United States Patent Application Publication US 2005/0244851 A1 - sequence listing, part 7

SEQ ID NO: 239367 - DNA, 25 bp, Homo sapien
gggtggcgcttcccaaatctctgag

SEQ ID NO: 239368 - DNA, 25 bp, Homo sapien
ctctgagaggtttgtcttgctgaca

SEQ ID NO: 239369 - DNA, 25 bp, Homo sapien
atccagcattaaaccacgaaggggg

SEQ ID NO: 239370 - DNA, 25 bp, Homo sapien
agccatcacccaggcattgtgggta

SEQ ID NO: 239371 - DNA, 25 bp, Homo sapien
cacccaggcattgtgggtatctggg

SEQ ID NO: 239372 - DNA, 25 bp, Homo sapien
catcacccaggcattgtgggtatct

SEQ ID NO: 239373 - DNA, 25 bp, Homo sapien
tcacccaggcattgtgggtatctgg

SEQ ID NO: 239374 - DNA, 25 bp, Homo sapien
gactttggcggcagatgaatttcca

SEQ ID NO: 239375 - DNA, 25 bp, Homo sapien
ccttcgctcggttatgccaggagga

SEQ ID NO: 239376 - DNA, 25 bp, Homo sapien
tttttggatcctggaacactgaccg

SEQ ID NO: 239377 - DNA, 25 bp, Homo sapien
acactgaccgtcagcgactttggcg

SEQ ID NO: 239378 - DNA, 25 bp, Homo sapien
tgataaaggcatattcagcggatgg

SEQ ID NO: 239379 - DNA, 25 bp, Homo sapien
tggtgataaaggcatattcagcgga

SEQ ID NO: 239380 - DNA, 25 bp, Homo sapien
actatgactgttgtcgggaactggg

SEQ ID NO: 239381 - DNA, 25 bp, Homo sapien
aaggcatattcagcggatggattca

SEQ ID NO: 239382 - DNA, 25 bp, Homo sapien
cagagggtctcctgggtcaaccaga

SEQ ID NO: 239383 - DNA, 25 bp, Homo sapien
gatcccaggcgatacttaaggaagc

SEQ ID NO: 239384 - DNA, 25 bp, Homo sapien
taatcatcgcaaccttcaaatccgg

SEQ ID NO: 239385 - DNA, 25 bp, Homo sapien
aagcgggtatttccagaagccctca

SEQ ID NO: 239386 - DNA, 25 bp, Homo sapien
cactcagttggtgagtggcagaact

SEQ ID NO: 239387 - DNA, 25 bp, Homo sapien
cagaactgggacctgaagccaggtt

SEQ ID NO: 239388 - DNA, 25 bp, Homo sapien
ttttcatctccaactatctgtgatt

SEQ ID NO: 239389 - DNA, 25 bp, Homo sapien
gtctcctcgcccatggtgtttctca

SEQ ID NO: 239390 - DNA, 25 bp, Homo sapien
tccagaatacttgcttatatggcta

SEQ ID NO: 239391 - DNA, 25 bp, Homo sapien
gctgagctaggctcaaggtctttca

SEQ ID NO: 239392 - DNA, 25 bp, Homo sapien
gaagttaagatattgactgggaatg

SEQ ID NO: 239393 - DNA, 25 bp, Homo sapien
gagacctcaattctccactggcttt

SEQ ID NO: 239394 - DNA, 25 bp, Homo sapien
aacagcggctgaggatttgcctcag

SEQ ID NO: 239395 - DNA, 25 bp, Homo sapien
gatgggctgctaatagtatctactc

SEQ ID NO: 239396 - DNA, 25 bp, Homo sapien
tcctcatcttaagatgggctgctaa

SEQ ID NO: 239397 - DNA, 25 bp, Homo sapien
gacagatagcccttcccaatgcagg

SEQ ID NO: 239398 - DNA, 25 bp, Homo sapien
gtatctactcatgggttgtaagaca

SEQ ID NO: 239399 - DNA, 25 bp, Homo sapien
caagcctaggaggttcataaataac

SEQ ID NO: 239400 - DNA, 25 bp, Homo sapien
ttcataaataacactcccagctgct

SEQ ID NO: 239401 - DNA, 25 bp, Homo sapien
cccttgaggggtgattgggccaagc

SEQ ID NO: 239402 - DNA, 25 bp, Homo sapien
tggcgcatctgtgtagggctggccc

SEQ ID NO: 239403 - DNA, 25 bp, Homo sapien
gggagcatacttgagcaagtggctc

SEQ ID NO: 239404 - DNA, 25 bp, Homo sapien
aaatcaaagtacatagtgggagcat

SEQ ID NO: 239405 - DNA, 25 bp, Homo sapien
gcaaatcttctagggtttatgtacc

SEQ ID NO: 239406 - DNA, 25 bp, Homo sapien
tcaagagcactggttgcaaatcttc

SEQ ID NO: 239407 - DNA, 25 bp, Homo sapien
agcgctcacagcagtaactcttcat

SEQ ID NO: 239408 - DNA, 25 bp, Homo sapien
agcacgccccaccaggaccaagtca

SEQ ID NO: 239409 - DNA, 25 bp, Homo sapien
gggagcacgggaatggaatgctgag

SEQ ID NO: 239410 - DNA, 25 bp, Homo sapien
gaccaagtcagggagcacgggaatg

SEQ ID NO: 239411 - DNA, 25 bp, Homo sapien
aagtcagggagcacgggaatggaat

SEQ ID NO: 239412 - DNA, 25 bp, Homo sapien
tcttcgccgctgcactgagcttctc

SEQ ID NO: 239413 - DNA, 25 bp, Homo sapien
tccctgcagcgaactctcttcgccg

SEQ ID NO: 239414 - DNA, 25 bp, Homo sapien
tcactgtctccgctctccaaaatgc

SEQ ID NO: 239415 - DNA, 25 bp, Homo sapien
taacactctccgtctcagtgccttg

SEQ ID NO: 239416 - DNA, 25 bp, Homo sapien
atatcaatacccatgtgtgcagcac

SEQ ID NO: 239417 - DNA, 25 bp, Homo sapien
gggtgagtgactacctcaagatcac

SEQ ID NO: 239418 - DNA, 25 bp, Homo sapien
tatagcactgtatcacgatagcacc

SEQ ID NO: 239419 - DNA, 25 bp, Homo sapien
taagtagcaccgacttgtggcacgc

SEQ ID NO: 239420 - DNA, 25 bp, Homo sapien
gagaagtcagcccatcttttgggac

SEQ ID NO: 239421 - DNA, 25 bp, Homo sapien
aaaatgagaagtcagcccatctttt

SEQ ID NO: 239422 - DNA, 25 bp, Homo sapien
cagcccatcttttgggactgaattt

SEQ ID NO: 239423 - DNA, 25 bp, Homo sapien
agtcagcccatcttttgggactgaa

SEQ ID NO: 239424 - DNA, 25 bp, Homo sapien
ctccagggactcctttcatttgatg

SEQ ID NO: 239425 - DNA, 25 bp, Homo sapien
gctgactggtgaacttgggcagtca

SEQ ID NO: 239426 - DNA, 25 bp, Homo sapien
ccagggactcctttcatttgatgac

SEQ ID NO: 239427 - DNA, 25 bp, Homo sapien
tgggcagtcaggttaactcctgtgg

SEQ ID NO: 239428 - DNA, 25 bp, Homo sapien
tggactgtcgggaaaccaaggcagc

SEQ ID NO: 239429 - DNA, 25 bp, Homo sapien
tcaagataaagcagggaatgccacc

SEQ ID NO: 239430 - DNA, 25 bp, Homo sapien
ttgatgcaaagctgggagtccctgc

SEQ ID NO: 239431 - DNA, 25 bp, Homo sapien
cgatgcagtcggaaagaagcgcttc

SEQ ID NO: 239432 - DNA, 25 bp, Homo sapien
ctttaagaatggctgagaggacagg

SEQ ID NO: 239433 - DNA, 25 bp, Homo sapien
gagttgggcccaagaatcaggtttg

SEQ ID NO: 239434 - DNA, 25 bp, Homo sapien
taggagtcagattacaaagggcctt

SEQ ID NO: 239435 - DNA, 25 bp, Homo sapien
aaagggccttctgcatttagctaag

SEQ ID NO: 239436 - DNA, 25 bp, Homo sapien
caaagcaggtggttacgtagtcaga

SEQ ID NO: 239437 - DNA, 25 bp, Homo sapien
tggaatacggctcttggcacatgct

SEQ ID NO: 239438 - DNA, 25 bp, Homo sapien
gctagaagagtggaacccaggacgc

SEQ ID NO: 239439 - DNA, 25 bp, Homo sapien
gacagcttcatgagcgggcagtgca

SEQ ID NO: 239440 - DNA, 25 bp, Homo sapien
cagctgtctattggccagtgggaag

SEQ ID NO: 239441 - DNA, 25 bp, Homo sapien
caaggcctaaattgagtcacagctt

SEQ ID NO: 239442 - DNA, 25 bp, Homo sapien
tcctgcaacctaagatgccaaatct

SEQ ID NO: 239443 - DNA, 25 bp, Homo sapien
tcattttgcctgtaaggaccctcag

SEQ ID NO: 239444 - DNA, 25 bp, Homo sapien
gcagggccaacagcggctctgggct

SEQ ID NO: 239445 - DNA, 25 bp, Homo sapien
ggcagggccaacagcggctctgggc

SEQ ID NO: 239446 - DNA, 25 bp, Homo sapien
gtgggcagggccaacagcggctctg

SEQ ID NO: 239447 - DNA, 25 bp, Homo sapien
aaatgtttgctgatggcaattctat

SEQ ID NO: 239448 - DNA, 25 bp, Homo sapien
ggcaattctatgggctttgtccacc

SEQ ID NO: 239449 - DNA, 25 bp, Homo sapien
gatggcaattctatgggctttgtcc

SEQ ID NO: 239450 - DNA, 25 bp, Homo sapien
tggcaattctatgggctttgtccac

SEQ ID NO: 239451 - DNA, 25 bp, Homo sapien
tatattaatacttaacaaagccctc

SEQ ID NO: 239452 - DNA, 25 bp, Homo sapien
tgtgtaacatttattatattaatac

SEQ ID NO: 239453 - DNA, 25 bp, Homo sapien
ttattatattaatacttaacaaagc

SEQ ID NO: 239454 - DNA, 25 bp, Homo sapien
taatacttaacaaagccctccaaga

SEQ ID NO: 239455 - DNA, 25 bp, Homo sapien
gaagtcaagtggtgagttttccaga

SEQ ID NO: 239456 - DNA, 25 bp, Homo sapien
taccttgggccacgtcttcatctta

SEQ ID NO: 239457 - DNA, 25 bp, Homo sapien
cattcctgaaggtagagaaggtctg

SEQ ID NO: 239458 - DNA, 25 bp, Homo sapien
ggccccaggaatagaggtttctgcc

SEQ ID NO: 239459 - DNA, 25 bp, Homo sapien
tggagttgggaacaccgacgtcctg

SEQ ID NO: 239460 - DNA, 25 bp, Homo sapien
tcctgagacttagtaagaagagtct

SEQ ID NO: 239461 - DNA, 25 bp, Homo sapien
tgagacccagtgagatcctggtagc

SEQ ID NO: 239462 - DNA, 25 bp, Homo sapien
ggccctgagacccagtgagatcctg

SEQ ID NO: 239463 - DNA, 25 bp, Homo sapien
aatggcctttcgaacccgcagtcgg

SEQ ID NO: 239464 - DNA, 25 bp, Homo sapien
tcaggtatctaatcagcctgcctgg

SEQ ID NO: 239465 - DNA, 25 bp, Homo sapien
tgggtgttctcgtatttcaggtatc

SEQ ID NO: 239466 - DNA, 25 bp, Homo sapien
agcggcaaggtgtctaggagtttta

SEQ ID NO: 239467 - DNA, 25 bp, Homo sapien
gcagcgttgcctagcgaagcattca

SEQ ID NO: 239468 - DNA, 25 bp, Homo sapien
tggaggcttccacaagagacggtgc

SEQ ID NO: 239469 - DNA, 25 bp, Homo sapien
cacatagtacgccaaagagcaggga

SEQ ID NO: 239470 - DNA, 25 bp, Homo sapien
cttgggccagatatgcagaggtgcc

SEQ ID NO: 239471 - DNA, 25 bp, Homo sapien
caaagctgtcgatgtgttccttcag

SEQ ID NO: 239472 - DNA, 25 bp, Homo sapien
gacatcgatgatgggccccgcccag

SEQ ID NO: 239473 - DNA, 25 bp, Homo sapien
agcagagctgcacgttgcccacgta

SEQ ID NO: 239474 - DNA, 25 bp, Homo sapien
cacgtagtccaggaggacatcgatg

SEQ ID NO: 239475 - DNA, 25 bp, Homo sapien
cctgccttagcctcccgagcacctg

SEQ ID NO: 239476 - DNA, 25 bp, Homo sapien
ctcctgccttagcctcccgagcacc

SEQ ID NO: 239477 - DNA, 25 bp, Homo sapien
tgggtgcacgtcattctcctgcctt

SEQ ID NO: 239478 - DNA, 25 bp, Homo sapien
cctgggtgcacgtcattctcctgcc

SEQ ID NO: 239479 - DNA, 25 bp, Homo sapien
gcagtggaccacaagaaggatttca

SEQ ID NO: 239480 - DNA, 25 bp, Homo sapien
tagtttggcagagttctccgctcca

SEQ ID NO: 239481 - DNA, 25 bp, Homo sapien
tcttgacatgcctttccggatcgtg

SEQ ID NO: 239482 - DNA, 25 bp, Homo sapien
caatgcaccactaagttctgcggcc

SEQ ID NO: 239483 - DNA, 25 bp, Homo sapien
gatataggcgtcgatgttcgcgccg

SEQ ID NO: 239484 - DNA, 25 bp, Homo sapien
cagcagctgcattgtgcgcaggcag

SEQ ID NO: 239485 - DNA, 25 bp, Homo sapien
tacacgttgttgttgaccaccgcga

SEQ ID NO: 239486 - DNA, 25 bp, Homo sapien
tgaggaacttgagcagcgacaggca

SEQ ID NO: 239487 - DNA, 25 bp, Homo sapien
tatttcaggctaagcgctgttgccc

SEQ ID NO: 239488 - DNA, 25 bp, Homo sapien
tgccgtctccgctttacagataagg

SEQ ID NO: 239489 - DNA, 25 bp, Homo sapien
ccaggaggctcctaaaggctttaca

SEQ ID NO: 239490 - DNA, 25 bp, Homo sapien
tcagccagactgcactagggtttca

SEQ ID NO: 239491 - DNA, 25 bp, Homo sapien
gcagcgggagcaagccgtccttgtt

SEQ ID NO: 239492 - DNA, 25 bp, Homo sapien
cctcgtagagggcagacgcgttgtc

SEQ ID NO: 239493 - DNA, 25 bp, Homo sapien
gctcattcttgcaggcctcgtagag

SEQ ID NO: 239494 - DNA, 25 bp, Homo sapien
ccttgttggtcttgttggcgtcggc

SEQ ID NO: 239495 - DNA, 25 bp, Homo sapien
tcttggggaagatcaggatataatg

SEQ ID NO: 239496 - DNA, 25 bp, Homo sapien
agagagggttacttcccgtggagag

SEQ ID NO: 239497 - DNA, 25 bp, Homo sapien
ggcattcttggggaagatcaggata

SEQ ID NO: 239498 - DNA, 25 bp, Homo sapien
gagagggttacttcccgtggagaga

SEQ ID NO: 239499 - DNA, 25 bp, Homo sapien
cgtacttggctaagaacctcaaggc

SEQ ID NO: 239500 - DNA, 25 bp, Homo sapien
gacctccaggtcattgcgagacaca

SEQ ID NO: 239501 - DNA, 25 bp, Homo sapien
tgccgtaggcgttcttggattccac

SEQ ID NO: 239502 - DNA, 25 bp, Homo sapien
acacagactcgtgcagagcggtcca

SEQ ID NO: 239503 - DNA, 25 bp, Homo sapien
tcagggggaagcagggatggtcagc

SEQ ID NO: 239504 - DNA, 25 bp, Homo sapien
cagggggaagcagggatggtcagca

SEQ ID NO: 239505 - DNA, 25 bp, Homo sapien
gggaagcagggatggtcagcagggc

SEQ ID NO: 239506 - DNA, 25 bp, Homo sapien
gggggaagcagggatggtcagcagg

SEQ ID NO: 239507 - DNA, 25 bp, Homo sapien
tgcacgttgccaagtaaacggctgt

SEQ ID NO: 239508 - DNA, 25 bp, Homo sapien
tgttggagatgtccggctctgcccc

SEQ ID NO: 239509 - DNA, 25 bp, Homo sapien
ctttgtagagcggtgtctctcggga

SEQ ID NO: 239510 - DNA, 25 bp, Homo sapien
tgcgctggtcgatggtccctgggta

SEQ ID NO: 239511 - DNA, 25 bp, Homo sapien
tcttgccaccgtcagagcccagccc

SEQ ID NO: 239512 - DNA, 25 bp, Homo sapien
ctcttgccaccgtcagagcccagcc

SEQ ID NO: 239513 - DNA, 25 bp, Homo sapien
gccaccgtcagagcccagccctcac

SEQ ID NO: 239514 - DNA, 25 bp, Homo sapien
ttgccaccgtcagagcccagccctc

SEQ ID NO: 239515 - DNA, 25 bp, Homo sapien
tggccatagtatgcggcctcgtgca

SEQ ID NO: 239516 - DNA, 25 bp, Homo sapien
tccttgttgggctctgcgagattct

SEQ ID NO: 239517 - DNA, 25 bp, Homo sapien
tcgctgcaggactttcaggcagccc

SEQ ID NO: 239518 - DNA, 25 bp, Homo sapien
tcccttccttgatcatggtcttcaa

SEQ ID NO: 239519 - DNA, 25 bp, Homo sapien
tccttggagagtccgtgagaaccac

SEQ ID NO: 239520 - DNA, 25 bp, Homo sapien
cacagatgccggtgaagcaacagac

SEQ ID NO: 239521 - DNA, 25 bp, Homo sapien
gaaccacgatgtctatgcctctcag

SEQ ID NO: 239522 - DNA, 25 bp, Homo sapien
tgtcagcatcaggaaaagcccagtg

SEQ ID NO: 239523 - DNA, 25 bp, Homo sapien
tgggaggtcttgaacaagctgctgc

SEQ ID NO: 239524 - DNA, 25 bp, Homo sapien
gctgggaggtcttgaacaagctgct

SEQ ID NO: 239525 - DNA, 25 bp, Homo sapien
gggaggtcttgaacaagctgctgct

SEQ ID NO: 239526 - DNA, 25 bp, Homo sapien
ctgggaggtcttgaacaagctgctg

SEQ ID NO: 239527 - DNA, 25 bp, Homo sapien
cccgggccggcgaactctcaggagg

SEQ ID NO: 239528 - DNA, 25 bp, Homo sapien
cttggaacaagcccattggggcccg

SEQ ID NO: 239529 - DNA, 25 bp, Homo sapien
ccgggccggcgaactctcaggaggt

SEQ ID NO: 239530 - DNA, 25 bp, Homo sapien
ggcccgggccggcgaactctcagga

SEQ ID NO: 239531 - DNA, 25 bp, Homo sapien
gaaaagtactctgcataggagaagc

SEQ ID NO: 239532 - DNA, 25 bp, Homo sapien
gtactctgcataggagaagcgggtc

SEQ ID NO: 239533 - DNA, 25 bp, Homo sapien
aagagggaaaagtactctgcatagg

SEQ ID NO: 239534 - DNA, 25 bp, Homo sapien
actctgcataggagaagcgggtcat

SEQ ID NO: 239535 - DNA, 25 bp, Homo sapien
tcttcacccaggaggatgtgagccg

SEQ ID NO: 239536 - DNA, 25 bp, Homo sapien
tctgaaccaaagcagatggccgggt

SEQ ID NO: 239537 - DNA, 25 bp, Homo sapien
tgtgtctccggattatttttggccc

SEQ ID NO: 239538 - DNA, 25 bp, Homo sapien
gacaacaatgaggttaacctcaccc

SEQ ID NO: 239539 - DNA, 25 bp, Homo sapien
tttctaatgtgtccaagcatccctg

SEQ ID NO: 239540 - DNA, 25 bp, Homo sapien
ctttctaatgtgtccaagcatccct

SEQ ID NO: 239541 - DNA, 25 bp, Homo sapien
caggttggcggttggtacatgcaga

SEQ ID NO: 239542 - DNA, 25 bp, Homo sapien
catgggtagaaatgggcaggttggc

SEQ ID NO: 239543 - DNA, 25 bp, Homo sapien
cagtggttgggccccttgtcttgtc

SEQ ID NO: 239544 - DNA, 25 bp, Homo sapien
ttgtccgctaggctctgctcgatgg

SEQ ID NO: 239545 - DNA, 25 bp, Homo sapien
caccagttcatcctcgctcaggctg

SEQ ID NO: 239546 - DNA, 25 bp, Homo sapien
catcctcgctcaggctgctgtacag

SEQ ID NO: 239547 - DNA, 25 bp, Homo sapien
gttcatcctcgctcaggctgctgta

SEQ ID NO: 239548 - DNA, 25 bp, Homo sapien
cagttcatcctcgctcaggctgctg

SEQ ID NO: 239549 - DNA, 25 bp, Homo sapien
tgccccgagtgctgatctgcgtggc

SEQ ID NO: 239550 - DNA, 25 bp, Homo sapien
ccgagtgctgatctgcgtggccatc

SEQ ID NO: 239551 - DNA, 25 bp, Homo sapien
caatggtacactggctgccccgagt

SEQ ID NO: 239552 - DNA, 25 bp, Homo sapien
ctgcccaatggtacactggctgccc

SEQ ID NO: 239553 - DNA, 25 bp, Homo sapien
ggcctccagaacagacacccagtgg

SEQ ID NO: 239554 - DNA, 25 bp, Homo sapien
gggaggagggaacagcaaatcagaa

SEQ ID NO: 239555 - DNA, 25 bp, Homo sapien
aacagacacccagtggggaggaggg

SEQ ID NO: 239556 - DNA, 25 bp, Homo sapien
ggagggaacagcaaatcagaaaacc

SEQ ID NO: 239557 - DNA, 25 bp, Homo sapien
gaaacgctgtcctttgaagcaggga

SEQ ID NO: 239558 - DNA, 25 bp, Homo sapien
gccaccgcatgaccaacgttgacaa

SEQ ID NO: 239559 - DNA, 25 bp, Homo sapien
cagatttcctgtttggaggttgcac

SEQ ID NO: 239560 - DNA, 25 bp, Homo sapien
taggctctgaaacaagggtacaatt

SEQ ID NO: 239561 - DNA, 25 bp, Homo sapien
ttagcagttctgaggagcaaagtcc

SEQ ID NO: 239562 - DNA, 25 bp, Homo sapien
gcaaagtccattgcgggacactggg

SEQ ID NO: 239563 - DNA, 25 bp, Homo sapien
tagcagttctgaggagcaaagtcca

SEQ ID NO: 239564 - DNA, 25 bp, Homo sapien
cattgcgggacactgggctgtttgc

SEQ ID NO: 239565 - DNA, 25 bp, Homo sapien
ttctcatgggcacattcaagatgcc

SEQ ID NO: 239566 - DNA, 25 bp, Homo sapien
tgggcacattcaagatgcctgctac

SEQ ID NO: 239567 - DNA, 25 bp, Homo sapien
tcatgccatagaccttaaacccagg

SEQ ID NO: 239568 - DNA, 25 bp, Homo sapien
caggaacctcaccacactggagaag

SEQ ID NO: 239569 - DNA, 25 bp, Homo sapien
gatattgatatttctcgtggtccaa

SEQ ID NO: 239570 - DNA, 25 bp, Homo sapien
aaagaaagggcgtttgatattgata

SEQ ID NO: 239571 - DNA, 25 bp, Homo sapien
ggccccctgatatgagctgacactg

SEQ ID NO: 239572 - DNA, 25 bp, Homo sapien
tatttctcgtggtccaaagtggcca

SEQ ID NO: 239573 - DNA, 25 bp, Homo sapien
aaactgcactgtcatagctcctggc

SEQ ID NO: 239574 - DNA, 25 bp, Homo sapien
gcctggcccctgaagagcgtgtgac

SEQ ID NO: 239575 - DNA, 25 bp, Homo sapien
cagtcacatcgacagccagggctgt

SEQ ID NO: 239576 - DNA, 25 bp, Homo sapien
ccctgaagagcgtgtgacctgggca

SEQ ID NO: 239577 - DNA, 25 bp, Homo sapien
gtgattcttcctaggaaggtgatgg

SEQ ID NO: 239578 - DNA, 25 bp, Homo sapien
agtgattcttcctaggaaggtgatg

SEQ ID NO: 239579 - DNA, 25 bp, Homo sapien
gattcttcctaggaaggtgatggtt

SEQ ID NO: 239580 - DNA, 25 bp, Homo sapien
tgattcttcctaggaaggtgatggt

SEQ ID NO: 239581 - DNA, 25 bp, Homo sapien
catcctgagcgtcaatggctgagga

SEQ ID NO: 239582 - DNA, 25 bp, Homo sapien
gaggtcagtacttttcctgaggcca

SEQ ID NO: 239583 - DNA, 25 bp, Homo sapien
ctcgtttaatccctgggtgctatta

SEQ ID NO: 239584 - DNA, 25 bp, Homo sapien
ggtgctattacccacactttgcctt

SEQ ID NO: 239585 - DNA, 25 bp, Homo sapien
ccaggcatcacggtggccaggaact

SEQ ID NO: 239586 - DNA, 25 bp, Homo sapien
aggcatcacggtggccaggaactga

SEQ ID NO: 239587 - DNA, 25 bp, Homo sapien
tgaaagttcccaggcatcacggtgg

SEQ ID NO: 239588 - DNA, 25 bp, Homo sapien
gttcccaggcatcacggtggccagg

SEQ ID NO: 239589 - DNA, 25 bp, Homo sapien
gtgctcagcacataagcgaggggct

SEQ ID NO: 239590 - DNA, 25 bp, Homo sapien
ggtgctcagcacataagcgaggggc

SEQ ID NO: 239591 - DNA, 25 bp, Homo sapien
cttcattctcagtcggtgctcagca

SEQ ID NO: 239592 - DNA, 25 bp, Homo sapien
cggtgctcagcacataagcgagggg

SEQ ID NO: 239593 - DNA, 25 bp, Homo sapien
catgggtccttcagcttgctcccac

SEQ ID NO: 239594 - DNA, 25 bp, Homo sapien
acaggaggttcaccgccaagctgta

SEQ ID NO: 239595 - DNA, 25 bp, Homo sapien
tggctccaacaggaggttcaccgcc

SEQ ID NO: 239596 - DNA, 25 bp, Homo sapien
ttccccggtggcacaggtccagtgg

SEQ ID NO: 239597 - DNA, 25 bp, Homo sapien
ccaggcctggtcctgagccatgggt

SEQ ID NO: 239598 - DNA, 25 bp, Homo sapien
ctgcacggaaccaggcctggtcctg

SEQ ID NO: 239599 - DNA, 25 bp, Homo sapien
tgggggggctgatggagaaatgcct

SEQ ID NO: 239600 - DNA, 25 bp, Homo sapien
gaaccaggcctggtcctgagccatg

SEQ ID NO: 239601 - DNA, 25 bp, Homo sapien
ttcagcagctgaccaatgagggtca

SEQ ID NO: 239602 - DNA, 25 bp, Homo sapien
ggttcagcagctgaccaatgagggt

SEQ ID NO: 239603 - DNA, 25 bp, Homo sapien
gttcagcagctgaccaatgagggtc

SEQ ID NO: 239604 - DNA, 25 bp, Homo sapien
tcagcagctgaccaatgagggtcat

SEQ ID NO: 239605 - DNA, 25 bp, Homo sapien
gtaccagttatagggccgcaagtga

SEQ ID NO: 239606 - DNA, 25 bp, Homo sapien
gcagcccgaagaccttggacttggg

SEQ ID NO: 239607 - DNA, 25 bp, Homo sapien
tcatttatttgaagccagcacttgt

SEQ ID NO: 239608 - DNA, 25 bp, Homo sapien
cagcacttgttgaaagttcccaggc

SEQ ID NO: 239609 - DNA, 25 bp, Homo sapien
tgcttccccagtgggctaagtggct

SEQ ID NO: 239610 - DNA, 25 bp, Homo sapien
gagagctgacccaagcaatcctggt

SEQ ID NO: 239611 - DNA, 25 bp, Homo sapien
ttcatcctgcctgactcacgggtct

SEQ ID NO: 239612 - DNA, 25 bp, Homo sapien
taagtatgtgttgtcccacccctgc

SEQ ID NO: 239613 - DNA, 25 bp, Homo sapien
tgagtggcatgggcagcagaaccca

SEQ ID NO: 239614 - DNA, 25 bp, Homo sapien
tacacaggtcctttgctggaagaca

SEQ ID NO: 239615 - DNA, 25 bp, Homo sapien
caaatcttgggcatctagtacccag

SEQ ID NO: 239616 - DNA, 25 bp, Homo sapien
gaagacaggacacccaaagcctcct

SEQ ID NO: 239617 - DNA, 25 bp, Homo sapien
ccgccaccgaaccagcggcggagcc

SEQ ID NO: 239618 - DNA, 25 bp, Homo sapien
tttgcggagcggtcgggtgtattct

SEQ ID NO: 239619 - DNA, 25 bp, Homo sapien
ctttggtttgcggagcggtcgggtg

SEQ ID NO: 239620 - DNA, 25 bp, Homo sapien
gcggtcgggtgtattctccgccgcc

SEQ ID NO: 239621 - DNA, 25 bp, Homo sapien
tcccaacgggcgtctaggatgctgg

SEQ ID NO: 239622 - DNA, 25 bp, Homo sapien
tctggaaatgcggtgatcccaacgg

SEQ ID NO: 239623 - DNA, 25 bp, Homo sapien
tgtaaccggcagttcagaggccacc

SEQ ID NO: 239624 - DNA, 25 bp, Homo sapien
taaccagggctatctcttcacgatg

SEQ ID NO: 239625 - DNA, 25 bp, Homo sapien
gagaccatgtcactcccaagcttga

SEQ ID NO: 239626 - DNA, 25 bp, Homo sapien
tctaggagcagtggaaacccctgac

SEQ ID NO: 239627 - DNA, 25 bp, Homo sapien
tatcctacacacaccagagcttgca

SEQ ID NO: 239628 - DNA, 25 bp, Homo sapien
tggccatagccctgtcacggacatt

SEQ ID NO: 239629 - DNA, 25 bp, Homo sapien
gctcctgagtgagaggcgttagcca

SEQ ID NO: 239630 - DNA, 25 bp, Homo sapien
gcttctagtactctggccatgggcc

SEQ ID NO: 239631 - DNA, 25 bp, Homo sapien
gactgttagatatgccaggaccagg

SEQ ID NO: 239632 - DNA, 25 bp, Homo sapien
ttcatggccatgcagggacagagtg

SEQ ID NO: 239633 - DNA, 25 bp, Homo sapien
ttcaaagaacgcgtactgcagaccc

SEQ ID NO: 239634 - DNA, 25 bp, Homo sapien
agagagtaacaacccagcatgcgca

SEQ ID NO: 239635 - DNA, 25 bp, Homo sapien
caagggtaacttggtgctggcagat

SEQ ID NO: 239636 - DNA, 25 bp, Homo sapien
gctggcagatgcttaacagccggct

SEQ ID NO: 239637 - DNA, 25 bp, Homo sapien
tggtttccatactgccctcagctgg

SEQ ID NO: 239638 - DNA, 25 bp, Homo sapien
gccttcgtgaaaagccaatagcact

SEQ ID NO: 239639 - DNA, 25 bp, Homo sapien
gctgcatgagtctgctgacaacctg

SEQ ID NO: 239640 - DNA, 25 bp, Homo sapien
tctatgagaagtacactggaagcgt

SEQ ID NO: 239641 - DNA, 25 bp, Homo sapien
cactcatcgtatgggctctgcaaag

SEQ ID NO: 239642 - DNA, 25 bp, Homo sapien
tcctgacaggaagcatagggcactg

SEQ ID NO: 239643 - DNA, 25 bp, Homo sapien
agaatgccagggttctaacttcagc

SEQ ID NO: 239644 - DNA, 25 bp, Homo sapien
tgcaaagggatattccccaacctgt

SEQ ID NO: 239645 - DNA, 25 bp, Homo sapien
tgtttaatggcagatccaggacact

SEQ ID NO: 239646 - DNA, 25 bp, Homo sapien
tagcactgcttggaaggctgctcct

SEQ ID NO: 239647 - DNA, 25 bp, Homo sapien
ccttaccaggcgagagtagcactgc

SEQ ID NO: 239648 - DNA, 25 bp, Homo sapien
gaactctgcttttccgtggtgctta

SEQ ID NO: 239649 - DNA, 25 bp, Homo sapien
ttatgaaatcaagtttaacacacaa

SEQ ID NO: 239650 - DNA, 25 bp, Homo sapien
tttatgaaatcaagtttaacacaca

SEQ ID NO: 239651 - DNA, 25 bp, Homo sapien
atttatgaaatcaagtttaacacac

SEQ ID NO: 239652 - DNA, 25 bp, Homo sapien
ataaacactgcaatacagaaaaatt

SEQ ID NO: 239653 - DNA, 25 bp, Homo sapien
caaaacaatgcaaatctgcatgagg

SEQ ID NO: 239654 - DNA, 25 bp, Homo sapien
aatctgcatgaggtctctcccgcta

SEQ ID NO: 239655 - DNA, 25 bp, Homo sapien
atgcaaatctgcatgaggtctctcc

SEQ ID NO: 239656 - DNA, 25 bp, Homo sapien
catgaggtctctcccgctatgggtg

SEQ ID NO: 239657 - DNA, 25 bp, Homo sapien
gaggttttgcaaatagccagagaac

SEQ ID NO: 239658 - DNA, 25 bp, Homo sapien
ccagagaacagaaaccaatgtgcag

SEQ ID NO: 239659 - DNA, 25 bp, Homo sapien
aggttttgcaaatagccagagaaca

SEQ ID NO: 239660 - DNA, 25 bp, Homo sapien
gtggctgttccggctgtggctcctt

SEQ ID NO: 239661 - DNA, 25 bp, Homo sapien
ctgtggctccttcggcttctttgtc

SEQ ID NO: 239662 - DNA, 25 bp, Homo sapien
ccggctgtggctccttcggcttctt

SEQ ID NO: 239663 - DNA, 25 bp, Homo sapien
tgttccggctgtggctccttcggct

SEQ ID NO: 239664 - DNA, 25 bp, Homo sapien
agacagctcaaagcagactcgctct

SEQ ID NO: 239665 - DNA, 25 bp, Homo sapien
acagctcaaagcagactcgctctta

SEQ ID NO: 239666 - DNA, 25 bp, Homo sapien
cagctcaaagcagactcgctcttac

SEQ ID NO: 239667 - DNA, 25 bp, Homo sapien
gacagctcaaagcagactcgctctt

SEQ ID NO: 239668 - DNA, 25 bp, Homo sapien
acacaagcaggggcggcttgccaga

SEQ ID NO: 239669 - DNA, 25 bp, Homo sapien
gggcagacacaagcaggggcggctt

SEQ ID NO: 239670 - DNA, 25 bp, Homo sapien
tggggcagacacaagcaggggcggc

SEQ ID NO: 239671 - DNA, 25 bp, Homo sapien
cagacacaagcaggggcggcttgcc

SEQ ID NO: 239672 - DNA, 25 bp, Homo sapien
ttctggctctccgtaaacagtggct

SEQ ID NO: 239673 - DNA, 25 bp, Homo sapien
gcttttgtctccgacgttcttcttg

SEQ ID NO: 239674 - DNA, 25 bp, Homo sapien
cgttcttcttgctggtcagcttttc

SEQ ID NO: 239675 - DNA, 25 bp, Homo sapien
tctccgtaaacagtggctgggacag

SEQ ID NO: 239676 - DNA, 25 bp, Homo sapien
aatccaagagttgtgcaggcaagcc

SEQ ID NO: 239677 - DNA, 25 bp, Homo sapien
ttctcaatctgtcgagctaaacgga

SEQ ID NO: 239678 - DNA, 25 bp, Homo sapien
gctgctgcctgctcaatccaagagt

SEQ ID NO: 239679 - DNA, 25 bp, Homo sapien
ggcaagcctggaagttccgatactc

SEQ ID NO: 239680 - DNA, 25 bp, Homo sapien
gaggccttcattggtagctcgagca

SEQ ID NO: 239681 - DNA, 25 bp, Homo sapien
gaccacatccatgtattttgtctgc

SEQ ID NO: 239682 - DNA, 25 bp, Homo sapien
tcgagcagttcgaccacttcggtgg

SEQ ID NO: 239683 - DNA, 25 bp, Homo sapien
caggcccaatgagcatcagactgag

SEQ ID NO: 239684 - DNA, 25 bp, Homo sapien
tgggagatcaatacatggccactgc

SEQ ID NO: 239685 - DNA, 25 bp, Homo sapien
taatccctgggttatacggtctcta

SEQ ID NO: 239686 - DNA, 25 bp, Homo sapien
aggtttagcccattcactgtgtagg

SEQ ID NO: 239687 - DNA, 25 bp, Homo sapien
tcactgtgagccaagtgcccctgaa

SEQ ID NO: 239688 - DNA, 25 bp, Homo sapien
catcttgtgggatctgaggctatct

SEQ ID NO: 239689 - DNA, 25 bp, Homo sapien
gaagggctacttgacatgagacaaa

SEQ ID NO: 239690 - DNA, 25 bp, Homo sapien
gcttgatatgtggtgaaaaacgccc

SEQ ID NO: 239691 - DNA, 25 bp, Homo sapien
tacactgtgctaccggcttcatcag

SEQ ID NO: 239692 - DNA, 25 bp, Homo sapien
ctttaggaatatccagaccccgagc

SEQ ID NO: 239693 - DNA, 25 bp, Homo sapien
tttaggaatatccagaccccgagct

SEQ ID NO: 239694 - DNA, 25 bp, Homo sapien
taggaatatccagaccccgagctgc

SEQ ID NO: 239695 - DNA, 25 bp, Homo sapien
ttaggaatatccagaccccgagctg

SEQ ID NO: 239696 - DNA, 25 bp, Homo sapien
tcttccagacgggcaaactgctcca

SEQ ID NO: 239697 - DNA, 25 bp, Homo sapien
ttccagacgggcaaactgctccagg

SEQ ID NO: 239698 - DNA, 25 bp, Homo sapien
ccagacgggcaaactgctccaggtt

SEQ ID NO: 239699 - DNA, 25 bp, Homo sapien
tccagacgggcaaactgctccaggt

SEQ ID NO: 239700 - DNA, 25 bp, Homo sapien
tgcaggagatactgttggcaaacac

SEQ ID NO: 239701 - DNA, 25 bp, Homo sapien
tatgaaggattcgagcaggagcctg

SEQ ID NO: 239702 - DNA, 25 bp, Homo sapien
caattttctgcataaggaggtcaag

SEQ ID NO: 239703 - DNA, 25 bp, Homo sapien
catacaggcatgcagggtcaagggc

SEQ ID NO: 239704 - DNA, 25 bp, Homo sapien
tctcaaccatccggtcagcctcatc

SEQ ID NO: 239705 - DNA, 25 bp, Homo sapien
atccggtcagcctcatccactacca

SEQ ID NO: 239706 - DNA, 25 bp, Homo sapien
accatccggtcagcctcatccacta

SEQ ID NO: 239707 - DNA, 25 bp, Homo sapien
tcaaccatccggtcagcctcatcca

SEQ ID NO: 239708 - DNA, 25 bp, Homo sapien
gagctgccgaaggttcctcaaatga

SEQ ID NO: 239709 - DNA, 25 bp, Homo sapien
tagcaaccacaatctcaggacgacg

SEQ ID NO: 239710 - DNA, 25 bp, Homo sapien
ttaattaattcccacagccggcctg

SEQ ID NO: 239711 - DNA, 25 bp, Homo sapien
ggacgacggttcagcatcctctgct

SEQ ID NO: 239712 - DNA, 25 bp, Homo sapien
gaacaggtttctccctgatcaggga

SEQ ID NO: 239713 - DNA, 25 bp, Homo sapien
aatgtgctgtttgacctggacggcc

SEQ ID NO: 239714 - DNA, 25 bp, Homo sapien
tacaggtggcgcttttgtcatccaa

SEQ ID NO: 239715 - DNA, 25 bp, Homo sapien
tgatcagggaagaaggcccttcacc

SEQ ID NO: 239716 - DNA, 25 bp, Homo sapien
caattacagtatcgtcaggcaatgc

SEQ ID NO: 239717 - DNA, 25 bp, Homo sapien
ggcaatgcatcagactcagcttcag

SEQ ID NO: 239718 - DNA, 25 bp, Homo sapien
ggtgatctagtctcagctccggcct

SEQ ID NO: 239719 - DNA, 25 bp, Homo sapien
tggcctcggctgcaatatcactggg

SEQ ID NO: 239720 - DNA, 25 bp, Homo sapien
ccgcatgaatcattgggatggcaaa

SEQ ID NO: 239721 - DNA, 25 bp, Homo sapien
tggcaaaggcaagagttttcccact

SEQ ID NO: 239722 - DNA, 25 bp, Homo sapien
gatggcaaaggcaagagttttccca

SEQ ID NO: 239723 - DNA, 25 bp, Homo sapien
actgcaacaccgcatgaatcattgg

SEQ ID NO: 239724 - DNA, 25 bp, Homo sapien
cccggcgtatgggtagatcttaata

SEQ ID NO: 239725 - DNA, 25 bp, Homo sapien
cttaatagtatctctctctctgaca

SEQ ID NO: 239726 - DNA, 25 bp, Homo sapien
ctgcacccggcgtatgggtagatct

SEQ ID NO: 239727 - DNA, 25 bp, Homo sapien
gatcttaatagtatctctctctctg

SEQ ID NO: 239728 - DNA, 25 bp, Homo sapien
aaagctgagtgctcggagaaccggc

SEQ ID NO: 239729 - DNA, 25 bp, Homo sapien
gaacttcaggaatccatgtcttcgc

SEQ ID NO: 239730 - DNA, 25 bp, Homo sapien
ggaacaaacaggtccttccaagctg

SEQ ID NO: 239731 - DNA, 25 bp, Homo sapien
agtttgtcacggatggcaggtgcca

SEQ ID NO: 239732 - DNA, 25 bp, Homo sapien
accgtggcacgcagctcggttggac

SEQ ID NO: 239733 - DNA, 25 bp, Homo sapien
cgcacgaaaccgagaaaccgagaag

SEQ ID NO: 239734 - DNA, 25 bp, Homo sapien
aaggccgtcaggctctgatgaccgg

SEQ ID NO: 239735 - DNA, 25 bp, Homo sapien
tctcgctttgtctcaggcacgaacg

SEQ ID NO: 239736 - DNA, 25 bp, Homo sapien
tacctgattggctgcctcgcggacc

SEQ ID NO: 239737 - DNA, 25 bp, Homo sapien
aagaacctcagaaaccgccgctgta

SEQ ID NO: 239738 - DNA, 25 bp, Homo sapien
tccgtcagtcgcgagtgaagaacct

SEQ ID NO: 239739 - DNA, 25 bp, Homo sapien
tatggcaaactcagctacctgattg

SEQ ID NO: 239740 - DNA, 25 bp, Homo sapien
ttctcataacaaccccagaggaaga

SEQ ID NO: 239741 - DNA, 25 bp, Homo sapien
gataagaagataatatcgtccctta

SEQ ID NO: 239742 - DNA, 25 bp, Homo sapien
tggaacaggaggtagaacaatgaac

SEQ ID NO: 239743 - DNA, 25 bp, Homo sapien
ccctagcacttgaggtttgtcaatt

SEQ ID NO: 239744 - DNA, 25 bp, Homo sapien
gtccgcggcggccattgccaatggg

SEQ ID NO: 239745 - DNA, 25 bp, Homo sapien
catgggcttcactgcggcgggaatc

SEQ ID NO: 239746 - DNA, 25 bp, Homo sapien
gcgggaatcgcctcgtcctccatag

SEQ ID NO: 239747 - DNA, 25 bp, Homo sapien
gtggagttgcctcgggcagccttgt

SEQ ID NO: 239748 - DNA, 25 bp, Homo sapien
tgcgaggttctactagctccctgcc

SEQ ID NO: 239749 - DNA, 25 bp, Homo sapien
cattgcggctgtcattgcgaggttc

SEQ ID NO: 239750 - DNA, 25 bp, Homo sapien
ggattgaccaagttcatcctgggct

SEQ ID NO: 239751 - DNA, 25 bp, Homo sapien
cagcgaggagccaactatcccaaat

SEQ ID NO: 239752 - DNA, 25 bp, Homo sapien
tattcgttcacaagagagctggcta

SEQ ID NO: 239753 - DNA, 25 bp, Homo sapien
cagagggctctacagtcagtggttc

SEQ ID NO: 239754 - DNA, 25 bp, Homo sapien
taccgattatctgcgtggccaacca

SEQ ID NO: 239755 - DNA, 25 bp, Homo sapien
cagggttccaggtcttcacgcatga

SEQ ID NO: 239756 - DNA, 25 bp, Homo sapien
tctctgacttgagtgggggttttgg

SEQ ID NO: 239757 - DNA, 25 bp, Homo sapien
ctctgacttgagtgggggttttgga

SEQ ID NO: 239758 - DNA, 25 bp, Homo sapien
ttctctgacttgagtgggggttttg

SEQ ID NO: 239759 - DNA, 25 bp, Homo sapien
cttggggtacattttctcttgcctc

SEQ ID NO: 239760 - DNA, 25 bp, Homo sapien
tcttgcctcatcttctttagcctcg

SEQ ID NO: 239761 - DNA, 25 bp, Homo sapien
gcctcatcttctttagcctcgggtt

SEQ ID NO: 239762 - DNA, 25 bp, Homo sapien
tcatcttctttagcctcgggttcag

SEQ ID NO: 239763 - DNA, 25 bp, Homo sapien
ccaggaggatgttggatgatgtgga

SEQ ID NO: 239764 - DNA, 25 bp, Homo sapien
gccaggaggatgttggatgatgtgg

SEQ ID NO: 239765 - DNA, 25 bp, Homo sapien
aggatgttggatgatgtggagagtc

SEQ ID NO: 239766 - DNA, 25 bp, Homo sapien
tgttggatgatgtggagagtccagc

SEQ ID NO: 239767 - DNA, 25 bp, Homo sapien
tgagaagagcttccctcgggctcag

SEQ ID NO: 239768 - DNA, 25 bp, Homo sapien
gtgagaagagcttccctcgggctca

SEQ ID NO: 239769 - DNA, 25 bp, Homo sapien
gagaagagcttccctcgggctcagc

SEQ ID NO: 239770 - DNA, 25 bp, Homo sapien
tggctgctgcggacatcatcttggc

SEQ ID NO: 239771 - DNA, 25 bp, Homo sapien
ccacggactgcagagtagccaccag

SEQ ID NO: 239772 - DNA, 25 bp, Homo sapien
tcatcttggctgctatggaggacgc

SEQ ID NO: 239773 - DNA, 25 bp, Homo sapien
ggaggacgcggcgattcctgcccca

SEQ ID NO: 239774 - DNA, 25 bp, Homo sapien
caaagatgtcatagaaggaccagcc

SEQ ID NO: 239775 - DNA, 25 bp, Homo sapien
gagacaggcgatccgggtaacttac

SEQ ID NO: 239776 - DNA, 25 bp, Homo sapien
taagccacgtggagtttagctgcaa

SEQ ID NO: 239777 - DNA, 25 bp, Homo sapien
tgatgctgaggaagtcaataccctt

SEQ ID NO: 239778 - DNA, 25 bp, Homo sapien
tcctcccactgcagcagcagctgcc

SEQ ID NO: 239779 - DNA, 25 bp, Homo sapien
ctcctcccactgcagcagcagctgc

SEQ ID NO: 239780 - DNA, 25 bp, Homo sapien
cccactgcagcagcagctgcccgtt

SEQ ID NO: 239781 - DNA, 25 bp, Homo sapien
ctcccactgcagcagcagctgcccg

SEQ ID NO: 239782 - DNA, 25 bp, Homo sapien
ctagagagagagtgccaggggaagg

SEQ ID NO: 239783 - DNA, 25 bp, Homo sapien
agagagaagggcagaaagggaggga

SEQ ID NO: 239784 - DNA, 25 bp, Homo sapien
gagatgggaaaggggagaaagagga

SEQ ID NO: 239785 - DNA, 25 bp, Homo sapien
gagagagtgccaggggaaggcagag

SEQ ID NO: 239786 - DNA, 25 bp, Homo sapien
cttggcccaggaaatgacagcgttc

SEQ ID NO: 239787 - DNA, 25 bp, Homo sapien
gtcccaacttggcccaggaaatgac

SEQ ID NO: 239788 - DNA, 25 bp, Homo sapien
gcccaggaaatgacagcgttcttgg

SEQ ID NO: 239789 - DNA, 25 bp, Homo sapien
caacttggcccaggaaatgacagcg

SEQ ID NO: 239790 - DNA, 25 bp, Homo sapien
tcccagagggcaaaactcgctgttt

SEQ ID NO: 239791 - DNA, 25 bp, Homo sapien
gtgaggtgccccagtaaagcaaaag

SEQ ID NO: 239792 - DNA, 25 bp, Homo sapien
tctgagagcagccttgaaattgtgg

SEQ ID NO: 239793 - DNA, 25 bp, Homo sapien
tccgtgggtggaaagcacacacatc

SEQ ID NO: 239794 - DNA, 25 bp, Homo sapien
acagtgcaaaccagtggttcctcca

SEQ ID NO: 239795 - DNA, 25 bp, Homo sapien
gaaaggtgaatccagctgctcaggt

SEQ ID NO: 239796 - DNA, 25 bp, Homo sapien
atctgggatggcagaataggtgaca

SEQ ID NO: 239797 - DNA, 25 bp, Homo sapien
gctgctcaggtgctaagtggtcatc

SEQ ID NO: 239798 - DNA, 25 bp, Homo sapien
tgatactgagcacgctgcttgctgc

SEQ ID NO: 239799 - DNA, 25 bp, Homo sapien
ctgttgatactgagcacgctgcttg

SEQ ID NO: 239800 - DNA, 25 bp, Homo sapien
tactgagcacgctgcttgctgcact

SEQ ID NO: 239801 - DNA, 25 bp, Homo sapien
tgttgatactgagcacgctgcttgc

SEQ ID NO: 239802 - DNA, 25 bp, Homo sapien
tccctcctcaactgctggagcccac

SEQ ID NO: 239803 - DNA, 25 bp, Homo sapien
ctgagctccctcctcaactgctgga

SEQ ID NO: 239804 - DNA, 25 bp, Homo sapien
gctggagcccacctgtgcttctgac

SEQ ID NO: 239805 - DNA, 25 bp, Homo sapien
ctgtgcttctgaccagctttaccat

SEQ ID NO: 239806 - DNA, 25 bp, Homo sapien
cagtttacactccacaagcagtatg

SEQ ID NO: 239807 - DNA, 25 bp, Homo sapien
tctagtgttttacaagttaatgcca

SEQ ID NO: 239808 - DNA, 25 bp, Homo sapien
cagtatgtaagtctgcctcttgaca

SEQ ID NO: 239809 - DNA, 25 bp, Homo sapien
catagctcttcgtgcaaatgtgcaa

SEQ ID NO: 239810 - DNA, 25 bp, Homo sapien
cggccaagagccggagaaagtcctg

SEQ ID NO: 239811 - DNA, 25 bp, Homo sapien
ccaagagccggagaaagtcctgctg

SEQ ID NO: 239812 - DNA, 25 bp, Homo sapien
gccaagagccggagaaagtcctgct

SEQ ID NO: 239813 - DNA, 25 bp, Homo sapien
agcggccaagagccggagaaagtcc

SEQ ID NO: 239814 - DNA, 25 bp, Homo sapien
ctttgacaaaaggaatgggttgctg

SEQ ID NO: 239815 - DNA, 25 bp, Homo sapien
taatggccaataagtgagatcacag

SEQ ID NO: 239816 - DNA, 25 bp, Homo sapien
tagtacaggctgcataactttaggc

SEQ ID NO: 239817 - DNA, 25 bp, Homo sapien
tatttatgaagcctttaccgtgtgc

SEQ ID NO: 239818 - DNA, 25 bp, Homo sapien
aaccatgatgattgtttcctgtgcc

SEQ ID NO: 239819 - DNA, 25 bp, Homo sapien
cctgtgccggcttttcaataggaag

SEQ ID NO: 239820 - DNA, 25 bp, Homo sapien
cagtgatggtagcatagatccacac

SEQ ID NO: 239821 - DNA, 25 bp, Homo sapien
aaaggagcagctcaagttgtaacca

SEQ ID NO: 239822 - DNA, 25 bp, Homo sapien
gtactacccataatgtatcagtttt

SEQ ID NO: 239823 - DNA, 25 bp, Homo sapien
gagaaccactagctaacccagtttc

SEQ ID NO: 239824 - DNA, 25 bp, Homo sapien
tcataatacccaatgtactacccat

SEQ ID NO: 239825 - DNA, 25 bp, Homo sapien
tccttcaaactcataatacccaatg

SEQ ID NO: 239826 - DNA, 25 bp, Homo sapien
tgcttggtcctctcagatgttacta

SEQ ID NO: 239827 - DNA, 25 bp, Homo sapien
tggtcctctcagatgttactatgga

SEQ ID NO: 239828 - DNA, 25 bp, Homo sapien
cctctcagatgttactatggacttg

SEQ ID NO: 239829 - DNA, 25 bp, Homo sapien
tcatggggataagactgcttggtcc

SEQ ID NO: 239830 - DNA, 25 bp, Homo sapien
gttttagctgccattcacacgtggc

SEQ ID NO: 239831 - DNA, 25 bp, Homo sapien
caaaaccatttgcagttttagctgc

SEQ ID NO: 239832 - DNA, 25 bp, Homo sapien
tgcagttttagctgccattcacacg

SEQ ID NO: 239833 - DNA, 25 bp, Homo sapien
catttgcagttttagctgccattca

SEQ ID NO: 239834 - DNA, 25 bp, Homo sapien
gtatagcaacagaaaaagcctttct

SEQ ID NO: 239835 - DNA, 25 bp, Homo sapien
cgtatagcaacagaaaaagcctttc

SEQ ID NO: 239836 - DNA, 25 bp, Homo sapien
ctttcttcatgacagggcagcttca

SEQ ID NO: 239837 - DNA, 25 bp, Homo sapien
aagcctttcttcatgacagggcagc

SEQ ID NO: 239838 - DNA, 25 bp, Homo sapien
cactgtaactttatagcgttcttga

SEQ ID NO: 239839 - DNA, 25 bp, Homo sapien
tgaattgtcttagcgtccttaagaa

SEQ ID NO: 239840 - DNA, 25 bp, Homo sapien
tggtaggatacgttttccatctttg

SEQ ID NO: 239841 - DNA, 25 bp, Homo sapien
tatcttttaagcaataccaaactgt

SEQ ID NO: 239842 - DNA, 25 bp, Homo sapien
tcagctggagtggaagttttacaat

SEQ ID NO: 239843 - DNA, 25 bp, Homo sapien
taatcctttaagctagttgtatggc

SEQ ID NO: 239844 - DNA, 25 bp, Homo sapien
ggagatgagtcagttttgccataca

SEQ ID NO: 239845 - DNA, 25 bp, Homo sapien
tactgcagaaatggagataggtcta

SEQ ID NO: 239846 - DNA, 25 bp, Homo sapien
tattacctattcacattactctgaa

SEQ ID NO: 239847 - DNA, 25 bp, Homo sapien
atgaaaagtcagtatttagactgca

SEQ ID NO: 239848 - DNA, 25 bp, Homo sapien
agtcagtatttagactgcatattaa

SEQ ID NO: 239849 - DNA, 25 bp, Homo sapien
taatattattacctattcacattac

SEQ ID NO: 239850 - DNA, 25 bp, Homo sapien
tcctcgcccatgagtcacttagtag

SEQ ID NO: 239851 - DNA, 25 bp, Homo sapien
ccattctgagtagtgggatggaatc

SEQ ID NO: 239852 - DNA, 25 bp, Homo sapien
tctgtcccacccaggatgtgaattc

SEQ ID NO: 239853 - DNA, 25 bp, Homo sapien
tataaggttcagcactgtccaccgt

SEQ ID NO: 239854 - DNA, 25 bp, Homo sapien
tacagcacgaagtgcttatgcgtgt

SEQ ID NO: 239855 - DNA, 25 bp, Homo sapien
acagcacgaagtgcttatgcgtgtc

SEQ ID NO: 239856 - DNA, 25 bp, Homo sapien
ctacagcacgaagtgcttatgcgtg

SEQ ID NO: 239857 - DNA, 25 bp, Homo sapien
ttcttcatagatcatgaaatgaaat

SEQ ID NO: 239858 - DNA, 25 bp, Homo sapien
tggccggtccactttgatgacagga

SEQ ID NO: 239859 - DNA, 25 bp, Homo sapien
gatgacaggaggcatggaataagca

SEQ ID NO: 239860 - DNA, 25 bp, Homo sapien
aagcagtaatttctgacaagattcc

SEQ ID NO: 239861 - DNA, 25 bp, Homo sapien
cttggagatttcttccagtagctga

SEQ ID NO: 239862 - DNA, 25 bp, Homo sapien
ctgagagttcactaaggtcagcaaa

SEQ ID NO: 239863 - DNA, 25 bp, Homo sapien
tctgcctaagcagctcatgcatctc

SEQ ID NO: 239864 - DNA, 25 bp, Homo sapien
tctgatctagcttgaacttcggaaa

SEQ ID NO: 239865 - DNA, 25 bp, Homo sapien
tagggcagtttgaggacatgacaac

SEQ ID NO: 239866 - DNA, 25 bp, Homo sapien
aacttgcctgcaccgtacatcatgg

SEQ ID NO: 239867 - DNA, 25 bp, Homo sapien
tgtcgacttcggtgaagacagggtc

SEQ ID NO: 239868 - DNA, 25 bp, Homo sapien
tcaagggcgaggtggtcacccattt

SEQ ID NO: 239869 - DNA, 25 bp, Homo sapien
gcctctaacactgtagtaggtggag

SEQ ID NO: 239870 - DNA, 25 bp, Homo sapien
agtggcatccaacccacgtccagtg

SEQ ID NO: 239871 - DNA, 25 bp, Homo sapien
gatcaagctaacgtctctgagctgg

SEQ ID NO: 239872 - DNA, 25 bp, Homo sapien
tgattggcagtttggaagaacaagt

SEQ ID NO: 239873 - DNA, 25 bp, Homo sapien
gagacaatcgtagggccctgtggcc

SEQ ID NO: 239874 - DNA, 25 bp, Homo sapien
tatgctggcctaacgaaaggaaagg

SEQ ID NO: 239875 - DNA, 25 bp, Homo sapien
gccttgggagagcagaacattatca

SEQ ID NO: 239876 - DNA, 25 bp, Homo sapien
acgtagcgttaatcatatgctggcc

SEQ ID NO: 239877 - DNA, 25 bp, Homo sapien
cgaaaattcataggcacgcactctg

SEQ ID NO: 239878 - DNA, 25 bp, Homo sapien
gagaagaccatgttgccatcgtgcc

SEQ ID NO: 239879 - DNA, 25 bp, Homo sapien
gatgaaggcaaaactcccctgtgtg

SEQ ID NO: 239880 - DNA, 25 bp, Homo sapien
catggagatctttcgcagcaggctg

SEQ ID NO: 239881 - DNA, 25 bp, Homo sapien
gggtctctggcgactgaggactggg

SEQ ID NO: 239882 - DNA, 25 bp, Homo sapien
tcactggccttctcctcgctggcct

SEQ ID NO: 239883 - DNA, 25 bp, Homo sapien
tctggcgactgaggactgggggcca

SEQ ID NO: 239884 - DNA, 25 bp, Homo sapien
tctctggcgactgaggactgggggc

SEQ ID NO: 239885 - DNA, 25 bp, Homo sapien
ccaggaggacggagagcaggagact

SEQ ID NO: 239886 - DNA, 25 bp, Homo sapien
gaggacggagagcaggagacttggc

SEQ ID NO: 239887 - DNA, 25 bp, Homo sapien
gcaggagacttggcaccaccttcat

SEQ ID NO: 239888 - DNA, 25 bp, Homo sapien
cacctgtgccaggaggacggagagc

SEQ ID NO: 239889 - DNA, 25 bp, Homo sapien
gccaaggagtgcctcccttcagctg

SEQ ID NO: 239890 - DNA, 25 bp, Homo sapien
ggccaaggagtgcctcccttcagct

SEQ ID NO: 239891 - DNA, 25 bp, Homo sapien
ttcctgttcttggagcttgtcctgc

SEQ ID NO: 239892 - DNA, 25 bp, Homo sapien
tgcagtggtagcccagtaattcctg

SEQ ID NO: 239893 - DNA, 25 bp, Homo sapien
ctgcagtggtagcccagtaattcct

SEQ ID NO: 239894 - DNA, 25 bp, Homo sapien
gtggtagcccagtaattcctgggtg

SEQ ID NO: 239895 - DNA, 25 bp, Homo sapien
gcatggtgaggacgcaccttcctag

SEQ ID NO: 239896 - DNA, 25 bp, Homo sapien
tcctagacagaacctgggcagtaag

SEQ ID NO: 239897 - DNA, 25 bp, Homo sapien
gcagaggagccccttgtgtctataa

SEQ ID NO: 239898 - DNA, 25 bp, Homo sapien
tatcgcctaaggtctttgtaaagtc

SEQ ID NO: 239899 - DNA, 25 bp, Homo sapien
ctggaaaagtccttcatttagagca

SEQ ID NO: 239900 - DNA, 25 bp, Homo sapien
catttagagcagaaaccaaagcttc

SEQ ID NO: 239901 - DNA, 25 bp, Homo sapien
gaaaccaaagcttcagctttgcagc

SEQ ID NO: 239902 - DNA, 25 bp, Homo sapien
cttgggtcctggaaaagtccttcat

SEQ ID NO: 239903 - DNA, 25 bp, Homo sapien
gagggacagtgtgtacaggaggaaa

SEQ ID NO: 239904 - DNA, 25 bp, Homo sapien
tcctcctatctttctagagtaagac

SEQ ID NO: 239905 - DNA, 25 bp, Homo sapien
tctccctccacatatgaggattata

SEQ ID NO: 239906 - DNA, 25 bp, Homo sapien
gagtaagactccactgttcacccac

SEQ ID NO: 239907 - DNA, 25 bp, Homo sapien
ccactttaacacagtaacctccaga

SEQ ID NO: 239908 - DNA, 25 bp, Homo sapien
tttaacacagtaacctccagaacgc

SEQ ID NO: 239909 - DNA, 25 bp, Homo sapien
acagtaacctccagaacgcccctgc

SEQ ID NO: 239910 - DNA, 25 bp, Homo sapien
acacagtaacctccagaacgcccct

SEQ ID NO: 239911 - DNA, 25 bp, Homo sapien
gttagacacaactctggttggaggg

SEQ ID NO: 239912 - DNA, 25 bp, Homo sapien
ttattaaaagatgcctaaagttaga

SEQ ID NO: 239913 - DNA, 25 bp, Homo sapien
tgcctaaagttagacacaactctgg

SEQ ID NO: 239914 - DNA, 25 bp, Homo sapien
ggagaagaacttggaggagattggg

SEQ ID NO: 239915 - DNA, 25 bp, Homo sapien
cgcaagatgataggcttggacgtca

SEQ ID NO: 239916 - DNA, 25 bp, Homo sapien
ctcctcattgagttgcagcacagct

SEQ ID NO: 239917 - DNA, 25 bp, Homo sapien
taaccctcgccaggaaaaggctgct

SEQ ID NO: 239918 - DNA, 25 bp, Homo sapien
ctccaggtgaagtggtcgaagatca

SEQ ID NO: 239919 - DNA, 25 bp, Homo sapien
aatgaagatgggtagtgagacctgc

SEQ ID NO: 239920 - DNA, 25 bp, Homo sapien
tcattgctgggacccttcacatcct

SEQ ID NO: 239921 - DNA, 25 bp, Homo sapien
gtgcgttctcgctttcctgactcat

SEQ ID NO: 239922 - DNA, 25 bp, Homo sapien
tgttaggtacagaatgaagatgggt

SEQ ID NO: 239923 - DNA, 25 bp, Homo sapien
cctttggaatgtacaggtccacctg

SEQ ID NO: 239924 - DNA, 25 bp, Homo sapien
catctccgaggtcatagactccaga

SEQ ID NO: 239925 - DNA, 25 bp, Homo sapien
cctgggtgatgcgtgagaaatttgc

SEQ ID NO: 239926 - DNA, 25 bp, Homo sapien
ggtgaacaagtctgcaatgcccatt

SEQ ID NO: 239927 - DNA, 25 bp, Homo sapien
ggccagactcttatttcctcatgcg

SEQ ID NO: 239928 - DNA, 25 bp, Homo sapien
tcgagctgattccacctgggatgca

SEQ ID NO: 239929 - DNA, 25 bp, Homo sapien
caggagaacccctgctagaagcaga

SEQ ID NO: 239930 - DNA, 25 bp, Homo sapien
tgcagctggaccatggagcatttaa

SEQ ID NO: 239931 - DNA, 25 bp, Homo sapien
tgttaatcgtgtcccggctcagtgc

SEQ ID NO: 239932 - DNA, 25 bp, Homo sapien
gaaggtaactgatggtgctcgactg

SEQ ID NO: 239933 - DNA, 25 bp, Homo sapien
tgctcgactgcaacatcatgggcac

SEQ ID NO: 239934 - DNA, 25 bp, Homo sapien
cacagttgtctcgtccacatagaag

SEQ ID NO: 239935 - DNA, 25 bp, Homo sapien
ctggtgcttgccaggtcaaagggct

SEQ ID NO: 239936 - DNA, 25 bp, Homo sapien
gctctggaagtggtgctagacctca

SEQ ID NO: 239937 - DNA, 25 bp, Homo sapien
cacagttccaggtgatctcacgggc

SEQ ID NO: 239938 - DNA, 25 bp, Homo sapien
ggcctactatccaagtgacacagtg

SEQ ID NO: 239939 - DNA, 25 bp, Homo sapien
tccccatgcctagagtgggtcccag

SEQ ID NO: 239940 - DNA, 25 bp, Homo sapien
tctcctgggagttcccagccttgtg

SEQ ID NO: 239941 - DNA, 25 bp, Homo sapien
ggcctctcctgggagttcccagcct

SEQ ID NO: 239942 - DNA, 25 bp, Homo sapien
atcctgcgaagagggcggcctctcc

SEQ ID NO: 239943 - DNA, 25 bp, Homo sapien
catcctgcgaagagggcggcctctc

SEQ ID NO: 239944 - DNA, 25 bp, Homo sapien
tggagattcccagatgtgtatgtgc

SEQ ID NO: 239945 - DNA, 25 bp, Homo sapien
tattcctggccatagtggatgggcc

SEQ ID NO: 239946 - DNA, 25 bp, Homo sapien
gattttagcggctgttattcctggc

SEQ ID NO: 239947 - DNA, 25 bp, Homo sapien
aaagactttgcccaagagtgtgccc

SEQ ID NO: 239948 - DNA, 25 bp, Homo sapien
taagcagcgttaggatccatggcct

SEQ ID NO: 239949 - DNA, 25 bp, Homo sapien
tatccagccctgaaaacaagtcgac

SEQ ID NO: 239950 - DNA, 25 bp, Homo sapien
caaagtcaacgttggctgaagccag

SEQ ID NO: 239951 - DNA, 25 bp, Homo sapien
ccactaggtgcttatacaggctgaa

SEQ ID NO: 239952 - DNA, 25 bp, Homo sapien
agccagagaagacaggtgtacagga

SEQ ID NO: 239953 - DNA, 25 bp, Homo sapien
gcagccagagaagacaggtgtacag

SEQ ID NO: 239954 - DNA, 25 bp, Homo sapien
gagaagacaggtgtacaggaggagt

SEQ ID NO: 239955 - DNA, 25 bp, Homo sapien
gggcagccagagaagacaggtgtac

SEQ ID NO: 239956 - DNA, 25 bp, Homo sapien
gtcctggaccctagcatgtgtacag

SEQ ID NO: 239957 - DNA, 25 bp, Homo sapien
tcctggaccctagcatgtgtacagt

SEQ ID NO: 239958 - DNA, 25 bp, Homo sapien
aggatggagccataagttgcgagct

SEQ ID NO: 239959 - DNA, 25 bp, Homo sapien
gccataagttgcgagctgtgttgat

SEQ ID NO: 239960 - DNA, 25 bp, Homo sapien
tcaggaggcccgagcattgcccagc

SEQ ID NO: 239961 - DNA, 25 bp, Homo sapien
gtgctttgtgcagaccagaggatgg

SEQ ID NO: 239962 - DNA, 25 bp, Homo sapien
catgggtgtggtttgcagagaaatt

SEQ ID NO: 239963 - DNA, 25 bp, Homo sapien
gcaagagctggtccaattgaatatt

SEQ ID NO: 239964 - DNA, 25 bp, Homo sapien
gtaactgaatatagctgagatgccc

SEQ ID NO: 239965 - DNA, 25 bp, Homo sapien
gaatattgccaggtagggagaattt

SEQ ID NO: 239966 - DNA, 25 bp, Homo sapien
gagatgcccattttgggcaagagct

SEQ ID NO: 239967 - DNA, 25 bp, Homo sapien
aggaagcccatctgttccttcttgg

SEQ ID NO: 239968 - DNA, 25 bp, Homo sapien
ccttgaactccacactccactgttg

SEQ ID NO: 239969 - DNA, 25 bp, Homo sapien
cactgttgcctttgccaggaagccc

SEQ ID NO: 239970 - DNA, 25 bp, Homo sapien
ttctgccagaatgtgtggtggtgct

SEQ ID NO: 239971 - DNA, 25 bp, Homo sapien
cacatcttctttggatcgggcagga

SEQ ID NO: 239972 - DNA, 25 bp, Homo sapien
ggtggatgtcaaatctacccaggtg

SEQ ID NO: 239973 - DNA, 25 bp, Homo sapien
tacccaggtggtttatcataggcac

SEQ ID NO: 239974 - DNA, 25 bp, Homo sapien
tggaagccctctaccataatgcgct

SEQ ID NO: 239975 - DNA, 25 bp, Homo sapien
gcttggacaggtagtgctaccttac

SEQ ID NO: 239976 - DNA, 25 bp, Homo sapien
aacgggcttggacaggtagtgctac

SEQ ID NO: 239977 - DNA, 25 bp, Homo sapien
tggaacgggcttggacaggtagtgc

SEQ ID NO: 239978 - DNA, 25 bp, Homo sapien
cagtggaacgggcttggacaggtag

SEQ ID NO: 239979 - DNA, 25 bp, Homo sapien
ttgttaacaaacaggctactgccgg

SEQ ID NO: 239980 - DNA, 25 bp, Homo sapien
gagagcattgcaaaggccatagcca

SEQ ID NO: 239981 - DNA, 25 bp, Homo sapien
gaaatgtaatccaccagggcaagac

SEQ ID NO: 239982 - DNA, 25 bp, Homo sapien
tgtacaaatcaaaggcgaggtcggt

SEQ ID NO: 239983 - DNA, 25 bp, Homo sapien
aggacgccccatgagacagagaatg

SEQ ID NO: 239984 - DNA, 25 bp, Homo sapien
agcaggaggacgccccatgagacag

SEQ ID NO: 239985 - DNA, 25 bp, Homo sapien
ctgccagcaggaggacgccccatga

SEQ ID NO: 239986 - DNA, 25 bp, Homo sapien
ccatgagacagagaatggtattgtc

SEQ ID NO: 239987 - DNA, 25 bp, Homo sapien
cttggtggcgcttccttcacactcc

SEQ ID NO: 239988 - DNA, 25 bp, Homo sapien
ttggcccttcccgacatcccaggtg

SEQ ID NO: 239989 - DNA, 25 bp, Homo sapien
ttcccgacatcccaggtgcggtctt

SEQ ID NO: 239990 - DNA, 25 bp, Homo sapien
gacatcccaggtgcggtctttgggt

SEQ ID NO: 239991 - DNA, 25 bp, Homo sapien
ttgatcaatctcagaacatattttg

SEQ ID NO: 239992 - DNA, 25 bp, Homo sapien
tcagaacatattttgagggtattaa

SEQ ID NO: 239993 - DNA, 25 bp, Homo sapien
tgatcaatctcagaacatattttga

SEQ ID NO: 239994 - DNA, 25 bp, Homo sapien
caatctcagaacatattttgagggt

SEQ ID NO: 239995 - DNA, 25 bp, Homo sapien
caccggatctgggcgtatttctgca

SEQ ID NO: 239996 - DNA, 25 bp, Homo sapien
caacagtaagcgtgataccaatgac

SEQ ID NO: 239997 - DNA, 25 bp, Homo sapien
taccaatgacagtgatcagaaaact

SEQ ID NO: 239998 - DNA, 25 bp, Homo sapien
cattgaagcgtctgctgtcagcatc

SEQ ID NO: 239999 - DNA, 25 bp, Homo sapien
gaaaactcctactgccattgaagcg

SEQ ID NO: 240000 - DNA, 25 bp, Homo sapien
gaagggacctgattctaaacggaga

SEQ ID NO: 240001 - DNA, 25 bp, Homo sapien
cagtgagtggttagacagtgattcc

SEQ ID NO: 240002 - DNA, 25 bp, Homo sapien
aataggtgtccttgttgccccatgg

SEQ ID NO: 240003 - DNA, 25 bp, Homo sapien
tcagagaggtttggcgacttcacga

SEQ ID NO: 240004 - DNA, 25 bp, Homo sapien
gccagatgctccatgaacacagttc

SEQ ID NO: 240005 - DNA, 25 bp, Homo sapien
cagatgctccatgaacacagttcag

SEQ ID NO: 240006 - DNA, 25 bp, Homo sapien
gatgctccatgaacacagttcaggg

SEQ ID NO: 240007 - DNA, 25 bp, Homo sapien
gaacacagttcagggggcccgaaga

SEQ ID NO: 240008 - DNA, 25 bp, Homo sapien
gagaaaacatgggagggatttacag

SEQ ID NO: 240009 - DNA, 25 bp, Homo sapien
tgggagggatttacagtcacatgca

SEQ ID NO: 240010 - DNA, 25 bp, Homo sapien
ggatttacagtcacatgcaggcagg

SEQ ID NO: 240011 - DNA, 25 bp, Homo sapien
ccacatacagcctcagcaggcaaag

SEQ ID NO: 240012 - DNA, 25 bp, Homo sapien
ttaatgtcatccagggagggggcca

SEQ ID NO: 240013 - DNA, 25 bp, Homo sapien
taatgtcatccagggagggggccag

SEQ ID NO: 240014 - DNA, 25 bp, Homo sapien
ggaggggttgaggagcgagaggcag

SEQ ID NO: 240015 - DNA, 25 bp, Homo sapien
gggaggggttgaggagcgagaggca

SEQ ID NO: 240016 - DNA, 25 bp, Homo sapien
tgaacttgacctcgggggggataga

SEQ ID NO: 240017 - DNA, 25 bp, Homo sapien
caatcattaagaagacaaagggttt

SEQ ID NO: 240018 - DNA, 25 bp, Homo sapien
gaggggagacttggtattttgttca

SEQ ID NO: 240019 - DNA, 25 bp, Homo sapien
tgttcaatcattaagaagacaaagg

SEQ ID NO: 240020 - DNA, 25 bp, Homo sapien
agcttcagtccctttctcgtcgatg

SEQ ID NO: 240021 - DNA, 25 bp, Homo sapien
ctttctcgtcgatggtcagcacagc

SEQ ID NO: 240022 - DNA, 25 bp, Homo sapien
gtccctttctcgtcgatggtcagca

SEQ ID NO: 240023 - DNA, 25 bp, Homo sapien
atggtcagcacagccttatgcacgg

SEQ ID NO: 240024 - DNA, 25 bp, Homo sapien
agttgaaattcagggtcagtgacac

SEQ ID NO: 240025 - DNA, 25 bp, Homo sapien
caacaaggtcgtcagggtgatctca

SEQ ID NO: 240026 - DNA, 25 bp, Homo sapien
tgtttgaccacgtcccgtgtcagtg

SEQ ID NO: 240027 - DNA, 25 bp, Homo sapien
tgtcagtgaatcacgggcatcttca

SEQ ID NO: 240028 - DNA, 25 bp, Homo sapien
gaagaccttagtgatgcccagttga

SEQ ID NO: 240029 - DNA, 25 bp, Homo sapien
tctgtgaccccggagaggtcagccc

SEQ ID NO: 240030 - DNA, 25 bp, Homo sapien
gctgaagaccttagtgatgcccagt

SEQ ID NO: 240031 - DNA, 25 bp, Homo sapien
gaccttagtgatgcccagttgaccc

SEQ ID NO: 240032 - DNA, 25 bp, Homo sapien
tggacagtttgggtaaatgtaagct

SEQ ID NO: 240033 - DNA, 25 bp, Homo sapien
agtaatggacagtttgggtaaatgt

SEQ ID NO: 240034 - DNA, 25 bp, Homo sapien
cagtttgggtaaatgtaagctggca

SEQ ID NO: 240035 - DNA, 25 bp, Homo sapien
tttgggtaaatgtaagctggcagac

SEQ ID NO: 240036 - DNA, 25 bp, Homo sapien
aggaagcccatctgttcctttttgg

SEQ ID NO: 240037 - DNA, 25 bp, Homo sapien
tcctttttggttctgccagaacgtg

SEQ ID NO: 240038 - DNA, 25 bp, Homo sapien
cttgaactccacactccactgctgc

SEQ ID NO: 240039 - DNA, 25 bp, Homo sapien
ttctgccagaacgtgtggtggtgct

SEQ ID NO: 240040 - DNA, 25 bp, Homo sapien
tctggaagccaagtttatacagagt

SEQ ID NO: 240041 - DNA, 25 bp, Homo sapien
agcttcttggtcaccctcaggttgg

SEQ ID NO: 240042 - DNA, 25 bp, Homo sapien
tcagtcccaacatggctaagaggtg

SEQ ID NO: 240043 - DNA, 25 bp, Homo sapien
ctcatggagcatggatggcgctgcc

SEQ ID NO: 240044 - DNA, 25 bp, Homo sapien
tcataggcaccttcacggtggtcac

SEQ ID NO: 240045 - DNA, 25 bp, Homo sapien
tacagtgctggatgttaaacatgcc

SEQ ID NO: 240046 - DNA, 25 bp, Homo sapien
tcggtgtccttgacttcaaagggtc

SEQ ID NO: 240047 - DNA, 25 bp, Homo sapien
ctcatcaggcaggaagaagatggcg

SEQ ID NO: 240048 - DNA, 25 bp, Homo sapien
catcaggcatatttggtaccttctg

SEQ ID NO: 240049 - DNA, 25 bp, Homo sapien
gttattcatccagggcaaacattct

SEQ ID NO: 240050 - DNA, 25 bp, Homo sapien
tgttaattggcagctcagttattca

SEQ ID NO: 240051 - DNA, 25 bp, Homo sapien
aataaaatgttggagcatcaggcat

SEQ ID NO: 240052 - DNA, 25 bp, Homo sapien
cctcatcctctagattggcagggga

SEQ ID NO: 240053 - DNA, 25 bp, Homo sapien
ccatcgaggcatgcagagtggacag

SEQ ID NO: 240054 - DNA, 25 bp, Homo sapien
cctcagggacccctgatcccagctt

SEQ ID NO: 240055 - DNA, 25 bp, Homo sapien
aacagagcttcaccatcgaggcatg

SEQ ID NO: 240056 - DNA, 25 bp, Homo sapien
gaacccaggtctttcagattgcaaa

SEQ ID NO: 240057 - DNA, 25 bp, Homo sapien
cctcaaagaggtagaatgcattgtt

SEQ ID NO: 240058 - DNA, 25 bp, Homo sapien
tgagatacagaagagtccatcacct

SEQ ID NO: 240059 - DNA, 25 bp, Homo sapien
gctaagatgagaaattagcacctca

SEQ ID NO: 240060 - DNA, 25 bp, Homo sapien
aaagtatgttccatgaaactatccc

SEQ ID NO: 240061 - DNA, 25 bp, Homo sapien
acaatttgttctatagttctaagca

SEQ ID NO: 240062 - DNA, 25 bp, Homo sapien
tacaatttgttctatagttctaagc

SEQ ID NO: 240063 - DNA, 25 bp, Homo sapien
tatccctttatgcagtgtattacaa

SEQ ID NO: 240064 - DNA, 25 bp, Homo sapien
aaagcattgctatggcccataatgc

SEQ ID NO: 240065 - DNA, 25 bp, Homo sapien
tatttcctcaaattactcaatgatg

SEQ ID NO: 240066 - DNA, 25 bp, Homo sapien
gaacagctcaggctggttgagcaac

SEQ ID NO: 240067 - DNA, 25 bp, Homo sapien
gaaaactgaagaatccacgctgaaa

SEQ ID NO: 240068 - DNA, 25 bp, Homo sapien
ccattgccggtggtcagctggagct

SEQ ID NO: 240069 - DNA, 25 bp, Homo sapien
gcggtataggctgaaggcgaactca

SEQ ID NO: 240070 - DNA, 25 bp, Homo sapien
caggatttcatcgtgagtgtcagcc

SEQ ID NO: 240071 - DNA, 25 bp, Homo sapien
cattgcaaaggctgtagcgatgctc

SEQ ID NO: 240072 - DNA, 25 bp, Homo sapien
ggccccgagtcaaggcacatgatga

SEQ ID NO: 240073 - DNA, 25 bp, Homo sapien
gggattattaaaccagcctgtgcca

SEQ ID NO: 240074 - DNA, 25 bp, Homo sapien
tgccaagtacttgccgacatcagta

SEQ ID NO: 240075 - DNA, 25 bp, Homo sapien
gatcagggattgacaccacgtggaa

SEQ ID NO: 240076 - DNA, 25 bp, Homo sapien
ttcttgtaacaatcccgtgaggtgc

SEQ ID NO: 240077 - DNA, 25 bp, Homo sapien
aagaagaggaatgggcctgcccacg

SEQ ID NO: 240078 - DNA, 25 bp, Homo sapien
gccagagagattaggtcagctattc

SEQ ID NO: 240079 - DNA, 25 bp, Homo sapien
cacgattatccaggaatcgggccag

SEQ ID NO: 240080 - DNA, 25 bp, Homo sapien
gaggaatacatgtttcatacccggg

SEQ ID NO: 240081 - DNA, 25 bp, Homo sapien
ccaggtgtatgagccaggacaagtc

SEQ ID NO: 240082 - DNA, 25 bp, Homo sapien
cgagcaatggtcaaagtcaacgtca

SEQ ID NO: 240083 - DNA, 25 bp, Homo sapien
cttcaggtgataggccagtgaggaa

SEQ ID NO: 240084 - DNA, 25 bp, Homo sapien
ggaatcacactagtaactgccttgg

SEQ ID NO: 240085 - DNA, 25 bp, Homo sapien
tgaagtcaccgagcatcagagaggc

SEQ ID NO: 240086 - DNA, 25 bp, Homo sapien
aaacagtgacactagggccaggttc

SEQ ID NO: 240087 - DNA, 25 bp, Homo sapien
caacacttcagagatcaaggtcggg

SEQ ID NO: 240088 - DNA, 25 bp, Homo sapien
agggcccagaggtccacggtgcatg

SEQ ID NO: 240089 - DNA, 25 bp, Homo sapien
tccacggtgcatggggaggcccatt

SEQ ID NO: 240090 - DNA, 25 bp, Homo sapien
cctggcacaggtctgttcctggtca

SEQ ID NO: 240091 - DNA, 25 bp, Homo sapien
ggcacaggtctgttcctggtcatat

SEQ ID NO: 240092 - DNA, 25 bp, Homo sapien
tgcatgcccaagcagtaggagaggt

SEQ ID NO: 240093 - DNA, 25 bp, Homo sapien
gaggcttataggagacaacagacag

SEQ ID NO: 240094 - DNA, 25 bp, Homo sapien
aggactgcagacctagacaccctca

SEQ ID NO: 240095 - DNA, 25 bp, Homo sapien
tggagaatgtgagccggcgttcctc

SEQ ID NO: 240096 - DNA, 25 bp, Homo sapien
gtccgtatttaagcagtggatccag

SEQ ID NO: 240097 - DNA, 25 bp, Homo sapien
gtcagtggtggtgcctgaagctgag

SEQ ID NO: 240098 - DNA, 25 bp, Homo sapien
tgtcctcgtccgtatttaagcagtg

SEQ ID NO: 240099 - DNA, 25 bp, Homo sapien
gccctgtcctcgtccgtatttaagc

SEQ ID NO: 240100 - DNA, 25 bp, Homo sapien
ggctgggatctgagtcgcccgccta

SEQ ID NO: 240101 - DNA, 25 bp, Homo sapien
ggacgctttgcctgggcagtgtaca

SEQ ID NO: 240102 - DNA, 25 bp, Homo sapien
tgaatattaaccaaggtcaccccag

SEQ ID NO: 240103 - DNA, 25 bp, Homo sapien
cccagttatcggaggagcaaacagg

SEQ ID NO: 240104 - DNA, 25 bp, Homo sapien
tttactgagtcaccccaaaatgcct

SEQ ID NO: 240105 - DNA, 25 bp, Homo sapien
cagacagtctctgggagagtaccac

SEQ ID NO: 240106 - DNA, 25 bp, Homo sapien
tgttccactggtagcaagatctacc

SEQ ID NO: 240107 - DNA, 25 bp, Homo sapien
gagtaccacttagctggccctctgc

SEQ ID NO: 240108 - DNA, 25 bp, Homo sapien
ctcaggactctgagggttgctgcgt

SEQ ID NO: 240109 - DNA, 25 bp, Homo sapien
tggcaggaggttgccgcccctccaa

SEQ ID NO: 240110 - DNA, 25 bp, Homo sapien
cagcagcggctaggccttcctcgga

SEQ ID NO: 240111 - DNA, 25 bp, Homo sapien
cacccaggaagtagacttcgggtgg

SEQ ID NO: 240112 - DNA, 25 bp, Homo sapien
caatcccctctttaggggccgtgct

SEQ ID NO: 240113 - DNA, 25 bp, Homo sapien
gaaaaggctgtcaatcccctcttta

SEQ ID NO: 240114 - DNA, 25 bp, Homo sapien
aaggctgtcaatcccctctttaggg

SEQ ID NO: 240115 - DNA, 25 bp, Homo sapien
atcccctctttaggggccgtgctca

SEQ ID NO: 240116 - DNA, 25 bp, Homo sapien
gaagtcattaatcccctagaatagc

SEQ ID NO: 240117 - DNA, 25 bp, Homo sapien
aatccctgccctgagacttggccgg

SEQ ID NO: 240118 - DNA, 25 bp, Homo sapien
aagatgtggtaccactcccctggca

SEQ ID NO: 240119 - DNA, 25 bp, Homo sapien
caatgtctggaatccgttggccaag

SEQ ID NO: 240120 - DNA, 25 bp, Homo sapien
aatcttcatgaacacctctgcatcc

SEQ ID NO: 240121 - DNA, 25 bp, Homo sapien
atcttcatgaacacctctgcatcca

SEQ ID NO: 240122 - DNA, 25 bp, Homo sapien
tatctccattacagagcatcctgtg

SEQ ID NO: 240123 - DNA, 25 bp, Homo sapien
gggtacaaaggctcgctcctcttca

SEQ ID NO: 240124 - DNA, 25 bp, Homo sapien
gttttctactgtaggaagctgccat

SEQ ID NO: 240125 - DNA, 25 bp, Homo sapien
ggttgttcctgagagtgttccctga

SEQ ID NO: 240126 - DNA, 25 bp, Homo sapien
ggcagcaccgtggagtgcagacggg

SEQ ID NO: 240127 - DNA, 25 bp, Homo sapien
gcagcaccgtggagtgcagacgggc

SEQ ID NO: 240128 - DNA, 25 bp, Homo sapien
gctgctctgaatcccatactgggga

SEQ ID NO: 240129 - DNA, 25 bp, Homo sapien
tcccatactggggataggagaggct

SEQ ID NO: 240130 - DNA, 25 bp, Homo sapien
acttcaatactagcaactactgagg

SEQ ID NO: 240131 - DNA, 25 bp, Homo sapien
tgttatcgaaagaccacaggtttga

SEQ ID NO: 240132 - DNA, 25 bp, Homo sapien
ccagagcggtgcattcgttataaca

SEQ ID NO: 240133 - DNA, 25 bp, Homo sapien
tgttgctggctacgcagaaagccaa

SEQ ID NO: 240134 - DNA, 25 bp, Homo sapien
cctttttcacttggttcacacatct

SEQ ID NO: 240135 - DNA, 25 bp, Homo sapien
tgcctttttcacttggttcacacat

SEQ ID NO: 240136 - DNA, 25 bp, Homo sapien
gcctttttcacttggttcacacatc

SEQ ID NO: 240137 - DNA, 25 bp, Homo sapien
gacagggagggatctttcagttgca

SEQ ID NO: 240138 - DNA, 25 bp, Homo sapien
catggagtgaacacaagacttgtct

SEQ ID NO: 240139 - DNA, 25 bp, Homo sapien
tcaacagtgtattccctatgcagca

SEQ ID NO: 240140 - DNA, 25 bp, Homo sapien
tgtggatacattgcagccttgggct

SEQ ID NO: 240141 - DNA, 25 bp, Homo sapien
gattaactgaaccacatagcagccc

SEQ ID NO: 240142 - DNA, 25 bp, Homo sapien
ggtcaactttattagaatcttggca

SEQ ID NO: 240143 - DNA, 25 bp, Homo sapien
gcaggctggttctggcctatctgtt

SEQ ID NO: 240144 - DNA, 25 bp, Homo sapien
tggtccaggatgagataagataact

SEQ ID NO: 240145 - DNA, 25 bp, Homo sapien
catgtgggtctgacatggtgttcag

SEQ ID NO: 240146 - DNA, 25 bp, Homo sapien
gaggaaaggcctgttgaagtgggca

SEQ ID NO: 240147 - DNA, 25 bp, Homo sapien
tcatgtccaccatcgccttgtgtga

SEQ ID NO: 240148 - DNA, 25 bp, Homo sapien
gcaactgggttgacaacttttccca

SEQ ID NO: 240149 - DNA, 25 bp, Homo sapien
gagaagtcagcttctaagttgagta

SEQ ID NO: 240150 - DNA, 25 bp, Homo sapien
gagatggttttgttgagctgcccag

SEQ ID NO: 240151 - DNA, 25 bp, Homo sapien
agtatgttggtgagaccaatttggg

SEQ ID NO: 240152 - DNA, 25 bp, Homo sapien
gaccaatttggggaagtatgtcttc

SEQ ID NO: 240153 - DNA, 25 bp, Homo sapien
tcctggcatcccctaatacaagcag

SEQ ID NO: 240154 - DNA, 25 bp, Homo sapien
cagccattgtctctcacccatctcc

SEQ ID NO: 240155 - DNA, 25 bp, Homo sapien
taggtcctaaatccacctcctggca

SEQ ID NO: 240156 - DNA, 25 bp, Homo sapien
gctcagcttctgaactaggtcctaa

SEQ ID NO: 240157 - DNA, 25 bp, Homo sapien
tcctggtcatagaggaatctgtgca

SEQ ID NO: 240158 - DNA, 25 bp, Homo sapien
tgcttctgggtctggtagcgactga

SEQ ID NO: 240159 - DNA, 25 bp, Homo sapien
tagcgactgaaagggtgcttccact

SEQ ID NO: 240160 - DNA, 25 bp, Homo sapien
ttctatctggaggacggtgcaagcc

SEQ ID NO: 240161 - DNA, 25 bp, Homo sapien
tagtcgcttgtctaggaacagggag

SEQ ID NO: 240162 - DNA, 25 bp, Homo sapien
tgaggtgttagcttgggccccaaga

SEQ ID NO: 240163 - DNA, 25 bp, Homo sapien
tgtccaaatagtgctgccgaggctt

SEQ ID NO: 240164 - DNA, 25 bp, Homo sapien
tggcaagaaccatgaacgtgtcctg

SEQ ID NO: 240165 - DNA, 25 bp, Homo sapien
aggcccctgcagacttttatctcca

SEQ ID NO: 240166 - DNA, 25 bp, Homo sapien
gcagacttttatctccatgggcaag

SEQ ID NO: 240167 - DNA, 25 bp, Homo sapien
ggttgaggcccctgcagacttttat

SEQ ID NO: 240168 - DNA, 25 bp, Homo sapien
ctgagagctgatgcctggggggttg

SEQ ID NO: 240169 - DNA, 25 bp, Homo sapien
ctgacagtggacagaggccaggatc

SEQ ID NO: 240170 - DNA, 25 bp, Homo sapien
tgacagtggacagaggccaggatcc

SEQ ID NO: 240171 - DNA, 25 bp, Homo sapien
gtagccaaagccaagctggacccat

SEQ ID NO: 240172 - DNA, 25 bp, Homo sapien
agtagccaaagccaagctggaccca

SEQ ID NO: 240173 - DNA, 25 bp, Homo sapien
cagtagccaaagccaagctggaccc

SEQ ID NO: 240174 - DNA, 25 bp, Homo sapien
tcattttgggcacaggcaaagtact

SEQ ID NO: 240175 - DNA, 25 bp, Homo sapien
ttttgggcacaggcaaagtacttac

SEQ ID NO: 240176 - DNA, 25 bp, Homo sapien
cattttgggcacaggcaaagtactt

SEQ ID NO: 240177 - DNA, 25 bp, Homo sapien
cctcattttgggcacaggcaaagta

SEQ ID NO: 240178 - DNA, 25 bp, Homo sapien
aggtcttcagcactgcatcacctct

SEQ ID NO: 240179 - DNA, 25 bp, Homo sapien
ccaggtcttcagcactgcatcacct

SEQ ID NO: 240180 - DNA, 25 bp, Homo sapien
gcccaggtcttcagcactgcatcac

SEQ ID NO: 240181 - DNA, 25 bp, Homo sapien
agcaaaggcactgagcaggggccca

SEQ ID NO: 240182 - DNA, 25 bp, Homo sapien
gtttgaagatgacagcaacctggtc

SEQ ID NO: 240183 - DNA, 25 bp, Homo sapien
tgtttgaagatgacagcaacctggt

SEQ ID NO: 240184 - DNA, 25 bp, Homo sapien
ggtgtttgaagatgacagcaacctg

SEQ ID NO: 240185 - DNA, 25 bp, Homo sapien
tttgaagatgacagcaacctggtca

SEQ ID NO: 240186 - DNA, 25 bp, Homo sapien
tgccctcggtaatgggggtgacata

SEQ ID NO: 240187 - DNA, 25 bp, Homo sapien
aggcccctggcacatccgaggtgtg

SEQ ID NO: 240188 - DNA, 25 bp, Homo sapien
gagcctttggatctgatgggagcaa

SEQ ID NO: 240189 - DNA, 25 bp, Homo sapien
gagcaagggctctactgaggctgcc

SEQ ID NO: 240190 - DNA, 25 bp, Homo sapien
acgcattagccctcgtcagccggtg

SEQ ID NO: 240191 - DNA, 25 bp, Homo sapien
tctccttggctaacaatggcctcca

SEQ ID NO: 240192 - DNA, 25 bp, Homo sapien
gttatcggagtcaggaaggcagcca

SEQ ID NO: 240193 - DNA, 25 bp, Homo sapien
gagatgggaaactggtccacggcac

SEQ ID NO: 240194 - DNA, 25 bp, Homo sapien
tgtaattctgcaatagaggtgccta

SEQ ID NO: 240195 - DNA, 25 bp, Homo sapien
ggaatggaaatatggtaacccagca

SEQ ID NO: 240196 - DNA, 25 bp, Homo sapien
agcaacatcccatgaagctagttac

SEQ ID NO: 240197 - DNA, 25 bp, Homo sapien
ggttggcgtatttccattcctggga

SEQ ID NO: 240198 - DNA, 25 bp, Homo sapien
taatgggtgttggcttgtgactggg

SEQ ID NO: 240199 - DNA, 25 bp, Homo sapien
ggtccctgttgatggtttggtgatt

SEQ ID NO: 240200 - DNA, 25 bp, Homo sapien
ctgggagaatttgtggaaaagggca

SEQ ID NO: 240201 - DNA, 25 bp, Homo sapien
atggtttggtgattgagccttggaa

SEQ ID NO: 240202 - DNA, 25 bp, Homo sapien
aagagggatgtggtttgttatttct

SEQ ID NO: 240203 - DNA, 25 bp, Homo sapien
gggatgtggtttgttatttcttgtg

SEQ ID NO: 240204 - DNA, 25 bp, Homo sapien
gatgtggtttgttatttcttgtgca

SEQ ID NO: 240205 - DNA, 25 bp, Homo sapien
gagggatgtggtttgttatttcttg

SEQ ID NO: 240206 - DNA, 25 bp, Homo sapien
gggccatccttcgatcggactatga

SEQ ID NO: 240207 - DNA, 25 bp, Homo sapien
gactatgaacttggtggtggtagct

SEQ ID NO: 240208 - DNA, 25 bp, Homo sapien
aaggtcctattgaaggagacagtga

SEQ ID NO: 240209 - DNA, 25 bp, Homo sapien
cagtgaagtaagaggggccatcctt

SEQ ID NO: 240210 - DNA, 25 bp, Homo sapien
tctgcaggtgcttccagcttggact

SEQ ID NO: 240211 - DNA, 25 bp, Homo sapien
taagagcatgtgattaattctgcag

SEQ ID NO: 240212 - DNA, 25 bp, Homo sapien
atgtgattaattctgcaggtgcttc

SEQ ID NO: 240213 - DNA, 25 bp, Homo sapien
caggtgcttccagcttggacttttt

SEQ ID NO: 240214 - DNA, 25 bp, Homo sapien
ctgcagggagtctctctttgcaatt

SEQ ID NO: 240215 - DNA, 25 bp, Homo sapien
aaagacattttggatgcccatcttc

SEQ ID NO: 240216 - DNA, 25 bp, Homo sapien
ggtttccagattgtaggaggcagaa

SEQ ID NO: 240217 - DNA, 25 bp, Homo sapien
ccatcttcgggaggatggtttccag

SEQ ID NO: 240218 - DNA, 25 bp, Homo sapien
gtcccaggcacattcaacaacactt

SEQ ID NO: 240219 - DNA, 25 bp, Homo sapien
cattgtcccaggcacattcaacaac

SEQ ID NO: 240220 - DNA, 25 bp, Homo sapien
ttgtcccaggcacattcaacaacac

SEQ ID NO: 240221 - DNA, 25 bp, Homo sapien
gacattgtcccaggcacattcaaca

SEQ ID NO: 240222 - DNA, 25 bp, Homo sapien
aggccacggcatctcccttgtaatc

SEQ ID NO: 240223 - DNA, 25 bp, Homo sapien
tctcagtgttctggctgacaaggcc

SEQ ID NO: 240224 - DNA, 25 bp, Homo sapien
catcttgcccttgctagggaggaca

SEQ ID NO: 240225 - DNA, 25 bp, Homo sapien
gtatccaccccaaaagcgaactgct

SEQ ID NO: 240226 - DNA, 25 bp, Homo sapien
caccaggaatgggaagttctttctt

SEQ ID NO: 240227 - DNA, 25 bp, Homo sapien
tgggaagttctttcttgtatattca

SEQ ID NO: 240228 - DNA, 25 bp, Homo sapien
tcttgtatattcagggtgaaagggc

SEQ ID NO: 240229 - DNA, 25 bp, Homo sapien
gtatattcagggtgaaagggcttct

SEQ ID NO: 240230 - DNA, 25 bp, Homo sapien
gccgtcagaaggtcaaggccttgga

SEQ ID NO: 240231 - DNA, 25 bp, Homo sapien
tatgtctacaaccttcccttgggtc

SEQ ID NO: 240232 - DNA, 25 bp, Homo sapien
tcaaggccttggattatgtctacaa

SEQ ID NO: 240233 - DNA, 25 bp, Homo sapien
ttcaccagaaccatggccgtcagaa

SEQ ID NO: 240234 - DNA, 25 bp, Homo sapien
cattgcccaagaaatttgcctgcag

SEQ ID NO: 240235 - DNA, 25 bp, Homo sapien
ttcatacagcctcttgacattgccc

SEQ ID NO: 240236 - DNA, 25 bp, Homo sapien
tgcagctccttcttgacgaagaggg

SEQ ID NO: 240237 - DNA, 25 bp, Homo sapien
ctccttcttgacgaagagggcactt

SEQ ID NO: 240238 - DNA, 25 bp, Homo sapien
ctgggaacagtcagtgagtgaacca

SEQ ID NO: 240239 - DNA, 25 bp, Homo sapien
ttctgactcggggtctccaaaacca

SEQ ID NO: 240240 - DNA, 25 bp, Homo sapien
gggagaagaagatgttctgactcgg

SEQ ID NO: 240241 - DNA, 25 bp, Homo sapien
gatgttctgactcggggtctccaaa

SEQ ID NO: 240242 - DNA, 25 bp, Homo sapien
gaagaagatgttctgactcggggtc

SEQ ID NO: 240243 - DNA, 25 bp, Homo sapien
taggcggaaggcaaagtcggtgttg

SEQ ID NO: 240244 - DNA, 25 bp, Homo sapien
caaagtcggtgttgagggaatacac

SEQ ID NO: 240245 - DNA, 25 bp, Homo sapien
aaggcaaagtcggtgttgagggaat

SEQ ID NO: 240246 - DNA, 25 bp, Homo sapien
gcggtataggcggaaggcaaagtcg

SEQ ID NO: 240247 - DNA, 25 bp, Homo sapien
acacagtagattggagcacagaggc

SEQ ID NO: 240248 - DNA, 25 bp, Homo sapien
caaagagtactccataaaggtaaga

SEQ ID NO: 240249 - DNA, 25 bp, Homo sapien
gcattggccggggacacacagtaga

SEQ ID NO: 240250 - DNA, 25 bp, Homo sapien
agaggccaacagcaaagagtactcc

SEQ ID NO: 240251 - DNA, 25 bp, Homo sapien
caaagtcaggtctcaaattccaaat

SEQ ID NO: 240252 - DNA, 25 bp, Homo sapien
acccagattgcattagcagccagaa

SEQ ID NO: 240253 - DNA, 25 bp, Homo sapien
tgaacccagattgcattagcagcca

SEQ ID NO: 240254 - DNA, 25 bp, Homo sapien
aattgagtatgtgaacccagattgc

SEQ ID NO: 240255 - DNA, 25 bp, Homo sapien
tttaagaattgagtatgtgaaccca

SEQ ID NO: 240256 - DNA, 25 bp, Homo sapien
tttggaggtccctccacacattctt

SEQ ID NO: 240257 - DNA, 25 bp, Homo sapien
ctttggaggtccctccacacattct

SEQ ID NO: 240258 - DNA, 25 bp, Homo sapien
tcgtggtggacaagtaacctctctg

SEQ ID NO: 240259 - DNA, 25 bp, Homo sapien
cacaaattgtgcagcacgggaccca

SEQ ID NO: 240260 - DNA, 25 bp, Homo sapien
gctgacatggctttggccccaagga

SEQ ID NO: 240261 - DNA, 25 bp, Homo sapien
actttacagaggagctccaaccctg

SEQ ID NO: 240262 - DNA, 25 bp, Homo sapien
tcagaccaagcataatgtgacagcc

SEQ ID NO: 240263 - DNA, 25 bp, Homo sapien
caataggtcacatccgtctgaaggc

SEQ ID NO: 240264 - DNA, 25 bp, Homo sapien
tctcctaggagcaccggcatgaagt

SEQ ID NO: 240265 - DNA, 25 bp, Homo sapien
tactacagtgtgaatggctgccacc

SEQ ID NO: 240266 - DNA, 25 bp, Homo sapien
gattgtccctggctattcatgacca

SEQ ID NO: 240267 - DNA, 25 bp, Homo sapien
tctgaattgcgtcaaccctgatctg

SEQ ID NO: 240268 - DNA, 25 bp, Homo sapien
agacaacgtctgcagaacgcccagt

SEQ ID NO: 240269 - DNA, 25 bp, Homo sapien
cctgatctgtaaggagggcagttct

SEQ ID NO: 240270 - DNA, 25 bp, Homo sapien
tcctgagtcatcgatggtactggcc

SEQ ID NO: 240271 - DNA, 25 bp, Homo sapien
agttggctagtaaatgtcctgagtc

SEQ ID NO: 240272 - DNA, 25 bp, Homo sapien
gagtcatcgatggtactggcctcca

SEQ ID NO: 240273 - DNA, 25 bp, Homo sapien
taaatgtcctgagtcatcgatggta

SEQ ID NO: 240274 - DNA, 25 bp, Homo sapien
actggtccactccagcctggcttct

SEQ ID NO: 240275 - DNA, 25 bp, Homo sapien
tggtccactccagcctggcttctgt

SEQ ID NO: 240276 - DNA, 25 bp, Homo sapien
ctccaactcactcactggtccactc

SEQ ID NO: 240277 - DNA, 25 bp, Homo sapien
gtccactccagcctggcttctgtat

SEQ ID NO: 240278 - DNA, 25 bp, Homo sapien
acttcccagctgcatttgacactga

SEQ ID NO: 240279 - DNA, 25 bp, Homo sapien
ttcccagctgcatttgacactgaag

SEQ ID NO: 240280 - DNA, 25 bp, Homo sapien
tgacttcccagctgcatttgacact

SEQ ID NO: 240281 - DNA, 25 bp, Homo sapien
gacttcccagctgcatttgacactg

SEQ ID NO: 240282 - DNA, 25 bp, Homo sapien
ctttgcaggttcctcttctcctgcc

SEQ ID NO: 240283 - DNA, 25 bp, Homo sapien
tcctcttctcctgccctgtccttgc

SEQ ID NO: 240284 - DNA, 25 bp, Homo sapien
gttcctcttctcctgccctgtcctt

SEQ ID NO: 240285 - DNA, 25 bp, Homo sapien
ctcttctcctgccctgtccttgcat

SEQ ID NO: 240286 - DNA, 25 bp, Homo sapien
tgagccctgacacttgcttacttgg

SEQ ID NO: 240287 - DNA, 25 bp, Homo sapien
gttggtgagccctgacacttgctta

SEQ ID NO: 240288 - DNA, 25 bp, Homo sapien
cctgacacttgcttacttggttgta

SEQ ID NO: 240289 - DNA, 25 bp, Homo sapien
acacttgcttacttggttgtagctc

SEQ ID NO: 240290 - DNA, 25 bp, Homo sapien
gacacccatgacttcattactaaga

SEQ ID NO: 240291 - DNA, 25 bp, Homo sapien
cacgacacccatgacttcattacta

SEQ ID NO: 240292 - DNA, 25 bp, Homo sapien
ttactaagacatgcaaatgatatat

SEQ ID NO: 240293 - DNA, 25 bp, Homo sapien
gccacgacacccatgacttcattac

SEQ ID NO: 240294 - DNA, 25 bp, Homo sapien
agtattgcccaaaatagaagggtct

SEQ ID NO: 240295 - DNA, 25 bp, Homo sapien
gaagaaggtatttgctccagccaca

SEQ ID NO: 240296 - DNA, 25 bp, Homo sapien
tacataaaactttcgagccagttct

SEQ ID NO: 240297 - DNA, 25 bp, Homo sapien
tcatcattgcacaaatgggcagtgg

SEQ ID NO: 240298 - DNA, 25 bp, Homo sapien
gttttgctcattcgggctgtctagg

SEQ ID NO: 240299 - DNA, 25 bp, Homo sapien
cattgcatcccagcatttgaatggg

SEQ ID NO: 240300 - DNA, 25 bp, Homo sapien
cactcgagaccccaggtacttgctg

SEQ ID NO: 240301 - DNA, 25 bp, Homo sapien
ggcacaggacttctagaacttgcag

SEQ ID NO: 240302 - DNA, 25 bp, Homo sapien
ggtattttctcgctgtaaatcagca

SEQ ID NO: 240303 - DNA, 25 bp, Homo sapien
tagggtttgtctatcttgacgacga

SEQ ID NO: 240304 - DNA, 25 bp, Homo sapien
cccaggaagagcacggaaggtattt

SEQ ID NO: 240305 - DNA, 25 bp, Homo sapien
ttgacgacgagtggtgtctccatgg

SEQ ID NO: 240306 - DNA, 25 bp, Homo sapien
ttcaggtcgaaggtgcccgtcatgt

SEQ ID NO: 240307 - DNA, 25 bp, Homo sapien
aagattttggagacacctatgtagg

SEQ ID NO: 240308 - DNA, 25 bp, Homo sapien
tctgggtacagacacgtctacgacc

SEQ ID NO: 240309 - DNA, 25 bp, Homo sapien
acacctatgtaggagagagtcttct

SEQ ID NO: 240310 - DNA, 25 bp, Homo sapien
caggatggtgcaagagagcttatcg

SEQ ID NO: 240311 - DNA, 25 bp, Homo sapien
tcagcttgccctcatcaggaaggat

SEQ ID NO: 240312 - DNA, 25 bp, Homo sapien
gagcttatcgtcatagccaacttgg

SEQ ID NO: 240313 - DNA, 25 bp, Homo sapien
tatgccactacggaacatcatgggc

SEQ ID NO: 240314 - DNA, 25 bp, Homo sapien
gaacagcgtgttcccaatgctcagt

SEQ ID NO: 240315 - DNA, 25 bp, Homo sapien
ttcctgccagggttgtaaaaggcca

SEQ ID NO: 240316 - DNA, 25 bp, Homo sapien
tgaacccctgcttgatctcgtccag

SEQ ID NO: 240317 - DNA, 25 bp, Homo sapien
tttgcaagaagcatcacagtgccgg

SEQ ID NO: 240318 - DNA, 25 bp, Homo sapien
caaagctttataattccttggtgag

SEQ ID NO: 240319 - DNA, 25 bp, Homo sapien
ccttggtgagaagctcggctttaga

SEQ ID NO: 240320 - DNA, 25 bp, Homo sapien
tttgcttccatccttggacctcgct

SEQ ID NO: 240321 - DNA, 25 bp, Homo sapien
gctttagaagacctttcaccgtgag

SEQ ID NO: 240322 - DNA, 25 bp, Homo sapien
tcctccctcgatctgaagcaagctt

SEQ ID NO: 240323 - DNA, 25 bp, Homo sapien
gaagggaaggtctcatactcacagt

SEQ ID NO: 240324 - DNA, 25 bp, Homo sapien
tttggaagcaatggccacaccacct

SEQ ID NO: 240325 - DNA, 25 bp, Homo sapien
gcaagcttcgtgtggaatagacaag

SEQ ID NO: 240326 - DNA, 25 bp, Homo sapien
gaagactctttttactcgtctgctg

SEQ ID NO: 240327 - DNA, 25 bp, Homo sapien
tgtgtgctggctctgttcttgctct

SEQ ID NO: 240328 - DNA, 25 bp, Homo sapien
aaagctattgcacctcccgaagact

SEQ ID NO: 240329 - DNA, 25 bp, Homo sapien
gcatgatgccgccagaactttccat

SEQ ID NO: 240330 - DNA, 25 bp, Homo sapien
ccaacttaagaagaaggcccagcgc

SEQ ID NO: 240331 - DNA, 25 bp, Homo sapien
aaacgcgggtttggcaccgactgtg

SEQ ID NO: 240332 - DNA, 25 bp, Homo sapien
tctgttctggagtagagcctgctcg

SEQ ID NO: 240333 - DNA, 25 bp, Homo sapien
tacggatctggacgcttgacacctg

SEQ ID NO: 240334 - DNA, 25 bp, Homo sapien
tgagaaggcctggtttgaccagtcc

SEQ ID NO: 240335 - DNA, 25 bp, Homo sapien
tgttgaggcaatgctgcacccgtag

SEQ ID NO: 240336 - DNA, 25 bp, Homo sapien
gcacccgtagcctgtttgttaataa

SEQ ID NO: 240337 - DNA, 25 bp, Homo sapien
catgcactgcacaaacatgaagaag

SEQ ID NO: 240338 - DNA, 25 bp, Homo sapien
gacaaggatgacaccgaaggtccag

SEQ ID NO: 240339 - DNA, 25 bp, Homo sapien
gctgggagtgagtagctctgtgttt

SEQ ID NO: 240340 - DNA, 25 bp, Homo sapien
gagcatccgacctcttggagcaagt

SEQ ID NO: 240341 - DNA, 25 bp, Homo sapien
tttctgggcaaggtcgtcgacccca

SEQ ID NO: 240342 - DNA, 25 bp, Homo sapien
tgcctgaaggtaacggacgtgttca

SEQ ID NO: 240343 - DNA, 25 bp, Homo sapien
cttgctcatagatcaggaaaccgaa

SEQ ID NO: 240344 - DNA, 25 bp, Homo sapien
cgaagcatgaagaatacaggcggca

SEQ ID NO: 240345 - DNA, 25 bp, Homo sapien
gggcttttggccagatatgcagcaa

SEQ ID NO: 240346 - DNA, 25 bp, Homo sapien
tcagtgtccagcttgcagtctaatg

SEQ ID NO: 240347 - DNA, 25 bp, Homo sapien
cagagaaggagactggtcagttcat

SEQ ID NO: 240348 - DNA, 25 bp, Homo sapien
caagctcttgaaggtgagagcagca

SEQ ID NO: 240349 - DNA, 25 bp, Homo sapien
gagagaggccggaatgaaaaatgtc

SEQ ID NO: 240350 - DNA, 25 bp, Homo sapien
gagatagaacggacaagctttgctg

SEQ ID NO: 240351 - DNA, 25 bp, Homo sapien
ccatgagtttcttaggcgaggaagc

SEQ ID NO: 240352 - DNA, 25 bp, Homo sapien
cgaggaagcgctgtgaccatattta

SEQ ID NO: 240353 - DNA, 25 bp, Homo sapien
cagccctagtgggttagagcacaaa

SEQ ID NO: 240354 - DNA, 25 bp, Homo sapien
gacaccgatcctgttcatgacagct

SEQ ID NO: 240355 - DNA, 25 bp, Homo sapien
aacttggactctgagatttcctatc

SEQ ID NO: 240356 - DNA, 25 bp, Homo sapien
gagatttcctatcccctggtgcagg

SEQ ID NO: 240357 - DNA, 25 bp, Homo sapien
cagcagtgagtgtcgaacttggact

SEQ ID NO: 240358 - DNA, 25 bp, Homo sapien
tacccatgatgagccgcgaggatca

SEQ ID NO: 240359 - DNA, 25 bp, Homo sapien
tgagaaaacgctgaggaagtggctt

SEQ ID NO: 240360 - DNA, 25 bp, Homo sapien
cacaaaggcacccaagagcaagact

SEQ ID NO: 240361 - DNA, 25 bp, Homo sapien
gcaagacttctacgtgacctcggag

SEQ ID NO: 240362 - DNA, 25 bp, Homo sapien
aactgtcagttcatcctgcatggga

SEQ ID NO: 240363 - DNA, 25 bp, Homo sapien
gactgcaacatacaggtgccttggg

SEQ ID NO: 240364 - DNA, 25 bp, Homo sapien
tatggcccatctgtatgctggtagc

SEQ ID NO: 240365 - DNA, 25 bp, Homo sapien
cagtgccacaaagctcaataggagg

SEQ ID NO: 240366 - DNA, 25 bp, Homo sapien
gtgacattgggacaacactttccct

SEQ ID NO: 240367 - DNA, 25 bp, Homo sapien
tgaggccgtcatctaaatggagcac

SEQ ID NO: 240368 - DNA, 25 bp, Homo sapien
gaaagtggaacatggcgacatctca

SEQ ID NO: 240369 - DNA, 25 bp, Homo sapien
ccaagggatcgaggttggcatcgcc

SEQ ID NO: 240370 - DNA, 25 bp, Homo sapien
gatatggcgtcatgagcaggctgcc

SEQ ID NO: 240371 - DNA, 25 bp, Homo sapien
cattcaaagttgacctgggcccatt

SEQ ID NO: 240372 - DNA, 25 bp, Homo sapien
tctcgcagcggctctgaaaggtgga

SEQ ID NO: 240373 - DNA, 25 bp, Homo sapien
tgtggtccacatgagggcagattct

SEQ ID NO: 240374 - DNA, 25 bp, Homo sapien
tgttaggtaggagacatgccgtcca

SEQ ID NO: 240375 - DNA, 25 bp, Homo sapien
ttccgggacgaggagctgtcctgca

SEQ ID NO: 240376 - DNA, 25 bp, Homo sapien
ttcatcctccctgatcaagacaaga

SEQ ID NO: 240377 - DNA, 25 bp, Homo sapien
agctgtcctgcaccgtggtggagct

SEQ ID NO: 240378 - DNA, 25 bp, Homo sapien
atcctccctgatcaagacaagatgg

SEQ ID NO: 240379 - DNA, 25 bp, Homo sapien
ttcctccatcttgtcttgatcaggg

SEQ ID NO: 240380 - DNA, 25 bp, Homo sapien
gatcagggaggatgaagagtgcgct

SEQ ID NO: 240381 - DNA, 25 bp, Homo sapien
ctccatcttgtcttgatcagggagg

SEQ ID NO: 240382 - DNA, 25 bp, Homo sapien
tgaagagtgcgctggcattgcctgt

SEQ ID NO: 240383 - DNA, 25 bp, Homo sapien
tcaggactgtgcaaaactagttggc

SEQ ID NO: 240384 - DNA, 25 bp, Homo sapien
tgggtctccatttgcacatctaggc

SEQ ID NO: 240385 - DNA, 25 bp, Homo sapien
tggcacacaggcaggtcgctgaact

SEQ ID NO: 240386 - DNA, 25 bp, Homo sapien
tccccacaggtggtccataaggctg

SEQ ID NO: 240387 - DNA, 25 bp, Homo sapien
cttggaatgcaagctggatgcctgg

SEQ ID NO: 240388 - DNA, 25 bp, Homo sapien
gggctctcagtaaggaacttggaat

SEQ ID NO: 240389 - DNA, 25 bp, Homo sapien
tgtgcaccgagtggccatggcatgt

SEQ ID NO: 240390 - DNA, 25 bp, Homo sapien
gaaggtgacagcgattccctgtgta

SEQ ID NO: 240391 - DNA, 25 bp, Homo sapien
ttgccccaaccttgagctcacaaaa

SEQ ID NO: 240392 - DNA, 25 bp, Homo sapien
ttaacaaaatgtttacaggcagtgt

SEQ ID NO: 240393 - DNA, 25 bp, Homo sapien
caaaatgtttacaggcagtgtgctt

SEQ ID NO: 240394 - DNA, 25 bp, Homo sapien
aacaaaatgtttacaggcagtgtgc

SEQ ID NO: 240395 - DNA, 25 bp, Homo sapien
ggaactcagtgccggtgcaggttct

SEQ ID NO: 240396 - DNA, 25 bp, Homo sapien
actcagtgccggtgcaggttcttgg

SEQ ID NO: 240397 - DNA, 25 bp, Homo sapien
gttcttggtgtgctgagcaccggtc

SEQ ID NO: 240398 - DNA, 25 bp, Homo sapien
agggaactcagtgccggtgcaggtt

SEQ ID NO: 240399 - DNA, 25 bp, Homo sapien
gttgcagaattagcagttggccagg

SEQ ID NO: 240400 - DNA, 25 bp, Homo sapien
tgacatcgccttcaactcggagttg

SEQ ID NO: 240401 - DNA, 25 bp, Homo sapien
ccatcctaagttacagttcacaggt

SEQ ID NO: 240402 - DNA, 25 bp, Homo sapien
cacaggtggtttgacatcgccttca

SEQ ID NO: 240403 - DNA, 25 bp, Homo sapien
tggaggtacagactacagaagggtt

SEQ ID NO: 240404 - DNA, 25 bp, Homo sapien
ccctttgtgggcttcaagaaggcca

SEQ ID NO: 240405 - DNA, 25 bp, Homo sapien
gttgacatcatggacttgagaccag

SEQ ID NO: 240406 - DNA, 25 bp, Homo sapien
agaaggccaactgctgatcagaagg

SEQ ID NO: 240407 - DNA, 25 bp, Homo sapien
atcagggtatctcagccgcaggcca

SEQ ID NO: 240408 - DNA, 25 bp, Homo sapien
tacactgaggatcagggtatctcag

SEQ ID NO: 240409 - DNA, 25 bp, Homo sapien
tagcgtggggcatcatgacccggtt

SEQ ID NO: 240410 - DNA, 25 bp, Homo sapien
ccttcagtgccacgggatgtagcgt

SEQ ID NO: 240411 - DNA, 25 bp, Homo sapien
ctagaggtccccttgcagctgccag

SEQ ID NO: 240412 - DNA, 25 bp, Homo sapien
agaggtccccttgcagctgccagga

SEQ ID NO: 240413 - DNA, 25 bp, Homo sapien
tagaggtccccttgcagctgccagg

SEQ ID NO: 240414 - DNA, 25 bp, Homo sapien
caggcttggcatccgtgtcccccat

SEQ ID NO: 240415 - DNA, 25 bp, Homo sapien
ccaggcttggcatccgtgtccccca

SEQ ID NO: 240416 - DNA, 25 bp, Homo sapien
tgacaaggctggtgtcggactccca

SEQ ID NO: 240417 - DNA, 25 bp, Homo sapien
aatgcaaagcctgtctctagcgaac

SEQ ID NO: 240418 - DNA, 25 bp, Homo sapien
aacgtactgtcactacaggcgtggg

SEQ ID NO: 240419 - DNA, 25 bp, Homo sapien
tcttcttcaggcaaaggctggtcaa

SEQ ID NO: 240420 - DNA, 25 bp, Homo sapien
cgcaagccaccttgcccgacctgtt

SEQ ID NO: 240421 - DNA, 25 bp, Homo sapien
tcatcctttccactgttaatggaca

SEQ ID NO: 240422 - DNA, 25 bp, Homo sapien
tattagaaggatgtaccattattaa

SEQ ID NO: 240423 - DNA, 25 bp, Homo sapien
ttattatattagaaggatgtaccat

SEQ ID NO: 240424 - DNA, 25 bp, Homo sapien
gaaggctcaactcgggcttgcccgg

SEQ ID NO: 240425 - DNA, 25 bp, Homo sapien
gtttcaatgcgaggaagcaaagagc

SEQ ID NO: 240426 - DNA, 25 bp, Homo sapien
agcaaggaaggctcaactcgggctt

SEQ ID NO: 240427 - DNA, 25 bp, Homo sapien
cgtggaagtttcaatgcgaggaagc

SEQ ID NO: 240428 - DNA, 25 bp, Homo sapien
tcatcgctggtaaccctggttcaca

SEQ ID NO: 240429 - DNA, 25 bp, Homo sapien
atgtagcgatggtggatttcacatc

SEQ ID NO: 240430 - DNA, 25 bp, Homo sapien
catcgctggtaaccctggttcacaa

SEQ ID NO: 240431 - DNA, 25 bp, Homo sapien
tgtagatgtagcgatggtggatttc

SEQ ID NO: 240432 - DNA, 25 bp, Homo sapien
ctactgtgtcccagttgcggccaca

SEQ ID NO: 240433 - DNA, 25 bp, Homo sapien
tgtgtcccagttgcggccacagcct

SEQ ID NO: 240434 - DNA, 25 bp, Homo sapien
agtgcccacctcgaggtagctgtcc

SEQ ID NO: 240435 - DNA, 25 bp, Homo sapien
actgtgtcccagttgcggccacagc

SEQ ID NO: 240436 - DNA, 25 bp, Homo sapien
cctgcgctcagtggcatgttggagc

SEQ ID NO: 240437 - DNA, 25 bp, Homo sapien
tggtgtctccctgcgctcagtggca

SEQ ID NO: 240438 - DNA, 25 bp, Homo sapien
tgcttggtgtctccctgcgctcagt

SEQ ID NO: 240439 - DNA, 25 bp, Homo sapien
tccctgcgctcagtggcatgttgga

SEQ ID NO: 240440 - DNA, 25 bp, Homo sapien
agcagacagctcaagggctacggca

SEQ ID NO: 240441 - DNA, 25 bp, Homo sapien
cagcagacagctcaagggctacggc

SEQ ID NO: 240442 - DNA, 25 bp, Homo sapien
gcagacagctcaagggctacggcag

SEQ ID NO: 240443 - DNA, 25 bp, Homo sapien
ttaggtctgtgcccctcagatcgtt

SEQ ID NO: 240444 - DNA, 25 bp, Homo sapien
cttcagatccatgccccttaggtct

SEQ ID NO: 240445 - DNA, 25 bp, Homo sapien
agatccatgccccttaggtctgtgc

SEQ ID NO: 240446 - DNA, 25 bp, Homo sapien
tgcccttcagatccatgccccttag

SEQ ID NO: 240447 - DNA, 25 bp, Homo sapien
gcctgatctgactgttcgtcttgac

SEQ ID NO: 240448 - DNA, 25 bp, Homo sapien
gatctgactgttcgtcttgaccttg

SEQ ID NO: 240449 - DNA, 25 bp, Homo sapien
cctgatctgactgttcgtcttgacc

SEQ ID NO: 240450 - DNA, 25 bp, Homo sapien
ctgactgttcgtcttgaccttgacc

SEQ ID NO: 240451 - DNA, 25 bp, Homo sapien
ggaacacttgggaccaagaactctc

SEQ ID NO: 240452 - DNA, 25 bp, Homo sapien
caagaactctctgggatgactccat

SEQ ID NO: 240453 - DNA, 25 bp, Homo sapien
tttcctctccagaatgttgggcccc

SEQ ID NO: 240454 - DNA, 25 bp, Homo sapien
acttccaaatgccacccgcactcag

SEQ ID NO: 240455 - DNA, 25 bp, Homo sapien
tcagtgactatgagatcctgcaccc

SEQ ID NO: 240456 - DNA, 25 bp, Homo sapien
gacgtggtcagtgactatgagatcc

SEQ ID NO: 240457 - DNA, 25 bp, Homo sapien
tgactatgagatcctgcaccctggg

SEQ ID NO: 240458 - DNA, 25 bp, Homo sapien
cagccccacagacgtggtcagtgac

SEQ ID NO: 240459 - DNA, 25 bp, Homo sapien
tacttgctgagtagtccagggttgt

SEQ ID NO: 240460 - DNA, 25 bp, Homo sapien
ccccatcatcaggagcattgaatgg

SEQ ID NO: 240461 - DNA, 25 bp, Homo sapien
tgaatgggaaaacgtctcctacttg

SEQ ID NO: 240462 - DNA, 25 bp, Homo sapien
ttggcctccccggtgttccaccatg

SEQ ID NO: 240463 - DNA, 25 bp, Homo sapien
tacaggcggtctcatcgagccaaag

SEQ ID NO: 240464 - DNA, 25 bp, Homo sapien
tcttgtgacaaaagctgactcgaag

SEQ ID NO: 240465 - DNA, 25 bp, Homo sapien
tgaagcatcatcacgttcctgggcc

SEQ ID NO: 240466 - DNA, 25 bp, Homo sapien
tgaccagttaccacaaaggcaagaa

SEQ ID NO: 240467 - DNA, 25 bp, Homo sapien
aaacactgccctgtgcgattcagac

SEQ ID NO: 240468 - DNA, 25 bp, Homo sapien
tttgggacacgattaaagcgggcac

SEQ ID NO: 240469 - DNA, 25 bp, Homo sapien
ccacctggcggtgtgggcttctgaa

SEQ ID NO: 240470 - DNA, 25 bp, Homo sapien
catctggcctccgtagtggtctgaa

SEQ ID NO: 240471 - DNA, 25 bp, Homo sapien
tcgatgggtcactcagactgcaaag

SEQ ID NO: 240472 - DNA, 25 bp, Homo sapien
caacgggcgaagtgcagttcactca

SEQ ID NO: 240473 - DNA, 25 bp, Homo sapien
cgtcctgtggtcatgcataagctcc

SEQ ID NO: 240474 - DNA, 25 bp, Homo sapien
gagctttcaagggactctgcaccag

SEQ ID NO: 240475 - DNA, 25 bp, Homo sapien
cccttaggtcaaagttccaatgtca

SEQ ID NO: 240476 - DNA, 25 bp, Homo sapien
tgtgtgggaagtccgccgaggttcg

SEQ ID NO: 240477 - DNA, 25 bp, Homo sapien
tgattaaagaactgtaattcaaata

SEQ ID NO: 240478 - DNA, 25 bp, Homo sapien
ctggaagccattacctcatacctct

SEQ ID NO: 240479 - DNA, 25 bp, Homo sapien
tctggagggatcttgcaccaaatac

SEQ ID NO: 240480 - DNA, 25 bp, Homo sapien
ttttgccagctacccaccataggag

SEQ ID NO: 240481 - DNA, 25 bp, Homo sapien
tgccggaagccaagctggaaagctc

SEQ ID NO: 240482 - DNA, 25 bp, Homo sapien
ggatgcacaacctttctctggaggg

SEQ ID NO: 240483 - DNA, 25 bp, Homo sapien
gtctccactttcatccccacgacgg

SEQ ID NO: 240484 - DNA, 25 bp, Homo sapien
agtctccactttcatccccacgacg

SEQ ID NO: 240485 - DNA, 25 bp, Homo sapien
ttagtctccactttcatccccacga

SEQ ID NO: 240486 - DNA, 25 bp, Homo sapien
tctccactttcatccccacgacggc

SEQ ID NO: 240487 - DNA, 25 bp, Homo sapien
gtaatacgggcaagtgtcccgcggc

SEQ ID NO: 240488 - DNA, 25 bp, Homo sapien
caaggcagcgcgtgtgcaagaaagt

SEQ ID NO: 240489 - DNA, 25 bp, Homo sapien
tgtctgtgcaagtccttcgagttag

SEQ ID NO: 240490 - DNA, 25 bp, Homo sapien
gaaagtagcatcgtctgtctgtgca

SEQ ID NO: 240491 - DNA, 25 bp, Homo sapien
agctgtccgagtccaaatcgctttt

SEQ ID NO: 240492 - DNA, 25 bp, Homo sapien
gctgtccgagtccaaatcgctttta

SEQ ID NO: 240493 - DNA, 25 bp, Homo sapien
ctgtccgagtccaaatcgcttttac

SEQ ID NO: 240494 - DNA, 25 bp, Homo sapien
cgacgacgacgtcttgttccacttc

SEQ ID NO: 240495 - DNA, 25 bp, Homo sapien
gcttctgccgcctccatttggcgcg

SEQ ID NO: 240496 - DNA, 25 bp, Homo sapien
gaggaccgcttctgccgcctccatt

SEQ ID NO: 240497 - DNA, 25 bp, Homo sapien
ccggtgacgccttcgacgacgacgt

SEQ ID NO: 240498 - DNA, 25 bp, Homo sapien
gcggggaaggaccgctaggcgccca

SEQ ID NO: 240499 - DNA, 25 bp, Homo sapien
ctcgcggggaaggaccgctaggcgc

SEQ ID NO: 240500 - DNA, 25 bp, Homo sapien
ggaaggaccgctaggcgcccacggc

SEQ ID NO: 240501 - DNA, 25 bp, Homo sapien
aaggaccgctaggcgcccacggcag

SEQ ID NO: 240502 - DNA, 25 bp, Homo sapien
gcttccgccgacagtgcagctggtt

SEQ ID NO: 240503 - DNA, 25 bp, Homo sapien
tcctggaagaggttctcgagagctt

SEQ ID NO: 240504 - DNA, 25 bp, Homo sapien
cacgtccgggtacttggtctcctgg

SEQ ID NO: 240505 - DNA, 25 bp, Homo sapien
cggaggtgcactttccgggccagct

SEQ ID NO: 240506 - DNA, 25 bp, Homo sapien
ccacgggcgccgcctgcacgtgcag

SEQ ID NO: 240507 - DNA, 25 bp, Homo sapien
tgggggcgtcgggacgcaggagcac

SEQ ID NO: 240508 - DNA, 25 bp, Homo sapien
gcgtcgggacgcaggagcactgctg

SEQ ID NO: 240509 - DNA, 25 bp, Homo sapien
gcccacgggcgccgcctgcacgtgc

SEQ ID NO: 240510 - DNA, 25 bp, Homo sapien
ctgcccgtagaagtagttgttgtag

SEQ ID NO: 240511 - DNA, 25 bp, Homo sapien
cgtagaagtagttgttgtagccgag

SEQ ID NO: 240512 - DNA, 25 bp, Homo sapien
cccgtagaagtagttgttgtagccg

SEQ ID NO: 240513 - DNA, 25 bp, Homo sapien
tagaagtagttgttgtagccgaggc

SEQ ID NO: 240514 - DNA, 25 bp, Homo sapien
cgccgtagagcgagtccccgtgcag

SEQ ID NO: 240515 - DNA, 25 bp, Homo sapien
gtagaaggcgccatagtccgaggag

SEQ ID NO: 240516 - DNA, 25 bp, Homo sapien
gccgctggcgccgtagagcgagtcc

SEQ ID NO: 240517 - DNA, 25 bp, Homo sapien
gtgcagggccgggaagacgacggga

SEQ ID NO: 240518 - DNA, 25 bp, Homo sapien
gcaacaccgagtccttgcagcgcgg

SEQ ID NO: 240519 - DNA, 25 bp, Homo sapien
gcggccgggcggctaggatgttgtc

SEQ ID NO: 240520 - DNA, 25 bp, Homo sapien
ggcaacaccgagtccttgcagcgcg

SEQ ID NO: 240521 - DNA, 25 bp, Homo sapien
gctaggatgttgtcgatgctgaaca

SEQ ID NO: 240522 - DNA, 25 bp, Homo sapien
cggcgggaacgcgccgaggacagag

SEQ ID NO: 240523 - DNA, 25 bp, Homo sapien
ggcgggaacgcgccgaggacagagc

SEQ ID NO: 240524 - DNA, 25 bp, Homo sapien
gcggcgggaacgcgccgaggacaga

SEQ ID NO: 240525 - DNA, 25 bp, Homo sapien
cagccgccgaccaaaccgaaagaga

SEQ ID NO: 240526 - DNA, 25 bp, Homo sapien
agtgggggggtccactctcctccag

SEQ ID NO: 240527 - DNA, 25 bp, Homo sapien
aaaccgaaagagagcgccggcgagc

SEQ ID NO: 240528 - DNA, 25 bp, Homo sapien
cgaccaaaccgaaagagagcgccgg

SEQ ID NO: 240529 - DNA, 25 bp, Homo sapien
cttgttggttttatactgagtcgac

SEQ ID NO: 240530 - DNA, 25 bp, Homo sapien
gacaaacagaaccagatttggccct

SEQ ID NO: 240531 - DNA, 25 bp, Homo sapien
tgagtcgacgtcatcctggatttag

SEQ ID NO: 240532 - DNA, 25 bp, Homo sapien
ggatttagttcctggtaatatgcag

SEQ ID NO: 240533 - DNA, 25 bp, Homo sapien
cggccgcgatgatttgcgggattct

SEQ ID NO: 240534 - DNA, 25 bp, Homo sapien
ctggcaggcccagagtggattccct

SEQ ID NO: 240535 - DNA, 25 bp, Homo sapien
tctgatagcggcaggcggccgcgat

SEQ ID NO: 240536 - DNA, 25 bp, Homo sapien
cagtggcctggacgatggccgggtc

SEQ ID NO: 240537 - DNA, 25 bp, Homo sapien
gaggtttagtcctgtccgagggcac

SEQ ID NO: 240538 - DNA, 25 bp, Homo sapien
tttctgttcgggtttcaaagagcca

SEQ ID NO: 240539 - DNA, 25 bp, Homo sapien
ccagcttgtggcctgagagttgctc

SEQ ID NO: 240540 - DNA, 25 bp, Homo sapien
caaagagccattgcacggaggttta

SEQ ID NO: 240541 - DNA, 25 bp, Homo sapien
tggctctgcatgtccagacctggct

SEQ ID NO: 240542 - DNA, 25 bp, Homo sapien
gctggctctgcatgtccagacctgg

SEQ ID NO: 240543 - DNA, 25 bp, Homo sapien
gctctgcatgtccagacctggcttc

SEQ ID NO: 240544 - DNA, 25 bp, Homo sapien
tctgctggctctgcatgtccagacc

SEQ ID NO: 240545 - DNA, 25 bp, Homo sapien
ctatgcctttggatgtaggcagccc

SEQ ID NO: 240546 - DNA, 25 bp, Homo sapien
gagctgctgatgaccggcttctgtg

SEQ ID NO: 240547 - DNA, 25 bp, Homo sapien
tttggatgtaggcagccctctatgg

SEQ ID NO: 240548 - DNA, 25 bp, Homo sapien
agctgctgatgaccggcttctgtgg

SEQ ID NO: 240549 - DNA, 25 bp, Homo sapien
tttccaacgtgattgtaccatcttg

SEQ ID NO: 240550 - DNA, 25 bp, Homo sapien
tggataatcttttctggtaacctag

SEQ ID NO: 240551 - DNA, 25 bp, Homo sapien
caacagtacgtttaactttgagaga

SEQ ID NO: 240552 - DNA, 25 bp, Homo sapien
gaattgctggtcgtctgtcaacagt

SEQ ID NO: 240553 - DNA, 25 bp, Homo sapien
gacctaaatgatgcttttggctccc

SEQ ID NO: 240554 - DNA, 25 bp, Homo sapien
taaaaggtttcgcaaatatgagacc

SEQ ID NO: 240555 - DNA, 25 bp, Homo sapien
tctaatccaggatgcaaactgggat

SEQ ID NO: 240556 - DNA, 25 bp, Homo sapien
tagagtaccccaccatctggatgtg

SEQ ID NO: 240557 - DNA, 25 bp, Homo sapien
tctacagggctagcttcaatactct

SEQ ID NO: 240558 - DNA, 25 bp, Homo sapien
tagcctcctagaagacatgatgcga

SEQ ID NO: 240559 - DNA, 25 bp, Homo sapien
taaaagcacgaccactaaccactga

SEQ ID NO: 240560 - DNA, 25 bp, Homo sapien
ttcagggaacaatctgcagactagt

SEQ ID NO: 240561 - DNA, 25 bp, Homo sapien
accgaaggcttcgagcaaactttag

SEQ ID NO: 240562 - DNA, 25 bp, Homo sapien
cgaaggcttcgagcaaactttagct

SEQ ID NO: 240563 - DNA, 25 bp, Homo sapien
ctgcaacggaccgaaggcttcgagc

SEQ ID NO: 240564 - DNA, 25 bp, Homo sapien
gcaacggaccgaaggcttcgagcaa

SEQ ID NO: 240565 - DNA, 25 bp, Homo sapien
ttgccgtcagttgttcctaagggaa

SEQ ID NO: 240566 - DNA, 25 bp, Homo sapien
ctgtgaagagcagagagctgacaca

SEQ ID NO: 240567 - DNA, 25 bp, Homo sapien
tgtgaagagcagagagctgacacac

SEQ ID NO: 240568 - DNA, 25 bp, Homo sapien
gaagaaagcgcatgacgtcagactg

SEQ ID NO: 240569 - DNA, 25 bp, Homo sapien
acgtcagactgcttctttctccata

SEQ ID NO: 240570 - DNA, 25 bp, Homo sapien
gcgcatgacgtcagactgcttcttt

SEQ ID NO: 240571 - DNA, 25 bp, Homo sapien
gcatgacgtcagactgcttctttct

SEQ ID NO: 240572 - DNA, 25 bp, Homo sapien
cttggcttacctgatggctgcctcc

SEQ ID NO: 240573 - DNA, 25 bp, Homo sapien
tggcttacctgatggctgcctccag

SEQ ID NO: 240574 - DNA, 25 bp, Homo sapien
ggcttacctgatggctgcctccaga

SEQ ID NO: 240575 - DNA, 25 bp, Homo sapien
cttacctgatggctgcctccagacg

SEQ ID NO: 240576 - DNA, 25 bp, Homo sapien
tttcctgacaccagaagagtctctg

SEQ ID NO: 240577 - DNA, 25 bp, Homo sapien
tctctgtccaacttgtagcagcttt

SEQ ID NO: 240578 - DNA, 25 bp, Homo sapien
gtttcattttgaacagcagcatgaa

SEQ ID NO: 240579 - DNA, 25 bp, Homo sapien
cttgtgtaggtatttccccagaatc

SEQ ID NO: 240580 - DNA, 25 bp, Homo sapien
ctgtggaaaggatgtcacggggagg

SEQ ID NO: 240581 - DNA, 25 bp, Homo sapien
atgtggcccccccttcgaccccatg

SEQ ID NO: 240582 - DNA, 25 bp, Homo sapien
cccccttcgaccccatggggcatct

SEQ ID NO: 240583 - DNA, 25 bp, Homo sapien
ccccttcgaccccatggggcatctg

SEQ ID NO: 240584 - DNA, 25 bp, Homo sapien
cccgtgcccttttatatctccacat

SEQ ID NO: 240585 - DNA, 25 bp, Homo sapien
ccccgtgcccttttatatctccaca

SEQ ID NO: 240586 - DNA, 25 bp, Homo sapien
acatttctctttgcctgtgatgaat

SEQ ID NO: 240587 - DNA, 25 bp, Homo sapien
tctttgcctgtgatgaatggttcca

SEQ ID NO: 240588 - DNA, 25 bp, Homo sapien
tccaggagtctgataataaattttc

SEQ ID NO: 240589 - DNA, 25 bp, Homo sapien
ttggagacatccacaggcatctgtc

SEQ ID NO: 240590 - DNA, 25 bp, Homo sapien
ctctgaagcgatggtgcagctgccc

SEQ ID NO: 240591 - DNA, 25 bp, Homo sapien
gctgtggacttggtgattccattgg

SEQ ID NO: 240592 - DNA, 25 bp, Homo sapien
tcctatggcaaccagattccagaac

SEQ ID NO: 240593 - DNA, 25 bp, Homo sapien
tactcctatggcaaccagattccag

SEQ ID NO: 240594 - DNA, 25 bp, Homo sapien
cctatggcaaccagattccagaacc

SEQ ID NO: 240595 - DNA, 25 bp, Homo sapien
actcctatggcaaccagattccaga

SEQ ID NO: 240596 - DNA, 25 bp, Homo sapien
tgagtgatagcttataatccttggg

SEQ ID NO: 240597 - DNA, 25 bp, Homo sapien
cacagggcttcctgtacccgtttct

SEQ ID NO: 240598 - DNA, 25 bp, Homo sapien
tatctgcttccatggcaaaaagggc

SEQ ID NO: 240599 - DNA, 25 bp, Homo sapien
ctggatgatgatgagtgatagctta

SEQ ID NO: 240600 - DNA, 25 bp, Homo sapien
ctccatcgtagccctaggcgcttgg

SEQ ID NO: 240601 - DNA, 25 bp, Homo sapien
atcgtagccctaggcgcttggacat

SEQ ID NO: 240602 - DNA, 25 bp, Homo sapien
tccatcgtagccctaggcgcttgga

SEQ ID NO: 240603 - DNA, 25 bp, Homo sapien
catcgtagccctaggcgcttggaca

SEQ ID NO: 240604 - DNA, 25 bp, Homo sapien
cttccctactgcccagtggaaatcc

SEQ ID NO: 240605 - DNA, 25 bp, Homo sapien
ccttccctactgcccagtggaaatc

SEQ ID NO: 240606 - DNA, 25 bp, Homo sapien
ttccctactgcccagtggaaatcca

SEQ ID NO: 240607 - DNA, 25 bp, Homo sapien
tggcagcaattcccaccaccttccc

SEQ ID NO: 240608 - DNA, 25 bp, Homo sapien
gtccctctcatgtagctgtgtcccc

SEQ ID NO: 240609 - DNA, 25 bp, Homo sapien
agcagccatttttctcgaattgtcc

SEQ ID NO: 240610 - DNA, 25 bp, Homo sapien
ttgtccctctcatgtagctgtgtcc

SEQ ID NO: 240611 - DNA, 25 bp, Homo sapien
cagccatttttctcgaattgtccct

SEQ ID NO: 240612 - DNA, 25 bp, Homo sapien
aagccctctgtccagatacttagca

SEQ ID NO: 240613 - DNA, 25 bp, Homo sapien
gccctctgtccagatacttagcaga

SEQ ID NO: 240614 - DNA, 25 bp, Homo sapien
gatacttagcagatccctccactct

SEQ ID NO: 240615 - DNA, 25 bp, Homo sapien
tgtccagatacttagcagatccctc

SEQ ID NO: 240616 - DNA, 25 bp, Homo sapien
tttcttcactatcataaggcagccc

SEQ ID NO: 240617 - DNA, 25 bp, Homo sapien
tcttcactatcataaggcagcccct

SEQ ID NO: 240618 - DNA, 25 bp, Homo sapien
ctatcataaggcagcccctgggtcc

SEQ ID NO: 240619 - DNA, 25 bp, Homo sapien
tcactatcataaggcagcccctggg

SEQ ID NO: 240620 - DNA, 25 bp, Homo sapien
cctttgcattcaggtggtgtccgaa

SEQ ID NO: 240621 - DNA, 25 bp, Homo sapien
tttgcattcaggtggtgtccgaacc

SEQ ID NO: 240622 - DNA, 25 bp, Homo sapien
ttgcattcaggtggtgtccgaacca

SEQ ID NO: 240623 - DNA, 25 bp, Homo sapien
ggacctttgcattcaggtggtgtcc

SEQ ID NO: 240624 - DNA, 25 bp, Homo sapien
tcaacatgtattgtacgttgtacat

SEQ ID NO: 240625 - DNA, 25 bp, Homo sapien
ttaatcaacatgtattgtacgttgt

SEQ ID NO: 240626 - DNA, 25 bp, Homo sapien
ggaataatacactttaatcaacatg

SEQ ID NO: 240627 - DNA, 25 bp, Homo sapien
gcactggaataatacactttaatca

SEQ ID NO: 240628 - DNA, 25 bp, Homo sapien
aaagcctctggcgtaattttctaat

SEQ ID NO: 240629 - DNA, 25 bp, Homo sapien
agaaggaccgtctgctctgaggtga

SEQ ID NO: 240630 - DNA, 25 bp, Homo sapien
agcctctggcgtaattttctaatac

SEQ ID NO: 240631 - DNA, 25 bp, Homo sapien
agcagaagaaggaccgtctgctctg

SEQ ID NO: 240632 - DNA, 25 bp, Homo sapien
aggaagaactgcaaagaggatgaga

SEQ ID NO: 240633 - DNA, 25 bp, Homo sapien
cagcagcaaatgagagcaagcgata

SEQ ID NO: 240634 - DNA, 25 bp, Homo sapien
aaatgagagcaagcgataaggaaga

SEQ ID NO: 240635 - DNA, 25 bp, Homo sapien
cagcaaatgagagcaagcgataagg

SEQ ID NO: 240636 - DNA, 25 bp, Homo sapien
gcaaatgagagcaagcgataaggaa

SEQ ID NO: 240637 - DNA, 25 bp, Homo sapien
agcagcatcttagaggtaaccccag

SEQ ID NO: 240638 - DNA, 25 bp, Homo sapien
aggatctcggctccgccttcatctg

SEQ ID NO: 240639 - DNA, 25 bp, Homo sapien
agtcttaacttgtcggcctctgtcc

SEQ ID NO: 240640 - DNA, 25 bp, Homo sapien
gataatccgagcaaagtccagtctt

SEQ ID NO: 240641 - DNA, 25 bp, Homo sapien
tgtgatgcttgatctttgcttggtc

SEQ ID NO: 240642 - DNA, 25 bp, Homo sapien
cctccagctgtctcaaggggtgcat

SEQ ID NO: 240643 - DNA, 25 bp, Homo sapien
cttctggaacatggcttgtgatgct

SEQ ID NO: 240644 - DNA, 25 bp, Homo sapien
tggcttgtgatgcttgatctttgct

SEQ ID NO: 240645 - DNA, 25 bp, Homo sapien
cagctgcctacggaccactgactgg

SEQ ID NO: 240646 - DNA, 25 bp, Homo sapien
agcagctgcctacggaccactgact

SEQ ID NO: 240647 - DNA, 25 bp, Homo sapien
tgcagcagctgcctacggaccactg

SEQ ID NO: 240648 - DNA, 25 bp, Homo sapien
agctgcctacggaccactgactggg

SEQ ID NO: 240649 - DNA, 25 bp, Homo sapien
tgcacacaagtccttcacgtcaaac

SEQ ID NO: 240650 - DNA, 25 bp, Homo sapien
tcaaactgcttgaaaaactcgacag

SEQ ID NO: 240651 - DNA, 25 bp, Homo sapien
gcaacatcggagatgaggtgcttga

SEQ ID NO: 240652 - DNA, 25 bp, Homo sapien
agttttcaagattacacctccataa

SEQ ID NO: 240653 - DNA, 25 bp, Homo sapien
gcccttggtgaacattggccatcac

SEQ ID NO: 240654 - DNA, 25 bp, Homo sapien
gttgagcccttggtgaacattggcc

SEQ ID NO: 240655 - DNA, 25 bp, Homo sapien
tgagcccttggtgaacattggccat

SEQ ID NO: 240656 - DNA, 25 bp, Homo sapien
gagcccttggtgaacattggccatc

SEQ ID NO: 240657 - DNA, 25 bp, Homo sapien
gagcccctgtgaacatcggacatca

SEQ ID NO: 240658 - DNA, 25 bp, Homo sapien
ttgagcccctgtgaacatcggacat

SEQ ID NO: 240659 - DNA, 25 bp, Homo sapien
ggttgagcccctgtgaacatcggac

SEQ ID NO: 240660 - DNA, 25 bp, Homo sapien
tggttgagcccctgtgaacatcgga

SEQ ID NO: 240661 - DNA, 25 bp, Homo sapien
tacagtagggttaaatgaggaaatg

SEQ ID NO: 240662 - DNA, 25 bp, Homo sapien
tattagccaagttgcctggaacagt

SEQ ID NO: 240663 - DNA, 25 bp, Homo sapien
caagggttccgtcaatgtttgtgga

SEQ ID NO: 240664 - DNA, 25 bp, Homo sapien
tggcctctgaggattacagtagggt

SEQ ID NO: 240665 - DNA, 25 bp, Homo sapien
gtgggcttggcgaggaccggataac

SEQ ID NO: 240666 - DNA, 25 bp, Homo sapien
tgggcttggcgaggaccggataacc

SEQ ID NO: 240667 - DNA, 25 bp, Homo sapien
aggtgggcttggcgaggaccggata

SEQ ID NO: 240668 - DNA, 25 bp, Homo sapien
ggtgggcttggcgaggaccggataa

SEQ ID NO: 240669 - DNA, 25 bp, Homo sapien
cttcgccagtagtcacggagcaggg

SEQ ID NO: 240670 - DNA, 25 bp, Homo sapien
tcgccagtagtcacggagcagggac

SEQ ID NO: 240671 - DNA, 25 bp, Homo sapien
gacctagcatcctcccagggagact

SEQ ID NO: 240672 - DNA, 25 bp, Homo sapien
gggtccacaggggacctagcatcct

SEQ ID NO: 240673 - DNA, 25 bp, Homo sapien
gaggcagacagcctgattgtcatca

SEQ ID NO: 240674 - DNA, 25 bp, Homo sapien
ctctctagggagacgtgcctgcagg

SEQ ID NO: 240675 - DNA, 25 bp, Homo sapien
gagctcactaccagctctgctgact

SEQ ID NO: 240676 - DNA, 25 bp, Homo sapien
ggcgacaagtcgcttaacctccaaa

SEQ ID NO: 240677 - DNA, 25 bp, Homo sapien
actgcaggtcacaccatttccccat

SEQ ID NO: 240678 - DNA, 25 bp, Homo sapien
tcaaatcatgaattggcaactgcag

SEQ ID NO: 240679 - DNA, 25 bp, Homo sapien
catgaattggcaactgcaggtcaca

SEQ ID NO: 240680 - DNA, 25 bp, Homo sapien
agccatcaaatcatgaattggcaac

SEQ ID NO: 240681 - DNA, 25 bp, Homo sapien
ggcatctggctacataggctttgga

SEQ ID NO: 240682 - DNA, 25 bp, Homo sapien
cccagggttggattgctgattcagc

SEQ ID NO: 240683 - DNA, 25 bp, Homo sapien
gtatactaagaatggatatccagca

SEQ ID NO: 240684 - DNA, 25 bp, Homo sapien
tagtctcattgctactctacctgga

SEQ ID NO: 240685 - DNA, 25 bp, Homo sapien
tccctacatcccatgaagtaagaca

SEQ ID NO: 240686 - DNA, 25 bp, Homo sapien
tgtgaagcttcagaatcgaccctct

SEQ ID NO: 240687 - DNA, 25 bp, Homo sapien
aattctatgttttcaccttggcctt

SEQ ID NO: 240688 - DNA, 25 bp, Homo sapien
tgactggtaattgcatcagatgttt

SEQ ID NO: 240689 - DNA, 25 bp, Homo sapien
tacggttagcttcaattgaccttga

SEQ ID NO: 240690 - DNA, 25 bp, Homo sapien
aaagaacggctaatatttcatgagg

SEQ ID NO: 240691 - DNA, 25 bp, Homo sapien
gaggtgacctcttcatcgatgcttg

SEQ ID NO: 240692 - DNA, 25 bp, Homo sapien
gataactagtccaacagaggatcca

SEQ ID NO: 240693 - DNA, 25 bp, Homo sapien
ccaagggcaagtttatctgccccac

SEQ ID NO: 240694 - DNA, 25 bp, Homo sapien
cccaagggcaagtttatctgcccca

SEQ ID NO: 240695 - DNA, 25 bp, Homo sapien
gcccaagggcaagtttatctgcccc

SEQ ID NO: 240696 - DNA, 25 bp, Homo sapien
ccagacaccaaggttcagagacctc

SEQ ID NO: 240697 - DNA, 25 bp, Homo sapien
tcttttctcagagaccggaagcaac

SEQ ID NO: 240698 - DNA, 25 bp, Homo sapien
agccgggatgccagctgaagtttcc

SEQ ID NO: 240699 - DNA, 25 bp, Homo sapien
ctcagagaccggaagcaactggacc

SEQ ID NO: 240700 - DNA, 25 bp, Homo sapien
ctacagaagtattggtttcactgga

SEQ ID NO: 240701 - DNA, 25 bp, Homo sapien
agtattggtttcactggaattatac

SEQ ID NO: 240702 - DNA, 25 bp, Homo sapien
cagaagtattggtttcactggaatt

SEQ ID NO: 240703 - DNA, 25 bp, Homo sapien
gaagtattggtttcactggaattat

SEQ ID NO: 240704 - DNA, 25 bp, Homo sapien
cagtgcttccgggtaattctttgat

SEQ ID NO: 240705 - DNA, 25 bp, Homo sapien
tgatgataggcttgtccagatccac

SEQ ID NO: 240706 - DNA, 25 bp, Homo sapien
ctttgatgataggcttgtccagatc

SEQ ID NO: 240707 - DNA, 25 bp, Homo sapien
gtgcttccgggtaattctttgatga

SEQ ID NO: 240708 - DNA, 25 bp, Homo sapien
ttgaaggcctgggaactagcacagc

SEQ ID NO: 240709 - DNA, 25 bp, Homo sapien
tactggaaagattaaagattttgct

SEQ ID NO: 240710 - DNA, 25 bp, Homo sapien
gcacagcgactagctattgaaataa

SEQ ID NO: 240711 - DNA, 25 bp, Homo sapien
aagaaagaatcacacgctatgcgct

SEQ ID NO: 240712 - DNA, 25 bp, Homo sapien
aaaggctttgtctaaaggcagggag

SEQ ID NO: 240713 - DNA, 25 bp, Homo sapien
gtgttgatgggtcaaaggctttgtc

SEQ ID NO: 240714 - DNA, 25 bp, Homo sapien
gtcaaaggctttgtctaaaggcagg

SEQ ID NO: 240715 - DNA, 25 bp, Homo sapien
tgttgatgggtcaaaggctttgtct

SEQ ID NO: 240716 - DNA, 25 bp, Homo sapien
caatggcacaagcattccacacggg

SEQ ID NO: 240717 - DNA, 25 bp, Homo sapien
gagctgactcgtagtagccgcagca

SEQ ID NO: 240718 - DNA, 25 bp, Homo sapien
cacacggggtccactgagctgactc

SEQ ID NO: 240719 - DNA, 25 bp, Homo sapien
ccagcaatggcacaagcattccaca

SEQ ID NO: 240720 - DNA, 25 bp, Homo sapien
caaaaggagggctattggtgcgcac

SEQ ID NO: 240721 - DNA, 25 bp, Homo sapien
ggagtccaagaatggccaccctcta

SEQ ID NO: 240722 - DNA, 25 bp, Homo sapien
gcacagctgacttaggagcaccagt

SEQ ID NO: 240723 - DNA, 25 bp, Homo sapien
taggtgcaaggaatagaggctgaac

SEQ ID NO: 240724 - DNA, 25 bp, Homo sapien
caccatagacgcccatcgtcactct

SEQ ID NO: 240725 - DNA, 25 bp, Homo sapien
taaacaccatagacgcccatcgtca

SEQ ID NO: 240726 - DNA, 25 bp, Homo sapien
ttaaacaccatagacgcccatcgtc

SEQ ID NO: 240727 - DNA, 25 bp, Homo sapien
catagacgcccatcgtcactcttcc

SEQ ID NO: 240728 - DNA, 25 bp, Homo sapien
cagagagtccccaacgtatgatggc

SEQ ID NO: 240729 - DNA, 25 bp, Homo sapien
aatttgctgacggacgactgacagg

SEQ ID NO: 240730 - DNA, 25 bp, Homo sapien
gactgacaggatgcaagactacgag

SEQ ID NO: 240731 - DNA, 25 bp, Homo sapien
aaaccatactttgaggacctagccg

SEQ ID NO: 240732 - DNA, 25 bp, Homo sapien
ttcggtctcacattgcaatcacagg

SEQ ID NO: 240733 - DNA, 25 bp, Homo sapien
acagggtggcacacagggctctaaa

SEQ ID NO: 240734 - DNA, 25 bp, Homo sapien
gaactgcgctcgatctggattccag

SEQ ID NO: 240735 - DNA, 25 bp, Homo sapien
tcatgttgtcaaggcagggtatcag

SEQ ID NO: 240736 - DNA, 25 bp, Homo sapien
gaatcaagagaatcccgtaacactg

SEQ ID NO: 240737 - DNA, 25 bp, Homo sapien
acagttttctgtcggtgcactcgca

SEQ ID NO: 240738 - DNA, 25 bp, Homo sapien
tgggaaatatgagacacctctgctc

SEQ ID NO: 240739 - DNA, 25 bp, Homo sapien
gaacccctgagaatgtatgacctaa

SEQ ID NO: 240740 - DNA, 25 bp, Homo sapien
catcagtgggaactacctggcagga

SEQ ID NO: 240741 - DNA, 25 bp, Homo sapien
tactatcaggtgcaacagcgaccgg

SEQ ID NO: 240742 - DNA, 25 bp, Homo sapien
ggcactactgcacacacggagagat

SEQ ID NO: 240743 - DNA, 25 bp, Homo sapien
tatcaactactgcaggactggcact

SEQ ID NO: 240744 - DNA, 25 bp, Homo sapien
ttattctgttatctatcctgttatc

SEQ ID NO: 240745 - DNA, 25 bp, Homo sapien
ttatcaaccaaactttaaattctgc

SEQ ID NO: 240746 - DNA, 25 bp, Homo sapien
ctgttatctatcctgttatcaacca

SEQ ID NO: 240747 - DNA, 25 bp, Homo sapien
tatcaaccaaactttaaattctgcc

SEQ ID NO: 240748 - DNA, 25 bp, Homo sapien
tagctttgaggcttcggagggctct

SEQ ID NO: 240749 - DNA, 25 bp, Homo sapien
gggaacctgaggttgattagctttg

SEQ ID NO: 240750 - DNA, 25 bp, Homo sapien
gcttcggagggctcttcttgctgct

SEQ ID NO: 240751 - DNA, 25 bp, Homo sapien
ggttgattagctttgaggcttcgga

SEQ ID NO: 240752 - DNA, 25 bp, Homo sapien
ctttcctactacttccacagtgact

SEQ ID NO: 240753 - DNA, 25 bp, Homo sapien
cctactacttccacagtgactctga

SEQ ID NO: 240754 - DNA, 25 bp, Homo sapien
tcccgtcgtaagttctctcagccgg

SEQ ID NO: 240755 - DNA, 25 bp, Homo sapien
ctgaccttcccgtcgtaagttctct

SEQ ID NO: 240756 - DNA, 25 bp, Homo sapien
cagggctgccgtctagtctttatta

SEQ ID NO: 240757 - DNA, 25 bp, Homo sapien
gccaggagtcccatgtataagctga

SEQ ID NO: 240758 - DNA, 25 bp, Homo sapien
tataagctgacaccacacaaaggaa

SEQ ID NO: 240759 - DNA, 25 bp, Homo sapien
cacaaaggaaacacgcgttacgact

SEQ ID NO: 240760 - DNA, 25 bp, Homo sapien
tcaagcaattctcgcacaggggaac

SEQ ID NO: 240761 - DNA, 25 bp, Homo sapien
aatttggcagtttctggttccattt

SEQ ID NO: 240762 - DNA, 25 bp, Homo sapien
caattctcgcacaggggaacggggt

SEQ ID NO: 240763 - DNA, 25 bp, Homo sapien
ggcagtttctggttccatttcaagc

SEQ ID NO: 240764 - DNA, 25 bp, Homo sapien
ctttggaacttcaatatcctcttct

SEQ ID NO: 240765 - DNA, 25 bp, Homo sapien
tggccgcatcatgggatagtacacc

SEQ ID NO: 240766 - DNA, 25 bp, Homo sapien
tggcaccagcaagcgactcaaaaat

SEQ ID NO: 240767 - DNA, 25 bp, Homo sapien
cactatccatgtaaatggcaccagc

SEQ ID NO: 240768 - DNA, 25 bp, Homo sapien
gccacttttacaggcagtccacaga

SEQ ID NO: 240769 - DNA, 25 bp, Homo sapien
gcctactatattgtaatagtaaaac

SEQ ID NO: 240770 - DNA, 25 bp, Homo sapien
ttaaaacagttctactccctagctg

SEQ ID NO: 240771 - DNA, 25 bp, Homo sapien
caaattcactcgtaatcaaagaact

SEQ ID NO: 240772 - DNA, 25 bp, Homo sapien
gtgttgactagcgtgtggcccctga

SEQ ID NO: 240773 - DNA, 25 bp, Homo sapien
taattactcggccataaagaagcgt

SEQ ID NO: 240774 - DNA, 25 bp, Homo sapien
gaagcgtttaaatcaatcagccacg

SEQ ID NO: 240775 - DNA, 25 bp, Homo sapien
catcaatacacggaaagtcagccac

SEQ ID NO: 240776 - DNA, 25 bp, Homo sapien
tggtagtcgtactttacagccagcg

SEQ ID NO: 240777 - DNA, 25 bp, Homo sapien
caggagagacagctttgaagtactt

SEQ ID NO: 240778 - DNA, 25 bp, Homo sapien
tgctgccgcgggtcttcataaaggt

SEQ ID NO: 240779 - DNA, 25 bp, Homo sapien
gtagtccaaaatcgcatctcccagg

SEQ ID NO: 240780 - DNA, 25 bp, Homo sapien
cactgatgagggtatatgatagcca

SEQ ID NO: 240781 - DNA, 25 bp, Homo sapien
aaatgaagtctggtcgtgggctcct

SEQ ID NO: 240782 - DNA, 25 bp, Homo sapien
catgcatagatcacttttacaaggc

SEQ ID NO: 240783 - DNA, 25 bp, Homo sapien
tacgtgctccccaaataacaaggaa

SEQ ID NO: 240784 - DNA, 25 bp, Homo sapien
aatggactgctttcccgtgtcaaca

SEQ ID NO: 240785 - DNA, 25 bp, Homo sapien
ttaattaccgggagcaccttcagcc

SEQ ID NO: 240786 - DNA, 25 bp, Homo sapien
tacagaagagcgtgaactggccaca

SEQ ID NO: 240787 - DNA, 25 bp, Homo sapien
gaaattctcccgagtagggcacagg

SEQ ID NO: 240788 - DNA, 25 bp, Homo sapien
aaaagctcctgaccccattaacata

SEQ ID NO: 240789 - DNA, 25 bp, Homo sapien
caaaagctcctgaccccattaacat

SEQ ID NO: 240790 - DNA, 25 bp, Homo sapien
cctgaccccattaacatattatcta

SEQ ID NO: 240791 - DNA, 25 bp, Homo sapien
gctcctgaccccattaacatattat

SEQ ID NO: 240792 - DNA, 25 bp, Homo sapien
gccattcgccagcatgcagtctttt

SEQ ID NO: 240793 - DNA, 25 bp, Homo sapien
cctcatccagtttgccattcgccag

SEQ ID NO: 240794 - DNA, 25 bp, Homo sapien
cagtttgccattcgccagcatgcag

SEQ ID NO: 240795 - DNA, 25 bp, Homo sapien
atccagtttgccattcgccagcatg

SEQ ID NO: 240796 - DNA, 25 bp, Homo sapien
caaaagatctttgctaattccaatt

SEQ ID NO: 240797 - DNA, 25 bp, Homo sapien
aaagcttatttgtgagtgacaacct

SEQ ID NO: 240798 - DNA, 25 bp, Homo sapien
caaccttaataatgggctagatttc

SEQ ID NO: 240799 - DNA, 25 bp, Homo sapien
cagtaatgatgtaacttctttgcaa

SEQ ID NO: 240800 - DNA, 25 bp, Homo sapien
gaacatttcctgctaacaatcttag

SEQ ID NO: 240801 - DNA, 25 bp, Homo sapien
ggcagacctcaaggaacatttcctg

SEQ ID NO: 240802 - DNA, 25 bp, Homo sapien
caaaagcaactgtagcggcagacct

SEQ ID NO: 240803 - DNA, 25 bp, Homo sapien
gaataaggaacaccaaaagcaactg

SEQ ID NO: 240804 - DNA, 25 bp, Homo sapien
caaggtagggagaatggcaatgcaa

SEQ ID NO: 240805 - DNA, 25 bp, Homo sapien
gatactctcgtctattaagaggcgt

SEQ ID NO: 240806 - DNA, 25 bp, Homo sapien
taagaggcgttttagcatgcaaagg

SEQ ID NO: 240807 - DNA, 25 bp, Homo sapien
cataagccaaaagtggcagagcaca

SEQ ID NO: 240808 - DNA, 25 bp, Homo sapien
ttttccaaggcgatacagattacag

SEQ ID NO: 240809 - DNA, 25 bp, Homo sapien
tttactacataaccaggaggaagcc

SEQ ID NO: 240810 - DNA, 25 bp, Homo sapien
caccatgcggctgggtagtcccttc

SEQ ID NO: 240811 - DNA, 25 bp, Homo sapien
tcacagggggatcaaatattgacac

SEQ ID NO: 240812 - DNA, 25 bp, Homo sapien
tccatcactagcgtttgacagagtc

SEQ ID NO: 240813 - DNA, 25 bp, Homo sapien
ggagtcgccaagcatttcaagccgc

SEQ ID NO: 240814 - DNA, 25 bp, Homo sapien
tctcatatatgaaaggcggccctca

SEQ ID NO: 240815 - DNA, 25 bp, Homo sapien
gagtacccaatagaagggctctgct

SEQ ID NO: 240816 - DNA, 25 bp, Homo sapien
tgaatagtgtctgtcgtaccaggca

SEQ ID NO: 240817 - DNA, 25 bp, Homo sapien
aacttcaacgtggagcttaccaggg

SEQ ID NO: 240818 - DNA, 25 bp, Homo sapien
ggcattacggccatcacaggacttc

SEQ ID NO: 240819 - DNA, 25 bp, Homo sapien
gagagtacattcatcgctgggctgg

SEQ ID NO: 240820 - DNA, 25 bp, Homo sapien
aattgagatgaaagatttgctgtca

SEQ ID NO: 240821 - DNA, 25 bp, Homo sapien
ttgagatgaaagatttgctgtcaat

SEQ ID NO: 240822 - DNA, 25 bp, Homo sapien
gagatgaaagatttgctgtcaatag

SEQ ID NO: 240823 - DNA, 25 bp, Homo sapien
aaattgagatgaaagatttgctgtc

SEQ ID NO: 240824 - DNA, 25 bp, Homo sapien
cagtgaaggcgataaagtatgctgg

SEQ ID NO: 240825 - DNA, 25 bp, Homo sapien
aggaagtgatctgactcccacgcca

SEQ ID NO: 240826 - DNA, 25 bp, Homo sapien
acgccagcatcgctggcagtctggg

SEQ ID NO: 240827 - DNA, 25 bp, Homo sapien
tgctggaattggatgtatagcacag

SEQ ID NO: 240828 - DNA, 25 bp, Homo sapien
cactgcttaaaggaagcgctttccc

SEQ ID NO: 240829 - DNA, 25 bp, Homo sapien
tctgattcaaatgtcgaggtgtcaa

SEQ ID NO: 240830 - DNA, 25 bp, Homo sapien
aaggaagcgctttccccttctgatt

SEQ ID NO: 240831 - DNA, 25 bp, Homo sapien
caaatgtcgaggtgtcaaaagatta

SEQ ID NO: 240832 - DNA, 25 bp, Homo sapien
tggggtaagatcagtgtacacatca

SEQ ID NO: 240833 - DNA, 25 bp, Homo sapien
gagattggttaggtcaaggttgtac

SEQ ID NO: 240834 - DNA, 25 bp, Homo sapien
ttgaagatgtgtggtccacatccag

SEQ ID NO: 240835 - DNA, 25 bp, Homo sapien
gtacacatcagctacataaaatcga

SEQ ID NO: 240836 - DNA, 25 bp, Homo sapien
tatactggagagaacgggtcgacct

SEQ ID NO: 240837 - DNA, 25 bp, Homo sapien
taagactctggagactaaaaggatg

SEQ ID NO: 240838 - DNA, 25 bp, Homo sapien
aactgcctgtattgtattgccccaa

SEQ ID NO: 240839 - DNA, 25 bp, Homo sapien
cacagcttactgcacagcctagaaa

SEQ ID NO: 240840 - DNA, 25 bp, Homo sapien
taacggcatcttggtaatcttctaa

SEQ ID NO: 240841 - DNA, 25 bp, Homo sapien
cttggaatgataacggcatcttggt

SEQ ID NO: 240842 - DNA, 25 bp, Homo sapien
gggaatgcctatgcgagcttcagac

SEQ ID NO: 240843 - DNA, 25 bp, Homo sapien
tgggaatgcctatgcgagcttcaga

SEQ ID NO: 240844 - DNA, 25 bp, Homo sapien
caacattaagaggtagaacacagta

SEQ ID NO: 240845 - DNA, 25 bp, Homo sapien
tctagtgcaggtttttcaagccgaa

SEQ ID NO: 240846 - DNA, 25 bp, Homo sapien
tcaactcaatggatatggtaacctc

SEQ ID NO: 240847 - DNA, 25 bp, Homo sapien
gaacacagtatgctgaatcagcgtc

SEQ ID NO: 240848 - DNA, 25 bp, Homo sapien
ttttgacataagtactcattatgaa

SEQ ID NO: 240849 - DNA, 25 bp, Homo sapien
tgggtttggccgtcagtattccaaa

SEQ ID NO: 240850 - DNA, 25 bp, Homo sapien
gagcttccgccttctaaagttgagt

SEQ ID NO: 240851 - DNA, 25 bp, Homo sapien
agcatcttgtggtatcttcaggagg

SEQ ID NO: 240852 - DNA, 25 bp, Homo sapien
tcatcaggtaaaggtgtagttaaaa

SEQ ID NO: 240853 - DNA, 25 bp, Homo sapien
caggtaacagggctgatcaggtctg

SEQ ID NO: 240854 - DNA, 25 bp, Homo sapien
ggctgatcaggtctgggataactat

SEQ ID NO: 240855 - DNA, 25 bp, Homo sapien
atacaggtaacagggctgatcaggt

SEQ ID NO: 240856 - DNA, 25 bp, Homo sapien
ctgggataactatccctcaaacact

SEQ ID NO: 240857 - DNA, 25 bp, Homo sapien
gaaaggaaaattaagcgtcatgctc

SEQ ID NO: 240858 - DNA, 25 bp, Homo sapien
aaattaagcgtcatgctcaagcata

SEQ ID NO: 240859 - DNA, 25 bp, Homo sapien
catgctcaagcatattagcctcttt

SEQ ID NO: 240860 - DNA, 25 bp, Homo sapien
gcgtcatgctcaagcatattagcct

SEQ ID NO: 240861 - DNA, 25 bp, Homo sapien
tcacttaatgtcttcggcaggttct

SEQ ID NO: 240862 - DNA, 25 bp, Homo sapien
taggctaacatacaggcacagcagt

SEQ ID NO: 240863 - DNA, 25 bp, Homo sapien
ggtcagtcacggtccaataacaggt

SEQ ID NO: 240864 - DNA, 25 bp, Homo sapien
tgcagcctccatggtttcagtaacc

SEQ ID NO: 240865 - DNA, 25 bp, Homo sapien
tgccttcgtttcgtggaacctggtc

SEQ ID NO: 240866 - DNA, 25 bp, Homo sapien
cgtttcgtggaacctggtcttcctg

SEQ ID NO: 240867 - DNA, 25 bp, Homo sapien
cctcttcatatttaacagtctcttt

SEQ ID NO: 240868 - DNA, 25 bp, Homo sapien
gcttttgggtagcactgccttcgtt

SEQ ID NO: 240869 - DNA, 25 bp, Homo sapien
cagcaaatgagagctacaactcttt

SEQ ID NO: 240870 - DNA, 25 bp, Homo sapien
aatgagagctacaactctttcagcc

SEQ ID NO: 240871 - DNA, 25 bp, Homo sapien
actctttcagccaatcgtacacagc

SEQ ID NO: 240872 - DNA, 25 bp, Homo sapien
aatcgtacacagctcattggtggac

SEQ ID NO: 240873 - DNA, 25 bp, Homo sapien
accatcaggcaactctcgggttctg

SEQ ID NO: 240874 - DNA, 25 bp, Homo sapien
ggagctagatgagtaaacggatcac

SEQ ID NO: 240875 - DNA, 25 bp, Homo sapien
tcgggttctgcatttaggagctaga

SEQ ID NO: 240876 - DNA, 25 bp, Homo sapien
gatcacttggtaatctagcacagta

SEQ ID NO: 240877 - DNA, 25 bp, Homo sapien
ttaaactgtgcaacattcccaggtt

SEQ ID NO: 240878 - DNA, 25 bp, Homo sapien
attcccaggttttccacacaaatga

SEQ ID NO: 240879 - DNA, 25 bp, Homo sapien
aactgtgcaacattcccaggttttc

SEQ ID NO: 240880 - DNA, 25 bp, Homo sapien
ttttccacacaaatgatatgatgcc

SEQ ID NO: 240881 - DNA, 25 bp, Homo sapien
caggcctcaacacatatggtgggaa

SEQ ID NO: 240882 - DNA, 25 bp, Homo sapien
tgtcagtctcaccagtatcaaccga

SEQ ID NO: 240883 - DNA, 25 bp, Homo sapien
tatcaaccgacttggaacacttgtt

SEQ ID NO: 240884 - DNA, 25 bp, Homo sapien
tgttgattgtgactcgtggaccacc

SEQ ID NO: 240885 - DNA, 25 bp, Homo sapien
aacataggatcgatattctgtgggc

SEQ ID NO: 240886 - DNA, 25 bp, Homo sapien
tacttgttgcaataagcaggttggt

SEQ ID NO: 240887 - DNA, 25 bp, Homo sapien
gcaggttggtctcatgtgctcgaaa

SEQ ID NO: 240888 - DNA, 25 bp, Homo sapien
tctgtgggcaaatcaaaacgaacca

SEQ ID NO: 240889 - DNA, 25 bp, Homo sapien
tgctactgatataagccagctctgg

SEQ ID NO: 240890 - DNA, 25 bp, Homo sapien
ccatgtccagttatgaaattgctac

SEQ ID NO: 240891 - DNA, 25 bp, Homo sapien
gcttccatctgtttgttgcgaggct

SEQ ID NO: 240892 - DNA, 25 bp, Homo sapien
gctgattcttcccaatgccatgtcc

SEQ ID NO: 240893 - DNA, 25 bp, Homo sapien
catgacataggtaaattctggcacc

SEQ ID NO: 240894 - DNA, 25 bp, Homo sapien
gctaactaatgcagacaaccataag

SEQ ID NO: 240895 - DNA, 25 bp, Homo sapien
ccatcagaggcagttttgtagaatt

SEQ ID NO: 240896 - DNA, 25 bp, Homo sapien
aattactgtcaaactgctctaagag

SEQ ID NO: 240897 - DNA, 25 bp, Homo sapien
ccgactgattctggataaacctttt

SEQ ID NO: 240898 - DNA, 25 bp, Homo sapien
ttatataatcctaaatggagacggg

SEQ ID NO: 240899 - DNA, 25 bp, Homo sapien
gcttatatgcccatgaaactattca

SEQ ID NO: 240900 - DNA, 25 bp, Homo sapien
gctgctcataaagtcaaccctcaga

SEQ ID NO: 240901 - DNA, 25 bp, Homo sapien
ccaattaatggatctcatagaaaag

SEQ ID NO: 240902 - DNA, 25 bp, Homo sapien
agaaaagttagggatcaactgtggc

SEQ ID NO: 240903 - DNA, 25 bp, Homo sapien
gttagggatcaactgtggccaatta

SEQ ID NO: 240904 - DNA, 25 bp, Homo sapien
actgtggccaattaatggatctcat

SEQ ID NO: 240905 - DNA, 25 bp, Homo sapien
taggagttacaaatttcaggtcaag

SEQ ID NO: 240906 - DNA, 25 bp, Homo sapien
taccaatacggcacgacagtctgat

SEQ ID NO: 240907 - DNA, 25 bp, Homo sapien
tatatttgcgtaagatttcgagcag

SEQ ID NO: 240908 - DNA, 25 bp, Homo sapien
cagctactttatctgcacaccaggg

SEQ ID NO: 240909 - DNA, 25 bp, Homo sapien
tcttttgaatgtacagatatattac

SEQ ID NO: 240910 - DNA, 25 bp, Homo sapien
taaatggtccacaatccaccacaat

SEQ ID NO: 240911 - DNA, 25 bp, Homo sapien
agcccacttctgtcagtaaatggtc

SEQ ID NO: 240912 - DNA, 25 bp, Homo sapien
tgtcagtaaatggtccacaatccac

SEQ ID NO: 240913 - DNA, 25 bp, Homo sapien
taaaatggaagcagttagtcccaaa

SEQ ID NO: 240914 - DNA, 25 bp, Homo sapien
gaccaccaggtcagttgcagtttca

SEQ ID NO: 240915 - DNA, 25 bp, Homo sapien
caccaggtcagttgcagtttcagca

SEQ ID NO: 240916 - DNA, 25 bp, Homo sapien
gtcccaaaatgcgaggacatgatgg

SEQ ID NO: 240917 - DNA, 25 bp, Homo sapien
cgacatagcaagtcataatgagaac

SEQ ID NO: 240918 - DNA, 25 bp, Homo sapien
taatgtctgacagtgataagtaacc

SEQ ID NO: 240919 - DNA, 25 bp, Homo sapien
tcaaaacattcaaggcgacatagca

SEQ ID NO: 240920 - DNA, 25 bp, Homo sapien
ctaggattgcaagatgacactcatc

SEQ ID NO: 240921 - DNA, 25 bp, Homo sapien
agtacctaggactactacgccacca

SEQ ID NO: 240922 - DNA, 25 bp, Homo sapien
gtacctaggactactacgccaccac

SEQ ID NO: 240923 - DNA, 25 bp, Homo sapien
tacttctaggtttgagtattcccca

SEQ ID NO: 240924 - DNA, 25 bp, Homo sapien
ccttgagatctgaatgagttctgac

SEQ ID NO: 240925 - DNA, 25 bp, Homo sapien
ggtgcttagtaaactcttggttcca

SEQ ID NO: 240926 - DNA, 25 bp, Homo sapien
tgtccaagatgcatttacttctagg

SEQ ID NO: 240927 - DNA, 25 bp, Homo sapien
ggtattatgatccagagctgcttca

SEQ ID NO: 240928 - DNA, 25 bp, Homo sapien
ttccctgagccagtgtttaaacaga

SEQ ID NO: 240929 - DNA, 25 bp, Homo sapien
ctgaagtctcccctgatctgatagg

SEQ ID NO: 240930 - DNA, 25 bp, Homo sapien
cagagttgaccaagaacaccgtcct

SEQ ID NO: 240931 - DNA, 25 bp, Homo sapien
tgagctgcaggcctgccatgctgag

SEQ ID NO: 240932 - DNA, 25 bp, Homo sapien
tatcatgaattgcttcttgttgcca

SEQ ID NO: 240933 - DNA, 25 bp, Homo sapien
gaaaggacccattggtgaggaagca

SEQ ID NO: 240934 - DNA, 25 bp, Homo sapien
tcttggcgtataaatgttatcatga

SEQ ID NO: 240935 - DNA, 25 bp, Homo sapien
tttcattgcatttttgttctagcac

SEQ ID NO: 240936 - DNA, 25 bp, Homo sapien
tgcatttttgttctagcacagctta

SEQ ID NO: 240937 - DNA, 25 bp, Homo sapien
tccagtgtttctttcattgcatttt

SEQ ID NO: 240938 - DNA, 25 bp, Homo sapien
tcatccagtgtttctttcattgcat

SEQ ID NO: 240939 - DNA, 25 bp, Homo sapien
tgctgcctaggctctagtttcttat

SEQ ID NO: 240940 - DNA, 25 bp, Homo sapien
gctgcctaggctctagtttcttatt

SEQ ID NO: 240941 - DNA, 25 bp, Homo sapien
ctgcctaggctctagtttcttattt

SEQ ID NO: 240942 - DNA, 25 bp, Homo sapien
gatccagccttaggatgaaaccagc

SEQ ID NO: 240943 - DNA, 25 bp, Homo sapien
catttgctgctgcaattacactaca

SEQ ID NO: 240944 - DNA, 25 bp, Homo sapien
gatgactcatgaaattattagtccc

SEQ ID NO: 240945 - DNA, 25 bp, Homo sapien
attggttcatgctcatccaacagca

SEQ ID NO: 240946 - DNA, 25 bp, Homo sapien
tgacttctgccgacctgtaacctta

SEQ ID NO: 240947 - DNA, 25 bp, Homo sapien
taagcaaagcactacactctgtgat

SEQ ID NO: 240948 - DNA, 25 bp, Homo sapien
gatatctagtcccaaatgtactctg

SEQ ID NO: 240949 - DNA, 25 bp, Homo sapien
ttacgttcagattattcacccagct

SEQ ID NO: 240950 - DNA, 25 bp, Homo sapien
tccacctgagtgacattaaaacctc

SEQ ID NO: 240951 - DNA, 25 bp, Homo sapien
ggagcacagctccataagaacaaga

SEQ ID NO: 240952 - DNA, 25 bp, Homo sapien
tagagactcatgaatgtccacacaa

SEQ ID NO: 240953 - DNA, 25 bp, Homo sapien
catttagtggacaataactggcccc

SEQ ID NO: 240954 - DNA, 25 bp, Homo sapien
gatagcagtttattggaaaatcaca

SEQ ID NO: 240955 - DNA, 25 bp, Homo sapien
ttgacattgtgatagcagtttattg

SEQ ID NO: 240956 - DNA, 25 bp, Homo sapien
tggaaaatcacagcatgcccaagct

SEQ ID NO: 240957 - DNA, 25 bp, Homo sapien
aaatcacagcatgcccaagcttctg

SEQ ID NO: 240958 - DNA, 25 bp, Homo sapien
ctttcagagtttccaagtctgtatt

SEQ ID NO: 240959 - DNA, 25 bp, Homo sapien
tcagagtttccaagtctgtattaat

SEQ ID NO: 240960 - DNA, 25 bp, Homo sapien
tctttcagagtttccaagtctgtat

SEQ ID NO: 240961 - DNA, 25 bp, Homo sapien
agagtttccaagtctgtattaattc

SEQ ID NO: 240962 - DNA, 25 bp, Homo sapien
tctataccgccacctagtaggatgc

SEQ ID NO: 240963 - DNA, 25 bp, Homo sapien
gatgatttccaattcagactcacct

SEQ ID NO: 240964 - DNA, 25 bp, Homo sapien
gctgtgtcaccctctagagatgatt

SEQ ID NO: 240965 - DNA, 25 bp, Homo sapien
cccaaagtgctgtagtcccaaaaga

SEQ ID NO: 240966 - DNA, 25 bp, Homo sapien
gcatccattgggaaaaaggagccac

SEQ ID NO: 240967 - DNA, 25 bp, Homo sapien
taacactgtgcaacgagtgctagaa

SEQ ID NO: 240968 - DNA, 25 bp, Homo sapien
tattaaaaggtccaggcaagagtgt

SEQ ID NO: 240969 - DNA, 25 bp, Homo sapien
taaagggaggtcaatccagagacaa

SEQ ID NO: 240970 - DNA, 25 bp, Homo sapien
attagctcaatatagtggcttgcac

SEQ ID NO: 240971 - DNA, 25 bp, Homo sapien
ggcgaaactctactgaatgtcaact

SEQ ID NO: 240972 - DNA, 25 bp, Homo sapien
agagcaagactcagcattaacaaca

SEQ ID NO: 240973 - DNA, 25 bp, Homo sapien
catcacattagtgattgaagcaagg

SEQ ID NO: 240974 - DNA, 25 bp, Homo sapien
gcgggccttcgagaaccatcggacc

SEQ ID NO: 240975 - DNA, 25 bp, Homo sapien
gccgccatttcctcgcgctcgccgt

SEQ ID NO: 240976 - DNA, 25 bp, Homo sapien
ggcgcgcgcgtcacagcccaggcct

SEQ ID NO: 240977 - DNA, 25 bp, Homo sapien
gtccccgctgtcaggttactccatt

SEQ ID NO: 240978 - DNA, 25 bp, Homo sapien
ggcgcctgcggagactgcgcagcgc

SEQ ID NO: 240979 - DNA, 25 bp, Homo sapien
gcagccagcgcacggcccgcggcaa

SEQ ID NO: 240980 - DNA, 25 bp, Homo sapien
acggcccgcggcaacggcgcacagc

SEQ ID NO: 240981 - DNA, 25 bp, Homo sapien
gccggcgcctgcggagactgcgcag

SEQ ID NO: 240982 - DNA, 25 bp, Homo sapien
gcgttagtggtgcaggggcctccgc

SEQ ID NO: 240983 - DNA, 25 bp, Homo sapien
cgtttcctcgcgttagtggtgcagg

SEQ ID NO: 240984 - DNA, 25 bp, Homo sapien
ctgcgtttcctcgcgttagtggtgc

SEQ ID NO: 240985 - DNA, 25 bp, Homo sapien
cgttagtggtgcaggggcctccgca

SEQ ID NO: 240986 - DNA, 25 bp, Homo sapien
gcggatagtatcagcaccactgtga

SEQ ID NO: 240987 - DNA, 25 bp, Homo sapien
gacatagtcaattaagccctgcaca

SEQ ID NO: 240988 - DNA, 25 bp, Homo sapien
cccagagaggtaaattcaaggcatc

SEQ ID NO: 240989 - DNA, 25 bp, Homo sapien
caaacggctccgattctgagtagaa

SEQ ID NO: 240990 - DNA, 25 bp, Homo sapien
ttttggcatgttgctccagccctgg

SEQ ID NO: 240991 - DNA, 25 bp, Homo sapien
caactgcagaacactcagctcagaa

SEQ ID NO: 240992 - DNA, 25 bp, Homo sapien
cagaaactctgataacttttgtggg

SEQ ID NO: 240993 - DNA, 25 bp, Homo sapien
tgagtctccaggcttttgacccaca

SEQ ID NO: 240994 - DNA, 25 bp, Homo sapien
gatttcccctagtgaatgcaaccag

SEQ ID NO: 240995 - DNA, 25 bp, Homo sapien
tccaggcgggctaatgatcactaac

SEQ ID NO: 240996 - DNA, 25 bp, Homo sapien
gaaactcaagttcatccagcgtgtg

SEQ ID NO: 240997 - DNA, 25 bp, Homo sapien
gaaatctcaaccagcacgcttggga

SEQ ID NO: 240998 - DNA, 25 bp, Homo sapien
cttttttattatccagacacacgta

SEQ ID NO: 240999 - DNA, 25 bp, Homo sapien
tcttttttattatccagacacacgt

SEQ ID NO: 241000 - DNA, 25 bp, Homo sapien
gtcttttttattatccagacacacg

SEQ ID NO: 241001 - DNA, 25 bp, Homo sapien
agctgtgtcagggagtcactctgcg

SEQ ID NO: 241002 - DNA, 25 bp, Homo sapien
aaatacatcatatccggctgctgga

SEQ ID NO: 241003 - DNA, 25 bp, Homo sapien
agagcagcaagcagtacaccaggag

SEQ ID NO: 241004 - DNA, 25 bp, Homo sapien
cagggagtcactctgcgggctgtgg

SEQ ID NO: 241005 - DNA, 25 bp, Homo sapien
acacagaggaaacgcagttaccaag

SEQ ID NO: 241006 - DNA, 25 bp, Homo sapien
gaggaaacgcagttaccaagcaggt

SEQ ID NO: 241007 - DNA, 25 bp, Homo sapien
gaaacacagaggaaacgcagttacc

SEQ ID NO: 241008 - DNA, 25 bp, Homo sapien
gaaacgcagttaccaagcaggttcc

SEQ ID NO: 241009 - DNA, 25 bp, Homo sapien
gaccccataggtcatctaagggatg

SEQ ID NO: 241010 - DNA, 25 bp, Homo sapien
gatgaagtgtccctaatagcagatc

SEQ ID NO: 241011 - DNA, 25 bp, Homo sapien
ttaacttggcgacagagagggcgcc

SEQ ID NO: 241012 - DNA, 25 bp, Homo sapien
ccattctgcagatggacacactgag

SEQ ID NO: 241013 - DNA, 25 bp, Homo sapien
ctatgagcatatccagcctggtgga

SEQ ID NO: 241014 - DNA, 25 bp, Homo sapien
tgtagacaactgaaaacacgactgc

SEQ ID NO: 241015 - DNA, 25 bp, Homo sapien
caggttctattttcaacgcctctat

SEQ ID NO: 241016 - DNA, 25 bp, Homo sapien
tctcataagagcaaaaaggattatt

SEQ ID NO: 241017 - DNA, 25 bp, Homo sapien
gcaactctatgacttcaacaggaat

SEQ ID NO: 241018 - DNA, 25 bp, Homo sapien
ccaattcaaatctgtggcgagtaaa

SEQ ID NO: 241019 - DNA, 25 bp, Homo sapien
cagacagaggcttccgattccagta

SEQ ID NO: 241020 - DNA, 25 bp, Homo sapien
caattcagcaacattaggccaggcc

SEQ ID NO: 241021 - DNA, 25 bp, Homo sapien
tttccctcttcatgtctgctctgat

SEQ ID NO: 241022 - DNA, 25 bp, Homo sapien
gctcagtaagcttctgagtactgta

SEQ ID NO: 241023 - DNA, 25 bp, Homo sapien
aaactgtaaaatcagctcagtaagc

SEQ ID NO: 241024 - DNA, 25 bp, Homo sapien
catcctggcatgtttgctttccctc

SEQ ID NO: 241025 - DNA, 25 bp, Homo sapien
ctggttaatattcggtttcttctgt

SEQ ID NO: 241026 - DNA, 25 bp, Homo sapien
ctgcgttcctcaactgaacatagct

SEQ ID NO: 241027 - DNA, 25 bp, Homo sapien
ggttaatattcggtttcttctgtca

SEQ ID NO: 241028 - DNA, 25 bp, Homo sapien
tcctcaactgaacatagctaaaatg

SEQ ID NO: 241029 - DNA, 25 bp, Homo sapien
ccccgcaacccaattagtaaagatg

SEQ ID NO: 241030 - DNA, 25 bp, Homo sapien
caacccaattagtaaagatgaaatc

SEQ ID NO: 241031 - DNA, 25 bp, Homo sapien
cgcaacccaattagtaaagatgaaa

SEQ ID NO: 241032 - DNA, 25 bp, Homo sapien
tacagtgaaatttataaacaaaagc

SEQ ID NO: 241033 - DNA, 25 bp, Homo sapien
taagcccctcccttgtgagtgcgag

SEQ ID NO: 241034 - DNA, 25 bp, Homo sapien
ttttaaacacacaaagccgagcatg

SEQ ID NO: 241035 - DNA, 25 bp, Homo sapien
gcatgccgggcatttctcaataccg

SEQ ID NO: 241036 - DNA, 25 bp, Homo sapien
taccgccagcgtctagatccaaaat

SEQ ID NO: 241037 - DNA, 25 bp, Homo sapien
tatccgatcggactgtgcttaatga

SEQ ID NO: 241038 - DNA, 25 bp, Homo sapien
caaaagtatagctgttgcatgccag

SEQ ID NO: 241039 - DNA, 25 bp, Homo sapien
ttattgcccaaaccggatatccgat

SEQ ID NO: 241040 - DNA, 25 bp, Homo sapien
aacgtgatccttctgggtgcgcgcg

SEQ ID NO: 241041 - DNA, 25 bp, Homo sapien
ggaaaggaattgattagcaggggcc

SEQ ID NO: 241042 - DNA, 25 bp, Homo sapien
aaaggaattgattagcaggggccgt

SEQ ID NO: 241043 - DNA, 25 bp, Homo sapien
aattgattagcaggggccgtgcgga

SEQ ID NO: 241044 - DNA, 25 bp, Homo sapien
tagcaggggccgtgcggaaagagaa

SEQ ID NO: 241045 - DNA, 25 bp, Homo sapien
cgattccgaagacctatgagtatgt

SEQ ID NO: 241046 - DNA, 25 bp, Homo sapien
tatgtcgtcgaaggtaaatgctgga

SEQ ID NO: 241047 - DNA, 25 bp, Homo sapien
cgtcgaaggtaaatgctggagtcac

SEQ ID NO: 241048 - DNA, 25 bp, Homo sapien
cctatgagtatgtcgtcgaaggtaa

SEQ ID NO: 241049 - DNA, 25 bp, Homo sapien
agatcatagatgactgctagacagt

SEQ ID NO: 241050 - DNA, 25 bp, Homo sapien
gcccagcgacatgagaagatcatag

SEQ ID NO: 241051 - DNA, 25 bp, Homo sapien
gactgctagacagtcacacccaggg

SEQ ID NO: 241052 - DNA, 25 bp, Homo sapien
acagcagagcccagcgacatgagaa

SEQ ID NO: 241053 - DNA, 25 bp, Homo sapien
gcttataaagtgaagtctggtcaac

SEQ ID NO: 241054 - DNA, 25 bp, Homo sapien
aatgagatgtccagcttccacgtgc

SEQ ID NO: 241055 - DNA, 25 bp, Homo sapien
cacgtgccagacattaatggtctcc

SEQ ID NO: 241056 - DNA, 25 bp, Homo sapien
ccttggtggaaaggtggatatgctt

SEQ ID NO: 241057 - DNA, 25 bp, Homo sapien
tgaactttctacgtggtccacatgt

SEQ ID NO: 241058 - DNA, 25 bp, Homo sapien
cctggtgctacaaatagtgaacttt

SEQ ID NO: 241059 - DNA, 25 bp, Homo sapien
tggaaggaatgctgtagtcgctact

SEQ ID NO: 241060 - DNA, 25 bp, Homo sapien
ctgaggattgaacacttcctggtgc

SEQ ID NO: 241061 - DNA, 25 bp, Homo sapien
attttcttctagggggtttgctatg

SEQ ID NO: 241062 - DNA, 25 bp, Homo sapien
tgattgattctttcgttacattttc

SEQ ID NO: 241063 - DNA, 25 bp, Homo sapien
gattgattctttcgttacattttct

SEQ ID NO: 241064 - DNA, 25 bp, Homo sapien
ctgattgattctttcgttacatttt

SEQ ID NO: 241065 - DNA, 25 bp, Homo sapien
gaacaaccaaatccaagtcagtatg

SEQ ID NO: 241066 - DNA, 25 bp, Homo sapien
tgcatgagagacaagtccaccccaa

SEQ ID NO: 241067 - DNA, 25 bp, Homo sapien
gatcctcttcatgaatcccctgcag

SEQ ID NO: 241068 - DNA, 25 bp, Homo sapien
tgtcacgctgcagtgtaaagtaggt

SEQ ID NO: 241069 - DNA, 25 bp, Homo sapien
catcccatctccttgtctgccagga

SEQ ID NO: 241070 - DNA, 25 bp, Homo sapien
atctccttgtctgccaggacccaag

SEQ ID NO: 241071 - DNA, 25 bp, Homo sapien
aggacccaagactcccagacctcac

SEQ ID NO: 241072 - DNA, 25 bp, Homo sapien
cccatctccttgtctgccaggaccc

SEQ ID NO: 241073 - DNA, 25 bp, Homo sapien
tgggctcctcatcaaacgggctgta

SEQ ID NO: 241074 - DNA, 25 bp, Homo sapien
tcacccacacggattgaggcaaggg

SEQ ID NO: 241075 - DNA, 25 bp, Homo sapien
ctacgctcacccacacggattgagg

SEQ ID NO: 241076 - DNA, 25 bp, Homo sapien
ggctcctcatcaaacgggctgtacc

SEQ ID NO: 241077 - DNA, 25 bp, Homo sapien
gcagacggtgttgatttcattccca

SEQ ID NO: 241078 - DNA, 25 bp, Homo sapien
agatctcccgattctaccactgcaa

SEQ ID NO: 241079 - DNA, 25 bp, Homo sapien
gctggacacatgcactctctgcttt

SEQ ID NO: 241080 - DNA, 25 bp, Homo sapien
tcaccaagagtgagatccatgtaag

SEQ ID NO: 241081 - DNA, 25 bp, Homo sapien
gcctggatgtctgggggtgtgggag

SEQ ID NO: 241082 - DNA, 25 bp, Homo sapien
gcagaggagagcctggatgtctggg

SEQ ID NO: 241083 - DNA, 25 bp, Homo sapien
ggagagcctggatgtctgggggtgt

SEQ ID NO: 241084 - DNA, 25 bp, Homo sapien
aggcagaggagagcctggatgtctg

SEQ ID NO: 241085 - DNA, 25 bp, Homo sapien
catggccaatgtggtttcggactca

SEQ ID NO: 241086 - DNA, 25 bp, Homo sapien
gcactatatccagcagggcatggcc

SEQ ID NO: 241087 - DNA, 25 bp, Homo sapien
ggcatggccaatgtggtttcggact

SEQ ID NO: 241088 - DNA, 25 bp, Homo sapien
ctggatgccctgtgtgcactatatc

SEQ ID NO: 241089 - DNA, 25 bp, Homo sapien
cgtagcaggacgcagcacttattaa

SEQ ID NO: 241090 - DNA, 25 bp, Homo sapien
cagtgccgtagcaggacgcagcact

SEQ ID NO: 241091 - DNA, 25 bp, Homo sapien
cctggatccccagtgccgtagcagg

SEQ ID NO: 241092 - DNA, 25 bp, Homo sapien
atccccagtgccgtagcaggacgca

SEQ ID NO: 241093 - DNA, 25 bp, Homo sapien
tcactgatcactccagtggcccttt

SEQ ID NO: 241094 - DNA, 25 bp, Homo sapien
gaagagcgcatgtccccttatgcta

SEQ ID NO: 241095 - DNA, 25 bp, Homo sapien
gagctactgggccagatgaagtggg

SEQ ID NO: 241096 - DNA, 25 bp, Homo sapien
gaacacaagtggcagataagaatgt

SEQ ID NO: 241097 - DNA, 25 bp, Homo sapien
cagaaaccaaagattagtgcccaac

SEQ ID NO: 241098 - DNA, 25 bp, Homo sapien
agaaaccaaagattagtgcccaaca

SEQ ID NO: 241099 - DNA, 25 bp, Homo sapien
gaaaccaaagattagtgcccaacag

SEQ ID NO: 241100 - DNA, 25 bp, Homo sapien
cctctggctcttcgagatccatttc

SEQ ID NO: 241101 - DNA, 25 bp, Homo sapien
tctctcctggcaccgaggaactgga

SEQ ID NO: 241102 - DNA, 25 bp, Homo sapien
gatggctgtccatggggtcattctc

SEQ ID NO: 241103 - DNA, 25 bp, Homo sapien
gagtccaggtctggcatatagccct

SEQ ID NO: 241104 - DNA, 25 bp, Homo sapien
ggccttcttcgctgtgactcccaag

SEQ ID NO: 241105 - DNA, 25 bp, Homo sapien
ggctggaagataattcctcgcccac

SEQ ID NO: 241106 - DNA, 25 bp, Homo sapien
tcataatgaggacgggtggactttc

SEQ ID NO: 241107 - DNA, 25 bp, Homo sapien
ggagggcttgaaatccaggccttct

SEQ ID NO: 241108 - DNA, 25 bp, Homo sapien
catgtttgtccatcttaacttgagg

SEQ ID NO: 241109 - DNA, 25 bp, Homo sapien
aacttgaggctctggcgaatccttc

SEQ ID NO: 241110 - DNA, 25 bp, Homo sapien
tttgtgagcagatttaatactcctt

SEQ ID NO: 241111 - DNA, 25 bp, Homo sapien
ggcgaatccttctttttgtgagcag

SEQ ID NO: 241112 - DNA, 25 bp, Homo sapien
tcaccagcgaccttgtcagaggagg

SEQ ID NO: 241113 - DNA, 25 bp, Homo sapien
gaattattgtttgtgccctccacca

SEQ ID NO: 241114 - DNA, 25 bp, Homo sapien
gatctggaaggaatcggccatcaca

SEQ ID NO: 241115 - DNA, 25 bp, Homo sapien
tcgtggcgggctgtactctctaaag

SEQ ID NO: 241116 - DNA, 25 bp, Homo sapien
ggcggaattccttcatgctctcggg

SEQ ID NO: 241117 - DNA, 25 bp, Homo sapien
tctggtgcatgaactcggtggagct

SEQ ID NO: 241118 - DNA, 25 bp, Homo sapien
gatcggcaaagagttggacctcccg

SEQ ID NO: 241119 - DNA, 25 bp, Homo sapien
gttaacagtgtaggtacgctcccca

SEQ ID NO: 241120 - DNA, 25 bp, Homo sapien
tatttaagtacaacccatatccacc

SEQ ID NO: 241121 - DNA, 25 bp, Homo sapien
ggaaaaagccacttcaaaccaatgc

SEQ ID NO: 241122 - DNA, 25 bp, Homo sapien
agatgtaaatggttagagaagactc

SEQ ID NO: 241123 - DNA, 25 bp, Homo sapien
cttcaaaccaatgcaaagtgttcta

SEQ ID NO: 241124 - DNA, 25 bp, Homo sapien
aaatgactctgtggtactgcagtgc

SEQ ID NO: 241125 - DNA, 25 bp, Homo sapien
tgactcccaatgcaccgatagtgtg

SEQ ID NO: 241126 - DNA, 25 bp, Homo sapien
gcaacatagctcctattgacgctga

SEQ ID NO: 241127 - DNA, 25 bp, Homo sapien
catatactaattagcccacacaggg

SEQ ID NO: 241128 - DNA, 25 bp, Homo sapien
gttgttccaggcacagtactaggta

SEQ ID NO: 241129 - DNA, 25 bp, Homo sapien
tagatgtgtatcagagaggtcaagt

SEQ ID NO: 241130 - DNA, 25 bp, Homo sapien
catagccctgaaatgtgggtcagat

SEQ ID NO: 241131 - DNA, 25 bp, Homo sapien
ggtgacacacattcaatagatacac

SEQ ID NO: 241132 - DNA, 25 bp, Homo sapien
gttactagaacaacgctccacaagg

SEQ ID NO: 241133 - DNA, 25 bp, Homo sapien
tagctgagtgactatggagaggtct

SEQ ID NO: 241134 - DNA, 25 bp, Homo sapien
ggattatgatactgagccatgctgg

SEQ ID NO: 241135 - DNA, 25 bp, Homo sapien
gcaaggcagccagctagaaaagcag

SEQ ID NO: 241136 - DNA, 25 bp, Homo sapien
tatggtgtcggaattaaaggtaaga

SEQ ID NO: 241137 - DNA, 25 bp, Homo sapien
ccagcggatggaaatgtatggtgtc

SEQ ID NO: 241138 - DNA, 25 bp, Homo sapien
tcgtctgatggccagcggatggaaa

SEQ ID NO: 241139 - DNA, 25 bp, Homo sapien
acgtccctgcttcgtctgatggcca

SEQ ID NO: 241140 - DNA, 25 bp, Homo sapien
tcatgatagactgctcgtctggtgt

SEQ ID NO: 241141 - DNA, 25 bp, Homo sapien
gctcgtctggtgtgtcaaccatgat

SEQ ID NO: 241142 - DNA, 25 bp, Homo sapien
gaaaacgttctagaaactgtgccac

SEQ ID NO: 241143 - DNA, 25 bp, Homo sapien
ctgtgccacgtaagtcatgatagac

SEQ ID NO: 241144 - DNA, 25 bp, Homo sapien
tttagtcccttccacagtaagcagc

SEQ ID NO: 241145 - DNA, 25 bp, Homo sapien
tatacggagtcctacgttagcctaa

SEQ ID NO: 241146 - DNA, 25 bp, Homo sapien
agtattcccggatgcctgatggtga

SEQ ID NO: 241147 - DNA, 25 bp, Homo sapien
ctccatgggcaaggacggtgaacca

SEQ ID NO: 241148 - DNA, 25 bp, Homo sapien
ttgatcaccgccaggaaagccagcc

SEQ ID NO: 241149 - DNA, 25 bp, Homo sapien
tggccttgatcaccgccaggaaagc

SEQ ID NO: 241150 - DNA, 25 bp, Homo sapien
gggtcaatggccttgatcaccgcca

SEQ ID NO: 241151 - DNA, 25 bp, Homo sapien
tccaactgcccgcaaagtcctgcac

SEQ ID NO: 241152 - DNA, 25 bp, Homo sapien
gctcctctctgcagtgggtgtgggt

SEQ ID NO: 241153 - DNA, 25 bp, Homo sapien
ggtctttcaccgatattgccacgct

SEQ ID NO: 241154 - DNA, 25 bp, Homo sapien
tgctgaggttgcctgtgagctcctt

SEQ ID NO: 241155 - DNA, 25 bp, Homo sapien
acccacgccaacagggccttgatag

SEQ ID NO: 241156 - DNA, 25 bp, Homo sapien
aatgcaggcattgcgccaaaatcca

SEQ ID NO: 241157 - DNA, 25 bp, Homo sapien
tcagaacaggaactattgtctccag

SEQ ID NO: 241158 - DNA, 25 bp, Homo sapien
caagcaaatcatgcccgtgtggatc

SEQ ID NO: 241159 - DNA, 25 bp, Homo sapien
ggcttcttttgatgctcaccaccta

SEQ ID NO: 241160 - DNA, 25 bp, Homo sapien
tgttccatatcagcccaagaaccaa

SEQ ID NO: 241161 - DNA, 25 bp, Homo sapien
gaagaggattatgttccatatcagc

SEQ ID NO: 241162 - DNA, 25 bp, Homo sapien
ccaaagaagggttgccatctgctat

SEQ ID NO: 241163 - DNA, 25 bp, Homo sapien
ctgcatcaatgctaaccagttttac

SEQ ID NO: 241164 - DNA, 25 bp, Homo sapien
cagttcaagtaagggaatttcagag

SEQ ID NO: 241165 - DNA, 25 bp, Homo sapien
ccagttcaagtaagggaatttcaga

SEQ ID NO: 241166 - DNA, 25 bp, Homo sapien
ttcaagtaagggaatttcagagagg

SEQ ID NO: 241167 - DNA, 25 bp, Homo sapien
gttcaagtaagggaatttcagagag

SEQ ID NO: 241168 - DNA, 25 bp, Homo sapien
gcaccgacatgagcagtcacggact

SEQ ID NO: 241169 - DNA, 25 bp, Homo sapien
gatgctcctggtaaatccctaaggc

SEQ ID NO: 241170 - DNA, 25 bp, Homo sapien
tgtccttgggacaaacacagagcac

SEQ ID NO: 241171 - DNA, 25 bp, Homo sapien
aatgtgcctcttgtagaaaccctca

SEQ ID NO: 241172 - DNA, 25 bp, Homo sapien
gtgatgaaacgtcctccctgctgag

SEQ ID NO: 241173 - DNA, 25 bp, Homo sapien
tgctcgccatactcttattcaaggg

SEQ ID NO: 241174 - DNA, 25 bp, Homo sapien
aagttctacactcggacatgctcgc

SEQ ID NO: 241175 - DNA, 25 bp, Homo sapien
cagggactatgttcccaacggaggg

SEQ ID NO: 241176 - DNA, 25 bp, Homo sapien
gcgacgaggatttgtattcgtgcag

SEQ ID NO: 241177 - DNA, 25 bp, Homo sapien
tgttcaaccgaaaaatacgatgcga

SEQ ID NO: 241178 - DNA, 25 bp, Homo sapien
gtgctttcgctatgttgttcaaccg

SEQ ID NO: 241179 - DNA, 25 bp, Homo sapien
aacttaagtgctttcgctatgttgt

SEQ ID NO: 241180 - DNA, 25 bp, Homo sapien
cagttatcccaggtcgaaagagaga

SEQ ID NO: 241181 - DNA, 25 bp, Homo sapien
caaatgtgacatcagagggctctca

SEQ ID NO: 241182 - DNA, 25 bp, Homo sapien
tgctaaatcatccagccgaggtcct

SEQ ID NO: 241183 - DNA, 25 bp, Homo sapien
ttacgtgttcccttcgctaagcggc

SEQ ID NO: 241184 - DNA, 25 bp, Homo sapien
gtgtgaagtgccaggccacgctcat

SEQ ID NO: 241185 - DNA, 25 bp, Homo sapien
gatggcattacaaggcaaaccagtg

SEQ ID NO: 241186 - DNA, 25 bp, Homo sapien
ccagaatcaaagactccccgtggag

SEQ ID NO: 241187 - DNA, 25 bp, Homo sapien
tgaactgaagcacactgacgctcct

SEQ ID NO: 241188 - DNA, 25 bp, Homo sapien
caaagccattaggattttgccatct

SEQ ID NO: 241189 - DNA, 25 bp, Homo sapien
ataaatctttaacttctagaggtgg

SEQ ID NO: 241190 - DNA, 25 bp, Homo sapien
caggacttctaacaaagccattagg

SEQ ID NO: 241191 - DNA, 25 bp, Homo sapien
gccatcttgtatatcgacgaataaa

SEQ ID NO: 241192 - DNA, 25 bp, Homo sapien
aaggctttcctcaccccacgtgtgt

SEQ ID NO: 241193 - DNA, 25 bp, Homo sapien
ccacgtgtgtagacttactaggaac

SEQ ID NO: 241194 - DNA, 25 bp, Homo sapien
tcagaggtcgatttacatgtccatg

SEQ ID NO: 241195 - DNA, 25 bp, Homo sapien
tcacatgagccaacgagaagcaagg

SEQ ID NO: 241196 - DNA, 25 bp, Homo sapien
tttggcaaggttagagcagctggtc

SEQ ID NO: 241197 - DNA, 25 bp, Homo sapien
gcattcacatgggagataggattaa

SEQ ID NO: 241198 - DNA, 25 bp, Homo sapien
ttccaccccggcatgaatttcctgt

SEQ ID NO: 241199 - DNA, 25 bp, Homo sapien
catgaccggccgaaacccgattctt

SEQ ID NO: 241200 - DNA, 25 bp, Homo sapien
taatttccattgacagttcctataa

SEQ ID NO: 241201 - DNA, 25 bp, Homo sapien
cagttcctataagagcctcagcagc

SEQ ID NO: 241202 - DNA, 25 bp, Homo sapien
gacagttcctataagagcctcagca

SEQ ID NO: 241203 - DNA, 25 bp, Homo sapien
tccattgacagttcctataagagcc

SEQ ID NO: 241204 - DNA, 25 bp, Homo sapien
ggtcctcttctgcacattttccctc

SEQ ID NO: 241205 - DNA, 25 bp, Homo sapien
ctcttctgcacattttccctctcaa

SEQ ID NO: 241206 - DNA, 25 bp, Homo sapien
gtcctcttctgcacattttccctct

SEQ ID NO: 241207 - DNA, 25 bp, Homo sapien
cgtgtaaaggtcctcttctgcacat

SEQ ID NO: 241208 - DNA, 25 bp, Homo sapien
aatggccatcggcaaatggctttag

SEQ ID NO: 241209 - DNA, 25 bp, Homo sapien
tcttcctgacaatggccatcggcaa

SEQ ID NO: 241210 - DNA, 25 bp, Homo sapien
agggctcttcctgacaatggccatc

SEQ ID NO: 241211 - DNA, 25 bp, Homo sapien
atggctttagtcactgaattcatac

SEQ ID NO: 241212 - DNA, 25 bp, Homo sapien
tgattctcatgagaggtgttttgcc

SEQ ID NO: 241213 - DNA, 25 bp, Homo sapien
agttggacagaatctgattctcatg

SEQ ID NO: 241214 - DNA, 25 bp, Homo sapien
gaggtgttttgcctaggtggacagc

SEQ ID NO: 241215 - DNA, 25 bp, Homo sapien
gtgttttgcctaggtggacagcaga

SEQ ID NO: 241216 - DNA, 25 bp, Homo sapien
catgggagccgtattctttgacgtc

SEQ ID NO: 241217 - DNA, 25 bp, Homo sapien
gccgtattctttgacgtccatccag

SEQ ID NO: 241218 - DNA, 25 bp, Homo sapien
attctttgacgtccatccagacagg

SEQ ID NO: 241219 - DNA, 25 bp, Homo sapien
agaatttccgcatgggagccgtatt

SEQ ID NO: 241220 - DNA, 25 bp, Homo sapien
cagttcaagtgattctcctgcctca

SEQ ID NO: 241221 - DNA, 25 bp, Homo sapien
ccatgcccagcctggcatctctttt

SEQ ID NO: 241222 - DNA, 25 bp, Homo sapien
tgcaacaacatccacctccacagtt

SEQ ID NO: 241223 - DNA, 25 bp, Homo sapien
tgcccagcctggcatctctttttct

SEQ ID NO: 241224 - DNA, 25 bp, Homo sapien
gatactgaactgaaacctgtcaccc

SEQ ID NO: 241225 - DNA, 25 bp, Homo sapien
tccacagttgggcagctctagtagc

SEQ ID NO: 241226 - DNA, 25 bp, Homo sapien
gaaacctgattgtgggtgcctctgg

SEQ ID NO: 241227 - DNA, 25 bp, Homo sapien
cttgcaccagccatgtaagaggtac

SEQ ID NO: 241228 - DNA, 25 bp, Homo sapien
atttcccagccttcttgcactcaga

SEQ ID NO: 241229 - DNA, 25 bp, Homo sapien
tgcccactcagaacccaatttcaag

SEQ ID NO: 241230 - DNA, 25 bp, Homo sapien
caagttagcaatcttcctggtttaa

SEQ ID NO: 241231 - DNA, 25 bp, Homo sapien
tttcccagccttcttgcactcagag

SEQ ID NO: 241232 - DNA, 25 bp, Homo sapien
ccttgagtgtgaaaactaggaacct

SEQ ID NO: 241233 - DNA, 25 bp, Homo sapien
gagtgtgaaaactaggaacctgtat

SEQ ID NO: 241234 - DNA, 25 bp, Homo sapien
gtatacccttgagtgtgaaaactag

SEQ ID NO: 241235 - DNA, 25 bp, Homo sapien
tacccttgagtgtgaaaactaggaa

SEQ ID NO: 241236 - DNA, 25 bp, Homo sapien
cgaggcaaagcccaacttgattgaa

SEQ ID NO: 241237 - DNA, 25 bp, Homo sapien
cacaggttctaaacttgggtccaag

SEQ ID NO: 241238 - DNA, 25 bp, Homo sapien
tcttttgttggagtgctggagctcc

SEQ ID NO: 241239 - DNA, 25 bp, Homo sapien
tctgggaacatgcagtgtcacaggg

SEQ ID NO: 241240 - DNA, 25 bp, Homo sapien
gacctgccctgtgatttagagtgga

SEQ ID NO: 241241 - DNA, 25 bp, Homo sapien
gagttctgactacgaaggaccttag

SEQ ID NO: 241242 - DNA, 25 bp, Homo sapien
aatggctacacccaacaggcttagg

SEQ ID NO: 241243 - DNA, 25 bp, Homo sapien
tgccgggagggtaaagcatcctgcc

SEQ ID NO: 241244 - DNA, 25 bp, Homo sapien
tcacctcaatgcaggagtttggcaa

SEQ ID NO: 241245 - DNA, 25 bp, Homo sapien
caatggagccctaaacgttacttgg

SEQ ID NO: 241246 - DNA, 25 bp, Homo sapien
gggtctggcacctacaagcctgaaa

SEQ ID NO: 241247 - DNA, 25 bp, Homo sapien
catccacctagcaaaagggttccgg

SEQ ID NO: 241248 - DNA, 25 bp, Homo sapien
caccgcacttggctatgtcttacaa

SEQ ID NO: 241249 - DNA, 25 bp, Homo sapien
aacaataatctcaaaatgaaaggtt

SEQ ID NO: 241250 - DNA, 25 bp, Homo sapien
gttaatcaaatatatgcctgtgctt

SEQ ID NO: 241251 - DNA, 25 bp, Homo sapien
aaaactcttcatccaccaagacgtt

SEQ ID NO: 241252 - DNA, 25 bp, Homo sapien
gtctgaagatacaaatgatgatcac

SEQ ID NO: 241253 - DNA, 25 bp, Homo sapien
gatctaccaactggcagcaggttta

SEQ ID NO: 241254 - DNA, 25 bp, Homo sapien
ttccctgagttgaggcacgattcag

SEQ ID NO: 241255 - DNA, 25 bp, Homo sapien
tagtatgtagggtataaggcctgtc

SEQ ID NO: 241256 - DNA, 25 bp, Homo sapien
gacaagagtttcttacaagtcaggc

SEQ ID NO: 241257 - DNA, 25 bp, Homo sapien
ctggcaaaaggacaagagtttctta

SEQ ID NO: 241258 - DNA, 25 bp, Homo sapien
gagtttcttacaagtcaggcttcag

SEQ ID NO: 241259 - DNA, 25 bp, Homo sapien
tcttacaagtcaggcttcagcctct

SEQ ID NO: 241260 - DNA, 25 bp, Homo sapien
cttggtctccgccatttggaaggtg

SEQ ID NO: 241261 - DNA, 25 bp, Homo sapien
tagatataatgcaggcctaggaccc

SEQ ID NO: 241262 - DNA, 25 bp, Homo sapien
ggtcaatggagactgcccaatgctg

SEQ ID NO: 241263 - DNA, 25 bp, Homo sapien
aagtctgctatttgagctgacccag

SEQ ID NO: 241264 - DNA, 25 bp, Homo sapien
gcctgggacatatggagttagccat

SEQ ID NO: 241265 - DNA, 25 bp, Homo sapien
taattgctcagcttacctactttgg

SEQ ID NO: 241266 - DNA, 25 bp, Homo sapien
tagattctagataaggcctgggaca

SEQ ID NO: 241267 - DNA, 25 bp, Homo sapien
taccttttagttcgtgtcacttgag

SEQ ID NO: 241268 - DNA, 25 bp, Homo sapien
catcagcctctctccatacagccct

SEQ ID NO: 241269 - DNA, 25 bp, Homo sapien
gagatgccctgggattctgggtctt

SEQ ID NO: 241270 - DNA, 25 bp, Homo sapien
gccctgggattctgggtctttcttg

SEQ ID NO: 241271 - DNA, 25 bp, Homo sapien
agcctctctccatacagccctgttt

SEQ ID NO: 241272 - DNA, 25 bp, Homo sapien
gctgcaaaccagagttgcaacagcc

SEQ ID NO: 241273 - DNA, 25 bp, Homo sapien
tgcaaaccagagttgcaacagccat

SEQ ID NO: 241274 - DNA, 25 bp, Homo sapien
ctgcaaaccagagttgcaacagcca

SEQ ID NO: 241275 - DNA, 25 bp, Homo sapien
tctttgcaaaaagaggtacatctat

SEQ ID NO: 241276 - DNA, 25 bp, Homo sapien
tgtctttgcaaaaagaggtacatct

SEQ ID NO: 241277 - DNA, 25 bp, Homo sapien
tttgcaaaaagaggtacatctatac

SEQ ID NO: 241278 - DNA, 25 bp, Homo sapien
tcatgtctttgcaaaaagaggtaca

SEQ ID NO: 241279 - DNA, 25 bp, Homo sapien
cgatttctcctggtaaccagtattc

SEQ ID NO: 241280 - DNA, 25 bp, Homo sapien
gaaaatagccattaggtgtgaccaa

SEQ ID NO: 241281 - DNA, 25 bp, Homo sapien
aaagtgtgcggctgagaaaatagcc

SEQ ID NO: 241282 - DNA, 25 bp, Homo sapien
tcaaccacggatgaaccaaagtgtg

SEQ ID NO: 241283 - DNA, 25 bp, Homo sapien
gatgaagacatatgacctcactgaa

SEQ ID NO: 241284 - DNA, 25 bp, Homo sapien
tgaatgttctagcaaccaggagaag

SEQ ID NO: 241285 - DNA, 25 bp, Homo sapien
cagtcaatactaaaaacaggctcaa

SEQ ID NO: 241286 - DNA, 25 bp, Homo sapien
caaaaagacatggtcgggctcacag

SEQ ID NO: 241287 - DNA, 25 bp, Homo sapien
tacgggtcagcaatcacgtgccact

SEQ ID NO: 241288 - DNA, 25 bp, Homo sapien
gaactcaatacaggccattgcccgg

SEQ ID NO: 241289 - DNA, 25 bp, Homo sapien
attgcgatgtctctgtcccctacgg

SEQ ID NO: 241290 - DNA, 25 bp, Homo sapien
tcagagttaaactcacaggccaggc

SEQ ID NO: 241291 - DNA, 25 bp, Homo sapien
caaagcagaactgacctctgcaccg

SEQ ID NO: 241292 - DNA, 25 bp, Homo sapien
attacagcatcaaacgccaaaagca

SEQ ID NO: 241293 - DNA, 25 bp, Homo sapien
gggatggcccaaagcagaactgacc

SEQ ID NO: 241294 - DNA, 25 bp, Homo sapien
tacagcatcaaacgccaaaagcacc

SEQ ID NO: 241295 - DNA, 25 bp, Homo sapien
gccttcccacatggctccaaggaag

SEQ ID NO: 241296 - DNA, 25 bp, Homo sapien
cagttctagaaaatatgtccctgcc

SEQ ID NO: 241297 - DNA, 25 bp, Homo sapien
tctagaaaatatgtccctgccttcc

SEQ ID NO: 241298 - DNA, 25 bp, Homo sapien
cacctctaacatcagttctagaaaa

SEQ ID NO: 241299 - DNA, 25 bp, Homo sapien
tcaacagcttggaccacccctgttt

SEQ ID NO: 241300 - DNA, 25 bp, Homo sapien
aaggtcaacagcttggaccacccct

SEQ ID NO: 241301 - DNA, 25 bp, Homo sapien
ggtcaacagcttggaccacccctgt

SEQ ID NO: 241302 - DNA, 25 bp, Homo sapien
ttggaccacccctgtttccttgcaa

SEQ ID NO: 241303 - DNA, 25 bp, Homo sapien
gtccctattctgtaaagccttctcc

SEQ ID NO: 241304 - DNA, 25 bp, Homo sapien
tgtccctattctgtaaagccttctc

SEQ ID NO: 241305 - DNA, 25 bp, Homo sapien
caaattgtccctattctgtaaagcc

SEQ ID NO: 241306 - DNA, 25 bp, Homo sapien
attgtccctattctgtaaagccttc

SEQ ID NO: 241307 - DNA, 25 bp, Homo sapien
ggcatctcttcacaacaatcaatct

SEQ ID NO: 241308 - DNA, 25 bp, Homo sapien
tgtaacctaatgttcatattgcggg

SEQ ID NO: 241309 - DNA, 25 bp, Homo sapien
cgttctggttgtaacctaatgttca

SEQ ID NO: 241310 - DNA, 25 bp, Homo sapien
caatcttctctaaaccaggagctaa

SEQ ID NO: 241311 - DNA, 25 bp, Homo sapien
caggttctgcactcggatgtcgcta

SEQ ID NO: 241312 - DNA, 25 bp, Homo sapien
gatgtcgctaatctgcccgatgagc

SEQ ID NO: 241313 - DNA, 25 bp, Homo sapien
cccgatgagctcctcgcgttggaac

SEQ ID NO: 241314 - DNA, 25 bp, Homo sapien
tggaaccagtcccactcgtgtgcag

SEQ ID NO: 241315 - DNA, 25 bp, Homo sapien
cgggcgggagagcccgggccagcgc

SEQ ID NO: 241316 - DNA, 25 bp, Homo sapien
gcggcgggcgcggagagcctggctg

SEQ ID NO: 241317 - DNA, 25 bp, Homo sapien
gcgggcgggagagcccgggccagcg

SEQ ID NO: 241318 - DNA, 25 bp, Homo sapien
gggcgggagagcccgggccagcgcg

SEQ ID NO: 241319 - DNA, 25 bp, Homo sapien
tttccaataattggcggcctttgcc

SEQ ID NO: 241320 - DNA, 25 bp, Homo sapien
caattactccaagggacagagtggc

SEQ ID NO: 241321 - DNA, 25 bp, Homo sapien
gccaggcagcccttaatggtaatag

SEQ ID NO: 241322 - DNA, 25 bp, Homo sapien
ccccactgctactatgtgtgaagat

SEQ ID NO: 241323 - DNA, 25 bp, Homo sapien
ggtcacgggtgggagacaggtcatc

SEQ ID NO: 241324 - DNA, 25 bp, Homo sapien
cgctggtcacgggtgggagacaggt

SEQ ID NO: 241325 - DNA, 25 bp, Homo sapien
attgaacaagttgcgcttcagttcc

SEQ ID NO: 241326 - DNA, 25 bp, Homo sapien
acaggtcatcattgaacaagttgcg

SEQ ID NO: 241327 - DNA, 25 bp, Homo sapien
gggcagatgtgcagatgacgcatct

SEQ ID NO: 241328 - DNA, 25 bp, Homo sapien
ttgggtgtagtgtggcggccaccag

SEQ ID NO: 241329 - DNA, 25 bp, Homo sapien
cagatgtgcagatgacgcatctacc

SEQ ID NO: 241330 - DNA, 25 bp, Homo sapien
accagaccaagcctcgtccagctgc

SEQ ID NO: 241331 - DNA, 25 bp, Homo sapien
tgtgtcatccctgaggatgcaggat

SEQ ID NO: 241332 - DNA, 25 bp, Homo sapien
gtggagttttaatgaggtcacacag

SEQ ID NO: 241333 - DNA, 25 bp, Homo sapien
ggtgctcagtaaacagcagctgtag

SEQ ID NO: 241334 - DNA, 25 bp, Homo sapien
ctcagtaaacagcagctgtagtgat

SEQ ID NO: 241335 - DNA, 25 bp, Homo sapien
agctgccgggacctggctgatcctt

SEQ ID NO: 241336 - DNA, 25 bp, Homo sapien
ggcttgcagacaggtaggatccttg

SEQ ID NO: 241337 - DNA, 25 bp, Homo sapien
cacaccaggagcagaaggtgtttga

SEQ ID NO: 241338 - DNA, 25 bp, Homo sapien
caccttggcccggttgagctgccgg

SEQ ID NO: 241339 - DNA, 25 bp, Homo sapien
acatcctgccaaggactgcctttct

SEQ ID NO: 241340 - DNA, 25 bp, Homo sapien
tctcagaaatctccggagctggccc

SEQ ID NO: 241341 - DNA, 25 bp, Homo sapien
ttgtgttggccggaggcactaccct

SEQ ID NO: 241342 - DNA, 25 bp, Homo sapien
tttcttagttcagccgagttcattc

SEQ ID NO: 241343 - DNA, 25 bp, Homo sapien
gggcgatgcatgtaaaagtgcttct

SEQ ID NO: 241344 - DNA, 25 bp, Homo sapien
cctggaggcactggggcactcggaa

SEQ ID NO: 241345 - DNA, 25 bp, Homo sapien
cggaagggggcgatgcatgtaaaag

SEQ ID NO: 241346 - DNA, 25 bp, Homo sapien
cgatgcatgtaaaagtgcttctcac

SEQ ID NO: 241347 - DNA, 25 bp, Homo sapien
agaagtccttccgtctcagaaacgg

SEQ ID NO: 241348 - DNA, 25 bp, Homo sapien
tattcaataagtgtgccatggagca

SEQ ID NO: 241349 - DNA, 25 bp, Homo sapien
agatgtgagcctgggtatccggcag

SEQ ID NO: 241350 - DNA, 25 bp, Homo sapien
ccatggagcagatgtgagcctgggt

SEQ ID NO: 241351 - DNA, 25 bp, Homo sapien
gatgaacctctctagtcctctggcg

SEQ ID NO: 241352 - DNA, 25 bp, Homo sapien
gatggccagttgagacgagtcttga

SEQ ID NO: 241353 - DNA, 25 bp, Homo sapien
gctcattggcttgctctgatctggg

SEQ ID NO: 241354 - DNA, 25 bp, Homo sapien
gagacaaacgccacacagatagaat

SEQ ID NO: 241355 - DNA, 25 bp, Homo sapien
tacttcctggtaagttcagcgccat

SEQ ID NO: 241356 - DNA, 25 bp, Homo sapien
agtagacacagtgcaggctcagtcc

SEQ ID NO: 241357 - DNA, 25 bp, Homo sapien
actcctttgatacttcctggtaagt

SEQ ID NO: 241358 - DNA, 25 bp, Homo sapien
gtggagtagacacagtgcaggctca

SEQ ID NO: 241359 - DNA, 25 bp, Homo sapien
gcagatgcttgggattccaatcagt

SEQ ID NO: 241360 - DNA, 25 bp, Homo sapien
cataatcaggaagggatacgtttta

SEQ ID NO: 241361 - DNA, 25 bp, Homo sapien
ggatccctggatatcaaaaaacaca

SEQ ID NO: 241362 - DNA, 25 bp, Homo sapien
ctcatgacataatcaggaagggata

SEQ ID NO: 241363 - DNA, 25 bp, Homo sapien
ctggtttctctgctgggctcgcacc

SEQ ID NO: 241364 - DNA, 25 bp, Homo sapien
gttttgagcctcacctcgtgcttgg

SEQ ID NO: 241365 - DNA, 25 bp, Homo sapien
gtccttcaggtcttccggagccgct

SEQ ID NO: 241366 - DNA, 25 bp, Homo sapien
gcatctccatcaagatgagggccat

SEQ ID NO: 241367 - DNA, 25 bp, Homo sapien
ctgtcggtggatgaggtggcgcgga

SEQ ID NO: 241368 - DNA, 25 bp, Homo sapien
tcagccgcagggacacaaacggagc

SEQ ID NO: 241369 - DNA, 25 bp, Homo sapien
tggcgcggagtagccgtttctcctc

SEQ ID NO: 241370 - DNA, 25 bp, Homo sapien
ggacacaaacggagctttgtatggg

SEQ ID NO: 241371 - DNA, 25 bp, Homo sapien
agtgggtctgattctgctccttcct

SEQ ID NO: 241372 - DNA, 25 bp, Homo sapien
ctgctccttcctgcaccaacgtcat

SEQ ID NO: 241373 - DNA, 25 bp, Homo sapien
tgggtctgattctgctccttcctgc

SEQ ID NO: 241374 - DNA, 25 bp, Homo sapien
ttctgctccttcctgcaccaacgtc

SEQ ID NO: 241375 - DNA, 25 bp, Homo sapien
cttccttgatactgtgaagttgtcc

SEQ ID NO: 241376 - DNA, 25 bp, Homo sapien
tgatactgtgaagttgtcccaggac

SEQ ID NO: 241377 - DNA, 25 bp, Homo sapien
tcagtgtgacccctgtatcttcctt

SEQ ID NO: 241378 - DNA, 25 bp, Homo sapien
tgtgacccctgtatcttccttgata

SEQ ID NO: 241379 - DNA, 25 bp, Homo sapien
tggaaggtctctccatggacccctg

SEQ ID NO: 241380 - DNA, 25 bp, Homo sapien
taagctgtgtatcttgaactcttcc

SEQ ID NO: 241381 - DNA, 25 bp, Homo sapien
cccattcttccggaagatgaagatg

SEQ ID NO: 241382 - DNA, 25 bp, Homo sapien
tctctgagttgtatggaatataagc

SEQ ID NO: 241383 - DNA, 25 bp, Homo sapien
tgcccaaaggtagtttgctggcatt

SEQ ID NO: 241384 - DNA, 25 bp, Homo sapien
tagtcaggatccacagagagccatg

SEQ ID NO: 241385 - DNA, 25 bp, Homo sapien
gcccaaaggtagtttgctggcatta

SEQ ID NO: 241386 - DNA, 25 bp, Homo sapien
cagggctttcctgagaagtgatttg

SEQ ID NO: 241387 - DNA, 25 bp, Homo sapien
tttcctgagaagtgatttgctgcca

SEQ ID NO: 241388 - DNA, 25 bp, Homo sapien
tcctgagaagtgatttgctgccaca

SEQ ID NO: 241389 - DNA, 25 bp, Homo sapien
gagaagtgatttgctgccacagacc

SEQ ID NO: 241390 - DNA, 25 bp, Homo sapien
cctggagctgtcgtttttcacatcc

SEQ ID NO: 241391 - DNA, 25 bp, Homo sapien
cactaaacttcgtgggtgagagcct

SEQ ID NO: 241392 - DNA, 25 bp, Homo sapien
ggctgagacaatggcaaagcatttc

SEQ ID NO: 241393 - DNA, 25 bp, Homo sapien
tttccaaacctctcactgaaccagt

SEQ ID NO: 241394 - DNA, 25 bp, Homo sapien
ccagtaccggcccagcctgataatg

SEQ ID NO: 241395 - DNA, 25 bp, Homo sapien
gatcaagttacaatccttgggaatg

SEQ ID NO: 241396 - DNA, 25 bp, Homo sapien
agtaccggcccagcctgataatgcc

SEQ ID NO: 241397 - DNA, 25 bp, Homo sapien
tcttcattgaagacgatcaagttac

SEQ ID NO: 241398 - DNA, 25 bp, Homo sapien
ccagagctctgctacggctcccaac

SEQ ID NO: 241399 - DNA, 25 bp, Homo sapien
tgcagagctgacttaatcagaccag

SEQ ID NO: 241400 - DNA, 25 bp, Homo sapien
tcagaccagagtcgaggagggatcc

SEQ ID NO: 241401 - DNA, 25 bp, Homo sapien
gctgacttaatcagaccagagtcga

SEQ ID NO: 241402 - DNA, 25 bp, Homo sapien
gtgccagcagccgagagcacagaac

SEQ ID NO: 241403 - DNA, 25 bp, Homo sapien
gtcagtgccagcagccgagagcaca

SEQ ID NO: 241404 - DNA, 25 bp, Homo sapien
tcagtgccagcagccgagagcacag

SEQ ID NO: 241405 - DNA, 25 bp, Homo sapien
gccagcagccgagagcacagaacag

SEQ ID NO: 241406 - DNA, 25 bp, Homo sapien
aagggagatcccggactcctggcag

SEQ ID NO: 241407 - DNA, 25 bp, Homo sapien
gtaagcccataagggagatcccgga

SEQ ID NO: 241408 - DNA, 25 bp, Homo sapien
tagttgcagggcagtactttggggt

SEQ ID NO: 241409 - DNA, 25 bp, Homo sapien
ttgcagggcagtactttggggtcag

SEQ ID NO: 241410 - DNA, 25 bp, Homo sapien
caatacggaattccagcccggaagc

SEQ ID NO: 241411 - DNA, 25 bp, Homo sapien
gatgcacgccagtatgcaactgcaa

SEQ ID NO: 241412 - DNA, 25 bp, Homo sapien
agcaggccacagtgaaaaccaagct

SEQ ID NO: 241413 - DNA, 25 bp, Homo sapien
cataatgaaaggtagcaggacggag

SEQ ID NO: 241414 - DNA, 25 bp, Homo sapien
caattaaccatgtcatggttgggct

SEQ ID NO: 241415 - DNA, 25 bp, Homo sapien
caagaggattccacgagaaggtgat

SEQ ID NO: 241416 - DNA, 25 bp, Homo sapien
tccacgagaaggtgatggatctctc

SEQ ID NO: 241417 - DNA, 25 bp, Homo sapien
gaagccgtggatgaaaactgaggta

SEQ ID NO: 241418 - DNA, 25 bp, Homo sapien
ttctggaacatgcacaagcgactgc

SEQ ID NO: 241419 - DNA, 25 bp, Homo sapien
tagacagacagtgggtacctgctcc

SEQ ID NO: 241420 - DNA, 25 bp, Homo sapien
tcgtgtctaaaccagcccaaggaaa

SEQ ID NO: 241421 - DNA, 25 bp, Homo sapien
taaaacgtcctgagcccgatgtggt

SEQ ID NO: 241422 - DNA, 25 bp, Homo sapien
ctgccagagtggcagcagcccgcgg

SEQ ID NO: 241423 - DNA, 25 bp, Homo sapien
agctgccagagtggcagcagcccgc

SEQ ID NO: 241424 - DNA, 25 bp, Homo sapien
tgccagagtggcagcagcccgcggc

SEQ ID NO: 241425 - DNA, 25 bp, Homo sapien
cagctgccagagtggcagcagcccg

SEQ ID NO: 241426 - DNA, 25 bp, Homo sapien
tttaaggccctgaacatcctgctga

SEQ ID NO: 241427 - DNA, 25 bp, Homo sapien
agtcatgcctgggtacaagtcccaa

SEQ ID NO: 241428 - DNA, 25 bp, Homo sapien
caggctttttgaaagtgtcatgacc

SEQ ID NO: 241429 - DNA, 25 bp, Homo sapien
catgaccatattgcaggcgctcggg

SEQ ID NO: 241430 - DNA, 25 bp, Homo sapien
ttgcttttagaccacgagcctgtgt

SEQ ID NO: 241431 - DNA, 25 bp, Homo sapien
ttcaaaagcttagccctgggtgctc

SEQ ID NO: 241432 - DNA, 25 bp, Homo sapien
caaagcctcaattgtctgctacaaa

SEQ ID NO: 241433 - DNA, 25 bp, Homo sapien
gctaagggagaaacgacagctggtt

SEQ ID NO: 241434 - DNA, 25 bp, Homo sapien
tatttgtcggttcccaagccttgca

SEQ ID NO: 241435 - DNA, 25 bp, Homo sapien
tacaatgcctttgggtagacctgaa

SEQ ID NO: 241436 - DNA, 25 bp, Homo sapien
ggctgttcctgcacaaaaactctgg

SEQ ID NO: 241437 - DNA, 25 bp, Homo sapien
caagctgggcagatctatttgtcgg

SEQ ID NO: 241438 - DNA, 25 bp, Homo sapien
tctcatgccctgttccgagctctcc

SEQ ID NO: 241439 - DNA, 25 bp, Homo sapien
ttcatagtcacaatggtggcctcca

SEQ ID NO: 241440 - DNA, 25 bp, Homo sapien
cctgttccgagctctcccactgtct

SEQ ID NO: 241441 - DNA, 25 bp, Homo sapien
ctctgcccggtatggttcatagtca

SEQ ID NO: 241442 - DNA, 25 bp, Homo sapien
tctcccttgtcggtgttccctctgt

SEQ ID NO: 241443 - DNA, 25 bp, Homo sapien
caccaaacgagcacattctttgtct

SEQ ID NO: 241444 - DNA, 25 bp, Homo sapien
agggtctcctcgcctcgtctgctgt

SEQ ID NO: 241445 - DNA, 25 bp, Homo sapien
tgggtgctgcatgtgcctttccaca

SEQ ID NO: 241446 - DNA, 25 bp, Homo sapien
gacatgagcggatcataccacaatg

SEQ ID NO: 241447 - DNA, 25 bp, Homo sapien
ctcacctgtgacataggaaagtgga

SEQ ID NO: 241448 - DNA, 25 bp, Homo sapien
aacagacttgatggcatcattatca

SEQ ID NO: 241449 - DNA, 25 bp, Homo sapien
tgtgacaggctgcatacatgcccag

SEQ ID NO: 241450 - DNA, 25 bp, Homo sapien
cagtaaggtggtcgcctgcagagaa

SEQ ID NO: 241451 - DNA, 25 bp, Homo sapien
ggccctatggcttggtttccagata

SEQ ID NO: 241452 - DNA, 25 bp, Homo sapien
gattttccagtaaggtggtcgcctg

SEQ ID NO: 241453 - DNA, 25 bp, Homo sapien
gcctgcagagaacggccctatggct

SEQ ID NO: 241454 - DNA, 25 bp, Homo sapien
ggtatcaggccctcttaggtcctca

SEQ ID NO: 241455 - DNA, 25 bp, Homo sapien
tgtagagcacttaggaaccatccca

SEQ ID NO: 241456 - DNA, 25 bp, Homo sapien
ccttatgattccaaagccggacaga

SEQ ID NO: 241457 - DNA, 25 bp, Homo sapien
aaaagtacgctttctgagtcagccc

SEQ ID NO: 241458 - DNA, 25 bp, Homo sapien
tcttggccccatagacctgctgtct

SEQ ID NO: 241459 - DNA, 25 bp, Homo sapien
gggatgcacatgagaccttcttggc

SEQ ID NO: 241460 - DNA, 25 bp, Homo sapien
cttcttggccccatagacctgctgt

SEQ ID NO: 241461 - DNA, 25 bp, Homo sapien
ggccctagtcccatatggggatgca

SEQ ID NO: 241462 - DNA, 25 bp, Homo sapien
ggctgaactccaaagcagattctct

SEQ ID NO: 241463 - DNA, 25 bp, Homo sapien
aagcggaaggagagcccttgagaca

SEQ ID NO: 241464 - DNA, 25 bp, Homo sapien
ccttgagacaggctgaactccaaag

SEQ ID NO: 241465 - DNA, 25 bp, Homo sapien
tggaccctcgatccctggcccctgg

SEQ ID NO: 241466 - DNA, 25 bp, Homo sapien
gacgatgaaaactcagtccaggagc

SEQ ID NO: 241467 - DNA, 25 bp, Homo sapien
tctcgacgatgaaaactcagtccag

SEQ ID NO: 241468 - DNA, 25 bp, Homo sapien
agctcgagctctcgacgatgaaaac

SEQ ID NO: 241469 - DNA, 25 bp, Homo sapien
gagctctcgacgatgaaaactcagt

SEQ ID NO: 241470 - DNA, 25 bp, Homo sapien
cataaagcaagagtcgctgggcacc

SEQ ID NO: 241471 - DNA, 25 bp, Homo sapien
gctttctagggttgactgcagacca

SEQ ID NO: 241472 - DNA, 25 bp, Homo sapien
cactgatatggatgcagctctgcag

SEQ ID NO: 241473 - DNA, 25 bp, Homo sapien
tcccattggagggagccattgctag

SEQ ID NO: 241474 - DNA, 25 bp, Homo sapien
agctgcggtcctcttccctgattgg

SEQ ID NO: 241475 - DNA, 25 bp, Homo sapien
acagcacgccctccggaagagggag

SEQ ID NO: 241476 - DNA, 25 bp, Homo sapien
cattgtagcgcagcatgagcgtgaa

SEQ ID NO: 241477 - DNA, 25 bp, Homo sapien
aaggagcgggcgaagttgttggcca

SEQ ID NO: 241478 - DNA, 25 bp, Homo sapien
gctggctgtgaatcctaaggtcact

SEQ ID NO: 241479 - DNA, 25 bp, Homo sapien
ccaaagcattcaaggcatgaaagga

SEQ ID NO: 241480 - DNA, 25 bp, Homo sapien
gagcggtggtagcactgaactgact

SEQ ID NO: 241481 - DNA, 25 bp, Homo sapien
cagctgctgtcatgattagtatgca

SEQ ID NO: 241482 - DNA, 25 bp, Homo sapien
gaatgagtgtgagttcacagagaag

SEQ ID NO: 241483 - DNA, 25 bp, Homo sapien
tccactgcaactaacaacctgtaat

SEQ ID NO: 241484 - DNA, 25 bp, Homo sapien
tgtaattaaggttctcccaaatgga

SEQ ID NO: 241485 - DNA, 25 bp, Homo sapien
tggagggtctgcttacaagtgtcct

SEQ ID NO: 241486 - DNA, 25 bp, Homo sapien
atccagtcggctcccctggagaact

SEQ ID NO: 241487 - DNA, 25 bp, Homo sapien
gtcggctcccctggagaactttgtg

SEQ ID NO: 241488 - DNA, 25 bp, Homo sapien
tcggctcccctggagaactttgtgt

SEQ ID NO: 241489 - DNA, 25 bp, Homo sapien
cagtcggctcccctggagaactttg

SEQ ID NO: 241490 - DNA, 25 bp, Homo sapien
tcagcttggacttgtacagcatcca

SEQ ID NO: 241491 - DNA, 25 bp, Homo sapien
agagatgctgaccttctggcacccg

SEQ ID NO: 241492 - DNA, 25 bp, Homo sapien
cgaaggaggttctcaaagagatgct

SEQ ID NO: 241493 - DNA, 25 bp, Homo sapien
cactggtagcgcagatcttccagct

SEQ ID NO: 241494 - DNA, 25 bp, Homo sapien
gcgatgattctaaccagcttggagt

SEQ ID NO: 241495 - DNA, 25 bp, Homo sapien
ctgtagaagttctcattgcgatgat

SEQ ID NO: 241496 - DNA, 25 bp, Homo sapien
tgcagcttcgattttctggtcctca

SEQ ID NO: 241497 - DNA, 25 bp, Homo sapien
actgcccaaagttcctcaggagctg

SEQ ID NO: 241498 - DNA, 25 bp, Homo sapien
tctgactggctaagggataccccta

SEQ ID NO: 241499 - DNA, 25 bp, Homo sapien
tcacagaggtgagtatctcccgggc

SEQ ID NO: 241500 - DNA, 25 bp, Homo sapien
gctcaaatgagacaggacgtggcca

SEQ ID NO: 241501 - DNA, 25 bp, Homo sapien
cagaatcgaattgtgggccctagcc

SEQ ID NO: 241502 - DNA, 25 bp, Homo sapien
tttgggatgttgttggtgaaaacca

SEQ ID NO: 241503 - DNA, 25 bp, Homo sapien
tcgacgatgcctgggaataggatcc

SEQ ID NO: 241504 - DNA, 25 bp, Homo sapien
aggatccatgggattgatgagaaat

SEQ ID NO: 241505 - DNA, 25 bp, Homo sapien
gagaaatcctgactttgggatgttg

SEQ ID NO: 241506 - DNA, 25 bp, Homo sapien
tctgctccacgagcacctgagtgtc

SEQ ID NO: 241507 - DNA, 25 bp, Homo sapien
tggctccacactgggcagcaccctg

SEQ ID NO: 241508 - DNA, 25 bp, Homo sapien
ctggccctctgctccacgagcacct

SEQ ID NO: 241509 - DNA, 25 bp, Homo sapien
ctggctccacactgggcagcaccct

SEQ ID NO: 241510 - DNA, 25 bp, Homo sapien
actttcttccagcagcctcaaggcc

SEQ ID NO: 241511 - DNA, 25 bp, Homo sapien
agactttcttccagcagcctcaagg

SEQ ID NO: 241512 - DNA, 25 bp, Homo sapien
ctcagcagactttcttccagcagcc

SEQ ID NO: 241513 - DNA, 25 bp, Homo sapien
tttcttccagcagcctcaaggcccg

SEQ ID NO: 241514 - DNA, 25 bp, Homo sapien
agcaccctccggagaagacttctcc

SEQ ID NO: 241515 - DNA, 25 bp, Homo sapien
cctgcaccacggcagcaccctccgg

SEQ ID NO: 241516 - DNA, 25 bp, Homo sapien
ggcctccttctccgggaattctgcc

SEQ ID NO: 241517 - DNA, 25 bp, Homo sapien
ctccttctccgggaattctgccacc

SEQ ID NO: 241518 - DNA, 25 bp, Homo sapien
gcctccagcttttgcgtggtcacaa

SEQ ID NO: 241519 - DNA, 25 bp, Homo sapien
gtggtcacaacgatccactgccgca

SEQ ID NO: 241520 - DNA, 25 bp, Homo sapien
tctgccgacacctgtccacaaggtc

SEQ ID NO: 241521 - DNA, 25 bp, Homo sapien
aaactcggcctcttgggactcggca

SEQ ID NO: 241522 - DNA, 25 bp, Homo sapien
gaagtcggaggaaagctggtccatt

SEQ ID NO: 241523 - DNA, 25 bp, Homo sapien
aagctggtccattttgtgctggtgg

SEQ ID NO: 241524 - DNA, 25 bp, Homo sapien
ctgcagggcctggaagtcggaggaa

SEQ ID NO: 241525 - DNA, 25 bp, Homo sapien
tctcctggaccagaggccttgcagc

SEQ ID NO: 241526 - DNA, 25 bp, Homo sapien
aagttccttatccagccaacaatga

SEQ ID NO: 241527 - DNA, 25 bp, Homo sapien
aatgtcttctagagaacactctcaa

SEQ ID NO: 241528 - DNA, 25 bp, Homo sapien
aagagagaactattgtatcacgcgc

SEQ ID NO: 241529 - DNA, 25 bp, Homo sapien
atcctaaagtcaggcaatctgctca

SEQ ID NO: 241530 - DNA, 25 bp, Homo sapien
gaaaggtcagatctcaactaagggt

SEQ ID NO: 241531 - DNA, 25 bp, Homo sapien
taaatttctggctcacggcagctgt

SEQ ID NO: 241532 - DNA, 25 bp, Homo sapien
tgctagagggagacgctgcttccag

SEQ ID NO: 241533 - DNA, 25 bp, Homo sapien
gtttaactgaacacctctggactca

SEQ ID NO: 241534 - DNA, 25 bp, Homo sapien
tgaagccccttctcggcttggaccc

SEQ ID NO: 241535 - DNA, 25 bp, Homo sapien
ctgaagccccttctcggcttggacc

SEQ ID NO: 241536 - DNA, 25 bp, Homo sapien
ccttctcggcttggaccctgacctg

SEQ ID NO: 241537 - DNA, 25 bp, Homo sapien
gccccttctcggcttggaccctgac

SEQ ID NO: 241538 - DNA, 25 bp, Homo sapien
gagcaccgtgttgtgagacccgacc

SEQ ID NO: 241539 - DNA, 25 bp, Homo sapien
agggtcactacagcgtcctcacaga

SEQ ID NO: 241540 - DNA, 25 bp, Homo sapien
taagagcgttcctcatgagcaccgt

SEQ ID NO: 241541 - DNA, 25 bp, Homo sapien
gaaacagtctgccaacccttgctgt

SEQ ID NO: 241542 - DNA, 25 bp, Homo sapien
gcagctctttcaggcgggagctttc

SEQ ID NO: 241543 - DNA, 25 bp, Homo sapien
tcaggcgggagctttccatcagggc

SEQ ID NO: 241544 - DNA, 25 bp, Homo sapien
ctggccaaagatgccaatcaggagg

SEQ ID NO: 241545 - DNA, 25 bp, Homo sapien
tccaggagtgccgtggctctctcct

SEQ ID NO: 241546 - DNA, 25 bp, Homo sapien
accgccgcggcattgcgcagcctcg

SEQ ID NO: 241547 - DNA, 25 bp, Homo sapien
tgaagggaaggcaggtccggcaggc

SEQ ID NO: 241548 - DNA, 25 bp, Homo sapien
agaggccgctggaaatgctgccaca

SEQ ID NO: 241549 - DNA, 25 bp, Homo sapien
tggcagtgacctccaagagccgctg

SEQ ID NO: 241550 - DNA, 25 bp, Homo sapien
taagataccgtcattctaggcccat

SEQ ID NO: 241551 - DNA, 25 bp, Homo sapien
catgaagctgggatcgcaaaggtcc

SEQ ID NO: 241552 - DNA, 25 bp, Homo sapien
gatggcccagcttcatgaccaagga

SEQ ID NO: 241553 - DNA, 25 bp, Homo sapien
tttggcagccactcaggataagggt

SEQ ID NO: 241554 - DNA, 25 bp, Homo sapien
cagttttatagatgtaggcctgagc

SEQ ID NO: 241555 - DNA, 25 bp, Homo sapien
cccagttttatagatgtaggcctga

SEQ ID NO: 241556 - DNA, 25 bp, Homo sapien
ttttatagatgtaggcctgagcacg

SEQ ID NO: 241557 - DNA, 25 bp, Homo sapien
gccccagttttatagatgtaggcct

SEQ ID NO: 241558 - DNA, 25 bp, Homo sapien
cctcggaggctcatgcagtgaagac

SEQ ID NO: 241559 - DNA, 25 bp, Homo sapien
tgaaggagctccctgtaccaggcag

SEQ ID NO: 241560 - DNA, 25 bp, Homo sapien
cacacagcaaaggtaggagctccct

SEQ ID NO: 241561 - DNA, 25 bp, Homo sapien
tgtctgagccaagtgagaacctcta

SEQ ID NO: 241562 - DNA, 25 bp, Homo sapien
tgagggaagacgatgagctccttca

SEQ ID NO: 241563 - DNA, 25 bp, Homo sapien
ctctgatactcctggatggtagcga

SEQ ID NO: 241564 - DNA, 25 bp, Homo sapien
gacactatcagagagtggcttcagg

SEQ ID NO: 241565 - DNA, 25 bp, Homo sapien
ttgtgagggaagacgatgagctcct

SEQ ID NO: 241566 - DNA, 25 bp, Homo sapien
agtagcgtctccagtgtgccaccag

SEQ ID NO: 241567 - DNA, 25 bp, Homo sapien
gtgttccgaatgacacccgcagact

SEQ ID NO: 241568 - DNA, 25 bp, Homo sapien
tcgcccctgggaaaatctttggcaa

SEQ ID NO: 241569 - DNA, 25 bp, Homo sapien
gttctccggtgatcttctctgcacc

SEQ ID NO: 241570 - DNA, 25 bp, Homo sapien
gagcccgaggctggcagatcacaag

SEQ ID NO: 241571 - DNA, 25 bp, Homo sapien
tgaaaccctgtctctactaaaaata

SEQ ID NO: 241572 - DNA, 25 bp, Homo sapien
gtcaggagatcgagaccatcctggc

SEQ ID NO: 241573 - DNA, 25 bp, Homo sapien
taacatggtgaaaccctgtctctac

SEQ ID NO: 241574 - DNA, 25 bp, Homo sapien
agccacagttggaactcgtccacac

SEQ ID NO: 241575 - DNA, 25 bp, Homo sapien
gggcagcttgcagttccgccccagg

SEQ ID NO: 241576 - DNA, 25 bp, Homo sapien
atgggcagcttgcagttccgcccca

SEQ ID NO: 241577 - DNA, 25 bp, Homo sapien
tcagccacagttggaactcgtccac

SEQ ID NO: 241578 - DNA, 25 bp, Homo sapien
caggcttcggaagaacatggcaccc

SEQ ID NO: 241579 - DNA, 25 bp, Homo sapien
tgacaaacgggaaggtgctcaacct

SEQ ID NO: 241580 - DNA, 25 bp, Homo sapien
tcaagaatctccctctagcaggtgg

SEQ ID NO: 241581 - DNA, 25 bp, Homo sapien
gcaattacaccatctgcggcgggca

SEQ ID NO: 241582 - DNA, 25 bp, Homo sapien
caagcacctgtttcctgtaaagcca

SEQ ID NO: 241583 - DNA, 25 bp, Homo sapien
ctgggccttgcgcagtctcctggag

SEQ ID NO: 241584 - DNA, 25 bp, Homo sapien
tgcaccaggcgctctctgctgattg

SEQ ID NO: 241585 - DNA, 25 bp, Homo sapien
gccctgcgggttgcttgccttcaaa

SEQ ID NO: 241586 - DNA, 25 bp, Homo sapien
gtttcagcgctatagccaactagag

SEQ ID NO: 241587 - DNA, 25 bp, Homo sapien
tcccaagcgccagagccttgttcct

SEQ ID NO: 241588 - DNA, 25 bp, Homo sapien
tatagccaactagagagccagaaat

SEQ ID NO: 241589 - DNA, 25 bp, Homo sapien
agatgttcagtttcagcgctatagc

SEQ ID NO: 241590 - DNA, 25 bp, Homo sapien
tctgggcatcttcgtccacgctggg

SEQ ID NO: 241591 - DNA, 25 bp, Homo sapien
actgcatcgtactcagccttcattc

SEQ ID NO: 241592 - DNA, 25 bp, Homo sapien
ccttcactgcatcgtactcagcctt

SEQ ID NO: 241593 - DNA, 25 bp, Homo sapien
ttctgggcatcttcgtccacgctgg

SEQ ID NO: 241594 - DNA, 25 bp, Homo sapien
aggagcaccgcctggttgtccacgt

SEQ ID NO: 241595 - DNA, 25 bp, Homo sapien
gaaccagcggtagaactcatctcgg

SEQ ID NO: 241596 - DNA, 25 bp, Homo sapien
gggccagcaggtactcgctccagtg

SEQ ID NO: 241597 - DNA, 25 bp, Homo sapien
gagcaccgcctggttgtccacgttg

SEQ ID NO: 241598 - DNA, 25 bp, Homo sapien
ttcagccatccgtagcacgaggtcc

SEQ ID NO: 241599 - DNA, 25 bp, Homo sapien
gagtcatgtaggtgactgtctcctc

SEQ ID NO: 241600 - DNA, 25 bp, Homo sapien
tgccaagagggcttcagccatccgt

SEQ ID NO: 241601 - DNA, 25 bp, Homo sapien
ttcagccgggccaggatcccgggct

SEQ ID NO: 241602 - DNA, 25 bp, Homo sapien
ctggtgtcctgactgtgtggtcccc

SEQ ID NO: 241603 - DNA, 25 bp, Homo sapien
tggaatgtcccatgcggacaatggc

SEQ ID NO: 241604 - DNA, 25 bp, Homo sapien
ttcgtccttcttatcctcatgaaag

SEQ ID NO: 241605 - DNA, 25 bp, Homo sapien
tccaaagcctggtgtcctgactgtg

SEQ ID NO: 241606 - DNA, 25 bp, Homo sapien
tcctaaggaccacccttgactttgc

SEQ ID NO: 241607 - DNA, 25 bp, Homo sapien
gtgtcttcctaaggaccacccttga

SEQ ID NO: 241608 - DNA, 25 bp, Homo sapien
taaggaccacccttgactttgctta

SEQ ID NO: 241609 - DNA, 25 bp, Homo sapien
caatgtgtcttcctaaggaccaccc

SEQ ID NO: 241610 - DNA, 25 bp, Homo sapien
tgtgagggagcttcccagacagaag

SEQ ID NO: 241611 - DNA, 25 bp, Homo sapien
aagcagggggtattccactcttggg

SEQ ID NO: 241612 - DNA, 25 bp, Homo sapien
ccactcttgggtgatctgtgaggga

SEQ ID NO: 241613 - DNA, 25 bp, Homo sapien
cagagagcttgaacgtgacagggct

SEQ ID NO: 241614 - DNA, 25 bp, Homo sapien
gtccctgcgtgttgtcattgacctg

SEQ ID NO: 241615 - DNA, 25 bp, Homo sapien
gggtccctgcgtgttgtcattgacc

SEQ ID NO: 241616 - DNA, 25 bp, Homo sapien
cgcggggtccctgcgtgttgtcatt

SEQ ID NO: 241617 - DNA, 25 bp, Homo sapien
tgcgtgttgtcattgacctgcagct

SEQ ID NO: 241618 - DNA, 25 bp, Homo sapien
cgtggggcatccaatagaactgccc

SEQ ID NO: 241619 - DNA, 25 bp, Homo sapien
gagtgataccttgcagacgcgtagg

SEQ ID NO: 241620 - DNA, 25 bp, Homo sapien
tttacgacgtgcctgtgagaagccg

SEQ ID NO: 241621 - DNA, 25 bp, Homo sapien
tgccagaactttgagacgccaggtt

SEQ ID NO: 241622 - DNA, 25 bp, Homo sapien
gagtccaaggtcgactgttaacagg

SEQ ID NO: 241623 - DNA, 25 bp, Homo sapien
ggactgatggtccacacgctttgca

SEQ ID NO: 241624 - DNA, 25 bp, Homo sapien
tggaagaagcaaacggtcagcacac

SEQ ID NO: 241625 - DNA, 25 bp, Homo sapien
agcagccccatagcagagtcactga

SEQ ID NO: 241626 - DNA, 25 bp, Homo sapien
tgtgcccaagttgactacgctacga

SEQ ID NO: 241627 - DNA, 25 bp, Homo sapien
agtgtagcctgggagttacctgcca

SEQ ID NO: 241628 - DNA, 25 bp, Homo sapien
tggtaacaacatcagagcatccttc

SEQ ID NO: 241629 - DNA, 25 bp, Homo sapien
caacagctagtgaacaagtggcgga

SEQ ID NO: 241630 - DNA, 25 bp, Homo sapien
ggcagagagcacttagacattcagt

SEQ ID NO: 241631 - DNA, 25 bp, Homo sapien
aaataacgcccttagccaggcatgg

SEQ ID NO: 241632 - DNA, 25 bp, Homo sapien
tgtaaataatgaagcataaaaatat

SEQ ID NO: 241633 - DNA, 25 bp, Homo sapien
tgcgcctcctatttgtaaataatga

SEQ ID NO: 241634 - DNA, 25 bp, Homo sapien
taaaaataacgcccttagccaggca

SEQ ID NO: 241635 - DNA, 25 bp, Homo sapien
cctaacagctggacaatgcgggaag

SEQ ID NO: 241636 - DNA, 25 bp, Homo sapien
ggaagaccccacgaacacatttgag

SEQ ID NO: 241637 - DNA, 25 bp, Homo sapien
cagtcctatttatggtgtgcccgca

SEQ ID NO: 241638 - DNA, 25 bp, Homo sapien
tcctgggttgaccaatgggccacat

SEQ ID NO: 241639 - DNA, 25 bp, Homo sapien
gggaatttcgcagccagcacagaac

SEQ ID NO: 241640 - DNA, 25 bp, Homo sapien
ggaaaggctcgggaatttcgcagcc

SEQ ID NO: 241641 - DNA, 25 bp, Homo sapien
ttttcttgtgggccggccgaagctc

SEQ ID NO: 241642 - DNA, 25 bp, Homo sapien
gctcgggaatttcgcagccagcaca

SEQ ID NO: 241643 - DNA, 25 bp, Homo sapien
tcagggtagttctctggagcgtcac

SEQ ID NO: 241644 - DNA, 25 bp, Homo sapien
gacacaaaacgcttccgtcacaagg

SEQ ID NO: 241645 - DNA, 25 bp, Homo sapien
taatggaatcacacggtgggactgc

SEQ ID NO: 241646 - DNA, 25 bp, Homo sapien
ggctggctcccgtatcgagtctgtg

SEQ ID NO: 241647 - DNA, 25 bp, Homo sapien
acattttgtacgcacatgtgtgtca

SEQ ID NO: 241648 - DNA, 25 bp, Homo sapien
tacaatcccataccatcagatttct

SEQ ID NO: 241649 - DNA, 25 bp, Homo sapien
tgttggatctaatacccacttacaa

SEQ ID NO: 241650 - DNA, 25 bp, Homo sapien
cacatcttaagtttcagctgttgga

SEQ ID NO: 241651 - DNA, 25 bp, Homo sapien
caatagatccagacccgtagaggca

SEQ ID NO: 241652 - DNA, 25 bp, Homo sapien
ccatgccaatgggatgagtgcacca

SEQ ID NO: 241653 - DNA, 25 bp, Homo sapien
caaaactgacttgtagaggaaccca

SEQ ID NO: 241654 - DNA, 25 bp, Homo sapien
tatttcaaaggtctcggctagcacc

SEQ ID NO: 241655 - DNA, 25 bp, Homo sapien
tggagtatgcagtgaagtggcgaga

SEQ ID NO: 241656 - DNA, 25 bp, Homo sapien
gaaggccataaagagttcgcaagca

SEQ ID NO: 241657 - DNA, 25 bp, Homo sapien
tgcctgatagcaaaaacgatcacag

SEQ ID NO: 241658 - DNA, 25 bp, Homo sapien
aatacttctgcaatgcctgccgagc

SEQ ID NO: 241659 - DNA, 25 bp, Homo sapien
tcaaaatagacacagggaaggccat

SEQ ID NO: 241660 - DNA, 25 bp, Homo sapien
caattatgcttctgcataatagctt

SEQ ID NO: 241661 - DNA, 25 bp, Homo sapien
atatattctctattgttaagtgcac

SEQ ID NO: 241662 - DNA, 25 bp, Homo sapien
ttaagtgcaccagatgctggacttc

SEQ ID NO: 241663 - DNA, 25 bp, Homo sapien
tggacttctgaaacaacaattatgc

SEQ ID NO: 241664 - DNA, 25 bp, Homo sapien
tgttgcttgttcctctgatttacct

SEQ ID NO: 241665 - DNA, 25 bp, Homo sapien
caaagcataaacagatcacctccag

SEQ ID NO: 241666 - DNA, 25 bp, Homo sapien
tatttgaaagactcactcactgaca

SEQ ID NO: 241667 - DNA, 25 bp, Homo sapien
tactaggctcaggtttcatgccgaa

SEQ ID NO: 241668 - DNA, 25 bp, Homo sapien
cattgagactttcgggtaatgtgcc

SEQ ID NO: 241669 - DNA, 25 bp, Homo sapien
ggcaacagtgaccagaaactatcag

SEQ ID NO: 241670 - DNA, 25 bp, Homo sapien
caagtctggtgtgctcgagggtacc

SEQ ID NO: 241671 - DNA, 25 bp, Homo sapien
gaacagctggctctcgagcaggcat

SEQ ID NO: 241672 - DNA, 25 bp, Homo sapien
aagcttctcttactgttggcggata

SEQ ID NO: 241673 - DNA, 25 bp, Homo sapien
tgtagcaagtccactggtcctgctc

SEQ ID NO: 241674 - DNA, 25 bp, Homo sapien
tgctcttccggatttattcttcccg

SEQ ID NO: 241675 - DNA, 25 bp, Homo sapien
tccggatttattcttcccgccaata

SEQ ID NO: 241676 - DNA, 25 bp, Homo sapien
tcttcccgccaataggagcacttac

SEQ ID NO: 241677 - DNA, 25 bp, Homo sapien
cagagcaagcaatgggcctgatgag

SEQ ID NO: 241678 - DNA, 25 bp, Homo sapien
tccaagcatcgtcctaggcactgag

SEQ ID NO: 241679 - DNA, 25 bp, Homo sapien
gtaagtacaagggagagcagagcaa

SEQ ID NO: 241680 - DNA, 25 bp, Homo sapien
tcatttctcacgatgggtccaagct

SEQ ID NO: 241681 - DNA, 25 bp, Homo sapien
ttctagagaaataatcgcgcgccgg

SEQ ID NO: 241682 - DNA, 25 bp, Homo sapien
gagggccaacgaggctggaaactca

SEQ ID NO: 241683 - DNA, 25 bp, Homo sapien
tgatcctaggcccaacaggttaaaa

SEQ ID NO: 241684 - DNA, 25 bp, Homo sapien
agtccaggagccaaggctacggccc

SEQ ID NO: 241685 - DNA, 25 bp, Homo sapien
ggcctagccccgctacctcccaaga

SEQ ID NO: 241686 - DNA, 25 bp, Homo sapien
gagaggcggatacccgcccggccta

SEQ ID NO: 241687 - DNA, 25 bp, Homo sapien
gccccgctacctcccaagagaccaa

SEQ ID NO: 241688 - DNA, 25 bp, Homo sapien
ctgggagaggcggatacccgcccgg

SEQ ID NO: 241689 - DNA, 25 bp, Homo sapien
caattaactaacaaagcggttgccg

SEQ ID NO: 241690 - DNA, 25 bp, Homo sapien
ggaaacttcatcaggaggtgacccc

SEQ ID NO: 241691 - DNA, 25 bp, Homo sapien
caagcgtgaccctgatggacatcca

SEQ ID NO: 241692 - DNA, 25 bp, Homo sapien
tcccagttgtctcggcgtagtccag

SEQ ID NO: 241693 - DNA, 25 bp, Homo sapien
gaaagaccaagactccaagtgaggg

SEQ ID NO: 241694 - DNA, 25 bp, Homo sapien
taattggaagagtcagggcctaacc

SEQ ID NO: 241695 - DNA, 25 bp, Homo sapien
ccgagttggccatgaattaccgtga

SEQ ID NO: 241696 - DNA, 25 bp, Homo sapien
gcaaatgtgtcagtctccaaagaga

SEQ ID NO: 241697 - DNA, 25 bp, Homo sapien
gatgatggtgttattggcgtcacaa

SEQ ID NO: 241698 - DNA, 25 bp, Homo sapien
ctgtgccgccatggtgatcgagcat

SEQ ID NO: 241699 - DNA, 25 bp, Homo sapien
caagctcactgctgtgccgccatgg

SEQ ID NO: 241700 - DNA, 25 bp, Homo sapien
gtgttattggcgtcacaaaaaactg

SEQ ID NO: 241701 - DNA, 25 bp, Homo sapien
catcatactccggtaacttctggaa

SEQ ID NO: 241702 - DNA, 25 bp, Homo sapien
catagccagggttctgtcgcatgac

SEQ ID NO: 241703 - DNA, 25 bp, Homo sapien
ggagccagcgagaaacacatagcca

SEQ ID NO: 241704 - DNA, 25 bp, Homo sapien
tggagttttgtggaaattggacctg

SEQ ID NO: 241705 - DNA, 25 bp, Homo sapien
aaccagaagcgggtaatgggagcct

SEQ ID NO: 241706 - DNA, 25 bp, Homo sapien
gggagtgctttgatctggtttacca

SEQ ID NO: 241707 - DNA, 25 bp, Homo sapien
agagcattgcctggacttgggaacc

SEQ ID NO: 241708 - DNA, 25 bp, Homo sapien
gtttaccatctagaagcatcatagg

SEQ ID NO: 241709 - DNA, 25 bp, Homo sapien
gttggcagtagtgcccaagaggtca

SEQ ID NO: 241710 - DNA, 25 bp, Homo sapien
acgttggcagtagtgcccaagaggt

SEQ ID NO: 241711 - DNA, 25 bp, Homo sapien
tgacgttggcagtagtgcccaagag

SEQ ID NO: 241712 - DNA, 25 bp, Homo sapien
cttgacgttggcagtagtgcccaag

SEQ ID NO: 241713 - DNA, 25 bp, Homo sapien
tccaacaattgctcagtgaatccaa

SEQ ID NO: 241714 - DNA, 25 bp, Homo sapien
tatgaccacatggacaagataagcc

SEQ ID NO: 241715 - DNA, 25 bp, Homo sapien
tggcagaagccaggataggtccaac

SEQ ID NO: 241716 - DNA, 25 bp, Homo sapien
gctttgttgtatgaccacatggaca

SEQ ID NO: 241717 - DNA, 25 bp, Homo sapien
gcccagacccatagctagctgcccc

SEQ ID NO: 241718 - DNA, 25 bp, Homo sapien
ccagacccatagctagctgccccat

SEQ ID NO: 241719 - DNA, 25 bp, Homo sapien
cccagacccatagctagctgcccca

SEQ ID NO: 241720 - DNA, 25 bp, Homo sapien
cagattcgagtcacgtccttttttc

SEQ ID NO: 241721 - DNA, 25 bp, Homo sapien
cagacacattcacactgggccaaga

SEQ ID NO: 241722 - DNA, 25 bp, Homo sapien
ctccttcttggagttacaacagaag

SEQ ID NO: 241723 - DNA, 25 bp, Homo sapien
tgccattgcagattcgagtcacgtc

SEQ ID NO: 241724 - DNA, 25 bp, Homo sapien
gaatcaaacatgctgaagttcagat

SEQ ID NO: 241725 - DNA, 25 bp, Homo sapien
caatcagtgaacagggtttgcagcg

SEQ ID NO: 241726 - DNA, 25 bp, Homo sapien
ccagctcctccactaactatctctg

SEQ ID NO: 241727 - DNA, 25 bp, Homo sapien
caggtacctgtggtgtagtagaaga

SEQ ID NO: 241728 - DNA, 25 bp, Homo sapien
gcttggggcttgtgaagggctccct

SEQ ID NO: 241729 - DNA, 25 bp, Homo sapien
caagtgggtgtccagcctcaacgtc

SEQ ID NO: 241730 - DNA, 25 bp, Homo sapien
ccttccggcaagtgggtgtccagcc

SEQ ID NO: 241731 - DNA, 25 bp, Homo sapien
cagcctcaacgtccccagggcttgg

SEQ ID NO: 241732 - DNA, 25 bp, Homo sapien
cctgggagcaattctggagagatca

SEQ ID NO: 241733 - DNA, 25 bp, Homo sapien
caatcctgggagcaattctggagag

SEQ ID NO: 241734 - DNA, 25 bp, Homo sapien
ctggagagatcaaagtggttctcaa

SEQ ID NO: 241735 - DNA, 25 bp, Homo sapien
aggcaatcctgggagcaattctgga

SEQ ID NO: 241736 - DNA, 25 bp, Homo sapien
gagagtgaatccttcaggtcacagg

SEQ ID NO: 241737 - DNA, 25 bp, Homo sapien
aactgttgtcacctgcagctccgtg

SEQ ID NO: 241738 - DNA, 25 bp, Homo sapien
gacatgacatggacaaagaccagct

SEQ ID NO: 241739 - DNA, 25 bp, Homo sapien
ggtcacaggtaccagagatggacaa

SEQ ID NO: 241740 - DNA, 25 bp, Homo sapien
ttgacaaagtcgagcaagtaagacg

SEQ ID NO: 241741 - DNA, 25 bp, Homo sapien
ttgctatgttcttgagcttctgagg

SEQ ID NO: 241742 - DNA, 25 bp, Homo sapien
agtaagacgaccaggccaagtgggc

SEQ ID NO: 241743 - DNA, 25 bp, Homo sapien
cagatgctgatagtgcactggctta

SEQ ID NO: 241744 - DNA, 25 bp, Homo sapien
ggcacaagcttatccacatgagata

SEQ ID NO: 241745 - DNA, 25 bp, Homo sapien
ctgtgcaggtctaggagcgcagcaa

SEQ ID NO: 241746 - DNA, 25 bp, Homo sapien
ccacaggcacaagcttatccacatg

SEQ ID NO: 241747 - DNA, 25 bp, Homo sapien
ggtctaggagcgcagcaatgtccat

SEQ ID NO: 241748 - DNA, 25 bp, Homo sapien
gagggctcctctcagatgggcagca

SEQ ID NO: 241749 - DNA, 25 bp, Homo sapien
tctcagatgggcagcagcttggagc

SEQ ID NO: 241750 - DNA, 25 bp, Homo sapien
gctcctctcagatgggcagcagctt

SEQ ID NO: 241751 - DNA, 25 bp, Homo sapien
catagagggctcctctcagatgggc

SEQ ID NO: 241752 - DNA, 25 bp, Homo sapien
tctctccaccagaatctaagtcaag

SEQ ID NO: 241753 - DNA, 25 bp, Homo sapien
ccagaatctaagtcaaggatagaag

SEQ ID NO: 241754 - DNA, 25 bp, Homo sapien
ggatagaagctgattccgcacgaag

SEQ ID NO: 241755 - DNA, 25 bp, Homo sapien
tcaaggatagaagctgattccgcac

SEQ ID NO: 241756 - DNA, 25 bp, Homo sapien
cacaagttcacggagctgagtgggt

SEQ ID NO: 241757 - DNA, 25 bp, Homo sapien
tacaactttgtaacacccaggtgcg

SEQ ID NO: 241758 - DNA, 25 bp, Homo sapien
gcaggcgtgtttacatgcaggcgta

SEQ ID NO: 241759 - DNA, 25 bp, Homo sapien
tgcaggcgtagcaccatgtgagacc

SEQ ID NO: 241760 - DNA, 25 bp, Homo sapien
aacatccccattgtaggctggccag

SEQ ID NO: 241761 - DNA, 25 bp, Homo sapien
caaatggaatcctccttggcaggag

SEQ ID NO: 241762 - DNA, 25 bp, Homo sapien
aaagccgaggcacaggtatagctgg

SEQ ID NO: 241763 - DNA, 25 bp, Homo sapien
gaagacacaggcatagtaaacgaag

SEQ ID NO: 241764 - DNA, 25 bp, Homo sapien
agacagaatcaagggtgaaggaaag

SEQ ID NO: 241765 - DNA, 25 bp, Homo sapien
agcaggtctaagtgggaagcctagt

SEQ ID NO: 241766 - DNA, 25 bp, Homo sapien
aagcctagtggtcagggatggcccc

SEQ ID NO: 241767 - DNA, 25 bp, Homo sapien
acagaatcaagggtgaaggaaagga

SEQ ID NO: 241768 - DNA, 25 bp, Homo sapien
tgccagctgaaacttgtgaagtact

SEQ ID NO: 241769 - DNA, 25 bp, Homo sapien
ggttagcactgccttcatggagaag

SEQ ID NO: 241770 - DNA, 25 bp, Homo sapien
tctttctgatacagccactgtggac

SEQ ID NO: 241771 - DNA, 25 bp, Homo sapien
taagggagacatgagtgcctccagg

SEQ ID NO: 241772 - DNA, 25 bp, Homo sapien
atctggcagcagctcgagaagcatg

SEQ ID NO: 241773 - DNA, 25 bp, Homo sapien
tctggcagcagctcgagaagcatgt

SEQ ID NO: 241774 - DNA, 25 bp, Homo sapien
agagaaggcattgatcggccagagc

SEQ ID NO: 241775 - DNA, 25 bp, Homo sapien
gccttcccctagctggaaacagcag

SEQ ID NO: 241776 - DNA, 25 bp, Homo sapien
tgcgccttcccctagctggaaacag

SEQ ID NO: 241777 - DNA, 25 bp, Homo sapien
gaaggcattgatcggccagagccct

SEQ ID NO: 241778 - DNA, 25 bp, Homo sapien
tcggtatcgtccatcagggtagagc

SEQ ID NO: 241779 - DNA, 25 bp, Homo sapien
gatgtggtacactaagcgccagaaa

SEQ ID NO: 241780 - DNA, 25 bp, Homo sapien
gacgcaagagcacccgtaactgtaa

SEQ ID NO: 241781 - DNA, 25 bp, Homo sapien
ataggcctccccaggacgacgtctt

SEQ ID NO: 241782 - DNA, 25 bp, Homo sapien
ttcaggttccgcttgccagggcttc

SEQ ID NO: 241783 - DNA, 25 bp, Homo sapien
tccgagtgtgaaatgatggtcatca

SEQ ID NO: 241784 - DNA, 25 bp, Homo sapien
cttctccaggcgcagaaaaccggaa

SEQ ID NO: 241785 - DNA, 25 bp, Homo sapien
aaaaggacagggcatactttcaggt

SEQ ID NO: 241786 - DNA, 25 bp, Homo sapien
aggccatgcatgctcctctcaggga

SEQ ID NO: 241787 - DNA, 25 bp, Homo sapien
tttttctggcgggttgcagcggctc

SEQ ID NO: 241788 - DNA, 25 bp, Homo sapien
accagcacacacacgtgtctagcca

SEQ ID NO: 241789 - DNA, 25 bp, Homo sapien
acgtgtctagccacccagacagggc

SEQ ID NO: 241790 - DNA, 25 bp, Homo sapien
taagaccagcctgggtcacagagcg

SEQ ID NO: 241791 - DNA, 25 bp, Homo sapien
aggcaggaggatcgcttgaggccag

SEQ ID NO: 241792 - DNA, 25 bp, Homo sapien
gagtttaagaccagcctgggtcaca

SEQ ID NO: 241793 - DNA, 25 bp, Homo sapien
gtaattccagtgctttggaaggcag

SEQ ID NO: 241794 - DNA, 25 bp, Homo sapien
tccaaatacacgaacttctcccagg

SEQ ID NO: 241795 - DNA, 25 bp, Homo sapien
taagggcagccaggcgtgctgcttc

SEQ ID NO: 241796 - DNA, 25 bp, Homo sapien
caggcggtccgggtggtcggtgact

SEQ ID NO: 241797 - DNA, 25 bp, Homo sapien
gctgcttctcgtccaaatacacgaa

SEQ ID NO: 241798 - DNA, 25 bp, Homo sapien
tttatatccgggcagcatgcggccg

SEQ ID NO: 241799 - DNA, 25 bp, Homo sapien
cgaccctttatatccgggcagcatg

SEQ ID NO: 241800 - DNA, 25 bp, Homo sapien
gaccctttatatccgggcagcatgc

SEQ ID NO: 241801 - DNA, 25 bp, Homo sapien
ggccgaccctttatatccgggcagc

SEQ ID NO: 241802 - DNA, 25 bp, Homo sapien
cttgctgtggcctgggtccacaggc

SEQ ID NO: 241803 - DNA, 25 bp, Homo sapien
gaggcttgctgtggcctgggtccac

SEQ ID NO: 241804 - DNA, 25 bp, Homo sapien
aggcttgctgtggcctgggtccaca

SEQ ID NO: 241805 - DNA, 25 bp, Homo sapien
gcttgctgtggcctgggtccacagg

SEQ ID NO: 241806 - DNA, 25 bp, Homo sapien
tcctgtatttcttagctccatttgc

SEQ ID NO: 241807 - DNA, 25 bp, Homo sapien
tcactttctgatagtgtctgtgcat

SEQ ID NO: 241808 - DNA, 25 bp, Homo sapien
ctgttagcatcactttctgatagtg

SEQ ID NO: 241809 - DNA, 25 bp, Homo sapien
ccgactcctgtatttcttagctcca

SEQ ID NO: 241810 - DNA, 25 bp, Homo sapien
gcataaggggtccagactgtgtcca

SEQ ID NO: 241811 - DNA, 25 bp, Homo sapien
ccagttgccttccagtgtggcataa

SEQ ID NO: 241812 - DNA, 25 bp, Homo sapien
catatctacctctggaggagccaga

SEQ ID NO: 241813 - DNA, 25 bp, Homo sapien
tcagatacccatatctacctctgga

SEQ ID NO: 241814 - DNA, 25 bp, Homo sapien
cttgcattggctcttagatccccag

SEQ ID NO: 241815 - DNA, 25 bp, Homo sapien
gcattggctcttagatccccagggc

SEQ ID NO: 241816 - DNA, 25 bp, Homo sapien
tgcattggctcttagatccccaggg

SEQ ID NO: 241817 - DNA, 25 bp, Homo sapien
ttgcattggctcttagatccccagg

SEQ ID NO: 241818 - DNA, 25 bp, Homo sapien
ggctgtcttaatggcaaggtggatg

SEQ ID NO: 241819 - DNA, 25 bp, Homo sapien
ggatgcaaaggtcctgggtgacaac

SEQ ID NO: 241820 - DNA, 25 bp, Homo sapien
tgacaacatggctcaggatgcagct

SEQ ID NO: 241821 - DNA, 25 bp, Homo sapien
aacagtaaccagaaggttgtggact

SEQ ID NO: 241822 - DNA, 25 bp, Homo sapien
tgggtgacaacatggctcaggatgc

SEQ ID NO: 241823 - DNA, 25 bp, Homo sapien
aacagcaatcagatagaaggccaca

SEQ ID NO: 241824 - DNA, 25 bp, Homo sapien
agtaggtgatcctacaccagggagg

SEQ ID NO: 241825 - DNA, 25 bp, Homo sapien
agcccgcggtgagtaggtgatccta

SEQ ID NO: 241826 - DNA, 25 bp, Homo sapien
aatcagatagaaggccacattaggg

SEQ ID NO: 241827 - DNA, 25 bp, Homo sapien
tggaaagtcggcagcttcaactgag

SEQ ID NO: 241828 - DNA, 25 bp, Homo sapien
caactgaggccattaaaccgggcat

SEQ ID NO: 241829 - DNA, 25 bp, Homo sapien
ggcagcttcaactgaggccattaaa

SEQ ID NO: 241830 - DNA, 25 bp, Homo sapien
tcagctgtggaaagtcggcagcttc

SEQ ID NO: 241831 - DNA, 25 bp, Homo sapien
gcatttaccgaactggtgagcctgg

SEQ ID NO: 241832 - DNA, 25 bp, Homo sapien
ggtggcagcatttaccgaactggtg

SEQ ID NO: 241833 - DNA, 25 bp, Homo sapien
gaaaggtggcagcatttaccgaact

SEQ ID NO: 241834 - DNA, 25 bp, Homo sapien
gcagcatttaccgaactggtgagcc

SEQ ID NO: 241835 - DNA, 25 bp, Homo sapien
ctgatgatgacaaatgtctgcagcc

SEQ ID NO: 241836 - DNA, 25 bp, Homo sapien
gatgatgacaaatgtctgcagcccc

SEQ ID NO: 241837 - DNA, 25 bp, Homo sapien
ggggatgatgggatgaaacgcacac

SEQ ID NO: 241838 - DNA, 25 bp, Homo sapien
ctgcagccccctcaggggatgatgg

SEQ ID NO: 241839 - DNA, 25 bp, Homo sapien
cagcctggaccccccagaaacttat

SEQ ID NO: 241840 - DNA, 25 bp, Homo sapien
agaaacttatggtttaggaagaatg

SEQ ID NO: 241841 - DNA, 25 bp, Homo sapien
ccacaagcaactgtagcacagcaca

SEQ ID NO: 241842 - DNA, 25 bp, Homo sapien
cacaagcaactgtagcacagcacag

SEQ ID NO: 241843 - DNA, 25 bp, Homo sapien
gctccattggccataaaagtgggcg

SEQ ID NO: 241844 - DNA, 25 bp, Homo sapien
ggacaatcctatcaggctccattgg

SEQ ID NO: 241845 - DNA, 25 bp, Homo sapien
tcaaaagggacaatcctatcaggct

SEQ ID NO: 241846 - DNA, 25 bp, Homo sapien
gctaaaagttggagctcaggaacca

SEQ ID NO: 241847 - DNA, 25 bp, Homo sapien
ggcagcagctgataggagcagaagc

SEQ ID NO: 241848 - DNA, 25 bp, Homo sapien
tggtgagaactgtttttctgtggtt

SEQ ID NO: 241849 - DNA, 25 bp, Homo sapien
cagcagctgataggagcagaagcca

SEQ ID NO: 241850 - DNA, 25 bp, Homo sapien
cagacgtgttggtgagaactgtttt

SEQ ID NO: 241851 - DNA, 25 bp, Homo sapien
atgatcttccgagtcacactagttc

SEQ ID NO: 241852 - DNA, 25 bp, Homo sapien
tcccaaatgatcttccgagtcacac

SEQ ID NO: 241853 - DNA, 25 bp, Homo sapien
ctggcttgtaaaccttcaaattggt

SEQ ID NO: 241854 - DNA, 25 bp, Homo sapien
gcttgtaaaccttcaaattggtgtc

SEQ ID NO: 241855 - DNA, 25 bp, Homo sapien
ctgtaccgtgaaactcccagaaggg

SEQ ID NO: 241856 - DNA, 25 bp, Homo sapien
catgcaggctgtaccgtgaaactcc

SEQ ID NO: 241857 - DNA, 25 bp, Homo sapien
ggctgtaccgtgaaactcccagaag

SEQ ID NO: 241858 - DNA, 25 bp, Homo sapien
gcaggctgtaccgtgaaactcccag

SEQ ID NO: 241859 - DNA, 25 bp, Homo sapien
ttcctcgctcttttgtggaagtaga

SEQ ID NO: 241860 - DNA, 25 bp, Homo sapien
tgggaacatcttcttcctcgctctt

SEQ ID NO: 241861 - DNA, 25 bp, Homo sapien
tgaacacagtgtggggaaatgtggc

SEQ ID NO: 241862 - DNA, 25 bp, Homo sapien
gaagtagaattccactgaacacagt

SEQ ID NO: 241863 - DNA, 25 bp, Homo sapien
tgtactaccatccaacaaaaccctg

SEQ ID NO: 241864 - DNA, 25 bp, Homo sapien
tcatggtttcaagatagcccctgcc

SEQ ID NO: 241865 - DNA, 25 bp, Homo sapien
ggtgtttgcgttcttctcaggatga

SEQ ID NO: 241866 - DNA, 25 bp, Homo sapien
tttatcctcaaagatgggaggtggg

SEQ ID NO: 241867 - DNA, 25 bp, Homo sapien
tacagcaatggtaatgggaggtcac

SEQ ID NO: 241868 - DNA, 25 bp, Homo sapien
tcctgggattcacacccttgtataa

SEQ ID NO: 241869 - DNA, 25 bp, Homo sapien
tcttcttgaatgtgagcaagacctg

SEQ ID NO: 241870 - DNA, 25 bp, Homo sapien
ggcaggctgtaagatgtccccactg

SEQ ID NO: 241871 - DNA, 25 bp, Homo sapien
tcaacaatatcctgagaagaggcct

SEQ ID NO: 241872 - DNA, 25 bp, Homo sapien
taggttacatgagatcttggtttcc

SEQ ID NO: 241873 - DNA, 25 bp, Homo sapien
tacatcccctgttgagccttcagat

SEQ ID NO: 241874 - DNA, 25 bp, Homo sapien
caatactggagaggctcatgtggca

SEQ ID NO: 241875 - DNA, 25 bp, Homo sapien
aaccaaccaccttgattatctacta

SEQ ID NO: 241876 - DNA, 25 bp, Homo sapien
tgtgttaaggcctgaataatatctg

SEQ ID NO: 241877 - DNA, 25 bp, Homo sapien
acctcttagaggtatctgtagcaca

SEQ ID NO: 241878 - DNA, 25 bp, Homo sapien
agagtggatgtgttaaggcctgaat

SEQ ID NO: 241879 - DNA, 25 bp, Homo sapien
tgtcagaggtcccaagtcttccaag

SEQ ID NO: 241880 - DNA, 25 bp, Homo sapien
ctgtgtactgaaagcaattggaggg

SEQ ID NO: 241881 - DNA, 25 bp, Homo sapien
taaaatgtcctgtgtactgaaagca

SEQ ID NO: 241882 - DNA, 25 bp, Homo sapien
aaggcgccccgaggcaggttagagg

SEQ ID NO: 241883 - DNA, 25 bp, Homo sapien
gcgcctctgggtgccgagcctccac

SEQ ID NO: 241884 - DNA, 25 bp, Homo sapien
acaggccacatagccgccacctgct

SEQ ID NO: 241885 - DNA, 25 bp, Homo sapien
cctccacaggccacatagccgccac

SEQ ID NO: 241886 - DNA, 25 bp, Homo sapien
gcgcgcctctgggtgccgagcctcc

SEQ ID NO: 241887 - DNA, 25 bp, Homo sapien
gcagccccggcccagaatgccttaa

SEQ ID NO: 241888 - DNA, 25 bp, Homo sapien
cgcgcagccccggcccagaatgcct

SEQ ID NO: 241889 - DNA, 25 bp, Homo sapien
cagccccggcccagaatgccttaac

SEQ ID NO: 241890 - DNA, 25 bp, Homo sapien
cgcagccccggcccagaatgcctta

SEQ ID NO: 241891 - DNA, 25 bp, Homo sapien
ctgcgccgattgctgccgccgaggt

SEQ ID NO: 241892 - DNA, 25 bp, Homo sapien
tgcggtcgcggtcgccgctggtaag

SEQ ID NO: 241893 - DNA, 25 bp, Homo sapien
gcagctacggccaccgtggccgccg

SEQ ID NO: 241894 - DNA, 25 bp, Homo sapien
ggcgctcgaagagcagggcagctac

SEQ ID NO: 241895 - DNA, 25 bp, Homo sapien
tcgagtagagatgccgtcgtagctg

SEQ ID NO: 241896 - DNA, 25 bp, Homo sapien
aggtcacccatgtgagtatagctgc

SEQ ID NO: 241897 - DNA, 25 bp, Homo sapien
gacggccttcggaaggtcacccatg

SEQ ID NO: 241898 - DNA, 25 bp, Homo sapien
ttatcgagtagagatgccgtcgtag

SEQ ID NO: 241899 - DNA, 25 bp, Homo sapien
accattcccaggaccagagattcca

SEQ ID NO: 241900 - DNA, 25 bp, Homo sapien
ccattcccaggaccagagattccag

SEQ ID NO: 241901 - DNA, 25 bp, Homo sapien
tcccaggaccagagattccagagtc

SEQ ID NO: 241902 - DNA, 25 bp, Homo sapien
gggaagcattttcacgctcagcatc

SEQ ID NO: 241903 - DNA, 25 bp, Homo sapien
gaagagtgtctcagggtcacgggtg

SEQ ID NO: 241904 - DNA, 25 bp, Homo sapien
tcagcagggccagtgacttttgcag

SEQ ID NO: 241905 - DNA, 25 bp, Homo sapien
tggacaaagggaacatgaagaaggg

SEQ ID NO: 241906 - DNA, 25 bp, Homo sapien
tcacgggtggttatactacccttga

SEQ ID NO: 241907 - DNA, 25 bp, Homo sapien
ttttcttttcgcaaaagtggaagca

SEQ ID NO: 241908 - DNA, 25 bp, Homo sapien
cttcactgatgtgcttgcctctcgt

SEQ ID NO: 241909 - DNA, 25 bp, Homo sapien
tcgttcatacggatgttcattcaca

SEQ ID NO: 241910 - DNA, 25 bp, Homo sapien
tcatgttgcatcagttcctccattc

SEQ ID NO: 241911 - DNA, 25 bp, Homo sapien
gcatcagttcctccattcttcactg

SEQ ID NO: 241912 - DNA, 25 bp, Homo sapien
tgtggtttggaccagcaattggtag

SEQ ID NO: 241913 - DNA, 25 bp, Homo sapien
ggtttggaccagcaattggtagaaa

SEQ ID NO: 241914 - DNA, 25 bp, Homo sapien
gtggtttggaccagcaattggtaga

SEQ ID NO: 241915 - DNA, 25 bp, Homo sapien
tggtttggaccagcaattggtagaa

SEQ ID NO: 241916 - DNA, 25 bp, Homo sapien
cagctgcccactgactcatccaccc

SEQ ID NO: 241917 - DNA, 25 bp, Homo sapien
agacagatggctcggccttgaaggc

SEQ ID NO: 241918 - DNA, 25 bp, Homo sapien
tcagaagacagatggctcggccttg

SEQ ID NO: 241919 - DNA, 25 bp, Homo sapien
ggccagcctcggccagcctgtacat

SEQ ID NO: 241920 - DNA, 25 bp, Homo sapien
cagcattcacgtgacatggccctct

SEQ ID NO: 241921 - DNA, 25 bp, Homo sapien
tggcttggggaatacagaactgccc

SEQ ID NO: 241922 - DNA, 25 bp, Homo sapien
gccttgacaatactgctctcacatt

SEQ ID NO: 241923 - DNA, 25 bp, Homo sapien
gcatgcagcagcaattggctgtaca

SEQ ID NO: 241924 - DNA, 25 bp, Homo sapien
gagagtggtgaggaacctcctcctt

SEQ ID NO: 241925 - DNA, 25 bp, Homo sapien
aggagagtggtgaggaacctcctcc

SEQ ID NO: 241926 - DNA, 25 bp, Homo sapien
tggtgaggaacctcctccttctcgc

SEQ ID NO: 241927 - DNA, 25 bp, Homo sapien
gtgaggaacctcctccttctcgctg

SEQ ID NO: 241928 - DNA, 25 bp, Homo sapien
tccagttgcttcctgatctgtttcc

SEQ ID NO: 241929 - DNA, 25 bp, Homo sapien
cctgctgagggtcttctgtggcttc

SEQ ID NO: 241930 - DNA, 25 bp, Homo sapien
ctggggggtgtctccagttgcttcc

SEQ ID NO: 241931 - DNA, 25 bp, Homo sapien
tttcttcactcttgccagagggagc

SEQ ID NO: 241932 - DNA, 25 bp, Homo sapien
ttggtgcccacaccagtcaggctga

SEQ ID NO: 241933 - DNA, 25 bp, Homo sapien
actgttgttcccatgagcagacccc

SEQ ID NO: 241934 - DNA, 25 bp, Homo sapien
ggcctgggcccgaaatgcatcttct

SEQ ID NO: 241935 - DNA, 25 bp, Homo sapien
tccttgggccaactgttgttcccat

SEQ ID NO: 241936 - DNA, 25 bp, Homo sapien
catggaccatgggatgcgcgtggag

SEQ ID NO: 241937 - DNA, 25 bp, Homo sapien
tgggatgcgcgtggaggacaaggtc

SEQ ID NO: 241938 - DNA, 25 bp, Homo sapien
tttctgtccccgcagggcaagtgct

SEQ ID NO: 241939 - DNA, 25 bp, Homo sapien
agggccctggaccacaccatctgag

SEQ ID NO: 241940 - DNA, 25 bp, Homo sapien
gtgattgtccccgagcaagtgccag

SEQ ID NO: 241941 - DNA, 25 bp, Homo sapien
cccgaggtgggttgtgctccctgca

SEQ ID NO: 241942 - DNA, 25 bp, Homo sapien
atcggcccgctttgcttcgtcctgg

SEQ ID NO: 241943 - DNA, 25 bp, Homo sapien
tttgcttcgtcctggcagatgccca

SEQ ID NO: 241944 - DNA, 25 bp, Homo sapien
gcccactccacaggcccctgaccat

SEQ ID NO: 241945 - DNA, 25 bp, Homo sapien
cccaccctggcccactccacaggcc

SEQ ID NO: 241946 - DNA, 25 bp, Homo sapien
cacccaccctggcccactccacagg

SEQ ID NO: 241947 - DNA, 25 bp, Homo sapien
tggcccactccacaggcccctgacc

SEQ ID NO: 241948 - DNA, 25 bp, Homo sapien
ttagagagctctctgcagcccagag

SEQ ID NO: 241949 - DNA, 25 bp, Homo sapien
tctcccgagccttgtccatcctttt

SEQ ID NO: 241950 - DNA, 25 bp, Homo sapien
tcccaggatggaacccttcatgtcc

SEQ ID NO: 241951 - DNA, 25 bp, Homo sapien
ggatggaacccttcatgtccatcca

SEQ ID NO: 241952 - DNA, 25 bp, Homo sapien
ttgctctgtaagccaaccatgtgga

SEQ ID NO: 241953 - DNA, 25 bp, Homo sapien
taaattggttgccaacaataacagt

SEQ ID NO: 241954 - DNA, 25 bp, Homo sapien
agtaacagaaaatttggatttctgt

SEQ ID NO: 241955 - DNA, 25 bp, Homo sapien
caataacagtaacagaaaatttgga

SEQ ID NO: 241956 - DNA, 25 bp, Homo sapien
ttaaattggttgccaacaataacag

SEQ ID NO: 241957 - DNA, 25 bp, Homo sapien
tgggacttcaggctcccgtttttca

SEQ ID NO: 241958 - DNA, 25 bp, Homo sapien
actgagacttcacacaaggccccat

SEQ ID NO: 241959 - DNA, 25 bp, Homo sapien
ggacttcaggctcccgtttttcaga

SEQ ID NO: 241960 - DNA, 25 bp, Homo sapien
gagccttgccccagaaaccgtctgt

SEQ ID NO: 241961 - DNA, 25 bp, Homo sapien
tctttcaggcgttccctcagcaaca

SEQ ID NO: 241962 - DNA, 25 bp, Homo sapien
cagcaacaactcattgagagtgtgc

SEQ ID NO: 241963 - DNA, 25 bp, Homo sapien
caagctgggcgggatgacaatgtca

SEQ ID NO: 241964 - DNA, 25 bp, Homo sapien
gacaatgtcactgcccacgtgcgtt

SEQ ID NO: 241965 - DNA, 25 bp, Homo sapien
gtgggtgtcagctgtgaatatttca

SEQ ID NO: 241966 - DNA, 25 bp, Homo sapien
gtcggtgggtgtcagctgtgaatat

SEQ ID NO: 241967 - DNA, 25 bp, Homo sapien
ggctgtcggtgggtgtcagctgtga

SEQ ID NO: 241968 - DNA, 25 bp, Homo sapien
ctgtcggtgggtgtcagctgtgaat

SEQ ID NO: 241969 - DNA, 25 bp, Homo sapien
gagttccacgttgagcttgacacaa

SEQ ID NO: 241970 - DNA, 25 bp, Homo sapien
tacacactctcaatgtgcagggttg

SEQ ID NO: 241971 - DNA, 25 bp, Homo sapien
gaaatgggagagtcgagttccacgt

SEQ ID NO: 241972 - DNA, 25 bp, Homo sapien
caatgtgcagggttgtcctatttct

SEQ ID NO: 241973 - DNA, 25 bp, Homo sapien
cagtgtgagcagtccagtaacttat

SEQ ID NO: 241974 - DNA, 25 bp, Homo sapien
cgaatgtggaagtgctcgagggaca

SEQ ID NO: 241975 - DNA, 25 bp, Homo sapien
gggccgacggccatcgcaccagtga

SEQ ID NO: 241976 - DNA, 25 bp, Homo sapien
aaggcagacgcagtgtgagcagtcc

SEQ ID NO: 241977 - DNA, 25 bp, Homo sapien
ccacgagggtgacgcactgctccag

SEQ ID NO: 241978 - DNA, 25 bp, Homo sapien
acgcaggccacgagggtgacgcact

SEQ ID NO: 241979 - DNA, 25 bp, Homo sapien
cagggggccagagccgtggttctgc

SEQ ID NO: 241980 - DNA, 25 bp, Homo sapien
tttgaccacaaatgggacacgcagg

SEQ ID NO: 241981 - DNA, 25 bp, Homo sapien
cagagatcacttggcagcgagtcgc

SEQ ID NO: 241982 - DNA, 25 bp, Homo sapien
gtagggcctgctacagagatcactt

SEQ ID NO: 241983 - DNA, 25 bp, Homo sapien
tcacttggcagcgagtcgccatgcg

SEQ ID NO: 241984 - DNA, 25 bp, Homo sapien
tagggcctgctacagagatcacttg

SEQ ID NO: 241985 - DNA, 25 bp, Homo sapien
gagcgactgaagtgcccatgccgct

SEQ ID NO: 241986 - DNA, 25 bp, Homo sapien
agggagcgactgaagtgcccatgcc

SEQ ID NO: 241987 - DNA, 25 bp, Homo sapien
actgaagtgcccatgccgcttgctc

SEQ ID NO: 241988 - DNA, 25 bp, Homo sapien
cttgctccggagaaggtgggtgccg

SEQ ID NO: 241989 - DNA, 25 bp, Homo sapien
gggttccaagcaccggctttgcatc

SEQ ID NO: 241990 - DNA, 25 bp, Homo sapien
accggctttgcatccggcccaggtt

SEQ ID NO: 241991 - DNA, 25 bp, Homo sapien
ttgcatccggcccaggttgcagctc

SEQ ID NO: 241992 - DNA, 25 bp, Homo sapien
ggggttccaagcaccggctttgcat

SEQ ID NO: 241993 - DNA, 25 bp, Homo sapien
tgctgagagtaggtcgtttccgcag

SEQ ID NO: 241994 - DNA, 25 bp, Homo sapien
tgaagcaccacgtatgtcataggca

SEQ ID NO: 241995 - DNA, 25 bp, Homo sapien
cgagttattttgtcctgtctcctga

SEQ ID NO: 241996 - DNA, 25 bp, Homo sapien
cctgtgggtgacgtttttgggcgag

SEQ ID NO: 241997 - DNA, 25 bp, Homo sapien
agccccgtcgcttctgtggttctta

SEQ ID NO: 241998 - DNA, 25 bp, Homo sapien
agcacagccccgtcgcttctgtggt

SEQ ID NO: 241999 - DNA, 25 bp, Homo sapien
acagccccgtcgcttctgtggttct

SEQ ID NO: 242000 - DNA, 25 bp, Homo sapien
gccccgtcgcttctgtggttcttat

SEQ ID NO: 242001 - DNA, 25 bp, Homo sapien
cactggccggttagcaaagtgagag

SEQ ID NO: 242002 - DNA, 25 bp, Homo sapien
gcccactggccggttagcaaagtga

SEQ ID NO: 242003 - DNA, 25 bp, Homo sapien
gagcccactggccggttagcaaagt

SEQ ID NO: 242004 - DNA, 25 bp, Homo sapien
ccactggccggttagcaaagtgaga

SEQ ID NO: 242005 - DNA, 25 bp, Homo sapien
gatgtccccaaatcccgaaatgtgg

SEQ ID NO: 242006 - DNA, 25 bp, Homo sapien
tcgtccagaccccttcgttgtacag

SEQ ID NO: 242007 - DNA, 25 bp, Homo sapien
gaaatgtggtttgagtcccagtccc

SEQ ID NO: 242008 - DNA, 25 bp, Homo sapien
cttcgttgtacagcaggtttgcctc

SEQ ID NO: 242009 - DNA, 25 bp, Homo sapien
gctaatgggctaactggtccttgct

SEQ ID NO: 242010 - DNA, 25 bp, Homo sapien
taatccatattcacaccaagcgcct

SEQ ID NO: 242011 - DNA, 25 bp, Homo sapien
gcactaggcatgtcaggtttaccct

SEQ ID NO: 242012 - DNA, 25 bp, Homo sapien
tcatcccaggtcgaagctaatgggc

SEQ ID NO: 242013 - DNA, 25 bp, Homo sapien
cagtggtctccaagcttttgtgatt

SEQ ID NO: 242014 - DNA, 25 bp, Homo sapien
taaatggatgaggtttttgcatagc

SEQ ID NO: 242015 - DNA, 25 bp, Homo sapien
acaggcttctggcatgtagatcagt

SEQ ID NO: 242016 - DNA, 25 bp, Homo sapien
atttctgctcaatctgttaacaggc

SEQ ID NO: 242017 - DNA, 25 bp, Homo sapien
tacagcaagaccgttggggagctct

SEQ ID NO: 242018 - DNA, 25 bp, Homo sapien
caaggggttgggtcgttgtcctgtg

SEQ ID NO: 242019 - DNA, 25 bp, Homo sapien
agcaagaccgttggggagctcttga

SEQ ID NO: 242020 - DNA, 25 bp, Homo sapien
gtcctgtggcatgacaaaatccagg

SEQ ID NO: 242021 - DNA, 25 bp, Homo sapien
cttgtatgtacgttgcatgagtttc

SEQ ID NO: 242022 - DNA, 25 bp, Homo sapien
gtttctaaaccctgtgatgggaaga

SEQ ID NO: 242023 - DNA, 25 bp, Homo sapien
gggaagaaaggtgtgaccgccaaca

SEQ ID NO: 242024 - DNA, 25 bp, Homo sapien
gaagaaaggtgtgaccgccaacagc

SEQ ID NO: 242025 - DNA, 25 bp, Homo sapien
ggcagccagatgcatctccgaagtc

SEQ ID NO: 242026 - DNA, 25 bp, Homo sapien
cagccagatgcatctccgaagtcca

SEQ ID NO: 242027 - DNA, 25 bp, Homo sapien
gcagccagatgcatctccgaagtcc

SEQ ID NO: 242028 - DNA, 25 bp, Homo sapien
aggcagccagatgcatctccgaagt

SEQ ID NO: 242029 - DNA, 25 bp, Homo sapien
gaccgtgctgatggtctttaacatc

SEQ ID NO: 242030 - DNA, 25 bp, Homo sapien
gtgctgatggtctttaacatctgtg

SEQ ID NO: 242031 - DNA, 25 bp, Homo sapien
tatgtgaccgtgctgatggtcttta

SEQ ID NO: 242032 - DNA, 25 bp, Homo sapien
tgtgaccgtgctgatggtctttaac

SEQ ID NO: 242033 - DNA, 25 bp, Homo sapien
aacaaattgtgtgtgcaccatgacc

SEQ ID NO: 242034 - DNA, 25 bp, Homo sapien
tgtcacgtacgtctataaatgtcaa

SEQ ID NO: 242035 - DNA, 25 bp, Homo sapien
gttaccatgacgctggactccacca

SEQ ID NO: 242036 - DNA, 25 bp, Homo sapien
tgctgagactcaatgtccactaaaa

SEQ ID NO: 242037 - DNA, 25 bp, Homo sapien
gttcttcttatggagccaacacaca

SEQ ID NO: 242038 - DNA, 25 bp, Homo sapien
cactgttgcacgtgcacaagaaaag

SEQ ID NO: 242039 - DNA, 25 bp, Homo sapien
ttttctgtctgaagagtccgaggat

SEQ ID NO: 242040 - DNA, 25 bp, Homo sapien
tcactttgccagaatgaatgtccca

SEQ ID NO: 242041 - DNA, 25 bp, Homo sapien
tgtaattcaatggtagactgcagcc

SEQ ID NO: 242042 - DNA, 25 bp, Homo sapien
gaaatcggacaacattgctcacggg

SEQ ID NO: 242043 - DNA, 25 bp, Homo sapien
cactcgagaagaacgtgctggccgg

SEQ ID NO: 242044 - DNA, 25 bp, Homo sapien
tctattccgagtgagctgacccaca

SEQ ID NO: 242045 - DNA, 25 bp, Homo sapien
tatcagtctgccgtgaaagtgccac

SEQ ID NO: 242046 - DNA, 25 bp, Homo sapien
taagaggaagctgtcaccgacaagc

SEQ ID NO: 242047 - DNA, 25 bp, Homo sapien
cactacagatccgttccaaagcgaa

SEQ ID NO: 242048 - DNA, 25 bp, Homo sapien
accttagactttgcgcccagctgag

SEQ ID NO: 242049 - DNA, 25 bp, Homo sapien
tagaacgcggtatggacaattaaga

SEQ ID NO: 242050 - DNA, 25 bp, Homo sapien
taaaacggaatctggtgtcaagaaa

SEQ ID NO: 242051 - DNA, 25 bp, Homo sapien
caaagtgaacctttagggcggagat

SEQ ID NO: 242052 - DNA, 25 bp, Homo sapien
aaggctgggccacgttaagattgct

SEQ ID NO: 242053 - DNA, 25 bp, Homo sapien
caagtgagtactttgcactgagcag

SEQ ID NO: 242054 - DNA, 25 bp, Homo sapien
tgtgttttcccctatacttcagtgg

SEQ ID NO: 242055 - DNA, 25 bp, Homo sapien
tcttacagtaaggatgcactagtgt

SEQ ID NO: 242056 - DNA, 25 bp, Homo sapien
aatggttcgtcctcttctggtagcc

SEQ ID NO: 242057 - DNA, 25 bp, Homo sapien
gagatcccgacagagcatccgagtt

SEQ ID NO: 242058 - DNA, 25 bp, Homo sapien
tactcacgggcatgcagaactgaac

SEQ ID NO: 242059 - DNA, 25 bp, Homo sapien
cagacgtggatctacagtatgcggg

SEQ ID NO: 242060 - DNA, 25 bp, Homo sapien
gaaatcttccaggtggtgctaaccc

SEQ ID NO: 242061 - DNA, 25 bp, Homo sapien
taaggactcaacgtatcactggtgg

SEQ ID NO: 242062 - DNA, 25 bp, Homo sapien
tgaggctctgtacaaagcatgacgc

SEQ ID NO: 242063 - DNA, 25 bp, Homo sapien
tcactggtggacatgcgcgatctac

SEQ ID NO: 242064 - DNA, 25 bp, Homo sapien
gaagacacggttgtggcctcagctg

SEQ ID NO: 242065 - DNA, 25 bp, Homo sapien
tggtcccacggtgcttaaacaggtg

SEQ ID NO: 242066 - DNA, 25 bp, Homo sapien
tgattacatcgacaacaggtgcagg

SEQ ID NO: 242067 - DNA, 25 bp, Homo sapien
ttagtgtgtcgccaggaccaggctc

SEQ ID NO: 242068 - DNA, 25 bp, Homo sapien
tacccgaataagagatggtcccacg

SEQ ID NO: 242069 - DNA, 25 bp, Homo sapien
tataaacaattacatgggccccact

SEQ ID NO: 242070 - DNA, 25 bp, Homo sapien
gaaggcagcttccaatgatctctcg

SEQ ID NO: 242071 - DNA, 25 bp, Homo sapien
gatctctcgtcggtaacaaggagaa

SEQ ID NO: 242072 - DNA, 25 bp, Homo sapien
tttaaggacctttgacaccagccac

SEQ ID NO: 242073 - DNA, 25 bp, Homo sapien
ggtttcaccactgccggaggaatct

SEQ ID NO: 242074 - DNA, 25 bp, Homo sapien
tcatgccacccagcacgtttgacgt

SEQ ID NO: 242075 - DNA, 25 bp, Homo sapien
catttctgtgactcgtcttgccgga

SEQ ID NO: 242076 - DNA, 25 bp, Homo sapien
tctcgagccgcagtttcataaatgg

SEQ ID NO: 242077 - DNA, 25 bp, Homo sapien
ggttctgatgtgtccacccaagtat

SEQ ID NO: 242078 - DNA, 25 bp, Homo sapien
tgctcccagggatttctacagaata

SEQ ID NO: 242079 - DNA, 25 bp, Homo sapien
cacagatatgggcacatgttattag

SEQ ID NO: 242080 - DNA, 25 bp, Homo sapien
tattagtggcagttgccattctgct

SEQ ID NO: 242081 - DNA, 25 bp, Homo sapien
ttccctcaggtctactggctggtgg

SEQ ID NO: 242082 - DNA, 25 bp, Homo sapien
tcttgggctcgatagaaagggtacc

SEQ ID NO: 242083 - DNA, 25 bp, Homo sapien
gacaccatatcataagcagtctctg

SEQ ID NO: 242084 - DNA, 25 bp, Homo sapien
tgggctaaccggtgatgaggaaacc

SEQ ID NO: 242085 - DNA, 25 bp, Homo sapien
tgtcaaaaggaagaaatgaattaga

SEQ ID NO: 242086 - DNA, 25 bp, Homo sapien
tttgtcaaaaggaagaaatgaatta

SEQ ID NO: 242087 - DNA, 25 bp, Homo sapien
caaaaggaagaaatgaattagaaga

SEQ ID NO: 242088 - DNA, 25 bp, Homo sapien
aggaagaaatgaattagaagaaagt

SEQ ID NO: 242089 - DNA, 25 bp, Homo sapien
catcgctgtcgaggtaccaaaggaa

SEQ ID NO: 242090 - DNA, 25 bp, Homo sapien
tgacaatgcggccatccttccggta

SEQ ID NO: 242091 - DNA, 25 bp, Homo sapien
ccttccggtactgctctattgggag

SEQ ID NO: 242092 - DNA, 25 bp, Homo sapien
tattgggagccagaccaagtccttt

SEQ ID NO: 242093 - DNA, 25 bp, Homo sapien
gaatgcataggtccaacacctccca

SEQ ID NO: 242094 - DNA, 25 bp, Homo sapien
gccactcagtgattgcatatgagaa

SEQ ID NO: 242095 - DNA, 25 bp, Homo sapien
ctaattgtactagtgaatgcatagg

SEQ ID NO: 242096 - DNA, 25 bp, Homo sapien
tgtcattaagccactcagtgattgc

SEQ ID NO: 242097 - DNA, 25 bp, Homo sapien
tgtgtttttccaatgttcttatttc

SEQ ID NO: 242098 - DNA, 25 bp, Homo sapien
tttccaatgttcttatttcttgaac

SEQ ID NO: 242099 - DNA, 25 bp, Homo sapien
tagtgtgtttttccaatgttcttat

SEQ ID NO: 242100 - DNA, 25 bp, Homo sapien
tccaatgttcttatttcttgaacat

SEQ ID NO: 242101 - DNA, 25 bp, Homo sapien
catgtcgataggaaagcctcttgag

SEQ ID NO: 242102 - DNA, 25 bp, Homo sapien
ccatgtcgataggaaagcctcttga

SEQ ID NO: 242103 - DNA, 25 bp, Homo sapien
cagagcagtttaactgagccagacc

SEQ ID NO: 242104 - DNA, 25 bp, Homo sapien
agagcagtttaactgagccagacca

SEQ ID NO: 242105 - DNA, 25 bp, Homo sapien
tcagagcagtttaactgagccagac

SEQ ID NO: 242106 - DNA, 25 bp, Homo sapien
gtggagtatatttgtagagtttccc

SEQ ID NO: 242107 - DNA, 25 bp, Homo sapien
tgataattttgtggagtatatttgt

SEQ ID NO: 242108 - DNA, 25 bp, Homo sapien
ttagagaaacatatgataattttgt

SEQ ID NO: 242109 - DNA, 25 bp, Homo sapien
ttgtggagtatatttgtagagtttc

SEQ ID NO: 242110 - DNA, 25 bp, Homo sapien
catgataatcaagtcgaatgggaac

SEQ ID NO: 242111 - DNA, 25 bp, Homo sapien
tgtttgccatgataatcaagtcgaa

SEQ ID NO: 242112 - DNA, 25 bp, Homo sapien
atcaagtcgaatgggaacttctgac

SEQ ID NO: 242113 - DNA, 25 bp, Homo sapien
tcgaatgggaacttctgacgtgaat

SEQ ID NO: 242114 - DNA, 25 bp, Homo sapien
tttatggataccaaaccccttgatg

SEQ ID NO: 242115 - DNA, 25 bp, Homo sapien
catctatgacatgcaactgtgggca

SEQ ID NO: 242116 - DNA, 25 bp, Homo sapien
gattaaaccagatagtcatgaccaa

SEQ ID NO: 242117 - DNA, 25 bp, Homo sapien
tgaagtggattgcttccagggcctt

SEQ ID NO: 242118 - DNA, 25 bp, Homo sapien
aatgatctggcttccaaaagttggc

SEQ ID NO: 242119 - DNA, 25 bp, Homo sapien
gtagaattccagatatagagggctg

SEQ ID NO: 242120 - DNA, 25 bp, Homo sapien
taatgttggtggttacatcctaagc

SEQ ID NO: 242121 - DNA, 25 bp, Homo sapien
ggtacacatctaacaaaatgatctg

SEQ ID NO: 242122 - DNA, 25 bp, Homo sapien
cacttccactgaattggcactatca

SEQ ID NO: 242123 - DNA, 25 bp, Homo sapien
ggctgatccctaaaagatgcttctt

SEQ ID NO: 242124 - DNA, 25 bp, Homo sapien
tccatgccattaaccacttccactg

SEQ ID NO: 242125 - DNA, 25 bp, Homo sapien
aaaacacaggctgatccctaaaaga

SEQ ID NO: 242126 - DNA, 25 bp, Homo sapien
tttgaggtactcaaatgccttggca

SEQ ID NO: 242127 - DNA, 25 bp, Homo sapien
cctttgaggtactcaaatgccttgg

SEQ ID NO: 242128 - DNA, 25 bp, Homo sapien
gaggtactcaaatgccttggcaaac

SEQ ID NO: 242129 - DNA, 25 bp, Homo sapien
tgaggtactcaaatgccttggcaaa

SEQ ID NO: 242130 - DNA, 25 bp, Homo sapien
tctacttctgcagaaagacttgtga

SEQ ID NO: 242131 - DNA, 25 bp, Homo sapien
tacttctgcagaaagacttgtgaag

SEQ ID NO: 242132 - DNA, 25 bp, Homo sapien
cagaaagacttgtgaagaaatcctt

SEQ ID NO: 242133 - DNA, 25 bp, Homo sapien
tctgcagaaagacttgtgaagaaat

SEQ ID NO: 242134 - DNA, 25 bp, Homo sapien
aatattgaggcggagcggcatcagc

SEQ ID NO: 242135 - DNA, 25 bp, Homo sapien
gacactctcaagcagcactcctgtg

SEQ ID NO: 242136 - DNA, 25 bp, Homo sapien
tctggacacacgtgtaaggctttca

SEQ ID NO: 242137 - DNA, 25 bp, Homo sapien
tcctgtggggacctgccagattctg

SEQ ID NO: 242138 - DNA, 25 bp, Homo sapien
tgatgttgccaaacgatctcgaatc

SEQ ID NO: 242139 - DNA, 25 bp, Homo sapien
tctcaagatcctgaacaatgaacac

SEQ ID NO: 242140 - DNA, 25 bp, Homo sapien
ttttcgaggcatttctttactgcaa

SEQ ID NO: 242141 - DNA, 25 bp, Homo sapien
catgttggagtgagcttttcgaggc

SEQ ID NO: 242142 - DNA, 25 bp, Homo sapien
atggcgggtagacttcatgctgaaa

SEQ ID NO: 242143 - DNA, 25 bp, Homo sapien
gagaggctggaatcacaatcaggtt

SEQ ID NO: 242144 - DNA, 25 bp, Homo sapien
tcaggtttgcatggcgggtagactt

SEQ ID NO: 242145 - DNA, 25 bp, Homo sapien
tgccgggagactgggtgttctgaga

SEQ ID NO: 242146 - DNA, 25 bp, Homo sapien
tccatgtctcgtgggtgtgtgagaa

SEQ ID NO: 242147 - DNA, 25 bp, Homo sapien
ccccacatactgtattacgtccatg

SEQ ID NO: 242148 - DNA, 25 bp, Homo sapien
ggtgtgtgagaaggcgaactgtggg

SEQ ID NO: 242149 - DNA, 25 bp, Homo sapien
actgtattacgtccatgtctcgtgg

SEQ ID NO: 242150 - DNA, 25 bp, Homo sapien
gagaagtgggagggactattccaaa

SEQ ID NO: 242151 - DNA, 25 bp, Homo sapien
atataacttttagccggagaagtgg

SEQ ID NO: 242152 - DNA, 25 bp, Homo sapien
gggctttgctcgtatcggtcttatt

SEQ ID NO: 242153 - DNA, 25 bp, Homo sapien
taacgggcagactgaaataattgtc

SEQ ID NO: 242154 - DNA, 25 bp, Homo sapien
cacatagcgaatcacaggaatggga

SEQ ID NO: 242155 - DNA, 25 bp, Homo sapien
tatcacaattgcatcatcaaccatg

SEQ ID NO: 242156 - DNA, 25 bp, Homo sapien
ggcacacctgtcattgcatcactga

SEQ ID NO: 242157 - DNA, 25 bp, Homo sapien
ttctcagtgggcacacctgtcattg

SEQ ID NO: 242158 - DNA, 25 bp, Homo sapien
gggatacattcccactctcgtcagg

SEQ ID NO: 242159 - DNA, 25 bp, Homo sapien
ccactctcgtcaggaaacaggaaga

SEQ ID NO: 242160 - DNA, 25 bp, Homo sapien
acaaatgataaattcgaaatggcaa

SEQ ID NO: 242161 - DNA, 25 bp, Homo sapien
gataaattcgaaatggcaatgtcac

SEQ ID NO: 242162 - DNA, 25 bp, Homo sapien
gttgagtggagttttgctttaccca

SEQ ID NO: 242163 - DNA, 25 bp, Homo sapien
tcagcagttgctggttagtgttgag

SEQ ID NO: 242164 - DNA, 25 bp, Homo sapien
gccttgttgcatgtcgatctcctcc

SEQ ID NO: 242165 - DNA, 25 bp, Homo sapien
cctgtggttttactgacgaggtgcc

SEQ ID NO: 242166 - DNA, 25 bp, Homo sapien
catcagatctcgtaacatttgttga

SEQ ID NO: 242167 - DNA, 25 bp, Homo sapien
tgaggatgatcgaccactggaatct

SEQ ID NO: 242168 - DNA, 25 bp, Homo sapien
ttctttgaaaggctccaggcttcat

SEQ ID NO: 242169 - DNA, 25 bp, Homo sapien
tgccttgttaggtgtctgcaagtca

SEQ ID NO: 242170 - DNA, 25 bp, Homo sapien
taggtgtctgcaagtcaccatagct

SEQ ID NO: 242171 - DNA, 25 bp, Homo sapien
ggctccaggcttcatatctgccttg

SEQ ID NO: 242172 - DNA, 25 bp, Homo sapien
cgcagcacaagagtctgagcacgtt

SEQ ID NO: 242173 - DNA, 25 bp, Homo sapien
acgcagcacaagagtctgagcacgt

SEQ ID NO: 242174 - DNA, 25 bp, Homo sapien
aacgcagcacaagagtctgagcacg

SEQ ID NO: 242175 - DNA, 25 bp, Homo sapien
taacgcagcacaagagtctgagcac

SEQ ID NO: 242176 - DNA, 25 bp, Homo sapien
acaacatcgctggaacagtgtaact

SEQ ID NO: 242177 - DNA, 25 bp, Homo sapien
ggaacagtgtaactcaaagcggggc

SEQ ID NO: 242178 - DNA, 25 bp, Homo sapien
tatggacaacatcgctggaacagtg

SEQ ID NO: 242179 - DNA, 25 bp, Homo sapien
ctgatatggacaacatcgctggaac

SEQ ID NO: 242180 - DNA, 25 bp, Homo sapien
gttaactccaaaagccccatatcca

SEQ ID NO: 242181 - DNA, 25 bp, Homo sapien
cccatatccatcacacgaacataat

SEQ ID NO: 242182 - DNA, 25 bp, Homo sapien
agccccatatccatcacacgaacat

SEQ ID NO: 242183 - DNA, 25 bp, Homo sapien
atggttaactccaaaagccccatat

SEQ ID NO: 242184 - DNA, 25 bp, Homo sapien
tctcttcagtacagctttcaaaaat

SEQ ID NO: 242185 - DNA, 25 bp, Homo sapien
aacacccaatacaactagcattcct

SEQ ID NO: 242186 - DNA, 25 bp, Homo sapien
gaaaatctcttcagtacagctttca

SEQ ID NO: 242187 - DNA, 25 bp, Homo sapien
caaaaatgtgtatccaaccaacacc

SEQ ID NO: 242188 - DNA, 25 bp, Homo sapien
gatgtacttaactagcattataaga

SEQ ID NO: 242189 - DNA, 25 bp, Homo sapien
ttagttcactagcattatcccagag

SEQ ID NO: 242190 - DNA, 25 bp, Homo sapien
catcccatagaagtcctaaaattca

SEQ ID NO: 242191 - DNA, 25 bp, Homo sapien
tgatcactatatacttaaagaccct

SEQ ID NO: 242192 - DNA, 25 bp, Homo sapien
gtcagatagatgtaaagcagcttca

SEQ ID NO: 242193 - DNA, 25 bp, Homo sapien
tgcatttgtcagatagatgtaaagc

SEQ ID NO: 242194 - DNA, 25 bp, Homo sapien
catttgtcagatagatgtaaagcag

SEQ ID NO: 242195 - DNA, 25 bp, Homo sapien
tttgtcagatagatgtaaagcagct

SEQ ID NO: 242196 - DNA, 25 bp, Homo sapien
tctgaaaaactaagctttgagtatc

SEQ ID NO: 242197 - DNA, 25 bp, Homo sapien
ctgaaaaactaagctttgagtatca

SEQ ID NO: 242198 - DNA, 25 bp, Homo sapien
aaaaactaagctttgagtatcatac

SEQ ID NO: 242199 - DNA, 25 bp, Homo sapien
ctgagagtagaggaagatttatcca

SEQ ID NO: 242200 - DNA, 25 bp, Homo sapien
ccaatgcaacgctactggaaacact

SEQ ID NO: 242201 - DNA, 25 bp, Homo sapien
tttccacggtaagaagagatcggat

SEQ ID NO: 242202 - DNA, 25 bp, Homo sapien
actgaatgtttccacggtaagaaga

SEQ ID NO: 242203 - DNA, 25 bp, Homo sapien
taatcaagtgcacagctccaaagat

SEQ ID NO: 242204 - DNA, 25 bp, Homo sapien
ctataatcaagtgcacagctccaaa

SEQ ID NO: 242205 - DNA, 25 bp, Homo sapien
tgaaaagttgtaaatgaagttggag

SEQ ID NO: 242206 - DNA, 25 bp, Homo sapien
tggaggattatatcccaaaacaggt

SEQ ID NO: 242207 - DNA, 25 bp, Homo sapien
ctttcagtcctacggcaatgagaaa

SEQ ID NO: 242208 - DNA, 25 bp, Homo sapien
agcattctatgctggagagtggctc

SEQ ID NO: 242209 - DNA, 25 bp, Homo sapien
tcagtcctacggcaatgagaaattc

SEQ ID NO: 242210 - DNA, 25 bp, Homo sapien
ctcctttcagtcctacggcaatgag

SEQ ID NO: 242211 - DNA, 25 bp, Homo sapien
ctttgtattggactctgatttatca

SEQ ID NO: 242212 - DNA, 25 bp, Homo sapien
ggactctgatttatcagacaatatt

SEQ ID NO: 242213 - DNA, 25 bp, Homo sapien
atattttaacggcaacagacagcat

SEQ ID NO: 242214 - DNA, 25 bp, Homo sapien
tattggactctgatttatcagacaa

SEQ ID NO: 242215 - DNA, 25 bp, Homo sapien
tgaagaagttttactgaggccatct

SEQ ID NO: 242216 - DNA, 25 bp, Homo sapien
cagaggaataaatagtaggttccaa

SEQ ID NO: 242217 - DNA, 25 bp, Homo sapien
tagtaggttccaaccagtgtgggcg

SEQ ID NO: 242218 - DNA, 25 bp, Homo sapien
tgtgggcgggttgagctgggaagtc

SEQ ID NO: 242219 - DNA, 25 bp, Homo sapien
ctgtcgggagaatcactccattcac

SEQ ID NO: 242220 - DNA, 25 bp, Homo sapien
tgaaccactattgaactctaaccag

SEQ ID NO: 242221 - DNA, 25 bp, Homo sapien
caaatgtagtgcttgtcatcaaaac

SEQ ID NO: 242222 - DNA, 25 bp, Homo sapien
tctaaccagaattcaccatgcttgt

SEQ ID NO: 242223 - DNA, 25 bp, Homo sapien
tatggtacagactgaaactgctaga

SEQ ID NO: 242224 - DNA, 25 bp, Homo sapien
ccagaagcagaattagcacctgttt

SEQ ID NO: 242225 - DNA, 25 bp, Homo sapien
gagccccacaaagtttgatctgcaa

SEQ ID NO: 242226 - DNA, 25 bp, Homo sapien
tgatctgcaacgaaagctaaatccc

SEQ ID NO: 242227 - DNA, 25 bp, Homo sapien
gctatcatcatggtttgccccagga

SEQ ID NO: 242228 - DNA, 25 bp, Homo sapien
gattaatattcagaagaactgagag

SEQ ID NO: 242229 - DNA, 25 bp, Homo sapien
cgatagttgggatcaacagtggaaa

SEQ ID NO: 242230 - DNA, 25 bp, Homo sapien
tgtgaacactgctattaatccatga

SEQ ID NO: 242231 - DNA, 25 bp, Homo sapien
ttttttcctgcgagaacgatagttg

SEQ ID NO: 242232 - DNA, 25 bp, Homo sapien
gatagcatattaaaacagcaacata

SEQ ID NO: 242233 - DNA, 25 bp, Homo sapien
acattctgatagcatattaaaacag

SEQ ID NO: 242234 - DNA, 25 bp, Homo sapien
cattctgatagcatattaaaacagc

SEQ ID NO: 242235 - DNA, 25 bp, Homo sapien
tctgatagcatattaaaacagcaac

SEQ ID NO: 242236 - DNA, 25 bp, Homo sapien
aaatattctcgaatgtctccactgg

SEQ ID NO: 242237 - DNA, 25 bp, Homo sapien
tggttcccacagtagcaagtcatta

SEQ ID NO: 242238 - DNA, 25 bp, Homo sapien
gactggctactgaaagcccaatgcc

SEQ ID NO: 242239 - DNA, 25 bp, Homo sapien
gaaagtattaatgagctgactggct

SEQ ID NO: 242240 - DNA, 25 bp, Homo sapien
aaagctcttattaggtagtgttaca

SEQ ID NO: 242241 - DNA, 25 bp, Homo sapien
attgctttatcctgaaattctgtca

SEQ ID NO: 242242 - DNA, 25 bp, Homo sapien
tatttggtaacgtaagttccagcac

SEQ ID NO: 242243 - DNA, 25 bp, Homo sapien
acgtaagttccagcacatagtgaga

SEQ ID NO: 242244 - DNA, 25 bp, Homo sapien
gatggggctggtcttcttagatcac

SEQ ID NO: 242245 - DNA, 25 bp, Homo sapien
cttcttagatcacaaacatctttca

SEQ ID NO: 242246 - DNA, 25 bp, Homo sapien
cattactctacgagaagaaaaagga

SEQ ID NO: 242247 - DNA, 25 bp, Homo sapien
tctccaaaatggaatgcatggctgg

SEQ ID NO: 242248 - DNA, 25 bp, Homo sapien
ggtgacacatctcacacattcatgt

SEQ ID NO: 242249 - DNA, 25 bp, Homo sapien
agggtgacacatctcacacattcat

SEQ ID NO: 242250 - DNA, 25 bp, Homo sapien
ttgagggtgacacatctcacacatt

SEQ ID NO: 242251 - DNA, 25 bp, Homo sapien
tgacacatctcacacattcatgtga

SEQ ID NO: 242252 - DNA, 25 bp, Homo sapien
tactccactagacacatggaaaaac

SEQ ID NO: 242253 - DNA, 25 bp, Homo sapien
aaacttaatagatggatctcctttc

SEQ ID NO: 242254 - DNA, 25 bp, Homo sapien
gacgatgttgtatctccatctactc

SEQ ID NO: 242255 - DNA, 25 bp, Homo sapien
caaagtcatctgacgatgttgtatc

SEQ ID NO: 242256 - DNA, 25 bp, Homo sapien
aaaaaaagactgatttactgaaatg

SEQ ID NO: 242257 - DNA, 25 bp, Homo sapien
gatttactgaaatgtgcttcttctc

SEQ ID NO: 242258 - DNA, 25 bp, Homo sapien
agactgatttactgaaatgtgcttc

SEQ ID NO: 242259 - DNA, 25 bp, Homo sapien
ttactgaaatgtgcttcttctcaag

SEQ ID NO: 242260 - DNA, 25 bp, Homo sapien
gagtttctcaccactggagataagg

SEQ ID NO: 242261 - DNA, 25 bp, Homo sapien
caggtggtctaggaaccacaggata

SEQ ID NO: 242262 - DNA, 25 bp, Homo sapien
gggatgatctcacaacacctgaagg

SEQ ID NO: 242263 - DNA, 25 bp, Homo sapien
taagatacgtaaaaccgagagagaa

SEQ ID NO: 242264 - DNA, 25 bp, Homo sapien
gaagatcaggtattgggaagcgaac

SEQ ID NO: 242265 - DNA, 25 bp, Homo sapien
ccgacaatttgcaggactatgtgaa

SEQ ID NO: 242266 - DNA, 25 bp, Homo sapien
tgtggcaacttgtactgatatccga

SEQ ID NO: 242267 - DNA, 25 bp, Homo sapien
gaagtgacttcttaaaccatggtcc

SEQ ID NO: 242268 - DNA, 25 bp, Homo sapien
tatacatgtgggatgccatcatctc

SEQ ID NO: 242269 - DNA, 25 bp, Homo sapien
catcatctctactgtggcaagtttc

SEQ ID NO: 242270 - DNA, 25 bp, Homo sapien
aatttgcaattctgccttgtgagga

SEQ ID NO: 242271 - DNA, 25 bp, Homo sapien
tgtgaggaactgaactaagtcttgc

SEQ ID NO: 242272 - DNA, 25 bp, Homo sapien
ggccctctattctcagaatgcttat

SEQ ID NO: 242273 - DNA, 25 bp, Homo sapien
gccctctattctcagaatgcttata

SEQ ID NO: 242274 - DNA, 25 bp, Homo sapien
ccctctattctcagaatgcttataa

SEQ ID NO: 242275 - DNA, 25 bp, Homo sapien
ctctattctcagaatgcttataatg

SEQ ID NO: 242276 - DNA, 25 bp, Homo sapien
agacacacaggggaatgggaaccag

SEQ ID NO: 242277 - DNA, 25 bp, Homo sapien
tgaagacacacaggggaatgggaac

SEQ ID NO: 242278 - DNA, 25 bp, Homo sapien
cacacaggggaatgggaaccagttt

SEQ ID NO: 242279 - DNA, 25 bp, Homo sapien
ctgaagacacacaggggaatgggaa

SEQ ID NO: 242280 - DNA, 25 bp, Homo sapien
tgttcataggatactttaatgccag

SEQ ID NO: 242281 - DNA, 25 bp, Homo sapien
ggacatatcagtactaaaatatcgg

SEQ ID NO: 242282 - DNA, 25 bp, Homo sapien
aaatatcgggaagctgatctttgtc

SEQ ID NO: 242283 - DNA, 25 bp, Homo sapien
gaaataggcactccaaaaattccat

SEQ ID NO: 242284 - DNA, 25 bp, Homo sapien
gcaaacactgctcggaaagacttaa

SEQ ID NO: 242285 - DNA, 25 bp, Homo sapien
taaggtgatcgtgtgagcaagcttc

SEQ ID NO: 242286 - DNA, 25 bp, Homo sapien
tcgtgtgagcaagcttctgcaaaca

SEQ ID NO: 242287 - DNA, 25 bp, Homo sapien
gaaaatcttgctggatcaatctttt

SEQ ID NO: 242288 - DNA, 25 bp, Homo sapien
gctactgccataggtgtcaatggat

SEQ ID NO: 242289 - DNA, 25 bp, Homo sapien
tatacaagtaaagaaagctactgcc

SEQ ID NO: 242290 - DNA, 25 bp, Homo sapien
cactgaaacagatctagatgggaga

SEQ ID NO: 242291 - DNA, 25 bp, Homo sapien
gcacagagattgaaaaagttcccac

SEQ ID NO: 242292 - DNA, 25 bp, Homo sapien
tgttgggtgaactaggttggatgga

SEQ ID NO: 242293 - DNA, 25 bp, Homo sapien
tgtcttctgtaaaggtgttgggtga

SEQ ID NO: 242294 - DNA, 25 bp, Homo sapien
aatgttgaccctcttactggctgtt

SEQ ID NO: 242295 - DNA, 25 bp, Homo sapien
ttatgatgatcaaggaactctcccc

SEQ ID NO: 242296 - DNA, 25 bp, Homo sapien
tgataactcaaggtccatgtttggg

SEQ ID NO: 242297 - DNA, 25 bp, Homo sapien
gacatgtccatatcagccatggaga

SEQ ID NO: 242298 - DNA, 25 bp, Homo sapien
tatatgtactagttaatgataactc

SEQ ID NO: 242299 - DNA, 25 bp, Homo sapien
cacagtagcacttaatggagatcct

SEQ ID NO: 242300 - DNA, 25 bp, Homo sapien
aagctttgctctgaagatacaccca

SEQ ID NO: 242301 - DNA, 25 bp, Homo sapien
taataccggtttaattccatctgaa

SEQ ID NO: 242302 - DNA, 25 bp, Homo sapien
ttcctgctgcatgggtcgatttttc

SEQ ID NO: 242303 - DNA, 25 bp, Homo sapien
cacggctagaaggtgtacgagctgt

SEQ ID NO: 242304 - DNA, 25 bp, Homo sapien
ctatctttattagctaaccctattt

SEQ ID NO: 242305 - DNA, 25 bp, Homo sapien
atctttattagctaaccctattttg

SEQ ID NO: 242306 - DNA, 25 bp, Homo sapien
gaatagagtctatctgtccatcaac

SEQ ID NO: 242307 - DNA, 25 bp, Homo sapien
catatccaaaagcaagtgcacctgt

SEQ ID NO: 242308 - DNA, 25 bp, Homo sapien
cacctgtcttggtgacaggagtaga

SEQ ID NO: 242309 - DNA, 25 bp, Homo sapien
gtgacaggagtagatgaatagagtc

SEQ ID NO: 242310 - DNA, 25 bp, Homo sapien
acaaagcccgctctgcatgcaaggg

SEQ ID NO: 242311 - DNA, 25 bp, Homo sapien
gaagatggtgcttaggtggacttcc

SEQ ID NO: 242312 - DNA, 25 bp, Homo sapien
tactgtggtccacaaagcccgctct

SEQ ID NO: 242313 - DNA, 25 bp, Homo sapien
ggacgccactacagaaacgtggaca

SEQ ID NO: 242314 - DNA, 25 bp, Homo sapien
aaaaagcagaatatccctgccttac

SEQ ID NO: 242315 - DNA, 25 bp, Homo sapien
ctaaaaagcagaatatccctgcctt

SEQ ID NO: 242316 - DNA, 25 bp, Homo sapien
taaaaagcagaatatccctgcctta

SEQ ID NO: 242317 - DNA, 25 bp, Homo sapien
cgcctcctcttaacactgactccta

SEQ ID NO: 242318 - DNA, 25 bp, Homo sapien
ctcctcttaacactgactcctatta

SEQ ID NO: 242319 - DNA, 25 bp, Homo sapien
gcctcctcttaacactgactcctat

SEQ ID NO: 242320 - DNA, 25 bp, Homo sapien
cctcctcttaacactgactcctatt

SEQ ID NO: 242321 - DNA, 25 bp, Homo sapien
cagaggattccctgtagagtttaca

SEQ ID NO: 242322 - DNA, 25 bp, Homo sapien
gatgttaccacagcagaggattccc

SEQ ID NO: 242323 - DNA, 25 bp, Homo sapien
ttattagtatagtttcccaaggatg

SEQ ID NO: 242324 - DNA, 25 bp, Homo sapien
gacatggcaaatgcattccccagag

SEQ ID NO: 242325 - DNA, 25 bp, Homo sapien
cttgtaaagggccttttgacattgt

SEQ ID NO: 242326 - DNA, 25 bp, Homo sapien
tcccaacatgttacttgtaaagggc

SEQ ID NO: 242327 - DNA, 25 bp, Homo sapien
tgtaaagggccttttgacattgtaa

SEQ ID NO: 242328 - DNA, 25 bp, Homo sapien
aatcccaacatgttacttgtaaagg

SEQ ID NO: 242329 - DNA, 25 bp, Homo sapien
catactgagtataccgtacactgct

SEQ ID NO: 242330 - DNA, 25 bp, Homo sapien
cacctgtatcccaaaaacaactgaa

SEQ ID NO: 242331 - DNA, 25 bp, Homo sapien
actgagtataccgtacactgctcag

SEQ ID NO: 242332 - DNA, 25 bp, Homo sapien
gaggtatataatggactgtagggac

SEQ ID NO: 242333 - DNA, 25 bp, Homo sapien
tacagaaagtgaaacaaacactgac

SEQ ID NO: 242334 - DNA, 25 bp, Homo sapien
tttactacagaaagtgaaacaaaca

SEQ ID NO: 242335 - DNA, 25 bp, Homo sapien
tactacagaaagtgaaacaaacact

SEQ ID NO: 242336 - DNA, 25 bp, Homo sapien
tggttttactacagaaagtgaaaca

SEQ ID NO: 242337 - DNA, 25 bp, Homo sapien
ttcattctgtttcaacgtgagactc

SEQ ID NO: 242338 - DNA, 25 bp, Homo sapien
cattctgtttcaacgtgagactcaa

SEQ ID NO: 242339 - DNA, 25 bp, Homo sapien
tctgtttcaacgtgagactcaactc

SEQ ID NO: 242340 - DNA, 25 bp, Homo sapien
tgtttcaacgtgagactcaactcca

SEQ ID NO: 242341 - DNA, 25 bp, Homo sapien
aattaaccgtccaatctgcactggg

SEQ ID NO: 242342 - DNA, 25 bp, Homo sapien
cagaaggtgctatctctggtaaatt

SEQ ID NO: 242343 - DNA, 25 bp, Homo sapien
ggtgtggctcataaataattttggg

SEQ ID NO: 242344 - DNA, 25 bp, Homo sapien
tggtaaatttctagttagctgtggg

SEQ ID NO: 242345 - DNA, 25 bp, Homo sapien
taacttgtgagcaaaagcagtgggt

SEQ ID NO: 242346 - DNA, 25 bp, Homo sapien
gcagaaaactcatcccagaagagag

SEQ ID NO: 242347 - DNA, 25 bp, Homo sapien
cactggtgcagttgaacacactggg

SEQ ID NO: 242348 - DNA, 25 bp, Homo sapien
ctgaggattcgtcagcagtttcatc

SEQ ID NO: 242349 - DNA, 25 bp, Homo sapien
ctttctattcgaatttcaagtgcag

SEQ ID NO: 242350 - DNA, 25 bp, Homo sapien
tttctattcgaatttcaagtgcagt

SEQ ID NO: 242351 - DNA, 25 bp, Homo sapien
tcaaaaggctgggatccttctcctt

SEQ ID NO: 242352 - DNA, 25 bp, Homo sapien
gctggtcataaaacttgaccaatac

SEQ ID NO: 242353 - DNA, 25 bp, Homo sapien
gaccaatacataggctcagaaccag

SEQ ID NO: 242354 - DNA, 25 bp, Homo sapien
ttcttttgccaattgcatactgctg

SEQ ID NO: 242355 - DNA, 25 bp, Homo sapien
ctgggcgaggtctaggccggaagac

SEQ ID NO: 242356 - DNA, 25 bp, Homo sapien
gcgaggtctaggccggaagaccatt

SEQ ID NO: 242357 - DNA, 25 bp, Homo sapien
aggtctaggccggaagaccatttct

SEQ ID NO: 242358 - DNA, 25 bp, Homo sapien
tctaggccggaagaccatttctaat

SEQ ID NO: 242359 - DNA, 25 bp, Homo sapien
tccagtgcacaattatcctgcagta

SEQ ID NO: 242360 - DNA, 25 bp, Homo sapien
gcatctgctgactccaagatctcat

SEQ ID NO: 242361 - DNA, 25 bp, Homo sapien
cagtgacttctaagggtgcatctgc

SEQ ID NO: 242362 - DNA, 25 bp, Homo sapien
gtaaagagccccatggaactgacag

SEQ ID NO: 242363 - DNA, 25 bp, Homo sapien
ggcagcatgatcaataaaagacaag

SEQ ID NO: 242364 - DNA, 25 bp, Homo sapien
tgtacgatttttaaatcccactgga

SEQ ID NO: 242365 - DNA, 25 bp, Homo sapien
gttcaatggaaaaagacacgatgtt

SEQ ID NO: 242366 - DNA, 25 bp, Homo sapien
gcaaacatggttaaagaccactcct

SEQ ID NO: 242367 - DNA, 25 bp, Homo sapien
ccatttgtccaaggggacctgggcg

SEQ ID NO: 242368 - DNA, 25 bp, Homo sapien
cctgggcgagggacccggtgccttg

SEQ ID NO: 242369 - DNA, 25 bp, Homo sapien
tgtccaaggggacctgggcgaggga

SEQ ID NO: 242370 - DNA, 25 bp, Homo sapien
ctgggcgagggacccggtgccttgg

SEQ ID NO: 242371 - DNA, 25 bp, Homo sapien
ggactccgaaaacggccaaggcata

SEQ ID NO: 242372 - DNA, 25 bp, Homo sapien
ccctcttcttgatggactccgaaaa

SEQ ID NO: 242373 - DNA, 25 bp, Homo sapien
aggaggtaccggcaggccctcttct

SEQ ID NO: 242374 - DNA, 25 bp, Homo sapien
gaggtaccggcaggccctcttcttg

SEQ ID NO: 242375 - DNA, 25 bp, Homo sapien
cggctgcgggttgcgacggctccgg

SEQ ID NO: 242376 - DNA, 25 bp, Homo sapien
tgcgggttgcgacggctccggcctc

SEQ ID NO: 242377 - DNA, 25 bp, Homo sapien
ctcggggtagcgactccggctccag

SEQ ID NO: 242378 - DNA, 25 bp, Homo sapien
cggcctcggggtagcgactccggct

SEQ ID NO: 242379 - DNA, 25 bp, Homo sapien
gtcccaaccggctcggagagagtgc

SEQ ID NO: 242380 - DNA, 25 bp, Homo sapien
catccctatttggtgccgggagtcc

SEQ ID NO: 242381 - DNA, 25 bp, Homo sapien
tgccgccgcgcgacgaatttgttgt

SEQ ID NO: 242382 - DNA, 25 bp, Homo sapien
ttgtcatccgcgaggcgcgttcccg

SEQ ID NO: 242383 - DNA, 25 bp, Homo sapien
ggtgtgtcatagcaacgatcaggaa

SEQ ID NO: 242384 - DNA, 25 bp, Homo sapien
catacgctcgcttaatcctgggtgt

SEQ ID NO: 242385 - DNA, 25 bp, Homo sapien
tttgcctggcggtttgcagagcgct

SEQ ID NO: 242386 - DNA, 25 bp, Homo sapien
gagcattgaccggtgcccattgtca

SEQ ID NO: 242387 - DNA, 25 bp, Homo sapien
tctgcgcaatcgtatttctgccttt

SEQ ID NO: 242388 - DNA, 25 bp, Homo sapien
gggctgttctggcagtctgcgcaat

SEQ ID NO: 242389 - DNA, 25 bp, Homo sapien
actgcattccttgagaaatgctaaa

SEQ ID NO: 242390 - DNA, 25 bp, Homo sapien
tgggcaaaactgcattccttgagaa

SEQ ID NO: 242391 - DNA, 25 bp, Homo sapien
tttagaaccagggtactttgtatgc

SEQ ID NO: 242392 - DNA, 25 bp, Homo sapien
ggtactttgtatgcagttgcttgga

SEQ ID NO: 242393 - DNA, 25 bp, Homo sapien
gcagttgcttggattgttgatttcc

SEQ ID NO: 242394 - DNA, 25 bp, Homo sapien
tgcttggattgttgatttccctcat

SEQ ID NO: 242395 - DNA, 25 bp, Homo sapien
cataaggtggtgagcaaggcctgcc

SEQ ID NO: 242396 - DNA, 25 bp, Homo sapien
cgtctacccctgagagagtttctgc

SEQ ID NO: 242397 - DNA, 25 bp, Homo sapien
gatcttgagtgagtccgtctacccc

SEQ ID NO: 242398 - DNA, 25 bp, Homo sapien
cctgcctaagcaagtaagaatgtca

SEQ ID NO: 242399 - DNA, 25 bp, Homo sapien
tccccaacagatgtacagtgttctg

SEQ ID NO: 242400 - DNA, 25 bp, Homo sapien
aatttaataaactgtaccatgctgc

SEQ ID NO: 242401 - DNA, 25 bp, Homo sapien
tacatgttgaacagtaaggattggg

SEQ ID NO: 242402 - DNA, 25 bp, Homo sapien
taaaattttgcatctggtcatacct

SEQ ID NO: 242403 - DNA, 25 bp, Homo sapien
gtggatttatctcagcaactgcatg

SEQ ID NO: 242404 - DNA, 25 bp, Homo sapien
caagggaactgcgtattcttagtcc

SEQ ID NO: 242405 - DNA, 25 bp, Homo sapien
tcttagtccaccacaacctttatgg

SEQ ID NO: 242406 - DNA, 25 bp, Homo sapien
taatctcttgtggaacggtcaagtc

SEQ ID NO: 242407 - DNA, 25 bp, Homo sapien
agattttgtttttctcgcaatggat

SEQ ID NO: 242408 - DNA, 25 bp, Homo sapien
ttttctcgcaatggatatgtattcc

SEQ ID NO: 242409 - DNA, 25 bp, Homo sapien
ctcgcaatggatatgtattcctttc

SEQ ID NO: 242410 - DNA, 25 bp, Homo sapien
tgtttttctcgcaatggatatgtat

SEQ ID NO: 242411 - DNA, 25 bp, Homo sapien
tagggattcctgataagcggtcagc

SEQ ID NO: 242412 - DNA, 25 bp, Homo sapien
gaaagctatggtacatgcagcactg

SEQ ID NO: 242413 - DNA, 25 bp, Homo sapien
gactagaatgataaaggccaggcag

SEQ ID NO: 242414 - DNA, 25 bp, Homo sapien
tgcagcactgaactggagaacacag

SEQ ID NO: 242415 - DNA, 25 bp, Homo sapien
ctcgtcacatttcagcggcctgtgc

SEQ ID NO: 242416 - DNA, 25 bp, Homo sapien
gctcgtcacatttcagcggcctgtg

SEQ ID NO: 242417 - DNA, 25 bp, Homo sapien
caggtgtagagtttccctaaatcaa

SEQ ID NO: 242418 - DNA, 25 bp, Homo sapien
ccaggtgtagagtttccctaaatca

SEQ ID NO: 242419 - DNA, 25 bp, Homo sapien
ggcccggaccgctgtctgaggttca

SEQ ID NO: 242420 - DNA, 25 bp, Homo sapien
caccccgtgcaggtgacatgcagcg

SEQ ID NO: 242421 - DNA, 25 bp, Homo sapien
ctgtctgaggttcacccgcgtggcg

SEQ ID NO: 242422 - DNA, 25 bp, Homo sapien
atcgggcacggtgctccgctcgtcc

SEQ ID NO: 242423 - DNA, 25 bp, Homo sapien
ttcctcatgccctgagacttacagc

SEQ ID NO: 242424 - DNA, 25 bp, Homo sapien
catgtggaggagtccctcgctgtcc

SEQ ID NO: 242425 - DNA, 25 bp, Homo sapien
gccgccatgtggaggagtccctcgc

SEQ ID NO: 242426 - DNA, 25 bp, Homo sapien
cctgagacttacagcagcaggccgc

SEQ ID NO: 242427 - DNA, 25 bp, Homo sapien
tgtatatgattcgaattagccagct

SEQ ID NO: 242428 - DNA, 25 bp, Homo sapien
taaagatgtatatgattcgaattag

SEQ ID NO: 242429 - DNA, 25 bp, Homo sapien
gatgtatatgattcgaattagccag

SEQ ID NO: 242430 - DNA, 25 bp, Homo sapien
tatatgattcgaattagccagctgg

SEQ ID NO: 242431 - DNA, 25 bp, Homo sapien
tcaggcctgagaagagtgttgacct

SEQ ID NO: 242432 - DNA, 25 bp, Homo sapien
cactggcgtcagagagcttcttcac

SEQ ID NO: 242433 - DNA, 25 bp, Homo sapien
tgctggctttggcacccgcaatgaa

SEQ ID NO: 242434 - DNA, 25 bp, Homo sapien
acagcctgttggatgtggcgcttgc

SEQ ID NO: 242435 - DNA, 25 bp, Homo sapien
ttgggaggatgtctgggctgccccc

SEQ ID NO: 242436 - DNA, 25 bp, Homo sapien
gggaggatgtctgggctgcccccgg

SEQ ID NO: 242437 - DNA, 25 bp, Homo sapien
tcttgggaggatgtctgggctgccc

SEQ ID NO: 242438 - DNA, 25 bp, Homo sapien
gatgtctgggctgcccccggagcca

SEQ ID NO: 242439 - DNA, 25 bp, Homo sapien
acaccagaaggtggatgacgtgtgg

SEQ ID NO: 242440 - DNA, 25 bp, Homo sapien
gacaccagaaggtggatgacgtgtg

SEQ ID NO: 242441 - DNA, 25 bp, Homo sapien
caccagaaggtggatgacgtgtgga

SEQ ID NO: 242442 - DNA, 25 bp, Homo sapien
tgctttggcttcgggaaagaaagga

SEQ ID NO: 242443 - DNA, 25 bp, Homo sapien
cttccttctttaccttcagagccat

SEQ ID NO: 242444 - DNA, 25 bp, Homo sapien
tggcttcgggaaagaaaggagcttc

SEQ ID NO: 242445 - DNA, 25 bp, Homo sapien
ggagcttccttctttaccttcagag

SEQ ID NO: 242446 - DNA, 25 bp, Homo sapien
aatacacggccggagagagttgccc

SEQ ID NO: 242447 - DNA, 25 bp, Homo sapien
cagagtagggcgtcttcagaaagca

SEQ ID NO: 242448 - DNA, 25 bp, Homo sapien
cagatcccaggagcaggttcttaga

SEQ ID NO: 242449 - DNA, 25 bp, Homo sapien
gagctgcttacggacattacctgat

SEQ ID NO: 242450 - DNA, 25 bp, Homo sapien
cctaccaacactaaggcataacatg

SEQ ID NO: 242451 - DNA, 25 bp, Homo sapien
ttgaaggagttcaacaagtggtcat

SEQ ID NO: 242452 - DNA, 25 bp, Homo sapien
gaaggagttcaacaagtggtcattt

SEQ ID NO: 242453 - DNA, 25 bp, Homo sapien
ggcataacatgacatactattatga

SEQ ID NO: 242454 - DNA, 25 bp, Homo sapien
tgctttgagttcagggtcaggatcc

SEQ ID NO: 242455 - DNA, 25 bp, Homo sapien
aacctttaggcggagaaatctgcat

SEQ ID NO: 242456 - DNA, 25 bp, Homo sapien
gcacctattaggcagtcacgctcca

SEQ ID NO: 242457 - DNA, 25 bp, Homo sapien
gatcccagacaatgaatcggagaga

SEQ ID NO: 242458 - DNA, 25 bp, Homo sapien
cagtagtgagatgacgactcacggc

SEQ ID NO: 242459 - DNA, 25 bp, Homo sapien
gtgagatgacgactcacggcagcct

SEQ ID NO: 242460 - DNA, 25 bp, Homo sapien
tagtgagatgacgactcacggcagc

SEQ ID NO: 242461 - DNA, 25 bp, Homo sapien
tgcagtagtgagatgacgactcacg

SEQ ID NO: 242462 - DNA, 25 bp, Homo sapien
ttcgtcgaactgacacccgtgcgta

SEQ ID NO: 242463 - DNA, 25 bp, Homo sapien
ttccagtgcctcctaaacgaactag

SEQ ID NO: 242464 - DNA, 25 bp, Homo sapien
tgtttttcccattcggagtcaccag

SEQ ID NO: 242465 - DNA, 25 bp, Homo sapien
tagaactttggttaaggcagcgtcc

SEQ ID NO: 242466 - DNA, 25 bp, Homo sapien
tataattcgttctaattcgcagatg

SEQ ID NO: 242467 - DNA, 25 bp, Homo sapien
gtgacaccgtagaacttataattcg

SEQ ID NO: 242468 - DNA, 25 bp, Homo sapien
tctcaaacttttgccgaggggtggc

SEQ ID NO: 242469 - DNA, 25 bp, Homo sapien
aggtcccacccgatatagattaagg

SEQ ID NO: 242470 - DNA, 25 bp, Homo sapien
gacaacctttgctaaaatgccagcg

SEQ ID NO: 242471 - DNA, 25 bp, Homo sapien
aacaaatatttcagcgcctgggtca

SEQ ID NO: 242472 - DNA, 25 bp, Homo sapien
ttttcgtcggctctaggctaagcac

SEQ ID NO: 242473 - DNA, 25 bp, Homo sapien
tgttccagaattcgcggactgtcgt

SEQ ID NO: 242474 - DNA, 25 bp, Homo sapien
gctgcccggcgaagtacttgttact

SEQ ID NO: 242475 - DNA, 25 bp, Homo sapien
tactttgcagtccagtacgaagcgg

SEQ ID NO: 242476 - DNA, 25 bp, Homo sapien
cccaaggcagcgactcatgcgagtc

SEQ ID NO: 242477 - DNA, 25 bp, Homo sapien
catgcgagtcgttctaagcgccgcg

SEQ ID NO: 242478 - DNA, 25 bp, Homo sapien
acatacggtgcacgcgtgggtgcct

SEQ ID NO: 242479 - DNA, 25 bp, Homo sapien
gaaaggtgggacctcacaatgcgcc

SEQ ID NO: 242480 - DNA, 25 bp, Homo sapien
gatctctccgggttcttccttgcgc

SEQ ID NO: 242481 - DNA, 25 bp, Homo sapien
acaatgcgccggaagcggtgcctcg

SEQ ID NO: 242482 - DNA, 25 bp, Homo sapien
caggcggccttaggaactccgcttc

SEQ ID NO: 242483 - DNA, 25 bp, Homo sapien
gcgtccccgcccgagggacaactca

SEQ ID NO: 242484 - DNA, 25 bp, Homo sapien
gccgcaggcggccttaggaactccg

SEQ ID NO: 242485 - DNA, 25 bp, Homo sapien
cgcccgagggacaactcaccgcccg

SEQ ID NO: 242486 - DNA, 25 bp, Homo sapien
gcgtcagcagttctagaacgttgct

SEQ ID NO: 242487 - DNA, 25 bp, Homo sapien
cgtggtggcgtcagcagttctagaa

SEQ ID NO: 242488 - DNA, 25 bp, Homo sapien
gcagttctagaacgttgctgtggta

SEQ ID NO: 242489 - DNA, 25 bp, Homo sapien
tagaacgttgctgtggtagcgctcg

SEQ ID NO: 242490 - DNA, 25 bp, Homo sapien
ttttgtaataaatagatcgctggag

SEQ ID NO: 242491 - DNA, 25 bp, Homo sapien
gaatatgtcttccaatttcatggct

SEQ ID NO: 242492 - DNA, 25 bp, Homo sapien
ggctttcagtttgaaccttctgtcc

SEQ ID NO: 242493 - DNA, 25 bp, Homo sapien
ctggagataaagttgctagacaaac

SEQ ID NO: 242494 - DNA, 25 bp, Homo sapien
gagactgactgcgtacttacacaga

SEQ ID NO: 242495 - DNA, 25 bp, Homo sapien
tacttctcctatcagcttagcagcc

SEQ ID NO: 242496 - DNA, 25 bp, Homo sapien
cacaaccgccacagaagcactatgg

SEQ ID NO: 242497 - DNA, 25 bp, Homo sapien
gaaactaattgagacattgaaaccc

SEQ ID NO: 242498 - DNA, 25 bp, Homo sapien
aatttggaagcattaccattaaact

SEQ ID NO: 242499 - DNA, 25 bp, Homo sapien
taattaggttgcagggtaaccgatg

SEQ ID NO: 242500 - DNA, 25 bp, Homo sapien
aacttcaggttaactctgagagcta

SEQ ID NO: 242501 - DNA, 25 bp, Homo sapien
ttacatctagtaccaaacattgaca

SEQ ID NO: 242502 - DNA, 25 bp, Homo sapien
taaggcagattctatttgtacttcc

SEQ ID NO: 242503 - DNA, 25 bp, Homo sapien
taggcagccttggagatcacattgt

SEQ ID NO: 242504 - DNA, 25 bp, Homo sapien
aaacttaccctctgaataaactctg

SEQ ID NO: 242505 - DNA, 25 bp, Homo sapien
taggttgggaaatcagttactatac

SEQ ID NO: 242506 - DNA, 25 bp, Homo sapien
tgttaagagtggcaggtgttctcca

SEQ ID NO: 242507 - DNA, 25 bp, Homo sapien
tggatggaactagtataaaggcagg

SEQ ID NO: 242508 - DNA, 25 bp, Homo sapien
caccgcgtccggctgtcagaatttc

SEQ ID NO: 242509 - DNA, 25 bp, Homo sapien
catatgggaccaaagtagctagttt

SEQ ID NO: 242510 - DNA, 25 bp, Homo sapien
gaaatgtgccacttactgatataca

SEQ ID NO: 242511 - DNA, 25 bp, Homo sapien
caggttttccgaacctcaaggcatt

SEQ ID NO: 242512 - DNA, 25 bp, Homo sapien
acatggataatgtagtttcaccgcg

SEQ ID NO: 242513 - DNA, 25 bp, Homo sapien
tggttgggctaaagaagaccttcca

SEQ ID NO: 242514 - DNA, 25 bp, Homo sapien
tgaggactttgcgttttcatggagc

SEQ ID NO: 242515 - DNA, 25 bp, Homo sapien
gaagaatttcgcacgatgtgggtga

SEQ ID NO: 242516 - DNA, 25 bp, Homo sapien
gattgtcagccacactgatagctac

SEQ ID NO: 242517 - DNA, 25 bp, Homo sapien
caaattgtcttgatgcataccatag

SEQ ID NO: 242518 - DNA, 25 bp, Homo sapien
gaggattccctggatgagtgtgaaa

SEQ ID NO: 242519 - DNA, 25 bp, Homo sapien
caaatcatgcataatccaaagactt

SEQ ID NO: 242520 - DNA, 25 bp, Homo sapien
tggattaccgtcacctgccatcatg

SEQ ID NO: 242521 - DNA, 25 bp, Homo sapien
tgtattacaatttaaccaatggcag

SEQ ID NO: 242522 - DNA, 25 bp, Homo sapien
aagtcttcgaagtgttgcctacctc

SEQ ID NO: 242523 - DNA, 25 bp, Homo sapien
tccctgtggatgtcatgtaagtacc

SEQ ID NO: 242524 - DNA, 25 bp, Homo sapien
taagttgactgctccgtggttccct

SEQ ID NO: 242525 - DNA, 25 bp, Homo sapien
cattcaccagtttcagagtgtgggt

SEQ ID NO: 242526 - DNA, 25 bp, Homo sapien
tagaaggtttgtgtactatttactg

SEQ ID NO: 242527 - DNA, 25 bp, Homo sapien
gaagtaacattagacagtgctgctt

SEQ ID NO: 242528 - DNA, 25 bp, Homo sapien
taaagtcagttgctaaattgtatgt

SEQ ID NO: 242529 - DNA, 25 bp, Homo sapien
tactttatccaataaagtcagttgc

SEQ ID NO: 242530 - DNA, 25 bp, Homo sapien
taggtacatcgagtgaaagcattcc

SEQ ID NO: 242531 - DNA, 25 bp, Homo sapien
tatagtaggagtcaagaggacatcc

SEQ ID NO: 242532 - DNA, 25 bp, Homo sapien
aaagcctacggtctccagagttgtt

SEQ ID NO: 242533 - DNA, 25 bp, Homo sapien
tctgtgaccaacatacaggctactg

SEQ ID NO: 242534 - DNA, 25 bp, Homo sapien
aatcccccagattacttacgatgcc

SEQ ID NO: 242535 - DNA, 25 bp, Homo sapien
cccagattacttacgatgcctaata

SEQ ID NO: 242536 - DNA, 25 bp, Homo sapien
taaatcccccagattacttacgatg

SEQ ID NO: 242537 - DNA, 25 bp, Homo sapien
tcccccagattacttacgatgccta

SEQ ID NO: 242538 - DNA, 25 bp, Homo sapien
ctcattgttaaattatggtgctttg

SEQ ID NO: 242539 - DNA, 25 bp, Homo sapien
catccagtacagacctttctgatat

SEQ ID NO: 242540 - DNA, 25 bp, Homo sapien
tcagaaaacatccagtacagacctt

SEQ ID NO: 242541 - DNA, 25 bp, Homo sapien
cattgttaaattatggtgctttgaa

SEQ ID NO: 242542 - DNA, 25 bp, Homo sapien
tcctatgaggtagctgtaaccctta

SEQ ID NO: 242543 - DNA, 25 bp, Homo sapien
tgcatacaaatcagcgatcagccag

SEQ ID NO: 242544 - DNA, 25 bp, Homo sapien
tacatctagttcagttcctatgagg

SEQ ID NO: 242545 - DNA, 25 bp, Homo sapien
aaacgtcaactctagggtacatttg

SEQ ID NO: 242546 - DNA, 25 bp, Homo sapien
cttggaccttttctgtgtagtgact

SEQ ID NO: 242547 - DNA, 25 bp, Homo sapien
gagatcagactgttgctttcgcatg

SEQ ID NO: 242548 - DNA, 25 bp, Homo sapien
cccttaggctatgcattaatcgaag

SEQ ID NO: 242549 - DNA, 25 bp, Homo sapien
taaacgtttcatgtaactgcaccca

SEQ ID NO: 242550 - DNA, 25 bp, Homo sapien
tgtatttatagctcagataataatt

SEQ ID NO: 242551 - DNA, 25 bp, Homo sapien
agcagccttgtatttatagctcaga

SEQ ID NO: 242552 - DNA, 25 bp, Homo sapien
ctcagataataattaggtgtttgtt

SEQ ID NO: 242553 - DNA, 25 bp, Homo sapien
tggcagcagccttgtatttatagct

SEQ ID NO: 242554 - DNA, 25 bp, Homo sapien
atttgaaacggtgtagatggtatcc

SEQ ID NO: 242555 - DNA, 25 bp, Homo sapien
gaaacggtgtagatggtatcctcat

SEQ ID NO: 242556 - DNA, 25 bp, Homo sapien
gatggtatcctcatttttcacataa

SEQ ID NO: 242557 - DNA, 25 bp, Homo sapien
cacaatatttgaaacggtgtagatg

SEQ ID NO: 242558 - DNA, 25 bp, Homo sapien
gatgcctggtgctatgtgatttcca

SEQ ID NO: 242559 - DNA, 25 bp, Homo sapien
tgtgatgcctggtgctatgtgattt

SEQ ID NO: 242560 - DNA, 25 bp, Homo sapien
aattggtccttgtttgcgttttctg

SEQ ID NO: 242561 - DNA, 25 bp, Homo sapien
tttgcgttttctgactgcagtggag

SEQ ID NO: 242562 - DNA, 25 bp, Homo sapien
taaagttgtcgaaaagagacagttg

SEQ ID NO: 242563 - DNA, 25 bp, Homo sapien
gaactgctccccatgagtgacagag

SEQ ID NO: 242564 - DNA, 25 bp, Homo sapien
gacagagggcatgatctgccttcac

SEQ ID NO: 242565 - DNA, 25 bp, Homo sapien
agaaccgaccatgcctggacactgt

SEQ ID NO: 242566 - DNA, 25 bp, Homo sapien
tacattagggcgataccaggttttc

SEQ ID NO: 242567 - DNA, 25 bp, Homo sapien
aataaggttaagctcgtgtcctcgg

SEQ ID NO: 242568 - DNA, 25 bp, Homo sapien
tacctgtgggtgtagtggagcaact

SEQ ID NO: 242569 - DNA, 25 bp, Homo sapien
tgtcctcggatatatcgtaatcagg

SEQ ID NO: 242570 - DNA, 25 bp, Homo sapien
gttctcagagacctccaaagaaggg

SEQ ID NO: 242571 - DNA, 25 bp, Homo sapien
aggactctggtttagtgaactgaac

SEQ ID NO: 242572 - DNA, 25 bp, Homo sapien
tcagagacctccaaagaagggtttc

SEQ ID NO: 242573 - DNA, 25 bp, Homo sapien
gaactgtagcatgttgagagcatgt

SEQ ID NO: 242574 - DNA, 25 bp, Homo sapien
aaaggagagttctagtcatggactc

SEQ ID NO: 242575 - DNA, 25 bp, Homo sapien
tttgaaaggagagttctagtcatgg

SEQ ID NO: 242576 - DNA, 25 bp, Homo sapien
gaaaggagagttctagtcatggact

SEQ ID NO: 242577 - DNA, 25 bp, Homo sapien
tgaaaggagagttctagtcatggac

SEQ ID NO: 242578 - DNA, 25 bp, Homo sapien
agagctttgaatttggctgttaacc

SEQ ID NO: 242579 - DNA, 25 bp, Homo sapien
gtagaattttcacatgttaggaaca

SEQ ID NO: 242580 - DNA, 25 bp, Homo sapien
agaattttcacatgttaggaacaga

SEQ ID NO: 242581 - DNA, 25 bp, Homo sapien
atttggctgttaaccaaacaggctg

SEQ ID NO: 242582 - DNA, 25 bp, Homo sapien
caaagcattggagcttccatgaagg

SEQ ID NO: 242583 - DNA, 25 bp, Homo sapien
ttgaagcaccttagaggctctgact

SEQ ID NO: 242584 - DNA, 25 bp, Homo sapien
aggaaggattagaagttgaagcacc

SEQ ID NO: 242585 - DNA, 25 bp, Homo sapien
tggctagtaagtggctaaaccacat

SEQ ID NO: 242586 - DNA, 25 bp, Homo sapien
cttctggcaagggttcaagtgcagt

SEQ ID NO: 242587 - DNA, 25 bp, Homo sapien
cgtagcttctgaggagacagtgagc

SEQ ID NO: 242588 - DNA, 25 bp, Homo sapien
tggtagggccagttgttacagcaac

SEQ ID NO: 242589 - DNA, 25 bp, Homo sapien
gccaagacaaatgcagtgcgtagct

SEQ ID NO: 242590 - DNA, 25 bp, Homo sapien
tgcgtcgtcaagaagcaccgcacag

SEQ ID NO: 242591 - DNA, 25 bp, Homo sapien
tggacaacttgcctagcaccttggt

SEQ ID NO: 242592 - DNA, 25 bp, Homo sapien
taagccacttgagtccacttgcagc

SEQ ID NO: 242593 - DNA, 25 bp, Homo sapien
caccgcacaggaggtgagggtgctt

SEQ ID NO: 242594 - DNA, 25 bp, Homo sapien
gctatgctctgggttaggcgccaga

SEQ ID NO: 242595 - DNA, 25 bp, Homo sapien
tctgggttaggcgccagagggagcg

SEQ ID NO: 242596 - DNA, 25 bp, Homo sapien
gggttaggcgccagagggagcgggc

SEQ ID NO: 242597 - DNA, 25 bp, Homo sapien
ctatgctctgggttaggcgccagag

SEQ ID NO: 242598 - DNA, 25 bp, Homo sapien
ggccgtgtcttgatgcatgtctgta

SEQ ID NO: 242599 - DNA, 25 bp, Homo sapien
tgcccgagttgggagcagctcttgc

SEQ ID NO: 242600 - DNA, 25 bp, Homo sapien
gagcagctcttgcaaagctgaggcc

SEQ ID NO: 242601 - DNA, 25 bp, Homo sapien
catattgtggtattgcccgagttgg

SEQ ID NO: 242602 - DNA, 25 bp, Homo sapien
atgtgtaatagctgcttgtcagtgt

SEQ ID NO: 242603 - DNA, 25 bp, Homo sapien
gatgtgtaatagctgcttgtcagtg

SEQ ID NO: 242604 - DNA, 25 bp, Homo sapien
ctggaagagaaggatcctggcttct

SEQ ID NO: 242605 - DNA, 25 bp, Homo sapien
tctggaagagaaggatcctggcttc

SEQ ID NO: 242606 - DNA, 25 bp, Homo sapien
gaagagaaggatcctggcttctcag

SEQ ID NO: 242607 - DNA, 25 bp, Homo sapien
ctttctctgtttgctgctctggaag

SEQ ID NO: 242608 - DNA, 25 bp, Homo sapien
tctcctgcctgccaagccttcgcac

SEQ ID NO: 242609 - DNA, 25 bp, Homo sapien
cctgccaagccttcgcacctgctgc

SEQ ID NO: 242610 - DNA, 25 bp, Homo sapien
tcctgcctgccaagccttcgcacct

SEQ ID NO: 242611 - DNA, 25 bp, Homo sapien
tgcctgccaagccttcgcacctgct

SEQ ID NO: 242612 - DNA, 25 bp, Homo sapien
tacagatgcggcaccttaatggaaa

SEQ ID NO: 242613 - DNA, 25 bp, Homo sapien
taccgagaacctgagttgtaagaac

SEQ ID NO: 242614 - DNA, 25 bp, Homo sapien
tggatgccaccaagcgaggaaggct

SEQ ID NO: 242615 - DNA, 25 bp, Homo sapien
gaatcttgctacatacagatgcggc

SEQ ID NO: 242616 - DNA, 25 bp, Homo sapien
ctccttccactcctcgatcggggta

SEQ ID NO: 242617 - DNA, 25 bp, Homo sapien
tccttccactcctcgatcggggtag

SEQ ID NO: 242618 - DNA, 25 bp, Homo sapien
cttctgagcttggaatccggaagcc

SEQ ID NO: 242619 - DNA, 25 bp, Homo sapien
ttggaatccggaagccccagcatcc

SEQ ID NO: 242620 - DNA, 25 bp, Homo sapien
tgagcttggaatccggaagccccag

SEQ ID NO: 242621 - DNA, 25 bp, Homo sapien
ccagcatcccgccttctctaggctc

SEQ ID NO: 242622 - DNA, 25 bp, Homo sapien
cgcggaagcgtagacacccggcttt

SEQ ID NO: 242623 - DNA, 25 bp, Homo sapien
ttttcccgcgtgctctatcgggctc

SEQ ID NO: 242624 - DNA, 25 bp, Homo sapien
ctaagtcgcggaagcgtagacaccc

SEQ ID NO: 242625 - DNA, 25 bp, Homo sapien
tgcagcctaagtcgcggaagcgtag

SEQ ID NO: 242626 - DNA, 25 bp, Homo sapien
tagatatcccacatctcaatgtaga

SEQ ID NO: 242627 - DNA, 25 bp, Homo sapien
catctcaatgtagatgaaaaggtgg

SEQ ID NO: 242628 - DNA, 25 bp, Homo sapien
tccctcgctaccttctctgtggggg

SEQ ID NO: 242629 - DNA, 25 bp, Homo sapien
tttgaatgtagatatcccacatctc

SEQ ID NO: 242630 - DNA, 25 bp, Homo sapien
tcacaaataggtcggcctgagagca

SEQ ID NO: 242631 - DNA, 25 bp, Homo sapien
tcctgctcacaaataggtcggcctg

SEQ ID NO: 242632 - DNA, 25 bp, Homo sapien
tcagtcctgctcacaaataggtcgg

SEQ ID NO: 242633 - DNA, 25 bp, Homo sapien
aaataggtcggcctgagagcagagc

SEQ ID NO: 242634 - DNA, 25 bp, Homo sapien
gactgtagtcaatggctaatggctg

SEQ ID NO: 242635 - DNA, 25 bp, Homo sapien
tcagtgcacggacttctcccggaga

SEQ ID NO: 242636 - DNA, 25 bp, Homo sapien
gagcaggaatttgcaagcgttgcct

SEQ ID NO: 242637 - DNA, 25 bp, Homo sapien
caacctggtgctgtctacctgtagg

SEQ ID NO: 242638 - DNA, 25 bp, Homo sapien
taagtgccgatttgcaagcccacaa

SEQ ID NO: 242639 - DNA, 25 bp, Homo sapien
gatatagaggcatctggctgccgca

SEQ ID NO: 242640 - DNA, 25 bp, Homo sapien
tcactggacggcttttggaatcagc

SEQ ID NO: 242641 - DNA, 25 bp, Homo sapien
caaagattcggcgtgcgctggatca

SEQ ID NO: 242642 - DNA, 25 bp, Homo sapien
aacatgctgccacttagaatcactg

SEQ ID NO: 242643 - DNA, 25 bp, Homo sapien
gaatcatgtctggaggtgtgactgc

SEQ ID NO: 242644 - DNA, 25 bp, Homo sapien
tagaatcactgatccgaatcatgtc

SEQ ID NO: 242645 - DNA, 25 bp, Homo sapien
cactgatccgaatcatgtctggagg

SEQ ID NO: 242646 - DNA, 25 bp, Homo sapien
cacccagggaccccggatggaggca

SEQ ID NO: 242647 - DNA, 25 bp, Homo sapien
gatggaggcagggttaccgttgctc

SEQ ID NO: 242648 - DNA, 25 bp, Homo sapien
cagggaccccggatggaggcagggt

SEQ ID NO: 242649 - DNA, 25 bp, Homo sapien
catcgccttttccaacctgcccctt

SEQ ID NO: 242650 - DNA, 25 bp, Homo sapien
attccaccccgagcctgggcagaag

SEQ ID NO: 242651 - DNA, 25 bp, Homo sapien
tccagccgtcggagctggattccac

SEQ ID NO: 242652 - DNA, 25 bp, Homo sapien
aggtgctctgggcaggcctcgacac

SEQ ID NO: 242653 - DNA, 25 bp, Homo sapien
cagcgctttcttcccagttacggtt

SEQ ID NO: 242654 - DNA, 25 bp, Homo sapien
gctcctgcgagacttaggcctcggt

SEQ ID NO: 242655 - DNA, 25 bp, Homo sapien
gtgtgctggagcacgcgcagaatcc

SEQ ID NO: 242656 - DNA, 25 bp, Homo sapien
ttttgatagccgtggacagtgcagg

SEQ ID NO: 242657 - DNA, 25 bp, Homo sapien
tttgggtcacgctgaatgctgccgc

SEQ ID NO: 242658 - DNA, 25 bp, Homo sapien
agcccctggtcgaaggctgcccaca

SEQ ID NO: 242659 - DNA, 25 bp, Homo sapien
ctgccccggtgtgaccaagaggggt

SEQ ID NO: 242660 - DNA, 25 bp, Homo sapien
cgtggagcccctggtcgaaggctgc

SEQ ID NO: 242661 - DNA, 25 bp, Homo sapien
tctgccccggtgtgaccaagagggg

SEQ ID NO: 242662 - DNA, 25 bp, Homo sapien
ccacgtgaacccgatgccatggact

SEQ ID NO: 242663 - DNA, 25 bp, Homo sapien
ttttacatggagtgctacccggctc

SEQ ID NO: 242664 - DNA, 25 bp, Homo sapien
gactcaggccccgtgggcgagccat

SEQ ID NO: 242665 - DNA, 25 bp, Homo sapien
ggctccactggcgtctgctgaggaa

SEQ ID NO: 242666 - DNA, 25 bp, Homo sapien
atctccacggggtttgccctccagg

SEQ ID NO: 242667 - DNA, 25 bp, Homo sapien
catctccacggggtttgccctccag

SEQ ID NO: 242668 - DNA, 25 bp, Homo sapien
ccacggggtttgccctccagggctg

SEQ ID NO: 242669 - DNA, 25 bp, Homo sapien
tgcatctccacggggtttgccctcc

SEQ ID NO: 242670 - DNA, 25 bp, Homo sapien
cagccaaatcaacccgggtgatcgc

SEQ ID NO: 242671 - DNA, 25 bp, Homo sapien
catatatctgtgaccgaagaccggt

SEQ ID NO: 242672 - DNA, 25 bp, Homo sapien
atggagaaggggacacccgacttgt

SEQ ID NO: 242673 - DNA, 25 bp, Homo sapien
acccgacttgtcagcaagatcagcc

SEQ ID NO: 242674 - DNA, 25 bp, Homo sapien
attggcatttgtgctccaccagggc

SEQ ID NO: 242675 - DNA, 25 bp, Homo sapien
cacttggtgctattaatatcggaga

SEQ ID NO: 242676 - DNA, 25 bp, Homo sapien
caaataaagggtcaaacacatggca

SEQ ID NO: 242677 - DNA, 25 bp, Homo sapien
tacccactttcatcgctgtcatagc

SEQ ID NO: 242678 - DNA, 25 bp, Homo sapien
ccatctggcggaggagccccaaagc

SEQ ID NO: 242679 - DNA, 25 bp, Homo sapien
tgattgactgcgagtcaaggtctcc

SEQ ID NO: 242680 - DNA, 25 bp, Homo sapien
ggaacaatgcctgcaacccatctgg

SEQ ID NO: 242681 - DNA, 25 bp, Homo sapien
tcacattaggcatcaatagcgctgg

SEQ ID NO: 242682 - DNA, 25 bp, Homo sapien
tgatggaaggagaacactcggtagc

SEQ ID NO: 242683 - DNA, 25 bp, Homo sapien
gaacactcggtagcgatgataaagc

SEQ ID NO: 242684 - DNA, 25 bp, Homo sapien
gcgatgataaagcactcggaaagta

SEQ ID NO: 242685 - DNA, 25 bp, Homo sapien
taaagcactcggaaagtaatgatgt

SEQ ID NO: 242686 - DNA, 25 bp, Homo sapien
tgtccctaacttatgctgagtggtt

SEQ ID NO: 242687 - DNA, 25 bp, Homo sapien
tgagaagcaggcctttgactctgtt

SEQ ID NO: 242688 - DNA, 25 bp, Homo sapien
ttgatctaggaatgtgagcactgtc

SEQ ID NO: 242689 - DNA, 25 bp, Homo sapien
caaaggcattatcaccaacaaagga

SEQ ID NO: 242690 - DNA, 25 bp, Homo sapien
gccttattttgccttgaccacattg

SEQ ID NO: 242691 - DNA, 25 bp, Homo sapien
cattggctattccattggctggtgg

SEQ ID NO: 242692 - DNA, 25 bp, Homo sapien
cttctcccaggatgtttcttaaagg

SEQ ID NO: 242693 - DNA, 25 bp, Homo sapien
cttagagcctgtgtccttttgccca

SEQ ID NO: 242694 - DNA, 25 bp, Homo sapien
cttctggctgctgctgagaggacca

SEQ ID NO: 242695 - DNA, 25 bp, Homo sapien
caggcttctggctgctgctgagagg

SEQ ID NO: 242696 - DNA, 25 bp, Homo sapien
ggcttctggctgctgctgagaggac

SEQ ID NO: 242697 - DNA, 25 bp, Homo sapien
ttctggctgctgctgagaggaccat

SEQ ID NO: 242698 - DNA, 25 bp, Homo sapien
aatgtggacgttgggtagattctcc

SEQ ID NO: 242699 - DNA, 25 bp, Homo sapien
tagattctccagatgaggttacgga

SEQ ID NO: 242700 - DNA, 25 bp, Homo sapien
ttacggacacagtctcatggacaca

SEQ ID NO: 242701 - DNA, 25 bp, Homo sapien
tagtaacaaggaacctcgaatgtgg

SEQ ID NO: 242702 - DNA, 25 bp, Homo sapien
tggcaatggttatcctccatgggaa

SEQ ID NO: 242703 - DNA, 25 bp, Homo sapien
catggcaatggttatcctccatggg

SEQ ID NO: 242704 - DNA, 25 bp, Homo sapien
gcatatccatggcaatggttatcct

SEQ ID NO: 242705 - DNA, 25 bp, Homo sapien
tatccatggcaatggttatcctcca

SEQ ID NO: 242706 - DNA, 25 bp, Homo sapien
ttcctgcaacacctcagccgtttgc

SEQ ID NO: 242707 - DNA, 25 bp, Homo sapien
tcctgcaacacctcagccgtttgca

SEQ ID NO: 242708 - DNA, 25 bp, Homo sapien
gcagggaggactgagtgggagtttc

SEQ ID NO: 242709 - DNA, 25 bp, Homo sapien
catggagcaaaagccggccatggtt

SEQ ID NO: 242710 - DNA, 25 bp, Homo sapien
ccggccatggttccatgctgtgggt

SEQ ID NO: 242711 - DNA, 25 bp, Homo sapien
gcaaaagccggccatggttccatgc

SEQ ID NO: 242712 - DNA, 25 bp, Homo sapien
aagccggccatggttccatgctgtg

SEQ ID NO: 242713 - DNA, 25 bp, Homo sapien
gcctgttcccaatctcttctgtgtt

SEQ ID NO: 242714 - DNA, 25 bp, Homo sapien
caagcctgttcccaatctcttctgt

SEQ ID NO: 242715 - DNA, 25 bp, Homo sapien
ctgcgtggagcccacaagcctgttc

SEQ ID NO: 242716 - DNA, 25 bp, Homo sapien
ctgttcccaatctcttctgtgttga

SEQ ID NO: 242717 - DNA, 25 bp, Homo sapien
aagaggtagccaagactcgctctgc

SEQ ID NO: 242718 - DNA, 25 bp, Homo sapien
gattaggtgccagtttgccgaaaag

SEQ ID NO: 242719 - DNA, 25 bp, Homo sapien
tcgcgtcactttgaaaacttgcaag

SEQ ID NO: 242720 - DNA, 25 bp, Homo sapien
cgctctgctcacagatggtgggtga

SEQ ID NO: 242721 - DNA, 25 bp, Homo sapien
ccctgtgtgggtcttcctcggacac

SEQ ID NO: 242722 - DNA, 25 bp, Homo sapien
cctgtgtgggtcttcctcggacacc

SEQ ID NO: 242723 - DNA, 25 bp, Homo sapien
gtccctgtgtgggtcttcctcggac

SEQ ID NO: 242724 - DNA, 25 bp, Homo sapien
tccctgtgtgggtcttcctcggaca

SEQ ID NO: 242725 - DNA, 25 bp, Homo sapien
cactggagtgggttcccaccttcct

SEQ ID NO: 242726 - DNA, 25 bp, Homo sapien
actggagtgggttcccaccttcctg

SEQ ID NO: 242727 - DNA, 25 bp, Homo sapien
ctggagtgggttcccaccttcctgg

SEQ ID NO: 242728 - DNA, 25 bp, Homo sapien
tcactggagtgggttcccaccttcc

SEQ ID NO: 242729 - DNA, 25 bp, Homo sapien
cacacaaacacaaatgcccaagcac

SEQ ID NO: 242730 - DNA, 25 bp, Homo sapien
accccactgacaatggagcactcgg

SEQ ID NO: 242731 - DNA, 25 bp, Homo sapien
ttccagtggccccactgacgatgga

SEQ ID NO: 242732 - DNA, 25 bp, Homo sapien
ccccactgacaatggagcactcgga

SEQ ID NO: 242733 - DNA, 25 bp, Homo sapien
cactgacgatggagccttggagctc

SEQ ID NO: 242734 - DNA, 25 bp, Homo sapien
agagaagagcttcttttgactcaga

SEQ ID NO: 242735 - DNA, 25 bp, Homo sapien
taggggtggccatgggccagagtgc

SEQ ID NO: 242736 - DNA, 25 bp, Homo sapien
aagtctctaggggtggccatgggcc

SEQ ID NO: 242737 - DNA, 25 bp, Homo sapien
gactcagaacaaagtctctaggggt

SEQ ID NO: 242738 - DNA, 25 bp, Homo sapien
gggacactgaggacattgagttaca

SEQ ID NO: 242739 - DNA, 25 bp, Homo sapien
acactgaggacattgagttacagac

SEQ ID NO: 242740 - DNA, 25 bp, Homo sapien
gacactgaggacattgagttacaga

SEQ ID NO: 242741 - DNA, 25 bp, Homo sapien
tggggacactgaggacattgagtta

SEQ ID NO: 242742 - DNA, 25 bp, Homo sapien
gcagccttacttggcaaaatcgagg

SEQ ID NO: 242743 - DNA, 25 bp, Homo sapien
acaaccactgagcagccttacttgg

SEQ ID NO: 242744 - DNA, 25 bp, Homo sapien
gacaaccactgagcagccttacttg

SEQ ID NO: 242745 - DNA, 25 bp, Homo sapien
tacttggcaaaatcgaggtttctgc

SEQ ID NO: 242746 - DNA, 25 bp, Homo sapien
atggccttccaattgctggggccac

SEQ ID NO: 242747 - DNA, 25 bp, Homo sapien
ggggccactcctgttggggtcctca

SEQ ID NO: 242748 - DNA, 25 bp, Homo sapien
ggccttccaattgctggggccactc

SEQ ID NO: 242749 - DNA, 25 bp, Homo sapien
tgagaaatggccttccaattgctgg

SEQ ID NO: 242750 - DNA, 25 bp, Homo sapien
tgtctgctgacatcagttttcccac

SEQ ID NO: 242751 - DNA, 25 bp, Homo sapien
gttttcccacgcagagcttgagctc

SEQ ID NO: 242752 - DNA, 25 bp, Homo sapien
tgacatcagttttcccacgcagagc

SEQ ID NO: 242753 - DNA, 25 bp, Homo sapien
tcgagcggcactcgtcctgccgctg

SEQ ID NO: 242754 - DNA, 25 bp, Homo sapien
tgtcaggggcgtggttctcagctgg

SEQ ID NO: 242755 - DNA, 25 bp, Homo sapien
ctgctgtgttgccatgacaggcaag

SEQ ID NO: 242756 - DNA, 25 bp, Homo sapien
tgctgtgttgccatgacaggcaagg

SEQ ID NO: 242757 - DNA, 25 bp, Homo sapien
gagggccctggctcatttctttata

SEQ ID NO: 242758 - DNA, 25 bp, Homo sapien
acaggcaagggcaatggagggccct

SEQ ID NO: 242759 - DNA, 25 bp, Homo sapien
gcacttaatcttggctggtgactga

SEQ ID NO: 242760 - DNA, 25 bp, Homo sapien
tgactgaccagaaaccggattccag

SEQ ID NO: 242761 - DNA, 25 bp, Homo sapien
ggaactagacccatagcacatgtaa

SEQ ID NO: 242762 - DNA, 25 bp, Homo sapien
taaaccatgaactgagggatgacag

SEQ ID NO: 242763 - DNA, 25 bp, Homo sapien
ttcacagtcataagggacaaacgca

SEQ ID NO: 242764 - DNA, 25 bp, Homo sapien
acgttttggactgggcagcatctcg

SEQ ID NO: 242765 - DNA, 25 bp, Homo sapien
caaactggcttggatgcaattgagc

SEQ ID NO: 242766 - DNA, 25 bp, Homo sapien
gaacgggattttatggtcaacagga

SEQ ID NO: 242767 - DNA, 25 bp, Homo sapien
caaaactccgttccatggcacacaa

SEQ ID NO: 242768 - DNA, 25 bp, Homo sapien
ctcacagctggtggcattgttcgtc

SEQ ID NO: 242769 - DNA, 25 bp, Homo sapien
ggcacacaaaggttccgtgagatgt

SEQ ID NO: 242770 - DNA, 25 bp, Homo sapien
gatgttcgtgggtattccaaaggac

SEQ ID NO: 242771 - DNA, 25 bp, Homo sapien
tttccttagcccttataccattgga

SEQ ID NO: 242772 - DNA, 25 bp, Homo sapien
taaatgtcactttcttgtgaggctt

SEQ ID NO: 242773 - DNA, 25 bp, Homo sapien
ttataccattggacatatgacatgt

SEQ ID NO: 242774 - DNA, 25 bp, Homo sapien
tgtagaacagttcctgcacagagtg

SEQ ID NO: 242775 - DNA, 25 bp, Homo sapien
tgaaaattattatgacacgcacttt

SEQ ID NO: 242776 - DNA, 25 bp, Homo sapien
tcttgcgaggtggaagtaatgatta

SEQ ID NO: 242777 - DNA, 25 bp, Homo sapien
aagtcctcacttttaaggaaatgca

SEQ ID NO: 242778 - DNA, 25 bp, Homo sapien
cttaagttatcccaaagccgtgtgt

SEQ ID NO: 242779 - DNA, 25 bp, Homo sapien
gttagaacgttgttctgagatgtca

SEQ ID NO: 242780 - DNA, 25 bp, Homo sapien
agttaagtccaatgttagaacgttg

SEQ ID NO: 242781 - DNA, 25 bp, Homo sapien
agatgtcagccatgtgagtggagat

SEQ ID NO: 242782 - DNA, 25 bp, Homo sapien
tctgagatgtcagccatgtgagtgg

SEQ ID NO: 242783 - DNA, 25 bp, Homo sapien
gtgcaactgaaacagccctccaccc

SEQ ID NO: 242784 - DNA, 25 bp, Homo sapien
tgcaactgaaacagccctccacccc

SEQ ID NO: 242785 - DNA, 25 bp, Homo sapien
aatatgtccccaatattgcctagga

SEQ ID NO: 242786 - DNA, 25 bp, Homo sapien
caaaaggcccctcctcttgataacg

SEQ ID NO: 242787 - DNA, 25 bp, Homo sapien
tatcaaatgataggagacagagctc

SEQ ID NO: 242788 - DNA, 25 bp, Homo sapien
taactgggcgtcttatatttctgct

SEQ ID NO: 242789 - DNA, 25 bp, Homo sapien
agtcgacagtgggagcaaccgtgaa

SEQ ID NO: 242790 - DNA, 25 bp, Homo sapien
accagtcgacagtgggagcaaccgt

SEQ ID NO: 242791 - DNA, 25 bp, Homo sapien
gtcgacagtgggagcaaccgtgaac

SEQ ID NO: 242792 - DNA, 25 bp, Homo sapien
ttaccagtcgacagtgggagcaacc

SEQ ID NO: 242793 - DNA, 25 bp, Homo sapien
ggaataggccgtgacatcagcaatc

SEQ ID NO: 242794 - DNA, 25 bp, Homo sapien
ttctcccacggaggattcgctggtg

SEQ ID NO: 242795 - DNA, 25 bp, Homo sapien
ttcgctggtgggaataggccgtgac

SEQ ID NO: 242796 - DNA, 25 bp, Homo sapien
ctggtgggaataggccgtgacatca

SEQ ID NO: 242797 - DNA, 25 bp, Homo sapien
ggctcaggctgtgtccacgctgtcc

SEQ ID NO: 242798 - DNA, 25 bp, Homo sapien
gggctcaggctgtgtccacgctgtc

SEQ ID NO: 242799 - DNA, 25 bp, Homo sapien
ggggctcaggctgtgtccacgctgt

SEQ ID NO: 242800 - DNA, 25 bp, Homo sapien
gctcaggctgtgtccacgctgtccc

SEQ ID NO: 242801 - DNA, 25 bp, Homo sapien
ttgttgccgaggtgaggaatggcag

SEQ ID NO: 242802 - DNA, 25 bp, Homo sapien
tgttgccgaggtgaggaatggcagc

SEQ ID NO: 242803 - DNA, 25 bp, Homo sapien
cccatggtatggcttgagtggcccc

SEQ ID NO: 242804 - DNA, 25 bp, Homo sapien
cagacaggcccacccttggacagga

SEQ ID NO: 242805 - DNA, 25 bp, Homo sapien
gcctccttgggagcagctattctcg

SEQ ID NO: 242806 - DNA, 25 bp, Homo sapien
tattctcgctgttagttgacccaca

SEQ ID NO: 242807 - DNA, 25 bp, Homo sapien
ctggaaagtgggagcagcgttcagc

SEQ ID NO: 242808 - DNA, 25 bp, Homo sapien
aagtgggagcagcgttcagcagggt

SEQ ID NO: 242809 - DNA, 25 bp, Homo sapien
tggaaagtgggagcagcgttcagca

SEQ ID NO: 242810 - DNA, 25 bp, Homo sapien
gaaagtgggagcagcgttcagcagg

SEQ ID NO: 242811 - DNA, 25 bp, Homo sapien
actggacctcttgttcccagcatgt

SEQ ID NO: 242812 - DNA, 25 bp, Homo sapien
tggacctcttgttcccagcatgttc

SEQ ID NO: 242813 - DNA, 25 bp, Homo sapien
cactggacctcttgttcccagcatg

SEQ ID NO: 242814 - DNA, 25 bp, Homo sapien
gacctcttgttcccagcatgttcac

SEQ ID NO: 242815 - DNA, 25 bp, Homo sapien
ggcatttcgactgggtgcaatgata

SEQ ID NO: 242816 - DNA, 25 bp, Homo sapien
gctgcataatgaagtaaccccttcc

SEQ ID NO: 242817 - DNA, 25 bp, Homo sapien
taattttgcccgtcggctgcagcag

SEQ ID NO: 242818 - DNA, 25 bp, Homo sapien
tgcagcaggcttgacagtttgctac

SEQ ID NO: 242819 - DNA, 25 bp, Homo sapien
tctcagacttagaagaagcacactt

SEQ ID NO: 242820 - DNA, 25 bp, Homo sapien
gtgtgtggctgaaattaagcgactc

SEQ ID NO: 242821 - DNA, 25 bp, Homo sapien
tagacatgctaaacctctttcagag

SEQ ID NO: 242822 - DNA, 25 bp, Homo sapien
gaagaagcacacttattaaaaatcc

SEQ ID NO: 242823 - DNA, 25 bp, Homo sapien
ctgtagttcagggtgagaccagcac

SEQ ID NO: 242824 - DNA, 25 bp, Homo sapien
gttcagggtgagaccagcacaatac

SEQ ID NO: 242825 - DNA, 25 bp, Homo sapien
tcagggtgagaccagcacaatacat

SEQ ID NO: 242826 - DNA, 25 bp, Homo sapien
cactgtagttcagggtgagaccagc

SEQ ID NO: 242827 - DNA, 25 bp, Homo sapien
tcttgccaaggacacaatcctcagt

SEQ ID NO: 242828 - DNA, 25 bp, Homo sapien
gcttttcatagaacaactcaggact

SEQ ID NO: 242829 - DNA, 25 bp, Homo sapien
gcttattcttattgggtcttgccaa

SEQ ID NO: 242830 - DNA, 25 bp, Homo sapien
atgcatggtgtgcatgtttagcccc

SEQ ID NO: 242831 - DNA, 25 bp, Homo sapien
caagttgacattcgcagagtttact

SEQ ID NO: 242832 - DNA, 25 bp, Homo sapien
atcaagttgacattcgcagagttta

SEQ ID NO: 242833 - DNA, 25 bp, Homo sapien
tgacattcgcagagtttactcaggg

SEQ ID NO: 242834 - DNA, 25 bp, Homo sapien
gttgacattcgcagagtttactcag

SEQ ID NO: 242835 - DNA, 25 bp, Homo sapien
aactgaatggaagtcagcaagcagc

SEQ ID NO: 242836 - DNA, 25 bp, Homo sapien
tgcccacggcctgcatgtatctgtg

SEQ ID NO: 242837 - DNA, 25 bp, Homo sapien
tttctttatgcccaaagagcctgcc

SEQ ID NO: 242838 - DNA, 25 bp, Homo sapien
taggtgggagatggttcaggagtca

SEQ ID NO: 242839 - DNA, 25 bp, Homo sapien
cttgatcagagtgaattgttgttac

SEQ ID NO: 242840 - DNA, 25 bp, Homo sapien
ttgatcagagtgaattgttgttact

SEQ ID NO: 242841 - DNA, 25 bp, Homo sapien
caaataggaggtcgatggcatcaaa

SEQ ID NO: 242842 - DNA, 25 bp, Homo sapien
tctggtcaatgagcaaccgaggccc

SEQ ID NO: 242843 - DNA, 25 bp, Homo sapien
cctgtgctgaacaaacggatgtgag

SEQ ID NO: 242844 - DNA, 25 bp, Homo sapien
gcttgacccctgtgaagatattggc

SEQ ID NO: 242845 - DNA, 25 bp, Homo sapien
gagtgatactttcaaagggcctctc

SEQ ID NO: 242846 - DNA, 25 bp, Homo sapien
aaggccagaaagaccccttgagatg

SEQ ID NO: 242847 - DNA, 25 bp, Homo sapien
cccagccctgatgatagaggaaagg

SEQ ID NO: 242848 - DNA, 25 bp, Homo sapien
taacgtgaaacttagccctttgtga

SEQ ID NO: 242849 - DNA, 25 bp, Homo sapien
ttccaggaattaatggcttctaatc

SEQ ID NO: 242850 - DNA, 25 bp, Homo sapien
aattccaggaattaatggcttctaa

SEQ ID NO: 242851 - DNA, 25 bp, Homo sapien
attccaggaattaatggcttctaat

SEQ ID NO: 242852 - DNA, 25 bp, Homo sapien
gctgaaggcaaccatggatcccaag

SEQ ID NO: 242853 - DNA, 25 bp, Homo sapien
gggctgaaggcaaccatggatccca

SEQ ID NO: 242854 - DNA, 25 bp, Homo sapien
cagggctgaaggcaaccatggatcc

SEQ ID NO: 242855 - DNA, 25 bp, Homo sapien
gaaggcaaccatggatcccaagtag

SEQ ID NO: 242856 - DNA, 25 bp, Homo sapien
ccaagaattccaggttccatgttta

SEQ ID NO: 242857 - DNA, 25 bp, Homo sapien
gcatagagtcgcttctgaaccagta

SEQ ID NO: 242858 - DNA, 25 bp, Homo sapien
agggactcagtccaaaattctgcaa

SEQ ID NO: 242859 - DNA, 25 bp, Homo sapien
taagaacagccaaggtcagggactc

SEQ ID NO: 242860 - DNA, 25 bp, Homo sapien
tactgacacagatttgctcgttcat

SEQ ID NO: 242861 - DNA, 25 bp, Homo sapien
attactgacacagatttgctcgttc

SEQ ID NO: 242862 - DNA, 25 bp, Homo sapien
ttactgacacagatttgctcgttca

SEQ ID NO: 242863 - DNA, 25 bp, Homo sapien
cagctccctccttctatgcataggg

SEQ ID NO: 242864 - DNA, 25 bp, Homo sapien
tttccgaaaaatcaaatgaatcaca

SEQ ID NO: 242865 - DNA, 25 bp, Homo sapien
gacactcaagtgcagccggcatttc

SEQ ID NO: 242866 - DNA, 25 bp, Homo sapien
cgaaaaatcaaatgaatcacaggac

SEQ ID NO: 242867 - DNA, 25 bp, Homo sapien
agtgctggacttggcctttgtttac

SEQ ID NO: 242868 - DNA, 25 bp, Homo sapien
gagtgctggacttggcctttgttta

SEQ ID NO: 242869 - DNA, 25 bp, Homo sapien
agctccatacgtgggctgccggcat

SEQ ID NO: 242870 - DNA, 25 bp, Homo sapien
tgtagttgagcacattggacctcac

SEQ ID NO: 242871 - DNA, 25 bp, Homo sapien
ggttcctggttaactgcctggtctg

SEQ ID NO: 242872 - DNA, 25 bp, Homo sapien
tggttcccagctaatctggttcctg

SEQ ID NO: 242873 - DNA, 25 bp, Homo sapien
ttaaagacgctgcttcagggacgct

SEQ ID NO: 242874 - DNA, 25 bp, Homo sapien
aagacgctgcttcagggacgcttca

SEQ ID NO: 242875 - DNA, 25 bp, Homo sapien
gacgctgcttcagggacgcttcaac

SEQ ID NO: 242876 - DNA, 25 bp, Homo sapien
gctgcttcagggacgcttcaacaag

SEQ ID NO: 242877 - DNA, 25 bp, Homo sapien
cctcatgtgcgaatccaggttctcc

SEQ ID NO: 242878 - DNA, 25 bp, Homo sapien
tgcagcccctcatgtgcgaatccag

SEQ ID NO: 242879 - DNA, 25 bp, Homo sapien
ctgcgtggcgctccccgcctttggg

SEQ ID NO: 242880 - DNA, 25 bp, Homo sapien
ggccgccgcgaaccgctccttcagt

SEQ ID NO: 242881 - DNA, 25 bp, Homo sapien
cctgggtttagggtccacagctctt

SEQ ID NO: 242882 - DNA, 25 bp, Homo sapien
tattatctgcaacacgggtgcctgc

SEQ ID NO: 242883 - DNA, 25 bp, Homo sapien
tctgtccgagatgtcccaaagtggc

SEQ ID NO: 242884 - DNA, 25 bp, Homo sapien
acgcgtgacctgatcgctgcgacag

SEQ ID NO: 242885 - DNA, 25 bp, Homo sapien
taatgggaaagggctcagcgggcat

SEQ ID NO: 242886 - DNA, 25 bp, Homo sapien
ctaatgggaaagggctcagcgggca

SEQ ID NO: 242887 - DNA, 25 bp, Homo sapien
gaacactttggcgttgatcgtctgg

SEQ ID NO: 242888 - DNA, 25 bp, Homo sapien
cactttggcgttgatcgtctgggtg

SEQ ID NO: 242889 - DNA, 25 bp, Homo sapien
ggaagggaacactttggcgttgatc

SEQ ID NO: 242890 - DNA, 25 bp, Homo sapien
ggcgttgatcgtctgggtggctcca

SEQ ID NO: 242891 - DNA, 25 bp, Homo sapien
aaaagggagaagatagcttgtggaa

SEQ ID NO: 242892 - DNA, 25 bp, Homo sapien
tggtcccggagctcaactcagagag

SEQ ID NO: 242893 - DNA, 25 bp, Homo sapien
cccagccaccgggacatgagaggaa

SEQ ID NO: 242894 - DNA, 25 bp, Homo sapien
aagtggtctgcattggtcccggagc

SEQ ID NO: 242895 - DNA, 25 bp, Homo sapien
tgatgtgtggtcaggaccacccgtt

SEQ ID NO: 242896 - DNA, 25 bp, Homo sapien
tctcactgagcagatccttttcccc

SEQ ID NO: 242897 - DNA, 25 bp, Homo sapien
agccggcctcacacatctctgatgt

SEQ ID NO: 242898 - DNA, 25 bp, Homo sapien
tctgccggaccgatccttggaacag

SEQ ID NO: 242899 - DNA, 25 bp, Homo sapien
tacagcgaatcaccgccaataaaac

SEQ ID NO: 242900 - DNA, 25 bp, Homo sapien
taggaaagatacagcgaatcaccgc

SEQ ID NO: 242901 - DNA, 25 bp, Homo sapien
ctctaggaaagatacagcgaatcac

SEQ ID NO: 242902 - DNA, 25 bp, Homo sapien
gaaagatacagcgaatcaccgccaa

SEQ ID NO: 242903 - DNA, 25 bp, Homo sapien
ttctccacaggtgcctaacccaaat

SEQ ID NO: 242904 - DNA, 25 bp, Homo sapien
tcatttcttctcctcgaggaggttt

SEQ ID NO: 242905 - DNA, 25 bp, Homo sapien
acccaaatgacaggtcctgcgacat

SEQ ID NO: 242906 - DNA, 25 bp, Homo sapien
cctaacccaaatgacaggtcctgcg

SEQ ID NO: 242907 - DNA, 25 bp, Homo sapien
tggtgagggcctaaattcaggtcca

SEQ ID NO: 242908 - DNA, 25 bp, Homo sapien
ttgatagcagggagaaagcagccga

SEQ ID NO: 242909 - DNA, 25 bp, Homo sapien
taaagaaattgtttcacgtgccacg

SEQ ID NO: 242910 - DNA, 25 bp, Homo sapien
cacatggtagatgggtgaggccact

SEQ ID NO: 242911 - DNA, 25 bp, Homo sapien
tttgtgggtcaagtgggtattaaca

SEQ ID NO: 242912 - DNA, 25 bp, Homo sapien
taaattagaagctgcggaatgctgg

SEQ ID NO: 242913 - DNA, 25 bp, Homo sapien
agctgcggaatgctggcgaattttc

SEQ ID NO: 242914 - DNA, 25 bp, Homo sapien
agtgggtattaacaaatgctaagac

SEQ ID NO: 242915 - DNA, 25 bp, Homo sapien
cctgattccataaggttgattggtt

SEQ ID NO: 242916 - DNA, 25 bp, Homo sapien
attccataaggttgattggttttca

SEQ ID NO: 242917 - DNA, 25 bp, Homo sapien
gattccataaggttgattggttttc

SEQ ID NO: 242918 - DNA, 25 bp, Homo sapien
ctgattccataaggttgattggttt

SEQ ID NO: 242919 - DNA, 25 bp, Homo sapien
agccatgtgggccacttgcaggcca

SEQ ID NO: 242920 - DNA, 25 bp, Homo sapien
gagccacggctataaatggtctcca

SEQ ID NO: 242921 - DNA, 25 bp, Homo sapien
acttgcaggccagtcctacttggtg

SEQ ID NO: 242922 - DNA, 25 bp, Homo sapien
ctttatgccccagcggagagccatg

SEQ ID NO: 242923 - DNA, 25 bp, Homo sapien
gtctgatgtgcttctcagttggggt

SEQ ID NO: 242924 - DNA, 25 bp, Homo sapien
tctgatgtgcttctcagttggggtg

SEQ ID NO: 242925 - DNA, 25 bp, Homo sapien
gttagcgtaactgacaaaatgagtc

SEQ ID NO: 242926 - DNA, 25 bp, Homo sapien
cttgtagtcatctcactccgtcggg

SEQ ID NO: 242927 - DNA, 25 bp, Homo sapien
atctcactccgtcggggagaacaga

SEQ ID NO: 242928 - DNA, 25 bp, Homo sapien
cagacattgaggcaaggaccacaca

SEQ ID NO: 242929 - DNA, 25 bp, Homo sapien
gaccacacagatgatcaatcacatt

SEQ ID NO: 242930 - DNA, 25 bp, Homo sapien
catacatgagtttcccagtgctgcc

SEQ ID NO: 242931 - DNA, 25 bp, Homo sapien
gggaccaccctcaggaagtcatcat

SEQ ID NO: 242932 - DNA, 25 bp, Homo sapien
gaagccttttcagcggacttgtgac

SEQ ID NO: 242933 - DNA, 25 bp, Homo sapien
tacacagcaccacaaaccgggtggc

SEQ ID NO: 242934 - DNA, 25 bp, Homo sapien
ggctttttgagagcaccattcctca

SEQ ID NO: 242935 - DNA, 25 bp, Homo sapien
ctgggctttttgagagcaccattcc

SEQ ID NO: 242936 - DNA, 25 bp, Homo sapien
ttttgagagcaccattcctcacctg

SEQ ID NO: 242937 - DNA, 25 bp, Homo sapien
ttgagagcaccattcctcacctggt

SEQ ID NO: 242938 - DNA, 25 bp, Homo sapien
tgtcccagatccgttttgattgcat

SEQ ID NO: 242939 - DNA, 25 bp, Homo sapien
tcctttgtcccagatccgttttgat

SEQ ID NO: 242940 - DNA, 25 bp, Homo sapien
tcataccattcctttgtcccagatc

SEQ ID NO: 242941 - DNA, 25 bp, Homo sapien
gatccgttttgattgcataatgtcc

SEQ ID NO: 242942 - DNA, 25 bp, Homo sapien
gtggctcctggacgtctaccttgaa

SEQ ID NO: 242943 - DNA, 25 bp, Homo sapien
tgaggtttagttccagcccatgcct

SEQ ID NO: 242944 - DNA, 25 bp, Homo sapien
gagccacgtgccttagaatgatccc

SEQ ID NO: 242945 - DNA, 25 bp, Homo sapien
aatgggctggtaatccttgtctggc

SEQ ID NO: 242946 - DNA, 25 bp, Homo sapien
tccagagttgcatccattctcttaa

SEQ ID NO: 242947 - DNA, 25 bp, Homo sapien
agtctcactgtgctaagatcaaggt

SEQ ID NO: 242948 - DNA, 25 bp, Homo sapien
tggtggttccagagttgcatccatt

SEQ ID NO: 242949 - DNA, 25 bp, Homo sapien
aagtctcactgtgctaagatcaagg

SEQ ID NO: 242950 - DNA, 25 bp, Homo sapien
ggctgcttgtgttacgtgttttacc

SEQ ID NO: 242951 - DNA, 25 bp, Homo sapien
acactgagggctctcggacaccttc

SEQ ID NO: 242952 - DNA, 25 bp, Homo sapien
ctcggacaccttcgagctgagaggg

SEQ ID NO: 242953 - DNA, 25 bp, Homo sapien
tttctggcgactcacccacactgag

SEQ ID NO: 242954 - DNA, 25 bp, Homo sapien
taggccactctctgttttttcatcc

SEQ ID NO: 242955 - DNA, 25 bp, Homo sapien
tctctgggccttccttaggccactc

SEQ ID NO: 242956 - DNA, 25 bp, Homo sapien
cttccttaggccactctctgttttt

SEQ ID NO: 242957 - DNA, 25 bp, Homo sapien
tgggccttccttaggccactctctg

SEQ ID NO: 242958 - DNA, 25 bp, Homo sapien
cactcaaaccgccttcccattgcag

SEQ ID NO: 242959 - DNA, 25 bp, Homo sapien
tgggatgaaggagggcccatcaaca

SEQ ID NO: 242960 - DNA, 25 bp, Homo sapien
ggagtgggatgaaggagggcccatc

SEQ ID NO: 242961 - DNA, 25 bp, Homo sapien
ccttcccactgagcattcgcactca

SEQ ID NO: 242962 - DNA, 25 bp, Homo sapien
gcagcagtgtttatagagaatgatg

SEQ ID NO: 242963 - DNA, 25 bp, Homo sapien
aagcagcagtgtttatagagaatga

SEQ ID NO: 242964 - DNA, 25 bp, Homo sapien
ctggtacagagtagacgcccactgt

SEQ ID NO: 242965 - DNA, 25 bp, Homo sapien
agagtagacgcccactgttagcatc

SEQ ID NO: 242966 - DNA, 25 bp, Homo sapien
caccagaaggcgaagccagattatc

SEQ ID NO: 242967 - DNA, 25 bp, Homo sapien
gaaggcgaagccagattatctgtgg

SEQ ID NO: 242968 - DNA, 25 bp, Homo sapien
tcagttacaccagaaggcgaagcca

SEQ ID NO: 242969 - DNA, 25 bp, Homo sapien
tttccacatcagttacaccagaagg

SEQ ID NO: 242970 - DNA, 25 bp, Homo sapien
acatccactttcctgtccctccgga

SEQ ID NO: 242971 - DNA, 25 bp, Homo sapien
ggacatccactttcctgtccctccg

SEQ ID NO: 242972 - DNA, 25 bp, Homo sapien
tccactttcctgtccctccggacat

SEQ ID NO: 242973 - DNA, 25 bp, Homo sapien
cttggacatccactttcctgtccct

SEQ ID NO: 242974 - DNA, 25 bp, Homo sapien
agcagcaatccattccctgtctgac

SEQ ID NO: 242975 - DNA, 25 bp, Homo sapien
ttccctgtctgaccagatcactagg

SEQ ID NO: 242976 - DNA, 25 bp, Homo sapien
gaaacgccattcataatcttcccct

SEQ ID NO: 242977 - DNA, 25 bp, Homo sapien
gaccagatcactaggaaacgccatt

SEQ ID NO: 242978 - DNA, 25 bp, Homo sapien
cttcctcggagggaactgctgatgg

SEQ ID NO: 242979 - DNA, 25 bp, Homo sapien
taatgaggacactctagcagggaat

SEQ ID NO: 242980 - DNA, 25 bp, Homo sapien
tctgctcagatccaaatgaggtgat

SEQ ID NO: 242981 - DNA, 25 bp, Homo sapien
tagcaaatgtccacaagaggctggg

SEQ ID NO: 242982 - DNA, 25 bp, Homo sapien
aaagtactgtgtctcttacctatgc

SEQ ID NO: 242983 - DNA, 25 bp, Homo sapien
tactgtgtctcttacctatgctgtc

SEQ ID NO: 242984 - DNA, 25 bp, Homo sapien
cattccaaagtactgtgtctcttac

SEQ ID NO: 242985 - DNA, 25 bp, Homo sapien
acctatgctgtctctacactgcagc

SEQ ID NO: 242986 - DNA, 25 bp, Homo sapien
caggagcaaagtggatgtggaaaca

SEQ ID NO: 242987 - DNA, 25 bp, Homo sapien
cccctggtgcacagaagtaggcatg

SEQ ID NO: 242988 - DNA, 25 bp, Homo sapien
taaaatctagaattgagcactgcgg

SEQ ID NO: 242989 - DNA, 25 bp, Homo sapien
tgagcactgcggtcttcccgtggtt

SEQ ID NO: 242990 - DNA, 25 bp, Homo sapien
cttgcatgagccagtccctggtctg

SEQ ID NO: 242991 - DNA, 25 bp, Homo sapien
agtccctggtctgacatcttctctc

SEQ ID NO: 242992 - DNA, 25 bp, Homo sapien
tgagccagtccctggtctgacatct

SEQ ID NO: 242993 - DNA, 25 bp, Homo sapien
agccagtccctggtctgacatcttc

SEQ ID NO: 242994 - DNA, 25 bp, Homo sapien
gatactgtctgctgggcattttagg

SEQ ID NO: 242995 - DNA, 25 bp, Homo sapien
ctgggccagggttggaccacaatca

SEQ ID NO: 242996 - DNA, 25 bp, Homo sapien
aagttcatggatgtgtctgggccag

SEQ ID NO: 242997 - DNA, 25 bp, Homo sapien
ccattggctgttgggagacatttgc

SEQ ID NO: 242998 - DNA, 25 bp, Homo sapien
actctgcgagtgagtttcagcagga

SEQ ID NO: 242999 - DNA, 25 bp, Homo sapien
catctccggtactgcttctgttttt

SEQ ID NO: 243000 - DNA, 25 bp, Homo sapien
tttttgtagaatgttctggggagcg

SEQ ID NO: 243001 - DNA, 25 bp, Homo sapien
ccggtactgcttctgtttttgtaga

SEQ ID NO: 243002 - DNA, 25 bp, Homo sapien
gagtggaggccattcatagaacacg

SEQ ID NO: 243003 - DNA, 25 bp, Homo sapien
ctgtggagtggaggccattcataga

SEQ ID NO: 243004 - DNA, 25 bp, Homo sapien
gaggccattcatagaacacggacta

SEQ ID NO: 243005 - DNA, 25 bp, Homo sapien
tcatagaacacggactatcaacttc

SEQ ID NO: 243006 - DNA, 25 bp, Homo sapien
aagtttgataggcattgtaattgga

SEQ ID NO: 243007 - DNA, 25 bp, Homo sapien
gaagttaagtttgataggcattgta

SEQ ID NO: 243008 - DNA, 25 bp, Homo sapien
gctataacctgtgaagttaagtttg

SEQ ID NO: 243009 - DNA, 25 bp, Homo sapien
taattggattgttacagtaatagcc

SEQ ID NO: 243010 - DNA, 25 bp, Homo sapien
gatgcaggatgagcacctgtgttgc

SEQ ID NO: 243011 - DNA, 25 bp, Homo sapien
atgcctgtgatgcaggatgagcacc

SEQ ID NO: 243012 - DNA, 25 bp, Homo sapien
tgatgcctgtgatgcaggatgagca

SEQ ID NO: 243013 - DNA, 25 bp, Homo sapien
aggatgagcacctgtgttgcagcag

SEQ ID NO: 243014 - DNA, 25 bp, Homo sapien
ggtctttctgaaatgcattcccctc

SEQ ID NO: 243015 - DNA, 25 bp, Homo sapien
tgcctctgacaaacaaacacagcct

SEQ ID NO: 243016 - DNA, 25 bp, Homo sapien
tgagggaacctcattcccgaaggcg

SEQ ID NO: 243017 - DNA, 25 bp, Homo sapien
cccgaaggcgattgttagctgtgca

SEQ ID NO: 243018 - DNA, 25 bp, Homo sapien
acagccttccagagttgagggaacc

SEQ ID NO: 243019 - DNA, 25 bp, Homo sapien
ctgatgtcagagatgttttaaccag

SEQ ID NO: 243020 - DNA, 25 bp, Homo sapien
ctgggtaggaaaacattgagttaca

SEQ ID NO: 243021 - DNA, 25 bp, Homo sapien
gtaggaaaacattgagttacaaatc

SEQ ID NO: 243022 - DNA, 25 bp, Homo sapien
tggtacctgggtaggaaaacattga

SEQ ID NO: 243023 - DNA, 25 bp, Homo sapien
tgggtaggaaaacattgagttacaa

SEQ ID NO: 243024 - DNA, 25 bp, Homo sapien
ccttttgcagattatttccctttct

SEQ ID NO: 243025 - DNA, 25 bp, Homo sapien
tatttcttccaaaattccttttgca

SEQ ID NO: 243026 - DNA, 25 bp, Homo sapien
tccaaaattccttttgcagattatt

SEQ ID NO: 243027 - DNA, 25 bp, Homo sapien
aattccttttgcagattatttccct

SEQ ID NO: 243028 - DNA, 25 bp, Homo sapien
tccaagacatttccttgggtcctta

SEQ ID NO: 243029 - DNA, 25 bp, Homo sapien
tccttataaccttcctggaacctca

SEQ ID NO: 243030 - DNA, 25 bp, Homo sapien
caaactgtccaagacatttccttgg

SEQ ID NO: 243031 - DNA, 25 bp, Homo sapien
tataaccttcctggaacctcagttc

SEQ ID NO: 243032 - DNA, 25 bp, Homo sapien
ctgccttggctttgtaggacagaga

SEQ ID NO: 243033 - DNA, 25 bp, Homo sapien
acttgctgttgtatattgcaggtcc

SEQ ID NO: 243034 - DNA, 25 bp, Homo sapien
tcttgccatccctggattccctgct

SEQ ID NO: 243035 - DNA, 25 bp, Homo sapien
aggtcctgctgcctgtgcgcttccc

SEQ ID NO: 243036 - DNA, 25 bp, Homo sapien
tgctccttctaatgtccatcttgta

SEQ ID NO: 243037 - DNA, 25 bp, Homo sapien
ccccaaatgagctacgttagggtca

SEQ ID NO: 243038 - DNA, 25 bp, Homo sapien
aggaacagtgacctccttgtctccc

SEQ ID NO: 243039 - DNA, 25 bp, Homo sapien
caaatgagctacgttagggtcaccc

SEQ ID NO: 243040 - DNA, 25 bp, Homo sapien
gccaggaacagtgacctccttgtct

SEQ ID NO: 243041 - DNA, 25 bp, Homo sapien
tgtcagtctgcaaagggtcaggctg

SEQ ID NO: 243042 - DNA, 25 bp, Homo sapien
ttgctgacagcaggaacacccagta

SEQ ID NO: 243043 - DNA, 25 bp, Homo sapien
acagcaggaacacccagtaggtcag

SEQ ID NO: 243044 - DNA, 25 bp, Homo sapien
ccccactgtcagtctgcaaagggtc

SEQ ID NO: 243045 - DNA, 25 bp, Homo sapien
gtgtctggttctctgactttagggc

SEQ ID NO: 243046 - DNA, 25 bp, Homo sapien
tgtgtctggttctctgactttaggg

SEQ ID NO: 243047 - DNA, 25 bp, Homo sapien
tggacctgccgaataaccacagctt

SEQ ID NO: 243048 - DNA, 25 bp, Homo sapien
tgagggtttgctaagtggacctgcc

SEQ ID NO: 243049 - DNA, 25 bp, Homo sapien
gattatcaccaatgagcagactgag

SEQ ID NO: 243050 - DNA, 25 bp, Homo sapien
tatctgaaaccactttgctgccctc

SEQ ID NO: 243051 - DNA, 25 bp, Homo sapien
gggaagtatgtactccagaatcatc

SEQ ID NO: 243052 - DNA, 25 bp, Homo sapien
catgggaagtatgtactccagaatc

SEQ ID NO: 243053 - DNA, 25 bp, Homo sapien
atggctaccaccaatcatgggaagt

SEQ ID NO: 243054 - DNA, 25 bp, Homo sapien
caccaatcatgggaagtatgtactc

SEQ ID NO: 243055 - DNA, 25 bp, Homo sapien
cagcaccttcccagtgccaatgcaa

SEQ ID NO: 243056 - DNA, 25 bp, Homo sapien
aaatctcactgctaaattggccact

SEQ ID NO: 243057 - DNA, 25 bp, Homo sapien
aatctcactgctaaattggccactt

SEQ ID NO: 243058 - DNA, 25 bp, Homo sapien
attttcctagtaaatctcactgcta

SEQ ID NO: 243059 - DNA, 25 bp, Homo sapien
ctcactgctaaattggccactttat

SEQ ID NO: 243060 - DNA, 25 bp, Homo sapien
ctagcggatcttctttcaaaccctg

SEQ ID NO: 243061 - DNA, 25 bp, Homo sapien
tcaaaccctgcatttctgaaggcac

SEQ ID NO: 243062 - DNA, 25 bp, Homo sapien
catcacaaggagaaacgttagtcac

SEQ ID NO: 243063 - DNA, 25 bp, Homo sapien
ctgcccatgccacctagcggatctt

SEQ ID NO: 243064 - DNA, 25 bp, Homo sapien
ctccaatgaggggggcctgggtcac

SEQ ID NO: 243065 - DNA, 25 bp, Homo sapien
cctccaatgaggggggcctgggtca

SEQ ID NO: 243066 - DNA, 25 bp, Homo sapien
aagttccaaaggacactccgcgtct

SEQ ID NO: 243067 - DNA, 25 bp, Homo sapien
aaggaagcacagtgaagactccagc

SEQ ID NO: 243068 - DNA, 25 bp, Homo sapien
tccagcatggaaaagcgtgtcccac

SEQ ID NO: 243069 - DNA, 25 bp, Homo sapien
gcctcggcgcctccatggatgatag

SEQ ID NO: 243070 - DNA, 25 bp, Homo sapien
gcagcacaccgtccacgggagcaac

SEQ ID NO: 243071 - DNA, 25 bp, Homo sapien
ctcccgctctgtggcttccgcggca

SEQ ID NO: 243072 - DNA, 25 bp, Homo sapien
cccgctctgtggcttccgcggcagc

SEQ ID NO: 243073 - DNA, 25 bp, Homo sapien
cgtccacgggagcaacggcctctgc

SEQ ID NO: 243074 - DNA, 25 bp, Homo sapien
tgcgtaatctactgccatcagggat

SEQ ID NO: 243075 - DNA, 25 bp, Homo sapien
gaactccaccctatgctctgcgtaa

SEQ ID NO: 243076 - DNA, 25 bp, Homo sapien
aaacatctggctccataagtactcc

SEQ ID NO: 243077 - DNA, 25 bp, Homo sapien
tcagggatgaaacatctggctccat

SEQ ID NO: 243078 - DNA, 25 bp, Homo sapien
tgtatagcagcaaaatccgtcaccc

SEQ ID NO: 243079 - DNA, 25 bp, Homo sapien
ttgagctctcattccccgcactgta

SEQ ID NO: 243080 - DNA, 25 bp, Homo sapien
cagatgccaatttacaagccagaga

SEQ ID NO: 243081 - DNA, 25 bp, Homo sapien
tcttggctgtgtctagggacttgcc

SEQ ID NO: 243082 - DNA, 25 bp, Homo sapien
gttgagctcaacgtccttcttcttt

SEQ ID NO: 243083 - DNA, 25 bp, Homo sapien
tcatggctctgcagtgtagcgagtt

SEQ ID NO: 243084 - DNA, 25 bp, Homo sapien
gagtttttcaccacagttgagctca

SEQ ID NO: 243085 - DNA, 25 bp, Homo sapien
aaagggcatggttgatggcatggat

SEQ ID NO: 243086 - DNA, 25 bp, Homo sapien
tatcctgttttgcaccagtttcaca

SEQ ID NO: 243087 - DNA, 25 bp, Homo sapien
ttctagctgtgcgtccttgggcaaa

SEQ ID NO: 243088 - DNA, 25 bp, Homo sapien
gagaaactggcatcaaagtctaccc

SEQ ID NO: 243089 - DNA, 25 bp, Homo sapien
tatgacgagaaagtcattgcactgg

SEQ ID NO: 243090 - DNA, 25 bp, Homo sapien
ttggcagggagagcctcggatttat

SEQ ID NO: 243091 - DNA, 25 bp, Homo sapien
accgccactggcagacccggtgctg

SEQ ID NO: 243092 - DNA, 25 bp, Homo sapien
gcgttattggctgaacactctgaca

SEQ ID NO: 243093 - DNA, 25 bp, Homo sapien
ggcggcagtagctgtcacccgcaaa

SEQ ID NO: 243094 - DNA, 25 bp, Homo sapien
tctttccttgtagtgcctacagtta

SEQ ID NO: 243095 - DNA, 25 bp, Homo sapien
gcaactatttactgagcctcctttg

SEQ ID NO: 243096 - DNA, 25 bp, Homo sapien
cggcagtggccgaggatcacgtaat

SEQ ID NO: 243097 - DNA, 25 bp, Homo sapien
gtacccagcacgtaggtcacggcag

SEQ ID NO: 243098 - DNA, 25 bp, Homo sapien
gatgacagtgatcgccacgcagcat

SEQ ID NO: 243099 - DNA, 25 bp, Homo sapien
aggatgacagtgatcgccacgcagc

SEQ ID NO: 243100 - DNA, 25 bp, Homo sapien
ggatgacagtgatcgccacgcagca

SEQ ID NO: 243101 - DNA, 25 bp, Homo sapien
tatctaaaaagcgactctctccggt

SEQ ID NO: 243102 - DNA, 25 bp, Homo sapien
tgcctcgggttctaatttattttgc

SEQ ID NO: 243103 - DNA, 25 bp, Homo sapien
tttattttgcaattcgcacagtgca

SEQ ID NO: 243104 - DNA, 25 bp, Homo sapien
attatctaaaaagcgactctctccg

SEQ ID NO: 243105 - DNA, 25 bp, Homo sapien
ggtgcttctcgagggagtccttcct

SEQ ID NO: 243106 - DNA, 25 bp, Homo sapien
aacccgtcagatccagtactttggc

SEQ ID NO: 243107 - DNA, 25 bp, Homo sapien
ttgaatgccaagaccggcacacctg

SEQ ID NO: 243108 - DNA, 25 bp, Homo sapien
catccctccgaggtgcttctcgagg

SEQ ID NO: 243109 - DNA, 25 bp, Homo sapien
ggtccgtccataggatctccccaaa

SEQ ID NO: 243110 - DNA, 25 bp, Homo sapien
gatccttataaaacttagggtggca

SEQ ID NO: 243111 - DNA, 25 bp, Homo sapien
tccctgctgtaattagaagctcact

SEQ ID NO: 243112 - DNA, 25 bp, Homo sapien
gaattgatattctctagctgcagtg

SEQ ID NO: 243113 - DNA, 25 bp, Homo sapien
catcaccggaagcacttttattaga

SEQ ID NO: 243114 - DNA, 25 bp, Homo sapien
ctctttggacggtaatgaatatgga

SEQ ID NO: 243115 - DNA, 25 bp, Homo sapien
gaaatcttccaagcttgcatttgct

SEQ ID NO: 243116 - DNA, 25 bp, Homo sapien
aagcctatggcgctcatcaccggaa

SEQ ID NO: 243117 - DNA, 25 bp, Homo sapien
taagtcgacacttatgtcaaagtgc

SEQ ID NO: 243118 - DNA, 25 bp, Homo sapien
tcaaagtgccatgacacagcattgt

SEQ ID NO: 243119 - DNA, 25 bp, Homo sapien
cctggaccttatttgccatcctaca

SEQ ID NO: 243120 - DNA, 25 bp, Homo sapien
tacgattagtcacttcttgccacat

SEQ ID NO: 243121 - DNA, 25 bp, Homo sapien
tgttaaccagaatttcctctctgcc

SEQ ID NO: 243122 - DNA, 25 bp, Homo sapien
cttgatcatttctgcgtgcactgta

SEQ ID NO: 243123 - DNA, 25 bp, Homo sapien
catttctgcgtgcactgtagcactg

SEQ ID NO: 243124 - DNA, 25 bp, Homo sapien
actgttttgtctccacgctgttaac

SEQ ID NO: 243125 - DNA, 25 bp, Homo sapien
cccaaccttggctctgctgtatttt

SEQ ID NO: 243126 - DNA, 25 bp, Homo sapien
aaggctttgtggctttctggaacct

SEQ ID NO: 243127 - DNA, 25 bp, Homo sapien
ctgccagaaggctttgtggctttct

SEQ ID NO: 243128 - DNA, 25 bp, Homo sapien
aacctgactcccaaccttggctctg

SEQ ID NO: 243129 - DNA, 25 bp, Homo sapien
taatgtagtgcttgtgaagggcgcc

SEQ ID NO: 243130 - DNA, 25 bp, Homo sapien
agacaaaccgtgctcaaaactgtag

SEQ ID NO: 243131 - DNA, 25 bp, Homo sapien
gacatcgcctcttgatgcgagaaga

SEQ ID NO: 243132 - DNA, 25 bp, Homo sapien
tagattctcaacacaacaggtccag

SEQ ID NO: 243133 - DNA, 25 bp, Homo sapien
atggccagtgtgatgctgatcaaca

SEQ ID NO: 243134 - DNA, 25 bp, Homo sapien
gtgtgatgctgatcaacagggtcat

SEQ ID NO: 243135 - DNA, 25 bp, Homo sapien
tgccctcttaaaactcacaatcatg

SEQ ID NO: 243136 - DNA, 25 bp, Homo sapien
ctcttaaaactcacaatcatggcca

SEQ ID NO: 243137 - DNA, 25 bp, Homo sapien
cctcattgcaagcagggaaatttcc

SEQ ID NO: 243138 - DNA, 25 bp, Homo sapien
tgcataaggacagtgaacctccagg

SEQ ID NO: 243139 - DNA, 25 bp, Homo sapien
tttggccacggatatgcttgacccc

SEQ ID NO: 243140 - DNA, 25 bp, Homo sapien
ccaatactgggctgttgaggcacag

SEQ ID NO: 243141 - DNA, 25 bp, Homo sapien
tagccccttaggcaatggtagaaac

SEQ ID NO: 243142 - DNA, 25 bp, Homo sapien
agggggctctattgatgctttcaga

SEQ ID NO: 243143 - DNA, 25 bp, Homo sapien
cgagcacaagtgtaatttggttgta

SEQ ID NO: 243144 - DNA, 25 bp, Homo sapien
tggtagaaactgctgggtttcaggg

SEQ ID NO: 243145 - DNA, 25 bp, Homo sapien
tttgcagggaatatagccagtggcc

SEQ ID NO: 243146 - DNA, 25 bp, Homo sapien
gagtctgttcctttgactgtgctac

SEQ ID NO: 243147 - DNA, 25 bp, Homo sapien
cacaccagatccctacactcccttt

SEQ ID NO: 243148 - DNA, 25 bp, Homo sapien
tgttcctttgactgtgctacccaca

SEQ ID NO: 243149 - DNA, 25 bp, Homo sapien
tgcttctccactgggcatcagtgct

SEQ ID NO: 243150 - DNA, 25 bp, Homo sapien
gcttctccactgggcatcagtgctc

SEQ ID NO: 243151 - DNA, 25 bp, Homo sapien
ctgcttctccactgggcatcagtgc

SEQ ID NO: 243152 - DNA, 25 bp, Homo sapien
ttctggatccttccggggcttttgc

SEQ ID NO: 243153 - DNA, 25 bp, Homo sapien
tgtgactaaaatgggcctgtctagc

SEQ ID NO: 243154 - DNA, 25 bp, Homo sapien
taatttgaggacaacgccacttggg

SEQ ID NO: 243155 - DNA, 25 bp, Homo sapien
ggtggccttctgtatggatgtatta

SEQ ID NO: 243156 - DNA, 25 bp, Homo sapien
tccccgggcatagcactgtgactaa

SEQ ID NO: 243157 - DNA, 25 bp, Homo sapien
tacatataatgtgctccgaagaatt

SEQ ID NO: 243158 - DNA, 25 bp, Homo sapien
aatacatataatgtgctccgaagaa

SEQ ID NO: 243159 - DNA, 25 bp, Homo sapien
acatataatgtgctccgaagaattg

SEQ ID NO: 243160 - DNA, 25 bp, Homo sapien
atacatataatgtgctccgaagaat

SEQ ID NO: 243161 - DNA, 25 bp, Homo sapien
accaagtagcaggagcttatcttca

SEQ ID NO: 243162 - DNA, 25 bp, Homo sapien
caccaagtagcaggagcttatcttc

SEQ ID NO: 243163 - DNA, 25 bp, Homo sapien
acaccaagtagcaggagcttatctt

SEQ ID NO: 243164 - DNA, 25 bp, Homo sapien
cttgttgccgaccaaggctgctatg

SEQ ID NO: 243165 - DNA, 25 bp, Homo sapien
gtcccttgttgccgaccaaggctgc

SEQ ID NO: 243166 - DNA, 25 bp, Homo sapien
cccttgttgccgaccaaggctgcta

SEQ ID NO: 243167 - DNA, 25 bp, Homo sapien
ctgtcccttgttgccgaccaaggct

SEQ ID NO: 243168 - DNA, 25 bp, Homo sapien
gtttctgctaatccacttaagctgg

SEQ ID NO: 243169 - DNA, 25 bp, Homo sapien
aaatcaatgacttcggtgcctttgt

SEQ ID NO: 243170 - DNA, 25 bp, Homo sapien
gctggttgattgtcagaagcaattc

SEQ ID NO: 243171 - DNA, 25 bp, Homo sapien
ttaacgtccacttgcaaatcaatga

SEQ ID NO: 243172 - DNA, 25 bp, Homo sapien
ttagaagctccatccgaaaggcgct

SEQ ID NO: 243173 - DNA, 25 bp, Homo sapien
agctccatccgaaaggcgctttggg

SEQ ID NO: 243174 - DNA, 25 bp, Homo sapien
gcttgtcttagaagctccatccgaa

SEQ ID NO: 243175 - DNA, 25 bp, Homo sapien
ttttctcgggggcaaactgctgagt

SEQ ID NO: 243176 - DNA, 25 bp, Homo sapien
aaacttagagttggatgcattgtcc

SEQ ID NO: 243177 - DNA, 25 bp, Homo sapien
gcaaaacgtgagtcaggagaaactt

SEQ ID NO: 243178 - DNA, 25 bp, Homo sapien
gccagtgggcaagcaaaacgtgagt

SEQ ID NO: 243179 - DNA, 25 bp, Homo sapien
tatcaaagcatgtgggggcttgttc

SEQ ID NO: 243180 - DNA, 25 bp, Homo sapien
tatgggcaaggttccctccttggaa

SEQ ID NO: 243181 - DNA, 25 bp, Homo sapien
actgaagttgaatgaaggtcacatt

SEQ ID NO: 243182 - DNA, 25 bp, Homo sapien
tcagtactcttcttcgaaccttttc

SEQ ID NO: 243183 - DNA, 25 bp, Homo sapien
tcctaaaggaataactatatcctcc

SEQ ID NO: 243184 - DNA, 25 bp, Homo sapien
tccatgtccaccacagatagagatg

SEQ ID NO: 243185 - DNA, 25 bp, Homo sapien
ttccatgtccaccacagatagagat

SEQ ID NO: 243186 - DNA, 25 bp, Homo sapien
gttccatgtccaccacagatagaga

SEQ ID NO: 243187 - DNA, 25 bp, Homo sapien
agtctagtgctaatgttgcagccca

SEQ ID NO: 243188 - DNA, 25 bp, Homo sapien
tgaccgtgcaaaacacaggagaggt

SEQ ID NO: 243189 - DNA, 25 bp, Homo sapien
taataggggcacaagaatcctgctg

SEQ ID NO: 243190 - DNA, 25 bp, Homo sapien
gaatgatggacctgactgtgcagag

SEQ ID NO: 243191 - DNA, 25 bp, Homo sapien
ctggaaatagacaatgaccgtgcaa

SEQ ID NO: 243192 - DNA, 25 bp, Homo sapien
gccaaggaattgaaacgcattccaa

SEQ ID NO: 243193 - DNA, 25 bp, Homo sapien
aaagccaaggaattgaaacgcattc

SEQ ID NO: 243194 - DNA, 25 bp, Homo sapien
gaaaagccaaggaattgaaacgcat

SEQ ID NO: 243195 - DNA, 25 bp, Homo sapien
tgaacatgtgaacaaggtggggaaa

SEQ ID NO: 243196 - DNA, 25 bp, Homo sapien
gctctccacaaacgtggttgtggca

SEQ ID NO: 243197 - DNA, 25 bp, Homo sapien
cttggtgaagaagcacgtaagatac

SEQ ID NO: 243198 - DNA, 25 bp, Homo sapien
cgtggataagccacttccggtagct

SEQ ID NO: 243199 - DNA, 25 bp, Homo sapien
taagatacaggcaacatacacagct

SEQ ID NO: 243200 - DNA, 25 bp, Homo sapien
ctcctttcccgtaagtcctgttgat

SEQ ID NO: 243201 - DNA, 25 bp, Homo sapien
ttgatttggctgactaaatatttcc

SEQ ID NO: 243202 - DNA, 25 bp, Homo sapien
cagtcttggatcaagcccttggccc

SEQ ID NO: 243203 - DNA, 25 bp, Homo sapien
ccgtaagtcctgttgatttggctga

SEQ ID NO: 243204 - DNA, 25 bp, Homo sapien
ttccatccttgagtccgtgctgcat

SEQ ID NO: 243205 - DNA, 25 bp, Homo sapien
cactccttccatccttgagtccgtg

SEQ ID NO: 243206 - DNA, 25 bp, Homo sapien
gtgcagtgggcttctaatcgacttc

SEQ ID NO: 243207 - DNA, 25 bp, Homo sapien
cgtgcagtgggcttctaatcgactt

SEQ ID NO: 243208 - DNA, 25 bp, Homo sapien
gaagtctggtcatgcgagttttatg

SEQ ID NO: 243209 - DNA, 25 bp, Homo sapien
tctgaagtctggtcatgcgagtttt

SEQ ID NO: 243210 - DNA, 25 bp, Homo sapien
aagtctggtcatgcgagttttatgc

SEQ ID NO: 243211 - DNA, 25 bp, Homo sapien
gtctggtcatgcgagttttatgcat

SEQ ID NO: 243212 - DNA, 25 bp, Homo sapien
ccaagcgattggcagctttccttct

SEQ ID NO: 243213 - DNA, 25 bp, Homo sapien
taccaagcgattggcagctttcctt

SEQ ID NO: 243214 - DNA, 25 bp, Homo sapien
cataccaagcgattggcagctttcc

SEQ ID NO: 243215 - DNA, 25 bp, Homo sapien
caagcgattggcagctttccttctg

SEQ ID NO: 243216 - DNA, 25 bp, Homo sapien
aggcttcctattcctctgggctgca

SEQ ID NO: 243217 - DNA, 25 bp, Homo sapien
tcatgggcttagttgaaggcttcct

SEQ ID NO: 243218 - DNA, 25 bp, Homo sapien
cactggaaaagccctttcattttct

SEQ ID NO: 243219 - DNA, 25 bp, Homo sapien
ccttctaaaaccacatcctcatatg

SEQ ID NO: 243220 - DNA, 25 bp, Homo sapien
taattagggtggcatgtgcacagct

SEQ ID NO: 243221 - DNA, 25 bp, Homo sapien
gcaaggcttgtacggcatttttcgt

SEQ ID NO: 243222 - DNA, 25 bp, Homo sapien
tgaacaatgtttgcagtgtcggcct

SEQ ID NO: 243223 - DNA, 25 bp, Homo sapien
ggcctgtgccttgataaatgcaagg

SEQ ID NO: 243224 - DNA, 25 bp, Homo sapien
ttaacaagttcgtgttcggctcata

SEQ ID NO: 243225 - DNA, 25 bp, Homo sapien
caacactattgatttgctcatactc

SEQ ID NO: 243226 - DNA, 25 bp, Homo sapien
cgtgttcggctcataataaaaacaa

SEQ ID NO: 243227 - DNA, 25 bp, Homo sapien
caagttcgtgttcggctcataataa

SEQ ID NO: 243228 - DNA, 25 bp, Homo sapien
ctgctctgcaaagggtcttcttgga

SEQ ID NO: 243229 - DNA, 25 bp, Homo sapien
cttcttggagtaaatgcttttccac

SEQ ID NO: 243230 - DNA, 25 bp, Homo sapien
cactttggaagcaaagtccaacggc

SEQ ID NO: 243231 - DNA, 25 bp, Homo sapien
gtccaacggcattgtaaaatactgt

SEQ ID NO: 243232 - DNA, 25 bp, Homo sapien
ttcctgagccaggtatttgtagaag

SEQ ID NO: 243233 - DNA, 25 bp, Homo sapien
cctgagccaggtatttgtagaagcc

SEQ ID NO: 243234 - DNA, 25 bp, Homo sapien
tgagccaggtatttgtagaagccat

SEQ ID NO: 243235 - DNA, 25 bp, Homo sapien
actttcctgagccaggtatttgtag

SEQ ID NO: 243236 - DNA, 25 bp, Homo sapien
tcactccgatcctcctctctaagga

SEQ ID NO: 243237 - DNA, 25 bp, Homo sapien
gccagaaccttctcataccactgaa

SEQ ID NO: 243238 - DNA, 25 bp, Homo sapien
gagccccttctccagacagcgccag

SEQ ID NO: 243239 - DNA, 25 bp, Homo sapien
ttcttcactccgatcctcctctcta

SEQ ID NO: 243240 - DNA, 25 bp, Homo sapien
tcgcttcctctttatttctctctcc

SEQ ID NO: 243241 - DNA, 25 bp, Homo sapien
gcttcctctttatttctctctccat

SEQ ID NO: 243242 - DNA, 25 bp, Homo sapien
cactcgcttcctctttatttctctc

SEQ ID NO: 243243 - DNA, 25 bp, Homo sapien
actcgcttcctctttatttctctct

SEQ ID NO: 243244 - DNA, 25 bp, Homo sapien
aatttgctgtgataactcaatcata

SEQ ID NO: 243245 - DNA, 25 bp, Homo sapien
taagtccatttgcatccacagaaag

SEQ ID NO: 243246 - DNA, 25 bp, Homo sapien
atttgcatccacagaaagacccagg

SEQ ID NO: 243247 - DNA, 25 bp, Homo sapien
gtccatttgcatccacagaaagacc

SEQ ID NO: 243248 - DNA, 25 bp, Homo sapien
cggatgctaactgaagggctggaag

SEQ ID NO: 243249 - DNA, 25 bp, Homo sapien
aagtcagacatatcagcagtctctg

SEQ ID NO: 243250 - DNA, 25 bp, Homo sapien
tttattcaggtccaagctagaactc

SEQ ID NO: 243251 - DNA, 25 bp, Homo sapien
gatccataaggagcattgttgagtc

SEQ ID NO: 243252 - DNA, 25 bp, Homo sapien
tccatagcttctgccccactggaaa

SEQ ID NO: 243253 - DNA, 25 bp, Homo sapien
taattctgcataattctggctgaaa

SEQ ID NO: 243254 - DNA, 25 bp, Homo sapien
atttgaatcctgcaagatttaattc

SEQ ID NO: 243255 - DNA, 25 bp, Homo sapien
taactgtagaggcacttcgactccc

SEQ ID NO: 243256 - DNA, 25 bp, Homo sapien
gactcccttgataaatgggacttcc

SEQ ID NO: 243257 - DNA, 25 bp, Homo sapien
tcccttttgtatggtctcctatgca

SEQ ID NO: 243258 - DNA, 25 bp, Homo sapien
tacggctgaaggagggtctcgttcc

SEQ ID NO: 243259 - DNA, 25 bp, Homo sapien
cttttgtacggctgaaggagggtct

SEQ ID NO: 243260 - DNA, 25 bp, Homo sapien
gtctcgttccatgatatcccttttg

SEQ ID NO: 243261 - DNA, 25 bp, Homo sapien
gtgggcctagctctctacctgttag

SEQ ID NO: 243262 - DNA, 25 bp, Homo sapien
gatccaggtaaacagactccagaac

SEQ ID NO: 243263 - DNA, 25 bp, Homo sapien
cagcccgtgggataggatactgaca

SEQ ID NO: 243264 - DNA, 25 bp, Homo sapien
gaaacttcctggttggctccactcg

SEQ ID NO: 243265 - DNA, 25 bp, Homo sapien
gacaatgtacatgaattatctttgc

SEQ ID NO: 243266 - DNA, 25 bp, Homo sapien
gagctcatccgacaatgtacatgaa

SEQ ID NO: 243267 - DNA, 25 bp, Homo sapien
ctgtgttgagaggagctcatccgac

SEQ ID NO: 243268 - DNA, 25 bp, Homo sapien
caacatgctcccattgtgccatttt

SEQ ID NO: 243269 - DNA, 25 bp, Homo sapien
agcttgatgacaggccccattcttt

SEQ ID NO: 243270 - DNA, 25 bp, Homo sapien
cagcttgatgacaggccccattctt

SEQ ID NO: 243271 - DNA, 25 bp, Homo sapien
ccagcttgatgacaggccccattct

SEQ ID NO: 243272 - DNA, 25 bp, Homo sapien
aaacaggcttcagtgaaatggccat

SEQ ID NO: 243273 - DNA, 25 bp, Homo sapien
aaaacaggcttcagtgaaatggcca

SEQ ID NO: 243274 - DNA, 25 bp, Homo sapien
tgtgctctacaaataagttcgtaat

SEQ ID NO: 243275 - DNA, 25 bp, Homo sapien
tgcagtaataataacaccagtgtta

SEQ ID NO: 243276 - DNA, 25 bp, Homo sapien
caacagatcagtaattgtgctctac

SEQ ID NO: 243277 - DNA, 25 bp, Homo sapien
tcccgagaggtagttaaatgcagta

SEQ ID NO: 243278 - DNA, 25 bp, Homo sapien
tccttcttctgaggcaatggaagtc

SEQ ID NO: 243279 - DNA, 25 bp, Homo sapien
ttctgccgtgtgatccttcttctga

SEQ ID NO: 243280 - DNA, 25 bp, Homo sapien
tcaggtgtttgcgagtccgcaatgt

SEQ ID NO: 243281 - DNA, 25 bp, Homo sapien
tgaaacacgctagtgttctgtctgc

SEQ ID NO: 243282 - DNA, 25 bp, Homo sapien
atctgaatctctcgtgggctgctcc

SEQ ID NO: 243283 - DNA, 25 bp, Homo sapien
ccttcagaattctgctatctgaatc

SEQ ID NO: 243284 - DNA, 25 bp, Homo sapien
gctatctgaatctctcgtgggctgc

SEQ ID NO: 243285 - DNA, 25 bp, Homo sapien
ctgctatctgaatctctcgtgggct

SEQ ID NO: 243286 - DNA, 25 bp, Homo sapien
tatgatgaactaatggcaacaagat

SEQ ID NO: 243287 - DNA, 25 bp, Homo sapien
tacagctttatagaaggatgaacac

SEQ ID NO: 243288 - DNA, 25 bp, Homo sapien
cagctttatagaaggatgaacacat

SEQ ID NO: 243289 - DNA, 25 bp, Homo sapien
actaatggcaacaagatgtagaagc

SEQ ID NO: 243290 - DNA, 25 bp, Homo sapien
tgcaggatgagggaacaataaggcc

SEQ ID NO: 243291 - DNA, 25 bp, Homo sapien
taaggcctcgctgtattcaataaca

SEQ ID NO: 243292 - DNA, 25 bp, Homo sapien
taaagtctttgctttcaggatctca

SEQ ID NO: 243293 - DNA, 25 bp, Homo sapien
ttaattatcatgattatctcacatt

SEQ ID NO: 243294 - DNA, 25 bp, Homo sapien
gacaaggccctccagatatgcaacc

SEQ ID NO: 243295 - DNA, 25 bp, Homo sapien
aacctggcgtttcttcaagagcaga

SEQ ID NO: 243296 - DNA, 25 bp, Homo sapien
gattctacatggagaggtgcagcag

SEQ ID NO: 243297 - DNA, 25 bp, Homo sapien
ggatcctgagtaggaaccagcattt

SEQ ID NO: 243298 - DNA, 25 bp, Homo sapien
acacaatacaggcttgctggatttg

SEQ ID NO: 243299 - DNA, 25 bp, Homo sapien
ggccaaaggagttgattttggccac

SEQ ID NO: 243300 - DNA, 25 bp, Homo sapien
gagacagcatggttacacaatacag

SEQ ID NO: 243301 - DNA, 25 bp, Homo sapien
caaagtgcagactttaggccaaagg

SEQ ID NO: 243302 - DNA, 25 bp, Homo sapien
gagccattgactcttggctgctcat

SEQ ID NO: 243303 - DNA, 25 bp, Homo sapien
tctaggaggtcggtcaacgggctcc

SEQ ID NO: 243304 - DNA, 25 bp, Homo sapien
tgcttttgtgaaattggcccaacag

SEQ ID NO: 243305 - DNA, 25 bp, Homo sapien
ggacaaagctttgctgtcagccaga

SEQ ID NO: 243306 - DNA, 25 bp, Homo sapien
ttgtttcattggcactggacaaagc

SEQ ID NO: 243307 - DNA, 25 bp, Homo sapien
atgcacccctctgtgtcggaatggg

SEQ ID NO: 243308 - DNA, 25 bp, Homo sapien
tttttgcctgcaacgatgcacccct

SEQ ID NO: 243309 - DNA, 25 bp, Homo sapien
gctttttgcctgcaacgatgcaccc

SEQ ID NO: 243310 - DNA, 25 bp, Homo sapien
aatgggttgcgtctgctgtctcctc

SEQ ID NO: 243311 - DNA, 25 bp, Homo sapien
caaacccagggcattctaatgcagg

SEQ ID NO: 243312 - DNA, 25 bp, Homo sapien
gctccaggacccacatttttctgac

SEQ ID NO: 243313 - DNA, 25 bp, Homo sapien
cattctaatgcaggggccttgtgga

SEQ ID NO: 243314 - DNA, 25 bp, Homo sapien
ggcattctaatgcaggggccttgtg

SEQ ID NO: 243315 - DNA, 25 bp, Homo sapien
gctgaagaagccctaaggtggtcca

SEQ ID NO: 243316 - DNA, 25 bp, Homo sapien
ctgaagaagccctaaggtggtccag

SEQ ID NO: 243317 - DNA, 25 bp, Homo sapien
tgaagaagccctaaggtggtccagg

SEQ ID NO: 243318 - DNA, 25 bp, Homo sapien
tccagtgccaggtatttctaggagc

SEQ ID NO: 243319 - DNA, 25 bp, Homo sapien
cagtgccaggtatttctaggagctc

SEQ ID NO: 243320 - DNA, 25 bp, Homo sapien
tggctccagtgccaggtatttctag

SEQ ID NO: 243321 - DNA, 25 bp, Homo sapien
gaggcagggtgtgctccggagtgtc

SEQ ID NO: 243322 - DNA, 25 bp, Homo sapien
ctcttcttcatttgatcccctcttt

SEQ ID NO: 243323 - DNA, 25 bp, Homo sapien
tcttcatttgatcccctcttttcaa

SEQ ID NO: 243324 - DNA, 25 bp, Homo sapien
ttgatcccctcttttcaacatccat

SEQ ID NO: 243325 - DNA, 25 bp, Homo sapien
ctctcttcttcatttgatcccctct

SEQ ID NO: 243326 - DNA, 25 bp, Homo sapien
cttacagcttgcatgtccagctctt

SEQ ID NO: 243327 - DNA, 25 bp, Homo sapien
tgattgcaccccattgattacccca

SEQ ID NO: 243328 - DNA, 25 bp, Homo sapien
ccaggttgattgcaccccattgatt

SEQ ID NO: 243329 - DNA, 25 bp, Homo sapien
caccccattgattaccccatcgcat

SEQ ID NO: 243330 - DNA, 25 bp, Homo sapien
ctctctgtgcagagggggagatttt

SEQ ID NO: 243331 - DNA, 25 bp, Homo sapien
ttctctctgtgcagagggggagatt

SEQ ID NO: 243332 - DNA, 25 bp, Homo sapien
tctctctgtgcagagggggagattt

SEQ ID NO: 243333 - DNA, 25 bp, Homo sapien
tctctgtgcagagggggagattttt

SEQ ID NO: 243334 - DNA, 25 bp, Homo sapien
tgcgctcggtcggagaatctttcgg

SEQ ID NO: 243335 - DNA, 25 bp, Homo sapien
aaatgtggctgaaattgataattcc

SEQ ID NO: 243336 - DNA, 25 bp, Homo sapien
aaagtgcttcatttcggctcctcgg

SEQ ID NO: 243337 - DNA, 25 bp, Homo sapien
tgcagtccgggagaatgcgctcggt

SEQ ID NO: 243338 - DNA, 25 bp, Homo sapien
gtggctttgtgcaaagtcatggcat

SEQ ID NO: 243339 - DNA, 25 bp, Homo sapien
tgtggctttgtgcaaagtcatggca

SEQ ID NO: 243340 - DNA, 25 bp, Homo sapien
agtgtggctttgtgcaaagtcatgg

SEQ ID NO: 243341 - DNA, 25 bp, Homo sapien
gtgtggctttgtgcaaagtcatggc

SEQ ID NO: 243342 - DNA, 25 bp, Homo sapien
tctgatggccagacacaaccaggag

SEQ ID NO: 243343 - DNA, 25 bp, Homo sapien
gatgtcttcaggttccatgtttggc

SEQ ID NO: 243344 - DNA, 25 bp, Homo sapien
tatccttgccaagttccctagatgt

SEQ ID NO: 243345 - DNA, 25 bp, Homo sapien
tgtggaaaacgtccctgaagttctg

SEQ ID NO: 243346 - DNA, 25 bp, Homo sapien
tggcgttcattagcctgctgggccc

SEQ ID NO: 243347 - DNA, 25 bp, Homo sapien
tgctgggcccgcatggaaagtgtct

SEQ ID NO: 243348 - DNA, 25 bp, Homo sapien
caagacccatcgtgttgagctggcg

SEQ ID NO: 243349 - DNA, 25 bp, Homo sapien
tcaagcactagttccttatgaagga

SEQ ID NO: 243350 - DNA, 25 bp, Homo sapien
tctccctaagggtgccatgaagatt

SEQ ID NO: 243351 - DNA, 25 bp, Homo sapien
tcctgcaatacctggacaatgacca

SEQ ID NO: 243352 - DNA, 25 bp, Homo sapien
taacaacagtgtctccctaagggtg

SEQ ID NO: 243353 - DNA, 25 bp, Homo sapien
gccatgaagattaaggtaatcctgc

SEQ ID NO: 243354 - DNA, 25 bp, Homo sapien
ggaaatccatggaacaagagaggga

SEQ ID NO: 243355 - DNA, 25 bp, Homo sapien
taaatttacttattgtataaccaca

SEQ ID NO: 243356 - DNA, 25 bp, Homo sapien
aatccatggaacaagagagggaatg

SEQ ID NO: 243357 - DNA, 25 bp, Homo sapien
tattgtataaccacattactgaaca

SEQ ID NO: 243358 - DNA, 25 bp, Homo sapien
caaacagctggtggaagtcgagaaa

SEQ ID NO: 243359 - DNA, 25 bp, Homo sapien
ggcagtcaggatacagcgtggctct

SEQ ID NO: 243360 - DNA, 25 bp, Homo sapien
ccatgatggacctcaaacttctctt

SEQ ID NO: 243361 - DNA, 25 bp, Homo sapien
gcagttgtagggagctttgcagcac

SEQ ID NO: 243362 - DNA, 25 bp, Homo sapien
aattttgagcatgatgcgcggaggt

SEQ ID NO: 243363 - DNA, 25 bp, Homo sapien
gagcctgagaacatttaccccttgg

SEQ ID NO: 243364 - DNA, 25 bp, Homo sapien
cattaccgttaatgggaatgacagc

SEQ ID NO: 243365 - DNA, 25 bp, Homo sapien
gaggtttagccatgggactctcatt

SEQ ID NO: 243366 - DNA, 25 bp, Homo sapien
gggaggaatcgcagagatgccaact

SEQ ID NO: 243367 - DNA, 25 bp, Homo sapien
gatgccaactctgccgctatgtagg

SEQ ID NO: 243368 - DNA, 25 bp, Homo sapien
tccaggtgacagaagcgacagcttt

SEQ ID NO: 243369 - DNA, 25 bp, Homo sapien
tccggagagggagctgcgaaattct

SEQ ID NO: 243370 - DNA, 25 bp, Homo sapien
gaggtggtggcagcatctcctcctt

SEQ ID NO: 243371 - DNA, 25 bp, Homo sapien
tgctttctccttgaaagcaggtcac

SEQ ID NO: 243372 - DNA, 25 bp, Homo sapien
aactgctttctccttgaaagcaggt

SEQ ID NO: 243373 - DNA, 25 bp, Homo sapien
tctcctccttcagcaactgctttct

SEQ ID NO: 243374 - DNA, 25 bp, Homo sapien
gagaacgcctaagcattcaaatcca

SEQ ID NO: 243375 - DNA, 25 bp, Homo sapien
cctgttgttggttcatcggctggtg

SEQ ID NO: 243376 - DNA, 25 bp, Homo sapien
tcattcggtaccttgttcccagaca

SEQ ID NO: 243377 - DNA, 25 bp, Homo sapien
taacttgaaacataaggagaacgcc

SEQ ID NO: 243378 - DNA, 25 bp, Homo sapien
gagaatagacaatggccgtatcttc

SEQ ID NO: 243379 - DNA, 25 bp, Homo sapien
catcagtagtaaagacaatggtctt

SEQ ID NO: 243380 - DNA, 25 bp, Homo sapien
cttctttggaggcatcagtagtaaa

SEQ ID NO: 243381 - DNA, 25 bp, Homo sapien
tggaggcatcagtagtaaagacaat

SEQ ID NO: 243382 - DNA, 25 bp, Homo sapien
ctgtaggaacagagaagacattgtt

SEQ ID NO: 243383 - DNA, 25 bp, Homo sapien
tgtaggaacagagaagacattgttg

SEQ ID NO: 243384 - DNA, 25 bp, Homo sapien
aggaacagagaagacattgttgttc

SEQ ID NO: 243385 - DNA, 25 bp, Homo sapien
gtaggaacagagaagacattgttgt

SEQ ID NO: 243386 - DNA, 25 bp, Homo sapien
gcaatcacacagttctcagtggcca

SEQ ID NO: 243387 - DNA, 25 bp, Homo sapien
gtctgtcaatatcctgctttacaga

SEQ ID NO: 243388 - DNA, 25 bp, Homo sapien
gatgcaatcacacagttctcagtgg

SEQ ID NO: 243389 - DNA, 25 bp, Homo sapien
acagatgcaatcacacagttctcag

SEQ ID NO: 243390 - DNA, 25 bp, Homo sapien
ctcactgtctgtcttgtggaaagaa

SEQ ID NO: 243391 - DNA, 25 bp, Homo sapien
acttcgctggtgctgttcacttccc

SEQ ID NO: 243392 - DNA, 25 bp, Homo sapien
taacattgcctcaacacttcgctgg

SEQ ID NO: 243393 - DNA, 25 bp, Homo sapien
acatgctcaacagcagtgaccgcct

SEQ ID NO: 243394 - DNA, 25 bp, Homo sapien
ctgctactgttcagcacgagagttt

SEQ ID NO: 243395 - DNA, 25 bp, Homo sapien
ggtatcactacgttgctgcagtgca

SEQ ID NO: 243396 - DNA, 25 bp, Homo sapien
gccaagcttagtgcaacatccaatc

SEQ ID NO: 243397 - DNA, 25 bp, Homo sapien
tcacaagtgcaatcctgctactgtt

SEQ ID NO: 243398 - DNA, 25 bp, Homo sapien
agcaggagacagatcagtgcagtct

SEQ ID NO: 243399 - DNA, 25 bp, Homo sapien
gcaccgggatgcgtgacaccagaca

SEQ ID NO: 243400 - DNA, 25 bp, Homo sapien
cgtgacaccagacagccatttccat

SEQ ID NO: 243401 - DNA, 25 bp, Homo sapien
ggcaacagagattccacagggtagt

SEQ ID NO: 243402 - DNA, 25 bp, Homo sapien
gacatccattgttggcggctctgta

SEQ ID NO: 243403 - DNA, 25 bp, Homo sapien
tggcggctctgtacttgattataag

SEQ ID NO: 243404 - DNA, 25 bp, Homo sapien
cataatgacatccattgttggcggc

SEQ ID NO: 243405 - DNA, 25 bp, Homo sapien
cattgttggcggctctgtacttgat

SEQ ID NO: 243406 - DNA, 25 bp, Homo sapien
atctctgtctgaatgccacttgggc

SEQ ID NO: 243407 - DNA, 25 bp, Homo sapien
cttgggccatcccacctagaggatg

SEQ ID NO: 243408 - DNA, 25 bp, Homo sapien
tcccacctagaggatggtactccat

SEQ ID NO: 243409 - DNA, 25 bp, Homo sapien
tgtctgaatgccacttgggccatcc

SEQ ID NO: 243410 - DNA, 25 bp, Homo sapien
cccactctgggagatacgtgctagg

SEQ ID NO: 243411 - DNA, 25 bp, Homo sapien
ggttcctcgggaaacggtgattgca

SEQ ID NO: 243412 - DNA, 25 bp, Homo sapien
agatacgtgctagggagtccaccca

SEQ ID NO: 243413 - DNA, 25 bp, Homo sapien
cacttgcagatagaagcctccttct

SEQ ID NO: 243414 - DNA, 25 bp, Homo sapien
tcagcgagacccgtgacctttaaaa

SEQ ID NO: 243415 - DNA, 25 bp, Homo sapien
gcatggctagatggcgaccacttta

SEQ ID NO: 243416 - DNA, 25 bp, Homo sapien
cactttagccttatctcagcgagac

SEQ ID NO: 243417 - DNA, 25 bp, Homo sapien
tccttgatgaattgacctgaacaga

SEQ ID NO: 243418 - DNA, 25 bp, Homo sapien
tcagctctgacgaatttgcatctct

SEQ ID NO: 243419 - DNA, 25 bp, Homo sapien
cacaaggtgctaaaagtcagctggg

SEQ ID NO: 243420 - DNA, 25 bp, Homo sapien
aaccccagcgatagattaaattttg

SEQ ID NO: 243421 - DNA, 25 bp, Homo sapien
gaatatgacgcttgaaaaaccccag

SEQ ID NO: 243422 - DNA, 25 bp, Homo sapien
aagatttggagccacggccttacct

SEQ ID NO: 243423 - DNA, 25 bp, Homo sapien
gagccacggccttacctcttgagag

SEQ ID NO: 243424 - DNA, 25 bp, Homo sapien
gacacgtcttacagccagggaagag

SEQ ID NO: 243425 - DNA, 25 bp, Homo sapien
gggaatcatcgacctggacacgtct

SEQ ID NO: 243426 - DNA, 25 bp, Homo sapien
tatatgagtcttggaggagcatcca

SEQ ID NO: 243427 - DNA, 25 bp, Homo sapien
tagtcggtgatcctttatcagtccc

SEQ ID NO: 243428 - DNA, 25 bp, Homo sapien
tgcgagattccacgggcaaaagttg

SEQ ID NO: 243429 - DNA, 25 bp, Homo sapien
catttgcccatgcaaatgtgattta

SEQ ID NO: 243430 - DNA, 25 bp, Homo sapien
tctcctaactggctggtaaccaaat

SEQ ID NO: 243431 - DNA, 25 bp, Homo sapien
agagtgctctgtacgctgccagaac

SEQ ID NO: 243432 - DNA, 25 bp, Homo sapien
ctcctaactggctggtaaccaaatg

SEQ ID NO: 243433 - DNA, 25 bp, Homo sapien
tcccttccagagtgctctgtacgct

SEQ ID NO: 243434 - DNA, 25 bp, Homo sapien
ggacgagataaaggctccgctgcat

SEQ ID NO: 243435 - DNA, 25 bp, Homo sapien
aggccagactcggacgagataaagg

SEQ ID NO: 243436 - DNA, 25 bp, Homo sapien
gactcggacgagataaaggctccgc

SEQ ID NO: 243437 - DNA, 25 bp, Homo sapien
ctgattcttgttagaattgtttatc

SEQ ID NO: 243438 - DNA, 25 bp, Homo sapien
acccaggactttgcctgacaccaag

SEQ ID NO: 243439 - DNA, 25 bp, Homo sapien
caccaagatggtattcagtgaacat

SEQ ID NO: 243440 - DNA, 25 bp, Homo sapien
tgcctgacaccaagatggtattcag

SEQ ID NO: 243441 - DNA, 25 bp, Homo sapien
caatgaaatcatttagggactggtt

SEQ ID NO: 243442 - DNA, 25 bp, Homo sapien
taagccaatcagtcttgtccatgga

SEQ ID NO: 243443 - DNA, 25 bp, Homo sapien
tacttgagagtagctagaccttctc

SEQ ID NO: 243444 - DNA, 25 bp, Homo sapien
tccggtgggtctgtacttgagagta

SEQ ID NO: 243445 - DNA, 25 bp, Homo sapien
ccaaggtgtgggtcttagctagatc

SEQ ID NO: 243446 - DNA, 25 bp, Homo sapien
gatctcatagttgctgctgcttttg

SEQ ID NO: 243447 - DNA, 25 bp, Homo sapien
aagatctcatagttgctgctgcttt

SEQ ID NO: 243448 - DNA, 25 bp, Homo sapien
tcacaagatctcatagttgctgctg

SEQ ID NO: 243449 - DNA, 25 bp, Homo sapien
acaagatctcatagttgctgctgct

SEQ ID NO: 243450 - DNA, 25 bp, Homo sapien
cctgtgctaggcacagtagtagccc

SEQ ID NO: 243451 - DNA, 25 bp, Homo sapien
gtgctaggcacagtagtagcccagg

SEQ ID NO: 243452 - DNA, 25 bp, Homo sapien
acaggacatatttctgctgccccat

SEQ ID NO: 243453 - DNA, 25 bp, Homo sapien
tccaagatgcacaggacatatttct

SEQ ID NO: 243454 - DNA, 25 bp, Homo sapien
gggacaattatatagatctgcacag

SEQ ID NO: 243455 - DNA, 25 bp, Homo sapien
ccactggggacaattatatagatct

SEQ ID NO: 243456 - DNA, 25 bp, Homo sapien
aattatatagatctgcacagaactg

SEQ ID NO: 243457 - DNA, 25 bp, Homo sapien
tatagatctgcacagaactgcccca

SEQ ID NO: 243458 - DNA, 25 bp, Homo sapien
cattcaccaattccttgtttctagg

SEQ ID NO: 243459 - DNA, 25 bp, Homo sapien
tttccatctctgtagttgaatgtgg

SEQ ID NO: 243460 - DNA, 25 bp, Homo sapien
ccaaccttatataggaatatcttca

SEQ ID NO: 243461 - DNA, 25 bp, Homo sapien
tgtttctaggtgttccaaccttata

SEQ ID NO: 243462 - DNA, 25 bp, Homo sapien
ctctacagtcactacactggtgctg

SEQ ID NO: 243463 - DNA, 25 bp, Homo sapien
gtcataacaggaaatcgtgcacttg

SEQ ID NO: 243464 - DNA, 25 bp, Homo sapien
aacaaacaggatggacgcctctaca

SEQ ID NO: 243465 - DNA, 25 bp, Homo sapien
gccggcgggatctgcagtcataaca

SEQ ID NO: 243466 - DNA, 25 bp, Homo sapien
ctgtagaacagaggtggtttgagag

SEQ ID NO: 243467 - DNA, 25 bp, Homo sapien
gaacagaggtggtttgagaggttgt

SEQ ID NO: 243468 - DNA, 25 bp, Homo sapien
gtggtttgagaggttgttttcacca

SEQ ID NO: 243469 - DNA, 25 bp, Homo sapien
tggtttgagaggttgttttcaccag

SEQ ID NO: 243470 - DNA, 25 bp, Homo sapien
tggtgagtaccaaagtgatgactgc

SEQ ID NO: 243471 - DNA, 25 bp, Homo sapien
tggaagctaaccaaaatctgctcag

SEQ ID NO: 243472 - DNA, 25 bp, Homo sapien
tggttgtccagtcagtgcaataaca

SEQ ID NO: 243473 - DNA, 25 bp, Homo sapien
gactgggaatagctccatctggttg

SEQ ID NO: 243474 - DNA, 25 bp, Homo sapien
gcaaatgtcacccaaaacagcttgg

SEQ ID NO: 243475 - DNA, 25 bp, Homo sapien
ttttaaaggtttcagacatgcacga

SEQ ID NO: 243476 - DNA, 25 bp, Homo sapien
catctgagaacatcggttgcatgtc

SEQ ID NO: 243477 - DNA, 25 bp, Homo sapien
gcagtaaaacaggtgaaacattccc

SEQ ID NO: 243478 - DNA, 25 bp, Homo sapien
ttactcagcacgagaacgtcagccc

SEQ ID NO: 243479 - DNA, 25 bp, Homo sapien
tccctaacagatgtcgagaaactgc

SEQ ID NO: 243480 - DNA, 25 bp, Homo sapien
tggagtgtcctctcagtaaggaaaa

SEQ ID NO: 243481 - DNA, 25 bp, Homo sapien
tctaaattgttgtttcgccattccc

SEQ ID NO: 243482 - DNA, 25 bp, Homo sapien
tcacctggagtctgcgcagcatctg

SEQ ID NO: 243483 - DNA, 25 bp, Homo sapien
tgtgggacccctgatgatatgccag

SEQ ID NO: 243484 - DNA, 25 bp, Homo sapien
tatgccaggcatatcgagtataccg

SEQ ID NO: 243485 - DNA, 25 bp, Homo sapien
tgctgtgtttgcacccggtttccgg

SEQ ID NO: 243486 - DNA, 25 bp, Homo sapien
taaggcggagcaatggacatggcac

SEQ ID NO: 243487 - DNA, 25 bp, Homo sapien
cttggtaaggcggagcaatggacat

SEQ ID NO: 243488 - DNA, 25 bp, Homo sapien
gagcaatggacatggcactcctgag

SEQ ID NO: 243489 - DNA, 25 bp, Homo sapien
aatggacatggcactcctgagaggc

SEQ ID NO: 243490 - DNA, 25 bp, Homo sapien
ccctatatatctctggagagtcaga

SEQ ID NO: 243491 - DNA, 25 bp, Homo sapien
aaaggcttgcccctatatatctctg

SEQ ID NO: 243492 - DNA, 25 bp, Homo sapien
gcttgtaatcttcgagtttccggag

SEQ ID NO: 243493 - DNA, 25 bp, Homo sapien
tatgctaagtgtatcaggctagttt

SEQ ID NO: 243494 - DNA, 25 bp, Homo sapien
aagtgggagcgtgtacatagaagcc

SEQ ID NO: 243495 - DNA, 25 bp, Homo sapien
catagaagccctcactagaggagtt

SEQ ID NO: 243496 - DNA, 25 bp, Homo sapien
gaattaaactgagccctcactagga

SEQ ID NO: 243497 - DNA, 25 bp, Homo sapien
gattgagtcatgcttcctggttttg

SEQ ID NO: 243498 - DNA, 25 bp, Homo sapien
gtcctgtgtatccccctggcttgcc

SEQ ID NO: 243499 - DNA, 25 bp, Homo sapien
tgtcctgtgtatccccctggcttgc

SEQ ID NO: 243500 - DNA, 25 bp, Homo sapien
ctgtgtatccccctggcttgccttt

SEQ ID NO: 243501 - DNA, 25 bp, Homo sapien
tcctgtgtatccccctggcttgcct

SEQ ID NO: 243502 - DNA, 25 bp, Homo sapien
cattctaagtttcccagtgaagagg

SEQ ID NO: 243503 - DNA, 25 bp, Homo sapien
tagacaagccatgacagtgcagtgt

SEQ ID NO: 243504 - DNA, 25 bp, Homo sapien
gaaactgcatccagattggaggccc

SEQ ID NO: 243505 - DNA, 25 bp, Homo sapien
aataaacatctttgccaagggcctg

SEQ ID NO: 243506 - DNA, 25 bp, Homo sapien
ttctcattgttatggggaggtagtg

SEQ ID NO: 243507 - DNA, 25 bp, Homo sapien
ctgtgctccaggctagttgggagag

SEQ ID NO: 243508 - DNA, 25 bp, Homo sapien
tgctccaggctagttgggagagtta

SEQ ID NO: 243509 - DNA, 25 bp, Homo sapien
ctccaggctagttgggagagttaaa

SEQ ID NO: 243510 - DNA, 25 bp, Homo sapien
tggtccatggtaaacacttcccaaa

SEQ ID NO: 243511 - DNA, 25 bp, Homo sapien
gaatgaagcaccagttcttgcctct

SEQ ID NO: 243512 - DNA, 25 bp, Homo sapien
aattgggagaaaagctctgtggttt

SEQ ID NO: 243513 - DNA, 25 bp, Homo sapien
caaagagagagttgatgggagagat

SEQ ID NO: 243514 - DNA, 25 bp, Homo sapien
gagagttgatgggagagatgaatga

SEQ ID NO: 243515 - DNA, 25 bp, Homo sapien
gatgaaacgtgcagctgaaccaggt

SEQ ID NO: 243516 - DNA, 25 bp, Homo sapien
ccagatgaaacgtgcagctgaacca

SEQ ID NO: 243517 - DNA, 25 bp, Homo sapien
cctgagcccagatgaaacgtgcagc

SEQ ID NO: 243518 - DNA, 25 bp, Homo sapien
ccagtgcctatgtgtggggtaaata

SEQ ID NO: 243519 - DNA, 25 bp, Homo sapien
gagacagctagaaaccaggaccaag

SEQ ID NO: 243520 - DNA, 25 bp, Homo sapien
gattctggttactaactacaccctg

SEQ ID NO: 243521 - DNA, 25 bp, Homo sapien
aatttgaagcctatggacatcagcc

SEQ ID NO: 243522 - DNA, 25 bp, Homo sapien
ccaagtgggttcgttcatatgatgc

SEQ ID NO: 243523 - DNA, 25 bp, Homo sapien
taagccgatgtgtagcaagcacccc

SEQ ID NO: 243524 - DNA, 25 bp, Homo sapien
tattgcatgtccactaagcatcagg

SEQ ID NO: 243525 - DNA, 25 bp, Homo sapien
aagcatcaggtacttagccaataac

SEQ ID NO: 243526 - DNA, 25 bp, Homo sapien
tgtgtcatgcatccaccagtacaaa

SEQ ID NO: 243527 - DNA, 25 bp, Homo sapien
tagagtgttgcatgtatgcacggtg

SEQ ID NO: 243528 - DNA, 25 bp, Homo sapien
ctgtttagctagagtgttgcatgta

SEQ ID NO: 243529 - DNA, 25 bp, Homo sapien
tatgcacggtgttaggatgtctctg

SEQ ID NO: 243530 - DNA, 25 bp, Homo sapien
gttgcatgtatgcacggtgttagga

SEQ ID NO: 243531 - DNA, 25 bp, Homo sapien
gatgtgcagtcgatgcacagggatt

SEQ ID NO: 243532 - DNA, 25 bp, Homo sapien
tccacttctcttgccaagcaggatg

SEQ ID NO: 243533 - DNA, 25 bp, Homo sapien
ccaagcaggatgtgcagtcgatgca

SEQ ID NO: 243534 - DNA, 25 bp, Homo sapien
cacttctcttgccaagcaggatgtg

SEQ ID NO: 243535 - DNA, 25 bp, Homo sapien
ttagggcacacaaagagagcgcttg

SEQ ID NO: 243536 - DNA, 25 bp, Homo sapien
tatttgcaagatgccataaagaacc

SEQ ID NO: 243537 - DNA, 25 bp, Homo sapien
gagagggtatccttctcaaacagct

SEQ ID NO: 243538 - DNA, 25 bp, Homo sapien
gtcagggcttctagatcagatgtaa

SEQ ID NO: 243539 - DNA, 25 bp, Homo sapien
tcagcagcaggatctaatgggggca

SEQ ID NO: 243540 - DNA, 25 bp, Homo sapien
aatgggcagagtttagggcacagca

SEQ ID NO: 243541 - DNA, 25 bp, Homo sapien
atgaaagtcaaatgggcagagttta

SEQ ID NO: 243542 - DNA, 25 bp, Homo sapien
gcaggatctaatgggggcaaatgaa

SEQ ID NO: 243543 - DNA, 25 bp, Homo sapien
tctgagatatcttattaagagtcca

SEQ ID NO: 243544 - DNA, 25 bp, Homo sapien
gagatatcttattaagagtccatct

SEQ ID NO: 243545 - DNA, 25 bp, Homo sapien
agtccagcttctgagatatcttatt

SEQ ID NO: 243546 - DNA, 25 bp, Homo sapien
gcttctgagatatcttattaagagt

SEQ ID NO: 243547 - DNA, 25 bp, Homo sapien
gaagaagaacgagaaggtggctgcc

SEQ ID NO: 243548 - DNA, 25 bp, Homo sapien
agaagaagaacgagaaggtggctgc

SEQ ID NO: 243549 - DNA, 25 bp, Homo sapien
gaagtggagcatgttagcccaggta

SEQ ID NO: 243550 - DNA, 25 bp, Homo sapien
tgctgctgggaactctgtagagtct

SEQ ID NO: 243551 - DNA, 25 bp, Homo sapien
gagtctcatggtagcacaggacatc

SEQ ID NO: 243552 - DNA, 25 bp, Homo sapien
tcagagggccatatctgctcagggc

SEQ ID NO: 243553 - DNA, 25 bp, Homo sapien
tggctattctggctgataccaagag

SEQ ID NO: 243554 - DNA, 25 bp, Homo sapien
gctattctggctgataccaagagtt

SEQ ID NO: 243555 - DNA, 25 bp, Homo sapien
ccttgtaggacattcccttgagcat

SEQ ID NO: 243556 - DNA, 25 bp, Homo sapien
taggacattcccttgagcatcccaa

SEQ ID NO: 243557 - DNA, 25 bp, Homo sapien
ttcccatgagatgaccttgtcattt

SEQ ID NO: 243558 - DNA, 25 bp, Homo sapien
atgagatgaccttgtcatttgccat

SEQ ID NO: 243559 - DNA, 25 bp, Homo sapien
cccatgagatgaccttgtcatttgc

SEQ ID NO: 243560 - DNA, 25 bp, Homo sapien
catgagatgaccttgtcatttgcca

SEQ ID NO: 243561 - DNA, 25 bp, Homo sapien
ttattagtaccacctggagaggagc

SEQ ID NO: 243562 - DNA, 25 bp, Homo sapien
taaagacccatgactctggagttgc

SEQ ID NO: 243563 - DNA, 25 bp, Homo sapien
gaggctaggccacttgattaaaggg

SEQ ID NO: 243564 - DNA, 25 bp, Homo sapien
gagtcagctccccaggttttgttag

SEQ ID NO: 243565 - DNA, 25 bp, Homo sapien
agcttgttaagcaggccctcctgta

SEQ ID NO: 243566 - DNA, 25 bp, Homo sapien
gaagttgccagtgatggtcgcgttc

SEQ ID NO: 243567 - DNA, 25 bp, Homo sapien
tgatggtcgcgttccatagcagaca

SEQ ID NO: 243568 - DNA, 25 bp, Homo sapien
tgtgggctggaccttggtaaagctt

SEQ ID NO: 243569 - DNA, 25 bp, Homo sapien
tatttattgatttcataccacgata

SEQ ID NO: 243570 - DNA, 25 bp, Homo sapien
ttaggtcacttacattagttccaat

SEQ ID NO: 243571 - DNA, 25 bp, Homo sapien
tacattagttccaatgtacttacat

SEQ ID NO: 243572 - DNA, 25 bp, Homo sapien
ttcataccacgataaaacacaattt

SEQ ID NO: 243573 - DNA, 25 bp, Homo sapien
cccaccattacagtgttatacataa

SEQ ID NO: 243574 - DNA, 25 bp, Homo sapien
gttatacataatagtttcactgtcc

SEQ ID NO: 243575 - DNA, 25 bp, Homo sapien
aagaatgacattgacccaccattac

SEQ ID NO: 243576 - DNA, 25 bp, Homo sapien
tgacccaccattacagtgttataca

SEQ ID NO: 243577 - DNA, 25 bp, Homo sapien
tcttcttacctacgaacatgaactc

SEQ ID NO: 243578 - DNA, 25 bp, Homo sapien
aaaagtatagatcaagttgtgaaaa

SEQ ID NO: 243579 - DNA, 25 bp, Homo sapien
tacctacgaacatgaactctctctc

SEQ ID NO: 243580 - DNA, 25 bp, Homo sapien
tgtgaaaaattgacatcttgacaat

SEQ ID NO: 243581 - DNA, 25 bp, Homo sapien
aattagttgactatatatgttcggg

SEQ ID NO: 243582 - DNA, 25 bp, Homo sapien
atatatgttcgggtgtatttctggg

SEQ ID NO: 243583 - DNA, 25 bp, Homo sapien
tcatccatggtgtaaactaagggtc

SEQ ID NO: 243584 - DNA, 25 bp, Homo sapien
ttctcattatgtcctcttggtgcct

SEQ ID NO: 243585 - DNA, 25 bp, Homo sapien
ccctcagagctgaaacctaatattt

SEQ ID NO: 243586 - DNA, 25 bp, Homo sapien
agaaacattcggtccattgcagagg

SEQ ID NO: 243587 - DNA, 25 bp, Homo sapien
gaaatgctagggtgaagactcttga

SEQ ID NO: 243588 - DNA, 25 bp, Homo sapien
tggagtctaggatctcaacatatga

SEQ ID NO: 243589 - DNA, 25 bp, Homo sapien
gcagccggccctttatggattctgg

SEQ ID NO: 243590 - DNA, 25 bp, Homo sapien
taaagcaagaggcaactacaaggtc

SEQ ID NO: 243591 - DNA, 25 bp, Homo sapien
tgaaggctctgtcaagtgactctcc

SEQ ID NO: 243592 - DNA, 25 bp, Homo sapien
aagtgactctcccaaggtagcacag

SEQ ID NO: 243593 - DNA, 25 bp, Homo sapien
cacggagggcaaagtaaaatctgtc

SEQ ID NO: 243594 - DNA, 25 bp, Homo sapien
tagatgttcaaacccatgagtcagg

SEQ ID NO: 243595 - DNA, 25 bp, Homo sapien
taacccgttggatgagagagccaag

SEQ ID NO: 243596 - DNA, 25 bp, Homo sapien
cacatagattacgagtggcagagac

SEQ ID NO: 243597 - DNA, 25 bp, Homo sapien
tatttgtcctgagcgattgtcctga

SEQ ID NO: 243598 - DNA, 25 bp, Homo sapien
tcccacaaggatgggattggaacaa

SEQ ID NO: 243599 - DNA, 25 bp, Homo sapien
agtgctcagccgcagcctcgtgtag

SEQ ID NO: 243600 - DNA, 25 bp, Homo sapien
gctgtgttcaggatgcgggccttta

SEQ ID NO: 243601 - DNA, 25 bp, Homo sapien
tctgctgaccttagacgctggttct

SEQ ID NO: 243602 - DNA, 25 bp, Homo sapien
gagtgcattctagtctctgctgacc

SEQ ID NO: 243603 - DNA, 25 bp, Homo sapien
cagaggtttcaaggtctcatggaga

SEQ ID NO: 243604 - DNA, 25 bp, Homo sapien
tcatggagatgagatccacttccca

SEQ ID NO: 243605 - DNA, 25 bp, Homo sapien
tctctgaactcccatgctggcgggt

SEQ ID NO: 243606 - DNA, 25 bp, Homo sapien
ttgctaatcccagtgacaggccggt

SEQ ID NO: 243607 - DNA, 25 bp, Homo sapien
gaaccagcgtgttgtgcagggaaac

SEQ ID NO: 243608 - DNA, 25 bp, Homo sapien
tatagtcctagcatagaaccagcgt

SEQ ID NO: 243609 - DNA, 25 bp, Homo sapien
gaaacaaatccctcgctcactgttg

SEQ ID NO: 243610 - DNA, 25 bp, Homo sapien
gaggactgcctatggaaccagagct

SEQ ID NO: 243611 - DNA, 25 bp, Homo sapien
cacctctgctctacgaatcgatgta

SEQ ID NO: 243612 - DNA, 25 bp, Homo sapien
tcatgaaggtgaaacggcaatacat

SEQ ID NO: 243613 - DNA, 25 bp, Homo sapien
gcagcagcaattgactctatctcta

SEQ ID NO: 243614 - DNA, 25 bp, Homo sapien
gcttcctgttgcgttgtgccaatgg

SEQ ID NO: 243615 - DNA, 25 bp, Homo sapien
atttcccaggctgcggtatccttgg

SEQ ID NO: 243616 - DNA, 25 bp, Homo sapien
gctgataagaccttctttgcagggc

SEQ ID NO: 243617 - DNA, 25 bp, Homo sapien
cacccccagagctagacttggggtc

SEQ ID NO: 243618 - DNA, 25 bp, Homo sapien
agctgggatttccttcccaatgggg

SEQ ID NO: 243619 - DNA, 25 bp, Homo sapien
tgggatttccttcccaatggggcac

SEQ ID NO: 243620 - DNA, 25 bp, Homo sapien
ggatttccttcccaatggggcacag

SEQ ID NO: 243621 - DNA, 25 bp, Homo sapien
taatgccagaggctgatctcggatc

SEQ ID NO: 243622 - DNA, 25 bp, Homo sapien
taccggcagcttggacgaagtagtg

SEQ ID NO: 243623 - DNA, 25 bp, Homo sapien
gaagctctgctgagggtcagataca

SEQ ID NO: 243624 - DNA, 25 bp, Homo sapien
tcccaggtttcatgttttgaaggcc

SEQ ID NO: 243625 - DNA, 25 bp, Homo sapien
cagcaacataccctgggtggctcac

SEQ ID NO: 243626 - DNA, 25 bp, Homo sapien
gctgctgattttctcaacggcctgc

SEQ ID NO: 243627 - DNA, 25 bp, Homo sapien
tgctgcctcccttagacggtggcca

SEQ ID NO: 243628 - DNA, 25 bp, Homo sapien
tttctcaacggcctgctgctgcaga

SEQ ID NO: 243629 - DNA, 25 bp, Homo sapien
ccaaagccagtgctgccttcagcac

SEQ ID NO: 243630 - DNA, 25 bp, Homo sapien
cgccaaagccagtgctgccttcagc

SEQ ID NO: 243631 - DNA, 25 bp, Homo sapien
caaagccagtgctgccttcagcact

SEQ ID NO: 243632 - DNA, 25 bp, Homo sapien
gccaaagccagtgctgccttcagca

SEQ ID NO: 243633 - DNA, 25 bp, Homo sapien
ctgtgatgacgaccttgagggaaag

SEQ ID NO: 243634 - DNA, 25 bp, Homo sapien
tgtgatgacgaccttgagggaaagg

SEQ ID NO: 243635 - DNA, 25 bp, Homo sapien
ttccacactcacagaaggagctttg

SEQ ID NO: 243636 - DNA, 25 bp, Homo sapien
tcaggccttcttgaaaagttagaaa

SEQ ID NO: 243637 - DNA, 25 bp, Homo sapien
tgtctgccgagaaacctggtggata

SEQ ID NO: 243638 - DNA, 25 bp, Homo sapien
tagaaaactgtcctgggtagtgagt

SEQ ID NO: 243639 - DNA, 25 bp, Homo sapien
tcagagggctttggacattttggca

SEQ ID NO: 243640 - DNA, 25 bp, Homo sapien
ctttggacattttggcagtgtatgc

SEQ ID NO: 243641 - DNA, 25 bp, Homo sapien
tggacattttggcagtgtatgctac

SEQ ID NO: 243642 - DNA, 25 bp, Homo sapien
gggctttggacattttggcagtgta

SEQ ID NO: 243643 - DNA, 25 bp, Homo sapien
tcaattcggcgtatgcttcctgtgc

SEQ ID NO: 243644 - DNA, 25 bp, Homo sapien
atcagtgattcaattcggcgtatgc

SEQ ID NO: 243645 - DNA, 25 bp, Homo sapien
tcggcgtatgcttcctgtgcattgt

SEQ ID NO: 243646 - DNA, 25 bp, Homo sapien
gcttcctgtgcattgtttatgcaca

SEQ ID NO: 243647 - DNA, 25 bp, Homo sapien
atagcccgtaagaggctctgtgtcc

SEQ ID NO: 243648 - DNA, 25 bp, Homo sapien
tagcccgtaagaggctctgtgtcca

SEQ ID NO: 243649 - DNA, 25 bp, Homo sapien
tcatagcccgtaagaggctctgtgt

SEQ ID NO: 243650 - DNA, 25 bp, Homo sapien
catagcccgtaagaggctctgtgtc

SEQ ID NO: 243651 - DNA, 25 bp, Homo sapien
gagggtaatagatgtggtcacagcc

SEQ ID NO: 243652 - DNA, 25 bp, Homo sapien
ctgaggagggtaatagatgtggtca

SEQ ID NO: 243653 - DNA, 25 bp, Homo sapien
ctctgaggagggtaatagatgtggt

SEQ ID NO: 243654 - DNA, 25 bp, Homo sapien
ggagggtaatagatgtggtcacagc

SEQ ID NO: 243655 - DNA, 25 bp, Homo sapien
tgtttgcagaataattgatggatcg

SEQ ID NO: 243656 - DNA, 25 bp, Homo sapien
cagaataattgatggatcgtaagct

SEQ ID NO: 243657 - DNA, 25 bp, Homo sapien
ttgatggatcgtaagctagagctgt

SEQ ID NO: 243658 - DNA, 25 bp, Homo sapien
taagctagagctgtagggtgctcca

SEQ ID NO: 243659 - DNA, 25 bp, Homo sapien
caatgctgcaagttggcaagagccc

SEQ ID NO: 243660 - DNA, 25 bp, Homo sapien
aagagcccgttgctgttccatgagc

SEQ ID NO: 243661 - DNA, 25 bp, Homo sapien
caagttggcaagagcccgttgctgt

SEQ ID NO: 243662 - DNA, 25 bp, Homo sapien
gcaagagcccgttgctgttccatga

SEQ ID NO: 243663 - DNA, 25 bp, Homo sapien
taatttgactttggtggatgaccac

SEQ ID NO: 243664 - DNA, 25 bp, Homo sapien
agccgtgaggaccttgtccatggtg

SEQ ID NO: 243665 - DNA, 25 bp, Homo sapien
tggatgaccacagccgtgaggacct

SEQ ID NO: 243666 - DNA, 25 bp, Homo sapien
ggtgcagcgactatctttacattca

SEQ ID NO: 243667 - DNA, 25 bp, Homo sapien
tgcaaaatggcccaggggccacatg

SEQ ID NO: 243668 - DNA, 25 bp, Homo sapien
aatggcccaggggccacatgaatgg

SEQ ID NO: 243669 - DNA, 25 bp, Homo sapien
aaatggcccaggggccacatgaatg

SEQ ID NO: 243670 - DNA, 25 bp, Homo sapien
caaaatggcccaggggccacatgaa

SEQ ID NO: 243671 - DNA, 25 bp, Homo sapien
tatggtcatttctggatgatggtgt

SEQ ID NO: 243672 - DNA, 25 bp, Homo sapien
gttcaaagtcctactgggaagagca

SEQ ID NO: 243673 - DNA, 25 bp, Homo sapien
aaggtcttgactggactttatggtc

SEQ ID NO: 243674 - DNA, 25 bp, Homo sapien
gaactgcaacttgatcccagacctt

SEQ ID NO: 243675 - DNA, 25 bp, Homo sapien
agggaagcgctatctaaatccaggt

SEQ ID NO: 243676 - DNA, 25 bp, Homo sapien
cagggaagcgctatctaaatccagg

SEQ ID NO: 243677 - DNA, 25 bp, Homo sapien
ccagggaagcgctatctaaatccag

SEQ ID NO: 243678 - DNA, 25 bp, Homo sapien
cccagggaagcgctatctaaatcca

SEQ ID NO: 243679 - DNA, 25 bp, Homo sapien
acatcactgtttccatggccgccat

SEQ ID NO: 243680 - DNA, 25 bp, Homo sapien
ccacatcactgtttccatggccgcc

SEQ ID NO: 243681 - DNA, 25 bp, Homo sapien
cagttcccacatcactgtttccatg

SEQ ID NO: 243682 - DNA, 25 bp, Homo sapien
tcccacatcactgtttccatggccg

SEQ ID NO: 243683 - DNA, 25 bp, Homo sapien
taatcttttccaaacacctgtctga

SEQ ID NO: 243684 - DNA, 25 bp, Homo sapien
tcaccccaagcaagtggagtagcca

SEQ ID NO: 243685 - DNA, 25 bp, Homo sapien
tccacaccacccatgagagggaact

SEQ ID NO: 243686 - DNA, 25 bp, Homo sapien
gagggaactcagacaccttgcccaa

SEQ ID NO: 243687 - DNA, 25 bp, Homo sapien
gagaagaaccccctgcagcgattcc

SEQ ID NO: 243688 - DNA, 25 bp, Homo sapien
ggtctagaatctccataactgagaa

SEQ ID NO: 243689 - DNA, 25 bp, Homo sapien
cctgcagcgattccaagctggtagc

SEQ ID NO: 243690 - DNA, 25 bp, Homo sapien
tgaactgtccccagcggtggccatg

SEQ ID NO: 243691 - DNA, 25 bp, Homo sapien
ttgggggatcttgaaggctttcctg

SEQ ID NO: 243692 - DNA, 25 bp, Homo sapien
cttgggggatcttgaaggctttcct

SEQ ID NO: 243693 - DNA, 25 bp, Homo sapien
ggggatcttgaaggctttcctgggc

SEQ ID NO: 243694 - DNA, 25 bp, Homo sapien
tgggggatcttgaaggctttcctgg

SEQ ID NO: 243695 - DNA, 25 bp, Homo sapien
gtaaaagcagaacaaatatttgaag

SEQ ID NO: 243696 - DNA, 25 bp, Homo sapien
ctgtaaaagcagaacaaatatttga

SEQ ID NO: 243697 - DNA, 25 bp, Homo sapien
aaaagcagaacaaatatttgaagaa

SEQ ID NO: 243698 - DNA, 25 bp, Homo sapien
agcagaacaaatatttgaagaataa

SEQ ID NO: 243699 - DNA, 25 bp, Homo sapien
cttttctctggacatccacatcaaa

SEQ ID NO: 243700 - DNA, 25 bp, Homo sapien
tctgctatcctatcattccagtcac

SEQ ID NO: 243701 - DNA, 25 bp, Homo sapien
tctctggacatccacatcaaatcct

SEQ ID NO: 243702 - DNA, 25 bp, Homo sapien
ctgaggctctgctatcctatcattc

SEQ ID NO: 243703 - DNA, 25 bp, Homo sapien
taggtgacgttatggacctagagtc

SEQ ID NO: 243704 - DNA, 25 bp, Homo sapien
ggctcctgacaacctggcgttggaa

SEQ ID NO: 243705 - DNA, 25 bp, Homo sapien
gaagattgtcggctaggtgacgtta

SEQ ID NO: 243706 - DNA, 25 bp, Homo sapien
caacctggcgttggaaagaccaagg

SEQ ID NO: 243707 - DNA, 25 bp, Homo sapien
gcctgccctccatgtatcacatgag

SEQ ID NO: 243708 - DNA, 25 bp, Homo sapien
aggcctgccctccatgtatcacatg

SEQ ID NO: 243709 - DNA, 25 bp, Homo sapien
gggatgctgtcctgtacccgcatcc

SEQ ID NO: 243710 - DNA, 25 bp, Homo sapien
tgtacccgcatccaggagtagatct

SEQ ID NO: 243711 - DNA, 25 bp, Homo sapien
ggcagcttttgggagtccacttcct

SEQ ID NO: 243712 - DNA, 25 bp, Homo sapien
tagccgcatcggcaaggcagctttt

SEQ ID NO: 243713 - DNA, 25 bp, Homo sapien
ccccgggagggcctgatagccgcat

SEQ ID NO: 243714 - DNA, 25 bp, Homo sapien
taagacccttccatgcctttgtcct

SEQ ID NO: 243715 - DNA, 25 bp, Homo sapien
ctatttgtacaataacggtaaaatg

SEQ ID NO: 243716 - DNA, 25 bp, Homo sapien
aatgtttttacagagtaagccaacg

SEQ ID NO: 243717 - DNA, 25 bp, Homo sapien
atgtttttacagagtaagccaacgg

SEQ ID NO: 243718 - DNA, 25 bp, Homo sapien
taaaatgtttttacagagtaagcca

SEQ ID NO: 243719 - DNA, 25 bp, Homo sapien
cttgtttctcaactcgcccagcatc

SEQ ID NO: 243720 - DNA, 25 bp, Homo sapien
gtttctcaactcgcccagcatcatc

SEQ ID NO: 243721 - DNA, 25 bp, Homo sapien
ttgtttctcaactcgcccagcatca

SEQ ID NO: 243722 - DNA, 25 bp, Homo sapien
tgtttctcaactcgcccagcatcat

SEQ ID NO: 243723 - DNA, 25 bp, Homo sapien
cctctgacatatagctgaagcatag

SEQ ID NO: 243724 - DNA, 25 bp, Homo sapien
agttcccactgaccctctgacatat

SEQ ID NO: 243725 - DNA, 25 bp, Homo sapien
gggttctccactggccgcttcaaag

SEQ ID NO: 243726 - DNA, 25 bp, Homo sapien
tgaagcatagcaggtgggttctcca

SEQ ID NO: 243727 - DNA, 25 bp, Homo sapien
gagtgaatgactgcccagccagccc

SEQ ID NO: 243728 - DNA, 25 bp, Homo sapien
agccagccctatcaggcccacgctg

SEQ ID NO: 243729 - DNA, 25 bp, Homo sapien
ctggagtgaatgactgcccagccag

SEQ ID NO: 243730 - DNA, 25 bp, Homo sapien
cagccagccctatcaggcccacgct

SEQ ID NO: 243731 - DNA, 25 bp, Homo sapien
tagggctcgggtctcatcagtgggc

SEQ ID NO: 243732 - DNA, 25 bp, Homo sapien
tgtgtgatgcctactagtcgggacg

SEQ ID NO: 243733 - DNA, 25 bp, Homo sapien
tcaggtgttcttgcgagtgccccca

SEQ ID NO: 243734 - DNA, 25 bp, Homo sapien
tgttcttgcgagtgcccccatgaaa

SEQ ID NO: 243735 - DNA, 25 bp, Homo sapien
gaaaacgattcacatgctgccagga

SEQ ID NO: 243736 - DNA, 25 bp, Homo sapien
tccaagaaggagatatttaagcctc

SEQ ID NO: 243737 - DNA, 25 bp, Homo sapien
ccaggagccgatctgaagtgttatc

SEQ ID NO: 243738 - DNA, 25 bp, Homo sapien
gacacccagagagcattaatgagct

SEQ ID NO: 243739 - DNA, 25 bp, Homo sapien
caccggatatgctgatcccgtggtt

SEQ ID NO: 243740 - DNA, 25 bp, Homo sapien
tgccatgcgcagtaaatactgaaga

SEQ ID NO: 243741 - DNA, 25 bp, Homo sapien
gggcaccggatatgctgatcccgtg

SEQ ID NO: 243742 - DNA, 25 bp, Homo sapien
gcagctccaaggacccatttgtctg

SEQ ID NO: 243743 - DNA, 25 bp, Homo sapien
cctgaagtcgcccatggactctgtg

SEQ ID NO: 243744 - DNA, 25 bp, Homo sapien
gtctcgccctgaagtcgcccatgga

SEQ ID NO: 243745 - DNA, 25 bp, Homo sapien
tgaagtcgcccatggactctgtgtg

SEQ ID NO: 243746 - DNA, 25 bp, Homo sapien
aagtcgcccatggactctgtgtgct

SEQ ID NO: 243747 - DNA, 25 bp, Homo sapien
aaagtcacctttgtgatggtgaagc

SEQ ID NO: 243748 - DNA, 25 bp, Homo sapien
ttgtgatggtgaagctcatttccct

SEQ ID NO: 243749 - DNA, 25 bp, Homo sapien
cacctttgtgatggtgaagctcatt

SEQ ID NO: 243750 - DNA, 25 bp, Homo sapien
tgatggtgaagctcatttcccttcc

SEQ ID NO: 243751 - DNA, 25 bp, Homo sapien
gacaacttcctgtataatttgacta

SEQ ID NO: 243752 - DNA, 25 bp, Homo sapien
tgttcggactcctttgacaacttcc

SEQ ID NO: 243753 - DNA, 25 bp, Homo sapien
ctgtcgtggggtcagagatttcctc

SEQ ID NO: 243754 - DNA, 25 bp, Homo sapien
tttgactattatttgcctgtctggg

SEQ ID NO: 243755 - DNA, 25 bp, Homo sapien
ggccctgggtattcaattagcctgt

SEQ ID NO: 243756 - DNA, 25 bp, Homo sapien
ccctgggtattcaattagcctgtag

SEQ ID NO: 243757 - DNA, 25 bp, Homo sapien
caggccctgggtattcaattagcct

SEQ ID NO: 243758 - DNA, 25 bp, Homo sapien
ctgggtattcaattagcctgtaggg

SEQ ID NO: 243759 - DNA, 25 bp, Homo sapien
tggaaatgcctggctgctccaaaga

SEQ ID NO: 243760 - DNA, 25 bp, Homo sapien
ccccagtgagtactaccttctccaa

SEQ ID NO: 243761 - DNA, 25 bp, Homo sapien
ggttagcccttgaacctgtctgccc

SEQ ID NO: 243762 - DNA, 25 bp, Homo sapien
gtctgccccagtgagtactaccttc

SEQ ID NO: 243763 - DNA, 25 bp, Homo sapien
ctggttagcccttgaacctgtctgc

SEQ ID NO: 243764 - DNA, 25 bp, Homo sapien
aaggcaccacttatcattggtgtct

SEQ ID NO: 243765 - DNA, 25 bp, Homo sapien
ggctgtgtttcggatgcagagtttc

SEQ ID NO: 243766 - DNA, 25 bp, Homo sapien
gtagatggtgagatcctcaagagaa

SEQ ID NO: 243767 - DNA, 25 bp, Homo sapien
tcaccccttctgaccattcgcatag

SEQ ID NO: 243768 - DNA, 25 bp, Homo sapien
cttcttcctctttcatccagatcat

SEQ ID NO: 243769 - DNA, 25 bp, Homo sapien
gcttcttcctctttcatccagatca

SEQ ID NO: 243770 - DNA, 25 bp, Homo sapien
ctgtcaccagcttcttcctctttca

SEQ ID NO: 243771 - DNA, 25 bp, Homo sapien
ccagcttcttcctctttcatccaga

SEQ ID NO: 243772 - DNA, 25 bp, Homo sapien
agtcttaggatggtccatggaatgc

SEQ ID NO: 243773 - DNA, 25 bp, Homo sapien
gatccaagctgggtcccccagtagc

SEQ ID NO: 243774 - DNA, 25 bp, Homo sapien
ggttttgagtcttaggatggtccat

SEQ ID NO: 243775 - DNA, 25 bp, Homo sapien
ttgagtcttaggatggtccatggaa

SEQ ID NO: 243776 - DNA, 25 bp, Homo sapien
attcatcacatttatcccacgatga

SEQ ID NO: 243777 - DNA, 25 bp, Homo sapien
ctattcatcacatttatcccacgat

SEQ ID NO: 243778 - DNA, 25 bp, Homo sapien
tattcatcacatttatcccacgatg

SEQ ID NO: 243779 - DNA, 25 bp, Homo sapien
ttcatcacatttatcccacgatgat

SEQ ID NO: 243780 - DNA, 25 bp, Homo sapien
ccaaccctgcagacccgatacacat

SEQ ID NO: 243781 - DNA, 25 bp, Homo sapien
cacacccttacatgtggcctccacc

SEQ ID NO: 243782 - DNA, 25 bp, Homo sapien
gtccacacccttacatgtggcctcc

SEQ ID NO: 243783 - DNA, 25 bp, Homo sapien
ctgcagacccgatacacattttcct

SEQ ID NO: 243784 - DNA, 25 bp, Homo sapien
gatatctgcacgatccttgtcatag

SEQ ID NO: 243785 - DNA, 25 bp, Homo sapien
tactgcaacgtaaatgaggcccgaa

SEQ ID NO: 243786 - DNA, 25 bp, Homo sapien
taaatgtctgagaacaggcccaggt

SEQ ID NO: 243787 - DNA, 25 bp, Homo sapien
ggtaatgcgctaagtccaaaggaca

SEQ ID NO: 243788 - DNA, 25 bp, Homo sapien
ggcttgccacagtcaaactttggtt

SEQ ID NO: 243789 - DNA, 25 bp, Homo sapien
cagttctgcagcgatggtgcttgtc

SEQ ID NO: 243790 - DNA, 25 bp, Homo sapien
taacttcttgatactcagttctgca

SEQ ID NO: 243791 - DNA, 25 bp, Homo sapien
gccaattttctaggagcaacctgga

SEQ ID NO: 243792 - DNA, 25 bp, Homo sapien
cggaagatgggatatagcaagagaa

SEQ ID NO: 243793 - DNA, 25 bp, Homo sapien
ggatttatgcctttgctgcggaaga

SEQ ID NO: 243794 - DNA, 25 bp, Homo sapien
gacctctggatttatgcctttgctg

SEQ ID NO: 243795 - DNA, 25 bp, Homo sapien
cctttgctgcggaagatgggatata

SEQ ID NO: 243796 - DNA, 25 bp, Homo sapien
actctccaggttctaatactccaag

SEQ ID NO: 243797 - DNA, 25 bp, Homo sapien
tggaatgccaatgctttcaagaggt

SEQ ID NO: 243798 - DNA, 25 bp, Homo sapien
gcaagactagctcttctcagactct

SEQ ID NO: 243799 - DNA, 25 bp, Homo sapien
ggtgtaaggattggaatgccaatgc

SEQ ID NO: 243800 - DNA, 25 bp, Homo sapien
ctttcaagaggtgcaagactagctc

SEQ ID NO: 243801 - DNA, 25 bp, Homo sapien
aaaggccatagttagctgctgtgcc

SEQ ID NO: 243802 - DNA, 25 bp, Homo sapien
ctaggtcatcctgggttgttcctct

SEQ ID NO: 243803 - DNA, 25 bp, Homo sapien
ctaaaaggccatagttagctgctgt

SEQ ID NO: 243804 - DNA, 25 bp, Homo sapien
cttttccctagagtgtccaagtcta

SEQ ID NO: 243805 - DNA, 25 bp, Homo sapien
tgggagctgcttcagatggggacct

SEQ ID NO: 243806 - DNA, 25 bp, Homo sapien
gcttcacaccatggtggggtctctt

SEQ ID NO: 243807 - DNA, 25 bp, Homo sapien
ccatggtggggtctcttgatgtctg

SEQ ID NO: 243808 - DNA, 25 bp, Homo sapien
cttgatgtctgaggccatgagtccc

SEQ ID NO: 243809 - DNA, 25 bp, Homo sapien
tcggacacccgaaatgacatgcaga

SEQ ID NO: 243810 - DNA, 25 bp, Homo sapien
cagctctggcgtctactattctgag

SEQ ID NO: 243811 - DNA, 25 bp, Homo sapien
ttgctaaagctcgtctcacacacag

SEQ ID NO: 243812 - DNA, 25 bp, Homo sapien
tgggagcttgaactgccaggacgtc

SEQ ID NO: 243813 - DNA, 25 bp, Homo sapien
tggggtagagcaaccaaagactctg

SEQ ID NO: 243814 - DNA, 25 bp, Homo sapien
tcttaggctatgctaagagaatggg

SEQ ID NO: 243815 - DNA, 25 bp, Homo sapien
catgaggactaaatatgatgaagtg

SEQ ID NO: 243816 - DNA, 25 bp, Homo sapien
agtcaacctcttaggtgatcatgag

SEQ ID NO: 243817 - DNA, 25 bp, Homo sapien
gacccccatggccaatgtatttgct

SEQ ID NO: 243818 - DNA, 25 bp, Homo sapien
aagaaacagacttgctgctggtgga

SEQ ID NO: 243819 - DNA, 25 bp, Homo sapien
ttgctctgagaatagaccagccaag

SEQ ID NO: 243820 - DNA, 25 bp, Homo sapien
tgagaatagaccagccaagaaacag

SEQ ID NO: 243821 - DNA, 25 bp, Homo sapien
tataccgttattagccaagatacgt

SEQ ID NO: 243822 - DNA, 25 bp, Homo sapien
tacactgggtcaaggcattgctgcc

SEQ ID NO: 243823 - DNA, 25 bp, Homo sapien
ttttagggcactggtgtgacttggc

SEQ ID NO: 243824 - DNA, 25 bp, Homo sapien
caaacacagagtttttagggcactg

SEQ ID NO: 243825 - DNA, 25 bp, Homo sapien
cacagtgggtacatgcataggctgc

SEQ ID NO: 243826 - DNA, 25 bp, Homo sapien
gctagatgtagtgaggcctcttcca

SEQ ID NO: 243827 - DNA, 25 bp, Homo sapien
cacattgacttcgtattgagggcac

SEQ ID NO: 243828 - DNA, 25 bp, Homo sapien
catgtgctcatgaattccgggtgat

SEQ ID NO: 243829 - DNA, 25 bp, Homo sapien
gcagcagctcttcgcacaaggagta

SEQ ID NO: 243830 - DNA, 25 bp, Homo sapien
taagggctaatagacctggcagaac

SEQ ID NO: 243831 - DNA, 25 bp, Homo sapien
ggaagatgatcctagtacacctggg

SEQ ID NO: 243832 - DNA, 25 bp, Homo sapien
tacaacacccggcttagtagggatc

SEQ ID NO: 243833 - DNA, 25 bp, Homo sapien
ggcccaataccttattatatcagag

SEQ ID NO: 243834 - DNA, 25 bp, Homo sapien
ttaccttgattagagtttcgatggg

SEQ ID NO: 243835 - DNA, 25 bp, Homo sapien
gactgactgtttcctagggtggctg

SEQ ID NO: 243836 - DNA, 25 bp, Homo sapien
tgccctgctccaattggactgactg

SEQ ID NO: 243837 - DNA, 25 bp, Homo sapien
cattaactgttgagcaatatcgcct

SEQ ID NO: 243838 - DNA, 25 bp, Homo sapien
ggcaagtggatcgtgtttgaagaca

SEQ ID NO: 243839 - DNA, 25 bp, Homo sapien
aaatacatatttggaggattggcag

SEQ ID NO: 243840 - DNA, 25 bp, Homo sapien
gaaaatgccttagctctatccacag

SEQ ID NO: 243841 - DNA, 25 bp, Homo sapien
gcttgtgagcagtagcatatgcctc

SEQ ID NO: 243842 - DNA, 25 bp, Homo sapien
tctctcccttgaaagtgcacatgtg

SEQ ID NO: 243843 - DNA, 25 bp, Homo sapien
tactagcatactaagcactgtgtgg

SEQ ID NO: 243844 - DNA, 25 bp, Homo sapien
cattgggaataaacaatgcactgca

SEQ ID NO: 243845 - DNA, 25 bp, Homo sapien
ttccacagcacattcaaccgcaaat

SEQ ID NO: 243846 - DNA, 25 bp, Homo sapien
cgcttcgctctcgtaggtttgcaaa

SEQ ID NO: 243847 - DNA, 25 bp, Homo sapien
gctgtttaacgtacacacagatgca

SEQ ID NO: 243848 - DNA, 25 bp, Homo sapien
tccttgagtttcacgactttcttct

SEQ ID NO: 243849 - DNA, 25 bp, Homo sapien
ttttacacatttgagatcacactga

SEQ ID NO: 243850 - DNA, 25 bp, Homo sapien
tttatttgatagagtggcagagaac

SEQ ID NO: 243851 - DNA, 25 bp, Homo sapien
catacatgattgcatcacccagaag

SEQ ID NO: 243852 - DNA, 25 bp, Homo sapien
catcttgccgtacttcattcttcca

SEQ ID NO: 243853 - DNA, 25 bp, Homo sapien
gtaaatgtttgataagggcagagcc

SEQ ID NO: 243854 - DNA, 25 bp, Homo sapien
cccagtgtaggaggcaaacttataa

SEQ ID NO: 243855 - DNA, 25 bp, Homo sapien
tcagtccatcagtctattctgtgca

SEQ ID NO: 243856 - DNA, 25 bp, Homo sapien
gagaagtcacccagtgtaggaggca

SEQ ID NO: 243857 - DNA, 25 bp, Homo sapien
tccttccgggagtgctaatggcaaa

SEQ ID NO: 243858 - DNA, 25 bp, Homo sapien
ccttataggccaagacggactttgc

SEQ ID NO: 243859 - DNA, 25 bp, Homo sapien
caaagcaagcaggtgacttccagga

SEQ ID NO: 243860 - DNA, 25 bp, Homo sapien
gatgcagttgctggaagtgccccac

SEQ ID NO: 243861 - DNA, 25 bp, Homo sapien
cctacctgacacttacttttgcttg

SEQ ID NO: 243862 - DNA, 25 bp, Homo sapien
ctgtgacggaagacagaactgttct

SEQ ID NO: 243863 - DNA, 25 bp, Homo sapien
ggccttcaatgatgtgtctcccctt

SEQ ID NO: 243864 - DNA, 25 bp, Homo sapien
tacgaaacgtcattgtggaatcatt

SEQ ID NO: 243865 - DNA, 25 bp, Homo sapien
tagtggagcgccaaacatgtgtgtt

SEQ ID NO: 243866 - DNA, 25 bp, Homo sapien
tgctgtaacgtggtcacagggtttc

SEQ ID NO: 243867 - DNA, 25 bp, Homo sapien
tgtttgattactctggaggccaggg

SEQ ID NO: 243868 - DNA, 25 bp, Homo sapien
ctgcccctgtgctgtaacgtggtca

SEQ ID NO: 243869 - DNA, 25 bp, Homo sapien
catcaggccatggtccaaatgcagg

SEQ ID NO: 243870 - DNA, 25 bp, Homo sapien
tccatcaggccatggtccaaatgca

SEQ ID NO: 243871 - DNA, 25 bp, Homo sapien
cttccatcaggccatggtccaaatg

SEQ ID NO: 243872 - DNA, 25 bp, Homo sapien
ccatggtccaaatgcagggggagct

SEQ ID NO: 243873 - DNA, 25 bp, Homo sapien
gcgcccgtgcttccagagacagact

SEQ ID NO: 243874 - DNA, 25 bp, Homo sapien
ttgtcttcagagacagcgcccgtgc

SEQ ID NO: 243875 - DNA, 25 bp, Homo sapien
gaggtcgttccaccgggtctgcttg

SEQ ID NO: 243876 - DNA, 25 bp, Homo sapien
cttgtgttacgatcaatttgtcttc

SEQ ID NO: 243877 - DNA, 25 bp, Homo sapien
gaagctgtggacttaaaccctcatc

SEQ ID NO: 243878 - DNA, 25 bp, Homo sapien
taagcacaagcatgcgatggtcaca

SEQ ID NO: 243879 - DNA, 25 bp, Homo sapien
gatgaggccagtaagcaagtggacc

SEQ ID NO: 243880 - DNA, 25 bp, Homo sapien
tccagtcggtggcaataatagaagc

SEQ ID NO: 243881 - DNA, 25 bp, Homo sapien
cattcacaagcgtggagatcaggac

SEQ ID NO: 243882 - DNA, 25 bp, Homo sapien
tcaaagcggcagcagggttacttcc

SEQ ID NO: 243883 - DNA, 25 bp, Homo sapien
gcaacctttggtttagagacgtaca

SEQ ID NO: 243884 - DNA, 25 bp, Homo sapien
taacaaagtaccaaagcacggtggc

SEQ ID NO: 243885 - DNA, 25 bp, Homo sapien
tacaaattctagtctcacagcagag

SEQ ID NO: 243886 - DNA, 25 bp, Homo sapien
taaggaggctcaaggtgtgacagac

SEQ ID NO: 243887 - DNA, 25 bp, Homo sapien
catgttctgttagaagcaaggctca

SEQ ID NO: 243888 - DNA, 25 bp, Homo sapien
taagagtggccattgtaagcaggac

SEQ ID NO: 243889 - DNA, 25 bp, Homo sapien
gactctttcaccaaggctggagtgc

SEQ ID NO: 243890 - DNA, 25 bp, Homo sapien
agagtctgactctttcaccaaggct

SEQ ID NO: 243891 - DNA, 25 bp, Homo sapien
actctttcaccaaggctggagtgca

SEQ ID NO: 243892 - DNA, 25 bp, Homo sapien
ctctttcaccaaggctggagtgcag

SEQ ID NO: 243893 - DNA, 25 bp, Homo sapien
caaaggggttggctataaaatatgg

SEQ ID NO: 243894 - DNA, 25 bp, Homo sapien
tatggagaccaaaataactgctgag

SEQ ID NO: 243895 - DNA, 25 bp, Homo sapien
cttcaagcccagattaagggttttg

SEQ ID NO: 243896 - DNA, 25 bp, Homo sapien
cagattaagggttttgcaaaaatca

SEQ ID NO: 243897 - DNA, 25 bp, Homo sapien
gtgagttcctgagcccaaaggtgat

SEQ ID NO: 243898 - DNA, 25 bp, Homo sapien
ggctgtaaagctcggtactgtcctg

SEQ ID NO: 243899 - DNA, 25 bp, Homo sapien
gactgattgagttgaatgtgctgag

SEQ ID NO: 243900 - DNA, 25 bp, Homo sapien
cctggtcattgtgccttccgggaga

SEQ ID NO: 243901 - DNA, 25 bp, Homo sapien
gctgtgcggtatgagatgcatgtat

SEQ ID NO: 243902 - DNA, 25 bp, Homo sapien
tagaaatttgggctgtgcggtatga

SEQ ID NO: 243903 - DNA, 25 bp, Homo sapien
atgcagactaaaaggcattcagcca

SEQ ID NO: 243904 - DNA, 25 bp, Homo sapien
ctggacaagttgtagaaatttgggc

SEQ ID NO: 243905 - DNA, 25 bp, Homo sapien
ttcagtagtgagcaaatcttgaggg

SEQ ID NO: 243906 - DNA, 25 bp, Homo sapien
tgcatgaagttagtggacaaaaaat

SEQ ID NO: 243907 - DNA, 25 bp, Homo sapien
cttcttggttggacagaaacatgtt

SEQ ID NO: 243908 - DNA, 25 bp, Homo sapien
tgagggaatccattgacctgaacac

SEQ ID NO: 243909 - DNA, 25 bp, Homo sapien
tgttgttcccgaaagcaccggaata

SEQ ID NO: 243910 - DNA, 25 bp, Homo sapien
caaacgttgcttggaagagcgaagg

SEQ ID NO: 243911 - DNA, 25 bp, Homo sapien
tgtggtcacacattcttggaagaag

SEQ ID NO: 243912 - DNA, 25 bp, Homo sapien
cactgagagtggttgtcatgaagga

SEQ ID NO: 243913 - DNA, 25 bp, Homo sapien
cgccctgtgcaagctcggtgcagtg

SEQ ID NO: 243914 - DNA, 25 bp, Homo sapien
ctcgccctgtgcaagctcggtgcag

SEQ ID NO: 243915 - DNA, 25 bp, Homo sapien
gagccggggattgggacgaggcaga

SEQ ID NO: 243916 - DNA, 25 bp, Homo sapien
ctgcatttggtaagagccggggatt

SEQ ID NO: 243917 - DNA, 25 bp, Homo sapien
tcagctgaggactaaacgcttggct

SEQ ID NO: 243918 - DNA, 25 bp, Homo sapien
aacgcttggctcaagttcaacacgg

SEQ ID NO: 243919 - DNA, 25 bp, Homo sapien
gcagcagttcagctgaggactaaac

SEQ ID NO: 243920 - DNA, 25 bp, Homo sapien
ccacaatgccgtgcgcaggctggca

SEQ ID NO: 243921 - DNA, 25 bp, Homo sapien
tcggctgccttgctatcttcctggg

SEQ ID NO: 243922 - DNA, 25 bp, Homo sapien
cttcctgggcttcgagaatatcacc

SEQ ID NO: 243923 - DNA, 25 bp, Homo sapien
tggaaaacacaggtctcggctgcct

SEQ ID NO: 243924 - DNA, 25 bp, Homo sapien
tcgagaatatcaccagaagagggca

SEQ ID NO: 243925 - DNA, 25 bp, Homo sapien
tcttggcgccggctcagccctgtgc

SEQ ID NO: 243926 - DNA, 25 bp, Homo sapien
gctcagccctgtgcagcccggagct

SEQ ID NO: 243927 - DNA, 25 bp, Homo sapien
ttggcgccggctcagccctgtgcag

SEQ ID NO: 243928 - DNA, 25 bp, Homo sapien
agccctgtgcagcccggagctggca

SEQ ID NO: 243929 - DNA, 25 bp, Homo sapien
ggggaatgagttttagctgacaaat

SEQ ID NO: 243930 - DNA, 25 bp, Homo sapien
aaggaaattctgcacggtagtattg

SEQ ID NO: 243931 - DNA, 25 bp, Homo sapien
aggggaatgagttttagctgacaaa

SEQ ID NO: 243932 - DNA, 25 bp, Homo sapien
ttctgcacggtagtattggggaaga

SEQ ID NO: 243933 - DNA, 25 bp, Homo sapien
tatagcagccggaaactttgctgca

SEQ ID NO: 243934 - DNA, 25 bp, Homo sapien
ccaagaaactcgctgtcatttccag

SEQ ID NO: 243935 - DNA, 25 bp, Homo sapien
tttgccaagaaactcgctgtcattt

SEQ ID NO: 243936 - DNA, 25 bp, Homo sapien
cactggtgctatagcagccggaaac

SEQ ID NO: 243937 - DNA, 25 bp, Homo sapien
gattggcagacgtctctgatccaca

SEQ ID NO: 243938 - DNA, 25 bp, Homo sapien
caaagttcttttaactgacgcagca

SEQ ID NO: 243939 - DNA, 25 bp, Homo sapien
gagctcgagtagaaaaacaacgggc

SEQ ID NO: 243940 - DNA, 25 bp, Homo sapien
cagagccccaaggatctgattggca

SEQ ID NO: 243941 - DNA, 25 bp, Homo sapien
caaagaatccaactgtgacccatga

SEQ ID NO: 243942 - DNA, 25 bp, Homo sapien
tcatatctgttttgctgccatctca

SEQ ID NO: 243943 - DNA, 25 bp, Homo sapien
gctgccatctcaagttgctgagcat

SEQ ID NO: 243944 - DNA, 25 bp, Homo sapien
ttgcccgaacacaaagaatccaact

SEQ ID NO: 243945 - DNA, 25 bp, Homo sapien
tctgtccagtgcctcggaataattc

SEQ ID NO: 243946 - DNA, 25 bp, Homo sapien
atctgtccagtgcctcggaataatt

SEQ ID NO: 243947 - DNA, 25 bp, Homo sapien
cataccctatggtaagtctcaatac

SEQ ID NO: 243948 - DNA, 25 bp, Homo sapien
cactaagtggagtggtcacataccc

SEQ ID NO: 243949 - DNA, 25 bp, Homo sapien
gaaaagccaacactacactaagtgg

SEQ ID NO: 243950 - DNA, 25 bp, Homo sapien
ctgaggaaaagccaacactacacta

SEQ ID NO: 243951 - DNA, 25 bp, Homo sapien
gtcccaaggccagcataagaggtgc

SEQ ID NO: 243952 - DNA, 25 bp, Homo sapien
ccaaggccagcataagaggtgctgt

SEQ ID NO: 243953 - DNA, 25 bp, Homo sapien
tactttggtggtcccaaggccagca

SEQ ID NO: 243954 - DNA, 25 bp, Homo sapien
cagcataagaggtgctgtgagatca

SEQ ID NO: 243955 - DNA, 25 bp, Homo sapien
gagctatcccaaccatcgactgaga

SEQ ID NO: 243956 - DNA, 25 bp, Homo sapien
cataaacccgaataaggcatggctt

SEQ ID NO: 243957 - DNA, 25 bp, Homo sapien
caaagagagcttgatagagctatcc

SEQ ID NO: 243958 - DNA, 25 bp, Homo sapien
gaaaaggtttttggaagcatgcatc

SEQ ID NO: 243959 - DNA, 25 bp, Homo sapien
tcctctttcccactaagaggggaca

SEQ ID NO: 243960 - DNA, 25 bp, Homo sapien
cctctttcccactaagaggggacat

SEQ ID NO: 243961 - DNA, 25 bp, Homo sapien
tgtgtttcctctttcccactaagag

SEQ ID NO: 243962 - DNA, 25 bp, Homo sapien
tgctgtgtttcctctttcccactaa

SEQ ID NO: 243963 - DNA, 25 bp, Homo sapien
ttttggagaaatccagtttgataaa

SEQ ID NO: 243964 - DNA, 25 bp, Homo sapien
ggagaaatccagtttgataaaatcg

SEQ ID NO: 243965 - DNA, 25 bp, Homo sapien
ttggagaaatccagtttgataaaat

SEQ ID NO: 243966 - DNA, 25 bp, Homo sapien
gaaatccagtttgataaaatcgaag

SEQ ID NO: 243967 - DNA, 25 bp, Homo sapien
ctcactgctactaggctctgagtgg

SEQ ID NO: 243968 - DNA, 25 bp, Homo sapien
cactgctactaggctctgagtggac

SEQ ID NO: 243969 - DNA, 25 bp, Homo sapien
tctcactgctactaggctctgagtg

SEQ ID NO: 243970 - DNA, 25 bp, Homo sapien
atctcactgctactaggctctgagt

SEQ ID NO: 243971 - DNA, 25 bp, Homo sapien
ggcataggtggagtctccggtgcgg

SEQ ID NO: 243972 - DNA, 25 bp, Homo sapien
cataggtggagtctccggtgcggtg

SEQ ID NO: 243973 - DNA, 25 bp, Homo sapien
taggtggagtctccggtgcggtgcc

SEQ ID NO: 243974 - DNA, 25 bp, Homo sapien
tggagtctccggtgcggtgcctgac

SEQ ID NO: 243975 - DNA, 25 bp, Homo sapien
tcaacatccaaatcgtgatatctgc

SEQ ID NO: 243976 - DNA, 25 bp, Homo sapien
tcatagttcatcaacatccaaatcg

SEQ ID NO: 243977 - DNA, 25 bp, Homo sapien
aatcgtgatatctgctggcccctac

SEQ ID NO: 243978 - DNA, 25 bp, Homo sapien
catccaaatcgtgatatctgctggc

SEQ ID NO: 243979 - DNA, 25 bp, Homo sapien
tacagtgcttgttggttgttctctt

SEQ ID NO: 243980 - DNA, 25 bp, Homo sapien
ctccttacagtgcttgttggttgtt

SEQ ID NO: 243981 - DNA, 25 bp, Homo sapien
tgcttgttggttgttctcttttcag

SEQ ID NO: 243982 - DNA, 25 bp, Homo sapien
ctgttgatgcaagaaccttgtctcc

SEQ ID NO: 243983 - DNA, 25 bp, Homo sapien
cattttcgtggattatgggctccgc

SEQ ID NO: 243984 - DNA, 25 bp, Homo sapien
tcaatgccaccagaatgtatagggc

SEQ ID NO: 243985 - DNA, 25 bp, Homo sapien
ggatggagatggaacgcacaattca

SEQ ID NO: 243986 - DNA, 25 bp, Homo sapien
tactatccaatatatgcagctctgc

SEQ ID NO: 243987 - DNA, 25 bp, Homo sapien
gctcagtgtggaattcgtagggcaa

SEQ ID NO: 243988 - DNA, 25 bp, Homo sapien
tgattttgacggaaggaacaaaatc

SEQ ID NO: 243989 - DNA, 25 bp, Homo sapien
tgcacaatatggatcttctttaacg

SEQ ID NO: 243990 - DNA, 25 bp, Homo sapien
ggaacaaaatccagcacgccttgca

SEQ ID NO: 243991 - DNA, 25 bp, Homo sapien
aagaagatctgaggagcccagatct

SEQ ID NO: 243992 - DNA, 25 bp, Homo sapien
cagaaggttctatgttggaagaaga

SEQ ID NO: 243993 - DNA, 25 bp, Homo sapien
tcacagaaggttctatgttggaaga

SEQ ID NO: 243994 - DNA, 25 bp, Homo sapien
gaagaagatctgaggagcccagatc

SEQ ID NO: 243995 - DNA, 25 bp, Homo sapien
tttgaactcggccttgaaaatccag

SEQ ID NO: 243996 - DNA, 25 bp, Homo sapien
agaaggtagcttccgcagacgtctg

SEQ ID NO: 243997 - DNA, 25 bp, Homo sapien
caggttaggcatttcaggtgggtac

SEQ ID NO: 243998 - DNA, 25 bp, Homo sapien
gtacaagaagagctgtccacaggtt

SEQ ID NO: 243999 - DNA, 25 bp, Homo sapien
tagcattcgccaaatttatacacgc

SEQ ID NO: 244000 - DNA, 25 bp, Homo sapien
aagtaaattacagtctgactcccaa

SEQ ID NO: 244001 - DNA, 25 bp, Homo sapien
tgagtttagagtcaacgggtctctt

SEQ ID NO: 244002 - DNA, 25 bp, Homo sapien
gactcccaagtaggcattttatgag

SEQ ID NO: 244003 - DNA, 25 bp, Homo sapien
cagggatggtgagtgggttagctct

SEQ ID NO: 244004 - DNA, 25 bp, Homo sapien
gggcttgtccgcatgtgtaaaccaa

SEQ ID NO: 244005 - DNA, 25 bp, Homo sapien
tgggctactgggcttgtccgcatgt

SEQ ID NO: 244006 - DNA, 25 bp, Homo sapien
catgtgtaaaccaatttcccaggag

SEQ ID NO: 244007 - DNA, 25 bp, Homo sapien
tccccaggaccaaatagaaagactg

SEQ ID NO: 244008 - DNA, 25 bp, Homo sapien
aatgagggagaacccgatgaatgct

SEQ ID NO: 244009 - DNA, 25 bp, Homo sapien
tggaaatgagggagaacccgatgaa

SEQ ID NO: 244010 - DNA, 25 bp, Homo sapien
gaaatgagggagaacccgatgaatg

SEQ ID NO: 244011 - DNA, 25 bp, Homo sapien
caaaatctgagtaatgtagaccatt

SEQ ID NO: 244012 - DNA, 25 bp, Homo sapien
tctgagtaatgtagaccatttctac

SEQ ID NO: 244013 - DNA, 25 bp, Homo sapien
gagtaatgtagaccatttctacata

SEQ ID NO: 244014 - DNA, 25 bp, Homo sapien
aaatctgagtaatgtagaccatttc

SEQ ID NO: 244015 - DNA, 25 bp, Homo sapien
gccctagtaaacagtttgcagctct

SEQ ID NO: 244016 - DNA, 25 bp, Homo sapien
ctcattcgtgccctgttttggaaag

SEQ ID NO: 244017 - DNA, 25 bp, Homo sapien
tgcatttggccgtgacttagcccta

SEQ ID NO: 244018 - DNA, 25 bp, Homo sapien
tttccactcgtgtaggggactggga

SEQ ID NO: 244019 - DNA, 25 bp, Homo sapien
tgtagagtttgaccagaatcattct

SEQ ID NO: 244020 - DNA, 25 bp, Homo sapien
tgtttctcaatgtagagtttgacca

SEQ ID NO: 244021 - DNA, 25 bp, Homo sapien
ctcaatgtagagtttgaccagaatc

SEQ ID NO: 244022 - DNA, 25 bp, Homo sapien
taaatttctgcccctgatctgtcac

SEQ ID NO: 244023 - DNA, 25 bp, Homo sapien
cacttgaagacccaaatgctatcag

SEQ ID NO: 244024 - DNA, 25 bp, Homo sapien
cttgccacttgaagacccaaatgct

SEQ ID NO: 244025 - DNA, 25 bp, Homo sapien
tgctatcagatatggacatttctcc

SEQ ID NO: 244026 - DNA, 25 bp, Homo sapien
gacccaaatgctatcagatatggac

SEQ ID NO: 244027 - DNA, 25 bp, Homo sapien
gtatagccaagacagtcccatgcaa

SEQ ID NO: 244028 - DNA, 25 bp, Homo sapien
ttcagtgatattcccatcaagctgc

SEQ ID NO: 244029 - DNA, 25 bp, Homo sapien
cagtgatattcccatcaagctgcca

SEQ ID NO: 244030 - DNA, 25 bp, Homo sapien
tgtatagccaagacagtcccatgca

SEQ ID NO: 244031 - DNA, 25 bp, Homo sapien
cacaatggccgtagttgaatttggg

SEQ ID NO: 244032 - DNA, 25 bp, Homo sapien
tggaaaggggatcttgcagggatct

SEQ ID NO: 244033 - DNA, 25 bp, Homo sapien
ttgcagggatctgggcagcatgtga

SEQ ID NO: 244034 - DNA, 25 bp, Homo sapien
aagacctgtgagctgatccacaatg

SEQ ID NO: 244035 - DNA, 25 bp, Homo sapien
ccttatcaaggaccaccggcaaatg

SEQ ID NO: 244036 - DNA, 25 bp, Homo sapien
tcattctctgtaagacgaagaccat

SEQ ID NO: 244037 - DNA, 25 bp, Homo sapien
ccttgaactggactggactgagccc

SEQ ID NO: 244038 - DNA, 25 bp, Homo sapien
tgggtcctagcccaaaatgagccct

SEQ ID NO: 244039 - DNA, 25 bp, Homo sapien
aagaatctttgctttgaaatccagt

SEQ ID NO: 244040 - DNA, 25 bp, Homo sapien
tttaatagcaagaatctttgctttg

SEQ ID NO: 244041 - DNA, 25 bp, Homo sapien
gaatctttgctttgaaatccagtga

SEQ ID NO: 244042 - DNA, 25 bp, Homo sapien
tagcaagaatctttgctttgaaatc

SEQ ID NO: 244043 - DNA, 25 bp, Homo sapien
caatgttgtccaacttagctactgc

SEQ ID NO: 244044 - DNA, 25 bp, Homo sapien
gtcctctggcattgttgcctgccca

SEQ ID NO: 244045 - DNA, 25 bp, Homo sapien
cttctagtctttggcgtttgctttc

SEQ ID NO: 244046 - DNA, 25 bp, Homo sapien
tgtccaacttagctactgcctcttc

SEQ ID NO: 244047 - DNA, 25 bp, Homo sapien
gaagtcacaacatccgtttcttcct

SEQ ID NO: 244048 - DNA, 25 bp, Homo sapien
atgactgtatcaatgactgaagaag

SEQ ID NO: 244049 - DNA, 25 bp, Homo sapien
atgttaagaatgactgtatcaatga

SEQ ID NO: 244050 - DNA, 25 bp, Homo sapien
aagtcacaacatccgtttcttcctc

SEQ ID NO: 244051 - DNA, 25 bp, Homo sapien
actttctttgacctgggccactgta

SEQ ID NO: 244052 - DNA, 25 bp, Homo sapien
cctagtgaaggtttgcaatgactga

SEQ ID NO: 244053 - DNA, 25 bp, Homo sapien
tctgatatgcaaagacctagtgaag

SEQ ID NO: 244054 - DNA, 25 bp, Homo sapien
cgtggatagaaatgattggcatctc

SEQ ID NO: 244055 - DNA, 25 bp, Homo sapien
gcccatgatcccatattctgaacta

SEQ ID NO: 244056 - DNA, 25 bp, Homo sapien
caagtcaaactcaggatcttgaata

SEQ ID NO: 244057 - DNA, 25 bp, Homo sapien
caggatcttgaatatataacttgcc

SEQ ID NO: 244058 - DNA, 25 bp, Homo sapien
tatccctggacatagcttcatcttc

SEQ ID NO: 244059 - DNA, 25 bp, Homo sapien
tactgcctttcacgatgctggcttc

SEQ ID NO: 244060 - DNA, 25 bp, Homo sapien
caccctctatgcaatattctggatg

SEQ ID NO: 244061 - DNA, 25 bp, Homo sapien
gcttcaccctctatgcaatattctg

SEQ ID NO: 244062 - DNA, 25 bp, Homo sapien
tttctgtactgcctttcacgatgct

SEQ ID NO: 244063 - DNA, 25 bp, Homo sapien
tgcccctctgggtaagtgataccaa

SEQ ID NO: 244064 - DNA, 25 bp, Homo sapien
acagtctgatatggccggctctgcc

SEQ ID NO: 244065 - DNA, 25 bp, Homo sapien
aaggccgctcctgccattgtctcca

SEQ ID NO: 244066 - DNA, 25 bp, Homo sapien
ggcccaagaaaccacacacgtgaga

SEQ ID NO: 244067 - DNA, 25 bp, Homo sapien
atgaaaaatggcaacctccgggcag

SEQ ID NO: 244068 - DNA, 25 bp, Homo sapien
aaaatggcaacctccgggcagccct

SEQ ID NO: 244069 - DNA, 25 bp, Homo sapien
gccatgaaaaatggcaacctccggg

SEQ ID NO: 244070 - DNA, 25 bp, Homo sapien
ctggccatgaaaaatggcaacctcc

SEQ ID NO: 244071 - DNA, 25 bp, Homo sapien
caatagtcgtcaatgccctttattt

SEQ ID NO: 244072 - DNA, 25 bp, Homo sapien
tcagattctagcaaagtagggagag

SEQ ID NO: 244073 - DNA, 25 bp, Homo sapien
cctttatttccatgtgttcagattc

SEQ ID NO: 244074 - DNA, 25 bp, Homo sapien
tgttcagattctagcaaagtaggga

SEQ ID NO: 244075 - DNA, 25 bp, Homo sapien
ctaaagggactcttgtcggaagagg

SEQ ID NO: 244076 - DNA, 25 bp, Homo sapien
ctgtgccccgtggaaatagctcaaa

SEQ ID NO: 244077 - DNA, 25 bp, Homo sapien
tctaattctggagagctaaagggac

SEQ ID NO: 244078 - DNA, 25 bp, Homo sapien
ttagactgctgctgacaacaaggga

SEQ ID NO: 244079 - DNA, 25 bp, Homo sapien
ttctcttctaacgtccctgctgtga

SEQ ID NO: 244080 - DNA, 25 bp, Homo sapien
ggttgtcaacattttgcgcaaagtc

SEQ ID NO: 244081 - DNA, 25 bp, Homo sapien
ccctgcctagctggttgcaagttgc

SEQ ID NO: 244082 - DNA, 25 bp, Homo sapien
tatggataatccttgcatgtggaag

SEQ ID NO: 244083 - DNA, 25 bp, Homo sapien
cagagcctgactctggctattagag

SEQ ID NO: 244084 - DNA, 25 bp, Homo sapien
gagataaattcggtacctcaggaag

SEQ ID NO: 244085 - DNA, 25 bp, Homo sapien
taagagcaaatcgacaccaagggac

SEQ ID NO: 244086 - DNA, 25 bp, Homo sapien
gtattaagtggtaatgactttccag

SEQ ID NO: 244087 - DNA, 25 bp, Homo sapien
gggtatctttatgttggattggatg

SEQ ID NO: 244088 - DNA, 25 bp, Homo sapien
caggtttcaacttgatttgccatcc

SEQ ID NO: 244089 - DNA, 25 bp, Homo sapien
ttttctgcagggctgtaacaacagg

SEQ ID NO: 244090 - DNA, 25 bp, Homo sapien
gcttccgaggacaagaagggctgta

SEQ ID NO: 244091 - DNA, 25 bp, Homo sapien
gacattacctttcttcaaccaggga

SEQ ID NO: 244092 - DNA, 25 bp, Homo sapien
ttgttgaaacatggccgggaggaaa

SEQ ID NO: 244093 - DNA, 25 bp, Homo sapien
cattccatctggtgagcgtttgctc

SEQ ID NO: 244094 - DNA, 25 bp, Homo sapien
tcattacgattgcatcgccgcctgg

SEQ ID NO: 244095 - DNA, 25 bp, Homo sapien
gctgtgcaaaacaggaggcctgggc

SEQ ID NO: 244096 - DNA, 25 bp, Homo sapien
ccagggcagagccacgctggcttta

SEQ ID NO: 244097 - DNA, 25 bp, Homo sapien
tggctttagaggctgtgcaaaacag

SEQ ID NO: 244098 - DNA, 25 bp, Homo sapien
ctgtggccgggagactcccagggca

SEQ ID NO: 244099 - DNA, 25 bp, Homo sapien
actctggaaggatgaagtgcggaca

SEQ ID NO: 244100 - DNA, 25 bp, Homo sapien
ggtgctacagaggatttccaggcct

SEQ ID NO: 244101 - DNA, 25 bp, Homo sapien
cagggatgttgccactcacaaaaga

SEQ ID NO: 244102 - DNA, 25 bp, Homo sapien
gaagtatctctctgtgcgcaggtga

SEQ ID NO: 244103 - DNA, 25 bp, Homo sapien
gatgatgagcaacaggagaactgcc

SEQ ID NO: 244104 - DNA, 25 bp, Homo sapien
ggcaccatgtatgtgtagtgatgaa

SEQ ID NO: 244105 - DNA, 25 bp, Homo sapien
gaggaagtctccataaagcgggcag

SEQ ID NO: 244106 - DNA, 25 bp, Homo sapien
tcgacatgggtagaatatggcacca

SEQ ID NO: 244107 - DNA, 25 bp, Homo sapien
gatgtaaattaatgttttgcctttg

SEQ ID NO: 244108 - DNA, 25 bp, Homo sapien
catctcttgcctgcgatatgaggaa

SEQ ID NO: 244109 - DNA, 25 bp, Homo sapien
ttgcctttgtttgccgcggtaatca

SEQ ID NO: 244110 - DNA, 25 bp, Homo sapien
tctgggaacatcacctttgcaaatt

SEQ ID NO: 244111 - DNA, 25 bp, Homo sapien
gcacacatttcaacgggctgaagaa

SEQ ID NO: 244112 - DNA, 25 bp, Homo sapien
tgtatcacaggacattagccgaccg

SEQ ID NO: 244113 - DNA, 25 bp, Homo sapien
aacatgccggtttgcctgtatcaca

SEQ ID NO: 244114 - DNA, 25 bp, Homo sapien
cgagttgacacatgcacatgagtgg

SEQ ID NO: 244115 - DNA, 25 bp, Homo sapien
aggagaaatgcagctcagagcccca

SEQ ID NO: 244116 - DNA, 25 bp, Homo sapien
ctgcatcataagacaccctctgctg

SEQ ID NO: 244117 - DNA, 25 bp, Homo sapien
actgcatcataagacaccctctgct

SEQ ID NO: 244118 - DNA, 25 bp, Homo sapien
ggagaaatgcagctcagagccccat

SEQ ID NO: 244119 - DNA, 25 bp, Homo sapien
ggaaccaccaactcctgattggcat

SEQ ID NO: 244120 - DNA, 25 bp, Homo sapien
accaccaactcctgattggcattct

SEQ ID NO: 244121 - DNA, 25 bp, Homo sapien
atggaaccaccaactcctgattggc

SEQ ID NO: 244122 - DNA, 25 bp, Homo sapien
cagtcagggtggccggttgaatggc

SEQ ID NO: 244123 - DNA, 25 bp, Homo sapien
acttcagccaagaattgaaagaaaa

SEQ ID NO: 244124 - DNA, 25 bp, Homo sapien
aacttcagccaagaattgaaagaaa

SEQ ID NO: 244125 - DNA, 25 bp, Homo sapien
tgagaactagcaggaacctgggctt

SEQ ID NO: 244126 - DNA, 25 bp, Homo sapien
gcagccatcaactgcctgccagagg

SEQ ID NO: 244127 - DNA, 25 bp, Homo sapien
gaaagtccaatcgtcagcttcactg

SEQ ID NO: 244128 - DNA, 25 bp, Homo sapien
gggtctcccattgtgcacggcgtgc

SEQ ID NO: 244129 - DNA, 25 bp, Homo sapien
catcaaggtggactttggtgctccc

SEQ ID NO: 244130 - DNA, 25 bp, Homo sapien
tgctttgccatcaaggtggactttg

SEQ ID NO: 244131 - DNA, 25 bp, Homo sapien
tgccatcaaggtggactttggtgct

SEQ ID NO: 244132 - DNA, 25 bp, Homo sapien
ggtggactttggtgctcccctttca

SEQ ID NO: 244133 - DNA, 25 bp, Homo sapien
ggattggatactggcttttctttga

SEQ ID NO: 244134 - DNA, 25 bp, Homo sapien
cactccaaggtattgtgagaagtag

SEQ ID NO: 244135 - DNA, 25 bp, Homo sapien
tccacagccactccaaggtattgtg

SEQ ID NO: 244136 - DNA, 25 bp, Homo sapien
agaagtaggattggatactggcttt

SEQ ID NO: 244137 - DNA, 25 bp, Homo sapien
tcgggagcataaacagaagccagga

SEQ ID NO: 244138 - DNA, 25 bp, Homo sapien
cttccactctcgtttgtcgggagca

SEQ ID NO: 244139 - DNA, 25 bp, Homo sapien
aagtcacacagccatcttgagccac

SEQ ID NO: 244140 - DNA, 25 bp, Homo sapien
acacagccatcttgagccacactgg

SEQ ID NO: 244141 - DNA, 25 bp, Homo sapien
tcatcctgcaacaggtccagtcaaa

SEQ ID NO: 244142 - DNA, 25 bp, Homo sapien
gtgacattcattgaggttcctaaga

SEQ ID NO: 244143 - DNA, 25 bp, Homo sapien
gttcctaagagatgacccctggaca

SEQ ID NO: 244144 - DNA, 25 bp, Homo sapien
tgcagctgacccgatcgactggttg

SEQ ID NO: 244145 - DNA, 25 bp, Homo sapien
ctggttgactggtcaagtgacattc

SEQ ID NO: 244146 - DNA, 25 bp, Homo sapien
gcttaaattgcttgtgactcttccc

SEQ ID NO: 244147 - DNA, 25 bp, Homo sapien
attgcttgtgactcttcccaaatta

SEQ ID NO: 244148 - DNA, 25 bp, Homo sapien
ttagcttaaattgcttgtgactctt

SEQ ID NO: 244149 - DNA, 25 bp, Homo sapien
taaattgcttgtgactcttcccaaa

SEQ ID NO: 244150 - DNA, 25 bp, Homo sapien
tcctggtgatgagtaaaggctctga

SEQ ID NO: 244151 - DNA, 25 bp, Homo sapien
tatggtgtcattaaatatctgcgga

SEQ ID NO: 244152 - DNA, 25 bp, Homo sapien
atttttaataatgccgccatggcct

SEQ ID NO: 244153 - DNA, 25 bp, Homo sapien
tgctaggagtcaagcaagggacaat

SEQ ID NO: 244154 - DNA, 25 bp, Homo sapien
agcttgtcttaaccacagagccacc

SEQ ID NO: 244155 - DNA, 25 bp, Homo sapien
tgcatgttaattaaaccccaccact

SEQ ID NO: 244156 - DNA, 25 bp, Homo sapien
aataatggtgcatgttaattaaacc

SEQ ID NO: 244157 - DNA, 25 bp, Homo sapien
accccagcttgtcttaaccacagag

SEQ ID NO: 244158 - DNA, 25 bp, Homo sapien
agcttcccccgactgttgccgattt

SEQ ID NO: 244159 - DNA, 25 bp, Homo sapien
cccccgactgttgccgatttcccat

SEQ ID NO: 244160 - DNA, 25 bp, Homo sapien
gcttcccccgactgttgccgatttc

SEQ ID NO: 244161 - DNA, 25 bp, Homo sapien
tcccccgactgttgccgatttccca

SEQ ID NO: 244162 - DNA, 25 bp, Homo sapien
agaaagcaggtgttgtggaagtgaa

SEQ ID NO: 244163 - DNA, 25 bp, Homo sapien
ggtgttgtggaagtgaagcgagcat

SEQ ID NO: 244164 - DNA, 25 bp, Homo sapien
caggtgttgtggaagtgaagcgagc

SEQ ID NO: 244165 - DNA, 25 bp, Homo sapien
aaagcaggtgttgtggaagtgaagc

SEQ ID NO: 244166 - DNA, 25 bp, Homo sapien
ttctcttcactcattgaaacccgct

SEQ ID NO: 244167 - DNA, 25 bp, Homo sapien
tcttcactcattgaaacccgcttga

SEQ ID NO: 244168 - DNA, 25 bp, Homo sapien
cactcattgaaacccgcttgaaagg

SEQ ID NO: 244169 - DNA, 25 bp, Homo sapien
attgaaacccgcttgaaaggctggg

SEQ ID NO: 244170 - DNA, 25 bp, Homo sapien
gaaaaaggtacgagctcttccttga

SEQ ID NO: 244171 - DNA, 25 bp, Homo sapien
taggaataccaagttcatggccatc

SEQ ID NO: 244172 - DNA, 25 bp, Homo sapien
gctattaacaggcattgagttagga

SEQ ID NO: 244173 - DNA, 25 bp, Homo sapien
caagttcatggccatcaaagatgaa

SEQ ID NO: 244174 - DNA, 25 bp, Homo sapien
ttgtgttccaccacattgagcccac

SEQ ID NO: 244175 - DNA, 25 bp, Homo sapien
catcatatccgcattcatcttgtgt

SEQ ID NO: 244176 - DNA, 25 bp, Homo sapien
gagtataatcgtttcatgtcttcaa

SEQ ID NO: 244177 - DNA, 25 bp, Homo sapien
caccaataccccttcgatgagtata

SEQ ID NO: 244178 - DNA, 25 bp, Homo sapien
gaatcctactgtcggcttgtgtgca

SEQ ID NO: 244179 - DNA, 25 bp, Homo sapien
ctctgagtctggaggtgagaatcct

SEQ ID NO: 244180 - DNA, 25 bp, Homo sapien
tcctttgaactggtgcccggagggc

SEQ ID NO: 244181 - DNA, 25 bp, Homo sapien
aaagctaacaatttccaggcctgga

SEQ ID NO: 244182 - DNA, 25 bp, Homo sapien
tcctgtacgatgatgtctctctgca

SEQ ID NO: 244183 - DNA, 25 bp, Homo sapien
cagccagtgatgatgcttagaccat

SEQ ID NO: 244184 - DNA, 25 bp, Homo sapien
tgcaccctcagctggttaactagct

SEQ ID NO: 244185 - DNA, 25 bp, Homo sapien
gatgtcttctctacatattgctctg

SEQ ID NO: 244186 - DNA, 25 bp, Homo sapien
caatctggctctaattgtcagtgtg

SEQ ID NO: 244187 - DNA, 25 bp, Homo sapien
atttgctcagcacggtacaatctgg

SEQ ID NO: 244188 - DNA, 25 bp, Homo sapien
tcagcacggtacaatctggctctaa

SEQ ID NO: 244189 - DNA, 25 bp, Homo sapien
tatgtatgtaatttgctcagcacgg

SEQ ID NO: 244190 - DNA, 25 bp, Homo sapien
tgcattgctgcgctgaccatgtaga

SEQ ID NO: 244191 - DNA, 25 bp, Homo sapien
ttgctgcgctgaccatgtagatagt

SEQ ID NO: 244192 - DNA, 25 bp, Homo sapien
ccttacttttgcattgctgcgctga

SEQ ID NO: 244193 - DNA, 25 bp, Homo sapien
tacttttgcattgctgcgctgacca

SEQ ID NO: 244194 - DNA, 25 bp, Homo sapien
tactggaaagggctcgtttgcttca

SEQ ID NO: 244195 - DNA, 25 bp, Homo sapien
ccatactggaaagggctcgtttgct

SEQ ID NO: 244196 - DNA, 25 bp, Homo sapien
gaaagggctcgtttgcttcagtgcc

SEQ ID NO: 244197 - DNA, 25 bp, Homo sapien
gcaccatactggaaagggctcgttt

SEQ ID NO: 244198 - DNA, 25 bp, Homo sapien
tgtggtcctctgaagtagatggtga

SEQ ID NO: 244199 - DNA, 25 bp, Homo sapien
taatctgtgctgtggtcctctgaag

SEQ ID NO: 244200 - DNA, 25 bp, Homo sapien
cagcctcccttaatctgtgctgtgg

SEQ ID NO: 244201 - DNA, 25 bp, Homo sapien
tgctgtggtcctctgaagtagatgg

SEQ ID NO: 244202 - DNA, 25 bp, Homo sapien
cactttgctcaatttccagtaaaca

SEQ ID NO: 244203 - DNA, 25 bp, Homo sapien
tactctggactgacggtgtcacttt

SEQ ID NO: 244204 - DNA, 25 bp, Homo sapien
tagagacattattggctggaactgc

SEQ ID NO: 244205 - DNA, 25 bp, Homo sapien
aactctgaaccggccctggtctctt

SEQ ID NO: 244206 - DNA, 25 bp, Homo sapien
cagtgccaccccacagtttcaaatt

SEQ ID NO: 244207 - DNA, 25 bp, Homo sapien
gcctccactctccacggcggctcct

SEQ ID NO: 244208 - DNA, 25 bp, Homo sapien
ttcagtgccaccccacagtttcaaa

SEQ ID NO: 244209 - DNA, 25 bp, Homo sapien
agtgagttgacctgcaaaggcccca

SEQ ID NO: 244210 - DNA, 25 bp, Homo sapien
gtagtctgggaggtgccttctctct

SEQ ID NO: 244211 - DNA, 25 bp, Homo sapien
ttctgtgtagtctgggaggtgcctt

SEQ ID NO: 244212 - DNA, 25 bp, Homo sapien
cagtgctaaacagctgacctctcag

SEQ ID NO: 244213 - DNA, 25 bp, Homo sapien
gctaaacagctgacctctcagaaac

SEQ ID NO: 244214 - DNA, 25 bp, Homo sapien
tcttgctccctcatggaacactctt

SEQ ID NO: 244215 - DNA, 25 bp, Homo sapien
cttcttgctccctcatggaacactc

SEQ ID NO: 244216 - DNA, 25 bp, Homo sapien
ttgctccctcatggaacactcttct

SEQ ID NO: 244217 - DNA, 25 bp, Homo sapien
tgctccctcatggaacactcttcta

SEQ ID NO: 244218 - DNA, 25 bp, Homo sapien
aaagttgctgaaatgctccagccta

SEQ ID NO: 244219 - DNA, 25 bp, Homo sapien
cctatggcagcatcaaagttgctga

SEQ ID NO: 244220 - DNA, 25 bp, Homo sapien
aatgctccagcctaagagccaggaa

SEQ ID NO: 244221 - DNA, 25 bp, Homo sapien
agtcctatggcagcatcaaagttgc

SEQ ID NO: 244222 - DNA, 25 bp, Homo sapien
aagaagcctgcttctgtacccgaat

SEQ ID NO: 244223 - DNA, 25 bp, Homo sapien
ttaagaagcctgcttctgtacccga

SEQ ID NO: 244224 - DNA, 25 bp, Homo sapien
taagaagcctgcttctgtacccgaa

SEQ ID NO: 244225 - DNA, 25 bp, Homo sapien
agaagcctgcttctgtacccgaatc

SEQ ID NO: 244226 - DNA, 25 bp, Homo sapien
tcagccttacccttatgattccatt

SEQ ID NO: 244227 - DNA, 25 bp, Homo sapien
tagaaaacaggctcagccttaccct

SEQ ID NO: 244228 - DNA, 25 bp, Homo sapien
ggctcagccttacccttatgattcc

SEQ ID NO: 244229 - DNA, 25 bp, Homo sapien
aacaggctcagccttacccttatga

SEQ ID NO: 244230 - DNA, 25 bp, Homo sapien
ccttcatgtttctgaatggtacttg

SEQ ID NO: 244231 - DNA, 25 bp, Homo sapien
tttctgaatggtacttggaggttgt

SEQ ID NO: 244232 - DNA, 25 bp, Homo sapien
gggtgccatacaaaatcaagttgta

SEQ ID NO: 244233 - DNA, 25 bp, Homo sapien
tcatgtttctgaatggtacttggag

SEQ ID NO: 244234 - DNA, 25 bp, Homo sapien
tggatgcttaataagcatagcacac

SEQ ID NO: 244235 - DNA, 25 bp, Homo sapien
tgtggatgcttaataagcatagcac

SEQ ID NO: 244236 - DNA, 25 bp, Homo sapien
ccctgttctcgggaggtcactatat

SEQ ID NO: 244237 - DNA, 25 bp, Homo sapien
gatgcttaataagcatagcacacta

SEQ ID NO: 244238 - DNA, 25 bp, Homo sapien
tgatgtttgcaacattgcctcgtac

SEQ ID NO: 244239 - DNA, 25 bp, Homo sapien
gatgtttgcaacattgcctcgtact

SEQ ID NO: 244240 - DNA, 25 bp, Homo sapien
gcaacattgcctcgtactctaaatc

SEQ ID NO: 244241 - DNA, 25 bp, Homo sapien
cagagattttggaataagaccttgc

SEQ ID NO: 244242 - DNA, 25 bp, Homo sapien
agccccaagatattggctccagaga

SEQ ID NO: 244243 - DNA, 25 bp, Homo sapien
ccagagattttggaataagaccttg

SEQ ID NO: 244244 - DNA, 25 bp, Homo sapien
gggatgagccccaagatattggctc

SEQ ID NO: 244245 - DNA, 25 bp, Homo sapien
aaattgcagtcgtcagttcctagtc

SEQ ID NO: 244246 - DNA, 25 bp, Homo sapien
cgtcagttcctagtctggctgcttt

SEQ ID NO: 244247 - DNA, 25 bp, Homo sapien
tgcagtcgtcagttcctagtctggc

SEQ ID NO: 244248 - DNA, 25 bp, Homo sapien
ttgtaaattgcagtcgtcagttcct

SEQ ID NO: 244249 - DNA, 25 bp, Homo sapien
cagagaaatcatcatgcggcgtctc

SEQ ID NO: 244250 - DNA, 25 bp, Homo sapien
tctggtctatgcatgcagctgttgc

SEQ ID NO: 244251 - DNA, 25 bp, Homo sapien
tctcatggccaatgctagacataga

SEQ ID NO: 244252 - DNA, 25 bp, Homo sapien
tcatcatgcggcgtctctggtctat

SEQ ID NO: 244253 - DNA, 25 bp, Homo sapien
taagtccacatggtctacactcgtt

SEQ ID NO: 244254 - DNA, 25 bp, Homo sapien
gtctacactcgtttatttgatgaag

SEQ ID NO: 244255 - DNA, 25 bp, Homo sapien
agaagtacatcttatcacaggatag

SEQ ID NO: 244256 - DNA, 25 bp, Homo sapien
tccagatccataagtccacatggtc

SEQ ID NO: 244257 - DNA, 25 bp, Homo sapien
gatcatgtagagagtcacagaatca

SEQ ID NO: 244258 - DNA, 25 bp, Homo sapien
aaatacttactagatttgtactcca

SEQ ID NO: 244259 - DNA, 25 bp, Homo sapien
gcagacaattcgatgttctgttatt

SEQ ID NO: 244260 - DNA, 25 bp, Homo sapien
gcttcctttgcagtaatttactaaa

SEQ ID NO: 244261 - DNA, 25 bp, Homo sapien
ctccaacaaggaggggagatacttc

SEQ ID NO: 244262 - DNA, 25 bp, Homo sapien
tctccaacaaggaggggagatactt

SEQ ID NO: 244263 - DNA, 25 bp, Homo sapien
ctctccaacaaggaggggagatact

SEQ ID NO: 244264 - DNA, 25 bp, Homo sapien
agcaggcacgtaggcacttcctctc

SEQ ID NO: 244265 - DNA, 25 bp, Homo sapien
accagcaggcacgtaggcacttcct

SEQ ID NO: 244266 - DNA, 25 bp, Homo sapien
ccaccagcaggcacgtaggcacttc

SEQ ID NO: 244267 - DNA, 25 bp, Homo sapien
gcaggcacgtaggcacttcctctct

SEQ ID NO: 244268 - DNA, 25 bp, Homo sapien
gacttctgtgcttgcctattcttgg

SEQ ID NO: 244269 - DNA, 25 bp, Homo sapien
actgccaaagaatgttgctgtacaa

SEQ ID NO: 244270 - DNA, 25 bp, Homo sapien
gacagtcctgacgttctttgtggaa

SEQ ID NO: 244271 - DNA, 25 bp, Homo sapien
gtacaattagttctgttggcaggac

SEQ ID NO: 244272 - DNA, 25 bp, Homo sapien
ccgatctggtagcaagtggtagaag

SEQ ID NO: 244273 - DNA, 25 bp, Homo sapien
ccccgatctggtagcaagtggtaga

SEQ ID NO: 244274 - DNA, 25 bp, Homo sapien
gagcccccgatctggtagcaagtgg

SEQ ID NO: 244275 - DNA, 25 bp, Homo sapien
atctggtagcaagtggtagaagtca

SEQ ID NO: 244276 - DNA, 25 bp, Homo sapien
attttctgagtggttccaacctgtc

SEQ ID NO: 244277 - DNA, 25 bp, Homo sapien
gagcttggggatcggccaactcttg

SEQ ID NO: 244278 - DNA, 25 bp, Homo sapien
gagtggttccaacctgtccatttga

SEQ ID NO: 244279 - DNA, 25 bp, Homo sapien
caagctggaactaaagctgtgaaga

SEQ ID NO: 244280 - DNA, 25 bp, Homo sapien
ctgggccaatgggatatttccagaa

SEQ ID NO: 244281 - DNA, 25 bp, Homo sapien
caatgggatatttccagaataagga

SEQ ID NO: 244282 - DNA, 25 bp, Homo sapien
gccaatgggatatttccagaataag

SEQ ID NO: 244283 - DNA, 25 bp, Homo sapien
gggccaatgggatatttccagaata

SEQ ID NO: 244284 - DNA, 25 bp, Homo sapien
tatttcggtgactttacgaagtgtc

SEQ ID NO: 244285 - DNA, 25 bp, Homo sapien
gcacaaaatatttcggtgactttac

SEQ ID NO: 244286 - DNA, 25 bp, Homo sapien
gtgactttacgaagtgtctcttccc

SEQ ID NO: 244287 - DNA, 25 bp, Homo sapien
taatattgttcagttggggaatcac

SEQ ID NO: 244288 - DNA, 25 bp, Homo sapien
aacggaagaggattagcacgaggca

SEQ ID NO: 244289 - DNA, 25 bp, Homo sapien
tagcacgaggcagctgatactgcaa

SEQ ID NO: 244290 - DNA, 25 bp, Homo sapien
ctgaaacggaagaggattagcacga

SEQ ID NO: 244291 - DNA, 25 bp, Homo sapien
aagaggattagcacgaggcagctga

SEQ ID NO: 244292 - DNA, 25 bp, Homo sapien
gatcccagcaccaatgaatgcagga

SEQ ID NO: 244293 - DNA, 25 bp, Homo sapien
cactgctctcctcctgtaactccat

SEQ ID NO: 244294 - DNA, 25 bp, Homo sapien
ccaatgaatgcaggaaggcactgct

SEQ ID NO: 244295 - DNA, 25 bp, Homo sapien
aatgaatgcaggaaggcactgctct

SEQ ID NO: 244296 - DNA, 25 bp, Homo sapien
tttgtacaggtctcagactgcggta

SEQ ID NO: 244297 - DNA, 25 bp, Homo sapien
aagcagtgcacaaaccacatcagtg

SEQ ID NO: 244298 - DNA, 25 bp, Homo sapien
catcagtgtcctcggaatgtctcag

SEQ ID NO: 244299 - DNA, 25 bp, Homo sapien
tagagacagcatagactcagaatct

SEQ ID NO: 244300 - DNA, 25 bp, Homo sapien
tgtatgcagcaacgaacacaatcgt

SEQ ID NO: 244301 - DNA, 25 bp, Homo sapien
cagaatctgcttgcaagggtctgag

SEQ ID NO: 244302 - DNA, 25 bp, Homo sapien
caccggctgactggcgtgtatgcag

SEQ ID NO: 244303 - DNA, 25 bp, Homo sapien
ttagtaaagcgcaaacagaatctgc

SEQ ID NO: 244304 - DNA, 25 bp, Homo sapien
gaagtctgttcttgagatggccatg

SEQ ID NO: 244305 - DNA, 25 bp, Homo sapien
caggaccatggagtaacactgtagt

SEQ ID NO: 244306 - DNA, 25 bp, Homo sapien
tgaaggtgaccttccccgtctggga

SEQ ID NO: 244307 - DNA, 25 bp, Homo sapien
gatggccatggaggtgtaacttaaa

SEQ ID NO: 244308 - DNA, 25 bp, Homo sapien
ggccatgtagaccatgtataggtcc

SEQ ID NO: 244309 - DNA, 25 bp, Homo sapien
ctcccctgcaatgtaggccatgtag

SEQ ID NO: 244310 - DNA, 25 bp, Homo sapien
ccctgcaatgtaggccatgtagacc

SEQ ID NO: 244311 - DNA, 25 bp, Homo sapien
ccatgtataggtccaggttccacat

SEQ ID NO: 244312 - DNA, 25 bp, Homo sapien
ttgcaggaccaatagagaagctttg

SEQ ID NO: 244313 - DNA, 25 bp, Homo sapien
tcattggagtatggccaaaaggaga

SEQ ID NO: 244314 - DNA, 25 bp, Homo sapien
gctggaccagcaactagccatggag

SEQ ID NO: 244315 - DNA, 25 bp, Homo sapien
cacggaaaccacagttttgcaggac

SEQ ID NO: 244316 - DNA, 25 bp, Homo sapien
atttttctgacacttccctatcagg

SEQ ID NO: 244317 - DNA, 25 bp, Homo sapien
aacagtgacgtctatggcttttccc

SEQ ID NO: 244318 - DNA, 25 bp, Homo sapien
gaagcccgtgagttcctttagaatc

SEQ ID NO: 244319 - DNA, 25 bp, Homo sapien
cctatcaggttctatggcataatca

SEQ ID NO: 244320 - DNA, 25 bp, Homo sapien
taatttgccttaatggcatccacac

SEQ ID NO: 244321 - DNA, 25 bp, Homo sapien
gggacttggtaagtgacacttgtac

SEQ ID NO: 244322 - DNA, 25 bp, Homo sapien
tgggcatcgagctaaaaatatttga

SEQ ID NO: 244323 - DNA, 25 bp, Homo sapien
catatacctctaaggcaaatgcaga

SEQ ID NO: 244324 - DNA, 25 bp, Homo sapien
tggtatgtcatcaatggggcctgga

SEQ ID NO: 244325 - DNA, 25 bp, Homo sapien
gcctggacagccagattagtctctg

SEQ ID NO: 244326 - DNA, 25 bp, Homo sapien
gtgggacctgagctctttagttgct

SEQ ID NO: 244327 - DNA, 25 bp, Homo sapien
agattagtctctggcggtagtgtag

SEQ ID NO: 244328 - DNA, 25 bp, Homo sapien
tggggttgctggggtatccacactc

SEQ ID NO: 244329 - DNA, 25 bp, Homo sapien
ttgctggggtatccacactcagaag

SEQ ID NO: 244330 - DNA, 25 bp, Homo sapien
gggttgctggggtatccacactcag

SEQ ID NO: 244331 - DNA, 25 bp, Homo sapien
gttgctggggtatccacactcagaa

SEQ ID NO: 244332 - DNA, 25 bp, Homo sapien
gtcacctcgatgtattttgtgagag

SEQ ID NO: 244333 - DNA, 25 bp, Homo sapien
acctcgatgtattttgtgagagcag

SEQ ID NO: 244334 - DNA, 25 bp, Homo sapien
gatgtcacctcgatgtattttgtga

SEQ ID NO: 244335 - DNA, 25 bp, Homo sapien
acagatgtcacctcgatgtattttg

SEQ ID NO: 244336 - DNA, 25 bp, Homo sapien
cccagacagaaaggtacccaagatc

SEQ ID NO: 244337 - DNA, 25 bp, Homo sapien
tgcgattcaacagcggcccagccca

SEQ ID NO: 244338 - DNA, 25 bp, Homo sapien
tccccagacagaaaggtacccaaga

SEQ ID NO: 244339 - DNA, 25 bp, Homo sapien
gaaggagatactgtgtccccagaca

SEQ ID NO: 244340 - DNA, 25 bp, Homo sapien
tgacatccccgctggaattttacac

SEQ ID NO: 244341 - DNA, 25 bp, Homo sapien
agaaattgatgacatccccgctgga

SEQ ID NO: 244342 - DNA, 25 bp, Homo sapien
tcaccccagagccaacacaaagagg

SEQ ID NO: 244343 - DNA, 25 bp, Homo sapien
tggaattttacactgattcggccag

SEQ ID NO: 244344 - DNA, 25 bp, Homo sapien
gcttcgccaatgttctcaactagtg

SEQ ID NO: 244345 - DNA, 25 bp, Homo sapien
tgccttttccgtagacagcttcgcc

SEQ ID NO: 244346 - DNA, 25 bp, Homo sapien
gtcatgattatcactgccttttccg

SEQ ID NO: 244347 - DNA, 25 bp, Homo sapien
ttatttagcattaccctcgtcatga

SEQ ID NO: 244348 - DNA, 25 bp, Homo sapien
tggcagtttaccaagaacacctggg

SEQ ID NO: 244349 - DNA, 25 bp, Homo sapien
cgttggtctaaagtgtgaccttctt

SEQ ID NO: 244350 - DNA, 25 bp, Homo sapien
agaacacctgggctaacttgtccag

SEQ ID NO: 244351 - DNA, 25 bp, Homo sapien
gaacacttctcagtttgcaaacgtt

SEQ ID NO: 244352 - DNA, 25 bp, Homo sapien
tctgagtggcagtctttttgttgca

SEQ ID NO: 244353 - DNA, 25 bp, Homo sapien
ctctgagtggcagtctttttgttgc

SEQ ID NO: 244354 - DNA, 25 bp, Homo sapien
tttgttgcatttgttcttgctgtcc

SEQ ID NO: 244355 - DNA, 25 bp, Homo sapien
ttgcatttgttcttgctgtcctcca

SEQ ID NO: 244356 - DNA, 25 bp, Homo sapien
gttatgaaggcaataacacagtttc

SEQ ID NO: 244357 - DNA, 25 bp, Homo sapien
cagtttctcttaaaggtgaagctga

SEQ ID NO: 244358 - DNA, 25 bp, Homo sapien
ttgctgcttccagttatgaaggcaa

SEQ ID NO: 244359 - DNA, 25 bp, Homo sapien
tttctcttaaaggtgaagctgaggt

SEQ ID NO: 244360 - DNA, 25 bp, Homo sapien
ctgcttctgtagatgcttgcagatg

SEQ ID NO: 244361 - DNA, 25 bp, Homo sapien
cttgcagatgccctcagtctgtcta

SEQ ID NO: 244362 - DNA, 25 bp, Homo sapien
tgtaaacgtcgagtctgcttctgta

SEQ ID NO: 244363 - DNA, 25 bp, Homo sapien
tcatgtagtctgtaaacgtcgagtc

SEQ ID NO: 244364 - DNA, 25 bp, Homo sapien
agggagtggagagatgatacaatac

SEQ ID NO: 244365 - DNA, 25 bp, Homo sapien
gtggagagatgatacaatacatggc

SEQ ID NO: 244366 - DNA, 25 bp, Homo sapien
gagagatgatacaatacatggccat

SEQ ID NO: 244367 - DNA, 25 bp, Homo sapien
gggagtggagagatgatacaataca

SEQ ID NO: 244368 - DNA, 25 bp, Homo sapien
tgctttgctgctccttgatcgtggc

SEQ ID NO: 244369 - DNA, 25 bp, Homo sapien
cttgatcgtggctggactctctgct

SEQ ID NO: 244370 - DNA, 25 bp, Homo sapien
aagcattgtgtctgggtttcccctt

SEQ ID NO: 244371 - DNA, 25 bp, Homo sapien
gaaagcattgtgtctgggtttcccc

SEQ ID NO: 244372 - DNA, 25 bp, Homo sapien
tcagaaagcattgtgtctgggtttc

SEQ ID NO: 244373 - DNA, 25 bp, Homo sapien
cagaaagcattgtgtctgggtttcc

SEQ ID NO: 244374 - DNA, 25 bp, Homo sapien
ggtgccctgaaccatctttgcctga

SEQ ID NO: 244375 - DNA, 25 bp, Homo sapien
gggtgtctcagtgtttctgcgatga

SEQ ID NO: 244376 - DNA, 25 bp, Homo sapien
cctgggtgccctgaaccatctttgc

SEQ ID NO: 244377 - DNA, 25 bp, Homo sapien
gcgatgaggactcaagtgccccagg

SEQ ID NO: 244378 - DNA, 25 bp, Homo sapien
cagacaaatccagcttaattgcctc

SEQ ID NO: 244379 - DNA, 25 bp, Homo sapien
atcaaacctttgatcccctgcccca

SEQ ID NO: 244380 - DNA, 25 bp, Homo sapien
cagcttaattgcctcagtgggccca

SEQ ID NO: 244381 - DNA, 25 bp, Homo sapien
aatccagcttaattgcctcagtggg

SEQ ID NO: 244382 - DNA, 25 bp, Homo sapien
agagttcgaccaccgtccctttcat

SEQ ID NO: 244383 - DNA, 25 bp, Homo sapien
tccttgataggctcagtgacggaga

SEQ ID NO: 244384 - DNA, 25 bp, Homo sapien
tcagtgacggagagttcgaccaccg

SEQ ID NO: 244385 - DNA, 25 bp, Homo sapien
tgttaaatccttgataggctcagtg

SEQ ID NO: 244386 - DNA, 25 bp, Homo sapien
cacgtcgtctgtcaaggaaaatgag

SEQ ID NO: 244387 - DNA, 25 bp, Homo sapien
caaaaagccacatcggggtaacgag

SEQ ID NO: 244388 - DNA, 25 bp, Homo sapien
aacccggagaacacagcacgtcgtc

SEQ ID NO: 244389 - DNA, 25 bp, Homo sapien
gatttgccgatcagcaacccggaga

SEQ ID NO: 244390 - DNA, 25 bp, Homo sapien
aaactgacgggatcggggcagatcc

SEQ ID NO: 244391 - DNA, 25 bp, Homo sapien
accaacaattgggtgggccacatgc

SEQ ID NO: 244392 - DNA, 25 bp, Homo sapien
gccacatgcttgcatgaaaggcaag

SEQ ID NO: 244393 - DNA, 25 bp, Homo sapien
gtgggccacatgcttgcatgaaagg

SEQ ID NO: 244394 - DNA, 25 bp, Homo sapien
agggatctggcatcagccccatggg

SEQ ID NO: 244395 - DNA, 25 bp, Homo sapien
cacattttcgcaccagcaacacagg

SEQ ID NO: 244396 - DNA, 25 bp, Homo sapien
catgtgagtccgtggtctgtcacgt

SEQ ID NO: 244397 - DNA, 25 bp, Homo sapien
gaaccttcatcgattggcatgtgag

SEQ ID NO: 244398 - DNA, 25 bp, Homo sapien
taaaaacttaacagcaaatcctatc

SEQ ID NO: 244399 - DNA, 25 bp, Homo sapien
gatcacttatgaggatggaaatttc

SEQ ID NO: 244400 - DNA, 25 bp, Homo sapien
tcaataagaacgatcacttatgagg

SEQ ID NO: 244401 - DNA, 25 bp, Homo sapien
tatcttgcaacagcgcatctcttcc

SEQ ID NO: 244402 - DNA, 25 bp, Homo sapien
gatgccttcaggatgaacgacaaga

SEQ ID NO: 244403 - DNA, 25 bp, Homo sapien
gacacaaagtaagatgccttcagga

SEQ ID NO: 244404 - DNA, 25 bp, Homo sapien
tgggagacacaaagtaagatgcctt

SEQ ID NO: 244405 - DNA, 25 bp, Homo sapien
cacaatgggagacacaaagtaagat

SEQ ID NO: 244406 - DNA, 25 bp, Homo sapien
tccctttggctactctgcccgcatt

SEQ ID NO: 244407 - DNA, 25 bp, Homo sapien
gaggtagttccctttggctactctg

SEQ ID NO: 244408 - DNA, 25 bp, Homo sapien
ggtagttccctttggctactctgcc

SEQ ID NO: 244409 - DNA, 25 bp, Homo sapien
cagaggtagttccctttggctactc

SEQ ID NO: 244410 - DNA, 25 bp, Homo sapien
actgaatatctgagcagaccacttt

SEQ ID NO: 244411 - DNA, 25 bp, Homo sapien
tatctgagcagaccactttctgagc

SEQ ID NO: 244412 - DNA, 25 bp, Homo sapien
tggggtccttgctctgatgggcact

SEQ ID NO: 244413 - DNA, 25 bp, Homo sapien
gcagaccactttctgagcaagccca

SEQ ID NO: 244414 - DNA, 25 bp, Homo sapien
caaccggaagtagtgctcataaaac

SEQ ID NO: 244415 - DNA, 25 bp, Homo sapien
aaaaccctagcttactctcaatcag

SEQ ID NO: 244416 - DNA, 25 bp, Homo sapien
cccgtccaaccggaagtagtgctca

SEQ ID NO: 244417 - DNA, 25 bp, Homo sapien
gaagtagtgctcataaaaccctagc

SEQ ID NO: 244418 - DNA, 25 bp, Homo sapien
tgtctaatgacagggctacaagtgg

SEQ ID NO: 244419 - DNA, 25 bp, Homo sapien
gaagtgccatctgatctcctatgaa

SEQ ID NO: 244420 - DNA, 25 bp, Homo sapien
tctcacacgagctaatgaagtcagt

SEQ ID NO: 244421 - DNA, 25 bp, Homo sapien
caggtcagtaattaggctcttgcag

SEQ ID NO: 244422 - DNA, 25 bp, Homo sapien
gcaaagcatcaaccaagctcctgga

SEQ ID NO: 244423 - DNA, 25 bp, Homo sapien
agtgatttatcatccaggcacctga

SEQ ID NO: 244424 - DNA, 25 bp, Homo sapien
aaatatagaagaggtggcaatgtcc

SEQ ID NO: 244425 - DNA, 25 bp, Homo sapien
tcacctcagcaatgtggcctatgtg

SEQ ID NO: 244426 - DNA, 25 bp, Homo sapien
tggacagcatcccattcacagtcac

SEQ ID NO: 244427 - DNA, 25 bp, Homo sapien
ctacaattggacagcatcccattca

SEQ ID NO: 244428 - DNA, 25 bp, Homo sapien
aattggacagcatcccattcacagt

SEQ ID NO: 244429 - DNA, 25 bp, Homo sapien
gaaggtgcactgtgacagtccacag

SEQ ID NO: 244430 - DNA, 25 bp, Homo sapien
gaggtctgagatacaagaaggaacc

SEQ ID NO: 244431 - DNA, 25 bp, Homo sapien
tcccaggcaagaagctggcaaagtc

SEQ ID NO: 244432 - DNA, 25 bp, Homo sapien
taggtaaagaccagctagagaggct

SEQ ID NO: 244433 - DNA, 25 bp, Homo sapien
gactgtgtctcgctcccatctacat

SEQ ID NO: 244434 - DNA, 25 bp, Homo sapien
atttgtttaccaatcaatcgccggg

SEQ ID NO: 244435 - DNA, 25 bp, Homo sapien
ggtataccagatataatccccgcct

SEQ ID NO: 244436 - DNA, 25 bp, Homo sapien
ccgagtccaggctgtttgtgaggtt

SEQ ID NO: 244437 - DNA, 25 bp, Homo sapien
tgtgaggtttactaaggtataccag

SEQ ID NO: 244438 - DNA, 25 bp, Homo sapien
ccatgagaagttagaaatggtcaac

SEQ ID NO: 244439 - DNA, 25 bp, Homo sapien
aggatgcaggaatcccctcagaagg

SEQ ID NO: 244440 - DNA, 25 bp, Homo sapien
aatggtcaacgctagcaaaatggag

SEQ ID NO: 244441 - DNA, 25 bp, Homo sapien
ggcctggtgggttctacacatcaca

SEQ ID NO: 244442 - DNA, 25 bp, Homo sapien
gcagggatggcgatgtcaatggtct

SEQ ID NO: 244443 - DNA, 25 bp, Homo sapien
aaggagcccggttctcagaggtctc

SEQ ID NO: 244444 - DNA, 25 bp, Homo sapien
tggttagaaggagcccggttctcag

SEQ ID NO: 244445 - DNA, 25 bp, Homo sapien
ttggttagaaggagcccggttctca

SEQ ID NO: 244446 - DNA, 25 bp, Homo sapien
tagaaggagcccggttctcagaggt

SEQ ID NO: 244447 - DNA, 25 bp, Homo sapien
gaggtttgcttttgctcgatggaga

SEQ ID NO: 244448 - DNA, 25 bp, Homo sapien
tcaggacggagacaaatagcctggg

SEQ ID NO: 244449 - DNA, 25 bp, Homo sapien
ttttgtgcacaaagatgattgaggt

SEQ ID NO: 244450 - DNA, 25 bp, Homo sapien
atcctttgaaattgtgctcccgggg

SEQ ID NO: 244451 - DNA, 25 bp, Homo sapien
aaacaggcctcgacagcgtcaggga

SEQ ID NO: 244452 - DNA, 25 bp, Homo sapien
ggcgaaacaggcctcgacagcgtca

SEQ ID NO: 244453 - DNA, 25 bp, Homo sapien
aatgaccacggcgaaacaggcctcg

SEQ ID NO: 244454 - DNA, 25 bp, Homo sapien
aactccaaatgaccacggcgaaaca

SEQ ID NO: 244455 - DNA, 25 bp, Homo sapien
aggggacaggcatatcctccaggtg

SEQ ID NO: 244456 - DNA, 25 bp, Homo sapien
tcacccaaagttgatccaagaaggg

SEQ ID NO: 244457 - DNA, 25 bp, Homo sapien
gcagagaagcaagatgcagcttccc

SEQ ID NO: 244458 - DNA, 25 bp, Homo sapien
ccgctgcctctctcatgggtctggg

SEQ ID NO: 244459 - DNA, 25 bp, Homo sapien
gatctcaccctctccctgtagtaca

SEQ ID NO: 244460 - DNA, 25 bp, Homo sapien
gtagtacagtccacactggcaccaa

SEQ ID NO: 244461 - DNA, 25 bp, Homo sapien
caatctatcgagaagctgatttcat

SEQ ID NO: 244462 - DNA, 25 bp, Homo sapien
ttcattaagcatgccaagggccagc

SEQ ID NO: 244463 - DNA, 25 bp, Homo sapien
gaagaagatacagccatccaaagtg

SEQ ID NO: 244464 - DNA, 25 bp, Homo sapien
atccaaagtgacgtcctcgccaccc

SEQ ID NO: 244465 - DNA, 25 bp, Homo sapien
agaagaagatacagccatccaaagt

SEQ ID NO: 244466 - DNA, 25 bp, Homo sapien
acagccatccaaagtgacgtcctcg

SEQ ID NO: 244467 - DNA, 25 bp, Homo sapien
caagacggatgggacttgaggctcc

SEQ ID NO: 244468 - DNA, 25 bp, Homo sapien
aagggttccctctccaatgcaggtg

SEQ ID NO: 244469 - DNA, 25 bp, Homo sapien
gaactcatggcctgaagggtccctg

SEQ ID NO: 244470 - DNA, 25 bp, Homo sapien
caggatcctgccagacttgggaaca

SEQ ID NO: 244471 - DNA, 25 bp, Homo sapien
ctgcaactagagtggactccgggtg

SEQ ID NO: 244472 - DNA, 25 bp, Homo sapien
caactagagtggactccgggtgcct

SEQ ID NO: 244473 - DNA, 25 bp, Homo sapien
tgggagaagctactagaatctactg

SEQ ID NO: 244474 - DNA, 25 bp, Homo sapien
actccgggtgcctatgggagaagct

SEQ ID NO: 244475 - DNA, 25 bp, Homo sapien
tctgagtctccacaggacattgccc

SEQ ID NO: 244476 - DNA, 25 bp, Homo sapien
catatataaccagtgcccgagacca

SEQ ID NO: 244477 - DNA, 25 bp, Homo sapien
cttggtcgtaggtactagcactggc

SEQ ID NO: 244478 - DNA, 25 bp, Homo sapien
atcatgaacttggacacaggctggg

SEQ ID NO: 244479 - DNA, 25 bp, Homo sapien
gaggccaaatgtgagtctaaactta

SEQ ID NO: 244480 - DNA, 25 bp, Homo sapien
cacgtttgcctactagctggtgtca

SEQ ID NO: 244481 - DNA, 25 bp, Homo sapien
tgcatatgctggacataaacagccc

SEQ ID NO: 244482 - DNA, 25 bp, Homo sapien
gactttagaaaggaattgtggtgca

SEQ ID NO: 244483 - DNA, 25 bp, Homo sapien
caattcggtctttcttcagtggtcc

SEQ ID NO: 244484 - DNA, 25 bp, Homo sapien
tttgcaattcggtctttcttcagtg

SEQ ID NO: 244485 - DNA, 25 bp, Homo sapien
ttcggtctttcttcagtggtcccat

SEQ ID NO: 244486 - DNA, 25 bp, Homo sapien
gcaattcggtctttcttcagtggtc

SEQ ID NO: 244487 - DNA, 25 bp, Homo sapien
ttgcggagggtgagcacccgcttct

SEQ ID NO: 244488 - DNA, 25 bp, Homo sapien
ccgccgcttcgtctgcaccagcaag

SEQ ID NO: 244489 - DNA, 25 bp, Homo sapien
ttctccagagcccgccgcttcgtct

SEQ ID NO: 244490 - DNA, 25 bp, Homo sapien
cagagcccgccgcttcgtctgcacc

SEQ ID NO: 244491 - DNA, 25 bp, Homo sapien
cacacagcctttcagcatgacaaag

SEQ ID NO: 244492 - DNA, 25 bp, Homo sapien
cacagcctttcagcatgacaaagtc

SEQ ID NO: 244493 - DNA, 25 bp, Homo sapien
acagcctttcagcatgacaaagtca

SEQ ID NO: 244494 - DNA, 25 bp, Homo sapien
agcctttcagcatgacaaagtcatt

SEQ ID NO: 244495 - DNA, 25 bp, Homo sapien
ccatccttgataaggtagccctggc

SEQ ID NO: 244496 - DNA, 25 bp, Homo sapien
gatgctcttgtcagataggtcatag

SEQ ID NO: 244497 - DNA, 25 bp, Homo sapien
gttcttgatcagcttgccatccttg

SEQ ID NO: 244498 - DNA, 25 bp, Homo sapien
tagccctggccaatcttatagatct

SEQ ID NO: 244499 - DNA, 25 bp, Homo sapien
gccacagagaatttgatggcgtgat

SEQ ID NO: 244500 - DNA, 25 bp, Homo sapien
ggtccctcggcttcctgcctcggaa

SEQ ID NO: 244501 - DNA, 25 bp, Homo sapien
tccctcggcttcctgcctcggaagc

SEQ ID NO: 244502 - DNA, 25 bp, Homo sapien
ttcctgcctcggaagcgcagcagca

SEQ ID NO: 244503 - DNA, 25 bp, Homo sapien
tcggcttcctgcctcggaagcgcag

SEQ ID NO: 244504 - DNA, 25 bp, Homo sapien
gacccaactctatactacctataag

SEQ ID NO: 244505 - DNA, 25 bp, Homo sapien
gagggaaaaattgtcagaactgcat

SEQ ID NO: 244506 - DNA, 25 bp, Homo sapien
ggtatcaaaaattagtcatccaaac

SEQ ID NO: 244507 - DNA, 25 bp, Homo sapien
tacgcatccactaacaaaacctcaa

SEQ ID NO: 244508 - DNA, 25 bp, Homo sapien
taattgagcaccatgcaaatttcgg

SEQ ID NO: 244509 - DNA, 25 bp, Homo sapien
gatatgaacagattgccaagtgatg

SEQ ID NO: 244510 - DNA, 25 bp, Homo sapien
ctctggaatgaatgatgaggctatg

SEQ ID NO: 244511 - DNA, 25 bp, Homo sapien
gttcactaatgtataattgagcacc

SEQ ID NO: 244512 - DNA, 25 bp, Homo sapien
tataaaaggccgatgtcaggagcga

SEQ ID NO: 244513 - DNA, 25 bp, Homo sapien
gctgatatgcttgcgccaggacgga

SEQ ID NO: 244514 - DNA, 25 bp, Homo sapien
ccggcgtggcctgcatgtggaaact

SEQ ID NO: 244515 - DNA, 25 bp, Homo sapien
gacggaagcccatggatctggccat

SEQ ID NO: 244516 - DNA, 25 bp, Homo sapien
ctgctcggtcggggagcaaccacaa

SEQ ID NO: 244517 - DNA, 25 bp, Homo sapien
ctcggtcggggagcaaccacaaggg

SEQ ID NO: 244518 - DNA, 25 bp, Homo sapien
cggtcggggagcaaccacaagggtg

SEQ ID NO: 244519 - DNA, 25 bp, Homo sapien
tcggggagcaaccacaagggtgtct

SEQ ID NO: 244520 - DNA, 25 bp, Homo sapien
ctgggatttgcataagagacaggtc

SEQ ID NO: 244521 - DNA, 25 bp, Homo sapien
gttccctggcattagaaatgtggcc

SEQ ID NO: 244522 - DNA, 25 bp, Homo sapien
catatatcaaaatgccccccgtgag

SEQ ID NO: 244523 - DNA, 25 bp, Homo sapien
taagagacaggtctccaagttcata

SEQ ID NO: 244524 - DNA, 25 bp, Homo sapien
tccaaacaccttgcattcacaggca

SEQ ID NO: 244525 - DNA, 25 bp, Homo sapien
aagatggtgggaccccaaagctgac

SEQ ID NO: 244526 - DNA, 25 bp, Homo sapien
aggctccaagatggtgggaccccaa

SEQ ID NO: 244527 - DNA, 25 bp, Homo sapien
tgccaaaggtgtttgggcagcctcc

SEQ ID NO: 244528 - DNA, 25 bp, Homo sapien
cacctttgtctctccaattaggttg

SEQ ID NO: 244529 - DNA, 25 bp, Homo sapien
tctccaattaggttgggtgttcctc

SEQ ID NO: 244530 - DNA, 25 bp, Homo sapien
ccttagccaaggatgagtctggttc

SEQ ID NO: 244531 - DNA, 25 bp, Homo sapien
taggttgggtgttcctccttagcca

SEQ ID NO: 244532 - DNA, 25 bp, Homo sapien
taatagggctttgtcccggctcctg

SEQ ID NO: 244533 - DNA, 25 bp, Homo sapien
gcgggtcggcaggttcacacgcttc

SEQ ID NO: 244534 - DNA, 25 bp, Homo sapien
tgtgagcaccctgcataatagggct

SEQ ID NO: 244535 - DNA, 25 bp, Homo sapien
cacgcttcagacgtgagtgtgagca

SEQ ID NO: 244536 - DNA, 25 bp, Homo sapien
gatgcctgcatctcagacaccgaca

SEQ ID NO: 244537 - DNA, 25 bp, Homo sapien
ttagggagatgcctgcatctcagac

SEQ ID NO: 244538 - DNA, 25 bp, Homo sapien
tgcatctcagacaccgacatcagca

SEQ ID NO: 244539 - DNA, 25 bp, Homo sapien
tcagacaccgacatcagcaacagaa

SEQ ID NO: 244540 - DNA, 25 bp, Homo sapien
catgcgatgagaggctttacttaca

SEQ ID NO: 244541 - DNA, 25 bp, Homo sapien
agagtgggcccgtcacacctctggg

SEQ ID NO: 244542 - DNA, 25 bp, Homo sapien
tcacatagaccatgcgatgagaggc

SEQ ID NO: 244543 - DNA, 25 bp, Homo sapien
gggacacggttcacatagaccatgc

SEQ ID NO: 244544 - DNA, 25 bp, Homo sapien
gcacactgagttcttacactccagg

SEQ ID NO: 244545 - DNA, 25 bp, Homo sapien
aaaagctttatagctaccctgggag

SEQ ID NO: 244546 - DNA, 25 bp, Homo sapien
aagaaagaagttactgcacactgag

SEQ ID NO: 244547 - DNA, 25 bp, Homo sapien
caggctgagcgaattccttcccaca

SEQ ID NO: 244548 - DNA, 25 bp, Homo sapien
tggagggtctttcctcggtgctgat

SEQ ID NO: 244549 - DNA, 25 bp, Homo sapien
ctgttggagggtctttcctcggtgc

SEQ ID NO: 244550 - DNA, 25 bp, Homo sapien
caaaattggagtcaactctgccact

SEQ ID NO: 244551 - DNA, 25 bp, Homo sapien
acaatgatgaggttttccccatcaa

SEQ ID NO: 244552 - DNA, 25 bp, Homo sapien
tgacagacaccacctgcaataaagg

SEQ ID NO: 244553 - DNA, 25 bp, Homo sapien
ccctaattcaacagggctgctgtcc

SEQ ID NO: 244554 - DNA, 25 bp, Homo sapien
gcaataaaggccagtagtgaaacaa

SEQ ID NO: 244555 - DNA, 25 bp, Homo sapien
ttacattggagaaacttgacagaca

SEQ ID NO: 244556 - DNA, 25 bp, Homo sapien
tcccagcgagtaaggtgggtgcttc

SEQ ID NO: 244557 - DNA, 25 bp, Homo sapien
tagtcacatcactcttccgaaaaga

SEQ ID NO: 244558 - DNA, 25 bp, Homo sapien
aacagagaaatgacatagtcacatc

SEQ ID NO: 244559 - DNA, 25 bp, Homo sapien
gagactgcgatgaggagctgctgcg

SEQ ID NO: 244560 - DNA, 25 bp, Homo sapien
gaagcctgctcgagaggtgcagtca

SEQ ID NO: 244561 - DNA, 25 bp, Homo sapien
gctgttgactggctgttcgcattca

SEQ ID NO: 244562 - DNA, 25 bp, Homo sapien
tgctctttgatctcagctcctactg

SEQ ID NO: 244563 - DNA, 25 bp, Homo sapien
tactgactatttgccgcacagtggg

SEQ ID NO: 244564 - DNA, 25 bp, Homo sapien
acagctctcgctccactctgggtgt

SEQ ID NO: 244565 - DNA, 25 bp, Homo sapien
cagctctcgctccactctgggtgtt

SEQ ID NO: 244566 - DNA, 25 bp, Homo sapien
tcacagctctcgctccactctgggt

SEQ ID NO: 244567 - DNA, 25 bp, Homo sapien
agctctcgctccactctgggtgttt

SEQ ID NO: 244568 - DNA, 25 bp, Homo sapien
ccccatgtctctacgaagtgacttc

SEQ ID NO: 244569 - DNA, 25 bp, Homo sapien
ccatgtctctacgaagtgacttctc

SEQ ID NO: 244570 - DNA, 25 bp, Homo sapien
gggagatgccaacagtggcctttgc

SEQ ID NO: 244571 - DNA, 25 bp, Homo sapien
caacagtggcctttgccgtcaccag

SEQ ID NO: 244572 - DNA, 25 bp, Homo sapien
cacaccagcccttccgcactcccca

SEQ ID NO: 244573 - DNA, 25 bp, Homo sapien
ccacaccagcccttccgcactcccc

SEQ ID NO: 244574 - DNA, 25 bp, Homo sapien
cagcccttccgcactccccagcagg

SEQ ID NO: 244575 - DNA, 25 bp, Homo sapien
acaccagcccttccgcactccccag

SEQ ID NO: 244576 - DNA, 25 bp, Homo sapien
aaacaggctagaggtggccacacca

SEQ ID NO: 244577 - DNA, 25 bp, Homo sapien
caggagagctcctatggctgggcgc

SEQ ID NO: 244578 - DNA, 25 bp, Homo sapien
gagagaagcagatgcaaaccctgca

SEQ ID NO: 244579 - DNA, 25 bp, Homo sapien
tgcagcagtgacgttttccaaacag

SEQ ID NO: 244580 - DNA, 25 bp, Homo sapien
tgctgggccttgtacgggaagggac

SEQ ID NO: 244581 - DNA, 25 bp, Homo sapien
gctgggccttgtacgggaagggaca

SEQ ID NO: 244582 - DNA, 25 bp, Homo sapien
tcctgctgggccttgtacgggaagg

SEQ ID NO: 244583 - DNA, 25 bp, Homo sapien
ctagtcctgctgggccttgtacggg

SEQ ID NO: 244584 - DNA, 25 bp, Homo sapien
gcagcccacctcctcacatgccagc

SEQ ID NO: 244585 - DNA, 25 bp, Homo sapien
ttgctcctatctgccaggtcttcca

SEQ ID NO: 244586 - DNA, 25 bp, Homo sapien
cagttgctcctatctgccaggtctt

SEQ ID NO: 244587 - DNA, 25 bp, Homo sapien
agcccacctcctcacatgccagcca

SEQ ID NO: 244588 - DNA, 25 bp, Homo sapien
aaaaaccctatctctggcggcgctg

SEQ ID NO: 244589 - DNA, 25 bp, Homo sapien
gaaaacaatatacacgcggccactg

SEQ ID NO: 244590 - DNA, 25 bp, Homo sapien
tccataggacttcgcagacacaggt

SEQ ID NO: 244591 - DNA, 25 bp, Homo sapien
cacggaggcaagtcaggtcagcatt

SEQ ID NO: 244592 - DNA, 25 bp, Homo sapien
tcatgtggcgcgtgagcttgctgct

SEQ ID NO: 244593 - DNA, 25 bp, Homo sapien
cgatctgcccgtgcgtcttcatgtg

SEQ ID NO: 244594 - DNA, 25 bp, Homo sapien
catctggcagatgtcgcagcggtac

SEQ ID NO: 244595 - DNA, 25 bp, Homo sapien
gacgtcgttagtcagcaagtgctcg

SEQ ID NO: 244596 - DNA, 25 bp, Homo sapien
tgtcgtgcgtccgtgaagcccagga

SEQ ID NO: 244597 - DNA, 25 bp, Homo sapien
agtactcgcacgtgtcgctgcggcg

SEQ ID NO: 244598 - DNA, 25 bp, Homo sapien
tctcggacgagtgctcggacgacgt

SEQ ID NO: 244599 - DNA, 25 bp, Homo sapien
gtccttcatgaagtgccgcgacgcc

SEQ ID NO: 244600 - DNA, 25 bp, Homo sapien
tacacgttctcggacgggatgagcg

SEQ ID NO: 244601 - DNA, 25 bp, Homo sapien
cgagtacacgttctcggacgggatg

SEQ ID NO: 244602 - DNA, 25 bp, Homo sapien
ccttgatgcgcttggcggcgctgtt

SEQ ID NO: 244603 - DNA, 25 bp, Homo sapien
cttctccaccttgatgcgcttggcg

SEQ ID NO: 244604 - DNA, 25 bp, Homo sapien
cgggcttgcgcgggaagagcccggg

SEQ ID NO: 244605 - DNA, 25 bp, Homo sapien
gcggcgcgggcttgcgcgggaagag

SEQ ID NO: 244606 - DNA, 25 bp, Homo sapien
cggcgcgggcttgcgcgggaagagc

SEQ ID NO: 244607 - DNA, 25 bp, Homo sapien
cttgcgcgggaagagcccggggaag

SEQ ID NO: 244608 - DNA, 25 bp, Homo sapien
gaaggcgccgcgcttctgcttgtcg

SEQ ID NO: 244609 - DNA, 25 bp, Homo sapien
gtccatgctgaagctcgactcgggc

SEQ ID NO: 244610 - DNA, 25 bp, Homo sapien
gttctcgcggttgcggctcagctcc

SEQ ID NO: 244611 - DNA, 25 bp, Homo sapien
ggccggctctcgttctccagtagca

SEQ ID NO: 244612 - DNA, 25 bp, Homo sapien
gggtcgctctcgtggtggcggaagt

SEQ ID NO: 244613 - DNA, 25 bp, Homo sapien
ggtcgctctcgtggtggcggaagtc

SEQ ID NO: 244614 - DNA, 25 bp, Homo sapien
ggccgagagcccgtcgtcggagcgg

SEQ ID NO: 244615 - DNA, 25 bp, Homo sapien
gccagctcgctggtgccgggctcgg

SEQ ID NO: 244616 - DNA, 25 bp, Homo sapien
cgtcggccgccttgaggccctcgcc

SEQ ID NO: 244617 - DNA, 25 bp, Homo sapien
aactcgcacgacttgctcttggctg

SEQ ID NO: 244618 - DNA, 25 bp, Homo sapien
gaaccacgcgctgttgaagggctgc

SEQ ID NO: 244619 - DNA, 25 bp, Homo sapien
catctcctcggcactgaggcggtgc

SEQ ID NO: 244620 - DNA, 25 bp, Homo sapien
ggttcaggcgcatgactcggtcgaa

SEQ ID NO: 244621 - DNA, 25 bp, Homo sapien
tgctgtcgcccaggaaattcatgag

SEQ ID NO: 244622 - DNA, 25 bp, Homo sapien
tactaagcaatgaaagaacatcctc

SEQ ID NO: 244623 - DNA, 25 bp, Homo sapien
tgaagaccggctactactgtgacag

SEQ ID NO: 244624 - DNA, 25 bp, Homo sapien
tgcagaaagcactgtacacctgaat

SEQ ID NO: 244625 - DNA, 25 bp, Homo sapien
cctacaccaccgtctgtgcagaaag

SEQ ID NO: 244626 - DNA, 25 bp, Homo sapien
ggcagcaaattgtagcgaacactcg

SEQ ID NO: 244627 - DNA, 25 bp, Homo sapien
tggcaaatgctgatgtgttagcaac

SEQ ID NO: 244628 - DNA, 25 bp, Homo sapien
ttagcaactggctctggtgacacgg

SEQ ID NO: 244629 - DNA, 25 bp, Homo sapien
gcgaacactcgtggtatggagccaa

SEQ ID NO: 244630 - DNA, 25 bp, Homo sapien
tgaagctcgccgcttttccagtatg

SEQ ID NO: 244631 - DNA, 25 bp, Homo sapien
tgagacaatcacaaaatggaggctg

SEQ ID NO: 244632 - DNA, 25 bp, Homo sapien
atttcctccggaacccatcctgcaa

SEQ ID NO: 244633 - DNA, 25 bp, Homo sapien
cagtatgtacctctcctaatgctct

SEQ ID NO: 244634 - DNA, 25 bp, Homo sapien
tgcctgcagcgtcacagaaggcttc

SEQ ID NO: 244635 - DNA, 25 bp, Homo sapien
gaattctgaagttcggcctcatccc

SEQ ID NO: 244636 - DNA, 25 bp, Homo sapien
caatatcggtaagttgccatgggaa

SEQ ID NO: 244637 - DNA, 25 bp, Homo sapien
caggacaccaacactagaaaccgag

SEQ ID NO: 244638 - DNA, 25 bp, Homo sapien
ggctggatttcagggccacccgtcc

SEQ ID NO: 244639 - DNA, 25 bp, Homo sapien
aaagctcttactggacccgtgtccg

SEQ ID NO: 244640 - DNA, 25 bp, Homo sapien
gtttattcatcaggctggatttcag

SEQ ID NO: 244641 - DNA, 25 bp, Homo sapien
taattcaccatcaggtgagaagagc

SEQ ID NO: 244642 - DNA, 25 bp, Homo sapien
tgaggcatttatcgtcagggcctgt

SEQ ID NO: 244643 - DNA, 25 bp, Homo sapien
gaggcatttatcgtcagggcctgtt

SEQ ID NO: 244644 - DNA, 25 bp, Homo sapien
tcacaatgcaaatggccacgaagga

SEQ ID NO: 244645 - DNA, 25 bp, Homo sapien
tgcaaatggccacgaaggaggttct

SEQ ID NO: 244646 - DNA, 25 bp, Homo sapien
atggccacgaaggaggttctcccac

SEQ ID NO: 244647 - DNA, 25 bp, Homo sapien
caaatggccacgaaggaggttctcc

SEQ ID NO: 244648 - DNA, 25 bp, Homo sapien
gatgatgtttggttggaacccggtc

SEQ ID NO: 244649 - DNA, 25 bp, Homo sapien
tgatgtttggttggaacccggtcag

SEQ ID NO: 244650 - DNA, 25 bp, Homo sapien
cacactgtgagtgtcctcccagtgg

SEQ ID NO: 244651 - DNA, 25 bp, Homo sapien
tgtgagtgtcctcccagtggaaggc

SEQ ID NO: 244652 - DNA, 25 bp, Homo sapien
tcatgacgtcagaaaggagatgtcc

SEQ ID NO: 244653 - DNA, 25 bp, Homo sapien
tatgaaatccttaccacctgccagg

SEQ ID NO: 244654 - DNA, 25 bp, Homo sapien
gaatccgtctgctaaagatgccgtc

SEQ ID NO: 244655 - DNA, 25 bp, Homo sapien
tctccaagacaaaggcggaactggg

SEQ ID NO: 244656 - DNA, 25 bp, Homo sapien
gcagaggtgagctgtgcggcttcat

SEQ ID NO: 244657 - DNA, 25 bp, Homo sapien
atggcaacttgggaaccacactggg

SEQ ID NO: 244658 - DNA, 25 bp, Homo sapien
taccagaccggctgaagtttggatg

SEQ ID NO: 244659 - DNA, 25 bp, Homo sapien
gccaggtaccaggtgtaccagaccg

SEQ ID NO: 244660 - DNA, 25 bp, Homo sapien
acaatgccggcacgttctggagacc

SEQ ID NO: 244661 - DNA, 25 bp, Homo sapien
ggagcctcgtcccagtcattcctgt

SEQ ID NO: 244662 - DNA, 25 bp, Homo sapien
ggcccctacagagtgggagcctcgt

SEQ ID NO: 244663 - DNA, 25 bp, Homo sapien
tatctggaaagaagtcgggaaacaa

SEQ ID NO: 244664 - DNA, 25 bp, Homo sapien
caacacctgctagactgagctgaca

SEQ ID NO: 244665 - DNA, 25 bp, Homo sapien
tggcctagtcaatcttatcgcaacg

SEQ ID NO: 244666 - DNA, 25 bp, Homo sapien
gaaggcatcattacaggccagcaca

SEQ ID NO: 244667 - DNA, 25 bp, Homo sapien
tctgagccaaggagtgccacaagaa

SEQ ID NO: 244668 - DNA, 25 bp, Homo sapien
cagtgggaccttcagctcagatagg

SEQ ID NO: 244669 - DNA, 25 bp, Homo sapien
gcttaagactaattccagcatgcgg

SEQ ID NO: 244670 - DNA, 25 bp, Homo sapien
tcggctggccgtgaaaagaattcta

SEQ ID NO: 244671 - DNA, 25 bp, Homo sapien
tgcggacggctctcacatagtaagg

SEQ ID NO: 244672 - DNA, 25 bp, Homo sapien
caacagtgcctatgtgtgccggcag

SEQ ID NO: 244673 - DNA, 25 bp, Homo sapien
cacagaagtctgagtgctagccgaa

SEQ ID NO: 244674 - DNA, 25 bp, Homo sapien
atctccccgccctatcgttaatagt

SEQ ID NO: 244675 - DNA, 25 bp, Homo sapien
gtgctagccgaagggccaggcattt

SEQ ID NO: 244676 - DNA, 25 bp, Homo sapien
cagaatcaccacattcctgagaaaa

SEQ ID NO: 244677 - DNA, 25 bp, Homo sapien
tttttagagaatgggtttcgccatg

SEQ ID NO: 244678 - DNA, 25 bp, Homo sapien
gctgggattacaggtgtatgccacc

SEQ ID NO: 244679 - DNA, 25 bp, Homo sapien
tcctcctgcctccacctccccagta

SEQ ID NO: 244680 - DNA, 25 bp, Homo sapien
acctccctgggctcaagggctcctc

SEQ ID NO: 244681 - DNA, 25 bp, Homo sapien
taggattaccctttgacgcagaaac

SEQ ID NO: 244682 - DNA, 25 bp, Homo sapien
tattgtccacccacgttcttagctg

SEQ ID NO: 244683 - DNA, 25 bp, Homo sapien
cacagtggacccttgatcaatggta

SEQ ID NO: 244684 - DNA, 25 bp, Homo sapien
tggatggacctcgaagacactatac

SEQ ID NO: 244685 - DNA, 25 bp, Homo sapien
taggaatataagtatgcacggtcac

SEQ ID NO: 244686 - DNA, 25 bp, Homo sapien
caagtttcacaatgagcgtttgaca

SEQ ID NO: 244687 - DNA, 25 bp, Homo sapien
gcacggtcacttgagcaaatttgca

SEQ ID NO: 244688 - DNA, 25 bp, Homo sapien
tagctgctgcttattacatagaacc

SEQ ID NO: 244689 - DNA, 25 bp, Homo sapien
tctcagcaatgcgaccacaaggaca

SEQ ID NO: 244690 - DNA, 25 bp, Homo sapien
taacatgcggttatggaccagccat

SEQ ID NO: 244691 - DNA, 25 bp, Homo sapien
taatcacgtggattccaatgcagtc

SEQ ID NO: 244692 - DNA, 25 bp, Homo sapien
catgggcccaatgcaccactggata

SEQ ID NO: 244693 - DNA, 25 bp, Homo sapien
tagtatggcctagtgggcagaccca

SEQ ID NO: 244694 - DNA, 25 bp, Homo sapien
caatctcattgcagggttcacacca

SEQ ID NO: 244695 - DNA, 25 bp, Homo sapien
ccaggatgtgtctggtgggctccca

SEQ ID NO: 244696 - DNA, 25 bp, Homo sapien
gcagacccaggtatgagtcagctct

SEQ ID NO: 244697 - DNA, 25 bp, Homo sapien
cttgaccgcgtccagtaataaacac

SEQ ID NO: 244698 - DNA, 25 bp, Homo sapien
agatttctgtgccacggaacttgac

SEQ ID NO: 244699 - DNA, 25 bp, Homo sapien
caggctgatcttcgatagcatggcc

SEQ ID NO: 244700 - DNA, 25 bp, Homo sapien
atggcccccccagtggttgccgagg

SEQ ID NO: 244701 - DNA, 25 bp, Homo sapien
tgcgtggccacagtgctttcacgcc

SEQ ID NO: 244702 - DNA, 25 bp, Homo sapien
gcatcctggtttgcgtggccacagt

SEQ ID NO: 244703 - DNA, 25 bp, Homo sapien
tcagcatcctggtttgcgtggccac

SEQ ID NO: 244704 - DNA, 25 bp, Homo sapien
tggccacagtgctttcacgccaggc

SEQ ID NO: 244705 - DNA, 25 bp, Homo sapien
gcctccgtctgaccctcaccctgag

SEQ ID NO: 244706 - DNA, 25 bp, Homo sapien
aaagggagcctccgtctgaccctca

SEQ ID NO: 244707 - DNA, 25 bp, Homo sapien
ccaaagggagcctccgtctgaccct

SEQ ID NO: 244708 - DNA, 25 bp, Homo sapien
atccaaagggagcctccgtctgacc

SEQ ID NO: 244709 - DNA, 25 bp, Homo sapien
ggagagcgcccagggcacgcagagg

SEQ ID NO: 244710 - DNA, 25 bp, Homo sapien
cacgcagaggtgaagtgatcacgga

SEQ ID NO: 244711 - DNA, 25 bp, Homo sapien
aagtgatcacggatgagtgagggtg

SEQ ID NO: 244712 - DNA, 25 bp, Homo sapien
gggcgcgcgctgcagcacggcaggg

SEQ ID NO: 244713 - DNA, 25 bp, Homo sapien
ccacctcgctcagaaaagatccaca

SEQ ID NO: 244714 - DNA, 25 bp, Homo sapien
gaggcttagggagatctgagactgg

SEQ ID NO: 244715 - DNA, 25 bp, Homo sapien
tccacattccactgggggaaaactg

SEQ ID NO: 244716 - DNA, 25 bp, Homo sapien
tgggtcatccatcatcatgacagcc

SEQ ID NO: 244717 - DNA, 25 bp, Homo sapien
ccagggtctgtaaaggcgatgtcac

SEQ ID NO: 244718 - DNA, 25 bp, Homo sapien
ggtctgtaaaggcgatgtcacacac

SEQ ID NO: 244719 - DNA, 25 bp, Homo sapien
agggtctgtaaaggcgatgtcacac

SEQ ID NO: 244720 - DNA, 25 bp, Homo sapien
accagggtctgtaaaggcgatgtca

SEQ ID NO: 244721 - DNA, 25 bp, Homo sapien
cattagcaattgtgaccttgctgaa

SEQ ID NO: 244722 - DNA, 25 bp, Homo sapien
cacgttgttccctgcataggggtca

SEQ ID NO: 244723 - DNA, 25 bp, Homo sapien
ttccccagagtctcattagcaattg

SEQ ID NO: 244724 - DNA, 25 bp, Homo sapien
gagtctcattagcaattgtgacctt

SEQ ID NO: 244725 - DNA, 25 bp, Homo sapien
gagcgtggagacacaaaaacgcctg

SEQ ID NO: 244726 - DNA, 25 bp, Homo sapien
acatgcgcactcacccagcgaacac

SEQ ID NO: 244727 - DNA, 25 bp, Homo sapien
cccaccgccgaggagcgtggagaca

SEQ ID NO: 244728 - DNA, 25 bp, Homo sapien
cgaggagcgtggagacacaaaaacg

SEQ ID NO: 244729 - DNA, 25 bp, Homo sapien
gactgcacgctcatattttaacagc

SEQ ID NO: 244730 - DNA, 25 bp, Homo sapien
tcccaacggctccaagagctgtctg

SEQ ID NO: 244731 - DNA, 25 bp, Homo sapien
agagctgtctgctaagactgcacgc

SEQ ID NO: 244732 - DNA, 25 bp, Homo sapien
gctcatattttaacagctccaccat

SEQ ID NO: 244733 - DNA, 25 bp, Homo sapien
tagctggtaaaatgatcctgcagtt

SEQ ID NO: 244734 - DNA, 25 bp, Homo sapien
ggtgttcacctgacaagactggcct

SEQ ID NO: 244735 - DNA, 25 bp, Homo sapien
tacatctaattagcagcccatgaca

SEQ ID NO: 244736 - DNA, 25 bp, Homo sapien
tatttgaaagaagtggagtgcaacc

SEQ ID NO: 244737 - DNA, 25 bp, Homo sapien
gatgcaggcagctgaaatactccag

SEQ ID NO: 244738 - DNA, 25 bp, Homo sapien
gacaaaactactatttctgggcatg

SEQ ID NO: 244739 - DNA, 25 bp, Homo sapien
actactatttctgggcatgtggtca

SEQ ID NO: 244740 - DNA, 25 bp, Homo sapien
caaaactactatttctgggcatgtg

SEQ ID NO: 244741 - DNA, 25 bp, Homo sapien
catttgacaaaactactatttctgg

SEQ ID NO: 244742 - DNA, 25 bp, Homo sapien
tttcctgaattactgctggaagtat

SEQ ID NO: 244743 - DNA, 25 bp, Homo sapien
gaagtatggaactacgtacataaaa

SEQ ID NO: 244744 - DNA, 25 bp, Homo sapien
tggaagtatggaactacgtacataa

SEQ ID NO: 244745 - DNA, 25 bp, Homo sapien
tgaattactgctggaagtatggaac

SEQ ID NO: 244746 - DNA, 25 bp, Homo sapien
aagaccggtgcaagctgctctaacg

SEQ ID NO: 244747 - DNA, 25 bp, Homo sapien
gcccattgccaagaagaccggtgca

SEQ ID NO: 244748 - DNA, 25 bp, Homo sapien
gcggtttgtcccaaccctgacagga

SEQ ID NO: 244749 - DNA, 25 bp, Homo sapien
cagtggcggtttgtcccaaccctga

SEQ ID NO: 244750 - DNA, 25 bp, Homo sapien
ccccacttctagaagcacctggtag

SEQ ID NO: 244751 - DNA, 25 bp, Homo sapien
cctggtagcaaggaagagcggggac

SEQ ID NO: 244752 - DNA, 25 bp, Homo sapien
gtccccacttctagaagcacctggt

SEQ ID NO: 244753 - DNA, 25 bp, Homo sapien
aagagcggggacctgcctgggtatc

SEQ ID NO: 244754 - DNA, 25 bp, Homo sapien
tgagcctggacagccaaagccagag

SEQ ID NO: 244755 - DNA, 25 bp, Homo sapien
aggcagagtccaagaattaacagcc

SEQ ID NO: 244756 - DNA, 25 bp, Homo sapien
cagaggcagagtccaagaattaaca

SEQ ID NO: 244757 - DNA, 25 bp, Homo sapien
tcaccctggactcctctgagcctgg

SEQ ID NO: 244758 - DNA, 25 bp, Homo sapien
agctactggccggggccagcgaggc

SEQ ID NO: 244759 - DNA, 25 bp, Homo sapien
gctactggccggggccagcgaggcc

SEQ ID NO: 244760 - DNA, 25 bp, Homo sapien
cagctactggccggggccagcgagg

SEQ ID NO: 244761 - DNA, 25 bp, Homo sapien
cagagcccatgctaccttccatgat

SEQ ID NO: 244762 - DNA, 25 bp, Homo sapien
acgatcaatgcactcgtttccccag

SEQ ID NO: 244763 - DNA, 25 bp, Homo sapien
atcgaaagcctgagtccctccagag

SEQ ID NO: 244764 - DNA, 25 bp, Homo sapien
cttccatgatggaagcatggtaacg

SEQ ID NO: 244765 - DNA, 25 bp, Homo sapien
ccatcagccatttgggcctccccga

SEQ ID NO: 244766 - DNA, 25 bp, Homo sapien
atcagccatttgggcctccccgagc

SEQ ID NO: 244767 - DNA, 25 bp, Homo sapien
catcagccatttgggcctccccgag

SEQ ID NO: 244768 - DNA, 25 bp, Homo sapien
ggccttgtcatagcaggcacccaag

SEQ ID NO: 244769 - DNA, 25 bp, Homo sapien
tcgtcttcttcgaggatggcggcct

SEQ ID NO: 244770 - DNA, 25 bp, Homo sapien
cactttcctgagctcggagcgtgag

SEQ ID NO: 244771 - DNA, 25 bp, Homo sapien
cagatgcctttcgtgggtgagagca

SEQ ID NO: 244772 - DNA, 25 bp, Homo sapien
gaggctctaggagcaacgtcgtgcc

SEQ ID NO: 244773 - DNA, 25 bp, Homo sapien
ggctctaggagcaacgtcgtgcccc

SEQ ID NO: 244774 - DNA, 25 bp, Homo sapien
gagcaacgtcgtgccccctgggcat

SEQ ID NO: 244775 - DNA, 25 bp, Homo sapien
ctgaggctctaggagcaacgtcgtg

SEQ ID NO: 244776 - DNA, 25 bp, Homo sapien
aactatgtgtgaataggtagcgacg

SEQ ID NO: 244777 - DNA, 25 bp, Homo sapien
caacgcgcacgtatgaactatgtgt

SEQ ID NO: 244778 - DNA, 25 bp, Homo sapien
tagcgacgtaggtatcgctgagaag

SEQ ID NO: 244779 - DNA, 25 bp, Homo sapien
gacgatgtaagacgtacaacgcgca

SEQ ID NO: 244780 - DNA, 25 bp, Homo sapien
tttgaaggtgtccaaagccgtttgc

SEQ ID NO: 244781 - DNA, 25 bp, Homo sapien
tttctgcgtcaagtcctaacagcca

SEQ ID NO: 244782 - DNA, 25 bp, Homo sapien
tctgagctgggatctccacgtccca

SEQ ID NO: 244783 - DNA, 25 bp, Homo sapien
gatccaactcactgcctctaaggga

SEQ ID NO: 244784 - DNA, 25 bp, Homo sapien
ctcgatcgccgtttctgacatgtga

SEQ ID NO: 244785 - DNA, 25 bp, Homo sapien
cagcagcggaaactttgggcctggc

SEQ ID NO: 244786 - DNA, 25 bp, Homo sapien
ggccggtgcaaaacatgcttcccag

SEQ ID NO: 244787 - DNA, 25 bp, Homo sapien
gctgactccgccagcagcggaaact

SEQ ID NO: 244788 - DNA, 25 bp, Homo sapien
caagcaaattatcagctgccacaag

SEQ ID NO: 244789 - DNA, 25 bp, Homo sapien
ggctggctattcaacacccaagcaa

SEQ ID NO: 244790 - DNA, 25 bp, Homo sapien
acagtaaaatagctcaggctggcta

SEQ ID NO: 244791 - DNA, 25 bp, Homo sapien
tgctggaccaacatcccgtgaatgt

SEQ ID NO: 244792 - DNA, 25 bp, Homo sapien
gcttgtgcagaagacgcaagaaatg

SEQ ID NO: 244793 - DNA, 25 bp, Homo sapien
aatagcctgctctcggcacttttta

SEQ ID NO: 244794 - DNA, 25 bp, Homo sapien
tttccacgcgtctccaaatagcctg

SEQ ID NO: 244795 - DNA, 25 bp, Homo sapien
gtccttctctttccacgcgtctcca

SEQ ID NO: 244796 - DNA, 25 bp, Homo sapien
ggaggcagtcagcacacggcgtttc

SEQ ID NO: 244797 - DNA, 25 bp, Homo sapien
acttgctcaagggaggcagtcagca

SEQ ID NO: 244798 - DNA, 25 bp, Homo sapien
gcagtcagcacacggcgtttcttgg

SEQ ID NO: 244799 - DNA, 25 bp, Homo sapien
tcaagggaggcagtcagcacacggc

SEQ ID NO: 244800 - DNA, 25 bp, Homo sapien
tgcaattatacagaggctacgtggg

SEQ ID NO: 244801 - DNA, 25 bp, Homo sapien
tcctcaaaaacaacccttgcaatta

SEQ ID NO: 244802 - DNA, 25 bp, Homo sapien
cctggagaaattaagcctctgcaag

SEQ ID NO: 244803 - DNA, 25 bp, Homo sapien
gcaagtatagacgttttaacaacca

SEQ ID NO: 244804 - DNA, 25 bp, Homo sapien
gagaaaggcggctgcggaatcctag

SEQ ID NO: 244805 - DNA, 25 bp, Homo sapien
ggaatcctaggactggcgcggccgg

SEQ ID NO: 244806 - DNA, 25 bp, Homo sapien
gggcttgagcccggcaaacagccgc

SEQ ID NO: 244807 - DNA, 25 bp, Homo sapien
caaacagccgcgcagctggattatt

SEQ ID NO: 244808 - DNA, 25 bp, Homo sapien
ccctctgggacaagtgctgcgggtt

SEQ ID NO: 244809 - DNA, 25 bp, Homo sapien
agctccctctgggacaagtgctgcg

SEQ ID NO: 244810 - DNA, 25 bp, Homo sapien
caagtgctgcgggttgccctgtttg

SEQ ID NO: 244811 - DNA, 25 bp, Homo sapien
aagtgctgcgggttgccctgtttgc

SEQ ID NO: 244812 - DNA, 25 bp, Homo sapien
ggcatctattctggcatcgcccgga

SEQ ID NO: 244813 - DNA, 25 bp, Homo sapien
ccggcatctattctggcatcgcccg

SEQ ID NO: 244814 - DNA, 25 bp, Homo sapien
atctattctggcatcgcccggagag

SEQ ID NO: 244815 - DNA, 25 bp, Homo sapien
gccccggcatctattctggcatcgc

SEQ ID NO: 244816 - DNA, 25 bp, Homo sapien
aagcaagaaaaacctctcgatctaa

SEQ ID NO: 244817 - DNA, 25 bp, Homo sapien
aaaagcaagaaaaacctctcgatct

SEQ ID NO: 244818 - DNA, 25 bp, Homo sapien
aaagcaagaaaaacctctcgatcta

SEQ ID NO: 244819 - DNA, 25 bp, Homo sapien
tgcactagagacaaaaagacccaga

SEQ ID NO: 244820 - DNA, 25 bp, Homo sapien
aagacccagagagtcggagcactgg

SEQ ID NO: 244821 - DNA, 25 bp, Homo sapien
ggcgactagcggtggctttttaaca

SEQ ID NO: 244822 - DNA, 25 bp, Homo sapien
tgcggacgtgacgtttaatctgcac

SEQ ID NO: 244823 - DNA, 25 bp, Homo sapien
gcttcgcgggcgagtccagctgcac

SEQ ID NO: 244824 - DNA, 25 bp, Homo sapien
gcctggctccggctaggcttcgcgg

SEQ ID NO: 244825 - DNA, 25 bp, Homo sapien
tccggctaggcttcgcgggcgagtc

SEQ ID NO: 244826 - DNA, 25 bp, Homo sapien
ctaggcttcgcgggcgagtccagct

SEQ ID NO: 244827 - DNA, 25 bp, Homo sapien
attgtacccagaccacacattccgg

SEQ ID NO: 244828 - DNA, 25 bp, Homo sapien
agactgaagagtgaggacgcctgtt

SEQ ID NO: 244829 - DNA, 25 bp, Homo sapien
ggtttggtattgtacccagaccaca

SEQ ID NO: 244830 - DNA, 25 bp, Homo sapien
cacaggcatctgcagtttcattatt

SEQ ID NO: 244831 - DNA, 25 bp, Homo sapien
tattccttcccatgcaacttattga

SEQ ID NO: 244832 - DNA, 25 bp, Homo sapien
ccggtataaataagttatgctgcag

SEQ ID NO: 244833 - DNA, 25 bp, Homo sapien
ggaagaaattttgttgtagcaatta

SEQ ID NO: 244834 - DNA, 25 bp, Homo sapien
acagctacaccggtataaataagtt

SEQ ID NO: 244835 - DNA, 25 bp, Homo sapien
tgttatctgctagtagcaggtcact

SEQ ID NO: 244836 - DNA, 25 bp, Homo sapien
tatctgctagtagcaggtcactggg

SEQ ID NO: 244837 - DNA, 25 bp, Homo sapien
atagttgttatctgctagtagcagg

SEQ ID NO: 244838 - DNA, 25 bp, Homo sapien
tttgccaatacccagaggaaaacat

SEQ ID NO: 244839 - DNA, 25 bp, Homo sapien
ccttctggaacagcgaaggctacag

SEQ ID NO: 244840 - DNA, 25 bp, Homo sapien
cttctggaacagcgaaggctacagg

SEQ ID NO: 244841 - DNA, 25 bp, Homo sapien
ttctggaacagcgaaggctacagga

SEQ ID NO: 244842 - DNA, 25 bp, Homo sapien
ttgagagctgcgcttccagccccgg

SEQ ID NO: 244843 - DNA, 25 bp, Homo sapien
ctttgagagctgcgcttccagcccc

SEQ ID NO: 244844 - DNA, 25 bp, Homo sapien
agagctgcgcttccagccccgggcc

SEQ ID NO: 244845 - DNA, 25 bp, Homo sapien
agctgcgcttccagccccgggccat

SEQ ID NO: 244846 - DNA, 25 bp, Homo sapien
gagacgattcttcagcagccagtag

SEQ ID NO: 244847 - DNA, 25 bp, Homo sapien
tgccagggttatgagtcaaagctcc

SEQ ID NO: 244848 - DNA, 25 bp, Homo sapien
agtaggacccactcgaagcgcgtca

SEQ ID NO: 244849 - DNA, 25 bp, Homo sapien
tccccaagtattatcgctgcatata

SEQ ID NO: 244850 - DNA, 25 bp, Homo sapien
aatgcgtttgaggtcgacaaggatg

SEQ ID NO: 244851 - DNA, 25 bp, Homo sapien
gaaatgcgtttgaggtcgacaagga

SEQ ID NO: 244852 - DNA, 25 bp, Homo sapien
gatgagtctggatccgattagcctt

SEQ ID NO: 244853 - DNA, 25 bp, Homo sapien
gatccgattagccttccaatccctt

SEQ ID NO: 244854 - DNA, 25 bp, Homo sapien
tgaagaaggttatggtcttagggac

SEQ ID NO: 244855 - DNA, 25 bp, Homo sapien
ttgaagaaggttatggtcttaggga

SEQ ID NO: 244856 - DNA, 25 bp, Homo sapien
cagtttgaagaaggttatggtctta

SEQ ID NO: 244857 - DNA, 25 bp, Homo sapien
gcagcagtttgaagaaggttatggt

SEQ ID NO: 244858 - DNA, 25 bp, Homo sapien
cacactggaccagttgtgagcgagc

SEQ ID NO: 244859 - DNA, 25 bp, Homo sapien
cagttgtgagcgagcggcataaacc

SEQ ID NO: 244860 - DNA, 25 bp, Homo sapien
taaaattaacacactggaccagttg

SEQ ID NO: 244861 - DNA, 25 bp, Homo sapien
cgagcggcataaaccaggagctgga

SEQ ID NO: 244862 - DNA, 25 bp, Homo sapien
gctggcctgcactttggcgtcatgg

SEQ ID NO: 244863 - DNA, 25 bp, Homo sapien
tcgttgctagactgaggatgctggc

SEQ ID NO: 244864 - DNA, 25 bp, Homo sapien
gaaggttcctggtgtcgttgctaga

SEQ ID NO: 244865 - DNA, 25 bp, Homo sapien
cataagacgctgctgggaaggttcc

SEQ ID NO: 244866 - DNA, 25 bp, Homo sapien
tccaaggttcctgaagagcagacat

SEQ ID NO: 244867 - DNA, 25 bp, Homo sapien
tgaaccccagcagacctgcttgatg

SEQ ID NO: 244868 - DNA, 25 bp, Homo sapien
tggccaccaagtgggcaagaggctt

SEQ ID NO: 244869 - DNA, 25 bp, Homo sapien
gagcagacatcttgggccatgggcc

SEQ ID NO: 244870 - DNA, 25 bp, Homo sapien
agtcttagagaggattaaaatagga

SEQ ID NO: 244871 - DNA, 25 bp, Homo sapien
gagtcttagagaggattaaaatagg

SEQ ID NO: 244872 - DNA, 25 bp, Homo sapien
gtcttagagaggattaaaataggaa

SEQ ID NO: 244873 - DNA, 25 bp, Homo sapien
tgctcggaggagacttcagagtgtc

SEQ ID NO: 244874 - DNA, 25 bp, Homo sapien
ctgcttgtcacctccgtgttttatt

SEQ ID NO: 244875 - DNA, 25 bp, Homo sapien
gagcccagtgaacgggtctggcctt

SEQ ID NO: 244876 - DNA, 25 bp, Homo sapien
gtcgcgctgacatttcaacttctcc

SEQ ID NO: 244877 - DNA, 25 bp, Homo sapien
agagtgccattatgtgcatgatgcc

SEQ ID NO: 244878 - DNA, 25 bp, Homo sapien
tcgccagtgacttctagaagaagat

SEQ ID NO: 244879 - DNA, 25 bp, Homo sapien
gccaacgataatggcaagtcgccag

SEQ ID NO: 244880 - DNA, 25 bp, Homo sapien
agcccctgagagtgccattatgtgc

SEQ ID NO: 244881 - DNA, 25 bp, Homo sapien
aaaagtcatctgcataacacggccc

SEQ ID NO: 244882 - DNA, 25 bp, Homo sapien
ctcctgtcctgtggagactttgtcc

SEQ ID NO: 244883 - DNA, 25 bp, Homo sapien
agccacggccactactctggagagg

SEQ ID NO: 244884 - DNA, 25 bp, Homo sapien
ctggtcaaactgctcctcaaaaggg

SEQ ID NO: 244885 - DNA, 25 bp, Homo sapien
agggcaagtgagtgaccgtctacat

SEQ ID NO: 244886 - DNA, 25 bp, Homo sapien
caataacacaaagccagcaggtcag

SEQ ID NO: 244887 - DNA, 25 bp, Homo sapien
acacaagtccccgaaagcaataaca

SEQ ID NO: 244888 - DNA, 25 bp, Homo sapien
agaggtggggtcagcacacaagtcc

SEQ ID NO: 244889 - DNA, 25 bp, Homo sapien
gagtgaccgtccacacggtcaggga

SEQ ID NO: 244890 - DNA, 25 bp, Homo sapien
gtgaccgtccacacggtcagggaga

SEQ ID NO: 244891 - DNA, 25 bp, Homo sapien
agtgaccgtccacacggtcagggag

SEQ ID NO: 244892 - DNA, 25 bp, Homo sapien
tgaccgtccacacggtcagggagag

SEQ ID NO: 244893 - DNA, 25 bp, Homo sapien
cagccccacatagggctggtcacat

SEQ ID NO: 244894 - DNA, 25 bp, Homo sapien
tagggctggtcacatggggggttca

SEQ ID NO: 244895 - DNA, 25 bp, Homo sapien
ctggggcttccatggacacaagggc

SEQ ID NO: 244896 - DNA, 25 bp, Homo sapien
ggcttccatggacacaagggctgtg

SEQ ID NO: 244897 - DNA, 25 bp, Homo sapien
atgaacacatccatccgcacaggtg

SEQ ID NO: 244898 - DNA, 25 bp, Homo sapien
acatccatccgcacaggtgcttggc

SEQ ID NO: 244899 - DNA, 25 bp, Homo sapien
gggaatgaacacatccatccgcaca

SEQ ID NO: 244900 - DNA, 25 bp, Homo sapien
cacatccatccgcacaggtgcttgg

SEQ ID NO: 244901 - DNA, 25 bp, Homo sapien
ctgagcgtccaggtgcggtgcccct

SEQ ID NO: 244902 - DNA, 25 bp, Homo sapien
gtgtctccaaaagggctgaccggct

SEQ ID NO: 244903 - DNA, 25 bp, Homo sapien
aaatgtggcccctgagcgtccaggt

SEQ ID NO: 244904 - DNA, 25 bp, Homo sapien
tttccttgctcttgacaaatgtggc

SEQ ID NO: 244905 - DNA, 25 bp, Homo sapien
ctcgttctccatcgttgccattatg

SEQ ID NO: 244906 - DNA, 25 bp, Homo sapien
atcatcctcaccctccgtcttcact

SEQ ID NO: 244907 - DNA, 25 bp, Homo sapien
tccatcgttgccattatggccacca

SEQ ID NO: 244908 - DNA, 25 bp, Homo sapien
ttctccatcgttgccattatggcca

SEQ ID NO: 244909 - DNA, 25 bp, Homo sapien
gaaaactgacctatcctgtgaagcc

SEQ ID NO: 244910 - DNA, 25 bp, Homo sapien
actttgtatctcatggaggccccga

SEQ ID NO: 244911 - DNA, 25 bp, Homo sapien
caaaaagttatgcacgcttgccctg

SEQ ID NO: 244912 - DNA, 25 bp, Homo sapien
cagacagtgggtcatgactccgcaa

SEQ ID NO: 244913 - DNA, 25 bp, Homo sapien
gaactgcccatttaagatactgaag

SEQ ID NO: 244914 - DNA, 25 bp, Homo sapien
cagatgtggcccatcaatgaacaca

SEQ ID NO: 244915 - DNA, 25 bp, Homo sapien
ttttctcggttactgctgacagtca

SEQ ID NO: 244916 - DNA, 25 bp, Homo sapien
gaacacagatcctccaactgccttg

SEQ ID NO: 244917 - DNA, 25 bp, Homo sapien
cccatgttgaggagcttctctgttg

SEQ ID NO: 244918 - DNA, 25 bp, Homo sapien
aacccatgttgaggagcttctctgt

SEQ ID NO: 244919 - DNA, 25 bp, Homo sapien
ctaacccatgttgaggagcttctct

SEQ ID NO: 244920 - DNA, 25 bp, Homo sapien
ccatgttgaggagcttctctgttgc

SEQ ID NO: 244921 - DNA, 25 bp, Homo sapien
ttcagctagggttaccgtcaacact

SEQ ID NO: 244922 - DNA, 25 bp, Homo sapien
gtcatatccgggctctccgcaaagt

SEQ ID NO: 244923 - DNA, 25 bp, Homo sapien
tctccgcaaagtaccctccaaacca

SEQ ID NO: 244924 - DNA, 25 bp, Homo sapien
accgtcaacactgtcatatccgggc

SEQ ID NO: 244925 - DNA, 25 bp, Homo sapien
tgtgctgtggtctcgcctgcctttg

SEQ ID NO: 244926 - DNA, 25 bp, Homo sapien
aacagttccgttcttgtgggcgcca

SEQ ID NO: 244927 - DNA, 25 bp, Homo sapien
caaatgcttaagttgtagctccaag

SEQ ID NO: 244928 - DNA, 25 bp, Homo sapien
ttagggcaatcctacccaactcagg

SEQ ID NO: 244929 - DNA, 25 bp, Homo sapien
tgggtcccaggaaccgacatcacaa

SEQ ID NO: 244930 - DNA, 25 bp, Homo sapien
ctttggacaatttagtaccattctt

SEQ ID NO: 244931 - DNA, 25 bp, Homo sapien
gactttggacaatttagtaccattc

SEQ ID NO: 244932 - DNA, 25 bp, Homo sapien
ctgggtcccaggaaccgacatcaca

SEQ ID NO: 244933 - DNA, 25 bp, Homo sapien
aaatctctagcttgttgtgaaaacc

SEQ ID NO: 244934 - DNA, 25 bp, Homo sapien
taggtctgcaaaatctcccacaggc

SEQ ID NO: 244935 - DNA, 25 bp, Homo sapien
cagcgatgtgaacggactgtccgtc

SEQ ID NO: 244936 - DNA, 25 bp, Homo sapien
tgcacaccaccacgtgaagctgtgg

SEQ ID NO: 244937 - DNA, 25 bp, Homo sapien
tcctttggcgtcttcaactgctctt

SEQ ID NO: 244938 - DNA, 25 bp, Homo sapien
agaagatcctttggcgtcttcaact

SEQ ID NO: 244939 - DNA, 25 bp, Homo sapien
aagatcctttggcgtcttcaactgc

SEQ ID NO: 244940 - DNA, 25 bp, Homo sapien
gatcctttggcgtcttcaactgctc

SEQ ID NO: 244941 - DNA, 25 bp, Homo sapien
catatttgggaagcggagccttttc

SEQ ID NO: 244942 - DNA, 25 bp, Homo sapien
tcacctaagcgcaatttgatggcca

SEQ ID NO: 244943 - DNA, 25 bp, Homo sapien
gatggccatttttgcacgaacagaa

SEQ ID NO: 244944 - DNA, 25 bp, Homo sapien
tagtattcccggttgacagctgcac

SEQ ID NO: 244945 - DNA, 25 bp, Homo sapien
caagagcaaaattaattacaagaag

SEQ ID NO: 244946 - DNA, 25 bp, Homo sapien
attaattacaagaagtctaaaccag

SEQ ID NO: 244947 - DNA, 25 bp, Homo sapien
taattacaagaagtctaaaccagca

SEQ ID NO: 244948 - DNA, 25 bp, Homo sapien
ttacaagaagtctaaaccagcaaaa

SEQ ID NO: 244949 - DNA, 25 bp, Homo sapien
aaaagaagtgaggctctatcttcaa

SEQ ID NO: 244950 - DNA, 25 bp, Homo sapien
tcttcaagaaatgtccaaagtttga

SEQ ID NO: 244951 - DNA, 25 bp, Homo sapien
aaagaagtgaggctctatcttcaag

SEQ ID NO: 244952 - DNA, 25 bp, Homo sapien
cttcaagaaatgtccaaagtttgac

SEQ ID NO: 244953 - DNA, 25 bp, Homo sapien
ttccccaaggtgaagattctatcaa

SEQ ID NO: 244954 - DNA, 25 bp, Homo sapien
gattctatcaatagcgctgtctccc

SEQ ID NO: 244955 - DNA, 25 bp, Homo sapien
ctcgttgtcccagctaacaggaaat

SEQ ID NO: 244956 - DNA, 25 bp, Homo sapien
cagctaacaggaaattccgagttcc

SEQ ID NO: 244957 - DNA, 25 bp, Homo sapien
catacagaatactcggagaaaagcc

SEQ ID NO: 244958 - DNA, 25 bp, Homo sapien
ggcggctcggtaaaatgcaatgcaa

SEQ ID NO: 244959 - DNA, 25 bp, Homo sapien
gctgagcagagatgggcggctcggt

SEQ ID NO: 244960 - DNA, 25 bp, Homo sapien
cttcagtcatacagaatactcggag

SEQ ID NO: 244961 - DNA, 25 bp, Homo sapien
cgtagagtctgtcacttttactcac

SEQ ID NO: 244962 - DNA, 25 bp, Homo sapien
cactctgtcgtgtgagttattgtca

SEQ ID NO: 244963 - DNA, 25 bp, Homo sapien
gagccaagacctcggccttcatggc

SEQ ID NO: 244964 - DNA, 25 bp, Homo sapien
tgtggatcacaaactctgcgttgga

SEQ ID NO: 244965 - DNA, 25 bp, Homo sapien
cttccaggttgtaaccagtagtgat

SEQ ID NO: 244966 - DNA, 25 bp, Homo sapien
tcttccaggttgtaaccagtagtga

SEQ ID NO: 244967 - DNA, 25 bp, Homo sapien
atcttccaggttgtaaccagtagtg

SEQ ID NO: 244968 - DNA, 25 bp, Homo sapien
ggcactcccagggtgctggcagtac

SEQ ID NO: 244969 - DNA, 25 bp, Homo sapien
catatcatgaactcccaggagggag

SEQ ID NO: 244970 - DNA, 25 bp, Homo sapien
ccagggtgctggcagtacaggtaca

SEQ ID NO: 244971 - DNA, 25 bp, Homo sapien
agaagctgcccatatcatgaactcc

SEQ ID NO: 244972 - DNA, 25 bp, Homo sapien
gagtgagtcccgtaagtgcctaagg

SEQ ID NO: 244973 - DNA, 25 bp, Homo sapien
caaaatcaccctgcgttcatggatc

SEQ ID NO: 244974 - DNA, 25 bp, Homo sapien
gaaacaagcggatctggacaataga

SEQ ID NO: 244975 - DNA, 25 bp, Homo sapien
ggcgtagtcattccacatagggtgc

SEQ ID NO: 244976 - DNA, 25 bp, Homo sapien
agaggcgacagcaagagcgaaggaa

SEQ ID NO: 244977 - DNA, 25 bp, Homo sapien
ttaggcagaggcgacagcaagagcg

SEQ ID NO: 244978 - DNA, 25 bp, Homo sapien
aggcagaggcgacagcaagagcgaa

SEQ ID NO: 244979 - DNA, 25 bp, Homo sapien
aggcgacagcaagagcgaaggaatc

SEQ ID NO: 244980 - DNA, 25 bp, Homo sapien
aagaatagcagggaaccagaggtga

SEQ ID NO: 244981 - DNA, 25 bp, Homo sapien
ctgaagaatagcagggaaccagagg

SEQ ID NO: 244982 - DNA, 25 bp, Homo sapien
atagcagggaaccagaggtgagtca

SEQ ID NO: 244983 - DNA, 25 bp, Homo sapien
aatagcagggaaccagaggtgagtc

SEQ ID NO: 244984 - DNA, 25 bp, Homo sapien
cacctggtagagtcgcagattcaaa

SEQ ID NO: 244985 - DNA, 25 bp, Homo sapien
gaagtatccttgtcatatcaaccga

SEQ ID NO: 244986 - DNA, 25 bp, Homo sapien
aaagaacttccctccgttgtgcctg

SEQ ID NO: 244987 - DNA, 25 bp, Homo sapien
gggaactaataccactgtctaacag

SEQ ID NO: 244988 - DNA, 25 bp, Homo sapien
tgccaatggatggaagcttcgctag

SEQ ID NO: 244989 - DNA, 25 bp, Homo sapien
gcttcgctagggaccacggtggcct

SEQ ID NO: 244990 - DNA, 25 bp, Homo sapien
tcaacaccatcaggtggactgtggg

SEQ ID NO: 244991 - DNA, 25 bp, Homo sapien
gctcaccttgctacagaggttcctg

SEQ ID NO: 244992 - DNA, 25 bp, Homo sapien
cttcccaggtatgatgatgccagct

SEQ ID NO: 244993 - DNA, 25 bp, Homo sapien
cactacgtgtgttctggccattcca

SEQ ID NO: 244994 - DNA, 25 bp, Homo sapien
taaacatggccagggattcgtcagc

SEQ ID NO: 244995 - DNA, 25 bp, Homo sapien
tacgatgggtaggtggaataacagc

SEQ ID NO: 244996 - DNA, 25 bp, Homo sapien
tcaacacaacacaggggaagaggtc

SEQ ID NO: 244997 - DNA, 25 bp, Homo sapien
caacacaacacaggggaagaggtcg

SEQ ID NO: 244998 - DNA, 25 bp, Homo sapien
aacacaacacaggggaagaggtcgt

SEQ ID NO: 244999 - DNA, 25 bp, Homo sapien
cacaacacaggggaagaggtcgtta

SEQ ID NO: 245000 - DNA, 25 bp, Homo sapien
cacatatcccataaaggaatcagag

SEQ ID NO: 245001 - DNA, 25 bp, Homo sapien
cgtcataacagaagagactgcccac

SEQ ID NO: 245002 - DNA, 25 bp, Homo sapien
ggaatttggttttgcctcgtcataa

SEQ ID NO: 245003 - DNA, 25 bp, Homo sapien
cgcgggaaccatcctctgtgggaat

SEQ ID NO: 245004 - DNA, 25 bp, Homo sapien
aaggtaatgtttggccttcatcatc

SEQ ID NO: 245005 - DNA, 25 bp, Homo sapien
taaaagccaattgcagtaagaaata

SEQ ID NO: 245006 - DNA, 25 bp, Homo sapien
acatttaaaagccaattgcagtaag

SEQ ID NO: 245007 - DNA, 25 bp, Homo sapien
taaatggtgacttaaggttggaaca

SEQ ID NO: 245008 - DNA, 25 bp, Homo sapien
ctgtagtcctcgtaagtgaaagaat

SEQ ID NO: 245009 - DNA, 25 bp, Homo sapien
atccttcaagggtagtttgttggca

SEQ ID NO: 245010 - DNA, 25 bp, Homo sapien
agaatccttcaagggtagtttgttg

SEQ ID NO: 245011 - DNA, 25 bp, Homo sapien
ttcaagggtagtttgttggcatgag

SEQ ID NO: 245012 - DNA, 25 bp, Homo sapien
tcactgtaatgtactcgctggcacc

SEQ ID NO: 245013 - DNA, 25 bp, Homo sapien
taatgcaggaagctccatgtagcct

SEQ ID NO: 245014 - DNA, 25 bp, Homo sapien
tcgtgacgcattggcatcacaagtg

SEQ ID NO: 245015 - DNA, 25 bp, Homo sapien
gcctgcagttttcactcgtgacgca

SEQ ID NO: 245016 - DNA, 25 bp, Homo sapien
ggtgaggctgggaacctgccaggtc

SEQ ID NO: 245017 - DNA, 25 bp, Homo sapien
aagcatgctgcccaaccacttgtgc

SEQ ID NO: 245018 - DNA, 25 bp, Homo sapien
gaacatgtagcacacacccttcgaa

SEQ ID NO: 245019 - DNA, 25 bp, Homo sapien
tgccaggtcatccaagcatgctgcc

SEQ ID NO: 245020 - DNA, 25 bp, Homo sapien
tatggcacctggaaacttcacaaca

SEQ ID NO: 245021 - DNA, 25 bp, Homo sapien
caacactcagcacccgggagcagaa

SEQ ID NO: 245022 - DNA, 25 bp, Homo sapien
gaggacacggggcttcggagggtgc

SEQ ID NO: 245023 - DNA, 25 bp, Homo sapien
cttgcactaactgttatggcacctg

SEQ ID NO: 245024 - DNA, 25 bp, Homo sapien
acctcgctcggccaacgagggcaga

SEQ ID NO: 245025 - DNA, 25 bp, Homo sapien
cgctcggccaacgagggcagaggcc

SEQ ID NO: 245026 - DNA, 25 bp, Homo sapien
tcgctcggccaacgagggcagaggc

SEQ ID NO: 245027 - DNA, 25 bp, Homo sapien
cctcgctcggccaacgagggcagag

SEQ ID NO: 245028 - DNA, 25 bp, Homo sapien
ctggggagcatccggagcgcctcct

SEQ ID NO: 245029 - DNA, 25 bp, Homo sapien
ggcagctggggagcatccggagcgc

SEQ ID NO: 245030 - DNA, 25 bp, Homo sapien
ggagcatccggagcgcctcctgtca

SEQ ID NO: 245031 - DNA, 25 bp, Homo sapien
gcaagagagcgtggggggcagctgg

SEQ ID NO: 245032 - DNA, 25 bp, Homo sapien
tgttttcattctttgaaacagatga

SEQ ID NO: 245033 - DNA, 25 bp, Homo sapien
ctgttttcattctttgaaacagatg

SEQ ID NO: 245034 - DNA, 25 bp, Homo sapien
gttttcattctttgaaacagatgaa

SEQ ID NO: 245035 - DNA, 25 bp, Homo sapien
tttcattctttgaaacagatgaaaa

SEQ ID NO: 245036 - DNA, 25 bp, Homo sapien
tccttccatttcacacctggcttca

SEQ ID NO: 245037 - DNA, 25 bp, Homo sapien
tccatttcacacctggcttcacaca

SEQ ID NO: 245038 - DNA, 25 bp, Homo sapien
ccatttcacacctggcttcacacac

SEQ ID NO: 245039 - DNA, 25 bp, Homo sapien
ctttccttccatttcacacctggct

SEQ ID NO: 245040 - DNA, 25 bp, Homo sapien
tgagggacttggctatggtcacaaa

SEQ ID NO: 245041 - DNA, 25 bp, Homo sapien
tatggtcacaaagtgaataactgac

SEQ ID NO: 245042 - DNA, 25 bp, Homo sapien
agggctccaatgtctggtcatcggt

SEQ ID NO: 245043 - DNA, 25 bp, Homo sapien
tcatcggtctttccacctgtattag

SEQ ID NO: 245044 - DNA, 25 bp, Homo sapien
tcttgccttttacatccaatacagg

SEQ ID NO: 245045 - DNA, 25 bp, Homo sapien
cttgccttttacatccaatacaggg

SEQ ID NO: 245046 - DNA, 25 bp, Homo sapien
ttcttgccttttacatccaatacag

SEQ ID NO: 245047 - DNA, 25 bp, Homo sapien
tcagggactaaacaacacaggtggg

SEQ ID NO: 245048 - DNA, 25 bp, Homo sapien
gcaaaatgacaaaagtacgcaaacc

SEQ ID NO: 245049 - DNA, 25 bp, Homo sapien
taacacgtgaccaagctcagggact

SEQ ID NO: 245050 - DNA, 25 bp, Homo sapien
tgttcttcccgatgagactgaatgt

SEQ ID NO: 245051 - DNA, 25 bp, Homo sapien
aggcgcacgctaccaggcctgggtg

SEQ ID NO: 245052 - DNA, 25 bp, Homo sapien
cgcacgctaccaggcctgggtgatt

SEQ ID NO: 245053 - DNA, 25 bp, Homo sapien
agtggcactcagttcaaacctccgc

SEQ ID NO: 245054 - DNA, 25 bp, Homo sapien
gcagtggcactcagttcaaacctcc

SEQ ID NO: 245055 - DNA, 25 bp, Homo sapien
cagaactattagattacaagggcac

SEQ ID NO: 245056 - DNA, 25 bp, Homo sapien
gccaggctgagctagtgggtcacaa

SEQ ID NO: 245057 - DNA, 25 bp, Homo sapien
gaatttccatgctcgcttaggcagc

SEQ ID NO: 245058 - DNA, 25 bp, Homo sapien
ggataatctgcccagcacaaactta

SEQ ID NO: 245059 - DNA, 25 bp, Homo sapien
gcctgagcaacatggcaaaaactca

SEQ ID NO: 245060 - DNA, 25 bp, Homo sapien
catctctacaaaaaaatataaaaat

SEQ ID NO: 245061 - DNA, 25 bp, Homo sapien
tagctgggcatggtggtgcacgctg

SEQ ID NO: 245062 - DNA, 25 bp, Homo sapien
tgagcaacatggcaaaaactcatct

SEQ ID NO: 245063 - DNA, 25 bp, Homo sapien
ggaagacgacctgaacttggtctca

SEQ ID NO: 245064 - DNA, 25 bp, Homo sapien
aatactcaggctctcaaattcgaag

SEQ ID NO: 245065 - DNA, 25 bp, Homo sapien
tgttcaggccatatcaattccaggt

SEQ ID NO: 245066 - DNA, 25 bp, Homo sapien
gagtggactgcaagctcgtaaggac

SEQ ID NO: 245067 - DNA, 25 bp, Homo sapien
ccaggctggaagtgatttgagaaga

SEQ ID NO: 245068 - DNA, 25 bp, Homo sapien
aaatatccaacaaatgcatactgag

SEQ ID NO: 245069 - DNA, 25 bp, Homo sapien
gctcttcaaaagtgccggggtcatg

SEQ ID NO: 245070 - DNA, 25 bp, Homo sapien
tctacaaagtaaccggtcaggccag

SEQ ID NO: 245071 - DNA, 25 bp, Homo sapien
actgtggtactggccctgttccttc

SEQ ID NO: 245072 - DNA, 25 bp, Homo sapien
tatgtaaccgcatttcattgatatt

SEQ ID NO: 245073 - DNA, 25 bp, Homo sapien
catcaaatggaatatttatggactc

SEQ ID NO: 245074 - DNA, 25 bp, Homo sapien
gtttaagtatccttaataagacatc

SEQ ID NO: 245075 - DNA, 25 bp, Homo sapien
ttatggactcaattcctctttcctc

SEQ ID NO: 245076 - DNA, 25 bp, Homo sapien
cacagcaaatgaaaggccagtgcga

SEQ ID NO: 245077 - DNA, 25 bp, Homo sapien
tagaagtaggcgtactgtcgagctg

SEQ ID NO: 245078 - DNA, 25 bp, Homo sapien
aaggagttagggctggctcgctcac

SEQ ID NO: 245079 - DNA, 25 bp, Homo sapien
cagtgcgatgtttcccatggcttga

SEQ ID NO: 245080 - DNA, 25 bp, Homo sapien
cagtcattagcaattttcgtggaac

SEQ ID NO: 245081 - DNA, 25 bp, Homo sapien
gattcaacagtcattagcaattttc

SEQ ID NO: 245082 - DNA, 25 bp, Homo sapien
caacagtcattagcaattttcgtgg

SEQ ID NO: 245083 - DNA, 25 bp, Homo sapien
tagcaattttcgtggaacccataaa

SEQ ID NO: 245084 - DNA, 25 bp, Homo sapien
catccacacaaatactgccttgaat

SEQ ID NO: 245085 - DNA, 25 bp, Homo sapien
tgaggaaagtccacagctcggatct

SEQ ID NO: 245086 - DNA, 25 bp, Homo sapien
aagcacatagtgaggaaagtccaca

SEQ ID NO: 245087 - DNA, 25 bp, Homo sapien
cacagctcggatcttctgggcagca

SEQ ID NO: 245088 - DNA, 25 bp, Homo sapien
accatttcaaaaccctcgacagaag

SEQ ID NO: 245089 - DNA, 25 bp, Homo sapien
catttcaaaaccctcgacagaagcc

SEQ ID NO: 245090 - DNA, 25 bp, Homo sapien
atctcttgttgctctcaaaccaaag

SEQ ID NO: 245091 - DNA, 25 bp, Homo sapien
tgttgctctcaaaccaaagccctct

SEQ ID NO: 245092 - DNA, 25 bp, Homo sapien
tagatcaggaaagtaatcttctctt

SEQ ID NO: 245093 - DNA, 25 bp, Homo sapien
gatcaggaaagtaatcttctctttt

SEQ ID NO: 245094 - DNA, 25 bp, Homo sapien
tcaggaaagtaatcttctctttttc

SEQ ID NO: 245095 - DNA, 25 bp, Homo sapien
agatcaggaaagtaatcttctcttt

SEQ ID NO: 245096 - DNA, 25 bp, Homo sapien
cagagtccggatctgcacatactct

SEQ ID NO: 245097 - DNA, 25 bp, Homo sapien
aaccagagtccggatctgcacatac

SEQ ID NO: 245098 - DNA, 25 bp, Homo sapien
tttctcaaccagagtccggatctgc

SEQ ID NO: 245099 - DNA, 25 bp, Homo sapien
gtattttctcaaccagagtccggat

SEQ ID NO: 245100 - DNA, 25 bp, Homo sapien
ggttcaagatttcctttggtgacac

SEQ ID NO: 245101 - DNA, 25 bp, Homo sapien
gttcaagatttcctttggtgacaca

SEQ ID NO: 245102 - DNA, 25 bp, Homo sapien
aggttcaagatttcctttggtgaca

SEQ ID NO: 245103 - DNA, 25 bp, Homo sapien
cacagcctggacacagcacctccac

SEQ ID NO: 245104 - DNA, 25 bp, Homo sapien
ggacacagcacctccacccttctgg

SEQ ID NO: 245105 - DNA, 25 bp, Homo sapien
cctggacacagcacctccacccttc

SEQ ID NO: 245106 - DNA, 25 bp, Homo sapien
agccaagagcaagggcacagcctgg

SEQ ID NO: 245107 - DNA, 25 bp, Homo sapien
taggcagctccagccacttcctcct

SEQ ID NO: 245108 - DNA, 25 bp, Homo sapien
ctaggcagctccagccacttcctcc

SEQ ID NO: 245109 - DNA, 25 bp, Homo sapien
ggcagctccagccacttcctcctgc

SEQ ID NO: 245110 - DNA, 25 bp, Homo sapien
cagctccagccacttcctcctgcac

SEQ ID NO: 245111 - DNA, 25 bp, Homo sapien
tgcccgcttcccctagcgcagcggg

SEQ ID NO: 245112 - DNA, 25 bp, Homo sapien
ttcccctagcgcagcgggaacgacg

SEQ ID NO: 245113 - DNA, 25 bp, Homo sapien
ctagcgcagcgggaacgacgtactc

SEQ ID NO: 245114 - DNA, 25 bp, Homo sapien
gcagcgggaacgacgtactccggcc

SEQ ID NO: 245115 - DNA, 25 bp, Homo sapien
ctctccgcccctccggtcgcttggt

SEQ ID NO: 245116 - DNA, 25 bp, Homo sapien
gcgtgatgacgtaggtccccgacat

SEQ ID NO: 245117 - DNA, 25 bp, Homo sapien
cgtctcaggacgcagcgtgatgacg

SEQ ID NO: 245118 - DNA, 25 bp, Homo sapien
gacgcagcgtgatgacgtaggtccc

SEQ ID NO: 245119 - DNA, 25 bp, Homo sapien
ctagaactggtagcggccctcgcac

SEQ ID NO: 245120 - DNA, 25 bp, Homo sapien
gccctcgcactggggggcagtcaga

SEQ ID NO: 245121 - DNA, 25 bp, Homo sapien
tagaactggtagcggccctcgcact

SEQ ID NO: 245122 - DNA, 25 bp, Homo sapien
agaactggtagcggccctcgcactg

SEQ ID NO: 245123 - DNA, 25 bp, Homo sapien
ttttcagggagttctacgattttga

SEQ ID NO: 245124 - DNA, 25 bp, Homo sapien
gattttgaggactgtctctattctg

SEQ ID NO: 245125 - DNA, 25 bp, Homo sapien
gttctacgattttgaggactgtctc

SEQ ID NO: 245126 - DNA, 25 bp, Homo sapien
tcatgaattgtttatattctgcctt

SEQ ID NO: 245127 - DNA, 25 bp, Homo sapien
tggacacatgttcgttttttgccat

SEQ ID NO: 245128 - DNA, 25 bp, Homo sapien
cagatacacagaaaaggttaggttt

SEQ ID NO: 245129 - DNA, 25 bp, Homo sapien
gctaccaggtgcaaggaggagaata

SEQ ID NO: 245130 - DNA, 25 bp, Homo sapien
gaagatcagatttccttcagagcta

SEQ ID NO: 245131 - DNA, 25 bp, Homo sapien
gaggagaatattcagccccaccatg

SEQ ID NO: 245132 - DNA, 25 bp, Homo sapien
catctttgatgtgggcacacgtttg

SEQ ID NO: 245133 - DNA, 25 bp, Homo sapien
cggtaccgccgagagggcgctcggt

SEQ ID NO: 245134 - DNA, 25 bp, Homo sapien
agggcgctcggttcatctttgatgt

SEQ ID NO: 245135 - DNA, 25 bp, Homo sapien
gtttggggctgtatcctgactctcc

SEQ ID NO: 245136 - DNA, 25 bp, Homo sapien
tcccatttctaagcgagcacaggga

SEQ ID NO: 245137 - DNA, 25 bp, Homo sapien
gggtgttcgccgaaactcgcagtcc

SEQ ID NO: 245138 - DNA, 25 bp, Homo sapien
tcgcagtccgactgcttgtcggtgg

SEQ ID NO: 245139 - DNA, 25 bp, Homo sapien
agcgagcacagggaacaccggaagc

SEQ ID NO: 245140 - DNA, 25 bp, Homo sapien
aggccaaggcatgctttgagcccag

SEQ ID NO: 245141 - DNA, 25 bp, Homo sapien
cctctgaatgttggacgcagcaggt

SEQ ID NO: 245142 - DNA, 25 bp, Homo sapien
tggccagctgtgcacatcgcctctg

SEQ ID NO: 245143 - DNA, 25 bp, Homo sapien
ctgaatgttggacgcagcaggtcct

SEQ ID NO: 245144 - DNA, 25 bp, Homo sapien
tgtgcacatcgcctctgaatgttgg

SEQ ID NO: 245145 - DNA, 25 bp, Homo sapien
gatgcgctagagaaggccagagtga

SEQ ID NO: 245146 - DNA, 25 bp, Homo sapien
tttcagaaggtgatgcgctagagaa

SEQ ID NO: 245147 - DNA, 25 bp, Homo sapien
cgatactccggaggcttccaagcct

SEQ ID NO: 245148 - DNA, 25 bp, Homo sapien
gcttgctctccaaaaggtggtcgat

SEQ ID NO: 245149 - DNA, 25 bp, Homo sapien
ctgttggtcggtgcacgtggctcac

SEQ ID NO: 245150 - DNA, 25 bp, Homo sapien
gtggctcacactggggctgacagca

SEQ ID NO: 245151 - DNA, 25 bp, Homo sapien
ttggtcggtgcacgtggctcacact

SEQ ID NO: 245152 - DNA, 25 bp, Homo sapien
cgtggctcacactggggctgacagc

SEQ ID NO: 245153 - DNA, 25 bp, Homo sapien
tactagtgaggacgttaaccagcca

SEQ ID NO: 245154 - DNA, 25 bp, Homo sapien
taatgtctgagagtcctgcactggg

SEQ ID NO: 245155 - DNA, 25 bp, Homo sapien
cagcctggatgagataacgtgagcc

SEQ ID NO: 245156 - DNA, 25 bp, Homo sapien
cagggtaccttgtataatgcacgac

SEQ ID NO: 245157 - DNA, 25 bp, Homo sapien
caggccttcgcagtctgtggcttat

SEQ ID NO: 245158 - DNA, 25 bp, Homo sapien
actctgggtggatccgcacagctgc

SEQ ID NO: 245159 - DNA, 25 bp, Homo sapien
gggacgcgggagaggcctggctgca

SEQ ID NO: 245160 - DNA, 25 bp, Homo sapien
tatccctttctttgttatgggtgga

SEQ ID NO: 245161 - DNA, 25 bp, Homo sapien
tgctgcgtagaacgcacacaggaac

SEQ ID NO: 245162 - DNA, 25 bp, Homo sapien
tgaagccttgctgcgtagaacgcac

SEQ ID NO: 245163 - DNA, 25 bp, Homo sapien
tgcgtagaacgcacacaggaacccg

SEQ ID NO: 245164 - DNA, 25 bp, Homo sapien
tgaaactttgaagccttgctgcgta

SEQ ID NO: 245165 - DNA, 25 bp, Homo sapien
ctgtccaccttgaggggccacggct

SEQ ID NO: 245166 - DNA, 25 bp, Homo sapien
cttgaggggccacggctctgtctgt

SEQ ID NO: 245167 - DNA, 25 bp, Homo sapien
tcactgtccaccttgaggggccacg

SEQ ID NO: 245168 - DNA, 25 bp, Homo sapien
tctgtggaaggggccccgactgagc

SEQ ID NO: 245169 - DNA, 25 bp, Homo sapien
gaccctgccacccacgacagaaaca

SEQ ID NO: 245170 - DNA, 25 bp, Homo sapien
cctgccacccacgacagaaacaagc

SEQ ID NO: 245171 - DNA, 25 bp, Homo sapien
ctgaccctgccacccacgacagaaa

SEQ ID NO: 245172 - DNA, 25 bp, Homo sapien
accctgccacccacgacagaaacaa

SEQ ID NO: 245173 - DNA, 25 bp, Homo sapien
tgtactcaggtacatggcgtcgctg

SEQ ID NO: 245174 - DNA, 25 bp, Homo sapien
agaaaatagacgtagctgccgggcc

SEQ ID NO: 245175 - DNA, 25 bp, Homo sapien
gccgcgtccggcttcaagatcaaga

SEQ ID NO: 245176 - DNA, 25 bp, Homo sapien
ccgtaacagcaggagggttctcaaa

SEQ ID NO: 245177 - DNA, 25 bp, Homo sapien
tatttcagtggtggccacgccaacc

SEQ ID NO: 245178 - DNA, 25 bp, Homo sapien
ttctttggactgcaagacccagagg

SEQ ID NO: 245179 - DNA, 25 bp, Homo sapien
tgtttgcaggagatccgcaggtacc

SEQ ID NO: 245180 - DNA, 25 bp, Homo sapien
tcaaaatggacccacagcccttggg

SEQ ID NO: 245181 - DNA, 25 bp, Homo sapien
ctttcccctgagagcaaacgggcag

SEQ ID NO: 245182 - DNA, 25 bp, Homo sapien
catgagacctgctgggtaggaagac

SEQ ID NO: 245183 - DNA, 25 bp, Homo sapien
gagcacaggagtctgacgaggacct

SEQ ID NO: 245184 - DNA, 25 bp, Homo sapien
cgtgtacacccctagtgaccgggag

SEQ ID NO: 245185 - DNA, 25 bp, Homo sapien
cgaaaagggacgtgcctcaggcatg

SEQ ID NO: 245186 - DNA, 25 bp, Homo sapien
agcgggcatcgggtggctgagcaca

SEQ ID NO: 245187 - DNA, 25 bp, Homo sapien
agggggatgacctccaaaagcaagg

SEQ ID NO: 245188 - DNA, 25 bp, Homo sapien
aaagcaaggagcagcgggcatcggg

SEQ ID NO: 245189 - DNA, 25 bp, Homo sapien
cagatgtggtgagtggccttgtcca

SEQ ID NO: 245190 - DNA, 25 bp, Homo sapien
cacatgccggggacccagtgcttgg

SEQ ID NO: 245191 - DNA, 25 bp, Homo sapien
gccaggccacggcatttgggcaaga

SEQ ID NO: 245192 - DNA, 25 bp, Homo sapien
cctgcgtcaagacccaggtagtggt

SEQ ID NO: 245193 - DNA, 25 bp, Homo sapien
tgcaggaacagtcgcagcgtctcgt

SEQ ID NO: 245194 - DNA, 25 bp, Homo sapien
gcttgggccagtgcatcggacccat

SEQ ID NO: 245195 - DNA, 25 bp, Homo sapien
agcgtctcgtcttcccaggttgctg

SEQ ID NO: 245196 - DNA, 25 bp, Homo sapien
ttcccaggttgctggtgtatgaggc

SEQ ID NO: 245197 - DNA, 25 bp, Homo sapien
ggctggaggtcctgcccgtgtctgg

SEQ ID NO: 245198 - DNA, 25 bp, Homo sapien
tgtacagttcaccacagaggaagaa

SEQ ID NO: 245199 - DNA, 25 bp, Homo sapien
agtccacgtccacagaagagtggcc

SEQ ID NO: 245200 - DNA, 25 bp, Homo sapien
tgtctggggcctgaaactccccctg

SEQ ID NO: 245201 - DNA, 25 bp, Homo sapien
tgctgccgtatggagggcttggagc

SEQ ID NO: 245202 - DNA, 25 bp, Homo sapien
cccagacaggtgctgccgtatggag

SEQ ID NO: 245203 - DNA, 25 bp, Homo sapien
tggttcccagacaggtgctgccgta

SEQ ID NO: 245204 - DNA, 25 bp, Homo sapien
ggccccttgaactggttcccagaca

SEQ ID NO: 245205 - DNA, 25 bp, Homo sapien
tctcgcgaacgatggccttctcctt

SEQ ID NO: 245206 - DNA, 25 bp, Homo sapien
tgcacatctcgcgaacgatggcctt

SEQ ID NO: 245207 - DNA, 25 bp, Homo sapien
ctggagctgccggtccagattctcg

SEQ ID NO: 245208 - DNA, 25 bp, Homo sapien
ccagattctcgtgtacctccaggac

SEQ ID NO: 245209 - DNA, 25 bp, Homo sapien
tggcatgcacgacagcctcgggctt

SEQ ID NO: 245210 - DNA, 25 bp, Homo sapien
gacagcctcgggcttctgtcctgca

SEQ ID NO: 245211 - DNA, 25 bp, Homo sapien
cttcatggcatgcacgacagcctcg

SEQ ID NO: 245212 - DNA, 25 bp, Homo sapien
tgcacgacagcctcgggcttctgtc

SEQ ID NO: 245213 - DNA, 25 bp, Homo sapien
aggtcttctgcagatgaaatggtcc

SEQ ID NO: 245214 - DNA, 25 bp, Homo sapien
caggtcttctgcagatgaaatggtc

SEQ ID NO: 245215 - DNA, 25 bp, Homo sapien
aatacctgtcgccaaacgctcagag

SEQ ID NO: 245216 - DNA, 25 bp, Homo sapien
tcagagcaacaccattcatgtgagc

SEQ ID NO: 245217 - DNA, 25 bp, Homo sapien
tgaggataccagtgtgcaccagaga

SEQ ID NO: 245218 - DNA, 25 bp, Homo sapien
tgagcccaaacatggaaacgatcca

SEQ ID NO: 245219 - DNA, 25 bp, Homo sapien
aatacagggtacctgtggctggacc

SEQ ID NO: 245220 - DNA, 25 bp, Homo sapien
tgatgacggcacaagtctgagtgtc

SEQ ID NO: 245221 - DNA, 25 bp, Homo sapien
gccgatgggtacagggtgtctttct

SEQ ID NO: 245222 - DNA, 25 bp, Homo sapien
gactctccagcatgccctcaatgtg

SEQ ID NO: 245223 - DNA, 25 bp, Homo sapien
cattttatccgcactctcaggcctt

SEQ ID NO: 245224 - DNA, 25 bp, Homo sapien
gacagcattttatccgcactctcag

SEQ ID NO: 245225 - DNA, 25 bp, Homo sapien
ggccttgaggctcggcccatgcctg

SEQ ID NO: 245226 - DNA, 25 bp, Homo sapien
agcattttatccgcactctcaggcc

SEQ ID NO: 245227 - DNA, 25 bp, Homo sapien
ggcctggtacatgtgagagctgtgc

SEQ ID NO: 245228 - DNA, 25 bp, Homo sapien
gtgagagctgtgcttgcacagcact

SEQ ID NO: 245229 - DNA, 25 bp, Homo sapien
gcaggccacgcggaagacttcagga

SEQ ID NO: 245230 - DNA, 25 bp, Homo sapien
taactgctagctgctattactccct

SEQ ID NO: 245231 - DNA, 25 bp, Homo sapien
catagcactgagtaactgctagctg

SEQ ID NO: 245232 - DNA, 25 bp, Homo sapien
gaagacttcaggacatagcactgag

SEQ ID NO: 245233 - DNA, 25 bp, Homo sapien
ccccgtgagggcatcccttggcttt

SEQ ID NO: 245234 - DNA, 25 bp, Homo sapien
agccagccccgtgagggcatccctt

SEQ ID NO: 245235 - DNA, 25 bp, Homo sapien
agccccgtgagggcatcccttggct

SEQ ID NO: 245236 - DNA, 25 bp, Homo sapien
ggagccagccccgtgagggcatccc

SEQ ID NO: 245237 - DNA, 25 bp, Homo sapien
tgcctgcacaggctctacagctgca

SEQ ID NO: 245238 - DNA, 25 bp, Homo sapien
cacgggactccggataaatgcttgg

SEQ ID NO: 245239 - DNA, 25 bp, Homo sapien
gttagagcctcgttcagccacggga

SEQ ID NO: 245240 - DNA, 25 bp, Homo sapien
aatatcggccattggcgggctttgc

SEQ ID NO: 245241 - DNA, 25 bp, Homo sapien
aagagaaatcgcagagccagcagcc

SEQ ID NO: 245242 - DNA, 25 bp, Homo sapien
aaagagaaatcgcagagccagcagc

SEQ ID NO: 245243 - DNA, 25 bp, Homo sapien
agcaaaagagaaatcgcagagccag

SEQ ID NO: 245244 - DNA, 25 bp, Homo sapien
caaaagagaaatcgcagagccagca

SEQ ID NO: 245245 - DNA, 25 bp, Homo sapien
cagcgtgcggaactctccggagcct

SEQ ID NO: 245246 - DNA, 25 bp, Homo sapien
actccgagtggtagggcgagaagcc

SEQ ID NO: 245247 - DNA, 25 bp, Homo sapien
ggcgagaagcctttccgcagcgtgc

SEQ ID NO: 245248 - DNA, 25 bp, Homo sapien
caagctgggactccgagtggtaggg

SEQ ID NO: 245249 - DNA, 25 bp, Homo sapien
tctccccagctcaaatgtcagcgat

SEQ ID NO: 245250 - DNA, 25 bp, Homo sapien
ctccaacgtgggctttgtaaacatt

SEQ ID NO: 245251 - DNA, 25 bp, Homo sapien
ccccgagccgggatcaatcgatctt

SEQ ID NO: 245252 - DNA, 25 bp, Homo sapien
tgtcagcgatccactctccaacgtg

SEQ ID NO: 245253 - DNA, 25 bp, Homo sapien
ctaaagcccaccgagatccagctgt

SEQ ID NO: 245254 - DNA, 25 bp, Homo sapien
gatccagctgtcatccgtctcggag

SEQ ID NO: 245255 - DNA, 25 bp, Homo sapien
gaagcagaggctcgaatgcgtgact

SEQ ID NO: 245256 - DNA, 25 bp, Homo sapien
gggccacagactagcctgggctcca

SEQ ID NO: 245257 - DNA, 25 bp, Homo sapien
agagttgttcccacgagggcacgca

SEQ ID NO: 245258 - DNA, 25 bp, Homo sapien
ggaggtttgtgtccacacgtccgtc

SEQ ID NO: 245259 - DNA, 25 bp, Homo sapien
tccgtcagtcatgcctgtgggctgc

SEQ ID NO: 245260 - DNA, 25 bp, Homo sapien
actgcaccagagttgttcccacgag

SEQ ID NO: 245261 - DNA, 25 bp, Homo sapien
aagccagcttctcgggcggccgtag

SEQ ID NO: 245262 - DNA, 25 bp, Homo sapien
cagcttctcgggcggccgtaggggc

SEQ ID NO: 245263 - DNA, 25 bp, Homo sapien
ctgaagccagcttctcgggcggccg

SEQ ID NO: 245264 - DNA, 25 bp, Homo sapien
ccagcttctcgggcggccgtagggg

SEQ ID NO: 245265 - DNA, 25 bp, Homo sapien
cacggcacacgtgtactcatgtaac

SEQ ID NO: 245266 - DNA, 25 bp, Homo sapien
tgcactcagatcaggcggtagagat

SEQ ID NO: 245267 - DNA, 25 bp, Homo sapien
tgggcttattacctaggccatgggc

SEQ ID NO: 245268 - DNA, 25 bp, Homo sapien
gacatattcccaatctgcactcaga

SEQ ID NO: 245269 - DNA, 25 bp, Homo sapien
gctggcactgctcctcccttggtcc

SEQ ID NO: 245270 - DNA, 25 bp, Homo sapien
tggcactgctcctcccttggtcccc

SEQ ID NO: 245271 - DNA, 25 bp, Homo sapien
gcactgctcctcccttggtccccat

SEQ ID NO: 245272 - DNA, 25 bp, Homo sapien
ggctggcactgctcctcccttggtc

SEQ ID NO: 245273 - DNA, 25 bp, Homo sapien
ttcacacccgaaatcccatttttca

SEQ ID NO: 245274 - DNA, 25 bp, Homo sapien
gtcatttcacacccgaaatcccatt

SEQ ID NO: 245275 - DNA, 25 bp, Homo sapien
catttcacacccgaaatcccatttt

SEQ ID NO: 245276 - DNA, 25 bp, Homo sapien
tcacacccgaaatcccatttttcaa

SEQ ID NO: 245277 - DNA, 25 bp, Homo sapien
ggtaacaggcagaccagtcttgtcc

SEQ ID NO: 245278 - DNA, 25 bp, Homo sapien
gccattcagggtaacaggcagacca

SEQ ID NO: 245279 - DNA, 25 bp, Homo sapien
gtgtatgtgccattcagggtaacag

SEQ ID NO: 245280 - DNA, 25 bp, Homo sapien
agaccagtcttgtccaccacgcaga

SEQ ID NO: 245281 - DNA, 25 bp, Homo sapien
tgtgggagctttgaggtgtgcagtt

SEQ ID NO: 245282 - DNA, 25 bp, Homo sapien
tgcaggcccattacttgttccagtg

SEQ ID NO: 245283 - DNA, 25 bp, Homo sapien
aggcccattacttgttccagtgagg

SEQ ID NO: 245284 - DNA, 25 bp, Homo sapien
ctctgcaggcccattacttgttcca

SEQ ID NO: 245285 - DNA, 25 bp, Homo sapien
cagcatctggctcacggtggacact

SEQ ID NO: 245286 - DNA, 25 bp, Homo sapien
tcacggtggacactccttacactgc

SEQ ID NO: 245287 - DNA, 25 bp, Homo sapien
tctggctcacggtggacactcctta

SEQ ID NO: 245288 - DNA, 25 bp, Homo sapien
cactccttacactgctggtgctagg

SEQ ID NO: 245289 - DNA, 25 bp, Homo sapien
caagggagaggccaaactgactctg

SEQ ID NO: 245290 - DNA, 25 bp, Homo sapien
tatgacagaggtgatacggtatggc

SEQ ID NO: 245291 - DNA, 25 bp, Homo sapien
gaagcgtttaaagtcctccagagac

SEQ ID NO: 245292 - DNA, 25 bp, Homo sapien
tctgaggttcaactaaggaagcgtt

SEQ ID NO: 245293 - DNA, 25 bp, Homo sapien
caccgcgacgccagcatctccggag

SEQ ID NO: 245294 - DNA, 25 bp, Homo sapien
ctgaccaacagagatgcccacgtgg

SEQ ID NO: 245295 - DNA, 25 bp, Homo sapien
ggcttggagcctgctaccaaggcat

SEQ ID NO: 245296 - DNA, 25 bp, Homo sapien
ctgctaccaaggcatggaaacgctg

SEQ ID NO: 245297 - DNA, 25 bp, Homo sapien
agccatcaggatctgatgtcggtgc

SEQ ID NO: 245298 - DNA, 25 bp, Homo sapien
cctggcccacggatgaggatgtgaa

SEQ ID NO: 245299 - DNA, 25 bp, Homo sapien
tgtgtccaggcaagggtcagcagct

SEQ ID NO: 245300 - DNA, 25 bp, Homo sapien
caggatctgatgtcggtgccctgca

SEQ ID NO: 245301 - DNA, 25 bp, Homo sapien
aacacccaagcgtgactgcccatag

SEQ ID NO: 245302 - DNA, 25 bp, Homo sapien
tgcgcacgagggctcggaggcttgg

SEQ ID NO: 245303 - DNA, 25 bp, Homo sapien
gatgaagccagggatgcgcacgagg

SEQ ID NO: 245304 - DNA, 25 bp, Homo sapien
tgagaggtcgccaagccagctggcc

SEQ ID NO: 245305 - DNA, 25 bp, Homo sapien
tgcgaggagcttgtcaccctccagc

SEQ ID NO: 245306 - DNA, 25 bp, Homo sapien
tgtgcgaggagcttgtcaccctcca

SEQ ID NO: 245307 - DNA, 25 bp, Homo sapien
gaggagcttgtcaccctccagcagc

SEQ ID NO: 245308 - DNA, 25 bp, Homo sapien
ctgtgcgaggagcttgtcaccctcc

SEQ ID NO: 245309 - DNA, 25 bp, Homo sapien
ctgagcccttctcaggaccttcagg

SEQ ID NO: 245310 - DNA, 25 bp, Homo sapien
gaggccagccttgcaggacccgctg

SEQ ID NO: 245311 - DNA, 25 bp, Homo sapien
gagcccttctcaggaccttcaggac

SEQ ID NO: 245312 - DNA, 25 bp, Homo sapien
tgccctcgctgtgggcctctgagcc

SEQ ID NO: 245313 - DNA, 25 bp, Homo sapien
gaggtggccactgcccgcatgccag

SEQ ID NO: 245314 - DNA, 25 bp, Homo sapien
ctgcttcatcccgaggtggccactg

SEQ ID NO: 245315 - DNA, 25 bp, Homo sapien
tgcttcatcccgaggtggccactgc

SEQ ID NO: 245316 - DNA, 25 bp, Homo sapien
ggatcacagctctcggaggggcagg

SEQ ID NO: 245317 - DNA, 25 bp, Homo sapien
gctcctggaagggatcacagctctc

SEQ ID NO: 245318 - DNA, 25 bp, Homo sapien
tgccccttagcatcagtggccatgc

SEQ ID NO: 245319 - DNA, 25 bp, Homo sapien
gtggccatgccaatcccagctgaca

SEQ ID NO: 245320 - DNA, 25 bp, Homo sapien
tcagggaaggcacttgatctgcggt

SEQ ID NO: 245321 - DNA, 25 bp, Homo sapien
ctctgggcggttccatctggcagca

SEQ ID NO: 245322 - DNA, 25 bp, Homo sapien
tgcggtgagagcagtggtgggaatc

SEQ ID NO: 245323 - DNA, 25 bp, Homo sapien
ctgggcggttccatctggcagcagc

SEQ ID NO: 245324 - DNA, 25 bp, Homo sapien
tgggtccagctcgaccaagctgctg

SEQ ID NO: 245325 - DNA, 25 bp, Homo sapien
gcaaaggctaccacatcactgccaa

SEQ ID NO: 245326 - DNA, 25 bp, Homo sapien
tccatcaccaatccagcaaaggcta

SEQ ID NO: 245327 - DNA, 25 bp, Homo sapien
caacattacccagtgcaggcatgca

SEQ ID NO: 245328 - DNA, 25 bp, Homo sapien
tccaaagccaatgtggtatcaccca

SEQ ID NO: 245329 - DNA, 25 bp, Homo sapien
aatgtggtatcacccatacagcgca

SEQ ID NO: 245330 - DNA, 25 bp, Homo sapien
ctgcaaggtgatccaaagccaatgt

SEQ ID NO: 245331 - DNA, 25 bp, Homo sapien
gccaatgtggtatcacccatacagc

SEQ ID NO: 245332 - DNA, 25 bp, Homo sapien
gccatcctgtgcaactttctgcctc

SEQ ID NO: 245333 - DNA, 25 bp, Homo sapien
ttcccaaagtgacttccattgaggt

SEQ ID NO: 245334 - DNA, 25 bp, Homo sapien
aggtaactcggagccacctgccaca

SEQ ID NO: 245335 - DNA, 25 bp, Homo sapien
tccaaaccgatcacaacttcaccag

SEQ ID NO: 245336 - DNA, 25 bp, Homo sapien
tctgcccgataccagggcccatggg

SEQ ID NO: 245337 - DNA, 25 bp, Homo sapien
tgcccgataccagggcccatgggag

SEQ ID NO: 245338 - DNA, 25 bp, Homo sapien
caccaagcgagcaggtttgttcatc

SEQ ID NO: 245339 - DNA, 25 bp, Homo sapien
ccgcctgggcggagtcgcagaacac

SEQ ID NO: 245340 - DNA, 25 bp, Homo sapien
tccagggctcccgacaagccacatg

SEQ ID NO: 245341 - DNA, 25 bp, Homo sapien
ccgacaagccacatggccgtagcgg

SEQ ID NO: 245342 - DNA, 25 bp, Homo sapien
cacatggccgtagcggccctggctt

SEQ ID NO: 245343 - DNA, 25 bp, Homo sapien
tgcctgctgccacacgcctccaggg

SEQ ID NO: 245344 - DNA, 25 bp, Homo sapien
ttgacactgcggaaagagtattgag

SEQ ID NO: 245345 - DNA, 25 bp, Homo sapien
tcttgacactgcggaaagagtattg

SEQ ID NO: 245346 - DNA, 25 bp, Homo sapien
ggtcttgacactgcggaaagagtat

SEQ ID NO: 245347 - DNA, 25 bp, Homo sapien
gggtcttgacactgcggaaagagta

SEQ ID NO: 245348 - DNA, 25 bp, Homo sapien
ggagccggcagaagcaccagataat

SEQ ID NO: 245349 - DNA, 25 bp, Homo sapien
aactgggccatctgggaataactcg

SEQ ID NO: 245350 - DNA, 25 bp, Homo sapien
gaataactcgggcaggtacatcccc

SEQ ID NO: 245351 - DNA, 25 bp, Homo sapien
cagataataaggtggtcactctgca

SEQ ID NO: 245352 - DNA, 25 bp, Homo sapien
ccgtgggccgtgctggcctccatgt

SEQ ID NO: 245353 - DNA, 25 bp, Homo sapien
agacataaatcacccactcccgtgg

SEQ ID NO: 245354 - DNA, 25 bp, Homo sapien
cagccggcagacataaatcacccac

SEQ ID NO: 245355 - DNA, 25 bp, Homo sapien
ctcccgtgggccgtgctggcctcca

SEQ ID NO: 245356 - DNA, 25 bp, Homo sapien
cagcatgttagggttttggtcagca

SEQ ID NO: 245357 - DNA, 25 bp, Homo sapien
gcacgtccgcacttttctgaagcct

SEQ ID NO: 245358 - DNA, 25 bp, Homo sapien
ggagcacgtccgcacttttctgaag

SEQ ID NO: 245359 - DNA, 25 bp, Homo sapien
agcaggagcacgtccgcacttttct

SEQ ID NO: 245360 - DNA, 25 bp, Homo sapien
tgcactcgtccatggaagctccaga

SEQ ID NO: 245361 - DNA, 25 bp, Homo sapien
aagctccagaaggtgcgggatctgc

SEQ ID NO: 245362 - DNA, 25 bp, Homo sapien
agctgccacagggggcaaccaaccg

SEQ ID NO: 245363 - DNA, 25 bp, Homo sapien
gatctgcgtggcggcagctgccaca

SEQ ID NO: 245364 - DNA, 25 bp, Homo sapien
gagaggggacgcagaccctctcccg

SEQ ID NO: 245365 - DNA, 25 bp, Homo sapien
ccaaggagaggggacgcagaccctc

SEQ ID NO: 245366 - DNA, 25 bp, Homo sapien
aaggagaggggacgcagaccctctc

SEQ ID NO: 245367 - DNA, 25 bp, Homo sapien
tccaaggagaggggacgcagaccct

SEQ ID NO: 245368 - DNA, 25 bp, Homo sapien
gacgacagctgcttatcatccaagc

SEQ ID NO: 245369 - DNA, 25 bp, Homo sapien
gcctggtcagctccgggaaagctct

SEQ ID NO: 245370 - DNA, 25 bp, Homo sapien
agctccgggaaagctctgacatctg

SEQ ID NO: 245371 - DNA, 25 bp, Homo sapien
ctttgctggaaaccttccagggacg

SEQ ID NO: 245372 - DNA, 25 bp, Homo sapien
tgcctcgctggtccagcagcttagc

SEQ ID NO: 245373 - DNA, 25 bp, Homo sapien
gtccagcagcttagctgagaacctg

SEQ ID NO: 245374 - DNA, 25 bp, Homo sapien
gatggtgctgtccacgcacttctca

SEQ ID NO: 245375 - DNA, 25 bp, Homo sapien
acttctcatgaaccacaccagtggg

SEQ ID NO: 245376 - DNA, 25 bp, Homo sapien
cccggagtgagtcacatgggcaggg

SEQ ID NO: 245377 - DNA, 25 bp, Homo sapien
tgggcagaaacccagtgaccggtgc

SEQ ID NO: 245378 - DNA, 25 bp, Homo sapien
gaggacagcgtatgaagcctcacac

SEQ ID NO: 245379 - DNA, 25 bp, Homo sapien
cattgtctgcaattctctcgcctgc

SEQ ID NO: 245380 - DNA, 25 bp, Homo sapien
agcccctgaagacaaccgtggaagt

SEQ ID NO: 245381 - DNA, 25 bp, Homo sapien
agtggtatgcagagactctctgggt

SEQ ID NO: 245382 - DNA, 25 bp, Homo sapien
tggtatgcagagactctctgggtgc

SEQ ID NO: 245383 - DNA, 25 bp, Homo sapien
ctgggtgctggggtcaaaggtagtt

SEQ ID NO: 245384 - DNA, 25 bp, Homo sapien
tgctggggtcaaaggtagttagttc

SEQ ID NO: 245385 - DNA, 25 bp, Homo sapien
acactgccttgctcattgttcccaa

SEQ ID NO: 245386 - DNA, 25 bp, Homo sapien
ttctgggccacactgccttgctcat

SEQ ID NO: 245387 - DNA, 25 bp, Homo sapien
gccacactgccttgctcattgttcc

SEQ ID NO: 245388 - DNA, 25 bp, Homo sapien
gggccacactgccttgctcattgtt

SEQ ID NO: 245389 - DNA, 25 bp, Homo sapien
gctgagtgcgcgagggctgcaggtc

SEQ ID NO: 245390 - DNA, 25 bp, Homo sapien
tgcggaggctgccacggctcccacg

SEQ ID NO: 245391 - DNA, 25 bp, Homo sapien
gctcccacggatgctgagtgcgcga

SEQ ID NO: 245392 - DNA, 25 bp, Homo sapien
cggatgctgagtgcgcgagggctgc

SEQ ID NO: 245393 - DNA, 25 bp, Homo sapien
gggcctgcaatgtgccttctgcaca

SEQ ID NO: 245394 - DNA, 25 bp, Homo sapien
ctggcagctgattcgagctcctggg

SEQ ID NO: 245395 - DNA, 25 bp, Homo sapien
atgcctggcagctgattcgagctcc

SEQ ID NO: 245396 - DNA, 25 bp, Homo sapien
ctgtccagccctgcgaaagtggggt

SEQ ID NO: 245397 - DNA, 25 bp, Homo sapien
tccagggcccaaaatggcattccac

SEQ ID NO: 245398 - DNA, 25 bp, Homo sapien
gtcagcggtgacctgctgaagaaca

SEQ ID NO: 245399 - DNA, 25 bp, Homo sapien
gctcccctcaagagctggaggtcag

SEQ ID NO: 245400 - DNA, 25 bp, Homo sapien
ggcagtcaatacaatcctgatcttt

SEQ ID NO: 245401 - DNA, 25 bp, Homo sapien
cccctcaagagctggaggtcagcgg

SEQ ID NO: 245402 - DNA, 25 bp, Homo sapien
cagttgcaactaccagcagaactgg

SEQ ID NO: 245403 - DNA, 25 bp, Homo sapien
ccggatccaccagcgaggaggagaa

SEQ ID NO: 245404 - DNA, 25 bp, Homo sapien
gttcaggcagttgcaactaccagca

SEQ ID NO: 245405 - DNA, 25 bp, Homo sapien
accttcaggcaaaaagttcaggcag

SEQ ID NO: 245406 - DNA, 25 bp, Homo sapien
tggtcacggatgaccacggcacttc

SEQ ID NO: 245407 - DNA, 25 bp, Homo sapien
cctggtcacggatgaccacggcact

SEQ ID NO: 245408 - DNA, 25 bp, Homo sapien
ctggtcacggatgaccacggcactt

SEQ ID NO: 245409 - DNA, 25 bp, Homo sapien
tccagggaccgacgtgtggctcctg

SEQ ID NO: 245410 - DNA, 25 bp, Homo sapien
gacaagtcgtccagggaccgacgtg

SEQ ID NO: 245411 - DNA, 25 bp, Homo sapien
cggcgccgacaagtcgtccagggac

SEQ ID NO: 245412 - DNA, 25 bp, Homo sapien
tgcggcggcgccgacaagtcgtcca

SEQ ID NO: 245413 - DNA, 25 bp, Homo sapien
cgccgctgcccgcgctggacgtact

SEQ ID NO: 245414 - DNA, 25 bp, Homo sapien
tggtggtggtcggggctgccgccgc

SEQ ID NO: 245415 - DNA, 25 bp, Homo sapien
gccgctgcccgcgctggacgtactg

SEQ ID NO: 245416 - DNA, 25 bp, Homo sapien
tgccgtcgcccacgtcgcgggcccc

SEQ ID NO: 245417 - DNA, 25 bp, Homo sapien
ctgccgtcgcccacgtcgcgggccc

SEQ ID NO: 245418 - DNA, 25 bp, Homo sapien
ccgacagcggcccgctcaggctggc

SEQ ID NO: 245419 - DNA, 25 bp, Homo sapien
tcaggctggcctggctgtcgatgga

SEQ ID NO: 245420 - DNA, 25 bp, Homo sapien
caggctggcctggctgtcgatggag

SEQ ID NO: 245421 - DNA, 25 bp, Homo sapien
acagcggcccgctcaggctggcctg

SEQ ID NO: 245422 - DNA, 25 bp, Homo sapien
cccgtcgccgccagtgccgcgcgct

SEQ ID NO: 245423 - DNA, 25 bp, Homo sapien
ccgccgccaccgcttgcggcccccg

SEQ ID NO: 245424 - DNA, 25 bp, Homo sapien
ccgccaccgcttgcggcccccgtcg

SEQ ID NO: 245425 - DNA, 25 bp, Homo sapien
ccccgtcgccgccagtgccgcgcgc

SEQ ID NO: 245426 - DNA, 25 bp, Homo sapien
ctggttcacgtccttgaggccgcgg

SEQ ID NO: 245427 - DNA, 25 bp, Homo sapien
tcctggttgtcgtcctgcagccgct

SEQ ID NO: 245428 - DNA, 25 bp, Homo sapien
gcagcttctgctgcgagcgggccac

SEQ ID NO: 245429 - DNA, 25 bp, Homo sapien
ccttctgccggtcgtcgtcgaggaa

SEQ ID NO: 245430 - DNA, 25 bp, Homo sapien
ccgccgtcgccgcgggcttagccat

SEQ ID NO: 245431 - DNA, 25 bp, Homo sapien
cagctcctcgtccggcacctggctc

SEQ ID NO: 245432 - DNA, 25 bp, Homo sapien
gcagctcctcgtccggcacctggct

SEQ ID NO: 245433 - DNA, 25 bp, Homo sapien
tgtgccttgcccatcctcggtgatg

SEQ ID NO: 245434 - DNA, 25 bp, Homo sapien
tacgcgtgtcccaacgcacatgagt

SEQ ID NO: 245435 - DNA, 25 bp, Homo sapien
tggctagacagtgccaaagtgcttt

SEQ ID NO: 245436 - DNA, 25 bp, Homo sapien
tgccctgtggaccttcttatacgcg

SEQ ID NO: 245437 - DNA, 25 bp, Homo sapien
cctgcagaaacatcgtgccaggcct

SEQ ID NO: 245438 - DNA, 25 bp, Homo sapien
ccctgcagaaacatcgtgccaggcc

SEQ ID NO: 245439 - DNA, 25 bp, Homo sapien
cactgggatgtactcaaagcagcct

SEQ ID NO: 245440 - DNA, 25 bp, Homo sapien
ctgggatgtactcaaagcagcctgt

SEQ ID NO: 245441 - DNA, 25 bp, Homo sapien
gctggatgatgcgttcacggctgtc

SEQ ID NO: 245442 - DNA, 25 bp, Homo sapien
cagctggatgatgcgttcacggctg

SEQ ID NO: 245443 - DNA, 25 bp, Homo sapien
tggatgatgcgttcacggctgtcag

SEQ ID NO: 245444 - DNA, 25 bp, Homo sapien
atgatgcgttcacggctgtcagggc

SEQ ID NO: 245445 - DNA, 25 bp, Homo sapien
cagaccctccagtgaaggagcaggt

SEQ ID NO: 245446 - DNA, 25 bp, Homo sapien
gatgggaacggcaactgctctggaa

SEQ ID NO: 245447 - DNA, 25 bp, Homo sapien
gccacatgtcaagtaccagaaagcc

SEQ ID NO: 245448 - DNA, 25 bp, Homo sapien
tgatcacaggatagctgggagcatc

SEQ ID NO: 245449 - DNA, 25 bp, Homo sapien
catacctcaggtggttgacagtttc

SEQ ID NO: 245450 - DNA, 25 bp, Homo sapien
tgactcggcaagtgagcaacagggc

SEQ ID NO: 245451 - DNA, 25 bp, Homo sapien
aaacatcggtttctcagctgggcgg

SEQ ID NO: 245452 - DNA, 25 bp, Homo sapien
atgcattgagcaccttctgggacgg

SEQ ID NO: 245453 - DNA, 25 bp, Homo sapien
agatgtgtggggcaattctctgcaa

SEQ ID NO: 245454 - DNA, 25 bp, Homo sapien
ggcaattctctgcaatggagggtgg

SEQ ID NO: 245455 - DNA, 25 bp, Homo sapien
tgtggggcaattctctgcaatggag

SEQ ID NO: 245456 - DNA, 25 bp, Homo sapien
catgggtgcgcagcagatgtgtggg

SEQ ID NO: 245457 - DNA, 25 bp, Homo sapien
gcgaggaggttcctgccgacatcct

SEQ ID NO: 245458 - DNA, 25 bp, Homo sapien
ggcgaggaggttcctgccgacatcc

SEQ ID NO: 245459 - DNA, 25 bp, Homo sapien
gaggtccgggagagcattcgcttcc

SEQ ID NO: 245460 - DNA, 25 bp, Homo sapien
gcattcgcttcctgcgccaggtggg

SEQ ID NO: 245461 - DNA, 25 bp, Homo sapien
ccatttccagctcgctgtctgaggg

SEQ ID NO: 245462 - DNA, 25 bp, Homo sapien
ctttgagaatggtatgcccgggctc

SEQ ID NO: 245463 - DNA, 25 bp, Homo sapien
tgtctcccagcgtcctgttcccaag

SEQ ID NO: 245464 - DNA, 25 bp, Homo sapien
tctctgaggttcaccagtacccaca

SEQ ID NO: 245465 - DNA, 25 bp, Homo sapien
gggtgggtgacagccgctgaggctc

SEQ ID NO: 245466 - DNA, 25 bp, Homo sapien
tgagcacgttcttatctgcccagcc

SEQ ID NO: 245467 - DNA, 25 bp, Homo sapien
tttatccaccaatcgcacaggctgc

SEQ ID NO: 245468 - DNA, 25 bp, Homo sapien
gtggcttctcaagcaacatcctggg

SEQ ID NO: 245469 - DNA, 25 bp, Homo sapien
aaatggccaaaggaactcgggcaca

SEQ ID NO: 245470 - DNA, 25 bp, Homo sapien
cggaactatcagtcactccacatgg

SEQ ID NO: 245471 - DNA, 25 bp, Homo sapien
cacagagcagcatgatatggctcac

SEQ ID NO: 245472 - DNA, 25 bp, Homo sapien
tggtgacgtctgtggcaggaaggat

SEQ ID NO: 245473 - DNA, 25 bp, Homo sapien
aggggtggacgttgcccaggaccat

SEQ ID NO: 245474 - DNA, 25 bp, Homo sapien
tagtgcctgcataatggatgcctcc

SEQ ID NO: 245475 - DNA, 25 bp, Homo sapien
gggataccggcgctctgctcgtaaa

SEQ ID NO: 245476 - DNA, 25 bp, Homo sapien
gctctgctcgtaaagccggcctctg

SEQ ID NO: 245477 - DNA, 25 bp, Homo sapien
ttgcttaatggccacgagggaagtg

SEQ ID NO: 245478 - DNA, 25 bp, Homo sapien
cacattgttcttaggcagctctggg

SEQ ID NO: 245479 - DNA, 25 bp, Homo sapien
acattgttcttaggcagctctgggg

SEQ ID NO: 245480 - DNA, 25 bp, Homo sapien
ggcccagagtcacctggtttggcca

SEQ ID NO: 245481 - DNA, 25 bp, Homo sapien
tggcagggcccagagtcacctggtt

SEQ ID NO: 245482 - DNA, 25 bp, Homo sapien
tgtgatgaagaaccggtgaccaagc

SEQ ID NO: 245483 - DNA, 25 bp, Homo sapien
ctgtgatgaagaaccggtgaccaag

SEQ ID NO: 245484 - DNA, 25 bp, Homo sapien
tctgtgatgaagaaccggtgaccaa

SEQ ID NO: 245485 - DNA, 25 bp, Homo sapien
cataagataagctgtagaactgcat

SEQ ID NO: 245486 - DNA, 25 bp, Homo sapien
ttcataagataagctgtagaactgc

SEQ ID NO: 245487 - DNA, 25 bp, Homo sapien
cttcataagataagctgtagaactg

SEQ ID NO: 245488 - DNA, 25 bp, Homo sapien
tcataagataagctgtagaactgca

SEQ ID NO: 245489 - DNA, 25 bp, Homo sapien
gatctatgtgtttctccgactgcgc

SEQ ID NO: 245490 - DNA, 25 bp, Homo sapien
tatggcctggaaaagttacaaactc

SEQ ID NO: 245491 - DNA, 25 bp, Homo sapien
taacgtgacagatctgtatcccagg

SEQ ID NO: 245492 - DNA, 25 bp, Homo sapien
tagtcctgtagcaagttaacaagcc

SEQ ID NO: 245493 - DNA, 25 bp, Homo sapien
gatgtttctttatgacttgaaaggt

SEQ ID NO: 245494 - DNA, 25 bp, Homo sapien
tgcgtcggtgacatcagccttgatt

SEQ ID NO: 245495 - DNA, 25 bp, Homo sapien
gcatcttgtgtcatgctcagaggta

SEQ ID NO: 245496 - DNA, 25 bp, Homo sapien
cgtagagatgcttacgagatgagca

SEQ ID NO: 245497 - DNA, 25 bp, Homo sapien
tccgactagacgtactttcactcat

SEQ ID NO: 245498 - DNA, 25 bp, Homo sapien
tcagagagatccgactagacgtact

SEQ ID NO: 245499 - DNA, 25 bp, Homo sapien
ggtcagagagatccgactagacgta

SEQ ID NO: 245500 - DNA, 25 bp, Homo sapien
gagatccgactagacgtactttcac

SEQ ID NO: 245501 - DNA, 25 bp, Homo sapien
aatatttcagcagggtacacaggcg

SEQ ID NO: 245502 - DNA, 25 bp, Homo sapien
taatgaggtactgaaccacgatggc

SEQ ID NO: 245503 - DNA, 25 bp, Homo sapien
cacgatggctgttgaggaattggtc

SEQ ID NO: 245504 - DNA, 25 bp, Homo sapien
tcctgcctaaccagatgcggtcagc

SEQ ID NO: 245505 - DNA, 25 bp, Homo sapien
ctaactggaagacccgagtgagtat

SEQ ID NO: 245506 - DNA, 25 bp, Homo sapien
aattgagagcatctaactggaagac

SEQ ID NO: 245507 - DNA, 25 bp, Homo sapien
gagagcatctaactggaagacccga

SEQ ID NO: 245508 - DNA, 25 bp, Homo sapien
catctaactggaagacccgagtgag

SEQ ID NO: 245509 - DNA, 25 bp, Homo sapien
cacagaagcctttcggagtaccaag

SEQ ID NO: 245510 - DNA, 25 bp, Homo sapien
gcgttccagggggtccgcaggtcaa

SEQ ID NO: 245511 - DNA, 25 bp, Homo sapien
ttgctggcaagccagaccggaccac

SEQ ID NO: 245512 - DNA, 25 bp, Homo sapien
gagtaccaagttccctcttgaagga

SEQ ID NO: 245513 - DNA, 25 bp, Homo sapien
aaatcctgcattgtataatagccat

SEQ ID NO: 245514 - DNA, 25 bp, Homo sapien
cattgtataatagccatagctggag

SEQ ID NO: 245515 - DNA, 25 bp, Homo sapien
ggcagtccttaatgccagccatcat

SEQ ID NO: 245516 - DNA, 25 bp, Homo sapien
ccagagcttggggatcagatagctg

SEQ ID NO: 245517 - DNA, 25 bp, Homo sapien
ctttttgggcacagagatcaagatg

SEQ ID NO: 245518 - DNA, 25 bp, Homo sapien
agctttttgggcacagagatcaaga

SEQ ID NO: 245519 - DNA, 25 bp, Homo sapien
tagagatgaggtgtaccagcacaga

SEQ ID NO: 245520 - DNA, 25 bp, Homo sapien
cgtggggcttgccagtgttgtctcc

SEQ ID NO: 245521 - DNA, 25 bp, Homo sapien
gtagagatgaggtgtaccagcacag

SEQ ID NO: 245522 - DNA, 25 bp, Homo sapien
tgactccttggatggtagtaggtac

SEQ ID NO: 245523 - DNA, 25 bp, Homo sapien
ctccttggatggtagtaggtaccgt

SEQ ID NO: 245524 - DNA, 25 bp, Homo sapien
aaagatgatgactccttggatggta

SEQ ID NO: 245525 - DNA, 25 bp, Homo sapien
tgatgactccttggatggtagtagg

SEQ ID NO: 245526 - DNA, 25 bp, Homo sapien
gtgccttgaatctggaccactggcc

SEQ ID NO: 245527 - DNA, 25 bp, Homo sapien
ggccagtgcaagtctccatttttac

SEQ ID NO: 245528 - DNA, 25 bp, Homo sapien
cccaatggcaacaagtgccttgaat

SEQ ID NO: 245529 - DNA, 25 bp, Homo sapien
gaccactggccagtgcaagtctcca

SEQ ID NO: 245530 - DNA, 25 bp, Homo sapien
taaactcattcgtgagggttgcccc

SEQ ID NO: 245531 - DNA, 25 bp, Homo sapien
aatcttaaactcattcgtgagggtt

SEQ ID NO: 245532 - DNA, 25 bp, Homo sapien
gatagagcttcagggacttaatctt

SEQ ID NO: 245533 - DNA, 25 bp, Homo sapien
agaggagatagagcttcagggactt

SEQ ID NO: 245534 - DNA, 25 bp, Homo sapien
tgctgcccagtttgatgatggggac

SEQ ID NO: 245535 - DNA, 25 bp, Homo sapien
actatgctgcccagtttgatgatgg

SEQ ID NO: 245536 - DNA, 25 bp, Homo sapien
cttgactatgctgcccagtttgatg

SEQ ID NO: 245537 - DNA, 25 bp, Homo sapien
tgactatgctgcccagtttgatgat

SEQ ID NO: 245538 - DNA, 25 bp, Homo sapien
actggtctcattcgccatttggtgt

SEQ ID NO: 245539 - DNA, 25 bp, Homo sapien
ctgcactggtctcattcgccatttg

SEQ ID NO: 245540 - DNA, 25 bp, Homo sapien
cactgcactggtctcattcgccatt

SEQ ID NO: 245541 - DNA, 25 bp, Homo sapien
gcactggtctcattcgccatttggt

SEQ ID NO: 245542 - DNA, 25 bp, Homo sapien
tagctcaggtcattaaaacaaaaga

SEQ ID NO: 245543 - DNA, 25 bp, Homo sapien
gtgacacctattttcttgtgttctg

SEQ ID NO: 245544 - DNA, 25 bp, Homo sapien
tgtgttctgtcctaattgtattaga

SEQ ID NO: 245545 - DNA, 25 bp, Homo sapien
taaaaattatgctctaaccagtcct

SEQ ID NO: 245546 - DNA, 25 bp, Homo sapien
gtgacagagcgagactctgtctcaa

SEQ ID NO: 245547 - DNA, 25 bp, Homo sapien
gatcttgccattgtactccatcttg

SEQ ID NO: 245548 - DNA, 25 bp, Homo sapien
gggtgacagagcgagactctgtctc

SEQ ID NO: 245549 - DNA, 25 bp, Homo sapien
gagatcttgccattgtactccatct

SEQ ID NO: 245550 - DNA, 25 bp, Homo sapien
aatgcctacatgagtgagaatcacc

SEQ ID NO: 245551 - DNA, 25 bp, Homo sapien
catggttgtggctggtaatgcctac

SEQ ID NO: 245552 - DNA, 25 bp, Homo sapien
tacatgtgaggcatggccagtccag

SEQ ID NO: 245553 - DNA, 25 bp, Homo sapien
caacaggtctggttacgagccaaga

SEQ ID NO: 245554 - DNA, 25 bp, Homo sapien
tatagttgtgtatataagctgggtg

SEQ ID NO: 245555 - DNA, 25 bp, Homo sapien
cattaccatatttaccttgtgggca

SEQ ID NO: 245556 - DNA, 25 bp, Homo sapien
tgtaagggctatagggattccgtgt

SEQ ID NO: 245557 - DNA, 25 bp, Homo sapien
tgtttttaggcctatgccattacca

SEQ ID NO: 245558 - DNA, 25 bp, Homo sapien
aagagcttggttttggcagccgcct

SEQ ID NO: 245559 - DNA, 25 bp, Homo sapien
tttaaaaggttccagcactctcaac

SEQ ID NO: 245560 - DNA, 25 bp, Homo sapien
tttattgcacttatcttctcttctc

SEQ ID NO: 245561 - DNA, 25 bp, Homo sapien
gctctgctgcttttgtggagctgtg

SEQ ID NO: 245562 - DNA, 25 bp, Homo sapien
gatagttgatcgtggcattcatccc

SEQ ID NO: 245563 - DNA, 25 bp, Homo sapien
cgtggcattcatcccagtttggcat

SEQ ID NO: 245564 - DNA, 25 bp, Homo sapien
ctaagatggatagttgatcgtggca

SEQ ID NO: 245565 - DNA, 25 bp, Homo sapien
gttgatcgtggcattcatcccagtt

SEQ ID NO: 245566 - DNA, 25 bp, Homo sapien
gagaggctgtggaaagtatatgcca

SEQ ID NO: 245567 - DNA, 25 bp, Homo sapien
tctgctggctttcatgaggttcttc

SEQ ID NO: 245568 - DNA, 25 bp, Homo sapien
acattgttaattcatctccataggg

SEQ ID NO: 245569 - DNA, 25 bp, Homo sapien
gcatacttggggtacagaaacctct

SEQ ID NO: 245570 - DNA, 25 bp, Homo sapien
ctggaagttttggaacatagtgccc

SEQ ID NO: 245571 - DNA, 25 bp, Homo sapien
ttaggagatccaaaagtgaggtcgt

SEQ ID NO: 245572 - DNA, 25 bp, Homo sapien
caaaagtgaggtcgttggagagaat

SEQ ID NO: 245573 - DNA, 25 bp, Homo sapien
ttggaacatagtgccctcctcaact

SEQ ID NO: 245574 - DNA, 25 bp, Homo sapien
tcagtccttattttgcttcacgtcc

SEQ ID NO: 245575 - DNA, 25 bp, Homo sapien
cagtccttattttgcttcacgtcca

SEQ ID NO: 245576 - DNA, 25 bp, Homo sapien
tgcttcacgtccatcatggctgtgt

SEQ ID NO: 245577 - DNA, 25 bp, Homo sapien
ttattttgcttcacgtccatcatgg

SEQ ID NO: 245578 - DNA, 25 bp, Homo sapien
ttactggatgtgactgcattttgtg

SEQ ID NO: 245579 - DNA, 25 bp, Homo sapien
tttactggatgtgactgcattttgt

SEQ ID NO: 245580 - DNA, 25 bp, Homo sapien
cagtcagccagttcagatccttcca

SEQ ID NO: 245581 - DNA, 25 bp, Homo sapien
cagggttgactcacactgcattctt

SEQ ID NO: 245582 - DNA, 25 bp, Homo sapien
ttccagatgccagggttgactcaca

SEQ ID NO: 245583 - DNA, 25 bp, Homo sapien
tcagatccttccagatgccagggtt

SEQ ID NO: 245584 - DNA, 25 bp, Homo sapien
atactcttgcacctacttctgtttc

SEQ ID NO: 245585 - DNA, 25 bp, Homo sapien
atttccttcgagtgtcatgtcggca

SEQ ID NO: 245586 - DNA, 25 bp, Homo sapien
tctgtaaaggcctctgagatagcca

SEQ ID NO: 245587 - DNA, 25 bp, Homo sapien
catgtcggcattcagaaagttttga

SEQ ID NO: 245588 - DNA, 25 bp, Homo sapien
aaactcgggagacagtgcattatac

SEQ ID NO: 245589 - DNA, 25 bp, Homo sapien
ggtgaagagccatattacagtcccc

SEQ ID NO: 245590 - DNA, 25 bp, Homo sapien
tcatgaacaccaagtccacggaagt

SEQ ID NO: 245591 - DNA, 25 bp, Homo sapien
gaaactagatttcccactcccagga

SEQ ID NO: 245592 - DNA, 25 bp, Homo sapien
ttgtttcaggaggtgaggacaactg

SEQ ID NO: 245593 - DNA, 25 bp, Homo sapien
ctcacagaaatgaggaggcgactgg

SEQ ID NO: 245594 - DNA, 25 bp, Homo sapien
tcacagaaatgaggaggcgactggc

SEQ ID NO: 245595 - DNA, 25 bp, Homo sapien
cagaaatgaggaggcgactggctgt

SEQ ID NO: 245596 - DNA, 25 bp, Homo sapien
cacagaaatgaggaggcgactggct

SEQ ID NO: 245597 - DNA, 25 bp, Homo sapien
ggcaaacaatagagccagacctggg

SEQ ID NO: 245598 - DNA, 25 bp, Homo sapien
gtgttctcacttccccgcgctgact

SEQ ID NO: 245599 - DNA, 25 bp, Homo sapien
tccctgaagtcttgttgctggcaaa

SEQ ID NO: 245600 - DNA, 25 bp, Homo sapien
gagctgttgtccacagtgttctcac

SEQ ID NO: 245601 - DNA, 25 bp, Homo sapien
taccatgcgcagataagcagatgca

SEQ ID NO: 245602 - DNA, 25 bp, Homo sapien
taacacgtgtgtgcgcagttcccag

SEQ ID NO: 245603 - DNA, 25 bp, Homo sapien
aatgtagtcagcaccaaaaggccct

SEQ ID NO: 245604 - DNA, 25 bp, Homo sapien
gttcccagtgccagaccgagaaaga

SEQ ID NO: 245605 - DNA, 25 bp, Homo sapien
aaaatggacataaagggtgggcaca

SEQ ID NO: 245606 - DNA, 25 bp, Homo sapien
ggcacccaccatcatactgtcacct

SEQ ID NO: 245607 - DNA, 25 bp, Homo sapien
tcatactgtcacctacttttaaaaa

SEQ ID NO: 245608 - DNA, 25 bp, Homo sapien
tctctgctgcctgctgatcttggca

SEQ ID NO: 245609 - DNA, 25 bp, Homo sapien
cacagagggctttgtagagccacgg

SEQ ID NO: 245610 - DNA, 25 bp, Homo sapien
tagcacgctagtcctgttgggagca

SEQ ID NO: 245611 - DNA, 25 bp, Homo sapien
cagggtcagaccttgtgccggtcat

SEQ ID NO: 245612 - DNA, 25 bp, Homo sapien
caggacacctctttggtaccagcat

SEQ ID NO: 245613 - DNA, 25 bp, Homo sapien
tagagtcatcgtgtcatcgtctccc

SEQ ID NO: 245614 - DNA, 25 bp, Homo sapien
ggcaagaccccaagctgatggcact

SEQ ID NO: 245615 - DNA, 25 bp, Homo sapien
tgatggcactcgaccacatagtggg

SEQ ID NO: 245616 - DNA, 25 bp, Homo sapien
cctggtggcacttgaggcaagaccc

SEQ ID NO: 245617 - DNA, 25 bp, Homo sapien
atttgcagtttgggggttgaatgca

SEQ ID NO: 245618 - DNA, 25 bp, Homo sapien
cagtggatttcaaactggatatttt

SEQ ID NO: 245619 - DNA, 25 bp, Homo sapien
gcagtggatttcaaactggatattt

SEQ ID NO: 245620 - DNA, 25 bp, Homo sapien
ttatttgcagtttgggggttgaatg

SEQ ID NO: 245621 - DNA, 25 bp, Homo sapien
tcgccctgatgcaaccagagtagtt

SEQ ID NO: 245622 - DNA, 25 bp, Homo sapien
caaccagagtagttcttcatcgact

SEQ ID NO: 245623 - DNA, 25 bp, Homo sapien
agggtcctcgccctgatgcaaccag

SEQ ID NO: 245624 - DNA, 25 bp, Homo sapien
ttcatcgactttatacagtgggact

SEQ ID NO: 245625 - DNA, 25 bp, Homo sapien
acctcatagctcttggaggtggggc

SEQ ID NO: 245626 - DNA, 25 bp, Homo sapien
gaggtggggctgaattttgcttctt

SEQ ID NO: 245627 - DNA, 25 bp, Homo sapien
aacctcatagctcttggaggtgggg

SEQ ID NO: 245628 - DNA, 25 bp, Homo sapien
cgaggccatttgacaccttgtgcca

SEQ ID NO: 245629 - DNA, 25 bp, Homo sapien
aagagaaggaagtactggactgtct

SEQ ID NO: 245630 - DNA, 25 bp, Homo sapien
ggctgccgaggccatttgacacctt

SEQ ID NO: 245631 - DNA, 25 bp, Homo sapien
tgccgaggccatttgacaccttgtg

SEQ ID NO: 245632 - DNA, 25 bp, Homo sapien
tgggctgcgtctaaaggggccccgc

SEQ ID NO: 245633 - DNA, 25 bp, Homo sapien
ctctctcccctgaagtgttgtaatg

SEQ ID NO: 245634 - DNA, 25 bp, Homo sapien
tgtaatggggttgtaacccatccac

SEQ ID NO: 245635 - DNA, 25 bp, Homo sapien
ctctcccctgaagtgttgtaatggg

SEQ ID NO: 245636 - DNA, 25 bp, Homo sapien
tggccttcctaaacagactcccttc

SEQ ID NO: 245637 - DNA, 25 bp, Homo sapien
cattttaggaagatcctagtacctc

SEQ ID NO: 245638 - DNA, 25 bp, Homo sapien
gtcatatgtgttcattgggaacatt

SEQ ID NO: 245639 - DNA, 25 bp, Homo sapien
tgtccaatgatgtcctgccctggcc

SEQ ID NO: 245640 - DNA, 25 bp, Homo sapien
cagtgtcaggactcatgtctcccag

SEQ ID NO: 245641 - DNA, 25 bp, Homo sapien
agtcccgcacgagagaaggcacttg

SEQ ID NO: 245642 - DNA, 25 bp, Homo sapien
taactcctcaggtgagagggcgccc

SEQ ID NO: 245643 - DNA, 25 bp, Homo sapien
tgtctcccagtgaaacgccagctga

SEQ ID NO: 245644 - DNA, 25 bp, Homo sapien
tggaactgagattgcccaaaaaggc

SEQ ID NO: 245645 - DNA, 25 bp, Homo sapien
caaagtgaggtctgttaacccctgc

SEQ ID NO: 245646 - DNA, 25 bp, Homo sapien
gcggccggcacacagaatcagtttc

SEQ ID NO: 245647 - DNA, 25 bp, Homo sapien
ccagctctggactcactacgtgtga

SEQ ID NO: 245648 - DNA, 25 bp, Homo sapien
gagaactaccttgaaagagcaaaac

SEQ ID NO: 245649 - DNA, 25 bp, Homo sapien
cttttcaaagaagtagtccacgaga

SEQ ID NO: 245650 - DNA, 25 bp, Homo sapien
tgaggcatgatacgcctctgtactc

SEQ ID NO: 245651 - DNA, 25 bp, Homo sapien
gcagtgaggcatgatacgcctctgt

SEQ ID NO: 245652 - DNA, 25 bp, Homo sapien
gcctccaggccggtgtgaactctgc

SEQ ID NO: 245653 - DNA, 25 bp, Homo sapien
gaactctgcaacttcacattgtgcc

SEQ ID NO: 245654 - DNA, 25 bp, Homo sapien
agcatgagctcccaccctgaggagg

SEQ ID NO: 245655 - DNA, 25 bp, Homo sapien
cgctggtgtgtcaggagcgcgcctc

SEQ ID NO: 245656 - DNA, 25 bp, Homo sapien
ggcaggtccacgccaggggtgcggg

SEQ ID NO: 245657 - DNA, 25 bp, Homo sapien
caggtccacgccaggggtgcggggc

SEQ ID NO: 245658 - DNA, 25 bp, Homo sapien
gcaggtccacgccaggggtgcgggg

SEQ ID NO: 245659 - DNA, 25 bp, Homo sapien
caggcaggtccacgccaggggtgcg

SEQ ID NO: 245660 - DNA, 25 bp, Homo sapien
tgagtgggatcagcaccacgtaagg

SEQ ID NO: 245661 - DNA, 25 bp, Homo sapien
agactccagtgcaccagagcacgca

SEQ ID NO: 245662 - DNA, 25 bp, Homo sapien
gcgcgctgctgtgaaacgtcctgac

SEQ ID NO: 245663 - DNA, 25 bp, Homo sapien
ggcctcgctgcgctgattcgtcgag

SEQ ID NO: 245664 - DNA, 25 bp, Homo sapien
agagacgcccctaagtcacctgctt

SEQ ID NO: 245665 - DNA, 25 bp, Homo sapien
cccaggtgacgctgttagcgcctca

SEQ ID NO: 245666 - DNA, 25 bp, Homo sapien
tgcttcattagacggtttccaggtt

SEQ ID NO: 245667 - DNA, 25 bp, Homo sapien
catttctttgggtttctagagacgc

SEQ ID NO: 245668 - DNA, 25 bp, Homo sapien
cgtccccagcgctcatggtgttgaa

SEQ ID NO: 245669 - DNA, 25 bp, Homo sapien
gcaccacggtgtctgtgtccacaca

SEQ ID NO: 245670 - DNA, 25 bp, Homo sapien
tgaaactgtctgtcatgcaccacgg

SEQ ID NO: 245671 - DNA, 25 bp, Homo sapien
tgaccaggagtcgtaggagcaagat

SEQ ID NO: 245672 - DNA, 25 bp, Homo sapien
gaagatggtccctcaagtgcaaccc

SEQ ID NO: 245673 - DNA, 25 bp, Homo sapien
tcaggtcctgcctgtagggaactcc

SEQ ID NO: 245674 - DNA, 25 bp, Homo sapien
tccacgtgcattctgacgggcaggg

SEQ ID NO: 245675 - DNA, 25 bp, Homo sapien
actccctacgggatctccaggaaga

SEQ ID NO: 245676 - DNA, 25 bp, Homo sapien
gcttgggtgccagatctgggcagag

SEQ ID NO: 245677 - DNA, 25 bp, Homo sapien
ctggtgtgggggatagaccctctct

SEQ ID NO: 245678 - DNA, 25 bp, Homo sapien
ccccgggcttgggtgccagatctgg

SEQ ID NO: 245679 - DNA, 25 bp, Homo sapien
gctggtgtgggggatagaccctctc

SEQ ID NO: 245680 - DNA, 25 bp, Homo sapien
caccgtcccacaaagagccaggagt

SEQ ID NO: 245681 - DNA, 25 bp, Homo sapien
ccacacagatgaccaaagtgagctt

SEQ ID NO: 245682 - DNA, 25 bp, Homo sapien
atccccgggctgctaggagggattt

SEQ ID NO: 245683 - DNA, 25 bp, Homo sapien
tggacgaagcggcactcaggcctca

SEQ ID NO: 245684 - DNA, 25 bp, Homo sapien
tttaatgtagggcacaggcaccccg

SEQ ID NO: 245685 - DNA, 25 bp, Homo sapien
aaggtccagggcaagtccacgtgca

SEQ ID NO: 245686 - DNA, 25 bp, Homo sapien
gagaagtcagctccgtgggaaccgt

SEQ ID NO: 245687 - DNA, 25 bp, Homo sapien
gggctcagagcacccaggtcatggt

SEQ ID NO: 245688 - DNA, 25 bp, Homo sapien
tcttttgccagcctgtacacccgct

SEQ ID NO: 245689 - DNA, 25 bp, Homo sapien
catcttttgccagcctgtacacccg

SEQ ID NO: 245690 - DNA, 25 bp, Homo sapien
ttttgccagcctgtacacccgcttc

SEQ ID NO: 245691 - DNA, 25 bp, Homo sapien
ttgccagcctgtacacccgcttcac

SEQ ID NO: 245692 - DNA, 25 bp, Homo sapien
cccagggagtcctcaaacacaaaat

SEQ ID NO: 245693 - DNA, 25 bp, Homo sapien
gagtcctcaaacacaaaatcccaga

SEQ ID NO: 245694 - DNA, 25 bp, Homo sapien
tggtcgtagtactcgggcgcgatct

SEQ ID NO: 245695 - DNA, 25 bp, Homo sapien
gtggtgctgcggcaggtggtcgtag

SEQ ID NO: 245696 - DNA, 25 bp, Homo sapien
atgtccagcttggccaaacacaagg

SEQ ID NO: 245697 - DNA, 25 bp, Homo sapien
tggtggcctgaactgcgcccaggac

SEQ ID NO: 245698 - DNA, 25 bp, Homo sapien
tccagcttggccaaacacaaggcca

SEQ ID NO: 245699 - DNA, 25 bp, Homo sapien
tgggtgcctggaagcgtggcgctgg

SEQ ID NO: 245700 - DNA, 25 bp, Homo sapien
gaaggtgatccagttgagaggccca

SEQ ID NO: 245701 - DNA, 25 bp, Homo sapien
catagtaggagtaggtctcgtggcc

SEQ ID NO: 245702 - DNA, 25 bp, Homo sapien
ggttcacgcagccaccaaaggcgta

SEQ ID NO: 245703 - DNA, 25 bp, Homo sapien
ggaacatgtagtgctcggccacgaa

SEQ ID NO: 245704 - DNA, 25 bp, Homo sapien
aggccagcccgcgcaccagccagca

SEQ ID NO: 245705 - DNA, 25 bp, Homo sapien
gccaggccagcccgcgcaccagcca

SEQ ID NO: 245706 - DNA, 25 bp, Homo sapien
agccagcaggccagcatctgcacca

SEQ ID NO: 245707 - DNA, 25 bp, Homo sapien
cagcgccaggccagcccgcgcacca

SEQ ID NO: 245708 - DNA, 25 bp, Homo sapien
cccacttgaggcgcgggtctggccg

SEQ ID NO: 245709 - DNA, 25 bp, Homo sapien
aggcgcgggtctggccgcatcaggg

SEQ ID NO: 245710 - DNA, 25 bp, Homo sapien
tgaggcgcgggtctggccgcatcag

SEQ ID NO: 245711 - DNA, 25 bp, Homo sapien
cttgaggcgcgggtctggccgcatc

SEQ ID NO: 245712 - DNA, 25 bp, Homo sapien
ctgcctgcaggcacctgctggactg

SEQ ID NO: 245713 - DNA, 25 bp, Homo sapien
actgcagcacgtggctgagggaccc

SEQ ID NO: 245714 - DNA, 25 bp, Homo sapien
agcacgtggctgagggacccccaag

SEQ ID NO: 245715 - DNA, 25 bp, Homo sapien
tgctggactgcagcacgtggctgag

SEQ ID NO: 245716 - DNA, 25 bp, Homo sapien
tggatatcaaaactccagcctttgg

SEQ ID NO: 245717 - DNA, 25 bp, Homo sapien
tccaatcagctagggccccgataga

SEQ ID NO: 245718 - DNA, 25 bp, Homo sapien
aatatcatactgagggttccaccgt

SEQ ID NO: 245719 - DNA, 25 bp, Homo sapien
tggttctgaggccctcagactcaga

SEQ ID NO: 245720 - DNA, 25 bp, Homo sapien
ccttgtggctctggcagtttggtcc

SEQ ID NO: 245721 - DNA, 25 bp, Homo sapien
ttgtggctctggcagtttggtcctg

SEQ ID NO: 245722 - DNA, 25 bp, Homo sapien
ggatccccttgtggctctggcagtt

SEQ ID NO: 245723 - DNA, 25 bp, Homo sapien
tccccttgtggctctggcagtttgg

SEQ ID NO: 245724 - DNA, 25 bp, Homo sapien
tttgtattaccatgtgtgccctgct

SEQ ID NO: 245725 - DNA, 25 bp, Homo sapien
tcttctataaagagatgctggcagt

SEQ ID NO: 245726 - DNA, 25 bp, Homo sapien
agttatgttctagggagcatgtccc

SEQ ID NO: 245727 - DNA, 25 bp, Homo sapien
tgtgttccccggcaagttgcttccc

SEQ ID NO: 245728 - DNA, 25 bp, Homo sapien
ggtcggtgtagacccactcgaagtc

SEQ ID NO: 245729 - DNA, 25 bp, Homo sapien
tgcggctggtcggtgtagacccact

SEQ ID NO: 245730 - DNA, 25 bp, Homo sapien
cggctggtcggtgtagacccactcg

SEQ ID NO: 245731 - DNA, 25 bp, Homo sapien
gctggtcggtgtagacccactcgaa

SEQ ID NO: 245732 - DNA, 25 bp, Homo sapien
gggcgggaggcgccgttcggagcgc

SEQ ID NO: 245733 - DNA, 25 bp, Homo sapien
ggcgggaggcgccgttcggagcgcg

SEQ ID NO: 245734 - DNA, 25 bp, Homo sapien
cgggaggcgccgttcggagcgcggc

SEQ ID NO: 245735 - DNA, 25 bp, Homo sapien
tgtcgcggcggccgcggcgcggaac

SEQ ID NO: 245736 - DNA, 25 bp, Homo sapien
cggcggccgcggcgcggaaccagct

SEQ ID NO: 245737 - DNA, 25 bp, Homo sapien
ctgtcgcggcggccgcggcgcggaa

SEQ ID NO: 245738 - DNA, 25 bp, Homo sapien
tcgcggcggccgcggcgcggaacca

SEQ ID NO: 245739 - DNA, 25 bp, Homo sapien
ctggcgctttgggaacctcagttgc

SEQ ID NO: 245740 - DNA, 25 bp, Homo sapien
tgccagtaaacaggcgccgaggaaa

SEQ ID NO: 245741 - DNA, 25 bp, Homo sapien
tgccatctgcgcgagtccctgggtc

SEQ ID NO: 245742 - DNA, 25 bp, Homo sapien
gaatggatgcgacggtgccagtaaa

SEQ ID NO: 245743 - DNA, 25 bp, Homo sapien
gcctggcctcggctggcagttgcct

SEQ ID NO: 245744 - DNA, 25 bp, Homo sapien
tcgcacatagtgagggcgtgcttct

SEQ ID NO: 245745 - DNA, 25 bp, Homo sapien
gcgtgcttctgtgcgtcccatggaa

SEQ ID NO: 245746 - DNA, 25 bp, Homo sapien
gtttggtacacttggcaggccttcc

SEQ ID NO: 245747 - DNA, 25 bp, Homo sapien
catggcccggggtttggtacacttg

SEQ ID NO: 245748 - DNA, 25 bp, Homo sapien
agggtcattctcccgcagcggctgc

SEQ ID NO: 245749 - DNA, 25 bp, Homo sapien
cagagccctcggaggtcgggtaaga

SEQ ID NO: 245750 - DNA, 25 bp, Homo sapien
gccgcgctcaaagcagcctcaaaaa

SEQ ID NO: 245751 - DNA, 25 bp, Homo sapien
caaaaataccgacagggtcattctc

SEQ ID NO: 245752 - DNA, 25 bp, Homo sapien
gcaccgattaacaaatcttcatgga

SEQ ID NO: 245753 - DNA, 25 bp, Homo sapien
aataggctgtaagttaactttagca

SEQ ID NO: 245754 - DNA, 25 bp, Homo sapien
cactgactggcttttgtgcctctaa

SEQ ID NO: 245755 - DNA, 25 bp, Homo sapien
catataccaaaaggattcacataaa

SEQ ID NO: 245756 - DNA, 25 bp, Homo sapien
tcagggctcggtacaaaggctgcat

SEQ ID NO: 245757 - DNA, 25 bp, Homo sapien
cttcccggtcgagttcagggctcgg

SEQ ID NO: 245758 - DNA, 25 bp, Homo sapien
ccttcccggtcgagttcagggctcg

SEQ ID NO: 245759 - DNA, 25 bp, Homo sapien
tcccggtcgagttcagggctcggta

SEQ ID NO: 245760 - DNA, 25 bp, Homo sapien
caaggctgggagtgcccagacagaa

SEQ ID NO: 245761 - DNA, 25 bp, Homo sapien
ccacagagggtgaatggcctggtgc

SEQ ID NO: 245762 - DNA, 25 bp, Homo sapien
atgccacagagggtgaatggcctgg

SEQ ID NO: 245763 - DNA, 25 bp, Homo sapien
catccaagaagtgtgagttcaggcc

SEQ ID NO: 245764 - DNA, 25 bp, Homo sapien
gggagaggctatcaccaagataaat

SEQ ID NO: 245765 - DNA, 25 bp, Homo sapien
tcaccaagataaatcggtaaggctt

SEQ ID NO: 245766 - DNA, 25 bp, Homo sapien
atcggtaaggcttaattccatgtcc

SEQ ID NO: 245767 - DNA, 25 bp, Homo sapien
cttctctgggagaggctatcaccaa

SEQ ID NO: 245768 - DNA, 25 bp, Homo sapien
tcagcctgacgaaaggcggccttta

SEQ ID NO: 245769 - DNA, 25 bp, Homo sapien
ggcggcctttaccagcctcaggacc

SEQ ID NO: 245770 - DNA, 25 bp, Homo sapien
gtgccaagttcacggtctcagcctg

SEQ ID NO: 245771 - DNA, 25 bp, Homo sapien
tggtgatggcccgtgccaagttcac

SEQ ID NO: 245772 - DNA, 25 bp, Homo sapien
gactgttctttgcaatcccggctgg

SEQ ID NO: 245773 - DNA, 25 bp, Homo sapien
ccctcgcttgctccgactgttcttt

SEQ ID NO: 245774 - DNA, 25 bp, Homo sapien
gtgccctctgctcagaacgaccttt

SEQ ID NO: 245775 - DNA, 25 bp, Homo sapien
tgtgccctctgctcagaacgacctt

SEQ ID NO: 245776 - DNA, 25 bp, Homo sapien
aaaaggcagtcccttgccttgcttt

SEQ ID NO: 245777 - DNA, 25 bp, Homo sapien
aaaaaaggcagtcccttgccttgct

SEQ ID NO: 245778 - DNA, 25 bp, Homo sapien
taataacacgtacatatttttaaca

SEQ ID NO: 245779 - DNA, 25 bp, Homo sapien
atgaaaaaaggcagtcccttgcctt

SEQ ID NO: 245780 - DNA, 25 bp, Homo sapien
aaagaagcctccatagagacccaag

SEQ ID NO: 245781 - DNA, 25 bp, Homo sapien
tacaatgttgggagtgtcagcacca

SEQ ID NO: 245782 - DNA, 25 bp, Homo sapien
ggcaggaccctaatctgatcttggg

SEQ ID NO: 245783 - DNA, 25 bp, Homo sapien
gttagacctcgggaaacagaatctc

SEQ ID NO: 245784 - DNA, 25 bp, Homo sapien
ctatggacgctgaatctgagcttgt

SEQ ID NO: 245785 - DNA, 25 bp, Homo sapien
tttccgcagcactaactccttttgg

SEQ ID NO: 245786 - DNA, 25 bp, Homo sapien
gacgctgaatctgagcttgtcgaaa

SEQ ID NO: 245787 - DNA, 25 bp, Homo sapien
gctgaatctgagcttgtcgaaatga

SEQ ID NO: 245788 - DNA, 25 bp, Homo sapien
ggcgacagggccgccccgcacgcgc

SEQ ID NO: 245789 - DNA, 25 bp, Homo sapien
cgacagggccgccccgcacgcgcca

SEQ ID NO: 245790 - DNA, 25 bp, Homo sapien
ccgccccgcacgcgccagccgctcc

SEQ ID NO: 245791 - DNA, 25 bp, Homo sapien
gacagggccgccccgcacgcgccag

SEQ ID NO: 245792 - DNA, 25 bp, Homo sapien
ccgcgcgacaccgggaagcgggagg

SEQ ID NO: 245793 - DNA, 25 bp, Homo sapien
cagccgcgcgacaccgggaagcggg

SEQ ID NO: 245794 - DNA, 25 bp, Homo sapien
gcagccgcgcgacaccgggaagcgg

SEQ ID NO: 245795 - DNA, 25 bp, Homo sapien
agccgcgcgacaccgggaagcggga

SEQ ID NO: 245796 - DNA, 25 bp, Homo sapien
ggcgctcacctgaggaccacatggt

SEQ ID NO: 245797 - DNA, 25 bp, Homo sapien
gaccacatggtgaccgagaactcgc

SEQ ID NO: 245798 - DNA, 25 bp, Homo sapien
gctgaggtaactcttcttgccgctc

SEQ ID NO: 245799 - DNA, 25 bp, Homo sapien
tccagggtcttgatctgcacctgct

SEQ ID NO: 245800 - DNA, 25 bp, Homo sapien
cgagaactcgccctccagggtcttg

SEQ ID NO: 245801 - DNA, 25 bp, Homo sapien
ccacttcttgttgcccgggtcggcg

SEQ ID NO: 245802 - DNA, 25 bp, Homo sapien
accatgtggtcctcaggtgagcgcc

SEQ ID NO: 245803 - DNA, 25 bp, Homo sapien
caagaccctggagggcgagttctcg

SEQ ID NO: 245804 - DNA, 25 bp, Homo sapien
ggcgagttctcggtcaccatgtggt

SEQ ID NO: 245805 - DNA, 25 bp, Homo sapien
aagcaggtgcagatcaagaccctgg

SEQ ID NO: 245806 - DNA, 25 bp, Homo sapien
gcaagaagagttacctcagcggcgg

SEQ ID NO: 245807 - DNA, 25 bp, Homo sapien
cgccgacccgggcaacaagaagtgg

SEQ ID NO: 245808 - DNA, 25 bp, Homo sapien
ccggcctcccatacattttgctaga

SEQ ID NO: 245809 - DNA, 25 bp, Homo sapien
acattttgctagagttattcctagt

SEQ ID NO: 245810 - DNA, 25 bp, Homo sapien
cattttgctagagttattcctagta

SEQ ID NO: 245811 - DNA, 25 bp, Homo sapien
ttgctagagttattcctagtaactt

SEQ ID NO: 245812 - DNA, 25 bp, Homo sapien
tttgctagagttattcctagtaact

SEQ ID NO: 245813 - DNA, 25 bp, Homo sapien
ttttgctagagttattcctagtaac

SEQ ID NO: 245814 - DNA, 25 bp, Homo sapien
tactaggaataactctagcaaaatg

SEQ ID NO: 245815 - DNA, 25 bp, Homo sapien
agttactaggaataactctagcaaa

SEQ ID NO: 245816 - DNA, 25 bp, Homo sapien
aagttactaggaataactctagcaa

SEQ ID NO: 245817 - DNA, 25 bp, Homo sapien
tctagcaaaatgtatgggaggccgg

SEQ ID NO: 245818 - DNA, 25 bp, Homo sapien
gttactaggaataactctagcaaaa

SEQ ID NO: 245819 - DNA, 25 bp, Homo sapien
actaggaataactctagcaaaatgt

SEQ ID NO: 245820 - DNA, 25 bp, Homo sapien
cagttgttgcccagtaatggagtga

SEQ ID NO: 245821 - DNA, 25 bp, Homo sapien
tgtgtggcgctcgagaagcatgtcc

SEQ ID NO: 245822 - DNA, 25 bp, Homo sapien
gaaggacagcacaagtcactagaca

SEQ ID NO: 245823 - DNA, 25 bp, Homo sapien
caaattgataccagtgcagggcggg

SEQ ID NO: 245824 - DNA, 25 bp, Homo sapien
aaatgataagacagcatgacagaag

SEQ ID NO: 245825 - DNA, 25 bp, Homo sapien
tcactagacagctcacaggcagaag

SEQ ID NO: 245826 - DNA, 25 bp, Homo sapien
gaagaaattgttgaggacatgcttc

SEQ ID NO: 245827 - DNA, 25 bp, Homo sapien
tcactccattactgggcaacaactg

SEQ ID NO: 245828 - DNA, 25 bp, Homo sapien
cccgccctgcactggtatcaatttg

SEQ ID NO: 245829 - DNA, 25 bp, Homo sapien
cttctgcctgtgagctgtctagtga

SEQ ID NO: 245830 - DNA, 25 bp, Homo sapien
tctagtgacttgtgctgtccttctg

SEQ ID NO: 245831 - DNA, 25 bp, Homo sapien
gacatgcttctcgagcgccacacat

SEQ ID NO: 245832 - DNA, 25 bp, Homo sapien
cacatgtgtgcgcaaattgaagtcc

SEQ ID NO: 245833 - DNA, 25 bp, Homo sapien
gaagtccagtgaaaagcgtttccca

SEQ ID NO: 245834 - DNA, 25 bp, Homo sapien
tcgaacgtgcactgtcaaggaaaga

SEQ ID NO: 245835 - DNA, 25 bp, Homo sapien
tgtctccggtatggattcgcacatg

SEQ ID NO: 245836 - DNA, 25 bp, Homo sapien
tggaagatgcttcccgtggtcgaga

SEQ ID NO: 245837 - DNA, 25 bp, Homo sapien
caaggaaagaccagagatcaaccca

SEQ ID NO: 245838 - DNA, 25 bp, Homo sapien
gaatcctacacacctaagggacatg

SEQ ID NO: 245839 - DNA, 25 bp, Homo sapien
tatgtgtgccccttcgatggttgta

SEQ ID NO: 245840 - DNA, 25 bp, Homo sapien
ggacttcaatttgcgcacacatgtg

SEQ ID NO: 245841 - DNA, 25 bp, Homo sapien
gagaagacccttctcgaccacggga

SEQ ID NO: 245842 - DNA, 25 bp, Homo sapien
tgtgcgaatccataccggagacagg

SEQ ID NO: 245843 - DNA, 25 bp, Homo sapien
tctttccttgacagtgcacgttcga

SEQ ID NO: 245844 - DNA, 25 bp, Homo sapien
cactgtcgggttgagtagccccagc

SEQ ID NO: 245845 - DNA, 25 bp, Homo sapien
gaactgagttaagcagaagacccca

SEQ ID NO: 245846 - DNA, 25 bp, Homo sapien
tagttctttgacttggacctgggca

SEQ ID NO: 245847 - DNA, 25 bp, Homo sapien
tactaacagtgaccctgtggctctg

SEQ ID NO: 245848 - DNA, 25 bp, Homo sapien
cagagttaacttctgtaaggagttt

SEQ ID NO: 245849 - DNA, 25 bp, Homo sapien
ctgaaatagtcatcactccccttga

SEQ ID NO: 245850 - DNA, 25 bp, Homo sapien
tctgaaatagtcatcactccccttg

SEQ ID NO: 245851 - DNA, 25 bp, Homo sapien
gcttgggaaattcatgttgttgatc

SEQ ID NO: 245852 - DNA, 25 bp, Homo sapien
tcagcctggcttgggaaattcatgt

SEQ ID NO: 245853 - DNA, 25 bp, Homo sapien
ggaaattcatgttgttgatctttaa

SEQ ID NO: 245854 - DNA, 25 bp, Homo sapien
tggaaatcagcctggcttgggaaat

SEQ ID NO: 245855 - DNA, 25 bp, Homo sapien
ccgcttttcatgagacacccagatg

SEQ ID NO: 245856 - DNA, 25 bp, Homo sapien
tcaaattgaccgcttttcatgagac

SEQ ID NO: 245857 - DNA, 25 bp, Homo sapien
aattgaccgcttttcatgagacacc

SEQ ID NO: 245858 - DNA, 25 bp, Homo sapien
tgaccgcttttcatgagacacccag

SEQ ID NO: 245859 - DNA, 25 bp, Homo sapien
ttcgatcaatgcaattatgtgccag

SEQ ID NO: 245860 - DNA, 25 bp, Homo sapien
gggccctgattcgatcaatgcaatt

SEQ ID NO: 245861 - DNA, 25 bp, Homo sapien
cctgattcgatcaatgcaattatgt

SEQ ID NO: 245862 - DNA, 25 bp, Homo sapien
gatcaatgcaattatgtgccaggcc

SEQ ID NO: 245863 - DNA, 25 bp, Homo sapien
caggaatggcattgccctactggca

SEQ ID NO: 245864 - DNA, 25 bp, Homo sapien
ggaatggcattgccctactggcact

SEQ ID NO: 245865 - DNA, 25 bp, Homo sapien
aggaatggcattgccctactggcac

SEQ ID NO: 245866 - DNA, 25 bp, Homo sapien
gcaggaatggcattgccctactggc

SEQ ID NO: 245867 - DNA, 25 bp, Homo sapien
atcattacagctggcgtggtgttgg

SEQ ID NO: 245868 - DNA, 25 bp, Homo sapien
tcattcacccaaactttgtgggaca

SEQ ID NO: 245869 - DNA, 25 bp, Homo sapien
cattccccacgatcctgggggaggt

SEQ ID NO: 245870 - DNA, 25 bp, Homo sapien
gaggtcaagtcggaggagagcaagg

SEQ ID NO: 245871 - DNA, 25 bp, Homo sapien
tgccactggagcaccaccccccccc

SEQ ID NO: 245872 - DNA, 25 bp, Homo sapien
tcaagaggtcctctggcttggactc

SEQ ID NO: 245873 - DNA, 25 bp, Homo sapien
tggcctcaagaggtcctctggcttg

SEQ ID NO: 245874 - DNA, 25 bp, Homo sapien
gcctcaagaggtcctctggcttgga

SEQ ID NO: 245875 - DNA, 25 bp, Homo sapien
acattccccaggacgcctggtgcag

SEQ ID NO: 245876 - DNA, 25 bp, Homo sapien
ttcccttgacagtttctgtacagcg

SEQ ID NO: 245877 - DNA, 25 bp, Homo sapien
aggctgtgcaaagcccagtgtcgtc

SEQ ID NO: 245878 - DNA, 25 bp, Homo sapien
tttctgtacagcgacaccaggctgt

SEQ ID NO: 245879 - DNA, 25 bp, Homo sapien
gccccaactagccacccctgtgccc

SEQ ID NO: 245880 - DNA, 25 bp, Homo sapien
cctgtgccttcacagggatgaagcc

SEQ ID NO: 245881 - DNA, 25 bp, Homo sapien
gtgccttcacagggatgaagccctg

SEQ ID NO: 245882 - DNA, 25 bp, Homo sapien
tgtgccttcacagggatgaagccct

SEQ ID NO: 245883 - DNA, 25 bp, Homo sapien
gccctgtgccttcacagggatgaag

SEQ ID NO: 245884 - DNA, 25 bp, Homo sapien
tgggaggcaccgtttgctggggagc

SEQ ID NO: 245885 - DNA, 25 bp, Homo sapien
tgcctgggaggcaccgtttgctggg

SEQ ID NO: 245886 - DNA, 25 bp, Homo sapien
gaatgcctgggaggcaccgtttgct

SEQ ID NO: 245887 - DNA, 25 bp, Homo sapien
aggcaccgtttgctggggagcagag

SEQ ID NO: 245888 - DNA, 25 bp, Homo sapien
gagactcagttgtccgtcagctggc

SEQ ID NO: 245889 - DNA, 25 bp, Homo sapien
gcttcgtgactctacagtgtgggca

SEQ ID NO: 245890 - DNA, 25 bp, Homo sapien
gaggcaagtgcagttctcggccaaa

SEQ ID NO: 245891 - DNA, 25 bp, Homo sapien
tagtcccgcaggctgatatggtgcc

SEQ ID NO: 245892 - DNA, 25 bp, Homo sapien
tagctctggtgcacgcagtccagga

SEQ ID NO: 245893 - DNA, 25 bp, Homo sapien
gaccacgtccacaggataggtagag

SEQ ID NO: 245894 - DNA, 25 bp, Homo sapien
ggtagagagccaggacacgatgcct

SEQ ID NO: 245895 - DNA, 25 bp, Homo sapien
agcgcgttgatgaaggtgagcccca

SEQ ID NO: 245896 - DNA, 25 bp, Homo sapien
agcggcgagcccaggcccttgtaca

SEQ ID NO: 245897 - DNA, 25 bp, Homo sapien
ggcgagcccaggcccttgtacaggc

SEQ ID NO: 245898 - DNA, 25 bp, Homo sapien
cgagcccaggcccttgtacaggccc

SEQ ID NO: 245899 - DNA, 25 bp, Homo sapien
gagcggcgagcccaggcccttgtac

SEQ ID NO: 245900 - DNA, 25 bp, Homo sapien
cttgaagcagtgcaacgtcccgcgg

SEQ ID NO: 245901 - DNA, 25 bp, Homo sapien
gcagtgcaacgtcccgcggtactga

SEQ ID NO: 245902 - DNA, 25 bp, Homo sapien
gctctcttgcttgatgatggacttg

SEQ ID NO: 245903 - DNA, 25 bp, Homo sapien
ctctcttgcttgatgatggacttga

SEQ ID NO: 245904 - DNA, 25 bp, Homo sapien
tgtcccagactaggctgaagggccc

SEQ ID NO: 245905 - DNA, 25 bp, Homo sapien
tcagagactggcttcgaggcaatag

SEQ ID NO: 245906 - DNA, 25 bp, Homo sapien
gccgggtatctatgccttctcagga

SEQ ID NO: 245907 - DNA, 25 bp, Homo sapien
gcaataggcgcaaaaagtgatgagc

SEQ ID NO: 245908 - DNA, 25 bp, Homo sapien
ggcgctggtcaggccccgctgcctc

SEQ ID NO: 245909 - DNA, 25 bp, Homo sapien
gcgctggtcaggccccgctgcctcc

SEQ ID NO: 245910 - DNA, 25 bp, Homo sapien
gggcgctggtcaggccccgctgcct

SEQ ID NO: 245911 - DNA, 25 bp, Homo sapien
gggctggttccctaggtctgactca

SEQ ID NO: 245912 - DNA, 25 bp, Homo sapien
caataggaggctcagagttgcagag

SEQ ID NO: 245913 - DNA, 25 bp, Homo sapien
aatgatcattcttacagccagggcc

SEQ ID NO: 245914 - DNA, 25 bp, Homo sapien
ggtgggagtaaactaggtcaagtca

SEQ ID NO: 245915 - DNA, 25 bp, Homo sapien
ccaacactggcactaagagggctgt

SEQ ID NO: 245916 - DNA, 25 bp, Homo sapien
gacacaagtttaggaagctcccagc

SEQ ID NO: 245917 - DNA, 25 bp, Homo sapien
ctttgaggattgatgggaacggacc

SEQ ID NO: 245918 - DNA, 25 bp, Homo sapien
gaatgtcaggcttaggtcaactcag

SEQ ID NO: 245919 - DNA, 25 bp, Homo sapien
tctccagggtgaggcttacgcccat

SEQ ID NO: 245920 - DNA, 25 bp, Homo sapien
tagcgctctccagggtgaggcttac

SEQ ID NO: 245921 - DNA, 25 bp, Homo sapien
gctctccagggtgaggcttacgccc

SEQ ID NO: 245922 - DNA, 25 bp, Homo sapien
gcgctctccagggtgaggcttacgc

SEQ ID NO: 245923 - DNA, 25 bp, Homo sapien
tacacttttgctatggatggagaca

SEQ ID NO: 245924 - DNA, 25 bp, Homo sapien
gttacacttttgctatggatggaga

SEQ ID NO: 245925 - DNA, 25 bp, Homo sapien
caaagttacacttttgctatggatg

SEQ ID NO: 245926 - DNA, 25 bp, Homo sapien
cttttgctatggatggagacagccc

SEQ ID NO: 245927 - DNA, 25 bp, Homo sapien
caacatcacatccaggcgcggagcc

SEQ ID NO: 245928 - DNA, 25 bp, Homo sapien
tagctcagaaagtaaaggcggttaa

SEQ ID NO: 245929 - DNA, 25 bp, Homo sapien
ctagctcagaaagtaaaggcggtta

SEQ ID NO: 245930 - DNA, 25 bp, Homo sapien
tcagaaagtaaaggcggttaaagca

SEQ ID NO: 245931 - DNA, 25 bp, Homo sapien
tagaaacgtgtgaaggccgtgtgct

SEQ ID NO: 245932 - DNA, 25 bp, Homo sapien
cagatcttggattctttcagtccca

SEQ ID NO: 245933 - DNA, 25 bp, Homo sapien
tcatcataggtcaagacaactgctc

SEQ ID NO: 245934 - DNA, 25 bp, Homo sapien
ttctgggcgctatagaggagatcca

SEQ ID NO: 245935 - DNA, 25 bp, Homo sapien
tcgggtggcccctgatgatcctagg

SEQ ID NO: 245936 - DNA, 25 bp, Homo sapien
tacggactgacacagactcgggtgg

SEQ ID NO: 245937 - DNA, 25 bp, Homo sapien
tatattcaaccaggcaaaagggacc

SEQ ID NO: 245938 - DNA, 25 bp, Homo sapien
gggtacagctgcaattatattcaac

SEQ ID NO: 245939 - DNA, 25 bp, Homo sapien
ctggtgcctgccactcacagcttgc

SEQ ID NO: 245940 - DNA, 25 bp, Homo sapien
tgtagcgctgccagcaagcacaagg

SEQ ID NO: 245941 - DNA, 25 bp, Homo sapien
gctcagggtgcgcatcctgccttgc

SEQ ID NO: 245942 - DNA, 25 bp, Homo sapien
gtctcccgcaaacccagctcagggt

SEQ ID NO: 245943 - DNA, 25 bp, Homo sapien
aacgggtgtcccacaagcacgcctg

SEQ ID NO: 245944 - DNA, 25 bp, Homo sapien
tgtcaaacgggtgtcccacaagcac

SEQ ID NO: 245945 - DNA, 25 bp, Homo sapien
gaccgtgtcaaacgggtgtcccaca

SEQ ID NO: 245946 - DNA, 25 bp, Homo sapien
ttgaccgtgtcaaacgggtgtccca

SEQ ID NO: 245947 - DNA, 25 bp, Homo sapien
ctctccgcggctgactggtctgggt

SEQ ID NO: 245948 - DNA, 25 bp, Homo sapien
tggctgacagcagaagttgtcccct

SEQ ID NO: 245949 - DNA, 25 bp, Homo sapien
tatgcatgtgacatcccaaggccaa

SEQ ID NO: 245950 - DNA, 25 bp, Homo sapien
ctcacgtccactgggagggtatgca

SEQ ID NO: 245951 - DNA, 25 bp, Homo sapien
ccctggagtttcacgtggacatctg

SEQ ID NO: 245952 - DNA, 25 bp, Homo sapien
ggaagttactatgcatctccacaaa

SEQ ID NO: 245953 - DNA, 25 bp, Homo sapien
ggtaactgactctgactcccatgct

SEQ ID NO: 245954 - DNA, 25 bp, Homo sapien
taattaaaacagctggcatctgctg

SEQ ID NO: 245955 - DNA, 25 bp, Homo sapien
cacgcccggcacttcctgcttctaa

SEQ ID NO: 245956 - DNA, 25 bp, Homo sapien
ccacgcccggcacttcctgcttcta

SEQ ID NO: 245957 - DNA, 25 bp, Homo sapien
tgtgggaggtcgctgagattttatc

SEQ ID NO: 245958 - DNA, 25 bp, Homo sapien
ctgagcccggctcaaaatctatttc

SEQ ID NO: 245959 - DNA, 25 bp, Homo sapien
tcctctggctttcagtgctgcagat

SEQ ID NO: 245960 - DNA, 25 bp, Homo sapien
tgaagaagcaaccaccaagcctatc

SEQ ID NO: 245961 - DNA, 25 bp, Homo sapien
tgggcctaggtttctccgatgagac

SEQ ID NO: 245962 - DNA, 25 bp, Homo sapien
tatctgccctgagcctgtaggttgg

SEQ ID NO: 245963 - DNA, 25 bp, Homo sapien
catgcaaggcctcaaggatgctgtc

SEQ ID NO: 245964 - DNA, 25 bp, Homo sapien
ttaaaacacgtgacccacactaggc

SEQ ID NO: 245965 - DNA, 25 bp, Homo sapien
gggcacccagcgattagcagcaaat

SEQ ID NO: 245966 - DNA, 25 bp, Homo sapien
gagggtttattcgagccaaatccaa

SEQ ID NO: 245967 - DNA, 25 bp, Homo sapien
tgagaatggaatccgcagaggacac

SEQ ID NO: 245968 - DNA, 25 bp, Homo sapien
caaacagcgagatcagaagcgggag

SEQ ID NO: 245969 - DNA, 25 bp, Homo sapien
ccgtccgagcgtgcccagagagaat

SEQ ID NO: 245970 - DNA, 25 bp, Homo sapien
tgaagtcaatttacgcccacgagac

SEQ ID NO: 245971 - DNA, 25 bp, Homo sapien
aataaagacacctgccctcgcggac

SEQ ID NO: 245972 - DNA, 25 bp, Homo sapien
ccgcccgaggcaagagaactgtggt

SEQ ID NO: 245973 - DNA, 25 bp, Homo sapien
atccagccaagaagtccagcgccat

SEQ ID NO: 245974 - DNA, 25 bp, Homo sapien
tccctcggcggcagctgactcgctg

SEQ ID NO: 245975 - DNA, 25 bp, Homo sapien
ggcgaggccgcctttcctcctcgtc

SEQ ID NO: 245976 - DNA, 25 bp, Homo sapien
gggcaggcgcggtcagggatggtgg

SEQ ID NO: 245977 - DNA, 25 bp, Homo sapien
ctcgggccgcgcgccccgcccctcg

SEQ ID NO: 245978 - DNA, 25 bp, Homo sapien
gggccgcgcgccccgcccctcgtgc

SEQ ID NO: 245979 - DNA, 25 bp, Homo sapien
cgggccgcgcgccccgcccctcgtg

SEQ ID NO: 245980 - DNA, 25 bp, Homo sapien
caggcgctgaagtcggagggtgctt

SEQ ID NO: 245981 - DNA, 25 bp, Homo sapien
tcaggcgctgaagtcggagggtgct

SEQ ID NO: 245982 - DNA, 25 bp, Homo sapien
gcgctgaagtcggagggtgcttggc

SEQ ID NO: 245983 - DNA, 25 bp, Homo sapien
tgaagtcggagggtgcttggctctg

SEQ ID NO: 245984 - DNA, 25 bp, Homo sapien
tgtaattaatcagctgaagtcctga

SEQ ID NO: 245985 - DNA, 25 bp, Homo sapien
gaaggcttcctaagggcatcttcaa

SEQ ID NO: 245986 - DNA, 25 bp, Homo sapien
catcttcaacggtctggatgggttg

SEQ ID NO: 245987 - DNA, 25 bp, Homo sapien
gaacaggtcaggtggcgttgtggcc

SEQ ID NO: 245988 - DNA, 25 bp, Homo sapien
cacagccgtgtgagtgggtcacttc

SEQ ID NO: 245989 - DNA, 25 bp, Homo sapien
tggacttagtgactcgcttccagtg

SEQ ID NO: 245990 - DNA, 25 bp, Homo sapien
acaatgcattgcctctgaaactggg

SEQ ID NO: 245991 - DNA, 25 bp, Homo sapien
tttcaagaggcgaaacctcacttcc

SEQ ID NO: 245992 - DNA, 25 bp, Homo sapien
actgtatggatgctgactgtagtgt

SEQ ID NO: 245993 - DNA, 25 bp, Homo sapien
gctgactgtagtgtattggacaatc

SEQ ID NO: 245994 - DNA, 25 bp, Homo sapien
ggatgctgactgtagtgtattggac

SEQ ID NO: 245995 - DNA, 25 bp, Homo sapien
tagtgtattggacaatcagcacagt

SEQ ID NO: 245996 - DNA, 25 bp, Homo sapien
tatttactctactgggtgacaggag

SEQ ID NO: 245997 - DNA, 25 bp, Homo sapien
gtttatttactctactgggtgacag

SEQ ID NO: 245998 - DNA, 25 bp, Homo sapien
tttatttactctactgggtgacagg

SEQ ID NO: 245999 - DNA, 25 bp, Homo sapien
agtttatttactctactgggtgaca

SEQ ID NO: 246000 - DNA, 25 bp, Homo sapien
agaggagacccagatacatcaacca

SEQ ID NO: 246001 - DNA, 25 bp, Homo sapien
cagaggagacccagatacatcaacc

SEQ ID NO: 246002 - DNA, 25 bp, Homo sapien
gagtatacttggaaccctcggagtc

SEQ ID NO: 246003 - DNA, 25 bp, Homo sapien
tgaggcctgcctagacatctgtgag

SEQ ID NO: 246004 - DNA, 25 bp, Homo sapien
catacacaggcttacagaggccagg

SEQ ID NO: 246005 - DNA, 25 bp, Homo sapien
tatccgaccatgcaatgttagccag

SEQ ID NO: 246006 - DNA, 25 bp, Homo sapien
tgcagaacctctatgagtgccttct

SEQ ID NO: 246007 - DNA, 25 bp, Homo sapien
ctggtgctctgcgatcaagggctgc

SEQ ID NO: 246008 - DNA, 25 bp, Homo sapien
tactgaaagtcgaaggacagcttcc

SEQ ID NO: 246009 - DNA, 25 bp, Homo sapien
gtgagcatggctccgctggtgtaat

SEQ ID NO: 246010 - DNA, 25 bp, Homo sapien
caagactgttttgggtggctcctaa

SEQ ID NO: 246011 - DNA, 25 bp, Homo sapien
tagtcaatggcaacacaaaagcccc

SEQ ID NO: 246012 - DNA, 25 bp, Homo sapien
taaaaaccatgagggcgagtctact

SEQ ID NO: 246013 - DNA, 25 bp, Homo sapien
ccttgtttcagttgagcacctccga

SEQ ID NO: 246014 - DNA, 25 bp, Homo sapien
ctccctccagaaaacgcatgcttat

SEQ ID NO: 246015 - DNA, 25 bp, Homo sapien
ctgctcgagcttgtcgtcgtcctcg

SEQ ID NO: 246016 - DNA, 25 bp, Homo sapien
ccctccagaaaacgcatgcttattg

SEQ ID NO: 246017 - DNA, 25 bp, Homo sapien
tcgtcgtcctcgaggaagaaggtca

SEQ ID NO: 246018 - DNA, 25 bp, Homo sapien
acataaataaggcaccgggtccagc

SEQ ID NO: 246019 - DNA, 25 bp, Homo sapien
tcagtgagaacgctctctgggagaa

SEQ ID NO: 246020 - DNA, 25 bp, Homo sapien
aacttggtcaagtggctgggcttct

SEQ ID NO: 246021 - DNA, 25 bp, Homo sapien
tgaggaaccaggcaacagaactggg

SEQ ID NO: 246022 - DNA, 25 bp, Homo sapien
gggcatgtttctgatcccgctggct

SEQ ID NO: 246023 - DNA, 25 bp, Homo sapien
gcaaagttggcaatcctggagttca

SEQ ID NO: 246024 - DNA, 25 bp, Homo sapien
tgactttgcctgcagaacagtgctg

SEQ ID NO: 246025 - DNA, 25 bp, Homo sapien
gaggcccaaagcactgcgcagtggt

SEQ ID NO: 246026 - DNA, 25 bp, Homo sapien
cgtgtcggtgaggaagatggaggag

SEQ ID NO: 246027 - DNA, 25 bp, Homo sapien
tcattttggtctgggcgccctgcag

SEQ ID NO: 246028 - DNA, 25 bp, Homo sapien
cagggctggtttaggatagccgatc

SEQ ID NO: 246029 - DNA, 25 bp, Homo sapien
ctggcactcattttggtctgggcgc

SEQ ID NO: 246030 - DNA, 25 bp, Homo sapien
ctctccccgctgaagagtaagagga

SEQ ID NO: 246031 - DNA, 25 bp, Homo sapien
gtaagaggaacctgctgtcaatgcc

SEQ ID NO: 246032 - DNA, 25 bp, Homo sapien
tcaatgccccagacttagagagcct

SEQ ID NO: 246033 - DNA, 25 bp, Homo sapien
tgcccatcatatctttcaatacctc

SEQ ID NO: 246034 - DNA, 25 bp, Homo sapien
tccgtcctgtctcggaagatctgtg

SEQ ID NO: 246035 - DNA, 25 bp, Homo sapien
tggatatccgtcctgtctcggaaga

SEQ ID NO: 246036 - DNA, 25 bp, Homo sapien
tgtctcggaagatctgtgggaatga

SEQ ID NO: 246037 - DNA, 25 bp, Homo sapien
gtgggaatgagttgctgaaggaggg

SEQ ID NO: 246038 - DNA, 25 bp, Homo sapien
ttcattgtaatgactatccatgttg

SEQ ID NO: 246039 - DNA, 25 bp, Homo sapien
gccaccttccacctttaattatcag

SEQ ID NO: 246040 - DNA, 25 bp, Homo sapien
tcatttaaccattctctagccacct

SEQ ID NO: 246041 - DNA, 25 bp, Homo sapien
ttatcagaagttatgatggcttccc

SEQ ID NO: 246042 - DNA, 25 bp, Homo sapien
caatgcagtcgctgtcagtgaagcc

SEQ ID NO: 246043 - DNA, 25 bp, Homo sapien
gctgtcagtgaagccgaaaatgcct

SEQ ID NO: 246044 - DNA, 25 bp, Homo sapien
cgaaaatgcctttcacttggttgaa

SEQ ID NO: 246045 - DNA, 25 bp, Homo sapien
catttttgtagaaacctgagctcat

SEQ ID NO: 246046 - DNA, 25 bp, Homo sapien
ctgaggaaactgtgtaaccactgag

SEQ ID NO: 246047 - DNA, 25 bp, Homo sapien
ggaagactgactatccttggcaaga

SEQ ID NO: 246048 - DNA, 25 bp, Homo sapien
tctgtgaggaaaaggtgcgttgaaa

SEQ ID NO: 246049 - DNA, 25 bp, Homo sapien
gtgtaaccactgagtcttttctctg

SEQ ID NO: 246050 - DNA, 25 bp, Homo sapien
gtcaaagccacaggcgatgatgtcc

SEQ ID NO: 246051 - DNA, 25 bp, Homo sapien
aatatgaaagtcttgttgatgtcaa

SEQ ID NO: 246052 - DNA, 25 bp, Homo sapien
aggtcagagaatatgaaagtcttgt

SEQ ID NO: 246053 - DNA, 25 bp, Homo sapien
aagccacaggcgatgatgtccttgg

SEQ ID NO: 246054 - DNA, 25 bp, Homo sapien
tcatccgtcatctggatgaccaagg

SEQ ID NO: 246055 - DNA, 25 bp, Homo sapien
cacgttaaatacatcctggagccac

SEQ ID NO: 246056 - DNA, 25 bp, Homo sapien
ttccacagatacttctcgtcatccg

SEQ ID NO: 246057 - DNA, 25 bp, Homo sapien
ctggatgaccaagggcacgttaaat

SEQ ID NO: 246058 - DNA, 25 bp, Homo sapien
ggaggaacgccatcgtgcatctgaa

SEQ ID NO: 246059 - DNA, 25 bp, Homo sapien
tccatggtcctctaaagtgagccca

SEQ ID NO: 246060 - DNA, 25 bp, Homo sapien
tactaccatttatcgaccaggtggc

SEQ ID NO: 246061 - DNA, 25 bp, Homo sapien
agagaagtagcaggcccatggccat

SEQ ID NO: 246062 - DNA, 25 bp, Homo sapien
ccccggcccgtgtacagataaaatg

SEQ ID NO: 246063 - DNA, 25 bp, Homo sapien
ctacatgcattgcttcagaagaggg

SEQ ID NO: 246064 - DNA, 25 bp, Homo sapien
taaatggaatgaggtgacctacatg

SEQ ID NO: 246065 - DNA, 25 bp, Homo sapien
ttttcataggcatcaagaacctgat

SEQ ID NO: 246066 - DNA, 25 bp, Homo sapien
ccaccaccatgcctgcccaattttg

SEQ ID NO: 246067 - DNA, 25 bp, Homo sapien
cccaccaccatgcctgcccaatttt

SEQ ID NO: 246068 - DNA, 25 bp, Homo sapien
tatttcgaggtatatgcccaagaga

SEQ ID NO: 246069 - DNA, 25 bp, Homo sapien
tgcctacctactgttccaaaattgg

SEQ ID NO: 246070 - DNA, 25 bp, Homo sapien
caaaggactatcagtagagtgaaga

SEQ ID NO: 246071 - DNA, 25 bp, Homo sapien
tagatagtcttgatggtctcacaac

SEQ ID NO: 246072 - DNA, 25 bp, Homo sapien
cgttatctgcgtggaatttacggcc

SEQ ID NO: 246073 - DNA, 25 bp, Homo sapien
tgttctcctgtaagcgtgaagtgcc

SEQ ID NO: 246074 - DNA, 25 bp, Homo sapien
tacggcctaaggtacagataatctg

SEQ ID NO: 246075 - DNA, 25 bp, Homo sapien
ccagaaagtgggttgagcaaggcct

SEQ ID NO: 246076 - DNA, 25 bp, Homo sapien
gaagtggtgtggtctttggccggtg

SEQ ID NO: 246077 - DNA, 25 bp, Homo sapien
ggctctctctattcggtttattagc

SEQ ID NO: 246078 - DNA, 25 bp, Homo sapien
ggccggtggctctctctattcggtt

SEQ ID NO: 246079 - DNA, 25 bp, Homo sapien
agaagatgcctctgcgcaggaagtg

SEQ ID NO: 246080 - DNA, 25 bp, Homo sapien
tggaggacagtcagccttgtaatcc

SEQ ID NO: 246081 - DNA, 25 bp, Homo sapien
tttgcactgcttgtctgtactgtcc

SEQ ID NO: 246082 - DNA, 25 bp, Homo sapien
caatgagcttatcgtagtctatgcc

SEQ ID NO: 246083 - DNA, 25 bp, Homo sapien
ggacagtcagccttgtaatcctccc

SEQ ID NO: 246084 - DNA, 25 bp, Homo sapien
ttcttataatcagtcttaatcagtg

SEQ ID NO: 246085 - DNA, 25 bp, Homo sapien
ttttcttataatcagtcttaatcag

SEQ ID NO: 246086 - DNA, 25 bp, Homo sapien
tcttataatcagtcttaatcagtgt

SEQ ID NO: 246087 - DNA, 25 bp, Homo sapien
attttcttataatcagtcttaatca

SEQ ID NO: 246088 - DNA, 25 bp, Homo sapien
gccagggcaggagaatcgctcgaac

SEQ ID NO: 246089 - DNA, 25 bp, Homo sapien
aggccagggcaggagaatcgctcga

SEQ ID NO: 246090 - DNA, 25 bp, Homo sapien
ccagggcaggagaatcgctcgaact

SEQ ID NO: 246091 - DNA, 25 bp, Homo sapien
agggcaggagaatcgctcgaactca

SEQ ID NO: 246092 - DNA, 25 bp, Homo sapien
tgacagcaacaaggtttcagaagcc

SEQ ID NO: 246093 - DNA, 25 bp, Homo sapien
tactggaaggtgaccgagtgtacac

SEQ ID NO: 246094 - DNA, 25 bp, Homo sapien
tacactgttacggaatcacccaaag

SEQ ID NO: 246095 - DNA, 25 bp, Homo sapien
tgaccttgcgcacttacaggagtgg

SEQ ID NO: 246096 - DNA, 25 bp, Homo sapien
gaaactatccagaagaagctggctg

SEQ ID NO: 246097 - DNA, 25 bp, Homo sapien
tagattacagacaacggaagacaga

SEQ ID NO: 246098 - DNA, 25 bp, Homo sapien
tcagattgctgtcagacatggccca

SEQ ID NO: 246099 - DNA, 25 bp, Homo sapien
gagcatggacatcgtaaaatggaac

SEQ ID NO: 246100 - DNA, 25 bp, Homo sapien
aggattcaaatggggatttgctgca

SEQ ID NO: 246101 - DNA, 25 bp, Homo sapien
tttgctgcatttgtggtagctgtag

SEQ ID NO: 246102 - DNA, 25 bp, Homo sapien
ctgcatttgtggtagctgtaggagc

SEQ ID NO: 246103 - DNA, 25 bp, Homo sapien
ggattcaaatggggatttgctgcat

SEQ ID NO: 246104 - DNA, 25 bp, Homo sapien
taaccaaaacacctcagtcattgag

SEQ ID NO: 246105 - DNA, 25 bp, Homo sapien
aaaccatctattctagaggaacaca

SEQ ID NO: 246106 - DNA, 25 bp, Homo sapien
agaggaacacaaccctacagacttg

SEQ ID NO: 246107 - DNA, 25 bp, Homo sapien
gctcagctgccttcgtggagaaccc

SEQ ID NO: 246108 - DNA, 25 bp, Homo sapien
tttgacgcatttcccgctttgaggg

SEQ ID NO: 246109 - DNA, 25 bp, Homo sapien
gcatttcccgctttgagggacctta

SEQ ID NO: 246110 - DNA, 25 bp, Homo sapien
gacgcatttcccgctttgagggacc

SEQ ID NO: 246111 - DNA, 25 bp, Homo sapien
ctttgacgcatttcccgctttgagg

SEQ ID NO: 246112 - DNA, 25 bp, Homo sapien
gctccccttgtgtggcgatgctgtt

SEQ ID NO: 246113 - DNA, 25 bp, Homo sapien
ctccccttgtgtggcgatgctgttg

SEQ ID NO: 246114 - DNA, 25 bp, Homo sapien
tccagcagagatgcgggctcactgt

SEQ ID NO: 246115 - DNA, 25 bp, Homo sapien
gaacagctccagcagagatgcgggc

SEQ ID NO: 246116 - DNA, 25 bp, Homo sapien
tctctcaggaactacgttcacagcc

SEQ ID NO: 246117 - DNA, 25 bp, Homo sapien
ctcaggaactacgttcacagccggc

SEQ ID NO: 246118 - DNA, 25 bp, Homo sapien
tctcaggaactacgttcacagccgg

SEQ ID NO: 246119 - DNA, 25 bp, Homo sapien
tatctctcaggaactacgttcacag

SEQ ID NO: 246120 - DNA, 25 bp, Homo sapien
aggtcagaggatttgttcagcagac

SEQ ID NO: 246121 - DNA, 25 bp, Homo sapien
gaggtcagaggatttgttcagcaga

SEQ ID NO: 246122 - DNA, 25 bp, Homo sapien
tgaggtcagaggatttgttcagcag

SEQ ID NO: 246123 - DNA, 25 bp, Homo sapien
gaggttaacacaacatcgcggctgt

SEQ ID NO: 246124 - DNA, 25 bp, Homo sapien
caggaggactcctgtttgctcaggg

SEQ ID NO: 246125 - DNA, 25 bp, Homo sapien
tcaagtttgcatctggtgatgcccc

SEQ ID NO: 246126 - DNA, 25 bp, Homo sapien
aaaggagtggctaggatttactgac

SEQ ID NO: 246127 - DNA, 25 bp, Homo sapien
ttgagttgaacttcagaggtttttc

SEQ ID NO: 246128 - DNA, 25 bp, Homo sapien
ttttcaacttggagttcaggaacat

SEQ ID NO: 246129 - DNA, 25 bp, Homo sapien
ctattgacatcctcctttatttctt

SEQ ID NO: 246130 - DNA, 25 bp, Homo sapien
ttgttgactttcagaattgagttga

SEQ ID NO: 246131 - DNA, 25 bp, Homo sapien
tcagtgtttaccacataaattgcaa

SEQ ID NO: 246132 - DNA, 25 bp, Homo sapien
aaaggttaaggaccattgtcttcag

SEQ ID NO: 246133 - DNA, 25 bp, Homo sapien
tgcaaataggacattgagactttgt

SEQ ID NO: 246134 - DNA, 25 bp, Homo sapien
actttgttaagagaagtagattcac

SEQ ID NO: 246135 - DNA, 25 bp, Homo sapien
tgcagaggtggccactggtcacgct

SEQ ID NO: 246136 - DNA, 25 bp, Homo sapien
agaggtggccactggtcacgctggg

SEQ ID NO: 246137 - DNA, 25 bp, Homo sapien
tggccactggtcacgctgggcagtt

SEQ ID NO: 246138 - DNA, 25 bp, Homo sapien
aggtggccactggtcacgctgggca

SEQ ID NO: 246139 - DNA, 25 bp, Homo sapien
gccagaaatggtctttaatactctt

SEQ ID NO: 246140 - DNA, 25 bp, Homo sapien
ccagaaatggtctttaatactcttc

SEQ ID NO: 246141 - DNA, 25 bp, Homo sapien
gcattcagctaagggtttcttataa

SEQ ID NO: 246142 - DNA, 25 bp, Homo sapien
tctcctcgggaaaagcgaacaggcg

SEQ ID NO: 246143 - DNA, 25 bp, Homo sapien
tctaaggatactcccgggagggcca

SEQ ID NO: 246144 - DNA, 25 bp, Homo sapien
gagaagcctgctaacattaccgttg

SEQ ID NO: 246145 - DNA, 25 bp, Homo sapien
tcttgagaatcgagccattagctgg

SEQ ID NO: 246146 - DNA, 25 bp, Homo sapien
taacgcggtctctcatagccgctcg

SEQ ID NO: 246147 - DNA, 25 bp, Homo sapien
cagaggccgccactgattggctggc

SEQ ID NO: 246148 - DNA, 25 bp, Homo sapien
tgtctcctgggcgtccgtggaaacg

SEQ ID NO: 246149 - DNA, 25 bp, Homo sapien
agaaagcgctgtgccttggaccaac

SEQ ID NO: 246150 - DNA, 25 bp, Homo sapien
tccagtccagcagtgtgacatggct

SEQ ID NO: 246151 - DNA, 25 bp, Homo sapien
gccttgtgacgtctccatgagccag

SEQ ID NO: 246152 - DNA, 25 bp, Homo sapien
gcctgtgaattcctcgggccttgct

SEQ ID NO: 246153 - DNA, 25 bp, Homo sapien
ttcctcgggccttgctttatgctgt

SEQ ID NO: 246154 - DNA, 25 bp, Homo sapien
taagaatggatgatggacccaggga

SEQ ID NO: 246155 - DNA, 25 bp, Homo sapien
gtgatcaatattccagtttgcttgg

SEQ ID NO: 246156 - DNA, 25 bp, Homo sapien
aatgcacatgaagtgcttggccctc

SEQ ID NO: 246157 - DNA, 25 bp, Homo sapien
ccatcgagatgattgcagtgatcaa

SEQ ID NO: 246158 - DNA, 25 bp, Homo sapien
ttcttgacttttgggcctgggtcca

SEQ ID NO: 246159 - DNA, 25 bp, Homo sapien
ccatgggcttgccttcggagaagat

SEQ ID NO: 246160 - DNA, 25 bp, Homo sapien
gatgcaatcaatccgtttcttgact

SEQ ID NO: 246161 - DNA, 25 bp, Homo sapien
ccagctcagaatggaggtgtgctcc

SEQ ID NO: 246162 - DNA, 25 bp, Homo sapien
tgtccaatgatcagagtccaaggcc

SEQ ID NO: 246163 - DNA, 25 bp, Homo sapien
cttatggcagcaagacagtggcacc

SEQ ID NO: 246164 - DNA, 25 bp, Homo sapien
cggacagcctcagttttcataggag

SEQ ID NO: 246165 - DNA, 25 bp, Homo sapien
aacttcggcctgtcacatgtgtgca

SEQ ID NO: 246166 - DNA, 25 bp, Homo sapien
tgtaagtacactgtcagatgagttt

SEQ ID NO: 246167 - DNA, 25 bp, Homo sapien
gccctgtaagtacactgtcagatga

SEQ ID NO: 246168 - DNA, 25 bp, Homo sapien
gacaaacctgtatacttatgcaacc

SEQ ID NO: 246169 - DNA, 25 bp, Homo sapien
ctatggagatataacttaacaataa

SEQ ID NO: 246170 - DNA, 25 bp, Homo sapien
agcactggaccatcgtccccagatg

SEQ ID NO: 246171 - DNA, 25 bp, Homo sapien
tgctcgttactgactgtagggtact

SEQ ID NO: 246172 - DNA, 25 bp, Homo sapien
acttcacagtcatgaggtacttgat

SEQ ID NO: 246173 - DNA, 25 bp, Homo sapien
gggctcacttatgggacccagtaac

SEQ ID NO: 246174 - DNA, 25 bp, Homo sapien
tcgcccttactttgatactgtgtga

SEQ ID NO: 246175 - DNA, 25 bp, Homo sapien
cagtgaggctctggagagtgagtca

SEQ ID NO: 246176 - DNA, 25 bp, Homo sapien
ctgcacaaatcgcccttactttgat

SEQ ID NO: 246177 - DNA, 25 bp, Homo sapien
gggtgctagagaccgagccttttcc

SEQ ID NO: 246178 - DNA, 25 bp, Homo sapien
tggctgtgggcttcctccttgggcc

SEQ ID NO: 246179 - DNA, 25 bp, Homo sapien
tgtgggcttcctccttgggccacat

SEQ ID NO: 246180 - DNA, 25 bp, Homo sapien
ctggacccacgggctggctgtgggc

SEQ ID NO: 246181 - DNA, 25 bp, Homo sapien
gctgtgggcttcctccttgggccac

SEQ ID NO: 246182 - DNA, 25 bp, Homo sapien
tgtgtcaaagtacccggtccctggc

SEQ ID NO: 246183 - DNA, 25 bp, Homo sapien
gcactgggattgttcccccaggata

SEQ ID NO: 246184 - DNA, 25 bp, Homo sapien
caggctgtcatttggccagagattg

SEQ ID NO: 246185 - DNA, 25 bp, Homo sapien
ccccaggatagtcctgatgacaaat

SEQ ID NO: 246186 - DNA, 25 bp, Homo sapien
tgagctgatggggtcagccgccact

SEQ ID NO: 246187 - DNA, 25 bp, Homo sapien
ggataacctggagtgagctgatggg

SEQ ID NO: 246188 - DNA, 25 bp, Homo sapien
tcagccgccactgtcattgtgatag

SEQ ID NO: 246189 - DNA, 25 bp, Homo sapien
tgtgatagaggcctgcaggagcacc

SEQ ID NO: 246190 - DNA, 25 bp, Homo sapien
tcttttgttgtctagctcctactct

SEQ ID NO: 246191 - DNA, 25 bp, Homo sapien
ctctctttctatgtgcagggtgaca

SEQ ID NO: 246192 - DNA, 25 bp, Homo sapien
tctcagttaaggcaagattgaacac

SEQ ID NO: 246193 - DNA, 25 bp, Homo sapien
acactggaaattggagcagccctgg

SEQ ID NO: 246194 - DNA, 25 bp, Homo sapien
cttggagaagcctgcatggacagcc

SEQ ID NO: 246195 - DNA, 25 bp, Homo sapien
gccatgtgcagctccgtgcctggtg

SEQ ID NO: 246196 - DNA, 25 bp, Homo sapien
tcagtgagggctgtgcgttttgttc

SEQ ID NO: 246197 - DNA, 25 bp, Homo sapien
atggacagccctggcattcacatgc

SEQ ID NO: 246198 - DNA, 25 bp, Homo sapien
tgtcagtgggcaggctttcctggca

SEQ ID NO: 246199 - DNA, 25 bp, Homo sapien
aagactgcttggtgcttctctgcaa

SEQ ID NO: 246200 - DNA, 25 bp, Homo sapien
cttggtgcttctctgcaaatctggc

SEQ ID NO: 246201 - DNA, 25 bp, Homo sapien
ttctcacacccctgagggaagactg

SEQ ID NO: 246202 - DNA, 25 bp, Homo sapien
gagctgctcactttagagttcttca

SEQ ID NO: 246203 - DNA, 25 bp, Homo sapien
agctgctcactttagagttcttcat

SEQ ID NO: 246204 - DNA, 25 bp, Homo sapien
taggggtcctatagacacttgctga

SEQ ID NO: 246205 - DNA, 25 bp, Homo sapien
gtcctatagacacttgctgaattaa

SEQ ID NO: 246206 - DNA, 25 bp, Homo sapien
ggggtcctatagacacttgctgaat

SEQ ID NO: 246207 - DNA, 25 bp, Homo sapien
ggtcctatagacacttgctgaatta

SEQ ID NO: 246208 - DNA, 25 bp, Homo sapien
tcttcgtggacacaacttcagggct

SEQ ID NO: 246209 - DNA, 25 bp, Homo sapien
tactaactggcagggcatgcatcag

SEQ ID NO: 246210 - DNA, 25 bp, Homo sapien
aacagactcctcgttgttggccggg

SEQ ID NO: 246211 - DNA, 25 bp, Homo sapien
cagaaaccaggaatggagggcctcc

SEQ ID NO: 246212 - DNA, 25 bp, Homo sapien
tcagttgagcaaggttccgtagagc

SEQ ID NO: 246213 - DNA, 25 bp, Homo sapien
cctcggagaagctgtcggccttgta

SEQ ID NO: 246214 - DNA, 25 bp, Homo sapien
accagtccgcggaaaggcctgctgg

SEQ ID NO: 246215 - DNA, 25 bp, Homo sapien
tggagctcggctccaaggagtccct

SEQ ID NO: 246216 - DNA, 25 bp, Homo sapien
cgtagtagcgttcagagaagctgca

SEQ ID NO: 246217 - DNA, 25 bp, Homo sapien
cggccccgccgtagtagcgttcaga

SEQ ID NO: 246218 - DNA, 25 bp, Homo sapien
gtaggagtaggcgccgatgtcctcc

SEQ ID NO: 246219 - DNA, 25 bp, Homo sapien
cccgccgtagtagcgttcagagaag

SEQ ID NO: 246220 - DNA, 25 bp, Homo sapien
cagtagagggctgtgtcactgcagt

SEQ ID NO: 246221 - DNA, 25 bp, Homo sapien
tcgcggctgttcaggtagatggcct

SEQ ID NO: 246222 - DNA, 25 bp, Homo sapien
acgcgctcctggaaatccgagggca

SEQ ID NO: 246223 - DNA, 25 bp, Homo sapien
tgcttctccatgtgcaggctcacgc

SEQ ID NO: 246224 - DNA, 25 bp, Homo sapien
tcactgttagcatggcagcccagcc

SEQ ID NO: 246225 - DNA, 25 bp, Homo sapien
cagggtcactgttagcatggcagcc

SEQ ID NO: 246226 - DNA, 25 bp, Homo sapien
ggtcactgttagcatggcagcccag

SEQ ID NO: 246227 - DNA, 25 bp, Homo sapien
gggtcactgttagcatggcagccca

SEQ ID NO: 246228 - DNA, 25 bp, Homo sapien
accgacaggcagacagacgaacggg

SEQ ID NO: 246229 - DNA, 25 bp, Homo sapien
cagacagacgaacgggggcctcccg

SEQ ID NO: 246230 - DNA, 25 bp, Homo sapien
caggcagacagacgaacgggggcct

SEQ ID NO: 246231 - DNA, 25 bp, Homo sapien
ggcagacagacgaacgggggcctcc

SEQ ID NO: 246232 - DNA, 25 bp, Homo sapien
ccaccccactctgattgggcccagg

SEQ ID NO: 246233 - DNA, 25 bp, Homo sapien
ctgcagtcgcctggagaagccggaa

SEQ ID NO: 246234 - DNA, 25 bp, Homo sapien
cattttgtgcccagcgaggggttga

SEQ ID NO: 246235 - DNA, 25 bp, Homo sapien
tgctctcccaggcccgtgggttctg

SEQ ID NO: 246236 - DNA, 25 bp, Homo sapien
gggtgtcccgctactgtttgatcta

SEQ ID NO: 246237 - DNA, 25 bp, Homo sapien
caacaaagattgagggccagggctg

SEQ ID NO: 246238 - DNA, 25 bp, Homo sapien
gctgagagcgcctggtgccatgtgg

SEQ ID NO: 246239 - DNA, 25 bp, Homo sapien
tcatgctgctggagcgctcctgaag

SEQ ID NO: 246240 - DNA, 25 bp, Homo sapien
cctcctcaaagatgggaaatggctt

SEQ ID NO: 246241 - DNA, 25 bp, Homo sapien
ggctttggggtagcactggcacaaa

SEQ ID NO: 246242 - DNA, 25 bp, Homo sapien
tggcacaaaaggagcccggtggtcc

SEQ ID NO: 246243 - DNA, 25 bp, Homo sapien
tcttcctcctcaaagatgggaaatg

SEQ ID NO: 246244 - DNA, 25 bp, Homo sapien
gccgctagattgcagtccttcctat

SEQ ID NO: 246245 - DNA, 25 bp, Homo sapien
tcagacaccttgtggaccctgccgt

SEQ ID NO: 246246 - DNA, 25 bp, Homo sapien
ccttgtggaccctgccgtaggtctg

SEQ ID NO: 246247 - DNA, 25 bp, Homo sapien
gcagctgggccgctagattgcagtc

SEQ ID NO: 246248 - DNA, 25 bp, Homo sapien
catcatcttggagcctagtagggtc

SEQ ID NO: 246249 - DNA, 25 bp, Homo sapien
gacacccttggcgtcctcaatgaga

SEQ ID NO: 246250 - DNA, 25 bp, Homo sapien
tgtgatgcaacactgggactggcca

SEQ ID NO: 246251 - DNA, 25 bp, Homo sapien
ttgaatgggataatatggccccgca

SEQ ID NO: 246252 - DNA, 25 bp, Homo sapien
tgagggcaacaatctcgtggctcag

SEQ ID NO: 246253 - DNA, 25 bp, Homo sapien
gctgttgagggcaacaatctcgtgg

SEQ ID NO: 246254 - DNA, 25 bp, Homo sapien
agggcaacaatctcgtggctcagcg

SEQ ID NO: 246255 - DNA, 25 bp, Homo sapien
tgttgagggcaacaatctcgtggct

SEQ ID NO: 246256 - DNA, 25 bp, Homo sapien
agctcctggttgatcctctgcagtg

SEQ ID NO: 246257 - DNA, 25 bp, Homo sapien
tgcagtgccatgtagttgctctgaa

SEQ ID NO: 246258 - DNA, 25 bp, Homo sapien
gacacttcattagcccgtacgcgct

SEQ ID NO: 246259 - DNA, 25 bp, Homo sapien
tgtttgagggagtccagcacaactg

SEQ ID NO: 246260 - DNA, 25 bp, Homo sapien
taaactggttcatctccgggctaga

SEQ ID NO: 246261 - DNA, 25 bp, Homo sapien
ccaacagcaaaggttgcatgcttct

SEQ ID NO: 246262 - DNA, 25 bp, Homo sapien
ggtagtggcgcgtggagtcgaactc

SEQ ID NO: 246263 - DNA, 25 bp, Homo sapien
gcttctcgagcttgtgtgtggtgta

SEQ ID NO: 246264 - DNA, 25 bp, Homo sapien
gtaggacagccgcttgcgcagctcg

SEQ ID NO: 246265 - DNA, 25 bp, Homo sapien
cgaactcggtctcgagcttctcgag

SEQ ID NO: 246266 - DNA, 25 bp, Homo sapien
actaacacgcgagtaccggcgcgcg

SEQ ID NO: 246267 - DNA, 25 bp, Homo sapien
tgccgcactaacacgcgagtaccgg

SEQ ID NO: 246268 - DNA, 25 bp, Homo sapien
gcactaacacgcgagtaccggcgcg

SEQ ID NO: 246269 - DNA, 25 bp, Homo sapien
gggcgtgccgcactaacacgcgagt

SEQ ID NO: 246270 - DNA, 25 bp, Homo sapien
cagacaatgagctaggcagggattc

SEQ ID NO: 246271 - DNA, 25 bp, Homo sapien
ccccgtgagtaaaccgcatgtggca

SEQ ID NO: 246272 - DNA, 25 bp, Homo sapien
gatggccttccagatacagcagtca

SEQ ID NO: 246273 - DNA, 25 bp, Homo sapien
tctatagctacaggtcccaggctgc

SEQ ID NO: 246274 - DNA, 25 bp, Homo sapien
ctccacacccaacccgtccaatgca

SEQ ID NO: 246275 - DNA, 25 bp, Homo sapien
tctccacacccaacccgtccaatgc

SEQ ID NO: 246276 - DNA, 25 bp, Homo sapien
acacccaacccgtccaatgcagcca

SEQ ID NO: 246277 - DNA, 25 bp, Homo sapien
ccaacccgtccaatgcagccacatc

SEQ ID NO: 246278 - DNA, 25 bp, Homo sapien
cagtgttccccacaccgggcaataa

SEQ ID NO: 246279 - DNA, 25 bp, Homo sapien
gaactggatggtgcacccagacacg

SEQ ID NO: 246280 - DNA, 25 bp, Homo sapien
agggctgttgctggtccacattcta

SEQ ID NO: 246281 - DNA, 25 bp, Homo sapien
tagcaccctccacacagtggacaat

SEQ ID NO: 246282 - DNA, 25 bp, Homo sapien
ccctgcagtactcggggctgcccga

SEQ ID NO: 246283 - DNA, 25 bp, Homo sapien
cagccggccctgcagtactcggggc

SEQ ID NO: 246284 - DNA, 25 bp, Homo sapien
agccggccctgcagtactcggggct

SEQ ID NO: 246285 - DNA, 25 bp, Homo sapien
cggccctgcagtactcggggctgcc

SEQ ID NO: 246286 - DNA, 25 bp, Homo sapien
agaacctacagttggcccctggagg

SEQ ID NO: 246287 - DNA, 25 bp, Homo sapien
gaacctacagttggcccctggagga

SEQ ID NO: 246288 - DNA, 25 bp, Homo sapien
cctgcagaaggccttgtgccccaag

SEQ ID NO: 246289 - DNA, 25 bp, Homo sapien
gccccaagccttccatcaaaggagc

SEQ ID NO: 246290 - DNA, 25 bp, Homo sapien
gactctggctctgagcctagtgggc

SEQ ID NO: 246291 - DNA, 25 bp, Homo sapien
gcccaggactggaaggaggcatcgg

SEQ ID NO: 246292 - DNA, 25 bp, Homo sapien
ttgctgagagatgaccgccatggcg

SEQ ID NO: 246293 - DNA, 25 bp, Homo sapien
ggcagacgcacacaagccatgcttg

SEQ ID NO: 246294 - DNA, 25 bp, Homo sapien
ctggagattggtgtggccggagcct

SEQ ID NO: 246295 - DNA, 25 bp, Homo sapien
tgggccatcgtgtgcaggacacaca

SEQ ID NO: 246296 - DNA, 25 bp, Homo sapien
cagggcgcgtcctggagattggtgt

SEQ ID NO: 246297 - DNA, 25 bp, Homo sapien
tccttgaaaccaacgtcagacccat

SEQ ID NO: 246298 - DNA, 25 bp, Homo sapien
ggatggagcatgaggcctctctcag

SEQ ID NO: 246299 - DNA, 25 bp, Homo sapien
acacgagctgccctcgacacgagcc

SEQ ID NO: 246300 - DNA, 25 bp, Homo sapien
catctcctgcttcccgtctcacgtc

SEQ ID NO: 246301 - DNA, 25 bp, Homo sapien
ccgtctcacgtcctgcaactctgtc

SEQ ID NO: 246302 - DNA, 25 bp, Homo sapien
cataccccagctgtcagtgtcttgg

SEQ ID NO: 246303 - DNA, 25 bp, Homo sapien
tgtcagtgtcttggttcctcacccc

SEQ ID NO: 246304 - DNA, 25 bp, Homo sapien
gagctgctccagattaggagtgact

SEQ ID NO: 246305 - DNA, 25 bp, Homo sapien
ttaggagtgactcccagactcatac

SEQ ID NO: 246306 - DNA, 25 bp, Homo sapien
aggcactgtggctgtcagaacacca

SEQ ID NO: 246307 - DNA, 25 bp, Homo sapien
caggcactgtggctgtcagaacacc

SEQ ID NO: 246308 - DNA, 25 bp, Homo sapien
ccagaccccggctctgttctctggg

SEQ ID NO: 246309 - DNA, 25 bp, Homo sapien
aggggccagaccccggctctgttct

SEQ ID NO: 246310 - DNA, 25 bp, Homo sapien
tgcgagaaaccaaacgagagggtca

SEQ ID NO: 246311 - DNA, 25 bp, Homo sapien
gagaaaccaaacgagagggtcagca

SEQ ID NO: 246312 - DNA, 25 bp, Homo sapien
cacagcgggcacggccgggcaaccc

SEQ ID NO: 246313 - DNA, 25 bp, Homo sapien
gcacagcgggcacggccgggcaacc

SEQ ID NO: 246314 - DNA, 25 bp, Homo sapien
aatccgagggcgatggcatttggag

SEQ ID NO: 246315 - DNA, 25 bp, Homo sapien
acaatccgagggcgatggcatttgg

SEQ ID NO: 246316 - DNA, 25 bp, Homo sapien
caatccgagggcgatggcatttgga

SEQ ID NO: 246317 - DNA, 25 bp, Homo sapien
tcctacggcactggagcctgtcttt

SEQ ID NO: 246318 - DNA, 25 bp, Homo sapien
gcgcttctcatgctaggtcccagca

SEQ ID NO: 246319 - DNA, 25 bp, Homo sapien
ggcgctcaataaacacggacagtgc

SEQ ID NO: 246320 - DNA, 25 bp, Homo sapien
gtgcatgcctggatcctacggcact

SEQ ID NO: 246321 - DNA, 25 bp, Homo sapien
tagctctgggctaagttctccagca

SEQ ID NO: 246322 - DNA, 25 bp, Homo sapien
acaaatattataaatggggtgtggg

SEQ ID NO: 246323 - DNA, 25 bp, Homo sapien
caaatattataaatggggtgtgggg

SEQ ID NO: 246324 - DNA, 25 bp, Homo sapien
ccactagttcccacggcctggcctg

SEQ ID NO: 246325 - DNA, 25 bp, Homo sapien
tggagacctccaaggggaggcagtc

SEQ ID NO: 246326 - DNA, 25 bp, Homo sapien
actgcccaagcaaggcccactagtt

SEQ ID NO: 246327 - DNA, 25 bp, Homo sapien
ggaggcagtccggcctccacgcttg

SEQ ID NO: 246328 - DNA, 25 bp, Homo sapien
tcagtggccgcctccgaagaaagct

SEQ ID NO: 246329 - DNA, 25 bp, Homo sapien
cttggcatgtggcttcgaaggtcct

SEQ ID NO: 246330 - DNA, 25 bp, Homo sapien
cccagcggtggcaagatgctttgcc

SEQ ID NO: 246331 - DNA, 25 bp, Homo sapien
taagggcctcctgggctagaccttg

SEQ ID NO: 246332 - DNA, 25 bp, Homo sapien
agggttagagccccgtgcctgggag

SEQ ID NO: 246333 - DNA, 25 bp, Homo sapien
gacaggtagggttagagccccgtgc

SEQ ID NO: 246334 - DNA, 25 bp, Homo sapien
tagggttagagccccgtgcctggga

SEQ ID NO: 246335 - DNA, 25 bp, Homo sapien
aggtagggttagagccccgtgcctg

SEQ ID NO: 246336 - DNA, 25 bp, Homo sapien
gacatgtacacagctgtccaggtct

SEQ ID NO: 246337 - DNA, 25 bp, Homo sapien
cttcctcagataggacatgtacaca

SEQ ID NO: 246338 - DNA, 25 bp, Homo sapien
ggattttccacgctggcctcagaat

SEQ ID NO: 246339 - DNA, 25 bp, Homo sapien
catggtcttgatgtctcccagtccc

SEQ ID NO: 246340 - DNA, 25 bp, Homo sapien
cgctgacctttcgaagaggtctcac

SEQ ID NO: 246341 - DNA, 25 bp, Homo sapien
ccccggctggccgctgacctttcga

SEQ ID NO: 246342 - DNA, 25 bp, Homo sapien
tgacctttcgaagaggtctcactgc

SEQ ID NO: 246343 - DNA, 25 bp, Homo sapien
gctgacctttcgaagaggtctcact

SEQ ID NO: 246344 - DNA, 25 bp, Homo sapien
gtctgcactggcggccgaccttggc

SEQ ID NO: 246345 - DNA, 25 bp, Homo sapien
ccagtctgcactggcggccgacctt

SEQ ID NO: 246346 - DNA, 25 bp, Homo sapien
agtctgcactggcggccgaccttgg

SEQ ID NO: 246347 - DNA, 25 bp, Homo sapien
tgcactggcggccgaccttggccat

SEQ ID NO: 246348 - DNA, 25 bp, Homo sapien
ggcccggccggcgaccgccagtcca

SEQ ID NO: 246349 - DNA, 25 bp, Homo sapien
ccctcccctccgaggccgagcgcgc

SEQ ID NO: 246350 - DNA, 25 bp, Homo sapien
gccggcgaccgccagtccacatggc

SEQ ID NO: 246351 - DNA, 25 bp, Homo sapien
cccggccggcgaccgccagtccaca

SEQ ID NO: 246352 - DNA, 25 bp, Homo sapien
ctgtcttcgctactccatcctttaa

SEQ ID NO: 246353 - DNA, 25 bp, Homo sapien
gggtattcccgcatctgctgctctt

SEQ ID NO: 246354 - DNA, 25 bp, Homo sapien
tcacggtggctcctcgagggtattc

SEQ ID NO: 246355 - DNA, 25 bp, Homo sapien
ctttaatgggcccacatgcgctcct

SEQ ID NO: 246356 - DNA, 25 bp, Homo sapien
agttgctaaagtgaatgtccacacg

SEQ ID NO: 246357 - DNA, 25 bp, Homo sapien
atgaagttgctaaagtgaatgtcca

SEQ ID NO: 246358 - DNA, 25 bp, Homo sapien
gaagttgctaaagtgaatgtccaca

SEQ ID NO: 246359 - DNA, 25 bp, Homo sapien
ttgctaaagtgaatgtccacacggg

SEQ ID NO: 246360 - DNA, 25 bp, Homo sapien
aacattgaagcacggcggcagcaaa

SEQ ID NO: 246361 - DNA, 25 bp, Homo sapien
gaaacattgaagcacggcggcagca

SEQ ID NO: 246362 - DNA, 25 bp, Homo sapien
acattgaagcacggcggcagcaaag

SEQ ID NO: 246363 - DNA, 25 bp, Homo sapien
aaacattgaagcacggcggcagcaa

SEQ ID NO: 246364 - DNA, 25 bp, Homo sapien
ctgccacaggccaatgaccagggtg

SEQ ID NO: 246365 - DNA, 25 bp, Homo sapien
tgggttttgccccatggctaggtgc

SEQ ID NO: 246366 - DNA, 25 bp, Homo sapien
tcaaattccccttacagggagagaa

SEQ ID NO: 246367 - DNA, 25 bp, Homo sapien
aaattgagaccccataaggccctgc

SEQ ID NO: 246368 - DNA, 25 bp, Homo sapien
ggtgtagtcttttgcgcccgggtca

SEQ ID NO: 246369 - DNA, 25 bp, Homo sapien
agctacaaagtgctgaggctcaggt

SEQ ID NO: 246370 - DNA, 25 bp, Homo sapien
ttttcctcaaagctccagcgctgct

SEQ ID NO: 246371 - DNA, 25 bp, Homo sapien
tctgaagaggctccctggttactcc

SEQ ID NO: 246372 - DNA, 25 bp, Homo sapien
ggaatccagtgcatccagaggcctg

SEQ ID NO: 246373 - DNA, 25 bp, Homo sapien
tgctaactgttccagggaatccagt

SEQ ID NO: 246374 - DNA, 25 bp, Homo sapien
aaggagaaaggcctttgccctgtgt

SEQ ID NO: 246375 - DNA, 25 bp, Homo sapien
gccctgtgtcctgctaactgttcca

SEQ ID NO: 246376 - DNA, 25 bp, Homo sapien
gggtgtttccagagatcgctgggcc

SEQ ID NO: 246377 - DNA, 25 bp, Homo sapien
gactccgggtgtttccagagatcgc

SEQ ID NO: 246378 - DNA, 25 bp, Homo sapien
ggtgtttccagagatcgctgggcct

SEQ ID NO: 246379 - DNA, 25 bp, Homo sapien
tccgggtgtttccagagatcgctgg

SEQ ID NO: 246380 - DNA, 25 bp, Homo sapien
ctcgagggaccggaagaggccctca

SEQ ID NO: 246381 - DNA, 25 bp, Homo sapien
tgctgctgagcgcaggcctttgcgt

SEQ ID NO: 246382 - DNA, 25 bp, Homo sapien
tatgctcctccctcgagggaccgga

SEQ ID NO: 246383 - DNA, 25 bp, Homo sapien
ggccctcagccccagctaccgtgcc

SEQ ID NO: 246384 - DNA, 25 bp, Homo sapien
tctggcttctcgtccgaacgtgggc

SEQ ID NO: 246385 - DNA, 25 bp, Homo sapien
gacacggcatgtgattggacagtga

SEQ ID NO: 246386 - DNA, 25 bp, Homo sapien
ccaggcagaagggtccatgatgcaa

SEQ ID NO: 246387 - DNA, 25 bp, Homo sapien
tgacacttctgtatcccagagggcc

SEQ ID NO: 246388 - DNA, 25 bp, Homo sapien
gtggccacgacaggagccgggaggg

SEQ ID NO: 246389 - DNA, 25 bp, Homo sapien
cctggggtggccacgacaggagccg

SEQ ID NO: 246390 - DNA, 25 bp, Homo sapien
ggaggggtgtcatcggcctggtaac

SEQ ID NO: 246391 - DNA, 25 bp, Homo sapien
ccgggaggggtgtcatcggcctggt

SEQ ID NO: 246392 - DNA, 25 bp, Homo sapien
catccttgggagtgggggtagaagc

SEQ ID NO: 246393 - DNA, 25 bp, Homo sapien
ctgggtccttggcatccttgggagt

SEQ ID NO: 246394 - DNA, 25 bp, Homo sapien
cttggcatccttgggagtgggggta

SEQ ID NO: 246395 - DNA, 25 bp, Homo sapien
ggtccttggcatccttgggagtggg

SEQ ID NO: 246396 - DNA, 25 bp, Homo sapien
ggcctcagcttgggtcgcttctctc

SEQ ID NO: 246397 - DNA, 25 bp, Homo sapien
tctcctgtcagcgtgggccagcgtg

SEQ ID NO: 246398 - DNA, 25 bp, Homo sapien
ttctctcctgtcagcgtgggccagc

SEQ ID NO: 246399 - DNA, 25 bp, Homo sapien
agcttgggtcgcttctctcctgtca

SEQ ID NO: 246400 - DNA, 25 bp, Homo sapien
cgcagtagcccgctttaaagatgga

SEQ ID NO: 246401 - DNA, 25 bp, Homo sapien
tagcccgctttaaagatggacgtga

SEQ ID NO: 246402 - DNA, 25 bp, Homo sapien
tgcagcgctcgcagtagcccgcttt

SEQ ID NO: 246403 - DNA, 25 bp, Homo sapien
ccgctttaaagatggacgtgatgaa

SEQ ID NO: 246404 - DNA, 25 bp, Homo sapien
tgtcagttctggtgataaaggtggt

SEQ ID NO: 246405 - DNA, 25 bp, Homo sapien
tggctcccttccttagtgtcagttc

SEQ ID NO: 246406 - DNA, 25 bp, Homo sapien
cacatggctcccttccttagtgtca

SEQ ID NO: 246407 - DNA, 25 bp, Homo sapien
cagttctggtgataaaggtggtttg

SEQ ID NO: 246408 - DNA, 25 bp, Homo sapien
actggatggtgaggcgaggactagg

SEQ ID NO: 246409 - DNA, 25 bp, Homo sapien
atggtgaggcgaggactaggccctg

SEQ ID NO: 246410 - DNA, 25 bp, Homo sapien
aagcactggatggtgaggcgaggac

SEQ ID NO: 246411 - DNA, 25 bp, Homo sapien
caggcccccaagagagggtgagact

SEQ ID NO: 246412 - DNA, 25 bp, Homo sapien
acataaaggagccaaccgacgtcac

SEQ ID NO: 246413 - DNA, 25 bp, Homo sapien
actggttggtgaggagttgaatgga

SEQ ID NO: 246414 - DNA, 25 bp, Homo sapien
ggagttgaatggaggtactcttagc

SEQ ID NO: 246415 - DNA, 25 bp, Homo sapien
gacgtcaccaccgaactggttggtg

SEQ ID NO: 246416 - DNA, 25 bp, Homo sapien
ttgcagcggcggctcagagtcttct

SEQ ID NO: 246417 - DNA, 25 bp, Homo sapien
tcctttggaacacgcatgaccagca

SEQ ID NO: 246418 - DNA, 25 bp, Homo sapien
gctggtctttgatctgcccgtgtga

SEQ ID NO: 246419 - DNA, 25 bp, Homo sapien
cagtggcctgccaaacccttgtgga

SEQ ID NO: 246420 - DNA, 25 bp, Homo sapien
tgtcagtgccccatgttatttgcat

SEQ ID NO: 246421 - DNA, 25 bp, Homo sapien
ttgtcagtgccccatgttatttgca

SEQ ID NO: 246422 - DNA, 25 bp, Homo sapien
taaatccagtcttgtcagtgcccca

SEQ ID NO: 246423 - DNA, 25 bp, Homo sapien
cttcctaaatccagtcttgtcagtg

SEQ ID NO: 246424 - DNA, 25 bp, Homo sapien
gcctctgaggaatgctgcaggtgct

SEQ ID NO: 246425 - DNA, 25 bp, Homo sapien
gacttaacttcccagggtcttcagc

SEQ ID NO: 246426 - DNA, 25 bp, Homo sapien
gggcacagtagggagtggcctctga

SEQ ID NO: 246427 - DNA, 25 bp, Homo sapien
acacgccttagacaggggctgcggg

SEQ ID NO: 246428 - DNA, 25 bp, Homo sapien
tagttctgagcagtgctctggacca

SEQ ID NO: 246429 - DNA, 25 bp, Homo sapien
tggaccaagcttgttcttcagatcc

SEQ ID NO: 246430 - DNA, 25 bp, Homo sapien
cccagatctgaagatggccttggtg

SEQ ID NO: 246431 - DNA, 25 bp, Homo sapien
gccttggtggcttgtgacatagttc

SEQ ID NO: 246432 - DNA, 25 bp, Homo sapien
tgagggaacgtgtaccaaacgctcg

SEQ ID NO: 246433 - DNA, 25 bp, Homo sapien
agagatgaccgcgaccgaagccctc

SEQ ID NO: 246434 - DNA, 25 bp, Homo sapien
tagccaagagtgcacccgtgtgcgc

SEQ ID NO: 246435 - DNA, 25 bp, Homo sapien
gctcgcgggatacctgtgcccgtct

SEQ ID NO: 246436 - DNA, 25 bp, Homo sapien
gagtgtctgtgcaagcccgagttca

SEQ ID NO: 246437 - DNA, 25 bp, Homo sapien
caacaagtgcgagacctgggtgtcc

SEQ ID NO: 246438 - DNA, 25 bp, Homo sapien
tctcacctgtgtcaagaagcgcgcg

SEQ ID NO: 246439 - DNA, 25 bp, Homo sapien
caatttctgcgagatcgtggccaac

SEQ ID NO: 246440 - DNA, 25 bp, Homo sapien
aacagcccttgggtaccagatagga

SEQ ID NO: 246441 - DNA, 25 bp, Homo sapien
ccttcgtcatctacagtcagtcaca

SEQ ID NO: 246442 - DNA, 25 bp, Homo sapien
attgcctgccgtgtttaccttgctc

SEQ ID NO: 246443 - DNA, 25 bp, Homo sapien
ggtcacctgcgccatcgtcatgaca

SEQ ID NO: 246444 - DNA, 25 bp, Homo sapien
tgaactccacgtagaggaagaggcc

SEQ ID NO: 246445 - DNA, 25 bp, Homo sapien
agcaggtgcatggaaggttcctgaa

SEQ ID NO: 246446 - DNA, 25 bp, Homo sapien
ccccagtgaactccacgtagaggaa

SEQ ID NO: 246447 - DNA, 25 bp, Homo sapien
cacgtagaggaagaggccccgtgca

SEQ ID NO: 246448 - DNA, 25 bp, Homo sapien
caaattttcttagaattagcaaccg

SEQ ID NO: 246449 - DNA, 25 bp, Homo sapien
ttttcttagaattagcaaccgtgct

SEQ ID NO: 246450 - DNA, 25 bp, Homo sapien
ttcttagaattagcaaccgtgcttc

SEQ ID NO: 246451 - DNA, 25 bp, Homo sapien
ttagcaaccgtgcttcactgggagc

SEQ ID NO: 246452 - DNA, 25 bp, Homo sapien
ctgtgcccggcatgcgaggtgccac

SEQ ID NO: 246453 - DNA, 25 bp, Homo sapien
gaggtgccacgtcctccttcctgtt

SEQ ID NO: 246454 - DNA, 25 bp, Homo sapien
gatcaatcggtgctaatgaagctct

SEQ ID NO: 246455 - DNA, 25 bp, Homo sapien
ctctggttgtgagctccagcgcgag

SEQ ID NO: 246456 - DNA, 25 bp, Homo sapien
ttagctgtggctcgccgagcgtttg

SEQ ID NO: 246457 - DNA, 25 bp, Homo sapien
ctgtggctcgccgagcgtttgggag

SEQ ID NO: 246458 - DNA, 25 bp, Homo sapien
gagatggcgccaaaggagggagagg

SEQ ID NO: 246459 - DNA, 25 bp, Homo sapien
ggctcgccgagcgtttgggagtggg

SEQ ID NO: 246460 - DNA, 25 bp, Homo sapien
gagtctgtgtcctgcatgccaggga

SEQ ID NO: 246461 - DNA, 25 bp, Homo sapien
cccgggcatgagaccggagccacag

SEQ ID NO: 246462 - DNA, 25 bp, Homo sapien
gatgggggacctccaagcatccagt

SEQ ID NO: 246463 - DNA, 25 bp, Homo sapien
cacagggtagatagggtgtatttcc

SEQ ID NO: 246464 - DNA, 25 bp, Homo sapien
tcatagcggaattccgggtattctg

SEQ ID NO: 246465 - DNA, 25 bp, Homo sapien
gtgaatttgctcatagcggaattcc

SEQ ID NO: 246466 - DNA, 25 bp, Homo sapien
tctgtgtcgatggaagaattaagtc

SEQ ID NO: 246467 - DNA, 25 bp, Homo sapien
aattccgggtattctgtgtcgatgg

SEQ ID NO: 246468 - DNA, 25 bp, Homo sapien
aactgggtttgccagtagcccgcgg

SEQ ID NO: 246469 - DNA, 25 bp, Homo sapien
ggtttgccagtagcccgcggttcgc

SEQ ID NO: 246470 - DNA, 25 bp, Homo sapien
tgggtttgccagtagcccgcggttc

SEQ ID NO: 246471 - DNA, 25 bp, Homo sapien
ttgccagtagcccgcggttcgccat

SEQ ID NO: 246472 - DNA, 25 bp, Homo sapien
cctgacctgctcagtgagtgagagg

SEQ ID NO: 246473 - DNA, 25 bp, Homo sapien
ctggagaacggaagacccatttcct

SEQ ID NO: 246474 - DNA, 25 bp, Homo sapien
gatggtttttgcaaccctgacctgc

SEQ ID NO: 246475 - DNA, 25 bp, Homo sapien
ccttgatggtttttgcaaccctgac

SEQ ID NO: 246476 - DNA, 25 bp, Homo sapien
cacccgaggaggccggcagatgcac

SEQ ID NO: 246477 - DNA, 25 bp, Homo sapien
aggaggccggcagatgcacctggca

SEQ ID NO: 246478 - DNA, 25 bp, Homo sapien
aggccggcagatgcacctggcagct

SEQ ID NO: 246479 - DNA, 25 bp, Homo sapien
tcacccgaggaggccggcagatgca

SEQ ID NO: 246480 - DNA, 25 bp, Homo sapien
ttgcccgaggctcacagttgcccat

SEQ ID NO: 246481 - DNA, 25 bp, Homo sapien
tggcttacagttgcccgaggctcac

SEQ ID NO: 246482 - DNA, 25 bp, Homo sapien
caccagctgcccgtggcttacagtt

SEQ ID NO: 246483 - DNA, 25 bp, Homo sapien
tgcccgtggcttacagttgcccgag

SEQ ID NO: 246484 - DNA, 25 bp, Homo sapien
caggtggacgtgctcttcccctttg

SEQ ID NO: 246485 - DNA, 25 bp, Homo sapien
cccctttggtcaggatggcaggcct

SEQ ID NO: 246486 - DNA, 25 bp, Homo sapien
cctttggtcaggatggcaggcctgc

SEQ ID NO: 246487 - DNA, 25 bp, Homo sapien
cccattccaggtggacgtgctcttc

SEQ ID NO: 246488 - DNA, 25 bp, Homo sapien
gcgctggagaccttagcccgttcac

SEQ ID NO: 246489 - DNA, 25 bp, Homo sapien
agcgctggagaccttagcccgttca

SEQ ID NO: 246490 - DNA, 25 bp, Homo sapien
tggagaccttagcccgttcaccttc

SEQ ID NO: 246491 - DNA, 25 bp, Homo sapien
gctggagaccttagcccgttcacct

SEQ ID NO: 246492 - DNA, 25 bp, Homo sapien
tcagagggcgcagcgtttgcacaac

SEQ ID NO: 246493 - DNA, 25 bp, Homo sapien
gacctgcggtgttccgggatgacct

SEQ ID NO: 246494 - DNA, 25 bp, Homo sapien
gatgacctttggtgaccttcggtcc

SEQ ID NO: 246495 - DNA, 25 bp, Homo sapien
tttgcacaacataagccctggcggc

SEQ ID NO: 246496 - DNA, 25 bp, Homo sapien
gctctgcattcttgtggagtgggtg

SEQ ID NO: 246497 - DNA, 25 bp, Homo sapien
agtgggtggcactgtgaggcctgct

SEQ ID NO: 246498 - DNA, 25 bp, Homo sapien
tgcaaacaggagcccgatgtaaagg

SEQ ID NO: 246499 - DNA, 25 bp, Homo sapien
caggagcccgatgtaaaggttctga

SEQ ID NO: 246500 - DNA, 25 bp, Homo sapien
tcctttcagcgtcagacagcggtgg

SEQ ID NO: 246501 - DNA, 25 bp, Homo sapien
ctttcagcgtcagacagcggtggca

SEQ ID NO: 246502 - DNA, 25 bp, Homo sapien
tctcctttcagcgtcagacagcggt

SEQ ID NO: 246503 - DNA, 25 bp, Homo sapien
catctcctttcagcgtcagacagcg

SEQ ID NO: 246504 - DNA, 25 bp, Homo sapien
gcccttgtggggctgcagggctgac

SEQ ID NO: 246505 - DNA, 25 bp, Homo sapien
catgcccttgtggggctgcagggct

SEQ ID NO: 246506 - DNA, 25 bp, Homo sapien
tcatgcccttgtggggctgcagggc

SEQ ID NO: 246507 - DNA, 25 bp, Homo sapien
tgcccttgtggggctgcagggctga

SEQ ID NO: 246508 - DNA, 25 bp, Homo sapien
gacatattaaagcagcgccccatga

SEQ ID NO: 246509 - DNA, 25 bp, Homo sapien
cgttcttgacgtctgtggctggtgc

SEQ ID NO: 246510 - DNA, 25 bp, Homo sapien
taataaacgttctcctgttgacgcg

SEQ ID NO: 246511 - DNA, 25 bp, Homo sapien
gaatgcgagccccttgtcaatgcgt

SEQ ID NO: 246512 - DNA, 25 bp, Homo sapien
gacctgacggtcaatgttcacctcc

SEQ ID NO: 246513 - DNA, 25 bp, Homo sapien
gtcccaaggctcggcgcctctagtg

SEQ ID NO: 246514 - DNA, 25 bp, Homo sapien
aaggctcggcgcctctagtgacctg

SEQ ID NO: 246515 - DNA, 25 bp, Homo sapien
ggcgcctctagtgacctgacggtca

SEQ ID NO: 246516 - DNA, 25 bp, Homo sapien
gggattaactcccatgtgccagctc

SEQ ID NO: 246517 - DNA, 25 bp, Homo sapien
gccgagggctcccacctgttaggga

SEQ ID NO: 246518 - DNA, 25 bp, Homo sapien
agggctcggcgcaacatgtgtcgct

SEQ ID NO: 246519 - DNA, 25 bp, Homo sapien
ggacatttgattgacggccctgcac

SEQ ID NO: 246520 - DNA, 25 bp, Homo sapien
agggaaaaagcacccgcgaccacag

SEQ ID NO: 246521 - DNA, 25 bp, Homo sapien
cctgcctggcgagccgggctcacgc

SEQ ID NO: 246522 - DNA, 25 bp, Homo sapien
cgcagggaaaaagcacccgcgacca

SEQ ID NO: 246523 - DNA, 25 bp, Homo sapien
cgggctcacgcagggaaaaagcacc

SEQ ID NO: 246524 - DNA, 25 bp, Homo sapien
ggtgcggctagagcaatttgtcata

SEQ ID NO: 246525 - DNA, 25 bp, Homo sapien
gggcactgcggcagaattttttcct

SEQ ID NO: 246526 - DNA, 25 bp, Homo sapien
agagcaatttgtcatagaatctggg

SEQ ID NO: 246527 - DNA, 25 bp, Homo sapien
tctttgctgcaatctgggtgcggct

SEQ ID NO: 246528 - DNA, 25 bp, Homo sapien
tgctgcccatctacacctcacggta

SEQ ID NO: 246529 - DNA, 25 bp, Homo sapien
ggatgaagaggaccggaactgacca

SEQ ID NO: 246530 - DNA, 25 bp, Homo sapien
tcctggatcccaccaacatacaaag

SEQ ID NO: 246531 - DNA, 25 bp, Homo sapien
cagagggcactaggagcacggtttc

SEQ ID NO: 246532 - DNA, 25 bp, Homo sapien
gacttaaaccaatgccctagtgagg

SEQ ID NO: 246533 - DNA, 25 bp, Homo sapien
tcacctgctagcaaactggagtgtt

SEQ ID NO: 246534 - DNA, 25 bp, Homo sapien
tgggcttctggaatgagcatgctac

SEQ ID NO: 246535 - DNA, 25 bp, Homo sapien
cacccttatgatgtcctgaatggaa

SEQ ID NO: 246536 - DNA, 25 bp, Homo sapien
cagtctttgtcgactgactctgtca

SEQ ID NO: 246537 - DNA, 25 bp, Homo sapien
gccaaccagttttgtccggacaaga

SEQ ID NO: 246538 - DNA, 25 bp, Homo sapien
tgacaaatgaagtgggcggagacct

SEQ ID NO: 246539 - DNA, 25 bp, Homo sapien
agattgggccccactggatcattga

SEQ ID NO: 246540 - DNA, 25 bp, Homo sapien
aaacagaggctgtcaagaggctcca

SEQ ID NO: 246541 - DNA, 25 bp, Homo sapien
taccatgccgtcttaagcagtcagg

SEQ ID NO: 246542 - DNA, 25 bp, Homo sapien
tggaagcacgctcacaaaggtaaag

SEQ ID NO: 246543 - DNA, 25 bp, Homo sapien
tttcggctcatggacacaaggacac

SEQ ID NO: 246544 - DNA, 25 bp, Homo sapien
taatccttgtcatgttttcggctca

SEQ ID NO: 246545 - DNA, 25 bp, Homo sapien
taatctcgggccttgtcgaaggaag

SEQ ID NO: 246546 - DNA, 25 bp, Homo sapien
tattcgtcgcataaggatccttctt

SEQ ID NO: 246547 - DNA, 25 bp, Homo sapien
tgctggattccagtattcgtcgcat

SEQ ID NO: 246548 - DNA, 25 bp, Homo sapien
aagaggctgcagacgttaatgaggt

SEQ ID NO: 246549 - DNA, 25 bp, Homo sapien
ttttgccaaggcgagactttcccag

SEQ ID NO: 246550 - DNA, 25 bp, Homo sapien
tggacatttctcaccccaaggcgga

SEQ ID NO: 246551 - DNA, 25 bp, Homo sapien
ctttagagcaggtatgtcccgagtc

SEQ ID NO: 246552 - DNA, 25 bp, Homo sapien
gctgagatcacacgaaaacctggcc

SEQ ID NO: 246553 - DNA, 25 bp, Homo sapien
gaaaagtaaactgcaggtgaggccg

SEQ ID NO: 246554 - DNA, 25 bp, Homo sapien
ctagctgggccatgcgaagagttct

SEQ ID NO: 246555 - DNA, 25 bp, Homo sapien
gagtctctcaggaccaaagtgggca

SEQ ID NO: 246556 - DNA, 25 bp, Homo sapien
gactgtggctccatagaggtaggcc

SEQ ID NO: 246557 - DNA, 25 bp, Homo sapien
cggtggcccagtcggctgagaactt

SEQ ID NO: 246558 - DNA, 25 bp, Homo sapien
cgccagcgcctctgttggcacggtg

SEQ ID NO: 246559 - DNA, 25 bp, Homo sapien
tgttggcacggtggcccagtcggct

SEQ ID NO: 246560 - DNA, 25 bp, Homo sapien
tcgccagcgcctctgttggcacggt

SEQ ID NO: 246561 - DNA, 25 bp, Homo sapien
cactgcacgcacttatgaggtcttc

SEQ ID NO: 246562 - DNA, 25 bp, Homo sapien
tggactctataaggaggcctcgtgt

SEQ ID NO: 246563 - DNA, 25 bp, Homo sapien
taaaccaaggcacgaatttgctggg

SEQ ID NO: 246564 - DNA, 25 bp, Homo sapien
gattctagcccagcactgcgttatt

SEQ ID NO: 246565 - DNA, 25 bp, Homo sapien
gaaaaaacccagatgctccttcctg

SEQ ID NO: 246566 - DNA, 25 bp, Homo sapien
aaatggcagtgcctttggtcgcgct

SEQ ID NO: 246567 - DNA, 25 bp, Homo sapien
tagataatgggtggtctggcagcct

SEQ ID NO: 246568 - DNA, 25 bp, Homo sapien
aaacggtctcgagtggtggtcagta

SEQ ID NO: 246569 - DNA, 25 bp, Homo sapien
taggcgggcttcaaatgtcggaccc

SEQ ID NO: 246570 - DNA, 25 bp, Homo sapien
atgcctacgtgggaagggacctcga

SEQ ID NO: 246571 - DNA, 25 bp, Homo sapien
ggtgcccatcgagtcaagccaagtg

SEQ ID NO: 246572 - DNA, 25 bp, Homo sapien
cctttggctcttgtgccgcagggca

SEQ ID NO: 246573 - DNA, 25 bp, Homo sapien
gagacatagattttgaggcccgtca

SEQ ID NO: 246574 - DNA, 25 bp, Homo sapien
ccagtatgtttaggacgcgagcccc

SEQ ID NO: 246575 - DNA, 25 bp, Homo sapien
tgtgtgtacacaagaccatggttca

SEQ ID NO: 246576 - DNA, 25 bp, Homo sapien
tggtcattcaccacggtccagaggg

SEQ ID NO: 246577 - DNA, 25 bp, Homo sapien
tgagctccgaagacaaagtgcaaga

SEQ ID NO: 246578 - DNA, 25 bp, Homo sapien
gaacggctcaaagcatacacatggg

SEQ ID NO: 246579 - DNA, 25 bp, Homo sapien
gcagaccgcttaattggcaccagtg

SEQ ID NO: 246580 - DNA, 25 bp, Homo sapien
gctaggacttgtcataagggcacct

SEQ ID NO: 246581 - DNA, 25 bp, Homo sapien
tatcctgtgcactcaaggcccaaaa

SEQ ID NO: 246582 - DNA, 25 bp, Homo sapien
taaacagtaaacgttgaggttcatc

SEQ ID NO: 246583 - DNA, 25 bp, Homo sapien
cagatacctgaatagaggagtgacc

SEQ ID NO: 246584 - DNA, 25 bp, Homo sapien
tgaatagaattcgttcagccgaacg

SEQ ID NO: 246585 - DNA, 25 bp, Homo sapien
aatggtgcttgacgtaggagcagta

SEQ ID NO: 246586 - DNA, 25 bp, Homo sapien
gcaagacactatcttagatcaaaaa

SEQ ID NO: 246587 - DNA, 25 bp, Homo sapien
tgaccgggagccctgattcatggga

SEQ ID NO: 246588 - DNA, 25 bp, Homo sapien
tttataagaaccaagaatggctggg

SEQ ID NO: 246589 - DNA, 25 bp, Homo sapien
gagttgctcgtgctgacagtcctcc

SEQ ID NO: 246590 - DNA, 25 bp, Homo sapien
taacttggcgggattgcgtttcgct

SEQ ID NO: 246591 - DNA, 25 bp, Homo sapien
cgctgtgtcgaggttgtctcttctc

SEQ ID NO: 246592 - DNA, 25 bp, Homo sapien
ggtaaatctggagagttgctcgtgc

SEQ ID NO: 246593 - DNA, 25 bp, Homo sapien
tgtagtggaggaaatgtgtgtagtt

SEQ ID NO: 246594 - DNA, 25 bp, Homo sapien
ctgtagtggaggaaatgtgtgtagt

SEQ ID NO: 246595 - DNA, 25 bp, Homo sapien
tccagtaccacgtgtcagggccaca

SEQ ID NO: 246596 - DNA, 25 bp, Homo sapien
gagctgggcctcgtgggcctgatgt

SEQ ID NO: 246597 - DNA, 25 bp, Homo sapien
gtaccacgtgtcagggccacatgag

SEQ ID NO: 246598 - DNA, 25 bp, Homo sapien
gcctccagtaccacgtgtcagggcc

SEQ ID NO: 246599 - DNA, 25 bp, Homo sapien
gaatcttcataacctcacttgctgc

SEQ ID NO: 246600 - DNA, 25 bp, Homo sapien
gccttgttgagtggctatggcatca

SEQ ID NO: 246601 - DNA, 25 bp, Homo sapien
tgtgagccccataagggcaaggagc

SEQ ID NO: 246602 - DNA, 25 bp, Homo sapien
ggcaaggagcttattgaattggcct

SEQ ID NO: 246603 - DNA, 25 bp, Homo sapien
tgtagacactgcaggctggacctcc

SEQ ID NO: 246604 - DNA, 25 bp, Homo sapien
caggtgtagacactgcaggctggac

SEQ ID NO: 246605 - DNA, 25 bp, Homo sapien
tggactccgatcttgcccttgataa

SEQ ID NO: 246606 - DNA, 25 bp, Homo sapien
ggactccgatcttgcccttgataaa

SEQ ID NO: 246607 - DNA, 25 bp, Homo sapien
cctttcttgtagctgcctcctccgg

SEQ ID NO: 246608 - DNA, 25 bp, Homo sapien
ctcctccggggttactgccctgagc

SEQ ID NO: 246609 - DNA, 25 bp, Homo sapien
gggttactgccctgagcacgtccca

SEQ ID NO: 246610 - DNA, 25 bp, Homo sapien
ggttactgccctgagcacgtcccag

SEQ ID NO: 246611 - DNA, 25 bp, Homo sapien
tgctcatgtgggtgataagaatcac

SEQ ID NO: 246612 - DNA, 25 bp, Homo sapien
tggagccattcctgcccctttcaag

SEQ ID NO: 246613 - DNA, 25 bp, Homo sapien
tcctggaggtgatcttggagccatt

SEQ ID NO: 246614 - DNA, 25 bp, Homo sapien
ttcaagtcattagaacactctggcc

SEQ ID NO: 246615 - DNA, 25 bp, Homo sapien
cataggcaaacctgggtgtccaagg

SEQ ID NO: 246616 - DNA, 25 bp, Homo sapien
tccaaggcacgtggcattttgcaaa

SEQ ID NO: 246617 - DNA, 25 bp, Homo sapien
tagaacactccataggcaaacctgg

SEQ ID NO: 246618 - DNA, 25 bp, Homo sapien
gaccaggtgagaactccctgagttc

SEQ ID NO: 246619 - DNA, 25 bp, Homo sapien
cctgaccttacgctgggattgcatt

SEQ ID NO: 246620 - DNA, 25 bp, Homo sapien
ttttatgttagaaagcgcgtagcct

SEQ ID NO: 246621 - DNA, 25 bp, Homo sapien
tagccttaggatctggcagacccag

SEQ ID NO: 246622 - DNA, 25 bp, Homo sapien
tggaacttgagctgtctgatgcgaa

SEQ ID NO: 246623 - DNA, 25 bp, Homo sapien
tgtccccaccgttggtgacaatcag

SEQ ID NO: 246624 - DNA, 25 bp, Homo sapien
ccaccgttggtgacaatcagcattg

SEQ ID NO: 246625 - DNA, 25 bp, Homo sapien
gtctttgtccccaccgttggtgaca

SEQ ID NO: 246626 - DNA, 25 bp, Homo sapien
gacaatcagcattgacctgtgaggc

SEQ ID NO: 246627 - DNA, 25 bp, Homo sapien
tgagaattctcgctgcatgccgtgg

SEQ ID NO: 246628 - DNA, 25 bp, Homo sapien
aataaacgctttgtgactggcacac

SEQ ID NO: 246629 - DNA, 25 bp, Homo sapien
tcatgacagtgtccgcttgggagac

SEQ ID NO: 246630 - DNA, 25 bp, Homo sapien
tgtaacctggaaagcgtcacacctg

SEQ ID NO: 246631 - DNA, 25 bp, Homo sapien
tccatgctgctaggagcccgtgagc

SEQ ID NO: 246632 - DNA, 25 bp, Homo sapien
cactaggtagacaggccgagctggt

SEQ ID NO: 246633 - DNA, 25 bp, Homo sapien
tgtgaactcttgtcggccagcgagg

SEQ ID NO: 246634 - DNA, 25 bp, Homo sapien
gaaaccagaggttgccagttgtagg

SEQ ID NO: 246635 - DNA, 25 bp, Homo sapien
gggcgctgtgatgcggttccaaagc

SEQ ID NO: 246636 - DNA, 25 bp, Homo sapien
gtgatgcggttccaaagcacagggc

SEQ ID NO: 246637 - DNA, 25 bp, Homo sapien
agggcttggcgcaccccactgtgct

SEQ ID NO: 246638 - DNA, 25 bp, Homo sapien
aagtgggctccttcacctacctcac

SEQ ID NO: 246639 - DNA, 25 bp, Homo sapien
ctcttggaggtccggaggttgacac

SEQ ID NO: 246640 - DNA, 25 bp, Homo sapien
ccctccttctactgatcgtgggatg

SEQ ID NO: 246641 - DNA, 25 bp, Homo sapien
gacacgtgcttggatgaactaacat

SEQ ID NO: 246642 - DNA, 25 bp, Homo sapien
tctactgatcgtgggatgccaggct

SEQ ID NO: 246643 - DNA, 25 bp, Homo sapien
tttgctgcagcggatcataaggaca

SEQ ID NO: 246644 - DNA, 25 bp, Homo sapien
gcagcggatcataaggacatgctcc

SEQ ID NO: 246645 - DNA, 25 bp, Homo sapien
tgctgcagcggatcataaggacatg

SEQ ID NO: 246646 - DNA, 25 bp, Homo sapien
tggctttgctgcagcggatcataag

SEQ ID NO: 246647 - DNA, 25 bp, Homo sapien
catggcccctttgctgagagaaaca

SEQ ID NO: 246648 - DNA, 25 bp, Homo sapien
ggcaagtccagccgtaagtgcacag

SEQ ID NO: 246649 - DNA, 25 bp, Homo sapien
cttggggatcatggccatgacctgg

SEQ ID NO: 246650 - DNA, 25 bp, Homo sapien
aacaaccgccttggggatcatggcc

SEQ ID NO: 246651 - DNA, 25 bp, Homo sapien
tgatgttttagagccaggactccag

SEQ ID NO: 246652 - DNA, 25 bp, Homo sapien
cgataaagctcggatgttcagaatg

SEQ ID NO: 246653 - DNA, 25 bp, Homo sapien
gctccagcctccgataaagctcgga

SEQ ID NO: 246654 - DNA, 25 bp, Homo sapien
gttcagaatgaaggacgtccttgat

SEQ ID NO: 246655 - DNA, 25 bp, Homo sapien
gcagatgtccagaaagagggacctc

SEQ ID NO: 246656 - DNA, 25 bp, Homo sapien
gctttcgaagaagcgcagatgtcca

SEQ ID NO: 246657 - DNA, 25 bp, Homo sapien
ctttgatgttctagggctgggaccc

SEQ ID NO: 246658 - DNA, 25 bp, Homo sapien
caggacttcagctctagctttcgaa

SEQ ID NO: 246659 - DNA, 25 bp, Homo sapien
cattcagacacagctatgagaatgg

SEQ ID NO: 246660 - DNA, 25 bp, Homo sapien
gaatggatcctagaggacgacttac

SEQ ID NO: 246661 - DNA, 25 bp, Homo sapien
acacagctatgagaatggatcctag

SEQ ID NO: 246662 - DNA, 25 bp, Homo sapien
ctatgagaatggatcctagaggacg

SEQ ID NO: 246663 - DNA, 25 bp, Homo sapien
tctgtgttgctatctggcttccgtg

SEQ ID NO: 246664 - DNA, 25 bp, Homo sapien
gcccatcagagggatgttctccagg

SEQ ID NO: 246665 - DNA, 25 bp, Homo sapien
catcagagggatgttctccaggctt

SEQ ID NO: 246666 - DNA, 25 bp, Homo sapien
ctccaggcttctgtgttgctatctg

SEQ ID NO: 246667 - DNA, 25 bp, Homo sapien
gcaggcggctaccaaggaattccag

SEQ ID NO: 246668 - DNA, 25 bp, Homo sapien
tcagtcgaggttagcatcttcgtcc

SEQ ID NO: 246669 - DNA, 25 bp, Homo sapien
gtcctcatcaggcagctcttctagc

SEQ ID NO: 246670 - DNA, 25 bp, Homo sapien
cagggcccgcctgtagatcagggtc

SEQ ID NO: 246671 - DNA, 25 bp, Homo sapien
ctggggatccatcaggtggcgtggg

SEQ ID NO: 246672 - DNA, 25 bp, Homo sapien
tgcaggccacactgacggtaacgtt

SEQ ID NO: 246673 - DNA, 25 bp, Homo sapien
gctagggtgttcttccagtacagga

SEQ ID NO: 246674 - DNA, 25 bp, Homo sapien
tgcagggcttctcgcaagacgacat

SEQ ID NO: 246675 - DNA, 25 bp, Homo sapien
tgtttgcacctacgagagcgggcat

SEQ ID NO: 246676 - DNA, 25 bp, Homo sapien
ccagcagctcttgccgtaggatctg

SEQ ID NO: 246677 - DNA, 25 bp, Homo sapien
cggattccgtcgatggatccctggg

SEQ ID NO: 246678 - DNA, 25 bp, Homo sapien
accggaggtttctcacaggtggcag

SEQ ID NO: 246679 - DNA, 25 bp, Homo sapien
gatctggtcgatgggtatcatggcc

SEQ ID NO: 246680 - DNA, 25 bp, Homo sapien
gacttcctggccataagaaagcaca

SEQ ID NO: 246681 - DNA, 25 bp, Homo sapien
tgacgccggtttccaagtagaatgg

SEQ ID NO: 246682 - DNA, 25 bp, Homo sapien
tgaaggcagcccgtattggaagaat

SEQ ID NO: 246683 - DNA, 25 bp, Homo sapien
tgaagcgctccacgaagtggcggta

SEQ ID NO: 246684 - DNA, 25 bp, Homo sapien
ggtgcggtgcccgttcacgctttcc

SEQ ID NO: 246685 - DNA, 25 bp, Homo sapien
ttcaagctccaaaccaaacgctgct

SEQ ID NO: 246686 - DNA, 25 bp, Homo sapien
cacgttctgaggtatgatagggtct

SEQ ID NO: 246687 - DNA, 25 bp, Homo sapien
tttccacacatcttcggtgcggtgc

SEQ ID NO: 246688 - DNA, 25 bp, Homo sapien
cggctccgtgtaactggtcaaacag

SEQ ID NO: 246689 - DNA, 25 bp, Homo sapien
gttccggaatcatctgtatgtagtc

SEQ ID NO: 246690 - DNA, 25 bp, Homo sapien
ccactcggctccgtgtaactggtca

SEQ ID NO: 246691 - DNA, 25 bp, Homo sapien
ggtcaaacagttccggaatcatctg

SEQ ID NO: 246692 - DNA, 25 bp, Homo sapien
tcgtaaaaggtctcgctgtgatcac

SEQ ID NO: 246693 - DNA, 25 bp, Homo sapien
gacactcgtaaaaggtctcgctgtg

SEQ ID NO: 246694 - DNA, 25 bp, Homo sapien
tggagggacactcgtaaaaggtctc

SEQ ID NO: 246695 - DNA, 25 bp, Homo sapien
tcccaaggcgcggtggagggacact

SEQ ID NO: 246696 - DNA, 25 bp, Homo sapien
ggttaaacacgtcggccaggtctga

SEQ ID NO: 246697 - DNA, 25 bp, Homo sapien
tgtcaaattcgatggactcctggtg

SEQ ID NO: 246698 - DNA, 25 bp, Homo sapien
tcatcggatccgtctgagcttggct

SEQ ID NO: 246699 - DNA, 25 bp, Homo sapien
tgcagcggcctttgatccagtcgac

SEQ ID NO: 246700 - DNA, 25 bp, Homo sapien
accgcgacgctgtggtaggggttca

SEQ ID NO: 246701 - DNA, 25 bp, Homo sapien
gcgacgctgtggtaggggttcactc

SEQ ID NO: 246702 - DNA, 25 bp, Homo sapien
gacgctgtggtaggggttcactctc

SEQ ID NO: 246703 - DNA, 25 bp, Homo sapien
tggaccgcgacgctgtggtaggggt

SEQ ID NO: 246704 - DNA, 25 bp, Homo sapien
tgagggacccggaatagatagtgcc

SEQ ID NO: 246705 - DNA, 25 bp, Homo sapien
tacagcgagatgatggacctcacca

SEQ ID NO: 246706 - DNA, 25 bp, Homo sapien
tgcctggcggtactcaaacacttcg

SEQ ID NO: 246707 - DNA, 25 bp, Homo sapien
aatcagactgtctagggaatccggc

SEQ ID NO: 246708 - DNA, 25 bp, Homo sapien
gtgaaccgttgcatgactcctccag

SEQ ID NO: 246709 - DNA, 25 bp, Homo sapien
cgattccttcaggtcagtgtgagcc

SEQ ID NO: 246710 - DNA, 25 bp, Homo sapien
cctcggtggtgttggatgagccctc

SEQ ID NO: 246711 - DNA, 25 bp, Homo sapien
tctatttccttacgtgggccactgg

SEQ ID NO: 246712 - DNA, 25 bp, Homo sapien
aatgagtcttcagagggttctatca

SEQ ID NO: 246713 - DNA, 25 bp, Homo sapien
atgagtcttcagagggttctatcat

SEQ ID NO: 246714 - DNA, 25 bp, Homo sapien
cacgcttctctctgaaaagactgag

SEQ ID NO: 246715 - DNA, 25 bp, Homo sapien
catcttgcaggtcatcaccaggaag

SEQ ID NO: 246716 - DNA, 25 bp, Homo sapien
acggtgctcgatccccaatggaagg

SEQ ID NO: 246717 - DNA, 25 bp, Homo sapien
cgtccctctgcccataattcattaa

SEQ ID NO: 246718 - DNA, 25 bp, Homo sapien
cctctgtcgggtcagctccttgctt

SEQ ID NO: 246719 - DNA, 25 bp, Homo sapien
ctctgagccagtggcccattgggtc

SEQ ID NO: 246720 - DNA, 25 bp, Homo sapien
ttgggtcagggctgccaacgtgtgt

SEQ ID NO: 246721 - DNA, 25 bp, Homo sapien
ggtcagctccttgcttgcctctgag

SEQ ID NO: 246722 - DNA, 25 bp, Homo sapien
gaagtggcctcaaaatgaatacccc

SEQ ID NO: 246723 - DNA, 25 bp, Homo sapien
gagggacatagctactgggtcttag

SEQ ID NO: 246724 - DNA, 25 bp, Homo sapien
tccttgggtttgagggacatagcta

SEQ ID NO: 246725 - DNA, 25 bp, Homo sapien
ccaggatgggtgtcaggtgaagatc

SEQ ID NO: 246726 - DNA, 25 bp, Homo sapien
ggcagcccagtctcggacattccct

SEQ ID NO: 246727 - DNA, 25 bp, Homo sapien
cttcccctatggtctggaccgaggt

SEQ ID NO: 246728 - DNA, 25 bp, Homo sapien
ccatgggcctcggacttcatcgtag

SEQ ID NO: 246729 - DNA, 25 bp, Homo sapien
gggtgggaggccgttggcatctcgg

SEQ ID NO: 246730 - DNA, 25 bp, Homo sapien
agccagagcgtcagcctcgctggcg

SEQ ID NO: 246731 - DNA, 25 bp, Homo sapien
cggactgggcaaggactaagtccag

SEQ ID NO: 246732 - DNA, 25 bp, Homo sapien
ggactgggcaaggactaagtccagc

SEQ ID NO: 246733 - DNA, 25 bp, Homo sapien
ccggactgggcaaggactaagtcca

SEQ ID NO: 246734 - DNA, 25 bp, Homo sapien
cactggtgtttacctgctaggcgca

SEQ ID NO: 246735 - DNA, 25 bp, Homo sapien
cctttaccccagcttcttagagatg

SEQ ID NO: 246736 - DNA, 25 bp, Homo sapien
cattcttgcagctaaatctgtaaac

SEQ ID NO: 246737 - DNA, 25 bp, Homo sapien
tatcctggcatggaagaccctttag

SEQ ID NO: 246738 - DNA, 25 bp, Homo sapien
ctccttgccagaggtaaacgggtct

SEQ ID NO: 246739 - DNA, 25 bp, Homo sapien
tgccagaggtaaacgggtctggtcc

SEQ ID NO: 246740 - DNA, 25 bp, Homo sapien
tccttgccagaggtaaacgggtctg

SEQ ID NO: 246741 - DNA, 25 bp, Homo sapien
cttgccagaggtaaacgggtctggt

SEQ ID NO: 246742 - DNA, 25 bp, Homo sapien
gctgagagcaagtgctgggaccttt

SEQ ID NO: 246743 - DNA, 25 bp, Homo sapien
catattctaaaaagagcacaggctt

SEQ ID NO: 246744 - DNA, 25 bp, Homo sapien
cagacccagctacagaacagacttg

SEQ ID NO: 246745 - DNA, 25 bp, Homo sapien
tgggacctttgggaccgagtcatat

SEQ ID NO: 246746 - DNA, 25 bp, Homo sapien
gaacagagccttgtctagcagaggt

SEQ ID NO: 246747 - DNA, 25 bp, Homo sapien
ctgggaactgaacccctgtgaatgg

SEQ ID NO: 246748 - DNA, 25 bp, Homo sapien
cccgaggaccttgggcatttcacag

SEQ ID NO: 246749 - DNA, 25 bp, Homo sapien
gcagaggtcccctgataaaggtccc

SEQ ID NO: 246750 - DNA, 25 bp, Homo sapien
tctgcttctgagcgcactgactggc

SEQ ID NO: 246751 - DNA, 25 bp, Homo sapien
gcttctgagcgcactgactggctca

SEQ ID NO: 246752 - DNA, 25 bp, Homo sapien
tgcttctgagcgcactgactggctc

SEQ ID NO: 246753 - DNA, 25 bp, Homo sapien
gttctgcttctgagcgcactgactg

SEQ ID NO: 246754 - DNA, 25 bp, Homo sapien
tagactgtctgctgggataaagacg

SEQ ID NO: 246755 - DNA, 25 bp, Homo sapien
tagatgtaggtcagacaagaaccac

SEQ ID NO: 246756 - DNA, 25 bp, Homo sapien
taaatgagtttcctatgagagggac

SEQ ID NO: 246757 - DNA, 25 bp, Homo sapien
aacaagagagggcaaacatgggaca

SEQ ID NO: 246758 - DNA, 25 bp, Homo sapien
tgggctatttactctgaccaaggag

SEQ ID NO: 246759 - DNA, 25 bp, Homo sapien
cgtttgcccataaatagaaatctgg

SEQ ID NO: 246760 - DNA, 25 bp, Homo sapien
gagtgtcagcataaaccaatgatga

SEQ ID NO: 246761 - DNA, 25 bp, Homo sapien
gagtattttctagtattgcccaatg

SEQ ID NO: 246762 - DNA, 25 bp, Homo sapien
tacccgtccgcagtagaactttctg

SEQ ID NO: 246763 - DNA, 25 bp, Homo sapien
tggctggcgttcatgagtaactgaa

SEQ ID NO: 246764 - DNA, 25 bp, Homo sapien
cagtgatgaaagtgtgtcatgaacc

SEQ ID NO: 246765 - DNA, 25 bp, Homo sapien
aagcctaagcatggaccagtgatga

SEQ ID NO: 246766 - DNA, 25 bp, Homo sapien
gaagaggatcaagcatggcaagtgc

SEQ ID NO: 246767 - DNA, 25 bp, Homo sapien
gtagctgactaaatggaagaggatc

SEQ ID NO: 246768 - DNA, 25 bp, Homo sapien
caaatacctgattatgtagctgact

SEQ ID NO: 246769 - DNA, 25 bp, Homo sapien
ccactgtctggcctattataagtag

SEQ ID NO: 246770 - DNA, 25 bp, Homo sapien
tgtgactccacgtttttgccatcat

SEQ ID NO: 246771 - DNA, 25 bp, Homo sapien
taataggtgtgcggtggtatctcgt

SEQ ID NO: 246772 - DNA, 25 bp, Homo sapien
tcttccaatgtgattgtgttgattt

SEQ ID NO: 246773 - DNA, 25 bp, Homo sapien
tttcccaataatatatgatgtggag

SEQ ID NO: 246774 - DNA, 25 bp, Homo sapien
gatttcgttgttttttatcaggcca

SEQ ID NO: 246775 - DNA, 25 bp, Homo sapien
gggcagcgcatgagaatatggaaat

SEQ ID NO: 246776 - DNA, 25 bp, Homo sapien
ggtagagatcctggctgacatccgt

SEQ ID NO: 246777 - DNA, 25 bp, Homo sapien
caggccatcgttgacatatgtatga

SEQ ID NO: 246778 - DNA, 25 bp, Homo sapien
tatcagaacgaatgctgaatgtgaa

SEQ ID NO: 246779 - DNA, 25 bp, Homo sapien
ctatatcagaacgaatgctgaatgt

SEQ ID NO: 246780 - DNA, 25 bp, Homo sapien
atatcagaacgaatgctgaatgtga

SEQ ID NO: 246781 - DNA, 25 bp, Homo sapien
tatatcagaacgaatgctgaatgtg

SEQ ID NO: 246782 - DNA, 25 bp, Homo sapien
gttgacttaagcacccttccatggt

SEQ ID NO: 246783 - DNA, 25 bp, Homo sapien
caatgaacaccctcaagttgactta

SEQ ID NO: 246784 - DNA, 25 bp, Homo sapien
tgcctctgtgtgttagaagcttgga

SEQ ID NO: 246785 - DNA, 25 bp, Homo sapien
atccaaaaggttaaccatggtccag

SEQ ID NO: 246786 - DNA, 25 bp, Homo sapien
gacctaagcattcatggtcatgaga

SEQ ID NO: 246787 - DNA, 25 bp, Homo sapien
cttgagccgacctaagcattcatgg

SEQ ID NO: 246788 - DNA, 25 bp, Homo sapien
tcatggtcatgagatttgtggttgc

SEQ ID NO: 246789 - DNA, 25 bp, Homo sapien
cagaatggatgcacttgagccgacc

SEQ ID NO: 246790 - DNA, 25 bp, Homo sapien
tgctttgcacttcccagaatggaca

SEQ ID NO: 246791 - DNA, 25 bp, Homo sapien
cttctctgctttgcacttcccagaa

SEQ ID NO: 246792 - DNA, 25 bp, Homo sapien
tctctgctttgcacttcccagaatg

SEQ ID NO: 246793 - DNA, 25 bp, Homo sapien
tttgcacttcccagaatggacacac

SEQ ID NO: 246794 - DNA, 25 bp, Homo sapien
catcttgccttgatctggagcccca

SEQ ID NO: 246795 - DNA, 25 bp, Homo sapien
aacatcttgccttgatctggagccc

SEQ ID NO: 246796 - DNA, 25 bp, Homo sapien
atcttgccttgatctggagccccat

SEQ ID NO: 246797 - DNA, 25 bp, Homo sapien
agaacatcttgccttgatctggagc

SEQ ID NO: 246798 - DNA, 25 bp, Homo sapien
cttcgcagggttgatgttcatgggt

SEQ ID NO: 246799 - DNA, 25 bp, Homo sapien
tacttcgcagggttgatgttcatgg

SEQ ID NO: 246800 - DNA, 25 bp, Homo sapien
gtacttcgcagggttgatgttcatg

SEQ ID NO: 246801 - DNA, 25 bp, Homo sapien
ctgtaacatctactttgtacttcgc

SEQ ID NO: 246802 - DNA, 25 bp, Homo sapien
tcatcctgtagcgacggtggtattg

SEQ ID NO: 246803 - DNA, 25 bp, Homo sapien
gcgacggtggtattgactgttcccc

SEQ ID NO: 246804 - DNA, 25 bp, Homo sapien
cctgtagcgacggtggtattgactg

SEQ ID NO: 246805 - DNA, 25 bp, Homo sapien
aaggagtgtgttcttatgtaagtca

SEQ ID NO: 246806 - DNA, 25 bp, Homo sapien
ttttgattgggtagtttgcctgttc

SEQ ID NO: 246807 - DNA, 25 bp, Homo sapien
tcttgtttttgattgggtagtttgc

SEQ ID NO: 246808 - DNA, 25 bp, Homo sapien
tcattgatgttcatagtactataga

SEQ ID NO: 246809 - DNA, 25 bp, Homo sapien
agaaggtagataaatggccacatac

SEQ ID NO: 246810 - DNA, 25 bp, Homo sapien
tcctatattccacagaatggacatc

SEQ ID NO: 246811 - DNA, 25 bp, Homo sapien
ctatattccacagaatggacatcat

SEQ ID NO: 246812 - DNA, 25 bp, Homo sapien
tgtcctatattccacagaatggaca

SEQ ID NO: 246813 - DNA, 25 bp, Homo sapien
ctgtcctatattccacagaatggac

SEQ ID NO: 246814 - DNA, 25 bp, Homo sapien
cctccttagctcaggatggtgtaga

SEQ ID NO: 246815 - DNA, 25 bp, Homo sapien
taggcccatgttgggaatatccgag

SEQ ID NO: 246816 - DNA, 25 bp, Homo sapien
aatatccgaggatcttgggcttgat

SEQ ID NO: 246817 - DNA, 25 bp, Homo sapien
gactgactaaaggtgaaaagcaagg

SEQ ID NO: 246818 - DNA, 25 bp, Homo sapien
gcctcttgattgggagcacgcagac

SEQ ID NO: 246819 - DNA, 25 bp, Homo sapien
gaaggattcctccctggtgacatgc

SEQ ID NO: 246820 - DNA, 25 bp, Homo sapien
aaggattcctccctggtgacatgct

SEQ ID NO: 246821 - DNA, 25 bp, Homo sapien
ctgcctcttgattgggagcacgcag

SEQ ID NO: 246822 - DNA, 25 bp, Homo sapien
cgatgaatacgtgtctagaactctg

SEQ ID NO: 246823 - DNA, 25 bp, Homo sapien
actgctggtggcgtatgagtcatat

SEQ ID NO: 246824 - DNA, 25 bp, Homo sapien
gaaagagatgaacaatcctggatcg

SEQ ID NO: 246825 - DNA, 25 bp, Homo sapien
tgagtaaggttaatcattgtccagt

SEQ ID NO: 246826 - DNA, 25 bp, Homo sapien
caaaggctatgtgatttttaggtca

SEQ ID NO: 246827 - DNA, 25 bp, Homo sapien
cctacagacaaatgtgagtaatcgt

SEQ ID NO: 246828 - DNA, 25 bp, Homo sapien
tcttccttgtaatcctcagaacagt

SEQ ID NO: 246829 - DNA, 25 bp, Homo sapien
ttaggtcaattctcaggtcaactgg

SEQ ID NO: 246830 - DNA, 25 bp, Homo sapien
gaaatctagcctattgatcagttgg

SEQ ID NO: 246831 - DNA, 25 bp, Homo sapien
taggagtcaggaagtttaagctccg

SEQ ID NO: 246832 - DNA, 25 bp, Homo sapien
aatattcagttatcggctgggcacg

SEQ ID NO: 246833 - DNA, 25 bp, Homo sapien
cagttggaaatgatcctgtagacag

SEQ ID NO: 246834 - DNA, 25 bp, Homo sapien
tacgatggttacttcacgtttacta

SEQ ID NO: 246835 - DNA, 25 bp, Homo sapien
cgatggttacttcacgtttactaag

SEQ ID NO: 246836 - DNA, 25 bp, Homo sapien
tgttcaatttctacgatggttactt

SEQ ID NO: 246837 - DNA, 25 bp, Homo sapien
ttgtgttcaatttctacgatggtta

SEQ ID NO: 246838 - DNA, 25 bp, Homo sapien
atccctcagagtaaggagaatgtca

SEQ ID NO: 246839 - DNA, 25 bp, Homo sapien
gaatgtcatataatgtaagtaataa

SEQ ID NO: 246840 - DNA, 25 bp, Homo sapien
cttatccctcagagtaaggagaatg

SEQ ID NO: 246841 - DNA, 25 bp, Homo sapien
ttcttgagttgggttgttggttcat

SEQ ID NO: 246842 - DNA, 25 bp, Homo sapien
tatcccaaagggctatgagcttctt

SEQ ID NO: 246843 - DNA, 25 bp, Homo sapien
gctatgagctgccaatttatcccaa

SEQ ID NO: 246844 - DNA, 25 bp, Homo sapien
tatgtcattatagcccacagaaggt

SEQ ID NO: 246845 - DNA, 25 bp, Homo sapien
catgccagaacccacatcacattgt

SEQ ID NO: 246846 - DNA, 25 bp, Homo sapien
tcagagatggccagtggctttggcc

SEQ ID NO: 246847 - DNA, 25 bp, Homo sapien
gtcagagatggccagtggctttggc

SEQ ID NO: 246848 - DNA, 25 bp, Homo sapien
tgggcaatcgaactagctcttgaaa

SEQ ID NO: 246849 - DNA, 25 bp, Homo sapien
gcaatcgaactagctcttgaaactg

SEQ ID NO: 246850 - DNA, 25 bp, Homo sapien
aggatgtgggcaatcgaactagctc

SEQ ID NO: 246851 - DNA, 25 bp, Homo sapien
gctcttgaaactgaacgttttgcaa

SEQ ID NO: 246852 - DNA, 25 bp, Homo sapien
cttcattggaggctttagacggagc

SEQ ID NO: 246853 - DNA, 25 bp, Homo sapien
aggctttagacggagccagtgacag

SEQ ID NO: 246854 - DNA, 25 bp, Homo sapien
tctccagcgtgaaggggacctcaat

SEQ ID NO: 246855 - DNA, 25 bp, Homo sapien
cattggaggctttagacggagccag

SEQ ID NO: 246856 - DNA, 25 bp, Homo sapien
cagtccatactccatccagtccact

SEQ ID NO: 246857 - DNA, 25 bp, Homo sapien
agtccactgtccaccccgaccatgt

SEQ ID NO: 246858 - DNA, 25 bp, Homo sapien
cagttcatactgcatccagtccata

SEQ ID NO: 246859 - DNA, 25 bp, Homo sapien
gtccaccccgaccatgttcatctga

SEQ ID NO: 246860 - DNA, 25 bp, Homo sapien
tccaatccatcctcggagggcttcc

SEQ ID NO: 246861 - DNA, 25 bp, Homo sapien
gtatccaatccatcctcggagggct

SEQ ID NO: 246862 - DNA, 25 bp, Homo sapien
caatccatcctcggagggcttcctg

SEQ ID NO: 246863 - DNA, 25 bp, Homo sapien
tatccaatccatcctcggagggctt

SEQ ID NO: 246864 - DNA, 25 bp, Homo sapien
gaggagaccttgattcttcccggaa

SEQ ID NO: 246865 - DNA, 25 bp, Homo sapien
caatgacgtggttgactacgctacg

SEQ ID NO: 246866 - DNA, 25 bp, Homo sapien
tcaaatgcagcctagaagaagcgcc

SEQ ID NO: 246867 - DNA, 25 bp, Homo sapien
tcaggcaacttcgtggacatgagcc

SEQ ID NO: 246868 - DNA, 25 bp, Homo sapien
tgtgggatggtaaaccgcttcttgg

SEQ ID NO: 246869 - DNA, 25 bp, Homo sapien
gatggtaaaccgcttcttggtatcc

SEQ ID NO: 246870 - DNA, 25 bp, Homo sapien
aaccgcttcttggtatccagcccag

SEQ ID NO: 246871 - DNA, 25 bp, Homo sapien
tgtatgtgggatggtaaaccgcttc

SEQ ID NO: 246872 - DNA, 25 bp, Homo sapien
cctgtctgggaacgtgagcttggct

SEQ ID NO: 246873 - DNA, 25 bp, Homo sapien
gaggaagacgctcagaccctgctgt

SEQ ID NO: 246874 - DNA, 25 bp, Homo sapien
tatttgcgtatcaaactctgtcgag

SEQ ID NO: 246875 - DNA, 25 bp, Homo sapien
ttccctgtctgggaacgtgagcttg

SEQ ID NO: 246876 - DNA, 25 bp, Homo sapien
gacaaagcctcggatgtcagcccct

SEQ ID NO: 246877 - DNA, 25 bp, Homo sapien
ggacaaagcctcggatgtcagcccc

SEQ ID NO: 246878 - DNA, 25 bp, Homo sapien
tcagcccaaggaaagcgaacgtcca

SEQ ID NO: 246879 - DNA, 25 bp, Homo sapien
tggagacactccttgggccgtgtga

SEQ ID NO: 246880 - DNA, 25 bp, Homo sapien
ttcaggaaggacattcgcagcatcc

SEQ ID NO: 246881 - DNA, 25 bp, Homo sapien
tgactgccggctttttacaccccga

SEQ ID NO: 246882 - DNA, 25 bp, Homo sapien
aatactcgtaaggatgacccatggc

SEQ ID NO: 246883 - DNA, 25 bp, Homo sapien
ctcgtgaaatactcgtaaggatgac

SEQ ID NO: 246884 - DNA, 25 bp, Homo sapien
ttggagtaagactcacatgctgtgg

SEQ ID NO: 246885 - DNA, 25 bp, Homo sapien
tcttcattggagtaagactcacatg

SEQ ID NO: 246886 - DNA, 25 bp, Homo sapien
tcctgactctcagtatcccgtccgt

SEQ ID NO: 246887 - DNA, 25 bp, Homo sapien
ttatttcgtgggtggtgtgttgcca

SEQ ID NO: 246888 - DNA, 25 bp, Homo sapien
tggtgtgttgccaccttcctgactc

SEQ ID NO: 246889 - DNA, 25 bp, Homo sapien
tctcagtatcccgtccgtcctcagg

SEQ ID NO: 246890 - DNA, 25 bp, Homo sapien
tcacgaggggaaagcccagccggca

SEQ ID NO: 246891 - DNA, 25 bp, Homo sapien
cacgaggggaaagcccagccggcac

SEQ ID NO: 246892 - DNA, 25 bp, Homo sapien
gcttcagagacttccagaggagata

SEQ ID NO: 246893 - DNA, 25 bp, Homo sapien
cctcaaacccctgtaggctggactg

SEQ ID NO: 246894 - DNA, 25 bp, Homo sapien
tctggaggtggaccttggtgttcca

SEQ ID NO: 246895 - DNA, 25 bp, Homo sapien
gctggactgaacacggtcacatggt

SEQ ID NO: 246896 - DNA, 25 bp, Homo sapien
tagacgtgggtggtctgccctctgc

SEQ ID NO: 246897 - DNA, 25 bp, Homo sapien
cccctcccgtgagcaagaatggacg

SEQ ID NO: 246898 - DNA, 25 bp, Homo sapien
tttgagtatcaaatcctgcttggga

SEQ ID NO: 246899 - DNA, 25 bp, Homo sapien
cttgggatggcttccgggacccagt

SEQ ID NO: 246900 - DNA, 25 bp, Homo sapien
tgatgtagacaagaacacattgagg

SEQ ID NO: 246901 - DNA, 25 bp, Homo sapien
cacattgaggaatcaaatcttcatg

SEQ ID NO: 246902 - DNA, 25 bp, Homo sapien
aacagtgatatttgatgtagacaag

SEQ ID NO: 246903 - DNA, 25 bp, Homo sapien
tggcggcggtgataaacagtgatat

SEQ ID NO: 246904 - DNA, 25 bp, Homo sapien
gtataatggcattggctctgaaaaa

SEQ ID NO: 246905 - DNA, 25 bp, Homo sapien
tacaattcttgtgaaggtggttaca

SEQ ID NO: 246906 - DNA, 25 bp, Homo sapien
cagggaattggattagtataatggc

SEQ ID NO: 246907 - DNA, 25 bp, Homo sapien
aaacacgtttctatgaatatcagtg

SEQ ID NO: 246908 - DNA, 25 bp, Homo sapien
atgctggccccaaggacgtgccctt

SEQ ID NO: 246909 - DNA, 25 bp, Homo sapien
gaaagagctcgttgtttgctggcct

SEQ ID NO: 246910 - DNA, 25 bp, Homo sapien
catttggtcatagaggctgaaagtc

SEQ ID NO: 246911 - DNA, 25 bp, Homo sapien
cgttggtgccgaatgtcatttggtc

SEQ ID NO: 246912 - DNA, 25 bp, Homo sapien
ccacggtgcatgtcatctgttccac

SEQ ID NO: 246913 - DNA, 25 bp, Homo sapien
gaatttccagaagcaacagcaccct

SEQ ID NO: 246914 - DNA, 25 bp, Homo sapien
tgttccactcctgctgactccggtg

SEQ ID NO: 246915 - DNA, 25 bp, Homo sapien
tgggacaggcccgattgtacccacg

SEQ ID NO: 246916 - DNA, 25 bp, Homo sapien
gaggctctgatgcaggtcagtgccc

SEQ ID NO: 246917 - DNA, 25 bp, Homo sapien
cctgaagggaagtcgtctgtgacat

SEQ ID NO: 246918 - DNA, 25 bp, Homo sapien
caggaaggaggctctgatgcaggtc

SEQ ID NO: 246919 - DNA, 25 bp, Homo sapien
gtgcccatggctcctgaagggaagt

SEQ ID NO: 246920 - DNA, 25 bp, Homo sapien
ctccatggtactcggggagaggtta

SEQ ID NO: 246921 - DNA, 25 bp, Homo sapien
tctgagcctctccatggtactcggg

SEQ ID NO: 246922 - DNA, 25 bp, Homo sapien
agcatctgagcctctccatggtact

SEQ ID NO: 246923 - DNA, 25 bp, Homo sapien
cttagtccgagcatctgagcctctc

SEQ ID NO: 246924 - DNA, 25 bp, Homo sapien
gcaactttgcatctggacgacgaat

SEQ ID NO: 246925 - DNA, 25 bp, Homo sapien
cttttcggtatcaaattccaccagg

SEQ ID NO: 246926 - DNA, 25 bp, Homo sapien
atgttgctcggtgaaccccttttcg

SEQ ID NO: 246927 - DNA, 25 bp, Homo sapien
gaaggacgccggcatcagcaccatt

SEQ ID NO: 246928 - DNA, 25 bp, Homo sapien
tttctaatgtacttcacctggtcca

SEQ ID NO: 246929 - DNA, 25 bp, Homo sapien
tggtcgaccagttggaaagtaattg

SEQ ID NO: 246930 - DNA, 25 bp, Homo sapien
tgtacttcacctggtccactagccg

SEQ ID NO: 246931 - DNA, 25 bp, Homo sapien
gtccgtatccgctgcagcctgtggg

SEQ ID NO: 246932 - DNA, 25 bp, Homo sapien
cttggaggacccgttggagatgaag

SEQ ID NO: 246933 - DNA, 25 bp, Homo sapien
tggaggacccgttggagatgaagcc

SEQ ID NO: 246934 - DNA, 25 bp, Homo sapien
gctttggagtcgctgcctcagtggg

SEQ ID NO: 246935 - DNA, 25 bp, Homo sapien
ggagcaggacgggtgctttggagtc

SEQ ID NO: 246936 - DNA, 25 bp, Homo sapien
gcagccacgttcttgagccgatggc

SEQ ID NO: 246937 - DNA, 25 bp, Homo sapien
ccacgttcttgagccgatggcactc

SEQ ID NO: 246938 - DNA, 25 bp, Homo sapien
agcgctggcaccacgggacgcggca

SEQ ID NO: 246939 - DNA, 25 bp, Homo sapien
tcttgagccgatggcactctgggta

SEQ ID NO: 246940 - DNA, 25 bp, Homo sapien
ctgagaagaggttgtctgtgatgag

SEQ ID NO: 246941 - DNA, 25 bp, Homo sapien
gagaagaggttgtctgtgatgagtt

SEQ ID NO: 246942 - DNA, 25 bp, Homo sapien
gaagaggttgtctgtgatgagttcg

SEQ ID NO: 246943 - DNA, 25 bp, Homo sapien
agaagaggttgtctgtgatgagttc

SEQ ID NO: 246944 - DNA, 25 bp, Homo sapien
taatgacgaatataacacagatggc

SEQ ID NO: 246945 - DNA, 25 bp, Homo sapien
cttttattaatgacgaatataacac

SEQ ID NO: 246946 - DNA, 25 bp, Homo sapien
tattaatgacgaatataacacagat

SEQ ID NO: 246947 - DNA, 25 bp, Homo sapien
tttattaatgacgaatataacacag

SEQ ID NO: 246948 - DNA, 25 bp, Homo sapien
ggtggccgagcacgcgcttgacttc

SEQ ID NO: 246949 - DNA, 25 bp, Homo sapien
tggctggtggccgagcacgcgcttg

SEQ ID NO: 246950 - DNA, 25 bp, Homo sapien
ggaggtccggttgcgcgccctgtgg

SEQ ID NO: 246951 - DNA, 25 bp, Homo sapien
gggaggtccggttgcgcgccctgtg

SEQ ID NO: 246952 - DNA, 25 bp, Homo sapien
cctgtggactttgtgtaggacctgt

SEQ ID NO: 246953 - DNA, 25 bp, Homo sapien
gacctgtgtcacttggcctgttaat

SEQ ID NO: 246954 - DNA, 25 bp, Homo sapien
ctggctctgcgctggttgaccctgt

SEQ ID NO: 246955 - DNA, 25 bp, Homo sapien
gaagtgtgacagaatggcatcccca

SEQ ID NO: 246956 - DNA, 25 bp, Homo sapien
tggaggtagagggacaatttgtcat

SEQ ID NO: 246957 - DNA, 25 bp, Homo sapien
ttttcccgttatcccagcagcgtgc

SEQ ID NO: 246958 - DNA, 25 bp, Homo sapien
gatgggcataaatctccaccaagtg

SEQ ID NO: 246959 - DNA, 25 bp, Homo sapien
caatttgtcatggatgggaatgggc

SEQ ID NO: 246960 - DNA, 25 bp, Homo sapien
taaagtgtaattaactcaggccgga

SEQ ID NO: 246961 - DNA, 25 bp, Homo sapien
cctatgacctagtgggagcaccctg

SEQ ID NO: 246962 - DNA, 25 bp, Homo sapien
gaaattccccgatcagtaaacatgc

SEQ ID NO: 246963 - DNA, 25 bp, Homo sapien
gctgctctgcctgggataaacacat

SEQ ID NO: 246964 - DNA, 25 bp, Homo sapien
cttcagagtcggaggacttgggtta

SEQ ID NO: 246965 - DNA, 25 bp, Homo sapien
cttgggttaagatccagcctttgtc

SEQ ID NO: 246966 - DNA, 25 bp, Homo sapien
ctgtggttttcttgtatctggcctc

SEQ ID NO: 246967 - DNA, 25 bp, Homo sapien
atgggacctgttgggtatggccttc

SEQ ID NO: 246968 - DNA, 25 bp, Homo sapien
gactctgctccgctgacttctgagc

SEQ ID NO: 246969 - DNA, 25 bp, Homo sapien
tgctccgctgacttctgagctgtgg

SEQ ID NO: 246970 - DNA, 25 bp, Homo sapien
ctctgctccgctgacttctgagctg

SEQ ID NO: 246971 - DNA, 25 bp, Homo sapien
tctgctccgctgacttctgagctgt

SEQ ID NO: 246972 - DNA, 25 bp, Homo sapien
ctttgccatttccctcgcggggctg

SEQ ID NO: 246973 - DNA, 25 bp, Homo sapien
gctgttgtttctctcgtctgctgtc

SEQ ID NO: 246974 - DNA, 25 bp, Homo sapien
tttgccatttccctcgcggggctga

SEQ ID NO: 246975 - DNA, 25 bp, Homo sapien
tttctctcgtctgctgtcatcttcc

SEQ ID NO: 246976 - DNA, 25 bp, Homo sapien
ctaaaaggcgggcagcagtcccgtt

SEQ ID NO: 246977 - DNA, 25 bp, Homo sapien
tctcagagcacttgtgatggcagca

SEQ ID NO: 246978 - DNA, 25 bp, Homo sapien
gcagcagtcccgtttgtctccaata

SEQ ID NO: 246979 - DNA, 25 bp, Homo sapien
agagcagcctccaacggtcgcctaa

SEQ ID NO: 246980 - DNA, 25 bp, Homo sapien
aatgccggcgggaggtactgaaggc

SEQ ID NO: 246981 - DNA, 25 bp, Homo sapien
ggtggctcagcggaatcatcgagaa

SEQ ID NO: 246982 - DNA, 25 bp, Homo sapien
tcacagattggaaaagctggtgccc

SEQ ID NO: 246983 - DNA, 25 bp, Homo sapien
agaccgctggttgctaatgggcttg

SEQ ID NO: 246984 - DNA, 25 bp, Homo sapien
ccgcagaaccggacgtgcctggcga

SEQ ID NO: 246985 - DNA, 25 bp, Homo sapien
cctggcgaggttcagaggcgctagc

SEQ ID NO: 246986 - DNA, 25 bp, Homo sapien
aggcgctagcggtgtggtgggtggg

SEQ ID NO: 246987 - DNA, 25 bp, Homo sapien
gggtgggcagcgccgggatggctgg

SEQ ID NO: 246988 - DNA, 25 bp, Homo sapien
cagcaggtaagtgtgagaaggcatc

SEQ ID NO: 246989 - DNA, 25 bp, Homo sapien
gacgattaactcatggccctccttg

SEQ ID NO: 246990 - DNA, 25 bp, Homo sapien
tagtccagtcccttgcgattaggcc

SEQ ID NO: 246991 - DNA, 25 bp, Homo sapien
gctcctggcttggtccctaagtgca

SEQ ID NO: 246992 - DNA, 25 bp, Homo sapien
tttgcctttggggtggaaaccatgc

SEQ ID NO: 246993 - DNA, 25 bp, Homo sapien
agctaccgtggccagtaggcctttg

SEQ ID NO: 246994 - DNA, 25 bp, Homo sapien
aggaccaggttcaaggatgggccct

SEQ ID NO: 246995 - DNA, 25 bp, Homo sapien
ctgagcctggcgagctcacgagcta

SEQ ID NO: 246996 - DNA, 25 bp, Homo sapien
ctagtggatccggctgacagtgcag

SEQ ID NO: 246997 - DNA, 25 bp, Homo sapien
tcagggtggcgcagggacctggcga

SEQ ID NO: 246998 - DNA, 25 bp, Homo sapien
ctggcgatagggtaaggaaagttct

SEQ ID NO: 246999 - DNA, 25 bp, Homo sapien
gtggatccggctgacagtgcaggca

SEQ ID NO: 247000 - DNA, 25 bp, Homo sapien
tctgtttctgcaggtaagacatctg

SEQ ID NO: 247001 - DNA, 25 bp, Homo sapien
tctgcaggtaagacatctgccaggt

SEQ ID NO: 247002 - DNA, 25 bp, Homo sapien
aagacatctgccaggttgtaggagg

SEQ ID NO: 247003 - DNA, 25 bp, Homo sapien
actggaccccggcatctgtttctgc

SEQ ID NO: 247004 - DNA, 25 bp, Homo sapien
aggtcggacaggctgtgttccagtc

SEQ ID NO: 247005 - DNA, 25 bp, Homo sapien
ggccccggacacacttgttatgcct

SEQ ID NO: 247006 - DNA, 25 bp, Homo sapien
tctctccacggtttggggctcagtg

SEQ ID NO: 247007 - DNA, 25 bp, Homo sapien
ggacacacttgttatgcctcgtccc

SEQ ID NO: 247008 - DNA, 25 bp, Homo sapien
taaagaaggcgggaataaactctgc

SEQ ID NO: 247009 - DNA, 25 bp, Homo sapien
tgcacttcctggtgaccctctgaga

SEQ ID NO: 247010 - DNA, 25 bp, Homo sapien
gagaagaagcttgtgcctgtgcctg

SEQ ID NO: 247011 - DNA, 25 bp, Homo sapien
cagaagatccgcagagcaggaggct

SEQ ID NO: 247012 - DNA, 25 bp, Homo sapien
aatcaccaatggtaagtggcagctg

SEQ ID NO: 247013 - DNA, 25 bp, Homo sapien
agaacaatcaccaatggtaagtggc

SEQ ID NO: 247014 - DNA, 25 bp, Homo sapien
ttgacaccactgtggaactgaagaa

SEQ ID NO: 247015 - DNA, 25 bp, Homo sapien
ggctttgacaccactgtggaactga

SEQ ID NO: 247016 - DNA, 25 bp, Homo sapien
tccacctggcagtcccagttggtct

SEQ ID NO: 247017 - DNA, 25 bp, Homo sapien
ccatgggctttgacaccactgtgga

SEQ ID NO: 247018 - DNA, 25 bp, Homo sapien
gggtctggttcttcagtgccccgta

SEQ ID NO: 247019 - DNA, 25 bp, Homo sapien
tcctttcaggagagtcttcccttct

SEQ ID NO: 247020 - DNA, 25 bp, Homo sapien
ttcagtgccccgtaggcacttcctg

SEQ ID NO: 247021 - DNA, 25 bp, Homo sapien
tggccacgaggtcctttcaggagag

SEQ ID NO: 247022 - DNA, 25 bp, Homo sapien
tcagcacacgattcctgaacacgtt

SEQ ID NO: 247023 - DNA, 25 bp, Homo sapien
cctcctggacgctcctgatacaggg

SEQ ID NO: 247024 - DNA, 25 bp, Homo sapien
tctctgggtggtgtcccgctgagcc

SEQ ID NO: 247025 - DNA, 25 bp, Homo sapien
cacgattcctgaacacgttctctgg

SEQ ID NO: 247026 - DNA, 25 bp, Homo sapien
taaagacttgctccgagaagtggaa

SEQ ID NO: 247027 - DNA, 25 bp, Homo sapien
gtggagtaaagacttgctccgagaa

SEQ ID NO: 247028 - DNA, 25 bp, Homo sapien
gacttgctccgagaagtggaaatcc

SEQ ID NO: 247029 - DNA, 25 bp, Homo sapien
gagtaaagacttgctccgagaagtg

SEQ ID NO: 247030 - DNA, 25 bp, Homo sapien
caggcacttttgacaacaccttaga

SEQ ID NO: 247031 - DNA, 25 bp, Homo sapien
gctcacggaacgatttgtcatcctg

SEQ ID NO: 247032 - DNA, 25 bp, Homo sapien
ccgcttgggttcaggcacttttgac

SEQ ID NO: 247033 - DNA, 25 bp, Homo sapien
tagaaagtccagctcacggaacgat

SEQ ID NO: 247034 - DNA, 25 bp, Homo sapien
tcttattccatctccactgaagcac

SEQ ID NO: 247035 - DNA, 25 bp, Homo sapien
taatgagcggttatcagctgagcca

SEQ ID NO: 247036 - DNA, 25 bp, Homo sapien
tggtatccacctgccggcattagca

SEQ ID NO: 247037 - DNA, 25 bp, Homo sapien
gggctgggcacataaacgctgtcac

SEQ ID NO: 247038 - DNA, 25 bp, Homo sapien
tcagcagccacgcaagtagtctctg

SEQ ID NO: 247039 - DNA, 25 bp, Homo sapien
gaacgtgcacacctgccagcgtggg

SEQ ID NO: 247040 - DNA, 25 bp, Homo sapien
gtggcattggctgccggaaggccct

SEQ ID NO: 247041 - DNA, 25 bp, Homo sapien
gcaggtgggaacgtgcacacctgcc

SEQ ID NO: 247042 - DNA, 25 bp, Homo sapien
gagctgagaggatcctaatttcagt

SEQ ID NO: 247043 - DNA, 25 bp, Homo sapien
agctgagaggatcctaatttcagtc

SEQ ID NO: 247044 - DNA, 25 bp, Homo sapien
gctgagaggatcctaatttcagtct

SEQ ID NO: 247045 - DNA, 25 bp, Homo sapien
tgagctgagaggatcctaatttcag

SEQ ID NO: 247046 - DNA, 25 bp, Homo sapien
gctttttaccagcggctccacctcc

SEQ ID NO: 247047 - DNA, 25 bp, Homo sapien
ttaccagcggctccacctccgcccg

SEQ ID NO: 247048 - DNA, 25 bp, Homo sapien
ttttaccagcggctccacctccgcc

SEQ ID NO: 247049 - DNA, 25 bp, Homo sapien
taccagcggctccacctccgcccgt

SEQ ID NO: 247050 - DNA, 25 bp, Homo sapien
gatgctgttccctccgtagggaaac

SEQ ID NO: 247051 - DNA, 25 bp, Homo sapien
ggagtgggatgctgttccctccgta

SEQ ID NO: 247052 - DNA, 25 bp, Homo sapien
tgggatgctgttccctccgtaggga

SEQ ID NO: 247053 - DNA, 25 bp, Homo sapien
agtgggatgctgttccctccgtagg

SEQ ID NO: 247054 - DNA, 25 bp, Homo sapien
ggagcagcatagcaactcgcctgtg

SEQ ID NO: 247055 - DNA, 25 bp, Homo sapien
aggcctgtgctgaacgcatccggga

SEQ ID NO: 247056 - DNA, 25 bp, Homo sapien
gaggctcgagtctttgctctctgag

SEQ ID NO: 247057 - DNA, 25 bp, Homo sapien
aagcagcgtgaacctgcggcgggaa

SEQ ID NO: 247058 - DNA, 25 bp, Homo sapien
ggtggatactgagagcaccaaagtg

SEQ ID NO: 247059 - DNA, 25 bp, Homo sapien
gatactgagagcaccaaagtggccc

SEQ ID NO: 247060 - DNA, 25 bp, Homo sapien
actgagagcaccaaagtggccccat

SEQ ID NO: 247061 - DNA, 25 bp, Homo sapien
tggatactgagagcaccaaagtggc

SEQ ID NO: 247062 - DNA, 25 bp, Homo sapien
gagtcaggctttacacatcgcagga

SEQ ID NO: 247063 - DNA, 25 bp, Homo sapien
tgttccaacctacacaaatgcagag

SEQ ID NO: 247064 - DNA, 25 bp, Homo sapien
taggttgctcaaataaacaagcggg

SEQ ID NO: 247065 - DNA, 25 bp, Homo sapien
catactggcttgtggacatgctcag

SEQ ID NO: 247066 - DNA, 25 bp, Homo sapien
aaggagcatgagagacatctcctga

SEQ ID NO: 247067 - DNA, 25 bp, Homo sapien
ttgggcgtatctgtacccatcaggt

SEQ ID NO: 247068 - DNA, 25 bp, Homo sapien
cattccagcccaccattgggcgtat

SEQ ID NO: 247069 - DNA, 25 bp, Homo sapien
tgcctgcccgcatagtgtgcacaaa

SEQ ID NO: 247070 - DNA, 25 bp, Homo sapien
tcaggaagcagaagtcgtgcagccc

SEQ ID NO: 247071 - DNA, 25 bp, Homo sapien
ttggtgacgggcaagcgctccatca

SEQ ID NO: 247072 - DNA, 25 bp, Homo sapien
actgatgcccagtctatgccaagct

SEQ ID NO: 247073 - DNA, 25 bp, Homo sapien
gctccatcaccccaatcaatgtgca

SEQ ID NO: 247074 - DNA, 25 bp, Homo sapien
tgggagggcagtgcgtccgtgagga

SEQ ID NO: 247075 - DNA, 25 bp, Homo sapien
tgaggcagtagttcagctgcacctt

SEQ ID NO: 247076 - DNA, 25 bp, Homo sapien
ggtgaggcagtagttcagctgcacc

SEQ ID NO: 247077 - DNA, 25 bp, Homo sapien
ggagggcagtgcgtccgtgaggatg

SEQ ID NO: 247078 - DNA, 25 bp, Homo sapien
tggaaaacacattcgatgatgaaag

SEQ ID NO: 247079 - DNA, 25 bp, Homo sapien
cgacaggacgagatggaaaacacat

SEQ ID NO: 247080 - DNA, 25 bp, Homo sapien
ctgtgcgacaggacgagatggaaaa

SEQ ID NO: 247081 - DNA, 25 bp, Homo sapien
ggaaaacacattcgatgatgaaagc

SEQ ID NO: 247082 - DNA, 25 bp, Homo sapien
agctccaggaacatccccggcatgc

SEQ ID NO: 247083 - DNA, 25 bp, Homo sapien
cccggcatgcctgaagcacatctgc

SEQ ID NO: 247084 - DNA, 25 bp, Homo sapien
aatgtccactccgaatcccagcctc

SEQ ID NO: 247085 - DNA, 25 bp, Homo sapien
cagcaatgtccactccgaatcccag

SEQ ID NO: 247086 - DNA, 25 bp, Homo sapien
gcatcccacattgatgaatggaggc

SEQ ID NO: 247087 - DNA, 25 bp, Homo sapien
tcccacattgatgaatggaggcctg

SEQ ID NO: 247088 - DNA, 25 bp, Homo sapien
catcccacattgatgaatggaggcc

SEQ ID NO: 247089 - DNA, 25 bp, Homo sapien
cccacattgatgaatggaggcctgt

SEQ ID NO: 247090 - DNA, 25 bp, Homo sapien
gaaacgctgcaagaacggccagcgc

SEQ ID NO: 247091 - DNA, 25 bp, Homo sapien
caaacgtatcctgggaaacgctgca

SEQ ID NO: 247092 - DNA, 25 bp, Homo sapien
aggatatcttcttcagcagggcgag

SEQ ID NO: 247093 - DNA, 25 bp, Homo sapien
tggaaactgccggagggatggtgaa

SEQ ID NO: 247094 - DNA, 25 bp, Homo sapien
tttcacccccctgaatctggcgtgg

SEQ ID NO: 247095 - DNA, 25 bp, Homo sapien
cacccccctgaatctggcgtgggtt

SEQ ID NO: 247096 - DNA, 25 bp, Homo sapien
catgaatttcacccccctgaatctg

SEQ ID NO: 247097 - DNA, 25 bp, Homo sapien
aatttcacccccctgaatctggcgt

SEQ ID NO: 247098 - DNA, 25 bp, Homo sapien
tgttgtcagacttgaagtgcacccc

SEQ ID NO: 247099 - DNA, 25 bp, Homo sapien
cacgtctccccgagaggactggtgt

SEQ ID NO: 247100 - DNA, 25 bp, Homo sapien
tccagggctgatagtttgcggactg

SEQ ID NO: 247101 - DNA, 25 bp, Homo sapien
ggactgtgtgactgggcatcttcca

SEQ ID NO: 247102 - DNA, 25 bp, Homo sapien
gcgtgcacgttgcacagctccaaga

SEQ ID NO: 247103 - DNA, 25 bp, Homo sapien
tactgagacggtcatatcgtcggtc

SEQ ID NO: 247104 - DNA, 25 bp, Homo sapien
cctgggaaatggagcttccagactt

SEQ ID NO: 247105 - DNA, 25 bp, Homo sapien
taaactggaaccattgccagagagc

SEQ ID NO: 247106 - DNA, 25 bp, Homo sapien
tgtcattcccaggtatgccctccag

SEQ ID NO: 247107 - DNA, 25 bp, Homo sapien
taaaccgactactgactattccgcc

SEQ ID NO: 247108 - DNA, 25 bp, Homo sapien
tatggccaagatgtacccaagcagg

SEQ ID NO: 247109 - DNA, 25 bp, Homo sapien
tgttaaagattaacgagcccttggc

SEQ ID NO: 247110 - DNA, 25 bp, Homo sapien
gatggcggcaccaagggagttccct

SEQ ID NO: 247111 - DNA, 25 bp, Homo sapien
ctcccacggccgcagatggcggcac

SEQ ID NO: 247112 - DNA, 25 bp, Homo sapien
gacttcttcagcactgcgcaccctc

SEQ ID NO: 247113 - DNA, 25 bp, Homo sapien
tcagcactgcgcaccctctgcatgg

SEQ ID NO: 247114 - DNA, 25 bp, Homo sapien
gtggatggcattgttctcattatca

SEQ ID NO: 247115 - DNA, 25 bp, Homo sapien
tggatggcattgttctcattatcag

SEQ ID NO: 247116 - DNA, 25 bp, Homo sapien
ctccgataaggtgcctgagtcaccc

SEQ ID NO: 247117 - DNA, 25 bp, Homo sapien
gaggggctccgataaggtgcctgag

SEQ ID NO: 247118 - DNA, 25 bp, Homo sapien
aggtgcctgagtcacccaatgggca

SEQ ID NO: 247119 - DNA, 25 bp, Homo sapien
tggggaggggctccgataaggtgcc

SEQ ID NO: 247120 - DNA, 25 bp, Homo sapien
cacgtgtgcatagatttcatgagcc

SEQ ID NO: 247121 - DNA, 25 bp, Homo sapien
ttgtgttcacgtgtgcatagatttc

SEQ ID NO: 247122 - DNA, 25 bp, Homo sapien
tgttcacgtgtgcatagatttcatg

SEQ ID NO: 247123 - DNA, 25 bp, Homo sapien
cccttccctccgtgtatcttgcttt

SEQ ID NO: 247124 - DNA, 25 bp, Homo sapien
ctatccagagtggtcagaaggtgca

SEQ ID NO: 247125 - DNA, 25 bp, Homo sapien
gggcttcatggtgaagggcctgagc

SEQ ID NO: 247126 - DNA, 25 bp, Homo sapien
cttcttgcccagaaaggtgagtcgg

SEQ ID NO: 247127 - DNA, 25 bp, Homo sapien
ggtcagaaggtgcagacttcttgcc

SEQ ID NO: 247128 - DNA, 25 bp, Homo sapien
tccgagcaacctcaggagggtgcac

SEQ ID NO: 247129 - DNA, 25 bp, Homo sapien
gattttaaacaggatatccagccgg

SEQ ID NO: 247130 - DNA, 25 bp, Homo sapien
caagctgcgacttagtgctgtgtca

SEQ ID NO: 247131 - DNA, 25 bp, Homo sapien
gaggacccgttctgcacacgtttaa

SEQ ID NO: 247132 - DNA, 25 bp, Homo sapien
aaaccttgagcaatcgggacctggg

SEQ ID NO: 247133 - DNA, 25 bp, Homo sapien
ttaacggtgaagcaacattcgtggg

SEQ ID NO: 247134 - DNA, 25 bp, Homo sapien
tctaatggcaaagaaggtgctgacc

SEQ ID NO: 247135 - DNA, 25 bp, Homo sapien
tgctgaccagacgtttaaccacgag

SEQ ID NO: 247136 - DNA, 25 bp, Homo sapien
cttgtggacggtgacctttctgctg

SEQ ID NO: 247137 - DNA, 25 bp, Homo sapien
ttgtaagtcctgataccttgctggc

SEQ ID NO: 247138 - DNA, 25 bp, Homo sapien
gcaaagctgttgggaacttgtaagt

SEQ ID NO: 247139 - DNA, 25 bp, Homo sapien
gcttgtggacggtgacctttctgct

SEQ ID NO: 247140 - DNA, 25 bp, Homo sapien
ctgggcaggacggtgccatctgcct

SEQ ID NO: 247141 - DNA, 25 bp, Homo sapien
gaacttgctacctcggtgccacctt

SEQ ID NO: 247142 - DNA, 25 bp, Homo sapien
tcaccagaacttgctacctcggtgc

SEQ ID NO: 247143 - DNA, 25 bp, Homo sapien
caggacggtgccatctgcctggtca

SEQ ID NO: 247144 - DNA, 25 bp, Homo sapien
ttatccctctgggtgccttgtgtcc

SEQ ID NO: 247145 - DNA, 25 bp, Homo sapien
ccctctgggtgccttgtgtcctcac

SEQ ID NO: 247146 - DNA, 25 bp, Homo sapien
atccctctgggtgccttgtgtcctc

SEQ ID NO: 247147 - DNA, 25 bp, Homo sapien
tatccctctgggtgccttgtgtcct

SEQ ID NO: 247148 - DNA, 25 bp, Homo sapien
tccgcatcgactcctcctcactctc

SEQ ID NO: 247149 - DNA, 25 bp, Homo sapien
tctcccctccgcatcgactcctcct

SEQ ID NO: 247150 - DNA, 25 bp, Homo sapien
tcccctccgcatcgactcctcctca

SEQ ID NO: 247151 - DNA, 25 bp, Homo sapien
ccctccgcatcgactcctcctcact

SEQ ID NO: 247152 - DNA, 25 bp, Homo sapien
gggtcagggcatctgtccaaatccg

SEQ ID NO: 247153 - DNA, 25 bp, Homo sapien
gcctgcttagtgtgtgcccacggag

SEQ ID NO: 247154 - DNA, 25 bp, Homo sapien
tgtggcaccgtcctgtgtctctgtg

SEQ ID NO: 247155 - DNA, 25 bp, Homo sapien
tgtctctgtgactggacagttgcca

SEQ ID NO: 247156 - DNA, 25 bp, Homo sapien
gttctgtgctgatccctgctgggca

SEQ ID NO: 247157 - DNA, 25 bp, Homo sapien
tccttagtgtagcaatgactctgaa

SEQ ID NO: 247158 - DNA, 25 bp, Homo sapien
tcttcggtacgatcacaggagccat

SEQ ID NO: 247159 - DNA, 25 bp, Homo sapien
tgggcagttttatgccccggttgcc

SEQ ID NO: 247160 - DNA, 25 bp, Homo sapien
cagctggccagagaactcatgcgcc

SEQ ID NO: 247161 - DNA, 25 bp, Homo sapien
gggaacagccgccaatggcaagact

SEQ ID NO: 247162 - DNA, 25 bp, Homo sapien
atgcgccagccaagaaggtccgtga

SEQ ID NO: 247163 - DNA, 25 bp, Homo sapien
tccgtgaagagggcctcgtgaaccc

SEQ ID NO: 247164 - DNA, 25 bp, Homo sapien
tccttcatcgccctctcccagacct

SEQ ID NO: 247165 - DNA, 25 bp, Homo sapien
cctccttcatcgccctctcccagac

SEQ ID NO: 247166 - DNA, 25 bp, Homo sapien
ctccttcatcgccctctcccagacc

SEQ ID NO: 247167 - DNA, 25 bp, Homo sapien
tgagaaggaccagggctcccgggga

SEQ ID NO: 247168 - DNA, 25 bp, Homo sapien
ctgagaaggaccagggctcccgggg

SEQ ID NO: 247169 - DNA, 25 bp, Homo sapien
agaaggaccagggctcccggggatg

SEQ ID NO: 247170 - DNA, 25 bp, Homo sapien
ccagcaacccggtccctggcaggtg

SEQ ID NO: 247171 - DNA, 25 bp, Homo sapien
cagcaacccggtccctggcaggtgt

SEQ ID NO: 247172 - DNA, 25 bp, Homo sapien
cctggggccgcgtggctgagactgt

SEQ ID NO: 247173 - DNA, 25 bp, Homo sapien
ctgtgccctcgcgtagggttcccat

SEQ ID NO: 247174 - DNA, 25 bp, Homo sapien
tggctgagactgtgccctcgcgtag

SEQ ID NO: 247175 - DNA, 25 bp, Homo sapien
tgagactgtgccctcgcgtagggtt

SEQ ID NO: 247176 - DNA, 25 bp, Homo sapien
tccagaggcccggtgtgggaagagg

SEQ ID NO: 247177 - DNA, 25 bp, Homo sapien
cccaggctctgagcgacccctgagg

SEQ ID NO: 247178 - DNA, 25 bp, Homo sapien
gggcaaagatttcctgacgtaataa

SEQ ID NO: 247179 - DNA, 25 bp, Homo sapien
gtaataatccaggtcttgccacact

SEQ ID NO: 247180 - DNA, 25 bp, Homo sapien
gagtgctgtgagccagcggtggtca

SEQ ID NO: 247181 - DNA, 25 bp, Homo sapien
agtgctgtgagccagcggtggtcat

SEQ ID NO: 247182 - DNA, 25 bp, Homo sapien
tgagtgctgtgagccagcggtggtc

SEQ ID NO: 247183 - DNA, 25 bp, Homo sapien
ctgagtgctgtgagccagcggtggt

SEQ ID NO: 247184 - DNA, 25 bp, Homo sapien
cagtatgcagggctgctatgaagac

SEQ ID NO: 247185 - DNA, 25 bp, Homo sapien
tcagtatgcagggctgctatgaaga

SEQ ID NO: 247186 - DNA, 25 bp, Homo sapien
gctcctcgggagacgagaaacctta

SEQ ID NO: 247187 - DNA, 25 bp, Homo sapien
ggtacaccacgcgaatgttctgaga

SEQ ID NO: 247188 - DNA, 25 bp, Homo sapien
gcttgcagctacagcgagcaggctt

SEQ ID NO: 247189 - DNA, 25 bp, Homo sapien
gcaagacactctggccacgcagtgg

SEQ ID NO: 247190 - DNA, 25 bp, Homo sapien
tcgcagggccagacaagctgctctg

SEQ ID NO: 247191 - DNA, 25 bp, Homo sapien
cattccgccggcactcgcagggcca

SEQ ID NO: 247192 - DNA, 25 bp, Homo sapien
actcgcagggccagacaagctgctc

SEQ ID NO: 247193 - DNA, 25 bp, Homo sapien
tcagcgaatctgcacattccgccgg

SEQ ID NO: 247194 - DNA, 25 bp, Homo sapien
ttcagtttaaagcacggcatttaat

SEQ ID NO: 247195 - DNA, 25 bp, Homo sapien
tagtgttgttactctcatttatttg

SEQ ID NO: 247196 - DNA, 25 bp, Homo sapien
tctagtgttgttactctcatttatt

SEQ ID NO: 247197 - DNA, 25 bp, Homo sapien
agtgttgttactctcatttatttgc

SEQ ID NO: 247198 - DNA, 25 bp, Homo sapien
tgagccaatgaaagaggagatgcgt

SEQ ID NO: 247199 - DNA, 25 bp, Homo sapien
agacattgtccttcactccccatga

SEQ ID NO: 247200 - DNA, 25 bp, Homo sapien
gacattgtccttcactccccatgag

SEQ ID NO: 247201 - DNA, 25 bp, Homo sapien
ctccccatgagccaatgaaagagga

SEQ ID NO: 247202 - DNA, 25 bp, Homo sapien
aacagagggatgtgggcaaaaatct

SEQ ID NO: 247203 - DNA, 25 bp, Homo sapien
tcctggttaactccgtggccagcaa

SEQ ID NO: 247204 - DNA, 25 bp, Homo sapien
aaaatctgggatgaccgcaagggcg

SEQ ID NO: 247205 - DNA, 25 bp, Homo sapien
cttccgaggttgatggtccctcctg

SEQ ID NO: 247206 - DNA, 25 bp, Homo sapien
gtcccaggcggccaccgggcgtcgc

SEQ ID NO: 247207 - DNA, 25 bp, Homo sapien
ggcgtcgcggccgcctgcggcatca

SEQ ID NO: 247208 - DNA, 25 bp, Homo sapien
ctgcagctgccgccgtggggcgggg

SEQ ID NO: 247209 - DNA, 25 bp, Homo sapien
tcgcggccgcctgcggcatcagcat

SEQ ID NO: 247210 - DNA, 25 bp, Homo sapien
gcctccgtgcgcgtcccagaaggaa

SEQ ID NO: 247211 - DNA, 25 bp, Homo sapien
aaatgctagcaaaccggaaggccgc

SEQ ID NO: 247212 - DNA, 25 bp, Homo sapien
ctagcaaaccggaaggccgcacggg

SEQ ID NO: 247213 - DNA, 25 bp, Homo sapien
gaccccggccgggtctctccacagc

SEQ ID NO: 247214 - DNA, 25 bp, Homo sapien
catgtgaatagtcccctgcatgcag

SEQ ID NO: 247215 - DNA, 25 bp, Homo sapien
gaaaagaacggagggccatttctgc

SEQ ID NO: 247216 - DNA, 25 bp, Homo sapien
cttacgggagatggacagacggtca

SEQ ID NO: 247217 - DNA, 25 bp, Homo sapien
tcaagctttgcaagtctctcatggc

SEQ ID NO: 247218 - DNA, 25 bp, Homo sapien
tggaatgtcattgccactcagcgtg

SEQ ID NO: 247219 - DNA, 25 bp, Homo sapien
ctgagccagggacctgctccttgga

SEQ ID NO: 247220 - DNA, 25 bp, Homo sapien
gacttgtgaattgtgttgagtcccg

SEQ ID NO: 247221 - DNA, 25 bp, Homo sapien
gagccaaccaccttgtgacttgtga

SEQ ID NO: 247222 - DNA, 25 bp, Homo sapien
gtccccatgcatatgcacctgcatg

SEQ ID NO: 247223 - DNA, 25 bp, Homo sapien
ccatggagaagactgtccgcacggg

SEQ ID NO: 247224 - DNA, 25 bp, Homo sapien
cactgatcaattgctgcattcccag

SEQ ID NO: 247225 - DNA, 25 bp, Homo sapien
gcatgtgacacacttctcggcccat

SEQ ID NO: 247226 - DNA, 25 bp, Homo sapien
ctgacccttcaggggcgatagacgg

SEQ ID NO: 247227 - DNA, 25 bp, Homo sapien
cttccagtgaggagcacctgaccct

SEQ ID NO: 247228 - DNA, 25 bp, Homo sapien
gtgaggagcacctgacccttcaggg

SEQ ID NO: 247229 - DNA, 25 bp, Homo sapien
cagtgaggagcacctgacccttcag

SEQ ID NO: 247230 - DNA, 25 bp, Homo sapien
aatttccatatgtctgcattgagcg

SEQ ID NO: 247231 - DNA, 25 bp, Homo sapien
cattgagcgttcacatacatgagcg

SEQ ID NO: 247232 - DNA, 25 bp, Homo sapien
cagaagcattatctcctcatgcttc

SEQ ID NO: 247233 - DNA, 25 bp, Homo sapien
ggtaaatgtagacgacataatttcc

SEQ ID NO: 247234 - DNA, 25 bp, Homo sapien
tgggccagggatctcaaaacggaag

SEQ ID NO: 247235 - DNA, 25 bp, Homo sapien
gatctcaaaacggaaggccgccaac

SEQ ID NO: 247236 - DNA, 25 bp, Homo sapien
ccactaggacacttgccagagaggg

SEQ ID NO: 247237 - DNA, 25 bp, Homo sapien
gggtgagctggttcccatggagaca

SEQ ID NO: 247238 - DNA, 25 bp, Homo sapien
cagcctgaataggacaaagggggtc

SEQ ID NO: 247239 - DNA, 25 bp, Homo sapien
tcagttgacagcctgaataggacaa

SEQ ID NO: 247240 - DNA, 25 bp, Homo sapien
cagttgacagcctgaataggacaaa

SEQ ID NO: 247241 - DNA, 25 bp, Homo sapien
ctctctacgtcctaatgtgacagag

SEQ ID NO: 247242 - DNA, 25 bp, Homo sapien
gaactgaaacgtccgctctgtctaa

SEQ ID NO: 247243 - DNA, 25 bp, Homo sapien
ctctgtctaagctcgggctgctgta

SEQ ID NO: 247244 - DNA, 25 bp, Homo sapien
aatttcgttcattagcgctccaccc

SEQ ID NO: 247245 - DNA, 25 bp, Homo sapien
agggaggcctcgctcccagggtcag

SEQ ID NO: 247246 - DNA, 25 bp, Homo sapien
ctgctctgatgcaggcgtcctggcc

SEQ ID NO: 247247 - DNA, 25 bp, Homo sapien
acaaatgcccggagcaggtcagcag

SEQ ID NO: 247248 - DNA, 25 bp, Homo sapien
tcctggccctcaaggcgaatggcca

SEQ ID NO: 247249 - DNA, 25 bp, Homo sapien
caggagaccccgagaagcgggtgcc

SEQ ID NO: 247250 - DNA, 25 bp, Homo sapien
cccgagaagcgggtgccacagaact

SEQ ID NO: 247251 - DNA, 25 bp, Homo sapien
agaccccgagaagcgggtgccacag

SEQ ID NO: 247252 - DNA, 25 bp, Homo sapien
ccgagaagcgggtgccacagaactg

SEQ ID NO: 247253 - DNA, 25 bp, Homo sapien
accagctccccacggacatgcaggt

SEQ ID NO: 247254 - DNA, 25 bp, Homo sapien
gcaccagctccccacggacatgcag

SEQ ID NO: 247255 - DNA, 25 bp, Homo sapien
agctccccacggacatgcaggtcca

SEQ ID NO: 247256 - DNA, 25 bp, Homo sapien
ccagcccctcggctgtcagcagcca

SEQ ID NO: 247257 - DNA, 25 bp, Homo sapien
agcagcgggagccttggagggcttc

SEQ ID NO: 247258 - DNA, 25 bp, Homo sapien
cttcaagtaggaggtgacacagcca

SEQ ID NO: 247259 - DNA, 25 bp, Homo sapien
ttcaagtaggaggtgacacagccag

SEQ ID NO: 247260 - DNA, 25 bp, Homo sapien
gagcagcgggagccttggagggctt

SEQ ID NO: 247261 - DNA, 25 bp, Homo sapien
tcaggaacgcctagtaaagaggagg

SEQ ID NO: 247262 - DNA, 25 bp, Homo sapien
caggaacgcctagtaaagaggaggg

SEQ ID NO: 247263 - DNA, 25 bp, Homo sapien
gtcttccagggtagtgacagcaggc

SEQ ID NO: 247264 - DNA, 25 bp, Homo sapien
ttgtcttccagggtagtgacagcag

SEQ ID NO: 247265 - DNA, 25 bp, Homo sapien
gcctgcttgtcttccagggtagtga

SEQ ID NO: 247266 - DNA, 25 bp, Homo sapien
ctgcttgtcttccagggtagtgaca

SEQ ID NO: 247267 - DNA, 25 bp, Homo sapien
gccgtgttcttggagcggttcccag

SEQ ID NO: 247268 - DNA, 25 bp, Homo sapien
agtggaagacctcgaatgtagattc

SEQ ID NO: 247269 - DNA, 25 bp, Homo sapien
cacggaacaggtagcaggccgtgtt

SEQ ID NO: 247270 - DNA, 25 bp, Homo sapien
ggaggaaccctgagtggaagacctc

SEQ ID NO: 247271 - DNA, 25 bp, Homo sapien
ctgcccagccactgccaaactccat

SEQ ID NO: 247272 - DNA, 25 bp, Homo sapien
ggctgcccagccactgccaaactcc

SEQ ID NO: 247273 - DNA, 25 bp, Homo sapien
agggctgcccagccactgccaaact

SEQ ID NO: 247274 - DNA, 25 bp, Homo sapien
ctggctagggctgcccagccactgc

SEQ ID NO: 247275 - DNA, 25 bp, Homo sapien
cactccggcccagccaccgaggaca

SEQ ID NO: 247276 - DNA, 25 bp, Homo sapien
ccaccgaggacaccaggggacccag

SEQ ID NO: 247277 - DNA, 25 bp, Homo sapien
aggggacccagggccaggatgtcca

SEQ ID NO: 247278 - DNA, 25 bp, Homo sapien
agcactccggcccagccaccgagga

SEQ ID NO: 247279 - DNA, 25 bp, Homo sapien
tggcagacacaggtgagtccaactc

SEQ ID NO: 247280 - DNA, 25 bp, Homo sapien
tacctgctctgagatgtgccagcac

SEQ ID NO: 247281 - DNA, 25 bp, Homo sapien
gttacccagcattacagtgacaaag

SEQ ID NO: 247282 - DNA, 25 bp, Homo sapien
gcagctggacaacgaagagcaggaa

SEQ ID NO: 247283 - DNA, 25 bp, Homo sapien
taaaacaacggccagagaacttcag

SEQ ID NO: 247284 - DNA, 25 bp, Homo sapien
gaagcagagtcggaatgtgaacccc

SEQ ID NO: 247285 - DNA, 25 bp, Homo sapien
gaaacacctcttgctaacttgtgag

SEQ ID NO: 247286 - DNA, 25 bp, Homo sapien
caagcatccctcagaaaggcgtggt

SEQ ID NO: 247287 - DNA, 25 bp, Homo sapien
gacaccgggaatcatagccaatcag

SEQ ID NO: 247288 - DNA, 25 bp, Homo sapien
tctgaggatcccaagcttcaggctt

SEQ ID NO: 247289 - DNA, 25 bp, Homo sapien
ggctgtactttgtccccttatggga

SEQ ID NO: 247290 - DNA, 25 bp, Homo sapien
gccaatcagactttaccaccagggt

SEQ ID NO: 247291 - DNA, 25 bp, Homo sapien
ttccaaagcttcttagaggaatcct

SEQ ID NO: 247292 - DNA, 25 bp, Homo sapien
cattccaaagcttcttagaggaatc

SEQ ID NO: 247293 - DNA, 25 bp, Homo sapien
ggtatcttctggcattccaaagctt

SEQ ID NO: 247294 - DNA, 25 bp, Homo sapien
ttgtggtatcttctggcattccaaa

SEQ ID NO: 247295 - DNA, 25 bp, Homo sapien
caaaggtttattgggtccctgcctg

SEQ ID NO: 247296 - DNA, 25 bp, Homo sapien
tcacaaaggtttattgggtccctgc

SEQ ID NO: 247297 - DNA, 25 bp, Homo sapien
gaggacagctctgggaggaccgctg

SEQ ID NO: 247298 - DNA, 25 bp, Homo sapien
agtccgaggcagacacgaaaccggg

SEQ ID NO: 247299 - DNA, 25 bp, Homo sapien
ctgggaggaccgctgaagaggatga

SEQ ID NO: 247300 - DNA, 25 bp, Homo sapien
acagctctgggaggaccgctgaaga

SEQ ID NO: 247301 - DNA, 25 bp, Homo sapien
tggggttcagccatctcccgggagc

SEQ ID NO: 247302 - DNA, 25 bp, Homo sapien
gtggggttcagccatctcccgggag

SEQ ID NO: 247303 - DNA, 25 bp, Homo sapien
ggggttcagccatctcccgggagct

SEQ ID NO: 247304 - DNA, 25 bp, Homo sapien
agtggggttcagccatctcccggga

SEQ ID NO: 247305 - DNA, 25 bp, Homo sapien
agggtctctgtgcttcaagaggcca

SEQ ID NO: 247306 - DNA, 25 bp, Homo sapien
ggctgacaccctggcagcaaggaca

SEQ ID NO: 247307 - DNA, 25 bp, Homo sapien
gagacaaacggccagtggtgaagca

SEQ ID NO: 247308 - DNA, 25 bp, Homo sapien
tctgtgcttcaagaggccagtggag

SEQ ID NO: 247309 - DNA, 25 bp, Homo sapien
ctcctgcccgaagcctcaggaggtc

SEQ ID NO: 247310 - DNA, 25 bp, Homo sapien
ccaggttctgtgttccaaaggccag

SEQ ID NO: 247311 - DNA, 25 bp, Homo sapien
gagagagaggctgtacccattgcaa

SEQ ID NO: 247312 - DNA, 25 bp, Homo sapien
tggcactcccctaagtcacaggtgg

SEQ ID NO: 247313 - DNA, 25 bp, Homo sapien
ctttcaagggaagactgccccagga

SEQ ID NO: 247314 - DNA, 25 bp, Homo sapien
attctgtgggcccaagaaacagcaa

SEQ ID NO: 247315 - DNA, 25 bp, Homo sapien
tcccgaggtgtggagtgtattctgt

SEQ ID NO: 247316 - DNA, 25 bp, Homo sapien
tccaatattatggagtcccgaggtg

SEQ ID NO: 247317 - DNA, 25 bp, Homo sapien
gatcaggtgcttcctattgggctgg

SEQ ID NO: 247318 - DNA, 25 bp, Homo sapien
tgaaagacccctacccagagtggtg

SEQ ID NO: 247319 - DNA, 25 bp, Homo sapien
cagagaaatcgcctgactgggagat

SEQ ID NO: 247320 - DNA, 25 bp, Homo sapien
tctcagagacctgccgagtaggagg

SEQ ID NO: 247321 - DNA, 25 bp, Homo sapien
ggctggcttccctctacgtagtaag

SEQ ID NO: 247322 - DNA, 25 bp, Homo sapien
ctccgtcccgagaagaagtttcgcg

SEQ ID NO: 247323 - DNA, 25 bp, Homo sapien
ggcggcttccgacttgggctcagac

SEQ ID NO: 247324 - DNA, 25 bp, Homo sapien
ggcagttcagctccccagacgggag

SEQ ID NO: 247325 - DNA, 25 bp, Homo sapien
cgcgactgcgacagtgtctcgggca

SEQ ID NO: 247326 - DNA, 25 bp, Homo sapien
ccacgagttagggagttgccccgca

SEQ ID NO: 247327 - DNA, 25 bp, Homo sapien
cagtccaaggcgaaaggagacttgc

SEQ ID NO: 247328 - DNA, 25 bp, Homo sapien
tctgggtccctaggtcaaggcacct

SEQ ID NO: 247329 - DNA, 25 bp, Homo sapien
atcagaaggtctcggacgccgcggc

SEQ ID NO: 247330 - DNA, 25 bp, Homo sapien
cagtctcgacgttcccggggtagag

SEQ ID NO: 247331 - DNA, 25 bp, Homo sapien
aaggtggctcagttcgggcgctcca

SEQ ID NO: 247332 - DNA, 25 bp, Homo sapien
cgctctcggggtccgcgaaggtggc

SEQ ID NO: 247333 - DNA, 25 bp, Homo sapien
gtccgggcgcctccgcggtgagtcg

SEQ ID NO: 247334 - DNA, 25 bp, Homo sapien
ggagtctcccgccaattgaagcctc

SEQ ID NO: 247335 - DNA, 25 bp, Homo sapien
gatttctagggcattggccgcgctg

SEQ ID NO: 247336 - DNA, 25 bp, Homo sapien
gctataaattgaactccctgcactg

SEQ ID NO: 247337 - DNA, 25 bp, Homo sapien
tgggtgatccctccgggctcaagtt

SEQ ID NO: 247338 - DNA, 25 bp, Homo sapien
cctgtaggttgatttgtgcctggca

SEQ ID NO: 247339 - DNA, 25 bp, Homo sapien
caattagtatcttttcaaggtccag

SEQ ID NO: 247340 - DNA, 25 bp, Homo sapien
agccattgctggtgtcgcagttgcc

SEQ ID NO: 247341 - DNA, 25 bp, Homo sapien
gccatcaccctcacaattagtatct

SEQ ID NO: 247342 - DNA, 25 bp, Homo sapien
agaggtaccaggaggtccatggccc

SEQ ID NO: 247343 - DNA, 25 bp, Homo sapien
ctggagggaataaccaaactggtga

SEQ ID NO: 247344 - DNA, 25 bp, Homo sapien
aataaccaaactggtgagcaaaggg

SEQ ID NO: 247345 - DNA, 25 bp, Homo sapien
gagggaataaccaaactggtgagca

SEQ ID NO: 247346 - DNA, 25 bp, Homo sapien
tactgggcccaatcatgatgctctg

SEQ ID NO: 247347 - DNA, 25 bp, Homo sapien
ccaaacacagcagtgagggcaacac

SEQ ID NO: 247348 - DNA, 25 bp, Homo sapien
actgggcccaatcatgatgctctgg

SEQ ID NO: 247349 - DNA, 25 bp, Homo sapien
tccacgtgcacagcagtgagggcag

SEQ ID NO: 247350 - DNA, 25 bp, Homo sapien
gctccacgtgcacagcagtgagggc

SEQ ID NO: 247351 - DNA, 25 bp, Homo sapien
cacgtgcacagcagtgagggcagcg

SEQ ID NO: 247352 - DNA, 25 bp, Homo sapien
ccacgtgcacagcagtgagggcagt

SEQ ID NO: 247353 - DNA, 25 bp, Homo sapien
ctgtgagcgcctcgggatgcagacc

SEQ ID NO: 247354 - DNA, 25 bp, Homo sapien
aacggctttcctggcggctgtgagc

SEQ ID NO: 247355 - DNA, 25 bp, Homo sapien
gctgcctcggattccaacggctttc

SEQ ID NO: 247356 - DNA, 25 bp, Homo sapien
gtggttcctgcctcaagcgccggct

SEQ ID NO: 247357 - DNA, 25 bp, Homo sapien
tgggtttaaacctcacgatgaagac

SEQ ID NO: 247358 - DNA, 25 bp, Homo sapien
tttaaacctcacgatgaagactttg

SEQ ID NO: 247359 - DNA, 25 bp, Homo sapien
ctccacagactggttcttggtgttt

SEQ ID NO: 247360 - DNA, 25 bp, Homo sapien
ctgtatgcggttccaatgtgcagaa

SEQ ID NO: 247361 - DNA, 25 bp, Homo sapien
gcacgtctccactcggctggctgtt

SEQ ID NO: 247362 - DNA, 25 bp, Homo sapien
tgtgtggcagctcagtgcttttcct

SEQ ID NO: 247363 - DNA, 25 bp, Homo sapien
tgctgcagtgtctgtttggtcctgg

SEQ ID NO: 247364 - DNA, 25 bp, Homo sapien
gtgctgcagtgtctgtttggtcctg

SEQ ID NO: 247365 - DNA, 25 bp, Homo sapien
ctgcagtgtctgtttggtcctggct

SEQ ID NO: 247366 - DNA, 25 bp, Homo sapien
ccagcagcacctctgagaggggcat

SEQ ID NO: 247367 - DNA, 25 bp, Homo sapien
tcccacccccagcagcacctctgag

SEQ ID NO: 247368 - DNA, 25 bp, Homo sapien
cccagcagcacctctgagaggggca

SEQ ID NO: 247369 - DNA, 25 bp, Homo sapien
acccccagcagcacctctgagaggg

SEQ ID NO: 247370 - DNA, 25 bp, Homo sapien
cctgcttcatcctgtgcacggcagc

SEQ ID NO: 247371 - DNA, 25 bp, Homo sapien
ccctgcttcatcctgtgcacggcag

SEQ ID NO: 247372 - DNA, 25 bp, Homo sapien
atcaggggaccgtgggaagaagaag

SEQ ID NO: 247373 - DNA, 25 bp, Homo sapien
tcactcgggaggcaaatcaggggac

SEQ ID NO: 247374 - DNA, 25 bp, Homo sapien
ccagagaccccgagtgtcacacttg

SEQ ID NO: 247375 - DNA, 25 bp, Homo sapien
gccctttaactaggcgcggaggctg

SEQ ID NO: 247376 - DNA, 25 bp, Homo sapien
tgcagaaatgagtgcgtcgcccttt

SEQ ID NO: 247377 - DNA, 25 bp, Homo sapien
ggtaatgaatcatctcgcttttaaa

SEQ ID NO: 247378 - DNA, 25 bp, Homo sapien
tgtaaattattaggccccgagttga

SEQ ID NO: 247379 - DNA, 25 bp, Homo sapien
gaggacacccgaagacacgggcgac

SEQ ID NO: 247380 - DNA, 25 bp, Homo sapien
ctcgcgcacgaactcgctgcacaga

SEQ ID NO: 247381 - DNA, 25 bp, Homo sapien
acacgggcgactcgcggggacatcc

SEQ ID NO: 247382 - DNA, 25 bp, Homo sapien
agcgggaccgcagcggcccgcgggt

SEQ ID NO: 247383 - DNA, 25 bp, Homo sapien
ggctgctcgcgtaggctgggcctgg

SEQ ID NO: 247384 - DNA, 25 bp, Homo sapien
tgttgtcaccgccaatccccacaca

SEQ ID NO: 247385 - DNA, 25 bp, Homo sapien
gcaagagaaagcagcttctagcctc

SEQ ID NO: 247386 - DNA, 25 bp, Homo sapien
tagcctcatctcacacacgggaaag

SEQ ID NO: 247387 - DNA, 25 bp, Homo sapien
catccctgcggtgcacaaaacagtg

SEQ ID NO: 247388 - DNA, 25 bp, Homo sapien
ggttgagcccaatcaagtaggcagt

SEQ ID NO: 247389 - DNA, 25 bp, Homo sapien
catcttacgcacgagcagactgagg

SEQ ID NO: 247390 - DNA, 25 bp, Homo sapien
gagttagctcttgaccactccaggc

SEQ ID NO: 247391 - DNA, 25 bp, Homo sapien
cacatcacaggagcgtggagaagcg

SEQ ID NO: 247392 - DNA, 25 bp, Homo sapien
tggggtgccacagggtatcccagca

SEQ ID NO: 247393 - DNA, 25 bp, Homo sapien
agcacatcacaggagcgtggagaag

SEQ ID NO: 247394 - DNA, 25 bp, Homo sapien
gatggggtgccacagggtatcccag

SEQ ID NO: 247395 - DNA, 25 bp, Homo sapien
ctgccacgttgccaacaaataaaca

SEQ ID NO: 247396 - DNA, 25 bp, Homo sapien
tgccacgttgccaacaaataaacat

SEQ ID NO: 247397 - DNA, 25 bp, Homo sapien
gccacgttgccaacaaataaacata

SEQ ID NO: 247398 - DNA, 25 bp, Homo sapien
ctgatgcccgcctggctgatgcccg

SEQ ID NO: 247399 - DNA, 25 bp, Homo sapien
cttagtgatcctgggcatgtccctt

SEQ ID NO: 247400 - DNA, 25 bp, Homo sapien
tgggcatgtcccttcacctctgcgg

SEQ ID NO: 247401 - DNA, 25 bp, Homo sapien
tctgcacagtgaagatgctgatgcc

SEQ ID NO: 247402 - DNA, 25 bp, Homo sapien
caggccccactgctaggaatgaata

SEQ ID NO: 247403 - DNA, 25 bp, Homo sapien
taggtgggacgattgagctaccagc

SEQ ID NO: 247404 - DNA, 25 bp, Homo sapien
gctaccagcgtgtttatgactacca

SEQ ID NO: 247405 - DNA, 25 bp, Homo sapien
caccggcaggcatgtgtgcttctca

SEQ ID NO: 247406 - DNA, 25 bp, Homo sapien
gagagcatttatcaggggaactttg

SEQ ID NO: 247407 - DNA, 25 bp, Homo sapien
gatgtattcattacagttagggatg

SEQ ID NO: 247408 - DNA, 25 bp, Homo sapien
gccgtgaggaccaatgatgtattca

SEQ ID NO: 247409 - DNA, 25 bp, Homo sapien
taatccgctgccgtgaggaccaatg

SEQ ID NO: 247410 - DNA, 25 bp, Homo sapien
tagtctgatgtagtgcgccgatggt

SEQ ID NO: 247411 - DNA, 25 bp, Homo sapien
aaatctggacacagtgatgcctcgg

SEQ ID NO: 247412 - DNA, 25 bp, Homo sapien
catatccacaccgtggactgagagg

SEQ ID NO: 247413 - DNA, 25 bp, Homo sapien
atggtcgggtgaccccagacctcta

SEQ ID NO: 247414 - DNA, 25 bp, Homo sapien
taaacatcgtggaatgagggaaaca

SEQ ID NO: 247415 - DNA, 25 bp, Homo sapien
aatgagggaaacagagacccggaga

SEQ ID NO: 247416 - DNA, 25 bp, Homo sapien
gagaagagagcccacgatgttccca

SEQ ID NO: 247417 - DNA, 25 bp, Homo sapien
agaagagagcccacgatgttcccag

SEQ ID NO: 247418 - DNA, 25 bp, Homo sapien
ttttatgttccagcgtctatgcttc

SEQ ID NO: 247419 - DNA, 25 bp, Homo sapien
gttccagcgtctatgcttcaacacc

SEQ ID NO: 247420 - DNA, 25 bp, Homo sapien
ttccagattttcctccgtgagctgg

SEQ ID NO: 247421 - DNA, 25 bp, Homo sapien
ctatgcttcaacaccttccagattt

SEQ ID NO: 247422 - DNA, 25 bp, Homo sapien
cacccagccattatctttcattctg

SEQ ID NO: 247423 - DNA, 25 bp, Homo sapien
tttgcatcccatgaaagatcccact

SEQ ID NO: 247424 - DNA, 25 bp, Homo sapien
tgatgtgttgtcgaatttggttggc

SEQ ID NO: 247425 - DNA, 25 bp, Homo sapien
tggtcatggtatatactctttttga

SEQ ID NO: 247426 - DNA, 25 bp, Homo sapien
caaagaccgcaaaaagatccttgaa

SEQ ID NO: 247427 - DNA, 25 bp, Homo sapien
ggcacaactgtccacgcaggcgttc

SEQ ID NO: 247428 - DNA, 25 bp, Homo sapien
ggcgttcaccccagcaaggtggtta

SEQ ID NO: 247429 - DNA, 25 bp, Homo sapien
cattgaacaggtgcagcgggaaaag

SEQ ID NO: 247430 - DNA, 25 bp, Homo sapien
ccgtgctctgtgaccggcgcatatt

SEQ ID NO: 247431 - DNA, 25 bp, Homo sapien
acagtgtggcctctatggctgcccc

SEQ ID NO: 247432 - DNA, 25 bp, Homo sapien
tatggctgccccgtgctctgtgacc

SEQ ID NO: 247433 - DNA, 25 bp, Homo sapien
attcaccacgggtgagcccctcgag

SEQ ID NO: 247434 - DNA, 25 bp, Homo sapien
gcttccgggagcagccgaagcctga

SEQ ID NO: 247435 - DNA, 25 bp, Homo sapien
gaacctggacgagccgcgaccgcag

SEQ ID NO: 247436 - DNA, 25 bp, Homo sapien
gggcgcgagatctccccgcaggcgg

SEQ ID NO: 247437 - DNA, 25 bp, Homo sapien
gcaggtcccggcgtccatgtgcagc

SEQ ID NO: 247438 - DNA, 25 bp, Homo sapien
gacagaaggcgaggactgcagtttt

SEQ ID NO: 247439 - DNA, 25 bp, Homo sapien
aacatcattagccacgtcgagtaga

SEQ ID NO: 247440 - DNA, 25 bp, Homo sapien
ttagccacgtcgagtagacggccgg

SEQ ID NO: 247441 - DNA, 25 bp, Homo sapien
aagggaagaactgaggtcggagagg

SEQ ID NO: 247442 - DNA, 25 bp, Homo sapien
ctgctggccacgcctactgctaaac

SEQ ID NO: 247443 - DNA, 25 bp, Homo sapien
ctactgctaaacgcagcccaaacag

SEQ ID NO: 247444 - DNA, 25 bp, Homo sapien
actgctaaacgcagcccaaacagtg

SEQ ID NO: 247445 - DNA, 25 bp, Homo sapien
tggccacgcctactgctaaacgcag

SEQ ID NO: 247446 - DNA, 25 bp, Homo sapien
cagttcccttcttatcccgggccat

SEQ ID NO: 247447 - DNA, 25 bp, Homo sapien
gctgtctcctgctcaagcatggttt

SEQ ID NO: 247448 - DNA, 25 bp, Homo sapien
acaaaggctggttctagtgtctcac

SEQ ID NO: 247449 - DNA, 25 bp, Homo sapien
gctggttctagtgtctcactggctg

SEQ ID NO: 247450 - DNA, 25 bp, Homo sapien
cttggtgctttcagagatggctcag

SEQ ID NO: 247451 - DNA, 25 bp, Homo sapien
gtgctttcagagatggctcagagca

SEQ ID NO: 247452 - DNA, 25 bp, Homo sapien
gctcttggtgctttcagagatggct

SEQ ID NO: 247453 - DNA, 25 bp, Homo sapien
ctggctcttggtgctttcagagatg

SEQ ID NO: 247454 - DNA, 25 bp, Homo sapien
cagccttgggctatttcgttgagaa

SEQ ID NO: 247455 - DNA, 25 bp, Homo sapien
gaatcaaatccgcagagatgtggca

SEQ ID NO: 247456 - DNA, 25 bp, Homo sapien
gaagctgagcagattagctccccag

SEQ ID NO: 247457 - DNA, 25 bp, Homo sapien
tagcattttcccagaggtgcaggtt

SEQ ID NO: 247458 - DNA, 25 bp, Homo sapien
tgagaagccccagtgtgcatcagac

SEQ ID NO: 247459 - DNA, 25 bp, Homo sapien
gacccagcacgttgaaatgtaccca

SEQ ID NO: 247460 - DNA, 25 bp, Homo sapien
tttaaatgatcaggcctagagaggc

SEQ ID NO: 247461 - DNA, 25 bp, Homo sapien
agaaaagaaatctcctgaggccgct

SEQ ID NO: 247462 - DNA, 25 bp, Homo sapien
gaagtctgtggtacagttctggctt

SEQ ID NO: 247463 - DNA, 25 bp, Homo sapien
atgaagtctgtggtacagttctggc

SEQ ID NO: 247464 - DNA, 25 bp, Homo sapien
gctcttggtaaccagcagagagggc

SEQ ID NO: 247465 - DNA, 25 bp, Homo sapien
gatgctcttggtaaccagcagagag

SEQ ID NO: 247466 - DNA, 25 bp, Homo sapien
cagagcagccagacagcgtggaaat

SEQ ID NO: 247467 - DNA, 25 bp, Homo sapien
tcagcctcatagaaagcaagaaagc

SEQ ID NO: 247468 - DNA, 25 bp, Homo sapien
tacttcaagtatatggcaggtctgt

SEQ ID NO: 247469 - DNA, 25 bp, Homo sapien
gaacttggcctctggttgacttaac

SEQ ID NO: 247470 - DNA, 25 bp, Homo sapien
tgtaagatcagaccataggtgggtg

SEQ ID NO: 247471 - DNA, 25 bp, Homo sapien
catctgttctcagtgtaaccttcaa

SEQ ID NO: 247472 - DNA, 25 bp, Homo sapien
ggctcatgggtcacttgaagttgga

SEQ ID NO: 247473 - DNA, 25 bp, Homo sapien
caaatctgtggaaacataactaggc

SEQ ID NO: 247474 - DNA, 25 bp, Homo sapien
ctttgatcttgccatatatattagg

SEQ ID NO: 247475 - DNA, 25 bp, Homo sapien
tcttctttgatcttgccatatatat

SEQ ID NO: 247476 - DNA, 25 bp, Homo sapien
gagtcttctttgatcttgccatata

SEQ ID NO: 247477 - DNA, 25 bp, Homo sapien
ttgatcttgccatatatattagggc

SEQ ID NO: 247478 - DNA, 25 bp, Homo sapien
aaacctaggtggtagtctgctacac

SEQ ID NO: 247479 - DNA, 25 bp, Homo sapien
ggcatgtgcttaacacaaacctagg

SEQ ID NO: 247480 - DNA, 25 bp, Homo sapien
tcagtggtaaaaagtatagcctcat

SEQ ID NO: 247481 - DNA, 25 bp, Homo sapien
cacctagggcatatggaatagcctg

SEQ ID NO: 247482 - DNA, 25 bp, Homo sapien
cctaccctggctaggaacctgaact

SEQ ID NO: 247483 - DNA, 25 bp, Homo sapien
taccctggctaggaacctgaactcc

SEQ ID NO: 247484 - DNA, 25 bp, Homo sapien
agggccagcagtccacctaccctgg

SEQ ID NO: 247485 - DNA, 25 bp, Homo sapien
ccagggccagcagtccacctaccct

SEQ ID NO: 247486 - DNA, 25 bp, Homo sapien
gctgggtcatatggatggtcatttt

SEQ ID NO: 247487 - DNA, 25 bp, Homo sapien
ataatgcgctgtgaacattgtgtac

SEQ ID NO: 247488 - DNA, 25 bp, Homo sapien
atatgcctaggagtgagattgctgg

SEQ ID NO: 247489 - DNA, 25 bp, Homo sapien
cattgtgtaccgatttttgtttgaa

SEQ ID NO: 247490 - DNA, 25 bp, Homo sapien
tctgcttcgtgcatcttcagactct

SEQ ID NO: 247491 - DNA, 25 bp, Homo sapien
tagttcagttggcagcgttgcaggt

SEQ ID NO: 247492 - DNA, 25 bp, Homo sapien
agagcacagctgaactccacgggcc

SEQ ID NO: 247493 - DNA, 25 bp, Homo sapien
tgttgaccagccctggagctatggt

SEQ ID NO: 247494 - DNA, 25 bp, Homo sapien
tgagattgaggtgcttaaaacctta

SEQ ID NO: 247495 - DNA, 25 bp, Homo sapien
tgtcttagaactgtagcaattccga

SEQ ID NO: 247496 - DNA, 25 bp, Homo sapien
tatttatggtattaagctagccagt

SEQ ID NO: 247497 - DNA, 25 bp, Homo sapien
gaggattacctctactcaagcattt

SEQ ID NO: 247498 - DNA, 25 bp, Homo sapien
ccatgcaggctggttggcgccatgc

SEQ ID NO: 247499 - DNA, 25 bp, Homo sapien
gctggttggcgccatgccagtgcat

SEQ ID NO: 247500 - DNA, 25 bp, Homo sapien
gacccatgcaggctggttggcgcca

SEQ ID NO: 247501 - DNA, 25 bp, Homo sapien
atgcaggctggttggcgccatgcca

SEQ ID NO: 247502 - DNA, 25 bp, Homo sapien
ctaaaactcacccattgtaactgga

SEQ ID NO: 247503 - DNA, 25 bp, Homo sapien
taagttgaatagagagttgacttat

SEQ ID NO: 247504 - DNA, 25 bp, Homo sapien
gtgtaaccttcagccctatccctag

SEQ ID NO: 247505 - DNA, 25 bp, Homo sapien
gaatttaaagccacgtattcattct

SEQ ID NO: 247506 - DNA, 25 bp, Homo sapien
tctcatgcaaatacaatacttcacc

SEQ ID NO: 247507 - DNA, 25 bp, Homo sapien
gcaaatacaatacttcaccctcatt

SEQ ID NO: 247508 - DNA, 25 bp, Homo sapien
tcatgcaaatacaatacttcaccct

SEQ ID NO: 247509 - DNA, 25 bp, Homo sapien
tcctctcatgcaaatacaatacttc

SEQ ID NO: 247510 - DNA, 25 bp, Homo sapien
tctcggctcattaccgcacacagag

SEQ ID NO: 247511 - DNA, 25 bp, Homo sapien
tggacattcccgtcctctgtctggt

SEQ ID NO: 247512 - DNA, 25 bp, Homo sapien
gggtttagtttccagctgccagctg

SEQ ID NO: 247513 - DNA, 25 bp, Homo sapien
acacatgaccttggccgttactcca

SEQ ID NO: 247514 - DNA, 25 bp, Homo sapien
tatgcatacttttacttcgcgttgg

SEQ ID NO: 247515 - DNA, 25 bp, Homo sapien
gaagtatgaaagtaaccaaggtctc

SEQ ID NO: 247516 - DNA, 25 bp, Homo sapien
ttgctgttggcaagcagaagttccc

SEQ ID NO: 247517 - DNA, 25 bp, Homo sapien
cagcatgaaagcactccgatgtatg

SEQ ID NO: 247518 - DNA, 25 bp, Homo sapien
gtggggtaaatcactaataaaggca

SEQ ID NO: 247519 - DNA, 25 bp, Homo sapien
gagtgtggggtaaatcactaataaa

SEQ ID NO: 247520 - DNA, 25 bp, Homo sapien
gcatagggtttcaaaagagtgtggg

SEQ ID NO: 247521 - DNA, 25 bp, Homo sapien
ttcaaaagagtgtggggtaaatcac

SEQ ID NO: 247522 - DNA, 25 bp, Homo sapien
tgcaaaaagccggaaaatatcccag

SEQ ID NO: 247523 - DNA, 25 bp, Homo sapien
aaagttactgagaaacgaaggctgc

SEQ ID NO: 247524 - DNA, 25 bp, Homo sapien
aacagaacgctctttccgtttgcag

SEQ ID NO: 247525 - DNA, 25 bp, Homo sapien
cattttaagttgcagcttccggcca

SEQ ID NO: 247526 - DNA, 25 bp, Homo sapien
tgacatgtaataaagcgggcagcag

SEQ ID NO: 247527 - DNA, 25 bp, Homo sapien
tcccgctgaagtctagatgttgaca

SEQ ID NO: 247528 - DNA, 25 bp, Homo sapien
gtttcttgccttaaggagcccattg

SEQ ID NO: 247529 - DNA, 25 bp, Homo sapien
tggatgcggccaactccaatgggcc

SEQ ID NO: 247530 - DNA, 25 bp, Homo sapien
ttcactgaatcggaaccttccgtgg

SEQ ID NO: 247531 - DNA, 25 bp, Homo sapien
tgtttcactgaatcggaaccttccg

SEQ ID NO: 247532 - DNA, 25 bp, Homo sapien
ctgaatcggaaccttccgtgggtag

SEQ ID NO: 247533 - DNA, 25 bp, Homo sapien
gtgtgtttcactgaatcggaacctt

SEQ ID NO: 247534 - DNA, 25 bp, Homo sapien
cagtttggcattttacgaactactt

SEQ ID NO: 247535 - DNA, 25 bp, Homo sapien
taaccagaggaggttgggtgtgtca

SEQ ID NO: 247536 - DNA, 25 bp, Homo sapien
catttcgctgcagacttaaccagag

SEQ ID NO: 247537 - DNA, 25 bp, Homo sapien
ttgggtgtgtcactgcagtttggca

SEQ ID NO: 247538 - DNA, 25 bp, Homo sapien
ttctgctttctgctcgctctcccat

SEQ ID NO: 247539 - DNA, 25 bp, Homo sapien
gctgatgtcaaaggatgtgaagtca

SEQ ID NO: 247540 - DNA, 25 bp, Homo sapien
gcatgcatagttcaaagctggtttt

SEQ ID NO: 247541 - DNA, 25 bp, Homo sapien
cttgaaagaggccttgcatgcatag

SEQ ID NO: 247542 - DNA, 25 bp, Homo sapien
caagtacgaggtcccgaagctgctg

SEQ ID NO: 247543 - DNA, 25 bp, Homo sapien
gtccagtccagggctgttggcagca

SEQ ID NO: 247544 - DNA, 25 bp, Homo sapien
gctgttggcagcaccaagtacgagg

SEQ ID NO: 247545 - DNA, 25 bp, Homo sapien
ttggcagcaccaagtacgaggtccc

SEQ ID NO: 247546 - DNA, 25 bp, Homo sapien
tgccagctagtaactgttgacttac

SEQ ID NO: 247547 - DNA, 25 bp, Homo sapien
tctgccagctagtaactgttgactt

SEQ ID NO: 247548 - DNA, 25 bp, Homo sapien
caaatctgccagctagtaactgttg

SEQ ID NO: 247549 - DNA, 25 bp, Homo sapien
aaatctgccagctagtaactgttga

SEQ ID NO: 247550 - DNA, 25 bp, Homo sapien
aaaatcaggagtatcccgaggacag

SEQ ID NO: 247551 - DNA, 25 bp, Homo sapien
ccacaaaatcaggagtatcccgagg

SEQ ID NO: 247552 - DNA, 25 bp, Homo sapien
aatcaggagtatcccgaggacagtc

SEQ ID NO: 247553 - DNA, 25 bp, Homo sapien
caaaatcaggagtatcccgaggaca

SEQ ID NO: 247554 - DNA, 25 bp, Homo sapien
acatcccgagagattcatgttcaag

SEQ ID NO: 247555 - DNA, 25 bp, Homo sapien
cagagctcctgttgaaggaacagac

SEQ ID NO: 247556 - DNA, 25 bp, Homo sapien
gctgcattttagacatagctggcaa

SEQ ID NO: 247557 - DNA, 25 bp, Homo sapien
ccacttgattttcggagctcgcaca

SEQ ID NO: 247558 - DNA, 25 bp, Homo sapien
tttcgcagtattgaaatgttcactc

SEQ ID NO: 247559 - DNA, 25 bp, Homo sapien
tgttgtgtcgctgtcgtatttttct

SEQ ID NO: 247560 - DNA, 25 bp, Homo sapien
tatttttcttttttcgcagtattga

SEQ ID NO: 247561 - DNA, 25 bp, Homo sapien
tagtctcactttggttgttgtgtcg

SEQ ID NO: 247562 - DNA, 25 bp, Homo sapien
tcctgtctgagttgtaagatgggac

SEQ ID NO: 247563 - DNA, 25 bp, Homo sapien
ggtactaaaaccattgcagatgcat

SEQ ID NO: 247564 - DNA, 25 bp, Homo sapien
taagcttccttccagtttgtggtac

SEQ ID NO: 247565 - DNA, 25 bp, Homo sapien
tagaagccagttaggaggactagtt

SEQ ID NO: 247566 - DNA, 25 bp, Homo sapien
aattatatggtttgatcattcttca

SEQ ID NO: 247567 - DNA, 25 bp, Homo sapien
attatatggtttgatcattcttcag

SEQ ID NO: 247568 - DNA, 25 bp, Homo sapien
ttatatggtttgatcattcttcaga

SEQ ID NO: 247569 - DNA, 25 bp, Homo sapien
tatatggtttgatcattcttcagaa

SEQ ID NO: 247570 - DNA, 25 bp, Homo sapien
aaaggtcttagaagtaatattcttg

SEQ ID NO: 247571 - DNA, 25 bp, Homo sapien
gagcaggaacggtgagaccactctt

SEQ ID NO: 247572 - DNA, 25 bp, Homo sapien
acagtcttcatcttgagcaggaacg

SEQ ID NO: 247573 - DNA, 25 bp, Homo sapien
acacagtcttcatcttgagcaggaa

SEQ ID NO: 247574 - DNA, 25 bp, Homo sapien
gttacgtgaccacaggtggcacagg

SEQ ID NO: 247575 - DNA, 25 bp, Homo sapien
tgtgagaacagcctgcgacgacttc

SEQ ID NO: 247576 - DNA, 25 bp, Homo sapien
ttccagagtcaagttacgtgaccac

SEQ ID NO: 247577 - DNA, 25 bp, Homo sapien
gcctgtgagaacagcctgcgacgac

SEQ ID NO: 247578 - DNA, 25 bp, Homo sapien
tcactctgtgcctccggagatgagg

SEQ ID NO: 247579 - DNA, 25 bp, Homo sapien
tccctgctgagcggtcagtcctcac

SEQ ID NO: 247580 - DNA, 25 bp, Homo sapien
ctccctgctgagcggtcagtcctca

SEQ ID NO: 247581 - DNA, 25 bp, Homo sapien
ctgtgcctccggagatgaggctccc

SEQ ID NO: 247582 - DNA, 25 bp, Homo sapien
gacacaaaagccgtagagagtaagg

SEQ ID NO: 247583 - DNA, 25 bp, Homo sapien
tttgaaacgaaaccttccagtcgca

SEQ ID NO: 247584 - DNA, 25 bp, Homo sapien
gaaaccttccagtcgcagacacaaa

SEQ ID NO: 247585 - DNA, 25 bp, Homo sapien
cacggtcactgtggtgttggtgttc

SEQ ID NO: 247586 - DNA, 25 bp, Homo sapien
catttgggaacaacatattcttggc

SEQ ID NO: 247587 - DNA, 25 bp, Homo sapien
ttttgctatacttggctgcatgttt

SEQ ID NO: 247588 - DNA, 25 bp, Homo sapien
caactgttagagatacgaaataaga

SEQ ID NO: 247589 - DNA, 25 bp, Homo sapien
tgtcctatcatacttacttaaaacc

SEQ ID NO: 247590 - DNA, 25 bp, Homo sapien
aaagccatcagtgttaccgtaatcg

SEQ ID NO: 247591 - DNA, 25 bp, Homo sapien
tccattgatacacacgggccctgaa

SEQ ID NO: 247592 - DNA, 25 bp, Homo sapien
gaagcccttggctgtacagatgttt

SEQ ID NO: 247593 - DNA, 25 bp, Homo sapien
tatttcatagcccaagggaagccct

SEQ ID NO: 247594 - DNA, 25 bp, Homo sapien
ttgcccgaaatccacccacacggag

SEQ ID NO: 247595 - DNA, 25 bp, Homo sapien
tactgttcattttgcccgaaatcca

SEQ ID NO: 247596 - DNA, 25 bp, Homo sapien
attttgcccgaaatccacccacacg

SEQ ID NO: 247597 - DNA, 25 bp, Homo sapien
ccacccacacggagtggaaagatgg

SEQ ID NO: 247598 - DNA, 25 bp, Homo sapien
tatccagaagttacgtcagtgttgc

SEQ ID NO: 247599 - DNA, 25 bp, Homo sapien
gtggaaggaagtaaaacgagctgct

SEQ ID NO: 247600 - DNA, 25 bp, Homo sapien
ccataatcggaatgtgatcacagag

SEQ ID NO: 247601 - DNA, 25 bp, Homo sapien
tgttcctcctgctgatcaagagaag

SEQ ID NO: 247602 - DNA, 25 bp, Homo sapien
atattcagtgtatatcccctcttgg

SEQ ID NO: 247603 - DNA, 25 bp, Homo sapien
tatagccattccagcgctcttctga

SEQ ID NO: 247604 - DNA, 25 bp, Homo sapien
gaaatccactccgtctcaccttaat

SEQ ID NO: 247605 - DNA, 25 bp, Homo sapien
cgtatctttatacgtaaagtgggtg

SEQ ID NO: 247606 - DNA, 25 bp, Homo sapien
ggcagtagcataaacctcatccttg

SEQ ID NO: 247607 - DNA, 25 bp, Homo sapien
tctgctgaatagttgagtgacctct

SEQ ID NO: 247608 - DNA, 25 bp, Homo sapien
aaaatctatcaaggcaggagcctgg

SEQ ID NO: 247609 - DNA, 25 bp, Homo sapien
caaatatgctgatctgtactctgct

SEQ ID NO: 247610 - DNA, 25 bp, Homo sapien
tgaaccaacgttagaagcagcctgg

SEQ ID NO: 247611 - DNA, 25 bp, Homo sapien
tgacccggaggaagatgaaccaacg

SEQ ID NO: 247612 - DNA, 25 bp, Homo sapien
tgtttcgaacattaccaccttcctc

SEQ ID NO: 247613 - DNA, 25 bp, Homo sapien
caatcctacgggagcggaatttgac

SEQ ID NO: 247614 - DNA, 25 bp, Homo sapien
gtctccagatttccaacctaatata

SEQ ID NO: 247615 - DNA, 25 bp, Homo sapien
tccaacctaatatagcgaagaaata

SEQ ID NO: 247616 - DNA, 25 bp, Homo sapien
tattgatcagaagtttgtattgcag

SEQ ID NO: 247617 - DNA, 25 bp, Homo sapien
tatagcgaagaaatatattgatcag

SEQ ID NO: 247618 - DNA, 25 bp, Homo sapien
tatgggaaattcctaggcttgagag

SEQ ID NO: 247619 - DNA, 25 bp, Homo sapien
aatctatgggaaattcctaggcttg

SEQ ID NO: 247620 - DNA, 25 bp, Homo sapien
aggcttgagagcttacatcagaaaa

SEQ ID NO: 247621 - DNA, 25 bp, Homo sapien
ctaggcttgagagcttacatcagaa

SEQ ID NO: 247622 - DNA, 25 bp, Homo sapien
gcatcataatggcatagcagagtta

SEQ ID NO: 247623 - DNA, 25 bp, Homo sapien
aattaatggatttgccttaccacta

SEQ ID NO: 247624 - DNA, 25 bp, Homo sapien
tataattaatggatttgccttacca

SEQ ID NO: 247625 - DNA, 25 bp, Homo sapien
taatggatttgccttaccactaaaa

SEQ ID NO: 247626 - DNA, 25 bp, Homo sapien
tggatttgccttaccactaaaagaa

SEQ ID NO: 247627 - DNA, 25 bp, Homo sapien
tactgtgtagtgcagtttttagaaa

SEQ ID NO: 247628 - DNA, 25 bp, Homo sapien
tagaaaaggacagcaccctcacgga

SEQ ID NO: 247629 - DNA, 25 bp, Homo sapien
atactgtgtagtgcagtttttagaa

SEQ ID NO: 247630 - DNA, 25 bp, Homo sapien
aaaggacagcaccctcacggaacca

SEQ ID NO: 247631 - DNA, 25 bp, Homo sapien
gtttgtttgttagattcttggagta

SEQ ID NO: 247632 - DNA, 25 bp, Homo sapien
ttgttagattcttggagtacagtgg

SEQ ID NO: 247633 - DNA, 25 bp, Homo sapien
gctaggagaaccattaaatgatgca

SEQ ID NO: 247634 - DNA, 25 bp, Homo sapien
ttatgtcagacttgaaaactagcag

SEQ ID NO: 247635 - DNA, 25 bp, Homo sapien
tggtgatggcacttctcaaatactg

SEQ ID NO: 247636 - DNA, 25 bp, Homo sapien
tactggccaaagactcacagtccaa

SEQ ID NO: 247637 - DNA, 25 bp, Homo sapien
tgttcttaaacgaattagaagagat

SEQ ID NO: 247638 - DNA, 25 bp, Homo sapien
ttgaaccatcagaatttgtgaagat

SEQ ID NO: 247639 - DNA, 25 bp, Homo sapien
tcagtgtgagcactttgcacaaagg

SEQ ID NO: 247640 - DNA, 25 bp, Homo sapien
ctggctgaagtacagggcgttcgta

SEQ ID NO: 247641 - DNA, 25 bp, Homo sapien
gcgttcgtatgccaaggagagactg

SEQ ID NO: 247642 - DNA, 25 bp, Homo sapien
tgggaagtgtcccaaaaacttgagc

SEQ ID NO: 247643 - DNA, 25 bp, Homo sapien
cgcaactcaaagacccattggaaca

SEQ ID NO: 247644 - DNA, 25 bp, Homo sapien
gagcgagctctctattactggaata

SEQ ID NO: 247645 - DNA, 25 bp, Homo sapien
gacaacgcagcgaagattctgccca

SEQ ID NO: 247646 - DNA, 25 bp, Homo sapien
gaatacatcatgagtttaatcagtg

SEQ ID NO: 247647 - DNA, 25 bp, Homo sapien
tgatgactgtacacaacagttcaaa

SEQ ID NO: 247648 - DNA, 25 bp, Homo sapien
caatacatggcttgatatacaacgc

SEQ ID NO: 247649 - DNA, 25 bp, Homo sapien
tatacaacgccctgaagctcttcat

SEQ ID NO: 247650 - DNA, 25 bp, Homo sapien
gatgaaccaaaagctatttgatgac

SEQ ID NO: 247651 - DNA, 25 bp, Homo sapien
aaatgaaagaacgggaagaagcatg

SEQ ID NO: 247652 - DNA, 25 bp, Homo sapien
taaaatagaaaatctagccaaagcc

SEQ ID NO: 247653 - DNA, 25 bp, Homo sapien
aaatctagccaaagccaatccccag

SEQ ID NO: 247654 - DNA, 25 bp, Homo sapien
tgaaagaacgggaagaagcatgggt

SEQ ID NO: 247655 - DNA, 25 bp, Homo sapien
ggaggctgttggtgggtcccatgaa

SEQ ID NO: 247656 - DNA, 25 bp, Homo sapien
gacactctcctttgccccgagggcc

SEQ ID NO: 247657 - DNA, 25 bp, Homo sapien
gcattcttgtgtagggacactctcc

SEQ ID NO: 247658 - DNA, 25 bp, Homo sapien
agccgtgctccaagcggaggctgtt

SEQ ID NO: 247659 - DNA, 25 bp, Homo sapien
gaaatgcttctgtaggggacatgcc

SEQ ID NO: 247660 - DNA, 25 bp, Homo sapien
gcttctgtaggggacatgcccatga

SEQ ID NO: 247661 - DNA, 25 bp, Homo sapien
aatgcttctgtaggggacatgccca

SEQ ID NO: 247662 - DNA, 25 bp, Homo sapien
ttctgtaggggacatgcccatgaaa

SEQ ID NO: 247663 - DNA, 25 bp, Homo sapien
cactcaaagctttcttggaccccgt

SEQ ID NO: 247664 - DNA, 25 bp, Homo sapien
gcacagaaagatccgaagaaggacc

SEQ ID NO: 247665 - DNA, 25 bp, Homo sapien
tcttgcacgccgcaagtccgagctg

SEQ ID NO: 247666 - DNA, 25 bp, Homo sapien
tcctgtgccataccaatcagttaca

SEQ ID NO: 247667 - DNA, 25 bp, Homo sapien
caagtccgctttgtgagatgaatac

SEQ ID NO: 247668 - DNA, 25 bp, Homo sapien
gctgtcacttcaagccactggcaat

SEQ ID NO: 247669 - DNA, 25 bp, Homo sapien
cgtgtcttggaggaaaatcacctgg

SEQ ID NO: 247670 - DNA, 25 bp, Homo sapien
gaagattgccccagctaaaagtgga

SEQ ID NO: 247671 - DNA, 25 bp, Homo sapien
gtgtggctttagtatggcttccttt

SEQ ID NO: 247672 - DNA, 25 bp, Homo sapien
tacaaaatgtcctatgtacagaata

SEQ ID NO: 247673 - DNA, 25 bp, Homo sapien
tagtgtggctttagtatggcttcct

SEQ ID NO: 247674 - DNA, 25 bp, Homo sapien
cattgaaaataaaccggtgactgtt

SEQ ID NO: 247675 - DNA, 25 bp, Homo sapien
agtggcgtctgtgctcccttcgcac

SEQ ID NO: 247676 - DNA, 25 bp, Homo sapien
gcagacgccgtcactctgcagctgg

SEQ ID NO: 247677 - DNA, 25 bp, Homo sapien
tccttctctacccagtggcgtctgt

SEQ ID NO: 247678 - DNA, 25 bp, Homo sapien
ccttcgcactgacagaggtgcagac

SEQ ID NO: 247679 - DNA, 25 bp, Homo sapien
cagagtgtggccttcgcccaagggt

SEQ ID NO: 247680 - DNA, 25 bp, Homo sapien
tgtttcgaagaaccgcacatgcccc

SEQ ID NO: 247681 - DNA, 25 bp, Homo sapien
ctttgctggctgtttcgaagaaccg

SEQ ID NO: 247682 - DNA, 25 bp, Homo sapien
agagtgtggccttcgcccaagggtc

SEQ ID NO: 247683 - DNA, 25 bp, Homo sapien
agactagatgctcgcccgctgcggt

SEQ ID NO: 247684 - DNA, 25 bp, Homo sapien
tcgatgtttccgcagactagatgct

SEQ ID NO: 247685 - DNA, 25 bp, Homo sapien
gatgctcgcccgctgcggtccttat

SEQ ID NO: 247686 - DNA, 25 bp, Homo sapien
tttccgcagactagatgctcgcccg

SEQ ID NO: 247687 - DNA, 25 bp, Homo sapien
tacaaggcaaggagctcatctgctt

SEQ ID NO: 247688 - DNA, 25 bp, Homo sapien
tgaccactgtcctgaaattgggaac

SEQ ID NO: 247689 - DNA, 25 bp, Homo sapien
gaagagcaggatgcacatacgcagt

SEQ ID NO: 247690 - DNA, 25 bp, Homo sapien
aatgcaatggtttctctcgaaaggg

SEQ ID NO: 247691 - DNA, 25 bp, Homo sapien
gcagagctgtctggcgttttgagcc

SEQ ID NO: 247692 - DNA, 25 bp, Homo sapien
cctccccatggcggcagagctgtct

SEQ ID NO: 247693 - DNA, 25 bp, Homo sapien
gagctgtctggcgttttgagccctt

SEQ ID NO: 247694 - DNA, 25 bp, Homo sapien
ctggcgttttgagccctttacacca

SEQ ID NO: 247695 - DNA, 25 bp, Homo sapien
tatctgccagcgcccgctcggagcc

SEQ ID NO: 247696 - DNA, 25 bp, Homo sapien
tgccagcgcccgctcggagccgggc

SEQ ID NO: 247697 - DNA, 25 bp, Homo sapien
aatatctgccagcgcccgctcggag

SEQ ID NO: 247698 - DNA, 25 bp, Homo sapien
tctgccagcgcccgctcggagccgg

SEQ ID NO: 247699 - DNA, 25 bp, Homo sapien
ggctttctgcactggacgctgccgc

SEQ ID NO: 247700 - DNA, 25 bp, Homo sapien
ggacctgaaagcgtccggatgcgct

SEQ ID NO: 247701 - DNA, 25 bp, Homo sapien
gcactggacgctgccgcccagagag

SEQ ID NO: 247702 - DNA, 25 bp, Homo sapien
cgggcccttggcaaccggctttctg

SEQ ID NO: 247703 - DNA, 25 bp, Homo sapien
gatggtatgaaactgggcacccgac

SEQ ID NO: 247704 - DNA, 25 bp, Homo sapien
tttgagcctatcctacagggccgca

SEQ ID NO: 247705 - DNA, 25 bp, Homo sapien
ggcacccgacttgagacttggactt

SEQ ID NO: 247706 - DNA, 25 bp, Homo sapien
gattactcggaactgcttaggcaca

SEQ ID NO: 247707 - DNA, 25 bp, Homo sapien
agaaagaagttatgaatgtgaactt

SEQ ID NO: 247708 - DNA, 25 bp, Homo sapien
aagaagttatgaatgtgaactttca

SEQ ID NO: 247709 - DNA, 25 bp, Homo sapien
aaagaagttatgaatgtgaactttc

SEQ ID NO: 247710 - DNA, 25 bp, Homo sapien
gaaagaagttatgaatgtgaacttt

SEQ ID NO: 247711 - DNA, 25 bp, Homo sapien
gatgcgcaagttcctttcggacccg

SEQ ID NO: 247712 - DNA, 25 bp, Homo sapien
catctcctaggactcgcagtgcgga

SEQ ID NO: 247713 - DNA, 25 bp, Homo sapien
ttgtacggacccagatactgaggcc

SEQ ID NO: 247714 - DNA, 25 bp, Homo sapien
tgcagaagcacctgcgcaagctggt

SEQ ID NO: 247715 - DNA, 25 bp, Homo sapien
cgggcctgcgagcatcactgttgta

SEQ ID NO: 247716 - DNA, 25 bp, Homo sapien
cgatttgtgtccaagccaagtggcc

SEQ ID NO: 247717 - DNA, 25 bp, Homo sapien
catccttgctgaacgggtgtatcct

SEQ ID NO: 247718 - DNA, 25 bp, Homo sapien
cactgttgtaggtggatgctctcac

SEQ ID NO: 247719 - DNA, 25 bp, Homo sapien
ggccaagaccttctttctaaagcag

SEQ ID NO: 247720 - DNA, 25 bp, Homo sapien
gaagatctggcagcgcgtgtttgta

SEQ ID NO: 247721 - DNA, 25 bp, Homo sapien
tagtttcttctagggcacccagtta

SEQ ID NO: 247722 - DNA, 25 bp, Homo sapien
gatgcaggccgtacagtgttgctcc

SEQ ID NO: 247723 - DNA, 25 bp, Homo sapien
tcctataacatcaacatagacattc

SEQ ID NO: 247724 - DNA, 25 bp, Homo sapien
atttcctataacatcaacatagaca

SEQ ID NO: 247725 - DNA, 25 bp, Homo sapien
taacatcaacatagacattcattat

SEQ ID NO: 247726 - DNA, 25 bp, Homo sapien
agaggacgtcggtgatgaaggagaa

SEQ ID NO: 247727 - DNA, 25 bp, Homo sapien
tcagaaagtttcattgactttacag

SEQ ID NO: 247728 - DNA, 25 bp, Homo sapien
taactttttgaagttatccgcctgc

SEQ ID NO: 247729 - DNA, 25 bp, Homo sapien
ggcagaaatactattgtgacttcat

SEQ ID NO: 247730 - DNA, 25 bp, Homo sapien
tcaggttatacgattttggcagaaa

SEQ ID NO: 247731 - DNA, 25 bp, Homo sapien
cgtactcccgtgattgatgcagata

SEQ ID NO: 247732 - DNA, 25 bp, Homo sapien
gcattcattaaacgtactcccgtga

SEQ ID NO: 247733 - DNA, 25 bp, Homo sapien
ttggcattcattaaacgtactcccg

SEQ ID NO: 247734 - DNA, 25 bp, Homo sapien
cattaaacgtactcccgtgattgat

SEQ ID NO: 247735 - DNA, 25 bp, Homo sapien
gtggcttgacctgggacacgtgcac

SEQ ID NO: 247736 - DNA, 25 bp, Homo sapien
tccctgggagaacgagagctttgtc

SEQ ID NO: 247737 - DNA, 25 bp, Homo sapien
ggaagcgtctacttcagctccctgg

SEQ ID NO: 247738 - DNA, 25 bp, Homo sapien
tgttggactgcatctctatctcgag

SEQ ID NO: 247739 - DNA, 25 bp, Homo sapien
gatgaaaatagagccatacagtttc

SEQ ID NO: 247740 - DNA, 25 bp, Homo sapien
tatgcaggtgctaagactgctgaca

SEQ ID NO: 247741 - DNA, 25 bp, Homo sapien
ttctccaaggtctgtcatcaaagtc

SEQ ID NO: 247742 - DNA, 25 bp, Homo sapien
tattcagagatgttattgagccgag

SEQ ID NO: 247743 - DNA, 25 bp, Homo sapien
tgagtgagcagtgggtccgttttca

SEQ ID NO: 247744 - DNA, 25 bp, Homo sapien
agcagtgggtccgttttcagttctt

SEQ ID NO: 247745 - DNA, 25 bp, Homo sapien
tgagcagtgggtccgttttcagttc

SEQ ID NO: 247746 - DNA, 25 bp, Homo sapien
gagtttgtgtattgagtgagcagtg

SEQ ID NO: 247747 - DNA, 25 bp, Homo sapien
tctgctgaacgtgaacgatgggaaa

SEQ ID NO: 247748 - DNA, 25 bp, Homo sapien
tcggtataaatcctgaaaggcctca

SEQ ID NO: 247749 - DNA, 25 bp, Homo sapien
tacgcgggttactttgaccagcaga

SEQ ID NO: 247750 - DNA, 25 bp, Homo sapien
cagcagatgcgtcagaacttgttca

SEQ ID NO: 247751 - DNA, 25 bp, Homo sapien
tctcgggtggtggtaacagcctatc

SEQ ID NO: 247752 - DNA, 25 bp, Homo sapien
gatcgtaagatcacacggaccagct

SEQ ID NO: 247753 - DNA, 25 bp, Homo sapien
aatcagggtctctcatcagggactc

SEQ ID NO: 247754 - DNA, 25 bp, Homo sapien
gagtgcactgagattcggtaacccc

SEQ ID NO: 247755 - DNA, 25 bp, Homo sapien
acgggttttcttcatgttggcagcc

SEQ ID NO: 247756 - DNA, 25 bp, Homo sapien
tcttcatgttggcagcccagcctgg

SEQ ID NO: 247757 - DNA, 25 bp, Homo sapien
tttcttcatgttggcagcccagcct

SEQ ID NO: 247758 - DNA, 25 bp, Homo sapien
gttttcttcatgttggcagcccagc

SEQ ID NO: 247759 - DNA, 25 bp, Homo sapien
taaagctttgactgacctggcatct

SEQ ID NO: 247760 - DNA, 25 bp, Homo sapien
agaacgcttacgatacgcaccactg

SEQ ID NO: 247761 - DNA, 25 bp, Homo sapien
ggcgccaagtgaagaccgaaactct

SEQ ID NO: 247762 - DNA, 25 bp, Homo sapien
tgtgaatctgctgccatcgtcagga

SEQ ID NO: 247763 - DNA, 25 bp, Homo sapien
cacacacacgaaccctgcttttcct

SEQ ID NO: 247764 - DNA, 25 bp, Homo sapien
tgaccacacacacgaaccctgcttt

SEQ ID NO: 247765 - DNA, 25 bp, Homo sapien
gaccacacacacgaaccctgctttt

SEQ ID NO: 247766 - DNA, 25 bp, Homo sapien
ccacacacacgaaccctgcttttcc

SEQ ID NO: 247767 - DNA, 25 bp, Homo sapien
ctggcatgcaaggtcgacggacata

SEQ ID NO: 247768 - DNA, 25 bp, Homo sapien
tgtcagggcgtctggtgtcactcag

SEQ ID NO: 247769 - DNA, 25 bp, Homo sapien
cacaaccaggagtttcgacagtgag

SEQ ID NO: 247770 - DNA, 25 bp, Homo sapien
gaggtgacccctgacatcatttcca

SEQ ID NO: 247771 - DNA, 25 bp, Homo sapien
aatctgacggttgggagtggtggaa

SEQ ID NO: 247772 - DNA, 25 bp, Homo sapien
aaggccaatggcgtggctcctttga

SEQ ID NO: 247773 - DNA, 25 bp, Homo sapien
attggaaggataccaggaggtattt

SEQ ID NO: 247774 - DNA, 25 bp, Homo sapien
tgtgcacagagtaaacttttctagc

SEQ ID NO: 247775 - DNA, 25 bp, Homo sapien
tcccaaacctaggtggtggccatgc

SEQ ID NO: 247776 - DNA, 25 bp, Homo sapien
tctgcgaggcggaatcaagtctaac

SEQ ID NO: 247777 - DNA, 25 bp, Homo sapien
tgacagggcgtctactatatgaact

SEQ ID NO: 247778 - DNA, 25 bp, Homo sapien
gacttcagtgtgtaggaagccacct

SEQ ID NO: 247779 - DNA, 25 bp, Homo sapien
tcttagtgtagatggggtttttcca

SEQ ID NO: 247780 - DNA, 25 bp, Homo sapien
ggcatgacccatggcccctggccat

SEQ ID NO: 247781 - DNA, 25 bp, Homo sapien
acaggcatgacccatggcccctggc

SEQ ID NO: 247782 - DNA, 25 bp, Homo sapien
tacaggcatgacccatggcccctgg

SEQ ID NO: 247783 - DNA, 25 bp, Homo sapien
cttaacatggactctcgactgcagt

SEQ ID NO: 247784 - DNA, 25 bp, Homo sapien
tcccacttctgatcaaccttggagt

SEQ ID NO: 247785 - DNA, 25 bp, Homo sapien
ggactctcgactgcagtacaacact

SEQ ID NO: 247786 - DNA, 25 bp, Homo sapien
accttggagttttgagctgttccat

SEQ ID NO: 247787 - DNA, 25 bp, Homo sapien
gagtttcctacctagacgaccatgt

SEQ ID NO: 247788 - DNA, 25 bp, Homo sapien
gcctggctcaactatcctatgctaa

SEQ ID NO: 247789 - DNA, 25 bp, Homo sapien
ggagatgggtacttacctgtgcatc

SEQ ID NO: 247790 - DNA, 25 bp, Homo sapien
tcttggtggtacagtctccagcatg

SEQ ID NO: 247791 - DNA, 25 bp, Homo sapien
acgcaggggatgcatgttgtctgca

SEQ ID NO: 247792 - DNA, 25 bp, Homo sapien
tggcactaactgtcatccagatact

SEQ ID NO: 247793 - DNA, 25 bp, Homo sapien
gtcacacaatatcttttaactcatc

SEQ ID NO: 247794 - DNA, 25 bp, Homo sapien
attttggcactaactgtcatccaga

SEQ ID NO: 247795 - DNA, 25 bp, Homo sapien
tcaagatacagctcagaacacttca

SEQ ID NO: 247796 - DNA, 25 bp, Homo sapien
gtcttacagtgcacgttaccccaat

SEQ ID NO: 247797 - DNA, 25 bp, Homo sapien
catcatgttacatacgtcttacagt

SEQ ID NO: 247798 - DNA, 25 bp, Homo sapien
tactgaacaggtaagtcatccctca

SEQ ID NO: 247799 - DNA, 25 bp, Homo sapien
ttcttccatgcgtgatgtgtcgtca

SEQ ID NO: 247800 - DNA, 25 bp, Homo sapien
tgcgtgatgtgtcgtcatctccttc

SEQ ID NO: 247801 - DNA, 25 bp, Homo sapien
tcagttacagcagcactggtatcat

SEQ ID NO: 247802 - DNA, 25 bp, Homo sapien
agcagcactggtatcatcagcagta

SEQ ID NO: 247803 - DNA, 25 bp, Homo sapien
tgctttcaagacagtattacaggac

SEQ ID NO: 247804 - DNA, 25 bp, Homo sapien
tcttaaagccagctattagggtaat

SEQ ID NO: 247805 - DNA, 25 bp, Homo sapien
caggacaaggtgctccaagtttgga

SEQ ID NO: 247806 - DNA, 25 bp, Homo sapien
tactttaatacctccaagcagcaag

SEQ ID NO: 247807 - DNA, 25 bp, Homo sapien
tctcaataatggaatggtcagggtt

SEQ ID NO: 247808 - DNA, 25 bp, Homo sapien
ctcaataatggaatggtcagggttt

SEQ ID NO: 247809 - DNA, 25 bp, Homo sapien
tgtcaccaatcggtttgacacaacc

SEQ ID NO: 247810 - DNA, 25 bp, Homo sapien
cttgtgacaatacagcatggagatg

SEQ ID NO: 247811 - DNA, 25 bp, Homo sapien
ttgtgacaatacagcatggagatgt

SEQ ID NO: 247812 - DNA, 25 bp, Homo sapien
agcatggagatgtcaccaatcggtt

SEQ ID NO: 247813 - DNA, 25 bp, Homo sapien
taggtatccaaagagcacaggttat

SEQ ID NO: 247814 - DNA, 25 bp, Homo sapien
aagttgaaaacatgcgaaaatgggc

SEQ ID NO: 247815 - DNA, 25 bp, Homo sapien
tgtatgactaagcttgaaagcacct

SEQ ID NO: 247816 - DNA, 25 bp, Homo sapien
gcaccttagaagtatcaatgatcag

SEQ ID NO: 247817 - DNA, 25 bp, Homo sapien
cttcatcctctggaagttccaggcc

SEQ ID NO: 247818 - DNA, 25 bp, Homo sapien
tctggaagttccaggccttctttgg

SEQ ID NO: 247819 - DNA, 25 bp, Homo sapien
tgtctttcatgattttgcagaggtt

SEQ ID NO: 247820 - DNA, 25 bp, Homo sapien
gaagttccaggccttctttggtgac

SEQ ID NO: 247821 - DNA, 25 bp, Homo sapien
tccacaaaggctgagttagctacct

SEQ ID NO: 247822 - DNA, 25 bp, Homo sapien
atgtttccgaagacgttccacaaag

SEQ ID NO: 247823 - DNA, 25 bp, Homo sapien
ttctaagccatgtttccgaagacgt

SEQ ID NO: 247824 - DNA, 25 bp, Homo sapien
caatgggctcaatcatatagatcac

SEQ ID NO: 247825 - DNA, 25 bp, Homo sapien
gccagatacctaggcagaacctaag

SEQ ID NO: 247826 - DNA, 25 bp, Homo sapien
taccagttgtaacagtgctacctga

SEQ ID NO: 247827 - DNA, 25 bp, Homo sapien
tacctgagtagaaaacacacccaca

SEQ ID NO: 247828 - DNA, 25 bp, Homo sapien
tcttgcctagatcaataccagttgt

SEQ ID NO: 247829 - DNA, 25 bp, Homo sapien
tttgagagtcttcgtgtattccaag

SEQ ID NO: 247830 - DNA, 25 bp, Homo sapien
tagatatgtttctggttctccttca

SEQ ID NO: 247831 - DNA, 25 bp, Homo sapien
gaggcagatgtgtagtaccttaaca

SEQ ID NO: 247832 - DNA, 25 bp, Homo sapien
ctccttcattctggtgcagtagtcc

SEQ ID NO: 247833 - DNA, 25 bp, Homo sapien
agtatgttctttacaaagactttct

SEQ ID NO: 247834 - DNA, 25 bp, Homo sapien
tatgttctttacaaagactttctga

SEQ ID NO: 247835 - DNA, 25 bp, Homo sapien
aagaggccaattggaaaactaatgg

SEQ ID NO: 247836 - DNA, 25 bp, Homo sapien
acaaagtatgttctttacaaagact

SEQ ID NO: 247837 - DNA, 25 bp, Homo sapien
agagggagatcctccgagtctacca

SEQ ID NO: 247838 - DNA, 25 bp, Homo sapien
tagagggagatcctccgagtctacc

SEQ ID NO: 247839 - DNA, 25 bp, Homo sapien
gacaaaactggtactatgtaaactc

SEQ ID NO: 247840 - DNA, 25 bp, Homo sapien
tcagcctgccactacatggggctaa

SEQ ID NO: 247841 - DNA, 25 bp, Homo sapien
caaaatcaaagataacctgaagatg

SEQ ID NO: 247842 - DNA, 25 bp, Homo sapien
gatgatgggacgtatttttgagaca

SEQ ID NO: 247843 - DNA, 25 bp, Homo sapien
cgtcgtgggacaaatagaagggctc

SEQ ID NO: 247844 - DNA, 25 bp, Homo sapien
aaacagatcaaaaggagcacgtcgt

SEQ ID NO: 247845 - DNA, 25 bp, Homo sapien
tccatgatgaaaactctgcgtacat

SEQ ID NO: 247846 - DNA, 25 bp, Homo sapien
tttcaaacagatcaaaaggagcacg

SEQ ID NO: 247847 - DNA, 25 bp, Homo sapien
gcttgaagcacccatcagtcactca

SEQ ID NO: 247848 - DNA, 25 bp, Homo sapien
tgaacaatgcattatagaagatatt

SEQ ID NO: 247849 - DNA, 25 bp, Homo sapien
tacactaagtaccaatgaacaatgc

SEQ ID NO: 247850 - DNA, 25 bp, Homo sapien
tctaaggacaagcttgaagcaccca

SEQ ID NO: 247851 - DNA, 25 bp, Homo sapien
cagtcattggtcaagctcttataga

SEQ ID NO: 247852 - DNA, 25 bp, Homo sapien
caagctcttatagaattctccgtac

SEQ ID NO: 247853 - DNA, 25 bp, Homo sapien
gaattctccgtactcctcattagta

SEQ ID NO: 247854 - DNA, 25 bp, Homo sapien
cctcattagtaatatcgtcgggatt

SEQ ID NO: 247855 - DNA, 25 bp, Homo sapien
gttttgttgagctcttcttgatcga

SEQ ID NO: 247856 - DNA, 25 bp, Homo sapien
ttgagctcttcttgatcgatgtact

SEQ ID NO: 247857 - DNA, 25 bp, Homo sapien
gctcttcttgatcgatgtacttttc

SEQ ID NO: 247858 - DNA, 25 bp, Homo sapien
gagctcttcttgatcgatgtacttt

SEQ ID NO: 247859 - DNA, 25 bp, Homo sapien
ttttcttcagcctcatcatcgctta

SEQ ID NO: 247860 - DNA, 25 bp, Homo sapien
gtttgtcttccgactctttctcttc

SEQ ID NO: 247861 - DNA, 25 bp, Homo sapien
tttcttcagcctcatcatcgcttac

SEQ ID NO: 247862 - DNA, 25 bp, Homo sapien
aatttcaggtttgtcttccgactct

SEQ ID NO: 247863 - DNA, 25 bp, Homo sapien
gatacatccacttaatagcccgagg

SEQ ID NO: 247864 - DNA, 25 bp, Homo sapien
taggtagtagagcttaggttcccca

SEQ ID NO: 247865 - DNA, 25 bp, Homo sapien
ttagccaacttgagaagcacccagc

SEQ ID NO: 247866 - DNA, 25 bp, Homo sapien
tgcactccagaactaagcgacagcg

SEQ ID NO: 247867 - DNA, 25 bp, Homo sapien
tcctccaagtactcagtttggtctt

SEQ ID NO: 247868 - DNA, 25 bp, Homo sapien
caaggtttgccgttactacagatgc

SEQ ID NO: 247869 - DNA, 25 bp, Homo sapien
tcaatttagtgctcaacgccatgcc

SEQ ID NO: 247870 - DNA, 25 bp, Homo sapien
tctagcttgttcctgatcgttgggc

SEQ ID NO: 247871 - DNA, 25 bp, Homo sapien
cacaaattctgtaagcttcaccgca

SEQ ID NO: 247872 - DNA, 25 bp, Homo sapien
taaccagtgaatgttcaggtgccta

SEQ ID NO: 247873 - DNA, 25 bp, Homo sapien
aaccagtgaatgttcaggtgcctac

SEQ ID NO: 247874 - DNA, 25 bp, Homo sapien
ttaaccagtgaatgttcaggtgcct

SEQ ID NO: 247875 - DNA, 25 bp, Homo sapien
ggcgatagtaccaaggttattgatc

SEQ ID NO: 247876 - DNA, 25 bp, Homo sapien
cccagacttggcgatagtaccaagg

SEQ ID NO: 247877 - DNA, 25 bp, Homo sapien
ggtcccagacttggcgatagtacca

SEQ ID NO: 247878 - DNA, 25 bp, Homo sapien
gacttggcgatagtaccaaggttat

SEQ ID NO: 247879 - DNA, 25 bp, Homo sapien
tcgatcttgtttgttcggtataagg

SEQ ID NO: 247880 - DNA, 25 bp, Homo sapien
tgggatctgtcaagctttcataccg

SEQ ID NO: 247881 - DNA, 25 bp, Homo sapien
tttcataccggattttgtccaatgc

SEQ ID NO: 247882 - DNA, 25 bp, Homo sapien
tatccacaatagtgagagttcgatc

SEQ ID NO: 247883 - DNA, 25 bp, Homo sapien
tattaatttaagcatacagcacccc

SEQ ID NO: 247884 - DNA, 25 bp, Homo sapien
aaaatattaatttaagcatacagca

SEQ ID NO: 247885 - DNA, 25 bp, Homo sapien
tttaagcatacagcacccccaagaa

SEQ ID NO: 247886 - DNA, 25 bp, Homo sapien
aatttaagcatacagcacccccaag

SEQ ID NO: 247887 - DNA, 25 bp, Homo sapien
aaatccgattctgggttaataagtg

SEQ ID NO: 247888 - DNA, 25 bp, Homo sapien
caaaatccgattctgggttaataag

SEQ ID NO: 247889 - DNA, 25 bp, Homo sapien
ccgattctgggttaataagtgactt

SEQ ID NO: 247890 - DNA, 25 bp, Homo sapien
atccgattctgggttaataagtgac

SEQ ID NO: 247891 - DNA, 25 bp, Homo sapien
ctctcagaaagatctctttgttcga

SEQ ID NO: 247892 - DNA, 25 bp, Homo sapien
gatgatcaatgacatcaactgggca

SEQ ID NO: 247893 - DNA, 25 bp, Homo sapien
gcctgaaaggcgaacgtctcaacct

SEQ ID NO: 247894 - DNA, 25 bp, Homo sapien
gaaagatctctttgttcgagtagaa

SEQ ID NO: 247895 - DNA, 25 bp, Homo sapien
ttggtcttgggtctgggtttcctca

SEQ ID NO: 247896 - DNA, 25 bp, Homo sapien
cttgggtctgggtttcctcaggcat

SEQ ID NO: 247897 - DNA, 25 bp, Homo sapien
tggtcttgggtctgggtttcctcag

SEQ ID NO: 247898 - DNA, 25 bp, Homo sapien
gtcttgggtctgggtttcctcaggc

SEQ ID NO: 247899 - DNA, 25 bp, Homo sapien
gatgacctcatttcggagcgcggca

SEQ ID NO: 247900 - DNA, 25 bp, Homo sapien
agcgcggcaactaccacgagcgtgt

SEQ ID NO: 247901 - DNA, 25 bp, Homo sapien
ccgaaaatagaagggcggctgacaa

SEQ ID NO: 247902 - DNA, 25 bp, Homo sapien
gaggcaacacgaaattccatcgcgt

SEQ ID NO: 247903 - DNA, 25 bp, Homo sapien
cagccacaccgggacgctgaagcaa

SEQ ID NO: 247904 - DNA, 25 bp, Homo sapien
gacgctgaagcaactgacgcgccac

SEQ ID NO: 247905 - DNA, 25 bp, Homo sapien
accgggacgctgaagcaactgacgc

SEQ ID NO: 247906 - DNA, 25 bp, Homo sapien
aggaccaacggcacagccacaccgg

SEQ ID NO: 247907 - DNA, 25 bp, Homo sapien
ccagcgcgcggcgctttttccagaa

SEQ ID NO: 247908 - DNA, 25 bp, Homo sapien
cccagcgcgcggcgctttttccaga

SEQ ID NO: 247909 - DNA, 25 bp, Homo sapien
tatatagcgacgggcccgcccagcg

SEQ ID NO: 247910 - DNA, 25 bp, Homo sapien
cttatatagcgacgggcccgcccag

SEQ ID NO: 247911 - DNA, 25 bp, Homo sapien
aagatgccagtcagtcatttatata

SEQ ID NO: 247912 - DNA, 25 bp, Homo sapien
tgagaaagatgccagtcagtcattt

SEQ ID NO: 247913 - DNA, 25 bp, Homo sapien
gaaagatgccagtcagtcatttata

SEQ ID NO: 247914 - DNA, 25 bp, Homo sapien
ggagggaaggatcacagggacctga

SEQ ID NO: 247915 - DNA, 25 bp, Homo sapien
acagtgtctgctgcgcatccacgtg

SEQ ID NO: 247916 - DNA, 25 bp, Homo sapien
cagtgtcacctttgttggaccacag

SEQ ID NO: 247917 - DNA, 25 bp, Homo sapien
ggatgggcctccaatgaacaggatg

SEQ ID NO: 247918 - DNA, 25 bp, Homo sapien
gcagatgatggcaggtgacccttgc

SEQ ID NO: 247919 - DNA, 25 bp, Homo sapien
tgggatgcctttgggcatgctcctg

SEQ ID NO: 247920 - DNA, 25 bp, Homo sapien
gagcccctctgagtaaagcacaaag

SEQ ID NO: 247921 - DNA, 25 bp, Homo sapien
gggtcctggacacgaatttgaactc

SEQ ID NO: 247922 - DNA, 25 bp, Homo sapien
gctgacaagtctggtggatttttcc

SEQ ID NO: 247923 - DNA, 25 bp, Homo sapien
cttccttgggaggccccctcctgtg

SEQ ID NO: 247924 - DNA, 25 bp, Homo sapien
tccttgggaggccccctcctgtgcc

SEQ ID NO: 247925 - DNA, 25 bp, Homo sapien
ttccttgggaggccccctcctgtgc

SEQ ID NO: 247926 - DNA, 25 bp, Homo sapien
gcctgatcttggtgctctcagacct

SEQ ID NO: 247927 - DNA, 25 bp, Homo sapien
ctgatcttggtgctctcagacctgg

SEQ ID NO: 247928 - DNA, 25 bp, Homo sapien
ctcagacctggaatgctgggcaccc

SEQ ID NO: 247929 - DNA, 25 bp, Homo sapien
agacctggaatgctgggcacccaca

SEQ ID NO: 247930 - DNA, 25 bp, Homo sapien
catttctttgattagtaatcctata

SEQ ID NO: 247931 - DNA, 25 bp, Homo sapien
atgcccagctctgattttaatttgc

SEQ ID NO: 247932 - DNA, 25 bp, Homo sapien
accatgcccagctctgattttaatt

SEQ ID NO: 247933 - DNA, 25 bp, Homo sapien
gcatttctttgattagtaatcctat

SEQ ID NO: 247934 - DNA, 25 bp, Homo sapien
tctcctcccagcattcaaaatttgg

SEQ ID NO: 247935 - DNA, 25 bp, Homo sapien
aaatttggttcacttctctcccctg

SEQ ID NO: 247936 - DNA, 25 bp, Homo sapien
aaattaccacgtgctggacacagcc

SEQ ID NO: 247937 - DNA, 25 bp, Homo sapien
gatgcttgagggaaggtcagtcacc

SEQ ID NO: 247938 - DNA, 25 bp, Homo sapien
acagagtagagtggtggatccagac

SEQ ID NO: 247939 - DNA, 25 bp, Homo sapien
tgacagggaatgcagagacgtggaa

SEQ ID NO: 247940 - DNA, 25 bp, Homo sapien
tctgaaggccagtgacgcggtgaca

SEQ ID NO: 247941 - DNA, 25 bp, Homo sapien
tccttgtagaggtgttgccctgcac

SEQ ID NO: 247942 - DNA, 25 bp, Homo sapien
acagctcattgcttcacagggtgca

SEQ ID NO: 247943 - DNA, 25 bp, Homo sapien
tatcagaagtcttcacggcagcccc

SEQ ID NO: 247944 - DNA, 25 bp, Homo sapien
cacaggcttggaggcctagaaggaa

SEQ ID NO: 247945 - DNA, 25 bp, Homo sapien
tttccacatggtactgagcctgcag

SEQ ID NO: 247946 - DNA, 25 bp, Homo sapien
taagtagttgagactacaggtgccc

SEQ ID NO: 247947 - DNA, 25 bp, Homo sapien
ctaagtagttgagactacaggtgcc

SEQ ID NO: 247948 - DNA, 25 bp, Homo sapien
tcttaggtgtatttgagtttgtttc

SEQ ID NO: 247949 - DNA, 25 bp, Homo sapien
tgcctgtgcaacaactacatgtttt

SEQ ID NO: 247950 - DNA, 25 bp, Homo sapien
tcctagatgattacccagcaatcct

SEQ ID NO: 247951 - DNA, 25 bp, Homo sapien
cagcaatcctaatcctatttattga

SEQ ID NO: 247952 - DNA, 25 bp, Homo sapien
tgccatctctatcatatgtccattt

SEQ ID NO: 247953 - DNA, 25 bp, Homo sapien
tccaatacctcttcttaaattaatc

SEQ ID NO: 247954 - DNA, 25 bp, Homo sapien
taatcctgccatctctatcatatgt

SEQ ID NO: 247955 - DNA, 25 bp, Homo sapien
tataaatggttagttggttgttcca

SEQ ID NO: 247956 - DNA, 25 bp, Homo sapien
tcttactggaggagcttaacaatga

SEQ ID NO: 247957 - DNA, 25 bp, Homo sapien
ggctattaagcttgaacgtccttgc

SEQ ID NO: 247958 - DNA, 25 bp, Homo sapien
caaagctagcatgagttctatctac

SEQ ID NO: 247959 - DNA, 25 bp, Homo sapien
gataaaacccacaatgctcattaag

SEQ ID NO: 247960 - DNA, 25 bp, Homo sapien
attactacaggggattactacaggc

SEQ ID NO: 247961 - DNA, 25 bp, Homo sapien
tattcagaactgtgcaattatcacc

SEQ ID NO: 247962 - DNA, 25 bp, Homo sapien
cacgcccacctggctaggtttgatt

SEQ ID NO: 247963 - DNA, 25 bp, Homo sapien
ccaacgactattattcagtggtttc

SEQ ID NO: 247964 - DNA, 25 bp, Homo sapien
accacgcccgacaactacattcctt

SEQ ID NO: 247965 - DNA, 25 bp, Homo sapien
caccacgcccgacaactacattcct

SEQ ID NO: 247966 - DNA, 25 bp, Homo sapien
ctgagaagtgctggtgtatcgtgtc

SEQ ID NO: 247967 - DNA, 25 bp, Homo sapien
catggagccactactcaaacctggg

SEQ ID NO: 247968 - DNA, 25 bp, Homo sapien
ttatgcagtaggtaagaaacaggct

SEQ ID NO: 247969 - DNA, 25 bp, Homo sapien
aaggatgacagtagaaacgttagac

SEQ ID NO: 247970 - DNA, 25 bp, Homo sapien
ttcgtaacctactgagcaagatcag

SEQ ID NO: 247971 - DNA, 25 bp, Homo sapien
tctggtgtaacatgccaagaaaccc

SEQ ID NO: 247972 - DNA, 25 bp, Homo sapien
cgtgtgcccgtccttataaatctag

SEQ ID NO: 247973 - DNA, 25 bp, Homo sapien
ttgtgcccctccagatataatctga

SEQ ID NO: 247974 - DNA, 25 bp, Homo sapien
tagtgaagcgtaaatcttgagtccc

SEQ ID NO: 247975 - DNA, 25 bp, Homo sapien
gctcatcacacgcaggaattaggat

SEQ ID NO: 247976 - DNA, 25 bp, Homo sapien
ggcttgagaacacctatgctgtacc

SEQ ID NO: 247977 - DNA, 25 bp, Homo sapien
cacgcaggaattaggatatctggct

SEQ ID NO: 247978 - DNA, 25 bp, Homo sapien
tccgggcacttagggcaggatgaac

SEQ ID NO: 247979 - DNA, 25 bp, Homo sapien
cccgggaaggtctgtacaagctgct

SEQ ID NO: 247980 - DNA, 25 bp, Homo sapien
tattcagcactctgggcgggacagt

SEQ ID NO: 247981 - DNA, 25 bp, Homo sapien
tctgcttcaatgtgggccgggagct

SEQ ID NO: 247982 - DNA, 25 bp, Homo sapien
cagttgccttttgctttctggacca

SEQ ID NO: 247983 - DNA, 25 bp, Homo sapien
tcagttgccttttgctttctggacc

SEQ ID NO: 247984 - DNA, 25 bp, Homo sapien
agttgccttttgctttctggaccac

SEQ ID NO: 247985 - DNA, 25 bp, Homo sapien
ctgtttccagtcgtgggtgtggtca

SEQ ID NO: 247986 - DNA, 25 bp, Homo sapien
tgtttccagtcgtgggtgtggtcat

SEQ ID NO: 247987 - DNA, 25 bp, Homo sapien
tcctttgctggatgcacagtttgtg

SEQ ID NO: 247988 - DNA, 25 bp, Homo sapien
tctgcaaccctgtgggttgtttact

SEQ ID NO: 247989 - DNA, 25 bp, Homo sapien
gctggatgcacagtttgtgaagatt

SEQ ID NO: 247990 - DNA, 25 bp, Homo sapien
aagattttctctgcaaccctgtggg

SEQ ID NO: 247991 - DNA, 25 bp, Homo sapien
ttgcctttggtggaatagcccctct

SEQ ID NO: 247992 - DNA, 25 bp, Homo sapien
tagtgccatgctaaactgacccagc

SEQ ID NO: 247993 - DNA, 25 bp, Homo sapien
cctactgaggcccactaagttggtg

SEQ ID NO: 247994 - DNA, 25 bp, Homo sapien
tatgtgatgtgacatggctgttgcc

SEQ ID NO: 247995 - DNA, 25 bp, Homo sapien
tctgcttcagggttagttgtctcca

SEQ ID NO: 247996 - DNA, 25 bp, Homo sapien
cagtagagaactagagccgggagcc

SEQ ID NO: 247997 - DNA, 25 bp, Homo sapien
ggtccagacttctacatgtgcaagg

SEQ ID NO: 247998 - DNA, 25 bp, Homo sapien
gaatacttggttcgatgtcacaggc

SEQ ID NO: 247999 - DNA, 25 bp, Homo sapien
cagccgaagccctttagcttgggac

SEQ ID NO: 248000 - DNA, 25 bp, Homo sapien
gtgcaagcgtcagggtcccagccga

SEQ ID NO: 248001 - DNA, 25 bp, Homo sapien
cacatttttagaaccctgtgtgtgt

SEQ ID NO: 248002 - DNA, 25 bp, Homo sapien
cactgacagcacattccacttgaga

SEQ ID NO: 248003 - DNA, 25 bp, Homo sapien
ccttagaacgcttgggagtggccct

SEQ ID NO: 248004 - DNA, 25 bp, Homo sapien
tcaacattgaaatcactagagtccc

SEQ ID NO: 248005 - DNA, 25 bp, Homo sapien
gtcaaacccaatccaaataagccag

SEQ ID NO: 248006 - DNA, 25 bp, Homo sapien
gaacgggagacagcatgctcgcttt

SEQ ID NO: 248007 - DNA, 25 bp, Homo sapien
tggcagcgtactcgatgaaatgttc

SEQ ID NO: 248008 - DNA, 25 bp, Homo sapien
agacattctgaagtcgtcctgggcc

SEQ ID NO: 248009 - DNA, 25 bp, Homo sapien
tgttacatggactcactatcccgga

SEQ ID NO: 248010 - DNA, 25 bp, Homo sapien
tgtgccaactccagtccgggagaag

SEQ ID NO: 248011 - DNA, 25 bp, Homo sapien
caggtaggctgctttcagtaggagc

SEQ ID NO: 248012 - DNA, 25 bp, Homo sapien
agtaggagctcttttcctggctaga

SEQ ID NO: 248013 - DNA, 25 bp, Homo sapien
ctttgtgctggcgtgaggttgtcct

SEQ ID NO: 248014 - DNA, 25 bp, Homo sapien
agttcattgtctgcctactcctcat

SEQ ID NO: 248015 - DNA, 25 bp, Homo sapien
gtttgacacggatgaccatttgggc

SEQ ID NO: 248016 - DNA, 25 bp, Homo sapien
taatattagagccaaggcttgcccc

SEQ ID NO: 248017 - DNA, 25 bp, Homo sapien
gaactgaagtctctagcgggaataa

SEQ ID NO: 248018 - DNA, 25 bp, Homo sapien
tgatgggacgccgtgcagattctgc

SEQ ID NO: 248019 - DNA, 25 bp, Homo sapien
cccagttccgttatgccagtatgga

SEQ ID NO: 248020 - DNA, 25 bp, Homo sapien
agggctgccatcaaaagggcgaagc

SEQ ID NO: 248021 - DNA, 25 bp, Homo sapien
caaaagggcgaagcctgctaacggg

SEQ ID NO: 248022 - DNA, 25 bp, Homo sapien
ccccagttccgttatgccagtatgg

SEQ ID NO: 248023 - DNA, 25 bp, Homo sapien
cacatcaacagcaccagttttgacc

SEQ ID NO: 248024 - DNA, 25 bp, Homo sapien
tcaacagcaccagttttgaccacgt

SEQ ID NO: 248025 - DNA, 25 bp, Homo sapien
gcttccacatcaacagcaccagttt

SEQ ID NO: 248026 - DNA, 25 bp, Homo sapien
gcaccagttttgaccacgtggagct

SEQ ID NO: 248027 - DNA, 25 bp, Homo sapien
tagtgtagcgacctcactgctgcgc

SEQ ID NO: 248028 - DNA, 25 bp, Homo sapien
ggctcattgtcatccccaagccagg

SEQ ID NO: 248029 - DNA, 25 bp, Homo sapien
gctgctcacccaaagaagttgtttc

SEQ ID NO: 248030 - DNA, 25 bp, Homo sapien
acagtctcccgggacttggactcga

SEQ ID NO: 248031 - DNA, 25 bp, Homo sapien
ttttaaaaaatcatatacaactgga

SEQ ID NO: 248032 - DNA, 25 bp, Homo sapien
tcagctcagccctcggtttagtttt

SEQ ID NO: 248033 - DNA, 25 bp, Homo sapien
ccttcgaaagctttattttgtgaga

SEQ ID NO: 248034 - DNA, 25 bp, Homo sapien
tatgaatgcagccacggaaaacttc

SEQ ID NO: 248035 - DNA, 25 bp, Homo sapien
gacattagttacagcttgagttctc

SEQ ID NO: 248036 - DNA, 25 bp, Homo sapien
tttggccatcactgtactaacgctg

SEQ ID NO: 248037 - DNA, 25 bp, Homo sapien
gaaagactagcttccctggtacgat

SEQ ID NO: 248038 - DNA, 25 bp, Homo sapien
cacttctggcgttggagaatgcacg

SEQ ID NO: 248039 - DNA, 25 bp, Homo sapien
gatccagccgtgtccaaaacttttg

SEQ ID NO: 248040 - DNA, 25 bp, Homo sapien
tgcccggtgtcttctttaaggtcag

SEQ ID NO: 248041 - DNA, 25 bp, Homo sapien
cgtgcacgtctgagtgccagatgga

SEQ ID NO: 248042 - DNA, 25 bp, Homo sapien
tcacacgaagacgtgcacgtctgag

SEQ ID NO: 248043 - DNA, 25 bp, Homo sapien
gatgagggtaggctcacacaagaag

SEQ ID NO: 248044 - DNA, 25 bp, Homo sapien
tgagggatgaacgtgtttgaatggg

SEQ ID NO: 248045 - DNA, 25 bp, Homo sapien
gcagagggttgagggatgaacgtgt

SEQ ID NO: 248046 - DNA, 25 bp, Homo sapien
ggaggaggacggctgaggcctcatc

SEQ ID NO: 248047 - DNA, 25 bp, Homo sapien
ctcatcctcgcttccgttctgggtt

SEQ ID NO: 248048 - DNA, 25 bp, Homo sapien
tcactggtaagacatgatggcgctc

SEQ ID NO: 248049 - DNA, 25 bp, Homo sapien
taataaaagtcaggggtgtcagcag

SEQ ID NO: 248050 - DNA, 25 bp, Homo sapien
ggtgtcagcagcgtcactggtaaga

SEQ ID NO: 248051 - DNA, 25 bp, Homo sapien
atggcgctccacgactgaccagcag

SEQ ID NO: 248052 - DNA, 25 bp, Homo sapien
cttggtgttgcctccgaagtcgaga

SEQ ID NO: 248053 - DNA, 25 bp, Homo sapien
tatattagcccagaacatcctaggc

SEQ ID NO: 248054 - DNA, 25 bp, Homo sapien
ccctagaatgcggtggttttacaag

SEQ ID NO: 248055 - DNA, 25 bp, Homo sapien
aagtcgagacgacggtgctgctcag

SEQ ID NO: 248056 - DNA, 25 bp, Homo sapien
cctttccgcactatggtgggcaggc

SEQ ID NO: 248057 - DNA, 25 bp, Homo sapien
tccgcactatggtgggcaggcgaca

SEQ ID NO: 248058 - DNA, 25 bp, Homo sapien
tatcttccgcctttccgcactatgg

SEQ ID NO: 248059 - DNA, 25 bp, Homo sapien
ccgcctttccgcactatggtgggca

SEQ ID NO: 248060 - DNA, 25 bp, Homo sapien
gggcaggcttaaggtccttctgcgg

SEQ ID NO: 248061 - DNA, 25 bp, Homo sapien
ggcaggcttaaggtccttctgcgga

SEQ ID NO: 248062 - DNA, 25 bp, Homo sapien
gcaggcttaaggtccttctgcggat

SEQ ID NO: 248063 - DNA, 25 bp, Homo sapien
tgggctgggtcgaagagcagcgccg

SEQ ID NO: 248064 - DNA, 25 bp, Homo sapien
gacacaaaattcagtggcggcctgg

SEQ ID NO: 248065 - DNA, 25 bp, Homo sapien
acagacacaaaattcagtggcggcc

SEQ ID NO: 248066 - DNA, 25 bp, Homo sapien
acaaaattcagtggcggcctgggct

SEQ ID NO: 248067 - DNA, 25 bp, Homo sapien
tgttccagatccaagcacggactgc

SEQ ID NO: 248068 - DNA, 25 bp, Homo sapien
gacggtcctcctcttgctttaggga

SEQ ID NO: 248069 - DNA, 25 bp, Homo sapien
tcgcagggatgcacttcaagggtct

SEQ ID NO: 248070 - DNA, 25 bp, Homo sapien
gttccatgacataggccggtcctcg

SEQ ID NO: 248071 - DNA, 25 bp, Homo sapien
cagaacagaggccagttggacataa

SEQ ID NO: 248072 - DNA, 25 bp, Homo sapien
cagaggccagttggacataaaacgc

SEQ ID NO: 248073 - DNA, 25 bp, Homo sapien
gaacagaggccagttggacataaaa

SEQ ID NO: 248074 - DNA, 25 bp, Homo sapien
ggccagttggacataaaacgctttc

SEQ ID NO: 248075 - DNA, 25 bp, Homo sapien
aacagacgaatgatggaagggcaca

SEQ ID NO: 248076 - DNA, 25 bp, Homo sapien
tgaatgccggccaggagtgacatca

SEQ ID NO: 248077 - DNA, 25 bp, Homo sapien
tactggaacgcagcccctatgtggt

SEQ ID NO: 248078 - DNA, 25 bp, Homo sapien
caagaaggcgaagcccctgtgggat

SEQ ID NO: 248079 - DNA, 25 bp, Homo sapien
ttctgccctccttggaaatctggca

SEQ ID NO: 248080 - DNA, 25 bp, Homo sapien
ctttctgccctccttggaaatctgg

SEQ ID NO: 248081 - DNA, 25 bp, Homo sapien
ctgctttctgccctccttggaaatc

SEQ ID NO: 248082 - DNA, 25 bp, Homo sapien
tgccctccttggaaatctggcagct

SEQ ID NO: 248083 - DNA, 25 bp, Homo sapien
tgagtggttccggtgccacagggtg

SEQ ID NO: 248084 - DNA, 25 bp, Homo sapien
ccggaaagccagcttttctgtggct

SEQ ID NO: 248085 - DNA, 25 bp, Homo sapien
agtggttccggtgccacagggtgct

SEQ ID NO: 248086 - DNA, 25 bp, Homo sapien
gccacagggtgctccggaaagccag

SEQ ID NO: 248087 - DNA, 25 bp, Homo sapien
cagggactcgcagtttcagatcaaa

SEQ ID NO: 248088 - DNA, 25 bp, Homo sapien
gcaaacaggagtgtccagaggtccg

SEQ ID NO: 248089 - DNA, 25 bp, Homo sapien
tcacattcagcaggtacttccagcg

SEQ ID NO: 248090 - DNA, 25 bp, Homo sapien
gctccatgaatcagaagcgctgcct

SEQ ID NO: 248091 - DNA, 25 bp, Homo sapien
ctctgttcttggaagtaggggtgct

SEQ ID NO: 248092 - DNA, 25 bp, Homo sapien
cggcgattctctcatcgggatcata

SEQ ID NO: 248093 - DNA, 25 bp, Homo sapien
tgggcggcgattctctcatcgggat

SEQ ID NO: 248094 - DNA, 25 bp, Homo sapien
ttctctcatcgggatcataggccac

SEQ ID NO: 248095 - DNA, 25 bp, Homo sapien
ttgttagtagaggtattcctgatcc

SEQ ID NO: 248096 - DNA, 25 bp, Homo sapien
tggttgttagtagaggtattcctga

SEQ ID NO: 248097 - DNA, 25 bp, Homo sapien
attggttgttagtagaggtattcct

SEQ ID NO: 248098 - DNA, 25 bp, Homo sapien
gacaaattggttgttagtagaggta

SEQ ID NO: 248099 - DNA, 25 bp, Homo sapien
ggaaaatcaaaattcatagctctcg

SEQ ID NO: 248100 - DNA, 25 bp, Homo sapien
aaaggaaaatcaaaattcatagctc

SEQ ID NO: 248101 - DNA, 25 bp, Homo sapien
aggaaaatcaaaattcatagctctc

SEQ ID NO: 248102 - DNA, 25 bp, Homo sapien
aaaatcaaaattcatagctctcgac

SEQ ID NO: 248103 - DNA, 25 bp, Homo sapien
taataaacacaccactcgaggcagg

SEQ ID NO: 248104 - DNA, 25 bp, Homo sapien
ggtggtccactgtcacaactaaggg

SEQ ID NO: 248105 - DNA, 25 bp, Homo sapien
cagaatgaccctaagagtccgggaa

SEQ ID NO: 248106 - DNA, 25 bp, Homo sapien
gagatatccacggttcatcgaccat

SEQ ID NO: 248107 - DNA, 25 bp, Homo sapien
ttaaattactcagggaacacagcct

SEQ ID NO: 248108 - DNA, 25 bp, Homo sapien
gcagaaagccctcaccacctatgct

SEQ ID NO: 248109 - DNA, 25 bp, Homo sapien
gtttaaattactcagggaacacagc

SEQ ID NO: 248110 - DNA, 25 bp, Homo sapien
aagccctcaccacctatgctctgtg

SEQ ID NO: 248111 - DNA, 25 bp, Homo sapien
ctttctgtgatgctcaaggaagagc

SEQ ID NO: 248112 - DNA, 25 bp, Homo sapien
tctgtctgagcagccactcactggc

SEQ ID NO: 248113 - DNA, 25 bp, Homo sapien
tagtcagccaaaggagctcctgaga

SEQ ID NO: 248114 - DNA, 25 bp, Homo sapien
accacttaaagtgatgggctctgtc

SEQ ID NO: 248115 - DNA, 25 bp, Homo sapien
gaacttgaacccctgtagtcagcca

SEQ ID NO: 248116 - DNA, 25 bp, Homo sapien
tcttctgagcgggtgtgccgatgac

SEQ ID NO: 248117 - DNA, 25 bp, Homo sapien
tgtttgaacttggtgaggatcttct

SEQ ID NO: 248118 - DNA, 25 bp, Homo sapien
tctgagcgggtgtgccgatgacatc

SEQ ID NO: 248119 - DNA, 25 bp, Homo sapien
tgagatttggtccagttcatttact

SEQ ID NO: 248120 - DNA, 25 bp, Homo sapien
cttcttctccgggaagtggcatggg

SEQ ID NO: 248121 - DNA, 25 bp, Homo sapien
tcttctccgggaagtggcatgggcc

SEQ ID NO: 248122 - DNA, 25 bp, Homo sapien
ggcatgggccgaagggatggtccgt

SEQ ID NO: 248123 - DNA, 25 bp, Homo sapien
gatggtccgtgtccacgtcccattt

SEQ ID NO: 248124 - DNA, 25 bp, Homo sapien
catgatctctatattattttgtctt

SEQ ID NO: 248125 - DNA, 25 bp, Homo sapien
ttggcatgatctctatattattttg

SEQ ID NO: 248126 - DNA, 25 bp, Homo sapien
ctatattattttgtcttctaccctc

SEQ ID NO: 248127 - DNA, 25 bp, Homo sapien
tctctatattattttgtcttctacc

SEQ ID NO: 248128 - DNA, 25 bp, Homo sapien
gatgacctccatcggcaagatccta

SEQ ID NO: 248129 - DNA, 25 bp, Homo sapien
cagttccctgagaagagcgtacctg

SEQ ID NO: 248130 - DNA, 25 bp, Homo sapien
tacctgggcgtatcaacccacaggc

SEQ ID NO: 248131 - DNA, 25 bp, Homo sapien
ctgccagacctcctgtaatcatatg

SEQ ID NO: 248132 - DNA, 25 bp, Homo sapien
ttcctttgcccctgtagcctacctc

SEQ ID NO: 248133 - DNA, 25 bp, Homo sapien
tcttagggcaacagaaaggagaccc

SEQ ID NO: 248134 - DNA, 25 bp, Homo sapien
tctcacactctatactgccaaaaga

SEQ ID NO: 248135 - DNA, 25 bp, Homo sapien
gaggaatagccctcggtgtcttagg

SEQ ID NO: 248136 - DNA, 25 bp, Homo sapien
tactcattcttgcactgacgtccta

SEQ ID NO: 248137 - DNA, 25 bp, Homo sapien
cttcctactcattcttgcactgacg

SEQ ID NO: 248138 - DNA, 25 bp, Homo sapien
cactgacgtcctagatcacctgcag

SEQ ID NO: 248139 - DNA, 25 bp, Homo sapien
tcttgcactgacgtcctagatcacc

SEQ ID NO: 248140 - DNA, 25 bp, Homo sapien
aagatgtatatcacattcttcattc

SEQ ID NO: 248141 - DNA, 25 bp, Homo sapien
gatgtatatcacattcttcattccc

SEQ ID NO: 248142 - DNA, 25 bp, Homo sapien
agatgtatatcacattcttcattcc

SEQ ID NO: 248143 - DNA, 25 bp, Homo sapien
gccaaagtgaccctatcactaacca

SEQ ID NO: 248144 - DNA, 25 bp, Homo sapien
caaagtgaccctatcactaaccacc

SEQ ID NO: 248145 - DNA, 25 bp, Homo sapien
ccaaagtgaccctatcactaaccac

SEQ ID NO: 248146 - DNA, 25 bp, Homo sapien
gaaatcatccctagctttggtctcc

SEQ ID NO: 248147 - DNA, 25 bp, Homo sapien
gaaaaagctgcagtagtctcccaga

SEQ ID NO: 248148 - DNA, 25 bp, Homo sapien
tccaatcaatcagacaatggccctg

SEQ ID NO: 248149 - DNA, 25 bp, Homo sapien
catatcgaccccaatcatcaggaaa

SEQ ID NO: 248150 - DNA, 25 bp, Homo sapien
cttgctacccttcagtctccctgtt

SEQ ID NO: 248151 - DNA, 25 bp, Homo sapien
aatttcaaatcaggtaagcggtctt

SEQ ID NO: 248152 - DNA, 25 bp, Homo sapien
caggtaagcggtcttttcactctct

SEQ ID NO: 248153 - DNA, 25 bp, Homo sapien
tgctacccttcagtctccctgttct

SEQ ID NO: 248154 - DNA, 25 bp, Homo sapien
agacacattttatctgtggactcaa

SEQ ID NO: 248155 - DNA, 25 bp, Homo sapien
gagacacattttatctgtggactca

SEQ ID NO: 248156 - DNA, 25 bp, Homo sapien
cgataatggttctaaacagccagaa

SEQ ID NO: 248157 - DNA, 25 bp, Homo sapien
ctcgataatggttctaaacagccag

SEQ ID NO: 248158 - DNA, 25 bp, Homo sapien
aactcgataatggttctaaacagcc

SEQ ID NO: 248159 - DNA, 25 bp, Homo sapien
tcgataatggttctaaacagccaga

SEQ ID NO: 248160 - DNA, 25 bp, Homo sapien
aatgcaactcatcccaaatctttct

SEQ ID NO: 248161 - DNA, 25 bp, Homo sapien
ggatgatttttgtcgaaaaatgggc

SEQ ID NO: 248162 - DNA, 25 bp, Homo sapien
tgctcccaatgcaactcatcccaaa

SEQ ID NO: 248163 - DNA, 25 bp, Homo sapien
tttacacatcggtccctccctagtc

SEQ ID NO: 248164 - DNA, 25 bp, Homo sapien
tatagtgtaactccttccaattgga

SEQ ID NO: 248165 - DNA, 25 bp, Homo sapien
tccaattggaataccagccaaaagt

SEQ ID NO: 248166 - DNA, 25 bp, Homo sapien
cgttacccttacagcaggaatcaca

SEQ ID NO: 248167 - DNA, 25 bp, Homo sapien
tagccgtctgcctaatcgttaccct

SEQ ID NO: 248168 - DNA, 25 bp, Homo sapien
cactgccacctgcctggaggcccac

SEQ ID NO: 248169 - DNA, 25 bp, Homo sapien
tcactgccacctgcctggaggccca

SEQ ID NO: 248170 - DNA, 25 bp, Homo sapien
ctcactgccacctgcctggaggccc

SEQ ID NO: 248171 - DNA, 25 bp, Homo sapien
cattcacctcggagtgggaccggcc

SEQ ID NO: 248172 - DNA, 25 bp, Homo sapien
cctgtgcgcgtcttcaactcaacac

SEQ ID NO: 248173 - DNA, 25 bp, Homo sapien
aacaccattcacctcggagtgggac

SEQ ID NO: 248174 - DNA, 25 bp, Homo sapien
agctctccacccctgtgcgcgtctt

SEQ ID NO: 248175 - DNA, 25 bp, Homo sapien
taccagcgggtggagatgtattccg

SEQ ID NO: 248176 - DNA, 25 bp, Homo sapien
ttggaatagacactccggcaggagc

SEQ ID NO: 248177 - DNA, 25 bp, Homo sapien
ggcgatctcgtagaacacacagccg

SEQ ID NO: 248178 - DNA, 25 bp, Homo sapien
caggtccatcttgtacgtgtagaac

SEQ ID NO: 248179 - DNA, 25 bp, Homo sapien
gaacggccgtctgaatagggttcat

SEQ ID NO: 248180 - DNA, 25 bp, Homo sapien
gccacatttccctctagaaggtttg

SEQ ID NO: 248181 - DNA, 25 bp, Homo sapien
tcttccaggtgcagtcagttatgtt

SEQ ID NO: 248182 - DNA, 25 bp, Homo sapien
ttcatttttgtctgcggtgtgaaaa

SEQ ID NO: 248183 - DNA, 25 bp, Homo sapien
ctgtaacaaacaggctgtctagccg

SEQ ID NO: 248184 - DNA, 25 bp, Homo sapien
gccgcatggactgaaagttcctctg

SEQ ID NO: 248185 - DNA, 25 bp, Homo sapien
tcgggaaagattttctattcagctt

SEQ ID NO: 248186 - DNA, 25 bp, Homo sapien
tttattctgatacccagctttcatg

SEQ ID NO: 248187 - DNA, 25 bp, Homo sapien
tattagtatattttctggttttaca

SEQ ID NO: 248188 - DNA, 25 bp, Homo sapien
tggttttacatctctgtgaaatatt

SEQ ID NO: 248189 - DNA, 25 bp, Homo sapien
ttctggttttacatctctgtgaaat

SEQ ID NO: 248190 - DNA, 25 bp, Homo sapien
gttttacatctctgtgaaatattcc

SEQ ID NO: 248191 - DNA, 25 bp, Homo sapien
cagagctgtcaaatctccgagagca

SEQ ID NO: 248192 - DNA, 25 bp, Homo sapien
caaattcttgaatctgaatgttaac

SEQ ID NO: 248193 - DNA, 25 bp, Homo sapien
agagctgtcaaatctccgagagcat

SEQ ID NO: 248194 - DNA, 25 bp, Homo sapien
agctgtcaaatctccgagagcatac

SEQ ID NO: 248195 - DNA, 25 bp, Homo sapien
cataactggtacatatagtgcataa

SEQ ID NO: 248196 - DNA, 25 bp, Homo sapien
gtgaatatgatccagggacttacat

SEQ ID NO: 248197 - DNA, 25 bp, Homo sapien
tatgatccagggacttacataactg

SEQ ID NO: 248198 - DNA, 25 bp, Homo sapien
cagggacttacataactggtacata

SEQ ID NO: 248199 - DNA, 25 bp, Homo sapien
caaaagtaagacctttatcagcttt

SEQ ID NO: 248200 - DNA, 25 bp, Homo sapien
gaatcaaaagtaagacctttatcag

SEQ ID NO: 248201 - DNA, 25 bp, Homo sapien
gctttcccaagctgataattctgga

SEQ ID NO: 248202 - DNA, 25 bp, Homo sapien
ccaagctgataattctggaatctta

SEQ ID NO: 248203 - DNA, 25 bp, Homo sapien
gccttattttcccagcccacaccat

SEQ ID NO: 248204 - DNA, 25 bp, Homo sapien
ctgtccaattctaccactcctccag

SEQ ID NO: 248205 - DNA, 25 bp, Homo sapien
gtccaattctaccactcctccagga

SEQ ID NO: 248206 - DNA, 25 bp, Homo sapien
tccaggaaagccttattttcccagc

SEQ ID NO: 248207 - DNA, 25 bp, Homo sapien
tagtgcaagagaaccagattttctg

SEQ ID NO: 248208 - DNA, 25 bp, Homo sapien
taagttcacatattagtgcaagaga

SEQ ID NO: 248209 - DNA, 25 bp, Homo sapien
attagtgcaagagaaccagattttc

SEQ ID NO: 248210 - DNA, 25 bp, Homo sapien
tattcatgtccataagttcacatat

SEQ ID NO: 248211 - DNA, 25 bp, Homo sapien
gagtcctgagcaagagcctgtatca

SEQ ID NO: 248212 - DNA, 25 bp, Homo sapien
gctggctgagccaccaacttctgag

SEQ ID NO: 248213 - DNA, 25 bp, Homo sapien
gacttctaagaacgctacaggacag

SEQ ID NO: 248214 - DNA, 25 bp, Homo sapien
tacaaactgcactctctggacctgg

SEQ ID NO: 248215 - DNA, 25 bp, Homo sapien
tttgggtgcggattcaggcgcctca

SEQ ID NO: 248216 - DNA, 25 bp, Homo sapien
cagtgcttggatctctcgtaggttg

SEQ ID NO: 248217 - DNA, 25 bp, Homo sapien
aaccacttcatgcaacataagaatg

SEQ ID NO: 248218 - DNA, 25 bp, Homo sapien
tctcgtaggttgttgacttgctcaa

SEQ ID NO: 248219 - DNA, 25 bp, Homo sapien
ctatcgtgtaggtaaaaatggatag

SEQ ID NO: 248220 - DNA, 25 bp, Homo sapien
atcgtgtaggtaaaaatggatagct

SEQ ID NO: 248221 - DNA, 25 bp, Homo sapien
tcgtgtaggtaaaaatggatagctc

SEQ ID NO: 248222 - DNA, 25 bp, Homo sapien
tatcgtgtaggtaaaaatggatagc

SEQ ID NO: 248223 - DNA, 25 bp, Homo sapien
ggtaagtctcaatacatttcaagac

SEQ ID NO: 248224 - DNA, 25 bp, Homo sapien
tgtgctggaccataaggtaagtctc

SEQ ID NO: 248225 - DNA, 25 bp, Homo sapien
ttacacaacatgttctcagaccaca

SEQ ID NO: 248226 - DNA, 25 bp, Homo sapien
tcaagactgaaaactttacacaaca

SEQ ID NO: 248227 - DNA, 25 bp, Homo sapien
gacccagtgattctgtttctaggta

SEQ ID NO: 248228 - DNA, 25 bp, Homo sapien
cctttgacccagtgattctgtttct

SEQ ID NO: 248229 - DNA, 25 bp, Homo sapien
tgacccagtgattctgtttctaggt

SEQ ID NO: 248230 - DNA, 25 bp, Homo sapien
tttgacccagtgattctgtttctag

SEQ ID NO: 248231 - DNA, 25 bp, Homo sapien
agattgtaatgaatgttgctcagca

SEQ ID NO: 248232 - DNA, 25 bp, Homo sapien
gattgtaatgaatgttgctcagcat

SEQ ID NO: 248233 - DNA, 25 bp, Homo sapien
tgtaatgaatgttgctcagcattaa

SEQ ID NO: 248234 - DNA, 25 bp, Homo sapien
taatgaatgttgctcagcattaaag

SEQ ID NO: 248235 - DNA, 25 bp, Homo sapien
ggtgtgacttgagaaaaaccatgta

SEQ ID NO: 248236 - DNA, 25 bp, Homo sapien
taccacatgtagacctgacgttggc

SEQ ID NO: 248237 - DNA, 25 bp, Homo sapien
tcaccagctcaggacctatacagac

SEQ ID NO: 248238 - DNA, 25 bp, Homo sapien
tttgaggactgcttagaggtgtgac

SEQ ID NO: 248239 - DNA, 25 bp, Homo sapien
aggttgggtagcaacgggccaggtg

SEQ ID NO: 248240 - DNA, 25 bp, Homo sapien
ccaggtggggaacttgatctctccg

SEQ ID NO: 248241 - DNA, 25 bp, Homo sapien
gggaacttgatctctccgaatttca

SEQ ID NO: 248242 - DNA, 25 bp, Homo sapien
agctccacgacgtgtaggttgggta

SEQ ID NO: 248243 - DNA, 25 bp, Homo sapien
taacaatggatcttcctcccagggc

SEQ ID NO: 248244 - DNA, 25 bp, Homo sapien
caagttgctttattacggtgtgcca

SEQ ID NO: 248245 - DNA, 25 bp, Homo sapien
tagtgaacaactgcggtaatcttac

SEQ ID NO: 248246 - DNA, 25 bp, Homo sapien
tgttcatgacaccagatatgtagtg

SEQ ID NO: 248247 - DNA, 25 bp, Homo sapien
tttggtcccaagtgcatctctgtag

SEQ ID NO: 248248 - DNA, 25 bp, Homo sapien
taagcctggatatgagtaaactcca

SEQ ID NO: 248249 - DNA, 25 bp, Homo sapien
aaacttggatctgtgtttggtccca

SEQ ID NO: 248250 - DNA, 25 bp, Homo sapien
tacagactgtttaaggtgagacaca

SEQ ID NO: 248251 - DNA, 25 bp, Homo sapien
tttcaaagcgctgcttcatttgttt

SEQ ID NO: 248252 - DNA, 25 bp, Homo sapien
ttcaaagcgctgcttcatttgttta

SEQ ID NO: 248253 - DNA, 25 bp, Homo sapien
ctttcaaagcgctgcttcatttgtt

SEQ ID NO: 248254 - DNA, 25 bp, Homo sapien
cgttccctctcctattttgccaatt

SEQ ID NO: 248255 - DNA, 25 bp, Homo sapien
acgttccctctcctattttgccaat

SEQ ID NO: 248256 - DNA, 25 bp, Homo sapien
gccagtgaggagaggctcagctacc

SEQ ID NO: 248257 - DNA, 25 bp, Homo sapien
ggacccagtgtccgctgagcctgct

SEQ ID NO: 248258 - DNA, 25 bp, Homo sapien
atgcggaagccggtgacaacccctt

SEQ ID NO: 248259 - DNA, 25 bp, Homo sapien
gaagccggtgacaaccccttgccga

SEQ ID NO: 248260 - DNA, 25 bp, Homo sapien
gcggaagccggtgacaaccccttgc

SEQ ID NO: 248261 - DNA, 25 bp, Homo sapien
ggatgcggaagccggtgacaacccc

SEQ ID NO: 248262 - DNA, 25 bp, Homo sapien
gggtcccgcactaggatctccgtgg

SEQ ID NO: 248263 - DNA, 25 bp, Homo sapien
tctccgtggtggtccctcgaaggag

SEQ ID NO: 248264 - DNA, 25 bp, Homo sapien
tgctttccacttccctgaggcgggg

SEQ ID NO: 248265 - DNA, 25 bp, Homo sapien
cgcactaggatctccgtggtggtcc

SEQ ID NO: 248266 - DNA, 25 bp, Homo sapien
aaccgtcaggccctgaacgccatga

SEQ ID NO: 248267 - DNA, 25 bp, Homo sapien
gccgccatgttgtgtccctgtcacc

SEQ ID NO: 248268 - DNA, 25 bp, Homo sapien
ccctgtcaccctagcaaccgtcagg

SEQ ID NO: 248269 - DNA, 25 bp, Homo sapien
ctgaacgccatgagctgtcgcctgc

SEQ ID NO: 248270 - DNA, 25 bp, Homo sapien
ttcgagtccccgcctcggccgccat

SEQ ID NO: 248271 - DNA, 25 bp, Homo sapien
gttcgagtccccgcctcggccgcca

SEQ ID NO: 248272 - DNA, 25 bp, Homo sapien
ttctacgttattattcctgttttca

SEQ ID NO: 248273 - DNA, 25 bp, Homo sapien
caccgggcacgcctggcctttattt

SEQ ID NO: 248274 - DNA, 25 bp, Homo sapien
gcctcagccttcaggtgtgcaccat

SEQ ID NO: 248275 - DNA, 25 bp, Homo sapien
gccaccgggcacgcctggcctttat

SEQ ID NO: 248276 - DNA, 25 bp, Homo sapien
tttctgagctgatgaaactgtgttg

SEQ ID NO: 248277 - DNA, 25 bp, Homo sapien
ttctgagctgatgaaactgtgttgg

SEQ ID NO: 248278 - DNA, 25 bp, Homo sapien
aatttcgcgaatattttgtatccac

SEQ ID NO: 248279 - DNA, 25 bp, Homo sapien
tggttacacaatttcgcgaatattt

SEQ ID NO: 248280 - DNA, 25 bp, Homo sapien
gcgtctggccttctaagcactgatc

SEQ ID NO: 248281 - DNA, 25 bp, Homo sapien
cctctcactttattgcttccctggg

SEQ ID NO: 248282 - DNA, 25 bp, Homo sapien
cccaggagcgtagtggctcaatcat

SEQ ID NO: 248283 - DNA, 25 bp, Homo sapien
gtttctaggacttcctcagcttccc

SEQ ID NO: 248284 - DNA, 25 bp, Homo sapien
ccaggtgactgtgcacggtgaatta

SEQ ID NO: 248285 - DNA, 25 bp, Homo sapien
cttctgttcacaccaggaagaggag

SEQ ID NO: 248286 - DNA, 25 bp, Homo sapien
agccctgtccaacgataccactgaa

SEQ ID NO: 248287 - DNA, 25 bp, Homo sapien
gcacctcagccgagacatggatggg

SEQ ID NO: 248288 - DNA, 25 bp, Homo sapien
gatgggcccgctagaaggagttcct

SEQ ID NO: 248289 - DNA, 25 bp, Homo sapien
tgagtgggccatgacacagtacacg

SEQ ID NO: 248290 - DNA, 25 bp, Homo sapien
caacgacggtttctggtggcaatgg

SEQ ID NO: 248291 - DNA, 25 bp, Homo sapien
tctgaagaaagccatacaacgacgg

SEQ ID NO: 248292 - DNA, 25 bp, Homo sapien
tgccatcacacctggatcattttgt

SEQ ID NO: 248293 - DNA, 25 bp, Homo sapien
ccactgcactgggcctgattgtttt

SEQ ID NO: 248294 - DNA, 25 bp, Homo sapien
ctgtgcccggccccggcctgatttt

SEQ ID NO: 248295 - DNA, 25 bp, Homo sapien
actgcactgggcctgattgtttttt

SEQ ID NO: 248296 - DNA, 25 bp, Homo sapien
gaagggccatttgtccacatgtgga

SEQ ID NO: 248297 - DNA, 25 bp, Homo sapien
gaagcccagttctttgatgtcccac

SEQ ID NO: 248298 - DNA, 25 bp, Homo sapien
tgtatcctgtagactcaaggccgct

SEQ ID NO: 248299 - DNA, 25 bp, Homo sapien
tgatctcaaagccacggtcggtagg

SEQ ID NO: 248300 - DNA, 25 bp, Homo sapien
gaagagacattagagtacagaccgg

SEQ ID NO: 248301 - DNA, 25 bp, Homo sapien
gtggatctttaatgccctctgaggc

SEQ ID NO: 248302 - DNA, 25 bp, Homo sapien
gcttcaatgaggacacgtggtttca

SEQ ID NO: 248303 - DNA, 25 bp, Homo sapien
aaggacacccaaatgactcccaggg

SEQ ID NO: 248304 - DNA, 25 bp, Homo sapien
agatcttaataaatatagcaaaggc

SEQ ID NO: 248305 - DNA, 25 bp, Homo sapien
cctaagaaatgttgcctttaaatgc

SEQ ID NO: 248306 - DNA, 25 bp, Homo sapien
gaaagagaaatcctaagaaatgttg

SEQ ID NO: 248307 - DNA, 25 bp, Homo sapien
cttaataaatatagcaaaggcagag

SEQ ID NO: 248308 - DNA, 25 bp, Homo sapien
ggcaaacgcagatgtagaaaccatg

SEQ ID NO: 248309 - DNA, 25 bp, Homo sapien
catgtccccagtatgcaaacagcgg

SEQ ID NO: 248310 - DNA, 25 bp, Homo sapien
tagcttttggccagtctcttcggtc

SEQ ID NO: 248311 - DNA, 25 bp, Homo sapien
aggagtttgacactacttgggccac

SEQ ID NO: 248312 - DNA, 25 bp, Homo sapien
aatttatagaaactagatcactcac

SEQ ID NO: 248313 - DNA, 25 bp, Homo sapien
caaacataatgtataaagcatgcct

SEQ ID NO: 248314 - DNA, 25 bp, Homo sapien
aaccagggattttctacacaaacat

SEQ ID NO: 248315 - DNA, 25 bp, Homo sapien
cataatgtataaagcatgcctaatt

SEQ ID NO: 248316 - DNA, 25 bp, Homo sapien
gctggccgcgggttgtgggcatgag

SEQ ID NO: 248317 - DNA, 25 bp, Homo sapien
gggtctgatccaggcctgcggcact

SEQ ID NO: 248318 - DNA, 25 bp, Homo sapien
gcactgggtcctaggcagactgtct

SEQ ID NO: 248319 - DNA, 25 bp, Homo sapien
gaagaccccaaggtctgatcctggg

SEQ ID NO: 248320 - DNA, 25 bp, Homo sapien
ccttggccaccgtgcgcttcaggag

SEQ ID NO: 248321 - DNA, 25 bp, Homo sapien
ggatccccggtgtgggcaagctcct

SEQ ID NO: 248322 - DNA, 25 bp, Homo sapien
gcctgctgtcgctctccacataggg

SEQ ID NO: 248323 - DNA, 25 bp, Homo sapien
tccaagagcttatgcgaaacctcat

SEQ ID NO: 248324 - DNA, 25 bp, Homo sapien
agaactacattttaacagctcttga

SEQ ID NO: 248325 - DNA, 25 bp, Homo sapien
cagtgattcaagaacatagtgtcga

SEQ ID NO: 248326 - DNA, 25 bp, Homo sapien
aacatagtgtcgacttgggaagaac

SEQ ID NO: 248327 - DNA, 25 bp, Homo sapien
cttaatggcagtgattcaagaacat

SEQ ID NO: 248328 - DNA, 25 bp, Homo sapien
aaatgggttgtaggccacgtgtgga

SEQ ID NO: 248329 - DNA, 25 bp, Homo sapien
ttcccttggtagttgaagacagctt

SEQ ID NO: 248330 - DNA, 25 bp, Homo sapien
ctccccataatggtagttttctagt

SEQ ID NO: 248331 - DNA, 25 bp, Homo sapien
ggtagttgaagacagcttttccatt

SEQ ID NO: 248332 - DNA, 25 bp, Homo sapien
gtgccatttcactaggatttccaaa

SEQ ID NO: 248333 - DNA, 25 bp, Homo sapien
cagatttccagtcctagagcaagaa

SEQ ID NO: 248334 - DNA, 25 bp, Homo sapien
caagaaaggtttccgagtgccattt

SEQ ID NO: 248335 - DNA, 25 bp, Homo sapien
aaggtggacagttgctatgatttca

SEQ ID NO: 248336 - DNA, 25 bp, Homo sapien
tgatattttatttggcccaacccca

SEQ ID NO: 248337 - DNA, 25 bp, Homo sapien
tggcaagcactaaattcagctaacg

SEQ ID NO: 248338 - DNA, 25 bp, Homo sapien
cgtttcacagctgggaaattgctta

SEQ ID NO: 248339 - DNA, 25 bp, Homo sapien
caattacattggaagtggcaagcac

SEQ ID NO: 248340 - DNA, 25 bp, Homo sapien
taggaagaacggtgcatgaaacccc

SEQ ID NO: 248341 - DNA, 25 bp, Homo sapien
gaattcaagtcacataggcacgtgc

SEQ ID NO: 248342 - DNA, 25 bp, Homo sapien
tgaacagtgcataaacagcaggccc

SEQ ID NO: 248343 - DNA, 25 bp, Homo sapien
gaaatgttagcccagcttaggaaga

SEQ ID NO: 248344 - DNA, 25 bp, Homo sapien
ttcattttccttcgaggctgggctg

SEQ ID NO: 248345 - DNA, 25 bp, Homo sapien
tcttcattttccttcgaggctgggc

SEQ ID NO: 248346 - DNA, 25 bp, Homo sapien
tatattccagacacaccttttcttc

SEQ ID NO: 248347 - DNA, 25 bp, Homo sapien
ctccagttcctcgttatattccaga

SEQ ID NO: 248348 - DNA, 25 bp, Homo sapien
aaggcacaggtcatacatgagcatg

SEQ ID NO: 248349 - DNA, 25 bp, Homo sapien
tgaggaaggcacaggtcatacatga

SEQ ID NO: 248350 - DNA, 25 bp, Homo sapien
gccaacatcatagcaaagtttgagg

SEQ ID NO: 248351 - DNA, 25 bp, Homo sapien
ggaaggcacaggtcatacatgagca

SEQ ID NO: 248352 - DNA, 25 bp, Homo sapien
gccaatcagccgcattgtccttaat

SEQ ID NO: 248353 - DNA, 25 bp, Homo sapien
tcaggattaaattgtgccaatcagc

SEQ ID NO: 248354 - DNA, 25 bp, Homo sapien
acctgcatcattgagggtttcccac

SEQ ID NO: 248355 - DNA, 25 bp, Homo sapien
ttcaagttggcaatattatttgcag

SEQ ID NO: 248356 - DNA, 25 bp, Homo sapien
tttctgggcgttacagttccaagag

SEQ ID NO: 248357 - DNA, 25 bp, Homo sapien
ttttctgggcgttacagttccaaga

SEQ ID NO: 248358 - DNA, 25 bp, Homo sapien
ttctgggcgttacagttccaagagt

SEQ ID NO: 248359 - DNA, 25 bp, Homo sapien
tatcgtcccgttcatctgtcactgc

SEQ ID NO: 248360 - DNA, 25 bp, Homo sapien
ggatgtcggatctgctgacactcat

SEQ ID NO: 248361 - DNA, 25 bp, Homo sapien
catgtgaaaaaacggaggctcggca

SEQ ID NO: 248362 - DNA, 25 bp, Homo sapien
acactcatttgcgtatatcgtcccg

SEQ ID NO: 248363 - DNA, 25 bp, Homo sapien
cacagatatccgtagaaggagacgc

SEQ ID NO: 248364 - DNA, 25 bp, Homo sapien
gtccacagatatccgtagaaggaga

SEQ ID NO: 248365 - DNA, 25 bp, Homo sapien
agatatccgtagaaggagacgcgaa

SEQ ID NO: 248366 - DNA, 25 bp, Homo sapien
cagatatccgtagaaggagacgcga

SEQ ID NO: 248367 - DNA, 25 bp, Homo sapien
tgccacttgtggctctgccgctcta

SEQ ID NO: 248368 - DNA, 25 bp, Homo sapien
ggaaacgcatttgcgtcacgtccgc

SEQ ID NO: 248369 - DNA, 25 bp, Homo sapien
gctctagcccccggcggagccagct

SEQ ID NO: 248370 - DNA, 25 bp, Homo sapien
agctgctgctcttcggtgctggccc

SEQ ID NO: 248371 - DNA, 25 bp, Homo sapien
ttttcttttgctctacacattcaga

SEQ ID NO: 248372 - DNA, 25 bp, Homo sapien
tatagaaatgatcccagaaagcaca

SEQ ID NO: 248373 - DNA, 25 bp, Homo sapien
aaatgatcccagaaagcacagcctt

SEQ ID NO: 248374 - DNA, 25 bp, Homo sapien
tagaaatgatcccagaaagcacagc

SEQ ID NO: 248375 - DNA, 25 bp, Homo sapien
gccacagtttctgagacgaggctca

SEQ ID NO: 248376 - DNA, 25 bp, Homo sapien
ccctgtcacagagattcaacgccat

SEQ ID NO: 248377 - DNA, 25 bp, Homo sapien
ggatcaccagtggtaaaaccagact

SEQ ID NO: 248378 - DNA, 25 bp, Homo sapien
gatgctcagagcgtgtccacgtgca

SEQ ID NO: 248379 - DNA, 25 bp, Homo sapien
tgaagctgtttttggagttaactga

SEQ ID NO: 248380 - DNA, 25 bp, Homo sapien
aaggaaatgattgaagctgtttttg

SEQ ID NO: 248381 - DNA, 25 bp, Homo sapien
tgattgaagctgtttttggagttaa

SEQ ID NO: 248382 - DNA, 25 bp, Homo sapien
aaaaggaaatgattgaagctgtttt

SEQ ID NO: 248383 - DNA, 25 bp, Homo sapien
gatatagcagtctaggttggaaacc

SEQ ID NO: 248384 - DNA, 25 bp, Homo sapien
tcacccttgaccttgctggatatag

SEQ ID NO: 248385 - DNA, 25 bp, Homo sapien
ccaggattgctactgagaagccaga

SEQ ID NO: 248386 - DNA, 25 bp, Homo sapien
gagtttatcttccagtcggttccca

SEQ ID NO: 248387 - DNA, 25 bp, Homo sapien
caggtggtccgcctgcctcagcctc

SEQ ID NO: 248388 - DNA, 25 bp, Homo sapien
gagacgaggtctctccatattggtc

SEQ ID NO: 248389 - DNA, 25 bp, Homo sapien
gatacgtagtttcactctttttgcc

SEQ ID NO: 248390 - DNA, 25 bp, Homo sapien
agagacgaggtctctccatattggt

SEQ ID NO: 248391 - DNA, 25 bp, Homo sapien
ttcccgggtttgtcctgagcctgca

SEQ ID NO: 248392 - DNA, 25 bp, Homo sapien
cacagacttgactggcagggcggtc

SEQ ID NO: 248393 - DNA, 25 bp, Homo sapien
caaatggaacctggatgtgtgcacg

SEQ ID NO: 248394 - DNA, 25 bp, Homo sapien
taactaatgctgctggcggacatcc

SEQ ID NO: 248395 - DNA, 25 bp, Homo sapien
cagccacataggtggaggttttcca

SEQ ID NO: 248396 - DNA, 25 bp, Homo sapien
cccgcgtctaggtgatgcttttaaa

SEQ ID NO: 248397 - DNA, 25 bp, Homo sapien
tgaggtcaagatgccgaaatcccag

SEQ ID NO: 248398 - DNA, 25 bp, Homo sapien
ggactgtagtgcaattaaacccgcg

SEQ ID NO: 248399 - DNA, 25 bp, Homo sapien
tcgagtcgagtgtaagggcccttca

SEQ ID NO: 248400 - DNA, 25 bp, Homo sapien
tcaagaacaagtcctaggtcaaggg

SEQ ID NO: 248401 - DNA, 25 bp, Homo sapien
caataggaggagcacttcgagtcga

SEQ ID NO: 248402 - DNA, 25 bp, Homo sapien
gaagttcccgggcatggtcatgaaa

SEQ ID NO: 248403 - DNA, 25 bp, Homo sapien
tgacatcaggagctaatggcccagg

SEQ ID NO: 248404 - DNA, 25 bp, Homo sapien
gagcgattgcctttgggaagccacc

SEQ ID NO: 248405 - DNA, 25 bp, Homo sapien
gactgataagctaaacccagggcct

SEQ ID NO: 248406 - DNA, 25 bp, Homo sapien
ggtcctgaaccacagatccctggag

SEQ ID NO: 248407 - DNA, 25 bp, Homo sapien
ggtgaattcgcaaacaagtctccat

SEQ ID NO: 248408 - DNA, 25 bp, Homo sapien
ccactccgggcttggacagagggca

SEQ ID NO: 248409 - DNA, 25 bp, Homo sapien
ggttgaatttgacggcccagcagaa

SEQ ID NO: 248410 - DNA, 25 bp, Homo sapien
cctgcccacgttggtgcgggttgaa

SEQ ID NO: 248411 - DNA, 25 bp, Homo sapien
tgtccgaggctctagatcaaggtgg

SEQ ID NO: 248412 - DNA, 25 bp, Homo sapien
cgtgagaaccctacgctgcagagct

SEQ ID NO: 248413 - DNA, 25 bp, Homo sapien
tataaagtgccggtacaacgctctg

SEQ ID NO: 248414 - DNA, 25 bp, Homo sapien
ccagtgcatgcgacagatgaggcag

SEQ ID NO: 248415 - DNA, 25 bp, Homo sapien
ttgccagtgaggtccaacggctgca

SEQ ID NO: 248416 - DNA, 25 bp, Homo sapien
aatgcccacgcggttgtagcgcact

SEQ ID NO: 248417 - DNA, 25 bp, Homo sapien
gccagcaggtaatgcgcgtacgctt

SEQ ID NO: 248418 - DNA, 25 bp, Homo sapien
tgcacgagcgcgtagagcagcgcct

SEQ ID NO: 248419 - DNA, 25 bp, Homo sapien
agaaggcgaacgacgacttgcggca

SEQ ID NO: 248420 - DNA, 25 bp, Homo sapien
ggcgaacgacgacttgcggcactgc

SEQ ID NO: 248421 - DNA, 25 bp, Homo sapien
cgaacgacgacttgcggcactgctt

SEQ ID NO: 248422 - DNA, 25 bp, Homo sapien
tggtagaaggcgaacgacgacttgc

SEQ ID NO: 248423 - DNA, 25 bp, Homo sapien
ccaggccgccgcgcgtcccacggca

SEQ ID NO: 248424 - DNA, 25 bp, Homo sapien
gcgccgcgcccgaggcctcgggccc

SEQ ID NO: 248425 - DNA, 25 bp, Homo sapien
caggccgccgcgcgtcccacggcat

SEQ ID NO: 248426 - DNA, 25 bp, Homo sapien
ctgcgctcgcgagcgcgccgcgccc

SEQ ID NO: 248427 - DNA, 25 bp, Homo sapien
gcctcaaggcatggatcccgcgaag

SEQ ID NO: 248428 - DNA, 25 bp, Homo sapien
tcaaggcatggatcccgcgaaggca

SEQ ID NO: 248429 - DNA, 25 bp, Homo sapien
tgggcctcaaggcatggatcccgcg

SEQ ID NO: 248430 - DNA, 25 bp, Homo sapien
gggcctcaaggcatggatcccgcga

SEQ ID NO: 248431 - DNA, 25 bp, Homo sapien
ctgcggggaaaggaagaggccacgg

SEQ ID NO: 248432 - DNA, 25 bp, Homo sapien
agctccatctctccgacgcccagaa

SEQ ID NO: 248433 - DNA, 25 bp, Homo sapien
tccatccttgatctagctgtacctg

SEQ ID NO: 248434 - DNA, 25 bp, Homo sapien
gaaactgacttgctctctggcacct

SEQ ID NO: 248435 - DNA, 25 bp, Homo sapien
tcccacctaagccaggttcatacga

SEQ ID NO: 248436 - DNA, 25 bp, Homo sapien
tgcaccgcgatcacctagttccggg

SEQ ID NO: 248437 - DNA, 25 bp, Homo sapien
gatgtgggtatatcacagtccctgg

SEQ ID NO: 248438 - DNA, 25 bp, Homo sapien
agttccggggatgtgggtatatcac

SEQ ID NO: 248439 - DNA, 25 bp, Homo sapien
cagtccctggccgagcctcagcttt

SEQ ID NO: 248440 - DNA, 25 bp, Homo sapien
ggtggacgacggctgtgcgggcggg

SEQ ID NO: 248441 - DNA, 25 bp, Homo sapien
ggaggggtggacgacggctgtgcgg

SEQ ID NO: 248442 - DNA, 25 bp, Homo sapien
tggcaccagccctctatccaaacat

SEQ ID NO: 248443 - DNA, 25 bp, Homo sapien
ccagccctctatccaaacatgtttg

SEQ ID NO: 248444 - DNA, 25 bp, Homo sapien
agaccggtgtgcaccgcactgcaca

SEQ ID NO: 248445 - DNA, 25 bp, Homo sapien
aacaacctggagaccggtgtgcacc

SEQ ID NO: 248446 - DNA, 25 bp, Homo sapien
tgggaggagataggagggtgaaaac

SEQ ID NO: 248447 - DNA, 25 bp, Homo sapien
ggtgtgcaccgcactgcacagtctg

SEQ ID NO: 248448 - DNA, 25 bp, Homo sapien
tgaagcgggtactgccatcccactt

SEQ ID NO: 248449 - DNA, 25 bp, Homo sapien
tgatctccccgactactagatgaag

SEQ ID NO: 248450 - DNA, 25 bp, Homo sapien
cagcagggcacaagcttctccaatt

SEQ ID NO: 248451 - DNA, 25 bp, Homo sapien
tccaaggtcagcaagccacggcaga

SEQ ID NO: 248452 - DNA, 25 bp, Homo sapien
actcaggtcccctgcgtctcagttt

SEQ ID NO: 248453 - DNA, 25 bp, Homo sapien
aactcaggtcccctgcgtctcagtt

SEQ ID NO: 248454 - DNA, 25 bp, Homo sapien
cgcggtgcgggtaggctgtggcccg

SEQ ID NO: 248455 - DNA, 25 bp, Homo sapien
cactatcactggcagtaactgagtt

SEQ ID NO: 248456 - DNA, 25 bp, Homo sapien
tcactggcagtaactgagttaaaga

SEQ ID NO: 248457 - DNA, 25 bp, Homo sapien
tgagttaaagagagcggcgcggtgc

SEQ ID NO: 248458 - DNA, 25 bp, Homo sapien
ggacgcacgggagggagccaccgcc

SEQ ID NO: 248459 - DNA, 25 bp, Homo sapien
cgcagggcggcggtgccgtcgccgg

SEQ ID NO: 248460 - DNA, 25 bp, Homo sapien
caaaggtcccacgacggacgcacgg

SEQ ID NO: 248461 - DNA, 25 bp, Homo sapien
gggcgagcgggcaaaggtcccacga

SEQ ID NO: 248462 - DNA, 25 bp, Homo sapien
gaggccacgtgtcccaggtgcccca

SEQ ID NO: 248463 - DNA, 25 bp, Homo sapien
ctgaggccacgtgtcccaggtgccc

SEQ ID NO: 248464 - DNA, 25 bp, Homo sapien
gccctgaggccacgtgtcccaggtg

SEQ ID NO: 248465 - DNA, 25 bp, Homo sapien
cagccctgaggccacgtgtcccagg

SEQ ID NO: 248466 - DNA, 25 bp, Homo sapien
tctctcaagtagctcgaactcctga

SEQ ID NO: 248467 - DNA, 25 bp, Homo sapien
ctctcaagtagctcgaactcctgac

SEQ ID NO: 248468 - DNA, 25 bp, Homo sapien
gtctctcaagtagctcgaactcctg

SEQ ID NO: 248469 - DNA, 25 bp, Homo sapien
gccaaagttagtgcggacaccctct

SEQ ID NO: 248470 - DNA, 25 bp, Homo sapien
aaagttagtgcggacaccctctcgg

SEQ ID NO: 248471 - DNA, 25 bp, Homo sapien
gttagtgcggacaccctctcggcat

SEQ ID NO: 248472 - DNA, 25 bp, Homo sapien
tgccaaagttagtgcggacaccctc

SEQ ID NO: 248473 - DNA, 25 bp, Homo sapien
gaagaaaatgctggattttggttaa

SEQ ID NO: 248474 - DNA, 25 bp, Homo sapien
tgctggattttggttaaaggttgat

SEQ ID NO: 248475 - DNA, 25 bp, Homo sapien
ggttcagaactcttaggatggctaa

SEQ ID NO: 248476 - DNA, 25 bp, Homo sapien
tgctattttgagatatttccagtga

SEQ ID NO: 248477 - DNA, 25 bp, Homo sapien
agtggcacaatcagctcacacagcc

SEQ ID NO: 248478 - DNA, 25 bp, Homo sapien
ttgaaatggagtctttctatgttgc

SEQ ID NO: 248479 - DNA, 25 bp, Homo sapien
gcacaatcagctcacacagcctctg

SEQ ID NO: 248480 - DNA, 25 bp, Homo sapien
gtggcacaatcagctcacacagcct

SEQ ID NO: 248481 - DNA, 25 bp, Homo sapien
caaatggttggagctaagactatct

SEQ ID NO: 248482 - DNA, 25 bp, Homo sapien
gtatgccagcttgaccctatttagg

SEQ ID NO: 248483 - DNA, 25 bp, Homo sapien
tctgtcatgccttacaaagagtgaa

SEQ ID NO: 248484 - DNA, 25 bp, Homo sapien
ttttacttatttgcggtatgccagc

SEQ ID NO: 248485 - DNA, 25 bp, Homo sapien
tagagtagtggagttactcgatcct

SEQ ID NO: 248486 - DNA, 25 bp, Homo sapien
gagtagtggagttactcgatccttc

SEQ ID NO: 248487 - DNA, 25 bp, Homo sapien
agtagtggagttactcgatccttcc

SEQ ID NO: 248488 - DNA, 25 bp, Homo sapien
ttagagtagtggagttactcgatcc

SEQ ID NO: 248489 - DNA, 25 bp, Homo sapien
gcaagctccgcttcctggattcact

SEQ ID NO: 248490 - DNA, 25 bp, Homo sapien
caagctccgcttcctggattcactc

SEQ ID NO: 248491 - DNA, 25 bp, Homo sapien
aagctccgcttcctggattcactcc

SEQ ID NO: 248492 - DNA, 25 bp, Homo sapien
gctccgcttcctggattcactccat

SEQ ID NO: 248493 - DNA, 25 bp, Homo sapien
aacacagtgaccctaatccttccga

SEQ ID NO: 248494 - DNA, 25 bp, Homo sapien
cctaatgatattcttcccagagccg

SEQ ID NO: 248495 - DNA, 25 bp, Homo sapien
tgacctctattcctgggatcctgtt

SEQ ID NO: 248496 - DNA, 25 bp, Homo sapien
gaatgactgcataggttgaacacaa

SEQ ID NO: 248497 - DNA, 25 bp, Homo sapien
tgccaaactgtagtatgaacataaa

SEQ ID NO: 248498 - DNA, 25 bp, Homo sapien
tctatgccaaactgtagtatgaaca

SEQ ID NO: 248499 - DNA, 25 bp, Homo sapien
aggattctatgccaaactgtagtat

SEQ ID NO: 248500 - DNA, 25 bp, Homo sapien
gattctatgccaaactgtagtatga

SEQ ID NO: 248501 - DNA, 25 bp, Homo sapien
agatgcaaaagggttatgcacaaga

SEQ ID NO: 248502 - DNA, 25 bp, Homo sapien
tgttgaatatttggataggcaatac

SEQ ID NO: 248503 - DNA, 25 bp, Homo sapien
gcaatacaggcatatggtacaaaat

SEQ ID NO: 248504 - DNA, 25 bp, Homo sapien
taaaagatgcaaaagggttatgcac

SEQ ID NO: 248505 - DNA, 25 bp, Homo sapien
caggagctagttgaacgtatgcctc

SEQ ID NO: 248506 - DNA, 25 bp, Homo sapien
cataatcaggagctagttgaacgta

SEQ ID NO: 248507 - DNA, 25 bp, Homo sapien
atcataatcaggagctagttgaacg

SEQ ID NO: 248508 - DNA, 25 bp, Homo sapien
tagttgaacgtatgcctccttctct

SEQ ID NO: 248509 - DNA, 25 bp, Homo sapien
cacaagtgtcttgttgtcctcgctc

SEQ ID NO: 248510 - DNA, 25 bp, Homo sapien
aacacaagtgtcttgttgtcctcgc

SEQ ID NO: 248511 - DNA, 25 bp, Homo sapien
gtcttgttgtcctcgctcttcttca

SEQ ID NO: 248512 - DNA, 25 bp, Homo sapien
agtgtcttgttgtcctcgctcttct

SEQ ID NO: 248513 - DNA, 25 bp, Homo sapien
caacactgctttcttggccttcaca

SEQ ID NO: 248514 - DNA, 25 bp, Homo sapien
ctttcttggccttcacagcctttgc

SEQ ID NO: 248515 - DNA, 25 bp, Homo sapien
tgctttcttggccttcacagccttt

SEQ ID NO: 248516 - DNA, 25 bp, Homo sapien
acactgctttcttggccttcacagc

SEQ ID NO: 248517 - DNA, 25 bp, Homo sapien
ggactaggagagtaagcagacttac

SEQ ID NO: 248518 - DNA, 25 bp, Homo sapien
ctggactaggagagtaagcagactt

SEQ ID NO: 248519 - DNA, 25 bp, Homo sapien
tggactaggagagtaagcagactta

SEQ ID NO: 248520 - DNA, 25 bp, Homo sapien
aaagatggtgatccttgaggggtct

SEQ ID NO: 248521 - DNA, 25 bp, Homo sapien
gtgatccttgaggggtcttgaagca

SEQ ID NO: 248522 - DNA, 25 bp, Homo sapien
aagatggtgatccttgaggggtctt

SEQ ID NO: 248523 - DNA, 25 bp, Homo sapien
atggtgatccttgaggggtcttgaa

SEQ ID NO: 248524 - DNA, 25 bp, Homo sapien
ggagaccgaatttagcctgcaacct

SEQ ID NO: 248525 - DNA, 25 bp, Homo sapien
aagatgacttgccagccatattgct

SEQ ID NO: 248526 - DNA, 25 bp, Homo sapien
ccatattgctgggagttggtgacta

SEQ ID NO: 248527 - DNA, 25 bp, Homo sapien
tctagctagtggagaaactgaatct

SEQ ID NO: 248528 - DNA, 25 bp, Homo sapien
tattgaaagtatgggtggccagtcc

SEQ ID NO: 248529 - DNA, 25 bp, Homo sapien
gattacccaacgtcagaagccaaaa

SEQ ID NO: 248530 - DNA, 25 bp, Homo sapien
taagattgaaatgaactaaggcacg

SEQ ID NO: 248531 - DNA, 25 bp, Homo sapien
taaggcacgtcaaagtacacagtgc

SEQ ID NO: 248532 - DNA, 25 bp, Homo sapien
ttataattattgatagcaagaaaag

SEQ ID NO: 248533 - DNA, 25 bp, Homo sapien
ttattgatagcaagaaaagcatatt

SEQ ID NO: 248534 - DNA, 25 bp, Homo sapien
tataattattgatagcaagaaaagc

SEQ ID NO: 248535 - DNA, 25 bp, Homo sapien
taattattgatagcaagaaaagcat

SEQ ID NO: 248536 - DNA, 25 bp, Homo sapien
gaagttgattgcctaaccgggtcag

SEQ ID NO: 248537 - DNA, 25 bp, Homo sapien
tgaaaagctcttgacagtcctgtgg

SEQ ID NO: 248538 - DNA, 25 bp, Homo sapien
ggaaatccagcacttaattttggag

SEQ ID NO: 248539 - DNA, 25 bp, Homo sapien
ccatagaattgtgggcttagtgact

SEQ ID NO: 248540 - DNA, 25 bp, Homo sapien
tccagtgtctgtatgcatatgggtc

SEQ ID NO: 248541 - DNA, 25 bp, Homo sapien
cagtgaacctgatatacccctctac

SEQ ID NO: 248542 - DNA, 25 bp, Homo sapien
catatgggtctggtttgaggttctc

SEQ ID NO: 248543 - DNA, 25 bp, Homo sapien
cctttatcctttgcaacgcagcagg

SEQ ID NO: 248544 - DNA, 25 bp, Homo sapien
ccggtgtgtgatgtttccccatcct

SEQ ID NO: 248545 - DNA, 25 bp, Homo sapien
tgtgtgatgtttccccatcctgtgt

SEQ ID NO: 248546 - DNA, 25 bp, Homo sapien
tgatgtttccccatcctgtgtccaa

SEQ ID NO: 248547 - DNA, 25 bp, Homo sapien
tgtttccccatcctgtgtccaagtg

SEQ ID NO: 248548 - DNA, 25 bp, Homo sapien
tcttcgcatttgatcaaagccagtg

SEQ ID NO: 248549 - DNA, 25 bp, Homo sapien
gagtccctaccaacaggatgtcagt

SEQ ID NO: 248550 - DNA, 25 bp, Homo sapien
catagtaaatttaggaccaagagtc

SEQ ID NO: 248551 - DNA, 25 bp, Homo sapien
ttccggcttcggtcccaggatgact

SEQ ID NO: 248552 - DNA, 25 bp, Homo sapien
gatcaatgtattggtctagtgagac

SEQ ID NO: 248553 - DNA, 25 bp, Homo sapien
ccttcatgtgctgatgtgattacac

SEQ ID NO: 248554 - DNA, 25 bp, Homo sapien
tcttttcatatcagagtacaggaca

SEQ ID NO: 248555 - DNA, 25 bp, Homo sapien
taacctacagagtggtctgtaatgc

SEQ ID NO: 248556 - DNA, 25 bp, Homo sapien
aaagtacaatgggacttgctgccct

SEQ ID NO: 248557 - DNA, 25 bp, Homo sapien
ttcatcatctcgttcccgtgccagg

SEQ ID NO: 248558 - DNA, 25 bp, Homo sapien
ttttagtatagtctggagagaaagg

SEQ ID NO: 248559 - DNA, 25 bp, Homo sapien
ttagaaagagggtcagctagaaacc

SEQ ID NO: 248560 - DNA, 25 bp, Homo sapien
agcatcagaggagtcccggattgct

SEQ ID NO: 248561 - DNA, 25 bp, Homo sapien
tcacgtaaaagcctgggaagcatca

SEQ ID NO: 248562 - DNA, 25 bp, Homo sapien
aggagtcccggattgctgctgctac

SEQ ID NO: 248563 - DNA, 25 bp, Homo sapien
acgtaaaagcctgggaagcatcaga

SEQ ID NO: 248564 - DNA, 25 bp, Homo sapien
taggttctccgtgcttccctcaaga

SEQ ID NO: 248565 - DNA, 25 bp, Homo sapien
taacactagtgatgagggagaggct

SEQ ID NO: 248566 - DNA, 25 bp, Homo sapien
taaagggtacactaaggtatgagct

SEQ ID NO: 248567 - DNA, 25 bp, Homo sapien
gaaggagtcagcctaagtttgcaca

SEQ ID NO: 248568 - DNA, 25 bp, Homo sapien
aactggatccctgcttttatgtgag

SEQ ID NO: 248569 - DNA, 25 bp, Homo sapien
tgtttctaaaccgaatgatccagga

SEQ ID NO: 248570 - DNA, 25 bp, Homo sapien
caaatgccgcgttgtctgggtgtac

SEQ ID NO: 248571 - DNA, 25 bp, Homo sapien
tggagacgccacttcctcaaaatgg

SEQ ID NO: 248572 - DNA, 25 bp, Homo sapien
taatgctgttgtaagtaatatttta

SEQ ID NO: 248573 - DNA, 25 bp, Homo sapien
agatgtataaggttaagtttgcaaa

SEQ ID NO: 248574 - DNA, 25 bp, Homo sapien
aagatgtataaggttaagtttgcaa

SEQ ID NO: 248575 - DNA, 25 bp, Homo sapien
gatatcttatactgacctgtctttg

SEQ ID NO: 248576 - DNA, 25 bp, Homo sapien
taattctaccgtctctatgtcctgg

SEQ ID NO: 248577 - DNA, 25 bp, Homo sapien
tttatattgcactactagaatggcc

SEQ ID NO: 248578 - DNA, 25 bp, Homo sapien
gctgctatcaaacccatgcaattag

SEQ ID NO: 248579 - DNA, 25 bp, Homo sapien
tcttacacccttgtccagatggccg

SEQ ID NO: 248580 - DNA, 25 bp, Homo sapien
gacagaggtgggttctaaagactcc

SEQ ID NO: 248581 - DNA, 25 bp, Homo sapien
gaatccactggttatgagcgcagct

SEQ ID NO: 248582 - DNA, 25 bp, Homo sapien
taaagactcccgagctggtgtgcag

SEQ ID NO: 248583 - DNA, 25 bp, Homo sapien
gaggcggagagcagtcagacctggg

SEQ ID NO: 248584 - DNA, 25 bp, Homo sapien
aaaggaggcaacagggatcgggcct

SEQ ID NO: 248585 - DNA, 25 bp, Homo sapien
tggccccgtcggcactgtctgtcat

SEQ ID NO: 248586 - DNA, 25 bp, Homo sapien
ggcctcggtggctgatgtgacaggt

SEQ ID NO: 248587 - DNA, 25 bp, Homo sapien
tagggcgagctcatgtcctggaact

SEQ ID NO: 248588 - DNA, 25 bp, Homo sapien
ctagggcgagctcatgtcctggaac

SEQ ID NO: 248589 - DNA, 25 bp, Homo sapien
tcactgtcgtccagcggggccaagt

SEQ ID NO: 248590 - DNA, 25 bp, Homo sapien
tgagtcctgctccaaactccggctt

SEQ ID NO: 248591 - DNA, 25 bp, Homo sapien
tggccacaaagggacccacttggag

SEQ ID NO: 248592 - DNA, 25 bp, Homo sapien
caaactccggcttttggaggtgatg

SEQ ID NO: 248593 - DNA, 25 bp, Homo sapien
ggtcgtaaactggtccgtgtcactg

SEQ ID NO: 248594 - DNA, 25 bp, Homo sapien
gaaggtcgtaaactggtccgtgtca

SEQ ID NO: 248595 - DNA, 25 bp, Homo sapien
aggtcgtaaactggtccgtgtcact

SEQ ID NO: 248596 - DNA, 25 bp, Homo sapien
caggaaggtcgtaaactggtccgtg

SEQ ID NO: 248597 - DNA, 25 bp, Homo sapien
ttatctctgccaagctcagtagata

SEQ ID NO: 248598 - DNA, 25 bp, Homo sapien
ctttatctctgccaagctcagtaga

SEQ ID NO: 248599 - DNA, 25 bp, Homo sapien
tcagtagataggattctgtgtgtct

SEQ ID NO: 248600 - DNA, 25 bp, Homo sapien
cctttatctctgccaagctcagtag

SEQ ID NO: 248601 - DNA, 25 bp, Homo sapien
acagggcaatgcctagaccacagga

SEQ ID NO: 248602 - DNA, 25 bp, Homo sapien
gcttagccaatcagagcctatgcct

SEQ ID NO: 248603 - DNA, 25 bp, Homo sapien
tctaggagaatcattggcttagcca

SEQ ID NO: 248604 - DNA, 25 bp, Homo sapien
acttctagcctgtcgtggtgggacc

SEQ ID NO: 248605 - DNA, 25 bp, Homo sapien
ggctgcacagttccggcatttgtag

SEQ ID NO: 248606 - DNA, 25 bp, Homo sapien
tgttggctgcacagttccggcattt

SEQ ID NO: 248607 - DNA, 25 bp, Homo sapien
ggtgttggctgcacagttccggcat

SEQ ID NO: 248608 - DNA, 25 bp, Homo sapien
gttggctgcacagttccggcatttg

SEQ ID NO: 248609 - DNA, 25 bp, Homo sapien
tgctggaaccgagagtcaactgtgg

SEQ ID NO: 248610 - DNA, 25 bp, Homo sapien
agggattcgcctctgttttgagcac

SEQ ID NO: 248611 - DNA, 25 bp, Homo sapien
cactcaggacgcttgtgttatcagt

SEQ ID NO: 248612 - DNA, 25 bp, Homo sapien
tccacagctgcgtgccgattttcac

SEQ ID NO: 248613 - DNA, 25 bp, Homo sapien
ggctgagttgctcgggattaggttg

SEQ ID NO: 248614 - DNA, 25 bp, Homo sapien
atgcgacgagttgggccctccaagg

SEQ ID NO: 248615 - DNA, 25 bp, Homo sapien
tgccacatgcgacgagttgggccct

SEQ ID NO: 248616 - DNA, 25 bp, Homo sapien
cttggctgttgccacatgcgacgag

SEQ ID NO: 248617 - DNA, 25 bp, Homo sapien
gacagtgatgagacagagcggtgcg

SEQ ID NO: 248618 - DNA, 25 bp, Homo sapien
cagtgatgagacagagcggtgcggc

SEQ ID NO: 248619 - DNA, 25 bp, Homo sapien
ggacagtgatgagacagagcggtgc

SEQ ID NO: 248620 - DNA, 25 bp, Homo sapien
gtgatgagacagagcggtgcggcct

SEQ ID NO: 248621 - DNA, 25 bp, Homo sapien
agaggcctcgggagaaatgcgcagg

SEQ ID NO: 248622 - DNA, 25 bp, Homo sapien
gcctcgggagaaatgcgcaggcccc

SEQ ID NO: 248623 - DNA, 25 bp, Homo sapien
gaggcctcgggagaaatgcgcaggc

SEQ ID NO: 248624 - DNA, 25 bp, Homo sapien
ctcgggagaaatgcgcaggccccag

SEQ ID NO: 248625 - DNA, 25 bp, Homo sapien
gggggcacgtggcaaactggctacc

SEQ ID NO: 248626 - DNA, 25 bp, Homo sapien
ctgggggcacgtggcaaactggcta

SEQ ID NO: 248627 - DNA, 25 bp, Homo sapien
tgggggcacgtggcaaactggctac

SEQ ID NO: 248628 - DNA, 25 bp, Homo sapien
ctgtccacccgtgagcaagacacca

SEQ ID NO: 248629 - DNA, 25 bp, Homo sapien
ctgcgtgtgcgcgagggtgcgtggc

SEQ ID NO: 248630 - DNA, 25 bp, Homo sapien
acggtgttggtgagcgtgtgtgtgc

SEQ ID NO: 248631 - DNA, 25 bp, Homo sapien
cgtggcctggtacgcgtgcgcacgg

SEQ ID NO: 248632 - DNA, 25 bp, Homo sapien
tacgcgtgcgcacggtgttggtgag

SEQ ID NO: 248633 - DNA, 25 bp, Homo sapien
atatcggacccgtgcgtgtgcgtag

SEQ ID NO: 248634 - DNA, 25 bp, Homo sapien
cgtcgtgtatgcgtccgcgacagtg

SEQ ID NO: 248635 - DNA, 25 bp, Homo sapien
ggccgcatatcggacccgtgcgtgt

SEQ ID NO: 248636 - DNA, 25 bp, Homo sapien
tcgtgtatgcgtccgcgacagtgcg

SEQ ID NO: 248637 - DNA, 25 bp, Homo sapien
cacgggcgtgcacgcacgggggctg

SEQ ID NO: 248638 - DNA, 25 bp, Homo sapien
tgcacgcacgggggctgcgtatgct

SEQ ID NO: 248639 - DNA, 25 bp, Homo sapien
cacacgggcgtgcacgcacgggggc

SEQ ID NO: 248640 - DNA, 25 bp, Homo sapien
gtgcacgcacgggggctgcgtatgc

SEQ ID NO: 248641 - DNA, 25 bp, Homo sapien
tgagccggccgagcggcgacggacc

SEQ ID NO: 248642 - DNA, 25 bp, Homo sapien
agcccggggagcagaacgctgcgga

SEQ ID NO: 248643 - DNA, 25 bp, Homo sapien
cggcgcccctgagccggccgagcgg

SEQ ID NO: 248644 - DNA, 25 bp, Homo sapien
ggagcagaacgctgcggaccgcggc

SEQ ID NO: 248645 - DNA, 25 bp, Homo sapien
cttttcaggaaacggggcgcgcagg

SEQ ID NO: 248646 - DNA, 25 bp, Homo sapien
cgctggcgttgaggacccggcaccc

SEQ ID NO: 248647 - DNA, 25 bp, Homo sapien
gcgcaggcctcgctacggccgtgac

SEQ ID NO: 248648 - DNA, 25 bp, Homo sapien
ttcacgcggggggacgggcggctca

SEQ ID NO: 248649 - DNA, 25 bp, Homo sapien
ggcgttattggaaagttggtcctga

SEQ ID NO: 248650 - DNA, 25 bp, Homo sapien
tattggaaagttggtcctgagtcat

SEQ ID NO: 248651 - DNA, 25 bp, Homo sapien
cgttattggaaagttggtcctgagt

SEQ ID NO: 248652 - DNA, 25 bp, Homo sapien
ttattggaaagttggtcctgagtca

SEQ ID NO: 248653 - DNA, 25 bp, Homo sapien
taacaaactggaaacggatgaggtg

SEQ ID NO: 248654 - DNA, 25 bp, Homo sapien
tatgtcgagcgttgtagcggcttct

SEQ ID NO: 248655 - DNA, 25 bp, Homo sapien
tctagtatttggacccgaggagata

SEQ ID NO: 248656 - DNA, 25 bp, Homo sapien
tacgagctgttgacgggaccagttg

SEQ ID NO: 248657 - DNA, 25 bp, Homo sapien
tcagttcgtcctgagatcttctcat

SEQ ID NO: 248658 - DNA, 25 bp, Homo sapien
aagtggaccatcagttcgtcctgag

SEQ ID NO: 248659 - DNA, 25 bp, Homo sapien
tggaccatcagttcgtcctgagatc

SEQ ID NO: 248660 - DNA, 25 bp, Homo sapien
gaccatcagttcgtcctgagatctt

SEQ ID NO: 248661 - DNA, 25 bp, Homo sapien
tcactgtgcaactcaagaaggacct

SEQ ID NO: 248662 - DNA, 25 bp, Homo sapien
tgagacatctgagcctgcgttgcgg

SEQ ID NO: 248663 - DNA, 25 bp, Homo sapien
tgagctagctcaagcaaacaaagga

SEQ ID NO: 248664 - DNA, 25 bp, Homo sapien
cactgtggcgttgcaagtctgagct

SEQ ID NO: 248665 - DNA, 25 bp, Homo sapien
tcaaggttttgaacgtgcaaccagg

SEQ ID NO: 248666 - DNA, 25 bp, Homo sapien
gaataacggaatgcagccagacact

SEQ ID NO: 248667 - DNA, 25 bp, Homo sapien
tcatggccatttgtacctgctccag

SEQ ID NO: 248668 - DNA, 25 bp, Homo sapien
tgaggccactaggtcaggtccttgg

SEQ ID NO: 248669 - DNA, 25 bp, Homo sapien
ttcatttgaatacccaatcacactt

SEQ ID NO: 248670 - DNA, 25 bp, Homo sapien
accttcatttgaatacccaatcaca

SEQ ID NO: 248671 - DNA, 25 bp, Homo sapien
ttcagagtggcacctctcacacctt

SEQ ID NO: 248672 - DNA, 25 bp, Homo sapien
cataacaaggtttcagagtggcacc

SEQ ID NO: 248673 - DNA, 25 bp, Homo sapien
gagacacagccctatcagtggctta

SEQ ID NO: 248674 - DNA, 25 bp, Homo sapien
cagtggcttacgctcctggcttggc

SEQ ID NO: 248675 - DNA, 25 bp, Homo sapien
gttacagtcttggaatgtcagccct

SEQ ID NO: 248676 - DNA, 25 bp, Homo sapien
gagtgggatccttgctggttatgaa

SEQ ID NO: 248677 - DNA, 25 bp, Homo sapien
agtcatcgctgcccaagactactgt

SEQ ID NO: 248678 - DNA, 25 bp, Homo sapien
gagtcatcgctgcccaagactactg

SEQ ID NO: 248679 - DNA, 25 bp, Homo sapien
ccaagactactgttgggttctcctc

SEQ ID NO: 248680 - DNA, 25 bp, Homo sapien
gtcatcgctgcccaagactactgtt

SEQ ID NO: 248681 - DNA, 25 bp, Homo sapien
tctttgggagatgaaacgtagaaaa

SEQ ID NO: 248682 - DNA, 25 bp, Homo sapien
tgtggacgtattctttgggagatga

SEQ ID NO: 248683 - DNA, 25 bp, Homo sapien
aggtaccccgagtccattacacatt

SEQ ID NO: 248684 - DNA, 25 bp, Homo sapien
aaggtaccccgagtccattacacat

SEQ ID NO: 248685 - DNA, 25 bp, Homo sapien
ggagggaggttgacagaggagggcc

SEQ ID NO: 248686 - DNA, 25 bp, Homo sapien
aaggcagggtgttcaggagggaggt

SEQ ID NO: 248687 - DNA, 25 bp, Homo sapien
gcctgggatccagtgccagagtaga

SEQ ID NO: 248688 - DNA, 25 bp, Homo sapien
cagagtagagggtggaccttgccca

SEQ ID NO: 248689 - DNA, 25 bp, Homo sapien
tctacccagctgtgggcgagatgtg

SEQ ID NO: 248690 - DNA, 25 bp, Homo sapien
cttgctttcatgcagtctacccagc

SEQ ID NO: 248691 - DNA, 25 bp, Homo sapien
gggcaggcacggcagtcttgctttc

SEQ ID NO: 248692 - DNA, 25 bp, Homo sapien
gagatgtgtgcacatcgctcagcat

SEQ ID NO: 248693 - DNA, 25 bp, Homo sapien
tcattgtgaattgtgagtcgacatg

SEQ ID NO: 248694 - DNA, 25 bp, Homo sapien
cattgtgaattgtgagtcgacatga

SEQ ID NO: 248695 - DNA, 25 bp, Homo sapien
actcattgtgaattgtgagtcgaca

SEQ ID NO: 248696 - DNA, 25 bp, Homo sapien
ttgactcattgtgaattgtgagtcg

SEQ ID NO: 248697 - DNA, 25 bp, Homo sapien
actcatgtgaattgtgagtagacac

SEQ ID NO: 248698 - DNA, 25 bp, Homo sapien
aggtgactcatgtgaattgtgagta

SEQ ID NO: 248699 - DNA, 25 bp, Homo sapien
catgtgaattgtgagtagacacgat

SEQ ID NO: 248700 - DNA, 25 bp, Homo sapien
tgactcatgtgaattgtgagtagac

SEQ ID NO: 248701 - DNA, 25 bp, Homo sapien
aagagtcatcctgcagcgctgccac

SEQ ID NO: 248702 - DNA, 25 bp, Homo sapien
tgagagtggcgctgccacagagaac

SEQ ID NO: 248703 - DNA, 25 bp, Homo sapien
gccttgatccctgacttgaaagtca

SEQ ID NO: 248704 - DNA, 25 bp, Homo sapien
tctggaacttctgtggggagtgccc

SEQ ID NO: 248705 - DNA, 25 bp, Homo sapien
gatggcaaaaggaaaccacctcacg

SEQ ID NO: 248706 - DNA, 25 bp, Homo sapien
cacctcacgctacctctttgtgcct

SEQ ID NO: 248707 - DNA, 25 bp, Homo sapien
gtctctctgaagcacggtgatggca

SEQ ID NO: 248708 - DNA, 25 bp, Homo sapien
gcttgatgaaagttcctctgaggct

SEQ ID NO: 248709 - DNA, 25 bp, Homo sapien
gtcaggaatttacgcggaggcatgt

SEQ ID NO: 248710 - DNA, 25 bp, Homo sapien
aggaatttacgcggaggcatgtctg

SEQ ID NO: 248711 - DNA, 25 bp, Homo sapien
ctgtcaggaatttacgcggaggcat

SEQ ID NO: 248712 - DNA, 25 bp, Homo sapien
tcaggaatttacgcggaggcatgtc

SEQ ID NO: 248713 - DNA, 25 bp, Homo sapien
ggcgtcgtagcgcacagcgcactcg

SEQ ID NO: 248714 - DNA, 25 bp, Homo sapien
agcgcactcgtttccgcattcccac

SEQ ID NO: 248715 - DNA, 25 bp, Homo sapien
ccgcacggccagttgtcacagccat

SEQ ID NO: 248716 - DNA, 25 bp, Homo sapien
attcccaccccgcacggccagttgt

SEQ ID NO: 248717 - DNA, 25 bp, Homo sapien
gaggcccaaagaagtgatgccactt

SEQ ID NO: 248718 - DNA, 25 bp, Homo sapien
gaagtgatgccacttggttaaggtc

SEQ ID NO: 248719 - DNA, 25 bp, Homo sapien
tgatgccacttggttaaggtcccag

SEQ ID NO: 248720 - DNA, 25 bp, Homo sapien
caaagaagtgatgccacttggttaa

SEQ ID NO: 248721 - DNA, 25 bp, Homo sapien
gctccctggtgcatcaggttgtgaa

SEQ ID NO: 248722 - DNA, 25 bp, Homo sapien
caggcactagccttatttggttcag

SEQ ID NO: 248723 - DNA, 25 bp, Homo sapien
tggttcagctaaaggtgctccctgg

SEQ ID NO: 248724 - DNA, 25 bp, Homo sapien
tagccttatttggttcagctaaagg

SEQ ID NO: 248725 - DNA, 25 bp, Homo sapien
ctgtagagaatctgtggaaatcggc

SEQ ID NO: 248726 - DNA, 25 bp, Homo sapien
tagagaatctgtggaaatcggctca

SEQ ID NO: 248727 - DNA, 25 bp, Homo sapien
tgaaatgaacgctgtagagaatctg

SEQ ID NO: 248728 - DNA, 25 bp, Homo sapien
cttctatgaaatgaacgctgtagag

SEQ ID NO: 248729 - DNA, 25 bp, Homo sapien
aaagtaccaggactgtcattttctg

SEQ ID NO: 248730 - DNA, 25 bp, Homo sapien
tctgaaactctgtcaataagctaac

SEQ ID NO: 248731 - DNA, 25 bp, Homo sapien
ggcatgtacctgtaggcctagctta

SEQ ID NO: 248732 - DNA, 25 bp, Homo sapien
ctaacagaaggcctatattgtgaaa

SEQ ID NO: 248733 - DNA, 25 bp, Homo sapien
tgatggcgggagtcgaagcacagag

SEQ ID NO: 248734 - DNA, 25 bp, Homo sapien
tgagggcacacgtcacttggggtct

SEQ ID NO: 248735 - DNA, 25 bp, Homo sapien
ccctaaagccctggtgatggcggga

SEQ ID NO: 248736 - DNA, 25 bp, Homo sapien
tccttgtctgattctccagtagacc

SEQ ID NO: 248737 - DNA, 25 bp, Homo sapien
gggcttctcacagcgccgggcttgt

SEQ ID NO: 248738 - DNA, 25 bp, Homo sapien
tccacagggcacacgtagaggagca

SEQ ID NO: 248739 - DNA, 25 bp, Homo sapien
agggacgtccatccacgcggccttc

SEQ ID NO: 248740 - DNA, 25 bp, Homo sapien
ggagcacgcactgggacagaaggca

SEQ ID NO: 248741 - DNA, 25 bp, Homo sapien
gatctgcccgatccctgataagtag

SEQ ID NO: 248742 - DNA, 25 bp, Homo sapien
catagtggatacttcggatctgccc

SEQ ID NO: 248743 - DNA, 25 bp, Homo sapien
catgcgtggagaatatgatgccctg

SEQ ID NO: 248744 - DNA, 25 bp, Homo sapien
tgggagatgcattcaagcccgaccc

SEQ ID NO: 248745 - DNA, 25 bp, Homo sapien
ggtctccgaaagcaacgttgtgcgt

SEQ ID NO: 248746 - DNA, 25 bp, Homo sapien
tctgccccatgtgttcggacgagct

SEQ ID NO: 248747 - DNA, 25 bp, Homo sapien
gcaggtgtgtttctccatcccgtca

SEQ ID NO: 248748 - DNA, 25 bp, Homo sapien
catcttgctgcatgccgtcaacggt

SEQ ID NO: 248749 - DNA, 25 bp, Homo sapien
gccttagatgggacatgctgcttct

SEQ ID NO: 248750 - DNA, 25 bp, Homo sapien
ctggtggcatacggcccacgtgcct

SEQ ID NO: 248751 - DNA, 25 bp, Homo sapien
cgtgccttagatgggacatgctgct

SEQ ID NO: 248752 - DNA, 25 bp, Homo sapien
cggcccacgtgccttagatgggaca

SEQ ID NO: 248753 - DNA, 25 bp, Homo sapien
ctgggtttgcattgagcatcattct

SEQ ID NO: 248754 - DNA, 25 bp, Homo sapien
ttctctccaccactagatctttgtc

SEQ ID NO: 248755 - DNA, 25 bp, Homo sapien
gcattgagcatcattctagaaagtg

SEQ ID NO: 248756 - DNA, 25 bp, Homo sapien
ctttgtctctacaagggccctcaga

SEQ ID NO: 248757 - DNA, 25 bp, Homo sapien
caggctccaccgtcggcttctggag

SEQ ID NO: 248758 - DNA, 25 bp, Homo sapien
tggagcctccgctgcttaattacca

SEQ ID NO: 248759 - DNA, 25 bp, Homo sapien
agtgagccgcctggtccaagtacgg

SEQ ID NO: 248760 - DNA, 25 bp, Homo sapien
agattccaaatctctaggccccacg

SEQ ID NO: 248761 - DNA, 25 bp, Homo sapien
caggtgtggaacagaagccgagcct

SEQ ID NO: 248762 - DNA, 25 bp, Homo sapien
caactgtgattagaagcctggagcc

SEQ ID NO: 248763 - DNA, 25 bp, Homo sapien
tacacgcgacgggtgcttcttaggc

SEQ ID NO: 248764 - DNA, 25 bp, Homo sapien
ttcttaggcaaaaccaatgtgtgcg

SEQ ID NO: 248765 - DNA, 25 bp, Homo sapien
tgagccacgtgcaagccgcagccgg

SEQ ID NO: 248766 - DNA, 25 bp, Homo sapien
tctagggcttgtcccgcggagcctg

SEQ ID NO: 248767 - DNA, 25 bp, Homo sapien
gaagcctgaccctctggttctaggg

SEQ ID NO: 248768 - DNA, 25 bp, Homo sapien
agggcactggctcttgtgaccacac

SEQ ID NO: 248769 - DNA, 25 bp, Homo sapien
ggctcccactgcactggctgtggca

SEQ ID NO: 248770 - DNA, 25 bp, Homo sapien
tgccagggctcccactgcactggct

SEQ ID NO: 248771 - DNA, 25 bp, Homo sapien
agggctcccactgcactggctgtgg

SEQ ID NO: 248772 - DNA, 25 bp, Homo sapien
ccagggctcccactgcactggctgt

SEQ ID NO: 248773 - DNA, 25 bp, Homo sapien
taagactgtagaatgcaaaactcgg

SEQ ID NO: 248774 - DNA, 25 bp, Homo sapien
aaagaccgtgagttattgcccagca

SEQ ID NO: 248775 - DNA, 25 bp, Homo sapien
taaaagttgcgtctgtagtagccgc

SEQ ID NO: 248776 - DNA, 25 bp, Homo sapien
tagtagccgcttgctgtgaagacac

SEQ ID NO: 248777 - DNA, 25 bp, Homo sapien
ggagacagcggcactcggacccgct

SEQ ID NO: 248778 - DNA, 25 bp, Homo sapien
tctggactgaaagcgcaaccgtact

SEQ ID NO: 248779 - DNA, 25 bp, Homo sapien
tggatcaggcggcacacccggctca

SEQ ID NO: 248780 - DNA, 25 bp, Homo sapien
tctcgagttctggtaaggaaagcaa

SEQ ID NO: 248781 - DNA, 25 bp, Homo sapien
ccagccgttcctcagcacccgtggg

SEQ ID NO: 248782 - DNA, 25 bp, Homo sapien
gcatatggtcaagggccttctgtgc

SEQ ID NO: 248783 - DNA, 25 bp, Homo sapien
ctgtgcatatggtcaagggccttct

SEQ ID NO: 248784 - DNA, 25 bp, Homo sapien
ctgcagtgtggtcccagccgttcct

SEQ ID NO: 248785 - DNA, 25 bp, Homo sapien
gtcctggtccagccagccttgcggg

SEQ ID NO: 248786 - DNA, 25 bp, Homo sapien
cctggtccagccagccttgcgggga

SEQ ID NO: 248787 - DNA, 25 bp, Homo sapien
tcctggtccagccagccttgcgggg

SEQ ID NO: 248788 - DNA, 25 bp, Homo sapien
tggtccagccagccttgcggggact

SEQ ID NO: 248789 - DNA, 25 bp, Homo sapien
cctctgcatttatggtggcggtggg

SEQ ID NO: 248790 - DNA, 25 bp, Homo sapien
tgaagcccaacgcagccctgtcagt

SEQ ID NO: 248791 - DNA, 25 bp, Homo sapien
ggggtgaagcccaacgcagccctgt

SEQ ID NO: 248792 - DNA, 25 bp, Homo sapien
ggtgaagcccaacgcagccctgtca

SEQ ID NO: 248793 - DNA, 25 bp, Homo sapien
tccctcctggtaccaagctgctggg

SEQ ID NO: 248794 - DNA, 25 bp, Homo sapien
aggctgggatctgcgaagttgaacc

SEQ ID NO: 248795 - DNA, 25 bp, Homo sapien
agccttgcgccgcattcgcactggg

SEQ ID NO: 248796 - DNA, 25 bp, Homo sapien
gacagggtggccttactcagtaaag

SEQ ID NO: 248797 - DNA, 25 bp, Homo sapien
acgtcctgaacagccttgccaagca

SEQ ID NO: 248798 - DNA, 25 bp, Homo sapien
tgtctgccgccacagttaatcacaa

SEQ ID NO: 248799 - DNA, 25 bp, Homo sapien
tgggtctacgtgatcatacgggcta

SEQ ID NO: 248800 - DNA, 25 bp, Homo sapien
tcactcaacatctggtacaaagggt

SEQ ID NO: 248801 - DNA, 25 bp, Homo sapien
ggctccatgcgggggcaggactggt

SEQ ID NO: 248802 - DNA, 25 bp, Homo sapien
gctgcgacccagaatgaacttaatg

SEQ ID NO: 248803 - DNA, 25 bp, Homo sapien
tgacactgggaatgctataggacct

SEQ ID NO: 248804 - DNA, 25 bp, Homo sapien
ccgtggaagcgaatggaaaacagca

SEQ ID NO: 248805 - DNA, 25 bp, Homo sapien
cacgacactcgctggttttatggca

SEQ ID NO: 248806 - DNA, 25 bp, Homo sapien
tcggtgggccgctggggttggagct

SEQ ID NO: 248807 - DNA, 25 bp, Homo sapien
gccttcgagggggagctggctcctg

SEQ ID NO: 248808 - DNA, 25 bp, Homo sapien
gagctattcgatggagttgagtgtt

SEQ ID NO: 248809 - DNA, 25 bp, Homo sapien
agtgtttggtggagtccgaatcagg

SEQ ID NO: 248810 - DNA, 25 bp, Homo sapien
cccttaggcgtgctggtgagagtca

SEQ ID NO: 248811 - DNA, 25 bp, Homo sapien
gaagagacgctgaccttggcagaac

SEQ ID NO: 248812 - DNA, 25 bp, Homo sapien
tttagcaatagaaacgccagcactg

SEQ ID NO: 248813 - DNA, 25 bp, Homo sapien
taggcagagcgatcagggaagaaac

SEQ ID NO: 248814 - DNA, 25 bp, Homo sapien
tcagcactggacctgggcaagtctc

SEQ ID NO: 248815 - DNA, 25 bp, Homo sapien
agcactggacctgggcaagtctcac

SEQ ID NO: 248816 - DNA, 25 bp, Homo sapien
cagcactggacctgggcaagtctca

SEQ ID NO: 248817 - DNA, 25 bp, Homo sapien
ttgtcaaagtcctggtctggatcag

SEQ ID NO: 248818 - DNA, 25 bp, Homo sapien
cagaggcacagtcacgctaggctcc

SEQ ID NO: 248819 - DNA, 25 bp, Homo sapien
ggcacagtcacgctaggctccgatc

SEQ ID NO: 248820 - DNA, 25 bp, Homo sapien
gatcagacatacttctcagaggcac

SEQ ID NO: 248821 - DNA, 25 bp, Homo sapien
tgcgggggccaggcttcccctgtac

SEQ ID NO: 248822 - DNA, 25 bp, Homo sapien
ctgcgggggccaggcttcccctgta

SEQ ID NO: 248823 - DNA, 25 bp, Homo sapien
tggatggaggctggcgagccaggtt

SEQ ID NO: 248824 - DNA, 25 bp, Homo sapien
ccacgagatgtagggcttgttcctg

SEQ ID NO: 248825 - DNA, 25 bp, Homo sapien
agggccacgagatgtagggcttgtt

SEQ ID NO: 248826 - DNA, 25 bp, Homo sapien
aggctggcgagccaggttggtggga

SEQ ID NO: 248827 - DNA, 25 bp, Homo sapien
acctacggtggctgtggcctcgtga

SEQ ID NO: 248828 - DNA, 25 bp, Homo sapien
gagcatgcttggttgacacccggca

SEQ ID NO: 248829 - DNA, 25 bp, Homo sapien
tgggcagaaatagcaacacgtgagc

SEQ ID NO: 248830 - DNA, 25 bp, Homo sapien
ggccggctgcgaagtttgtgcaacc

SEQ ID NO: 248831 - DNA, 25 bp, Homo sapien
caaggccttgtgacagggtaagtgc

SEQ ID NO: 248832 - DNA, 25 bp, Homo sapien
tgctcgtgaacagagcttcagcgga

SEQ ID NO: 248833 - DNA, 25 bp, Homo sapien
gaggcctgtgcacaaggccttgtga

SEQ ID NO: 248834 - DNA, 25 bp, Homo sapien
tttgggacagtctcagccagcatgg

SEQ ID NO: 248835 - DNA, 25 bp, Homo sapien
ccatgtgggccacgtggttgaagtt

SEQ ID NO: 248836 - DNA, 25 bp, Homo sapien
ggatctcaattctgggtctctaagc

SEQ ID NO: 248837 - DNA, 25 bp, Homo sapien
atgagcacctgcatgccgtcgcctg

SEQ ID NO: 248838 - DNA, 25 bp, Homo sapien
tggttgggttggatatcattttgga

SEQ ID NO: 248839 - DNA, 25 bp, Homo sapien
ggtgtccggcacgttgagaaccgct

SEQ ID NO: 248840 - DNA, 25 bp, Homo sapien
ttcttgctgttgtcggaggtgtccg

SEQ ID NO: 248841 - DNA, 25 bp, Homo sapien
ctgggaccttgaagacgaaccgcct

SEQ ID NO: 248842 - DNA, 25 bp, Homo sapien
tttgctcctggtgcgcagcatctgc

SEQ ID NO: 248843 - DNA, 25 bp, Homo sapien
ggaggctcgcagttgaggaggttga

SEQ ID NO: 248844 - DNA, 25 bp, Homo sapien
tagatcaagcgtggaggctcgcagt

SEQ ID NO: 248845 - DNA, 25 bp, Homo sapien
ctcttgaagtagatcaagcgtggag

SEQ ID NO: 248846 - DNA, 25 bp, Homo sapien
gttgagggtgccttcagagttcagg

SEQ ID NO: 248847 - DNA, 25 bp, Homo sapien
gcaccgggagaagcccgcccgcaca

SEQ ID NO: 248848 - DNA, 25 bp, Homo sapien
agggacagtaagcgcggccacgcac

SEQ ID NO: 248849 - DNA, 25 bp, Homo sapien
gggagggacagtaagcgcggccacg

SEQ ID NO: 248850 - DNA, 25 bp, Homo sapien
taagcgcggccacgcacagactgca

SEQ ID NO: 248851 - DNA, 25 bp, Homo sapien
ccactccatggtgcgcacatcaaag

SEQ ID NO: 248852 - DNA, 25 bp, Homo sapien
atcaaagacgtccacgccatactcg

SEQ ID NO: 248853 - DNA, 25 bp, Homo sapien
cgatggtctgcacccactccatggt

SEQ ID NO: 248854 - DNA, 25 bp, Homo sapien
tactcgctgtacaccgtgacgtggg

SEQ ID NO: 248855 - DNA, 25 bp, Homo sapien
taggagatggcaagtccggtttcca

SEQ ID NO: 248856 - DNA, 25 bp, Homo sapien
agacccctaggaacccgtgctatgg

SEQ ID NO: 248857 - DNA, 25 bp, Homo sapien
cacttgaacaagtgcagaggcggca

SEQ ID NO: 248858 - DNA, 25 bp, Homo sapien
ccgactgttcagtatggtgaggcta

SEQ ID NO: 248859 - DNA, 25 bp, Homo sapien
gaaggcccttgcctgccgagtatgt

SEQ ID NO: 248860 - DNA, 25 bp, Homo sapien
tgtgaaaccaaggactgcaaagcct

SEQ ID NO: 248861 - DNA, 25 bp, Homo sapien
tctgagggcatatgcaagcgaggct

SEQ ID NO: 248862 - DNA, 25 bp, Homo sapien
tctccacacgggcttctgggaaggc

SEQ ID NO: 248863 - DNA, 25 bp, Homo sapien
tcttcaacgttacgctttgcaaaaa

SEQ ID NO: 248864 - DNA, 25 bp, Homo sapien
caacgttacgctttgcaaaaatgta

SEQ ID NO: 248865 - DNA, 25 bp, Homo sapien
gtgtggttttaaaccctgtgctggc

SEQ ID NO: 248866 - DNA, 25 bp, Homo sapien
ctgggccctcttcaacgttacgctt

SEQ ID NO: 248867 - DNA, 25 bp, Homo sapien
cctgggtatgatgccgtctcagcaa

SEQ ID NO: 248868 - DNA, 25 bp, Homo sapien
acactgcagtaagcccgtgggtgga

SEQ ID NO: 248869 - DNA, 25 bp, Homo sapien
atggagccgggacacactgcagtaa

SEQ ID NO: 248870 - DNA, 25 bp, Homo sapien
acaggcctggtgtctagccacgacg

SEQ ID NO: 248871 - DNA, 25 bp, Homo sapien
tgttacccccatatgcgcggctcgt

SEQ ID NO: 248872 - DNA, 25 bp, Homo sapien
gccactctgatagatcagagggatt

SEQ ID NO: 248873 - DNA, 25 bp, Homo sapien
taactgagggagaatgtcattcccc

SEQ ID NO: 248874 - DNA, 25 bp, Homo sapien
ggatttgatggtgcaggccactctg

SEQ ID NO: 248875 - DNA, 25 bp, Homo sapien
gagccaccgctctccacccggttta

SEQ ID NO: 248876 - DNA, 25 bp, Homo sapien
tagtagagatgaggctggtattgaa

SEQ ID NO: 248877 - DNA, 25 bp, Homo sapien
gtgagccaccgctctccacccggtt

SEQ ID NO: 248878 - DNA, 25 bp, Homo sapien
caggtgtgagccatattttgttatt

SEQ ID NO: 248879 - DNA, 25 bp, Homo sapien
taaatgagagatgaatgccacgccc

SEQ ID NO: 248880 - DNA, 25 bp, Homo sapien
tgctgaggcctctggaagaaccggc

SEQ ID NO: 248881 - DNA, 25 bp, Homo sapien
gaacacatgctgactgtcggtggga

SEQ ID NO: 248882 - DNA, 25 bp, Homo sapien
tgtgactactcaactaagggactgg

SEQ ID NO: 248883 - DNA, 25 bp, Homo sapien
gagccgcaggccacatgagctcctg

SEQ ID NO: 248884 - DNA, 25 bp, Homo sapien
tgcgggtccacgtacagtcccatgt

SEQ ID NO: 248885 - DNA, 25 bp, Homo sapien
aagcaggtactcctcgctttcgagc

SEQ ID NO: 248886 - DNA, 25 bp, Homo sapien
caaaagactgttgtgagaggaacgc

SEQ ID NO: 248887 - DNA, 25 bp, Homo sapien
ggagcaagctcgatctggtgtacct

SEQ ID NO: 248888 - DNA, 25 bp, Homo sapien
gacgaccacggatagaggtgcacat

SEQ ID NO: 248889 - DNA, 25 bp, Homo sapien
gaggattacgatcttctccctggga

SEQ ID NO: 248890 - DNA, 25 bp, Homo sapien
tctcatagcaaaggatcagccgttt

SEQ ID NO: 248891 - DNA, 25 bp, Homo sapien
tctcgggtgacctctatgacataga

SEQ ID NO: 248892 - DNA, 25 bp, Homo sapien
catctcgggtgacctctatgacata

SEQ ID NO: 248893 - DNA, 25 bp, Homo sapien
tgacatagagcccttcttctaggcc

SEQ ID NO: 248894 - DNA, 25 bp, Homo sapien
taggccgactgcaatcctgtctgca

SEQ ID NO: 248895 - DNA, 25 bp, Homo sapien
agatgggcactgcagcgccgccgga

SEQ ID NO: 248896 - DNA, 25 bp, Homo sapien
tgttgcttcagacacctgaaggaca

SEQ ID NO: 248897 - DNA, 25 bp, Homo sapien
cagcgccgccggaagtgctgttgct

SEQ ID NO: 248898 - DNA, 25 bp, Homo sapien
ctgttgcttcagacacctgaaggac

SEQ ID NO: 248899 - DNA, 25 bp, Homo sapien
cagcgagctggtcttagaaggtgca

SEQ ID NO: 248900 - DNA, 25 bp, Homo sapien
gcttccaagggaacatgcacgacct

SEQ ID NO: 248901 - DNA, 25 bp, Homo sapien
gcagcgagctgtcgtaggcttccaa

SEQ ID NO: 248902 - DNA, 25 bp, Homo sapien
ttttctgtcagaatgagcagcgagc

SEQ ID NO: 248903 - DNA, 25 bp, Homo sapien
ctgccacagcgcccgcctggcagtg

SEQ ID NO: 248904 - DNA, 25 bp, Homo sapien
cagcgcccgcctggcagtgcacacg

SEQ ID NO: 248905 - DNA, 25 bp, Homo sapien
cacagcgcccgcctggcagtgcaca

SEQ ID NO: 248906 - DNA, 25 bp, Homo sapien
gccacagcgcccgcctggcagtgca

SEQ ID NO: 248907 - DNA, 25 bp, Homo sapien
ggcgtgtagcatgaatgacatctga

SEQ ID NO: 248908 - DNA, 25 bp, Homo sapien
tgagctcacggaaaactcgtcatct

SEQ ID NO: 248909 - DNA, 25 bp, Homo sapien
atctgaggccaggactgagctcacg

SEQ ID NO: 248910 - DNA, 25 bp, Homo sapien
tacatggaatatctcggcgtgtagc

SEQ ID NO: 248911 - DNA, 25 bp, Homo sapien
atagctgaggaagattcacagagca

SEQ ID NO: 248912 - DNA, 25 bp, Homo sapien
gatagctgaggaagattcacagagc

SEQ ID NO: 248913 - DNA, 25 bp, Homo sapien
atccaagacttggctcgcaatgaca

SEQ ID NO: 248914 - DNA, 25 bp, Homo sapien
gatccaagacttggctcgcaatgac

SEQ ID NO: 248915 - DNA, 25 bp, Homo sapien
tccaagacttggctcgcaatgacac

SEQ ID NO: 248916 - DNA, 25 bp, Homo sapien
aggaagagcttgcagtcacagacga

SEQ ID NO: 248917 - DNA, 25 bp, Homo sapien
ggattttccttcaggcagatcatac

SEQ ID NO: 248918 - DNA, 25 bp, Homo sapien
ttttccttcaggcagatcatacagg

SEQ ID NO: 248919 - DNA, 25 bp, Homo sapien
agacgactgcatatgcgcgctgcca

SEQ ID NO: 248920 - DNA, 25 bp, Homo sapien
atgcctcgctgcacgtccacgccca

SEQ ID NO: 248921 - DNA, 25 bp, Homo sapien
gcctcttggactgctcgggaggtat

SEQ ID NO: 248922 - DNA, 25 bp, Homo sapien
ttgtaggctgttccgatgcctcgct

SEQ ID NO: 248923 - DNA, 25 bp, Homo sapien
cttgacatggcctttgtaggctgtt

SEQ ID NO: 248924 - DNA, 25 bp, Homo sapien
gcaggacacgtggcaagcaaaggaa

SEQ ID NO: 248925 - DNA, 25 bp, Homo sapien
gacacgtggcaagcaaaggaacaca

SEQ ID NO: 248926 - DNA, 25 bp, Homo sapien
ctttgcaggacacgtggcaagcaaa

SEQ ID NO: 248927 - DNA, 25 bp, Homo sapien
caggacacgtggcaagcaaaggaac

SEQ ID NO: 248928 - DNA, 25 bp, Homo sapien
tggctgcactgagtagggctggaga

SEQ ID NO: 248929 - DNA, 25 bp, Homo sapien
ctgcactgagtagggctggagaagg

SEQ ID NO: 248930 - DNA, 25 bp, Homo sapien
cgcaggcgtagccctgccggatcag

SEQ ID NO: 248931 - DNA, 25 bp, Homo sapien
gccggatcagcccaaccatcaggga

SEQ ID NO: 248932 - DNA, 25 bp, Homo sapien
gaaccatggactcttgagagtcaga

SEQ ID NO: 248933 - DNA, 25 bp, Homo sapien
gtttatacacagcttgggcattatc

SEQ ID NO: 248934 - DNA, 25 bp, Homo sapien
ctgaggtgaaccatggactcttgag

SEQ ID NO: 248935 - DNA, 25 bp, Homo sapien
agtttatacacagcttgggcattat

SEQ ID NO: 248936 - DNA, 25 bp, Homo sapien
tgcgtggtgggcaacggcacagcgg

SEQ ID NO: 248937 - DNA, 25 bp, Homo sapien
ggtgggcaacggcacagcggatggc

SEQ ID NO: 248938 - DNA, 25 bp, Homo sapien
ggcaacggcacagcggatggcctct

SEQ ID NO: 248939 - DNA, 25 bp, Homo sapien
aacggcacagcggatggcctctgcg

SEQ ID NO: 248940 - DNA, 25 bp, Homo sapien
tggacacgagggcagaccccaggtg

SEQ ID NO: 248941 - DNA, 25 bp, Homo sapien
gtttcttgctcactagctgagctgg

SEQ ID NO: 248942 - DNA, 25 bp, Homo sapien
tgatgcagccacagacatcgacggg

SEQ ID NO: 248943 - DNA, 25 bp, Homo sapien
catcgacggggacgcttctggcttc

SEQ ID NO: 248944 - DNA, 25 bp, Homo sapien
ctggcttcggagcttgtgtttcttg

SEQ ID NO: 248945 - DNA, 25 bp, Homo sapien
cagggaagatgcagacgaggaggag

SEQ ID NO: 248946 - DNA, 25 bp, Homo sapien
ttcttcccaaaaggctagcagggaa

SEQ ID NO: 248947 - DNA, 25 bp, Homo sapien
gctagcagggaagatgcagacgagg

SEQ ID NO: 248948 - DNA, 25 bp, Homo sapien
gatgcagacgaggaggagagagagt

SEQ ID NO: 248949 - DNA, 25 bp, Homo sapien
tgcaagaggagcagtgttgaaatac

SEQ ID NO: 248950 - DNA, 25 bp, Homo sapien
agaggagcagtgttgaaatactcaa

SEQ ID NO: 248951 - DNA, 25 bp, Homo sapien
catgtgcaagaggagcagtgttgaa

SEQ ID NO: 248952 - DNA, 25 bp, Homo sapien
tcatgtgcaagaggagcagtgttga

SEQ ID NO: 248953 - DNA, 25 bp, Homo sapien
gaattctgtaggtgcttctaaagta

SEQ ID NO: 248954 - DNA, 25 bp, Homo sapien
gaatttggaattctgtaggtgcttc

SEQ ID NO: 248955 - DNA, 25 bp, Homo sapien
tgctgattttggaaaatactgaatt

SEQ ID NO: 248956 - DNA, 25 bp, Homo sapien
aatatatttgaagatgttgtttgaa

SEQ ID NO: 248957 - DNA, 25 bp, Homo sapien
catttcttctaataattctctgttt

SEQ ID NO: 248958 - DNA, 25 bp, Homo sapien
ctctgtttttggcttcggaatcctt

SEQ ID NO: 248959 - DNA, 25 bp, Homo sapien
tcttctaataattctctgtttttgg

SEQ ID NO: 248960 - DNA, 25 bp, Homo sapien
ttctctgtttttggcttcggaatcc

SEQ ID NO: 248961 - DNA, 25 bp, Homo sapien
tctttcccataactggcaagatggt

SEQ ID NO: 248962 - DNA, 25 bp, Homo sapien
cgcacgggtagccttgcaattccag

SEQ ID NO: 248963 - DNA, 25 bp, Homo sapien
cataactggcaagatggtggctgca

SEQ ID NO: 248964 - DNA, 25 bp, Homo sapien
cacccgcacgggtagccttgcaatt

SEQ ID NO: 248965 - DNA, 25 bp, Homo sapien
tggagtcagaccctggcaccaagta

SEQ ID NO: 248966 - DNA, 25 bp, Homo sapien
ggagtcagaccctggcaccaagtac

SEQ ID NO: 248967 - DNA, 25 bp, Homo sapien
ctggagtcagaccctggcaccaagt

SEQ ID NO: 248968 - DNA, 25 bp, Homo sapien
caaggtgaggttggcgtccttgacc

SEQ ID NO: 248969 - DNA, 25 bp, Homo sapien
tcctggacaagctgcttggcccgga

SEQ ID NO: 248970 - DNA, 25 bp, Homo sapien
ccagccgcgcggacatgtccagctt

SEQ ID NO: 248971 - DNA, 25 bp, Homo sapien
ttccaaggtgaggttggcgtccttg

SEQ ID NO: 248972 - DNA, 25 bp, Homo sapien
tgcggcgcaccttccacagcgggtc

SEQ ID NO: 248973 - DNA, 25 bp, Homo sapien
ctgcggcgcaccttccacagcgggt

SEQ ID NO: 248974 - DNA, 25 bp, Homo sapien
gctgcggcgcaccttccacagcggg

SEQ ID NO: 248975 - DNA, 25 bp, Homo sapien
tggctgcggcgcaccttccacagcg

SEQ ID NO: 248976 - DNA, 25 bp, Homo sapien
gacatcaactttcgagaggtatcaa

SEQ ID NO: 248977 - DNA, 25 bp, Homo sapien
cgaatgaatgctgtcgagagaagcc

SEQ ID NO: 248978 - DNA, 25 bp, Homo sapien
cagagtgacctaggatgaagcaaca

SEQ ID NO: 248979 - DNA, 25 bp, Homo sapien
gttttgctatttcaccatcctggga

SEQ ID NO: 248980 - DNA, 25 bp, Homo sapien
gctcttcggtcatcttggaagcaag

SEQ ID NO: 248981 - DNA, 25 bp, Homo sapien
gtaaccccgggcatctttctcgtca

SEQ ID NO: 248982 - DNA, 25 bp, Homo sapien
gaactcctcaaagcctcgagctctt

SEQ ID NO: 248983 - DNA, 25 bp, Homo sapien
agagcttgaaggtaaccccgggcat

SEQ ID NO: 248984 - DNA, 25 bp, Homo sapien
ttacaacttcacaccttaggagcgg

SEQ ID NO: 248985 - DNA, 25 bp, Homo sapien
tatctcacgaagcatggctatcagg

SEQ ID NO: 248986 - DNA, 25 bp, Homo sapien
cagtgtcacgtcagctagagtgccc

SEQ ID NO: 248987 - DNA, 25 bp, Homo sapien
gatggatgcgtcgttacattgcaca

SEQ ID NO: 248988 - DNA, 25 bp, Homo sapien
atgatttccgcaatctgagcttccc

SEQ ID NO: 248989 - DNA, 25 bp, Homo sapien
gaatgatttccgcaatctgagcttc

SEQ ID NO: 248990 - DNA, 25 bp, Homo sapien
cactgaatgatttccgcaatctgag

SEQ ID NO: 248991 - DNA, 25 bp, Homo sapien
gcttcccagtgggccactgactcct

SEQ ID NO: 248992 - DNA, 25 bp, Homo sapien
cacagaacttgttaatcgggcatcc

SEQ ID NO: 248993 - DNA, 25 bp, Homo sapien
cataccatgttgctgtgcgggacgc

SEQ ID NO: 248994 - DNA, 25 bp, Homo sapien
cagtattatgatcgtacgggacgcc

SEQ ID NO: 248995 - DNA, 25 bp, Homo sapien
tctaaacctaaactgatggagctgg

SEQ ID NO: 248996 - DNA, 25 bp, Homo sapien
tatcttttattgtacctactgcctc

SEQ ID NO: 248997 - DNA, 25 bp, Homo sapien
cgctctttctcgttcgtatttatct

SEQ ID NO: 248998 - DNA, 25 bp, Homo sapien
tcttttattgtacctactgcctcct

SEQ ID NO: 248999 - DNA, 25 bp, Homo sapien
ttcagcagttagcttcttgttttca

SEQ ID NO: 249000 - DNA, 25 bp, Homo sapien
ttttaaaagctcgtaacttcactga

SEQ ID NO: 249001 - DNA, 25 bp, Homo sapien
tcagcttgcatcttctgaactgaga

SEQ ID NO: 249002 - DNA, 25 bp, Homo sapien
tctatggcgtgggtatcagcttgca

SEQ ID NO: 249003 - DNA, 25 bp, Homo sapien
ccaaggtgagcgagaaacagtttta

SEQ ID NO: 249004 - DNA, 25 bp, Homo sapien
atgggaggcctcacgtctgaccaat

SEQ ID NO: 249005 - DNA, 25 bp, Homo sapien
agatttctttctgcagggccagctg

SEQ ID NO: 249006 - DNA, 25 bp, Homo sapien
cagctggtggctttctgaatcatgc

SEQ ID NO: 249007 - DNA, 25 bp, Homo sapien
tttttcacttctagcacatgggagg

SEQ ID NO: 249008 - DNA, 25 bp, Homo sapien
tacaccagatgacgtagctgacctg

SEQ ID NO: 249009 - DNA, 25 bp, Homo sapien
caaggactgtgtgtgcctggtctac

SEQ ID NO: 249010 - DNA, 25 bp, Homo sapien
aatgtgatccggctttggtctgcca

SEQ ID NO: 249011 - DNA, 25 bp, Homo sapien
ggctaacgtgatccaggttctaggg

SEQ ID NO: 249012 - DNA, 25 bp, Homo sapien
gctcacgaagcttgcgctccttgga

SEQ ID NO: 249013 - DNA, 25 bp, Homo sapien
agaagttctcgctgtgctcacgaag

SEQ ID NO: 249014 - DNA, 25 bp, Homo sapien
gagggcctccagctcgctttccatt

SEQ ID NO: 249015 - DNA, 25 bp, Homo sapien
tcgctgtgctcacgaagcttgcgct

SEQ ID NO: 249016 - DNA, 25 bp, Homo sapien
catgcgctcgttcagctccgagaac

SEQ ID NO: 249017 - DNA, 25 bp, Homo sapien
atttcaaccgctctgaggcttcaac

SEQ ID NO: 249018 - DNA, 25 bp, Homo sapien
acggagctctgccatgcgctcgttc

SEQ ID NO: 249019 - DNA, 25 bp, Homo sapien
atttcctgccgcatggcgtccacct

SEQ ID NO: 249020 - DNA, 25 bp, Homo sapien
ctgaacaaaaacaattatagatgtt

SEQ ID NO: 249021 - DNA, 25 bp, Homo sapien
tagatgttttacgtttgcctaacaa

SEQ ID NO: 249022 - DNA, 25 bp, Homo sapien
cgtttgcctaacaaaggcttggaag

SEQ ID NO: 249023 - DNA, 25 bp, Homo sapien
attatagatgttttacgtttgccta

SEQ ID NO: 249024 - DNA, 25 bp, Homo sapien
gaggagttaaaagcgacagccaatg

SEQ ID NO: 249025 - DNA, 25 bp, Homo sapien
ctggaggttcggtcttccatgatat

SEQ ID NO: 249026 - DNA, 25 bp, Homo sapien
cggtcttccatgatattgaggagtt

SEQ ID NO: 249027 - DNA, 25 bp, Homo sapien
ttgaggagttaaaagcgacagccaa

SEQ ID NO: 249028 - DNA, 25 bp, Homo sapien
gctcttggcgaagcgccactgtgtc

SEQ ID NO: 249029 - DNA, 25 bp, Homo sapien
tgccggaccacgcggtgctgcttct

SEQ ID NO: 249030 - DNA, 25 bp, Homo sapien
gcagccgctgcgtggagtcctcacg

SEQ ID NO: 249031 - DNA, 25 bp, Homo sapien
tgtgtcctcaagctgtcgctcgagc

SEQ ID NO: 249032 - DNA, 25 bp, Homo sapien
tctcggtttgaattgctgagggccc

SEQ ID NO: 249033 - DNA, 25 bp, Homo sapien
ctgagggcccgagatgagccgtgga

SEQ ID NO: 249034 - DNA, 25 bp, Homo sapien
tattcttcaagcgttcgatttcttc

SEQ ID NO: 249035 - DNA, 25 bp, Homo sapien
gagatgagccgtggagggactgcac

SEQ ID NO: 249036 - DNA, 25 bp, Homo sapien
tgcacatcctcatctttggttaatg

SEQ ID NO: 249037 - DNA, 25 bp, Homo sapien
cctgttccagcctccgaatcctcct

SEQ ID NO: 249038 - DNA, 25 bp, Homo sapien
ttaatgtgttggactgcattatgct

SEQ ID NO: 249039 - DNA, 25 bp, Homo sapien
gaatcctcctctcgtaagcttccat

SEQ ID NO: 249040 - DNA, 25 bp, Homo sapien
ttcagagagcctcgatcagaaaaac

SEQ ID NO: 249041 - DNA, 25 bp, Homo sapien
cagagagcctcgatcagaaaaacag

SEQ ID NO: 249042 - DNA, 25 bp, Homo sapien
tcagagagcctcgatcagaaaaaca

SEQ ID NO: 249043 - DNA, 25 bp, Homo sapien
aatgaatggcaaatgtaatccagaa

SEQ ID NO: 249044 - DNA, 25 bp, Homo sapien
ttccgttgtgaatgtaaaaccaatg

SEQ ID NO: 249045 - DNA, 25 bp, Homo sapien
ccaatgaatggcaaatgtaatccag

SEQ ID NO: 249046 - DNA, 25 bp, Homo sapien
tgaatggcaaatgtaatccagaaaa

SEQ ID NO: 249047 - DNA, 25 bp, Homo sapien
agacacactctgatttcgatgatga

SEQ ID NO: 249048 - DNA, 25 bp, Homo sapien
gagacacactctgatttcgatgatg

SEQ ID NO: 249049 - DNA, 25 bp, Homo sapien
ggccgtcaccaggttagtgattttc

SEQ ID NO: 249050 - DNA, 25 bp, Homo sapien
gcacaggccgtcaccaggttagtga

SEQ ID NO: 249051 - DNA, 25 bp, Homo sapien
ttcatagtttctaagaacctctgct

SEQ ID NO: 249052 - DNA, 25 bp, Homo sapien
gatgatgcttcggtgtaagaaactc

SEQ ID NO: 249053 - DNA, 25 bp, Homo sapien
ctactaggagtttccccaggttcat

SEQ ID NO: 249054 - DNA, 25 bp, Homo sapien
gggatgaaacatacagagtgaatga

SEQ ID NO: 249055 - DNA, 25 bp, Homo sapien
caaccctgagaacggtgctttcaca

SEQ ID NO: 249056 - DNA, 25 bp, Homo sapien
ccctgagaacggtgctttcacactc

SEQ ID NO: 249057 - DNA, 25 bp, Homo sapien
agcaaccctgagaacggtgctttca

SEQ ID NO: 249058 - DNA, 25 bp, Homo sapien
gccagcaaccctgagaacggtgctt

SEQ ID NO: 249059 - DNA, 25 bp, Homo sapien
gctcacatcaggaatataaggtgct

SEQ ID NO: 249060 - DNA, 25 bp, Homo sapien
ggatgaggtccttcgcttcttcaga

SEQ ID NO: 249061 - DNA, 25 bp, Homo sapien
tttagaccttcaaaaaacgcatgct

SEQ ID NO: 249062 - DNA, 25 bp, Homo sapien
tcttcagatacatccgtgacatggg

SEQ ID NO: 249063 - DNA, 25 bp, Homo sapien
gcaaaaacaccggtggacaggtgga

SEQ ID NO: 249064 - DNA, 25 bp, Homo sapien
tggcaaaaacaccggtggacaggtg

SEQ ID NO: 249065 - DNA, 25 bp, Homo sapien
aaacaccggtggacaggtggacgca

SEQ ID NO: 249066 - DNA, 25 bp, Homo sapien
aacaccggtggacaggtggacgcat

SEQ ID NO: 249067 - DNA, 25 bp, Homo sapien
tctccggcgagatgtagtcaggtgt

SEQ ID NO: 249068 - DNA, 25 bp, Homo sapien
taaaacggcgtttctccatagagca

SEQ ID NO: 249069 - DNA, 25 bp, Homo sapien
cagtcacactcaggcccgtatttgc

SEQ ID NO: 249070 - DNA, 25 bp, Homo sapien
ccataggtctccacgagtgactccg

SEQ ID NO: 249071 - DNA, 25 bp, Homo sapien
tcttaattgtacctcaaattgaaaa

SEQ ID NO: 249072 - DNA, 25 bp, Homo sapien
ttcttaattgtacctcaaattgaaa

SEQ ID NO: 249073 - DNA, 25 bp, Homo sapien
tatgaccattcacgtccaaaaggac

SEQ ID NO: 249074 - DNA, 25 bp, Homo sapien
cagccaggcggatatgaccattcac

SEQ ID NO: 249075 - DNA, 25 bp, Homo sapien
gtcagccaggcggatatgaccattc

SEQ ID NO: 249076 - DNA, 25 bp, Homo sapien
tccaaaaggacattgtcaggtttaa

SEQ ID NO: 249077 - DNA, 25 bp, Homo sapien
ccaggggccatttgcacgcactggg

SEQ ID NO: 249078 - DNA, 25 bp, Homo sapien
gccatttgcacgcactgggggtcat

SEQ ID NO: 249079 - DNA, 25 bp, Homo sapien
ttccaggggccatttgcacgcactg

SEQ ID NO: 249080 - DNA, 25 bp, Homo sapien
tttgcacgcactgggggtcatctgc

SEQ ID NO: 249081 - DNA, 25 bp, Homo sapien
ctcccacttccatccgttccccttg

SEQ ID NO: 249082 - DNA, 25 bp, Homo sapien
ccacttccatccgttccccttgtgg

SEQ ID NO: 249083 - DNA, 25 bp, Homo sapien
cacttccatccgttccccttgtgga

SEQ ID NO: 249084 - DNA, 25 bp, Homo sapien
ctgtgaggggcacccacagggtcct

SEQ ID NO: 249085 - DNA, 25 bp, Homo sapien
ctgatttcctcacccggaaggcttt

SEQ ID NO: 249086 - DNA, 25 bp, Homo sapien
cagggtcctggtctgccactgattt

SEQ ID NO: 249087 - DNA, 25 bp, Homo sapien
tgccactgatttcctcacccggaag

SEQ ID NO: 249088 - DNA, 25 bp, Homo sapien
gaacctcgccatatcttccggaagc

SEQ ID NO: 249089 - DNA, 25 bp, Homo sapien
cgtaatgaagctgatggatggagtc

SEQ ID NO: 249090 - DNA, 25 bp, Homo sapien
tttcaccaatgtagaacctcgccat

SEQ ID NO: 249091 - DNA, 25 bp, Homo sapien
tgagcagggtcagtaaatcaccacc

SEQ ID NO: 249092 - DNA, 25 bp, Homo sapien
caaagcggctaggaggaaagtggca

SEQ ID NO: 249093 - DNA, 25 bp, Homo sapien
ctccagatgaaggggtgcgtgcaaa

SEQ ID NO: 249094 - DNA, 25 bp, Homo sapien
gccagaggttgccaagcagaggcct

SEQ ID NO: 249095 - DNA, 25 bp, Homo sapien
gggggcgggagagaccgtggccagc

SEQ ID NO: 249096 - DNA, 25 bp, Homo sapien
cggtctcctggagcatggtctctga

SEQ ID NO: 249097 - DNA, 25 bp, Homo sapien
tctgccgagaactctaagaggagga

SEQ ID NO: 249098 - DNA, 25 bp, Homo sapien
tccacgtctgccgagaactctaaga

SEQ ID NO: 249099 - DNA, 25 bp, Homo sapien
gcactgggtctgatcaacggtctcc

SEQ ID NO: 249100 - DNA, 25 bp, Homo sapien
agcacatcgcgctcctctcggaagc

SEQ ID NO: 249101 - DNA, 25 bp, Homo sapien
aggtggttctcgtcctgaaaggcgt

SEQ ID NO: 249102 - DNA, 25 bp, Homo sapien
aggcgtagtgcagcgcggtgatcca

SEQ ID NO: 249103 - DNA, 25 bp, Homo sapien
atccactggcagtcgccgttcacca

SEQ ID NO: 249104 - DNA, 25 bp, Homo sapien
aacgaggggtgtcagtctgtgttca

SEQ ID NO: 249105 - DNA, 25 bp, Homo sapien
tgcaaagcaacgaggggtgtcagtc

SEQ ID NO: 249106 - DNA, 25 bp, Homo sapien
gcaaagcaacgaggggtgtcagtct

SEQ ID NO: 249107 - DNA, 25 bp, Homo sapien
agcaacgaggggtgtcagtctgtgt

SEQ ID NO: 249108 - DNA, 25 bp, Homo sapien
cagaaggcgcacacgtttgctgaaa

SEQ ID NO: 249109 - DNA, 25 bp, Homo sapien
gccaagtatcgatggcatgggcagc

SEQ ID NO: 249110 - DNA, 25 bp, Homo sapien
tatacccactactgagctgctgtgc

SEQ ID NO: 249111 - DNA, 25 bp, Homo sapien
ttgtcacagattccactagggaggc

SEQ ID NO: 249112 - DNA, 25 bp, Homo sapien
atggcttttcaagctccatacttac

SEQ ID NO: 249113 - DNA, 25 bp, Homo sapien
tgtatggcttttcaagctccatact

SEQ ID NO: 249114 - DNA, 25 bp, Homo sapien
tttgtatggcttttcaagctccata

SEQ ID NO: 249115 - DNA, 25 bp, Homo sapien
tatggcttttcaagctccatactta

SEQ ID NO: 249116 - DNA, 25 bp, Homo sapien
tattcttcattttgacaacagcaac

SEQ ID NO: 249117 - DNA, 25 bp, Homo sapien
ttcattgcataaattcgttcagtat

SEQ ID NO: 249118 - DNA, 25 bp, Homo sapien
gcataaattcgttcagtattcttca

SEQ ID NO: 249119 - DNA, 25 bp, Homo sapien
gcatctcccacttgttgaggatttt

SEQ ID NO: 249120 - DNA, 25 bp, Homo sapien
caaatgtgagttgaacaaagatgcg

SEQ ID NO: 249121 - DNA, 25 bp, Homo sapien
atgtgagttgaacaaagatgcggtt

SEQ ID NO: 249122 - DNA, 25 bp, Homo sapien
ctgcagtgcaaatgtgagttgaaca

SEQ ID NO: 249123 - DNA, 25 bp, Homo sapien
gcagtgcaaatgtgagttgaacaaa

SEQ ID NO: 249124 - DNA, 25 bp, Homo sapien
tggcaagcagccagcatgtccccgt

SEQ ID NO: 249125 - DNA, 25 bp, Homo sapien
tgccaatggcaagcagccagcatgt

SEQ ID NO: 249126 - DNA, 25 bp, Homo sapien
cttctggctgccaatggcaagcagc

SEQ ID NO: 249127 - DNA, 25 bp, Homo sapien
agcagccagcatgtccccgtgcctg

SEQ ID NO: 249128 - DNA, 25 bp, Homo sapien
gaaaacagctgctattcgaccctct

SEQ ID NO: 249129 - DNA, 25 bp, Homo sapien
agccccatacaagggacctggtgag

SEQ ID NO: 249130 - DNA, 25 bp, Homo sapien
acaccgcgtgtgtcaacagcaagca

SEQ ID NO: 249131 - DNA, 25 bp, Homo sapien
tagaaactacgtcagaaggctgggc

SEQ ID NO: 249132 - DNA, 25 bp, Homo sapien
caaagtcttctcgatgaagctgcat

SEQ ID NO: 249133 - DNA, 25 bp, Homo sapien
agtcttctcgatgaagctgcatttc

SEQ ID NO: 249134 - DNA, 25 bp, Homo sapien
tcaaagtcttctcgatgaagctgca

SEQ ID NO: 249135 - DNA, 25 bp, Homo sapien
ttctcgatgaagctgcatttctttc

SEQ ID NO: 249136 - DNA, 25 bp, Homo sapien
acctaggcgccggaggttacaatga

SEQ ID NO: 249137 - DNA, 25 bp, Homo sapien
tgaacacctatcgagagagcaactg

SEQ ID NO: 249138 - DNA, 25 bp, Homo sapien
gtgttcggaactgtcgcacgctgca

SEQ ID NO: 249139 - DNA, 25 bp, Homo sapien
cacaggtgtgtaacccaggagcagt

SEQ ID NO: 249140 - DNA, 25 bp, Homo sapien
cggctgacgcagctacggaagatta

SEQ ID NO: 249141 - DNA, 25 bp, Homo sapien
ggttcagacggctgacgcagctacg

SEQ ID NO: 249142 - DNA, 25 bp, Homo sapien
tcagacggctgacgcagctacggaa

SEQ ID NO: 249143 - DNA, 25 bp, Homo sapien
ctgacgcagctacggaagattagta

SEQ ID NO: 249144 - DNA, 25 bp, Homo sapien
actcgtcaactgatccagctgttag

SEQ ID NO: 249145 - DNA, 25 bp, Homo sapien
tcttggcatagacggaaagctggcc

SEQ ID NO: 249146 - DNA, 25 bp, Homo sapien
cgggtgctcacatcacactcgtcaa

SEQ ID NO: 249147 - DNA, 25 bp, Homo sapien
cacgcccgggagatgtttgaaatca

SEQ ID NO: 249148 - DNA, 25 bp, Homo sapien
cagaggtatttaagatcacgcacag

SEQ ID NO: 249149 - DNA, 25 bp, Homo sapien
tgcagattttgcagctcgccaaaca

SEQ ID NO: 249150 - DNA, 25 bp, Homo sapien
tcacgcacagatcaattttcaaaga

SEQ ID NO: 249151 - DNA, 25 bp, Homo sapien
cttttattaagtcaactactggtat

SEQ ID NO: 249152 - DNA, 25 bp, Homo sapien
caggacaggaaggacgacgtgacag

SEQ ID NO: 249153 - DNA, 25 bp, Homo sapien
gaaggacgacgtgacagccaggaag

SEQ ID NO: 249154 - DNA, 25 bp, Homo sapien
acaggaaggacgacgtgacagccag

SEQ ID NO: 249155 - DNA, 25 bp, Homo sapien
ggacaggaaggacgacgtgacagcc

SEQ ID NO: 249156 - DNA, 25 bp, Homo sapien
tcctggaaggcctcggacttgtctc

SEQ ID NO: 249157 - DNA, 25 bp, Homo sapien
gaaggcctcggacttgtctctgttt

SEQ ID NO: 249158 - DNA, 25 bp, Homo sapien
tggaaggcctcggacttgtctctgt

SEQ ID NO: 249159 - DNA, 25 bp, Homo sapien
aggcctcggacttgtctctgtttaa

SEQ ID NO: 249160 - DNA, 25 bp, Homo sapien
taacagagtccgtcctaacttactc

SEQ ID NO: 249161 - DNA, 25 bp, Homo sapien
tggcctctagagttctgtaacagag

SEQ ID NO: 249162 - DNA, 25 bp, Homo sapien
ggctctctaacccttgagactgaga

SEQ ID NO: 249163 - DNA, 25 bp, Homo sapien
gacagaaaggagccccaatgctctg

SEQ ID NO: 249164 - DNA, 25 bp, Homo sapien
tctacaggcatatggtctcaaaact

SEQ ID NO: 249165 - DNA, 25 bp, Homo sapien
tatttgacagacttgagaaggcagg

SEQ ID NO: 249166 - DNA, 25 bp, Homo sapien
tgaacatctacatatgggtcaggga

SEQ ID NO: 249167 - DNA, 25 bp, Homo sapien
taccagctgctcctaatgtcatgat

SEQ ID NO: 249168 - DNA, 25 bp, Homo sapien
tgaattatctgagtccaactgccaa

SEQ ID NO: 249169 - DNA, 25 bp, Homo sapien
tcaatatgtcaggaatactatggtg

SEQ ID NO: 249170 - DNA, 25 bp, Homo sapien
catagatcctgagatcagcagagtt

SEQ ID NO: 249171 - DNA, 25 bp, Homo sapien
cagcagggttcttaacaactgtcca

SEQ ID NO: 249172 - DNA, 25 bp, Homo sapien
tgcccgacaggagtgaccagtagtc

SEQ ID NO: 249173 - DNA, 25 bp, Homo sapien
acaggagtgaccagtagtcgcccat

SEQ ID NO: 249174 - DNA, 25 bp, Homo sapien
cttgcccgacaggagtgaccagtag

SEQ ID NO: 249175 - DNA, 25 bp, Homo sapien
ccgacaggagtgaccagtagtcgcc

SEQ ID NO: 249176 - DNA, 25 bp, Homo sapien
tcagtattataaaaacgccggcatg

SEQ ID NO: 249177 - DNA, 25 bp, Homo sapien
aaaggacatctagctttgtgcagtc

SEQ ID NO: 249178 - DNA, 25 bp, Homo sapien
tacccttttcaccagatgcctagag

SEQ ID NO: 249179 - DNA, 25 bp, Homo sapien
tgcctagagatgagacactaaaatc

SEQ ID NO: 249180 - DNA, 25 bp, Homo sapien
ggtaataacgcacttctcggcctct

SEQ ID NO: 249181 - DNA, 25 bp, Homo sapien
ggcctggagaagcaacacgtatttc

SEQ ID NO: 249182 - DNA, 25 bp, Homo sapien
agagtgacagatccaacctctcatg

SEQ ID NO: 249183 - DNA, 25 bp, Homo sapien
ggaatatactttaccactgcaacat

SEQ ID NO: 249184 - DNA, 25 bp, Homo sapien
tcaccagagtttcggagagaagcct

SEQ ID NO: 249185 - DNA, 25 bp, Homo sapien
gagcatccgcttcaagtctgtggga

SEQ ID NO: 249186 - DNA, 25 bp, Homo sapien
tggcagtggccctcaaattggcagg

SEQ ID NO: 249187 - DNA, 25 bp, Homo sapien
tatgcatacagggagtttccaatcg

SEQ ID NO: 249188 - DNA, 25 bp, Homo sapien
gaggatgttacaaaaaggaatactg

SEQ ID NO: 249189 - DNA, 25 bp, Homo sapien
agaggatgttacaaaaaggaatact

SEQ ID NO: 249190 - DNA, 25 bp, Homo sapien
aggttcctgtgagctcagatcacgc

SEQ ID NO: 249191 - DNA, 25 bp, Homo sapien
gaggttcctgtgagctcagatcacg

SEQ ID NO: 249192 - DNA, 25 bp, Homo sapien
cggaggttcctgtgagctcagatca

SEQ ID NO: 249193 - DNA, 25 bp, Homo sapien
gttcctgtgagctcagatcacgcca

SEQ ID NO: 249194 - DNA, 25 bp, Homo sapien
caagcgtcccaatcaaaaagaccca

SEQ ID NO: 249195 - DNA, 25 bp, Homo sapien
atcaacaaaagttccccagagctga

SEQ ID NO: 249196 - DNA, 25 bp, Homo sapien
gctgaaggacccaagcgtcccaatc

SEQ ID NO: 249197 - DNA, 25 bp, Homo sapien
tacagtattatcaacaaaagttccc

SEQ ID NO: 249198 - DNA, 25 bp, Homo sapien
attctgtacgcaggcaaagtgccat

SEQ ID NO: 249199 - DNA, 25 bp, Homo sapien
gaattctgtacgcaggcaaagtgcc

SEQ ID NO: 249200 - DNA, 25 bp, Homo sapien
tagaattctgtacgcaggcaaagtg

SEQ ID NO: 249201 - DNA, 25 bp, Homo sapien
cctagaattctgtacgcaggcaaag

SEQ ID NO: 249202 - DNA, 25 bp, Homo sapien
gatgcgtcttttggggtcaatttca

SEQ ID NO: 249203 - DNA, 25 bp, Homo sapien
gctaagattagatgcgtcttttggg

SEQ ID NO: 249204 - DNA, 25 bp, Homo sapien
tctaaagctaagattagatgcgtct

SEQ ID NO: 249205 - DNA, 25 bp, Homo sapien
ccttaacttctaaagctaagattag

SEQ ID NO: 249206 - DNA, 25 bp, Homo sapien
ttacttattaaattcggtggcatca

SEQ ID NO: 249207 - DNA, 25 bp, Homo sapien
gggctggccattcccacactaacag

SEQ ID NO: 249208 - DNA, 25 bp, Homo sapien
atcccactcacaccttgggctggcc

SEQ ID NO: 249209 - DNA, 25 bp, Homo sapien
tattaaattcggtggcatcatccca

SEQ ID NO: 249210 - DNA, 25 bp, Homo sapien
gggacgatcgaacgcggatgtcgag

SEQ ID NO: 249211 - DNA, 25 bp, Homo sapien
tgggagtgggaacgtaggatgtggc

SEQ ID NO: 249212 - DNA, 25 bp, Homo sapien
ctaggaagccgccagggcgagggcc

SEQ ID NO: 249213 - DNA, 25 bp, Homo sapien
ggaacgtaggatgtggctccaaggg

SEQ ID NO: 249214 - DNA, 25 bp, Homo sapien
acgagcacgtcgagcagcgtttcca

SEQ ID NO: 249215 - DNA, 25 bp, Homo sapien
tttccacgctcagggcgctctcgtt

SEQ ID NO: 249216 - DNA, 25 bp, Homo sapien
cactcgaggaactcggccacgtact

SEQ ID NO: 249217 - DNA, 25 bp, Homo sapien
tcggtgtacaggcagacgagcacgt

SEQ ID NO: 249218 - DNA, 25 bp, Homo sapien
ccgcgcggcccgctcccgacgcgcc

SEQ ID NO: 249219 - DNA, 25 bp, Homo sapien
ggtgccgcgcggcccgctcccgacg

SEQ ID NO: 249220 - DNA, 25 bp, Homo sapien
cgcgcggcccgctcccgacgcgccg

SEQ ID NO: 249221 - DNA, 25 bp, Homo sapien
tgccgcgcggcccgctcccgacgcg

SEQ ID NO: 249222 - DNA, 25 bp, Homo sapien
ccggcctaggccgacatcttgggct

SEQ ID NO: 249223 - DNA, 25 bp, Homo sapien
ccgcgggtccatgggccgctctcct

SEQ ID NO: 249224 - DNA, 25 bp, Homo sapien
ctcggccagtccgtcagggcgcgcc

SEQ ID NO: 249225 - DNA, 25 bp, Homo sapien
gccgcagactaggagcggcgaggag

SEQ ID NO: 249226 - DNA, 25 bp, Homo sapien
cccggtggattcgtgatggcttgca

SEQ ID NO: 249227 - DNA, 25 bp, Homo sapien
tagcgagtcgctgcatttactaaga

SEQ ID NO: 249228 - DNA, 25 bp, Homo sapien
caacaaacccttggcgtcaggagag

SEQ ID NO: 249229 - DNA, 25 bp, Homo sapien
tacccctgactttaccgatgagaga

SEQ ID NO: 249230 - DNA, 25 bp, Homo sapien
ctggagctaaaaataggagtgggcc

SEQ ID NO: 249231 - DNA, 25 bp, Homo sapien
tggagctaaaaataggagtgggcct

SEQ ID NO: 249232 - DNA, 25 bp, Homo sapien
agctaaaaataggagtgggcctggc

SEQ ID NO: 249233 - DNA, 25 bp, Homo sapien
ctaaaaataggagtgggcctggcgc

SEQ ID NO: 249234 - DNA, 25 bp, Homo sapien
agacccgtagcttgctgctccttgc

SEQ ID NO: 249235 - DNA, 25 bp, Homo sapien
gcagacccgtagcttgctgctcctt

SEQ ID NO: 249236 - DNA, 25 bp, Homo sapien
tgcagacccgtagcttgctgctcct

SEQ ID NO: 249237 - DNA, 25 bp, Homo sapien
cagacccgtagcttgctgctccttg

SEQ ID NO: 249238 - DNA, 25 bp, Homo sapien
accacattgaaggtcaagggcgtgg

SEQ ID NO: 249239 - DNA, 25 bp, Homo sapien
gactctgcggcacttctgaagggtg

SEQ ID NO: 249240 - DNA, 25 bp, Homo sapien
tccctgcccggcatggaggagtccc

SEQ ID NO: 249241 - DNA, 25 bp, Homo sapien
gccattggttcctagggtttcctgc

SEQ ID NO: 249242 - DNA, 25 bp, Homo sapien
gagacgccctgtgggtcggggagag

SEQ ID NO: 249243 - DNA, 25 bp, Homo sapien
cctgtgggtcggggagagggctcac

SEQ ID NO: 249244 - DNA, 25 bp, Homo sapien
ctgagacgccctgtgggtcggggag

SEQ ID NO: 249245 - DNA, 25 bp, Homo sapien
gccctgtgggtcggggagagggctc

SEQ ID NO: 249246 - DNA, 25 bp, Homo sapien
gacctccgtgacctccagtgcctcc

SEQ ID NO: 249247 - DNA, 25 bp, Homo sapien
aggccagcgtgagattctgcactga

SEQ ID NO: 249248 - DNA, 25 bp, Homo sapien
cacaccccaggtctccatcagtcac

SEQ ID NO: 249249 - DNA, 25 bp, Homo sapien
tgagaggccagcgtgagattctgca

SEQ ID NO: 249250 - DNA, 25 bp, Homo sapien
gattctgcactgagcgggggtaggg

SEQ ID NO: 249251 - DNA, 25 bp, Homo sapien
agcggctgccctcaatcgtggtgga

SEQ ID NO: 249252 - DNA, 25 bp, Homo sapien
cccgccttggagtctctgcctgaga

SEQ ID NO: 249253 - DNA, 25 bp, Homo sapien
gactctaggtgctgcctggccttaa

SEQ ID NO: 249254 - DNA, 25 bp, Homo sapien
gaagtggccactgccagggtcagaa

SEQ ID NO: 249255 - DNA, 25 bp, Homo sapien
tgactctccagttgggcggctgaaa

SEQ ID NO: 249256 - DNA, 25 bp, Homo sapien
catggacgtccatatggtgcggccc

SEQ ID NO: 249257 - DNA, 25 bp, Homo sapien
cttccgttagatgggagcctgaggc

SEQ ID NO: 249258 - DNA, 25 bp, Homo sapien
cacacggtggcgatttccagaacga

SEQ ID NO: 249259 - DNA, 25 bp, Homo sapien
acgaaaggtagaatggcggttgcca

SEQ ID NO: 249260 - DNA, 25 bp, Homo sapien
tacatagaatagtcaagaccacaga

SEQ ID NO: 249261 - DNA, 25 bp, Homo sapien
cacagagacgaaaggtagaatggcg

SEQ ID NO: 249262 - DNA, 25 bp, Homo sapien
gactctatttatttgcagtacatag

SEQ ID NO: 249263 - DNA, 25 bp, Homo sapien
ccgttttgccaggtgacgatttctg

SEQ ID NO: 249264 - DNA, 25 bp, Homo sapien
ccaggtgacgatttctgcaggtgga

SEQ ID NO: 249265 - DNA, 25 bp, Homo sapien
catagtgggtagagtttccgttttg

SEQ ID NO: 249266 - DNA, 25 bp, Homo sapien
tagagtttccgttttgccaggtgac

SEQ ID NO: 249267 - DNA, 25 bp, Homo sapien
tttaaacagtcagctgtcattgctc

SEQ ID NO: 249268 - DNA, 25 bp, Homo sapien
gtgctggcacactcgccttctaggc

SEQ ID NO: 249269 - DNA, 25 bp, Homo sapien
cctgggttgcgtgcgaggagctgac

SEQ ID NO: 249270 - DNA, 25 bp, Homo sapien
tcccatgtgtcgtagcctctgaggc

SEQ ID NO: 249271 - DNA, 25 bp, Homo sapien
agtgggagtcccataggcctggcta

SEQ ID NO: 249272 - DNA, 25 bp, Homo sapien
aggcctgcgctgaatgggcaaagcc

SEQ ID NO: 249273 - DNA, 25 bp, Homo sapien
gcaaagccgggttgatgatccagac

SEQ ID NO: 249274 - DNA, 25 bp, Homo sapien
cactccgctacttaaagtggtgtga

SEQ ID NO: 249275 - DNA, 25 bp, Homo sapien
gggctcaaggccctgtgcacagccg

SEQ ID NO: 249276 - DNA, 25 bp, Homo sapien
agcactctggccagccttgtagccc

SEQ ID NO: 249277 - DNA, 25 bp, Homo sapien
tcaagcaaggcttgacgaccggagg

SEQ ID NO: 249278 - DNA, 25 bp, Homo sapien
ttacgcatttcaagcaaggcttgac

SEQ ID NO: 249279 - DNA, 25 bp, Homo sapien
aggtccccgagagcgtctttctgca

SEQ ID NO: 249280 - DNA, 25 bp, Homo sapien
agttcgagctgtgcgagcgcgacac

SEQ ID NO: 249281 - DNA, 25 bp, Homo sapien
tcgtggcggcctacgccgagagcta

SEQ ID NO: 249282 - DNA, 25 bp, Homo sapien
gagagctaccaccagcacttcgcgg

SEQ ID NO: 249283 - DNA, 25 bp, Homo sapien
tcgctctaccccaggaaaatgtgag

SEQ ID NO: 249284 - DNA, 25 bp, Homo sapien
gaagtggccggtataaaggatgccc

SEQ ID NO: 249285 - DNA, 25 bp, Homo sapien
caggtactgccttacaaagctgtgg

SEQ ID NO: 249286 - DNA, 25 bp, Homo sapien
ttatgatcacattgcgcctacccag

SEQ ID NO: 249287 - DNA, 25 bp, Homo sapien
ggcctctccgcagccaatctggcct

SEQ ID NO: 249288 - DNA, 25 bp, Homo sapien
gtctggtttgtattcagagacgggc

SEQ ID NO: 249289 - DNA, 25 bp, Homo sapien
gggctcagctgccacggaagggtgg

SEQ ID NO: 249290 - DNA, 25 bp, Homo sapien
gaggtctggtttgtattcagagacg

SEQ ID NO: 249291 - DNA, 25 bp, Homo sapien
ctgaagaggggtgtgggcttcagca

SEQ ID NO: 249292 - DNA, 25 bp, Homo sapien
gggagggcaggccctttctcctgag

SEQ ID NO: 249293 - DNA, 25 bp, Homo sapien
agggcctgggacagcccggagctgg

SEQ ID NO: 249294 - DNA, 25 bp, Homo sapien
gagggcaggccctttctcctgagtt

SEQ ID NO: 249295 - DNA, 25 bp, Homo sapien
aggccttgtggaaaacatggaattt

SEQ ID NO: 249296 - DNA, 25 bp, Homo sapien
gataacaaagccctttcagccggaa

SEQ ID NO: 249297 - DNA, 25 bp, Homo sapien
caggccttgtggaaaacatggaatt

SEQ ID NO: 249298 - DNA, 25 bp, Homo sapien
aaagataacaaagccctttcagccg

SEQ ID NO: 249299 - DNA, 25 bp, Homo sapien
tacgatgttccccagcatgctgttg

SEQ ID NO: 249300 - DNA, 25 bp, Homo sapien
aaagctggaagagtctacgatgttc

SEQ ID NO: 249301 - DNA, 25 bp, Homo sapien
gttccccagcatgctgttggcattg

SEQ ID NO: 249302 - DNA, 25 bp, Homo sapien
aagtgtcaccatggcaaagctggaa

SEQ ID NO: 249303 - DNA, 25 bp, Homo sapien
tcaggcactttggtccagactccag

SEQ ID NO: 249304 - DNA, 25 bp, Homo sapien
caggcactttggtccagactccagg

SEQ ID NO: 249305 - DNA, 25 bp, Homo sapien
tccccaaggaaatagggcatccagg

SEQ ID NO: 249306 - DNA, 25 bp, Homo sapien
aaggattgttctggaattgtttggc

SEQ ID NO: 249307 - DNA, 25 bp, Homo sapien
tctggaattgtttggcaagggctgt

SEQ ID NO: 249308 - DNA, 25 bp, Homo sapien
gccatgtgtttttctagattcactt

SEQ ID NO: 249309 - DNA, 25 bp, Homo sapien
gggagatttgtcagccacgtaggca

SEQ ID NO: 249310 - DNA, 25 bp, Homo sapien
tatcaagggtgtaatggaagacgct

SEQ ID NO: 249311 - DNA, 25 bp, Homo sapien
catggttctcaccaccaggctagtg

SEQ ID NO: 249312 - DNA, 25 bp, Homo sapien
tagaggacaaagatcagcgacagct

SEQ ID NO: 249313 - DNA, 25 bp, Homo sapien
ccagaggctcccctagaaggcagac

SEQ ID NO: 249314 - DNA, 25 bp, Homo sapien
agaggctcccctagaaggcagacag

SEQ ID NO: 249315 - DNA, 25 bp, Homo sapien
acaccagaggctcccctagaaggca

SEQ ID NO: 249316 - DNA, 25 bp, Homo sapien
aggctcccctagaaggcagacagcc

SEQ ID NO: 249317 - DNA, 25 bp, Homo sapien
aattccaaataccaatggtaattct

SEQ ID NO: 249318 - DNA, 25 bp, Homo sapien
taccaatggtaattctcaataccta

SEQ ID NO: 249319 - DNA, 25 bp, Homo sapien
aataccaatggtaattctcaatacc

SEQ ID NO: 249320 - DNA, 25 bp, Homo sapien
ccaaataccaatggtaattctcaat

SEQ ID NO: 249321 - DNA, 25 bp, Homo sapien
cgatttaaaactcgcgccaacgcgg

SEQ ID NO: 249322 - DNA, 25 bp, Homo sapien
tcaattacaccgcaatagagctggg

SEQ ID NO: 249323 - DNA, 25 bp, Homo sapien
tcaacttaagtacaaaacacgacga

SEQ ID NO: 249324 - DNA, 25 bp, Homo sapien
tcttctgaaagtaccacacggtgtg

SEQ ID NO: 249325 - DNA, 25 bp, Homo sapien
gcttgcttaaaagagccttgcacag

SEQ ID NO: 249326 - DNA, 25 bp, Homo sapien
gatggctgttatctaggcttgctta

SEQ ID NO: 249327 - DNA, 25 bp, Homo sapien
cacacctttgaacgggagtgggcta

SEQ ID NO: 249328 - DNA, 25 bp, Homo sapien
cagagacagaacataggcagttaat

SEQ ID NO: 249329 - DNA, 25 bp, Homo sapien
ctgcttctttgatgatgttatcaag

SEQ ID NO: 249330 - DNA, 25 bp, Homo sapien
gtctccagagcacactcctttgagc

SEQ ID NO: 249331 - DNA, 25 bp, Homo sapien
tatcaagacttcgtctgggtctggg

SEQ ID NO: 249332 - DNA, 25 bp, Homo sapien
tctgttactgcctttgggatgagtc

SEQ ID NO: 249333 - DNA, 25 bp, Homo sapien
ctggacatccgccacggcgacggct

SEQ ID NO: 249334 - DNA, 25 bp, Homo sapien
acctggtcacgctccaggacctgga

SEQ ID NO: 249335 - DNA, 25 bp, Homo sapien
cgccgagcacctggtcacgctccag

SEQ ID NO: 249336 - DNA, 25 bp, Homo sapien
tccaggacctggacatccgccacgg

SEQ ID NO: 249337 - DNA, 25 bp, Homo sapien
caggtgttcacgctggcggtgcgcg

SEQ ID NO: 249338 - DNA, 25 bp, Homo sapien
cacccaggccgaccgggactccgag

SEQ ID NO: 249339 - DNA, 25 bp, Homo sapien
cacggccaagatccagcggaggatg

SEQ ID NO: 249340 - DNA, 25 bp, Homo sapien
gatggaccaggtgttcacgctggcg

SEQ ID NO: 249341 - DNA, 25 bp, Homo sapien
aattggctgttgatctacataacaa

SEQ ID NO: 249342 - DNA, 25 bp, Homo sapien
gaaggcaccgtgataatattaccaa

SEQ ID NO: 249343 - DNA, 25 bp, Homo sapien
tacataacaatctgagaacttggtg

SEQ ID NO: 249344 - DNA, 25 bp, Homo sapien
gccgcagaatcatccttaactttca

SEQ ID NO: 249345 - DNA, 25 bp, Homo sapien
tccaggaaggcgtggcttggtccac

SEQ ID NO: 249346 - DNA, 25 bp, Homo sapien
tctgtagcttgaagtgcaggtcctc

SEQ ID NO: 249347 - DNA, 25 bp, Homo sapien
tcaaggtaagctcgagggaaaagca

SEQ ID NO: 249348 - DNA, 25 bp, Homo sapien
cactgcgtcccttcgtggtgatggg

SEQ ID NO: 249349 - DNA, 25 bp, Homo sapien
gataggcacgttaaacccagaactg

SEQ ID NO: 249350 - DNA, 25 bp, Homo sapien
cccaacgttggcagggacgaggacg

SEQ ID NO: 249351 - DNA, 25 bp, Homo sapien
agacacagcgtcagcctcagcgctt

SEQ ID NO: 249352 - DNA, 25 bp, Homo sapien
ggcaggtcactagattctcccacag

SEQ ID NO: 249353 - DNA, 25 bp, Homo sapien
gacagaggacacttaactggccaaa

SEQ ID NO: 249354 - DNA, 25 bp, Homo sapien
gggcacacgagagtgagacccgcac

SEQ ID NO: 249355 - DNA, 25 bp, Homo sapien
cttgaccgtcgggactgaccaggga

SEQ ID NO: 249356 - DNA, 25 bp, Homo sapien
catcctgtgttgcttgaccgtcggg

SEQ ID NO: 249357 - DNA, 25 bp, Homo sapien
gctccactccagcccgaaagcctcc

SEQ ID NO: 249358 - DNA, 25 bp, Homo sapien
ccaggtggaaggttattgggggcat

SEQ ID NO: 249359 - DNA, 25 bp, Homo sapien
gatgggtacgtgttctccctgagag

SEQ ID NO: 249360 - DNA, 25 bp, Homo sapien
cacctggtgagatgggtacgtgttc

SEQ ID NO: 249361 - DNA, 25 bp, Homo sapien
ctcatgagcagccaggcgattcagg

SEQ ID NO: 249362 - DNA, 25 bp, Homo sapien
agagcacagctcatgagcagccagg

SEQ ID NO: 249363 - DNA, 25 bp, Homo sapien
ggccacagccgccctgtctcaggcc

SEQ ID NO: 249364 - DNA, 25 bp, Homo sapien
tgggcggccacagccgccctgtctc

SEQ ID NO: 249365 - DNA, 25 bp, Homo sapien
ggcggccacagccgccctgtctcag

SEQ ID NO: 249366 - DNA, 25 bp, Homo sapien
ctgggcggccacagccgccctgtct

SEQ ID NO: 249367 - DNA, 25 bp, Homo sapien
aggaagccccgcaagtgtcaccatg

SEQ ID NO: 249368 - DNA, 25 bp, Homo sapien
aaggaagccccgcaagtgtcaccat

SEQ ID NO: 249369 - DNA, 25 bp, Homo sapien
aaaggaagccccgcaagtgtcacca

SEQ ID NO: 249370 - DNA, 25 bp, Homo sapien
tgctttctgcgcatcgacaggctct

SEQ ID NO: 249371 - DNA, 25 bp, Homo sapien
gacaggctctggctaaggcaatcag

SEQ ID NO: 249372 - DNA, 25 bp, Homo sapien
tcaaaagtgtctggcttccgatgtc

SEQ ID NO: 249373 - DNA, 25 bp, Homo sapien
caatcagttttgctgggtgggccaa

SEQ ID NO: 249374 - DNA, 25 bp, Homo sapien
tcacggcaatacagccagggagcag

SEQ ID NO: 249375 - DNA, 25 bp, Homo sapien
tctgcctaggagtgagaatttgctg

SEQ ID NO: 249376 - DNA, 25 bp, Homo sapien
gaactccacataaagaagcctgtgg

SEQ ID NO: 249377 - DNA, 25 bp, Homo sapien
gaaggcaatggcagcacagtagcag

SEQ ID NO: 249378 - DNA, 25 bp, Homo sapien
tggcatgctaatgttcattcccacc

SEQ ID NO: 249379 - DNA, 25 bp, Homo sapien
gagttgggtcctgtactttaatcca

SEQ ID NO: 249380 - DNA, 25 bp, Homo sapien
aactattatcgtatcggaatctacc

SEQ ID NO: 249381 - DNA, 25 bp, Homo sapien
gaatctacctctccctttagaacta

SEQ ID NO: 249382 - DNA, 25 bp, Homo sapien
gcgcgcacaccgggtcccccgcggc

SEQ ID NO: 249383 - DNA, 25 bp, Homo sapien
tgcgcgcacaccgggtcccccgcgg

SEQ ID NO: 249384 - DNA, 25 bp, Homo sapien
ctgcgcgcacaccgggtcccccgcg

SEQ ID NO: 249385 - DNA, 25 bp, Homo sapien
cagcggatggtggaccgggtgttca

SEQ ID NO: 249386 - DNA, 25 bp, Homo sapien
cgggtgttcatgcaggcggtgcgcg

SEQ ID NO: 249387 - DNA, 25 bp, Homo sapien
gttcccggaggtcatggccaagagc

SEQ ID NO: 249388 - DNA, 25 bp, Homo sapien
cgttgctggaggtcgtggacgcggc

SEQ ID NO: 249389 - DNA, 25 bp, Homo sapien
tactgagctcatcaaagaacctgag

SEQ ID NO: 249390 - DNA, 25 bp, Homo sapien
tctggttatgcagctggccttgtag

SEQ ID NO: 249391 - DNA, 25 bp, Homo sapien
tgggcaccgcagcactctggttatg

SEQ ID NO: 249392 - DNA, 25 bp, Homo sapien
tatttgtggctgtagtctttcctcc

SEQ ID NO: 249393 - DNA, 25 bp, Homo sapien
cagagcctctccaggacttcgaaga

SEQ ID NO: 249394 - DNA, 25 bp, Homo sapien
tgtccagtgggaagctctagccaga

SEQ ID NO: 249395 - DNA, 25 bp, Homo sapien
caggacttcgaagagtttcgcaaaa

SEQ ID NO: 249396 - DNA, 25 bp, Homo sapien
gccagaccgtgcttagatctaggca

SEQ ID NO: 249397 - DNA, 25 bp, Homo sapien
tcttccaggccccggagacgcctgg

SEQ ID NO: 249398 - DNA, 25 bp, Homo sapien
ttcttccaggccccggagacgcctg

SEQ ID NO: 249399 - DNA, 25 bp, Homo sapien
cttccaggccccggagacgcctggc

SEQ ID NO: 249400 - DNA, 25 bp, Homo sapien
tggggtgcgctcaggatagtatggc

SEQ ID NO: 249401 - DNA, 25 bp, Homo sapien
gcgctcaggatagtatggccataga

SEQ ID NO: 249402 - DNA, 25 bp, Homo sapien
atggggtgcgctcaggatagtatgg

SEQ ID NO: 249403 - DNA, 25 bp, Homo sapien
ggtgcgctcaggatagtatggccat

SEQ ID NO: 249404 - DNA, 25 bp, Homo sapien
ctggagggagacagagcccacgcac

SEQ ID NO: 249405 - DNA, 25 bp, Homo sapien
ggagggagacagagcccacgcacac

SEQ ID NO: 249406 - DNA, 25 bp, Homo sapien
tggagggagacagagcccacgcaca

SEQ ID NO: 249407 - DNA, 25 bp, Homo sapien
ggagggggacagagcacacgtacac

SEQ ID NO: 249408 - DNA, 25 bp, Homo sapien
tggagggggacagagcacacgtaca

SEQ ID NO: 249409 - DNA, 25 bp, Homo sapien
ctggagggggacagagcacacgtac

SEQ ID NO: 249410 - DNA, 25 bp, Homo sapien
gggacagagcacacgtacacctgga

SEQ ID NO: 249411 - DNA, 25 bp, Homo sapien
ctggaggggaacacagcacacgcac

SEQ ID NO: 249412 - DNA, 25 bp, Homo sapien
gagcacacgtacacctggaggggag

SEQ ID NO: 249413 - DNA, 25 bp, Homo sapien
acagagcacacgtacacctggaggg

SEQ ID NO: 249414 - DNA, 25 bp, Homo sapien
ggagggggacagtgcacacgtacac

SEQ ID NO: 249415 - DNA, 25 bp, Homo sapien
tggagggggacagtgcacacgtaca

SEQ ID NO: 249416 - DNA, 25 bp, Homo sapien
ctggagggggacagtgcacacgtac

SEQ ID NO: 249417 - DNA, 25 bp, Homo sapien
gatgggaaccctggtactcacaagg

SEQ ID NO: 249418 - DNA, 25 bp, Homo sapien
tatacaccaaggtacacactgcggg

SEQ ID NO: 249419 - DNA, 25 bp, Homo sapien
ttccagatcgggaaacctgcacggc

SEQ ID NO: 249420 - DNA, 25 bp, Homo sapien
gatgactgcaccttagagaccagag

SEQ ID NO: 249421 - DNA, 25 bp, Homo sapien
ctgtcctgaatgtgagaatcctgaa

SEQ ID NO: 249422 - DNA, 25 bp, Homo sapien
tctgtcctgaatgtgagaatcctga

SEQ ID NO: 249423 - DNA, 25 bp, Homo sapien
tgtcctgaatgtgagaatcctgaaa

SEQ ID NO: 249424 - DNA, 25 bp, Homo sapien
tggctatcgaggcatgcttgacaca

SEQ ID NO: 249425 - DNA, 25 bp, Homo sapien
aagcctgtggctatcgaggcatgct

SEQ ID NO: 249426 - DNA, 25 bp, Homo sapien
cgaggcatgcttgacacacatcata

SEQ ID NO: 249427 - DNA, 25 bp, Homo sapien
tatcgaggcatgcttgacacacatc

SEQ ID NO: 249428 - DNA, 25 bp, Homo sapien
ccttttcacaaagtgcacagtggga

SEQ ID NO: 249429 - DNA, 25 bp, Homo sapien
tatagccaggcacccaagaagtctg

SEQ ID NO: 249430 - DNA, 25 bp, Homo sapien
aagaagtctgatggccacctgagtg

SEQ ID NO: 249431 - DNA, 25 bp, Homo sapien
tgacaaggacctgacagagcccatg

SEQ ID NO: 249432 - DNA, 25 bp, Homo sapien
caaagccagagcagtcttagtacca

SEQ ID NO: 249433 - DNA, 25 bp, Homo sapien
ttagctcagtcagtcctcatcgtgg

SEQ ID NO: 249434 - DNA, 25 bp, Homo sapien
taattgctacagcttgacctaccag

SEQ ID NO: 249435 - DNA, 25 bp, Homo sapien
catcgtggtcctgaggcataggtac

SEQ ID NO: 249436 - DNA, 25 bp, Homo sapien
tatgtgcagcactcaatcccactgg

SEQ ID NO: 249437 - DNA, 25 bp, Homo sapien
ggattgcctttccatatctgctggg

SEQ ID NO: 249438 - DNA, 25 bp, Homo sapien
tcttttcttgggacctagactggga

SEQ ID NO: 249439 - DNA, 25 bp, Homo sapien
gatctgagttgaccctgcagttcgg

SEQ ID NO: 249440 - DNA, 25 bp, Homo sapien
caaggacctattaacaggagaatgg

SEQ ID NO: 249441 - DNA, 25 bp, Homo sapien
acttatgagaatggctattgcagct

SEQ ID NO: 249442 - DNA, 25 bp, Homo sapien
gaaagcaagcgttcctgaaaacact

SEQ ID NO: 249443 - DNA, 25 bp, Homo sapien
gaagaatacgtatgtacagttccat

SEQ ID NO: 249444 - DNA, 25 bp, Homo sapien
tgctcctggcccaacgcaaaaccag

SEQ ID NO: 249445 - DNA, 25 bp, Homo sapien
ggcccaacgcaaaaccagcagtctt

SEQ ID NO: 249446 - DNA, 25 bp, Homo sapien
tccattgcacctgctgagtcatggg

SEQ ID NO: 249447 - DNA, 25 bp, Homo sapien
tgctgagtcatgggtgcatgcagga

SEQ ID NO: 249448 - DNA, 25 bp, Homo sapien
tccagtcccctggatggcatgtgtc

SEQ ID NO: 249449 - DNA, 25 bp, Homo sapien
tggaggctcctgagtctccgtaggc

SEQ ID NO: 249450 - DNA, 25 bp, Homo sapien
cgtaggctttatctccagtcccctg

SEQ ID NO: 249451 - DNA, 25 bp, Homo sapien
tgatgaatgggttaaactgtccatg

SEQ ID NO: 249452 - DNA, 25 bp, Homo sapien
taacgtgacgccctctatatggtgg

SEQ ID NO: 249453 - DNA, 25 bp, Homo sapien
tgaccaaccagagtcacggagaagt

SEQ ID NO: 249454 - DNA, 25 bp, Homo sapien
gataatgagtatcaagtacagcctc

SEQ ID NO: 249455 - DNA, 25 bp, Homo sapien
ggcatctgctctgattaacgtgacg

SEQ ID NO: 249456 - DNA, 25 bp, Homo sapien
tttttccaggcaactttagcaggac

SEQ ID NO: 249457 - DNA, 25 bp, Homo sapien
atttttccaggcaactttagcagga

SEQ ID NO: 249458 - DNA, 25 bp, Homo sapien
tgccatcaaagtttcctttagactt

SEQ ID NO: 249459 - DNA, 25 bp, Homo sapien
cctttgtgccatcaaagtttccttt

SEQ ID NO: 249460 - DNA, 25 bp, Homo sapien
tttgtgccatcaaagtttcctttag

SEQ ID NO: 249461 - DNA, 25 bp, Homo sapien
tgtgccatcaaagtttcctttagac

SEQ ID NO: 249462 - DNA, 25 bp, Homo sapien
aacagaaataatatagaggatggcc

SEQ ID NO: 249463 - DNA, 25 bp, Homo sapien
cagaaataatatagaggatggcctt

SEQ ID NO: 249464 - DNA, 25 bp, Homo sapien
ctcccttagctggtctgttatcctc

SEQ ID NO: 249465 - DNA, 25 bp, Homo sapien
cttagctggtctgttatcctccatt

SEQ ID NO: 249466 - DNA, 25 bp, Homo sapien
ttggtttcctgggatcacgtttagc

SEQ ID NO: 249467 - DNA, 25 bp, Homo sapien
attaatttctgcttactatgtcctt

SEQ ID NO: 249468 - DNA, 25 bp, Homo sapien
tattgatctaattatatctttggga

SEQ ID NO: 249469 - DNA, 25 bp, Homo sapien
tctgcttactatgtccttttaacac

SEQ ID NO: 249470 - DNA, 25 bp, Homo sapien
tttaacactctttgggtacactgtg

SEQ ID NO: 249471 - DNA, 25 bp, Homo sapien
tgatgtctattttccatcaacctta

SEQ ID NO: 249472 - DNA, 25 bp, Homo sapien
tgaagagcccgtgcaagaacagctt

SEQ ID NO: 249473 - DNA, 25 bp, Homo sapien
accttatttccatgttgctgaagag

SEQ ID NO: 249474 - DNA, 25 bp, Homo sapien
cttatttccatgttgctgaagagcc

SEQ ID NO: 249475 - DNA, 25 bp, Homo sapien
gtcttccgtggcaggctgagccctc

SEQ ID NO: 249476 - DNA, 25 bp, Homo sapien
tccgtggcaggctgagccctccagt

SEQ ID NO: 249477 - DNA, 25 bp, Homo sapien
tattcagtggttgctcctacccctt

SEQ ID NO: 249478 - DNA, 25 bp, Homo sapien
ctattcagtggttgctcctacccct

SEQ ID NO: 249479 - DNA, 25 bp, Homo sapien
cttcagtagggaacttctgaatagg

SEQ ID NO: 249480 - DNA, 25 bp, Homo sapien
tcagtagggaacttctgaataggca

SEQ ID NO: 249481 - DNA, 25 bp, Homo sapien
gaacttctgaataggcacagagggc

SEQ ID NO: 249482 - DNA, 25 bp, Homo sapien
acttctgaataggcacagagggcac

SEQ ID NO: 249483 - DNA, 25 bp, Homo sapien
acctcaggctgagtagcagctgagg

SEQ ID NO: 249484 - DNA, 25 bp, Homo sapien
ctaaacgccgtcagaccagtctgca

SEQ ID NO: 249485 - DNA, 25 bp, Homo sapien
tgaggagctggagcagtccattcac

SEQ ID NO: 249486 - DNA, 25 bp, Homo sapien
caggctgagtagcagctgaggagct

SEQ ID NO: 249487 - DNA, 25 bp, Homo sapien
tcttttttaatctcttgaggatctc

SEQ ID NO: 249488 - DNA, 25 bp, Homo sapien
aaattcctctttcgtctcagccttt

SEQ ID NO: 249489 - DNA, 25 bp, Homo sapien
cctgaaattcctctttcgtctcagc

SEQ ID NO: 249490 - DNA, 25 bp, Homo sapien
tgaaattcctctttcgtctcagcct

SEQ ID NO: 249491 - DNA, 25 bp, Homo sapien
gtgttcacgggaaacggtgccacgc

SEQ ID NO: 249492 - DNA, 25 bp, Homo sapien
tcacgggaaacggtgccacgcatgc

SEQ ID NO: 249493 - DNA, 25 bp, Homo sapien
gttcacgggaaacggtgccacgcat

SEQ ID NO: 249494 - DNA, 25 bp, Homo sapien
cacgggaaacggtgccacgcatgcg

SEQ ID NO: 249495 - DNA, 25 bp, Homo sapien
ataagatgcctccatgagcggccgg

SEQ ID NO: 249496 - DNA, 25 bp, Homo sapien
atgcctccatgagcggccggtggtc

SEQ ID NO: 249497 - DNA, 25 bp, Homo sapien
ccatgagcggccggtggtcagccct

SEQ ID NO: 249498 - DNA, 25 bp, Homo sapien
atgagcggccggtggtcagccctgg

SEQ ID NO: 249499 - DNA, 25 bp, Homo sapien
agtattcctgaatgatatggcacta

SEQ ID NO: 249500 - DNA, 25 bp, Homo sapien
caaaagctccggaccttgtgaaagt

SEQ ID NO: 249501 - DNA, 25 bp, Homo sapien
catcaaaagctccggaccttgtgaa

SEQ ID NO: 249502 - DNA, 25 bp, Homo sapien
acatcaaaagctccggaccttgtga

SEQ ID NO: 249503 - DNA, 25 bp, Homo sapien
tcaaaagctccggaccttgtgaaag

SEQ ID NO: 249504 - DNA, 25 bp, Homo sapien
ttaagttacagtgagaatccagaac

SEQ ID NO: 249505 - DNA, 25 bp, Homo sapien
tcttcagcagatccgagagctggag

SEQ ID NO: 249506 - DNA, 25 bp, Homo sapien
cgatctagaactagatggggatcaa

SEQ ID NO: 249507 - DNA, 25 bp, Homo sapien
tccgagagctggagaattactgcag

SEQ ID NO: 249508 - DNA, 25 bp, Homo sapien
aactagatggggatcaatcatcttc

SEQ ID NO: 249509 - DNA, 25 bp, Homo sapien
tgtagctaatgtcagaatttcccct

SEQ ID NO: 249510 - DNA, 25 bp, Homo sapien
gtctcaatacatttgactgctccag

SEQ ID NO: 249511 - DNA, 25 bp, Homo sapien
ccaggtaactcatagaagagggatc

SEQ ID NO: 249512 - DNA, 25 bp, Homo sapien
catactgttgtgcaatctgtcctca

SEQ ID NO: 249513 - DNA, 25 bp, Homo sapien
tggaggcccgcgagctgaaattcgc

SEQ ID NO: 249514 - DNA, 25 bp, Homo sapien
caagctcgctagagagggagaagca

SEQ ID NO: 249515 - DNA, 25 bp, Homo sapien
ctccgtgaggctctgaggtgccggg

SEQ ID NO: 249516 - DNA, 25 bp, Homo sapien
ggcggcctgtcttgcgctccacttc

SEQ ID NO: 249517 - DNA, 25 bp, Homo sapien
cagtgccttgcagtcgggtgttccc

SEQ ID NO: 249518 - DNA, 25 bp, Homo sapien
gaagtacatcgattatgccggcagt

SEQ ID NO: 249519 - DNA, 25 bp, Homo sapien
tgggcgttgtagttggcggaccttc

SEQ ID NO: 249520 - DNA, 25 bp, Homo sapien
cagaagtctgccgtgtcccgctgtt

SEQ ID NO: 249521 - DNA, 25 bp, Homo sapien
ctggagaaaggtttggctgaccagg

SEQ ID NO: 249522 - DNA, 25 bp, Homo sapien
taaacattttacagtacgtaggaca

SEQ ID NO: 249523 - DNA, 25 bp, Homo sapien
aaacattttacagtacgtaggacag

SEQ ID NO: 249524 - DNA, 25 bp, Homo sapien
ttattggccaaagtaccagaggccc

SEQ ID NO: 249525 - DNA, 25 bp, Homo sapien
gatatgacacttcgtaagcctggta

SEQ ID NO: 249526 - DNA, 25 bp, Homo sapien
gaagggctttagaaccgtgatcact

SEQ ID NO: 249527 - DNA, 25 bp, Homo sapien
tgctgtagaggccatatacctggga

SEQ ID NO: 249528 - DNA, 25 bp, Homo sapien
gaaacatatattaggtgtttgggag

SEQ ID NO: 249529 - DNA, 25 bp, Homo sapien
catatattaggtgtttgggagtttt

SEQ ID NO: 249530 - DNA, 25 bp, Homo sapien
taattaagctttctcaaaagaacat

SEQ ID NO: 249531 - DNA, 25 bp, Homo sapien
acgcccagcctaattaagctttctc

SEQ ID NO: 249532 - DNA, 25 bp, Homo sapien
ccagttttttctcgagcagtgacac

SEQ ID NO: 249533 - DNA, 25 bp, Homo sapien
ctgccagttttttctcgagcagtga

SEQ ID NO: 249534 - DNA, 25 bp, Homo sapien
ttctgccagttttttctcgagcagt

SEQ ID NO: 249535 - DNA, 25 bp, Homo sapien
cttttcaaatatgccttaatatagg

SEQ ID NO: 249536 - DNA, 25 bp, Homo sapien
cagccacagccaaacataacatgtt

SEQ ID NO: 249537 - DNA, 25 bp, Homo sapien
aacagccacagccaaacataacatg

SEQ ID NO: 249538 - DNA, 25 bp, Homo sapien
gccacagccaaacataacatgttca

SEQ ID NO: 249539 - DNA, 25 bp, Homo sapien
caacagccacagccaaacataacat

SEQ ID NO: 249540 - DNA, 25 bp, Homo sapien
accgtgttttcatcgtgtgtgagca

SEQ ID NO: 249541 - DNA, 25 bp, Homo sapien
tggccaccgtgttttcatcgtgtgt

SEQ ID NO: 249542 - DNA, 25 bp, Homo sapien
tttgttaggcctatgccgaggattc

SEQ ID NO: 249543 - DNA, 25 bp, Homo sapien
ctttactgcctttgttaggcctatg

SEQ ID NO: 249544 - DNA, 25 bp, Homo sapien
agtgtccacttggggggatatccgt

SEQ ID NO: 249545 - DNA, 25 bp, Homo sapien
tgtccacttggggggatatccgtgg

SEQ ID NO: 249546 - DNA, 25 bp, Homo sapien
cacttggggggatatccgtggcctt

SEQ ID NO: 249547 - DNA, 25 bp, Homo sapien
tccacttggggggatatccgtggcc

SEQ ID NO: 249548 - DNA, 25 bp, Homo sapien
aactccaccatcttcaggaacttgg

SEQ ID NO: 249549 - DNA, 25 bp, Homo sapien
tcaagctgatctgcaactccaccat

SEQ ID NO: 249550 - DNA, 25 bp, Homo sapien
atctgcaactccaccatcttcagga

SEQ ID NO: 249551 - DNA, 25 bp, Homo sapien
gcaactccaccatcttcaggaactt

SEQ ID NO: 249552 - DNA, 25 bp, Homo sapien
ctcatccagggtgtcgtgagagact

SEQ ID NO: 249553 - DNA, 25 bp, Homo sapien
tcatccagggtgtcgtgagagactt

SEQ ID NO: 249554 - DNA, 25 bp, Homo sapien
catccagggtgtcgtgagagacttt

SEQ ID NO: 249555 - DNA, 25 bp, Homo sapien
atccagggtgtcgtgagagactttg

SEQ ID NO: 249556 - DNA, 25 bp, Homo sapien
tgtttgttgagtctccctttaccca

SEQ ID NO: 249557 - DNA, 25 bp, Homo sapien
acctttctgaggcactgcaatcggg

SEQ ID NO: 249558 - DNA, 25 bp, Homo sapien
gcatcagagtgaatgtaaatggaat

SEQ ID NO: 249559 - DNA, 25 bp, Homo sapien
aagtggctttctcacttagtgagcc

SEQ ID NO: 249560 - DNA, 25 bp, Homo sapien
tacgtgacagtgatgagctgaccag

SEQ ID NO: 249561 - DNA, 25 bp, Homo sapien
tgaacaaaggctgctaggtgaccct

SEQ ID NO: 249562 - DNA, 25 bp, Homo sapien
gagctcaggtgcaaagccgagttac

SEQ ID NO: 249563 - DNA, 25 bp, Homo sapien
tgcaggatgcccagtaggaagcaca

SEQ ID NO: 249564 - DNA, 25 bp, Homo sapien
gaggctgaggattgattaagcccag

SEQ ID NO: 249565 - DNA, 25 bp, Homo sapien
ggcacatagctgtggtctcagataa

SEQ ID NO: 249566 - DNA, 25 bp, Homo sapien
ggagtttacagctgcggtgagctgt

SEQ ID NO: 249567 - DNA, 25 bp, Homo sapien
cagagcaggagcccctcttaaaaaa

SEQ ID NO: 249568 - DNA, 25 bp, Homo sapien
ctctcctttctttgctgatctgcat

SEQ ID NO: 249569 - DNA, 25 bp, Homo sapien
ggtatgcagaagttggcaggttgca

SEQ ID NO: 249570 - DNA, 25 bp, Homo sapien
ggggtatgcagaagttggcaggttg

SEQ ID NO: 249571 - DNA, 25 bp, Homo sapien
tgcagaagttggcaggttgcaggga

SEQ ID NO: 249572 - DNA, 25 bp, Homo sapien
tatgcagaagttggcaggttgcagg

SEQ ID NO: 249573 - DNA, 25 bp, Homo sapien
tcatgaaggacaggtggatcaatgc

SEQ ID NO: 249574 - DNA, 25 bp, Homo sapien
tgccatactggatatatcctgcggc

SEQ ID NO: 249575 - DNA, 25 bp, Homo sapien
ccagagctagacatctcagaccaaa

SEQ ID NO: 249576 - DNA, 25 bp, Homo sapien
aaaagaataggtaatcactccatgc

SEQ ID NO: 249577 - DNA, 25 bp, Homo sapien
tgtaatatgtcatcttttaggtcaa

SEQ ID NO: 249578 - DNA, 25 bp, Homo sapien
gtaatatgtcatcttttaggtcaaa

SEQ ID NO: 249579 - DNA, 25 bp, Homo sapien
aatatgtcatcttttaggtcaaatg

SEQ ID NO: 249580 - DNA, 25 bp, Homo sapien
taatatgtcatcttttaggtcaaat

SEQ ID NO: 249581 - DNA, 25 bp, Homo sapien
tagttccatgattgggctcggcacc

SEQ ID NO: 249582 - DNA, 25 bp, Homo sapien
gcagaagccctcaggtggtctcctt

SEQ ID NO: 249583 - DNA, 25 bp, Homo sapien
agtccagggctagagttacggtcca

SEQ ID NO: 249584 - DNA, 25 bp, Homo sapien
cacagctgtgctcaagcagaagccc

SEQ ID NO: 249585 - DNA, 25 bp, Homo sapien
gccactctatcttaccatgtctgtt

SEQ ID NO: 249586 - DNA, 25 bp, Homo sapien
ttaaaacaacattggaaggctgggc

SEQ ID NO: 249587 - DNA, 25 bp, Homo sapien
tagatgaaactgcagacttccagcc

SEQ ID NO: 249588 - DNA, 25 bp, Homo sapien
ccggtaactgtgtgtgttagatgaa

SEQ ID NO: 249589 - DNA, 25 bp, Homo sapien
acggcgaaccgcaacatataatggc

SEQ ID NO: 249590 - DNA, 25 bp, Homo sapien
gaagccgaggctccactaatctctt

SEQ ID NO: 249591 - DNA, 25 bp, Homo sapien
acagtatcagtagtgcagccacccc

SEQ ID NO: 249592 - DNA, 25 bp, Homo sapien
agtcgtagcactttccacggccagc

SEQ ID NO: 249593 - DNA, 25 bp, Homo sapien
gagacagtgagttcaatctgagaag

SEQ ID NO: 249594 - DNA, 25 bp, Homo sapien
ctttgccaggtttgggacacccatt

SEQ ID NO: 249595 - DNA, 25 bp, Homo sapien
ccattcatgaccagccagcaagaga

SEQ ID NO: 249596 - DNA, 25 bp, Homo sapien
gaagtcagacgcatcagaaggtttc

SEQ ID NO: 249597 - DNA, 25 bp, Homo sapien
taagactagtattgggctgggccgg

SEQ ID NO: 249598 - DNA, 25 bp, Homo sapien
ttaagactagtattgggctgggccg

SEQ ID NO: 249599 - DNA, 25 bp, Homo sapien
taaagatgtgcaacctatgcgcccc

SEQ ID NO: 249600 - DNA, 25 bp, Homo sapien
taccctgagagtcggtgtgtggccc

SEQ ID NO: 249601 - DNA, 25 bp, Homo sapien
aaagtctgaggacgagagcacgcct

SEQ ID NO: 249602 - DNA, 25 bp, Homo sapien
cggagaacctcgtgcagtgggaaat

SEQ ID NO: 249603 - DNA, 25 bp, Homo sapien
cgatggacatgaagtagctgaccct

SEQ ID NO: 249604 - DNA, 25 bp, Homo sapien
tggttaaagggcctgcacgggtctc

SEQ ID NO: 249605 - DNA, 25 bp, Homo sapien
gaaagaatagcaacctgccgcttgg

SEQ ID NO: 249606 - DNA, 25 bp, Homo sapien
tgtaggcatcagcagtcatagcacc

SEQ ID NO: 249607 - DNA, 25 bp, Homo sapien
gaagtctctacagcaaggctaaggg

SEQ ID NO: 249608 - DNA, 25 bp, Homo sapien
actctaccaagggtgacggaagtct

SEQ ID NO: 249609 - DNA, 25 bp, Homo sapien
agggctcgccagacggcgaacatca

SEQ ID NO: 249610 - DNA, 25 bp, Homo sapien
ccaggcaataagttaggaagcagca

SEQ ID NO: 249611 - DNA, 25 bp, Homo sapien
cagccgctgctccatctcgatgagc

SEQ ID NO: 249612 - DNA, 25 bp, Homo sapien
atgaggtcgtcgatggcctggccct

SEQ ID NO: 249613 - DNA, 25 bp, Homo sapien
tcatttctgggcaggcatgaggtcg

SEQ ID NO: 249614 - DNA, 25 bp, Homo sapien
atgagcagcttcactccgtccacca

SEQ ID NO: 249615 - DNA, 25 bp, Homo sapien
ccgcccaccgcagccgtgtccacac

SEQ ID NO: 249616 - DNA, 25 bp, Homo sapien
gtcagcgttggagacgtcgaagacc

SEQ ID NO: 249617 - DNA, 25 bp, Homo sapien
ctgagaagcccaggcggtcagcgtt

SEQ ID NO: 249618 - DNA, 25 bp, Homo sapien
gcgttggagacgtcgaagaccccgc

SEQ ID NO: 249619 - DNA, 25 bp, Homo sapien
gacagcaagtcagggcggaggaaac

SEQ ID NO: 249620 - DNA, 25 bp, Homo sapien
acagcaagtcagggcggaggaaaca

SEQ ID NO: 249621 - DNA, 25 bp, Homo sapien
tctgaagtcgcagccgcttaagcac

SEQ ID NO: 249622 - DNA, 25 bp, Homo sapien
ggtgagggttccacatgaactcata

SEQ ID NO: 249623 - DNA, 25 bp, Homo sapien
gaactcatagtccttagacttgaag

SEQ ID NO: 249624 - DNA, 25 bp, Homo sapien
caggttgggcagcttgatatgcaca

SEQ ID NO: 249625 - DNA, 25 bp, Homo sapien
aaggcctgcctgaaacccctacagg

SEQ ID NO: 249626 - DNA, 25 bp, Homo sapien
tgaaacccctacaggccctgagact

SEQ ID NO: 249627 - DNA, 25 bp, Homo sapien
aaatcccccggggggactgatgctg

SEQ ID NO: 249628 - DNA, 25 bp, Homo sapien
atcccccggggggactgatgctggg

SEQ ID NO: 249629 - DNA, 25 bp, Homo sapien
gtgcagaagcgggtgaacacctcct

SEQ ID NO: 249630 - DNA, 25 bp, Homo sapien
tgcagaagcgggtgaacacctcctt

SEQ ID NO: 249631 - DNA, 25 bp, Homo sapien
gggctggtctcagggcatacccaga

SEQ ID NO: 249632 - DNA, 25 bp, Homo sapien
tggagaagctttggcgtcaccagcc

SEQ ID NO: 249633 - DNA, 25 bp, Homo sapien
gaacttcccaagtccctgaggtgct

SEQ ID NO: 249634 - DNA, 25 bp, Homo sapien
ccctggtagaatcccagcggcggag

SEQ ID NO: 249635 - DNA, 25 bp, Homo sapien
tcatgctcttgagcgcgtagtatcg

SEQ ID NO: 249636 - DNA, 25 bp, Homo sapien
tcttgagcgcgtagtatcggcccgc

SEQ ID NO: 249637 - DNA, 25 bp, Homo sapien
agcgcgtagtatcggcccgccaggt

SEQ ID NO: 249638 - DNA, 25 bp, Homo sapien
gcctccgtcatgctcttgagcgcgt

SEQ ID NO: 249639 - DNA, 25 bp, Homo sapien
acccgcccggatctgcgggcgtcca

SEQ ID NO: 249640 - DNA, 25 bp, Homo sapien
tgccgctcccgggcgacgtaaacaa

SEQ ID NO: 249641 - DNA, 25 bp, Homo sapien
agataagagcgcgacggcggctgcc

SEQ ID NO: 249642 - DNA, 25 bp, Homo sapien
tgaacccgggcgcgcgcagataaga

SEQ ID NO: 249643 - DNA, 25 bp, Homo sapien
gcacccgcgagctcagcacgtagtt

SEQ ID NO: 249644 - DNA, 25 bp, Homo sapien
cccgcgagctcagcacgtagttggg

SEQ ID NO: 249645 - DNA, 25 bp, Homo sapien
ttccaccgcgagcttctcgatggcg

SEQ ID NO: 249646 - DNA, 25 bp, Homo sapien
gagcttctcgatggcgcggcgctcc

SEQ ID NO: 249647 - DNA, 25 bp, Homo sapien
gaggcgagacgggagtgagcgcccg

SEQ ID NO: 249648 - DNA, 25 bp, Homo sapien
agacgggagtgagcgcccgaagacc

SEQ ID NO: 249649 - DNA, 25 bp, Homo sapien
gagtgagcgcccgaagaccccggcc

SEQ ID NO: 249650 - DNA, 25 bp, Homo sapien
gcgagacgggagtgagcgcccgaag

SEQ ID NO: 249651 - DNA, 25 bp, Homo sapien
ttgaggtcggtcttgtgctcatcgc

SEQ ID NO: 249652 - DNA, 25 bp, Homo sapien
gaagagatccttgaacacttcgtag

SEQ ID NO: 249653 - DNA, 25 bp, Homo sapien
cccacggtcatgatgtacgggtggc

SEQ ID NO: 249654 - DNA, 25 bp, Homo sapien
gccgccgtgccggtcctcgatgatg

SEQ ID NO: 249655 - DNA, 25 bp, Homo sapien
gggacggggacagtgacgtcactgc

SEQ ID NO: 249656 - DNA, 25 bp, Homo sapien
cgcgggacggggacagtgacgtcac

SEQ ID NO: 249657 - DNA, 25 bp, Homo sapien
cgggacggggacagtgacgtcactg

SEQ ID NO: 249658 - DNA, 25 bp, Homo sapien
ggcgcgggacggggacagtgacgtc

SEQ ID NO: 249659 - DNA, 25 bp, Homo sapien
ccgggttgtccacgcctgtctggat

SEQ ID NO: 249660 - DNA, 25 bp, Homo sapien
cgggttgtccacgcctgtctggatg

SEQ ID NO: 249661 - DNA, 25 bp, Homo sapien
ggttgtccacgcctgtctggatgac

SEQ ID NO: 249662 - DNA, 25 bp, Homo sapien
gggttgtccacgcctgtctggatga

SEQ ID NO: 249663 - DNA, 25 bp, Homo sapien
cagcttcagtgcgttgtggctgttg

SEQ ID NO: 249664 - DNA, 25 bp, Homo sapien
gccatgtggttgttgtgggcgctca

SEQ ID NO: 249665 - DNA, 25 bp, Homo sapien
ctcggccgggaagcgcagcttcagt

SEQ ID NO: 249666 - DNA, 25 bp, Homo sapien
cgtgaagccgctcggcgtgctcttg

SEQ ID NO: 249667 - DNA, 25 bp, Homo sapien
ccgggctcccgcgtaccactcaggc

SEQ ID NO: 249668 - DNA, 25 bp, Homo sapien
gggagcgccatcatcgccggggacc

SEQ ID NO: 249669 - DNA, 25 bp, Homo sapien
ccgggacgcggccaaggtcagcggg

SEQ ID NO: 249670 - DNA, 25 bp, Homo sapien
ccctttgcacgcagcgcccctagcc

SEQ ID NO: 249671 - DNA, 25 bp, Homo sapien
tccgtccgtcggcagctcccggagc

SEQ ID NO: 249672 - DNA, 25 bp, Homo sapien
gcgacgcaggcgaacagcggccgct

SEQ ID NO: 249673 - DNA, 25 bp, Homo sapien
ctcccggagcgacgcaggcgaacag

SEQ ID NO: 249674 - DNA, 25 bp, Homo sapien
ggcagctcccggagcgacgcaggcg

SEQ ID NO: 249675 - DNA, 25 bp, Homo sapien
cgccgcggggtggtgccgccgcttt

SEQ ID NO: 249676 - DNA, 25 bp, Homo sapien
tcgctgggaccccgcgcagcctgcc

SEQ ID NO: 249677 - DNA, 25 bp, Homo sapien
cctggccgcccacccgagctgtccc

SEQ ID NO: 249678 - DNA, 25 bp, Homo sapien
cgccgctttgtccgccgcccgcagc

SEQ ID NO: 249679 - DNA, 25 bp, Homo sapien
cccttgcctctgggcgggaaactga

SEQ ID NO: 249680 - DNA, 25 bp, Homo sapien
agcctccgggcactcgaggacgctt

SEQ ID NO: 249681 - DNA, 25 bp, Homo sapien
gcttgggttcatccgcatcctcgag

SEQ ID NO: 249682 - DNA, 25 bp, Homo sapien
gaaactgaggcggagagcctccggg

SEQ ID NO: 249683 - DNA, 25 bp, Homo sapien
tgttgctgagacagaacgccactcc

SEQ ID NO: 249684 - DNA, 25 bp, Homo sapien
gaattcattttagggcccagtcagg

SEQ ID NO: 249685 - DNA, 25 bp, Homo sapien
gagaagcatccgctggaacacaggt

SEQ ID NO: 249686 - DNA, 25 bp, Homo sapien
caaaagtgggcccaagtcatccagt

SEQ ID NO: 249687 - DNA, 25 bp, Homo sapien
gctcagacccttaaaaaccagatag

SEQ ID NO: 249688 - DNA, 25 bp, Homo sapien
tgcatgcacaagctaagctcagacc

SEQ ID NO: 249689 - DNA, 25 bp, Homo sapien
gttccaatactcaaacagttcacag

SEQ ID NO: 249690 - DNA, 25 bp, Homo sapien
gaaccaatgtactggaaaaacacac

SEQ ID NO: 249691 - DNA, 25 bp, Homo sapien
tacagcgtttaatgcagacccaaag

SEQ ID NO: 249692 - DNA, 25 bp, Homo sapien
tacaactactgtggccaaaacgtgg

SEQ ID NO: 249693 - DNA, 25 bp, Homo sapien
cagtagtatgggaagctcacggcct

SEQ ID NO: 249694 - DNA, 25 bp, Homo sapien
caagagctaaatccggtgtcaacag

SEQ ID NO: 249695 - DNA, 25 bp, Homo sapien
caagtttccaaggacgttccagacg

SEQ ID NO: 249696 - DNA, 25 bp, Homo sapien
gatgtgcatcctcggaaagcggcag

SEQ ID NO: 249697 - DNA, 25 bp, Homo sapien
ttttctctctcacgagggactgggc

SEQ ID NO: 249698 - DNA, 25 bp, Homo sapien
gaatattctgcgcaagcctcacagc

SEQ ID NO: 249699 - DNA, 25 bp, Homo sapien
acttttgttgtgttcagtttcacaa

SEQ ID NO: 249700 - DNA, 25 bp, Homo sapien
tttgttgtgttcagtttcacaagca

SEQ ID NO: 249701 - DNA, 25 bp, Homo sapien
cttttgttgtgttcagtttcacaag

SEQ ID NO: 249702 - DNA, 25 bp, Homo sapien
ttttgttgtgttcagtttcacaagc

SEQ ID NO: 249703 - DNA, 25 bp, Homo sapien
tgggagtccacaatggcctaatgca

SEQ ID NO: 249704 - DNA, 25 bp, Homo sapien
caaacggctcgctcaaggtgggtaa

SEQ ID NO: 249705 - DNA, 25 bp, Homo sapien
gaaacgcataatctatccccggcgg

SEQ ID NO: 249706 - DNA, 25 bp, Homo sapien
gcctaatgcacgtttcaagctcttg

SEQ ID NO: 249707 - DNA, 25 bp, Homo sapien
gcgaggtggaagatcagccctttac

SEQ ID NO: 249708 - DNA, 25 bp, Homo sapien
tgcctgatccgacaggccgcacggg

SEQ ID NO: 249709 - DNA, 25 bp, Homo sapien
aattggatgcggtcttggcgtcccg

SEQ ID NO: 249710 - DNA, 25 bp, Homo sapien
caggacgtgacctcacaatgggcgc

SEQ ID NO: 249711 - DNA, 25 bp, Homo sapien
gggaaaaggctacaagccgcgcttc

SEQ ID NO: 249712 - DNA, 25 bp, Homo sapien
aaaaggctacaagccgcgcttcgct

SEQ ID NO: 249713 - DNA, 25 bp, Homo sapien
gagggaaaaggctacaagccgcgct

SEQ ID NO: 249714 - DNA, 25 bp, Homo sapien
gaaaaggctacaagccgcgcttcgc

SEQ ID NO: 249715 - DNA, 25 bp, Homo sapien
cgacgcttccacgacttccgcagct

SEQ ID NO: 249716 - DNA, 25 bp, Homo sapien
gcggcgcagcgaggcagcctggagt

SEQ ID NO: 249717 - DNA, 25 bp, Homo sapien
cgcgcgatgcgtcgccgacgcttcc

SEQ ID NO: 249718 - DNA, 25 bp, Homo sapien
acgacttccgcagctccggcagtcg

SEQ ID NO: 249719 - DNA, 25 bp, Homo sapien
gcccgcgccgcccgccgccccctca

SEQ ID NO: 249720 - DNA, 25 bp, Homo sapien
tcagcccgcgccgcccgccgccccc

SEQ ID NO: 249721 - DNA, 25 bp, Homo sapien
tcgcaccgctgggaaagcgcacggt

SEQ ID NO: 249722 - DNA, 25 bp, Homo sapien
gcaatgctgccgtgcgccgcgggag

SEQ ID NO: 249723 - DNA, 25 bp, Homo sapien
gcttcgcgaccctgccgtaaagcgg

SEQ ID NO: 249724 - DNA, 25 bp, Homo sapien
ctcgcgccgtcgcaatgctgccgtg

SEQ ID NO: 249725 - DNA, 25 bp, Homo sapien
cagcttgttgtcacgtacgtggtgt

SEQ ID NO: 249726 - DNA, 25 bp, Homo sapien
ccagcttgttgtcacgtacgtggtg

SEQ ID NO: 249727 - DNA, 25 bp, Homo sapien
gcacaaatgctggagttataatgat

SEQ ID NO: 249728 - DNA, 25 bp, Homo sapien
aataatgtaccggaagctgcacctg

SEQ ID NO: 249729 - DNA, 25 bp, Homo sapien
ccagttggcgtcaggtacagcattt

SEQ ID NO: 249730 - DNA, 25 bp, Homo sapien
aggccatcccgtagctctggcagag

SEQ ID NO: 249731 - DNA, 25 bp, Homo sapien
tctctggatacttccgaatacctcc

SEQ ID NO: 249732 - DNA, 25 bp, Homo sapien
gggtccttggtgacttattctctgg

SEQ ID NO: 249733 - DNA, 25 bp, Homo sapien
ttccgaatacctcctgcgtgccagg

SEQ ID NO: 249734 - DNA, 25 bp, Homo sapien
ccttggtgacttattctctggatac

SEQ ID NO: 249735 - DNA, 25 bp, Homo sapien
gagaatcaacccctgtcgtcctgag

SEQ ID NO: 249736 - DNA, 25 bp, Homo sapien
tgcagccgcaggaaacacgtgcttt

SEQ ID NO: 249737 - DNA, 25 bp, Homo sapien
gaacctggtagaagccttagtctcc

SEQ ID NO: 249738 - DNA, 25 bp, Homo sapien
gaatgacagctggtgtccgcaagaa

SEQ ID NO: 249739 - DNA, 25 bp, Homo sapien
catctgtgacatgggttgcacctgc

SEQ ID NO: 249740 - DNA, 25 bp, Homo sapien
tctgactgctgcttacgagagatgg

SEQ ID NO: 249741 - DNA, 25 bp, Homo sapien
tgttctgtgctgcgtggccgtgact

SEQ ID NO: 249742 - DNA, 25 bp, Homo sapien
agatctgagccgagggcccgcatca

SEQ ID NO: 249743 - DNA, 25 bp, Homo sapien
cacaggtctggagacgttccctctg

SEQ ID NO: 249744 - DNA, 25 bp, Homo sapien
tgtggtcccagttggccaacatgga

SEQ ID NO: 249745 - DNA, 25 bp, Homo sapien
gaagtccgcctctgctggaggtgcc

SEQ ID NO: 249746 - DNA, 25 bp, Homo sapien
ccaaagatgatcgtgaatcctcggg

SEQ ID NO: 249747 - DNA, 25 bp, Homo sapien
ttcagcatcttacgaggcaaatgca

SEQ ID NO: 249748 - DNA, 25 bp, Homo sapien
cttacgaggcaaatgcaaattaaaa

SEQ ID NO: 249749 - DNA, 25 bp, Homo sapien
gatgttcagcatcttacgaggcaaa

SEQ ID NO: 249750 - DNA, 25 bp, Homo sapien
gaagccgagtcgggacgatcacttg

SEQ ID NO: 249751 - DNA, 25 bp, Homo sapien
ttgaatcagcatgccctcccggctg

SEQ ID NO: 249752 - DNA, 25 bp, Homo sapien
gaagccgcaggacttgacccaggcg

SEQ ID NO: 249753 - DNA, 25 bp, Homo sapien
cggcgaagccgcaggacttgaccca

SEQ ID NO: 249754 - DNA, 25 bp, Homo sapien
agcagcgagcggagcctcgcccatt

SEQ ID NO: 249755 - DNA, 25 bp, Homo sapien
cgcattctggtagggcccacagtcc

SEQ ID NO: 249756 - DNA, 25 bp, Homo sapien
ggaagctgccgaagcgctcggtcat

SEQ ID NO: 249757 - DNA, 25 bp, Homo sapien
ggaagggaagctgccgaagcgctcg

SEQ ID NO: 249758 - DNA, 25 bp, Homo sapien
cgtccccggccgcattctggtaggg

SEQ ID NO: 249759 - DNA, 25 bp, Homo sapien
gaagtgaactttctcggtgcagtcc

SEQ ID NO: 249760 - DNA, 25 bp, Homo sapien
tttcatggcgccaagaggagtctca

SEQ ID NO: 249761 - DNA, 25 bp, Homo sapien
tgcctgcccagacagtactaggaaa

SEQ ID NO: 249762 - DNA, 25 bp, Homo sapien
caggcgtggtctgcagattcttaca

SEQ ID NO: 249763 - DNA, 25 bp, Homo sapien
cagggtttcgtggacattctggaca

SEQ ID NO: 249764 - DNA, 25 bp, Homo sapien
tgccccatgactatgcagcagggtt

SEQ ID NO: 249765 - DNA, 25 bp, Homo sapien
aaatgaggccgttccctttggctct

SEQ ID NO: 249766 - DNA, 25 bp, Homo sapien
gagaaatgcggtgatatgactaccc

SEQ ID NO: 249767 - DNA, 25 bp, Homo sapien
gcattatagtgtgagagttgaccca

SEQ ID NO: 249768 - DNA, 25 bp, Homo sapien
cataactaggtttttgttgtgcaca

SEQ ID NO: 249769 - DNA, 25 bp, Homo sapien
ccacgtgcgtagatgtttgggaaaa

SEQ ID NO: 249770 - DNA, 25 bp, Homo sapien
tgtgcacagcgtgcatgggcacaca

SEQ ID NO: 249771 - DNA, 25 bp, Homo sapien
tgttggtttgggaccacaccggaga

SEQ ID NO: 249772 - DNA, 25 bp, Homo sapien
gaaccactgctaactaatagtccca

SEQ ID NO: 249773 - DNA, 25 bp, Homo sapien
acagtgtgctagtcccactcccaga

SEQ ID NO: 249774 - DNA, 25 bp, Homo sapien
ctaataagttccagttgaggctgac

SEQ ID NO: 249775 - DNA, 25 bp, Homo sapien
gaaaagctgtagtgatctacatctg

SEQ ID NO: 249776 - DNA, 25 bp, Homo sapien
tgatctacatctgaaacacttaatg

SEQ ID NO: 249777 - DNA, 25 bp, Homo sapien
gaaacacttaatgtgtgtttttcca

SEQ ID NO: 249778 - DNA, 25 bp, Homo sapien
gctgtagtgatctacatctgaaaca

SEQ ID NO: 249779 - DNA, 25 bp, Homo sapien
acacgcctgtaatcctgtaatccca

SEQ ID NO: 249780 - DNA, 25 bp, Homo sapien
aatcgcttgaacctgggaggtggag

SEQ ID NO: 249781 - DNA, 25 bp, Homo sapien
gctactcgggaggctgagacaggag

SEQ ID NO: 249782 - DNA, 25 bp, Homo sapien
gctgcagtgagccgatatcatgcca

SEQ ID NO: 249783 - DNA, 25 bp, Homo sapien
taaactgaaatcctggcccgcaggc

SEQ ID NO: 249784 - DNA, 25 bp, Homo sapien
tggccacgggtgatctaccaaaaca

SEQ ID NO: 249785 - DNA, 25 bp, Homo sapien
ggaaggagaactcgtgtcccctgca

SEQ ID NO: 249786 - DNA, 25 bp, Homo sapien
tggtgtgtcccctgatagctctgca

SEQ ID NO: 249787 - DNA, 25 bp, Homo sapien
aaaagagtatacctgtgcccggttg

SEQ ID NO: 249788 - DNA, 25 bp, Homo sapien
tacctgtgcccggttgctgtagctc

SEQ ID NO: 249789 - DNA, 25 bp, Homo sapien
gagtatacctgtgcccggttgctgt

SEQ ID NO: 249790 - DNA, 25 bp, Homo sapien
tgtgcccggttgctgtagctcatgc

SEQ ID NO: 249791 - DNA, 25 bp, Homo sapien
aaaacattgtgcctccctgttggga

SEQ ID NO: 249792 - DNA, 25 bp, Homo sapien
taatgataatcgtcccctgtgggcc

SEQ ID NO: 249793 - DNA, 25 bp, Homo sapien
tcctctatcctaggtggagcccggg

SEQ ID NO: 249794 - DNA, 25 bp, Homo sapien
gattaaactacttgacagcggcacc

SEQ ID NO: 249795 - DNA, 25 bp, Homo sapien
ttgcaatggcatgacggtgacctgt

SEQ ID NO: 249796 - DNA, 25 bp, Homo sapien
ggtctccctaggatatgccccagta

SEQ ID NO: 249797 - DNA, 25 bp, Homo sapien
tacagcaaggcatgtgccgcacgtg

SEQ ID NO: 249798 - DNA, 25 bp, Homo sapien
ggtgacctgttgacgtaactaagcc

SEQ ID NO: 249799 - DNA, 25 bp, Homo sapien
tgccagcctgaaccatgtgacatag

SEQ ID NO: 249800 - DNA, 25 bp, Homo sapien
tgcacacacttgcacggactaacgt

SEQ ID NO: 249801 - DNA, 25 bp, Homo sapien
taaaaatgtagcagtgtgtgaccag

SEQ ID NO: 249802 - DNA, 25 bp, Homo sapien
tgaccagtccccagtgttagaactg

SEQ ID NO: 249803 - DNA, 25 bp, Homo sapien
gtgagccactgcagctggtcttttt

SEQ ID NO: 249804 - DNA, 25 bp, Homo sapien
agtgatcctccacttctgcctcctg

SEQ ID NO: 249805 - DNA, 25 bp, Homo sapien
gccactgcagctggtcttttttttg

SEQ ID NO: 249806 - DNA, 25 bp, Homo sapien
atcctccacttctgcctcctgagca

SEQ ID NO: 249807 - DNA, 25 bp, Homo sapien
gctgatcgtttgtccttgcatgtcc

SEQ ID NO: 249808 - DNA, 25 bp, Homo sapien
agcatgaagcgtgccagctctctga

SEQ ID NO: 249809 - DNA, 25 bp, Homo sapien
gtccgtgtccgggttgcagcatgaa

SEQ ID NO: 249810 - DNA, 25 bp, Homo sapien
tggttgaccgatgtgctgatcgttt

SEQ ID NO: 249811 - DNA, 25 bp, Homo sapien
aagcactcggtgcagttgctcgggc

SEQ ID NO: 249812 - DNA, 25 bp, Homo sapien
tgacactaaaacctgaagcactcgg

SEQ ID NO: 249813 - DNA, 25 bp, Homo sapien
tgttaacatgatgactagcgtgctg

SEQ ID NO: 249814 - DNA, 25 bp, Homo sapien
taaagtactgtcaaagctcgaccaa

SEQ ID NO: 249815 - DNA, 25 bp, Homo sapien
agtacccctttcagaacgataggca

SEQ ID NO: 249816 - DNA, 25 bp, Homo sapien
gattggctcctgctcacggatgctg

SEQ ID NO: 249817 - DNA, 25 bp, Homo sapien
agcattctgttactcggcctgcagc

SEQ ID NO: 249818 - DNA, 25 bp, Homo sapien
gaagcttagcggacactggtcagtg

SEQ ID NO: 249819 - DNA, 25 bp, Homo sapien
ctggctaacatggcgtttcactttt

SEQ ID NO: 249820 - DNA, 25 bp, Homo sapien
tgagggagcacggtggactctgaca

SEQ ID NO: 249821 - DNA, 25 bp, Homo sapien
gctaacatggcgtttcactttttaa

SEQ ID NO: 249822 - DNA, 25 bp, Homo sapien
gctttatggaatgagggagcacggt

SEQ ID NO: 249823 - DNA, 25 bp, Homo sapien
gtttcatcccgcctcatgtcgcagg

SEQ ID NO: 249824 - DNA, 25 bp, Homo sapien
gaaagcgcgtttgtttccacaagac

SEQ ID NO: 249825 - DNA, 25 bp, Homo sapien
taaagagcatacaaaacagacgccg

SEQ ID NO: 249826 - DNA, 25 bp, Homo sapien
aagacaagctccgtgtagtcgccag

SEQ ID NO: 249827 - DNA, 25 bp, Homo sapien
ctgtgtgtggtcgttctggtgagag

SEQ ID NO: 249828 - DNA, 25 bp, Homo sapien
acccttccacccaatagaagtgcgg

SEQ ID NO: 249829 - DNA, 25 bp, Homo sapien
gaagtgcggtgatttcagccatttc

SEQ ID NO: 249830 - DNA, 25 bp, Homo sapien
ctgagtccccgatgtttgaaccctt

SEQ ID NO: 249831 - DNA, 25 bp, Homo sapien
tcgttacaatgtataacaggttttc

SEQ ID NO: 249832 - DNA, 25 bp, Homo sapien
cagtgtttatagtaagatgtattaa

SEQ ID NO: 249833 - DNA, 25 bp, Homo sapien
gctgtgtgtacgctgtggtcagatt

SEQ ID NO: 249834 - DNA, 25 bp, Homo sapien
cattgctaatgatgtatcgttacaa

SEQ ID NO: 249835 - DNA, 25 bp, Homo sapien
tctcagggctgatatgtagacgtgt

SEQ ID NO: 249836 - DNA, 25 bp, Homo sapien
tattctgtttacaattagttcccca

SEQ ID NO: 249837 - DNA, 25 bp, Homo sapien
cagggctgatatgtagacgtgtatt

SEQ ID NO: 249838 - DNA, 25 bp, Homo sapien
gctgatatgtagacgtgtattctgt

SEQ ID NO: 249839 - DNA, 25 bp, Homo sapien
cagtgttctgggactgactgccagg

SEQ ID NO: 249840 - DNA, 25 bp, Homo sapien
tttataatatggtgaggcaatgagg

SEQ ID NO: 249841 - DNA, 25 bp, Homo sapien
tcttcagggcaagacccatggccct

SEQ ID NO: 249842 - DNA, 25 bp, Homo sapien
gtctcattttctaatcgctggcatg

SEQ ID NO: 249843 - DNA, 25 bp, Homo sapien
ccatgttcatgccagtgattcttaa

SEQ ID NO: 249844 - DNA, 25 bp, Homo sapien
tagggtcatagagagccttgataac

SEQ ID NO: 249845 - DNA, 25 bp, Homo sapien
ttgcagaaaggctgttttgtaaaaa

SEQ ID NO: 249846 - DNA, 25 bp, Homo sapien
gtagaattcctgcacttttgcagaa

SEQ ID NO: 249847 - DNA, 25 bp, Homo sapien
cagaactgtgttcccaggtggctga

SEQ ID NO: 249848 - DNA, 25 bp, Homo sapien
cacactactagagacaaggcagtcc

SEQ ID NO: 249849 - DNA, 25 bp, Homo sapien
gcagacgcgttttaaaggcccgagc

SEQ ID NO: 249850 - DNA, 25 bp, Homo sapien
cacagtgtgggactgggtctgcaca

SEQ ID NO: 249851 - DNA, 25 bp, Homo sapien
tcagtgggactgggtcccaggtgtc

SEQ ID NO: 249852 - DNA, 25 bp, Homo sapien
ggactgggtcccaggtgtccctcgc

SEQ ID NO: 249853 - DNA, 25 bp, Homo sapien
actgggtcccaggtgtccctcgcac

SEQ ID NO: 249854 - DNA, 25 bp, Homo sapien
tgggactgggtcccaggtgtccctc

SEQ ID NO: 249855 - DNA, 25 bp, Homo sapien
cagcagtctcaccaggagctggtta

SEQ ID NO: 249856 - DNA, 25 bp, Homo sapien
tcgcggagccggtcagccagcagtc

SEQ ID NO: 249857 - DNA, 25 bp, Homo sapien
agctggttagcccaggttatgccaa

SEQ ID NO: 249858 - DNA, 25 bp, Homo sapien
cccttcggcactgatcgtgtaggaa

SEQ ID NO: 249859 - DNA, 25 bp, Homo sapien
cgtgtgctgcgccctgctcctccat

SEQ ID NO: 249860 - DNA, 25 bp, Homo sapien
ccgtgtgctgcgccctgctcctcca

SEQ ID NO: 249861 - DNA, 25 bp, Homo sapien
cccgtgtgctgcgccctgctcctcc

SEQ ID NO: 249862 - DNA, 25 bp, Homo sapien
gctgtcaaattcacagcggaatggg

SEQ ID NO: 249863 - DNA, 25 bp, Homo sapien
gtcgatgaccaccaggcgagccatg

SEQ ID NO: 249864 - DNA, 25 bp, Homo sapien
ccatgccccgagacagcagtacggg

SEQ ID NO: 249865 - DNA, 25 bp, Homo sapien
gggaccttcttattcacacactcca

SEQ ID NO: 249866 - DNA, 25 bp, Homo sapien
tctttttgtggaaaacgacagcagc

SEQ ID NO: 249867 - DNA, 25 bp, Homo sapien
cagggcgtctctggccgagcctctt

SEQ ID NO: 249868 - DNA, 25 bp, Homo sapien
gtgtcacgcccggagctctgaagac

SEQ ID NO: 249869 - DNA, 25 bp, Homo sapien
aactcgtctgtgcttcatctccagg

SEQ ID NO: 249870 - DNA, 25 bp, Homo sapien
gagcaggtcgcatccttctcagggc

SEQ ID NO: 249871 - DNA, 25 bp, Homo sapien
ttgacagatggtgtacaggcgccca

SEQ ID NO: 249872 - DNA, 25 bp, Homo sapien
cagtggtcaaggatctgaggtcacc

SEQ ID NO: 249873 - DNA, 25 bp, Homo sapien
tgcttcttggctacaggacggactc

SEQ ID NO: 249874 - DNA, 25 bp, Homo sapien
tatccagtcgccctcagtagctgac

SEQ ID NO: 249875 - DNA, 25 bp, Homo sapien
cccagaggccgtctgatccccaagg

SEQ ID NO: 249876 - DNA, 25 bp, Homo sapien
tgagattgtagcaggacccctgctc

SEQ ID NO: 249877 - DNA, 25 bp, Homo sapien
gatgctttagccagaattccctccc

SEQ ID NO: 249878 - DNA, 25 bp, Homo sapien
ggggtgtcatggggcttctcccaca

SEQ ID NO: 249879 - DNA, 25 bp, Homo sapien
ggtgtcatggggcttctcccacact

SEQ ID NO: 249880 - DNA, 25 bp, Homo sapien
gtcatggggcttctcccacactcac

SEQ ID NO: 249881 - DNA, 25 bp, Homo sapien
tgtcatggggcttctcccacactca

SEQ ID NO: 249882 - DNA, 25 bp, Homo sapien
agctctcctggaacgtcagtgcgca

SEQ ID NO: 249883 - DNA, 25 bp, Homo sapien
tcttccgtgcagatgtagacggctc

SEQ ID NO: 249884 - DNA, 25 bp, Homo sapien
tcggccacgtgctcgatgaagatct

SEQ ID NO: 249885 - DNA, 25 bp, Homo sapien
agatctggctgccaaatcggagctt

SEQ ID NO: 249886 - DNA, 25 bp, Homo sapien
taaccttgcatgtggtcacggtggc

SEQ ID NO: 249887 - DNA, 25 bp, Homo sapien
gggagactcccattttcaaggccaa

SEQ ID NO: 249888 - DNA, 25 bp, Homo sapien
tcacagcagctcttccgtgcggtaa

SEQ ID NO: 249889 - DNA, 25 bp, Homo sapien
taagcacgggagtcggaatcacttc

SEQ ID NO: 249890 - DNA, 25 bp, Homo sapien
ccctgtgtgggaagtgagcctagca

SEQ ID NO: 249891 - DNA, 25 bp, Homo sapien
gaagtgagcctagcagatgtgctcg

SEQ ID NO: 249892 - DNA, 25 bp, Homo sapien
gctcggaggtgccaccgatgaaaaa

SEQ ID NO: 249893 - DNA, 25 bp, Homo sapien
ccaccgatgaaaaaatactgccact

SEQ ID NO: 249894 - DNA, 25 bp, Homo sapien
cgagctgcgtccggccagctcagtg

SEQ ID NO: 249895 - DNA, 25 bp, Homo sapien
aggccaccgcggagcagcgcgtcca

SEQ ID NO: 249896 - DNA, 25 bp, Homo sapien
tgctgccgcgggaactgcacagcca

SEQ ID NO: 249897 - DNA, 25 bp, Homo sapien
tgctgcgtggggaaccgctccttct

SEQ ID NO: 249898 - DNA, 25 bp, Homo sapien
tctcaagcggctttaatgggctccc

SEQ ID NO: 249899 - DNA, 25 bp, Homo sapien
ccccatgggtgtaggacaagcaaga

SEQ ID NO: 249900 - DNA, 25 bp, Homo sapien
gatggaaaccttgtccgtccaggcg

SEQ ID NO: 249901 - DNA, 25 bp, Homo sapien
tctgggtgctgactgccaaatccac

SEQ ID NO: 249902 - DNA, 25 bp, Homo sapien
gccgttctcagcaagtgccagacct

SEQ ID NO: 249903 - DNA, 25 bp, Homo sapien
caagtctggtccagaaaagtgtaaa

SEQ ID NO: 249904 - DNA, 25 bp, Homo sapien
cgcaagtgtaaggaggccgttctca

SEQ ID NO: 249905 - DNA, 25 bp, Homo sapien
gagaggttggtcagtctcttcaagt

SEQ ID NO: 249906 - DNA, 25 bp, Homo sapien
gacaaaaggtgctttgttaagagca

SEQ ID NO: 249907 - DNA, 25 bp, Homo sapien
tgggtagggaccggatcccctgctc

SEQ ID NO: 249908 - DNA, 25 bp, Homo sapien
agagcaccgtgcttccgattctggg

SEQ ID NO: 249909 - DNA, 25 bp, Homo sapien
tcagactgtcacaacgcagggcaac

SEQ ID NO: 249910 - DNA, 25 bp, Homo sapien
tcaggtccagtagatccaaatccat

SEQ ID NO: 249911 - DNA, 25 bp, Homo sapien
gggattcaggtccagtagatccaaa

SEQ ID NO: 249912 - DNA, 25 bp, Homo sapien
gattcaggtccagtagatccaaatc

SEQ ID NO: 249913 - DNA, 25 bp, Homo sapien
attctgggattcaggtccagtagat

SEQ ID NO: 249914 - DNA, 25 bp, Homo sapien
tgtcggtgggctggccaccaggatg

SEQ ID NO: 249915 - DNA, 25 bp, Homo sapien
gtgggctggccaccaggatgaataa

SEQ ID NO: 249916 - DNA, 25 bp, Homo sapien
tcggtgggctggccaccaggatgaa

SEQ ID NO: 249917 - DNA, 25 bp, Homo sapien
tttgtcggtgggctggccaccagga

SEQ ID NO: 249918 - DNA, 25 bp, Homo sapien
ctgaggcactcgccttcaattcaaa

SEQ ID NO: 249919 - DNA, 25 bp, Homo sapien
aattctgaggcactcgccttcaatt

SEQ ID NO: 249920 - DNA, 25 bp, Homo sapien
gaggcactcgccttcaattcaaagc

SEQ ID NO: 249921 - DNA, 25 bp, Homo sapien
ttctgaggcactcgccttcaattca

SEQ ID NO: 249922 - DNA, 25 bp, Homo sapien
agcagccgaggtgtccgtgtcatcg

SEQ ID NO: 249923 - DNA, 25 bp, Homo sapien
gaggcccgaaccagggaagtgacag

SEQ ID NO: 249924 - DNA, 25 bp, Homo sapien
gaagtgacagcagccgaggtgtccg

SEQ ID NO: 249925 - DNA, 25 bp, Homo sapien
tgtccgtgtcatcggggctctgtca

SEQ ID NO: 249926 - DNA, 25 bp, Homo sapien
tgcagtttaatttcccttaagtgtc

SEQ ID NO: 249927 - DNA, 25 bp, Homo sapien
gatgacccgcgtgtttttggctgac

SEQ ID NO: 249928 - DNA, 25 bp, Homo sapien
cttggggatgacccgcgtgtttttg

SEQ ID NO: 249929 - DNA, 25 bp, Homo sapien
ctgcagtttaatttcccttaagtgt

SEQ ID NO: 249930 - DNA, 25 bp, Homo sapien
cccagcagccaacagcagaagacag

SEQ ID NO: 249931 - DNA, 25 bp, Homo sapien
atcagtcgcccccagcagccaacag

SEQ ID NO: 249932 - DNA, 25 bp, Homo sapien
ctcagggatccaaacatcagtcgcc

SEQ ID NO: 249933 - DNA, 25 bp, Homo sapien
gagtctgggattggcagggtgctca

SEQ ID NO: 249934 - DNA, 25 bp, Homo sapien
taaggcctttccaacaggccactct

SEQ ID NO: 249935 - DNA, 25 bp, Homo sapien
caggatccatgtcctccagtgaggc

SEQ ID NO: 249936 - DNA, 25 bp, Homo sapien
ggtgagaccaagagtgtccaggaca

SEQ ID NO: 249937 - DNA, 25 bp, Homo sapien
ccttggccgtaacccagcagaggaa

SEQ ID NO: 249938 - DNA, 25 bp, Homo sapien
tggacacgatcacgctggtcactcg

SEQ ID NO: 249939 - DNA, 25 bp, Homo sapien
gcactggcctggacacgatcacgct

SEQ ID NO: 249940 - DNA, 25 bp, Homo sapien
ggtcactcgtatgcccatgttcagc

SEQ ID NO: 249941 - DNA, 25 bp, Homo sapien
cacgctggtcactcgtatgcccatg

SEQ ID NO: 249942 - DNA, 25 bp, Homo sapien
ttggccaacggcagtccggctcctg

SEQ ID NO: 249943 - DNA, 25 bp, Homo sapien
gttggccaacggcagtccggctcct

SEQ ID NO: 249944 - DNA, 25 bp, Homo sapien
ggttggccaacggcagtccggctcc

SEQ ID NO: 249945 - DNA, 25 bp, Homo sapien
cggttggccaacggcagtccggctc

SEQ ID NO: 249946 - DNA, 25 bp, Homo sapien
gctgagaacttggtttaacaggcct

SEQ ID NO: 249947 - DNA, 25 bp, Homo sapien
tgctgagaacttggtttaacaggcc

SEQ ID NO: 249948 - DNA, 25 bp, Homo sapien
tgagaacttggtttaacaggcctgg

SEQ ID NO: 249949 - DNA, 25 bp, Homo sapien
ctgctgagaacttggtttaacaggc

SEQ ID NO: 249950 - DNA, 25 bp, Homo sapien
gagttactgaccctgactgctggac

SEQ ID NO: 249951 - DNA, 25 bp, Homo sapien
gggctggcccaagacagacctgtat

SEQ ID NO: 249952 - DNA, 25 bp, Homo sapien
gaaatgccgtggttactgcctggag

SEQ ID NO: 249953 - DNA, 25 bp, Homo sapien
tacggacggtcacaccagagctgtt

SEQ ID NO: 249954 - DNA, 25 bp, Homo sapien
tccgcactcctcttcccgccgtcct

SEQ ID NO: 249955 - DNA, 25 bp, Homo sapien
gttccgcactcctcttcccgccgtc

SEQ ID NO: 249956 - DNA, 25 bp, Homo sapien
ctcccgcgggttccgcactcctctt

SEQ ID NO: 249957 - DNA, 25 bp, Homo sapien
gcgggttccgcactcctcttcccgc

SEQ ID NO: 249958 - DNA, 25 bp, Homo sapien
aaaaaaggctggtcgtgggatctca

SEQ ID NO: 249959 - DNA, 25 bp, Homo sapien
tggaacctggtgataacgtggcctc

SEQ ID NO: 249960 - DNA, 25 bp, Homo sapien
tagaaattggcctttcagcttgccc

SEQ ID NO: 249961 - DNA, 25 bp, Homo sapien
tctgctgagaatattgagagccctc

SEQ ID NO: 249962 - DNA, 25 bp, Homo sapien
gggctgctctacaagggcgttcact

SEQ ID NO: 249963 - DNA, 25 bp, Homo sapien
tatgtacagtcagtgctccaaggtg

SEQ ID NO: 249964 - DNA, 25 bp, Homo sapien
catgaaaaatagagcctaagggcct

SEQ ID NO: 249965 - DNA, 25 bp, Homo sapien
gcctgggacaaaggtggcctcacag

SEQ ID NO: 249966 - DNA, 25 bp, Homo sapien
aaggatgagtgtccgattcggtgac

SEQ ID NO: 249967 - DNA, 25 bp, Homo sapien
tcacagcggcggacagtgttcactg

SEQ ID NO: 249968 - DNA, 25 bp, Homo sapien
tcagcctttaggtgaactggaacag

SEQ ID NO: 249969 - DNA, 25 bp, Homo sapien
aagagtatatgctgaggctctccca

SEQ ID NO: 249970 - DNA, 25 bp, Homo sapien
cacctggaaactgtaggattcacat

SEQ ID NO: 249971 - DNA, 25 bp, Homo sapien
gattcacattgtggacgctgtctgc

SEQ ID NO: 249972 - DNA, 25 bp, Homo sapien
tggcaaaattcagtccttggaggcg

SEQ ID NO: 249973 - DNA, 25 bp, Homo sapien
cgaaagtacctctcccagttaatgg

SEQ ID NO: 249974 - DNA, 25 bp, Homo sapien
gaccatgcggtgctccaaaaggaag

SEQ ID NO: 249975 - DNA, 25 bp, Homo sapien
ctggaaaacagcacaataatctctt

SEQ ID NO: 249976 - DNA, 25 bp, Homo sapien
tggcaagaccatgcggtgctccaaa

SEQ ID NO: 249977 - DNA, 25 bp, Homo sapien
gtagctggcaagaccatgcggtgct

SEQ ID NO: 249978 - DNA, 25 bp, Homo sapien
tcgctgtcggggtttgatccgtgga

SEQ ID NO: 249979 - DNA, 25 bp, Homo sapien
gctgtcggggtttgatccgtggata

SEQ ID NO: 249980 - DNA, 25 bp, Homo sapien
tgtcggggtttgatccgtggataca

SEQ ID NO: 249981 - DNA, 25 bp, Homo sapien
agtgttcgctgtcggggtttgatcc

SEQ ID NO: 249982 - DNA, 25 bp, Homo sapien
gggcctcgtagtcccacagagcata

SEQ ID NO: 249983 - DNA, 25 bp, Homo sapien
actcagtctcgctttcgtccttgcg

SEQ ID NO: 249984 - DNA, 25 bp, Homo sapien
cagagcatacgccacacctttgttc

SEQ ID NO: 249985 - DNA, 25 bp, Homo sapien
gaaggacagctcgtcactgttctgg

SEQ ID NO: 249986 - DNA, 25 bp, Homo sapien
cagagagcaatggtcaggcctcagc

SEQ ID NO: 249987 - DNA, 25 bp, Homo sapien
gccagagagcaatggtcaggcctca

SEQ ID NO: 249988 - DNA, 25 bp, Homo sapien
agccagagagcaatggtcaggcctc

SEQ ID NO: 249989 - DNA, 25 bp, Homo sapien
ccagagagcaatggtcaggcctcag

SEQ ID NO: 249990 - DNA, 25 bp, Homo sapien
gacactattgaagactagggccccc

SEQ ID NO: 249991 - DNA, 25 bp, Homo sapien
acacagtcgtgctgctgccgaggct

SEQ ID NO: 249992 - DNA, 25 bp, Homo sapien
ctcgaggaacaggacacagtcgtgc

SEQ ID NO: 249993 - DNA, 25 bp, Homo sapien
ctgctcgaggaacaggacacagtcg

SEQ ID NO: 249994 - DNA, 25 bp, Homo sapien
ccgatacctcccctgcccggcccag

SEQ ID NO: 249995 - DNA, 25 bp, Homo sapien
tcctgctgccggccctttctaagtc

SEQ ID NO: 249996 - DNA, 25 bp, Homo sapien
gctcctgctgccggccctttctaag

SEQ ID NO: 249997 - DNA, 25 bp, Homo sapien
ctgctcctgctgccggccctttcta

SEQ ID NO: 249998 - DNA, 25 bp, Homo sapien
cactcgagtgagacatcctggctgc

SEQ ID NO: 249999 - DNA, 25 bp, Homo sapien
gagcagctacttgtgggttcccaag

SEQ ID NO: 250000 - DNA, 25 bp, Homo sapien
tgctgaagcttctctggcaccggct

SEQ ID NO: 250001 - DNA, 25 bp, Homo sapien
gaaaatgcggccctggctaaagcag

SEQ ID NO: 250002 - DNA, 25 bp, Homo sapien
gtttgcagaggtgaacgctgttaca

SEQ ID NO: 250003 - DNA, 25 bp, Homo sapien
catatagaaactgggagcactggat

SEQ ID NO: 250004 - DNA, 25 bp, Homo sapien
tgtctgcagcagtttcaatgtcgct

SEQ ID NO: 250005 - DNA, 25 bp, Homo sapien
caatgtcgcttatggttgaggcaaa

SEQ ID NO: 250006 - DNA, 25 bp, Homo sapien
aaggtgcaggcctggcactgcctgt

SEQ ID NO: 250007 - DNA, 25 bp, Homo sapien
aatagagcgtgggtgaaggtgcagg

SEQ ID NO: 250008 - DNA, 25 bp, Homo sapien
aggtgcaggcctggcactgcctgtc

SEQ ID NO: 250009 - DNA, 25 bp, Homo sapien
ctggaatagagcgtgggtgaaggtg

SEQ ID NO: 250010 - DNA, 25 bp, Homo sapien
ggaatgaacaatgcgacaacctaca

SEQ ID NO: 250011 - DNA, 25 bp, Homo sapien
ggctgcttttcacacggagcacaga

SEQ ID NO: 250012 - DNA, 25 bp, Homo sapien
cagagctcccgaaggcaaacggaat

SEQ ID NO: 250013 - DNA, 25 bp, Homo sapien
gcacagagtgtgaagagtccatacg

SEQ ID NO: 250014 - DNA, 25 bp, Homo sapien
tcagcagcattcacgttgacaccaa

SEQ ID NO: 250015 - DNA, 25 bp, Homo sapien
tggccggcgcagacggcgttgtgca

SEQ ID NO: 250016 - DNA, 25 bp, Homo sapien
tcgttgggcttgctgggatcttcca

SEQ ID NO: 250017 - DNA, 25 bp, Homo sapien
ggaacttcacgatgtgatggtggcc

SEQ ID NO: 250018 - DNA, 25 bp, Homo sapien
tccttccagagacgcgtctaggagc

SEQ ID NO: 250019 - DNA, 25 bp, Homo sapien
tccgctccgagttgggcttcttcaa

SEQ ID NO: 250020 - DNA, 25 bp, Homo sapien
agagacgcgtctaggagcagtgcca

SEQ ID NO: 250021 - DNA, 25 bp, Homo sapien
catagatgatcctctgcaccagatc

SEQ ID NO: 250022 - DNA, 25 bp, Homo sapien
ggctttggtctagcaatgacaccca

SEQ ID NO: 250023 - DNA, 25 bp, Homo sapien
cagaggtcctggttgcatgaatgac

SEQ ID NO: 250024 - DNA, 25 bp, Homo sapien
acaggaccttcaggtgccagcgaca

SEQ ID NO: 250025 - DNA, 25 bp, Homo sapien
tacaagacgtaactcagggacatcc

SEQ ID NO: 250026 - DNA, 25 bp, Homo sapien
gttattgtcctctgccggctcggca

SEQ ID NO: 250027 - DNA, 25 bp, Homo sapien
gggaaggtaactcattatcattggc

SEQ ID NO: 250028 - DNA, 25 bp, Homo sapien
tcagccacaggactcgggatctgct

SEQ ID NO: 250029 - DNA, 25 bp, Homo sapien
cacatcggccaaggtgcccatgaag

SEQ ID NO: 250030 - DNA, 25 bp, Homo sapien
cagggtgttgaagcgctggtacagc

SEQ ID NO: 250031 - DNA, 25 bp, Homo sapien
gccctccatgccaccggccagggtg

SEQ ID NO: 250032 - DNA, 25 bp, Homo sapien
gtgttgaagcgctggtacagcagct

SEQ ID NO: 250033 - DNA, 25 bp, Homo sapien
tccatgccaccggccagggtgttga

SEQ ID NO: 250034 - DNA, 25 bp, Homo sapien
ttggccagcttcctgcggagggcct

SEQ ID NO: 250035 - DNA, 25 bp, Homo sapien
cgtggcaggctctccacggtgctgc

SEQ ID NO: 250036 - DNA, 25 bp, Homo sapien
catcactctggtagcgcagtggcga

SEQ ID NO: 250037 - DNA, 25 bp, Homo sapien
tgtgatggagctgcgctttttcagg

SEQ ID NO: 250038 - DNA, 25 bp, Homo sapien
ctttctcagtactttctgaaggtgg

SEQ ID NO: 250039 - DNA, 25 bp, Homo sapien
gcagcggcgatggagaggttgaacc

SEQ ID NO: 250040 - DNA, 25 bp, Homo sapien
tgtgcccgtggacagtgacccgtga

SEQ ID NO: 250041 - DNA, 25 bp, Homo sapien
tgacccgtgaagaaacggcagcggc

SEQ ID NO: 250042 - DNA, 25 bp, Homo sapien
cctatgattacaccagagacaggct

SEQ ID NO: 250043 - DNA, 25 bp, Homo sapien
gcaattttgacctcactacagagat

SEQ ID NO: 250044 - DNA, 25 bp, Homo sapien
gcagtgcctctctaatgtgtcggtt

SEQ ID NO: 250045 - DNA, 25 bp, Homo sapien
tacagagatctagtcatacacacct

SEQ ID NO: 250046 - DNA, 25 bp, Homo sapien
tatgtcccatagcttggaggcagct

SEQ ID NO: 250047 - DNA, 25 bp, Homo sapien
tttccagggagcttgtcgacccagg

SEQ ID NO: 250048 - DNA, 25 bp, Homo sapien
gacttggcggtacggaaatcctctg

SEQ ID NO: 250049 - DNA, 25 bp, Homo sapien
cactgtcagtgggagttcaggcttg

SEQ ID NO: 250050 - DNA, 25 bp, Homo sapien
ctacacccgggatgggaggtggcac

SEQ ID NO: 250051 - DNA, 25 bp, Homo sapien
tacacccgggatgggaggtggcact

SEQ ID NO: 250052 - DNA, 25 bp, Homo sapien
gtggcactttaccaatctcgatgcc

SEQ ID NO: 250053 - DNA, 25 bp, Homo sapien
gaggtggcactttaccaatctcgat

SEQ ID NO: 250054 - DNA, 25 bp, Homo sapien
ggtcccagtgctgagaagggcacag

SEQ ID NO: 250055 - DNA, 25 bp, Homo sapien
tcggatccttccagtctgcaccggc

SEQ ID NO: 250056 - DNA, 25 bp, Homo sapien
ttctccgtgggtcccagtgctgaga

SEQ ID NO: 250057 - DNA, 25 bp, Homo sapien
gagacagtgccctgcttgacagacc

SEQ ID NO: 250058 - DNA, 25 bp, Homo sapien
ttgaaaagaacacagaacttacgta

SEQ ID NO: 250059 - DNA, 25 bp, Homo sapien
tgaaaagaacacagaacttacgtaa

SEQ ID NO: 250060 - DNA, 25 bp, Homo sapien
cttgaaaagaacacagaacttacgt

SEQ ID NO: 250061 - DNA, 25 bp, Homo sapien
aggctccaggcagcggcttctgaga

SEQ ID NO: 250062 - DNA, 25 bp, Homo sapien
gcaaccccagctgcatacactgctg

SEQ ID NO: 250063 - DNA, 25 bp, Homo sapien
acagctctagtcaagccccgtgggt

SEQ ID NO: 250064 - DNA, 25 bp, Homo sapien
cggcttctgagacagctctagtcaa

SEQ ID NO: 250065 - DNA, 25 bp, Homo sapien
taattaggcccgacgtcgaggtctg

SEQ ID NO: 250066 - DNA, 25 bp, Homo sapien
aggagccataattaggcccgacgtc

SEQ ID NO: 250067 - DNA, 25 bp, Homo sapien
gacgtcgaggtctgacactgtccat

SEQ ID NO: 250068 - DNA, 25 bp, Homo sapien
cagagggccgcgaggagccataatt

SEQ ID NO: 250069 - DNA, 25 bp, Homo sapien
gggctttatagggtcccccagcaca

SEQ ID NO: 250070 - DNA, 25 bp, Homo sapien
gcaatactgagagactggggcttta

SEQ ID NO: 250071 - DNA, 25 bp, Homo sapien
ccggcactgggaacctggatataag

SEQ ID NO: 250072 - DNA, 25 bp, Homo sapien
tggtgatgacgtgccattcacacgg

SEQ ID NO: 250073 - DNA, 25 bp, Homo sapien
aaggaactgtagcttcctatgagca

SEQ ID NO: 250074 - DNA, 25 bp, Homo sapien
tatgagcaattctccgacaacaccc

SEQ ID NO: 250075 - DNA, 25 bp, Homo sapien
tcagcatctagaaggggagactgtg

SEQ ID NO: 250076 - DNA, 25 bp, Homo sapien
aagatcagcatctagaaggggagac

SEQ ID NO: 250077 - DNA, 25 bp, Homo sapien
caattgctcaaaggtacctaggacc

SEQ ID NO: 250078 - DNA, 25 bp, Homo sapien
tgtagccggtactgtctaagccacg

SEQ ID NO: 250079 - DNA, 25 bp, Homo sapien
caatgggcccagttccctgaaggca

SEQ ID NO: 250080 - DNA, 25 bp, Homo sapien
cctaggacctttgggtggagacgca

SEQ ID NO: 250081 - DNA, 25 bp, Homo sapien
cacaggtgcgagaaagtcaagtgcc

SEQ ID NO: 250082 - DNA, 25 bp, Homo sapien
gaatagctttcagatggtgcaacca

SEQ ID NO: 250083 - DNA, 25 bp, Homo sapien
catctttcagagcagtagaggctaa

SEQ ID NO: 250084 - DNA, 25 bp, Homo sapien
taccacgagggcagaatgcactcag

SEQ ID NO: 250085 - DNA, 25 bp, Homo sapien
tacagcaagaacatgaggctacgca

SEQ ID NO: 250086 - DNA, 25 bp, Homo sapien
taaaatggcagagtgcggaccgtga

SEQ ID NO: 250087 - DNA, 25 bp, Homo sapien
gggcaggtaggacaaatcactttac

SEQ ID NO: 250088 - DNA, 25 bp, Homo sapien
tcaaagtggcacagcttaaaatggc

SEQ ID NO: 250089 - DNA, 25 bp, Homo sapien
ttttcccatagagacgttcacgcag

SEQ ID NO: 250090 - DNA, 25 bp, Homo sapien
gttcacgcagttcactgattcgctt

SEQ ID NO: 250091 - DNA, 25 bp, Homo sapien
ttcactgattcgcttgtccatcatg

SEQ ID NO: 250092 - DNA, 25 bp, Homo sapien
tcccatagagacgttcacgcagttc

SEQ ID NO: 250093 - DNA, 25 bp, Homo sapien
catgttgcgcttatttaagagttcc

SEQ ID NO: 250094 - DNA, 25 bp, Homo sapien
atgttgcgcttatttaagagttcct

SEQ ID NO: 250095 - DNA, 25 bp, Homo sapien
ccatgttgcgcttatttaagagttc

SEQ ID NO: 250096 - DNA, 25 bp, Homo sapien
ctccatgttgcgcttatttaagagt

SEQ ID NO: 250097 - DNA, 25 bp, Homo sapien
gccgctggtcccgtcaatttgccat

SEQ ID NO: 250098 - DNA, 25 bp, Homo sapien
taaatcttccaattgctgactaagc

SEQ ID NO: 250099 - DNA, 25 bp, Homo sapien
ttcctggaacatggcactgaacctt

SEQ ID NO: 250100 - DNA, 25 bp, Homo sapien
tttgccattgtaagactggaaccca

SEQ ID NO: 250101 - DNA, 25 bp, Homo sapien
gctggtaccaacgtaacaagaggat

SEQ ID NO: 250102 - DNA, 25 bp, Homo sapien
tatgtttcactggatctgggcctgg

SEQ ID NO: 250103 - DNA, 25 bp, Homo sapien
tctgagggccgcaagagatcttttt

SEQ ID NO: 250104 - DNA, 25 bp, Homo sapien
gaatgagtaagtcttggagcgcccc

SEQ ID NO: 250105 - DNA, 25 bp, Homo sapien
gacttgtcctctcattgcacgaatt

SEQ ID NO: 250106 - DNA, 25 bp, Homo sapien
gacggcgctcctgttgctttagaaa

SEQ ID NO: 250107 - DNA, 25 bp, Homo sapien
gattttgctgtagtcgacttgtcct

SEQ ID NO: 250108 - DNA, 25 bp, Homo sapien
cctgggcttcaactcgttctttcaa

SEQ ID NO: 250109 - DNA, 25 bp, Homo sapien
tatggaagtgataacaaagagagaa

SEQ ID NO: 250110 - DNA, 25 bp, Homo sapien
gagaaagactgcatttagcactcct

SEQ ID NO: 250111 - DNA, 25 bp, Homo sapien
agtgagatgctcttgttctgatagc

SEQ ID NO: 250112 - DNA, 25 bp, Homo sapien
caacttccagaaactacagtatgca

SEQ ID NO: 250113 - DNA, 25 bp, Homo sapien
gctgctgttgcctagctgccatatc

SEQ ID NO: 250114 - DNA, 25 bp, Homo sapien
tgctgttgcctagctgccatatctt

SEQ ID NO: 250115 - DNA, 25 bp, Homo sapien
tgttgcctagctgccatatcttgga

SEQ ID NO: 250116 - DNA, 25 bp, Homo sapien
tgcctagctgccatatcttggagct

SEQ ID NO: 250117 - DNA, 25 bp, Homo sapien
ctgagagggtaagttcaacacgtgg

SEQ ID NO: 250118 - DNA, 25 bp, Homo sapien
taagttcaacacgtggattcccaac

SEQ ID NO: 250119 - DNA, 25 bp, Homo sapien
gagggtaagttcaacacgtggattc

SEQ ID NO: 250120 - DNA, 25 bp, Homo sapien
ggtaagttcaacacgtggattccca

SEQ ID NO: 250121 - DNA, 25 bp, Homo sapien
ctatcctctcgcctagctaggacta

SEQ ID NO: 250122 - DNA, 25 bp, Homo sapien
tgcccagacttaaacactttttgac

SEQ ID NO: 250123 - DNA, 25 bp, Homo sapien
atcctctcgcctagctaggactaca

SEQ ID NO: 250124 - DNA, 25 bp, Homo sapien
ctgtgcccagacttaaacacttttt

SEQ ID NO: 250125 - DNA, 25 bp, Homo sapien
gagcaagagaacgactcagtccctg

SEQ ID NO: 250126 - DNA, 25 bp, Homo sapien
aagagaacgactcagtccctgggtg

SEQ ID NO: 250127 - DNA, 25 bp, Homo sapien
aaccaagagcaagagaacgactcag

SEQ ID NO: 250128 - DNA, 25 bp, Homo sapien
gcctgaaaaacgggaaccaagagca

SEQ ID NO: 250129 - DNA, 25 bp, Homo sapien
cacactgccaccttatgacagggat

SEQ ID NO: 250130 - DNA, 25 bp, Homo sapien
taaaagattcgttgtcaccagcact

SEQ ID NO: 250131 - DNA, 25 bp, Homo sapien
ggaatgtgtccatgaaatagggttg

SEQ ID NO: 250132 - DNA, 25 bp, Homo sapien
gataatgagatggacccggatttca

SEQ ID NO: 250133 - DNA, 25 bp, Homo sapien
caccagcaatggacaccagtgtgtc

SEQ ID NO: 250134 - DNA, 25 bp, Homo sapien
tattcagtcagatggatacaccaca

SEQ ID NO: 250135 - DNA, 25 bp, Homo sapien
tcttccggacgcttcatataagtga

SEQ ID NO: 250136 - DNA, 25 bp, Homo sapien
aaactgttctccaaagcgattgcac

SEQ ID NO: 250137 - DNA, 25 bp, Homo sapien
agcaggcactctttccatcacatgg

SEQ ID NO: 250138 - DNA, 25 bp, Homo sapien
ggtatccgtggttgctcctaatcaa

SEQ ID NO: 250139 - DNA, 25 bp, Homo sapien
ggctttcccacgcttaagtgtcagg

SEQ ID NO: 250140 - DNA, 25 bp, Homo sapien
ggtcagtagcagtgccaggatccta

SEQ ID NO: 250141 - DNA, 25 bp, Homo sapien
ataaataaataagaactgaaaatct

SEQ ID NO: 250142 - DNA, 25 bp, Homo sapien
aaataaataagaactgaaaatctat

SEQ ID NO: 250143 - DNA, 25 bp, Homo sapien
aataaataagaactgaaaatctata

SEQ ID NO: 250144 - DNA, 25 bp, Homo sapien
taaataaataagaactgaaaatcta

SEQ ID NO: 250145 - DNA, 25 bp, Homo sapien
caagataccttatgaacacggatgc

SEQ ID NO: 250146 - DNA, 25 bp, Homo sapien
tatctaaaatgcatactagctccct

SEQ ID NO: 250147 - DNA, 25 bp, Homo sapien
taaattatatgctcagtattcccag

SEQ ID NO: 250148 - DNA, 25 bp, Homo sapien
gaataaaacctacttatgctcacgt

SEQ ID NO: 250149 - DNA, 25 bp, Homo sapien
caggatgcgaagacctacaacctca

SEQ ID NO: 250150 - DNA, 25 bp, Homo sapien
tccctggcagctggtgaagtctggc

SEQ ID NO: 250151 - DNA, 25 bp, Homo sapien
tgcccacaaacgtccaggatgcgaa

SEQ ID NO: 250152 - DNA, 25 bp, Homo sapien
agacttaagctcattccattgtgga

SEQ ID NO: 250153 - DNA, 25 bp, Homo sapien
tgaaaccataacagtattcagtatg

SEQ ID NO: 250154 - DNA, 25 bp, Homo sapien
aactatgaaatcagcacaatcaaga

SEQ ID NO: 250155 - DNA, 25 bp, Homo sapien
aaaatgtaaccaaagagcaactaag

SEQ ID NO: 250156 - DNA, 25 bp, Homo sapien
cactgaccttccctgttactagaga

SEQ ID NO: 250157 - DNA, 25 bp, Homo sapien
attcactaactgaaagatgaatctt

SEQ ID NO: 250158 - DNA, 25 bp, Homo sapien
cactaactgaaagatgaatcttagg

SEQ ID NO: 250159 - DNA, 25 bp, Homo sapien
agacaaaattcactaactgaaagat

SEQ ID NO: 250160 - DNA, 25 bp, Homo sapien
gacaaaattcactaactgaaagatg

SEQ ID NO: 250161 - DNA, 25 bp, Homo sapien
gaagttggcaaaagaacagacgaga

SEQ ID NO: 250162 - DNA, 25 bp, Homo sapien
ggctctgctcacaagggaggattaa

SEQ ID NO: 250163 - DNA, 25 bp, Homo sapien
cagagctgttgacagatgccaatcc

SEQ ID NO: 250164 - DNA, 25 bp, Homo sapien
taactgacctagtacatctgagaca

SEQ ID NO: 250165 - DNA, 25 bp, Homo sapien
gatcttcaacattctgttggacaaa

SEQ ID NO: 250166 - DNA, 25 bp, Homo sapien
cgcgcccgtcccatggtaaatctta

SEQ ID NO: 250167 - DNA, 25 bp, Homo sapien
cgtcccatggtaaatcttagaactc

SEQ ID NO: 250168 - DNA, 25 bp, Homo sapien
aagatcttcaacattctgttggaca

SEQ ID NO: 250169 - DNA, 25 bp, Homo sapien
cattttcagtacgtttttctccagg

SEQ ID NO: 250170 - DNA, 25 bp, Homo sapien
ccattttcagtacgtttttctccag

SEQ ID NO: 250171 - DNA, 25 bp, Homo sapien
tattacatttctctgagttcgttgc

SEQ ID NO: 250172 - DNA, 25 bp, Homo sapien
tctgagttcgttgctcttgggtctg

SEQ ID NO: 250173 - DNA, 25 bp, Homo sapien
tctgaagatgttcgtacatcatatg

SEQ ID NO: 250174 - DNA, 25 bp, Homo sapien
tgttcgtacatcatatgatcaaagg

SEQ ID NO: 250175 - DNA, 25 bp, Homo sapien
catatgatcaaagggtatgggacgt

SEQ ID NO: 250176 - DNA, 25 bp, Homo sapien
tcctcgtgtcgaaggaaaaatttca

SEQ ID NO: 250177 - DNA, 25 bp, Homo sapien
tgccatctcggctcactacaacctc

SEQ ID NO: 250178 - DNA, 25 bp, Homo sapien
tttgctcttatcacttaggctggag

SEQ ID NO: 250179 - DNA, 25 bp, Homo sapien
tgcctccagggttcgagagattctc

SEQ ID NO: 250180 - DNA, 25 bp, Homo sapien
agattctcctgcctcggcctcctga

SEQ ID NO: 250181 - DNA, 25 bp, Homo sapien
ggccaggtgcagtaagttttatgtg

SEQ ID NO: 250182 - DNA, 25 bp, Homo sapien
ccggccaggtgcagtaagttttatg

SEQ ID NO: 250183 - DNA, 25 bp, Homo sapien
cggccaggtgcagtaagttttatgt

SEQ ID NO: 250184 - DNA, 25 bp, Homo sapien
taggaacttctgttaaaatctgttc

SEQ ID NO: 250185 - DNA, 25 bp, Homo sapien
caacatctcgacaggttgtttccgg

SEQ ID NO: 250186 - DNA, 25 bp, Homo sapien
tgctcaagaaaacagttaatatcat

SEQ ID NO: 250187 - DNA, 25 bp, Homo sapien
tccaggttccttgcaaaattctaca

SEQ ID NO: 250188 - DNA, 25 bp, Homo sapien
gcagaatgccctgtttcactcagta

SEQ ID NO: 250189 - DNA, 25 bp, Homo sapien
tcagaatgaaggatggtatggcagc

SEQ ID NO: 250190 - DNA, 25 bp, Homo sapien
tatagcacgcgtaaagcagtaccct

SEQ ID NO: 250191 - DNA, 25 bp, Homo sapien
tgcttacttgctctgaaacgcggaa

SEQ ID NO: 250192 - DNA, 25 bp, Homo sapien
gacctgagaaagactggaaccaatg

SEQ ID NO: 250193 - DNA, 25 bp, Homo sapien
gagaaagactggaaccaatgtctgc

SEQ ID NO: 250194 - DNA, 25 bp, Homo sapien
cctgagaaagactggaaccaatgtc

SEQ ID NO: 250195 - DNA, 25 bp, Homo sapien
aaagactggaaccaatgtctgccca

SEQ ID NO: 250196 - DNA, 25 bp, Homo sapien
ccccagctccacgaagttgaaagct

SEQ ID NO: 250197 - DNA, 25 bp, Homo sapien
tcagctcctctgttcagcaaacaca

SEQ ID NO: 250198 - DNA, 25 bp, Homo sapien
caaacacaggaaagccccagctcca

SEQ ID NO: 250199 - DNA, 25 bp, Homo sapien
gctcctctgttcagcaaacacagga

SEQ ID NO: 250200 - DNA, 25 bp, Homo sapien
tttcaagctatcaaaaagatcagtc

SEQ ID NO: 250201 - DNA, 25 bp, Homo sapien
cccagccctagtcctttcagaagaa

SEQ ID NO: 250202 - DNA, 25 bp, Homo sapien
gcttacattagaagctgcaaactta

SEQ ID NO: 250203 - DNA, 25 bp, Homo sapien
taaaacaacactacataggtgcctc

SEQ ID NO: 250204 - DNA, 25 bp, Homo sapien
gaagacttctacagagatttgattg

SEQ ID NO: 250205 - DNA, 25 bp, Homo sapien
ggtcgccgtaagctgagatcgtatc

SEQ ID NO: 250206 - DNA, 25 bp, Homo sapien
gtcacagcactttgtacgacagcaa

SEQ ID NO: 250207 - DNA, 25 bp, Homo sapien
aaaattagccgtttgccgtggcgtg

SEQ ID NO: 250208 - DNA, 25 bp, Homo sapien
cagacacttagtaccagaaaaaatg

SEQ ID NO: 250209 - DNA, 25 bp, Homo sapien
tgtaaaatgcaaactgtcaccggat

SEQ ID NO: 250210 - DNA, 25 bp, Homo sapien
tatactctaagcctatgttgtccaa

SEQ ID NO: 250211 - DNA, 25 bp, Homo sapien
cactggaaatgtgctagtctgagct

SEQ ID NO: 250212 - DNA, 25 bp, Homo sapien
aagatggctctccaaatccgtgcac

SEQ ID NO: 250213 - DNA, 25 bp, Homo sapien
gtgcactcggcacctttcctcagta

SEQ ID NO: 250214 - DNA, 25 bp, Homo sapien
caacattgcagatacgggaaaaggg

SEQ ID NO: 250215 - DNA, 25 bp, Homo sapien
gaaaagggaattcctaagatggctc

SEQ ID NO: 250216 - DNA, 25 bp, Homo sapien
cgaggagatgaccggccccaaatgc

SEQ ID NO: 250217 - DNA, 25 bp, Homo sapien
ccgaggagatgaccggccccaaatg

SEQ ID NO: 250218 - DNA, 25 bp, Homo sapien
accgaggagatgaccggccccaaat

SEQ ID NO: 250219 - DNA, 25 bp, Homo sapien
gaccgaggagatgaccggccccaaa

SEQ ID NO: 250220 - DNA, 25 bp, Homo sapien
ctcggccgccgcctgacaggacgct

SEQ ID NO: 250221 - DNA, 25 bp, Homo sapien
ctccgcgccgagctgtgcccaccgc

SEQ ID NO: 250222 - DNA, 25 bp, Homo sapien
tccggccgcctcctaaggccgcgct

SEQ ID NO: 250223 - DNA, 25 bp, Homo sapien
gggagagtccgcgacgccctcggcc

SEQ ID NO: 250224 - DNA, 25 bp, Homo sapien
ctgcgtcgctgtcccgggcacccgg

SEQ ID NO: 250225 - DNA, 25 bp, Homo sapien
gctgcgtcgctgtcccgggcacccg

SEQ ID NO: 250226 - DNA, 25 bp, Homo sapien
tgcgtcgctgtcccgggcacccggc

SEQ ID NO: 250227 - DNA, 25 bp, Homo sapien
gggcctgagcgccggagtgacagag

SEQ ID NO: 250228 - DNA, 25 bp, Homo sapien
cctcgggcctgagcgccggagtgac

SEQ ID NO: 250229 - DNA, 25 bp, Homo sapien
gcagtcccgtctccagaggcgccgc

SEQ ID NO: 250230 - DNA, 25 bp, Homo sapien
ccccctcgggcctgagcgccggagt

SEQ ID NO: 250231 - DNA, 25 bp, Homo sapien
cagatgtgccgtctccggaggtcac

SEQ ID NO: 250232 - DNA, 25 bp, Homo sapien
tcagatgtgccgtctccggaggtca

SEQ ID NO: 250233 - DNA, 25 bp, Homo sapien
catagtggccatcaacagcttggcc

SEQ ID NO: 250234 - DNA, 25 bp, Homo sapien
agccatgcgacctgtggcccgcggt

SEQ ID NO: 250235 - DNA, 25 bp, Homo sapien
tcctatcaattgcaggatggactct

SEQ ID NO: 250236 - DNA, 25 bp, Homo sapien
aactcggccgcaggatcttttccta

SEQ ID NO: 250237 - DNA, 25 bp, Homo sapien
ctctgacctcctcttgggaagacga

SEQ ID NO: 250238 - DNA, 25 bp, Homo sapien
tgacctcctcttgggaagacgaggt

SEQ ID NO: 250239 - DNA, 25 bp, Homo sapien
tgaatgtaaatacggtccaacatca

SEQ ID NO: 250240 - DNA, 25 bp, Homo sapien
tttcagatttcttcccggtcagccc

SEQ ID NO: 250241 - DNA, 25 bp, Homo sapien
gatccaccagaggaaatgctcggga

SEQ ID NO: 250242 - DNA, 25 bp, Homo sapien
cagtatgttttcagtcccctctgtg

SEQ ID NO: 250243 - DNA, 25 bp, Homo sapien
tcgggaaacgctgacgcctgctttg

SEQ ID NO: 250244 - DNA, 25 bp, Homo sapien
cctgtttcagggtcaccgaatgaga

SEQ ID NO: 250245 - DNA, 25 bp, Homo sapien
aaggttcctgcatgcgggtgcctac

SEQ ID NO: 250246 - DNA, 25 bp, Homo sapien
ctccagcgggcgagtgccccaccct

SEQ ID NO: 250247 - DNA, 25 bp, Homo sapien
ggcgagtgccccaccctcgcctgca

SEQ ID NO: 250248 - DNA, 25 bp, Homo sapien
gaaagtggccatggccatgccgcct

SEQ ID NO: 250249 - DNA, 25 bp, Homo sapien
tttgcctgagttgcgcccgaactgg

SEQ ID NO: 250250 - DNA, 25 bp, Homo sapien
ccgaaagaactgatagccaccgtcc

SEQ ID NO: 250251 - DNA, 25 bp, Homo sapien
ctgagtgctggtggccgaaagaact

SEQ ID NO: 250252 - DNA, 25 bp, Homo sapien
tgctggtggccgaaagaactgatag

SEQ ID NO: 250253 - DNA, 25 bp, Homo sapien
tcagccggtgctgaaggtgagtcat

SEQ ID NO: 250254 - DNA, 25 bp, Homo sapien
ggtccccacggagttggtcatcttc

SEQ ID NO: 250255 - DNA, 25 bp, Homo sapien
ctcaggtccccacggagttggtcat

SEQ ID NO: 250256 - DNA, 25 bp, Homo sapien
gaaggtgagtcatgctcgatgatga

SEQ ID NO: 250257 - DNA, 25 bp, Homo sapien
gaccagctctgctctgccagctcct

SEQ ID NO: 250258 - DNA, 25 bp, Homo sapien
gtgaccagctctgctctgccagctc

SEQ ID NO: 250259 - DNA, 25 bp, Homo sapien
ctcgtgcagtgaccagctctgctct

SEQ ID NO: 250260 - DNA, 25 bp, Homo sapien
cagtgaccagctctgctctgccagc

SEQ ID NO: 250261 - DNA, 25 bp, Homo sapien
acagcacgatcctatcatctgctgc

SEQ ID NO: 250262 - DNA, 25 bp, Homo sapien
tggaccggggctattacattattgt

SEQ ID NO: 250263 - DNA, 25 bp, Homo sapien
ttattttctgattaccaaggcggta

SEQ ID NO: 250264 - DNA, 25 bp, Homo sapien
gcccacagcacgatcctatcatctg

SEQ ID NO: 250265 - DNA, 25 bp, Homo sapien
aggcctgatgctggcgcccgtcaga

SEQ ID NO: 250266 - DNA, 25 bp, Homo sapien
ccgtcagacggttcctaacagcaca

SEQ ID NO: 250267 - DNA, 25 bp, Homo sapien
tgctggcgcccgtcagacggttcct

SEQ ID NO: 250268 - DNA, 25 bp, Homo sapien
taacagcacagacgtccaggattgt

SEQ ID NO: 250269 - DNA, 25 bp, Homo sapien
cgtttattgagcagtagaatacaag

SEQ ID NO: 250270 - DNA, 25 bp, Homo sapien
gtttattgagcagtagaatacaagt

SEQ ID NO: 250271 - DNA, 25 bp, Homo sapien
tcagagtatgcctgacacgccggag

SEQ ID NO: 250272 - DNA, 25 bp, Homo sapien
tgtacaactgaggtaattatttcac

SEQ ID NO: 250273 - DNA, 25 bp, Homo sapien
gatcaccaagtcctgtacaactgag

SEQ ID NO: 250274 - DNA, 25 bp, Homo sapien
gcatgacaaattatctactcagagt

SEQ ID NO: 250275 - DNA, 25 bp, Homo sapien
ttcatgccatgaagtaaacggtact

SEQ ID NO: 250276 - DNA, 25 bp, Homo sapien
catgccatgaagtaaacggtactta

SEQ ID NO: 250277 - DNA, 25 bp, Homo sapien
tcatgccatgaagtaaacggtactt

SEQ ID NO: 250278 - DNA, 25 bp, Homo sapien
tgccatgaagtaaacggtacttata

SEQ ID NO: 250279 - DNA, 25 bp, Homo sapien
gactgacgttttctttcacatgtac

SEQ ID NO: 250280 - DNA, 25 bp, Homo sapien
tacaggcagactgacgttttctttc

SEQ ID NO: 250281 - DNA, 25 bp, Homo sapien
ttgctgaaatttacaggcagactga

SEQ ID NO: 250282 - DNA, 25 bp, Homo sapien
tacagtgacgttccacgctccccat

SEQ ID NO: 250283 - DNA, 25 bp, Homo sapien
ttagtgatgaccaggagcaggcgct

SEQ ID NO: 250284 - DNA, 25 bp, Homo sapien
agtgatgaccaggagcaggcgctga

SEQ ID NO: 250285 - DNA, 25 bp, Homo sapien
tagtgatgaccaggagcaggcgctg

SEQ ID NO: 250286 - DNA, 25 bp, Homo sapien
tgatgaccaggagcaggcgctgaag

SEQ ID NO: 250287 - DNA, 25 bp, Homo sapien
taggacagcatgcttgcacagctca

SEQ ID NO: 250288 - DNA, 25 bp, Homo sapien
tcattagggaacttctaggacagca

SEQ ID NO: 250289 - DNA, 25 bp, Homo sapien
aaaaacacatcattacgggtaggct

SEQ ID NO: 250290 - DNA, 25 bp, Homo sapien
tcaaactcatgtagccagtcctggg

SEQ ID NO: 250291 - DNA, 25 bp, Homo sapien
gctgaaggcattgtagcttaggtaa

SEQ ID NO: 250292 - DNA, 25 bp, Homo sapien
tgtagcttaggtaaagcaattcagg

SEQ ID NO: 250293 - DNA, 25 bp, Homo sapien
aattaacatttagctgaaggcattg

SEQ ID NO: 250294 - DNA, 25 bp, Homo sapien
aaagcagtcatatcaatgctttaca

SEQ ID NO: 250295 - DNA, 25 bp, Homo sapien
agttccccaattgggccaggtgttg

SEQ ID NO: 250296 - DNA, 25 bp, Homo sapien
agtcttgttcaaagttccccaattg

SEQ ID NO: 250297 - DNA, 25 bp, Homo sapien
gttcatacctagttagaacccatag

SEQ ID NO: 250298 - DNA, 25 bp, Homo sapien
ggactgtaggtagctctaatgttca

SEQ ID NO: 250299 - DNA, 25 bp, Homo sapien
ctgtattttttacgaaggactgtag

SEQ ID NO: 250300 - DNA, 25 bp, Homo sapien
tcttttatagctgacatgtgctccc

SEQ ID NO: 250301 - DNA, 25 bp, Homo sapien
ttttataaacgatgaagcccatcag

SEQ ID NO: 250302 - DNA, 25 bp, Homo sapien
agcagcccggattttataaacgatg

SEQ ID NO: 250303 - DNA, 25 bp, Homo sapien
taaactttggtgtagtagggcttca

SEQ ID NO: 250304 - DNA, 25 bp, Homo sapien
ctatccaaatctcctggtaaacttt

SEQ ID NO: 250305 - DNA, 25 bp, Homo sapien
ggggatccatatgtttttaataata

SEQ ID NO: 250306 - DNA, 25 bp, Homo sapien
tgtttttaataatactttgaagcat

SEQ ID NO: 250307 - DNA, 25 bp, Homo sapien
ggatccatatgtttttaataatact

SEQ ID NO: 250308 - DNA, 25 bp, Homo sapien
tatgtttttaataatactttgaagc

SEQ ID NO: 250309 - DNA, 25 bp, Homo sapien
ggctcagcacactctgatcagctgt

SEQ ID NO: 250310 - DNA, 25 bp, Homo sapien
gaaaaagaatatggccagggcatgg

SEQ ID NO: 250311 - DNA, 25 bp, Homo sapien
gaatgtcgcattcgaagctgaaaaa

SEQ ID NO: 250312 - DNA, 25 bp, Homo sapien
ttgtgaaactaatgccaggctcagc

SEQ ID NO: 250313 - DNA, 25 bp, Homo sapien
ggatccaaagaatccgaatgctcgg

SEQ ID NO: 250314 - DNA, 25 bp, Homo sapien
gaatgctcggcagtgtgctcccttt

SEQ ID NO: 250315 - DNA, 25 bp, Homo sapien
gctttaccgcactgaatccttcaca

SEQ ID NO: 250316 - DNA, 25 bp, Homo sapien
tgtgtgtgtcagctttaccgcactg

SEQ ID NO: 250317 - DNA, 25 bp, Homo sapien
tgctcctgatgacgagaacctacct

SEQ ID NO: 250318 - DNA, 25 bp, Homo sapien
tggagaaagctcctataaagcgggt

SEQ ID NO: 250319 - DNA, 25 bp, Homo sapien
ccaaatctgtacgtcatgctcctga

SEQ ID NO: 250320 - DNA, 25 bp, Homo sapien
ctactggacagaggagcaccaacag

SEQ ID NO: 250321 - DNA, 25 bp, Homo sapien
tcctgtcctcaagctactcgaatgc

SEQ ID NO: 250322 - DNA, 25 bp, Homo sapien
gatagtccgccctcaaatttcctgt

SEQ ID NO: 250323 - DNA, 25 bp, Homo sapien
aagctactcgaatgctctgacagtg

SEQ ID NO: 250324 - DNA, 25 bp, Homo sapien
atgcgactgtgtccttctcctggaa

SEQ ID NO: 250325 - DNA, 25 bp, Homo sapien
gaagccccagactaggagttcagag

SEQ ID NO: 250326 - DNA, 25 bp, Homo sapien
caaacaagacccagaggaggtttct

SEQ ID NO: 250327 - DNA, 25 bp, Homo sapien
tgggaatatgtcacagatgatccaa

SEQ ID NO: 250328 - DNA, 25 bp, Homo sapien
tggaagccccagactaggagttcag

SEQ ID NO: 250329 - DNA, 25 bp, Homo sapien
gaagcattctacaggaccgatgggt

SEQ ID NO: 250330 - DNA, 25 bp, Homo sapien
agcattctacaggaccgatgggttt

SEQ ID NO: 250331 - DNA, 25 bp, Homo sapien
ggaagcattctacaggaccgatggg

SEQ ID NO: 250332 - DNA, 25 bp, Homo sapien
gaaggaagcattctacaggaccgat

SEQ ID NO: 250333 - DNA, 25 bp, Homo sapien
cacttaagtctgcaaagttttggca

SEQ ID NO: 250334 - DNA, 25 bp, Homo sapien
tggcacattacattaagggcgaact

SEQ ID NO: 250335 - DNA, 25 bp, Homo sapien
tcagttttacagcaccagacctttt

SEQ ID NO: 250336 - DNA, 25 bp, Homo sapien
tcataggccaaacgtgtgtctactg

SEQ ID NO: 250337 - DNA, 25 bp, Homo sapien
tcatgtacagcataacgtggagggc

SEQ ID NO: 250338 - DNA, 25 bp, Homo sapien
gacccgcgagttccatacaatttca

SEQ ID NO: 250339 - DNA, 25 bp, Homo sapien
gaaatgggaaatgtctgacccgcga

SEQ ID NO: 250340 - DNA, 25 bp, Homo sapien
tgaacctctcaaggccaaggtacgc

SEQ ID NO: 250341 - DNA, 25 bp, Homo sapien
gaacgcaccacaaatctgcagccaa

SEQ ID NO: 250342 - DNA, 25 bp, Homo sapien
gctcagaacgcaccacaaatctgca

SEQ ID NO: 250343 - DNA, 25 bp, Homo sapien
tcagaacgcaccacaaatctgcagc

SEQ ID NO: 250344 - DNA, 25 bp, Homo sapien
gacggctcagaacgcaccacaaatc

SEQ ID NO: 250345 - DNA, 25 bp, Homo sapien
gattagagccatgctctcgataccg

SEQ ID NO: 250346 - DNA, 25 bp, Homo sapien
tcgataccgtctctgtatttgttca

SEQ ID NO: 250347 - DNA, 25 bp, Homo sapien
tctttcctgagagcccacatgggcc

SEQ ID NO: 250348 - DNA, 25 bp, Homo sapien
ttgccactgcttgggctttacactg

SEQ ID NO: 250349 - DNA, 25 bp, Homo sapien
atattaggtgcaaggatgtcctggt

SEQ ID NO: 250350 - DNA, 25 bp, Homo sapien
tgtcctggtacgtctgacccacgaa

SEQ ID NO: 250351 - DNA, 25 bp, Homo sapien
gcaaggatgtcctggtacgtctgac

SEQ ID NO: 250352 - DNA, 25 bp, Homo sapien
tacgtctgacccacgaacgcaaatc

SEQ ID NO: 250353 - DNA, 25 bp, Homo sapien
cacacaggggttgccacggaactcc

SEQ ID NO: 250354 - DNA, 25 bp, Homo sapien
gtgaaacagactcccgggccagccg

SEQ ID NO: 250355 - DNA, 25 bp, Homo sapien
agggagtgaccggagggcattttct

SEQ ID NO: 250356 - DNA, 25 bp, Homo sapien
gccagggagtgaccggagggcattt

SEQ ID NO: 250357 - DNA, 25 bp, Homo sapien
taaagttgctttagttcctgtgagg

SEQ ID NO: 250358 - DNA, 25 bp, Homo sapien
tgtaagtaacttaactagatgggtg

SEQ ID NO: 250359 - DNA, 25 bp, Homo sapien
cattgtagaataaaagtcaaggtta

SEQ ID NO: 250360 - DNA, 25 bp, Homo sapien
caggatactgaccttgtaacaaaga

SEQ ID NO: 250361 - DNA, 25 bp, Homo sapien
tctacgtaactggaaatggtgggta

SEQ ID NO: 250362 - DNA, 25 bp, Homo sapien
atttcatctttgtctgccctcttgg

SEQ ID NO: 250363 - DNA, 25 bp, Homo sapien
ttgtctacgtaactggaaatggtgg

SEQ ID NO: 250364 - DNA, 25 bp, Homo sapien
ctttgtgtttttgtctacgtaactg

SEQ ID NO: 250365 - DNA, 25 bp, Homo sapien
gcagagcagtccatgctccctgagt

SEQ ID NO: 250366 - DNA, 25 bp, Homo sapien
cagagcagtccatgctccctgagtc

SEQ ID NO: 250367 - DNA, 25 bp, Homo sapien
agagcagtccatgctccctgagtcc

SEQ ID NO: 250368 - DNA, 25 bp, Homo sapien
aacttgcttgaagatgtagactatt

SEQ ID NO: 250369 - DNA, 25 bp, Homo sapien
tgtagactatttcccatggcagtac

SEQ ID NO: 250370 - DNA, 25 bp, Homo sapien
cccatggcagtacatcattttctgc

SEQ ID NO: 250371 - DNA, 25 bp, Homo sapien
gagctgcttaggaagtctttcagaa

SEQ ID NO: 250372 - DNA, 25 bp, Homo sapien
acccaccttttgagtattttgcatg

SEQ ID NO: 250373 - DNA, 25 bp, Homo sapien
tacagcttgaataatgtatacaagt

SEQ ID NO: 250374 - DNA, 25 bp, Homo sapien
taaaacaattgctcaccagacatct

SEQ ID NO: 250375 - DNA, 25 bp, Homo sapien
cagacatctacacagttaaagaatt

SEQ ID NO: 250376 - DNA, 25 bp, Homo sapien
tgtgagcaaagaacttcaagttgtc

SEQ ID NO: 250377 - DNA, 25 bp, Homo sapien
tctgagccagttgtaatccacacct

SEQ ID NO: 250378 - DNA, 25 bp, Homo sapien
gccattttaattcccgaagcagagt

SEQ ID NO: 250379 - DNA, 25 bp, Homo sapien
taatctctctcgctcctttaggtgc

SEQ ID NO: 250380 - DNA, 25 bp, Homo sapien
tatgtctgagccaggatagtgtgtg

SEQ ID NO: 250381 - DNA, 25 bp, Homo sapien
tgtcactatgtctgagccaggatag

SEQ ID NO: 250382 - DNA, 25 bp, Homo sapien
gatagtgtgtgggtttgtaggaatc

SEQ ID NO: 250383 - DNA, 25 bp, Homo sapien
tagtgtgtgggtttgtaggaatcgt

SEQ ID NO: 250384 - DNA, 25 bp, Homo sapien
gatgctggtcctaaatgcattccga

SEQ ID NO: 250385 - DNA, 25 bp, Homo sapien
taaagcaccatagatgcgctccgag

SEQ ID NO: 250386 - DNA, 25 bp, Homo sapien
ccgacatgtctttggtagtgaaacg

SEQ ID NO: 250387 - DNA, 25 bp, Homo sapien
cctctgtagaaggaatgcgccacct

SEQ ID NO: 250388 - DNA, 25 bp, Homo sapien
gaaactctgcacctatgaagcaact

SEQ ID NO: 250389 - DNA, 25 bp, Homo sapien
cagtcgtgcaccgttaagtatattc

SEQ ID NO: 250390 - DNA, 25 bp, Homo sapien
cacattgttgtgaaagggatcctgg

SEQ ID NO: 250391 - DNA, 25 bp, Homo sapien
ctcatgtggcagacgggtaaaaaag

SEQ ID NO: 250392 - DNA, 25 bp, Homo sapien
gacccaaaaaggagagtcggaggca

SEQ ID NO: 250393 - DNA, 25 bp, Homo sapien
gcctggtgacttggcgctgcctcct

SEQ ID NO: 250394 - DNA, 25 bp, Homo sapien
tgcccgaggccaggacgactccgag

SEQ ID NO: 250395 - DNA, 25 bp, Homo sapien
gactgaggcgcagggaggccttcgg

SEQ ID NO: 250396 - DNA, 25 bp, Homo sapien
gccttgctggctccattgacagatg

SEQ ID NO: 250397 - DNA, 25 bp, Homo sapien
tggtcaagatttgcactccagacag

SEQ ID NO: 250398 - DNA, 25 bp, Homo sapien
cctggtcttgcttttgaagggactt

SEQ ID NO: 250399 - DNA, 25 bp, Homo sapien
gacttgagcccctcggctaggcctt

SEQ ID NO: 250400 - DNA, 25 bp, Homo sapien
atcagtcgcgggacctatgggcccg

SEQ ID NO: 250401 - DNA, 25 bp, Homo sapien
gcgagggcgtctaaggcgtccggta

SEQ ID NO: 250402 - DNA, 25 bp, Homo sapien
ggctgcgccgcataaaaggcgccgc

SEQ ID NO: 250403 - DNA, 25 bp, Homo sapien
tccccgggccgtggaggatcagtcg

SEQ ID NO: 250404 - DNA, 25 bp, Homo sapien
accacccttgttcgtgctccatcct

SEQ ID NO: 250405 - DNA, 25 bp, Homo sapien
gctgaccacccttgttcgtgctcca

SEQ ID NO: 250406 - DNA, 25 bp, Homo sapien
agctgaccacccttgttcgtgctcc

SEQ ID NO: 250407 - DNA, 25 bp, Homo sapien
tgaccacccttgttcgtgctccatc

SEQ ID NO: 250408 - DNA, 25 bp, Homo sapien
gctgtgccgcacactgcgtgcccgt

SEQ ID NO: 250409 - DNA, 25 bp, Homo sapien
caggaaaggtccccgccttcataag

SEQ ID NO: 250410 - DNA, 25 bp, Homo sapien
taagcataaaccttctctgcaaagg

SEQ ID NO: 250411 - DNA, 25 bp, Homo sapien
gccaacggggctgtgccgcacactg

SEQ ID NO: 250412 - DNA, 25 bp, Homo sapien
tgacatggcgggtggcctcccagaa

SEQ ID NO: 250413 - DNA, 25 bp, Homo sapien
atccactgacatggcgggtggcctc

SEQ ID NO: 250414 - DNA, 25 bp, Homo sapien
aagcccttggtccgctgaagggagc

SEQ ID NO: 250415 - DNA, 25 bp, Homo sapien
cactgacatggcgggtggcctccca

SEQ ID NO: 250416 - DNA, 25 bp, Homo sapien
tggcgccgctgaaaacgttctcctt

SEQ ID NO: 250417 - DNA, 25 bp, Homo sapien
aaggcgcctaatatcccctgggcag

SEQ ID NO: 250418 - DNA, 25 bp, Homo sapien
ggcctagcgcatttaggcgaacctc

SEQ ID NO: 250419 - DNA, 25 bp, Homo sapien
gcacagaaagtctagcccagcctta

SEQ ID NO: 250420 - DNA, 25 bp, Homo sapien
tggaggtccataggccaaggttgaa

SEQ ID NO: 250421 - DNA, 25 bp, Homo sapien
tgaaagtaaagtcgtcgtgcccggc

SEQ ID NO: 250422 - DNA, 25 bp, Homo sapien
gcacaatcgggatcctggagtggag

SEQ ID NO: 250423 - DNA, 25 bp, Homo sapien
gctgcgcacgctccgtggtccggtt

SEQ ID NO: 250424 - DNA, 25 bp, Homo sapien
tgagcttgtgcttcccgaagcgccg

SEQ ID NO: 250425 - DNA, 25 bp, Homo sapien
tatagagagtgtgtgtcccggagca

SEQ ID NO: 250426 - DNA, 25 bp, Homo sapien
caccccgtgttctgcggatatggga

SEQ ID NO: 250427 - DNA, 25 bp, Homo sapien
cttgcgccttgctaggatgggcgaa

SEQ ID NO: 250428 - DNA, 25 bp, Homo sapien
cagatccagatgtgggctgacgccc

SEQ ID NO: 250429 - DNA, 25 bp, Homo sapien
gtttgggtgttgtcctcagtaccca

SEQ ID NO: 250430 - DNA, 25 bp, Homo sapien
gatgtgggctgacgcccgttttcat

SEQ ID NO: 250431 - DNA, 25 bp, Homo sapien
tcctcagtacccagatccagatgtg

SEQ ID NO: 250432 - DNA, 25 bp, Homo sapien
acagttagacctaaagtggcccgcg

SEQ ID NO: 250433 - DNA, 25 bp, Homo sapien
aattaattccggagctgagttccca

SEQ ID NO: 250434 - DNA, 25 bp, Homo sapien
tgtaaagacacgtgccgttcgcaga

SEQ ID NO: 250435 - DNA, 25 bp, Homo sapien
gacacgcagagtacgctgggcttgc

SEQ ID NO: 250436 - DNA, 25 bp, Homo sapien
ctgcgaacttccgagcggctgggcc

SEQ ID NO: 250437 - DNA, 25 bp, Homo sapien
tcggggccggatcacgtagccgcgg

SEQ ID NO: 250438 - DNA, 25 bp, Homo sapien
cgcaggctctgcgaacttccgagcg

SEQ ID NO: 250439 - DNA, 25 bp, Homo sapien
tctgtgcgctgcgcagcccgcggta

SEQ ID NO: 250440 - DNA, 25 bp, Homo sapien
gggccttacgggtgtcattgtcctg

SEQ ID NO: 250441 - DNA, 25 bp, Homo sapien
catcctggggccttacgggtgtcat

SEQ ID NO: 250442 - DNA, 25 bp, Homo sapien
ccttacgggtgtcattgtcctgtcc

SEQ ID NO: 250443 - DNA, 25 bp, Homo sapien
ccagagtcccagcaaaattgcagcc

SEQ ID NO: 250444 - DNA, 25 bp, Homo sapien
tctttagcaacacccgatgcctgca

SEQ ID NO: 250445 - DNA, 25 bp, Homo sapien
ctgggacccggcctggctattagag

SEQ ID NO: 250446 - DNA, 25 bp, Homo sapien
catctgtctcatgcttggatcttca

SEQ ID NO: 250447 - DNA, 25 bp, Homo sapien
tattagaggccctcgcctccgggct

SEQ ID NO: 250448 - DNA, 25 bp, Homo sapien
tgcctggttcctaggcctgcgggca

SEQ ID NO: 250449 - DNA, 25 bp, Homo sapien
ggtggcgtcggttttgagtcctcaa

SEQ ID NO: 250450 - DNA, 25 bp, Homo sapien
tggctgacatgtccctgccaggatg

SEQ ID NO: 250451 - DNA, 25 bp, Homo sapien
tatccaaatactttcggcagcgtgg

SEQ ID NO: 250452 - DNA, 25 bp, Homo sapien
tccctgcctggcatgtgcggcaccg

SEQ ID NO: 250453 - DNA, 25 bp, Homo sapien
ccgctccctgcctggcatgtgcggc

SEQ ID NO: 250454 - DNA, 25 bp, Homo sapien
gcaccggcacggtgaggtggccctg

SEQ ID NO: 250455 - DNA, 25 bp, Homo sapien
tgcctggcatgtgcggcaccggcac

SEQ ID NO: 250456 - DNA, 25 bp, Homo sapien
ggtgattccggtccgggtggcactg

SEQ ID NO: 250457 - DNA, 25 bp, Homo sapien
cagtgtggtgaggtgattccggtcc

SEQ ID NO: 250458 - DNA, 25 bp, Homo sapien
tgtggtgaggtgattccggtccggg

SEQ ID NO: 250459 - DNA, 25 bp, Homo sapien
aggtgattccggtccgggtggcact

SEQ ID NO: 250460 - DNA, 25 bp, Homo sapien
gccccaaggtggacgagggaatgtg

SEQ ID NO: 250461 - DNA, 25 bp, Homo sapien
ccaaggtggacgagggaatgtgaca

SEQ ID NO: 250462 - DNA, 25 bp, Homo sapien
ccgccccaaggtggacgagggaatg

SEQ ID NO: 250463 - DNA, 25 bp, Homo sapien
ctgcccgccccaaggtggacgaggg

SEQ ID NO: 250464 - DNA, 25 bp, Homo sapien
ctctgcgtgtggtccaaagccgtgt

SEQ ID NO: 250465 - DNA, 25 bp, Homo sapien
cttggcgggagctctgcgtgtggtc

SEQ ID NO: 250466 - DNA, 25 bp, Homo sapien
gggcccctctatcctcccgcggctg

SEQ ID NO: 250467 - DNA, 25 bp, Homo sapien
aagccgtgtcccctctgtggcgggc

SEQ ID NO: 250468 - DNA, 25 bp, Homo sapien
actgtctccgcaggccatctgtgta

SEQ ID NO: 250469 - DNA, 25 bp, Homo sapien
tgtgtaccctgcatccgcacaggtg

SEQ ID NO: 250470 - DNA, 25 bp, Homo sapien
ccactgtctccgcaggccatctgtg

SEQ ID NO: 250471 - DNA, 25 bp, Homo sapien
gctggtgactctccacgctcaggac

SEQ ID NO: 250472 - DNA, 25 bp, Homo sapien
tccctcctctgcacgctttcctgtg

SEQ ID NO: 250473 - DNA, 25 bp, Homo sapien
ccctcctctgcacgctttcctgtgc

SEQ ID NO: 250474 - DNA, 25 bp, Homo sapien
ctccctcctctgcacgctttcctgt

SEQ ID NO: 250475 - DNA, 25 bp, Homo sapien
gtggtccttatcctgggtcaggagc

SEQ ID NO: 250476 - DNA, 25 bp, Homo sapien
actgtggtccttatcctgggtcagg

SEQ ID NO: 250477 - DNA, 25 bp, Homo sapien
acctgagtccactgatggtcctgga

SEQ ID NO: 250478 - DNA, 25 bp, Homo sapien
caggccacgacctgagtccactgat

SEQ ID NO: 250479 - DNA, 25 bp, Homo sapien
caccatgtttctcctcgctcaggtc

SEQ ID NO: 250480 - DNA, 25 bp, Homo sapien
gccacgacctgagtccactgatggt

SEQ ID NO: 250481 - DNA, 25 bp, Homo sapien
gaagcagctgactcttgcttatgtt

SEQ ID NO: 250482 - DNA, 25 bp, Homo sapien
tcctgaggctgcaaagttctttaaa

SEQ ID NO: 250483 - DNA, 25 bp, Homo sapien
tttggcctggtagtgcattctttgc

SEQ ID NO: 250484 - DNA, 25 bp, Homo sapien
tgggtgcaacagtcattcctgaggc

SEQ ID NO: 250485 - DNA, 25 bp, Homo sapien
cataaggctttcctcgtggaggttg

SEQ ID NO: 250486 - DNA, 25 bp, Homo sapien
gcacaggcttcagagcggccgctcc

SEQ ID NO: 250487 - DNA, 25 bp, Homo sapien
tcagagcggccgctcccagattcct

SEQ ID NO: 250488 - DNA, 25 bp, Homo sapien
acaggcttcagagcggccgctccca

SEQ ID NO: 250489 - DNA, 25 bp, Homo sapien
ggcttcagagcggccgctcccagat

SEQ ID NO: 250490 - DNA, 25 bp, Homo sapien
tccgcttccgcttccgcatccgcat

SEQ ID NO: 250491 - DNA, 25 bp, Homo sapien
gcttccgcttccgcttccgcatccg

SEQ ID NO: 250492 - DNA, 25 bp, Homo sapien
ttccgcttccgcttccgcatccgca

SEQ ID NO: 250493 - DNA, 25 bp, Homo sapien
tccgcttccgcttccgcttccgcat

SEQ ID NO: 250494 - DNA, 25 bp, Homo sapien
tcattcacgaggaaacgggatcttt

SEQ ID NO: 250495 - DNA, 25 bp, Homo sapien
tgatctagaaccacaggttccgcgg

SEQ ID NO: 250496 - DNA, 25 bp, Homo sapien
gatacccactgatgacctgtgaggg

SEQ ID NO: 250497 - DNA, 25 bp, Homo sapien
cagaaagctgtttggcgcgtgatct

SEQ ID NO: 250498 - DNA, 25 bp, Homo sapien
gagctgcagaatcggttccccaggg

SEQ ID NO: 250499 - DNA, 25 bp, Homo sapien
tgtcctggtttggaggtgaaggctc

SEQ ID NO: 250500 - DNA, 25 bp, Homo sapien
gtcctggtttggaggtgaaggctct

SEQ ID NO: 250501 - DNA, 25 bp, Homo sapien
ggagctgcagaatcggttccccagg

SEQ ID NO: 250502 - DNA, 25 bp, Homo sapien
caataaatatgcagtcgatgatgac

SEQ ID NO: 250503 - DNA, 25 bp, Homo sapien
gcagtcccggttgtcatctatgtgg

SEQ ID NO: 250504 - DNA, 25 bp, Homo sapien
gaagccgttgctggtctccggaagc

SEQ ID NO: 250505 - DNA, 25 bp, Homo sapien
gaagatgagcgttcatgggccgtct

SEQ ID NO: 250506 - DNA, 25 bp, Homo sapien
ggccgtggaccttgccttgatccca

SEQ ID NO: 250507 - DNA, 25 bp, Homo sapien
tttccacgctgtccgtgggaccagg

SEQ ID NO: 250508 - DNA, 25 bp, Homo sapien
gggctgagccgtcagcggccgtgga

SEQ ID NO: 250509 - DNA, 25 bp, Homo sapien
ccgagccactttctgcacatgatct

SEQ ID NO: 250510 - DNA, 25 bp, Homo sapien
agtgtcacctgtggcgacagcccgc

SEQ ID NO: 250511 - DNA, 25 bp, Homo sapien
tggctctgacgtctctgtcctgcag

SEQ ID NO: 250512 - DNA, 25 bp, Homo sapien
cagctctgtggacgcctctttctaa

SEQ ID NO: 250513 - DNA, 25 bp, Homo sapien
cttcctgagaacaggcgcaccaggg

SEQ ID NO: 250514 - DNA, 25 bp, Homo sapien
gcaggttttgtgaccgtgtcggcac

SEQ ID NO: 250515 - DNA, 25 bp, Homo sapien
cagcgagatgtgagatctgcagcca

SEQ ID NO: 250516 - DNA, 25 bp, Homo sapien
gacggcatcgccttgatgtgagcac

SEQ ID NO: 250517 - DNA, 25 bp, Homo sapien
gaccatgtgacaagaaaacctcggc

SEQ ID NO: 250518 - DNA, 25 bp, Homo sapien
gacagtgagttgctataaagtgaga

SEQ ID NO: 250519 - DNA, 25 bp, Homo sapien
caggactgggttagtgattgtgaca

SEQ ID NO: 250520 - DNA, 25 bp, Homo sapien
gattaatgccatctaaccacagtgc

SEQ ID NO: 250521 - DNA, 25 bp, Homo sapien
tatcagcaaactgggaatagaggat

SEQ ID NO: 250522 - DNA, 25 bp, Homo sapien
ggacactgcccttccgtctgtggca

SEQ ID NO: 250523 - DNA, 25 bp, Homo sapien
aaggcactgcagcccgtcacaggtg

SEQ ID NO: 250524 - DNA, 25 bp, Homo sapien
gctgcttttgcctgccggagggcag

SEQ ID NO: 250525 - DNA, 25 bp, Homo sapien
ggtggggagcggctgtccgtgcctc

SEQ ID NO: 250526 - DNA, 25 bp, Homo sapien
ttaggaagcaaaggtgtgcgctcat

SEQ ID NO: 250527 - DNA, 25 bp, Homo sapien
tcatgacgtaacagccaccatctaa

SEQ ID NO: 250528 - DNA, 25 bp, Homo sapien
aaaggtgtgcgctcatctccgccat

SEQ ID NO: 250529 - DNA, 25 bp, Homo sapien
tcatctccgccatcatcatgacgta

SEQ ID NO: 250530 - DNA, 25 bp, Homo sapien
cccctgcgtgggcaaggttccattt

SEQ ID NO: 250531 - DNA, 25 bp, Homo sapien
gaaggtgctgcagccgctgacagac

SEQ ID NO: 250532 - DNA, 25 bp, Homo sapien
cagagagcatccctgaggcttgtgt

SEQ ID NO: 250533 - DNA, 25 bp, Homo sapien
gacagacagctacctgctcctgggt

SEQ ID NO: 250534 - DNA, 25 bp, Homo sapien
cagcaagggagccggtgtcgacccc

SEQ ID NO: 250535 - DNA, 25 bp, Homo sapien
gacagcaagggagccggtgtcgacc

SEQ ID NO: 250536 - DNA, 25 bp, Homo sapien
caagggagccggtgtcgacccccat

SEQ ID NO: 250537 - DNA, 25 bp, Homo sapien
ggtgggaagcccctgtgaggacagc

SEQ ID NO: 250538 - DNA, 25 bp, Homo sapien
tggcctttaatatccccacgtgccg

SEQ ID NO: 250539 - DNA, 25 bp, Homo sapien
taacgactggttggatttcacgctt

SEQ ID NO: 250540 - DNA, 25 bp, Homo sapien
cttgttgcagctgtaccaaaccagg

SEQ ID NO: 250541 - DNA, 25 bp, Homo sapien
gtgccgcggctgcattggaacccag

SEQ ID NO: 250542 - DNA, 25 bp, Homo sapien
gcccactgtcttctgcgggaccctg

SEQ ID NO: 250543 - DNA, 25 bp, Homo sapien
tggcctgagactgtctgcccactgt

SEQ ID NO: 250544 - DNA, 25 bp, Homo sapien
acgtctgccagcatcctgtcgatgg

SEQ ID NO: 250545 - DNA, 25 bp, Homo sapien
ccagcatcctgtcgatggcctgaga

SEQ ID NO: 250546 - DNA, 25 bp, Homo sapien
gttattgccgcacactgaatgccaa

SEQ ID NO: 250547 - DNA, 25 bp, Homo sapien
tgcatcgtaatgacgcgtgctggct

SEQ ID NO: 250548 - DNA, 25 bp, Homo sapien
ctggctctcgaggaaggatgtgaca

SEQ ID NO: 250549 - DNA, 25 bp, Homo sapien
ccaaatgaacccataacggtggtgg

SEQ ID NO: 250550 - DNA, 25 bp, Homo sapien
tccatgggcggagaatacactgacg

SEQ ID NO: 250551 - DNA, 25 bp, Homo sapien
tggaagtgtccctacatacccgtgt

SEQ ID NO: 250552 - DNA, 25 bp, Homo sapien
gatggtgcccctcaaggatatggcc

SEQ ID NO: 250553 - DNA, 25 bp, Homo sapien
gaggcttacgtggatcatgtctacc

SEQ ID NO: 250554 - DNA, 25 bp, Homo sapien
acaagcctctcgtctgggagccgag

SEQ ID NO: 250555 - DNA, 25 bp, Homo sapien
tggctcttgagcacgagagtggcag

SEQ ID NO: 250556 - DNA, 25 bp, Homo sapien
ggagccgaggcaggcgcttgcaggc

SEQ ID NO: 250557 - DNA, 25 bp, Homo sapien
agtggcaggacaagcctctcgtctg

SEQ ID NO: 250558 - DNA, 25 bp, Homo sapien
cgtggtgacagggtggtggctctcc

SEQ ID NO: 250559 - DNA, 25 bp, Homo sapien
cactgggtggactcttgagaggaat

SEQ ID NO: 250560 - DNA, 25 bp, Homo sapien
ccatctgtgccatgggatgagcacc

SEQ ID NO: 250561 - DNA, 25 bp, Homo sapien
ctggcccactggaatcgtggtgaca

SEQ ID NO: 250562 - DNA, 25 bp, Homo sapien
ctgggactgagcatttggtcctgtg

SEQ ID NO: 250563 - DNA, 25 bp, Homo sapien
ggactgagcatttggtcctgtgtcc

SEQ ID NO: 250564 - DNA, 25 bp, Homo sapien
gcttccctgggctatcccaggggtg

SEQ ID NO: 250565 - DNA, 25 bp, Homo sapien
gggactgagcatttggtcctgtgtc

SEQ ID NO: 250566 - DNA, 25 bp, Homo sapien
ccctccgtggtggtactctcgtcag

SEQ ID NO: 250567 - DNA, 25 bp, Homo sapien
tggtactctcgtcagacaccagcct

SEQ ID NO: 250568 - DNA, 25 bp, Homo sapien
ggtggtactctcgtcagacaccagc

SEQ ID NO: 250569 - DNA, 25 bp, Homo sapien
tccgtggtggtactctcgtcagaca

SEQ ID NO: 250570 - DNA, 25 bp, Homo sapien
tgtggtcccagagtgcgtgaccgtc

SEQ ID NO: 250571 - DNA, 25 bp, Homo sapien
cgtgaccgtcaaccagagcagggac

SEQ ID NO: 250572 - DNA, 25 bp, Homo sapien
aggctcgaggttcaggcgaccagca

SEQ ID NO: 250573 - DNA, 25 bp, Homo sapien
tgtgtgccgggcacagcagtctcgc

SEQ ID NO: 250574 - DNA, 25 bp, Homo sapien
ggccgtagagggcggctctctcatt

SEQ ID NO: 250575 - DNA, 25 bp, Homo sapien
tctgcagatgaggagttctctcatc

SEQ ID NO: 250576 - DNA, 25 bp, Homo sapien
gaacctcacggctcaaggaacagaa

SEQ ID NO: 250577 - DNA, 25 bp, Homo sapien
tgaaccgccttagaggggccgtaga

SEQ ID NO: 250578 - DNA, 25 bp, Homo sapien
cttctctgcggcggccatcctccgt

SEQ ID NO: 250579 - DNA, 25 bp, Homo sapien
ggccatcctccgtgtgccttcaggg

SEQ ID NO: 250580 - DNA, 25 bp, Homo sapien
ggcggccatcctccgtgtgccttca

SEQ ID NO: 250581 - DNA, 25 bp, Homo sapien
cggccatcctccgtgtgccttcagg

SEQ ID NO: 250582 - DNA, 25 bp, Homo sapien
ctgaccctgagctttctcatccttt

SEQ ID NO: 250583 - DNA, 25 bp, Homo sapien
attaggatcgggacaggcctctcct

SEQ ID NO: 250584 - DNA, 25 bp, Homo sapien
ctgttctccccgaggcagcggatga

SEQ ID NO: 250585 - DNA, 25 bp, Homo sapien
gagggctccgcactttcctctctga

SEQ ID NO: 250586 - DNA, 25 bp, Homo sapien
agtgcttgtgaagcacgctggattt

SEQ ID NO: 250587 - DNA, 25 bp, Homo sapien
ttgtgaagcacgctggattttccgc

SEQ ID NO: 250588 - DNA, 25 bp, Homo sapien
acgctggattttccgctcttctctg

SEQ ID NO: 250589 - DNA, 25 bp, Homo sapien
tgaagcacgctggattttccgctct

SEQ ID NO: 250590 - DNA, 25 bp, Homo sapien
cggagcccgtgtgcttctcataggt

SEQ ID NO: 250591 - DNA, 25 bp, Homo sapien
tttccaatgcccagttcggagcccg

SEQ ID NO: 250592 - DNA, 25 bp, Homo sapien
agttcggagcccgtgtgcttctcat

SEQ ID NO: 250593 - DNA, 25 bp, Homo sapien
tgcccagttcggagcccgtgtgctt

SEQ ID NO: 250594 - DNA, 25 bp, Homo sapien
acacaacggcattcctgggcagcat

SEQ ID NO: 250595 - DNA, 25 bp, Homo sapien
gtcgggtggtggtgagtccaggccc

SEQ ID NO: 250596 - DNA, 25 bp, Homo sapien
cccgggctccgatgggagatcggat

SEQ ID NO: 250597 - DNA, 25 bp, Homo sapien
tcgcagcccagcagggtcgggtggt

SEQ ID NO: 250598 - DNA, 25 bp, Homo sapien
ctgtccatccgtccacatgtctgcc

SEQ ID NO: 250599 - DNA, 25 bp, Homo sapien
cagacgccacatggggatggccgac

SEQ ID NO: 250600 - DNA, 25 bp, Homo sapien
actggtgacggtgcctgcagcagac

SEQ ID NO: 250601 - DNA, 25 bp, Homo sapien
cacatgtctgcctccactggtgacg

SEQ ID NO: 250602 - DNA, 25 bp, Homo sapien
aagagcgttctggtccacacacgac

SEQ ID NO: 250603 - DNA, 25 bp, Homo sapien
agtgtctgtccatcaggcccacagg

SEQ ID NO: 250604 - DNA, 25 bp, Homo sapien
gcagagctcaggcaacgatgacgat

SEQ ID NO: 250605 - DNA, 25 bp, Homo sapien
tgctccacagtcgacaaagagcgtt

SEQ ID NO: 250606 - DNA, 25 bp, Homo sapien
aacatgcgaccaggccatgtttgcg

SEQ ID NO: 250607 - DNA, 25 bp, Homo sapien
cctctcatcaaaacatgcgaccagg

SEQ ID NO: 250608 - DNA, 25 bp, Homo sapien
gggcctgaggtcgatcaggagcagg

SEQ ID NO: 250609 - DNA, 25 bp, Homo sapien
agagatgaggcgtgaacacctggct

SEQ ID NO: 250610 - DNA, 25 bp, Homo sapien
aaggtcctgagattcagacggtggt

SEQ ID NO: 250611 - DNA, 25 bp, Homo sapien
gcgttttagagtgaagtccacagga

SEQ ID NO: 250612 - DNA, 25 bp, Homo sapien
cagcagctgaaacaggacgggcagt

SEQ ID NO: 250613 - DNA, 25 bp, Homo sapien
tgagccggcatccagggcaaggtcc

SEQ ID NO: 250614 - DNA, 25 bp, Homo sapien
ccattgtcaggtgggattgcgtaaa

SEQ ID NO: 250615 - DNA, 25 bp, Homo sapien
tccccgctgcttttcagaattgctg

SEQ ID NO: 250616 - DNA, 25 bp, Homo sapien
gaattgcagtactcgctgtgcacct

SEQ ID NO: 250617 - DNA, 25 bp, Homo sapien
attgctgctccgtgaatttctgaat

SEQ ID NO: 250618 - DNA, 25 bp, Homo sapien
ggaccatgctaatgttctctgtacc

SEQ ID NO: 250619 - DNA, 25 bp, Homo sapien
tccaattttagtatatgtgctgcca

SEQ ID NO: 250620 - DNA, 25 bp, Homo sapien
accatgctaatgttctctgtaccat

SEQ ID NO: 250621 - DNA, 25 bp, Homo sapien
tttctttgtcatccttgtacaggga

SEQ ID NO: 250622 - DNA, 25 bp, Homo sapien
gggatggcttccctagaggatcgca

SEQ ID NO: 250623 - DNA, 25 bp, Homo sapien
ggtggcagctcagaacttccgtgga

SEQ ID NO: 250624 - DNA, 25 bp, Homo sapien
gatcgcatccaatcgtgtccatgaa

SEQ ID NO: 250625 - DNA, 25 bp, Homo sapien
gagctgtgaatagcgcatgggaccc

SEQ ID NO: 250626 - DNA, 25 bp, Homo sapien
gaggtgcctagggtgagggacatgg

SEQ ID NO: 250627 - DNA, 25 bp, Homo sapien
gggacatggggggtgccccgtgcca

SEQ ID NO: 250628 - DNA, 25 bp, Homo sapien
gagagaagtcccaaggaccccacag

SEQ ID NO: 250629 - DNA, 25 bp, Homo sapien
caggctgcgtctgctgcaagtggac

SEQ ID NO: 250630 - DNA, 25 bp, Homo sapien
ctcaggtgagcatccggtccccaga

SEQ ID NO: 250631 - DNA, 25 bp, Homo sapien
tcaggtgagcatccggtccccagaa

SEQ ID NO: 250632 - DNA, 25 bp, Homo sapien
ccttccagtttgcacactaaactct

SEQ ID NO: 250633 - DNA, 25 bp, Homo sapien
tttgcacactaaactctccctgctg

SEQ ID NO: 250634 - DNA, 25 bp, Homo sapien
ctgtggcagggctggtggagaccag

SEQ ID NO: 250635 - DNA, 25 bp, Homo sapien
gccagggtcaccaccctgggttcca

SEQ ID NO: 250636 - DNA, 25 bp, Homo sapien
tctgggaccagggaccagagagacc

SEQ ID NO: 250637 - DNA, 25 bp, Homo sapien
tgggttccaccagggtctgggacca

SEQ ID NO: 250638 - DNA, 25 bp, Homo sapien
agccatggcgggtccttgagcagaa

SEQ ID NO: 250639 - DNA, 25 bp, Homo sapien
gtaggctctggaatgtgtttgaagt

SEQ ID NO: 250640 - DNA, 25 bp, Homo sapien
tctggaatgtgtttgaagttgatgc

SEQ ID NO: 250641 - DNA, 25 bp, Homo sapien
agaagggtaggctctggaatgtgtt

SEQ ID NO: 250642 - DNA, 25 bp, Homo sapien
ggccactggcagtcataggagagca

SEQ ID NO: 250643 - DNA, 25 bp, Homo sapien
cagagcaggcccaaggtaggcgcca

SEQ ID NO: 250644 - DNA, 25 bp, Homo sapien
atggcgcccttgcagccagcgtgtc

SEQ ID NO: 250645 - DNA, 25 bp, Homo sapien
aggcccaaggtaggcgccagacatg

SEQ ID NO: 250646 - DNA, 25 bp, Homo sapien
gtgtctttcgggctggatgggcggt

SEQ ID NO: 250647 - DNA, 25 bp, Homo sapien
gctggatgggcggtccaatgtccac

SEQ ID NO: 250648 - DNA, 25 bp, Homo sapien
ttcgggctggatgggcggtccaatg

SEQ ID NO: 250649 - DNA, 25 bp, Homo sapien
tgggcggtccaatgtccactccaca

SEQ ID NO: 250650 - DNA, 25 bp, Homo sapien
atccccaggtgtctccttcagccat

SEQ ID NO: 250651 - DNA, 25 bp, Homo sapien
ctggaccgtgctccggggggcagct

SEQ ID NO: 250652 - DNA, 25 bp, Homo sapien
tccggggggcagcttcaagcatccc

SEQ ID NO: 250653 - DNA, 25 bp, Homo sapien
tgtctggaccgtgctccggggggca

SEQ ID NO: 250654 - DNA, 25 bp, Homo sapien
taaattacacggtgagccagcacag

SEQ ID NO: 250655 - DNA, 25 bp, Homo sapien
tgagcaatgggtatatggctattcc

SEQ ID NO: 250656 - DNA, 25 bp, Homo sapien
ggtgacaaacgctgatgaagacaaa

SEQ ID NO: 250657 - DNA, 25 bp, Homo sapien
agaagtcaagtgctccaggtaggat

SEQ ID NO: 250658 - DNA, 25 bp, Homo sapien
cgtggagttcccttcgttcgcaagc

SEQ ID NO: 250659 - DNA, 25 bp, Homo sapien
cagttctactggacccttggaggaa

SEQ ID NO: 250660 - DNA, 25 bp, Homo sapien
gaacatctggtttaccaacgtggag

SEQ ID NO: 250661 - DNA, 25 bp, Homo sapien
tgtaacttggaacccggaacatctg

SEQ ID NO: 250662 - DNA, 25 bp, Homo sapien
ccttcccttaggcacgagaggctga

SEQ ID NO: 250663 - DNA, 25 bp, Homo sapien
taggtcaaggaaccaatgggcaggc

SEQ ID NO: 250664 - DNA, 25 bp, Homo sapien
tgaaccagaactgtgtgcctgcccg

SEQ ID NO: 250665 - DNA, 25 bp, Homo sapien
catagtttctgtgggccctggacac

SEQ ID NO: 250666 - DNA, 25 bp, Homo sapien
atcaccgtgtgcaccctcttgagga

SEQ ID NO: 250667 - DNA, 25 bp, Homo sapien
gactgctaacagttgaggctcccca

SEQ ID NO: 250668 - DNA, 25 bp, Homo sapien
tccctttgatgtgaggtgccatcct

SEQ ID NO: 250669 - DNA, 25 bp, Homo sapien
caaacccagccttttgcgattatgg

SEQ ID NO: 250670 - DNA, 25 bp, Homo sapien
ctctccagaccctacgtggggggag

SEQ ID NO: 250671 - DNA, 25 bp, Homo sapien
ggaggcccacggttagacaccaggc

SEQ ID NO: 250672 - DNA, 25 bp, Homo sapien
gggacaatcagaccagcgtcctcga

SEQ ID NO: 250673 - DNA, 25 bp, Homo sapien
caggcagaactgcccaggagagaca

SEQ ID NO: 250674 - DNA, 25 bp, Homo sapien
agacagttagaaccacgagccaggc

SEQ ID NO: 250675 - DNA, 25 bp, Homo sapien
tttgctaaggaatcggcctcagtgg

SEQ ID NO: 250676 - DNA, 25 bp, Homo sapien
cactgcaaaggcaacgcaaggacgt

SEQ ID NO: 250677 - DNA, 25 bp, Homo sapien
tcaaagcctgagcaaactgtgtgtg

SEQ ID NO: 250678 - DNA, 25 bp, Homo sapien
tcagaagcaacttggtggaccagcc

SEQ ID NO: 250679 - DNA, 25 bp, Homo sapien
tgtctgcatgcagccgaggatttcc

SEQ ID NO: 250680 - DNA, 25 bp, Homo sapien
gacaaggagctctccggactggaaa

SEQ ID NO: 250681 - DNA, 25 bp, Homo sapien
gaggatttccatcaccctggccatg

SEQ ID NO: 250682 - DNA, 25 bp, Homo sapien
agcactcgagccaagaaacggacag

SEQ ID NO: 250683 - DNA, 25 bp, Homo sapien
caggcagtcactcgcacatgcagtc

SEQ ID NO: 250684 - DNA, 25 bp, Homo sapien
tcatgtcacagggagtcacaccctc

SEQ ID NO: 250685 - DNA, 25 bp, Homo sapien
acttacgcacatgctgcacacactg

SEQ ID NO: 250686 - DNA, 25 bp, Homo sapien
cctccacataggctggccagtcagg

SEQ ID NO: 250687 - DNA, 25 bp, Homo sapien
atggagacagcatccggccagggtt

SEQ ID NO: 250688 - DNA, 25 bp, Homo sapien
cctggatggcagaattcatgcagaa

SEQ ID NO: 250689 - DNA, 25 bp, Homo sapien
attcgttcagggctaagtgacatct

SEQ ID NO: 250690 - DNA, 25 bp, Homo sapien
tacacgtggcgtcgaggggacacac

SEQ ID NO: 250691 - DNA, 25 bp, Homo sapien
cactgtgcctaaatgacagcgctct

SEQ ID NO: 250692 - DNA, 25 bp, Homo sapien
aggtcctcctgacggtagttgtggt

SEQ ID NO: 250693 - DNA, 25 bp, Homo sapien
tagttgtggtagaccttcaggaagg

SEQ ID NO: 250694 - DNA, 25 bp, Homo sapien
gaaacaatttaatcagaaccaggcc

SEQ ID NO: 250695 - DNA, 25 bp, Homo sapien
ggtccagttcatctcggcaaagagc

SEQ ID NO: 250696 - DNA, 25 bp, Homo sapien
catttgagcgtatttgccatcagac

SEQ ID NO: 250697 - DNA, 25 bp, Homo sapien
ccaggcctgagctacattaagctga

SEQ ID NO: 250698 - DNA, 25 bp, Homo sapien
tatacaagggcagggtggcaaatct

SEQ ID NO: 250699 - DNA, 25 bp, Homo sapien
gctaactaccttatccacacaggag

SEQ ID NO: 250700 - DNA, 25 bp, Homo sapien
tgaattcacaagtgggatcccctgc

SEQ ID NO: 250701 - DNA, 25 bp, Homo sapien
cagcaaatagcgtccctcagagtgg

SEQ ID NO: 250702 - DNA, 25 bp, Homo sapien
gtccagcagtaaatggccccctccc

SEQ ID NO: 250703 - DNA, 25 bp, Homo sapien
cattgcaagcctcccttcttgccca

SEQ ID NO: 250704 - DNA, 25 bp, Homo sapien
ggccccctcccagcattgcaagcct

SEQ ID NO: 250705 - DNA, 25 bp, Homo sapien
atgtccagcagtaaatggccccctc

SEQ ID NO: 250706 - DNA, 25 bp, Homo sapien
gtcgatgtcctggagctcttcacag

SEQ ID NO: 250707 - DNA, 25 bp, Homo sapien
gcccagctccaagtcgatgtcctgg

SEQ ID NO: 250708 - DNA, 25 bp, Homo sapien
tagaaggcggagttgtccacgccca

SEQ ID NO: 250709 - DNA, 25 bp, Homo sapien
ctgggcaattgcaaactgatcgtag

SEQ ID NO: 250710 - DNA, 25 bp, Homo sapien
gcccttctcggtgatggtgtcgcac

SEQ ID NO: 250711 - DNA, 25 bp, Homo sapien
gtgcccttctcggtgatggtgtcgc

SEQ ID NO: 250712 - DNA, 25 bp, Homo sapien
gtacggtgcccttctcggtgatggt

SEQ ID NO: 250713 - DNA, 25 bp, Homo sapien
gggtacggtgcccttctcggtgatg

SEQ ID NO: 250714 - DNA, 25 bp, Homo sapien
tgaagcccacgctcacgatggtgct

SEQ ID NO: 250715 - DNA, 25 bp, Homo sapien
cccacgctcacgatggtgctggcaa

SEQ ID NO: 250716 - DNA, 25 bp, Homo sapien
tggtgaagcccacgctcacgatggt

SEQ ID NO: 250717 - DNA, 25 bp, Homo sapien
acgctcacgatggtgctggcaatga

SEQ ID NO: 250718 - DNA, 25 bp, Homo sapien
gacaccagcactagcagcatggctg

SEQ ID NO: 250719 - DNA, 25 bp, Homo sapien
cggacaccagcactagcagcatggc

SEQ ID NO: 250720 - DNA, 25 bp, Homo sapien
ggacaccagcactagcagcatggct

SEQ ID NO: 250721 - DNA, 25 bp, Homo sapien
gcggacaccagcactagcagcatgg

SEQ ID NO: 250722 - DNA, 25 bp, Homo sapien
agcaggctcgatgttagcctgcatg

SEQ ID NO: 250723 - DNA, 25 bp, Homo sapien
aggctcgatgttagcctgcatgctg

SEQ ID NO: 250724 - DNA, 25 bp, Homo sapien
ggctcgatgttagcctgcatgctgt

SEQ ID NO: 250725 - DNA, 25 bp, Homo sapien
ccagcaggctcgatgttagcctgca

SEQ ID NO: 250726 - DNA, 25 bp, Homo sapien
cccaggcctcatggctgaagatggc

SEQ ID NO: 250727 - DNA, 25 bp, Homo sapien
atcacagcgccacatccaaagctct

SEQ ID NO: 250728 - DNA, 25 bp, Homo sapien
gtaccgtgtgccagtagacaagcca

SEQ ID NO: 250729 - DNA, 25 bp, Homo sapien
tgtgccagtagacaagccacaaccc

SEQ ID NO: 250730 - DNA, 25 bp, Homo sapien
caatgacctttccttgggtgagcca

SEQ ID NO: 250731 - DNA, 25 bp, Homo sapien
accccaccacttcatctcttgtcaa

SEQ ID NO: 250732 - DNA, 25 bp, Homo sapien
catccaggtcccgttagccagggat

SEQ ID NO: 250733 - DNA, 25 bp, Homo sapien
tgaccccatgaaccccaccacttca

SEQ ID NO: 250734 - DNA, 25 bp, Homo sapien
tcctggcgagtgtggcccggctgag

SEQ ID NO: 250735 - DNA, 25 bp, Homo sapien
gagagctcagtgcaagccctagacc

SEQ ID NO: 250736 - DNA, 25 bp, Homo sapien
tcagtgcaagccctagaccgggctg

SEQ ID NO: 250737 - DNA, 25 bp, Homo sapien
cgggctgggagttgtcgccggtcct

SEQ ID NO: 250738 - DNA, 25 bp, Homo sapien
gaagtcgtggccgttctcggacagc

SEQ ID NO: 250739 - DNA, 25 bp, Homo sapien
cgaaaaggaaattgttgagcgccat

SEQ ID NO: 250740 - DNA, 25 bp, Homo sapien
gccacatgccctcggtgaagagcag

SEQ ID NO: 250741 - DNA, 25 bp, Homo sapien
tagcaggcgcactgagcgaaaagga

SEQ ID NO: 250742 - DNA, 25 bp, Homo sapien
ggccgagcgcgggaagcgcctgcgg

SEQ ID NO: 250743 - DNA, 25 bp, Homo sapien
cgcccctcccgggacgcgtgcgcat

SEQ ID NO: 250744 - DNA, 25 bp, Homo sapien
gaagcgcctgcggtcagcaccgcgg

SEQ ID NO: 250745 - DNA, 25 bp, Homo sapien
gcggcctgcgggagatgcgggaatt

SEQ ID NO: 250746 - DNA, 25 bp, Homo sapien
tactctccgaacaagatgagaccca

SEQ ID NO: 250747 - DNA, 25 bp, Homo sapien
tccgacagtgtcaagaatttgtcag

SEQ ID NO: 250748 - DNA, 25 bp, Homo sapien
aacacgtgtgtttagcccactgaca

SEQ ID NO: 250749 - DNA, 25 bp, Homo sapien
tttgtcagagtcgagatactctccg

SEQ ID NO: 250750 - DNA, 25 bp, Homo sapien
tctcaaaagtaatagcaaagcaggg

SEQ ID NO: 250751 - DNA, 25 bp, Homo sapien
cagggcaaagtggagcaacattttc

SEQ ID NO: 250752 - DNA, 25 bp, Homo sapien
ggtatttctgcaaggtcatggcttt

SEQ ID NO: 250753 - DNA, 25 bp, Homo sapien
gagcccgcctggcatcagatttctc

SEQ ID NO: 250754 - DNA, 25 bp, Homo sapien
gaaacacttaatatccacagcacac

SEQ ID NO: 250755 - DNA, 25 bp, Homo sapien
gaccaggctgttacacgtctctgta

SEQ ID NO: 250756 - DNA, 25 bp, Homo sapien
tacttacaggctagatgactctgct

SEQ ID NO: 250757 - DNA, 25 bp, Homo sapien
tcatcggcggaatgaggaccaggct

SEQ ID NO: 250758 - DNA, 25 bp, Homo sapien
taatggcagagacacgacactgtgc

SEQ ID NO: 250759 - DNA, 25 bp, Homo sapien
gtggtgtcacccaatccgctgagga

SEQ ID NO: 250760 - DNA, 25 bp, Homo sapien
taactttatgtgtcagctcccctgg

SEQ ID NO: 250761 - DNA, 25 bp, Homo sapien
gcagctctcatgaccaacagtgttg

SEQ ID NO: 250762 - DNA, 25 bp, Homo sapien
gagaaggcacctgtgctggctaaaa

SEQ ID NO: 250763 - DNA, 25 bp, Homo sapien
agaaggcacctgtgctggaaaagga

SEQ ID NO: 250764 - DNA, 25 bp, Homo sapien
ctgctacagagcctgatgcccctga

SEQ ID NO: 250765 - DNA, 25 bp, Homo sapien
accgtgtgggtgagaccatcgcacc

SEQ ID NO: 250766 - DNA, 25 bp, Homo sapien
cagaaggcgctggacgtaggaaatt

SEQ ID NO: 250767 - DNA, 25 bp, Homo sapien
gtcgccccaggagtgaccatgacta

SEQ ID NO: 250768 - DNA, 25 bp, Homo sapien
tggaatggagcaggatactcgccct

SEQ ID NO: 250769 - DNA, 25 bp, Homo sapien
taggaaattcccttactgccagccc

SEQ ID NO: 250770 - DNA, 25 bp, Homo sapien
tagactctgcgccttccatcaaagt

SEQ ID NO: 250771 - DNA, 25 bp, Homo sapien
gcgccttccatcaaagtgcagttac

SEQ ID NO: 250772 - DNA, 25 bp, Homo sapien
ctgaaatagactctgcgccttccat

SEQ ID NO: 250773 - DNA, 25 bp, Homo sapien
tctgcgccttccatcaaagtgcagt

SEQ ID NO: 250774 - DNA, 25 bp, Homo sapien
cacgccacctccgttagggagtagg

SEQ ID NO: 250775 - DNA, 25 bp, Homo sapien
ccgagtcagggttgcttctgtgtga

SEQ ID NO: 250776 - DNA, 25 bp, Homo sapien
ttagtggccagagaaccgggcagcc

SEQ ID NO: 250777 - DNA, 25 bp, Homo sapien
tctgtgtgataagccgttgagtgcg

SEQ ID NO: 250778 - DNA, 25 bp, Homo sapien
tttagaaaatcttcaacaccacagg

SEQ ID NO: 250779 - DNA, 25 bp, Homo sapien
atttagaaaatcttcaacaccacag

SEQ ID NO: 250780 - DNA, 25 bp, Homo sapien
tttatttagaaaatcttcaacacca

SEQ ID NO: 250781 - DNA, 25 bp, Homo sapien
tatttagaaaatcttcaacaccaca

SEQ ID NO: 250782 - DNA, 25 bp, Homo sapien
tgcagggtgacacccagcagccgct

SEQ ID NO: 250783 - DNA, 25 bp, Homo sapien
tgaaacttggccatcacatcaacag

SEQ ID NO: 250784 - DNA, 25 bp, Homo sapien
tggcggctggatgcgtggccaataa

SEQ ID NO: 250785 - DNA, 25 bp, Homo sapien
agcgagggcagcctacccgagcctg

SEQ ID NO: 250786 - DNA, 25 bp, Homo sapien
aaacacacttgcagcgagaacccgt

SEQ ID NO: 250787 - DNA, 25 bp, Homo sapien
gatgtaaagctctatgcggacgtac

SEQ ID NO: 250788 - DNA, 25 bp, Homo sapien
tttcgtgtgcgtctggatgtgcccc

SEQ ID NO: 250789 - DNA, 25 bp, Homo sapien
gcggacgtacaggatgactatttca

SEQ ID NO: 250790 - DNA, 25 bp, Homo sapien
aacctctgaggaaccggcatgtggc

SEQ ID NO: 250791 - DNA, 25 bp, Homo sapien
gagtcgtgagaacatagtccaggtg

SEQ ID NO: 250792 - DNA, 25 bp, Homo sapien
ggaaagcatacactgcctctgaggg

SEQ ID NO: 250793 - DNA, 25 bp, Homo sapien
gagactggtaaggtttcagccaccc

SEQ ID NO: 250794 - DNA, 25 bp, Homo sapien
tgccatgttcgagacctgaggctgg

SEQ ID NO: 250795 - DNA, 25 bp, Homo sapien
tctattttgtatcctaatgacagaa

SEQ ID NO: 250796 - DNA, 25 bp, Homo sapien
gacgagcgctcggtgttcacactga

SEQ ID NO: 250797 - DNA, 25 bp, Homo sapien
tcaagccggctgccttcaccgggag

SEQ ID NO: 250798 - DNA, 25 bp, Homo sapien
caacttttattgaagaatttggagg

SEQ ID NO: 250799 - DNA, 25 bp, Homo sapien
agcgtctggccaggaggcgtggagg

SEQ ID NO: 250800 - DNA, 25 bp, Homo sapien
gttaagcgtcgaaaaggtcaagtgc

SEQ ID NO: 250801 - DNA, 25 bp, Homo sapien
caagtgctaccgtggagagatcatc

SEQ ID NO: 250802 - DNA, 25 bp, Homo sapien
taaaaaaacgccgtggtgcagcggc

SEQ ID NO: 250803 - DNA, 25 bp, Homo sapien
cacacccggagaacaaactggatga

SEQ ID NO: 250804 - DNA, 25 bp, Homo sapien
tgctggccagcataccatagtgagg

SEQ ID NO: 250805 - DNA, 25 bp, Homo sapien
tagtgaggttgcatctggtgccacc

SEQ ID NO: 250806 - DNA, 25 bp, Homo sapien
taaatacagatcatggcacgaggcc

SEQ ID NO: 250807 - DNA, 25 bp, Homo sapien
tcaggccgtgccgctggccgagtag

SEQ ID NO: 250808 - DNA, 25 bp, Homo sapien
aggccgtgccgctggccgagtagga

SEQ ID NO: 250809 - DNA, 25 bp, Homo sapien
ccgtgccgctggccgagtaggagaa

SEQ ID NO: 250810 - DNA, 25 bp, Homo sapien
ggccgtgccgctggccgagtaggag

SEQ ID NO: 250811 - DNA, 25 bp, Homo sapien
ggcctgcgctcgctgtccacacact

SEQ ID NO: 250812 - DNA, 25 bp, Homo sapien
gtgtcagtctccgacgtgacctggg

SEQ ID NO: 250813 - DNA, 25 bp, Homo sapien
gggccgtgaactcctcatcaaaata

SEQ ID NO: 250814 - DNA, 25 bp, Homo sapien
aaatacctggtgtcagtctccgacg

SEQ ID NO: 250815 - DNA, 25 bp, Homo sapien
atcatctgggccgtgaactcctcat

SEQ ID NO: 250816 - DNA, 25 bp, Homo sapien
gacgggacagtcatgagcttcgctc

SEQ ID NO: 250817 - DNA, 25 bp, Homo sapien
tgtgttaatgggagaacaggtgccc

SEQ ID NO: 250818 - DNA, 25 bp, Homo sapien
tgtcaattagcaaggtctctggtca

SEQ ID NO: 250819 - DNA, 25 bp, Homo sapien
tgatgtgcacacgtgaggagctgcc

SEQ ID NO: 250820 - DNA, 25 bp, Homo sapien
cagggcacccagcatctcagagtgc

SEQ ID NO: 250821 - DNA, 25 bp, Homo sapien
catctcagagtgcaggcttccgaac

SEQ ID NO: 250822 - DNA, 25 bp, Homo sapien
gctggcagaccccatcagctggggt

SEQ ID NO: 250823 - DNA, 25 bp, Homo sapien
tgcaggcttccgaacccagctggca

SEQ ID NO: 250824 - DNA, 25 bp, Homo sapien
caaacaggaggaactcgtggaggcc

SEQ ID NO: 250825 - DNA, 25 bp, Homo sapien
gaaaagtaggtgctgtccctgtccc

SEQ ID NO: 250826 - DNA, 25 bp, Homo sapien
gatggcgactcatgcagaaagagct

SEQ ID NO: 250827 - DNA, 25 bp, Homo sapien
tcactgcacagcgtcagggaaggga

SEQ ID NO: 250828 - DNA, 25 bp, Homo sapien
gcatgcgtgcgcgtgaatatgcggg

SEQ ID NO: 250829 - DNA, 25 bp, Homo sapien
cagtttcctggtggaacccggcagt

SEQ ID NO: 250830 - DNA, 25 bp, Homo sapien
gaaatctggcgagcgtgccacgtgc

SEQ ID NO: 250831 - DNA, 25 bp, Homo sapien
caccaggcgctgaggttggtgcagc

SEQ ID NO: 250832 - DNA, 25 bp, Homo sapien
cacgataccggcaaagaagcgatgc

SEQ ID NO: 250833 - DNA, 25 bp, Homo sapien
aaagaagcgatgctgcatgatctcc

SEQ ID NO: 250834 - DNA, 25 bp, Homo sapien
ttcttctcgtacacgtgctgccaca

SEQ ID NO: 250835 - DNA, 25 bp, Homo sapien
cgtgctgccacacgataccggcaaa

SEQ ID NO: 250836 - DNA, 25 bp, Homo sapien
ctcgggaccaagcgtgcgcgggaag

SEQ ID NO: 250837 - DNA, 25 bp, Homo sapien
ttggcctcgggaccaagcgtgcgcg

SEQ ID NO: 250838 - DNA, 25 bp, Homo sapien
gacttggcctcgggaccaagcgtgc

SEQ ID NO: 250839 - DNA, 25 bp, Homo sapien
cctcgggaccaagcgtgcgcgggaa

SEQ ID NO: 250840 - DNA, 25 bp, Homo sapien
cagtccactgcacggccgtagtcat

SEQ ID NO: 250841 - DNA, 25 bp, Homo sapien
ccccaccagtccactgcacggccgt

SEQ ID NO: 250842 - DNA, 25 bp, Homo sapien
ccaccagtccactgcacggccgtag

SEQ ID NO: 250843 - DNA, 25 bp, Homo sapien
accagtccactgcacggccgtagtc

SEQ ID NO: 250844 - DNA, 25 bp, Homo sapien
caggactcggcatcaaggggtgtcc

SEQ ID NO: 250845 - DNA, 25 bp, Homo sapien
actcggcatcaaggggtgtccggga

SEQ ID NO: 250846 - DNA, 25 bp, Homo sapien
gcagatgggcaggactcggcatcaa

SEQ ID NO: 250847 - DNA, 25 bp, Homo sapien
cagatgggcaggactcggcatcaag

SEQ ID NO: 250848 - DNA, 25 bp, Homo sapien
acgcagcaacgcgtatgcacgcagg

SEQ ID NO: 250849 - DNA, 25 bp, Homo sapien
gaggacacagcattgcgtgtgctca

SEQ ID NO: 250850 - DNA, 25 bp, Homo sapien
gggacgcagcaacgcgtatgcacgc

SEQ ID NO: 250851 - DNA, 25 bp, Homo sapien
cagcattgcgtgtgctcaggacgtg

SEQ ID NO: 250852 - DNA, 25 bp, Homo sapien
tgtgccgcaaaaggtcttcatggtg

SEQ ID NO: 250853 - DNA, 25 bp, Homo sapien
ggtcttcatggtggcaccgtccttg

SEQ ID NO: 250854 - DNA, 25 bp, Homo sapien
atggtggcaccgtccttgatcccct

SEQ ID NO: 250855 - DNA, 25 bp, Homo sapien
tactcaggtgtgccgcaaaaggtct

SEQ ID NO: 250856 - DNA, 25 bp, Homo sapien
gggaaaggtggcctcaggtcagtgc

SEQ ID NO: 250857 - DNA, 25 bp, Homo sapien
ggaaaggtggcctcaggtcagtgcc

SEQ ID NO: 250858 - DNA, 25 bp, Homo sapien
gaaaggtggcctcaggtcagtgccg

SEQ ID NO: 250859 - DNA, 25 bp, Homo sapien
gcccggtcctcggagaacacacgct

SEQ ID NO: 250860 - DNA, 25 bp, Homo sapien
ctcggagaacacacgctcccgggac

SEQ ID NO: 250861 - DNA, 25 bp, Homo sapien
tgacacaatctcagcgccatagaag

SEQ ID NO: 250862 - DNA, 25 bp, Homo sapien
tcagcgccatagaagcgggcccggt

SEQ ID NO: 250863 - DNA, 25 bp, Homo sapien
ccgggtctcggcattgcacagggaa

SEQ ID NO: 250864 - DNA, 25 bp, Homo sapien
aggcgcaacctgaggcacagccgtg

SEQ ID NO: 250865 - DNA, 25 bp, Homo sapien
tggaaagtctcagaagccctaactc

SEQ ID NO: 250866 - DNA, 25 bp, Homo sapien
tctggtgccatggagagtagccgag

SEQ ID NO: 250867 - DNA, 25 bp, Homo sapien
tgacaaagcagaggcggtcgtgggt

SEQ ID NO: 250868 - DNA, 25 bp, Homo sapien
gtcgtgggtctggaaagagtacttc

SEQ ID NO: 250869 - DNA, 25 bp, Homo sapien
tcgtgggtctggaaagagtacttca

SEQ ID NO: 250870 - DNA, 25 bp, Homo sapien
ctcgcccccgttggcgtactccatg

SEQ ID NO: 250871 - DNA, 25 bp, Homo sapien
ctggaactgcggccccacaggcagg

SEQ ID NO: 250872 - DNA, 25 bp, Homo sapien
gaaggggagctggaactgcggcccc

SEQ ID NO: 250873 - DNA, 25 bp, Homo sapien
aggacggcagccccgcaccacgctg

SEQ ID NO: 250874 - DNA, 25 bp, Homo sapien
gccccacaggcaggacggcagcccc

SEQ ID NO: 250875 - DNA, 25 bp, Homo sapien
gctgcttgataccacgtcgcctgat

SEQ ID NO: 250876 - DNA, 25 bp, Homo sapien
cctggaactaaccaagtggctggac

SEQ ID NO: 250877 - DNA, 25 bp, Homo sapien
cctcggcagagtgcaaggaagacca

SEQ ID NO: 250878 - DNA, 25 bp, Homo sapien
gagtccacggtgtgtaaagccctca

SEQ ID NO: 250879 - DNA, 25 bp, Homo sapien
cgcggttctcggtgagtgtgtgggc

SEQ ID NO: 250880 - DNA, 25 bp, Homo sapien
caggacgcggttctcggtgagtgtg

SEQ ID NO: 250881 - DNA, 25 bp, Homo sapien
ctgcaggacgcggttctcggtgagt

SEQ ID NO: 250882 - DNA, 25 bp, Homo sapien
ttctcggtgagtgtgtgggccacct

SEQ ID NO: 250883 - DNA, 25 bp, Homo sapien
gctgggtgagctgccaccccgcacc

SEQ ID NO: 250884 - DNA, 25 bp, Homo sapien
ggctgggtgagctgccaccccgcac

SEQ ID NO: 250885 - DNA, 25 bp, Homo sapien
gggtgagctgccaccccgcaccctc

SEQ ID NO: 250886 - DNA, 25 bp, Homo sapien
tgggtgagctgccaccccgcaccct

SEQ ID NO: 250887 - DNA, 25 bp, Homo sapien
tcaccaggatcaccttgccgaaagt

SEQ ID NO: 250888 - DNA, 25 bp, Homo sapien
agcttcaggtactcaaactcgttca

SEQ ID NO: 250889 - DNA, 25 bp, Homo sapien
gatcaccttgccgaaagtgcccttg

SEQ ID NO: 250890 - DNA, 25 bp, Homo sapien
ccagcagcttcaggtactcaaactc

SEQ ID NO: 250891 - DNA, 25 bp, Homo sapien
agaggcgtccacttcacacctggtg

SEQ ID NO: 250892 - DNA, 25 bp, Homo sapien
gaaaaccggcctaggtggagatgcc

SEQ ID NO: 250893 - DNA, 25 bp, Homo sapien
gagtccaggcttacagggaacacat

SEQ ID NO: 250894 - DNA, 25 bp, Homo sapien
agctgcgccctacatggaaaaccgg

SEQ ID NO: 250895 - DNA, 25 bp, Homo sapien
gggtgagcccgaccggaagtccatc

SEQ ID NO: 250896 - DNA, 25 bp, Homo sapien
tcttgaggccgtcagccacagtctg

SEQ ID NO: 250897 - DNA, 25 bp, Homo sapien
tctggatggcggttgtccactcctc

SEQ ID NO: 250898 - DNA, 25 bp, Homo sapien
cagggacacctccatctcttcagcc

SEQ ID NO: 250899 - DNA, 25 bp, Homo sapien
ccacatacactcagggtcacgaagc

SEQ ID NO: 250900 - DNA, 25 bp, Homo sapien
agcctcacaagcgtggttccacagc

SEQ ID NO: 250901 - DNA, 25 bp, Homo sapien
aggactgggccagtttccaaactgg

SEQ ID NO: 250902 - DNA, 25 bp, Homo sapien
tggctacaggcagaggtgccagcac

SEQ ID NO: 250903 - DNA, 25 bp, Homo sapien
cagcggatgatgaaggtgttgggcc

SEQ ID NO: 250904 - DNA, 25 bp, Homo sapien
cgctcctcaggagtctccacatgga

SEQ ID NO: 250905 - DNA, 25 bp, Homo sapien
tccacatggaaggtgcgttcgatga

SEQ ID NO: 250906 - DNA, 25 bp, Homo sapien
tgcgttcgatgacagtggtccactg

SEQ ID NO: 250907 - DNA, 25 bp, Homo sapien
atctggcccggcgtcaggtcaaacc

SEQ ID NO: 250908 - DNA, 25 bp, Homo sapien
tcagtttctcgcctcacagagtggg

SEQ ID NO: 250909 - DNA, 25 bp, Homo sapien
cacctagtgtagaaatgtcctgctt

SEQ ID NO: 250910 - DNA, 25 bp, Homo sapien
gggctaggacccctgttccagctca

SEQ ID NO: 250911 - DNA, 25 bp, Homo sapien
ctggagcacacccacacctggggca

SEQ ID NO: 250912 - DNA, 25 bp, Homo sapien
ggggcacagccacacctggggcaca

SEQ ID NO: 250913 - DNA, 25 bp, Homo sapien
ctgggaaatacagccacctggagca

SEQ ID NO: 250914 - DNA, 25 bp, Homo sapien
tggggcacagccacacctggggcac

SEQ ID NO: 250915 - DNA, 25 bp, Homo sapien
catctagacacctagccacatctgg

SEQ ID NO: 250916 - DNA, 25 bp, Homo sapien
gaacacatctagacacctagccaca

SEQ ID NO: 250917 - DNA, 25 bp, Homo sapien
atctagacacctagccacatctggg

SEQ ID NO: 250918 - DNA, 25 bp, Homo sapien
cacatctagacacctagccacatct

SEQ ID NO: 250919 - DNA, 25 bp, Homo sapien
tgagtgagtggagtgtgtagccgct

SEQ ID NO: 250920 - DNA, 25 bp, Homo sapien
cgtacaccctgagggctgtgggaac

SEQ ID NO: 250921 - DNA, 25 bp, Homo sapien
acagccacacctacagcacgtacac

SEQ ID NO: 250922 - DNA, 25 bp, Homo sapien
ctgtgggaacgtgcggggccctgag

SEQ ID NO: 250923 - DNA, 25 bp, Homo sapien
acattccagcatcgaggccctggca

SEQ ID NO: 250924 - DNA, 25 bp, Homo sapien
gatggtccgatctgccccagtatgc

SEQ ID NO: 250925 - DNA, 25 bp, Homo sapien
tatggcctaatctgaaggccccagc

SEQ ID NO: 250926 - DNA, 25 bp, Homo sapien
tgtgtcaacacaggccagagaagtg

SEQ ID NO: 250927 - DNA, 25 bp, Homo sapien
ccaggtgccaccaggcacgctgctg

SEQ ID NO: 250928 - DNA, 25 bp, Homo sapien
ggtgccaccaggcacgctgctggca

SEQ ID NO: 250929 - DNA, 25 bp, Homo sapien
ccagcaaggccctgtcccaggtgcc

SEQ ID NO: 250930 - DNA, 25 bp, Homo sapien
acccagcctctccctgatccctgaa

SEQ ID NO: 250931 - DNA, 25 bp, Homo sapien
gacaagtcacagtgagtctcctgca

SEQ ID NO: 250932 - DNA, 25 bp, Homo sapien
atggttacgaggctgtcaggagaca

SEQ ID NO: 250933 - DNA, 25 bp, Homo sapien
tgccctactctatcaggctgccctg

SEQ ID NO: 250934 - DNA, 25 bp, Homo sapien
tcggcttacaggaaccaggtcctgg

SEQ ID NO: 250935 - DNA, 25 bp, Homo sapien
tggccgccaggtcttgatgtactcc

SEQ ID NO: 250936 - DNA, 25 bp, Homo sapien
cggccgctccttgtagccaatgaag

SEQ ID NO: 250937 - DNA, 25 bp, Homo sapien
ttcttgaggaggaagtagcgtggcc

SEQ ID NO: 250938 - DNA, 25 bp, Homo sapien
gagcctcacgttggtccacatcctg

SEQ ID NO: 250939 - DNA, 25 bp, Homo sapien
ctggaggaggcagccctaaaccagc

SEQ ID NO: 250940 - DNA, 25 bp, Homo sapien
caccccgagctgtgtctgaaaacgg

SEQ ID NO: 250941 - DNA, 25 bp, Homo sapien
gccagcgacagaaacggccctgggt

SEQ ID NO: 250942 - DNA, 25 bp, Homo sapien
ccctgggtcaacgggaaggcagact

SEQ ID NO: 250943 - DNA, 25 bp, Homo sapien
acacgcacatacgtgccacgcagct

SEQ ID NO: 250944 - DNA, 25 bp, Homo sapien
cccgagtgtgcacatacacgcacat

SEQ ID NO: 250945 - DNA, 25 bp, Homo sapien
gcacatacgtgccacgcagctccac

SEQ ID NO: 250946 - DNA, 25 bp, Homo sapien
tgggatctcgcacacccccgagtgt

SEQ ID NO: 250947 - DNA, 25 bp, Homo sapien
agctccctgaacattctctcaaagt

SEQ ID NO: 250948 - DNA, 25 bp, Homo sapien
acattgagcagacggctccgctgac

SEQ ID NO: 250949 - DNA, 25 bp, Homo sapien
tcctgagccaccaggtgtgtcagcc

SEQ ID NO: 250950 - DNA, 25 bp, Homo sapien
acacttcgcagagacggtggtggca

SEQ ID NO: 250951 - DNA, 25 bp, Homo sapien
cacaccccgggaggaacatggtgcg

SEQ ID NO: 250952 - DNA, 25 bp, Homo sapien
ttccgctccaccatggagcaggcct

SEQ ID NO: 250953 - DNA, 25 bp, Homo sapien
acacacacaccccgggaggaacatg

SEQ ID NO: 250954 - DNA, 25 bp, Homo sapien
ggaggaacatggtgcgggcaggcgg

SEQ ID NO: 250955 - DNA, 25 bp, Homo sapien
gcagccaaccctccttcacaatagc

SEQ ID NO: 250956 - DNA, 25 bp, Homo sapien
tccttcacaatagccacgtcgctca

SEQ ID NO: 250957 - DNA, 25 bp, Homo sapien
caaccctccttcacaatagccacgt

SEQ ID NO: 250958 - DNA, 25 bp, Homo sapien
ctcgtttgtgcagccaaccctcctt

SEQ ID NO: 250959 - DNA, 25 bp, Homo sapien
gaggctcccgcgacgctcacgcgct

SEQ ID NO: 250960 - DNA, 25 bp, Homo sapien
acgctcacgcgctcctctcaggctg

SEQ ID NO: 250961 - DNA, 25 bp, Homo sapien
ccgcgacgctcacgcgctcctctca

SEQ ID NO: 250962 - DNA, 25 bp, Homo sapien
ggtgcccgaggctcccgcgacgctc

SEQ ID NO: 250963 - DNA, 25 bp, Homo sapien
tcagggctgccaagtgtcaaatcca

SEQ ID NO: 250964 - DNA, 25 bp, Homo sapien
gtgggctgccatccctctaagctct

SEQ ID NO: 250965 - DNA, 25 bp, Homo sapien
ggaagctgaatgtgaggccacgcct

SEQ ID NO: 250966 - DNA, 25 bp, Homo sapien
taattgaacacagttccctggacct

SEQ ID NO: 250967 - DNA, 25 bp, Homo sapien
tttgacccaggctggctcggccttc

SEQ ID NO: 250968 - DNA, 25 bp, Homo sapien
aggcagcccctttgacttctttgac

SEQ ID NO: 250969 - DNA, 25 bp, Homo sapien
tgatgcaccagctgacaggctgcct

SEQ ID NO: 250970 - DNA, 25 bp, Homo sapien
ctgatgcaccagctgacaggctgcc

SEQ ID NO: 250971 - DNA, 25 bp, Homo sapien
caaagagaggttcagacaagtccgt

SEQ ID NO: 250972 - DNA, 25 bp, Homo sapien
taattacagcagtcgggaggcagca

SEQ ID NO: 250973 - DNA, 25 bp, Homo sapien
tgacgacctctgtggaatggatccc

SEQ ID NO: 250974 - DNA, 25 bp, Homo sapien
taccgggcgtctcaggttttgccag

SEQ ID NO: 250975 - DNA, 25 bp, Homo sapien
cacagggtggtgtacgtctgcacag

SEQ ID NO: 250976 - DNA, 25 bp, Homo sapien
gggctggactcaaagacctctggat

SEQ ID NO: 250977 - DNA, 25 bp, Homo sapien
aagcaggccagactcgaggaaggca

SEQ ID NO: 250978 - DNA, 25 bp, Homo sapien
tgtccagagccatgtgtaaaaatac

SEQ ID NO: 250979 - DNA, 25 bp, Homo sapien
gctcggtgcccggtgcccagcgctc

SEQ ID NO: 250980 - DNA, 25 bp, Homo sapien
cgctccgcatccccgcgggccggcg

SEQ ID NO: 250981 - DNA, 25 bp, Homo sapien
gcgcgagcgcgggcctagccgggcc

SEQ ID NO: 250982 - DNA, 25 bp, Homo sapien
tcggccgcctgctcccgtcttcggg

SEQ ID NO: 250983 - DNA, 25 bp, Homo sapien
tagtataacaacgaggccttccttc

SEQ ID NO: 250984 - DNA, 25 bp, Homo sapien
tgagaccggctgaattcaaatcgtg

SEQ ID NO: 250985 - DNA, 25 bp, Homo sapien
tactgcctgatacatggctctgggt

SEQ ID NO: 250986 - DNA, 25 bp, Homo sapien
gatccggtggtctagagtaccttca

SEQ ID NO: 250987 - DNA, 25 bp, Homo sapien
cccgttctggactctaggatcgaca

SEQ ID NO: 250988 - DNA, 25 bp, Homo sapien
agagggtcccagctgaattaaattc

SEQ ID NO: 250989 - DNA, 25 bp, Homo sapien
tgtctctgttatggcgtttgtcccc

SEQ ID NO: 250990 - DNA, 25 bp, Homo sapien
tccttttgcagactggcgcagtaag

SEQ ID NO: 250991 - DNA, 25 bp, Homo sapien
ccgcggcggagctgctactgtttac

SEQ ID NO: 250992 - DNA, 25 bp, Homo sapien
cgtcccgtttgtgcccaggtgatga

SEQ ID NO: 250993 - DNA, 25 bp, Homo sapien
ttcggccgcctactggacttcatgt

SEQ ID NO: 250994 - DNA, 25 bp, Homo sapien
gagctgggcttcctatgcgactgca

SEQ ID NO: 250995 - DNA, 25 bp, Homo sapien
cagagtctcgctcctcccgtccacc

SEQ ID NO: 250996 - DNA, 25 bp, Homo sapien
ggagcggcggcgctgtaggaagcct

SEQ ID NO: 250997 - DNA, 25 bp, Homo sapien
agcggtcacagccatcgctcgcgta

SEQ ID NO: 250998 - DNA, 25 bp, Homo sapien
ctcccgccgggagccctcttcgaat

SEQ ID NO: 250999 - DNA, 25 bp, Homo sapien
tcccggaggtctgcgagcttcttga

SEQ ID NO: 251000 - DNA, 25 bp, Homo sapien
ctgcgggtgaccatcgacgcgttcc

SEQ ID NO: 251001 - DNA, 25 bp, Homo sapien
tgcccaagggagtttgcacttccca

SEQ ID NO: 251002 - DNA, 25 bp, Homo sapien
ctcgcttcttggttacgggccaggg

SEQ ID NO: 251003 - DNA, 25 bp, Homo sapien
tagcgtcacgtgcagcttgggaagc

SEQ ID NO: 251004 - DNA, 25 bp, Homo sapien
gcacaactcacacagcagtgtagcg

SEQ ID NO: 251005 - DNA, 25 bp, Homo sapien
ttgcaggctgcacgacatggattcc

SEQ ID NO: 251006 - DNA, 25 bp, Homo sapien
cagacaggtctaaatccaggtaggg

SEQ ID NO: 251007 - DNA, 25 bp, Homo sapien
ctgctgtggcctctactgcttcaaa

SEQ ID NO: 251008 - DNA, 25 bp, Homo sapien
tgtggcctctactgcttcaaatgat

SEQ ID NO: 251009 - DNA, 25 bp, Homo sapien
atgatgaatttgttaacagccttgt

SEQ ID NO: 251010 - DNA, 25 bp, Homo sapien
aaatgatgaatttgttaacagcctt

SEQ ID NO: 251011 - DNA, 25 bp, Homo sapien
gccatggccctttttggcacaacca

SEQ ID NO: 251012 - DNA, 25 bp, Homo sapien
catggccctttttggcacaaccagt

SEQ ID NO: 251013 - DNA, 25 bp, Homo sapien
atggccatggccctttttggcacaa

SEQ ID NO: 251014 - DNA, 25 bp, Homo sapien
atggccctttttggcacaaccagtg

SEQ ID NO: 251015 - DNA, 25 bp, Homo sapien
tttcaggcttaattcactttacttc

SEQ ID NO: 251016 - DNA, 25 bp, Homo sapien
tcaggcttaattcactttacttctc

SEQ ID NO: 251017 - DNA, 25 bp, Homo sapien
ggcttaattcactttacttctcttg

SEQ ID NO: 251018 - DNA, 25 bp, Homo sapien
caggcttaattcactttacttctct

SEQ ID NO: 251019 - DNA, 25 bp, Homo sapien
cccgtgtgcagggatgaggcgcgcc

SEQ ID NO: 251020 - DNA, 25 bp, Homo sapien
aggcgcgccggcacagagccgcagc

SEQ ID NO: 251021 - DNA, 25 bp, Homo sapien
gatgaggcgcgccggcacagagccg

SEQ ID NO: 251022 - DNA, 25 bp, Homo sapien
gcagggatgaggcgcgccggcacag

SEQ ID NO: 251023 - DNA, 25 bp, Homo sapien
ctgtgcacagggacaatggagagct

SEQ ID NO: 251024 - DNA, 25 bp, Homo sapien
atgatggccccacggatggcggtgg

SEQ ID NO: 251025 - DNA, 25 bp, Homo sapien
gatggccccacggatggcggtggcc

SEQ ID NO: 251026 - DNA, 25 bp, Homo sapien
ggatgatggccccacggatggcggt

SEQ ID NO: 251027 - DNA, 25 bp, Homo sapien
ctccgatagcaaagaacgccttgaa

SEQ ID NO: 251028 - DNA, 25 bp, Homo sapien
attgtagtctccgatagcaaagaac

SEQ ID NO: 251029 - DNA, 25 bp, Homo sapien
tgtagtctccgatagcaaagaacgc

SEQ ID NO: 251030 - DNA, 25 bp, Homo sapien
tagtctccgatagcaaagaacgcct

SEQ ID NO: 251031 - DNA, 25 bp, Homo sapien
gccctggccccgtccacggccgcga

SEQ ID NO: 251032 - DNA, 25 bp, Homo sapien
tggccctggccccgtccacggccgc

SEQ ID NO: 251033 - DNA, 25 bp, Homo sapien
actgccgaaacctccgcggaaggca

SEQ ID NO: 251034 - DNA, 25 bp, Homo sapien
cccccccctgcaccggcgtcatccg

SEQ ID NO: 251035 - DNA, 25 bp, Homo sapien
cgaaacctccgcggaaggcaccacg

SEQ ID NO: 251036 - DNA, 25 bp, Homo sapien
cgcggaaggcaccacggttccccat

SEQ ID NO: 251037 - DNA, 25 bp, Homo sapien
cagccgatgggatggtgttctgccc

SEQ ID NO: 251038 - DNA, 25 bp, Homo sapien
gaagtttcccagaccatttgagaac

SEQ ID NO: 251039 - DNA, 25 bp, Homo sapien
gctcaggcccaagagttcccaaaag

SEQ ID NO: 251040 - DNA, 25 bp, Homo sapien
tcctctgacaggtggtctgcaagct

SEQ ID NO: 251041 - DNA, 25 bp, Homo sapien
tcaactgcccatagcaagatgttct

SEQ ID NO: 251042 - DNA, 25 bp, Homo sapien
cagttgagtgacatcaagtgcattc

SEQ ID NO: 251043 - DNA, 25 bp, Homo sapien
tatgctaaatgatcacacagacctg

SEQ ID NO: 251044 - DNA, 25 bp, Homo sapien
ctgaagtacaatggcgtaatctagg

SEQ ID NO: 251045 - DNA, 25 bp, Homo sapien
accgtccatcgccaccattcatctc

SEQ ID NO: 251046 - DNA, 25 bp, Homo sapien
caccatttatctccaccctgtatca

SEQ ID NO: 251047 - DNA, 25 bp, Homo sapien
tcttccatttccaccgtccatcgcc

SEQ ID NO: 251048 - DNA, 25 bp, Homo sapien
ttatctccaccctgtatcaccactc

SEQ ID NO: 251049 - DNA, 25 bp, Homo sapien
ggctgtttctgcaccgagttccgtc

SEQ ID NO: 251050 - DNA, 25 bp, Homo sapien
tctgtgctgagtcaaaggagccgga

SEQ ID NO: 251051 - DNA, 25 bp, Homo sapien
gagcacaaattattagacactttcc

SEQ ID NO: 251052 - DNA, 25 bp, Homo sapien
cttggactgaaggtgagacccaggc

SEQ ID NO: 251053 - DNA, 25 bp, Homo sapien
tcttggcgaatcctgctctggagac

SEQ ID NO: 251054 - DNA, 25 bp, Homo sapien
ggagggagcagcgtgtgccagatga

SEQ ID NO: 251055 - DNA, 25 bp, Homo sapien
agcatgccgtcatcaactacgacca

SEQ ID NO: 251056 - DNA, 25 bp, Homo sapien
acgaccaggacagggacgagcactg

SEQ ID NO: 251057 - DNA, 25 bp, Homo sapien
ggtacggcgctcagccataaggcgt

SEQ ID NO: 251058 - DNA, 25 bp, Homo sapien
gtcagtgcccgtgagcagtcctcag

SEQ ID NO: 251059 - DNA, 25 bp, Homo sapien
gctcagatgtgatggcctccaacca

SEQ ID NO: 251060 - DNA, 25 bp, Homo sapien
caccgtcagcctgcgtagtggcaag

SEQ ID NO: 251061 - DNA, 25 bp, Homo sapien
cctggcaatggtatgagagtcggac

SEQ ID NO: 251062 - DNA, 25 bp, Homo sapien
cccctgtttacttttagctgagctg

SEQ ID NO: 251063 - DNA, 25 bp, Homo sapien
cgtgttgccggagcctctaagccaa

SEQ ID NO: 251064 - DNA, 25 bp, Homo sapien
agagcttggtgcctctgccgtggcc

SEQ ID NO: 251065 - DNA, 25 bp, Homo sapien
gagctcccactgaccaaagaatgat

SEQ ID NO: 251066 - DNA, 25 bp, Homo sapien
taagccattgttcccagcctaagga

SEQ ID NO: 251067 - DNA, 25 bp, Homo sapien
gatgactgaactggatcaaaacaca

SEQ ID NO: 251068 - DNA, 25 bp, Homo sapien
ccaggtctggtgcaggaaatgtgta

SEQ ID NO: 251069 - DNA, 25 bp, Homo sapien
gcagtctgcggctggaatcaggata

SEQ ID NO: 251070 - DNA, 25 bp, Homo sapien
gacccccagaggtatgtgccaatga

SEQ ID NO: 251071 - DNA, 25 bp, Homo sapien
aggttctcagccctaccctctagcc

SEQ ID NO: 251072 - DNA, 25 bp, Homo sapien
gacaaagaggaagtagctggaaggg

SEQ ID NO: 251073 - DNA, 25 bp, Homo sapien
caaaccgcccgcctgctctctgatt

SEQ ID NO: 251074 - DNA, 25 bp, Homo sapien
aaccgcccgcctgctctctgatttc

SEQ ID NO: 251075 - DNA, 25 bp, Homo sapien
ccgggcgtcgcaaaccgcccgcctg

SEQ ID NO: 251076 - DNA, 25 bp, Homo sapien
tgctctctgatttccgagtccagcc

SEQ ID NO: 251077 - DNA, 25 bp, Homo sapien
tctggctgcagcgtgtacattaggg

SEQ ID NO: 251078 - DNA, 25 bp, Homo sapien
aaaactatgtttgccgggaagcagc

SEQ ID NO: 251079 - DNA, 25 bp, Homo sapien
gcagtgcctctgagtaccgtgtgaa

SEQ ID NO: 251080 - DNA, 25 bp, Homo sapien
ggaatataccgcactctgcctgaaa

SEQ ID NO: 251081 - DNA, 25 bp, Homo sapien
tctgttctccgttctgtgaagtgag

SEQ ID NO: 251082 - DNA, 25 bp, Homo sapien
ctttggttccattttaggagggctg

SEQ ID NO: 251083 - DNA, 25 bp, Homo sapien
tggttccattttaggagggctgtgt

SEQ ID NO: 251084 - DNA, 25 bp, Homo sapien
tctgctctgttctccgttctgtgaa

SEQ ID NO: 251085 - DNA, 25 bp, Homo sapien
ctcttgtactgatgagccatacctc

SEQ ID NO: 251086 - DNA, 25 bp, Homo sapien
atgtgtgtgtagcctttactttcca

SEQ ID NO: 251087 - DNA, 25 bp, Homo sapien
gtgtgtgtagcctttactttccaac

SEQ ID NO: 251088 - DNA, 25 bp, Homo sapien
tccatatgtgtgtgtagcctttact

SEQ ID NO: 251089 - DNA, 25 bp, Homo sapien
aactctgttcttgccgcggatgtca

SEQ ID NO: 251090 - DNA, 25 bp, Homo sapien
gaccctttgctttcatcgtcagctt

SEQ ID NO: 251091 - DNA, 25 bp, Homo sapien
agccttcatttggtcccaggcctga

SEQ ID NO: 251092 - DNA, 25 bp, Homo sapien
cctgctcgggcaggattaactctgt

SEQ ID NO: 251093 - DNA, 25 bp, Homo sapien
tttgggaaatcggaaccagcctgcc

SEQ ID NO: 251094 - DNA, 25 bp, Homo sapien
ctcaggctgtgtttgaatgggagca

SEQ ID NO: 251095 - DNA, 25 bp, Homo sapien
ctttctcgggcatcaaaaaacgtga

SEQ ID NO: 251096 - DNA, 25 bp, Homo sapien
agttctgcctctggtcgtgcctcag

SEQ ID NO: 251097 - DNA, 25 bp, Homo sapien
caagctggtggccagaaggaacttc

SEQ ID NO: 251098 - DNA, 25 bp, Homo sapien
tcctgagtcctagagtgttgagtca

SEQ ID NO: 251099 - DNA, 25 bp, Homo sapien
caaatgtgagtgtttgctgtcccag

SEQ ID NO: 251100 - DNA, 25 bp, Homo sapien
caagaatttctgctggctcctcatc

SEQ ID NO: 251101 - DNA, 25 bp, Homo sapien
aaggtgtttgaatctctgacgtggg

SEQ ID NO: 251102 - DNA, 25 bp, Homo sapien
ctctgacgtggggatctctgattcc

SEQ ID NO: 251103 - DNA, 25 bp, Homo sapien
aatccgtacgaaggtgtttgaatct

SEQ ID NO: 251104 - DNA, 25 bp, Homo sapien
tacgaaggtgtttgaatctctgacg

SEQ ID NO: 251105 - DNA, 25 bp, Homo sapien
caaaggcaggttaaggtccacaggc

SEQ ID NO: 251106 - DNA, 25 bp, Homo sapien
tacaaactctggtgtcactatgctg

SEQ ID NO: 251107 - DNA, 25 bp, Homo sapien
tgtatcaatattggcctctggacac

SEQ ID NO: 251108 - DNA, 25 bp, Homo sapien
aagtcctgggtactgagagatctac

SEQ ID NO: 251109 - DNA, 25 bp, Homo sapien
gaaatctgggatggcatatcagtac

SEQ ID NO: 251110 - DNA, 25 bp, Homo sapien
ccacagttgatccacattaaccaca

SEQ ID NO: 251111 - DNA, 25 bp, Homo sapien
gcagggaaggagaaccttggtacca

SEQ ID NO: 251112 - DNA, 25 bp, Homo sapien
ttgacagttaggacagaatcttccc

SEQ ID NO: 251113 - DNA, 25 bp, Homo sapien
ttatcctccatgctggcaaggtcat

SEQ ID NO: 251114 - DNA, 25 bp, Homo sapien
ctgttttatcctccatgctggcaag

SEQ ID NO: 251115 - DNA, 25 bp, Homo sapien
ctgggaagaccatttctctgtttta

SEQ ID NO: 251116 - DNA, 25 bp, Homo sapien
ttttatcctccatgctggcaaggtc

SEQ ID NO: 251117 - DNA, 25 bp, Homo sapien
tggaaagaggagtctcatctatttc

SEQ ID NO: 251118 - DNA, 25 bp, Homo sapien
ttggaaagaggagtctcatctattt

SEQ ID NO: 251119 - DNA, 25 bp, Homo sapien
cttggaaagaggagtctcatctatt

SEQ ID NO: 251120 - DNA, 25 bp, Homo sapien
cagctttcctgcgagtacttggtca

SEQ ID NO: 251121 - DNA, 25 bp, Homo sapien
cagtggagaggtgcagcttcaagcc

SEQ ID NO: 251122 - DNA, 25 bp, Homo sapien
tgtccctgaaagagcgcctaaggct

SEQ ID NO: 251123 - DNA, 25 bp, Homo sapien
cagaagtggaaagctcatccccagt

SEQ ID NO: 251124 - DNA, 25 bp, Homo sapien
gagttttgagtcctccacgctgcat

SEQ ID NO: 251125 - DNA, 25 bp, Homo sapien
tgcattctgggtccacctttggccc

SEQ ID NO: 251126 - DNA, 25 bp, Homo sapien
aaagggaaggatccacgtctctctg

SEQ ID NO: 251127 - DNA, 25 bp, Homo sapien
catccttgtctaaaaccaggctgag

SEQ ID NO: 251128 - DNA, 25 bp, Homo sapien
tgatgtctgcaaggaggccacaagc

SEQ ID NO: 251129 - DNA, 25 bp, Homo sapien
gctcttctgggccctgagacacaca

SEQ ID NO: 251130 - DNA, 25 bp, Homo sapien
tctccaggggccactactgatgtct

SEQ ID NO: 251131 - DNA, 25 bp, Homo sapien
ggccactactgatgtctgcaaggag

SEQ ID NO: 251132 - DNA, 25 bp, Homo sapien
cactgctgcatgtaggtctccctca

SEQ ID NO: 251133 - DNA, 25 bp, Homo sapien
gtctccctcaggaactgccatttgg

SEQ ID NO: 251134 - DNA, 25 bp, Homo sapien
gatggcagctgggtgcttggcaagg

SEQ ID NO: 251135 - DNA, 25 bp, Homo sapien
caggaactgccatttgggggactga

SEQ ID NO: 251136 - DNA, 25 bp, Homo sapien
tcaagccgggatgatggaaacccag

SEQ ID NO: 251137 - DNA, 25 bp, Homo sapien
ctcagcttgagatgttggaactccc

SEQ ID NO: 251138 - DNA, 25 bp, Homo sapien
ttcagtgggccagagtgactctcag

SEQ ID NO: 251139 - DNA, 25 bp, Homo sapien
gtaagtgtaacatcctcacagggag

SEQ ID NO: 251140 - DNA, 25 bp, Homo sapien
ggatggctctgaacaagccgaaacc

SEQ ID NO: 251141 - DNA, 25 bp, Homo sapien
cctgttgtaattcaaaacttgagca

SEQ ID NO: 251142 - DNA, 25 bp, Homo sapien
ggctctgaacaagccgaaacctgtt

SEQ ID NO: 251143 - DNA, 25 bp, Homo sapien
aacctgttgtaattcaaaacttgag

SEQ ID NO: 251144 - DNA, 25 bp, Homo sapien
gaaactttgggcactttaaaatgca

SEQ ID NO: 251145 - DNA, 25 bp, Homo sapien
aaagacctatgctagactttgcacc

SEQ ID NO: 251146 - DNA, 25 bp, Homo sapien
cagtttcttaaacttcgaatccatt

SEQ ID NO: 251147 - DNA, 25 bp, Homo sapien
cctgggactaaactatctttaggag

SEQ ID NO: 251148 - DNA, 25 bp, Homo sapien
catcgcgagatggatcatgaagatc

SEQ ID NO: 251149 - DNA, 25 bp, Homo sapien
ccttcatgaacaacagattccacaa

SEQ ID NO: 251150 - DNA, 25 bp, Homo sapien
tccacaatgggaaatgtggaagtct

SEQ ID NO: 251151 - DNA, 25 bp, Homo sapien
ggaagtcttctcatggaatgtaaca

SEQ ID NO: 251152 - DNA, 25 bp, Homo sapien
tttgacgaccattcaaaaccagacg

SEQ ID NO: 251153 - DNA, 25 bp, Homo sapien
cattcaaaaccagacgtgctcagtt

SEQ ID NO: 251154 - DNA, 25 bp, Homo sapien
aaccagacgtgctcagttttggtcc

SEQ ID NO: 251155 - DNA, 25 bp, Homo sapien
ggaaactttctttgacgaccattca

SEQ ID NO: 251156 - DNA, 25 bp, Homo sapien
ccagctacatcctcgtgggccaggg

SEQ ID NO: 251157 - DNA, 25 bp, Homo sapien
tgtctttcccagctacatcctcgtg

SEQ ID NO: 251158 - DNA, 25 bp, Homo sapien
agctacatcctcgtgggccagggac

SEQ ID NO: 251159 - DNA, 25 bp, Homo sapien
tctttcccagctacatcctcgtggg

SEQ ID NO: 251160 - DNA, 25 bp, Homo sapien
gggcccttgaggtccactttgggca

SEQ ID NO: 251161 - DNA, 25 bp, Homo sapien
ggcccttgaggtccactttgggcat

SEQ ID NO: 251162 - DNA, 25 bp, Homo sapien
ctgggggcccttgaggtccactttg

SEQ ID NO: 251163 - DNA, 25 bp, Homo sapien
aggtcagtggtcttgaggtccccct

SEQ ID NO: 251164 - DNA, 25 bp, Homo sapien
gaggtcagtggtcttgaggtccccc

SEQ ID NO: 251165 - DNA, 25 bp, Homo sapien
ggtcagtggtcttgaggtccccctg

SEQ ID NO: 251166 - DNA, 25 bp, Homo sapien
gggcaggtgccctttgaggccggct

SEQ ID NO: 251167 - DNA, 25 bp, Homo sapien
ggcagtcacgtccttgtcagccagg

SEQ ID NO: 251168 - DNA, 25 bp, Homo sapien
ctgtctttggcagtcacgtccttgt

SEQ ID NO: 251169 - DNA, 25 bp, Homo sapien
tttggcagtcacgtccttgtcagcc

SEQ ID NO: 251170 - DNA, 25 bp, Homo sapien
tctttggcagtcacgtccttgtcag

SEQ ID NO: 251171 - DNA, 25 bp, Homo sapien
gcaggtgccctttgaggccggctcc

SEQ ID NO: 251172 - DNA, 25 bp, Homo sapien
ggcaggtgccctttgaggccggctc

SEQ ID NO: 251173 - DNA, 25 bp, Homo sapien
aggtgccctttgaggccggctccct

SEQ ID NO: 251174 - DNA, 25 bp, Homo sapien
caggtgccctttgaggccggctccc

SEQ ID NO: 251175 - DNA, 25 bp, Homo sapien
tccagccgcacactgtccagcttgg

SEQ ID NO: 251176 - DNA, 25 bp, Homo sapien
cccgaacgacggcatcttgaacttg

SEQ ID NO: 251177 - DNA, 25 bp, Homo sapien
aggtgccctttgaggccggctccct

SEQ ID NO: 251178 - DNA, 25 bp, Homo sapien
gacaccccgaatgatggcatcttga

SEQ ID NO: 251179 - DNA, 25 bp, Homo sapien
tgaggtcagtggtcttgaggtcccc

SEQ ID NO: 251180 - DNA, 25 bp, Homo sapien
cctggggccgacaccccgaatgatg

SEQ ID NO: 251181 - DNA, 25 bp, Homo sapien
ctgaggtcagtggtcttgaggtccc

SEQ ID NO: 251182 - DNA, 25 bp, Homo sapien
catccttgtcggccagggacaggtc

SEQ ID NO: 251183 - DNA, 25 bp, Homo sapien
cacatccttgtcggccagggacagg

SEQ ID NO: 251184 - DNA, 25 bp, Homo sapien
ttgctctcggggcctggacgtccac

SEQ ID NO: 251185 - DNA, 25 bp, Homo sapien
tccttgtcggccagggacaggtccc

SEQ ID NO: 251186 - DNA, 25 bp, Homo sapien
tcaggggctgtcacttccgccttgg

SEQ ID NO: 251187 - DNA, 25 bp, Homo sapien
ttaacatctatctgggggcccttga

SEQ ID NO: 251188 - DNA, 25 bp, Homo sapien
ctttgggcatcttgaaactgggcat

SEQ ID NO: 251189 - DNA, 25 bp, Homo sapien
ggacagagacatcttcacatcaggg

SEQ ID NO: 251190 - DNA, 25 bp, Homo sapien
gggcaggtgccctttgaggctggct

SEQ ID NO: 251191 - DNA, 25 bp, Homo sapien
ggcgcggtcacatccactgatgcct

SEQ ID NO: 251192 - DNA, 25 bp, Homo sapien
tttggcgcggtcacatccactgatg

SEQ ID NO: 251193 - DNA, 25 bp, Homo sapien
ctttggcgcggtcacatccactgat

SEQ ID NO: 251194 - DNA, 25 bp, Homo sapien
ttggcgcggtcacatccactgatgc

SEQ ID NO: 251195 - DNA, 25 bp, Homo sapien
tccagccgcgcaccatccagcttgg

SEQ ID NO: 251196 - DNA, 25 bp, Homo sapien
tgtccttgtcggccagggacaggtc

SEQ ID NO: 251197 - DNA, 25 bp, Homo sapien
ccgcgcaccatccagcttggctcct

SEQ ID NO: 251198 - DNA, 25 bp, Homo sapien
tccttgtcggccagggacaggtccc

SEQ ID NO: 251199 - DNA, 25 bp, Homo sapien
gcatcttgaaactgggcatctgcac

SEQ ID NO: 251200 - DNA, 25 bp, Homo sapien
cccttgaggtcgactttgggcatct

SEQ ID NO: 251201 - DNA, 25 bp, Homo sapien
ggcatcttgaaactgggcatctgca

SEQ ID NO: 251202 - DNA, 25 bp, Homo sapien
cttgatgtctatttcagggcccttg

SEQ ID NO: 251203 - DNA, 25 bp, Homo sapien
gagtttcatgtccacctggcgagct

SEQ ID NO: 251204 - DNA, 25 bp, Homo sapien
cctggcgagcttggaccgtcaggtc

SEQ ID NO: 251205 - DNA, 25 bp, Homo sapien
gcttggaccgtcaggtcggcagaat

SEQ ID NO: 251206 - DNA, 25 bp, Homo sapien
tgtccacctggcgagcttggaccgt

SEQ ID NO: 251207 - DNA, 25 bp, Homo sapien
cccaaatgacggcatcttgaacttg

SEQ ID NO: 251208 - DNA, 25 bp, Homo sapien
tgaacttgggcattttgaatttgct

SEQ ID NO: 251209 - DNA, 25 bp, Homo sapien
tgcaccgaggcctcaatggacttgc

SEQ ID NO: 251210 - DNA, 25 bp, Homo sapien
gggcagacaccccaaatgacggcat

SEQ ID NO: 251211 - DNA, 25 bp, Homo sapien
agctgtgcactatccagtttggctc

SEQ ID NO: 251212 - DNA, 25 bp, Homo sapien
cccctccagctgtgcactatccagt

SEQ ID NO: 251213 - DNA, 25 bp, Homo sapien
ctgtgcactatccagtttggctctt

SEQ ID NO: 251214 - DNA, 25 bp, Homo sapien
ctccagctgtgcactatccagtttg

SEQ ID NO: 251215 - DNA, 25 bp, Homo sapien
ggctgtgacttccgccttggagact

SEQ ID NO: 251216 - DNA, 25 bp, Homo sapien
gggctgtgacttccgccttggagac

SEQ ID NO: 251217 - DNA, 25 bp, Homo sapien
gctgtgacttccgccttggagactt

SEQ ID NO: 251218 - DNA, 25 bp, Homo sapien
tgaggtcagtggtcttcaggtcccc

SEQ ID NO: 251219 - DNA, 25 bp, Homo sapien
agcctggaccttcaggtcggcagaa

SEQ ID NO: 251220 - DNA, 25 bp, Homo sapien
gcaggtgctctttgaggccggctcc

SEQ ID NO: 251221 - DNA, 25 bp, Homo sapien
cgggagcttcacatccatctggcca

SEQ ID NO: 251222 - DNA, 25 bp, Homo sapien
ggcagtcacgtccttgtcagccagg

SEQ ID NO: 251223 - DNA, 25 bp, Homo sapien
ggcagagacacctcgacatcgggga

SEQ ID NO: 251224 - DNA, 25 bp, Homo sapien
gaatttgggcattttgaacttgctg

SEQ ID NO: 251225 - DNA, 25 bp, Homo sapien
ttaacatctatctgggggcccttga

SEQ ID NO: 251226 - DNA, 25 bp, Homo sapien
tttgaggccggctccctcgggcacg

SEQ ID NO: 251227 - DNA, 25 bp, Homo sapien
gggcaggtgccctttgaggccggct

SEQ ID NO: 251228 - DNA, 25 bp, Homo sapien
ctttgaggccggctccctcgggcac

SEQ ID NO: 251229 - DNA, 25 bp, Homo sapien
aggtgccctttgaggccggctccct

SEQ ID NO: 251230 - DNA, 25 bp, Homo sapien
agccgcgcaccatccagcttggctc

SEQ ID NO: 251231 - DNA, 25 bp, Homo sapien
aggtcagtggccttgaggtccccct

SEQ ID NO: 251232 - DNA, 25 bp, Homo sapien
gggcagagacacctccacatcaggg

SEQ ID NO: 251233 - DNA, 25 bp, Homo sapien
gaggagaggctcacgtcggcctcca

SEQ ID NO: 251234 - DNA, 25 bp, Homo sapien
ccagctccctcgggcacgtggccct

SEQ ID NO: 251235 - DNA, 25 bp, Homo sapien
ggcaggtgccctttgaggccagctc

SEQ ID NO: 251236 - DNA, 25 bp, Homo sapien
gcaggtgccctttgaggccagctcc

SEQ ID NO: 251237 - DNA, 25 bp, Homo sapien
ttgggcaggtgccctttgaggccag

SEQ ID NO: 251238 - DNA, 25 bp, Homo sapien
ggacctccaggtccacagaagggag

SEQ ID NO: 251239 - DNA, 25 bp, Homo sapien
tggacctccaggtccacagaaggga

SEQ ID NO: 251240 - DNA, 25 bp, Homo sapien
cctggacctccaggtccacagaagg

SEQ ID NO: 251241 - DNA, 25 bp, Homo sapien
agcctggacctccaggtccacagaa

SEQ ID NO: 251242 - DNA, 25 bp, Homo sapien
tgaggtcagtggtcttgaggtcccc

SEQ ID NO: 251243 - DNA, 25 bp, Homo sapien
ctgaggtcagtggtcttgaggtccc

SEQ ID NO: 251244 - DNA, 25 bp, Homo sapien
gcagacgccctgtacgacggcatct

SEQ ID NO: 251245 - DNA, 25 bp, Homo sapien
gacgccctgtacgacggcatcttga

SEQ ID NO: 251246 - DNA, 25 bp, Homo sapien
gggcagacgccctgtacgacggcat

SEQ ID NO: 251247 - DNA, 25 bp, Homo sapien
cagacgccctgtacgacggcatctt

SEQ ID NO: 251248 - DNA, 25 bp, Homo sapien
tgggctgagacacctccacgtcggg

SEQ ID NO: 251249 - DNA, 25 bp, Homo sapien
ggctcctggggcctcgacgtccacc

SEQ ID NO: 251250 - DNA, 25 bp, Homo sapien
gctcctggggcctcgacgtccacct

SEQ ID NO: 251251 - DNA, 25 bp, Homo sapien
gctgggctgagacacctccacgtcg

SEQ ID NO: 251252 - DNA, 25 bp, Homo sapien
cccttgcgatctactttgggcatct

SEQ ID NO: 251253 - DNA, 25 bp, Homo sapien
tgcgatctactttgggcatcttgaa

SEQ ID NO: 251254 - DNA, 25 bp, Homo sapien
gcgatctactttgggcatcttgaaa

SEQ ID NO: 251255 - DNA, 25 bp, Homo sapien
cttgcgatctactttgggcatcttg

SEQ ID NO: 251256 - DNA, 25 bp, Homo sapien
cccgaacgacggcatcttgaacttg

SEQ ID NO: 251257 - DNA, 25 bp, Homo sapien
gcgatctactttgggcatcttgaaa

SEQ ID NO: 251258 - DNA, 25 bp, Homo sapien
atccttgtcggccagggacaggtcc

SEQ ID NO: 251259 - DNA, 25 bp, Homo sapien
ctgtctttggcagtcacatccttgt

SEQ ID NO: 251260 - DNA, 25 bp, Homo sapien
gacctcaatggacttgcctggggca

SEQ ID NO: 251261 - DNA, 25 bp, Homo sapien
cccgaacgacggcatcttgaacttg

SEQ ID NO: 251262 - DNA, 25 bp, Homo sapien
ttgtcggccagggacaggtcaccct

SEQ ID NO: 251263 - DNA, 25 bp, Homo sapien
ctgtctttggcagtcacatccttgt

SEQ ID NO: 251264 - DNA, 25 bp, Homo sapien
gcaggtgccctttgaggccggctcc

SEQ ID NO: 251265 - DNA, 25 bp, Homo sapien
tgaggccggctccctcgggaacgtg

SEQ ID NO: 251266 - DNA, 25 bp, Homo sapien
gggcaggtgccctttgaggccggct

SEQ ID NO: 251267 - DNA, 25 bp, Homo sapien
aggtgccctttgaggccggctccct

SEQ ID NO: 251268 - DNA, 25 bp, Homo sapien
cagacacatccaccgaggcctcgat

SEQ ID NO: 251269 - DNA, 25 bp, Homo sapien
gacaccccgaatgacggcatcttga

SEQ ID NO: 251270 - DNA, 25 bp, Homo sapien
gctcagacacatccaccgaggcctc

SEQ ID NO: 251271 - DNA, 25 bp, Homo sapien
caccccgaatgacggcatcttgaac

SEQ ID NO: 251272 - DNA, 25 bp, Homo sapien
tgctgtctttggctgtcatgccctt

SEQ ID NO: 251273 - DNA, 25 bp, Homo sapien
gcccttgtcggccagggacaggtcc

SEQ ID NO: 251274 - DNA, 25 bp, Homo sapien
ttgggcattttgaacttgctgtctt

SEQ ID NO: 251275 - DNA, 25 bp, Homo sapien
cagccgcgcaccatccagctttgct

SEQ ID NO: 251276 - DNA, 25 bp, Homo sapien
gggcaggtgccctttgaggccggct

SEQ ID NO: 251277 - DNA, 25 bp, Homo sapien
tggacagagacatcttcacatcggg

SEQ ID NO: 251278 - DNA, 25 bp, Homo sapien
aggtgccctttgaggccggctccct

SEQ ID NO: 251279 - DNA, 25 bp, Homo sapien
ttaacatctatctgggggcccttga

SEQ ID NO: 251280 - DNA, 25 bp, Homo sapien
gcaggtgccctttgaggccggctcc

SEQ ID NO: 251281 - DNA, 25 bp, Homo sapien
gacaccccgaatgacggcatcttga

SEQ ID NO: 251282 - DNA, 25 bp, Homo sapien
ggagtttcacgtccacttggccagc

SEQ ID NO: 251283 - DNA, 25 bp, Homo sapien
ttcggcgcagacacatccaccgagg

SEQ ID NO: 251284 - DNA, 25 bp, Homo sapien
cttggggcccttgacatctatctgg

SEQ ID NO: 251285 - DNA, 25 bp, Homo sapien
gctgggctgagacacctccacgtcg

SEQ ID NO: 251286 - DNA, 25 bp, Homo sapien
cagcttggggcccttgacatctatc

SEQ ID NO: 251287 - DNA, 25 bp, Homo sapien
tgggctgagacacctccacgtcggg

SEQ ID NO: 251288 - DNA, 25 bp, Homo sapien
gcaggtgccctttgaggccggctcc

SEQ ID NO: 251289 - DNA, 25 bp, Homo sapien
ggcaggtgccctttgaggccggctc

SEQ ID NO: 251290 - DNA, 25 bp, Homo sapien
gggcaggtgccctttgaggccggct

SEQ ID NO: 251291 - DNA, 25 bp, Homo sapien
aggtgccctttgaggccggctccct

SEQ ID NO: 251292 - DNA, 25 bp, Homo sapien
ttcaacgcagacacatccgctgagg

SEQ ID NO: 251293 - DNA, 25 bp, Homo sapien
caagggcagacaccccaaacgacag

SEQ ID NO: 251294 - DNA, 25 bp, Homo sapien
ccaccttcaacgcagacacatccgc

SEQ ID NO: 251295 - DNA, 25 bp, Homo sapien
ccaagggcagacaccccaaacgaca

SEQ ID NO: 251296 - DNA, 25 bp, Homo sapien
agccgcgcaccatccagcttggctc

SEQ ID NO: 251297 - DNA, 25 bp, Homo sapien
tccagccgcgcaccatccagcttgg

SEQ ID NO: 251298 - DNA, 25 bp, Homo sapien
cagccgcgcaccatccagcttggct

SEQ ID NO: 251299 - DNA, 25 bp, Homo sapien
ccgcgcaccatccagcttggctcct

SEQ ID NO: 251300 - DNA, 25 bp, Homo sapien
gggcagagacacctccacatcaggg

SEQ ID NO: 251301 - DNA, 25 bp, Homo sapien
gatgcgcactatccagcttggctct

SEQ ID NO: 251302 - DNA, 25 bp, Homo sapien
ctggaccttcacgtcggcggaaagg

SEQ ID NO: 251303 - DNA, 25 bp, Homo sapien
ttgaggccgacttcctcgggcacag

SEQ ID NO: 251304 - DNA, 25 bp, Homo sapien
cctgcagatgcgcactatccagctt

SEQ ID NO: 251305 - DNA, 25 bp, Homo sapien
ggcagagacacctcgacatcgggga

SEQ ID NO: 251306 - DNA, 25 bp, Homo sapien
tgtccacctgggggcccttgaggtc

SEQ ID NO: 251307 - DNA, 25 bp, Homo sapien
gacacctcgacatcggggactctca

SEQ ID NO: 251308 - DNA, 25 bp, Homo sapien
cagagacacctcgacatcggggact

SEQ ID NO: 251309 - DNA, 25 bp, Homo sapien
ccagctccctcgggcacgtggccct

SEQ ID NO: 251310 - DNA, 25 bp, Homo sapien
ccctccgggagcttcacatccacct

SEQ ID NO: 251311 - DNA, 25 bp, Homo sapien
ctggaccttcaggtcggcagaaggg

SEQ ID NO: 251312 - DNA, 25 bp, Homo sapien
caggtcggcagaagggggctgaatg

SEQ ID NO: 251313 - DNA, 25 bp, Homo sapien
tgtccttgtcggccagggacaggtc

SEQ ID NO: 251314 - DNA, 25 bp, Homo sapien
gaatttgggcattttgaacttgctg

SEQ ID NO: 251315 - DNA, 25 bp, Homo sapien
gataccccgaacgacggcatcttga

SEQ ID NO: 251316 - DNA, 25 bp, Homo sapien
gggcagagacacctcgacatcgggg

SEQ ID NO: 251317 - DNA, 25 bp, Homo sapien
tcaggtccagcttggcgcccttaac

SEQ ID NO: 251318 - DNA, 25 bp, Homo sapien
ttggcgcccttaacatctgtctggg

SEQ ID NO: 251319 - DNA, 25 bp, Homo sapien
ccttgaggtccactttgggcatctt

SEQ ID NO: 251320 - DNA, 25 bp, Homo sapien
ggcatcttgaaactgggcatatcca

SEQ ID NO: 251321 - DNA, 25 bp, Homo sapien
ctgcagaagggagcggaatgcagag

SEQ ID NO: 251322 - DNA, 25 bp, Homo sapien
aagggagcggaatgcagaggtccgt

SEQ ID NO: 251323 - DNA, 25 bp, Homo sapien
gaagggagcggaatgcagaggtccg

SEQ ID NO: 251324 - DNA, 25 bp, Homo sapien
gggagcggaatgcagaggtccgtgg

SEQ ID NO: 251325 - DNA, 25 bp, Homo sapien
tccagccgcacactgtccagcttgg

SEQ ID NO: 251326 - DNA, 25 bp, Homo sapien
cccgaacgacggcatcttgaacttg

SEQ ID NO: 251327 - DNA, 25 bp, Homo sapien
ttgtcggccagggacaggtcaccct

SEQ ID NO: 251328 - DNA, 25 bp, Homo sapien
ctgtctttggcagtcacatccttgt

SEQ ID NO: 251329 - DNA, 25 bp, Homo sapien
cccttgagggccactttgggcatct

SEQ ID NO: 251330 - DNA, 25 bp, Homo sapien
gcatcttcaaactgggcatctgcac

SEQ ID NO: 251331 - DNA, 25 bp, Homo sapien
cagcttggggcccttgacgtccatc

SEQ ID NO: 251332 - DNA, 25 bp, Homo sapien
ttgacgtccatctgggggcccttga

SEQ ID NO: 251333 - DNA, 25 bp, Homo sapien
tttcacgttcacttggccagcctgg

SEQ ID NO: 251334 - DNA, 25 bp, Homo sapien
tgaggtcagtggtcttcaggtcccc

SEQ ID NO: 251335 - DNA, 25 bp, Homo sapien
cctccgggagtttcacgttcacttg

SEQ ID NO: 251336 - DNA, 25 bp, Homo sapien
ctttgaagccggctccctcgggaag

SEQ ID NO: 251337 - DNA, 25 bp, Homo sapien
ttgcctggggccgacaccccaaatg

SEQ ID NO: 251338 - DNA, 25 bp, Homo sapien
accgaggcctcgatggacttgcctg

SEQ ID NO: 251339 - DNA, 25 bp, Homo sapien
caccccaaatgatggcatcttgaac

SEQ ID NO: 251340 - DNA, 25 bp, Homo sapien
ttcggctcagacacatccaccgagg

SEQ ID NO: 251341 - DNA, 25 bp, Homo sapien
gtcaccgccttgtcggccagggaca

SEQ ID NO: 251342 - DNA, 25 bp, Homo sapien
gcagtcaccgccttgtcggccaggg

SEQ ID NO: 251343 - DNA, 25 bp, Homo sapien
ctttggcagtcaccgccttgtcggc

SEQ ID NO: 251344 - DNA, 25 bp, Homo sapien
gccttgtcggccagggacaggtccc

SEQ ID NO: 251345 - DNA, 25 bp, Homo sapien
acagagacatcttcacatcgggggc

SEQ ID NO: 251346 - DNA, 25 bp, Homo sapien
ttgctctcggggcctggacgtccac

SEQ ID NO: 251347 - DNA, 25 bp, Homo sapien
gagacatcttcacatcgggggctgt

SEQ ID NO: 251348 - DNA, 25 bp, Homo sapien
tggacagagacatcttcacatcggg

SEQ ID NO: 251349 - DNA, 25 bp, Homo sapien
ccgtccagctgtgcgccatccaact

SEQ ID NO: 251350 - DNA, 25 bp, Homo sapien
gtccagctgtgcgccatccaacttg

SEQ ID NO: 251351 - DNA, 25 bp, Homo sapien
tgccttatgacctttcaggtccagc

SEQ ID NO: 251352 - DNA, 25 bp, Homo sapien
ctgccttatgacctttcaggtccag

SEQ ID NO: 251353 - DNA, 25 bp, Homo sapien
tgggcaggtgccctttgaagccggc

SEQ ID NO: 251354 - DNA, 25 bp, Homo sapien
ggcaggtgccctttgaagccggctc

SEQ ID NO: 251355 - DNA, 25 bp, Homo sapien
ttgaagccggctccctcaggcacgt

SEQ ID NO: 251356 - DNA, 25 bp, Homo sapien
gaagccggctccctcaggcacgtgg

SEQ ID NO: 251357 - DNA, 25 bp, Homo sapien
tgaggtcagtggtcttgaggtcccc

SEQ ID NO: 251358 - DNA, 25 bp, Homo sapien
aggtcagcggaagggggctgaatgc

SEQ ID NO: 251359 - DNA, 25 bp, Homo sapien
acctccaggtcagcggaagggggct

SEQ ID NO: 251360 - DNA, 25 bp, Homo sapien
ctgaggtcagtggtcttgaggtccc

SEQ ID NO: 251361 - DNA, 25 bp, Homo sapien
gccccgaacgatggcatcttgaact

SEQ ID NO: 251362 - DNA, 25 bp, Homo sapien
accgaggcctcgatggacttgcctg

SEQ ID NO: 251363 - DNA, 25 bp, Homo sapien
ttgaacttgggcattttgaacctgc

SEQ ID NO: 251364 - DNA, 25 bp, Homo sapien
cctccactttgggtgcagacacatc

SEQ ID NO: 251365 - DNA, 25 bp, Homo sapien
tccagccgcgcactgtccagcttgg

SEQ ID NO: 251366 - DNA, 25 bp, Homo sapien
gccgcgcactgtccagcttggctcc

SEQ ID NO: 251367 - DNA, 25 bp, Homo sapien
gcactgtccagcttggctcccgggg

SEQ ID NO: 251368 - DNA, 25 bp, Homo sapien
tgtcggccagggacagttccccctc

SEQ ID NO: 251369 - DNA, 25 bp, Homo sapien
gggcagagacacctccacatcaggg

SEQ ID NO: 251370 - DNA, 25 bp, Homo sapien
gcatcttgaaactgggcatctccac

SEQ ID NO: 251371 - DNA, 25 bp, Homo sapien
tccagcttggggcccttgacgtcca

SEQ ID NO: 251372 - DNA, 25 bp, Homo sapien
cccttgagggccactttgggcatct

SEQ ID NO: 251373 - DNA, 25 bp, Homo sapien
gagggccactttgggcatcttgaaa

SEQ ID NO: 251374 - DNA, 25 bp, Homo sapien
tgaacttgctgtctttggtggccac

SEQ ID NO: 251375 - DNA, 25 bp, Homo sapien
ctggaccttcaggtcagtagaagca

SEQ ID NO: 251376 - DNA, 25 bp, Homo sapien
cctggaccttcaggtcagtagaagc

SEQ ID NO: 251377 - DNA, 25 bp, Homo sapien
gaacttgctgtctttggtggccact

SEQ ID NO: 251378 - DNA, 25 bp, Homo sapien
tctcaaggacagtctggcgatcccg

SEQ ID NO: 251379 - DNA, 25 bp, Homo sapien
tgtcctgtcgatgaagggccctgtc

SEQ ID NO: 251380 - DNA, 25 bp, Homo sapien
ccagtacccgcttttgaggacgcat

SEQ ID NO: 251381 - DNA, 25 bp, Homo sapien
aatctgaggttgaggaacttccgcc

SEQ ID NO: 251382 - DNA, 25 bp, Homo sapien
gggagctgccgtctgattttgaact

SEQ ID NO: 251383 - DNA, 25 bp, Homo sapien
gtgggccgtgctgggcatcgctgga

SEQ ID NO: 251384 - DNA, 25 bp, Homo sapien
gctgccgtctgattttgaactgaac

SEQ ID NO: 251385 - DNA, 25 bp, Homo sapien
gcatcgctggaagcccactcttcat

SEQ ID NO: 251386 - DNA, 25 bp, Homo sapien
aacacggttgtactgagcagctgat

SEQ ID NO: 251387 - DNA, 25 bp, Homo sapien
acggttgtactgagcagctgatccc

SEQ ID NO: 251388 - DNA, 25 bp, Homo sapien
attgaaggattttgagagcatcttc

SEQ ID NO: 251389 - DNA, 25 bp, Homo sapien
tgtacggctctgaatattgaaggat

SEQ ID NO: 251390 - DNA, 25 bp, Homo sapien
aagctgttgagcagaggcgtgagga

SEQ ID NO: 251391 - DNA, 25 bp, Homo sapien
gagcagaggcgtgaggaggtcatcc

SEQ ID NO: 251392 - DNA, 25 bp, Homo sapien
ccccagggccgggtgtgtgaatgag

SEQ ID NO: 251393 - DNA, 25 bp, Homo sapien
gaatagggggaatcccactgagtct

SEQ ID NO: 251394 - DNA, 25 bp, Homo sapien
cctgtgacactgtagccactggctc

SEQ ID NO: 251395 - DNA, 25 bp, Homo sapien
ttcagcacttgcttgacgaagatcc

SEQ ID NO: 251396 - DNA, 25 bp, Homo sapien
ttgcttgacgaagatcccctggtcc

SEQ ID NO: 251397 - DNA, 25 bp, Homo sapien
caagttaaaaagcttggcggctgag

SEQ ID NO: 251398 - DNA, 25 bp, Homo sapien
tgaaaaatgtccgtgagtcccctga

SEQ ID NO: 251399 - DNA, 25 bp, Homo sapien
atctccgtctcccagcagaaccttg

SEQ ID NO: 251400 - DNA, 25 bp, Homo sapien
tgaatctcgcttccaccaggatctc

SEQ ID NO: 251401 - DNA, 25 bp, Homo sapien
tctggacgactcatcctgaaaaatg

SEQ ID NO: 251402 - DNA, 25 bp, Homo sapien
gcagcctcagtcgtgtattcgtaga

SEQ ID NO: 251403 - DNA, 25 bp, Homo sapien
ctggagtccaaagtcggcagcctca

SEQ ID NO: 251404 - DNA, 25 bp, Homo sapien
tattcgtagacaggtgaagacccct

SEQ ID NO: 251405 - DNA, 25 bp, Homo sapien
tgcggccgtggtcgaatgccctcat

SEQ ID NO: 251406 - DNA, 25 bp, Homo sapien
tggtcatcttccgtttctgcacctg

SEQ ID NO: 251407 - DNA, 25 bp, Homo sapien
agagtggtcatcttccgtttctgca

SEQ ID NO: 251408 - DNA, 25 bp, Homo sapien
tcatcttccgtttctgcacctggct

SEQ ID NO: 251409 - DNA, 25 bp, Homo sapien
gagtggtcatcttccgtttctgcac

SEQ ID NO: 251410 - DNA, 25 bp, Homo sapien
gtggctgtcagtggagacaagcagg

SEQ ID NO: 251411 - DNA, 25 bp, Homo sapien
ctgcagagagagtggctgtcagtgg

SEQ ID NO: 251412 - DNA, 25 bp, Homo sapien
cagagagagtggctgtcagtggaga

SEQ ID NO: 251413 - DNA, 25 bp, Homo sapien
agtggctgtcagtggagacaagcag

SEQ ID NO: 251414 - DNA, 25 bp, Homo sapien
aactggactatcctggcgcagggcc

SEQ ID NO: 251415 - DNA, 25 bp, Homo sapien
gaaaagctgcctccccgagaactgg

SEQ ID NO: 251416 - DNA, 25 bp, Homo sapien
cagaaaagctgcctccccgagaact

SEQ ID NO: 251417 - DNA, 25 bp, Homo sapien
cagtgtgtctgggggacgagcagat

SEQ ID NO: 251418 - DNA, 25 bp, Homo sapien
caaggaagctacagacgctctccca

SEQ ID NO: 251419 - DNA, 25 bp, Homo sapien
gtcggcaccattagcattgacctgt

SEQ ID NO: 251420 - DNA, 25 bp, Homo sapien
ctgcagcattgtcggcaccattagc

SEQ ID NO: 251421 - DNA, 25 bp, Homo sapien
attgtcggcaccattagcattgacc

SEQ ID NO: 251422 - DNA, 25 bp, Homo sapien
cagcattgtcggcaccattagcatt

SEQ ID NO: 251423 - DNA, 25 bp, Homo sapien
gggttccgggccaggtgggcagcac

SEQ ID NO: 251424 - DNA, 25 bp, Homo sapien
ggggttccgggccaggtgggcagca

SEQ ID NO: 251425 - DNA, 25 bp, Homo sapien
agcagtcgcacatcgcggcggccag

SEQ ID NO: 251426 - DNA, 25 bp, Homo sapien
catgtggaagcagtcgcacatcgcg

SEQ ID NO: 251427 - DNA, 25 bp, Homo sapien
ggcccgtcgcgtccagtcgctggtc

SEQ ID NO: 251428 - DNA, 25 bp, Homo sapien
gtgcgggcctggcggcccgtcgcgt

SEQ ID NO: 251429 - DNA, 25 bp, Homo sapien
cccattccgggggagacagacactt

SEQ ID NO: 251430 - DNA, 25 bp, Homo sapien
ggctcctggacttgccgctgtcttc

SEQ ID NO: 251431 - DNA, 25 bp, Homo sapien
ccgggggagacagacactttagtca

SEQ ID NO: 251432 - DNA, 25 bp, Homo sapien
cgctgtcttcacctcccattccggg

SEQ ID NO: 251433 - DNA, 25 bp, Homo sapien
tggtgggtggcagatacgaggacgc

SEQ ID NO: 251434 - DNA, 25 bp, Homo sapien
gaggtgatctggcagcataaggaca

SEQ ID NO: 251435 - DNA, 25 bp, Homo sapien
taaggacaagatagaattctgcagg

SEQ ID NO: 251436 - DNA, 25 bp, Homo sapien
tcgcgggcaccgcaggaggtgatct

SEQ ID NO: 251437 - DNA, 25 bp, Homo sapien
ttcaagaaataacagtccagcaggc

SEQ ID NO: 251438 - DNA, 25 bp, Homo sapien
gagtagcatctctcctgaggtccct

SEQ ID NO: 251439 - DNA, 25 bp, Homo sapien
gcccggccgcatgtataatttctta

SEQ ID NO: 251440 - DNA, 25 bp, Homo sapien
gcaggcagctgaagacgtttccacc

SEQ ID NO: 251441 - DNA, 25 bp, Homo sapien
ttaggccgcagtggttgagaagctc

SEQ ID NO: 251442 - DNA, 25 bp, Homo sapien
gaagctcgaggtaagttggcccaag

SEQ ID NO: 251443 - DNA, 25 bp, Homo sapien
gtcactcgcagatggccattttcca

SEQ ID NO: 251444 - DNA, 25 bp, Homo sapien
ttgaaagacagacagcgctcgagtg

SEQ ID NO: 251445 - DNA, 25 bp, Homo sapien
cctgtccctcggtgtggtctgcgga

SEQ ID NO: 251446 - DNA, 25 bp, Homo sapien
agcattgcccagatggcccgtgtgc

SEQ ID NO: 251447 - DNA, 25 bp, Homo sapien
ctggacactcgtgggacagaaggct

SEQ ID NO: 251448 - DNA, 25 bp, Homo sapien
gaaaaactgtggagaatgtggtccc

SEQ ID NO: 251449 - DNA, 25 bp, Homo sapien
gcaaaatatctggtctcacggagct

SEQ ID NO: 251450 - DNA, 25 bp, Homo sapien
cactggtactcgtagtttgggagca

SEQ ID NO: 251451 - DNA, 25 bp, Homo sapien
tactagaacgtgaacttcctgcagg

SEQ ID NO: 251452 - DNA, 25 bp, Homo sapien
tccttggaggagacagtaacggcag

SEQ ID NO: 251453 - DNA, 25 bp, Homo sapien
ccatacgcctcttggcttgtgcgcg

SEQ ID NO: 251454 - DNA, 25 bp, Homo sapien
tgtttttagagttcttaacagccat

SEQ ID NO: 251455 - DNA, 25 bp, Homo sapien
ttcttaacagccatacgcctcttgg

SEQ ID NO: 251456 - DNA, 25 bp, Homo sapien
ctcttggcttgtgcgcgtctcggct

SEQ ID NO: 251457 - DNA, 25 bp, Homo sapien
ggagcaacttgtggccaaatccatg

SEQ ID NO: 251458 - DNA, 25 bp, Homo sapien
gttgagaccgctcagaaaccctctg

SEQ ID NO: 251459 - DNA, 25 bp, Homo sapien
gaaggcactgaaacgtcaccagaga

SEQ ID NO: 251460 - DNA, 25 bp, Homo sapien
ggaaaactgtgctcttcgaagggca

SEQ ID NO: 251461 - DNA, 25 bp, Homo sapien
tagagactgtttttctaacacacag

SEQ ID NO: 251462 - DNA, 25 bp, Homo sapien
aggagatgccctggtttcctaacct

SEQ ID NO: 251463 - DNA, 25 bp, Homo sapien
taacacacagcttccttcaaaggca

SEQ ID NO: 251464 - DNA, 25 bp, Homo sapien
aaaggcactgtcttttgggccctgc

SEQ ID NO: 251465 - DNA, 25 bp, Homo sapien
ttgaacctaggaggtagacgttaca

SEQ ID NO: 251466 - DNA, 25 bp, Homo sapien
gccaagattgcgccactgcactcca

SEQ ID NO: 251467 - DNA, 25 bp, Homo sapien
tccagcctaggcgacagagtaagag

SEQ ID NO: 251468 - DNA, 25 bp, Homo sapien
acctaggaggtagacgttacagtga

SEQ ID NO: 251469 - DNA, 25 bp, Homo sapien
gataaaaatgctatacagaaacaaa

SEQ ID NO: 251470 - DNA, 25 bp, Homo sapien
aaaagataaaaatgctatacagaaa

SEQ ID NO: 251471 - DNA, 25 bp, Homo sapien
aagataaaaatgctatacagaaaca

SEQ ID NO: 251472 - DNA, 25 bp, Homo sapien
ataaaaatgctatacagaaacaaaa

SEQ ID NO: 251473 - DNA, 25 bp, Homo sapien
ccagcgtccatttaatgcagccaag

SEQ ID NO: 251474 - DNA, 25 bp, Homo sapien
ggtcaggccgtggtcgtaactaaca

SEQ ID NO: 251475 - DNA, 25 bp, Homo sapien
cagccgggcgctgaacaatgtaaaa

SEQ ID NO: 251476 - DNA, 25 bp, Homo sapien
catgaggattaactttcgacatcgg

SEQ ID NO: 251477 - DNA, 25 bp, Homo sapien
caactggtgcctgtgatctacaaac

SEQ ID NO: 251478 - DNA, 25 bp, Homo sapien
tgaggtccctgaagaccaactggtg

SEQ ID NO: 251479 - DNA, 25 bp, Homo sapien
ggctgtgtgcggctcctgattttca

SEQ ID NO: 251480 - DNA, 25 bp, Homo sapien
gtctaacagagcagcgcaggcgttt

SEQ ID NO: 251481 - DNA, 25 bp, Homo sapien
gctgcagccccactggtaatgggct

SEQ ID NO: 251482 - DNA, 25 bp, Homo sapien
taatgtagcagcaaaggatgtttat

SEQ ID NO: 251483 - DNA, 25 bp, Homo sapien
gcggctcaccgtcctctacagtggg

SEQ ID NO: 251484 - DNA, 25 bp, Homo sapien
aggtgagtgggacgggcctagggct

SEQ ID NO: 251485 - DNA, 25 bp, Homo sapien
gtgtcaatgcgtcagaggcggctgt

SEQ ID NO: 251486 - DNA, 25 bp, Homo sapien
tagtctccagcgtttcaaatatctg

SEQ ID NO: 251487 - DNA, 25 bp, Homo sapien
ccaggtcgtagtaggggctgtccac

SEQ ID NO: 251488 - DNA, 25 bp, Homo sapien
gatcaagtgacttgtgaaagcttcc

SEQ ID NO: 251489 - DNA, 25 bp, Homo sapien
tctgttttctcgagggccatccatc

SEQ ID NO: 251490 - DNA, 25 bp, Homo sapien
caaaggtcagaaactggaccctgtg

SEQ ID NO: 251491 - DNA, 25 bp, Homo sapien
cctgtgctgaggtgactgggcaaag

SEQ ID NO: 251492 - DNA, 25 bp, Homo sapien
aagccaggagcaggatgtgccccct

SEQ ID NO: 251493 - DNA, 25 bp, Homo sapien
ctgcaggtgccttggtgcctgtgct

SEQ ID NO: 251494 - DNA, 25 bp, Homo sapien
tctccgtggagaccaagcggtcgag

SEQ ID NO: 251495 - DNA, 25 bp, Homo sapien
tctgccggaccgtgttggcaatgag

SEQ ID NO: 251496 - DNA, 25 bp, Homo sapien
aggactgagcggcacaggttgggct

SEQ ID NO: 251497 - DNA, 25 bp, Homo sapien
gcaacttcaccagagacatgtccag

SEQ ID NO: 251498 - DNA, 25 bp, Homo sapien
cactgtcttcaagccggccagggct

SEQ ID NO: 251499 - DNA, 25 bp, Homo sapien
tcctcttcagtcctcgtgcaaacat

SEQ ID NO: 251500 - DNA, 25 bp, Homo sapien
acatttcctcttcagtcctcgtgca

SEQ ID NO: 251501 - DNA, 25 bp, Homo sapien
aggacactgtcttcaagccggccag

SEQ ID NO: 251502 - DNA, 25 bp, Homo sapien
gttcagaagagttagtgccttcccc

SEQ ID NO: 251503 - DNA, 25 bp, Homo sapien
tatgtcgcagacagccgggctggaa

SEQ ID NO: 251504 - DNA, 25 bp, Homo sapien
tcaggatcctgcctcggacaaagtc

SEQ ID NO: 251505 - DNA, 25 bp, Homo sapien
cactaaaagcctctatatgtcgcag

SEQ ID NO: 251506 - DNA, 25 bp, Homo sapien
ggctggctgaaaacgcagattccca

SEQ ID NO: 251507 - DNA, 25 bp, Homo sapien
ggactggtccttcactacagcagca

SEQ ID NO: 251508 - DNA, 25 bp, Homo sapien
tgagcaataccacgaggctggctga

SEQ ID NO: 251509 - DNA, 25 bp, Homo sapien
tcaggcaagcagagtacagctcggg

SEQ ID NO: 251510 - DNA, 25 bp, Homo sapien
acaaagggtcgacgctgcgctctcc

SEQ ID NO: 251511 - DNA, 25 bp, Homo sapien
gctgattggccactcgcgggccggg

SEQ ID NO: 251512 - DNA, 25 bp, Homo sapien
gccactcggcgtccacaaagggtcg

SEQ ID NO: 251513 - DNA, 25 bp, Homo sapien
ggcatctgtggcgcgtcttcccgcg

SEQ ID NO: 251514 - DNA, 25 bp, Homo sapien
aagcgaagggacgtcttacacggcg

SEQ ID NO: 251515 - DNA, 25 bp, Homo sapien
gaaatgtattcactatccggagaac

SEQ ID NO: 251516 - DNA, 25 bp, Homo sapien
cgtcagatctcaggaaatgtattca

SEQ ID NO: 251517 - DNA, 25 bp, Homo sapien
tacaaagtataatgatccatcaagg

SEQ ID NO: 251518 - DNA, 25 bp, Homo sapien
gccagcgggcccttaaatgcgagtt

SEQ ID NO: 251519 - DNA, 25 bp, Homo sapien
tgagtatccaggcacttccacgaca

SEQ ID NO: 251520 - DNA, 25 bp, Homo sapien
cagagggaactccattgtcgatgcc

SEQ ID NO: 251521 - DNA, 25 bp, Homo sapien
tgggctcttgctccccgtggattct

SEQ ID NO: 251522 - DNA, 25 bp, Homo sapien
gcgccctctagggtcgttcttggga

SEQ ID NO: 251523 - DNA, 25 bp, Homo sapien
tggcgccctctagggtcgttcttgg

SEQ ID NO: 251524 - DNA, 25 bp, Homo sapien
ctggcgccctctagggtcgttcttg

SEQ ID NO: 251525 - DNA, 25 bp, Homo sapien
ggtatcacctgtccatagtgagctg

SEQ ID NO: 251526 - DNA, 25 bp, Homo sapien
ttgtgccaggctcatcttaggtgtg

SEQ ID NO: 251527 - DNA, 25 bp, Homo sapien
gttcattacccaagagcactgctag

SEQ ID NO: 251528 - DNA, 25 bp, Homo sapien
gaagatgtgtgtttttgagcgctgc

SEQ ID NO: 251529 - DNA, 25 bp, Homo sapien
gactgccgtgggtcccacaggtccg

SEQ ID NO: 251530 - DNA, 25 bp, Homo sapien
actgcagacattgcgctcaggcgcc

SEQ ID NO: 251531 - DNA, 25 bp, Homo sapien
tcactgcagacattgcgctcaggcg

SEQ ID NO: 251532 - DNA, 25 bp, Homo sapien
ctgatggtgactgccgtgggtccca

SEQ ID NO: 251533 - DNA, 25 bp, Homo sapien
tgctctgagtgcatgcgatgtgccc

SEQ ID NO: 251534 - DNA, 25 bp, Homo sapien
caaggaagagcaactgcatagctgc

SEQ ID NO: 251535 - DNA, 25 bp, Homo sapien
tgatctcgatggtgacccagtgagg

SEQ ID NO: 251536 - DNA, 25 bp, Homo sapien
gacaaaacgagagcgtggctcagcc

SEQ ID NO: 251537 - DNA, 25 bp, Homo sapien
tggcttcaggaacgagaaattggta

SEQ ID NO: 251538 - DNA, 25 bp, Homo sapien
tcatcgccactgatgcgaacagggc

SEQ ID NO: 251539 - DNA, 25 bp, Homo sapien
ccaactgttgttctgggcgtggaca

SEQ ID NO: 251540 - DNA, 25 bp, Homo sapien
aatgctccgcaaataaagtcatcgc

SEQ ID NO: 251541 - DNA, 25 bp, Homo sapien
tcagcaggactcctcaatcagcctc

SEQ ID NO: 251542 - DNA, 25 bp, Homo sapien
gcaggactcctcaatcagcctcttt

SEQ ID NO: 251543 - DNA, 25 bp, Homo sapien
ggactcctcaatcagcctctttgca

SEQ ID NO: 251544 - DNA, 25 bp, Homo sapien
tcagcctctttgcagggcatggtga

SEQ ID NO: 251545 - DNA, 25 bp, Homo sapien
gtgagcctggtgacgtctgtcttca

SEQ ID NO: 251546 - DNA, 25 bp, Homo sapien
caagggccacgggcgactgcagctc

SEQ ID NO: 251547 - DNA, 25 bp, Homo sapien
tgggtgagcctggtgacgtctgtct

SEQ ID NO: 251548 - DNA, 25 bp, Homo sapien
gcaagggccacgggcgactgcagct

SEQ ID NO: 251549 - DNA, 25 bp, Homo sapien
ctaggaagatgacaaccaccgcgat

SEQ ID NO: 251550 - DNA, 25 bp, Homo sapien
tgaacctggcgtagtagtacccggc

SEQ ID NO: 251551 - DNA, 25 bp, Homo sapien
gcagcggctttgacgaggagaacca

SEQ ID NO: 251552 - DNA, 25 bp, Homo sapien
cgttcaccgtggacaggcacagaaa

SEQ ID NO: 251553 - DNA, 25 bp, Homo sapien
tgtgtacagcagctcgcagagtgcc

SEQ ID NO: 251554 - DNA, 25 bp, Homo sapien
agatgtaggcggtcaccttgcaggc

SEQ ID NO: 251555 - DNA, 25 bp, Homo sapien
tcccgacgaggatgaagatgcaggc

SEQ ID NO: 251556 - DNA, 25 bp, Homo sapien
tagatgacccagagtggcagcgtgc

SEQ ID NO: 251557 - DNA, 25 bp, Homo sapien
ctgctctcttcgaaggacacgttgt

SEQ ID NO: 251558 - DNA, 25 bp, Homo sapien
gtcttggcggagaggcccagggagg

SEQ ID NO: 251559 - DNA, 25 bp, Homo sapien
acacgttgttgcaggtcttggcgga

SEQ ID NO: 251560 - DNA, 25 bp, Homo sapien
tcgaaggacacgttgttgcaggtct

SEQ ID NO: 251561 - DNA, 25 bp, Homo sapien
aggaagccgcagacagacctggcct

SEQ ID NO: 251562 - DNA, 25 bp, Homo sapien
gctgagttcatgcttctgggccttc

SEQ ID NO: 251563 - DNA, 25 bp, Homo sapien
ctgtggttacagatcatggagtccc

SEQ ID NO: 251564 - DNA, 25 bp, Homo sapien
tcaaacacagctctccgaggtcaga

SEQ ID NO: 251565 - DNA, 25 bp, Homo sapien
ccgtttttcagtagcattgggcaca

SEQ ID NO: 251566 - DNA, 25 bp, Homo sapien
taaccgtttttcagtagcattgggc

SEQ ID NO: 251567 - DNA, 25 bp, Homo sapien
cgtttttcagtagcattgggcacat

SEQ ID NO: 251568 - DNA, 25 bp, Homo sapien
cattgtaaccgtttttcagtagcat

SEQ ID NO: 251569 - DNA, 25 bp, Homo sapien
tcttgagcaatcctgcacgtgtggc

SEQ ID NO: 251570 - DNA, 25 bp, Homo sapien
cggcagttccgtctcatctcgtggg

SEQ ID NO: 251571 - DNA, 25 bp, Homo sapien
cattgctggatctcacggcagttcc

SEQ ID NO: 251572 - DNA, 25 bp, Homo sapien
cagacccacagttggcattgctgga

SEQ ID NO: 251573 - DNA, 25 bp, Homo sapien
tcttcacccagatggctcttttccc

SEQ ID NO: 251574 - DNA, 25 bp, Homo sapien
ccgtctctttcatgacaatcacagg

SEQ ID NO: 251575 - DNA, 25 bp, Homo sapien
ttttcccatcaaacgagtgccccag

SEQ ID NO: 251576 - DNA, 25 bp, Homo sapien
gtctctttcatgacaatcacaggcc

SEQ ID NO: 251577 - DNA, 25 bp, Homo sapien
catgtcatgcgtcttgtcggtccta

SEQ ID NO: 251578 - DNA, 25 bp, Homo sapien
ccaatctcagtgtggctctaagata

SEQ ID NO: 251579 - DNA, 25 bp, Homo sapien
catattttgcgggttccaatctcag

SEQ ID NO: 251580 - DNA, 25 bp, Homo sapien
ggtcctatcaagacgttcactctga

SEQ ID NO: 251581 - DNA, 25 bp, Homo sapien
gctgctctgccaagatccgtgtggc

SEQ ID NO: 251582 - DNA, 25 bp, Homo sapien
gcagcgctgagggtcttcagactct

SEQ ID NO: 251583 - DNA, 25 bp, Homo sapien
gtgtctactccgattctgcagccgc

SEQ ID NO: 251584 - DNA, 25 bp, Homo sapien
catactcttgctcgctggtgtctac

SEQ ID NO: 251585 - DNA, 25 bp, Homo sapien
taacaggatctagcatgacctcacc

SEQ ID NO: 251586 - DNA, 25 bp, Homo sapien
tctggcctgcaagttgctgtgctcc

SEQ ID NO: 251587 - DNA, 25 bp, Homo sapien
gcccggccaatgaatccattttcca

SEQ ID NO: 251588 - DNA, 25 bp, Homo sapien
acatgttcctgggatggacatttca

SEQ ID NO: 251589 - DNA, 25 bp, Homo sapien
cattcctagccatttccgtctttta

SEQ ID NO: 251590 - DNA, 25 bp, Homo sapien
cctgtaatttctaagctgtttcacg

SEQ ID NO: 251591 - DNA, 25 bp, Homo sapien
ttcacggttgctggccattcctagc

SEQ ID NO: 251592 - DNA, 25 bp, Homo sapien
ccgcacctggctggattgcctgtaa

SEQ ID NO: 251593 - DNA, 25 bp, Homo sapien
tctgccgtcacgtttgagacaaacc

SEQ ID NO: 251594 - DNA, 25 bp, Homo sapien
caccaggcaaacctatgacctcttt

SEQ ID NO: 251595 - DNA, 25 bp, Homo sapien
ggcaccaggcaaacctatgacctct

SEQ ID NO: 251596 - DNA, 25 bp, Homo sapien
gacctcttttctgccgtcacgtttg

SEQ ID NO: 251597 - DNA, 25 bp, Homo sapien
tcccaatttgatagtgttgcccagg

SEQ ID NO: 251598 - DNA, 25 bp, Homo sapien
aagcccattgtcaactttcttattt

SEQ ID NO: 251599 - DNA, 25 bp, Homo sapien
ttttcccaatttgatagtgttgccc

SEQ ID NO: 251600 - DNA, 25 bp, Homo sapien
ctagggagggaaatgtggagtcacc

SEQ ID NO: 251601 - DNA, 25 bp, Homo sapien
tagccaaccgggctggggtatctta

SEQ ID NO: 251602 - DNA, 25 bp, Homo sapien
gggtatcttactggtgatgacagca

SEQ ID NO: 251603 - DNA, 25 bp, Homo sapien
aattatgttctgtctagaactcccc

SEQ ID NO: 251604 - DNA, 25 bp, Homo sapien
tgcagtcctagctgaggtttcagga

SEQ ID NO: 251605 - DNA, 25 bp, Homo sapien
tgttgtctctgagaagcccgtcagg

SEQ ID NO: 251606 - DNA, 25 bp, Homo sapien
cacggctgagtcacgtgccagaaca

SEQ ID NO: 251607 - DNA, 25 bp, Homo sapien
caacaggagagcaggtttcagacag

SEQ ID NO: 251608 - DNA, 25 bp, Homo sapien
tgaccccagcaaagcgattcatacc

SEQ ID NO: 251609 - DNA, 25 bp, Homo sapien
cccaagccaggtgtgaccacgctgt

SEQ ID NO: 251610 - DNA, 25 bp, Homo sapien
cccccaagccaggtgtgaccacgct

SEQ ID NO: 251611 - DNA, 25 bp, Homo sapien
caagccaggtgtgaccacgctgtgg

SEQ ID NO: 251612 - DNA, 25 bp, Homo sapien
gtcccccaagccaggtgtgaccacg

SEQ ID NO: 251613 - DNA, 25 bp, Homo sapien
cacttctggcttattactaaaggaa

SEQ ID NO: 251614 - DNA, 25 bp, Homo sapien
gaagtgtcaagctgctcatcgtggc

SEQ ID NO: 251615 - DNA, 25 bp, Homo sapien
ctcatcgtggcttggtcttgctggc

SEQ ID NO: 251616 - DNA, 25 bp, Homo sapien
cctaggcaagtctaagggattagga

SEQ ID NO: 251617 - DNA, 25 bp, Homo sapien
tgctcccatcacctaggcaagtcta

SEQ ID NO: 251618 - DNA, 25 bp, Homo sapien
caggaccatgcttgtcattctcttg

SEQ ID NO: 251619 - DNA, 25 bp, Homo sapien
gggctattcccctgtggtctcaagc

SEQ ID NO: 251620 - DNA, 25 bp, Homo sapien
gatgctccgagaacccatctgttac

SEQ ID NO: 251621 - DNA, 25 bp, Homo sapien
actgctcccgcggtgaccatgcgtc

SEQ ID NO: 251622 - DNA, 25 bp, Homo sapien
actcaggaaggagcgacgtgcagcc

SEQ ID NO: 251623 - DNA, 25 bp, Homo sapien
aggaaggagcgacgtgcagccggct

SEQ ID NO: 251624 - DNA, 25 bp, Homo sapien
tcaggaaggagcgacgtgcagccgg

SEQ ID NO: 251625 - DNA, 25 bp, Homo sapien
gactcaggaaggagcgacgtgcagc

SEQ ID NO: 251626 - DNA, 25 bp, Homo sapien
ggggctcctcccgtcagcaggccct

SEQ ID NO: 251627 - DNA, 25 bp, Homo sapien
agggggctcctcccgtcagcaggcc

SEQ ID NO: 251628 - DNA, 25 bp, Homo sapien
ctgcaggcccgcggcacgccccacc

SEQ ID NO: 251629 - DNA, 25 bp, Homo sapien
ggctcctcccgtcagcaggccctgg

SEQ ID NO: 251630 - DNA, 25 bp, Homo sapien
ccgtctccaccaaaaccagtcaggc

SEQ ID NO: 251631 - DNA, 25 bp, Homo sapien
cgtctccaccaaaaccagtcaggcg

SEQ ID NO: 251632 - DNA, 25 bp, Homo sapien
gttgcagtgagcctgagccgagatg

SEQ ID NO: 251633 - DNA, 25 bp, Homo sapien
gcagtgagcctgagccgagatggca

SEQ ID NO: 251634 - DNA, 25 bp, Homo sapien
gccgcctgtgaacaccgacaggaag

SEQ ID NO: 251635 - DNA, 25 bp, Homo sapien
gcctgtgaacaccgacaggaagaac

SEQ ID NO: 251636 - DNA, 25 bp, Homo sapien
gaccctgaacagccgcctgtgaaca

SEQ ID NO: 251637 - DNA, 25 bp, Homo sapien
ggaccctgaacagccgcctgtgaac

SEQ ID NO: 251638 - DNA, 25 bp, Homo sapien
acagcccatcagaggcagggtgcag

SEQ ID NO: 251639 - DNA, 25 bp, Homo sapien
tgcgcgcacgcatactctgggcaat

SEQ ID NO: 251640 - DNA, 25 bp, Homo sapien
tctgggcaatccactcctcgggtgt

SEQ ID NO: 251641 - DNA, 25 bp, Homo sapien
catgtcatgcaaggcagtgtgctgt

SEQ ID NO: 251642 - DNA, 25 bp, Homo sapien
taccctgtgctcatgcaagtgtgca

SEQ ID NO: 251643 - DNA, 25 bp, Homo sapien
ccagggccgtgccaccctcctgatc

SEQ ID NO: 251644 - DNA, 25 bp, Homo sapien
ccctcctgatcaccgcaagcatgga

SEQ ID NO: 251645 - DNA, 25 bp, Homo sapien
gctgcgccgccgcaggcgggagagg

SEQ ID NO: 251646 - DNA, 25 bp, Homo sapien
ccacgaggggattctgcgggccgag

SEQ ID NO: 251647 - DNA, 25 bp, Homo sapien
tcgctgctgagccccggagagcgga

SEQ ID NO: 251648 - DNA, 25 bp, Homo sapien
agcacgctgcgggtgggacaggcag

SEQ ID NO: 251649 - DNA, 25 bp, Homo sapien
gctgccgcggcgatgtgggcggctt

SEQ ID NO: 251650 - DNA, 25 bp, Homo sapien
tgggcggcttgcgtgtggccgatcg

SEQ ID NO: 251651 - DNA, 25 bp, Homo sapien
taagaccttgatacgtattcgtggg

SEQ ID NO: 251652 - DNA, 25 bp, Homo sapien
taaagacttgcacatcactgacagg

SEQ ID NO: 251653 - DNA, 25 bp, Homo sapien
cgttccagttggctcaagcagtgag

SEQ ID NO: 251654 - DNA, 25 bp, Homo sapien
ttggcatgccaacgcattcgaggcc

SEQ ID NO: 251655 - DNA, 25 bp, Homo sapien
tgtcacgagcttcaatactgccgcc

SEQ ID NO: 251656 - DNA, 25 bp, Homo sapien
aacgctacgatttggtgacgacgca

SEQ ID NO: 251657 - DNA, 25 bp, Homo sapien
tttcatacagcgagtgccacgcacg

SEQ ID NO: 251658 - DNA, 25 bp, Homo sapien
gccagggccacatcaataaccaggg

SEQ ID NO: 251659 - DNA, 25 bp, Homo sapien
tgaccgcgcggttgtccactttggg

SEQ ID NO: 251660 - DNA, 25 bp, Homo sapien
tagcgggcctcattgatgctcctga

SEQ ID NO: 251661 - DNA, 25 bp, Homo sapien
tccttgccggcgtagcgggcctcat

SEQ ID NO: 251662 - DNA, 25 bp, Homo sapien
ttgatgctcctgaccgcgcggttgt

SEQ ID NO: 251663 - DNA, 25 bp, Homo sapien
ggtgaatttgtgtgagaggaacttc

SEQ ID NO: 251664 - DNA, 25 bp, Homo sapien
tgtgtgagaggaacttctccgcctc

SEQ ID NO: 251665 - DNA, 25 bp, Homo sapien
gaatttgtgtgagaggaacttctcc

SEQ ID NO: 251666 - DNA, 25 bp, Homo sapien
ctttggtgaatttgtgtgagaggaa

SEQ ID NO: 251667 - DNA, 25 bp, Homo sapien
agcgcctcgtccgccctgcgcggcg

SEQ ID NO: 251668 - DNA, 25 bp, Homo sapien
tgacggccgcgtggccggccggccc

SEQ ID NO: 251669 - DNA, 25 bp, Homo sapien
cgcggcggcggcgtgaagttcttgc

SEQ ID NO: 251670 - DNA, 25 bp, Homo sapien
cggcggcggcgtgaagttcttgcac

SEQ ID NO: 251671 - DNA, 25 bp, Homo sapien
cgcacgccagccacagcacgctgaa

SEQ ID NO: 251672 - DNA, 25 bp, Homo sapien
gctctttcctgcgcttgcgtgtcca

SEQ ID NO: 251673 - DNA, 25 bp, Homo sapien
gcccactggttgttggcgctctcct

SEQ ID NO: 251674 - DNA, 25 bp, Homo sapien
acacgcacaggaccacgcacgccag

SEQ ID NO: 251675 - DNA, 25 bp, Homo sapien
taacaaccgtctccaccttgacctc

SEQ ID NO: 251676 - DNA, 25 bp, Homo sapien
ctgtggaagagccgcccgtaacaac

SEQ ID NO: 251677 - DNA, 25 bp, Homo sapien
ggcggccacgatggcgtgggccgcg

SEQ ID NO: 251678 - DNA, 25 bp, Homo sapien
accttgacctcggtgacagccagga

SEQ ID NO: 251679 - DNA, 25 bp, Homo sapien
ggtcccgtgccacagcccttgtggc

SEQ ID NO: 251680 - DNA, 25 bp, Homo sapien
aggcggtcccgtgccacagcccttg

SEQ ID NO: 251681 - DNA, 25 bp, Homo sapien
aggacgcccggtcgcaaagcaacac

SEQ ID NO: 251682 - DNA, 25 bp, Homo sapien
agcggatcccggagcaaatggcgcc

SEQ ID NO: 251683 - DNA, 25 bp, Homo sapien
gtgggtacacgtgggacacacccta

SEQ ID NO: 251684 - DNA, 25 bp, Homo sapien
agggcagggccgtgaacctgacacc

SEQ ID NO: 251685 - DNA, 25 bp, Homo sapien
tacatccctggactggcgctgtggg

SEQ ID NO: 251686 - DNA, 25 bp, Homo sapien
gtgaacctgacacctacatccctgg

SEQ ID NO: 251687 - DNA, 25 bp, Homo sapien
ctcggtggctcttctgcgccgcact

SEQ ID NO: 251688 - DNA, 25 bp, Homo sapien
tgaggcgggcacagttattgtccag

SEQ ID NO: 251689 - DNA, 25 bp, Homo sapien
agggtggtcgcagacactggcctgg

SEQ ID NO: 251690 - DNA, 25 bp, Homo sapien
gccagcagacaaggcttccatccgc

SEQ ID NO: 251691 - DNA, 25 bp, Homo sapien
gcagctgttgcagtcttccacccag

SEQ ID NO: 251692 - DNA, 25 bp, Homo sapien
accagcaggatctcccgaacccgat

SEQ ID NO: 251693 - DNA, 25 bp, Homo sapien
ttgctgcagtcacggcggccatcca

SEQ ID NO: 251694 - DNA, 25 bp, Homo sapien
gcttccgtgtgggaacggagtgccc

SEQ ID NO: 251695 - DNA, 25 bp, Homo sapien
gcgatacccgttgatctcatccaca

SEQ ID NO: 251696 - DNA, 25 bp, Homo sapien
acgtggccccgtaggcacagggcga

SEQ ID NO: 251697 - DNA, 25 bp, Homo sapien
cacagggcgaggactggcactcgtc

SEQ ID NO: 251698 - DNA, 25 bp, Homo sapien
ccgggtgggcagctacagcgatacc

SEQ ID NO: 251699 - DNA, 25 bp, Homo sapien
gcaggaagtagttgtggccacactg

SEQ ID NO: 251700 - DNA, 25 bp, Homo sapien
tgcccttcaagggacgtggacgttg

SEQ ID NO: 251701 - DNA, 25 bp, Homo sapien
aatcacttggcagggtatacagcag

SEQ ID NO: 251702 - DNA, 25 bp, Homo sapien
agactcctgacaccgcggctgggct

SEQ ID NO: 251703 - DNA, 25 bp, Homo sapien
acactcgcagcggaaccagttgacg

SEQ ID NO: 251704 - DNA, 25 bp, Homo sapien
tgatgcggcagtcaggccccgcgaa

SEQ ID NO: 251705 - DNA, 25 bp, Homo sapien
atgcggcagtcaggccccgcgaagc

SEQ ID NO: 251706 - DNA, 25 bp, Homo sapien
gttgacgccgtcaacacagatgcca

SEQ ID NO: 251707 - DNA, 25 bp, Homo sapien
cagagggtgggcatcaggtggcccc

SEQ ID NO: 251708 - DNA, 25 bp, Homo sapien
ggcatcaggtggccccccgtggtat

SEQ ID NO: 251709 - DNA, 25 bp, Homo sapien
caggtggccccccgtggtatgccaa

SEQ ID NO: 251710 - DNA, 25 bp, Homo sapien
gtggccccccgtggtatgccaagtc

SEQ ID NO: 251711 - DNA, 25 bp, Homo sapien
ggcagagggttgcagtcgttggtat

SEQ ID NO: 251712 - DNA, 25 bp, Homo sapien
gcaagtacgaccctcccagccgtcc

SEQ ID NO: 251713 - DNA, 25 bp, Homo sapien
gtgcaagtacgaccctcccagccgt

SEQ ID NO: 251714 - DNA, 25 bp, Homo sapien
tgagtgcaagtacgaccctcccagc

SEQ ID NO: 251715 - DNA, 25 bp, Homo sapien
tgtgagtgcaagtacgaccctccca

SEQ ID NO: 251716 - DNA, 25 bp, Homo sapien
gcaggcgcagcggaaggtgtcgccg

SEQ ID NO: 251717 - DNA, 25 bp, Homo sapien
tgcaggtgtaggcatcgcactggaa

SEQ ID NO: 251718 - DNA, 25 bp, Homo sapien
aggtgctgcccttccagccgggggg

SEQ ID NO: 251719 - DNA, 25 bp, Homo sapien
aaggtgtcgccgctgtcgtagcagg

SEQ ID NO: 251720 - DNA, 25 bp, Homo sapien
cggccgcggctgtggcagggatcgg

SEQ ID NO: 251721 - DNA, 25 bp, Homo sapien
tgaccaggtcgtagcagcggccgcg

SEQ ID NO: 251722 - DNA, 25 bp, Homo sapien
cagggatcgggaaggcagtcgttgg

SEQ ID NO: 251723 - DNA, 25 bp, Homo sapien
tcgtcgcacgcacagtagaagtcat

SEQ ID NO: 251724 - DNA, 25 bp, Homo sapien
cctcatcgatgcatgtgcccccatt

SEQ ID NO: 251725 - DNA, 25 bp, Homo sapien
cagcggaaggcgtccacctcatcga

SEQ ID NO: 251726 - DNA, 25 bp, Homo sapien
gaagcagcggaaggcgtccacctca

SEQ ID NO: 251727 - DNA, 25 bp, Homo sapien
gcagaagcagcggaaggcgtccacc

SEQ ID NO: 251728 - DNA, 25 bp, Homo sapien
accaccagcccgccgttcgtggcca

SEQ ID NO: 251729 - DNA, 25 bp, Homo sapien
cagcccgccgttcgtggccactcac

SEQ ID NO: 251730 - DNA, 25 bp, Homo sapien
gaggcgagcggggtgagccagggcc

SEQ ID NO: 251731 - DNA, 25 bp, Homo sapien
accagcccgccgttcgtggccactc

SEQ ID NO: 251732 - DNA, 25 bp, Homo sapien
ccactgtcacagatgcaggaaaagt

SEQ ID NO: 251733 - DNA, 25 bp, Homo sapien
gcgtctgacccgcagccatcgatca

SEQ ID NO: 251734 - DNA, 25 bp, Homo sapien
taggtgccagtaaagccactgtcac

SEQ ID NO: 251735 - DNA, 25 bp, Homo sapien
cctggctggctgacgcagcgtccat

SEQ ID NO: 251736 - DNA, 25 bp, Homo sapien
ctatggcaggcagtacagtcaggag

SEQ ID NO: 251737 - DNA, 25 bp, Homo sapien
ccaccaccccatgccgcacccagca

SEQ ID NO: 251738 - DNA, 25 bp, Homo sapien
caggcagtacagtcaggagtcaggc

SEQ ID NO: 251739 - DNA, 25 bp, Homo sapien
gcagtacagtcaggagtcaggcccg

SEQ ID NO: 251740 - DNA, 25 bp, Homo sapien
gccagggcacggctcgcggggcacg

SEQ ID NO: 251741 - DNA, 25 bp, Homo sapien
tcagggcaggcgcagtaatagtcac

SEQ ID NO: 251742 - DNA, 25 bp, Homo sapien
gccaccaaagtcatcagggcaggcg

SEQ ID NO: 251743 - DNA, 25 bp, Homo sapien
accaaagtcatcagggcaggcgcag

SEQ ID NO: 251744 - DNA, 25 bp, Homo sapien
ttatagcagcgagcgccgttccggc

SEQ ID NO: 251745 - DNA, 25 bp, Homo sapien
ctccaggttatagcagcgagcgccg

SEQ ID NO: 251746 - DNA, 25 bp, Homo sapien
caggttatagcagcgagcgccgttc

SEQ ID NO: 251747 - DNA, 25 bp, Homo sapien
cctccaggttatagcagcgagcgcc

SEQ ID NO: 251748 - DNA, 25 bp, Homo sapien
ggcacacacactggtacccgttcac

SEQ ID NO: 251749 - DNA, 25 bp, Homo sapien
cacacactggtacccgttcaccagg

SEQ ID NO: 251750 - DNA, 25 bp, Homo sapien
tggcacactcgtctcgttccagctc

SEQ ID NO: 251751 - DNA, 25 bp, Homo sapien
gtctcgttccagctcgcaatgccgg

SEQ ID NO: 251752 - DNA, 25 bp, Homo sapien
gccagccaggtgagcgtcccgcagg

SEQ ID NO: 251753 - DNA, 25 bp, Homo sapien
ccgcaggcaccctgacggccccgca

SEQ ID NO: 251754 - DNA, 25 bp, Homo sapien
cgtcccgcaggcaccctgacggccc

SEQ ID NO: 251755 - DNA, 25 bp, Homo sapien
gcaggcaccctgacggccccgcagc

SEQ ID NO: 251756 - DNA, 25 bp, Homo sapien
tgacactgcccgcgacagtcgttga

SEQ ID NO: 251757 - DNA, 25 bp, Homo sapien
cactgcccgcgacagtcgttgacgt

SEQ ID NO: 251758 - DNA, 25 bp, Homo sapien
gctgacactgcccgcgacagtcgtt

SEQ ID NO: 251759 - DNA, 25 bp, Homo sapien
catgctgacactgcccgcgacagtc

SEQ ID NO: 251760 - DNA, 25 bp, Homo sapien
ccgccggcgcccaccccccatactg

SEQ ID NO: 251761 - DNA, 25 bp, Homo sapien
gccggcgcccaccccccatactgac

SEQ ID NO: 251762 - DNA, 25 bp, Homo sapien
cgccggcgcccaccccccatactga

SEQ ID NO: 251763 - DNA, 25 bp, Homo sapien
gcaagaaaaagcgttaaggcatggc

SEQ ID NO: 251764 - DNA, 25 bp, Homo sapien
ttccagcccgggatgcaatcacagt

SEQ ID NO: 251765 - DNA, 25 bp, Homo sapien
aatagccgccaatcaggtttttgca

SEQ ID NO: 251766 - DNA, 25 bp, Homo sapien
gatatggcagttgatgcccttccag

SEQ ID NO: 251767 - DNA, 25 bp, Homo sapien
tgccaccggccgcacacgggttcga

SEQ ID NO: 251768 - DNA, 25 bp, Homo sapien
gatgcactcaaagccgtccacctgg

SEQ ID NO: 251769 - DNA, 25 bp, Homo sapien
accggccgcacacgggttcgaagca

SEQ ID NO: 251770 - DNA, 25 bp, Homo sapien
ccacccactgctcggggcagatgca

SEQ ID NO: 251771 - DNA, 25 bp, Homo sapien
ggacggcacctcatggcaagagccc

SEQ ID NO: 251772 - DNA, 25 bp, Homo sapien
gcaagagcccccgttggcacacggg

SEQ ID NO: 251773 - DNA, 25 bp, Homo sapien
agtggcattcgaagccggacggcac

SEQ ID NO: 251774 - DNA, 25 bp, Homo sapien
gctccagcccgatgggcagtggcat

SEQ ID NO: 251775 - DNA, 25 bp, Homo sapien
gcgttgatgcacgtgcctccgttgg

SEQ ID NO: 251776 - DNA, 25 bp, Homo sapien
agttcctgcccgagtagccgtcagg

SEQ ID NO: 251777 - DNA, 25 bp, Homo sapien
tactggtcaggctcggcgttgatgc

SEQ ID NO: 251778 - DNA, 25 bp, Homo sapien
caggtgcagcggtactggtcaggct

SEQ ID NO: 251779 - DNA, 25 bp, Homo sapien
cgcagaacctcccttgccagccgta

SEQ ID NO: 251780 - DNA, 25 bp, Homo sapien
caactgccatgcacgcagccggggt

SEQ ID NO: 251781 - DNA, 25 bp, Homo sapien
ccggggtaggggacacactcatcgc

SEQ ID NO: 251782 - DNA, 25 bp, Homo sapien
agggctccacacaactgccatgcac

SEQ ID NO: 251783 - DNA, 25 bp, Homo sapien
gccccccagactccggctcatcttc

SEQ ID NO: 251784 - DNA, 25 bp, Homo sapien
ccaggccccccagactccggctcat

SEQ ID NO: 251785 - DNA, 25 bp, Homo sapien
aggccccccagactccggctcatct

SEQ ID NO: 251786 - DNA, 25 bp, Homo sapien
ccaccaggccccccagactccggct

SEQ ID NO: 251787 - DNA, 25 bp, Homo sapien
caggcacggtgcatcccccgtggag

SEQ ID NO: 251788 - DNA, 25 bp, Homo sapien
gcatcccccgtggagcaaattacac

SEQ ID NO: 251789 - DNA, 25 bp, Homo sapien
ggtgcatcccccgtggagcaaatta

SEQ ID NO: 251790 - DNA, 25 bp, Homo sapien
ccccgtggagcaaattacacccttg

SEQ ID NO: 251791 - DNA, 25 bp, Homo sapien
tgttgccgtactggtcgcaggtgta

SEQ ID NO: 251792 - DNA, 25 bp, Homo sapien
tgtagtagttctcgtcgcagcgcac

SEQ ID NO: 251793 - DNA, 25 bp, Homo sapien
tccagcggtcctccgggttgatcat

SEQ ID NO: 251794 - DNA, 25 bp, Homo sapien
tgtagtggccgaaaaagtcgttgcg

SEQ ID NO: 251795 - DNA, 25 bp, Homo sapien
cattcggggtggtatcgttgtccca

SEQ ID NO: 251796 - DNA, 25 bp, Homo sapien
aggcctccacgatgagggtaaagga

SEQ ID NO: 251797 - DNA, 25 bp, Homo sapien
tcccaggcctccacgatgagggtaa

SEQ ID NO: 251798 - DNA, 25 bp, Homo sapien
tggtatcgttgtcccagtcccaggc

SEQ ID NO: 251799 - DNA, 25 bp, Homo sapien
agtgcaaataccagggtgctggcat

SEQ ID NO: 251800 - DNA, 25 bp, Homo sapien
ccccaaacacgcagctatgactctg

SEQ ID NO: 251801 - DNA, 25 bp, Homo sapien
ggtgctggcatcacggcacagctcc

SEQ ID NO: 251802 - DNA, 25 bp, Homo sapien
ccaggccacatggcaggagaccagg

SEQ ID NO: 251803 - DNA, 25 bp, Homo sapien
gtagaaggagttgccgcccagcacg

SEQ ID NO: 251804 - DNA, 25 bp, Homo sapien
actggaaggggatgacgacgaggcc

SEQ ID NO: 251805 - DNA, 25 bp, Homo sapien
gcgccgtggccgtagctgcagggcc

SEQ ID NO: 251806 - DNA, 25 bp, Homo sapien
gggcgtggcgccgtggccgtagctg

SEQ ID NO: 251807 - DNA, 25 bp, Homo sapien
gtacgtgtcgcactcgtcgtggccg

SEQ ID NO: 251808 - DNA, 25 bp, Homo sapien
tgcagctcgaaatagcccatgggcc

SEQ ID NO: 251809 - DNA, 25 bp, Homo sapien
ttcacgttccgcagcgcgctcagct

SEQ ID NO: 251810 - DNA, 25 bp, Homo sapien
aaggcacacgcgcacgtacgtgtcg

SEQ ID NO: 251811 - DNA, 25 bp, Homo sapien
cagcagcagccgccggggaaggcgc

SEQ ID NO: 251812 - DNA, 25 bp, Homo sapien
ggcgcccccggccctgcgcccgcat

SEQ ID NO: 251813 - DNA, 25 bp, Homo sapien
cagcagccgccggggaaggcgcccc

SEQ ID NO: 251814 - DNA, 25 bp, Homo sapien
ctgcacccagagcgccagcagcagc

SEQ ID NO: 251815 - DNA, 25 bp, Homo sapien
ggcaccgcagccaacaagttcggaa

SEQ ID NO: 251816 - DNA, 25 bp, Homo sapien
gagactgacagctcgctcgcccatt

SEQ ID NO: 251817 - DNA, 25 bp, Homo sapien
ttcggaacgagactgacagctcgct

SEQ ID NO: 251818 - DNA, 25 bp, Homo sapien
ccaacaagttcggaacgagactgac

SEQ ID NO: 251819 - DNA, 25 bp, Homo sapien
tggcctctgtctagaaccctggagt

SEQ ID NO: 251820 - DNA, 25 bp, Homo sapien
ggcctctgtctagaaccctggagtc

SEQ ID NO: 251821 - DNA, 25 bp, Homo sapien
gactggcctctgtctagaaccctgg

SEQ ID NO: 251822 - DNA, 25 bp, Homo sapien
agactggcctctgtctagaaccctg

SEQ ID NO: 251823 - DNA, 25 bp, Homo sapien
tgaggaaccatgagacaccaaagat

SEQ ID NO: 251824 - DNA, 25 bp, Homo sapien
caccaaagatgacgccgagggtctt

SEQ ID NO: 251825 - DNA, 25 bp, Homo sapien
atgtccgggtcgtctgcaaaggcct

SEQ ID NO: 251826 - DNA, 25 bp, Homo sapien
tgagacaccaaagatgacgccgagg

SEQ ID NO: 251827 - DNA, 25 bp, Homo sapien
acctggaccgctacgctgggcatct

SEQ ID NO: 251828 - DNA, 25 bp, Homo sapien
ctacgctgggcatctgtcacctctg

SEQ ID NO: 251829 - DNA, 25 bp, Homo sapien
gtgtagaacatggtctgtctggagc

SEQ ID NO: 251830 - DNA, 25 bp, Homo sapien
aacatggtctgtctggagccagtca

SEQ ID NO: 251831 - DNA, 25 bp, Homo sapien
gagtcacccacgctggccccgctgg

SEQ ID NO: 251832 - DNA, 25 bp, Homo sapien
ccagtaggcaggactctgggatgcc

SEQ ID NO: 251833 - DNA, 25 bp, Homo sapien
gcatcccttccctgatcacgttgta

SEQ ID NO: 251834 - DNA, 25 bp, Homo sapien
cacccggattcccacctggtgtgca

SEQ ID NO: 251835 - DNA, 25 bp, Homo sapien
tgaccacttgccctgagagcctgtg

SEQ ID NO: 251836 - DNA, 25 bp, Homo sapien
taagcaggatgcctacttcccagag

SEQ ID NO: 251837 - DNA, 25 bp, Homo sapien
tctgccataacctcgtgagccggga

SEQ ID NO: 251838 - DNA, 25 bp, Homo sapien
tcttcccgatgcgagtctaagcagg

SEQ ID NO: 251839 - DNA, 25 bp, Homo sapien
aaatgctgcctttaacttgggagtc

SEQ ID NO: 251840 - DNA, 25 bp, Homo sapien
caggtgcagagacttccggtgcttc

SEQ ID NO: 251841 - DNA, 25 bp, Homo sapien
cttctcccagtggagcgggccctgg

SEQ ID NO: 251842 - DNA, 25 bp, Homo sapien
ccatccagccaggaacgtgcccagg

SEQ ID NO: 251843 - DNA, 25 bp, Homo sapien
tggtctacagctgctagggaccctg

SEQ ID NO: 251844 - DNA, 25 bp, Homo sapien
agtatgtggcgacccggcgcagatc

SEQ ID NO: 251845 - DNA, 25 bp, Homo sapien
tgtagctcccgaggcccgtcctggt

SEQ ID NO: 251846 - DNA, 25 bp, Homo sapien
aggccggcacacagctcaactgtca

SEQ ID NO: 251847 - DNA, 25 bp, Homo sapien
agggacctgaaggtgaccctgcaga

SEQ ID NO: 251848 - DNA, 25 bp, Homo sapien
cccttcccaccccagctggcctcac

SEQ ID NO: 251849 - DNA, 25 bp, Homo sapien
cctgcagatccccttcccaccccag

SEQ ID NO: 251850 - DNA, 25 bp, Homo sapien
ggacctgaaggtgaccctgcagatc

SEQ ID NO: 251851 - DNA, 25 bp, Homo sapien
ctggccggaactgcttcaccaacac

SEQ ID NO: 251852 - DNA, 25 bp, Homo sapien
tggccggaactgcttcaccaacacc

SEQ ID NO: 251853 - DNA, 25 bp, Homo sapien
agagttgaataagagaacggtcacg

SEQ ID NO: 251854 - DNA, 25 bp, Homo sapien
ctcctccgagaagagttgaataaga

SEQ ID NO: 251855 - DNA, 25 bp, Homo sapien
gaagagttgaataagagaacggtca

SEQ ID NO: 251856 - DNA, 25 bp, Homo sapien
ccgagaagagttgaataagagaacg

SEQ ID NO: 251857 - DNA, 25 bp, Homo sapien
aggcccaggcgggaccagagctttc

SEQ ID NO: 251858 - DNA, 25 bp, Homo sapien
agcacagaagcactccactggccct

SEQ ID NO: 251859 - DNA, 25 bp, Homo sapien
ttccagctggcaggatgggaggcgg

SEQ ID NO: 251860 - DNA, 25 bp, Homo sapien
gtggccatcccacctccttgccagc

SEQ ID NO: 251861 - DNA, 25 bp, Homo sapien
tgaagtcccaggacttctgggcacc

SEQ ID NO: 251862 - DNA, 25 bp, Homo sapien
catgaagtcccaggacttctgggca

SEQ ID NO: 251863 - DNA, 25 bp, Homo sapien
ctgtcatgcgtcttcatgaagtccc

SEQ ID NO: 251864 - DNA, 25 bp, Homo sapien
gcgtcttcatgaagtcccaggactt

SEQ ID NO: 251865 - DNA, 25 bp, Homo sapien
taatgcagcgtgagcggccgcaggt

SEQ ID NO: 251866 - DNA, 25 bp, Homo sapien
cggacgccccctcgatgcgctccat

SEQ ID NO: 251867 - DNA, 25 bp, Homo sapien
aatgcagcgtgagcggccgcaggta

SEQ ID NO: 251868 - DNA, 25 bp, Homo sapien
cggcgcagcggcccacggacgcccc

SEQ ID NO: 251869 - DNA, 25 bp, Homo sapien
gcgccctgtcccgacaggagccttc

SEQ ID NO: 251870 - DNA, 25 bp, Homo sapien
ctgtcccgacaggagccttcgggcg

SEQ ID NO: 251871 - DNA, 25 bp, Homo sapien
gacaggagccttcgggcgggcgcgt

SEQ ID NO: 251872 - DNA, 25 bp, Homo sapien
gggcggcgccctgtcccgacaggag

SEQ ID NO: 251873 - DNA, 25 bp, Homo sapien
ttggattctcccgtggcagctggct

SEQ ID NO: 251874 - DNA, 25 bp, Homo sapien
gaaacaatattgaggcccacactgg

SEQ ID NO: 251875 - DNA, 25 bp, Homo sapien
gctggagtcgtctgaaggccaaacg

SEQ ID NO: 251876 - DNA, 25 bp, Homo sapien
cctcagttgggtggctggaacagct

SEQ ID NO: 251877 - DNA, 25 bp, Homo sapien
ggcctcttcctccggtgcacgaggg

SEQ ID NO: 251878 - DNA, 25 bp, Homo sapien
aaatgaggatgagtctcagcttcca

SEQ ID NO: 251879 - DNA, 25 bp, Homo sapien
gcatgtcgcgtgcaggctccttcct

SEQ ID NO: 251880 - DNA, 25 bp, Homo sapien
agggtaagcgcgcaccctggcatgt

SEQ ID NO: 251881 - DNA, 25 bp, Homo sapien
ctaggagaccgctgtgggcttctgt

SEQ ID NO: 251882 - DNA, 25 bp, Homo sapien
taggagaccgctgtgggcttctgtc

SEQ ID NO: 251883 - DNA, 25 bp, Homo sapien
aggagaccgctgtgggcttctgtcc

SEQ ID NO: 251884 - DNA, 25 bp, Homo sapien
gtctccacgctgaccccacacatcc

SEQ ID NO: 251885 - DNA, 25 bp, Homo sapien
gctgaccccacacatccccgcagga

SEQ ID NO: 251886 - DNA, 25 bp, Homo sapien
gcaggactctcgggctccacgctga

SEQ ID NO: 251887 - DNA, 25 bp, Homo sapien
aggactctcgggctccacgctgacc

SEQ ID NO: 251888 - DNA, 25 bp, Homo sapien
acgctgaccccacacatccccgcag

SEQ ID NO: 251889 - DNA, 25 bp, Homo sapien
acatccccgcaggactctcgggctc

SEQ ID NO: 251890 - DNA, 25 bp, Homo sapien
tgaccccacacatccccgcaggact

SEQ ID NO: 251891 - DNA, 25 bp, Homo sapien
cacacatccccgcaggactctcggg

SEQ ID NO: 251892 - DNA, 25 bp, Homo sapien
agacagagcagccaaacaggcccac

SEQ ID NO: 251893 - DNA, 25 bp, Homo sapien
cccaagacagagcagccaaacaggc

SEQ ID NO: 251894 - DNA, 25 bp, Homo sapien
gagcagccaaacaggcccacagcag

SEQ ID NO: 251895 - DNA, 25 bp, Homo sapien
tccccaagacagagcagccaaacag

SEQ ID NO: 251896 - DNA, 25 bp, Homo sapien
acagtccttcatggtaaaggaaact

SEQ ID NO: 251897 - DNA, 25 bp, Homo sapien
gacagtccttcatggtaaaggaaac

SEQ ID NO: 251898 - DNA, 25 bp, Homo sapien
ggacagtccttcatggtaaaggaaa

SEQ ID NO: 251899 - DNA, 25 bp, Homo sapien
cagtccttcatggtaaaggaaactt

SEQ ID NO: 251900 - DNA, 25 bp, Homo sapien
gatgacggcagggacgtcagcaaga

SEQ ID NO: 251901 - DNA, 25 bp, Homo sapien
ttgtccgtcagtggcaacttcaggt

SEQ ID NO: 251902 - DNA, 25 bp, Homo sapien
agagggggtgaaccactggcccaat

SEQ ID NO: 251903 - DNA, 25 bp, Homo sapien
agggacaggccatgtttgtccgtca

SEQ ID NO: 251904 - DNA, 25 bp, Homo sapien
tgctgtttgaaatccccgcggtggc

SEQ ID NO: 251905 - DNA, 25 bp, Homo sapien
tttgctgattgagttggcctgagtc

SEQ ID NO: 251906 - DNA, 25 bp, Homo sapien
caagctgttcgcattaagttctgct

SEQ ID NO: 251907 - DNA, 25 bp, Homo sapien
ggaaattgatttccggcttgccaga

SEQ ID NO: 251908 - DNA, 25 bp, Homo sapien
agcctgtctccaccgtcttggccaa

SEQ ID NO: 251909 - DNA, 25 bp, Homo sapien
tttcctccgagcctgtctccaccgt

SEQ ID NO: 251910 - DNA, 25 bp, Homo sapien
ctgtctccaccgtcttggccaaggg

SEQ ID NO: 251911 - DNA, 25 bp, Homo sapien
tccgagcctgtctccaccgtcttgg

SEQ ID NO: 251912 - DNA, 25 bp, Homo sapien
tgctttactaaatctattcttcccc

SEQ ID NO: 251913 - DNA, 25 bp, Homo sapien
gacccaggctggctactgagctctg

SEQ ID NO: 251914 - DNA, 25 bp, Homo sapien
ggcaggacatacagcccattccatg

SEQ ID NO: 251915 - DNA, 25 bp, Homo sapien
gtaggggggtctggcctgctgcggg

SEQ ID NO: 251916 - DNA, 25 bp, Homo sapien
gcacggctctgcctcaaggccaccc

SEQ ID NO: 251917 - DNA, 25 bp, Homo sapien
ggcacggctctgcctcaaggccacc

SEQ ID NO: 251918 - DNA, 25 bp, Homo sapien
agctgagacctcctacgagtggtac

SEQ ID NO: 251919 - DNA, 25 bp, Homo sapien
tactggggccttcccacgaagaggc

SEQ ID NO: 251920 - DNA, 25 bp, Homo sapien
tggtactggggccttcccacgaaga

SEQ ID NO: 251921 - DNA, 25 bp, Homo sapien
gagacctcctacgagtggtactggg

SEQ ID NO: 251922 - DNA, 25 bp, Homo sapien
cctcggacgaggcaggtatctggat

SEQ ID NO: 251923 - DNA, 25 bp, Homo sapien
ggacactatgcaggctatgcccgca

SEQ ID NO: 251924 - DNA, 25 bp, Homo sapien
tacagagctatgctcaggacgggtg

SEQ ID NO: 251925 - DNA, 25 bp, Homo sapien
ggtctcagctgtcgggcactcagtt

SEQ ID NO: 251926 - DNA, 25 bp, Homo sapien
gaaacacaatcccaatggtaagttc

SEQ ID NO: 251927 - DNA, 25 bp, Homo sapien
tcctggaagcccgtctgatgctgag

SEQ ID NO: 251928 - DNA, 25 bp, Homo sapien
cacacatgcagacgcttggtccggt

SEQ ID NO: 251929 - DNA, 25 bp, Homo sapien
acctgtcaccaggagtctcggcgct

SEQ ID NO: 251930 - DNA, 25 bp, Homo sapien
gtagccgtcgtcctcatcgccatca

SEQ ID NO: 251931 - DNA, 25 bp, Homo sapien
agtagccgtcgtcctcatcgccatc

SEQ ID NO: 251932 - DNA, 25 bp, Homo sapien
tcagtagccgtcgtcctcatcgcca

SEQ ID NO: 251933 - DNA, 25 bp, Homo sapien
gccgtcgtcctcatcgccatcacag

SEQ ID NO: 251934 - DNA, 25 bp, Homo sapien
tggtgtgcagatccgggaacctcgt

SEQ ID NO: 251935 - DNA, 25 bp, Homo sapien
tgcagaagagcacagtcatgaagcc

SEQ ID NO: 251936 - DNA, 25 bp, Homo sapien
gtttgaagctaacaggcccaagttc

SEQ ID NO: 251937 - DNA, 25 bp, Homo sapien
agggccttgctcctcgtcgagggca

SEQ ID NO: 251938 - DNA, 25 bp, Homo sapien
gcgtggtatgacacgggcccgctct

SEQ ID NO: 251939 - DNA, 25 bp, Homo sapien
tctgcagggcactgacgcagggctc

SEQ ID NO: 251940 - DNA, 25 bp, Homo sapien
tcctcgtcggcgtggtatgacacgg

SEQ ID NO: 251941 - DNA, 25 bp, Homo sapien
tcgtcagcctcctcgtcggcgtggt

SEQ ID NO: 251942 - DNA, 25 bp, Homo sapien
tgccctggctgcgtgggacaacaca

SEQ ID NO: 251943 - DNA, 25 bp, Homo sapien
cagtccccaacaagtgacagtccag

SEQ ID NO: 251944 - DNA, 25 bp, Homo sapien
gggcctcgattctctggccatgcca

SEQ ID NO: 251945 - DNA, 25 bp, Homo sapien
tgtgtatctcaacagacccctcaga

SEQ ID NO: 251946 - DNA, 25 bp, Homo sapien
tctttgctggctgcgtagacaccag

SEQ ID NO: 251947 - DNA, 25 bp, Homo sapien
ccttctttgctggctgcgtagacac

SEQ ID NO: 251948 - DNA, 25 bp, Homo sapien
cttctttgctggctgcgtagacacc

SEQ ID NO: 251949 - DNA, 25 bp, Homo sapien
ttctttgctggctgcgtagacacca

SEQ ID NO: 251950 - DNA, 25 bp, Homo sapien
tggaccttagcagaacatctagacg

SEQ ID NO: 251951 - DNA, 25 bp, Homo sapien
ggaccccatgacaggtggaccttag

SEQ ID NO: 251952 - DNA, 25 bp, Homo sapien
tgacgtgtcagatgaaccctcggga

SEQ ID NO: 251953 - DNA, 25 bp, Homo sapien
ttctcaacagcgagcagcactcgac

SEQ ID NO: 251954 - DNA, 25 bp, Homo sapien
tggagaacaagctcccacctggcat

SEQ ID NO: 251955 - DNA, 25 bp, Homo sapien
atgagtgcagaaccgcaagggctcc

SEQ ID NO: 251956 - DNA, 25 bp, Homo sapien
tgaaattcaagccacaaggtcctgc

SEQ ID NO: 251957 - DNA, 25 bp, Homo sapien
tggcagactgtaccttagctagaga

SEQ ID NO: 251958 - DNA, 25 bp, Homo sapien
agctccaggacccgaagccatgggc

SEQ ID NO: 251959 - DNA, 25 bp, Homo sapien
gagacactgtcaaggtgccggagaa

SEQ ID NO: 251960 - DNA, 25 bp, Homo sapien
gtggcaaatgccactccaggcactt

SEQ ID NO: 251961 - DNA, 25 bp, Homo sapien
gcatgcaggtggcaaatgccactcc

SEQ ID NO: 251962 - DNA, 25 bp, Homo sapien
ggcggtactggcctgaattggctcc

SEQ ID NO: 251963 - DNA, 25 bp, Homo sapien
gaggccccggagcacgctataattg

SEQ ID NO: 251964 - DNA, 25 bp, Homo sapien
aattggctcccgtcgcttgcaagac

SEQ ID NO: 251965 - DNA, 25 bp, Homo sapien
gcttcctggcactggcgctatgctc

SEQ ID NO: 251966 - DNA, 25 bp, Homo sapien
aaacaagcaagaatgcctcccgtga

SEQ ID NO: 251967 - DNA, 25 bp, Homo sapien
gcaagaatgcctcccgtgagtcacg

SEQ ID NO: 251968 - DNA, 25 bp, Homo sapien
aagcaagaatgcctcccgtgagtca

SEQ ID NO: 251969 - DNA, 25 bp, Homo sapien
tccccccagaatgtgggccagcctg

SEQ ID NO: 251970 - DNA, 25 bp, Homo sapien
ttccttgtagatgccgagctccttc

SEQ ID NO: 251971 - DNA, 25 bp, Homo sapien
cttgtagatgccgagctccttctct

SEQ ID NO: 251972 - DNA, 25 bp, Homo sapien
cttgtgttccttgtagatgccgagc

SEQ ID NO: 251973 - DNA, 25 bp, Homo sapien
tgttccttgtagatgccgagctcct

SEQ ID NO: 251974 - DNA, 25 bp, Homo sapien
tgttcccgcaggtactcggcgttct

SEQ ID NO: 251975 - DNA, 25 bp, Homo sapien
gggcttccgactcattcaggatgta

SEQ ID NO: 251976 - DNA, 25 bp, Homo sapien
ctctgttcccgcaggtactcggcgt

SEQ ID NO: 251977 - DNA, 25 bp, Homo sapien
agctcggccttcacgcgggcttccg

SEQ ID NO: 251978 - DNA, 25 bp, Homo sapien
tagccttcgcacaccggggcatgct

SEQ ID NO: 251979 - DNA, 25 bp, Homo sapien
gcttttagccttcgcacaccggggc

SEQ ID NO: 251980 - DNA, 25 bp, Homo sapien
cgcacaccggggcatgctaaggtcg

SEQ ID NO: 251981 - DNA, 25 bp, Homo sapien
cacaccggggcatgctaaggtcgcg

SEQ ID NO: 251982 - DNA, 25 bp, Homo sapien
tcttgtgtctagagacccctcgagg

SEQ ID NO: 251983 - DNA, 25 bp, Homo sapien
caccacgtggccatgaaatcaggga

SEQ ID NO: 251984 - DNA, 25 bp, Homo sapien
cctctatttagtgcggagcctgggc

SEQ ID NO: 251985 - DNA, 25 bp, Homo sapien
gctgcccctggtgctatttgtgcga

SEQ ID NO: 251986 - DNA, 25 bp, Homo sapien
atgccactgaggtccagctcaccgt

SEQ ID NO: 251987 - DNA, 25 bp, Homo sapien
ccaggtcatcaatgccactgaggtc

SEQ ID NO: 251988 - DNA, 25 bp, Homo sapien
tcatcaatgccactgaggtccagct

SEQ ID NO: 251989 - DNA, 25 bp, Homo sapien
tccaggtcatcaatgccactgaggt

SEQ ID NO: 251990 - DNA, 25 bp, Homo sapien
tcgccacacaagctggacgcggtgt

SEQ ID NO: 251991 - DNA, 25 bp, Homo sapien
gagctcccggtataagtctttgttc

SEQ ID NO: 251992 - DNA, 25 bp, Homo sapien
ctgagaggagatgcattcgcggatg

SEQ ID NO: 251993 - DNA, 25 bp, Homo sapien
ttcgcggatggagtctgagatgccc

SEQ ID NO: 251994 - DNA, 25 bp, Homo sapien
gcactgcacgcggaagttagctcaa

SEQ ID NO: 251995 - DNA, 25 bp, Homo sapien
ggtcaggtgccaaagaacgagcctc

SEQ ID NO: 251996 - DNA, 25 bp, Homo sapien
taccaagctgccaggtaacccatag

SEQ ID NO: 251997 - DNA, 25 bp, Homo sapien
catagaacggctgtcagtgcacggt

SEQ ID NO: 251998 - DNA, 25 bp, Homo sapien
tacttccagagttcgaccaggctgg

SEQ ID NO: 251999 - DNA, 25 bp, Homo sapien
gtggctcctactaacccccaagtga

SEQ ID NO: 252000 - DNA, 25 bp, Homo sapien
aaccaaatggatcccttctcttggc

SEQ ID NO: 252001 - DNA, 25 bp, Homo sapien
ggctctgccccaaaagtacttccag

SEQ ID NO: 252002 - DNA, 25 bp, Homo sapien
tagttcaatctcaattgcatcctgg

SEQ ID NO: 252003 - DNA, 25 bp, Homo sapien
tcaatctcaattgcatcctggtaac

SEQ ID NO: 252004 - DNA, 25 bp, Homo sapien
caatctcaattgcatcctggtaact

SEQ ID NO: 252005 - DNA, 25 bp, Homo sapien
gttcaatctcaattgcatcctggta

SEQ ID NO: 252006 - DNA, 25 bp, Homo sapien
cagtttttttgacaggacttgttca

SEQ ID NO: 252007 - DNA, 25 bp, Homo sapien
cagcttcctctgcccagctgtgtac

SEQ ID NO: 252008 - DNA, 25 bp, Homo sapien
ctgcttcatccgcagcttcctctgc

SEQ ID NO: 252009 - DNA, 25 bp, Homo sapien
cgcagcttcctctgcccagctgtgt

SEQ ID NO: 252010 - DNA, 25 bp, Homo sapien
tccgcagcttcctctgcccagctgt

SEQ ID NO: 252011 - DNA, 25 bp, Homo sapien
aactcatcaatggtcaactgactgg

SEQ ID NO: 252012 - DNA, 25 bp, Homo sapien
tcatgaactcatcaatggtcaactg

SEQ ID NO: 252013 - DNA, 25 bp, Homo sapien
catcaatggtcaactgactggtggg

SEQ ID NO: 252014 - DNA, 25 bp, Homo sapien
gggggtgtcttcaaattccgtgagc

SEQ ID NO: 252015 - DNA, 25 bp, Homo sapien
cacagcaaaaaggagacggaccagg

SEQ ID NO: 252016 - DNA, 25 bp, Homo sapien
caaagtctatgaaacagggctgcgg

SEQ ID NO: 252017 - DNA, 25 bp, Homo sapien
cggaccaggcttctgacgtcaaaga

SEQ ID NO: 252018 - DNA, 25 bp, Homo sapien
gagaaccccaatcctaggcggaaga

SEQ ID NO: 252019 - DNA, 25 bp, Homo sapien
acgtccaagccatagtgtgaccggg

SEQ ID NO: 252020 - DNA, 25 bp, Homo sapien
atgcctccgcaggatagggccggcc

SEQ ID NO: 252021 - DNA, 25 bp, Homo sapien
cccagaaggactagcagggaactct

SEQ ID NO: 252022 - DNA, 25 bp, Homo sapien
aaaaatacagggatcggaggaggag

SEQ ID NO: 252023 - DNA, 25 bp, Homo sapien
tggactcacacactttgaccacact

SEQ ID NO: 252024 - DNA, 25 bp, Homo sapien
cgtggactcacacactttgaccaca

SEQ ID NO: 252025 - DNA, 25 bp, Homo sapien
gcgtggactcacacactttgaccac

SEQ ID NO: 252026 - DNA, 25 bp, Homo sapien
gtggactcacacactttgaccacac

SEQ ID NO: 252027 - DNA, 25 bp, Homo sapien
cccggtcacggagatgatggcctga

SEQ ID NO: 252028 - DNA, 25 bp, Homo sapien
tgtgccaggcagtgagaccctcact

SEQ ID NO: 252029 - DNA, 25 bp, Homo sapien
aaccagggcaacatctgtggcggcc

SEQ ID NO: 252030 - DNA, 25 bp, Homo sapien
aaggcaacgagacgggcctcgtcaa

SEQ ID NO: 252031 - DNA, 25 bp, Homo sapien
gcctgccgggtagagtggactctgt

SEQ ID NO: 252032 - DNA, 25 bp, Homo sapien
gaggagtgagggccctgccgacctg

SEQ ID NO: 252033 - DNA, 25 bp, Homo sapien
tctgtgggcacgagggtaagggccc

SEQ ID NO: 252034 - DNA, 25 bp, Homo sapien
caattccggagctggggtagttgac

SEQ ID NO: 252035 - DNA, 25 bp, Homo sapien
ggcgccggcctgtgtgcatccagtc

SEQ ID NO: 252036 - DNA, 25 bp, Homo sapien
gtcccgcttcatcctctgtaggagc

SEQ ID NO: 252037 - DNA, 25 bp, Homo sapien
cagtcccgcttcatcctctgtagga

SEQ ID NO: 252038 - DNA, 25 bp, Homo sapien
atccagtcccgcttcatcctctgta

SEQ ID NO: 252039 - DNA, 25 bp, Homo sapien
ccagcaggtgcgcaaagcgtggaat

SEQ ID NO: 252040 - DNA, 25 bp, Homo sapien
tcgtggttcttctccccgaattcca

SEQ ID NO: 252041 - DNA, 25 bp, Homo sapien
aaagcgtggaatatacaggcacggg

SEQ ID NO: 252042 - DNA, 25 bp, Homo sapien
ttctccccgaattccagcaggtgcg

SEQ ID NO: 252043 - DNA, 25 bp, Homo sapien
agaggggcgcacacccagcagcctt

SEQ ID NO: 252044 - DNA, 25 bp, Homo sapien
gctgcagacacgctagggccaggca

SEQ ID NO: 252045 - DNA, 25 bp, Homo sapien
gtgctcctactgcatggccgccctg

SEQ ID NO: 252046 - DNA, 25 bp, Homo sapien
gcctgctgcagacacgctagggcca

SEQ ID NO: 252047 - DNA, 25 bp, Homo sapien
tgcatgaacgcatcaagacacctca

SEQ ID NO: 252048 - DNA, 25 bp, Homo sapien
ttccagctgagggtgtccataacac

SEQ ID NO: 252049 - DNA, 25 bp, Homo sapien
catcgcagctagaaataaagagaac

SEQ ID NO: 252050 - DNA, 25 bp, Homo sapien
gcatccattcatactcacgacgcag

SEQ ID NO: 252051 - DNA, 25 bp, Homo sapien
tggtctcttcaatatgcagcgctgg

SEQ ID NO: 252052 - DNA, 25 bp, Homo sapien
gatgcaagacccaaacacagacttg

SEQ ID NO: 252053 - DNA, 25 bp, Homo sapien
ccttcaacaagggtgacaagaactt

SEQ ID NO: 252054 - DNA, 25 bp, Homo sapien
caccaacagcaagggcaacgaaagt

SEQ ID NO: 252055 - DNA, 25 bp, Homo sapien
tatgaaatcgcagctgtggcctcgg

SEQ ID NO: 252056 - DNA, 25 bp, Homo sapien
ggaactttccggactctcatgcata

SEQ ID NO: 252057 - DNA, 25 bp, Homo sapien
gcatatgctacagctttccaaacgg

SEQ ID NO: 252058 - DNA, 25 bp, Homo sapien
tggcgggtgcatccacacactttct

SEQ ID NO: 252059 - DNA, 25 bp, Homo sapien
taaaagtctaaagcctggcggtcca

SEQ ID NO: 252060 - DNA, 25 bp, Homo sapien
aatgatgatttgtgcactctgggcc

SEQ ID NO: 252061 - DNA, 25 bp, Homo sapien
cacggcctctgaagtctggtctcct

SEQ ID NO: 252062 - DNA, 25 bp, Homo sapien
ccatgacccgagatgctggctgcgt

SEQ ID NO: 252063 - DNA, 25 bp, Homo sapien
ccagaggcagactccggaatgcaaa

SEQ ID NO: 252064 - DNA, 25 bp, Homo sapien
catctgaacgaacgaggaagcccaa

SEQ ID NO: 252065 - DNA, 25 bp, Homo sapien
aaagatcgctaactgaagaacgggc

SEQ ID NO: 252066 - DNA, 25 bp, Homo sapien
aaatgccgggaaatagcagcgcctg

SEQ ID NO: 252067 - DNA, 25 bp, Homo sapien
acgctgcgcgagaggtgagcccgtg

SEQ ID NO: 252068 - DNA, 25 bp, Homo sapien
cggtgctgccgccccacgctgcgcg

SEQ ID NO: 252069 - DNA, 25 bp, Homo sapien
ctggcggtgctgccgccccacgctg

SEQ ID NO: 252070 - DNA, 25 bp, Homo sapien
tggcggtgctgccgccccacgctgc

SEQ ID NO: 252071 - DNA, 25 bp, Homo sapien
cgtccgccgtgtggctgacacgcag

SEQ ID NO: 252072 - DNA, 25 bp, Homo sapien
agccaggctcacggcggcgctttct

SEQ ID NO: 252073 - DNA, 25 bp, Homo sapien
ccagtacgtcttggctgtcggcagc

SEQ ID NO: 252074 - DNA, 25 bp, Homo sapien
cacaaggtgggtagcggcggcccct

SEQ ID NO: 252075 - DNA, 25 bp, Homo sapien
aagatttacggctcaagacaggccc

SEQ ID NO: 252076 - DNA, 25 bp, Homo sapien
gagatcattgtcactcgggaggccc

SEQ ID NO: 252077 - DNA, 25 bp, Homo sapien
ggcgagccctctatctggtccgaat

SEQ ID NO: 252078 - DNA, 25 bp, Homo sapien
aaggcttctgtgagatagaccggca

SEQ ID NO: 252079 - DNA, 25 bp, Homo sapien
gaagaaacgtctttccaagcacgta

SEQ ID NO: 252080 - DNA, 25 bp, Homo sapien
acgtctttccaagcacgtacacatt

SEQ ID NO: 252081 - DNA, 25 bp, Homo sapien
ggccggcgcattgatgcagagctct

SEQ ID NO: 252082 - DNA, 25 bp, Homo sapien
ctatggccggcgcattgatgcagag

SEQ ID NO: 252083 - DNA, 25 bp, Homo sapien
ctagctaacacccaaccgtgcccag

SEQ ID NO: 252084 - DNA, 25 bp, Homo sapien
caggcctagctaacacccaaccgtg

SEQ ID NO: 252085 - DNA, 25 bp, Homo sapien
gccatggagacccacactcccacaa

SEQ ID NO: 252086 - DNA, 25 bp, Homo sapien
acaagtctcggactgtgacccccat

SEQ ID NO: 252087 - DNA, 25 bp, Homo sapien
aggcagcacagaccggccactgaga

SEQ ID NO: 252088 - DNA, 25 bp, Homo sapien
ccactgagatgcgtggaggcacctg

SEQ ID NO: 252089 - DNA, 25 bp, Homo sapien
ccaaaacttcctgactgggcaggca

SEQ ID NO: 252090 - DNA, 25 bp, Homo sapien
tcatcctacagaccaaaacttcctg

SEQ ID NO: 252091 - DNA, 25 bp, Homo sapien
gagcaggtcgctgaggtccaggagc

SEQ ID NO: 252092 - DNA, 25 bp, Homo sapien
ctggagcaggtcgctgaggtccagg

SEQ ID NO: 252093 - DNA, 25 bp, Homo sapien
gcaggtcgctgaggtccaggagcat

SEQ ID NO: 252094 - DNA, 25 bp, Homo sapien
aggtcgctgaggtccaggagcatgt

SEQ ID NO: 252095 - DNA, 25 bp, Homo sapien
aaaactgcagatgggtcctgactca

SEQ ID NO: 252096 - DNA, 25 bp, Homo sapien
tcctgactcagacacactttcctta

SEQ ID NO: 252097 - DNA, 25 bp, Homo sapien
gcctcacatacaaatgctcttactg

SEQ ID NO: 252098 - DNA, 25 bp, Homo sapien
tgctgtgccatcaaactgtcccggc

SEQ ID NO: 252099 - DNA, 25 bp, Homo sapien
gacctgaaatgccaacgtcttcatg

SEQ ID NO: 252100 - DNA, 25 bp, Homo sapien
ctgaacggacggttctgcagcctga

SEQ ID NO: 252101 - DNA, 25 bp, Homo sapien
tataaatgccctgtccttgagaagg

SEQ ID NO: 252102 - DNA, 25 bp, Homo sapien
gaataagctgaatgcacatggcccc

SEQ ID NO: 252103 - DNA, 25 bp, Homo sapien
gcggcgtgccctccgtacggcagac

SEQ ID NO: 252104 - DNA, 25 bp, Homo sapien
aggtgcctgctcacggccatcttga

SEQ ID NO: 252105 - DNA, 25 bp, Homo sapien
aatcacgtgggccatcttccggccg

SEQ ID NO: 252106 - DNA, 25 bp, Homo sapien
aggcaggcagcaatcacgtgggcca

SEQ ID NO: 252107 - DNA, 25 bp, Homo sapien
aagttgaaggcggtgtccaggcagt

SEQ ID NO: 252108 - DNA, 25 bp, Homo sapien
tgactggcagcaaaagggacgactc

SEQ ID NO: 252109 - DNA, 25 bp, Homo sapien
caggtacaaagatcagcatagggtc

SEQ ID NO: 252110 - DNA, 25 bp, Homo sapien
cactcgacagcaaggaggtacggcg

SEQ ID NO: 252111 - DNA, 25 bp, Homo sapien
tattgcaatgcacgcgtctgcaccg

SEQ ID NO: 252112 - DNA, 25 bp, Homo sapien
tcaatcgattttcagcaagggcacc

SEQ ID NO: 252113 - DNA, 25 bp, Homo sapien
gagaaaactgggtctgcacgtgcag

SEQ ID NO: 252114 - DNA, 25 bp, Homo sapien
gtcctgaacagcgtggaacgggcac

SEQ ID NO: 252115 - DNA, 25 bp, Homo sapien
tcactaagccaaactgaggatccag

SEQ ID NO: 252116 - DNA, 25 bp, Homo sapien
cagcagcatccgcggtgggaaatac

SEQ ID NO: 252117 - DNA, 25 bp, Homo sapien
tgcagggtctgcgctctcgactcct

SEQ ID NO: 252118 - DNA, 25 bp, Homo sapien
agattcacgtggaagccgccaccca

SEQ ID NO: 252119 - DNA, 25 bp, Homo sapien
cttccccagattcacgtggaagccg

SEQ ID NO: 252120 - DNA, 25 bp, Homo sapien
tgcgctctcgactccttccccagat

SEQ ID NO: 252121 - DNA, 25 bp, Homo sapien
gctggatgcagtagcatcagacatc

SEQ ID NO: 252122 - DNA, 25 bp, Homo sapien
acacagagcgtgtgcctactggtgg

SEQ ID NO: 252123 - DNA, 25 bp, Homo sapien
gggaggagcactgacaaacagggcc

SEQ ID NO: 252124 - DNA, 25 bp, Homo sapien
aggcgcagacccttcccatgcgcac

SEQ ID NO: 252125 - DNA, 25 bp, Homo sapien
acaagcggctaattcaccccaggtg

SEQ ID NO: 252126 - DNA, 25 bp, Homo sapien
cacggatcaacttctagcaagagag

SEQ ID NO: 252127 - DNA, 25 bp, Homo sapien
gaatgcttcgaacaactctctgggc

SEQ ID NO: 252128 - DNA, 25 bp, Homo sapien
gaagcccaagccagttcttagaaaa

SEQ ID NO: 252129 - DNA, 25 bp, Homo sapien
gcacctcggacacgatgatgttgtc

SEQ ID NO: 252130 - DNA, 25 bp, Homo sapien
tgctctccacgaactgcacctcgga

SEQ ID NO: 252131 - DNA, 25 bp, Homo sapien
tccagggacacgaactggcccacgg

SEQ ID NO: 252132 - DNA, 25 bp, Homo sapien
gcgtccagctcgatgtccgtgccgc

SEQ ID NO: 252133 - DNA, 25 bp, Homo sapien
acgcgaggactggagccgcgacctc

SEQ ID NO: 252134 - DNA, 25 bp, Homo sapien
gattcgcagccgcagattcgccgcg

SEQ ID NO: 252135 - DNA, 25 bp, Homo sapien
cagaggagggtcctcctcggatagt

SEQ ID NO: 252136 - DNA, 25 bp, Homo sapien
cgggcccttggcgatgaacgcagtc

SEQ ID NO: 252137 - DNA, 25 bp, Homo sapien
acactgtcagacctcggcctgggag

SEQ ID NO: 252138 - DNA, 25 bp, Homo sapien
tcctttcgcgttcggcgacactgtc

SEQ ID NO: 252139 - DNA, 25 bp, Homo sapien
tcctcgcgggtacctggttggcgct

SEQ ID NO: 252140 - DNA, 25 bp, Homo sapien
tcggttgtatcctccgtccagcgcg

SEQ ID NO: 252141 - DNA, 25 bp, Homo sapien
tcctcaggtgaccagagtccgtgca

SEQ ID NO: 252142 - DNA, 25 bp, Homo sapien
tgttaatcagagtgaaagccagtcc

SEQ ID NO: 252143 - DNA, 25 bp, Homo sapien
gacagagttaccgtcagagttactg

SEQ ID NO: 252144 - DNA, 25 bp, Homo sapien
tactgtgtgagctagcagttgcact

SEQ ID NO: 252145 - DNA, 25 bp, Homo sapien
cagggatgagacattcggcctggat

SEQ ID NO: 252146 - DNA, 25 bp, Homo sapien
cctggatcggccagatggtctgcaa

SEQ ID NO: 252147 - DNA, 25 bp, Homo sapien
tctggtttgtctggaaaggcatggg

SEQ ID NO: 252148 - DNA, 25 bp, Homo sapien
ttcgtacatattatatcaaccaggg

SEQ ID NO: 252149 - DNA, 25 bp, Homo sapien
gaagccagaaggacgatgctgagcc

SEQ ID NO: 252150 - DNA, 25 bp, Homo sapien
tgctctgcttattaacccgaacgtt

SEQ ID NO: 252151 - DNA, 25 bp, Homo sapien
ccaggagccgaataactgctctgct

SEQ ID NO: 252152 - DNA, 25 bp, Homo sapien
catggatcgcggaaggcgtcctctg

SEQ ID NO: 252153 - DNA, 25 bp, Homo sapien
catttcttacttgtgaccgccctgc

SEQ ID NO: 252154 - DNA, 25 bp, Homo sapien
gaaggtctcccattgaatcctggct

SEQ ID NO: 252155 - DNA, 25 bp, Homo sapien
ggtgggaccctgactgactcgttca

SEQ ID NO: 252156 - DNA, 25 bp, Homo sapien
ggtttcgtaagatggagcactgcaa

SEQ ID NO: 252157 - DNA, 25 bp, Homo sapien
ccacccacgccgcagtgcagaggtg

SEQ ID NO: 252158 - DNA, 25 bp, Homo sapien
acccacgccgcagtgcagaggtgct

SEQ ID NO: 252159 - DNA, 25 bp, Homo sapien
tgccacccacgccgcagtgcagagg

SEQ ID NO: 252160 - DNA, 25 bp, Homo sapien
cacgccgcagtgcagaggtgctatc

SEQ ID NO: 252161 - DNA, 25 bp, Homo sapien
tgcttccggtttgcttggctcttaa

SEQ ID NO: 252162 - DNA, 25 bp, Homo sapien
tccagccacggtgcgattttggtgc

SEQ ID NO: 252163 - DNA, 25 bp, Homo sapien
tgctagattgcaaaccctctgaggg

SEQ ID NO: 252164 - DNA, 25 bp, Homo sapien
cttaccctccaaggcctagagtggc

SEQ ID NO: 252165 - DNA, 25 bp, Homo sapien
tctgagctggcttaagggcaatcca

SEQ ID NO: 252166 - DNA, 25 bp, Homo sapien
tgaatttcagattgcctccctggga

SEQ ID NO: 252167 - DNA, 25 bp, Homo sapien
ggttctcagggtgaagctcgtccat

SEQ ID NO: 252168 - DNA, 25 bp, Homo sapien
catttctgggatggcagcggaagca

SEQ ID NO: 252169 - DNA, 25 bp, Homo sapien
ctgctgaggagacagaggtaggctg

SEQ ID NO: 252170 - DNA, 25 bp, Homo sapien
ggtaggctggggctgtaggacaggg

SEQ ID NO: 252171 - DNA, 25 bp, Homo sapien
taggctggggctgtaggacagggga

SEQ ID NO: 252172 - DNA, 25 bp, Homo sapien
cagaggtaggctggggctgtaggac

SEQ ID NO: 252173 - DNA, 25 bp, Homo sapien
cagctgcctcactgcggaaagagca

SEQ ID NO: 252174 - DNA, 25 bp, Homo sapien
gagctacggcaggactcacctgtgg

SEQ ID NO: 252175 - DNA, 25 bp, Homo sapien
gcgtctgggtcactcactggactct

SEQ ID NO: 252176 - DNA, 25 bp, Homo sapien
tgtgcacaagcacacacgggaaggc

SEQ ID NO: 252177 - DNA, 25 bp, Homo sapien
acctcaagtgatccacctgctttgg

SEQ ID NO: 252178 - DNA, 25 bp, Homo sapien
aagtgattctcccacctcagcctcc

SEQ ID NO: 252179 - DNA, 25 bp, Homo sapien
ccacctccagctctcgggttcaagt

SEQ ID NO: 252180 - DNA, 25 bp, Homo sapien
actgccacctccagctctcgggttc

SEQ ID NO: 252181 - DNA, 25 bp, Homo sapien
gaagccacaagtaaccaacatcagg

SEQ ID NO: 252182 - DNA, 25 bp, Homo sapien
tcaggaacaacagatgggacatcac

SEQ ID NO: 252183 - DNA, 25 bp, Homo sapien
cctactgacacgagaaatgtgtggc

SEQ ID NO: 252184 - DNA, 25 bp, Homo sapien
catacaaagtgccaaaagcctatag

SEQ ID NO: 252185 - DNA, 25 bp, Homo sapien
tgagagtagctatacccttggcaca

SEQ ID NO: 252186 - DNA, 25 bp, Homo sapien
catctacggagatggtcatagggct

SEQ ID NO: 252187 - DNA, 25 bp, Homo sapien
gaaagtcacatcatctgcgtataga

SEQ ID NO: 252188 - DNA, 25 bp, Homo sapien
gctgggacttcctcgatggtcagca

SEQ ID NO: 252189 - DNA, 25 bp, Homo sapien
tggcccagggtggatcctgtctctg

SEQ ID NO: 252190 - DNA, 25 bp, Homo sapien
tcaggcgccaccgttgagttgggca

SEQ ID NO: 252191 - DNA, 25 bp, Homo sapien
ccagagagcctgtatcagtggttta

SEQ ID NO: 252192 - DNA, 25 bp, Homo sapien
gcgttcctatgaactgagagcccag

SEQ ID NO: 252193 - DNA, 25 bp, Homo sapien
catagggcgggcgtgaacaaaagcc

SEQ ID NO: 252194 - DNA, 25 bp, Homo sapien
ccccagaagtgggagcgagtgagat

SEQ ID NO: 252195 - DNA, 25 bp, Homo sapien
cagggtgcagtttgctcgtgggtcc

SEQ ID NO: 252196 - DNA, 25 bp, Homo sapien
tgccctgttctatggaccgggagga

SEQ ID NO: 252197 - DNA, 25 bp, Homo sapien
agccaccgagtctggccttggcagt

SEQ ID NO: 252198 - DNA, 25 bp, Homo sapien
gtgagccaccgagtctggccttggc

SEQ ID NO: 252199 - DNA, 25 bp, Homo sapien
ccaccgagtctggccttggcagtta

SEQ ID NO: 252200 - DNA, 25 bp, Homo sapien
accgagtctggccttggcagttatt

SEQ ID NO: 252201 - DNA, 25 bp, Homo sapien
gccctcgaggtttgtgctcctgcaa

SEQ ID NO: 252202 - DNA, 25 bp, Homo sapien
ccgggcctgcgagagctgttacagt

SEQ ID NO: 252203 - DNA, 25 bp, Homo sapien
agtaagtgtgccctcacagccgtcg

SEQ ID NO: 252204 - DNA, 25 bp, Homo sapien
gcgtcaacaacgtcaaggccggtgt

SEQ ID NO: 252205 - DNA, 25 bp, Homo sapien
tgtaataccattaaggcagcgtcgt

SEQ ID NO: 252206 - DNA, 25 bp, Homo sapien
agggagtatacttcctgagccacgc

SEQ ID NO: 252207 - DNA, 25 bp, Homo sapien
agcatctgaggacacccgagaacct

SEQ ID NO: 252208 - DNA, 25 bp, Homo sapien
gggtttaggtggtgcacacccctgc

SEQ ID NO: 252209 - DNA, 25 bp, Homo sapien
cagcaggcatcttcgagctttttgt

SEQ ID NO: 252210 - DNA, 25 bp, Homo sapien
aaagcggttaaccagcaagttacat

SEQ ID NO: 252211 - DNA, 25 bp, Homo sapien
gcggttaaccagcaagttacataaa

SEQ ID NO: 252212 - DNA, 25 bp, Homo sapien
gtagaaacaggagggagtccttgtc

SEQ ID NO: 252213 - DNA, 25 bp, Homo sapien
gcccctcagtttggtagtgccccac

SEQ ID NO: 252214 - DNA, 25 bp, Homo sapien
cgcccctcagtttggtagtgcccca

SEQ ID NO: 252215 - DNA, 25 bp, Homo sapien
gcccgcccctcagtttggtagtgcc

SEQ ID NO: 252216 - DNA, 25 bp, Homo sapien
cgccgcccgcccctcagtttggtag

SEQ ID NO: 252217 - DNA, 25 bp, Homo sapien
gaagaagcgcggctaacttattccg

SEQ ID NO: 252218 - DNA, 25 bp, Homo sapien
tgtagatgaacttgagctctgtaac

SEQ ID NO: 252219 - DNA, 25 bp, Homo sapien
gaatgccgaggagttgtcgttttta

SEQ ID NO: 252220 - DNA, 25 bp, Homo sapien
agaaacgcgctccttggcggacact

SEQ ID NO: 252221 - DNA, 25 bp, Homo sapien
tacagcggctctcatgatgtgggct

SEQ ID NO: 252222 - DNA, 25 bp, Homo sapien
gtctgcgtgtccgaatccccgtgtg

SEQ ID NO: 252223 - DNA, 25 bp, Homo sapien
tgggcgtcccatgatcccttctgtg

SEQ ID NO: 252224 - DNA, 25 bp, Homo sapien
aggtccagccctaggctacagcggc

SEQ ID NO: 252225 - DNA, 25 bp, Homo sapien
acctggacgctgagggcctgtcgac

SEQ ID NO: 252226 - DNA, 25 bp, Homo sapien
gcagagcccacgtcacatgctcgct

SEQ ID NO: 252227 - DNA, 25 bp, Homo sapien
ccttgaggaggtcgtgacaggctca

SEQ ID NO: 252228 - DNA, 25 bp, Homo sapien
cctcgtgtgggaagcctgccctggc

SEQ ID NO: 252229 - DNA, 25 bp, Homo sapien
aatagcacacctagcatgggcagag

SEQ ID NO: 252230 - DNA, 25 bp, Homo sapien
agaggaggcattcggaatggaacaa

SEQ ID NO: 252231 - DNA, 25 bp, Homo sapien
tctgactgtaagtggtggttacaca

SEQ ID NO: 252232 - DNA, 25 bp, Homo sapien
caataaatagggagattgaggatga

SEQ ID NO: 252233 - DNA, 25 bp, Homo sapien
ggaatctctcggaccgcggatcctc

SEQ ID NO: 252234 - DNA, 25 bp, Homo sapien
gatctgctccttcggtgggggcctc

SEQ ID NO: 252235 - DNA, 25 bp, Homo sapien
cagcccgccccagcgcgtgggtctg

SEQ ID NO: 252236 - DNA, 25 bp, Homo sapien
cctgctgggccgcccgggttggaag

SEQ ID NO: 252237 - DNA, 25 bp, Homo sapien
aaaattagcataccccatcaccagg

SEQ ID NO: 252238 - DNA, 25 bp, Homo sapien
acagcctgattagacccgtggtaca

SEQ ID NO: 252239 - DNA, 25 bp, Homo sapien
gattcccggcatagccaacaagctg

SEQ ID NO: 252240 - DNA, 25 bp, Homo sapien
cgtggtacaacagcggaccagagct

SEQ ID NO: 252241 - DNA, 25 bp, Homo sapien
ggtgctcactggatccagtttctga

SEQ ID NO: 252242 - DNA, 25 bp, Homo sapien
acttcgaaattctttgctctcccca

SEQ ID NO: 252243 - DNA, 25 bp, Homo sapien
catggcacactttaaacttcgaaat

SEQ ID NO: 252244 - DNA, 25 bp, Homo sapien
gcaggcgatggtgctcactggatcc

SEQ ID NO: 252245 - DNA, 25 bp, Homo sapien
ggagttaatgagagtcactcctggg

SEQ ID NO: 252246 - DNA, 25 bp, Homo sapien
taacttctactcacatcctaaaatg

SEQ ID NO: 252247 - DNA, 25 bp, Homo sapien
ctaaaatggacacagggctccctca

SEQ ID NO: 252248 - DNA, 25 bp, Homo sapien
taataggttaggtcaggcgcttccc

SEQ ID NO: 252249 - DNA, 25 bp, Homo sapien
cgagaggccagccacgccgatggaa

SEQ ID NO: 252250 - DNA, 25 bp, Homo sapien
gccagccacgccgatggaagggatg

SEQ ID NO: 252251 - DNA, 25 bp, Homo sapien
ccagccacgccgatggaagggatgt

SEQ ID NO: 252252 - DNA, 25 bp, Homo sapien
ggtcgagaggccagccacgccgatg

SEQ ID NO: 252253 - DNA, 25 bp, Homo sapien
ctggacggaagctggcaggagagct

SEQ ID NO: 252254 - DNA, 25 bp, Homo sapien
caggagagcttggccgggctgcggg

SEQ ID NO: 252255 - DNA, 25 bp, Homo sapien
agctggcaggagagcttggccgggc

SEQ ID NO: 252256 - DNA, 25 bp, Homo sapien
gacggaagctggcaggagagcttgg

SEQ ID NO: 252257 - DNA, 25 bp, Homo sapien
gctccggaagtgaacgctgggaggc

SEQ ID NO: 252258 - DNA, 25 bp, Homo sapien
cagcgccggggtcaacgtgtgcgta

SEQ ID NO: 252259 - DNA, 25 bp, Homo sapien
ctgctccggaagtgaacgctgggag

SEQ ID NO: 252260 - DNA, 25 bp, Homo sapien
gggtcaacgtgtgcgtaggaagcag

SEQ ID NO: 252261 - DNA, 25 bp, Homo sapien
cggcagccacgctggcacgccctcc

SEQ ID NO: 252262 - DNA, 25 bp, Homo sapien
gcgcaagcccggctccacattcggc

SEQ ID NO: 252263 - DNA, 25 bp, Homo sapien
tctcccccgcgaattccagctcttc

SEQ ID NO: 252264 - DNA, 25 bp, Homo sapien
gcggcgcaagcccggctccacattc

SEQ ID NO: 252265 - DNA, 25 bp, Homo sapien
tggatgtgaaggtggaacagaggcc

SEQ ID NO: 252266 - DNA, 25 bp, Homo sapien
ctgcggctgcagagactggatgtga

SEQ ID NO: 252267 - DNA, 25 bp, Homo sapien
ctgcgttggggagcaccgcagcagg

SEQ ID NO: 252268 - DNA, 25 bp, Homo sapien
ggaacagaggcccgagcgcatgtac

SEQ ID NO: 252269 - DNA, 25 bp, Homo sapien
gccacaactgccatggtgaagtaac

SEQ ID NO: 252270 - DNA, 25 bp, Homo sapien
gctgttgcgcgccaaaccgccaggg

SEQ ID NO: 252271 - DNA, 25 bp, Homo sapien
ttgttccggctgttgcgcgccaaac

SEQ ID NO: 252272 - DNA, 25 bp, Homo sapien
tgccatggtgaagtaaccgacacct

SEQ ID NO: 252273 - DNA, 25 bp, Homo sapien
aacttctggccgctcaccttgcgga

SEQ ID NO: 252274 - DNA, 25 bp, Homo sapien
ttgcgtcgcccccacggctaggcca

SEQ ID NO: 252275 - DNA, 25 bp, Homo sapien
ccaggagctgtggccgttgccttgc

SEQ ID NO: 252276 - DNA, 25 bp, Homo sapien
tcacgccatcctaggggtacctgtg

SEQ ID NO: 252277 - DNA, 25 bp, Homo sapien
catgctggcagctccgggaggtggg

SEQ ID NO: 252278 - DNA, 25 bp, Homo sapien
cgctgggcgctggacacggagatgg

SEQ ID NO: 252279 - DNA, 25 bp, Homo sapien
ccagaggcccgcgtgtgaaacgtcc

SEQ ID NO: 252280 - DNA, 25 bp, Homo sapien
cgctggacacggagatgggtgcttg

SEQ ID NO: 252281 - DNA, 25 bp, Homo sapien
cgcgtgtgaaacgtccgagtgcgct

SEQ ID NO: 252282 - DNA, 25 bp, Homo sapien
ggtccacgcggtgctgacacgagct

SEQ ID NO: 252283 - DNA, 25 bp, Homo sapien
cacgcggtgctgacacgagctggcc

SEQ ID NO: 252284 - DNA, 25 bp, Homo sapien
tccacgcggtgctgacacgagctgg

SEQ ID NO: 252285 - DNA, 25 bp, Homo sapien
cgcggtgctgacacgagctggccct

SEQ ID NO: 252286 - DNA, 25 bp, Homo sapien
caagctggtgaggaaagtgggtcct

SEQ ID NO: 252287 - DNA, 25 bp, Homo sapien
ctggtgaggaaagtgggtcctgcca

SEQ ID NO: 252288 - DNA, 25 bp, Homo sapien
ctaggggcaagctggtgaggaaagt

SEQ ID NO: 252289 - DNA, 25 bp, Homo sapien
gggcaagctggtgaggaaagtgggt

SEQ ID NO: 252290 - DNA, 25 bp, Homo sapien
ggccctggaacgtgaccagtgtggg

SEQ ID NO: 252291 - DNA, 25 bp, Homo sapien
gtctaggttatgaggaatagggatc

SEQ ID NO: 252292 - DNA, 25 bp, Homo sapien
agggctgtctaggttatgaggaata

SEQ ID NO: 252293 - DNA, 25 bp, Homo sapien
ggcgttctccagtctaaagccacca

SEQ ID NO: 252294 - DNA, 25 bp, Homo sapien
ggactttgaagcaggcgttctccag

SEQ ID NO: 252295 - DNA, 25 bp, Homo sapien
gggccactttattgcacctggaagc

SEQ ID NO: 252296 - DNA, 25 bp, Homo sapien
catagctggcttctccaagaggttc

SEQ ID NO: 252297 - DNA, 25 bp, Homo sapien
agttctggcaagcatagctggcttc

SEQ ID NO: 252298 - DNA, 25 bp, Homo sapien
agggctgagttctggcaagcatagc

SEQ ID NO: 252299 - DNA, 25 bp, Homo sapien
ttctccaagaggttcctccacactt

SEQ ID NO: 252300 - DNA, 25 bp, Homo sapien
atgggccccggacgctggtcacggt

SEQ ID NO: 252301 - DNA, 25 bp, Homo sapien
gctggtcacggtcagtgctgtgcta

SEQ ID NO: 252302 - DNA, 25 bp, Homo sapien
gggtctcctgcggcaagtccagcac

SEQ ID NO: 252303 - DNA, 25 bp, Homo sapien
cacggtcagtgctgtgctatagaac

SEQ ID NO: 252304 - DNA, 25 bp, Homo sapien
attcaggggtggggacaggcgggcg

SEQ ID NO: 252305 - DNA, 25 bp, Homo sapien
tggagtttattcaggggtggggaca

SEQ ID NO: 252306 - DNA, 25 bp, Homo sapien
tattcaggggtggggacaggcgggc

SEQ ID NO: 252307 - DNA, 25 bp, Homo sapien
gcatggagtttattcaggggtgggg

SEQ ID NO: 252308 - DNA, 25 bp, Homo sapien
agtagcaggtgccatccgcctccgc

SEQ ID NO: 252309 - DNA, 25 bp, Homo sapien
agcaggtgccatccgcctccgccat

SEQ ID NO: 252310 - DNA, 25 bp, Homo sapien
gtagcaggtgccatccgcctccgcc

SEQ ID NO: 252311 - DNA, 25 bp, Homo sapien
tcagtagcaggtgccatccgcctcc

SEQ ID NO: 252312 - DNA, 25 bp, Homo sapien
cagacacattgatgtgggtgggttt

SEQ ID NO: 252313 - DNA, 25 bp, Homo sapien
gacacattgatgtgggtgggtttac

SEQ ID NO: 252314 - DNA, 25 bp, Homo sapien
acaacagacacattgatgtgggtgg

SEQ ID NO: 252315 - DNA, 25 bp, Homo sapien
caacagacacattgatgtgggtggg

SEQ ID NO: 252316 - DNA, 25 bp, Homo sapien
gctgccacgcgcagtatgctggtta

SEQ ID NO: 252317 - DNA, 25 bp, Homo sapien
tgccacgcgcagtatgctggttaca

SEQ ID NO: 252318 - DNA, 25 bp, Homo sapien
gccacgcgcagtatgctggttacag

SEQ ID NO: 252319 - DNA, 25 bp, Homo sapien
cacgcgcagtatgctggttacagcg

SEQ ID NO: 252320 - DNA, 25 bp, Homo sapien
gggtcttcaactcggggtgggcagc

SEQ ID NO: 252321 - DNA, 25 bp, Homo sapien
gtgatgttggcggttagtggggtct

SEQ ID NO: 252322 - DNA, 25 bp, Homo sapien
tgttggcggttagtggggtcttcaa

SEQ ID NO: 252323 - DNA, 25 bp, Homo sapien
tcttcaactcggggtgggcagcagt

SEQ ID NO: 252324 - DNA, 25 bp, Homo sapien
tgaacagcgctcttcccacttgagg

SEQ ID NO: 252325 - DNA, 25 bp, Homo sapien
gaggcatctctcaggccggtcagtg

SEQ ID NO: 252326 - DNA, 25 bp, Homo sapien
gcaggacactggacacgctgtagca

SEQ ID NO: 252327 - DNA, 25 bp, Homo sapien
cagtgtgcacgtgaggttcgcttct

SEQ ID NO: 252328 - DNA, 25 bp, Homo sapien
tcgagggccggtcggtgcagcgaca

SEQ ID NO: 252329 - DNA, 25 bp, Homo sapien
ctcgagggccggtcggtgcagcgac

SEQ ID NO: 252330 - DNA, 25 bp, Homo sapien
gagggccggtcggtgcagcgacagt

SEQ ID NO: 252331 - DNA, 25 bp, Homo sapien
agggccggtcggtgcagcgacagtc

SEQ ID NO: 252332 - DNA, 25 bp, Homo sapien
acgtggcatgtcacggacttgccgt

SEQ ID NO: 252333 - DNA, 25 bp, Homo sapien
cgtggcatgtcacggacttgccgtc

SEQ ID NO: 252334 - DNA, 25 bp, Homo sapien
gtggcatgtcacggacttgccgtct

SEQ ID NO: 252335 - DNA, 25 bp, Homo sapien
gcgacgaccacgttcccatcttggg

SEQ ID NO: 252336 - DNA, 25 bp, Homo sapien
atcttggggggtgctgtcgaggctc

SEQ ID NO: 252337 - DNA, 25 bp, Homo sapien
tcttggggggtgctgtcgaggctca

SEQ ID NO: 252338 - DNA, 25 bp, Homo sapien
catgcgacgaccacgttcccatctt

SEQ ID NO: 252339 - DNA, 25 bp, Homo sapien
tccaggacagggcctgttacccagg

SEQ ID NO: 252340 - DNA, 25 bp, Homo sapien
ccaggacagggcctgttacccaggg

SEQ ID NO: 252341 - DNA, 25 bp, Homo sapien
tgctccgccgcgctggctgtgtcca

SEQ ID NO: 252342 - DNA, 25 bp, Homo sapien
cttgatggccgtctgtccttagcag

SEQ ID NO: 252343 - DNA, 25 bp, Homo sapien
cctgctccgccgcgctggctgtgtc

SEQ ID NO: 252344 - DNA, 25 bp, Homo sapien
ttgatggccgtctgtccttagcaga

SEQ ID NO: 252345 - DNA, 25 bp, Homo sapien
gaaatccttgacaatccagggcgcc

SEQ ID NO: 252346 - DNA, 25 bp, Homo sapien
tcgaaatccttgacaatccagggcg

SEQ ID NO: 252347 - DNA, 25 bp, Homo sapien
ctcgaaatccttgacaatccagggc

SEQ ID NO: 252348 - DNA, 25 bp, Homo sapien
aatccttgacaatccagggcgccct

SEQ ID NO: 252349 - DNA, 25 bp, Homo sapien
aaatccttgacaatccagggtgccc

SEQ ID NO: 252350 - DNA, 25 bp, Homo sapien
aaatccttgacaatccagggcgccc

SEQ ID NO: 252351 - DNA, 25 bp, Homo sapien
gaaatccttgacaatccagggtgcc

SEQ ID NO: 252352 - DNA, 25 bp, Homo sapien
gaaatccttgacaatccagggcgcc

SEQ ID NO: 252353 - DNA, 25 bp, Homo sapien
aaatccttgacaatccagggctccc

SEQ ID NO: 252354 - DNA, 25 bp, Homo sapien
aaatccttgacaatccagggtgccc

SEQ ID NO: 252355 - DNA, 25 bp, Homo sapien
tccttgacaatccagggtgccctca

SEQ ID NO: 252356 - DNA, 25 bp, Homo sapien
tcgaaatccttgacaatccagggct

SEQ ID NO: 252357 - DNA, 25 bp, Homo sapien
tcgaaatccttgacaatccagggcg

SEQ ID NO: 252358 - DNA, 25 bp, Homo sapien
ctcgaaatccttgacaatccagggc

SEQ ID NO: 252359 - DNA, 25 bp, Homo sapien
gaaatccttgacaatccagggcgcc

SEQ ID NO: 252360 - DNA, 25 bp, Homo sapien
aatccttgacaatccagggcgccct

SEQ ID NO: 252361 - DNA, 25 bp, Homo sapien
tcgaaatccttgacaatccagggcg

SEQ ID NO: 252362 - DNA, 25 bp, Homo sapien
tcgaaatccttgacaatccagggct

SEQ ID NO: 252363 - DNA, 25 bp, Homo sapien
tcgaaatccttgacaatccagggcg

SEQ ID NO: 252364 - DNA, 25 bp, Homo sapien
gaaatccttgacaatccagggtgcc

SEQ ID NO: 252365 - DNA, 25 bp, Homo sapien
gaaatccttgacaatccagggcgcc

SEQ ID NO: 252366 - DNA, 25 bp, Homo sapien
gacaatccagggtgccctcacctcg

SEQ ID NO: 252367 - DNA, 25 bp, Homo sapien
cttgacaatccagggtgccctcacc

SEQ ID NO: 252368 - DNA, 25 bp, Homo sapien
atccagggtgccctcacctcgaaat

SEQ ID NO: 252369 - DNA, 25 bp, Homo sapien
aatccagggtgccctcacctcgaaa

SEQ ID NO: 252370 - DNA, 25 bp, Homo sapien
tgttgtttggacccagtcggcctca

SEQ ID NO: 252371 - DNA, 25 bp, Homo sapien
gttgtttggacccagtcggcctcag

SEQ ID NO: 252372 - DNA, 25 bp, Homo sapien
gactccatgtgacgtggctctcctg

SEQ ID NO: 252373 - DNA, 25 bp, Homo sapien
ggcaggcttgcttcattccgctttg

SEQ ID NO: 252374 - DNA, 25 bp, Homo sapien
cactgtgagaggactctcctgcatt

SEQ ID NO: 252375 - DNA, 25 bp, Homo sapien
caggtgccgctgtcagactgaggca

SEQ ID NO: 252376 - DNA, 25 bp, Homo sapien
tctttatattatcggccactgggtt

SEQ ID NO: 252377 - DNA, 25 bp, Homo sapien
gactggtgtgggtcaagcccacctg

SEQ ID NO: 252378 - DNA, 25 bp, Homo sapien
aatgatttacgtgccctcagtcagg

SEQ ID NO: 252379 - DNA, 25 bp, Homo sapien
tcttcttagtgatctctgagtgctc

SEQ ID NO: 252380 - DNA, 25 bp, Homo sapien
cattcttggggcctcctgtgctgac

SEQ ID NO: 252381 - DNA, 25 bp, Homo sapien
agctgcattcttggggcctcctgtg

SEQ ID NO: 252382 - DNA, 25 bp, Homo sapien
cttggtgactgtgcagctgcattct

SEQ ID NO: 252383 - DNA, 25 bp, Homo sapien
gactgtgcagctgcattcttggggc

SEQ ID NO: 252384 - DNA, 25 bp, Homo sapien
aaaggggtcgatgttgattgttgct

SEQ ID NO: 252385 - DNA, 25 bp, Homo sapien
gggtcgatgttgattgttgctttga

SEQ ID NO: 252386 - DNA, 25 bp, Homo sapien
aggggtcgatgttgattgttgcttt

SEQ ID NO: 252387 - DNA, 25 bp, Homo sapien
acaaaggggtcgatgttgattgttg

SEQ ID NO: 252388 - DNA, 25 bp, Homo sapien
gggcccgaagccctcaactgtcctg

SEQ ID NO: 252389 - DNA, 25 bp, Homo sapien
accagcagaccaggtatgacagggc

SEQ ID NO: 252390 - DNA, 25 bp, Homo sapien
agaccagcagaccaggtatgacagg

SEQ ID NO: 252391 - DNA, 25 bp, Homo sapien
ggcccgaagccctcaactgtcctgt

SEQ ID NO: 252392 - DNA, 25 bp, Homo sapien
tggaggacgttggtgtagtcgaggg

SEQ ID NO: 252393 - DNA, 25 bp, Homo sapien
ttggtgtagtcgagggaggtctggg

SEQ ID NO: 252394 - DNA, 25 bp, Homo sapien
cccctgccgcgtggctgagaggaac

SEQ ID NO: 252395 - DNA, 25 bp, Homo sapien
ctcccctgccgcgtggctgagagga

SEQ ID NO: 252396 - DNA, 25 bp, Homo sapien
tgatggcggcgctgtagctcacgct

SEQ ID NO: 252397 - DNA, 25 bp, Homo sapien
gcctcctccacgcacacgtccagct

SEQ ID NO: 252398 - DNA, 25 bp, Homo sapien
caggaagagtgcggcgaagatgcag

SEQ ID NO: 252399 - DNA, 25 bp, Homo sapien
cgctgtagctcacgctgagcaggaa

SEQ ID NO: 252400 - DNA, 25 bp, Homo sapien
cagagcaccctatccggggccctct

SEQ ID NO: 252401 - DNA, 25 bp, Homo sapien
gtggcagagcaccctatccggggcc

SEQ ID NO: 252402 - DNA, 25 bp, Homo sapien
agtggcagagcaccctatccggggc

SEQ ID NO: 252403 - DNA, 25 bp, Homo sapien
ggcagagcaccctatccggggccct

SEQ ID NO: 252404 - DNA, 25 bp, Homo sapien
atccagcggcccaggtatggctcag

SEQ ID NO: 252405 - DNA, 25 bp, Homo sapien
actggaggacaccacgtgagggcct

SEQ ID NO: 252406 - DNA, 25 bp, Homo sapien
ctgtgaggggcacgtagcctgctct

SEQ ID NO: 252407 - DNA, 25 bp, Homo sapien
cacgcatccatcctgtgtttggctg

SEQ ID NO: 252408 - DNA, 25 bp, Homo sapien
gccctgcccgctcccaagaatgggt

SEQ ID NO: 252409 - DNA, 25 bp, Homo sapien
cctgcccgctcccaagaatgggtgt

SEQ ID NO: 252410 - DNA, 25 bp, Homo sapien
tgcccgctcccaagaatgggtgtac

SEQ ID NO: 252411 - DNA, 25 bp, Homo sapien
ctgcccgctcccaagaatgggtgta

SEQ ID NO: 252412 - DNA, 25 bp, Homo sapien
cattgcaacagtggacagaaggtct

SEQ ID NO: 252413 - DNA, 25 bp, Homo sapien
ggacagaaggtctggccagtcctcc

SEQ ID NO: 252414 - DNA, 25 bp, Homo sapien
cctggggtcattgcaacagtggaca

SEQ ID NO: 252415 - DNA, 25 bp, Homo sapien
tattgggggtagcttcctggggtca

SEQ ID NO: 252416 - DNA, 25 bp, Homo sapien
agggaggcaggagtacgtcatttac

SEQ ID NO: 252417 - DNA, 25 bp, Homo sapien
gagggaggcaggagtacgtcattta

SEQ ID NO: 252418 - DNA, 25 bp, Homo sapien
gactgcacggcagatgaactcatct

SEQ ID NO: 252419 - DNA, 25 bp, Homo sapien
cgggatttacagacaccgctcgctg

SEQ ID NO: 252420 - DNA, 25 bp, Homo sapien
caccgctcgctggacggtctgtgag

SEQ ID NO: 252421 - DNA, 25 bp, Homo sapien
tggactgcacggcagatgaactcat

SEQ ID NO: 252422 - DNA, 25 bp, Homo sapien
gagatgtcctcaggcatgaagttct

SEQ ID NO: 252423 - DNA, 25 bp, Homo sapien
ggctgcgtcgtgctgtgccgggcgt

SEQ ID NO: 252424 - DNA, 25 bp, Homo sapien
cgtcgcaaacgcatagacttccggg

SEQ ID NO: 252425 - DNA, 25 bp, Homo sapien
cactgcaccgagatgtcctcaggca

SEQ ID NO: 252426 - DNA, 25 bp, Homo sapien
cttggtcgtggaccgcatgagggcc

SEQ ID NO: 252427 - DNA, 25 bp, Homo sapien
ggtcttggtcgtggaccgcatgagg

SEQ ID NO: 252428 - DNA, 25 bp, Homo sapien
ctggtcttggtcgtggaccgcatga

SEQ ID NO: 252429 - DNA, 25 bp, Homo sapien
cgctggtcttggtcgtggaccgcat

SEQ ID NO: 252430 - DNA, 25 bp, Homo sapien
gcgctcacccctctcgggttggaat

SEQ ID NO: 252431 - DNA, 25 bp, Homo sapien
ccaggtgatgttgatagtccctggg

SEQ ID NO: 252432 - DNA, 25 bp, Homo sapien
tagaggcggtggacaagtccacgtc

SEQ ID NO: 252433 - DNA, 25 bp, Homo sapien
ggtgtaggtgcggtctgacagccag

SEQ ID NO: 252434 - DNA, 25 bp, Homo sapien
gtcgcaggacgactgtaagatcttc

SEQ ID NO: 252435 - DNA, 25 bp, Homo sapien
tgtcgacccagtctgtggacgatgg

SEQ ID NO: 252436 - DNA, 25 bp, Homo sapien
tagttgtcccgttgagggagcctgt

SEQ ID NO: 252437 - DNA, 25 bp, Homo sapien
tggctggtaaggtcatagttgtccc

SEQ ID NO: 252438 - DNA, 25 bp, Homo sapien
acccgagacggtcagcaagctgatg

SEQ ID NO: 252439 - DNA, 25 bp, Homo sapien
ctgtggatggtgtggcccgtccggc

SEQ ID NO: 252440 - DNA, 25 bp, Homo sapien
cagatgatcagtaaccgtggttgtt

SEQ ID NO: 252441 - DNA, 25 bp, Homo sapien
tccctgtcgggttcctggacagctc

SEQ ID NO: 252442 - DNA, 25 bp, Homo sapien
cagctcccagatgatcagtaaccgt

SEQ ID NO: 252443 - DNA, 25 bp, Homo sapien
tgttcttgggaagtcgattgagcaa

SEQ ID NO: 252444 - DNA, 25 bp, Homo sapien
ttgggaagtcgattgagcaacagcg

SEQ ID NO: 252445 - DNA, 25 bp, Homo sapien
tgaggctccttcactaccgatgcac

SEQ ID NO: 252446 - DNA, 25 bp, Homo sapien
ctctgttcttgggaagtcgattgag

SEQ ID NO: 252447 - DNA, 25 bp, Homo sapien
cttggtggtcccagtcagcaaactt

SEQ ID NO: 252448 - DNA, 25 bp, Homo sapien
ctcttgacgcatgcgtggcttggtg

SEQ ID NO: 252449 - DNA, 25 bp, Homo sapien
ctaggtcccggactctcactcttga

SEQ ID NO: 252450 - DNA, 25 bp, Homo sapien
tggtggtcccagtcagcaaacttgg

SEQ ID NO: 252451 - DNA, 25 bp, Homo sapien
tgttggccaaggcgagctccatgcc

SEQ ID NO: 252452 - DNA, 25 bp, Homo sapien
cctgttggccaaggcgagctccatg

SEQ ID NO: 252453 - DNA, 25 bp, Homo sapien
ctgttggccaaggcgagctccatgc

SEQ ID NO: 252454 - DNA, 25 bp, Homo sapien
ccaaggcgagctccatgccatgtgg

SEQ ID NO: 252455 - DNA, 25 bp, Homo sapien
caacctgctcagatcgttccattct

SEQ ID NO: 252456 - DNA, 25 bp, Homo sapien
aacctgctcagatcgttccattctc

SEQ ID NO: 252457 - DNA, 25 bp, Homo sapien
aggtcaacctgctcagatcgttcca

SEQ ID NO: 252458 - DNA, 25 bp, Homo sapien
gtcaacctgctcagatcgttccatt

SEQ ID NO: 252459 - DNA, 25 bp, Homo sapien
ctgaccctctggaggatgctcggtc

SEQ ID NO: 252460 - DNA, 25 bp, Homo sapien
ctctggaggatgctcggtcccaggt

SEQ ID NO: 252461 - DNA, 25 bp, Homo sapien
ccctctggaggatgctcggtcccag

SEQ ID NO: 252462 - DNA, 25 bp, Homo sapien
gaccctctggaggatgctcggtccc

SEQ ID NO: 252463 - DNA, 25 bp, Homo sapien
cctgagagttaaagggctgggcttc

SEQ ID NO: 252464 - DNA, 25 bp, Homo sapien
gcagcagcgtgtcctgagagttaaa

SEQ ID NO: 252465 - DNA, 25 bp, Homo sapien
ccagtggcgagccttcccacggcat

SEQ ID NO: 252466 - DNA, 25 bp, Homo sapien
ggcttcagcacccagttcaggccag

SEQ ID NO: 252467 - DNA, 25 bp, Homo sapien
ccaaagctgaaatggtgacacctcc

SEQ ID NO: 252468 - DNA, 25 bp, Homo sapien
ctgcgtgacagtcacggaacggtgt

SEQ ID NO: 252469 - DNA, 25 bp, Homo sapien
aagccaaagctgaaatggtgacacc

SEQ ID NO: 252470 - DNA, 25 bp, Homo sapien
ttctgcgtgacagtcacggaacggt

SEQ ID NO: 252471 - DNA, 25 bp, Homo sapien
gtggcttccctaccttggcgactga

SEQ ID NO: 252472 - DNA, 25 bp, Homo sapien
tccaccactgaggagaagatccact

SEQ ID NO: 252473 - DNA, 25 bp, Homo sapien
tagtcggggacgatggtctgcttca

SEQ ID NO: 252474 - DNA, 25 bp, Homo sapien
caggtccaccactgaggagaagatc

SEQ ID NO: 252475 - DNA, 25 bp, Homo sapien
tcatgttcctgtagtcggggacgat

SEQ ID NO: 252476 - DNA, 25 bp, Homo sapien
aagatggtgatggtcgtccacagcc

SEQ ID NO: 252477 - DNA, 25 bp, Homo sapien
cgcttagcaggaagagtgtgatgaa

SEQ ID NO: 252478 - DNA, 25 bp, Homo sapien
cactgtagcacacgcttagcaggaa

SEQ ID NO: 252479 - DNA, 25 bp, Homo sapien
atggtgatggtcgtccacagcccgt

SEQ ID NO: 252480 - DNA, 25 bp, Homo sapien
ctgcgcctccgcacagctctcctcc

SEQ ID NO: 252481 - DNA, 25 bp, Homo sapien
tgcgcctccgcacagctctcctcca

SEQ ID NO: 252482 - DNA, 25 bp, Homo sapien
tacacggggtacgtgccaagcatcc

SEQ ID NO: 252483 - DNA, 25 bp, Homo sapien
gtacgtgccaagcatcctcgcgcga

SEQ ID NO: 252484 - DNA, 25 bp, Homo sapien
gaagtatgtacacggggtacgtgcc

SEQ ID NO: 252485 - DNA, 25 bp, Homo sapien
atcctcgcgcgaccccgagagcccg

SEQ ID NO: 252486 - DNA, 25 bp, Homo sapien
tcatgcatcacggagcatgagaaga

SEQ ID NO: 252487 - DNA, 25 bp, Homo sapien
ctcttctgtgtgtagtggttgtgca

SEQ ID NO: 252488 - DNA, 25 bp, Homo sapien
cctcatgcatcacggagcatgagaa

SEQ ID NO: 252489 - DNA, 25 bp, Homo sapien
catgcatcacggagcatgagaagac

SEQ ID NO: 252490 - DNA, 25 bp, Homo sapien
tgctcttgtccacggtgagcctgct

SEQ ID NO: 252491 - DNA, 25 bp, Homo sapien
ctttgaccaggcaggtcaggctgac

SEQ ID NO: 252492 - DNA, 25 bp, Homo sapien
ggcagggtgtacacctgtggctctc

SEQ ID NO: 252493 - DNA, 25 bp, Homo sapien
agggtgtacacctgtggctctcggg

SEQ ID NO: 252494 - DNA, 25 bp, Homo sapien
tcaggctgacctggttcttggtcat

SEQ ID NO: 252495 - DNA, 25 bp, Homo sapien
tccttgccgttcagccagtcctggt

SEQ ID NO: 252496 - DNA, 25 bp, Homo sapien
cccgcggctttgtcttggcattatg

SEQ ID NO: 252497 - DNA, 25 bp, Homo sapien
acgtgctgttgaactgctcctcccg

SEQ ID NO: 252498 - DNA, 25 bp, Homo sapien
acggtgaggacgctgaccacacggt

SEQ ID NO: 252499 - DNA, 25 bp, Homo sapien
catgatgggcatgggggaccatatt

SEQ ID NO: 252500 - DNA, 25 bp, Homo sapien
gggcatgggggaccatatttggact

SEQ ID NO: 252501 - DNA, 25 bp, Homo sapien
tgggcatgggggaccatatttggac

SEQ ID NO: 252502 - DNA, 25 bp, Homo sapien
gggcatgatgggcatgggggaccat

SEQ ID NO: 252503 - DNA, 25 bp, Homo sapien
gatctacgttgcaggtgtaggtctt

SEQ ID NO: 252504 - DNA, 25 bp, Homo sapien
ggcgcagaggcccctcggttcttgt

SEQ ID NO: 252505 - DNA, 25 bp, Homo sapien
cagggcgcagaggcccctcggttct

SEQ ID NO: 252506 - DNA, 25 bp, Homo sapien
aggtggtgccatgtgaccgcggtgt

SEQ ID NO: 252507 - DNA, 25 bp, Homo sapien
ggtgccatgtgaccgcggtgtggga

SEQ ID NO: 252508 - DNA, 25 bp, Homo sapien
tgagttccaggagccgccccctgtt

SEQ ID NO: 252509 - DNA, 25 bp, Homo sapien
cttctgatgctctcccctgtttcct

SEQ ID NO: 252510 - DNA, 25 bp, Homo sapien
tctcccctgtttcctgagttccagg

SEQ ID NO: 252511 - DNA, 25 bp, Homo sapien
gtttcctgagttccaggagccgccc

SEQ ID NO: 252512 - DNA, 25 bp, Homo sapien
cccctcccctctcctgtttgcctgt

SEQ ID NO: 252513 - DNA, 25 bp, Homo sapien
ccctctcctgtttgcctgtggctgc

SEQ ID NO: 252514 - DNA, 25 bp, Homo sapien
tgccctggtcccctgagttccagga

SEQ ID NO: 252515 - DNA, 25 bp, Homo sapien
ctggtcccctgagctccaagagctg

SEQ ID NO: 252516 - DNA, 25 bp, Homo sapien
cggggcagcaatgtcactcaggcca

SEQ ID NO: 252517 - DNA, 25 bp, Homo sapien
ctcaacccggggcagcaatgtcact

SEQ ID NO: 252518 - DNA, 25 bp, Homo sapien
agctcccggatcctcccgtccctgc

SEQ ID NO: 252519 - DNA, 25 bp, Homo sapien
ccttgcctatgtgcccctcctggat

SEQ ID NO: 252520 - DNA, 25 bp, Homo sapien
agcctggactgagctcatcagggac

SEQ ID NO: 252521 - DNA, 25 bp, Homo sapien
gagcctggactgagctcatcaggga

SEQ ID NO: 252522 - DNA, 25 bp, Homo sapien
ggagcctggactgagctcatcaggg

SEQ ID NO: 252523 - DNA, 25 bp, Homo sapien
gaggtagcgggggacgagatgcagc

SEQ ID NO: 252524 - DNA, 25 bp, Homo sapien
cgggggacgagatgcagccagaggg

SEQ ID NO: 252525 - DNA, 25 bp, Homo sapien
gagctgggcaaggacggatgtggag

SEQ ID NO: 252526 - DNA, 25 bp, Homo sapien
ggagctgggcaaggacggatgtgga

SEQ ID NO: 252527 - DNA, 25 bp, Homo sapien
cctccagtggcgagccttcccacgg

SEQ ID NO: 252528 - DNA, 25 bp, Homo sapien
ccagtggcgagccttcccacggcat

SEQ ID NO: 252529 - DNA, 25 bp, Homo sapien
aaacatcaaagacaattaatgagct

SEQ ID NO: 252530 - DNA, 25 bp, Homo sapien
gaagaagaaaagctaccaaagctga

SEQ ID NO: 252531 - DNA, 25 bp, Homo sapien
gcactgagactgttcccaggagcca

SEQ ID NO: 252532 - DNA, 25 bp, Homo sapien
tctgcggattctgcgtgacagtcac

SEQ ID NO: 252533 - DNA, 25 bp, Homo sapien
catgtcaggagttcacgggagtgcc

SEQ ID NO: 252534 - DNA, 25 bp, Homo sapien
agttccacccgagaatccagcagtg

SEQ ID NO: 252535 - DNA, 25 bp, Homo sapien
gagcatggcccacggctcctgtgtg

SEQ ID NO: 252536 - DNA, 25 bp, Homo sapien
tgagcatggcccacggctcctgtgt

SEQ ID NO: 252537 - DNA, 25 bp, Homo sapien
tggctgagcatggcccacggctcct

SEQ ID NO: 252538 - DNA, 25 bp, Homo sapien
gctgagcatggcccacggctcctgt

SEQ ID NO: 252539 - DNA, 25 bp, Homo sapien
tccaccactgaggagaagatccact

SEQ ID NO: 252540 - DNA, 25 bp, Homo sapien
gatcatgttcctgtagtcggggacg

SEQ ID NO: 252541 - DNA, 25 bp, Homo sapien
tagtcggggacgatggtctgcttca

SEQ ID NO: 252542 - DNA, 25 bp, Homo sapien
caggtccaccactgaggagaagatc

SEQ ID NO: 252543 - DNA, 25 bp, Homo sapien
catgggggacaatgtcaaggacagc

SEQ ID NO: 252544 - DNA, 25 bp, Homo sapien
tagcacacgcttagcaggaagagtg

SEQ ID NO: 252545 - DNA, 25 bp, Homo sapien
cgtcctgcgcctccgcacagctctc

SEQ ID NO: 252546 - DNA, 25 bp, Homo sapien
cactgtagcacacgcttagcaggaa

SEQ ID NO: 252547 - DNA, 25 bp, Homo sapien
cgcttagcaggaagagtgtgatgaa

SEQ ID NO: 252548 - DNA, 25 bp, Homo sapien
ccagggcagcgctgggtgctttatt

SEQ ID NO: 252549 - DNA, 25 bp, Homo sapien
catgctgggtgcccgggaagtatgt

SEQ ID NO: 252550 - DNA, 25 bp, Homo sapien
atcctcgcgcgaccccgagagcctg

SEQ ID NO: 252551 - DNA, 25 bp, Homo sapien
tatgtagacggggtacgtgccaagc

SEQ ID NO: 252552 - DNA, 25 bp, Homo sapien
gagcgggggcttgccggccgtggca

SEQ ID NO: 252553 - DNA, 25 bp, Homo sapien
catgcatcacggagcatgagaagac

SEQ ID NO: 252554 - DNA, 25 bp, Homo sapien
ctcttctgtgtgtagtggttgtgca

SEQ ID NO: 252555 - DNA, 25 bp, Homo sapien
cctcatgcatcacggagcatgagaa

SEQ ID NO: 252556 - DNA, 25 bp, Homo sapien
catcacggagcatgagaagacgttc

SEQ ID NO: 252557 - DNA, 25 bp, Homo sapien
tcttgtagttgttctccggctgccc

SEQ ID NO: 252558 - DNA, 25 bp, Homo sapien
tgtagttgttctccggctgcccatt

SEQ ID NO: 252559 - DNA, 25 bp, Homo sapien
ttggtcatctcctcccgggatgggg

SEQ ID NO: 252560 - DNA, 25 bp, Homo sapien
agaaggagccgtcggagtccagcat

SEQ ID NO: 252561 - DNA, 25 bp, Homo sapien
ggccgagccggcctctgtccatgtg

SEQ ID NO: 252562 - DNA, 25 bp, Homo sapien
tccttgccgttcagccagtcctggt

SEQ ID NO: 252563 - DNA, 25 bp, Homo sapien
acgtgctgttgaactgctcctcccg

SEQ ID NO: 252564 - DNA, 25 bp, Homo sapien
ggacgctgaccacacggaacgtgct

SEQ ID NO: 252565 - DNA, 25 bp, Homo sapien
acgccgtccacgtaccagttgaact

SEQ ID NO: 252566 - DNA, 25 bp, Homo sapien
gggtccgggagatcatgagggtgtc

SEQ ID NO: 252567 - DNA, 25 bp, Homo sapien
tccgggagatcatgagggtgtcctt

SEQ ID NO: 252568 - DNA, 25 bp, Homo sapien
aagaggaagactgacggtcctgcca

SEQ ID NO: 252569 - DNA, 25 bp, Homo sapien
aagactgacggtcctgccacaggtg

SEQ ID NO: 252570 - DNA, 25 bp, Homo sapien
ggcacggtgggcactcgacacaaca

SEQ ID NO: 252571 - DNA, 25 bp, Homo sapien
gggcactcgacacaacatttgcgct

SEQ ID NO: 252572 - DNA, 25 bp, Homo sapien
cacggtgggcactcgacacaacatt

SEQ ID NO: 252573 - DNA, 25 bp, Homo sapien
ggtgggcactcgacacaacatttgc

SEQ ID NO: 252574 - DNA, 25 bp, Homo sapien
tgctggagggcacggtcaccacgct

SEQ ID NO: 252575 - DNA, 25 bp, Homo sapien
tgagttccacgacaccgtcaccggt

SEQ ID NO: 252576 - DNA, 25 bp, Homo sapien
tgggcttgtgatctacgttgcaggt

SEQ ID NO: 252577 - DNA, 25 bp, Homo sapien
tcaccacgctgctgagggagtagag

SEQ ID NO: 252578 - DNA, 25 bp, Homo sapien
ggcgccagggggaagaccgatgggc

SEQ ID NO: 252579 - DNA, 25 bp, Homo sapien
cagggccgctgtgctctcggaggtg

SEQ ID NO: 252580 - DNA, 25 bp, Homo sapien
agcccagggccgctgtgctctcgga

SEQ ID NO: 252581 - DNA, 25 bp, Homo sapien
ccgctgtgctctcggaggtgctcct

SEQ ID NO: 252582 - DNA, 25 bp, Homo sapien
ggcgcagaggcccctcggttcttgt

SEQ ID NO: 252583 - DNA, 25 bp, Homo sapien
cagggcgcagaggcccctcggttct

SEQ ID NO: 252584 - DNA, 25 bp, Homo sapien
aggtggtgccatgtgaccgcggtgt

SEQ ID NO: 252585 - DNA, 25 bp, Homo sapien
ggtgccatgtgaccgcggtgtggga

SEQ ID NO: 252586 - DNA, 25 bp, Homo sapien
ccagtgtctgggctcacgggcattg

SEQ ID NO: 252587 - DNA, 25 bp, Homo sapien
ggtccagtgtctgggctcacgggca

SEQ ID NO: 252588 - DNA, 25 bp, Homo sapien
tccagtgtctgggctcacgggcatt

SEQ ID NO: 252589 - DNA, 25 bp, Homo sapien
gtccagtgtctgggctcacgggcat

SEQ ID NO: 252590 - DNA, 25 bp, Homo sapien
ccagaaagcttgcaggaccggtggc

SEQ ID NO: 252591 - DNA, 25 bp, Homo sapien
tccgctagtgagtgggcctgacttg

SEQ ID NO: 252592 - DNA, 25 bp, Homo sapien
cactccagccttttatgggtgcctg

SEQ ID NO: 252593 - DNA, 25 bp, Homo sapien
agacactgcatagggtcggcgccct

SEQ ID NO: 252594 - DNA, 25 bp, Homo sapien
gccaactgctcagtgggatgggctc

SEQ ID NO: 252595 - DNA, 25 bp, Homo sapien
ccctggtcccgagttccaggggctg

SEQ ID NO: 252596 - DNA, 25 bp, Homo sapien
cctggtcccgagttccaggggctgc

SEQ ID NO: 252597 - DNA, 25 bp, Homo sapien
tctgccctggtcccgagttccaggg

SEQ ID NO: 252598 - DNA, 25 bp, Homo sapien
ctgccctggtcccgagttccagggg

SEQ ID NO: 252599 - DNA, 25 bp, Homo sapien
tcctccctcgttctactgcctcctc

SEQ ID NO: 252600 - DNA, 25 bp, Homo sapien
cctcgttctactgcctcctcagctc

SEQ ID NO: 252601 - DNA, 25 bp, Homo sapien
ccctcgttctactgcctcctcagct

SEQ ID NO: 252602 - DNA, 25 bp, Homo sapien
ctccctcgttctactgcctcctcag

SEQ ID NO: 252603 - DNA, 25 bp, Homo sapien
tttggcgcggtacatgtgggcagac

SEQ ID NO: 252604 - DNA, 25 bp, Homo sapien
ttgcccacgccgtcagctgctattt

SEQ ID NO: 252605 - DNA, 25 bp, Homo sapien
ccacgccgtcagctgctatttgtct

SEQ ID NO: 252606 - DNA, 25 bp, Homo sapien
taggaaatcacagctcggccctcag

SEQ ID NO: 252607 - DNA, 25 bp, Homo sapien
acaggaagtgtccagcgtggaaaag

SEQ ID NO: 252608 - DNA, 25 bp, Homo sapien
aacgggaagcgtccagaatgggcac

SEQ ID NO: 252609 - DNA, 25 bp, Homo sapien
cgggaagcgtccagaatgggcactt

SEQ ID NO: 252610 - DNA, 25 bp, Homo sapien
tgtccagcgcggaacaggaagtgtc

SEQ ID NO: 252611 - DNA, 25 bp, Homo sapien
tgacctccggaagaactagtcttag

SEQ ID NO: 252612 - DNA, 25 bp, Homo sapien
tcaacgcctccctgatggctaggaa

SEQ ID NO: 252613 - DNA, 25 bp, Homo sapien
cgtaatccagatgaacagttgcaag

SEQ ID NO: 252614 - DNA, 25 bp, Homo sapien
ctttgttcagaaccgggacgtgtgg

SEQ ID NO: 252615 - DNA, 25 bp, Homo sapien
tctcgggttgtcaggaccctgcacc

SEQ ID NO: 252616 - DNA, 25 bp, Homo sapien
tttaaacttgccacgatctcccagg

SEQ ID NO: 252617 - DNA, 25 bp, Homo sapien
tacagtgtgaagtctcatcagtctc

SEQ ID NO: 252618 - DNA, 25 bp, Homo sapien
tgatgatctcgtgagtgtctgccct

SEQ ID NO: 252619 - DNA, 25 bp, Homo sapien
tccctcagttagtccctgtgacagc

SEQ ID NO: 252620 - DNA, 25 bp, Homo sapien
aactctgttaccagctatatccgtg

SEQ ID NO: 252621 - DNA, 25 bp, Homo sapien
tatatccgtgctgtggctgccgtaa

SEQ ID NO: 252622 - DNA, 25 bp, Homo sapien
taccccaggcttgtattttggaggc

SEQ ID NO: 252623 - DNA, 25 bp, Homo sapien
aaacatcaaagacaattaatgaact

SEQ ID NO: 252624 - DNA, 25 bp, Homo sapien
cctgctttcgcaagaacacgggcac

SEQ ID NO: 252625 - DNA, 25 bp, Homo sapien
tctgcggattctgcgtgacagtcac

SEQ ID NO: 252626 - DNA, 25 bp, Homo sapien
catgtcaggagttcacgggagtgcc

SEQ ID NO: 252627 - DNA, 25 bp, Homo sapien
agttccacccgagaatccagcagtg

SEQ ID NO: 252628 - DNA, 25 bp, Homo sapien
tctgggcggccctggacaccccgca

SEQ ID NO: 252629 - DNA, 25 bp, Homo sapien
cggccctggacaccccgcagagggt

SEQ ID NO: 252630 - DNA, 25 bp, Homo sapien
cctggacaccccgcagagggtggcc

SEQ ID NO: 252631 - DNA, 25 bp, Homo sapien
gtctgggcggccctggacaccccgc

SEQ ID NO: 252632 - DNA, 25 bp, Homo sapien
catgttcctgtagtcggggacgatg

SEQ ID NO: 252633 - DNA, 25 bp, Homo sapien
gatcatgttcctgtagtcggggacg

SEQ ID NO: 252634 - DNA, 25 bp, Homo sapien
ccgatcatgttcctgtagtcgggga

SEQ ID NO: 252635 - DNA, 25 bp, Homo sapien
tagtcggggacgatggtctgcttca

SEQ ID NO: 252636 - DNA, 25 bp, Homo sapien
tgaagaaggtgacggtggcactgta

SEQ ID NO: 252637 - DNA, 25 bp, Homo sapien
aggtgacggtggcactgtagcacac

SEQ ID NO: 252638 - DNA, 25 bp, Homo sapien
cttgaagaaggtgacggtggcactg

SEQ ID NO: 252639 - DNA, 25 bp, Homo sapien
agaaggtgacggtggcactgtagca

SEQ ID NO: 252640 - DNA, 25 bp, Homo sapien
cgtcctgcgcctccgcacagctctc

SEQ ID NO: 252641 - DNA, 25 bp, Homo sapien
aagatggtgatggtcgtccacagcc

SEQ ID NO: 252642 - DNA, 25 bp, Homo sapien
tgatggtcgtccacagcccgtccag

SEQ ID NO: 252643 - DNA, 25 bp, Homo sapien
tggtgatggtcgtccacagcccgtc

SEQ ID NO: 252644 - DNA, 25 bp, Homo sapien
tagacggggtacgtgccaagcatcc

SEQ ID NO: 252645 - DNA, 25 bp, Homo sapien
gacggggtacgtgccaagcatcctc

SEQ ID NO: 252646 - DNA, 25 bp, Homo sapien
agtatgtagacggggtacgtgccaa

SEQ ID NO: 252647 - DNA, 25 bp, Homo sapien
tatgtagacggggtacgtgccaagc

SEQ ID NO: 252648 - DNA, 25 bp, Homo sapien
ggagaggctcttctgcgtgtagtgg

SEQ ID NO: 252649 - DNA, 25 bp, Homo sapien
acagggagaggctcttctgcgtgta

SEQ ID NO: 252650 - DNA, 25 bp, Homo sapien
ggctcttctgcgtgtagtggttctg

SEQ ID NO: 252651 - DNA, 25 bp, Homo sapien
agaggctcttctgcgtgtagtggtt

SEQ ID NO: 252652 - DNA, 25 bp, Homo sapien
catgcatcacggagcatgagaagac

SEQ ID NO: 252653 - DNA, 25 bp, Homo sapien
cctcatgcatcacggagcatgagaa

SEQ ID NO: 252654 - DNA, 25 bp, Homo sapien
catcacggagcatgagaagacgttc

SEQ ID NO: 252655 - DNA, 25 bp, Homo sapien
tgcatcacggagcatgagaagacgt

SEQ ID NO: 252656 - DNA, 25 bp, Homo sapien
tccagcatgggaggcgtggtcttgt

SEQ ID NO: 252657 - DNA, 25 bp, Homo sapien
tccacggtgagcttgctatagagga

SEQ ID NO: 252658 - DNA, 25 bp, Homo sapien
gaggaagaaggagccgttggagtcc

SEQ ID NO: 252659 - DNA, 25 bp, Homo sapien
tgctcttgtccacggtgagcttgct

SEQ ID NO: 252660 - DNA, 25 bp, Homo sapien
ctggggtagaagcctttgaccaggc

SEQ ID NO: 252661 - DNA, 25 bp, Homo sapien
gggtagaagcctttgaccaggcagg

SEQ ID NO: 252662 - DNA, 25 bp, Homo sapien
tagaagcctttgaccaggcaggtca

SEQ ID NO: 252663 - DNA, 25 bp, Homo sapien
gtcgctggggtagaagcctttgacc

SEQ ID NO: 252664 - DNA, 25 bp, Homo sapien
tacacctgtggttctcggggctgcc

SEQ ID NO: 252665 - DNA, 25 bp, Homo sapien
tgtacacctgtggttctcggggctg

SEQ ID NO: 252666 - DNA, 25 bp, Homo sapien
gtgacctggttcttggtcatcttct

SEQ ID NO: 252667 - DNA, 25 bp, Homo sapien
gttcttggtcatcttctgggatggg

SEQ ID NO: 252668 - DNA, 25 bp, Homo sapien
ttttggagatggttttctcgatggg

SEQ ID NO: 252669 - DNA, 25 bp, Homo sapien
cgccgtccacgtaccagttgaactt

SEQ ID NO: 252670 - DNA, 25 bp, Homo sapien
gtcttcgtggctcacgtccaccacc

SEQ ID NO: 252671 - DNA, 25 bp, Homo sapien
cggctttgtcttggcattatgcacc

SEQ ID NO: 252672 - DNA, 25 bp, Homo sapien
agaggaagactgacggtccccccag

SEQ ID NO: 252673 - DNA, 25 bp, Homo sapien
tcccgccttgagctggagggcgagg

SEQ ID NO: 252674 - DNA, 25 bp, Homo sapien
ggagggcgaggcctgggctggctta

SEQ ID NO: 252675 - DNA, 25 bp, Homo sapien
gagggcgaggcctgggctggcttac

SEQ ID NO: 252676 - DNA, 25 bp, Homo sapien
ctgtcccgccttgagctggagggcg

SEQ ID NO: 252677 - DNA, 25 bp, Homo sapien
gttgtgtcacaacatggggttttgg

SEQ ID NO: 252678 - DNA, 25 bp, Homo sapien
ggtgggcatgtgtgagttgtgtcac

SEQ ID NO: 252679 - DNA, 25 bp, Homo sapien
gtgtcacaacatggggttttgggct

SEQ ID NO: 252680 - DNA, 25 bp, Homo sapien
tgtgtgagttgtgtcacaacatggg

SEQ ID NO: 252681 - DNA, 25 bp, Homo sapien
ttgtccaccttggtgttgctgggct

SEQ ID NO: 252682 - DNA, 25 bp, Homo sapien
cttgtccaccttggtgttgctgggc

SEQ ID NO: 252683 - DNA, 25 bp, Homo sapien
caactgtcttgtccaccttggtgtt

SEQ ID NO: 252684 - DNA, 25 bp, Homo sapien
ctgtcttgtccaccttggtgttgct

SEQ ID NO: 252685 - DNA, 25 bp, Homo sapien
tgccctcagagacgctcctggagga

SEQ ID NO: 252686 - DNA, 25 bp, Homo sapien
ccctcagagacgctcctggaggagg

SEQ ID NO: 252687 - DNA, 25 bp, Homo sapien
cctcagagacgctcctggaggaggg

SEQ ID NO: 252688 - DNA, 25 bp, Homo sapien
gccctcagagacgctcctggaggag

SEQ ID NO: 252689 - DNA, 25 bp, Homo sapien
agtgtctgggctcacgggcattgag

SEQ ID NO: 252690 - DNA, 25 bp, Homo sapien
cagtgtctgggctcacgggcattga

SEQ ID NO: 252691 - DNA, 25 bp, Homo sapien
gtgtctgggctcacgggcattgagt

SEQ ID NO: 252692 - DNA, 25 bp, Homo sapien
tgtctgggctcacgggcattgagtg

SEQ ID NO: 252693 - DNA, 25 bp, Homo sapien
tcttctctgttaaagtgacagtttt

SEQ ID NO: 252694 - DNA, 25 bp, Homo sapien
cagttcatgtgaaactagaatttgg

SEQ ID NO: 252695 - DNA, 25 bp, Homo sapien
gtcttctctgttaaagtgacagttt

SEQ ID NO: 252696 - DNA, 25 bp, Homo sapien
attaacagttcatgtgaaactagaa

SEQ ID NO: 252697 - DNA, 25 bp, Homo sapien
tccattttggggaagcaaaacagtg

SEQ ID NO: 252698 - DNA, 25 bp, Homo sapien
ttttgaacccactcttcctgcctag

SEQ ID NO: 252699 - DNA, 25 bp, Homo sapien
tggagacgagtgtagcaccgtcccc

SEQ ID NO: 252700 - DNA, 25 bp, Homo sapien
gaagcaaaacagtggagacgagtgt

SEQ ID NO: 252701 - DNA, 25 bp, Homo sapien
ctccagggacattgaaagtgtcctt

SEQ ID NO: 252702 - DNA, 25 bp, Homo sapien
ggacattgaaagtgtcctttgtacc

SEQ ID NO: 252703 - DNA, 25 bp, Homo sapien
tccagggacattgaaagtgtccttt

SEQ ID NO: 252704 - DNA, 25 bp, Homo sapien
cagggacattgaaagtgtcctttgt

SEQ ID NO: 252705 - DNA, 25 bp, Homo sapien
ctgtaggaaattggggggctgggag

SEQ ID NO: 252706 - DNA, 25 bp, Homo sapien
gactcccaacccattaaatggtaca

SEQ ID NO: 252707 - DNA, 25 bp, Homo sapien
ccaccccaccaaatataggaagaga

SEQ ID NO: 252708 - DNA, 25 bp, Homo sapien
aaaggataagctgtctgagagaaag

SEQ ID NO: 252709 - DNA, 25 bp, Homo sapien
gagacctggagtactggctggaggg

SEQ ID NO: 252710 - DNA, 25 bp, Homo sapien
gggcaggccgaggaatgaagaaaga

SEQ ID NO: 252711 - DNA, 25 bp, Homo sapien
acgggcaggccgaggaatgaagaaa

SEQ ID NO: 252712 - DNA, 25 bp, Homo sapien
ctaaaatggacacagggctccctca

SEQ ID NO: 252713 - DNA, 25 bp, Homo sapien
atcctaaaatggacacagggctccc

SEQ ID NO: 252714 - DNA, 25 bp, Homo sapien
taataggttaggtcaggcgcttccc

SEQ ID NO: 252715 - DNA, 25 bp, Homo sapien
ttctccttgagagagcacggatgga

SEQ ID NO: 252716 - DNA, 25 bp, Homo sapien
ggagttaatgagagtcactcctggg

SEQ ID NO: 252717 - DNA, 25 bp, Homo sapien
cgtcctgaccaccctaataggttag

SEQ ID NO: 252718 - DNA, 25 bp, Homo sapien
cgagaggccagccacgccgatggaa

SEQ ID NO: 252719 - DNA, 25 bp, Homo sapien
gccagccacgccgatggaagggatg

SEQ ID NO: 252720 - DNA, 25 bp, Homo sapien
ccagccacgccgatggaagggatgt

SEQ ID NO: 252721 - DNA, 25 bp, Homo sapien
ggtcgagaggccagccacgccgatg

SEQ ID NO: 252722 - DNA, 25 bp, Homo sapien
ctggacggaagctggcaggagagct

SEQ ID NO: 252723 - DNA, 25 bp, Homo sapien
caggagagcttggccgggctgcggg

SEQ ID NO: 252724 - DNA, 25 bp, Homo sapien
gacggaagctggcaggagagcttgg

SEQ ID NO: 252725 - DNA, 25 bp, Homo sapien
agctggcaggagagcttggccgggc

SEQ ID NO: 252726 - DNA, 25 bp, Homo sapien
gctccggaagtgaacgctgggaggc

SEQ ID NO: 252727 - DNA, 25 bp, Homo sapien
ctgctccggaagtgaacgctgggag

SEQ ID NO: 252728 - DNA, 25 bp, Homo sapien
cagcgccggggtcaacgtgtgcgta

SEQ ID NO: 252729 - DNA, 25 bp, Homo sapien
gggtcaacgtgtgcgtaggaagcag

SEQ ID NO: 252730 - DNA, 25 bp, Homo sapien
cggcccttctgcggctgggagatct

SEQ ID NO: 252731 - DNA, 25 bp, Homo sapien
ggaagccgcgtggccgcccgcctgc

SEQ ID NO: 252732 - DNA, 25 bp, Homo sapien
ctggaagccgcgtggccgcccgcct

SEQ ID NO: 252733 - DNA, 25 bp, Homo sapien
gaagccgcgtggccgcccgcctgcc

SEQ ID NO: 252734 - DNA, 25 bp, Homo sapien
tggaagccgcgtggccgcccgcctg

SEQ ID NO: 252735 - DNA, 25 bp, Homo sapien
aaagggcggcgcaagcccggctcca

SEQ ID NO: 252736 - DNA, 25 bp, Homo sapien
tcaggctcggccttggcggtttctg

SEQ ID NO: 252737 - DNA, 25 bp, Homo sapien
cattcggctcttccagtttcgggtt

SEQ ID NO: 252738 - DNA, 25 bp, Homo sapien
gcggtttctggcacgaaccctctct

SEQ ID NO: 252739 - DNA, 25 bp, Homo sapien
gagggaagccggcttcctcagcctc

SEQ ID NO: 252740 - DNA, 25 bp, Homo sapien
cttggactgcaggagctgcgttggg

SEQ ID NO: 252741 - DNA, 25 bp, Homo sapien
ctgcagagggaagccggcttcctca

SEQ ID NO: 252742 - DNA, 25 bp, Homo sapien
cctcccaggggcttggactgcagga

SEQ ID NO: 252743 - DNA, 25 bp, Homo sapien
tacttgttccggctgttgcgcgcca

SEQ ID NO: 252744 - DNA, 25 bp, Homo sapien
gctgttgcgcgccaaaccgccaggg

SEQ ID NO: 252745 - DNA, 25 bp, Homo sapien
ttgttccggctgttgcgcgccaaac

SEQ ID NO: 252746 - DNA, 25 bp, Homo sapien
catgtacttgttccggctgttgcgc

SEQ ID NO: 252747 - DNA, 25 bp, Homo sapien
cacaactgccatggtgaagtaaccg

SEQ ID NO: 252748 - DNA, 25 bp, Homo sapien
tgccatggtgaagtaaccgacacct

SEQ ID NO: 252749 - DNA, 25 bp, Homo sapien
caactgccatggtgaagtaaccgac

SEQ ID NO: 252750 - DNA, 25 bp, Homo sapien
gccacaactgccatggtgaagtaac

SEQ ID NO: 252751 - DNA, 25 bp, Homo sapien
cctgcgacctcaggataggacacaa

SEQ ID NO: 252752 - DNA, 25 bp, Homo sapien
tcaggataggacacaaacttgtaga

SEQ ID NO: 252753 - DNA, 25 bp, Homo sapien
gcgggcagtcctcactcagtggagc

SEQ ID NO: 252754 - DNA, 25 bp, Homo sapien
gtggagcaccctgcgacctcaggat

SEQ ID NO: 252755 - DNA, 25 bp, Homo sapien
agcatcggatgctgccggcagaagt

SEQ ID NO: 252756 - DNA, 25 bp, Homo sapien
agcatcccgtgggtccattcgcgac

SEQ ID NO: 252757 - DNA, 25 bp, Homo sapien
ctgattctgagcacacggaggcctt

SEQ ID NO: 252758 - DNA, 25 bp, Homo sapien
tccattcgcgaccatagtgaagacc

SEQ ID NO: 252759 - DNA, 25 bp, Homo sapien
cgctgggcgctggacacggagatgg

SEQ ID NO: 252760 - DNA, 25 bp, Homo sapien
ccagaggcccgcgtgtgaaacgtcc

SEQ ID NO: 252761 - DNA, 25 bp, Homo sapien
cgcgtgtgaaacgtccgagtgcgct

SEQ ID NO: 252762 - DNA, 25 bp, Homo sapien
cgctggacacggagatgggtgcttg

SEQ ID NO: 252763 - DNA, 25 bp, Homo sapien
ggtccacgcggtgctgacacgagct

SEQ ID NO: 252764 - DNA, 25 bp, Homo sapien
cacgcggtgctgacacgagctggcc

SEQ ID NO: 252765 - DNA, 25 bp, Homo sapien
tccacgcggtgctgacacgagctgg

SEQ ID NO: 252766 - DNA, 25 bp, Homo sapien
cgcggtgctgacacgagctggccct

SEQ ID NO: 252767 - DNA, 25 bp, Homo sapien
ccacactggtcacgttccagggccc

SEQ ID NO: 252768 - DNA, 25 bp, Homo sapien
acactggtcacgttccagggcccct

SEQ ID NO: 252769 - DNA, 25 bp, Homo sapien
agcttgcccctaggtgggacccaca

SEQ ID NO: 252770 - DNA, 25 bp, Homo sapien
ccagcttgcccctaggtgggaccca

SEQ ID NO: 252771 - DNA, 25 bp, Homo sapien
cctcaccagcttgcccctaggtggg

SEQ ID NO: 252772 - DNA, 25 bp, Homo sapien
ttgcccctaggtgggacccacagga

SEQ ID NO: 252773 - DNA, 25 bp, Homo sapien
ggccctggaacgtgaccagtgtggg

SEQ ID NO: 252774 - DNA, 25 bp, Homo sapien
tgggtatggatgtgacagtgactta

SEQ ID NO: 252775 - DNA, 25 bp, Homo sapien
ccgatgttccgggtcctgtgtggat

SEQ ID NO: 252776 - DNA, 25 bp, Homo sapien
tgaatgttgtataatagtcgtggtg

SEQ ID NO: 252777 - DNA, 25 bp, Homo sapien
gcaggctgaggtctccccatttgct

SEQ ID NO: 252778 - DNA, 25 bp, Homo sapien
aaatagggcccaacgatcaggatca

SEQ ID NO: 252779 - DNA, 25 bp, Homo sapien
tcagtgatcaggaacagggatccgc

SEQ ID NO: 252780 - DNA, 25 bp, Homo sapien
tcagcaatcgggaacaagggtcagt

SEQ ID NO: 252781 - DNA, 25 bp, Homo sapien
gaacagaggtcagtggtcaggatca

SEQ ID NO: 252782 - DNA, 25 bp, Homo sapien
ggatctaataatcaggaccagagct

SEQ ID NO: 252783 - DNA, 25 bp, Homo sapien
tcagggccagggttcattgatcagg

SEQ ID NO: 252784 - DNA, 25 bp, Homo sapien
cagtgcccagtgactagcatcagga

SEQ ID NO: 252785 - DNA, 25 bp, Homo sapien
gttcagtgattaggatcagggccca

SEQ ID NO: 252786 - DNA, 25 bp, Homo sapien
agggctgtctaggttatgaggaaca

SEQ ID NO: 252787 - DNA, 25 bp, Homo sapien
cagtgatcaggactaaggctcagtg

SEQ ID NO: 252788 - DNA, 25 bp, Homo sapien
ggactcagtgatcaggactaaggct

SEQ ID NO: 252789 - DNA, 25 bp, Homo sapien
gtctaggttatgaggaacagggatc

SEQ ID NO: 252790 - DNA, 25 bp, Homo sapien
ggccactttattgcacctggaaggc

SEQ ID NO: 252791 - DNA, 25 bp, Homo sapien
gccactttattgcacctggaaggca

SEQ ID NO: 252792 - DNA, 25 bp, Homo sapien
gggccactttattgcacctggaagg

SEQ ID NO: 252793 - DNA, 25 bp, Homo sapien
atgggccccggacgctggtcacggt

SEQ ID NO: 252794 - DNA, 25 bp, Homo sapien
gctggtcacggtcagtgctgtgcta

SEQ ID NO: 252795 - DNA, 25 bp, Homo sapien
gggtctcctgcggcaagtccagcac

SEQ ID NO: 252796 - DNA, 25 bp, Homo sapien
cacggtcagtgctgtgctatagaac

SEQ ID NO: 252797 - DNA, 25 bp, Homo sapien
tcaggggtggggacaggcgggcggc

SEQ ID NO: 252798 - DNA, 25 bp, Homo sapien
gtgccgtccacctccgccatgacaa

SEQ ID NO: 252799 - DNA, 25 bp, Homo sapien
gacacattgacatgggtgggtttac

SEQ ID NO: 252800 - DNA, 25 bp, Homo sapien
tcagtagcaggtgccgtccacctcc

SEQ ID NO: 252801 - DNA, 25 bp, Homo sapien
ccgccatgacaacagacacattgac

SEQ ID NO: 252802 - DNA, 25 bp, Homo sapien
tgccacgcgcagtatgctggtcaca

SEQ ID NO: 252803 - DNA, 25 bp, Homo sapien
cacgcgcagtatgctggtcacagcg

SEQ ID NO: 252804 - DNA, 25 bp, Homo sapien
gctgccacgcgcagtatgctggtca

SEQ ID NO: 252805 - DNA, 25 bp, Homo sapien
gccacgcgcagtatgctggtcacag

SEQ ID NO: 252806 - DNA, 25 bp, Homo sapien
caggtggacctcgggccggaatgtg

SEQ ID NO: 252807 - DNA, 25 bp, Homo sapien
tggacctcgggccggaatgtgtttc

SEQ ID NO: 252808 - DNA, 25 bp, Homo sapien
gcacgtcagcgtcaccagctcgttc

SEQ ID NO: 252809 - DNA, 25 bp, Homo sapien
gtcagcgtcaccagctcgttcaggg

SEQ ID NO: 252810 - DNA, 25 bp, Homo sapien
tgagagggtggcggttagcggggtc

SEQ ID NO: 252811 - DNA, 25 bp, Homo sapien
tgcaagtgaaggtcttcccatggtt

SEQ ID NO: 252812 - DNA, 25 bp, Homo sapien
gggtcttggactcggggtaggcagc

SEQ ID NO: 252813 - DNA, 25 bp, Homo sapien
cagcagtgcaagtgaaggtcttccc

SEQ ID NO: 252814 - DNA, 25 bp, Homo sapien
gaggcatctctcaggccggtcagtg

SEQ ID NO: 252815 - DNA, 25 bp, Homo sapien
cagtgtgcacgtgaggttcgcttct

SEQ ID NO: 252816 - DNA, 25 bp, Homo sapien
gcaggacactggacacgctgtagca

SEQ ID NO: 252817 - DNA, 25 bp, Homo sapien
tgaacagcgctcttcccacttgagg

SEQ ID NO: 252818 - DNA, 25 bp, Homo sapien
gagggccggtcggtgcagtgacagt

SEQ ID NO: 252819 - DNA, 25 bp, Homo sapien
tcgagggccggtcggtgcagtgaca

SEQ ID NO: 252820 - DNA, 25 bp, Homo sapien
ctcgagggccggtcggtgcagtgac

SEQ ID NO: 252821 - DNA, 25 bp, Homo sapien
agggccggtcggtgcagtgacagtc

SEQ ID NO: 252822 - DNA, 25 bp, Homo sapien
tgagggagatggggtaggtggagtt

SEQ ID NO: 252823 - DNA, 25 bp, Homo sapien
taggtggagttgagggagatggggt

SEQ ID NO: 252824 - DNA, 25 bp, Homo sapien
gggagatggggtaggtggagttgag

SEQ ID NO: 252825 - DNA, 25 bp, Homo sapien
gtaggtggagttgagggagatgggg

SEQ ID NO: 252826 - DNA, 25 bp, Homo sapien
tgagctggtcagcacatacttcccc

SEQ ID NO: 252827 - DNA, 25 bp, Homo sapien
gagatggcctgagctggtcagcaca

SEQ ID NO: 252828 - DNA, 25 bp, Homo sapien
tggcctgagctggtcagcacatact

SEQ ID NO: 252829 - DNA, 25 bp, Homo sapien
cctgagctggtcagcacatacttcc

SEQ ID NO: 252830 - DNA, 25 bp, Homo sapien
cggcccgcggtccactctggtgtga

SEQ ID NO: 252831 - DNA, 25 bp, Homo sapien
cgcggtccactctggtgtgagtgaa

SEQ ID NO: 252832 - DNA, 25 bp, Homo sapien
gcccgcggtccactctggtgtgagt

SEQ ID NO: 252833 - DNA, 25 bp, Homo sapien
tcggcccgcggtccactctggtgtg

SEQ ID NO: 252834 - DNA, 25 bp, Homo sapien
aacacgggtgcaggcgcagtgtcag

SEQ ID NO: 252835 - DNA, 25 bp, Homo sapien
aggcgcagtgtcagggcacgacggg

SEQ ID NO: 252836 - DNA, 25 bp, Homo sapien
cgggtgcaggcgcagtgtcagggca

SEQ ID NO: 252837 - DNA, 25 bp, Homo sapien
gggaacacgggtgcaggcgcagtgt

SEQ ID NO: 252838 - DNA, 25 bp, Homo sapien
cgtggcatgtcacggacttgccggc

SEQ ID NO: 252839 - DNA, 25 bp, Homo sapien
acgtggcatgtcacggacttgccgg

SEQ ID NO: 252840 - DNA, 25 bp, Homo sapien
gtggcatgtcacggacttgccggct

SEQ ID NO: 252841 - DNA, 25 bp, Homo sapien
gtttctggcggtcacgccctgtccg

SEQ ID NO: 252842 - DNA, 25 bp, Homo sapien
gctttcgctccaggtcacactgagt

SEQ ID NO: 252843 - DNA, 25 bp, Homo sapien
cgccctgtccgctttcgctccaggt

SEQ ID NO: 252844 - DNA, 25 bp, Homo sapien
ggtgggaagtttctggcggtcacgc

SEQ ID NO: 252845 - DNA, 25 bp, Homo sapien
gcgatgaccacgttcccatctggct

SEQ ID NO: 252846 - DNA, 25 bp, Homo sapien
ggcgatgaccacgttcccatctggc

SEQ ID NO: 252847 - DNA, 25 bp, Homo sapien
caggcgatgaccacgttcccatctg

SEQ ID NO: 252848 - DNA, 25 bp, Homo sapien
aggcgatgaccacgttcccatctgg

SEQ ID NO: 252849 - DNA, 25 bp, Homo sapien
catgctccttagatagggtctctga

SEQ ID NO: 252850 - DNA, 25 bp, Homo sapien
tcaggccatcccagacacaagttgt

SEQ ID NO: 252851 - DNA, 25 bp, Homo sapien
tgtctgatcccagcaacatggtttc

SEQ ID NO: 252852 - DNA, 25 bp, Homo sapien
tgcaccacaggcctgcagttggacc

SEQ ID NO: 252853 - DNA, 25 bp, Homo sapien
tcagcacaggtcagaccagctcagt

SEQ ID NO: 252854 - DNA, 25 bp, Homo sapien
cagctcagcacaggtcagaccagct

SEQ ID NO: 252855 - DNA, 25 bp, Homo sapien
gctcagcacaggtcagaccagctca

SEQ ID NO: 252856 - DNA, 25 bp, Homo sapien
cagtccaacccagcccagcgcagtc

SEQ ID NO: 252857 - DNA, 25 bp, Homo sapien
agccaggtccagcttagcccagctc

SEQ ID NO: 252858 - DNA, 25 bp, Homo sapien
gcccagctcagcccagcccaactca

SEQ ID NO: 252859 - DNA, 25 bp, Homo sapien
cccagctcagcccagcccaactcag

SEQ ID NO: 252860 - DNA, 25 bp, Homo sapien
cccagccaggtccagcttagcccag

SEQ ID NO: 252861 - DNA, 25 bp, Homo sapien
gggcagcccagctcgtccaagccca

SEQ ID NO: 252862 - DNA, 25 bp, Homo sapien
gctcagctcagctcaacccagggca

SEQ ID NO: 252863 - DNA, 25 bp, Homo sapien
tcagctcagctcaacccagggcagc

SEQ ID NO: 252864 - DNA, 25 bp, Homo sapien
gcccagctcgtccaagcccagccca

SEQ ID NO: 252865 - DNA, 25 bp, Homo sapien
tgagtgggcggcctccggcgtgcag

SEQ ID NO: 252866 - DNA, 25 bp, Homo sapien
agtgggcggcctccggcgtgcaggc

SEQ ID NO: 252867 - DNA, 25 bp, Homo sapien
accctcacgggcgtctggctgcctg

SEQ ID NO: 252868 - DNA, 25 bp, Homo sapien
ggccctcatggcaggtccaccctca

SEQ ID NO: 252869 - DNA, 25 bp, Homo sapien
aaatccttgacaatccagggcgccc

SEQ ID NO: 252870 - DNA, 25 bp, Homo sapien
gaaatccttgacaatccagggcgcc

SEQ ID NO: 252871 - DNA, 25 bp, Homo sapien
aatccttgacaatccagggcgccct

SEQ ID NO: 252872 - DNA, 25 bp, Homo sapien
aaatccttgacaatccagggcgccc

SEQ ID NO: 252873 - DNA, 25 bp, Homo sapien
aaatccttgacaatccagggtgccc

SEQ ID NO: 252874 - DNA, 25 bp, Homo sapien
gaaatccttgacaatccagggtgcc

SEQ ID NO: 252875 - DNA, 25 bp, Homo sapien
gaaatccttgacaatccagggcgcc

SEQ ID NO: 252876 - DNA, 25 bp, Homo sapien
aatgatttacgtgccctcagtcagg

SEQ ID NO: 252877 - DNA, 25 bp, Homo sapien
tctttatattatcggccactgggtt

SEQ ID NO: 252878 - DNA, 25 bp, Homo sapien
caggtgccgctgtcagactgaggca

SEQ ID NO: 252879 - DNA, 25 bp, Homo sapien
gactccatgtgacgtggctctcctg

SEQ ID NO: 252880 - DNA, 25 bp, Homo sapien
aaaggggtcgatgttgattgttgct

SEQ ID NO: 252881 - DNA, 25 bp, Homo sapien
gggtcgatgttgattgttgctttga

SEQ ID NO: 252882 - DNA, 25 bp, Homo sapien
aggggtcgatgttgattgttgcttt

SEQ ID NO: 252883 - DNA, 25 bp, Homo sapien
acaaaggggtcgatgttgattgttg

SEQ ID NO: 252884 - DNA, 25 bp, Homo sapien
accagcagaccaggtatgacagcgc

SEQ ID NO: 252885 - DNA, 25 bp, Homo sapien
gaccagcagaccaggtatgacagcg

SEQ ID NO: 252886 - DNA, 25 bp, Homo sapien
agaccagcagaccaggtatgacagc

SEQ ID NO: 252887 - DNA, 25 bp, Homo sapien
aaggatctttactaagaaactcaga

SEQ ID NO: 252888 - DNA, 25 bp, Homo sapien
aaaggatctttactaagaaactcag

SEQ ID NO: 252889 - DNA, 25 bp, Homo sapien
cttgggggacggggatgccaggcac

SEQ ID NO: 252890 - DNA, 25 bp, Homo sapien
agaagtatgactgctgaagccagac

SEQ ID NO: 252891 - DNA, 25 bp, Homo sapien
tgggctcaggttcactggccatcag

SEQ ID NO: 252892 - DNA, 25 bp, Homo sapien
cgcctttaaccttgcggctgagccg

SEQ ID NO: 252893 - DNA, 25 bp, Homo sapien
tggtggttctctcggcgcctttaac

SEQ ID NO: 252894 - DNA, 25 bp, Homo sapien
agcccacagtagtgaccttgtgccc

SEQ ID NO: 252895 - DNA, 25 bp, Homo sapien
tggaggacgttggtgtagtcgaggg

SEQ ID NO: 252896 - DNA, 25 bp, Homo sapien
ttggtgtagtcgagggaggtctggg

SEQ ID NO: 252897 - DNA, 25 bp, Homo sapien
cccctgccgcgtggctgagaggaac

SEQ ID NO: 252898 - DNA, 25 bp, Homo sapien
ctcccctgccgcgtggctgagagga

SEQ ID NO: 252899 - DNA, 25 bp, Homo sapien
cgctgtagctcacgctgagcaggaa

SEQ ID NO: 252900 - DNA, 25 bp, Homo sapien
tgatggcggcgctgtagctcacgct

SEQ ID NO: 252901 - DNA, 25 bp, Homo sapien
gcctcctccacgcacacgtccagct

SEQ ID NO: 252902 - DNA, 25 bp, Homo sapien
caggaagagtgcggcgaagatgcag

SEQ ID NO: 252903 - DNA, 25 bp, Homo sapien
cagagcaccctatccggggccctct

SEQ ID NO: 252904 - DNA, 25 bp, Homo sapien
agtggcagagcaccctatccggggc

SEQ ID NO: 252905 - DNA, 25 bp, Homo sapien
gtggcagagcaccctatccggggcc

SEQ ID NO: 252906 - DNA, 25 bp, Homo sapien
ggcagagcaccctatccggggccct

SEQ ID NO: 252907 - DNA, 25 bp, Homo sapien
cccgtgtttccgtgtggatttggtg

SEQ ID NO: 252908 - DNA, 25 bp, Homo sapien
ctggtcccgggtcatcagcaggtgc

SEQ ID NO: 252909 - DNA, 25 bp, Homo sapien
gaatgtatggctgtgacggtgtgca

SEQ ID NO: 252910 - DNA, 25 bp, Homo sapien
ctgggacgtgagagtgaagctgaat

SEQ ID NO: 252911 - DNA, 25 bp, Homo sapien
ctgcccgctcccaagaacgggtgta

SEQ ID NO: 252912 - DNA, 25 bp, Homo sapien
tgcccgctcccaagaacgggtgtac

SEQ ID NO: 252913 - DNA, 25 bp, Homo sapien
cctgcccgctcccaagaacgggtgt

SEQ ID NO: 252914 - DNA, 25 bp, Homo sapien
ccctgcccgctcccaagaacgggtg

SEQ ID NO: 252915 - DNA, 25 bp, Homo sapien
gcactgtttattgggggtagcttcc

SEQ ID NO: 252916 - DNA, 25 bp, Homo sapien
gtggacagaaggtctggccagccct

SEQ ID NO: 252917 - DNA, 25 bp, Homo sapien
ggtagcttcctggggtcgttgcaac

SEQ ID NO: 252918 - DNA, 25 bp, Homo sapien
tcgttgcaacagtggacagaaggtc

SEQ ID NO: 252919 - DNA, 25 bp, Homo sapien
agggaggcaggagtacgtcatttac

SEQ ID NO: 252920 - DNA, 25 bp, Homo sapien
gagggaggcaggagtacgtcattta

SEQ ID NO: 252921 - DNA, 25 bp, Homo sapien
gactgcacggcagatgaactcatct

SEQ ID NO: 252922 - DNA, 25 bp, Homo sapien
cgggatttacagacaccgctcgctg

SEQ ID NO: 252923 - DNA, 25 bp, Homo sapien
caccgctcgctggacggtctgtgag

SEQ ID NO: 252924 - DNA, 25 bp, Homo sapien
tggactgcacggcagatgaactcat

SEQ ID NO: 252925 - DNA, 25 bp, Homo sapien
gagatgtcctcaggcatgaagttct

SEQ ID NO: 252926 - DNA, 25 bp, Homo sapien
cactgcaccgagatgtcctcaggca

SEQ ID NO: 252927 - DNA, 25 bp, Homo sapien
ggctgcgtcgtgctgtgccgggcgt

SEQ ID NO: 252928 - DNA, 25 bp, Homo sapien
cgtcgcaaacgcatagacttccggg

SEQ ID NO: 252929 - DNA, 25 bp, Homo sapien
ggtcttggtcgtggaccgcacgagg

SEQ ID NO: 252930 - DNA, 25 bp, Homo sapien
ctggtcttggtcgtggaccgcacga

SEQ ID NO: 252931 - DNA, 25 bp, Homo sapien
cgctggtcttggtcgtggaccgcac

SEQ ID NO: 252932 - DNA, 25 bp, Homo sapien
cttggtcgtggaccgcacgagggcc

SEQ ID NO: 252933 - DNA, 25 bp, Homo sapien
atgaacaggtcgaacgggctgggcc

SEQ ID NO: 252934 - DNA, 25 bp, Homo sapien
gctgggccggcttaggtaggcgctc

SEQ ID NO: 252935 - DNA, 25 bp, Homo sapien
ggccggcttaggtaggcgctcaccc

SEQ ID NO: 252936 - DNA, 25 bp, Homo sapien
tggcccgggaccaggtcaggttcac

SEQ ID NO: 252937 - DNA, 25 bp, Homo sapien
taagcttggctcaggtctgtccagc

SEQ ID NO: 252938 - DNA, 25 bp, Homo sapien
ctcaggccaggtcaggtaagctcag

SEQ ID NO: 252939 - DNA, 25 bp, Homo sapien
gtaagctcagcaggtaataccccag

SEQ ID NO: 252940 - DNA, 25 bp, Homo sapien
tcaaccaagtccagtcaagtccagg

SEQ ID NO: 252941 - DNA, 25 bp, Homo sapien
ccgggtcgtccatttggtgcctgtg

SEQ ID NO: 252942 - DNA, 25 bp, Homo sapien
ctgaagcgccgggtcgtccatttgg

SEQ ID NO: 252943 - DNA, 25 bp, Homo sapien
aagcgccgggtcgtccatttggtgc

SEQ ID NO: 252944 - DNA, 25 bp, Homo sapien
gcgccgggtcgtccatttggtgcct

SEQ ID NO: 252945 - DNA, 25 bp, Homo sapien
caggacgtagtgtgactgcatctga

SEQ ID NO: 252946 - DNA, 25 bp, Homo sapien
gagatgtaatcaaagcctcagaaga

SEQ ID NO: 252947 - DNA, 25 bp, Homo sapien
tcactggatggtagagagcatgtcc

SEQ ID NO: 252948 - DNA, 25 bp, Homo sapien
ggcgaatgcgtaattgctccctcca

SEQ ID NO: 252949 - DNA, 25 bp, Homo sapien
caaacattcgtgtgcctgtgaggcc

SEQ ID NO: 252950 - DNA, 25 bp, Homo sapien
ccccacgcgtggcaggcattgttgt

SEQ ID NO: 252951 - DNA, 25 bp, Homo sapien
tgtgtggccactatgcatggcaggc

SEQ ID NO: 252952 - DNA, 25 bp, Homo sapien
tatgtgtgtgtcacgtgtccccatg

SEQ ID NO: 252953 - DNA, 25 bp, Homo sapien
cctgagagttaaagggctgggcttc

SEQ ID NO: 252954 - DNA, 25 bp, Homo sapien
gcagcagcgtgtcctgagagttaaa

SEQ ID NO: 252955 - DNA, 25 bp, Homo sapien
ggcttcagcacccagttcaggccag

SEQ ID NO: 252956 - DNA, 25 bp, Homo sapien
ggctgggcttcagcacccagttcag

SEQ ID NO: 252957 - DNA, 25 bp, Homo sapien
ctccagcagcgagccttcccacggc

SEQ ID NO: 252958 - DNA, 25 bp, Homo sapien
tccagcagcgagccttcccacggca

SEQ ID NO: 252959 - DNA, 25 bp, Homo sapien
ccagcagcgagccttcccacggcat

SEQ ID NO: 252960 - DNA, 25 bp, Homo sapien
cctccagcagcgagccttcccacgg

SEQ ID NO: 252961 - DNA, 25 bp, Homo sapien
ctgggataccggtcactgcctcctt

SEQ ID NO: 252962 - DNA, 25 bp, Homo sapien
catgcaccaagcagcggaggtctgg

SEQ ID NO: 252963 - DNA, 25 bp, Homo sapien
tgcatgcaccaagcagcggaggtct

SEQ ID NO: 252964 - DNA, 25 bp, Homo sapien
ggggtagacctgctatgcacagggt

SEQ ID NO: 252965 - DNA, 25 bp, Homo sapien
gccctgcatgcaccaagcagcggag

SEQ ID NO: 252966 - DNA, 25 bp, Homo sapien
gaaggggggcgtgtcaggtgtgtca

SEQ ID NO: 252967 - DNA, 25 bp, Homo sapien
aaggggggcgtgtcaggtgtgtcag

SEQ ID NO: 252968 - DNA, 25 bp, Homo sapien
aggggggcgtgtcaggtgtgtcagg

SEQ ID NO: 252969 - DNA, 25 bp, Homo sapien
gtccgatcatgttcctgtagtcggg

SEQ ID NO: 252970 - DNA, 25 bp, Homo sapien
tgcttcaggtccaccaccgaggaga

SEQ ID NO: 252971 - DNA, 25 bp, Homo sapien
cccctgtccgatcatgttcctgtag

SEQ ID NO: 252972 - DNA, 25 bp, Homo sapien
ccaccgaggagaagatccacttcac

SEQ ID NO: 252973 - DNA, 25 bp, Homo sapien
attataggggacagagtgggagaca

SEQ ID NO: 252974 - DNA, 25 bp, Homo sapien
acagtgtcagggattataggggaca

SEQ ID NO: 252975 - DNA, 25 bp, Homo sapien
gacagtgtcagggataggagggaac

SEQ ID NO: 252976 - DNA, 25 bp, Homo sapien
cagtggggacattgtcggggacagg

SEQ ID NO: 252977 - DNA, 25 bp, Homo sapien
tgggacagtgtcagagacagtttgt

SEQ ID NO: 252978 - DNA, 25 bp, Homo sapien
acagcctgtgggacagtgtcagaga

SEQ ID NO: 252979 - DNA, 25 bp, Homo sapien
cctgtgggacagtgtcagagacagt

SEQ ID NO: 252980 - DNA, 25 bp, Homo sapien
cagctggggacaacgtgcggccgac

SEQ ID NO: 252981 - DNA, 25 bp, Homo sapien
aagatggtgatggtcgtccacagcc

SEQ ID NO: 252982 - DNA, 25 bp, Homo sapien
cgtcctgcgcctccgcacagctctc

SEQ ID NO: 252983 - DNA, 25 bp, Homo sapien
tgatggtcgtccacagcccgtccag

SEQ ID NO: 252984 - DNA, 25 bp, Homo sapien
cgcttaacaggaagagtgtgatgaa

SEQ ID NO: 252985 - DNA, 25 bp, Homo sapien
atcctcgcgcgaccccgagagcctg

SEQ ID NO: 252986 - DNA, 25 bp, Homo sapien
gagcgggggcttgccggccgtggca

SEQ ID NO: 252987 - DNA, 25 bp, Homo sapien
gtacgtgccaagcatcctcgcgcga

SEQ ID NO: 252988 - DNA, 25 bp, Homo sapien
gaagtatgtacacggggtacgtgcc

SEQ ID NO: 252989 - DNA, 25 bp, Homo sapien
ctcttctgtgtgtagtggttgtgca

SEQ ID NO: 252990 - DNA, 25 bp, Homo sapien
tccagcacgggaggcgtggtcttgt

SEQ ID NO: 252991 - DNA, 25 bp, Homo sapien
cctcatgcatcacggagcatgagaa

SEQ ID NO: 252992 - DNA, 25 bp, Homo sapien
catcacggagcatgagaagacgttc

SEQ ID NO: 252993 - DNA, 25 bp, Homo sapien
aagaaggagccgtcggagtccagca

SEQ ID NO: 252994 - DNA, 25 bp, Homo sapien
ccactccacggcgatgtcgctggga

SEQ ID NO: 252995 - DNA, 25 bp, Homo sapien
ctttgaccaggcaggtcaggctgac

SEQ ID NO: 252996 - DNA, 25 bp, Homo sapien
tgtcgctgggatagaagcctttgac

SEQ ID NO: 252997 - DNA, 25 bp, Homo sapien
tgctctcccactccacggcgatgtc

SEQ ID NO: 252998 - DNA, 25 bp, Homo sapien
ctggttcttggtcagctcatcccgg

SEQ ID NO: 252999 - DNA, 25 bp, Homo sapien
gttcttggtcagctcatcccgggat

SEQ ID NO: 253000 - DNA, 25 bp, Homo sapien
ttcttggtcagctcatcccgggatg

SEQ ID NO: 253001 - DNA, 25 bp, Homo sapien
cttggtcagctcatcccgggatggg

SEQ ID NO: 253002 - DNA, 25 bp, Homo sapien
ggccgagccggcctctgtccatgtg

SEQ ID NO: 253003 - DNA, 25 bp, Homo sapien
gaccttgcacttgtactccttgcca

SEQ ID NO: 253004 - DNA, 25 bp, Homo sapien
ctttggagatggttttctcgatggg

SEQ ID NO: 253005 - DNA, 25 bp, Homo sapien
gctttgttggagaccttgcacttgt

SEQ ID NO: 253006 - DNA, 25 bp, Homo sapien
ctttggctttggagatggttttctc

SEQ ID NO: 253007 - DNA, 25 bp, Homo sapien
gctgaccacacggtacgtgctgttg

SEQ ID NO: 253008 - DNA, 25 bp, Homo sapien
gcggctttgtcttggcattatgcac

SEQ ID NO: 253009 - DNA, 25 bp, Homo sapien
ttgtactgctcctcccgcggctttg

SEQ ID NO: 253010 - DNA, 25 bp, Homo sapien
acggtgaggacgctgaccacacggt

SEQ ID NO: 253011 - DNA, 25 bp, Homo sapien
cgtaccagttgaacttgacctcagg

SEQ ID NO: 253012 - DNA, 25 bp, Homo sapien
acgtaccagttgaacttgacctcag

SEQ ID NO: 253013 - DNA, 25 bp, Homo sapien
cacgtaccagttgaacttgacctca

SEQ ID NO: 253014 - DNA, 25 bp, Homo sapien
gggtccgggagatcatgagggtgtc

SEQ ID NO: 253015 - DNA, 25 bp, Homo sapien
tcaggggtccgggagatcatgaggg

SEQ ID NO: 253016 - DNA, 25 bp, Homo sapien
ggggtccgggagatcatgagggtgt

SEQ ID NO: 253017 - DNA, 25 bp, Homo sapien
caggggtccgggagatcatgagggt

SEQ ID NO: 253018 - DNA, 25 bp, Homo sapien
agaggaagactgacggtccccccag

SEQ ID NO: 253019 - DNA, 25 bp, Homo sapien
gactgacggtccccccaggagttca

SEQ ID NO: 253020 - DNA, 25 bp, Homo sapien
actgacggtccccccaggagttcag

SEQ ID NO: 253021 - DNA, 25 bp, Homo sapien
ctgacggtccccccaggagttcagg

SEQ ID NO: 253022 - DNA, 25 bp, Homo sapien
gtgggcatgtgtgagttttgtcaca

SEQ ID NO: 253023 - DNA, 25 bp, Homo sapien
tgggcacggtgggcatgtgtgagtt

SEQ ID NO: 253024 - DNA, 25 bp, Homo sapien
catgtgtgagttttgtcacaagatt

SEQ ID NO: 253025 - DNA, 25 bp, Homo sapien
cacggtgggcatgtgtgagttttgt

SEQ ID NO: 253026 - DNA, 25 bp, Homo sapien
ggcagggtcctcccggatatggctc

SEQ ID NO: 253027 - DNA, 25 bp, Homo sapien
gtcctcccggatatggctcttggca

SEQ ID NO: 253028 - DNA, 25 bp, Homo sapien
cagcacctgcccctttgtgtgcagg

SEQ ID NO: 253029 - DNA, 25 bp, Homo sapien
ggttaggggcacctagcctgtgcct

SEQ ID NO: 253030 - DNA, 25 bp, Homo sapien
tgggcttgtgattcacgttgcagat

SEQ ID NO: 253031 - DNA, 25 bp, Homo sapien
gcttgtgattcacgttgcagatgta

SEQ ID NO: 253032 - DNA, 25 bp, Homo sapien
tgtgattcacgttgcagatgtaggt

SEQ ID NO: 253033 - DNA, 25 bp, Homo sapien
ttgtgattcacgttgcagatgtagg

SEQ ID NO: 253034 - DNA, 25 bp, Homo sapien
tgagttccacgacaccgtcaccggt

SEQ ID NO: 253035 - DNA, 25 bp, Homo sapien
tggtcagggcgcctgagttccacga

SEQ ID NO: 253036 - DNA, 25 bp, Homo sapien
gtgtgcacgccgctggtcagggcgc

SEQ ID NO: 253037 - DNA, 25 bp, Homo sapien
gggcgcctgagttccacgacaccgt

SEQ ID NO: 253038 - DNA, 25 bp, Homo sapien
tgcccccagaggtgctcttggagga

SEQ ID NO: 253039 - DNA, 25 bp, Homo sapien
ggaagaccgatgggcccttggtgga

SEQ ID NO: 253040 - DNA, 25 bp, Homo sapien
tgtgcccccagaggtgctcttggag

SEQ ID NO: 253041 - DNA, 25 bp, Homo sapien
gagggtgccagggggaagaccgatg

SEQ ID NO: 253042 - DNA, 25 bp, Homo sapien
aggtggtgccatgtgaccgcggtgt

SEQ ID NO: 253043 - DNA, 25 bp, Homo sapien
ccatgtgaccgcggtgtgggacaga

SEQ ID NO: 253044 - DNA, 25 bp, Homo sapien
tggtgccatgtgaccgcggtgtggg

SEQ ID NO: 253045 - DNA, 25 bp, Homo sapien
ggtgccatgtgaccgcggtgtggga

SEQ ID NO: 253046 - DNA, 25 bp, Homo sapien
ccagaaagcttgcaggaccggtggc

SEQ ID NO: 253047 - DNA, 25 bp, Homo sapien
ccagtgtctgggctcacgggcattg

SEQ ID NO: 253048 - DNA, 25 bp, Homo sapien
agacactgcatagggtcggcgccct

SEQ ID NO: 253049 - DNA, 25 bp, Homo sapien
agcgctctgtgtctgccgggagtca

SEQ ID NO: 253050 - DNA, 25 bp, Homo sapien
cctccctgctctgctcccggctcac

SEQ ID NO: 253051 - DNA, 25 bp, Homo sapien
tgttggcttggaagcccctgcccac

SEQ ID NO: 253052 - DNA, 25 bp, Homo sapien
cactgggtgggcatcggtgcctgaa

SEQ ID NO: 253053 - DNA, 25 bp, Homo sapien
cagtcagcctctggtgtgtcctgcc

SEQ ID NO: 253054 - DNA, 25 bp, Homo sapien
gctatttgtcttcctaggaaatcac

SEQ ID NO: 253055 - DNA, 25 bp, Homo sapien
gaactggaagcatccagagtcaaac

SEQ ID NO: 253056 - DNA, 25 bp, Homo sapien
tggaactggaagcatccagagtcaa

SEQ ID NO: 253057 - DNA, 25 bp, Homo sapien
ggaactggaagcatccagagtcaaa

SEQ ID NO: 253058 - DNA, 25 bp, Homo sapien
aatggaactggaagcatccagagtc

SEQ ID NO: 253059 - DNA, 25 bp, Homo sapien
aacatgctcagatggttctattctc

SEQ ID NO: 253060 - DNA, 25 bp, Homo sapien
acatgctcagatggttctattctcc

SEQ ID NO: 253061 - DNA, 25 bp, Homo sapien
catgctcagatggttctattctccc

SEQ ID NO: 253062 - DNA, 25 bp, Homo sapien
ctgaccctctggaggatgctcggtc

SEQ ID NO: 253063 - DNA, 25 bp, Homo sapien
ctctggaggatgctcggtcccaggt

SEQ ID NO: 253064 - DNA, 25 bp, Homo sapien
ccctctggaggatgctcggtcccag

SEQ ID NO: 253065 - DNA, 25 bp, Homo sapien
gaccctctggaggatgctcggtccc

SEQ ID NO: 253066 - DNA, 25 bp, Homo sapien
cccttccttgggctatcctcactct

SEQ ID NO: 253067 - DNA, 25 bp, Homo sapien
acccgagaatccagcagtgtaggca

SEQ ID NO: 253068 - DNA, 25 bp, Homo sapien
tccacccgagaatccagcagtgtag

SEQ ID NO: 253069 - DNA, 25 bp, Homo sapien
ttccacccgagaatccagcagtgta

SEQ ID NO: 253070 - DNA, 25 bp, Homo sapien
tggcttccctaccttggcggctgat

SEQ ID NO: 253071 - DNA, 25 bp, Homo sapien
tcagggctcagagggcgactgcaaa

SEQ ID NO: 253072 - DNA, 25 bp, Homo sapien
cttttgtgtgagcatctggcggtct

SEQ ID NO: 253073 - DNA, 25 bp, Homo sapien
tcagagggcgactgcaaagacagag

SEQ ID NO: 253074 - DNA, 25 bp, Homo sapien
ttttgtgtgagcatctggcggtctg

SEQ ID NO: 253075 - DNA, 25 bp, Homo sapien
gcccaatcatgttcctatagtcggg

SEQ ID NO: 253076 - DNA, 25 bp, Homo sapien
tgcttcaggtccaccaccgaggaga

SEQ ID NO: 253077 - DNA, 25 bp, Homo sapien
atagtcggggatgatggtctgcttc

SEQ ID NO: 253078 - DNA, 25 bp, Homo sapien
ccctgcccaatcatgttcctatagt

SEQ ID NO: 253079 - DNA, 25 bp, Homo sapien
cgtcctgcgcctccgcacagctctc

SEQ ID NO: 253080 - DNA, 25 bp, Homo sapien
tgatggtcgtccacagcccgtccag

SEQ ID NO: 253081 - DNA, 25 bp, Homo sapien
cgcttaacaggaagagtgtgatgaa

SEQ ID NO: 253082 - DNA, 25 bp, Homo sapien
aagatggtgatggtcgtccacagcc

SEQ ID NO: 253083 - DNA, 25 bp, Homo sapien
atcctcgcgcgaccccgagagcccg

SEQ ID NO: 253084 - DNA, 25 bp, Homo sapien
gtacgtgccaagcatcctcgcgcga

SEQ ID NO: 253085 - DNA, 25 bp, Homo sapien
gaagtatgtacacggggtacgtgcc

SEQ ID NO: 253086 - DNA, 25 bp, Homo sapien
catgctgggtgcccgggaagtatgt

SEQ ID NO: 253087 - DNA, 25 bp, Homo sapien
ttctgcgtgaagcggttgtgcagag

SEQ ID NO: 253088 - DNA, 25 bp, Homo sapien
gctcttctgcgtgaagcggttgtgc

SEQ ID NO: 253089 - DNA, 25 bp, Homo sapien
acagggagaggctcttctgcgtgaa

SEQ ID NO: 253090 - DNA, 25 bp, Homo sapien
agaggctcttctgcgtgaagcggtt

SEQ ID NO: 253091 - DNA, 25 bp, Homo sapien
catgcatcacggagcatgagaagat

SEQ ID NO: 253092 - DNA, 25 bp, Homo sapien
gggtagaagcctttgaccaggcagg

SEQ ID NO: 253093 - DNA, 25 bp, Homo sapien
ctggggtagaagcctttgaccaggc

SEQ ID NO: 253094 - DNA, 25 bp, Homo sapien
tagaagcctttgaccaggcaggtca

SEQ ID NO: 253095 - DNA, 25 bp, Homo sapien
gtcgctggggtagaagcctttgacc

SEQ ID NO: 253096 - DNA, 25 bp, Homo sapien
ttggtcatctcctcccgggatgggg

SEQ ID NO: 253097 - DNA, 25 bp, Homo sapien
ttgtactgctcctcccgcggctttg

SEQ ID NO: 253098 - DNA, 25 bp, Homo sapien
ggacgctgaccacacggaacgtgct

SEQ ID NO: 253099 - DNA, 25 bp, Homo sapien
tccttgccgttcagccagtcctggt

SEQ ID NO: 253100 - DNA, 25 bp, Homo sapien
gcggctttgtcttggcattatgcac

SEQ ID NO: 253101 - DNA, 25 bp, Homo sapien
aagaggaagactgacggtcctccca

SEQ ID NO: 253102 - DNA, 25 bp, Homo sapien
gaggaagagatggaggcagatgtgt

SEQ ID NO: 253103 - DNA, 25 bp, Homo sapien
aggaagagatggaggcagatgtgtc

SEQ ID NO: 253104 - DNA, 25 bp, Homo sapien
ctgaggaagagatggaggcagatgt

SEQ ID NO: 253105 - DNA, 25 bp, Homo sapien
tgaggaagagatggaggcagatgtg

SEQ ID NO: 253106 - DNA, 25 bp, Homo sapien
gggggaggtgtgtcacaagatttgg

SEQ ID NO: 253107 - DNA, 25 bp, Homo sapien
acgggggaggtgtgtcacaagattt

SEQ ID NO: 253108 - DNA, 25 bp, Homo sapien
ggcacgggggaggtgtgtcacaaga

SEQ ID NO: 253109 - DNA, 25 bp, Homo sapien
gcacgggggaggtgtgtcacaagat

SEQ ID NO: 253110 - DNA, 25 bp, Homo sapien
gagaagattgggagttacggggatc

SEQ ID NO: 253111 - DNA, 25 bp, Homo sapien
tcaggccactctagggctcttgtcc

SEQ ID NO: 253112 - DNA, 25 bp, Homo sapien
gactcaggccactctagggctcttg

SEQ ID NO: 253113 - DNA, 25 bp, Homo sapien
tggactcaggccactctagggctct

SEQ ID NO: 253114 - DNA, 25 bp, Homo sapien
gggggaggtgtgtcacaagatttgg

SEQ ID NO: 253115 - DNA, 25 bp, Homo sapien
caggccactctagggctcttgtcct

SEQ ID NO: 253116 - DNA, 25 bp, Homo sapien
gggggaggtgtgtcacaagatttgg

SEQ ID NO: 253117 - DNA, 25 bp, Homo sapien
acgggggaggtgtgtcacaagattt

SEQ ID NO: 253118 - DNA, 25 bp, Homo sapien
ggcacgggggaggtgtgtcacaaga

SEQ ID NO: 253119 - DNA, 25 bp, Homo sapien
gcacgggggaggtgtgtcacaagat

SEQ ID NO: 253120 - DNA, 25 bp, Homo sapien
atgtgtgagttgtgtcaccaagtgg

SEQ ID NO: 253121 - DNA, 25 bp, Homo sapien
gtgagttgtgtcaccaagtggggtt

SEQ ID NO: 253122 - DNA, 25 bp, Homo sapien
agttgtgtcaccaagtggggttttg

SEQ ID NO: 253123 - DNA, 25 bp, Homo sapien
ttgtgtcaccaagtggggttttgag

SEQ ID NO: 253124 - DNA, 25 bp, Homo sapien
ttgtccaccttggtgttgctgggct

SEQ ID NO: 253125 - DNA, 25 bp, Homo sapien
caactctcttgtccaccttggtgtt

SEQ ID NO: 253126 - DNA, 25 bp, Homo sapien
cttgtccaccttggtgttgctgggc

SEQ ID NO: 253127 - DNA, 25 bp, Homo sapien
ctctcttgtccaccttggtgttgct

SEQ ID NO: 253128 - DNA, 25 bp, Homo sapien
gttgcaggtgtaggtctgggtgccc

SEQ ID NO: 253129 - DNA, 25 bp, Homo sapien
tgctggagggcacggtcaccacgct

SEQ ID NO: 253130 - DNA, 25 bp, Homo sapien
tcaccacgctgctgagggagtagag

SEQ ID NO: 253131 - DNA, 25 bp, Homo sapien
tggagggcacggtcaccacgctgct

SEQ ID NO: 253132 - DNA, 25 bp, Homo sapien
tgagttccacgacaccgtcaccggt

SEQ ID NO: 253133 - DNA, 25 bp, Homo sapien
gtgtgcacgccgctggtcagggcgc

SEQ ID NO: 253134 - DNA, 25 bp, Homo sapien
acagccgggaaggtgtgcacgccgc

SEQ ID NO: 253135 - DNA, 25 bp, Homo sapien
tggtcagggcgcctgagttccacga

SEQ ID NO: 253136 - DNA, 25 bp, Homo sapien
gggcgcagaggcccctcggttcttg

SEQ ID NO: 253137 - DNA, 25 bp, Homo sapien
agggcgcagaggcccctcggttctt

SEQ ID NO: 253138 - DNA, 25 bp, Homo sapien
ggcgcagaggcccctcggttcttgt

SEQ ID NO: 253139 - DNA, 25 bp, Homo sapien
cagggcgcagaggcccctcggttct

SEQ ID NO: 253140 - DNA, 25 bp, Homo sapien
tgtgcccctgacctctgaggaagct

SEQ ID NO: 253141 - DNA, 25 bp, Homo sapien
tgccttggaatatcgccccgggagc

SEQ ID NO: 253142 - DNA, 25 bp, Homo sapien
acaggtaggagccttgcacctgccc

SEQ ID NO: 253143 - DNA, 25 bp, Homo sapien
ggccctgaatgggcccctctggctg

SEQ ID NO: 253144 - DNA, 25 bp, Homo sapien
actgctcagtgggatggactcacac

SEQ ID NO: 253145 - DNA, 25 bp, Homo sapien
tcagctgtctgctgccggcaactac

SEQ ID NO: 253146 - DNA, 25 bp, Homo sapien
gccaactgctcagtgggatggactc

SEQ ID NO: 253147 - DNA, 25 bp, Homo sapien
aaagtctaggagctgcgtgctgcct

SEQ ID NO: 253148 - DNA, 25 bp, Homo sapien
gcccctgctcacctgcagcggctct

SEQ ID NO: 253149 - DNA, 25 bp, Homo sapien
cctgctcacctgcagcggctctgcc

SEQ ID NO: 253150 - DNA, 25 bp, Homo sapien
ctgcccctgctcacctgcagcggct

SEQ ID NO: 253151 - DNA, 25 bp, Homo sapien
ccctgctcacctgcagcggctctgc

SEQ ID NO: 253152 - DNA, 25 bp, Homo sapien
cctgctcctgtttgcctatggctgc

SEQ ID NO: 253153 - DNA, 25 bp, Homo sapien
ctatggctgctctgcccttgtcccc

SEQ ID NO: 253154 - DNA, 25 bp, Homo sapien
cccttgtcccctgagctccaggagc

SEQ ID NO: 253155 - DNA, 25 bp, Homo sapien
tgcccttgtcccctgagctccagga

SEQ ID NO: 253156 - DNA, 25 bp, Homo sapien
ccaggagctgccccctgcttgccca

SEQ ID NO: 253157 - DNA, 25 bp, Homo sapien
gtggctacactgccctggtgccctg

SEQ ID NO: 253158 - DNA, 25 bp, Homo sapien
ggctacactgccctggtgccctgag

SEQ ID NO: 253159 - DNA, 25 bp, Homo sapien
ctgtggctacactgccctggtgccc

SEQ ID NO: 253160 - DNA, 25 bp, Homo sapien
gtgttccctatgctgtggagcagcc

SEQ ID NO: 253161 - DNA, 25 bp, Homo sapien
agtgtccagtcaggtctccccaaca

SEQ ID NO: 253162 - DNA, 25 bp, Homo sapien
acttggcgtgttccctatgctgtgg

SEQ ID NO: 253163 - DNA, 25 bp, Homo sapien
tgtttttgcagcacttggcgtgttc

SEQ ID NO: 253164 - DNA, 25 bp, Homo sapien
tgggctccggtgatgctgccggcct

SEQ ID NO: 253165 - DNA, 25 bp, Homo sapien
cactgggtgggcatcggtgcctgaa

SEQ ID NO: 253166 - DNA, 25 bp, Homo sapien
tgttggcttggaagcccctgcccac

SEQ ID NO: 253167 - DNA, 25 bp, Homo sapien
tcctggaggcctcagtcagcctctg

SEQ ID NO: 253168 - DNA, 25 bp, Homo sapien
ctgtgctggctccgcttaggcttcc

SEQ ID NO: 253169 - DNA, 25 bp, Homo sapien
tccgcttaggcttccatgtggggct

SEQ ID NO: 253170 - DNA, 25 bp, Homo sapien
aggtccagaagcgccgatggctgcg

SEQ ID NO: 253171 - DNA, 25 bp, Homo sapien
aagcgccgatggctgcgcccaggct

SEQ ID NO: 253172 - DNA, 25 bp, Homo sapien
agaacaggattgaaaccggcggcac

SEQ ID NO: 253173 - DNA, 25 bp, Homo sapien
ggtctcagcccttcctgttgtggcg

SEQ ID NO: 253174 - DNA, 25 bp, Homo sapien
gggtgtgaactccacgctgcaaaca

SEQ ID NO: 253175 - DNA, 25 bp, Homo sapien
gctgtcagctgccacttgtcttcct

SEQ ID NO: 253176 - DNA, 25 bp, Homo sapien
cctgaagttcccttttcttctggtg

SEQ ID NO: 253177 - DNA, 25 bp, Homo sapien
ctgaagttcccttttcttctggtgg

SEQ ID NO: 253178 - DNA, 25 bp, Homo sapien
actgagactggcaacgattatgacc

SEQ ID NO: 253179 - DNA, 25 bp, Homo sapien
catactcccccgtactcacgggaga

SEQ ID NO: 253180 - DNA, 25 bp, Homo sapien
ggagcccggaccttgtgtgctgctc

SEQ ID NO: 253181 - DNA, 25 bp, Homo sapien
gactggcaacgattatgaccattct

SEQ ID NO: 253182 - DNA, 25 bp, Homo sapien
ggtggtgcagggcagtgtagcagca

SEQ ID NO: 253183 - DNA, 25 bp, Homo sapien
agccagaggggcccattcagggcct

SEQ ID NO: 253184 - DNA, 25 bp, Homo sapien
gccagaggggcccattcagggcctg

SEQ ID NO: 253185 - DNA, 25 bp, Homo sapien
tgaggctgagtggaggtggtgcagg

SEQ ID NO: 253186 - DNA, 25 bp, Homo sapien
ttatcctgggtctgcgagatcctag

SEQ ID NO: 253187 - DNA, 25 bp, Homo sapien
aaagtgccagtccatttaacaggtg

SEQ ID NO: 253188 - DNA, 25 bp, Homo sapien
ttttcagggatttctggctggatgc

SEQ ID NO: 253189 - DNA, 25 bp, Homo sapien
tctctccgaaaagtgaatgggccta

SEQ ID NO: 253190 - DNA, 25 bp, Homo sapien
tggatcacctgtgactgaccggcca

SEQ ID NO: 253191 - DNA, 25 bp, Homo sapien
ggatcacctgtgactgaccggccat

SEQ ID NO: 253192 - DNA, 25 bp, Homo sapien
ctggatcacctgtgactgaccggcc

SEQ ID NO: 253193 - DNA, 25 bp, Homo sapien
gctggatcacctgtgactgaccggc

SEQ ID NO: 253194 - DNA, 25 bp, Homo sapien
gccgtggtgattctgagaccaaggt

SEQ ID NO: 253195 - DNA, 25 bp, Homo sapien
tggtgattctgagaccaaggtgagc

SEQ ID NO: 253196 - DNA, 25 bp, Homo sapien
ggccgtggtgattctgagaccaagg

SEQ ID NO: 253197 - DNA, 25 bp, Homo sapien
cgtggtgattctgagaccaaggtga

SEQ ID NO: 253198 - DNA, 25 bp, Homo sapien
gctggtcttcaatttgctttttgtc

SEQ ID NO: 253199 - DNA, 25 bp, Homo sapien
tcttcaatttgctttttgtccttac

SEQ ID NO: 253200 - DNA, 25 bp, Homo sapien
agtgctggtcttcaatttgcttttt

SEQ ID NO: 253201 - DNA, 25 bp, Homo sapien
ctggtcttcaatttgctttttgtcc

SEQ ID NO: 253202 - DNA, 25 bp, Homo sapien
taaacttggcaggtatagagccggc

SEQ ID NO: 253203 - DNA, 25 bp, Homo sapien
tctttggggctggagactatggcct

SEQ ID NO: 253204 - DNA, 25 bp, Homo sapien
ttctgtccaggtcttggggggcctc

SEQ ID NO: 253205 - DNA, 25 bp, Homo sapien
tgaggtcttgtccaaaccaatgttt

SEQ ID NO: 253206 - DNA, 25 bp, Homo sapien
gctgtggcgacacgggtgagctgca

SEQ ID NO: 253207 - DNA, 25 bp, Homo sapien
agatgtttctgccccgagtgccacc

SEQ ID NO: 253208 - DNA, 25 bp, Homo sapien
ccagcaggctgtggcgacacgggtg

SEQ ID NO: 253209 - DNA, 25 bp, Homo sapien
agctgcagagcgtgcggaggcgagg

SEQ ID NO: 253210 - DNA, 25 bp, Homo sapien
aaaaccacaggtgactcaattttga

SEQ ID NO: 253211 - DNA, 25 bp, Homo sapien
tctcttcttggccttcctaggctct

SEQ ID NO: 253212 - DNA, 25 bp, Homo sapien
ctctatttgtcagggatttagaaaa

SEQ ID NO: 253213 - DNA, 25 bp, Homo sapien
gatgacttccacatactacagacgt

SEQ ID NO: 253214 - DNA, 25 bp, Homo sapien
ggtgcaggctctcgatacacacaga

SEQ ID NO: 253215 - DNA, 25 bp, Homo sapien
tgtgtatgcgcgtgcacgagcatgt

SEQ ID NO: 253216 - DNA, 25 bp, Homo sapien
ccatcctgtcatggcgtgtgcatgc

SEQ ID NO: 253217 - DNA, 25 bp, Homo sapien
catgtgcaaggttgttcccgtgcca

SEQ ID NO: 253218 - DNA, 25 bp, Homo sapien
gtgcccgtccccctggtctagaaga

SEQ ID NO: 253219 - DNA, 25 bp, Homo sapien
attcgcctgcggagtgatgggtgcc

SEQ ID NO: 253220 - DNA, 25 bp, Homo sapien
ggggggctctgattcgcctgcggag

SEQ ID NO: 253221 - DNA, 25 bp, Homo sapien
ctgcggagtgatgggtgcccgtccc

SEQ ID NO: 253222 - DNA, 25 bp, Homo sapien
ctctgcaggtacagggcgtcctgct

SEQ ID NO: 253223 - DNA, 25 bp, Homo sapien
tctgcaggtacagggcgtcctgctc

SEQ ID NO: 253224 - DNA, 25 bp, Homo sapien
ggggctggcgcatcttcctgcacac

SEQ ID NO: 253225 - DNA, 25 bp, Homo sapien
caggggctggcgcatcttcctgcac

SEQ ID NO: 253226 - DNA, 25 bp, Homo sapien
ctgaaagacagcccctggggtcaga

SEQ ID NO: 253227 - DNA, 25 bp, Homo sapien
gcccctggggtcagacagggggcta

SEQ ID NO: 253228 - DNA, 25 bp, Homo sapien
tgaaagacagcccctggggtcagac

SEQ ID NO: 253229 - DNA, 25 bp, Homo sapien
tggggtcagacagggggctagaagc

SEQ ID NO: 253230 - DNA, 25 bp, Homo sapien
ccaccccgagggtcactgagagcct

SEQ ID NO: 253231 - DNA, 25 bp, Homo sapien
accccgagggtcactgagagcctgg

SEQ ID NO: 253232 - DNA, 25 bp, Homo sapien
gagggtcactgagagcctggccgct

SEQ ID NO: 253233 - DNA, 25 bp, Homo sapien
cccgagggtcactgagagcctggcc

SEQ ID NO: 253234 - DNA, 25 bp, Homo sapien
ccacaaacgtggacagggcggtcca

SEQ ID NO: 253235 - DNA, 25 bp, Homo sapien
cttgatgaaagtgacaatgccgctg

SEQ ID NO: 253236 - DNA, 25 bp, Homo sapien
gaaagtgacaatgccgctgtagagg

SEQ ID NO: 253237 - DNA, 25 bp, Homo sapien
catcaaaggtcgtgtagtcatcgct

SEQ ID NO: 253238 - DNA, 25 bp, Homo sapien
gagggatcaggggggtcatggccag

SEQ ID NO: 253239 - DNA, 25 bp, Homo sapien
ttgctctgagggatcaggggggtca

SEQ ID NO: 253240 - DNA, 25 bp, Homo sapien
catccttgctctgagggatcagggg

SEQ ID NO: 253241 - DNA, 25 bp, Homo sapien
tgagggatcaggggggtcatggcca

SEQ ID NO: 253242 - DNA, 25 bp, Homo sapien
cattcaacaagagtttattgtggtt

SEQ ID NO: 253243 - DNA, 25 bp, Homo sapien
gttgtactgtgagctcggccagagc

SEQ ID NO: 253244 - DNA, 25 bp, Homo sapien
tgtggttgtactgtgagctcggcca

SEQ ID NO: 253245 - DNA, 25 bp, Homo sapien
tttattgtggttgtactgtgagctc

SEQ ID NO: 253246 - DNA, 25 bp, Homo sapien
ttcatggggccatggtctgttacat

SEQ ID NO: 253247 - DNA, 25 bp, Homo sapien
ctgagtggcgggtgtggacggatct

SEQ ID NO: 253248 - DNA, 25 bp, Homo sapien
atctggtccgggatcatttcatggg

SEQ ID NO: 253249 - DNA, 25 bp, Homo sapien
tggacggatctggtccgggatcatt

SEQ ID NO: 253250 - DNA, 25 bp, Homo sapien
gaaattgagaaagaagccggatcct

SEQ ID NO: 253251 - DNA, 25 bp, Homo sapien
cagataatgggagacacgtggacac

SEQ ID NO: 253252 - DNA, 25 bp, Homo sapien
gggcacaagggtacactcggatatc

SEQ ID NO: 253253 - DNA, 25 bp, Homo sapien
tgatgggaatctgtaggccgaacct

SEQ ID NO: 253254 - DNA, 25 bp, Homo sapien
tcgtggctgaccacacacgtgtagg

SEQ ID NO: 253255 - DNA, 25 bp, Homo sapien
aggcccagaacgtggtgctcccggg

SEQ ID NO: 253256 - DNA, 25 bp, Homo sapien
agctgacttctaggctccggctggc

SEQ ID NO: 253257 - DNA, 25 bp, Homo sapien
ggctgggacacgcagcacactccag

SEQ ID NO: 253258 - DNA, 25 bp, Homo sapien
tgcgggggcaaacccagaagtgttc

SEQ ID NO: 253259 - DNA, 25 bp, Homo sapien
gcgggggcaaacccagaagtgttca

SEQ ID NO: 253260 - DNA, 25 bp, Homo sapien
gcgtgcgggggcaaacccagaagtg

SEQ ID NO: 253261 - DNA, 25 bp, Homo sapien
ctgtggaggggggcgtgcgggggca

SEQ ID NO: 253262 - DNA, 25 bp, Homo sapien
ccacgaggccgcctcgggagggtca

SEQ ID NO: 253263 - DNA, 25 bp, Homo sapien
tcagggaaagcttgacgggtgcctg

SEQ ID NO: 253264 - DNA, 25 bp, Homo sapien
gggcgagaagccagacacctcacac

SEQ ID NO: 253265 - DNA, 25 bp, Homo sapien
caggaggatgttggggggcgagaag

SEQ ID NO: 253266 - DNA, 25 bp, Homo sapien
gggcaggcgtaggggtcagcaggct

SEQ ID NO: 253267 - DNA, 25 bp, Homo sapien
ttcctgtggaggatgaccggtgctg

SEQ ID NO: 253268 - DNA, 25 bp, Homo sapien
tgtggaggatgaccggtgctgctgg

SEQ ID NO: 253269 - DNA, 25 bp, Homo sapien
cctgtggaggatgaccggtgctgct

SEQ ID NO: 253270 - DNA, 25 bp, Homo sapien
ccgcgttccacaaggacctgggcag

SEQ ID NO: 253271 - DNA, 25 bp, Homo sapien
tcccaggtcaggtgagcatccttca

SEQ ID NO: 253272 - DNA, 25 bp, Homo sapien
aaggtggctttgtcccggagccaca

SEQ ID NO: 253273 - DNA, 25 bp, Homo sapien
ttagcaggtagacgccaagaggctg

SEQ ID NO: 253274 - DNA, 25 bp, Homo sapien
agagcaaacgagagcagctgtggcc

SEQ ID NO: 253275 - DNA, 25 bp, Homo sapien
gagcaaacgagagcagctgtggccg

SEQ ID NO: 253276 - DNA, 25 bp, Homo sapien
gatctgtgggcaaagacccgttgag

SEQ ID NO: 253277 - DNA, 25 bp, Homo sapien
ggtgccactcttggtcactgtccgg

SEQ ID NO: 253278 - DNA, 25 bp, Homo sapien
gccaggtttttctggtgccgtctcc

SEQ ID NO: 253279 - DNA, 25 bp, Homo sapien
cagactcgggccttcgttgcttcta

SEQ ID NO: 253280 - DNA, 25 bp, Homo sapien
gttttgatagcccaggggtcagaaa

SEQ ID NO: 253281 - DNA, 25 bp, Homo sapien
gttattgggcaataggtgttttgat

SEQ ID NO: 253282 - DNA, 25 bp, Homo sapien
tttgatagcccaggggtcagaaaaa

SEQ ID NO: 253283 - DNA, 25 bp, Homo sapien
ctagttattgggcaataggtgtttt

SEQ ID NO: 253284 - DNA, 25 bp, Homo sapien
ctctctctcttcttgttcctctttc

SEQ ID NO: 253285 - DNA, 25 bp, Homo sapien
tccttctccttcttcttctcttctc

SEQ ID NO: 253286 - DNA, 25 bp, Homo sapien
gtctctctctcttcttgttcctctt

SEQ ID NO: 253287 - DNA, 25 bp, Homo sapien
tctccttcttcttctcttctcctcc

SEQ ID NO: 253288 - DNA, 25 bp, Homo sapien
ggaagcagcgccgtggtctgagtaa

SEQ ID NO: 253289 - DNA, 25 bp, Homo sapien
aagcagcgccgtggtctgagtaaga

SEQ ID NO: 253290 - DNA, 25 bp, Homo sapien
gccgtggtctgagtaagagcacttg

SEQ ID NO: 253291 - DNA, 25 bp, Homo sapien
cagcgccgtggtctgagtaagagca

SEQ ID NO: 253292 - DNA, 25 bp, Homo sapien
tcagagtcacaagcctcagactcct

SEQ ID NO: 253293 - DNA, 25 bp, Homo sapien
cccggccacatggacatctcaggca

SEQ ID NO: 253294 - DNA, 25 bp, Homo sapien
ccccggccacatggacatctcaggc

SEQ ID NO: 253295 - DNA, 25 bp, Homo sapien
aggtcagagtcacaagcctcagact

SEQ ID NO: 253296 - DNA, 25 bp, Homo sapien
tgccctctgcttggggttgtgcagt

SEQ ID NO: 253297 - DNA, 25 bp, Homo sapien
gttgccttggcgaggctgccctctg

SEQ ID NO: 253298 - DNA, 25 bp, Homo sapien
cactgaggaggcctgtgcctttgga

SEQ ID NO: 253299 - DNA, 25 bp, Homo sapien
gctgtggttgccttggcgaggctgc

SEQ ID NO: 253300 - DNA, 25 bp, Homo sapien
tgcctccgtgcacactgagggaagg

SEQ ID NO: 253301 - DNA, 25 bp, Homo sapien
ggtattgggagatgggcctcagaga

SEQ ID NO: 253302 - DNA, 25 bp, Homo sapien
tctgggtgatctccggtgcgaccta

SEQ ID NO: 253303 - DNA, 25 bp, Homo sapien
tgtgggaagcccactagacagtcac

SEQ ID NO: 253304 - DNA, 25 bp, Homo sapien
gcggtgtgctggaccacgcatttgt

SEQ ID NO: 253305 - DNA, 25 bp, Homo sapien
tctccttcttactcttgctggcggt

SEQ ID NO: 253306 - DNA, 25 bp, Homo sapien
atttgtactcgccttggcgccactg

SEQ ID NO: 253307 - DNA, 25 bp, Homo sapien
ccacgcatttgtactcgccttggcg

SEQ ID NO: 253308 - DNA, 25 bp, Homo sapien
tgcttgtcatgtagtagctgtcccg

SEQ ID NO: 253309 - DNA, 25 bp, Homo sapien
gctgtcccgtctttgtatctcaggg

SEQ ID NO: 253310 - DNA, 25 bp, Homo sapien
ccacagggctgttatcctttgggtg

SEQ ID NO: 253311 - DNA, 25 bp, Homo sapien
gaacacatccggagccttggtgggt

SEQ ID NO: 253312 - DNA, 25 bp, Homo sapien
ttccacagctccctttggaactggg

SEQ ID NO: 253313 - DNA, 25 bp, Homo sapien
tgcgctggctgacccagcgctcttt

SEQ ID NO: 253314 - DNA, 25 bp, Homo sapien
cctttcctgggcacgtggctttcct

SEQ ID NO: 253315 - DNA, 25 bp, Homo sapien
tggctttcctcgaaccccctgcgct

SEQ ID NO: 253316 - DNA, 25 bp, Homo sapien
ccctgccggtcgagaaggaagcctg

SEQ ID NO: 253317 - DNA, 25 bp, Homo sapien
ggaagagaaacacgtgccaacaggc

SEQ ID NO: 253318 - DNA, 25 bp, Homo sapien
tgtgagagcacacaactggaggccg

SEQ ID NO: 253319 - DNA, 25 bp, Homo sapien
catatttatttcagggcaacaagcg

SEQ ID NO: 253320 - DNA, 25 bp, Homo sapien
gggcctccgggctagacgtccagcc

SEQ ID NO: 253321 - DNA, 25 bp, Homo sapien
ctccgggctagacgtccagcccagg

SEQ ID NO: 253322 - DNA, 25 bp, Homo sapien
ctgggccccacattcgccctgcgcc

SEQ ID NO: 253323 - DNA, 25 bp, Homo sapien
cgggctagacgtccagcccaggctg

SEQ ID NO: 253324 - DNA, 25 bp, Homo sapien
acaaggtgacggtggtactgtagaa

SEQ ID NO: 253325 - DNA, 25 bp, Homo sapien
gtgacggtggtactgtagaagaggc

SEQ ID NO: 253326 - DNA, 25 bp, Homo sapien
aacaaggtgacggtggtactgtaga

SEQ ID NO: 253327 - DNA, 25 bp, Homo sapien
acggtggtactgtagaagaggctca

SEQ ID NO: 253328 - DNA, 25 bp, Homo sapien
gccctcctcgtcggcgctcacctcc

SEQ ID NO: 253329 - DNA, 25 bp, Homo sapien
cctcctcgtcggcgctcacctcccc

SEQ ID NO: 253330 - DNA, 25 bp, Homo sapien
agccctcctcgtcggcgctcacctc

SEQ ID NO: 253331 - DNA, 25 bp, Homo sapien
tcctcgtcggcgctcacctccccct

SEQ ID NO: 253332 - DNA, 25 bp, Homo sapien
ctccctcttggagcagagtctgcat

SEQ ID NO: 253333 - DNA, 25 bp, Homo sapien
tccagctccctcttggagcagagtc

SEQ ID NO: 253334 - DNA, 25 bp, Homo sapien
aaggccctgactctccagctccctc

SEQ ID NO: 253335 - DNA, 25 bp, Homo sapien
agctccctcttggagcagagtctgc

SEQ ID NO: 253336 - DNA, 25 bp, Homo sapien
catctcaccccgttgacacggttag

SEQ ID NO: 253337 - DNA, 25 bp, Homo sapien
cccgttgacacggttagtttgcatg

SEQ ID NO: 253338 - DNA, 25 bp, Homo sapien
gttgacacggttagtttgcatgcac

SEQ ID NO: 253339 - DNA, 25 bp, Homo sapien
taagatgcaacatctcaccccgttg

SEQ ID NO: 253340 - DNA, 25 bp, Homo sapien
tgccagctgtgtcggacatgaccag

SEQ ID NO: 253341 - DNA, 25 bp, Homo sapien
ctgtgtcggacatgaccagggacac

SEQ ID NO: 253342 - DNA, 25 bp, Homo sapien
caggtgccagctgtgtcggacatga

SEQ ID NO: 253343 - DNA, 25 bp, Homo sapien
ccagctgtgtcggacatgaccaggg

SEQ ID NO: 253344 - DNA, 25 bp, Homo sapien
gcagcaagtagacatcgggcctgtg

SEQ ID NO: 253345 - DNA, 25 bp, Homo sapien
tcaccaggcacgtgatggtggccga

SEQ ID NO: 253346 - DNA, 25 bp, Homo sapien
tcttcggacacggtcaggatgctgt

SEQ ID NO: 253347 - DNA, 25 bp, Homo sapien
tctgcatccactgcacgaagacgtc

SEQ ID NO: 253348 - DNA, 25 bp, Homo sapien
tgggtcacggtgcacgtgaacctct

SEQ ID NO: 253349 - DNA, 25 bp, Homo sapien
cacccacggcgctgaaagtggcatt

SEQ ID NO: 253350 - DNA, 25 bp, Homo sapien
cttcgccattctggcgggtccagga

SEQ ID NO: 253351 - DNA, 25 bp, Homo sapien
agatgttggtgtgggttttcacagc

SEQ ID NO: 253352 - DNA, 25 bp, Homo sapien
ctgtcataggtggtcaggtctgtga

SEQ ID NO: 253353 - DNA, 25 bp, Homo sapien
gaccaggcaggtcaacttggtggac

SEQ ID NO: 253354 - DNA, 25 bp, Homo sapien
cataggtggtcaggtctgtgaccag

SEQ ID NO: 253355 - DNA, 25 bp, Homo sapien
caggcaggtcaacttggtggacttg

SEQ ID NO: 253356 - DNA, 25 bp, Homo sapien
cagtcgctctctttgatggtcagtg

SEQ ID NO: 253357 - DNA, 25 bp, Homo sapien
cacacatggaggacgcattctgctg

SEQ ID NO: 253358 - DNA, 25 bp, Homo sapien
tcaccttgtaggtcgtgggcccaga

SEQ ID NO: 253359 - DNA, 25 bp, Homo sapien
tccacgcggcaggtgaacatgctct

SEQ ID NO: 253360 - DNA, 25 bp, Homo sapien
ctttgttgccgttggggtgctggac

SEQ ID NO: 253361 - DNA, 25 bp, Homo sapien
actttgcacaccacgtgttcgtctg

SEQ ID NO: 253362 - DNA, 25 bp, Homo sapien
tggactttgcacaccacgtgttcgt

SEQ ID NO: 253363 - DNA, 25 bp, Homo sapien
tttgcacaccacgtgttcgtctgtg

SEQ ID NO: 253364 - DNA, 25 bp, Homo sapien
tccaggagaaagtgatggagtcggg

SEQ ID NO: 253365 - DNA, 25 bp, Homo sapien
tgtgaggtggctgcgtacttgcccc

SEQ ID NO: 253366 - DNA, 25 bp, Homo sapien
tgctgatgtcagagttgttcttgta

SEQ ID NO: 253367 - DNA, 25 bp, Homo sapien
ccctgcatgacgtccttggaaggca

SEQ ID NO: 253368 - DNA, 25 bp, Homo sapien
ctgtgcgaggcagccaacggccacg

SEQ ID NO: 253369 - DNA, 25 bp, Homo sapien
gctcgtatccgacggggaattctca

SEQ ID NO: 253370 - DNA, 25 bp, Homo sapien
tgcgaggcagccaacggccacgctg

SEQ ID NO: 253371 - DNA, 25 bp, Homo sapien
aacggccacgctgctcgtatccgac

SEQ ID NO: 253372 - DNA, 25 bp, Homo sapien
gaaaagggttggggcggatgcactc

SEQ ID NO: 253373 - DNA, 25 bp, Homo sapien
gctgagtggcgttctgagtgccctc

SEQ ID NO: 253374 - DNA, 25 bp, Homo sapien
cactacttgcgtcccgctgtggctg

SEQ ID NO: 253375 - DNA, 25 bp, Homo sapien
agcccagactgtcatggctatcagg

SEQ ID NO: 253376 - DNA, 25 bp, Homo sapien
cctgctcagaatggctgagggctca

SEQ ID NO: 253377 - DNA, 25 bp, Homo sapien
aggcagccaatagagtccctccagc

SEQ ID NO: 253378 - DNA, 25 bp, Homo sapien
gaagattggcccagtgccatgtcct

SEQ ID NO: 253379 - DNA, 25 bp, Homo sapien
cagctgaggctatccatctatgtcc

SEQ ID NO: 253380 - DNA, 25 bp, Homo sapien
gccagctcaatccagttcatcccag

SEQ ID NO: 253381 - DNA, 25 bp, Homo sapien
agtttggctcaacccagcttggctc

SEQ ID NO: 253382 - DNA, 25 bp, Homo sapien
ccagtttggctcaacccagcttggc

SEQ ID NO: 253383 - DNA, 25 bp, Homo sapien
agcccagtttggctcaacccagctt

SEQ ID NO: 253384 - DNA, 25 bp, Homo sapien
gcccagtttggctcaacccagcttg

SEQ ID NO: 253385 - DNA, 25 bp, Homo sapien
tagcttggctcaacacagctcagct

SEQ ID NO: 253386 - DNA, 25 bp, Homo sapien
gcttggctcaacacagctcagctca

SEQ ID NO: 253387 - DNA, 25 bp, Homo sapien
cagcccagcctagcttggctcaaca

SEQ ID NO: 253388 - DNA, 25 bp, Homo sapien
agcctagcttggctcaacacagctc

SEQ ID NO: 253389 - DNA, 25 bp, Homo sapien
agcctagccttgctcagcccagctc

SEQ ID NO: 253390 - DNA, 25 bp, Homo sapien
cagcctagccttgctcagcccagct

SEQ ID NO: 253391 - DNA, 25 bp, Homo sapien
tcagcctagccttgctcagcccagc

SEQ ID NO: 253392 - DNA, 25 bp, Homo sapien
ggtgcaacttagcccagctcagctc

SEQ ID NO: 253393 - DNA, 25 bp, Homo sapien
gtgcaacttagcccagctcagctca

SEQ ID NO: 253394 - DNA, 25 bp, Homo sapien
tgcaacttagcccagctcagctcag

SEQ ID NO: 253395 - DNA, 25 bp, Homo sapien
cagccttgtttagtctaggtcagct

SEQ ID NO: 253396 - DNA, 25 bp, Homo sapien
taggtcagcttaggtcagttttgcc

SEQ ID NO: 253397 - DNA, 25 bp, Homo sapien
tgtttagtctaggtcagcttaggtc

SEQ ID NO: 253398 - DNA, 25 bp, Homo sapien
tcagcttaggtcagttttgcccatc

SEQ ID NO: 253399 - DNA, 25 bp, Homo sapien
tactttcaagggtgcgatgatgacc

SEQ ID NO: 253400 - DNA, 25 bp, Homo sapien
cccttctagtggaaataagacgtca

SEQ ID NO: 253401 - DNA, 25 bp, Homo sapien
tctgagtctgcagtaaacccctgcc

SEQ ID NO: 253402 - DNA, 25 bp, Homo sapien
taaatcgctttggaaggcatgggct

SEQ ID NO: 253403 - DNA, 25 bp, Homo sapien
tttagaaacgcaaattgtccaggtg

SEQ ID NO: 253404 - DNA, 25 bp, Homo sapien
gacgccgcatcggtgattcggaaca

SEQ ID NO: 253405 - DNA, 25 bp, Homo sapien
tggtcactgcgagccttgcaaagct

SEQ ID NO: 253406 - DNA, 25 bp, Homo sapien
tcagcctcgccttattttagaaacg

SEQ ID NO: 253407 - DNA, 25 bp, Homo sapien
tatgatggtcaaaacgcagtcccgc

SEQ ID NO: 253408 - DNA, 25 bp, Homo sapien
ggttgacacacagcgcacctcataa

SEQ ID NO: 253409 - DNA, 25 bp, Homo sapien
gatcttgcagtcctacagacaccgc

SEQ ID NO: 253410 - DNA, 25 bp, Homo sapien
taaaatagactctcgcggtgacctg

SEQ ID NO: 253411 - DNA, 25 bp, Homo sapien
ggctcagttactccatcagacgcac

SEQ ID NO: 253412 - DNA, 25 bp, Homo sapien
ccaaaggcatcggaaaatccacaga

SEQ ID NO: 253413 - DNA, 25 bp, Homo sapien
tctcgtccaaatgtggctccccaag

SEQ ID NO: 253414 - DNA, 25 bp, Homo sapien
agaggctcccagatcctcaaggcac

SEQ ID NO: 253415 - DNA, 25 bp, Homo sapien
tggtccctttgccccagacgtccat

SEQ ID NO: 253416 - DNA, 25 bp, Homo sapien
gccttggagcgggacagagtcccac

SEQ ID NO: 253417 - DNA, 25 bp, Homo sapien
aagccagaccactgtcggcctggga

SEQ ID NO: 253418 - DNA, 25 bp, Homo sapien
acgacagcccctgagaatgctccag

SEQ ID NO: 253419 - DNA, 25 bp, Homo sapien
gaagtccaactgcaagcagacggct

SEQ ID NO: 253420 - DNA, 25 bp, Homo sapien
cagctgccgacatctgtggccggac

SEQ ID NO: 253421 - DNA, 25 bp, Homo sapien
acaggctgggttcccattcgaaggg

SEQ ID NO: 253422 - DNA, 25 bp, Homo sapien
tgccgacatctgtggccggacttgg

SEQ ID NO: 253423 - DNA, 25 bp, Homo sapien
tgagtctccctaagtggactcagag

SEQ ID NO: 253424 - DNA, 25 bp, Homo sapien
tgtgacaacaatgccaggaccccag

SEQ ID NO: 253425 - DNA, 25 bp, Homo sapien
gtcacattgtgacaacaatgccagg

SEQ ID NO: 253426 - DNA, 25 bp, Homo sapien
attgtgacaacaatgccaggacccc

SEQ ID NO: 253427 - DNA, 25 bp, Homo sapien
ggcaagaactggcgccccgctacgt

SEQ ID NO: 253428 - DNA, 25 bp, Homo sapien
gaaggagcatctggagcccttgccc

SEQ ID NO: 253429 - DNA, 25 bp, Homo sapien
accccagaggcctagggtggccctg

SEQ ID NO: 253430 - DNA, 25 bp, Homo sapien
ggcaggagacccagcacccttattt

SEQ ID NO: 253431 - DNA, 25 bp, Homo sapien
tctgtgtggccgctgttgcctcagg

SEQ ID NO: 253432 - DNA, 25 bp, Homo sapien
cagccagccccgtgtcccaaggtca

SEQ ID NO: 253433 - DNA, 25 bp, Homo sapien
cccaaggtcattttgtccccagcac

SEQ ID NO: 253434 - DNA, 25 bp, Homo sapien
gtccccagcacaagcatgactctgc

SEQ ID NO: 253435 - DNA, 25 bp, Homo sapien
cattaaggggtgcacaaaaacctga

SEQ ID NO: 253436 - DNA, 25 bp, Homo sapien
atggcccagcgcagaccaaggagcc

SEQ ID NO: 253437 - DNA, 25 bp, Homo sapien
tgctgaacgtggtcccaaacagccg

SEQ ID NO: 253438 - DNA, 25 bp, Homo sapien
aaggagccccggagggccccacatg

SEQ ID NO: 253439 - DNA, 25 bp, Homo sapien
aaggccttctgctgaacgtggtccc

SEQ ID NO: 253440 - DNA, 25 bp, Homo sapien
ggacactcgaatgggtcacatggcc

SEQ ID NO: 253441 - DNA, 25 bp, Homo sapien
aggacactcgaatgggtcacatggc

SEQ ID NO: 253442 - DNA, 25 bp, Homo sapien
tgtgcccgtgcaggacactcgaatg

SEQ ID NO: 253443 - DNA, 25 bp, Homo sapien
agacacaaacctgtgcccgtgcagg

SEQ ID NO: 253444 - DNA, 25 bp, Homo sapien
cacggccccagagatcgaagtacca

SEQ ID NO: 253445 - DNA, 25 bp, Homo sapien
gccccagagatcgaagtaccagtag

SEQ ID NO: 253446 - DNA, 25 bp, Homo sapien
gatcgaagtaccagtagcacagcct

SEQ ID NO: 253447 - DNA, 25 bp, Homo sapien
cccagagatcgaagtaccagtagca

SEQ ID NO: 253448 - DNA, 25 bp, Homo sapien
tgaccagggtgccctggccccagtg

SEQ ID NO: 253449 - DNA, 25 bp, Homo sapien
tgaggagacggtgaccagggtgccc

SEQ ID NO: 253450 - DNA, 25 bp, Homo sapien
ggagacggtgaccagggtgccctgg

SEQ ID NO: 253451 - DNA, 25 bp, Homo sapien
ctgaggagacggtgaccagggtgcc

SEQ ID NO: 253452 - DNA, 25 bp, Homo sapien
tccccagttagcacagtggttctca

SEQ ID NO: 253453 - DNA, 25 bp, Homo sapien
acagtggttctcagctcagccaaaa

SEQ ID NO: 253454 - DNA, 25 bp, Homo sapien
cacagtggttctcagctcagccaaa

SEQ ID NO: 253455 - DNA, 25 bp, Homo sapien
ccagttagcacagtggttctcagct

SEQ ID NO: 253456 - DNA, 25 bp, Homo sapien
gggctgatgtggctgcggtctccag

SEQ ID NO: 253457 - DNA, 25 bp, Homo sapien
ccagccctcaaccctgccagtcact

SEQ ID NO: 253458 - DNA, 25 bp, Homo sapien
tgttagccccaaaacacgtgggaga

SEQ ID NO: 253459 - DNA, 25 bp, Homo sapien
ctgttagccccaaaacacgtgggag

SEQ ID NO: 253460 - DNA, 25 bp, Homo sapien
gggagaccccagccctcaaccctgc

SEQ ID NO: 253461 - DNA, 25 bp, Homo sapien
tgccaataatttgctgctgttaaga

SEQ ID NO: 253462 - DNA, 25 bp, Homo sapien
ggagtcttgtgccaataatttgctg

SEQ ID NO: 253463 - DNA, 25 bp, Homo sapien
cacgaggggccgagaacccatttgt

SEQ ID NO: 253464 - DNA, 25 bp, Homo sapien
ccacgaggggccgagaacccatttg

SEQ ID NO: 253465 - DNA, 25 bp, Homo sapien
agggggctgggattcccgcctggct

SEQ ID NO: 253466 - DNA, 25 bp, Homo sapien
actggcagccccagctagcggcacc

SEQ ID NO: 253467 - DNA, 25 bp, Homo sapien
gctagcggcacccacagagcctgaa

SEQ ID NO: 253468 - DNA, 25 bp, Homo sapien
gcggctgtggctcaccttaggtgtg

SEQ ID NO: 253469 - DNA, 25 bp, Homo sapien
tgaggatcgtagagcacagcttggc

SEQ ID NO: 253470 - DNA, 25 bp, Homo sapien
atgaggatcgtagagcacagcttgg

SEQ ID NO: 253471 - DNA, 25 bp, Homo sapien
gatgaggatcgtagagcacagcttg

SEQ ID NO: 253472 - DNA, 25 bp, Homo sapien
gagggatgaggatcgtagagcacag

SEQ ID NO: 253473 - DNA, 25 bp, Homo sapien
acgacaatggcaggtgtttctacat

SEQ ID NO: 253474 - DNA, 25 bp, Homo sapien
ccacaagtggtctttgccaggtggg

SEQ ID NO: 253475 - DNA, 25 bp, Homo sapien
caggtgaggggaactgtctgcggcc

SEQ ID NO: 253476 - DNA, 25 bp, Homo sapien
aggtgtttctacatgggcaggtgag

SEQ ID NO: 253477 - DNA, 25 bp, Homo sapien
gggccgtcctgatccagatgtgcgt

SEQ ID NO: 253478 - DNA, 25 bp, Homo sapien
tgcgttcccgctgtgatgctgctga

SEQ ID NO: 253479 - DNA, 25 bp, Homo sapien
gtccccatgggccatcgcgtgttct

SEQ ID NO: 253480 - DNA, 25 bp, Homo sapien
cccatgggccatcgcgtgttctggg

SEQ ID NO: 253481 - DNA, 25 bp, Homo sapien
tggcgccgtgtcctcgatcaaaatc

SEQ ID NO: 253482 - DNA, 25 bp, Homo sapien
ttggccatctgtttcatggtctctg

SEQ ID NO: 253483 - DNA, 25 bp, Homo sapien
tgtggtagccaccatacccatggcg

SEQ ID NO: 253484 - DNA, 25 bp, Homo sapien
catcatggtcacttgtgggcctgtc

SEQ ID NO: 253485 - DNA, 25 bp, Homo sapien
cttccttggggatatacagctctgt

SEQ ID NO: 253486 - DNA, 25 bp, Homo sapien
agctctgtgcctgctccacatcagg

SEQ ID NO: 253487 - DNA, 25 bp, Homo sapien
ctgctccacatcaggccccaggagc

SEQ ID NO: 253488 - DNA, 25 bp, Homo sapien
ttccttggggatatacagctctgtg

SEQ ID NO: 253489 - DNA, 25 bp, Homo sapien
ggaatagcagtcaccaccacaatat

SEQ ID NO: 253490 - DNA, 25 bp, Homo sapien
atagcagtcaccaccacaatatgct

SEQ ID NO: 253491 - DNA, 25 bp, Homo sapien
aatagcagtcaccaccacaatatgc

SEQ ID NO: 253492 - DNA, 25 bp, Homo sapien
gaatagcagtcaccaccacaatatg

SEQ ID NO: 253493 - DNA, 25 bp, Homo sapien
ctggaggccgatttctttcagtgcc

SEQ ID NO: 253494 - DNA, 25 bp, Homo sapien
ggaagacttgggtgagcctttgtcc

SEQ ID NO: 253495 - DNA, 25 bp, Homo sapien
agacttgggtgagcctttgtcctgg

SEQ ID NO: 253496 - DNA, 25 bp, Homo sapien
tggaggccgatttctttcagtgcct

SEQ ID NO: 253497 - DNA, 25 bp, Homo sapien
gcggcaagtgcagcaggtagaaaag

SEQ ID NO: 253498 - DNA, 25 bp, Homo sapien
ggttgtttgggtgggcggcaagtgc

SEQ ID NO: 253499 - DNA, 25 bp, Homo sapien
cagggttgtttgggtgggcggcaag

SEQ ID NO: 253500 - DNA, 25 bp, Homo sapien
ttgggtgggcggcaagtgcagcagg

SEQ ID NO: 253501 - DNA, 25 bp, Homo sapien
catgggaaccggcaggacatgggtt

SEQ ID NO: 253502 - DNA, 25 bp, Homo sapien
tcacggtggtcgttccagttatacc

SEQ ID NO: 253503 - DNA, 25 bp, Homo sapien
ttggacacagtttttctcacggtgg

SEQ ID NO: 253504 - DNA, 25 bp, Homo sapien
gctgttcagaatccgaccaggcgcc

SEQ ID NO: 253505 - DNA, 25 bp, Homo sapien
caggaggtgctggaacgaggctggt

SEQ ID NO: 253506 - DNA, 25 bp, Homo sapien
cctggcggatgctgccctcttgatt

SEQ ID NO: 253507 - DNA, 25 bp, Homo sapien
tgctggaacgaggctggtgtctaca

SEQ ID NO: 253508 - DNA, 25 bp, Homo sapien
tgtgcgggagtcctgcctgttggga

SEQ ID NO: 253509 - DNA, 25 bp, Homo sapien
caggaattggctgttggaactgggg

SEQ ID NO: 253510 - DNA, 25 bp, Homo sapien
aattggctgttggaactggggcagc

SEQ ID NO: 253511 - DNA, 25 bp, Homo sapien
gaattggctgttggaactggggcag

SEQ ID NO: 253512 - DNA, 25 bp, Homo sapien
ggaattggctgttggaactggggca

SEQ ID NO: 253513 - DNA, 25 bp, Homo sapien
ccccaaacgtaatcataataccaca

SEQ ID NO: 253514 - DNA, 25 bp, Homo sapien
aacgtaatcataataccacagtgac

SEQ ID NO: 253515 - DNA, 25 bp, Homo sapien
tcacttcaaacctaccgccaggcct

SEQ ID NO: 253516 - DNA, 25 bp, Homo sapien
agacctcacttcaaacctaccgcca

SEQ ID NO: 253517 - DNA, 25 bp, Homo sapien
gggccccatatcttgctccttcatg

SEQ ID NO: 253518 - DNA, 25 bp, Homo sapien
catctgtgcctgtatcgggggcccc

SEQ ID NO: 253519 - DNA, 25 bp, Homo sapien
cagacgttcctctcagggtgtgggc

SEQ ID NO: 253520 - DNA, 25 bp, Homo sapien
ccaggcccagttgttggacgtcgtg

SEQ ID NO: 253521 - DNA, 25 bp, Homo sapien
agggatgaggatcatagaggacaac

SEQ ID NO: 253522 - DNA, 25 bp, Homo sapien
tagaggacaacctggcagcttctgt

SEQ ID NO: 253523 - DNA, 25 bp, Homo sapien
gatcatagaggacaacctggcagct

SEQ ID NO: 253524 - DNA, 25 bp, Homo sapien
tgaggatcatagaggacaacctggc

SEQ ID NO: 253525 - DNA, 25 bp, Homo sapien
tgacatcgcctgacaataaccacac

SEQ ID NO: 253526 - DNA, 25 bp, Homo sapien
cctggttgctgctatgggcggcacc

SEQ ID NO: 253527 - DNA, 25 bp, Homo sapien
ggtaatcgtagccactatatccacc

SEQ ID NO: 253528 - DNA, 25 bp, Homo sapien
ggcaccactgtggtaatcgtagcca

SEQ ID NO: 253529 - DNA, 25 bp, Homo sapien
ggtgagctcctatgtggcccagtgt

SEQ ID NO: 253530 - DNA, 25 bp, Homo sapien
tggtgagctcctatgtggcccagtg

SEQ ID NO: 253531 - DNA, 25 bp, Homo sapien
agctcctatgtggcccagtgtgggc

SEQ ID NO: 253532 - DNA, 25 bp, Homo sapien
tgagctcctatgtggcccagtgtgg

SEQ ID NO: 253533 - DNA, 25 bp, Homo sapien
gggcctcgaggactctctctacagc

SEQ ID NO: 253534 - DNA, 25 bp, Homo sapien
tgggcatggctccttcttaggggcc

SEQ ID NO: 253535 - DNA, 25 bp, Homo sapien
cgagggtcccggcagaactgggcat

SEQ ID NO: 253536 - DNA, 25 bp, Homo sapien
actcctgtcggcctggccgagggtc

SEQ ID NO: 253537 - DNA, 25 bp, Homo sapien
ggtgtttctctagtggcaggtgagg

SEQ ID NO: 253538 - DNA, 25 bp, Homo sapien
gggctccacgagtggtcttttccag

SEQ ID NO: 253539 - DNA, 25 bp, Homo sapien
tttccaggtggggacgacaatggca

SEQ ID NO: 253540 - DNA, 25 bp, Homo sapien
ggtgaggggaactgtccagggcctg

SEQ ID NO: 253541 - DNA, 25 bp, Homo sapien
aggacggccgggcaggatgagcgac

SEQ ID NO: 253542 - DNA, 25 bp, Homo sapien
tattgacagcggtgctgcgtcctgg

SEQ ID NO: 253543 - DNA, 25 bp, Homo sapien
ctgaatgtgggaggcgagtcctctg

SEQ ID NO: 253544 - DNA, 25 bp, Homo sapien
atgagcgacgcccagctccggctgt

SEQ ID NO: 253545 - DNA, 25 bp, Homo sapien
ctgtggcgggaagcttccaggcatg

SEQ ID NO: 253546 - DNA, 25 bp, Homo sapien
ggctgtggcgggaagcttccaggca

SEQ ID NO: 253547 - DNA, 25 bp, Homo sapien
gctgtggcgggaagcttccaggcat

SEQ ID NO: 253548 - DNA, 25 bp, Homo sapien
agggctgtggcgggaagcttccagg

SEQ ID NO: 253549 - DNA, 25 bp, Homo sapien
tataataaccagtcaaaatatcgta

SEQ ID NO: 253550 - DNA, 25 bp, Homo sapien
ataataaccagtcaaaatatcgtaa

SEQ ID NO: 253551 - DNA, 25 bp, Homo sapien
aaacccaggtcaggagacgttcagg

SEQ ID NO: 253552 - DNA, 25 bp, Homo sapien
attctaaacctaccggcaggcctgg

SEQ ID NO: 253553 - DNA, 25 bp, Homo sapien
taaagcttgggacaggcgaggtcca

SEQ ID NO: 253554 - DNA, 25 bp, Homo sapien
taagttgcccacaaatcacagagtc

SEQ ID NO: 253555 - DNA, 25 bp, Homo sapien
ttcactgactgtgccgtcctccggg

SEQ ID NO: 253556 - DNA, 25 bp, Homo sapien
gtcctccgggatatatggccctgcg

SEQ ID NO: 253557 - DNA, 25 bp, Homo sapien
gactgtgccgtcctccgggatatat

SEQ ID NO: 253558 - DNA, 25 bp, Homo sapien
tggcccgtgcacaggtggtgctggc

SEQ ID NO: 253559 - DNA, 25 bp, Homo sapien
gcatacaccattagtacaatatcct

SEQ ID NO: 253560 - DNA, 25 bp, Homo sapien
ggtatagcatacaccattagtacaa

SEQ ID NO: 253561 - DNA, 25 bp, Homo sapien
tatagcatacaccattagtacaata

SEQ ID NO: 253562 - DNA, 25 bp, Homo sapien
tagcatacaccattagtacaatatc

SEQ ID NO: 253563 - DNA, 25 bp, Homo sapien
gaggtttggtgttagactccgttga

SEQ ID NO: 253564 - DNA, 25 bp, Homo sapien
actccgttgactgggcgtcttcagg

SEQ ID NO: 253565 - DNA, 25 bp, Homo sapien
atgactccgttactacccatcggcc

SEQ ID NO: 253566 - DNA, 25 bp, Homo sapien
aggcctgtgagaggactgggatgtc

SEQ ID NO: 253567 - DNA, 25 bp, Homo sapien
gagccgctgtggaggtattccactg

SEQ ID NO: 253568 - DNA, 25 bp, Homo sapien
tccactgtgagagggtcccgcacag

SEQ ID NO: 253569 - DNA, 25 bp, Homo sapien
gagggtcccgcacagattctcccat

SEQ ID NO: 253570 - DNA, 25 bp, Homo sapien
ctgagccgctgtggaggtattccac

SEQ ID NO: 253571 - DNA, 25 bp, Homo sapien
gggtggtcacttgtgggcttgtctg

SEQ ID NO: 253572 - DNA, 25 bp, Homo sapien
ggtggtcacttgtgggcttgtctgt

SEQ ID NO: 253573 - DNA, 25 bp, Homo sapien
gtggtcacttgtgggcttgtctgtt

SEQ ID NO: 253574 - DNA, 25 bp, Homo sapien
tgcccctggcttaggtggacagtgt

SEQ ID NO: 253575 - DNA, 25 bp, Homo sapien
tgtaattttcagttggtgccaaccc

SEQ ID NO: 253576 - DNA, 25 bp, Homo sapien
aaatcacgcaggcatcattcaggct

SEQ ID NO: 253577 - DNA, 25 bp, Homo sapien
ggtgaagcccaggtcaggtgaaacc

SEQ ID NO: 253578 - DNA, 25 bp, Homo sapien
gcattgtcatgaactcaaccacaga

SEQ ID NO: 253579 - DNA, 25 bp, Homo sapien
cttttcagagtgtctgtgcccagcc

SEQ ID NO: 253580 - DNA, 25 bp, Homo sapien
gaacctgccatcgtttatttgcctg

SEQ ID NO: 253581 - DNA, 25 bp, Homo sapien
tgtactttgcccttgcatcaggcac

SEQ ID NO: 253582 - DNA, 25 bp, Homo sapien
tctcctgctgatactatgatttcca

SEQ ID NO: 253583 - DNA, 25 bp, Homo sapien
tttggtcaagggaagtacttgctgg

SEQ ID NO: 253584 - DNA, 25 bp, Homo sapien
gcgggagtcactgagtcccctcttg

SEQ ID NO: 253585 - DNA, 25 bp, Homo sapien
tgtctgaaactcagggtgtgttgga

SEQ ID NO: 253586 - DNA, 25 bp, Homo sapien
gctccgtggctgttcagtggtggct

SEQ ID NO: 253587 - DNA, 25 bp, Homo sapien
tgttctgtttccacgcggtgttctg

SEQ ID NO: 253588 - DNA, 25 bp, Homo sapien
gggctccgtggctgttcagtggtgg

SEQ ID NO: 253589 - DNA, 25 bp, Homo sapien
tccacgcggtgttctggggccgcca

SEQ ID NO: 253590 - DNA, 25 bp, Homo sapien
tggaggccgatttctttcagtgcct

SEQ ID NO: 253591 - DNA, 25 bp, Homo sapien
ctggaggccgatttctttcagtgcc

SEQ ID NO: 253592 - DNA, 25 bp, Homo sapien
cttgggtgagcctttgtcctggaaa

SEQ ID NO: 253593 - DNA, 25 bp, Homo sapien
tgggtgagcctttgtcctggaaata

SEQ ID NO: 253594 - DNA, 25 bp, Homo sapien
gggtgagcctttgtcctggaaatac

SEQ ID NO: 253595 - DNA, 25 bp, Homo sapien
gacttgggtgagcctttgtcctgga

SEQ ID NO: 253596 - DNA, 25 bp, Homo sapien
aggagaggaagagctcgagttgtgg

SEQ ID NO: 253597 - DNA, 25 bp, Homo sapien
agtgcacggtcagtgccatggctca

SEQ ID NO: 253598 - DNA, 25 bp, Homo sapien
gaggaagagctcgagttgtgggcag

SEQ ID NO: 253599 - DNA, 25 bp, Homo sapien
gcagggtcagagtgtccaggaggaa

SEQ ID NO: 253600 - DNA, 25 bp, Homo sapien
cctggagtctgctctgactctggac

SEQ ID NO: 253601 - DNA, 25 bp, Homo sapien
ctgcactagaccctcgcctggaggg

SEQ ID NO: 253602 - DNA, 25 bp, Homo sapien
ctgcagcgtccctggagtctgctct

SEQ ID NO: 253603 - DNA, 25 bp, Homo sapien
gggcggcttcctagcctgcagcgtc

SEQ ID NO: 253604 - DNA, 25 bp, Homo sapien
gctctccccggggtatgtgactgcc

SEQ ID NO: 253605 - DNA, 25 bp, Homo sapien
tcctctcctgggcaacattggctgc

SEQ ID NO: 253606 - DNA, 25 bp, Homo sapien
tgcttctatgatggtgaacgggcag

SEQ ID NO: 253607 - DNA, 25 bp, Homo sapien
tgcttgctgtggctctccccggggt

SEQ ID NO: 253608 - DNA, 25 bp, Homo sapien
ggcgacgtataccaggtgtcccacc

SEQ ID NO: 253609 - DNA, 25 bp, Homo sapien
ctggcgacgtataccaggtgtccca

SEQ ID NO: 253610 - DNA, 25 bp, Homo sapien
tcccgatacggcaaccaccacggac

SEQ ID NO: 253611 - DNA, 25 bp, Homo sapien
atggggcctcccgatacggcaacca

SEQ ID NO: 253612 - DNA, 25 bp, Homo sapien
gtcaaggcaggtggcttcgtccctt

SEQ ID NO: 253613 - DNA, 25 bp, Homo sapien
ggagtaagctccgtcaaggcaggtg

SEQ ID NO: 253614 - DNA, 25 bp, Homo sapien
catatctcatgataacaccctatca

SEQ ID NO: 253615 - DNA, 25 bp, Homo sapien
catgataacaccctatcatgaaaac

SEQ ID NO: 253616 - DNA, 25 bp, Homo sapien
catcatatctcatgataacacccta

SEQ ID NO: 253617 - DNA, 25 bp, Homo sapien
ctcatgataacaccctatcatgaaa

SEQ ID NO: 253618 - DNA, 25 bp, Homo sapien
caagataatggaatcttctctacag

SEQ ID NO: 253619 - DNA, 25 bp, Homo sapien
tgcaggtgaccatttccaatttgtg

SEQ ID NO: 253620 - DNA, 25 bp, Homo sapien
catatcacataggaacctaatagga

SEQ ID NO: 253621 - DNA, 25 bp, Homo sapien
tcagtaaccctttatcagttggtaa

SEQ ID NO: 253622 - DNA, 25 bp, Homo sapien
ccaggaggttcacagaacccaaaat

SEQ ID NO: 253623 - DNA, 25 bp, Homo sapien
gaacttctttgaggcacactgtcaa

SEQ ID NO: 253624 - DNA, 25 bp, Homo sapien
gggttttctatgatctctgttgctg

SEQ ID NO: 253625 - DNA, 25 bp, Homo sapien
tgaggcacactgtcaaaagtcaagt

SEQ ID NO: 253626 - DNA, 25 bp, Homo sapien
ggtctgggccctgcgctggtagtgc

SEQ ID NO: 253627 - DNA, 25 bp, Homo sapien
ctgggccctgcgctggtagtgctgg

SEQ ID NO: 253628 - DNA, 25 bp, Homo sapien
ggccctgcgctggtagtgctgggtg

SEQ ID NO: 253629 - DNA, 25 bp, Homo sapien
tggtctgggccctgcgctggtagtg

SEQ ID NO: 253630 - DNA, 25 bp, Homo sapien
cagtcctggacctgactgctgcagc

SEQ ID NO: 253631 - DNA, 25 bp, Homo sapien
cactgtccccggagatggcacaggt

SEQ ID NO: 253632 - DNA, 25 bp, Homo sapien
gatccagttccaagcagcactgttg

SEQ ID NO: 253633 - DNA, 25 bp, Homo sapien
gatggttattcgacttttcacagat

SEQ ID NO: 253634 - DNA, 25 bp, Homo sapien
ctgctgtgaatacggcatctccctg

SEQ ID NO: 253635 - DNA, 25 bp, Homo sapien
caaagtgaaacacccctcagtctgt

SEQ ID NO: 253636 - DNA, 25 bp, Homo sapien
tgctgtgaatacggcatctccctga

SEQ ID NO: 253637 - DNA, 25 bp, Homo sapien
aaagtgaaacacccctcagtctgtg

SEQ ID NO: 253638 - DNA, 25 bp, Homo sapien
ggcccagcacgggcaggaagatgag

SEQ ID NO: 253639 - DNA, 25 bp, Homo sapien
catgggaggcccagcacgggcagga

SEQ ID NO: 253640 - DNA, 25 bp, Homo sapien
cccagcacgggcaggaagatgagga

SEQ ID NO: 253641 - DNA, 25 bp, Homo sapien
ggaggcccagcacgggcaggaagat

SEQ ID NO: 253642 - DNA, 25 bp, Homo sapien
ggagctctggtgactgccctggtca

SEQ ID NO: 253643 - DNA, 25 bp, Homo sapien
tggagctctggtgactgccctggtc

SEQ ID NO: 253644 - DNA, 25 bp, Homo sapien
atgcgtcacccacaggcgttgcatc

SEQ ID NO: 253645 - DNA, 25 bp, Homo sapien
tgcgtcacccacaggcgttgcatct

SEQ ID NO: 253646 - DNA, 25 bp, Homo sapien
cgtcacccacaggcgttgcatctgt

SEQ ID NO: 253647 - DNA, 25 bp, Homo sapien
gcgtcacccacaggcgttgcatctg

SEQ ID NO: 253648 - DNA, 25 bp, Homo sapien
caagggagggctcggagtgcactgg

SEQ ID NO: 253649 - DNA, 25 bp, Homo sapien
tcggagtgcactggggaaaggccgc

SEQ ID NO: 253650 - DNA, 25 bp, Homo sapien
tgcactggggaaaggccgcccccag

SEQ ID NO: 253651 - DNA, 25 bp, Homo sapien
gccaagggagggctcggagtgcact

SEQ ID NO: 253652 - DNA, 25 bp, Homo sapien
cctgcattctcggtctacagcccat

SEQ ID NO: 253653 - DNA, 25 bp, Homo sapien
gactatggccccgatagacaaagac

SEQ ID NO: 253654 - DNA, 25 bp, Homo sapien
atagacaaagactttcccgcctgca

SEQ ID NO: 253655 - DNA, 25 bp, Homo sapien
tgtagaacctgactatggccccgat

SEQ ID NO: 253656 - DNA, 25 bp, Homo sapien
tttccttggtagcccatttcatgca

SEQ ID NO: 253657 - DNA, 25 bp, Homo sapien
ttccttggtagcccatttcatgcac

SEQ ID NO: 253658 - DNA, 25 bp, Homo sapien
atttccttggtagcccatttcatgc

SEQ ID NO: 253659 - DNA, 25 bp, Homo sapien
cagctgctggtgctataagaacggt

SEQ ID NO: 253660 - DNA, 25 bp, Homo sapien
tccacgcctcgttcttgagagggcc

SEQ ID NO: 253661 - DNA, 25 bp, Homo sapien
ctataagaacggtcacagctgagca

SEQ ID NO: 253662 - DNA, 25 bp, Homo sapien
cagacaaaggtgtgcgtcccatggg

SEQ ID NO: 253663 - DNA, 25 bp, Homo sapien
tacagatggagagttggcccagaaa

SEQ ID NO: 253664 - DNA, 25 bp, Homo sapien
tctgtgaggacctcaccagccctgg

SEQ ID NO: 253665 - DNA, 25 bp, Homo sapien
aactgggccttggatgtgtctctac

SEQ ID NO: 253666 - DNA, 25 bp, Homo sapien
tgtctcccacgggaatgtgcggccc

SEQ ID NO: 253667 - DNA, 25 bp, Homo sapien
aacctgggacagaagccaatgcctc

SEQ ID NO: 253668 - DNA, 25 bp, Homo sapien
ctgggacagaagccaatgcctcccg

SEQ ID NO: 253669 - DNA, 25 bp, Homo sapien
cttcccctgatcctgtttcatagat

SEQ ID NO: 253670 - DNA, 25 bp, Homo sapien
ccctgtgatgtgaaacaggaccctg

SEQ ID NO: 253671 - DNA, 25 bp, Homo sapien
cctgatagttcgcacatttttggct

SEQ ID NO: 253672 - DNA, 25 bp, Homo sapien
gatagttcgcacatttttggctgtc

SEQ ID NO: 253673 - DNA, 25 bp, Homo sapien
ctgatagttcgcacatttttggctg

SEQ ID NO: 253674 - DNA, 25 bp, Homo sapien
tagttcgcacatttttggctgtccc

SEQ ID NO: 253675 - DNA, 25 bp, Homo sapien
ccgcacttctgagggtggcagttgt

SEQ ID NO: 253676 - DNA, 25 bp, Homo sapien
agactcctctatgaccgcacttctg

SEQ ID NO: 253677 - DNA, 25 bp, Homo sapien
tctatgaccgcacttctgagggtgg

SEQ ID NO: 253678 - DNA, 25 bp, Homo sapien
tgaccgcacttctgagggtggcagt

SEQ ID NO: 253679 - DNA, 25 bp, Homo sapien
cagtcgtgtctgttgcatggtgttc

SEQ ID NO: 253680 - DNA, 25 bp, Homo sapien
agtcgtgtctgttgcatggtgttca

SEQ ID NO: 253681 - DNA, 25 bp, Homo sapien
cgtgtctgttgcatggtgttcatcc

SEQ ID NO: 253682 - DNA, 25 bp, Homo sapien
atcagtcgtgtctgttgcatggtgt

SEQ ID NO: 253683 - DNA, 25 bp, Homo sapien
ctgagatatgtttgttgtctaatac

SEQ ID NO: 253684 - DNA, 25 bp, Homo sapien
acaagcctggtagctgagatatgtt

SEQ ID NO: 253685 - DNA, 25 bp, Homo sapien
tagctgagatatgtttgttgtctaa

SEQ ID NO: 253686 - DNA, 25 bp, Homo sapien
cctggtagctgagatatgtttgttg

SEQ ID NO: 253687 - DNA, 25 bp, Homo sapien
cccgtgacagtactctggaaggtca

SEQ ID NO: 253688 - DNA, 25 bp, Homo sapien
catgtcacggtggtcccgtgacagt

SEQ ID NO: 253689 - DNA, 25 bp, Homo sapien
ccgtgacagtactctggaaggtcac

SEQ ID NO: 253690 - DNA, 25 bp, Homo sapien
tgtcacggtggtcccgtgacagtac

SEQ ID NO: 253691 - DNA, 25 bp, Homo sapien
agtttgtacagcactctcctatatg

SEQ ID NO: 253692 - DNA, 25 bp, Homo sapien
agtaccaatgtgtaacagggctata

SEQ ID NO: 253693 - DNA, 25 bp, Homo sapien
catgtggcacgtatttaataagtag

SEQ ID NO: 253694 - DNA, 25 bp, Homo sapien
gttcatagttagattcatgtggcac

SEQ ID NO: 253695 - DNA, 25 bp, Homo sapien
taacagggctatacgggaacagaag

SEQ ID NO: 253696 - DNA, 25 bp, Homo sapien
tctgaggtccccatagcacgtgtcg

SEQ ID NO: 253697 - DNA, 25 bp, Homo sapien
tttcgtacgcaaggtcgtccagcct

SEQ ID NO: 253698 - DNA, 25 bp, Homo sapien
atttcgtacgcaaggtcgtccagcc

SEQ ID NO: 253699 - DNA, 25 bp, Homo sapien
catagcacgtgtcgacggtgaccat

SEQ ID NO: 253700 - DNA, 25 bp, Homo sapien
ccagcccagcgatagtcatccaaag

SEQ ID NO: 253701 - DNA, 25 bp, Homo sapien
agcgatagtcatccaaagacaatgg

SEQ ID NO: 253702 - DNA, 25 bp, Homo sapien
ttgaccccaaaacacaggctgtagg

SEQ ID NO: 253703 - DNA, 25 bp, Homo sapien
gccgaggtactagcagtctggaggg

SEQ ID NO: 253704 - DNA, 25 bp, Homo sapien
acacctttattacatgggtgaagac

SEQ ID NO: 253705 - DNA, 25 bp, Homo sapien
tttattacatgggtgaagacaaaac

SEQ ID NO: 253706 - DNA, 25 bp, Homo sapien
tattacatgggtgaagacaaaacaa

SEQ ID NO: 253707 - DNA, 25 bp, Homo sapien
caataaacacctttattacatgggt

SEQ ID NO: 253708 - DNA, 25 bp, Homo sapien
acatcgatgacccttgtttcaccag

SEQ ID NO: 253709 - DNA, 25 bp, Homo sapien
tgcggcacgggtcagtcttgctgtt

SEQ ID NO: 253710 - DNA, 25 bp, Homo sapien
tttcaccagcgcagcattctgagcc

SEQ ID NO: 253711 - DNA, 25 bp, Homo sapien
cggtagggcgtgctgtcgatgggca

SEQ ID NO: 253712 - DNA, 25 bp, Homo sapien
gcatggataggctggcgcctttcct

SEQ ID NO: 253713 - DNA, 25 bp, Homo sapien
catggataggctggcgcctttcctg

SEQ ID NO: 253714 - DNA, 25 bp, Homo sapien
gccacacgtccacagagatacaaaa

SEQ ID NO: 253715 - DNA, 25 bp, Homo sapien
ctgtgccacacgtccacagagatac

SEQ ID NO: 253716 - DNA, 25 bp, Homo sapien
agcactgtgccacacgtccacagag

SEQ ID NO: 253717 - DNA, 25 bp, Homo sapien
tgccacacgtccacagagatacaaa

SEQ ID NO: 253718 - DNA, 25 bp, Homo sapien
tcgcacagtaatacacggccgtgtc

SEQ ID NO: 253719 - DNA, 25 bp, Homo sapien
cacagtaatacacggccgtgtcgtc

SEQ ID NO: 253720 - DNA, 25 bp, Homo sapien
ctcgcacagtaatacacggccgtgt

SEQ ID NO: 253721 - DNA, 25 bp, Homo sapien
cgcacagtaatacacggccgtgtcg

SEQ ID NO: 253722 - DNA, 25 bp, Homo sapien
tccatgtaggctgtgctgatggacg

SEQ ID NO: 253723 - DNA, 25 bp, Homo sapien
catgtaggctgtgctgatggacgtg

SEQ ID NO: 253724 - DNA, 25 bp, Homo sapien
gtaggctgtgctgatggacgtgtcc

SEQ ID NO: 253725 - DNA, 25 bp, Homo sapien
ctcagctccatgtaggctgtgctga

SEQ ID NO: 253726 - DNA, 25 bp, Homo sapien
gccctgaaacttctgtgcatagttt

SEQ ID NO: 253727 - DNA, 25 bp, Homo sapien
ctgccctgaaacttctgtgcatagt

SEQ ID NO: 253728 - DNA, 25 bp, Homo sapien
cctgaaacttctgtgcatagtttgt

SEQ ID NO: 253729 - DNA, 25 bp, Homo sapien
tgaccctgccctgaaacttctgtgc

SEQ ID NO: 253730 - DNA, 25 bp, Homo sapien
cactgttagggttgatccatcccat

SEQ ID NO: 253731 - DNA, 25 bp, Homo sapien
caccactgttagggttgatccatcc

SEQ ID NO: 253732 - DNA, 25 bp, Homo sapien
tagggttgatccatcccatccactc

SEQ ID NO: 253733 - DNA, 25 bp, Homo sapien
agggttgatccatcccatccactca

SEQ ID NO: 253734 - DNA, 25 bp, Homo sapien
agcccttgtccaggggcctgtcgca

SEQ ID NO: 253735 - DNA, 25 bp, Homo sapien
gcccttgtccaggggcctgtcgcac

SEQ ID NO: 253736 - DNA, 25 bp, Homo sapien
gcatatagtagccggtgaaggtgta

SEQ ID NO: 253737 - DNA, 25 bp, Homo sapien
agtagccggtgaaggtgtatccaga

SEQ ID NO: 253738 - DNA, 25 bp, Homo sapien
catatagtagccggtgaaggtgtat

SEQ ID NO: 253739 - DNA, 25 bp, Homo sapien
agccggtgaaggtgtatccagaagc

SEQ ID NO: 253740 - DNA, 25 bp, Homo sapien
tgaggccccaggcttcttcacctca

SEQ ID NO: 253741 - DNA, 25 bp, Homo sapien
tcactgaggccccaggcttcttcac

SEQ ID NO: 253742 - DNA, 25 bp, Homo sapien
actgaggccccaggcttcttcacct

SEQ ID NO: 253743 - DNA, 25 bp, Homo sapien
cttcactgaggccccaggcttcttc

SEQ ID NO: 253744 - DNA, 25 bp, Homo sapien
agaagaggatcctccaggtccagtc

SEQ ID NO: 253745 - DNA, 25 bp, Homo sapien
aagaggatcctccaggtccagtcca

SEQ ID NO: 253746 - DNA, 25 bp, Homo sapien
tgctgccaccaagaagaggatcctc

SEQ ID NO: 253747 - DNA, 25 bp, Homo sapien
tggctgctgccaccaagaagaggat

SEQ ID NO: 253748 - DNA, 25 bp, Homo sapien
ggtgaggaacggagctctcagggga

SEQ ID NO: 253749 - DNA, 25 bp, Homo sapien
aggaacggagctctcaggggattct

SEQ ID NO: 253750 - DNA, 25 bp, Homo sapien
tgaggaacggagctctcaggggatt

SEQ ID NO: 253751 - DNA, 25 bp, Homo sapien
gaggaacggagctctcaggggattc

SEQ ID NO: 253752 - DNA, 25 bp, Homo sapien
tcatgaaagcactactgagcccctg

SEQ ID NO: 253753 - DNA, 25 bp, Homo sapien
caatcacaatggcagcttgctggag

SEQ ID NO: 253754 - DNA, 25 bp, Homo sapien
taggaaactgaaagcagcccatgct

SEQ ID NO: 253755 - DNA, 25 bp, Homo sapien
cacattagggatttggacttcatga

SEQ ID NO: 253756 - DNA, 25 bp, Homo sapien
cagtctcatgagtgccctttggtgt

SEQ ID NO: 253757 - DNA, 25 bp, Homo sapien
agtctcatgagtgccctttggtgtc

SEQ ID NO: 253758 - DNA, 25 bp, Homo sapien
acagtctcatgagtgccctttggtg

SEQ ID NO: 253759 - DNA, 25 bp, Homo sapien
ggtggttctgtgcaccctccctgat

SEQ ID NO: 253760 - DNA, 25 bp, Homo sapien
gtggttctgtgcaccctccctgatg

SEQ ID NO: 253761 - DNA, 25 bp, Homo sapien
tggtggttctgtgcaccctccctga

SEQ ID NO: 253762 - DNA, 25 bp, Homo sapien
tggttctgtgcaccctccctgatgg

SEQ ID NO: 253763 - DNA, 25 bp, Homo sapien
cctgagcgccccctagtgattcata

SEQ ID NO: 253764 - DNA, 25 bp, Homo sapien
ttcatagcacctcctagtgttctga

SEQ ID NO: 253765 - DNA, 25 bp, Homo sapien
ctggcggttccgagtgccccctggt

SEQ ID NO: 253766 - DNA, 25 bp, Homo sapien
ccctagtgattcatagcacctccta

SEQ ID NO: 253767 - DNA, 25 bp, Homo sapien
cctgagcgccccctagtgattcata

SEQ ID NO: 253768 - DNA, 25 bp, Homo sapien
accctccctgatggttctgagtgcc

SEQ ID NO: 253769 - DNA, 25 bp, Homo sapien
ttcatagcacctcctagtgttctga

SEQ ID NO: 253770 - DNA, 25 bp, Homo sapien
gtggttctgtgcaccctccctgatg

SEQ ID NO: 253771 - DNA, 25 bp, Homo sapien
gtcattgtaaggcagactgcactta

SEQ ID NO: 253772 - DNA, 25 bp, Homo sapien
taaaagggtgttgcttgagattgtt

SEQ ID NO: 253773 - DNA, 25 bp, Homo sapien
tgagaattcatacttgatcactcac

SEQ ID NO: 253774 - DNA, 25 bp, Homo sapien
ggagagtctcaccactgggctgtaa

SEQ ID NO: 253775 - DNA, 25 bp, Homo sapien
ccaagaactatcatgcattgatggt

SEQ ID NO: 253776 - DNA, 25 bp, Homo sapien
aaacacacaattctcataatgataa

SEQ ID NO: 253777 - DNA, 25 bp, Homo sapien
ctaaaaattagataccattactcac

SEQ ID NO: 253778 - DNA, 25 bp, Homo sapien
gataaatggcaatatgaatgtggaa

SEQ ID NO: 253779 - DNA, 25 bp, Homo sapien
atgtaggctgtgctcgcggatgtgt

SEQ ID NO: 253780 - DNA, 25 bp, Homo sapien
gctgtgctcgcggatgtgtccctgg

SEQ ID NO: 253781 - DNA, 25 bp, Homo sapien
gtaggctgtgctcgcggatgtgtcc

SEQ ID NO: 253782 - DNA, 25 bp, Homo sapien
tgtgctcgcggatgtgtccctggta

SEQ ID NO: 253783 - DNA, 25 bp, Homo sapien
gtgaatattttgtgttaccattgcc

SEQ ID NO: 253784 - DNA, 25 bp, Homo sapien
tgtgaatattttgtgttaccattgc

SEQ ID NO: 253785 - DNA, 25 bp, Homo sapien
catagcatagctagtgaaggtgtat

SEQ ID NO: 253786 - DNA, 25 bp, Homo sapien
caatgcatagcatagctagtgaagg

SEQ ID NO: 253787 - DNA, 25 bp, Homo sapien
tatccagaagccttgcaggaaacct

SEQ ID NO: 253788 - DNA, 25 bp, Homo sapien
agcatagctagtgaaggtgtatcca

SEQ ID NO: 253789 - DNA, 25 bp, Homo sapien
caccagctgaacctgggagtggaca

SEQ ID NO: 253790 - DNA, 25 bp, Homo sapien
accagctgaacctgggagtggacac

SEQ ID NO: 253791 - DNA, 25 bp, Homo sapien
ccttgactggcttcgatcccttcct

SEQ ID NO: 253792 - DNA, 25 bp, Homo sapien
agcccccttgactggcttcgatccc

SEQ ID NO: 253793 - DNA, 25 bp, Homo sapien
ttgactggcttcgatcccttcctcc

SEQ ID NO: 253794 - DNA, 25 bp, Homo sapien
ccccttgactggcttcgatcccttc

SEQ ID NO: 253795 - DNA, 25 bp, Homo sapien
tgctgccaccaaaaagaggatcctc

SEQ ID NO: 253796 - DNA, 25 bp, Homo sapien
tgccaccaaaaagaggatcctccag

SEQ ID NO: 253797 - DNA, 25 bp, Homo sapien
gctgccaccaaaaagaggatcctcc

SEQ ID NO: 253798 - DNA, 25 bp, Homo sapien
ccaccaaaaagaggatcctccaggt

SEQ ID NO: 253799 - DNA, 25 bp, Homo sapien
atttcatacctaacacagcatgaga

SEQ ID NO: 253800 - DNA, 25 bp, Homo sapien
tggattacccaacaggaggatgcta

SEQ ID NO: 253801 - DNA, 25 bp, Homo sapien
tttgcatattcatgagcgatgctat

SEQ ID NO: 253802 - DNA, 25 bp, Homo sapien
ggcacaaagatatctatagtcatct

SEQ ID NO: 253803 - DNA, 25 bp, Homo sapien
cagccccaccgagtcggtgcagcct

SEQ ID NO: 253804 - DNA, 25 bp, Homo sapien
ccagccccaccgagtcggtgcagcc

SEQ ID NO: 253805 - DNA, 25 bp, Homo sapien
cagcagccacacgtgagctgaggag

SEQ ID NO: 253806 - DNA, 25 bp, Homo sapien
ttggcctggaaagtgcaggcaccag

SEQ ID NO: 253807 - DNA, 25 bp, Homo sapien
ctggaaagtgcaggcaccagctgtc

SEQ ID NO: 253808 - DNA, 25 bp, Homo sapien
gcctggaaagtgcaggcaccagctg

SEQ ID NO: 253809 - DNA, 25 bp, Homo sapien
agtcctgggcccgactcctgcagct

SEQ ID NO: 253810 - DNA, 25 bp, Homo sapien
tgagggacagggtctccgaaggctt

SEQ ID NO: 253811 - DNA, 25 bp, Homo sapien
tctccgaaggcttcaccagtcctgg

SEQ ID NO: 253812 - DNA, 25 bp, Homo sapien
cagggtctccgaaggcttcaccagt

SEQ ID NO: 253813 - DNA, 25 bp, Homo sapien
ctgtgaacagagagacccacagtga

SEQ ID NO: 253814 - DNA, 25 bp, Homo sapien
tgtgaacagagagacccacagtgag

SEQ ID NO: 253815 - DNA, 25 bp, Homo sapien
gtgaacagagagacccacagtgagc

SEQ ID NO: 253816 - DNA, 25 bp, Homo sapien
tgaacagagagacccacagtgagcc

SEQ ID NO: 253817 - DNA, 25 bp, Homo sapien
aggaggaagaaccacaggtgtttca

SEQ ID NO: 253818 - DNA, 25 bp, Homo sapien
accagcaggaggaagaaccacaggt

SEQ ID NO: 253819 - DNA, 25 bp, Homo sapien
gcaggaggaagaaccacaggtgttt

SEQ ID NO: 253820 - DNA, 25 bp, Homo sapien
cagcaggaggaagaaccacaggtgt

SEQ ID NO: 253821 - DNA, 25 bp, Homo sapien
gtatttcccatgtgagctggaccct

SEQ ID NO: 253822 - DNA, 25 bp, Homo sapien
tatttcccatgtgagctggaccctg

SEQ ID NO: 253823 - DNA, 25 bp, Homo sapien
atttcccatgtgagctggaccctga

SEQ ID NO: 253824 - DNA, 25 bp, Homo sapien
tcttgggacctggacaagtggccaa

SEQ ID NO: 253825 - DNA, 25 bp, Homo sapien
cttcttgggacctggacaagtggcc

SEQ ID NO: 253826 - DNA, 25 bp, Homo sapien
gggacctggacaagtggccaatctt

SEQ ID NO: 253827 - DNA, 25 bp, Homo sapien
gactctcttcttgggacctggacaa

SEQ ID NO: 253828 - DNA, 25 bp, Homo sapien
ggggagggagcaccaatgagaagca

SEQ ID NO: 253829 - DNA, 25 bp, Homo sapien
gtccatgttggtcattgtaaggacc

SEQ ID NO: 253830 - DNA, 25 bp, Homo sapien
cagggtccatgttggtcattgtaag

SEQ ID NO: 253831 - DNA, 25 bp, Homo sapien
tgtgtccacagggtccatgttggtc

SEQ ID NO: 253832 - DNA, 25 bp, Homo sapien
ccatgttggtcattgtaaggaccac

SEQ ID NO: 253833 - DNA, 25 bp, Homo sapien
cagagatgggctgtagcgcttatca

SEQ ID NO: 253834 - DNA, 25 bp, Homo sapien
tgggctgtagcgcttatcatcattc

SEQ ID NO: 253835 - DNA, 25 bp, Homo sapien
tcttcagagatgggctgtagcgctt

SEQ ID NO: 253836 - DNA, 25 bp, Homo sapien
gctgtagcgcttatcatcattccaa

SEQ ID NO: 253837 - DNA, 25 bp, Homo sapien
gcccacacccactccactagtgctg

SEQ ID NO: 253838 - DNA, 25 bp, Homo sapien
ccactccactagtgctgagtgagaa

SEQ ID NO: 253839 - DNA, 25 bp, Homo sapien
acacccactccactagtgctgagtg

SEQ ID NO: 253840 - DNA, 25 bp, Homo sapien
acggatccagcccacacccactcca

SEQ ID NO: 253841 - DNA, 25 bp, Homo sapien
gcaggagcgtggagcaaagtgtgtc

SEQ ID NO: 253842 - DNA, 25 bp, Homo sapien
cagcaggagcgtggagcaaagtgtg

SEQ ID NO: 253843 - DNA, 25 bp, Homo sapien
caggagcgtggagcaaagtgtgtcc

SEQ ID NO: 253844 - DNA, 25 bp, Homo sapien
agcagcaggagcgtggagcaaagtg

SEQ ID NO: 253845 - DNA, 25 bp, Homo sapien
tccagggagcaggaaaatccaaagg

SEQ ID NO: 253846 - DNA, 25 bp, Homo sapien
cagggagcaggaaaatccaaaggaa

SEQ ID NO: 253847 - DNA, 25 bp, Homo sapien
ttttccagggagcaggaaaatccaa

SEQ ID NO: 253848 - DNA, 25 bp, Homo sapien
tccaaaggaaaagtgagaacgacaa

SEQ ID NO: 253849 - DNA, 25 bp, Homo sapien
cttgcacagtaatgtagtgacgtgt

SEQ ID NO: 253850 - DNA, 25 bp, Homo sapien
atgtagtgacgtgtccttggtttgc

SEQ ID NO: 253851 - DNA, 25 bp, Homo sapien
gattgcccatttgcagaaacagcat

SEQ ID NO: 253852 - DNA, 25 bp, Homo sapien
cttcttgacattgtctcttgagatg

SEQ ID NO: 253853 - DNA, 25 bp, Homo sapien
tctgagaatctcttgttggtcctga

SEQ ID NO: 253854 - DNA, 25 bp, Homo sapien
ctgatgtcctaagtgtctcctggtg

SEQ ID NO: 253855 - DNA, 25 bp, Homo sapien
gtggtctggaatgcacccttgtcat

SEQ ID NO: 253856 - DNA, 25 bp, Homo sapien
tcagtggccatgagtgtctcctggt

SEQ ID NO: 253857 - DNA, 25 bp, Homo sapien
cacttgggtcactcatggctaccac

SEQ ID NO: 253858 - DNA, 25 bp, Homo sapien
gcaccactgagaacttccacttggg

SEQ ID NO: 253859 - DNA, 25 bp, Homo sapien
tgcagaagaagctaagagaatagcc

SEQ ID NO: 253860 - DNA, 25 bp, Homo sapien
tgttaagtgttgtccccaggaactg

SEQ ID NO: 253861 - DNA, 25 bp, Homo sapien
acagtgcacagtgtcccaggctttc

SEQ ID NO: 253862 - DNA, 25 bp, Homo sapien
ccaggctttccctggttgtcccagg

SEQ ID NO: 253863 - DNA, 25 bp, Homo sapien
tccctggttgtcccaggtaccctga

SEQ ID NO: 253864 - DNA, 25 bp, Homo sapien
ctggttgtcccaggtaccctgaagg

SEQ ID NO: 253865 - DNA, 25 bp, Homo sapien
gtttttggtattgtctctggaaatg

SEQ ID NO: 253866 - DNA, 25 bp, Homo sapien
gagtttttggtattgtctctggaaa

SEQ ID NO: 253867 - DNA, 25 bp, Homo sapien
tgagtttttggtattgtctctggaa

SEQ ID NO: 253868 - DNA, 25 bp, Homo sapien
tttttggtattgtctctggaaatgg

SEQ ID NO: 253869 - DNA, 25 bp, Homo sapien
cccagtgcgtgctatggctactgaa

SEQ ID NO: 253870 - DNA, 25 bp, Homo sapien
gggacccagtgcgtgctatggctac

SEQ ID NO: 253871 - DNA, 25 bp, Homo sapien
cagtgcgtgctatggctactgaagg

SEQ ID NO: 253872 - DNA, 25 bp, Homo sapien
gcgtgctatggctactgaaggtgaa

SEQ ID NO: 253873 - DNA, 25 bp, Homo sapien
acccaggctttgtcaagtttgctcc

SEQ ID NO: 253874 - DNA, 25 bp, Homo sapien
caagtttgctccagactctaccagc

SEQ ID NO: 253875 - DNA, 25 bp, Homo sapien
tttgtcaagtttgctccagactcta

SEQ ID NO: 253876 - DNA, 25 bp, Homo sapien
caggctttgtcaagtttgctccaga

SEQ ID NO: 253877 - DNA, 25 bp, Homo sapien
gcaaggaaaacccacctcagcccca

SEQ ID NO: 253878 - DNA, 25 bp, Homo sapien
gcagcaaggaaaacccacctcagcc

SEQ ID NO: 253879 - DNA, 25 bp, Homo sapien
aatagcagcaaggaaaacccacctc

SEQ ID NO: 253880 - DNA, 25 bp, Homo sapien
taaaatagcagcaaggaaaacccac

SEQ ID NO: 253881 - DNA, 25 bp, Homo sapien
aggtcctgcagacctgagccctggg

SEQ ID NO: 253882 - DNA, 25 bp, Homo sapien
ccaggtcctgcagacctgagccctg

SEQ ID NO: 253883 - DNA, 25 bp, Homo sapien
cctgcagacctgagccctgggattt

SEQ ID NO: 253884 - DNA, 25 bp, Homo sapien
gtcctgcagacctgagccctgggat

SEQ ID NO: 253885 - DNA, 25 bp, Homo sapien
ggctgttcatttgcagatacagtga

SEQ ID NO: 253886 - DNA, 25 bp, Homo sapien
agccgtgtcctcggctctcaggctg

SEQ ID NO: 253887 - DNA, 25 bp, Homo sapien
tcgcacagtaatacacagccgtgtc

SEQ ID NO: 253888 - DNA, 25 bp, Homo sapien
ctcaggctgttcatttgcagataca

SEQ ID NO: 253889 - DNA, 25 bp, Homo sapien
ttctcacttccatcttgctttatgt

SEQ ID NO: 253890 - DNA, 25 bp, Homo sapien
ctaaaggtgaatccagaggctgcac

SEQ ID NO: 253891 - DNA, 25 bp, Homo sapien
gctcatccaatagctactaaaggtg

SEQ ID NO: 253892 - DNA, 25 bp, Homo sapien
cagctcatccaatagctactaaagg

SEQ ID NO: 253893 - DNA, 25 bp, Homo sapien
tcatccaatagctactaaaggtgaa

SEQ ID NO: 253894 - DNA, 25 bp, Homo sapien
ctgcaaacaaagagacaccaaggtc

SEQ ID NO: 253895 - DNA, 25 bp, Homo sapien
aggtcagaaactgccacacaaatcc

SEQ ID NO: 253896 - DNA, 25 bp, Homo sapien
ccaaggtcagaaactgccacacaaa

SEQ ID NO: 253897 - DNA, 25 bp, Homo sapien
gtcagaaactgccacacaaatccac

SEQ ID NO: 253898 - DNA, 25 bp, Homo sapien
actcaatcttcctagttttccatga

SEQ ID NO: 253899 - DNA, 25 bp, Homo sapien
cacacacactcaatcttcctagttt

SEQ ID NO: 253900 - DNA, 25 bp, Homo sapien
cacactcaatcttcctagttttcca

SEQ ID NO: 253901 - DNA, 25 bp, Homo sapien
tcaatcttcctagttttccatgaat

SEQ ID NO: 253902 - DNA, 25 bp, Homo sapien
aaaacccagctcagccccaattcca

SEQ ID NO: 253903 - DNA, 25 bp, Homo sapien
aaatagcaacaaggaaaacccagct

SEQ ID NO: 253904 - DNA, 25 bp, Homo sapien
aaggaaaacccagctcagccccaat

SEQ ID NO: 253905 - DNA, 25 bp, Homo sapien
ggaaaacccagctcagccccaattc

SEQ ID NO: 253906 - DNA, 25 bp, Homo sapien
gctgatcaccaagtggaaaggcctt

SEQ ID NO: 253907 - DNA, 25 bp, Homo sapien
cagtgctgatcaccaagtggaaagg

SEQ ID NO: 253908 - DNA, 25 bp, Homo sapien
ttggagtccagggctaaggctcctc

SEQ ID NO: 253909 - DNA, 25 bp, Homo sapien
tcaccaagtggaaaggccttggagt

SEQ ID NO: 253910 - DNA, 25 bp, Homo sapien
ctcagctccatgtaggctgtgctta

SEQ ID NO: 253911 - DNA, 25 bp, Homo sapien
ggctgctcagctccatgtaggctgt

SEQ ID NO: 253912 - DNA, 25 bp, Homo sapien
tccatgtaggctgtgcttatggagg

SEQ ID NO: 253913 - DNA, 25 bp, Homo sapien
gctccatgtaggctgtgcttatgga

SEQ ID NO: 253914 - DNA, 25 bp, Homo sapien
tggtcatggtgactctgccctggaa

SEQ ID NO: 253915 - DNA, 25 bp, Homo sapien
ctggtcatggtgactctgccctgga

SEQ ID NO: 253916 - DNA, 25 bp, Homo sapien
gcacccagttgatatcataactggt

SEQ ID NO: 253917 - DNA, 25 bp, Homo sapien
cgcacccagttgatatcataactgg

SEQ ID NO: 253918 - DNA, 25 bp, Homo sapien
cacccagttgatatcataactggtg

SEQ ID NO: 253919 - DNA, 25 bp, Homo sapien
acccagttgatatcataactggtga

SEQ ID NO: 253920 - DNA, 25 bp, Homo sapien
cacaggagagaataaaatcctcttt

SEQ ID NO: 253921 - DNA, 25 bp, Homo sapien
tgtggagagaacacaggagagaata

SEQ ID NO: 253922 - DNA, 25 bp, Homo sapien
gaacacaggagagaataaaatcctc

SEQ ID NO: 253923 - DNA, 25 bp, Homo sapien
acaggagagaataaaatcctctttg

SEQ ID NO: 253924 - DNA, 25 bp, Homo sapien
agaagaggatcctccaggtccagtc

SEQ ID NO: 253925 - DNA, 25 bp, Homo sapien
ctgctgccaccaagaagaggatcct

SEQ ID NO: 253926 - DNA, 25 bp, Homo sapien
aagaggatcctccaggtccagtcca

SEQ ID NO: 253927 - DNA, 25 bp, Homo sapien
ctgccaccaagaagaggatcctcca

SEQ ID NO: 253928 - DNA, 25 bp, Homo sapien
tcacagggttttctctagaggacag

SEQ ID NO: 253929 - DNA, 25 bp, Homo sapien
tgtgctcacagggttttctctagag

SEQ ID NO: 253930 - DNA, 25 bp, Homo sapien
ctcacagggttttctctagaggaca

SEQ ID NO: 253931 - DNA, 25 bp, Homo sapien
tgctcacagggttttctctagagga

SEQ ID NO: 253932 - DNA, 25 bp, Homo sapien
aaggccgtgtcctcagctctcagac

SEQ ID NO: 253933 - DNA, 25 bp, Homo sapien
atttgcagatacagggagttcttgg

SEQ ID NO: 253934 - DNA, 25 bp, Homo sapien
cagatacagggagttcttggcgttg

SEQ ID NO: 253935 - DNA, 25 bp, Homo sapien
tgcagatacagggagttcttggcgt

SEQ ID NO: 253936 - DNA, 25 bp, Homo sapien
tatgctaccactattccaactaata

SEQ ID NO: 253937 - DNA, 25 bp, Homo sapien
gcatagcctatgctaccactattcc

SEQ ID NO: 253938 - DNA, 25 bp, Homo sapien
tcacagagtccgcatagcctatgct

SEQ ID NO: 253939 - DNA, 25 bp, Homo sapien
cttcacagagtccgcatagcctatg

SEQ ID NO: 253940 - DNA, 25 bp, Homo sapien
ctccaggcccttccctggagcttgc

SEQ ID NO: 253941 - DNA, 25 bp, Homo sapien
aggcccttccctggagcttgccgga

SEQ ID NO: 253942 - DNA, 25 bp, Homo sapien
ggcccttccctggagcttgccggac

SEQ ID NO: 253943 - DNA, 25 bp, Homo sapien
ccaggcccttccctggagcttgccg

SEQ ID NO: 253944 - DNA, 25 bp, Homo sapien
agggacctgccaggctgtaccaagc

SEQ ID NO: 253945 - DNA, 25 bp, Homo sapien
acaggagagtctcagggacctgcca

SEQ ID NO: 253946 - DNA, 25 bp, Homo sapien
aatcatcaaaggtgaatccagaggc

SEQ ID NO: 253947 - DNA, 25 bp, Homo sapien
tctcagggacctgccaggctgtacc

SEQ ID NO: 253948 - DNA, 25 bp, Homo sapien
caaacacagagacaccaaggtcaga

SEQ ID NO: 253949 - DNA, 25 bp, Homo sapien
gcaaacacagagacaccaaggtcag

SEQ ID NO: 253950 - DNA, 25 bp, Homo sapien
ctgcaaacacagagacaccaaggtc

SEQ ID NO: 253951 - DNA, 25 bp, Homo sapien
aacacagagacaccaaggtcagaaa

SEQ ID NO: 253952 - DNA, 25 bp, Homo sapien
cacaaatccactcatgtccactcac

SEQ ID NO: 253953 - DNA, 25 bp, Homo sapien
caaatccactcatgtccactcacac

SEQ ID NO: 253954 - DNA, 25 bp, Homo sapien
cacacaaatccactcatgtccactc

SEQ ID NO: 253955 - DNA, 25 bp, Homo sapien
acaaatccactcatgtccactcaca

SEQ ID NO: 253956 - DNA, 25 bp, Homo sapien
ggaaaatccagctcagtcccaactc

SEQ ID NO: 253957 - DNA, 25 bp, Homo sapien
aaatagccaaaaggaaaatccagct

SEQ ID NO: 253958 - DNA, 25 bp, Homo sapien
aaaaggaaaatccagctcagtccca

SEQ ID NO: 253959 - DNA, 25 bp, Homo sapien
gccaaaaggaaaatccagctcagtc

SEQ ID NO: 253960 - DNA, 25 bp, Homo sapien
atggaaacacctgggaatctcaggg

SEQ ID NO: 253961 - DNA, 25 bp, Homo sapien
ttcagtgctgatcactgaatggaaa

SEQ ID NO: 253962 - DNA, 25 bp, Homo sapien
gtgctgatcactgaatggaaacacc

SEQ ID NO: 253963 - DNA, 25 bp, Homo sapien
tctgtgttcagtgctgatcactgaa

SEQ ID NO: 253964 - DNA, 25 bp, Homo sapien
gttgatcactgttagaaccacttca

SEQ ID NO: 253965 - DNA, 25 bp, Homo sapien
tgctgagggctgacagatctaaccc

SEQ ID NO: 253966 - DNA, 25 bp, Homo sapien
tgtgtccacaatgtccatgttgatc

SEQ ID NO: 253967 - DNA, 25 bp, Homo sapien
tccttggagataatgagcctactct

SEQ ID NO: 253968 - DNA, 25 bp, Homo sapien
ccagagaaggtgcaggtcagcatga

SEQ ID NO: 253969 - DNA, 25 bp, Homo sapien
ttcaaggtgacctgggataagaccc

SEQ ID NO: 253970 - DNA, 25 bp, Homo sapien
tctgtgtgggtttcaccagtgcagg

SEQ ID NO: 253971 - DNA, 25 bp, Homo sapien
tccttcaaggtgacctgggataaga

SEQ ID NO: 253972 - DNA, 25 bp, Homo sapien
ggagaagcgtggagtaaagctccat

SEQ ID NO: 253973 - DNA, 25 bp, Homo sapien
aggagaagcgtggagtaaagctcca

SEQ ID NO: 253974 - DNA, 25 bp, Homo sapien
gacagccccgtgctcagtgtcccgg

SEQ ID NO: 253975 - DNA, 25 bp, Homo sapien
agccccgtgctcagtgtcccgggcg

SEQ ID NO: 253976 - DNA, 25 bp, Homo sapien
ctggagacagccccgtgctcagtgt

SEQ ID NO: 253977 - DNA, 25 bp, Homo sapien
cccgtgctcagtgtcccgggcgccc

SEQ ID NO: 253978 - DNA, 25 bp, Homo sapien
tgtccctggagatggtgaatcggcc

SEQ ID NO: 253979 - DNA, 25 bp, Homo sapien
cgttgtccctggagatggtgaatcg

SEQ ID NO: 253980 - DNA, 25 bp, Homo sapien
gtgaatcggcccttcacagagtctg

SEQ ID NO: 253981 - DNA, 25 bp, Homo sapien
cctggagatggtgaatcggcccttc

SEQ ID NO: 253982 - DNA, 25 bp, Homo sapien
atatggtactaccactactactaat

SEQ ID NO: 253983 - DNA, 25 bp, Homo sapien
gaccctccaggcttgaccaagcctc

SEQ ID NO: 253984 - DNA, 25 bp, Homo sapien
tccagctcatgtagtagtcactgaa

SEQ ID NO: 253985 - DNA, 25 bp, Homo sapien
gggaccctccaggcttgaccaagcc

SEQ ID NO: 253986 - DNA, 25 bp, Homo sapien
gatccagctcatgtagtagtcactg

SEQ ID NO: 253987 - DNA, 25 bp, Homo sapien
ccgaatggaaactcctgggaattct

SEQ ID NO: 253988 - DNA, 25 bp, Homo sapien
cgaatggaaactcctgggaattctg

SEQ ID NO: 253989 - DNA, 25 bp, Homo sapien
tgctgtgagagtgtgaaactcctgg

SEQ ID NO: 253990 - DNA, 25 bp, Homo sapien
atgtgtgtgctaatgctgtgagagt

SEQ ID NO: 253991 - DNA, 25 bp, Homo sapien
ggcacttgcgggcttttcctacaga

SEQ ID NO: 253992 - DNA, 25 bp, Homo sapien
ctggaaatgtttcatgagttgttga

SEQ ID NO: 253993 - DNA, 25 bp, Homo sapien
tgagaaggaggaattcaaagcacac

SEQ ID NO: 253994 - DNA, 25 bp, Homo sapien
tctctgctagtagccgtgtgatata

SEQ ID NO: 253995 - DNA, 25 bp, Homo sapien
ctatacgaagaaattaagactgtac

SEQ ID NO: 253996 - DNA, 25 bp, Homo sapien
tagtatatgtaagtgcaaactggga

SEQ ID NO: 253997 - DNA, 25 bp, Homo sapien
ccagagtctttgcaggagtggctga

SEQ ID NO: 253998 - DNA, 25 bp, Homo sapien
gcaagccccaactagaagctatgta

SEQ ID NO: 253999 - DNA, 25 bp, Homo sapien
cgtaagggtgcatgtaagaacttcc

SEQ ID NO: 254000 - DNA, 25 bp, Homo sapien
tcagtgagaccgtgcacgtaagggt

SEQ ID NO: 254001 - DNA, 25 bp, Homo sapien
tcacaagggccactaatacgagggt

SEQ ID NO: 254002 - DNA, 25 bp, Homo sapien
attcacaagggccactaatacgagg

SEQ ID NO: 254003 - DNA, 25 bp, Homo sapien
caagggccactaatacgagggtgat

SEQ ID NO: 254004 - DNA, 25 bp, Homo sapien
agggccactaatacgagggtgatga

SEQ ID NO: 254005 - DNA, 25 bp, Homo sapien
agcccttgtccaggggcctgtcata

SEQ ID NO: 254006 - DNA, 25 bp, Homo sapien
atcctgtccattcaagcccttgtcc

SEQ ID NO: 254007 - DNA, 25 bp, Homo sapien
ctgtccattcaagcccttgtccagg

SEQ ID NO: 254008 - DNA, 25 bp, Homo sapien
aagcccttgtccaggggcctgtcat

SEQ ID NO: 254009 - DNA, 25 bp, Homo sapien
ccagtgcaagtagcagtaggtgaag

SEQ ID NO: 254010 - DNA, 25 bp, Homo sapien
aagtagcagtaggtgaaggtgtatc

SEQ ID NO: 254011 - DNA, 25 bp, Homo sapien
aggtgtatccagaagccttgcagga

SEQ ID NO: 254012 - DNA, 25 bp, Homo sapien
tgcaagtagcagtaggtgaaggtgt

SEQ ID NO: 254013 - DNA, 25 bp, Homo sapien
cagattgcaccagctgcacctggga

SEQ ID NO: 254014 - DNA, 25 bp, Homo sapien
gccccagattgcaccagctgcacct

SEQ ID NO: 254015 - DNA, 25 bp, Homo sapien
cctcagccccagattgcaccagctg

SEQ ID NO: 254016 - DNA, 25 bp, Homo sapien
acctcagccccagattgcaccagct

SEQ ID NO: 254017 - DNA, 25 bp, Homo sapien
cttgcaggtccagcccatgaggaga

SEQ ID NO: 254018 - DNA, 25 bp, Homo sapien
gcaggtccagcccatgaggagatgt

SEQ ID NO: 254019 - DNA, 25 bp, Homo sapien
gaagaggatcttgcaggtccagccc

SEQ ID NO: 254020 - DNA, 25 bp, Homo sapien
aggtccagcccatgaggagatgtgc

SEQ ID NO: 254021 - DNA, 25 bp, Homo sapien
tggagtggccagaaatggtgtaggt

SEQ ID NO: 254022 - DNA, 25 bp, Homo sapien
ttccattcgcaggtgagtctccacg

SEQ ID NO: 254023 - DNA, 25 bp, Homo sapien
ccattcgcaggtgagtctccacgtg

SEQ ID NO: 254024 - DNA, 25 bp, Homo sapien
cataggtttatgagtgaaaatgagg

SEQ ID NO: 254025 - DNA, 25 bp, Homo sapien
ggatgtcaatccataggtttatgag

SEQ ID NO: 254026 - DNA, 25 bp, Homo sapien
agcaagagccacatccccactttac

SEQ ID NO: 254027 - DNA, 25 bp, Homo sapien
ccccactttacagggagcaggaaca

SEQ ID NO: 254028 - DNA, 25 bp, Homo sapien
cacatccccactttacagggagcag

SEQ ID NO: 254029 - DNA, 25 bp, Homo sapien
gagccacatccccactttacaggga

SEQ ID NO: 254030 - DNA, 25 bp, Homo sapien
ctgcctctggggatgactctgatca

SEQ ID NO: 254031 - DNA, 25 bp, Homo sapien
gggatgactctgatcagtgggtcct

SEQ ID NO: 254032 - DNA, 25 bp, Homo sapien
tgatttcccccaggcattctgcagg

SEQ ID NO: 254033 - DNA, 25 bp, Homo sapien
tctgatcagtgggtcctgtgcgccc

SEQ ID NO: 254034 - DNA, 25 bp, Homo sapien
aggctgttcatttgaagatacaagg

SEQ ID NO: 254035 - DNA, 25 bp, Homo sapien
gtgtccccggctctcaggctgttca

SEQ ID NO: 254036 - DNA, 25 bp, Homo sapien
cgtgtccccggctctcaggctgttc

SEQ ID NO: 254037 - DNA, 25 bp, Homo sapien
ttcatttgaagatacaaggagttct

SEQ ID NO: 254038 - DNA, 25 bp, Homo sapien
cggagcctggatagtatgtgtcacc

SEQ ID NO: 254039 - DNA, 25 bp, Homo sapien
ctggatagtatgtgtcaccagcagt

SEQ ID NO: 254040 - DNA, 25 bp, Homo sapien
ggagcctggatagtatgtgtcacca

SEQ ID NO: 254041 - DNA, 25 bp, Homo sapien
agcctggatagtatgtgtcaccagc

SEQ ID NO: 254042 - DNA, 25 bp, Homo sapien
cccactccagaccttttcctgtagc

SEQ ID NO: 254043 - DNA, 25 bp, Homo sapien
gacccactccagaccttttcctgta

SEQ ID NO: 254044 - DNA, 25 bp, Homo sapien
tgagacccactccagaccttttcct

SEQ ID NO: 254045 - DNA, 25 bp, Homo sapien
agctgagacccactccagacctttt

SEQ ID NO: 254046 - DNA, 25 bp, Homo sapien
gctgcacaggagagtctcagggacc

SEQ ID NO: 254047 - DNA, 25 bp, Homo sapien
agtgcatgtcgtagctactgaaggt

SEQ ID NO: 254048 - DNA, 25 bp, Homo sapien
ttggcggacccagtgcatgtcgtag

SEQ ID NO: 254049 - DNA, 25 bp, Homo sapien
tactgaaggtgaatccagaggctgc

SEQ ID NO: 254050 - DNA, 25 bp, Homo sapien
aggaaaacccagctcagccccaact

SEQ ID NO: 254051 - DNA, 25 bp, Homo sapien
cttctaatatagcaacaaggaaaac

SEQ ID NO: 254052 - DNA, 25 bp, Homo sapien
ctaatatagcaacaaggaaaaccca

SEQ ID NO: 254053 - DNA, 25 bp, Homo sapien
ggaaaacccagctcagccccaactc

SEQ ID NO: 254054 - DNA, 25 bp, Homo sapien
ctgaatacaaacacttgggaatccc

SEQ ID NO: 254055 - DNA, 25 bp, Homo sapien
tgatcactgaatacaaacacttggg

SEQ ID NO: 254056 - DNA, 25 bp, Homo sapien
cactgaatacaaacacttgggaatc

SEQ ID NO: 254057 - DNA, 25 bp, Homo sapien
tcctgtgtgttcagtcctgatcact

SEQ ID NO: 254058 - DNA, 25 bp, Homo sapien
ctcagaattcctcttgctcttttat

SEQ ID NO: 254059 - DNA, 25 bp, Homo sapien
aaaagtactgatgttttcatatttc

SEQ ID NO: 254060 - DNA, 25 bp, Homo sapien
tcatatttctttagactagttttta

SEQ ID NO: 254061 - DNA, 25 bp, Homo sapien
gaattcctcttgctcttttatagat

SEQ ID NO: 254062 - DNA, 25 bp, Homo sapien
caacttcggagcatgcgcctgtaac

SEQ ID NO: 254063 - DNA, 25 bp, Homo sapien
aacagcggagtcttggccaattcca

SEQ ID NO: 254064 - DNA, 25 bp, Homo sapien
tcaaccactcgtacactcttgaggg

SEQ ID NO: 254065 - DNA, 25 bp, Homo sapien
tggacgagattgaaaagccaacttc

SEQ ID NO: 254066 - DNA, 25 bp, Homo sapien
taatctccagggcatcgcagaagat

SEQ ID NO: 254067 - DNA, 25 bp, Homo sapien
tcaccaaagttccatcgaaatgcac

SEQ ID NO: 254068 - DNA, 25 bp, Homo sapien
gaaatgcacctcctctctgtcatgg

SEQ ID NO: 254069 - DNA, 25 bp, Homo sapien
gccactgaaaccatgattccagagg

SEQ ID NO: 254070 - DNA, 25 bp, Homo sapien
tcaattgttaacaactgtgaagagc

SEQ ID NO: 254071 - DNA, 25 bp, Homo sapien
cagtaaagtataccatactcaattg

SEQ ID NO: 254072 - DNA, 25 bp, Homo sapien
ctgtgaagagcttaaaagacaaact

SEQ ID NO: 254073 - DNA, 25 bp, Homo sapien
tttatcagtaaagtataccatactc

SEQ ID NO: 254074 - DNA, 25 bp, Homo sapien
cctgagtacccccggtggttgtgag

SEQ ID NO: 254075 - DNA, 25 bp, Homo sapien
ccggtttactaagcacgtcgttgtg

SEQ ID NO: 254076 - DNA, 25 bp, Homo sapien
ctcctaagggagcagtggtgtcctc

SEQ ID NO: 254077 - DNA, 25 bp, Homo sapien
taagcacgtcgttgtgtcctgtgag

SEQ ID NO: 254078 - DNA, 25 bp, Homo sapien
tctctgtctaactccattagttaac

SEQ ID NO: 254079 - DNA, 25 bp, Homo sapien
gtagtatttctctgtctaactccat

SEQ ID NO: 254080 - DNA, 25 bp, Homo sapien
aactccattagttaacttcacaggg

SEQ ID NO: 254081 - DNA, 25 bp, Homo sapien
tatttgaggattgttaatcatcttt

SEQ ID NO: 254082 - DNA, 25 bp, Homo sapien
agtagtacacatctatgtcctcaga

SEQ ID NO: 254083 - DNA, 25 bp, Homo sapien
tggacgtgtccctggtcatggtgac

SEQ ID NO: 254084 - DNA, 25 bp, Homo sapien
gtgcatagcctgtgttaccattgcc

SEQ ID NO: 254085 - DNA, 25 bp, Homo sapien
cctgtgttaccattgccagagtagc

SEQ ID NO: 254086 - DNA, 25 bp, Homo sapien
acttctgtgcatagcctgtgttacc

SEQ ID NO: 254087 - DNA, 25 bp, Homo sapien
ccatccattcaaacccttatccagg

SEQ ID NO: 254088 - DNA, 25 bp, Homo sapien
cactgaggccatggacgctggcaac

SEQ ID NO: 254089 - DNA, 25 bp, Homo sapien
gtcatataatcaggacaaacctgtg

SEQ ID NO: 254090 - DNA, 25 bp, Homo sapien
actgaggccatggacgctggcaaca

SEQ ID NO: 254091 - DNA, 25 bp, Homo sapien
taatcaggacaaacctgtgctctct

SEQ ID NO: 254092 - DNA, 25 bp, Homo sapien
agtgggtcacgagcgccccctggtg

SEQ ID NO: 254093 - DNA, 25 bp, Homo sapien
ccgcgcgcccctgcagggaggtttg

SEQ ID NO: 254094 - DNA, 25 bp, Homo sapien
ggaggtttgtgtccgggctcacact

SEQ ID NO: 254095 - DNA, 25 bp, Homo sapien
tcagtgggtcacgagcgccccctgg

SEQ ID NO: 254096 - DNA, 25 bp, Homo sapien
ggtacagtaatacacggctgtgtcc

SEQ ID NO: 254097 - DNA, 25 bp, Homo sapien
tctgtggtacagtaatacacggctg

SEQ ID NO: 254098 - DNA, 25 bp, Homo sapien
acacggctgtgtcctcggttttcag

SEQ ID NO: 254099 - DNA, 25 bp, Homo sapien
taatacacggctgtgtcctcggttt

SEQ ID NO: 254100 - DNA, 25 bp, Homo sapien
ggtgcagcgtagtctgttgtcccac

SEQ ID NO: 254101 - DNA, 25 bp, Homo sapien
tgcagcgtagtctgttgtcccacca

SEQ ID NO: 254102 - DNA, 25 bp, Homo sapien
gtgcagcgtagtctgttgtcccacc

SEQ ID NO: 254103 - DNA, 25 bp, Homo sapien
ccaggcgttactgaaagtgaatcca

SEQ ID NO: 254104 - DNA, 25 bp, Homo sapien
gctcatccaggcgttactgaaagtg

SEQ ID NO: 254105 - DNA, 25 bp, Homo sapien
acccagctcatccaggcgttactga

SEQ ID NO: 254106 - DNA, 25 bp, Homo sapien
tcatccaggcgttactgaaagtgaa

SEQ ID NO: 254107 - DNA, 25 bp, Homo sapien
aacacagagacactaagatcagaaa

SEQ ID NO: 254108 - DNA, 25 bp, Homo sapien
gcaaacacagagacactaagatcag

SEQ ID NO: 254109 - DNA, 25 bp, Homo sapien
caaacacagagacactaagatcaga

SEQ ID NO: 254110 - DNA, 25 bp, Homo sapien
ctgcaaacacagagacactaagatc

SEQ ID NO: 254111 - DNA, 25 bp, Homo sapien
taatctctctagttctccataaatc

SEQ ID NO: 254112 - DNA, 25 bp, Homo sapien
cacttaatctctctagttctccata

SEQ ID NO: 254113 - DNA, 25 bp, Homo sapien
gtccactcacacttaatctctctag

SEQ ID NO: 254114 - DNA, 25 bp, Homo sapien
cttaatctctctagttctccataaa

SEQ ID NO: 254115 - DNA, 25 bp, Homo sapien
aatagcagcaaggaaaatccagctc

SEQ ID NO: 254116 - DNA, 25 bp, Homo sapien
gcaaggaaaatccagctcagcccaa

SEQ ID NO: 254117 - DNA, 25 bp, Homo sapien
gcagcaaggaaaatccagctcagcc

SEQ ID NO: 254118 - DNA, 25 bp, Homo sapien
aaatagcagcaaggaaaatccagct

SEQ ID NO: 254119 - DNA, 25 bp, Homo sapien
gtcctgatcactgaatgaaaacact

SEQ ID NO: 254120 - DNA, 25 bp, Homo sapien
ggtgagtcctctgtgttcagtcctg

SEQ ID NO: 254121 - DNA, 25 bp, Homo sapien
gaatgaaaacacttgggaatcccaa

SEQ ID NO: 254122 - DNA, 25 bp, Homo sapien
tcctctgtgttcagtcctgatcact

SEQ ID NO: 254123 - DNA, 25 bp, Homo sapien
tcattgtttagtcggcctaggctgt

SEQ ID NO: 254124 - DNA, 25 bp, Homo sapien
tcctcattgtttagtcggcctaggc

SEQ ID NO: 254125 - DNA, 25 bp, Homo sapien
ttttcctcattgtttagtcggccta

SEQ ID NO: 254126 - DNA, 25 bp, Homo sapien
gtttagtcggcctaggctgtctttc

SEQ ID NO: 254127 - DNA, 25 bp, Homo sapien
ccagcaccttttttcccctcttgca

SEQ ID NO: 254128 - DNA, 25 bp, Homo sapien
tccagcaccttttttcccctcttgc

SEQ ID NO: 254129 - DNA, 25 bp, Homo sapien
ctccagcaccttttttcccctcttg

SEQ ID NO: 254130 - DNA, 25 bp, Homo sapien
cagcaccttttttcccctcttgcac

SEQ ID NO: 254131 - DNA, 25 bp, Homo sapien
tcctgagagcccttggtgtctgagc

SEQ ID NO: 254132 - DNA, 25 bp, Homo sapien
tgtcctgagagcccttggtgtctga

SEQ ID NO: 254133 - DNA, 25 bp, Homo sapien
tgtgtcctgagagcccttggtgtct

SEQ ID NO: 254134 - DNA, 25 bp, Homo sapien
tgccttgatgtgtcctgagagccct

SEQ ID NO: 254135 - DNA, 25 bp, Homo sapien
catggtggtttactcattgtgcggg

SEQ ID NO: 254136 - DNA, 25 bp, Homo sapien
tcattgtgcgggtagctcagctgta

SEQ ID NO: 254137 - DNA, 25 bp, Homo sapien
actgtgtgtttcctcgtgacctaca

SEQ ID NO: 254138 - DNA, 25 bp, Homo sapien
actggactcttgagaagcgggttgc

SEQ ID NO: 254139 - DNA, 25 bp, Homo sapien
aagtactggttatgattggaaatcc

SEQ ID NO: 254140 - DNA, 25 bp, Homo sapien
ttatgattggaaatccagagacagc

SEQ ID NO: 254141 - DNA, 25 bp, Homo sapien
gctggcagatacagctccaggagga

SEQ ID NO: 254142 - DNA, 25 bp, Homo sapien
gaggaagtactggttatgattggaa

SEQ ID NO: 254143 - DNA, 25 bp, Homo sapien
gaagcttgtgccctcattactaatg

SEQ ID NO: 254144 - DNA, 25 bp, Homo sapien
tactaatggccacacgcgttctcag

SEQ ID NO: 254145 - DNA, 25 bp, Homo sapien
gacgcgtctccagaaaacagagtgg

SEQ ID NO: 254146 - DNA, 25 bp, Homo sapien
tgaccaaagaagcttgtgccctcat

SEQ ID NO: 254147 - DNA, 25 bp, Homo sapien
gtctgggctcgcacttgtgtcccct

SEQ ID NO: 254148 - DNA, 25 bp, Homo sapien
tgtgtctgggctcgcacttgtgtcc

SEQ ID NO: 254149 - DNA, 25 bp, Homo sapien
ctgatttcgcccagtgttcctgcag

SEQ ID NO: 254150 - DNA, 25 bp, Homo sapien
cagctgatttcgcccagtgttcctg

SEQ ID NO: 254151 - DNA, 25 bp, Homo sapien
gatttctcacacagtaatacacagc

SEQ ID NO: 254152 - DNA, 25 bp, Homo sapien
aggatttctcacacagtaatacaca

SEQ ID NO: 254153 - DNA, 25 bp, Homo sapien
ggatttctcacacagtaatacacag

SEQ ID NO: 254154 - DNA, 25 bp, Homo sapien
ctgccattccaactaacacccgata

SEQ ID NO: 254155 - DNA, 25 bp, Homo sapien
actgccattccaactaacacccgat

SEQ ID NO: 254156 - DNA, 25 bp, Homo sapien
tgccattccaactaacacccgatac

SEQ ID NO: 254157 - DNA, 25 bp, Homo sapien
accagctgcacctcacactggacac

SEQ ID NO: 254158 - DNA, 25 bp, Homo sapien
aggagagtctcagggaccccccagg

SEQ ID NO: 254159 - DNA, 25 bp, Homo sapien
tcagggaccccccaggctgtaccaa

SEQ ID NO: 254160 - DNA, 25 bp, Homo sapien
aagcctcccccagactccaccagct

SEQ ID NO: 254161 - DNA, 25 bp, Homo sapien
ctgcaaacacagagacaccctggtc

SEQ ID NO: 254162 - DNA, 25 bp, Homo sapien
gcaaacacagagacaccctggtcag

SEQ ID NO: 254163 - DNA, 25 bp, Homo sapien
caaacacagagacaccctggtcaga

SEQ ID NO: 254164 - DNA, 25 bp, Homo sapien
aacacagagacaccctggtcagaaa

SEQ ID NO: 254165 - DNA, 25 bp, Homo sapien
gaaaaacccagctcagcccaaattc

SEQ ID NO: 254166 - DNA, 25 bp, Homo sapien
aataccagcaagaaaaacccagctc

SEQ ID NO: 254167 - DNA, 25 bp, Homo sapien
gcaagaaaaacccagctcagcccaa

SEQ ID NO: 254168 - DNA, 25 bp, Homo sapien
aaataccagcaagaaaaacccagct

SEQ ID NO: 254169 - DNA, 25 bp, Homo sapien
ccaaggtgaccttgcacatccccca

SEQ ID NO: 254170 - DNA, 25 bp, Homo sapien
cttgcacatcccccaggtcacctca

SEQ ID NO: 254171 - DNA, 25 bp, Homo sapien
aggtgaccttgcacatcccccaggt

SEQ ID NO: 254172 - DNA, 25 bp, Homo sapien
ttgcacatcccccaggtcacctcac

SEQ ID NO: 254173 - DNA, 25 bp, Homo sapien
attcctgtggccacctcacacaagt

SEQ ID NO: 254174 - DNA, 25 bp, Homo sapien
tgtcaccttacacatcccccaggtc

SEQ ID NO: 254175 - DNA, 25 bp, Homo sapien
acatcccgcaggtcacctcgtaaat

SEQ ID NO: 254176 - DNA, 25 bp, Homo sapien
gtcacctcacacatccccaatgtca

SEQ ID NO: 254177 - DNA, 25 bp, Homo sapien
aattttcccccctgactctatcagt

SEQ ID NO: 254178 - DNA, 25 bp, Homo sapien
tctcacagtattacaaggccttgtc

SEQ ID NO: 254179 - DNA, 25 bp, Homo sapien
tctctcacagtattacaaggccttg

SEQ ID NO: 254180 - DNA, 25 bp, Homo sapien
cctgactctatcagtaaatttcaca

SEQ ID NO: 254181 - DNA, 25 bp, Homo sapien
ggttttcgcactgtgtctctcacac

SEQ ID NO: 254182 - DNA, 25 bp, Homo sapien
tgggttttcgcactgtgtctctcac

SEQ ID NO: 254183 - DNA, 25 bp, Homo sapien
ggatgtgggttttcgcactgtgtct

SEQ ID NO: 254184 - DNA, 25 bp, Homo sapien
tgtgggttttcgcactgtgtctctc

SEQ ID NO: 254185 - DNA, 25 bp, Homo sapien
ctccatgtaggctgtgctcacggac

SEQ ID NO: 254186 - DNA, 25 bp, Homo sapien
gctccatgtaggctgtgctcacgga

SEQ ID NO: 254187 - DNA, 25 bp, Homo sapien
aggaatacacgaccatgtcttcaga

SEQ ID NO: 254188 - DNA, 25 bp, Homo sapien
tcagctccatgtaggctgtgctcac

SEQ ID NO: 254189 - DNA, 25 bp, Homo sapien
ctgtcactggtaatggtgactctgc

SEQ ID NO: 254190 - DNA, 25 bp, Homo sapien
tcactggtaatggtgactctgcccc

SEQ ID NO: 254191 - DNA, 25 bp, Homo sapien
tggtaatggtgactctgccccggaa

SEQ ID NO: 254192 - DNA, 25 bp, Homo sapien
actggtaatggtgactctgccccgg

SEQ ID NO: 254193 - DNA, 25 bp, Homo sapien
tgtgtgttatcattgtaagggttga

SEQ ID NO: 254194 - DNA, 25 bp, Homo sapien
gtgtgtgttatcattgtaagggttg

SEQ ID NO: 254195 - DNA, 25 bp, Homo sapien
gtgtgttatcattgtaagggttgat

SEQ ID NO: 254196 - DNA, 25 bp, Homo sapien
tagtgtgtgttatcattgtaagggt

SEQ ID NO: 254197 - DNA, 25 bp, Homo sapien
ccactgtgtaaagtatttggtgaag

SEQ ID NO: 254198 - DNA, 25 bp, Homo sapien
cttcactgaggacgcaggcttcttc

SEQ ID NO: 254199 - DNA, 25 bp, Homo sapien
ttggtgaaggtgtatctggaagcct

SEQ ID NO: 254200 - DNA, 25 bp, Homo sapien
agaccttcactgaggacgcaggctt

SEQ ID NO: 254201 - DNA, 25 bp, Homo sapien
tggcagctgccaccaagaagaggat

SEQ ID NO: 254202 - DNA, 25 bp, Homo sapien
ctgtggcagctgccaccaagaagag

SEQ ID NO: 254203 - DNA, 25 bp, Homo sapien
gcagctgccaccaagaagaggatcc

SEQ ID NO: 254204 - DNA, 25 bp, Homo sapien
tgtggcagctgccaccaagaagagg

SEQ ID NO: 254205 - DNA, 25 bp, Homo sapien
tccatggtgaggagctgtgctctca

SEQ ID NO: 254206 - DNA, 25 bp, Homo sapien
tgaggagctgtgctctcaggggctt

SEQ ID NO: 254207 - DNA, 25 bp, Homo sapien
agtccatggtgaggagctgtgctct

SEQ ID NO: 254208 - DNA, 25 bp, Homo sapien
ggtgaggagctgtgctctcaggggc

SEQ ID NO: 254209 - DNA, 25 bp, Homo sapien
tctagcccagcatgaaatggctgtg

SEQ ID NO: 254210 - DNA, 25 bp, Homo sapien
gcccctgccttgcaaggaggttcct

SEQ ID NO: 254211 - DNA, 25 bp, Homo sapien
gctgtgtgctagtgtagaatactcc

SEQ ID NO: 254212 - DNA, 25 bp, Homo sapien
gctgctgacaccatctcttgaaaca

SEQ ID NO: 254213 - DNA, 25 bp, Homo sapien
tcttgggatctctgcgtcttctgaa

SEQ ID NO: 254214 - DNA, 25 bp, Homo sapien
tctctgcgtcttctgaaatgtgtac

SEQ ID NO: 254215 - DNA, 25 bp, Homo sapien
ggatctctgcgtcttctgaaatgtg

SEQ ID NO: 254216 - DNA, 25 bp, Homo sapien
tgcgtcttctgaaatgtgtaccttt

SEQ ID NO: 254217 - DNA, 25 bp, Homo sapien
cataggcaagtgactcaatcaggca

SEQ ID NO: 254218 - DNA, 25 bp, Homo sapien
tagtcaggcttatcttggcatacca

SEQ ID NO: 254219 - DNA, 25 bp, Homo sapien
agtccagtaccgaaggcacagaggg

SEQ ID NO: 254220 - DNA, 25 bp, Homo sapien
caaaccaggctatacaatgtcacga

SEQ ID NO: 254221 - DNA, 25 bp, Homo sapien
tatgctgggcatgaactcaaggctt

SEQ ID NO: 254222 - DNA, 25 bp, Homo sapien
ccttcattatagttagatatgatgc

SEQ ID NO: 254223 - DNA, 25 bp, Homo sapien
tacaaaaagcaacgttaccaggtgc

SEQ ID NO: 254224 - DNA, 25 bp, Homo sapien
tgccgaagagatggctaacgctcaa

SEQ ID NO: 254225 - DNA, 25 bp, Homo sapien
atacacggccgtgtcgtcagatctc

SEQ ID NO: 254226 - DNA, 25 bp, Homo sapien
tacacggccgtgtcgtcagatctca

SEQ ID NO: 254227 - DNA, 25 bp, Homo sapien
ggccgtgtcgtcagatctcaggctc

SEQ ID NO: 254228 - DNA, 25 bp, Homo sapien
cacggccgtgtcgtcagatctcagg

SEQ ID NO: 254229 - DNA, 25 bp, Homo sapien
gtgctcgtggatgtgtctgtggtca

SEQ ID NO: 254230 - DNA, 25 bp, Homo sapien
tgtgtctgtggtcatggtgactctg

SEQ ID NO: 254231 - DNA, 25 bp, Homo sapien
ctgtgctcgtggatgtgtctgtggt

SEQ ID NO: 254232 - DNA, 25 bp, Homo sapien
tgtctgtggtcatggtgactctgcc

SEQ ID NO: 254233 - DNA, 25 bp, Homo sapien
cattgtaagcgctgatccatcccat

SEQ ID NO: 254234 - DNA, 25 bp, Homo sapien
tttgtgttaccattgtaagcgctga

SEQ ID NO: 254235 - DNA, 25 bp, Homo sapien
catagtttgtgttaccattgtaagc

SEQ ID NO: 254236 - DNA, 25 bp, Homo sapien
tgttaccattgtaagcgctgatcca

SEQ ID NO: 254237 - DNA, 25 bp, Homo sapien
ctgtcgcacccagctgataccatag

SEQ ID NO: 254238 - DNA, 25 bp, Homo sapien
gcctgtcgcacccagctgataccat

SEQ ID NO: 254239 - DNA, 25 bp, Homo sapien
gtcgcacccagctgataccatagct

SEQ ID NO: 254240 - DNA, 25 bp, Homo sapien
aggggcctgtcgcacccagctgata

SEQ ID NO: 254241 - DNA, 25 bp, Homo sapien
tgctgccaccaagaaaaggatgctc

SEQ ID NO: 254242 - DNA, 25 bp, Homo sapien
tgccaccaagaaaaggatgctccag

SEQ ID NO: 254243 - DNA, 25 bp, Homo sapien
gctgccaccaagaaaaggatgctcc

SEQ ID NO: 254244 - DNA, 25 bp, Homo sapien
ccaccaagaaaaggatgctccaggt

SEQ ID NO: 254245 - DNA, 25 bp, Homo sapien
gactctgaagattgtagactcagtg

SEQ ID NO: 254246 - DNA, 25 bp, Homo sapien
gacctgaatgtttacaagaatccca

SEQ ID NO: 254247 - DNA, 25 bp, Homo sapien
cttatttcttctgttgacctgaatg

SEQ ID NO: 254248 - DNA, 25 bp, Homo sapien
caggactccccttcatggatgactc

SEQ ID NO: 254249 - DNA, 25 bp, Homo sapien
ccaacgttcctgcaggaggtttgtg

SEQ ID NO: 254250 - DNA, 25 bp, Homo sapien
atttcccccaacgttcctgcaggag

SEQ ID NO: 254251 - DNA, 25 bp, Homo sapien
tgatttcccccaacgttcctgcagg

SEQ ID NO: 254252 - DNA, 25 bp, Homo sapien
ccccaacgttcctgcaggaggtttg

SEQ ID NO: 254253 - DNA, 25 bp, Homo sapien
ttcatttgctgatacaggaagttcc

SEQ ID NO: 254254 - DNA, 25 bp, Homo sapien
gctgttcatttgctgatacaggaag

SEQ ID NO: 254255 - DNA, 25 bp, Homo sapien
aggctgttcatttgctgatacagga

SEQ ID NO: 254256 - DNA, 25 bp, Homo sapien
tgttcatttgctgatacaggaagtt

SEQ ID NO: 254257 - DNA, 25 bp, Homo sapien
tcacagagtctgcatagtgcgtcct

SEQ ID NO: 254258 - DNA, 25 bp, Homo sapien
gagtctgcatagtgcgtcctactgc

SEQ ID NO: 254259 - DNA, 25 bp, Homo sapien
tgccattccaactaacacccgatac

SEQ ID NO: 254260 - DNA, 25 bp, Homo sapien
gcatagtgcgtcctactgccattcc

SEQ ID NO: 254261 - DNA, 25 bp, Homo sapien
ggcggacccagttcatgtcactgtt

SEQ ID NO: 254262 - DNA, 25 bp, Homo sapien
cggacccagttcatgtcactgttac

SEQ ID NO: 254263 - DNA, 25 bp, Homo sapien
cagttcatgtcactgttactgaagg

SEQ ID NO: 254264 - DNA, 25 bp, Homo sapien
gcctggcggacccagttcatgtcac

SEQ ID NO: 254265 - DNA, 25 bp, Homo sapien
tgcacaggagagtctcagggacccc

SEQ ID NO: 254266 - DNA, 25 bp, Homo sapien
ctgcacaggagagtctcagggaccc

SEQ ID NO: 254267 - DNA, 25 bp, Homo sapien
ctcagggaccccccaggctctacca

SEQ ID NO: 254268 - DNA, 25 bp, Homo sapien
gaccccccaggctctaccaagcctc

SEQ ID NO: 254269 - DNA, 25 bp, Homo sapien
ccgggaacagtatacacaagtcgac

SEQ ID NO: 254270 - DNA, 25 bp, Homo sapien
ctggagtaccaccttccaagtagta

SEQ ID NO: 254271 - DNA, 25 bp, Homo sapien
tcgcgatgatcttcgtgggtaccag

SEQ ID NO: 254272 - DNA, 25 bp, Homo sapien
tggtaggtatctcaacagctagcat

SEQ ID NO: 254273 - DNA, 25 bp, Homo sapien
gatgggatcatttagatgcctgcct

SEQ ID NO: 254274 - DNA, 25 bp, Homo sapien
ccgtgatgggatcatttagatgcct

SEQ ID NO: 254275 - DNA, 25 bp, Homo sapien
tgggatcatttagatgcctgcctgg

SEQ ID NO: 254276 - DNA, 25 bp, Homo sapien
tgatgggatcatttagatgcctgcc

SEQ ID NO: 254277 - DNA, 25 bp, Homo sapien
cagcgtggaggttctcatctttgcc

SEQ ID NO: 254278 - DNA, 25 bp, Homo sapien
cagcgtggaggttctcatctttgtc

SEQ ID NO: 254279 - DNA, 25 bp, Homo sapien
agcgtggaggttctcatctttgccc

SEQ ID NO: 254280 - DNA, 25 bp, Homo sapien
ttgcagatacagggagttcttggcg

SEQ ID NO: 254281 - DNA, 25 bp, Homo sapien
agtgatacaaggccgtgtcctcggc

SEQ ID NO: 254282 - DNA, 25 bp, Homo sapien
cagatacagggagttcttggcgttg

SEQ ID NO: 254283 - DNA, 25 bp, Homo sapien
gtcctcggctctcagactgttcatt

SEQ ID NO: 254284 - DNA, 25 bp, Homo sapien
caccattccaattaataccagagac

SEQ ID NO: 254285 - DNA, 25 bp, Homo sapien
taccaccattccaattaataccaga

SEQ ID NO: 254286 - DNA, 25 bp, Homo sapien
gtgctaccaccattccaattaatac

SEQ ID NO: 254287 - DNA, 25 bp, Homo sapien
ctgcataacctgtgctaccaccatt

SEQ ID NO: 254288 - DNA, 25 bp, Homo sapien
gcttggcggacccagctcatgccat

SEQ ID NO: 254289 - DNA, 25 bp, Homo sapien
tggagcttggcggacccagctcatg

SEQ ID NO: 254290 - DNA, 25 bp, Homo sapien
tccctggagcttggcggacccagct

SEQ ID NO: 254291 - DNA, 25 bp, Homo sapien
gagcttggcggacccagctcatgcc

SEQ ID NO: 254292 - DNA, 25 bp, Homo sapien
gccgtaccacacctcccccagactc

SEQ ID NO: 254293 - DNA, 25 bp, Homo sapien
aatcatcaaaggtgaatccagaggc

SEQ ID NO: 254294 - DNA, 25 bp, Homo sapien
caaaggtgaatccagaggctgcaca

SEQ ID NO: 254295 - DNA, 25 bp, Homo sapien
gctgcacaggagagtctcagggacc

SEQ ID NO: 254296 - DNA, 25 bp, Homo sapien
acatctctattgatccatgaatcac

SEQ ID NO: 254297 - DNA, 25 bp, Homo sapien
tcaacatctctattgatccatgaat

SEQ ID NO: 254298 - DNA, 25 bp, Homo sapien
actcaacatctctattgatccatga

SEQ ID NO: 254299 - DNA, 25 bp, Homo sapien
caacatctctattgatccatgaatc

SEQ ID NO: 254300 - DNA, 25 bp, Homo sapien
aaatagcaacaaggaaaacccagct

SEQ ID NO: 254301 - DNA, 25 bp, Homo sapien
aggaaaacccagctcagcccaaact

SEQ ID NO: 254302 - DNA, 25 bp, Homo sapien
ggaaaacccagctcagcccaaactc

SEQ ID NO: 254303 - DNA, 25 bp, Homo sapien
aaacccagctcagcccaaactccat

SEQ ID NO: 254304 - DNA, 25 bp, Homo sapien
cagggctgggtggttttcatcggca

SEQ ID NO: 254305 - DNA, 25 bp, Homo sapien
aatggaaacacgtgggaatctcagg

SEQ ID NO: 254306 - DNA, 25 bp, Homo sapien
gtgctgatcactgaatggaaacacg

SEQ ID NO: 254307 - DNA, 25 bp, Homo sapien
gttttcatcggcagagggaggaccc

SEQ ID NO: 254308 - DNA, 25 bp, Homo sapien
ctgccccggcggacatagatctgga

SEQ ID NO: 254309 - DNA, 25 bp, Homo sapien
aaatacatggttgtggctgagcgcg

SEQ ID NO: 254310 - DNA, 25 bp, Homo sapien
aacatggttatttgcttgttgctca

SEQ ID NO: 254311 - DNA, 25 bp, Homo sapien
tcatgtagctcagccataggaagag

SEQ ID NO: 254312 - DNA, 25 bp, Homo sapien
ttattcccttcatgactaatgtcca

SEQ ID NO: 254313 - DNA, 25 bp, Homo sapien
tcctcaaagtcacgggtgagagtcc

SEQ ID NO: 254314 - DNA, 25 bp, Homo sapien
gaagcacaagatccagctctacatc

SEQ ID NO: 254315 - DNA, 25 bp, Homo sapien
tctacatcagtatcccattggagaa

SEQ ID NO: 254316 - DNA, 25 bp, Homo sapien
aggctttaaggaccctgaccctgtg

SEQ ID NO: 254317 - DNA, 25 bp, Homo sapien
tgaccctgtgtgagcgtctctcttg

SEQ ID NO: 254318 - DNA, 25 bp, Homo sapien
tgagtgagaaagtccccgtagccta

SEQ ID NO: 254319 - DNA, 25 bp, Homo sapien
caggagagtccagacaatggtgagt

SEQ ID NO: 254320 - DNA, 25 bp, Homo sapien
ccctggagacagacccgtgcacagt

SEQ ID NO: 254321 - DNA, 25 bp, Homo sapien
gtgcacagtgtcccgggcgcccctg

SEQ ID NO: 254322 - DNA, 25 bp, Homo sapien
agacccgtgcacagtgtcccgggcg

SEQ ID NO: 254323 - DNA, 25 bp, Homo sapien
ggagacagacccgtgcacagtgtcc

SEQ ID NO: 254324 - DNA, 25 bp, Homo sapien
caggctgttcatttgcagatacagt

SEQ ID NO: 254325 - DNA, 25 bp, Homo sapien
ctctcaggctgttcatttgcagata

SEQ ID NO: 254326 - DNA, 25 bp, Homo sapien
cggctctcaggctgttcatttgcag

SEQ ID NO: 254327 - DNA, 25 bp, Homo sapien
tcggctctcaggctgttcatttgca

SEQ ID NO: 254328 - DNA, 25 bp, Homo sapien
cctggcggacccagttcatgctata

SEQ ID NO: 254329 - DNA, 25 bp, Homo sapien
tcactgagtctgcgtagtatatgta

SEQ ID NO: 254330 - DNA, 25 bp, Homo sapien
ctgagtctgcgtagtatatgtaact

SEQ ID NO: 254331 - DNA, 25 bp, Homo sapien
agttcatgctatagctactgaaggt

SEQ ID NO: 254332 - DNA, 25 bp, Homo sapien
ccccagactccaccagctgcacctc

SEQ ID NO: 254333 - DNA, 25 bp, Homo sapien
actccaccagctgcacctcacactg

SEQ ID NO: 254334 - DNA, 25 bp, Homo sapien
gactccaccagctgcacctcacact

SEQ ID NO: 254335 - DNA, 25 bp, Homo sapien
cagactccaccagctgcacctcaca

SEQ ID NO: 254336 - DNA, 25 bp, Homo sapien
agcaacaaggaaaacccagcggagc

SEQ ID NO: 254337 - DNA, 25 bp, Homo sapien
caaggaaaacccagcggagccccag

SEQ ID NO: 254338 - DNA, 25 bp, Homo sapien
tagcaacaaggaaaacccagcggag

SEQ ID NO: 254339 - DNA, 25 bp, Homo sapien
aaatagcaacaaggaaaacccagcg

SEQ ID NO: 254340 - DNA, 25 bp, Homo sapien
aagtggataggccttggaatccagg

SEQ ID NO: 254341 - DNA, 25 bp, Homo sapien
gatcaccaagtggataggccttgga

SEQ ID NO: 254342 - DNA, 25 bp, Homo sapien
ctgatcaccaagtggataggccttg

SEQ ID NO: 254343 - DNA, 25 bp, Homo sapien
accaagtggataggccttggaatcc

SEQ ID NO: 254344 - DNA, 25 bp, Homo sapien
tgttttctgagtttatggtatgaac

SEQ ID NO: 254345 - DNA, 25 bp, Homo sapien
gagtttatggtatgaacagatgcag

SEQ ID NO: 254346 - DNA, 25 bp, Homo sapien
agatgcagaagagtttgtcacgggc

SEQ ID NO: 254347 - DNA, 25 bp, Homo sapien
tctgagtttatggtatgaacagatg

SEQ ID NO: 254348 - DNA, 25 bp, Homo sapien
cctgctcctgtcccgccctcagtgg

SEQ ID NO: 254349 - DNA, 25 bp, Homo sapien
tgctcctgtcccgccctcagtgggt

SEQ ID NO: 254350 - DNA, 25 bp, Homo sapien
cagtgggtccctagcgcccccctgg

SEQ ID NO: 254351 - DNA, 25 bp, Homo sapien
tcctgtcccgccctcagtgggtccc

SEQ ID NO: 254352 - DNA, 25 bp, Homo sapien
caggctcttcatttgcagataggtg

SEQ ID NO: 254353 - DNA, 25 bp, Homo sapien
tcaggctcttcatttgcagataggt

SEQ ID NO: 254354 - DNA, 25 bp, Homo sapien
tttcaggctcttcatttgcagatag

SEQ ID NO: 254355 - DNA, 25 bp, Homo sapien
gctcttcatttgcagataggtgatg

SEQ ID NO: 254356 - DNA, 25 bp, Homo sapien
ggaatcatctcttgagattgtgaat

SEQ ID NO: 254357 - DNA, 25 bp, Homo sapien
aatcatctcttgagattgtgaatct

SEQ ID NO: 254358 - DNA, 25 bp, Homo sapien
ttggaatcatctcttgagattgtga

SEQ ID NO: 254359 - DNA, 25 bp, Homo sapien
tcatctcttgagattgtgaatctgc

SEQ ID NO: 254360 - DNA, 25 bp, Homo sapien
tagctttgtttctaatgaaacctac

SEQ ID NO: 254361 - DNA, 25 bp, Homo sapien
attagctttgtttctaatgaaacct

SEQ ID NO: 254362 - DNA, 25 bp, Homo sapien
ttagctttgtttctaatgaaaccta

SEQ ID NO: 254363 - DNA, 25 bp, Homo sapien
cattagctttgtttctaatgaaacc

SEQ ID NO: 254364 - DNA, 25 bp, Homo sapien
cctggcggaccccgctcatgtagta

SEQ ID NO: 254365 - DNA, 25 bp, Homo sapien
gagcctggcggaccccgctcatgta

SEQ ID NO: 254366 - DNA, 25 bp, Homo sapien
tggcggaccccgctcatgtagtagt

SEQ ID NO: 254367 - DNA, 25 bp, Homo sapien
cggaccccgctcatgtagtagtaac

SEQ ID NO: 254368 - DNA, 25 bp, Homo sapien
ggctgcacaggagagtctcagggac

SEQ ID NO: 254369 - DNA, 25 bp, Homo sapien
tgcacaggagagtctcagggacccc

SEQ ID NO: 254370 - DNA, 25 bp, Homo sapien
tcagggaccccccaggctgtaccaa

SEQ ID NO: 254371 - DNA, 25 bp, Homo sapien
tgaaggtgaatccagaggctgcaca

SEQ ID NO: 254372 - DNA, 25 bp, Homo sapien
tgcaaacaaaaagaaaccctggtca

SEQ ID NO: 254373 - DNA, 25 bp, Homo sapien
aagaaaaacccagctcagccatgac

SEQ ID NO: 254374 - DNA, 25 bp, Homo sapien
aatagcggcaagaaaaacccagctc

SEQ ID NO: 254375 - DNA, 25 bp, Homo sapien
aaatagcggcaagaaaaacccagct

SEQ ID NO: 254376 - DNA, 25 bp, Homo sapien
aaaaacccagctcagccatgactcc

SEQ ID NO: 254377 - DNA, 25 bp, Homo sapien
taaaaatcatggttgtgtactcctt

SEQ ID NO: 254378 - DNA, 25 bp, Homo sapien
actccttgttaaggtagctcagctg

SEQ ID NO: 254379 - DNA, 25 bp, Homo sapien
ttgtataaaaatcatggttgtgtac

SEQ ID NO: 254380 - DNA, 25 bp, Homo sapien
tgtgtactccttgttaaggtagctc

SEQ ID NO: 254381 - DNA, 25 bp, Homo sapien
gcaaagctgcacacgggggtctctg

SEQ ID NO: 254382 - DNA, 25 bp, Homo sapien
atgaggaaagatctgactctgcaaa

SEQ ID NO: 254383 - DNA, 25 bp, Homo sapien
tgaggaaagatctgactctgcaaag

SEQ ID NO: 254384 - DNA, 25 bp, Homo sapien
aagctgcacacgggggtctctgcag

SEQ ID NO: 254385 - DNA, 25 bp, Homo sapien
ctcccctacactccaccacctgcac

SEQ ID NO: 254386 - DNA, 25 bp, Homo sapien
ctctcccctacactccaccacctgc

SEQ ID NO: 254387 - DNA, 25 bp, Homo sapien
aacaagaaaacccagctcagcccta

SEQ ID NO: 254388 - DNA, 25 bp, Homo sapien
aaaatagcaacaagaaaacccagct

SEQ ID NO: 254389 - DNA, 25 bp, Homo sapien
atagcaacaagaaaacccagctcag

SEQ ID NO: 254390 - DNA, 25 bp, Homo sapien
aaaacccagctcagccctaactcta

SEQ ID NO: 254391 - DNA, 25 bp, Homo sapien
gcacctgcctctgcggatgactctg

SEQ ID NO: 254392 - DNA, 25 bp, Homo sapien
gatttcccccccatcgttcctgcag

SEQ ID NO: 254393 - DNA, 25 bp, Homo sapien
tggtgaaccggcccttcacggagtc

SEQ ID NO: 254394 - DNA, 25 bp, Homo sapien
gtgaaccggcccttcacggagtctg

SEQ ID NO: 254395 - DNA, 25 bp, Homo sapien
gagatggtgaaccggcccttcacgg

SEQ ID NO: 254396 - DNA, 25 bp, Homo sapien
aaccggcccttcacggagtctgcgt

SEQ ID NO: 254397 - DNA, 25 bp, Homo sapien
ggctgcacaggagagtctcagggac

SEQ ID NO: 254398 - DNA, 25 bp, Homo sapien
tgcacaggagagtctcagggacccc

SEQ ID NO: 254399 - DNA, 25 bp, Homo sapien
gcatagctgctaaaggtgaatccag

SEQ ID NO: 254400 - DNA, 25 bp, Homo sapien
ccagaggctgcacaggagagtctca

SEQ ID NO: 254401 - DNA, 25 bp, Homo sapien
acaagaaaaagccagctcagcccaa

SEQ ID NO: 254402 - DNA, 25 bp, Homo sapien
aagaaaaagccagctcagcccaaac

SEQ ID NO: 254403 - DNA, 25 bp, Homo sapien
gaaaaagccagctcagcccaaactc

SEQ ID NO: 254404 - DNA, 25 bp, Homo sapien
ttaaaatagccacaagaaaaagcca

SEQ ID NO: 254405 - DNA, 25 bp, Homo sapien
tgttcagtcctgatcaccaaatgaa

SEQ ID NO: 254406 - DNA, 25 bp, Homo sapien
tcgtgaggttcgcagaaccttttct

SEQ ID NO: 254407 - DNA, 25 bp, Homo sapien
cacagctcgtgaggttcgcagaacc

SEQ ID NO: 254408 - DNA, 25 bp, Homo sapien
agcacacaggggtcacagctcgtga

SEQ ID NO: 254409 - DNA, 25 bp, Homo sapien
ggtcacagctcgtgaggttcgcaga

SEQ ID NO: 254410 - DNA, 25 bp, Homo sapien
gggcagggatacttggaaggacaca

SEQ ID NO: 254411 - DNA, 25 bp, Homo sapien
cttggaaggacacaccctgagccag

SEQ ID NO: 254412 - DNA, 25 bp, Homo sapien
aggaagggcagggatacttggaagg

SEQ ID NO: 254413 - DNA, 25 bp, Homo sapien
gaagggcagggatacttggaaggac

SEQ ID NO: 254414 - DNA, 25 bp, Homo sapien
catattgacaatcatcaggtccatg

SEQ ID NO: 254415 - DNA, 25 bp, Homo sapien
atattgacaatcatcaggtccatgt

SEQ ID NO: 254416 - DNA, 25 bp, Homo sapien
tgacaatcatcaggtccatgtggct

SEQ ID NO: 254417 - DNA, 25 bp, Homo sapien
caatcatcaggtccatgtggctctg

SEQ ID NO: 254418 - DNA, 25 bp, Homo sapien
agtcagcgccacagaagaatgttct

SEQ ID NO: 254419 - DNA, 25 bp, Homo sapien
taatttattttgcccctctagtcag

SEQ ID NO: 254420 - DNA, 25 bp, Homo sapien
cagcgccacagaagaatgttctcag

SEQ ID NO: 254421 - DNA, 25 bp, Homo sapien
cctctagtcagcgccacagaagaat

SEQ ID NO: 254422 - DNA, 25 bp, Homo sapien
tgcccttcagtcacttcctgaacac

SEQ ID NO: 254423 - DNA, 25 bp, Homo sapien
gtttatccttgcaggcccctgtccg

SEQ ID NO: 254424 - DNA, 25 bp, Homo sapien
cctgaaacgtggcatttggcagtgc

SEQ ID NO: 254425 - DNA, 25 bp, Homo sapien
aaacgtggcatttggcagtgctttc

SEQ ID NO: 254426 - DNA, 25 bp, Homo sapien
tccgtttctggagcacgggttgcag

SEQ ID NO: 254427 - DNA, 25 bp, Homo sapien
tgagtgtgtggtagtggataatcag

SEQ ID NO: 254428 - DNA, 25 bp, Homo sapien
agtgtgtggtagtggataatcagtg

SEQ ID NO: 254429 - DNA, 25 bp, Homo sapien
ctgagtgtgtggtagtggataatca

SEQ ID NO: 254430 - DNA, 25 bp, Homo sapien
gagtgtgtggtagtggataatcagt

SEQ ID NO: 254431 - DNA, 25 bp, Homo sapien
taaacttcataaatcctgtcatctc

SEQ ID NO: 254432 - DNA, 25 bp, Homo sapien
acttcataaatcctgtcatctcctc

SEQ ID NO: 254433 - DNA, 25 bp, Homo sapien
ttaaacttcataaatcctgtcatct

SEQ ID NO: 254434 - DNA, 25 bp, Homo sapien
aaacttcataaatcctgtcatctcc

SEQ ID NO: 254435 - DNA, 25 bp, Homo sapien
tcaggctgctcagctccatgtaggc

SEQ ID NO: 254436 - DNA, 25 bp, Homo sapien
aggctgctcagctccatgtaggctg

SEQ ID NO: 254437 - DNA, 25 bp, Homo sapien
tctcaggctgctcagctccatgtag

SEQ ID NO: 254438 - DNA, 25 bp, Homo sapien
ctcagatctcaggctgctcagctcc

SEQ ID NO: 254439 - DNA, 25 bp, Homo sapien
tgtagatgtgtcctcggtcatggtg

SEQ ID NO: 254440 - DNA, 25 bp, Homo sapien
gtagatgtgtcctcggtcatggtga

SEQ ID NO: 254441 - DNA, 25 bp, Homo sapien
attcagtgagggtgtatccggaaac

SEQ ID NO: 254442 - DNA, 25 bp, Homo sapien
cgcacccagtgcatggataattcag

SEQ ID NO: 254443 - DNA, 25 bp, Homo sapien
tcgcacccagtgcatggataattca

SEQ ID NO: 254444 - DNA, 25 bp, Homo sapien
catggataattcagtgagggtgtat

SEQ ID NO: 254445 - DNA, 25 bp, Homo sapien
cagactgtaccagctggacctgggc

SEQ ID NO: 254446 - DNA, 25 bp, Homo sapien
gccccagactgtaccagctggacct

SEQ ID NO: 254447 - DNA, 25 bp, Homo sapien
tcagccccagactgtaccagctgga

SEQ ID NO: 254448 - DNA, 25 bp, Homo sapien
ctcagccccagactgtaccagctgg

SEQ ID NO: 254449 - DNA, 25 bp, Homo sapien
gacaccacttaactggacccagtcc

SEQ ID NO: 254450 - DNA, 25 bp, Homo sapien
acttaactggacccagtcccctcat

SEQ ID NO: 254451 - DNA, 25 bp, Homo sapien
cacttaactggacccagtcccctca

SEQ ID NO: 254452 - DNA, 25 bp, Homo sapien
gagacaccacttaactggacccagt

SEQ ID NO: 254453 - DNA, 25 bp, Homo sapien
gtgcagtccatggtgaggtgctgcg

SEQ ID NO: 254454 - DNA, 25 bp, Homo sapien
ggtgctgcgctctgggggcttctgt

SEQ ID NO: 254455 - DNA, 25 bp, Homo sapien
gtgctgcgctctgggggcttctgta

SEQ ID NO: 254456 - DNA, 25 bp, Homo sapien
ccaagaagaggatcctccaggtgca

SEQ ID NO: 254457 - DNA, 25 bp, Homo sapien
tccccatgttttcggagaggaatgt

SEQ ID NO: 254458 - DNA, 25 bp, Homo sapien
tccaacaacccttatgaacgatata

SEQ ID NO: 254459 - DNA, 25 bp, Homo sapien
tatcggataaaaggagcccgatggc

SEQ ID NO: 254460 - DNA, 25 bp, Homo sapien
tgggcaagtctccactaaacagtta

SEQ ID NO: 254461 - DNA, 25 bp, Homo sapien
acacatacttaggactcacgttggg

SEQ ID NO: 254462 - DNA, 25 bp, Homo sapien
ctgccagccctagttgttggtgccc

SEQ ID NO: 254463 - DNA, 25 bp, Homo sapien
gttatgcaggcctggatcttccggt

SEQ ID NO: 254464 - DNA, 25 bp, Homo sapien
cctgggcggaagttatgcaggcctg

SEQ ID NO: 254465 - DNA, 25 bp, Homo sapien
gtcgggatttgctctcctcagggcc

SEQ ID NO: 254466 - DNA, 25 bp, Homo sapien
ttccaggttttgatcctctctctgc

SEQ ID NO: 254467 - DNA, 25 bp, Homo sapien
gtcgcactctgactcacggcctctt

SEQ ID NO: 254468 - DNA, 25 bp, Homo sapien
tcctctgctccgcactggccgtcga

SEQ ID NO: 254469 - DNA, 25 bp, Homo sapien
ctccatcttctcagagacacagtcg

SEQ ID NO: 254470 - DNA, 25 bp, Homo sapien
gcgccgtgggcagccggaagtcggt

SEQ ID NO: 254471 - DNA, 25 bp, Homo sapien
tgcccagacgtctgtgacgtgttgg

SEQ ID NO: 254472 - DNA, 25 bp, Homo sapien
tgttgtttatggtcaccttggcgct

SEQ ID NO: 254473 - DNA, 25 bp, Homo sapien
cccagactgcaggtgcgtgtcggct

SEQ ID NO: 254474 - DNA, 25 bp, Homo sapien
cggagtagaagatggggctccacgc

SEQ ID NO: 254475 - DNA, 25 bp, Homo sapien
tgtgacatcatagaaacaggaaatg

SEQ ID NO: 254476 - DNA, 25 bp, Homo sapien
catcatagaaacaggaaatggtgac

SEQ ID NO: 254477 - DNA, 25 bp, Homo sapien
gacatcatagaaacaggaaatggtg

SEQ ID NO: 254478 - DNA, 25 bp, Homo sapien
cttgtgacatcatagaaacaggaaa

SEQ ID NO: 254479 - DNA, 25 bp, Homo sapien
ctgttgctcgcaggcatccagttct

SEQ ID NO: 254480 - DNA, 25 bp, Homo sapien
cgcctgttgctcgcaggcatccagt

SEQ ID NO: 254481 - DNA, 25 bp, Homo sapien
tgttgctcgcaggcatccagttctt

SEQ ID NO: 254482 - DNA, 25 bp, Homo sapien
cctgttgctcgcaggcatccagttc

SEQ ID NO: 254483 - DNA, 25 bp, Homo sapien
taatctgtaataaggagacgtcaac

SEQ ID NO: 254484 - DNA, 25 bp, Homo sapien
tctggtataacagcatgttgagaaa

SEQ ID NO: 254485 - DNA, 25 bp, Homo sapien
gaagaaacctcgaagcacaggaagg

SEQ ID NO: 254486 - DNA, 25 bp, Homo sapien
caggaagggtctcatgtatagtagg

SEQ ID NO: 254487 - DNA, 25 bp, Homo sapien
tctctggaggtattgaatcggtcct

SEQ ID NO: 254488 - DNA, 25 bp, Homo sapien
tacactaatagagggccgtgtcctc

SEQ ID NO: 254489 - DNA, 25 bp, Homo sapien
tggcggacacagttcatgtagtagc

SEQ ID NO: 254490 - DNA, 25 bp, Homo sapien
cggtccttaccggagtctatgaggt

SEQ ID NO: 254491 - DNA, 25 bp, Homo sapien
aaatagcaacaaggaaaacccagct

SEQ ID NO: 254492 - DNA, 25 bp, Homo sapien
aaacccagctcagcacaaactccat

SEQ ID NO: 254493 - DNA, 25 bp, Homo sapien
aggaaaacccagctcagcacaaact

SEQ ID NO: 254494 - DNA, 25 bp, Homo sapien
gaaaacccagctcagcacaaactcc

SEQ ID NO: 254495 - DNA, 25 bp, Homo sapien
gaacctgaagtttttgtgaacagga

SEQ ID NO: 254496 - DNA, 25 bp, Homo sapien
tttcaactctgatagccacggcaac

SEQ ID NO: 254497 - DNA, 25 bp, Homo sapien
aatgtgaagatccaaagccaaacag

SEQ ID NO: 254498 - DNA, 25 bp, Homo sapien
caaacgcaggtatcaccagaggaac

SEQ ID NO: 254499 - DNA, 25 bp, Homo sapien
tgctggaccaagcttatgctgcaat

SEQ ID NO: 254500 - DNA, 25 bp, Homo sapien
tggaccaagcttatgctgcaatcag

SEQ ID NO: 254501 - DNA, 25 bp, Homo sapien
ctggaccaagcttatgctgcaatca

SEQ ID NO: 254502 - DNA, 25 bp, Homo sapien
gctggaccaagcttatgctgcaatc

SEQ ID NO: 254503 - DNA, 25 bp, Homo sapien
gctgcaccgttatttcctctgtctc

SEQ ID NO: 254504 - DNA, 25 bp, Homo sapien
tgtctcccccggtgaacttcacaca

SEQ ID NO: 254505 - DNA, 25 bp, Homo sapien
gagactcagatagcccccggctgca

SEQ ID NO: 254506 - DNA, 25 bp, Homo sapien
ccggctgcaccgttatttcctctgt

SEQ ID NO: 254507 - DNA, 25 bp, Homo sapien
caggaccactacggacaggggatga

SEQ ID NO: 254508 - DNA, 25 bp, Homo sapien
agtgtgggagtgaccacatttccat

SEQ ID NO: 254509 - DNA, 25 bp, Homo sapien
gaccactacggacaggggatgagct

SEQ ID NO: 254510 - DNA, 25 bp, Homo sapien
ttgagtgtgggagtgaccacatttc

SEQ ID NO: 254511 - DNA, 25 bp, Homo sapien
ctctgagtctggttggtataggaaa

SEQ ID NO: 254512 - DNA, 25 bp, Homo sapien
tggttggtataggaaacacaagccc

SEQ ID NO: 254513 - DNA, 25 bp, Homo sapien
gagtctggttggtataggaaacaca

SEQ ID NO: 254514 - DNA, 25 bp, Homo sapien
ggtataggaaacacaagccctggca

SEQ ID NO: 254515 - DNA, 25 bp, Homo sapien
caccactgagatgcagctaggttct

SEQ ID NO: 254516 - DNA, 25 bp, Homo sapien
ggagcaccactgagatgcagctagg

SEQ ID NO: 254517 - DNA, 25 bp, Homo sapien
ccactgagatgcagctaggttcttg

SEQ ID NO: 254518 - DNA, 25 bp, Homo sapien
gagatgcagctaggttcttgtacag

SEQ ID NO: 254519 - DNA, 25 bp, Homo sapien
agctcacacccattctagcattgct

SEQ ID NO: 254520 - DNA, 25 bp, Homo sapien
tttcgtcattcgaaaaaatgtgtgc

SEQ ID NO: 254521 - DNA, 25 bp, Homo sapien
cgtcattcgaaaaaatgtgtgcaag

SEQ ID NO: 254522 - DNA, 25 bp, Homo sapien
acccattctagcattgctgagtgag

SEQ ID NO: 254523 - DNA, 25 bp, Homo sapien
caactgatgtttcacttctgaggaa

SEQ ID NO: 254524 - DNA, 25 bp, Homo sapien
ggagacaactgatgtttcacttctg

SEQ ID NO: 254525 - DNA, 25 bp, Homo sapien
agaagatgaagcccacaaaggagac

SEQ ID NO: 254526 - DNA, 25 bp, Homo sapien
ccacaaaggagacaactgatgtttc

SEQ ID NO: 254527 - DNA, 25 bp, Homo sapien
agcgaggccccgtgctcagcttttg

SEQ ID NO: 254528 - DNA, 25 bp, Homo sapien
gaggccccgtgctcagcttttgaac

SEQ ID NO: 254529 - DNA, 25 bp, Homo sapien
gcacaggagtcactgagcgaggccc

SEQ ID NO: 254530 - DNA, 25 bp, Homo sapien
tcagcttttgaacccagaggagggt

SEQ ID NO: 254531 - DNA, 25 bp, Homo sapien
aaaatcatagttctgcaataattaa

SEQ ID NO: 254532 - DNA, 25 bp, Homo sapien
aaatcatagttctgcaataattaaa

SEQ ID NO: 254533 - DNA, 25 bp, Homo sapien
taaaatcatagttctgcaataatta

SEQ ID NO: 254534 - DNA, 25 bp, Homo sapien
ctctatcgctgacagttttggttgt

SEQ ID NO: 254535 - DNA, 25 bp, Homo sapien
aacctgcatgtcctgagcgtcccct

SEQ ID NO: 254536 - DNA, 25 bp, Homo sapien
tgagcccagaattgttgtctttagc

SEQ ID NO: 254537 - DNA, 25 bp, Homo sapien
cctgcatgtcctgagcgtcccctgg

SEQ ID NO: 254538 - DNA, 25 bp, Homo sapien
gagaacctgcatgtcctgagcgtcc

SEQ ID NO: 254539 - DNA, 25 bp, Homo sapien
ttgtggttctgagcaaccattggtg

SEQ ID NO: 254540 - DNA, 25 bp, Homo sapien
tgagtaccccctcttgtcctgagtg

SEQ ID NO: 254541 - DNA, 25 bp, Homo sapien
tggttctgagtaccccctcttgtcc

SEQ ID NO: 254542 - DNA, 25 bp, Homo sapien
gcaaccattggtggtcctgagcgcc

SEQ ID NO: 254543 - DNA, 25 bp, Homo sapien
tccctcactgtaatatacggccttg

SEQ ID NO: 254544 - DNA, 25 bp, Homo sapien
cactgtaatatacggccttgccctt

SEQ ID NO: 254545 - DNA, 25 bp, Homo sapien
cacttgaaagggtgtcacttgggaa

SEQ ID NO: 254546 - DNA, 25 bp, Homo sapien
ttagaactcccatatgatctctcac

SEQ ID NO: 254547 - DNA, 25 bp, Homo sapien
atgctgcacccagtaaacccgaaac

SEQ ID NO: 254548 - DNA, 25 bp, Homo sapien
tgaactgctgggctgttaaattttt

SEQ ID NO: 254549 - DNA, 25 bp, Homo sapien
tgttgctacccacaccaattcctgt

SEQ ID NO: 254550 - DNA, 25 bp, Homo sapien
tacccacaccaattcctgttgtgaa

SEQ ID NO: 254551 - DNA, 25 bp, Homo sapien
caaacaagcgcatacctttcacaac

SEQ ID NO: 254552 - DNA, 25 bp, Homo sapien
gcgcatacctttcacaactattggc

SEQ ID NO: 254553 - DNA, 25 bp, Homo sapien
cacattccactttgaccaaacaagc

SEQ ID NO: 254554 - DNA, 25 bp, Homo sapien
cactttgaccaaacaagcgcatacc

SEQ ID NO: 254555 - DNA, 25 bp, Homo sapien
attccagcctgttgcccacgggatg

SEQ ID NO: 254556 - DNA, 25 bp, Homo sapien
taatactcagccgtgtcctaggtgg

SEQ ID NO: 254557 - DNA, 25 bp, Homo sapien
cagtctagtaactgtgccccagcca

SEQ ID NO: 254558 - DNA, 25 bp, Homo sapien
cacgggatggtggattcatctcaaa

SEQ ID NO: 254559 - DNA, 25 bp, Homo sapien
cactacttgttactgatcctgttca

SEQ ID NO: 254560 - DNA, 25 bp, Homo sapien
gatgaagtcatcaagtcccgggttt

SEQ ID NO: 254561 - DNA, 25 bp, Homo sapien
tccagatatttcgatttattggcat

SEQ ID NO: 254562 - DNA, 25 bp, Homo sapien
gcactattggttgtaatatttccag

SEQ ID NO: 254563 - DNA, 25 bp, Homo sapien
ggtttccacactgtgcctcttgcac

SEQ ID NO: 254564 - DNA, 25 bp, Homo sapien
gtgggtttccacactgtgcctcttg

SEQ ID NO: 254565 - DNA, 25 bp, Homo sapien
tcctccctcaggatttctggttctc

SEQ ID NO: 254566 - DNA, 25 bp, Homo sapien
gcctcctccctcaggatttctggtt

SEQ ID NO: 254567 - DNA, 25 bp, Homo sapien
taggttcccagtgttggtgttgatc

SEQ ID NO: 254568 - DNA, 25 bp, Homo sapien
aagatatgccatgctgacggaggtg

SEQ ID NO: 254569 - DNA, 25 bp, Homo sapien
agcctttaggctgctgatatgaaga

SEQ ID NO: 254570 - DNA, 25 bp, Homo sapien
ggcatacgttaggttcccagtgttg

SEQ ID NO: 254571 - DNA, 25 bp, Homo sapien
ccagtacatgttgaggtgctgtggt

SEQ ID NO: 254572 - DNA, 25 bp, Homo sapien
gtacatgttgaggtgctgtggtcta

SEQ ID NO: 254573 - DNA, 25 bp, Homo sapien
cagtacatgttgaggtgctgtggtc

SEQ ID NO: 254574 - DNA, 25 bp, Homo sapien
tacatgttgaggtgctgtggtctag

SEQ ID NO: 254575 - DNA, 25 bp, Homo sapien
cgagttggcgcagcctgcactgagc

SEQ ID NO: 254576 - DNA, 25 bp, Homo sapien
ttggcgcagcctgcactgagccgct

SEQ ID NO: 254577 - DNA, 25 bp, Homo sapien
ggcgcagcctgcactgagccgctga

SEQ ID NO: 254578 - DNA, 25 bp, Homo sapien
agttggcgcagcctgcactgagccg

SEQ ID NO: 254579 - DNA, 25 bp, Homo sapien
tgcttgtcaagaaggtaaaatgggc

SEQ ID NO: 254580 - DNA, 25 bp, Homo sapien
agggtgccagtgactgttaaaacct

SEQ ID NO: 254581 - DNA, 25 bp, Homo sapien
tgggccttgtgggaatttgttgaaa

SEQ ID NO: 254582 - DNA, 25 bp, Homo sapien
ttgcttgtcaagaaggtaaaatggg

SEQ ID NO: 254583 - DNA, 25 bp, Homo sapien
tgagcagcacctgcgccggctcctc

SEQ ID NO: 254584 - DNA, 25 bp, Homo sapien
gccccctgctcgtcctgagcagcac

SEQ ID NO: 254585 - DNA, 25 bp, Homo sapien
cccctgctcgtcctgagcagcacct

SEQ ID NO: 254586 - DNA, 25 bp, Homo sapien
gcgcgccccctgctcgtcctgagca

SEQ ID NO: 254587 - DNA, 25 bp, Homo sapien
cagcttcagggagaactggttcttg

SEQ ID NO: 254588 - DNA, 25 bp, Homo sapien
agaactggttcttggacgtgtctac

SEQ ID NO: 254589 - DNA, 25 bp, Homo sapien
gttcttggacgtgtctactgacatg

SEQ ID NO: 254590 - DNA, 25 bp, Homo sapien
ctggttcttggacgtgtctactgac

SEQ ID NO: 254591 - DNA, 25 bp, Homo sapien
gggctgccggatccagccccaccag

SEQ ID NO: 254592 - DNA, 25 bp, Homo sapien
tagatgtacccaatccactccagtc

SEQ ID NO: 254593 - DNA, 25 bp, Homo sapien
ctgccggatccagccccaccagtta

SEQ ID NO: 254594 - DNA, 25 bp, Homo sapien
taatagatgtacccaatccactcca

SEQ ID NO: 254595 - DNA, 25 bp, Homo sapien
atggagtaaccagagacagcgcagg

SEQ ID NO: 254596 - DNA, 25 bp, Homo sapien
gacagggtgtccgaaggcttcacca

SEQ ID NO: 254597 - DNA, 25 bp, Homo sapien
tgtccgaaggcttcaccagtcctgg

SEQ ID NO: 254598 - DNA, 25 bp, Homo sapien
agtaaccagagacagcgcaggtgag

SEQ ID NO: 254599 - DNA, 25 bp, Homo sapien
caggtgtttcatgttcttgcacagg

SEQ ID NO: 254600 - DNA, 25 bp, Homo sapien
caggaggaagaaccacaggtgtttc

SEQ ID NO: 254601 - DNA, 25 bp, Homo sapien
gttcttgcacaggaggtccaggact

SEQ ID NO: 254602 - DNA, 25 bp, Homo sapien
agcaggaggaagaaccacaggtgtt

SEQ ID NO: 254603 - DNA, 25 bp, Homo sapien
cagggagctccggatgcactgatac

SEQ ID NO: 254604 - DNA, 25 bp, Homo sapien
acaatatggttcaccccagtgacat

SEQ ID NO: 254605 - DNA, 25 bp, Homo sapien
tctgtggttgaaggtcacaacactg

SEQ ID NO: 254606 - DNA, 25 bp, Homo sapien
gatacggcccagacacatggcgagt

SEQ ID NO: 254607 - DNA, 25 bp, Homo sapien
cctctaccccttgggatggtgctgt

SEQ ID NO: 254608 - DNA, 25 bp, Homo sapien
cagcctctaccccttgggatggtgc

SEQ ID NO: 254609 - DNA, 25 bp, Homo sapien
gcctctaccccttgggatggtgctg

SEQ ID NO: 254610 - DNA, 25 bp, Homo sapien
tctaccccttgggatggtgctgtct

SEQ ID NO: 254611 - DNA, 25 bp, Homo sapien
tggagaaaccaataagaactgggag

SEQ ID NO: 254612 - DNA, 25 bp, Homo sapien
tgcaagagaaattatctgcagaggt

SEQ ID NO: 254613 - DNA, 25 bp, Homo sapien
aagccatcaaaaccactgttctaca

SEQ ID NO: 254614 - DNA, 25 bp, Homo sapien
cccatcaccactacattgcaagaga

SEQ ID NO: 254615 - DNA, 25 bp, Homo sapien
atatatgaataaaaacgaagaggcc

SEQ ID NO: 254616 - DNA, 25 bp, Homo sapien
tatgaataaaaacgaagaggccagg

SEQ ID NO: 254617 - DNA, 25 bp, Homo sapien
tatatgaataaaaacgaagaggcca

SEQ ID NO: 254618 - DNA, 25 bp, Homo sapien
aagacatagtggctgctgaaggaat

SEQ ID NO: 254619 - DNA, 25 bp, Homo sapien
ttttgcttaaaaatgcgtagttgtg

SEQ ID NO: 254620 - DNA, 25 bp, Homo sapien
tgcgtagttgtgtgttcactgggca

SEQ ID NO: 254621 - DNA, 25 bp, Homo sapien
gatacaattctagcaggaaacactg

SEQ ID NO: 254622 - DNA, 25 bp, Homo sapien
gagggtctgcaaggagtctcaagcc

SEQ ID NO: 254623 - DNA, 25 bp, Homo sapien
gaggaaaccacagatcctgaaggaa

SEQ ID NO: 254624 - DNA, 25 bp, Homo sapien
tgaaggaaagcagcccttaccctcc

SEQ ID NO: 254625 - DNA, 25 bp, Homo sapien
ggaaatattagaagcagaggaaacc

SEQ ID NO: 254626 - DNA, 25 bp, Homo sapien
cagaggggaaatattagaagcagag

SEQ ID NO: 254627 - DNA, 25 bp, Homo sapien
tgagtgctgagtgtcccctttggcc

SEQ ID NO: 254628 - DNA, 25 bp, Homo sapien
agtgctgagtgtcccctttggccca

SEQ ID NO: 254629 - DNA, 25 bp, Homo sapien
gtgctgagtgtcccctttggcccag

SEQ ID NO: 254630 - DNA, 25 bp, Homo sapien
gagtgctgagtgtcccctttggccc

SEQ ID NO: 254631 - DNA, 25 bp, Homo sapien
cctcacttggaaccttatgtacagc

SEQ ID NO: 254632 - DNA, 25 bp, Homo sapien
cacttggaaccttatgtacagccat

SEQ ID NO: 254633 - DNA, 25 bp, Homo sapien
tcacttggaaccttatgtacagcca

SEQ ID NO: 254634 - DNA, 25 bp, Homo sapien
ctcacttggaaccttatgtacagcc

SEQ ID NO: 254635 - DNA, 25 bp, Homo sapien
aggcgaatctagaggctacacagga

SEQ ID NO: 254636 - DNA, 25 bp, Homo sapien
cagaagctactgaaggcgaatctag

SEQ ID NO: 254637 - DNA, 25 bp, Homo sapien
ttatatctattactcactccagccc

SEQ ID NO: 254638 - DNA, 25 bp, Homo sapien
gtctgcatggtgtatctgacttcca

SEQ ID NO: 254639 - DNA, 25 bp, Homo sapien
aaattcagcttaattcacaccccat

SEQ ID NO: 254640 - DNA, 25 bp, Homo sapien
aaaattcagcttaattcacacccca

SEQ ID NO: 254641 - DNA, 25 bp, Homo sapien
tttaaaggtagtctgccatatatct

SEQ ID NO: 254642 - DNA, 25 bp, Homo sapien
tattttaaaggtagtctgccatata

SEQ ID NO: 254643 - DNA, 25 bp, Homo sapien
ttttaaaggtagtctgccatatatc

SEQ ID NO: 254644 - DNA, 25 bp, Homo sapien
ctattttaaaggtagtctgccatat

SEQ ID NO: 254645 - DNA, 25 bp, Homo sapien
taaaactccacggtgattaagcagc

SEQ ID NO: 254646 - DNA, 25 bp, Homo sapien
tctacttagctggacaatactgtgt

SEQ ID NO: 254647 - DNA, 25 bp, Homo sapien
tattgaaactggaatcggttgactc

SEQ ID NO: 254648 - DNA, 25 bp, Homo sapien
tttctccatgggcaacggtccgtct

SEQ ID NO: 254649 - DNA, 25 bp, Homo sapien
ccctgaggatattggatgttccagc

SEQ ID NO: 254650 - DNA, 25 bp, Homo sapien
tctacatgacgctgaccctggttca

SEQ ID NO: 254651 - DNA, 25 bp, Homo sapien
gatttgcatactttcgtgtcaggag

SEQ ID NO: 254652 - DNA, 25 bp, Homo sapien
ggaacaaaagaagcaccagatcggt

SEQ ID NO: 254653 - DNA, 25 bp, Homo sapien
caggatccataaagactgttccagt

SEQ ID NO: 254654 - DNA, 25 bp, Homo sapien
cagtcagggaatctcacggaggtcc

SEQ ID NO: 254655 - DNA, 25 bp, Homo sapien
gactgttccagtcagggaatctcac

SEQ ID NO: 254656 - DNA, 25 bp, Homo sapien
tgtgaccaggatccataaagactgt

SEQ ID NO: 254657 - DNA, 25 bp, Homo sapien
gagaaaaggtcctcatatgcataga

SEQ ID NO: 254658 - DNA, 25 bp, Homo sapien
gaattttcatccgtgtcagcgtcaa

SEQ ID NO: 254659 - DNA, 25 bp, Homo sapien
ccttgtgaccatggttgaggaattt

SEQ ID NO: 254660 - DNA, 25 bp, Homo sapien
tcagcgtcaatctgcattttgtgcc

SEQ ID NO: 254661 - DNA, 25 bp, Homo sapien
cgccagcgttcctgcagggaggttt

SEQ ID NO: 254662 - DNA, 25 bp, Homo sapien
atcggcccttcacggagtctgcata

SEQ ID NO: 254663 - DNA, 25 bp, Homo sapien
gaatcggcccttcacggagtctgca

SEQ ID NO: 254664 - DNA, 25 bp, Homo sapien
gcccttcacggagtctgcatagtat

SEQ ID NO: 254665 - DNA, 25 bp, Homo sapien
cggcccttcacggagtctgcatagt

SEQ ID NO: 254666 - DNA, 25 bp, Homo sapien
cttgcctggagcctggcggacccag

SEQ ID NO: 254667 - DNA, 25 bp, Homo sapien
ccccttgcctggagcctggcggacc

SEQ ID NO: 254668 - DNA, 25 bp, Homo sapien
ttgcctggagcctggcggacccagt

SEQ ID NO: 254669 - DNA, 25 bp, Homo sapien
cagccccttgcctggagcctggcgg

SEQ ID NO: 254670 - DNA, 25 bp, Homo sapien
ggacctcccaggctggaccacgcct

SEQ ID NO: 254671 - DNA, 25 bp, Homo sapien
acctcccaggctggaccacgcctcc

SEQ ID NO: 254672 - DNA, 25 bp, Homo sapien
agggacctcccaggctggaccacgc

SEQ ID NO: 254673 - DNA, 25 bp, Homo sapien
tcagggacctcccaggctggaccac

SEQ ID NO: 254674 - DNA, 25 bp, Homo sapien
aacagaaggacaccgttatcagaaa

SEQ ID NO: 254675 - DNA, 25 bp, Homo sapien
ctgcaaacagaaggacaccgttatc

SEQ ID NO: 254676 - DNA, 25 bp, Homo sapien
gacaccgttatcagaaaatgccaca

SEQ ID NO: 254677 - DNA, 25 bp, Homo sapien
gaaggacaccgttatcagaaaatgc

SEQ ID NO: 254678 - DNA, 25 bp, Homo sapien
aagagcaacgaggaaaacccagctc

SEQ ID NO: 254679 - DNA, 25 bp, Homo sapien
aaagagcaacgaggaaaacccagct

SEQ ID NO: 254680 - DNA, 25 bp, Homo sapien
aaacccagctcagcccaaactccat

SEQ ID NO: 254681 - DNA, 25 bp, Homo sapien
ggaaaacccagctcagcccaaactc

SEQ ID NO: 254682 - DNA, 25 bp, Homo sapien
cgaatggaaacaccgccgacttcta

SEQ ID NO: 254683 - DNA, 25 bp, Homo sapien
tgctgatcaccgaatggaaacaccg

SEQ ID NO: 254684 - DNA, 25 bp, Homo sapien
gccgacttctagtgctgggctcctc

SEQ ID NO: 254685 - DNA, 25 bp, Homo sapien
tcagtgctgatcaccgaatggaaac

SEQ ID NO: 254686 - DNA, 25 bp, Homo sapien
tgcgcccaaaccttagcaggcataa

SEQ ID NO: 254687 - DNA, 25 bp, Homo sapien
tatctaggaatgtcagcagccttgg

SEQ ID NO: 254688 - DNA, 25 bp, Homo sapien
ttaaatcatgccaggtgatgggaat

SEQ ID NO: 254689 - DNA, 25 bp, Homo sapien
gaatgaatagggtgcccctaacctg

SEQ ID NO: 254690 - DNA, 25 bp, Homo sapien
cctactagagggctgattaatatca

SEQ ID NO: 254691 - DNA, 25 bp, Homo sapien
gaaatcctattgagatggacaacaa

SEQ ID NO: 254692 - DNA, 25 bp, Homo sapien
aaccctcagatgaatttctacctac

SEQ ID NO: 254693 - DNA, 25 bp, Homo sapien
acagagagggttcttacgtcttctg

SEQ ID NO: 254694 - DNA, 25 bp, Homo sapien
aagacattcggccaggaccctaatt

SEQ ID NO: 254695 - DNA, 25 bp, Homo sapien
gagcatcctcattgattgcctggca

SEQ ID NO: 254696 - DNA, 25 bp, Homo sapien
gacgtgtgacctaagacctgcagaa

SEQ ID NO: 254697 - DNA, 25 bp, Homo sapien
taagctgtggaacagtgtgagagcc

SEQ ID NO: 254698 - DNA, 25 bp, Homo sapien
gagtgcaccgagaaatacagttgtt

SEQ ID NO: 254699 - DNA, 25 bp, Homo sapien
tactttttggacatggatctggaga

SEQ ID NO: 254700 - DNA, 25 bp, Homo sapien
tcttttgctctaaaatacatggcta

SEQ ID NO: 254701 - DNA, 25 bp, Homo sapien
cagcaggaaacactggttgtgatgg

SEQ ID NO: 254702 - DNA, 25 bp, Homo sapien
cagtaacacacagctgtgcccgctg

SEQ ID NO: 254703 - DNA, 25 bp, Homo sapien
gtaacacacagctgtgcccgctgct

SEQ ID NO: 254704 - DNA, 25 bp, Homo sapien
tacagtaacacacagctgtgcccgc

SEQ ID NO: 254705 - DNA, 25 bp, Homo sapien
aacacacagctgtgcccgctgctct

SEQ ID NO: 254706 - DNA, 25 bp, Homo sapien
ttaaaacagcaacagtgaaaaccca

SEQ ID NO: 254707 - DNA, 25 bp, Homo sapien
aaacccagctcagcccaagctccat

SEQ ID NO: 254708 - DNA, 25 bp, Homo sapien
cagcaacagtgaaaacccagctcag

SEQ ID NO: 254709 - DNA, 25 bp, Homo sapien
aaaacccagctcagcccaagctcca

SEQ ID NO: 254710 - DNA, 25 bp, Homo sapien
tgaaactattagtccttgcaggctt

SEQ ID NO: 254711 - DNA, 25 bp, Homo sapien
aaactattagtccttgcaggctttt

SEQ ID NO: 254712 - DNA, 25 bp, Homo sapien
tgtgaaactattagtccttgcaggc

SEQ ID NO: 254713 - DNA, 25 bp, Homo sapien
agctcccttatctgctgtcctgcgg

SEQ ID NO: 254714 - DNA, 25 bp, Homo sapien
tggtcctcattgtccatttgttata

SEQ ID NO: 254715 - DNA, 25 bp, Homo sapien
ggtcctcattgtccatttgttatat

SEQ ID NO: 254716 - DNA, 25 bp, Homo sapien
agctggtcctcattgtccatttgtt

SEQ ID NO: 254717 - DNA, 25 bp, Homo sapien
gctggtcctcattgtccatttgtta

SEQ ID NO: 254718 - DNA, 25 bp, Homo sapien
tgcaccttctagtccactatgtctc

SEQ ID NO: 254719 - DNA, 25 bp, Homo sapien
cttcttggcttgcaccttctagtcc

SEQ ID NO: 254720 - DNA, 25 bp, Homo sapien
tgaagtctgaatgtccaaggtccag

SEQ ID NO: 254721 - DNA, 25 bp, Homo sapien
attctgaagtctgaatgtccaaggt

SEQ ID NO: 254722 - DNA, 25 bp, Homo sapien
cgtgcacgggaaaagtgagaggtct

SEQ ID NO: 254723 - DNA, 25 bp, Homo sapien
tgcacgggaaaagtgagaggtctct

SEQ ID NO: 254724 - DNA, 25 bp, Homo sapien
ctgcgtgcacgggaaaagtgagagg

SEQ ID NO: 254725 - DNA, 25 bp, Homo sapien
agaggtctctggtgactcttccact

SEQ ID NO: 254726 - DNA, 25 bp, Homo sapien
agtgacactttgactgtaagaggaa

SEQ ID NO: 254727 - DNA, 25 bp, Homo sapien
gggagagcactgagctgatgaggaa

SEQ ID NO: 254728 - DNA, 25 bp, Homo sapien
aagttcctagtaattagtgacactt

SEQ ID NO: 254729 - DNA, 25 bp, Homo sapien
gagagcactgagctgatgaggaagc

SEQ ID NO: 254730 - DNA, 25 bp, Homo sapien
ctccctgcagggaggtttgtgtctg

SEQ ID NO: 254731 - DNA, 25 bp, Homo sapien
gaggtttgtgtctgggctcacactc

SEQ ID NO: 254732 - DNA, 25 bp, Homo sapien
cgccccctccgcctccctgcaggga

SEQ ID NO: 254733 - DNA, 25 bp, Homo sapien
ggtttgtgtctgggctcacactcac

SEQ ID NO: 254734 - DNA, 25 bp, Homo sapien
agctcagcttcagggagaactggtt

SEQ ID NO: 254735 - DNA, 25 bp, Homo sapien
cagagctcagcttcagggagaactg

SEQ ID NO: 254736 - DNA, 25 bp, Homo sapien
gcggcagtcacagagctcagcttca

SEQ ID NO: 254737 - DNA, 25 bp, Homo sapien
cgcggcagtcacagagctcagcttc

SEQ ID NO: 254738 - DNA, 25 bp, Homo sapien
gactcttgagggacgggttgtagta

SEQ ID NO: 254739 - DNA, 25 bp, Homo sapien
cgggttgtagtaggtgctcccactg

SEQ ID NO: 254740 - DNA, 25 bp, Homo sapien
ggacgggttgtagtaggtgctccca

SEQ ID NO: 254741 - DNA, 25 bp, Homo sapien
gagggacgggttgtagtaggtgctc

SEQ ID NO: 254742 - DNA, 25 bp, Homo sapien
taatagatgtacccaatccactcca

SEQ ID NO: 254743 - DNA, 25 bp, Homo sapien
aggcccttccctgggtgctggcgga

SEQ ID NO: 254744 - DNA, 25 bp, Homo sapien
gcccttccctgggtgctggcggatc

SEQ ID NO: 254745 - DNA, 25 bp, Homo sapien
tagatgtacccaatccactccaggc

SEQ ID NO: 254746 - DNA, 25 bp, Homo sapien
gagccaccagagacagtacaggtga

SEQ ID NO: 254747 - DNA, 25 bp, Homo sapien
tgtgaacagagagacacacagtgag

SEQ ID NO: 254748 - DNA, 25 bp, Homo sapien
ctgtgaacagagagacacacagtga

SEQ ID NO: 254749 - DNA, 25 bp, Homo sapien
gtgaacagagagacacacagtgagc

SEQ ID NO: 254750 - DNA, 25 bp, Homo sapien
tgaacagagagacacacagtgagcc

SEQ ID NO: 254751 - DNA, 25 bp, Homo sapien
aggaggaagaaccacaggtgtttca

SEQ ID NO: 254752 - DNA, 25 bp, Homo sapien
gcaggaggaagaaccacaggtgttt

SEQ ID NO: 254753 - DNA, 25 bp, Homo sapien
cagcaggaggaagaaccacaggtgt

SEQ ID NO: 254754 - DNA, 25 bp, Homo sapien
accagcaggaggaagaaccacaggt

SEQ ID NO: 254755 - DNA, 25 bp, Homo sapien
gttcttgcacaggaggtccaggact

SEQ ID NO: 254756 - DNA, 25 bp, Homo sapien
tgcacaggaggtccaggactctcag

SEQ ID NO: 254757 - DNA, 25 bp, Homo sapien
tcttgcacaggaggtccaggactct

SEQ ID NO: 254758 - DNA, 25 bp, Homo sapien
cttgcacaggaggtccaggactctc

SEQ ID NO: 254759 - DNA, 25 bp, Homo sapien
caaatgccatttaagttagcacacg

SEQ ID NO: 254760 - DNA, 25 bp, Homo sapien
tattacacatagaggtgcttctcag

SEQ ID NO: 254761 - DNA, 25 bp, Homo sapien
gaggaattcctcctgctattgaagc

SEQ ID NO: 254762 - DNA, 25 bp, Homo sapien
tcagcttggagatgtaagcacccca

SEQ ID NO: 254763 - DNA, 25 bp, Homo sapien
gatctggatatggactcttgagaag

SEQ ID NO: 254764 - DNA, 25 bp, Homo sapien
gagaagtgggatgtaatttttgctc

SEQ ID NO: 254765 - DNA, 25 bp, Homo sapien
gatgtaatttttgctccctttacaa

SEQ ID NO: 254766 - DNA, 25 bp, Homo sapien
agagggtctgtgaggatgtctcaag

SEQ ID NO: 254767 - DNA, 25 bp, Homo sapien
ttatgtatagccatacacggccacg

SEQ ID NO: 254768 - DNA, 25 bp, Homo sapien
ttgtgtctggactcacaccgatatt

SEQ ID NO: 254769 - DNA, 25 bp, Homo sapien
gggaccttatgtatagccatacacg

SEQ ID NO: 254770 - DNA, 25 bp, Homo sapien
tctggactcacaccgatatttcctc

SEQ ID NO: 254771 - DNA, 25 bp, Homo sapien
aaaattcagcttaattcacacccca

SEQ ID NO: 254772 - DNA, 25 bp, Homo sapien
aaattcagcttaattcacaccccat

SEQ ID NO: 254773 - DNA, 25 bp, Homo sapien
tattgcatatgtctaaaaacaaact

SEQ ID NO: 254774 - DNA, 25 bp, Homo sapien
ccaggttaagtcattctgaatatct

SEQ ID NO: 254775 - DNA, 25 bp, Homo sapien
gaaaggaatagaatgaaagctcata

SEQ ID NO: 254776 - DNA, 25 bp, Homo sapien
ttatgtgtcatagcttaaagaactg

SEQ ID NO: 254777 - DNA, 25 bp, Homo sapien
taaacccacatattgatgacaagct

SEQ ID NO: 254778 - DNA, 25 bp, Homo sapien
gctttaggcatttcacttccaggcc

SEQ ID NO: 254779 - DNA, 25 bp, Homo sapien
tagacaaaggcaccacaataaagga

SEQ ID NO: 254780 - DNA, 25 bp, Homo sapien
gaaaggccacagctattattacact

SEQ ID NO: 254781 - DNA, 25 bp, Homo sapien
tcagacgtgaaatctgtgacgttct

SEQ ID NO: 254782 - DNA, 25 bp, Homo sapien
atcagacgtgaaatctgtgacgttc

SEQ ID NO: 254783 - DNA, 25 bp, Homo sapien
agacgtgaaatctgtgacgttctac

SEQ ID NO: 254784 - DNA, 25 bp, Homo sapien
cagacgtgaaatctgtgacgttcta

SEQ ID NO: 254785 - DNA, 25 bp, Homo sapien
ccagggagaaaaggtcctcatatgc

SEQ ID NO: 254786 - DNA, 25 bp, Homo sapien
cgccagcgttcctgcagggaggttt

SEQ ID NO: 254787 - DNA, 25 bp, Homo sapien
gaattttcatccgtgtcagcgtcaa

SEQ ID NO: 254788 - DNA, 25 bp, Homo sapien
gcgtcaatctgcattttgtgccagg

SEQ ID NO: 254789 - DNA, 25 bp, Homo sapien
agccgtgtcctcggctctcaggctg

SEQ ID NO: 254790 - DNA, 25 bp, Homo sapien
acagccgtgtcctcggctctcaggc

SEQ ID NO: 254791 - DNA, 25 bp, Homo sapien
ctcaggctgttcatttgcagataca

SEQ ID NO: 254792 - DNA, 25 bp, Homo sapien
atttgcagatacagcgtgttcttgg

SEQ ID NO: 254793 - DNA, 25 bp, Homo sapien
aattgtctctggagatggtgaatcg

SEQ ID NO: 254794 - DNA, 25 bp, Homo sapien
tctggagatggtgaatcggcccttc

SEQ ID NO: 254795 - DNA, 25 bp, Homo sapien
gagatggtgaatcggcccttcacgg

SEQ ID NO: 254796 - DNA, 25 bp, Homo sapien
tctctggagatggtgaatcggccct

SEQ ID NO: 254797 - DNA, 25 bp, Homo sapien
atagtatttattacttccatcatac

SEQ ID NO: 254798 - DNA, 25 bp, Homo sapien
tacttccatcataccatataactgc

SEQ ID NO: 254799 - DNA, 25 bp, Homo sapien
ttccatcataccatataactgccac

SEQ ID NO: 254800 - DNA, 25 bp, Homo sapien
tattacttccatcataccatataac

SEQ ID NO: 254801 - DNA, 25 bp, Homo sapien
gcggacccagtgcatgccatagcta

SEQ ID NO: 254802 - DNA, 25 bp, Homo sapien
ctggcggacccagtgcatgccatag

SEQ ID NO: 254803 - DNA, 25 bp, Homo sapien
ggcggacccagtgcatgccatagct

SEQ ID NO: 254804 - DNA, 25 bp, Homo sapien
tggcggacccagtgcatgccatagc

SEQ ID NO: 254805 - DNA, 25 bp, Homo sapien
agggacctcccaggctggaccacgc

SEQ ID NO: 254806 - DNA, 25 bp, Homo sapien
ggacctcccaggctggaccacgcct

SEQ ID NO: 254807 - DNA, 25 bp, Homo sapien
tcagggacctcccaggctggaccac

SEQ ID NO: 254808 - DNA, 25 bp, Homo sapien
acctcccaggctggaccacgcctcc

SEQ ID NO: 254809 - DNA, 25 bp, Homo sapien
gaaggacaccgttatcagaaaatgc

SEQ ID NO: 254810 - DNA, 25 bp, Homo sapien
aacagaaggacaccgttatcagaaa

SEQ ID NO: 254811 - DNA, 25 bp, Homo sapien
gacaccgttatcagaaaatgccaca

SEQ ID NO: 254812 - DNA, 25 bp, Homo sapien
ctgcaaacagaaggacaccgttatc

SEQ ID NO: 254813 - DNA, 25 bp, Homo sapien
tgctgatcaccgaatggaaacaccg

SEQ ID NO: 254814 - DNA, 25 bp, Homo sapien
cgaatggaaacaccgccgacttcta

SEQ ID NO: 254815 - DNA, 25 bp, Homo sapien
gccgacttctagtgctgggctcctc

SEQ ID NO: 254816 - DNA, 25 bp, Homo sapien
tcagtgctgatcaccgaatggaaac

SEQ ID NO: 254817 - DNA, 25 bp, Homo sapien
tgacctcattaacaacaaagctgaa

SEQ ID NO: 254818 - DNA, 25 bp, Homo sapien
tgcgcccaaaccttagcaggcataa

SEQ ID NO: 254819 - DNA, 25 bp, Homo sapien
ttaaatcatgccaggtgatgggaat

SEQ ID NO: 254820 - DNA, 25 bp, Homo sapien
tatctaggaatgtcagcagccttgg

SEQ ID NO: 254821 - DNA, 25 bp, Homo sapien
gaatgaatagggtgcccctaacctg

SEQ ID NO: 254822 - DNA, 25 bp, Homo sapien
tgtgatgtgccgtgcttcgccttca

SEQ ID NO: 254823 - DNA, 25 bp, Homo sapien
cacagctggacatgtgctatagatt

SEQ ID NO: 254824 - DNA, 25 bp, Homo sapien
tcaacagtacacactggatccctga

SEQ ID NO: 254825 - DNA, 25 bp, Homo sapien
tcacaccggctagaatgatgatcac

SEQ ID NO: 254826 - DNA, 25 bp, Homo sapien
atggtcttgagtgccccttggtgtc

SEQ ID NO: 254827 - DNA, 25 bp, Homo sapien
ggaggcttgggtatgagttcacact

SEQ ID NO: 254828 - DNA, 25 bp, Homo sapien
ctacaatggtcttgagtgccccttg

SEQ ID NO: 254829 - DNA, 25 bp, Homo sapien
gtgtcctgagtaaccctggctgtcc

SEQ ID NO: 254830 - DNA, 25 bp, Homo sapien
ttgtgatggagaatgcagagatggc

SEQ ID NO: 254831 - DNA, 25 bp, Homo sapien
aggccaagagtgcaccgagaaatac

SEQ ID NO: 254832 - DNA, 25 bp, Homo sapien
gtgcaccgagaaatacagttgttgg

SEQ ID NO: 254833 - DNA, 25 bp, Homo sapien
caagagtgcaccgagaaatacagtt

SEQ ID NO: 254834 - DNA, 25 bp, Homo sapien
gggaactggtagatgcagaggaggc

SEQ ID NO: 254835 - DNA, 25 bp, Homo sapien
gaaacataaatgtccagaggctccg

SEQ ID NO: 254836 - DNA, 25 bp, Homo sapien
tctgctttgggacaaatgagaatgt

SEQ ID NO: 254837 - DNA, 25 bp, Homo sapien
aaacttttctaatccagagatgtca

SEQ ID NO: 254838 - DNA, 25 bp, Homo sapien
aaccgagctcattcagtagctactg

SEQ ID NO: 254839 - DNA, 25 bp, Homo sapien
gcataacatatctgacttccatcac

SEQ ID NO: 254840 - DNA, 25 bp, Homo sapien
tacagtaacacacagctgtgccctc

SEQ ID NO: 254841 - DNA, 25 bp, Homo sapien
tgtatatctactactcactccagcc

SEQ ID NO: 254842 - DNA, 25 bp, Homo sapien
ctgcaaactcgtagacatcctggtc

SEQ ID NO: 254843 - DNA, 25 bp, Homo sapien
cgtagacatcctggtcagaaactcc

SEQ ID NO: 254844 - DNA, 25 bp, Homo sapien
ggtcagaaactcccagacataatcc

SEQ ID NO: 254845 - DNA, 25 bp, Homo sapien
aactcgtagacatcctggtcagaaa

SEQ ID NO: 254846 - DNA, 25 bp, Homo sapien
aaacccagctcagcccaagctccat

SEQ ID NO: 254847 - DNA, 25 bp, Homo sapien
ttaaaacagcaacagtgaaaaccca

SEQ ID NO: 254848 - DNA, 25 bp, Homo sapien
cagcaacagtgaaaacccagctcag

SEQ ID NO: 254849 - DNA, 25 bp, Homo sapien
aaaacccagctcagcccaagctcca

SEQ ID NO: 254850 - DNA, 25 bp, Homo sapien
tctgaccactagaggagactgctcc

SEQ ID NO: 254851 - DNA, 25 bp, Homo sapien
agtgaggtttgcaggattccacccc

SEQ ID NO: 254852 - DNA, 25 bp, Homo sapien
gtattagccccattatccatgcctg

SEQ ID NO: 254853 - DNA, 25 bp, Homo sapien
tcacacagctggacagtattagccc

SEQ ID NO: 254854 - DNA, 25 bp, Homo sapien
ttcgaaagccgaagaaatagaccat

SEQ ID NO: 254855 - DNA, 25 bp, Homo sapien
tagtccgtttgaggtggtagaagaa

SEQ ID NO: 254856 - DNA, 25 bp, Homo sapien
catactgcagggatcatttctgtag

SEQ ID NO: 254857 - DNA, 25 bp, Homo sapien
tcagtgcaaatttcgaaagccgaag

SEQ ID NO: 254858 - DNA, 25 bp, Homo sapien
tatttttgcctacttcacgtggaaa

SEQ ID NO: 254859 - DNA, 25 bp, Homo sapien
caggagacagagctaacagagttag

SEQ ID NO: 254860 - DNA, 25 bp, Homo sapien
gagaccatgctcaaaaatggccaac

SEQ ID NO: 254861 - DNA, 25 bp, Homo sapien
tagtcagtttgggtcttcgtaagaa

SEQ ID NO: 254862 - DNA, 25 bp, Homo sapien
gacccggcctcgggatctgtgggcg

SEQ ID NO: 254863 - DNA, 25 bp, Homo sapien
tctagtaattggtgaaacctcaaca

SEQ ID NO: 254864 - DNA, 25 bp, Homo sapien
acatctgaggtgctggcgaggagac

SEQ ID NO: 254865 - DNA, 25 bp, Homo sapien
tggcgaggagacagaccactgagct

SEQ ID NO: 254866 - DNA, 25 bp, Homo sapien
cgactcttgagggacgggttgtagt

SEQ ID NO: 254867 - DNA, 25 bp, Homo sapien
ctcgactcttgagggacgggttgta

SEQ ID NO: 254868 - DNA, 25 bp, Homo sapien
tcgactcttgagggacgggttgtag

SEQ ID NO: 254869 - DNA, 25 bp, Homo sapien
tgatttccccaatccactccagccc

SEQ ID NO: 254870 - DNA, 25 bp, Homo sapien
cactatgattgatttccccaatcca

SEQ ID NO: 254871 - DNA, 25 bp, Homo sapien
gattgatttccccaatccactccag

SEQ ID NO: 254872 - DNA, 25 bp, Homo sapien
tatgattgatttccccaatccactc

SEQ ID NO: 254873 - DNA, 25 bp, Homo sapien
ctgaaggacccaccatagacagcgc

SEQ ID NO: 254874 - DNA, 25 bp, Homo sapien
agtcctgcgccccactgctgtagct

SEQ ID NO: 254875 - DNA, 25 bp, Homo sapien
gacccaccatagacagcgcaggtga

SEQ ID NO: 254876 - DNA, 25 bp, Homo sapien
gaaggcttcaacagtcctgcgcccc

SEQ ID NO: 254877 - DNA, 25 bp, Homo sapien
ctgtgaacagagaaacccacagtga

SEQ ID NO: 254878 - DNA, 25 bp, Homo sapien
tgtgaacagagaaacccacagtgag

SEQ ID NO: 254879 - DNA, 25 bp, Homo sapien
tgaacagagaaacccacagtgagcc

SEQ ID NO: 254880 - DNA, 25 bp, Homo sapien
gtgaacagagaaacccacagtgagc

SEQ ID NO: 254881 - DNA, 25 bp, Homo sapien
gcatctcatatcttcatatccgcat

SEQ ID NO: 254882 - DNA, 25 bp, Homo sapien
cagaggcagcatctcatatcttcat

SEQ ID NO: 254883 - DNA, 25 bp, Homo sapien
gcagcatctcatatcttcatatccg

SEQ ID NO: 254884 - DNA, 25 bp, Homo sapien
atatcttcatatccgcattcctgag

SEQ ID NO: 254885 - DNA, 25 bp, Homo sapien
aggaggaagaaccacaggtgtttca

SEQ ID NO: 254886 - DNA, 25 bp, Homo sapien
tctgggagctgccaccaggaggagg

SEQ ID NO: 254887 - DNA, 25 bp, Homo sapien
caggaggaggaagaaccacaggtgt

SEQ ID NO: 254888 - DNA, 25 bp, Homo sapien
atctgggagctgccaccaggaggag

SEQ ID NO: 254889 - DNA, 25 bp, Homo sapien
gaattgcaagaacataccctagggt

SEQ ID NO: 254890 - DNA, 25 bp, Homo sapien
gttgtataatctggataaacctggg

SEQ ID NO: 254891 - DNA, 25 bp, Homo sapien
cagtattgcaacttgggcatttcac

SEQ ID NO: 254892 - DNA, 25 bp, Homo sapien
ttcttaggagctgaacaagtgggct

SEQ ID NO: 254893 - DNA, 25 bp, Homo sapien
gatcagtccaatttacgtagtcctg

SEQ ID NO: 254894 - DNA, 25 bp, Homo sapien
taacagcataaaaacgatcagtcca

SEQ ID NO: 254895 - DNA, 25 bp, Homo sapien
taatctccatcaaggatttaggtcc

SEQ ID NO: 254896 - DNA, 25 bp, Homo sapien
ttaggtccatgtggcctgtgacaga

SEQ ID NO: 254897 - DNA, 25 bp, Homo sapien
gatggagcacacaacaacaatgctg

SEQ ID NO: 254898 - DNA, 25 bp, Homo sapien
aaatggatacacgtgtttctggagc

SEQ ID NO: 254899 - DNA, 25 bp, Homo sapien
caacgttagccttgctttaaagcac

SEQ ID NO: 254900 - DNA, 25 bp, Homo sapien
aaagtggcttctcacgtctttggga

SEQ ID NO: 254901 - DNA, 25 bp, Homo sapien
tgaaactctcgggatgtgggtttcc

SEQ ID NO: 254902 - DNA, 25 bp, Homo sapien
ctcaggctttctgaaactctcggga

SEQ ID NO: 254903 - DNA, 25 bp, Homo sapien
caggctttctgaaactctcgggatg

SEQ ID NO: 254904 - DNA, 25 bp, Homo sapien
ctttctgaaactctcgggatgtggg

SEQ ID NO: 254905 - DNA, 25 bp, Homo sapien
gctgctgatctgaagacacgccgtg

SEQ ID NO: 254906 - DNA, 25 bp, Homo sapien
cacgccgtgctgacagacgtgtcca

SEQ ID NO: 254907 - DNA, 25 bp, Homo sapien
gaagacacgccgtgctgacagacgt

SEQ ID NO: 254908 - DNA, 25 bp, Homo sapien
gatctgaagacacgccgtgctgaca

SEQ ID NO: 254909 - DNA, 25 bp, Homo sapien
tgtccaggggtctatcatacccaat

SEQ ID NO: 254910 - DNA, 25 bp, Homo sapien
tcccagtgtaggtgatgatccatca

SEQ ID NO: 254911 - DNA, 25 bp, Homo sapien
atgatccatcacatccactcaaagc

SEQ ID NO: 254912 - DNA, 25 bp, Homo sapien
ggggtctatcatacccaattcatac

SEQ ID NO: 254913 - DNA, 25 bp, Homo sapien
aggtgtaaccagaagacttatagga

SEQ ID NO: 254914 - DNA, 25 bp, Homo sapien
gaagacttataggagaccttcactg

SEQ ID NO: 254915 - DNA, 25 bp, Homo sapien
taaccagaagacttataggagacct

SEQ ID NO: 254916 - DNA, 25 bp, Homo sapien
ccagaagacttataggagaccttca

SEQ ID NO: 254917 - DNA, 25 bp, Homo sapien
aggagctgtgatctaggggcttctc

SEQ ID NO: 254918 - DNA, 25 bp, Homo sapien
agctgtgatctaggggcttctccag

SEQ ID NO: 254919 - DNA, 25 bp, Homo sapien
gctgccatcaagaagaggatccttc

SEQ ID NO: 254920 - DNA, 25 bp, Homo sapien
atcaagaagaggatccttcaggtcc

SEQ ID NO: 254921 - DNA, 25 bp, Homo sapien
ccaacgttcctgcaggaggtttgtg

SEQ ID NO: 254922 - DNA, 25 bp, Homo sapien
tgatttcccccaacgttcctgcagg

SEQ ID NO: 254923 - DNA, 25 bp, Homo sapien
ccccaacgttcctgcaggaggtttg

SEQ ID NO: 254924 - DNA, 25 bp, Homo sapien
atttcccccaacgttcctgcaggag

SEQ ID NO: 254925 - DNA, 25 bp, Homo sapien
cggccctcaggctattcgtttgcag

SEQ ID NO: 254926 - DNA, 25 bp, Homo sapien
ccctcaggctattcgtttgcagata

SEQ ID NO: 254927 - DNA, 25 bp, Homo sapien
ggccctcaggctattcgtttgcaga

SEQ ID NO: 254928 - DNA, 25 bp, Homo sapien
ctcggccctcaggctattcgtttgc

SEQ ID NO: 254929 - DNA, 25 bp, Homo sapien
ctgcaaacacagagacaccctggtc

SEQ ID NO: 254930 - DNA, 25 bp, Homo sapien
gcaaacacagagacaccctggtcag

SEQ ID NO: 254931 - DNA, 25 bp, Homo sapien
caaacacagagacaccctggtcaga

SEQ ID NO: 254932 - DNA, 25 bp, Homo sapien
aacacagagacaccctggtcagaaa

SEQ ID NO: 254933 - DNA, 25 bp, Homo sapien
agaaaaacccagctcagcccaaatt

SEQ ID NO: 254934 - DNA, 25 bp, Homo sapien
ttaaaatagcagcaagaaaaaccca

SEQ ID NO: 254935 - DNA, 25 bp, Homo sapien
aatagcagcaagaaaaacccagctc

SEQ ID NO: 254936 - DNA, 25 bp, Homo sapien
gaaaaacccagctcagcccaaattc

SEQ ID NO: 254937 - DNA, 25 bp, Homo sapien
gatgcacacaatgccaccacagtaa

SEQ ID NO: 254938 - DNA, 25 bp, Homo sapien
gtctgcatagcttgtgctacctaca

SEQ ID NO: 254939 - DNA, 25 bp, Homo sapien
gtaatacacagacctatcctcggct

SEQ ID NO: 254940 - DNA, 25 bp, Homo sapien
cataaatgagacctactccagccct

SEQ ID NO: 254941 - DNA, 25 bp, Homo sapien
ttacattagcaacaaggaaaaccca

SEQ ID NO: 254942 - DNA, 25 bp, Homo sapien
aaaacccagctcagcccaaactcca

SEQ ID NO: 254943 - DNA, 25 bp, Homo sapien
aaacccagctcagcccaaactccat

SEQ ID NO: 254944 - DNA, 25 bp, Homo sapien
cattagcaacaaggaaaacccagct

SEQ ID NO: 254945 - DNA, 25 bp, Homo sapien
caccactagcactaatgtatgagac

SEQ ID NO: 254946 - DNA, 25 bp, Homo sapien
gatggtgaatctacccttcagtgtc

SEQ ID NO: 254947 - DNA, 25 bp, Homo sapien
cagtgtctgcatagtataggctacc

SEQ ID NO: 254948 - DNA, 25 bp, Homo sapien
atgttcttgccattgtctctagaga

SEQ ID NO: 254949 - DNA, 25 bp, Homo sapien
tgcttctcaagatgaatccgcaggc

SEQ ID NO: 254950 - DNA, 25 bp, Homo sapien
cttgaagcccggtgggcccagttca

SEQ ID NO: 254951 - DNA, 25 bp, Homo sapien
ctcaagatgaatccgcaggctgcac

SEQ ID NO: 254952 - DNA, 25 bp, Homo sapien
ttctcaagatgaatccgcaggctgc

SEQ ID NO: 254953 - DNA, 25 bp, Homo sapien
tgtaaacgcagaagcatgagggagc

SEQ ID NO: 254954 - DNA, 25 bp, Homo sapien
tcacatgtgacaagaatgggctcca

SEQ ID NO: 254955 - DNA, 25 bp, Homo sapien
tttagcccagagttacacacacctg

SEQ ID NO: 254956 - DNA, 25 bp, Homo sapien
aatacattgttagaggcagatgccc

SEQ ID NO: 254957 - DNA, 25 bp, Homo sapien
aacgatcaccatccggtggccgcta

SEQ ID NO: 254958 - DNA, 25 bp, Homo sapien
actaacatttcttgccctaaggccg

SEQ ID NO: 254959 - DNA, 25 bp, Homo sapien
catgtcaaggtcttgtagaagaacg

SEQ ID NO: 254960 - DNA, 25 bp, Homo sapien
catttcttgccctaaggccgttgaa

SEQ ID NO: 254961 - DNA, 25 bp, Homo sapien
gatcaaatgagtttatccccttcac

SEQ ID NO: 254962 - DNA, 25 bp, Homo sapien
tatccccttcactattaacggccaa

SEQ ID NO: 254963 - DNA, 25 bp, Homo sapien
cacatcccattttgatcaaatgagt

SEQ ID NO: 254964 - DNA, 25 bp, Homo sapien
cggccaattgcattcccagatgagt

SEQ ID NO: 254965 - DNA, 25 bp, Homo sapien
tgatttccccccagcgttcctgcag

SEQ ID NO: 254966 - DNA, 25 bp, Homo sapien
ccccagcgttcctgcagggaggttt

SEQ ID NO: 254967 - DNA, 25 bp, Homo sapien
tttccccccagcgttcctgcaggga

SEQ ID NO: 254968 - DNA, 25 bp, Homo sapien
cctgccgctgatttccccccagcgt

SEQ ID NO: 254969 - DNA, 25 bp, Homo sapien
aatgacttcccctctgtgtatatct

SEQ ID NO: 254970 - DNA, 25 bp, Homo sapien
tgacttcccctctgtgtatatctgg

SEQ ID NO: 254971 - DNA, 25 bp, Homo sapien
cttcccctctgtgtatatctggcac

SEQ ID NO: 254972 - DNA, 25 bp, Homo sapien
gacttcccctctgtgtatatctggc

SEQ ID NO: 254973 - DNA, 25 bp, Homo sapien
taatacacggccgtgccctcagctc

SEQ ID NO: 254974 - DNA, 25 bp, Homo sapien
acggccgtgccctcagctctcaggt

SEQ ID NO: 254975 - DNA, 25 bp, Homo sapien
atacacggccgtgccctcagctctc

SEQ ID NO: 254976 - DNA, 25 bp, Homo sapien
agtaatacacggccgtgccctcagc

SEQ ID NO: 254977 - DNA, 25 bp, Homo sapien
tgctaccaccactaatggatgagac

SEQ ID NO: 254978 - DNA, 25 bp, Homo sapien
gtgctaccaccactaatggatgaga

SEQ ID NO: 254979 - DNA, 25 bp, Homo sapien
tcattgctactgacggtgaatccag

SEQ ID NO: 254980 - DNA, 25 bp, Homo sapien
gcaaacacagagacaccaaggtcag

SEQ ID NO: 254981 - DNA, 25 bp, Homo sapien
caaacacagagacaccaaggtcaga

SEQ ID NO: 254982 - DNA, 25 bp, Homo sapien
ctgcaaacacagagacaccaaggtc

SEQ ID NO: 254983 - DNA, 25 bp, Homo sapien
aacacagagacaccaaggtcagaaa

SEQ ID NO: 254984 - DNA, 25 bp, Homo sapien
ggaaaacccagctcagcacaaactg

SEQ ID NO: 254985 - DNA, 25 bp, Homo sapien
ccaacaaggaaaacccagctcagca

SEQ ID NO: 254986 - DNA, 25 bp, Homo sapien
aggaaaacccagctcagcacaaact

SEQ ID NO: 254987 - DNA, 25 bp, Homo sapien
ataccaacaaggaaaacccagctca

SEQ ID NO: 254988 - DNA, 25 bp, Homo sapien
cccctggtgttctgatcgctctctg

SEQ ID NO: 254989 - DNA, 25 bp, Homo sapien
ctctctggtgtcctgagtgcttcct

SEQ ID NO: 254990 - DNA, 25 bp, Homo sapien
tgagtgccccctggaggatctgagt

SEQ ID NO: 254991 - DNA, 25 bp, Homo sapien
gtgttctgatcgctctctggtgtcc

SEQ ID NO: 254992 - DNA, 25 bp, Homo sapien
agggccggtcatgtcctgagcaccc

SEQ ID NO: 254993 - DNA, 25 bp, Homo sapien
tgagggccggtcatgtcctgagcac

SEQ ID NO: 254994 - DNA, 25 bp, Homo sapien
ctgagggccggtcatgtcctgagca

SEQ ID NO: 254995 - DNA, 25 bp, Homo sapien
gagggccggtcatgtcctgagcacc

SEQ ID NO: 254996 - DNA, 25 bp, Homo sapien
tgaaggcgagtcccattgagaactt

SEQ ID NO: 254997 - DNA, 25 bp, Homo sapien
gaaggcgagtcccattgagaacttc

SEQ ID NO: 254998 - DNA, 25 bp, Homo sapien
tcctgtctgactccactagttaact

SEQ ID NO: 254999 - DNA, 25 bp, Homo sapien
gactccactagttaacttcacagag

SEQ ID NO: 255000 - DNA, 25 bp, Homo sapien
aatcctgctggaccaaacttgttct

SEQ ID NO: 255001 - DNA, 25 bp, Homo sapien
ggctttgcagaacagtctgagaatt

SEQ ID NO: 255002 - DNA, 25 bp, Homo sapien
cacagaccccatggtcatgagtaca

SEQ ID NO: 255003 - DNA, 25 bp, Homo sapien
cctatcaagttttgagagacccaca

SEQ ID NO: 255004 - DNA, 25 bp, Homo sapien
gagtcctggcacaatctatcatcct

SEQ ID NO: 255005 - DNA, 25 bp, Homo sapien
gacagaagtttgaatcctatcaagt

SEQ ID NO: 255006 - DNA, 25 bp, Homo sapien
tcccttcagccttcatgtgcacagg

SEQ ID NO: 255007 - DNA, 25 bp, Homo sapien
ctttaggattttccattcaaaagtg

SEQ ID NO: 255008 - DNA, 25 bp, Homo sapien
ctttcagctgttgtatgctttagga

SEQ ID NO: 255009 - DNA, 25 bp, Homo sapien
gtgcacaggggccattctttcagct

SEQ ID NO: 255010 - DNA, 25 bp, Homo sapien
tggtactcattgtcaattagttaag

SEQ ID NO: 255011 - DNA, 25 bp, Homo sapien
gtactcattgtcaattagttaagtc

SEQ ID NO: 255012 - DNA, 25 bp, Homo sapien
ctggtactcattgtcaattagttaa

SEQ ID NO: 255013 - DNA, 25 bp, Homo sapien
ggtactcattgtcaattagttaagt

SEQ ID NO: 255014 - DNA, 25 bp, Homo sapien
accttctagtgcactatgtctccac

SEQ ID NO: 255015 - DNA, 25 bp, Homo sapien
gcagggttggttcttggtgcggctt

SEQ ID NO: 255016 - DNA, 25 bp, Homo sapien
ccaccttctagtgcactatgtctcc

SEQ ID NO: 255017 - DNA, 25 bp, Homo sapien
caccttctagtgcactatgtctcca

SEQ ID NO: 255018 - DNA, 25 bp, Homo sapien
tgacccggccttgtattccgtgagc

SEQ ID NO: 255019 - DNA, 25 bp, Homo sapien
tacttgcaggaaagttcttagtaat

SEQ ID NO: 255020 - DNA, 25 bp, Homo sapien
aagaggacctctacggaaagctgag

SEQ ID NO: 255021 - DNA, 25 bp, Homo sapien
ggtgaaacttcaattgtaacaggaa

SEQ ID NO: 255022 - DNA, 25 bp, Homo sapien
ggagaactggttcttggacgtgtct

SEQ ID NO: 255023 - DNA, 25 bp, Homo sapien
agagctcagcttcagggagaactgg

SEQ ID NO: 255024 - DNA, 25 bp, Homo sapien
gaactggttcttggacgtgtctacg

SEQ ID NO: 255025 - DNA, 25 bp, Homo sapien
cagcttcagggagaactggttcttg

SEQ ID NO: 255026 - DNA, 25 bp, Homo sapien
gactcgactcttgagggacgggttg

SEQ ID NO: 255027 - DNA, 25 bp, Homo sapien
tgactcgactcttgagggacgggtt

SEQ ID NO: 255028 - DNA, 25 bp, Homo sapien
gtgactcgactcttgagggacgggt

SEQ ID NO: 255029 - DNA, 25 bp, Homo sapien
aatccactccagccccttccctggg

SEQ ID NO: 255030 - DNA, 25 bp, Homo sapien
caatccactccagccccttccctgg

SEQ ID NO: 255031 - DNA, 25 bp, Homo sapien
ccaatccactccagccccttccctg

SEQ ID NO: 255032 - DNA, 25 bp, Homo sapien
atccactccagccccttccctgggg

SEQ ID NO: 255033 - DNA, 25 bp, Homo sapien
ccagccccagtagtaactactactg

SEQ ID NO: 255034 - DNA, 25 bp, Homo sapien
atccagccccagtagtaactactac

SEQ ID NO: 255035 - DNA, 25 bp, Homo sapien
tccagccccagtagtaactactact

SEQ ID NO: 255036 - DNA, 25 bp, Homo sapien
agtcctgggcccgactcctgcagct

SEQ ID NO: 255037 - DNA, 25 bp, Homo sapien
tgagggacagggtctccgaaggctt

SEQ ID NO: 255038 - DNA, 25 bp, Homo sapien
tctccgaaggcttcaccagtcctgg

SEQ ID NO: 255039 - DNA, 25 bp, Homo sapien
cagggtctccgaaggcttcaccagt

SEQ ID NO: 255040 - DNA, 25 bp, Homo sapien
gtgaacagaaaaacccacagtgagc

SEQ ID NO: 255041 - DNA, 25 bp, Homo sapien
tgtgaacagaaaaacccacagtgag

SEQ ID NO: 255042 - DNA, 25 bp, Homo sapien
tgaacagaaaaacccacagtgagcc

SEQ ID NO: 255043 - DNA, 25 bp, Homo sapien
ctgtgaacagaaaaacccacagtga

SEQ ID NO: 255044 - DNA, 25 bp, Homo sapien
accagcaggaggaagaaccacaggt

SEQ ID NO: 255045 - DNA, 25 bp, Homo sapien
aggaggaagaaccacaggtgcttca

SEQ ID NO: 255046 - DNA, 25 bp, Homo sapien
tctgggagccgccaccagcaggagg

SEQ ID NO: 255047 - DNA, 25 bp, Homo sapien
gcaggaggaagaaccacaggtgctt

SEQ ID NO: 255048 - DNA, 25 bp, Homo sapien
gctttcttgttaggacgtgaacaac

SEQ ID NO: 255049 - DNA, 25 bp, Homo sapien
ctgggctttcttgttaggacgtgaa

SEQ ID NO: 255050 - DNA, 25 bp, Homo sapien
ttaggacgtgaacaactgggctgac

SEQ ID NO: 255051 - DNA, 25 bp, Homo sapien
tcttgttaggacgtgaacaactggg

SEQ ID NO: 255052 - DNA, 25 bp, Homo sapien
cagcacagctgcctcctccctcggg

SEQ ID NO: 255053 - DNA, 25 bp, Homo sapien
agctgcctcctccctcggggtttct

SEQ ID NO: 255054 - DNA, 25 bp, Homo sapien
tcagcacagctgcctcctccctcgg

SEQ ID NO: 255055 - DNA, 25 bp, Homo sapien
tgcctcctccctcggggtttctgac

SEQ ID NO: 255056 - DNA, 25 bp, Homo sapien
ccctcgggatgtgggtttccacact

SEQ ID NO: 255057 - DNA, 25 bp, Homo sapien
tccctcgggatgtgggtttccacac

SEQ ID NO: 255058 - DNA, 25 bp, Homo sapien
ggtttccacactgtgtctctcatac

SEQ ID NO: 255059 - DNA, 25 bp, Homo sapien
gtgggtttccacactgtgtctctca

SEQ ID NO: 255060 - DNA, 25 bp, Homo sapien
ccgtcctgtgaagccgttggtatat

SEQ ID NO: 255061 - DNA, 25 bp, Homo sapien
gaatagaaaccgtcctgtgaagccg

SEQ ID NO: 255062 - DNA, 25 bp, Homo sapien
gctgctgatcttcagatacgccatg

SEQ ID NO: 255063 - DNA, 25 bp, Homo sapien
tgatcttcagatacgccatgctgac

SEQ ID NO: 255064 - DNA, 25 bp, Homo sapien
acacatgcttgggactcacggtggg

SEQ ID NO: 255065 - DNA, 25 bp, Homo sapien
tccaggcggcgctgtcgagatttat

SEQ ID NO: 255066 - DNA, 25 bp, Homo sapien
cattcaggtcgtggatcttccggtc

SEQ ID NO: 255067 - DNA, 25 bp, Homo sapien
cctcagtgtctgtctttagggaact

SEQ ID NO: 255068 - DNA, 25 bp, Homo sapien
gaagactatggagtgtaggtcccca

SEQ ID NO: 255069 - DNA, 25 bp, Homo sapien
cttttccagttcagccagtgtcaac

SEQ ID NO: 255070 - DNA, 25 bp, Homo sapien
tgatatcatggtcttacaggtgtcc

SEQ ID NO: 255071 - DNA, 25 bp, Homo sapien
catgtgtgtgctctcaccaactcgt

SEQ ID NO: 255072 - DNA, 25 bp, Homo sapien
gggtttgcaagggcttcaccaggct

SEQ ID NO: 255073 - DNA, 25 bp, Homo sapien
tgagtgagggggtttgcaagggctt

SEQ ID NO: 255074 - DNA, 25 bp, Homo sapien
caggaagcactgattgtgacagaga

SEQ ID NO: 255075 - DNA, 25 bp, Homo sapien
aagcactgattgtgacagagaatcc

SEQ ID NO: 255076 - DNA, 25 bp, Homo sapien
tccatttgcagatagagcatgctct

SEQ ID NO: 255077 - DNA, 25 bp, Homo sapien
gcatgctcttagaattgtctcggag

SEQ ID NO: 255078 - DNA, 25 bp, Homo sapien
catggccgtgtccttagctttcaga

SEQ ID NO: 255079 - DNA, 25 bp, Homo sapien
tgtctcggagattgtgaatcggccc

SEQ ID NO: 255080 - DNA, 25 bp, Homo sapien
ctgcatagtatttctgacttccatc

SEQ ID NO: 255081 - DNA, 25 bp, Homo sapien
gcatagtatttctgacttccatcat

SEQ ID NO: 255082 - DNA, 25 bp, Homo sapien
tagtatttctgacttccatcattcc

SEQ ID NO: 255083 - DNA, 25 bp, Homo sapien
agtatttctgacttccatcattcca

SEQ ID NO: 255084 - DNA, 25 bp, Homo sapien
tccagccccttccctggagcctggc

SEQ ID NO: 255085 - DNA, 25 bp, Homo sapien
gccccttccctggagcctggcggac

SEQ ID NO: 255086 - DNA, 25 bp, Homo sapien
agccccttccctggagcctggcgga

SEQ ID NO: 255087 - DNA, 25 bp, Homo sapien
cagccccttccctggagcctggcgg

SEQ ID NO: 255088 - DNA, 25 bp, Homo sapien
ctaaaggagaatcctgaggctgcac

SEQ ID NO: 255089 - DNA, 25 bp, Homo sapien
catagctactaaaggagaatcctga

SEQ ID NO: 255090 - DNA, 25 bp, Homo sapien
actaaaggagaatcctgaggctgca

SEQ ID NO: 255091 - DNA, 25 bp, Homo sapien
tcatgccatagctactaaaggagaa

SEQ ID NO: 255092 - DNA, 25 bp, Homo sapien
caaacacaaagaaaccctggtcaga

SEQ ID NO: 255093 - DNA, 25 bp, Homo sapien
atttcaatagttctcaatgaattac

SEQ ID NO: 255094 - DNA, 25 bp, Homo sapien
actcaatttcaatagttctcaatga

SEQ ID NO: 255095 - DNA, 25 bp, Homo sapien
ctcaatttcaatagttctcaatgaa

SEQ ID NO: 255096 - DNA, 25 bp, Homo sapien
caatttcaatagttctcaatgaatt

SEQ ID NO: 255097 - DNA, 25 bp, Homo sapien
gctcagccatgactccatggtgaat

SEQ ID NO: 255098 - DNA, 25 bp, Homo sapien
ccatgactccatggtgaatcctctg

SEQ ID NO: 255099 - DNA, 25 bp, Homo sapien
aaatagcggcaagaaaaacccagct

SEQ ID NO: 255100 - DNA, 25 bp, Homo sapien
agaaaaacccagctcagccatgact

SEQ ID NO: 255101 - DNA, 25 bp, Homo sapien
tcacaaaatgaaagcacctgaaaat

SEQ ID NO: 255102 - DNA, 25 bp, Homo sapien
ctgatcacaaaatgaaagcacctga

SEQ ID NO: 255103 - DNA, 25 bp, Homo sapien
cacaaaatgaaagcacctgaaaatc

SEQ ID NO: 255104 - DNA, 25 bp, Homo sapien
gatcacaaaatgaaagcacctgaaa

SEQ ID NO: 255105 - DNA, 25 bp, Homo sapien
ccaagttcttgatagcagcgagtag

SEQ ID NO: 255106 - DNA, 25 bp, Homo sapien
tggaataagccagatgccgaaagac

SEQ ID NO: 255107 - DNA, 25 bp, Homo sapien
cagcgagtagagtactgggtcccac

SEQ ID NO: 255108 - DNA, 25 bp, Homo sapien
caagaatgtggtgaagagggtatcc

SEQ ID NO: 255109 - DNA, 25 bp, Homo sapien
gcctggcgcctgatggacattcaaa

SEQ ID NO: 255110 - DNA, 25 bp, Homo sapien
caatatcgtggatgcaggtgatccc

SEQ ID NO: 255111 - DNA, 25 bp, Homo sapien
tcgataaaaggagcccgatgacctg

SEQ ID NO: 255112 - DNA, 25 bp, Homo sapien
ttaaagcctctcgttattgacggag

SEQ ID NO: 255113 - DNA, 25 bp, Homo sapien
tcctctgctccacgctggccaccga

SEQ ID NO: 255114 - DNA, 25 bp, Homo sapien
ggcctcttcctctgctccacgctgg

SEQ ID NO: 255115 - DNA, 25 bp, Homo sapien
tcttcctctgctccacgctggccac

SEQ ID NO: 255116 - DNA, 25 bp, Homo sapien
ctcttcctctgctccacgctggcca

SEQ ID NO: 255117 - DNA, 25 bp, Homo sapien
tcctgcagcgccgtgggcagccggg

SEQ ID NO: 255118 - DNA, 25 bp, Homo sapien
cgggcgtcgctctcccgccgggtct

SEQ ID NO: 255119 - DNA, 25 bp, Homo sapien
ctctttgcgtcgaggccgccttcag

SEQ ID NO: 255120 - DNA, 25 bp, Homo sapien
ccacctcttcccgtgggcagctctt

SEQ ID NO: 255121 - DNA, 25 bp, Homo sapien
catgcccggattctcgggattatta

SEQ ID NO: 255122 - DNA, 25 bp, Homo sapien
gggctccatgcccggattctcggga

SEQ ID NO: 255123 - DNA, 25 bp, Homo sapien
gctccatgcccggattctcgggatt

SEQ ID NO: 255124 - DNA, 25 bp, Homo sapien
gagtagaagatggggctccatgccc

SEQ ID NO: 255125 - DNA, 25 bp, Homo sapien
ggtcatattcggtgtgattgtgctg

SEQ ID NO: 255126 - DNA, 25 bp, Homo sapien
aaggtcatattcggtgtgattgtgc

SEQ ID NO: 255127 - DNA, 25 bp, Homo sapien
aggtcatattcggtgtgattgtgct

SEQ ID NO: 255128 - DNA, 25 bp, Homo sapien
taagaaacggtggccgcctgttgct

SEQ ID NO: 255129 - DNA, 25 bp, Homo sapien
agaaacggtggccgcctgttgctcg

SEQ ID NO: 255130 - DNA, 25 bp, Homo sapien
agtaagaaacggtggccgcctgttg

SEQ ID NO: 255131 - DNA, 25 bp, Homo sapien
gtaagaaacggtggccgcctgttgc

SEQ ID NO: 255132 - DNA, 25 bp, Homo sapien
ttggtgttggggtcaatctggaaga

SEQ ID NO: 255133 - DNA, 25 bp, Homo sapien
tggtgttggggtcaatctggaagac

SEQ ID NO: 255134 - DNA, 25 bp, Homo sapien
ctgtgctccggtggtgaagatgggc

SEQ ID NO: 255135 - DNA, 25 bp, Homo sapien
gtgctccggtggtgaagatgggctg

SEQ ID NO: 255136 - DNA, 25 bp, Homo sapien
tccggtggtgaagatgggctgttct

SEQ ID NO: 255137 - DNA, 25 bp, Homo sapien
cggtggtgaagatgggctgttcttc

SEQ ID NO: 255138 - DNA, 25 bp, Homo sapien
acagtaatagatggccgtgtactcg

SEQ ID NO: 255139 - DNA, 25 bp, Homo sapien
gtaatagatggccgtgtactcggtt

SEQ ID NO: 255140 - DNA, 25 bp, Homo sapien
tacagtaatagatggccgtgtactc

SEQ ID NO: 255141 - DNA, 25 bp, Homo sapien
tagtacagtaatagatggccgtgta

SEQ ID NO: 255142 - DNA, 25 bp, Homo sapien
gatgcagcgcattctgtcgtgtaac

SEQ ID NO: 255143 - DNA, 25 bp, Homo sapien
aacctgcctttcacagatgcagcgc

SEQ ID NO: 255144 - DNA, 25 bp, Homo sapien
tgcctttcacagatgcagcgcattc

SEQ ID NO: 255145 - DNA, 25 bp, Homo sapien
ttcacagatgcagcgcattctgtcg

SEQ ID NO: 255146 - DNA, 25 bp, Homo sapien
ggtgaatctagaagctgcaaatgag

SEQ ID NO: 255147 - DNA, 25 bp, Homo sapien
tgaatctagaagctgcaaatgagag

SEQ ID NO: 255148 - DNA, 25 bp, Homo sapien
aaggtgaatctagaagctgcaaatg

SEQ ID NO: 255149 - DNA, 25 bp, Homo sapien
aatctagaagctgcaaatgagagtc

SEQ ID NO: 255150 - DNA, 25 bp, Homo sapien
tccatgcaatgcttcagccatgtat

SEQ ID NO: 255151 - DNA, 25 bp, Homo sapien
atgtatcatcattgagtcagggtct

SEQ ID NO: 255152 - DNA, 25 bp, Homo sapien
taacacaactgtgttgagagttctc

SEQ ID NO: 255153 - DNA, 25 bp, Homo sapien
aacacaactgtgttgagagttctca

SEQ ID NO: 255154 - DNA, 25 bp, Homo sapien
caaggctacagacatccacagacac

SEQ ID NO: 255155 - DNA, 25 bp, Homo sapien
aatcatagactatggaacacctggg

SEQ ID NO: 255156 - DNA, 25 bp, Homo sapien
gattaaacttgtaccgcatgtccca

SEQ ID NO: 255157 - DNA, 25 bp, Homo sapien
gggaactgaccacaatactcagacg

SEQ ID NO: 255158 - DNA, 25 bp, Homo sapien
gatgggaactgtgacacgactctga

SEQ ID NO: 255159 - DNA, 25 bp, Homo sapien
ggtgttggagccacgtcctgtgctc

SEQ ID NO: 255160 - DNA, 25 bp, Homo sapien
caagctctgcgctgatctgagcaga

SEQ ID NO: 255161 - DNA, 25 bp, Homo sapien
aggagacgaacaagctctgcgctga

SEQ ID NO: 255162 - DNA, 25 bp, Homo sapien
gcaggtgcgcctctttccaaaaatt

SEQ ID NO: 255163 - DNA, 25 bp, Homo sapien
ttgttgctctgatggcttcatacag

SEQ ID NO: 255164 - DNA, 25 bp, Homo sapien
tagtgctagttaaccttggtgtgcc

SEQ ID NO: 255165 - DNA, 25 bp, Homo sapien
tccttggctagaccatagtctcaat

SEQ ID NO: 255166 - DNA, 25 bp, Homo sapien
gcagatacagggagtttttgctgtt

SEQ ID NO: 255167 - DNA, 25 bp, Homo sapien
cagatacagggagtttttgctgttg

SEQ ID NO: 255168 - DNA, 25 bp, Homo sapien
tgcatagtatgtgctaccaccatcc

SEQ ID NO: 255169 - DNA, 25 bp, Homo sapien
caccatcccaactaataagagagac

SEQ ID NO: 255170 - DNA, 25 bp, Homo sapien
taccaccatcccaactaataagaga

SEQ ID NO: 255171 - DNA, 25 bp, Homo sapien
tgctaccaccatcccaactaataag

SEQ ID NO: 255172 - DNA, 25 bp, Homo sapien
ctccagacccttccccggagcttga

SEQ ID NO: 255173 - DNA, 25 bp, Homo sapien
acccagtgcatggtataatcatcaa

SEQ ID NO: 255174 - DNA, 25 bp, Homo sapien
ggtataatcatcaaaggtgaatcca

SEQ ID NO: 255175 - DNA, 25 bp, Homo sapien
gagcttgacggacccagtgcatggt

SEQ ID NO: 255176 - DNA, 25 bp, Homo sapien
accagctgcacttcacactggacac

SEQ ID NO: 255177 - DNA, 25 bp, Homo sapien
gactccaccagctgcacttcacact

SEQ ID NO: 255178 - DNA, 25 bp, Homo sapien
tccaccagctgcacttcacactgga

SEQ ID NO: 255179 - DNA, 25 bp, Homo sapien
caccagctgcacttcacactggaca

SEQ ID NO: 255180 - DNA, 25 bp, Homo sapien
ctgcaaacacagagacaccctggtc

SEQ ID NO: 255181 - DNA, 25 bp, Homo sapien
gcaaacacagagacaccctggtcag

SEQ ID NO: 255182 - DNA, 25 bp, Homo sapien
aacacagagacaccctggtcagaca

SEQ ID NO: 255183 - DNA, 25 bp, Homo sapien
caaacacagagacaccctggtcaga

SEQ ID NO: 255184 - DNA, 25 bp, Homo sapien
gtgctgatcaccgaatggaaacacc

SEQ ID NO: 255185 - DNA, 25 bp, Homo sapien
tgctgatcaccgaatggaaacacct

SEQ ID NO: 255186 - DNA, 25 bp, Homo sapien
cagtgctgatcaccgaatggaaaca

SEQ ID NO: 255187 - DNA, 25 bp, Homo sapien
tcagtgctgatcaccgaatggaaac

SEQ ID NO: 255188 - DNA, 25 bp, Homo sapien
cagccatacgaagagctgtttttgg

SEQ ID NO: 255189 - DNA, 25 bp, Homo sapien
taatgtcactcagccatacgaagag

SEQ ID NO: 255190 - DNA, 25 bp, Homo sapien
gttgctaatgtcactcagccatacg

SEQ ID NO: 255191 - DNA, 25 bp, Homo sapien
tcactcagccatacgaagagctgtt

SEQ ID NO: 255192 - DNA, 25 bp, Homo sapien
taccagctgcacctcatactgcaca

SEQ ID NO: 255193 - DNA, 25 bp, Homo sapien
tctaccagctgcacctcatactgca

SEQ ID NO: 255194 - DNA, 25 bp, Homo sapien
accagctgcacctcatactgcacac

SEQ ID NO: 255195 - DNA, 25 bp, Homo sapien
actctaccagctgcacctcatactg

SEQ ID NO: 255196 - DNA, 25 bp, Homo sapien
ctctgtgttaagttctgatcaccaa

SEQ ID NO: 255197 - DNA, 25 bp, Homo sapien
tctgtgttaagttctgatcaccaag

SEQ ID NO: 255198 - DNA, 25 bp, Homo sapien
tgttaagttctgatcaccaagtgaa

SEQ ID NO: 255199 - DNA, 25 bp, Homo sapien
tgtgttaagttctgatcaccaagtg

SEQ ID NO: 255200 - DNA, 25 bp, Homo sapien
cattcaactcccgaccttcatgtca

SEQ ID NO: 255201 - DNA, 25 bp, Homo sapien
tcccgaccttcatgtcacttcagtt

SEQ ID NO: 255202 - DNA, 25 bp, Homo sapien
cttttctccattcaactcccgacct

SEQ ID NO: 255203 - DNA, 25 bp, Homo sapien
gaccttcatgtcacttcagtttcta

SEQ ID NO: 255204 - DNA, 25 bp, Homo sapien
agctgctccaagttcgaacccgcgg

SEQ ID NO: 255205 - DNA, 25 bp, Homo sapien
gctggcgcctcagctggcagcagct

SEQ ID NO: 255206 - DNA, 25 bp, Homo sapien
ttttcagaggacatgccgaatccag

SEQ ID NO: 255207 - DNA, 25 bp, Homo sapien
tcagtgacaaattcccgagttttca

SEQ ID NO: 255208 - DNA, 25 bp, Homo sapien
ttcccggaggcgccggcgtgaggtc

SEQ ID NO: 255209 - DNA, 25 bp, Homo sapien
cttcccggaggcgccggcgtgaggt

SEQ ID NO: 255210 - DNA, 25 bp, Homo sapien
ggcggctcagtggaggcgcagcagc

SEQ ID NO: 255211 - DNA, 25 bp, Homo sapien
aggcggctcagtggaggcgcagcag

SEQ ID NO: 255212 - DNA, 25 bp, Homo sapien
ttctaaatatgagcagcctggcatg

SEQ ID NO: 255213 - DNA, 25 bp, Homo sapien
cactgaacgaacgtggacgtgtggt

SEQ ID NO: 255214 - DNA, 25 bp, Homo sapien
tatacaatagcgaggaataaaacgc

SEQ ID NO: 255215 - DNA, 25 bp, Homo sapien
aaagcacatggtaacttacggccag

SEQ ID NO: 255216 - DNA, 25 bp, Homo sapien
tgcccccgcgcctctccagaccgcc

SEQ ID NO: 255217 - DNA, 25 bp, Homo sapien
agctgcccccgcgcctctccagacc

SEQ ID NO: 255218 - DNA, 25 bp, Homo sapien
tcagctgcccccgcgcctctccaga

SEQ ID NO: 255219 - DNA, 25 bp, Homo sapien
ccccgcgcctctccagaccgcccac

SEQ ID NO: 255220 - DNA, 25 bp, Homo sapien
tgccccctggcatctccgatcgccg

SEQ ID NO: 255221 - DNA, 25 bp, Homo sapien
cccctggcatctccgatcgccgacg

SEQ ID NO: 255222 - DNA, 25 bp, Homo sapien
cccggaccgcccacgtcccatcagc

SEQ ID NO: 255223 - DNA, 25 bp, Homo sapien
ggcatctccgatcgccgacgtcccg

SEQ ID NO: 255224 - DNA, 25 bp, Homo sapien
tcagctgctgatcttgtttttgact

SEQ ID NO: 255225 - DNA, 25 bp, Homo sapien
ttgacttttacaagactgtagtggc

SEQ ID NO: 255226 - DNA, 25 bp, Homo sapien
ctgtagtggcatcttgtctcttgga

SEQ ID NO: 255227 - DNA, 25 bp, Homo sapien
gcatcttgtctcttggatggaaggg

SEQ ID NO: 255228 - DNA, 25 bp, Homo sapien
ctcttcgttgcaaagattttgttca

SEQ ID NO: 255229 - DNA, 25 bp, Homo sapien
attctgacacatggtcatacaaagt

SEQ ID NO: 255230 - DNA, 25 bp, Homo sapien
cttcgttgcaaagattttgttcagt

SEQ ID NO: 255231 - DNA, 25 bp, Homo sapien
tcttcgttgcaaagattttgttcag

SEQ ID NO: 255232 - DNA, 25 bp, Homo sapien
gcacagtaatacacgcctgcatccc

SEQ ID NO: 255233 - DNA, 25 bp, Homo sapien
cacttctcagctgtaagttttcttg

SEQ ID NO: 255234 - DNA, 25 bp, Homo sapien
agtaatacacgcctgcatccccagc

SEQ ID NO: 255235 - DNA, 25 bp, Homo sapien
gccatcacacttctcagctgtaagt

SEQ ID NO: 255236 - DNA, 25 bp, Homo sapien
gtgtttcccttaacccatatcacac

SEQ ID NO: 255237 - DNA, 25 bp, Homo sapien
tctgccctgaaggttggggcttagt

SEQ ID NO: 255238 - DNA, 25 bp, Homo sapien
ttagtgtttcccttaacccatatca

SEQ ID NO: 255239 - DNA, 25 bp, Homo sapien
ctctgccctgaaggttggggcttag

SEQ ID NO: 255240 - DNA, 25 bp, Homo sapien
ttgaatgtgcataggcggcataggt

SEQ ID NO: 255241 - DNA, 25 bp, Homo sapien
cagaaattgaatgtgcataggcggc

SEQ ID NO: 255242 - DNA, 25 bp, Homo sapien
accttttgatgggagatggtggatc

SEQ ID NO: 255243 - DNA, 25 bp, Homo sapien
cccattgcacaaggtggtcctcact

SEQ ID NO: 255244 - DNA, 25 bp, Homo sapien
agagaaggagtagcggaggggccat

SEQ ID NO: 255245 - DNA, 25 bp, Homo sapien
cagagaaggagtagcggaggggcca

SEQ ID NO: 255246 - DNA, 25 bp, Homo sapien
gcagagaaggagtagcggaggggcc

SEQ ID NO: 255247 - DNA, 25 bp, Homo sapien
gctctgcagagatggatcatcgtgt

SEQ ID NO: 255248 - DNA, 25 bp, Homo sapien
gttgggatggacaacccagaaatgg

SEQ ID NO: 255249 - DNA, 25 bp, Homo sapien
ccatggaagcgggctagtggattca

SEQ ID NO: 255250 - DNA, 25 bp, Homo sapien
cacagagctcaggtatagtcaaaat

SEQ ID NO: 255251 - DNA, 25 bp, Homo sapien
tgctcatagacctgtccctggtaat

SEQ ID NO: 255252 - DNA, 25 bp, Homo sapien
gtaggctgtgctcatagacctgtcc

SEQ ID NO: 255253 - DNA, 25 bp, Homo sapien
gctgtgctcatagacctgtccctgg

SEQ ID NO: 255254 - DNA, 25 bp, Homo sapien
taggctgtgctcatagacctgtccc

SEQ ID NO: 255255 - DNA, 25 bp, Homo sapien
taccattgaaaggtgtgatccatcc

SEQ ID NO: 255256 - DNA, 25 bp, Homo sapien
ggaaaccttcactgaggacccagtc

SEQ ID NO: 255257 - DNA, 25 bp, Homo sapien
ggtgtatccggaagccttgcaggaa

SEQ ID NO: 255258 - DNA, 25 bp, Homo sapien
tatccggaagccttgcaggaaacct

SEQ ID NO: 255259 - DNA, 25 bp, Homo sapien
ccagtgcaggtagcggtaggtgaag

SEQ ID NO: 255260 - DNA, 25 bp, Homo sapien
gaggggacacaggagtggataaaag

SEQ ID NO: 255261 - DNA, 25 bp, Homo sapien
gggacacaggagtggataaaagcca

SEQ ID NO: 255262 - DNA, 25 bp, Homo sapien
caggagtggataaaagccaccttga

SEQ ID NO: 255263 - DNA, 25 bp, Homo sapien
gacacaggagtggataaaagccacc

SEQ ID NO: 255264 - DNA, 25 bp, Homo sapien
aagaggattctccaggtccagtcca

SEQ ID NO: 255265 - DNA, 25 bp, Homo sapien
caccaagaagaggattctccaggtc

SEQ ID NO: 255266 - DNA, 25 bp, Homo sapien
accaagaagaggattctccaggtcc

SEQ ID NO: 255267 - DNA, 25 bp, Homo sapien
aagaagaggattctccaggtccagt

SEQ ID NO: 255268 - DNA, 25 bp, Homo sapien
ggagggatgtggttgttgggtgatg

SEQ ID NO: 255269 - DNA, 25 bp, Homo sapien
agggatgtggttgttgggtgatgct

SEQ ID NO: 255270 - DNA, 25 bp, Homo sapien
gagggatgtggttgttgggtgatgc

SEQ ID NO: 255271 - DNA, 25 bp, Homo sapien
accttcacaagctttcagagagaga

SEQ ID NO: 255272 - DNA, 25 bp, Homo sapien
ctgatcttccttgagttcctggtgc

SEQ ID NO: 255273 - DNA, 25 bp, Homo sapien
ttctctaggcagctccacagcaggg

SEQ ID NO: 255274 - DNA, 25 bp, Homo sapien
gaacaaaaacccatgcattactcag

SEQ ID NO: 255275 - DNA, 25 bp, Homo sapien
gtgctaccaccactagggttgatta

SEQ ID NO: 255276 - DNA, 25 bp, Homo sapien
cacccagtgcatatagtagctggtg

SEQ ID NO: 255277 - DNA, 25 bp, Homo sapien
ccagtgcatatagtagctggtgaag

SEQ ID NO: 255278 - DNA, 25 bp, Homo sapien
gtcgcacccagtgcatatagtagct

SEQ ID NO: 255279 - DNA, 25 bp, Homo sapien
cgcacccagtgcatatagtagctgg

SEQ ID NO: 255280 - DNA, 25 bp, Homo sapien
ggacacagtagagaatgacagtcct

SEQ ID NO: 255281 - DNA, 25 bp, Homo sapien
ctgcggagaggacacagtagagaat

SEQ ID NO: 255282 - DNA, 25 bp, Homo sapien
gaggacacagtagagaatgacagtc

SEQ ID NO: 255283 - DNA, 25 bp, Homo sapien
cggagaggacacagtagagaatgac

SEQ ID NO: 255284 - DNA, 25 bp, Homo sapien
cctcagccctggaaccagttggccc

SEQ ID NO: 255285 - DNA, 25 bp, Homo sapien
cagccctggaaccagttggcccttt

SEQ ID NO: 255286 - DNA, 25 bp, Homo sapien
ttcctcagccctggaaccagttggc

SEQ ID NO: 255287 - DNA, 25 bp, Homo sapien
cttcctcagccctggaaccagttgg

SEQ ID NO: 255288 - DNA, 25 bp, Homo sapien
agcaagcagaagaccctccaggtcc

SEQ ID NO: 255289 - DNA, 25 bp, Homo sapien
agcagaagaccctccaggtccagtc

SEQ ID NO: 255290 - DNA, 25 bp, Homo sapien
agccagcaagcagaagaccctccag

SEQ ID NO: 255291 - DNA, 25 bp, Homo sapien
aagcagaagaccctccaggtccagt

SEQ ID NO: 255292 - DNA, 25 bp, Homo sapien
gtgaagaactttcctctcagaggct

SEQ ID NO: 255293 - DNA, 25 bp, Homo sapien
tgaagaactttcctctcagaggctt

SEQ ID NO: 255294 - DNA, 25 bp, Homo sapien
ggtgaagaactttcctctcagaggc

SEQ ID NO: 255295 - DNA, 25 bp, Homo sapien
ttcagggcccagatgtatccatatt

SEQ ID NO: 255296 - DNA, 25 bp, Homo sapien
catatttacctcagtagatctaagg

SEQ ID NO: 255297 - DNA, 25 bp, Homo sapien
gttggatgatgctttcagggcccag

SEQ ID NO: 255298 - DNA, 25 bp, Homo sapien
ccatatttacctcagtagatctaag

SEQ ID NO: 255299 - DNA, 25 bp, Homo sapien
agcaggttcctctgagattcgttgg

SEQ ID NO: 255300 - DNA, 25 bp, Homo sapien
aaactgactgtagatgttccacgtg

SEQ ID NO: 255301 - DNA, 25 bp, Homo sapien
gttccacgtgactctccagcaggtt

SEQ ID NO: 255302 - DNA, 25 bp, Homo sapien
ttcctctgagattcgttgggcgcac

SEQ ID NO: 255303 - DNA, 25 bp, Homo sapien
aacgctctgggtttacagaattgcc

SEQ ID NO: 255304 - DNA, 25 bp, Homo sapien
atcacctgcccggtgtcttgattcc

SEQ ID NO: 255305 - DNA, 25 bp, Homo sapien
gcagaaacgctctgggtttacagaa

SEQ ID NO: 255306 - DNA, 25 bp, Homo sapien
gcccggtgtcttgattccccaggat

SEQ ID NO: 255307 - DNA, 25 bp, Homo sapien
ggccagtaacagtgtaggtgaggca

SEQ ID NO: 255308 - DNA, 25 bp, Homo sapien
gtggccagtaacagtgtaggtgagg

SEQ ID NO: 255309 - DNA, 25 bp, Homo sapien
agagggtaagtgtgtgctattcagg

SEQ ID NO: 255310 - DNA, 25 bp, Homo sapien
gtgacggagtggccagtaacagtgt

SEQ ID NO: 255311 - DNA, 25 bp, Homo sapien
cttcaggacctgctaccaggcacag

SEQ ID NO: 255312 - DNA, 25 bp, Homo sapien
ttcaggacctgctaccaggcacagg

SEQ ID NO: 255313 - DNA, 25 bp, Homo sapien
tcaggacctgctaccaggcacagga

SEQ ID NO: 255314 - DNA, 25 bp, Homo sapien
cgttcctgcagggaagtttgtatct

SEQ ID NO: 255315 - DNA, 25 bp, Homo sapien
tcctccagcgttcctgcagggaagt

SEQ ID NO: 255316 - DNA, 25 bp, Homo sapien
tgcagctgatttcctccagcgttcc

SEQ ID NO: 255317 - DNA, 25 bp, Homo sapien
tgatttcctccagcgttcctgcagg

SEQ ID NO: 255318 - DNA, 25 bp, Homo sapien
gctgatacccactccggacccttcc

SEQ ID NO: 255319 - DNA, 25 bp, Homo sapien
agtgcagaacatagctactgaaggc

SEQ ID NO: 255320 - DNA, 25 bp, Homo sapien
ggagcccggcgaacccagtgcagaa

SEQ ID NO: 255321 - DNA, 25 bp, Homo sapien
gaacatagctactgaaggcgaatcc

SEQ ID NO: 255322 - DNA, 25 bp, Homo sapien
ccagcttagcacaaactccctggtg

SEQ ID NO: 255323 - DNA, 25 bp, Homo sapien
cccagcttagcacaaactccctggt

SEQ ID NO: 255324 - DNA, 25 bp, Homo sapien
gtgtccctcacagtaataaacggaa

SEQ ID NO: 255325 - DNA, 25 bp, Homo sapien
cgtgtccctcacagtaataaacgga

SEQ ID NO: 255326 - DNA, 25 bp, Homo sapien
tgtccctcacagtaataaacggaat

SEQ ID NO: 255327 - DNA, 25 bp, Homo sapien
tgaattactgatgttatcacctaca

SEQ ID NO: 255328 - DNA, 25 bp, Homo sapien
tactgatgttatcacctacacccac

SEQ ID NO: 255329 - DNA, 25 bp, Homo sapien
aattactgatgttatcacctacacc

SEQ ID NO: 255330 - DNA, 25 bp, Homo sapien
ttactgatgttatcacctacaccca

SEQ ID NO: 255331 - DNA, 25 bp, Homo sapien
gaagcccagatcatcatagacccga

SEQ ID NO: 255332 - DNA, 25 bp, Homo sapien
tgaagcccagatcatcatagacccg

SEQ ID NO: 255333 - DNA, 25 bp, Homo sapien
agatcatcatagacccgatggtgtg

SEQ ID NO: 255334 - DNA, 25 bp, Homo sapien
gcccagatcatcatagacccgatgg

SEQ ID NO: 255335 - DNA, 25 bp, Homo sapien
gcttttcattagcagggaggggcct

SEQ ID NO: 255336 - DNA, 25 bp, Homo sapien
ttttcattagcagggaggggcctca

SEQ ID NO: 255337 - DNA, 25 bp, Homo sapien
gagctgcttttcattagcagggagg

SEQ ID NO: 255338 - DNA, 25 bp, Homo sapien
cattagcagggaggggcctcatttc

SEQ ID NO: 255339 - DNA, 25 bp, Homo sapien
atttctgcccccaaagtgacactgt

SEQ ID NO: 255340 - DNA, 25 bp, Homo sapien
cctgttgaccacgaaaggattattt

SEQ ID NO: 255341 - DNA, 25 bp, Homo sapien
tgttgaccacgaaaggattatttct

SEQ ID NO: 255342 - DNA, 25 bp, Homo sapien
cccccaaagtgacactgtggcttct

SEQ ID NO: 255343 - DNA, 25 bp, Homo sapien
cctggtggtcctgcggacccctgca

SEQ ID NO: 255344 - DNA, 25 bp, Homo sapien
gcagatacagtgagttcttggcatt

SEQ ID NO: 255345 - DNA, 25 bp, Homo sapien
tttgcagatacagtgagttcttggc

SEQ ID NO: 255346 - DNA, 25 bp, Homo sapien
gtgtcctcgtctctcaggctgttca

SEQ ID NO: 255347 - DNA, 25 bp, Homo sapien
tgtcctcgtctctcaggctgttcat

SEQ ID NO: 255348 - DNA, 25 bp, Homo sapien
cagagtctgcgtagtatatggtact

SEQ ID NO: 255349 - DNA, 25 bp, Homo sapien
gcctggcggacccagttcatgctat

SEQ ID NO: 255350 - DNA, 25 bp, Homo sapien
cgtagtatatggtactactactact

SEQ ID NO: 255351 - DNA, 25 bp, Homo sapien
agttcatgctatagctactgaaggt

SEQ ID NO: 255352 - DNA, 25 bp, Homo sapien
aacaaagagacaccaaggtcagaaa

SEQ ID NO: 255353 - DNA, 25 bp, Homo sapien
caaacaaagagacaccaaggtcaga

SEQ ID NO: 255354 - DNA, 25 bp, Homo sapien
gcaaacaaagagacaccaaggtcag

SEQ ID NO: 255355 - DNA, 25 bp, Homo sapien
ctgcaaacaaagagacaccaaggtc

SEQ ID NO: 255356 - DNA, 25 bp, Homo sapien
ccttggaatccagggctaaggcacc

SEQ ID NO: 255357 - DNA, 25 bp, Homo sapien
cagtgctgatcaccaagtggaaatg

SEQ ID NO: 255358 - DNA, 25 bp, Homo sapien
tctgtgttcagtgctgatcaccaag

SEQ ID NO: 255359 - DNA, 25 bp, Homo sapien
tgatcaccaagtggaaatgccttgg

SEQ ID NO: 255360 - DNA, 25 bp, Homo sapien
ccccactggagaacaaagaattatt

SEQ ID NO: 255361 - DNA, 25 bp, Homo sapien
tccccactggagaacaaagaattat

SEQ ID NO: 255362 - DNA, 25 bp, Homo sapien
atccccactggagaacaaagaatta

SEQ ID NO: 255363 - DNA, 25 bp, Homo sapien
caacagcggggtaaggataatgaag

SEQ ID NO: 255364 - DNA, 25 bp, Homo sapien
agagccctgtgatcccgaggagatg

SEQ ID NO: 255365 - DNA, 25 bp, Homo sapien
gttgcttgtttggtacaacagcggg

SEQ ID NO: 255366 - DNA, 25 bp, Homo sapien
gaggctccaggtcgtgtggactcac

SEQ ID NO: 255367 - DNA, 25 bp, Homo sapien
cctctccagaagtcttcgggagaca

SEQ ID NO: 255368 - DNA, 25 bp, Homo sapien
ctccagaagtcttcgggagacaggg

SEQ ID NO: 255369 - DNA, 25 bp, Homo sapien
ggccctcgagatgatccagtgagat

SEQ ID NO: 255370 - DNA, 25 bp, Homo sapien
tgaggatgggccctcgagatgatcc

SEQ ID NO: 255371 - DNA, 25 bp, Homo sapien
cctggtggctctgtgcgcccctgca

SEQ ID NO: 255372 - DNA, 25 bp, Homo sapien
tggtggctctgtgcgcccctgcagg

SEQ ID NO: 255373 - DNA, 25 bp, Homo sapien
ccccctggtggctctgtgcgcccct

SEQ ID NO: 255374 - DNA, 25 bp, Homo sapien
tcaggcggtccctagcgccccctgg

SEQ ID NO: 255375 - DNA, 25 bp, Homo sapien
tcactgtgtctctagtacagtaata

SEQ ID NO: 255376 - DNA, 25 bp, Homo sapien
tgtctctagtacagtaatacacggc

SEQ ID NO: 255377 - DNA, 25 bp, Homo sapien
ctgtgtctctagtacagtaatacac

SEQ ID NO: 255378 - DNA, 25 bp, Homo sapien
gtgtctctagtacagtaatacacgg

SEQ ID NO: 255379 - DNA, 25 bp, Homo sapien
ctgttcatttgcagataggcgatgc

SEQ ID NO: 255380 - DNA, 25 bp, Homo sapien
ggctgttcatttgcagataggcgat

SEQ ID NO: 255381 - DNA, 25 bp, Homo sapien
tgtgtcctcggttttcaggctgttc

SEQ ID NO: 255382 - DNA, 25 bp, Homo sapien
caggctgttcatttgcagataggcg

SEQ ID NO: 255383 - DNA, 25 bp, Homo sapien
acagacgcggcgtattctgttgtcc

SEQ ID NO: 255384 - DNA, 25 bp, Homo sapien
cagctcatagcataatcaccaaagg

SEQ ID NO: 255385 - DNA, 25 bp, Homo sapien
gctcatagcataatcaccaaaggtg

SEQ ID NO: 255386 - DNA, 25 bp, Homo sapien
tcatagcataatcaccaaaggtgaa

SEQ ID NO: 255387 - DNA, 25 bp, Homo sapien
agctcatagcataatcaccaaaggt

SEQ ID NO: 255388 - DNA, 25 bp, Homo sapien
ctgcaaacacagaaacaccaaggtc

SEQ ID NO: 255389 - DNA, 25 bp, Homo sapien
aacacagaaacaccaaggtcagaaa

SEQ ID NO: 255390 - DNA, 25 bp, Homo sapien
caaacacagaaacaccaaggtcaga

SEQ ID NO: 255391 - DNA, 25 bp, Homo sapien
gcaaacacagaaacaccaaggtcag

SEQ ID NO: 255392 - DNA, 25 bp, Homo sapien
tcatgtcccctcacactcagtatct

SEQ ID NO: 255393 - DNA, 25 bp, Homo sapien
gtatctctagtacaccatgaattac

SEQ ID NO: 255394 - DNA, 25 bp, Homo sapien
tatccactgtttctaccactcatgt

SEQ ID NO: 255395 - DNA, 25 bp, Homo sapien
acatatccactgtttctaccactca

SEQ ID NO: 255396 - DNA, 25 bp, Homo sapien
ccatggttggtggtctgtgttcagt

SEQ ID NO: 255397 - DNA, 25 bp, Homo sapien
cagctaagcccaaactccatggttg

SEQ ID NO: 255398 - DNA, 25 bp, Homo sapien
tgctgatcaccaagtggaaactcct

SEQ ID NO: 255399 - DNA, 25 bp, Homo sapien
aaactcctgggaatctcacggctgg

SEQ ID NO: 255400 - DNA, 25 bp, Homo sapien
tgggttgcgttgtgttctccctcat

SEQ ID NO: 255401 - DNA, 25 bp, Homo sapien
attcatggttgtgtactcgttgctc

SEQ ID NO: 255402 - DNA, 25 bp, Homo sapien
aaattcatggttgtgtactcgttgc

SEQ ID NO: 255403 - DNA, 25 bp, Homo sapien
ggactcttgaggcgtgggttgcgtt

SEQ ID NO: 255404 - DNA, 25 bp, Homo sapien
ctccctcagactcagagtaaggaca

SEQ ID NO: 255405 - DNA, 25 bp, Homo sapien
cagagtaaggacaatgtgctcttta

SEQ ID NO: 255406 - DNA, 25 bp, Homo sapien
tcagactcagagtaaggacaatgtg

SEQ ID NO: 255407 - DNA, 25 bp, Homo sapien
ttagttgtacaggaacagctcctcc

SEQ ID NO: 255408 - DNA, 25 bp, Homo sapien
ccatcacccggtttttgacaaagag

SEQ ID NO: 255409 - DNA, 25 bp, Homo sapien
tcctatacctccaacgtcagggagc

SEQ ID NO: 255410 - DNA, 25 bp, Homo sapien
cacccggcacagctctctgacacca

SEQ ID NO: 255411 - DNA, 25 bp, Homo sapien
caacgtcagggagcccctggaccag

SEQ ID NO: 255412 - DNA, 25 bp, Homo sapien
gagcctggcagattcagctgatcta

SEQ ID NO: 255413 - DNA, 25 bp, Homo sapien
tctagtagctacagaaggtggattc

SEQ ID NO: 255414 - DNA, 25 bp, Homo sapien
gattcagaggatgcacggcagagtc

SEQ ID NO: 255415 - DNA, 25 bp, Homo sapien
tttgcagatacaacctgtgcttggc

SEQ ID NO: 255416 - DNA, 25 bp, Homo sapien
aatgacaagggaaacccagctcagc

SEQ ID NO: 255417 - DNA, 25 bp, Homo sapien
caagggaaacccagctcagccctaa

SEQ ID NO: 255418 - DNA, 25 bp, Homo sapien
aaataatgacaagggaaacccagct

SEQ ID NO: 255419 - DNA, 25 bp, Homo sapien
ataatgacaagggaaacccagctca

SEQ ID NO: 255420 - DNA, 25 bp, Homo sapien
agagaatccacctcccatggtcagg

SEQ ID NO: 255421 - DNA, 25 bp, Homo sapien
ttgtagaacacacaagagccccgtc

SEQ ID NO: 255422 - DNA, 25 bp, Homo sapien
tggtcaggtcccctatacagttgcc

SEQ ID NO: 255423 - DNA, 25 bp, Homo sapien
tcattctgcacctgcggtgtggagg

SEQ ID NO: 255424 - DNA, 25 bp, Homo sapien
gacgggctcggggctggtttctctc

SEQ ID NO: 255425 - DNA, 25 bp, Homo sapien
cgggctcggggctggtttctctcac

SEQ ID NO: 255426 - DNA, 25 bp, Homo sapien
acgggctcggggctggtttctctca

SEQ ID NO: 255427 - DNA, 25 bp, Homo sapien
tagacgggctcggggctggtttctc

SEQ ID NO: 255428 - DNA, 25 bp, Homo sapien
agtcaccaggatagatgatccccat

SEQ ID NO: 255429 - DNA, 25 bp, Homo sapien
ttcccgggcatctggcgcacccagc

SEQ ID NO: 255430 - DNA, 25 bp, Homo sapien
gagtcaccaggatagatgatcccca

SEQ ID NO: 255431 - DNA, 25 bp, Homo sapien
gggcgaggatggcggttgaccccat

SEQ ID NO: 255432 - DNA, 25 bp, Homo sapien
aggagggcgaggatggcggttgacc

SEQ ID NO: 255433 - DNA, 25 bp, Homo sapien
ggagggcgaggatggcggttgaccc

SEQ ID NO: 255434 - DNA, 25 bp, Homo sapien
gagggcgaggatggcggttgacccc

SEQ ID NO: 255435 - DNA, 25 bp, Homo sapien
aaaatgaagccctgagatcccagct

SEQ ID NO: 255436 - DNA, 25 bp, Homo sapien
gatggtggaggacagaaaatgaagc

SEQ ID NO: 255437 - DNA, 25 bp, Homo sapien
acagaaaatgaagccctgagatccc

SEQ ID NO: 255438 - DNA, 25 bp, Homo sapien
agaaaatgaagccctgagatcccag

SEQ ID NO: 255439 - DNA, 25 bp, Homo sapien
gggcccctctcagtgtaccaagtct

SEQ ID NO: 255440 - DNA, 25 bp, Homo sapien
gatactgaaggtgaaccaagaggct

SEQ ID NO: 255441 - DNA, 25 bp, Homo sapien
tgaggcctggcaaacccagtgaatc

SEQ ID NO: 255442 - DNA, 25 bp, Homo sapien
gaagtggtgagtctgcccctaacat

SEQ ID NO: 255443 - DNA, 25 bp, Homo sapien
actctgtaagctgggcctcaccctg

SEQ ID NO: 255444 - DNA, 25 bp, Homo sapien
gtaagctgggcctcaccctggatac

SEQ ID NO: 255445 - DNA, 25 bp, Homo sapien
tgtaagctgggcctcaccctggata

SEQ ID NO: 255446 - DNA, 25 bp, Homo sapien
cccagactctgtaagctgggcctca

SEQ ID NO: 255447 - DNA, 25 bp, Homo sapien
tgggcctgagtgctctttggtggtc

SEQ ID NO: 255448 - DNA, 25 bp, Homo sapien
gttgtggcattgttggtcacagaac

SEQ ID NO: 255449 - DNA, 25 bp, Homo sapien
gtaatacaaggttgtggcattgttg

SEQ ID NO: 255450 - DNA, 25 bp, Homo sapien
acaaggttgtggcattgttggtcac

SEQ ID NO: 255451 - DNA, 25 bp, Homo sapien
gatccactcccttgactgaggactg

SEQ ID NO: 255452 - DNA, 25 bp, Homo sapien
tttggttcttggacgtggatctgga

SEQ ID NO: 255453 - DNA, 25 bp, Homo sapien
tttgtgctccctcgtgacctatgcc

SEQ ID NO: 255454 - DNA, 25 bp, Homo sapien
tgactgaggactggcggatccagct

SEQ ID NO: 255455 - DNA, 25 bp, Homo sapien
aaggtgactctacggtgggaccctg

SEQ ID NO: 255456 - DNA, 25 bp, Homo sapien
ttataattatttgctgactgcatgg

SEQ ID NO: 255457 - DNA, 25 bp, Homo sapien
aattatttgctgactgcatggttgc

SEQ ID NO: 255458 - DNA, 25 bp, Homo sapien
cctgcgcagaattaaggattaacca

SEQ ID NO: 255459 - DNA, 25 bp, Homo sapien
ggctgttcacttgcagatagaggga

SEQ ID NO: 255460 - DNA, 25 bp, Homo sapien
ttctcacttccgtcacactttatgt

SEQ ID NO: 255461 - DNA, 25 bp, Homo sapien
ggcagacccagtgcatccaggagct

SEQ ID NO: 255462 - DNA, 25 bp, Homo sapien
tggcagacccagtgcatccaggagc

SEQ ID NO: 255463 - DNA, 25 bp, Homo sapien
ctggcagacccagtgcatccaggag

SEQ ID NO: 255464 - DNA, 25 bp, Homo sapien
gcagacccagtgcatccaggagcta

SEQ ID NO: 255465 - DNA, 25 bp, Homo sapien
acaggagagtctcagggaccctcca

SEQ ID NO: 255466 - DNA, 25 bp, Homo sapien
agggaccctccaggctgtaccaagc

SEQ ID NO: 255467 - DNA, 25 bp, Homo sapien
tgaaggtgaatccagaggctgcaca

SEQ ID NO: 255468 - DNA, 25 bp, Homo sapien
gctgcacaggagagtctcagggacc

SEQ ID NO: 255469 - DNA, 25 bp, Homo sapien
actccaccagctgcacctcacactg

SEQ ID NO: 255470 - DNA, 25 bp, Homo sapien
accagctgcacctcacactggacac

SEQ ID NO: 255471 - DNA, 25 bp, Homo sapien
ccagactccaccagctgcacctcac

SEQ ID NO: 255472 - DNA, 25 bp, Homo sapien
ccaccagctgcacctcacactggac

SEQ ID NO: 255473 - DNA, 25 bp, Homo sapien
caaaatagcaacaaggaaaacccag

SEQ ID NO: 255474 - DNA, 25 bp, Homo sapien
tcaaaatagcaacaaggaaaaccca

SEQ ID NO: 255475 - DNA, 25 bp, Homo sapien
aaacccagctcagcccagactccat

SEQ ID NO: 255476 - DNA, 25 bp, Homo sapien
ggaaaacccagctcagcccagactc

SEQ ID NO: 255477 - DNA, 25 bp, Homo sapien
agcgccaggaaagggcttgaggtcc

SEQ ID NO: 255478 - DNA, 25 bp, Homo sapien
ggcttgaggtccggaattttgacca

SEQ ID NO: 255479 - DNA, 25 bp, Homo sapien
tgaggtccggaattttgaccacagg

SEQ ID NO: 255480 - DNA, 25 bp, Homo sapien
cttgaggtccggaattttgaccaca

SEQ ID NO: 255481 - DNA, 25 bp, Homo sapien
cttttgcagaaagcaggaaaagcaa

SEQ ID NO: 255482 - DNA, 25 bp, Homo sapien
gcaaatggaaaaatgaaaacaacga

SEQ ID NO: 255483 - DNA, 25 bp, Homo sapien
agcaaatggaaaaatgaaaacaacg

SEQ ID NO: 255484 - DNA, 25 bp, Homo sapien
ttgcagaaagcaggaaaagcaaatg

SEQ ID NO: 255485 - DNA, 25 bp, Homo sapien
ccccagcgttcctgcagggaggttt

SEQ ID NO: 255486 - DNA, 25 bp, Homo sapien
ctgcctccggggctgactctgatca

SEQ ID NO: 255487 - DNA, 25 bp, Homo sapien
tgcctccggggctgactctgatcag

SEQ ID NO: 255488 - DNA, 25 bp, Homo sapien
cctgccgctgatttccccccagcgt

SEQ ID NO: 255489 - DNA, 25 bp, Homo sapien
ctctcaggctgttcatttgaagata

SEQ ID NO: 255490 - DNA, 25 bp, Homo sapien
caggctgttcatttgaagatacagc

SEQ ID NO: 255491 - DNA, 25 bp, Homo sapien
cgtgtcctcggctctcaggctgttc

SEQ ID NO: 255492 - DNA, 25 bp, Homo sapien
ctcaggctgttcatttgaagataca

SEQ ID NO: 255493 - DNA, 25 bp, Homo sapien
tgcgtagtatgtgctaccaccgcta

SEQ ID NO: 255494 - DNA, 25 bp, Homo sapien
cgtagtatgtgctaccaccgctata

SEQ ID NO: 255495 - DNA, 25 bp, Homo sapien
tctgcgtagtatgtgctaccaccgc

SEQ ID NO: 255496 - DNA, 25 bp, Homo sapien
gtagtatgtgctaccaccgctataa

SEQ ID NO: 255497 - DNA, 25 bp, Homo sapien
tgtagttgctactgacggtgaaccc

SEQ ID NO: 255498 - DNA, 25 bp, Homo sapien
agttgctactgacggtgaacccaga

SEQ ID NO: 255499 - DNA, 25 bp, Homo sapien
ctcatgtagttgctactgacggtga

SEQ ID NO: 255500 - DNA, 25 bp, Homo sapien
tgctactgacggtgaacccagaggc

SEQ ID NO: 255501 - DNA, 25 bp, Homo sapien
actccaccagctgcacctcacactg

SEQ ID NO: 255502 - DNA, 25 bp, Homo sapien
ctccaccagctgcacctcacactgg

SEQ ID NO: 255503 - DNA, 25 bp, Homo sapien
gactccaccagctgcacctcacact

SEQ ID NO: 255504 - DNA, 25 bp, Homo sapien
agactccaccagctgcacctcacac

SEQ ID NO: 255505 - DNA, 25 bp, Homo sapien
ggaaaacccagctcagccaaaactc

SEQ ID NO: 255506 - DNA, 25 bp, Homo sapien
caaggaaaacccagctcagccaaaa

SEQ ID NO: 255507 - DNA, 25 bp, Homo sapien
aacaaggaaaacccagctcagccaa

SEQ ID NO: 255508 - DNA, 25 bp, Homo sapien
aaatagcaacaaggaaaacccagct

SEQ ID NO: 255509 - DNA, 25 bp, Homo sapien
gaatggaaacacctcggaatcccag

SEQ ID NO: 255510 - DNA, 25 bp, Homo sapien
gaaacacctcggaatcccagtgctg

SEQ ID NO: 255511 - DNA, 25 bp, Homo sapien
tgctgatcaccgaatggaaacacct

SEQ ID NO: 255512 - DNA, 25 bp, Homo sapien
tcagtgctgatcaccgaatggaaac

SEQ ID NO: 255513 - DNA, 25 bp, Homo sapien
aaaatacatggctgtgtgcttgtga

SEQ ID NO: 255514 - DNA, 25 bp, Homo sapien
ttgttaaaaatacatggctgtgtgc

SEQ ID NO: 255515 - DNA, 25 bp, Homo sapien
cttttgttaaaaatacatggctgtg

SEQ ID NO: 255516 - DNA, 25 bp, Homo sapien
acatggctgtgtgcttgtgactcac

SEQ ID NO: 255517 - DNA, 25 bp, Homo sapien
ctttttggacatggatctggagatg

SEQ ID NO: 255518 - DNA, 25 bp, Homo sapien
ttttggacatggatctggagatggt

SEQ ID NO: 255519 - DNA, 25 bp, Homo sapien
gagtgggttggaatgtgcactccct

SEQ ID NO: 255520 - DNA, 25 bp, Homo sapien
gggttggaatgtgcactccctcatg

SEQ ID NO: 255521 - DNA, 25 bp, Homo sapien
gagggtctgtgagggcttcaccagg

SEQ ID NO: 255522 - DNA, 25 bp, Homo sapien
agagggtctgtgagggcttcaccag

SEQ ID NO: 255523 - DNA, 25 bp, Homo sapien
tatcctactatatatctactactca

SEQ ID NO: 255524 - DNA, 25 bp, Homo sapien
aaaacccagctcagcccaagctcca

SEQ ID NO: 255525 - DNA, 25 bp, Homo sapien
ttaaaacagcaacagtgaaaaccca

SEQ ID NO: 255526 - DNA, 25 bp, Homo sapien
cagcaacagtgaaaacccagctcag

SEQ ID NO: 255527 - DNA, 25 bp, Homo sapien
aaacccagctcagcccaagctccat

SEQ ID NO: 255528 - DNA, 25 bp, Homo sapien
tcgcacagtaatacacggccgtgtc

SEQ ID NO: 255529 - DNA, 25 bp, Homo sapien
ctcgcacagtaatacacggccgtgt

SEQ ID NO: 255530 - DNA, 25 bp, Homo sapien
gagctcagcttcaggtagaactggt

SEQ ID NO: 255531 - DNA, 25 bp, Homo sapien
cttcaggtagaactggttcttggac

SEQ ID NO: 255532 - DNA, 25 bp, Homo sapien
caggtagaactggttcttggacgtg

SEQ ID NO: 255533 - DNA, 25 bp, Homo sapien
cagcttcaggtagaactggttcttg

SEQ ID NO: 255534 - DNA, 25 bp, Homo sapien
tgattcgactcttgagggacgggtt

SEQ ID NO: 255535 - DNA, 25 bp, Homo sapien
ctacggacatggtgattcgactctt

SEQ ID NO: 255536 - DNA, 25 bp, Homo sapien
ggacatggtgattcgactcttgagg

SEQ ID NO: 255537 - DNA, 25 bp, Homo sapien
attcgactcttgagggacgggttgt

SEQ ID NO: 255538 - DNA, 25 bp, Homo sapien
gctcccactatgatggatttcccca

SEQ ID NO: 255539 - DNA, 25 bp, Homo sapien
tatgatggatttccccaatccactc

SEQ ID NO: 255540 - DNA, 25 bp, Homo sapien
ggtgctcccactatgatggatttcc

SEQ ID NO: 255541 - DNA, 25 bp, Homo sapien
ggatttccccaatccactccagccc

SEQ ID NO: 255542 - DNA, 25 bp, Homo sapien
ggggctggcggacccagattcacca

SEQ ID NO: 255543 - DNA, 25 bp, Homo sapien
ctgggggctggcggacccagattca

SEQ ID NO: 255544 - DNA, 25 bp, Homo sapien
ggctggcggacccagattcaccagt

SEQ ID NO: 255545 - DNA, 25 bp, Homo sapien
tgggggctggcggacccagattcac

SEQ ID NO: 255546 - DNA, 25 bp, Homo sapien
agtcctgggcccgactcctgcagct

SEQ ID NO: 255547 - DNA, 25 bp, Homo sapien
tgagggacagggtctccgaaggctt

SEQ ID NO: 255548 - DNA, 25 bp, Homo sapien
tctccgaaggcttcaccagtcctgg

SEQ ID NO: 255549 - DNA, 25 bp, Homo sapien
cagggtctccgaaggcttcaccagt

SEQ ID NO: 255550 - DNA, 25 bp, Homo sapien
ctgtgaacagagagaaccacggtga

SEQ ID NO: 255551 - DNA, 25 bp, Homo sapien
tgaacagagagaaccacggtgagcc

SEQ ID NO: 255552 - DNA, 25 bp, Homo sapien
gtgaacagagagaaccacggtgagc

SEQ ID NO: 255553 - DNA, 25 bp, Homo sapien
tgtgaacagagagaaccacggtgag

SEQ ID NO: 255554 - DNA, 25 bp, Homo sapien
aggaggaagaaccacaggtgtttca

SEQ ID NO: 255555 - DNA, 25 bp, Homo sapien
gcaggaggaagaaccacaggtgttt

SEQ ID NO: 255556 - DNA, 25 bp, Homo sapien
accagcaggaggaagaaccacaggt

SEQ ID NO: 255557 - DNA, 25 bp, Homo sapien
cagcaggaggaagaaccacaggtgt

SEQ ID NO: 255558 - DNA, 25 bp, Homo sapien
gttcttgtgcaggaggcccatgagt

SEQ ID NO: 255559 - DNA, 25 bp, Homo sapien
cttccaggtagggaaatgtgctgaa

SEQ ID NO: 255560 - DNA, 25 bp, Homo sapien
aactctcgggatgtgggtttccaca

SEQ ID NO: 255561 - DNA, 25 bp, Homo sapien
actctcgggatgtgggtttccacac

SEQ ID NO: 255562 - DNA, 25 bp, Homo sapien
ggcagctagtctgcagatccgccgt

SEQ ID NO: 255563 - DNA, 25 bp, Homo sapien
ctagtctgcagatccgccgtgctga

SEQ ID NO: 255564 - DNA, 25 bp, Homo sapien
gcagatccgccgtgctgacagaggt

SEQ ID NO: 255565 - DNA, 25 bp, Homo sapien
tgcagatccgccgtgctgacagagg

SEQ ID NO: 255566 - DNA, 25 bp, Homo sapien
catacattgggttcaccagggtagg

SEQ ID NO: 255567 - DNA, 25 bp, Homo sapien
tatccaattcataccataggtgatg

SEQ ID NO: 255568 - DNA, 25 bp, Homo sapien
gggtctgtcgtatccaattcatacc

SEQ ID NO: 255569 - DNA, 25 bp, Homo sapien
ctgtgggcatacattgggttcacca

SEQ ID NO: 255570 - DNA, 25 bp, Homo sapien
cttcgccgaggccccaggctgcttc

SEQ ID NO: 255571 - DNA, 25 bp, Homo sapien
tcgccgaggccccaggctgcttcac

SEQ ID NO: 255572 - DNA, 25 bp, Homo sapien
ttcgccgaggccccaggctgcttca

SEQ ID NO: 255573 - DNA, 25 bp, Homo sapien
agactgcaccagctgcactcgggag

SEQ ID NO: 255574 - DNA, 25 bp, Homo sapien
gcaccagctgcactcgggagtgggc

SEQ ID NO: 255575 - DNA, 25 bp, Homo sapien
accagctgcactcgggagtgggcac

SEQ ID NO: 255576 - DNA, 25 bp, Homo sapien
actgcaccagctgcactcgggagtg

SEQ ID NO: 255577 - DNA, 25 bp, Homo sapien
gctgctgccaccaagaagaggatgc

SEQ ID NO: 255578 - DNA, 25 bp, Homo sapien
agaagaggatgctccaggtccagtc

SEQ ID NO: 255579 - DNA, 25 bp, Homo sapien
caccaagaagaggatgctccaggtc

SEQ ID NO: 255580 - DNA, 25 bp, Homo sapien
tgccaccaagaagaggatgctccag

SEQ ID NO: 255581 - DNA, 25 bp, Homo sapien
ttttctgcctctgactccatcaata

SEQ ID NO: 255582 - DNA, 25 bp, Homo sapien
attttctgcctctgactccatcaat

SEQ ID NO: 255583 - DNA, 25 bp, Homo sapien
cactgggctgtacaattttctgcct

SEQ ID NO: 255584 - DNA, 25 bp, Homo sapien
actgggctgtacaattttctgcctc

SEQ ID NO: 255585 - DNA, 25 bp, Homo sapien
cacggccgtgtcctcggatctcagg

SEQ ID NO: 255586 - DNA, 25 bp, Homo sapien
cgtgtcctcggatctcaggctgctc

SEQ ID NO: 255587 - DNA, 25 bp, Homo sapien
taatacacggccgtgtcctcggatc

SEQ ID NO: 255588 - DNA, 25 bp, Homo sapien
gccgtgtcctcggatctcaggctgc

SEQ ID NO: 255589 - DNA, 25 bp, Homo sapien
cactcaaggcgttgtccacgagcct

SEQ ID NO: 255590 - DNA, 25 bp, Homo sapien
tgtgttaccactgccaacgacgatc

SEQ ID NO: 255591 - DNA, 25 bp, Homo sapien
gacgatccatcctatccactcaagg

SEQ ID NO: 255592 - DNA, 25 bp, Homo sapien
cctgtcgcacccactgcatagcaga

SEQ ID NO: 255593 - DNA, 25 bp, Homo sapien
ctgtggagagaacacaggagtggat

SEQ ID NO: 255594 - DNA, 25 bp, Homo sapien
gtggagagaacacaggagtggatga

SEQ ID NO: 255595 - DNA, 25 bp, Homo sapien
agagaacacaggagtggatgaaagc

SEQ ID NO: 255596 - DNA, 25 bp, Homo sapien
ggagagaacacaggagtggatgaaa

SEQ ID NO: 255597 - DNA, 25 bp, Homo sapien
catcactgggacttggcatctcctt

SEQ ID NO: 255598 - DNA, 25 bp, Homo sapien
tcactgggacttggcatctccttgc

SEQ ID NO: 255599 - DNA, 25 bp, Homo sapien
gactggactcaatcccctcctcatc

SEQ ID NO: 255600 - DNA, 25 bp, Homo sapien
ctcatcactgggacttggcatctcc

SEQ ID NO: 255601 - DNA, 25 bp, Homo sapien
catagtgaggaactgtgccgtcagg

SEQ ID NO: 255602 - DNA, 25 bp, Homo sapien
caaatccagtccatagtgaggaact

SEQ ID NO: 255603 - DNA, 25 bp, Homo sapien
accctccaaatccagtccatagtga

SEQ ID NO: 255604 - DNA, 25 bp, Homo sapien
cagtccatagtgaggaactgtgccg

SEQ ID NO: 255605 - DNA, 25 bp, Homo sapien
ggaaagtttctccaatcctgggctg

SEQ ID NO: 255606 - DNA, 25 bp, Homo sapien
tagataagacctttcccagagaagc

SEQ ID NO: 255607 - DNA, 25 bp, Homo sapien
taaaggagttattcaacgctgggcc

SEQ ID NO: 255608 - DNA, 25 bp, Homo sapien
cagtaggtgtactcaggcacccaag

SEQ ID NO: 255609 - DNA, 25 bp, Homo sapien
ctccctgcacggaggtttttgtctg

SEQ ID NO: 255610 - DNA, 25 bp, Homo sapien
gcacctgcgccggtcccctccgcct

SEQ ID NO: 255611 - DNA, 25 bp, Homo sapien
ccgcctccctgcacggaggtttttg

SEQ ID NO: 255612 - DNA, 25 bp, Homo sapien
tgagcagcacctgcgccggtcccct

SEQ ID NO: 255613 - DNA, 25 bp, Homo sapien
tacacggccgtgtccgcagcggtca

SEQ ID NO: 255614 - DNA, 25 bp, Homo sapien
cagtaatacacggccgtgtccgcag

SEQ ID NO: 255615 - DNA, 25 bp, Homo sapien
taatacacggccgtgtccgcagcgg

SEQ ID NO: 255616 - DNA, 25 bp, Homo sapien
ctcgcacagtaatacacggccgtgt

SEQ ID NO: 255617 - DNA, 25 bp, Homo sapien
cttggacgtgtctactgatatggtg

SEQ ID NO: 255618 - DNA, 25 bp, Homo sapien
tatggtgactcgactcttgagggag

SEQ ID NO: 255619 - DNA, 25 bp, Homo sapien
gtagttggtgctcccactgtaatag

SEQ ID NO: 255620 - DNA, 25 bp, Homo sapien
agaactggttcttggacgtgtctac

SEQ ID NO: 255621 - DNA, 25 bp, Homo sapien
agtcctgggcccgactcctgcagct

SEQ ID NO: 255622 - DNA, 25 bp, Homo sapien
tctccgaaggcttcaccagtcctgg

SEQ ID NO: 255623 - DNA, 25 bp, Homo sapien
tgagggacagggtctccgaaggctt

SEQ ID NO: 255624 - DNA, 25 bp, Homo sapien
cagggtctccgaaggcttcaccagt

SEQ ID NO: 255625 - DNA, 25 bp, Homo sapien
ctgtgaacagagagacccacagtga

SEQ ID NO: 255626 - DNA, 25 bp, Homo sapien
tgtgaacagagagacccacagtgag

SEQ ID NO: 255627 - DNA, 25 bp, Homo sapien
gtgaacagagagacccacagtgagc

SEQ ID NO: 255628 - DNA, 25 bp, Homo sapien
tgaacagagagacccacagtgagcc

SEQ ID NO: 255629 - DNA, 25 bp, Homo sapien
gccaccaggagaaggaagaaccaca

SEQ ID NO: 255630 - DNA, 25 bp, Homo sapien
ggagaaggaagaaccacagatgttt

SEQ ID NO: 255631 - DNA, 25 bp, Homo sapien
ccaggagaaggaagaaccacagatg

SEQ ID NO: 255632 - DNA, 25 bp, Homo sapien
agaaggaagaaccacagatgtttca

SEQ ID NO: 255633 - DNA, 25 bp, Homo sapien
gtccaggactctcagaaagtatttc

SEQ ID NO: 255634 - DNA, 25 bp, Homo sapien
ggaggtccaggactctcagaaagta

SEQ ID NO: 255635 - DNA, 25 bp, Homo sapien
gaggtccaggactctcagaaagtat

SEQ ID NO: 255636 - DNA, 25 bp, Homo sapien
gttcttgcacaggaggtccaggact

SEQ ID NO: 255637 - DNA, 25 bp, Homo sapien
tccaatgtttattgtagttcagaac

SEQ ID NO: 255638 - DNA, 25 bp, Homo sapien
cagacacattgaaacagcagctgaa

SEQ ID NO: 255639 - DNA, 25 bp, Homo sapien
tgacagtgacttcaaacaatcctgg

SEQ ID NO: 255640 - DNA, 25 bp, Homo sapien
atcctggatccatccaatgtttatt

SEQ ID NO: 255641 - DNA, 25 bp, Homo sapien
acaggagagtctcagagacccctcc

SEQ ID NO: 255642 - DNA, 25 bp, Homo sapien
gagacccctccagtctttactaagc

SEQ ID NO: 255643 - DNA, 25 bp, Homo sapien
aacaaggaaaatccagctcagccca

SEQ ID NO: 255644 - DNA, 25 bp, Homo sapien
acaaggaaaatccagctcagcccag

SEQ ID NO: 255645 - DNA, 25 bp, Homo sapien
aactgcaacaaggaaaatccagctc

SEQ ID NO: 255646 - DNA, 25 bp, Homo sapien
ttaaaactgcaacaaggaaaatcca

SEQ ID NO: 255647 - DNA, 25 bp, Homo sapien
gggacaccaacagagattgtgagag

SEQ ID NO: 255648 - DNA, 25 bp, Homo sapien
ggaatcagagccttaatctgcaggt

SEQ ID NO: 255649 - DNA, 25 bp, Homo sapien
ctggaagatggggacaccaacagag

SEQ ID NO: 255650 - DNA, 25 bp, Homo sapien
agagccttaatctgcaggtcatggc

SEQ ID NO: 255651 - DNA, 25 bp, Homo sapien
gtctgcgagggctccaccaggccaa

SEQ ID NO: 255652 - DNA, 25 bp, Homo sapien
ttgctcccttcatgacgtgtgcgcc

SEQ ID NO: 255653 - DNA, 25 bp, Homo sapien
gagatggtgactggattcataagga

SEQ ID NO: 255654 - DNA, 25 bp, Homo sapien
tgtggactcgtggatccagctccag

SEQ ID NO: 255655 - DNA, 25 bp, Homo sapien
aatgttgaagattagtgtgctggca

SEQ ID NO: 255656 - DNA, 25 bp, Homo sapien
tgagaataaagagctcactggtgtt

SEQ ID NO: 255657 - DNA, 25 bp, Homo sapien
ttccacggttagagtcccacaaaca

SEQ ID NO: 255658 - DNA, 25 bp, Homo sapien
aattggccaacagggacatgacaag

SEQ ID NO: 255659 - DNA, 25 bp, Homo sapien
gtcccctccgcgtccatgcagggag

SEQ ID NO: 255660 - DNA, 25 bp, Homo sapien
tcccctccgcgtccatgcagggagg

SEQ ID NO: 255661 - DNA, 25 bp, Homo sapien
agcacctgcgccggtcccctccgcg

SEQ ID NO: 255662 - DNA, 25 bp, Homo sapien
cacctgcgccggtcccctccgcgtc

SEQ ID NO: 255663 - DNA, 25 bp, Homo sapien
tacacggccgtgtccgcagcggtca

SEQ ID NO: 255664 - DNA, 25 bp, Homo sapien
taatacacggccgtgtccgcagcgg

SEQ ID NO: 255665 - DNA, 25 bp, Homo sapien
cggccgtgtccgcagcggtcacaga

SEQ ID NO: 255666 - DNA, 25 bp, Homo sapien
acggccgtgtccgcagcggtcacag

SEQ ID NO: 255667 - DNA, 25 bp, Homo sapien
ctgccggatccagctccagtagtaa

SEQ ID NO: 255668 - DNA, 25 bp, Homo sapien
tagatatacccaatccactccagtc

SEQ ID NO: 255669 - DNA, 25 bp, Homo sapien
gaactggttcttggacgtgtctact

SEQ ID NO: 255670 - DNA, 25 bp, Homo sapien
tggtgctcccactgtaatagatata

SEQ ID NO: 255671 - DNA, 25 bp, Homo sapien
agtcctgggcccgactcctgcagct

SEQ ID NO: 255672 - DNA, 25 bp, Homo sapien
tgagggacagggtctccgaaggctt

SEQ ID NO: 255673 - DNA, 25 bp, Homo sapien
tctccgaaggcttcaccagtcctgg

SEQ ID NO: 255674 - DNA, 25 bp, Homo sapien
cagggtctccgaaggcttcaccagt

SEQ ID NO: 255675 - DNA, 25 bp, Homo sapien
ctgtgaacagagagacccacagtga

SEQ ID NO: 255676 - DNA, 25 bp, Homo sapien
tgtgaacagagagacccacagtgag

SEQ ID NO: 255677 - DNA, 25 bp, Homo sapien
gtgaacagagagacccacagtgagc

SEQ ID NO: 255678 - DNA, 25 bp, Homo sapien
tgaacagagagacccacagtgagcc

SEQ ID NO: 255679 - DNA, 25 bp, Homo sapien
aggaggaagaaccacaggtgtttca

SEQ ID NO: 255680 - DNA, 25 bp, Homo sapien
atctgggagctgccaccaggaggag

SEQ ID NO: 255681 - DNA, 25 bp, Homo sapien
tctgggagctgccaccaggaggagg

SEQ ID NO: 255682 - DNA, 25 bp, Homo sapien
caggaggaggaagaaccacaggtgt

SEQ ID NO: 255683 - DNA, 25 bp, Homo sapien
ctcagaaagtatttcccatgtgagc

SEQ ID NO: 255684 - DNA, 25 bp, Homo sapien
gaaagtatttcccatgtgagctgga

SEQ ID NO: 255685 - DNA, 25 bp, Homo sapien
aagtatttcccatgtgagctggaac

SEQ ID NO: 255686 - DNA, 25 bp, Homo sapien
gttcttgcacaggaggtccaggact

SEQ ID NO: 255687 - DNA, 25 bp, Homo sapien
agtacacaactgtgccctcggctct

SEQ ID NO: 255688 - DNA, 25 bp, Homo sapien
tagtacacaactgtgccctcggctc

SEQ ID NO: 255689 - DNA, 25 bp, Homo sapien
gtagtacacaactgtgccctcggct

SEQ ID NO: 255690 - DNA, 25 bp, Homo sapien
caccacttgtactaataactgagac

SEQ ID NO: 255691 - DNA, 25 bp, Homo sapien
ctgtgtagagtacggtatcaccact

SEQ ID NO: 255692 - DNA, 25 bp, Homo sapien
tcaccacttgtactaataactgaga

SEQ ID NO: 255693 - DNA, 25 bp, Homo sapien
tagagtacggtatcaccacttgtac

SEQ ID NO: 255694 - DNA, 25 bp, Homo sapien
gctgcacaggagagtctcagggacc

SEQ ID NO: 255695 - DNA, 25 bp, Homo sapien
tagcagagctactgaaggtgaatcc

SEQ ID NO: 255696 - DNA, 25 bp, Homo sapien
caggctggaccaagccttccccaga

SEQ ID NO: 255697 - DNA, 25 bp, Homo sapien
acccagtgcatagcagagctactga

SEQ ID NO: 255698 - DNA, 25 bp, Homo sapien
acaaggaaaacccagctcagcccaa

SEQ ID NO: 255699 - DNA, 25 bp, Homo sapien
aaatagcaacaaggaaaacccagct

SEQ ID NO: 255700 - DNA, 25 bp, Homo sapien
gaaaacccagctcagcccaaactcc

SEQ ID NO: 255701 - DNA, 25 bp, Homo sapien
aggaaaacccagctcagcccaaact

SEQ ID NO: 255702 - DNA, 25 bp, Homo sapien
tggaaacaccgccgacttccagtgc

SEQ ID NO: 255703 - DNA, 25 bp, Homo sapien
gaatggaaacaccgccgacttccag

SEQ ID NO: 255704 - DNA, 25 bp, Homo sapien
aatggaaacaccgccgacttccagt

SEQ ID NO: 255705 - DNA, 25 bp, Homo sapien
gaaacaccgccgacttccagtgctg

SEQ ID NO: 255706 - DNA, 25 bp, Homo sapien
ctttggtgtcctgattttcccccat

SEQ ID NO: 255707 - DNA, 25 bp, Homo sapien
ccctgctgtaccaagcaccctttgg

SEQ ID NO: 255708 - DNA, 25 bp, Homo sapien
gtcctgagccccctgctgtaccaag

SEQ ID NO: 255709 - DNA, 25 bp, Homo sapien
tgagccccctgctgtaccaagcacc

SEQ ID NO: 255710 - DNA, 25 bp, Homo sapien
tgctcccttcatcatctatggaccc

SEQ ID NO: 255711 - DNA, 25 bp, Homo sapien
tcccttcatcatctatggacccaat

SEQ ID NO: 255712 - DNA, 25 bp, Homo sapien
gagtaatgtgtgctcccttcatcat

SEQ ID NO: 255713 - DNA, 25 bp, Homo sapien
aactgtttttggacatggatctggg

SEQ ID NO: 255714 - DNA, 25 bp, Homo sapien
acttggaaccttatgtacagccatg

SEQ ID NO: 255715 - DNA, 25 bp, Homo sapien
ctcagactgttcgtttggagatacg

SEQ ID NO: 255716 - DNA, 25 bp, Homo sapien
gagatacggtgagttcttagcattg

SEQ ID NO: 255717 - DNA, 25 bp, Homo sapien
tgtacagccatgcatggtcatgtcc

SEQ ID NO: 255718 - DNA, 25 bp, Homo sapien
agagtctcaggaacttcccaagttg

SEQ ID NO: 255719 - DNA, 25 bp, Homo sapien
agtctcaggaacttcccaagttgtc

SEQ ID NO: 255720 - DNA, 25 bp, Homo sapien
gagtctcaggaacttcccaagttgt

SEQ ID NO: 255721 - DNA, 25 bp, Homo sapien
aaattctggttagctcaaaccccat

SEQ ID NO: 255722 - DNA, 25 bp, Homo sapien
ctgaataaaatagtcggttagggat

SEQ ID NO: 255723 - DNA, 25 bp, Homo sapien
catgccatagtgtaaagaactggtc

SEQ ID NO: 255724 - DNA, 25 bp, Homo sapien
tacatggcacagcttaaagaactgg

SEQ ID NO: 255725 - DNA, 25 bp, Homo sapien
tagagaaaatccactaagtctcacc

SEQ ID NO: 255726 - DNA, 25 bp, Homo sapien
aagaaagtcccaccagactctcctg

SEQ ID NO: 255727 - DNA, 25 bp, Homo sapien
gagggtcctgagtgacgaagagtga

SEQ ID NO: 255728 - DNA, 25 bp, Homo sapien
cctgagtgacgaagagtgaagaaag

SEQ ID NO: 255729 - DNA, 25 bp, Homo sapien
gacgaagagtgaagaaagtcccacc

SEQ ID NO: 255730 - DNA, 25 bp, Homo sapien
gaggtctggaattttgaccacagca

SEQ ID NO: 255731 - DNA, 25 bp, Homo sapien
agcgccaagaaaagggcttgaggtc

SEQ ID NO: 255732 - DNA, 25 bp, Homo sapien
ctgagcgccaagaaaagggcttgag

SEQ ID NO: 255733 - DNA, 25 bp, Homo sapien
gaattttgaccacagcaaaaacatc

SEQ ID NO: 255734 - DNA, 25 bp, Homo sapien
tttcggaaagcaggaaaagcaaatg

SEQ ID NO: 255735 - DNA, 25 bp, Homo sapien
aagcaaatggaaaaatgagaacaac

SEQ ID NO: 255736 - DNA, 25 bp, Homo sapien
aaaagcaaatggaaaaatgagaaca

SEQ ID NO: 255737 - DNA, 25 bp, Homo sapien
gcaaatggaaaaatgagaacaacat

SEQ ID NO: 255738 - DNA, 25 bp, Homo sapien
cctctgtgaggatcaatctgcattt

SEQ ID NO: 255739 - DNA, 25 bp, Homo sapien
gaccatggttgagaacttttcatct

SEQ ID NO: 255740 - DNA, 25 bp, Homo sapien
ggtgaccatggttgagaacttttca

SEQ ID NO: 255741 - DNA, 25 bp, Homo sapien
agtggtgaccatggttgagaacttt

SEQ ID NO: 255742 - DNA, 25 bp, Homo sapien
tctctggagatggtgaatctgccct

SEQ ID NO: 255743 - DNA, 25 bp, Homo sapien
atacagcgtgttcttggaattgtct

SEQ ID NO: 255744 - DNA, 25 bp, Homo sapien
tacagcgtgttcttggaattgtctc

SEQ ID NO: 255745 - DNA, 25 bp, Homo sapien
agcgtgttcttggaattgtctctgg

SEQ ID NO: 255746 - DNA, 25 bp, Homo sapien
gcataatatgtgctacccccattac

SEQ ID NO: 255747 - DNA, 25 bp, Homo sapien
ctactaatagctgaaacatattcca

SEQ ID NO: 255748 - DNA, 25 bp, Homo sapien
aatagctgaaacatattccagtccc

SEQ ID NO: 255749 - DNA, 25 bp, Homo sapien
gtgctacccccattactactaatag

SEQ ID NO: 255750 - DNA, 25 bp, Homo sapien
gtgcatagcatagctactgaaggtg

SEQ ID NO: 255751 - DNA, 25 bp, Homo sapien
caggctggaccaagccttccccaga

SEQ ID NO: 255752 - DNA, 25 bp, Homo sapien
ccagtgcatagcatagctactgaag

SEQ ID NO: 255753 - DNA, 25 bp, Homo sapien
gctgcacaggagagtctcagggacc

SEQ ID NO: 255754 - DNA, 25 bp, Homo sapien
caaacacagagacaccaaggtcaga

SEQ ID NO: 255755 - DNA, 25 bp, Homo sapien
gcaaacacagagacaccaaggtcag

SEQ ID NO: 255756 - DNA, 25 bp, Homo sapien
ctgcaaacacagagacaccaaggtc

SEQ ID NO: 255757 - DNA, 25 bp, Homo sapien
aacacagagacaccaaggtcagaaa

SEQ ID NO: 255758 - DNA, 25 bp, Homo sapien
gcccaaactccatcatgactcttct

SEQ ID NO: 255759 - DNA, 25 bp, Homo sapien
agcccaaactccatcatgactcttc

SEQ ID NO: 255760 - DNA, 25 bp, Homo sapien
cactagcaacttcaaacttttttgg

SEQ ID NO: 255761 - DNA, 25 bp, Homo sapien
caagttgaactactggcatgagtgt

SEQ ID NO: 255762 - DNA, 25 bp, Homo sapien
aatggatcactagcaacttcaaact

SEQ ID NO: 255763 - DNA, 25 bp, Homo sapien
gccctttgcaagttgaactactggc

SEQ ID NO: 255764 - DNA, 25 bp, Homo sapien
ctcacagagcatattctcccaatgt

SEQ ID NO: 255765 - DNA, 25 bp, Homo sapien
ggaaccgtggtgtctgagcgacccc

SEQ ID NO: 255766 - DNA, 25 bp, Homo sapien
cctggtttaactgagttctctctgg

SEQ ID NO: 255767 - DNA, 25 bp, Homo sapien
tctgctgttctgagcgcccactggt

SEQ ID NO: 255768 - DNA, 25 bp, Homo sapien
tgagcgccccctggtttaactgagt

SEQ ID NO: 255769 - DNA, 25 bp, Homo sapien
ggtttgtgtctgggctcacactgac

SEQ ID NO: 255770 - DNA, 25 bp, Homo sapien
gacgcggcgtattctgttgttccac

SEQ ID NO: 255771 - DNA, 25 bp, Homo sapien
tctgttgttccacgattagttttgt

SEQ ID NO: 255772 - DNA, 25 bp, Homo sapien
gcgtattctgttgttccacgattag

SEQ ID NO: 255773 - DNA, 25 bp, Homo sapien
acagacgcggcgtattctgttgttc

SEQ ID NO: 255774 - DNA, 25 bp, Homo sapien
ctgcatgcagtagttaacggaaggt

SEQ ID NO: 255775 - DNA, 25 bp, Homo sapien
catgcagtagttaacggaaggtgaa

SEQ ID NO: 255776 - DNA, 25 bp, Homo sapien
gtagttaacggaaggtgaatccaga

SEQ ID NO: 255777 - DNA, 25 bp, Homo sapien
cagtagttaacggaaggtgaatcca

SEQ ID NO: 255778 - DNA, 25 bp, Homo sapien
tgcacaggagagtctcagggacccc

SEQ ID NO: 255779 - DNA, 25 bp, Homo sapien
ctgcacaggagagtctcagggaccc

SEQ ID NO: 255780 - DNA, 25 bp, Homo sapien
ctcagggaccccccaggctgtacca

SEQ ID NO: 255781 - DNA, 25 bp, Homo sapien
gaccccccaggctgtaccaagcctc

SEQ ID NO: 255782 - DNA, 25 bp, Homo sapien
gaaaaaccggctcagcccagacttc

SEQ ID NO: 255783 - DNA, 25 bp, Homo sapien
gcaacaaggaaaaaccggctcagcc

SEQ ID NO: 255784 - DNA, 25 bp, Homo sapien
tagcaacaaggaaaaaccggctcag

SEQ ID NO: 255785 - DNA, 25 bp, Homo sapien
aaaaccggctcagcccagacttcat

SEQ ID NO: 255786 - DNA, 25 bp, Homo sapien
atggttggtagtcggtgttcagtgc

SEQ ID NO: 255787 - DNA, 25 bp, Homo sapien
ttggtagtcggtgttcagtgctgat

SEQ ID NO: 255788 - DNA, 25 bp, Homo sapien
tgctgatcaccaagtggaaacacct

SEQ ID NO: 255789 - DNA, 25 bp, Homo sapien
caagtggaaacacctgggcatccca

SEQ ID NO: 255790 - DNA, 25 bp, Homo sapien
aattcatggttgtgtacttgttgct

SEQ ID NO: 255791 - DNA, 25 bp, Homo sapien
cagtcccttccttgcggggggtgat

SEQ ID NO: 255792 - DNA, 25 bp, Homo sapien
gattcgctccagtcccttccttgcg

SEQ ID NO: 255793 - DNA, 25 bp, Homo sapien
ttttggatgtggatctggagatagt

SEQ ID NO: 255794 - DNA, 25 bp, Homo sapien
ctgcctccggggctgactctgatca

SEQ ID NO: 255795 - DNA, 25 bp, Homo sapien
tgcctccggggctgactctgatcag

SEQ ID NO: 255796 - DNA, 25 bp, Homo sapien
tcgcacagtaatacacagccgtgtc

SEQ ID NO: 255797 - DNA, 25 bp, Homo sapien
tctcgcacagtaatacacagccgtg

SEQ ID NO: 255798 - DNA, 25 bp, Homo sapien
gcacagtaatacacagccgtgtcct

SEQ ID NO: 255799 - DNA, 25 bp, Homo sapien
tgtgtctctcgcacagtaatacaca

SEQ ID NO: 255800 - DNA, 25 bp, Homo sapien
gcgtagtatgtgctaccacagctat

SEQ ID NO: 255801 - DNA, 25 bp, Homo sapien
gtagtatgtgctaccacagctataa

SEQ ID NO: 255802 - DNA, 25 bp, Homo sapien
cgtagtatgtgctaccacagctata

SEQ ID NO: 255803 - DNA, 25 bp, Homo sapien
tgtagttgctactgacggtgaaccc

SEQ ID NO: 255804 - DNA, 25 bp, Homo sapien
agttgctactgacggtgaacccaga

SEQ ID NO: 255805 - DNA, 25 bp, Homo sapien
ctcatgtagttgctactgacggtga

SEQ ID NO: 255806 - DNA, 25 bp, Homo sapien
tgctactgacggtgaacccagaggc

SEQ ID NO: 255807 - DNA, 25 bp, Homo sapien
tgcaaacacagagacattggttaga

SEQ ID NO: 255808 - DNA, 25 bp, Homo sapien
caaacacagagacattggttagaaa

SEQ ID NO: 255809 - DNA, 25 bp, Homo sapien
ctgcaaacacagagacattggttag

SEQ ID NO: 255810 - DNA, 25 bp, Homo sapien
gcaaacacagagacattggttagaa

SEQ ID NO: 255811 - DNA, 25 bp, Homo sapien
tcactcacactcaatatctctagtt

SEQ ID NO: 255812 - DNA, 25 bp, Homo sapien
ttcactcacactcaatatctctagt

SEQ ID NO: 255813 - DNA, 25 bp, Homo sapien
aaatagcaacaaggaaaacccagct

SEQ ID NO: 255814 - DNA, 25 bp, Homo sapien
aaacccagctcagcccaaactccat

SEQ ID NO: 255815 - DNA, 25 bp, Homo sapien
ggaaaacccagctcagcccaaactc

SEQ ID NO: 255816 - DNA, 25 bp, Homo sapien
aggaaaacccagctcagcccaaact

SEQ ID NO: 255817 - DNA, 25 bp, Homo sapien
ggaaacacctcggaatcccagtgct

SEQ ID NO: 255818 - DNA, 25 bp, Homo sapien
gaatggaaacacctcggaatcccag

SEQ ID NO: 255819 - DNA, 25 bp, Homo sapien
gaaacacctcggaatcccagtgctg

SEQ ID NO: 255820 - DNA, 25 bp, Homo sapien
atggaaacacctcggaatcccagtg

SEQ ID NO: 255821 - DNA, 25 bp, Homo sapien
aacttctctgcgtagcttatgctgc

SEQ ID NO: 255822 - DNA, 25 bp, Homo sapien
ctgcgtagcttatgctgccatcact

SEQ ID NO: 255823 - DNA, 25 bp, Homo sapien
tctctgcgtagcttatgctgccatc

SEQ ID NO: 255824 - DNA, 25 bp, Homo sapien
catcactagggcacatccttcccat

SEQ ID NO: 255825 - DNA, 25 bp, Homo sapien
taggtgtatccacaagtcttgcagg

SEQ ID NO: 255826 - DNA, 25 bp, Homo sapien
aggagactttcactgatgccccagc

SEQ ID NO: 255827 - DNA, 25 bp, Homo sapien
aactggtgaaggtaggtgtatccac

SEQ ID NO: 255828 - DNA, 25 bp, Homo sapien
cagccttcttcatctcatccccaga

SEQ ID NO: 255829 - DNA, 25 bp, Homo sapien
tgcagctacgaccaccaaaattagg

SEQ ID NO: 255830 - DNA, 25 bp, Homo sapien
ctgcagctacgaccaccaaaattag

SEQ ID NO: 255831 - DNA, 25 bp, Homo sapien
caaacccctaggctaatgcagatgc

SEQ ID NO: 255832 - DNA, 25 bp, Homo sapien
caccaggcggtgtgacagtgtcaga

SEQ ID NO: 255833 - DNA, 25 bp, Homo sapien
gatggtgagactaaaaatgcagcgc

SEQ ID NO: 255834 - DNA, 25 bp, Homo sapien
cagtccagtactgaaggcaccaggc

SEQ ID NO: 255835 - DNA, 25 bp, Homo sapien
caaagccaccagagaatgtactgca

SEQ ID NO: 255836 - DNA, 25 bp, Homo sapien
accaccatgggcgagtgacctcaat

SEQ ID NO: 255837 - DNA, 25 bp, Homo sapien
ccactcttgaggaaacatctcccac

SEQ ID NO: 255838 - DNA, 25 bp, Homo sapien
tctcccacattataaaccagataca

SEQ ID NO: 255839 - DNA, 25 bp, Homo sapien
cacttcttggagactgcattgggcc

SEQ ID NO: 255840 - DNA, 25 bp, Homo sapien
cattgggccatgcatgtaagattct

SEQ ID NO: 255841 - DNA, 25 bp, Homo sapien
tgtccactgaagctatctggttgct

SEQ ID NO: 255842 - DNA, 25 bp, Homo sapien
agtgtttgccaccagatctcccatg

SEQ ID NO: 255843 - DNA, 25 bp, Homo sapien
tcacacctaggcatgactgctgtag

SEQ ID NO: 255844 - DNA, 25 bp, Homo sapien
gggactggcagatccacgtccaata

SEQ ID NO: 255845 - DNA, 25 bp, Homo sapien
ctgtagctgctcctgaataggacat

SEQ ID NO: 255846 - DNA, 25 bp, Homo sapien
caatattaagcattggttgtgatga

SEQ ID NO: 255847 - DNA, 25 bp, Homo sapien
agatcgcccatttgcagatatagca

SEQ ID NO: 255848 - DNA, 25 bp, Homo sapien
tattcttgacattgtctctggagac

SEQ ID NO: 255849 - DNA, 25 bp, Homo sapien
gatgtgttcttggtttacagatcgc

SEQ ID NO: 255850 - DNA, 25 bp, Homo sapien
cctcttgcacagtgatatactgatg

SEQ ID NO: 255851 - DNA, 25 bp, Homo sapien
ccccgagtggttctgatcctcttct

SEQ ID NO: 255852 - DNA, 25 bp, Homo sapien
gctggtcctgagcatcccactgtgt

SEQ ID NO: 255853 - DNA, 25 bp, Homo sapien
agagccccctgttaccctgagaaca

SEQ ID NO: 255854 - DNA, 25 bp, Homo sapien
ttctgagggccgcatgatgtcctgg

SEQ ID NO: 255855 - DNA, 25 bp, Homo sapien
ccatctgggctcaatttatgctgta

SEQ ID NO: 255856 - DNA, 25 bp, Homo sapien
gagaacttccacttgaatcaatcac

SEQ ID NO: 255857 - DNA, 25 bp, Homo sapien
tgctgatgcagaatatcactgagaa

SEQ ID NO: 255858 - DNA, 25 bp, Homo sapien
tgcaaaagaggctaagagaacagcc

SEQ ID NO: 255859 - DNA, 25 bp, Homo sapien
gaaccactgggctgtactacgttta

SEQ ID NO: 255860 - DNA, 25 bp, Homo sapien
ggtgaatccagacgctttgcaagaa

SEQ ID NO: 255861 - DNA, 25 bp, Homo sapien
tagtcattgtaaggtagagtgcacg

SEQ ID NO: 255862 - DNA, 25 bp, Homo sapien
cacgtgaaagggtgtcgctggacca

SEQ ID NO: 255863 - DNA, 25 bp, Homo sapien
gcaccgtgtatcttgcccagtaata

SEQ ID NO: 255864 - DNA, 25 bp, Homo sapien
ccattgtaaagtgtgatccatctca

SEQ ID NO: 255865 - DNA, 25 bp, Homo sapien
catctcatcctttcaagcccttgtc

SEQ ID NO: 255866 - DNA, 25 bp, Homo sapien
aggatgtgggttctcgcaccgtgta

SEQ ID NO: 255867 - DNA, 25 bp, Homo sapien
tagctctaggtcctgtccatggtga

SEQ ID NO: 255868 - DNA, 25 bp, Homo sapien
gaagattagctctaggtcctgtcca

SEQ ID NO: 255869 - DNA, 25 bp, Homo sapien
caccaggaagattagctctaggtcc

SEQ ID NO: 255870 - DNA, 25 bp, Homo sapien
tgctgccaccaggaagattagctct

SEQ ID NO: 255871 - DNA, 25 bp, Homo sapien
tttcagttcatgtgcatagatcctc

SEQ ID NO: 255872 - DNA, 25 bp, Homo sapien
ttcagttcatgtgcatagatcctca

SEQ ID NO: 255873 - DNA, 25 bp, Homo sapien
tcagttcatgtgcatagatcctcat

SEQ ID NO: 255874 - DNA, 25 bp, Homo sapien
aattactacctatcaggcttgggct

SEQ ID NO: 255875 - DNA, 25 bp, Homo sapien
taattgtctccatatgactggtggg

SEQ ID NO: 255876 - DNA, 25 bp, Homo sapien
cacttggtaaaaggtgctggccatt

SEQ ID NO: 255877 - DNA, 25 bp, Homo sapien
cattctggttggaggtacctgggct

SEQ ID NO: 255878 - DNA, 25 bp, Homo sapien
cccctggtggtcgttgtcagcaaca

SEQ ID NO: 255879 - DNA, 25 bp, Homo sapien
taacatgaccaccaagaagatgagg

SEQ ID NO: 255880 - DNA, 25 bp, Homo sapien
tgtccacaagagattttagcctgtc

SEQ ID NO: 255881 - DNA, 25 bp, Homo sapien
gagaaatatgtagagtggtccacct

SEQ ID NO: 255882 - DNA, 25 bp, Homo sapien
tctgagctaatcttcctgaaacgtg

SEQ ID NO: 255883 - DNA, 25 bp, Homo sapien
tggctttgggcagtatgttcaccag

SEQ ID NO: 255884 - DNA, 25 bp, Homo sapien
gagcaggtttgtgcgcatcttgtca

SEQ ID NO: 255885 - DNA, 25 bp, Homo sapien
tattcctttccggagcacaggttgg

SEQ ID NO: 255886 - DNA, 25 bp, Homo sapien
gaaaacttgttcacagtagcacctt

SEQ ID NO: 255887 - DNA, 25 bp, Homo sapien
tgggaattctcacgcctcctgtgca

SEQ ID NO: 255888 - DNA, 25 bp, Homo sapien
tctttgtaatcctaaaactgctgta

SEQ ID NO: 255889 - DNA, 25 bp, Homo sapien
gtaactgatttgtgactgcggtgca

SEQ ID NO: 255890 - DNA, 25 bp, Homo sapien
ctgtgaatttggcttatattacgac

SEQ ID NO: 255891 - DNA, 25 bp, Homo sapien
gcttatattacgactcttgaatgga

SEQ ID NO: 255892 - DNA, 25 bp, Homo sapien
acgttatagagtgtggccttttcca

SEQ ID NO: 255893 - DNA, 25 bp, Homo sapien
atatataacccattttgtaaacagc

SEQ ID NO: 255894 - DNA, 25 bp, Homo sapien
ggctgctcagctccatgtaggctgt

SEQ ID NO: 255895 - DNA, 25 bp, Homo sapien
ctgctcagctccatgtaggctgtgc

SEQ ID NO: 255896 - DNA, 25 bp, Homo sapien
ctcaggctgctcagctccatgtagg

SEQ ID NO: 255897 - DNA, 25 bp, Homo sapien
caggctgctcagctccatgtaggct

SEQ ID NO: 255898 - DNA, 25 bp, Homo sapien
gcgtagtttgctgtaccaaagatag

SEQ ID NO: 255899 - DNA, 25 bp, Homo sapien
tccgcggtaatcgtgactctgccct

SEQ ID NO: 255900 - DNA, 25 bp, Homo sapien
tgtccgcggtaatcgtgactctgcc

SEQ ID NO: 255901 - DNA, 25 bp, Homo sapien
tctgtgcgtagtttgctgtaccaaa

SEQ ID NO: 255902 - DNA, 25 bp, Homo sapien
ctgatagcatagctgctgaaggtgc

SEQ ID NO: 255903 - DNA, 25 bp, Homo sapien
actgcaccagctgcacctgggactg

SEQ ID NO: 255904 - DNA, 25 bp, Homo sapien
caggagaccttcaccgaggacccag

SEQ ID NO: 255905 - DNA, 25 bp, Homo sapien
aggagaccttcaccgaggacccagg

SEQ ID NO: 255906 - DNA, 25 bp, Homo sapien
gcaccagctgcacctgggactggac

SEQ ID NO: 255907 - DNA, 25 bp, Homo sapien
ccacaaagaggaacctccaggtcca

SEQ ID NO: 255908 - DNA, 25 bp, Homo sapien
ccaccacaaagaggaacctccaggt

SEQ ID NO: 255909 - DNA, 25 bp, Homo sapien
caaagaggaacctccaggtccagtc

SEQ ID NO: 255910 - DNA, 25 bp, Homo sapien
cacaaagaggaacctccaggtccag

SEQ ID NO: 255911 - DNA, 25 bp, Homo sapien
gtgatgagctgtgctcccaggggct

SEQ ID NO: 255912 - DNA, 25 bp, Homo sapien
ggtgatgagctgtgctcccaggggc

SEQ ID NO: 255913 - DNA, 25 bp, Homo sapien
tgatgagctgtgctcccaggggctt

SEQ ID NO: 255914 - DNA, 25 bp, Homo sapien
ggaatgtggttgttatgtgatgctc

SEQ ID NO: 255915 - DNA, 25 bp, Homo sapien
aatgtggttgttatgtgatgctctc

SEQ ID NO: 255916 - DNA, 25 bp, Homo sapien
gaggaatgtggttgttatgtgatgc

SEQ ID NO: 255917 - DNA, 25 bp, Homo sapien
cttcagaggaggaatgtggttgtta

SEQ ID NO: 255918 - DNA, 25 bp, Homo sapien
ggataaggaatccagagatatgcca

SEQ ID NO: 255919 - DNA, 25 bp, Homo sapien
tcttcttcagagacttcacaggaag

SEQ ID NO: 255920 - DNA, 25 bp, Homo sapien
gaatccagagatatgccacaaagga

SEQ ID NO: 255921 - DNA, 25 bp, Homo sapien
gaagaacaggataaggaatccagag

SEQ ID NO: 255922 - DNA, 25 bp, Homo sapien
ttctgcttgcatgaaccactaacag

SEQ ID NO: 255923 - DNA, 25 bp, Homo sapien
gaaccactaacaggggacatgccat

SEQ ID NO: 255924 - DNA, 25 bp, Homo sapien
ctgcttgcatgaaccactaacaggg

SEQ ID NO: 255925 - DNA, 25 bp, Homo sapien
atgaaccactaacaggggacatgcc

SEQ ID NO: 255926 - DNA, 25 bp, Homo sapien
aaatggcatctcagccacactatcc

SEQ ID NO: 255927 - DNA, 25 bp, Homo sapien
caggaaatggcatctcagccacact

SEQ ID NO: 255928 - DNA, 25 bp, Homo sapien
ggaaatggcatctcagccacactat

SEQ ID NO: 255929 - DNA, 25 bp, Homo sapien
ggcatctcagccacactatcctgtt

SEQ ID NO: 255930 - DNA, 25 bp, Homo sapien
ggatccagctcacacacattccact

SEQ ID NO: 255931 - DNA, 25 bp, Homo sapien
cggatccagctcacacacattccac

SEQ ID NO: 255932 - DNA, 25 bp, Homo sapien
tcacacacattccactagtgctgag

SEQ ID NO: 255933 - DNA, 25 bp, Homo sapien
aagatgaagcccacaaaggagagaa

SEQ ID NO: 255934 - DNA, 25 bp, Homo sapien
caggagcgtggaacaaagtatgtcc

SEQ ID NO: 255935 - DNA, 25 bp, Homo sapien
ggagcgtggaacaaagtatgtccat

SEQ ID NO: 255936 - DNA, 25 bp, Homo sapien
aggagcgtggaacaaagtatgtcca

SEQ ID NO: 255937 - DNA, 25 bp, Homo sapien
cctggagacagccccgtgcacagtg

SEQ ID NO: 255938 - DNA, 25 bp, Homo sapien
gccccgtgcacagtgtccctggcgc

SEQ ID NO: 255939 - DNA, 25 bp, Homo sapien
agccccgtgcacagtgtccctggcg

SEQ ID NO: 255940 - DNA, 25 bp, Homo sapien
ggagacagccccgtgcacagtgtcc

SEQ ID NO: 255941 - DNA, 25 bp, Homo sapien
tgcctttcacagacgtggtctattc

SEQ ID NO: 255942 - DNA, 25 bp, Homo sapien
cagacgtggtctattctgttgtccc

SEQ ID NO: 255943 - DNA, 25 bp, Homo sapien
ttcacagacgtggtctattctgttg

SEQ ID NO: 255944 - DNA, 25 bp, Homo sapien
cctttcacagacgtggtctattctg

SEQ ID NO: 255945 - DNA, 25 bp, Homo sapien
tagctttgtttctaatgaaacctac

SEQ ID NO: 255946 - DNA, 25 bp, Homo sapien
attagctttgtttctaatgaaacct

SEQ ID NO: 255947 - DNA, 25 bp, Homo sapien
ttagctttgtttctaatgaaaccta

SEQ ID NO: 255948 - DNA, 25 bp, Homo sapien
cattagctttgtttctaatgaaacc

SEQ ID NO: 255949 - DNA, 25 bp, Homo sapien
cccagctcatgtagtagtcactgaa

SEQ ID NO: 255950 - DNA, 25 bp, Homo sapien
ctcatgtagtagtcactgaaggtga

SEQ ID NO: 255951 - DNA, 25 bp, Homo sapien
gcggacccagctcatgtagtagtca

SEQ ID NO: 255952 - DNA, 25 bp, Homo sapien
gacccagctcatgtagtagtcactg

SEQ ID NO: 255953 - DNA, 25 bp, Homo sapien
tgcaaacaaaaagaaaccctggtca

SEQ ID NO: 255954 - DNA, 25 bp, Homo sapien
aagaaaaacccagctcagccatgac

SEQ ID NO: 255955 - DNA, 25 bp, Homo sapien
aatagcggcaagaaaaacccagctc

SEQ ID NO: 255956 - DNA, 25 bp, Homo sapien
aaatagcggcaagaaaaacccagct

SEQ ID NO: 255957 - DNA, 25 bp, Homo sapien
aaaaacccagctcagccatgactcc

SEQ ID NO: 255958 - DNA, 25 bp, Homo sapien
tgttcagtcctgatcaccaaatgaa

SEQ ID NO: 255959 - DNA, 25 bp, Homo sapien
ctgttggccccacgcgcccctgcag

SEQ ID NO: 255960 - DNA, 25 bp, Homo sapien
ggaggtttgtgtccgggctcacact

SEQ ID NO: 255961 - DNA, 25 bp, Homo sapien
cccctgttggccccacgcgcccctg

SEQ ID NO: 255962 - DNA, 25 bp, Homo sapien
cccctgcagggaggtttgtgtccgg

SEQ ID NO: 255963 - DNA, 25 bp, Homo sapien
cgtgtcctcggttttcaggctgttc

SEQ ID NO: 255964 - DNA, 25 bp, Homo sapien
cacggccgtgtcctcggttttcagg

SEQ ID NO: 255965 - DNA, 25 bp, Homo sapien
tgtgtctctagcacagtaatacacg

SEQ ID NO: 255966 - DNA, 25 bp, Homo sapien
ctcccctcgctgtgtctctagcaca

SEQ ID NO: 255967 - DNA, 25 bp, Homo sapien
cgcggcgtattctgtggtgtaactg

SEQ ID NO: 255968 - DNA, 25 bp, Homo sapien
gacgcggcgtattctgtggtgtaac

SEQ ID NO: 255969 - DNA, 25 bp, Homo sapien
acagacgcggcgtattctgtggtgt

SEQ ID NO: 255970 - DNA, 25 bp, Homo sapien
ttcacagacgcggcgtattctgtgg

SEQ ID NO: 255971 - DNA, 25 bp, Homo sapien
gcctggcggacccagtccatgtagt

SEQ ID NO: 255972 - DNA, 25 bp, Homo sapien
gcggacccagtccatgtagtggtca

SEQ ID NO: 255973 - DNA, 25 bp, Homo sapien
cggacccagtccatgtagtggtcac

SEQ ID NO: 255974 - DNA, 25 bp, Homo sapien
tggcggacccagtccatgtagtggt

SEQ ID NO: 255975 - DNA, 25 bp, Homo sapien
acaggagagtctcagggaccctcca

SEQ ID NO: 255976 - DNA, 25 bp, Homo sapien
tgcacaggagagtctcagggaccct

SEQ ID NO: 255977 - DNA, 25 bp, Homo sapien
tgaaggtgaatccagaggctgcaca

SEQ ID NO: 255978 - DNA, 25 bp, Homo sapien
gctgcacaggagagtctcagggacc

SEQ ID NO: 255979 - DNA, 25 bp, Homo sapien
ctgcaaacacagagacaccctggtc

SEQ ID NO: 255980 - DNA, 25 bp, Homo sapien
gcaaacacagagacaccctggtcag

SEQ ID NO: 255981 - DNA, 25 bp, Homo sapien
caaacacagagacaccctggtcaga

SEQ ID NO: 255982 - DNA, 25 bp, Homo sapien
aacacagagacaccctggtcagaaa

SEQ ID NO: 255983 - DNA, 25 bp, Homo sapien
acaacaaggaaaacccagctcagcc

SEQ ID NO: 255984 - DNA, 25 bp, Homo sapien
taacaacaaggaaaacccagctcag

SEQ ID NO: 255985 - DNA, 25 bp, Homo sapien
aaacccagctcagcccaaactccat

SEQ ID NO: 255986 - DNA, 25 bp, Homo sapien
ggaaaacccagctcagcccaaactc

SEQ ID NO: 255987 - DNA, 25 bp, Homo sapien
tgtgttcagtgctgatcaccaaatg

SEQ ID NO: 255988 - DNA, 25 bp, Homo sapien
tctgtgttcagtgctgatcaccaaa

SEQ ID NO: 255989 - DNA, 25 bp, Homo sapien
tgctgatcaccaaatgaaaacacct

SEQ ID NO: 255990 - DNA, 25 bp, Homo sapien
cagtgctgatcaccaaatgaaaaca

SEQ ID NO: 255991 - DNA, 25 bp, Homo sapien
tcagtgagtcccgagcgccccctgg

SEQ ID NO: 255992 - DNA, 25 bp, Homo sapien
ccgcgcgcccctgcagggaggtttg

SEQ ID NO: 255993 - DNA, 25 bp, Homo sapien
ggaggtttgtgtccgggctcacact

SEQ ID NO: 255994 - DNA, 25 bp, Homo sapien
agtgagtcccgagcgccccctggta

SEQ ID NO: 255995 - DNA, 25 bp, Homo sapien
tcactgtgtgtctagtacagtaata

SEQ ID NO: 255996 - DNA, 25 bp, Homo sapien
cccctcactgtgtgtctagtacagt

SEQ ID NO: 255997 - DNA, 25 bp, Homo sapien
ctcccctcactgtgtgtctagtaca

SEQ ID NO: 255998 - DNA, 25 bp, Homo sapien
cctcactgtgtgtctagtacagtaa

SEQ ID NO: 255999 - DNA, 25 bp, Homo sapien
cgacgcagcatatgctgtcgcgtaa

SEQ ID NO: 256000 - DNA, 25 bp, Homo sapien
tcaccgacgcagcatatgctgtcgc

SEQ ID NO: 256001 - DNA, 25 bp, Homo sapien
caccgacgcagcatatgctgtcgcg

SEQ ID NO: 256002 - DNA, 25 bp, Homo sapien
ccgacgcagcatatgctgtcgcgta

SEQ ID NO: 256003 - DNA, 25 bp, Homo sapien
gagccactgaaggtgaacccagagg

SEQ ID NO: 256004 - DNA, 25 bp, Homo sapien
catagcagagccactgaaggtgaac

SEQ ID NO: 256005 - DNA, 25 bp, Homo sapien
ctccagccctttcccggaagcctgg

SEQ ID NO: 256006 - DNA, 25 bp, Homo sapien
cactccagccctttcccggaagcct

SEQ ID NO: 256007 - DNA, 25 bp, Homo sapien
tctcctgtattcagtgccgatcacc

SEQ ID NO: 256008 - DNA, 25 bp, Homo sapien
tattcagtgccgatcaccgagtgga

SEQ ID NO: 256009 - DNA, 25 bp, Homo sapien
gtgagtctcctgtattcagtgccga

SEQ ID NO: 256010 - DNA, 25 bp, Homo sapien
gccgatcaccgagtggagacagctg

SEQ ID NO: 256011 - DNA, 25 bp, Homo sapien
gaaggacgtgagttacagacaacct

SEQ ID NO: 256012 - DNA, 25 bp, Homo sapien
cctagatggtggtcagaggttccct

SEQ ID NO: 256013 - DNA, 25 bp, Homo sapien
ttttgcttcaagacaagaaggacgt

SEQ ID NO: 256014 - DNA, 25 bp, Homo sapien
tacagacaacctagtgggtggtctc

SEQ ID NO: 256015 - DNA, 25 bp, Homo sapien
ttcttctgagatgccaagttgtatg

SEQ ID NO: 256016 - DNA, 25 bp, Homo sapien
agatgccaagttgtatgtctggttc

SEQ ID NO: 256017 - DNA, 25 bp, Homo sapien
tgctggtcctgtgctgcccatgaag

SEQ ID NO: 256018 - DNA, 25 bp, Homo sapien
ccaggtaaaggaaatcttggagatc

SEQ ID NO: 256019 - DNA, 25 bp, Homo sapien
tgtgtgtcaccttgactaggacata

SEQ ID NO: 256020 - DNA, 25 bp, Homo sapien
ggtgttgctctgatgtataatacag

SEQ ID NO: 256021 - DNA, 25 bp, Homo sapien
caccttgactaggacatagtctcaa

SEQ ID NO: 256022 - DNA, 25 bp, Homo sapien
aacatgagtctgattctattgtcaa

SEQ ID NO: 256023 - DNA, 25 bp, Homo sapien
gtagacagcagctgtaggacttccc

SEQ ID NO: 256024 - DNA, 25 bp, Homo sapien
gaagacaatggaactctatggtaga

SEQ ID NO: 256025 - DNA, 25 bp, Homo sapien
tgaacttggtcggtctggtttaatc

SEQ ID NO: 256026 - DNA, 25 bp, Homo sapien
tcaggaagattgtcctagatgaact

SEQ ID NO: 256027 - DNA, 25 bp, Homo sapien
gattgccatcatgcagagctcacag

SEQ ID NO: 256028 - DNA, 25 bp, Homo sapien
gagctcacagcccaataaagtgtcc

SEQ ID NO: 256029 - DNA, 25 bp, Homo sapien
cagtatcccatttgaggaaacgact

SEQ ID NO: 256030 - DNA, 25 bp, Homo sapien
gcatccacgcatagaagacagcagg

SEQ ID NO: 256031 - DNA, 25 bp, Homo sapien
aatgagaaagatccctcagcctgcc

SEQ ID NO: 256032 - DNA, 25 bp, Homo sapien
tgccaggtccacaggagccatagcc

SEQ ID NO: 256033 - DNA, 25 bp, Homo sapien
caggtccacaggagccatagccaga

SEQ ID NO: 256034 - DNA, 25 bp, Homo sapien
cagggaatgagaaagatccctcagc

SEQ ID NO: 256035 - DNA, 25 bp, Homo sapien
tgagttccaggtaatgcatctgagg

SEQ ID NO: 256036 - DNA, 25 bp, Homo sapien
gagttccaggtaatgcatctgaggc

SEQ ID NO: 256037 - DNA, 25 bp, Homo sapien
ctgagttccaggtaatgcatctgag

SEQ ID NO: 256038 - DNA, 25 bp, Homo sapien
aaaatcagcctttagcaccaccagc

SEQ ID NO: 256039 - DNA, 25 bp, Homo sapien
gcttcctcgggactctgattctggt

SEQ ID NO: 256040 - DNA, 25 bp, Homo sapien
tgccctgagtctgattgaaaaacac

SEQ ID NO: 256041 - DNA, 25 bp, Homo sapien
atcagagattcccacggagacgcct

SEQ ID NO: 256042 - DNA, 25 bp, Homo sapien
ccatcactattaatacgtgagaccc

SEQ ID NO: 256043 - DNA, 25 bp, Homo sapien
gtgctactcccatcactattaatac

SEQ ID NO: 256044 - DNA, 25 bp, Homo sapien
gctactcccatcactattaatacgt

SEQ ID NO: 256045 - DNA, 25 bp, Homo sapien
tattaatacgtgagacccacaccag

SEQ ID NO: 256046 - DNA, 25 bp, Homo sapien
ctactgaaggtgaatccagaggctg

SEQ ID NO: 256047 - DNA, 25 bp, Homo sapien
tcagggaccccccaggctgaactaa

SEQ ID NO: 256048 - DNA, 25 bp, Homo sapien
gaccccccaggctgaactaagcctc

SEQ ID NO: 256049 - DNA, 25 bp, Homo sapien
gctgcacaggagagtctcagggacc

SEQ ID NO: 256050 - DNA, 25 bp, Homo sapien
ccccggactccaccagctgcacctc

SEQ ID NO: 256051 - DNA, 25 bp, Homo sapien
accagctgcacctcacactggacac

SEQ ID NO: 256052 - DNA, 25 bp, Homo sapien
ggactccaccagctgcacctcacac

SEQ ID NO: 256053 - DNA, 25 bp, Homo sapien
ccaccagctgcacctcacactggac

SEQ ID NO: 256054 - DNA, 25 bp, Homo sapien
aaacacagagacaccctggtcagaa

SEQ ID NO: 256055 - DNA, 25 bp, Homo sapien
agagacaccctggtcagaaactgcc

SEQ ID NO: 256056 - DNA, 25 bp, Homo sapien
accctggtcagaaactgccacacac

SEQ ID NO: 256057 - DNA, 25 bp, Homo sapien
cctggtcagaaactgccacacacat

SEQ ID NO: 256058 - DNA, 25 bp, Homo sapien
aaatagcaacaaggaaaacccagct

SEQ ID NO: 256059 - DNA, 25 bp, Homo sapien
aaacccagctcagcccaaactccat

SEQ ID NO: 256060 - DNA, 25 bp, Homo sapien
ggaaaacccagctcagcccaaactc

SEQ ID NO: 256061 - DNA, 25 bp, Homo sapien
aggaaaacccagctcagcccaaact

SEQ ID NO: 256062 - DNA, 25 bp, Homo sapien
tgtgtgcagtcctgatcagcaagca

SEQ ID NO: 256063 - DNA, 25 bp, Homo sapien
cagtcctgatcagcaagcagaaaca

SEQ ID NO: 256064 - DNA, 25 bp, Homo sapien
ggtgagttctctgtgtgcagtcctg

SEQ ID NO: 256065 - DNA, 25 bp, Homo sapien
agcagaaacagctgggaatcccagg

SEQ ID NO: 256066 - DNA, 25 bp, Homo sapien
accaatgcaccccatccattccagc

SEQ ID NO: 256067 - DNA, 25 bp, Homo sapien
aatgcaccccatccattccagccct

SEQ ID NO: 256068 - DNA, 25 bp, Homo sapien
atgcaccccatccattccagccctt

SEQ ID NO: 256069 - DNA, 25 bp, Homo sapien
ccatccattccagccctttcctggg

SEQ ID NO: 256070 - DNA, 25 bp, Homo sapien
tcaggcccagtcataagcactgttt

SEQ ID NO: 256071 - DNA, 25 bp, Homo sapien
cataagtgatgcagaaggtcagtgt

SEQ ID NO: 256072 - DNA, 25 bp, Homo sapien
tctgggcctgactcctgtagctgct

SEQ ID NO: 256073 - DNA, 25 bp, Homo sapien
cagggcacctggagttatgaataat

SEQ ID NO: 256074 - DNA, 25 bp, Homo sapien
gcatagcgtatgctactcccatcag

SEQ ID NO: 256075 - DNA, 25 bp, Homo sapien
tcagtactaatacatgagacccact

SEQ ID NO: 256076 - DNA, 25 bp, Homo sapien
ggctgtgtactcagctctcaaactg

SEQ ID NO: 256077 - DNA, 25 bp, Homo sapien
cagtggctactgaaggcaaatccag

SEQ ID NO: 256078 - DNA, 25 bp, Homo sapien
agtaacaagtaaatcccaagtcagc

SEQ ID NO: 256079 - DNA, 25 bp, Homo sapien
aatcccaagtcagcacaaaccccat

SEQ ID NO: 256080 - DNA, 25 bp, Homo sapien
gtaaatcccaagtcagcacaaaccc

SEQ ID NO: 256081 - DNA, 25 bp, Homo sapien
atagtaacaagtaaatcccaagtca

SEQ ID NO: 256082 - DNA, 25 bp, Homo sapien
tatatgcctccaccactagcattaa

SEQ ID NO: 256083 - DNA, 25 bp, Homo sapien
ggagcttggtccacctagtgcatgc

SEQ ID NO: 256084 - DNA, 25 bp, Homo sapien
gttttctctggagatggtcaaccgg

SEQ ID NO: 256085 - DNA, 25 bp, Homo sapien
catagttactgaaagtgtatccaga

SEQ ID NO: 256086 - DNA, 25 bp, Homo sapien
taccagctacacttcacattggaca

SEQ ID NO: 256087 - DNA, 25 bp, Homo sapien
caggagagtcacatggaccccccaa

SEQ ID NO: 256088 - DNA, 25 bp, Homo sapien
agactctaccagctacacttcacat

SEQ ID NO: 256089 - DNA, 25 bp, Homo sapien
gagtcacatggaccccccaagctgt

SEQ ID NO: 256090 - DNA, 25 bp, Homo sapien
caaagaaaacccagcgcattcctaa

SEQ ID NO: 256091 - DNA, 25 bp, Homo sapien
aacaaagaaaacccagcgcattcct

SEQ ID NO: 256092 - DNA, 25 bp, Homo sapien
gaaaacccagcgcattcctaactcc

SEQ ID NO: 256093 - DNA, 25 bp, Homo sapien
aagaaaacccagcgcattcctaact

SEQ ID NO: 256094 - DNA, 25 bp, Homo sapien
gagtgccacctcatgtcctgtgcgc

SEQ ID NO: 256095 - DNA, 25 bp, Homo sapien
tcctgagcgacgtctggtgattctg

SEQ ID NO: 256096 - DNA, 25 bp, Homo sapien
gtcctgagtgccacctcatgtcctg

SEQ ID NO: 256097 - DNA, 25 bp, Homo sapien
catgtcctgagcgacgtctggtgat

SEQ ID NO: 256098 - DNA, 25 bp, Homo sapien
cagctcctgatgtcctgagtgcccc

SEQ ID NO: 256099 - DNA, 25 bp, Homo sapien
cgcccagccgccgtctggtgattct

SEQ ID NO: 256100 - DNA, 25 bp, Homo sapien
gcccagccgccgtctggtgattctg

SEQ ID NO: 256101 - DNA, 25 bp, Homo sapien
ggtgattctgagcagctcctgatgt

SEQ ID NO: 256102 - DNA, 25 bp, Homo sapien
caccagtgaacttcttgtaggactc

SEQ ID NO: 256103 - DNA, 25 bp, Homo sapien
tattgatggagggtaccactaacaa

SEQ ID NO: 256104 - DNA, 25 bp, Homo sapien
taggctgtatcatttctcttccaga

SEQ ID NO: 256105 - DNA, 25 bp, Homo sapien
ggctctgagaacagttaggctgtat

SEQ ID NO: 256106 - DNA, 25 bp, Homo sapien
tgttcttcatgataaggcaagtttt

SEQ ID NO: 256107 - DNA, 25 bp, Homo sapien
tttttcccatctcataccctgcctt

SEQ ID NO: 256108 - DNA, 25 bp, Homo sapien
tgatgcctcctatgtatgaaatttt

SEQ ID NO: 256109 - DNA, 25 bp, Homo sapien
ataccctgcctttgatgcctcctat

SEQ ID NO: 256110 - DNA, 25 bp, Homo sapien
gcacacttacttttatggcagctat

SEQ ID NO: 256111 - DNA, 25 bp, Homo sapien
tagtaggccatgttgcaaagcccca

SEQ ID NO: 256112 - DNA, 25 bp, Homo sapien
tccaaggtggtaagattcacaggat

SEQ ID NO: 256113 - DNA, 25 bp, Homo sapien
tgttaccagggaaccggtggagcaa

SEQ ID NO: 256114 - DNA, 25 bp, Homo sapien
cgcacgtacagaggcaagacagagg

SEQ ID NO: 256115 - DNA, 25 bp, Homo sapien
ccaccatggcatgtagctggctaca

SEQ ID NO: 256116 - DNA, 25 bp, Homo sapien
caaagccaggcttgtaactcagggt

SEQ ID NO: 256117 - DNA, 25 bp, Homo sapien
tgagtgcactctgtcccaagggact

SEQ ID NO: 256118 - DNA, 25 bp, Homo sapien
gctccggcccttagataacatcatt

SEQ ID NO: 256119 - DNA, 25 bp, Homo sapien
ccggcccttagataacatcattgaa

SEQ ID NO: 256120 - DNA, 25 bp, Homo sapien
tctgagctccggcccttagataaca

SEQ ID NO: 256121 - DNA, 25 bp, Homo sapien
gagctccggcccttagataacatca

SEQ ID NO: 256122 - DNA, 25 bp, Homo sapien
tccggctttttcacgtaggcagtag

SEQ ID NO: 256123 - DNA, 25 bp, Homo sapien
catcttatgccattgttaacccaga

SEQ ID NO: 256124 - DNA, 25 bp, Homo sapien
taacccagatattactcaggagcag

SEQ ID NO: 256125 - DNA, 25 bp, Homo sapien
tctgcagatcttggacagaatgttc

SEQ ID NO: 256126 - DNA, 25 bp, Homo sapien
gactatgggactgcgggtgaacacc

SEQ ID NO: 256127 - DNA, 25 bp, Homo sapien
tctggactttgattcgagatgttgg

SEQ ID NO: 256128 - DNA, 25 bp, Homo sapien
gattcgagatgttggaaaaatcact

SEQ ID NO: 256129 - DNA, 25 bp, Homo sapien
cactgactcgatctctttactcatt

SEQ ID NO: 256130 - DNA, 25 bp, Homo sapien
ttatttcttggtggttcagttttga

SEQ ID NO: 256131 - DNA, 25 bp, Homo sapien
ttcttggtggttcagttttgatagg

SEQ ID NO: 256132 - DNA, 25 bp, Homo sapien
atttcttggtggttcagttttgata

SEQ ID NO: 256133 - DNA, 25 bp, Homo sapien
cttggtggttcagttttgataggtt

SEQ ID NO: 256134 - DNA, 25 bp, Homo sapien
ggttaggaacgctcccatgttgttc

SEQ ID NO: 256135 - DNA, 25 bp, Homo sapien
aaatatttgcaagattactcacagg

SEQ ID NO: 256136 - DNA, 25 bp, Homo sapien
aggcagccttttgatgttaaccatg

SEQ ID NO: 256137 - DNA, 25 bp, Homo sapien
ggtcaggtctcccatccagttgcct

SEQ ID NO: 256138 - DNA, 25 bp, Homo sapien
tcggctgagatggtgacgtggcctt

SEQ ID NO: 256139 - DNA, 25 bp, Homo sapien
tgcaggtaggcggtgctgctggagc

SEQ ID NO: 256140 - DNA, 25 bp, Homo sapien
ttcccgggcatctggcgcacccagt

SEQ ID NO: 256141 - DNA, 25 bp, Homo sapien
cagaagtcttacaggagatcctcag

SEQ ID NO: 256142 - DNA, 25 bp, Homo sapien
ccaggacgagggaaaggatgacggt

SEQ ID NO: 256143 - DNA, 25 bp, Homo sapien
cagccaggacgagggaaaggatgac

SEQ ID NO: 256144 - DNA, 25 bp, Homo sapien
ggagaacagccaggacgagggaaag

SEQ ID NO: 256145 - DNA, 25 bp, Homo sapien
gacgagggaaaggatgacggttgac

SEQ ID NO: 256146 - DNA, 25 bp, Homo sapien
gacagaaaagaaagcactgagatcc

SEQ ID NO: 256147 - DNA, 25 bp, Homo sapien
ctggaggaggacagaaaagaaagca

SEQ ID NO: 256148 - DNA, 25 bp, Homo sapien
agaaaagaaagcactgagatcccag

SEQ ID NO: 256149 - DNA, 25 bp, Homo sapien
gaggaggacagaaaagaaagcactg

SEQ ID NO: 256150 - DNA, 25 bp, Homo sapien
gaactacttgtgaattttgccatgc

SEQ ID NO: 256151 - DNA, 25 bp, Homo sapien
gctgggtattataagctgatgctac

SEQ ID NO: 256152 - DNA, 25 bp, Homo sapien
gtacttgcttttagtcaggaaggca

SEQ ID NO: 256153 - DNA, 25 bp, Homo sapien
gccatgctgttgacagtagccaaca

SEQ ID NO: 256154 - DNA, 25 bp, Homo sapien
agcaggaagacctcgttatcacggg

SEQ ID NO: 256155 - DNA, 25 bp, Homo sapien
ctgcttttttggacacggatctggg

SEQ ID NO: 256156 - DNA, 25 bp, Homo sapien
cacagcgcaggtaagggagagggtc

SEQ ID NO: 256157 - DNA, 25 bp, Homo sapien
ggctgatggatccagcttcagcagg

SEQ ID NO: 256158 - DNA, 25 bp, Homo sapien
gttgtcttgggtcctctccagactc

SEQ ID NO: 256159 - DNA, 25 bp, Homo sapien
cccaggttgtcttgggtcctctcca

SEQ ID NO: 256160 - DNA, 25 bp, Homo sapien
ccaggttgtcttgggtcctctccag

SEQ ID NO: 256161 - DNA, 25 bp, Homo sapien
aggttgtcttgggtcctctccagac

SEQ ID NO: 256162 - DNA, 25 bp, Homo sapien
taacaactgtgaaacccagctcagc

SEQ ID NO: 256163 - DNA, 25 bp, Homo sapien
acgtttctattgacatggtgactca

SEQ ID NO: 256164 - DNA, 25 bp, Homo sapien
gtgactcaactcctgagggacgggg

SEQ ID NO: 256165 - DNA, 25 bp, Homo sapien
acggggtgtagtagctcctcccact

SEQ ID NO: 256166 - DNA, 25 bp, Homo sapien
tccctggggactggcggaccagctc

SEQ ID NO: 256167 - DNA, 25 bp, Homo sapien
ccaccagggggaggaagaaccacag

SEQ ID NO: 256168 - DNA, 25 bp, Homo sapien
tgccaccagggggaggaagaaccac

SEQ ID NO: 256169 - DNA, 25 bp, Homo sapien
tctgggagctgccaccagggggagg

SEQ ID NO: 256170 - DNA, 25 bp, Homo sapien
ggagctgccaccagggggaggaaga

SEQ ID NO: 256171 - DNA, 25 bp, Homo sapien
ctaatataaaggtggatgtcgatgc

SEQ ID NO: 256172 - DNA, 25 bp, Homo sapien
gaacatattcctgtacctgatgtga

SEQ ID NO: 256173 - DNA, 25 bp, Homo sapien
taatttgaaaatgaacccagcttcc

SEQ ID NO: 256174 - DNA, 25 bp, Homo sapien
gaaatgggctcacatgtgtctggag

SEQ ID NO: 256175 - DNA, 25 bp, Homo sapien
ggtttccacatggtgtatctcgcac

SEQ ID NO: 256176 - DNA, 25 bp, Homo sapien
gggtttccacatggtgtatctcgca

SEQ ID NO: 256177 - DNA, 25 bp, Homo sapien
gtgggtttccacatggtgtatctcg

SEQ ID NO: 256178 - DNA, 25 bp, Homo sapien
tgggtttccacatggtgtatctcgc

SEQ ID NO: 256179 - DNA, 25 bp, Homo sapien
tctgcaggtatgctgtgctggcaga

SEQ ID NO: 256180 - DNA, 25 bp, Homo sapien
gctgatctgcaggtatgctgtgctg

SEQ ID NO: 256181 - DNA, 25 bp, Homo sapien
ctgctgatctgcaggtatgctgtgc

SEQ ID NO: 256182 - DNA, 25 bp, Homo sapien
gatctgcaggtatgctgtgctggca

SEQ ID NO: 256183 - DNA, 25 bp, Homo sapien
gcacccaattcataccataggtggt

SEQ ID NO: 256184 - DNA, 25 bp, Homo sapien
ggcacccaattcataccataggtgg

SEQ ID NO: 256185 - DNA, 25 bp, Homo sapien
ttcataccataggtggtgaaactgt

SEQ ID NO: 256186 - DNA, 25 bp, Homo sapien
aattcataccataggtggtgaaact

SEQ ID NO: 256187 - DNA, 25 bp, Homo sapien
gctgctgccaccaagaagaggatgc

SEQ ID NO: 256188 - DNA, 25 bp, Homo sapien
agaagaggatgctccaggtccagtc

SEQ ID NO: 256189 - DNA, 25 bp, Homo sapien
caccaagaagaggatgctccaggtc

SEQ ID NO: 256190 - DNA, 25 bp, Homo sapien
tgccaccaagaagaggatgctccag

SEQ ID NO: 256191 - DNA, 25 bp, Homo sapien
tgaggagctgtgctctaggggattc

SEQ ID NO: 256192 - DNA, 25 bp, Homo sapien
gtgaggagctgtgctctaggggatt

SEQ ID NO: 256193 - DNA, 25 bp, Homo sapien
gaggagctgtgctctaggggattct

SEQ ID NO: 256194 - DNA, 25 bp, Homo sapien
ggtgaggagctgtgctctaggggat

SEQ ID NO: 256195 - DNA, 25 bp, Homo sapien
gagtaaccctgataactcactgttg

SEQ ID NO: 256196 - DNA, 25 bp, Homo sapien
gagagtaaccctgataactcactgt

SEQ ID NO: 256197 - DNA, 25 bp, Homo sapien
tggagagtaaccctgataactcact

SEQ ID NO: 256198 - DNA, 25 bp, Homo sapien
taaccctgataactcactgttgcca

SEQ ID NO: 256199 - DNA, 25 bp, Homo sapien
tttgcaggagagtctgtgagaaccg

SEQ ID NO: 256200 - DNA, 25 bp, Homo sapien
tgtagccagtacaagtgaaatcaga

SEQ ID NO: 256201 - DNA, 25 bp, Homo sapien
aaccgctgggctgtacaatgtttcc

SEQ ID NO: 256202 - DNA, 25 bp, Homo sapien
tgtgagaaccgctgggctgtacaat

SEQ ID NO: 256203 - DNA, 25 bp, Homo sapien
gaaacgtactgactgcagccccatg

SEQ ID NO: 256204 - DNA, 25 bp, Homo sapien
cagaggaaacgtactgactgcagcc

SEQ ID NO: 256205 - DNA, 25 bp, Homo sapien
gaggaaacgtactgactgcagcccc

SEQ ID NO: 256206 - DNA, 25 bp, Homo sapien
cgtactgactgcagccccatgcaga

SEQ ID NO: 256207 - DNA, 25 bp, Homo sapien
aagcttcatagttgacatcattata

SEQ ID NO: 256208 - DNA, 25 bp, Homo sapien
agcttcatagttgacatcattatat

SEQ ID NO: 256209 - DNA, 25 bp, Homo sapien
ctagtaagcttcatagttgacatca

SEQ ID NO: 256210 - DNA, 25 bp, Homo sapien
taatcagcagtcactttactttcag

SEQ ID NO: 256211 - DNA, 25 bp, Homo sapien
ttcagtcttttcaaagccactttgt

SEQ ID NO: 256212 - DNA, 25 bp, Homo sapien
ttactttcagtcttttcaaagccac

SEQ ID NO: 256213 - DNA, 25 bp, Homo sapien
ttaatcagcagtcactttactttca

SEQ ID NO: 256214 - DNA, 25 bp, Homo sapien
gctggctttcattgtgctgatatgc

SEQ ID NO: 256215 - DNA, 25 bp, Homo sapien
tgtttttcaaaaaggttagcattgc

SEQ ID NO: 256216 - DNA, 25 bp, Homo sapien
tcacacatatattctctgtagaagg

SEQ ID NO: 256217 - DNA, 25 bp, Homo sapien
tatattctctgtagaagggcactgg

SEQ ID NO: 256218 - DNA, 25 bp, Homo sapien
tagcagaagcaatccgtaaagtttt

SEQ ID NO: 256219 - DNA, 25 bp, Homo sapien
tgttgtaaaatgcagcgttggtgtc

SEQ ID NO: 256220 - DNA, 25 bp, Homo sapien
ttgtttgttgtaaaatgcagcgttg

SEQ ID NO: 256221 - DNA, 25 bp, Homo sapien
aaactttagtaagttagcagaagca

SEQ ID NO: 256222 - DNA, 25 bp, Homo sapien
ctggtccgtgtatttacatgtaact

SEQ ID NO: 256223 - DNA, 25 bp, Homo sapien
tagaggagaaacttagagcagcacc

SEQ ID NO: 256224 - DNA, 25 bp, Homo sapien
aggagaaacttagagcagcaccact

SEQ ID NO: 256225 - DNA, 25 bp, Homo sapien
tccactagaggagaaacttagagca

SEQ ID NO: 256226 - DNA, 25 bp, Homo sapien
gctgcggtagttatttacctgaatt

SEQ ID NO: 256227 - DNA, 25 bp, Homo sapien
agttgcctgccactcaataagtaat

SEQ ID NO: 256228 - DNA, 25 bp, Homo sapien
gagttgcctgccactcaataagtaa

SEQ ID NO: 256229 - DNA, 25 bp, Homo sapien
tgagttgcctgccactcaataagta

SEQ ID NO: 256230 - DNA, 25 bp, Homo sapien
attgagttgcctgccactcaataag

SEQ ID NO: 256231 - DNA, 25 bp, Homo sapien
tgaagaagagtccaatcaagccact

SEQ ID NO: 256232 - DNA, 25 bp, Homo sapien
ccttgactcagcgaccatgaagaag

SEQ ID NO: 256233 - DNA, 25 bp, Homo sapien
cccttaaattcactagaagagaagg

SEQ ID NO: 256234 - DNA, 25 bp, Homo sapien
gaagagtccaatcaagccacttgaa

SEQ ID NO: 256235 - DNA, 25 bp, Homo sapien
aactgaccatgtctgttctatttgt

SEQ ID NO: 256236 - DNA, 25 bp, Homo sapien
actgaccatgtctgttctatttgtt

SEQ ID NO: 256237 - DNA, 25 bp, Homo sapien
gagccatactccacctagtggccaa

SEQ ID NO: 256238 - DNA, 25 bp, Homo sapien
cacagctgtagaagagcgggaactt

SEQ ID NO: 256239 - DNA, 25 bp, Homo sapien
acagcggctgcaaacccggactccg

SEQ ID NO: 256240 - DNA, 25 bp, Homo sapien
aaaccctagagccatactccaccta

SEQ ID NO: 256241 - DNA, 25 bp, Homo sapien
ctgcttctaatgtcattgtttcttt

SEQ ID NO: 256242 - DNA, 25 bp, Homo sapien
tcctctgcttctaatgtcattgttt

SEQ ID NO: 256243 - DNA, 25 bp, Homo sapien
taggtttagccttctaatccttctc

SEQ ID NO: 256244 - DNA, 25 bp, Homo sapien
ctaggtttagccttctaatccttct

SEQ ID NO: 256245 - DNA, 25 bp, Homo sapien
tagacgtaagtcttccaatggctcc

SEQ ID NO: 256246 - DNA, 25 bp, Homo sapien
agacgtaagtcttccaatggctcca

SEQ ID NO: 256247 - DNA, 25 bp, Homo sapien
gacgtaagtcttccaatggctccat

SEQ ID NO: 256248 - DNA, 25 bp, Homo sapien
attagacgtaagtcttccaatggct

SEQ ID NO: 256249 - DNA, 25 bp, Homo sapien
cggagcaggggcgatgagctgctgc

SEQ ID NO: 256250 - DNA, 25 bp, Homo sapien
gctgctgggaactggccggcgggag

SEQ ID NO: 256251 - DNA, 25 bp, Homo sapien
gcgggagcgccgccacagccttcgc

SEQ ID NO: 256252 - DNA, 25 bp, Homo sapien
cgaaggcgcggagcaggggcgatga

SEQ ID NO: 256253 - DNA, 25 bp, Homo sapien
ccccgcggggctgcgaccgtgcggg

SEQ ID NO: 256254 - DNA, 25 bp, Homo sapien
gactgctttctggtactcgctcgcg

SEQ ID NO: 256255 - DNA, 25 bp, Homo sapien
gagcggaagagcccgactgctttct

SEQ ID NO: 256256 - DNA, 25 bp, Homo sapien
cctccaagcgctgggcgattggctt

SEQ ID NO: 256257 - DNA, 25 bp, Homo sapien
agcgctgggcgattggcttcccgca

SEQ ID NO: 256258 - DNA, 25 bp, Homo sapien
agcgcctccagcctcccggctacac

SEQ ID NO: 256259 - DNA, 25 bp, Homo sapien
gcagcgcctccagcctcccggctac

SEQ ID NO: 256260 - DNA, 25 bp, Homo sapien
cgcctccagcctcccggctacacgg

SEQ ID NO: 256261 - DNA, 25 bp, Homo sapien
ctccagcctcccggctacacggaac

SEQ ID NO: 256262 - DNA, 25 bp, Homo sapien
cagtgtcaccggcttgtgcagcagc

SEQ ID NO: 256263 - DNA, 25 bp, Homo sapien
cacgcagcgctcacagaccgtgatc

SEQ ID NO: 256264 - DNA, 25 bp, Homo sapien
ggcttcctcgccaacagtggccgtt

SEQ ID NO: 256265 - DNA, 25 bp, Homo sapien
tcacagaccgtgatcccgcagggca

SEQ ID NO: 256266 - DNA, 25 bp, Homo sapien
ctcggccgggaagaacctctccagc

SEQ ID NO: 256267 - DNA, 25 bp, Homo sapien
tcggccgggaagaacctctccagca

SEQ ID NO: 256268 - DNA, 25 bp, Homo sapien
ggccgggaagaacctctccagcagg

SEQ ID NO: 256269 - DNA, 25 bp, Homo sapien
cgggaagaacctctccagcaggcgg

SEQ ID NO: 256270 - DNA, 25 bp, Homo sapien
caggctccgcgcctgaccctccagc

SEQ ID NO: 256271 - DNA, 25 bp, Homo sapien
gcctgaccctccagcctgcgcagcg

SEQ ID NO: 256272 - DNA, 25 bp, Homo sapien
gcgcctgaccctccagcctgcgcag

SEQ ID NO: 256273 - DNA, 25 bp, Homo sapien
gaccctccagcctgcgcagcgggca

SEQ ID NO: 256274 - DNA, 25 bp, Homo sapien
gggccgcgggaaacttatcagcatc

SEQ ID NO: 256275 - DNA, 25 bp, Homo sapien
gagctgctccgggggccgcgggaaa

SEQ ID NO: 256276 - DNA, 25 bp, Homo sapien
agagctgctccgggggccgcgggaa

SEQ ID NO: 256277 - DNA, 25 bp, Homo sapien
gggggccgcgggaaacttatcagca

SEQ ID NO: 256278 - DNA, 25 bp, Homo sapien
ctggtggtcctctggccctgaacgt

SEQ ID NO: 256279 - DNA, 25 bp, Homo sapien
ctggccctgaacgtggacctggtgt

SEQ ID NO: 256280 - DNA, 25 bp, Homo sapien
cagtgagcacccggctgagggacaa

SEQ ID NO: 256281 - DNA, 25 bp, Homo sapien
gagggtacgctgatgacttctgctg

SEQ ID NO: 256282 - DNA, 25 bp, Homo sapien
agaaaaaggcggtaaagcagagacg

SEQ ID NO: 256283 - DNA, 25 bp, Homo sapien
aaaaggcggtaaagcagagacgaga

SEQ ID NO: 256284 - DNA, 25 bp, Homo sapien
gaaaaaggcggtaaagcagagacga

SEQ ID NO: 256285 - DNA, 25 bp, Homo sapien
aggcggtaaagcagagacgagaaca

SEQ ID NO: 256286 - DNA, 25 bp, Homo sapien
aggaggatgacccccaatactggat

SEQ ID NO: 256287 - DNA, 25 bp, Homo sapien
gaggatgacccccaatactggatgg

SEQ ID NO: 256288 - DNA, 25 bp, Homo sapien
atggagaaggatgcccccctcagtc

SEQ ID NO: 256289 - DNA, 25 bp, Homo sapien
agatggagaaggatgcccccctcag

SEQ ID NO: 256290 - DNA, 25 bp, Homo sapien
gatttaatggtaaatcactataaac

SEQ ID NO: 256291 - DNA, 25 bp, Homo sapien
tggtaaatcactataaacatgaagg

SEQ ID NO: 256292 - DNA, 25 bp, Homo sapien
taatggtaaatcactataaacatga

SEQ ID NO: 256293 - DNA, 25 bp, Homo sapien
tttaatggtaaatcactataaacat

SEQ ID NO: 256294 - DNA, 25 bp, Homo sapien
gctctgatgccagggttgacagcac

SEQ ID NO: 256295 - DNA, 25 bp, Homo sapien
gtgctggcttgtagggaatattctt

SEQ ID NO: 256296 - DNA, 25 bp, Homo sapien
ggcttgtagggaatattcttaaaga

SEQ ID NO: 256297 - DNA, 25 bp, Homo sapien
tgttgttcccaatgaattatccaag

SEQ ID NO: 256298 - DNA, 25 bp, Homo sapien
tgttgttgttcccaatgaattatcc

SEQ ID NO: 256299 - DNA, 25 bp, Homo sapien
tctgtgtacccatgttgccaaagat

SEQ ID NO: 256300 - DNA, 25 bp, Homo sapien
ttccatagtctgtgtacccatgttg

SEQ ID NO: 256301 - DNA, 25 bp, Homo sapien
gttttccatagtctgtgtacccatg

SEQ ID NO: 256302 - DNA, 25 bp, Homo sapien
agtctgtgtacccatgttgccaaag

SEQ ID NO: 256303 - DNA, 25 bp, Homo sapien
tggccgacgatcccactggctcagt

SEQ ID NO: 256304 - DNA, 25 bp, Homo sapien
gagtgaggcgccctctcctggccga

SEQ ID NO: 256305 - DNA, 25 bp, Homo sapien
gatcccactggctcagtcacagcag

SEQ ID NO: 256306 - DNA, 25 bp, Homo sapien
actggctcagtcacagcaggaaagc

SEQ ID NO: 256307 - DNA, 25 bp, Homo sapien
ttaacacctgcaaagttaagcctga

SEQ ID NO: 256308 - DNA, 25 bp, Homo sapien
tggacacacggagatttaacacctg

SEQ ID NO: 256309 - DNA, 25 bp, Homo sapien
gataacttcctgacttgtgtttggg

SEQ ID NO: 256310 - DNA, 25 bp, Homo sapien
ggcggcaagcctctgacggagataa

SEQ ID NO: 256311 - DNA, 25 bp, Homo sapien
taggcttttagccacagtgcgatga

SEQ ID NO: 256312 - DNA, 25 bp, Homo sapien
ccacagtgcgatgattggaatgtgt

SEQ ID NO: 256313 - DNA, 25 bp, Homo sapien
ttaggcttttagccacagtgcgatg

SEQ ID NO: 256314 - DNA, 25 bp, Homo sapien
gattaaaggcctcacagtaacaggt

SEQ ID NO: 256315 - DNA, 25 bp, Homo sapien
acgggctcaacaaggccacagagca

SEQ ID NO: 256316 - DNA, 25 bp, Homo sapien
aaagcggcggtgaagatggattaaa

SEQ ID NO: 256317 - DNA, 25 bp, Homo sapien
aggaaccagccccacgggctcaaca

SEQ ID NO: 256318 - DNA, 25 bp, Homo sapien
gggactgtctttaaggatctctgca

SEQ ID NO: 256319 - DNA, 25 bp, Homo sapien
tgtaaccaaaatataggcagagccc

SEQ ID NO: 256320 - DNA, 25 bp, Homo sapien
cacattgagtatatgacatgggacc

SEQ ID NO: 256321 - DNA, 25 bp, Homo sapien
catggagctggcacaaagagcttta

SEQ ID NO: 256322 - DNA, 25 bp, Homo sapien
tagacaagctagagcttgagttgag

SEQ ID NO: 256323 - DNA, 25 bp, Homo sapien
gagcttgagttgaggggcttttatc

SEQ ID NO: 256324 - DNA, 25 bp, Homo sapien
ttagacaagctagagcttgagttga

SEQ ID NO: 256325 - DNA, 25 bp, Homo sapien
gcttgagttgaggggcttttatcct

SEQ ID NO: 256326 - DNA, 25 bp, Homo sapien
tctgtacatgagagctgaaacagcc

SEQ ID NO: 256327 - DNA, 25 bp, Homo sapien
ttctatacaaggctgagatctgtac

SEQ ID NO: 256328 - DNA, 25 bp, Homo sapien
cagcctcttgcttcttgatcatgaa

SEQ ID NO: 256329 - DNA, 25 bp, Homo sapien
tcttcagttagatccagaaagggtc

SEQ ID NO: 256330 - DNA, 25 bp, Homo sapien
gaaaccgctcagctttgcagtgata

SEQ ID NO: 256331 - DNA, 25 bp, Homo sapien
gattctccagaaaccgctcagcttt

SEQ ID NO: 256332 - DNA, 25 bp, Homo sapien
attctccagaaaccgctcagctttg

SEQ ID NO: 256333 - DNA, 25 bp, Homo sapien
agaaaccgctcagctttgcagtgat

SEQ ID NO: 256334 - DNA, 25 bp, Homo sapien
ctttcggagataattggagcttaac

SEQ ID NO: 256335 - DNA, 25 bp, Homo sapien
cacgggcggcgttgtacacggcggt

SEQ ID NO: 256336 - DNA, 25 bp, Homo sapien
cgttgtacacggcggtgcggaggtc

SEQ ID NO: 256337 - DNA, 25 bp, Homo sapien
acgggcggcgttgtacacggcggtg

SEQ ID NO: 256338 - DNA, 25 bp, Homo sapien
tcacgggcggcgttgtacacggcgg

SEQ ID NO: 256339 - DNA, 25 bp, Homo sapien
tagccagtcagctcgtccagttcct

SEQ ID NO: 256340 - DNA, 25 bp, Homo sapien
ctagccagtcagctcgtccagttcc

SEQ ID NO: 256341 - DNA, 25 bp, Homo sapien
tccagttcctcccggctccggccgc

SEQ ID NO: 256342 - DNA, 25 bp, Homo sapien
cggccgctgagcagcttctggagca

SEQ ID NO: 256343 - DNA, 25 bp, Homo sapien
cgccatcgaagtgcaccgagccacc

SEQ ID NO: 256344 - DNA, 25 bp, Homo sapien
catcgaagtgcaccgagccaccggc

SEQ ID NO: 256345 - DNA, 25 bp, Homo sapien
ccatcgaagtgcaccgagccaccgg

SEQ ID NO: 256346 - DNA, 25 bp, Homo sapien
gccatcgaagtgcaccgagccaccg

SEQ ID NO: 256347 - DNA, 25 bp, Homo sapien
tccgcaccacgtccaggtggtccgc

SEQ ID NO: 256348 - DNA, 25 bp, Homo sapien
cgcaccacgtccaggtggtccgcgc

SEQ ID NO: 256349 - DNA, 25 bp, Homo sapien
ctccgcaccacgtccaggtggtccg

SEQ ID NO: 256350 - DNA, 25 bp, Homo sapien
ccgcaccacgtccaggtggtccgcg

SEQ ID NO: 256351 - DNA, 25 bp, Homo sapien
agttggtgcgcgtggtgcggttcac

SEQ ID NO: 256352 - DNA, 25 bp, Homo sapien
gcgcgtggtgcggttcaccgaggcc

SEQ ID NO: 256353 - DNA, 25 bp, Homo sapien
gcgtggagttggtgcgcgtggtgcg

SEQ ID NO: 256354 - DNA, 25 bp, Homo sapien
tggtgcggttcaccgaggccccgcg

SEQ ID NO: 256355 - DNA, 25 bp, Homo sapien
ggcctggtgctcgccgaccaggtag

SEQ ID NO: 256356 - DNA, 25 bp, Homo sapien
gcagctgcaggatctccaggctgct

SEQ ID NO: 256357 - DNA, 25 bp, Homo sapien
aggatctccaggctgctggtctcgg

SEQ ID NO: 256358 - DNA, 25 bp, Homo sapien
tgcaggatctccaggctgctggtct

SEQ ID NO: 256359 - DNA, 25 bp, Homo sapien
gctgcaggatctccaggctgctggt

SEQ ID NO: 256360 - DNA, 25 bp, Homo sapien
ctggccgggagcaacggggtcatgc

SEQ ID NO: 256361 - DNA, 25 bp, Homo sapien
caacggggtcatgccgtagctatcc

SEQ ID NO: 256362 - DNA, 25 bp, Homo sapien
tggccgggagcaacggggtcatgcc

SEQ ID NO: 256363 - DNA, 25 bp, Homo sapien
gagcaacggggtcatgccgtagcta

SEQ ID NO: 256364 - DNA, 25 bp, Homo sapien
tccacgatgttggtgtggcccgtca

SEQ ID NO: 256365 - DNA, 25 bp, Homo sapien
ggctgagcctctacccctgtgacct

SEQ ID NO: 256366 - DNA, 25 bp, Homo sapien
aggctgcctacacccctggctggtg

SEQ ID NO: 256367 - DNA, 25 bp, Homo sapien
gggagaagatgcagcacggagcccc

SEQ ID NO: 256368 - DNA, 25 bp, Homo sapien
ctgttcagtacctcaggggagaaga

SEQ ID NO: 256369 - DNA, 25 bp, Homo sapien
tgggacagcagctttggtaagattc

SEQ ID NO: 256370 - DNA, 25 bp, Homo sapien
ctggtgggacagcagctttggtaag

SEQ ID NO: 256371 - DNA, 25 bp, Homo sapien
gggacagcagctttggtaagattcc

SEQ ID NO: 256372 - DNA, 25 bp, Homo sapien
ggtgggacagcagctttggtaagat

SEQ ID NO: 256373 - DNA, 25 bp, Homo sapien
tccagctcctcggtggtgttgacct

SEQ ID NO: 256374 - DNA, 25 bp, Homo sapien
tgacctccctggaatagtcataggc

SEQ ID NO: 256375 - DNA, 25 bp, Homo sapien
gcccttgtaagggatcttgttctta

SEQ ID NO: 256376 - DNA, 25 bp, Homo sapien
gtggcgtccatgtgggcccctgctt

SEQ ID NO: 256377 - DNA, 25 bp, Homo sapien
gggtttcacaaatatagtcgtattc

SEQ ID NO: 256378 - DNA, 25 bp, Homo sapien
gaagtgatgcaaatatactgttagg

SEQ ID NO: 256379 - DNA, 25 bp, Homo sapien
aaacattgacatgctacctcacagc

SEQ ID NO: 256380 - DNA, 25 bp, Homo sapien
ttctgagaagctcttaggaacattg

SEQ ID NO: 256381 - DNA, 25 bp, Homo sapien
gactacacattgagagctacttgct

SEQ ID NO: 256382 - DNA, 25 bp, Homo sapien
gggacagtttaaagaatcagtaaga

SEQ ID NO: 256383 - DNA, 25 bp, Homo sapien
gtggatgctgcccatctgaggacta

SEQ ID NO: 256384 - DNA, 25 bp, Homo sapien
tcagtatggagcatgcttcagagtc

SEQ ID NO: 256385 - DNA, 25 bp, Homo sapien
atttacatggataaagagtgaccac

SEQ ID NO: 256386 - DNA, 25 bp, Homo sapien
aagagtgaccactgtctttggctgg

SEQ ID NO: 256387 - DNA, 25 bp, Homo sapien
cttcactgaattcccacatgtgctt

SEQ ID NO: 256388 - DNA, 25 bp, Homo sapien
aattcccacatgtgcttggttgcaa

SEQ ID NO: 256389 - DNA, 25 bp, Homo sapien
gaactgctcctcatcgtttctctct

SEQ ID NO: 256390 - DNA, 25 bp, Homo sapien
tgctcctcatcgtttctctctgttt

SEQ ID NO: 256391 - DNA, 25 bp, Homo sapien
tgagccgttcctggcattcgaactg

SEQ ID NO: 256392 - DNA, 25 bp, Homo sapien
tgccacctgcttctcggtagggtcg

SEQ ID NO: 256393 - DNA, 25 bp, Homo sapien
gattccaagggtgtaattcgttcat

SEQ ID NO: 256394 - DNA, 25 bp, Homo sapien
tccaagggtgtaattcgttcatcat

SEQ ID NO: 256395 - DNA, 25 bp, Homo sapien
agggtgtaattcgttcatcattttc

SEQ ID NO: 256396 - DNA, 25 bp, Homo sapien
caagggtgtaattcgttcatcattt

SEQ ID NO: 256397 - DNA, 25 bp, Homo sapien
tcattagaaaggttgatgatttttc

SEQ ID NO: 256398 - DNA, 25 bp, Homo sapien
agaaaggttgatgatttttcactta

SEQ ID NO: 256399 - DNA, 25 bp, Homo sapien
ttcattagaaaggttgatgattttt

SEQ ID NO: 256400 - DNA, 25 bp, Homo sapien
cttcattagaaaggttgatgatttt

SEQ ID NO: 256401 - DNA, 25 bp, Homo sapien
ttcttgtactttgaggagttcctac

SEQ ID NO: 256402 - DNA, 25 bp, Homo sapien
ttgtactttgaggagttcctactct

SEQ ID NO: 256403 - DNA, 25 bp, Homo sapien
ctgctttcagtggctcttctgcttt

SEQ ID NO: 256404 - DNA, 25 bp, Homo sapien
tctttcttgtactttgaggagttcc

SEQ ID NO: 256405 - DNA, 25 bp, Homo sapien
gtgatcaaaatacttaactgtcctt

SEQ ID NO: 256406 - DNA, 25 bp, Homo sapien
tgatcaaaatacttaactgtccttt

SEQ ID NO: 256407 - DNA, 25 bp, Homo sapien
gatactaaatgtggcagggttcaac

SEQ ID NO: 256408 - DNA, 25 bp, Homo sapien
ctaaatgtggcagggttcaacaaat

SEQ ID NO: 256409 - DNA, 25 bp, Homo sapien
gcaaagatgttggtgttgatgaacg

SEQ ID NO: 256410 - DNA, 25 bp, Homo sapien
gggcaaaacggtcttggcctctgca

SEQ ID NO: 256411 - DNA, 25 bp, Homo sapien
ctccttcttgggcaaaacggtcttg

SEQ ID NO: 256412 - DNA, 25 bp, Homo sapien
ggcaaaacggtcttggcctctgcac

SEQ ID NO: 256413 - DNA, 25 bp, Homo sapien
tcttgggcaaaacggtcttggcctc

SEQ ID NO: 256414 - DNA, 25 bp, Homo sapien
gtgcttctgctcagccagttttatg

SEQ ID NO: 256415 - DNA, 25 bp, Homo sapien
tgtgcttctgctcagccagttttat

SEQ ID NO: 256416 - DNA, 25 bp, Homo sapien
ccctgtgcttctgctcagccagttt

SEQ ID NO: 256417 - DNA, 25 bp, Homo sapien
ctgtgcttctgctcagccagtttta

SEQ ID NO: 256418 - DNA, 25 bp, Homo sapien
cagagccatttattgagccccacaa

SEQ ID NO: 256419 - DNA, 25 bp, Homo sapien
gttcacagagccatttattgagccc

SEQ ID NO: 256420 - DNA, 25 bp, Homo sapien
ttattgagccccacaaccgaccaga

SEQ ID NO: 256421 - DNA, 25 bp, Homo sapien
gccatttattgagccccacaaccga

SEQ ID NO: 256422 - DNA, 25 bp, Homo sapien
tggctgtgcagtgtgtcacgctgct

SEQ ID NO: 256423 - DNA, 25 bp, Homo sapien
caccacatcacgtcttttcactgcc

SEQ ID NO: 256424 - DNA, 25 bp, Homo sapien
gtaatgcattaaccacgtcaatggc

SEQ ID NO: 256425 - DNA, 25 bp, Homo sapien
gatttgaggtggctgtaatgcatta

SEQ ID NO: 256426 - DNA, 25 bp, Homo sapien
cgtcaatggcttcccgctccttgtt

SEQ ID NO: 256427 - DNA, 25 bp, Homo sapien
ccttgttgtcaccaaagtgggccac

SEQ ID NO: 256428 - DNA, 25 bp, Homo sapien
tctgacattgtagtaaaagtaaatg

SEQ ID NO: 256429 - DNA, 25 bp, Homo sapien
tgcttgtgatcacctctgtatgaaa

SEQ ID NO: 256430 - DNA, 25 bp, Homo sapien
gccactgcttgtgatcacctctgta

SEQ ID NO: 256431 - DNA, 25 bp, Homo sapien
tactgagcccataatctcaggaatt

SEQ ID NO: 256432 - DNA, 25 bp, Homo sapien
ttgccattggaagggcaccattgcc

SEQ ID NO: 256433 - DNA, 25 bp, Homo sapien
tttggcgaggagaaagaacacaggc

SEQ ID NO: 256434 - DNA, 25 bp, Homo sapien
gaacacaggccttgatctgcatatt

SEQ ID NO: 256435 - DNA, 25 bp, Homo sapien
tttttatcaatgaagggaagtgcac

SEQ ID NO: 256436 - DNA, 25 bp, Homo sapien
actccaagtggctgcgttttcagcg

SEQ ID NO: 256437 - DNA, 25 bp, Homo sapien
actgccatcaagctgactccaagtg

SEQ ID NO: 256438 - DNA, 25 bp, Homo sapien
atagcagtcacctatcagcttcttg

SEQ ID NO: 256439 - DNA, 25 bp, Homo sapien
tcagcgagaggggaatagcagtcac

SEQ ID NO: 256440 - DNA, 25 bp, Homo sapien
aagtctgctgataagcacgctctga

SEQ ID NO: 256441 - DNA, 25 bp, Homo sapien
ggtcaaagaggaacaccagtggcag

SEQ ID NO: 256442 - DNA, 25 bp, Homo sapien
ccagtggcagaagagctaagagtga

SEQ ID NO: 256443 - DNA, 25 bp, Homo sapien
cacgctctgaaaatgcatgaccaag

SEQ ID NO: 256444 - DNA, 25 bp, Homo sapien
tatgacagacattgttcctccattt

SEQ ID NO: 256445 - DNA, 25 bp, Homo sapien
ttacagcaactttatatgacagaca

SEQ ID NO: 256446 - DNA, 25 bp, Homo sapien
cttgctgctaccattaattgggtgt

SEQ ID NO: 256447 - DNA, 25 bp, Homo sapien
gctgctaccattaattgggtgttta

SEQ ID NO: 256448 - DNA, 25 bp, Homo sapien
gctcctttacgccttcagccagctc

SEQ ID NO: 256449 - DNA, 25 bp, Homo sapien
tctgctcgctcctttacgccttcag

SEQ ID NO: 256450 - DNA, 25 bp, Homo sapien
ggcttctgctcgctcctttacgcct

SEQ ID NO: 256451 - DNA, 25 bp, Homo sapien
gctcgctcctttacgccttcagcca

SEQ ID NO: 256452 - DNA, 25 bp, Homo sapien
tctgcgagtcatatatggacaggag

SEQ ID NO: 256453 - DNA, 25 bp, Homo sapien
gcgagtcatatatggacaggagccg

SEQ ID NO: 256454 - DNA, 25 bp, Homo sapien
tgcgagtcatatatggacaggagcc

SEQ ID NO: 256455 - DNA, 25 bp, Homo sapien
cgagtcatatatggacaggagccgg

SEQ ID NO: 256456 - DNA, 25 bp, Homo sapien
agtcgggactcactgggccgatgga

SEQ ID NO: 256457 - DNA, 25 bp, Homo sapien
tctggaagtcgggactcactgggcc

SEQ ID NO: 256458 - DNA, 25 bp, Homo sapien
gaagtcgggactcactgggccgatg

SEQ ID NO: 256459 - DNA, 25 bp, Homo sapien
tcgggactcactgggccgatggaga

SEQ ID NO: 256460 - DNA, 25 bp, Homo sapien
ggaggttggagagggtttctagctg

SEQ ID NO: 256461 - DNA, 25 bp, Homo sapien
taggtccacggggttcatgctgtag

SEQ ID NO: 256462 - DNA, 25 bp, Homo sapien
ctaaaacaggtcgttagtctcaaat

SEQ ID NO: 256463 - DNA, 25 bp, Homo sapien
tgctgtagctgaccatggacttgag

SEQ ID NO: 256464 - DNA, 25 bp, Homo sapien
gaagagacacctgcacctgcctcac

SEQ ID NO: 256465 - DNA, 25 bp, Homo sapien
gacacctgcacctgcctcacgttcc

SEQ ID NO: 256466 - DNA, 25 bp, Homo sapien
cctgcacctgcctcacgttcccact

SEQ ID NO: 256467 - DNA, 25 bp, Homo sapien
acacctgcacctgcctcacgttccc

SEQ ID NO: 256468 - DNA, 25 bp, Homo sapien
ctcctcgtgctctgccgtacacagt

SEQ ID NO: 256469 - DNA, 25 bp, Homo sapien
ctgccgtacacagtcgtgcctgact

SEQ ID NO: 256470 - DNA, 25 bp, Homo sapien
tgcctcctcgtgctctgccgtacac

SEQ ID NO: 256471 - DNA, 25 bp, Homo sapien
gtacacagtcgtgcctgactggctg

SEQ ID NO: 256472 - DNA, 25 bp, Homo sapien
ttcgtgtcgtagatgtgccaccggg

SEQ ID NO: 256473 - DNA, 25 bp, Homo sapien
ccagcttcgtgtcgtagatgtgcca

SEQ ID NO: 256474 - DNA, 25 bp, Homo sapien
tgtgattcccagcttcgtgtcgtag

SEQ ID NO: 256475 - DNA, 25 bp, Homo sapien
catacttgtgattcccagcttcgtg

SEQ ID NO: 256476 - DNA, 25 bp, Homo sapien
tgtcacatgtggcctttttggccgg

SEQ ID NO: 256477 - DNA, 25 bp, Homo sapien
tcacatgtggcctttttggccggct

SEQ ID NO: 256478 - DNA, 25 bp, Homo sapien
catgtggcctttttggccggctcat

SEQ ID NO: 256479 - DNA, 25 bp, Homo sapien
acatgtggcctttttggccggctca

SEQ ID NO: 256480 - DNA, 25 bp, Homo sapien
tgaagcttgtactcttgaatcagag

SEQ ID NO: 256481 - DNA, 25 bp, Homo sapien
cttggataagatcttcagatctctc

SEQ ID NO: 256482 - DNA, 25 bp, Homo sapien
gatcgctgaggccattgcattgctt

SEQ ID NO: 256483 - DNA, 25 bp, Homo sapien
cctgcctcctgttggcttggataag

SEQ ID NO: 256484 - DNA, 25 bp, Homo sapien
cccagtgagtgttgcacctcaagac

SEQ ID NO: 256485 - DNA, 25 bp, Homo sapien
ctgactgtctatccatgtgtttgat

SEQ ID NO: 256486 - DNA, 25 bp, Homo sapien
tatgatggacattgttctgactgtc

SEQ ID NO: 256487 - DNA, 25 bp, Homo sapien
ctcccatatgaaacccagtgagtgt

SEQ ID NO: 256488 - DNA, 25 bp, Homo sapien
tattcccattgtagtctccctccag

SEQ ID NO: 256489 - DNA, 25 bp, Homo sapien
gaactatgagtctgaggcaacactg

SEQ ID NO: 256490 - DNA, 25 bp, Homo sapien
tcatgcccaataagtgaagagctgg

SEQ ID NO: 256491 - DNA, 25 bp, Homo sapien
ccagagtgcggaatcatgtgtaaca

SEQ ID NO: 256492 - DNA, 25 bp, Homo sapien
gtttttgttcgctgatggtgcagta

SEQ ID NO: 256493 - DNA, 25 bp, Homo sapien
cttagtttttgttcgctgatggtgc

SEQ ID NO: 256494 - DNA, 25 bp, Homo sapien
ttcgctgatggtgcagtagaggcca

SEQ ID NO: 256495 - DNA, 25 bp, Homo sapien
tttgttcgctgatggtgcagtagag

SEQ ID NO: 256496 - DNA, 25 bp, Homo sapien
ggaagcacgaaggacgcacaggtca

SEQ ID NO: 256497 - DNA, 25 bp, Homo sapien
caatcctggggttgcttcaggggct

SEQ ID NO: 256498 - DNA, 25 bp, Homo sapien
tctgcagtgcggctgcttcttgatt

SEQ ID NO: 256499 - DNA, 25 bp, Homo sapien
cccttcacgaaattgccccatgttt

SEQ ID NO: 256500 - DNA, 25 bp, Homo sapien
gtatcctgcgtggtcccctttcctg

SEQ ID NO: 256501 - DNA, 25 bp, Homo sapien
gattgtttctgtggaccccaccctg

SEQ ID NO: 256502 - DNA, 25 bp, Homo sapien
gctccttatgagtggtgttttccct

SEQ ID NO: 256503 - DNA, 25 bp, Homo sapien
tgtttctgtggaccccaccctgagt

SEQ ID NO: 256504 - DNA, 25 bp, Homo sapien
gagtcccacttcagatgtggtgctg

SEQ ID NO: 256505 - DNA, 25 bp, Homo sapien
cactcctgctggatgtttagaaggt

SEQ ID NO: 256506 - DNA, 25 bp, Homo sapien
aagcaaggacctagggaaataccag

SEQ ID NO: 256507 - DNA, 25 bp, Homo sapien
tccatctgtagatttcttggctgct

SEQ ID NO: 256508 - DNA, 25 bp, Homo sapien
cttttgtacctgtctctgcaagcat

SEQ ID NO: 256509 - DNA, 25 bp, Homo sapien
aggcctggtcaccagcttttgtacc

SEQ ID NO: 256510 - DNA, 25 bp, Homo sapien
gcctggtcaccagcttttgtacctg

SEQ ID NO: 256511 - DNA, 25 bp, Homo sapien
tacctgtctctgcaagcattgcatt

SEQ ID NO: 256512 - DNA, 25 bp, Homo sapien
gcagaaagggcccaatctggtggat

SEQ ID NO: 256513 - DNA, 25 bp, Homo sapien
gtcctgcctgggctgattggcaaag

SEQ ID NO: 256514 - DNA, 25 bp, Homo sapien
tggcaaagagctcactgacagtgtg

SEQ ID NO: 256515 - DNA, 25 bp, Homo sapien
tgactgggtccaggtcctgcctggg

SEQ ID NO: 256516 - DNA, 25 bp, Homo sapien
gcctgggctgattggcaaagagctc

SEQ ID NO: 256517 - DNA, 25 bp, Homo sapien
ttgggtatgtggatgatgtccagga

SEQ ID NO: 256518 - DNA, 25 bp, Homo sapien
tccaggatgttggcctggtgtccct

SEQ ID NO: 256519 - DNA, 25 bp, Homo sapien
tgggtatgtggatgatgtccaggat

SEQ ID NO: 256520 - DNA, 25 bp, Homo sapien
gcctggtgtccctgagacagcatta

SEQ ID NO: 256521 - DNA, 25 bp, Homo sapien
aagtcccatacctaaagcatcctgt

SEQ ID NO: 256522 - DNA, 25 bp, Homo sapien
agtcccatacctaaagcatcctgtc

SEQ ID NO: 256523 - DNA, 25 bp, Homo sapien
caagtcccatacctaaagcatcctg

SEQ ID NO: 256524 - DNA, 25 bp, Homo sapien
gagaggcacatctcaacacagctca

SEQ ID NO: 256525 - DNA, 25 bp, Homo sapien
aaggaccgttttctagatgagaggc

SEQ ID NO: 256526 - DNA, 25 bp, Homo sapien
tgttgctgagttcccatcgcctctg

SEQ ID NO: 256527 - DNA, 25 bp, Homo sapien
tgtggagcagttagagacacacagc

SEQ ID NO: 256528 - DNA, 25 bp, Homo sapien
agccctctcagcattatgcagtgcc

SEQ ID NO: 256529 - DNA, 25 bp, Homo sapien
cagcattatgcagtgcccctcctct

SEQ ID NO: 256530 - DNA, 25 bp, Homo sapien
tctcagcattatgcagtgcccctcc

SEQ ID NO: 256531 - DNA, 25 bp, Homo sapien
ccagccctctcagcattatgcagtg

SEQ ID NO: 256532 - DNA, 25 bp, Homo sapien
ctctgttcccgattcactgatgtcc

SEQ ID NO: 256533 - DNA, 25 bp, Homo sapien
gcctctgttcccgattcactgatgt

SEQ ID NO: 256534 - DNA, 25 bp, Homo sapien
tctgcctctgttcccgattcactga

SEQ ID NO: 256535 - DNA, 25 bp, Homo sapien
ctctgcctctgttcccgattcactg

SEQ ID NO: 256536 - DNA, 25 bp, Homo sapien
tttttacctgtattgaacattctgg

SEQ ID NO: 256537 - DNA, 25 bp, Homo sapien
tatatcctatttgcatgtgctttaa

SEQ ID NO: 256538 - DNA, 25 bp, Homo sapien
cattttgaggcccagtactcttcct

SEQ ID NO: 256539 - DNA, 25 bp, Homo sapien
aaattctgctgggtatgtattccca

SEQ ID NO: 256540 - DNA, 25 bp, Homo sapien
aaagatggaacacctccccaatttg

SEQ ID NO: 256541 - DNA, 25 bp, Homo sapien
gaacacctccccaatttgcatgcca

SEQ ID NO: 256542 - DNA, 25 bp, Homo sapien
gatggaacacctccccaatttgcat

SEQ ID NO: 256543 - DNA, 25 bp, Homo sapien
ggaacacctccccaatttgcatgcc

SEQ ID NO: 256544 - DNA, 25 bp, Homo sapien
tgcaccattgagaaagtgggtcgtt

SEQ ID NO: 256545 - DNA, 25 bp, Homo sapien
aaagtgggtcgttaactggctccag

SEQ ID NO: 256546 - DNA, 25 bp, Homo sapien
ttgtgaaggtttaagtcacagtcac

SEQ ID NO: 256547 - DNA, 25 bp, Homo sapien
tgaaggtttaagtcacagtcaccat

SEQ ID NO: 256548 - DNA, 25 bp, Homo sapien
tggagtaaaatcttgaggctgtcat

SEQ ID NO: 256549 - DNA, 25 bp, Homo sapien
cttccctaactctggagtaaaatct

SEQ ID NO: 256550 - DNA, 25 bp, Homo sapien
ggagtaaaatcttgaggctgtcatc

SEQ ID NO: 256551 - DNA, 25 bp, Homo sapien
agtaaaatcttgaggctgtcatctg

SEQ ID NO: 256552 - DNA, 25 bp, Homo sapien
ttgcagtgcctgtaggacttcgagg

SEQ ID NO: 256553 - DNA, 25 bp, Homo sapien
ctttgcagtgcctgtaggacttcga

SEQ ID NO: 256554 - DNA, 25 bp, Homo sapien
tgctgctgtcgctttgcagtgcctg

SEQ ID NO: 256555 - DNA, 25 bp, Homo sapien
gctgctgctgtcgctttgcagtgcc

SEQ ID NO: 256556 - DNA, 25 bp, Homo sapien
ctggcagccctaacacaggcagggc

SEQ ID NO: 256557 - DNA, 25 bp, Homo sapien
agatgaccccgatgagcccacttca

SEQ ID NO: 256558 - DNA, 25 bp, Homo sapien
catgtgtaagtgtccatgggcccca

SEQ ID NO: 256559 - DNA, 25 bp, Homo sapien
cctccactggaaagggcgagttcaa

SEQ ID NO: 256560 - DNA, 25 bp, Homo sapien
cagctcggggtatgtggctcccact

SEQ ID NO: 256561 - DNA, 25 bp, Homo sapien
ggctcaagccgccagctcggggtat

SEQ ID NO: 256562 - DNA, 25 bp, Homo sapien
tgaggtgagcctagataccacaggc

SEQ ID NO: 256563 - DNA, 25 bp, Homo sapien
ccaaccgcagtgaggtgagcctaga

SEQ ID NO: 256564 - DNA, 25 bp, Homo sapien
ggaaacattgtgcacctgccacgct

SEQ ID NO: 256565 - DNA, 25 bp, Homo sapien
agaggttgccctctagaatctagag

SEQ ID NO: 256566 - DNA, 25 bp, Homo sapien
tgccacgctccagcatgagcaaaca

SEQ ID NO: 256567 - DNA, 25 bp, Homo sapien
gattcccaaggaaacattgtgcacc

SEQ ID NO: 256568 - DNA, 25 bp, Homo sapien
caggggctggtttcatcaaaggcac

SEQ ID NO: 256569 - DNA, 25 bp, Homo sapien
caggggtcccagattgtctctgcaa

SEQ ID NO: 256570 - DNA, 25 bp, Homo sapien
gtggtgcccaatactccgtgcccag

SEQ ID NO: 256571 - DNA, 25 bp, Homo sapien
agctctctccaaccaagtgccagtt

SEQ ID NO: 256572 - DNA, 25 bp, Homo sapien
tctcctggctcgaagcaactgggtg

SEQ ID NO: 256573 - DNA, 25 bp, Homo sapien
gaggtgagccacagaaccatgccat

SEQ ID NO: 256574 - DNA, 25 bp, Homo sapien
agcgtgcaacagatgactcctccat

SEQ ID NO: 256575 - DNA, 25 bp, Homo sapien
agcctccagcgtgcaacagatgact

SEQ ID NO: 256576 - DNA, 25 bp, Homo sapien
ttgtgaatcttggccttaaaacatt

SEQ ID NO: 256577 - DNA, 25 bp, Homo sapien
tgtgaatcttggccttaaaacatta

SEQ ID NO: 256578 - DNA, 25 bp, Homo sapien
atgaaccagatttgctcatgcagat

SEQ ID NO: 256579 - DNA, 25 bp, Homo sapien
gtaatccagctactgaggaggctga

SEQ ID NO: 256580 - DNA, 25 bp, Homo sapien
atggcttgaacccgggaggtggagg

SEQ ID NO: 256581 - DNA, 25 bp, Homo sapien
ctgaggaggctgagggaagagaatg

SEQ ID NO: 256582 - DNA, 25 bp, Homo sapien
ttgcagtgagtcaagatcatgccac

SEQ ID NO: 256583 - DNA, 25 bp, Homo sapien
ggagctctttagatgagtctttaga

SEQ ID NO: 256584 - DNA, 25 bp, Homo sapien
tgagtgggcatcatattctcacggg

SEQ ID NO: 256585 - DNA, 25 bp, Homo sapien
tatagatggcttgtatcacctagag

SEQ ID NO: 256586 - DNA, 25 bp, Homo sapien
tatatcattggaaatcagtgacagt

SEQ ID NO: 256587 - DNA, 25 bp, Homo sapien
caagtggtgatggaaaggtgttaaa

SEQ ID NO: 256588 - DNA, 25 bp, Homo sapien
acactgtgcagaatgtgtggtctcc

SEQ ID NO: 256589 - DNA, 25 bp, Homo sapien
attcatttgatcaagtggtgatgga

SEQ ID NO: 256590 - DNA, 25 bp, Homo sapien
agttatttagtaatggtttctgaga

SEQ ID NO: 256591 - DNA, 25 bp, Homo sapien
gtgcaactattaagctccagtgtcg

SEQ ID NO: 256592 - DNA, 25 bp, Homo sapien
cagtgtcggatatggctgtgttgca

SEQ ID NO: 256593 - DNA, 25 bp, Homo sapien
cctgaaaacacactgaacactgatg

SEQ ID NO: 256594 - DNA, 25 bp, Homo sapien
ctgttccgttttagcccaaggtcag

SEQ ID NO: 256595 - DNA, 25 bp, Homo sapien
tttactccctctggattctaaatgg

SEQ ID NO: 256596 - DNA, 25 bp, Homo sapien
tccacttataactccatagaagcca

SEQ ID NO: 256597 - DNA, 25 bp, Homo sapien
ggtaatgttgctggctcagtgaagc

SEQ ID NO: 256598 - DNA, 25 bp, Homo sapien
gaaatccagacctcagtacagacgg

SEQ ID NO: 256599 - DNA, 25 bp, Homo sapien
acgttatgcttctcctatgttccca

SEQ ID NO: 256600 - DNA, 25 bp, Homo sapien
tcctatgttcccaatatgctggaca

SEQ ID NO: 256601 - DNA, 25 bp, Homo sapien
cgttatgcttctcctatgttcccaa

SEQ ID NO: 256602 - DNA, 25 bp, Homo sapien
gcttctcctatgttcccaatatgct

SEQ ID NO: 256603 - DNA, 25 bp, Homo sapien
gtttgcagtcactttcctatccctg

SEQ ID NO: 256604 - DNA, 25 bp, Homo sapien
tgtttgcagtcactttcctatccct

SEQ ID NO: 256605 - DNA, 25 bp, Homo sapien
caggtgtcacaggttactaaacaca

SEQ ID NO: 256606 - DNA, 25 bp, Homo sapien
ttatacagttggacgacaaagtcag

SEQ ID NO: 256607 - DNA, 25 bp, Homo sapien
acttatctcagattccctcctggag

SEQ ID NO: 256608 - DNA, 25 bp, Homo sapien
ggagtctactgccttgcttatacag

SEQ ID NO: 256609 - DNA, 25 bp, Homo sapien
gatttagcttagaacatgcatacct

SEQ ID NO: 256610 - DNA, 25 bp, Homo sapien
tgctttctttgtgcgcaagttgcca

SEQ ID NO: 256611 - DNA, 25 bp, Homo sapien
caagttgccatgagctaaagcctca

SEQ ID NO: 256612 - DNA, 25 bp, Homo sapien
tactatggatgctacagtcatgctt

SEQ ID NO: 256613 - DNA, 25 bp, Homo sapien
tgtggagtgctcttgagatacatat

SEQ ID NO: 256614 - DNA, 25 bp, Homo sapien
gcttcctaagaccactctatgcata

SEQ ID NO: 256615 - DNA, 25 bp, Homo sapien
tctatgcataactgtgttacacagg

SEQ ID NO: 256616 - DNA, 25 bp, Homo sapien
tgttctacaaggcaactttgagggt

SEQ ID NO: 256617 - DNA, 25 bp, Homo sapien
aattttcatgttagagtcagcttcc

SEQ ID NO: 256618 - DNA, 25 bp, Homo sapien
gaagtatcactatgagcagcgggct

SEQ ID NO: 256619 - DNA, 25 bp, Homo sapien
cactatagaagaggtgctgcactgc

SEQ ID NO: 256620 - DNA, 25 bp, Homo sapien
tgcactgcccaagtgtacagaaacg

SEQ ID NO: 256621 - DNA, 25 bp, Homo sapien
tacatttagaagcaagtcccaaggc

SEQ ID NO: 256622 - DNA, 25 bp, Homo sapien
tgggcttctgtattctggctttcca

SEQ ID NO: 256623 - DNA, 25 bp, Homo sapien
tccctctaccttctggccttctatc

SEQ ID NO: 256624 - DNA, 25 bp, Homo sapien
ggccttctatcttgggcttctgtat

SEQ ID NO: 256625 - DNA, 25 bp, Homo sapien
tatcttgggcttctgtattctggct

SEQ ID NO: 256626 - DNA, 25 bp, Homo sapien
tgggcctttggccttctcaccttct

SEQ ID NO: 256627 - DNA, 25 bp, Homo sapien
ttctgccttctgaatatctggctgg

SEQ ID NO: 256628 - DNA, 25 bp, Homo sapien
tggtctttgccttctgagatgtggc

SEQ ID NO: 256629 - DNA, 25 bp, Homo sapien
tcttgtttcgttcttggccttctgc

SEQ ID NO: 256630 - DNA, 25 bp, Homo sapien
tttctgtattttgttgctgcctact

SEQ ID NO: 256631 - DNA, 25 bp, Homo sapien
tcttgcctcgtcttctgtattcttg

SEQ ID NO: 256632 - DNA, 25 bp, Homo sapien
tgttctggcttcttgcctcgtcttc

SEQ ID NO: 256633 - DNA, 25 bp, Homo sapien
ctgtattttgttgctgcctactgac

SEQ ID NO: 256634 - DNA, 25 bp, Homo sapien
tgagatattggagggagctttcctg

SEQ ID NO: 256635 - DNA, 25 bp, Homo sapien
gaaattgagatattggagggagctt

SEQ ID NO: 256636 - DNA, 25 bp, Homo sapien
aatgagaattctagtgaatcacttc

SEQ ID NO: 256637 - DNA, 25 bp, Homo sapien
tagtgaatcacttctcccagtgagt

SEQ ID NO: 256638 - DNA, 25 bp, Homo sapien
ggaaacagctctgggacgacagcat

SEQ ID NO: 256639 - DNA, 25 bp, Homo sapien
tagaggcataggtagaggagtccca

SEQ ID NO: 256640 - DNA, 25 bp, Homo sapien
acagggtagtcacagaaaagagttc

SEQ ID NO: 256641 - DNA, 25 bp, Homo sapien
tgggacccaagcgttgaccagtagg

SEQ ID NO: 256642 - DNA, 25 bp, Homo sapien
gaatgctggtttgccatcgtcttgc

SEQ ID NO: 256643 - DNA, 25 bp, Homo sapien
ccaagatgagacttgtgaaccataa

SEQ ID NO: 256644 - DNA, 25 bp, Homo sapien
ctttgtccacgaggtcagactgctg

SEQ ID NO: 256645 - DNA, 25 bp, Homo sapien
ttgtgaaccataaggtctggttggg

SEQ ID NO: 256646 - DNA, 25 bp, Homo sapien
gatgaggcaggggaggaaaggagca

SEQ ID NO: 256647 - DNA, 25 bp, Homo sapien
ctgatgaggcaggggaggaaaggag

SEQ ID NO: 256648 - DNA, 25 bp, Homo sapien
tgaggcaggggaggaaaggagcaga

SEQ ID NO: 256649 - DNA, 25 bp, Homo sapien
atgaggcaggggaggaaaggagcag

SEQ ID NO: 256650 - DNA, 25 bp, Homo sapien
tctctgtcactggccctgtggtttg

SEQ ID NO: 256651 - DNA, 25 bp, Homo sapien
gaccgagttccatggagaagccagg

SEQ ID NO: 256652 - DNA, 25 bp, Homo sapien
gctttgtggctgtagaccgagttcc

SEQ ID NO: 256653 - DNA, 25 bp, Homo sapien
gctgtagaccgagttccatggagaa

SEQ ID NO: 256654 - DNA, 25 bp, Homo sapien
gaaactcatcttggccaatcattcc

SEQ ID NO: 256655 - DNA, 25 bp, Homo sapien
gtggacatacgattgaaactcatct

SEQ ID NO: 256656 - DNA, 25 bp, Homo sapien
tggcaggccaggaggtagtggacat

SEQ ID NO: 256657 - DNA, 25 bp, Homo sapien
gaggtagtggacatacgattgaaac

SEQ ID NO: 256658 - DNA, 25 bp, Homo sapien
ttctcagcacctgcctgatcactgg

SEQ ID NO: 256659 - DNA, 25 bp, Homo sapien
agcacctgcctgatcactggaaccg

SEQ ID NO: 256660 - DNA, 25 bp, Homo sapien
acctgcctgatcactggaaccgccc

SEQ ID NO: 256661 - DNA, 25 bp, Homo sapien
gcacctgcctgatcactggaaccgc

SEQ ID NO: 256662 - DNA, 25 bp, Homo sapien
acacccaccttcttccagtgcttaa

SEQ ID NO: 256663 - DNA, 25 bp, Homo sapien
ggtgttgtcacccattcccctactg

SEQ ID NO: 256664 - DNA, 25 bp, Homo sapien
tggagtagattttggtgttgtcacc

SEQ ID NO: 256665 - DNA, 25 bp, Homo sapien
tctcaggatcttatttcacacccac

SEQ ID NO: 256666 - DNA, 25 bp, Homo sapien
caatggcatcccatgctgtctcctg

SEQ ID NO: 256667 - DNA, 25 bp, Homo sapien
aggcaatggcatcccatgctgtctc

SEQ ID NO: 256668 - DNA, 25 bp, Homo sapien
ctaggcaatggcatcccatgctgtc

SEQ ID NO: 256669 - DNA, 25 bp, Homo sapien
gcaatggcatcccatgctgtctcct

SEQ ID NO: 256670 - DNA, 25 bp, Homo sapien
cactctgggtgttctctcgctgcct

SEQ ID NO: 256671 - DNA, 25 bp, Homo sapien
tccctcaggtgtcccattgtggcct

SEQ ID NO: 256672 - DNA, 25 bp, Homo sapien
tccatgcagcttggtccgatcagga

SEQ ID NO: 256673 - DNA, 25 bp, Homo sapien
ttttccctcaggtgtcccattgtgg

SEQ ID NO: 256674 - DNA, 25 bp, Homo sapien
ctggtttgacagttcccacaatatc

SEQ ID NO: 256675 - DNA, 25 bp, Homo sapien
cacaagatctagttctgatgagcct

SEQ ID NO: 256676 - DNA, 25 bp, Homo sapien
gatgagcctcatctgtggtcgcctt

SEQ ID NO: 256677 - DNA, 25 bp, Homo sapien
tcggaacccgatgagccttatctgg

SEQ ID NO: 256678 - DNA, 25 bp, Homo sapien
ggtcgccttctgcagttctcacaag

SEQ ID NO: 256679 - DNA, 25 bp, Homo sapien
tcaattcttaaaagactcacggagt

SEQ ID NO: 256680 - DNA, 25 bp, Homo sapien
tcacggagtggtgggttgttatttc

SEQ ID NO: 256681 - DNA, 25 bp, Homo sapien
cttaaaagactcacggagtggtggg

SEQ ID NO: 256682 - DNA, 25 bp, Homo sapien
cggagtggtgggttgttatttccat

SEQ ID NO: 256683 - DNA, 25 bp, Homo sapien
ctttgaccatctgatttatctgaaa

SEQ ID NO: 256684 - DNA, 25 bp, Homo sapien
actttgaccatctgatttatctgaa

SEQ ID NO: 256685 - DNA, 25 bp, Homo sapien
atagatcacctttgcattggctttc

SEQ ID NO: 256686 - DNA, 25 bp, Homo sapien
acataatcaataggttcatgaggaa

SEQ ID NO: 256687 - DNA, 25 bp, Homo sapien
cataatcaataggttcatgaggaag

SEQ ID NO: 256688 - DNA, 25 bp, Homo sapien
aacataatcaataggttcatgagga

SEQ ID NO: 256689 - DNA, 25 bp, Homo sapien
aaacataatcaataggttcatgagg

SEQ ID NO: 256690 - DNA, 25 bp, Homo sapien
tttggaaagaagttccactgtgtgt

SEQ ID NO: 256691 - DNA, 25 bp, Homo sapien
tgtaaaatgctgtccaatggcatca

SEQ ID NO: 256692 - DNA, 25 bp, Homo sapien
gcaggctttcagaggattgattccg

SEQ ID NO: 256693 - DNA, 25 bp, Homo sapien
tggcatcatacctcccagagatctt

SEQ ID NO: 256694 - DNA, 25 bp, Homo sapien
cagctgctgcgagtgttccagtcac

SEQ ID NO: 256695 - DNA, 25 bp, Homo sapien
tgttccagtcaccttgtccaccttt

SEQ ID NO: 256696 - DNA, 25 bp, Homo sapien
tgatggcactaatttccccagctgc

SEQ ID NO: 256697 - DNA, 25 bp, Homo sapien
tcagtcccttctttcaatactgatg

SEQ ID NO: 256698 - DNA, 25 bp, Homo sapien
tcttggtgggcctcttcgtgatgtg

SEQ ID NO: 256699 - DNA, 25 bp, Homo sapien
acttcagctatgcagggcccagtgg

SEQ ID NO: 256700 - DNA, 25 bp, Homo sapien
gacagtcatagtcgcccttggtggg

SEQ ID NO: 256701 - DNA, 25 bp, Homo sapien
gctggcccctctagggacctggctg

SEQ ID NO: 256702 - DNA, 25 bp, Homo sapien
taatgttcacacttgctgggccagt

SEQ ID NO: 256703 - DNA, 25 bp, Homo sapien
gtaccgcagccgtaatgttcacact

SEQ ID NO: 256704 - DNA, 25 bp, Homo sapien
tggtctggcagccttgtgtaccgca

SEQ ID NO: 256705 - DNA, 25 bp, Homo sapien
tggcagccttgtgtaccgcagccgt

SEQ ID NO: 256706 - DNA, 25 bp, Homo sapien
tccatctgggttctagccagtgcca

SEQ ID NO: 256707 - DNA, 25 bp, Homo sapien
agccagtgccatcgccatcagcagt

SEQ ID NO: 256708 - DNA, 25 bp, Homo sapien
acttgtgggtgcaggaagcaccggt

SEQ ID NO: 256709 - DNA, 25 bp, Homo sapien
agaagtctcctcctcgtctggattc

SEQ ID NO: 256710 - DNA, 25 bp, Homo sapien
ccatgtaagcaatgtcgagaaatac

SEQ ID NO: 256711 - DNA, 25 bp, Homo sapien
cgagaaatacgtgggtaagcgccat

SEQ ID NO: 256712 - DNA, 25 bp, Homo sapien
taagcaatgtcgagaaatacgtggg

SEQ ID NO: 256713 - DNA, 25 bp, Homo sapien
ccccacgttccatgtaagcaatgtc

SEQ ID NO: 256714 - DNA, 25 bp, Homo sapien
agtcagctcacgctgggccacatgg

SEQ ID NO: 256715 - DNA, 25 bp, Homo sapien
gcctcagtcctgacgtggtctctga

SEQ ID NO: 256716 - DNA, 25 bp, Homo sapien
agtggcccatgtgccggacagtcag

SEQ ID NO: 256717 - DNA, 25 bp, Homo sapien
ggttctggattcagcactgcatctg

SEQ ID NO: 256718 - DNA, 25 bp, Homo sapien
cgtccacttgaattgcgggcaagaa

SEQ ID NO: 256719 - DNA, 25 bp, Homo sapien
ccaaatttccataacgtccacttga

SEQ ID NO: 256720 - DNA, 25 bp, Homo sapien
caagaagattgaacataatgcgaag

SEQ ID NO: 256721 - DNA, 25 bp, Homo sapien
gtcctggtttctggccttgactctc

SEQ ID NO: 256722 - DNA, 25 bp, Homo sapien
gatggtattcacagtcaccaaggct

SEQ ID NO: 256723 - DNA, 25 bp, Homo sapien
actttgtgaactctgaagcccctca

SEQ ID NO: 256724 - DNA, 25 bp, Homo sapien
caccaaggcttaggattgttgcggg

SEQ ID NO: 256725 - DNA, 25 bp, Homo sapien
cacggagtgcacgtaactgcctcca

SEQ ID NO: 256726 - DNA, 25 bp, Homo sapien
acacttggtgctcctcgccggtgat

SEQ ID NO: 256727 - DNA, 25 bp, Homo sapien
cacacttggtgctcctcgccggtga

SEQ ID NO: 256728 - DNA, 25 bp, Homo sapien
acttggtgctcctcgccggtgatga

SEQ ID NO: 256729 - DNA, 25 bp, Homo sapien
cttggtgctcctcgccggtgatgac

SEQ ID NO: 256730 - DNA, 25 bp, Homo sapien
cagggctgcctcatgcccctgcctg

SEQ ID NO: 256731 - DNA, 25 bp, Homo sapien
gctgcctcatgcccctgcctgagtt

SEQ ID NO: 256732 - DNA, 25 bp, Homo sapien
cctcatgcccctgcctgagttgcca

SEQ ID NO: 256733 - DNA, 25 bp, Homo sapien
tgcctcatgcccctgcctgagttgc

SEQ ID NO: 256734 - DNA, 25 bp, Homo sapien
gacttttctcatcccgtcccgctct

SEQ ID NO: 256735 - DNA, 25 bp, Homo sapien
cactcatcttattgaactgactttt

SEQ ID NO: 256736 - DNA, 25 bp, Homo sapien
catcccgtcccgctctgtggagttg

SEQ ID NO: 256737 - DNA, 25 bp, Homo sapien
ctgacgtatacacagtcactcatct

SEQ ID NO: 256738 - DNA, 25 bp, Homo sapien
aaggcgtccccatctgatgaggaag

SEQ ID NO: 256739 - DNA, 25 bp, Homo sapien
caggaactcgggaaggcgtccccat

SEQ ID NO: 256740 - DNA, 25 bp, Homo sapien
actcgggaaggcgtccccatctgat

SEQ ID NO: 256741 - DNA, 25 bp, Homo sapien
tggccaggaactcgggaaggcgtcc

SEQ ID NO: 256742 - DNA, 25 bp, Homo sapien
ctgacactgatttggtacagggtgg

SEQ ID NO: 256743 - DNA, 25 bp, Homo sapien
gacactgatttggtacagggtggcc

SEQ ID NO: 256744 - DNA, 25 bp, Homo sapien
tgactgacactgatttggtacaggg

SEQ ID NO: 256745 - DNA, 25 bp, Homo sapien
actgatttggtacagggtggcccag

SEQ ID NO: 256746 - DNA, 25 bp, Homo sapien
cttgagctgattttggccatggcct

SEQ ID NO: 256747 - DNA, 25 bp, Homo sapien
cctgtgctgtcccaacatgtccctt

SEQ ID NO: 256748 - DNA, 25 bp, Homo sapien
acatgtcccttgagctgattttggc

SEQ ID NO: 256749 - DNA, 25 bp, Homo sapien
gaaagccacggtggtgaggattgca

SEQ ID NO: 256750 - DNA, 25 bp, Homo sapien
cagcactaggaacctctggaggcct

SEQ ID NO: 256751 - DNA, 25 bp, Homo sapien
agccagcactaggaacctctggagg

SEQ ID NO: 256752 - DNA, 25 bp, Homo sapien
gagccagcactaggaacctctggag

SEQ ID NO: 256753 - DNA, 25 bp, Homo sapien
agcactaggaacctctggaggcctt

SEQ ID NO: 256754 - DNA, 25 bp, Homo sapien
tgcagccacgccttgcacgccaagg

SEQ ID NO: 256755 - DNA, 25 bp, Homo sapien
gaagtgaatgtgcactgtgcccaga

SEQ ID NO: 256756 - DNA, 25 bp, Homo sapien
cttccaccagtgtgcatgttgagat

SEQ ID NO: 256757 - DNA, 25 bp, Homo sapien
agcctgtctgcgatgccccatttgg

SEQ ID NO: 256758 - DNA, 25 bp, Homo sapien
gcttcatgtgtcgagaacagatctc

SEQ ID NO: 256759 - DNA, 25 bp, Homo sapien
cgcttcatgccggtccattgctgga

SEQ ID NO: 256760 - DNA, 25 bp, Homo sapien
tagctcttcctgaattacaggctga

SEQ ID NO: 256761 - DNA, 25 bp, Homo sapien
tctcccaaggcctgaacgcttcatg

SEQ ID NO: 256762 - DNA, 25 bp, Homo sapien
taagggctgaagctccgtattcttc

SEQ ID NO: 256763 - DNA, 25 bp, Homo sapien
gtaggcttgcctcacactatgcagg

SEQ ID NO: 256764 - DNA, 25 bp, Homo sapien
actatgcaggttcatccaggtgagc

SEQ ID NO: 256765 - DNA, 25 bp, Homo sapien
gctgtttgcatatcctaagggctga

SEQ ID NO: 256766 - DNA, 25 bp, Homo sapien
gggcatatccagatgctgcatctgg

SEQ ID NO: 256767 - DNA, 25 bp, Homo sapien
tgccggatggcccattcattgggtt

SEQ ID NO: 256768 - DNA, 25 bp, Homo sapien
ggcctaggttcccagatgttgagca

SEQ ID NO: 256769 - DNA, 25 bp, Homo sapien
ggaccacattccctacacagctgtg

SEQ ID NO: 256770 - DNA, 25 bp, Homo sapien
gtgacagggcattggtgaccctcac

SEQ ID NO: 256771 - DNA, 25 bp, Homo sapien
cctgtcctctgggtgacagggcatt

SEQ ID NO: 256772 - DNA, 25 bp, Homo sapien
ctggtgaagtgatggggacagcctg

SEQ ID NO: 256773 - DNA, 25 bp, Homo sapien
agcctggctctgagactctctcttc

SEQ ID NO: 256774 - DNA, 25 bp, Homo sapien
gaactgcgtggactttattttagct

SEQ ID NO: 256775 - DNA, 25 bp, Homo sapien
tgttctcagaactcaggactgtggt

SEQ ID NO: 256776 - DNA, 25 bp, Homo sapien
ttacacttgactctttgaactgcgt

SEQ ID NO: 256777 - DNA, 25 bp, Homo sapien
gctgtggaagagaacattcgtctgg

SEQ ID NO: 256778 - DNA, 25 bp, Homo sapien
aacccataaagacctggcaggtagg

SEQ ID NO: 256779 - DNA, 25 bp, Homo sapien
tgatggtccatgtgcgtgcaaggcc

SEQ ID NO: 256780 - DNA, 25 bp, Homo sapien
tgtgtgatggtccatgtgcgtgcaa

SEQ ID NO: 256781 - DNA, 25 bp, Homo sapien
ttctgcctgagggtcagcaccaacc

SEQ ID NO: 256782 - DNA, 25 bp, Homo sapien
gagcagcgatgcagatgtaggatca

SEQ ID NO: 256783 - DNA, 25 bp, Homo sapien
tgcagatgtaggatcagtgccagca

SEQ ID NO: 256784 - DNA, 25 bp, Homo sapien
gcagcgatgcagatgtaggatcagt

SEQ ID NO: 256785 - DNA, 25 bp, Homo sapien
gcgatgcagatgtaggatcagtgcc

SEQ ID NO: 256786 - DNA, 25 bp, Homo sapien
ccttccagggttgatggctcaggag

SEQ ID NO: 256787 - DNA, 25 bp, Homo sapien
acaggttccttgtgagacacctggg

SEQ ID NO: 256788 - DNA, 25 bp, Homo sapien
gggactccaaacagccggaatccat

SEQ ID NO: 256789 - DNA, 25 bp, Homo sapien
ggagacagggatcctccgcctcctt

SEQ ID NO: 256790 - DNA, 25 bp, Homo sapien
attcctggagcagtgtccccggggc

SEQ ID NO: 256791 - DNA, 25 bp, Homo sapien
cattacccacttgttttgtggattg

SEQ ID NO: 256792 - DNA, 25 bp, Homo sapien
gggtggacctcacttcctctcgcag

SEQ ID NO: 256793 - DNA, 25 bp, Homo sapien
gtggattgtgacaaatcgagaagta

SEQ ID NO: 256794 - DNA, 25 bp, Homo sapien
ggagtaggtggtgcattgtcccctt

SEQ ID NO: 256795 - DNA, 25 bp, Homo sapien
tctcacgagttcctgtggagtaggt

SEQ ID NO: 256796 - DNA, 25 bp, Homo sapien
gagtaggtggtgcattgtccccttt

SEQ ID NO: 256797 - DNA, 25 bp, Homo sapien
gctgtttcattctcacgagttcctg

SEQ ID NO: 256798 - DNA, 25 bp, Homo sapien
tcagcacagacttcgtggccgcatg

SEQ ID NO: 256799 - DNA, 25 bp, Homo sapien
ggctgctcctctagatgggattctg

SEQ ID NO: 256800 - DNA, 25 bp, Homo sapien
acagaagttatagccctgatgggtc

SEQ ID NO: 256801 - DNA, 25 bp, Homo sapien
gccgcatgcaaagacgcctgcagga

SEQ ID NO: 256802 - DNA, 25 bp, Homo sapien
tgattcccatcgctcaggcttggcg

SEQ ID NO: 256803 - DNA, 25 bp, Homo sapien
caggcttggcgttttctttgagcaa

SEQ ID NO: 256804 - DNA, 25 bp, Homo sapien
ggctctgatccatacatgattccca

SEQ ID NO: 256805 - DNA, 25 bp, Homo sapien
ctccacagttcaggtggctctgatc

SEQ ID NO: 256806 - DNA, 25 bp, Homo sapien
tcggggacctatgtgtctcttcaga

SEQ ID NO: 256807 - DNA, 25 bp, Homo sapien
agatggccactggaatcggggacct

SEQ ID NO: 256808 - DNA, 25 bp, Homo sapien
tctgtccctgccgagcacagccacc

SEQ ID NO: 256809 - DNA, 25 bp, Homo sapien
gcacagccaccaaattgtggcctct

SEQ ID NO: 256810 - DNA, 25 bp, Homo sapien
gttccccactttatgtcttagcatt

SEQ ID NO: 256811 - DNA, 25 bp, Homo sapien
gtcttagcatttccacccatgtcca

SEQ ID NO: 256812 - DNA, 25 bp, Homo sapien
tgagcctttagcatttcgttcatga

SEQ ID NO: 256813 - DNA, 25 bp, Homo sapien
ttcgttcatgagattttccatctgg

SEQ ID NO: 256814 - DNA, 25 bp, Homo sapien
ttgttgatctctgccgctagcctct

SEQ ID NO: 256815 - DNA, 25 bp, Homo sapien
ttgacaagcaatggacacggtctgt

SEQ ID NO: 256816 - DNA, 25 bp, Homo sapien
cgcctcggtacccactgttgttgat

SEQ ID NO: 256817 - DNA, 25 bp, Homo sapien
gaaggctggcgtttccagcgacaga

SEQ ID NO: 256818 - DNA, 25 bp, Homo sapien
tcgtggattccgctttggtgctgag

SEQ ID NO: 256819 - DNA, 25 bp, Homo sapien
agagcccctctgaatctcgtggatt

SEQ ID NO: 256820 - DNA, 25 bp, Homo sapien
gaaggaatcagtggctcattagttt

SEQ ID NO: 256821 - DNA, 25 bp, Homo sapien
gagggcctcagcaaggtcttgggaa

SEQ ID NO: 256822 - DNA, 25 bp, Homo sapien
ccattgaaagtctgactaggcctga

SEQ ID NO: 256823 - DNA, 25 bp, Homo sapien
gccagcctcccattgaaagtctgac

SEQ ID NO: 256824 - DNA, 25 bp, Homo sapien
ccagcctcccattgaaagtctgact

SEQ ID NO: 256825 - DNA, 25 bp, Homo sapien
ctcccattgaaagtctgactaggcc

SEQ ID NO: 256826 - DNA, 25 bp, Homo sapien
ggttccaagaaaggcctgctggact

SEQ ID NO: 256827 - DNA, 25 bp, Homo sapien
caagccccatcttttgacgtggctg

SEQ ID NO: 256828 - DNA, 25 bp, Homo sapien
ctcgggagcctgtttgttgtgtcca

SEQ ID NO: 256829 - DNA, 25 bp, Homo sapien
gagctagccccgtgttcatttccat

SEQ ID NO: 256830 - DNA, 25 bp, Homo sapien
gcctgcaccgttacggacttcccac

SEQ ID NO: 256831 - DNA, 25 bp, Homo sapien
ccctgctgcctgcaccgttacggac

SEQ ID NO: 256832 - DNA, 25 bp, Homo sapien
tcatcctgtaagctcctcccttcct

SEQ ID NO: 256833 - DNA, 25 bp, Homo sapien
ctgctgcctgcaccgttacggactt

SEQ ID NO: 256834 - DNA, 25 bp, Homo sapien
atggtctccagcttggatggtggct

SEQ ID NO: 256835 - DNA, 25 bp, Homo sapien
gccgacttcgttttgttcttgctgg

SEQ ID NO: 256836 - DNA, 25 bp, Homo sapien
taggcctgcgtagcactgcagtcat

SEQ ID NO: 256837 - DNA, 25 bp, Homo sapien
ccttaggcctgcgtagcactgcagt

SEQ ID NO: 256838 - DNA, 25 bp, Homo sapien
ttaggcctgcgtagcactgcagtca

SEQ ID NO: 256839 - DNA, 25 bp, Homo sapien
cttaggcctgcgtagcactgcagtc

SEQ ID NO: 256840 - DNA, 25 bp, Homo sapien
tatagtagtactcactccctgaggg

SEQ ID NO: 256841 - DNA, 25 bp, Homo sapien
gcataggaggctttagggctgtttc

SEQ ID NO: 256842 - DNA, 25 bp, Homo sapien
ccattaattttatagtagtactcac

SEQ ID NO: 256843 - DNA, 25 bp, Homo sapien
gggaaactccccgagaagatggaga

SEQ ID NO: 256844 - DNA, 25 bp, Homo sapien
tctgcggccagcttctttgaggcct

SEQ ID NO: 256845 - DNA, 25 bp, Homo sapien
ttgtccatggcgctgactactgagg

SEQ ID NO: 256846 - DNA, 25 bp, Homo sapien
tactgaggacagcttcggtgtggct

SEQ ID NO: 256847 - DNA, 25 bp, Homo sapien
tcggtgtggcttttctgcggccagc

SEQ ID NO: 256848 - DNA, 25 bp, Homo sapien
gctgcagcagcttcgggataacttg

SEQ ID NO: 256849 - DNA, 25 bp, Homo sapien
cagcagcttcgggataacttgagga

SEQ ID NO: 256850 - DNA, 25 bp, Homo sapien
cttcgggataacttgaggatgcatc

SEQ ID NO: 256851 - DNA, 25 bp, Homo sapien
ggataacttgaggatgcatcctggg

SEQ ID NO: 256852 - DNA, 25 bp, Homo sapien
gtgggctgctgtatcgaaggtgaca

SEQ ID NO: 256853 - DNA, 25 bp, Homo sapien
tgtatcgaaggtgacagtggttgta

SEQ ID NO: 256854 - DNA, 25 bp, Homo sapien
ctgctgtatcgaaggtgacagtggt

SEQ ID NO: 256855 - DNA, 25 bp, Homo sapien
tatcgaaggtgacagtggttgtatt

SEQ ID NO: 256856 - DNA, 25 bp, Homo sapien
gcaatttgtggccagctgcacttgg

SEQ ID NO: 256857 - DNA, 25 bp, Homo sapien
gtgcactctcgaacatggcagggcc

SEQ ID NO: 256858 - DNA, 25 bp, Homo sapien
accaacagcggttccctggcccatg

SEQ ID NO: 256859 - DNA, 25 bp, Homo sapien
tcaggaatgggaaccagcacttgtg

SEQ ID NO: 256860 - DNA, 25 bp, Homo sapien
gggcaggcaacaagttttcataacc

SEQ ID NO: 256861 - DNA, 25 bp, Homo sapien
ggcaggcaacaagttttcataaccc

SEQ ID NO: 256862 - DNA, 25 bp, Homo sapien
gaactacagccagtattactatctg

SEQ ID NO: 256863 - DNA, 25 bp, Homo sapien
agccagtattactatctggcgcagg

SEQ ID NO: 256864 - DNA, 25 bp, Homo sapien
tttttagaactacagccagtattac

SEQ ID NO: 256865 - DNA, 25 bp, Homo sapien
gtattactatctggcgcaggcaaca

SEQ ID NO: 256866 - DNA, 25 bp, Homo sapien
ttggatataaagtacaagagagtag

SEQ ID NO: 256867 - DNA, 25 bp, Homo sapien
tccataaattggagcaacataaagt

SEQ ID NO: 256868 - DNA, 25 bp, Homo sapien
taaagtacaagagagtagatatcca

SEQ ID NO: 256869 - DNA, 25 bp, Homo sapien
agcaacataaagtctgaaactcctc

SEQ ID NO: 256870 - DNA, 25 bp, Homo sapien
ccatagattctctgaattcttcaaa

SEQ ID NO: 256871 - DNA, 25 bp, Homo sapien
gattctctgaattcttcaaatagat

SEQ ID NO: 256872 - DNA, 25 bp, Homo sapien
tagattctctgaattcttcaaatag

SEQ ID NO: 256873 - DNA, 25 bp, Homo sapien
cttccatagattctctgaattcttc

SEQ ID NO: 256874 - DNA, 25 bp, Homo sapien
ctttgcttcacagcaagctgagcca

SEQ ID NO: 256875 - DNA, 25 bp, Homo sapien
ttttttagaggacaaacactagctg

SEQ ID NO: 256876 - DNA, 25 bp, Homo sapien
gtagctactgcaatcaagcactagt

SEQ ID NO: 256877 - DNA, 25 bp, Homo sapien
gcaatcaagcactagtataactgag

SEQ ID NO: 256878 - DNA, 25 bp, Homo sapien
gctactgcaatcaagcactagtata

SEQ ID NO: 256879 - DNA, 25 bp, Homo sapien
tcaagcactagtataactgagagag

SEQ ID NO: 256880 - DNA, 25 bp, Homo sapien
agtggaaatgatccacttctattca

SEQ ID NO: 256881 - DNA, 25 bp, Homo sapien
gtggaaatgatccacttctattcaa

SEQ ID NO: 256882 - DNA, 25 bp, Homo sapien
ctagtggaaatgatccacttctatt

SEQ ID NO: 256883 - DNA, 25 bp, Homo sapien
tagtggaaatgatccacttctattc

SEQ ID NO: 256884 - DNA, 25 bp, Homo sapien
taagcaatggatgttctgtaaaagt

SEQ ID NO: 256885 - DNA, 25 bp, Homo sapien
ctctaagcaatggatgttctgtaaa

SEQ ID NO: 256886 - DNA, 25 bp, Homo sapien
aagttgggggaagctttgaagctgt

SEQ ID NO: 256887 - DNA, 25 bp, Homo sapien
gcaatggatgttctgtaaaagttgg

SEQ ID NO: 256888 - DNA, 25 bp, Homo sapien
ctgccaacagcagaacaactgatca

SEQ ID NO: 256889 - DNA, 25 bp, Homo sapien
tgccaacagcagaacaactgatcaa

SEQ ID NO: 256890 - DNA, 25 bp, Homo sapien
gccaacagcagaacaactgatcaac

SEQ ID NO: 256891 - DNA, 25 bp, Homo sapien
caacagcagaacaactgatcaacag

SEQ ID NO: 256892 - DNA, 25 bp, Homo sapien
gaagcagcagagagttgtttagcac

SEQ ID NO: 256893 - DNA, 25 bp, Homo sapien
gtgaagcagcagagagttgtttagc

SEQ ID NO: 256894 - DNA, 25 bp, Homo sapien
tgtagtgaagcagcagagagttgtt

SEQ ID NO: 256895 - DNA, 25 bp, Homo sapien
tagtgaagcagcagagagttgttta

SEQ ID NO: 256896 - DNA, 25 bp, Homo sapien
accactaataagaccttagcaagac

SEQ ID NO: 256897 - DNA, 25 bp, Homo sapien
gactcaaccactaataagaccttag

SEQ ID NO: 256898 - DNA, 25 bp, Homo sapien
ttgactcaaccactaataagacctt

SEQ ID NO: 256899 - DNA, 25 bp, Homo sapien
tcaaccactaataagaccttagcaa

SEQ ID NO: 256900 - DNA, 25 bp, Homo sapien
ctagagcagaaacagtaaatacaag

SEQ ID NO: 256901 - DNA, 25 bp, Homo sapien
agaaacagtaaatacaagcatccag

SEQ ID NO: 256902 - DNA, 25 bp, Homo sapien
agagcagaaacagtaaatacaagca

SEQ ID NO: 256903 - DNA, 25 bp, Homo sapien
gcagaaacagtaaatacaagcatcc

SEQ ID NO: 256904 - DNA, 25 bp, Homo sapien
ttattcaccttgtaccaaatacatt

SEQ ID NO: 256905 - DNA, 25 bp, Homo sapien
aatatccagaaagttggtaaattct

SEQ ID NO: 256906 - DNA, 25 bp, Homo sapien
ttgtaagaaggactctgccctgatg

SEQ ID NO: 256907 - DNA, 25 bp, Homo sapien
tgataatatccagaaagttggtaaa

SEQ ID NO: 256908 - DNA, 25 bp, Homo sapien
tctgccctgatgataatatccagaa

SEQ ID NO: 256909 - DNA, 25 bp, Homo sapien
gtggaagcagcaagtgaaatcttac

SEQ ID NO: 256910 - DNA, 25 bp, Homo sapien
tggtgaagtgtggaagcagcaagtg

SEQ ID NO: 256911 - DNA, 25 bp, Homo sapien
tagtaaagagtggtgaagtgtggaa

SEQ ID NO: 256912 - DNA, 25 bp, Homo sapien
aagtgtggaagcagcaagtgaaatc

SEQ ID NO: 256913 - DNA, 25 bp, Homo sapien
agctgaaggaactgtgaccgacaac

SEQ ID NO: 256914 - DNA, 25 bp, Homo sapien
ttatacaggaatgcttcacaggaat

SEQ ID NO: 256915 - DNA, 25 bp, Homo sapien
gctgaaggaactgtgaccgacaaca

SEQ ID NO: 256916 - DNA, 25 bp, Homo sapien
tcccagagaggaaggctcttataca

SEQ ID NO: 256917 - DNA, 25 bp, Homo sapien
aagaagggctgtgccggacgatcaa

SEQ ID NO: 256918 - DNA, 25 bp, Homo sapien
tgtgccggacgatcaaaaagaagtg

SEQ ID NO: 256919 - DNA, 25 bp, Homo sapien
taaagaagggctgtgccggacgatc

SEQ ID NO: 256920 - DNA, 25 bp, Homo sapien
agggctgtgccggacgatcaaaaag

SEQ ID NO: 256921 - DNA, 25 bp, Homo sapien
tttggaattgtgtaccactagcaac

SEQ ID NO: 256922 - DNA, 25 bp, Homo sapien
gtttggaattgtgtaccactagcaa

SEQ ID NO: 256923 - DNA, 25 bp, Homo sapien
agtttggaattgtgtaccactagca

SEQ ID NO: 256924 - DNA, 25 bp, Homo sapien
catttatactttgattcaaatgtca

SEQ ID NO: 256925 - DNA, 25 bp, Homo sapien
tacattgcaagttggccgaagactg

SEQ ID NO: 256926 - DNA, 25 bp, Homo sapien
tgcaagttggccgaagactgtagat

SEQ ID NO: 256927 - DNA, 25 bp, Homo sapien
gggtaccagagacttacattgcaag

SEQ ID NO: 256928 - DNA, 25 bp, Homo sapien
caggggtaccagagacttacattgc

SEQ ID NO: 256929 - DNA, 25 bp, Homo sapien
catagaaatccaacatacagtgcat

SEQ ID NO: 256930 - DNA, 25 bp, Homo sapien
ccaaggctgtctctcttcaataaga

SEQ ID NO: 256931 - DNA, 25 bp, Homo sapien
agtgttcacaatttccaagctaaag

SEQ ID NO: 256932 - DNA, 25 bp, Homo sapien
cagtggagcagtttagacagagttc

SEQ ID NO: 256933 - DNA, 25 bp, Homo sapien
ccagactctttggaagggccaggtg

SEQ ID NO: 256934 - DNA, 25 bp, Homo sapien
tagtgagagggatccatgtgactgc

SEQ ID NO: 256935 - DNA, 25 bp, Homo sapien
ctgttggaaaatagtgagagggatc

SEQ ID NO: 256936 - DNA, 25 bp, Homo sapien
ctgctcccctgagccgtaaggagga

SEQ ID NO: 256937 - DNA, 25 bp, Homo sapien
agcagggactagagggcttgggcca

SEQ ID NO: 256938 - DNA, 25 bp, Homo sapien
gatgagaaaacgtgttgggccccga

SEQ ID NO: 256939 - DNA, 25 bp, Homo sapien
gagtgaacgggaatttgagcacaag

SEQ ID NO: 256940 - DNA, 25 bp, Homo sapien
gctgggatggcagtcacagcacatg

SEQ ID NO: 256941 - DNA, 25 bp, Homo sapien
cttgaggagctctgatgtgcatgtg

SEQ ID NO: 256942 - DNA, 25 bp, Homo sapien
tcaggaccttgaggtcttggtggct

SEQ ID NO: 256943 - DNA, 25 bp, Homo sapien
catgtgacacggtgtggcctgagtc

SEQ ID NO: 256944 - DNA, 25 bp, Homo sapien
catgtctcagtgagggccctaggct

SEQ ID NO: 256945 - DNA, 25 bp, Homo sapien
ggagaggatgccttctagcgtcaga

SEQ ID NO: 256946 - DNA, 25 bp, Homo sapien
tagcgtcagaactgatgtgcacacc

SEQ ID NO: 256947 - DNA, 25 bp, Homo sapien
ctggagagtgagagttcctggtgct

SEQ ID NO: 256948 - DNA, 25 bp, Homo sapien
tgatgtgcacaccacctcagctgac

SEQ ID NO: 256949 - DNA, 25 bp, Homo sapien
cctgctctgcgtgtcttgatgtcta

SEQ ID NO: 256950 - DNA, 25 bp, Homo sapien
caggatgtgcgccaggatgcctctg

SEQ ID NO: 256951 - DNA, 25 bp, Homo sapien
agtggaggcactgcttcgacaggaa

SEQ ID NO: 256952 - DNA, 25 bp, Homo sapien
tgatctctcctgatgtggaccccag

SEQ ID NO: 256953 - DNA, 25 bp, Homo sapien
gtgtgtgcttactccccggtggtcc

SEQ ID NO: 256954 - DNA, 25 bp, Homo sapien
tcccgtgggcagtaaggatggccac

SEQ ID NO: 256955 - DNA, 25 bp, Homo sapien
cggtggtcccgtgggcagtaaggat

SEQ ID NO: 256956 - DNA, 25 bp, Homo sapien
agggtgtgtgcttactccccggtgg

SEQ ID NO: 256957 - DNA, 25 bp, Homo sapien
tcagccacatagtctggtgcccaca

SEQ ID NO: 256958 - DNA, 25 bp, Homo sapien
gactttggcattgtcactgacaaaa

SEQ ID NO: 256959 - DNA, 25 bp, Homo sapien
ggagactttggcattgtcactgaca

SEQ ID NO: 256960 - DNA, 25 bp, Homo sapien
tgtgctttggagactttggcattgt

SEQ ID NO: 256961 - DNA, 25 bp, Homo sapien
cctgccagccgctgcgtaaaatctt

SEQ ID NO: 256962 - DNA, 25 bp, Homo sapien
ccagccgctgcgtaaaatcttggca

SEQ ID NO: 256963 - DNA, 25 bp, Homo sapien
aaaatcttggcaaagtgtccttgtc

SEQ ID NO: 256964 - DNA, 25 bp, Homo sapien
ctgcgtaaaatcttggcaaagtgtc

SEQ ID NO: 256965 - DNA, 25 bp, Homo sapien
caggtcctcattctcctgccacacc

SEQ ID NO: 256966 - DNA, 25 bp, Homo sapien
cttgcgcaggtcctcattctcctgc

SEQ ID NO: 256967 - DNA, 25 bp, Homo sapien
tgcgcaggtcctcattctcctgcca

SEQ ID NO: 256968 - DNA, 25 bp, Homo sapien
ggtcctcattctcctgccacaccat

SEQ ID NO: 256969 - DNA, 25 bp, Homo sapien
ctgcaaagtctcgtaagcctttctc

SEQ ID NO: 256970 - DNA, 25 bp, Homo sapien
tctcacccagaactgagccacctac

SEQ ID NO: 256971 - DNA, 25 bp, Homo sapien
caaagtctcgtaagcctttctcacc

SEQ ID NO: 256972 - DNA, 25 bp, Homo sapien
gcaaagtctcgtaagcctttctcac

SEQ ID NO: 256973 - DNA, 25 bp, Homo sapien
caggcaaggtgctagtaggcagcca

SEQ ID NO: 256974 - DNA, 25 bp, Homo sapien
gctggtccctagatccaggcttggc

SEQ ID NO: 256975 - DNA, 25 bp, Homo sapien
agatgactgcgaagtgggtgcctgc

SEQ ID NO: 256976 - DNA, 25 bp, Homo sapien
gctgacacgagctatgcagcacccg

SEQ ID NO: 256977 - DNA, 25 bp, Homo sapien
ggcctgggatttcaataactctgag

SEQ ID NO: 256978 - DNA, 25 bp, Homo sapien
cctgccacatcgtgttgactttctg

SEQ ID NO: 256979 - DNA, 25 bp, Homo sapien
gccacatcgtgttgactttctgcat

SEQ ID NO: 256980 - DNA, 25 bp, Homo sapien
tgccacatcgtgttgactttctgca

SEQ ID NO: 256981 - DNA, 25 bp, Homo sapien
cacatcgtgttgactttctgcatgg

SEQ ID NO: 256982 - DNA, 25 bp, Homo sapien
catataaatagcttcctctttctga

SEQ ID NO: 256983 - DNA, 25 bp, Homo sapien
cttcctctttctgagcttcttggat

SEQ ID NO: 256984 - DNA, 25 bp, Homo sapien
ttcctctttctgagcttcttggatc

SEQ ID NO: 256985 - DNA, 25 bp, Homo sapien
ataaatagcttcctctttctgagct

SEQ ID NO: 256986 - DNA, 25 bp, Homo sapien
cctgcagtagccttctgctttcagg

SEQ ID NO: 256987 - DNA, 25 bp, Homo sapien
ctccctgcagtagccttctgctttc

SEQ ID NO: 256988 - DNA, 25 bp, Homo sapien
gcagtagccttctgctttcaggccc

SEQ ID NO: 256989 - DNA, 25 bp, Homo sapien
tgcagtagccttctgctttcaggcc

SEQ ID NO: 256990 - DNA, 25 bp, Homo sapien
gtattccatagtactgtgaaatcta

SEQ ID NO: 256991 - DNA, 25 bp, Homo sapien
agaatggtaatgatgctcatcattt

SEQ ID NO: 256992 - DNA, 25 bp, Homo sapien
ttcatgagctttgtagattagaatg

SEQ ID NO: 256993 - DNA, 25 bp, Homo sapien
tataagtattccatagtactgtgaa

SEQ ID NO: 256994 - DNA, 25 bp, Homo sapien
ccaatgagtggcgtaggtcctgtga

SEQ ID NO: 256995 - DNA, 25 bp, Homo sapien
gcaccaatgagtggcgtaggtcctg

SEQ ID NO: 256996 - DNA, 25 bp, Homo sapien
aagcaccaatgagtggcgtaggtcc

SEQ ID NO: 256997 - DNA, 25 bp, Homo sapien
tcaagcaccaatgagtggcgtaggt

SEQ ID NO: 256998 - DNA, 25 bp, Homo sapien
cgtaatggaaaaacggcagccctgt

SEQ ID NO: 256999 - DNA, 25 bp, Homo sapien
gctgggcacccggaagtcatgagtt

SEQ ID NO: 257000 - DNA, 25 bp, Homo sapien
catggcctatgcatccttgggaacc

SEQ ID NO: 257001 - DNA, 25 bp, Homo sapien
ggatggtcaaaagcacgtggtcaca

SEQ ID NO: 257002 - DNA, 25 bp, Homo sapien
gcctacggctctgaggctgagcaca

SEQ ID NO: 257003 - DNA, 25 bp, Homo sapien
aacacccatatgctcactcatgcag

SEQ ID NO: 257004 - DNA, 25 bp, Homo sapien
gaagaactctctcggcacagccttt

SEQ ID NO: 257005 - DNA, 25 bp, Homo sapien
tgcagacaggcgctctcgcctacgg

SEQ ID NO: 257006 - DNA, 25 bp, Homo sapien
atgcccatggccctgataggcccat

SEQ ID NO: 257007 - DNA, 25 bp, Homo sapien
atcatgcccatggccctgataggcc

SEQ ID NO: 257008 - DNA, 25 bp, Homo sapien
atggccctgataggcccatgtccag

SEQ ID NO: 257009 - DNA, 25 bp, Homo sapien
gcccatggccctgataggcccatgt

SEQ ID NO: 257010 - DNA, 25 bp, Homo sapien
gcaggccgcgagttccttggctgac

SEQ ID NO: 257011 - DNA, 25 bp, Homo sapien
cctgcatgcggtgacacagtccagt

SEQ ID NO: 257012 - DNA, 25 bp, Homo sapien
tgctcaggccgagatgctggtctct

SEQ ID NO: 257013 - DNA, 25 bp, Homo sapien
tgtcctcggcctttgggtgacccaa

SEQ ID NO: 257014 - DNA, 25 bp, Homo sapien
tacccagatgattgggccaaggtaa

SEQ ID NO: 257015 - DNA, 25 bp, Homo sapien
atccaactcattggcagtgtggcca

SEQ ID NO: 257016 - DNA, 25 bp, Homo sapien
agaaggtgcgatacgtcctccacat

SEQ ID NO: 257017 - DNA, 25 bp, Homo sapien
taaatcctgtccctatgcacctggc

SEQ ID NO: 257018 - DNA, 25 bp, Homo sapien
cttcttgaagagtacaaagtgcaca

SEQ ID NO: 257019 - DNA, 25 bp, Homo sapien
tcttcttgaagagtacaaagtgcac

SEQ ID NO: 257020 - DNA, 25 bp, Homo sapien
ccatacaattttcaattggcacttt

SEQ ID NO: 257021 - DNA, 25 bp, Homo sapien
gccatacaattttcaattggcactt

SEQ ID NO: 257022 - DNA, 25 bp, Homo sapien
gcattgcccgggcatagaccttccg

SEQ ID NO: 257023 - DNA, 25 bp, Homo sapien
attgcccgggcatagaccttccgtt

SEQ ID NO: 257024 - DNA, 25 bp, Homo sapien
tcctctgtggcattgcccgggcata

SEQ ID NO: 257025 - DNA, 25 bp, Homo sapien
ggcatagaccttccgttttcacttc

SEQ ID NO: 257026 - DNA, 25 bp, Homo sapien
gcaacttcaaaatcttgaggaagat

SEQ ID NO: 257027 - DNA, 25 bp, Homo sapien
gaggaatttcaacattctgtgtacc

SEQ ID NO: 257028 - DNA, 25 bp, Homo sapien
aatttcaacattctgtgtaccaaac

SEQ ID NO: 257029 - DNA, 25 bp, Homo sapien
caaggtgttatattttgcaacttca

SEQ ID NO: 257030 - DNA, 25 bp, Homo sapien
cagttccacaaccacagcttcctgg

SEQ ID NO: 257031 - DNA, 25 bp, Homo sapien
ctggagtcctgcgaacactgcagtt

SEQ ID NO: 257032 - DNA, 25 bp, Homo sapien
gagtcctgcgaacactgcagttcca

SEQ ID NO: 257033 - DNA, 25 bp, Homo sapien
gaacactgcagttccacaaccacag

SEQ ID NO: 257034 - DNA, 25 bp, Homo sapien
ttctccttcttggacacatttgacc

SEQ ID NO: 257035 - DNA, 25 bp, Homo sapien
ctttctccttcttggacacatttga

SEQ ID NO: 257036 - DNA, 25 bp, Homo sapien
ctccttcttggacacatttgaccat

SEQ ID NO: 257037 - DNA, 25 bp, Homo sapien
aaccctttctccttcttggacacat

SEQ ID NO: 257038 - DNA, 25 bp, Homo sapien
caaacaactaaatcctccacaaaat

SEQ ID NO: 257039 - DNA, 25 bp, Homo sapien
taaatcctccacaaaatccagtatg

SEQ ID NO: 257040 - DNA, 25 bp, Homo sapien
tacccaaacaactaaatcctccaca

SEQ ID NO: 257041 - DNA, 25 bp, Homo sapien
atcctccacaaaatccagtatgcat

SEQ ID NO: 257042 - DNA, 25 bp, Homo sapien
ctgcaagacatccactgggctctta

SEQ ID NO: 257043 - DNA, 25 bp, Homo sapien
tcactctgccaactctaaatatctg

SEQ ID NO: 257044 - DNA, 25 bp, Homo sapien
gaaccatgcaacaagggcctcacat

SEQ ID NO: 257045 - DNA, 25 bp, Homo sapien
tacaggagaaccatgcaacaagggc

SEQ ID NO: 257046 - DNA, 25 bp, Homo sapien
gtttccgacgtctgttctttgcaca

SEQ ID NO: 257047 - DNA, 25 bp, Homo sapien
acaccacgatcttccactactttgg

SEQ ID NO: 257048 - DNA, 25 bp, Homo sapien
ccacttccaaggtttccgacgtctg

SEQ ID NO: 257049 - DNA, 25 bp, Homo sapien
ccacgatcttccactactttgggta

SEQ ID NO: 257050 - DNA, 25 bp, Homo sapien
aaaacaattttgtagcggctgggag

SEQ ID NO: 257051 - DNA, 25 bp, Homo sapien
aacaattttgtagcggctgggagca

SEQ ID NO: 257052 - DNA, 25 bp, Homo sapien
gcgtgaaccccgcaggaggagattg

SEQ ID NO: 257053 - DNA, 25 bp, Homo sapien
gtgaaccccgcaggaggagattgca

SEQ ID NO: 257054 - DNA, 25 bp, Homo sapien
gggccagtgaccgtctcttctggct

SEQ ID NO: 257055 - DNA, 25 bp, Homo sapien
cagagggggccagtgaccgtctctt

SEQ ID NO: 257056 - DNA, 25 bp, Homo sapien
tatctcaccacgttctggcagaggg

SEQ ID NO: 257057 - DNA, 25 bp, Homo sapien
tctgttgcttcctatctcaccacgt

SEQ ID NO: 257058 - DNA, 25 bp, Homo sapien
agtatggccagacgacccttctttg

SEQ ID NO: 257059 - DNA, 25 bp, Homo sapien
aaatgcagaagtatggccagacgac

SEQ ID NO: 257060 - DNA, 25 bp, Homo sapien
tatggccagacgacccttctttgtt

SEQ ID NO: 257061 - DNA, 25 bp, Homo sapien
cagaagtatggccagacgacccttc

SEQ ID NO: 257062 - DNA, 25 bp, Homo sapien
cgtcacaaatgagcaggagtctggt

SEQ ID NO: 257063 - DNA, 25 bp, Homo sapien
gctacgtcacaaatgagcaggagtc

SEQ ID NO: 257064 - DNA, 25 bp, Homo sapien
gagggctacgtcacaaatgagcagg

SEQ ID NO: 257065 - DNA, 25 bp, Homo sapien
cacaaatgagcaggagtctggtgcc

SEQ ID NO: 257066 - DNA, 25 bp, Homo sapien
tgcacactgtcgtagcctggtggtg

SEQ ID NO: 257067 - DNA, 25 bp, Homo sapien
cactgtcgtagcctggtggtgcttc

SEQ ID NO: 257068 - DNA, 25 bp, Homo sapien
cacactgtcgtagcctggtggtgct

SEQ ID NO: 257069 - DNA, 25 bp, Homo sapien
actgtcgtagcctggtggtgcttca

SEQ ID NO: 257070 - DNA, 25 bp, Homo sapien
gtggtgacagaggctgtttgtgaaa

SEQ ID NO: 257071 - DNA, 25 bp, Homo sapien
gtgacagaggctgtttgtgaaactc

SEQ ID NO: 257072 - DNA, 25 bp, Homo sapien
gacagaggctgtttgtgaaactcca

SEQ ID NO: 257073 - DNA, 25 bp, Homo sapien
tggtgacagaggctgtttgtgaaac

SEQ ID NO: 257074 - DNA, 25 bp, Homo sapien
tggttttatagacaacaaattcatc

SEQ ID NO: 257075 - DNA, 25 bp, Homo sapien
ccaggcatgggaaatttaataatat

SEQ ID NO: 257076 - DNA, 25 bp, Homo sapien
cctgattggttttatagacaacaaa

SEQ ID NO: 257077 - DNA, 25 bp, Homo sapien
tttaacctgattggttttatagaca

SEQ ID NO: 257078 - DNA, 25 bp, Homo sapien
tttgaaaactcaggtctgtattcct

SEQ ID NO: 257079 - DNA, 25 bp, Homo sapien
tgggctacagtgtctatgattctcc

SEQ ID NO: 257080 - DNA, 25 bp, Homo sapien
aatgaatggttagagtgtgcctggc

SEQ ID NO: 257081 - DNA, 25 bp, Homo sapien
cctgcaatgaatggttagagtgtgc

SEQ ID NO: 257082 - DNA, 25 bp, Homo sapien
gcaatctgggctacgctgcctgcaa

SEQ ID NO: 257083 - DNA, 25 bp, Homo sapien
ttctcagcaatctgggctacgctgc

SEQ ID NO: 257084 - DNA, 25 bp, Homo sapien
aggcttcgaagccacacacagcggc

SEQ ID NO: 257085 - DNA, 25 bp, Homo sapien
gaaggcttcgaagccacacacagcg

SEQ ID NO: 257086 - DNA, 25 bp, Homo sapien
tgatgaaggcttcgaagccacacac

SEQ ID NO: 257087 - DNA, 25 bp, Homo sapien
tgaaggcttcgaagccacacacagc

SEQ ID NO: 257088 - DNA, 25 bp, Homo sapien
gtcacggctcctcggtactctcgct

SEQ ID NO: 257089 - DNA, 25 bp, Homo sapien
acggctcctcggtactctcgctggg

SEQ ID NO: 257090 - DNA, 25 bp, Homo sapien
gggtcacggctcctcggtactctcg

SEQ ID NO: 257091 - DNA, 25 bp, Homo sapien
ggctcctcggtactctcgctgggct

SEQ ID NO: 257092 - DNA, 25 bp, Homo sapien
tcagcctctagcatgaaattcgtat

SEQ ID NO: 257093 - DNA, 25 bp, Homo sapien
cacgcggcatgcacaccaagcggta

SEQ ID NO: 257094 - DNA, 25 bp, Homo sapien
catatcttgttctaactctctttcc

SEQ ID NO: 257095 - DNA, 25 bp, Homo sapien
ctctcctgtatgcacgcggcatgca

SEQ ID NO: 257096 - DNA, 25 bp, Homo sapien
aatattcaaatactccggcaccaca

SEQ ID NO: 257097 - DNA, 25 bp, Homo sapien
gttttctccatctatgcttggattt

SEQ ID NO: 257098 - DNA, 25 bp, Homo sapien
caccacactgggacaaaatccttag

SEQ ID NO: 257099 - DNA, 25 bp, Homo sapien
aaatccttaggatgtgacgatttgc

SEQ ID NO: 257100 - DNA, 25 bp, Homo sapien
gccatttgacggagacagagtggca

SEQ ID NO: 257101 - DNA, 25 bp, Homo sapien
tccatagacaaggagtcgatcattg

SEQ ID NO: 257102 - DNA, 25 bp, Homo sapien
gacagagtggcaactcggagaacat

SEQ ID NO: 257103 - DNA, 25 bp, Homo sapien
gtgaggaatgaatccatagacaagg

SEQ ID NO: 257104 - DNA, 25 bp, Homo sapien
ttctcttaaattagtgcacacaaac

SEQ ID NO: 257105 - DNA, 25 bp, Homo sapien
tagtcgacactattgtacaaaaatt

SEQ ID NO: 257106 - DNA, 25 bp, Homo sapien
cttaaattagtgcacacaaacttgc

SEQ ID NO: 257107 - DNA, 25 bp, Homo sapien
gctcaatagtcgacactattgtaca

SEQ ID NO: 257108 - DNA, 25 bp, Homo sapien
cgccactcggaagtgcaccctggct

SEQ ID NO: 257109 - DNA, 25 bp, Homo sapien
gccactcggaagtgcaccctggctt

SEQ ID NO: 257110 - DNA, 25 bp, Homo sapien
tcgccactcggaagtgcaccctggc

SEQ ID NO: 257111 - DNA, 25 bp, Homo sapien
ggtaaatggtgcaagcagtggcaat

SEQ ID NO: 257112 - DNA, 25 bp, Homo sapien
ggaagcgcagaactctcagcatgag

SEQ ID NO: 257113 - DNA, 25 bp, Homo sapien
gaagcgcagaactctcagcatgaga

SEQ ID NO: 257114 - DNA, 25 bp, Homo sapien
tggaagcgcagaactctcagcatga

SEQ ID NO: 257115 - DNA, 25 bp, Homo sapien
ggcttctcagcctcgacctcagcgg

SEQ ID NO: 257116 - DNA, 25 bp, Homo sapien
gacctcagcgggcacctcaactccg

SEQ ID NO: 257117 - DNA, 25 bp, Homo sapien
tcagcgggcacctcaactccgcaga

SEQ ID NO: 257118 - DNA, 25 bp, Homo sapien
agcctcgacctcagcgggcacctca

SEQ ID NO: 257119 - DNA, 25 bp, Homo sapien
gattggtaaggtcgtcaccaaacac

SEQ ID NO: 257120 - DNA, 25 bp, Homo sapien
tgattggtaaggtcgtcaccaaaca

SEQ ID NO: 257121 - DNA, 25 bp, Homo sapien
tcaatgattggtaaggtcgtcacca

SEQ ID NO: 257122 - DNA, 25 bp, Homo sapien
aatgattggtaaggtcgtcaccaaa

SEQ ID NO: 257123 - DNA, 25 bp, Homo sapien
atctgaatgagatcagatacaatat

SEQ ID NO: 257124 - DNA, 25 bp, Homo sapien
tctgtgtccgtggtataaatctgaa

SEQ ID NO: 257125 - DNA, 25 bp, Homo sapien
ttaggggatctctgtgtccgtggta

SEQ ID NO: 257126 - DNA, 25 bp, Homo sapien
taaatctgaatgagatcagatacaa

SEQ ID NO: 257127 - DNA, 25 bp, Homo sapien
tgcacaatgtgcaccaccaggtgct

SEQ ID NO: 257128 - DNA, 25 bp, Homo sapien
atggtctgcactctgaagggtgaag

SEQ ID NO: 257129 - DNA, 25 bp, Homo sapien
gatgcccgtccgtgaacatggtctg

SEQ ID NO: 257130 - DNA, 25 bp, Homo sapien
ttcctctccaacaactgagtgatgg

SEQ ID NO: 257131 - DNA, 25 bp, Homo sapien
tccgattagagctcggattgccagc

SEQ ID NO: 257132 - DNA, 25 bp, Homo sapien
agaatgccatcttcgtaatctccga

SEQ ID NO: 257133 - DNA, 25 bp, Homo sapien
ctcggattgccagcttgtggatcat

SEQ ID NO: 257134 - DNA, 25 bp, Homo sapien
tcgtaatctccgattagagctcgga

SEQ ID NO: 257135 - DNA, 25 bp, Homo sapien
aagatctcatccctcagagaacagc

SEQ ID NO: 257136 - DNA, 25 bp, Homo sapien
gaagatctcatccctcagagaacag

SEQ ID NO: 257137 - DNA, 25 bp, Homo sapien
tgaagatctcatccctcagagaaca

SEQ ID NO: 257138 - DNA, 25 bp, Homo sapien
gagagagttttctttactgagttta

SEQ ID NO: 257139 - DNA, 25 bp, Homo sapien
tgagagagttttctttactgagttt

SEQ ID NO: 257140 - DNA, 25 bp, Homo sapien
atgagagagttttctttactgagtt

SEQ ID NO: 257141 - DNA, 25 bp, Homo sapien
gttcagaaacttttggaatatcagg

SEQ ID NO: 257142 - DNA, 25 bp, Homo sapien
gctcatgtagggcaggaagtctaca

SEQ ID NO: 257143 - DNA, 25 bp, Homo sapien
gggcaggaagtctacatcttctttg

SEQ ID NO: 257144 - DNA, 25 bp, Homo sapien
ccagctcatgtagggcaggaagtct

SEQ ID NO: 257145 - DNA, 25 bp, Homo sapien
ggttcctgacggcttcttggggctc

SEQ ID NO: 257146 - DNA, 25 bp, Homo sapien
tggttcctgacggcttcttggggct

SEQ ID NO: 257147 - DNA, 25 bp, Homo sapien
ctggttcctgacggcttcttggggc

SEQ ID NO: 257148 - DNA, 25 bp, Homo sapien
gttcctgacggcttcttggggctcc

SEQ ID NO: 257149 - DNA, 25 bp, Homo sapien
acacctaagccatcctcttcaaaat

SEQ ID NO: 257150 - DNA, 25 bp, Homo sapien
gtagtacacctaagccatcctcttc

SEQ ID NO: 257151 - DNA, 25 bp, Homo sapien
gtacacctaagccatcctcttcaaa

SEQ ID NO: 257152 - DNA, 25 bp, Homo sapien
acctaagccatcctcttcaaaatct

SEQ ID NO: 257153 - DNA, 25 bp, Homo sapien
ggttcagttgctgttggtttacatg

SEQ ID NO: 257154 - DNA, 25 bp, Homo sapien
gctgttggtttacatgactctgtcc

SEQ ID NO: 257155 - DNA, 25 bp, Homo sapien
ttcttaaatagtggttcagttgctg

SEQ ID NO: 257156 - DNA, 25 bp, Homo sapien
cagttgctgttggtttacatgactc

SEQ ID NO: 257157 - DNA, 25 bp, Homo sapien
cacaaaaaaggctagaagtagatgt

SEQ ID NO: 257158 - DNA, 25 bp, Homo sapien
acacaaaaaaggctagaagtagatg

SEQ ID NO: 257159 - DNA, 25 bp, Homo sapien
tgactgtaaagaggctcaggtaagg

SEQ ID NO: 257160 - DNA, 25 bp, Homo sapien
aggactgactgtaaagaggctcagg

SEQ ID NO: 257161 - DNA, 25 bp, Homo sapien
tagtccaggactgactgtaaagagg

SEQ ID NO: 257162 - DNA, 25 bp, Homo sapien
ccaggactgactgtaaagaggctca

SEQ ID NO: 257163 - DNA, 25 bp, Homo sapien
atattgacttccttcgagaccgctt

SEQ ID NO: 257164 - DNA, 25 bp, Homo sapien
tgaaaaccatagtcaggatattgac

SEQ ID NO: 257165 - DNA, 25 bp, Homo sapien
ctttctgtttcagaacaactttgaa

SEQ ID NO: 257166 - DNA, 25 bp, Homo sapien
attgacttccttcgagaccgcttac

SEQ ID NO: 257167 - DNA, 25 bp, Homo sapien
atttcatcctcctctattacctcca

SEQ ID NO: 257168 - DNA, 25 bp, Homo sapien
gaaagcacgggatactgttgtctgt

SEQ ID NO: 257169 - DNA, 25 bp, Homo sapien
ccagaaagcacgggatactgttgtc

SEQ ID NO: 257170 - DNA, 25 bp, Homo sapien
aaagcacgggatactgttgtctgtt

SEQ ID NO: 257171 - DNA, 25 bp, Homo sapien
cccagttctggtgtaagtttccaga

SEQ ID NO: 257172 - DNA, 25 bp, Homo sapien
tcccagttctggtgtaagtttccag

SEQ ID NO: 257173 - DNA, 25 bp, Homo sapien
ctggtgtaagtttccagaagccatc

SEQ ID NO: 257174 - DNA, 25 bp, Homo sapien
cattgtggcaattaggtccaggaga

SEQ ID NO: 257175 - DNA, 25 bp, Homo sapien
gagcttatgcactgcattgtcaagt

SEQ ID NO: 257176 - DNA, 25 bp, Homo sapien
tgagcttatgcactgcattgtcaag

SEQ ID NO: 257177 - DNA, 25 bp, Homo sapien
agcttatgcactgcattgtcaagtg

SEQ ID NO: 257178 - DNA, 25 bp, Homo sapien
attgcctcaaaagcccagggaatat

SEQ ID NO: 257179 - DNA, 25 bp, Homo sapien
cacttgcttgctttattgcctcaaa

SEQ ID NO: 257180 - DNA, 25 bp, Homo sapien
ttattgcctcaaaagcccagggaat

SEQ ID NO: 257181 - DNA, 25 bp, Homo sapien
gcttgctttattgcctcaaaagccc

SEQ ID NO: 257182 - DNA, 25 bp, Homo sapien
tagccttgactgtaatgaaggactc

SEQ ID NO: 257183 - DNA, 25 bp, Homo sapien
ccagttcaagccgtgggcagataga

SEQ ID NO: 257184 - DNA, 25 bp, Homo sapien
tggagtcccagcaactgcttggtgg

SEQ ID NO: 257185 - DNA, 25 bp, Homo sapien
cacagtgcttatgggctggagtccc

SEQ ID NO: 257186 - DNA, 25 bp, Homo sapien
tctctggagcttatgacaggcacca

SEQ ID NO: 257187 - DNA, 25 bp, Homo sapien
ggcagctctctggagcttatgacag

SEQ ID NO: 257188 - DNA, 25 bp, Homo sapien
ctggtctcatggaaggcagctctct

SEQ ID NO: 257189 - DNA, 25 bp, Homo sapien
gagcttatgacaggcaccacatatc

SEQ ID NO: 257190 - DNA, 25 bp, Homo sapien
agcctggatagggggattggacttc

SEQ ID NO: 257191 - DNA, 25 bp, Homo sapien
gcctggatagggggattggacttca

SEQ ID NO: 257192 - DNA, 25 bp, Homo sapien
cctggatagggggattggacttcat

SEQ ID NO: 257193 - DNA, 25 bp, Homo sapien
ggattcatcccaaaggtaaagccca

SEQ ID NO: 257194 - DNA, 25 bp, Homo sapien
tggattcatcccaaaggtaaagccc

SEQ ID NO: 257195 - DNA, 25 bp, Homo sapien
atggattcatcccaaaggtaaagcc

SEQ ID NO: 257196 - DNA, 25 bp, Homo sapien
tgttagcaataatggacactcctct

SEQ ID NO: 257197 - DNA, 25 bp, Homo sapien
aaggtgttagcaataatggacactc

SEQ ID NO: 257198 - DNA, 25 bp, Homo sapien
ttagcaataatggacactcctctac

SEQ ID NO: 257199 - DNA, 25 bp, Homo sapien
ggtgttagcaataatggacactcct

SEQ ID NO: 257200 - DNA, 25 bp, Homo sapien
gactgatgaggtaaccacactcatg

SEQ ID NO: 257201 - DNA, 25 bp, Homo sapien
gatgaggtaaccacactcatgacca

SEQ ID NO: 257202 - DNA, 25 bp, Homo sapien
aatgactgatgaggtaaccacactc

SEQ ID NO: 257203 - DNA, 25 bp, Homo sapien
gtaaccacactcatgaccatactca

SEQ ID NO: 257204 - DNA, 25 bp, Homo sapien
tggatataccgcaagccagagcaaa

SEQ ID NO: 257205 - DNA, 25 bp, Homo sapien
aagccagagcaaatcccgccaactc

SEQ ID NO: 257206 - DNA, 25 bp, Homo sapien
gatttgatacaatccactggatata

SEQ ID NO: 257207 - DNA, 25 bp, Homo sapien
tataaaggttctgataaattctgcc

SEQ ID NO: 257208 - DNA, 25 bp, Homo sapien
gaatcatgtaggtttcagtccagaa

SEQ ID NO: 257209 - DNA, 25 bp, Homo sapien
tgtcagggaatgctcgaatcatgta

SEQ ID NO: 257210 - DNA, 25 bp, Homo sapien
catcaaattcctgctatattcatag

SEQ ID NO: 257211 - DNA, 25 bp, Homo sapien
attcctgctatattcataggccaaa

SEQ ID NO: 257212 - DNA, 25 bp, Homo sapien
gaatcctgaactatgcatcctgaaa

SEQ ID NO: 257213 - DNA, 25 bp, Homo sapien
cagaatctcctttgctcagcgtaga

SEQ ID NO: 257214 - DNA, 25 bp, Homo sapien
tcagcgtagatttctgcagtggtct

SEQ ID NO: 257215 - DNA, 25 bp, Homo sapien
gttctcactgccactaattgtccag

SEQ ID NO: 257216 - DNA, 25 bp, Homo sapien
gggaactagccattgatatagaaac

SEQ ID NO: 257217 - DNA, 25 bp, Homo sapien
aagggtgaccgggaactagccattg

SEQ ID NO: 257218 - DNA, 25 bp, Homo sapien
ggtgaccgggaactagccattgata

SEQ ID NO: 257219 - DNA, 25 bp, Homo sapien
gaccgggaactagccattgatatag

SEQ ID NO: 257220 - DNA, 25 bp, Homo sapien
tggcagtggcgctggaagcagtctc

SEQ ID NO: 257221 - DNA, 25 bp, Homo sapien
ggcagtggcgctggaagcagtctca

SEQ ID NO: 257222 - DNA, 25 bp, Homo sapien
gcagtggcgctggaagcagtctcat

SEQ ID NO: 257223 - DNA, 25 bp, Homo sapien
tgtattaaccaaccactcttccctg

SEQ ID NO: 257224 - DNA, 25 bp, Homo sapien
tattaaaggtatctgccactttgag

SEQ ID NO: 257225 - DNA, 25 bp, Homo sapien
tacagatgatatgttgttacatgca

SEQ ID NO: 257226 - DNA, 25 bp, Homo sapien
cagcccaatttgtgatcttttatgc

SEQ ID NO: 257227 - DNA, 25 bp, Homo sapien
gccttcgctgaggacttagtcctgg

SEQ ID NO: 257228 - DNA, 25 bp, Homo sapien
tcgctgaggacttagtcctggatga

SEQ ID NO: 257229 - DNA, 25 bp, Homo sapien
ttggccttcgctgaggacttagtcc

SEQ ID NO: 257230 - DNA, 25 bp, Homo sapien
tgaggacttagtcctggatgaagag

SEQ ID NO: 257231 - DNA, 25 bp, Homo sapien
caaagtgggccatgcttcacatcta

SEQ ID NO: 257232 - DNA, 25 bp, Homo sapien
tctacccatgatgaatagtggtctt

SEQ ID NO: 257233 - DNA, 25 bp, Homo sapien
taacccaccatcaatgaaaagaagg

SEQ ID NO: 257234 - DNA, 25 bp, Homo sapien
tgtaccttagagaaataacccacca

SEQ ID NO: 257235 - DNA, 25 bp, Homo sapien
gaattaaatgatatcagtctcctgt

SEQ ID NO: 257236 - DNA, 25 bp, Homo sapien
ttttcatgagacacttaatgattta

SEQ ID NO: 257237 - DNA, 25 bp, Homo sapien
taggtgataggtatacagatactga

SEQ ID NO: 257238 - DNA, 25 bp, Homo sapien
gtagctaagatttctaatacacttg

SEQ ID NO: 257239 - DNA, 25 bp, Homo sapien
aaaccacttccgcttctgtctgatc

SEQ ID NO: 257240 - DNA, 25 bp, Homo sapien
ttgaagggcacgaaaccacttccgc

SEQ ID NO: 257241 - DNA, 25 bp, Homo sapien
acgaaaccacttccgcttctgtctg

SEQ ID NO: 257242 - DNA, 25 bp, Homo sapien
agggcacgaaaccacttccgcttct

SEQ ID NO: 257243 - DNA, 25 bp, Homo sapien
tctttgggacggctattccaggcca

SEQ ID NO: 257244 - DNA, 25 bp, Homo sapien
cataagacagggcatacgagcaggc

SEQ ID NO: 257245 - DNA, 25 bp, Homo sapien
aaagaagattccgtgcctaagctga

SEQ ID NO: 257246 - DNA, 25 bp, Homo sapien
gctagatgcgatgtactcctgagaa

SEQ ID NO: 257247 - DNA, 25 bp, Homo sapien
cacttaacaccgacgtcggccgcgg

SEQ ID NO: 257248 - DNA, 25 bp, Homo sapien
acgtcggccgcggtcggctctccgc

SEQ ID NO: 257249 - DNA, 25 bp, Homo sapien
ctcttggctccgggtagccggccgg

SEQ ID NO: 257250 - DNA, 25 bp, Homo sapien
acgtcccgctcaggctgcgccgcct

SEQ ID NO: 257251 - DNA, 25 bp, Homo sapien
tctggatgcaagtgtcgtgagacat

SEQ ID NO: 257252 - DNA, 25 bp, Homo sapien
gctggcgccccttttgattgggcca

SEQ ID NO: 257253 - DNA, 25 bp, Homo sapien
gtgagacatcttaactgtcacccca

SEQ ID NO: 257254 - DNA, 25 bp, Homo sapien
gctagcacggcagaagaggttttcc

SEQ ID NO: 257255 - DNA, 25 bp, Homo sapien
tctcaggcctgatggggtttgcagt

SEQ ID NO: 257256 - DNA, 25 bp, Homo sapien
tcaggtctgagtataattctcaggc

SEQ ID NO: 257257 - DNA, 25 bp, Homo sapien
gtgtgggctttatctccttgtagtc

SEQ ID NO: 257258 - DNA, 25 bp, Homo sapien
ggtttgcagtgtgggctttatctcc

SEQ ID NO: 257259 - DNA, 25 bp, Homo sapien
tagaaaatggcttgcgatcctgagc

SEQ ID NO: 257260 - DNA, 25 bp, Homo sapien
ttgcttagagcacgccattcaggac

SEQ ID NO: 257261 - DNA, 25 bp, Homo sapien
taaagtcacgggcattgcgctagaa

SEQ ID NO: 257262 - DNA, 25 bp, Homo sapien
tgcaaatgagcctgggaatgactgg

SEQ ID NO: 257263 - DNA, 25 bp, Homo sapien
cacaaacaaatggaagaatattcca

SEQ ID NO: 257264 - DNA, 25 bp, Homo sapien
ctgttcaacaaaataaaagaggaca

SEQ ID NO: 257265 - DNA, 25 bp, Homo sapien
ggaagaatattccatgctcatggat

SEQ ID NO: 257266 - DNA, 25 bp, Homo sapien
gagaactacaaacccctgttcaaca

SEQ ID NO: 257267 - DNA, 25 bp, Homo sapien
tgtccacgggcaattagtttcagaa

SEQ ID NO: 257268 - DNA, 25 bp, Homo sapien
cagggcaggcaagaccaaatcacct

SEQ ID NO: 257269 - DNA, 25 bp, Homo sapien
atccagccaggaaagacgtaacaag

SEQ ID NO: 257270 - DNA, 25 bp, Homo sapien
gctactgggcacttgcaatctttta

SEQ ID NO: 257271 - DNA, 25 bp, Homo sapien
tcttattaagccacaaatccttatc

SEQ ID NO: 257272 - DNA, 25 bp, Homo sapien
taaacatagtgtagcagtggcacac

SEQ ID NO: 257273 - DNA, 25 bp, Homo sapien
taagccacaaatccttatcttatgt

SEQ ID NO: 257274 - DNA, 25 bp, Homo sapien
cagatcatctaaacatagtgtagca

SEQ ID NO: 257275 - DNA, 25 bp, Homo sapien
ccctcgcgttccgcgctcggcccta

SEQ ID NO: 257276 - DNA, 25 bp, Homo sapien
tcgcgttccgcgctcggccctactc

SEQ ID NO: 257277 - DNA, 25 bp, Homo sapien
gcgttccgcgctcggccctactcca

SEQ ID NO: 257278 - DNA, 25 bp, Homo sapien
ccgcgctcggccctactccacatca

SEQ ID NO: 257279 - DNA, 25 bp, Homo sapien
tagcagctccgcaaaccgccgagga

SEQ ID NO: 257280 - DNA, 25 bp, Homo sapien
cagctccgcaaaccgccgaggaaaa

SEQ ID NO: 257281 - DNA, 25 bp, Homo sapien
gcagctccgcaaaccgccgaggaaa

SEQ ID NO: 257282 - DNA, 25 bp, Homo sapien
cctagcagctccgcaaaccgccgag

SEQ ID NO: 257283 - DNA, 25 bp, Homo sapien
gggactgcggtcacccttgctccct

SEQ ID NO: 257284 - DNA, 25 bp, Homo sapien
acagggactgcggtcacccttgctc

SEQ ID NO: 257285 - DNA, 25 bp, Homo sapien
cagggactgcggtcacccttgctcc

SEQ ID NO: 257286 - DNA, 25 bp, Homo sapien
cacagggactgcggtcacccttgct

SEQ ID NO: 257287 - DNA, 25 bp, Homo sapien
actgtcgccaaaggcctccgctcct

SEQ ID NO: 257288 - DNA, 25 bp, Homo sapien
gctcctctcgcggctgcgtcattat

SEQ ID NO: 257289 - DNA, 25 bp, Homo sapien
tccttcttcgacttcggccaactcc

SEQ ID NO: 257290 - DNA, 25 bp, Homo sapien
ttctccacctcgaacacatcctctc

SEQ ID NO: 257291 - DNA, 25 bp, Homo sapien
gcctttccagcgaactttgtaaaga

SEQ ID NO: 257292 - DNA, 25 bp, Homo sapien
gaagcacttctttacagtcctccag

SEQ ID NO: 257293 - DNA, 25 bp, Homo sapien
tcatccgatgtatagcctttccagc

SEQ ID NO: 257294 - DNA, 25 bp, Homo sapien
gctttggctttgttctctgcaattt

SEQ ID NO: 257295 - DNA, 25 bp, Homo sapien
tactacacatactttgagagttaaa

SEQ ID NO: 257296 - DNA, 25 bp, Homo sapien
tttgtcaactgcaactgtaggttgg

SEQ ID NO: 257297 - DNA, 25 bp, Homo sapien
tgagaattggctacatggaatttac

SEQ ID NO: 257298 - DNA, 25 bp, Homo sapien
cactaaagaatacggtacactttgt

SEQ ID NO: 257299 - DNA, 25 bp, Homo sapien
tcagtagaagtccattagtgtcacg

SEQ ID NO: 257300 - DNA, 25 bp, Homo sapien
tcaaagctcatgacagaccagtggt

SEQ ID NO: 257301 - DNA, 25 bp, Homo sapien
ccagtgctgacccagtgtatggtag

SEQ ID NO: 257302 - DNA, 25 bp, Homo sapien
tgtcacgtaacatcactcaaagctc

SEQ ID NO: 257303 - DNA, 25 bp, Homo sapien
ttttgtgccagataacaatggatta

SEQ ID NO: 257304 - DNA, 25 bp, Homo sapien
actggtcatcaagagcaatgttttg

SEQ ID NO: 257305 - DNA, 25 bp, Homo sapien
gacaaataaactcaactggtcatca

SEQ ID NO: 257306 - DNA, 25 bp, Homo sapien
taacaatggattaacacagtaagac

SEQ ID NO: 257307 - DNA, 25 bp, Homo sapien
gactcaggtatggtgggctataaat

SEQ ID NO: 257308 - DNA, 25 bp, Homo sapien
tatggtgggctataaatgatttgaa

SEQ ID NO: 257309 - DNA, 25 bp, Homo sapien
ccaatgcaaatacaaaacgttttct

SEQ ID NO: 257310 - DNA, 25 bp, Homo sapien
tgcaaatacaaaacgttttctaaga

SEQ ID NO: 257311 - DNA, 25 bp, Homo sapien
gactcagcaaacaggtcttggcggt

SEQ ID NO: 257312 - DNA, 25 bp, Homo sapien
tcttggcggtgagggcaagtgtgag

SEQ ID NO: 257313 - DNA, 25 bp, Homo sapien
tcagcaaacaggtcttggcggtgag

SEQ ID NO: 257314 - DNA, 25 bp, Homo sapien
ctgactcagcaaacaggtcttggcg

SEQ ID NO: 257315 - DNA, 25 bp, Homo sapien
tttttgttccaagcagaatctcaac

SEQ ID NO: 257316 - DNA, 25 bp, Homo sapien
atcagagttcgcctcaaatatgtcg

SEQ ID NO: 257317 - DNA, 25 bp, Homo sapien
cagagttcgcctcaaatatgtcgtt

SEQ ID NO: 257318 - DNA, 25 bp, Homo sapien
cgctatcagagttcgcctcaaatat

SEQ ID NO: 257319 - DNA, 25 bp, Homo sapien
aatatgtcgttatttaaggatagtc

SEQ ID NO: 257320 - DNA, 25 bp, Homo sapien
tttccaaggagctctccaggtctgg

SEQ ID NO: 257321 - DNA, 25 bp, Homo sapien
ctttttcagatcatctgggcttttc

SEQ ID NO: 257322 - DNA, 25 bp, Homo sapien
ggggaagtatcttcttttgtctcac

SEQ ID NO: 257323 - DNA, 25 bp, Homo sapien
tggacttgtcttttagcttcccggc

SEQ ID NO: 257324 - DNA, 25 bp, Homo sapien
gaatcattaagtacacttgattcag

SEQ ID NO: 257325 - DNA, 25 bp, Homo sapien
gattcagattccacctgggattcga

SEQ ID NO: 257326 - DNA, 25 bp, Homo sapien
cttgattcagattccacctgggatt

SEQ ID NO: 257327 - DNA, 25 bp, Homo sapien
cagattccacctgggattcgacaaa

SEQ ID NO: 257328 - DNA, 25 bp, Homo sapien
cgtttgggcagatacaggcatcagc

SEQ ID NO: 257329 - DNA, 25 bp, Homo sapien
tggcgtttgggcagatacaggcatc

SEQ ID NO: 257330 - DNA, 25 bp, Homo sapien
gtttgggcagatacaggcatcagct

SEQ ID NO: 257331 - DNA, 25 bp, Homo sapien
gcgtttgggcagatacaggcatcag

SEQ ID NO: 257332 - DNA, 25 bp, Homo sapien
actaagagataagctgcggtgtcca

SEQ ID NO: 257333 - DNA, 25 bp, Homo sapien
tataaacctgagtatacaatgctcc

SEQ ID NO: 257334 - DNA, 25 bp, Homo sapien
taatagtggtatactcaagacaaca

SEQ ID NO: 257335 - DNA, 25 bp, Homo sapien
acaggtttgtggcttcagggaatca

SEQ ID NO: 257336 - DNA, 25 bp, Homo sapien
aatgacatgatatccaaaacaagaa

SEQ ID NO: 257337 - DNA, 25 bp, Homo sapien
tgacatgatatccaaaacaagaatg

SEQ ID NO: 257338 - DNA, 25 bp, Homo sapien
gaaaatgacatgatatccaaaacaa

SEQ ID NO: 257339 - DNA, 25 bp, Homo sapien
ctgaaaatgacatgatatccaaaac

SEQ ID NO: 257340 - DNA, 25 bp, Homo sapien
agaatcatgccttttctgatatttt

SEQ ID NO: 257341 - DNA, 25 bp, Homo sapien
taaaactgtacctgacgctaccagc

SEQ ID NO: 257342 - DNA, 25 bp, Homo sapien
gaaacagcagggtgccagagcactg

SEQ ID NO: 257343 - DNA, 25 bp, Homo sapien
tggtggcaagtgagggaaacagcag

SEQ ID NO: 257344 - DNA, 25 bp, Homo sapien
cactgcctgtgtacctggtaaaact

SEQ ID NO: 257345 - DNA, 25 bp, Homo sapien
cacagctaaagacaccagactgtct

SEQ ID NO: 257346 - DNA, 25 bp, Homo sapien
tgttgaagcttgtaccaaaatggct

SEQ ID NO: 257347 - DNA, 25 bp, Homo sapien
agacaccagactgtctatagctgga

SEQ ID NO: 257348 - DNA, 25 bp, Homo sapien
atagctggatgttgaagcttgtacc

SEQ ID NO: 257349 - DNA, 25 bp, Homo sapien
agtgagtctcagagtgatccaagtc

SEQ ID NO: 257350 - DNA, 25 bp, Homo sapien
tgagtctcagagtgatccaagtcac

SEQ ID NO: 257351 - DNA, 25 bp, Homo sapien
agttgtgacaaaggcctactgaagg

SEQ ID NO: 257352 - DNA, 25 bp, Homo sapien
acaaaggcctactgaaggcagtgag

SEQ ID NO: 257353 - DNA, 25 bp, Homo sapien
ccttttccgattattctcagaaaca

SEQ ID NO: 257354 - DNA, 25 bp, Homo sapien
ggttttgtgatcgtctatggtttta

SEQ ID NO: 257355 - DNA, 25 bp, Homo sapien
ttccttggttttgtgatcgtctatg

SEQ ID NO: 257356 - DNA, 25 bp, Homo sapien
ttcttcccttttccgattattctca

SEQ ID NO: 257357 - DNA, 25 bp, Homo sapien
gctgtctaaaacctcctgatcacct

SEQ ID NO: 257358 - DNA, 25 bp, Homo sapien
atgtatgcccaagtatccgtttcgt

SEQ ID NO: 257359 - DNA, 25 bp, Homo sapien
ctgcagcaatgtatgcccaagtatc

SEQ ID NO: 257360 - DNA, 25 bp, Homo sapien
ctgcttggcacacgctgtctaaaac

SEQ ID NO: 257361 - DNA, 25 bp, Homo sapien
aagtcacagaatgacccgtcttcaa

SEQ ID NO: 257362 - DNA, 25 bp, Homo sapien
tatacgtgctgagaacattatagga

SEQ ID NO: 257363 - DNA, 25 bp, Homo sapien
ccattattttttgatcgttgagatc

SEQ ID NO: 257364 - DNA, 25 bp, Homo sapien
ggtgcactaccttgaaaaattctgc

SEQ ID NO: 257365 - DNA, 25 bp, Homo sapien
aatagccttgttaacatacatttgt

SEQ ID NO: 257366 - DNA, 25 bp, Homo sapien
cacaatagccttgttaacatacatt

SEQ ID NO: 257367 - DNA, 25 bp, Homo sapien
gaacacacaatagccttgttaacat

SEQ ID NO: 257368 - DNA, 25 bp, Homo sapien
cacacaatagccttgttaacataca

SEQ ID NO: 257369 - DNA, 25 bp, Homo sapien
ggtccatgcccaaactcagaatctg

SEQ ID NO: 257370 - DNA, 25 bp, Homo sapien
tacttggaattgcatctgttgcagc

SEQ ID NO: 257371 - DNA, 25 bp, Homo sapien
tcccatcaaggtgcttttggaaatc

SEQ ID NO: 257372 - DNA, 25 bp, Homo sapien
ctgcaggtccatgcccaaactcaga

SEQ ID NO: 257373 - DNA, 25 bp, Homo sapien
aattaagtgcaacttttacagtaat

SEQ ID NO: 257374 - DNA, 25 bp, Homo sapien
acttttacagtaatataatccccat

SEQ ID NO: 257375 - DNA, 25 bp, Homo sapien
ggtccaggttatattcttcatttga

SEQ ID NO: 257376 - DNA, 25 bp, Homo sapien
tcttggtccaggttatattcttcat

SEQ ID NO: 257377 - DNA, 25 bp, Homo sapien
gagacggtgttgctatgtcagccca

SEQ ID NO: 257378 - DNA, 25 bp, Homo sapien
gacggtgttgctatgtcagcccagg

SEQ ID NO: 257379 - DNA, 25 bp, Homo sapien
agacggtgttgctatgtcagcccag

SEQ ID NO: 257380 - DNA, 25 bp, Homo sapien
gctattcacatttagactacagtat

SEQ ID NO: 257381 - DNA, 25 bp, Homo sapien
ttattccaacagtctggaaccaaac

SEQ ID NO: 257382 - DNA, 25 bp, Homo sapien
gtaatgctattcacatttagactac

SEQ ID NO: 257383 - DNA, 25 bp, Homo sapien
ctttattccaacagtctggaaccaa

SEQ ID NO: 257384 - DNA, 25 bp, Homo sapien
actttcgcgccttttgtgatgagga

SEQ ID NO: 257385 - DNA, 25 bp, Homo sapien
gagtcgcaggaggtcgtcctgccct

SEQ ID NO: 257386 - DNA, 25 bp, Homo sapien
cgttcttctgccgaccgttcacttt

SEQ ID NO: 257387 - DNA, 25 bp, Homo sapien
atgagggcggtggtcccgttcttct

SEQ ID NO: 257388 - DNA, 25 bp, Homo sapien
gctgccagcaactgcgaatggaacc

SEQ ID NO: 257389 - DNA, 25 bp, Homo sapien
ccaacctaagaacctctgcatataa

SEQ ID NO: 257390 - DNA, 25 bp, Homo sapien
gaatggaaccgctagctccaaccta

SEQ ID NO: 257391 - DNA, 25 bp, Homo sapien
gctagctccaacctaagaacctctg

SEQ ID NO: 257392 - DNA, 25 bp, Homo sapien
tgcttccaaaagaatagccactgtt

SEQ ID NO: 257393 - DNA, 25 bp, Homo sapien
ctgcttccaaaagaatagccactgt

SEQ ID NO: 257394 - DNA, 25 bp, Homo sapien
cactctcaacctatggctacggtca

SEQ ID NO: 257395 - DNA, 25 bp, Homo sapien
aggctctttccatctatggcccttt

SEQ ID NO: 257396 - DNA, 25 bp, Homo sapien
tcaacctatggctacggtcactgtt

SEQ ID NO: 257397 - DNA, 25 bp, Homo sapien
tatggctacggtcactgttgcagag

SEQ ID NO: 257398 - DNA, 25 bp, Homo sapien
tagactgcttcgcaaagtgcagggc

SEQ ID NO: 257399 - DNA, 25 bp, Homo sapien
tccacattcaattacgagtcgtacg

SEQ ID NO: 257400 - DNA, 25 bp, Homo sapien
cgagtcgtacgatgtctgaatttcc

SEQ ID NO: 257401 - DNA, 25 bp, Homo sapien
taaatggttcttcagcaagtcgtac

SEQ ID NO: 257402 - DNA, 25 bp, Homo sapien
tatgccatgtccctgtaggttcccc

SEQ ID NO: 257403 - DNA, 25 bp, Homo sapien
agtgagccctaatgtcaatgctgcg

SEQ ID NO: 257404 - DNA, 25 bp, Homo sapien
tgtaccctccgctcaactttgctgt

SEQ ID NO: 257405 - DNA, 25 bp, Homo sapien
gaatgggtaacactacgagtgagcc

SEQ ID NO: 257406 - DNA, 25 bp, Homo sapien
ggaccctcacagagtcgatgacatg

SEQ ID NO: 257407 - DNA, 25 bp, Homo sapien
gatgacatgcgattggaaaaactgg

SEQ ID NO: 257408 - DNA, 25 bp, Homo sapien
gcaaggcgagcttcaaagtaatcct

SEQ ID NO: 257409 - DNA, 25 bp, Homo sapien
gaaaaactggttctagcagagcaag

SEQ ID NO: 257410 - DNA, 25 bp, Homo sapien
gtacactacacggtccacagagccg

SEQ ID NO: 257411 - DNA, 25 bp, Homo sapien
aagataaacagcaggatgccagagc

SEQ ID NO: 257412 - DNA, 25 bp, Homo sapien
tcattcagaactacagcttgtacac

SEQ ID NO: 257413 - DNA, 25 bp, Homo sapien
gccgagcaataacttctttacccaa

SEQ ID NO: 257414 - DNA, 25 bp, Homo sapien
tcatctgtgcttttgattagaagaa

SEQ ID NO: 257415 - DNA, 25 bp, Homo sapien
gcccccagcaatatacagtacaagt

SEQ ID NO: 257416 - DNA, 25 bp, Homo sapien
ccccagcaatatacagtacaagtgt

SEQ ID NO: 257417 - DNA, 25 bp, Homo sapien
gaatgcccccagcaatatacagtac

SEQ ID NO: 257418 - DNA, 25 bp, Homo sapien
tgcccccagcaatatacagtacaag

SEQ ID NO: 257419 - DNA, 25 bp, Homo sapien
agtcaagactccagtgagctgtaat

SEQ ID NO: 257420 - DNA, 25 bp, Homo sapien
gagctgtaatccgcgccactgcact

SEQ ID NO: 257421 - DNA, 25 bp, Homo sapien
tgcctgggaagtcaagactccagtg

SEQ ID NO: 257422 - DNA, 25 bp, Homo sapien
cttgtgcctgggaagtcaagactcc

SEQ ID NO: 257423 - DNA, 25 bp, Homo sapien
ttttatttcataagtcaagatgttg

SEQ ID NO: 257424 - DNA, 25 bp, Homo sapien
ttatttcataagtcaagatgttgtg

SEQ ID NO: 257425 - DNA, 25 bp, Homo sapien
tatttcataagtcaagatgttgtgg

SEQ ID NO: 257426 - DNA, 25 bp, Homo sapien
atttcataagtcaagatgttgtgga

SEQ ID NO: 257427 - DNA, 25 bp, Homo sapien
agaagcccttaaaacaccaatgatg

SEQ ID NO: 257428 - DNA, 25 bp, Homo sapien
ccagaagcccttaaaacaccaatga

SEQ ID NO: 257429 - DNA, 25 bp, Homo sapien
aacaccaatgatgtaaaagaatcat

SEQ ID NO: 257430 - DNA, 25 bp, Homo sapien
tacaccagaagcccttaaaacacca

SEQ ID NO: 257431 - DNA, 25 bp, Homo sapien
agagtttattgggacctgcaacagg

SEQ ID NO: 257432 - DNA, 25 bp, Homo sapien
gagtttattgggacctgcaacaggg

SEQ ID NO: 257433 - DNA, 25 bp, Homo sapien
aagagtttattgggacctgcaacag

SEQ ID NO: 257434 - DNA, 25 bp, Homo sapien
agtttattgggacctgcaacagggc

SEQ ID NO: 257435 - DNA, 25 bp, Homo sapien
cttggcagagggtgcttctgtcaac

SEQ ID NO: 257436 - DNA, 25 bp, Homo sapien
ttggcagagggtgcttctgtcaacc

SEQ ID NO: 257437 - DNA, 25 bp, Homo sapien
tgcactctgtatgcacctattagca

SEQ ID NO: 257438 - DNA, 25 bp, Homo sapien
ctgtatgcacctattagcaacttaa

SEQ ID NO: 257439 - DNA, 25 bp, Homo sapien
gcactctgtatgcacctattagcaa

SEQ ID NO: 257440 - DNA, 25 bp, Homo sapien
tgtatgcacctattagcaacttaac

SEQ ID NO: 257441 - DNA, 25 bp, Homo sapien
tacatagatgtgctagaagaattcc

SEQ ID NO: 257442 - DNA, 25 bp, Homo sapien
tgagattccggcatactggcacaga

SEQ ID NO: 257443 - DNA, 25 bp, Homo sapien
tataggaatcggtctgaagagaact

SEQ ID NO: 257444 - DNA, 25 bp, Homo sapien
cagactacaacagacaacaggctta

SEQ ID NO: 257445 - DNA, 25 bp, Homo sapien
tgaatataacatggctcccttgctg

SEQ ID NO: 257446 - DNA, 25 bp, Homo sapien
ccacgctctgctaaaagttcacatt

SEQ ID NO: 257447 - DNA, 25 bp, Homo sapien
tcttttaggtctcatagtgtactgg

SEQ ID NO: 257448 - DNA, 25 bp, Homo sapien
ggactacaggcttgttccaccccat

SEQ ID NO: 257449 - DNA, 25 bp, Homo sapien
gccaggtttggctgttacctaagcc

SEQ ID NO: 257450 - DNA, 25 bp, Homo sapien
tcttcccagtcggtgttcaaaacaa

SEQ ID NO: 257451 - DNA, 25 bp, Homo sapien
cttgccatacagaagcaggaactct

SEQ ID NO: 257452 - DNA, 25 bp, Homo sapien
tattgacaaaaccataggaaaaggc

SEQ ID NO: 257453 - DNA, 25 bp, Homo sapien
tccttgttttgctaatcatcctcct

SEQ ID NO: 257454 - DNA, 25 bp, Homo sapien
tttccttgttttgctaatcatcctc

SEQ ID NO: 257455 - DNA, 25 bp, Homo sapien
ttgctaatcatcctccttgagctcc

SEQ ID NO: 257456 - DNA, 25 bp, Homo sapien
gttttgctaatcatcctccttgagc

SEQ ID NO: 257457 - DNA, 25 bp, Homo sapien
tcaactctcaaaattgggaataaga

SEQ ID NO: 257458 - DNA, 25 bp, Homo sapien
taaaaaccatccctcatagcccaca

SEQ ID NO: 257459 - DNA, 25 bp, Homo sapien
aaaaccatccctcatagcccacaat

SEQ ID NO: 257460 - DNA, 25 bp, Homo sapien
catccctcatagcccacaattttgg

SEQ ID NO: 257461 - DNA, 25 bp, Homo sapien
tcgtgttgggaagtagtatggcagc

SEQ ID NO: 257462 - DNA, 25 bp, Homo sapien
gcaatgcacaaattcagaatagcca

SEQ ID NO: 257463 - DNA, 25 bp, Homo sapien
tcttgctggttcgtgttgggaagta

SEQ ID NO: 257464 - DNA, 25 bp, Homo sapien
caagatgttacccactccttggtgt

SEQ ID NO: 257465 - DNA, 25 bp, Homo sapien
tgcattgagggttttggctttttat

SEQ ID NO: 257466 - DNA, 25 bp, Homo sapien
gatgtctgggcaatcatagcacttg

SEQ ID NO: 257467 - DNA, 25 bp, Homo sapien
tgatctccagaataagtgtaaactg

SEQ ID NO: 257468 - DNA, 25 bp, Homo sapien
gaatttcttactccatacaagcagt

SEQ ID NO: 257469 - DNA, 25 bp, Homo sapien
gcttgaatttaggtctgctggtcag

SEQ ID NO: 257470 - DNA, 25 bp, Homo sapien
ctagtctagcaaattactttaggac

SEQ ID NO: 257471 - DNA, 25 bp, Homo sapien
tcctgtttactagtgaagactctgt

SEQ ID NO: 257472 - DNA, 25 bp, Homo sapien
tgctggtcagtgattctagtctagc

SEQ ID NO: 257473 - DNA, 25 bp, Homo sapien
cccatgggtcctcttgggttactgg

SEQ ID NO: 257474 - DNA, 25 bp, Homo sapien
aaactccaaagatttgattataggg

SEQ ID NO: 257475 - DNA, 25 bp, Homo sapien
tatagggaccccatgggtcctcttg

SEQ ID NO: 257476 - DNA, 25 bp, Homo sapien
gatttgattatagggaccccatggg

SEQ ID NO: 257477 - DNA, 25 bp, Homo sapien
agtgtaaatgctatggagctatatt

SEQ ID NO: 257478 - DNA, 25 bp, Homo sapien
tttcacatatcccatgtacatcctc

SEQ ID NO: 257479 - DNA, 25 bp, Homo sapien
taaatgctatggagctatattgttt

SEQ ID NO: 257480 - DNA, 25 bp, Homo sapien
tagtatttcacatatcccatgtaca

SEQ ID NO: 257481 - DNA, 25 bp, Homo sapien
gctgttgaacagtgaacatctggtt

SEQ ID NO: 257482 - DNA, 25 bp, Homo sapien
gctggtccctgtggctcagcacaac

SEQ ID NO: 257483 - DNA, 25 bp, Homo sapien
atctggttaaaagaatgctggtccc

SEQ ID NO: 257484 - DNA, 25 bp, Homo sapien
tgctggtccctgtggctcagcacaa

SEQ ID NO: 257485 - DNA, 25 bp, Homo sapien
gctgggctctgatgtggcgcagtgc

SEQ ID NO: 257486 - DNA, 25 bp, Homo sapien
gttgggctgggctctgatgtggcgc

SEQ ID NO: 257487 - DNA, 25 bp, Homo sapien
tgggctgggctctgatgtggcgcag

SEQ ID NO: 257488 - DNA, 25 bp, Homo sapien
caagggccaaaggttgggctgggct

SEQ ID NO: 257489 - DNA, 25 bp, Homo sapien
gtagatacgatcagagtgggcccac

SEQ ID NO: 257490 - DNA, 25 bp, Homo sapien
taatggtaggagcacctttcagcag

SEQ ID NO: 257491 - DNA, 25 bp, Homo sapien
ggaatataagctccgtccagcaagg

SEQ ID NO: 257492 - DNA, 25 bp, Homo sapien
catcgaagataaacgcagccagcgt

SEQ ID NO: 257493 - DNA, 25 bp, Homo sapien
tgttaaatgtaagagtgactggact

SEQ ID NO: 257494 - DNA, 25 bp, Homo sapien
gagtgactggactggaaacaatgtt

SEQ ID NO: 257495 - DNA, 25 bp, Homo sapien
taaatgtaagagtgactggactgga

SEQ ID NO: 257496 - DNA, 25 bp, Homo sapien
taagagtgactggactggaaacaat

SEQ ID NO: 257497 - DNA, 25 bp, Homo sapien
taggtgactgcgagtaaggataagc

SEQ ID NO: 257498 - DNA, 25 bp, Homo sapien
gactgcgagtaaggataagccccat

SEQ ID NO: 257499 - DNA, 25 bp, Homo sapien
cttttaggtgactgcgagtaaggat

SEQ ID NO: 257500 - DNA, 25 bp, Homo sapien
ggtgactgcgagtaaggataagccc

SEQ ID NO: 257501 - DNA, 25 bp, Homo sapien
gggtggcaacatgatgtggtcacag

SEQ ID NO: 257502 - DNA, 25 bp, Homo sapien
aagatgatagcgtttgagcaggtcc

SEQ ID NO: 257503 - DNA, 25 bp, Homo sapien
gagtagatacttgatagttgtaggc

SEQ ID NO: 257504 - DNA, 25 bp, Homo sapien
taggctttttgcacgagagggtaag

SEQ ID NO: 257505 - DNA, 25 bp, Homo sapien
tgaagctgaaccatcctagtagtag

SEQ ID NO: 257506 - DNA, 25 bp, Homo sapien
tgagttgtgctgaagtaagcggcca

SEQ ID NO: 257507 - DNA, 25 bp, Homo sapien
gtagtggcatttggctgttgagtcc

SEQ ID NO: 257508 - DNA, 25 bp, Homo sapien
taagcggccacagttctgcctgaag

SEQ ID NO: 257509 - DNA, 25 bp, Homo sapien
gtattccatagtactgtgaaatcta

SEQ ID NO: 257510 - DNA, 25 bp, Homo sapien
agaatggtaatgatgctcatcattt

SEQ ID NO: 257511 - DNA, 25 bp, Homo sapien
ttcatgagctttgtagattagaatg

SEQ ID NO: 257512 - DNA, 25 bp, Homo sapien
tataagtattccatagtactgtgaa

SEQ ID NO: 257513 - DNA, 25 bp, Homo sapien
ttaaacattcgttcattcctggcta

SEQ ID NO: 257514 - DNA, 25 bp, Homo sapien
gatattaaacattcgttcattcctg

SEQ ID NO: 257515 - DNA, 25 bp, Homo sapien
gcgtcgtagatattaaacattcgtt

SEQ ID NO: 257516 - DNA, 25 bp, Homo sapien
ctaataagcgtcgtagatattaaac

SEQ ID NO: 257517 - DNA, 25 bp, Homo sapien
atgagaatgggtgatatgggtcccc

SEQ ID NO: 257518 - DNA, 25 bp, Homo sapien
gtagtatattaagcctgggagactg

SEQ ID NO: 257519 - DNA, 25 bp, Homo sapien
taagatcgataggttgactgtgaca

SEQ ID NO: 257520 - DNA, 25 bp, Homo sapien
tgggtccccgtggagcaataaacat

SEQ ID NO: 257521 - DNA, 25 bp, Homo sapien
cacttgtggcttaatggcaattacg

SEQ ID NO: 257522 - DNA, 25 bp, Homo sapien
ggacatctccatttaagttaggcag

SEQ ID NO: 257523 - DNA, 25 bp, Homo sapien
ggcaattacgtttccatcataggct

SEQ ID NO: 257524 - DNA, 25 bp, Homo sapien
tgttgtaccgtagcttcattcattg

SEQ ID NO: 257525 - DNA, 25 bp, Homo sapien
gcaggtcagcaatagtatccattaa

SEQ ID NO: 257526 - DNA, 25 bp, Homo sapien
tttgcaggtcagcaatagtatccat

SEQ ID NO: 257527 - DNA, 25 bp, Homo sapien
gcaccccgcctcagtctagcttttt

SEQ ID NO: 257528 - DNA, 25 bp, Homo sapien
gcaatagtatccattaatggtcaca

SEQ ID NO: 257529 - DNA, 25 bp, Homo sapien
gctatggtagcatggagtattctaa

SEQ ID NO: 257530 - DNA, 25 bp, Homo sapien
ctgtaatgtgcctcatgaattggta

SEQ ID NO: 257531 - DNA, 25 bp, Homo sapien
gtaccaatttataatataccaccag

SEQ ID NO: 257532 - DNA, 25 bp, Homo sapien
aataaagcttgcactattctagaaa

SEQ ID NO: 257533 - DNA, 25 bp, Homo sapien
taaaaatatcacgtatacgcactgg

SEQ ID NO: 257534 - DNA, 25 bp, Homo sapien
gaatgaaagtatctcgtgaacgtca

SEQ ID NO: 257535 - DNA, 25 bp, Homo sapien
cataggtttattttagcgcactgca

SEQ ID NO: 257536 - DNA, 25 bp, Homo sapien
tcgtataggttagctcagccactta

SEQ ID NO: 257537 - DNA, 25 bp, Homo sapien
aaatactgatgcattggcctaagca

SEQ ID NO: 257538 - DNA, 25 bp, Homo sapien
tttagtgttatgtaccaatcagaag

SEQ ID NO: 257539 - DNA, 25 bp, Homo sapien
tttttagtgttatgtaccaatcaga

SEQ ID NO: 257540 - DNA, 25 bp, Homo sapien
gcctaagcagattatccaaaatgct

SEQ ID NO: 257541 - DNA, 25 bp, Homo sapien
taccttacttagtgcaagcttcctg

SEQ ID NO: 257542 - DNA, 25 bp, Homo sapien
caaaaagtgccatgtgccagtagtg

SEQ ID NO: 257543 - DNA, 25 bp, Homo sapien
tgtttcatgatagcccaagtactaa

SEQ ID NO: 257544 - DNA, 25 bp, Homo sapien
tatccatgttctgcacaaaaagtgc

SEQ ID NO: 257545 - DNA, 25 bp, Homo sapien
cggcccacgctcggcaaagtttttg

SEQ ID NO: 257546 - DNA, 25 bp, Homo sapien
ccacgcccggcccacgctcggcaaa

SEQ ID NO: 257547 - DNA, 25 bp, Homo sapien
catgatttcggcccactccaacccc

SEQ ID NO: 257548 - DNA, 25 bp, Homo sapien
tgacatgatttcggcccactccaac

SEQ ID NO: 257549 - DNA, 25 bp, Homo sapien
gctggaattaaaagtgcacgccacc

SEQ ID NO: 257550 - DNA, 25 bp, Homo sapien
tagctggaattaaaagtgcacgcca

SEQ ID NO: 257551 - DNA, 25 bp, Homo sapien
ggaattaaaagtgcacgccaccacg

SEQ ID NO: 257552 - DNA, 25 bp, Homo sapien
tggaattaaaagtgcacgccaccac

SEQ ID NO: 257553 - DNA, 25 bp, Homo sapien
tggacggcaccattctcaagagcag

SEQ ID NO: 257554 - DNA, 25 bp, Homo sapien
cagaaccctggctgaaattgcaaaa

SEQ ID NO: 257555 - DNA, 25 bp, Homo sapien
tacggattcgcttcgctacacatgg

SEQ ID NO: 257556 - DNA, 25 bp, Homo sapien
catggagcagccttgactgtcaaga

SEQ ID NO: 257557 - DNA, 25 bp, Homo sapien
gaagtcttcatcaaccgggaccgtg

SEQ ID NO: 257558 - DNA, 25 bp, Homo sapien
tcaagagtttcctcaagccgggcga

SEQ ID NO: 257559 - DNA, 25 bp, Homo sapien
aagaggctcttcgaacgctatggcg

SEQ ID NO: 257560 - DNA, 25 bp, Homo sapien
aagtgcgcattgagaaaaacccggc

SEQ ID NO: 257561 - DNA, 25 bp, Homo sapien
gagccaagatcacactccagcctcg

SEQ ID NO: 257562 - DNA, 25 bp, Homo sapien
ctcggtgacggagtgagactctatc

SEQ ID NO: 257563 - DNA, 25 bp, Homo sapien
gcctcggtgacggagtgagactcta

SEQ ID NO: 257564 - DNA, 25 bp, Homo sapien
gccaagatcacactccagcctcggt

SEQ ID NO: 257565 - DNA, 25 bp, Homo sapien
aataaaagctctttcatggaaacta

SEQ ID NO: 257566 - DNA, 25 bp, Homo sapien
ataaaagctctttcatggaaactag

SEQ ID NO: 257567 - DNA, 25 bp, Homo sapien
gcttgttttagatgtcattcatgtt

SEQ ID NO: 257568 - DNA, 25 bp, Homo sapien
tgcttgttttagatgtcattcatgt

SEQ ID NO: 257569 - DNA, 25 bp, Homo sapien
caggtttttcgggcgagggcttctg

SEQ ID NO: 257570 - DNA, 25 bp, Homo sapien
ctgggagagtgcgagcgaggccggg

SEQ ID NO: 257571 - DNA, 25 bp, Homo sapien
cggccgggtcttcgctgtcaggacc

SEQ ID NO: 257572 - DNA, 25 bp, Homo sapien
ttctctcctgccgcatagtggcggg

SEQ ID NO: 257573 - DNA, 25 bp, Homo sapien
agggttgggtgaggcggtcgccagc

SEQ ID NO: 257574 - DNA, 25 bp, Homo sapien
accagcgcgaaaagccgggactgga

SEQ ID NO: 257575 - DNA, 25 bp, Homo sapien
tcgccagccaacgagcgcacggagg

SEQ ID NO: 257576 - DNA, 25 bp, Homo sapien
cgtcggagccaatgggcgtgcccaa

SEQ ID NO: 257577 - DNA, 25 bp, Homo sapien
tgggcttgttcgttccgcgcagccg

SEQ ID NO: 257578 - DNA, 25 bp, Homo sapien
tctcccgggctgtgtaggtcccgga

SEQ ID NO: 257579 - DNA, 25 bp, Homo sapien
ccggagtctcccgggctgtgtaggt

SEQ ID NO: 257580 - DNA, 25 bp, Homo sapien
gagtctcccgggctgtgtaggtccc

SEQ ID NO: 257581 - DNA, 25 bp, Homo sapien
cgggctgtgtaggtcccggagagcc

SEQ ID NO: 257582 - DNA, 25 bp, Homo sapien
gcagcgcactcaagactccagttca

SEQ ID NO: 257583 - DNA, 25 bp, Homo sapien
gccgctgccgcagcttgggcccccg

SEQ ID NO: 257584 - DNA, 25 bp, Homo sapien
actcaagactccagttcaaccgcgg

SEQ ID NO: 257585 - DNA, 25 bp, Homo sapien
tcaaccgcggccccgaaagctcact

SEQ ID NO: 257586 - DNA, 25 bp, Homo sapien
gactattccccacggggcgcggcga

SEQ ID NO: 257587 - DNA, 25 bp, Homo sapien
catggcgggaggtgggggactattc

SEQ ID NO: 257588 - DNA, 25 bp, Homo sapien
ggcgcggcgagggtggaagggcctc

SEQ ID NO: 257589 - DNA, 25 bp, Homo sapien
cgagggtggaagggcctccactgac

SEQ ID NO: 257590 - DNA, 25 bp, Homo sapien
ccgacaaaatggaggacgtcgtctc

SEQ ID NO: 257591 - DNA, 25 bp, Homo sapien
gacaaaatggaggacgtcgtctcct

SEQ ID NO: 257592 - DNA, 25 bp, Homo sapien
aaatggaggacgtcgtctcctcctg

SEQ ID NO: 257593 - DNA, 25 bp, Homo sapien
caaaatggaggacgtcgtctcctcc

SEQ ID NO: 257594 - DNA, 25 bp, Homo sapien
accgtcgcgcccgaccagtactgcc

SEQ ID NO: 257595 - DNA, 25 bp, Homo sapien
gcgagagcccagctccaagggagcc

SEQ ID NO: 257596 - DNA, 25 bp, Homo sapien
agctgcgtctgggtgtctccaccgt

SEQ ID NO: 257597 - DNA, 25 bp, Homo sapien
ttgtccgaatggcagagcccagtcg

SEQ ID NO: 257598 - DNA, 25 bp, Homo sapien
tatttccaaagagtaactgaggacc

SEQ ID NO: 257599 - DNA, 25 bp, Homo sapien
gacaaccctcgaaatcatggcagca

SEQ ID NO: 257600 - DNA, 25 bp, Homo sapien
tccatctttacgtggagtccgggaa

SEQ ID NO: 257601 - DNA, 25 bp, Homo sapien
ggccacccctgcattagatggttaa

SEQ ID NO: 257602 - DNA, 25 bp, Homo sapien
tgagcatactagtgcagacgtcttt

SEQ ID NO: 257603 - DNA, 25 bp, Homo sapien
gctggctcaggtggcaattctattt

SEQ ID NO: 257604 - DNA, 25 bp, Homo sapien
tctgctggtagagggcacctaggct

SEQ ID NO: 257605 - DNA, 25 bp, Homo sapien
gattgtctctatccaatctgctggt

SEQ ID NO: 257606 - DNA, 25 bp, Homo sapien
cacatgcgggtgaacacccagttct

SEQ ID NO: 257607 - DNA, 25 bp, Homo sapien
atgcgggtgaacacccagttctcac

SEQ ID NO: 257608 - DNA, 25 bp, Homo sapien
acatgcgggtgaacacccagttctc

SEQ ID NO: 257609 - DNA, 25 bp, Homo sapien
catgcgggtgaacacccagttctca

SEQ ID NO: 257610 - DNA, 25 bp, Homo sapien
gcgcccagcaatagtgtcattattt

SEQ ID NO: 257611 - DNA, 25 bp, Homo sapien
ccagcaatagtgtcattatttttta

SEQ ID NO: 257612 - DNA, 25 bp, Homo sapien
ccgctgcgcccagcaatagtgtcat

SEQ ID NO: 257613 - DNA, 25 bp, Homo sapien
gctgcgcccagcaatagtgtcatta

SEQ ID NO: 257614 - DNA, 25 bp, Homo sapien
gccggagtgctgtggcgccatctcg

SEQ ID NO: 257615 - DNA, 25 bp, Homo sapien
atggggtttcaccatattagccagg

SEQ ID NO: 257616 - DNA, 25 bp, Homo sapien
tggggtttcaccatattagccagga

SEQ ID NO: 257617 - DNA, 25 bp, Homo sapien
ccggagtgctgtggcgccatctcgg

SEQ ID NO: 257618 - DNA, 25 bp, Homo sapien
tagacgcaacttacagaggataatc

SEQ ID NO: 257619 - DNA, 25 bp, Homo sapien
taatcacccgtgaaagactgatgtg

SEQ ID NO: 257620 - DNA, 25 bp, Homo sapien
tcttcggcggacgtcatggtgctga

SEQ ID NO: 257621 - DNA, 25 bp, Homo sapien
cacgtaaagatggaagcgatgtcgc

SEQ ID NO: 257622 - DNA, 25 bp, Homo sapien
ccaagggaacaaccccggctgctgg

SEQ ID NO: 257623 - DNA, 25 bp, Homo sapien
tccccgcctccatcaaccaagatgg

SEQ ID NO: 257624 - DNA, 25 bp, Homo sapien
acgggcacgacggtggagagaccca

SEQ ID NO: 257625 - DNA, 25 bp, Homo sapien
ttgtcctcgggaagccccaactgga

SEQ ID NO: 257626 - DNA, 25 bp, Homo sapien
cctcgccgcgccccgtggggaatag

SEQ ID NO: 257627 - DNA, 25 bp, Homo sapien
ctcgccgcgccccgtggggaatagt

SEQ ID NO: 257628 - DNA, 25 bp, Homo sapien
tcgccgcgccccgtggggaatagtc

SEQ ID NO: 257629 - DNA, 25 bp, Homo sapien
gccccgccctccgcgcgctcattgg

SEQ ID NO: 257630 - DNA, 25 bp, Homo sapien
gcggcgcggccgagcccggggaggc

SEQ ID NO: 257631 - DNA, 25 bp, Homo sapien
gaggccccgccctccgcgcgctcat

SEQ ID NO: 257632 - DNA, 25 bp, Homo sapien
cggcggcgcggccgagcccggggag

SEQ ID NO: 257633 - DNA, 25 bp, Homo sapien
aactccgctcggtccagtcccggct

SEQ ID NO: 257634 - DNA, 25 bp, Homo sapien
gcccaccccccttcggcgacacgca

SEQ ID NO: 257635 - DNA, 25 bp, Homo sapien
ctggctggggctccgcggaacgaac

SEQ ID NO: 257636 - DNA, 25 bp, Homo sapien
ccggttctggctggggctccgcgga

SEQ ID NO: 257637 - DNA, 25 bp, Homo sapien
ttctggctggggctccgcggaacga

SEQ ID NO: 257638 - DNA, 25 bp, Homo sapien
ggttctggctggggctccgcggaac

SEQ ID NO: 257639 - DNA, 25 bp, Homo sapien
tggactggaaagacagcggggataa

SEQ ID NO: 257640 - DNA, 25 bp, Homo sapien
gactggaaagacagcggggataagc

SEQ ID NO: 257641 - DNA, 25 bp, Homo sapien
ggactggaaagacagcggggataag

SEQ ID NO: 257642 - DNA, 25 bp, Homo sapien
ggcctgaggtttgcccccccctgca

SEQ ID NO: 257643 - DNA, 25 bp, Homo sapien
ctgcagtcggcgaccggcagcgctg

SEQ ID NO: 257644 - DNA, 25 bp, Homo sapien
gtcactgctgggccgatatcgccca

SEQ ID NO: 257645 - DNA, 25 bp, Homo sapien
gctgggccgatatcgcccacatttg

SEQ ID NO: 257646 - DNA, 25 bp, Homo sapien
ggcaaaacagcgcaaaatacatatt

SEQ ID NO: 257647 - DNA, 25 bp, Homo sapien
agaacccaaccctttctgccagaag

SEQ ID NO: 257648 - DNA, 25 bp, Homo sapien
cacacaacctggtgggagaacccaa

SEQ ID NO: 257649 - DNA, 25 bp, Homo sapien
cctcgacgccagcaagggatttgta

SEQ ID NO: 257650 - DNA, 25 bp, Homo sapien
aaggatgcaccagacagggctgaag

SEQ ID NO: 257651 - DNA, 25 bp, Homo sapien
caccagacagggctgaaggcgattc

SEQ ID NO: 257652 - DNA, 25 bp, Homo sapien
tttctgccaaggatgcaccagacag

SEQ ID NO: 257653 - DNA, 25 bp, Homo sapien
cagacagggctgaaggcgattcttg

SEQ ID NO: 257654 - DNA, 25 bp, Homo sapien
gacataatgtgtccagagtgctgac

SEQ ID NO: 257655 - DNA, 25 bp, Homo sapien
taagggctcaatacacgccataggt

SEQ ID NO: 257656 - DNA, 25 bp, Homo sapien
catgtggactgaatacttaagcgta

SEQ ID NO: 257657 - DNA, 25 bp, Homo sapien
tgtcctggactgtgcctagaacggt

SEQ ID NO: 257658 - DNA, 25 bp, Homo sapien
gatttggcaattaggtcactagcga

SEQ ID NO: 257659 - DNA, 25 bp, Homo sapien
tatgagaccacattaagccccagaa

SEQ ID NO: 257660 - DNA, 25 bp, Homo sapien
tctcgatggaggataaagcactgca

SEQ ID NO: 257661 - DNA, 25 bp, Homo sapien
taagtttaccataccaggtggtggc

SEQ ID NO: 257662 - DNA, 25 bp, Homo sapien
tgacttcaaatgttccatgattaag

SEQ ID NO: 257663 - DNA, 25 bp, Homo sapien
cttctttacgtgacttcaaatgttc

SEQ ID NO: 257664 - DNA, 25 bp, Homo sapien
tttacgtgacttcaaatgttccatg

SEQ ID NO: 257665 - DNA, 25 bp, Homo sapien
tacgtgacttcaaatgttccatgat

SEQ ID NO: 257666 - DNA, 25 bp, Homo sapien
tctctcttcttgtgtgcataggaca

SEQ ID NO: 257667 - DNA, 25 bp, Homo sapien
gaaaggttatcataccctatccctg

SEQ ID NO: 257668 - DNA, 25 bp, Homo sapien
ggtgttccaaatctatgatctagtg

SEQ ID NO: 257669 - DNA, 25 bp, Homo sapien
ctgtgatcccctttaccaaagaagg

SEQ ID NO: 257670 - DNA, 25 bp, Homo sapien
aagagctcctacaatcaatgagata

SEQ ID NO: 257671 - DNA, 25 bp, Homo sapien
aacaatgatatcctatgaaaagaaa

SEQ ID NO: 257672 - DNA, 25 bp, Homo sapien
ttgtcatatcgtaataaaatgaagg

SEQ ID NO: 257673 - DNA, 25 bp, Homo sapien
ccaaaaacaatgatatcctatgaaa

SEQ ID NO: 257674 - DNA, 25 bp, Homo sapien
aggccaaggtgaaagaatcaattga

SEQ ID NO: 257675 - DNA, 25 bp, Homo sapien
ggccaaggtgaaagaatcaattgag

SEQ ID NO: 257676 - DNA, 25 bp, Homo sapien
taagtgaatagtacaaaccagccac

SEQ ID NO: 257677 - DNA, 25 bp, Homo sapien
ggtataagtacttccacccaagcaa

SEQ ID NO: 257678 - DNA, 25 bp, Homo sapien
ccagggagacgctggtgatcattca

SEQ ID NO: 257679 - DNA, 25 bp, Homo sapien
gactttaggcgaaatggtgtggcaa

SEQ ID NO: 257680 - DNA, 25 bp, Homo sapien
catttcccacctactgaaaccaggg

SEQ ID NO: 257681 - DNA, 25 bp, Homo sapien
gcttttagacatgcaccacgaacag

SEQ ID NO: 257682 - DNA, 25 bp, Homo sapien
gatacccaagaatggagatttccca

SEQ ID NO: 257683 - DNA, 25 bp, Homo sapien
gacagtgtactgtgaccctcaacgg

SEQ ID NO: 257684 - DNA, 25 bp, Homo sapien
gcctggccacagctcttattgtttt

SEQ ID NO: 257685 - DNA, 25 bp, Homo sapien
gcaagcccaaagtaccaacctacaa

SEQ ID NO: 257686 - DNA, 25 bp, Homo sapien
tgtgcctggccacagctcttattgt

SEQ ID NO: 257687 - DNA, 25 bp, Homo sapien
agcccaaagtaccaacctacaatgg

SEQ ID NO: 257688 - DNA, 25 bp, Homo sapien
tttaatctgtgcaattgatataata

SEQ ID NO: 257689 - DNA, 25 bp, Homo sapien
tgtgcaattgatataataatgattc

SEQ ID NO: 257690 - DNA, 25 bp, Homo sapien
taaggggctgctatagtgtttgaca

SEQ ID NO: 257691 - DNA, 25 bp, Homo sapien
gtgtttgacatgaatatttggtcca

SEQ ID NO: 257692 - DNA, 25 bp, Homo sapien
tgctgagactggaaaatcgcaaaag

SEQ ID NO: 257693 - DNA, 25 bp, Homo sapien
tgtcagatgaaagacatgctgagac

SEQ ID NO: 257694 - DNA, 25 bp, Homo sapien
gtgtgtctatctgctgtcagatgaa

SEQ ID NO: 257695 - DNA, 25 bp, Homo sapien
cagtctctattcctctcagagaaag

SEQ ID NO: 257696 - DNA, 25 bp, Homo sapien
catgcccggccgtaactcgtctttt

SEQ ID NO: 257697 - DNA, 25 bp, Homo sapien
gtggcgcaatcgatcttgctcaccg

SEQ ID NO: 257698 - DNA, 25 bp, Homo sapien
caatgcttgagcacagagtagacaa

SEQ ID NO: 257699 - DNA, 25 bp, Homo sapien
cgtaactcgtcttttcactgaatct

SEQ ID NO: 257700 - DNA, 25 bp, Homo sapien
tcagctaccactggtacagaaggtg

SEQ ID NO: 257701 - DNA, 25 bp, Homo sapien
tcatcttccactgacgagttctgaa

SEQ ID NO: 257702 - DNA, 25 bp, Homo sapien
cctacattcgtgagactagttgcca

SEQ ID NO: 257703 - DNA, 25 bp, Homo sapien
ttagctggaccactaaatgagtttc

SEQ ID NO: 257704 - DNA, 25 bp, Homo sapien
gttacatgtgtaatcattaagttca

SEQ ID NO: 257705 - DNA, 25 bp, Homo sapien
taagttcatatctcgcccgtcagta

SEQ ID NO: 257706 - DNA, 25 bp, Homo sapien
tacttgactgcagtccgttagagac

SEQ ID NO: 257707 - DNA, 25 bp, Homo sapien
gtaacattagcaatctgaatttcag

SEQ ID NO: 257708 - DNA, 25 bp, Homo sapien
ccaggattaaaaggtcctactccag

SEQ ID NO: 257709 - DNA, 25 bp, Homo sapien
tcattctaccaggattaaaaggtcc

SEQ ID NO: 257710 - DNA, 25 bp, Homo sapien
cattctaccaggattaaaaggtcct

SEQ ID NO: 257711 - DNA, 25 bp, Homo sapien
attaaaaggtcctactccagtcttg

SEQ ID NO: 257712 - DNA, 25 bp, Homo sapien
ggattatgatgagttgcagattctc

SEQ ID NO: 257713 - DNA, 25 bp, Homo sapien
caggattatgatgagttgcagattc

SEQ ID NO: 257714 - DNA, 25 bp, Homo sapien
ttatgatgagttgcagattctccat

SEQ ID NO: 257715 - DNA, 25 bp, Homo sapien
gattatgatgagttgcagattctcc

SEQ ID NO: 257716 - DNA, 25 bp, Homo sapien
tgatgaaactaaacaaggtaatacc

SEQ ID NO: 257717 - DNA, 25 bp, Homo sapien
tcatttacatgaagtagagtatctc

SEQ ID NO: 257718 - DNA, 25 bp, Homo sapien
gattaactttttagtaatccacaga

SEQ ID NO: 257719 - DNA, 25 bp, Homo sapien
ttacatgaagtagagtatctcttac

SEQ ID NO: 257720 - DNA, 25 bp, Homo sapien
cactgttctttaagtgtgctattat

SEQ ID NO: 257721 - DNA, 25 bp, Homo sapien
taatcttttggttctctaatttata

SEQ ID NO: 257722 - DNA, 25 bp, Homo sapien
aaagtaatgcatgacaaacaagata

SEQ ID NO: 257723 - DNA, 25 bp, Homo sapien
tatattaatcttttggttctctaat

SEQ ID NO: 257724 - DNA, 25 bp, Homo sapien
tagtggtcatctttactcaggagga

SEQ ID NO: 257725 - DNA, 25 bp, Homo sapien
gatctgcatttccactaggttaaca

SEQ ID NO: 257726 - DNA, 25 bp, Homo sapien
caggctgctgtgtgctggctattaa

SEQ ID NO: 257727 - DNA, 25 bp, Homo sapien
tggctattaacacgcaccagcacag

SEQ ID NO: 257728 - DNA, 25 bp, Homo sapien
ctgttggacagacggctggaaaatc

SEQ ID NO: 257729 - DNA, 25 bp, Homo sapien
ctgctgttggacagacggctggaaa

SEQ ID NO: 257730 - DNA, 25 bp, Homo sapien
gtttgcacaagtgactttaactggt

SEQ ID NO: 257731 - DNA, 25 bp, Homo sapien
aactggtttagtaggctgctgttgg

SEQ ID NO: 257732 - DNA, 25 bp, Homo sapien
tctgtttgtcttcatagagagataa

SEQ ID NO: 257733 - DNA, 25 bp, Homo sapien
agatgtactacagaattcctggaag

SEQ ID NO: 257734 - DNA, 25 bp, Homo sapien
cagttagtttaccacagattgtaca

SEQ ID NO: 257735 - DNA, 25 bp, Homo sapien
tagagctcctttagtaggattctgt

SEQ ID NO: 257736 - DNA, 25 bp, Homo sapien
ggtcactgcacagcttatgagtcat

SEQ ID NO: 257737 - DNA, 25 bp, Homo sapien
tggtcactgcacagcttatgagtca

SEQ ID NO: 257738 - DNA, 25 bp, Homo sapien
gggcaagtactctccacactgttca

SEQ ID NO: 257739 - DNA, 25 bp, Homo sapien
gtattcactgacacaactttgacag

SEQ ID NO: 257740 - DNA, 25 bp, Homo sapien
atttccagcacctttactgggcaag

SEQ ID NO: 257741 - DNA, 25 bp, Homo sapien
tttctgttgaccatcaatcaccaga

SEQ ID NO: 257742 - DNA, 25 bp, Homo sapien
cactcttaaacatggctcaaagaag

SEQ ID NO: 257743 - DNA, 25 bp, Homo sapien
tgaacaaagggtctacttaccaaga

SEQ ID NO: 257744 - DNA, 25 bp, Homo sapien
taatagctggagacatcaatacacc

SEQ ID NO: 257745 - DNA, 25 bp, Homo sapien
gtggacaaaccatctagacagaatt

SEQ ID NO: 257746 - DNA, 25 bp, Homo sapien
cctgcatgtgatctcgaacctcctt

SEQ ID NO: 257747 - DNA, 25 bp, Homo sapien
tcaggaagcttggatggctacctac

SEQ ID NO: 257748 - DNA, 25 bp, Homo sapien
ttaagaaagagtcctgcatgtgatc

SEQ ID NO: 257749 - DNA, 25 bp, Homo sapien
tccttcaggaagcttggatggctac

SEQ ID NO: 257750 - DNA, 25 bp, Homo sapien
aaatgttaaggccttgaactccatt

SEQ ID NO: 257751 - DNA, 25 bp, Homo sapien
aaaatgttaaggccttgaactccat

SEQ ID NO: 257752 - DNA, 25 bp, Homo sapien
atttcaaattggacaagatttttca

SEQ ID NO: 257753 - DNA, 25 bp, Homo sapien
aacttttcaggtaggcacaaaagag

SEQ ID NO: 257754 - DNA, 25 bp, Homo sapien
tgagcatatcacaagaaaatacatg

SEQ ID NO: 257755 - DNA, 25 bp, Homo sapien
gaaatctatgtctcagagataaaac

SEQ ID NO: 257756 - DNA, 25 bp, Homo sapien
acatgactcattacccagaagaaga

SEQ ID NO: 257757 - DNA, 25 bp, Homo sapien
ggcagatatgaaaacagtaaggccg

SEQ ID NO: 257758 - DNA, 25 bp, Homo sapien
gaaaatcaaactatagaaacagatc

SEQ ID NO: 257759 - DNA, 25 bp, Homo sapien
tagaaacagatctagaaatggcaga

SEQ ID NO: 257760 - DNA, 25 bp, Homo sapien
gcattcatgagaagaaagcacctgt

SEQ ID NO: 257761 - DNA, 25 bp, Homo sapien
tacctgttcaagagtaggatgacct

SEQ ID NO: 257762 - DNA, 25 bp, Homo sapien
ggtagtatgaataaatagccccagg

SEQ ID NO: 257763 - DNA, 25 bp, Homo sapien
cacacatggccaggagtactctgta

SEQ ID NO: 257764 - DNA, 25 bp, Homo sapien
tagaaggcctccatgtatcagcacc

SEQ ID NO: 257765 - DNA, 25 bp, Homo sapien
taaaatattcgggacaactgccact

SEQ ID NO: 257766 - DNA, 25 bp, Homo sapien
gaaatggcgccccaagatataggct

SEQ ID NO: 257767 - DNA, 25 bp, Homo sapien
tacacacaaggtagcacagaactgt

SEQ ID NO: 257768 - DNA, 25 bp, Homo sapien
gcaatgatcatcagctaagtcgcct

SEQ ID NO: 257769 - DNA, 25 bp, Homo sapien
taactatgcaacaactgctaaggtc

SEQ ID NO: 257770 - DNA, 25 bp, Homo sapien
cactgagctgctattgttccaagca

SEQ ID NO: 257771 - DNA, 25 bp, Homo sapien
ctaaggtccaaacaaagcaatgatc

SEQ ID NO: 257772 - DNA, 25 bp, Homo sapien
gtcatatcaaaaaacctgcactgtg

SEQ ID NO: 257773 - DNA, 25 bp, Homo sapien
tatggctccatatatccattaggac

SEQ ID NO: 257774 - DNA, 25 bp, Homo sapien
ccattaggacctatacactgagtca

SEQ ID NO: 257775 - DNA, 25 bp, Homo sapien
caagcagttgaacaatatggctcca

SEQ ID NO: 257776 - DNA, 25 bp, Homo sapien
tggtattgaggtaaagagtttcgct

SEQ ID NO: 257777 - DNA, 25 bp, Homo sapien
gagtttcgcttacaaaaatggcaaa

SEQ ID NO: 257778 - DNA, 25 bp, Homo sapien
tttccatcaggcattgtggcttggt

SEQ ID NO: 257779 - DNA, 25 bp, Homo sapien
atttagccacacaactggaattgca

SEQ ID NO: 257780 - DNA, 25 bp, Homo sapien
tggctttatgcacgggtttgaacct

SEQ ID NO: 257781 - DNA, 25 bp, Homo sapien
taactcatgaagcatggctttatgc

SEQ ID NO: 257782 - DNA, 25 bp, Homo sapien
aattgttggatgaattaactcatga

SEQ ID NO: 257783 - DNA, 25 bp, Homo sapien
ctttatgcacgggtttgaacctttg

SEQ ID NO: 257784 - DNA, 25 bp, Homo sapien
cacttggcgctacaaactggccatt

SEQ ID NO: 257785 - DNA, 25 bp, Homo sapien
caaactggccatttggagatgactg

SEQ ID NO: 257786 - DNA, 25 bp, Homo sapien
tcacttggcgctacaaactggccat

SEQ ID NO: 257787 - DNA, 25 bp, Homo sapien
acttggcgctacaaactggccattt

SEQ ID NO: 257788 - DNA, 25 bp, Homo sapien
tcccattccaggatttctggttttg

SEQ ID NO: 257789 - DNA, 25 bp, Homo sapien
gcagtagttgcatttcaactgaata

SEQ ID NO: 257790 - DNA, 25 bp, Homo sapien
caaaaggaatttttgcagtagttgc

SEQ ID NO: 257791 - DNA, 25 bp, Homo sapien
caggatttctggttttgaacaaaag

SEQ ID NO: 257792 - DNA, 25 bp, Homo sapien
tctcctcttgacagtattcgcaata

SEQ ID NO: 257793 - DNA, 25 bp, Homo sapien
tttactgtttcatgaagagtcttct

SEQ ID NO: 257794 - DNA, 25 bp, Homo sapien
tatagtcatctgaacaagttttgct

SEQ ID NO: 257795 - DNA, 25 bp, Homo sapien
tacagaaaggtctcttaacgccaga

SEQ ID NO: 257796 - DNA, 25 bp, Homo sapien
tcaatcctaaacgtctggcaaaatc

SEQ ID NO: 257797 - DNA, 25 bp, Homo sapien
tgagaacaatagttgcaagtaacac

SEQ ID NO: 257798 - DNA, 25 bp, Homo sapien
gcagaaatctctcacaacaccatcg

SEQ ID NO: 257799 - DNA, 25 bp, Homo sapien
cccttcttacatagctgagaacaat

SEQ ID NO: 257800 - DNA, 25 bp, Homo sapien
tgaatagtattatcagggctgggcc

SEQ ID NO: 257801 - DNA, 25 bp, Homo sapien
gtagctgctgtaataaaggagttac

SEQ ID NO: 257802 - DNA, 25 bp, Homo sapien
gagttgccagatttgtaatggtaac

SEQ ID NO: 257803 - DNA, 25 bp, Homo sapien
cagctacaacgttttttaagactgg

SEQ ID NO: 257804 - DNA, 25 bp, Homo sapien
aacccctgaagccaacctaggcaat

SEQ ID NO: 257805 - DNA, 25 bp, Homo sapien
taaatgcctaccaatagtagagtgg

SEQ ID NO: 257806 - DNA, 25 bp, Homo sapien
aaatgtttctggtctctacttagtg

SEQ ID NO: 257807 - DNA, 25 bp, Homo sapien
ttcacaacagcaaacacctagagtc

SEQ ID NO: 257808 - DNA, 25 bp, Homo sapien
cagttggagccttagcagtcagccc

SEQ ID NO: 257809 - DNA, 25 bp, Homo sapien
aaaactaggcacacagaacagtgga

SEQ ID NO: 257810 - DNA, 25 bp, Homo sapien
taccctggcagacggaacttgacca

SEQ ID NO: 257811 - DNA, 25 bp, Homo sapien
ggtcagcctcgagtgtcctagaagc

SEQ ID NO: 257812 - DNA, 25 bp, Homo sapien
tgttcttgacccctaatatgctgag

SEQ ID NO: 257813 - DNA, 25 bp, Homo sapien
gacacttgagttggcagggaaagct

SEQ ID NO: 257814 - DNA, 25 bp, Homo sapien
cagctgatctggagcccacagggtt

SEQ ID NO: 257815 - DNA, 25 bp, Homo sapien
tgctgagggcacaagttaggtgaac

SEQ ID NO: 257816 - DNA, 25 bp, Homo sapien
caactgtacccacaatgaagtttca

SEQ ID NO: 257817 - DNA, 25 bp, Homo sapien
tgactagacgcagccaggtagaaga

SEQ ID NO: 257818 - DNA, 25 bp, Homo sapien
gactgagagtactggtgcactccta

SEQ ID NO: 257819 - DNA, 25 bp, Homo sapien
gtttcagcattgagatggttttcca

SEQ ID NO: 257820 - DNA, 25 bp, Homo sapien
taaacaatgggtataaaagtgcact

SEQ ID NO: 257821 - DNA, 25 bp, Homo sapien
caacttgggaattactttacagctc

SEQ ID NO: 257822 - DNA, 25 bp, Homo sapien
tttaaagctgggagatcattcattc

SEQ ID NO: 257823 - DNA, 25 bp, Homo sapien
taaactaacatcaagcattgcaagg

SEQ ID NO: 257824 - DNA, 25 bp, Homo sapien
gggactataggggtatgaaatcaca

SEQ ID NO: 257825 - DNA, 25 bp, Homo sapien
ctcccaacttcaaacaaccctctca

SEQ ID NO: 257826 - DNA, 25 bp, Homo sapien
ggactataggggtatgaaatcacac

SEQ ID NO: 257827 - DNA, 25 bp, Homo sapien
caacttcaaacaaccctctcacctc

SEQ ID NO: 257828 - DNA, 25 bp, Homo sapien
gacaaacaggtcttacataacaaac

SEQ ID NO: 257829 - DNA, 25 bp, Homo sapien
tcctggtcaggaatgttaacaaatg

SEQ ID NO: 257830 - DNA, 25 bp, Homo sapien
tcaattaccctttggcttaacagct

SEQ ID NO: 257831 - DNA, 25 bp, Homo sapien
tgtagttcgtagtaactgtggccat

SEQ ID NO: 257832 - DNA, 25 bp, Homo sapien
taatgtactggtagaattgtctcct

SEQ ID NO: 257833 - DNA, 25 bp, Homo sapien
tttatgagtaatgaacggatttccc

SEQ ID NO: 257834 - DNA, 25 bp, Homo sapien
gataaaaccgtgactgatacagaaa

SEQ ID NO: 257835 - DNA, 25 bp, Homo sapien
caaagaccagcattacaaaagtagg

SEQ ID NO: 257836 - DNA, 25 bp, Homo sapien
ccactgaactcgctctttaagagtt

SEQ ID NO: 257837 - DNA, 25 bp, Homo sapien
ttccccacgccactgaactcgctct

SEQ ID NO: 257838 - DNA, 25 bp, Homo sapien
cccacgccactgaactcgctcttta

SEQ ID NO: 257839 - DNA, 25 bp, Homo sapien
cgccactgaactcgctctttaagag

SEQ ID NO: 257840 - DNA, 25 bp, Homo sapien
gtaagcaatgttgatcacagaaatg

SEQ ID NO: 257841 - DNA, 25 bp, Homo sapien
agaaacgcagtaagcaatgttgatc

SEQ ID NO: 257842 - DNA, 25 bp, Homo sapien
aagcaatgttgatcacagaaatgtt

SEQ ID NO: 257843 - DNA, 25 bp, Homo sapien
agtagaaacgcagtaagcaatgttg

SEQ ID NO: 257844 - DNA, 25 bp, Homo sapien
cataatgtaagttttcaggtccttt

SEQ ID NO: 257845 - DNA, 25 bp, Homo sapien
agttttcaggtcctttctgagttgt

SEQ ID NO: 257846 - DNA, 25 bp, Homo sapien
tgtaagttttcaggtcctttctgag

SEQ ID NO: 257847 - DNA, 25 bp, Homo sapien
aatgtaagttttcaggtcctttctg

SEQ ID NO: 257848 - DNA, 25 bp, Homo sapien
tttggttcgagatgtctgacaaccc

SEQ ID NO: 257849 - DNA, 25 bp, Homo sapien
gttcgagatgtctgacaaccctgat

SEQ ID NO: 257850 - DNA, 25 bp, Homo sapien
tggttcgagatgtctgacaaccctg

SEQ ID NO: 257851 - DNA, 25 bp, Homo sapien
ggttcgagatgtctgacaaccctga

SEQ ID NO: 257852 - DNA, 25 bp, Homo sapien
cttcatctctttgttaggtgttgga

SEQ ID NO: 257853 - DNA, 25 bp, Homo sapien
tcatctctttgttaggtgttggaga

SEQ ID NO: 257854 - DNA, 25 bp, Homo sapien
attgttaaaggtttgcaaagaactg

SEQ ID NO: 257855 - DNA, 25 bp, Homo sapien
taaaggtttgcaaagaactgctttg

SEQ ID NO: 257856 - DNA, 25 bp, Homo sapien
aactgtagtaggaacaggaatattc

SEQ ID NO: 257857 - DNA, 25 bp, Homo sapien
attctgactgtacatgtgcatagga

SEQ ID NO: 257858 - DNA, 25 bp, Homo sapien
gaacatattctgtcctccaagtatc

SEQ ID NO: 257859 - DNA, 25 bp, Homo sapien
tgactgtacatgtgcataggaactg

SEQ ID NO: 257860 - DNA, 25 bp, Homo sapien
tgatgttggttgtctctgttttccc

SEQ ID NO: 257861 - DNA, 25 bp, Homo sapien
aactctgtatcaagagcatctgaag

SEQ ID NO: 257862 - DNA, 25 bp, Homo sapien
ttttagctcctcaattgctgcagga

SEQ ID NO: 257863 - DNA, 25 bp, Homo sapien
tgtccaatggagcaggcagaaaaac

SEQ ID NO: 257864 - DNA, 25 bp, Homo sapien
aacaatacttataaataaccaatgt

SEQ ID NO: 257865 - DNA, 25 bp, Homo sapien
ccaatgttaacacttattcgcaagg

SEQ ID NO: 257866 - DNA, 25 bp, Homo sapien
cacttattcgcaaggtataatttag

SEQ ID NO: 257867 - DNA, 25 bp, Homo sapien
caaggtataatttagtgtagctcac

SEQ ID NO: 257868 - DNA, 25 bp, Homo sapien
atctggttcatatggtacatcaggc

SEQ ID NO: 257869 - DNA, 25 bp, Homo sapien
tctgggaaaatctatttcgatatcc

SEQ ID NO: 257870 - DNA, 25 bp, Homo sapien
gaaaatctatttcgatatccaaatc

SEQ ID NO: 257871 - DNA, 25 bp, Homo sapien
tcaggcatgctggactgtgtctctg

SEQ ID NO: 257872 - DNA, 25 bp, Homo sapien
ccatagtcataaaggttttgagtac

SEQ ID NO: 257873 - DNA, 25 bp, Homo sapien
tatgaagttaactcttaaggtgagt

SEQ ID NO: 257874 - DNA, 25 bp, Homo sapien
gtgatctcattccagaagttaactg

SEQ ID NO: 257875 - DNA, 25 bp, Homo sapien
tgatcataaccacagttgactccat

SEQ ID NO: 257876 - DNA, 25 bp, Homo sapien
gaactaaccacaggatgtaaaccag

SEQ ID NO: 257877 - DNA, 25 bp, Homo sapien
tgaaatagcacagggttacataaac

SEQ ID NO: 257878 - DNA, 25 bp, Homo sapien
tggtcttggtacaaatctgattcaa

SEQ ID NO: 257879 - DNA, 25 bp, Homo sapien
aaatgactcattgtacctaacatgg

SEQ ID NO: 257880 - DNA, 25 bp, Homo sapien
tcttcgccaaaaacaggtggtaata

SEQ ID NO: 257881 - DNA, 25 bp, Homo sapien
tttagatcgaggtctgggctgttcc

SEQ ID NO: 257882 - DNA, 25 bp, Homo sapien
ttttttagatcgaggtctgggctgt

SEQ ID NO: 257883 - DNA, 25 bp, Homo sapien
tcctcatattcttcgccaaaaacag

SEQ ID NO: 257884 - DNA, 25 bp, Homo sapien
taatcgtggaaaaaacagctcccta

SEQ ID NO: 257885 - DNA, 25 bp, Homo sapien
taaaacctgctttatgttggaagtc

SEQ ID NO: 257886 - DNA, 25 bp, Homo sapien
tacctgaatgatcaaactgtccagc

SEQ ID NO: 257887 - DNA, 25 bp, Homo sapien
aaactgtgtacttcaaccccactga

SEQ ID NO: 257888 - DNA, 25 bp, Homo sapien
cactgcattgtacaacggtcatctg

SEQ ID NO: 257889 - DNA, 25 bp, Homo sapien
gacaacagtcaattaatattccagg

SEQ ID NO: 257890 - DNA, 25 bp, Homo sapien
ggtattcctgaatctgacaacagtc

SEQ ID NO: 257891 - DNA, 25 bp, Homo sapien
tccaccttatagagagtgacactta

SEQ ID NO: 257892 - DNA, 25 bp, Homo sapien
cacttggacacgtatgtttttctgt

SEQ ID NO: 257893 - DNA, 25 bp, Homo sapien
tctcaacaaaggcaaattacaattg

SEQ ID NO: 257894 - DNA, 25 bp, Homo sapien
ctacctcttccaatcgtgccacctg

SEQ ID NO: 257895 - DNA, 25 bp, Homo sapien
tgaactgcaggggtccacttggaca

SEQ ID NO: 257896 - DNA, 25 bp, Homo sapien
gaattgtcagaactatcatcatgag

SEQ ID NO: 257897 - DNA, 25 bp, Homo sapien
cagtgtttccatgcatttacgccat

SEQ ID NO: 257898 - DNA, 25 bp, Homo sapien
tacgccatacgtatatttgaaagga

SEQ ID NO: 257899 - DNA, 25 bp, Homo sapien
caagttgcctagttttgacccagtg

SEQ ID NO: 257900 - DNA, 25 bp, Homo sapien
tgtggtgtgagagagtagatcctct

SEQ ID NO: 257901 - DNA, 25 bp, Homo sapien
tctctccatttggccgtcggatctc

SEQ ID NO: 257902 - DNA, 25 bp, Homo sapien
aggtaatagatgctgtcaggtgcat

SEQ ID NO: 257903 - DNA, 25 bp, Homo sapien
ccatttggccgtcggatctcattga

SEQ ID NO: 257904 - DNA, 25 bp, Homo sapien
ggccgtcggatctcattgacaaaat

SEQ ID NO: 257905 - DNA, 25 bp, Homo sapien
tcagtgatttacttcattatctaac

SEQ ID NO: 257906 - DNA, 25 bp, Homo sapien
cagtgatttacttcattatctaaca

SEQ ID NO: 257907 - DNA, 25 bp, Homo sapien
agtgatttacttcattatctaacac

SEQ ID NO: 257908 - DNA, 25 bp, Homo sapien
cctattcacgtatcttttaggttgc

SEQ ID NO: 257909 - DNA, 25 bp, Homo sapien
tacagtgatttatagccatgcacta

SEQ ID NO: 257910 - DNA, 25 bp, Homo sapien
gctactgcaagatatatgatggtcc

SEQ ID NO: 257911 - DNA, 25 bp, Homo sapien
catgcactatatatctgcaccacca

SEQ ID NO: 257912 - DNA, 25 bp, Homo sapien
gcatgaggctcaaagtacatgtaaa

SEQ ID NO: 257913 - DNA, 25 bp, Homo sapien
ctaagcatgaggctcaaagtacatg

SEQ ID NO: 257914 - DNA, 25 bp, Homo sapien
catgaggctcaaagtacatgtaaac

SEQ ID NO: 257915 - DNA, 25 bp, Homo sapien
aagcatgaggctcaaagtacatgta

SEQ ID NO: 257916 - DNA, 25 bp, Homo sapien
gtttgtggaatggtggacctatatt

SEQ ID NO: 257917 - DNA, 25 bp, Homo sapien
ttgtggaatggtggacctatattat

SEQ ID NO: 257918 - DNA, 25 bp, Homo sapien
aggtttgtggaatggtggacctata

SEQ ID NO: 257919 - DNA, 25 bp, Homo sapien
cagaggtttgtggaatggtggacct

SEQ ID NO: 257920 - DNA, 25 bp, Homo sapien
acgcctgtaatcaagagaacgagac

SEQ ID NO: 257921 - DNA, 25 bp, Homo sapien
tgacacatcaagcacgtagcatagt

SEQ ID NO: 257922 - DNA, 25 bp, Homo sapien
cagtcagtaaatgtaagttgtcaac

SEQ ID NO: 257923 - DNA, 25 bp, Homo sapien
tgttgagaggactgaatgacacatc

SEQ ID NO: 257924 - DNA, 25 bp, Homo sapien
ttccagccaggctaagtagttcctg

SEQ ID NO: 257925 - DNA, 25 bp, Homo sapien
tcaatgtcatctaaattcctatact

SEQ ID NO: 257926 - DNA, 25 bp, Homo sapien
tctctcatccctttgctgaataaat

SEQ ID NO: 257927 - DNA, 25 bp, Homo sapien
cacttcacattatacattccagcca

SEQ ID NO: 257928 - DNA, 25 bp, Homo sapien
tattttatactcagaacacttctca

SEQ ID NO: 257929 - DNA, 25 bp, Homo sapien
ggtactagtacttgagaagcaaaat

SEQ ID NO: 257930 - DNA, 25 bp, Homo sapien
tagggcaaagcagcacgttgacaga

SEQ ID NO: 257931 - DNA, 25 bp, Homo sapien
tctttgggactatacatgagaaaac

SEQ ID NO: 257932 - DNA, 25 bp, Homo sapien
tgctgttattttccaccataggcag

SEQ ID NO: 257933 - DNA, 25 bp, Homo sapien
taggcctgtctgaagagtagatttc

SEQ ID NO: 257934 - DNA, 25 bp, Homo sapien
ttgtggtagtatgggaagcaatgcc

SEQ ID NO: 257935 - DNA, 25 bp, Homo sapien
gcaccaaagcccttgcaaccaatga

SEQ ID NO: 257936 - DNA, 25 bp, Homo sapien
taaaggcaaggttcgacaatatgct

SEQ ID NO: 257937 - DNA, 25 bp, Homo sapien
gtacaccatgtatacactaatcaaa

SEQ ID NO: 257938 - DNA, 25 bp, Homo sapien
gaccgaggcccagtctcaaggaaaa

SEQ ID NO: 257939 - DNA, 25 bp, Homo sapien
catctgagttgatccaatgttattc

SEQ ID NO: 257940 - DNA, 25 bp, Homo sapien
tctgactttgtcaggctaacgcttt

SEQ ID NO: 257941 - DNA, 25 bp, Homo sapien
taacagtgagggtggttacagaatc

SEQ ID NO: 257942 - DNA, 25 bp, Homo sapien
taaggctcttaaactacatgtgaag

SEQ ID NO: 257943 - DNA, 25 bp, Homo sapien
gggagtacactgttctaaggctctt

SEQ ID NO: 257944 - DNA, 25 bp, Homo sapien
acatattacactccgtatttcttaa

SEQ ID NO: 257945 - DNA, 25 bp, Homo sapien
attatagtaaacatattacactccg

SEQ ID NO: 257946 - DNA, 25 bp, Homo sapien
gtaaacatattacactccgtatttc

SEQ ID NO: 257947 - DNA, 25 bp, Homo sapien
tattacactccgtatttcttaagaa

SEQ ID NO: 257948 - DNA, 25 bp, Homo sapien
tatgttgtcttttcgattacttcca

SEQ ID NO: 257949 - DNA, 25 bp, Homo sapien
gtcttttcgattacttccacacaaa

SEQ ID NO: 257950 - DNA, 25 bp, Homo sapien
gccagcttcgcagtattttattcaa

SEQ ID NO: 257951 - DNA, 25 bp, Homo sapien
catctggaagtatgcttggttgcca

SEQ ID NO: 257952 - DNA, 25 bp, Homo sapien
gagcaacacctttagtgaaaatagc

SEQ ID NO: 257953 - DNA, 25 bp, Homo sapien
cagatgagctcgagtaagtgttcag

SEQ ID NO: 257954 - DNA, 25 bp, Homo sapien
gaacatccagtctcgtactccagag

SEQ ID NO: 257955 - DNA, 25 bp, Homo sapien
caatcctaatatcaagagagcaaca

SEQ ID NO: 257956 - DNA, 25 bp, Homo sapien
gtgttgttccactgttttcaggcca

SEQ ID NO: 257957 - DNA, 25 bp, Homo sapien
tcagaagagctactggagagtgtga

SEQ ID NO: 257958 - DNA, 25 bp, Homo sapien
gagatagtcttcttcaactcgagag

SEQ ID NO: 257959 - DNA, 25 bp, Homo sapien
gagagtgtgatcctagttgttttat

SEQ ID NO: 257960 - DNA, 25 bp, Homo sapien
tatctgttccacacaaggaagacac

SEQ ID NO: 257961 - DNA, 25 bp, Homo sapien
cacttggtatcgaagacacgctttg

SEQ ID NO: 257962 - DNA, 25 bp, Homo sapien
gtatcgaagacacgctttgttttcc

SEQ ID NO: 257963 - DNA, 25 bp, Homo sapien
caaggaagacacttggtatcgaaga

SEQ ID NO: 257964 - DNA, 25 bp, Homo sapien
tcctagtgtctgttataccaaagaa

SEQ ID NO: 257965 - DNA, 25 bp, Homo sapien
taccaaagaataggaccaggtgccc

SEQ ID NO: 257966 - DNA, 25 bp, Homo sapien
gaactgagacatcttaagacatagg

SEQ ID NO: 257967 - DNA, 25 bp, Homo sapien
gcaaggtttggatatccctaccata

SEQ ID NO: 257968 - DNA, 25 bp, Homo sapien
gacatctggaaggattggctgtgtt

SEQ ID NO: 257969 - DNA, 25 bp, Homo sapien
tcacaggacatctggaaggattggc

SEQ ID NO: 257970 - DNA, 25 bp, Homo sapien
tgttcaaatactggctcatcatctt

SEQ ID NO: 257971 - DNA, 25 bp, Homo sapien
caaatactggctcatcatcttcatg

SEQ ID NO: 257972 - DNA, 25 bp, Homo sapien
tgtgcatcccagtttcagaaatagt

SEQ ID NO: 257973 - DNA, 25 bp, Homo sapien
taatcacgttatatgaccagacccc

SEQ ID NO: 257974 - DNA, 25 bp, Homo sapien
aactgaagaccctgacactactgca

SEQ ID NO: 257975 - DNA, 25 bp, Homo sapien
acctcatgtgaggagttcgcgccca

SEQ ID NO: 257976 - DNA, 25 bp, Homo sapien
cagacagggctatctgtagaactag

SEQ ID NO: 257977 - DNA, 25 bp, Homo sapien
tttactagaagaacccgtacaagca

SEQ ID NO: 257978 - DNA, 25 bp, Homo sapien
caaggtgtttcggtccagtgaagta

SEQ ID NO: 257979 - DNA, 25 bp, Homo sapien
gaagtagacgtataccagacagggc

SEQ ID NO: 257980 - DNA, 25 bp, Homo sapien
taatacccagcgtgggtacactgct

SEQ ID NO: 257981 - DNA, 25 bp, Homo sapien
gaataatggcaactttcactcacag

SEQ ID NO: 257982 - DNA, 25 bp, Homo sapien
caaggaagctttgcaacagtagagt

SEQ ID NO: 257983 - DNA, 25 bp, Homo sapien
taaaaattccgaaagacactgcaag

SEQ ID NO: 257984 - DNA, 25 bp, Homo sapien
gcatagattcacattacagtacacc

SEQ ID NO: 257985 - DNA, 25 bp, Homo sapien
ggtacagaagatggtatctctctac

SEQ ID NO: 257986 - DNA, 25 bp, Homo sapien
aaaaattgttttcaccagcatagat

SEQ ID NO: 257987 - DNA, 25 bp, Homo sapien
tctacataaccttgtaaggcttcag

SEQ ID NO: 257988 - DNA, 25 bp, Homo sapien
catatacaataagtgacacctggga

SEQ ID NO: 257989 - DNA, 25 bp, Homo sapien
ggaatatagcaccactttgaagact

SEQ ID NO: 257990 - DNA, 25 bp, Homo sapien
gagtactacacagctaacattgcag

SEQ ID NO: 257991 - DNA, 25 bp, Homo sapien
tagcaattgctagccactatggaaa

SEQ ID NO: 257992 - DNA, 25 bp, Homo sapien
ttttccacttcattacaaggcaggg

SEQ ID NO: 257993 - DNA, 25 bp, Homo sapien
taacaactaatggtctgtggccctc

SEQ ID NO: 257994 - DNA, 25 bp, Homo sapien
gcagcagccttttagcacagaggaa

SEQ ID NO: 257995 - DNA, 25 bp, Homo sapien
taactaccatggttagcagcagcct

SEQ ID NO: 257996 - DNA, 25 bp, Homo sapien
gagcagcacactcataacttggaaa

SEQ ID NO: 257997 - DNA, 25 bp, Homo sapien
gcatggtgagggtgctctagctacc

SEQ ID NO: 257998 - DNA, 25 bp, Homo sapien
taatcacaggtggtagtaatcctct

SEQ ID NO: 257999 - DNA, 25 bp, Homo sapien
gaggtcagcaatccctaatcacgaa

SEQ ID NO: 258000 - DNA, 25 bp, Homo sapien
tgttctgctcttaacagcaaggtga

SEQ ID NO: 258001 - DNA, 25 bp, Homo sapien
tgtgtcacaaaaagtagcttcttgg

SEQ ID NO: 258002 - DNA, 25 bp, Homo sapien
ggtgctagggatccaacagggaaaa

SEQ ID NO: 258003 - DNA, 25 bp, Homo sapien
taaagatcgagagccttccatctgg

SEQ ID NO: 258004 - DNA, 25 bp, Homo sapien
catgtcactagccagcaacgttcct

SEQ ID NO: 258005 - DNA, 25 bp, Homo sapien
tagccagcaacgttcctcaaacagg

SEQ ID NO: 258006 - DNA, 25 bp, Homo sapien
gcaacgttcctcaaacaggagaatc

SEQ ID NO: 258007 - DNA, 25 bp, Homo sapien
tcagtgataaaatcaaccccttctc

SEQ ID NO: 258008 - DNA, 25 bp, Homo sapien
ttcaataggacggagaagcttctgg

SEQ ID NO: 258009 - DNA, 25 bp, Homo sapien
tttgggtgttaactgaacgcttgcc

SEQ ID NO: 258010 - DNA, 25 bp, Homo sapien
ggagtttctgctatctctgacacaa

SEQ ID NO: 258011 - DNA, 25 bp, Homo sapien
aacgcttgcccacgtgatgttctca

SEQ ID NO: 258012 - DNA, 25 bp, Homo sapien
ttcccacatgcccagtggttccctt

SEQ ID NO: 258013 - DNA, 25 bp, Homo sapien
aagggctttgagcagcgggcctgcc

SEQ ID NO: 258014 - DNA, 25 bp, Homo sapien
gcaaagttgcgaggccttccatgaa

SEQ ID NO: 258015 - DNA, 25 bp, Homo sapien
ccttcctcggtgacttcacttcttt

SEQ ID NO: 258016 - DNA, 25 bp, Homo sapien
ctggaccccagccacggtgagcagc

SEQ ID NO: 258017 - DNA, 25 bp, Homo sapien
accccagccacggtgagcagctgga

SEQ ID NO: 258018 - DNA, 25 bp, Homo sapien
tggaccccagccacggtgagcagct

SEQ ID NO: 258019 - DNA, 25 bp, Homo sapien
ttaggcatcgtccttcagagatcct

SEQ ID NO: 258020 - DNA, 25 bp, Homo sapien
ctctgggtccgcgtctctttgtgat

SEQ ID NO: 258021 - DNA, 25 bp, Homo sapien
ctctttgtgatcaactccagcctct

SEQ ID NO: 258022 - DNA, 25 bp, Homo sapien
gagctctgcattgcacctgggtcca

SEQ ID NO: 258023 - DNA, 25 bp, Homo sapien
gagctgccgccgactgttaaggaag

SEQ ID NO: 258024 - DNA, 25 bp, Homo sapien
taaggaaggccctttgcacccaaga

SEQ ID NO: 258025 - DNA, 25 bp, Homo sapien
tccatactggtaaaatcctgagctg

SEQ ID NO: 258026 - DNA, 25 bp, Homo sapien
tcacaggaggaaggtaacgtgacct

SEQ ID NO: 258027 - DNA, 25 bp, Homo sapien
gggacgcgcgggctggccctgctgc

SEQ ID NO: 258028 - DNA, 25 bp, Homo sapien
ttgaccctgagggacgcgcgggctg

SEQ ID NO: 258029 - DNA, 25 bp, Homo sapien
cgccttcgctctcgcagggcaaggt

SEQ ID NO: 258030 - DNA, 25 bp, Homo sapien
tctcgcagggcaaggttgctcagca

SEQ ID NO: 258031 - DNA, 25 bp, Homo sapien
gaagtggacctgacgcttcctgctt

SEQ ID NO: 258032 - DNA, 25 bp, Homo sapien
ttcccacagaactgcggattatgtt

SEQ ID NO: 258033 - DNA, 25 bp, Homo sapien
cagcattcatgggtgcgatgcacac

SEQ ID NO: 258034 - DNA, 25 bp, Homo sapien
gcggattatgttgtccagtaatggg

SEQ ID NO: 258035 - DNA, 25 bp, Homo sapien
caggaacccgtaacgatcctgtacg

SEQ ID NO: 258036 - DNA, 25 bp, Homo sapien
tgtacggtggacagttccacgcccg

SEQ ID NO: 258037 - DNA, 25 bp, Homo sapien
cgtaacgatcctgtacggtggacag

SEQ ID NO: 258038 - DNA, 25 bp, Homo sapien
cgcccgagtccaggtgagccgttgt

SEQ ID NO: 258039 - DNA, 25 bp, Homo sapien
ttttcagcgcttgataaggaacgca

SEQ ID NO: 258040 - DNA, 25 bp, Homo sapien
cagtataacacaaagcagccggcct

SEQ ID NO: 258041 - DNA, 25 bp, Homo sapien
gggagtttcccatattgccgacaag

SEQ ID NO: 258042 - DNA, 25 bp, Homo sapien
gaagctgtcccgcatggaattctac

SEQ ID NO: 258043 - DNA, 25 bp, Homo sapien
tttatattacagtgcaaatcttggg

SEQ ID NO: 258044 - DNA, 25 bp, Homo sapien
caagttagggatttgaataacactc

SEQ ID NO: 258045 - DNA, 25 bp, Homo sapien
caaagatgaatagagtcctgccacc

SEQ ID NO: 258046 - DNA, 25 bp, Homo sapien
aatcttgggttgactcactttaagg

SEQ ID NO: 258047 - DNA, 25 bp, Homo sapien
cggcagggtgcgcatggccggggcg

SEQ ID NO: 258048 - DNA, 25 bp, Homo sapien
gcagggtgcgcatggccggggcgct

SEQ ID NO: 258049 - DNA, 25 bp, Homo sapien
ggcagggtgcgcatggccggggcgc

SEQ ID NO: 258050 - DNA, 25 bp, Homo sapien
gcggcagggtgcgcatggccggggc

SEQ ID NO: 258051 - DNA, 25 bp, Homo sapien
tcaccagggttagcctctggttcat

SEQ ID NO: 258052 - DNA, 25 bp, Homo sapien
cctctttaaacggtgccatcatttt

SEQ ID NO: 258053 - DNA, 25 bp, Homo sapien
tgccatcattttcccggtcaccagg

SEQ ID NO: 258054 - DNA, 25 bp, Homo sapien
cagctcaggtcagcacttgccccaa

SEQ ID NO: 258055 - DNA, 25 bp, Homo sapien
actgatgctcctccgcggctttcca

SEQ ID NO: 258056 - DNA, 25 bp, Homo sapien
cacatggaacttctctcgtgttgtg

SEQ ID NO: 258057 - DNA, 25 bp, Homo sapien
gggtatcgggagtctgacacatgga

SEQ ID NO: 258058 - DNA, 25 bp, Homo sapien
ggctcccatgtcctggagccccggt

SEQ ID NO: 258059 - DNA, 25 bp, Homo sapien
gttggctctggatgagagtaatgtt

SEQ ID NO: 258060 - DNA, 25 bp, Homo sapien
ttggctctggatgagagtaatgttt

SEQ ID NO: 258061 - DNA, 25 bp, Homo sapien
tggctctggatgagagtaatgtttc

SEQ ID NO: 258062 - DNA, 25 bp, Homo sapien
ggtaggcgtccctctcaagcgtggt

SEQ ID NO: 258063 - DNA, 25 bp, Homo sapien
ggcaggttaggcctcgccctggcat

SEQ ID NO: 258064 - DNA, 25 bp, Homo sapien
gttaaaatcttcgttgggcgccagc

SEQ ID NO: 258065 - DNA, 25 bp, Homo sapien
cagacagcagacaaggacgcgatgc

SEQ ID NO: 258066 - DNA, 25 bp, Homo sapien
tggtgaggagtggatcatcttgccc

SEQ ID NO: 258067 - DNA, 25 bp, Homo sapien
atcttgcccagtcgggctgggcgca

SEQ ID NO: 258068 - DNA, 25 bp, Homo sapien
agtggatcatcttgcccagtcgggc

SEQ ID NO: 258069 - DNA, 25 bp, Homo sapien
cctcagaaccacaggctgacgactt

SEQ ID NO: 258070 - DNA, 25 bp, Homo sapien
caggaggcgaggagctcttcttgta

SEQ ID NO: 258071 - DNA, 25 bp, Homo sapien
aggaggcgaggagctcttcttgtac

SEQ ID NO: 258072 - DNA, 25 bp, Homo sapien
gaggccacattccaaatccagcttg

SEQ ID NO: 258073 - DNA, 25 bp, Homo sapien
gctccaaaggcctttgcatgatctc

SEQ ID NO: 258074 - DNA, 25 bp, Homo sapien
gcctttgcatgatctccaggagttt

SEQ ID NO: 258075 - DNA, 25 bp, Homo sapien
tctgtatcaccctcagcactgaggg

SEQ ID NO: 258076 - DNA, 25 bp, Homo sapien
tcagcgaatggacagagaagcaaaa

SEQ ID NO: 258077 - DNA, 25 bp, Homo sapien
caaaatgtagtctatgcatgcaatg

SEQ ID NO: 258078 - DNA, 25 bp, Homo sapien
tatattcttacgaagggaaatcacc

SEQ ID NO: 258079 - DNA, 25 bp, Homo sapien
aaaggagagagatctcaatgtgaac

SEQ ID NO: 258080 - DNA, 25 bp, Homo sapien
caggttccacagaggacacagagaa

SEQ ID NO: 258081 - DNA, 25 bp, Homo sapien
ccagtgccttaaactctgttacact

SEQ ID NO: 258082 - DNA, 25 bp, Homo sapien
cagtggacaaagttaccagtgcctt

SEQ ID NO: 258083 - DNA, 25 bp, Homo sapien
cacgttaaaggtgaacattggttct

SEQ ID NO: 258084 - DNA, 25 bp, Homo sapien
ctccttgcagttccccagttgcgaa

SEQ ID NO: 258085 - DNA, 25 bp, Homo sapien
gggcaccctccgcagatggcgggac

SEQ ID NO: 258086 - DNA, 25 bp, Homo sapien
ccagttgcgaaaagaggaggaagtt

SEQ ID NO: 258087 - DNA, 25 bp, Homo sapien
tcctcaccccgaaaggagtcacctc

SEQ ID NO: 258088 - DNA, 25 bp, Homo sapien
tgccctagaggagtcctgagcctac

SEQ ID NO: 258089 - DNA, 25 bp, Homo sapien
tgtgataatacgactagccaacatc

SEQ ID NO: 258090 - DNA, 25 bp, Homo sapien
taagtgctataggacttccagctac

SEQ ID NO: 258091 - DNA, 25 bp, Homo sapien
aaagcaagcgctgatctgtaagtga

SEQ ID NO: 258092 - DNA, 25 bp, Homo sapien
gcaatataagtgtgtaatttacaaa

SEQ ID NO: 258093 - DNA, 25 bp, Homo sapien
taacttcaaatatccaagccttccc

SEQ ID NO: 258094 - DNA, 25 bp, Homo sapien
ggatttacgtctaagctcatttgta

SEQ ID NO: 258095 - DNA, 25 bp, Homo sapien
tgtggtgtcatctgttaactggatt

SEQ ID NO: 258096 - DNA, 25 bp, Homo sapien
cccatctcacaggacagcgtggctg

SEQ ID NO: 258097 - DNA, 25 bp, Homo sapien
tccagctaattgtcctaagatatca

SEQ ID NO: 258098 - DNA, 25 bp, Homo sapien
acaaatgggcctcgagggagagccc

SEQ ID NO: 258099 - DNA, 25 bp, Homo sapien
tatcatacagcccattgacaaatgg

SEQ ID NO: 258100 - DNA, 25 bp, Homo sapien
ccttatcttctctgatacagacaga

SEQ ID NO: 258101 - DNA, 25 bp, Homo sapien
tacactgacagaacccgatgtcctg

SEQ ID NO: 258102 - DNA, 25 bp, Homo sapien
tcccagatttggatgtggatgcgag

SEQ ID NO: 258103 - DNA, 25 bp, Homo sapien
cgatgtcctgatgcgctctgtgcct

SEQ ID NO: 258104 - DNA, 25 bp, Homo sapien
tccctatgcgccagaactgctgttg

SEQ ID NO: 258105 - DNA, 25 bp, Homo sapien
gaataacctccctatgcgccagaac

SEQ ID NO: 258106 - DNA, 25 bp, Homo sapien
gtttctcccacccatgaggagtact

SEQ ID NO: 258107 - DNA, 25 bp, Homo sapien
cccatgaggagtacttaggtgaatg

SEQ ID NO: 258108 - DNA, 25 bp, Homo sapien
tggaacttcaacagcgatacttgca

SEQ ID NO: 258109 - DNA, 25 bp, Homo sapien
cacatgccttgtggtttctgttgca

SEQ ID NO: 258110 - DNA, 25 bp, Homo sapien
agcttgctgccaaccctcgtggtat

SEQ ID NO: 258111 - DNA, 25 bp, Homo sapien
tcaataaagctcgtccccattgctt

SEQ ID NO: 258112 - DNA, 25 bp, Homo sapien
gatgtcccgctgataaggatgttcc

SEQ ID NO: 258113 - DNA, 25 bp, Homo sapien
tgtttcacattccagggtcaccgcc

SEQ ID NO: 258114 - DNA, 25 bp, Homo sapien
tctctcggctgtgaggtaacctcca

SEQ ID NO: 258115 - DNA, 25 bp, Homo sapien
tcttagtcctagatccacgcaggca

SEQ ID NO: 258116 - DNA, 25 bp, Homo sapien
agccactgtggactgattcgattat

SEQ ID NO: 258117 - DNA, 25 bp, Homo sapien
gactgattcgattattctggaactc

SEQ ID NO: 258118 - DNA, 25 bp, Homo sapien
caggagcacgggcaggtttgagcat

SEQ ID NO: 258119 - DNA, 25 bp, Homo sapien
tgtggactgattcgattattctgga

SEQ ID NO: 258120 - DNA, 25 bp, Homo sapien
tcttggctaagcagctgacaggtgt

SEQ ID NO: 258121 - DNA, 25 bp, Homo sapien
gtaagtcctccaaacctggcaccat

SEQ ID NO: 258122 - DNA, 25 bp, Homo sapien
gagcatttaaggcagcaagctgact

SEQ ID NO: 258123 - DNA, 25 bp, Homo sapien
aggtgtgccacagccatgcactgag

SEQ ID NO: 258124 - DNA, 25 bp, Homo sapien
catacgtttcaataggtgaaggcaa

SEQ ID NO: 258125 - DNA, 25 bp, Homo sapien
attataacctggcaagacaagagag

SEQ ID NO: 258126 - DNA, 25 bp, Homo sapien
catccacgctgagattagacccgaa

SEQ ID NO: 258127 - DNA, 25 bp, Homo sapien
ggatcccaggaacaaaggagccacc

SEQ ID NO: 258128 - DNA, 25 bp, Homo sapien
tttgggatacttacaaatctgttct

SEQ ID NO: 258129 - DNA, 25 bp, Homo sapien
ttcagagtgtgtggcaattttatag

SEQ ID NO: 258130 - DNA, 25 bp, Homo sapien
cagtggttcagtattagctctttca

SEQ ID NO: 258131 - DNA, 25 bp, Homo sapien
cctttttgggatacttacaaatctg

SEQ ID NO: 258132 - DNA, 25 bp, Homo sapien
ctgtgattcaggtgcctgaaatagt

SEQ ID NO: 258133 - DNA, 25 bp, Homo sapien
gctgtgattcaggtgcctgaaatag

SEQ ID NO: 258134 - DNA, 25 bp, Homo sapien
gcagctgtgattcaggtgcctgaaa

SEQ ID NO: 258135 - DNA, 25 bp, Homo sapien
cagctgtgattcaggtgcctgaaat

SEQ ID NO: 258136 - DNA, 25 bp, Homo sapien
tcatctcaagagcttgtaagagcct

SEQ ID NO: 258137 - DNA, 25 bp, Homo sapien
tgtcttcatgggttaaaaatttgac

SEQ ID NO: 258138 - DNA, 25 bp, Homo sapien
cagcacttttactgcggccactctt

SEQ ID NO: 258139 - DNA, 25 bp, Homo sapien
agagcttgtaagagcctgtctttgt

SEQ ID NO: 258140 - DNA, 25 bp, Homo sapien
gagtacagaggtcccgggacaggtg

SEQ ID NO: 258141 - DNA, 25 bp, Homo sapien
ggtgacagagagatgacattcgaca

SEQ ID NO: 258142 - DNA, 25 bp, Homo sapien
agagatgacattcgacatgagtttt

SEQ ID NO: 258143 - DNA, 25 bp, Homo sapien
aggtcccgggacaggtgacagagag

SEQ ID NO: 258144 - DNA, 25 bp, Homo sapien
cacactcgcacatttgctgaagctg

SEQ ID NO: 258145 - DNA, 25 bp, Homo sapien
tgtcatggcttcgacctgttctgcc

SEQ ID NO: 258146 - DNA, 25 bp, Homo sapien
accagaagtatcacatcttgttcct

SEQ ID NO: 258147 - DNA, 25 bp, Homo sapien
tccctgccgggagatacctctctgg

SEQ ID NO: 258148 - DNA, 25 bp, Homo sapien
ttaggaggctgcttggccacaaacc

SEQ ID NO: 258149 - DNA, 25 bp, Homo sapien
taggaggctgcttggccacaaaccc

SEQ ID NO: 258150 - DNA, 25 bp, Homo sapien
ggaggctgcttggccacaaacccca

SEQ ID NO: 258151 - DNA, 25 bp, Homo sapien
aggaggctgcttggccacaaacccc

SEQ ID NO: 258152 - DNA, 25 bp, Homo sapien
cctgctgcagagtcgctgtggggac

SEQ ID NO: 258153 - DNA, 25 bp, Homo sapien
aggtgagttcctcccgtgcctgctg

SEQ ID NO: 258154 - DNA, 25 bp, Homo sapien
gcctgctgcagagtcgctgtgggga

SEQ ID NO: 258155 - DNA, 25 bp, Homo sapien
gacggtcctccataaagtcaatcat

SEQ ID NO: 258156 - DNA, 25 bp, Homo sapien
tccagacatgagacggtcctccata

SEQ ID NO: 258157 - DNA, 25 bp, Homo sapien
gtcagtgctagactgtcagctgctg

SEQ ID NO: 258158 - DNA, 25 bp, Homo sapien
agccttccaaagttgaggctctcca

SEQ ID NO: 258159 - DNA, 25 bp, Homo sapien
gacaaagtcagtgctagactgtcag

SEQ ID NO: 258160 - DNA, 25 bp, Homo sapien
gctgctgtgagattatgatctctct

SEQ ID NO: 258161 - DNA, 25 bp, Homo sapien
tctcctgtgtgtacagaagtcccgg

SEQ ID NO: 258162 - DNA, 25 bp, Homo sapien
tgagtgtctgcaccccaagcagtga

SEQ ID NO: 258163 - DNA, 25 bp, Homo sapien
cacagccgcccatagggcgtcttct

SEQ ID NO: 258164 - DNA, 25 bp, Homo sapien
agtgactccattcttgcctggacgc

SEQ ID NO: 258165 - DNA, 25 bp, Homo sapien
aaatgcactggatgagccgtggctc

SEQ ID NO: 258166 - DNA, 25 bp, Homo sapien
cagggcgaggcgtgaaggctgacct

SEQ ID NO: 258167 - DNA, 25 bp, Homo sapien
catccacgacctcggccaggatgga

SEQ ID NO: 258168 - DNA, 25 bp, Homo sapien
agtgacagcacatccacgacctcgg

SEQ ID NO: 258169 - DNA, 25 bp, Homo sapien
tgctgggttagatcagctaatgctt

SEQ ID NO: 258170 - DNA, 25 bp, Homo sapien
gaggttgctgggttagatcagctaa

SEQ ID NO: 258171 - DNA, 25 bp, Homo sapien
ggctgcatgaaggaacatggagtta

SEQ ID NO: 258172 - DNA, 25 bp, Homo sapien
gaacatggagttaggaggttgctgg

SEQ ID NO: 258173 - DNA, 25 bp, Homo sapien
gaaatggaacttagcccatttaata

SEQ ID NO: 258174 - DNA, 25 bp, Homo sapien
ggaacttagcccatttaatagacat

SEQ ID NO: 258175 - DNA, 25 bp, Homo sapien
tcacatgtaaagtggccggggaaat

SEQ ID NO: 258176 - DNA, 25 bp, Homo sapien
gaccacagcatcagtttcacatgta

SEQ ID NO: 258177 - DNA, 25 bp, Homo sapien
gtaactggccttccacgtacgcctg

SEQ ID NO: 258178 - DNA, 25 bp, Homo sapien
gaaaagcagagcgtggagtgtcaga

SEQ ID NO: 258179 - DNA, 25 bp, Homo sapien
tagagaccctctgtaactggccttc

SEQ ID NO: 258180 - DNA, 25 bp, Homo sapien
ttgtgaaatgcattagccctagaga

SEQ ID NO: 258181 - DNA, 25 bp, Homo sapien
caaagggctcttgctgtgcacctgt

SEQ ID NO: 258182 - DNA, 25 bp, Homo sapien
ctcttgctgtgcacctgtggagagg

SEQ ID NO: 258183 - DNA, 25 bp, Homo sapien
caggcctgtcccatcacagacaaag

SEQ ID NO: 258184 - DNA, 25 bp, Homo sapien
tcccatcacagacaaagggctcttg

SEQ ID NO: 258185 - DNA, 25 bp, Homo sapien
tatttggatgggcccacagtgcctg

SEQ ID NO: 258186 - DNA, 25 bp, Homo sapien
aatatttggatgggcccacagtgcc

SEQ ID NO: 258187 - DNA, 25 bp, Homo sapien
tttggatgggcccacagtgcctgtc

SEQ ID NO: 258188 - DNA, 25 bp, Homo sapien
aaagtgtccacagttaatatttgga

SEQ ID NO: 258189 - DNA, 25 bp, Homo sapien
ttcgtgtgagtgtgcttggcagacc

SEQ ID NO: 258190 - DNA, 25 bp, Homo sapien
tttacaaatgccagccaattcccct

SEQ ID NO: 258191 - DNA, 25 bp, Homo sapien
aattcccctcaggtgttcgtgtgag

SEQ ID NO: 258192 - DNA, 25 bp, Homo sapien
catgggtactcatatacgacatgag

SEQ ID NO: 258193 - DNA, 25 bp, Homo sapien
cactgaaacagacactgagctccat

SEQ ID NO: 258194 - DNA, 25 bp, Homo sapien
caaacactgaaacagacactgagct

SEQ ID NO: 258195 - DNA, 25 bp, Homo sapien
aacactgaaacagacactgagctcc

SEQ ID NO: 258196 - DNA, 25 bp, Homo sapien
ctatagagagcacaaacactgaaac

SEQ ID NO: 258197 - DNA, 25 bp, Homo sapien
ctgaataggacccaggcaggccttg

SEQ ID NO: 258198 - DNA, 25 bp, Homo sapien
gagggagcgagaacacactgaggcc

SEQ ID NO: 258199 - DNA, 25 bp, Homo sapien
gcatcatccctttgagtctcggcag

SEQ ID NO: 258200 - DNA, 25 bp, Homo sapien
aattggcgccgggagcgcattccca

SEQ ID NO: 258201 - DNA, 25 bp, Homo sapien
ccatgtcaggaaagtagtcactggg

SEQ ID NO: 258202 - DNA, 25 bp, Homo sapien
gtgtaactggggcttatggattctc

SEQ ID NO: 258203 - DNA, 25 bp, Homo sapien
aactggggcttatggattctccatc

SEQ ID NO: 258204 - DNA, 25 bp, Homo sapien
tctggccgtgtcagctgggcccgag

SEQ ID NO: 258205 - DNA, 25 bp, Homo sapien
aatccttcacggagggccagggctc

SEQ ID NO: 258206 - DNA, 25 bp, Homo sapien
ggaagcaatccttcacggagggcca

SEQ ID NO: 258207 - DNA, 25 bp, Homo sapien
ccccttgggcggaagcaatccttca

SEQ ID NO: 258208 - DNA, 25 bp, Homo sapien
tgggcggaagcaatccttcacggag

SEQ ID NO: 258209 - DNA, 25 bp, Homo sapien
gatggcacaggacgatgcagaatgt

SEQ ID NO: 258210 - DNA, 25 bp, Homo sapien
tacagacgagcttgggcagtgcctc

SEQ ID NO: 258211 - DNA, 25 bp, Homo sapien
gtgatcggtaatggtgcacagccct

SEQ ID NO: 258212 - DNA, 25 bp, Homo sapien
gataagtccctgacccatagatggt

SEQ ID NO: 258213 - DNA, 25 bp, Homo sapien
gtcaatacacgggtccatctgtctg

SEQ ID NO: 258214 - DNA, 25 bp, Homo sapien
ggaatgctgcgtgtataaaatcctg

SEQ ID NO: 258215 - DNA, 25 bp, Homo sapien
tccttctgtgcagcccagcgaatgg

SEQ ID NO: 258216 - DNA, 25 bp, Homo sapien
catgctttcattgtcaatacacggg

SEQ ID NO: 258217 - DNA, 25 bp, Homo sapien
aggtgaggtagttctggggctggaa

SEQ ID NO: 258218 - DNA, 25 bp, Homo sapien
ggtgaggtagttctggggctggaag

SEQ ID NO: 258219 - DNA, 25 bp, Homo sapien
gtgaggtagttctggggctggaagt

SEQ ID NO: 258220 - DNA, 25 bp, Homo sapien
gaggtgaggtagttctggggctgga

SEQ ID NO: 258221 - DNA, 25 bp, Homo sapien
tctagggcatccatttgctgctgca

SEQ ID NO: 258222 - DNA, 25 bp, Homo sapien
caggtgtgcaggcgtttgttcagca

SEQ ID NO: 258223 - DNA, 25 bp, Homo sapien
cgagccatagctaggaggaagttga

SEQ ID NO: 258224 - DNA, 25 bp, Homo sapien
cgtttgttcagcagaggttccaggc

SEQ ID NO: 258225 - DNA, 25 bp, Homo sapien
caagtttgccggctcatttgcaggg

SEQ ID NO: 258226 - DNA, 25 bp, Homo sapien
gagcagctgttgctcaacaggagtt

SEQ ID NO: 258227 - DNA, 25 bp, Homo sapien
agagggagccctgcatgtaagaccc

SEQ ID NO: 258228 - DNA, 25 bp, Homo sapien
gcagggtgacttgggaataggagca

SEQ ID NO: 258229 - DNA, 25 bp, Homo sapien
cggtcagccctcctcatgtgtgact

SEQ ID NO: 258230 - DNA, 25 bp, Homo sapien
tcatgtgtgactgcggtgtctgcac

SEQ ID NO: 258231 - DNA, 25 bp, Homo sapien
cctcctcatgtgtgactgcggtgtc

SEQ ID NO: 258232 - DNA, 25 bp, Homo sapien
gtgactgcggtgtctgcacaaccat

SEQ ID NO: 258233 - DNA, 25 bp, Homo sapien
caaaaagtgcaaaaactacctgtgg

SEQ ID NO: 258234 - DNA, 25 bp, Homo sapien
cttaaagcttgtgtctcacgtgcaa

SEQ ID NO: 258235 - DNA, 25 bp, Homo sapien
tgtgtctcacgtgcaacagctttgc

SEQ ID NO: 258236 - DNA, 25 bp, Homo sapien
tcaaaaagtgcaaaaactacctgtg

SEQ ID NO: 258237 - DNA, 25 bp, Homo sapien
acttgtccatcggaatgtgcttggg

SEQ ID NO: 258238 - DNA, 25 bp, Homo sapien
tcaaacttgtccatcggaatgtgct

SEQ ID NO: 258239 - DNA, 25 bp, Homo sapien
cggaatgtgcttgggccattgtctg

SEQ ID NO: 258240 - DNA, 25 bp, Homo sapien
tgtccatcggaatgtgcttgggcca

SEQ ID NO: 258241 - DNA, 25 bp, Homo sapien
ctagttgttgacaatgaatttgttg

SEQ ID NO: 258242 - DNA, 25 bp, Homo sapien
ttgttgacaatgaatttgttgagcc

SEQ ID NO: 258243 - DNA, 25 bp, Homo sapien
gttgttgacaatgaatttgttgagc

SEQ ID NO: 258244 - DNA, 25 bp, Homo sapien
agttgttgacaatgaatttgttgag

SEQ ID NO: 258245 - DNA, 25 bp, Homo sapien
caggtggaacgaagatatggatcac

SEQ ID NO: 258246 - DNA, 25 bp, Homo sapien
ggtgaagctggatctaacctctgat

SEQ ID NO: 258247 - DNA, 25 bp, Homo sapien
cagaataccctatgatgtgtagtgc

SEQ ID NO: 258248 - DNA, 25 bp, Homo sapien
tatggatcacagagctagcatatgg

SEQ ID NO: 258249 - DNA, 25 bp, Homo sapien
tcctcggaaggctccgtgggctcag

SEQ ID NO: 258250 - DNA, 25 bp, Homo sapien
agtctgggacgcctggcgaggctcc

SEQ ID NO: 258251 - DNA, 25 bp, Homo sapien
tttttgttctccgaggacgagtctg

SEQ ID NO: 258252 - DNA, 25 bp, Homo sapien
ctcctcggaaggctccgtgggctca

SEQ ID NO: 258253 - DNA, 25 bp, Homo sapien
tcgggagtcccttctcgcgtgggcc

SEQ ID NO: 258254 - DNA, 25 bp, Homo sapien
tgcctggagcgccagtctggactgt

SEQ ID NO: 258255 - DNA, 25 bp, Homo sapien
aggaccacaactgggcctcgggagt

SEQ ID NO: 258256 - DNA, 25 bp, Homo sapien
tgcctgaggctcttccagccgcttc

SEQ ID NO: 258257 - DNA, 25 bp, Homo sapien
ggagatggcccagcgggacttgaga

SEQ ID NO: 258258 - DNA, 25 bp, Homo sapien
gcccagcgggacttgagaggccttt

SEQ ID NO: 258259 - DNA, 25 bp, Homo sapien
gagaccctcgttcagccaaggaggc

SEQ ID NO: 258260 - DNA, 25 bp, Homo sapien
gacgcggctgaacgagaccctcgtt

SEQ ID NO: 258261 - DNA, 25 bp, Homo sapien
cggtgcttggactgcccctgccttt

SEQ ID NO: 258262 - DNA, 25 bp, Homo sapien
atgcaccggtcagcaccttgtcccg

SEQ ID NO: 258263 - DNA, 25 bp, Homo sapien
accctccgaggccagctttccgtgg

SEQ ID NO: 258264 - DNA, 25 bp, Homo sapien
ggtggacgcggagagcttgaggccc

SEQ ID NO: 258265 - DNA, 25 bp, Homo sapien
cacagagtggcagtctgaaagcctg

SEQ ID NO: 258266 - DNA, 25 bp, Homo sapien
taagcgcaaggccatagacacaggt

SEQ ID NO: 258267 - DNA, 25 bp, Homo sapien
ggtgcccagcaggatctaagcgcaa

SEQ ID NO: 258268 - DNA, 25 bp, Homo sapien
tgagccccagagctgttcatagcag

SEQ ID NO: 258269 - DNA, 25 bp, Homo sapien
acgcattccaagaggagcggccaca

SEQ ID NO: 258270 - DNA, 25 bp, Homo sapien
tcatggtatccctgagccacgcatt

SEQ ID NO: 258271 - DNA, 25 bp, Homo sapien
tgatgagcccgccaaggccatctgc

SEQ ID NO: 258272 - DNA, 25 bp, Homo sapien
aggtggccccactcatggcctgctg

SEQ ID NO: 258273 - DNA, 25 bp, Homo sapien
ttaactggtgactaaatccctcagc

SEQ ID NO: 258274 - DNA, 25 bp, Homo sapien
cagaaattccttaactggtgactaa

SEQ ID NO: 258275 - DNA, 25 bp, Homo sapien
tccttaactggtgactaaatccctc

SEQ ID NO: 258276 - DNA, 25 bp, Homo sapien
tggtgactaaatccctcagccctca

SEQ ID NO: 258277 - DNA, 25 bp, Homo sapien
gggtccacgtgagagtgagttgggc

SEQ ID NO: 258278 - DNA, 25 bp, Homo sapien
cacagtccccgcaggacccgagaga

SEQ ID NO: 258279 - DNA, 25 bp, Homo sapien
ggcagtgaacgcagaaaccatccca

SEQ ID NO: 258280 - DNA, 25 bp, Homo sapien
agtgaacgcagaaaccatcccaggt

SEQ ID NO: 258281 - DNA, 25 bp, Homo sapien
tcctgatgaccggcatattttaggg

SEQ ID NO: 258282 - DNA, 25 bp, Homo sapien
agagtaggttccatggtaccctgag

SEQ ID NO: 258283 - DNA, 25 bp, Homo sapien
ttagggtgaccatgacgcataagtc

SEQ ID NO: 258284 - DNA, 25 bp, Homo sapien
ataagcagatacttttttccaggcc

SEQ ID NO: 258285 - DNA, 25 bp, Homo sapien
tcatgttaatatgtggcaaaatatt

SEQ ID NO: 258286 - DNA, 25 bp, Homo sapien
agtactctggggccctgcatttatg

SEQ ID NO: 258287 - DNA, 25 bp, Homo sapien
cagccagtgattgtagtttcatgtt

SEQ ID NO: 258288 - DNA, 25 bp, Homo sapien
tactctggggccctgcatttatgag

SEQ ID NO: 258289 - DNA, 25 bp, Homo sapien
gatcaatgttaacagaaccacagaa

SEQ ID NO: 258290 - DNA, 25 bp, Homo sapien
aaactgatcaatgttaacagaacca

SEQ ID NO: 258291 - DNA, 25 bp, Homo sapien
gtaagtactgattgctaaactgatc

SEQ ID NO: 258292 - DNA, 25 bp, Homo sapien
ctgatcaatgttaacagaaccacag

SEQ ID NO: 258293 - DNA, 25 bp, Homo sapien
tcacccttgccgtggagccagtttc

SEQ ID NO: 258294 - DNA, 25 bp, Homo sapien
tctttttcacccttgccgtggagcc

SEQ ID NO: 258295 - DNA, 25 bp, Homo sapien
ggaaccactgggtcagatctttttc

SEQ ID NO: 258296 - DNA, 25 bp, Homo sapien
tgggaaccactgggtcagatctttt

SEQ ID NO: 258297 - DNA, 25 bp, Homo sapien
tgcagagagctctgtaagaatgatc

SEQ ID NO: 258298 - DNA, 25 bp, Homo sapien
gcaatgagagaggtgatatttttca

SEQ ID NO: 258299 - DNA, 25 bp, Homo sapien
tagagcggatacatcacccacgttg

SEQ ID NO: 258300 - DNA, 25 bp, Homo sapien
ggaccagcctcctggttaattgaga

SEQ ID NO: 258301 - DNA, 25 bp, Homo sapien
tgacagcatctgtccaaagccccag

SEQ ID NO: 258302 - DNA, 25 bp, Homo sapien
tctgtgaccggttcagtctctgtct

SEQ ID NO: 258303 - DNA, 25 bp, Homo sapien
aaagccccaggtgccgcttagagct

SEQ ID NO: 258304 - DNA, 25 bp, Homo sapien
gcgccttctgaagtctgggtggtca

SEQ ID NO: 258305 - DNA, 25 bp, Homo sapien
acaaagcgggcactccaaggaggag

SEQ ID NO: 258306 - DNA, 25 bp, Homo sapien
tgacggttattcagatgtcgactct

SEQ ID NO: 258307 - DNA, 25 bp, Homo sapien
tcacaggctttgaggtcaaggacag

SEQ ID NO: 258308 - DNA, 25 bp, Homo sapien
gcagaactgggctccatcatcgttt

SEQ ID NO: 258309 - DNA, 25 bp, Homo sapien
taatatcattgtcaacgtgagcagg

SEQ ID NO: 258310 - DNA, 25 bp, Homo sapien
ccttttctggcagtccggtgaggct

SEQ ID NO: 258311 - DNA, 25 bp, Homo sapien
cattgtcaacgtgagcaggtgccct

SEQ ID NO: 258312 - DNA, 25 bp, Homo sapien
gaggctctgccgtttcactaatatc

SEQ ID NO: 258313 - DNA, 25 bp, Homo sapien
tctgcctgtccttcggaatgatgtc

SEQ ID NO: 258314 - DNA, 25 bp, Homo sapien
gagattccagaacttcatcgttgag

SEQ ID NO: 258315 - DNA, 25 bp, Homo sapien
cctgggccgcagagattgagttctt

SEQ ID NO: 258316 - DNA, 25 bp, Homo sapien
catccctgtgctggactgctgtcct

SEQ ID NO: 258317 - DNA, 25 bp, Homo sapien
ctggtgtgagttggtggtgatgagc

SEQ ID NO: 258318 - DNA, 25 bp, Homo sapien
ggtgatgagcttcggaaattgctga

SEQ ID NO: 258319 - DNA, 25 bp, Homo sapien
agttggtggtgatgagcttcggaaa

SEQ ID NO: 258320 - DNA, 25 bp, Homo sapien
tgtgagttggtggtgatgagcttcg

SEQ ID NO: 258321 - DNA, 25 bp, Homo sapien
gcactggcacactggtcatgacctt

SEQ ID NO: 258322 - DNA, 25 bp, Homo sapien
tgccctgtattccataagactctgg

SEQ ID NO: 258323 - DNA, 25 bp, Homo sapien
tgcacacctgagcatccacttggat

SEQ ID NO: 258324 - DNA, 25 bp, Homo sapien
catgaccttgttcgtgaagtagccg

SEQ ID NO: 258325 - DNA, 25 bp, Homo sapien
catgaagcatcgaacaccgagggct

SEQ ID NO: 258326 - DNA, 25 bp, Homo sapien
gcttgctgtctgcaaagcgcccgtg

SEQ ID NO: 258327 - DNA, 25 bp, Homo sapien
catctgccctggtattggtggtaaa

SEQ ID NO: 258328 - DNA, 25 bp, Homo sapien
tgcgctgccgttgtatctgtcgaac

SEQ ID NO: 258329 - DNA, 25 bp, Homo sapien
cttgtgcgtggccttttcgaactca

SEQ ID NO: 258330 - DNA, 25 bp, Homo sapien
tcagtctgggaaggcgatggtccga

SEQ ID NO: 258331 - DNA, 25 bp, Homo sapien
gggagaggccaccagttagcccgct

SEQ ID NO: 258332 - DNA, 25 bp, Homo sapien
tgtgctgtatggacaggcctgcttg

SEQ ID NO: 258333 - DNA, 25 bp, Homo sapien
tcctcaactcctcgtggcagtgact

SEQ ID NO: 258334 - DNA, 25 bp, Homo sapien
ctgggcccggctctgttgtggacat

SEQ ID NO: 258335 - DNA, 25 bp, Homo sapien
tccaggactagagctgctgacggcc

SEQ ID NO: 258336 - DNA, 25 bp, Homo sapien
tgtgctgtttcctcaactcctcgtg

SEQ ID NO: 258337 - DNA, 25 bp, Homo sapien
tgagattagcattacgagggaccct

SEQ ID NO: 258338 - DNA, 25 bp, Homo sapien
catggtcctgggacatacgatggaa

SEQ ID NO: 258339 - DNA, 25 bp, Homo sapien
tgctccttgattgcttcagtggaag

SEQ ID NO: 258340 - DNA, 25 bp, Homo sapien
aaagcaagtcccgagaagcctgtcg

SEQ ID NO: 258341 - DNA, 25 bp, Homo sapien
gctgaggaggccgactaataaataa

SEQ ID NO: 258342 - DNA, 25 bp, Homo sapien
caacggaatagagtgaggactgctt

SEQ ID NO: 258343 - DNA, 25 bp, Homo sapien
ccccaagtaactgtgtagctgagga

SEQ ID NO: 258344 - DNA, 25 bp, Homo sapien
ttgtatagatacgtcacttgcactg

SEQ ID NO: 258345 - DNA, 25 bp, Homo sapien
tctattggggtttcagtgaatcagt

SEQ ID NO: 258346 - DNA, 25 bp, Homo sapien
gaaattagatactatgtcatccaac

SEQ ID NO: 258347 - DNA, 25 bp, Homo sapien
tgtgtcagtgtaacagtatgtgccc

SEQ ID NO: 258348 - DNA, 25 bp, Homo sapien
caagttcaggagaactgatgtgtta

SEQ ID NO: 258349 - DNA, 25 bp, Homo sapien
gctggaatccttgagctgggctgcc

SEQ ID NO: 258350 - DNA, 25 bp, Homo sapien
gactcctactgtcacaaagcagggc

SEQ ID NO: 258351 - DNA, 25 bp, Homo sapien
taaagaacaccctaaggctgagaga

SEQ ID NO: 258352 - DNA, 25 bp, Homo sapien
gcaaagaagcgtgggtgtgcagctg

SEQ ID NO: 258353 - DNA, 25 bp, Homo sapien
tgctcaggattaattgtcattgtcc

SEQ ID NO: 258354 - DNA, 25 bp, Homo sapien
ccttgctcaggattaattgtcattg

SEQ ID NO: 258355 - DNA, 25 bp, Homo sapien
tccaagagccagcagtgacgctttc

SEQ ID NO: 258356 - DNA, 25 bp, Homo sapien
gacgctttccaactgtttgtgcatg

SEQ ID NO: 258357 - DNA, 25 bp, Homo sapien
cagccaagacctttgacaggtttcc

SEQ ID NO: 258358 - DNA, 25 bp, Homo sapien
tggtgtgagatgagtgactggctca

SEQ ID NO: 258359 - DNA, 25 bp, Homo sapien
tggctcagccaagacctttgacagg

SEQ ID NO: 258360 - DNA, 25 bp, Homo sapien
tgagatgagtgactggctcagccaa

SEQ ID NO: 258361 - DNA, 25 bp, Homo sapien
atcgggagcccagtgctttgccagc

SEQ ID NO: 258362 - DNA, 25 bp, Homo sapien
ctggtcgtagtccatcgggagccca

SEQ ID NO: 258363 - DNA, 25 bp, Homo sapien
agtgctttgccagcaagccttccca

SEQ ID NO: 258364 - DNA, 25 bp, Homo sapien
gtagtccatcgggagcccagtgctt

SEQ ID NO: 258365 - DNA, 25 bp, Homo sapien
aacagaacagtgcttgaggctgtgc

SEQ ID NO: 258366 - DNA, 25 bp, Homo sapien
cttgaacttgcacccggggccaggc

SEQ ID NO: 258367 - DNA, 25 bp, Homo sapien
ttctatgcactgtgaacagaacagt

SEQ ID NO: 258368 - DNA, 25 bp, Homo sapien
tgaacttgcacccggggccaggcct

SEQ ID NO: 258369 - DNA, 25 bp, Homo sapien
acaatgaactggttttttgtgtcag

SEQ ID NO: 258370 - DNA, 25 bp, Homo sapien
tctgttctcatctgttgttagggaa

SEQ ID NO: 258371 - DNA, 25 bp, Homo sapien
ctcagcgcctttgagggctggtgcc

SEQ ID NO: 258372 - DNA, 25 bp, Homo sapien
gattggacgatgtcactgctcttgt

SEQ ID NO: 258373 - DNA, 25 bp, Homo sapien
taacatcccgatggcaagaagaggc

SEQ ID NO: 258374 - DNA, 25 bp, Homo sapien
gaagaggcccaaaagtgagtccaaa

SEQ ID NO: 258375 - DNA, 25 bp, Homo sapien
aaaaagcgattgcacctcacaaaca

SEQ ID NO: 258376 - DNA, 25 bp, Homo sapien
tccaaaaagcgattgcacctcacaa

SEQ ID NO: 258377 - DNA, 25 bp, Homo sapien
agagactggatcttggacccccaaa

SEQ ID NO: 258378 - DNA, 25 bp, Homo sapien
gagcagtacgggcactcgagtttgc

SEQ ID NO: 258379 - DNA, 25 bp, Homo sapien
actcgagtttgctccactggccact

SEQ ID NO: 258380 - DNA, 25 bp, Homo sapien
tgtctctctgagcagtacgggcact

SEQ ID NO: 258381 - DNA, 25 bp, Homo sapien
atgaacaggaactccatgcagtaat

SEQ ID NO: 258382 - DNA, 25 bp, Homo sapien
tccatgcagtaattatgcatcttgt

SEQ ID NO: 258383 - DNA, 25 bp, Homo sapien
catgcagtaattatgcatcttgtca

SEQ ID NO: 258384 - DNA, 25 bp, Homo sapien
catcttgtcaaataggggctgactg

SEQ ID NO: 258385 - DNA, 25 bp, Homo sapien
gagctgaatcacaagatccagagtt

SEQ ID NO: 258386 - DNA, 25 bp, Homo sapien
gcaaacctttctgggctggtcattg

SEQ ID NO: 258387 - DNA, 25 bp, Homo sapien
ggagccttgtccctgagactttggg

SEQ ID NO: 258388 - DNA, 25 bp, Homo sapien
ggcaggtgacggtttctccagcaaa

SEQ ID NO: 258389 - DNA, 25 bp, Homo sapien
tccagctggaacctgcatgcctgcc

SEQ ID NO: 258390 - DNA, 25 bp, Homo sapien
caaaggtggaatcagcctttgggcc

SEQ ID NO: 258391 - DNA, 25 bp, Homo sapien
gggccaggtcgcttggactccagct

SEQ ID NO: 258392 - DNA, 25 bp, Homo sapien
ctttgggccaggtcgcttggactcc

SEQ ID NO: 258393 - DNA, 25 bp, Homo sapien
tgctttgctcgcgtttgaaggcact

SEQ ID NO: 258394 - DNA, 25 bp, Homo sapien
cagaggaggctgctactgtggtttc

SEQ ID NO: 258395 - DNA, 25 bp, Homo sapien
aggccctggcgttcagcaagtatcg

SEQ ID NO: 258396 - DNA, 25 bp, Homo sapien
tgtggatatgtcaccgggactcgtc

SEQ ID NO: 258397 - DNA, 25 bp, Homo sapien
tctcagacatcgtgggacctgcagg

SEQ ID NO: 258398 - DNA, 25 bp, Homo sapien
caggagcattaggaaagtactccac

SEQ ID NO: 258399 - DNA, 25 bp, Homo sapien
cctgtgtctcagacatcgtgggacc

SEQ ID NO: 258400 - DNA, 25 bp, Homo sapien
gacctgcaggagcattaggaaagta

SEQ ID NO: 258401 - DNA, 25 bp, Homo sapien
agcattgtgggtccccgcagcatcc

SEQ ID NO: 258402 - DNA, 25 bp, Homo sapien
gcagcatccacgaacggcaggttat

SEQ ID NO: 258403 - DNA, 25 bp, Homo sapien
taaacatggccagcattgtgggtcc

SEQ ID NO: 258404 - DNA, 25 bp, Homo sapien
ttggcatgatttgcgctggcaggcc

SEQ ID NO: 258405 - DNA, 25 bp, Homo sapien
ctgatcttccatgtctgccccattc

SEQ ID NO: 258406 - DNA, 25 bp, Homo sapien
tcttccatgtctgccccattcttcc

SEQ ID NO: 258407 - DNA, 25 bp, Homo sapien
ccatgtctgccccattcttccccat

SEQ ID NO: 258408 - DNA, 25 bp, Homo sapien
gatcttccatgtctgccccattctt

SEQ ID NO: 258409 - DNA, 25 bp, Homo sapien
ttggtgaaattgattgccttgacac

SEQ ID NO: 258410 - DNA, 25 bp, Homo sapien
ggccttgatactccagtgtaaactt

SEQ ID NO: 258411 - DNA, 25 bp, Homo sapien
tacccagatcccagtgttaccactg

SEQ ID NO: 258412 - DNA, 25 bp, Homo sapien
ttgacacttaagcaggccctctcct

SEQ ID NO: 258413 - DNA, 25 bp, Homo sapien
tgatcgttggcaggtaaagggctcc

SEQ ID NO: 258414 - DNA, 25 bp, Homo sapien
agttgggtctgcttcccgggagcca

SEQ ID NO: 258415 - DNA, 25 bp, Homo sapien
actctgttgaatgtcgccgcgtctg

SEQ ID NO: 258416 - DNA, 25 bp, Homo sapien
tgaatgaaacgaattctggctgcga

SEQ ID NO: 258417 - DNA, 25 bp, Homo sapien
aattcagacgtgtccttccgtagcg

SEQ ID NO: 258418 - DNA, 25 bp, Homo sapien
tacataaaccgagtgcagagtgtgc

SEQ ID NO: 258419 - DNA, 25 bp, Homo sapien
ttccgtagcgcagatgaacgcatca

SEQ ID NO: 258420 - DNA, 25 bp, Homo sapien
gagtcagggcacgagggcatttcct

SEQ ID NO: 258421 - DNA, 25 bp, Homo sapien
ttcagcaagtctacatgcttgttga

SEQ ID NO: 258422 - DNA, 25 bp, Homo sapien
cttcagcaagtctacatgcttgttg

SEQ ID NO: 258423 - DNA, 25 bp, Homo sapien
agcaagtctacatgcttgttgattt

SEQ ID NO: 258424 - DNA, 25 bp, Homo sapien
tcagcaagtctacatgcttgttgat

SEQ ID NO: 258425 - DNA, 25 bp, Homo sapien
ttactgtgacataactcccggagcc

SEQ ID NO: 258426 - DNA, 25 bp, Homo sapien
gcgacagttattcgggcccagggac

SEQ ID NO: 258427 - DNA, 25 bp, Homo sapien
gtattgttctgtagcaccccgtgcg

SEQ ID NO: 258428 - DNA, 25 bp, Homo sapien
gcacgagccttgtgaaccttggaag

SEQ ID NO: 258429 - DNA, 25 bp, Homo sapien
caacgcccgcgtttctgagtagaca

SEQ ID NO: 258430 - DNA, 25 bp, Homo sapien
gacaccgatgtgagaaacaacgccc

SEQ ID NO: 258431 - DNA, 25 bp, Homo sapien
taagtttccccgtcaggcgtgactg

SEQ ID NO: 258432 - DNA, 25 bp, Homo sapien
ttgggacatcgccaagcggtcagcg

SEQ ID NO: 258433 - DNA, 25 bp, Homo sapien
tcatcaggcaatttgaagtgcttca

SEQ ID NO: 258434 - DNA, 25 bp, Homo sapien
tgtgaggctaagtaccgctttctgc

SEQ ID NO: 258435 - DNA, 25 bp, Homo sapien
tccatctttgtgaggctaagtaccg

SEQ ID NO: 258436 - DNA, 25 bp, Homo sapien
taagtaccgctttctgcattgttgt

SEQ ID NO: 258437 - DNA, 25 bp, Homo sapien
cacaaccagaaaatcggactagtaa

SEQ ID NO: 258438 - DNA, 25 bp, Homo sapien
attttaggcttagaaagaatcttgg

SEQ ID NO: 258439 - DNA, 25 bp, Homo sapien
tgtaattttaggcttagaaagaatc

SEQ ID NO: 258440 - DNA, 25 bp, Homo sapien
cagaaaatcggactagtaaaagtgt

SEQ ID NO: 258441 - DNA, 25 bp, Homo sapien
gacacccttggtctacttccaagaa

SEQ ID NO: 258442 - DNA, 25 bp, Homo sapien
ggacctggtaatttagaggagagtc

SEQ ID NO: 258443 - DNA, 25 bp, Homo sapien
cctggtaatttagaggagagtctca

SEQ ID NO: 258444 - DNA, 25 bp, Homo sapien
tgtttcactcccacgcctctctgga

SEQ ID NO: 258445 - DNA, 25 bp, Homo sapien
ggtaatttagaggagagtctcattc

SEQ ID NO: 258446 - DNA, 25 bp, Homo sapien
tgtagtcattatagccggaataaag

SEQ ID NO: 258447 - DNA, 25 bp, Homo sapien
ctcgatatcatagattggattgtag

SEQ ID NO: 258448 - DNA, 25 bp, Homo sapien
catagattggattgtagtcattata

SEQ ID NO: 258449 - DNA, 25 bp, Homo sapien
ttatagccggaataaagatcatctt

SEQ ID NO: 258450 - DNA, 25 bp, Homo sapien
ttatccttgtaaccttccatatcaa

SEQ ID NO: 258451 - DNA, 25 bp, Homo sapien
attatccttgtaaccttccatatca

SEQ ID NO: 258452 - DNA, 25 bp, Homo sapien
tcttctgccatgactagtcctcaca

SEQ ID NO: 258453 - DNA, 25 bp, Homo sapien
catgactagtcctcacagcttgctg

SEQ ID NO: 258454 - DNA, 25 bp, Homo sapien
tgccatgactagtcctcacagcttg

SEQ ID NO: 258455 - DNA, 25 bp, Homo sapien
gactagtcctcacagcttgctgaaa

SEQ ID NO: 258456 - DNA, 25 bp, Homo sapien
ccattcaacagggaagggacggtct

SEQ ID NO: 258457 - DNA, 25 bp, Homo sapien
gaatatcaagggaccccaagtagct

SEQ ID NO: 258458 - DNA, 25 bp, Homo sapien
caaagttggaaggttcacatttcct

SEQ ID NO: 258459 - DNA, 25 bp, Homo sapien
tatggttaaatgatcttcaacaatg

SEQ ID NO: 258460 - DNA, 25 bp, Homo sapien
tccagtagctataggtctagtaact

SEQ ID NO: 258461 - DNA, 25 bp, Homo sapien
taactgccgtgcttgatattttagc

SEQ ID NO: 258462 - DNA, 25 bp, Homo sapien
cccatatccagtagctataggtcta

SEQ ID NO: 258463 - DNA, 25 bp, Homo sapien
ctataggtctagtaactgccgtgct

SEQ ID NO: 258464 - DNA, 25 bp, Homo sapien
ttcctattgatgatgccagagatgt

SEQ ID NO: 258465 - DNA, 25 bp, Homo sapien
tcctattgatgatgccagagatgtc

SEQ ID NO: 258466 - DNA, 25 bp, Homo sapien
gttctatgtccacaccccaatggga

SEQ ID NO: 258467 - DNA, 25 bp, Homo sapien
tctaaagagacttcgccttcaaaga

SEQ ID NO: 258468 - DNA, 25 bp, Homo sapien
tacatgcctatgagagaaaccacag

SEQ ID NO: 258469 - DNA, 25 bp, Homo sapien
aaaatgggccccagaatacatcata

SEQ ID NO: 258470 - DNA, 25 bp, Homo sapien
tgctgtcatgggtctagtaactcca

SEQ ID NO: 258471 - DNA, 25 bp, Homo sapien
ctgctgtcatgggtctagtaactcc

SEQ ID NO: 258472 - DNA, 25 bp, Homo sapien
ctgtcatgggtctagtaactccatc

SEQ ID NO: 258473 - DNA, 25 bp, Homo sapien
actgctgtcatgggtctagtaactc

SEQ ID NO: 258474 - DNA, 25 bp, Homo sapien
gccccttgactgactaagggggtca

SEQ ID NO: 258475 - DNA, 25 bp, Homo sapien
gcagggccccttgactgactaaggg

SEQ ID NO: 258476 - DNA, 25 bp, Homo sapien
ccttgactgactaagggggtcaaat

SEQ ID NO: 258477 - DNA, 25 bp, Homo sapien
gaagcagggccccttgactgactaa

SEQ ID NO: 258478 - DNA, 25 bp, Homo sapien
taagtctccacaactattggcaata

SEQ ID NO: 258479 - DNA, 25 bp, Homo sapien
aattttaagtctccacaactattgg

SEQ ID NO: 258480 - DNA, 25 bp, Homo sapien
cacaactattggcaatacagctttc

SEQ ID NO: 258481 - DNA, 25 bp, Homo sapien
gtctccacaactattggcaatacag

SEQ ID NO: 258482 - DNA, 25 bp, Homo sapien
gagtaagttaaatccaaattgatat

SEQ ID NO: 258483 - DNA, 25 bp, Homo sapien
tgagtaagttaaatccaaattgata

SEQ ID NO: 258484 - DNA, 25 bp, Homo sapien
actgactggccaaattgaaaagaac

SEQ ID NO: 258485 - DNA, 25 bp, Homo sapien
tgaatactgactggccaaattgaaa

SEQ ID NO: 258486 - DNA, 25 bp, Homo sapien
tatttttgactataacttgataagt

SEQ ID NO: 258487 - DNA, 25 bp, Homo sapien
tataacttgataagtgttaagtgct

SEQ ID NO: 258488 - DNA, 25 bp, Homo sapien
cacttggaacttggtctaatgccat

SEQ ID NO: 258489 - DNA, 25 bp, Homo sapien
acttggtctaatgccattcggtaga

SEQ ID NO: 258490 - DNA, 25 bp, Homo sapien
catttgcttattgacacttggaact

SEQ ID NO: 258491 - DNA, 25 bp, Homo sapien
cattcggtagaatttaatggctttg

SEQ ID NO: 258492 - DNA, 25 bp, Homo sapien
cagcctgaataaatgtaactccaat

SEQ ID NO: 258493 - DNA, 25 bp, Homo sapien
aatgtaactccaatattctgcatta

SEQ ID NO: 258494 - DNA, 25 bp, Homo sapien
aactccaatattctgcattatttta

SEQ ID NO: 258495 - DNA, 25 bp, Homo sapien
tgtaactccaatattctgcattatt

SEQ ID NO: 258496 - DNA, 25 bp, Homo sapien
gcaaaataacagatagttaggttgt

SEQ ID NO: 258497 - DNA, 25 bp, Homo sapien
gaattaatagcatctgaatactgac

SEQ ID NO: 258498 - DNA, 25 bp, Homo sapien
ctcattatgtgctcatatgaattaa

SEQ ID NO: 258499 - DNA, 25 bp, Homo sapien
taggttgtagcctgccttcagattt

SEQ ID NO: 258500 - DNA, 25 bp, Homo sapien
tctaatggaacagtaatcaattttt

SEQ ID NO: 258501 - DNA, 25 bp, Homo sapien
ttctaatggaacagtaatcaatttt

SEQ ID NO: 258502 - DNA, 25 bp, Homo sapien
ctaatggaacagtaatcaatttttg

SEQ ID NO: 258503 - DNA, 25 bp, Homo sapien
tttctaatggaacagtaatcaattt

SEQ ID NO: 258504 - DNA, 25 bp, Homo sapien
catttgcctgaggtgatcatttttt

SEQ ID NO: 258505 - DNA, 25 bp, Homo sapien
ttactaagttagtatgaggatcatc

SEQ ID NO: 258506 - DNA, 25 bp, Homo sapien
tagcttcagttactaagttagtatg

SEQ ID NO: 258507 - DNA, 25 bp, Homo sapien
tttatagcttcagttactaagttag

SEQ ID NO: 258508 - DNA, 25 bp, Homo sapien
catgcctacatcatgaaacctacat

SEQ ID NO: 258509 - DNA, 25 bp, Homo sapien
aggttgatgaacacacggaggtgct

SEQ ID NO: 258510 - DNA, 25 bp, Homo sapien
ccctcaatctccagcgaagggagaa

SEQ ID NO: 258511 - DNA, 25 bp, Homo sapien
acctacatataaaccctaaatgaca

SEQ ID NO: 258512 - DNA, 25 bp, Homo sapien
tccgttgacacccagaataggcaga

SEQ ID NO: 258513 - DNA, 25 bp, Homo sapien
gttaaagccctgacgctccactaag

SEQ ID NO: 258514 - DNA, 25 bp, Homo sapien
gacatttctgaattatgagaccctg

SEQ ID NO: 258515 - DNA, 25 bp, Homo sapien
catcatgataggagggctttgttac

SEQ ID NO: 258516 - DNA, 25 bp, Homo sapien
gtccttaagatttatagggctattc

SEQ ID NO: 258517 - DNA, 25 bp, Homo sapien
ttctccagtaaaacccatctgggcc

SEQ ID NO: 258518 - DNA, 25 bp, Homo sapien
agtagcactatcttagcactcactg

SEQ ID NO: 258519 - DNA, 25 bp, Homo sapien
aaaagcatcattcaatgtccttaag

SEQ ID NO: 258520 - DNA, 25 bp, Homo sapien
gcacaaggacacagtcaccgggaac

SEQ ID NO: 258521 - DNA, 25 bp, Homo sapien
cacgtacagtaccaggatgtggcac

SEQ ID NO: 258522 - DNA, 25 bp, Homo sapien
aggacacagtcaccgggaacaggaa

SEQ ID NO: 258523 - DNA, 25 bp, Homo sapien
agcaggagccccacgtacagtacca

SEQ ID NO: 258524 - DNA, 25 bp, Homo sapien
cggcagcagcaggccaggggacgaa

SEQ ID NO: 258525 - DNA, 25 bp, Homo sapien
gcagcagcaggccaggggacgaatg

SEQ ID NO: 258526 - DNA, 25 bp, Homo sapien
cagcaggccaggggacgaatgcaga

SEQ ID NO: 258527 - DNA, 25 bp, Homo sapien
agcagcaggccaggggacgaatgca

SEQ ID NO: 258528 - DNA, 25 bp, Homo sapien
tggcagcacgcagtacgggtagaag

SEQ ID NO: 258529 - DNA, 25 bp, Homo sapien
tacttgccgaaggtgagtggcagca

SEQ ID NO: 258530 - DNA, 25 bp, Homo sapien
ctgacgtgcactgacagggatgcga

SEQ ID NO: 258531 - DNA, 25 bp, Homo sapien
actgacagggatgcgaagtacttgc

SEQ ID NO: 258532 - DNA, 25 bp, Homo sapien
ttaatggtgtgtgcataggacatgg

SEQ ID NO: 258533 - DNA, 25 bp, Homo sapien
ccttaatggtgtgtgcataggacat

SEQ ID NO: 258534 - DNA, 25 bp, Homo sapien
ggccttaatggtgtgtgcataggac

SEQ ID NO: 258535 - DNA, 25 bp, Homo sapien
tggtgtgtgcataggacatgggcac

SEQ ID NO: 258536 - DNA, 25 bp, Homo sapien
ggtgaccgtggccatcaggacgccg

SEQ ID NO: 258537 - DNA, 25 bp, Homo sapien
tgagtgacaagtacaccttgttgct

SEQ ID NO: 258538 - DNA, 25 bp, Homo sapien
tctttataatgatctgggacaggag

SEQ ID NO: 258539 - DNA, 25 bp, Homo sapien
gggatcataaaaaaacagcgtggca

SEQ ID NO: 258540 - DNA, 25 bp, Homo sapien
gatcataaaaaaacagcgtggcagc

SEQ ID NO: 258541 - DNA, 25 bp, Homo sapien
gagatggtggatccgcaaatctctc

SEQ ID NO: 258542 - DNA, 25 bp, Homo sapien
gcaaatctctcaagatctttttgga

SEQ ID NO: 258543 - DNA, 25 bp, Homo sapien
ggccactgtgagacgtagtcaagtc

SEQ ID NO: 258544 - DNA, 25 bp, Homo sapien
cagggccactgtgagacgtagtcaa

SEQ ID NO: 258545 - DNA, 25 bp, Homo sapien
agggccactgtgagacgtagtcaag

SEQ ID NO: 258546 - DNA, 25 bp, Homo sapien
cactgtgagacgtagtcaagtcgct

SEQ ID NO: 258547 - DNA, 25 bp, Homo sapien
tcttggtggcattgacaactgaata

SEQ ID NO: 258548 - DNA, 25 bp, Homo sapien
tctcttggtggcattgacaactgaa

SEQ ID NO: 258549 - DNA, 25 bp, Homo sapien
tgaatagctcagagagctgacgagg

SEQ ID NO: 258550 - DNA, 25 bp, Homo sapien
tagctcagagagctgacgaggttga

SEQ ID NO: 258551 - DNA, 25 bp, Homo sapien
aagaggaggccattggtggggcttc

SEQ ID NO: 258552 - DNA, 25 bp, Homo sapien
gttgcagccatgatagtccccgtgc

SEQ ID NO: 258553 - DNA, 25 bp, Homo sapien
aagccgtcgcagaacagtctggtcc

SEQ ID NO: 258554 - DNA, 25 bp, Homo sapien
ggaagccgtcgcagaacagtctggt

SEQ ID NO: 258555 - DNA, 25 bp, Homo sapien
gccgtcgcagaacagtctggtcctg

SEQ ID NO: 258556 - DNA, 25 bp, Homo sapien
caggggaagccgtcgcagaacagtc

SEQ ID NO: 258557 - DNA, 25 bp, Homo sapien
acacaccattccctcggctgggttg

SEQ ID NO: 258558 - DNA, 25 bp, Homo sapien
gttacacaccattccctcggctggg

SEQ ID NO: 258559 - DNA, 25 bp, Homo sapien
ccaggaaccccggtgcttctgatga

SEQ ID NO: 258560 - DNA, 25 bp, Homo sapien
caggaaccccggtgcttctgatgaa

SEQ ID NO: 258561 - DNA, 25 bp, Homo sapien
tacagccacagcgatcccagctttc

SEQ ID NO: 258562 - DNA, 25 bp, Homo sapien
ggggaattaaaatggccagtctgac

SEQ ID NO: 258563 - DNA, 25 bp, Homo sapien
gacacaagtgttttgagatacaccg

SEQ ID NO: 258564 - DNA, 25 bp, Homo sapien
ctatgcatatctcagccggggaatt

SEQ ID NO: 258565 - DNA, 25 bp, Homo sapien
tgacccataagccagtcctaacgca

SEQ ID NO: 258566 - DNA, 25 bp, Homo sapien
gctggtctctagtgatgcacctgcc

SEQ ID NO: 258567 - DNA, 25 bp, Homo sapien
taagccagtcctaacgcatagggta

SEQ ID NO: 258568 - DNA, 25 bp, Homo sapien
cagtcctaacgcatagggtaatggg

SEQ ID NO: 258569 - DNA, 25 bp, Homo sapien
caacctccacctcctgggttcaagt

SEQ ID NO: 258570 - DNA, 25 bp, Homo sapien
ctaggactacaggcatgtgccacca

SEQ ID NO: 258571 - DNA, 25 bp, Homo sapien
cactctattggccaggctgaagtgt

SEQ ID NO: 258572 - DNA, 25 bp, Homo sapien
gtagtggcatgatctcggctcactg

SEQ ID NO: 258573 - DNA, 25 bp, Homo sapien
aaacagcagtcaagcataagcagtg

SEQ ID NO: 258574 - DNA, 25 bp, Homo sapien
tagcgaacagggacacttctgaagc

SEQ ID NO: 258575 - DNA, 25 bp, Homo sapien
tgtctcctcgcaaatgccagcaaga

SEQ ID NO: 258576 - DNA, 25 bp, Homo sapien
gaagcatcttgctcactgggagata

SEQ ID NO: 258577 - DNA, 25 bp, Homo sapien
ggtcaatgcatacagcagatggagc

SEQ ID NO: 258578 - DNA, 25 bp, Homo sapien
gcggaagcatcagatatacaaatac

SEQ ID NO: 258579 - DNA, 25 bp, Homo sapien
agttcctggagttactgcactacca

SEQ ID NO: 258580 - DNA, 25 bp, Homo sapien
cagattgtccttggatagcggaagc

SEQ ID NO: 258581 - DNA, 25 bp, Homo sapien
catctgtattgtattggttggtgca

SEQ ID NO: 258582 - DNA, 25 bp, Homo sapien
accaacctaacagcacgtatcagta

SEQ ID NO: 258583 - DNA, 25 bp, Homo sapien
aatatctagacgtaaaattgctggg

SEQ ID NO: 258584 - DNA, 25 bp, Homo sapien
tcctttgtatggctgaatcacatcc

SEQ ID NO: 258585 - DNA, 25 bp, Homo sapien
ctgagtaatatccatgttatatgtc

SEQ ID NO: 258586 - DNA, 25 bp, Homo sapien
aatttgttgcgtatatcaatattca

SEQ ID NO: 258587 - DNA, 25 bp, Homo sapien
gatctatccaatttgttgcgtatat

SEQ ID NO: 258588 - DNA, 25 bp, Homo sapien
gagtaatatccatgttatatgtcaa

SEQ ID NO: 258589 - DNA, 25 bp, Homo sapien
cataagagattccatgtacccttta

SEQ ID NO: 258590 - DNA, 25 bp, Homo sapien
atcacaaccagattactgtcattga

SEQ ID NO: 258591 - DNA, 25 bp, Homo sapien
gtcattgataacagtcaagaaacag

SEQ ID NO: 258592 - DNA, 25 bp, Homo sapien
taaaacataagagattccatgtacc

SEQ ID NO: 258593 - DNA, 25 bp, Homo sapien
tcataacctgcagcaaaagatgttt

SEQ ID NO: 258594 - DNA, 25 bp, Homo sapien
atagtctttttgtctcaagtatgta

SEQ ID NO: 258595 - DNA, 25 bp, Homo sapien
ttccagatcattggctagctctaca

SEQ ID NO: 258596 - DNA, 25 bp, Homo sapien
tattgagaagctttcaccacttcca

SEQ ID NO: 258597 - DNA, 25 bp, Homo sapien
ctacatattgagaagctttcaccac

SEQ ID NO: 258598 - DNA, 25 bp, Homo sapien
ggctgagagattggttgcagctgca

SEQ ID NO: 258599 - DNA, 25 bp, Homo sapien
gcagctgcacttttcactctactgt

SEQ ID NO: 258600 - DNA, 25 bp, Homo sapien
gctgagagattggttgcagctgcac

SEQ ID NO: 258601 - DNA, 25 bp, Homo sapien
cagctgcacttttcactctactgtc

SEQ ID NO: 258602 - DNA, 25 bp, Homo sapien
tgatccttgggcagaaatttagcaa

SEQ ID NO: 258603 - DNA, 25 bp, Homo sapien
gacaaggtatctgtcaccaaacagg

SEQ ID NO: 258604 - DNA, 25 bp, Homo sapien
ggtattcccatgactggcatccagt

SEQ ID NO: 258605 - DNA, 25 bp, Homo sapien
tattctttggacctctccctaggca

SEQ ID NO: 258606 - DNA, 25 bp, Homo sapien
catatttcagttgggtcaggacagt

SEQ ID NO: 258607 - DNA, 25 bp, Homo sapien
caaggggttggataatgcaatattc

SEQ ID NO: 258608 - DNA, 25 bp, Homo sapien
aaggtgagactatctgccaaggaga

SEQ ID NO: 258609 - DNA, 25 bp, Homo sapien
caatattcttacaataagggcagtt

SEQ ID NO: 258610 - DNA, 25 bp, Homo sapien
gcttcagtacaagaagaatcatttc

SEQ ID NO: 258611 - DNA, 25 bp, Homo sapien
gagttcacagctatatctgcatagc

SEQ ID NO: 258612 - DNA, 25 bp, Homo sapien
ctttatagaattcagcggccttctc

SEQ ID NO: 258613 - DNA, 25 bp, Homo sapien
catagctgctggcttgtgcaaaatc

SEQ ID NO: 258614 - DNA, 25 bp, Homo sapien
ccaaagcctcatctagccgatttag

SEQ ID NO: 258615 - DNA, 25 bp, Homo sapien
tcgtaggattgcgtgaagtttcagg

SEQ ID NO: 258616 - DNA, 25 bp, Homo sapien
tttgctatctggtaaagaacttcgg

SEQ ID NO: 258617 - DNA, 25 bp, Homo sapien
gaacttcggcactgtttcgtaggat

SEQ ID NO: 258618 - DNA, 25 bp, Homo sapien
taactcttcccaatgttgtggccaa

SEQ ID NO: 258619 - DNA, 25 bp, Homo sapien
gagtgacaccagaagatctactgtt

SEQ ID NO: 258620 - DNA, 25 bp, Homo sapien
tggaagaaactgatattagcgcaac

SEQ ID NO: 258621 - DNA, 25 bp, Homo sapien
tagagggtaacagtctttggagacc

SEQ ID NO: 258622 - DNA, 25 bp, Homo sapien
ttatacatattagatatctcagtga

SEQ ID NO: 258623 - DNA, 25 bp, Homo sapien
tagtacctactaagtcttcggtgta

SEQ ID NO: 258624 - DNA, 25 bp, Homo sapien
tacatattagatatctcagtgaaat

SEQ ID NO: 258625 - DNA, 25 bp, Homo sapien
actaagtcttcggtgtatatacaaa

SEQ ID NO: 258626 - DNA, 25 bp, Homo sapien
ttcaatagcttgactgggattttcc

SEQ ID NO: 258627 - DNA, 25 bp, Homo sapien
tagccattcaatagcttgactggga

SEQ ID NO: 258628 - DNA, 25 bp, Homo sapien
agccattcaatagcttgactgggat

SEQ ID NO: 258629 - DNA, 25 bp, Homo sapien
ccattcaatagcttgactgggattt

SEQ ID NO: 258630 - DNA, 25 bp, Homo sapien
tagataaaacttgaggatcggttgg

SEQ ID NO: 258631 - DNA, 25 bp, Homo sapien
tctccttcacgatcatataattctc

SEQ ID NO: 258632 - DNA, 25 bp, Homo sapien
catataattctcctagcttagataa

SEQ ID NO: 258633 - DNA, 25 bp, Homo sapien
ggttggaataacactgaccacctgc

SEQ ID NO: 258634 - DNA, 25 bp, Homo sapien
attgggtgtcaatgtaataggctcc

SEQ ID NO: 258635 - DNA, 25 bp, Homo sapien
caatgacttcaatattacaaggaaa

SEQ ID NO: 258636 - DNA, 25 bp, Homo sapien
tcaatgacttcaatattacaaggaa

SEQ ID NO: 258637 - DNA, 25 bp, Homo sapien
ttgggtgtcaatgtaataggctcca

SEQ ID NO: 258638 - DNA, 25 bp, Homo sapien
catcagctgccatttcacttgtgta

SEQ ID NO: 258639 - DNA, 25 bp, Homo sapien
tcagctgccatttcacttgtgtagg

SEQ ID NO: 258640 - DNA, 25 bp, Homo sapien
atcagctgccatttcacttgtgtag

SEQ ID NO: 258641 - DNA, 25 bp, Homo sapien
cagctgccatttcacttgtgtaggc

SEQ ID NO: 258642 - DNA, 25 bp, Homo sapien
cacttcttctgaaacaactagctac

SEQ ID NO: 258643 - DNA, 25 bp, Homo sapien
acaaaataatttagcttcatgtagc

SEQ ID NO: 258644 - DNA, 25 bp, Homo sapien
taatttagcttcatgtagcagccaa

SEQ ID NO: 258645 - DNA, 25 bp, Homo sapien
aaataatttagcttcatgtagcagc

SEQ ID NO: 258646 - DNA, 25 bp, Homo sapien
tttagcttcatgtagcagccaaaat

SEQ ID NO: 258647 - DNA, 25 bp, Homo sapien
aattttctgtgagtatctttgtaag

SEQ ID NO: 258648 - DNA, 25 bp, Homo sapien
tttgtaagtatctaatgctttttgg

SEQ ID NO: 258649 - DNA, 25 bp, Homo sapien
tggaaattttctgtgagtatctttg

SEQ ID NO: 258650 - DNA, 25 bp, Homo sapien
gtatctaatgctttttggtagttac

SEQ ID NO: 258651 - DNA, 25 bp, Homo sapien
gaattaagagttgaagagatacttc

SEQ ID NO: 258652 - DNA, 25 bp, Homo sapien
ttattactgtaagttgcatcaatcc

SEQ ID NO: 258653 - DNA, 25 bp, Homo sapien
gctgcaaggctattcagggacaaat

SEQ ID NO: 258654 - DNA, 25 bp, Homo sapien
caaattttaacatggtcgtttccag

SEQ ID NO: 258655 - DNA, 25 bp, Homo sapien
ggaaaaaacagacgcctgcatccac

SEQ ID NO: 258656 - DNA, 25 bp, Homo sapien
tctaggtagggctagaaatttgtac

SEQ ID NO: 258657 - DNA, 25 bp, Homo sapien
aatctttctaggtagggctagaaat

SEQ ID NO: 258658 - DNA, 25 bp, Homo sapien
gcatccactgtaaatctaaatgaaa

SEQ ID NO: 258659 - DNA, 25 bp, Homo sapien
cccgagcaggtggaactatagatgc

SEQ ID NO: 258660 - DNA, 25 bp, Homo sapien
cagaggccagggattttaccaaaca

SEQ ID NO: 258661 - DNA, 25 bp, Homo sapien
tacttcaagagttctcaactggcat

SEQ ID NO: 258662 - DNA, 25 bp, Homo sapien
tttccggtccggtgcagaggtgcta

SEQ ID NO: 258663 - DNA, 25 bp, Homo sapien
tcttggacatcgaaaaggtagctca

SEQ ID NO: 258664 - DNA, 25 bp, Homo sapien
aactatttgtgagtcctaggaggca

SEQ ID NO: 258665 - DNA, 25 bp, Homo sapien
tatgtcaatcgtcccctagtttggg

SEQ ID NO: 258666 - DNA, 25 bp, Homo sapien
tagtttgggcagagttaagagatcc

SEQ ID NO: 258667 - DNA, 25 bp, Homo sapien
tttcaaatacatctcccgacatcat

SEQ ID NO: 258668 - DNA, 25 bp, Homo sapien
caaatacatctcccgacatcatcca

SEQ ID NO: 258669 - DNA, 25 bp, Homo sapien
ttcaaatacatctcccgacatcatc

SEQ ID NO: 258670 - DNA, 25 bp, Homo sapien
aatacatctcccgacatcatccacc

SEQ ID NO: 258671 - DNA, 25 bp, Homo sapien
tgtcctgtcctcacgctgccagaac

SEQ ID NO: 258672 - DNA, 25 bp, Homo sapien
gtgtcctgtcctcacgctgccagaa

SEQ ID NO: 258673 - DNA, 25 bp, Homo sapien
aaaaataattacactttgcaatctc

SEQ ID NO: 258674 - DNA, 25 bp, Homo sapien
tgtgtcctgtcctcacgctgccaga

SEQ ID NO: 258675 - DNA, 25 bp, Homo sapien
atataggcacagtatatttgttaaa

SEQ ID NO: 258676 - DNA, 25 bp, Homo sapien
taggaaagaatataggcacagtata

SEQ ID NO: 258677 - DNA, 25 bp, Homo sapien
gaactcagtcttttgggatacaggt

SEQ ID NO: 258678 - DNA, 25 bp, Homo sapien
cttttgggatacaggtaggaatgat

SEQ ID NO: 258679 - DNA, 25 bp, Homo sapien
tgcagagacgaactaagaaacgcag

SEQ ID NO: 258680 - DNA, 25 bp, Homo sapien
ctgtgcagagacgaactaagaaacg

SEQ ID NO: 258681 - DNA, 25 bp, Homo sapien
cagagacgaactaagaaacgcagac

SEQ ID NO: 258682 - DNA, 25 bp, Homo sapien
tgtgcagagacgaactaagaaacgc

SEQ ID NO: 258683 - DNA, 25 bp, Homo sapien
tctggcatattcttgagcatctttt

SEQ ID NO: 258684 - DNA, 25 bp, Homo sapien
ctggcatattcttgagcatctttta

SEQ ID NO: 258685 - DNA, 25 bp, Homo sapien
tggcatattcttgagcatcttttaa

SEQ ID NO: 258686 - DNA, 25 bp, Homo sapien
gcagtttggggcccatatgagatac

SEQ ID NO: 258687 - DNA, 25 bp, Homo sapien
actgcagtttggggcccatatgaga

SEQ ID NO: 258688 - DNA, 25 bp, Homo sapien
cagactgcagtttggggcccatatg

SEQ ID NO: 258689 - DNA, 25 bp, Homo sapien
agactgcagtttggggcccatatga

SEQ ID NO: 258690 - DNA, 25 bp, Homo sapien
ctccatatgcacggcagatcataat

SEQ ID NO: 258691 - DNA, 25 bp, Homo sapien
tatgcacggcagatcataatcaatg

SEQ ID NO: 258692 - DNA, 25 bp, Homo sapien
gcacggcagatcataatcaatgttt

SEQ ID NO: 258693 - DNA, 25 bp, Homo sapien
catatgcacggcagatcataatcaa

SEQ ID NO: 258694 - DNA, 25 bp, Homo sapien
gaccttgccctttaagagtgtgatg

SEQ ID NO: 258695 - DNA, 25 bp, Homo sapien
tgccccaccgggtattccagggctg

SEQ ID NO: 258696 - DNA, 25 bp, Homo sapien
ccctttaagagtgtgatggaggtaa

SEQ ID NO: 258697 - DNA, 25 bp, Homo sapien
aggacagactctgtgatgccccacc

SEQ ID NO: 258698 - DNA, 25 bp, Homo sapien
gatgcaaagtaaacacccaagagac

SEQ ID NO: 258699 - DNA, 25 bp, Homo sapien
tgcttccttcggagatgcaaagtaa

SEQ ID NO: 258700 - DNA, 25 bp, Homo sapien
ctaagtgcttccttcggagatgcaa

SEQ ID NO: 258701 - DNA, 25 bp, Homo sapien
gagatgcaaagtaaacacccaagag

SEQ ID NO: 258702 - DNA, 25 bp, Homo sapien
tcgggactggctccatgtgctctca

SEQ ID NO: 258703 - DNA, 25 bp, Homo sapien
ctcagggtccgactctaccggtttg

SEQ ID NO: 258704 - DNA, 25 bp, Homo sapien
tcctcctgtgcacagagaatgtggt

SEQ ID NO: 258705 - DNA, 25 bp, Homo sapien
gtgctctcattatgctcagggtccg

SEQ ID NO: 258706 - DNA, 25 bp, Homo sapien
ttccttctcttttgccacgggagcc

SEQ ID NO: 258707 - DNA, 25 bp, Homo sapien
tccttctcttttgccacgggagccc

SEQ ID NO: 258708 - DNA, 25 bp, Homo sapien
ggtggcctgaggcacactgatcaat

SEQ ID NO: 258709 - DNA, 25 bp, Homo sapien
aatctgtttccgagaggcagctgtc

SEQ ID NO: 258710 - DNA, 25 bp, Homo sapien
tcacatcccattaggaggtactgat

SEQ ID NO: 258711 - DNA, 25 bp, Homo sapien
gcagtttttcgggtgttctatcaca

SEQ ID NO: 258712 - DNA, 25 bp, Homo sapien
gaggaggtccctggccgagtgaagc

SEQ ID NO: 258713 - DNA, 25 bp, Homo sapien
ggtccctggccgagtgaagccctct

SEQ ID NO: 258714 - DNA, 25 bp, Homo sapien
aggaggtccctggccgagtgaagcc

SEQ ID NO: 258715 - DNA, 25 bp, Homo sapien
gaggtccctggccgagtgaagccct

SEQ ID NO: 258716 - DNA, 25 bp, Homo sapien
agcctgggtttgttccgacttcaca

SEQ ID NO: 258717 - DNA, 25 bp, Homo sapien
tggagaaggcggacagaaaacacga

SEQ ID NO: 258718 - DNA, 25 bp, Homo sapien
gagaaggcggacagaaaacacgatt

SEQ ID NO: 258719 - DNA, 25 bp, Homo sapien
tgggtttgttccgacttcacagcca

SEQ ID NO: 258720 - DNA, 25 bp, Homo sapien
ttggctgacttgtgtcggcctgtcc

SEQ ID NO: 258721 - DNA, 25 bp, Homo sapien
tgtcggcctgtcctctacatttagg

SEQ ID NO: 258722 - DNA, 25 bp, Homo sapien
cttgtctcgtcctcccttgtgggca

SEQ ID NO: 258723 - DNA, 25 bp, Homo sapien
tttaggcctatgcacctcctcagag

SEQ ID NO: 258724 - DNA, 25 bp, Homo sapien
agaagtgacagcacccgccccccgg

SEQ ID NO: 258725 - DNA, 25 bp, Homo sapien
ccggcctctcaagactccctcccca

SEQ ID NO: 258726 - DNA, 25 bp, Homo sapien
gaagtgacagcacccgccccccggc

SEQ ID NO: 258727 - DNA, 25 bp, Homo sapien
ggatactcgggtatcctgcaaaact

SEQ ID NO: 258728 - DNA, 25 bp, Homo sapien
cgtatacaaagtgggctggatactc

SEQ ID NO: 258729 - DNA, 25 bp, Homo sapien
aactgtggtctagatttatggggta

SEQ ID NO: 258730 - DNA, 25 bp, Homo sapien
tttatggggtaaagggacatgcaag

SEQ ID NO: 258731 - DNA, 25 bp, Homo sapien
cagtagtgccacagaaagtaaccat

SEQ ID NO: 258732 - DNA, 25 bp, Homo sapien
taattggatacaacctgctctaggc

SEQ ID NO: 258733 - DNA, 25 bp, Homo sapien
tattctttgtgctgccccgacttgg

SEQ ID NO: 258734 - DNA, 25 bp, Homo sapien
tatacaacttatgagggcactgcag

SEQ ID NO: 258735 - DNA, 25 bp, Homo sapien
ggctaactacataaactttggtgaa

SEQ ID NO: 258736 - DNA, 25 bp, Homo sapien
gagtgttaactgtgctcctgctcag

SEQ ID NO: 258737 - DNA, 25 bp, Homo sapien
taattttctaaacaggttgcggcag

SEQ ID NO: 258738 - DNA, 25 bp, Homo sapien
tatctttaacaccaccgatgctatt

SEQ ID NO: 258739 - DNA, 25 bp, Homo sapien
caatgcatactaagaagatgaccta

SEQ ID NO: 258740 - DNA, 25 bp, Homo sapien
gactacatcccgacttgaccaatgt

SEQ ID NO: 258741 - DNA, 25 bp, Homo sapien
tgccttattaagcaagtctgcaaaa

SEQ ID NO: 258742 - DNA, 25 bp, Homo sapien
acacatttctagttggtggccgact

SEQ ID NO: 258743 - DNA, 25 bp, Homo sapien
tcaagagtgcatagttggtgacaag

SEQ ID NO: 258744 - DNA, 25 bp, Homo sapien
tatttagactatcttaccgtcagac

SEQ ID NO: 258745 - DNA, 25 bp, Homo sapien
tgacaagatcagcaccaaaacccag

SEQ ID NO: 258746 - DNA, 25 bp, Homo sapien
tgcctgttagacaaatagtgcctct

SEQ ID NO: 258747 - DNA, 25 bp, Homo sapien
gaagggcaagggcatacacagttct

SEQ ID NO: 258748 - DNA, 25 bp, Homo sapien
ccatgcagaaatgtatacgggtgtc

SEQ ID NO: 258749 - DNA, 25 bp, Homo sapien
gagtggtccaaacaggccttcttgc

SEQ ID NO: 258750 - DNA, 25 bp, Homo sapien
tagggtttgcagtcaacgaagggca

SEQ ID NO: 258751 - DNA, 25 bp, Homo sapien
ggcacttagtcgttcacctttacta

SEQ ID NO: 258752 - DNA, 25 bp, Homo sapien
tctgagtctggcacttagtcgttca

SEQ ID NO: 258753 - DNA, 25 bp, Homo sapien
tactactggcactatagttctggcc

SEQ ID NO: 258754 - DNA, 25 bp, Homo sapien
cataaggttcatttgtcccaggtaa

SEQ ID NO: 258755 - DNA, 25 bp, Homo sapien
tcagacctgctatgcctggaggaac

SEQ ID NO: 258756 - DNA, 25 bp, Homo sapien
cattcttcttcagacctgctatgcc

SEQ ID NO: 258757 - DNA, 25 bp, Homo sapien
tcttcttcagacctgctatgcctgg

SEQ ID NO: 258758 - DNA, 25 bp, Homo sapien
tcttcagacctgctatgcctggagg

SEQ ID NO: 258759 - DNA, 25 bp, Homo sapien
caaaacaaatgtgaaaccaatcagg

SEQ ID NO: 258760 - DNA, 25 bp, Homo sapien
aacaaatgtgaaaccaatcaggctc

SEQ ID NO: 258761 - DNA, 25 bp, Homo sapien
ctaggtttcgaagagattgtcacgt

SEQ ID NO: 258762 - DNA, 25 bp, Homo sapien
cacgttagagttatgtaaacaaaca

SEQ ID NO: 258763 - DNA, 25 bp, Homo sapien
tggctgcagtttttggtcgttctat

SEQ ID NO: 258764 - DNA, 25 bp, Homo sapien
ctatttgagggccaagtgggtccac

SEQ ID NO: 258765 - DNA, 25 bp, Homo sapien
ccaagtgggtccacataggaggcat

SEQ ID NO: 258766 - DNA, 25 bp, Homo sapien
cagtttttggtcgttctatttgagg

SEQ ID NO: 258767 - DNA, 25 bp, Homo sapien
tattctggaagcaaatcatctccta

SEQ ID NO: 258768 - DNA, 25 bp, Homo sapien
ttattctggaagcaaatcatctcct

SEQ ID NO: 258769 - DNA, 25 bp, Homo sapien
gatatttaatccaaggtttaacatg

SEQ ID NO: 258770 - DNA, 25 bp, Homo sapien
agaatagaatacacttacttaagtt

SEQ ID NO: 258771 - DNA, 25 bp, Homo sapien
gaggatgatctcataaggcaatttc

SEQ ID NO: 258772 - DNA, 25 bp, Homo sapien
taattacaggttagatatttaatcc

SEQ ID NO: 258773 - DNA, 25 bp, Homo sapien
tcttcctgtgtgtcaatgttttcaa

SEQ ID NO: 258774 - DNA, 25 bp, Homo sapien
tttcaaaaagctaaggaagtcactg

SEQ ID NO: 258775 - DNA, 25 bp, Homo sapien
tcctgtgtgtcaatgttttcaaaaa

SEQ ID NO: 258776 - DNA, 25 bp, Homo sapien
cctgtgtgtcaatgttttcaaaaag

SEQ ID NO: 258777 - DNA, 25 bp, Homo sapien
tatgacgacgatgttggagagttcc

SEQ ID NO: 258778 - DNA, 25 bp, Homo sapien
agaggaatgcgctcaaacccagagg

SEQ ID NO: 258779 - DNA, 25 bp, Homo sapien
tcagttctaagtgcaagcagtcacg

SEQ ID NO: 258780 - DNA, 25 bp, Homo sapien
ggaaagcagtccaagaataggcccc

SEQ ID NO: 258781 - DNA, 25 bp, Homo sapien
ccccgaaagcgctttcagattcgcg

SEQ ID NO: 258782 - DNA, 25 bp, Homo sapien
tcttgagcggaataacccgaagggc

SEQ ID NO: 258783 - DNA, 25 bp, Homo sapien
cgctttcagattcgcgccgagatgg

SEQ ID NO: 258784 - DNA, 25 bp, Homo sapien
acgcggcggctcttgagcggaataa

SEQ ID NO: 258785 - DNA, 25 bp, Homo sapien
gacacagagcgactctgcacctttc

SEQ ID NO: 258786 - DNA, 25 bp, Homo sapien
ggagctgaaaacattttgtcacttg

SEQ ID NO: 258787 - DNA, 25 bp, Homo sapien
accgagaagccgactgagcgaggtc

SEQ ID NO: 258788 - DNA, 25 bp, Homo sapien
gcacctttcgcctccaggagctgaa

SEQ ID NO: 258789 - DNA, 25 bp, Homo sapien
cagaggccggcccggaggatgggag

SEQ ID NO: 258790 - DNA, 25 bp, Homo sapien
agaggccggcccggaggatgggagc

SEQ ID NO: 258791 - DNA, 25 bp, Homo sapien
gccagaggccggcccggaggatggg

SEQ ID NO: 258792 - DNA, 25 bp, Homo sapien
ccagaggccggcccggaggatggga

SEQ ID NO: 258793 - DNA, 25 bp, Homo sapien
tgagggacaggccacgctcagcgtc

SEQ ID NO: 258794 - DNA, 25 bp, Homo sapien
ctgagggacaggccacgctcagcgt

SEQ ID NO: 258795 - DNA, 25 bp, Homo sapien
tgctccagtagctcctccggccggt

SEQ ID NO: 258796 - DNA, 25 bp, Homo sapien
ctgctccagtagctcctccggccgg

SEQ ID NO: 258797 - DNA, 25 bp, Homo sapien
gtggaaggcactgagcacgccggcc

SEQ ID NO: 258798 - DNA, 25 bp, Homo sapien
tggaaggcactgagcacgccggccg

SEQ ID NO: 258799 - DNA, 25 bp, Homo sapien
cctgccgggcagctcgcgttgcgcg

SEQ ID NO: 258800 - DNA, 25 bp, Homo sapien
gcgttgcgcgcctgctcacgcggcc

SEQ ID NO: 258801 - DNA, 25 bp, Homo sapien
gcaggttggtgggcggccggaagcg

SEQ ID NO: 258802 - DNA, 25 bp, Homo sapien
cccagggcgacacgctgcgcaggtt

SEQ ID NO: 258803 - DNA, 25 bp, Homo sapien
tgggcggccggaagcggcggtcggc

SEQ ID NO: 258804 - DNA, 25 bp, Homo sapien
ctgtaggcccagggcgacacgctgc

SEQ ID NO: 258805 - DNA, 25 bp, Homo sapien
ggtgttcaagagatacgtgttgcat

SEQ ID NO: 258806 - DNA, 25 bp, Homo sapien
ggaggagatgaggtgttcaagagat

SEQ ID NO: 258807 - DNA, 25 bp, Homo sapien
agagatacgtgttgcataggaaata

SEQ ID NO: 258808 - DNA, 25 bp, Homo sapien
caagagatacgtgttgcataggaaa

SEQ ID NO: 258809 - DNA, 25 bp, Homo sapien
aagcctttcttgacctctgtggccc

SEQ ID NO: 258810 - DNA, 25 bp, Homo sapien
tcaagactcagctctttcacgaagc

SEQ ID NO: 258811 - DNA, 25 bp, Homo sapien
ctgggaggccttgccccctagggca

SEQ ID NO: 258812 - DNA, 25 bp, Homo sapien
tttcttgacctctgtggccctggga

SEQ ID NO: 258813 - DNA, 25 bp, Homo sapien
taatgagcatctttcacgctgatcc

SEQ ID NO: 258814 - DNA, 25 bp, Homo sapien
ggaaagcccagatgcgttttagaca

SEQ ID NO: 258815 - DNA, 25 bp, Homo sapien
tctgccacagtgagcttggtcctct

SEQ ID NO: 258816 - DNA, 25 bp, Homo sapien
ctgagtgaagccctagatcctttgg

SEQ ID NO: 258817 - DNA, 25 bp, Homo sapien
cacaggcaaacatgaccacacctgg

SEQ ID NO: 258818 - DNA, 25 bp, Homo sapien
aaatgatgcacatgacaccttcagc

SEQ ID NO: 258819 - DNA, 25 bp, Homo sapien
ttcagcaaatataagccacccacct

SEQ ID NO: 258820 - DNA, 25 bp, Homo sapien
caataacccaaaagatggtgagagg

SEQ ID NO: 258821 - DNA, 25 bp, Homo sapien
ccgttggtgacctagggtgtctatt

SEQ ID NO: 258822 - DNA, 25 bp, Homo sapien
gggtgtctatttgaaagttacttga

SEQ ID NO: 258823 - DNA, 25 bp, Homo sapien
gggagggtctcatggcctcttcgaa

SEQ ID NO: 258824 - DNA, 25 bp, Homo sapien
ttcgaatgccgttggtgacctaggg

SEQ ID NO: 258825 - DNA, 25 bp, Homo sapien
aggaggagtgtcagggtctgtggtt

SEQ ID NO: 258826 - DNA, 25 bp, Homo sapien
ggaggagtgtcagggtctgtggttc

SEQ ID NO: 258827 - DNA, 25 bp, Homo sapien
tggttcctggctgtattccaggggg

SEQ ID NO: 258828 - DNA, 25 bp, Homo sapien
tcctggctgtattccagggggcctg

SEQ ID NO: 258829 - DNA, 25 bp, Homo sapien
tgaggatgaacaatgtcccgccggc

SEQ ID NO: 258830 - DNA, 25 bp, Homo sapien
taacccacagtttggaagcagggac

SEQ ID NO: 258831 - DNA, 25 bp, Homo sapien
aaattccacagaccacgcggtgggc

SEQ ID NO: 258832 - DNA, 25 bp, Homo sapien
tagcgtcggcacacacatttgaaag

SEQ ID NO: 258833 - DNA, 25 bp, Homo sapien
ggcatgaggcctatatgggactcct

SEQ ID NO: 258834 - DNA, 25 bp, Homo sapien
catggtaataccaagacatccgccg

SEQ ID NO: 258835 - DNA, 25 bp, Homo sapien
caagctgtccaagtgatctgtttca

SEQ ID NO: 258836 - DNA, 25 bp, Homo sapien
ggttttcagaccaccggcatgaggc

SEQ ID NO: 258837 - DNA, 25 bp, Homo sapien
caggaacaaaggacgagtcctccag

SEQ ID NO: 258838 - DNA, 25 bp, Homo sapien
atgggatcgcagaagtgtccctggc

SEQ ID NO: 258839 - DNA, 25 bp, Homo sapien
tggcccggcttaatccaggaacaaa

SEQ ID NO: 258840 - DNA, 25 bp, Homo sapien
cctccagggatgattagaggtgatg

SEQ ID NO: 258841 - DNA, 25 bp, Homo sapien
tcctgtgggcagtcattcttttgtc

SEQ ID NO: 258842 - DNA, 25 bp, Homo sapien
caaacacggacaagcaaccgagcag

SEQ ID NO: 258843 - DNA, 25 bp, Homo sapien
gcaaccgagcagagttctgccctgt

SEQ ID NO: 258844 - DNA, 25 bp, Homo sapien
ttcacattttctgcgtgctgctctg

SEQ ID NO: 258845 - DNA, 25 bp, Homo sapien
cgtgccctcggtatgtaggtaactg

SEQ ID NO: 258846 - DNA, 25 bp, Homo sapien
tgggactggtctttccgtgccctcg

SEQ ID NO: 258847 - DNA, 25 bp, Homo sapien
actggtctttccgtgccctcggtat

SEQ ID NO: 258848 - DNA, 25 bp, Homo sapien
tctttccgtgccctcggtatgtagg

SEQ ID NO: 258849 - DNA, 25 bp, Homo sapien
cgaggatgtgccgcaggaaaaccaa

SEQ ID NO: 258850 - DNA, 25 bp, Homo sapien
gaggatgtgccgcaggaaaaccaaa

SEQ ID NO: 258851 - DNA, 25 bp, Homo sapien
ggatgtgccgcaggaaaaccaaagg

SEQ ID NO: 258852 - DNA, 25 bp, Homo sapien
atgtgccgcaggaaaaccaaaggcg

SEQ ID NO: 258853 - DNA, 25 bp, Homo sapien
agccacttccactcccagtatcacc

SEQ ID NO: 258854 - DNA, 25 bp, Homo sapien
gcagtgacatgaagccagccacttc

SEQ ID NO: 258855 - DNA, 25 bp, Homo sapien
gtgacatgaagccagccacttccac

SEQ ID NO: 258856 - DNA, 25 bp, Homo sapien
cacttccactcccagtatcaccacc

SEQ ID NO: 258857 - DNA, 25 bp, Homo sapien
tgggtgcatcctcagtccacgaagg

SEQ ID NO: 258858 - DNA, 25 bp, Homo sapien
caagggacagtcaccactaggaagt

SEQ ID NO: 258859 - DNA, 25 bp, Homo sapien
tacaacgagaaagagtgtccctcag

SEQ ID NO: 258860 - DNA, 25 bp, Homo sapien
catgtcaaagcatagggtcaaggga

SEQ ID NO: 258861 - DNA, 25 bp, Homo sapien
ggagagagcacgggtgaggtcacgc

SEQ ID NO: 258862 - DNA, 25 bp, Homo sapien
gggagagagcacgggtgaggtcacg

SEQ ID NO: 258863 - DNA, 25 bp, Homo sapien
ggtgcggcgcaggacgacggtgggc

SEQ ID NO: 258864 - DNA, 25 bp, Homo sapien
ggaagcgcacgtcctcctcgccgaa

SEQ ID NO: 258865 - DNA, 25 bp, Homo sapien
tcctcgccgaacagcccggtcaggc

SEQ ID NO: 258866 - DNA, 25 bp, Homo sapien
gacgacggtgggcatgtagacaggg

SEQ ID NO: 258867 - DNA, 25 bp, Homo sapien
cgccctgtttgtcgatgctggagtt

SEQ ID NO: 258868 - DNA, 25 bp, Homo sapien
tctgcgtccttctccggctcgggga

SEQ ID NO: 258869 - DNA, 25 bp, Homo sapien
ggatggtgacgtaggcctcggtgta

SEQ ID NO: 258870 - DNA, 25 bp, Homo sapien
cagcaggagcttggcgccctgtttg

SEQ ID NO: 258871 - DNA, 25 bp, Homo sapien
tgcagatgctaacgtggcccacttt

SEQ ID NO: 258872 - DNA, 25 bp, Homo sapien
tttggaactcttagctggccctggg

SEQ ID NO: 258873 - DNA, 25 bp, Homo sapien
gatcaaggacctagctctcgtggca

SEQ ID NO: 258874 - DNA, 25 bp, Homo sapien
tctttggcaagcacccagcggtgag

SEQ ID NO: 258875 - DNA, 25 bp, Homo sapien
ttactgccgccttgcaggagctggg

SEQ ID NO: 258876 - DNA, 25 bp, Homo sapien
cactaagcggatgaatgtacggtac

SEQ ID NO: 258877 - DNA, 25 bp, Homo sapien
ggtgcccagtagatagtcactaagc

SEQ ID NO: 258878 - DNA, 25 bp, Homo sapien
ggtgactagaaccaggcaggtgccc

SEQ ID NO: 258879 - DNA, 25 bp, Homo sapien
gcctgagagtggatcctggttgctg

SEQ ID NO: 258880 - DNA, 25 bp, Homo sapien
ctcgcgtcccggtcgccggaaggcg

SEQ ID NO: 258881 - DNA, 25 bp, Homo sapien
gttgctgtgttaggcgctgttgggc

SEQ ID NO: 258882 - DNA, 25 bp, Homo sapien
ttaggcgctgttgggcctcgcgtcc

SEQ ID NO: 258883 - DNA, 25 bp, Homo sapien
aattcggttgcttatgagtgatgcc

SEQ ID NO: 258884 - DNA, 25 bp, Homo sapien
tctcagtctggcgtataattcaacc

SEQ ID NO: 258885 - DNA, 25 bp, Homo sapien
taaacatagggtctcagattgagtc

SEQ ID NO: 258886 - DNA, 25 bp, Homo sapien
ttttattcccacagtagtgagcagt

SEQ ID NO: 258887 - DNA, 25 bp, Homo sapien
gtactcacagaatatccagtattag

SEQ ID NO: 258888 - DNA, 25 bp, Homo sapien
tcaccttctgggagaacccgtggta

SEQ ID NO: 258889 - DNA, 25 bp, Homo sapien
cagtttcacagttactagttaagtc

SEQ ID NO: 258890 - DNA, 25 bp, Homo sapien
ggtgaattaccatattactgtgtgc

SEQ ID NO: 258891 - DNA, 25 bp, Homo sapien
gcctcttagctattaggaactgtca

SEQ ID NO: 258892 - DNA, 25 bp, Homo sapien
tggtcacaaaaatgttagcactgct

SEQ ID NO: 258893 - DNA, 25 bp, Homo sapien
gaagctctatgcagtgagtttgtgg

SEQ ID NO: 258894 - DNA, 25 bp, Homo sapien
gtacctactagggatctgacctcaa

SEQ ID NO: 258895 - DNA, 25 bp, Homo sapien
taagttagctgtctttgatgaggaa

SEQ ID NO: 258896 - DNA, 25 bp, Homo sapien
tagttgtaatatcaccatgtttccc

SEQ ID NO: 258897 - DNA, 25 bp, Homo sapien
gaagggaactagctgtcagtttcaa

SEQ ID NO: 258898 - DNA, 25 bp, Homo sapien
gatgggatggttactaccacttgtc

SEQ ID NO: 258899 - DNA, 25 bp, Homo sapien
tcctttccagcaccattatttgggt

SEQ ID NO: 258900 - DNA, 25 bp, Homo sapien
caaggcacaatcactaaagactttg

SEQ ID NO: 258901 - DNA, 25 bp, Homo sapien
ggtagcacctgtaactgtgttcttg

SEQ ID NO: 258902 - DNA, 25 bp, Homo sapien
gaagacagtagcatgttaacatcac

SEQ ID NO: 258903 - DNA, 25 bp, Homo sapien
tactctaaatggcttgcttaagcaa

SEQ ID NO: 258904 - DNA, 25 bp, Homo sapien
cctgttgcccctttcgatcgtgtat

SEQ ID NO: 258905 - DNA, 25 bp, Homo sapien
tatccagccacatagcccatatcta

SEQ ID NO: 258906 - DNA, 25 bp, Homo sapien
tgttagctgctatgaacctgttgcc

SEQ ID NO: 258907 - DNA, 25 bp, Homo sapien
cactaatcatactctgatgcctgaa

SEQ ID NO: 258908 - DNA, 25 bp, Homo sapien
taatcatactctgatgcctgaactt

SEQ ID NO: 258909 - DNA, 25 bp, Homo sapien
aaataaccttaggaactgtagccat

SEQ ID NO: 258910 - DNA, 25 bp, Homo sapien
actgtagccatttcattgccttaat

SEQ ID NO: 258911 - DNA, 25 bp, Homo sapien
tatatagctatgtttgaatcctcgc

SEQ ID NO: 258912 - DNA, 25 bp, Homo sapien
gccaacagagtcctggcgggagact

SEQ ID NO: 258913 - DNA, 25 bp, Homo sapien
tcctcgcaaaatgtgctgttgaagc

SEQ ID NO: 258914 - DNA, 25 bp, Homo sapien
gttgaccttgacaccaaataactgg

SEQ ID NO: 258915 - DNA, 25 bp, Homo sapien
cagcagtttcatggtacagtctgat

SEQ ID NO: 258916 - DNA, 25 bp, Homo sapien
gcctttctcccatataaaagccagc

SEQ ID NO: 258917 - DNA, 25 bp, Homo sapien
tacaatgcatagtaagcctttctcc

SEQ ID NO: 258918 - DNA, 25 bp, Homo sapien
taatgcatgtacgtgaataataaca

SEQ ID NO: 258919 - DNA, 25 bp, Homo sapien
tctgccatgattgttccgtgtgtcc

SEQ ID NO: 258920 - DNA, 25 bp, Homo sapien
cacaactcgggaaatgctactgcca

SEQ ID NO: 258921 - DNA, 25 bp, Homo sapien
tgggcccaaagtatcaatagtcatc

SEQ ID NO: 258922 - DNA, 25 bp, Homo sapien
ccatctattgggttgaggctacgga

SEQ ID NO: 258923 - DNA, 25 bp, Homo sapien
tgttgtattaacctcttagaagtct

SEQ ID NO: 258924 - DNA, 25 bp, Homo sapien
tgtcttaagtatcagagccactgtc

SEQ ID NO: 258925 - DNA, 25 bp, Homo sapien
tcctgtgtattttagtatggcagtc

SEQ ID NO: 258926 - DNA, 25 bp, Homo sapien
caactttgatccgaattcactgaca

SEQ ID NO: 258927 - DNA, 25 bp, Homo sapien
gaagggctttgaccacagttatttg

SEQ ID NO: 258928 - DNA, 25 bp, Homo sapien
tgctgggcatagaagtaaacactga

SEQ ID NO: 258929 - DNA, 25 bp, Homo sapien
gaaatcttggactgttagagcccag

SEQ ID NO: 258930 - DNA, 25 bp, Homo sapien
tgaggtcaaggtacatgaagggctt

SEQ ID NO: 258931 - DNA, 25 bp, Homo sapien
gagccagagattgtacagtgtattt

SEQ ID NO: 258932 - DNA, 25 bp, Homo sapien
taactattcgagagtgccacagaca

SEQ ID NO: 258933 - DNA, 25 bp, Homo sapien
cttgaacgtgtctcttctgaaagca

SEQ ID NO: 258934 - DNA, 25 bp, Homo sapien
cacaccctttttccagtagaggctc

SEQ ID NO: 258935 - DNA, 25 bp, Homo sapien
gacaggactgtttgtcttttgaccc

SEQ ID NO: 258936 - DNA, 25 bp, Homo sapien
gagtagaggtcttgacaatgtcagc

SEQ ID NO: 258937 - DNA, 25 bp, Homo sapien
tgacccctctgtacataaagaaagg

SEQ ID NO: 258938 - DNA, 25 bp, Homo sapien
tttctgttgactgtaccctggcagt

SEQ ID NO: 258939 - DNA, 25 bp, Homo sapien
tatcagtcatttctgcgtagggtat

SEQ ID NO: 258940 - DNA, 25 bp, Homo sapien
tgacatgtacagaaaagatttcttc

SEQ ID NO: 258941 - DNA, 25 bp, Homo sapien
gcgtagggtatcactgtatgtatcc

SEQ ID NO: 258942 - DNA, 25 bp, Homo sapien
gtatgtatcctaaaataaagcactg

SEQ ID NO: 258943 - DNA, 25 bp, Homo sapien
ggattcctccaagtgcctaggtaca

SEQ ID NO: 258944 - DNA, 25 bp, Homo sapien
tgttgtgatgggcaagagacctgtc

SEQ ID NO: 258945 - DNA, 25 bp, Homo sapien
gagacctgtcataggcctgcttgtg

SEQ ID NO: 258946 - DNA, 25 bp, Homo sapien
catctattgttaaggtccagaccgg

SEQ ID NO: 258947 - DNA, 25 bp, Homo sapien
cattgaagagagaccatgatggcgg

SEQ ID NO: 258948 - DNA, 25 bp, Homo sapien
gcgcgtcattgaagagagaccatga

SEQ ID NO: 258949 - DNA, 25 bp, Homo sapien
agcgcatggcgcgtcattgaagaga

SEQ ID NO: 258950 - DNA, 25 bp, Homo sapien
cgctcccagaatgcagcgcatggcg

SEQ ID NO: 258951 - DNA, 25 bp, Homo sapien
ctatggaagttccagtatttgaggg

SEQ ID NO: 258952 - DNA, 25 bp, Homo sapien
tgaggggtcgcctcacatagcccat

SEQ ID NO: 258953 - DNA, 25 bp, Homo sapien
atgtcgggcagatccactcctccca

SEQ ID NO: 258954 - DNA, 25 bp, Homo sapien
ccctccacatgcacctatggaagtt

SEQ ID NO: 258955 - DNA, 25 bp, Homo sapien
cattgtatcataagcagtggtaatt

SEQ ID NO: 258956 - DNA, 25 bp, Homo sapien
tctgccaggtgtctaccgggtgaag

SEQ ID NO: 258957 - DNA, 25 bp, Homo sapien
ggtaattcccgtctgccaggtgtct

SEQ ID NO: 258958 - DNA, 25 bp, Homo sapien
ggaaataccattgtatcataagcag

SEQ ID NO: 258959 - DNA, 25 bp, Homo sapien
taaacacctcttaagtaccactcca

SEQ ID NO: 258960 - DNA, 25 bp, Homo sapien
ggacaccgttggacgcttactccac

SEQ ID NO: 258961 - DNA, 25 bp, Homo sapien
cttgttgctcgtgtaaacacctctt

SEQ ID NO: 258962 - DNA, 25 bp, Homo sapien
tggacaccgttggacgcttactcca

SEQ ID NO: 258963 - DNA, 25 bp, Homo sapien
tcgcagaggactcccgatctcttca

SEQ ID NO: 258964 - DNA, 25 bp, Homo sapien
ccctttggtcttgtgagaacgcagt

SEQ ID NO: 258965 - DNA, 25 bp, Homo sapien
cactagcctcttaggcgccgggtgc

SEQ ID NO: 258966 - DNA, 25 bp, Homo sapien
ccaggctagctctcgtggtgggtgc

SEQ ID NO: 258967 - DNA, 25 bp, Homo sapien
ttaccaggagacttcggtgcggcga

SEQ ID NO: 258968 - DNA, 25 bp, Homo sapien
cctttctgttgaccgctaactgcgg

SEQ ID NO: 258969 - DNA, 25 bp, Homo sapien
acatagcccggtcccgtgtcgctgt

SEQ ID NO: 258970 - DNA, 25 bp, Homo sapien
ccttcaggagctgcggaccgccagg

SEQ ID NO: 258971 - DNA, 25 bp, Homo sapien
gcctgaccaacaaggcataacccca

SEQ ID NO: 258972 - DNA, 25 bp, Homo sapien
tctctactgaaaatacacaaagaag

SEQ ID NO: 258973 - DNA, 25 bp, Homo sapien
gaagctgggcatggtggagcttgcc

SEQ ID NO: 258974 - DNA, 25 bp, Homo sapien
actgaaaatacacaaagaagctggg

SEQ ID NO: 258975 - DNA, 25 bp, Homo sapien
tgaggaacgctcctggactgtgagg

SEQ ID NO: 258976 - DNA, 25 bp, Homo sapien
gaggaacgctcctggactgtgaggt

SEQ ID NO: 258977 - DNA, 25 bp, Homo sapien
aatgaggaacgctcctggactgtga

SEQ ID NO: 258978 - DNA, 25 bp, Homo sapien
atgaggaacgctcctggactgtgag

SEQ ID NO: 258979 - DNA, 25 bp, Homo sapien
agagcaaatgccactaccgtgtttc

SEQ ID NO: 258980 - DNA, 25 bp, Homo sapien
gtgtttccccctcgcgcctgtggag

SEQ ID NO: 258981 - DNA, 25 bp, Homo sapien
agcaaatgccactaccgtgtttccc

SEQ ID NO: 258982 - DNA, 25 bp, Homo sapien
ccgtgtttccccctcgcgcctgtgg

SEQ ID NO: 258983 - DNA, 25 bp, Homo sapien
ctgaagcggcaggatgatttgagcc

SEQ ID NO: 258984 - DNA, 25 bp, Homo sapien
ggttgcatgatgtgcctgtggtttc

SEQ ID NO: 258985 - DNA, 25 bp, Homo sapien
atgggtgtggttgcatgatgtgcct

SEQ ID NO: 258986 - DNA, 25 bp, Homo sapien
aaattacatgggtgtggttgcatga

SEQ ID NO: 258987 - DNA, 25 bp, Homo sapien
ccaaagacagcagttccaatgatat

SEQ ID NO: 258988 - DNA, 25 bp, Homo sapien
catttccttcgagccgtttgcagac

SEQ ID NO: 258989 - DNA, 25 bp, Homo sapien
ttgggcctcatttccttcgagccgt

SEQ ID NO: 258990 - DNA, 25 bp, Homo sapien
atattcccaggcattgctgtcaagc

SEQ ID NO: 258991 - DNA, 25 bp, Homo sapien
ttacgaccggaatccagaacaacgc

SEQ ID NO: 258992 - DNA, 25 bp, Homo sapien
gaccggaatccagaacaacgcccta

SEQ ID NO: 258993 - DNA, 25 bp, Homo sapien
cggaatccagaacaacgccctatgg

SEQ ID NO: 258994 - DNA, 25 bp, Homo sapien
tacgaccggaatccagaacaacgcc

SEQ ID NO: 258995 - DNA, 25 bp, Homo sapien
ttgcaggacatcaagggctccggac

SEQ ID NO: 258996 - DNA, 25 bp, Homo sapien
ctcctccttcatttgcaggacatca

SEQ ID NO: 258997 - DNA, 25 bp, Homo sapien
ctgcaaggaacttaaggacatcctc

SEQ ID NO: 258998 - DNA, 25 bp, Homo sapien
gaacttaaggacatcctcctccttc

SEQ ID NO: 258999 - DNA, 25 bp, Homo sapien
gtcttcttcagatttatgatataga

SEQ ID NO: 259000 - DNA, 25 bp, Homo sapien
ggtcttcttcagatttatgatatag

SEQ ID NO: 259001 - DNA, 25 bp, Homo sapien
ttcttcagatttatgatatagatgc

SEQ ID NO: 259002 - DNA, 25 bp, Homo sapien
ccaggtcttcttcagatttatgata

SEQ ID NO: 259003 - DNA, 25 bp, Homo sapien
gtattcctggaggatataacactga

SEQ ID NO: 259004 - DNA, 25 bp, Homo sapien
gccagtattcctggaggatataaca

SEQ ID NO: 259005 - DNA, 25 bp, Homo sapien
cagtattcctggaggatataacact

SEQ ID NO: 259006 - DNA, 25 bp, Homo sapien
tggccagtattcctggaggatataa

SEQ ID NO: 259007 - DNA, 25 bp, Homo sapien
caagaagccgtggctcccggaaggc

SEQ ID NO: 259008 - DNA, 25 bp, Homo sapien
cacaagaagccgtggctcccggaag

SEQ ID NO: 259009 - DNA, 25 bp, Homo sapien
aattggagtggctccagtggccgca

SEQ ID NO: 259010 - DNA, 25 bp, Homo sapien
gtggccgcagcaaacttcagcacag

SEQ ID NO: 259011 - DNA, 25 bp, Homo sapien
ctccgtgagaggctggtgggtcagc

SEQ ID NO: 259012 - DNA, 25 bp, Homo sapien
cgcctccgtgagaggctggtgggtc

SEQ ID NO: 259013 - DNA, 25 bp, Homo sapien
gacgcctccgtgagaggctggtggg

SEQ ID NO: 259014 - DNA, 25 bp, Homo sapien
gcctccgtgagaggctggtgggtca

SEQ ID NO: 259015 - DNA, 25 bp, Homo sapien
ctgttacacagagcaatggtaggta

SEQ ID NO: 259016 - DNA, 25 bp, Homo sapien
ttacacagagcaatggtaggtaggt

SEQ ID NO: 259017 - DNA, 25 bp, Homo sapien
acagagcaatggtaggtaggttaac

SEQ ID NO: 259018 - DNA, 25 bp, Homo sapien
cacagagcaatggtaggtaggttaa

SEQ ID NO: 259019 - DNA, 25 bp, Homo sapien
gacctcccatgggtgttcacgagaa

SEQ ID NO: 259020 - DNA, 25 bp, Homo sapien
cctcccatgggtgttcacgagaaat

SEQ ID NO: 259021 - DNA, 25 bp, Homo sapien
tcccatgggtgttcacgagaaatgg

SEQ ID NO: 259022 - DNA, 25 bp, Homo sapien
atgggtgttcacgagaaatggtgcc

SEQ ID NO: 259023 - DNA, 25 bp, Homo sapien
agagggcacctgcacaccttcagac

SEQ ID NO: 259024 - DNA, 25 bp, Homo sapien
gcgctccagtcttcagtagggaact

SEQ ID NO: 259025 - DNA, 25 bp, Homo sapien
cagtggcctgaacagtgggagctgc

SEQ ID NO: 259026 - DNA, 25 bp, Homo sapien
taagaccagtcagtggttgctccta

SEQ ID NO: 259027 - DNA, 25 bp, Homo sapien
ctgcttaagagcctatgcaagaaca

SEQ ID NO: 259028 - DNA, 25 bp, Homo sapien
catcaaccatttttccatgctgctt

SEQ ID NO: 259029 - DNA, 25 bp, Homo sapien
catgctgcttaagagcctatgcaag

SEQ ID NO: 259030 - DNA, 25 bp, Homo sapien
ttccatcaaccatttttccatgctg

SEQ ID NO: 259031 - DNA, 25 bp, Homo sapien
cacattgccccggtgggactaggga

SEQ ID NO: 259032 - DNA, 25 bp, Homo sapien
gggaaactgatgcaaacatgctgct

SEQ ID NO: 259033 - DNA, 25 bp, Homo sapien
caaggcctgactgctctttatctga

SEQ ID NO: 259034 - DNA, 25 bp, Homo sapien
tagtatacctcagcagaacccatct

SEQ ID NO: 259035 - DNA, 25 bp, Homo sapien
tactgtcaggaaactgagtgatcta

SEQ ID NO: 259036 - DNA, 25 bp, Homo sapien
tcttagaagtatagatgtatgtgcg

SEQ ID NO: 259037 - DNA, 25 bp, Homo sapien
tatatatctaggcaacaacacttag

SEQ ID NO: 259038 - DNA, 25 bp, Homo sapien
gaagttcttagcataatgtatccat

SEQ ID NO: 259039 - DNA, 25 bp, Homo sapien
tgtggaatgccatacctctgaccct

SEQ ID NO: 259040 - DNA, 25 bp, Homo sapien
gataatgtattgtgcgggtgacctc

SEQ ID NO: 259041 - DNA, 25 bp, Homo sapien
aaagtttaatcacggacacatgtcc

SEQ ID NO: 259042 - DNA, 25 bp, Homo sapien
caaaagggattaatacagcgatgcc

SEQ ID NO: 259043 - DNA, 25 bp, Homo sapien
gactcagcatcgctttcaataggct

SEQ ID NO: 259044 - DNA, 25 bp, Homo sapien
tcacaggccaatagggaagccgagg

SEQ ID NO: 259045 - DNA, 25 bp, Homo sapien
taggcttttcaggaccttcactgca

SEQ ID NO: 259046 - DNA, 25 bp, Homo sapien
tagtccgtcgattacttcacttgaa

SEQ ID NO: 259047 - DNA, 25 bp, Homo sapien
tcttgcacccggtgaagagcgtgcg

SEQ ID NO: 259048 - DNA, 25 bp, Homo sapien
ggaacagcctcaacgtggacctgta

SEQ ID NO: 259049 - DNA, 25 bp, Homo sapien
tgacggctgtcacggccgcgcacat

SEQ ID NO: 259050 - DNA, 25 bp, Homo sapien
gcagccaggtgttcgccagcgacag

SEQ ID NO: 259051 - DNA, 25 bp, Homo sapien
ctacgagggcccaagcttcggcgct

SEQ ID NO: 259052 - DNA, 25 bp, Homo sapien
agcttcggcgctgacggccccacgg

SEQ ID NO: 259053 - DNA, 25 bp, Homo sapien
acggcgctggaggagatgccgcggc

SEQ ID NO: 259054 - DNA, 25 bp, Homo sapien
cccacggcgctggaggagatgccgc

SEQ ID NO: 259055 - DNA, 25 bp, Homo sapien
cagtccaaccacaaaagttttctga

SEQ ID NO: 259056 - DNA, 25 bp, Homo sapien
aagtctctttcaggcccatcatcaa

SEQ ID NO: 259057 - DNA, 25 bp, Homo sapien
gaatttaagtctctttcaggcccat

SEQ ID NO: 259058 - DNA, 25 bp, Homo sapien
aagcagaatttaagtctctttcagg

SEQ ID NO: 259059 - DNA, 25 bp, Homo sapien
ttctttcttctacgagtcagatctc

SEQ ID NO: 259060 - DNA, 25 bp, Homo sapien
agggccagtcctccgctgctatagc

SEQ ID NO: 259061 - DNA, 25 bp, Homo sapien
cttctacgagtcagatctctaaggg

SEQ ID NO: 259062 - DNA, 25 bp, Homo sapien
atctctaagggccagtcctccgctg

SEQ ID NO: 259063 - DNA, 25 bp, Homo sapien
catctccacctacccttgcgtgctg

SEQ ID NO: 259064 - DNA, 25 bp, Homo sapien
atctgtgggtccatccccccatctc

SEQ ID NO: 259065 - DNA, 25 bp, Homo sapien
gcagacaggagcaaaaccctggaga

SEQ ID NO: 259066 - DNA, 25 bp, Homo sapien
tccacctacccttgcgtgctgctgc

SEQ ID NO: 259067 - DNA, 25 bp, Homo sapien
ccgtatgtcccagtttgaaagcttc

SEQ ID NO: 259068 - DNA, 25 bp, Homo sapien
tgccgtatgtcccagtttgaaagct

SEQ ID NO: 259069 - DNA, 25 bp, Homo sapien
gatgccgtatgtcccagtttgaaag

SEQ ID NO: 259070 - DNA, 25 bp, Homo sapien
tgatgccgtatgtcccagtttgaaa

SEQ ID NO: 259071 - DNA, 25 bp, Homo sapien
gctgcatctcttcggtaccctcctg

SEQ ID NO: 259072 - DNA, 25 bp, Homo sapien
atctcttcggtaccctcctgcctat

SEQ ID NO: 259073 - DNA, 25 bp, Homo sapien
ctcctgcctattctgtctcccccat

SEQ ID NO: 259074 - DNA, 25 bp, Homo sapien
gggctgcatctcttcggtaccctcc

SEQ ID NO: 259075 - DNA, 25 bp, Homo sapien
acagccagcctcaacggtgttcttt

SEQ ID NO: 259076 - DNA, 25 bp, Homo sapien
cagccagcctcaacggtgttctttt

SEQ ID NO: 259077 - DNA, 25 bp, Homo sapien
cctcgccttcagttggcttgcagct

SEQ ID NO: 259078 - DNA, 25 bp, Homo sapien
agttggcttgcagctgaactcttgc

SEQ ID NO: 259079 - DNA, 25 bp, Homo sapien
tagacgtggataatgtttacacagc

SEQ ID NO: 259080 - DNA, 25 bp, Homo sapien
tccacatcttggcatgcatagacgt

SEQ ID NO: 259081 - DNA, 25 bp, Homo sapien
tcctcggctcctgtgttctcataaa

SEQ ID NO: 259082 - DNA, 25 bp, Homo sapien
gggtcagagattcttttgaagacca

SEQ ID NO: 259083 - DNA, 25 bp, Homo sapien
cctcggctcctgtgttctcataaaa

SEQ ID NO: 259084 - DNA, 25 bp, Homo sapien
aaatctaggcctttgggtcagagat

SEQ ID NO: 259085 - DNA, 25 bp, Homo sapien
aattggctcgcacacggcacgtgct

SEQ ID NO: 259086 - DNA, 25 bp, Homo sapien
cctgcctcgcgtggacaaggttgtg

SEQ ID NO: 259087 - DNA, 25 bp, Homo sapien
gttgtggaccaggtcgccagaaccc

SEQ ID NO: 259088 - DNA, 25 bp, Homo sapien
catttgtcctccacctgttttccag

SEQ ID NO: 259089 - DNA, 25 bp, Homo sapien
gacagtttttcgagcctccttttga

SEQ ID NO: 259090 - DNA, 25 bp, Homo sapien
gtgcaatcttttctgttcaccagac

SEQ ID NO: 259091 - DNA, 25 bp, Homo sapien
agtgggtttctctctaacttagtgt

SEQ ID NO: 259092 - DNA, 25 bp, Homo sapien
gctacaccctgtcaaggtcaagtga

SEQ ID NO: 259093 - DNA, 25 bp, Homo sapien
gcctgggtcagtgtagccctggcca

SEQ ID NO: 259094 - DNA, 25 bp, Homo sapien
tgcctgggtcagtgtagccctggcc

SEQ ID NO: 259095 - DNA, 25 bp, Homo sapien
agcatgagccctgcccagtaggagt

SEQ ID NO: 259096 - DNA, 25 bp, Homo sapien
cctgcccagtaggagtgccagaggc

SEQ ID NO: 259097 - DNA, 25 bp, Homo sapien
tattactcttcctgtcagaaaaaca

SEQ ID NO: 259098 - DNA, 25 bp, Homo sapien
tcttattactcttcctgtcagaaaa

SEQ ID NO: 259099 - DNA, 25 bp, Homo sapien
ttactcttcctgtcagaaaaacact

SEQ ID NO: 259100 - DNA, 25 bp, Homo sapien
tatcttattactcttcctgtcagaa

SEQ ID NO: 259101 - DNA, 25 bp, Homo sapien
gcaagagtgcgaattaaaaccccaa

SEQ ID NO: 259102 - DNA, 25 bp, Homo sapien
tttcttaattctgctgctagagctc

SEQ ID NO: 259103 - DNA, 25 bp, Homo sapien
tgttcccagcaagagtgcgaattaa

SEQ ID NO: 259104 - DNA, 25 bp, Homo sapien
ttcctcctaaggtagtgttcccagc

SEQ ID NO: 259105 - DNA, 25 bp, Homo sapien
gatccagcagcaaattggaaccagt

SEQ ID NO: 259106 - DNA, 25 bp, Homo sapien
gcccaaagagtatgggaattgtttg

SEQ ID NO: 259107 - DNA, 25 bp, Homo sapien
tttgggaccaatgatccagcagcaa

SEQ ID NO: 259108 - DNA, 25 bp, Homo sapien
gtataaattcccagacatgacttgc

SEQ ID NO: 259109 - DNA, 25 bp, Homo sapien
tctctttctgctcgttcccttaaaa

SEQ ID NO: 259110 - DNA, 25 bp, Homo sapien
gcaaagcgcttataccatacttgtt

SEQ ID NO: 259111 - DNA, 25 bp, Homo sapien
gtttaccatccaacaaagccatgaa

SEQ ID NO: 259112 - DNA, 25 bp, Homo sapien
cctgtgctagcgctgttcattccat

SEQ ID NO: 259113 - DNA, 25 bp, Homo sapien
gatcctacgtgttactgaagctgag

SEQ ID NO: 259114 - DNA, 25 bp, Homo sapien
aagtctcagatcaaaactagccagt

SEQ ID NO: 259115 - DNA, 25 bp, Homo sapien
gctgagtgacattgattcagaagaa

SEQ ID NO: 259116 - DNA, 25 bp, Homo sapien
caaaactagccagtgatcctacgtg

SEQ ID NO: 259117 - DNA, 25 bp, Homo sapien
ccttcccgaggatgcctgcttgttt

SEQ ID NO: 259118 - DNA, 25 bp, Homo sapien
ctggggaaggtctgtaaactccctg

SEQ ID NO: 259119 - DNA, 25 bp, Homo sapien
agcgagacactttaacctttctggg

SEQ ID NO: 259120 - DNA, 25 bp, Homo sapien
ccaaagccccctgagttgtgttttg

SEQ ID NO: 259121 - DNA, 25 bp, Homo sapien
caatttaagtcaaacatacctaccg

SEQ ID NO: 259122 - DNA, 25 bp, Homo sapien
cagttgaatggatgaattttggcac

SEQ ID NO: 259123 - DNA, 25 bp, Homo sapien
gagctatggtgccagggcaaaacaa

SEQ ID NO: 259124 - DNA, 25 bp, Homo sapien
tacctaccgtatgtctcagtcattc

SEQ ID NO: 259125 - DNA, 25 bp, Homo sapien
gacccatccttgtggccttctacgg

SEQ ID NO: 259126 - DNA, 25 bp, Homo sapien
ccatttgtgtcggtaccatccaggg

SEQ ID NO: 259127 - DNA, 25 bp, Homo sapien
tcctgttctcattgggtctgccctc

SEQ ID NO: 259128 - DNA, 25 bp, Homo sapien
acactgggttcgctcatgctgtcgc

SEQ ID NO: 259129 - DNA, 25 bp, Homo sapien
cccgcaggaccaaacagtgacactt

SEQ ID NO: 259130 - DNA, 25 bp, Homo sapien
aaggaaactggactaacaatgaggc

SEQ ID NO: 259131 - DNA, 25 bp, Homo sapien
tattctggaaatagccggcagcgac

SEQ ID NO: 259132 - DNA, 25 bp, Homo sapien
caaagttcggaccttatcagaaagc

SEQ ID NO: 259133 - DNA, 25 bp, Homo sapien
ggatcagttgttcttcgtttattaa

SEQ ID NO: 259134 - DNA, 25 bp, Homo sapien
tagagggtactctttttggatcagt

SEQ ID NO: 259135 - DNA, 25 bp, Homo sapien
ttatccttcgaaatctgctcattga

SEQ ID NO: 259136 - DNA, 25 bp, Homo sapien
aagctaaacatccagatccctctgc

SEQ ID NO: 259137 - DNA, 25 bp, Homo sapien
ccttctgtgccctgctaatgtcact

SEQ ID NO: 259138 - DNA, 25 bp, Homo sapien
tttcttcagtctgcagtgtctcttg

SEQ ID NO: 259139 - DNA, 25 bp, Homo sapien
tctgtgccctgctaatgtcactgct

SEQ ID NO: 259140 - DNA, 25 bp, Homo sapien
agtgtctcttgtggctcttgtcctt

SEQ ID NO: 259141 - DNA, 25 bp, Homo sapien
caagtgtctctaggagcgtggctct

SEQ ID NO: 259142 - DNA, 25 bp, Homo sapien
gactcctgatctggctagggacacg

SEQ ID NO: 259143 - DNA, 25 bp, Homo sapien
tgtggcacccacagatgcttaacac

SEQ ID NO: 259144 - DNA, 25 bp, Homo sapien
tagggacacggccacttagtatttc

SEQ ID NO: 259145 - DNA, 25 bp, Homo sapien
ttctcattaaatgtacccggacgac

SEQ ID NO: 259146 - DNA, 25 bp, Homo sapien
aatgctaagggccaacatggttcat

SEQ ID NO: 259147 - DNA, 25 bp, Homo sapien
catggttcattactagttaactcca

SEQ ID NO: 259148 - DNA, 25 bp, Homo sapien
tccattcttactcgggagtctcact

SEQ ID NO: 259149 - DNA, 25 bp, Homo sapien
gttggttatcatctagatcatgtca

SEQ ID NO: 259150 - DNA, 25 bp, Homo sapien
ttaatgtttgccgttcaccctggga

SEQ ID NO: 259151 - DNA, 25 bp, Homo sapien
gaaataaagacattggttatgatgt

SEQ ID NO: 259152 - DNA, 25 bp, Homo sapien
gatcatgtcaagttaattgtgacaa

SEQ ID NO: 259153 - DNA, 25 bp, Homo sapien
gcaaacccgtttgtgaaatgcaagt

SEQ ID NO: 259154 - DNA, 25 bp, Homo sapien
tctccagtgtcccgagggttgggaa

SEQ ID NO: 259155 - DNA, 25 bp, Homo sapien
taacagggtcccgagttagctcggc

SEQ ID NO: 259156 - DNA, 25 bp, Homo sapien
gagtgcggcctggagcaaacccgtt

SEQ ID NO: 259157 - DNA, 25 bp, Homo sapien
ggaagatggagcagtcgccgtccac

SEQ ID NO: 259158 - DNA, 25 bp, Homo sapien
ccacttgggtctgcgctttggaacc

SEQ ID NO: 259159 - DNA, 25 bp, Homo sapien
aatgtagcgaatgtcccacttgggt

SEQ ID NO: 259160 - DNA, 25 bp, Homo sapien
gtgacgcccgtggaatgccaacaat

SEQ ID NO: 259161 - DNA, 25 bp, Homo sapien
gacctttactactgtttcccatgag

SEQ ID NO: 259162 - DNA, 25 bp, Homo sapien
gaagtatgatgttaggagagccaga

SEQ ID NO: 259163 - DNA, 25 bp, Homo sapien
tatattgaccctcagcatcacttgc

SEQ ID NO: 259164 - DNA, 25 bp, Homo sapien
tacggtttgattatcagagcccaaa

SEQ ID NO: 259165 - DNA, 25 bp, Homo sapien
gacgtaatggcgcaggcctgtggtc

SEQ ID NO: 259166 - DNA, 25 bp, Homo sapien
tagccggacgtaatggcgcaggcct

SEQ ID NO: 259167 - DNA, 25 bp, Homo sapien
aattagccggacgtaatggcgcagg

SEQ ID NO: 259168 - DNA, 25 bp, Homo sapien
ggacgtaatggcgcaggcctgtggt

SEQ ID NO: 259169 - DNA, 25 bp, Homo sapien
ctatgcagagagcaccgcacgcgag

SEQ ID NO: 259170 - DNA, 25 bp, Homo sapien
caggagggctggatccggtttgagg

SEQ ID NO: 259171 - DNA, 25 bp, Homo sapien
gcacgcgagaggctggcttactcct

SEQ ID NO: 259172 - DNA, 25 bp, Homo sapien
tggatccggtttgagggagaaggga

SEQ ID NO: 259173 - DNA, 25 bp, Homo sapien
tctgaagggcttcgtagtctctgag

SEQ ID NO: 259174 - DNA, 25 bp, Homo sapien
ctttgttcagagtccggttggccct

SEQ ID NO: 259175 - DNA, 25 bp, Homo sapien
cgtgggcatcaacacctggctgtct

SEQ ID NO: 259176 - DNA, 25 bp, Homo sapien
tttcagtaaccgcagaagagcgtcc

SEQ ID NO: 259177 - DNA, 25 bp, Homo sapien
gaaatgattgaggtggtgtcccact

SEQ ID NO: 259178 - DNA, 25 bp, Homo sapien
catctgaaatgattgaggtggtgtc

SEQ ID NO: 259179 - DNA, 25 bp, Homo sapien
ttgaggtggtgtcccacttgctttc

SEQ ID NO: 259180 - DNA, 25 bp, Homo sapien
tgattgaggtggtgtcccacttgct

SEQ ID NO: 259181 - DNA, 25 bp, Homo sapien
gatgggcctcgctttctctgagaag

SEQ ID NO: 259182 - DNA, 25 bp, Homo sapien
tgcgggatgggcctcgctttctctg

SEQ ID NO: 259183 - DNA, 25 bp, Homo sapien
gcatcccgtgcctgcgggatgggcc

SEQ ID NO: 259184 - DNA, 25 bp, Homo sapien
gccgtgggggcatcaaggtgtccag

SEQ ID NO: 259185 - DNA, 25 bp, Homo sapien
cgctgtgtctcgctgagttttctga

SEQ ID NO: 259186 - DNA, 25 bp, Homo sapien
agaagacctcggaagagatatttca

SEQ ID NO: 259187 - DNA, 25 bp, Homo sapien
tgcagcgctgtgtctcgctgagttt

SEQ ID NO: 259188 - DNA, 25 bp, Homo sapien
gtctcgctgagttttctgaagtttc

SEQ ID NO: 259189 - DNA, 25 bp, Homo sapien
tttttctttcgcgtacagtccagat

SEQ ID NO: 259190 - DNA, 25 bp, Homo sapien
tctttcgcgtacagtccagatgtgg

SEQ ID NO: 259191 - DNA, 25 bp, Homo sapien
gcccaggctcgtgggacagctctgc

SEQ ID NO: 259192 - DNA, 25 bp, Homo sapien
cgcgtacagtccagatgtggtggcc

SEQ ID NO: 259193 - DNA, 25 bp, Homo sapien
gagcactaagtctctcgcgaggaga

SEQ ID NO: 259194 - DNA, 25 bp, Homo sapien
tctcgcgaggagaagctcgacactt

SEQ ID NO: 259195 - DNA, 25 bp, Homo sapien
cgaggagaagctcgacactttatag

SEQ ID NO: 259196 - DNA, 25 bp, Homo sapien
taagtctctcgcgaggagaagctcg

SEQ ID NO: 259197 - DNA, 25 bp, Homo sapien
gacctccgacccctgcagcgagcat

SEQ ID NO: 259198 - DNA, 25 bp, Homo sapien
tacggcctgcgagacgctcgccctg

SEQ ID NO: 259199 - DNA, 25 bp, Homo sapien
gagacgctcgccctgacctccgacc

SEQ ID NO: 259200 - DNA, 25 bp, Homo sapien
tcctcctacggcctgcgagacgctc

SEQ ID NO: 259201 - DNA, 25 bp, Homo sapien
taatttcctcctgggtaacgcgcga

SEQ ID NO: 259202 - DNA, 25 bp, Homo sapien
cggtcgatcggtttctctggctcct

SEQ ID NO: 259203 - DNA, 25 bp, Homo sapien
ttcctcctgggtaacgcgcgactcc

SEQ ID NO: 259204 - DNA, 25 bp, Homo sapien
tctggctccttcttaatttcctcct

SEQ ID NO: 259205 - DNA, 25 bp, Homo sapien
agacccgtagcaacagtgggcatgt

SEQ ID NO: 259206 - DNA, 25 bp, Homo sapien
gtgaagacccgtagcaacagtgggc

SEQ ID NO: 259207 - DNA, 25 bp, Homo sapien
tggtggtgaagacccgtagcaacag

SEQ ID NO: 259208 - DNA, 25 bp, Homo sapien
tattggtggtgaagacccgtagcaa

SEQ ID NO: 259209 - DNA, 25 bp, Homo sapien
tgtagatctgcaactcgctggacgg

SEQ ID NO: 259210 - DNA, 25 bp, Homo sapien
caagtgtagatctgcaactcgctgg

SEQ ID NO: 259211 - DNA, 25 bp, Homo sapien
agatctgcaactcgctggacggtac

SEQ ID NO: 259212 - DNA, 25 bp, Homo sapien
atctgcaactcgctggacggtacat

SEQ ID NO: 259213 - DNA, 25 bp, Homo sapien
tccctgaggccaccccgccctcctc

SEQ ID NO: 259214 - DNA, 25 bp, Homo sapien
ccctgaggccaccccgccctcctca

SEQ ID NO: 259215 - DNA, 25 bp, Homo sapien
cctgaggccaccccgccctcctcac

SEQ ID NO: 259216 - DNA, 25 bp, Homo sapien
tatgtgcagcgctaaagacaagccc

SEQ ID NO: 259217 - DNA, 25 bp, Homo sapien
gagaataactctacactggcaaagg

SEQ ID NO: 259218 - DNA, 25 bp, Homo sapien
tcctgaaagctgagtccgaaggccc

SEQ ID NO: 259219 - DNA, 25 bp, Homo sapien
tacctagcagccataacagtgacag

SEQ ID NO: 259220 - DNA, 25 bp, Homo sapien
ttttgttatataggcacacacatat

SEQ ID NO: 259221 - DNA, 25 bp, Homo sapien
attttgttatataggcacacacata

SEQ ID NO: 259222 - DNA, 25 bp, Homo sapien
tttgttatataggcacacacatata

SEQ ID NO: 259223 - DNA, 25 bp, Homo sapien
cggtgtcacgtcagctctcaaaagt

SEQ ID NO: 259224 - DNA, 25 bp, Homo sapien
aagaggtcaagaacttatgtgtgca

SEQ ID NO: 259225 - DNA, 25 bp, Homo sapien
gatgctcagtctatattctgataca

SEQ ID NO: 259226 - DNA, 25 bp, Homo sapien
agattttggacttgcgatgctcagt

SEQ ID NO: 259227 - DNA, 25 bp, Homo sapien
cacagctggaatacaattttataca

SEQ ID NO: 259228 - DNA, 25 bp, Homo sapien
gctggaatacaattttatacatcat

SEQ ID NO: 259229 - DNA, 25 bp, Homo sapien
cagctggaatacaattttatacatc

SEQ ID NO: 259230 - DNA, 25 bp, Homo sapien
acacagctggaatacaattttatac

SEQ ID NO: 259231 - DNA, 25 bp, Homo sapien
catgggactagaagcgttttaggtt

SEQ ID NO: 259232 - DNA, 25 bp, Homo sapien
atatcttggggttgtgacccaagtt

SEQ ID NO: 259233 - DNA, 25 bp, Homo sapien
atacatgggactagaagcgttttag

SEQ ID NO: 259234 - DNA, 25 bp, Homo sapien
aatttttgcatatacgtaagatatc

SEQ ID NO: 259235 - DNA, 25 bp, Homo sapien
aaaactccatgtaccagccttactg

SEQ ID NO: 259236 - DNA, 25 bp, Homo sapien
tacacaacaccttatggcctagtga

SEQ ID NO: 259237 - DNA, 25 bp, Homo sapien
ctcttagtgctaaaagggacttcag

SEQ ID NO: 259238 - DNA, 25 bp, Homo sapien
gaaactgccagggtcttatactaga

SEQ ID NO: 259239 - DNA, 25 bp, Homo sapien
taacatctgtaaaaacgattgcaaa

SEQ ID NO: 259240 - DNA, 25 bp, Homo sapien
attgcaaaattgaagtgagtgccct

SEQ ID NO: 259241 - DNA, 25 bp, Homo sapien
gacttcttttactaagcttgtcagt

SEQ ID NO: 259242 - DNA, 25 bp, Homo sapien
gcaaaattgaagtgagtgcccttct

SEQ ID NO: 259243 - DNA, 25 bp, Homo sapien
agagattacaggacttaaaaatgag

SEQ ID NO: 259244 - DNA, 25 bp, Homo sapien
tatgtactacaaagtgaatatggca

SEQ ID NO: 259245 - DNA, 25 bp, Homo sapien
caaatcaatgaaacccagtatgtac

SEQ ID NO: 259246 - DNA, 25 bp, Homo sapien
tcattgaaggagttatctgtatcag

SEQ ID NO: 259247 - DNA, 25 bp, Homo sapien
aatctcctatctggaacttctgcga

SEQ ID NO: 259248 - DNA, 25 bp, Homo sapien
caagtaatctcctatctggaacttc

SEQ ID NO: 259249 - DNA, 25 bp, Homo sapien
agacatggtgctgccaatctcctta

SEQ ID NO: 259250 - DNA, 25 bp, Homo sapien
gtccaagtaatctcctatctggaac

SEQ ID NO: 259251 - DNA, 25 bp, Homo sapien
cataactgacggaaaaataaattca

SEQ ID NO: 259252 - DNA, 25 bp, Homo sapien
gggcaatctcgtccaacacagcttc

SEQ ID NO: 259253 - DNA, 25 bp, Homo sapien
ttatccaaggttgcagagtcactgc

SEQ ID NO: 259254 - DNA, 25 bp, Homo sapien
tcagtcttaacaatcctataggccg

SEQ ID NO: 259255 - DNA, 25 bp, Homo sapien
tctcagatcagatgcacgccactac

SEQ ID NO: 259256 - DNA, 25 bp, Homo sapien
gctaacagggacaccaattccacag

SEQ ID NO: 259257 - DNA, 25 bp, Homo sapien
cacagcacagaagaagcaccagatc

SEQ ID NO: 259258 - DNA, 25 bp, Homo sapien
tctgcatagtaaatcatagggttcc

SEQ ID NO: 259259 - DNA, 25 bp, Homo sapien
caaaatgagagtagtgccatggaag

SEQ ID NO: 259260 - DNA, 25 bp, Homo sapien
tccatgttggaaccaagcaaagggt

SEQ ID NO: 259261 - DNA, 25 bp, Homo sapien
gccagaggtaaactagtacaagtct

SEQ ID NO: 259262 - DNA, 25 bp, Homo sapien
gaaacagctcagttattactcaaag

SEQ ID NO: 259263 - DNA, 25 bp, Homo sapien
aagccacacttaccaaagccagagg

SEQ ID NO: 259264 - DNA, 25 bp, Homo sapien
gatgggtaccaagttgggaagcttc

SEQ ID NO: 259265 - DNA, 25 bp, Homo sapien
gagtacacaagtagttaaagtacca

SEQ ID NO: 259266 - DNA, 25 bp, Homo sapien
gccactggtgaatctttcttaggga

SEQ ID NO: 259267 - DNA, 25 bp, Homo sapien
agtaccaagcaaatctagacagaaa

SEQ ID NO: 259268 - DNA, 25 bp, Homo sapien
gaaagcgtatactgcaattaccatt

SEQ ID NO: 259269 - DNA, 25 bp, Homo sapien
tattctattcagaaatatggaaggg

SEQ ID NO: 259270 - DNA, 25 bp, Homo sapien
gacatgattagacatcttaacgata

SEQ ID NO: 259271 - DNA, 25 bp, Homo sapien
gtcatctctgcctcaagtcaacata

SEQ ID NO: 259272 - DNA, 25 bp, Homo sapien
gtccggcgccgagattcaaactagt

SEQ ID NO: 259273 - DNA, 25 bp, Homo sapien
agagacttcggctctcgcgagagag

SEQ ID NO: 259274 - DNA, 25 bp, Homo sapien
gtctgcgtacgcctggagtccttcc

SEQ ID NO: 259275 - DNA, 25 bp, Homo sapien
tgtgctcagcatggaccctatccgg

SEQ ID NO: 259276 - DNA, 25 bp, Homo sapien
ccaggtaaggccagcaggcgaagaa

SEQ ID NO: 259277 - DNA, 25 bp, Homo sapien
gctccagctcacgcctacgggagtt

SEQ ID NO: 259278 - DNA, 25 bp, Homo sapien
ggcgaagaaggagctccctagagaa

SEQ ID NO: 259279 - DNA, 25 bp, Homo sapien
acgggctttgcggaggcgaactggc

SEQ ID NO: 259280 - DNA, 25 bp, Homo sapien
catgtagggcatgctcagccagtaa

SEQ ID NO: 259281 - DNA, 25 bp, Homo sapien
tggcggccgcctttatggcctcgaa

SEQ ID NO: 259282 - DNA, 25 bp, Homo sapien
cattgagatggtcgagctggtccgc

SEQ ID NO: 259283 - DNA, 25 bp, Homo sapien
gccagtaatggttctccgcctcgat

SEQ ID NO: 259284 - DNA, 25 bp, Homo sapien
taaaatccaagggtgacgactcagg

SEQ ID NO: 259285 - DNA, 25 bp, Homo sapien
aaggctcattttcacacaagctaca

SEQ ID NO: 259286 - DNA, 25 bp, Homo sapien
taataaagactggtccaaaggctca

SEQ ID NO: 259287 - DNA, 25 bp, Homo sapien
ggtcagctccgtgatccataaaatc

SEQ ID NO: 259288 - DNA, 25 bp, Homo sapien
ctatcagactaatgaaaccacagga

SEQ ID NO: 259289 - DNA, 25 bp, Homo sapien
tctagatattcgatatgcagactac

SEQ ID NO: 259290 - DNA, 25 bp, Homo sapien
caaaatatcatctgtgactgaggaa

SEQ ID NO: 259291 - DNA, 25 bp, Homo sapien
gggtttagagctctagatattcgat

SEQ ID NO: 259292 - DNA, 25 bp, Homo sapien
tcccagtcaatagtggtttctcctt

SEQ ID NO: 259293 - DNA, 25 bp, Homo sapien
cgggttttatcaccttggccaagct

SEQ ID NO: 259294 - DNA, 25 bp, Homo sapien
tgttcccacagacgcaattctgatt

SEQ ID NO: 259295 - DNA, 25 bp, Homo sapien
gggcctcagccatacaactttgaca

SEQ ID NO: 259296 - DNA, 25 bp, Homo sapien
tcatcgctgcagagccttcaaagag

SEQ ID NO: 259297 - DNA, 25 bp, Homo sapien
aacagtagaactaggctgactcagc

SEQ ID NO: 259298 - DNA, 25 bp, Homo sapien
cattctggtgaggaagtcatagtgc

SEQ ID NO: 259299 - DNA, 25 bp, Homo sapien
gtctttggatcagttgcaaaaggcc

SEQ ID NO: 259300 - DNA, 25 bp, Homo sapien
catctgaaagcttgtagttgatttt

SEQ ID NO: 259301 - DNA, 25 bp, Homo sapien
tcatctgaaagcttgtagttgattt

SEQ ID NO: 259302 - DNA, 25 bp, Homo sapien
tacaagtgttggtggcatttttgct

SEQ ID NO: 259303 - DNA, 25 bp, Homo sapien
ttgctgagagcttttcaacaacttc

SEQ ID NO: 259304 - DNA, 25 bp, Homo sapien
tttgaagatttcctgtgatacaagt

SEQ ID NO: 259305 - DNA, 25 bp, Homo sapien
gctgagagcttttcaacaacttctt

SEQ ID NO: 259306 - DNA, 25 bp, Homo sapien
ctgtagaactttcaccgtcgccatt

SEQ ID NO: 259307 - DNA, 25 bp, Homo sapien
tttcaccgtcgccattgtgatcatt

SEQ ID NO: 259308 - DNA, 25 bp, Homo sapien
gaactttcaccgtcgccattgtgat

SEQ ID NO: 259309 - DNA, 25 bp, Homo sapien
tcaccgtcgccattgtgatcattcc

SEQ ID NO: 259310 - DNA, 25 bp, Homo sapien
tttccatctcctcggcaactcggaa

SEQ ID NO: 259311 - DNA, 25 bp, Homo sapien
gcacctgctgttcactttccatctc

SEQ ID NO: 259312 - DNA, 25 bp, Homo sapien
aaatgtaggcggttcctgtttctca

SEQ ID NO: 259313 - DNA, 25 bp, Homo sapien
tacagccaccgttacccctactgtg

SEQ ID NO: 259314 - DNA, 25 bp, Homo sapien
tccgtgcagtttcccgttgatccct

SEQ ID NO: 259315 - DNA, 25 bp, Homo sapien
aatgtgtccgtgcagtttcccgttg

SEQ ID NO: 259316 - DNA, 25 bp, Homo sapien
tgaaaggaatgaatgtgtccgtgca

SEQ ID NO: 259317 - DNA, 25 bp, Homo sapien
ctgaaaggaatgaatgtgtccgtgc

SEQ ID NO: 259318 - DNA, 25 bp, Homo sapien
ttgatgcggtctgagaaattacgat

SEQ ID NO: 259319 - DNA, 25 bp, Homo sapien
cggtctgagaaattacgatctttcc

SEQ ID NO: 259320 - DNA, 25 bp, Homo sapien
tgagaaattacgatctttccatctg

SEQ ID NO: 259321 - DNA, 25 bp, Homo sapien
gaaattacgatctttccatctgtag

SEQ ID NO: 259322 - DNA, 25 bp, Homo sapien
tgggagtcctgacagtagcccagga

SEQ ID NO: 259323 - DNA, 25 bp, Homo sapien
gggagtcctgacagtagcccaggaa

SEQ ID NO: 259324 - DNA, 25 bp, Homo sapien
cgtgactgtatcgactattgggtta

SEQ ID NO: 259325 - DNA, 25 bp, Homo sapien
tcttttaaactcgtgactgtatcga

SEQ ID NO: 259326 - DNA, 25 bp, Homo sapien
acgtcagaagccagataccaggttt

SEQ ID NO: 259327 - DNA, 25 bp, Homo sapien
caatagaagattgtactgaaacgtc

SEQ ID NO: 259328 - DNA, 25 bp, Homo sapien
gtgatgtcatccagatgcacaatag

SEQ ID NO: 259329 - DNA, 25 bp, Homo sapien
tgtcatccagatgcacaatagaaga

SEQ ID NO: 259330 - DNA, 25 bp, Homo sapien
aaaagccggtattagtggtgtctgc

SEQ ID NO: 259331 - DNA, 25 bp, Homo sapien
gtctgcctgagccaccgtaaatcac

SEQ ID NO: 259332 - DNA, 25 bp, Homo sapien
aagccggtattagtggtgtctgcct

SEQ ID NO: 259333 - DNA, 25 bp, Homo sapien
atgaaaagccggtattagtggtgtc

SEQ ID NO: 259334 - DNA, 25 bp, Homo sapien
cctggacagttagggccctgtatgc

SEQ ID NO: 259335 - DNA, 25 bp, Homo sapien
acagttagggccctgtatgcacatc

SEQ ID NO: 259336 - DNA, 25 bp, Homo sapien
tcctggacagttagggccctgtatg

SEQ ID NO: 259337 - DNA, 25 bp, Homo sapien
gttagggccctgtatgcacatctct

SEQ ID NO: 259338 - DNA, 25 bp, Homo sapien
acccttgggaggcacaggatccact

SEQ ID NO: 259339 - DNA, 25 bp, Homo sapien
tgggctgcagcagacaaatggcctg

SEQ ID NO: 259340 - DNA, 25 bp, Homo sapien
gactcaaggtatgaaaagcctgctg

SEQ ID NO: 259341 - DNA, 25 bp, Homo sapien
acaagtgtgcagtcaccgtgggcgc

SEQ ID NO: 259342 - DNA, 25 bp, Homo sapien
gcagttcacagagccccgtagtttt

SEQ ID NO: 259343 - DNA, 25 bp, Homo sapien
cgctttgctgcgcaccggcagttca

SEQ ID NO: 259344 - DNA, 25 bp, Homo sapien
gggagcactcctctgtcactacagt

SEQ ID NO: 259345 - DNA, 25 bp, Homo sapien
tggaatgaggttgcacacatgggcc

SEQ ID NO: 259346 - DNA, 25 bp, Homo sapien
tcacagtactagaaagggcgagccg

SEQ ID NO: 259347 - DNA, 25 bp, Homo sapien
ggttttccagctcacgtgaagccgt

SEQ ID NO: 259348 - DNA, 25 bp, Homo sapien
gagtaacaagcgtatccatgcaagg

SEQ ID NO: 259349 - DNA, 25 bp, Homo sapien
aagccgtcctgagaactgccgtggt

SEQ ID NO: 259350 - DNA, 25 bp, Homo sapien
tgaggatcctttcccgttccactcc

SEQ ID NO: 259351 - DNA, 25 bp, Homo sapien
gatggaatattgttgccggactcat

SEQ ID NO: 259352 - DNA, 25 bp, Homo sapien
atattgttgccggactcatttcttc

SEQ ID NO: 259353 - DNA, 25 bp, Homo sapien
tggaatattgttgccggactcattt

SEQ ID NO: 259354 - DNA, 25 bp, Homo sapien
ggtgtcatctagcacagaggtgttc

SEQ ID NO: 259355 - DNA, 25 bp, Homo sapien
ttactgaggtcacagctaccagctg

SEQ ID NO: 259356 - DNA, 25 bp, Homo sapien
ggtgttcactgtttgagaagagaca

SEQ ID NO: 259357 - DNA, 25 bp, Homo sapien
tccccatctctgagaaaaagattcc

SEQ ID NO: 259358 - DNA, 25 bp, Homo sapien
gatgtgccataatgcagcaggctca

SEQ ID NO: 259359 - DNA, 25 bp, Homo sapien
gcagatgtgccataatgcagcaggc

SEQ ID NO: 259360 - DNA, 25 bp, Homo sapien
cagatgtgccataatgcagcaggct

SEQ ID NO: 259361 - DNA, 25 bp, Homo sapien
ctgcagatgtgccataatgcagcag

SEQ ID NO: 259362 - DNA, 25 bp, Homo sapien
ggagacagcaagaaccgcgtagctt

SEQ ID NO: 259363 - DNA, 25 bp, Homo sapien
gtttttcagagcctgctcgatttgt

SEQ ID NO: 259364 - DNA, 25 bp, Homo sapien
cgatttgtacactgagtgcggctac

SEQ ID NO: 259365 - DNA, 25 bp, Homo sapien
aaccgcgtagcttcacttggcagtg

SEQ ID NO: 259366 - DNA, 25 bp, Homo sapien
tccactgggtcccgaccgtggccca

SEQ ID NO: 259367 - DNA, 25 bp, Homo sapien
ccccagagccagaccccgcctgcag

SEQ ID NO: 259368 - DNA, 25 bp, Homo sapien
tgggtcccgaccgtggcccagactg

SEQ ID NO: 259369 - DNA, 25 bp, Homo sapien
cagtccggccctccactgggtcccg

SEQ ID NO: 259370 - DNA, 25 bp, Homo sapien
agaactcggacgccggatcccgcct

SEQ ID NO: 259371 - DNA, 25 bp, Homo sapien
cagaactcggacgccggatcccgcc

SEQ ID NO: 259372 - DNA, 25 bp, Homo sapien
tcggacgccggatcccgcctgaacc

SEQ ID NO: 259373 - DNA, 25 bp, Homo sapien
actcggacgccggatcccgcctgaa

SEQ ID NO: 259374 - DNA, 25 bp, Homo sapien
ttagagcgcccccacgtggtcttca

SEQ ID NO: 259375 - DNA, 25 bp, Homo sapien
gacatagagccctccgcgtcttgca

SEQ ID NO: 259376 - DNA, 25 bp, Homo sapien
gccattgcgatgacctttgacccag

SEQ ID NO: 259377 - DNA, 25 bp, Homo sapien
acttcggcaagtgcgggattgaacc

SEQ ID NO: 259378 - DNA, 25 bp, Homo sapien
gaagttccctgaagttgctacgcct

SEQ ID NO: 259379 - DNA, 25 bp, Homo sapien
ggaagttccctgaagttgctacgcc

SEQ ID NO: 259380 - DNA, 25 bp, Homo sapien
agttccctgaagttgctacgcctcc

SEQ ID NO: 259381 - DNA, 25 bp, Homo sapien
ttgggaagttccctgaagttgctac

SEQ ID NO: 259382 - DNA, 25 bp, Homo sapien
tgtcgcagaggccgccacctcccgg

SEQ ID NO: 259383 - DNA, 25 bp, Homo sapien
cgcgccccgccccccaacctgcgca

SEQ ID NO: 259384 - DNA, 25 bp, Homo sapien
gccccgccccccaacctgcgcacac

SEQ ID NO: 259385 - DNA, 25 bp, Homo sapien
ctgtcgcagaggccgccacctcccg

SEQ ID NO: 259386 - DNA, 25 bp, Homo sapien
cagcatgccgatcccaggcacaaag

SEQ ID NO: 259387 - DNA, 25 bp, Homo sapien
gctggacatggttctggtcacctga

SEQ ID NO: 259388 - DNA, 25 bp, Homo sapien
ggacatggttctggtcacctgacac

SEQ ID NO: 259389 - DNA, 25 bp, Homo sapien
aggcacaaagcgggcgccacccact

SEQ ID NO: 259390 - DNA, 25 bp, Homo sapien
gctcgggtctccgtctccgaggagc

SEQ ID NO: 259391 - DNA, 25 bp, Homo sapien
agccctttggactgtcaggcctggc

SEQ ID NO: 259392 - DNA, 25 bp, Homo sapien
tctgccatgatgtagagaggctcac

SEQ ID NO: 259393 - DNA, 25 bp, Homo sapien
ccacaggaggctcgggtctccgtct

SEQ ID NO: 259394 - DNA, 25 bp, Homo sapien
ttcccaccgcccagctcgccaggcc

SEQ ID NO: 259395 - DNA, 25 bp, Homo sapien
accagcttcccaccgcccagctcgc

SEQ ID NO: 259396 - DNA, 25 bp, Homo sapien
gcaccagcttcccaccgcccagctc

SEQ ID NO: 259397 - DNA, 25 bp, Homo sapien
gcttcccaccgcccagctcgccagg

SEQ ID NO: 259398 - DNA, 25 bp, Homo sapien
agctgtacttgatgctcccctggat

SEQ ID NO: 259399 - DNA, 25 bp, Homo sapien
acagctgtacttgatgctcccctgg

SEQ ID NO: 259400 - DNA, 25 bp, Homo sapien
cagctgtacttgatgctcccctgga

SEQ ID NO: 259401 - DNA, 25 bp, Homo sapien
gatccaggcgcactcccgcaggcac

SEQ ID NO: 259402 - DNA, 25 bp, Homo sapien
cgatccaggcgcactcccgcaggca

SEQ ID NO: 259403 - DNA, 25 bp, Homo sapien
agggcagcgggtccacctctggcac

SEQ ID NO: 259404 - DNA, 25 bp, Homo sapien
aagggcagcgggtccacctctggca

SEQ ID NO: 259405 - DNA, 25 bp, Homo sapien
atggcatagagcttctcaggctcaa

SEQ ID NO: 259406 - DNA, 25 bp, Homo sapien
gggcatggcatagagcttctcaggc

SEQ ID NO: 259407 - DNA, 25 bp, Homo sapien
gtcgggcatggcatagagcttctca

SEQ ID NO: 259408 - DNA, 25 bp, Homo sapien
tggcatagagcttctcaggctcaac

SEQ ID NO: 259409 - DNA, 25 bp, Homo sapien
cttaaaggtgcccatcagggcccac

SEQ ID NO: 259410 - DNA, 25 bp, Homo sapien
aagaggtcacagagggtagccacgg

SEQ ID NO: 259411 - DNA, 25 bp, Homo sapien
tggcccagctgacggtaaatacgat

SEQ ID NO: 259412 - DNA, 25 bp, Homo sapien
ctcttggcccagctgacggtaaata

SEQ ID NO: 259413 - DNA, 25 bp, Homo sapien
tgggatgctcttggcccagctgacg

SEQ ID NO: 259414 - DNA, 25 bp, Homo sapien
ttggcccagctgacggtaaatacga

SEQ ID NO: 259415 - DNA, 25 bp, Homo sapien
ggtcagacagcgacagcaatgagaa

SEQ ID NO: 259416 - DNA, 25 bp, Homo sapien
ctggtcagacagcgacagcaatgag

SEQ ID NO: 259417 - DNA, 25 bp, Homo sapien
tcagacagcgacagcaatgagaagc

SEQ ID NO: 259418 - DNA, 25 bp, Homo sapien
tggtcagacagcgacagcaatgaga

SEQ ID NO: 259419 - DNA, 25 bp, Homo sapien
agcacctccatccacacgctctgca

SEQ ID NO: 259420 - DNA, 25 bp, Homo sapien
catccaggactctgtcctcagtgaa

SEQ ID NO: 259421 - DNA, 25 bp, Homo sapien
gactctgtcctcagtgaaggccagc

SEQ ID NO: 259422 - DNA, 25 bp, Homo sapien
ccatccacacgctctgcagtactga

SEQ ID NO: 259423 - DNA, 25 bp, Homo sapien
ttcagtagaacgtactcccctcgct

SEQ ID NO: 259424 - DNA, 25 bp, Homo sapien
cttcagtagaacgtactcccctcgc

SEQ ID NO: 259425 - DNA, 25 bp, Homo sapien
cagggccttcagtagaacgtactcc

SEQ ID NO: 259426 - DNA, 25 bp, Homo sapien
ggccagggccttcagtagaacgtac

SEQ ID NO: 259427 - DNA, 25 bp, Homo sapien
ttcaccccatagaaatgggccagca

SEQ ID NO: 259428 - DNA, 25 bp, Homo sapien
tggcctcgagcatctccaagaacag

SEQ ID NO: 259429 - DNA, 25 bp, Homo sapien
tgggccagcactttgcccgctgtct

SEQ ID NO: 259430 - DNA, 25 bp, Homo sapien
tgcatgggcaccttgccctccagct

SEQ ID NO: 259431 - DNA, 25 bp, Homo sapien
tgtacagccaaaggctctgggccct

SEQ ID NO: 259432 - DNA, 25 bp, Homo sapien
aaccaaaagcggtttctctttgcag

SEQ ID NO: 259433 - DNA, 25 bp, Homo sapien
tggcttgccccatgtccgtgcgcct

SEQ ID NO: 259434 - DNA, 25 bp, Homo sapien
tatacattaaaatagagtctctgta

SEQ ID NO: 259435 - DNA, 25 bp, Homo sapien
caggatctggtgtttaaatcatgaa

SEQ ID NO: 259436 - DNA, 25 bp, Homo sapien
atgaatgtcttcaccgacttcaact

SEQ ID NO: 259437 - DNA, 25 bp, Homo sapien
agtagatttaatgcctttcaggatc

SEQ ID NO: 259438 - DNA, 25 bp, Homo sapien
tcaaagtagatttaatgcctttcag

SEQ ID NO: 259439 - DNA, 25 bp, Homo sapien
taaaagcagagtttataccaaatta

SEQ ID NO: 259440 - DNA, 25 bp, Homo sapien
gagtgtaatggtgcaactttggctc

SEQ ID NO: 259441 - DNA, 25 bp, Homo sapien
tggagtgtaatggtgcaactttggc

SEQ ID NO: 259442 - DNA, 25 bp, Homo sapien
aaggtgatccacccacctcagcctc

SEQ ID NO: 259443 - DNA, 25 bp, Homo sapien
taaggtgatccacccacctcagcct

SEQ ID NO: 259444 - DNA, 25 bp, Homo sapien
ggtgatgtgtcgtataataaaaaca

SEQ ID NO: 259445 - DNA, 25 bp, Homo sapien
ggaaacacatgtgatcccaattcaa

SEQ ID NO: 259446 - DNA, 25 bp, Homo sapien
accaggtcctagatgaggaaacaca

SEQ ID NO: 259447 - DNA, 25 bp, Homo sapien
aggaaacacatgtgatcccaattca

SEQ ID NO: 259448 - DNA, 25 bp, Homo sapien
cctattcaacatagtgttggaagtt

SEQ ID NO: 259449 - DNA, 25 bp, Homo sapien
cactcctattcaacatagtgttgga

SEQ ID NO: 259450 - DNA, 25 bp, Homo sapien
ctcctattcaacatagtgttggaag

SEQ ID NO: 259451 - DNA, 25 bp, Homo sapien
ccatgtcagggatgccctctctcac

SEQ ID NO: 259452 - DNA, 25 bp, Homo sapien
ctttggctgcggttgtgagagcctg

SEQ ID NO: 259453 - DNA, 25 bp, Homo sapien
gaaaccaactggctctggaatgttc

SEQ ID NO: 259454 - DNA, 25 bp, Homo sapien
tggagggctctcttagagactattt

SEQ ID NO: 259455 - DNA, 25 bp, Homo sapien
tctcttagagactatttcaacaaat

SEQ ID NO: 259456 - DNA, 25 bp, Homo sapien
acaaggaacctaagtagttccattg

SEQ ID NO: 259457 - DNA, 25 bp, Homo sapien
tcatgagcccccaaaacgaaaacca

SEQ ID NO: 259458 - DNA, 25 bp, Homo sapien
aacgaaaaccacacgcagccgtgat

SEQ ID NO: 259459 - DNA, 25 bp, Homo sapien
gggcccaggccgcttcatgagcccc

SEQ ID NO: 259460 - DNA, 25 bp, Homo sapien
cacctgggatgtggaatccctggag

SEQ ID NO: 259461 - DNA, 25 bp, Homo sapien
taattgaataaggaggagcagcgag

SEQ ID NO: 259462 - DNA, 25 bp, Homo sapien
gctgtggagccgagcacaatgacag

SEQ ID NO: 259463 - DNA, 25 bp, Homo sapien
gaccctggcttggacaagagagaca

SEQ ID NO: 259464 - DNA, 25 bp, Homo sapien
gatcttggcgatctccacagagctg

SEQ ID NO: 259465 - DNA, 25 bp, Homo sapien
cagacagttgcaaagtggttccact

SEQ ID NO: 259466 - DNA, 25 bp, Homo sapien
tggttccactctctcaccttggggt

SEQ ID NO: 259467 - DNA, 25 bp, Homo sapien
tgcatgagtacgctcagacagttgc

SEQ ID NO: 259468 - DNA, 25 bp, Homo sapien
ttcccactatgtccgctgtcagcag

SEQ ID NO: 259469 - DNA, 25 bp, Homo sapien
catcgtccatgagctcaaggatgca

SEQ ID NO: 259470 - DNA, 25 bp, Homo sapien
ggcggagctcctctactgcctcata

SEQ ID NO: 259471 - DNA, 25 bp, Homo sapien
ctcaaggatgcaggggttttcagtc

SEQ ID NO: 259472 - DNA, 25 bp, Homo sapien
tgcctcatagagcacatcgtccatg

SEQ ID NO: 259473 - DNA, 25 bp, Homo sapien
tgcagccccaaagggagagttgctt

SEQ ID NO: 259474 - DNA, 25 bp, Homo sapien
tcttggatccttgagagtttctttt

SEQ ID NO: 259475 - DNA, 25 bp, Homo sapien
tcatcttggatccttgagagtttct

SEQ ID NO: 259476 - DNA, 25 bp, Homo sapien
ttgagagtttctttttgttcaccaa

SEQ ID NO: 259477 - DNA, 25 bp, Homo sapien
tgagagtttctttttgttcaccaac

SEQ ID NO: 259478 - DNA, 25 bp, Homo sapien
tggaagtgtctccttggtgaatcac

SEQ ID NO: 259479 - DNA, 25 bp, Homo sapien
tctccgggttctttgggttcagtga

SEQ ID NO: 259480 - DNA, 25 bp, Homo sapien
ttcttataaccactgactctccggg

SEQ ID NO: 259481 - DNA, 25 bp, Homo sapien
tcagtgacgttaaatttggtttctc

SEQ ID NO: 259482 - DNA, 25 bp, Homo sapien
gatgtactaaaagactagacttcac

SEQ ID NO: 259483 - DNA, 25 bp, Homo sapien
taagtcctaacacatataccctgta

SEQ ID NO: 259484 - DNA, 25 bp, Homo sapien
ccccaacaaagagtgtgcctatttt

SEQ ID NO: 259485 - DNA, 25 bp, Homo sapien
cacatgaacttcgagtgtggaatga

SEQ ID NO: 259486 - DNA, 25 bp, Homo sapien
cagtaaatggtaggccaagtttggt

SEQ ID NO: 259487 - DNA, 25 bp, Homo sapien
gagagagaagaattgacttgtttta

SEQ ID NO: 259488 - DNA, 25 bp, Homo sapien
agcaaataattcagagtgacagcaa

SEQ ID NO: 259489 - DNA, 25 bp, Homo sapien
ttctgataacagtaaatggtaggcc

SEQ ID NO: 259490 - DNA, 25 bp, Homo sapien
ggcttgctggcttaatgacattaca

SEQ ID NO: 259491 - DNA, 25 bp, Homo sapien
tagccttcgcatgttagttgagccc

SEQ ID NO: 259492 - DNA, 25 bp, Homo sapien
taatacaggcttttctcagcgagga

SEQ ID NO: 259493 - DNA, 25 bp, Homo sapien
ttctcggaccctgagagaacttacg

SEQ ID NO: 259494 - DNA, 25 bp, Homo sapien
tctgtcggataacttgtttttactc

SEQ ID NO: 259495 - DNA, 25 bp, Homo sapien
tcatcctgcacttctaactctagtt

SEQ ID NO: 259496 - DNA, 25 bp, Homo sapien
actctagtttctctgtcggataact

SEQ ID NO: 259497 - DNA, 25 bp, Homo sapien
tctcttggtaaattcatcctgcact

SEQ ID NO: 259498 - DNA, 25 bp, Homo sapien
aaggctagggttgcgcttccctcct

SEQ ID NO: 259499 - DNA, 25 bp, Homo sapien
taaggaaaggctagggttgcgcttc

SEQ ID NO: 259500 - DNA, 25 bp, Homo sapien
ctagagtaaggaaaggctagggttg

SEQ ID NO: 259501 - DNA, 25 bp, Homo sapien
gaaaggctagggttgcgcttccctc

SEQ ID NO: 259502 - DNA, 25 bp, Homo sapien
acgtcggcgtccagagcaagagcgt

SEQ ID NO: 259503 - DNA, 25 bp, Homo sapien
tctgggcgcggcctcgacgtgggca

SEQ ID NO: 259504 - DNA, 25 bp, Homo sapien
gagcaagagcgtcgctcccacgctt

SEQ ID NO: 259505 - DNA, 25 bp, Homo sapien
cgtcgctgcatagcgcctcctgtct

SEQ ID NO: 259506 - DNA, 25 bp, Homo sapien
cctgtcctgggcgtagcagccttta

SEQ ID NO: 259507 - DNA, 25 bp, Homo sapien
ccgtgagaaccctgtcctgggcgta

SEQ ID NO: 259508 - DNA, 25 bp, Homo sapien
gaagccgcccggctttttggcgcac

SEQ ID NO: 259509 - DNA, 25 bp, Homo sapien
tggtatcccgcagaagtcctttcct

SEQ ID NO: 259510 - DNA, 25 bp, Homo sapien
caaacgggtccaagcgactgccctg

SEQ ID NO: 259511 - DNA, 25 bp, Homo sapien
gtccaagcgactgccctggaacttg

SEQ ID NO: 259512 - DNA, 25 bp, Homo sapien
tcgccaaacgggtccaagcgactgc

SEQ ID NO: 259513 - DNA, 25 bp, Homo sapien
acgggtccaagcgactgccctggaa

SEQ ID NO: 259514 - DNA, 25 bp, Homo sapien
aatctcgctctgagtgtcgctggcc

SEQ ID NO: 259515 - DNA, 25 bp, Homo sapien
tgtacaagttgggttcgctgcctgc

SEQ ID NO: 259516 - DNA, 25 bp, Homo sapien
aagttgggttcgctgcctgcctcct

SEQ ID NO: 259517 - DNA, 25 bp, Homo sapien
cccaaacaatctcgctctgagtgtc

SEQ ID NO: 259518 - DNA, 25 bp, Homo sapien
ctgtcactgagagcgcacacaagac

SEQ ID NO: 259519 - DNA, 25 bp, Homo sapien
tgtcactgagagcgcacacaagacc

SEQ ID NO: 259520 - DNA, 25 bp, Homo sapien
actgagagcgcacacaagaccccac

SEQ ID NO: 259521 - DNA, 25 bp, Homo sapien
tcactgagagcgcacacaagacccc

SEQ ID NO: 259522 - DNA, 25 bp, Homo sapien
aaaggtgagcttccagacccaagag

SEQ ID NO: 259523 - DNA, 25 bp, Homo sapien
tactattacttgactgcaggcagcc

SEQ ID NO: 259524 - DNA, 25 bp, Homo sapien
acttgttagcacactcaggaaggca

SEQ ID NO: 259525 - DNA, 25 bp, Homo sapien
aacaagtgaccggagcagatgctag

SEQ ID NO: 259526 - DNA, 25 bp, Homo sapien
tatatcatgttatacctgtgatcac

SEQ ID NO: 259527 - DNA, 25 bp, Homo sapien
tgatcacgaacaccactatcatact

SEQ ID NO: 259528 - DNA, 25 bp, Homo sapien
cttagaaccaaggaatacgtccaat

SEQ ID NO: 259529 - DNA, 25 bp, Homo sapien
tatcaccccacataaattacaccaa

SEQ ID NO: 259530 - DNA, 25 bp, Homo sapien
ctgagctcaggaactccaaaaagac

SEQ ID NO: 259531 - DNA, 25 bp, Homo sapien
tgagctcaggaactccaaaaagacc

SEQ ID NO: 259532 - DNA, 25 bp, Homo sapien
ttcatatttcatatgaagtatgtgc

SEQ ID NO: 259533 - DNA, 25 bp, Homo sapien
cttcatatttcatatgaagtatgtg

SEQ ID NO: 259534 - DNA, 25 bp, Homo sapien
tcatcaaggatcagcacggtctggg

SEQ ID NO: 259535 - DNA, 25 bp, Homo sapien
cacaaggaatccgagagctcatcaa

SEQ ID NO: 259536 - DNA, 25 bp, Homo sapien
acacgcacggtccacaagcaattct

SEQ ID NO: 259537 - DNA, 25 bp, Homo sapien
caaggctttttcttgtgcagtatga

SEQ ID NO: 259538 - DNA, 25 bp, Homo sapien
taaagtacaagttctaaatgtcacc

SEQ ID NO: 259539 - DNA, 25 bp, Homo sapien
caaaaaattatacccaatggatctc

SEQ ID NO: 259540 - DNA, 25 bp, Homo sapien
tccccattcctaatgatgtatttca

SEQ ID NO: 259541 - DNA, 25 bp, Homo sapien
aaagagaggtagcttcaagtctgag

SEQ ID NO: 259542 - DNA, 25 bp, Homo sapien
acaggggaactgcttggaactcagg

SEQ ID NO: 259543 - DNA, 25 bp, Homo sapien
gctaactaggctgtagaaagggcct

SEQ ID NO: 259544 - DNA, 25 bp, Homo sapien
taacagattgtgtcggtttcattcc

SEQ ID NO: 259545 - DNA, 25 bp, Homo sapien
ggcagctagctgcaccacaagctgg

SEQ ID NO: 259546 - DNA, 25 bp, Homo sapien
cattcctgcatgtatccctggtgcc

SEQ ID NO: 259547 - DNA, 25 bp, Homo sapien
gaagaagagctcgacagataccctg

SEQ ID NO: 259548 - DNA, 25 bp, Homo sapien
tatgaaacctccttttggcagtgcg

SEQ ID NO: 259549 - DNA, 25 bp, Homo sapien
tcagtttccttaagagcgggaggct

SEQ ID NO: 259550 - DNA, 25 bp, Homo sapien
taaggattcatgagacctgagcagc

SEQ ID NO: 259551 - DNA, 25 bp, Homo sapien
catgcaacagcgacaaggaaaaaag

SEQ ID NO: 259552 - DNA, 25 bp, Homo sapien
gcatataactgacgcacagcacact

SEQ ID NO: 259553 - DNA, 25 bp, Homo sapien
tccaaggttggttgactctacagat

SEQ ID NO: 259554 - DNA, 25 bp, Homo sapien
tcagtgggcaatggttagatcttcc

SEQ ID NO: 259555 - DNA, 25 bp, Homo sapien
tgcgacttccctgaatgctggctca

SEQ ID NO: 259556 - DNA, 25 bp, Homo sapien
cttctgcgacttccctgaatgctgg

SEQ ID NO: 259557 - DNA, 25 bp, Homo sapien
tctacaagcttcttctgcgacttcc

SEQ ID NO: 259558 - DNA, 25 bp, Homo sapien
acaagcttcttctgcgacttccctg

SEQ ID NO: 259559 - DNA, 25 bp, Homo sapien
cgtctaattcggcaggacacagcat

SEQ ID NO: 259560 - DNA, 25 bp, Homo sapien
agcccacgtctaattcggcaggaca

SEQ ID NO: 259561 - DNA, 25 bp, Homo sapien
tgagaccagcccacgtctaattcgg

SEQ ID NO: 259562 - DNA, 25 bp, Homo sapien
catgcagagagcctcgagcaggcag

SEQ ID NO: 259563 - DNA, 25 bp, Homo sapien
tttatgttggaagaccctgagataa

SEQ ID NO: 259564 - DNA, 25 bp, Homo sapien
ttttatgttggaagaccctgagata

SEQ ID NO: 259565 - DNA, 25 bp, Homo sapien
tttaaggaaatctcccagtagtatg

SEQ ID NO: 259566 - DNA, 25 bp, Homo sapien
aatctcccagtagtatgttttatgt

SEQ ID NO: 259567 - DNA, 25 bp, Homo sapien
caactgcctttgcaatgggacttca

SEQ ID NO: 259568 - DNA, 25 bp, Homo sapien
tcaactcctgatgagtaaaccagtc

SEQ ID NO: 259569 - DNA, 25 bp, Homo sapien
tctcctggtaagaattaggcccttc

SEQ ID NO: 259570 - DNA, 25 bp, Homo sapien
cagataatggaccttaactagtggg

SEQ ID NO: 259571 - DNA, 25 bp, Homo sapien
agcatctgccgccatttcttgcttt

SEQ ID NO: 259572 - DNA, 25 bp, Homo sapien
gcttttgcctttgcgatttccaccg

SEQ ID NO: 259573 - DNA, 25 bp, Homo sapien
ttgcttttgcctttgcgatttccac

SEQ ID NO: 259574 - DNA, 25 bp, Homo sapien
ggaactggagcatctgccgccattt

SEQ ID NO: 259575 - DNA, 25 bp, Homo sapien
gctgtgatagtcacgttcgagactg

SEQ ID NO: 259576 - DNA, 25 bp, Homo sapien
agtcacgttcgagactgagccgcag

SEQ ID NO: 259577 - DNA, 25 bp, Homo sapien
ctgtgatagtcacgttcgagactga

SEQ ID NO: 259578 - DNA, 25 bp, Homo sapien
acgttcgagactgagccgcagctct

SEQ ID NO: 259579 - DNA, 25 bp, Homo sapien
gcgcccgatgggctgccgctcgcac

SEQ ID NO: 259580 - DNA, 25 bp, Homo sapien
ctcagaacagcaggcgcccgatggg

SEQ ID NO: 259581 - DNA, 25 bp, Homo sapien
agcaggcgcccgatgggctgccgct

SEQ ID NO: 259582 - DNA, 25 bp, Homo sapien
tctcagaacagcaggcgcccgatgg

SEQ ID NO: 259583 - DNA, 25 bp, Homo sapien
tggaaggcgatgcaacggctcagct

SEQ ID NO: 259584 - DNA, 25 bp, Homo sapien
ctggaaggcgatgcaacggctcagc

SEQ ID NO: 259585 - DNA, 25 bp, Homo sapien
gcttcatactcggccatcccatcct

SEQ ID NO: 259586 - DNA, 25 bp, Homo sapien
catgctcaggtacccgtgggtcacc

SEQ ID NO: 259587 - DNA, 25 bp, Homo sapien
tgggagagttctttgcagggcccct

SEQ ID NO: 259588 - DNA, 25 bp, Homo sapien
atgctcaggtacccgtgggtcaccc

SEQ ID NO: 259589 - DNA, 25 bp, Homo sapien
tgctcaggtacccgtgggtcacccg

SEQ ID NO: 259590 - DNA, 25 bp, Homo sapien
gaaggtatttttggtcactggctgc

SEQ ID NO: 259591 - DNA, 25 bp, Homo sapien
ctcggtactgcctgaaggtattttt

SEQ ID NO: 259592 - DNA, 25 bp, Homo sapien
caggactcggtactgcctgaaggta

SEQ ID NO: 259593 - DNA, 25 bp, Homo sapien
tttgcccaggactcggtactgcctg

SEQ ID NO: 259594 - DNA, 25 bp, Homo sapien
cttcttgaaggcgtacatcttgcct

SEQ ID NO: 259595 - DNA, 25 bp, Homo sapien
tgcttctcgttcagcgccatggcct

SEQ ID NO: 259596 - DNA, 25 bp, Homo sapien
ttctagcttcttgaaggcgtacatc

SEQ ID NO: 259597 - DNA, 25 bp, Homo sapien
ttgaaggcgtacatcttgcctgtgg

SEQ ID NO: 259598 - DNA, 25 bp, Homo sapien
atgtggaaattgaggtcgcccccgt

SEQ ID NO: 259599 - DNA, 25 bp, Homo sapien
ggtgtaggccaagctcactataaac

SEQ ID NO: 259600 - DNA, 25 bp, Homo sapien
cagcccggcccatgtggcagatgtg

SEQ ID NO: 259601 - DNA, 25 bp, Homo sapien
gcgcctccttggtctcacaggtgta

SEQ ID NO: 259602 - DNA, 25 bp, Homo sapien
aggtccctgtacactatgcgctccc

SEQ ID NO: 259603 - DNA, 25 bp, Homo sapien
tccagaccgcaagcagatctcggga

SEQ ID NO: 259604 - DNA, 25 bp, Homo sapien
aggtcctccagaccgcaagcagatc

SEQ ID NO: 259605 - DNA, 25 bp, Homo sapien
ccagtcccaggtcggagacgaggat

SEQ ID NO: 259606 - DNA, 25 bp, Homo sapien
gcccacacggcctttgatggtctgg

SEQ ID NO: 259607 - DNA, 25 bp, Homo sapien
tgcccacacggcctttgatggtctg

SEQ ID NO: 259608 - DNA, 25 bp, Homo sapien
ccacacggcctttgatggtctggcc

SEQ ID NO: 259609 - DNA, 25 bp, Homo sapien
ggtgcccacacggcctttgatggtc

SEQ ID NO: 259610 - DNA, 25 bp, Homo sapien
tgaaagtgtacggttcattcttcac

SEQ ID NO: 259611 - DNA, 25 bp, Homo sapien
ctgaaagtgtacggttcattcttca

SEQ ID NO: 259612 - DNA, 25 bp, Homo sapien
gaaagtgtacggttcattcttcacc

SEQ ID NO: 259613 - DNA, 25 bp, Homo sapien
cctctgctggaagagcgactggcct

SEQ ID NO: 259614 - DNA, 25 bp, Homo sapien
cgggaggcagcctagcgcccaacag

SEQ ID NO: 259615 - DNA, 25 bp, Homo sapien
gggaggcagcctagcgcccaacagt

SEQ ID NO: 259616 - DNA, 25 bp, Homo sapien
tgcaatcatctcctgcgggaggcag

SEQ ID NO: 259617 - DNA, 25 bp, Homo sapien
gggtgctccttcacttcgcgggcac

SEQ ID NO: 259618 - DNA, 25 bp, Homo sapien
ggctcccacccgcttgaagttcagc

SEQ ID NO: 259619 - DNA, 25 bp, Homo sapien
cttgcagtaaatggcccgagggtca

SEQ ID NO: 259620 - DNA, 25 bp, Homo sapien
cttgaagggcggctccagcatgccg

SEQ ID NO: 259621 - DNA, 25 bp, Homo sapien
cacccttgaccctagagaactgttt

SEQ ID NO: 259622 - DNA, 25 bp, Homo sapien
gcacactgcctgtggcaaacttctg

SEQ ID NO: 259623 - DNA, 25 bp, Homo sapien
aagtcttggtcggtagcctccagct

SEQ ID NO: 259624 - DNA, 25 bp, Homo sapien
tgtggcaaacttctggtagaagtct

SEQ ID NO: 259625 - DNA, 25 bp, Homo sapien
aggtctgggggaactgagccatcca

SEQ ID NO: 259626 - DNA, 25 bp, Homo sapien
ggtctgggggaactgagccatccag

SEQ ID NO: 259627 - DNA, 25 bp, Homo sapien
ctgggggaactgagccatccagccc

SEQ ID NO: 259628 - DNA, 25 bp, Homo sapien
tcctttggcgactgaagagtctctg

SEQ ID NO: 259629 - DNA, 25 bp, Homo sapien
ggctagaggcgggtagggagctctt

SEQ ID NO: 259630 - DNA, 25 bp, Homo sapien
tgtccccgcagtttccacagcaatc

SEQ ID NO: 259631 - DNA, 25 bp, Homo sapien
ctgcagcagtcccttgcaggtggct

SEQ ID NO: 259632 - DNA, 25 bp, Homo sapien
ctgtaaaaggcactcggagtagcta

SEQ ID NO: 259633 - DNA, 25 bp, Homo sapien
aaaaggcactcggagtagctactac

SEQ ID NO: 259634 - DNA, 25 bp, Homo sapien
gtaaaaggcactcggagtagctact

SEQ ID NO: 259635 - DNA, 25 bp, Homo sapien
tgtaaaaggcactcggagtagctac

SEQ ID NO: 259636 - DNA, 25 bp, Homo sapien
ggccacaacttgagtggacaatggg

SEQ ID NO: 259637 - DNA, 25 bp, Homo sapien
gttccccaggccacaacttgagtgg

SEQ ID NO: 259638 - DNA, 25 bp, Homo sapien
ggacagttccgtctgtgttccccag

SEQ ID NO: 259639 - DNA, 25 bp, Homo sapien
gacaatggggaagtccactgtgcaa

SEQ ID NO: 259640 - DNA, 25 bp, Homo sapien
ctttgtcccagggatggcccaggcc

SEQ ID NO: 259641 - DNA, 25 bp, Homo sapien
tcccagggatggcccaggccctgcc

SEQ ID NO: 259642 - DNA, 25 bp, Homo sapien
agggatggcccaggccctgccaaac

SEQ ID NO: 259643 - DNA, 25 bp, Homo sapien
ccagggatggcccaggccctgccaa

SEQ ID NO: 259644 - DNA, 25 bp, Homo sapien
ctaggggatatacaggccccagatc

SEQ ID NO: 259645 - DNA, 25 bp, Homo sapien
gggacagctttagtccccagagggc

SEQ ID NO: 259646 - DNA, 25 bp, Homo sapien
aagtgaaatcacgaagcatttgtcc

SEQ ID NO: 259647 - DNA, 25 bp, Homo sapien
tgtgtctagtgttatgagaggagtt

SEQ ID NO: 259648 - DNA, 25 bp, Homo sapien
tcacattatgtatggcacagccatc

SEQ ID NO: 259649 - DNA, 25 bp, Homo sapien
tatcaggaataatgtcaccttatat

SEQ ID NO: 259650 - DNA, 25 bp, Homo sapien
gatggcccaccaacctcataacaag

SEQ ID NO: 259651 - DNA, 25 bp, Homo sapien
taacaagcagagatttccctgaggg

SEQ ID NO: 259652 - DNA, 25 bp, Homo sapien
agtggttcttgctgccagggctcca

SEQ ID NO: 259653 - DNA, 25 bp, Homo sapien
tcacagtgatgaaaggatggcccac

SEQ ID NO: 259654 - DNA, 25 bp, Homo sapien
tgctgtctgccacatccagtctgac

SEQ ID NO: 259655 - DNA, 25 bp, Homo sapien
tcaattgctgtctgccacatccagt

SEQ ID NO: 259656 - DNA, 25 bp, Homo sapien
attgctgtctgccacatccagtctg

SEQ ID NO: 259657 - DNA, 25 bp, Homo sapien
caattgctgtctgccacatccagtc

SEQ ID NO: 259658 - DNA, 25 bp, Homo sapien
gatcttccaaacacgcatgactatt

SEQ ID NO: 259659 - DNA, 25 bp, Homo sapien
tggccatgttatcccaataagatca

SEQ ID NO: 259660 - DNA, 25 bp, Homo sapien
tcacacttgcatgtctcggtcctag

SEQ ID NO: 259661 - DNA, 25 bp, Homo sapien
tgtaggcaccattgaggaccccttg

SEQ ID NO: 259662 - DNA, 25 bp, Homo sapien
ggaccctgcccgcattaaatctccc

SEQ ID NO: 259663 - DNA, 25 bp, Homo sapien
gtgttctcgtaattgggcggagtag

SEQ ID NO: 259664 - DNA, 25 bp, Homo sapien
ctctctgccggaccctgcccgcatt

SEQ ID NO: 259665 - DNA, 25 bp, Homo sapien
gttctcgtaattgggcggagtagcc

SEQ ID NO: 259666 - DNA, 25 bp, Homo sapien
agagagctggccaatgaaacgcccc

SEQ ID NO: 259667 - DNA, 25 bp, Homo sapien
tctaagaaatagttggagcctgaaa

SEQ ID NO: 259668 - DNA, 25 bp, Homo sapien
attaccgcatcggtgagtggctgcc

SEQ ID NO: 259669 - DNA, 25 bp, Homo sapien
gccattctcggctccgctgctgttg

SEQ ID NO: 259670 - DNA, 25 bp, Homo sapien
gtccctgttgtagcttcacggtaca

SEQ ID NO: 259671 - DNA, 25 bp, Homo sapien
ccctgttgtagcttcacggtacacc

SEQ ID NO: 259672 - DNA, 25 bp, Homo sapien
ctgtctgtccctgttgtagcttcac

SEQ ID NO: 259673 - DNA, 25 bp, Homo sapien
tctgtccctgttgtagcttcacggt

SEQ ID NO: 259674 - DNA, 25 bp, Homo sapien
gcttttgggaaatgccgcttcctac

SEQ ID NO: 259675 - DNA, 25 bp, Homo sapien
tgctccgggaataaaaggttcagag

SEQ ID NO: 259676 - DNA, 25 bp, Homo sapien
ttgggaaatgccgcttcctacaaac

SEQ ID NO: 259677 - DNA, 25 bp, Homo sapien
ttttgggaaatgccgcttcctacaa

SEQ ID NO: 259678 - DNA, 25 bp, Homo sapien
ggatcctggcgggacggatcctcca

SEQ ID NO: 259679 - DNA, 25 bp, Homo sapien
gacggatcctccacaggagcgtttt

SEQ ID NO: 259680 - DNA, 25 bp, Homo sapien
ctccacaggagcgtttttctagggt

SEQ ID NO: 259681 - DNA, 25 bp, Homo sapien
ttttctagggtgtgttctatggaac

SEQ ID NO: 259682 - DNA, 25 bp, Homo sapien
ggatctggccacctgggatccagct

SEQ ID NO: 259683 - DNA, 25 bp, Homo sapien
tgtctccagcacctaaagagctggc

SEQ ID NO: 259684 - DNA, 25 bp, Homo sapien
gagctggcgctgagaaggtcctcaa

SEQ ID NO: 259685 - DNA, 25 bp, Homo sapien
tcctcaatcattgtcggttgcaggg

SEQ ID NO: 259686 - DNA, 25 bp, Homo sapien
aggcggagcctgcagaaactgctgc

SEQ ID NO: 259687 - DNA, 25 bp, Homo sapien
cctgcagaaactgctgcagggccat

SEQ ID NO: 259688 - DNA, 25 bp, Homo sapien
gcggagcctgcagaaactgctgcag

SEQ ID NO: 259689 - DNA, 25 bp, Homo sapien
agcctgcagaaactgctgcagggcc

SEQ ID NO: 259690 - DNA, 25 bp, Homo sapien
ccgagagcagggagctcattttcct

SEQ ID NO: 259691 - DNA, 25 bp, Homo sapien
ttttcctctgaactcgcagactgct

SEQ ID NO: 259692 - DNA, 25 bp, Homo sapien
ttcctctgaactcgcagactgctgc

SEQ ID NO: 259693 - DNA, 25 bp, Homo sapien
ttcccgagagcagggagctcatttt

SEQ ID NO: 259694 - DNA, 25 bp, Homo sapien
cactgaccataatgaagagttagta

SEQ ID NO: 259695 - DNA, 25 bp, Homo sapien
aataatgcaaccgaaaggccatccc

SEQ ID NO: 259696 - DNA, 25 bp, Homo sapien
ctaataatgcaaccgaaaggccatc

SEQ ID NO: 259697 - DNA, 25 bp, Homo sapien
ttttccttcacgacactgaccataa

SEQ ID NO: 259698 - DNA, 25 bp, Homo sapien
cactgacaggtactgctgggtgcag

SEQ ID NO: 259699 - DNA, 25 bp, Homo sapien
gccatccaaagctctgacctggtct

SEQ ID NO: 259700 - DNA, 25 bp, Homo sapien
tcctgggtgtcatcagccatccaaa

SEQ ID NO: 259701 - DNA, 25 bp, Homo sapien
cagaagcatcacttcctgacctgga

SEQ ID NO: 259702 - DNA, 25 bp, Homo sapien
cattgtggggaagctcagcacagac

SEQ ID NO: 259703 - DNA, 25 bp, Homo sapien
gctcttgtatggagtttagcatctt

SEQ ID NO: 259704 - DNA, 25 bp, Homo sapien
tatttagattgtgtgtaaagctctg

SEQ ID NO: 259705 - DNA, 25 bp, Homo sapien
gagctgatgccttggcttgcattgt

SEQ ID NO: 259706 - DNA, 25 bp, Homo sapien
tgctggatgcagcttggctcttgct

SEQ ID NO: 259707 - DNA, 25 bp, Homo sapien
agtgctggatgcagcttggctcttg

SEQ ID NO: 259708 - DNA, 25 bp, Homo sapien
gctggatgcagcttggctcttgctt

SEQ ID NO: 259709 - DNA, 25 bp, Homo sapien
gatgcagcttggctcttgctttcaa

SEQ ID NO: 259710 - DNA, 25 bp, Homo sapien
catgcttctttgtgagagggctgcc

SEQ ID NO: 259711 - DNA, 25 bp, Homo sapien
gatacttagcatggtgttggacaca

SEQ ID NO: 259712 - DNA, 25 bp, Homo sapien
caaagacgtttatggcagctcatca

SEQ ID NO: 259713 - DNA, 25 bp, Homo sapien
caaagggttctaagagactggctca

SEQ ID NO: 259714 - DNA, 25 bp, Homo sapien
tagcaaaactgtggagtgcccaaag

SEQ ID NO: 259715 - DNA, 25 bp, Homo sapien
caaggtttacgtgaccaaggagtgc

SEQ ID NO: 259716 - DNA, 25 bp, Homo sapien
tgttgagaactaggacccgagatcc

SEQ ID NO: 259717 - DNA, 25 bp, Homo sapien
gagaataatgatactacccagcagg

SEQ ID NO: 259718 - DNA, 25 bp, Homo sapien
cataggctgctgtcttaatggaccc

SEQ ID NO: 259719 - DNA, 25 bp, Homo sapien
taatggacccaaggtgctttggttc

SEQ ID NO: 259720 - DNA, 25 bp, Homo sapien
cagggttgattaattcaccagctca

SEQ ID NO: 259721 - DNA, 25 bp, Homo sapien
ccagctcaccagtgtcttaaagatc

SEQ ID NO: 259722 - DNA, 25 bp, Homo sapien
aaagcacctacagttccgcgactgg

SEQ ID NO: 259723 - DNA, 25 bp, Homo sapien
gagaatcattgttagctcagctaag

SEQ ID NO: 259724 - DNA, 25 bp, Homo sapien
gggcttgattcccaactgggcacat

SEQ ID NO: 259725 - DNA, 25 bp, Homo sapien
tgggcaaggtcattccatatggtgt

SEQ ID NO: 259726 - DNA, 25 bp, Homo sapien
caagtgagtcctgatagattgtctc

SEQ ID NO: 259727 - DNA, 25 bp, Homo sapien
tgagtcctgatagattgtctcaggc

SEQ ID NO: 259728 - DNA, 25 bp, Homo sapien
agtgagtcctgatagattgtctcag

SEQ ID NO: 259729 - DNA, 25 bp, Homo sapien
aagtgagtcctgatagattgtctca

SEQ ID NO: 259730 - DNA, 25 bp, Homo sapien
caaagctccaggggcttcccttctt

SEQ ID NO: 259731 - DNA, 25 bp, Homo sapien
gcaaagctccaggggcttcccttct

SEQ ID NO: 259732 - DNA, 25 bp, Homo sapien
ctggcacagaaaagccagcaaagct

SEQ ID NO: 259733 - DNA, 25 bp, Homo sapien
gcacagaaaagccagcaaagctcca

SEQ ID NO: 259734 - DNA, 25 bp, Homo sapien
gctgcatgccctgagtagatcctcg

SEQ ID NO: 259735 - DNA, 25 bp, Homo sapien
ccctgagtagatcctcgcagatgct

SEQ ID NO: 259736 - DNA, 25 bp, Homo sapien
cagccccgagagtgtctgcaagggc

SEQ ID NO: 259737 - DNA, 25 bp, Homo sapien
gagtgtctgcaagggctgcatgccc

SEQ ID NO: 259738 - DNA, 25 bp, Homo sapien
ccacatgccaagcatccaggagaga

SEQ ID NO: 259739 - DNA, 25 bp, Homo sapien
ggagagacgacagattttctcaggt

SEQ ID NO: 259740 - DNA, 25 bp, Homo sapien
tgccaagcatccaggagagacgaca

SEQ ID NO: 259741 - DNA, 25 bp, Homo sapien
tgctgtcactgcctcagttgttcca

SEQ ID NO: 259742 - DNA, 25 bp, Homo sapien
ccactctgaatactgcaagtgtcca

SEQ ID NO: 259743 - DNA, 25 bp, Homo sapien
gaccactctgaatactgcaagtgtc

SEQ ID NO: 259744 - DNA, 25 bp, Homo sapien
actctgaatactgcaagtgtccaca

SEQ ID NO: 259745 - DNA, 25 bp, Homo sapien
ctgaatactgcaagtgtccacagag

SEQ ID NO: 259746 - DNA, 25 bp, Homo sapien
gatgaccaccgaggggagcaggtac

SEQ ID NO: 259747 - DNA, 25 bp, Homo sapien
ccgaggggagcaggtacatgggccc

SEQ ID NO: 259748 - DNA, 25 bp, Homo sapien
aggggagcaggtacatgggccctgc

SEQ ID NO: 259749 - DNA, 25 bp, Homo sapien
gaccaccgaggggagcaggtacatg

SEQ ID NO: 259750 - DNA, 25 bp, Homo sapien
cctgtgctctgtcctgaagagaatc

SEQ ID NO: 259751 - DNA, 25 bp, Homo sapien
tccacagacacaaaggtgtcatgtg

SEQ ID NO: 259752 - DNA, 25 bp, Homo sapien
aaacctgtgctctgtcctgaagaga

SEQ ID NO: 259753 - DNA, 25 bp, Homo sapien
cagacacaaaggtgtcatgtgacac

SEQ ID NO: 259754 - DNA, 25 bp, Homo sapien
ttcacaagtctgcgagagtgggcac

SEQ ID NO: 259755 - DNA, 25 bp, Homo sapien
acaagtctgcgagagtgggcacata

SEQ ID NO: 259756 - DNA, 25 bp, Homo sapien
caagtctgcgagagtgggcacatac

SEQ ID NO: 259757 - DNA, 25 bp, Homo sapien
ccttcacaagtctgcgagagtgggc

SEQ ID NO: 259758 - DNA, 25 bp, Homo sapien
tccactggacgggtcctgccgaagt

SEQ ID NO: 259759 - DNA, 25 bp, Homo sapien
ctaagcgctgaggagccttggtggc

SEQ ID NO: 259760 - DNA, 25 bp, Homo sapien
cttggtggcctggcgagactgtccc

SEQ ID NO: 259761 - DNA, 25 bp, Homo sapien
tgaactgactgtgggatcatgcgag

SEQ ID NO: 259762 - DNA, 25 bp, Homo sapien
gaggaagtctcgcttcttgccagac

SEQ ID NO: 259763 - DNA, 25 bp, Homo sapien
tagagttctccagcggatgtggttc

SEQ ID NO: 259764 - DNA, 25 bp, Homo sapien
tccaaaaactctgccggaagtccac

SEQ ID NO: 259765 - DNA, 25 bp, Homo sapien
tgccagggatcccttagatcgcgga

SEQ ID NO: 259766 - DNA, 25 bp, Homo sapien
ggagcctcccctggtgggatccatg

SEQ ID NO: 259767 - DNA, 25 bp, Homo sapien
agcctcccctggtgggatccatgag

SEQ ID NO: 259768 - DNA, 25 bp, Homo sapien
caggagcctcccctggtgggatcca

SEQ ID NO: 259769 - DNA, 25 bp, Homo sapien
gccaggagcctcccctggtgggatc

SEQ ID NO: 259770 - DNA, 25 bp, Homo sapien
ctgaggggacagccctttctgaagt

SEQ ID NO: 259771 - DNA, 25 bp, Homo sapien
gacagccctttctgaagtgatgcct

SEQ ID NO: 259772 - DNA, 25 bp, Homo sapien
gaggggacagccctttctgaagtga

SEQ ID NO: 259773 - DNA, 25 bp, Homo sapien
gggacagccctttctgaagtgatgc

SEQ ID NO: 259774 - DNA, 25 bp, Homo sapien
ttttactagacctgagagggctggt

SEQ ID NO: 259775 - DNA, 25 bp, Homo sapien
ggagtgaagggcacacacacttaga

SEQ ID NO: 259776 - DNA, 25 bp, Homo sapien
tgaagggcacacacacttagacccc

SEQ ID NO: 259777 - DNA, 25 bp, Homo sapien
ctccagtggtccagtgggcattaca

SEQ ID NO: 259778 - DNA, 25 bp, Homo sapien
cctccaggtggggagcttgtatgtt

SEQ ID NO: 259779 - DNA, 25 bp, Homo sapien
tctctttggcggcctcatgagggct

SEQ ID NO: 259780 - DNA, 25 bp, Homo sapien
tctttggcggcctcatgagggctgt

SEQ ID NO: 259781 - DNA, 25 bp, Homo sapien
cctgtctctttggcggcctcatgag

SEQ ID NO: 259782 - DNA, 25 bp, Homo sapien
catcctgtcctcacaatggctggtg

SEQ ID NO: 259783 - DNA, 25 bp, Homo sapien
tagagctaaatgctctgtaagggca

SEQ ID NO: 259784 - DNA, 25 bp, Homo sapien
aaagatgatgcaacttagagctaaa

SEQ ID NO: 259785 - DNA, 25 bp, Homo sapien
gatgaccgctatgagcaccttcact

SEQ ID NO: 259786 - DNA, 25 bp, Homo sapien
tcatcccgggacatacagcttgaat

SEQ ID NO: 259787 - DNA, 25 bp, Homo sapien
gcctctctccgtgttcctgtgaaga

SEQ ID NO: 259788 - DNA, 25 bp, Homo sapien
gccttcattggaatcatcccgggac

SEQ ID NO: 259789 - DNA, 25 bp, Homo sapien
tacagcttgaatgtgctgtctggct

SEQ ID NO: 259790 - DNA, 25 bp, Homo sapien
cccaccattagtgcctcttctcaga

SEQ ID NO: 259791 - DNA, 25 bp, Homo sapien
ttctcagagtgaggctcactaatgt

SEQ ID NO: 259792 - DNA, 25 bp, Homo sapien
ttcactaactgagccttgaagcaca

SEQ ID NO: 259793 - DNA, 25 bp, Homo sapien
gactgaagctcactaacttctcaga

SEQ ID NO: 259794 - DNA, 25 bp, Homo sapien
cctgttatcacaggccccaaggctt

SEQ ID NO: 259795 - DNA, 25 bp, Homo sapien
tccccctgttatcacaggccccaag

SEQ ID NO: 259796 - DNA, 25 bp, Homo sapien
ccccaaggcttgctggacgggcctg

SEQ ID NO: 259797 - DNA, 25 bp, Homo sapien
cccctgttatcacaggccccaaggc

SEQ ID NO: 259798 - DNA, 25 bp, Homo sapien
gcttcctccacaggatcggcttcct

SEQ ID NO: 259799 - DNA, 25 bp, Homo sapien
gctggaaacgcgtcatacagggtcc

SEQ ID NO: 259800 - DNA, 25 bp, Homo sapien
agtcacatagaaggctggaaacgcg

SEQ ID NO: 259801 - DNA, 25 bp, Homo sapien
tcatacagggtcctgaactctcggg

SEQ ID NO: 259802 - DNA, 25 bp, Homo sapien
gtgcccctggggcttctggagcgag

SEQ ID NO: 259803 - DNA, 25 bp, Homo sapien
tagtgcccctggggcttctggagcg

SEQ ID NO: 259804 - DNA, 25 bp, Homo sapien
cccctggggcttctggagcgagcac

SEQ ID NO: 259805 - DNA, 25 bp, Homo sapien
gcccctggggcttctggagcgagca

SEQ ID NO: 259806 - DNA, 25 bp, Homo sapien
ctgtgcgtaggtacccaggggccca

SEQ ID NO: 259807 - DNA, 25 bp, Homo sapien
caggcctgtgcgtaggtacccaggg

SEQ ID NO: 259808 - DNA, 25 bp, Homo sapien
gtgccttgagggtggtatgaacccc

SEQ ID NO: 259809 - DNA, 25 bp, Homo sapien
gcctgtgcgtaggtacccaggggcc

SEQ ID NO: 259810 - DNA, 25 bp, Homo sapien
cctggaacatcgctgacgtgcgtgt

SEQ ID NO: 259811 - DNA, 25 bp, Homo sapien
tactcaatctttatgatggcggtaa

SEQ ID NO: 259812 - DNA, 25 bp, Homo sapien
tgaacactgcgacctggcaggtaag

SEQ ID NO: 259813 - DNA, 25 bp, Homo sapien
aatgaagcccggtgacacctccagt

SEQ ID NO: 259814 - DNA, 25 bp, Homo sapien
caaacatggatctgcacaagagcac

SEQ ID NO: 259815 - DNA, 25 bp, Homo sapien
gtcctcagtgtagatcagaatgccc

SEQ ID NO: 259816 - DNA, 25 bp, Homo sapien
ttttgccgagttgaaagctgccctg

SEQ ID NO: 259817 - DNA, 25 bp, Homo sapien
ttctccgtagtgctgaagacgccag

SEQ ID NO: 259818 - DNA, 25 bp, Homo sapien
atgacaggtgcagagtgatctgtgc

SEQ ID NO: 259819 - DNA, 25 bp, Homo sapien
acaggtgcagagtgatctgtgcctg

SEQ ID NO: 259820 - DNA, 25 bp, Homo sapien
tttagatgacaggtgcagagtgatc

SEQ ID NO: 259821 - DNA, 25 bp, Homo sapien
ttttagatgacaggtgcagagtgat

SEQ ID NO: 259822 - DNA, 25 bp, Homo sapien
tatgtttcatatgatctaaactgta

SEQ ID NO: 259823 - DNA, 25 bp, Homo sapien
ttagaaacagataatacatgtctga

SEQ ID NO: 259824 - DNA, 25 bp, Homo sapien
gggactagcactgctatcaatggaa

SEQ ID NO: 259825 - DNA, 25 bp, Homo sapien
aagaccgcctgtaataatctgttag

SEQ ID NO: 259826 - DNA, 25 bp, Homo sapien
ttaatgaccattctagcaaaggcct

SEQ ID NO: 259827 - DNA, 25 bp, Homo sapien
caaaggcctacaagtggtgtgggaa

SEQ ID NO: 259828 - DNA, 25 bp, Homo sapien
tggctaacgccaagggaacttcatt

SEQ ID NO: 259829 - DNA, 25 bp, Homo sapien
aatttacagccagcattttgccacg

SEQ ID NO: 259830 - DNA, 25 bp, Homo sapien
tattatagtatggattcttctacct

SEQ ID NO: 259831 - DNA, 25 bp, Homo sapien
cttgattctagcaaactagaatgag

SEQ ID NO: 259832 - DNA, 25 bp, Homo sapien
caactccttagtaatcttgattcta

SEQ ID NO: 259833 - DNA, 25 bp, Homo sapien
ctagaatgagatttaagagatacca

SEQ ID NO: 259834 - DNA, 25 bp, Homo sapien
tgatcactaactcctgacctcaaat

SEQ ID NO: 259835 - DNA, 25 bp, Homo sapien
accaggctgatcactaactcctgac

SEQ ID NO: 259836 - DNA, 25 bp, Homo sapien
atcactaactcctgacctcaaataa

SEQ ID NO: 259837 - DNA, 25 bp, Homo sapien
cactaactcctgacctcaaataatc

SEQ ID NO: 259838 - DNA, 25 bp, Homo sapien
tttaaaatctaagcgacaggaggtg

SEQ ID NO: 259839 - DNA, 25 bp, Homo sapien
aaacaatgtagaaatgtcactcctc

SEQ ID NO: 259840 - DNA, 25 bp, Homo sapien
gaggtgttgcattaactccaaggaa

SEQ ID NO: 259841 - DNA, 25 bp, Homo sapien
gtcactcctcatttacaccttttag

SEQ ID NO: 259842 - DNA, 25 bp, Homo sapien
ccatttgtgcagcattgacttagag

SEQ ID NO: 259843 - DNA, 25 bp, Homo sapien
acctgaattacattattagaataag

SEQ ID NO: 259844 - DNA, 25 bp, Homo sapien
tccagagcagaatgatgccttaatc

SEQ ID NO: 259845 - DNA, 25 bp, Homo sapien
aatacttacctgttatgagttgcta

SEQ ID NO: 259846 - DNA, 25 bp, Homo sapien
tgaaaacattatagactggtatttt

SEQ ID NO: 259847 - DNA, 25 bp, Homo sapien
ctgaagtataacagaagatatattt

SEQ ID NO: 259848 - DNA, 25 bp, Homo sapien
ataactgaagtataacagaagatat

SEQ ID NO: 259849 - DNA, 25 bp, Homo sapien
aaacattatagactggtattttcaa

SEQ ID NO: 259850 - DNA, 25 bp, Homo sapien
gtcacgtcgggcagagtcagatcac

SEQ ID NO: 259851 - DNA, 25 bp, Homo sapien
gggcagagtcagatcgcaggcacta

SEQ ID NO: 259852 - DNA, 25 bp, Homo sapien
tcacgtcgggcagagtcagatcaca

SEQ ID NO: 259853 - DNA, 25 bp, Homo sapien
tcgggcagagtcagatcgcaggcac

SEQ ID NO: 259854 - DNA, 25 bp, Homo sapien
gcaatgttcttcatcagcgtcctct

SEQ ID NO: 259855 - DNA, 25 bp, Homo sapien
ttcatcagcgtcctctcacttttca

SEQ ID NO: 259856 - DNA, 25 bp, Homo sapien
tcttcatcagcgtcctctcactttt

SEQ ID NO: 259857 - DNA, 25 bp, Homo sapien
atgttcttcatcagcgtcctctcac

SEQ ID NO: 259858 - DNA, 25 bp, Homo sapien
tatatgtcggatgttggagaaagct

SEQ ID NO: 259859 - DNA, 25 bp, Homo sapien
cacaattagtttttagttagcagca

SEQ ID NO: 259860 - DNA, 25 bp, Homo sapien
aatttgttgggtagaagagtcgatc

SEQ ID NO: 259861 - DNA, 25 bp, Homo sapien
tgaactcctagataagcaggttgct

SEQ ID NO: 259862 - DNA, 25 bp, Homo sapien
agactcacttgatatgtttgaaaca

SEQ ID NO: 259863 - DNA, 25 bp, Homo sapien
gactcacttgatatgtttgaaacat

SEQ ID NO: 259864 - DNA, 25 bp, Homo sapien
taaatcttatcctcagtggttggca

SEQ ID NO: 259865 - DNA, 25 bp, Homo sapien
tggtaaaggctacgtgaaatggctt

SEQ ID NO: 259866 - DNA, 25 bp, Homo sapien
tactcttgtaaactcacttgaatcg

SEQ ID NO: 259867 - DNA, 25 bp, Homo sapien
tgtatccattagagcctagtgctag

SEQ ID NO: 259868 - DNA, 25 bp, Homo sapien
cgctcttctcccctgaagcaggcca

SEQ ID NO: 259869 - DNA, 25 bp, Homo sapien
tcctctcgctcttctcccctgaagc

SEQ ID NO: 259870 - DNA, 25 bp, Homo sapien
cttcctctcgctcttctcccctgaa

SEQ ID NO: 259871 - DNA, 25 bp, Homo sapien
tctcgctcttctcccctgaagcagg

SEQ ID NO: 259872 - DNA, 25 bp, Homo sapien
tccaaggccattcgttaatgacatc

SEQ ID NO: 259873 - DNA, 25 bp, Homo sapien
tccaacagtcgtcactgctggacag

SEQ ID NO: 259874 - DNA, 25 bp, Homo sapien
ggagacaacagcctttagacatatc

SEQ ID NO: 259875 - DNA, 25 bp, Homo sapien
taatgacatcgttgagggcatcgcg

SEQ ID NO: 259876 - DNA, 25 bp, Homo sapien
catatgggaaaaagtacttgagacc

SEQ ID NO: 259877 - DNA, 25 bp, Homo sapien
catgttcctaataggctaaatgaag

SEQ ID NO: 259878 - DNA, 25 bp, Homo sapien
gcatattttatgtcagtagcttagc

SEQ ID NO: 259879 - DNA, 25 bp, Homo sapien
caaggccagcatcaattccagacat

SEQ ID NO: 259880 - DNA, 25 bp, Homo sapien
taaagtgactgtgagctacgatcgc

SEQ ID NO: 259881 - DNA, 25 bp, Homo sapien
gaatgcatcgaggtttatgggtaac

SEQ ID NO: 259882 - DNA, 25 bp, Homo sapien
tattcagaaatgtagcctagctgga

SEQ ID NO: 259883 - DNA, 25 bp, Homo sapien
gaccagcgtggataacatcatgaga

SEQ ID NO: 259884 - DNA, 25 bp, Homo sapien
tctttgatcatctaaactccgtaaa

SEQ ID NO: 259885 - DNA, 25 bp, Homo sapien
catctaaactccgtaaatgcctgca

SEQ ID NO: 259886 - DNA, 25 bp, Homo sapien
gatcatctaaactccgtaaatgcct

SEQ ID NO: 259887 - DNA, 25 bp, Homo sapien
ctaaactccgtaaatgcctgcacat

SEQ ID NO: 259888 - DNA, 25 bp, Homo sapien
gctctggctgtctgggctcgccacc

SEQ ID NO: 259889 - DNA, 25 bp, Homo sapien
gctgtctgggctcgccaccttgtgc

SEQ ID NO: 259890 - DNA, 25 bp, Homo sapien
tggctgtctgggctcgccaccttgt

SEQ ID NO: 259891 - DNA, 25 bp, Homo sapien
gtctgggctcgccaccttgtgcagc

SEQ ID NO: 259892 - DNA, 25 bp, Homo sapien
gcaccacggcttgcctggcctcggc

SEQ ID NO: 259893 - DNA, 25 bp, Homo sapien
gggggcaccacggcttgcctggcct

SEQ ID NO: 259894 - DNA, 25 bp, Homo sapien
accacggcttgcctggcctcggccg

SEQ ID NO: 259895 - DNA, 25 bp, Homo sapien
gggcaccacggcttgcctggcctcg

SEQ ID NO: 259896 - DNA, 25 bp, Homo sapien
tctgcagcactagatctatatcagc

SEQ ID NO: 259897 - DNA, 25 bp, Homo sapien
tctgtcgctgtacaggacgtaggag

SEQ ID NO: 259898 - DNA, 25 bp, Homo sapien
tgcagcactagatctatatcagccc

SEQ ID NO: 259899 - DNA, 25 bp, Homo sapien
gctctgtcgctgtacaggacgtagg

SEQ ID NO: 259900 - DNA, 25 bp, Homo sapien
tatttggaaagaccacgatcctgca

SEQ ID NO: 259901 - DNA, 25 bp, Homo sapien
tttggaaagaccacgatcctgcaaa

SEQ ID NO: 259902 - DNA, 25 bp, Homo sapien
gatatttggaaagaccacgatcctg

SEQ ID NO: 259903 - DNA, 25 bp, Homo sapien
atatttggaaagaccacgatcctgc

SEQ ID NO: 259904 - DNA, 25 bp, Homo sapien
tcttgacgcgtgtactactgaagga

SEQ ID NO: 259905 - DNA, 25 bp, Homo sapien
cttgagctaggatctcacataactc

SEQ ID NO: 259906 - DNA, 25 bp, Homo sapien
aaggaagagttgatgctaagggatt

SEQ ID NO: 259907 - DNA, 25 bp, Homo sapien
gagctaggatctcacataactctaa

SEQ ID NO: 259908 - DNA, 25 bp, Homo sapien
tctcagtttccaggaagtctttttg

SEQ ID NO: 259909 - DNA, 25 bp, Homo sapien
cagtttccaggaagtctttttgcat

SEQ ID NO: 259910 - DNA, 25 bp, Homo sapien
agttctcagtttccaggaagtcttt

SEQ ID NO: 259911 - DNA, 25 bp, Homo sapien
tgaagttctcagtttccaggaagtc

SEQ ID NO: 259912 - DNA, 25 bp, Homo sapien
tagcgggagccccatgcatggagct

SEQ ID NO: 259913 - DNA, 25 bp, Homo sapien
tttgactgttgctttagcgggagcc

SEQ ID NO: 259914 - DNA, 25 bp, Homo sapien
actgctctttcggtgatggtagtag

SEQ ID NO: 259915 - DNA, 25 bp, Homo sapien
agggaactgctctttcggtgatggt

SEQ ID NO: 259916 - DNA, 25 bp, Homo sapien
tctcctgttccattagtctcatcta

SEQ ID NO: 259917 - DNA, 25 bp, Homo sapien
tgttgcaaactctcaagaagataat

SEQ ID NO: 259918 - DNA, 25 bp, Homo sapien
tagtattataatgtcccctttccta

SEQ ID NO: 259919 - DNA, 25 bp, Homo sapien
taacactttaaatcaacacatatac

SEQ ID NO: 259920 - DNA, 25 bp, Homo sapien
aataaggacccacagccatggtgat

SEQ ID NO: 259921 - DNA, 25 bp, Homo sapien
taagcgaatgttagacacatacata

SEQ ID NO: 259922 - DNA, 25 bp, Homo sapien
tatatatggatgaatagtactttac

SEQ ID NO: 259923 - DNA, 25 bp, Homo sapien
gattatgctttcaatcactgtgtat

SEQ ID NO: 259924 - DNA, 25 bp, Homo sapien
gatagatgttaatccatttggccca

SEQ ID NO: 259925 - DNA, 25 bp, Homo sapien
gcataaagccatacaagtttctcag

SEQ ID NO: 259926 - DNA, 25 bp, Homo sapien
ttcagaggagatcttagaccacagc

SEQ ID NO: 259927 - DNA, 25 bp, Homo sapien
tgtgtggtgatttgtgtggcaaccc

SEQ ID NO: 259928 - DNA, 25 bp, Homo sapien
aaactagatggcagccggctcataa

SEQ ID NO: 259929 - DNA, 25 bp, Homo sapien
tggtgtctataagaagctcacgggc

SEQ ID NO: 259930 - DNA, 25 bp, Homo sapien
tataagaagctcacgggcaaggatg

SEQ ID NO: 259931 - DNA, 25 bp, Homo sapien
caatgtggaacacaaggttgaaact

SEQ ID NO: 259932 - DNA, 25 bp, Homo sapien
gcaaagaccatttccgcttccgaat

SEQ ID NO: 259933 - DNA, 25 bp, Homo sapien
ggagcactttcccaggttgagcagc

SEQ ID NO: 259934 - DNA, 25 bp, Homo sapien
gcagcgtgtgactgtcgctttaaaa

SEQ ID NO: 259935 - DNA, 25 bp, Homo sapien
tttaaaaagcgttgcagcagtggaa

SEQ ID NO: 259936 - DNA, 25 bp, Homo sapien
tgcacgggctacgtcagaatttacg

SEQ ID NO: 259937 - DNA, 25 bp, Homo sapien
taggcgtccaaagctagtatccagg

SEQ ID NO: 259938 - DNA, 25 bp, Homo sapien
agaatttacggatcctgactccagg

SEQ ID NO: 259939 - DNA, 25 bp, Homo sapien
aaatctcacgttggtggcggcgaca

SEQ ID NO: 259940 - DNA, 25 bp, Homo sapien
ccaggagatattaggcgaggtatat

SEQ ID NO: 259941 - DNA, 25 bp, Homo sapien
taggcgaggtatatccaactcccct

SEQ ID NO: 259942 - DNA, 25 bp, Homo sapien
taatgatggtgtcaacccaggagat

SEQ ID NO: 259943 - DNA, 25 bp, Homo sapien
cagaggactcggcttttggagcaca

SEQ ID NO: 259944 - DNA, 25 bp, Homo sapien
tgcagtatagctgcctccgcctgag

SEQ ID NO: 259945 - DNA, 25 bp, Homo sapien
ggcacattcccaaacggtaccgcat

SEQ ID NO: 259946 - DNA, 25 bp, Homo sapien
taaatgatccaagtccgtgactgcg

SEQ ID NO: 259947 - DNA, 25 bp, Homo sapien
tcacttaacaaaaccgggctgtcca

SEQ ID NO: 259948 - DNA, 25 bp, Homo sapien
tatcacttgatagctggaaggacaa

SEQ ID NO: 259949 - DNA, 25 bp, Homo sapien
gccctttaaaattcgctcgcagcgt

SEQ ID NO: 259950 - DNA, 25 bp, Homo sapien
cacagggctgcacactatggaaatt

SEQ ID NO: 259951 - DNA, 25 bp, Homo sapien
tagttgacttcgtgccgttgggctc

SEQ ID NO: 259952 - DNA, 25 bp, Homo sapien
atccgcagccgcacgaagctaaaca

SEQ ID NO: 259953 - DNA, 25 bp, Homo sapien
tggcatcatccgcagccgcacgaag

SEQ ID NO: 259954 - DNA, 25 bp, Homo sapien
agtttagattgtgttcaacatctgg

SEQ ID NO: 259955 - DNA, 25 bp, Homo sapien
cagccgcacgaagctaaacatacag

SEQ ID NO: 259956 - DNA, 25 bp, Homo sapien
agcaatttcacactactaggctcag

SEQ ID NO: 259957 - DNA, 25 bp, Homo sapien
ggtgagcatgaggagcaaatcctgg

SEQ ID NO: 259958 - DNA, 25 bp, Homo sapien
ttaagcagcgagtggagacggccgg

SEQ ID NO: 259959 - DNA, 25 bp, Homo sapien
aaatcctgggcctcgtggatctggg

SEQ ID NO: 259960 - DNA, 25 bp, Homo sapien
taaacgcggccagaagtgtgtcagc

SEQ ID NO: 259961 - DNA, 25 bp, Homo sapien
ggctcaacttgggccaaaatgaaaa

SEQ ID NO: 259962 - DNA, 25 bp, Homo sapien
agcgaaggggctcaacttgggccaa

SEQ ID NO: 259963 - DNA, 25 bp, Homo sapien
gttcccacaccgcaaaccaccgtgc

SEQ ID NO: 259964 - DNA, 25 bp, Homo sapien
tcactgccaagcttgccagcagctg

SEQ ID NO: 259965 - DNA, 25 bp, Homo sapien
ctgctgtgtcactgccaagcttgcc

SEQ ID NO: 259966 - DNA, 25 bp, Homo sapien
cagctgcagtcacctgcggctgcat

SEQ ID NO: 259967 - DNA, 25 bp, Homo sapien
ccaagcttgccagcagctgcagtca

SEQ ID NO: 259968 - DNA, 25 bp, Homo sapien
ctgctggaacagtaagactccccca

SEQ ID NO: 259969 - DNA, 25 bp, Homo sapien
tcctgctggaacagtaagactcccc

SEQ ID NO: 259970 - DNA, 25 bp, Homo sapien
tgctggaacagtaagactcccccac

SEQ ID NO: 259971 - DNA, 25 bp, Homo sapien
cctgctggaacagtaagactccccc

SEQ ID NO: 259972 - DNA, 25 bp, Homo sapien
cagatcaaccatctcagatcctgca

SEQ ID NO: 259973 - DNA, 25 bp, Homo sapien
cagggctgccagatcaaccatctca

SEQ ID NO: 259974 - DNA, 25 bp, Homo sapien
cagagaagctcgaaccagggctgcc

SEQ ID NO: 259975 - DNA, 25 bp, Homo sapien
tgcaccggggtaagttcggatctgt

SEQ ID NO: 259976 - DNA, 25 bp, Homo sapien
tgtagaccttacattaatgcatatc

SEQ ID NO: 259977 - DNA, 25 bp, Homo sapien
gggtaacaatgtgctatagtcagtc

SEQ ID NO: 259978 - DNA, 25 bp, Homo sapien
ctcaagaggaaactatttcaaggtg

SEQ ID NO: 259979 - DNA, 25 bp, Homo sapien
gagctaccgcgcctgtctggacact

SEQ ID NO: 259980 - DNA, 25 bp, Homo sapien
cattcatcccgaggtagagtccact

SEQ ID NO: 259981 - DNA, 25 bp, Homo sapien
ccaggcccactgctatactgataaa

SEQ ID NO: 259982 - DNA, 25 bp, Homo sapien
agagtccactgtccacgcctcgaat

SEQ ID NO: 259983 - DNA, 25 bp, Homo sapien
gtccacgcctcgaatgctgaccagg

SEQ ID NO: 259984 - DNA, 25 bp, Homo sapien
tggatgaagtccctccagtacttac

SEQ ID NO: 259985 - DNA, 25 bp, Homo sapien
gaaaagacagctgttcaaatcaaac

SEQ ID NO: 259986 - DNA, 25 bp, Homo sapien
atggagataaagctggatgaagtcc

SEQ ID NO: 259987 - DNA, 25 bp, Homo sapien
tccaaacagactcagttgcatttct

SEQ ID NO: 259988 - DNA, 25 bp, Homo sapien
ccttttagatctactctcaaggtaa

SEQ ID NO: 259989 - DNA, 25 bp, Homo sapien
ctgaccttttagatctactctcaag

SEQ ID NO: 259990 - DNA, 25 bp, Homo sapien
ctctgaccttttagatctactctca

SEQ ID NO: 259991 - DNA, 25 bp, Homo sapien
ttttagatctactctcaaggtaaac

SEQ ID NO: 259992 - DNA, 25 bp, Homo sapien
tctaataggatatcagaatcctgta

SEQ ID NO: 259993 - DNA, 25 bp, Homo sapien
tactcattagcaatatagtttttct

SEQ ID NO: 259994 - DNA, 25 bp, Homo sapien
aatcaaatcgttatactcattagca

SEQ ID NO: 259995 - DNA, 25 bp, Homo sapien
tcatattctccttctaatcaaatcg

SEQ ID NO: 259996 - DNA, 25 bp, Homo sapien
tgaatactctaatcccctggccaag

SEQ ID NO: 259997 - DNA, 25 bp, Homo sapien
tatttaaacactcctctgggatgcc

SEQ ID NO: 259998 - DNA, 25 bp, Homo sapien
tctcgaaatttcaacctggcagcgt

SEQ ID NO: 259999 - DNA, 25 bp, Homo sapien
tgaagggtcacgtgacctaacctgc

SEQ ID NO: 260000 - DNA, 25 bp, Homo sapien
tattcgatgctcatgtacagtagac

SEQ ID NO: 260001 - DNA, 25 bp, Homo sapien
caaacgagaaatgttagcacctccc

SEQ ID NO: 260002 - DNA, 25 bp, Homo sapien
taattcctgtggaaacaccctgact

SEQ ID NO: 260003 - DNA, 25 bp, Homo sapien
ttcatctaacaaagagaccagcagg

SEQ ID NO: 260004 - DNA, 25 bp, Homo sapien
gagccatataaaccagggccctgtt

SEQ ID NO: 260005 - DNA, 25 bp, Homo sapien
ccttggttactgattacatggagcc

SEQ ID NO: 260006 - DNA, 25 bp, Homo sapien
gagttgaaacccatcataccttggt

SEQ ID NO: 260007 - DNA, 25 bp, Homo sapien
taggaacggctgcaaagtactggtc

SEQ ID NO: 260008 - DNA, 25 bp, Homo sapien
tctccagggttccatgcaatgaaca

SEQ ID NO: 260009 - DNA, 25 bp, Homo sapien
gggttctccagggttccatgcaatg

SEQ ID NO: 260010 - DNA, 25 bp, Homo sapien
ggttccatgcaatgaacaatccatt

SEQ ID NO: 260011 - DNA, 25 bp, Homo sapien
cagggttccatgcaatgaacaatcc

SEQ ID NO: 260012 - DNA, 25 bp, Homo sapien
gaatccggagacatccagaagcctc

SEQ ID NO: 260013 - DNA, 25 bp, Homo sapien
aagaccacagaatccggagacatcc

SEQ ID NO: 260014 - DNA, 25 bp, Homo sapien
aagcagagacaagatgaggcagatg

SEQ ID NO: 260015 - DNA, 25 bp, Homo sapien
agcagagacaagatgaggcagatga

SEQ ID NO: 260016 - DNA, 25 bp, Homo sapien
gccaggacgctgaacgacagccccg

SEQ ID NO: 260017 - DNA, 25 bp, Homo sapien
aggacgctgaacgacagccccggag

SEQ ID NO: 260018 - DNA, 25 bp, Homo sapien
gacaggggaggactctccacatgtc

SEQ ID NO: 260019 - DNA, 25 bp, Homo sapien
caggggaggactctccacatgtcag

SEQ ID NO: 260020 - DNA, 25 bp, Homo sapien
tgtcacagtgccactgaggcacacc

SEQ ID NO: 260021 - DNA, 25 bp, Homo sapien
ccagccggctgacaaatgatgtttc

SEQ ID NO: 260022 - DNA, 25 bp, Homo sapien
aagttcaagtcagtccctggtgagg

SEQ ID NO: 260023 - DNA, 25 bp, Homo sapien
gtttctgaccaagttcaagtcagtc

SEQ ID NO: 260024 - DNA, 25 bp, Homo sapien
tcagatacccacagcggatgcccat

SEQ ID NO: 260025 - DNA, 25 bp, Homo sapien
gaagatcaatgatgccagggatccc

SEQ ID NO: 260026 - DNA, 25 bp, Homo sapien
gatatttccacgtggctcttgaatt

SEQ ID NO: 260027 - DNA, 25 bp, Homo sapien
tgggcactatatgatatttccacgt

SEQ ID NO: 260028 - DNA, 25 bp, Homo sapien
ccagtattccagatgggccctgctt

SEQ ID NO: 260029 - DNA, 25 bp, Homo sapien
gccaccagaattgtgggaacaattg

SEQ ID NO: 260030 - DNA, 25 bp, Homo sapien
cacattcctggccatcaaaattgcc

SEQ ID NO: 260031 - DNA, 25 bp, Homo sapien
caattgaatcagttgtgtctggtcc

SEQ ID NO: 260032 - DNA, 25 bp, Homo sapien
gcatgtgggcctagaggggtgctct

SEQ ID NO: 260033 - DNA, 25 bp, Homo sapien
ccttagctggggagattgggctgaa

SEQ ID NO: 260034 - DNA, 25 bp, Homo sapien
gggagattgggctgaatgtgacttc

SEQ ID NO: 260035 - DNA, 25 bp, Homo sapien
attgggctgaatgtgacttccctct

SEQ ID NO: 260036 - DNA, 25 bp, Homo sapien
tgcaaggaacacctaatgtcatacg

SEQ ID NO: 260037 - DNA, 25 bp, Homo sapien
ttgaatgagtcaaatgcaaggaaca

SEQ ID NO: 260038 - DNA, 25 bp, Homo sapien
tgagtcaaatgcaaggaacacctaa

SEQ ID NO: 260039 - DNA, 25 bp, Homo sapien
cacctaatgtcatacgttgttccca

SEQ ID NO: 260040 - DNA, 25 bp, Homo sapien
tctggtgccgtttagtcctagtccc

SEQ ID NO: 260041 - DNA, 25 bp, Homo sapien
cagtgtccacgtgcttatataggtt

SEQ ID NO: 260042 - DNA, 25 bp, Homo sapien
aatgcaacatagtatcgccttccag

SEQ ID NO: 260043 - DNA, 25 bp, Homo sapien
gtttgatgagtacgtattataccag

SEQ ID NO: 260044 - DNA, 25 bp, Homo sapien
gaatatccttatacagttcaggtac

SEQ ID NO: 260045 - DNA, 25 bp, Homo sapien
tagaatatccttatacagttcaggt

SEQ ID NO: 260046 - DNA, 25 bp, Homo sapien
gcttagaatatccttatacagttca

SEQ ID NO: 260047 - DNA, 25 bp, Homo sapien
tggcttagaatatccttatacagtt

SEQ ID NO: 260048 - DNA, 25 bp, Homo sapien
taaatcaagcaagtggccctaggca

SEQ ID NO: 260049 - DNA, 25 bp, Homo sapien
gaatcaataagaacccaccgcgtga

SEQ ID NO: 260050 - DNA, 25 bp, Homo sapien
cattatgcatgcgacaaagtttggc

SEQ ID NO: 260051 - DNA, 25 bp, Homo sapien
tgcatcaggccgcagtccttttgct

SEQ ID NO: 260052 - DNA, 25 bp, Homo sapien
ttttaagtaagactgcaccctcgcg

SEQ ID NO: 260053 - DNA, 25 bp, Homo sapien
tgcgatgataccagtgagaattaac

SEQ ID NO: 260054 - DNA, 25 bp, Homo sapien
ggtctttgctttaagttcactgcga

SEQ ID NO: 260055 - DNA, 25 bp, Homo sapien
tcctgataagtcgaagtatggcagc

SEQ ID NO: 260056 - DNA, 25 bp, Homo sapien
cacaggttcatagcggactttgcca

SEQ ID NO: 260057 - DNA, 25 bp, Homo sapien
gaaatagtctcgcttgcccaagggc

SEQ ID NO: 260058 - DNA, 25 bp, Homo sapien
cttaatgcacatcagcaggagggca

SEQ ID NO: 260059 - DNA, 25 bp, Homo sapien
aaaaattgagcgcttgtggagacca

SEQ ID NO: 260060 - DNA, 25 bp, Homo sapien
tttgaccacagtgcaagtgttggca

SEQ ID NO: 260061 - DNA, 25 bp, Homo sapien
tgttggcaccaacaagacagtggtt

SEQ ID NO: 260062 - DNA, 25 bp, Homo sapien
caagaactggatgcaaacccatgag

SEQ ID NO: 260063 - DNA, 25 bp, Homo sapien
gacagatgggaaggttgttcagccc

SEQ ID NO: 260064 - DNA, 25 bp, Homo sapien
gggtatcatagagcacgtaggccac

SEQ ID NO: 260065 - DNA, 25 bp, Homo sapien
cgtgtcctaaggaagtaaacgcagt

SEQ ID NO: 260066 - DNA, 25 bp, Homo sapien
tcgtgcaagtgaccacaaacagtgg

SEQ ID NO: 260067 - DNA, 25 bp, Homo sapien
tacacacgtacacttgagagggcct

SEQ ID NO: 260068 - DNA, 25 bp, Homo sapien
tgccaccagtgacgtgtctgtcttc

SEQ ID NO: 260069 - DNA, 25 bp, Homo sapien
caccagtgacgtgtctgtcttcttc

SEQ ID NO: 260070 - DNA, 25 bp, Homo sapien
tgtgtgccaccagtgacgtgtctgt

SEQ ID NO: 260071 - DNA, 25 bp, Homo sapien
tgtgccaccagtgacgtgtctgtct

SEQ ID NO: 260072 - DNA, 25 bp, Homo sapien
ccagtaccttccttatcccagtatt

SEQ ID NO: 260073 - DNA, 25 bp, Homo sapien
tatcccagtattcatcacgatgcac

SEQ ID NO: 260074 - DNA, 25 bp, Homo sapien
cttccttatcccagtattcatcacg

SEQ ID NO: 260075 - DNA, 25 bp, Homo sapien
cccagtattcatcacgatgcaccat

SEQ ID NO: 260076 - DNA, 25 bp, Homo sapien
tgcaaagaacctaacctcatggacg

SEQ ID NO: 260077 - DNA, 25 bp, Homo sapien
taacctcatggacgccacatttgaa

SEQ ID NO: 260078 - DNA, 25 bp, Homo sapien
ttccaagaggcaccacggcttgcaa

SEQ ID NO: 260079 - DNA, 25 bp, Homo sapien
taagtgagattgtgcctgcccactg

SEQ ID NO: 260080 - DNA, 25 bp, Homo sapien
gggccaggtataacactgttttcat

SEQ ID NO: 260081 - DNA, 25 bp, Homo sapien
tcttgtgaagcctgatgactgaggt

SEQ ID NO: 260082 - DNA, 25 bp, Homo sapien
gaaggaccttttctgggatcttgtg

SEQ ID NO: 260083 - DNA, 25 bp, Homo sapien
caagactgccttgttactagaatgc

SEQ ID NO: 260084 - DNA, 25 bp, Homo sapien
cgatgggatcccctctcttggaaac

SEQ ID NO: 260085 - DNA, 25 bp, Homo sapien
cacagagagcaggagtccttccagg

SEQ ID NO: 260086 - DNA, 25 bp, Homo sapien
gaagttgcccagaccgatgggatcc

SEQ ID NO: 260087 - DNA, 25 bp, Homo sapien
tagaaaagaacggtgaagttgccca

SEQ ID NO: 260088 - DNA, 25 bp, Homo sapien
ttccagatataaatagccgctatgg

SEQ ID NO: 260089 - DNA, 25 bp, Homo sapien
gaatgcctcgctgcatatttacact

SEQ ID NO: 260090 - DNA, 25 bp, Homo sapien
ggatttctaacaactttcagaatgg

SEQ ID NO: 260091 - DNA, 25 bp, Homo sapien
aaggatggagcccatcaaggtcact

SEQ ID NO: 260092 - DNA, 25 bp, Homo sapien
gtgctaaatcttgggttagatttgg

SEQ ID NO: 260093 - DNA, 25 bp, Homo sapien
agcccacattatcatggacttgggt

SEQ ID NO: 260094 - DNA, 25 bp, Homo sapien
ccacattatcatggacttgggtaaa

SEQ ID NO: 260095 - DNA, 25 bp, Homo sapien
tatcatggacttgggtaaatgctgt

SEQ ID NO: 260096 - DNA, 25 bp, Homo sapien
agtgacatatggacgagctctaaag

SEQ ID NO: 260097 - DNA, 25 bp, Homo sapien
tcatacaacgtgaagagtgagcctc

SEQ ID NO: 260098 - DNA, 25 bp, Homo sapien
ctggtcacattgctacgtctccgga

SEQ ID NO: 260099 - DNA, 25 bp, Homo sapien
gaccacctgggatcgagtgacatat

SEQ ID NO: 260100 - DNA, 25 bp, Homo sapien
agcaaagtgactgcgactgggtgat

SEQ ID NO: 260101 - DNA, 25 bp, Homo sapien
gcgactgggtgatcgtttcggcagc

SEQ ID NO: 260102 - DNA, 25 bp, Homo sapien
agagcaaagtgactgcgactgggtg

SEQ ID NO: 260103 - DNA, 25 bp, Homo sapien
tgatcgtttcggcagcgactgtcat

SEQ ID NO: 260104 - DNA, 25 bp, Homo sapien
tcgtcagcaagtaggttacaaccgt

SEQ ID NO: 260105 - DNA, 25 bp, Homo sapien
tgaggaatgatcgtcagcaagtagg

SEQ ID NO: 260106 - DNA, 25 bp, Homo sapien
caagtaggttacaaccgtcagtttg

SEQ ID NO: 260107 - DNA, 25 bp, Homo sapien
gaatgatcgtcagcaagtaggttac

SEQ ID NO: 260108 - DNA, 25 bp, Homo sapien
taccagtcattctaagtaacaaggg

SEQ ID NO: 260109 - DNA, 25 bp, Homo sapien
caagagtaactcattttcggcaaga

SEQ ID NO: 260110 - DNA, 25 bp, Homo sapien
aactgggactctgaccaatccactg

SEQ ID NO: 260111 - DNA, 25 bp, Homo sapien
tttaaggaaatcaactgggactctg

SEQ ID NO: 260112 - DNA, 25 bp, Homo sapien
gactgtcctgtaagaagaaggcact

SEQ ID NO: 260113 - DNA, 25 bp, Homo sapien
gcaggtgtacatcgccaacttcatg

SEQ ID NO: 260114 - DNA, 25 bp, Homo sapien
tatggttaagcaggtgtacatcgcc

SEQ ID NO: 260115 - DNA, 25 bp, Homo sapien
gaagaaggcactatggttaagcagg

SEQ ID NO: 260116 - DNA, 25 bp, Homo sapien
ttttacagcaaattcccttcgatgt

SEQ ID NO: 260117 - DNA, 25 bp, Homo sapien
gatgacactcagtgttcccacatgg

SEQ ID NO: 260118 - DNA, 25 bp, Homo sapien
tgttcagtggaaaggctgatgacac

SEQ ID NO: 260119 - DNA, 25 bp, Homo sapien
tcccttcgatgttcagtggaaaggc

SEQ ID NO: 260120 - DNA, 25 bp, Homo sapien
attactacattacctattgacggca

SEQ ID NO: 260121 - DNA, 25 bp, Homo sapien
ccttgaatgaggcaggagactaaag

SEQ ID NO: 260122 - DNA, 25 bp, Homo sapien
aacagccccatccaagtatgttcca

SEQ ID NO: 260123 - DNA, 25 bp, Homo sapien
ttcatggagtaaccttcagagaagc

SEQ ID NO: 260124 - DNA, 25 bp, Homo sapien
gccctggatcccccgtgaccgtctc

SEQ ID NO: 260125 - DNA, 25 bp, Homo sapien
ccctggatcccccgtgaccgtctct

SEQ ID NO: 260126 - DNA, 25 bp, Homo sapien
ccgtgaccgtctctttccataccct

SEQ ID NO: 260127 - DNA, 25 bp, Homo sapien
catccattggcatagcaccctacag

SEQ ID NO: 260128 - DNA, 25 bp, Homo sapien
ctactgatctgctgaccagtgtggg

SEQ ID NO: 260129 - DNA, 25 bp, Homo sapien
gtggaacttatcacagacaccccat

SEQ ID NO: 260130 - DNA, 25 bp, Homo sapien
ggctatacacagatccctctactga

SEQ ID NO: 260131 - DNA, 25 bp, Homo sapien
acagatggtgtcatgagaaggagct

SEQ ID NO: 260132 - DNA, 25 bp, Homo sapien
ctgtgtcgagttgaatgaaggagct

SEQ ID NO: 260133 - DNA, 25 bp, Homo sapien
gcgcggagattgtgaattctgctat

SEQ ID NO: 260134 - DNA, 25 bp, Homo sapien
gtcacaagtgacagatggtgtcatg

SEQ ID NO: 260135 - DNA, 25 bp, Homo sapien
ggagagcagccttgacctccacaga

SEQ ID NO: 260136 - DNA, 25 bp, Homo sapien
agagcagccttgacctccacagaca

SEQ ID NO: 260137 - DNA, 25 bp, Homo sapien
tggagagcagccttgacctccacag

SEQ ID NO: 260138 - DNA, 25 bp, Homo sapien
ctggagagcagccttgacctccaca

SEQ ID NO: 260139 - DNA, 25 bp, Homo sapien
gctgctgttgaaggtcgagatgatg

SEQ ID NO: 260140 - DNA, 25 bp, Homo sapien
ccatggccagccctgtggcgttggt

SEQ ID NO: 260141 - DNA, 25 bp, Homo sapien
tgtgccactgtccccttcaagggca

SEQ ID NO: 260142 - DNA, 25 bp, Homo sapien
ttggctcctacacactccatggcca

SEQ ID NO: 260143 - DNA, 25 bp, Homo sapien
tcaaagccgcatcaacaaagacagg

SEQ ID NO: 260144 - DNA, 25 bp, Homo sapien
acaaagacaggtgcatctctgcctg

SEQ ID NO: 260145 - DNA, 25 bp, Homo sapien
gggtatctgttcattcgtcaaagcc

SEQ ID NO: 260146 - DNA, 25 bp, Homo sapien
catgtgagctctggcaagcctctgc

SEQ ID NO: 260147 - DNA, 25 bp, Homo sapien
agatactgggttggaccatttctag

SEQ ID NO: 260148 - DNA, 25 bp, Homo sapien
atttctagccagtaagtggcctctt

SEQ ID NO: 260149 - DNA, 25 bp, Homo sapien
tttctagccagtaagtggcctctta

SEQ ID NO: 260150 - DNA, 25 bp, Homo sapien
ttctagccagtaagtggcctcttac

SEQ ID NO: 260151 - DNA, 25 bp, Homo sapien
tgccaccttcgccttttgacctgct

SEQ ID NO: 260152 - DNA, 25 bp, Homo sapien
tgcatccggcattgcaccccagtgg

SEQ ID NO: 260153 - DNA, 25 bp, Homo sapien
caaaggccactgcatccggcattgc

SEQ ID NO: 260154 - DNA, 25 bp, Homo sapien
gctttggtggtgtccccaatcttga

SEQ ID NO: 260155 - DNA, 25 bp, Homo sapien
accctccctcgggacatggactgac

SEQ ID NO: 260156 - DNA, 25 bp, Homo sapien
catgcactgcactgcggggcatggg

SEQ ID NO: 260157 - DNA, 25 bp, Homo sapien
gagacaccctccctcgggacatgga

SEQ ID NO: 260158 - DNA, 25 bp, Homo sapien
gacaccctccctcgggacatggact

SEQ ID NO: 260159 - DNA, 25 bp, Homo sapien
aaggcacctggtgtaggaagagcat

SEQ ID NO: 260160 - DNA, 25 bp, Homo sapien
atatttaggcccacggaaggcacct

SEQ ID NO: 260161 - DNA, 25 bp, Homo sapien
aggcccacggaaggcacctggtgta

SEQ ID NO: 260162 - DNA, 25 bp, Homo sapien
actgaaatatttaggcccacggaag

SEQ ID NO: 260163 - DNA, 25 bp, Homo sapien
gaagacatcagtgaaacctctcgtt

SEQ ID NO: 260164 - DNA, 25 bp, Homo sapien
tggggaaagccctctcatttaaaga

SEQ ID NO: 260165 - DNA, 25 bp, Homo sapien
gagaataaggatgcccctcattttt

SEQ ID NO: 260166 - DNA, 25 bp, Homo sapien
tcaaactatgtgaataccccagaag

SEQ ID NO: 260167 - DNA, 25 bp, Homo sapien
agagctaagatttcctacacccacc

SEQ ID NO: 260168 - DNA, 25 bp, Homo sapien
cctcttcacaggatatattaagcct

SEQ ID NO: 260169 - DNA, 25 bp, Homo sapien
cttgaactccaggtagagctaagat

SEQ ID NO: 260170 - DNA, 25 bp, Homo sapien
aaacatcgttttctgtttcaacttg

SEQ ID NO: 260171 - DNA, 25 bp, Homo sapien
cgtgtgcccaaatgcagtccaggtt

SEQ ID NO: 260172 - DNA, 25 bp, Homo sapien
aagcaaattcttgtgggcactgccc

SEQ ID NO: 260173 - DNA, 25 bp, Homo sapien
tgactgaaggctactctgcacaggt

SEQ ID NO: 260174 - DNA, 25 bp, Homo sapien
gcatgcctgatccatggcaaatgaa

SEQ ID NO: 260175 - DNA, 25 bp, Homo sapien
acattagatgagaacctcctcagct

SEQ ID NO: 260176 - DNA, 25 bp, Homo sapien
tgcaaaagaacattagatgagaacc

SEQ ID NO: 260177 - DNA, 25 bp, Homo sapien
aagaacattagatgagaacctcctc

SEQ ID NO: 260178 - DNA, 25 bp, Homo sapien
caaaagaacattagatgagaacctc

SEQ ID NO: 260179 - DNA, 25 bp, Homo sapien
gcttccacactgcagcggtgggtta

SEQ ID NO: 260180 - DNA, 25 bp, Homo sapien
tgctggcctgggtgttaagcttttc

SEQ ID NO: 260181 - DNA, 25 bp, Homo sapien
gagccggctacggtctccggcagtc

SEQ ID NO: 260182 - DNA, 25 bp, Homo sapien
gtgtctcctctcactatagagctga

SEQ ID NO: 260183 - DNA, 25 bp, Homo sapien
ttgaggcaggagaatggcgtgaatc

SEQ ID NO: 260184 - DNA, 25 bp, Homo sapien
aaataagagggcgtggtgacgggcg

SEQ ID NO: 260185 - DNA, 25 bp, Homo sapien
cctgtaatcccagctacttcggagg

SEQ ID NO: 260186 - DNA, 25 bp, Homo sapien
cacggtgaaaccacgtctttactgg

SEQ ID NO: 260187 - DNA, 25 bp, Homo sapien
tggtccccaagctggaacaaggctc

SEQ ID NO: 260188 - DNA, 25 bp, Homo sapien
tccccaagctggaacaaggctctgc

SEQ ID NO: 260189 - DNA, 25 bp, Homo sapien
ccaagctggaacaaggctctgctct

SEQ ID NO: 260190 - DNA, 25 bp, Homo sapien
gcacagagctcaagccctgcctggt

SEQ ID NO: 260191 - DNA, 25 bp, Homo sapien
tattcttaagtgaggcagaaaaggc

SEQ ID NO: 260192 - DNA, 25 bp, Homo sapien
ttattattcttaagtgaggcagaaa

SEQ ID NO: 260193 - DNA, 25 bp, Homo sapien
acttttgaagtcttatcagctgagt

SEQ ID NO: 260194 - DNA, 25 bp, Homo sapien
tgaagtcttatcagctgagttttca

SEQ ID NO: 260195 - DNA, 25 bp, Homo sapien
gagtttgagcaaggaatgttgctaa

SEQ ID NO: 260196 - DNA, 25 bp, Homo sapien
tcaagggggagtttgagcaaggaat

SEQ ID NO: 260197 - DNA, 25 bp, Homo sapien
gcgttcaagggggagtttgagcaag

SEQ ID NO: 260198 - DNA, 25 bp, Homo sapien
ttaaatcctggcactgcgttcaagg

SEQ ID NO: 260199 - DNA, 25 bp, Homo sapien
aggaaatgaccaagtataaattgca

SEQ ID NO: 260200 - DNA, 25 bp, Homo sapien
caggaaatgaccaagtataaattgc

SEQ ID NO: 260201 - DNA, 25 bp, Homo sapien
acctgggctcaacctgcactctctt

SEQ ID NO: 260202 - DNA, 25 bp, Homo sapien
gagggaatcgactgccagtttaagg

SEQ ID NO: 260203 - DNA, 25 bp, Homo sapien
tcagactccagaatacgaaacgtag

SEQ ID NO: 260204 - DNA, 25 bp, Homo sapien
tcttcccatctgcagccctggaggg

SEQ ID NO: 260205 - DNA, 25 bp, Homo sapien
cgctgctctgcgtcagtgctgccaa

SEQ ID NO: 260206 - DNA, 25 bp, Homo sapien
cagtgcacctcacaagagctcgctg

SEQ ID NO: 260207 - DNA, 25 bp, Homo sapien
ctgttgcctttagacagcaggaggg

SEQ ID NO: 260208 - DNA, 25 bp, Homo sapien
tgtgatgaggccgtgtctgttgcct

SEQ ID NO: 260209 - DNA, 25 bp, Homo sapien
ggtaggtggatgctttgatctctga

SEQ ID NO: 260210 - DNA, 25 bp, Homo sapien
tggtgctggtgtggtactcaatata

SEQ ID NO: 260211 - DNA, 25 bp, Homo sapien
agagttcatttcagacaccctggga

SEQ ID NO: 260212 - DNA, 25 bp, Homo sapien
taggtggatgctttgatctctgatc

SEQ ID NO: 260213 - DNA, 25 bp, Homo sapien
ttttgcacagacacaaacttgggtg

SEQ ID NO: 260214 - DNA, 25 bp, Homo sapien
tcttttttgcacagacacaaacttg

SEQ ID NO: 260215 - DNA, 25 bp, Homo sapien
ctgggtctgtagtcctcgtatatcc

SEQ ID NO: 260216 - DNA, 25 bp, Homo sapien
tgtagtcctcgtatatccaatgatc

SEQ ID NO: 260217 - DNA, 25 bp, Homo sapien
tctggatataaactgtattcggtga

SEQ ID NO: 260218 - DNA, 25 bp, Homo sapien
acaataattaacatggcccgacgaa

SEQ ID NO: 260219 - DNA, 25 bp, Homo sapien
ttcagtagcatcaataaggaacatg

SEQ ID NO: 260220 - DNA, 25 bp, Homo sapien
tggcccgacgaagaatgcattttgg

SEQ ID NO: 260221 - DNA, 25 bp, Homo sapien
cttaggagcagccactgagtgtgta

SEQ ID NO: 260222 - DNA, 25 bp, Homo sapien
gtcggtcaccacacagagacttagg

SEQ ID NO: 260223 - DNA, 25 bp, Homo sapien
tgctaaccctggtcgacgtcggtca

SEQ ID NO: 260224 - DNA, 25 bp, Homo sapien
ccttgtgttctcaacagcttctgct

SEQ ID NO: 260225 - DNA, 25 bp, Homo sapien
tctctgtcccgtgaaaacagataag

SEQ ID NO: 260226 - DNA, 25 bp, Homo sapien
aaacagataagtggcatctgtgacc

SEQ ID NO: 260227 - DNA, 25 bp, Homo sapien
tgtgaccatgattccaagctgcttt

SEQ ID NO: 260228 - DNA, 25 bp, Homo sapien
gcatctgtgaccatgattccaagct

SEQ ID NO: 260229 - DNA, 25 bp, Homo sapien
aaatgacccgatgatttcatgagaa

SEQ ID NO: 260230 - DNA, 25 bp, Homo sapien
ccccagaaatgacccgatgatttca

SEQ ID NO: 260231 - DNA, 25 bp, Homo sapien
tcaggccctgctaatctgcagcccc

SEQ ID NO: 260232 - DNA, 25 bp, Homo sapien
ggccctgctaatctgcagccccaga

SEQ ID NO: 260233 - DNA, 25 bp, Homo sapien
cttccacacttgctctgacagcagc

SEQ ID NO: 260234 - DNA, 25 bp, Homo sapien
cctcccattgctgagcccacaagtc

SEQ ID NO: 260235 - DNA, 25 bp, Homo sapien
cctgttctcggggagttaaggctgc

SEQ ID NO: 260236 - DNA, 25 bp, Homo sapien
gctggattaggaaaaccatccttcc

SEQ ID NO: 260237 - DNA, 25 bp, Homo sapien
gacggtctgaaggaggttcaaacag

SEQ ID NO: 260238 - DNA, 25 bp, Homo sapien
gagtggaaaaccaacgctgacggtc

SEQ ID NO: 260239 - DNA, 25 bp, Homo sapien
caaacagaggattcagttgagacca

SEQ ID NO: 260240 - DNA, 25 bp, Homo sapien
agaccttcagaacatgctgtgcagg

SEQ ID NO: 260241 - DNA, 25 bp, Homo sapien
gaattgcgattccaaaacttccacg

SEQ ID NO: 260242 - DNA, 25 bp, Homo sapien
ggaattgcgattccaaaacttccac

SEQ ID NO: 260243 - DNA, 25 bp, Homo sapien
gaggaattgcgattccaaaacttcc

SEQ ID NO: 260244 - DNA, 25 bp, Homo sapien
caggaggaattgcgattccaaaact

SEQ ID NO: 260245 - DNA, 25 bp, Homo sapien
tgcatttctggttataaaggctggt

SEQ ID NO: 260246 - DNA, 25 bp, Homo sapien
atttctggttataaaggctggttag

SEQ ID NO: 260247 - DNA, 25 bp, Homo sapien
gttgcatttctggttataaaggctg

SEQ ID NO: 260248 - DNA, 25 bp, Homo sapien
catttctggttataaaggctggtta

SEQ ID NO: 260249 - DNA, 25 bp, Homo sapien
gctcatgaatgctgtcacgggactt

SEQ ID NO: 260250 - DNA, 25 bp, Homo sapien
cattcttcttagaccgctttgctca

SEQ ID NO: 260251 - DNA, 25 bp, Homo sapien
ttagaccgctttgctcatgaatgct

SEQ ID NO: 260252 - DNA, 25 bp, Homo sapien
gggacttctcaagggccttcatggc

SEQ ID NO: 260253 - DNA, 25 bp, Homo sapien
gagcaaggtccacagagtgcattcc

SEQ ID NO: 260254 - DNA, 25 bp, Homo sapien
caaacaggcctggaatgcaatgaac

SEQ ID NO: 260255 - DNA, 25 bp, Homo sapien
acacctgttggtctgaactgagcaa

SEQ ID NO: 260256 - DNA, 25 bp, Homo sapien
agtgcattcctacaggatgctcccc

SEQ ID NO: 260257 - DNA, 25 bp, Homo sapien
gaaaggagtctgactgaaccgagcc

SEQ ID NO: 260258 - DNA, 25 bp, Homo sapien
tgaaccgagcccacctcgtgatatg

SEQ ID NO: 260259 - DNA, 25 bp, Homo sapien
tgatatgcctgcaaactactcagaa

SEQ ID NO: 260260 - DNA, 25 bp, Homo sapien
tccatgctgtcctgttataaggaaa

SEQ ID NO: 260261 - DNA, 25 bp, Homo sapien
actgggggctggagctccctcaaga

SEQ ID NO: 260262 - DNA, 25 bp, Homo sapien
ctaccaggtaggggaaggacactgg

SEQ ID NO: 260263 - DNA, 25 bp, Homo sapien
acactgggggctggagctccctcaa

SEQ ID NO: 260264 - DNA, 25 bp, Homo sapien
ggacactgggggctggagctccctc

SEQ ID NO: 260265 - DNA, 25 bp, Homo sapien
ggtgatatcaactagcatagccgtg

SEQ ID NO: 260266 - DNA, 25 bp, Homo sapien
cagctccctgaaagaaggtgatatc

SEQ ID NO: 260267 - DNA, 25 bp, Homo sapien
aagagcccctaaccacttgcatctt

SEQ ID NO: 260268 - DNA, 25 bp, Homo sapien
caggagactccttggtcttgacaca

SEQ ID NO: 260269 - DNA, 25 bp, Homo sapien
atcctggtcatggaccagataccca

SEQ ID NO: 260270 - DNA, 25 bp, Homo sapien
ccaaatcctggtcatggaccagata

SEQ ID NO: 260271 - DNA, 25 bp, Homo sapien
atacccacccggatcagccgcaggt

SEQ ID NO: 260272 - DNA, 25 bp, Homo sapien
ccacccggatcagccgcaggttctc

SEQ ID NO: 260273 - DNA, 25 bp, Homo sapien
ccaaatcctggtccttgaccagaca

SEQ ID NO: 260274 - DNA, 25 bp, Homo sapien
tggccaaatcctggtccttgaccag

SEQ ID NO: 260275 - DNA, 25 bp, Homo sapien
aaatcctggtccttgaccagacact

SEQ ID NO: 260276 - DNA, 25 bp, Homo sapien
ctatttggccaaatcctggtccttg

SEQ ID NO: 260277 - DNA, 25 bp, Homo sapien
atttctgaacatatgggccatgtct

SEQ ID NO: 260278 - DNA, 25 bp, Homo sapien
aacttctggcatttcgctgacttca

SEQ ID NO: 260279 - DNA, 25 bp, Homo sapien
gaacatatgggccatgtctctgttt

SEQ ID NO: 260280 - DNA, 25 bp, Homo sapien
tctctgttttggatgtaaaaacttc

SEQ ID NO: 260281 - DNA, 25 bp, Homo sapien
gtcggctccagccccgatggcagct

SEQ ID NO: 260282 - DNA, 25 bp, Homo sapien
ggtcggctccagccccgatggcagc

SEQ ID NO: 260283 - DNA, 25 bp, Homo sapien
catccggagatgtgctgtacacgct

SEQ ID NO: 260284 - DNA, 25 bp, Homo sapien
ctcccagcagggttggcagcctttg

SEQ ID NO: 260285 - DNA, 25 bp, Homo sapien
gcagcctttgcaacacatccggaga

SEQ ID NO: 260286 - DNA, 25 bp, Homo sapien
cacgctttgttccatccagtataca

SEQ ID NO: 260287 - DNA, 25 bp, Homo sapien
tttgagcctcgataaacagctttct

SEQ ID NO: 260288 - DNA, 25 bp, Homo sapien
gaggctctcgttcacactctcagaa

SEQ ID NO: 260289 - DNA, 25 bp, Homo sapien
tgaagttaagttggaggctctcgtt

SEQ ID NO: 260290 - DNA, 25 bp, Homo sapien
tcagatatttgagcctcgataaaca

SEQ ID NO: 260291 - DNA, 25 bp, Homo sapien
aagagctgctaaaaacaacatcaac

SEQ ID NO: 260292 - DNA, 25 bp, Homo sapien
ctaacgctggtgtgaggatggtcga

SEQ ID NO: 260293 - DNA, 25 bp, Homo sapien
gtcaaaagagctgctaaaaacaaca

SEQ ID NO: 260294 - DNA, 25 bp, Homo sapien
tgaggatggtcgagtcaaaagagct

SEQ ID NO: 260295 - DNA, 25 bp, Homo sapien
ggaggaactgcccaccactcaaaat

SEQ ID NO: 260296 - DNA, 25 bp, Homo sapien
tgtattcaggctacggggagaaagc

SEQ ID NO: 260297 - DNA, 25 bp, Homo sapien
aaatcacacccatgaggcaacctgg

SEQ ID NO: 260298 - DNA, 25 bp, Homo sapien
gaaagcgaaggtaggaggaactgcc

SEQ ID NO: 260299 - DNA, 25 bp, Homo sapien
caagagacgtctaggtgaacaccca

SEQ ID NO: 260300 - DNA, 25 bp, Homo sapien
cagcaatagcgaggaaatggcagaa

SEQ ID NO: 260301 - DNA, 25 bp, Homo sapien
cgacacatcagtaatagcccacaat

SEQ ID NO: 260302 - DNA, 25 bp, Homo sapien
gggatcctgtcttacacgacacatc

SEQ ID NO: 260303 - DNA, 25 bp, Homo sapien
cgttgggcaagccatgagtgtgaat

SEQ ID NO: 260304 - DNA, 25 bp, Homo sapien
ctttcttatttggagcacgttgggc

SEQ ID NO: 260305 - DNA, 25 bp, Homo sapien
tcattccccgtcttgattgactttc

SEQ ID NO: 260306 - DNA, 25 bp, Homo sapien
tcaggattttcgtcacgtcagtgtc

SEQ ID NO: 260307 - DNA, 25 bp, Homo sapien
cttcctactcgggagggaagtggct

SEQ ID NO: 260308 - DNA, 25 bp, Homo sapien
tccatccaggactggtctgccgtca

SEQ ID NO: 260309 - DNA, 25 bp, Homo sapien
tggtctgccgtcacttaagaggcga

SEQ ID NO: 260310 - DNA, 25 bp, Homo sapien
atttggggggcaacagagctgccac

SEQ ID NO: 260311 - DNA, 25 bp, Homo sapien
ttaagaggcgactaataaggatttg

SEQ ID NO: 260312 - DNA, 25 bp, Homo sapien
cagatatatcagggttctctctagt

SEQ ID NO: 260313 - DNA, 25 bp, Homo sapien
gagaactcagatggttccccctgga

SEQ ID NO: 260314 - DNA, 25 bp, Homo sapien
agatatatcagggttctctctagta

SEQ ID NO: 260315 - DNA, 25 bp, Homo sapien
tgttccctcctcacattgacaggac

SEQ ID NO: 260316 - DNA, 25 bp, Homo sapien
ttcagcctgatccaaacctccaagt

SEQ ID NO: 260317 - DNA, 25 bp, Homo sapien
ggctttccattacaccgtagatcta

SEQ ID NO: 260318 - DNA, 25 bp, Homo sapien
ccttccttgacgtattgtagttggc

SEQ ID NO: 260319 - DNA, 25 bp, Homo sapien
ccactcgtgaggtatacagcataac

SEQ ID NO: 260320 - DNA, 25 bp, Homo sapien
gacttaatgactgcatgtgactgcg

SEQ ID NO: 260321 - DNA, 25 bp, Homo sapien
gacctacacctagcaggaattgact

SEQ ID NO: 260322 - DNA, 25 bp, Homo sapien
agcataactgcttggtctggctgcc

SEQ ID NO: 260323 - DNA, 25 bp, Homo sapien
ccagctcgcaactgcagccctgcag

SEQ ID NO: 260324 - DNA, 25 bp, Homo sapien
aggacaaacagcccagctcgcaact

SEQ ID NO: 260325 - DNA, 25 bp, Homo sapien
aaacagcccagctcgcaactgcagc

SEQ ID NO: 260326 - DNA, 25 bp, Homo sapien
cagcccagctcgcaactgcagccct

SEQ ID NO: 260327 - DNA, 25 bp, Homo sapien
attattcgaatcagagaactacatc

SEQ ID NO: 260328 - DNA, 25 bp, Homo sapien
tacatgtcctcaaccattattcgaa

SEQ ID NO: 260329 - DNA, 25 bp, Homo sapien
aacacactcttatcagccttgcaac

SEQ ID NO: 260330 - DNA, 25 bp, Homo sapien
gccttgcaactgagccaagccgttt

SEQ ID NO: 260331 - DNA, 25 bp, Homo sapien
caagtagctctctgccgataaaggc

SEQ ID NO: 260332 - DNA, 25 bp, Homo sapien
tagctagcgttcttctgcaggtcag

SEQ ID NO: 260333 - DNA, 25 bp, Homo sapien
gaatcttacccacgtgggcttggag

SEQ ID NO: 260334 - DNA, 25 bp, Homo sapien
cctccgcagtgtgggtgaatcttac

SEQ ID NO: 260335 - DNA, 25 bp, Homo sapien
ccaatctgtctgtctgtgaggtctg

SEQ ID NO: 260336 - DNA, 25 bp, Homo sapien
tctgtgaggtctgtgctcctttttc

SEQ ID NO: 260337 - DNA, 25 bp, Homo sapien
tgttgagcccaatctgtctgtctgt

SEQ ID NO: 260338 - DNA, 25 bp, Homo sapien
gcccaatctgtctgtctgtgaggtc

SEQ ID NO: 260339 - DNA, 25 bp, Homo sapien
ttttaaagccatcatcaaaaggcaa

SEQ ID NO: 260340 - DNA, 25 bp, Homo sapien
tcttctggctactttccataagttc

SEQ ID NO: 260341 - DNA, 25 bp, Homo sapien
tccatcggtagaatgctattttctt

SEQ ID NO: 260342 - DNA, 25 bp, Homo sapien
gcatctgaagtggaattccatcggt

SEQ ID NO: 260343 - DNA, 25 bp, Homo sapien
catgtccagtgaacacgggaagcgc

SEQ ID NO: 260344 - DNA, 25 bp, Homo sapien
tctgtctctcggtcaggagtgtccc

SEQ ID NO: 260345 - DNA, 25 bp, Homo sapien
tgtaaacacgatgaagagccactaa

SEQ ID NO: 260346 - DNA, 25 bp, Homo sapien
tatctgtggtatcacaagagcagtc

SEQ ID NO: 260347 - DNA, 25 bp, Homo sapien
cagaaaacgtatttctacctgctgg

SEQ ID NO: 260348 - DNA, 25 bp, Homo sapien
tcttccggttcgtgctattccccaa

SEQ ID NO: 260349 - DNA, 25 bp, Homo sapien
tcaactcaatgacactatttggaag

SEQ ID NO: 260350 - DNA, 25 bp, Homo sapien
tttgcagtgggctgtccggatttac

SEQ ID NO: 260351 - DNA, 25 bp, Homo sapien
tctttccctccaccagtatcttgca

SEQ ID NO: 260352 - DNA, 25 bp, Homo sapien
agccgcctatgccctgagcagcctc

SEQ ID NO: 260353 - DNA, 25 bp, Homo sapien
gaccatggctcacaggcgtctttcc

SEQ ID NO: 260354 - DNA, 25 bp, Homo sapien
tgcagccgcctatgccctgagcagc

SEQ ID NO: 260355 - DNA, 25 bp, Homo sapien
gtgtgcatcctcgatcccctgaaca

SEQ ID NO: 260356 - DNA, 25 bp, Homo sapien
gcacccttggtgtgcatcctcgatc

SEQ ID NO: 260357 - DNA, 25 bp, Homo sapien
ctctgatgcacccttggtgtgcatc

SEQ ID NO: 260358 - DNA, 25 bp, Homo sapien
cttggtgtgcatcctcgatcccctg

SEQ ID NO: 260359 - DNA, 25 bp, Homo sapien
cagaggactgtccatcaagttacat

SEQ ID NO: 260360 - DNA, 25 bp, Homo sapien
gctggtatcaaaaactggccccatt

SEQ ID NO: 260361 - DNA, 25 bp, Homo sapien
tgtctctcatgaaaggccacctctc

SEQ ID NO: 260362 - DNA, 25 bp, Homo sapien
tcccagttccaaatcttgttgcagg

SEQ ID NO: 260363 - DNA, 25 bp, Homo sapien
tcttctaatgcatcccgtaagtttt

SEQ ID NO: 260364 - DNA, 25 bp, Homo sapien
ctgtgctggtttgaggtttaatttg

SEQ ID NO: 260365 - DNA, 25 bp, Homo sapien
tccctgtgagcacttcttctaatgc

SEQ ID NO: 260366 - DNA, 25 bp, Homo sapien
tatgcatgcacagcgatcaatttcc

SEQ ID NO: 260367 - DNA, 25 bp, Homo sapien
cagctgtgccccgtgcctggtcagg

SEQ ID NO: 260368 - DNA, 25 bp, Homo sapien
tcagaggacgctgagatgtcctgca

SEQ ID NO: 260369 - DNA, 25 bp, Homo sapien
ggacagcttccgcaagacatgcacg

SEQ ID NO: 260370 - DNA, 25 bp, Homo sapien
tgcacggtgaacaccccaaaggagc

SEQ ID NO: 260371 - DNA, 25 bp, Homo sapien
taagtgaagatgtgcaccaaaccaa

SEQ ID NO: 260372 - DNA, 25 bp, Homo sapien
ttcaattacaatctcctagggacac

SEQ ID NO: 260373 - DNA, 25 bp, Homo sapien
gctaagagctcgcatttcaattaca

SEQ ID NO: 260374 - DNA, 25 bp, Homo sapien
gacacagaggtattggagtcagtct

SEQ ID NO: 260375 - DNA, 25 bp, Homo sapien
atccctgtctttctggagccctcca

SEQ ID NO: 260376 - DNA, 25 bp, Homo sapien
tgtgcccactcaaatcctcgtccat

SEQ ID NO: 260377 - DNA, 25 bp, Homo sapien
cctccaagcctggtgggcatctgca

SEQ ID NO: 260378 - DNA, 25 bp, Homo sapien
tgcatctgctcccattgggtcctgt

SEQ ID NO: 260379 - DNA, 25 bp, Homo sapien
ctgccacagagaagccatcccatct

SEQ ID NO: 260380 - DNA, 25 bp, Homo sapien
ccatggttcagcagggataagattt

SEQ ID NO: 260381 - DNA, 25 bp, Homo sapien
ggcaacactgaggtcccatggttca

SEQ ID NO: 260382 - DNA, 25 bp, Homo sapien
cagcagggataagattttcaggatg

SEQ ID NO: 260383 - DNA, 25 bp, Homo sapien
gagtccgcctgagctacagtaaaca

SEQ ID NO: 260384 - DNA, 25 bp, Homo sapien
ggagtccgcctgagctacagtaaac

SEQ ID NO: 260385 - DNA, 25 bp, Homo sapien
cctggagtccgcctgagctacagta

SEQ ID NO: 260386 - DNA, 25 bp, Homo sapien
tggagtccgcctgagctacagtaaa

SEQ ID NO: 260387 - DNA, 25 bp, Homo sapien
tctgacggccttgagtccattctct

SEQ ID NO: 260388 - DNA, 25 bp, Homo sapien
cgggtaaactcatggcgagtcatgg

SEQ ID NO: 260389 - DNA, 25 bp, Homo sapien
tgctctgacggccttgagtccattc

SEQ ID NO: 260390 - DNA, 25 bp, Homo sapien
ggacctacatgcccgggtaaactca

SEQ ID NO: 260391 - DNA, 25 bp, Homo sapien
catttgtgggatgaagtgacatctt

SEQ ID NO: 260392 - DNA, 25 bp, Homo sapien
cacagctttccgtgggtgcacagct

SEQ ID NO: 260393 - DNA, 25 bp, Homo sapien
ggacatttgtgggatgaagtgacat

SEQ ID NO: 260394 - DNA, 25 bp, Homo sapien
cctggccagcacagctttccgtggg

SEQ ID NO: 260395 - DNA, 25 bp, Homo sapien
aagacccacggttttcctgcaattg

SEQ ID NO: 260396 - DNA, 25 bp, Homo sapien
agacccacggttttcctgcaattga

SEQ ID NO: 260397 - DNA, 25 bp, Homo sapien
ttcctcgaaggctttctgggatgga

SEQ ID NO: 260398 - DNA, 25 bp, Homo sapien
ctgcctgcctgaggagttactgact

SEQ ID NO: 260399 - DNA, 25 bp, Homo sapien
caggttcctcgaaggctttctggga

SEQ ID NO: 260400 - DNA, 25 bp, Homo sapien
tgacttgagcaatgagggcctccat

SEQ ID NO: 260401 - DNA, 25 bp, Homo sapien
tcaacgtggttagaacaaaagacac

SEQ ID NO: 260402 - DNA, 25 bp, Homo sapien
tcctcaaaatggagaggcttatgcc

SEQ ID NO: 260403 - DNA, 25 bp, Homo sapien
atctgaagatgtgaatttgagtccc

SEQ ID NO: 260404 - DNA, 25 bp, Homo sapien
caaggcagttgttgagtcacttaag

SEQ ID NO: 260405 - DNA, 25 bp, Homo sapien
gagctgtgcaggagcagtcatctga

SEQ ID NO: 260406 - DNA, 25 bp, Homo sapien
tgtgctcggagttgtaccactccag

SEQ ID NO: 260407 - DNA, 25 bp, Homo sapien
gggttgtgctcggagttgtaccact

SEQ ID NO: 260408 - DNA, 25 bp, Homo sapien
cctgagagggttgtgctcggagttg

SEQ ID NO: 260409 - DNA, 25 bp, Homo sapien
tgtgggcttgaggtggtggcagttg

SEQ ID NO: 260410 - DNA, 25 bp, Homo sapien
ggcagttgaggtttttgtcttgctt

SEQ ID NO: 260411 - DNA, 25 bp, Homo sapien
gtggcagttgaggtttttgtcttgc

SEQ ID NO: 260412 - DNA, 25 bp, Homo sapien
ggtggtggcagttgaggtttttgtc

SEQ ID NO: 260413 - DNA, 25 bp, Homo sapien
tcaagatttccatctgcatgacttt

SEQ ID NO: 260414 - DNA, 25 bp, Homo sapien
catctgagtccgtcaatgtggacaa

SEQ ID NO: 260415 - DNA, 25 bp, Homo sapien
tttcattctcatctgagtccgtcaa

SEQ ID NO: 260416 - DNA, 25 bp, Homo sapien
tctcatctgagtccgtcaatgtgga

SEQ ID NO: 260417 - DNA, 25 bp, Homo sapien
gagaaggtgataggccagggccagg

SEQ ID NO: 260418 - DNA, 25 bp, Homo sapien
tcagggatggcttccagagaaggtg

SEQ ID NO: 260419 - DNA, 25 bp, Homo sapien
gccaggaggtgacaggccaggacca

SEQ ID NO: 260420 - DNA, 25 bp, Homo sapien
ggagaaggaagggagcatgcagcat

SEQ ID NO: 260421 - DNA, 25 bp, Homo sapien
cagttttgtcccttgtgaatctcat

SEQ ID NO: 260422 - DNA, 25 bp, Homo sapien
gcggtattagggtcataggatcaga

SEQ ID NO: 260423 - DNA, 25 bp, Homo sapien
tcatgtgacatagcttggcagtttt

SEQ ID NO: 260424 - DNA, 25 bp, Homo sapien
caaactttagtctcaactataacta

SEQ ID NO: 260425 - DNA, 25 bp, Homo sapien
aatgactcagatgagaagggctcca

SEQ ID NO: 260426 - DNA, 25 bp, Homo sapien
gacagtttcgaatgactcagatgag

SEQ ID NO: 260427 - DNA, 25 bp, Homo sapien
tttgtctaggacagtttcgaatgac

SEQ ID NO: 260428 - DNA, 25 bp, Homo sapien
caagtgttttgtctaggacagtttc

SEQ ID NO: 260429 - DNA, 25 bp, Homo sapien
tgaagatgcccatcccagactcctt

SEQ ID NO: 260430 - DNA, 25 bp, Homo sapien
tccaggtcacagatactctctgaag

SEQ ID NO: 260431 - DNA, 25 bp, Homo sapien
ttccaaatttggtgctccacggatg

SEQ ID NO: 260432 - DNA, 25 bp, Homo sapien
tatttcaatcagtggtagtacttcc

SEQ ID NO: 260433 - DNA, 25 bp, Homo sapien
agtccgcacagccttgagtcgctct

SEQ ID NO: 260434 - DNA, 25 bp, Homo sapien
gcacagccttgagtcgctctgtttc

SEQ ID NO: 260435 - DNA, 25 bp, Homo sapien
ctctccaatatctgggcagacggcc

SEQ ID NO: 260436 - DNA, 25 bp, Homo sapien
atatctgggcagacggccaagatct

SEQ ID NO: 260437 - DNA, 25 bp, Homo sapien
gaaaaggcagacagtgatgttcttg

SEQ ID NO: 260438 - DNA, 25 bp, Homo sapien
ttctgaaactctttgtgactccaca

SEQ ID NO: 260439 - DNA, 25 bp, Homo sapien
cagacagtgatgttcttgcattttc

SEQ ID NO: 260440 - DNA, 25 bp, Homo sapien
tgtaaagtaatgagtaagcatcttc

SEQ ID NO: 260441 - DNA, 25 bp, Homo sapien
ccccaagtcgaagtcaatccattca

SEQ ID NO: 260442 - DNA, 25 bp, Homo sapien
agtcgaagtcaatccattcactgtg

SEQ ID NO: 260443 - DNA, 25 bp, Homo sapien
ctgcagttccccaagtcgaagtcaa

SEQ ID NO: 260444 - DNA, 25 bp, Homo sapien
gttccccaagtcgaagtcaatccat

SEQ ID NO: 260445 - DNA, 25 bp, Homo sapien
tctccaagcctccagatggctcctt

SEQ ID NO: 260446 - DNA, 25 bp, Homo sapien
tcaggcaaacgattttgactctcca

SEQ ID NO: 260447 - DNA, 25 bp, Homo sapien
aaacgattttgactctccaagcctc

SEQ ID NO: 260448 - DNA, 25 bp, Homo sapien
tcttagctcaggcaaacgattttga

SEQ ID NO: 260449 - DNA, 25 bp, Homo sapien
tcgggccagctaacctgcaaataaa

SEQ ID NO: 260450 - DNA, 25 bp, Homo sapien
agcacagttgacatctcgggccagc

SEQ ID NO: 260451 - DNA, 25 bp, Homo sapien
gaccgagttatagcgaaggcacttt

SEQ ID NO: 260452 - DNA, 25 bp, Homo sapien
tagctgcgcccaaagaatctggtga

SEQ ID NO: 260453 - DNA, 25 bp, Homo sapien
ggctccgtggcaggttttctctttc

SEQ ID NO: 260454 - DNA, 25 bp, Homo sapien
tgagagacaaagtttggcgggagga

SEQ ID NO: 260455 - DNA, 25 bp, Homo sapien
gtttggcgggaggatcagagaagcc

SEQ ID NO: 260456 - DNA, 25 bp, Homo sapien
ggatcagagaagcccgggctccgtg

SEQ ID NO: 260457 - DNA, 25 bp, Homo sapien
gacaggaaagaaaggcgagttagct

SEQ ID NO: 260458 - DNA, 25 bp, Homo sapien
taggtgacagtgaatgaaatagcta

SEQ ID NO: 260459 - DNA, 25 bp, Homo sapien
ggatccacacggacaggaaagaaag

SEQ ID NO: 260460 - DNA, 25 bp, Homo sapien
tgcaggttgggggtgcggatccaca

SEQ ID NO: 260461 - DNA, 25 bp, Homo sapien
tcaaccaatagccatggagctttgt

SEQ ID NO: 260462 - DNA, 25 bp, Homo sapien
gaaatcagcaccctcaaaaggccac

SEQ ID NO: 260463 - DNA, 25 bp, Homo sapien
ggagctttgtaacagttgacctggg

SEQ ID NO: 260464 - DNA, 25 bp, Homo sapien
tcccaaaggagtaatggcagcacat

SEQ ID NO: 260465 - DNA, 25 bp, Homo sapien
atactgactgccaatattttggcaa

SEQ ID NO: 260466 - DNA, 25 bp, Homo sapien
aatactgactgccaatattttggca

SEQ ID NO: 260467 - DNA, 25 bp, Homo sapien
tactgactgccaatattttggcaag

SEQ ID NO: 260468 - DNA, 25 bp, Homo sapien
ccaaggtgacaagggattctagcca

SEQ ID NO: 260469 - DNA, 25 bp, Homo sapien
tgtcttaggcttcttattaacactc

SEQ ID NO: 260470 - DNA, 25 bp, Homo sapien
tagccaagcaggaacgggtttgtgc

SEQ ID NO: 260471 - DNA, 25 bp, Homo sapien
gctgtccatcatcatgtgacctgac

SEQ ID NO: 260472 - DNA, 25 bp, Homo sapien
ttttgtcaagatcatggaggttttc

SEQ ID NO: 260473 - DNA, 25 bp, Homo sapien
cactgttccaattttgtcaagatca

SEQ ID NO: 260474 - DNA, 25 bp, Homo sapien
taaagcaaagcaggtctgtgtggga

SEQ ID NO: 260475 - DNA, 25 bp, Homo sapien
gaggttttcaagtgatggttcattg

SEQ ID NO: 260476 - DNA, 25 bp, Homo sapien
catgaggagctcgatggcatcagtg

SEQ ID NO: 260477 - DNA, 25 bp, Homo sapien
tggcatcagtgatgaggaagcccat

SEQ ID NO: 260478 - DNA, 25 bp, Homo sapien
tcactggcagggtcctgtctaccca

SEQ ID NO: 260479 - DNA, 25 bp, Homo sapien
gaagagggtgagagctgttcatccc

SEQ ID NO: 260480 - DNA, 25 bp, Homo sapien
cactttggtgttttagctattttgg

SEQ ID NO: 260481 - DNA, 25 bp, Homo sapien
ttggtgttttagctattttggccca

SEQ ID NO: 260482 - DNA, 25 bp, Homo sapien
tggtgttttagctattttggcccat

SEQ ID NO: 260483 - DNA, 25 bp, Homo sapien
cctctccagagctcatccgtgagga

SEQ ID NO: 260484 - DNA, 25 bp, Homo sapien
tctccagagctcatccgtgaggaaa

SEQ ID NO: 260485 - DNA, 25 bp, Homo sapien
agctcatccgtgaggaaagcgttgc

SEQ ID NO: 260486 - DNA, 25 bp, Homo sapien
cagagctcatccgtgaggaaagcgt

SEQ ID NO: 260487 - DNA, 25 bp, Homo sapien
tcccatgtaaataaacgcggaggag

SEQ ID NO: 260488 - DNA, 25 bp, Homo sapien
catgtaaataaacgcggaggagcag

SEQ ID NO: 260489 - DNA, 25 bp, Homo sapien
tcacggcgacaagcactgcttccca

SEQ ID NO: 260490 - DNA, 25 bp, Homo sapien
cttcccatgtaaataaacgcggagg

SEQ ID NO: 260491 - DNA, 25 bp, Homo sapien
gcagctttgtgcataggactctata

SEQ ID NO: 260492 - DNA, 25 bp, Homo sapien
gctgtttctacacacggagtgataa

SEQ ID NO: 260493 - DNA, 25 bp, Homo sapien
tagagaagttcaagtgtccgaaacc

SEQ ID NO: 260494 - DNA, 25 bp, Homo sapien
cggagaaggctgaacatctacccta

SEQ ID NO: 260495 - DNA, 25 bp, Homo sapien
caagttctcccttattaatgtactg

SEQ ID NO: 260496 - DNA, 25 bp, Homo sapien
gcaaagagaataacatagagacttg

SEQ ID NO: 260497 - DNA, 25 bp, Homo sapien
caaagagaataacatagagacttgt

SEQ ID NO: 260498 - DNA, 25 bp, Homo sapien
tgccaagttctcccttattaatgta

SEQ ID NO: 260499 - DNA, 25 bp, Homo sapien
ggagccagcctattatgtcaaatgt

SEQ ID NO: 260500 - DNA, 25 bp, Homo sapien
gagccagcctattatgtcaaatgtc

SEQ ID NO: 260501 - DNA, 25 bp, Homo sapien
attctcatccttatttgcactattt

SEQ ID NO: 260502 - DNA, 25 bp, Homo sapien
tttgtactgtgtacatcatcagtct

SEQ ID NO: 260503 - DNA, 25 bp, Homo sapien
catcatcagtcttagcgcatctcca

SEQ ID NO: 260504 - DNA, 25 bp, Homo sapien
cagtcttagcgcatctccatccttg

SEQ ID NO: 260505 - DNA, 25 bp, Homo sapien
agaaatccgtaattttattctcagc

SEQ ID NO: 260506 - DNA, 25 bp, Homo sapien
aagtgcgtgtgtccattatggagaa

SEQ ID NO: 260507 - DNA, 25 bp, Homo sapien
aacaaaaagtgcgtgtgtccattat

SEQ ID NO: 260508 - DNA, 25 bp, Homo sapien
gtgtccattatggagaaatccgtaa

SEQ ID NO: 260509 - DNA, 25 bp, Homo sapien
cagaagatccttctgtgaagaagca

SEQ ID NO: 260510 - DNA, 25 bp, Homo sapien
agcataaacgaacaattttgactca

SEQ ID NO: 260511 - DNA, 25 bp, Homo sapien
tccttctgtgaagaagcataaacga

SEQ ID NO: 260512 - DNA, 25 bp, Homo sapien
gaagaagcataaacgaacaattttg

SEQ ID NO: 260513 - DNA, 25 bp, Homo sapien
taagtaactgcacaacgagggtttc

SEQ ID NO: 260514 - DNA, 25 bp, Homo sapien
ggcaggtcaccagcaaatgtctata

SEQ ID NO: 260515 - DNA, 25 bp, Homo sapien
gaaaagctaagttgaggaatctccc

SEQ ID NO: 260516 - DNA, 25 bp, Homo sapien
gaatgtccagattgctgcaggccac

SEQ ID NO: 260517 - DNA, 25 bp, Homo sapien
gcacttgatgcctgggtctggactc

SEQ ID NO: 260518 - DNA, 25 bp, Homo sapien
cttttgttcctaggcattgtctcca

SEQ ID NO: 260519 - DNA, 25 bp, Homo sapien
aaacacaaccttggatgcgtcatcg

SEQ ID NO: 260520 - DNA, 25 bp, Homo sapien
tttccaaatgctacggccagctctg

SEQ ID NO: 260521 - DNA, 25 bp, Homo sapien
tgacagaggccagaacacgtggcta

SEQ ID NO: 260522 - DNA, 25 bp, Homo sapien
gaatgagaccctacagtgacgaaga

SEQ ID NO: 260523 - DNA, 25 bp, Homo sapien
tcatacagtacaaaacaacgtggag

SEQ ID NO: 260524 - DNA, 25 bp, Homo sapien
tatttgacaagtagaggcacatctc

SEQ ID NO: 260525 - DNA, 25 bp, Homo sapien
gctctaagatgtaggcttcagcatc

SEQ ID NO: 260526 - DNA, 25 bp, Homo sapien
aaacaccagatccttcgtaacaagc

SEQ ID NO: 260527 - DNA, 25 bp, Homo sapien
aatcttctattcctacaaacaccag

SEQ ID NO: 260528 - DNA, 25 bp, Homo sapien
cagtacttagaagaattgggccacc

SEQ ID NO: 260529 - DNA, 25 bp, Homo sapien
tattaggtgcttggaatcaaaccac

SEQ ID NO: 260530 - DNA, 25 bp, Homo sapien
tgtgtcctcgccacctatacagtgc

SEQ ID NO: 260531 - DNA, 25 bp, Homo sapien
tactttgcctatcattgtgtcctcg

SEQ ID NO: 260532 - DNA, 25 bp, Homo sapien
tagaatgtaagctatccaaaagtag

SEQ ID NO: 260533 - DNA, 25 bp, Homo sapien
tcctttgatttacaatagctgctct

SEQ ID NO: 260534 - DNA, 25 bp, Homo sapien
gatcctttgatttacaatagctgct

SEQ ID NO: 260535 - DNA, 25 bp, Homo sapien
atcctttgatttacaatagctgctc

SEQ ID NO: 260536 - DNA, 25 bp, Homo sapien
gctgacctgcgatgtgacagactgg

SEQ ID NO: 260537 - DNA, 25 bp, Homo sapien
tatcagtccaacgaatgacagagga

SEQ ID NO: 260538 - DNA, 25 bp, Homo sapien
taggattcccctggcaacttcagtt

SEQ ID NO: 260539 - DNA, 25 bp, Homo sapien
gacagactggcaaggcctgaatcct

SEQ ID NO: 260540 - DNA, 25 bp, Homo sapien
gtctgataatgggtccataacaaac

SEQ ID NO: 260541 - DNA, 25 bp, Homo sapien
ttagtgttcagtctgataatgggtc

SEQ ID NO: 260542 - DNA, 25 bp, Homo sapien
ttcagtctgataatgggtccataac

SEQ ID NO: 260543 - DNA, 25 bp, Homo sapien
tgttcagtctgataatgggtccata

SEQ ID NO: 260544 - DNA, 25 bp, Homo sapien
gtgcacggcttgttccaaagctgat

SEQ ID NO: 260545 - DNA, 25 bp, Homo sapien
agtgcacggcttgttccaaagctga

SEQ ID NO: 260546 - DNA, 25 bp, Homo sapien
cagtgcacggcttgttccaaagctg

SEQ ID NO: 260547 - DNA, 25 bp, Homo sapien
gccagtgcacggcttgttccaaagc

SEQ ID NO: 260548 - DNA, 25 bp, Homo sapien
ttccacacatgacggtttccattgc

SEQ ID NO: 260549 - DNA, 25 bp, Homo sapien
tatttgaactgaactgccttattcc

SEQ ID NO: 260550 - DNA, 25 bp, Homo sapien
gtgctgtccaccgtacagatcccca

SEQ ID NO: 260551 - DNA, 25 bp, Homo sapien
ggacacatcctcatatttgaactga

SEQ ID NO: 260552 - DNA, 25 bp, Homo sapien
cacttggagctgctcgaacttcaaa

SEQ ID NO: 260553 - DNA, 25 bp, Homo sapien
tcaaacgcaaagcagcttcaaatcc

SEQ ID NO: 260554 - DNA, 25 bp, Homo sapien
ctcgaacttcaaacgcaaagcagct

SEQ ID NO: 260555 - DNA, 25 bp, Homo sapien
gagctgctcgaacttcaaacgcaaa

SEQ ID NO: 260556 - DNA, 25 bp, Homo sapien
cctaaatgtgtcgaatgtaaagtct

SEQ ID NO: 260557 - DNA, 25 bp, Homo sapien
catctgacataaattcccattgcag

SEQ ID NO: 260558 - DNA, 25 bp, Homo sapien
tgtaaagtctttatcagactcttct

SEQ ID NO: 260559 - DNA, 25 bp, Homo sapien
gttgtatgactgttttttgcattac

SEQ ID NO: 260560 - DNA, 25 bp, Homo sapien
taagcacccactttacttagacgct

SEQ ID NO: 260561 - DNA, 25 bp, Homo sapien
tagacgctcagattcatgtttgttc

SEQ ID NO: 260562 - DNA, 25 bp, Homo sapien
taaacattgatggatcatacttctg

SEQ ID NO: 260563 - DNA, 25 bp, Homo sapien
atacttctgttactcttatatgcag

SEQ ID NO: 260564 - DNA, 25 bp, Homo sapien
aattcttctatttgcaccagtactt

SEQ ID NO: 260565 - DNA, 25 bp, Homo sapien
gaggaaatggattcataatgaggca

SEQ ID NO: 260566 - DNA, 25 bp, Homo sapien
taatgaggcactgcattttggaagg

SEQ ID NO: 260567 - DNA, 25 bp, Homo sapien
gaaggtgttgtctctaacaataaaa

SEQ ID NO: 260568 - DNA, 25 bp, Homo sapien
tcagccccatagttcacaaatgtga

SEQ ID NO: 260569 - DNA, 25 bp, Homo sapien
gaggaatcatgctgccagaatgtag

SEQ ID NO: 260570 - DNA, 25 bp, Homo sapien
ctgtgattgtcgctttgctgtgggt

SEQ ID NO: 260571 - DNA, 25 bp, Homo sapien
tgccagaatgtaggctgtcagcccc

SEQ ID NO: 260572 - DNA, 25 bp, Homo sapien
tactccatttgcatgactgggccat

SEQ ID NO: 260573 - DNA, 25 bp, Homo sapien
ggtgcaacaccaaagcttctactcc

SEQ ID NO: 260574 - DNA, 25 bp, Homo sapien
tacaggtaatgacccacagtatctg

SEQ ID NO: 260575 - DNA, 25 bp, Homo sapien
tctgacattcgtgtgggtgcaacac

SEQ ID NO: 260576 - DNA, 25 bp, Homo sapien
gtttactgaatgttcccctctctga

SEQ ID NO: 260577 - DNA, 25 bp, Homo sapien
agtccaattgcccagtttactgaat

SEQ ID NO: 260578 - DNA, 25 bp, Homo sapien
tgatttgctctcagttgagctcacc

SEQ ID NO: 260579 - DNA, 25 bp, Homo sapien
ctgatttgctctcagttgagctcac

SEQ ID NO: 260580 - DNA, 25 bp, Homo sapien
aattgttcgtgtcgtcaggcctcag

SEQ ID NO: 260581 - DNA, 25 bp, Homo sapien
tgggaattgttcgtgtcgtcaggcc

SEQ ID NO: 260582 - DNA, 25 bp, Homo sapien
gttcgtgtcgtcaggcctcagttcc

SEQ ID NO: 260583 - DNA, 25 bp, Homo sapien
gagcttgggaattgttcgtgtcgtc

SEQ ID NO: 260584 - DNA, 25 bp, Homo sapien
ggcttacaccagacagctgaaggag

SEQ ID NO: 260585 - DNA, 25 bp, Homo sapien
aggaggcatgcagaaggcggcgatg

SEQ ID NO: 260586 - DNA, 25 bp, Homo sapien
caaggatgagggcttacaccagaca

SEQ ID NO: 260587 - DNA, 25 bp, Homo sapien
gatgagggcttacaccagacagctg

SEQ ID NO: 260588 - DNA, 25 bp, Homo sapien
tccatgagctctctggctatggctg

SEQ ID NO: 260589 - DNA, 25 bp, Homo sapien
tctttctcgtgctgtgactggtact

SEQ ID NO: 260590 - DNA, 25 bp, Homo sapien
ctttgtagacagtaagtaaagtctt

SEQ ID NO: 260591 - DNA, 25 bp, Homo sapien
caaagcatccatgagctctctggct

SEQ ID NO: 260592 - DNA, 25 bp, Homo sapien
aagtcatgaaccaggtagcactcag

SEQ ID NO: 260593 - DNA, 25 bp, Homo sapien
aataagtcatgaaccaggtagcact

SEQ ID NO: 260594 - DNA, 25 bp, Homo sapien
agaataagtcatgaaccaggtagca

SEQ ID NO: 260595 - DNA, 25 bp, Homo sapien
taagtcatgaaccaggtagcactca

SEQ ID NO: 260596 - DNA, 25 bp, Homo sapien
ctttgctgttggtcaaggtcctcca

SEQ ID NO: 260597 - DNA, 25 bp, Homo sapien
ggtcaaggtcctccagggcgtactg

SEQ ID NO: 260598 - DNA, 25 bp, Homo sapien
caaggtcctccagggcgtactgcat

SEQ ID NO: 260599 - DNA, 25 bp, Homo sapien
tgttggtcaaggtcctccagggcgt

SEQ ID NO: 260600 - DNA, 25 bp, Homo sapien
gctcttggtttagactcattccctt

SEQ ID NO: 260601 - DNA, 25 bp, Homo sapien
ttagattgaacatgatggtaggctc

SEQ ID NO: 260602 - DNA, 25 bp, Homo sapien
catgatggtaggctcttggtttaga

SEQ ID NO: 260603 - DNA, 25 bp, Homo sapien
tcctatttagattgaacatgatggt

SEQ ID NO: 260604 - DNA, 25 bp, Homo sapien
tctgagttggaagccttcagcaggt

SEQ ID NO: 260605 - DNA, 25 bp, Homo sapien
ctgagttggaagccttcagcaggtt

SEQ ID NO: 260606 - DNA, 25 bp, Homo sapien
gtacacgggaacctgcagaggcgct

SEQ ID NO: 260607 - DNA, 25 bp, Homo sapien
aatgcaggattttccgcgtcagagg

SEQ ID NO: 260608 - DNA, 25 bp, Homo sapien
gaggactgccactaagtacacggga

SEQ ID NO: 260609 - DNA, 25 bp, Homo sapien
cctgcagaggcgctggtagtccgat

SEQ ID NO: 260610 - DNA, 25 bp, Homo sapien
cagggtgagatgtgatcctccactt

SEQ ID NO: 260611 - DNA, 25 bp, Homo sapien
aggagtaccggccaggcactttgca

SEQ ID NO: 260612 - DNA, 25 bp, Homo sapien
gagtatataccaccaacataatgtg

SEQ ID NO: 260613 - DNA, 25 bp, Homo sapien
catagctcgcacttgcagggtgaga

SEQ ID NO: 260614 - DNA, 25 bp, Homo sapien
tgctgccaaccctccagagttcagt

SEQ ID NO: 260615 - DNA, 25 bp, Homo sapien
tatggacacctgctctctaatctct

SEQ ID NO: 260616 - DNA, 25 bp, Homo sapien
taactgtccccttgagtatggacac

SEQ ID NO: 260617 - DNA, 25 bp, Homo sapien
ggacatccagctctgcaaataactg

SEQ ID NO: 260618 - DNA, 25 bp, Homo sapien
ctggcatatcccagtgacagcagcg

SEQ ID NO: 260619 - DNA, 25 bp, Homo sapien
cactgaattttggtgagggccgggt

SEQ ID NO: 260620 - DNA, 25 bp, Homo sapien
gcatatcccagtgacagcagcggct

SEQ ID NO: 260621 - DNA, 25 bp, Homo sapien
catcctgtgtcaggcatctgttgcc

SEQ ID NO: 260622 - DNA, 25 bp, Homo sapien
ctaagtggtcgatggcttgatcagc

SEQ ID NO: 260623 - DNA, 25 bp, Homo sapien
tcgatggcttgatcagctttgggtc

SEQ ID NO: 260624 - DNA, 25 bp, Homo sapien
gggtctcgtaagcatcactttgatg

SEQ ID NO: 260625 - DNA, 25 bp, Homo sapien
acagagagtgcctgcagaatctaag

SEQ ID NO: 260626 - DNA, 25 bp, Homo sapien
gatcaccagctgatttacctgcagt

SEQ ID NO: 260627 - DNA, 25 bp, Homo sapien
gatttacctgcagtgtgctgtacag

SEQ ID NO: 260628 - DNA, 25 bp, Homo sapien
tcatttgtgtattcgatgatcacca

SEQ ID NO: 260629 - DNA, 25 bp, Homo sapien
ctgcagtgtgctgtacagagggcct

SEQ ID NO: 260630 - DNA, 25 bp, Homo sapien
ttaggaagatctcgctgcagctgtg

SEQ ID NO: 260631 - DNA, 25 bp, Homo sapien
aggaagatctcgctgcagctgtgtg

SEQ ID NO: 260632 - DNA, 25 bp, Homo sapien
actttaggaagatctcgctgcagct

SEQ ID NO: 260633 - DNA, 25 bp, Homo sapien
tttaggaagatctcgctgcagctgt

SEQ ID NO: 260634 - DNA, 25 bp, Homo sapien
catcccattctcacatcctgaagaa

SEQ ID NO: 260635 - DNA, 25 bp, Homo sapien
tgccaacatggcgtgagggcaccat

SEQ ID NO: 260636 - DNA, 25 bp, Homo sapien
catcactagtgggagcagtgatgct

SEQ ID NO: 260637 - DNA, 25 bp, Homo sapien
gggacacaggtaaccacataagcag

SEQ ID NO: 260638 - DNA, 25 bp, Homo sapien
gatgcagcggcttagcgatgccaag

SEQ ID NO: 260639 - DNA, 25 bp, Homo sapien
tctgtgtggatctgaggccacaggc

SEQ ID NO: 260640 - DNA, 25 bp, Homo sapien
ccacaggcagggtagcttaaaggtt

SEQ ID NO: 260641 - DNA, 25 bp, Homo sapien
taatcgtatcaggattggtcccgag

SEQ ID NO: 260642 - DNA, 25 bp, Homo sapien
ggaacctcccacagatgcgtcttga

SEQ ID NO: 260643 - DNA, 25 bp, Homo sapien
gggttctgcagtcccgttccatggg

SEQ ID NO: 260644 - DNA, 25 bp, Homo sapien
cagcagtgctgccaaatgtcttgag

SEQ ID NO: 260645 - DNA, 25 bp, Homo sapien
ttctgagttgaacgtccacgtcagc

SEQ ID NO: 260646 - DNA, 25 bp, Homo sapien
ccacttctgcactgtcctatggcaa

SEQ ID NO: 260647 - DNA, 25 bp, Homo sapien
taaaggtgagtggattccttccctc

SEQ ID NO: 260648 - DNA, 25 bp, Homo sapien
tctaatgccttggacagaccgtcgg

SEQ ID NO: 260649 - DNA, 25 bp, Homo sapien
cagcagtcagtactgtaaaggtgag

SEQ ID NO: 260650 - DNA, 25 bp, Homo sapien
taactactcaagatagcaggagctg

SEQ ID NO: 260651 - DNA, 25 bp, Homo sapien
taggtgctccttgtgtaactactca

SEQ ID NO: 260652 - DNA, 25 bp, Homo sapien
cagacgccaggtcaaaactgatcag

SEQ ID NO: 260653 - DNA, 25 bp, Homo sapien
gagctgaggatcgaccgccctttat

SEQ ID NO: 260654 - DNA, 25 bp, Homo sapien
ctatctttaattcccgaagtgctcc

SEQ ID NO: 260655 - DNA, 25 bp, Homo sapien
tctatctttaattcccgaagtgctc

SEQ ID NO: 260656 - DNA, 25 bp, Homo sapien
aactctatctttaattcccgaagtg

SEQ ID NO: 260657 - DNA, 25 bp, Homo sapien
actctatctttaattcccgaagtgc

SEQ ID NO: 260658 - DNA, 25 bp, Homo sapien
gcaaccctacttggttggcagtccc

SEQ ID NO: 260659 - DNA, 25 bp, Homo sapien
ctggcaaccctacttggttggcagt

SEQ ID NO: 260660 - DNA, 25 bp, Homo sapien
accctacttggttggcagtcccacg

SEQ ID NO: 260661 - DNA, 25 bp, Homo sapien
ccctacttggttggcagtcccacgt

SEQ ID NO: 260662 - DNA, 25 bp, Homo sapien
tgctgtcaagatggttaaacacaaa

SEQ ID NO: 260663 - DNA, 25 bp, Homo sapien
aataaagcaaagacacgaaaaatat

SEQ ID NO: 260664 - DNA, 25 bp, Homo sapien
taaagcaaagacacgaaaaatatat

SEQ ID NO: 260665 - DNA, 25 bp, Homo sapien
ttctgctgtcaagatggttaaacac

SEQ ID NO: 260666 - DNA, 25 bp, Homo sapien
ctgtagagtctcttagtctgaggca

SEQ ID NO: 260667 - DNA, 25 bp, Homo sapien
cagcaggcgcatcacaattgtcaga

SEQ ID NO: 260668 - DNA, 25 bp, Homo sapien
tgactcgcacagtgacagcaggcgc

SEQ ID NO: 260669 - DNA, 25 bp, Homo sapien
cattgatagatgaccctgactcgca

SEQ ID NO: 260670 - DNA, 25 bp, Homo sapien
tgttgtaaatgctaaggacagaagg

SEQ ID NO: 260671 - DNA, 25 bp, Homo sapien
gcgacaagaacaagggtcctctgcc

SEQ ID NO: 260672 - DNA, 25 bp, Homo sapien
cttgttctgtctgcccgatggtacc

SEQ ID NO: 260673 - DNA, 25 bp, Homo sapien
tgtctgcccgatggtacctgttgta

SEQ ID NO: 260674 - DNA, 25 bp, Homo sapien
gaagaatttgcttcaccaggcctag

SEQ ID NO: 260675 - DNA, 25 bp, Homo sapien
gtagttccaggcatagcaccttgtc

SEQ ID NO: 260676 - DNA, 25 bp, Homo sapien
ccaggcctagtacttgggtatagag

SEQ ID NO: 260677 - DNA, 25 bp, Homo sapien
tgtccaagtcattatcccagagctg

SEQ ID NO: 260678 - DNA, 25 bp, Homo sapien
ttttagttcatccagacctttttgc

SEQ ID NO: 260679 - DNA, 25 bp, Homo sapien
tgcaagtctctagtgcttttaacag

SEQ ID NO: 260680 - DNA, 25 bp, Homo sapien
tctgcaagtctctagtgcttttaac

SEQ ID NO: 260681 - DNA, 25 bp, Homo sapien
caagtctctagtgcttttaacagta

SEQ ID NO: 260682 - DNA, 25 bp, Homo sapien
taatacagtctggtagcccacgttc

SEQ ID NO: 260683 - DNA, 25 bp, Homo sapien
agtctggtagcccacgttccactgc

SEQ ID NO: 260684 - DNA, 25 bp, Homo sapien
ttattaatacagtctggtagcccac

SEQ ID NO: 260685 - DNA, 25 bp, Homo sapien
atacagtctggtagcccacgttcca

SEQ ID NO: 260686 - DNA, 25 bp, Homo sapien
tgttctgggaatctgtctgtaggaa

SEQ ID NO: 260687 - DNA, 25 bp, Homo sapien
gaaaatacttggctatgtttatccg

SEQ ID NO: 260688 - DNA, 25 bp, Homo sapien
aaaacccttggatgtagtgtagatg

SEQ ID NO: 260689 - DNA, 25 bp, Homo sapien
atccgagtgaaattagaaagagctg

SEQ ID NO: 260690 - DNA, 25 bp, Homo sapien
tgtttgcagtgcctttctctgggtc

SEQ ID NO: 260691 - DNA, 25 bp, Homo sapien
taatttccagtgtttgcattcccag

SEQ ID NO: 260692 - DNA, 25 bp, Homo sapien
ctctcacctgcaccatattccctca

SEQ ID NO: 260693 - DNA, 25 bp, Homo sapien
tctctgggtcttgccttaatttcca

SEQ ID NO: 260694 - DNA, 25 bp, Homo sapien
ttgctattactagggtcaggaactt

SEQ ID NO: 260695 - DNA, 25 bp, Homo sapien
gctattactagggtcaggaactttc

SEQ ID NO: 260696 - DNA, 25 bp, Homo sapien
atttttgctattactagggtcagga

SEQ ID NO: 260697 - DNA, 25 bp, Homo sapien
ttttgctattactagggtcaggaac

SEQ ID NO: 260698 - DNA, 25 bp, Homo sapien
tcactttctatattttgtcatattt

SEQ ID NO: 260699 - DNA, 25 bp, Homo sapien
cactttctatattttgtcatatttc

SEQ ID NO: 260700 - DNA, 25 bp, Homo sapien
tatacggagacactgtttgttgctc

SEQ ID NO: 260701 - DNA, 25 bp, Homo sapien
tgatagccacattcatgcctgtata

SEQ ID NO: 260702 - DNA, 25 bp, Homo sapien
gcctgtatacggagacactgtttgt

SEQ ID NO: 260703 - DNA, 25 bp, Homo sapien
ttcatgcctgtatacggagacactg

SEQ ID NO: 260704 - DNA, 25 bp, Homo sapien
tacaaggcatgtttcagcgggctca

SEQ ID NO: 260705 - DNA, 25 bp, Homo sapien
cagcttgagcgtagtgcagatcttc

SEQ ID NO: 260706 - DNA, 25 bp, Homo sapien
cagctcaaaggaagaaggtacgggc

SEQ ID NO: 260707 - DNA, 25 bp, Homo sapien
tcatccaggagacgagaagacgagt

SEQ ID NO: 260708 - DNA, 25 bp, Homo sapien
agtgacaaccaccaagaagcctttc

SEQ ID NO: 260709 - DNA, 25 bp, Homo sapien
gagccagttatcgacccgtaaggag

SEQ ID NO: 260710 - DNA, 25 bp, Homo sapien
caagaagcctttctatcgagccagt

SEQ ID NO: 260711 - DNA, 25 bp, Homo sapien
gagtgatgagcacaggacacgcctt

SEQ ID NO: 260712 - DNA, 25 bp, Homo sapien
aaagctcaagagcatagcgccggga

SEQ ID NO: 260713 - DNA, 25 bp, Homo sapien
aacagattgtgccagtctgatgcca

SEQ ID NO: 260714 - DNA, 25 bp, Homo sapien
catgccggcggacaagtcccttgaa

SEQ ID NO: 260715 - DNA, 25 bp, Homo sapien
cagtttacactggttaaggattgct

SEQ ID NO: 260716 - DNA, 25 bp, Homo sapien
gggaagattaacctcacagcagcct

SEQ ID NO: 260717 - DNA, 25 bp, Homo sapien
cccaaggcactggattgaattctga

SEQ ID NO: 260718 - DNA, 25 bp, Homo sapien
tatggcacatctggatggtacccac

SEQ ID NO: 260719 - DNA, 25 bp, Homo sapien
cactctatattgcagccccaagggc

SEQ ID NO: 260720 - DNA, 25 bp, Homo sapien
ctaagagtgggtcctggagagccag

SEQ ID NO: 260721 - DNA, 25 bp, Homo sapien
tttactaagagtgggtcctggagag

SEQ ID NO: 260722 - DNA, 25 bp, Homo sapien
tactaagagtgggtcctggagagcc

SEQ ID NO: 260723 - DNA, 25 bp, Homo sapien
gtttactaagagtgggtcctggaga

SEQ ID NO: 260724 - DNA, 25 bp, Homo sapien
agaggctttttgaagtgggaatgag

SEQ ID NO: 260725 - DNA, 25 bp, Homo sapien
caagaggctttttgaagtgggaatg

SEQ ID NO: 260726 - DNA, 25 bp, Homo sapien
acaagaggctttttgaagtgggaat

SEQ ID NO: 260727 - DNA, 25 bp, Homo sapien
cacaagaggctttttgaagtgggaa

SEQ ID NO: 260728 - DNA, 25 bp, Homo sapien
cagcatgctgttatgggcccagggt

SEQ ID NO: 260729 - DNA, 25 bp, Homo sapien
gatacagttacagggatcacacttc

SEQ ID NO: 260730 - DNA, 25 bp, Homo sapien
tatgcagccaaagccggaatacggg

SEQ ID NO: 260731 - DNA, 25 bp, Homo sapien
agtgttactaggaccctggccggag

SEQ ID NO: 260732 - DNA, 25 bp, Homo sapien
cagttctggaccatcgcagatcgct

SEQ ID NO: 260733 - DNA, 25 bp, Homo sapien
ttccgtcgcgatccccaggaatggg

SEQ ID NO: 260734 - DNA, 25 bp, Homo sapien
tcgcagatcgcttcttgagatccat

SEQ ID NO: 260735 - DNA, 25 bp, Homo sapien
ggaatgggcccactcttgcagttct

SEQ ID NO: 260736 - DNA, 25 bp, Homo sapien
acaaaacgtcagctctgcaaagcaa

SEQ ID NO: 260737 - DNA, 25 bp, Homo sapien
agcaagcccggctcttcatagaaac

SEQ ID NO: 260738 - DNA, 25 bp, Homo sapien
cttcaataacaaaacgtcagctctg

SEQ ID NO: 260739 - DNA, 25 bp, Homo sapien
agtgaaaatgcctctccaaattcca

SEQ ID NO: 260740 - DNA, 25 bp, Homo sapien
ccgtttctttagataggtctgagta

SEQ ID NO: 260741 - DNA, 25 bp, Homo sapien
cagcacctcaggtgcataatgcatt

SEQ ID NO: 260742 - DNA, 25 bp, Homo sapien
ttgaggtaattcacactcaaccgtt

SEQ ID NO: 260743 - DNA, 25 bp, Homo sapien
gcacctcaggtgcataatgcatttc

SEQ ID NO: 260744 - DNA, 25 bp, Homo sapien
gcacaaactggccactgacaaaaat

SEQ ID NO: 260745 - DNA, 25 bp, Homo sapien
actggccactgacaaaaatgacccc

SEQ ID NO: 260746 - DNA, 25 bp, Homo sapien
aactggccactgacaaaaatgaccc

SEQ ID NO: 260747 - DNA, 25 bp, Homo sapien
caaactggccactgacaaaaatgac

SEQ ID NO: 260748 - DNA, 25 bp, Homo sapien
gaccagtttgacgttaatgtgacag

SEQ ID NO: 260749 - DNA, 25 bp, Homo sapien
cctgtgcaggttgctttggcactaa

SEQ ID NO: 260750 - DNA, 25 bp, Homo sapien
gaaagcaacatctccacatatggtg

SEQ ID NO: 260751 - DNA, 25 bp, Homo sapien
gagaatgatgccaaagccctcaatg

SEQ ID NO: 260752 - DNA, 25 bp, Homo sapien
tttactgaggcagccccaagcctgt

SEQ ID NO: 260753 - DNA, 25 bp, Homo sapien
tatggcatgcctgaagactcggaca

SEQ ID NO: 260754 - DNA, 25 bp, Homo sapien
gattcaacatcgtcttaactatggc

SEQ ID NO: 260755 - DNA, 25 bp, Homo sapien
tgtgcaaatctgtcgacaacttctc

SEQ ID NO: 260756 - DNA, 25 bp, Homo sapien
tcctggacatgctggaatttaaaca

SEQ ID NO: 260757 - DNA, 25 bp, Homo sapien
gcaagcttttcgatctcctggacat

SEQ ID NO: 260758 - DNA, 25 bp, Homo sapien
atcaagccggtacagccctgcatgt

SEQ ID NO: 260759 - DNA, 25 bp, Homo sapien
taaacaggtggcaatcttcatcaag

SEQ ID NO: 260760 - DNA, 25 bp, Homo sapien
gcagaagcagtgaatcatgttcagt

SEQ ID NO: 260761 - DNA, 25 bp, Homo sapien
atgacgagaccaagcgcacgctgca

SEQ ID NO: 260762 - DNA, 25 bp, Homo sapien
cagtgaatcatgttcagtgccaccc

SEQ ID NO: 260763 - DNA, 25 bp, Homo sapien
gatgtgtttgtggatgacgagacca

SEQ ID NO: 260764 - DNA, 25 bp, Homo sapien
tcagcaaggagtgagaatgagcact

SEQ ID NO: 260765 - DNA, 25 bp, Homo sapien
gagctggccttccagatcagcaagg

SEQ ID NO: 260766 - DNA, 25 bp, Homo sapien
tgtcaactgacaggtgacggtcctg

SEQ ID NO: 260767 - DNA, 25 bp, Homo sapien
accccgggttggatcgtggcacttg

SEQ ID NO: 260768 - DNA, 25 bp, Homo sapien
tgggtatggacatccagtgccaagc

SEQ ID NO: 260769 - DNA, 25 bp, Homo sapien
tatggacatccagtgccaagccaaa

SEQ ID NO: 260770 - DNA, 25 bp, Homo sapien
ggtatggacatccagtgccaagcca

SEQ ID NO: 260771 - DNA, 25 bp, Homo sapien
cctgggtatggacatccagtgccaa

SEQ ID NO: 260772 - DNA, 25 bp, Homo sapien
gggactttctgctgcaactggagct

SEQ ID NO: 260773 - DNA, 25 bp, Homo sapien
ttagcaactgcatgccctcgtggca

SEQ ID NO: 260774 - DNA, 25 bp, Homo sapien
ttatgaagaagagccctaggcgtct

SEQ ID NO: 260775 - DNA, 25 bp, Homo sapien
taggcgtctccagggagcactctgg

SEQ ID NO: 260776 - DNA, 25 bp, Homo sapien
agcactctggttccccgtaagaaag

SEQ ID NO: 260777 - DNA, 25 bp, Homo sapien
ttcctgcatacaggccagatctctt

SEQ ID NO: 260778 - DNA, 25 bp, Homo sapien
catgggatcctgcatagacttcctg

SEQ ID NO: 260779 - DNA, 25 bp, Homo sapien
gcatagacttcctgcatacaggcca

SEQ ID NO: 260780 - DNA, 25 bp, Homo sapien
ctgcaggtgcgtgcagcgtgcgctt

SEQ ID NO: 260781 - DNA, 25 bp, Homo sapien
cgtgtcacttcaccccagaatggag

SEQ ID NO: 260782 - DNA, 25 bp, Homo sapien
tcctggaaaccgcagaggctgtgca

SEQ ID NO: 260783 - DNA, 25 bp, Homo sapien
ccagttaattgctgctgcgatgccg

SEQ ID NO: 260784 - DNA, 25 bp, Homo sapien
aaaccactcgatgcttccgtgtcac

SEQ ID NO: 260785 - DNA, 25 bp, Homo sapien
gggaggacatgacccgtgtggccat

SEQ ID NO: 260786 - DNA, 25 bp, Homo sapien
tgtcagtgtcctgtgcctctgtttg

SEQ ID NO: 260787 - DNA, 25 bp, Homo sapien
tcagcagctccacatagcgacccgc

SEQ ID NO: 260788 - DNA, 25 bp, Homo sapien
caagcaggggcaaacacatgtgcaa

SEQ ID NO: 260789 - DNA, 25 bp, Homo sapien
agtgtcctgtgcctctgtttgtgtc

SEQ ID NO: 260790 - DNA, 25 bp, Homo sapien
cttcagtgtagattgctggctcctc

SEQ ID NO: 260791 - DNA, 25 bp, Homo sapien
ttgctgcgttgtgccagtagacagg

SEQ ID NO: 260792 - DNA, 25 bp, Homo sapien
tgctgcgttgtgccagtagacaggt

SEQ ID NO: 260793 - DNA, 25 bp, Homo sapien
ccttctctgatgagatgatgaccat

SEQ ID NO: 260794 - DNA, 25 bp, Homo sapien
ttccttctctgatgagatgatgacc

SEQ ID NO: 260795 - DNA, 25 bp, Homo sapien
ctatacattccttctctgatgagat

SEQ ID NO: 260796 - DNA, 25 bp, Homo sapien
cattccttctctgatgagatgatga

SEQ ID NO: 260797 - DNA, 25 bp, Homo sapien
aaagtcttttcatccgaaatattct

SEQ ID NO: 260798 - DNA, 25 bp, Homo sapien
gtcttttcatccgaaatattctcag

SEQ ID NO: 260799 - DNA, 25 bp, Homo sapien
actcatggcaacagctaataccttt

SEQ ID NO: 260800 - DNA, 25 bp, Homo sapien
ggcaacagctaatacctttatttcc

SEQ ID NO: 260801 - DNA, 25 bp, Homo sapien
ttaagtcagctcttggaaaccacct

SEQ ID NO: 260802 - DNA, 25 bp, Homo sapien
cctgagagaatatgacagaagccag

SEQ ID NO: 260803 - DNA, 25 bp, Homo sapien
tgagagaatatgacagaagccagta

SEQ ID NO: 260804 - DNA, 25 bp, Homo sapien
cacctttatgagtttctgctatgct

SEQ ID NO: 260805 - DNA, 25 bp, Homo sapien
tgtgaaaatgtcaatttctctaatg

SEQ ID NO: 260806 - DNA, 25 bp, Homo sapien
ttctctaatgatcagccacaggtca

SEQ ID NO: 260807 - DNA, 25 bp, Homo sapien
gccacaggtcattataactgctcat

SEQ ID NO: 260808 - DNA, 25 bp, Homo sapien
cagccacaggtcattataactgctc

SEQ ID NO: 260809 - DNA, 25 bp, Homo sapien
caagcgaccttgcctaatgggagcc

SEQ ID NO: 260810 - DNA, 25 bp, Homo sapien
aagcgaccttgcctaatgggagcct

SEQ ID NO: 260811 - DNA, 25 bp, Homo sapien
ggctcatgggaaataagccagaggc

SEQ ID NO: 260812 - DNA, 25 bp, Homo sapien
agcgaccttgcctaatgggagcctt

SEQ ID NO: 260813 - DNA, 25 bp, Homo sapien
gcacatcaatgttaagatgagcaga

SEQ ID NO: 260814 - DNA, 25 bp, Homo sapien
gaaagccacacgagcacatctattt

SEQ ID NO: 260815 - DNA, 25 bp, Homo sapien
caaggaaaaaatcagcggtgaggca

SEQ ID NO: 260816 - DNA, 25 bp, Homo sapien
tctgcattcatggtcgggctcaagg

SEQ ID NO: 260817 - DNA, 25 bp, Homo sapien
taacagtttagatggctttcagtca

SEQ ID NO: 260818 - DNA, 25 bp, Homo sapien
tcagttaactctgaatagagagctc

SEQ ID NO: 260819 - DNA, 25 bp, Homo sapien
atcatggtcccagaggaactgctca

SEQ ID NO: 260820 - DNA, 25 bp, Homo sapien
gaatgcgcataagctctctggacct

SEQ ID NO: 260821 - DNA, 25 bp, Homo sapien
aagagaacataattgcacagtccaa

SEQ ID NO: 260822 - DNA, 25 bp, Homo sapien
aacataattgcacagtccaatttca

SEQ ID NO: 260823 - DNA, 25 bp, Homo sapien
aacatcatcagggttataaaagaga

SEQ ID NO: 260824 - DNA, 25 bp, Homo sapien
gagaacataattgcacagtccaatt

SEQ ID NO: 260825 - DNA, 25 bp, Homo sapien
acacagggcaggcaagaagacagcc

SEQ ID NO: 260826 - DNA, 25 bp, Homo sapien
acgacacagggcaggcaagaagaca

SEQ ID NO: 260827 - DNA, 25 bp, Homo sapien
tttacgacacagggcaggcaagaag

SEQ ID NO: 260828 - DNA, 25 bp, Homo sapien
acagggcaggcaagaagacagccag

SEQ ID NO: 260829 - DNA, 25 bp, Homo sapien
ttgtgtgaaggtgacagtggtgtag

SEQ ID NO: 260830 - DNA, 25 bp, Homo sapien
tgataatgcagtaagggacccccat

SEQ ID NO: 260831 - DNA, 25 bp, Homo sapien
tgccttccccttgataatgcagtaa

SEQ ID NO: 260832 - DNA, 25 bp, Homo sapien
tcctgtggactagatattccagtct

SEQ ID NO: 260833 - DNA, 25 bp, Homo sapien
caaagcgcctttgtcttctgacttc

SEQ ID NO: 260834 - DNA, 25 bp, Homo sapien
agtatctgtcgttgtaattggtcct

SEQ ID NO: 260835 - DNA, 25 bp, Homo sapien
agccaaagcgcctttgtcttctgac

SEQ ID NO: 260836 - DNA, 25 bp, Homo sapien
gatggcttccaccagcttagccaaa

SEQ ID NO: 260837 - DNA, 25 bp, Homo sapien
cttacagattggcaacagtgtatta

SEQ ID NO: 260838 - DNA, 25 bp, Homo sapien
tggtcttacagattggcaacagtgt

SEQ ID NO: 260839 - DNA, 25 bp, Homo sapien
tacagattggcaacagtgtattaaa

SEQ ID NO: 260840 - DNA, 25 bp, Homo sapien
gtcttacagattggcaacagtgtat

SEQ ID NO: 260841 - DNA, 25 bp, Homo sapien
tggtaaaaaacccactctatcatgt

SEQ ID NO: 260842 - DNA, 25 bp, Homo sapien
caaggaggtggcctagttgtagaaa

SEQ ID NO: 260843 - DNA, 25 bp, Homo sapien
gtgcaggtctattctataggtaaac

SEQ ID NO: 260844 - DNA, 25 bp, Homo sapien
taacagagcaggataagacgggctt

SEQ ID NO: 260845 - DNA, 25 bp, Homo sapien
ctttgatttgatacgtttgtaccct

SEQ ID NO: 260846 - DNA, 25 bp, Homo sapien
tttctccagtgcctttagctttgat

SEQ ID NO: 260847 - DNA, 25 bp, Homo sapien
cctaagttaccctttctattacatg

SEQ ID NO: 260848 - DNA, 25 bp, Homo sapien
ctccagtgcctttagctttgatttg

SEQ ID NO: 260849 - DNA, 25 bp, Homo sapien
gctaagtgcccctctcgtatcaggt

SEQ ID NO: 260850 - DNA, 25 bp, Homo sapien
gggcccaagagagcatacggtttat

SEQ ID NO: 260851 - DNA, 25 bp, Homo sapien
gagagcatacggtttatgctgctga

SEQ ID NO: 260852 - DNA, 25 bp, Homo sapien
aacggctaagtgcccctctcgtatc

SEQ ID NO: 260853 - DNA, 25 bp, Homo sapien
tcccaaatgtaaaggtcctcctgag

SEQ ID NO: 260854 - DNA, 25 bp, Homo sapien
cttgtgcagagccatcaagattcat

SEQ ID NO: 260855 - DNA, 25 bp, Homo sapien
cacttctctatcatggacaacagct

SEQ ID NO: 260856 - DNA, 25 bp, Homo sapien
ggtaacagcgaatatccatagcatg

SEQ ID NO: 260857 - DNA, 25 bp, Homo sapien
taaaaatcagagtcattagttcatt

SEQ ID NO: 260858 - DNA, 25 bp, Homo sapien
cagagtcattagttcattagaaaga

SEQ ID NO: 260859 - DNA, 25 bp, Homo sapien
aaaatcagagtcattagttcattag

SEQ ID NO: 260860 - DNA, 25 bp, Homo sapien
aatcagagtcattagttcattagaa

SEQ ID NO: 260861 - DNA, 25 bp, Homo sapien
tttcataagttttcctgttcagtta

SEQ ID NO: 260862 - DNA, 25 bp, Homo sapien
tatggattttaactaggcaatagtc

SEQ ID NO: 260863 - DNA, 25 bp, Homo sapien
taggcaatagtccaatgtggtcaac

SEQ ID NO: 260864 - DNA, 25 bp, Homo sapien
tggtcaacagacatggtttttcagc

SEQ ID NO: 260865 - DNA, 25 bp, Homo sapien
gactgtgttgcctaccaaattattg

SEQ ID NO: 260866 - DNA, 25 bp, Homo sapien
ctatgcatggacatatccacagaat

SEQ ID NO: 260867 - DNA, 25 bp, Homo sapien
tatacacctatgcatggacatatcc

SEQ ID NO: 260868 - DNA, 25 bp, Homo sapien
gaattctaggactgtgttgcctacc

SEQ ID NO: 260869 - DNA, 25 bp, Homo sapien
tactgcttgtgaagtggccggttct

SEQ ID NO: 260870 - DNA, 25 bp, Homo sapien
aatctggggtccattatctgaagcc

SEQ ID NO: 260871 - DNA, 25 bp, Homo sapien
tgaagtggccggttctggattcctt

SEQ ID NO: 260872 - DNA, 25 bp, Homo sapien
cattcccaatctggggtccattatc

SEQ ID NO: 260873 - DNA, 25 bp, Homo sapien
gccaaactcaatgtgtgggcttgat

SEQ ID NO: 260874 - DNA, 25 bp, Homo sapien
tgcaaaggcaggttaggtccaaggt

SEQ ID NO: 260875 - DNA, 25 bp, Homo sapien
gcagttcagtaaggctaaggccctc

SEQ ID NO: 260876 - DNA, 25 bp, Homo sapien
aggttttttaagtccagcagttcag

SEQ ID NO: 260877 - DNA, 25 bp, Homo sapien
ggccagtctgtttcacgcaaagttc

SEQ ID NO: 260878 - DNA, 25 bp, Homo sapien
ttaccataatacatgctacactttt

SEQ ID NO: 260879 - DNA, 25 bp, Homo sapien
accataatacatgctacacttttaa

SEQ ID NO: 260880 - DNA, 25 bp, Homo sapien
gctgttctcttaacttctgtagggg

SEQ ID NO: 260881 - DNA, 25 bp, Homo sapien
tgcccccagggacttcggaatatag

SEQ ID NO: 260882 - DNA, 25 bp, Homo sapien
tgtccagtaagtccagtaaaggtcc

SEQ ID NO: 260883 - DNA, 25 bp, Homo sapien
aaatatatacgagagttgaaagacc

SEQ ID NO: 260884 - DNA, 25 bp, Homo sapien
caagtgccacttctggttattcggc

SEQ ID NO: 260885 - DNA, 25 bp, Homo sapien
gcgaaactgctcctatccacataca

SEQ ID NO: 260886 - DNA, 25 bp, Homo sapien
ttagagaatgaccagttctcagtcc

SEQ ID NO: 260887 - DNA, 25 bp, Homo sapien
ggtagactgagtctaacacctctac

SEQ ID NO: 260888 - DNA, 25 bp, Homo sapien
ttgggcctactagggtagactgagt

SEQ ID NO: 260889 - DNA, 25 bp, Homo sapien
tagaacctagaaatgatcagggtga

SEQ ID NO: 260890 - DNA, 25 bp, Homo sapien
tgaaacttttagaacctagaaatga

SEQ ID NO: 260891 - DNA, 25 bp, Homo sapien
tttacaaacataatatgaagtgaca

SEQ ID NO: 260892 - DNA, 25 bp, Homo sapien
gatctcttattacagttgttttaca

SEQ ID NO: 260893 - DNA, 25 bp, Homo sapien
ttatacaatgttgggaatctatgag

SEQ ID NO: 260894 - DNA, 25 bp, Homo sapien
gttttgggcctggcatcaggctgcc

SEQ ID NO: 260895 - DNA, 25 bp, Homo sapien
tgggaatctatgagtaacatcggtt

SEQ ID NO: 260896 - DNA, 25 bp, Homo sapien
tgttgggaatctatgagtaacatcg

SEQ ID NO: 260897 - DNA, 25 bp, Homo sapien
tacatttgcctaattatctatttta

SEQ ID NO: 260898 - DNA, 25 bp, Homo sapien
aaatacccaagtaatgaaacatcta

SEQ ID NO: 260899 - DNA, 25 bp, Homo sapien
ccattacatttgcctaattatctat

SEQ ID NO: 260900 - DNA, 25 bp, Homo sapien
agattatttatgaatactgtaatag

SEQ ID NO: 260901 - DNA, 25 bp, Homo sapien
ctctgtgagcaaatggatgacttga

SEQ ID NO: 260902 - DNA, 25 bp, Homo sapien
tccgtccggaaaggcggagacagct

SEQ ID NO: 260903 - DNA, 25 bp, Homo sapien
gatgacttgaatagaatagaaggca

SEQ ID NO: 260904 - DNA, 25 bp, Homo sapien
caaggttgaagacatgcccagtgac

SEQ ID NO: 260905 - DNA, 25 bp, Homo sapien
gcccactcacctgtgaacccccaaa

SEQ ID NO: 260906 - DNA, 25 bp, Homo sapien
ctgagcccactcacctgtgaacccc

SEQ ID NO: 260907 - DNA, 25 bp, Homo sapien
actagtgcacatgcctgagcccact

SEQ ID NO: 260908 - DNA, 25 bp, Homo sapien
atactagtgcacatgcctgagccca

SEQ ID NO: 260909 - DNA, 25 bp, Homo sapien
caagtgtgtttatgggagttgtgca

SEQ ID NO: 260910 - DNA, 25 bp, Homo sapien
ccttaccagtcgagtgtttctagag

SEQ ID NO: 260911 - DNA, 25 bp, Homo sapien
cacaagtgtgtttatgggagttgtg

SEQ ID NO: 260912 - DNA, 25 bp, Homo sapien
tcccttaccagtcgagtgtttctag

SEQ ID NO: 260913 - DNA, 25 bp, Homo sapien
tctatcagggagtcctaagaactgt

SEQ ID NO: 260914 - DNA, 25 bp, Homo sapien
ggcaaatgcatacacgtctgcagca

SEQ ID NO: 260915 - DNA, 25 bp, Homo sapien
ggttttacgtgttggcatgcattca

SEQ ID NO: 260916 - DNA, 25 bp, Homo sapien
gaacatatcctagtcatgtggcacc

SEQ ID NO: 260917 - DNA, 25 bp, Homo sapien
tttgccaaggttcaggacagatcca

SEQ ID NO: 260918 - DNA, 25 bp, Homo sapien
ttcaggacagatccaggtgtctttc

SEQ ID NO: 260919 - DNA, 25 bp, Homo sapien
tattactgtatccacatgttgcagg

SEQ ID NO: 260920 - DNA, 25 bp, Homo sapien
caagggagggtatgatcatattact

SEQ ID NO: 260921 - DNA, 25 bp, Homo sapien
tgggaataaacctcacactcaccgt

SEQ ID NO: 260922 - DNA, 25 bp, Homo sapien
caacccaggctgtcatgctaaaaaa

SEQ ID NO: 260923 - DNA, 25 bp, Homo sapien
gctgcttacctaggaatacggctta

SEQ ID NO: 260924 - DNA, 25 bp, Homo sapien
gaactactgcatagggtgactacca

SEQ ID NO: 260925 - DNA, 25 bp, Homo sapien
atagccctaaatttgtataccgaag

SEQ ID NO: 260926 - DNA, 25 bp, Homo sapien
atttgtataccgaaggaacaactct

SEQ ID NO: 260927 - DNA, 25 bp, Homo sapien
caaaggcggagctagcactacaact

SEQ ID NO: 260928 - DNA, 25 bp, Homo sapien
cagtagtggcagctgcgacaaaggc

SEQ ID NO: 260929 - DNA, 25 bp, Homo sapien
tgagtaggtcgaactactggcgcct

SEQ ID NO: 260930 - DNA, 25 bp, Homo sapien
gaagggctacaatgtgaacgacgag

SEQ ID NO: 260931 - DNA, 25 bp, Homo sapien
tcccaaacagtaagctctaataaag

SEQ ID NO: 260932 - DNA, 25 bp, Homo sapien
taaagatagcattaggtcaagacca

SEQ ID NO: 260933 - DNA, 25 bp, Homo sapien
cacaggatatcacgaaataggatca

SEQ ID NO: 260934 - DNA, 25 bp, Homo sapien
acattagtgaggtcaaaaggactga

SEQ ID NO: 260935 - DNA, 25 bp, Homo sapien
atttcaattgtctgttagttcagtc

SEQ ID NO: 260936 - DNA, 25 bp, Homo sapien
aaagattatttcaattgtctgttag

SEQ ID NO: 260937 - DNA, 25 bp, Homo sapien
ttatttcaattgtctgttagttcag

SEQ ID NO: 260938 - DNA, 25 bp, Homo sapien
taaaagattatttcaattgtctgtt

SEQ ID NO: 260939 - DNA, 25 bp, Homo sapien
ttcgagcctccacgaatggacgcca

SEQ ID NO: 260940 - DNA, 25 bp, Homo sapien
ctggattcgagcctccacgaatgga

SEQ ID NO: 260941 - DNA, 25 bp, Homo sapien
agcctccacgaatggacgccacttg

SEQ ID NO: 260942 - DNA, 25 bp, Homo sapien
gattcgagcctccacgaatggacgc

SEQ ID NO: 260943 - DNA, 25 bp, Homo sapien
aagttactgtaggatctgtgatcca

SEQ ID NO: 260944 - DNA, 25 bp, Homo sapien
taggaaacagatgcaagttactgta

SEQ ID NO: 260945 - DNA, 25 bp, Homo sapien
ggttgaggacacacttaggaaacag

SEQ ID NO: 260946 - DNA, 25 bp, Homo sapien
catgcattttccaagtatggttttg

SEQ ID NO: 260947 - DNA, 25 bp, Homo sapien
attttttgcactgctagtcattcct

SEQ ID NO: 260948 - DNA, 25 bp, Homo sapien
gcaaataattgttaccactaaagta

SEQ ID NO: 260949 - DNA, 25 bp, Homo sapien
tagcaaataattgttaccactaaag

SEQ ID NO: 260950 - DNA, 25 bp, Homo sapien
tttgcactgctagtcattccttgga

SEQ ID NO: 260951 - DNA, 25 bp, Homo sapien
gttgtctaacttattggcatacagt

SEQ ID NO: 260952 - DNA, 25 bp, Homo sapien
agtaatgttccccctttcactcctg

SEQ ID NO: 260953 - DNA, 25 bp, Homo sapien
tcaatgttgtctatgttgtctaact

SEQ ID NO: 260954 - DNA, 25 bp, Homo sapien
atttgtcaatgttgtctatgttgtc

SEQ ID NO: 260955 - DNA, 25 bp, Homo sapien
ggaacaagatgtagatgaccaaacc

SEQ ID NO: 260956 - DNA, 25 bp, Homo sapien
gaatccctggaaagatgtcctaatc

SEQ ID NO: 260957 - DNA, 25 bp, Homo sapien
ggacccctctagaaacagtcttgaa

SEQ ID NO: 260958 - DNA, 25 bp, Homo sapien
gacagtctatgcttatctatggaac

SEQ ID NO: 260959 - DNA, 25 bp, Homo sapien
tgcagcaagaaagctctcatcattt

SEQ ID NO: 260960 - DNA, 25 bp, Homo sapien
gcagcaagaaagctctcatcatttg

SEQ ID NO: 260961 - DNA, 25 bp, Homo sapien
agatgattaggccataagacctgct

SEQ ID NO: 260962 - DNA, 25 bp, Homo sapien
atgattaggccataagacctgcttc

SEQ ID NO: 260963 - DNA, 25 bp, Homo sapien
atttcctagcattagtttcttctct

SEQ ID NO: 260964 - DNA, 25 bp, Homo sapien
catttcctagcattagtttcttctc

SEQ ID NO: 260965 - DNA, 25 bp, Homo sapien
cagcccaggcgaccgagtgagactc

SEQ ID NO: 260966 - DNA, 25 bp, Homo sapien
cccaggcgaccgagtgagactccat

SEQ ID NO: 260967 - DNA, 25 bp, Homo sapien
ccagcccaggcgaccgagtgagact

SEQ ID NO: 260968 - DNA, 25 bp, Homo sapien
gcccaggcgaccgagtgagactcca

SEQ ID NO: 260969 - DNA, 25 bp, Homo sapien
tgccactgatacacaagctgtctct

SEQ ID NO: 260970 - DNA, 25 bp, Homo sapien
tgttgatttagataaccaccctaga

SEQ ID NO: 260971 - DNA, 25 bp, Homo sapien
tgtgtctacaccaagttcaaactga

SEQ ID NO: 260972 - DNA, 25 bp, Homo sapien
ggtgcttgactccttgtgggcctaa

SEQ ID NO: 260973 - DNA, 25 bp, Homo sapien
tttaaaatgattagcatttactttc

SEQ ID NO: 260974 - DNA, 25 bp, Homo sapien
catggattccatggactggtgtaca

SEQ ID NO: 260975 - DNA, 25 bp, Homo sapien
tagatggcctgcatcctatgaggac

SEQ ID NO: 260976 - DNA, 25 bp, Homo sapien
tactttgtcaagaatctattggcca

SEQ ID NO: 260977 - DNA, 25 bp, Homo sapien
ttatttcatgagttagaacctccag

SEQ ID NO: 260978 - DNA, 25 bp, Homo sapien
tacaccttctagcaggtgtgtagtg

SEQ ID NO: 260979 - DNA, 25 bp, Homo sapien
gccatcacttggtatatcagtctgt

SEQ ID NO: 260980 - DNA, 25 bp, Homo sapien
catttttaccttcccatgagcagtg

SEQ ID NO: 260981 - DNA, 25 bp, Homo sapien
tagaagtcctttacagatacgtgat

SEQ ID NO: 260982 - DNA, 25 bp, Homo sapien
gtgtttatgcttgtgaaaccatcac

SEQ ID NO: 260983 - DNA, 25 bp, Homo sapien
ataataaacagatcggccaggctca

SEQ ID NO: 260984 - DNA, 25 bp, Homo sapien
ctaaaccgcgcatattgaaagtgca

SEQ ID NO: 260985 - DNA, 25 bp, Homo sapien
gatgattgacatacactaaaccgcg

SEQ ID NO: 260986 - DNA, 25 bp, Homo sapien
ttatccgcccctgcgccggcgcggg

SEQ ID NO: 260987 - DNA, 25 bp, Homo sapien
ttttatccgcccctgcgccggcgcg

SEQ ID NO: 260988 - DNA, 25 bp, Homo sapien
gctttttatccgcccctgcgccggc

SEQ ID NO: 260989 - DNA, 25 bp, Homo sapien
ctttttatccgcccctgcgccggcg

SEQ ID NO: 260990 - DNA, 25 bp, Homo sapien
accgaacgcggagccaggaggtgag

SEQ ID NO: 260991 - DNA, 25 bp, Homo sapien
gaaccgaacgcggagccaggaggtg

SEQ ID NO: 260992 - DNA, 25 bp, Homo sapien
aaccgaacgcggagccaggaggtga

SEQ ID NO: 260993 - DNA, 25 bp, Homo sapien
acgcctgggacttgcggagcgtgaa

SEQ ID NO: 260994 - DNA, 25 bp, Homo sapien
gacgcctgggacttgcggagcgtga

SEQ ID NO: 260995 - DNA, 25 bp, Homo sapien
agacgcctgggacttgcggagcgtg

SEQ ID NO: 260996 - DNA, 25 bp, Homo sapien
cagacgcctgggacttgcggagcgt

SEQ ID NO: 260997 - DNA, 25 bp, Homo sapien
tccagggaagggccgtccgcgcgcc

SEQ ID NO: 260998 - DNA, 25 bp, Homo sapien
ccagggaagggccgtccgcgcgcca

SEQ ID NO: 260999 - DNA, 25 bp, Homo sapien
cagggaagggccgtccgcgcgccag

SEQ ID NO: 261000 - DNA, 25 bp, Homo sapien
ctccagggaagggccgtccgcgcgc

SEQ ID NO: 261001 - DNA, 25 bp, Homo sapien
cctgctccacctcggtgatcaccag

SEQ ID NO: 261002 - DNA, 25 bp, Homo sapien
ttcctgctccacctcggtgatcacc

SEQ ID NO: 261003 - DNA, 25 bp, Homo sapien
ccacctcggtgatcaccaggcccat

SEQ ID NO: 261004 - DNA, 25 bp, Homo sapien
tgctccacctcggtgatcaccaggc

SEQ ID NO: 261005 - DNA, 25 bp, Homo sapien
ttgaacaatctaggcccagaagttc

SEQ ID NO: 261006 - DNA, 25 bp, Homo sapien
acaatctaggcccagaagttcttgc

SEQ ID NO: 261007 - DNA, 25 bp, Homo sapien
aatctaggcccagaagttcttgctg

SEQ ID NO: 261008 - DNA, 25 bp, Homo sapien
attttgaacaatctaggcccagaag

SEQ ID NO: 261009 - DNA, 25 bp, Homo sapien
tgagtaaactaacatatctacatcc

SEQ ID NO: 261010 - DNA, 25 bp, Homo sapien
ctgagtaaactaacatatctacatc

SEQ ID NO: 261011 - DNA, 25 bp, Homo sapien
taaatcaggatcaggacaaccattt

SEQ ID NO: 261012 - DNA, 25 bp, Homo sapien
atcaggatcaggacaaccatttgaa

SEQ ID NO: 261013 - DNA, 25 bp, Homo sapien
ctaaatcaggatcaggacaaccatt

SEQ ID NO: 261014 - DNA, 25 bp, Homo sapien
aatcaggatcaggacaaccatttga

SEQ ID NO: 261015 - DNA, 25 bp, Homo sapien
tttcccagacgctgttcacaggctg

SEQ ID NO: 261016 - DNA, 25 bp, Homo sapien
tcccagacgctgttcacaggctgca

SEQ ID NO: 261017 - DNA, 25 bp, Homo sapien
cccagacgctgttcacaggctgcat

SEQ ID NO: 261018 - DNA, 25 bp, Homo sapien
ccagacgctgttcacaggctgcata

SEQ ID NO: 261019 - DNA, 25 bp, Homo sapien
caaagttgtaggtctatgtatttcc

SEQ ID NO: 261020 - DNA, 25 bp, Homo sapien
tgtgtttgttgataaattatgagga

SEQ ID NO: 261021 - DNA, 25 bp, Homo sapien
gtgtacagggtttcataggtgcttt

SEQ ID NO: 261022 - DNA, 25 bp, Homo sapien
cacactcactctcaagtaagacact

SEQ ID NO: 261023 - DNA, 25 bp, Homo sapien
aaaccaactttggatataatatggc

SEQ ID NO: 261024 - DNA, 25 bp, Homo sapien
tggtaacattatattccccacagag

SEQ ID NO: 261025 - DNA, 25 bp, Homo sapien
cacactgtttgactataatgaagag

SEQ ID NO: 261026 - DNA, 25 bp, Homo sapien
tacacacggtaaccatcaggtttac

SEQ ID NO: 261027 - DNA, 25 bp, Homo sapien
tacaccgatcatgtttacaaaaagc

SEQ ID NO: 261028 - DNA, 25 bp, Homo sapien
gggctatgcagtgcaaaatgatgtc

SEQ ID NO: 261029 - DNA, 25 bp, Homo sapien
cttacaatgtataatgggctatgca

SEQ ID NO: 261030 - DNA, 25 bp, Homo sapien
tgcaaaatgatgtcaccggaccaaa

SEQ ID NO: 261031 - DNA, 25 bp, Homo sapien
tatattccagtaggtaatttattcc

SEQ ID NO: 261032 - DNA, 25 bp, Homo sapien
cagtaggtaatttattccactaact

SEQ ID NO: 261033 - DNA, 25 bp, Homo sapien
ttccagtaggtaatttattccacta

SEQ ID NO: 261034 - DNA, 25 bp, Homo sapien
tattccagtaggtaatttattccac

SEQ ID NO: 261035 - DNA, 25 bp, Homo sapien
cataggctacagatgtactttcaag

SEQ ID NO: 261036 - DNA, 25 bp, Homo sapien
gactctatgcatggtaccatcacac

SEQ ID NO: 261037 - DNA, 25 bp, Homo sapien
cacaaggatttgattgactctatgc

SEQ ID NO: 261038 - DNA, 25 bp, Homo sapien
caaagacaggcattcttaagcgtta

SEQ ID NO: 261039 - DNA, 25 bp, Homo sapien
gatagtttccatcattaacgagtct

SEQ ID NO: 261040 - DNA, 25 bp, Homo sapien
catgtatctctaggaaccttgtggg

SEQ ID NO: 261041 - DNA, 25 bp, Homo sapien
tagggtctctagcacaatgaaacat

SEQ ID NO: 261042 - DNA, 25 bp, Homo sapien
tcctcctattagaaacgtcttgcac

SEQ ID NO: 261043 - DNA, 25 bp, Homo sapien
accgcgcccggtcgaactcatcctt

SEQ ID NO: 261044 - DNA, 25 bp, Homo sapien
cgcgcccggtcgaactcatcctttt

SEQ ID NO: 261045 - DNA, 25 bp, Homo sapien
ccgcgcccggtcgaactcatccttt

SEQ ID NO: 261046 - DNA, 25 bp, Homo sapien
gcagcctcgctaactccactccttg

SEQ ID NO: 261047 - DNA, 25 bp, Homo sapien
ctccttgagggagggacagccgtcc

SEQ ID NO: 261048 - DNA, 25 bp, Homo sapien
gcctcgctaactccactccttgagg

SEQ ID NO: 261049 - DNA, 25 bp, Homo sapien
agcgcagcctcgctaactccactcc

SEQ ID NO: 261050 - DNA, 25 bp, Homo sapien
ctttgccgcctcgaactcggcccat

SEQ ID NO: 261051 - DNA, 25 bp, Homo sapien
gaccccagacccagcgaggagggcg

SEQ ID NO: 261052 - DNA, 25 bp, Homo sapien
cccagacccagcgaggagggcgccg

SEQ ID NO: 261053 - DNA, 25 bp, Homo sapien
ggaccccagacccagcgaggagggc

SEQ ID NO: 261054 - DNA, 25 bp, Homo sapien
accccagacccagcgaggagggcgc

SEQ ID NO: 261055 - DNA, 25 bp, Homo sapien
ctgccgtcggggcagccgggctcaa

SEQ ID NO: 261056 - DNA, 25 bp, Homo sapien
tgccgtcggggcagccgggctcaag

SEQ ID NO: 261057 - DNA, 25 bp, Homo sapien
gccgtcggggcagccgggctcaagg

SEQ ID NO: 261058 - DNA, 25 bp, Homo sapien
cgtcggggcagccgggctcaaggac

SEQ ID NO: 261059 - DNA, 25 bp, Homo sapien
ggagatgcgccgagtcccccgcaac

SEQ ID NO: 261060 - DNA, 25 bp, Homo sapien
tggagatgcgccgagtcccccgcaa

SEQ ID NO: 261061 - DNA, 25 bp, Homo sapien
gagatgcgccgagtcccccgcaacc

SEQ ID NO: 261062 - DNA, 25 bp, Homo sapien
ctggagatgcgccgagtcccccgca

SEQ ID NO: 261063 - DNA, 25 bp, Homo sapien
gcctgtaggccgaaggccctggact

SEQ ID NO: 261064 - DNA, 25 bp, Homo sapien
gccccgagcgatggctgctgagtct

SEQ ID NO: 261065 - DNA, 25 bp, Homo sapien
tgttgtccgcgttgctcagcctgta

SEQ ID NO: 261066 - DNA, 25 bp, Homo sapien
gctcgtcctccgtgcgggtggctca

SEQ ID NO: 261067 - DNA, 25 bp, Homo sapien
aagcatcacttaatccatggagggc

SEQ ID NO: 261068 - DNA, 25 bp, Homo sapien
cagaggatgggacatctgattcact

SEQ ID NO: 261069 - DNA, 25 bp, Homo sapien
tccagatcatgaaatgtcacagggc

SEQ ID NO: 261070 - DNA, 25 bp, Homo sapien
taagggttgcctagatagctgataa

SEQ ID NO: 261071 - DNA, 25 bp, Homo sapien
agcggtgtccggctttgtctctccc

SEQ ID NO: 261072 - DNA, 25 bp, Homo sapien
tcctctccgtgtactgtgggatcgg

SEQ ID NO: 261073 - DNA, 25 bp, Homo sapien
tgtgggatcggcacagggactccat

SEQ ID NO: 261074 - DNA, 25 bp, Homo sapien
cggtgtccggctttgtctctccctt

SEQ ID NO: 261075 - DNA, 25 bp, Homo sapien
gccgtgttctgaggctcgtcctggt

SEQ ID NO: 261076 - DNA, 25 bp, Homo sapien
agccgtgttctgaggctcgtcctgg

SEQ ID NO: 261077 - DNA, 25 bp, Homo sapien
cagccgtgttctgaggctcgtcctg

SEQ ID NO: 261078 - DNA, 25 bp, Homo sapien
tgggcgggagaaggaagtgcgatgg

SEQ ID NO: 261079 - DNA, 25 bp, Homo sapien
ctcgtgggcgggagaaggaagtgcg

SEQ ID NO: 261080 - DNA, 25 bp, Homo sapien
gggcacgtcaaggacgaggtgccag

SEQ ID NO: 261081 - DNA, 25 bp, Homo sapien
tgcgatggggcacgtcaaggacgag

SEQ ID NO: 261082 - DNA, 25 bp, Homo sapien
ggattccaattctgggttacagtgg

SEQ ID NO: 261083 - DNA, 25 bp, Homo sapien
aataaggcatttctccgggcaatca

SEQ ID NO: 261084 - DNA, 25 bp, Homo sapien
gggattccaattctgggttacagtg

SEQ ID NO: 261085 - DNA, 25 bp, Homo sapien
tttctccgggcaatcaggtgtgcag

SEQ ID NO: 261086 - DNA, 25 bp, Homo sapien
tgctctgagcaacacggcgggagct

SEQ ID NO: 261087 - DNA, 25 bp, Homo sapien
gagtcgccgtgcaccgtgagctgct

SEQ ID NO: 261088 - DNA, 25 bp, Homo sapien
gtggcagacacctgggaacacgtag

SEQ ID NO: 261089 - DNA, 25 bp, Homo sapien
gggctcgatgatgaaagcacacggg

SEQ ID NO: 261090 - DNA, 25 bp, Homo sapien
gtcactgcgcagtgatcgcagaggc

SEQ ID NO: 261091 - DNA, 25 bp, Homo sapien
gcgcagtgatcgcagaggccagctt

SEQ ID NO: 261092 - DNA, 25 bp, Homo sapien
ccgccgtggcctttatggaagccgg

SEQ ID NO: 261093 - DNA, 25 bp, Homo sapien
gcagagcccgccgtggcctttatgg

SEQ ID NO: 261094 - DNA, 25 bp, Homo sapien
ctggctctgcagatgccatttgccc

SEQ ID NO: 261095 - DNA, 25 bp, Homo sapien
gcatggagactcctcccggggagtc

SEQ ID NO: 261096 - DNA, 25 bp, Homo sapien
ttgcccccagcttgagtgtgtctct

SEQ ID NO: 261097 - DNA, 25 bp, Homo sapien
gagtccccgatcctcctggcccctg

SEQ ID NO: 261098 - DNA, 25 bp, Homo sapien
ctttgtgggtgtggcctggtcccca

SEQ ID NO: 261099 - DNA, 25 bp, Homo sapien
tagcggccgcttgacttcacaggat

SEQ ID NO: 261100 - DNA, 25 bp, Homo sapien
cacggcctcgatgtgtacacacagg

SEQ ID NO: 261101 - DNA, 25 bp, Homo sapien
cacaggagctgggttcctagcggcc

SEQ ID NO: 261102 - DNA, 25 bp, Homo sapien
gaggccaagataaaggctgcctgca

SEQ ID NO: 261103 - DNA, 25 bp, Homo sapien
gctgggggtccaagggaggccaaga

SEQ ID NO: 261104 - DNA, 25 bp, Homo sapien
tccaagggaggccaagataaaggct

SEQ ID NO: 261105 - DNA, 25 bp, Homo sapien
aagggaggccaagataaaggctgcc

SEQ ID NO: 261106 - DNA, 25 bp, Homo sapien
gccaccctgccattcgtggctgttt

SEQ ID NO: 261107 - DNA, 25 bp, Homo sapien
ggtgccaccctgccattcgtggctg

SEQ ID NO: 261108 - DNA, 25 bp, Homo sapien
accctgccattcgtggctgtttcca

SEQ ID NO: 261109 - DNA, 25 bp, Homo sapien
gtgccaccctgccattcgtggctgt

SEQ ID NO: 261110 - DNA, 25 bp, Homo sapien
tcccagaatcaagcggctccaagtc

SEQ ID NO: 261111 - DNA, 25 bp, Homo sapien
agagctttcccagaatcaagcggct

SEQ ID NO: 261112 - DNA, 25 bp, Homo sapien
actccagtgcacattggatgcttcc

SEQ ID NO: 261113 - DNA, 25 bp, Homo sapien
gctttcccagaatcaagcggctcca

SEQ ID NO: 261114 - DNA, 25 bp, Homo sapien
tccctggactgccacgaaagaggca

SEQ ID NO: 261115 - DNA, 25 bp, Homo sapien
ccctggactgccacgaaagaggcag

SEQ ID NO: 261116 - DNA, 25 bp, Homo sapien
aagtcctgcctgttcaaccacgtgt

SEQ ID NO: 261117 - DNA, 25 bp, Homo sapien
gacaaaactgagaaggaattcacca

SEQ ID NO: 261118 - DNA, 25 bp, Homo sapien
cgtgtaagtgatgagggcttgtgca

SEQ ID NO: 261119 - DNA, 25 bp, Homo sapien
gctagaacctcagctttcaggatcc

SEQ ID NO: 261120 - DNA, 25 bp, Homo sapien
tggttttcccaagcacatgcgtggc

SEQ ID NO: 261121 - DNA, 25 bp, Homo sapien
ggccagcactcttgtctggacctgt

SEQ ID NO: 261122 - DNA, 25 bp, Homo sapien
ttatggtggttttcccaagcacatg

SEQ ID NO: 261123 - DNA, 25 bp, Homo sapien
tcttgtctggacctgttatggtggt

SEQ ID NO: 261124 - DNA, 25 bp, Homo sapien
gcttaatacaggttcacagaccttc

SEQ ID NO: 261125 - DNA, 25 bp, Homo sapien
tttgcttaatacaggttcacagacc

SEQ ID NO: 261126 - DNA, 25 bp, Homo sapien
aatttcctttcagtccaagtccaca

SEQ ID NO: 261127 - DNA, 25 bp, Homo sapien
tccaagtccacatttagtttctatt

SEQ ID NO: 261128 - DNA, 25 bp, Homo sapien
taatcattcaaagaggagcccttaa

SEQ ID NO: 261129 - DNA, 25 bp, Homo sapien
caaagaggagcccttaatggaagac

SEQ ID NO: 261130 - DNA, 25 bp, Homo sapien
gaggagcccttaatggaagactatg

SEQ ID NO: 261131 - DNA, 25 bp, Homo sapien
gcccttaatggaagactatgaaaaa

SEQ ID NO: 261132 - DNA, 25 bp, Homo sapien
gctgtgcctcgtatctgttcaccat

SEQ ID NO: 261133 - DNA, 25 bp, Homo sapien
cagctgtgcctcgtatctgttcacc

SEQ ID NO: 261134 - DNA, 25 bp, Homo sapien
gccttcagctgtgcctcgtatctgt

SEQ ID NO: 261135 - DNA, 25 bp, Homo sapien
ttcagctgtgcctcgtatctgttca

SEQ ID NO: 261136 - DNA, 25 bp, Homo sapien
gaagacgaatgtgacggcatccact

SEQ ID NO: 261137 - DNA, 25 bp, Homo sapien
ttctccccgctcatgttatctttgt

SEQ ID NO: 261138 - DNA, 25 bp, Homo sapien
atccactcttctccccgctcatgtt

SEQ ID NO: 261139 - DNA, 25 bp, Homo sapien
gaaaaaagaagacgaatgtgacggc

SEQ ID NO: 261140 - DNA, 25 bp, Homo sapien
gttgttggaagacaacgcctgcact

SEQ ID NO: 261141 - DNA, 25 bp, Homo sapien
taggaatgatgcagaataaaaggca

SEQ ID NO: 261142 - DNA, 25 bp, Homo sapien
gttggaagacaacgcctgcactcca

SEQ ID NO: 261143 - DNA, 25 bp, Homo sapien
cagaataaaaggcagagtggactca

SEQ ID NO: 261144 - DNA, 25 bp, Homo sapien
gaggtgacaacatgggcacatttgc

SEQ ID NO: 261145 - DNA, 25 bp, Homo sapien
agaggtgacaacatgggcacatttg

SEQ ID NO: 261146 - DNA, 25 bp, Homo sapien
tagaggtgacaacatgggcacattt

SEQ ID NO: 261147 - DNA, 25 bp, Homo sapien
gccatgcagtccaagtggttccatc

SEQ ID NO: 261148 - DNA, 25 bp, Homo sapien
ggttccatctcttcttagggcttta

SEQ ID NO: 261149 - DNA, 25 bp, Homo sapien
tggagctccccacagcttggtcctg

SEQ ID NO: 261150 - DNA, 25 bp, Homo sapien
ggctttaaccatccttgctatgtga

SEQ ID NO: 261151 - DNA, 25 bp, Homo sapien
tctgatgaaaggaacagcattcctc

SEQ ID NO: 261152 - DNA, 25 bp, Homo sapien
ctctgatgaaaggaacagcattcct

SEQ ID NO: 261153 - DNA, 25 bp, Homo sapien
cctctgatgaaaggaacagcattcc

SEQ ID NO: 261154 - DNA, 25 bp, Homo sapien
tcctctgatgaaaggaacagcattc

SEQ ID NO: 261155 - DNA, 25 bp, Homo sapien
cacagagattttccagggcctttca

SEQ ID NO: 261156 - DNA, 25 bp, Homo sapien
ggcacagtggggtaactccccatgt

SEQ ID NO: 261157 - DNA, 25 bp, Homo sapien
taactccccatgttggcaggagcca

SEQ ID NO: 261158 - DNA, 25 bp, Homo sapien
gggtaactccccatgttggcaggag

SEQ ID NO: 261159 - DNA, 25 bp, Homo sapien
agcctgggtaccgtggcagctccag

SEQ ID NO: 261160 - DNA, 25 bp, Homo sapien
cagcggtacggtcatgtggaaagct

SEQ ID NO: 261161 - DNA, 25 bp, Homo sapien
gtgtggaagccagcggtatggtcat

SEQ ID NO: 261162 - DNA, 25 bp, Homo sapien
aggccagcggtacggtcatgtggaa

SEQ ID NO: 261163 - DNA, 25 bp, Homo sapien
ccaggtgtggaagccagcggtatgg

SEQ ID NO: 261164 - DNA, 25 bp, Homo sapien
caaatatgtcagaggtgtggaggcc

SEQ ID NO: 261165 - DNA, 25 bp, Homo sapien
cgtagggtagtgtagaaagtgctcc

SEQ ID NO: 261166 - DNA, 25 bp, Homo sapien
tagaaactgttccaggtgtggaggc

SEQ ID NO: 261167 - DNA, 25 bp, Homo sapien
tagggtagaaactgccccaggtgtg

SEQ ID NO: 261168 - DNA, 25 bp, Homo sapien
gctgggatatgacttcaggaatcca

SEQ ID NO: 261169 - DNA, 25 bp, Homo sapien
catcatacctctaggagtactaatc

SEQ ID NO: 261170 - DNA, 25 bp, Homo sapien
tttggagaattgtagaggacctctg

SEQ ID NO: 261171 - DNA, 25 bp, Homo sapien
tttacaggtgctgagcgcaattcaa

SEQ ID NO: 261172 - DNA, 25 bp, Homo sapien
atgcagcagtccagggtgcggctaa

SEQ ID NO: 261173 - DNA, 25 bp, Homo sapien
gcttccctttggtcgcccagaggtc

SEQ ID NO: 261174 - DNA, 25 bp, Homo sapien
aagggcgccatgcagcagctgatgt

SEQ ID NO: 261175 - DNA, 25 bp, Homo sapien
tggagctgggccaacgccagaagta

SEQ ID NO: 261176 - DNA, 25 bp, Homo sapien
tacaccctttatggtagattagggc

SEQ ID NO: 261177 - DNA, 25 bp, Homo sapien
tccaggctgggacaaatcacagcta

SEQ ID NO: 261178 - DNA, 25 bp, Homo sapien
gctgggacaaatcacagctacccct

SEQ ID NO: 261179 - DNA, 25 bp, Homo sapien
ccctacaccctttatggtagattag

SEQ ID NO: 261180 - DNA, 25 bp, Homo sapien
ggcagggacatttctcgctcccacg

SEQ ID NO: 261181 - DNA, 25 bp, Homo sapien
agggacatttctcgctcccacgcga

SEQ ID NO: 261182 - DNA, 25 bp, Homo sapien
gctgcagacgctgggtgccttcttt

SEQ ID NO: 261183 - DNA, 25 bp, Homo sapien
acgcgagtccttcgctgcagacgct

SEQ ID NO: 261184 - DNA, 25 bp, Homo sapien
ctggccggggcgcgcggggaggcgg

SEQ ID NO: 261185 - DNA, 25 bp, Homo sapien
cagccgctgcatttcccttcattcc

SEQ ID NO: 261186 - DNA, 25 bp, Homo sapien
ttctccccagacagcgcgggcctct

SEQ ID NO: 261187 - DNA, 25 bp, Homo sapien
accgcagcgacgactctgctccagg

SEQ ID NO: 261188 - DNA, 25 bp, Homo sapien
cgacgggatgacaccacagtcttct

SEQ ID NO: 261189 - DNA, 25 bp, Homo sapien
gcaggggaaggaaagtgctgtctgg

SEQ ID NO: 261190 - DNA, 25 bp, Homo sapien
gcacgggtggtgatggagtcctagg

SEQ ID NO: 261191 - DNA, 25 bp, Homo sapien
ggaaggctggaaccggcatagggac

SEQ ID NO: 261192 - DNA, 25 bp, Homo sapien
ggagaaagagggcacgggtggtgat

SEQ ID NO: 261193 - DNA, 25 bp, Homo sapien
ctgaagcaaccaagcccacatccat

SEQ ID NO: 261194 - DNA, 25 bp, Homo sapien
taggccatggatcaaggcatgccca

SEQ ID NO: 261195 - DNA, 25 bp, Homo sapien
caatcttgtgcttctccgttatgcc

SEQ ID NO: 261196 - DNA, 25 bp, Homo sapien
tcttcttcgcttgccctgaatcgga

SEQ ID NO: 261197 - DNA, 25 bp, Homo sapien
tgaatcggatagtgcttgaagcctg

SEQ ID NO: 261198 - DNA, 25 bp, Homo sapien
agaagaagaaggcaacaacaggaag

SEQ ID NO: 261199 - DNA, 25 bp, Homo sapien
tcatgaccattgtacacaatctcct

SEQ ID NO: 261200 - DNA, 25 bp, Homo sapien
tcaagcttcggccaaacttgtagta

SEQ ID NO: 261201 - DNA, 25 bp, Homo sapien
gccaaacttgtagtaatcatgacca

SEQ ID NO: 261202 - DNA, 25 bp, Homo sapien
ttttctgcggtattggtgtgatgca

SEQ ID NO: 261203 - DNA, 25 bp, Homo sapien
tagccaagtacctacttcctctgct

SEQ ID NO: 261204 - DNA, 25 bp, Homo sapien
gtctaccagtcactaacttcagtgg

SEQ ID NO: 261205 - DNA, 25 bp, Homo sapien
accttctctggcatcacctattgct

SEQ ID NO: 261206 - DNA, 25 bp, Homo sapien
ctctgcttccgggaactgccagccc

SEQ ID NO: 261207 - DNA, 25 bp, Homo sapien
gctctaccacagacagaatgtttca

SEQ ID NO: 261208 - DNA, 25 bp, Homo sapien
aagcacactggcgaatgaactacag

SEQ ID NO: 261209 - DNA, 25 bp, Homo sapien
gaaagggctctcacgagtttcgccc

SEQ ID NO: 261210 - DNA, 25 bp, Homo sapien
tgaactacagctggcccgagctcta

SEQ ID NO: 261211 - DNA, 25 bp, Homo sapien
agtcaggttgctattttgctcttgt

SEQ ID NO: 261212 - DNA, 25 bp, Homo sapien
gagtcaggttgctattttgctcttg

SEQ ID NO: 261213 - DNA, 25 bp, Homo sapien
cactagggataggcaggcagccacc

SEQ ID NO: 261214 - DNA, 25 bp, Homo sapien
actagggataggcaggcagccacca

SEQ ID NO: 261215 - DNA, 25 bp, Homo sapien
gctatttgtatcctggaatgcacac

SEQ ID NO: 261216 - DNA, 25 bp, Homo sapien
gaatgccaggagggctatttgtatc

SEQ ID NO: 261217 - DNA, 25 bp, Homo sapien
gagagtggctcacccagttgacaca

SEQ ID NO: 261218 - DNA, 25 bp, Homo sapien
ctccaagccgtccactgtagaaggg

SEQ ID NO: 261219 - DNA, 25 bp, Homo sapien
aataagaccaagcagccactcggtg

SEQ ID NO: 261220 - DNA, 25 bp, Homo sapien
tgcccctgctgaatgtctaaactgt

SEQ ID NO: 261221 - DNA, 25 bp, Homo sapien
tgtagacatactgattctctggcct

SEQ ID NO: 261222 - DNA, 25 bp, Homo sapien
tagagacagcgctttctccagccat

SEQ ID NO: 261223 - DNA, 25 bp, Homo sapien
gctaaattcacaacgaggatgatga

SEQ ID NO: 261224 - DNA, 25 bp, Homo sapien
gctgtagtgtactgctcacgcacca

SEQ ID NO: 261225 - DNA, 25 bp, Homo sapien
tattctttggtgtccttatgcgttc

SEQ ID NO: 261226 - DNA, 25 bp, Homo sapien
ggctttctcgtctaatgttatctgg

SEQ ID NO: 261227 - DNA, 25 bp, Homo sapien
tcttggtcaacattttgctctagtc

SEQ ID NO: 261228 - DNA, 25 bp, Homo sapien
catcttgtgatgttttactggcttt

SEQ ID NO: 261229 - DNA, 25 bp, Homo sapien
caagtccttgcctcgcagcaggcat

SEQ ID NO: 261230 - DNA, 25 bp, Homo sapien
ctggtctgctgtgggtataggcaat

SEQ ID NO: 261231 - DNA, 25 bp, Homo sapien
gggtataggcaatcccaccaggaag

SEQ ID NO: 261232 - DNA, 25 bp, Homo sapien
gaatgtcacaatatcaagtccttgc

SEQ ID NO: 261233 - DNA, 25 bp, Homo sapien
aaaggcagttggaagaccagtggta

SEQ ID NO: 261234 - DNA, 25 bp, Homo sapien
gcagagaaaggcagttggaagacca

SEQ ID NO: 261235 - DNA, 25 bp, Homo sapien
agagaaaggcagttggaagaccagt

SEQ ID NO: 261236 - DNA, 25 bp, Homo sapien
ggcagttggaagaccagtggtaaaa

SEQ ID NO: 261237 - DNA, 25 bp, Homo sapien
ccttccaagcgcagtccatcttttg

SEQ ID NO: 261238 - DNA, 25 bp, Homo sapien
gttacacacaagtggcccattcctg

SEQ ID NO: 261239 - DNA, 25 bp, Homo sapien
ctttggcatacaatgggaataaaaa

SEQ ID NO: 261240 - DNA, 25 bp, Homo sapien
ggcatacaatgggaataaaaattct

SEQ ID NO: 261241 - DNA, 25 bp, Homo sapien
tactgaggccaccaaattcagatct

SEQ ID NO: 261242 - DNA, 25 bp, Homo sapien
taagttagttgatctaacataaaga

SEQ ID NO: 261243 - DNA, 25 bp, Homo sapien
cgcgcccagctgaaacgaatttctt

SEQ ID NO: 261244 - DNA, 25 bp, Homo sapien
tattatggtctaaactactgaggcc

SEQ ID NO: 261245 - DNA, 25 bp, Homo sapien
ctgccaataagatagccccagaagt

SEQ ID NO: 261246 - DNA, 25 bp, Homo sapien
ctgcctattatactgcaggtcatct

SEQ ID NO: 261247 - DNA, 25 bp, Homo sapien
gcctattatactgcaggtcatcttc

SEQ ID NO: 261248 - DNA, 25 bp, Homo sapien
aataagatagccccagaagtaacat

SEQ ID NO: 261249 - DNA, 25 bp, Homo sapien
gatacagtgatcctgatacggcggt

SEQ ID NO: 261250 - DNA, 25 bp, Homo sapien
gaagtcgtaacgatccaggccctgt

SEQ ID NO: 261251 - DNA, 25 bp, Homo sapien
tcccaagcgcagagaaagtaagctg

SEQ ID NO: 261252 - DNA, 25 bp, Homo sapien
gatgacagttccgtggtggagccaa

SEQ ID NO: 261253 - DNA, 25 bp, Homo sapien
ccagtggtacttttccgggtgctga

SEQ ID NO: 261254 - DNA, 25 bp, Homo sapien
tttttcaactctttatcacagttct

SEQ ID NO: 261255 - DNA, 25 bp, Homo sapien
ccactccggcgcctcaggaatgttt

SEQ ID NO: 261256 - DNA, 25 bp, Homo sapien
gtgccactccagtggtacttttccg

SEQ ID NO: 261257 - DNA, 25 bp, Homo sapien
tggggatcacaaggacgaaaggaac

SEQ ID NO: 261258 - DNA, 25 bp, Homo sapien
accccaaacgctccaaattaggcag

SEQ ID NO: 261259 - DNA, 25 bp, Homo sapien
tcctaatcacgccagtggctgagga

SEQ ID NO: 261260 - DNA, 25 bp, Homo sapien
caaattaggcagtctttgtagccag

SEQ ID NO: 261261 - DNA, 25 bp, Homo sapien
gtttcattttgaccctcacttccag

SEQ ID NO: 261262 - DNA, 25 bp, Homo sapien
aattataggagctacgtttggaatt

SEQ ID NO: 261263 - DNA, 25 bp, Homo sapien
tataggagctacgtttggaattaat

SEQ ID NO: 261264 - DNA, 25 bp, Homo sapien
cagtttcattttgaccctcacttcc

SEQ ID NO: 261265 - DNA, 25 bp, Homo sapien
cacataagtcaattaagcgtcgcta

SEQ ID NO: 261266 - DNA, 25 bp, Homo sapien
gatctcctggagaaccctcacataa

SEQ ID NO: 261267 - DNA, 25 bp, Homo sapien
ggctcgtccttctccgtagtagaga

SEQ ID NO: 261268 - DNA, 25 bp, Homo sapien
taggcttgattgtgaactagtgaca

SEQ ID NO: 261269 - DNA, 25 bp, Homo sapien
gagaatacgactgtggttccaccta

SEQ ID NO: 261270 - DNA, 25 bp, Homo sapien
tagtcagtggcgtagtacagaggct

SEQ ID NO: 261271 - DNA, 25 bp, Homo sapien
aatgggagctctagtcttccgggaa

SEQ ID NO: 261272 - DNA, 25 bp, Homo sapien
caagagctggtgtagtcatgccaag

SEQ ID NO: 261273 - DNA, 25 bp, Homo sapien
tcaggaagctctggtggctgctcct

SEQ ID NO: 261274 - DNA, 25 bp, Homo sapien
actcaggaagctctggtggctgctc

SEQ ID NO: 261275 - DNA, 25 bp, Homo sapien
ggtggaataatcactcaggaagctc

SEQ ID NO: 261276 - DNA, 25 bp, Homo sapien
ctggtggaataatcactcaggaagc

SEQ ID NO: 261277 - DNA, 25 bp, Homo sapien
tacttggcagaaagctagatgcatg

SEQ ID NO: 261278 - DNA, 25 bp, Homo sapien
tgccagagggtacttggcagaaagc

SEQ ID NO: 261279 - DNA, 25 bp, Homo sapien
tccataaggacgttgtaatgtctcc

SEQ ID NO: 261280 - DNA, 25 bp, Homo sapien
tgcatgtcctccataaggacgttgt

SEQ ID NO: 261281 - DNA, 25 bp, Homo sapien
agcctggaatacagcaagtccaagt

SEQ ID NO: 261282 - DNA, 25 bp, Homo sapien
ttcaacggatgctcccacagcctgt

SEQ ID NO: 261283 - DNA, 25 bp, Homo sapien
cagcctgtcccttaggttttgagga

SEQ ID NO: 261284 - DNA, 25 bp, Homo sapien
caaaggctgatcatctttcaacgga

SEQ ID NO: 261285 - DNA, 25 bp, Homo sapien
cagccaaaggctgatcatctttcaa

SEQ ID NO: 261286 - DNA, 25 bp, Homo sapien
gtgcacatgttggagtaatccaagc

SEQ ID NO: 261287 - DNA, 25 bp, Homo sapien
acatgtgtggtgcacatgttggagt

SEQ ID NO: 261288 - DNA, 25 bp, Homo sapien
tgtgtggtgcacatgttggagtaat

SEQ ID NO: 261289 - DNA, 25 bp, Homo sapien
tgtggtgcacatgttggagtaatcc

SEQ ID NO: 261290 - DNA, 25 bp, Homo sapien
ggccagctgcagctatcttttaaat

SEQ ID NO: 261291 - DNA, 25 bp, Homo sapien
ccagctgcagctatcttttaaatac

SEQ ID NO: 261292 - DNA, 25 bp, Homo sapien
ctttaagagagacggccagctgcag

SEQ ID NO: 261293 - DNA, 25 bp, Homo sapien
tttaagagagacggccagctgcagc

SEQ ID NO: 261294 - DNA, 25 bp, Homo sapien
caatgctggtacatcttgtggtcag

SEQ ID NO: 261295 - DNA, 25 bp, Homo sapien
tgggtaactgccagtgaagcaatgc

SEQ ID NO: 261296 - DNA, 25 bp, Homo sapien
gtgaagcaatgctggtacatcttgt

SEQ ID NO: 261297 - DNA, 25 bp, Homo sapien
actgccagtgaagcaatgctggtac

SEQ ID NO: 261298 - DNA, 25 bp, Homo sapien
tctacaataattctctctaatggga

SEQ ID NO: 261299 - DNA, 25 bp, Homo sapien
gagcattggtttctacaataattct

SEQ ID NO: 261300 - DNA, 25 bp, Homo sapien
taattctctctaatgggatcttttt

SEQ ID NO: 261301 - DNA, 25 bp, Homo sapien
ggagcattggtttctacaataattc

SEQ ID NO: 261302 - DNA, 25 bp, Homo sapien
gacaggtgttctcctgcaagatggc

SEQ ID NO: 261303 - DNA, 25 bp, Homo sapien
acaggtgttctcctgcaagatggcc

SEQ ID NO: 261304 - DNA, 25 bp, Homo sapien
gtgacaggtgttctcctgcaagatg

SEQ ID NO: 261305 - DNA, 25 bp, Homo sapien
caggtgttctcctgcaagatggcca

SEQ ID NO: 261306 - DNA, 25 bp, Homo sapien
cccttctgagttgcgcgcatttaca

SEQ ID NO: 261307 - DNA, 25 bp, Homo sapien
ctgagttgcgcgcatttacagtcac

SEQ ID NO: 261308 - DNA, 25 bp, Homo sapien
ctccccttctgagttgcgcgcattt

SEQ ID NO: 261309 - DNA, 25 bp, Homo sapien
gagttgcgcgcatttacagtcacat

SEQ ID NO: 261310 - DNA, 25 bp, Homo sapien
gatattgctttcatctgtatttctt

SEQ ID NO: 261311 - DNA, 25 bp, Homo sapien
gtttgctcttctgatattgctttca

SEQ ID NO: 261312 - DNA, 25 bp, Homo sapien
cagctggtttgctcttctgatattg

SEQ ID NO: 261313 - DNA, 25 bp, Homo sapien
gctcttctgatattgctttcatctg

SEQ ID NO: 261314 - DNA, 25 bp, Homo sapien
tgcactcttgcttcttttgaggcct

SEQ ID NO: 261315 - DNA, 25 bp, Homo sapien
gcctctgtaggcttgtctcagaatc

SEQ ID NO: 261316 - DNA, 25 bp, Homo sapien
tttggcactcagaagaacagaatca

SEQ ID NO: 261317 - DNA, 25 bp, Homo sapien
cttctgtagtatctgagaatttggc

SEQ ID NO: 261318 - DNA, 25 bp, Homo sapien
ctgagggcagcagatttggctccct

SEQ ID NO: 261319 - DNA, 25 bp, Homo sapien
tgagggcagcagatttggctccctc

SEQ ID NO: 261320 - DNA, 25 bp, Homo sapien
ttctggacttctaccattttgggac

SEQ ID NO: 261321 - DNA, 25 bp, Homo sapien
cagttactcgaagtttatctgtacc

SEQ ID NO: 261322 - DNA, 25 bp, Homo sapien
gccgtcgttggagttgatctgaaac

SEQ ID NO: 261323 - DNA, 25 bp, Homo sapien
tcatctacagtaaatagtggcttgc

SEQ ID NO: 261324 - DNA, 25 bp, Homo sapien
tatgagtaattcaagtacatgatgt

SEQ ID NO: 261325 - DNA, 25 bp, Homo sapien
acttgaactgcacagataatagtga

SEQ ID NO: 261326 - DNA, 25 bp, Homo sapien
actgcacagataatagtgacatttg

SEQ ID NO: 261327 - DNA, 25 bp, Homo sapien
ggaaacaggtacttgaactgcacag

SEQ ID NO: 261328 - DNA, 25 bp, Homo sapien
taaggtgctttgttggacaattacc

SEQ ID NO: 261329 - DNA, 25 bp, Homo sapien
ttacgcagctagtaattgcagaggt

SEQ ID NO: 261330 - DNA, 25 bp, Homo sapien
taattaaatgcgctagtgtccttca

SEQ ID NO: 261331 - DNA, 25 bp, Homo sapien
acaagtatctgcctgtgtcttctag

SEQ ID NO: 261332 - DNA, 25 bp, Homo sapien
cctggtcttttgttagtggctttgc

SEQ ID NO: 261333 - DNA, 25 bp, Homo sapien
gctttgccagcaattccagtatttc

SEQ ID NO: 261334 - DNA, 25 bp, Homo sapien
tgctggcaaatctaactttcctggt

SEQ ID NO: 261335 - DNA, 25 bp, Homo sapien
gattttcacttctttagttgctggc

SEQ ID NO: 261336 - DNA, 25 bp, Homo sapien
cagatatctgtcttcacgtcttttt

SEQ ID NO: 261337 - DNA, 25 bp, Homo sapien
atggactgcagcacggcgttgatcg

SEQ ID NO: 261338 - DNA, 25 bp, Homo sapien
tgtgcccttgggtatgtgtttgaag

SEQ ID NO: 261339 - DNA, 25 bp, Homo sapien
tatgtgtttgaaggatatggtactc

SEQ ID NO: 261340 - DNA, 25 bp, Homo sapien
actgaatgttcaaaaagagcccctt

SEQ ID NO: 261341 - DNA, 25 bp, Homo sapien
aggtcttgaaacgggtcggctctga

SEQ ID NO: 261342 - DNA, 25 bp, Homo sapien
tcttgaaacgggtcggctctgacaa

SEQ ID NO: 261343 - DNA, 25 bp, Homo sapien
gggtgtctccactgaatgttcaaaa

SEQ ID NO: 261344 - DNA, 25 bp, Homo sapien
tttcctatggctgatgtgatgtggg

SEQ ID NO: 261345 - DNA, 25 bp, Homo sapien
ccagcttgcatttagcaaagtcatt

SEQ ID NO: 261346 - DNA, 25 bp, Homo sapien
cagtgtgagaggcagattggagagg

SEQ ID NO: 261347 - DNA, 25 bp, Homo sapien
tgtgggagcgatgaagcattttaac

SEQ ID NO: 261348 - DNA, 25 bp, Homo sapien
cttagactccgagtgggggattcta

SEQ ID NO: 261349 - DNA, 25 bp, Homo sapien
ttagactccgagtgggggattctaa

SEQ ID NO: 261350 - DNA, 25 bp, Homo sapien
gcttagactccgagtgggggattct

SEQ ID NO: 261351 - DNA, 25 bp, Homo sapien
tagactccgagtgggggattctaat

SEQ ID NO: 261352 - DNA, 25 bp, Homo sapien
tatgcacaccccttggggcatccat

SEQ ID NO: 261353 - DNA, 25 bp, Homo sapien
cagcgtgagcttgaatatgcacacc

SEQ ID NO: 261354 - DNA, 25 bp, Homo sapien
ttttcccagcgtgagcttgaatatg

SEQ ID NO: 261355 - DNA, 25 bp, Homo sapien
tgagaaagcgcctcaattttcccag

SEQ ID NO: 261356 - DNA, 25 bp, Homo sapien
gccacagacaggtacagcttcccat

SEQ ID NO: 261357 - DNA, 25 bp, Homo sapien
tggacacacacagatttcgtagagg

SEQ ID NO: 261358 - DNA, 25 bp, Homo sapien
cctgcaccagcttgggtaagcacac

SEQ ID NO: 261359 - DNA, 25 bp, Homo sapien
cagcttgggtaagcacacagtttca

SEQ ID NO: 261360 - DNA, 25 bp, Homo sapien
gcagatgtggttgtgctcctggcac

SEQ ID NO: 261361 - DNA, 25 bp, Homo sapien
tcagaggcagatgtggttgtgctcc

SEQ ID NO: 261362 - DNA, 25 bp, Homo sapien
gaggcagatgtggttgtgctcctgg

SEQ ID NO: 261363 - DNA, 25 bp, Homo sapien
cagaggcagatgtggttgtgctcct

SEQ ID NO: 261364 - DNA, 25 bp, Homo sapien
gagaattcgcaattgttccggtgaa

SEQ ID NO: 261365 - DNA, 25 bp, Homo sapien
tatccacagtggagcgtcatacatt

SEQ ID NO: 261366 - DNA, 25 bp, Homo sapien
tcaacagggcattagatatccacag

SEQ ID NO: 261367 - DNA, 25 bp, Homo sapien
tgagcaaggctactctcaacagggc

SEQ ID NO: 261368 - DNA, 25 bp, Homo sapien
ctgtttcccataggagcacagactg

SEQ ID NO: 261369 - DNA, 25 bp, Homo sapien
taggagcacagactgaagtttttgg

SEQ ID NO: 261370 - DNA, 25 bp, Homo sapien
gtttcccataggagcacagactgaa

SEQ ID NO: 261371 - DNA, 25 bp, Homo sapien
gcacagactgaagtttttggatgac

SEQ ID NO: 261372 - DNA, 25 bp, Homo sapien
gaaaaccatcgtgcacaaaattctg

SEQ ID NO: 261373 - DNA, 25 bp, Homo sapien
acaatctgaaaaccatcgtgcacaa

SEQ ID NO: 261374 - DNA, 25 bp, Homo sapien
caaaattctgctcgttcagaagagc

SEQ ID NO: 261375 - DNA, 25 bp, Homo sapien
tttcaaatcgaaggggacacaaagc

SEQ ID NO: 261376 - DNA, 25 bp, Homo sapien
gtgcactgagtgcactttacatctt

SEQ ID NO: 261377 - DNA, 25 bp, Homo sapien
acatcttatgtttacaggcttcctg

SEQ ID NO: 261378 - DNA, 25 bp, Homo sapien
gctggctctgatcatgaatttgttg

SEQ ID NO: 261379 - DNA, 25 bp, Homo sapien
taatcctattacttgactaagagtg

SEQ ID NO: 261380 - DNA, 25 bp, Homo sapien
tatgtgacccctgctgatatcagat

SEQ ID NO: 261381 - DNA, 25 bp, Homo sapien
gttaaccgtcttgatctacagccag

SEQ ID NO: 261382 - DNA, 25 bp, Homo sapien
tatcaccacacgcaaaacagtagca

SEQ ID NO: 261383 - DNA, 25 bp, Homo sapien
tcttttacctgttgtgcgggctcca

SEQ ID NO: 261384 - DNA, 25 bp, Homo sapien
cccggacgcatgtttagagatttgg

SEQ ID NO: 261385 - DNA, 25 bp, Homo sapien
gcacaatgttcagatttcctcttcg

SEQ ID NO: 261386 - DNA, 25 bp, Homo sapien
gatgttctggatctttatctgggaa

SEQ ID NO: 261387 - DNA, 25 bp, Homo sapien
tcctcttcgtaatgcagaaatggca

SEQ ID NO: 261388 - DNA, 25 bp, Homo sapien
acacctcatcgtagtgtagaatgaa

SEQ ID NO: 261389 - DNA, 25 bp, Homo sapien
cacctcatcgtagtgtagaatgaag

SEQ ID NO: 261390 - DNA, 25 bp, Homo sapien
gacacctcatcgtagtgtagaatga

SEQ ID NO: 261391 - DNA, 25 bp, Homo sapien
gtggatgaacccctagccgctggag

SEQ ID NO: 261392 - DNA, 25 bp, Homo sapien
agtggaggggcatgactggcctgtg

SEQ ID NO: 261393 - DNA, 25 bp, Homo sapien
gatgaacccctagccgctggagcag

SEQ ID NO: 261394 - DNA, 25 bp, Homo sapien
ggcatgactggcctgtggatgaacc

SEQ ID NO: 261395 - DNA, 25 bp, Homo sapien
taagttgcaagttcctgctaaggaa

SEQ ID NO: 261396 - DNA, 25 bp, Homo sapien
taaggaactgaattctctgcaccat

SEQ ID NO: 261397 - DNA, 25 bp, Homo sapien
ttctctggatccatagatcatgttg

SEQ ID NO: 261398 - DNA, 25 bp, Homo sapien
agggacagattaagttgcaagttcc

SEQ ID NO: 261399 - DNA, 25 bp, Homo sapien
gaaagtcagtctgcatgcgtgattc

SEQ ID NO: 261400 - DNA, 25 bp, Homo sapien
ggtgactcattgttggctctgtcag

SEQ ID NO: 261401 - DNA, 25 bp, Homo sapien
tgcatgcgtgattctgagcccttcc

SEQ ID NO: 261402 - DNA, 25 bp, Homo sapien
ccattttactgcatcctgggagaca

SEQ ID NO: 261403 - DNA, 25 bp, Homo sapien
ccagggtggtctcaaccaggcatcc

SEQ ID NO: 261404 - DNA, 25 bp, Homo sapien
gtggtctcaaccaggcatcctttta

SEQ ID NO: 261405 - DNA, 25 bp, Homo sapien
cagggtggtctcaaccaggcatcct

SEQ ID NO: 261406 - DNA, 25 bp, Homo sapien
gggtggtctcaaccaggcatccttt

SEQ ID NO: 261407 - DNA, 25 bp, Homo sapien
cccagatcttcatgccctgagcaga

SEQ ID NO: 261408 - DNA, 25 bp, Homo sapien
ggcggagctgccctgtcggctcaca

SEQ ID NO: 261409 - DNA, 25 bp, Homo sapien
gcagtcgattgtggcactctctggg

SEQ ID NO: 261410 - DNA, 25 bp, Homo sapien
cctgagcagagaagcgagaacatct

SEQ ID NO: 261411 - DNA, 25 bp, Homo sapien
ctaaataccaggccccagatttaca

SEQ ID NO: 261412 - DNA, 25 bp, Homo sapien
gacattaggcccaaggtacacactg

SEQ ID NO: 261413 - DNA, 25 bp, Homo sapien
tttagtccccaggttcacagtcaca

SEQ ID NO: 261414 - DNA, 25 bp, Homo sapien
gattctaggtagactttagtgccca

SEQ ID NO: 261415 - DNA, 25 bp, Homo sapien
cactgattgttttgacccctgaagc

SEQ ID NO: 261416 - DNA, 25 bp, Homo sapien
catttcttaggagatcaccaagggc

SEQ ID NO: 261417 - DNA, 25 bp, Homo sapien
tgatagcggctttcaagggtcagct

SEQ ID NO: 261418 - DNA, 25 bp, Homo sapien
agttcatggataaggcaagctggcc

SEQ ID NO: 261419 - DNA, 25 bp, Homo sapien
acatagcgaagttgggaaaagcact

SEQ ID NO: 261420 - DNA, 25 bp, Homo sapien
ggggaccaaagggtgtggctccagc

SEQ ID NO: 261421 - DNA, 25 bp, Homo sapien
gaaaagcactggattggggaccaaa

SEQ ID NO: 261422 - DNA, 25 bp, Homo sapien
tgacttctctttgtgctaattagaa

SEQ ID NO: 261423 - DNA, 25 bp, Homo sapien
cttggatcttaaagactccttcagt

SEQ ID NO: 261424 - DNA, 25 bp, Homo sapien
tctatcctccttagccgtccctttc

SEQ ID NO: 261425 - DNA, 25 bp, Homo sapien
tttgggctgtgacaacgatccccag

SEQ ID NO: 261426 - DNA, 25 bp, Homo sapien
gctgtgacaacgatccccagtttcc

SEQ ID NO: 261427 - DNA, 25 bp, Homo sapien
gggctgtgacaacgatccccagttt

SEQ ID NO: 261428 - DNA, 25 bp, Homo sapien
gaatttgtgggtgaggagcggctgc

SEQ ID NO: 261429 - DNA, 25 bp, Homo sapien
atgtacagtttgggttggctgcttg

SEQ ID NO: 261430 - DNA, 25 bp, Homo sapien
gtgttgttggccatccgtcccctga

SEQ ID NO: 261431 - DNA, 25 bp, Homo sapien
tgctgtacagctgtgagtaatgagc

SEQ ID NO: 261432 - DNA, 25 bp, Homo sapien
acagagacgagagggccttcagcgt

SEQ ID NO: 261433 - DNA, 25 bp, Homo sapien
taacatacccgccttcggagaggac

SEQ ID NO: 261434 - DNA, 25 bp, Homo sapien
ctgcgggacagtcacgctgggaact

SEQ ID NO: 261435 - DNA, 25 bp, Homo sapien
aaaacaaaggccgagagaccctgat

SEQ ID NO: 261436 - DNA, 25 bp, Homo sapien
ggccgagagaccctgatgcccacag

SEQ ID NO: 261437 - DNA, 25 bp, Homo sapien
aggagccgcctggacccagtgcggc

SEQ ID NO: 261438 - DNA, 25 bp, Homo sapien
gacacctaaggttgatgacagtcct

SEQ ID NO: 261439 - DNA, 25 bp, Homo sapien
aaaattagcctttgcaagtgaagag

SEQ ID NO: 261440 - DNA, 25 bp, Homo sapien
aatgaacgacaatgctgcacttgca

SEQ ID NO: 261441 - DNA, 25 bp, Homo sapien
gcacttgcagcattattgacaccta

SEQ ID NO: 261442 - DNA, 25 bp, Homo sapien
ttgataaaatctgaccctcatacag

SEQ ID NO: 261443 - DNA, 25 bp, Homo sapien
gctggaacgaaagactggcacggta

SEQ ID NO: 261444 - DNA, 25 bp, Homo sapien
ctttggccacgtgatatggctggaa

SEQ ID NO: 261445 - DNA, 25 bp, Homo sapien
caggccacatgtgagcagagctttg

SEQ ID NO: 261446 - DNA, 25 bp, Homo sapien
tgctgctggaccttcagaagtcacc

SEQ ID NO: 261447 - DNA, 25 bp, Homo sapien
ctgctggaccttcagaagtcaccat

SEQ ID NO: 261448 - DNA, 25 bp, Homo sapien
tgcggagctccgtgtaactcttcag

SEQ ID NO: 261449 - DNA, 25 bp, Homo sapien
catggagttgggctccacgtcttga

SEQ ID NO: 261450 - DNA, 25 bp, Homo sapien
tttgtgtgtcatggagttgggctcc

SEQ ID NO: 261451 - DNA, 25 bp, Homo sapien
cgtcttgatgggtcgctgtcctcca

SEQ ID NO: 261452 - DNA, 25 bp, Homo sapien
gaccggtcaccaagtataactgcga

SEQ ID NO: 261453 - DNA, 25 bp, Homo sapien
tagatgaatctgctactccggaaag

SEQ ID NO: 261454 - DNA, 25 bp, Homo sapien
cctccagtggttgagcgtgaagtca

SEQ ID NO: 261455 - DNA, 25 bp, Homo sapien
aaaaatgatgtggttgtgccctcca

SEQ ID NO: 261456 - DNA, 25 bp, Homo sapien
tttgggcctgccagatgacacactg

SEQ ID NO: 261457 - DNA, 25 bp, Homo sapien
cagaggtgccatattcctgcagact

SEQ ID NO: 261458 - DNA, 25 bp, Homo sapien
tcttgtgtgaacctagcctgacagg

SEQ ID NO: 261459 - DNA, 25 bp, Homo sapien
gaacaagctgtcttcaacactcagg

SEQ ID NO: 261460 - DNA, 25 bp, Homo sapien
caggtaagggctaggaattcttccg

SEQ ID NO: 261461 - DNA, 25 bp, Homo sapien
tctttgtagcccagcaagttccagg

SEQ ID NO: 261462 - DNA, 25 bp, Homo sapien
taatgatgagaaacgtgcctgcttc

SEQ ID NO: 261463 - DNA, 25 bp, Homo sapien
gagaatgtgctcaggaatccgtgcg

SEQ ID NO: 261464 - DNA, 25 bp, Homo sapien
tccagtgcttactcctttcctcaaa

SEQ ID NO: 261465 - DNA, 25 bp, Homo sapien
gaagctggtgaccaccctccgtaag

SEQ ID NO: 261466 - DNA, 25 bp, Homo sapien
taagcatgctgtgttggtgattcca

SEQ ID NO: 261467 - DNA, 25 bp, Homo sapien
tctactgttgccagtctgcgctcct

SEQ ID NO: 261468 - DNA, 25 bp, Homo sapien
gttgcccaggcattacaataataaa

SEQ ID NO: 261469 - DNA, 25 bp, Homo sapien
taagtctaaaatcatggttctcaaa

SEQ ID NO: 261470 - DNA, 25 bp, Homo sapien
tagtacagcctgaatagcctatgaa

SEQ ID NO: 261471 - DNA, 25 bp, Homo sapien
cataaaaagatcatagcttcgcgtc

SEQ ID NO: 261472 - DNA, 25 bp, Homo sapien
cagacaacttaaacttcggcagaaa

SEQ ID NO: 261473 - DNA, 25 bp, Homo sapien
ctgaagacagacaacttaaacttcg

SEQ ID NO: 261474 - DNA, 25 bp, Homo sapien
gacagacaacttaaacttcggcaga

SEQ ID NO: 261475 - DNA, 25 bp, Homo sapien
gaagacagacaacttaaacttcggc

SEQ ID NO: 261476 - DNA, 25 bp, Homo sapien
ctgcatacaaatacttaggccaagt

SEQ ID NO: 261477 - DNA, 25 bp, Homo sapien
aaaccagccctaccatgatttatct

SEQ ID NO: 261478 - DNA, 25 bp, Homo sapien
accaaaccagccctaccatgattta

SEQ ID NO: 261479 - DNA, 25 bp, Homo sapien
ccaactcatgggtatttgatagcac

SEQ ID NO: 261480 - DNA, 25 bp, Homo sapien
taagggtcacacgtgagccatttct

SEQ ID NO: 261481 - DNA, 25 bp, Homo sapien
tctgggctgaatgcacaagccttca

SEQ ID NO: 261482 - DNA, 25 bp, Homo sapien
gtcttctgttcactgggttcctgga

SEQ ID NO: 261483 - DNA, 25 bp, Homo sapien
cattgctcaatgtagagccagggct

SEQ ID NO: 261484 - DNA, 25 bp, Homo sapien
tcccctacccttattcatggaataa

SEQ ID NO: 261485 - DNA, 25 bp, Homo sapien
tgtcaacgtcttttgcctcccttgc

SEQ ID NO: 261486 - DNA, 25 bp, Homo sapien
tgttccataagcctctgtcaacgtc

SEQ ID NO: 261487 - DNA, 25 bp, Homo sapien
tatctcgcttatagaactgccttcc

SEQ ID NO: 261488 - DNA, 25 bp, Homo sapien
tgaccacttgcagtgatttcactct

SEQ ID NO: 261489 - DNA, 25 bp, Homo sapien
taacacagctttattgatgggtaat

SEQ ID NO: 261490 - DNA, 25 bp, Homo sapien
agtcccagccacaggaattcctaat

SEQ ID NO: 261491 - DNA, 25 bp, Homo sapien
gaacacacctatcacttcagaagat

SEQ ID NO: 261492 - DNA, 25 bp, Homo sapien
caatttcaggcaggctccaaatcaa

SEQ ID NO: 261493 - DNA, 25 bp, Homo sapien
gaaaaatcaatttcaggcaggctcc

SEQ ID NO: 261494 - DNA, 25 bp, Homo sapien
aaaatcaatttcaggcaggctccaa

SEQ ID NO: 261495 - DNA, 25 bp, Homo sapien
atcaatttcaggcaggctccaaatc

SEQ ID NO: 261496 - DNA, 25 bp, Homo sapien
tattctcaagaaattggattggttt

SEQ ID NO: 261497 - DNA, 25 bp, Homo sapien
caagaaattggattggtttgatttg

SEQ ID NO: 261498 - DNA, 25 bp, Homo sapien
tttatattgaaatggtgttacaagt

SEQ ID NO: 261499 - DNA, 25 bp, Homo sapien
ttttatattgaaatggtgttacaag

SEQ ID NO: 261500 - DNA, 25 bp, Homo sapien
ggctggttacccaagtggtgcggca

SEQ ID NO: 261501 - DNA, 25 bp, Homo sapien
gtggctggttacccaagtggtgcgg

SEQ ID NO: 261502 - DNA, 25 bp, Homo sapien
tggctggttacccaagtggtgcggc

SEQ ID NO: 261503 - DNA, 25 bp, Homo sapien
gctggttacccaagtggtgcggcat

SEQ ID NO: 261504 - DNA, 25 bp, Homo sapien
tacctccgagtcagcacggtttcac

SEQ ID NO: 261505 - DNA, 25 bp, Homo sapien
agcacggtttcacccctgggagtgg

SEQ ID NO: 261506 - DNA, 25 bp, Homo sapien
ccacgaatgtggagtcataaatgaa

SEQ ID NO: 261507 - DNA, 25 bp, Homo sapien
actgcttccaagtggcacactacct

SEQ ID NO: 261508 - DNA, 25 bp, Homo sapien
atttgttggctcctcgaaacacatt

SEQ ID NO: 261509 - DNA, 25 bp, Homo sapien
gttggctcctcgaaacacattcctg

SEQ ID NO: 261510 - DNA, 25 bp, Homo sapien
ttgttggctcctcgaaacacattcc

SEQ ID NO: 261511 - DNA, 25 bp, Homo sapien
ttggctcctcgaaacacattcctgc

SEQ ID NO: 261512 - DNA, 25 bp, Homo sapien
cagtcaggcaattgataagggtcca

SEQ ID NO: 261513 - DNA, 25 bp, Homo sapien
agggtccattagcataaaaaatgag

SEQ ID NO: 261514 - DNA, 25 bp, Homo sapien
taggtaaaataactatcatccagca

SEQ ID NO: 261515 - DNA, 25 bp, Homo sapien
taatctaaaagatgattggtagctc

SEQ ID NO: 261516 - DNA, 25 bp, Homo sapien
tgtctgttctcctactggagtctga

SEQ ID NO: 261517 - DNA, 25 bp, Homo sapien
catcatagaagggtgacgagtgaga

SEQ ID NO: 261518 - DNA, 25 bp, Homo sapien
tctgagaacttagacctctggtgct

SEQ ID NO: 261519 - DNA, 25 bp, Homo sapien
tgctctaagttgaagggaagaagat

SEQ ID NO: 261520 - DNA, 25 bp, Homo sapien
gggtcttctcaagacgaccgttcat

SEQ ID NO: 261521 - DNA, 25 bp, Homo sapien
tccgatacgcgcatttggtgtaggg

SEQ ID NO: 261522 - DNA, 25 bp, Homo sapien
tcttctcaagacgaccgttcatcat

SEQ ID NO: 261523 - DNA, 25 bp, Homo sapien
ctgagtgagtaggttccgatacgcg

SEQ ID NO: 261524 - DNA, 25 bp, Homo sapien
tagtaacgtggacatgcgctgtcag

SEQ ID NO: 261525 - DNA, 25 bp, Homo sapien
cgctgtcagcatgagggtccatttc

SEQ ID NO: 261526 - DNA, 25 bp, Homo sapien
caggcaaaaagtgacgggaagtcca

SEQ ID NO: 261527 - DNA, 25 bp, Homo sapien
ggaaccatggaagacgacaggcaaa

SEQ ID NO: 261528 - DNA, 25 bp, Homo sapien
tctgctttggcagcatgctgattgg

SEQ ID NO: 261529 - DNA, 25 bp, Homo sapien
cagggccacgtgaggagttgcccga

SEQ ID NO: 261530 - DNA, 25 bp, Homo sapien
gagctgattggtctgctttggcagc

SEQ ID NO: 261531 - DNA, 25 bp, Homo sapien
ggagttgcccgaccatcccatgctg

SEQ ID NO: 261532 - DNA, 25 bp, Homo sapien
cagccttagcttcactggtggagag

SEQ ID NO: 261533 - DNA, 25 bp, Homo sapien
gctcctgagaaaggtgcggacaggg

SEQ ID NO: 261534 - DNA, 25 bp, Homo sapien
aagccatgcctgtttgtgtccctcc

SEQ ID NO: 261535 - DNA, 25 bp, Homo sapien
caagggcttgtgcattttccagaga

SEQ ID NO: 261536 - DNA, 25 bp, Homo sapien
ctatagggtggagcccacacttgct

SEQ ID NO: 261537 - DNA, 25 bp, Homo sapien
atagggtggagcccacacttgctta

SEQ ID NO: 261538 - DNA, 25 bp, Homo sapien
tagggtggagcccacacttgcttac

SEQ ID NO: 261539 - DNA, 25 bp, Homo sapien
tatagggtggagcccacacttgctt

SEQ ID NO: 261540 - DNA, 25 bp, Homo sapien
gagaacacgagcatagctcagcaac

SEQ ID NO: 261541 - DNA, 25 bp, Homo sapien
ttctttggatttgagaacacgagca

SEQ ID NO: 261542 - DNA, 25 bp, Homo sapien
tgagaacacgagcatagctcagcaa

SEQ ID NO: 261543 - DNA, 25 bp, Homo sapien
aatattctttggatttgagaacacg

SEQ ID NO: 261544 - DNA, 25 bp, Homo sapien
acaggtatagctagacagtaagcga

SEQ ID NO: 261545 - DNA, 25 bp, Homo sapien
aagcgagtcttccactatcgcaggg

SEQ ID NO: 261546 - DNA, 25 bp, Homo sapien
tagctagacagtaagcgagtcttcc

SEQ ID NO: 261547 - DNA, 25 bp, Homo sapien
tcaagagtacatgagccaggggtgt

SEQ ID NO: 261548 - DNA, 25 bp, Homo sapien
gacagtttctgttatctgtctgcca

SEQ ID NO: 261549 - DNA, 25 bp, Homo sapien
aggacagtttctgttatctgtctgc

SEQ ID NO: 261550 - DNA, 25 bp, Homo sapien
acaggacagtttctgttatctgtct

SEQ ID NO: 261551 - DNA, 25 bp, Homo sapien
acagtttctgttatctgtctgccag

SEQ ID NO: 261552 - DNA, 25 bp, Homo sapien
actggtaggagagctataattcagc

SEQ ID NO: 261553 - DNA, 25 bp, Homo sapien
gaggcaatgctggtagttctcccat

SEQ ID NO: 261554 - DNA, 25 bp, Homo sapien
agcttttcctagtgccagcgggttc

SEQ ID NO: 261555 - DNA, 25 bp, Homo sapien
tttcatctcgctgaactgcagatcc

SEQ ID NO: 261556 - DNA, 25 bp, Homo sapien
cagacgagcagggagatgaaatgcc

SEQ ID NO: 261557 - DNA, 25 bp, Homo sapien
tcagcacaagcccagacgaaacttc

SEQ ID NO: 261558 - DNA, 25 bp, Homo sapien
taaccatgcagatcaaaggcagacg

SEQ ID NO: 261559 - DNA, 25 bp, Homo sapien
tgaaatgcctgtaatctgatcagtg

SEQ ID NO: 261560 - DNA, 25 bp, Homo sapien
aacatgctgagctctttgcagtact

SEQ ID NO: 261561 - DNA, 25 bp, Homo sapien
ctgcaacatgctgagctctttgcag

SEQ ID NO: 261562 - DNA, 25 bp, Homo sapien
atgctgagctctttgcagtacttac

SEQ ID NO: 261563 - DNA, 25 bp, Homo sapien
gcaacatgctgagctctttgcagta

SEQ ID NO: 261564 - DNA, 25 bp, Homo sapien
tccccctcagatgctgagggaacaa

SEQ ID NO: 261565 - DNA, 25 bp, Homo sapien
cagagcatatgcaaatttataccat

SEQ ID NO: 261566 - DNA, 25 bp, Homo sapien
gagggaacaaacactatagttccca

SEQ ID NO: 261567 - DNA, 25 bp, Homo sapien
ttcccactttccctcatttgagtgt

SEQ ID NO: 261568 - DNA, 25 bp, Homo sapien
cgcgctctcccgtagcccggcaacg

SEQ ID NO: 261569 - DNA, 25 bp, Homo sapien
agcgtgcacaccgtgcacctcccag

SEQ ID NO: 261570 - DNA, 25 bp, Homo sapien
cagtcctggttaaggcgcagggcgc

SEQ ID NO: 261571 - DNA, 25 bp, Homo sapien
gggcgcgcggagcagtcctggttaa

SEQ ID NO: 261572 - DNA, 25 bp, Homo sapien
tcttctccagtgtaagtagccccta

SEQ ID NO: 261573 - DNA, 25 bp, Homo sapien
catatgtgaccaatccaagctgacc

SEQ ID NO: 261574 - DNA, 25 bp, Homo sapien
ggaacaatggtagcatcagggacta

SEQ ID NO: 261575 - DNA, 25 bp, Homo sapien
tgacatgtggactagaagataaccc

SEQ ID NO: 261576 - DNA, 25 bp, Homo sapien
aggtcagaaccccatttcttgaagg

SEQ ID NO: 261577 - DNA, 25 bp, Homo sapien
aatgcaagtcactgtggtagcacaa

SEQ ID NO: 261578 - DNA, 25 bp, Homo sapien
gaaggtagtgctctaatacagacaa

SEQ ID NO: 261579 - DNA, 25 bp, Homo sapien
tgtggtagcacaaatccaggtcaga

SEQ ID NO: 261580 - DNA, 25 bp, Homo sapien
caaatgtatttattgttggagagtt

SEQ ID NO: 261581 - DNA, 25 bp, Homo sapien
tcttatcaaatgtatttattgttgg

SEQ ID NO: 261582 - DNA, 25 bp, Homo sapien
ctttcttatcaaatgtatttattgt

SEQ ID NO: 261583 - DNA, 25 bp, Homo sapien
atcaaatgtatttattgttggagag

SEQ ID NO: 261584 - DNA, 25 bp, Homo sapien
ttctcttgttctagtagcactttta

SEQ ID NO: 261585 - DNA, 25 bp, Homo sapien
atataattctgtacaaaccttctcc

SEQ ID NO: 261586 - DNA, 25 bp, Homo sapien
cattgtttttgatgcatataattct

SEQ ID NO: 261587 - DNA, 25 bp, Homo sapien
ggacattgtttttgatgcatataat

SEQ ID NO: 261588 - DNA, 25 bp, Homo sapien
ataattctgtacaaaccttctccac

SEQ ID NO: 261589 - DNA, 25 bp, Homo sapien
cctgaattcttgctgtctacagtct

SEQ ID NO: 261590 - DNA, 25 bp, Homo sapien
cacagtttccagaccgatccctgaa

SEQ ID NO: 261591 - DNA, 25 bp, Homo sapien
ggaacacagtttccagaccgatccc

SEQ ID NO: 261592 - DNA, 25 bp, Homo sapien
gtttccagaccgatccctgaattct

SEQ ID NO: 261593 - DNA, 25 bp, Homo sapien
catgggagttggatctgctgagcta

SEQ ID NO: 261594 - DNA, 25 bp, Homo sapien
ccatgggagttggatctgctgagct

SEQ ID NO: 261595 - DNA, 25 bp, Homo sapien
ggtgtctcccaatcgggaggctggg

SEQ ID NO: 261596 - DNA, 25 bp, Homo sapien
tcctacaaacagtcaggccctttgc

SEQ ID NO: 261597 - DNA, 25 bp, Homo sapien
gaggtgtctcccaatcgggaggctg

SEQ ID NO: 261598 - DNA, 25 bp, Homo sapien
ttcctacaaacagtcaggccctttg

SEQ ID NO: 261599 - DNA, 25 bp, Homo sapien
aaagcttgaaggaagtacgcagtac

SEQ ID NO: 261600 - DNA, 25 bp, Homo sapien
tacttccccgaatccttgagaagac

SEQ ID NO: 261601 - DNA, 25 bp, Homo sapien
gaagtacgcagtacttccccgaatc

SEQ ID NO: 261602 - DNA, 25 bp, Homo sapien
cttaaaagcttgaaggaagtacgca

SEQ ID NO: 261603 - DNA, 25 bp, Homo sapien
agccggcacgtcacacactgtgcat

SEQ ID NO: 261604 - DNA, 25 bp, Homo sapien
acacactgtgcatcctccccatagc

SEQ ID NO: 261605 - DNA, 25 bp, Homo sapien
tgtgcagccggcacgtcacacactg

SEQ ID NO: 261606 - DNA, 25 bp, Homo sapien
atcctccccatagccgaagccacat

SEQ ID NO: 261607 - DNA, 25 bp, Homo sapien
ctggcaagcagtccccgcagatggc

SEQ ID NO: 261608 - DNA, 25 bp, Homo sapien
actgcgcagtccagacagggcttgc

SEQ ID NO: 261609 - DNA, 25 bp, Homo sapien
tgaaagcggttcaccactgcgcagt

SEQ ID NO: 261610 - DNA, 25 bp, Homo sapien
tggtggctgaacaatttgccttctg

SEQ ID NO: 261611 - DNA, 25 bp, Homo sapien
aggcacacactccatgtcttgaaag

SEQ ID NO: 261612 - DNA, 25 bp, Homo sapien
cacaaggcacacactccatgtcttg

SEQ ID NO: 261613 - DNA, 25 bp, Homo sapien
gccgacaagtttcgtcttcctataa

SEQ ID NO: 261614 - DNA, 25 bp, Homo sapien
catgtcttgaaagccgacaagtttc

SEQ ID NO: 261615 - DNA, 25 bp, Homo sapien
aaggccaggcgtccccttggctctg

SEQ ID NO: 261616 - DNA, 25 bp, Homo sapien
tccccttggctctgcctgtgttgcg

SEQ ID NO: 261617 - DNA, 25 bp, Homo sapien
tcaaaaggccaggcgtccccttggc

SEQ ID NO: 261618 - DNA, 25 bp, Homo sapien
ccccttggctctgcctgtgttgcgt

SEQ ID NO: 261619 - DNA, 25 bp, Homo sapien
ggtctgttccttagcaggcaggtac

SEQ ID NO: 261620 - DNA, 25 bp, Homo sapien
gcagccaagatgtgaatccaacact

SEQ ID NO: 261621 - DNA, 25 bp, Homo sapien
ccatcagtacaaagcgcagccaaga

SEQ ID NO: 261622 - DNA, 25 bp, Homo sapien
tatcatgttgctggactactagttc

SEQ ID NO: 261623 - DNA, 25 bp, Homo sapien
cacatctgggtcagggtatggccga

SEQ ID NO: 261624 - DNA, 25 bp, Homo sapien
gaagacaaacatcagagccagatgc

SEQ ID NO: 261625 - DNA, 25 bp, Homo sapien
agatgcaccatgagatcctccccgt

SEQ ID NO: 261626 - DNA, 25 bp, Homo sapien
tcaggcacaaaactccatggaaccc

SEQ ID NO: 261627 - DNA, 25 bp, Homo sapien
ttattttttgtgaatatggtgtctc

SEQ ID NO: 261628 - DNA, 25 bp, Homo sapien
tttttgtgaatatggtgtctcacta

SEQ ID NO: 261629 - DNA, 25 bp, Homo sapien
agcacctggcccccatctgagctgc

SEQ ID NO: 261630 - DNA, 25 bp, Homo sapien
acagcacctggcccccatctgagct

SEQ ID NO: 261631 - DNA, 25 bp, Homo sapien
gctttgtgggctcatcatgcagagg

SEQ ID NO: 261632 - DNA, 25 bp, Homo sapien
attagtcctttaggcactggctttg

SEQ ID NO: 261633 - DNA, 25 bp, Homo sapien
tcagtaaatggagcccttaattagt

SEQ ID NO: 261634 - DNA, 25 bp, Homo sapien
ggcactggctttgtgggctcatcat

SEQ ID NO: 261635 - DNA, 25 bp, Homo sapien
tgtatgttaattaccataaatacca

SEQ ID NO: 261636 - DNA, 25 bp, Homo sapien
tggcacttgccggattgtaagtaca

SEQ ID NO: 261637 - DNA, 25 bp, Homo sapien
ttgccggattgtaagtacagctgtt

SEQ ID NO: 261638 - DNA, 25 bp, Homo sapien
cctctttggcacttgccggattgta

SEQ ID NO: 261639 - DNA, 25 bp, Homo sapien
gccctgctggccaaatcttccaggg

SEQ ID NO: 261640 - DNA, 25 bp, Homo sapien
gggcacgcagaccactgccctgctg

SEQ ID NO: 261641 - DNA, 25 bp, Homo sapien
ctggccaaatcttccagggggcctg

SEQ ID NO: 261642 - DNA, 25 bp, Homo sapien
ggccaaatcttccagggggcctgac

SEQ ID NO: 261643 - DNA, 25 bp, Homo sapien
tgtcgcccgctccctccagggccgg

SEQ ID NO: 261644 - DNA, 25 bp, Homo sapien
tgggttatgtgtgggtcagcttcac

SEQ ID NO: 261645 - DNA, 25 bp, Homo sapien
tgtgtgggtcagcttcacttaggga

SEQ ID NO: 261646 - DNA, 25 bp, Homo sapien
gggtgtgggttatgtgtgggtcagc

SEQ ID NO: 261647 - DNA, 25 bp, Homo sapien
tatgtgtgggtcagcttcacttagg

SEQ ID NO: 261648 - DNA, 25 bp, Homo sapien
cgttaagctaggtccagcaagaagc

SEQ ID NO: 261649 - DNA, 25 bp, Homo sapien
caggctcgtcgttaagctaggtcca

SEQ ID NO: 261650 - DNA, 25 bp, Homo sapien
tcgtcgttaagctaggtccagcaag

SEQ ID NO: 261651 - DNA, 25 bp, Homo sapien
taagctaggtccagcaagaagccac

SEQ ID NO: 261652 - DNA, 25 bp, Homo sapien
attctctcccaaggtaggagttgga

SEQ ID NO: 261653 - DNA, 25 bp, Homo sapien
tacttgtttggttcactgtcattct

SEQ ID NO: 261654 - DNA, 25 bp, Homo sapien
atactttacttgtttggttcactgt

SEQ ID NO: 261655 - DNA, 25 bp, Homo sapien
cattctctcccaaggtaggagttgg

SEQ ID NO: 261656 - DNA, 25 bp, Homo sapien
gccactgtggcctggctgtgctctc

SEQ ID NO: 261657 - DNA, 25 bp, Homo sapien
ggccactgtggcctggctgtgctct

SEQ ID NO: 261658 - DNA, 25 bp, Homo sapien
ccactgtggcctggctgtgctctcc

SEQ ID NO: 261659 - DNA, 25 bp, Homo sapien
caggcacactccaatagatctgctg

SEQ ID NO: 261660 - DNA, 25 bp, Homo sapien
tgccaggcacactccaatagatctg

SEQ ID NO: 261661 - DNA, 25 bp, Homo sapien
tattagggcaggtgagctcctgcag

SEQ ID NO: 261662 - DNA, 25 bp, Homo sapien
cagaagggcctgaacattctattag

SEQ ID NO: 261663 - DNA, 25 bp, Homo sapien
gggcagtaagcatgctgagcaacgt

SEQ ID NO: 261664 - DNA, 25 bp, Homo sapien
gggcattctgtggaggtgactgcat

SEQ ID NO: 261665 - DNA, 25 bp, Homo sapien
cacagagatgttcggggtcctccgc

SEQ ID NO: 261666 - DNA, 25 bp, Homo sapien
tcttggtgtctgcatgacgggccac

SEQ ID NO: 261667 - DNA, 25 bp, Homo sapien
gtttatggcgaagctggcaggcacc

SEQ ID NO: 261668 - DNA, 25 bp, Homo sapien
actgcagatgcagtgtttatggcga

SEQ ID NO: 261669 - DNA, 25 bp, Homo sapien
tgcagtgtttatggcgaagctggca

SEQ ID NO: 261670 - DNA, 25 bp, Homo sapien
ggaatggggtcagcatgctctgaac

SEQ ID NO: 261671 - DNA, 25 bp, Homo sapien
ctggaggccgtggacgcgatcttca

SEQ ID NO: 261672 - DNA, 25 bp, Homo sapien
cagataacggcagccagcgccgtgt

SEQ ID NO: 261673 - DNA, 25 bp, Homo sapien
ttcacgaggttgaccttgctggcac

SEQ ID NO: 261674 - DNA, 25 bp, Homo sapien
tggccagagcgctgcagataacggc

SEQ ID NO: 261675 - DNA, 25 bp, Homo sapien
agctgggtttcttctccataaactg

SEQ ID NO: 261676 - DNA, 25 bp, Homo sapien
ggtttcttctccataaactgtctct

SEQ ID NO: 261677 - DNA, 25 bp, Homo sapien
gctgggtttcttctccataaactgt

SEQ ID NO: 261678 - DNA, 25 bp, Homo sapien
ttcttctccataaactgtctcttac

SEQ ID NO: 261679 - DNA, 25 bp, Homo sapien
tgtggaacacttgcacgacaatagt

SEQ ID NO: 261680 - DNA, 25 bp, Homo sapien
tgcgttctttcacaactcactggtg

SEQ ID NO: 261681 - DNA, 25 bp, Homo sapien
gacaatagtaataaatgcccttccc

SEQ ID NO: 261682 - DNA, 25 bp, Homo sapien
gaaatgtaatgagctcaaaacttac

SEQ ID NO: 261683 - DNA, 25 bp, Homo sapien
gccttgtaagtctccttacaaagct

SEQ ID NO: 261684 - DNA, 25 bp, Homo sapien
tttttgcctagtggcgcagggacat

SEQ ID NO: 261685 - DNA, 25 bp, Homo sapien
cacagccttgtaagtctccttacaa

SEQ ID NO: 261686 - DNA, 25 bp, Homo sapien
tttatttttgcctagtggcgcaggg

SEQ ID NO: 261687 - DNA, 25 bp, Homo sapien
tgaggtctgtcaaaacacgacagct

SEQ ID NO: 261688 - DNA, 25 bp, Homo sapien
tgaatgtcctgtgaccgcagagacc

SEQ ID NO: 261689 - DNA, 25 bp, Homo sapien
gctcagagccgttgtactgaatgtc

SEQ ID NO: 261690 - DNA, 25 bp, Homo sapien
tctgtgggcatattcgtggagctga

SEQ ID NO: 261691 - DNA, 25 bp, Homo sapien
ttgcctgaagactggctgcagaatg

SEQ ID NO: 261692 - DNA, 25 bp, Homo sapien
cagcacatggatgggagcaagcgca

SEQ ID NO: 261693 - DNA, 25 bp, Homo sapien
cacaaccaagagtcgccgggttggg

SEQ ID NO: 261694 - DNA, 25 bp, Homo sapien
cagaatgcaccccacaaccaagagt

SEQ ID NO: 261695 - DNA, 25 bp, Homo sapien
tgagggatccgaagaaagtcggcac

SEQ ID NO: 261696 - DNA, 25 bp, Homo sapien
cacagatggactgcgtgagggatcc

SEQ ID NO: 261697 - DNA, 25 bp, Homo sapien
tctgaaaactcgccacagatggact

SEQ ID NO: 261698 - DNA, 25 bp, Homo sapien
tccgaagaaagtcggcaccatctcc

SEQ ID NO: 261699 - DNA, 25 bp, Homo sapien
gaatgagactggactggaacagccc

SEQ ID NO: 261700 - DNA, 25 bp, Homo sapien
tggctgggtggatgacagcaccact

SEQ ID NO: 261701 - DNA, 25 bp, Homo sapien
agcaccactctcctgatctagctgg

SEQ ID NO: 261702 - DNA, 25 bp, Homo sapien
tatttgaatccaaagacgttgagct

SEQ ID NO: 261703 - DNA, 25 bp, Homo sapien
acagggaacccagtcgctgccttac

SEQ ID NO: 261704 - DNA, 25 bp, Homo sapien
tcacagggaacccagtcgctgcctt

SEQ ID NO: 261705 - DNA, 25 bp, Homo sapien
cacagggaacccagtcgctgcctta

SEQ ID NO: 261706 - DNA, 25 bp, Homo sapien
gaataaaagaatgcagctgtccact

SEQ ID NO: 261707 - DNA, 25 bp, Homo sapien
cagagttctgatctactgtaagtca

SEQ ID NO: 261708 - DNA, 25 bp, Homo sapien
ccaaatcttatgctgggaacagagt

SEQ ID NO: 261709 - DNA, 25 bp, Homo sapien
gctgtgctaagtggttgtacttaca

SEQ ID NO: 261710 - DNA, 25 bp, Homo sapien
ctgatataatcaggccaggatacag

SEQ ID NO: 261711 - DNA, 25 bp, Homo sapien
tataatcaggccaggatacagaatg

SEQ ID NO: 261712 - DNA, 25 bp, Homo sapien
atcaggccaggatacagaatgacat

SEQ ID NO: 261713 - DNA, 25 bp, Homo sapien
gtctctgatataatcaggccaggat

SEQ ID NO: 261714 - DNA, 25 bp, Homo sapien
tgtctatagaatcccctaaaagttc

SEQ ID NO: 261715 - DNA, 25 bp, Homo sapien
tggatggctcaaaagaacaagatca

SEQ ID NO: 261716 - DNA, 25 bp, Homo sapien
gatactttgtatgtgttaactgcct

SEQ ID NO: 261717 - DNA, 25 bp, Homo sapien
caagatcagtgaacagcctttccta

SEQ ID NO: 261718 - DNA, 25 bp, Homo sapien
gaaaaacagtcattagtcagctggc

SEQ ID NO: 261719 - DNA, 25 bp, Homo sapien
aaagcaggcaatgagttggctccgg

SEQ ID NO: 261720 - DNA, 25 bp, Homo sapien
tccgggatgacctcgtatgaagacg

SEQ ID NO: 261721 - DNA, 25 bp, Homo sapien
cagatgatctcctaacaagagaggc

SEQ ID NO: 261722 - DNA, 25 bp, Homo sapien
cagtgacttgggcagggcaattcca

SEQ ID NO: 261723 - DNA, 25 bp, Homo sapien
tgacatcggcactctagcagctgag

SEQ ID NO: 261724 - DNA, 25 bp, Homo sapien
gaggtcacgcgaggaaactacttgc

SEQ ID NO: 261725 - DNA, 25 bp, Homo sapien
tacacaattggaaggagcacgacaa

SEQ ID NO: 261726 - DNA, 25 bp, Homo sapien
gcagccagaagctttctgtcacttc

SEQ ID NO: 261727 - DNA, 25 bp, Homo sapien
atatccaaacagctctcagatgcag

SEQ ID NO: 261728 - DNA, 25 bp, Homo sapien
tcacttcaataatgccaggatgctg

SEQ ID NO: 261729 - DNA, 25 bp, Homo sapien
gatgctggggagcagccggagtagt

SEQ ID NO: 261730 - DNA, 25 bp, Homo sapien
tcactgccttccgcctccacgactc

SEQ ID NO: 261731 - DNA, 25 bp, Homo sapien
gtctagctgttgattatcgagattg

SEQ ID NO: 261732 - DNA, 25 bp, Homo sapien
caaagtctagctgttgattatcgag

SEQ ID NO: 261733 - DNA, 25 bp, Homo sapien
gtttcacagtacaaagtctagctgt

SEQ ID NO: 261734 - DNA, 25 bp, Homo sapien
gggctgacagcaatccatcggtctt

SEQ ID NO: 261735 - DNA, 25 bp, Homo sapien
tatggggctgacagcaatccatcgg

SEQ ID NO: 261736 - DNA, 25 bp, Homo sapien
gcaatccatcggtcttctcctggct

SEQ ID NO: 261737 - DNA, 25 bp, Homo sapien
gacagcaatccatcggtcttctcct

SEQ ID NO: 261738 - DNA, 25 bp, Homo sapien
atgtttgggattcttgtcctccttg

SEQ ID NO: 261739 - DNA, 25 bp, Homo sapien
cgttaataactatgtttgggattct

SEQ ID NO: 261740 - DNA, 25 bp, Homo sapien
gatcgcttgcttcctcagtccatga

SEQ ID NO: 261741 - DNA, 25 bp, Homo sapien
ggctcttagtcaccgcttgcacaag

SEQ ID NO: 261742 - DNA, 25 bp, Homo sapien
cagtgcatctaaacctctctgctgt

SEQ ID NO: 261743 - DNA, 25 bp, Homo sapien
gcctggccctttgcggttgctttct

SEQ ID NO: 261744 - DNA, 25 bp, Homo sapien
gatcctgttccagatcgcaatgctg

SEQ ID NO: 261745 - DNA, 25 bp, Homo sapien
tcttaggggcttatgagcgccctgc

SEQ ID NO: 261746 - DNA, 25 bp, Homo sapien
agcaccctcagttacggcctctatg

SEQ ID NO: 261747 - DNA, 25 bp, Homo sapien
ttacggcctctatgtccagctgctg

SEQ ID NO: 261748 - DNA, 25 bp, Homo sapien
ctcagaggtggcgtcctgacagtga

SEQ ID NO: 261749 - DNA, 25 bp, Homo sapien
cagaggtggcgtcctgacagtgaca

SEQ ID NO: 261750 - DNA, 25 bp, Homo sapien
cccagtccctctctcactgaacaca

SEQ ID NO: 261751 - DNA, 25 bp, Homo sapien
gaaccccagtccctctctcactgaa

SEQ ID NO: 261752 - DNA, 25 bp, Homo sapien
acctccatccccttgttcctgtggc

SEQ ID NO: 261753 - DNA, 25 bp, Homo sapien
gcgctggaacctcgacgttcacctc

SEQ ID NO: 261754 - DNA, 25 bp, Homo sapien
tggaacctcgacgttcacctccatc

SEQ ID NO: 261755 - DNA, 25 bp, Homo sapien
gctggaacctcgacgttcacctcca

SEQ ID NO: 261756 - DNA, 25 bp, Homo sapien
gacacagggctatgggatctggctt

SEQ ID NO: 261757 - DNA, 25 bp, Homo sapien
agccatggacacagggctatgggat

SEQ ID NO: 261758 - DNA, 25 bp, Homo sapien
tcatctttagtggttctgacggtgt

SEQ ID NO: 261759 - DNA, 25 bp, Homo sapien
cggtgtgagaggctattccagccat

SEQ ID NO: 261760 - DNA, 25 bp, Homo sapien
accaggaaaagtcagagctctgcct

SEQ ID NO: 261761 - DNA, 25 bp, Homo sapien
tcccttcagtcgaaatgatgcagtt

SEQ ID NO: 261762 - DNA, 25 bp, Homo sapien
ggcataatcactactaaacatcaat

SEQ ID NO: 261763 - DNA, 25 bp, Homo sapien
catcaataggttttgtaactttgga

SEQ ID NO: 261764 - DNA, 25 bp, Homo sapien
ctgcagcaacttttctaccactctg

SEQ ID NO: 261765 - DNA, 25 bp, Homo sapien
tctggccgatctgcagtttccatca

SEQ ID NO: 261766 - DNA, 25 bp, Homo sapien
gcagatggctccctcttcgtgttct

SEQ ID NO: 261767 - DNA, 25 bp, Homo sapien
cagtgaggcgagcagcactggtgca

SEQ ID NO: 261768 - DNA, 25 bp, Homo sapien
cccgccactggccagtttcagtgaa

SEQ ID NO: 261769 - DNA, 25 bp, Homo sapien
tccttttggtctaagcggccaggaa

SEQ ID NO: 261770 - DNA, 25 bp, Homo sapien
tttcagtgaaggcactcgcaccctc

SEQ ID NO: 261771 - DNA, 25 bp, Homo sapien
ttttggtctaagcggccaggaactg

SEQ ID NO: 261772 - DNA, 25 bp, Homo sapien
gcctccagtgtaccacatgtggctc

SEQ ID NO: 261773 - DNA, 25 bp, Homo sapien
tccagcctccagtgtaccacatgtg

SEQ ID NO: 261774 - DNA, 25 bp, Homo sapien
tccttctcctctagccaggcatgga

SEQ ID NO: 261775 - DNA, 25 bp, Homo sapien
cagcctccagtgtaccacatgtggc

SEQ ID NO: 261776 - DNA, 25 bp, Homo sapien
gagaagatctggcagttgtgaattt

SEQ ID NO: 261777 - DNA, 25 bp, Homo sapien
caccatagaaaaggtcttgaattcc

SEQ ID NO: 261778 - DNA, 25 bp, Homo sapien
accctataaggcccctatcatctgg

SEQ ID NO: 261779 - DNA, 25 bp, Homo sapien
tggcccacgggtgtcctgtactggc

SEQ ID NO: 261780 - DNA, 25 bp, Homo sapien
caactgaggtaaagctggcccctgc

SEQ ID NO: 261781 - DNA, 25 bp, Homo sapien
aactgaggtaaagctggcccctgct

SEQ ID NO: 261782 - DNA, 25 bp, Homo sapien
ttcaaaaggtaatgtctgaatggaa

SEQ ID NO: 261783 - DNA, 25 bp, Homo sapien
caaaaggtaatgtctgaatggaagt

SEQ ID NO: 261784 - DNA, 25 bp, Homo sapien
tggggtgacaggcttcaaaaggtaa

SEQ ID NO: 261785 - DNA, 25 bp, Homo sapien
aagtacaattgtttctgcatgcttt

SEQ ID NO: 261786 - DNA, 25 bp, Homo sapien
gaggaaagggttctgagtggtagaa

SEQ ID NO: 261787 - DNA, 25 bp, Homo sapien
aagacaccacaagagagcatggatc

SEQ ID NO: 261788 - DNA, 25 bp, Homo sapien
ggtagaatggtgacagcgctcagca

SEQ ID NO: 261789 - DNA, 25 bp, Homo sapien
caagagagcatggatcatggcagag

SEQ ID NO: 261790 - DNA, 25 bp, Homo sapien
tggtggagcgaacccgtcactagtg

SEQ ID NO: 261791 - DNA, 25 bp, Homo sapien
cgtcactagtggacatgcagtggca

SEQ ID NO: 261792 - DNA, 25 bp, Homo sapien
tttggccagcagttgtttgatcacc

SEQ ID NO: 261793 - DNA, 25 bp, Homo sapien
ttatgtgagagcagcggctacccag

SEQ ID NO: 261794 - DNA, 25 bp, Homo sapien
tcggtactgaccagaaagcagagca

SEQ ID NO: 261795 - DNA, 25 bp, Homo sapien
gcttctcaccaaagaccaatgatga

SEQ ID NO: 261796 - DNA, 25 bp, Homo sapien
tagggctttgcgtttgactgagtgc

SEQ ID NO: 261797 - DNA, 25 bp, Homo sapien
cagtggtgtctcctctgtacccaaa

SEQ ID NO: 261798 - DNA, 25 bp, Homo sapien
aagaaacactctacacctcttaaat

SEQ ID NO: 261799 - DNA, 25 bp, Homo sapien
ttctgatttcattgttcgcttctgt

SEQ ID NO: 261800 - DNA, 25 bp, Homo sapien
cactctacacctcttaaatcaaggt

SEQ ID NO: 261801 - DNA, 25 bp, Homo sapien
ttcattgttcgcttctgtaattctg

SEQ ID NO: 261802 - DNA, 25 bp, Homo sapien
ggatctggacttcgaaactttcctc

SEQ ID NO: 261803 - DNA, 25 bp, Homo sapien
taagtgccctcgtttccgacttgga

SEQ ID NO: 261804 - DNA, 25 bp, Homo sapien
tgttgcctcctggtgaacgcagttc

SEQ ID NO: 261805 - DNA, 25 bp, Homo sapien
tctgttgatgacttcgtaagtgccc

SEQ ID NO: 261806 - DNA, 25 bp, Homo sapien
ctgttggttgccctggttcagagcc

SEQ ID NO: 261807 - DNA, 25 bp, Homo sapien
tcaaacttgacaagggttgtgtctc

SEQ ID NO: 261808 - DNA, 25 bp, Homo sapien
gacaagggttgtgtctccacaccac

SEQ ID NO: 261809 - DNA, 25 bp, Homo sapien
ccaccccatgtgctttctggtggga

SEQ ID NO: 261810 - DNA, 25 bp, Homo sapien
cttccagacagataatttccaaatt

SEQ ID NO: 261811 - DNA, 25 bp, Homo sapien
gtcccaagataaactcagagcttcc

SEQ ID NO: 261812 - DNA, 25 bp, Homo sapien
aactcagagcttccagacagataat

SEQ ID NO: 261813 - DNA, 25 bp, Homo sapien
cagagcttccagacagataatttcc

SEQ ID NO: 261814 - DNA, 25 bp, Homo sapien
agggcaccatgatcttctacacagg

SEQ ID NO: 261815 - DNA, 25 bp, Homo sapien
tcacgtagcccgcaggaaaagctgg

SEQ ID NO: 261816 - DNA, 25 bp, Homo sapien
gtccacaggaatcgccatgtttggg

SEQ ID NO: 261817 - DNA, 25 bp, Homo sapien
tatcgggtaactggcctggctttaa

SEQ ID NO: 261818 - DNA, 25 bp, Homo sapien
ggtcatgagtgtcccggtcacagct

SEQ ID NO: 261819 - DNA, 25 bp, Homo sapien
ggccctgtgagacgaagccactgat

SEQ ID NO: 261820 - DNA, 25 bp, Homo sapien
tgtgctccacagaacggaagccgtg

SEQ ID NO: 261821 - DNA, 25 bp, Homo sapien
tggcagtaccagactacggccctgt

SEQ ID NO: 261822 - DNA, 25 bp, Homo sapien
gaaacgacatctcattttcaggctt

SEQ ID NO: 261823 - DNA, 25 bp, Homo sapien
aatcgtctacatctttcttgctcag

SEQ ID NO: 261824 - DNA, 25 bp, Homo sapien
caagttatagttgccagttgagaga

SEQ ID NO: 261825 - DNA, 25 bp, Homo sapien
gcttaacaggtttccgcaggtccat

SEQ ID NO: 261826 - DNA, 25 bp, Homo sapien
ggcttttctgacctcaccacgtgat

SEQ ID NO: 261827 - DNA, 25 bp, Homo sapien
tggagaggtacaggagatcccttgc

SEQ ID NO: 261828 - DNA, 25 bp, Homo sapien
gaatggaggcaaaacaaggcactgg

SEQ ID NO: 261829 - DNA, 25 bp, Homo sapien
ggatcccgtcccgtgctgtcttggg

SEQ ID NO: 261830 - DNA, 25 bp, Homo sapien
catgccatagccctaggaggtgggt

SEQ ID NO: 261831 - DNA, 25 bp, Homo sapien
tctgttagcagctgacaaactggac

SEQ ID NO: 261832 - DNA, 25 bp, Homo sapien
agtgtgactgtccagtgatcccgga

SEQ ID NO: 261833 - DNA, 25 bp, Homo sapien
tgatcccggatttactgtctgcacc

SEQ ID NO: 261834 - DNA, 25 bp, Homo sapien
gcgtgtcaagctgtggcgttcccat

SEQ ID NO: 261835 - DNA, 25 bp, Homo sapien
tgcgtgtcaagctgtggcgttccca

SEQ ID NO: 261836 - DNA, 25 bp, Homo sapien
ctgcgtgtcaagctgtggcgttccc

SEQ ID NO: 261837 - DNA, 25 bp, Homo sapien
tacacctatttgttgtgcatcagca

SEQ ID NO: 261838 - DNA, 25 bp, Homo sapien
acctatttgttgtgcatcagcaagc

SEQ ID NO: 261839 - DNA, 25 bp, Homo sapien
tggcaacctacacctatttgttgtg

SEQ ID NO: 261840 - DNA, 25 bp, Homo sapien
ttgatgatgtggcaacctacaccta

SEQ ID NO: 261841 - DNA, 25 bp, Homo sapien
ctgactgtggggagtggaagattga

SEQ ID NO: 261842 - DNA, 25 bp, Homo sapien
ctgtggggagtggaagattgaaaca

SEQ ID NO: 261843 - DNA, 25 bp, Homo sapien
gactgtggggagtggaagattgaaa

SEQ ID NO: 261844 - DNA, 25 bp, Homo sapien
actgtggggagtggaagattgaaac

SEQ ID NO: 261845 - DNA, 25 bp, Homo sapien
tcctgacaccaggtgtgggagtcta

SEQ ID NO: 261846 - DNA, 25 bp, Homo sapien
agtctagttccaacctctccaacag

SEQ ID NO: 261847 - DNA, 25 bp, Homo sapien
catctatactcacgagatgctgcat

SEQ ID NO: 261848 - DNA, 25 bp, Homo sapien
tgcttcctttgtacttcctgacacc

SEQ ID NO: 261849 - DNA, 25 bp, Homo sapien
tctgcccttgcgtagctttctggtt

SEQ ID NO: 261850 - DNA, 25 bp, Homo sapien
tgctggcgtggtctgctccactcat

SEQ ID NO: 261851 - DNA, 25 bp, Homo sapien
tgtcatccactgagtcgcccacagt

SEQ ID NO: 261852 - DNA, 25 bp, Homo sapien
tgtgagcattgctggaatccttgtt

SEQ ID NO: 261853 - DNA, 25 bp, Homo sapien
tatacctagatctcttcagcaacta

SEQ ID NO: 261854 - DNA, 25 bp, Homo sapien
caagttttgacatcaaaatgattgt

SEQ ID NO: 261855 - DNA, 25 bp, Homo sapien
atttgaaatagaagtgtatacctag

SEQ ID NO: 261856 - DNA, 25 bp, Homo sapien
tcataagaggtgtgaaaaccagttt

SEQ ID NO: 261857 - DNA, 25 bp, Homo sapien
tcacctctgctttgaggggccgggt

SEQ ID NO: 261858 - DNA, 25 bp, Homo sapien
tgtcgggtccgggaactgcttctgc

SEQ ID NO: 261859 - DNA, 25 bp, Homo sapien
ttagtggtctcctacccagagtgtc

SEQ ID NO: 261860 - DNA, 25 bp, Homo sapien
ttttacagtggcgtcttgtgtgcgc

SEQ ID NO: 261861 - DNA, 25 bp, Homo sapien
gtgattcatcgtgtggcaaaatgtc

SEQ ID NO: 261862 - DNA, 25 bp, Homo sapien
tgtgattcatcgtgtggcaaaatgt

SEQ ID NO: 261863 - DNA, 25 bp, Homo sapien
tgcacaccagagatgcttacgtgag

SEQ ID NO: 261864 - DNA, 25 bp, Homo sapien
ccagagatgcttacgtgagctctga

SEQ ID NO: 261865 - DNA, 25 bp, Homo sapien
atactgcacaccagagatgcttacg

SEQ ID NO: 261866 - DNA, 25 bp, Homo sapien
cacaccagagatgcttacgtgagct

SEQ ID NO: 261867 - DNA, 25 bp, Homo sapien
catcaaaggtgatcaaggctcaaga

SEQ ID NO: 261868 - DNA, 25 bp, Homo sapien
gaggatccccaggaaaacatggccc

SEQ ID NO: 261869 - DNA, 25 bp, Homo sapien
tgggccctattggaaagcctggtcc

SEQ ID NO: 261870 - DNA, 25 bp, Homo sapien
gaaagggaaaatcggtgagactcta

SEQ ID NO: 261871 - DNA, 25 bp, Homo sapien
tgtcatctgaaccatgaggatctgg

SEQ ID NO: 261872 - DNA, 25 bp, Homo sapien
tgcacagggaacataaactcacagg

SEQ ID NO: 261873 - DNA, 25 bp, Homo sapien
cttctgcttgccattgaaatctgca

SEQ ID NO: 261874 - DNA, 25 bp, Homo sapien
ggttccaatcacaagtgttaccttc

SEQ ID NO: 261875 - DNA, 25 bp, Homo sapien
gcactggggaggggcggtcgctagg

SEQ ID NO: 261876 - DNA, 25 bp, Homo sapien
cactggggaggggcggtcgctaggg

SEQ ID NO: 261877 - DNA, 25 bp, Homo sapien
tctcaaactgttcatttttttccac

SEQ ID NO: 261878 - DNA, 25 bp, Homo sapien
ttctcaaactgttcatttttttcca

SEQ ID NO: 261879 - DNA, 25 bp, Homo sapien
tccacttgatttttgactggaattt

SEQ ID NO: 261880 - DNA, 25 bp, Homo sapien
ttttccacttgatttttgactggaa

SEQ ID NO: 261881 - DNA, 25 bp, Homo sapien
ggatagattccatatagaggactca

SEQ ID NO: 261882 - DNA, 25 bp, Homo sapien
catcagcagatcctgagtagatcct

SEQ ID NO: 261883 - DNA, 25 bp, Homo sapien
gattccatatagaggactcagattc

SEQ ID NO: 261884 - DNA, 25 bp, Homo sapien
tcctgagtagatcctgcagaagagg

SEQ ID NO: 261885 - DNA, 25 bp, Homo sapien
gggacccgagtcctgctctccatgt

SEQ ID NO: 261886 - DNA, 25 bp, Homo sapien
gaagggcgttcctgtgagttcttgt

SEQ ID NO: 261887 - DNA, 25 bp, Homo sapien
cccaggcctgaatagggtaggcagg

SEQ ID NO: 261888 - DNA, 25 bp, Homo sapien
gagcctctccaagtgcagggcaggg

SEQ ID NO: 261889 - DNA, 25 bp, Homo sapien
tgtagcacctacagccactggagcc

SEQ ID NO: 261890 - DNA, 25 bp, Homo sapien
ggagccagctctgcacaactcagac

SEQ ID NO: 261891 - DNA, 25 bp, Homo sapien
acaactcagacctgggtggcgagga

SEQ ID NO: 261892 - DNA, 25 bp, Homo sapien
gtgtgaagacctgaggccctgcgac

SEQ ID NO: 261893 - DNA, 25 bp, Homo sapien
gaggacttggcttcccaataagcca

SEQ ID NO: 261894 - DNA, 25 bp, Homo sapien
ccattggattgaccactgtggctgt

SEQ ID NO: 261895 - DNA, 25 bp, Homo sapien
caggtgccctgaaattcatgccgtt

SEQ ID NO: 261896 - DNA, 25 bp, Homo sapien
ttgctcagataagtgtgctcagctc

SEQ ID NO: 261897 - DNA, 25 bp, Homo sapien
ggcactcagtgattccaggaccgtg

SEQ ID NO: 261898 - DNA, 25 bp, Homo sapien
gtgattccaggaccgtgggacccca

SEQ ID NO: 261899 - DNA, 25 bp, Homo sapien
tgcactcccacggcactcagtgatt

SEQ ID NO: 261900 - DNA, 25 bp, Homo sapien
tgggctctgactcccgcactggacc

SEQ ID NO: 261901 - DNA, 25 bp, Homo sapien
tttctgctcgtggtccagcgcagca

SEQ ID NO: 261902 - DNA, 25 bp, Homo sapien
ctagagggcgacttctttctgctcg

SEQ ID NO: 261903 - DNA, 25 bp, Homo sapien
gtgtttactcgggaatgctgagcac

SEQ ID NO: 261904 - DNA, 25 bp, Homo sapien
tccagcgcagcaggcaaacagtgtt

SEQ ID NO: 261905 - DNA, 25 bp, Homo sapien
cagcgtgtggcaggtggcgtcccct

SEQ ID NO: 261906 - DNA, 25 bp, Homo sapien
gacacaagccgcagtcgtgcggacc

SEQ ID NO: 261907 - DNA, 25 bp, Homo sapien
ctcctgatcctctatgccgggaatg

SEQ ID NO: 261908 - DNA, 25 bp, Homo sapien
tccagccacgctgcagtttccatca

SEQ ID NO: 261909 - DNA, 25 bp, Homo sapien
gatcaatgctgcctgcaggcgctgg

SEQ ID NO: 261910 - DNA, 25 bp, Homo sapien
aaagctgcagtggatcagacgagcc

SEQ ID NO: 261911 - DNA, 25 bp, Homo sapien
atacggcagatgaggtgaaacttcg

SEQ ID NO: 261912 - DNA, 25 bp, Homo sapien
caagatgctcgaataagtagtagtc

SEQ ID NO: 261913 - DNA, 25 bp, Homo sapien
tcttcatttcctcggccagggcggg

SEQ ID NO: 261914 - DNA, 25 bp, Homo sapien
ggtccttggagggatcccagcatcc

SEQ ID NO: 261915 - DNA, 25 bp, Homo sapien
gagaagccgactggaaactgtcccg

SEQ ID NO: 261916 - DNA, 25 bp, Homo sapien
aggaccgcagcgaatcagtctctgg

SEQ ID NO: 261917 - DNA, 25 bp, Homo sapien
tgtttgtgaggcctacgctttgcca

SEQ ID NO: 261918 - DNA, 25 bp, Homo sapien
tgcacaggcagcgaatatgactccc

SEQ ID NO: 261919 - DNA, 25 bp, Homo sapien
gatagacaggtcacccctagctgga

SEQ ID NO: 261920 - DNA, 25 bp, Homo sapien
cgctttgccatctgcacggtgttgc

SEQ ID NO: 261921 - DNA, 25 bp, Homo sapien
cctctataccctcccggatatgctt

SEQ ID NO: 261922 - DNA, 25 bp, Homo sapien
tataccctcccggatatgctttaac

SEQ ID NO: 261923 - DNA, 25 bp, Homo sapien
tcccggatatgctttaacatgtcaa

SEQ ID NO: 261924 - DNA, 25 bp, Homo sapien
ctttaacatgtcaattattaacctc

SEQ ID NO: 261925 - DNA, 25 bp, Homo sapien
agtttctgcaccagctactcttgaa

SEQ ID NO: 261926 - DNA, 25 bp, Homo sapien
tctgcaccagctactcttgaagaca

SEQ ID NO: 261927 - DNA, 25 bp, Homo sapien
cgagtttctgcaccagctactcttg

SEQ ID NO: 261928 - DNA, 25 bp, Homo sapien
caccagctactcttgaagacaagct

SEQ ID NO: 261929 - DNA, 25 bp, Homo sapien
ccaggtggaggcaactgctccatca

SEQ ID NO: 261930 - DNA, 25 bp, Homo sapien
gggcaaggatccacaaccttcgtga

SEQ ID NO: 261931 - DNA, 25 bp, Homo sapien
tgtcacatgacggagggacacgcag

SEQ ID NO: 261932 - DNA, 25 bp, Homo sapien
tgtgtgcccgggttctcctcagggt

SEQ ID NO: 261933 - DNA, 25 bp, Homo sapien
tgatcaacaagtgctacagaccctg

SEQ ID NO: 261934 - DNA, 25 bp, Homo sapien
caagtgacatcacaagactagggcc

SEQ ID NO: 261935 - DNA, 25 bp, Homo sapien
tgcgatgcagataaagggtctcctc

SEQ ID NO: 261936 - DNA, 25 bp, Homo sapien
cagctgctaaatgtcgacggtctca

SEQ ID NO: 261937 - DNA, 25 bp, Homo sapien
cagagagatctcgtccctgggtgtc

SEQ ID NO: 261938 - DNA, 25 bp, Homo sapien
tagtaaggtgagagcagccttcaca

SEQ ID NO: 261939 - DNA, 25 bp, Homo sapien
caaatgagtggtaccgacaataacg

SEQ ID NO: 261940 - DNA, 25 bp, Homo sapien
aattgacagcatttactaagggcca

SEQ ID NO: 261941 - DNA, 25 bp, Homo sapien
cattgatagctgttcttaaaccaag

SEQ ID NO: 261942 - DNA, 25 bp, Homo sapien
ggagcaaatgtggtatcattatgac

SEQ ID NO: 261943 - DNA, 25 bp, Homo sapien
tgtggtatcattatgacagcattga

SEQ ID NO: 261944 - DNA, 25 bp, Homo sapien
gggacggtgctagaggtaactgaaa

SEQ ID NO: 261945 - DNA, 25 bp, Homo sapien
tcttttctactttctgatagatatt

SEQ ID NO: 261946 - DNA, 25 bp, Homo sapien
tttctactttctgatagatattttc

SEQ ID NO: 261947 - DNA, 25 bp, Homo sapien
tctactttctgatagatattttccc

SEQ ID NO: 261948 - DNA, 25 bp, Homo sapien
ctactttctgatagatattttccca

SEQ ID NO: 261949 - DNA, 25 bp, Homo sapien
agtgagttcgcgcacgggcatagat

SEQ ID NO: 261950 - DNA, 25 bp, Homo sapien
gatcggcaccaatggcttcacacag

SEQ ID NO: 261951 - DNA, 25 bp, Homo sapien
tcagtgactcgtgaggatcggcacc

SEQ ID NO: 261952 - DNA, 25 bp, Homo sapien
aacatctcagaaagcggcctatgga

SEQ ID NO: 261953 - DNA, 25 bp, Homo sapien
cggtgcggagaacaccgaggccacc

SEQ ID NO: 261954 - DNA, 25 bp, Homo sapien
ctaagggagaggagtgataaaccac

SEQ ID NO: 261955 - DNA, 25 bp, Homo sapien
accaccaagccagagaggcggtgcg

SEQ ID NO: 261956 - DNA, 25 bp, Homo sapien
gaggagtgataaaccaccaagccag

SEQ ID NO: 261957 - DNA, 25 bp, Homo sapien
caagacgcatgtccaaggcgaggca

SEQ ID NO: 261958 - DNA, 25 bp, Homo sapien
gcatgtttgtcatagccaagacgca

SEQ ID NO: 261959 - DNA, 25 bp, Homo sapien
tagcatccaccacataagtacctgg

SEQ ID NO: 261960 - DNA, 25 bp, Homo sapien
gaagtggacgtggtgtttgaccaca

SEQ ID NO: 261961 - DNA, 25 bp, Homo sapien
tgtgtcctgggtgctgctccagcca

SEQ ID NO: 261962 - DNA, 25 bp, Homo sapien
tgtcctgggtgctgctccagccaca

SEQ ID NO: 261963 - DNA, 25 bp, Homo sapien
gctgtgtcctgggtgctgctccagc

SEQ ID NO: 261964 - DNA, 25 bp, Homo sapien
gtcctgggtgctgctccagccacat

SEQ ID NO: 261965 - DNA, 25 bp, Homo sapien
catgctcgtcagcattatgcatggt

SEQ ID NO: 261966 - DNA, 25 bp, Homo sapien
gcacttggagcaagacaaaggcaag

SEQ ID NO: 261967 - DNA, 25 bp, Homo sapien
tcagcattatgcatggtgcctgcac

SEQ ID NO: 261968 - DNA, 25 bp, Homo sapien
tcgtcagcattatgcatggtgcctg

SEQ ID NO: 261969 - DNA, 25 bp, Homo sapien
tccaacgtgattggaaatcacttcc

SEQ ID NO: 261970 - DNA, 25 bp, Homo sapien
ctgaaatgccaggaccaggaagtcc

SEQ ID NO: 261971 - DNA, 25 bp, Homo sapien
agcatgtccaacgtgattggaaatc

SEQ ID NO: 261972 - DNA, 25 bp, Homo sapien
tgaaatgccaggaccaggaagtcct

SEQ ID NO: 261973 - DNA, 25 bp, Homo sapien
cagctggtagggcttcagtgcacgc

SEQ ID NO: 261974 - DNA, 25 bp, Homo sapien
ccaggacgtctgaacctggtgagga

SEQ ID NO: 261975 - DNA, 25 bp, Homo sapien
ttcagtgcacgcagaggaagccaaa

SEQ ID NO: 261976 - DNA, 25 bp, Homo sapien
gaccagagccaggacgtctgaacct

SEQ ID NO: 261977 - DNA, 25 bp, Homo sapien
tcaccaggccagtatccacagcctg

SEQ ID NO: 261978 - DNA, 25 bp, Homo sapien
gtcaccaggccagtatccacagcct

SEQ ID NO: 261979 - DNA, 25 bp, Homo sapien
caccaggccagtatccacagcctgg

SEQ ID NO: 261980 - DNA, 25 bp, Homo sapien
ctaaaacaagaatgtcacggagaaa

SEQ ID NO: 261981 - DNA, 25 bp, Homo sapien
taaaacaagaatgtcacggagaaaa

SEQ ID NO: 261982 - DNA, 25 bp, Homo sapien
agaatgtcacggagaaaaacaagtt

SEQ ID NO: 261983 - DNA, 25 bp, Homo sapien
aacaagaatgtcacggagaaaaaca

SEQ ID NO: 261984 - DNA, 25 bp, Homo sapien
tgctcagatacttgatgctttatat

SEQ ID NO: 261985 - DNA, 25 bp, Homo sapien
aaaatgttcttgctgctcagatact

SEQ ID NO: 261986 - DNA, 25 bp, Homo sapien
tcctgcaagacctttcctgaattcc

SEQ ID NO: 261987 - DNA, 25 bp, Homo sapien
gaattccacgattataaaatgcaag

SEQ ID NO: 261988 - DNA, 25 bp, Homo sapien
ctacccgaattttgttatgcaggaa

SEQ ID NO: 261989 - DNA, 25 bp, Homo sapien
gtagatcatttctacccgaattttg

SEQ ID NO: 261990 - DNA, 25 bp, Homo sapien
ggaactccacgtgaatcagccatgg

SEQ ID NO: 261991 - DNA, 25 bp, Homo sapien
tgagtggttgagaagttttagcggc

SEQ ID NO: 261992 - DNA, 25 bp, Homo sapien
caggagcctccgtcaccccaacgac

SEQ ID NO: 261993 - DNA, 25 bp, Homo sapien
caccccaacgacacagaggcagctg

SEQ ID NO: 261994 - DNA, 25 bp, Homo sapien
ccccaacgacacagaggcagctgtg

SEQ ID NO: 261995 - DNA, 25 bp, Homo sapien
gagcctccgtcaccccaacgacaca

SEQ ID NO: 261996 - DNA, 25 bp, Homo sapien
tgtgatgggaactccgggcttctgg

SEQ ID NO: 261997 - DNA, 25 bp, Homo sapien
gagggatctctcatggtgtccttga

SEQ ID NO: 261998 - DNA, 25 bp, Homo sapien
gacctgactcctctttgtgggcttc

SEQ ID NO: 261999 - DNA, 25 bp, Homo sapien
tctggccttggaagtggcagacgag

SEQ ID NO: 262000 - DNA, 25 bp, Homo sapien
tggctaaatgaaccagtggtctcac

SEQ ID NO: 262001 - DNA, 25 bp, Homo sapien
ctgaaagatttcttcccttttcctg

SEQ ID NO: 262002 - DNA, 25 bp, Homo sapien
taaatccaccctgaaagatttcttc

SEQ ID NO: 262003 - DNA, 25 bp, Homo sapien
tcttcccttttcctggctaaatgaa

SEQ ID NO: 262004 - DNA, 25 bp, Homo sapien
tatggctgtctaccagtctgccaga

SEQ ID NO: 262005 - DNA, 25 bp, Homo sapien
ttgaaggttgactgtgcagttggca

SEQ ID NO: 262006 - DNA, 25 bp, Homo sapien
cagttggcattgtcaacctgagcct

SEQ ID NO: 262007 - DNA, 25 bp, Homo sapien
aatctggctgccacagagggcggat

SEQ ID NO: 262008 - DNA, 25 bp, Homo sapien
tgaagagccgatctgctgcaatgac

SEQ ID NO: 262009 - DNA, 25 bp, Homo sapien
tcctgtccaccctgcatgtaagagg

SEQ ID NO: 262010 - DNA, 25 bp, Homo sapien
catctggccgtgaatccaagaggac

SEQ ID NO: 262011 - DNA, 25 bp, Homo sapien
gtaagaggaccttgctggaacacgc

SEQ ID NO: 262012 - DNA, 25 bp, Homo sapien
gtggtgtgcggcctgtccacactaa

SEQ ID NO: 262013 - DNA, 25 bp, Homo sapien
cttcttaggtggtgtgcggcctgtc

SEQ ID NO: 262014 - DNA, 25 bp, Homo sapien
gcggcctgtccacactaatgggtcc

SEQ ID NO: 262015 - DNA, 25 bp, Homo sapien
gtccagcctgactggcttgacttcc

SEQ ID NO: 262016 - DNA, 25 bp, Homo sapien
cccatggggtagagttgaaatggac

SEQ ID NO: 262017 - DNA, 25 bp, Homo sapien
catggggtagagttgaaatggactc

SEQ ID NO: 262018 - DNA, 25 bp, Homo sapien
ccatggggtagagttgaaatggact

SEQ ID NO: 262019 - DNA, 25 bp, Homo sapien
tgcccatggggtagagttgaaatgg

SEQ ID NO: 262020 - DNA, 25 bp, Homo sapien
ctccccaacgcatttaaattgttca

SEQ ID NO: 262021 - DNA, 25 bp, Homo sapien
tccccaacgcatttaaattgttcag

SEQ ID NO: 262022 - DNA, 25 bp, Homo sapien
ttaagggagcatcataagtagcatc

SEQ ID NO: 262023 - DNA, 25 bp, Homo sapien
agcagaactgcaagcacagagaccc

SEQ ID NO: 262024 - DNA, 25 bp, Homo sapien
ggcatcctgcccatcttaagggagc

SEQ ID NO: 262025 - DNA, 25 bp, Homo sapien
gcatctccatcatgcgcgggctcag

SEQ ID NO: 262026 - DNA, 25 bp, Homo sapien
tttcaagagaactcgggagtctgcc

SEQ ID NO: 262027 - DNA, 25 bp, Homo sapien
gatgactgcccacgtttccctatga

SEQ ID NO: 262028 - DNA, 25 bp, Homo sapien
tacagacccagccatcgaacttgtc

SEQ ID NO: 262029 - DNA, 25 bp, Homo sapien
aattcaggtccttgtggtcatgcca

SEQ ID NO: 262030 - DNA, 25 bp, Homo sapien
ttagagaccgggtctgtttgccaag

SEQ ID NO: 262031 - DNA, 25 bp, Homo sapien
agagaccgggtctgtttgccaagca

SEQ ID NO: 262032 - DNA, 25 bp, Homo sapien
tagagaccgggtctgtttgccaagc

SEQ ID NO: 262033 - DNA, 25 bp, Homo sapien
gagaccgggtctgtttgccaagcag

SEQ ID NO: 262034 - DNA, 25 bp, Homo sapien
aatctactttctcccggtgtcttcg

SEQ ID NO: 262035 - DNA, 25 bp, Homo sapien
atctactttctcccggtgtcttcga

SEQ ID NO: 262036 - DNA, 25 bp, Homo sapien
cacaatctactttctcccggtgtct

SEQ ID NO: 262037 - DNA, 25 bp, Homo sapien
caatctactttctcccggtgtcttc

SEQ ID NO: 262038 - DNA, 25 bp, Homo sapien
acacttgccaagttgtagatcaaag

SEQ ID NO: 262039 - DNA, 25 bp, Homo sapien
gcaggagccccgtggccacccagaa

SEQ ID NO: 262040 - DNA, 25 bp, Homo sapien
ggaacacttgccaagttgtagatca

SEQ ID NO: 262041 - DNA, 25 bp, Homo sapien
agaacacgggcttcctggaacactt

SEQ ID NO: 262042 - DNA, 25 bp, Homo sapien
cgtgcccattgttttaccaggatgc

SEQ ID NO: 262043 - DNA, 25 bp, Homo sapien
tgtgatcgtgcccattgttttacca

SEQ ID NO: 262044 - DNA, 25 bp, Homo sapien
taacaaaatgtgatcgtgcccattg

SEQ ID NO: 262045 - DNA, 25 bp, Homo sapien
cattgttttaccaggatgctctgga

SEQ ID NO: 262046 - DNA, 25 bp, Homo sapien
aaatggtgatagagtgtttgcaagc

SEQ ID NO: 262047 - DNA, 25 bp, Homo sapien
cagtgggatactggtgcctggaaaa

SEQ ID NO: 262048 - DNA, 25 bp, Homo sapien
gatcactaaccatacgtcctctttt

SEQ ID NO: 262049 - DNA, 25 bp, Homo sapien
gaaaacctagatcactaaccatacg

SEQ ID NO: 262050 - DNA, 25 bp, Homo sapien
tcctagctttgtcccgtcacagtat

SEQ ID NO: 262051 - DNA, 25 bp, Homo sapien
cccgtcacagtatttggcagatgcc

SEQ ID NO: 262052 - DNA, 25 bp, Homo sapien
cctagctttgtcccgtcacagtatt

SEQ ID NO: 262053 - DNA, 25 bp, Homo sapien
ctcctagctttgtcccgtcacagta

SEQ ID NO: 262054 - DNA, 25 bp, Homo sapien
tccaaagcacttcgctgggattgca

SEQ ID NO: 262055 - DNA, 25 bp, Homo sapien
ctgaaccaatccaaagcacttcgct

SEQ ID NO: 262056 - DNA, 25 bp, Homo sapien
aatccaaagcacttcgctgggattg

SEQ ID NO: 262057 - DNA, 25 bp, Homo sapien
accaatccaaagcacttcgctggga

SEQ ID NO: 262058 - DNA, 25 bp, Homo sapien
tggatttagccccaacatctaggtt

SEQ ID NO: 262059 - DNA, 25 bp, Homo sapien
cactgttattggtatggcaccagaa

SEQ ID NO: 262060 - DNA, 25 bp, Homo sapien
ggaagtctgagagatgcactgttat

SEQ ID NO: 262061 - DNA, 25 bp, Homo sapien
ttctcgtctgaaggaacctgggtgt

SEQ ID NO: 262062 - DNA, 25 bp, Homo sapien
cagagtcaaggcagtctgaacctca

SEQ ID NO: 262063 - DNA, 25 bp, Homo sapien
agtgcggcctcaaacgtccaggctc

SEQ ID NO: 262064 - DNA, 25 bp, Homo sapien
gggcctggtctttaatagccttcta

SEQ ID NO: 262065 - DNA, 25 bp, Homo sapien
aataattagctttcctgcactgtga

SEQ ID NO: 262066 - DNA, 25 bp, Homo sapien
ccctgaatctggagtttttgaactg

SEQ ID NO: 262067 - DNA, 25 bp, Homo sapien
ccctgcttttagagaaatggcgtct

SEQ ID NO: 262068 - DNA, 25 bp, Homo sapien
aatcattgatagagaaagccacgga

SEQ ID NO: 262069 - DNA, 25 bp, Homo sapien
tattcatgacactgatcacatggcg

SEQ ID NO: 262070 - DNA, 25 bp, Homo sapien
gtagctcctaaaaggatggacatga

SEQ ID NO: 262071 - DNA, 25 bp, Homo sapien
tgtgtggagttcagaagaccaagtg

SEQ ID NO: 262072 - DNA, 25 bp, Homo sapien
tctgagaagagaagatgacaagtag

SEQ ID NO: 262073 - DNA, 25 bp, Homo sapien
taaaatgtgtggagttcagaagacc

SEQ ID NO: 262074 - DNA, 25 bp, Homo sapien
ccttgggacaacatagtagagactg

SEQ ID NO: 262075 - DNA, 25 bp, Homo sapien
tgtgatgaggagtgctcgtttctct

SEQ ID NO: 262076 - DNA, 25 bp, Homo sapien
tccactgtgcctgcatacatacagc

SEQ ID NO: 262077 - DNA, 25 bp, Homo sapien
tggcaaccatttttcgggctccttg

SEQ ID NO: 262078 - DNA, 25 bp, Homo sapien
gacacgcttcttagtgtagctgaag

SEQ ID NO: 262079 - DNA, 25 bp, Homo sapien
ccagatgaagaaggtagtgatgaca

SEQ ID NO: 262080 - DNA, 25 bp, Homo sapien
gaattctgaatacacctgacacgct

SEQ ID NO: 262081 - DNA, 25 bp, Homo sapien
ctattgcagtagaaatgacacaaca

SEQ ID NO: 262082 - DNA, 25 bp, Homo sapien
cagtgaactaggctacatgagagca

SEQ ID NO: 262083 - DNA, 25 bp, Homo sapien
gctgccattgcccttcaagtattga

SEQ ID NO: 262084 - DNA, 25 bp, Homo sapien
caagggcttgctgggtaattcacta

SEQ ID NO: 262085 - DNA, 25 bp, Homo sapien
gatgaccttacccatgcaattcaga

SEQ ID NO: 262086 - DNA, 25 bp, Homo sapien
ttggcggagcctacaaagtcagcgt

SEQ ID NO: 262087 - DNA, 25 bp, Homo sapien
cgatcgcgggagaaagcgcaacgca

SEQ ID NO: 262088 - DNA, 25 bp, Homo sapien
ggtcgccgcactctcggaggagcct

SEQ ID NO: 262089 - DNA, 25 bp, Homo sapien
agtgcgcgccctcggagctagcgac

SEQ ID NO: 262090 - DNA, 25 bp, Homo sapien
attacctgtgtccaccgaagctgac

SEQ ID NO: 262091 - DNA, 25 bp, Homo sapien
tgcattctgcggtgttgccacagct

SEQ ID NO: 262092 - DNA, 25 bp, Homo sapien
aacatgatgaccacaggacagccat

SEQ ID NO: 262093 - DNA, 25 bp, Homo sapien
aagcaacagccccatttccgagatg

SEQ ID NO: 262094 - DNA, 25 bp, Homo sapien
gcaacggcaattcctttgaaggcct

SEQ ID NO: 262095 - DNA, 25 bp, Homo sapien
tattcagtccgtgggtaacgcgagt

SEQ ID NO: 262096 - DNA, 25 bp, Homo sapien
tgtgctgcgatacaaaagtttcccc

SEQ ID NO: 262097 - DNA, 25 bp, Homo sapien
taacgcgagtgacaatggtaagacc

SEQ ID NO: 262098 - DNA, 25 bp, Homo sapien
ttctgcagagagcttgagtgagagg

SEQ ID NO: 262099 - DNA, 25 bp, Homo sapien
attctgcagagagcttgagtgagag

SEQ ID NO: 262100 - DNA, 25 bp, Homo sapien
tgtaggtgggagagaagtaggacat

SEQ ID NO: 262101 - DNA, 25 bp, Homo sapien
ctgtaggtgggagagaagtaggaca

SEQ ID NO: 262102 - DNA, 25 bp, Homo sapien
agcaagcacacgtggccacctcctt

SEQ ID NO: 262103 - DNA, 25 bp, Homo sapien
gtaattatcagccctgtatgctgct

SEQ ID NO: 262104 - DNA, 25 bp, Homo sapien
agtctgtctgaacatgtggaagtca

SEQ ID NO: 262105 - DNA, 25 bp, Homo sapien
tctgtctgaacatgtggaagtcagc

SEQ ID NO: 262106 - DNA, 25 bp, Homo sapien
tacaaggtgtctcaatgtctgcagg

SEQ ID NO: 262107 - DNA, 25 bp, Homo sapien
cattcaggacgattttagctgcaca

SEQ ID NO: 262108 - DNA, 25 bp, Homo sapien
gactcggctactgaaccatggatgc

SEQ ID NO: 262109 - DNA, 25 bp, Homo sapien
tcacctggcacaacgtctgacatgt

SEQ ID NO: 262110 - DNA, 25 bp, Homo sapien
tcactcttagggaacacaccttcct

SEQ ID NO: 262111 - DNA, 25 bp, Homo sapien
tgtgaagggtttatgccaagcctca

SEQ ID NO: 262112 - DNA, 25 bp, Homo sapien
ccacaggagtactgactatgatact

SEQ ID NO: 262113 - DNA, 25 bp, Homo sapien
gaacattttctagtacactgtggaa

SEQ ID NO: 262114 - DNA, 25 bp, Homo sapien
acaaaacaaggtggctcggtgcggt

SEQ ID NO: 262115 - DNA, 25 bp, Homo sapien
aacaaaacaaggtggctcggtgcgg

SEQ ID NO: 262116 - DNA, 25 bp, Homo sapien
ggctgggaggacctgacatttagtc

SEQ ID NO: 262117 - DNA, 25 bp, Homo sapien
atttagtccagtgagtctggaaaca

SEQ ID NO: 262118 - DNA, 25 bp, Homo sapien
accttccgaagagctcagcggctgg

SEQ ID NO: 262119 - DNA, 25 bp, Homo sapien
caaacatggattgcagctggcgtgg

SEQ ID NO: 262120 - DNA, 25 bp, Homo sapien
agattttatggttctggcgggcgca

SEQ ID NO: 262121 - DNA, 25 bp, Homo sapien
ggtgctggattccaaacctctgaga

SEQ ID NO: 262122 - DNA, 25 bp, Homo sapien
catttcacgtttcaggttgcgcagt

SEQ ID NO: 262123 - DNA, 25 bp, Homo sapien
gggaccaccgagagcaaaaaacata

SEQ ID NO: 262124 - DNA, 25 bp, Homo sapien
ggtgtgccaaccactaaagcatcag

SEQ ID NO: 262125 - DNA, 25 bp, Homo sapien
tacaacagggctaaccaggtgtgcc

SEQ ID NO: 262126 - DNA, 25 bp, Homo sapien
caaagcccttagaatagctgcaaca

SEQ ID NO: 262127 - DNA, 25 bp, Homo sapien
tgcaaagcccttagaatagctgcaa

SEQ ID NO: 262128 - DNA, 25 bp, Homo sapien
gcgtgcaaagcccttagaatagctg

SEQ ID NO: 262129 - DNA, 25 bp, Homo sapien
agcccttagaatagctgcaacattc

SEQ ID NO: 262130 - DNA, 25 bp, Homo sapien
ctctagcatcagaaataagataagg

SEQ ID NO: 262131 - DNA, 25 bp, Homo sapien
cacttccattcaacataatcctgga

SEQ ID NO: 262132 - DNA, 25 bp, Homo sapien
gaaataagataaggatgtccactct

SEQ ID NO: 262133 - DNA, 25 bp, Homo sapien
aaagcttttcctctagcatcagaaa

SEQ ID NO: 262134 - DNA, 25 bp, Homo sapien
gattggcaaagatcacctgaatgcg

SEQ ID NO: 262135 - DNA, 25 bp, Homo sapien
gccagatagaagtgatgtgccacca

SEQ ID NO: 262136 - DNA, 25 bp, Homo sapien
tattgtacatgcatctggccttagg

SEQ ID NO: 262137 - DNA, 25 bp, Homo sapien
caccaggctcagtcagagattggca

SEQ ID NO: 262138 - DNA, 25 bp, Homo sapien
agactgccctgcgtcttgacttcct

SEQ ID NO: 262139 - DNA, 25 bp, Homo sapien
ccctgaagactgccctgcgtcttga

SEQ ID NO: 262140 - DNA, 25 bp, Homo sapien
agcaaccttggaaggctccagggga

SEQ ID NO: 262141 - DNA, 25 bp, Homo sapien
tccaggggagctgttgccagtcaca

SEQ ID NO: 262142 - DNA, 25 bp, Homo sapien
tactgggctaaaacacattcctgtg

SEQ ID NO: 262143 - DNA, 25 bp, Homo sapien
ggacaaatgcaactagaataagcgt

SEQ ID NO: 262144 - DNA, 25 bp, Homo sapien
agttattccccaggcctaatgccag

SEQ ID NO: 262145 - DNA, 25 bp, Homo sapien
tttgcaaaggcaggtcttagaccac

SEQ ID NO: 262146 - DNA, 25 bp, Homo sapien
ccatgccttccccacacacctgtgt

SEQ ID NO: 262147 - DNA, 25 bp, Homo sapien
tgtgtccatcccttcccctcagatc

SEQ ID NO: 262148 - DNA, 25 bp, Homo sapien
tcccctcagatcttgtccatgcttt

SEQ ID NO: 262149 - DNA, 25 bp, Homo sapien
tgtgtccatgccttccccacacacc

SEQ ID NO: 262150 - DNA, 25 bp, Homo sapien
gcacacgcaggaataagcatgagga

SEQ ID NO: 262151 - DNA, 25 bp, Homo sapien
cgcaggaataagcatgaggagcaga

SEQ ID NO: 262152 - DNA, 25 bp, Homo sapien
agcagagatggagccccacatgctg

SEQ ID NO: 262153 - DNA, 25 bp, Homo sapien
cacgcaggaataagcatgaggagca

SEQ ID NO: 262154 - DNA, 25 bp, Homo sapien
ggccgcacggcagcctgggtcatgg

SEQ ID NO: 262155 - DNA, 25 bp, Homo sapien
gcactgccgagtccgcagaccgcag

SEQ ID NO: 262156 - DNA, 25 bp, Homo sapien
ttcatctccaggaatgccgtcctgg

SEQ ID NO: 262157 - DNA, 25 bp, Homo sapien
tcatggccacgggcactgccgagtc

SEQ ID NO: 262158 - DNA, 25 bp, Homo sapien
tccgactggtggaaaagaggcgcac

SEQ ID NO: 262159 - DNA, 25 bp, Homo sapien
catcttggcgtctttcaggtccgag

SEQ ID NO: 262160 - DNA, 25 bp, Homo sapien
catgtggaggagttccccaccagga

SEQ ID NO: 262161 - DNA, 25 bp, Homo sapien
catttccacacgcaagggaggtcac

SEQ ID NO: 262162 - DNA, 25 bp, Homo sapien
ccagtggctatcgtgggtgtcgcat

SEQ ID NO: 262163 - DNA, 25 bp, Homo sapien
catcgtccgtgtcctcgaggtcgga

SEQ ID NO: 262164 - DNA, 25 bp, Homo sapien
cgaggtcggagccatccaatgtgcc

SEQ ID NO: 262165 - DNA, 25 bp, Homo sapien
tgtgtgctccgctggaaggcatcgt

SEQ ID NO: 262166 - DNA, 25 bp, Homo sapien
tctgtggtacccgtgcgtcatgggc

SEQ ID NO: 262167 - DNA, 25 bp, Homo sapien
ggtggacttccgcttaaaggagctc

SEQ ID NO: 262168 - DNA, 25 bp, Homo sapien
tgcaagattggaggtggacttccgc

SEQ ID NO: 262169 - DNA, 25 bp, Homo sapien
gaaaggcaagattgtccgtgctctt

SEQ ID NO: 262170 - DNA, 25 bp, Homo sapien
gcctcagtcacattgctcacaagtt

SEQ ID NO: 262171 - DNA, 25 bp, Homo sapien
tcctccagcgtttggtccttcctga

SEQ ID NO: 262172 - DNA, 25 bp, Homo sapien
agtccttggcccttatcgggctcct

SEQ ID NO: 262173 - DNA, 25 bp, Homo sapien
tccttcctgacccaagcttttggga

SEQ ID NO: 262174 - DNA, 25 bp, Homo sapien
acatcctggacaatcgggcttggca

SEQ ID NO: 262175 - DNA, 25 bp, Homo sapien
gaaatacggcagtgtcagcgtctag

SEQ ID NO: 262176 - DNA, 25 bp, Homo sapien
ccccttagaggtggctgagccgaaa

SEQ ID NO: 262177 - DNA, 25 bp, Homo sapien
gagtagtcgtcatgcagccggctgt

SEQ ID NO: 262178 - DNA, 25 bp, Homo sapien
ttcctctgaattcgcggacagggca

SEQ ID NO: 262179 - DNA, 25 bp, Homo sapien
gcactgtgattgctgtgacagctgg

SEQ ID NO: 262180 - DNA, 25 bp, Homo sapien
agggcactgtgattgctgtgacagc

SEQ ID NO: 262181 - DNA, 25 bp, Homo sapien
ctttcctctgaattcgcggacaggg

SEQ ID NO: 262182 - DNA, 25 bp, Homo sapien
gggccggctgccacaccaatgttca

SEQ ID NO: 262183 - DNA, 25 bp, Homo sapien
ccggctgccacaccaatgttcacca

SEQ ID NO: 262184 - DNA, 25 bp, Homo sapien
tctgggccggctgccacaccaatgt

SEQ ID NO: 262185 - DNA, 25 bp, Homo sapien
ggctgccacaccaatgttcaccaga

SEQ ID NO: 262186 - DNA, 25 bp, Homo sapien
tgaccttgacaggttagggaccaag

SEQ ID NO: 262187 - DNA, 25 bp, Homo sapien
ctaatactgtaagggcaacaaggtc

SEQ ID NO: 262188 - DNA, 25 bp, Homo sapien
tcagcagagggccactgaccttgac

SEQ ID NO: 262189 - DNA, 25 bp, Homo sapien
tggtaaacagcaacttgacaactcc

SEQ ID NO: 262190 - DNA, 25 bp, Homo sapien
gcagcttaccatagctccctggaga

SEQ ID NO: 262191 - DNA, 25 bp, Homo sapien
ctccataaggcaacagacagcactg

SEQ ID NO: 262192 - DNA, 25 bp, Homo sapien
taaagcggcaggacattttcccagc

SEQ ID NO: 262193 - DNA, 25 bp, Homo sapien
gctcttaaagcttaccactaggtgg

SEQ ID NO: 262194 - DNA, 25 bp, Homo sapien
gaaaggcaagatcgcaaggagcacc

SEQ ID NO: 262195 - DNA, 25 bp, Homo sapien
agacactcgggccacatggactgcc

SEQ ID NO: 262196 - DNA, 25 bp, Homo sapien
tccacctctgatgtgctgtgcacca

SEQ ID NO: 262197 - DNA, 25 bp, Homo sapien
agggcctccctgagcaggtaaacat

SEQ ID NO: 262198 - DNA, 25 bp, Homo sapien
tatgcctggactaattaagagtaaa

SEQ ID NO: 262199 - DNA, 25 bp, Homo sapien
catgctaaagaatatagaggtctac

SEQ ID NO: 262200 - DNA, 25 bp, Homo sapien
caccacacccggtcgtaggttgcaa

SEQ ID NO: 262201 - DNA, 25 bp, Homo sapien
atatggtctctatccgacacccagg

SEQ ID NO: 262202 - DNA, 25 bp, Homo sapien
ggaaccaagtgtcgattttgtttca

SEQ ID NO: 262203 - DNA, 25 bp, Homo sapien
ccaagtgtcgattttgtttcatgga

SEQ ID NO: 262204 - DNA, 25 bp, Homo sapien
ggccgtctatggaaccaagtgtcga

SEQ ID NO: 262205 - DNA, 25 bp, Homo sapien
tcttcccctaactggccgtctatgg

SEQ ID NO: 262206 - DNA, 25 bp, Homo sapien
ttacgatgagaagacaatggattta

SEQ ID NO: 262207 - DNA, 25 bp, Homo sapien
ccccattttacgatgagaagacaat

SEQ ID NO: 262208 - DNA, 25 bp, Homo sapien
tttacgatgagaagacaatggattt

SEQ ID NO: 262209 - DNA, 25 bp, Homo sapien
cattttacgatgagaagacaatgga

SEQ ID NO: 262210 - DNA, 25 bp, Homo sapien
aatacatcatgcctcagagtcagca

SEQ ID NO: 262211 - DNA, 25 bp, Homo sapien
ttaatacatcatgcctcagagtcag

SEQ ID NO: 262212 - DNA, 25 bp, Homo sapien
taatacatcatgcctcagagtcagc

SEQ ID NO: 262213 - DNA, 25 bp, Homo sapien
cagtgacagatgctgggtacaggca

SEQ ID NO: 262214 - DNA, 25 bp, Homo sapien
caggcagtgacagatgctgggtaca

SEQ ID NO: 262215 - DNA, 25 bp, Homo sapien
ggaactactccaggcagtgacagat

SEQ ID NO: 262216 - DNA, 25 bp, Homo sapien
caaaagtaaggaactactccaggca

SEQ ID NO: 262217 - DNA, 25 bp, Homo sapien
tggttttacacttacgtgacacgca

SEQ ID NO: 262218 - DNA, 25 bp, Homo sapien
ttggttttacacttacgtgacacgc

SEQ ID NO: 262219 - DNA, 25 bp, Homo sapien
ggttttacacttacgtgacacgcac

SEQ ID NO: 262220 - DNA, 25 bp, Homo sapien
tcatcctgtgatgagcttcgcctcc

SEQ ID NO: 262221 - DNA, 25 bp, Homo sapien
gccagctggccgtagtcagagaatg

SEQ ID NO: 262222 - DNA, 25 bp, Homo sapien
gggtctgcagcaaccgagtcttcag

SEQ ID NO: 262223 - DNA, 25 bp, Homo sapien
cgtagtcagagaatggccgaggcct

SEQ ID NO: 262224 - DNA, 25 bp, Homo sapien
aatagacaaactgcggctggccagc

SEQ ID NO: 262225 - DNA, 25 bp, Homo sapien
gaaatggggcgccttctccgggctc

SEQ ID NO: 262226 - DNA, 25 bp, Homo sapien
gtcagaagattgtccagttcctccg

SEQ ID NO: 262227 - DNA, 25 bp, Homo sapien
ttggtcccatacaagctgaccccac

SEQ ID NO: 262228 - DNA, 25 bp, Homo sapien
tgaccccacctatcacggaaatggg

SEQ ID NO: 262229 - DNA, 25 bp, Homo sapien
ggttaagtacatggtgccgcccttg

SEQ ID NO: 262230 - DNA, 25 bp, Homo sapien
gcaaaaggcatccaaacgtcaggtg

SEQ ID NO: 262231 - DNA, 25 bp, Homo sapien
tacctttccctggttagaatctcag

SEQ ID NO: 262232 - DNA, 25 bp, Homo sapien
ggagtcttactaaatatgccctgct

SEQ ID NO: 262233 - DNA, 25 bp, Homo sapien
cgttggatgctctcatctgccgccg

SEQ ID NO: 262234 - DNA, 25 bp, Homo sapien
tgggagaatgtgaagggccggaacc

SEQ ID NO: 262235 - DNA, 25 bp, Homo sapien
cacagccttgtagggtggcacctgg

SEQ ID NO: 262236 - DNA, 25 bp, Homo sapien
cacacggtccaacccaatgggggtg

SEQ ID NO: 262237 - DNA, 25 bp, Homo sapien
tagctggaaacggtcagatgggccc

SEQ ID NO: 262238 - DNA, 25 bp, Homo sapien
tggaaacggtcagatgggcccatag

SEQ ID NO: 262239 - DNA, 25 bp, Homo sapien
aaacggtcagatgggcccatagcag

SEQ ID NO: 262240 - DNA, 25 bp, Homo sapien
aggttagctggaaacggtcagatgg

SEQ ID NO: 262241 - DNA, 25 bp, Homo sapien
ctgatgaggatctgggtgtctcctt

SEQ ID NO: 262242 - DNA, 25 bp, Homo sapien
ctgccactgatgaggatctgggtgt

SEQ ID NO: 262243 - DNA, 25 bp, Homo sapien
gccactgatgaggatctgggtgtct

SEQ ID NO: 262244 - DNA, 25 bp, Homo sapien
tgctgccactgatgaggatctgggt

SEQ ID NO: 262245 - DNA, 25 bp, Homo sapien
ctaatctctctaggccagagatgct

SEQ ID NO: 262246 - DNA, 25 bp, Homo sapien
ttataattaatgtactgctaatctc

SEQ ID NO: 262247 - DNA, 25 bp, Homo sapien
ggttccactgcaatgcaaacctggt

SEQ ID NO: 262248 - DNA, 25 bp, Homo sapien
gcaatgcaaacctggtcctccatgg

SEQ ID NO: 262249 - DNA, 25 bp, Homo sapien
cactcaagtctaacagcgaagtaaa

SEQ ID NO: 262250 - DNA, 25 bp, Homo sapien
gcgaagtaaactggacactctcctc

SEQ ID NO: 262251 - DNA, 25 bp, Homo sapien
actgactttggtgcacgggtgtgca

SEQ ID NO: 262252 - DNA, 25 bp, Homo sapien
gggtctacccatatcgactgacttt

SEQ ID NO: 262253 - DNA, 25 bp, Homo sapien
gatggctccacttggcggccacgtg

SEQ ID NO: 262254 - DNA, 25 bp, Homo sapien
aggtggggatggctccacttggcgg

SEQ ID NO: 262255 - DNA, 25 bp, Homo sapien
cggccacgtgggtggaagccccttg

SEQ ID NO: 262256 - DNA, 25 bp, Homo sapien
cacgtgggtggaagccccttgctct

SEQ ID NO: 262257 - DNA, 25 bp, Homo sapien
gaccagcctcaatcctgtgcagaaa

SEQ ID NO: 262258 - DNA, 25 bp, Homo sapien
tttctttattcagaccagcctcaat

SEQ ID NO: 262259 - DNA, 25 bp, Homo sapien
ccagcctcaatcctgtgcagaaaac

SEQ ID NO: 262260 - DNA, 25 bp, Homo sapien
cagaccagcctcaatcctgtgcaga

SEQ ID NO: 262261 - DNA, 25 bp, Homo sapien
catggccctcaaaagccctcagtgg

SEQ ID NO: 262262 - DNA, 25 bp, Homo sapien
gaacttagtggaggcccacctctca

SEQ ID NO: 262263 - DNA, 25 bp, Homo sapien
ctctgcatcctgctatagccttgac

SEQ ID NO: 262264 - DNA, 25 bp, Homo sapien
tctgacttgtagcaatcgggctgcc

SEQ ID NO: 262265 - DNA, 25 bp, Homo sapien
ccagtgccactatcattttccgagg

SEQ ID NO: 262266 - DNA, 25 bp, Homo sapien
aggcaacagactcccgaggtctcca

SEQ ID NO: 262267 - DNA, 25 bp, Homo sapien
gacctctcggttcttcatatctcca

SEQ ID NO: 262268 - DNA, 25 bp, Homo sapien
ctccacgatccagccaatgatctct

SEQ ID NO: 262269 - DNA, 25 bp, Homo sapien
tggccccaaacatccagacaattac

SEQ ID NO: 262270 - DNA, 25 bp, Homo sapien
tcagccaggcatcagaggcagcacg

SEQ ID NO: 262271 - DNA, 25 bp, Homo sapien
ctggccccaaacatccagacaatta

SEQ ID NO: 262272 - DNA, 25 bp, Homo sapien
gaggcagcacggatggctgctccct

SEQ ID NO: 262273 - DNA, 25 bp, Homo sapien
ggaacgtggcaaggctcacggcatc

SEQ ID NO: 262274 - DNA, 25 bp, Homo sapien
gctgctatcacgcaacaggcactaa

SEQ ID NO: 262275 - DNA, 25 bp, Homo sapien
caggcactaagcaagtaaatcccaa

SEQ ID NO: 262276 - DNA, 25 bp, Homo sapien
gctttcctgagagctccgctgctat

SEQ ID NO: 262277 - DNA, 25 bp, Homo sapien
tctttggataagataccactacctc

SEQ ID NO: 262278 - DNA, 25 bp, Homo sapien
gattattggcaacactgtaaaagga

SEQ ID NO: 262279 - DNA, 25 bp, Homo sapien
tgtaaaaggattaagcacagggatc

SEQ ID NO: 262280 - DNA, 25 bp, Homo sapien
cactacctcactggaactgggaaat

SEQ ID NO: 262281 - DNA, 25 bp, Homo sapien
ggtatacatgtaagttctctccagg

SEQ ID NO: 262282 - DNA, 25 bp, Homo sapien
tatacgcaaagtagtgacctcacag

SEQ ID NO: 262283 - DNA, 25 bp, Homo sapien
taagcagaagacacggcctttttaa

SEQ ID NO: 262284 - DNA, 25 bp, Homo sapien
tttcacactgtggtatgacaaaaat

SEQ ID NO: 262285 - DNA, 25 bp, Homo sapien
gccggtccccaagcatcacagagga

SEQ ID NO: 262286 - DNA, 25 bp, Homo sapien
gaactgcagaaatcgcttattcact

SEQ ID NO: 262287 - DNA, 25 bp, Homo sapien
acgttgtatgcgttcccggccagag

SEQ ID NO: 262288 - DNA, 25 bp, Homo sapien
ggaaaacggcaaccttcagagcagg

SEQ ID NO: 262289 - DNA, 25 bp, Homo sapien
aatcttgctatctcccctctagcta

SEQ ID NO: 262290 - DNA, 25 bp, Homo sapien
agaatcttgctatctcccctctagc

SEQ ID NO: 262291 - DNA, 25 bp, Homo sapien
tcttgctatctcccctctagctacc

SEQ ID NO: 262292 - DNA, 25 bp, Homo sapien
ttgctatctcccctctagctaccat

SEQ ID NO: 262293 - DNA, 25 bp, Homo sapien
tggacagacctgagcaatcacccat

SEQ ID NO: 262294 - DNA, 25 bp, Homo sapien
gcaaagcgatcctgctatgagcctg

SEQ ID NO: 262295 - DNA, 25 bp, Homo sapien
tgcgctcagcgctggaataaatcct

SEQ ID NO: 262296 - DNA, 25 bp, Homo sapien
ttgagagcctcacaagcatcttgga

SEQ ID NO: 262297 - DNA, 25 bp, Homo sapien
cagtatagaattgcaagatgtggct

SEQ ID NO: 262298 - DNA, 25 bp, Homo sapien
tgaaaaacagtatagaattgcaaga

SEQ ID NO: 262299 - DNA, 25 bp, Homo sapien
aaacagtatagaattgcaagatgtg

SEQ ID NO: 262300 - DNA, 25 bp, Homo sapien
gaaaaacagtatagaattgcaagat

SEQ ID NO: 262301 - DNA, 25 bp, Homo sapien
tgttattggtgtgctttgagcctca

SEQ ID NO: 262302 - DNA, 25 bp, Homo sapien
tctgaacaagtacttgttattggtg

SEQ ID NO: 262303 - DNA, 25 bp, Homo sapien
gcctcaagtggaatgatgatacatg

SEQ ID NO: 262304 - DNA, 25 bp, Homo sapien
cagggttgtttatacattctgaaca

SEQ ID NO: 262305 - DNA, 25 bp, Homo sapien
cttcaaatgatagcgatgcacattt

SEQ ID NO: 262306 - DNA, 25 bp, Homo sapien
caaatgatagcgatgcacatttttt

SEQ ID NO: 262307 - DNA, 25 bp, Homo sapien
gtatgagtccttggtcaagtttctt

SEQ ID NO: 262308 - DNA, 25 bp, Homo sapien
tttgagtatgagtccttggtcaagt

SEQ ID NO: 262309 - DNA, 25 bp, Homo sapien
gcctggcgcctcaggagaagggagt

SEQ ID NO: 262310 - DNA, 25 bp, Homo sapien
agggcctggcgcctcaggagaaggg

SEQ ID NO: 262311 - DNA, 25 bp, Homo sapien
tggcgcctcaggagaagggagtgca

SEQ ID NO: 262312 - DNA, 25 bp, Homo sapien
gcgcctcaggagaagggagtgcacc

SEQ ID NO: 262313 - DNA, 25 bp, Homo sapien
ctcattaaaggagaggggacggttg

SEQ ID NO: 262314 - DNA, 25 bp, Homo sapien
ctgctcattaaaggagaggggacgg

SEQ ID NO: 262315 - DNA, 25 bp, Homo sapien
tcattaaaggagaggggacggttgc

SEQ ID NO: 262316 - DNA, 25 bp, Homo sapien
tgctcattaaaggagaggggacggt

SEQ ID NO: 262317 - DNA, 25 bp, Homo sapien
ctgtgaggaaaaagtgaaagtgagc

SEQ ID NO: 262318 - DNA, 25 bp, Homo sapien
tgtgaggaaaaagtgaaagtgagct

SEQ ID NO: 262319 - DNA, 25 bp, Homo sapien
gtgaggaaaaagtgaaagtgagctg

SEQ ID NO: 262320 - DNA, 25 bp, Homo sapien
tgaggaaaaagtgaaagtgagctgt

SEQ ID NO: 262321 - DNA, 25 bp, Homo sapien
acagccagggaaccttggagcagct

SEQ ID NO: 262322 - DNA, 25 bp, Homo sapien
tcagtgtggacaaagtcagggttcc

SEQ ID NO: 262323 - DNA, 25 bp, Homo sapien
atggcccatgggtccgcacctgtgc

SEQ ID NO: 262324 - DNA, 25 bp, Homo sapien
gacagcacacgccacattgaggcat

SEQ ID NO: 262325 - DNA, 25 bp, Homo sapien
tgattccaggagaaccagctgctta

SEQ ID NO: 262326 - DNA, 25 bp, Homo sapien
tgtgattccaggagaaccagctgct

SEQ ID NO: 262327 - DNA, 25 bp, Homo sapien
ctgtgattccaggagaaccagctgc

SEQ ID NO: 262328 - DNA, 25 bp, Homo sapien
gattccaggagaaccagctgcttac

SEQ ID NO: 262329 - DNA, 25 bp, Homo sapien
cctgtaagcctgagctctggacaca

SEQ ID NO: 262330 - DNA, 25 bp, Homo sapien
ctgggtctgctcatgggctctggct

SEQ ID NO: 262331 - DNA, 25 bp, Homo sapien
cccagtcctgtaagcctgagctctg

SEQ ID NO: 262332 - DNA, 25 bp, Homo sapien
agagaaaccccgacatcccagccac

SEQ ID NO: 262333 - DNA, 25 bp, Homo sapien
gatggtgtcccgcacgatgagggct

SEQ ID NO: 262334 - DNA, 25 bp, Homo sapien
tttgctacgacgtggaggaagagct

SEQ ID NO: 262335 - DNA, 25 bp, Homo sapien
ggctgggctaatgacagactttgct

SEQ ID NO: 262336 - DNA, 25 bp, Homo sapien
taatgacagactttgctacgacgtg

SEQ ID NO: 262337 - DNA, 25 bp, Homo sapien
gcctggcagaggtcttcatagctga

SEQ ID NO: 262338 - DNA, 25 bp, Homo sapien
gaagtcctcctcactaccgttgtca

SEQ ID NO: 262339 - DNA, 25 bp, Homo sapien
ttgtcatccactaaggcagagggct

SEQ ID NO: 262340 - DNA, 25 bp, Homo sapien
ggctcagtacctccatctgaagaaa

SEQ ID NO: 262341 - DNA, 25 bp, Homo sapien
gacatccccggctttgaagcccagt

SEQ ID NO: 262342 - DNA, 25 bp, Homo sapien
ggtcccacagggcttctgcgcagac

SEQ ID NO: 262343 - DNA, 25 bp, Homo sapien
gcagaccacgttgccatcactgatc

SEQ ID NO: 262344 - DNA, 25 bp, Homo sapien
gggaaccaggcttccttatcttcac

SEQ ID NO: 262345 - DNA, 25 bp, Homo sapien
gtgtttgatgtacacccgctcggtg

SEQ ID NO: 262346 - DNA, 25 bp, Homo sapien
gacagctcttcctgattcactcgca

SEQ ID NO: 262347 - DNA, 25 bp, Homo sapien
tgatctcccggatgacgttggtccg

SEQ ID NO: 262348 - DNA, 25 bp, Homo sapien
tgctgcttgttctcacagtgtctgt

SEQ ID NO: 262349 - DNA, 25 bp, Homo sapien
gatgctcgtacacaatccatagaag

SEQ ID NO: 262350 - DNA, 25 bp, Homo sapien
catacagaacgagatggctggcaca

SEQ ID NO: 262351 - DNA, 25 bp, Homo sapien
gaagctaaacactggcatgtccaca

SEQ ID NO: 262352 - DNA, 25 bp, Homo sapien
ctaggagagccgtaatgagcagaca

SEQ ID NO: 262353 - DNA, 25 bp, Homo sapien
ctagctgcgcaacggtgaacattcc

SEQ ID NO: 262354 - DNA, 25 bp, Homo sapien
gtttccaaaaatagtggctagctgc

SEQ ID NO: 262355 - DNA, 25 bp, Homo sapien
gcttgcggcactgtcggatatagcc

SEQ ID NO: 262356 - DNA, 25 bp, Homo sapien
gcaagatcctatttcacttaagtga

SEQ ID NO: 262357 - DNA, 25 bp, Homo sapien
cttcatgaggttggcgagctccagg

SEQ ID NO: 262358 - DNA, 25 bp, Homo sapien
tactcggaatagatggcaaagccct

SEQ ID NO: 262359 - DNA, 25 bp, Homo sapien
tcctgtgtggtatacttgagcagct

SEQ ID NO: 262360 - DNA, 25 bp, Homo sapien
tgcactggtgtgagcaggaacccgt

SEQ ID NO: 262361 - DNA, 25 bp, Homo sapien
gaacaagggcgtgagaagaatccag

SEQ ID NO: 262362 - DNA, 25 bp, Homo sapien
gaagccgagatccaaacaacagaag

SEQ ID NO: 262363 - DNA, 25 bp, Homo sapien
ccaaggaagctcgaagggagatgca

SEQ ID NO: 262364 - DNA, 25 bp, Homo sapien
caagaagagcttagtcaggcaccaa

SEQ ID NO: 262365 - DNA, 25 bp, Homo sapien
taacacccatatctagtgtctattg

SEQ ID NO: 262366 - DNA, 25 bp, Homo sapien
tttagtcctaactctttagctaaca

SEQ ID NO: 262367 - DNA, 25 bp, Homo sapien
taactctttagctaacacccatatc

SEQ ID NO: 262368 - DNA, 25 bp, Homo sapien
ttagctaacacccatatctagtgtc

SEQ ID NO: 262369 - DNA, 25 bp, Homo sapien
gatgggaggttaattttaatcacat

SEQ ID NO: 262370 - DNA, 25 bp, Homo sapien
gcaagatgggaggttaattttaatc

SEQ ID NO: 262371 - DNA, 25 bp, Homo sapien
caagatgggaggttaattttaatca

SEQ ID NO: 262372 - DNA, 25 bp, Homo sapien
ctgcaagatgggaggttaattttaa

SEQ ID NO: 262373 - DNA, 25 bp, Homo sapien
cttgcgcttgcgctcgttgatcaga

SEQ ID NO: 262374 - DNA, 25 bp, Homo sapien
tgccagcgagctatcttgtcgatgc

SEQ ID NO: 262375 - DNA, 25 bp, Homo sapien
agcccacgatagacacctgccagcg

SEQ ID NO: 262376 - DNA, 25 bp, Homo sapien
ttgcgctcgttgatcagacaggcca

SEQ ID NO: 262377 - DNA, 25 bp, Homo sapien
tgcaccagatcaaaggtgcgggaag

SEQ ID NO: 262378 - DNA, 25 bp, Homo sapien
gaatataagatattgaccacaggat

SEQ ID NO: 262379 - DNA, 25 bp, Homo sapien
cagtatgcctcgaaatacatttacc

SEQ ID NO: 262380 - DNA, 25 bp, Homo sapien
tatatgtaccattaaagccaagaat

SEQ ID NO: 262381 - DNA, 25 bp, Homo sapien
taatggcggtagagcacagtgatca

SEQ ID NO: 262382 - DNA, 25 bp, Homo sapien
tcaccagcacggactttgaagccag

SEQ ID NO: 262383 - DNA, 25 bp, Homo sapien
ttcagggtcatagaaacaaaaggcc

SEQ ID NO: 262384 - DNA, 25 bp, Homo sapien
agcacgcaggcttacatgggagaaa

SEQ ID NO: 262385 - DNA, 25 bp, Homo sapien
tagtgattttggtcagctccccaga

SEQ ID NO: 262386 - DNA, 25 bp, Homo sapien
gtagtacagcatgtccctgcgcagc

SEQ ID NO: 262387 - DNA, 25 bp, Homo sapien
tgaggttgcagtccttgtcgcgccc

SEQ ID NO: 262388 - DNA, 25 bp, Homo sapien
aacaggaagaacgtccgctgctggc

SEQ ID NO: 262389 - DNA, 25 bp, Homo sapien
cacacacatgcatcaagtacgaggg

SEQ ID NO: 262390 - DNA, 25 bp, Homo sapien
tctgtcccagactgtcctgacgtca

SEQ ID NO: 262391 - DNA, 25 bp, Homo sapien
actgtcctgacgtcaggctcaggct

SEQ ID NO: 262392 - DNA, 25 bp, Homo sapien
ccagactgtcctgacgtcaggctca

SEQ ID NO: 262393 - DNA, 25 bp, Homo sapien
attccttcacatgcccaacatctgt

SEQ ID NO: 262394 - DNA, 25 bp, Homo sapien
ttaacatggcaagtttcttctggtt

SEQ ID NO: 262395 - DNA, 25 bp, Homo sapien
tttgactttccatgtcctgcctttt

SEQ ID NO: 262396 - DNA, 25 bp, Homo sapien
tgataagcattaaggggacaaagcc

SEQ ID NO: 262397 - DNA, 25 bp, Homo sapien
ctgataagcattaaggggacaaagc

SEQ ID NO: 262398 - DNA, 25 bp, Homo sapien
gataagcattaaggggacaaagcct

SEQ ID NO: 262399 - DNA, 25 bp, Homo sapien
ttggggtatgctcccattttcagga

SEQ ID NO: 262400 - DNA, 25 bp, Homo sapien
ccttgagttctaacttctactgttc

SEQ ID NO: 262401 - DNA, 25 bp, Homo sapien
ccctgttctggacctgcccttgagt

SEQ ID NO: 262402 - DNA, 25 bp, Homo sapien
cacaggctgacaacttggggtatgc

SEQ ID NO: 262403 - DNA, 25 bp, Homo sapien
gcccacattccaatggaagcaaaca

SEQ ID NO: 262404 - DNA, 25 bp, Homo sapien
caatggaagcaaacactgacgcaca

SEQ ID NO: 262405 - DNA, 25 bp, Homo sapien
cacattccaatggaagcaaacactg

SEQ ID NO: 262406 - DNA, 25 bp, Homo sapien
ttccaatggaagcaaacactgacgc

SEQ ID NO: 262407 - DNA, 25 bp, Homo sapien
tcagactggggatgtgcgtgacctt

SEQ ID NO: 262408 - DNA, 25 bp, Homo sapien
agtccttggtttgcctcagactggg

SEQ ID NO: 262409 - DNA, 25 bp, Homo sapien
gagtccttggtttgcctcagactgg

SEQ ID NO: 262410 - DNA, 25 bp, Homo sapien
gatgtgcgtgaccttgtggctaaca

SEQ ID NO: 262411 - DNA, 25 bp, Homo sapien
taactccttgcctgatgtaccgaac

SEQ ID NO: 262412 - DNA, 25 bp, Homo sapien
ggtagccacctgtgaacgtcagcag

SEQ ID NO: 262413 - DNA, 25 bp, Homo sapien
gattatctgcatcctgttgggccag

SEQ ID NO: 262414 - DNA, 25 bp, Homo sapien
aatcttagtgcatcagagcccctgg

SEQ ID NO: 262415 - DNA, 25 bp, Homo sapien
tgagcctgttgaaggtgtgccagaa

SEQ ID NO: 262416 - DNA, 25 bp, Homo sapien
gtgtgccagaagagcgaggacttcc

SEQ ID NO: 262417 - DNA, 25 bp, Homo sapien
gccagaagagcgaggacttcctctt

SEQ ID NO: 262418 - DNA, 25 bp, Homo sapien
gtgagcctgttgaaggtgtgccaga

SEQ ID NO: 262419 - DNA, 25 bp, Homo sapien
tgtttctgtgtaggataaagctttg

SEQ ID NO: 262420 - DNA, 25 bp, Homo sapien
ccctggattgaagcacacaagaaac

SEQ ID NO: 262421 - DNA, 25 bp, Homo sapien
cgggtgtttctgtgtaggataaagc

SEQ ID NO: 262422 - DNA, 25 bp, Homo sapien
aaagactgaaggtgattccaagacc

SEQ ID NO: 262423 - DNA, 25 bp, Homo sapien
cctaatcactcgctttagagcatgg

SEQ ID NO: 262424 - DNA, 25 bp, Homo sapien
cactcgctttagagcatggtaccgg

SEQ ID NO: 262425 - DNA, 25 bp, Homo sapien
tttagagcatggtaccgggtcccac

SEQ ID NO: 262426 - DNA, 25 bp, Homo sapien
tcagctgctgcctaatcactcgctt

SEQ ID NO: 262427 - DNA, 25 bp, Homo sapien
caaatgcagaagtgatcctctaacc

SEQ ID NO: 262428 - DNA, 25 bp, Homo sapien
tggacacagacgatgccagggaaca

SEQ ID NO: 262429 - DNA, 25 bp, Homo sapien
tgtgaccagacacgtgcagcattgt

SEQ ID NO: 262430 - DNA, 25 bp, Homo sapien
gcagcattgtgtcaaccccgtcttg

SEQ ID NO: 262431 - DNA, 25 bp, Homo sapien
gaagcctgatgacatgctcacgtga

SEQ ID NO: 262432 - DNA, 25 bp, Homo sapien
cattgctaaggacgatgtcaggagc

SEQ ID NO: 262433 - DNA, 25 bp, Homo sapien
tctgcaggtgtcagcctaggtggcc

SEQ ID NO: 262434 - DNA, 25 bp, Homo sapien
tgctcggagttactgaaggcgtgca

SEQ ID NO: 262435 - DNA, 25 bp, Homo sapien
catcggttttcatctaggctaggta

SEQ ID NO: 262436 - DNA, 25 bp, Homo sapien
aacttctgtctcaggacgtgccgag

SEQ ID NO: 262437 - DNA, 25 bp, Homo sapien
taagtctctgttaggaagtccgtgg

SEQ ID NO: 262438 - DNA, 25 bp, Homo sapien
gaaaccatgtggctggtatcccagg

SEQ ID NO: 262439 - DNA, 25 bp, Homo sapien
gccactgagaagtctagggacatca

SEQ ID NO: 262440 - DNA, 25 bp, Homo sapien
cagtggttacatggagctcctgaat

SEQ ID NO: 262441 - DNA, 25 bp, Homo sapien
gtggttacatggagctcctgaatgg

SEQ ID NO: 262442 - DNA, 25 bp, Homo sapien
aatggatgagttgttgccactgaga

SEQ ID NO: 262443 - DNA, 25 bp, Homo sapien
tggaccctagggctgcaggctggac

SEQ ID NO: 262444 - DNA, 25 bp, Homo sapien
ctggaccctagggctgcaggctgga

SEQ ID NO: 262445 - DNA, 25 bp, Homo sapien
gggctgcaggctggacccagatact

SEQ ID NO: 262446 - DNA, 25 bp, Homo sapien
ctgcaggctggacccagatactgtg

SEQ ID NO: 262447 - DNA, 25 bp, Homo sapien
gcatagtgcaactggtcagaaccca

SEQ ID NO: 262448 - DNA, 25 bp, Homo sapien
cagtgctgatagccatgtaaatctg

SEQ ID NO: 262449 - DNA, 25 bp, Homo sapien
tagtattacaggctaaagaccctgt

SEQ ID NO: 262450 - DNA, 25 bp, Homo sapien
atgtaaatctgcacatctttctgga

SEQ ID NO: 262451 - DNA, 25 bp, Homo sapien
gaacagatgtccatgttcgtagttg

SEQ ID NO: 262452 - DNA, 25 bp, Homo sapien
cacaaacttggacagaaggctcagg

SEQ ID NO: 262453 - DNA, 25 bp, Homo sapien
gcaagctgattataaccagaatgac

SEQ ID NO: 262454 - DNA, 25 bp, Homo sapien
tataaccagaatgacactgtccttg

SEQ ID NO: 262455 - DNA, 25 bp, Homo sapien
acaaacttggacagaaggctcaggg

SEQ ID NO: 262456 - DNA, 25 bp, Homo sapien
ctccgtctcgtccatctcttccagg

SEQ ID NO: 262457 - DNA, 25 bp, Homo sapien
cctgtgagtttatgttccctgtgca

SEQ ID NO: 262458 - DNA, 25 bp, Homo sapien
tttgtcacccttcgctccgtctcgt

SEQ ID NO: 262459 - DNA, 25 bp, Homo sapien
ttccaggcagaccattgtgaccggg

SEQ ID NO: 262460 - DNA, 25 bp, Homo sapien
ttccattactcttgaggagagtgga

SEQ ID NO: 262461 - DNA, 25 bp, Homo sapien
cttccattactcttgaggagagtgg

SEQ ID NO: 262462 - DNA, 25 bp, Homo sapien
tccattactcttgaggagagtggaa

SEQ ID NO: 262463 - DNA, 25 bp, Homo sapien
caaggacttgggacgtggtctgaat

SEQ ID NO: 262464 - DNA, 25 bp, Homo sapien
tcctgcgacaaggacttgggacgtg

SEQ ID NO: 262465 - DNA, 25 bp, Homo sapien
gattgtgttcctctcctgcgacaag

SEQ ID NO: 262466 - DNA, 25 bp, Homo sapien
ttgtgttcctctcctgcgacaagga

SEQ ID NO: 262467 - DNA, 25 bp, Homo sapien
ttctctccactcgtcccatccttcc

SEQ ID NO: 262468 - DNA, 25 bp, Homo sapien
cttctctccactcgtcccatccttc

SEQ ID NO: 262469 - DNA, 25 bp, Homo sapien
gccttttgcttcaacttttccatct

SEQ ID NO: 262470 - DNA, 25 bp, Homo sapien
ctttgatgccttttgcttcaacttt

SEQ ID NO: 262471 - DNA, 25 bp, Homo sapien
cttttgcttcaacttttccatctgc

SEQ ID NO: 262472 - DNA, 25 bp, Homo sapien
tttgcttcaacttttccatctgctc

SEQ ID NO: 262473 - DNA, 25 bp, Homo sapien
cagcctcttattccccggactcctg

SEQ ID NO: 262474 - DNA, 25 bp, Homo sapien
tagagtctcaccgattttccctttc

SEQ ID NO: 262475 - DNA, 25 bp, Homo sapien
cagtgggacccacgtcacccttatt

SEQ ID NO: 262476 - DNA, 25 bp, Homo sapien
gaccaggctttccaatagggcccat

SEQ ID NO: 262477 - DNA, 25 bp, Homo sapien
agtaatagaccccagcaatgtggca

SEQ ID NO: 262478 - DNA, 25 bp, Homo sapien
tgtggtaggtgaagtaatagacccc

SEQ ID NO: 262479 - DNA, 25 bp, Homo sapien
agcaatgtggcacgtgaatttcccc

SEQ ID NO: 262480 - DNA, 25 bp, Homo sapien
ttatacaggatcttatcaaatttaa

SEQ ID NO: 262481 - DNA, 25 bp, Homo sapien
ttactccatttttgaccaaagacac

SEQ ID NO: 262482 - DNA, 25 bp, Homo sapien
atttttgaccaaagacacctgaaca

SEQ ID NO: 262483 - DNA, 25 bp, Homo sapien
ccatttttgaccaaagacacctgaa

SEQ ID NO: 262484 - DNA, 25 bp, Homo sapien
ctccatttttgaccaaagacacctg

SEQ ID NO: 262485 - DNA, 25 bp, Homo sapien
ctgtgaaagttgtgtcatcgtcctc

SEQ ID NO: 262486 - DNA, 25 bp, Homo sapien
tgtgaaagttgtgtcatcgtcctca

SEQ ID NO: 262487 - DNA, 25 bp, Homo sapien
tgaaagttgtgtcatcgtcctcatc

SEQ ID NO: 262488 - DNA, 25 bp, Homo sapien
gtgaaagttgtgtcatcgtcctcat

SEQ ID NO: 262489 - DNA, 25 bp, Homo sapien
caagtctggcaaataatgatcgaac

SEQ ID NO: 262490 - DNA, 25 bp, Homo sapien
cacaagaaacgcacagacgagggat

SEQ ID NO: 262491 - DNA, 25 bp, Homo sapien
ctttctggagtatgacagcatcacc

SEQ ID NO: 262492 - DNA, 25 bp, Homo sapien
gagggatacatcttcatatgactcc

SEQ ID NO: 262493 - DNA, 25 bp, Homo sapien
atgcagcacccgtcacagcagctcg

SEQ ID NO: 262494 - DNA, 25 bp, Homo sapien
ccccgcgcgggtgcgtgtggtgagg

SEQ ID NO: 262495 - DNA, 25 bp, Homo sapien
cgggtgcgtgtggtgagggctgttc

SEQ ID NO: 262496 - DNA, 25 bp, Homo sapien
gctgttccatgcttgcggagcgtga

SEQ ID NO: 262497 - DNA, 25 bp, Homo sapien
tccagggaagggccgtccgcgcgcc

SEQ ID NO: 262498 - DNA, 25 bp, Homo sapien
ccagggaagggccgtccgcgcgcca

SEQ ID NO: 262499 - DNA, 25 bp, Homo sapien
cagggaagggccgtccgcgcgccag

SEQ ID NO: 262500 - DNA, 25 bp, Homo sapien
ctccagggaagggccgtccgcgcgc

SEQ ID NO: 262501 - DNA, 25 bp, Homo sapien
ttgaacaatctaggcccagaagttc

SEQ ID NO: 262502 - DNA, 25 bp, Homo sapien
acaatctaggcccagaagttcttgc

SEQ ID NO: 262503 - DNA, 25 bp, Homo sapien
aatctaggcccagaagttcttgctg

SEQ ID NO: 262504 - DNA, 25 bp, Homo sapien
attttgaacaatctaggcccagaag

SEQ ID NO: 262505 - DNA, 25 bp, Homo sapien
ctgagtaaactaacatatctacatc

SEQ ID NO: 262506 - DNA, 25 bp, Homo sapien
tgagtaaactaacatatctacatcc

SEQ ID NO: 262507 - DNA, 25 bp, Homo sapien
taaatcaggatcaggacaaccattt

SEQ ID NO: 262508 - DNA, 25 bp, Homo sapien
ctaaatcaggatcaggacaaccatt

SEQ ID NO: 262509 - DNA, 25 bp, Homo sapien
atcaggatcaggacaaccatttgaa

SEQ ID NO: 262510 - DNA, 25 bp, Homo sapien
aatcaggatcaggacaaccatttga

SEQ ID NO: 262511 - DNA, 25 bp, Homo sapien
tttcccagacgctgttcacaggctg

SEQ ID NO: 262512 - DNA, 25 bp, Homo sapien
tcccagacgctgttcacaggctgca

SEQ ID NO: 262513 - DNA, 25 bp, Homo sapien
cccagacgctgttcacaggctgcat

SEQ ID NO: 262514 - DNA, 25 bp, Homo sapien
ccagacgctgttcacaggctgcata

SEQ ID NO: 262515 - DNA, 25 bp, Homo sapien
aaagtttggtcactaagaaggactg

SEQ ID NO: 262516 - DNA, 25 bp, Homo sapien
tggtcactaagaaggactgaacaaa

SEQ ID NO: 262517 - DNA, 25 bp, Homo sapien
gccaaacacaaccagaacagttcta

SEQ ID NO: 262518 - DNA, 25 bp, Homo sapien
aacagttctaatcaggccctcttct

SEQ ID NO: 262519 - DNA, 25 bp, Homo sapien
cttgatgacgtacagcttgtgatga

SEQ ID NO: 262520 - DNA, 25 bp, Homo sapien
ttgatgacgtacagcttgtgatgat

SEQ ID NO: 262521 - DNA, 25 bp, Homo sapien
ttggcctcccatgtggaatacagca

SEQ ID NO: 262522 - DNA, 25 bp, Homo sapien
cggtggcgctaatgtggctcactgc

SEQ ID NO: 262523 - DNA, 25 bp, Homo sapien
taatgggtgcctcaggtgctttacc

SEQ ID NO: 262524 - DNA, 25 bp, Homo sapien
aatcatcttgcgttgacttggcctc

SEQ ID NO: 262525 - DNA, 25 bp, Homo sapien
cccatccctctcaccaatacttcct

SEQ ID NO: 262526 - DNA, 25 bp, Homo sapien
tccctctcaccaatacttcctggac

SEQ ID NO: 262527 - DNA, 25 bp, Homo sapien
ttacactcttgggtctccccatccc

SEQ ID NO: 262528 - DNA, 25 bp, Homo sapien
cttcctggaccgctcctcagcaccg

SEQ ID NO: 262529 - DNA, 25 bp, Homo sapien
gaccactgtgaacccacacggccca

SEQ ID NO: 262530 - DNA, 25 bp, Homo sapien
catgtccatccattccctgaatgac

SEQ ID NO: 262531 - DNA, 25 bp, Homo sapien
gtccatccattccctgaatgaccac

SEQ ID NO: 262532 - DNA, 25 bp, Homo sapien
tgtccatccattccctgaatgacca

SEQ ID NO: 262533 - DNA, 25 bp, Homo sapien
gcccttgagccctctagagtgcctg

SEQ ID NO: 262534 - DNA, 25 bp, Homo sapien
gggtagtggcccttgagccctctag

SEQ ID NO: 262535 - DNA, 25 bp, Homo sapien
agccctctagagtgcctggccctat

SEQ ID NO: 262536 - DNA, 25 bp, Homo sapien
tagtggcccttgagccctctagagt

SEQ ID NO: 262537 - DNA, 25 bp, Homo sapien
tgcctgctggagaatcctcctcgca

SEQ ID NO: 262538 - DNA, 25 bp, Homo sapien
ctgagcttggccgagcactgcagga

SEQ ID NO: 262539 - DNA, 25 bp, Homo sapien
gcagtgtcccgctttgtctcttcct

SEQ ID NO: 262540 - DNA, 25 bp, Homo sapien
gtcggcacagggactctatctggct

SEQ ID NO: 262541 - DNA, 25 bp, Homo sapien
tccaattctgcatcacagtgggctc

SEQ ID NO: 262542 - DNA, 25 bp, Homo sapien
tctgggcaatcgggagtgcaggggg

SEQ ID NO: 262543 - DNA, 25 bp, Homo sapien
gggattccaattctgcatcacagtg

SEQ ID NO: 262544 - DNA, 25 bp, Homo sapien
ttctgggcaatcgggagtgcagggg

SEQ ID NO: 262545 - DNA, 25 bp, Homo sapien
taaccggcagcataacccgcagggc

SEQ ID NO: 262546 - DNA, 25 bp, Homo sapien
gcagcataacccgcagggccagatt

SEQ ID NO: 262547 - DNA, 25 bp, Homo sapien
tcatgtaaccggcagcataacccgc

SEQ ID NO: 262548 - DNA, 25 bp, Homo sapien
atgtaaccggcagcataacccgcag

SEQ ID NO: 262549 - DNA, 25 bp, Homo sapien
ggagggagaaatgactgggcagcct

SEQ ID NO: 262550 - DNA, 25 bp, Homo sapien
gagaaatgactgggcagcctgctgc

SEQ ID NO: 262551 - DNA, 25 bp, Homo sapien
gaaatgactgggcagcctgctgcag

SEQ ID NO: 262552 - DNA, 25 bp, Homo sapien
cgggagggagaaatgactgggcagc

SEQ ID NO: 262553 - DNA, 25 bp, Homo sapien
ggcatggagactcctcccgggcagt

SEQ ID NO: 262554 - DNA, 25 bp, Homo sapien
gggcagtccccgatcctcctggccc

SEQ ID NO: 262555 - DNA, 25 bp, Homo sapien
tcacccccagcttgagtgtgtctct

SEQ ID NO: 262556 - DNA, 25 bp, Homo sapien
ggatctggctctgcagatgccattc

SEQ ID NO: 262557 - DNA, 25 bp, Homo sapien
gtctgcctggcggtatggctgttgg

SEQ ID NO: 262558 - DNA, 25 bp, Homo sapien
tgcctggcggtatggctgttggagt

SEQ ID NO: 262559 - DNA, 25 bp, Homo sapien
tgctgtctgcctggcggtatggctg

SEQ ID NO: 262560 - DNA, 25 bp, Homo sapien
ctggcggtatggctgttggagtagg

SEQ ID NO: 262561 - DNA, 25 bp, Homo sapien
tgttcattctccttaaaggcctgcc

SEQ ID NO: 262562 - DNA, 25 bp, Homo sapien
tgtggaaagcactccctgctgtgcc

SEQ ID NO: 262563 - DNA, 25 bp, Homo sapien
tgagggtggagacctgtgctcatct

SEQ ID NO: 262564 - DNA, 25 bp, Homo sapien
gctatttgtggctgtttccagaggc

SEQ ID NO: 262565 - DNA, 25 bp, Homo sapien
ggctcttgaggtggctccagtatgc

SEQ ID NO: 262566 - DNA, 25 bp, Homo sapien
atggctcttgaggtggctccagtat

SEQ ID NO: 262567 - DNA, 25 bp, Homo sapien
tggctcttgaggtggctccagtatg

SEQ ID NO: 262568 - DNA, 25 bp, Homo sapien
ctcttgaggtggctccagtatgcag

SEQ ID NO: 262569 - DNA, 25 bp, Homo sapien
taaagggagttttcacagctacgca

SEQ ID NO: 262570 - DNA, 25 bp, Homo sapien
tacacaggctctctttttgatttta

SEQ ID NO: 262571 - DNA, 25 bp, Homo sapien
aaagggagttttcacagctacgcac

SEQ ID NO: 262572 - DNA, 25 bp, Homo sapien
ttacacaggctctctttttgatttt

SEQ ID NO: 262573 - DNA, 25 bp, Homo sapien
ccaagaagaaagtcctgctggcctg

SEQ ID NO: 262574 - DNA, 25 bp, Homo sapien
gcggcaccatttgaggagccaagaa

SEQ ID NO: 262575 - DNA, 25 bp, Homo sapien
ccacggaggtgcttagagggaagtg

SEQ ID NO: 262576 - DNA, 25 bp, Homo sapien
aggaactgacactgggcgccagcca

SEQ ID NO: 262577 - DNA, 25 bp, Homo sapien
ggcaaggcctgatgccaatgtttgc

SEQ ID NO: 262578 - DNA, 25 bp, Homo sapien
ggcctgatgccaatgtttgcaactc

SEQ ID NO: 262579 - DNA, 25 bp, Homo sapien
gcaaggcctgatgccaatgtttgca

SEQ ID NO: 262580 - DNA, 25 bp, Homo sapien
aaggcctgatgccaatgtttgcaac

SEQ ID NO: 262581 - DNA, 25 bp, Homo sapien
ccgggatcccacaaataggcgagca

SEQ ID NO: 262582 - DNA, 25 bp, Homo sapien
ctgggatgcggtgggcaggtctgcc

SEQ ID NO: 262583 - DNA, 25 bp, Homo sapien
caggtctgccgggatcccacaaata

SEQ ID NO: 262584 - DNA, 25 bp, Homo sapien
cacaaataggcgagcagagaagcca

SEQ ID NO: 262585 - DNA, 25 bp, Homo sapien
tcttgtctggacctgttatggtggt

SEQ ID NO: 262586 - DNA, 25 bp, Homo sapien
tggttttcccaagcacatgcgtggc

SEQ ID NO: 262587 - DNA, 25 bp, Homo sapien
ggccagcactcttgtctggacctgt

SEQ ID NO: 262588 - DNA, 25 bp, Homo sapien
ttatggtggttttcccaagcacatg

SEQ ID NO: 262589 - DNA, 25 bp, Homo sapien
cttcttgcttatcctgaggccattt

SEQ ID NO: 262590 - DNA, 25 bp, Homo sapien
ttcttgcttatcctgaggccatttt

SEQ ID NO: 262591 - DNA, 25 bp, Homo sapien
gaaaccccgccagccaccttagcac

SEQ ID NO: 262592 - DNA, 25 bp, Homo sapien
accccgccagccaccttagcaccat

SEQ ID NO: 262593 - DNA, 25 bp, Homo sapien
aaccccgccagccaccttagcacca

SEQ ID NO: 262594 - DNA, 25 bp, Homo sapien
ggaaaccccgccagccaccttagca

SEQ ID NO: 262595 - DNA, 25 bp, Homo sapien
ccatctgcggacaaagcccgggctc

SEQ ID NO: 262596 - DNA, 25 bp, Homo sapien
gggctccggcgtcacgtgctgggta

SEQ ID NO: 262597 - DNA, 25 bp, Homo sapien
tccggcgtcacgtgctgggtagagg

SEQ ID NO: 262598 - DNA, 25 bp, Homo sapien
tgggtagaggctctcggcccatctg

SEQ ID NO: 262599 - DNA, 25 bp, Homo sapien
ctgcccagggtcacatagtcaccag

SEQ ID NO: 262600 - DNA, 25 bp, Homo sapien
caggaaaccgtggagggctactctg

SEQ ID NO: 262601 - DNA, 25 bp, Homo sapien
ccaggaaaccgtggagggctactct

SEQ ID NO: 262602 - DNA, 25 bp, Homo sapien
ccagggtcacatagtcaccagaggc

SEQ ID NO: 262603 - DNA, 25 bp, Homo sapien
gtggggaatgctcttggcatcctct

SEQ ID NO: 262604 - DNA, 25 bp, Homo sapien
gctcccacagcctcttctgacgtca

SEQ ID NO: 262605 - DNA, 25 bp, Homo sapien
catggagggtggggaatgctcttgg

SEQ ID NO: 262606 - DNA, 25 bp, Homo sapien
ctggggaaggccccatggagggtgg

SEQ ID NO: 262607 - DNA, 25 bp, Homo sapien
caggaacactgactgtgttctgtgc

SEQ ID NO: 262608 - DNA, 25 bp, Homo sapien
gaatggcttccagacacgcctgaca

SEQ ID NO: 262609 - DNA, 25 bp, Homo sapien
gtggagagggcgtatccccgatccc

SEQ ID NO: 262610 - DNA, 25 bp, Homo sapien
gggcccaggcgtgtttgagcaaaca

SEQ ID NO: 262611 - DNA, 25 bp, Homo sapien
tctctgacagcgtcatttgcctgac

SEQ ID NO: 262612 - DNA, 25 bp, Homo sapien
gtctgagagttgcttcagaccccag

SEQ ID NO: 262613 - DNA, 25 bp, Homo sapien
ctgagagttgcttcagaccccaggc

SEQ ID NO: 262614 - DNA, 25 bp, Homo sapien
caggtgtgcgactcttatcactggg

SEQ ID NO: 262615 - DNA, 25 bp, Homo sapien
tttgcagaaaaggcagggttggacc

SEQ ID NO: 262616 - DNA, 25 bp, Homo sapien
aggcagggttggacccaactccagg

SEQ ID NO: 262617 - DNA, 25 bp, Homo sapien
gcagaaaaggcagggttggacccaa

SEQ ID NO: 262618 - DNA, 25 bp, Homo sapien
aaggcagggttggacccaactccag

SEQ ID NO: 262619 - DNA, 25 bp, Homo sapien
gctatgctagtgagaccccgtgctt

SEQ ID NO: 262620 - DNA, 25 bp, Homo sapien
gggcctcggagtctctcccgtgtga

SEQ ID NO: 262621 - DNA, 25 bp, Homo sapien
tgacaccagtgctatgctagtgaga

SEQ ID NO: 262622 - DNA, 25 bp, Homo sapien
catgtctgtccttacctgcatcttc

SEQ ID NO: 262623 - DNA, 25 bp, Homo sapien
catttatttccgtagctgggcctgg

SEQ ID NO: 262624 - DNA, 25 bp, Homo sapien
ccaatctcatgactgagtagctttg

SEQ ID NO: 262625 - DNA, 25 bp, Homo sapien
tagagacaaccgtgaagctgaacgc

SEQ ID NO: 262626 - DNA, 25 bp, Homo sapien
caagctctggcaaaacttgatcatc

SEQ ID NO: 262627 - DNA, 25 bp, Homo sapien
ccagtgaggtcgcaccggcagactg

SEQ ID NO: 262628 - DNA, 25 bp, Homo sapien
ggcccaggcagcgtggatggggtcc

SEQ ID NO: 262629 - DNA, 25 bp, Homo sapien
accggcagactggaggccccagctg

SEQ ID NO: 262630 - DNA, 25 bp, Homo sapien
acccaggggccagtgaggtcgcacc

SEQ ID NO: 262631 - DNA, 25 bp, Homo sapien
gtggtgtctggacatagtctctctc

SEQ ID NO: 262632 - DNA, 25 bp, Homo sapien
cctggcactccatgtttctctgagt

SEQ ID NO: 262633 - DNA, 25 bp, Homo sapien
tgctctcggtccaggtcactgagcg

SEQ ID NO: 262634 - DNA, 25 bp, Homo sapien
ctgtcacacgccagagccctaaatg

SEQ ID NO: 262635 - DNA, 25 bp, Homo sapien
cgccgttactggaaatgtcctctcc

SEQ ID NO: 262636 - DNA, 25 bp, Homo sapien
gaggaattctgaaacgccgttactg

SEQ ID NO: 262637 - DNA, 25 bp, Homo sapien
tctcccttgcgtggcctgggaggtc

SEQ ID NO: 262638 - DNA, 25 bp, Homo sapien
tcctgtgagccttggccgctggctg

SEQ ID NO: 262639 - DNA, 25 bp, Homo sapien
cagcctgtcttgtctcagggactgg

SEQ ID NO: 262640 - DNA, 25 bp, Homo sapien
gcctgagaattcctcggagcagagg

SEQ ID NO: 262641 - DNA, 25 bp, Homo sapien
ggcctgagaattcctcggagcagag

SEQ ID NO: 262642 - DNA, 25 bp, Homo sapien
ctgagaattcctcggagcagaggaa

SEQ ID NO: 262643 - DNA, 25 bp, Homo sapien
gatgctgctcggacgattcccgcgg

SEQ ID NO: 262644 - DNA, 25 bp, Homo sapien
tgctgctcggacgattcccgcggag

SEQ ID NO: 262645 - DNA, 25 bp, Homo sapien
gacgattcccgcggagggtcccaca

SEQ ID NO: 262646 - DNA, 25 bp, Homo sapien
gctcggacgattcccgcggagggtc

SEQ ID NO: 262647 - DNA, 25 bp, Homo sapien
gagaggcggactagagggtacactc

SEQ ID NO: 262648 - DNA, 25 bp, Homo sapien
agagggtacactccaccgagcttcc

SEQ ID NO: 262649 - DNA, 25 bp, Homo sapien
tagagggtacactccaccgagcttc

SEQ ID NO: 262650 - DNA, 25 bp, Homo sapien
gggagcaagagaggcggactagagg

SEQ ID NO: 262651 - DNA, 25 bp, Homo sapien
ggaataaggactggcagtgcttccc

SEQ ID NO: 262652 - DNA, 25 bp, Homo sapien
gggctgctctgactagcctcaggga

SEQ ID NO: 262653 - DNA, 25 bp, Homo sapien
tgctgtcctaggagcccatctgtgg

SEQ ID NO: 262654 - DNA, 25 bp, Homo sapien
ggaggctgagagtgcccgatctctt

SEQ ID NO: 262655 - DNA, 25 bp, Homo sapien
cggctgtgagttccaggtcatgatc

SEQ ID NO: 262656 - DNA, 25 bp, Homo sapien
ccagcttgggtcatggaccagatga

SEQ ID NO: 262657 - DNA, 25 bp, Homo sapien
gaggaataagcccagatatggaagg

SEQ ID NO: 262658 - DNA, 25 bp, Homo sapien
ggtcatgatccagcacactggcttt

SEQ ID NO: 262659 - DNA, 25 bp, Homo sapien
tgttctcgctcagaagccacacgtc

SEQ ID NO: 262660 - DNA, 25 bp, Homo sapien
tctcaacatctcaatatctctcaaa

SEQ ID NO: 262661 - DNA, 25 bp, Homo sapien
tctttctcaacatctcaatatctct

SEQ ID NO: 262662 - DNA, 25 bp, Homo sapien
tctcaaattctctctttcgtcactg

SEQ ID NO: 262663 - DNA, 25 bp, Homo sapien
caaattctctctttcgtcactggca

SEQ ID NO: 262664 - DNA, 25 bp, Homo sapien
tatcggtgtctatgtaagataatcc

SEQ ID NO: 262665 - DNA, 25 bp, Homo sapien
acttcctgggattctcaaaatactt

SEQ ID NO: 262666 - DNA, 25 bp, Homo sapien
tcggtgtctatgtaagataatccaa

SEQ ID NO: 262667 - DNA, 25 bp, Homo sapien
gttcttatcggtgtctatgtaagat

SEQ ID NO: 262668 - DNA, 25 bp, Homo sapien
aaaagcatttgtaagattccactct

SEQ ID NO: 262669 - DNA, 25 bp, Homo sapien
ttgccattaccttgaaacatatcca

SEQ ID NO: 262670 - DNA, 25 bp, Homo sapien
tcaccgggatgccacaaaggagagg

SEQ ID NO: 262671 - DNA, 25 bp, Homo sapien
gatgccacaaaggagaggcttgcaa

SEQ ID NO: 262672 - DNA, 25 bp, Homo sapien
gcttctcgtctagaaagtgcacaac

SEQ ID NO: 262673 - DNA, 25 bp, Homo sapien
tctcgtctagaaagtgcacaacttc

SEQ ID NO: 262674 - DNA, 25 bp, Homo sapien
ttctcgtctagaaagtgcacaactt

SEQ ID NO: 262675 - DNA, 25 bp, Homo sapien
atgcttctcgtctagaaagtgcaca

SEQ ID NO: 262676 - DNA, 25 bp, Homo sapien
gcagtaatctgttttctatctacag

SEQ ID NO: 262677 - DNA, 25 bp, Homo sapien
atctacagtagcaaaatatagagta

SEQ ID NO: 262678 - DNA, 25 bp, Homo sapien
cagtagcaaaatatagagtaacgta

SEQ ID NO: 262679 - DNA, 25 bp, Homo sapien
tacagtagcaaaatatagagtaacg

SEQ ID NO: 262680 - DNA, 25 bp, Homo sapien
catgagtctaccaacgctattatgg

SEQ ID NO: 262681 - DNA, 25 bp, Homo sapien
tcatgagtctaccaacgctattatg

SEQ ID NO: 262682 - DNA, 25 bp, Homo sapien
tgagtctaccaacgctattatggaa

SEQ ID NO: 262683 - DNA, 25 bp, Homo sapien
gtctaccaacgctattatggaagtg

SEQ ID NO: 262684 - DNA, 25 bp, Homo sapien
atcgctacgatgttttcaagatctt

SEQ ID NO: 262685 - DNA, 25 bp, Homo sapien
gtgaatcgctacgatgttttcaaga

SEQ ID NO: 262686 - DNA, 25 bp, Homo sapien
gaatcgctacgatgttttcaagatc

SEQ ID NO: 262687 - DNA, 25 bp, Homo sapien
ttgagccatccactcatttacttcc

SEQ ID NO: 262688 - DNA, 25 bp, Homo sapien
ggctccatccaaaacatgctgaatc

SEQ ID NO: 262689 - DNA, 25 bp, Homo sapien
tgggcacagtggagcatctcatcag

SEQ ID NO: 262690 - DNA, 25 bp, Homo sapien
tatttgaacacagtggcccaggtgc

SEQ ID NO: 262691 - DNA, 25 bp, Homo sapien
tcactcaggagctcatcaagacagg

SEQ ID NO: 262692 - DNA, 25 bp, Homo sapien
tgcatttcttcatccgtcacacggc

SEQ ID NO: 262693 - DNA, 25 bp, Homo sapien
tcatccgtcacacggccagggtatg

SEQ ID NO: 262694 - DNA, 25 bp, Homo sapien
tcttcatccgtcacacggccagggt

SEQ ID NO: 262695 - DNA, 25 bp, Homo sapien
atttcttcatccgtcacacggccag

SEQ ID NO: 262696 - DNA, 25 bp, Homo sapien
ccagccggtgtttcagagttttaag

SEQ ID NO: 262697 - DNA, 25 bp, Homo sapien
ccttctcacattcaggagtccagtg

SEQ ID NO: 262698 - DNA, 25 bp, Homo sapien
gagagatgcttctggatagtcctgg

SEQ ID NO: 262699 - DNA, 25 bp, Homo sapien
tggactgagcaatctgagaagaaac

SEQ ID NO: 262700 - DNA, 25 bp, Homo sapien
agcggctggaacgtgagctgtgctg

SEQ ID NO: 262701 - DNA, 25 bp, Homo sapien
agactgagaagcgtggaaaggggac

SEQ ID NO: 262702 - DNA, 25 bp, Homo sapien
ataaacaactgtagagcggctggaa

SEQ ID NO: 262703 - DNA, 25 bp, Homo sapien
aacaactgtagagcggctggaacgt

SEQ ID NO: 262704 - DNA, 25 bp, Homo sapien
tactgtgcactagggactagtaagc

SEQ ID NO: 262705 - DNA, 25 bp, Homo sapien
tgatttccaccacaaacccatagga

SEQ ID NO: 262706 - DNA, 25 bp, Homo sapien
ggacctcaggttattctcataattg

SEQ ID NO: 262707 - DNA, 25 bp, Homo sapien
tagtatcatgacattcagcgaacat

SEQ ID NO: 262708 - DNA, 25 bp, Homo sapien
tgttggcacttgagtacataagaca

SEQ ID NO: 262709 - DNA, 25 bp, Homo sapien
gcatattgctcttactccattactg

SEQ ID NO: 262710 - DNA, 25 bp, Homo sapien
ggcacatccaaagacgcatttattc

SEQ ID NO: 262711 - DNA, 25 bp, Homo sapien
gatcaagtatattccagcatattgc

SEQ ID NO: 262712 - DNA, 25 bp, Homo sapien
gagtcatgtaaaccaacagcaactg

SEQ ID NO: 262713 - DNA, 25 bp, Homo sapien
aagaggatggcttaggtgtactacc

SEQ ID NO: 262714 - DNA, 25 bp, Homo sapien
gaaagtcagtccatgggaaacatct

SEQ ID NO: 262715 - DNA, 25 bp, Homo sapien
cacatcaaatttggaacgtggaggt

SEQ ID NO: 262716 - DNA, 25 bp, Homo sapien
tggcacctgccgcattctacacgga

SEQ ID NO: 262717 - DNA, 25 bp, Homo sapien
tcttagcaagaaattgagggcactg

SEQ ID NO: 262718 - DNA, 25 bp, Homo sapien
cattgagaacaagcgagaggcagag

SEQ ID NO: 262719 - DNA, 25 bp, Homo sapien
aatagagcccggacatccaggtctg

SEQ ID NO: 262720 - DNA, 25 bp, Homo sapien
tcccttctcagtttgtcttctgtgt

SEQ ID NO: 262721 - DNA, 25 bp, Homo sapien
gacaaaatccctcctgaaatatgaa

SEQ ID NO: 262722 - DNA, 25 bp, Homo sapien
gattccgggcgcgttccggctatcg

SEQ ID NO: 262723 - DNA, 25 bp, Homo sapien
gattacggaagtaccgcgagcaagg

SEQ ID NO: 262724 - DNA, 25 bp, Homo sapien
gagcgtccggagctagctggatcct

SEQ ID NO: 262725 - DNA, 25 bp, Homo sapien
tgcttatgggataaaatgtaggaag

SEQ ID NO: 262726 - DNA, 25 bp, Homo sapien
ggtgcttcttgataccgtgcaacag

SEQ ID NO: 262727 - DNA, 25 bp, Homo sapien
ttgtaagatggttatggttttcttc

SEQ ID NO: 262728 - DNA, 25 bp, Homo sapien
tcttgataccgtgcaacagaaaata

SEQ ID NO: 262729 - DNA, 25 bp, Homo sapien
tgtgctgtttttttctccaaattca

SEQ ID NO: 262730 - DNA, 25 bp, Homo sapien
ctgtttttttctccaaattcaacat

SEQ ID NO: 262731 - DNA, 25 bp, Homo sapien
tgctgtttttttctccaaattcaac

SEQ ID NO: 262732 - DNA, 25 bp, Homo sapien
ctgatgtgctgtttttttctccaaa

SEQ ID NO: 262733 - DNA, 25 bp, Homo sapien
tgatcaattgggtcacacgtgaaga

SEQ ID NO: 262734 - DNA, 25 bp, Homo sapien
aggaagagggaagtgctgatcaatt

SEQ ID NO: 262735 - DNA, 25 bp, Homo sapien
tgtcctcctgcactgaatgggttcc

SEQ ID NO: 262736 - DNA, 25 bp, Homo sapien
aattagtctccctggaaactcagtg

SEQ ID NO: 262737 - DNA, 25 bp, Homo sapien
ctgagcattctagaagtaagtggac

SEQ ID NO: 262738 - DNA, 25 bp, Homo sapien
tgaatcacagagagcattcccagtt

SEQ ID NO: 262739 - DNA, 25 bp, Homo sapien
agagagcattcccagttgggctcat

SEQ ID NO: 262740 - DNA, 25 bp, Homo sapien
tctagaagtaagtggacctgaatca

SEQ ID NO: 262741 - DNA, 25 bp, Homo sapien
tgtatccaaaccaataggagggcta

SEQ ID NO: 262742 - DNA, 25 bp, Homo sapien
tcatcaatagcagaccccttttttc

SEQ ID NO: 262743 - DNA, 25 bp, Homo sapien
ccctgttcctgggtagcaactgtga

SEQ ID NO: 262744 - DNA, 25 bp, Homo sapien
caaacccagggtagctgtatccaaa

SEQ ID NO: 262745 - DNA, 25 bp, Homo sapien
tgaggactcagatggccccgtgctg

SEQ ID NO: 262746 - DNA, 25 bp, Homo sapien
gatgtggaggacgtatcgcaccttc

SEQ ID NO: 262747 - DNA, 25 bp, Homo sapien
tgctggtagccctctcctgaggact

SEQ ID NO: 262748 - DNA, 25 bp, Homo sapien
tggccacactgccaatgagttggat

SEQ ID NO: 262749 - DNA, 25 bp, Homo sapien
gtccctccaaagggacacaggtctc

SEQ ID NO: 262750 - DNA, 25 bp, Homo sapien
tccctccaaagggacacaggtctct

SEQ ID NO: 262751 - DNA, 25 bp, Homo sapien
ctcagctgtttcgatgagtaagtcc

SEQ ID NO: 262752 - DNA, 25 bp, Homo sapien
cagctgtttcgatgagtaagtcctc

SEQ ID NO: 262753 - DNA, 25 bp, Homo sapien
gctgtttcgatgagtaagtcctctg

SEQ ID NO: 262754 - DNA, 25 bp, Homo sapien
tttcgatgagtaagtcctctgactg

SEQ ID NO: 262755 - DNA, 25 bp, Homo sapien
aggaggaagtgcaggccccaaggcc

SEQ ID NO: 262756 - DNA, 25 bp, Homo sapien
agtgcaggccccaaggcctatgtgc

SEQ ID NO: 262757 - DNA, 25 bp, Homo sapien
gaggaagtgcaggccccaaggccta

SEQ ID NO: 262758 - DNA, 25 bp, Homo sapien
ggaagtgcaggccccaaggcctatg

SEQ ID NO: 262759 - DNA, 25 bp, Homo sapien
ttcatctaggtgcacccaaaggccg

SEQ ID NO: 262760 - DNA, 25 bp, Homo sapien
aggtgctggccggactgtgttctgg

SEQ ID NO: 262761 - DNA, 25 bp, Homo sapien
tgtgtaactgtgcagcttcgggctg

SEQ ID NO: 262762 - DNA, 25 bp, Homo sapien
tccaggacttcatctaggtgcaccc

SEQ ID NO: 262763 - DNA, 25 bp, Homo sapien
ctcccgcattgactggttggggttg

SEQ ID NO: 262764 - DNA, 25 bp, Homo sapien
tgagaaggctcccgcattgactggt

SEQ ID NO: 262765 - DNA, 25 bp, Homo sapien
aaggctcccgcattgactggttggg

SEQ ID NO: 262766 - DNA, 25 bp, Homo sapien
agaaggctcccgcattgactggttg

SEQ ID NO: 262767 - DNA, 25 bp, Homo sapien
gaggcagcatccttgcaggactcgc

SEQ ID NO: 262768 - DNA, 25 bp, Homo sapien
caccaaggcaaagccggctcagcct

SEQ ID NO: 262769 - DNA, 25 bp, Homo sapien
tccccagccacccacgagagaatct

SEQ ID NO: 262770 - DNA, 25 bp, Homo sapien
ccacgagagaatctgggtcgccagg

SEQ ID NO: 262771 - DNA, 25 bp, Homo sapien
gaggaagcaaatcgcgtccgccaca

SEQ ID NO: 262772 - DNA, 25 bp, Homo sapien
ctatatgaggaagcaaatcgcgtcc

SEQ ID NO: 262773 - DNA, 25 bp, Homo sapien
tatgaggaagcaaatcgcgtccgcc

SEQ ID NO: 262774 - DNA, 25 bp, Homo sapien
aggaaactccgcgactctcagcccc

SEQ ID NO: 262775 - DNA, 25 bp, Homo sapien
ttcatggctccgtctaccggcttcg

SEQ ID NO: 262776 - DNA, 25 bp, Homo sapien
tcttcttcatggctccgtctaccgg

SEQ ID NO: 262777 - DNA, 25 bp, Homo sapien
ttcttcatggctccgtctaccggct

SEQ ID NO: 262778 - DNA, 25 bp, Homo sapien
tggctccgtctaccggcttcggaga

SEQ ID NO: 262779 - DNA, 25 bp, Homo sapien
aggaggcgtggtccgcactctcact

SEQ ID NO: 262780 - DNA, 25 bp, Homo sapien
gtggtccgcactctcactcccggcg

SEQ ID NO: 262781 - DNA, 25 bp, Homo sapien
gcgtggtccgcactctcactcccgg

SEQ ID NO: 262782 - DNA, 25 bp, Homo sapien
tgggaggaggcgtggtccgcactct

SEQ ID NO: 262783 - DNA, 25 bp, Homo sapien
ggcagctctgcggagcctgtcgaac

SEQ ID NO: 262784 - DNA, 25 bp, Homo sapien
catcgtctctgtccggtgtcggccg

SEQ ID NO: 262785 - DNA, 25 bp, Homo sapien
gcagagaaaggatccgccgcatcgt

SEQ ID NO: 262786 - DNA, 25 bp, Homo sapien
cacgccactcttcggcagagaaagg

SEQ ID NO: 262787 - DNA, 25 bp, Homo sapien
accagaatcaaagagttcatcatct

SEQ ID NO: 262788 - DNA, 25 bp, Homo sapien
agttcatcatctattgaaagccatg

SEQ ID NO: 262789 - DNA, 25 bp, Homo sapien
accagaactctgttcgttggacagc

SEQ ID NO: 262790 - DNA, 25 bp, Homo sapien
tcaccagaactctgttcgttggaca

SEQ ID NO: 262791 - DNA, 25 bp, Homo sapien
cagttaagtgactatcatatttctg

SEQ ID NO: 262792 - DNA, 25 bp, Homo sapien
ccatcatcagctccagttaagtgac

SEQ ID NO: 262793 - DNA, 25 bp, Homo sapien
tcctctttgaccatcatcagctcca

SEQ ID NO: 262794 - DNA, 25 bp, Homo sapien
tctgtggaacattctcaaaggtagt

SEQ ID NO: 262795 - DNA, 25 bp, Homo sapien
cttccaatgatgatttctgtttctt

SEQ ID NO: 262796 - DNA, 25 bp, Homo sapien
tcatttagcagtagtatcttccaat

SEQ ID NO: 262797 - DNA, 25 bp, Homo sapien
agcagtagtatcttccaatgatgat

SEQ ID NO: 262798 - DNA, 25 bp, Homo sapien
tagtatcttccaatgatgatttctg

SEQ ID NO: 262799 - DNA, 25 bp, Homo sapien
caagtgatgatattgctgaagagaa

SEQ ID NO: 262800 - DNA, 25 bp, Homo sapien
cttcaagtgatgatattgctgaaga

SEQ ID NO: 262801 - DNA, 25 bp, Homo sapien
tcaagtgatgatattgctgaagaga

SEQ ID NO: 262802 - DNA, 25 bp, Homo sapien
aagtgatgatattgctgaagagaat

SEQ ID NO: 262803 - DNA, 25 bp, Homo sapien
gcctggttcgaaacacactctttca

SEQ ID NO: 262804 - DNA, 25 bp, Homo sapien
tgtacatctttcattccgactgcct

SEQ ID NO: 262805 - DNA, 25 bp, Homo sapien
ccgactgcctggttcgaaacacact

SEQ ID NO: 262806 - DNA, 25 bp, Homo sapien
gatgtgcatgcttgtacatctttca

SEQ ID NO: 262807 - DNA, 25 bp, Homo sapien
ggatcccaacacagtgttggtcatt

SEQ ID NO: 262808 - DNA, 25 bp, Homo sapien
acaaatggacatagatcaccaactt

SEQ ID NO: 262809 - DNA, 25 bp, Homo sapien
ctgtggatcccaacacagtgttggt

SEQ ID NO: 262810 - DNA, 25 bp, Homo sapien
caaatggacatagatcaccaacttt

SEQ ID NO: 262811 - DNA, 25 bp, Homo sapien
acacaggtcacggagagtgtgattc

SEQ ID NO: 262812 - DNA, 25 bp, Homo sapien
caggtcacggagagtgtgattccaa

SEQ ID NO: 262813 - DNA, 25 bp, Homo sapien
cacaggtcacggagagtgtgattcc

SEQ ID NO: 262814 - DNA, 25 bp, Homo sapien
gtcacggagagtgtgattccaaaat

SEQ ID NO: 262815 - DNA, 25 bp, Homo sapien
tcctatgtttattgcttcatgggga

SEQ ID NO: 262816 - DNA, 25 bp, Homo sapien
gtttattgcttcatggggacccaca

SEQ ID NO: 262817 - DNA, 25 bp, Homo sapien
ttcatggggacccacatcacccatt

SEQ ID NO: 262818 - DNA, 25 bp, Homo sapien
ttgcttcatggggacccacatcacc

SEQ ID NO: 262819 - DNA, 25 bp, Homo sapien
gccctggaagtcgaggtttcaggga

SEQ ID NO: 262820 - DNA, 25 bp, Homo sapien
cctggaagtcgaggtttcagggagc

SEQ ID NO: 262821 - DNA, 25 bp, Homo sapien
gagccctggaagtcgaggtttcagg

SEQ ID NO: 262822 - DNA, 25 bp, Homo sapien
gctacttggtaagatggaaggatct

SEQ ID NO: 262823 - DNA, 25 bp, Homo sapien
ctttttctctttaatagaatgtaat

SEQ ID NO: 262824 - DNA, 25 bp, Homo sapien
tctttttctctttaatagaatgtaa

SEQ ID NO: 262825 - DNA, 25 bp, Homo sapien
aatagaatgtaattttacaatggtg

SEQ ID NO: 262826 - DNA, 25 bp, Homo sapien
atgtaattttacaatggtgggtttg

SEQ ID NO: 262827 - DNA, 25 bp, Homo sapien
agttcccatatttgcggctccttct

SEQ ID NO: 262828 - DNA, 25 bp, Homo sapien
ccatatttgcggctccttctggtcc

SEQ ID NO: 262829 - DNA, 25 bp, Homo sapien
tggaggaggaccttggttaccagca

SEQ ID NO: 262830 - DNA, 25 bp, Homo sapien
aggtatagttgctctgttgttcata

SEQ ID NO: 262831 - DNA, 25 bp, Homo sapien
taatcaaaataatgtttatgataca

SEQ ID NO: 262832 - DNA, 25 bp, Homo sapien
ttactgaatataatcaaaataatgt

SEQ ID NO: 262833 - DNA, 25 bp, Homo sapien
tactgaatataatcaaaataatgtt

SEQ ID NO: 262834 - DNA, 25 bp, Homo sapien
caaaataatgtttatgatacattac

SEQ ID NO: 262835 - DNA, 25 bp, Homo sapien
ctctggcaccatctaaagtgtcttc

SEQ ID NO: 262836 - DNA, 25 bp, Homo sapien
caataagtcgcaggccaaatcctca

SEQ ID NO: 262837 - DNA, 25 bp, Homo sapien
tgcaataagtcgcaggccaaatcct

SEQ ID NO: 262838 - DNA, 25 bp, Homo sapien
aactctggcaccatctaaagtgtct

SEQ ID NO: 262839 - DNA, 25 bp, Homo sapien
atttcaggtctggataagactcttc

SEQ ID NO: 262840 - DNA, 25 bp, Homo sapien
gatttcaggtctggataagactctt

SEQ ID NO: 262841 - DNA, 25 bp, Homo sapien
gggatttcaggtctggataagactc

SEQ ID NO: 262842 - DNA, 25 bp, Homo sapien
ggatttcaggtctggataagactct

SEQ ID NO: 262843 - DNA, 25 bp, Homo sapien
aggggctggtgccttgaggacttac

SEQ ID NO: 262844 - DNA, 25 bp, Homo sapien
agtaggggctggtgccttgaggact

SEQ ID NO: 262845 - DNA, 25 bp, Homo sapien
tcaatctgtgtggagaagtaggggc

SEQ ID NO: 262846 - DNA, 25 bp, Homo sapien
gagaagtaggggctggtgccttgag

SEQ ID NO: 262847 - DNA, 25 bp, Homo sapien
ggcaacagccagctcttacccatgg

SEQ ID NO: 262848 - DNA, 25 bp, Homo sapien
aggatcaagtacacagccagcagca

SEQ ID NO: 262849 - DNA, 25 bp, Homo sapien
ggcagaagtgcattagggctacaga

SEQ ID NO: 262850 - DNA, 25 bp, Homo sapien
gaaggacccacacaagaattctagc

SEQ ID NO: 262851 - DNA, 25 bp, Homo sapien
caggacagcattcgactgatagaag

SEQ ID NO: 262852 - DNA, 25 bp, Homo sapien
tccaagatggcagattacaggcttt

SEQ ID NO: 262853 - DNA, 25 bp, Homo sapien
gatcttgcggaggacattgcaggca

SEQ ID NO: 262854 - DNA, 25 bp, Homo sapien
tatgaaggacatcccagatcttgcg

SEQ ID NO: 262855 - DNA, 25 bp, Homo sapien
tatttcggaggcaataaggaaggca

SEQ ID NO: 262856 - DNA, 25 bp, Homo sapien
tcggaggcaataaggaaggcacaaa

SEQ ID NO: 262857 - DNA, 25 bp, Homo sapien
ctgcagttaaaaatatttcggaggc

SEQ ID NO: 262858 - DNA, 25 bp, Homo sapien
aaggaaggcacaaatcatagttccg

SEQ ID NO: 262859 - DNA, 25 bp, Homo sapien
tgcaaaaaagggtacaatccaacca

SEQ ID NO: 262860 - DNA, 25 bp, Homo sapien
gtttctagtccctgaaatttactgc

SEQ ID NO: 262861 - DNA, 25 bp, Homo sapien
actgctgtgcgttttatctgttcgc

SEQ ID NO: 262862 - DNA, 25 bp, Homo sapien
gaaatttactgctgtgcgttttatc

SEQ ID NO: 262863 - DNA, 25 bp, Homo sapien
tagtccctgaaatttactgctgtgc

SEQ ID NO: 262864 - DNA, 25 bp, Homo sapien
agagggcactctgtcctgaggtctt

SEQ ID NO: 262865 - DNA, 25 bp, Homo sapien
actctgtcctgaggtcttgccaaca

SEQ ID NO: 262866 - DNA, 25 bp, Homo sapien
gataggctcaagaaagtccttaact

SEQ ID NO: 262867 - DNA, 25 bp, Homo sapien
ataggctcaagaaagtccttaactt

SEQ ID NO: 262868 - DNA, 25 bp, Homo sapien
agataggctcaagaaagtccttaac

SEQ ID NO: 262869 - DNA, 25 bp, Homo sapien
caaaactcataggttcacagactgt

SEQ ID NO: 262870 - DNA, 25 bp, Homo sapien
aaactcataggttcacagactgttc

SEQ ID NO: 262871 - DNA, 25 bp, Homo sapien
acaaaactcataggttcacagactg

SEQ ID NO: 262872 - DNA, 25 bp, Homo sapien
aaacaaaactcataggttcacagac

SEQ ID NO: 262873 - DNA, 25 bp, Homo sapien
ttgttcctgatgctagaattcttca

SEQ ID NO: 262874 - DNA, 25 bp, Homo sapien
tcctgatgctagaattcttcacttt

SEQ ID NO: 262875 - DNA, 25 bp, Homo sapien
cttgttcctgatgctagaattcttc

SEQ ID NO: 262876 - DNA, 25 bp, Homo sapien
ctggatgccattatataactggaca

SEQ ID NO: 262877 - DNA, 25 bp, Homo sapien
aaagagtatccgtcttggagggaga

SEQ ID NO: 262878 - DNA, 25 bp, Homo sapien
ataaagagtatccgtcttggaggga

SEQ ID NO: 262879 - DNA, 25 bp, Homo sapien
taaagagtatccgtcttggagggag

SEQ ID NO: 262880 - DNA, 25 bp, Homo sapien
agagtatccgtcttggagggagatt

SEQ ID NO: 262881 - DNA, 25 bp, Homo sapien
ggcttgagggcacatgggtcctcct

SEQ ID NO: 262882 - DNA, 25 bp, Homo sapien
gcaaactctgaactagaggtggttc

SEQ ID NO: 262883 - DNA, 25 bp, Homo sapien
tggttctgagaaataagcaggcttg

SEQ ID NO: 262884 - DNA, 25 bp, Homo sapien
caaggcaaactctgaactagaggtg

SEQ ID NO: 262885 - DNA, 25 bp, Homo sapien
tttggaattttagatcacatacatc

SEQ ID NO: 262886 - DNA, 25 bp, Homo sapien
tggaattttagatcacatacatcgc

SEQ ID NO: 262887 - DNA, 25 bp, Homo sapien
actatttggaattttagatcacata

SEQ ID NO: 262888 - DNA, 25 bp, Homo sapien
cattactatttggaattttagatca

SEQ ID NO: 262889 - DNA, 25 bp, Homo sapien
aacaatttcctaatgaagtactgga

SEQ ID NO: 262890 - DNA, 25 bp, Homo sapien
caatttcctaatgaagtactggaaa

SEQ ID NO: 262891 - DNA, 25 bp, Homo sapien
acaatttcctaatgaagtactggaa

SEQ ID NO: 262892 - DNA, 25 bp, Homo sapien
cgtacagagatggactgtcatatac

SEQ ID NO: 262893 - DNA, 25 bp, Homo sapien
tcatatacattagttaatacaccag

SEQ ID NO: 262894 - DNA, 25 bp, Homo sapien
tcacatcatcgtacagagatggact

SEQ ID NO: 262895 - DNA, 25 bp, Homo sapien
taatacaccagctgtttcaatgtca

SEQ ID NO: 262896 - DNA, 25 bp, Homo sapien
taaaggcttccactctcaggtccct

SEQ ID NO: 262897 - DNA, 25 bp, Homo sapien
tctccatgtgactgatcccgatatc

SEQ ID NO: 262898 - DNA, 25 bp, Homo sapien
cacagtagagactcatggctgcttg

SEQ ID NO: 262899 - DNA, 25 bp, Homo sapien
ccctggtgaccactttattatggga

SEQ ID NO: 262900 - DNA, 25 bp, Homo sapien
gcagggaccacgtggatatatcagt

SEQ ID NO: 262901 - DNA, 25 bp, Homo sapien
tgaataaaagatgtgttgaaccaga

SEQ ID NO: 262902 - DNA, 25 bp, Homo sapien
tgaacaattgtcatagtatttagga

SEQ ID NO: 262903 - DNA, 25 bp, Homo sapien
agaaaaatgaacaattgtcatagta

SEQ ID NO: 262904 - DNA, 25 bp, Homo sapien
acaattgtcatagtatttaggaaga

SEQ ID NO: 262905 - DNA, 25 bp, Homo sapien
tcagtaacacatgctgactctctta

SEQ ID NO: 262906 - DNA, 25 bp, Homo sapien
tacccacgttagttagagctggaag

SEQ ID NO: 262907 - DNA, 25 bp, Homo sapien
tattggggctcaccgaaaagccacg

SEQ ID NO: 262908 - DNA, 25 bp, Homo sapien
cagttggatacccacgttagttaga

SEQ ID NO: 262909 - DNA, 25 bp, Homo sapien
tttatattggggctcaccgaaaagc

SEQ ID NO: 262910 - DNA, 25 bp, Homo sapien
tatctccacggcaaattctggtgga

SEQ ID NO: 262911 - DNA, 25 bp, Homo sapien
tggtggataaattttccatgctttt

SEQ ID NO: 262912 - DNA, 25 bp, Homo sapien
tcatttctcgccaaaaagtatctcc

SEQ ID NO: 262913 - DNA, 25 bp, Homo sapien
ttgttgatgtggattatccaattca

SEQ ID NO: 262914 - DNA, 25 bp, Homo sapien
taggacatatgaacatgcacatggc

SEQ ID NO: 262915 - DNA, 25 bp, Homo sapien
aggacatatgaacatgcacatggca

SEQ ID NO: 262916 - DNA, 25 bp, Homo sapien
gacttaggacatatgaacatgcaca

SEQ ID NO: 262917 - DNA, 25 bp, Homo sapien
cttaggacatatgaacatgcacatg

SEQ ID NO: 262918 - DNA, 25 bp, Homo sapien
agagatgagccgggtggaggaggag

SEQ ID NO: 262919 - DNA, 25 bp, Homo sapien
aagagatgagccgggtggaggagga

SEQ ID NO: 262920 - DNA, 25 bp, Homo sapien
tgagacctaagcacatttgctgggc

SEQ ID NO: 262921 - DNA, 25 bp, Homo sapien
cctgagcagtcgatgagaactcctc

SEQ ID NO: 262922 - DNA, 25 bp, Homo sapien
tccacagtgtcttctatctgccatg

SEQ ID NO: 262923 - DNA, 25 bp, Homo sapien
gctgggcttacagcaaatgtgcagc

SEQ ID NO: 262924 - DNA, 25 bp, Homo sapien
tgggtcgcctgcctcccgtgggtta

SEQ ID NO: 262925 - DNA, 25 bp, Homo sapien
tctgggccggtggactctcgtcacc

SEQ ID NO: 262926 - DNA, 25 bp, Homo sapien
tcctgctactcacaagggaagacac

SEQ ID NO: 262927 - DNA, 25 bp, Homo sapien
cagcagcatccggtgtgactcagtg

SEQ ID NO: 262928 - DNA, 25 bp, Homo sapien
tggccatgttcttcgtggagaaggc

SEQ ID NO: 262929 - DNA, 25 bp, Homo sapien
tgtgtgagacacatcgaggttaaca

SEQ ID NO: 262930 - DNA, 25 bp, Homo sapien
tgagacacatcgaggttaacaaccc

SEQ ID NO: 262931 - DNA, 25 bp, Homo sapien
gacacatcgaggttaacaacccaca

SEQ ID NO: 262932 - DNA, 25 bp, Homo sapien
catcgaggttaacaacccacacatc

SEQ ID NO: 262933 - DNA, 25 bp, Homo sapien
gaagcaaaacgtgtgcatctaatac

SEQ ID NO: 262934 - DNA, 25 bp, Homo sapien
ttccgctgtctgtcctattcttcca

SEQ ID NO: 262935 - DNA, 25 bp, Homo sapien
tactgaattccgctgtctgtcctat

SEQ ID NO: 262936 - DNA, 25 bp, Homo sapien
ccgctgtctgtcctattcttccatg

SEQ ID NO: 262937 - DNA, 25 bp, Homo sapien
tgaattccgctgtctgtcctattct

SEQ ID NO: 262938 - DNA, 25 bp, Homo sapien
ccactgccccgatttcagaccccat

SEQ ID NO: 262939 - DNA, 25 bp, Homo sapien
ccacccgttcagctgctcagctgtg

SEQ ID NO: 262940 - DNA, 25 bp, Homo sapien
ggctcaacgcccttccttgggagat

SEQ ID NO: 262941 - DNA, 25 bp, Homo sapien
caaggacttacttgccactccctgg

SEQ ID NO: 262942 - DNA, 25 bp, Homo sapien
tctcaggccccctgaggtcccgctc

SEQ ID NO: 262943 - DNA, 25 bp, Homo sapien
ctcaggccccctgaggtcccgctca

SEQ ID NO: 262944 - DNA, 25 bp, Homo sapien
tcaggccccctgaggtcccgctcac

SEQ ID NO: 262945 - DNA, 25 bp, Homo sapien
ggctggcctgtaaccgacaactttg

SEQ ID NO: 262946 - DNA, 25 bp, Homo sapien
tgctccccagttgttggatgcctga

SEQ ID NO: 262947 - DNA, 25 bp, Homo sapien
tagagaaccaggctgacacagagtg

SEQ ID NO: 262948 - DNA, 25 bp, Homo sapien
gaactacccgctctttagagaacca

SEQ ID NO: 262949 - DNA, 25 bp, Homo sapien
tttttgaagccggtccagctccacc

SEQ ID NO: 262950 - DNA, 25 bp, Homo sapien
cagctccacctgcaagggtgaggcc

SEQ ID NO: 262951 - DNA, 25 bp, Homo sapien
caagggtgaggcctcccgggcttgg

SEQ ID NO: 262952 - DNA, 25 bp, Homo sapien
cacctgcaagggtgaggcctcccgg

SEQ ID NO: 262953 - DNA, 25 bp, Homo sapien
aaaccagtctggcagcctaaaggct

SEQ ID NO: 262954 - DNA, 25 bp, Homo sapien
gcttaataccaagggtaatgtggcc

SEQ ID NO: 262955 - DNA, 25 bp, Homo sapien
aaggctattggttcaggcttcggcc

SEQ ID NO: 262956 - DNA, 25 bp, Homo sapien
ccagtgaggacgtgcgctttgctaa

SEQ ID NO: 262957 - DNA, 25 bp, Homo sapien
cgagcaggctcttcggtggctatgt

SEQ ID NO: 262958 - DNA, 25 bp, Homo sapien
gctcttcggtggctatgtctagctg

SEQ ID NO: 262959 - DNA, 25 bp, Homo sapien
ggtggctatgtctagctgtctctgc

SEQ ID NO: 262960 - DNA, 25 bp, Homo sapien
tacgggcgagcaggctcttcggtgg

SEQ ID NO: 262961 - DNA, 25 bp, Homo sapien
caggaatgccctactgtgctgagtt

SEQ ID NO: 262962 - DNA, 25 bp, Homo sapien
tggcccccacaggaatgccctactg

SEQ ID NO: 262963 - DNA, 25 bp, Homo sapien
ccccacaggaatgccctactgtgct

SEQ ID NO: 262964 - DNA, 25 bp, Homo sapien
tgccctactgtgctgagtttttgtt

SEQ ID NO: 262965 - DNA, 25 bp, Homo sapien
cgtatgcatgtgaccctcatctcag

SEQ ID NO: 262966 - DNA, 25 bp, Homo sapien
tcagaattggccccgattgtcatgc

SEQ ID NO: 262967 - DNA, 25 bp, Homo sapien
aattggccccgattgtcatgcaata

SEQ ID NO: 262968 - DNA, 25 bp, Homo sapien
tggccccgattgtcatgcaataccc

SEQ ID NO: 262969 - DNA, 25 bp, Homo sapien
agaattggccccgattgtcatgcaa

SEQ ID NO: 262970 - DNA, 25 bp, Homo sapien
gctcgggaaggaggctcacgccagg

SEQ ID NO: 262971 - DNA, 25 bp, Homo sapien
cccgaaggataccagcgagctgagg

SEQ ID NO: 262972 - DNA, 25 bp, Homo sapien
ggcgcaggcagatggcgctcgggaa

SEQ ID NO: 262973 - DNA, 25 bp, Homo sapien
gagggaagtccgctctgtgtgcccc

SEQ ID NO: 262974 - DNA, 25 bp, Homo sapien
agtgtgctttgcagggcaagactct

SEQ ID NO: 262975 - DNA, 25 bp, Homo sapien
gggacagcacagcattgcccaagta

SEQ ID NO: 262976 - DNA, 25 bp, Homo sapien
tgaagtgtgctttgcagggcaagac

SEQ ID NO: 262977 - DNA, 25 bp, Homo sapien
cattgcccaagtagacgctgatcat

SEQ ID NO: 262978 - DNA, 25 bp, Homo sapien
ctgccagcacacagaccatccagcc

SEQ ID NO: 262979 - DNA, 25 bp, Homo sapien
ctgctgtttcttttgatagggtctc

SEQ ID NO: 262980 - DNA, 25 bp, Homo sapien
ctggttttcctccttgattcctgct

SEQ ID NO: 262981 - DNA, 25 bp, Homo sapien
agcacacagaccatccagcccttgt

SEQ ID NO: 262982 - DNA, 25 bp, Homo sapien
aactcaaagcttgcgtggttcctga

SEQ ID NO: 262983 - DNA, 25 bp, Homo sapien
ggttcctgaccagatgttttgtgca

SEQ ID NO: 262984 - DNA, 25 bp, Homo sapien
tgggaaccttcggattggctctgaa

SEQ ID NO: 262985 - DNA, 25 bp, Homo sapien
catgactccagctcggcactctggg

SEQ ID NO: 262986 - DNA, 25 bp, Homo sapien
cttgtcaatgattctgcaactgtgt

SEQ ID NO: 262987 - DNA, 25 bp, Homo sapien
tgtcaatgattctgcaactgtgtgc

SEQ ID NO: 262988 - DNA, 25 bp, Homo sapien
tcaatgattctgcaactgtgtgcca

SEQ ID NO: 262989 - DNA, 25 bp, Homo sapien
caatgattctgcaactgtgtgccat

SEQ ID NO: 262990 - DNA, 25 bp, Homo sapien
ttccaggcgagagaagcacggagta

SEQ ID NO: 262991 - DNA, 25 bp, Homo sapien
gggctctgctttcgactcacttgag

SEQ ID NO: 262992 - DNA, 25 bp, Homo sapien
ctctgctttcgactcacttgagagg

SEQ ID NO: 262993 - DNA, 25 bp, Homo sapien
tgacagtgagttccaggcgagagaa

SEQ ID NO: 262994 - DNA, 25 bp, Homo sapien
ccttgtggtttgctctgaagccggc

SEQ ID NO: 262995 - DNA, 25 bp, Homo sapien
cttgtggtttgctctgaagccggct

SEQ ID NO: 262996 - DNA, 25 bp, Homo sapien
agccggcttcctcacgttggagtga

SEQ ID NO: 262997 - DNA, 25 bp, Homo sapien
gtggtttgctctgaagccggcttcc

SEQ ID NO: 262998 - DNA, 25 bp, Homo sapien
gaagctagtgatgaacggccagatg

SEQ ID NO: 262999 - DNA, 25 bp, Homo sapien
gctagtgatgaacggccagatgtta

SEQ ID NO: 263000 - DNA, 25 bp, Homo sapien
gaagaagctagtgatgaacggccag

SEQ ID NO: 263001 - DNA, 25 bp, Homo sapien
gccagatgttatcaggagactgctc

SEQ ID NO: 263002 - DNA, 25 bp, Homo sapien
agtggcaacataggggcatctttct

SEQ ID NO: 263003 - DNA, 25 bp, Homo sapien
tatccagtcagcacgactggctgtg

SEQ ID NO: 263004 - DNA, 25 bp, Homo sapien
ctgtatccagtcagcacgactggct

SEQ ID NO: 263005 - DNA, 25 bp, Homo sapien
tcctctcccgacgagaggagggccg

SEQ ID NO: 263006 - DNA, 25 bp, Homo sapien
tgtgactcggccagtgttcctctcc

SEQ ID NO: 263007 - DNA, 25 bp, Homo sapien
tcacccacaatgttctgagcaatgt

SEQ ID NO: 263008 - DNA, 25 bp, Homo sapien
gacacgttcggtcccagggccatca

SEQ ID NO: 263009 - DNA, 25 bp, Homo sapien
cctgatcccacccagtgcaaatggc

SEQ ID NO: 263010 - DNA, 25 bp, Homo sapien
ttctcctgagacacgttcggtccca

SEQ ID NO: 263011 - DNA, 25 bp, Homo sapien
ggtggcaccagccttaaatgccgcc

SEQ ID NO: 263012 - DNA, 25 bp, Homo sapien
cgggtccggcatccaggtgagtaca

SEQ ID NO: 263013 - DNA, 25 bp, Homo sapien
cttccctttagtagccgaacgccag

SEQ ID NO: 263014 - DNA, 25 bp, Homo sapien
tgagtacagccctggttccgctggg

SEQ ID NO: 263015 - DNA, 25 bp, Homo sapien
accgcagcggcggagcgcacggtgg

SEQ ID NO: 263016 - DNA, 25 bp, Homo sapien
gcgtggagcgcggatccgggaccgc

SEQ ID NO: 263017 - DNA, 25 bp, Homo sapien
gcgggccctgcacgcacctccgcgg

SEQ ID NO: 263018 - DNA, 25 bp, Homo sapien
gcggtggagataccggcggcggcgc

SEQ ID NO: 263019 - DNA, 25 bp, Homo sapien
cgtctcgcatcctcggccggcgcgg

SEQ ID NO: 263020 - DNA, 25 bp, Homo sapien
tcctcttcgccttttcctcgcttcc

SEQ ID NO: 263021 - DNA, 25 bp, Homo sapien
ttcccgtcagcctgctccggtcccc

SEQ ID NO: 263022 - DNA, 25 bp, Homo sapien
ttggcccagcgtctcgcatcctcgg

SEQ ID NO: 263023 - DNA, 25 bp, Homo sapien
gggagtcagagaagcggtgcccagg

SEQ ID NO: 263024 - DNA, 25 bp, Homo sapien
tcagagaagcggtgcccaggccggg

SEQ ID NO: 263025 - DNA, 25 bp, Homo sapien
gccggggggcgctcagaggaaaggc

SEQ ID NO: 263026 - DNA, 25 bp, Homo sapien
cagaggaaaggcggcctccccttgc

SEQ ID NO: 263027 - DNA, 25 bp, Homo sapien
caaatggggtttccgaagaggtgct

SEQ ID NO: 263028 - DNA, 25 bp, Homo sapien
gggtttccgaagaggtgctgagcgc

SEQ ID NO: 263029 - DNA, 25 bp, Homo sapien
ttccgaagaggtgctgagcgcccct

SEQ ID NO: 263030 - DNA, 25 bp, Homo sapien
aagcccaggtgcaatattggcccca

SEQ ID NO: 263031 - DNA, 25 bp, Homo sapien
ttttgagttccaggcagttgttctt

SEQ ID NO: 263032 - DNA, 25 bp, Homo sapien
tctgttttcacgatgtccttagttc

SEQ ID NO: 263033 - DNA, 25 bp, Homo sapien
gagttccaggcagttgttcttcaga

SEQ ID NO: 263034 - DNA, 25 bp, Homo sapien
atgtccttagttccgctgagctcca

SEQ ID NO: 263035 - DNA, 25 bp, Homo sapien
cccaagctttgaccagccatggaag

SEQ ID NO: 263036 - DNA, 25 bp, Homo sapien
gaacagagtgaattagataattcca

SEQ ID NO: 263037 - DNA, 25 bp, Homo sapien
taattccaaaagactcaagccccaa

SEQ ID NO: 263038 - DNA, 25 bp, Homo sapien
gactcaagccccaagctttgaccag

SEQ ID NO: 263039 - DNA, 25 bp, Homo sapien
cataatgatgtctgtgccatatttc

SEQ ID NO: 263040 - DNA, 25 bp, Homo sapien
taatgatgtctgtgccatatttctc

SEQ ID NO: 263041 - DNA, 25 bp, Homo sapien
aatgatgtctgtgccatatttctct

SEQ ID NO: 263042 - DNA, 25 bp, Homo sapien
ataatgatgtctgtgccatatttct

SEQ ID NO: 263043 - DNA, 25 bp, Homo sapien
gaataactgtggaacatttcctcag

SEQ ID NO: 263044 - DNA, 25 bp, Homo sapien
gacaggccagtcttggtcatttttg

SEQ ID NO: 263045 - DNA, 25 bp, Homo sapien
tttgtgttctctcccgggtctcatg

SEQ ID NO: 263046 - DNA, 25 bp, Homo sapien
gaatggctagattcaggctcaccac

SEQ ID NO: 263047 - DNA, 25 bp, Homo sapien
acgatctcaggcgtctgcttgggag

SEQ ID NO: 263048 - DNA, 25 bp, Homo sapien
ggagtactgaatcccatatgcaatc

SEQ ID NO: 263049 - DNA, 25 bp, Homo sapien
aatccaacagagaaaggcgcccacc

SEQ ID NO: 263050 - DNA, 25 bp, Homo sapien
ttgttcagggatgcagacttgtcgc

SEQ ID NO: 263051 - DNA, 25 bp, Homo sapien
ggctctgccagcaaaaccaggaggg

SEQ ID NO: 263052 - DNA, 25 bp, Homo sapien
agatccccgttaaaatgaccaccag

SEQ ID NO: 263053 - DNA, 25 bp, Homo sapien
tgagggatcatcttattgaagctgg

SEQ ID NO: 263054 - DNA, 25 bp, Homo sapien
gctttttgcctcttggtaataagca

SEQ ID NO: 263055 - DNA, 25 bp, Homo sapien
tcttggtaataagcaaagatccccg

SEQ ID NO: 263056 - DNA, 25 bp, Homo sapien
tcggaatctcggatgacgagagctt

SEQ ID NO: 263057 - DNA, 25 bp, Homo sapien
atgtctgcagggatctggtctcctc

SEQ ID NO: 263058 - DNA, 25 bp, Homo sapien
tgaagggatggtcttcttctcggaa

SEQ ID NO: 263059 - DNA, 25 bp, Homo sapien
gtcttcttctcggaatctcggatga

SEQ ID NO: 263060 - DNA, 25 bp, Homo sapien
tcccccgtgagagatgagttatcca

SEQ ID NO: 263061 - DNA, 25 bp, Homo sapien
ggctcagactcccccgtgagagatg

SEQ ID NO: 263062 - DNA, 25 bp, Homo sapien
cttccagacacgttgtggaatagaa

SEQ ID NO: 263063 - DNA, 25 bp, Homo sapien
ttccagacacgttgtggaatagaag

SEQ ID NO: 263064 - DNA, 25 bp, Homo sapien
gggtgtgcagccagcttgcagccct

SEQ ID NO: 263065 - DNA, 25 bp, Homo sapien
caaggccaagcatcgtcctctaggc

SEQ ID NO: 263066 - DNA, 25 bp, Homo sapien
gataggcacaccacattcccaaggc

SEQ ID NO: 263067 - DNA, 25 bp, Homo sapien
tctctgggggctggcacaatcgata

SEQ ID NO: 263068 - DNA, 25 bp, Homo sapien
gaaaaggatgccgatggagacagcc

SEQ ID NO: 263069 - DNA, 25 bp, Homo sapien
ccaatgaggcaatatggccaatgat

SEQ ID NO: 263070 - DNA, 25 bp, Homo sapien
cgtgttgataaccatgccggtgaca

SEQ ID NO: 263071 - DNA, 25 bp, Homo sapien
ctcgatctcaatggcaatgggcgtc

SEQ ID NO: 263072 - DNA, 25 bp, Homo sapien
cgttttgctgtcagcgacagggtca

SEQ ID NO: 263073 - DNA, 25 bp, Homo sapien
ttgtcgaaccacagatgggccactg

SEQ ID NO: 263074 - DNA, 25 bp, Homo sapien
tcttcttggccatccgttttgctgt

SEQ ID NO: 263075 - DNA, 25 bp, Homo sapien
tgatggaggtggagccgagggtctc

SEQ ID NO: 263076 - DNA, 25 bp, Homo sapien
tctgctcggttacacaatgttatta

SEQ ID NO: 263077 - DNA, 25 bp, Homo sapien
caatgttattatcttggataaggag

SEQ ID NO: 263078 - DNA, 25 bp, Homo sapien
caagtcctagagctttggtcaaaga

SEQ ID NO: 263079 - DNA, 25 bp, Homo sapien
tgtcctggcttgaactctgctcggt

SEQ ID NO: 263080 - DNA, 25 bp, Homo sapien
agtagagttaaaagggatttcagct

SEQ ID NO: 263081 - DNA, 25 bp, Homo sapien
catcacatcacccaaaatgacctct

SEQ ID NO: 263082 - DNA, 25 bp, Homo sapien
atttcagctactttgcggtttcttt

SEQ ID NO: 263083 - DNA, 25 bp, Homo sapien
agagttaaaagggatttcagctact

SEQ ID NO: 263084 - DNA, 25 bp, Homo sapien
tgatggctgactgtcggccagccct

SEQ ID NO: 263085 - DNA, 25 bp, Homo sapien
agcccaagtccagatccagtgtggg

SEQ ID NO: 263086 - DNA, 25 bp, Homo sapien
cccaagtccagatccagtgtgggct

SEQ ID NO: 263087 - DNA, 25 bp, Homo sapien
aaagcccaagtccagatccagtgtg

SEQ ID NO: 263088 - DNA, 25 bp, Homo sapien
caagtccagatccagtgtgggctct

SEQ ID NO: 263089 - DNA, 25 bp, Homo sapien
tgctgatggaggcatcatctaaccc

SEQ ID NO: 263090 - DNA, 25 bp, Homo sapien
ctgatggaggcatcatctaacccca

SEQ ID NO: 263091 - DNA, 25 bp, Homo sapien
gctgatggaggcatcatctaacccc

SEQ ID NO: 263092 - DNA, 25 bp, Homo sapien
ccgttgatcatgatggtgctgcatt

SEQ ID NO: 263093 - DNA, 25 bp, Homo sapien
ttcatcaccatgaggaagcgcttgc

SEQ ID NO: 263094 - DNA, 25 bp, Homo sapien
gcatttctctaggatgcgctcaggg

SEQ ID NO: 263095 - DNA, 25 bp, Homo sapien
tgctcctcgccgttgatcatgatgg

SEQ ID NO: 263096 - DNA, 25 bp, Homo sapien
gcttcctatggagatgtgcatctct

SEQ ID NO: 263097 - DNA, 25 bp, Homo sapien
atgaagtctcttgccctgatctctc

SEQ ID NO: 263098 - DNA, 25 bp, Homo sapien
agggcagctgcttcctatggagatg

SEQ ID NO: 263099 - DNA, 25 bp, Homo sapien
aattcccatcccttttgcctgagca

SEQ ID NO: 263100 - DNA, 25 bp, Homo sapien
cattctgtggtcctgatggggcacc

SEQ ID NO: 263101 - DNA, 25 bp, Homo sapien
aggacacactgtcccctttgacaac

SEQ ID NO: 263102 - DNA, 25 bp, Homo sapien
agccctggtgctgacaacaggacac

SEQ ID NO: 263103 - DNA, 25 bp, Homo sapien
gcaccattccgccagccctggtgct

SEQ ID NO: 263104 - DNA, 25 bp, Homo sapien
gatccctgcactccggcatttggtg

SEQ ID NO: 263105 - DNA, 25 bp, Homo sapien
catttggtgactgcatctggcacgg

SEQ ID NO: 263106 - DNA, 25 bp, Homo sapien
gagtcccacaaaacagaggttggag

SEQ ID NO: 263107 - DNA, 25 bp, Homo sapien
gtttctggaaactcgtctgctggca

SEQ ID NO: 263108 - DNA, 25 bp, Homo sapien
ttcttgagtcaggaaaataactccc

SEQ ID NO: 263109 - DNA, 25 bp, Homo sapien
tcttgagtcaggaaaataactccca

SEQ ID NO: 263110 - DNA, 25 bp, Homo sapien
tagaaaggaacacgacataaagaaa

SEQ ID NO: 263111 - DNA, 25 bp, Homo sapien
cttcttgagtcaggaaaataactcc

SEQ ID NO: 263112 - DNA, 25 bp, Homo sapien
tgaggcgatgtgcaatgtcttccac

SEQ ID NO: 263113 - DNA, 25 bp, Homo sapien
tcactgttggctgaaatgatcccca

SEQ ID NO: 263114 - DNA, 25 bp, Homo sapien
cactcttggcaatagctttggctgt

SEQ ID NO: 263115 - DNA, 25 bp, Homo sapien
gggatgatcaccagtaaccataata

SEQ ID NO: 263116 - DNA, 25 bp, Homo sapien
ccaggtttataggaagaaatgtgcc

SEQ ID NO: 263117 - DNA, 25 bp, Homo sapien
tgctacaagcacagttccatccatg

SEQ ID NO: 263118 - DNA, 25 bp, Homo sapien
gaagttgaggttgcacaaagacact

SEQ ID NO: 263119 - DNA, 25 bp, Homo sapien
caaagacactatacgggccagcaaa

SEQ ID NO: 263120 - DNA, 25 bp, Homo sapien
gctaagatctcatccagctgttctg

SEQ ID NO: 263121 - DNA, 25 bp, Homo sapien
gacaatctcctggtagttggctaag

SEQ ID NO: 263122 - DNA, 25 bp, Homo sapien
gatgtccgggcaaagacaatctcct

SEQ ID NO: 263123 - DNA, 25 bp, Homo sapien
tgttctgagctcatgtccttcagct

SEQ ID NO: 263124 - DNA, 25 bp, Homo sapien
gagtcattaactccatccccggtca

SEQ ID NO: 263125 - DNA, 25 bp, Homo sapien
ttgtcgtccagcaagaccatgtcgg

SEQ ID NO: 263126 - DNA, 25 bp, Homo sapien
tgctatccccatggcaatcccaatg

SEQ ID NO: 263127 - DNA, 25 bp, Homo sapien
tctgccttctttagagccggagagt

SEQ ID NO: 263128 - DNA, 25 bp, Homo sapien
tgtctgtccccaagtcaatgaacag

SEQ ID NO: 263129 - DNA, 25 bp, Homo sapien
cagggggagcccgacaatgatgtag

SEQ ID NO: 263130 - DNA, 25 bp, Homo sapien
caatgatgtagatcagaaaggggca

SEQ ID NO: 263131 - DNA, 25 bp, Homo sapien
cccaagtcaatgaacagaatggtga

SEQ ID NO: 263132 - DNA, 25 bp, Homo sapien
gattatcactttagtcactgggccc

SEQ ID NO: 263133 - DNA, 25 bp, Homo sapien
caagaggtggctgtgagattatcac

SEQ ID NO: 263134 - DNA, 25 bp, Homo sapien
cataggctgaaactgaccaatggca

SEQ ID NO: 263135 - DNA, 25 bp, Homo sapien
gacattactgtagggcaaggcttta

SEQ ID NO: 263136 - DNA, 25 bp, Homo sapien
tctcgtacgccaaggcaatggaggg

SEQ ID NO: 263137 - DNA, 25 bp, Homo sapien
acagcgagcggctggttcaccagcc

SEQ ID NO: 263138 - DNA, 25 bp, Homo sapien
ccttattcttgtggcgaggcttcct

SEQ ID NO: 263139 - DNA, 25 bp, Homo sapien
caatgtgcaggtatgagtacacagc

SEQ ID NO: 263140 - DNA, 25 bp, Homo sapien
tgcatagacggtgaaatacacaagg

SEQ ID NO: 263141 - DNA, 25 bp, Homo sapien
cagaaagccctcttgtgcatagacg

SEQ ID NO: 263142 - DNA, 25 bp, Homo sapien
cattctacccgcaggttaatgagag

SEQ ID NO: 263143 - DNA, 25 bp, Homo sapien
cattcctgcccatagctgtctttca

SEQ ID NO: 263144 - DNA, 25 bp, Homo sapien
cattctaggtattccctctggtacc

SEQ ID NO: 263145 - DNA, 25 bp, Homo sapien
tagcccgtccattctaggtattccc

SEQ ID NO: 263146 - DNA, 25 bp, Homo sapien
ctaggatgccaacaaagaaagccgt

SEQ ID NO: 263147 - DNA, 25 bp, Homo sapien
aagaaagccgtgtagcccgtccatt

SEQ ID NO: 263148 - DNA, 25 bp, Homo sapien
tgggattcttgtggcttcatgatca

SEQ ID NO: 263149 - DNA, 25 bp, Homo sapien
tcatcatcatccttgcacggcaggc

SEQ ID NO: 263150 - DNA, 25 bp, Homo sapien
tgatcatacacccagcagaccatgc

SEQ ID NO: 263151 - DNA, 25 bp, Homo sapien
ggccagaactctgtcttgtgaaaaa

SEQ ID NO: 263152 - DNA, 25 bp, Homo sapien
gatctgtgaggtgatccccacccag

SEQ ID NO: 263153 - DNA, 25 bp, Homo sapien
aggctgtgacacttccgaggccata

SEQ ID NO: 263154 - DNA, 25 bp, Homo sapien
ccataggagaggatcagaccaatga

SEQ ID NO: 263155 - DNA, 25 bp, Homo sapien
ctaagcatggtgaaactcaaggctg

SEQ ID NO: 263156 - DNA, 25 bp, Homo sapien
ccagatcaggatggcgtgcggcaca

SEQ ID NO: 263157 - DNA, 25 bp, Homo sapien
gaagagcttccgcacctcatcatac

SEQ ID NO: 263158 - DNA, 25 bp, Homo sapien
acctcatcatacacccagatcagga

SEQ ID NO: 263159 - DNA, 25 bp, Homo sapien
tcatacacccagatcaggatggcgt

SEQ ID NO: 263160 - DNA, 25 bp, Homo sapien
aataatacatgttcttatcccacca

SEQ ID NO: 263161 - DNA, 25 bp, Homo sapien
taatacatgttcttatcccaccagc

SEQ ID NO: 263162 - DNA, 25 bp, Homo sapien
ttaataatacatgttcttatcccac

SEQ ID NO: 263163 - DNA, 25 bp, Homo sapien
ataatacatgttcttatcccaccag

SEQ ID NO: 263164 - DNA, 25 bp, Homo sapien
tgctgctgagagacataggaaggga

SEQ ID NO: 263165 - DNA, 25 bp, Homo sapien
aagtgtgccccaacgtgctgctgag

SEQ ID NO: 263166 - DNA, 25 bp, Homo sapien
gaagatgaacaagtgtgccccaacg

SEQ ID NO: 263167 - DNA, 25 bp, Homo sapien
ggaatagcccagcaaacggtcagaa

SEQ ID NO: 263168 - DNA, 25 bp, Homo sapien
tcagtgagcatcctgcatacagctt

SEQ ID NO: 263169 - DNA, 25 bp, Homo sapien
ctatataaagagttgaatttcagtt

SEQ ID NO: 263170 - DNA, 25 bp, Homo sapien
tgtctgaattttgacgatgtctgca

SEQ ID NO: 263171 - DNA, 25 bp, Homo sapien
cagctttctgcatgaaaatttcctc

SEQ ID NO: 263172 - DNA, 25 bp, Homo sapien
gaaagtccccttggattagctgagc

SEQ ID NO: 263173 - DNA, 25 bp, Homo sapien
gctgctgtgatgtaaacctgccgcc

SEQ ID NO: 263174 - DNA, 25 bp, Homo sapien
ctagctagagcttaaggcaggcccc

SEQ ID NO: 263175 - DNA, 25 bp, Homo sapien
caaaacgttattgctggagagcacc

SEQ ID NO: 263176 - DNA, 25 bp, Homo sapien
tgtagaacccttctctcgagtgctg

SEQ ID NO: 263177 - DNA, 25 bp, Homo sapien
acaggcgtccgaccaagaatcgagg

SEQ ID NO: 263178 - DNA, 25 bp, Homo sapien
tcaaatgagttagtgcgaggtgtgc

SEQ ID NO: 263179 - DNA, 25 bp, Homo sapien
gaatcgagggcacatcagaggccct

SEQ ID NO: 263180 - DNA, 25 bp, Homo sapien
cagctttgtgctaaattgatggcct

SEQ ID NO: 263181 - DNA, 25 bp, Homo sapien
accaagagctgccaagcattgcagc

SEQ ID NO: 263182 - DNA, 25 bp, Homo sapien
gcattgcagccatgagcactcaggc

SEQ ID NO: 263183 - DNA, 25 bp, Homo sapien
ttgcagctttgtgctaaattgatgg

SEQ ID NO: 263184 - DNA, 25 bp, Homo sapien
tatgtctctgagatactctaccaca

SEQ ID NO: 263185 - DNA, 25 bp, Homo sapien
caaaaacaccctctgaaatggattt

SEQ ID NO: 263186 - DNA, 25 bp, Homo sapien
taaaagacatctaggcttcagaggg

SEQ ID NO: 263187 - DNA, 25 bp, Homo sapien
caataatgctagtgtcttttctggg

SEQ ID NO: 263188 - DNA, 25 bp, Homo sapien
ggcaatgatgaccagagccacggtg

SEQ ID NO: 263189 - DNA, 25 bp, Homo sapien
tctgcgtcccgaagcacgtgccagg

SEQ ID NO: 263190 - DNA, 25 bp, Homo sapien
gtgacagtggcagcctgctccctgg

SEQ ID NO: 263191 - DNA, 25 bp, Homo sapien
ctggactctgcgtcccgaagcacgt

SEQ ID NO: 263192 - DNA, 25 bp, Homo sapien
cctctgtggtgggaagactctccat

SEQ ID NO: 263193 - DNA, 25 bp, Homo sapien
tagatcccgaagcaaagtcccgtct

SEQ ID NO: 263194 - DNA, 25 bp, Homo sapien
catcacagcagtttttggctaccac

SEQ ID NO: 263195 - DNA, 25 bp, Homo sapien
cctgcatggccaaactctgatctgg

SEQ ID NO: 263196 - DNA, 25 bp, Homo sapien
actgatggtgcccgccactggctgc

SEQ ID NO: 263197 - DNA, 25 bp, Homo sapien
gagcaaaatgcagcctgttgtttta

SEQ ID NO: 263198 - DNA, 25 bp, Homo sapien
gccccagggcgtttcctgggagcta

SEQ ID NO: 263199 - DNA, 25 bp, Homo sapien
ttttagatggccacagaatggatcc

SEQ ID NO: 263200 - DNA, 25 bp, Homo sapien
caactctatgacgaagtggctggct

SEQ ID NO: 263201 - DNA, 25 bp, Homo sapien
tgcttcaggccagatttgaggacct

SEQ ID NO: 263202 - DNA, 25 bp, Homo sapien
tcctcgtttaggatgggacagctga

SEQ ID NO: 263203 - DNA, 25 bp, Homo sapien
gcccagccaccaaacgatattagta

SEQ ID NO: 263204 - DNA, 25 bp, Homo sapien
agagagaagcggcacaggacggcca

SEQ ID NO: 263205 - DNA, 25 bp, Homo sapien
ggccagacagtgacccagaagagta

SEQ ID NO: 263206 - DNA, 25 bp, Homo sapien
ccagaagagtattgacaaccgcccc

SEQ ID NO: 263207 - DNA, 25 bp, Homo sapien
gcacaggacggccagacagtgaccc

SEQ ID NO: 263208 - DNA, 25 bp, Homo sapien
aaagatcgagggcctaggagattgg

SEQ ID NO: 263209 - DNA, 25 bp, Homo sapien
caccccagggggacgggcagctgct

SEQ ID NO: 263210 - DNA, 25 bp, Homo sapien
ctgcaaagatcgagggcctaggaga

SEQ ID NO: 263211 - DNA, 25 bp, Homo sapien
gcaaagatcgagggcctaggagatt

SEQ ID NO: 263212 - DNA, 25 bp, Homo sapien
tgtgtgcgtgccattcaggtgggtg

SEQ ID NO: 263213 - DNA, 25 bp, Homo sapien
tgggtgctatggaggccaccacatc

SEQ ID NO: 263214 - DNA, 25 bp, Homo sapien
cagatgcaccaccttgtatgtgtgc

SEQ ID NO: 263215 - DNA, 25 bp, Homo sapien
ccctgccaaaatccttacagtagta

SEQ ID NO: 263216 - DNA, 25 bp, Homo sapien
tccaagatgccgggaagatgatgga

SEQ ID NO: 263217 - DNA, 25 bp, Homo sapien
ccaagatgccgggaagatgatggac

SEQ ID NO: 263218 - DNA, 25 bp, Homo sapien
caagatgccgggaagatgatggact

SEQ ID NO: 263219 - DNA, 25 bp, Homo sapien
ctccaagatgccgggaagatgatgg

SEQ ID NO: 263220 - DNA, 25 bp, Homo sapien
agtcagtggaaccatagatgaagct

SEQ ID NO: 263221 - DNA, 25 bp, Homo sapien
aagtcagtggaaccatagatgaagc

SEQ ID NO: 263222 - DNA, 25 bp, Homo sapien
tccaggtactgtggctgtgacgcca

SEQ ID NO: 263223 - DNA, 25 bp, Homo sapien
ttgagtgacccagcagctccaggta

SEQ ID NO: 263224 - DNA, 25 bp, Homo sapien
cagctccaggtactgtggctgtgac

SEQ ID NO: 263225 - DNA, 25 bp, Homo sapien
gagtgacccagcagctccaggtact

SEQ ID NO: 263226 - DNA, 25 bp, Homo sapien
acagcatctgcgtactgggcacggg

SEQ ID NO: 263227 - DNA, 25 bp, Homo sapien
tggcacagcatctgcgtactgggca

SEQ ID NO: 263228 - DNA, 25 bp, Homo sapien
agcatctgcgtactgggcacgggca

SEQ ID NO: 263229 - DNA, 25 bp, Homo sapien
cagagcccctgccggtgggcatggg

SEQ ID NO: 263230 - DNA, 25 bp, Homo sapien
gtgctgtcctctgcagcaatgctct

SEQ ID NO: 263231 - DNA, 25 bp, Homo sapien
tgtcctctgcagcaatgctctcagc

SEQ ID NO: 263232 - DNA, 25 bp, Homo sapien
agcaatgctctcagccagccccttc

SEQ ID NO: 263233 - DNA, 25 bp, Homo sapien
cttccccttggcccggctgctagca

SEQ ID NO: 263234 - DNA, 25 bp, Homo sapien
ggacagggcacattgggaggtggcc

SEQ ID NO: 263235 - DNA, 25 bp, Homo sapien
gatgactgacagtgaccagctgcca

SEQ ID NO: 263236 - DNA, 25 bp, Homo sapien
gcccacctccaccattggaggagtg

SEQ ID NO: 263237 - DNA, 25 bp, Homo sapien
gagtggctgcgtgaatctcacccca

SEQ ID NO: 263238 - DNA, 25 bp, Homo sapien
ctgactcccttgcacacgttgagga

SEQ ID NO: 263239 - DNA, 25 bp, Homo sapien
ttgcacacgttgaggatcacttcct

SEQ ID NO: 263240 - DNA, 25 bp, Homo sapien
atcacttcctggtgtcgagggtcta

SEQ ID NO: 263241 - DNA, 25 bp, Homo sapien
tcccttgcacacgttgaggatcact

SEQ ID NO: 263242 - DNA, 25 bp, Homo sapien
ggccaaagatgctcccccaaagagg

SEQ ID NO: 263243 - DNA, 25 bp, Homo sapien
agcaccgagggccaaagatgctccc

SEQ ID NO: 263244 - DNA, 25 bp, Homo sapien
cagcaccgagggccaaagatgctcc

SEQ ID NO: 263245 - DNA, 25 bp, Homo sapien
gagggccaaagatgctcccccaaag

SEQ ID NO: 263246 - DNA, 25 bp, Homo sapien
caaaacgtcatcttggcaggactca

SEQ ID NO: 263247 - DNA, 25 bp, Homo sapien
ccagaggtttggcaggagagcaaaa

SEQ ID NO: 263248 - DNA, 25 bp, Homo sapien
aagccagaggtttggcaggagagca

SEQ ID NO: 263249 - DNA, 25 bp, Homo sapien
cagctgttcctggttccaaaacgtc

SEQ ID NO: 263250 - DNA, 25 bp, Homo sapien
acaatgagccggtacagtgtgggcc

SEQ ID NO: 263251 - DNA, 25 bp, Homo sapien
tgcccttgagtttatcctgcgagcc

SEQ ID NO: 263252 - DNA, 25 bp, Homo sapien
tggagatccccttactcgaactggc

SEQ ID NO: 263253 - DNA, 25 bp, Homo sapien
agtgcttgtgctctcgcacgcggct

SEQ ID NO: 263254 - DNA, 25 bp, Homo sapien
tgccggtgggcgttggtgaagctgg

SEQ ID NO: 263255 - DNA, 25 bp, Homo sapien
ctctcctcgcctttggtggggaagg

SEQ ID NO: 263256 - DNA, 25 bp, Homo sapien
ctacttgaggtgccggtgggcgttg

SEQ ID NO: 263257 - DNA, 25 bp, Homo sapien
ggtgaagctggtggggactggcgtg

SEQ ID NO: 263258 - DNA, 25 bp, Homo sapien
ggccagacccaagagcgagccttgg

SEQ ID NO: 263259 - DNA, 25 bp, Homo sapien
gttgagcacgttggcgctgccagcc

SEQ ID NO: 263260 - DNA, 25 bp, Homo sapien
gggcgcatgttcctcagtcctgtct

SEQ ID NO: 263261 - DNA, 25 bp, Homo sapien
gtgtcgctgtcgaagaggcctccgt

SEQ ID NO: 263262 - DNA, 25 bp, Homo sapien
cgcccgctgcagcgctggggctaac

SEQ ID NO: 263263 - DNA, 25 bp, Homo sapien
cctgcaggccgcccgctgcagcgct

SEQ ID NO: 263264 - DNA, 25 bp, Homo sapien
gcaggccgcccgctgcagcgctggg

SEQ ID NO: 263265 - DNA, 25 bp, Homo sapien
ccgcccgctgcagcgctggggctaa

SEQ ID NO: 263266 - DNA, 25 bp, Homo sapien
ctggctttgcaaattcaggaaggag

SEQ ID NO: 263267 - DNA, 25 bp, Homo sapien
gcgggtggagcgcagctctctggga

SEQ ID NO: 263268 - DNA, 25 bp, Homo sapien
agcacgagggccttcgcctggcttt

SEQ ID NO: 263269 - DNA, 25 bp, Homo sapien
tgcccatgatgatcctcacgacagt

SEQ ID NO: 263270 - DNA, 25 bp, Homo sapien
accttctctcccgaggtttgtgcgc

SEQ ID NO: 263271 - DNA, 25 bp, Homo sapien
ctctcccgaggtttgtgcgccctgg

SEQ ID NO: 263272 - DNA, 25 bp, Homo sapien
cttggtgtccgtaccaggaaccgct

SEQ ID NO: 263273 - DNA, 25 bp, Homo sapien
tcccgaggtttgtgcgccctggctg

SEQ ID NO: 263274 - DNA, 25 bp, Homo sapien
gatttgtggcatcgttctgctggaa

SEQ ID NO: 263275 - DNA, 25 bp, Homo sapien
gaagtggggactctcctggtgaact

SEQ ID NO: 263276 - DNA, 25 bp, Homo sapien
tggaacgtggatgtctacagcaaca

SEQ ID NO: 263277 - DNA, 25 bp, Homo sapien
tgaaaatgccacattgacattggtg

SEQ ID NO: 263278 - DNA, 25 bp, Homo sapien
taatacattcgtgggtaggaacagg

SEQ ID NO: 263279 - DNA, 25 bp, Homo sapien
gatgcatacttgtctcctcagacgt

SEQ ID NO: 263280 - DNA, 25 bp, Homo sapien
gatgctttacatgtgagacctggcc

SEQ ID NO: 263281 - DNA, 25 bp, Homo sapien
tgtgcaaagcagaaggtcctgaaag

SEQ ID NO: 263282 - DNA, 25 bp, Homo sapien
tctgtactgactagcaatggaaagg

SEQ ID NO: 263283 - DNA, 25 bp, Homo sapien
gaacggatgccacaaggacctgctt

SEQ ID NO: 263284 - DNA, 25 bp, Homo sapien
cgggattcgctatgacttccacaga

SEQ ID NO: 263285 - DNA, 25 bp, Homo sapien
caagctatacattttcgggattcgc

SEQ ID NO: 263286 - DNA, 25 bp, Homo sapien
cctggaaattaagaggtccaatgtg

SEQ ID NO: 263287 - DNA, 25 bp, Homo sapien
tttcactgctacctcgctgatctgt

SEQ ID NO: 263288 - DNA, 25 bp, Homo sapien
tatctactatcaagtggcctggaaa

SEQ ID NO: 263289 - DNA, 25 bp, Homo sapien
accctcttttcccaagatgaagcca

SEQ ID NO: 263290 - DNA, 25 bp, Homo sapien
ctaaaatatttctgctcatagattt

SEQ ID NO: 263291 - DNA, 25 bp, Homo sapien
aatatttctgctcatagatttttcc

SEQ ID NO: 263292 - DNA, 25 bp, Homo sapien
atacttaagaatattgtcggccagg

SEQ ID NO: 263293 - DNA, 25 bp, Homo sapien
acttaagaatattgtcggccaggca

SEQ ID NO: 263294 - DNA, 25 bp, Homo sapien
gactagagatagtcctatgatacat

SEQ ID NO: 263295 - DNA, 25 bp, Homo sapien
ctttttggtaggcttctgagatttc

SEQ ID NO: 263296 - DNA, 25 bp, Homo sapien
tctgcaaccatttttgactagagat

SEQ ID NO: 263297 - DNA, 25 bp, Homo sapien
ggcttctgagatttctgcccattct

SEQ ID NO: 263298 - DNA, 25 bp, Homo sapien
ctgcagatagccaaacagtgggccg

SEQ ID NO: 263299 - DNA, 25 bp, Homo sapien
tttcttctggaacaaccgccgagtg

SEQ ID NO: 263300 - DNA, 25 bp, Homo sapien
ctcgcggcagcgaccaatcattgga

SEQ ID NO: 263301 - DNA, 25 bp, Homo sapien
gcgaccaatcattggaggccagccc

SEQ ID NO: 263302 - DNA, 25 bp, Homo sapien
aacaaccgccgagtgcgagtcccgg

SEQ ID NO: 263303 - DNA, 25 bp, Homo sapien
tagaaggcccagtcttcgaagcctc

SEQ ID NO: 263304 - DNA, 25 bp, Homo sapien
gatttcagcggcaccccagggctga

SEQ ID NO: 263305 - DNA, 25 bp, Homo sapien
cctccccattcgctggtaggaagac

SEQ ID NO: 263306 - DNA, 25 bp, Homo sapien
taggaagacctagaaggcccagtct

SEQ ID NO: 263307 - DNA, 25 bp, Homo sapien
tgatctggataccctccttccacac

SEQ ID NO: 263308 - DNA, 25 bp, Homo sapien
cggatgatctggataccctccttcc

SEQ ID NO: 263309 - DNA, 25 bp, Homo sapien
ggatgatctggataccctccttcca

SEQ ID NO: 263310 - DNA, 25 bp, Homo sapien
gatgatctggataccctccttccac

SEQ ID NO: 263311 - DNA, 25 bp, Homo sapien
tgcctccccgctaggtgggcccttg

SEQ ID NO: 263312 - DNA, 25 bp, Homo sapien
ggctgcctccccgctaggtgggccc

SEQ ID NO: 263313 - DNA, 25 bp, Homo sapien
ccgctaggtgggcccttgggctcct

SEQ ID NO: 263314 - DNA, 25 bp, Homo sapien
ctgcctccccgctaggtgggccctt

SEQ ID NO: 263315 - DNA, 25 bp, Homo sapien
ccacattgaagttcacaatggtgac

SEQ ID NO: 263316 - DNA, 25 bp, Homo sapien
agcatgtccacattgaagttcacaa

SEQ ID NO: 263317 - DNA, 25 bp, Homo sapien
aaaagcatgtccacattgaagttca

SEQ ID NO: 263318 - DNA, 25 bp, Homo sapien
tcacaaaaagcatgtccacattgaa

SEQ ID NO: 263319 - DNA, 25 bp, Homo sapien
gatctactaccacaaccacatgagg

SEQ ID NO: 263320 - DNA, 25 bp, Homo sapien
gccagccacgtctaaggagctccat

SEQ ID NO: 263321 - DNA, 25 bp, Homo sapien
gaagcttacggagaactgttacata

SEQ ID NO: 263322 - DNA, 25 bp, Homo sapien
gatatggacacagacagttccagct

SEQ ID NO: 263323 - DNA, 25 bp, Homo sapien
gagtcttccttaatatatccagcca

SEQ ID NO: 263324 - DNA, 25 bp, Homo sapien
ccattatggagtcttccttaatata

SEQ ID NO: 263325 - DNA, 25 bp, Homo sapien
ccagccattgggtagtagcgttgtc

SEQ ID NO: 263326 - DNA, 25 bp, Homo sapien
cgttgtctagtatttacagctgtag

SEQ ID NO: 263327 - DNA, 25 bp, Homo sapien
cttgtctgtggaggctgaacgttct

SEQ ID NO: 263328 - DNA, 25 bp, Homo sapien
ttagctgatcagcagtcttcttaaa

SEQ ID NO: 263329 - DNA, 25 bp, Homo sapien
aaagtcctgagaacaattctttatc

SEQ ID NO: 263330 - DNA, 25 bp, Homo sapien
taaaccagtagttagctgatcagca

SEQ ID NO: 263331 - DNA, 25 bp, Homo sapien
ttttccagcaatgcttaactgttcg

SEQ ID NO: 263332 - DNA, 25 bp, Homo sapien
tgcttaactgttcgaaactatggtg

SEQ ID NO: 263333 - DNA, 25 bp, Homo sapien
tgtgctgtattcaatgcttcatcaa

SEQ ID NO: 263334 - DNA, 25 bp, Homo sapien
tgttcgaaactatggtgtgctgtat

SEQ ID NO: 263335 - DNA, 25 bp, Homo sapien
tccacaacttctataactctttctc

SEQ ID NO: 263336 - DNA, 25 bp, Homo sapien
tcctctatcgtttgcttctgcatgt

SEQ ID NO: 263337 - DNA, 25 bp, Homo sapien
ctccacaacttctataactctttct

SEQ ID NO: 263338 - DNA, 25 bp, Homo sapien
ctctttcctctatcgtttgcttctg

SEQ ID NO: 263339 - DNA, 25 bp, Homo sapien
aaatttgatagataatcatcagtag

SEQ ID NO: 263340 - DNA, 25 bp, Homo sapien
tgtaatgctcttgctatgttcatag

SEQ ID NO: 263341 - DNA, 25 bp, Homo sapien
ctgattcaggtcacagtatgttctt

SEQ ID NO: 263342 - DNA, 25 bp, Homo sapien
tagagaaggcgataattgtaatgct

SEQ ID NO: 263343 - DNA, 25 bp, Homo sapien
cactatctgaagttaactgcaaagt

SEQ ID NO: 263344 - DNA, 25 bp, Homo sapien
tcactatctgaagttaactgcaaag

SEQ ID NO: 263345 - DNA, 25 bp, Homo sapien
ctgggagggttccttagttgtggag

SEQ ID NO: 263346 - DNA, 25 bp, Homo sapien
tgggagggttccttagttgtggaga

SEQ ID NO: 263347 - DNA, 25 bp, Homo sapien
aatctttcccatattgttgaacata

SEQ ID NO: 263348 - DNA, 25 bp, Homo sapien
gaacatacagatgatctcactgcaa

SEQ ID NO: 263349 - DNA, 25 bp, Homo sapien
tttgttgagtccctaaattcaatct

SEQ ID NO: 263350 - DNA, 25 bp, Homo sapien
gatctcactgcaattcacactcaac

SEQ ID NO: 263351 - DNA, 25 bp, Homo sapien
atgtatcgtaacaagaaagttcctt

SEQ ID NO: 263352 - DNA, 25 bp, Homo sapien
tggtgcttcactggttaggacagac

SEQ ID NO: 263353 - DNA, 25 bp, Homo sapien
tcttttctagcggtgggtatgtatc

SEQ ID NO: 263354 - DNA, 25 bp, Homo sapien
gtacatcatttgtctcaggttgcaa

SEQ ID NO: 263355 - DNA, 25 bp, Homo sapien
tcccatctgaggtaacacagcaatg

SEQ ID NO: 263356 - DNA, 25 bp, Homo sapien
ggatgctgttgcaacgtctttctgt

SEQ ID NO: 263357 - DNA, 25 bp, Homo sapien
caattatcacatcagggctagatcc

SEQ ID NO: 263358 - DNA, 25 bp, Homo sapien
tccacgttgtcttcaataatttctt

SEQ ID NO: 263359 - DNA, 25 bp, Homo sapien
tccccaagatcatctgtgccgcatg

SEQ ID NO: 263360 - DNA, 25 bp, Homo sapien
ggatatctaggtgtctccccaagat

SEQ ID NO: 263361 - DNA, 25 bp, Homo sapien
tcagacagttgttacagtatctgct

SEQ ID NO: 263362 - DNA, 25 bp, Homo sapien
ttacagtatctgcttttgatccaaa

SEQ ID NO: 263363 - DNA, 25 bp, Homo sapien
tacacatacagtaaactccactaca

SEQ ID NO: 263364 - DNA, 25 bp, Homo sapien
tacagtaaactccactacatcaagc

SEQ ID NO: 263365 - DNA, 25 bp, Homo sapien
cacatacagtaaactccactacatc

SEQ ID NO: 263366 - DNA, 25 bp, Homo sapien
catacagtaaactccactacatcaa

SEQ ID NO: 263367 - DNA, 25 bp, Homo sapien
aaatggcaaggatctattacatggc

SEQ ID NO: 263368 - DNA, 25 bp, Homo sapien
cttcttctccagtactttggcgtct

SEQ ID NO: 263369 - DNA, 25 bp, Homo sapien
tttgtgaatacttccgaatgtagaa

SEQ ID NO: 263370 - DNA, 25 bp, Homo sapien
tattacatggcttacaaaaactagc

SEQ ID NO: 263371 - DNA, 25 bp, Homo sapien
tccaaaatgtctgaaggatcaaggt

SEQ ID NO: 263372 - DNA, 25 bp, Homo sapien
ggatcaaggtgtgaactcctattgc

SEQ ID NO: 263373 - DNA, 25 bp, Homo sapien
caaggtgtgaactcctattgcaaaa

SEQ ID NO: 263374 - DNA, 25 bp, Homo sapien
gtctgaaggatcaaggtgtgaactc

SEQ ID NO: 263375 - DNA, 25 bp, Homo sapien
tctggttggactacaaggttttctg

SEQ ID NO: 263376 - DNA, 25 bp, Homo sapien
tgcaacttcatggacaaataatctg

SEQ ID NO: 263377 - DNA, 25 bp, Homo sapien
gatagttcctcgacaccacattcca

SEQ ID NO: 263378 - DNA, 25 bp, Homo sapien
gtatttctaccctctattggaatta

SEQ ID NO: 263379 - DNA, 25 bp, Homo sapien
cagtgacaatcaggacttcagaatt

SEQ ID NO: 263380 - DNA, 25 bp, Homo sapien
gtgacaatcaggacttcagaatttc

SEQ ID NO: 263381 - DNA, 25 bp, Homo sapien
ccagtgacaatcaggacttcagaat

SEQ ID NO: 263382 - DNA, 25 bp, Homo sapien
agtgacaatcaggacttcagaattt

SEQ ID NO: 263383 - DNA, 25 bp, Homo sapien
agaaccagacataaatcatttagtg

SEQ ID NO: 263384 - DNA, 25 bp, Homo sapien
tatgttgcttagcagagtgttctgg

SEQ ID NO: 263385 - DNA, 25 bp, Homo sapien
tctggtctcacatgggtatcaacaa

SEQ ID NO: 263386 - DNA, 25 bp, Homo sapien
tcatttagtgcaatatgttgcttag

SEQ ID NO: 263387 - DNA, 25 bp, Homo sapien
ggttgtgctaatggctggatgtctt

SEQ ID NO: 263388 - DNA, 25 bp, Homo sapien
aatgtctttcaatgagcatggttgt

SEQ ID NO: 263389 - DNA, 25 bp, Homo sapien
tgaattctgtggaacaatgtctttc

SEQ ID NO: 263390 - DNA, 25 bp, Homo sapien
catggttgtgctaatggctggatgt

SEQ ID NO: 263391 - DNA, 25 bp, Homo sapien
ttttcaattgtggaagccgaagttc

SEQ ID NO: 263392 - DNA, 25 bp, Homo sapien
tatagttgactccaaaattactgct

SEQ ID NO: 263393 - DNA, 25 bp, Homo sapien
tatcaagattactggttccctgagc

SEQ ID NO: 263394 - DNA, 25 bp, Homo sapien
tagcaatctaactggcaatacatag

SEQ ID NO: 263395 - DNA, 25 bp, Homo sapien
tagcttcctcttcccagccttcatt

SEQ ID NO: 263396 - DNA, 25 bp, Homo sapien
acagccttgttatttaccattttca

SEQ ID NO: 263397 - DNA, 25 bp, Homo sapien
cagccttgttatttaccattttcaa

SEQ ID NO: 263398 - DNA, 25 bp, Homo sapien
cattttcaaaaattccactttagct

SEQ ID NO: 263399 - DNA, 25 bp, Homo sapien
cactgcttattttattcggtggtgg

SEQ ID NO: 263400 - DNA, 25 bp, Homo sapien
tctaagagacacaggcatatcactg

SEQ ID NO: 263401 - DNA, 25 bp, Homo sapien
gatctacaataagcacaccatcttc

SEQ ID NO: 263402 - DNA, 25 bp, Homo sapien
aaaaactagcgcatctctaagagac

SEQ ID NO: 263403 - DNA, 25 bp, Homo sapien
tcatgtcgtacttagattcaaagct

SEQ ID NO: 263404 - DNA, 25 bp, Homo sapien
tccagatccaagactacttgtattt

SEQ ID NO: 263405 - DNA, 25 bp, Homo sapien
cagatccaagactacttgtattttt

SEQ ID NO: 263406 - DNA, 25 bp, Homo sapien
atgtcgtacttagattcaaagctgc

SEQ ID NO: 263407 - DNA, 25 bp, Homo sapien
ttggtattgtcttcaattatcaaac

SEQ ID NO: 263408 - DNA, 25 bp, Homo sapien
gtctcaaaactttagagctaggctt

SEQ ID NO: 263409 - DNA, 25 bp, Homo sapien
tcaaaccaggttaaataagatatca

SEQ ID NO: 263410 - DNA, 25 bp, Homo sapien
tgtcttcaattatcaaaccaggtta

SEQ ID NO: 263411 - DNA, 25 bp, Homo sapien
ttctttaggcaaaataggtggatga

SEQ ID NO: 263412 - DNA, 25 bp, Homo sapien
taggtggatgatagtgtaaagtagt

SEQ ID NO: 263413 - DNA, 25 bp, Homo sapien
acttcttagtgattgtgacttaaac

SEQ ID NO: 263414 - DNA, 25 bp, Homo sapien
tcaaagtgacttcttagtgattgtg

SEQ ID NO: 263415 - DNA, 25 bp, Homo sapien
gacaaaccgttactgaaacatctgt

SEQ ID NO: 263416 - DNA, 25 bp, Homo sapien
ggactatttatatgacaaaccgtta

SEQ ID NO: 263417 - DNA, 25 bp, Homo sapien
atagaaatctccaggactatttata

SEQ ID NO: 263418 - DNA, 25 bp, Homo sapien
ttatatgacaaaccgttactgaaac

SEQ ID NO: 263419 - DNA, 25 bp, Homo sapien
ggtactgactgatatcagaagtttc

SEQ ID NO: 263420 - DNA, 25 bp, Homo sapien
tgaaaaccagaagtaagcagtaatc

SEQ ID NO: 263421 - DNA, 25 bp, Homo sapien
tgaatagggcttgcaggtactgact

SEQ ID NO: 263422 - DNA, 25 bp, Homo sapien
gtcacagcatcagggacctctgtca

SEQ ID NO: 263423 - DNA, 25 bp, Homo sapien
gaatgacgccaacaaaatagattag

SEQ ID NO: 263424 - DNA, 25 bp, Homo sapien
agtagatattatgcaaattcttcca

SEQ ID NO: 263425 - DNA, 25 bp, Homo sapien
ttctaagtagatattatgcaaattc

SEQ ID NO: 263426 - DNA, 25 bp, Homo sapien
cattaacaggtaagccagagtgaac

SEQ ID NO: 263427 - DNA, 25 bp, Homo sapien
tcttgaactggacagaggatttcca

SEQ ID NO: 263428 - DNA, 25 bp, Homo sapien
caaatttagctacacaggcttgatc

SEQ ID NO: 263429 - DNA, 25 bp, Homo sapien
tcttcacttttatagaattcctcga

SEQ ID NO: 263430 - DNA, 25 bp, Homo sapien
cgataacttttgctcggtaccaaat

SEQ ID NO: 263431 - DNA, 25 bp, Homo sapien
tgttgctttgttctatctatacaac

SEQ ID NO: 263432 - DNA, 25 bp, Homo sapien
catcaaactagagttcaccggtttt

SEQ ID NO: 263433 - DNA, 25 bp, Homo sapien
gtaccttgacaatcaaaatagcatg

SEQ ID NO: 263434 - DNA, 25 bp, Homo sapien
tctatctatacaacttttccagcaa

SEQ ID NO: 263435 - DNA, 25 bp, Homo sapien
attacaaacttggaaacagaattat

SEQ ID NO: 263436 - DNA, 25 bp, Homo sapien
cttgaaaaattatgaaattagaaat

SEQ ID NO: 263437 - DNA, 25 bp, Homo sapien
tgaaattagaaattacaaacttgga

SEQ ID NO: 263438 - DNA, 25 bp, Homo sapien
attatgaaattagaaattacaaact

SEQ ID NO: 263439 - DNA, 25 bp, Homo sapien
gaaactcatcctttattttacgcac

SEQ ID NO: 263440 - DNA, 25 bp, Homo sapien
tttacgcacgtctttgattgttatt

SEQ ID NO: 263441 - DNA, 25 bp, Homo sapien
ttttgcagtattaccaaagtccaca

SEQ ID NO: 263442 - DNA, 25 bp, Homo sapien
atttttgcagtattaccaaagtcca

SEQ ID NO: 263443 - DNA, 25 bp, Homo sapien
cttctttggaccactgcattgtcct

SEQ ID NO: 263444 - DNA, 25 bp, Homo sapien
tatggttcaatataggccaacttac

SEQ ID NO: 263445 - DNA, 25 bp, Homo sapien
tgcattgtccttttatatggttcaa

SEQ ID NO: 263446 - DNA, 25 bp, Homo sapien
tataggccaacttacatttaattgc

SEQ ID NO: 263447 - DNA, 25 bp, Homo sapien
gcacatatgtttaagactgtgatac

SEQ ID NO: 263448 - DNA, 25 bp, Homo sapien
taagtgagcatttaggcaatttaca

SEQ ID NO: 263449 - DNA, 25 bp, Homo sapien
caaggccgtctaccgttatataacg

SEQ ID NO: 263450 - DNA, 25 bp, Homo sapien
atattgaaacgtgaggtaccattgc

SEQ ID NO: 263451 - DNA, 25 bp, Homo sapien
gaatcgaaaagctcaactaagagca

SEQ ID NO: 263452 - DNA, 25 bp, Homo sapien
tcaactaagagcacattatcttcca

SEQ ID NO: 263453 - DNA, 25 bp, Homo sapien
ccaagagaatcgaaaagctcaacta

SEQ ID NO: 263454 - DNA, 25 bp, Homo sapien
aggagcaccaagagaatcgaaaagc

SEQ ID NO: 263455 - DNA, 25 bp, Homo sapien
atttcataagatgctaggccctctt

SEQ ID NO: 263456 - DNA, 25 bp, Homo sapien
ctggtcattaatactagtagtagtc

SEQ ID NO: 263457 - DNA, 25 bp, Homo sapien
tctttaactagctggtcattaatac

SEQ ID NO: 263458 - DNA, 25 bp, Homo sapien
cataagatgctaggccctctttaac

SEQ ID NO: 263459 - DNA, 25 bp, Homo sapien
gactgaaaattctcattaggtagag

SEQ ID NO: 263460 - DNA, 25 bp, Homo sapien
ttacagatatgcacaggcaattcct

SEQ ID NO: 263461 - DNA, 25 bp, Homo sapien
ttttgcagacacaggatttaagttg

SEQ ID NO: 263462 - DNA, 25 bp, Homo sapien
cttctggagaaggatcccaaacttc

SEQ ID NO: 263463 - DNA, 25 bp, Homo sapien
agttaacaaccactgaacataaatc

SEQ ID NO: 263464 - DNA, 25 bp, Homo sapien
cataaatcttctcaggagatattac

SEQ ID NO: 263465 - DNA, 25 bp, Homo sapien
gaacataaatcttctcaggagatat

SEQ ID NO: 263466 - DNA, 25 bp, Homo sapien
ttaacaaccactgaacataaatctt

SEQ ID NO: 263467 - DNA, 25 bp, Homo sapien
ctatagagataaaaaatatttaact

SEQ ID NO: 263468 - DNA, 25 bp, Homo sapien
agtgcatatcattttcccatttaac

SEQ ID NO: 263469 - DNA, 25 bp, Homo sapien
gatctggcctcttcgccactgattt

SEQ ID NO: 263470 - DNA, 25 bp, Homo sapien
tatcttggatcttaacagcacagtg

SEQ ID NO: 263471 - DNA, 25 bp, Homo sapien
tatcattttcccatttaacaggttc

SEQ ID NO: 263472 - DNA, 25 bp, Homo sapien
cttcacaattacacttttaactctg

SEQ ID NO: 263473 - DNA, 25 bp, Homo sapien
caattacacttttaactctgtaatt

SEQ ID NO: 263474 - DNA, 25 bp, Homo sapien
cacaattacacttttaactctgtaa

SEQ ID NO: 263475 - DNA, 25 bp, Homo sapien
ttcacaattacacttttaactctgt

SEQ ID NO: 263476 - DNA, 25 bp, Homo sapien
agagagtcttcccattgtctttaga

SEQ ID NO: 263477 - DNA, 25 bp, Homo sapien
caagttttcttaaacagtcaacatt

SEQ ID NO: 263478 - DNA, 25 bp, Homo sapien
tagttcaacacccacatcatacagc

SEQ ID NO: 263479 - DNA, 25 bp, Homo sapien
cagtcaacattcactactagttcaa

SEQ ID NO: 263480 - DNA, 25 bp, Homo sapien
aagctgttgctgtccacttgtcact

SEQ ID NO: 263481 - DNA, 25 bp, Homo sapien
gctccagtcaggtacaatgaaagac

SEQ ID NO: 263482 - DNA, 25 bp, Homo sapien
tacaatgaaagacagtcacaagctg

SEQ ID NO: 263483 - DNA, 25 bp, Homo sapien
gtaagattatagttgctacagctcc

SEQ ID NO: 263484 - DNA, 25 bp, Homo sapien
caggtaatggccatgttgtgttgtt

SEQ ID NO: 263485 - DNA, 25 bp, Homo sapien
acaggtaatggccatgttgtgttgt

SEQ ID NO: 263486 - DNA, 25 bp, Homo sapien
aagagagagaaaagaggccgagcgt

SEQ ID NO: 263487 - DNA, 25 bp, Homo sapien
ctaaatctctagaaagagagagaaa

SEQ ID NO: 263488 - DNA, 25 bp, Homo sapien
gagagagaaaagaggccgagcgtgg

SEQ ID NO: 263489 - DNA, 25 bp, Homo sapien
ctctaaatctctagaaagagagaga

SEQ ID NO: 263490 - DNA, 25 bp, Homo sapien
cagttagtaactactgaatcttcct

SEQ ID NO: 263491 - DNA, 25 bp, Homo sapien
tctcagataatgaatggctgttatc

SEQ ID NO: 263492 - DNA, 25 bp, Homo sapien
ctggtggcttataccctctagtggt

SEQ ID NO: 263493 - DNA, 25 bp, Homo sapien
tcactgattatgtcagcagttttct

SEQ ID NO: 263494 - DNA, 25 bp, Homo sapien
gatagtttaggtactacaaatatag

SEQ ID NO: 263495 - DNA, 25 bp, Homo sapien
atcaccaacacagctgactgttgcc

SEQ ID NO: 263496 - DNA, 25 bp, Homo sapien
aaatatagttccatcatcaccaaca

SEQ ID NO: 263497 - DNA, 25 bp, Homo sapien
tgttgcctcaaatacgttcatgtta

SEQ ID NO: 263498 - DNA, 25 bp, Homo sapien
aataaggctccaaaagaccaaggca

SEQ ID NO: 263499 - DNA, 25 bp, Homo sapien
tgccacgataccacagagtatcgga

SEQ ID NO: 263500 - DNA, 25 bp, Homo sapien
taaggctccaaaagaccaaggcatt

SEQ ID NO: 263501 - DNA, 25 bp, Homo sapien
agagtatcggatcctcttactgcac

SEQ ID NO: 263502 - DNA, 25 bp, Homo sapien
cagcgccacctacaacctccatcac

SEQ ID NO: 263503 - DNA, 25 bp, Homo sapien
acagcgccacctacaacctccatca

SEQ ID NO: 263504 - DNA, 25 bp, Homo sapien
tgacagcgccacctacaacctccat

SEQ ID NO: 263505 - DNA, 25 bp, Homo sapien
tctgacagcgccacctacaacctcc

SEQ ID NO: 263506 - DNA, 25 bp, Homo sapien
atagggtaaagatggcactgcggaa

SEQ ID NO: 263507 - DNA, 25 bp, Homo sapien
tgaatccatgatctaaatattgtac

SEQ ID NO: 263508 - DNA, 25 bp, Homo sapien
caaggaatacaaaactggggtatat

SEQ ID NO: 263509 - DNA, 25 bp, Homo sapien
tatatcaggatacagcaaaataggg

SEQ ID NO: 263510 - DNA, 25 bp, Homo sapien
ttgaagaacttctattgcatctggt

SEQ ID NO: 263511 - DNA, 25 bp, Homo sapien
gcagttgttgaagaacttctattgc

SEQ ID NO: 263512 - DNA, 25 bp, Homo sapien
ctttgaaagcagttgttgaagaact

SEQ ID NO: 263513 - DNA, 25 bp, Homo sapien
tgttgaagaacttctattgcatctg

SEQ ID NO: 263514 - DNA, 25 bp, Homo sapien
caattcacataagaaggtatatacc

SEQ ID NO: 263515 - DNA, 25 bp, Homo sapien
gcaggcgcaggaaccaaactggtag

SEQ ID NO: 263516 - DNA, 25 bp, Homo sapien
taatggttatgaaagttctcaggaa

SEQ ID NO: 263517 - DNA, 25 bp, Homo sapien
gcaggcttatttaaagcaggcgcag

SEQ ID NO: 263518 - DNA, 25 bp, Homo sapien
cataaaataagaaagtgacattcca

SEQ ID NO: 263519 - DNA, 25 bp, Homo sapien
ttcaacatctcctcagtatgttcag

SEQ ID NO: 263520 - DNA, 25 bp, Homo sapien
ccatcaaaatagaggtgaatagaca

SEQ ID NO: 263521 - DNA, 25 bp, Homo sapien
catctcctcagtatgttcagaagta

SEQ ID NO: 263522 - DNA, 25 bp, Homo sapien
taaaatcacctttagctatattgtt

SEQ ID NO: 263523 - DNA, 25 bp, Homo sapien
aaaatcacctttagctatattgttt

SEQ ID NO: 263524 - DNA, 25 bp, Homo sapien
gtaaaatcacctttagctatattgt

SEQ ID NO: 263525 - DNA, 25 bp, Homo sapien
atactttttatcatgatctgatctt

SEQ ID NO: 263526 - DNA, 25 bp, Homo sapien
gacaacgtgcttaacttgaacagca

SEQ ID NO: 263527 - DNA, 25 bp, Homo sapien
aggtgagacaacgtgcttaacttga

SEQ ID NO: 263528 - DNA, 25 bp, Homo sapien
gaagacaaatatggtggtaaaagag

SEQ ID NO: 263529 - DNA, 25 bp, Homo sapien
atgaagacaaatatggtggtaaaag

SEQ ID NO: 263530 - DNA, 25 bp, Homo sapien
ctatagaatcaaggcaaatatacac

SEQ ID NO: 263531 - DNA, 25 bp, Homo sapien
ggaggaagcgcctctaccttcttat

SEQ ID NO: 263532 - DNA, 25 bp, Homo sapien
cactatgctggttagactggttaga

SEQ ID NO: 263533 - DNA, 25 bp, Homo sapien
ctgttctaaaatccgtcagaggagg

SEQ ID NO: 263534 - DNA, 25 bp, Homo sapien
tcaaggctctcggattctgattccc

SEQ ID NO: 263535 - DNA, 25 bp, Homo sapien
ctaagatagataaaggattaaattc

SEQ ID NO: 263536 - DNA, 25 bp, Homo sapien
tgtcagctttgcagttgatccataa

SEQ ID NO: 263537 - DNA, 25 bp, Homo sapien
cataatcaacaaattgtactaagat

SEQ ID NO: 263538 - DNA, 25 bp, Homo sapien
ctttaatggcaacaatcttcgctct

SEQ ID NO: 263539 - DNA, 25 bp, Homo sapien
aatatggtattcttgtctcccctag

SEQ ID NO: 263540 - DNA, 25 bp, Homo sapien
cagtctatcatagcccacagtgcct

SEQ ID NO: 263541 - DNA, 25 bp, Homo sapien
tggacacagcatagagttgttttcc

SEQ ID NO: 263542 - DNA, 25 bp, Homo sapien
caagagaacctttatggctcgagct

SEQ ID NO: 263543 - DNA, 25 bp, Homo sapien
acggcatatgaactggatgctgttc

SEQ ID NO: 263544 - DNA, 25 bp, Homo sapien
tcatcgtcatataatgtcactatct

SEQ ID NO: 263545 - DNA, 25 bp, Homo sapien
gccccatttctaccaacggcatatg

SEQ ID NO: 263546 - DNA, 25 bp, Homo sapien
gctgttcatcgtcatataatgtcac

SEQ ID NO: 263547 - DNA, 25 bp, Homo sapien
gcactagtgctgaacaagttaggaa

SEQ ID NO: 263548 - DNA, 25 bp, Homo sapien
tcctaacagttcaattaaaaatgag

SEQ ID NO: 263549 - DNA, 25 bp, Homo sapien
ggcttctatagatgctctcactgta

SEQ ID NO: 263550 - DNA, 25 bp, Homo sapien
ggaaaattaagcctgaaatagtcta

SEQ ID NO: 263551 - DNA, 25 bp, Homo sapien
tcagcacatggctactgagtacctg

SEQ ID NO: 263552 - DNA, 25 bp, Homo sapien
gaataactgcgcatatgtgacctct

SEQ ID NO: 263553 - DNA, 25 bp, Homo sapien
tgtttacaagaatccaagaagggct

SEQ ID NO: 263554 - DNA, 25 bp, Homo sapien
ggcagccagtgttatcaatctcata

SEQ ID NO: 263555 - DNA, 25 bp, Homo sapien
gccgcagacatgctaccctaataat

SEQ ID NO: 263556 - DNA, 25 bp, Homo sapien
gaagagaatttgtgtaaccatgatg

SEQ ID NO: 263557 - DNA, 25 bp, Homo sapien
atccacttatgggacgccgcagaca

SEQ ID NO: 263558 - DNA, 25 bp, Homo sapien
aaggaagattgcaccagtcaagagg

SEQ ID NO: 263559 - DNA, 25 bp, Homo sapien
tgctttgctgggaacacggagatcc

SEQ ID NO: 263560 - DNA, 25 bp, Homo sapien
tacgaaatggtgtagcggactgccc

SEQ ID NO: 263561 - DNA, 25 bp, Homo sapien
tgtgtgatctcggaagtctcgggct

SEQ ID NO: 263562 - DNA, 25 bp, Homo sapien
tcctagattaaagggccgtggcagt

SEQ ID NO: 263563 - DNA, 25 bp, Homo sapien
aacagaagatacaatttgcaaagat

SEQ ID NO: 263564 - DNA, 25 bp, Homo sapien
aaacagaagatacaatttgcaaaga

SEQ ID NO: 263565 - DNA, 25 bp, Homo sapien
gaaatgtaatgtggtactaaaccca

SEQ ID NO: 263566 - DNA, 25 bp, Homo sapien
tgtggtactaaacccatcacattat

SEQ ID NO: 263567 - DNA, 25 bp, Homo sapien
tgtaatgtggtactaaacccatcac

SEQ ID NO: 263568 - DNA, 25 bp, Homo sapien
gtgaaatgtaatgtggtactaaacc

SEQ ID NO: 263569 - DNA, 25 bp, Homo sapien
ggcagatagatgggtactgtccttc

SEQ ID NO: 263570 - DNA, 25 bp, Homo sapien
gggcagatagatgggtactgtcctt

SEQ ID NO: 263571 - DNA, 25 bp, Homo sapien
gcagatagatgggtactgtccttca

SEQ ID NO: 263572 - DNA, 25 bp, Homo sapien
tgggcagatagatgggtactgtcct

SEQ ID NO: 263573 - DNA, 25 bp, Homo sapien
gaagtttcattataagtatctatta

SEQ ID NO: 263574 - DNA, 25 bp, Homo sapien
tttgaagacactaattgctacactg

SEQ ID NO: 263575 - DNA, 25 bp, Homo sapien
tgcttccacttactttatttttgaa

SEQ ID NO: 263576 - DNA, 25 bp, Homo sapien
tgaataaaaccttaatgaagtttca

SEQ ID NO: 263577 - DNA, 25 bp, Homo sapien
ccagaggcaaatcccgccaactccc

SEQ ID NO: 263578 - DNA, 25 bp, Homo sapien
ctttatttgatacaatccactggat

SEQ ID NO: 263579 - DNA, 25 bp, Homo sapien
tggatataccgcaagccagaggcaa

SEQ ID NO: 263580 - DNA, 25 bp, Homo sapien
tccactggatataccgcaagccaga

SEQ ID NO: 263581 - DNA, 25 bp, Homo sapien
cacaacatttataaaggttctgata

SEQ ID NO: 263582 - DNA, 25 bp, Homo sapien
catttataaaggttctgataaatcc

SEQ ID NO: 263583 - DNA, 25 bp, Homo sapien
tcacaacatttataaaggttctgat

SEQ ID NO: 263584 - DNA, 25 bp, Homo sapien
caacatttataaaggttctgataaa

SEQ ID NO: 263585 - DNA, 25 bp, Homo sapien
tccattgtcagggaatgctcgaatc

SEQ ID NO: 263586 - DNA, 25 bp, Homo sapien
tggctcatcatcaaattcctgctat

SEQ ID NO: 263587 - DNA, 25 bp, Homo sapien
ttcgtaggccaaaaagagtgctcca

SEQ ID NO: 263588 - DNA, 25 bp, Homo sapien
gaatcatagtaggtttcagtccaga

SEQ ID NO: 263589 - DNA, 25 bp, Homo sapien
gaggaacctctttatccaaagcaaa

SEQ ID NO: 263590 - DNA, 25 bp, Homo sapien
gacatattgatgttcacgctaacca

SEQ ID NO: 263591 - DNA, 25 bp, Homo sapien
gggcccaggaatctatagacttagc

SEQ ID NO: 263592 - DNA, 25 bp, Homo sapien
acaatgcaagggtgaatgaactggg

SEQ ID NO: 263593 - DNA, 25 bp, Homo sapien
gctcagctgtccgacagtgtgcctc

SEQ ID NO: 263594 - DNA, 25 bp, Homo sapien
gctgtccgacagtgtgcctctccag

SEQ ID NO: 263595 - DNA, 25 bp, Homo sapien
ctcagctcagctgtccgacagtgtg

SEQ ID NO: 263596 - DNA, 25 bp, Homo sapien
tctccaggggttgccgaaacactcg

SEQ ID NO: 263597 - DNA, 25 bp, Homo sapien
agggggaactgcgaaatccctcgca

SEQ ID NO: 263598 - DNA, 25 bp, Homo sapien
gcctcatcagagcagggaatgtgga

SEQ ID NO: 263599 - DNA, 25 bp, Homo sapien
cctcctccccactgagtagcaaatt

SEQ ID NO: 263600 - DNA, 25 bp, Homo sapien
tcagagcagggaatgtggacctgct

SEQ ID NO: 263601 - DNA, 25 bp, Homo sapien
tgtggtgtcttgtaattctaaccca

SEQ ID NO: 263602 - DNA, 25 bp, Homo sapien
tgcggctgtggtgtcttgtaattct

SEQ ID NO: 263603 - DNA, 25 bp, Homo sapien
gctaagcttccttgcggctgtggtg

SEQ ID NO: 263604 - DNA, 25 bp, Homo sapien
gcttccttgcggctgtggtgtcttg

SEQ ID NO: 263605 - DNA, 25 bp, Homo sapien
tgccgctgacagctcaaatcttgtg

SEQ ID NO: 263606 - DNA, 25 bp, Homo sapien
ggctctgggtctgagagtcttgatt

SEQ ID NO: 263607 - DNA, 25 bp, Homo sapien
tctgggtctgagagtcttgattctg

SEQ ID NO: 263608 - DNA, 25 bp, Homo sapien
tgacagctcaaatcttgtgcaagtg

SEQ ID NO: 263609 - DNA, 25 bp, Homo sapien
gtcagccgtgcaggtgtagcgccca

SEQ ID NO: 263610 - DNA, 25 bp, Homo sapien
aggtgtagcgcccagcaactaggac

SEQ ID NO: 263611 - DNA, 25 bp, Homo sapien
accggtcacgggcatggttcccaca

SEQ ID NO: 263612 - DNA, 25 bp, Homo sapien
ggaccctcagcgactgcagcagcag

SEQ ID NO: 263613 - DNA, 25 bp, Homo sapien
tatcgaggagcagaaaatcgttgtg

SEQ ID NO: 263614 - DNA, 25 bp, Homo sapien
tgttgaaggcacaagcacagagaca

SEQ ID NO: 263615 - DNA, 25 bp, Homo sapien
cttatcgaggagcagaaaatcgttg

SEQ ID NO: 263616 - DNA, 25 bp, Homo sapien
aatcgttgtgaaagtgttgaaggca

SEQ ID NO: 263617 - DNA, 25 bp, Homo sapien
cctgtagtggttccatgcgtactaa

SEQ ID NO: 263618 - DNA, 25 bp, Homo sapien
agggcctgtagtggttccatgcgta

SEQ ID NO: 263619 - DNA, 25 bp, Homo sapien
tagtggttccatgcgtactaaatgt

SEQ ID NO: 263620 - DNA, 25 bp, Homo sapien
cgcagggcctgtagtggttccatgc

SEQ ID NO: 263621 - DNA, 25 bp, Homo sapien
gagagctgttcatgaggacattgtt

SEQ ID NO: 263622 - DNA, 25 bp, Homo sapien
tagatcaagagagctgttcatgagg

SEQ ID NO: 263623 - DNA, 25 bp, Homo sapien
tgttggagggtgacttaggtgattg

SEQ ID NO: 263624 - DNA, 25 bp, Homo sapien
gtgggacatttagatcaagagagct

SEQ ID NO: 263625 - DNA, 25 bp, Homo sapien
accgatttgtctgcactagatgtcg

SEQ ID NO: 263626 - DNA, 25 bp, Homo sapien
gcaataccgatttgtctgcactaga

SEQ ID NO: 263627 - DNA, 25 bp, Homo sapien
tagttacaccaatggattgcaatac

SEQ ID NO: 263628 - DNA, 25 bp, Homo sapien
caatggattgcaataccgatttgtc

SEQ ID NO: 263629 - DNA, 25 bp, Homo sapien
atactggaggagttgccaataatga

SEQ ID NO: 263630 - DNA, 25 bp, Homo sapien
ctctccatttgtgcgctcagctgct

SEQ ID NO: 263631 - DNA, 25 bp, Homo sapien
cctcctgtagaccaatgactgagag

SEQ ID NO: 263632 - DNA, 25 bp, Homo sapien
ggctctccatttgtgcgctcagctg

SEQ ID NO: 263633 - DNA, 25 bp, Homo sapien
tgtagaccaatgactgagagctctg

SEQ ID NO: 263634 - DNA, 25 bp, Homo sapien
cagctctatggaggcctggcgggct

SEQ ID NO: 263635 - DNA, 25 bp, Homo sapien
gctgggcagctctatggaggcctgg

SEQ ID NO: 263636 - DNA, 25 bp, Homo sapien
ggcagctctatggaggcctggcggg

SEQ ID NO: 263637 - DNA, 25 bp, Homo sapien
tgggcagctctatggaggcctggcg

SEQ ID NO: 263638 - DNA, 25 bp, Homo sapien
cccaccgactcttggtactggccac

SEQ ID NO: 263639 - DNA, 25 bp, Homo sapien
accgactcttggtactggccacggc

SEQ ID NO: 263640 - DNA, 25 bp, Homo sapien
gactcttggtactggccacggccat

SEQ ID NO: 263641 - DNA, 25 bp, Homo sapien
caccgactcttggtactggccacgg

SEQ ID NO: 263642 - DNA, 25 bp, Homo sapien
taatgtggaatcagagtcatagctt

SEQ ID NO: 263643 - DNA, 25 bp, Homo sapien
ggaatcagagtcatagcttggaggc

SEQ ID NO: 263644 - DNA, 25 bp, Homo sapien
tttgttaatgtggaatcagagtcat

SEQ ID NO: 263645 - DNA, 25 bp, Homo sapien
tgtggaatcagagtcatagcttgga

SEQ ID NO: 263646 - DNA, 25 bp, Homo sapien
agagctgtcttctgtggtaatctgg

SEQ ID NO: 263647 - DNA, 25 bp, Homo sapien
tgtcttctgtggtaatctggagaaa

SEQ ID NO: 263648 - DNA, 25 bp, Homo sapien
tcttctgtggtaatctggagaaact

SEQ ID NO: 263649 - DNA, 25 bp, Homo sapien
gctgtcttctgtggtaatctggaga

SEQ ID NO: 263650 - DNA, 25 bp, Homo sapien
tgcgcgtgctcgctggttctaacgg

SEQ ID NO: 263651 - DNA, 25 bp, Homo sapien
ctaaggcggtttctctgcctcgggc

SEQ ID NO: 263652 - DNA, 25 bp, Homo sapien
ccgcctgtactgggcgccgcgagag

SEQ ID NO: 263653 - DNA, 25 bp, Homo sapien
gcgtgctcgctggttctaacggttc

SEQ ID NO: 263654 - DNA, 25 bp, Homo sapien
cgaggattgggaatccccgaccagg

SEQ ID NO: 263655 - DNA, 25 bp, Homo sapien
gccgaggattgggaatccccgacca

SEQ ID NO: 263656 - DNA, 25 bp, Homo sapien
gtcgccgaggattgggaatccccga

SEQ ID NO: 263657 - DNA, 25 bp, Homo sapien
tcgccgaggattgggaatccccgac

SEQ ID NO: 263658 - DNA, 25 bp, Homo sapien
gcatccatacatagaagcgcacaca

SEQ ID NO: 263659 - DNA, 25 bp, Homo sapien
tttcctcatgaagacgcgcacagtg

SEQ ID NO: 263660 - DNA, 25 bp, Homo sapien
taaaccgctgttatctcatggctca

SEQ ID NO: 263661 - DNA, 25 bp, Homo sapien
tctgagtgatctggcctaggcactc

SEQ ID NO: 263662 - DNA, 25 bp, Homo sapien
gccctgtgtgtatggagcagtctcg

SEQ ID NO: 263663 - DNA, 25 bp, Homo sapien
tgcactgtgctgaccattcccaggt

SEQ ID NO: 263664 - DNA, 25 bp, Homo sapien
tactgcgactgaacataatttggga

SEQ ID NO: 263665 - DNA, 25 bp, Homo sapien
gacacctgatggaactcccaaggga

SEQ ID NO: 263666 - DNA, 25 bp, Homo sapien
aggtgaccatattcctgagctgctt

SEQ ID NO: 263667 - DNA, 25 bp, Homo sapien
caccaggtgaccatattcctgagct

SEQ ID NO: 263668 - DNA, 25 bp, Homo sapien
ccaggtgaccatattcctgagctgc

SEQ ID NO: 263669 - DNA, 25 bp, Homo sapien
gacaccaggtgaccatattcctgag

SEQ ID NO: 263670 - DNA, 25 bp, Homo sapien
gacagccaccgggaaatcttcagag

SEQ ID NO: 263671 - DNA, 25 bp, Homo sapien
tgaggagccacacttacacgctgca

SEQ ID NO: 263672 - DNA, 25 bp, Homo sapien
gagaagcaatgcatgacagccaccg

SEQ ID NO: 263673 - DNA, 25 bp, Homo sapien
tgaggtctcacaatcaatggccgcc

SEQ ID NO: 263674 - DNA, 25 bp, Homo sapien
gatttcctactggtgcttgtggtgg

SEQ ID NO: 263675 - DNA, 25 bp, Homo sapien
ggctttgatcctggcacttgtggtg

SEQ ID NO: 263676 - DNA, 25 bp, Homo sapien
gcaccaagggaggatttcctactgg

SEQ ID NO: 263677 - DNA, 25 bp, Homo sapien
gatcctggcacttcaatgttggggc

SEQ ID NO: 263678 - DNA, 25 bp, Homo sapien
ggctgactgagcaagcgatctgcga

SEQ ID NO: 263679 - DNA, 25 bp, Homo sapien
cagctgccagaaggcgcatgggctc

SEQ ID NO: 263680 - DNA, 25 bp, Homo sapien
cagcgatttcggaagatgagtccgg

SEQ ID NO: 263681 - DNA, 25 bp, Homo sapien
gctgatcccatagattcgcagcgat

SEQ ID NO: 263682 - DNA, 25 bp, Homo sapien
tctctgctaagcaggaagcaatggc

SEQ ID NO: 263683 - DNA, 25 bp, Homo sapien
ctgagctgtggcgagccgggaagaa

SEQ ID NO: 263684 - DNA, 25 bp, Homo sapien
agagacacaggcttcggttctgggg

SEQ ID NO: 263685 - DNA, 25 bp, Homo sapien
gcgagccgggaagaatgaagggatg

SEQ ID NO: 263686 - DNA, 25 bp, Homo sapien
ccttatcttcctggaggaatttcat

SEQ ID NO: 263687 - DNA, 25 bp, Homo sapien
tcaagccttatcttcctggaggaat

SEQ ID NO: 263688 - DNA, 25 bp, Homo sapien
agccttatcttcctggaggaatttc

SEQ ID NO: 263689 - DNA, 25 bp, Homo sapien
caagccttatcttcctggaggaatt

SEQ ID NO: 263690 - DNA, 25 bp, Homo sapien
aaattgttttgattaaggaagctga

SEQ ID NO: 263691 - DNA, 25 bp, Homo sapien
gaagctgaagatagggtcccattcc

SEQ ID NO: 263692 - DNA, 25 bp, Homo sapien
tgatgtttattttcgctggttagaa

SEQ ID NO: 263693 - DNA, 25 bp, Homo sapien
tatagattacctggtgctttgtctc

SEQ ID NO: 263694 - DNA, 25 bp, Homo sapien
ggcactcgctagttggtgctgtggt

SEQ ID NO: 263695 - DNA, 25 bp, Homo sapien
ttggcactcgctagttggtgctgtg

SEQ ID NO: 263696 - DNA, 25 bp, Homo sapien
gcactcgctagttggtgctgtggtg

SEQ ID NO: 263697 - DNA, 25 bp, Homo sapien
tggcactcgctagttggtgctgtgg

SEQ ID NO: 263698 - DNA, 25 bp, Homo sapien
tctgtgctcccctatagccaatctt

SEQ ID NO: 263699 - DNA, 25 bp, Homo sapien
tccaactcaggcctaagacaactga

SEQ ID NO: 263700 - DNA, 25 bp, Homo sapien
tgctcccctatagccaatcttttct

SEQ ID NO: 263701 - DNA, 25 bp, Homo sapien
tctctccaactcaggcctaagacaa

SEQ ID NO: 263702 - DNA, 25 bp, Homo sapien
ctcgccttgtcccaaaggtcgctga

SEQ ID NO: 263703 - DNA, 25 bp, Homo sapien
ttgtcccaaaggtcgctgatccctt

SEQ ID NO: 263704 - DNA, 25 bp, Homo sapien
ccaaaggtcgctgatcccttccaaa

SEQ ID NO: 263705 - DNA, 25 bp, Homo sapien
ggtcgctgatcccttccaaaggtaa

SEQ ID NO: 263706 - DNA, 25 bp, Homo sapien
taggagctgaggaatctagagggaa

SEQ ID NO: 263707 - DNA, 25 bp, Homo sapien
tgagcttaactttagaaggacaggt

SEQ ID NO: 263708 - DNA, 25 bp, Homo sapien
cttgcaccaaggaacatgagaaacg

SEQ ID NO: 263709 - DNA, 25 bp, Homo sapien
tagaggaatcattagtgagcttaac

SEQ ID NO: 263710 - DNA, 25 bp, Homo sapien
gaattctttgcagcgacttgtagtt

SEQ ID NO: 263711 - DNA, 25 bp, Homo sapien
aattcatcagcaagctggtcagggt

SEQ ID NO: 263712 - DNA, 25 bp, Homo sapien
tctttgcagcgacttgtagttcagc

SEQ ID NO: 263713 - DNA, 25 bp, Homo sapien
tgaattcatcagcaagctggtcagg

SEQ ID NO: 263714 - DNA, 25 bp, Homo sapien
ttacaacatgggtgttaacgggcat

SEQ ID NO: 263715 - DNA, 25 bp, Homo sapien
cttacaacatgggtgttaacgggca

SEQ ID NO: 263716 - DNA, 25 bp, Homo sapien
tggcgggcggctcgggctcagctgc

SEQ ID NO: 263717 - DNA, 25 bp, Homo sapien
gggctcagctgcttcaccgggttat

SEQ ID NO: 263718 - DNA, 25 bp, Homo sapien
ggcggctcgggctcagctgcttcac

SEQ ID NO: 263719 - DNA, 25 bp, Homo sapien
tcagctgcttcaccgggttattttg

SEQ ID NO: 263720 - DNA, 25 bp, Homo sapien
ggagtagagcgcgtgccggggccgg

SEQ ID NO: 263721 - DNA, 25 bp, Homo sapien
ctttccgttacaggagtagagcgcg

SEQ ID NO: 263722 - DNA, 25 bp, Homo sapien
tccgttacaggagtagagcgcgtgc

SEQ ID NO: 263723 - DNA, 25 bp, Homo sapien
ccgttacaggagtagagcgcgtgcc

SEQ ID NO: 263724 - DNA, 25 bp, Homo sapien
tggtgatcaagtccctgcagatccg

SEQ ID NO: 263725 - DNA, 25 bp, Homo sapien
tcacatacgcgtagttggaggagcc

SEQ ID NO: 263726 - DNA, 25 bp, Homo sapien
tggacttatccagatttttaacgaa

SEQ ID NO: 263727 - DNA, 25 bp, Homo sapien
tgctccgcgtccttcgtatgctgga

SEQ ID NO: 263728 - DNA, 25 bp, Homo sapien
cttggaaccattttcatcacaaacc

SEQ ID NO: 263729 - DNA, 25 bp, Homo sapien
ccattttcatcacaaaccacgttac

SEQ ID NO: 263730 - DNA, 25 bp, Homo sapien
ggaaccattttcatcacaaaccacg

SEQ ID NO: 263731 - DNA, 25 bp, Homo sapien
gaaccattttcatcacaaaccacgt

SEQ ID NO: 263732 - DNA, 25 bp, Homo sapien
cacacttaaggcgggcccgaacttg

SEQ ID NO: 263733 - DNA, 25 bp, Homo sapien
ctgtgcatcttcatgcctttcaaag

SEQ ID NO: 263734 - DNA, 25 bp, Homo sapien
gcatcttcatgcctttcaaagctta

SEQ ID NO: 263735 - DNA, 25 bp, Homo sapien
tcatctacagctttctgtgcatctt

SEQ ID NO: 263736 - DNA, 25 bp, Homo sapien
ctcatctacagctttctgtgcatct

SEQ ID NO: 263737 - DNA, 25 bp, Homo sapien
cgtctgccgttccacttttttctga

SEQ ID NO: 263738 - DNA, 25 bp, Homo sapien
cttttttctgagctcgaccaacgta

SEQ ID NO: 263739 - DNA, 25 bp, Homo sapien
tgagctcgaccaacgtaaatttgtt

SEQ ID NO: 263740 - DNA, 25 bp, Homo sapien
aaatgtgcgcttaagttccgtctgc

SEQ ID NO: 263741 - DNA, 25 bp, Homo sapien
aacgctttccggagacgttcatcat

SEQ ID NO: 263742 - DNA, 25 bp, Homo sapien
tacaaaaccaaaccctttgctgcga

SEQ ID NO: 263743 - DNA, 25 bp, Homo sapien
ttccatcataacctttgcactagtg

SEQ ID NO: 263744 - DNA, 25 bp, Homo sapien
caaatggagaaaacgctttccggag

SEQ ID NO: 263745 - DNA, 25 bp, Homo sapien
aggtgctcgctggttgggcacagct

SEQ ID NO: 263746 - DNA, 25 bp, Homo sapien
gaaggaggtgctcgctggttgggca

SEQ ID NO: 263747 - DNA, 25 bp, Homo sapien
gaggtgctcgctggttgggcacagc

SEQ ID NO: 263748 - DNA, 25 bp, Homo sapien
aggaggtgctcgctggttgggcaca

SEQ ID NO: 263749 - DNA, 25 bp, Homo sapien
agtctgtgggacagctgtcatgaag

SEQ ID NO: 263750 - DNA, 25 bp, Homo sapien
gagtctgtgggacagctgtcatgaa

SEQ ID NO: 263751 - DNA, 25 bp, Homo sapien
tctgtgggacagctgtcatgaagta

SEQ ID NO: 263752 - DNA, 25 bp, Homo sapien
ctgagtctgtgggacagctgtcatg

SEQ ID NO: 263753 - DNA, 25 bp, Homo sapien
aaatggtactctaggagcacctggg

SEQ ID NO: 263754 - DNA, 25 bp, Homo sapien
ggtactctaggagcacctgggcgga

SEQ ID NO: 263755 - DNA, 25 bp, Homo sapien
tactctaggagcacctgggcggata

SEQ ID NO: 263756 - DNA, 25 bp, Homo sapien
atggtactctaggagcacctgggcg

SEQ ID NO: 263757 - DNA, 25 bp, Homo sapien
cgtgcgcacagcaggggtagctgca

SEQ ID NO: 263758 - DNA, 25 bp, Homo sapien
atttataccgtggaaccgtgcgcac

SEQ ID NO: 263759 - DNA, 25 bp, Homo sapien
ttataccgtggaaccgtgcgcacag

SEQ ID NO: 263760 - DNA, 25 bp, Homo sapien
atatttataccgtggaaccgtgcgc

SEQ ID NO: 263761 - DNA, 25 bp, Homo sapien
caacctggaggcagtcaaagtttcc

SEQ ID NO: 263762 - DNA, 25 bp, Homo sapien
ccaacctggaggcagtcaaagtttc

SEQ ID NO: 263763 - DNA, 25 bp, Homo sapien
gactcgagcatataaagaagttctg

SEQ ID NO: 263764 - DNA, 25 bp, Homo sapien
gaacaccggtagcactgttaactgc

SEQ ID NO: 263765 - DNA, 25 bp, Homo sapien
ttaaacagttggaacaccggtagca

SEQ ID NO: 263766 - DNA, 25 bp, Homo sapien
gtgactctggagactcgagcatata

SEQ ID NO: 263767 - DNA, 25 bp, Homo sapien
tcccatagtttctcgatgtttagat

SEQ ID NO: 263768 - DNA, 25 bp, Homo sapien
cccatagtttctcgatgtttagata

SEQ ID NO: 263769 - DNA, 25 bp, Homo sapien
ttcccatagtttctcgatgtttaga

SEQ ID NO: 263770 - DNA, 25 bp, Homo sapien
ccatagtttctcgatgtttagatat

SEQ ID NO: 263771 - DNA, 25 bp, Homo sapien
cagggtctacaaaacattaactggt

SEQ ID NO: 263772 - DNA, 25 bp, Homo sapien
aatggacattttgagctattccaca

SEQ ID NO: 263773 - DNA, 25 bp, Homo sapien
atccaaaccatgtttccttgctcag

SEQ ID NO: 263774 - DNA, 25 bp, Homo sapien
tataatccaaaccatgtttccttgc

SEQ ID NO: 263775 - DNA, 25 bp, Homo sapien
ggttactgagttgagagagcccaaa

SEQ ID NO: 263776 - DNA, 25 bp, Homo sapien
tggcggaagatctgccttcagcaac

SEQ ID NO: 263777 - DNA, 25 bp, Homo sapien
tgtccagtgagctctcaggaagtgg

SEQ ID NO: 263778 - DNA, 25 bp, Homo sapien
ccaacccttggagtgggcatggagc

SEQ ID NO: 263779 - DNA, 25 bp, Homo sapien
ctgtattgggaattccacccagtat

SEQ ID NO: 263780 - DNA, 25 bp, Homo sapien
tattgggaattccacccagtattta

SEQ ID NO: 263781 - DNA, 25 bp, Homo sapien
tgtattgggaattccacccagtatt

SEQ ID NO: 263782 - DNA, 25 bp, Homo sapien
gggcaagtttgcacccaggcgacct

SEQ ID NO: 263783 - DNA, 25 bp, Homo sapien
cactgaagctttctgaatcttgaga

SEQ ID NO: 263784 - DNA, 25 bp, Homo sapien
tgagaagggtgacttgatagatcag

SEQ ID NO: 263785 - DNA, 25 bp, Homo sapien
ccatgtatttccagggcaagtttgc

SEQ ID NO: 263786 - DNA, 25 bp, Homo sapien
taaatccttacgatgtggctgagaa

SEQ ID NO: 263787 - DNA, 25 bp, Homo sapien
agtgcttagggcctctaaatcctta

SEQ ID NO: 263788 - DNA, 25 bp, Homo sapien
ggcttttggacatccaggaaagaat

SEQ ID NO: 263789 - DNA, 25 bp, Homo sapien
atgaggctcgatgagggctccggaa

SEQ ID NO: 263790 - DNA, 25 bp, Homo sapien
gaaaggagctgtgcttggccttgcc

SEQ ID NO: 263791 - DNA, 25 bp, Homo sapien
ctgtcctgagaagcaaagtactgtg

SEQ ID NO: 263792 - DNA, 25 bp, Homo sapien
gcaaaggcacatgccctaggggaaa

SEQ ID NO: 263793 - DNA, 25 bp, Homo sapien
gagcagcctcgggcagtgcaaaggc

SEQ ID NO: 263794 - DNA, 25 bp, Homo sapien
ggaatcagcgtttccattcttaaca

SEQ ID NO: 263795 - DNA, 25 bp, Homo sapien
ctgcaaagcgggtctgaggggaatc

SEQ ID NO: 263796 - DNA, 25 bp, Homo sapien
cgggtctgaggggaatcagcgtttc

SEQ ID NO: 263797 - DNA, 25 bp, Homo sapien
caaagcgggtctgaggggaatcagc

SEQ ID NO: 263798 - DNA, 25 bp, Homo sapien
tgacatctcggtaaaatgcagggtt

SEQ ID NO: 263799 - DNA, 25 bp, Homo sapien
gacatctcggtaaaatgcagggtta

SEQ ID NO: 263800 - DNA, 25 bp, Homo sapien
ccttggtgtgcaaagggacttctcc

SEQ ID NO: 263801 - DNA, 25 bp, Homo sapien
atccccagccttgtggccagtcttg

SEQ ID NO: 263802 - DNA, 25 bp, Homo sapien
ggtcgaatatcaaccattggcacca

SEQ ID NO: 263803 - DNA, 25 bp, Homo sapien
ggaaaagctagtaaggatgctgcca

SEQ ID NO: 263804 - DNA, 25 bp, Homo sapien
gcggttgacaggcaaggaacatgtt

SEQ ID NO: 263805 - DNA, 25 bp, Homo sapien
tgtggactggactgctcagagcatc

SEQ ID NO: 263806 - DNA, 25 bp, Homo sapien
agaaccacaccagctgtcaggccag

SEQ ID NO: 263807 - DNA, 25 bp, Homo sapien
gaggagaacccctgagagagatgat

SEQ ID NO: 263808 - DNA, 25 bp, Homo sapien
gtaaaggaatgaaacttgacattgt

SEQ ID NO: 263809 - DNA, 25 bp, Homo sapien
ctcagacctgaatcatttaacaaac

SEQ ID NO: 263810 - DNA, 25 bp, Homo sapien
aaatatctggttcaataacataggg

SEQ ID NO: 263811 - DNA, 25 bp, Homo sapien
tactataccttctcagatactctca

SEQ ID NO: 263812 - DNA, 25 bp, Homo sapien
tctggttacctgagacatactatac

SEQ ID NO: 263813 - DNA, 25 bp, Homo sapien
gaaattgggcaccttttatgatgga

SEQ ID NO: 263814 - DNA, 25 bp, Homo sapien
gaaaggagttccttctcaaactgca

SEQ ID NO: 263815 - DNA, 25 bp, Homo sapien
gcaacaatagccacttctaaggaat

SEQ ID NO: 263816 - DNA, 25 bp, Homo sapien
tgaaaatagtcatgaagcctccaga

SEQ ID NO: 263817 - DNA, 25 bp, Homo sapien
tccaggtaaaaagactatgtcaggt

SEQ ID NO: 263818 - DNA, 25 bp, Homo sapien
aacagtatgcaaatagccctttgct

SEQ ID NO: 263819 - DNA, 25 bp, Homo sapien
tctatgaaggtaataactcaccgtg

SEQ ID NO: 263820 - DNA, 25 bp, Homo sapien
tatttcttcatctcagaggtagtct

SEQ ID NO: 263821 - DNA, 25 bp, Homo sapien
acttgaatgtctatattacacatac

SEQ ID NO: 263822 - DNA, 25 bp, Homo sapien
gaatgtctatattacacatacactg

SEQ ID NO: 263823 - DNA, 25 bp, Homo sapien
cactgttatttgaaacactctgctt

SEQ ID NO: 263824 - DNA, 25 bp, Homo sapien
catacactgttatttgaaacactct

SEQ ID NO: 263825 - DNA, 25 bp, Homo sapien
tggtccccaaaccattgatgttctg

SEQ ID NO: 263826 - DNA, 25 bp, Homo sapien
tatgtactgtaatgggaagcgattc

SEQ ID NO: 263827 - DNA, 25 bp, Homo sapien
tatagctagacatgatgatggtccc

SEQ ID NO: 263828 - DNA, 25 bp, Homo sapien
gcatattttaccgtttatccagctg

SEQ ID NO: 263829 - DNA, 25 bp, Homo sapien
cacttggaagtcacctttacttgcc

SEQ ID NO: 263830 - DNA, 25 bp, Homo sapien
gatattgggataagccagtgtctag

SEQ ID NO: 263831 - DNA, 25 bp, Homo sapien
tgaaggaaccgctgaagaaccagag

SEQ ID NO: 263832 - DNA, 25 bp, Homo sapien
tgctttaatatactgaacacttgga

SEQ ID NO: 263833 - DNA, 25 bp, Homo sapien
caagaagaggaaatcgggtggcacc

SEQ ID NO: 263834 - DNA, 25 bp, Homo sapien
acaccaggtgtgtggaagcggccaa

SEQ ID NO: 263835 - DNA, 25 bp, Homo sapien
tatgatctctatgctgacccggacg

SEQ ID NO: 263836 - DNA, 25 bp, Homo sapien
ggtattatataagcccttgcgggag

SEQ ID NO: 263837 - DNA, 25 bp, Homo sapien
gaggcatttcgtgatccatggttgc

SEQ ID NO: 263838 - DNA, 25 bp, Homo sapien
agtctagagaaggaatccgaaggtg

SEQ ID NO: 263839 - DNA, 25 bp, Homo sapien
ctcccgtgaagagcgagtctagaga

SEQ ID NO: 263840 - DNA, 25 bp, Homo sapien
tacgactcgaatttctgcaatcagc

SEQ ID NO: 263841 - DNA, 25 bp, Homo sapien
ccaatgctaaggacagacatgaagg

SEQ ID NO: 263842 - DNA, 25 bp, Homo sapien
atgcagggagtctaggagagaggat

SEQ ID NO: 263843 - DNA, 25 bp, Homo sapien
tgcctgctgggcttagtgcaccaat

SEQ ID NO: 263844 - DNA, 25 bp, Homo sapien
tagtgcaccaatgctaaggacagac

SEQ ID NO: 263845 - DNA, 25 bp, Homo sapien
gctgggctgctgatagactgattga

SEQ ID NO: 263846 - DNA, 25 bp, Homo sapien
aatgacagccacacagcatggacct

SEQ ID NO: 263847 - DNA, 25 bp, Homo sapien
tgtcccaaaggtgcaggcaaactcc

SEQ ID NO: 263848 - DNA, 25 bp, Homo sapien
gacaagacatggatgtaggcagaca

SEQ ID NO: 263849 - DNA, 25 bp, Homo sapien
tgtatctcataacaacagaagctgc

SEQ ID NO: 263850 - DNA, 25 bp, Homo sapien
taaaacgccaacttatgtggatggg

SEQ ID NO: 263851 - DNA, 25 bp, Homo sapien
gatccctagactgagctgttcccag

SEQ ID NO: 263852 - DNA, 25 bp, Homo sapien
gaagtgacaacctctcctgaacctg

SEQ ID NO: 263853 - DNA, 25 bp, Homo sapien
tgagctggagagttcacaccaaacc

SEQ ID NO: 263854 - DNA, 25 bp, Homo sapien
tggaacaatggtactgtcggcctga

SEQ ID NO: 263855 - DNA, 25 bp, Homo sapien
actgacgagcctcctggtcaccgtg

SEQ ID NO: 263856 - DNA, 25 bp, Homo sapien
aagtctcacactgacgagcctcctg

SEQ ID NO: 263857 - DNA, 25 bp, Homo sapien
agactcaggagagcagtgcttctgg

SEQ ID NO: 263858 - DNA, 25 bp, Homo sapien
cagggctccagatagggacagagac

SEQ ID NO: 263859 - DNA, 25 bp, Homo sapien
caggtcagtctagggcagggctcca

SEQ ID NO: 263860 - DNA, 25 bp, Homo sapien
caggcttgcttcctgtgctattcag

SEQ ID NO: 263861 - DNA, 25 bp, Homo sapien
gaccttgagattctatgtttccgtg

SEQ ID NO: 263862 - DNA, 25 bp, Homo sapien
gacttgaagcagacctaagtggctt

SEQ ID NO: 263863 - DNA, 25 bp, Homo sapien
gaagtactcacccagctaaatcatg

SEQ ID NO: 263864 - DNA, 25 bp, Homo sapien
gaagcattccaatcgtgactggctg

SEQ ID NO: 263865 - DNA, 25 bp, Homo sapien
tacaggagtataactagaactaagg

SEQ ID NO: 263866 - DNA, 25 bp, Homo sapien
ttctttgtgccagttgcctgatctg

SEQ ID NO: 263867 - DNA, 25 bp, Homo sapien
ggagaccccacctcatgtgatgact

SEQ ID NO: 263868 - DNA, 25 bp, Homo sapien
gaaggtatactaatggagacagagt

SEQ ID NO: 263869 - DNA, 25 bp, Homo sapien
tatgaaatttcagagatcccgcttc

SEQ ID NO: 263870 - DNA, 25 bp, Homo sapien
tcagatggaaatattaggagccctt

SEQ ID NO: 263871 - DNA, 25 bp, Homo sapien
tattaggagcccttcccggtcttca

SEQ ID NO: 263872 - DNA, 25 bp, Homo sapien
tcagagatcccgcttcagatggaaa

SEQ ID NO: 263873 - DNA, 25 bp, Homo sapien
tctgagaccttggaaagatgtgtgc

SEQ ID NO: 263874 - DNA, 25 bp, Homo sapien
tggaaagatgtgtgcgtgaccgcat

SEQ ID NO: 263875 - DNA, 25 bp, Homo sapien
tgtgaatagctgttgtgcttctgag

SEQ ID NO: 263876 - DNA, 25 bp, Homo sapien
agaagctgtgaatagctgttgtgct

SEQ ID NO: 263877 - DNA, 25 bp, Homo sapien
ctaatcccttccacactctccggtc

SEQ ID NO: 263878 - DNA, 25 bp, Homo sapien
tctaaatggagccatggccctttcc

SEQ ID NO: 263879 - DNA, 25 bp, Homo sapien
gaattcttgcctggtttcctcgggc

SEQ ID NO: 263880 - DNA, 25 bp, Homo sapien
ctgcaggtctaaatggagccatggc

SEQ ID NO: 263881 - DNA, 25 bp, Homo sapien
taaaggtctacagagcagagctatc

SEQ ID NO: 263882 - DNA, 25 bp, Homo sapien
tgcatctccatgtgcgtgctggcca

SEQ ID NO: 263883 - DNA, 25 bp, Homo sapien
gcagggtggcaccaagttccaaaca

SEQ ID NO: 263884 - DNA, 25 bp, Homo sapien
ttatttggaacattagcaagccagc

SEQ ID NO: 263885 - DNA, 25 bp, Homo sapien
gattatttaccaggtgagggcctct

SEQ ID NO: 263886 - DNA, 25 bp, Homo sapien
tcatgatataatccctaaaagctgc

SEQ ID NO: 263887 - DNA, 25 bp, Homo sapien
gaagtgtgctattcctgactgaaga

SEQ ID NO: 263888 - DNA, 25 bp, Homo sapien
actgaagaatacgaaaatgtcctcc

SEQ ID NO: 263889 - DNA, 25 bp, Homo sapien
cagaccttgagtgtacagctcccca

SEQ ID NO: 263890 - DNA, 25 bp, Homo sapien
gaaggtcgtggtaaacaacacacag

SEQ ID NO: 263891 - DNA, 25 bp, Homo sapien
tttcagaccttgagtgtacagctcc

SEQ ID NO: 263892 - DNA, 25 bp, Homo sapien
agctccccatctggactctcgtgaa

SEQ ID NO: 263893 - DNA, 25 bp, Homo sapien
ccagtgtgtggttcttcttttcctt

SEQ ID NO: 263894 - DNA, 25 bp, Homo sapien
tccttcttcttctggctgtggatgc

SEQ ID NO: 263895 - DNA, 25 bp, Homo sapien
cttggaccagtgtgtggttcttctt

SEQ ID NO: 263896 - DNA, 25 bp, Homo sapien
gaccagtgtgtggttcttcttttcc

SEQ ID NO: 263897 - DNA, 25 bp, Homo sapien
aaacttggtgatggcatagtagtca

SEQ ID NO: 263898 - DNA, 25 bp, Homo sapien
gcagaaacttggtgatggcatagta

SEQ ID NO: 263899 - DNA, 25 bp, Homo sapien
ttggctgcctccagagttgcagtgt

SEQ ID NO: 263900 - DNA, 25 bp, Homo sapien
gtcttctatcttcatggtggactca

SEQ ID NO: 263901 - DNA, 25 bp, Homo sapien
tttgatctggtgcttgttggcttta

SEQ ID NO: 263902 - DNA, 25 bp, Homo sapien
tatttgatctggtgcttgttggctt

SEQ ID NO: 263903 - DNA, 25 bp, Homo sapien
ctatttgatctggtgcttgttggct

SEQ ID NO: 263904 - DNA, 25 bp, Homo sapien
tgatctggtgcttgttggctttaac

SEQ ID NO: 263905 - DNA, 25 bp, Homo sapien
cacatcaatgtcatagagcttcttt

SEQ ID NO: 263906 - DNA, 25 bp, Homo sapien
atacgtcttcttctctccatcaggc

SEQ ID NO: 263907 - DNA, 25 bp, Homo sapien
acatcaatgtcatagagcttcttta

SEQ ID NO: 263908 - DNA, 25 bp, Homo sapien
ctccatcaggccgaatcagggtgtt

SEQ ID NO: 263909 - DNA, 25 bp, Homo sapien
tccaaagcatggtcctcaggagcca

SEQ ID NO: 263910 - DNA, 25 bp, Homo sapien
atgatccaaattttgttgaccatcc

SEQ ID NO: 263911 - DNA, 25 bp, Homo sapien
gttgaccatccaaagcatggtcctc

SEQ ID NO: 263912 - DNA, 25 bp, Homo sapien
tgatccaaattttgttgaccatcca

SEQ ID NO: 263913 - DNA, 25 bp, Homo sapien
gcttctggcatctcacctgtctctg

SEQ ID NO: 263914 - DNA, 25 bp, Homo sapien
agtgcgaaaatgtggaccccgctgc

SEQ ID NO: 263915 - DNA, 25 bp, Homo sapien
gagagaaaagcaccgctgggtcgtg

SEQ ID NO: 263916 - DNA, 25 bp, Homo sapien
acagttaaggaatctgaagatgaaa

SEQ ID NO: 263917 - DNA, 25 bp, Homo sapien
gctgccactcaaatggcagcttgat

SEQ ID NO: 263918 - DNA, 25 bp, Homo sapien
tcaaatggcagcttgattggaagct

SEQ ID NO: 263919 - DNA, 25 bp, Homo sapien
caagtgagcgtccaagtagcatctc

SEQ ID NO: 263920 - DNA, 25 bp, Homo sapien
acagcccgttgccatggccaagtga

SEQ ID NO: 263921 - DNA, 25 bp, Homo sapien
cttttcaaatcaaaacctgattcca

SEQ ID NO: 263922 - DNA, 25 bp, Homo sapien
tgacggcatagggttccaggagctc

SEQ ID NO: 263923 - DNA, 25 bp, Homo sapien
ctgacggcatagggttccaggagct

SEQ ID NO: 263924 - DNA, 25 bp, Homo sapien
ccaggagctccttttcaaatcaaaa

SEQ ID NO: 263925 - DNA, 25 bp, Homo sapien
ccagtcgtgttcacaactgtgttac

SEQ ID NO: 263926 - DNA, 25 bp, Homo sapien
tgtgatgtggcagacaccttactac

SEQ ID NO: 263927 - DNA, 25 bp, Homo sapien
gacttcgtctgtggtttccaggatt

SEQ ID NO: 263928 - DNA, 25 bp, Homo sapien
ctccagccacagtgattaaatcctt

SEQ ID NO: 263929 - DNA, 25 bp, Homo sapien
ttggattgtaatgtagggtctagga

SEQ ID NO: 263930 - DNA, 25 bp, Homo sapien
ggattgtaatgtagggtctaggacc

SEQ ID NO: 263931 - DNA, 25 bp, Homo sapien
tgtaatgtagggtctaggacccatg

SEQ ID NO: 263932 - DNA, 25 bp, Homo sapien
gattgtaatgtagggtctaggaccc

SEQ ID NO: 263933 - DNA, 25 bp, Homo sapien
ctccaacatcccctcgcgccgcttc

SEQ ID NO: 263934 - DNA, 25 bp, Homo sapien
gaggtaccagtgaaactttcggtca

SEQ ID NO: 263935 - DNA, 25 bp, Homo sapien
tcagggccttcgaatccaacccaag

SEQ ID NO: 263936 - DNA, 25 bp, Homo sapien
ccaacccaaggatttgagtccatcg

SEQ ID NO: 263937 - DNA, 25 bp, Homo sapien
ccatcgactgtcagggaggtaccag

SEQ ID NO: 263938 - DNA, 25 bp, Homo sapien
acatgaatgcttgttcgtttttcat

SEQ ID NO: 263939 - DNA, 25 bp, Homo sapien
atgaatgcttgttcgtttttcattt

SEQ ID NO: 263940 - DNA, 25 bp, Homo sapien
cacatgaatgcttgttcgtttttca

SEQ ID NO: 263941 - DNA, 25 bp, Homo sapien
tcacatgaatgcttgttcgtttttc

SEQ ID NO: 263942 - DNA, 25 bp, Homo sapien
ggtccattgagtacaaacattcgag

SEQ ID NO: 263943 - DNA, 25 bp, Homo sapien
cattcgaggtgaaatgtctctccaa

SEQ ID NO: 263944 - DNA, 25 bp, Homo sapien
gctagaagtagctcagggaatcttg

SEQ ID NO: 263945 - DNA, 25 bp, Homo sapien
aatttatttggtcgggtagcagagc

SEQ ID NO: 263946 - DNA, 25 bp, Homo sapien
gttacatcttaagtgacctacaggg

SEQ ID NO: 263947 - DNA, 25 bp, Homo sapien
tgtttatatgctcacaggtggactg

SEQ ID NO: 263948 - DNA, 25 bp, Homo sapien
tatgttggcaaaagcagactgtgta

SEQ ID NO: 263949 - DNA, 25 bp, Homo sapien
catggtggcatgaagtacaattcga

SEQ ID NO: 263950 - DNA, 25 bp, Homo sapien
tgttcctggagtatctaactttcag

SEQ ID NO: 263951 - DNA, 25 bp, Homo sapien
gggtgcatgctacaatacttctata

SEQ ID NO: 263952 - DNA, 25 bp, Homo sapien
tgctcaatgagttgctgttcctgga

SEQ ID NO: 263953 - DNA, 25 bp, Homo sapien
gaatacgtataagcacatttgactg

SEQ ID NO: 263954 - DNA, 25 bp, Homo sapien
ctcaccaaagcgacatcttccaatt

SEQ ID NO: 263955 - DNA, 25 bp, Homo sapien
accaaagcgacatcttccaattcct

SEQ ID NO: 263956 - DNA, 25 bp, Homo sapien
caaagcgacatcttccaattccttt

SEQ ID NO: 263957 - DNA, 25 bp, Homo sapien
cattcctcaccaaagcgacatcttc

SEQ ID NO: 263958 - DNA, 25 bp, Homo sapien
gattggtttgaacatagccaaactt

SEQ ID NO: 263959 - DNA, 25 bp, Homo sapien
taaaagattggtttgaacatagcca

SEQ ID NO: 263960 - DNA, 25 bp, Homo sapien
tttaaaagattggtttgaacatagc

SEQ ID NO: 263961 - DNA, 25 bp, Homo sapien
tggtttgaacatagccaaacttttg

SEQ ID NO: 263962 - DNA, 25 bp, Homo sapien
tgtgcttcatacttcaggcattgtc

SEQ ID NO: 263963 - DNA, 25 bp, Homo sapien
cattgtcctgtgtcagtagtcaaga

SEQ ID NO: 263964 - DNA, 25 bp, Homo sapien
tctccagtctttcgcatccggtgtt

SEQ ID NO: 263965 - DNA, 25 bp, Homo sapien
ttcgcatccggtgtttccgtgtctg

SEQ ID NO: 263966 - DNA, 25 bp, Homo sapien
gcaggaggagacgaaggctctgctg

SEQ ID NO: 263967 - DNA, 25 bp, Homo sapien
ctgaggcaggaggagacgaaggctc

SEQ ID NO: 263968 - DNA, 25 bp, Homo sapien
gaggcaggaggagacgaaggctctg

SEQ ID NO: 263969 - DNA, 25 bp, Homo sapien
ggcaggaggagacgaaggctctgct

SEQ ID NO: 263970 - DNA, 25 bp, Homo sapien
ccggctgacgtctccttgcgatgga

SEQ ID NO: 263971 - DNA, 25 bp, Homo sapien
tcgggcgcgggatcgccagtcttca

SEQ ID NO: 263972 - DNA, 25 bp, Homo sapien
catatccggacgaccaaggtagtcg

SEQ ID NO: 263973 - DNA, 25 bp, Homo sapien
ctgtagccgtatggtacgcctgtga

SEQ ID NO: 263974 - DNA, 25 bp, Homo sapien
gtccgggacgaaccagcaagccgct

SEQ ID NO: 263975 - DNA, 25 bp, Homo sapien
agcaagccgctctcggtccacacac

SEQ ID NO: 263976 - DNA, 25 bp, Homo sapien
tctcggtccacacacgctctgtctg

SEQ ID NO: 263977 - DNA, 25 bp, Homo sapien
ggatccgccgctgtccgggacgaac

SEQ ID NO: 263978 - DNA, 25 bp, Homo sapien
ttactcgggatccattctcacgcag

SEQ ID NO: 263979 - DNA, 25 bp, Homo sapien
cgggatgacaaagaccgcctcgggt

SEQ ID NO: 263980 - DNA, 25 bp, Homo sapien
tcggcgggatgacaaagaccgcctc

SEQ ID NO: 263981 - DNA, 25 bp, Homo sapien
cgcgtccgctcggcgggatgacaaa

SEQ ID NO: 263982 - DNA, 25 bp, Homo sapien
ctacaggatgagttttaatggatgc

SEQ ID NO: 263983 - DNA, 25 bp, Homo sapien
aactaaatttggtgctgtccagtgg

SEQ ID NO: 263984 - DNA, 25 bp, Homo sapien
gatgctggtgctaacatcgtatgaa

SEQ ID NO: 263985 - DNA, 25 bp, Homo sapien
tatggcgatggacttcagaacatcc

SEQ ID NO: 263986 - DNA, 25 bp, Homo sapien
tcaagtaagacctgatgctcgggga

SEQ ID NO: 263987 - DNA, 25 bp, Homo sapien
agtaagacctgatgctcggggagcc

SEQ ID NO: 263988 - DNA, 25 bp, Homo sapien
tgatgctcggggagccaaaacagga

SEQ ID NO: 263989 - DNA, 25 bp, Homo sapien
agacctgatgctcggggagccaaaa

SEQ ID NO: 263990 - DNA, 25 bp, Homo sapien
tactgacataatccgcactttaggg

SEQ ID NO: 263991 - DNA, 25 bp, Homo sapien
gaccaggcgagaataggcgtactgc

SEQ ID NO: 263992 - DNA, 25 bp, Homo sapien
tgatgctcagaatcgcagaatcggg

SEQ ID NO: 263993 - DNA, 25 bp, Homo sapien
ggcgtactgcctaatctcttaaagg

SEQ ID NO: 263994 - DNA, 25 bp, Homo sapien
aacggcggcgaaggcaaggctgagg

SEQ ID NO: 263995 - DNA, 25 bp, Homo sapien
gcacggacctggcgggaacttccag

SEQ ID NO: 263996 - DNA, 25 bp, Homo sapien
tgggacacttctctcgcctcaaagc

SEQ ID NO: 263997 - DNA, 25 bp, Homo sapien
agcaaccacgcaaaagtacgcccgg

SEQ ID NO: 263998 - DNA, 25 bp, Homo sapien
acgccgtcagcaaggcgaaatgggt

SEQ ID NO: 263999 - DNA, 25 bp, Homo sapien
gtctggccagggctcgacgccgtca

SEQ ID NO: 264000 - DNA, 25 bp, Homo sapien
tcgacgccgtcagcaaggcgaaatg

SEQ ID NO: 264001 - DNA, 25 bp, Homo sapien
ggctcgacgccgtcagcaaggcgaa

SEQ ID NO: 264002 - DNA, 25 bp, Homo sapien
cgccggcggccacggtggtggagcc

SEQ ID NO: 264003 - DNA, 25 bp, Homo sapien
aggagaaaacgccgcctgtgctggt

SEQ ID NO: 264004 - DNA, 25 bp, Homo sapien
ccgaaggagaaaacgccgcctgtgc

SEQ ID NO: 264005 - DNA, 25 bp, Homo sapien
agaaaacgccgcctgtgctggtccc

SEQ ID NO: 264006 - DNA, 25 bp, Homo sapien
cgccgggcggctagattaagtgctt

SEQ ID NO: 264007 - DNA, 25 bp, Homo sapien
cagataaggtcccatgtggcacaaa

SEQ ID NO: 264008 - DNA, 25 bp, Homo sapien
gaactatacgtggattctggaaacc

SEQ ID NO: 264009 - DNA, 25 bp, Homo sapien
actgacacatcgctaaagctccggg

SEQ ID NO: 264010 - DNA, 25 bp, Homo sapien
tactaatctgcacatactgcagaaa

SEQ ID NO: 264011 - DNA, 25 bp, Homo sapien
agaaaattaccactaataaacactg

SEQ ID NO: 264012 - DNA, 25 bp, Homo sapien
cagaaaattaccactaataaacact

SEQ ID NO: 264013 - DNA, 25 bp, Homo sapien
actaatctgcacatactgcagaaaa

SEQ ID NO: 264014 - DNA, 25 bp, Homo sapien
acctaaaacagagccttgcacatgg

SEQ ID NO: 264015 - DNA, 25 bp, Homo sapien
gaagtatcttgttgacagtgtgcac

SEQ ID NO: 264016 - DNA, 25 bp, Homo sapien
gttccacgaatgacaatagcctaag

SEQ ID NO: 264017 - DNA, 25 bp, Homo sapien
cagaacctgttgttgagcgagtaga

SEQ ID NO: 264018 - DNA, 25 bp, Homo sapien
tggaggagcttattaagggtagaac

SEQ ID NO: 264019 - DNA, 25 bp, Homo sapien
ttataatcaagtaccaaacgatggc

SEQ ID NO: 264020 - DNA, 25 bp, Homo sapien
ggcaaagagctaatcactgtgaggg

SEQ ID NO: 264021 - DNA, 25 bp, Homo sapien
caaacgatggcaaagagatactgca

SEQ ID NO: 264022 - DNA, 25 bp, Homo sapien
tcctcctagagtgaacccagtggca

SEQ ID NO: 264023 - DNA, 25 bp, Homo sapien
tagttgctggagttgaagtacttcc

SEQ ID NO: 264024 - DNA, 25 bp, Homo sapien
tttagatccaaagagcccggttcca

SEQ ID NO: 264025 - DNA, 25 bp, Homo sapien
gatttccaaaattgagccccacaga

SEQ ID NO: 264026 - DNA, 25 bp, Homo sapien
acaaaatgctatactgagctgtctc

SEQ ID NO: 264027 - DNA, 25 bp, Homo sapien
tgtggctgtgaaatgtgctgcactc

SEQ ID NO: 264028 - DNA, 25 bp, Homo sapien
cctcagggagtgacaacacttctaa

SEQ ID NO: 264029 - DNA, 25 bp, Homo sapien
catagtatctgccactaatcacgca

SEQ ID NO: 264030 - DNA, 25 bp, Homo sapien
ccagagttaatcctgtagttatagt

SEQ ID NO: 264031 - DNA, 25 bp, Homo sapien
cagagttaatcctgtagttatagtt

SEQ ID NO: 264032 - DNA, 25 bp, Homo sapien
tccctttggcctcctacatatctca

SEQ ID NO: 264033 - DNA, 25 bp, Homo sapien
ggcctcctacatatctcaccacaaa

SEQ ID NO: 264034 - DNA, 25 bp, Homo sapien
tctagttctatcttgatgtcccttt

SEQ ID NO: 264035 - DNA, 25 bp, Homo sapien
gttctatcttgatgtccctttggcc

SEQ ID NO: 264036 - DNA, 25 bp, Homo sapien
cagatgctgcaggtttattgaatcc

SEQ ID NO: 264037 - DNA, 25 bp, Homo sapien
ttattgaatcctaaactgaagcctg

SEQ ID NO: 264038 - DNA, 25 bp, Homo sapien
gaatcctaaactgaagcctgttgta

SEQ ID NO: 264039 - DNA, 25 bp, Homo sapien
gatgctgcaggtttattgaatccta

SEQ ID NO: 264040 - DNA, 25 bp, Homo sapien
tgatgtcagagcagacgaaagagtc

SEQ ID NO: 264041 - DNA, 25 bp, Homo sapien
ggagttgatgtcagagcagacgaaa

SEQ ID NO: 264042 - DNA, 25 bp, Homo sapien
gcagacgaaagagtcagaccgctag

SEQ ID NO: 264043 - DNA, 25 bp, Homo sapien
tcagagcagacgaaagagtcagacc

SEQ ID NO: 264044 - DNA, 25 bp, Homo sapien
ctaaagagaggcctgttgatgcagt

SEQ ID NO: 264045 - DNA, 25 bp, Homo sapien
gctgttgtcccacccaaattattta

SEQ ID NO: 264046 - DNA, 25 bp, Homo sapien
ctgttgatgcagttgtagttgtggc

SEQ ID NO: 264047 - DNA, 25 bp, Homo sapien
tgttgtcccacccaaattatttaga

SEQ ID NO: 264048 - DNA, 25 bp, Homo sapien
ctgaggagctactgaaatctatacc

SEQ ID NO: 264049 - DNA, 25 bp, Homo sapien
gaaatctataccaccaaggccttca

SEQ ID NO: 264050 - DNA, 25 bp, Homo sapien
aaagtcaaccctaaagcattctgtc

SEQ ID NO: 264051 - DNA, 25 bp, Homo sapien
tcccaaagtcaaccctaaagcattc

SEQ ID NO: 264052 - DNA, 25 bp, Homo sapien
tctttctgggaaagcgatttcacaa

SEQ ID NO: 264053 - DNA, 25 bp, Homo sapien
gagcttataagcagttgagccagga

SEQ ID NO: 264054 - DNA, 25 bp, Homo sapien
taaaaggagacacctacatgtctgg

SEQ ID NO: 264055 - DNA, 25 bp, Homo sapien
tctggctctgctagggttttacaaa

SEQ ID NO: 264056 - DNA, 25 bp, Homo sapien
actcaacatggcaaataaggactcc

SEQ ID NO: 264057 - DNA, 25 bp, Homo sapien
tggatccctgattaccatggacccc

SEQ ID NO: 264058 - DNA, 25 bp, Homo sapien
tttgcctcagtaatacacgtggagc

SEQ ID NO: 264059 - DNA, 25 bp, Homo sapien
cacgtggagctctacaaaagcttcc

SEQ ID NO: 264060 - DNA, 25 bp, Homo sapien
tttacctctgcacatggggttttac

SEQ ID NO: 264061 - DNA, 25 bp, Homo sapien
cagcaagtcactgtatcccaaaaaa

SEQ ID NO: 264062 - DNA, 25 bp, Homo sapien
tctttcatccaactgtaatttatgt

SEQ ID NO: 264063 - DNA, 25 bp, Homo sapien
taggaggttaacgtaggacaatcac

SEQ ID NO: 264064 - DNA, 25 bp, Homo sapien
aatcaagcattttgggcagactgct

SEQ ID NO: 264065 - DNA, 25 bp, Homo sapien
actgtgcccggctagcttttgcatt

SEQ ID NO: 264066 - DNA, 25 bp, Homo sapien
agggcaaaaccctgtggctacaaat

SEQ ID NO: 264067 - DNA, 25 bp, Homo sapien
aaaataagcacctaaaaatcaagca

SEQ ID NO: 264068 - DNA, 25 bp, Homo sapien
ttaaggccctatcagtacagaatac

SEQ ID NO: 264069 - DNA, 25 bp, Homo sapien
tcaaccctcgtcatgaactcagaag

SEQ ID NO: 264070 - DNA, 25 bp, Homo sapien
tgttgttgcctaccagtttaactcc

SEQ ID NO: 264071 - DNA, 25 bp, Homo sapien
taactcctgataactttacctgaca

SEQ ID NO: 264072 - DNA, 25 bp, Homo sapien
tctggtcttgttcccgttttatcac

SEQ ID NO: 264073 - DNA, 25 bp, Homo sapien
tctgcctacaatttaataagttaaa

SEQ ID NO: 264074 - DNA, 25 bp, Homo sapien
attataccatctgcctacaatttaa

SEQ ID NO: 264075 - DNA, 25 bp, Homo sapien
actcttcaattaaaatgccttaagg

SEQ ID NO: 264076 - DNA, 25 bp, Homo sapien
taaactcttcaattaaaatgcctta

SEQ ID NO: 264077 - DNA, 25 bp, Homo sapien
catctggcatgctgcaatggaatca

SEQ ID NO: 264078 - DNA, 25 bp, Homo sapien
tacaaaacttctcacaacgagatgc

SEQ ID NO: 264079 - DNA, 25 bp, Homo sapien
gacataaaacgagactggcacaata

SEQ ID NO: 264080 - DNA, 25 bp, Homo sapien
cagttagttcttcaacatgcattag

SEQ ID NO: 264081 - DNA, 25 bp, Homo sapien
gtattagagtattaagacacaagaa

SEQ ID NO: 264082 - DNA, 25 bp, Homo sapien
aatatagcaaaaaagcacgtatggc

SEQ ID NO: 264083 - DNA, 25 bp, Homo sapien
gcacgtatggcttctctggatgatt

SEQ ID NO: 264084 - DNA, 25 bp, Homo sapien
aatgcaaaacatgtattaaggtcat

SEQ ID NO: 264085 - DNA, 25 bp, Homo sapien
ggaggtagattttcatccttcagag

SEQ ID NO: 264086 - DNA, 25 bp, Homo sapien
agattttcaacatcctggcagatga

SEQ ID NO: 264087 - DNA, 25 bp, Homo sapien
caggaggtagattttcatccttcag

SEQ ID NO: 264088 - DNA, 25 bp, Homo sapien
tggagattttcaacatcctggcaga

SEQ ID NO: 264089 - DNA, 25 bp, Homo sapien
ctgcttcagagctttaatatcttct

SEQ ID NO: 264090 - DNA, 25 bp, Homo sapien
tatcttcttgtaccttaagcattgc

SEQ ID NO: 264091 - DNA, 25 bp, Homo sapien
tattccattggcagccaacgacagg

SEQ ID NO: 264092 - DNA, 25 bp, Homo sapien
tcttcttgaacttgtttctgctcct

SEQ ID NO: 264093 - DNA, 25 bp, Homo sapien
ggtaaaatggccataagttggtata

SEQ ID NO: 264094 - DNA, 25 bp, Homo sapien
gtaaaatggccataagttggtatac

SEQ ID NO: 264095 - DNA, 25 bp, Homo sapien
ttccctagaaaggacataggtgatg

SEQ ID NO: 264096 - DNA, 25 bp, Homo sapien
aaaatcaggcaccttgggaataggg

SEQ ID NO: 264097 - DNA, 25 bp, Homo sapien
aaacatggggcaatacaggttgagt

SEQ ID NO: 264098 - DNA, 25 bp, Homo sapien
tatctgcatacataaaatcaggcac

SEQ ID NO: 264099 - DNA, 25 bp, Homo sapien
atttcattcaccctactagactttt

SEQ ID NO: 264100 - DNA, 25 bp, Homo sapien
cattcaccctactagacttttagta

SEQ ID NO: 264101 - DNA, 25 bp, Homo sapien
cctgaaattcagctcagatgattct

SEQ ID NO: 264102 - DNA, 25 bp, Homo sapien
ttcctgaaattcagctcagatgatt

SEQ ID NO: 264103 - DNA, 25 bp, Homo sapien
gtggtgtcttctgggttcttaaagc

SEQ ID NO: 264104 - DNA, 25 bp, Homo sapien
aagtccaggtggtgtcttctgggtt

SEQ ID NO: 264105 - DNA, 25 bp, Homo sapien
gcaggagctgcatattcatgttgaa

SEQ ID NO: 264106 - DNA, 25 bp, Homo sapien
atgttgaagtccaggtggtgtcttc

SEQ ID NO: 264107 - DNA, 25 bp, Homo sapien
atttgcttgagtggcaagatggttt

SEQ ID NO: 264108 - DNA, 25 bp, Homo sapien
aaattgctgaaccaagattctgaag

SEQ ID NO: 264109 - DNA, 25 bp, Homo sapien
gttcttcaatctgctgcctgtactg

SEQ ID NO: 264110 - DNA, 25 bp, Homo sapien
gaggggttatatgtgaattatttgc

SEQ ID NO: 264111 - DNA, 25 bp, Homo sapien
tagactgaagttgtgccgctaaagc

SEQ ID NO: 264112 - DNA, 25 bp, Homo sapien
tttcatgaatagactgaagttgtgc

SEQ ID NO: 264113 - DNA, 25 bp, Homo sapien
gccgctaaagctacaaatgtttgat

SEQ ID NO: 264114 - DNA, 25 bp, Homo sapien
gaagttgtgccgctaaagctacaaa

SEQ ID NO: 264115 - DNA, 25 bp, Homo sapien
gcttctgctcgccttgtttcaaaca

SEQ ID NO: 264116 - DNA, 25 bp, Homo sapien
tagtaactctgggtgtgttctgcca

SEQ ID NO: 264117 - DNA, 25 bp, Homo sapien
ctgtgtaagtgttgcagccatggca

SEQ ID NO: 264118 - DNA, 25 bp, Homo sapien
tgaaaggagtgggtccagtagtaac

SEQ ID NO: 264119 - DNA, 25 bp, Homo sapien
cgaaaattttgactgggaaggcctg

SEQ ID NO: 264120 - DNA, 25 bp, Homo sapien
tacctttgtattcctcgagcccagc

SEQ ID NO: 264121 - DNA, 25 bp, Homo sapien
taacattgtcaaccaccacagaggg

SEQ ID NO: 264122 - DNA, 25 bp, Homo sapien
tcgtgcgagccactattcacatggg

SEQ ID NO: 264123 - DNA, 25 bp, Homo sapien
cacagtaacatgacaattccaactt

SEQ ID NO: 264124 - DNA, 25 bp, Homo sapien
gctctgctacattacaccacttatc

SEQ ID NO: 264125 - DNA, 25 bp, Homo sapien
tcttaagctctgctacattacacca

SEQ ID NO: 264126 - DNA, 25 bp, Homo sapien
gtaacatgacaattccaacttgttc

SEQ ID NO: 264127 - DNA, 25 bp, Homo sapien
aagaacctaagccacttgattgcaa

SEQ ID NO: 264128 - DNA, 25 bp, Homo sapien
gagccgaatggcgttccaaaactaa

SEQ ID NO: 264129 - DNA, 25 bp, Homo sapien
caaaactaactcccagagatggctg

SEQ ID NO: 264130 - DNA, 25 bp, Homo sapien
cagtgccaatacctgagccgaatgg

SEQ ID NO: 264131 - DNA, 25 bp, Homo sapien
tccaaaaccagagctagttccaaat

SEQ ID NO: 264132 - DNA, 25 bp, Homo sapien
ccaaaaccagagctagttccaaatc

SEQ ID NO: 264133 - DNA, 25 bp, Homo sapien
tcctgagggtttatttgttgttcca

SEQ ID NO: 264134 - DNA, 25 bp, Homo sapien
catccaaaaccagagctagttccaa

SEQ ID NO: 264135 - DNA, 25 bp, Homo sapien
ctttaaatttgcctgaaatccaggc

SEQ ID NO: 264136 - DNA, 25 bp, Homo sapien
tacacctttaaatttgcctgaaatc

SEQ ID NO: 264137 - DNA, 25 bp, Homo sapien
aaatttgcctgaaatccaggcagaa

SEQ ID NO: 264138 - DNA, 25 bp, Homo sapien
cacctttaaatttgcctgaaatcca

SEQ ID NO: 264139 - DNA, 25 bp, Homo sapien
ggtatttgtccctaagcactgcaca

SEQ ID NO: 264140 - DNA, 25 bp, Homo sapien
cctgccctttagtttatgagagaga

SEQ ID NO: 264141 - DNA, 25 bp, Homo sapien
aaaatgattagttaggcttgcacac

SEQ ID NO: 264142 - DNA, 25 bp, Homo sapien
aattaaatatgtcaaggtgccttcc

SEQ ID NO: 264143 - DNA, 25 bp, Homo sapien
gaatacataatctgtaagaatagca

SEQ ID NO: 264144 - DNA, 25 bp, Homo sapien
atattcatatcagaagttgaattcc

SEQ ID NO: 264145 - DNA, 25 bp, Homo sapien
ctaagtggcaccctgaaagagagtg

SEQ ID NO: 264146 - DNA, 25 bp, Homo sapien
taatatagctaacaactaagtggca

SEQ ID NO: 264147 - DNA, 25 bp, Homo sapien
caggattggacaccccaaaagtcaa

SEQ ID NO: 264148 - DNA, 25 bp, Homo sapien
ccaggattgctgaagttaaacccag

SEQ ID NO: 264149 - DNA, 25 bp, Homo sapien
aaagtcaaaccagctgatgccgtga

SEQ ID NO: 264150 - DNA, 25 bp, Homo sapien
gaaggagttgtcctcctgttccaaa

SEQ ID NO: 264151 - DNA, 25 bp, Homo sapien
caaattgattctagtataggcccta

SEQ ID NO: 264152 - DNA, 25 bp, Homo sapien
ctaacgaaatcatggctaaggcagt

SEQ ID NO: 264153 - DNA, 25 bp, Homo sapien
tacatattcacaagatgccctgcag

SEQ ID NO: 264154 - DNA, 25 bp, Homo sapien
aacggtgctgctatggattctctca

SEQ ID NO: 264155 - DNA, 25 bp, Homo sapien
taagaacagctactgacacctataa

SEQ ID NO: 264156 - DNA, 25 bp, Homo sapien
agaacagctactgacacctataaag

SEQ ID NO: 264157 - DNA, 25 bp, Homo sapien
ttaagaacagctactgacacctata

SEQ ID NO: 264158 - DNA, 25 bp, Homo sapien
aacagctactgacacctataaagaa

SEQ ID NO: 264159 - DNA, 25 bp, Homo sapien
gactgcactgcttctcaaccaaggg

SEQ ID NO: 264160 - DNA, 25 bp, Homo sapien
tagaaattctcgacaccagaaggag

SEQ ID NO: 264161 - DNA, 25 bp, Homo sapien
caaccaagggagaacgacttgccag

SEQ ID NO: 264162 - DNA, 25 bp, Homo sapien
ccagaaggagtaaatgctcagcaca

SEQ ID NO: 264163 - DNA, 25 bp, Homo sapien
taaaggtagatatttgttgattcaa

SEQ ID NO: 264164 - DNA, 25 bp, Homo sapien
tgattcaaggactgctcagaactgt

SEQ ID NO: 264165 - DNA, 25 bp, Homo sapien
caaacctactctaagcttaatgtgc

SEQ ID NO: 264166 - DNA, 25 bp, Homo sapien
tctaaacatcttgatcaaacctact

SEQ ID NO: 264167 - DNA, 25 bp, Homo sapien
tctaaatactccgaggatctggtat

SEQ ID NO: 264168 - DNA, 25 bp, Homo sapien
gaggatctggtatatgagccattag

SEQ ID NO: 264169 - DNA, 25 bp, Homo sapien
aatactccgaggatctggtatatga

SEQ ID NO: 264170 - DNA, 25 bp, Homo sapien
agttcctctaaatactccgaggatc

SEQ ID NO: 264171 - DNA, 25 bp, Homo sapien
tatttaattcactatacttggtaaa

SEQ ID NO: 264172 - DNA, 25 bp, Homo sapien
gcaccgacttttcctactccgtgag

SEQ ID NO: 264173 - DNA, 25 bp, Homo sapien
gttgcataattggaacttagaagta

SEQ ID NO: 264174 - DNA, 25 bp, Homo sapien
tattttgcaccgacttttcctactc

SEQ ID NO: 264175 - DNA, 25 bp, Homo sapien
acttctcagtgcaaccagatattcc

SEQ ID NO: 264176 - DNA, 25 bp, Homo sapien
cacacttctcagtgcaaccagatat

SEQ ID NO: 264177 - DNA, 25 bp, Homo sapien
cacttctcagtgcaaccagatattc

SEQ ID NO: 264178 - DNA, 25 bp, Homo sapien
ccacacttctcagtgcaaccagata

SEQ ID NO: 264179 - DNA, 25 bp, Homo sapien
tcttcctcagtgctgaggagctgaa

SEQ ID NO: 264180 - DNA, 25 bp, Homo sapien
gaatcaaagatataacaccagtaaa

SEQ ID NO: 264181 - DNA, 25 bp, Homo sapien
gaaagttctcgagtatcatagagac

SEQ ID NO: 264182 - DNA, 25 bp, Homo sapien
tagagacattatttggcgcggctgg

SEQ ID NO: 264183 - DNA, 25 bp, Homo sapien
tcagtgtgagccgatctgttaccca

SEQ ID NO: 264184 - DNA, 25 bp, Homo sapien
gtgagccgatctgttacccactgcc

SEQ ID NO: 264185 - DNA, 25 bp, Homo sapien
attttcagtgtgagccgatctgtta

SEQ ID NO: 264186 - DNA, 25 bp, Homo sapien
gtgtgagccgatctgttacccactg

SEQ ID NO: 264187 - DNA, 25 bp, Homo sapien
cacaaaacttgatttaatagaaatt

SEQ ID NO: 264188 - DNA, 25 bp, Homo sapien
ttctggagacacaaaacttgattta

SEQ ID NO: 264189 - DNA, 25 bp, Homo sapien
gacacaaaacttgatttaatagaaa

SEQ ID NO: 264190 - DNA, 25 bp, Homo sapien
ctggagacacaaaacttgatttaat

SEQ ID NO: 264191 - DNA, 25 bp, Homo sapien
ggccccgggcgagagacggaggcta

SEQ ID NO: 264192 - DNA, 25 bp, Homo sapien
ccgcccgaggaccatgggtgggcca

SEQ ID NO: 264193 - DNA, 25 bp, Homo sapien
ggcgagagacggaggctacgcgcag

SEQ ID NO: 264194 - DNA, 25 bp, Homo sapien
agacggaggctacgcgcagggctgg

SEQ ID NO: 264195 - DNA, 25 bp, Homo sapien
cacggacgagcggatcctcgacctc

SEQ ID NO: 264196 - DNA, 25 bp, Homo sapien
ggatcctcgacctccgcggcaggga

SEQ ID NO: 264197 - DNA, 25 bp, Homo sapien
cgacctccgcggcagggacatctta

SEQ ID NO: 264198 - DNA, 25 bp, Homo sapien
cgcggcagggacatcttaagagctt

SEQ ID NO: 264199 - DNA, 25 bp, Homo sapien
tctgttcctttcaattgtcagcaga

SEQ ID NO: 264200 - DNA, 25 bp, Homo sapien
tctctgttcctttcaattgtcagca

SEQ ID NO: 264201 - DNA, 25 bp, Homo sapien
agagccacaactgcctgcatgtgca

SEQ ID NO: 264202 - DNA, 25 bp, Homo sapien
tcagagccacaactgcctgcatgtg

SEQ ID NO: 264203 - DNA, 25 bp, Homo sapien
gaaaatgagcagttagtgtagagta

SEQ ID NO: 264204 - DNA, 25 bp, Homo sapien
tagtgtagagtagtggttgccaacc

SEQ ID NO: 264205 - DNA, 25 bp, Homo sapien
cgggcgtggagggatagtttcagga

SEQ ID NO: 264206 - DNA, 25 bp, Homo sapien
acaattttcccatgacccgggcgtg

SEQ ID NO: 264207 - DNA, 25 bp, Homo sapien
tgaacctaacacaacttcaaaagct

SEQ ID NO: 264208 - DNA, 25 bp, Homo sapien
aagtcatcagatttcctagcaagaa

SEQ ID NO: 264209 - DNA, 25 bp, Homo sapien
gctttgatctgttgaaaagtcatca

SEQ ID NO: 264210 - DNA, 25 bp, Homo sapien
tacactgatttcctgaacctaacac

SEQ ID NO: 264211 - DNA, 25 bp, Homo sapien
gaaatcccagtagccattccagact

SEQ ID NO: 264212 - DNA, 25 bp, Homo sapien
caaggagtaatgaagcaaccagctc

SEQ ID NO: 264213 - DNA, 25 bp, Homo sapien
agtgatggtactgggtgcttaagcc

SEQ ID NO: 264214 - DNA, 25 bp, Homo sapien
cagactcacaggctttagcggtggt

SEQ ID NO: 264215 - DNA, 25 bp, Homo sapien
tagctctctggttgatgtctcctcc

SEQ ID NO: 264216 - DNA, 25 bp, Homo sapien
cttggctccccctggagacgccgcc

SEQ ID NO: 264217 - DNA, 25 bp, Homo sapien
gggtgaggcggacgccgcctacgta

SEQ ID NO: 264218 - DNA, 25 bp, Homo sapien
agggcgcaggcagagaatacgacac

SEQ ID NO: 264219 - DNA, 25 bp, Homo sapien
gggaaggatgctcgggtgaggcgga

SEQ ID NO: 264220 - DNA, 25 bp, Homo sapien
tacgacacaaagaagtcaaccgcca

SEQ ID NO: 264221 - DNA, 25 bp, Homo sapien
tagcccaaagaagaacgaacaggtc

SEQ ID NO: 264222 - DNA, 25 bp, Homo sapien
ctgccttcttatagcccaaagaaga

SEQ ID NO: 264223 - DNA, 25 bp, Homo sapien
tctgccttcttatagcccaaagaag

SEQ ID NO: 264224 - DNA, 25 bp, Homo sapien
tggtctccaacagacgtggcccggg

SEQ ID NO: 264225 - DNA, 25 bp, Homo sapien
ctccaacagacgtggcccgggacat

SEQ ID NO: 264226 - DNA, 25 bp, Homo sapien
gtctccaacagacgtggcccgggac

SEQ ID NO: 264227 - DNA, 25 bp, Homo sapien
ttgaggtaaatggtgcgggcgggtg

SEQ ID NO: 264228 - DNA, 25 bp, Homo sapien
ttgtcgcggaatttgttgagatgcg

SEQ ID NO: 264229 - DNA, 25 bp, Homo sapien
tgatctggttgtcgcggaatttgtt

SEQ ID NO: 264230 - DNA, 25 bp, Homo sapien
gatctggttgtcgcggaatttgttg

SEQ ID NO: 264231 - DNA, 25 bp, Homo sapien
ctgatctggttgtcgcggaatttgt

SEQ ID NO: 264232 - DNA, 25 bp, Homo sapien
ctttatatgcacaaaacaggaaatg

SEQ ID NO: 264233 - DNA, 25 bp, Homo sapien
caaaacaggaaatgagaggtacatg

SEQ ID NO: 264234 - DNA, 25 bp, Homo sapien
aacaggaaatgagaggtacatgaca

SEQ ID NO: 264235 - DNA, 25 bp, Homo sapien
caggaaatgagaggtacatgacagc

SEQ ID NO: 264236 - DNA, 25 bp, Homo sapien
aacggtggagatgcaggacgaggaa

SEQ ID NO: 264237 - DNA, 25 bp, Homo sapien
tggagatgcaggacgaggaagaaaa

SEQ ID NO: 264238 - DNA, 25 bp, Homo sapien
ctgcaaacggtggagatgcaggacg

SEQ ID NO: 264239 - DNA, 25 bp, Homo sapien
gatgcaggacgaggaagaaaatgct

SEQ ID NO: 264240 - DNA, 25 bp, Homo sapien
agagtcagagatggataaaaataga

SEQ ID NO: 264241 - DNA, 25 bp, Homo sapien
gacagactttgtcatcaaggatgac

SEQ ID NO: 264242 - DNA, 25 bp, Homo sapien
aagagtctgagaaacgctgcggcac

SEQ ID NO: 264243 - DNA, 25 bp, Homo sapien
gatgtggtgcagcatgctaagttcc

SEQ ID NO: 264244 - DNA, 25 bp, Homo sapien
ccattggcaggaactgtgcgtcgtg

SEQ ID NO: 264245 - DNA, 25 bp, Homo sapien
cttcgcttgcagagcgcagtccttc

SEQ ID NO: 264246 - DNA, 25 bp, Homo sapien
ttcccattggcaggaactgtgcgtc

SEQ ID NO: 264247 - DNA, 25 bp, Homo sapien
gagcgcagtccttcagcaaaggttt

SEQ ID NO: 264248 - DNA, 25 bp, Homo sapien
ctggcccgtccgtgctgtgctccgc

SEQ ID NO: 264249 - DNA, 25 bp, Homo sapien
cgcgaggagagcttctaaggaaagt

SEQ ID NO: 264250 - DNA, 25 bp, Homo sapien
ccgtgctgtgctccgcgaggagagc

SEQ ID NO: 264251 - DNA, 25 bp, Homo sapien
ccggctcctggcccgtccgtgctgt

SEQ ID NO: 264252 - DNA, 25 bp, Homo sapien
ggagattacatctactatacacaca

SEQ ID NO: 264253 - DNA, 25 bp, Homo sapien
ccaccgcccaccttggagattacat

SEQ ID NO: 264254 - DNA, 25 bp, Homo sapien
aggtcaaagcgatccctccaactac

SEQ ID NO: 264255 - DNA, 25 bp, Homo sapien
gaaacggaagtacattattcaacac

SEQ ID NO: 264256 - DNA, 25 bp, Homo sapien
ggaaacctaataagatatttatgat

SEQ ID NO: 264257 - DNA, 25 bp, Homo sapien
aaacaggctttcataccctttgcag

SEQ ID NO: 264258 - DNA, 25 bp, Homo sapien
ttcatccctgccaaacaggctttca

SEQ ID NO: 264259 - DNA, 25 bp, Homo sapien
tttgcagcatggctttgttcccagg

SEQ ID NO: 264260 - DNA, 25 bp, Homo sapien
tatagatgcagataccacagagcct

SEQ ID NO: 264261 - DNA, 25 bp, Homo sapien
tcgctcacagctagaaggattcgga

SEQ ID NO: 264262 - DNA, 25 bp, Homo sapien
gaatatcagaacaacagcaacgcgc

SEQ ID NO: 264263 - DNA, 25 bp, Homo sapien
gcggagacacctaattcagacagtt

SEQ ID NO: 264264 - DNA, 25 bp, Homo sapien
ccaaggcaatggcacactctggcct

SEQ ID NO: 264265 - DNA, 25 bp, Homo sapien
ctgaacaaagacaggtggtaaagtg

SEQ ID NO: 264266 - DNA, 25 bp, Homo sapien
tgaacaaagacaggtggtaaagtgg

SEQ ID NO: 264267 - DNA, 25 bp, Homo sapien
catttccaaggcaatggcacactct

SEQ ID NO: 264268 - DNA, 25 bp, Homo sapien
tcatcaacccttccagatccaatcc

SEQ ID NO: 264269 - DNA, 25 bp, Homo sapien
acacaagactcacaaccccacaaca

SEQ ID NO: 264270 - DNA, 25 bp, Homo sapien
acctcacccagtcctcatcaaccct

SEQ ID NO: 264271 - DNA, 25 bp, Homo sapien
caagactcacaaccccacaacacct

SEQ ID NO: 264272 - DNA, 25 bp, Homo sapien
catacagcctgaatgtgcatgagcc

SEQ ID NO: 264273 - DNA, 25 bp, Homo sapien
aatacagccaggttaccctcgggtg

SEQ ID NO: 264274 - DNA, 25 bp, Homo sapien
gaatgtgcatgagccctggtgatga

SEQ ID NO: 264275 - DNA, 25 bp, Homo sapien
catctagtgttggagcatacagcct

SEQ ID NO: 264276 - DNA, 25 bp, Homo sapien
ccatgtctgagagactgaatctgca

SEQ ID NO: 264277 - DNA, 25 bp, Homo sapien
catgtctgagagactgaatctgcag

SEQ ID NO: 264278 - DNA, 25 bp, Homo sapien
ctccatgtctgagagactgaatctg

SEQ ID NO: 264279 - DNA, 25 bp, Homo sapien
tccatgtctgagagactgaatctgc

SEQ ID NO: 264280 - DNA, 25 bp, Homo sapien
aggaatcttagtgatctgtatcata

SEQ ID NO: 264281 - DNA, 25 bp, Homo sapien
tgcccaaaagtttggtcaagtcttc

SEQ ID NO: 264282 - DNA, 25 bp, Homo sapien
ttggacacctccatgacagcactct

SEQ ID NO: 264283 - DNA, 25 bp, Homo sapien
tcggctggacagctctcaatgccca

SEQ ID NO: 264284 - DNA, 25 bp, Homo sapien
gcttggacacctccatgacagcact

SEQ ID NO: 264285 - DNA, 25 bp, Homo sapien
tccttgcgcagggatcatcctaacc

SEQ ID NO: 264286 - DNA, 25 bp, Homo sapien
tatcattgcaattgtagtctatgtg

SEQ ID NO: 264287 - DNA, 25 bp, Homo sapien
agggatcatcctaaccttctctgta

SEQ ID NO: 264288 - DNA, 25 bp, Homo sapien
cattgcaattgtagtctatgtgctg

SEQ ID NO: 264289 - DNA, 25 bp, Homo sapien
tccacatctggcatcaattccttag

SEQ ID NO: 264290 - DNA, 25 bp, Homo sapien
ccagaggacattccaatggatggca

SEQ ID NO: 264291 - DNA, 25 bp, Homo sapien
atcaattccttaggctttgccacca

SEQ ID NO: 264292 - DNA, 25 bp, Homo sapien
atggatggcaaagcccatggccttc

SEQ ID NO: 264293 - DNA, 25 bp, Homo sapien
ttccacccaatcttacatctttcag

SEQ ID NO: 264294 - DNA, 25 bp, Homo sapien
cagtaagtctggtcaaatttataac

SEQ ID NO: 264295 - DNA, 25 bp, Homo sapien
ggtcaaatttataacgacactcctc

SEQ ID NO: 264296 - DNA, 25 bp, Homo sapien
tcttacatctttcagtaagtctggt

SEQ ID NO: 264297 - DNA, 25 bp, Homo sapien
aatactatcagttatagatgtaaac

SEQ ID NO: 264298 - DNA, 25 bp, Homo sapien
atactatcagttatagatgtaaact

SEQ ID NO: 264299 - DNA, 25 bp, Homo sapien
aataatactatcagttatagatgta

SEQ ID NO: 264300 - DNA, 25 bp, Homo sapien
taatactatcagttatagatgtaaa

SEQ ID NO: 264301 - DNA, 25 bp, Homo sapien
catacaagaatcgaggtagaaatgt

SEQ ID NO: 264302 - DNA, 25 bp, Homo sapien
gtagaaatgtcaacacgctgtactt

SEQ ID NO: 264303 - DNA, 25 bp, Homo sapien
tgtcaacacgctgtacttggccgta

SEQ ID NO: 264304 - DNA, 25 bp, Homo sapien
gcagctcttctaatctgctcataca

SEQ ID NO: 264305 - DNA, 25 bp, Homo sapien
ccagggtggtatatcttcctgttgg

SEQ ID NO: 264306 - DNA, 25 bp, Homo sapien
caccagggtggtatatcttcctgtt

SEQ ID NO: 264307 - DNA, 25 bp, Homo sapien
gcaccagggtggtatatcttcctgt

SEQ ID NO: 264308 - DNA, 25 bp, Homo sapien
accagggtggtatatcttcctgttg

SEQ ID NO: 264309 - DNA, 25 bp, Homo sapien
ctttttgttaactgcattgtctgcc

SEQ ID NO: 264310 - DNA, 25 bp, Homo sapien
tctttttgttaactgcattgtctgc

SEQ ID NO: 264311 - DNA, 25 bp, Homo sapien
tttttgttaactgcattgtctgcct

SEQ ID NO: 264312 - DNA, 25 bp, Homo sapien
tttgttaactgcattgtctgccttg

SEQ ID NO: 264313 - DNA, 25 bp, Homo sapien
tttccacataatggtatgccacata

SEQ ID NO: 264314 - DNA, 25 bp, Homo sapien
tggtatgccacataccatttcttaa

SEQ ID NO: 264315 - DNA, 25 bp, Homo sapien
tccacataatggtatgccacatacc

SEQ ID NO: 264316 - DNA, 25 bp, Homo sapien
gtatgccacataccatttcttaaca

SEQ ID NO: 264317 - DNA, 25 bp, Homo sapien
tactgcccattgacgaccttcacaa

SEQ ID NO: 264318 - DNA, 25 bp, Homo sapien
cccattgacgaccttcacaatgtct

SEQ ID NO: 264319 - DNA, 25 bp, Homo sapien
actgcccattgacgaccttcacaat

SEQ ID NO: 264320 - DNA, 25 bp, Homo sapien
tgcccattgacgaccttcacaatgt

SEQ ID NO: 264321 - DNA, 25 bp, Homo sapien
taaggttcgtctccccatccagatt

SEQ ID NO: 264322 - DNA, 25 bp, Homo sapien
tttaaggttcgtctccccatccaga

SEQ ID NO: 264323 - DNA, 25 bp, Homo sapien
ggttcgtctccccatccagattagc

SEQ ID NO: 264324 - DNA, 25 bp, Homo sapien
tcgtctccccatccagattagctgt

SEQ ID NO: 264325 - DNA, 25 bp, Homo sapien
cactctatagttccagataacttca

SEQ ID NO: 264326 - DNA, 25 bp, Homo sapien
ttcatcagaacttcacgtgtttgca

SEQ ID NO: 264327 - DNA, 25 bp, Homo sapien
ttgcatgtcagcagtgtgactcaaa

SEQ ID NO: 264328 - DNA, 25 bp, Homo sapien
ttcacactctatagttccagataac

SEQ ID NO: 264329 - DNA, 25 bp, Homo sapien
tctaagttcaagtttccagtgaagt

SEQ ID NO: 264330 - DNA, 25 bp, Homo sapien
tttccagtgaagtcatagaggtggc

SEQ ID NO: 264331 - DNA, 25 bp, Homo sapien
tcccatctaagttcaagtttccagt

SEQ ID NO: 264332 - DNA, 25 bp, Homo sapien
ttccagtgaagtcatagaggtggcg

SEQ ID NO: 264333 - DNA, 25 bp, Homo sapien
caaagacccactgagtatttctaag

SEQ ID NO: 264334 - DNA, 25 bp, Homo sapien
tataaacaactatgccaaagaccca

SEQ ID NO: 264335 - DNA, 25 bp, Homo sapien
taagctgtgtacctcttaataagat

SEQ ID NO: 264336 - DNA, 25 bp, Homo sapien
ctgcatgagtttggtgtcgtgtcca

SEQ ID NO: 264337 - DNA, 25 bp, Homo sapien
tgatctcttgagaggcgctttggtt

SEQ ID NO: 264338 - DNA, 25 bp, Homo sapien
tcttgagaggcgctttggttgaatt

SEQ ID NO: 264339 - DNA, 25 bp, Homo sapien
ccaggatctgcacgttagtcacctt

SEQ ID NO: 264340 - DNA, 25 bp, Homo sapien
tgcacgttagtcaccttctcaacat

SEQ ID NO: 264341 - DNA, 25 bp, Homo sapien
gaggtacgctggagtgacatttctg

SEQ ID NO: 264342 - DNA, 25 bp, Homo sapien
tcaattctccttgaaaggctggcat

SEQ ID NO: 264343 - DNA, 25 bp, Homo sapien
ccatttgagtataagacaagtccca

SEQ ID NO: 264344 - DNA, 25 bp, Homo sapien
tcaaccatggctgcaagaacatctc

SEQ ID NO: 264345 - DNA, 25 bp, Homo sapien
gagtatacttcacaacctcaagagt

SEQ ID NO: 264346 - DNA, 25 bp, Homo sapien
gaacgtcagtaggttgtatccaaaa

SEQ ID NO: 264347 - DNA, 25 bp, Homo sapien
ccagtttatgaaaagggcttgagta

SEQ ID NO: 264348 - DNA, 25 bp, Homo sapien
tcaagagtcaccaacagactgatgg

SEQ ID NO: 264349 - DNA, 25 bp, Homo sapien
ggagtgtcatttcctatataataca

SEQ ID NO: 264350 - DNA, 25 bp, Homo sapien
caggagtgtcatttcctatataata

SEQ ID NO: 264351 - DNA, 25 bp, Homo sapien
tcttcattaaggtttgatgtcctgg

SEQ ID NO: 264352 - DNA, 25 bp, Homo sapien
ggcaggagtgtcatttcctatataa

SEQ ID NO: 264353 - DNA, 25 bp, Homo sapien
cattcccaaagttcccagaggcttt

SEQ ID NO: 264354 - DNA, 25 bp, Homo sapien
aggttactccggcaatgctgcactt

SEQ ID NO: 264355 - DNA, 25 bp, Homo sapien
catgtaagcgttccagtcttgtcag

SEQ ID NO: 264356 - DNA, 25 bp, Homo sapien
ccataggttactccggcaatgctgc

SEQ ID NO: 264357 - DNA, 25 bp, Homo sapien
cttaaagttcatgatattgcatgta

SEQ ID NO: 264358 - DNA, 25 bp, Homo sapien
ccagagaaacggaaaacagagtggt

SEQ ID NO: 264359 - DNA, 25 bp, Homo sapien
gctctcttgccaattctgggaagtg

SEQ ID NO: 264360 - DNA, 25 bp, Homo sapien
agaagtcatctgaagacggctctct

SEQ ID NO: 264361 - DNA, 25 bp, Homo sapien
gacggctctcttgccaattctggga

SEQ ID NO: 264362 - DNA, 25 bp, Homo sapien
tctgaagacggctctcttgccaatt

SEQ ID NO: 264363 - DNA, 25 bp, Homo sapien
acagcctggggtcatcaaagtcaca

SEQ ID NO: 264364 - DNA, 25 bp, Homo sapien
atggcgatcctcaatgttcttcaac

SEQ ID NO: 264365 - DNA, 25 bp, Homo sapien
atgttcttcaacagcctggggtcat

SEQ ID NO: 264366 - DNA, 25 bp, Homo sapien
cctggggtcatcaaagtcacaggaa

SEQ ID NO: 264367 - DNA, 25 bp, Homo sapien
caaccgtgtggcacacggccagaag

SEQ ID NO: 264368 - DNA, 25 bp, Homo sapien
gccagaagggtgaggaactcctgaa

SEQ ID NO: 264369 - DNA, 25 bp, Homo sapien
cttctcaggaacaaccgtgtggcac

SEQ ID NO: 264370 - DNA, 25 bp, Homo sapien
agggtgaggaactcctgaatgcaag

SEQ ID NO: 264371 - DNA, 25 bp, Homo sapien
caagaataactgcaacacccaggtg

SEQ ID NO: 264372 - DNA, 25 bp, Homo sapien
agaataactgcaacacccaggtgtc

SEQ ID NO: 264373 - DNA, 25 bp, Homo sapien
ctccaagaataactgcaacacccag

SEQ ID NO: 264374 - DNA, 25 bp, Homo sapien
ccagcagggcgcatccggccagagc

SEQ ID NO: 264375 - DNA, 25 bp, Homo sapien
gagttggtgaaacattgacatatca

SEQ ID NO: 264376 - DNA, 25 bp, Homo sapien
ctgtcaagtgggagttggtgaaaca

SEQ ID NO: 264377 - DNA, 25 bp, Homo sapien
tgggagttggtgaaacattgacata

SEQ ID NO: 264378 - DNA, 25 bp, Homo sapien
tgtcaagtgggagttggtgaaacat

SEQ ID NO: 264379 - DNA, 25 bp, Homo sapien
tgactgagaatggtgttctggctgt

SEQ ID NO: 264380 - DNA, 25 bp, Homo sapien
tgatgactgagaatggtgttctggc

SEQ ID NO: 264381 - DNA, 25 bp, Homo sapien
tctatgatgactgagaatggtgttc

SEQ ID NO: 264382 - DNA, 25 bp, Homo sapien
tatgatgactgagaatggtgttctg

SEQ ID NO: 264383 - DNA, 25 bp, Homo sapien
gaaatgtgcacacgcatgttactca

SEQ ID NO: 264384 - DNA, 25 bp, Homo sapien
tctgaaatgtgcacacgcatgttac

SEQ ID NO: 264385 - DNA, 25 bp, Homo sapien
atatttacaatagacatgccatttc

SEQ ID NO: 264386 - DNA, 25 bp, Homo sapien
tcatatttacaatagacatgccatt

SEQ ID NO: 264387 - DNA, 25 bp, Homo sapien
aaattccaggacattaaggattccg

SEQ ID NO: 264388 - DNA, 25 bp, Homo sapien
taaggattccgaatgtttgttcctg

SEQ ID NO: 264389 - DNA, 25 bp, Homo sapien
ggacattaaggattccgaatgtttg

SEQ ID NO: 264390 - DNA, 25 bp, Homo sapien
tccaggacattaaggattccgaatg

SEQ ID NO: 264391 - DNA, 25 bp, Homo sapien
acacgcagggacactgtcaccactt

SEQ ID NO: 264392 - DNA, 25 bp, Homo sapien
ttggagagatgcctagcacgtcgct

SEQ ID NO: 264393 - DNA, 25 bp, Homo sapien
tcgctcacctccacacgcagggaca

SEQ ID NO: 264394 - DNA, 25 bp, Homo sapien
tgtccaataactgctggtcccagtt

SEQ ID NO: 264395 - DNA, 25 bp, Homo sapien
ggagttcgaacaattacagacattc

SEQ ID NO: 264396 - DNA, 25 bp, Homo sapien
tacagtaaagccgaagtcgtcctga

SEQ ID NO: 264397 - DNA, 25 bp, Homo sapien
taaagccgaagtcgtcctgaaggag

SEQ ID NO: 264398 - DNA, 25 bp, Homo sapien
cgtcctgaaggagttcgaacaatta

SEQ ID NO: 264399 - DNA, 25 bp, Homo sapien
ggcaaagtattccagatggcataat

SEQ ID NO: 264400 - DNA, 25 bp, Homo sapien
tcctcatactcattctcagagagat

SEQ ID NO: 264401 - DNA, 25 bp, Homo sapien
ctcgtaacactcttccaaccgttga

SEQ ID NO: 264402 - DNA, 25 bp, Homo sapien
gtaacactcttccaaccgttgagct

SEQ ID NO: 264403 - DNA, 25 bp, Homo sapien
tcttccaaccgttgagctctgtcct

SEQ ID NO: 264404 - DNA, 25 bp, Homo sapien
acactcttccaaccgttgagctctg

SEQ ID NO: 264405 - DNA, 25 bp, Homo sapien
ggcagcccagtactcatcactgatt

SEQ ID NO: 264406 - DNA, 25 bp, Homo sapien
aggttatcccgaggacactgacagt

SEQ ID NO: 264407 - DNA, 25 bp, Homo sapien
ctgacagtacctgagcccttcctct

SEQ ID NO: 264408 - DNA, 25 bp, Homo sapien
gatgggcaggttatcccgaggacac

SEQ ID NO: 264409 - DNA, 25 bp, Homo sapien
gcgatcttctatggctgtggctcca

SEQ ID NO: 264410 - DNA, 25 bp, Homo sapien
aaggcgatcttctatggctgtggct

SEQ ID NO: 264411 - DNA, 25 bp, Homo sapien
tgaaggcgatcttctatggctgtgg

SEQ ID NO: 264412 - DNA, 25 bp, Homo sapien
ggcgatcttctatggctgtggctcc

SEQ ID NO: 264413 - DNA, 25 bp, Homo sapien
aatttctgccttcaacagtgttgcg

SEQ ID NO: 264414 - DNA, 25 bp, Homo sapien
tgtttgtctcctgtcaacacccata

SEQ ID NO: 264415 - DNA, 25 bp, Homo sapien
acagtgttgcgatggtttctggaac

SEQ ID NO: 264416 - DNA, 25 bp, Homo sapien
tatattaatcgcagtttcttgtttg

SEQ ID NO: 264417 - DNA, 25 bp, Homo sapien
tgcgataccaatcggcaggaatacc

SEQ ID NO: 264418 - DNA, 25 bp, Homo sapien
tattctgcgataccaatcggcagga

SEQ ID NO: 264419 - DNA, 25 bp, Homo sapien
aggataagggccatattctgcgata

SEQ ID NO: 264420 - DNA, 25 bp, Homo sapien
gggccatattctgcgataccaatcg

SEQ ID NO: 264421 - DNA, 25 bp, Homo sapien
aatcctgttagctctccttggccag

SEQ ID NO: 264422 - DNA, 25 bp, Homo sapien
tgaggataaacaaagagactaccac

SEQ ID NO: 264423 - DNA, 25 bp, Homo sapien
gctggagcaccatgtattgacccta

SEQ ID NO: 264424 - DNA, 25 bp, Homo sapien
taagaacctgaatgaggacacatgt

SEQ ID NO: 264425 - DNA, 25 bp, Homo sapien
catcagagaaaagatcaaattggaa

SEQ ID NO: 264426 - DNA, 25 bp, Homo sapien
gagaaaagatcaaattggaaaactg

SEQ ID NO: 264427 - DNA, 25 bp, Homo sapien
gaaaagatcaaattggaaaactgga

SEQ ID NO: 264428 - DNA, 25 bp, Homo sapien
tcagagaaaagatcaaattggaaaa

SEQ ID NO: 264429 - DNA, 25 bp, Homo sapien
ccagtgagctacacctgcagggatt

SEQ ID NO: 264430 - DNA, 25 bp, Homo sapien
tcagtcatgcctacgtggtgaagcc

SEQ ID NO: 264431 - DNA, 25 bp, Homo sapien
gatttaacgcaaggccagcggaagc

SEQ ID NO: 264432 - DNA, 25 bp, Homo sapien
taatgagatggctaccagtgacccc

SEQ ID NO: 264433 - DNA, 25 bp, Homo sapien
gcttcggtccctcgagaaaatcagg

SEQ ID NO: 264434 - DNA, 25 bp, Homo sapien
ggtccctcgagaaaatcaggcagat

SEQ ID NO: 264435 - DNA, 25 bp, Homo sapien
tccatcaggagctcaattcccaatt

SEQ ID NO: 264436 - DNA, 25 bp, Homo sapien
attcccaattgtagcttcggtccct

SEQ ID NO: 264437 - DNA, 25 bp, Homo sapien
tgcaacaggctccacacagtttgag

SEQ ID NO: 264438 - DNA, 25 bp, Homo sapien
catgcctggagaaccactactttct

SEQ ID NO: 264439 - DNA, 25 bp, Homo sapien
actcaagcctcgtcaatggcaggcg

SEQ ID NO: 264440 - DNA, 25 bp, Homo sapien
tgccatctgttacagcttcccttgg

SEQ ID NO: 264441 - DNA, 25 bp, Homo sapien
tcctccagaggtatcccattcacct

SEQ ID NO: 264442 - DNA, 25 bp, Homo sapien
agaggtatcccattcacctggttct

SEQ ID NO: 264443 - DNA, 25 bp, Homo sapien
ccagaggtatcccattcacctggtt

SEQ ID NO: 264444 - DNA, 25 bp, Homo sapien
ctccagaggtatcccattcacctgg

SEQ ID NO: 264445 - DNA, 25 bp, Homo sapien
aacttgcctaaagttccagacttgg

SEQ ID NO: 264446 - DNA, 25 bp, Homo sapien
gcacaatcgatagcttttagaaaga

SEQ ID NO: 264447 - DNA, 25 bp, Homo sapien
taaatgaaactcgatcgcagagtgc

SEQ ID NO: 264448 - DNA, 25 bp, Homo sapien
gacttggacagcaggttgaaacctg

SEQ ID NO: 264449 - DNA, 25 bp, Homo sapien
ccaagatcaaaatcttctatactcc

SEQ ID NO: 264450 - DNA, 25 bp, Homo sapien
tcaccaagatcaaaatcttctatac

SEQ ID NO: 264451 - DNA, 25 bp, Homo sapien
ccttcaccaagatcaaaatcttcta

SEQ ID NO: 264452 - DNA, 25 bp, Homo sapien
caagatcaaaatcttctatactcct

SEQ ID NO: 264453 - DNA, 25 bp, Homo sapien
tgtgaatcctcagggtaggcctagc

SEQ ID NO: 264454 - DNA, 25 bp, Homo sapien
gaaccaggttcaacattcttcgggc

SEQ ID NO: 264455 - DNA, 25 bp, Homo sapien
taggcctagcagtacaagaactttg

SEQ ID NO: 264456 - DNA, 25 bp, Homo sapien
ttcttcgggctgtaactcaatcggc

SEQ ID NO: 264457 - DNA, 25 bp, Homo sapien
ccagcacagatttgacctttgcttt

SEQ ID NO: 264458 - DNA, 25 bp, Homo sapien
ggccagagcactctgctcatggccg

SEQ ID NO: 264459 - DNA, 25 bp, Homo sapien
tgctccacgactcccttcttctttg

SEQ ID NO: 264460 - DNA, 25 bp, Homo sapien
tgtttggggactatctgctgcctcc

SEQ ID NO: 264461 - DNA, 25 bp, Homo sapien
cactctgctcatggccgctgtgggc

SEQ ID NO: 264462 - DNA, 25 bp, Homo sapien
gccgaaaggcttccggctgtgtaga

SEQ ID NO: 264463 - DNA, 25 bp, Homo sapien
ctggccgaaaggcttccggctgtgt

SEQ ID NO: 264464 - DNA, 25 bp, Homo sapien
tccggctgtgtagaacccgtaacga

SEQ ID NO: 264465 - DNA, 25 bp, Homo sapien
aaggcttccggctgtgtagaacccg

SEQ ID NO: 264466 - DNA, 25 bp, Homo sapien
ccctgccagcaggaccttcttagga

SEQ ID NO: 264467 - DNA, 25 bp, Homo sapien
ctcccaggctgcaggttagcccaca

SEQ ID NO: 264468 - DNA, 25 bp, Homo sapien
ggcgtggttcttgaaagccctgcca

SEQ ID NO: 264469 - DNA, 25 bp, Homo sapien
caccagacagaaagggccgaagctg

SEQ ID NO: 264470 - DNA, 25 bp, Homo sapien
ggtaggagccctcttcctccgtcag

SEQ ID NO: 264471 - DNA, 25 bp, Homo sapien
gctgctgcagccctcactttgatgt

SEQ ID NO: 264472 - DNA, 25 bp, Homo sapien
tttcctagatgccatggagcagcag

SEQ ID NO: 264473 - DNA, 25 bp, Homo sapien
tccgtcagctcggcagggccacgag

SEQ ID NO: 264474 - DNA, 25 bp, Homo sapien
gacttcgaaggagagcgcgtacttc

SEQ ID NO: 264475 - DNA, 25 bp, Homo sapien
tacttcagggtgtggccatcgatga

SEQ ID NO: 264476 - DNA, 25 bp, Homo sapien
tatgaccgctttgcacgagagtgcc

SEQ ID NO: 264477 - DNA, 25 bp, Homo sapien
gcccagcaaattcccaaggtcagtg

SEQ ID NO: 264478 - DNA, 25 bp, Homo sapien
tggcctctacaatgattcacgtgag

SEQ ID NO: 264479 - DNA, 25 bp, Homo sapien
gaactattacatctgagcgctctca

SEQ ID NO: 264480 - DNA, 25 bp, Homo sapien
tactcaagtctctacatattctggc

SEQ ID NO: 264481 - DNA, 25 bp, Homo sapien
tctagagaaattatggtaagatctg

SEQ ID NO: 264482 - DNA, 25 bp, Homo sapien
cagatgagggaaagtgtcagatgta

SEQ ID NO: 264483 - DNA, 25 bp, Homo sapien
tcctgatgaaagttaacatgacaca

SEQ ID NO: 264484 - DNA, 25 bp, Homo sapien
gcattgataattcaggaggtgacag

SEQ ID NO: 264485 - DNA, 25 bp, Homo sapien
tgggaccaattaacgtaagagctat

SEQ ID NO: 264486 - DNA, 25 bp, Homo sapien
caagcggccattctttcagacagtc

SEQ ID NO: 264487 - DNA, 25 bp, Homo sapien
tgatagtggcatgtataggcagcaa

SEQ ID NO: 264488 - DNA, 25 bp, Homo sapien
gccagcaggtggatatgcacattaa

SEQ ID NO: 264489 - DNA, 25 bp, Homo sapien
cctggacagagctcaatagagagcc

SEQ ID NO: 264490 - DNA, 25 bp, Homo sapien
ggtgcacgactatacaaaaagcctc

SEQ ID NO: 264491 - DNA, 25 bp, Homo sapien
gctacgacgtcaccaagtgaaagga

SEQ ID NO: 264492 - DNA, 25 bp, Homo sapien
cagagcttgcaagactagacgttgc

SEQ ID NO: 264493 - DNA, 25 bp, Homo sapien
tcgtatgggaccaccatggttgata

SEQ ID NO: 264494 - DNA, 25 bp, Homo sapien
acaaggataagttgacttctgataa

SEQ ID NO: 264495 - DNA, 25 bp, Homo sapien
aaggaaggttgctggaattttcatc

SEQ ID NO: 264496 - DNA, 25 bp, Homo sapien
ctgtaaggaaggttgctggaatttt

SEQ ID NO: 264497 - DNA, 25 bp, Homo sapien
aatgaacatttgcacctcctgaaac

SEQ ID NO: 264498 - DNA, 25 bp, Homo sapien
ggaaggttgctggaattttcatcaa

SEQ ID NO: 264499 - DNA, 25 bp, Homo sapien
aaaggaccatagaagtccttccagg

SEQ ID NO: 264500 - DNA, 25 bp, Homo sapien
gaccatagaagtccttccaggttca

SEQ ID NO: 264501 - DNA, 25 bp, Homo sapien
atagaaaggaccatagaagtccttc

SEQ ID NO: 264502 - DNA, 25 bp, Homo sapien
cttccaggttcaaattcaaattctt

SEQ ID NO: 264503 - DNA, 25 bp, Homo sapien
actgtcctccttatgaagatgagag

SEQ ID NO: 264504 - DNA, 25 bp, Homo sapien
gtttgcctgctcaagcgctatggct

SEQ ID NO: 264505 - DNA, 25 bp, Homo sapien
ccaaggagcacggcagatgaggcct

SEQ ID NO: 264506 - DNA, 25 bp, Homo sapien
aacaggcacgaatcctctattattg

SEQ ID NO: 264507 - DNA, 25 bp, Homo sapien
ctgtaagagttatcaggtatgtgga

SEQ ID NO: 264508 - DNA, 25 bp, Homo sapien
aaggacccacaggataccttttgct

SEQ ID NO: 264509 - DNA, 25 bp, Homo sapien
ggtatgtggaagacatgaaacaaac

SEQ ID NO: 264510 - DNA, 25 bp, Homo sapien
gacccacaggataccttttgctaca

SEQ ID NO: 264511 - DNA, 25 bp, Homo sapien
tatcctgaagaccacctccagtgtc

SEQ ID NO: 264512 - DNA, 25 bp, Homo sapien
tctgttctcttcagcgtctgcagtg

SEQ ID NO: 264513 - DNA, 25 bp, Homo sapien
ccagtgtcgtctccttcctggcggg

SEQ ID NO: 264514 - DNA, 25 bp, Homo sapien
cctgcaaggcaaaggtctgttctct

SEQ ID NO: 264515 - DNA, 25 bp, Homo sapien
gtatctacggtgctcccaaagctgg

SEQ ID NO: 264516 - DNA, 25 bp, Homo sapien
ctgaactgaaagtatctacggtgct

SEQ ID NO: 264517 - DNA, 25 bp, Homo sapien
ctgaaaccaccggccttcggaatgg

SEQ ID NO: 264518 - DNA, 25 bp, Homo sapien
agccgggcagagcaacatggaagca

SEQ ID NO: 264519 - DNA, 25 bp, Homo sapien
cacagtggcaagtgcatgctaggtc

SEQ ID NO: 264520 - DNA, 25 bp, Homo sapien
tccacttagatgagagtgactcagc

SEQ ID NO: 264521 - DNA, 25 bp, Homo sapien
gaaagcacgcgtgtgtccactggag

SEQ ID NO: 264522 - DNA, 25 bp, Homo sapien
acagtggcacaaggtccagaccaga

SEQ ID NO: 264523 - DNA, 25 bp, Homo sapien
gggctggatctcgattgtagatttg

SEQ ID NO: 264524 - DNA, 25 bp, Homo sapien
tgagccagaggggttacaaggaact

SEQ ID NO: 264525 - DNA, 25 bp, Homo sapien
gccagaggggttacaaggaactcca

SEQ ID NO: 264526 - DNA, 25 bp, Homo sapien
tctcgattgtagatttgtacactga

SEQ ID NO: 264527 - DNA, 25 bp, Homo sapien
caagtaagtcaagtgaggattccaa

SEQ ID NO: 264528 - DNA, 25 bp, Homo sapien
tctatgaacatccaacagctgcctt

SEQ ID NO: 264529 - DNA, 25 bp, Homo sapien
cactctgggatttggatctcaagta

SEQ ID NO: 264530 - DNA, 25 bp, Homo sapien
tggcttaaagtacaatctatgaaca

SEQ ID NO: 264531 - DNA, 25 bp, Homo sapien
tggatcatcccgacatcgttggcgc

SEQ ID NO: 264532 - DNA, 25 bp, Homo sapien
cgtaatccgagttgttggtggcctg

SEQ ID NO: 264533 - DNA, 25 bp, Homo sapien
tcgttggcgccgtctccgatggcga

SEQ ID NO: 264534 - DNA, 25 bp, Homo sapien
cccacgtgggctgtctggatcatcc

SEQ ID NO: 264535 - DNA, 25 bp, Homo sapien
cataactacagagaaggcgacagct

SEQ ID NO: 264536 - DNA, 25 bp, Homo sapien
tgcagtacagcacatcaggagccct

SEQ ID NO: 264537 - DNA, 25 bp, Homo sapien
gctcttggcaattcacctcacaggg

SEQ ID NO: 264538 - DNA, 25 bp, Homo sapien
gaggctgattgctactgaccatggg

SEQ ID NO: 264539 - DNA, 25 bp, Homo sapien
ccttgtgttcatgtgattaaggtga

SEQ ID NO: 264540 - DNA, 25 bp, Homo sapien
aagggaattcctgctacccagccga

SEQ ID NO: 264541 - DNA, 25 bp, Homo sapien
caggcatctattcatgatgtatcgc

SEQ ID NO: 264542 - DNA, 25 bp, Homo sapien
tcaacaccgtagaaacacaagggaa

SEQ ID NO: 264543 - DNA, 25 bp, Homo sapien
taatcggcaataggaccatggacag

SEQ ID NO: 264544 - DNA, 25 bp, Homo sapien
tcctttggcagaagtgactatgatg

SEQ ID NO: 264545 - DNA, 25 bp, Homo sapien
gaaacatgtgggctgcatcagttcc

SEQ ID NO: 264546 - DNA, 25 bp, Homo sapien
caataggaccatggacaggagaaat

SEQ ID NO: 264547 - DNA, 25 bp, Homo sapien
tacaggaccacgttcttatagaagc

SEQ ID NO: 264548 - DNA, 25 bp, Homo sapien
gcagtacaagatgcacttggtcacc

SEQ ID NO: 264549 - DNA, 25 bp, Homo sapien
ggctccatgaaccaacagaagcttc

SEQ ID NO: 264550 - DNA, 25 bp, Homo sapien
tggtcacccggttgtagctccaggc

SEQ ID NO: 264551 - DNA, 25 bp, Homo sapien
taatacccttttacacgatggtcca

SEQ ID NO: 264552 - DNA, 25 bp, Homo sapien
gtccatgaccttgagtgacgttgag

SEQ ID NO: 264553 - DNA, 25 bp, Homo sapien
gaccctacgatacctctttacacta

SEQ ID NO: 264554 - DNA, 25 bp, Homo sapien
tacacgatggtccatgaccctacga

SEQ ID NO: 264555 - DNA, 25 bp, Homo sapien
tcacagctcaccacacctcaacctc

SEQ ID NO: 264556 - DNA, 25 bp, Homo sapien
gcaatcacagctcaccacacctcaa

SEQ ID NO: 264557 - DNA, 25 bp, Homo sapien
aagtggctgggactatgggcatgca

SEQ ID NO: 264558 - DNA, 25 bp, Homo sapien
gctcaccacacctcaacctctcagg

SEQ ID NO: 264559 - DNA, 25 bp, Homo sapien
tagggtaggtttctcttgcaagtct

SEQ ID NO: 264560 - DNA, 25 bp, Homo sapien
aacttttgcagctcaagggagatgg

SEQ ID NO: 264561 - DNA, 25 bp, Homo sapien
gttattagccatactcacggacaca

SEQ ID NO: 264562 - DNA, 25 bp, Homo sapien
tgtatacagatcataaccagagtct

SEQ ID NO: 264563 - DNA, 25 bp, Homo sapien
tcttggctacaatgtccatatttaa

SEQ ID NO: 264564 - DNA, 25 bp, Homo sapien
catgggaactacactgttcttggct

SEQ ID NO: 264565 - DNA, 25 bp, Homo sapien
tacactgttcttggctacaatgtcc

SEQ ID NO: 264566 - DNA, 25 bp, Homo sapien
gggaactacactgttcttggctaca

SEQ ID NO: 264567 - DNA, 25 bp, Homo sapien
aatgattccgtgtctgggaagcggc

SEQ ID NO: 264568 - DNA, 25 bp, Homo sapien
tcagatcccacataatcatctatgg

SEQ ID NO: 264569 - DNA, 25 bp, Homo sapien
aaggccacagggactactctctcca

SEQ ID NO: 264570 - DNA, 25 bp, Homo sapien
cctccaacgtggaagacttgtgtga

SEQ ID NO: 264571 - DNA, 25 bp, Homo sapien
ccacaagattccattcagtgtcctt

SEQ ID NO: 264572 - DNA, 25 bp, Homo sapien
tcctttctctgttcccacagcctca

SEQ ID NO: 264573 - DNA, 25 bp, Homo sapien
acaagattccattcagtgtcctttc

SEQ ID NO: 264574 - DNA, 25 bp, Homo sapien
ctccacaagattccattcagtgtcc

SEQ ID NO: 264575 - DNA, 25 bp, Homo sapien
ggccgatgcaccaacgttcaaataa

SEQ ID NO: 264576 - DNA, 25 bp, Homo sapien
atccattaacaaaggcgaaccaaag

SEQ ID NO: 264577 - DNA, 25 bp, Homo sapien
cacattgtacaggccgatgcaccaa

SEQ ID NO: 264578 - DNA, 25 bp, Homo sapien
caccaacgttcaaataaaatctgcc

SEQ ID NO: 264579 - DNA, 25 bp, Homo sapien
tgtgttgaagccttcgccattctgg

SEQ ID NO: 264580 - DNA, 25 bp, Homo sapien
tgcaagacctctcaaagattcccag

SEQ ID NO: 264581 - DNA, 25 bp, Homo sapien
tctcctgagtgcaagacctctcaaa

SEQ ID NO: 264582 - DNA, 25 bp, Homo sapien
gattcccagagtgaagggcggcaaa

SEQ ID NO: 264583 - DNA, 25 bp, Homo sapien
ccagcaacagctaggtaagctgcca

SEQ ID NO: 264584 - DNA, 25 bp, Homo sapien
ctctgacagcggatcctgaacctgg

SEQ ID NO: 264585 - DNA, 25 bp, Homo sapien
aggaccacgcaagggggatctctga

SEQ ID NO: 264586 - DNA, 25 bp, Homo sapien
aacagctaggtaagctgccaacagg

SEQ ID NO: 264587 - DNA, 25 bp, Homo sapien
gaggatgagggagtggaccaaggcg

SEQ ID NO: 264588 - DNA, 25 bp, Homo sapien
tggaccaaggcgttgatgcagtgac

SEQ ID NO: 264589 - DNA, 25 bp, Homo sapien
gggagtggaccaaggcgttgatgca

SEQ ID NO: 264590 - DNA, 25 bp, Homo sapien
accaaggcgttgatgcagtgacccc

SEQ ID NO: 264591 - DNA, 25 bp, Homo sapien
gcagcagagcggctgcaaagctcct

SEQ ID NO: 264592 - DNA, 25 bp, Homo sapien
tgctgacaggtgaaatcacacagcc

SEQ ID NO: 264593 - DNA, 25 bp, Homo sapien
gctccttgctgacaggtgaaatcac

SEQ ID NO: 264594 - DNA, 25 bp, Homo sapien
gacaggtgaaatcacacagccctta

SEQ ID NO: 264595 - DNA, 25 bp, Homo sapien
agacacccgtcactggtacacaaag

SEQ ID NO: 264596 - DNA, 25 bp, Homo sapien
ttcctcgcagacacccgtcactggt

SEQ ID NO: 264597 - DNA, 25 bp, Homo sapien
caagctcttcctcgcagacacccgt

SEQ ID NO: 264598 - DNA, 25 bp, Homo sapien
tcgcagacacccgtcactggtacac

SEQ ID NO: 264599 - DNA, 25 bp, Homo sapien
gttaaaacctgccaataagctactc

SEQ ID NO: 264600 - DNA, 25 bp, Homo sapien
cttgttaaaacctgccaataagcta

SEQ ID NO: 264601 - DNA, 25 bp, Homo sapien
gatggttctgtttcaacagttttag

SEQ ID NO: 264602 - DNA, 25 bp, Homo sapien
gcaaacacctgtgggtgtcgtttct

SEQ ID NO: 264603 - DNA, 25 bp, Homo sapien
taaatagtcggtagcatgaccactt

SEQ ID NO: 264604 - DNA, 25 bp, Homo sapien
ttccaacaaataaatagtcggtagc

SEQ ID NO: 264605 - DNA, 25 bp, Homo sapien
tcggtagcatgaccacttgtcaaca

SEQ ID NO: 264606 - DNA, 25 bp, Homo sapien
caaataaatagtcggtagcatgacc

SEQ ID NO: 264607 - DNA, 25 bp, Homo sapien
tagtccaagctgtggtctccaaacc

SEQ ID NO: 264608 - DNA, 25 bp, Homo sapien
agctttcagacaaacagtaacaaca

SEQ ID NO: 264609 - DNA, 25 bp, Homo sapien
gctgtggtctccaaaccagctttca

SEQ ID NO: 264610 - DNA, 25 bp, Homo sapien
tccaaaccagctttcagacaaacag

SEQ ID NO: 264611 - DNA, 25 bp, Homo sapien
gccaaaaaacaccagccaggtcagc

SEQ ID NO: 264612 - DNA, 25 bp, Homo sapien
ccagatggtcgagtagatgccaaaa

SEQ ID NO: 264613 - DNA, 25 bp, Homo sapien
tagatgccaaaaaacaccagccagg

SEQ ID NO: 264614 - DNA, 25 bp, Homo sapien
tggtcgagtagatgccaaaaaacac

SEQ ID NO: 264615 - DNA, 25 bp, Homo sapien
tcctctcatatctggagcaatggga

SEQ ID NO: 264616 - DNA, 25 bp, Homo sapien
tctcatatctggagcaatgggaatg

SEQ ID NO: 264617 - DNA, 25 bp, Homo sapien
cctctcatatctggagcaatgggaa

SEQ ID NO: 264618 - DNA, 25 bp, Homo sapien
tgtcctctcatatctggagcaatgg

SEQ ID NO: 264619 - DNA, 25 bp, Homo sapien
cacaaaattccccaaatgaaatatt

SEQ ID NO: 264620 - DNA, 25 bp, Homo sapien
aaaattccccaaatgaaatattcat

SEQ ID NO: 264621 - DNA, 25 bp, Homo sapien
caaaattccccaaatgaaatattca

SEQ ID NO: 264622 - DNA, 25 bp, Homo sapien
gaaaatgtcggcaccttagtagctg

SEQ ID NO: 264623 - DNA, 25 bp, Homo sapien
agtagctgcatgatcagcctggtcc

SEQ ID NO: 264624 - DNA, 25 bp, Homo sapien
ggaagagtccttaaacatgtgaatg

SEQ ID NO: 264625 - DNA, 25 bp, Homo sapien
gtgaatgtcaccattaatctgagcc

SEQ ID NO: 264626 - DNA, 25 bp, Homo sapien
gacttcctccttgacgaggctgacc

SEQ ID NO: 264627 - DNA, 25 bp, Homo sapien
ttccaaaccgaaaggtgaatctctg

SEQ ID NO: 264628 - DNA, 25 bp, Homo sapien
tgaatctctgctgataggacttcct

SEQ ID NO: 264629 - DNA, 25 bp, Homo sapien
ttcctccttgacgaggctgaccgct

SEQ ID NO: 264630 - DNA, 25 bp, Homo sapien
tattgcattgggcagaccaatgagg

SEQ ID NO: 264631 - DNA, 25 bp, Homo sapien
ggttagatgcaggaggtctgtttat

SEQ ID NO: 264632 - DNA, 25 bp, Homo sapien
cctgcatgttatgccaaagtcagag

SEQ ID NO: 264633 - DNA, 25 bp, Homo sapien
ggaggtctgtttattgcattgggca

SEQ ID NO: 264634 - DNA, 25 bp, Homo sapien
caagaaggtcgctcaaggtctcagg

SEQ ID NO: 264635 - DNA, 25 bp, Homo sapien
tctggttttacctgcagtggctgat

SEQ ID NO: 264636 - DNA, 25 bp, Homo sapien
gacttgcacacgcaggccacatcaa

SEQ ID NO: 264637 - DNA, 25 bp, Homo sapien
gttttcctgcatgaccctgacttgc

SEQ ID NO: 264638 - DNA, 25 bp, Homo sapien
cgggtgaaaccacgtgagcgagatt

SEQ ID NO: 264639 - DNA, 25 bp, Homo sapien
ccctagcctggaattagtgacctgt

SEQ ID NO: 264640 - DNA, 25 bp, Homo sapien
gatgcataccacacttgcagatgcg

SEQ ID NO: 264641 - DNA, 25 bp, Homo sapien
cagatgcgacaaaaatagggagggc

SEQ ID NO: 264642 - DNA, 25 bp, Homo sapien
tatggaacagctatcagatggcacg

SEQ ID NO: 264643 - DNA, 25 bp, Homo sapien
tcagctgttttcctatacgctatgg

SEQ ID NO: 264644 - DNA, 25 bp, Homo sapien
tatcagatggcacgaagaggctctg

SEQ ID NO: 264645 - DNA, 25 bp, Homo sapien
tggcagtaatctctggcgctccctc

SEQ ID NO: 264646 - DNA, 25 bp, Homo sapien
tcgttttcgagtggcgtaactttgc

SEQ ID NO: 264647 - DNA, 25 bp, Homo sapien
tcaacacgatcgttttcgagtggcg

SEQ ID NO: 264648 - DNA, 25 bp, Homo sapien
tatcccattctgaatatgacacact

SEQ ID NO: 264649 - DNA, 25 bp, Homo sapien
tatgacacactttcaacacgatcgt

SEQ ID NO: 264650 - DNA, 25 bp, Homo sapien
ttaggcctcccttagccctcatggg

SEQ ID NO: 264651 - DNA, 25 bp, Homo sapien
tcggccccttccagtacaatgcagt

SEQ ID NO: 264652 - DNA, 25 bp, Homo sapien
ccaaggccctttcggttcagtccat

SEQ ID NO: 264653 - DNA, 25 bp, Homo sapien
tagacaacgcatgggcttttcttcc

SEQ ID NO: 264654 - DNA, 25 bp, Homo sapien
acccaagggaagacaacagcgcttc

SEQ ID NO: 264655 - DNA, 25 bp, Homo sapien
caagggaagacaacagcgcttccgg

SEQ ID NO: 264656 - DNA, 25 bp, Homo sapien
gacaacagcgcttccggcaggcagg

SEQ ID NO: 264657 - DNA, 25 bp, Homo sapien
gggaagacaacagcgcttccggcag

SEQ ID NO: 264658 - DNA, 25 bp, Homo sapien
gataccaggcaggacggctactgct

SEQ ID NO: 264659 - DNA, 25 bp, Homo sapien
ggacggctactgctcttgtttttat

SEQ ID NO: 264660 - DNA, 25 bp, Homo sapien
caaccgctgttggcgaaactgtgga

SEQ ID NO: 264661 - DNA, 25 bp, Homo sapien
agcacagggatagcacgggatacca

SEQ ID NO: 264662 - DNA, 25 bp, Homo sapien
gtcatcttggcaagtctattgttcc

SEQ ID NO: 264663 - DNA, 25 bp, Homo sapien
aagccaggcccaaccaattaacatc

SEQ ID NO: 264664 - DNA, 25 bp, Homo sapien
taaaagaggtacttatgtgaatctg

SEQ ID NO: 264665 - DNA, 25 bp, Homo sapien
aatctggatgcatattgaaagaaac

SEQ ID NO: 264666 - DNA, 25 bp, Homo sapien
ccggtgtgctgtgcccacggccttg

SEQ ID NO: 264667 - DNA, 25 bp, Homo sapien
cagaaggtttgtgctgagtggcgca

SEQ ID NO: 264668 - DNA, 25 bp, Homo sapien
tgcagaaggtttgtgctgagtggcg

SEQ ID NO: 264669 - DNA, 25 bp, Homo sapien
cggccttgtgggctgtactgcagaa

SEQ ID NO: 264670 - DNA, 25 bp, Homo sapien
gaagaatgagccagtatctacgggc

SEQ ID NO: 264671 - DNA, 25 bp, Homo sapien
tatctacgggctcaatgctgaggtg

SEQ ID NO: 264672 - DNA, 25 bp, Homo sapien
cacgtgcaggtatgaatggaagcca

SEQ ID NO: 264673 - DNA, 25 bp, Homo sapien
gaagagtacaaggaccattcaggaa

SEQ ID NO: 264674 - DNA, 25 bp, Homo sapien
tgtgctctccgaagagctccgggaa

SEQ ID NO: 264675 - DNA, 25 bp, Homo sapien
cgagtgtataacctctgagcacttg

SEQ ID NO: 264676 - DNA, 25 bp, Homo sapien
cttggtggccttctacagaaggtgc

SEQ ID NO: 264677 - DNA, 25 bp, Homo sapien
ggcagctgcctacgggaaaccaact

SEQ ID NO: 264678 - DNA, 25 bp, Homo sapien
catgaactggcaagtaaattgctgc

SEQ ID NO: 264679 - DNA, 25 bp, Homo sapien
ttagaaagacttcatgaactggcaa

SEQ ID NO: 264680 - DNA, 25 bp, Homo sapien
gacttcatgaactggcaagtaaatt

SEQ ID NO: 264681 - DNA, 25 bp, Homo sapien
gaaagacttcatgaactggcaagta

SEQ ID NO: 264682 - DNA, 25 bp, Homo sapien
atgtcttgcggtgtgctggcttgta

SEQ ID NO: 264683 - DNA, 25 bp, Homo sapien
aaatgtcttgcggtgtgctggcttg

SEQ ID NO: 264684 - DNA, 25 bp, Homo sapien
cccaaatgtcttgcggtgtgctggc

SEQ ID NO: 264685 - DNA, 25 bp, Homo sapien
ctggcttgtaggaggcaaataataa

SEQ ID NO: 264686 - DNA, 25 bp, Homo sapien
agaggcacagcagacaacgtggaag

SEQ ID NO: 264687 - DNA, 25 bp, Homo sapien
gactgtgctgtaggacatcatccat

SEQ ID NO: 264688 - DNA, 25 bp, Homo sapien
ggctagtactggtttccccatccat

SEQ ID NO: 264689 - DNA, 25 bp, Homo sapien
tgaagggtagcttcctggctagtac

SEQ ID NO: 264690 - DNA, 25 bp, Homo sapien
gggcaatatccagctagtgtttgtg

SEQ ID NO: 264691 - DNA, 25 bp, Homo sapien
cgccgtgcagcacggagggcaatat

SEQ ID NO: 264692 - DNA, 25 bp, Homo sapien
tagtgtttgtgtgctcgtatcagga

SEQ ID NO: 264693 - DNA, 25 bp, Homo sapien
tcgtatcaggacaaaccatgcatgt

SEQ ID NO: 264694 - DNA, 25 bp, Homo sapien
aaaatgcagacgtttaatctttctg

SEQ ID NO: 264695 - DNA, 25 bp, Homo sapien
caggatggtcactatggcaacgggc

SEQ ID NO: 264696 - DNA, 25 bp, Homo sapien
catggtcacgcacatttacgatgga

SEQ ID NO: 264697 - DNA, 25 bp, Homo sapien
cgtgctggacgtccggtgacttccc

SEQ ID NO: 264698 - DNA, 25 bp, Homo sapien
tgttagcggcttgtgagtcagccac

SEQ ID NO: 264699 - DNA, 25 bp, Homo sapien
ttcaaaccatttgcaacacagagga

SEQ ID NO: 264700 - DNA, 25 bp, Homo sapien
caaggactggccgtcagatgagcat

SEQ ID NO: 264701 - DNA, 25 bp, Homo sapien
catgccagaggtatgcaaggctcca

SEQ ID NO: 264702 - DNA, 25 bp, Homo sapien
catacatgctcatgagcatcagctg

SEQ ID NO: 264703 - DNA, 25 bp, Homo sapien
acagattccaggttgtggagggcca

SEQ ID NO: 264704 - DNA, 25 bp, Homo sapien
agtggttttggagccccactggaag

SEQ ID NO: 264705 - DNA, 25 bp, Homo sapien
gagtggacgtcaactgcaaggcaga

SEQ ID NO: 264706 - DNA, 25 bp, Homo sapien
gaatcggatgctaagatcttgagga

SEQ ID NO: 264707 - DNA, 25 bp, Homo sapien
gacacgctgcctcctacagaggtgc

SEQ ID NO: 264708 - DNA, 25 bp, Homo sapien
tgaggatccatttcggcgcaggtaa

SEQ ID NO: 264709 - DNA, 25 bp, Homo sapien
tcacacgggttctggaagagacgcc

SEQ ID NO: 264710 - DNA, 25 bp, Homo sapien
gagcattgcagccagaagacggcca

SEQ ID NO: 264711 - DNA, 25 bp, Homo sapien
ttagtgcagattccctactggtatg

SEQ ID NO: 264712 - DNA, 25 bp, Homo sapien
gcagattccctactggtatgacaca

SEQ ID NO: 264713 - DNA, 25 bp, Homo sapien
ctgggcttgttcatcactccttagg

SEQ ID NO: 264714 - DNA, 25 bp, Homo sapien
tactggtatgacacactacagaact

SEQ ID NO: 264715 - DNA, 25 bp, Homo sapien
tagtttgacgtgtgcccttgcctct

SEQ ID NO: 264716 - DNA, 25 bp, Homo sapien
gccccttccgaacaggatgttgtct

SEQ ID NO: 264717 - DNA, 25 bp, Homo sapien
taaacgttgcctcactaggctcctc

SEQ ID NO: 264718 - DNA, 25 bp, Homo sapien
ttataaagtgcttcaagccccttcc

SEQ ID NO: 264719 - DNA, 25 bp, Homo sapien
tcttcaatcaaacaggcagtaggaa

SEQ ID NO: 264720 - DNA, 25 bp, Homo sapien
ttcaatcaaacaggcagtaggaacc

SEQ ID NO: 264721 - DNA, 25 bp, Homo sapien
cttcaatcaaacaggcagtaggaac

SEQ ID NO: 264722 - DNA, 25 bp, Homo sapien
agtcctattttacttggagcagccc

SEQ ID NO: 264723 - DNA, 25 bp, Homo sapien
catgaggtatcatcggttgtcaaga

SEQ ID NO: 264724 - DNA, 25 bp, Homo sapien
tttgcccaaagtaaagccgagctcg

SEQ ID NO: 264725 - DNA, 25 bp, Homo sapien
ttgtaggagaaattgggtcgaccca

SEQ ID NO: 264726 - DNA, 25 bp, Homo sapien
gcaaatgggttcctctgtgttcagt

SEQ ID NO: 264727 - DNA, 25 bp, Homo sapien
tgtaaatgtaacgtgctgcaaaaga

SEQ ID NO: 264728 - DNA, 25 bp, Homo sapien
ggtatgtggcagcttacctaagcat

SEQ ID NO: 264729 - DNA, 25 bp, Homo sapien
gaaatgaagtcattctggaatcggg

SEQ ID NO: 264730 - DNA, 25 bp, Homo sapien
tgataaaatactgcagttcaaagca

SEQ ID NO: 264731 - DNA, 25 bp, Homo sapien
aggattgataaaatactgcagttca

SEQ ID NO: 264732 - DNA, 25 bp, Homo sapien
caggattgataaaatactgcagttc

SEQ ID NO: 264733 - DNA, 25 bp, Homo sapien
gcacctcctccagcaatgtcttttt

SEQ ID NO: 264734 - DNA, 25 bp, Homo sapien
gccaacggccagtactgtgaaaaaa

SEQ ID NO: 264735 - DNA, 25 bp, Homo sapien
cacatgtgcactgccaacggccagt

SEQ ID NO: 264736 - DNA, 25 bp, Homo sapien
tgtgcactgccaacggccagtactg

SEQ ID NO: 264737 - DNA, 25 bp, Homo sapien
tactgtgaaaaaaccgatttcctga

SEQ ID NO: 264738 - DNA, 25 bp, Homo sapien
ctggagaggtttgctgaaaggatgc

SEQ ID NO: 264739 - DNA, 25 bp, Homo sapien
tggagaggtttgctgaaaggatgcc

SEQ ID NO: 264740 - DNA, 25 bp, Homo sapien
tcactacggccattcgtccacacca

SEQ ID NO: 264741 - DNA, 25 bp, Homo sapien
aacattcactacggccattcgtcca

SEQ ID NO: 264742 - DNA, 25 bp, Homo sapien
attcactacggccattcgtccacac

SEQ ID NO: 264743 - DNA, 25 bp, Homo sapien
tccaacattcactacggccattcgt

SEQ ID NO: 264744 - DNA, 25 bp, Homo sapien
gacagcctggactgggtacactgtc

SEQ ID NO: 264745 - DNA, 25 bp, Homo sapien
gctgtgcttcacaaaggatgtcttc

SEQ ID NO: 264746 - DNA, 25 bp, Homo sapien
gcaaggaccggcatagacgttacag

SEQ ID NO: 264747 - DNA, 25 bp, Homo sapien
gacgttacagacagactgcagctca

SEQ ID NO: 264748 - DNA, 25 bp, Homo sapien
ttcatcccgatggagcaggagactc

SEQ ID NO: 264749 - DNA, 25 bp, Homo sapien
catcgtataaaaccagtcaatcaag

SEQ ID NO: 264750 - DNA, 25 bp, Homo sapien
cagtgcaacaccatcgtataaaacc

SEQ ID NO: 264751 - DNA, 25 bp, Homo sapien
agtgcttgggacacagtgcaacacc

SEQ ID NO: 264752 - DNA, 25 bp, Homo sapien
taaaaccagtcaatcaagaagagcc

SEQ ID NO: 264753 - DNA, 25 bp, Homo sapien
tcatacaataaacgcaaggaccctg

SEQ ID NO: 264754 - DNA, 25 bp, Homo sapien
tatatccacaaacaggaccatgctg

SEQ ID NO: 264755 - DNA, 25 bp, Homo sapien
tatgaaaaggtcaggttggagtcac

SEQ ID NO: 264756 - DNA, 25 bp, Homo sapien
ccgtgccacgggttgaaaaggcctg

SEQ ID NO: 264757 - DNA, 25 bp, Homo sapien
agagagaggtcaaagctgagatgca

SEQ ID NO: 264758 - DNA, 25 bp, Homo sapien
gaggagaaaaaggttcagcaggaac

SEQ ID NO: 264759 - DNA, 25 bp, Homo sapien
gaggtgttcagaagacaggggacca

SEQ ID NO: 264760 - DNA, 25 bp, Homo sapien
gagaggtcaaagctgagatgcaact

SEQ ID NO: 264761 - DNA, 25 bp, Homo sapien
tgccatcaccgactgtccacagctc

SEQ ID NO: 264762 - DNA, 25 bp, Homo sapien
ccgtggcacctgtccctctgtgtag

SEQ ID NO: 264763 - DNA, 25 bp, Homo sapien
aggagtgagcccgtggcacctgtcc

SEQ ID NO: 264764 - DNA, 25 bp, Homo sapien
tgtccctctgtgtagctgccatcac

SEQ ID NO: 264765 - DNA, 25 bp, Homo sapien
gtctggctgagcaattgccctggaa

SEQ ID NO: 264766 - DNA, 25 bp, Homo sapien
cgggtctggctgagcaattgccctg

SEQ ID NO: 264767 - DNA, 25 bp, Homo sapien
tggctgagcaattgccctggaaggc

SEQ ID NO: 264768 - DNA, 25 bp, Homo sapien
ggctgagcaattgccctggaaggca

SEQ ID NO: 264769 - DNA, 25 bp, Homo sapien
ccctcagggccatcgaaagaggagt

SEQ ID NO: 264770 - DNA, 25 bp, Homo sapien
tccctcagggccatcgaaagaggag

SEQ ID NO: 264771 - DNA, 25 bp, Homo sapien
cctcagggccatcgaaagaggagtg

SEQ ID NO: 264772 - DNA, 25 bp, Homo sapien
tcagggccatcgaaagaggagtggg

SEQ ID NO: 264773 - DNA, 25 bp, Homo sapien
ccagcctcttgatcaggcggtcgcg

SEQ ID NO: 264774 - DNA, 25 bp, Homo sapien
gcctcttgatcaggcggtcgcgctc

SEQ ID NO: 264775 - DNA, 25 bp, Homo sapien
ttccggcccagcctcttgatcaggc

SEQ ID NO: 264776 - DNA, 25 bp, Homo sapien
tgatcaggcggtcgcgctcgttcag

SEQ ID NO: 264777 - DNA, 25 bp, Homo sapien
gaaacgtcctaagttatccatcagg

SEQ ID NO: 264778 - DNA, 25 bp, Homo sapien
tgagacctgctatatgcccatcctg

SEQ ID NO: 264779 - DNA, 25 bp, Homo sapien
gacccaggcggaacatcaaaggctg

SEQ ID NO: 264780 - DNA, 25 bp, Homo sapien
aggcaacacggctcaacagaacaga

SEQ ID NO: 264781 - DNA, 25 bp, Homo sapien
gcctgagaatcccaaaggctcaggg

SEQ ID NO: 264782 - DNA, 25 bp, Homo sapien
cagaggtggcctgagagttgactga

SEQ ID NO: 264783 - DNA, 25 bp, Homo sapien
ataactgagagtcccggtcctgggc

SEQ ID NO: 264784 - DNA, 25 bp, Homo sapien
caagggcttgtctgcagaggtggcc

SEQ ID NO: 264785 - DNA, 25 bp, Homo sapien
cttcttcctgactaacagctccgtg

SEQ ID NO: 264786 - DNA, 25 bp, Homo sapien
tggtgtcataagcacggatgacttc

SEQ ID NO: 264787 - DNA, 25 bp, Homo sapien
ttcctgactaacagctccgtgttct

SEQ ID NO: 264788 - DNA, 25 bp, Homo sapien
tttggtggtgtcataagcacggatg

SEQ ID NO: 264789 - DNA, 25 bp, Homo sapien
tgcactccaggtttgcgagggaata

SEQ ID NO: 264790 - DNA, 25 bp, Homo sapien
agttgggagggcaaagatagcttcc

SEQ ID NO: 264791 - DNA, 25 bp, Homo sapien
gttaacactgggtgcaacaaactga

SEQ ID NO: 264792 - DNA, 25 bp, Homo sapien
taggctaagcactgcagacgagttg

SEQ ID NO: 264793 - DNA, 25 bp, Homo sapien
tcaggttgaccaccccgatagagaa

SEQ ID NO: 264794 - DNA, 25 bp, Homo sapien
ggagagcaacctgcctacagtgaag

SEQ ID NO: 264795 - DNA, 25 bp, Homo sapien
tacagtgaagtctgcatgtggcccg

SEQ ID NO: 264796 - DNA, 25 bp, Homo sapien
gatgggcctctcacgcaacataaaa

SEQ ID NO: 264797 - DNA, 25 bp, Homo sapien
ttcgcatctgtatctgagtctgcag

SEQ ID NO: 264798 - DNA, 25 bp, Homo sapien
cagagagacgtttagaatatatgca

SEQ ID NO: 264799 - DNA, 25 bp, Homo sapien
tctttacagaacgagaagggcggtg

SEQ ID NO: 264800 - DNA, 25 bp, Homo sapien
tcggccgccatgcactgagtggtgt

SEQ ID NO: 264801 - DNA, 25 bp, Homo sapien
tacacactgggctgatcatgacaat

SEQ ID NO: 264802 - DNA, 25 bp, Homo sapien
tgcaaagatctggtggcgattcctc

SEQ ID NO: 264803 - DNA, 25 bp, Homo sapien
caggtgtgttccttcgctgtgcagg

SEQ ID NO: 264804 - DNA, 25 bp, Homo sapien
tagcacaatcattcctacagggttg

SEQ ID NO: 264805 - DNA, 25 bp, Homo sapien
gtgaattgcattgttctgctgcccc

SEQ ID NO: 264806 - DNA, 25 bp, Homo sapien
tgaattgcattgttctgctgcccct

SEQ ID NO: 264807 - DNA, 25 bp, Homo sapien
aattgcattgttctgctgcccctca

SEQ ID NO: 264808 - DNA, 25 bp, Homo sapien
gaattgcattgttctgctgcccctc

SEQ ID NO: 264809 - DNA, 25 bp, Homo sapien
gaagagagactcaacacaggactgg

SEQ ID NO: 264810 - DNA, 25 bp, Homo sapien
cataaccctggtcaagaagcctgga

SEQ ID NO: 264811 - DNA, 25 bp, Homo sapien
tactttgagacgatgaccctgggca

SEQ ID NO: 264812 - DNA, 25 bp, Homo sapien
gtcacttgaaaatgcgccagcctgg

SEQ ID NO: 264813 - DNA, 25 bp, Homo sapien
acaggcctgaacttggccatctcgg

SEQ ID NO: 264814 - DNA, 25 bp, Homo sapien
ggagagaaattccatgacagggctg

SEQ ID NO: 264815 - DNA, 25 bp, Homo sapien
gctcagagggaagcggcattgcaca

SEQ ID NO: 264816 - DNA, 25 bp, Homo sapien
aaaagtctttactgtgcagggaagg

SEQ ID NO: 264817 - DNA, 25 bp, Homo sapien
gatgcatttgaacgacaattcagtg

SEQ ID NO: 264818 - DNA, 25 bp, Homo sapien
aacgacaattcagtgaccggcagcc

SEQ ID NO: 264819 - DNA, 25 bp, Homo sapien
tggctttgctcgcatgagaaagacg

SEQ ID NO: 264820 - DNA, 25 bp, Homo sapien
gaaagacgccacaaagatgatgcat

SEQ ID NO: 264821 - DNA, 25 bp, Homo sapien
agcaatccaggcacagatgtgacag

SEQ ID NO: 264822 - DNA, 25 bp, Homo sapien
taacacttctagagggaggcaacaa

SEQ ID NO: 264823 - DNA, 25 bp, Homo sapien
ccgtttgtattcactccaggaggga

SEQ ID NO: 264824 - DNA, 25 bp, Homo sapien
caaccagaggacattaataggacgt

SEQ ID NO: 264825 - DNA, 25 bp, Homo sapien
ttgaaacaggtttgcgcagacatac

SEQ ID NO: 264826 - DNA, 25 bp, Homo sapien
acttcctgctttccaattgaatttg

SEQ ID NO: 264827 - DNA, 25 bp, Homo sapien
ttccaattgaatttgagctgcctcc

SEQ ID NO: 264828 - DNA, 25 bp, Homo sapien
aagtaacaatgtcatgacttcctgc

SEQ ID NO: 264829 - DNA, 25 bp, Homo sapien
tgaatgcaactccttgtacctagag

SEQ ID NO: 264830 - DNA, 25 bp, Homo sapien
atctaacaggctgtctttcatcccc

SEQ ID NO: 264831 - DNA, 25 bp, Homo sapien
cagagtgagaggctctagttggaca

SEQ ID NO: 264832 - DNA, 25 bp, Homo sapien
tcagttcctgaagtacgcacatatt

SEQ ID NO: 264833 - DNA, 25 bp, Homo sapien
caatgccggcctgtggccttgattt

SEQ ID NO: 264834 - DNA, 25 bp, Homo sapien
tagttggacatcacccacaggctgc

SEQ ID NO: 264835 - DNA, 25 bp, Homo sapien
gataaaattacagctttgaatggag

SEQ ID NO: 264836 - DNA, 25 bp, Homo sapien
catgacagaataacttggagataaa

SEQ ID NO: 264837 - DNA, 25 bp, Homo sapien
tgaatggagatttggctgtgagggt

SEQ ID NO: 264838 - DNA, 25 bp, Homo sapien
aattacagctttgaatggagatttg

SEQ ID NO: 264839 - DNA, 25 bp, Homo sapien
atacaaaagagaacacccttcctca

SEQ ID NO: 264840 - DNA, 25 bp, Homo sapien
tgaaatattgcaatgaggaatgaag

SEQ ID NO: 264841 - DNA, 25 bp, Homo sapien
caatgaggaatgaagcatgcataca

SEQ ID NO: 264842 - DNA, 25 bp, Homo sapien
gcatgcatacaaaagagaacaccct

SEQ ID NO: 264843 - DNA, 25 bp, Homo sapien
cctgcggcctgccagagaagggaca

SEQ ID NO: 264844 - DNA, 25 bp, Homo sapien
gacaggaaagacctgggtctgggtc

SEQ ID NO: 264845 - DNA, 25 bp, Homo sapien
agaaagtatgtcgactccctgcggc

SEQ ID NO: 264846 - DNA, 25 bp, Homo sapien
tgggcctggccactaaggaagccac

SEQ ID NO: 264847 - DNA, 25 bp, Homo sapien
tcatagaagttggggggagcccgtg

SEQ ID NO: 264848 - DNA, 25 bp, Homo sapien
catagaagttggggggagcccgtgg

SEQ ID NO: 264849 - DNA, 25 bp, Homo sapien
ccatttcctgcttataggacagaga

SEQ ID NO: 264850 - DNA, 25 bp, Homo sapien
tcctgcttataggacagagaagcag

SEQ ID NO: 264851 - DNA, 25 bp, Homo sapien
gtgtcggtttatgatagttctaggg

SEQ ID NO: 264852 - DNA, 25 bp, Homo sapien
ctagtgtcggtttatgatagttcta

SEQ ID NO: 264853 - DNA, 25 bp, Homo sapien
gtacatttccaactgctagcacaac

SEQ ID NO: 264854 - DNA, 25 bp, Homo sapien
gcttttcaacgaaggattgcctttc

SEQ ID NO: 264855 - DNA, 25 bp, Homo sapien
gccataacctgagacttgggatgaa

SEQ ID NO: 264856 - DNA, 25 bp, Homo sapien
gatacttagtatagctcctcagcca

SEQ ID NO: 264857 - DNA, 25 bp, Homo sapien
gggaagacgcaaataacaggactat

SEQ ID NO: 264858 - DNA, 25 bp, Homo sapien
agtcatcagtctcagtattccacag

SEQ ID NO: 264859 - DNA, 25 bp, Homo sapien
aaacctgtttgaactctgtgagatc

SEQ ID NO: 264860 - DNA, 25 bp, Homo sapien
tattgaaatcataaactatcacccg

SEQ ID NO: 264861 - DNA, 25 bp, Homo sapien
ggccggagccatgcggaccaagttc

SEQ ID NO: 264862 - DNA, 25 bp, Homo sapien
ttgctgcccagagccttgcgtgcac

SEQ ID NO: 264863 - DNA, 25 bp, Homo sapien
ccctcggcgacgtgctgggaagatt

SEQ ID NO: 264864 - DNA, 25 bp, Homo sapien
ctgaggcttaaaccctgcgcagagc

SEQ ID NO: 264865 - DNA, 25 bp, Homo sapien
tgtccaccaatactgaacatgaagc

SEQ ID NO: 264866 - DNA, 25 bp, Homo sapien
gaagtctgggagatacagctagtgt

SEQ ID NO: 264867 - DNA, 25 bp, Homo sapien
gaagaccgctaatgacagcacgtag

SEQ ID NO: 264868 - DNA, 25 bp, Homo sapien
catgaagcagctacaaccaaagtga

SEQ ID NO: 264869 - DNA, 25 bp, Homo sapien
tatatgacagatagccccaaatcag

SEQ ID NO: 264870 - DNA, 25 bp, Homo sapien
cagggttaattcaattttgcgagtc

SEQ ID NO: 264871 - DNA, 25 bp, Homo sapien
ggtgcttttgtctacaagtctatat

SEQ ID NO: 264872 - DNA, 25 bp, Homo sapien
aactagtaatgatggtgcttttgtc

SEQ ID NO: 264873 - DNA, 25 bp, Homo sapien
cacagatcggcattccaggaaagca

SEQ ID NO: 264874 - DNA, 25 bp, Homo sapien
ttccaggaaagcacaggatgtcatt

SEQ ID NO: 264875 - DNA, 25 bp, Homo sapien
catactcctgatgtgggcatcacag

SEQ ID NO: 264876 - DNA, 25 bp, Homo sapien
taaaaccttggcctgcatactcctg

SEQ ID NO: 264877 - DNA, 25 bp, Homo sapien
tgcggcttcgggtgtttcctccact

SEQ ID NO: 264878 - DNA, 25 bp, Homo sapien
tctgcacgtggtccactgctgatcc

SEQ ID NO: 264879 - DNA, 25 bp, Homo sapien
gacactagatggaacccatggtcca

SEQ ID NO: 264880 - DNA, 25 bp, Homo sapien
cattttcctctcaatacaggccagc

SEQ ID NO: 264881 - DNA, 25 bp, Homo sapien
actggaggcccgcacatctgtggcc

SEQ ID NO: 264882 - DNA, 25 bp, Homo sapien
cagcgtctgcgattcctcccaaggg

SEQ ID NO: 264883 - DNA, 25 bp, Homo sapien
cagtgtgatgcccagcgtctgcgat

SEQ ID NO: 264884 - DNA, 25 bp, Homo sapien
tgctcactggaggcccgcacatctg

SEQ ID NO: 264885 - DNA, 25 bp, Homo sapien
tgaagccaccccagatgccagtttt

SEQ ID NO: 264886 - DNA, 25 bp, Homo sapien
gaagccaccccagatgccagttttc

SEQ ID NO: 264887 - DNA, 25 bp, Homo sapien
ctggaatataatccccacatgaaac

SEQ ID NO: 264888 - DNA, 25 bp, Homo sapien
ttaaagacaaacaactggaatataa

SEQ ID NO: 264889 - DNA, 25 bp, Homo sapien
aacaagataaatccataaatcagac

SEQ ID NO: 264890 - DNA, 25 bp, Homo sapien
acaagataaatccataaatcagact

SEQ ID NO: 264891 - DNA, 25 bp, Homo sapien
aagataaatccataaatcagacttt

SEQ ID NO: 264892 - DNA, 25 bp, Homo sapien
caagataaatccataaatcagactt

SEQ ID NO: 264893 - DNA, 25 bp, Homo sapien
tctacgatccttggagtaaatcagt

SEQ ID NO: 264894 - DNA, 25 bp, Homo sapien
caaggtgttgaaaggtttgatgatg

SEQ ID NO: 264895 - DNA, 25 bp, Homo sapien
tgatgatagaggagtttgctccata

SEQ ID NO: 264896 - DNA, 25 bp, Homo sapien
aatatctacgatccttggagtaaat

SEQ ID NO: 264897 - DNA, 25 bp, Homo sapien
ttaagatccaataaacttccgtgaa

SEQ ID NO: 264898 - DNA, 25 bp, Homo sapien
cttccgtgaacgatttgtgttattc

SEQ ID NO: 264899 - DNA, 25 bp, Homo sapien
gcaaggtaaatgttagttaattcag

SEQ ID NO: 264900 - DNA, 25 bp, Homo sapien
tggaataaaatctggcaaggtaaat

SEQ ID NO: 264901 - DNA, 25 bp, Homo sapien
agaaagctccctcttacttcatggg

SEQ ID NO: 264902 - DNA, 25 bp, Homo sapien
caccatccctggctactaggaatat

SEQ ID NO: 264903 - DNA, 25 bp, Homo sapien
tcagtttgcatacaacctcttcaga

SEQ ID NO: 264904 - DNA, 25 bp, Homo sapien
gagtgtaagcctttgagtctacaat

SEQ ID NO: 264905 - DNA, 25 bp, Homo sapien
taagttcacttggaggctaaaaatc

SEQ ID NO: 264906 - DNA, 25 bp, Homo sapien
gataatttactgaagcgtctctgac

SEQ ID NO: 264907 - DNA, 25 bp, Homo sapien
tataaagaatcagatgcataggcaa

SEQ ID NO: 264908 - DNA, 25 bp, Homo sapien
aggtatacagtatgcatggtttctc

SEQ ID NO: 264909 - DNA, 25 bp, Homo sapien
tggcaggcagttgcgaaatccaaac

SEQ ID NO: 264910 - DNA, 25 bp, Homo sapien
ggaaggttcctctcaagacaggcag

SEQ ID NO: 264911 - DNA, 25 bp, Homo sapien
tccaccaggcactatgagcataaca

SEQ ID NO: 264912 - DNA, 25 bp, Homo sapien
tgcatggtgaaaacgagaccaccca

SEQ ID NO: 264913 - DNA, 25 bp, Homo sapien
acagcacacgttctccggacaggag

SEQ ID NO: 264914 - DNA, 25 bp, Homo sapien
acaggagggcgaaggcccaagacct

SEQ ID NO: 264915 - DNA, 25 bp, Homo sapien
cactacttcctggagacgccgggga

SEQ ID NO: 264916 - DNA, 25 bp, Homo sapien
gaaagatctgggtcccaccactact

SEQ ID NO: 264917 - DNA, 25 bp, Homo sapien
gggctggggcctgccgttcttcctc

SEQ ID NO: 264918 - DNA, 25 bp, Homo sapien
ggctggggcctgccgttcttcctcc

SEQ ID NO: 264919 - DNA, 25 bp, Homo sapien
ttttcagttgcacgggcgagctccg

SEQ ID NO: 264920 - DNA, 25 bp, Homo sapien
ctacgcggctgccacgagcgctgag

SEQ ID NO: 264921 - DNA, 25 bp, Homo sapien
tgagcggccgggcatttggcctcga

SEQ ID NO: 264922 - DNA, 25 bp, Homo sapien
cctagctcccgacggacgcagtttt

SEQ ID NO: 264923 - DNA, 25 bp, Homo sapien
caccgacgcgcagagttaagtgctg

SEQ ID NO: 264924 - DNA, 25 bp, Homo sapien
taaagagacgcatacaccgttgggt

SEQ ID NO: 264925 - DNA, 25 bp, Homo sapien
tatagtctggctggcaaacgagcga

SEQ ID NO: 264926 - DNA, 25 bp, Homo sapien
caagcctggaaagcagaccgtgtct

SEQ ID NO: 264927 - DNA, 25 bp, Homo sapien
tggtgtagagtcgttccctgggtag

SEQ ID NO: 264928 - DNA, 25 bp, Homo sapien
cagggcagccggacactgaacccag

SEQ ID NO: 264929 - DNA, 25 bp, Homo sapien
aaagatgaggggtcacaagctttgg

SEQ ID NO: 264930 - DNA, 25 bp, Homo sapien
ttccgcagggcagccggacactgaa

SEQ ID NO: 264931 - DNA, 25 bp, Homo sapien
gacccttgaaacatgtgactgctgg

SEQ ID NO: 264932 - DNA, 25 bp, Homo sapien
tatgtgtctcggaccaaaatcaaca

SEQ ID NO: 264933 - DNA, 25 bp, Homo sapien
caacatgtagtccaacccagatacc

SEQ ID NO: 264934 - DNA, 25 bp, Homo sapien
gggcaaggcaccgttggcaactatg

SEQ ID NO: 264935 - DNA, 25 bp, Homo sapien
tgaagaagaccaagttggaccatgt

SEQ ID NO: 264936 - DNA, 25 bp, Homo sapien
ccatgtgctcttccgcatacaggtg

SEQ ID NO: 264937 - DNA, 25 bp, Homo sapien
tttgcgcatctggatggatcctgtg

SEQ ID NO: 264938 - DNA, 25 bp, Homo sapien
gatcctgtgggaacctgaagaagac

SEQ ID NO: 264939 - DNA, 25 bp, Homo sapien
gattttctattaagactagctctac

SEQ ID NO: 264940 - DNA, 25 bp, Homo sapien
tatctaataggtctgctctccgaca

SEQ ID NO: 264941 - DNA, 25 bp, Homo sapien
tagaggactcagaaatggttggcac

SEQ ID NO: 264942 - DNA, 25 bp, Homo sapien
tggttggcacctaattgagaatgtg

SEQ ID NO: 264943 - DNA, 25 bp, Homo sapien
cctggggttctgaactctgctgttg

SEQ ID NO: 264944 - DNA, 25 bp, Homo sapien
gccctggggttctgaactctgctgt

SEQ ID NO: 264945 - DNA, 25 bp, Homo sapien
ccctggggttctgaactctgctgtt

SEQ ID NO: 264946 - DNA, 25 bp, Homo sapien
tccagcagtacttcgatgttaccgg

SEQ ID NO: 264947 - DNA, 25 bp, Homo sapien
tctggcatttcatcagtctcacatc

SEQ ID NO: 264948 - DNA, 25 bp, Homo sapien
cagtacttcgatgttaccgggagta

SEQ ID NO: 264949 - DNA, 25 bp, Homo sapien
tggcatttcatcagtctcacatcta

SEQ ID NO: 264950 - DNA, 25 bp, Homo sapien
cacagatctctagcagcctctagaa

SEQ ID NO: 264951 - DNA, 25 bp, Homo sapien
cctctagaatctcacagactctagc

SEQ ID NO: 264952 - DNA, 25 bp, Homo sapien
aaaaaagtgctcatggctgtcgtct

SEQ ID NO: 264953 - DNA, 25 bp, Homo sapien
gactctagcatctgatttggttgta

SEQ ID NO: 264954 - DNA, 25 bp, Homo sapien
aatctggccataacaatattccata

SEQ ID NO: 264955 - DNA, 25 bp, Homo sapien
aaacctcaccaacactgtaggtgat

SEQ ID NO: 264956 - DNA, 25 bp, Homo sapien
cagacataatgtaaatctggccata

SEQ ID NO: 264957 - DNA, 25 bp, Homo sapien
gcccacttgtaactttcagtgtgaa

SEQ ID NO: 264958 - DNA, 25 bp, Homo sapien
gaaaagttatagcatttgttcctca

SEQ ID NO: 264959 - DNA, 25 bp, Homo sapien
gcagagtatgtagatagcttgaggg

SEQ ID NO: 264960 - DNA, 25 bp, Homo sapien
gttcctcaattgctcccataacagg

SEQ ID NO: 264961 - DNA, 25 bp, Homo sapien
aattgctcccataacaggcactgat

SEQ ID NO: 264962 - DNA, 25 bp, Homo sapien
aattctaaaagcagttgcagccaac

SEQ ID NO: 264963 - DNA, 25 bp, Homo sapien
ttctaaaagcagttgcagccaacaa

SEQ ID NO: 264964 - DNA, 25 bp, Homo sapien
attctaaaagcagttgcagccaaca

SEQ ID NO: 264965 - DNA, 25 bp, Homo sapien
tctaaaagcagttgcagccaacaat

SEQ ID NO: 264966 - DNA, 25 bp, Homo sapien
taccatctaaaacaagtgcttacag

SEQ ID NO: 264967 - DNA, 25 bp, Homo sapien
tactacagagtacaaatgcttggcc

SEQ ID NO: 264968 - DNA, 25 bp, Homo sapien
ggaggtccactacaattcaaaagca

SEQ ID NO: 264969 - DNA, 25 bp, Homo sapien
gaaatcagaggtttgccctcagaaa

SEQ ID NO: 264970 - DNA, 25 bp, Homo sapien
ccatcatttcattgagtgcatgcag

SEQ ID NO: 264971 - DNA, 25 bp, Homo sapien
gttgagattccaagttgccttgctg

SEQ ID NO: 264972 - DNA, 25 bp, Homo sapien
tttcattgagtgcatgcagtacagc

SEQ ID NO: 264973 - DNA, 25 bp, Homo sapien
ggttagttgagattccaagttgcct

SEQ ID NO: 264974 - DNA, 25 bp, Homo sapien
catgtcgggatccagtaagtcactt

SEQ ID NO: 264975 - DNA, 25 bp, Homo sapien
gatctttagtcagtcaacgtgttca

SEQ ID NO: 264976 - DNA, 25 bp, Homo sapien
agaacgtgttgcactgttggagcac

SEQ ID NO: 264977 - DNA, 25 bp, Homo sapien
tgagaccttcatcgatgcatacaca

SEQ ID NO: 264978 - DNA, 25 bp, Homo sapien
caatctgcattggactgaagagtga

SEQ ID NO: 264979 - DNA, 25 bp, Homo sapien
cccttagtaagcgatattgtcccac

SEQ ID NO: 264980 - DNA, 25 bp, Homo sapien
gattttggacactaacaacagtagt

SEQ ID NO: 264981 - DNA, 25 bp, Homo sapien
ccctgactaacaaggcaagctgctt

SEQ ID NO: 264982 - DNA, 25 bp, Homo sapien
tcctctaccttgctagatcctaagt

SEQ ID NO: 264983 - DNA, 25 bp, Homo sapien
gctagatcctaagttgttataggaa

SEQ ID NO: 264984 - DNA, 25 bp, Homo sapien
ccttgctagatcctaagttgttata

SEQ ID NO: 264985 - DNA, 25 bp, Homo sapien
gatcctaagttgttataggaagtca

SEQ ID NO: 264986 - DNA, 25 bp, Homo sapien
gctgccgccccttctacgactccgc

SEQ ID NO: 264987 - DNA, 25 bp, Homo sapien
ctccgccccacacggtgggaatatg

SEQ ID NO: 264988 - DNA, 25 bp, Homo sapien
gactccgccccacacggtgggaata

SEQ ID NO: 264989 - DNA, 25 bp, Homo sapien
cgccccacacggtgggaatatggga

SEQ ID NO: 264990 - DNA, 25 bp, Homo sapien
actgcccaaagctgccgccaaatgc

SEQ ID NO: 264991 - DNA, 25 bp, Homo sapien
cgccaaatgcaccacgtggaaccag

SEQ ID NO: 264992 - DNA, 25 bp, Homo sapien
aaagctgccgccaaatgcaccacgt

SEQ ID NO: 264993 - DNA, 25 bp, Homo sapien
tgccgccaaatgcaccacgtggaac

SEQ ID NO: 264994 - DNA, 25 bp, Homo sapien
ggagggagggcactcgcggaacacg

SEQ ID NO: 264995 - DNA, 25 bp, Homo sapien
aaaaacgtcgcgaagcctcgggctg

SEQ ID NO: 264996 - DNA, 25 bp, Homo sapien
actcgcggaacacggccgcggctgt

SEQ ID NO: 264997 - DNA, 25 bp, Homo sapien
gcggctgtcgcaaaaacgtcgcgaa

SEQ ID NO: 264998 - DNA, 25 bp, Homo sapien
cactcactctcccatacactcaaac

SEQ ID NO: 264999 - DNA, 25 bp, Homo sapien
cactcaaacagaagggcagagccgc

SEQ ID NO: 265000 - DNA, 25 bp, Homo sapien
tcgtcctctcacacgcgcactcacg

SEQ ID NO: 265001 - DNA, 25 bp, Homo sapien
tctcacacgcgcactcacgcctcac

SEQ ID NO: 265002 - DNA, 25 bp, Homo sapien
tgtccccgcgggctccctgggcgcc

SEQ ID NO: 265003 - DNA, 25 bp, Homo sapien
tgcccttgtccccgcgggctccctg

SEQ ID NO: 265004 - DNA, 25 bp, Homo sapien
gctctctccggccgcgcgttctgct

SEQ ID NO: 265005 - DNA, 25 bp, Homo sapien
atcccccggcgaaggagagccgagg

SEQ ID NO: 265006 - DNA, 25 bp, Homo sapien
cagcccgactgatgcggcaagagca

SEQ ID NO: 265007 - DNA, 25 bp, Homo sapien
agcccgactgatgcggcaagagcag

SEQ ID NO: 265008 - DNA, 25 bp, Homo sapien
cgactgatgcggcaagagcaggagg

SEQ ID NO: 265009 - DNA, 25 bp, Homo sapien
cccgactgatgcggcaagagcagga

SEQ ID NO: 265010 - DNA, 25 bp, Homo sapien
agcacgggcagccgcagcccccggg

SEQ ID NO: 265011 - DNA, 25 bp, Homo sapien
gaagcacgggcagccgcagcccccg

SEQ ID NO: 265012 - DNA, 25 bp, Homo sapien
gcacgggcagccgcagcccccggga

SEQ ID NO: 265013 - DNA, 25 bp, Homo sapien
cacgggcagccgcagcccccgggaa

SEQ ID NO: 265014 - DNA, 25 bp, Homo sapien
cagccctcgtattcaaacaggtcct

SEQ ID NO: 265015 - DNA, 25 bp, Homo sapien
tttgcagccctcgtattcaaacagg

SEQ ID NO: 265016 - DNA, 25 bp, Homo sapien
tcttggctttgtagacgtgaccata

SEQ ID NO: 265017 - DNA, 25 bp, Homo sapien
aagtgcctcggccaactttgcagcc

SEQ ID NO: 265018 - DNA, 25 bp, Homo sapien
cggcgtcgaggaagtcagagcccgg

SEQ ID NO: 265019 - DNA, 25 bp, Homo sapien
aggccggcgtcgaggaagtcagagc

SEQ ID NO: 265020 - DNA, 25 bp, Homo sapien
gcgtcgaggaagtcagagcccggca

SEQ ID NO: 265021 - DNA, 25 bp, Homo sapien
ccagaggccggcgtcgaggaagtca

SEQ ID NO: 265022 - DNA, 25 bp, Homo sapien
acacagacgcggcacgcaggatttc

SEQ ID NO: 265023 - DNA, 25 bp, Homo sapien
gtttggatccctcgtacaccacttc

SEQ ID NO: 265024 - DNA, 25 bp, Homo sapien
tcgtgggtttggatccctcgtacac

SEQ ID NO: 265025 - DNA, 25 bp, Homo sapien
cgcaggatttctcgtgggtttggat

SEQ ID NO: 265026 - DNA, 25 bp, Homo sapien
aaagtatacagcccacggtgcagag

SEQ ID NO: 265027 - DNA, 25 bp, Homo sapien
gtatacagcccacggtgcagaggct

SEQ ID NO: 265028 - DNA, 25 bp, Homo sapien
aagtatacagcccacggtgcagagg

SEQ ID NO: 265029 - DNA, 25 bp, Homo sapien
atacagcccacggtgcagaggctca

SEQ ID NO: 265030 - DNA, 25 bp, Homo sapien
cagtgatctgctagggttgttacca

SEQ ID NO: 265031 - DNA, 25 bp, Homo sapien
ggataaaactccctgtggatttagc

SEQ ID NO: 265032 - DNA, 25 bp, Homo sapien
tacttgtacttgagcatggtgatca

SEQ ID NO: 265033 - DNA, 25 bp, Homo sapien
gtttctagaaccattgaaggaagcc

SEQ ID NO: 265034 - DNA, 25 bp, Homo sapien
tttaaatacctatatggctctcgag

SEQ ID NO: 265035 - DNA, 25 bp, Homo sapien
tatggtggcatagtcctatagcctg

SEQ ID NO: 265036 - DNA, 25 bp, Homo sapien
aatgagaggatgaccaaggccaacc

SEQ ID NO: 265037 - DNA, 25 bp, Homo sapien
tgcatggaggtagaataccaagagc

SEQ ID NO: 265038 - DNA, 25 bp, Homo sapien
tggaggcaagtccataagtgaacgc

SEQ ID NO: 265039 - DNA, 25 bp, Homo sapien
tatggaggcaagtccataagtgaac

SEQ ID NO: 265040 - DNA, 25 bp, Homo sapien
gaggcaagtccataagtgaacgcaa

SEQ ID NO: 265041 - DNA, 25 bp, Homo sapien
tctatggaggcaagtccataagtga

SEQ ID NO: 265042 - DNA, 25 bp, Homo sapien
tagcttatgccacaaacttaaaggg

SEQ ID NO: 265043 - DNA, 25 bp, Homo sapien
caccttttagaatagaatgatccca

SEQ ID NO: 265044 - DNA, 25 bp, Homo sapien
gacaatatcgactttcagctccagg

SEQ ID NO: 265045 - DNA, 25 bp, Homo sapien
ggtcagctagtcttggctaaaacac

SEQ ID NO: 265046 - DNA, 25 bp, Homo sapien
tgttcagtacggacacaactacaga

SEQ ID NO: 265047 - DNA, 25 bp, Homo sapien
gattcacgggttcgttataggacaa

SEQ ID NO: 265048 - DNA, 25 bp, Homo sapien
cgtggtatctgcatgaaacctacac

SEQ ID NO: 265049 - DNA, 25 bp, Homo sapien
tttactatcgagatggattcacggg

SEQ ID NO: 265050 - DNA, 25 bp, Homo sapien
tcactgtggtatcactggaatggct

SEQ ID NO: 265051 - DNA, 25 bp, Homo sapien
tccaagttaagagctgcaggtcagc

SEQ ID NO: 265052 - DNA, 25 bp, Homo sapien
gatgtgatgcactccccgttaggga

SEQ ID NO: 265053 - DNA, 25 bp, Homo sapien
gaatcgggcatgactacgtggacag

SEQ ID NO: 265054 - DNA, 25 bp, Homo sapien
tgagaggtctacactgatcagggaa

SEQ ID NO: 265055 - DNA, 25 bp, Homo sapien
tcttctacttttaggcaccctggtg

SEQ ID NO: 265056 - DNA, 25 bp, Homo sapien
ggtaggaagtgcagcataggtctca

SEQ ID NO: 265057 - DNA, 25 bp, Homo sapien
caccctggtgattatgtagagccaa

SEQ ID NO: 265058 - DNA, 25 bp, Homo sapien
tcaattgccagaagacagttatccg

SEQ ID NO: 265059 - DNA, 25 bp, Homo sapien
tattacacgcctctggacttgcaag

SEQ ID NO: 265060 - DNA, 25 bp, Homo sapien
gcaggtaaagcatgggctactacaa

SEQ ID NO: 265061 - DNA, 25 bp, Homo sapien
cttgcaagtctagcatggtgactcc

SEQ ID NO: 265062 - DNA, 25 bp, Homo sapien
cttgatggagtcacacaggtcgctt

SEQ ID NO: 265063 - DNA, 25 bp, Homo sapien
cctttgtaccaaggatgagcctgag

SEQ ID NO: 265064 - DNA, 25 bp, Homo sapien
aagtctttatctagttgacctgcca

SEQ ID NO: 265065 - DNA, 25 bp, Homo sapien
ggtttttgctagagactgcctttgt

SEQ ID NO: 265066 - DNA, 25 bp, Homo sapien
ctatttctctacatgccgacataga

SEQ ID NO: 265067 - DNA, 25 bp, Homo sapien
atgccgacatagagatcccagttcc

SEQ ID NO: 265068 - DNA, 25 bp, Homo sapien
tctacatgccgacatagagatccca

SEQ ID NO: 265069 - DNA, 25 bp, Homo sapien
tatttctctacatgccgacatagag

SEQ ID NO: 265070 - DNA, 25 bp, Homo sapien
ttgaagagaaatgacgtttggatgc

SEQ ID NO: 265071 - DNA, 25 bp, Homo sapien
ggtcatgttcagcatagtcaaacag

SEQ ID NO: 265072 - DNA, 25 bp, Homo sapien
tatcagcatgagacagaaacacctt

SEQ ID NO: 265073 - DNA, 25 bp, Homo sapien
ttggatgcttaagctctcgaagtaa

SEQ ID NO: 265074 - DNA, 25 bp, Homo sapien
tccccgaggtaactgaactggcttc

SEQ ID NO: 265075 - DNA, 25 bp, Homo sapien
gatctgatataatagtgacttcacc

SEQ ID NO: 265076 - DNA, 25 bp, Homo sapien
ggtagtgaataccatctaggatctg

SEQ ID NO: 265077 - DNA, 25 bp, Homo sapien
cccagttagcatgcaggtagtgaat

SEQ ID NO: 265078 - DNA, 25 bp, Homo sapien
ggtttggatcaatgaattacttcac

SEQ ID NO: 265079 - DNA, 25 bp, Homo sapien
cagacaagtgtataagcaacaactt

SEQ ID NO: 265080 - DNA, 25 bp, Homo sapien
taccagaaccaggactatagtagac

SEQ ID NO: 265081 - DNA, 25 bp, Homo sapien
catcaagggaaggagcaaagctaac

SEQ ID NO: 265082 - DNA, 25 bp, Homo sapien
cagactgtctttggactagagctaa

SEQ ID NO: 265083 - DNA, 25 bp, Homo sapien
tccttaacatggatatgcctcatcg

SEQ ID NO: 265084 - DNA, 25 bp, Homo sapien
ggctggaccatagtgcccagatgtt

SEQ ID NO: 265085 - DNA, 25 bp, Homo sapien
tttaccaagcctccacaactgcatg

SEQ ID NO: 265086 - DNA, 25 bp, Homo sapien
gtgaaaaaccgctcatgcccttgcc

SEQ ID NO: 265087 - DNA, 25 bp, Homo sapien
caacacaggcttcagtagtgaaaaa

SEQ ID NO: 265088 - DNA, 25 bp, Homo sapien
tcacaacacaggcttcagtagtgaa

SEQ ID NO: 265089 - DNA, 25 bp, Homo sapien
agtagtgaaaaaccgctcatgccct

SEQ ID NO: 265090 - DNA, 25 bp, Homo sapien
tcagctagggtgactagagagagtt

SEQ ID NO: 265091 - DNA, 25 bp, Homo sapien
acattctcattttcagctagggtga

SEQ ID NO: 265092 - DNA, 25 bp, Homo sapien
tgactagagagagtttaatttcgag

SEQ ID NO: 265093 - DNA, 25 bp, Homo sapien
ctcattttcagctagggtgactaga

SEQ ID NO: 265094 - DNA, 25 bp, Homo sapien
ctagaaagttttactatgacattaa

SEQ ID NO: 265095 - DNA, 25 bp, Homo sapien
gagtggccaaccgacgatggctgca

SEQ ID NO: 265096 - DNA, 25 bp, Homo sapien
acactccccaaatctagagattttc

SEQ ID NO: 265097 - DNA, 25 bp, Homo sapien
ctttgaagtgagtagcatacctcta

SEQ ID NO: 265098 - DNA, 25 bp, Homo sapien
cttacgtatgtggtacctaagcagg

SEQ ID NO: 265099 - DNA, 25 bp, Homo sapien
aaggccaattatctatcaggtacca

SEQ ID NO: 265100 - DNA, 25 bp, Homo sapien
cactgcagggtctagttgcagaaaa

SEQ ID NO: 265101 - DNA, 25 bp, Homo sapien
tcttggcatgtcatagtgggtaaca

SEQ ID NO: 265102 - DNA, 25 bp, Homo sapien
ggcaactgaggcatagcacactagt

SEQ ID NO: 265103 - DNA, 25 bp, Homo sapien
taagagatcaatatgggatagaacc

SEQ ID NO: 265104 - DNA, 25 bp, Homo sapien
aaacacacttttcaattgctgggca

SEQ ID NO: 265105 - DNA, 25 bp, Homo sapien
acttcctgtagcagagcctagcaca

SEQ ID NO: 265106 - DNA, 25 bp, Homo sapien
tcctgcatgcaaaagccacagagct

SEQ ID NO: 265107 - DNA, 25 bp, Homo sapien
gcatctgaggaacagagtgccttca

SEQ ID NO: 265108 - DNA, 25 bp, Homo sapien
aaattcaggaatgggagagcttcac

SEQ ID NO: 265109 - DNA, 25 bp, Homo sapien
ccctctaagaggtcatagtctaggc

SEQ ID NO: 265110 - DNA, 25 bp, Homo sapien
tactgctgaacaccttaagctcaag

SEQ ID NO: 265111 - DNA, 25 bp, Homo sapien
tagtgaattcagattccgtttgggc

SEQ ID NO: 265112 - DNA, 25 bp, Homo sapien
tttagtgaattcagattccgtttgg

SEQ ID NO: 265113 - DNA, 25 bp, Homo sapien
gtgaattcagattccgtttgggcat

SEQ ID NO: 265114 - DNA, 25 bp, Homo sapien
acttttatcccaacactctctcttt

SEQ ID NO: 265115 - DNA, 25 bp, Homo sapien
taaggtccagtccttgtgatgggat

SEQ ID NO: 265116 - DNA, 25 bp, Homo sapien
cactcctacataaggtccagtcctt

SEQ ID NO: 265117 - DNA, 25 bp, Homo sapien
gatgcaaggcgcctggcaggctgct

SEQ ID NO: 265118 - DNA, 25 bp, Homo sapien
ccttgtgatgggatgcaaggcgcct

SEQ ID NO: 265119 - DNA, 25 bp, Homo sapien
caatttttactcttcctcgctcagg

SEQ ID NO: 265120 - DNA, 25 bp, Homo sapien
cacccataactaaaatattagcagg

SEQ ID NO: 265121 - DNA, 25 bp, Homo sapien
ccttcacccataactaaaatattag

SEQ ID NO: 265122 - DNA, 25 bp, Homo sapien
tttactcttcctcgctcaggacctt

SEQ ID NO: 265123 - DNA, 25 bp, Homo sapien
tcggtaccagaatgtaacaaccact

SEQ ID NO: 265124 - DNA, 25 bp, Homo sapien
gaatgtaacaaccactggatccaaa

SEQ ID NO: 265125 - DNA, 25 bp, Homo sapien
ggtataatgccttgctccaagaagt

SEQ ID NO: 265126 - DNA, 25 bp, Homo sapien
gatccaaatctgctaaaggcttcaa

SEQ ID NO: 265127 - DNA, 25 bp, Homo sapien
tattccaccaagagacaatgtccga

SEQ ID NO: 265128 - DNA, 25 bp, Homo sapien
aatgtccgacctcaaaacgcctaag

SEQ ID NO: 265129 - DNA, 25 bp, Homo sapien
taacatggattataaattcggccgg

SEQ ID NO: 265130 - DNA, 25 bp, Homo sapien
catatggagcatgggaactacaacc

SEQ ID NO: 265131 - DNA, 25 bp, Homo sapien
caaatatacaccctatagcccaaat

SEQ ID NO: 265132 - DNA, 25 bp, Homo sapien
ctgcaaatatacaccctatagccca

SEQ ID NO: 265133 - DNA, 25 bp, Homo sapien
aatatacaccctatagcccaaatat

SEQ ID NO: 265134 - DNA, 25 bp, Homo sapien
tgcaaatatacaccctatagcccaa

SEQ ID NO: 265135 - DNA, 25 bp, Homo sapien
tcatggtgataaggattactagttt

SEQ ID NO: 265136 - DNA, 25 bp, Homo sapien
cagtgaaatattggttctgacgtta

SEQ ID NO: 265137 - DNA, 25 bp, Homo sapien
gctggtcatggtgataaggattact

SEQ ID NO: 265138 - DNA, 25 bp, Homo sapien
cgacagtgaaatattggttctgacg

SEQ ID NO: 265139 - DNA, 25 bp, Homo sapien
caatacatgctacataatgtgttct

SEQ ID NO: 265140 - DNA, 25 bp, Homo sapien
acaatacatgctacataatgtgttc

SEQ ID NO: 265141 - DNA, 25 bp, Homo sapien
caatatctgccaatgggttttcctg

SEQ ID NO: 265142 - DNA, 25 bp, Homo sapien
gaagtgtaaacataattccttatcc

SEQ ID NO: 265143 - DNA, 25 bp, Homo sapien
ttcaacctccacacaaaaaagctgt

SEQ ID NO: 265144 - DNA, 25 bp, Homo sapien
aaggttattaccacgttcattacat

SEQ ID NO: 265145 - DNA, 25 bp, Homo sapien
tataagctgcctcaatttctgtcac

SEQ ID NO: 265146 - DNA, 25 bp, Homo sapien
taatgttgaatgttcaggcatcttt

SEQ ID NO: 265147 - DNA, 25 bp, Homo sapien
gaaatctttcattaatgttgaatgt

SEQ ID NO: 265148 - DNA, 25 bp, Homo sapien
ttccatatacttgataaggctgcag

SEQ ID NO: 265149 - DNA, 25 bp, Homo sapien
ccatatacttgataaggctgcagtt

SEQ ID NO: 265150 - DNA, 25 bp, Homo sapien
atgctttactatctggtttaacttt

SEQ ID NO: 265151 - DNA, 25 bp, Homo sapien
tccatatacttgataaggctgcagt

SEQ ID NO: 265152 - DNA, 25 bp, Homo sapien
gctgcgtgacattggataagttacc

SEQ ID NO: 265153 - DNA, 25 bp, Homo sapien
tatactctgatctaatgcagtggct

SEQ ID NO: 265154 - DNA, 25 bp, Homo sapien
gagactctgaaagtcgactgctcca

SEQ ID NO: 265155 - DNA, 25 bp, Homo sapien
ggctttcggactttaggatgcatga

SEQ ID NO: 265156 - DNA, 25 bp, Homo sapien
aggaagtgggtcttctaagaaatag

SEQ ID NO: 265157 - DNA, 25 bp, Homo sapien
ttctgaggtaattcgctttattggg

SEQ ID NO: 265158 - DNA, 25 bp, Homo sapien
tctgatgtaggaagtgggtcttcta

SEQ ID NO: 265159 - DNA, 25 bp, Homo sapien
taagaaataggggtcctgcatagcc

SEQ ID NO: 265160 - DNA, 25 bp, Homo sapien
tattacagcaggctacttgagggct

SEQ ID NO: 265161 - DNA, 25 bp, Homo sapien
taactgtgacaaaacgaatcttttc

SEQ ID NO: 265162 - DNA, 25 bp, Homo sapien
gagggcttgagctgtatacaaatga

SEQ ID NO: 265163 - DNA, 25 bp, Homo sapien
taagcacctttcatgtaactgtgac

SEQ ID NO: 265164 - DNA, 25 bp, Homo sapien
tcatcaggttcttcttccgttaaaa

SEQ ID NO: 265165 - DNA, 25 bp, Homo sapien
tgtctcctttgtcatcaggttcttc

SEQ ID NO: 265166 - DNA, 25 bp, Homo sapien
tgtcatcaggttcttcttccgttaa

SEQ ID NO: 265167 - DNA, 25 bp, Homo sapien
tgggtaagggatttgacaaccggca

SEQ ID NO: 265168 - DNA, 25 bp, Homo sapien
ttatggaggcattcacgaaacaaga

SEQ ID NO: 265169 - DNA, 25 bp, Homo sapien
agagggagaacaaaatatacccaca

SEQ ID NO: 265170 - DNA, 25 bp, Homo sapien
cattcacgaaacaagaagctgctaa

SEQ ID NO: 265171 - DNA, 25 bp, Homo sapien
gaaaatgttatggaggcattcacga

SEQ ID NO: 265172 - DNA, 25 bp, Homo sapien
ctgaggtagtggtaggaggaacaac

SEQ ID NO: 265173 - DNA, 25 bp, Homo sapien
ccctgggtggccagttccattagtg

SEQ ID NO: 265174 - DNA, 25 bp, Homo sapien
tcatgataagtccacctgaggtagt

SEQ ID NO: 265175 - DNA, 25 bp, Homo sapien
ctgatagtctgaggtcatgataagt

SEQ ID NO: 265176 - DNA, 25 bp, Homo sapien
taggagaaggtatcacagaatccat

SEQ ID NO: 265177 - DNA, 25 bp, Homo sapien
ctaaaatggcacaaagagaaagaat

SEQ ID NO: 265178 - DNA, 25 bp, Homo sapien
ccacagtaagaaggacggtattctc

SEQ ID NO: 265179 - DNA, 25 bp, Homo sapien
cccacacacatgactgaagagtaaa

SEQ ID NO: 265180 - DNA, 25 bp, Homo sapien
agggaaaagtgtgattcaggtgctt

SEQ ID NO: 265181 - DNA, 25 bp, Homo sapien
tgagggaaaagtgtgattcaggtgc

SEQ ID NO: 265182 - DNA, 25 bp, Homo sapien
gagggaaaagtgtgattcaggtgct

SEQ ID NO: 265183 - DNA, 25 bp, Homo sapien
tcagtaccgatgtgtctgatgtgag

SEQ ID NO: 265184 - DNA, 25 bp, Homo sapien
gatgtgagtactgtggaggctgctg

SEQ ID NO: 265185 - DNA, 25 bp, Homo sapien
taccgatgtgtctgatgtgagtact

SEQ ID NO: 265186 - DNA, 25 bp, Homo sapien
ctgatgtgagtactgtggaggctgc

SEQ ID NO: 265187 - DNA, 25 bp, Homo sapien
tggatgccgcacctttttaaggaag

SEQ ID NO: 265188 - DNA, 25 bp, Homo sapien
ggaacttggctactggacattttga

SEQ ID NO: 265189 - DNA, 25 bp, Homo sapien
aaaaatgcattggtcagtctgaacc

SEQ ID NO: 265190 - DNA, 25 bp, Homo sapien
taagggcaccctaaacaacgtgcga

SEQ ID NO: 265191 - DNA, 25 bp, Homo sapien
gatatgggctgccattccccagctg

SEQ ID NO: 265192 - DNA, 25 bp, Homo sapien
tgagaacacggaaccccactatttg

SEQ ID NO: 265193 - DNA, 25 bp, Homo sapien
tctttccctaggcatgcaaagtggc

SEQ ID NO: 265194 - DNA, 25 bp, Homo sapien
gaatcttatgacgtggaaactctgg

SEQ ID NO: 265195 - DNA, 25 bp, Homo sapien
cagcgggttctgtccagcctttgag

SEQ ID NO: 265196 - DNA, 25 bp, Homo sapien
gaatagtccgtgtttctaccagtga

SEQ ID NO: 265197 - DNA, 25 bp, Homo sapien
tggctctggaaacacacagcgggtt

SEQ ID NO: 265198 - DNA, 25 bp, Homo sapien
gactaaaagttattctggacctgac

SEQ ID NO: 265199 - DNA, 25 bp, Homo sapien
gacaatggtcccttcgcaggcatct

SEQ ID NO: 265200 - DNA, 25 bp, Homo sapien
tgcagcccgggtacttcttgctcct

SEQ ID NO: 265201 - DNA, 25 bp, Homo sapien
gccacaggatagaaggctgaattct

SEQ ID NO: 265202 - DNA, 25 bp, Homo sapien
ccatgccgggcagttgtgtgcactg

SEQ ID NO: 265203 - DNA, 25 bp, Homo sapien
tcatctgggagcatgtggtgccgcc

SEQ ID NO: 265204 - DNA, 25 bp, Homo sapien
tgggagcatgtggtgccgccctccc

SEQ ID NO: 265205 - DNA, 25 bp, Homo sapien
atctgggagcatgtggtgccgccct

SEQ ID NO: 265206 - DNA, 25 bp, Homo sapien
tctgggagcatgtggtgccgccctc

SEQ ID NO: 265207 - DNA, 25 bp, Homo sapien
tcagcataatcgatgaaggacagga

SEQ ID NO: 265208 - DNA, 25 bp, Homo sapien
acaggattgttgtggacactggtgt

SEQ ID NO: 265209 - DNA, 25 bp, Homo sapien
cataatcgatgaaggacaggattgt

SEQ ID NO: 265210 - DNA, 25 bp, Homo sapien
caggattgttgtggacactggtgtt

SEQ ID NO: 265211 - DNA, 25 bp, Homo sapien
cattgtcgtgagttggcccaaggaa

SEQ ID NO: 265212 - DNA, 25 bp, Homo sapien
ctggcattgtcgtgagttggcccaa

SEQ ID NO: 265213 - DNA, 25 bp, Homo sapien
tggcattgtcgtgagttggcccaag

SEQ ID NO: 265214 - DNA, 25 bp, Homo sapien
gcattgtcgtgagttggcccaagga

SEQ ID NO: 265215 - DNA, 25 bp, Homo sapien
cagagaaggccaggattcggggtgc

SEQ ID NO: 265216 - DNA, 25 bp, Homo sapien
tgcagagaaggccaggattcggggt

SEQ ID NO: 265217 - DNA, 25 bp, Homo sapien
aaggccaggattcggggtgcctctt

SEQ ID NO: 265218 - DNA, 25 bp, Homo sapien
caggattcggggtgcctcttcaggt

SEQ ID NO: 265219 - DNA, 25 bp, Homo sapien
gttcatgccactgctcacatttcat

SEQ ID NO: 265220 - DNA, 25 bp, Homo sapien
tcagccaagaatatcccagaaactc

SEQ ID NO: 265221 - DNA, 25 bp, Homo sapien
agtcatcagttacaccagttttcag

SEQ ID NO: 265222 - DNA, 25 bp, Homo sapien
gaaactctcgaaccaaatgttcatg

SEQ ID NO: 265223 - DNA, 25 bp, Homo sapien
gggccagaatgtcagagtagtcaga

SEQ ID NO: 265224 - DNA, 25 bp, Homo sapien
gtgcagaggcctggaaagtattttg

SEQ ID NO: 265225 - DNA, 25 bp, Homo sapien
ctaaatgatcaaatggcttatgctg

SEQ ID NO: 265226 - DNA, 25 bp, Homo sapien
tggcatgtcaaacaaagcaactggg

SEQ ID NO: 265227 - DNA, 25 bp, Homo sapien
ctcctccagtagctttgggctgctg

SEQ ID NO: 265228 - DNA, 25 bp, Homo sapien
catgcccagacgcttcctcctccct

SEQ ID NO: 265229 - DNA, 25 bp, Homo sapien
tcatgcccagacgcttcctcctccc

SEQ ID NO: 265230 - DNA, 25 bp, Homo sapien
tctctcctccagtagctttgggctg

SEQ ID NO: 265231 - DNA, 25 bp, Homo sapien
ccaggcaggagagatttcgacagct

SEQ ID NO: 265232 - DNA, 25 bp, Homo sapien
atttcgacagctctgtaacctcaac

SEQ ID NO: 265233 - DNA, 25 bp, Homo sapien
agctctgtaacctcaactcctgctg

SEQ ID NO: 265234 - DNA, 25 bp, Homo sapien
gtccaggcaggagagatttcgacag

SEQ ID NO: 265235 - DNA, 25 bp, Homo sapien
tttcaagtgttccaagtatttaagc

SEQ ID NO: 265236 - DNA, 25 bp, Homo sapien
tcaagtgttccaagtatttaagcac

SEQ ID NO: 265237 - DNA, 25 bp, Homo sapien
ttcaagtgttccaagtatttaagca

SEQ ID NO: 265238 - DNA, 25 bp, Homo sapien
cagagctgcattcaggccctgtgta

SEQ ID NO: 265239 - DNA, 25 bp, Homo sapien
ggcctgcgcactgatcaagctcgtt

SEQ ID NO: 265240 - DNA, 25 bp, Homo sapien
tgtgtactcgttacctcaggcctgc

SEQ ID NO: 265241 - DNA, 25 bp, Homo sapien
caagctcgttttatggactcctaag

SEQ ID NO: 265242 - DNA, 25 bp, Homo sapien
caaggaccaaaattgaagttgagca

SEQ ID NO: 265243 - DNA, 25 bp, Homo sapien
tgaagttgagcaaattggtccagga

SEQ ID NO: 265244 - DNA, 25 bp, Homo sapien
ggagacagtcgcctctggcactggt

SEQ ID NO: 265245 - DNA, 25 bp, Homo sapien
gcactggttctgattgggctctggc

SEQ ID NO: 265246 - DNA, 25 bp, Homo sapien
cactgtcaggaacgctcgctttctg

SEQ ID NO: 265247 - DNA, 25 bp, Homo sapien
agcatgtgccggctattccgtggag

SEQ ID NO: 265248 - DNA, 25 bp, Homo sapien
ggagtcctccataggtgtgaaacag

SEQ ID NO: 265249 - DNA, 25 bp, Homo sapien
tttggcccaaatgatggagtcctcc

SEQ ID NO: 265250 - DNA, 25 bp, Homo sapien
tctgaaggatagtatttattttcat

SEQ ID NO: 265251 - DNA, 25 bp, Homo sapien
gctttcttctgaaggatagtattta

SEQ ID NO: 265252 - DNA, 25 bp, Homo sapien
tttcttctgaaggatagtatttatt

SEQ ID NO: 265253 - DNA, 25 bp, Homo sapien
ccgagctttcttctgaaggatagta

SEQ ID NO: 265254 - DNA, 25 bp, Homo sapien
tgttctgtgaaatcccgtgcatgca

SEQ ID NO: 265255 - DNA, 25 bp, Homo sapien
taaaacctcttgaattgtgccatct

SEQ ID NO: 265256 - DNA, 25 bp, Homo sapien
tacgataactgaacagctctcaagc

SEQ ID NO: 265257 - DNA, 25 bp, Homo sapien
tgcagcgtgtagtgaagccagtccg

SEQ ID NO: 265258 - DNA, 25 bp, Homo sapien
cgagtgcctcggccaatagggagcc

SEQ ID NO: 265259 - DNA, 25 bp, Homo sapien
gcctcggccaatagggagccggcga

SEQ ID NO: 265260 - DNA, 25 bp, Homo sapien
agtgcctcggccaatagggagccgg

SEQ ID NO: 265261 - DNA, 25 bp, Homo sapien
ttcaccaggattggcgagtgcctcg

SEQ ID NO: 265262 - DNA, 25 bp, Homo sapien
ccgcctcgcaccacaccgcacgcag

SEQ ID NO: 265263 - DNA, 25 bp, Homo sapien
cctcgcaccacaccgcacgcagcgg

SEQ ID NO: 265264 - DNA, 25 bp, Homo sapien
gcgcacccgcctcgcaccacaccgc

SEQ ID NO: 265265 - DNA, 25 bp, Homo sapien
acccgcctcgcaccacaccgcacgc

SEQ ID NO: 265266 - DNA, 25 bp, Homo sapien
cgccggggctgcgctctgagctcca

SEQ ID NO: 265267 - DNA, 25 bp, Homo sapien
gccggggctgcgctctgagctccat

SEQ ID NO: 265268 - DNA, 25 bp, Homo sapien
cgccggcgccggggctgcgctctga

SEQ ID NO: 265269 - DNA, 25 bp, Homo sapien
cggcgccggggctgcgctctgagct

SEQ ID NO: 265270 - DNA, 25 bp, Homo sapien
ggtggctgtcccgagtccagggagc

SEQ ID NO: 265271 - DNA, 25 bp, Homo sapien
gaagggccgcctggccgcgccgtga

SEQ ID NO: 265272 - DNA, 25 bp, Homo sapien
cggaggcccggaggcgcgggagaga

SEQ ID NO: 265273 - DNA, 25 bp, Homo sapien
cgcaccggacggcaaagggccggag

SEQ ID NO: 265274 - DNA, 25 bp, Homo sapien
ctgccatacataggtttctatggga

SEQ ID NO: 265275 - DNA, 25 bp, Homo sapien
catacataggtttctatgggaaccg

SEQ ID NO: 265276 - DNA, 25 bp, Homo sapien
gaaccgtaacgtgtgactacaaaga

SEQ ID NO: 265277 - DNA, 25 bp, Homo sapien
tttctatgggaaccgtaacgtgtga

SEQ ID NO: 265278 - DNA, 25 bp, Homo sapien
tgcaaaggaacaaccagtcctcaga

SEQ ID NO: 265279 - DNA, 25 bp, Homo sapien
aaaggaacaaccagtcctcagaaga

SEQ ID NO: 265280 - DNA, 25 bp, Homo sapien
caaaggaacaaccagtcctcagaag

SEQ ID NO: 265281 - DNA, 25 bp, Homo sapien
ctgcaaaggaacaaccagtcctcag

SEQ ID NO: 265282 - DNA, 25 bp, Homo sapien
taggaaaagtccagggtgggaagca

SEQ ID NO: 265283 - DNA, 25 bp, Homo sapien
tctgacacaaaactggtgctgaggt

SEQ ID NO: 265284 - DNA, 25 bp, Homo sapien
gataggcggataggatctgacacaa

SEQ ID NO: 265285 - DNA, 25 bp, Homo sapien
acaggacagcaaaggaggacagtca

SEQ ID NO: 265286 - DNA, 25 bp, Homo sapien
gagtattctgtcagaacaggacagc

SEQ ID NO: 265287 - DNA, 25 bp, Homo sapien
gaggtggacaaatgaacagtggtac

SEQ ID NO: 265288 - DNA, 25 bp, Homo sapien
tctgggaatggtctgagtactggtt

SEQ ID NO: 265289 - DNA, 25 bp, Homo sapien
caaatactgtaaggagaggtggaca

SEQ ID NO: 265290 - DNA, 25 bp, Homo sapien
tacatcagagtccatagaacacatt

SEQ ID NO: 265291 - DNA, 25 bp, Homo sapien
tttcgtaaggcgtttgttcttgcca

SEQ ID NO: 265292 - DNA, 25 bp, Homo sapien
cgtaaggcgtttgttcttgccaaca

SEQ ID NO: 265293 - DNA, 25 bp, Homo sapien
aggcgtttgttcttgccaacagcca

SEQ ID NO: 265294 - DNA, 25 bp, Homo sapien
taaggcgtttgttcttgccaacagc

SEQ ID NO: 265295 - DNA, 25 bp, Homo sapien
tattccttatattgaacacagaagg

SEQ ID NO: 265296 - DNA, 25 bp, Homo sapien
caatattccttatattgaacacaga

SEQ ID NO: 265297 - DNA, 25 bp, Homo sapien
ggtgactagcatctttccaatattc

SEQ ID NO: 265298 - DNA, 25 bp, Homo sapien
tgactagcatctttccaatattcct

SEQ ID NO: 265299 - DNA, 25 bp, Homo sapien
ctaaatgcaatctcatctttctgca

SEQ ID NO: 265300 - DNA, 25 bp, Homo sapien
aatctcatctttctgcaaatcagca

SEQ ID NO: 265301 - DNA, 25 bp, Homo sapien
ttctaaatgcaatctcatctttctg

SEQ ID NO: 265302 - DNA, 25 bp, Homo sapien
tctaaatgcaatctcatctttctgc

SEQ ID NO: 265303 - DNA, 25 bp, Homo sapien
aacagacaaagcaagtaaccatcgg

SEQ ID NO: 265304 - DNA, 25 bp, Homo sapien
catcaacatgagctttaatcactgt

SEQ ID NO: 265305 - DNA, 25 bp, Homo sapien
caacatgagctttaatcactgtctg

SEQ ID NO: 265306 - DNA, 25 bp, Homo sapien
cagacaaagcaagtaaccatcggta

SEQ ID NO: 265307 - DNA, 25 bp, Homo sapien
ccatatcggattgttacattgtttt

SEQ ID NO: 265308 - DNA, 25 bp, Homo sapien
acctcccgggtcttgatttccatca

SEQ ID NO: 265309 - DNA, 25 bp, Homo sapien
gcacctcccgggtcttgatttccat

SEQ ID NO: 265310 - DNA, 25 bp, Homo sapien
ctgcacctcccgggtcttgatttcc

SEQ ID NO: 265311 - DNA, 25 bp, Homo sapien
ctcccgggtcttgatttccatcata

SEQ ID NO: 265312 - DNA, 25 bp, Homo sapien
aatggattggcaagtcttttctatg

SEQ ID NO: 265313 - DNA, 25 bp, Homo sapien
agaggataaatggattggcaagtct

SEQ ID NO: 265314 - DNA, 25 bp, Homo sapien
ggataaatggattggcaagtctttt

SEQ ID NO: 265315 - DNA, 25 bp, Homo sapien
ctgtcttgctcccagtggcttttcc

SEQ ID NO: 265316 - DNA, 25 bp, Homo sapien
aacagattcttggactggtggttca

SEQ ID NO: 265317 - DNA, 25 bp, Homo sapien
ctggtggttcatatccatcagctca

SEQ ID NO: 265318 - DNA, 25 bp, Homo sapien
ccatcagctcattcaactttagcac

SEQ ID NO: 265319 - DNA, 25 bp, Homo sapien
agattcttggactggtggttcatat

SEQ ID NO: 265320 - DNA, 25 bp, Homo sapien
ccattaggttttactgtgatcggca

SEQ ID NO: 265321 - DNA, 25 bp, Homo sapien
tctaactaggccaaaggtgacaggg

SEQ ID NO: 265322 - DNA, 25 bp, Homo sapien
gacagggcatgactgaattacgaac

SEQ ID NO: 265323 - DNA, 25 bp, Homo sapien
gatcggcagctcatggtgtgttgca

SEQ ID NO: 265324 - DNA, 25 bp, Homo sapien
gaactctcaataaagtgcagtgcgt

SEQ ID NO: 265325 - DNA, 25 bp, Homo sapien
tactggtcccttgcaactaagtgat

SEQ ID NO: 265326 - DNA, 25 bp, Homo sapien
taaacattacaggaagtcacaggtc

SEQ ID NO: 265327 - DNA, 25 bp, Homo sapien
tagtaattccgctggttaacgacca

SEQ ID NO: 265328 - DNA, 25 bp, Homo sapien
tcacagcaattcccaacatgacacc

SEQ ID NO: 265329 - DNA, 25 bp, Homo sapien
cacttcttccttcaatgctctccag

SEQ ID NO: 265330 - DNA, 25 bp, Homo sapien
acagcaattcccaacatgacaccct

SEQ ID NO: 265331 - DNA, 25 bp, Homo sapien
caatttgcagtaaagttctgatatc

SEQ ID NO: 265332 - DNA, 25 bp, Homo sapien
catgtaatcgttgactatgggttgc

SEQ ID NO: 265333 - DNA, 25 bp, Homo sapien
caagtagcatcaccactttggctca

SEQ ID NO: 265334 - DNA, 25 bp, Homo sapien
cagtagtagttaacagcaatcaaaa

SEQ ID NO: 265335 - DNA, 25 bp, Homo sapien
gcagaaattcccctcaagtagcatc

SEQ ID NO: 265336 - DNA, 25 bp, Homo sapien
gaggaaaggcaaaaagtccacatgt

SEQ ID NO: 265337 - DNA, 25 bp, Homo sapien
tagagcctgaaggtacatgtatagt

SEQ ID NO: 265338 - DNA, 25 bp, Homo sapien
tgtatagtataatctcacttcatag

SEQ ID NO: 265339 - DNA, 25 bp, Homo sapien
cacatgtatcaagagcaagagagga

SEQ ID NO: 265340 - DNA, 25 bp, Homo sapien
tcagactgctcagctggcgtatgat

SEQ ID NO: 265341 - DNA, 25 bp, Homo sapien
tggttacacattcaagttcgctggt

SEQ ID NO: 265342 - DNA, 25 bp, Homo sapien
cggcaagagtactattggttacaca

SEQ ID NO: 265343 - DNA, 25 bp, Homo sapien
ttcaagttcgctggtaatcccttca

SEQ ID NO: 265344 - DNA, 25 bp, Homo sapien
cacatgggtgtctaattttgtgggt

SEQ ID NO: 265345 - DNA, 25 bp, Homo sapien
gacacatgggtgtctaattttgtgg

SEQ ID NO: 265346 - DNA, 25 bp, Homo sapien
atgggtgtctaattttgtgggtcat

SEQ ID NO: 265347 - DNA, 25 bp, Homo sapien
catgggtgtctaattttgtgggtca

SEQ ID NO: 265348 - DNA, 25 bp, Homo sapien
ggccttgcggtctcgctcatgttct

SEQ ID NO: 265349 - DNA, 25 bp, Homo sapien
cttgtgggccttgcggtctcgctca

SEQ ID NO: 265350 - DNA, 25 bp, Homo sapien
gtgggccttgcggtctcgctcatgt

SEQ ID NO: 265351 - DNA, 25 bp, Homo sapien
tgcggtctcgctcatgttcttgctt

SEQ ID NO: 265352 - DNA, 25 bp, Homo sapien
aatgctctttgggttgtaagcccca

SEQ ID NO: 265353 - DNA, 25 bp, Homo sapien
gcactcaacgaacctgaagtgagga

SEQ ID NO: 265354 - DNA, 25 bp, Homo sapien
tttgggttgtaagccccagatgcac

SEQ ID NO: 265355 - DNA, 25 bp, Homo sapien
gtaagccccagatgcactcaacgaa

SEQ ID NO: 265356 - DNA, 25 bp, Homo sapien
tcaaggtatcttgtatgagtccttt

SEQ ID NO: 265357 - DNA, 25 bp, Homo sapien
aaaactgtacgtggattttcagctg

SEQ ID NO: 265358 - DNA, 25 bp, Homo sapien
gaaacaatcaaggtatcttgtatga

SEQ ID NO: 265359 - DNA, 25 bp, Homo sapien
ataaaaactgtacgtggattttcag

SEQ ID NO: 265360 - DNA, 25 bp, Homo sapien
tctcccacttcctcacactctgtgc

SEQ ID NO: 265361 - DNA, 25 bp, Homo sapien
tcacactctgtgcttctgcacagct

SEQ ID NO: 265362 - DNA, 25 bp, Homo sapien
ccacttcctcacactctgtgcttct

SEQ ID NO: 265363 - DNA, 25 bp, Homo sapien
tgtgcttctgcacagctgctctgct

SEQ ID NO: 265364 - DNA, 25 bp, Homo sapien
gaataaaatgaatggagaaggccat

SEQ ID NO: 265365 - DNA, 25 bp, Homo sapien
tagaataaaatgaatggagaaggcc

SEQ ID NO: 265366 - DNA, 25 bp, Homo sapien
ctgtagaataaaatgaatggagaag

SEQ ID NO: 265367 - DNA, 25 bp, Homo sapien
gtagaataaaatgaatggagaaggc

SEQ ID NO: 265368 - DNA, 25 bp, Homo sapien
tagaagttgttagcctcattaaaca

SEQ ID NO: 265369 - DNA, 25 bp, Homo sapien
cagcaaggcgatcaattctgtcttg

SEQ ID NO: 265370 - DNA, 25 bp, Homo sapien
gaatttgctctgatgtagaagttgt

SEQ ID NO: 265371 - DNA, 25 bp, Homo sapien
ctgggtgactttgacagcaaggcga

SEQ ID NO: 265372 - DNA, 25 bp, Homo sapien
acaggattaggaatgctgttctttg

SEQ ID NO: 265373 - DNA, 25 bp, Homo sapien
ttcagaggcggtggcttatcactct

SEQ ID NO: 265374 - DNA, 25 bp, Homo sapien
gaaaccacttgctggtcttggactg

SEQ ID NO: 265375 - DNA, 25 bp, Homo sapien
ttcatgttgatatcctgtagtgaga

SEQ ID NO: 265376 - DNA, 25 bp, Homo sapien
ggctctgggactcatgaagctatac

SEQ ID NO: 265377 - DNA, 25 bp, Homo sapien
taacgtgtcctaccattttccagta

SEQ ID NO: 265378 - DNA, 25 bp, Homo sapien
tgtttagaaagagcatttttagtta

SEQ ID NO: 265379 - DNA, 25 bp, Homo sapien
gagggatatgggacaagaggtgaca

SEQ ID NO: 265380 - DNA, 25 bp, Homo sapien
gaagtctcgtcctgataacgtgtcc

SEQ ID NO: 265381 - DNA, 25 bp, Homo sapien
gttatataccccaaatattgctata

SEQ ID NO: 265382 - DNA, 25 bp, Homo sapien
ggcactgctatccttaaacacacta

SEQ ID NO: 265383 - DNA, 25 bp, Homo sapien
agcaaatttgggctggcactgctat

SEQ ID NO: 265384 - DNA, 25 bp, Homo sapien
ttttccataagactgaatacacaca

SEQ ID NO: 265385 - DNA, 25 bp, Homo sapien
tatagaacttcagcccatccttctt

SEQ ID NO: 265386 - DNA, 25 bp, Homo sapien
tagaacttcagcccatccttcttgt

SEQ ID NO: 265387 - DNA, 25 bp, Homo sapien
atagaacttcagcccatccttcttg

SEQ ID NO: 265388 - DNA, 25 bp, Homo sapien
agaacttcagcccatccttcttgtc

SEQ ID NO: 265389 - DNA, 25 bp, Homo sapien
ttccttttgtcttctgtgtcctgta

SEQ ID NO: 265390 - DNA, 25 bp, Homo sapien
ccttttgtcttctgtgtcctgtagc

SEQ ID NO: 265391 - DNA, 25 bp, Homo sapien
ctctttccttttgtcttctgtgtcc

SEQ ID NO: 265392 - DNA, 25 bp, Homo sapien
ttctctttccttttgtcttctgtgt

SEQ ID NO: 265393 - DNA, 25 bp, Homo sapien
ggaagacgctccatggtacacactc

SEQ ID NO: 265394 - DNA, 25 bp, Homo sapien
ctttttcacctcacgggtggtgcca

SEQ ID NO: 265395 - DNA, 25 bp, Homo sapien
ggacagggatccctcggaagacgct

SEQ ID NO: 265396 - DNA, 25 bp, Homo sapien
ggtggtgccatctatacgcttttgc

SEQ ID NO: 265397 - DNA, 25 bp, Homo sapien
gacatcaagggccatataaaccccg

SEQ ID NO: 265398 - DNA, 25 bp, Homo sapien
ccccgaagctattgatgcatttcaa

SEQ ID NO: 265399 - DNA, 25 bp, Homo sapien
aatcttaagacatcaagggccatat

SEQ ID NO: 265400 - DNA, 25 bp, Homo sapien
ccagttgcccaagcatcagggctga

SEQ ID NO: 265401 - DNA, 25 bp, Homo sapien
cgataaatatctgaagtagaaacca

SEQ ID NO: 265402 - DNA, 25 bp, Homo sapien
aaaccagagatttctacagggcaga

SEQ ID NO: 265403 - DNA, 25 bp, Homo sapien
gcagaagtgaaggaagactcgataa

SEQ ID NO: 265404 - DNA, 25 bp, Homo sapien
gaaggaagactcgataaatatctga

SEQ ID NO: 265405 - DNA, 25 bp, Homo sapien
gctccagtttctttgcgtcactcat

SEQ ID NO: 265406 - DNA, 25 bp, Homo sapien
tctttgcgtcactcataaactcaat

SEQ ID NO: 265407 - DNA, 25 bp, Homo sapien
gcgtcactcataaactcaatgccca

SEQ ID NO: 265408 - DNA, 25 bp, Homo sapien
tcataaactcaatgcccattttcct

SEQ ID NO: 265409 - DNA, 25 bp, Homo sapien
ggcagtctgagtctgggaacccaaa

SEQ ID NO: 265410 - DNA, 25 bp, Homo sapien
tagtaagacagtcacacgctcctgg

SEQ ID NO: 265411 - DNA, 25 bp, Homo sapien
gctcaggttacaggacatgtggcca

SEQ ID NO: 265412 - DNA, 25 bp, Homo sapien
tacatcctctcatggcggcagaagc

SEQ ID NO: 265413 - DNA, 25 bp, Homo sapien
agtaatccgtaacgtccgatgcatg

SEQ ID NO: 265414 - DNA, 25 bp, Homo sapien
taagagtaatccgtaacgtccgatg

SEQ ID NO: 265415 - DNA, 25 bp, Homo sapien
gagaatggttgggagtagccgggta

SEQ ID NO: 265416 - DNA, 25 bp, Homo sapien
aatccgtaacgtccgatgcatgtga

SEQ ID NO: 265417 - DNA, 25 bp, Homo sapien
tctgttgagggccatgtgcctcgcc

SEQ ID NO: 265418 - DNA, 25 bp, Homo sapien
tggcttgcaggcccgtgtggtggca

SEQ ID NO: 265419 - DNA, 25 bp, Homo sapien
agatgggggccggtactcatgctcc

SEQ ID NO: 265420 - DNA, 25 bp, Homo sapien
cggtactcatgctccgcagcctggc

SEQ ID NO: 265421 - DNA, 25 bp, Homo sapien
tctgctggagccatcggtgcagagg

SEQ ID NO: 265422 - DNA, 25 bp, Homo sapien
tggagccatcggtgcagaggcctgg

SEQ ID NO: 265423 - DNA, 25 bp, Homo sapien
agccatcggtgcagaggcctgggac

SEQ ID NO: 265424 - DNA, 25 bp, Homo sapien
catcggtgcagaggcctgggacccc

SEQ ID NO: 265425 - DNA, 25 bp, Homo sapien
agtttgtgctgagggaatcacagga

SEQ ID NO: 265426 - DNA, 25 bp, Homo sapien
tactcaattatctgcgctgggagca

SEQ ID NO: 265427 - DNA, 25 bp, Homo sapien
tggtccggatgggttgtaatactca

SEQ ID NO: 265428 - DNA, 25 bp, Homo sapien
ggctgacgaaggcagtttgtgctga

SEQ ID NO: 265429 - DNA, 25 bp, Homo sapien
ggaggtcgcttcgagcatcactgat

SEQ ID NO: 265430 - DNA, 25 bp, Homo sapien
cagcgaggaggtcgcttcgagcatc

SEQ ID NO: 265431 - DNA, 25 bp, Homo sapien
ggtcgcttcgagcatcactgattgg

SEQ ID NO: 265432 - DNA, 25 bp, Homo sapien
ttcgagcatcactgattggtggctg

SEQ ID NO: 265433 - DNA, 25 bp, Homo sapien
tgtactccacggcaatgcgccggga

SEQ ID NO: 265434 - DNA, 25 bp, Homo sapien
tgagtcgtcgtcagagtcgctgtac

SEQ ID NO: 265435 - DNA, 25 bp, Homo sapien
tcagtcggaccagtcgttctcgtcg

SEQ ID NO: 265436 - DNA, 25 bp, Homo sapien
cgggacaggatcgtggccacgtcat

SEQ ID NO: 265437 - DNA, 25 bp, Homo sapien
tagtgacagcctagtggtgaccagc

SEQ ID NO: 265438 - DNA, 25 bp, Homo sapien
tacatgactgcacccaatggacagg

SEQ ID NO: 265439 - DNA, 25 bp, Homo sapien
tatacaaaaggtgctatgctacggg

SEQ ID NO: 265440 - DNA, 25 bp, Homo sapien
taaagtgctctctgttgctcgctga

SEQ ID NO: 265441 - DNA, 25 bp, Homo sapien
tgtgcgcagccatcggggactgggc

SEQ ID NO: 265442 - DNA, 25 bp, Homo sapien
gccatcggggactgggcaatcttcc

SEQ ID NO: 265443 - DNA, 25 bp, Homo sapien
gcagccatcggggactgggcaatct

SEQ ID NO: 265444 - DNA, 25 bp, Homo sapien
ccatcggggactgggcaatcttccc

SEQ ID NO: 265445 - DNA, 25 bp, Homo sapien
tctggggctgacagtgcaaactcac

SEQ ID NO: 265446 - DNA, 25 bp, Homo sapien
ggtctggggctgacagtgcaaactc

SEQ ID NO: 265447 - DNA, 25 bp, Homo sapien
gtctggggctgacagtgcaaactca

SEQ ID NO: 265448 - DNA, 25 bp, Homo sapien
tggctgatacattcccactagtctt

SEQ ID NO: 265449 - DNA, 25 bp, Homo sapien
acttttacaacctagccacttggag

SEQ ID NO: 265450 - DNA, 25 bp, Homo sapien
ttgaatagtatccttagtaaagaaa

SEQ ID NO: 265451 - DNA, 25 bp, Homo sapien
tactgcaagatgacagatactatga

SEQ ID NO: 265452 - DNA, 25 bp, Homo sapien
tttagatgttacttgtacataatct

SEQ ID NO: 265453 - DNA, 25 bp, Homo sapien
ttagatgttacttgtacataatcta

SEQ ID NO: 265454 - DNA, 25 bp, Homo sapien
ttgtacataatctatagtaagatat

SEQ ID NO: 265455 - DNA, 25 bp, Homo sapien
tacataatctatagtaagatataca

SEQ ID NO: 265456 - DNA, 25 bp, Homo sapien
gccacagcaacactgcgacctgtgc

SEQ ID NO: 265457 - DNA, 25 bp, Homo sapien
cagcaacactgcgacctgtgcaaat

SEQ ID NO: 265458 - DNA, 25 bp, Homo sapien
gcaacactgcgacctgtgcaaatgg

SEQ ID NO: 265459 - DNA, 25 bp, Homo sapien
gaggaggcaacctggggcccttcat

SEQ ID NO: 265460 - DNA, 25 bp, Homo sapien
aaggagcctggcaaggaaagtcgtg

SEQ ID NO: 265461 - DNA, 25 bp, Homo sapien
ggccacagggacccacggcctctgt

SEQ ID NO: 265462 - DNA, 25 bp, Homo sapien
cacagggacccacggcctctgtgag

SEQ ID NO: 265463 - DNA, 25 bp, Homo sapien
gaaggagcctggcaaggaaagtcgt

SEQ ID NO: 265464 - DNA, 25 bp, Homo sapien
cctacaggggcagatgacacgaaaa

SEQ ID NO: 265465 - DNA, 25 bp, Homo sapien
gaaaatcaagcccttctgatgccag

SEQ ID NO: 265466 - DNA, 25 bp, Homo sapien
tctgtgcctgacctcgcctacaggg

SEQ ID NO: 265467 - DNA, 25 bp, Homo sapien
tgatgccagatctgaatccctggct

SEQ ID NO: 265468 - DNA, 25 bp, Homo sapien
aacatcgcaggtggcatcttcgggc

SEQ ID NO: 265469 - DNA, 25 bp, Homo sapien
tgccaaccagacaccggaggaaggg

SEQ ID NO: 265470 - DNA, 25 bp, Homo sapien
cccctgatggagagggcgctgggtc

SEQ ID NO: 265471 - DNA, 25 bp, Homo sapien
cattagtcgtccaatagcccagaac

SEQ ID NO: 265472 - DNA, 25 bp, Homo sapien
ggctcccacgtgctttgtgcggcca

SEQ ID NO: 265473 - DNA, 25 bp, Homo sapien
accgtgggctcccacgtgctttgtg

SEQ ID NO: 265474 - DNA, 25 bp, Homo sapien
tcccacgtgctttgtgcggccagca

SEQ ID NO: 265475 - DNA, 25 bp, Homo sapien
tgggctcccacgtgctttgtgcggc

SEQ ID NO: 265476 - DNA, 25 bp, Homo sapien
tccagcccgggaaggccatccagtg

SEQ ID NO: 265477 - DNA, 25 bp, Homo sapien
gccctgaataggaaggagctcctga

SEQ ID NO: 265478 - DNA, 25 bp, Homo sapien
ctccctaggccctgaataggaagga

SEQ ID NO: 265479 - DNA, 25 bp, Homo sapien
tgagtaacatcagtggggacagccc

SEQ ID NO: 265480 - DNA, 25 bp, Homo sapien
tccaagggccttagcacagacagtg

SEQ ID NO: 265481 - DNA, 25 bp, Homo sapien
gggagacctcttcctaatcgccttc

SEQ ID NO: 265482 - DNA, 25 bp, Homo sapien
cctgaatcagggagacctcttccta

SEQ ID NO: 265483 - DNA, 25 bp, Homo sapien
cagacagtgctgctccctttccgtg

SEQ ID NO: 265484 - DNA, 25 bp, Homo sapien
gcttccctccggcagctacagctgt

SEQ ID NO: 265485 - DNA, 25 bp, Homo sapien
tccggcagctacagctgttccttcg

SEQ ID NO: 265486 - DNA, 25 bp, Homo sapien
cagctgttccttcggtggacgtgtg

SEQ ID NO: 265487 - DNA, 25 bp, Homo sapien
gctacagctgttccttcggtggacg

SEQ ID NO: 265488 - DNA, 25 bp, Homo sapien
ctgaatggctgcgagctgaccagct

SEQ ID NO: 265489 - DNA, 25 bp, Homo sapien
aatggctgcgagctgaccagcttcc

SEQ ID NO: 265490 - DNA, 25 bp, Homo sapien
tggctgcgagctgaccagcttcctc

SEQ ID NO: 265491 - DNA, 25 bp, Homo sapien
gcagctgaatggctgcgagctgacc

SEQ ID NO: 265492 - DNA, 25 bp, Homo sapien
tcctctgcccggtgtagaaccagtg

SEQ ID NO: 265493 - DNA, 25 bp, Homo sapien
ctctgcccggtgtagaaccagtgcc

SEQ ID NO: 265494 - DNA, 25 bp, Homo sapien
tgcccggtgtagaaccagtgccccg

SEQ ID NO: 265495 - DNA, 25 bp, Homo sapien
tactcctctgcccggtgtagaacca

SEQ ID NO: 265496 - DNA, 25 bp, Homo sapien
taaatttggcatagcaccagtgagc

SEQ ID NO: 265497 - DNA, 25 bp, Homo sapien
aaaagcccagcttcagatggcctca

SEQ ID NO: 265498 - DNA, 25 bp, Homo sapien
ctttcaacagagcatcacgatagtg

SEQ ID NO: 265499 - DNA, 25 bp, Homo sapien
gaaataaaaagcgacaattgcccta

SEQ ID NO: 265500 - DNA, 25 bp, Homo sapien
catgtggttgcgaagaccgctgtga

SEQ ID NO: 265501 - DNA, 25 bp, Homo sapien
ccaaagagttgccttagccttcagt

SEQ ID NO: 265502 - DNA, 25 bp, Homo sapien
tcttggcggcacaggccacattgtc

SEQ ID NO: 265503 - DNA, 25 bp, Homo sapien
gcctcaagggaatggtgaacaagct

SEQ ID NO: 265504 - DNA, 25 bp, Homo sapien
gctgagcccgcagggactgctttga

SEQ ID NO: 265505 - DNA, 25 bp, Homo sapien
ttgctgaacagcaagaggtcgctgc

SEQ ID NO: 265506 - DNA, 25 bp, Homo sapien
cacaaacgtgcgctcatggtcgcca

SEQ ID NO: 265507 - DNA, 25 bp, Homo sapien
agagtcagccggcacacaaacgtgc

SEQ ID NO: 265508 - DNA, 25 bp, Homo sapien
gacaagctctgaccgggcaaagtca

SEQ ID NO: 265509 - DNA, 25 bp, Homo sapien
gctggaaaggactttgcaagcattc

SEQ ID NO: 265510 - DNA, 25 bp, Homo sapien
gcggcagacccagaacatgaacttg

SEQ ID NO: 265511 - DNA, 25 bp, Homo sapien
gatgtactggtagcgtccagattct

SEQ ID NO: 265512 - DNA, 25 bp, Homo sapien
gcaggagagggactgaaatacttaa

SEQ ID NO: 265513 - DNA, 25 bp, Homo sapien
caagaccattctgggagcctgcatg

SEQ ID NO: 265514 - DNA, 25 bp, Homo sapien
tgtctcctccctgaggttacttatg

SEQ ID NO: 265515 - DNA, 25 bp, Homo sapien
taacctcatcggtttgtcccagatg

SEQ ID NO: 265516 - DNA, 25 bp, Homo sapien
taagattgtgatgaggcacgcccat

SEQ ID NO: 265517 - DNA, 25 bp, Homo sapien
gtcgcactatgtgaccacccggaaa

SEQ ID NO: 265518 - DNA, 25 bp, Homo sapien
taccattcggagaggacggtcacgt

SEQ ID NO: 265519 - DNA, 25 bp, Homo sapien
gagacgagtccacctgcagcgtggt

SEQ ID NO: 265520 - DNA, 25 bp, Homo sapien
gcaagcacggagaattttagggcag

SEQ ID NO: 265521 - DNA, 25 bp, Homo sapien
ctatcgagctgcgaaaagacatgga

SEQ ID NO: 265522 - DNA, 25 bp, Homo sapien
ggcaatatgaaaagactacgtactg

SEQ ID NO: 265523 - DNA, 25 bp, Homo sapien
ggtggatacacgtcactgcagattt

SEQ ID NO: 265524 - DNA, 25 bp, Homo sapien
tgaggccagtgtactgggggctccc

SEQ ID NO: 265525 - DNA, 25 bp, Homo sapien
gcaggttgtgtagggctggtcctgg

SEQ ID NO: 265526 - DNA, 25 bp, Homo sapien
agaggcagtaatcatgcgcccagcc

SEQ ID NO: 265527 - DNA, 25 bp, Homo sapien
ctcccagagtgaggcaggttgtgta

SEQ ID NO: 265528 - DNA, 25 bp, Homo sapien
agaataatcaccttggtagacattt

SEQ ID NO: 265529 - DNA, 25 bp, Homo sapien
tcaccttggtagacatttttcccta

SEQ ID NO: 265530 - DNA, 25 bp, Homo sapien
cgagtcaagttaaacatgccttgat

SEQ ID NO: 265531 - DNA, 25 bp, Homo sapien
taaacatgccttgatacacatcaaa

SEQ ID NO: 265532 - DNA, 25 bp, Homo sapien
aaatgaatttggatctgcataaccc

SEQ ID NO: 265533 - DNA, 25 bp, Homo sapien
gaataattgggaagtgatgtcagag

SEQ ID NO: 265534 - DNA, 25 bp, Homo sapien
gcagagaagatttagtatgaactgt

SEQ ID NO: 265535 - DNA, 25 bp, Homo sapien
tgtcttctccctgattccaaaatga

SEQ ID NO: 265536 - DNA, 25 bp, Homo sapien
cttgccagtcctcgcacacagaggc

SEQ ID NO: 265537 - DNA, 25 bp, Homo sapien
ggttaattacttgcagcccaaacac

SEQ ID NO: 265538 - DNA, 25 bp, Homo sapien
tctgatgagcgatgaggttaattac

SEQ ID NO: 265539 - DNA, 25 bp, Homo sapien
cagaggccggtgctcagtccatgtc

SEQ ID NO: 265540 - DNA, 25 bp, Homo sapien
tcccgcttcaccaggtagcggcttg

SEQ ID NO: 265541 - DNA, 25 bp, Homo sapien
ccgcttcaccaggtagcggcttgca

SEQ ID NO: 265542 - DNA, 25 bp, Homo sapien
ctcccgcttcaccaggtagcggctt

SEQ ID NO: 265543 - DNA, 25 bp, Homo sapien
gcttcaccaggtagcggcttgcacc

SEQ ID NO: 265544 - DNA, 25 bp, Homo sapien
caaagcaccaagataggcaccgact

SEQ ID NO: 265545 - DNA, 25 bp, Homo sapien
aagcctcaaagcaccaagataggca

SEQ ID NO: 265546 - DNA, 25 bp, Homo sapien
tggaaacgcttttgcccaggaaagc

SEQ ID NO: 265547 - DNA, 25 bp, Homo sapien
ctggaaacgcttttgcccaggaaag

SEQ ID NO: 265548 - DNA, 25 bp, Homo sapien
tgatcatcagcaccacatcttcttc

SEQ ID NO: 265549 - DNA, 25 bp, Homo sapien
gatgggggagaacggagcctcttca

SEQ ID NO: 265550 - DNA, 25 bp, Homo sapien
gtgggacagcaaataccaccaccaa

SEQ ID NO: 265551 - DNA, 25 bp, Homo sapien
agagtgggacagcaaataccaccac

SEQ ID NO: 265552 - DNA, 25 bp, Homo sapien
gggtcctggggtgtacatgctgcct

SEQ ID NO: 265553 - DNA, 25 bp, Homo sapien
gtgggtcctggggtgtacatgctgc

SEQ ID NO: 265554 - DNA, 25 bp, Homo sapien
cctggggtgtacatgctgccttgcc

SEQ ID NO: 265555 - DNA, 25 bp, Homo sapien
tggggtgtacatgctgccttgcctg

SEQ ID NO: 265556 - DNA, 25 bp, Homo sapien
gagcttccaaagactagaggtgcac

SEQ ID NO: 265557 - DNA, 25 bp, Homo sapien
ctatggctaatagatggtcatggcc

SEQ ID NO: 265558 - DNA, 25 bp, Homo sapien
gactgatttctagggaaggctttgc

SEQ ID NO: 265559 - DNA, 25 bp, Homo sapien
gaagtgctgtgcctattctgactga

SEQ ID NO: 265560 - DNA, 25 bp, Homo sapien
ccccacatgcattggagtggtaata

SEQ ID NO: 265561 - DNA, 25 bp, Homo sapien
tagggagaagcaatactgcacaggc

SEQ ID NO: 265562 - DNA, 25 bp, Homo sapien
tgttgtaatgcgtgttccctgagct

SEQ ID NO: 265563 - DNA, 25 bp, Homo sapien
tatgctagtttatcctggtctgagg

SEQ ID NO: 265564 - DNA, 25 bp, Homo sapien
agtctggttccgtccctttggtatg

SEQ ID NO: 265565 - DNA, 25 bp, Homo sapien
aacccccatttgatgttgacagaat

SEQ ID NO: 265566 - DNA, 25 bp, Homo sapien
caccgtgcagcagacattcactgag

SEQ ID NO: 265567 - DNA, 25 bp, Homo sapien
gtccctttggtatggattcttccta

SEQ ID NO: 265568 - DNA, 25 bp, Homo sapien
ggaagagaagaaggcagacaggaag

SEQ ID NO: 265569 - DNA, 25 bp, Homo sapien
gaagaaggcagacaggaaggaaaac

SEQ ID NO: 265570 - DNA, 25 bp, Homo sapien
gaaggcagacaggaaggaaaaccat

SEQ ID NO: 265571 - DNA, 25 bp, Homo sapien
aagagaagaaggcagacaggaagga

SEQ ID NO: 265572 - DNA, 25 bp, Homo sapien
ccagggctaggttaccccagaggag

SEQ ID NO: 265573 - DNA, 25 bp, Homo sapien
cacctttgtatgtgctgtttggcca

SEQ ID NO: 265574 - DNA, 25 bp, Homo sapien
gcagtaggatttcccaagccaggga

SEQ ID NO: 265575 - DNA, 25 bp, Homo sapien
tgtttctcaagcttttggtgcccta

SEQ ID NO: 265576 - DNA, 25 bp, Homo sapien
tggttgcacggtccaaggtagaaac

SEQ ID NO: 265577 - DNA, 25 bp, Homo sapien
ctcttggatggttgcacggtccaag

SEQ ID NO: 265578 - DNA, 25 bp, Homo sapien
caaggctgagccaagtcagccccaa

SEQ ID NO: 265579 - DNA, 25 bp, Homo sapien
ccttgaaacttaagccaaggctgag

SEQ ID NO: 265580 - DNA, 25 bp, Homo sapien
gcagtgttggccacttgtttccctg

SEQ ID NO: 265581 - DNA, 25 bp, Homo sapien
caatcagtggttcaggctcggacaa

SEQ ID NO: 265582 - DNA, 25 bp, Homo sapien
gctcggacaagaaaaagcccaggcc

SEQ ID NO: 265583 - DNA, 25 bp, Homo sapien
aaagcccaggccagaaattgccagg

SEQ ID NO: 265584 - DNA, 25 bp, Homo sapien
tctctagcactagggtcagatgttg

SEQ ID NO: 265585 - DNA, 25 bp, Homo sapien
caaatcaggagagtcacacggatgg

SEQ ID NO: 265586 - DNA, 25 bp, Homo sapien
tgaggttgccgcactgaggctgtct

SEQ ID NO: 265587 - DNA, 25 bp, Homo sapien
tacgaaggtgatgcactaatttgcc

SEQ ID NO: 265588 - DNA, 25 bp, Homo sapien
ctcctgaggatgttctgaggacaca

SEQ ID NO: 265589 - DNA, 25 bp, Homo sapien
gcctgaggggtcacccgtggcaatg

SEQ ID NO: 265590 - DNA, 25 bp, Homo sapien
ggcaatggcagatttatcctgtgac

SEQ ID NO: 265591 - DNA, 25 bp, Homo sapien
gggtcacccgtggcaatggcagatt

SEQ ID NO: 265592 - DNA, 25 bp, Homo sapien
ttgcctggtgctgccatagacatcc

SEQ ID NO: 265593 - DNA, 25 bp, Homo sapien
cccttgcgtcgccatctcctagtct

SEQ ID NO: 265594 - DNA, 25 bp, Homo sapien
agccactgctctctttagccatcag

SEQ ID NO: 265595 - DNA, 25 bp, Homo sapien
actgcagtcccctgaaaggcagcca

SEQ ID NO: 265596 - DNA, 25 bp, Homo sapien
ctttggcaaatcagggcttgggctt

SEQ ID NO: 265597 - DNA, 25 bp, Homo sapien
cttagtatgaatcttggaaacagaa

SEQ ID NO: 265598 - DNA, 25 bp, Homo sapien
tttggcaaatcagggcttgggcttt

SEQ ID NO: 265599 - DNA, 25 bp, Homo sapien
ggctcttagtatgaatcttggaaac

SEQ ID NO: 265600 - DNA, 25 bp, Homo sapien
tgtgcacaacattagatataaatcc

SEQ ID NO: 265601 - DNA, 25 bp, Homo sapien
agagacgtttaattcctgttctccg

SEQ ID NO: 265602 - DNA, 25 bp, Homo sapien
cctgttctccgtcgtttctgaaggg

SEQ ID NO: 265603 - DNA, 25 bp, Homo sapien
atttccccaagcagagacgtttaat

SEQ ID NO: 265604 - DNA, 25 bp, Homo sapien
tattggacccttcatgatgaccttc

SEQ ID NO: 265605 - DNA, 25 bp, Homo sapien
gacagaacaaagtggattcgcttga

SEQ ID NO: 265606 - DNA, 25 bp, Homo sapien
caggcatccatcatatttggctctc

SEQ ID NO: 265607 - DNA, 25 bp, Homo sapien
tggctctctgagcagtattggaccc

SEQ ID NO: 265608 - DNA, 25 bp, Homo sapien
tatgagacaggctgaaggctgaagt

SEQ ID NO: 265609 - DNA, 25 bp, Homo sapien
gggtaagtgtatgccgatcccactc

SEQ ID NO: 265610 - DNA, 25 bp, Homo sapien
tgtggtatgagacaggctgaaggct

SEQ ID NO: 265611 - DNA, 25 bp, Homo sapien
agtctgctgtgtctgggtaagtgta

SEQ ID NO: 265612 - DNA, 25 bp, Homo sapien
cgccccttccccgtaggccactgag

SEQ ID NO: 265613 - DNA, 25 bp, Homo sapien
ttccccgtaggccactgagcttggg

SEQ ID NO: 265614 - DNA, 25 bp, Homo sapien
cttccccgtaggccactgagcttgg

SEQ ID NO: 265615 - DNA, 25 bp, Homo sapien
cccttccccgtaggccactgagctt

SEQ ID NO: 265616 - DNA, 25 bp, Homo sapien
caagtctcagatgggcttccgggag

SEQ ID NO: 265617 - DNA, 25 bp, Homo sapien
aagtcacctactagttcatccagag

SEQ ID NO: 265618 - DNA, 25 bp, Homo sapien
tagttcatccagagcaagtctcaga

SEQ ID NO: 265619 - DNA, 25 bp, Homo sapien
tagtttcaccgtcaagtcacctact

SEQ ID NO: 265620 - DNA, 25 bp, Homo sapien
ctctcatgacctgcggctggctgct

SEQ ID NO: 265621 - DNA, 25 bp, Homo sapien
agtttcaacatgaaggctctcatga

SEQ ID NO: 265622 - DNA, 25 bp, Homo sapien
ttcctggtgcaattcctcgggcctg

SEQ ID NO: 265623 - DNA, 25 bp, Homo sapien
gcttcctggtgcaattcctcgggcc

SEQ ID NO: 265624 - DNA, 25 bp, Homo sapien
gaagataggattctgttcaaagtca

SEQ ID NO: 265625 - DNA, 25 bp, Homo sapien
aatgagctggcgagaaaagcagggc

SEQ ID NO: 265626 - DNA, 25 bp, Homo sapien
cataatccagcactgacagagacct

SEQ ID NO: 265627 - DNA, 25 bp, Homo sapien
tgtaataaattatccatctggaagg

SEQ ID NO: 265628 - DNA, 25 bp, Homo sapien
tcagcctgaaacacatcccagtcat

SEQ ID NO: 265629 - DNA, 25 bp, Homo sapien
gcctgaaacacatcccagtcatcca

SEQ ID NO: 265630 - DNA, 25 bp, Homo sapien
tgtgagctacctccaccttcttcag

SEQ ID NO: 265631 - DNA, 25 bp, Homo sapien
ttcttcagcctgaaacacatcccag

SEQ ID NO: 265632 - DNA, 25 bp, Homo sapien
gggacaactagtccctttctcagat

SEQ ID NO: 265633 - DNA, 25 bp, Homo sapien
cggctgtcacagttgcagtgtgcat

SEQ ID NO: 265634 - DNA, 25 bp, Homo sapien
tgtcacagttgcagtgtgcatgctg

SEQ ID NO: 265635 - DNA, 25 bp, Homo sapien
ctttctcagatacccaggcatgtcc

SEQ ID NO: 265636 - DNA, 25 bp, Homo sapien
taaaggcatagtgcttttcacccag

SEQ ID NO: 265637 - DNA, 25 bp, Homo sapien
ggatttctgccaaacaacgctttgc

SEQ ID NO: 265638 - DNA, 25 bp, Homo sapien
gctgagcttgcgatgtgactgccaa

SEQ ID NO: 265639 - DNA, 25 bp, Homo sapien
ctctcaaggccgaattgggcagctc

SEQ ID NO: 265640 - DNA, 25 bp, Homo sapien
gggcacgcggagaatcttctcccca

SEQ ID NO: 265641 - DNA, 25 bp, Homo sapien
agagagactggggcacgcggagaat

SEQ ID NO: 265642 - DNA, 25 bp, Homo sapien
agactggggcacgcggagaatcttc

SEQ ID NO: 265643 - DNA, 25 bp, Homo sapien
ctggggcacgcggagaatcttctcc

SEQ ID NO: 265644 - DNA, 25 bp, Homo sapien
gcactacctgagtaatgaggtcaag

SEQ ID NO: 265645 - DNA, 25 bp, Homo sapien
gctaatctttgcactacctgagtaa

SEQ ID NO: 265646 - DNA, 25 bp, Homo sapien
cctgagtaatgaggtcaagtttcat

SEQ ID NO: 265647 - DNA, 25 bp, Homo sapien
taaaactgaatcagctaatctttgc

SEQ ID NO: 265648 - DNA, 25 bp, Homo sapien
tgttctgaccctcctatgaagtggg

SEQ ID NO: 265649 - DNA, 25 bp, Homo sapien
acaactgttctgaccctcctatgaa

SEQ ID NO: 265650 - DNA, 25 bp, Homo sapien
tctctggatctttaagcagttcaca

SEQ ID NO: 265651 - DNA, 25 bp, Homo sapien
ttaagcagttcacacaactgttctg

SEQ ID NO: 265652 - DNA, 25 bp, Homo sapien
ccacttgcttcaatacaggaaaaag

SEQ ID NO: 265653 - DNA, 25 bp, Homo sapien
tacaggaaaaagtcctgtccacagc

SEQ ID NO: 265654 - DNA, 25 bp, Homo sapien
ctggtgacattcttaaatccacttg

SEQ ID NO: 265655 - DNA, 25 bp, Homo sapien
gacattcttaaatccacttgcttca

SEQ ID NO: 265656 - DNA, 25 bp, Homo sapien
ctgagccctgggttgcccgcggagt

SEQ ID NO: 265657 - DNA, 25 bp, Homo sapien
agccctgggttgcccgcggagttca

SEQ ID NO: 265658 - DNA, 25 bp, Homo sapien
ttgcccgcggagttcaggcacctct

SEQ ID NO: 265659 - DNA, 25 bp, Homo sapien
ctgctccatcacagcgccgtccctt

SEQ ID NO: 265660 - DNA, 25 bp, Homo sapien
tccagagaaagatcagcacagctag

SEQ ID NO: 265661 - DNA, 25 bp, Homo sapien
gatcagcacagctagtattctgcgc

SEQ ID NO: 265662 - DNA, 25 bp, Homo sapien
agacaggaatgtgcgctccagagaa

SEQ ID NO: 265663 - DNA, 25 bp, Homo sapien
agtattctgcgccacagtgacagga

SEQ ID NO: 265664 - DNA, 25 bp, Homo sapien
gaaccctggtagaggaaggcatcag

SEQ ID NO: 265665 - DNA, 25 bp, Homo sapien
cggttacgcagagaggccgagccca

SEQ ID NO: 265666 - DNA, 25 bp, Homo sapien
taaatgagcctgagtgagataggga

SEQ ID NO: 265667 - DNA, 25 bp, Homo sapien
caccaagtgcttctccccagtagaa

SEQ ID NO: 265668 - DNA, 25 bp, Homo sapien
gggctgtgcgagtgagccctccagc

SEQ ID NO: 265669 - DNA, 25 bp, Homo sapien
gctgtgcgagtgagccctccagcca

SEQ ID NO: 265670 - DNA, 25 bp, Homo sapien
tcagcggggctgtgcgagtgagccc

SEQ ID NO: 265671 - DNA, 25 bp, Homo sapien
cggggctgtgcgagtgagccctcca

SEQ ID NO: 265672 - DNA, 25 bp, Homo sapien
taaggataggagacagcaaataaac

SEQ ID NO: 265673 - DNA, 25 bp, Homo sapien
cccttgcaggaagaatcattaggtt

SEQ ID NO: 265674 - DNA, 25 bp, Homo sapien
catgctccatccttagtctcagagg

SEQ ID NO: 265675 - DNA, 25 bp, Homo sapien
tgtcttgtcttcgtggcccttgcag

SEQ ID NO: 265676 - DNA, 25 bp, Homo sapien
tgttgccaaggtcagtgttgaccga

SEQ ID NO: 265677 - DNA, 25 bp, Homo sapien
cctgttgccaaggtcagtgttgacc

SEQ ID NO: 265678 - DNA, 25 bp, Homo sapien
ctgttgccaaggtcagtgttgaccg

SEQ ID NO: 265679 - DNA, 25 bp, Homo sapien
cagtacttgctcattatgaatccca

SEQ ID NO: 265680 - DNA, 25 bp, Homo sapien
tctgcattgtcatggtcttttgata

SEQ ID NO: 265681 - DNA, 25 bp, Homo sapien
aagctgcggtttgctcataaagaga

SEQ ID NO: 265682 - DNA, 25 bp, Homo sapien
gcggtttgctcataaagagactttt

SEQ ID NO: 265683 - DNA, 25 bp, Homo sapien
ttctttttagctaactcttcagccc

SEQ ID NO: 265684 - DNA, 25 bp, Homo sapien
ttagctaactcttcagccctcaaca

SEQ ID NO: 265685 - DNA, 25 bp, Homo sapien
tagctaactcttcagccctcaacat

SEQ ID NO: 265686 - DNA, 25 bp, Homo sapien
tttttagctaactcttcagccctca

SEQ ID NO: 265687 - DNA, 25 bp, Homo sapien
cagttatcaggtcaacgtgggcttg

SEQ ID NO: 265688 - DNA, 25 bp, Homo sapien
tcaggtcaacgtgggcttgtaatac

SEQ ID NO: 265689 - DNA, 25 bp, Homo sapien
tgctatttcagttatcaggtcaacg

SEQ ID NO: 265690 - DNA, 25 bp, Homo sapien
tttcagttatcaggtcaacgtgggc

SEQ ID NO: 265691 - DNA, 25 bp, Homo sapien
agaataaatcctatgaccattgttt

SEQ ID NO: 265692 - DNA, 25 bp, Homo sapien
tcttcctatctcatgcaaccttgat

SEQ ID NO: 265693 - DNA, 25 bp, Homo sapien
gaccattgtttacgcattttcaaaa

SEQ ID NO: 265694 - DNA, 25 bp, Homo sapien
tcaaaaaccagcttttgagagcatc

SEQ ID NO: 265695 - DNA, 25 bp, Homo sapien
tctccaacaggcagcgttgccccag

SEQ ID NO: 265696 - DNA, 25 bp, Homo sapien
agctctccccgtggatcatagaggg

SEQ ID NO: 265697 - DNA, 25 bp, Homo sapien
ctctccaacaggcagcgttgcccca

SEQ ID NO: 265698 - DNA, 25 bp, Homo sapien
gccaagctctccccgtggatcatag

SEQ ID NO: 265699 - DNA, 25 bp, Homo sapien
ttcagggaccgcctatagaataaag

SEQ ID NO: 265700 - DNA, 25 bp, Homo sapien
cagggaccgcctatagaataaaggg

SEQ ID NO: 265701 - DNA, 25 bp, Homo sapien
agctcattcagggaccgcctataga

SEQ ID NO: 265702 - DNA, 25 bp, Homo sapien
ctcattcagggaccgcctatagaat

SEQ ID NO: 265703 - DNA, 25 bp, Homo sapien
ctggcacacggaggatgaaggcagc

SEQ ID NO: 265704 - DNA, 25 bp, Homo sapien
gcacacggaggatgaaggcagccac

SEQ ID NO: 265705 - DNA, 25 bp, Homo sapien
cacggaggatgaaggcagccacgtc

SEQ ID NO: 265706 - DNA, 25 bp, Homo sapien
acacggaggatgaaggcagccacgt

SEQ ID NO: 265707 - DNA, 25 bp, Homo sapien
ggttcccaggacgttcacagggcag

SEQ ID NO: 265708 - DNA, 25 bp, Homo sapien
caccctggtgagttacggtttgcca

SEQ ID NO: 265709 - DNA, 25 bp, Homo sapien
cattgtctgccgaaaggatgaaggt

SEQ ID NO: 265710 - DNA, 25 bp, Homo sapien
ctcaattcggttcagggttcccagg

SEQ ID NO: 265711 - DNA, 25 bp, Homo sapien
tcccggacatggaccatagaagcag

SEQ ID NO: 265712 - DNA, 25 bp, Homo sapien
ggctcagcgtgtcttcttgccctct

SEQ ID NO: 265713 - DNA, 25 bp, Homo sapien
ccctctcctataggctgctgatgct

SEQ ID NO: 265714 - DNA, 25 bp, Homo sapien
aacccattcccggacatggaccata

SEQ ID NO: 265715 - DNA, 25 bp, Homo sapien
tgaagagtccgggaacctagtggta

SEQ ID NO: 265716 - DNA, 25 bp, Homo sapien
ggaacctagtggtacagggcatcag

SEQ ID NO: 265717 - DNA, 25 bp, Homo sapien
ggtttccagactgggatgcatgaca

SEQ ID NO: 265718 - DNA, 25 bp, Homo sapien
gggtttccagactgggatgcatgac

SEQ ID NO: 265719 - DNA, 25 bp, Homo sapien
gaaacaatgtaaagctgctgcatgt

SEQ ID NO: 265720 - DNA, 25 bp, Homo sapien
tgggcaaaaccacatgacagaatga

SEQ ID NO: 265721 - DNA, 25 bp, Homo sapien
gacagaatgacagcaggcttttgta

SEQ ID NO: 265722 - DNA, 25 bp, Homo sapien
ttttgtaggccagccggccacggga

SEQ ID NO: 265723 - DNA, 25 bp, Homo sapien
cagccatattcttgatgggatatgc

SEQ ID NO: 265724 - DNA, 25 bp, Homo sapien
catattcttgatgggatatgcccaa

SEQ ID NO: 265725 - DNA, 25 bp, Homo sapien
acagccacagccatattcttgatgg

SEQ ID NO: 265726 - DNA, 25 bp, Homo sapien
ccacagccatattcttgatgggata

SEQ ID NO: 265727 - DNA, 25 bp, Homo sapien
ggagttagagtgttgtttcccatca

SEQ ID NO: 265728 - DNA, 25 bp, Homo sapien
cctgggcagacagattgagtacaaa

SEQ ID NO: 265729 - DNA, 25 bp, Homo sapien
actttgcacgtggtaggtttcaaca

SEQ ID NO: 265730 - DNA, 25 bp, Homo sapien
caacaagtgttccttggcagtgata

SEQ ID NO: 265731 - DNA, 25 bp, Homo sapien
aaagatccacatctggtaactccgg

SEQ ID NO: 265732 - DNA, 25 bp, Homo sapien
taactccggtgtctggctgatctcc

SEQ ID NO: 265733 - DNA, 25 bp, Homo sapien
gatctggttgtaggagtgtgcccct

SEQ ID NO: 265734 - DNA, 25 bp, Homo sapien
cccaggttgagaggtagccgtccat

SEQ ID NO: 265735 - DNA, 25 bp, Homo sapien
caccagcaaccctaggtctggggtc

SEQ ID NO: 265736 - DNA, 25 bp, Homo sapien
ccaccagcaaccctaggtctggggt

SEQ ID NO: 265737 - DNA, 25 bp, Homo sapien
accagcaaccctaggtctggggtca

SEQ ID NO: 265738 - DNA, 25 bp, Homo sapien
tccaccagcaaccctaggtctgggg

SEQ ID NO: 265739 - DNA, 25 bp, Homo sapien
ctgtggctccatccacaggtatgtc

SEQ ID NO: 265740 - DNA, 25 bp, Homo sapien
gtggctccatccacaggtatgtcgc

SEQ ID NO: 265741 - DNA, 25 bp, Homo sapien
tgtggctccatccacaggtatgtcg

SEQ ID NO: 265742 - DNA, 25 bp, Homo sapien
tgccctgaagtgatagaggccatgg

SEQ ID NO: 265743 - DNA, 25 bp, Homo sapien
tggcagatacagtctttgttccctt

SEQ ID NO: 265744 - DNA, 25 bp, Homo sapien
gggactagagtcagcattgtgccct

SEQ ID NO: 265745 - DNA, 25 bp, Homo sapien
agatacagtctttgttccctttgcc

SEQ ID NO: 265746 - DNA, 25 bp, Homo sapien
aatgtgaattttggtgactcctgta

SEQ ID NO: 265747 - DNA, 25 bp, Homo sapien
tctcagcaccttttgactcaagcta

SEQ ID NO: 265748 - DNA, 25 bp, Homo sapien
tgtactcatccagagtggccctcag

SEQ ID NO: 265749 - DNA, 25 bp, Homo sapien
tgactcaagctattacccaaatgtg

SEQ ID NO: 265750 - DNA, 25 bp, Homo sapien
tattgccataatttgacacttgcca

SEQ ID NO: 265751 - DNA, 25 bp, Homo sapien
cctgtaaaccgtactaaatagagat

SEQ ID NO: 265752 - DNA, 25 bp, Homo sapien
gattgtaaagtgtccatagatcctg

SEQ ID NO: 265753 - DNA, 25 bp, Homo sapien
tactccaccgttttatcaatattgc

SEQ ID NO: 265754 - DNA, 25 bp, Homo sapien
taaatgttttatgagggttggtgag

SEQ ID NO: 265755 - DNA, 25 bp, Homo sapien
tggagcccacatacccatggagcct

SEQ ID NO: 265756 - DNA, 25 bp, Homo sapien
ttcgccaaaccactgttgactgatg

SEQ ID NO: 265757 - DNA, 25 bp, Homo sapien
tccccagtgacagttgagcctcatg

SEQ ID NO: 265758 - DNA, 25 bp, Homo sapien
gatgctgatgaccagcactttggga

SEQ ID NO: 265759 - DNA, 25 bp, Homo sapien
ttggaggcttttcgccaaaccactg

SEQ ID NO: 265760 - DNA, 25 bp, Homo sapien
agggttccatcctcgaccagccgtg

SEQ ID NO: 265761 - DNA, 25 bp, Homo sapien
cattaggtaaggtcagagtggagtc

SEQ ID NO: 265762 - DNA, 25 bp, Homo sapien
gcctcagagatcaggctcagggttc

SEQ ID NO: 265763 - DNA, 25 bp, Homo sapien
tgtcctccgagcgtcccattaggta

SEQ ID NO: 265764 - DNA, 25 bp, Homo sapien
attctgggtagtgagataacggaag

SEQ ID NO: 265765 - DNA, 25 bp, Homo sapien
gatctgagcaccttcttagtccacc

SEQ ID NO: 265766 - DNA, 25 bp, Homo sapien
agtgagataacggaaggagacatca

SEQ ID NO: 265767 - DNA, 25 bp, Homo sapien
tcttagtccaccacagctttcagga

SEQ ID NO: 265768 - DNA, 25 bp, Homo sapien
tggcctgacccgagccacagtattg

SEQ ID NO: 265769 - DNA, 25 bp, Homo sapien
gggcgctgagcttggaaactccctg

SEQ ID NO: 265770 - DNA, 25 bp, Homo sapien
tcatgtcaggcttgtcacaaagctg

SEQ ID NO: 265771 - DNA, 25 bp, Homo sapien
tctcctgtcaaaaatgtgccctctc

SEQ ID NO: 265772 - DNA, 25 bp, Homo sapien
taacaggggactggccacgtggcag

SEQ ID NO: 265773 - DNA, 25 bp, Homo sapien
tcttttctgcaacatggagccatcg

SEQ ID NO: 265774 - DNA, 25 bp, Homo sapien
catcgtgcctgattctgatgccccg

SEQ ID NO: 265775 - DNA, 25 bp, Homo sapien
cctccagggtcagagtcatgcgtgg

SEQ ID NO: 265776 - DNA, 25 bp, Homo sapien
gtcatgcgtggagccacacccatct

SEQ ID NO: 265777 - DNA, 25 bp, Homo sapien
tgcgggacagctacactcagtgtcc

SEQ ID NO: 265778 - DNA, 25 bp, Homo sapien
tcaaccctgcgggacagctacactc

SEQ ID NO: 265779 - DNA, 25 bp, Homo sapien
accctgcgggacagctacactcagt

SEQ ID NO: 265780 - DNA, 25 bp, Homo sapien
cctgcgggacagctacactcagtgt

SEQ ID NO: 265781 - DNA, 25 bp, Homo sapien
ccactgaccccatgactttcagggg

SEQ ID NO: 265782 - DNA, 25 bp, Homo sapien
tgaccactgaccccatgactttcag

SEQ ID NO: 265783 - DNA, 25 bp, Homo sapien
accactgaccccatgactttcaggg

SEQ ID NO: 265784 - DNA, 25 bp, Homo sapien
caaagccctttgcagtacttactgg

SEQ ID NO: 265785 - DNA, 25 bp, Homo sapien
tactggtgcgattagtaagaaaggc

SEQ ID NO: 265786 - DNA, 25 bp, Homo sapien
cctgtgtctgtatggttgataacct

SEQ ID NO: 265787 - DNA, 25 bp, Homo sapien
actgttcccaaggactgctctctgg

SEQ ID NO: 265788 - DNA, 25 bp, Homo sapien
ggcagagcctccgcacactcctcat

SEQ ID NO: 265789 - DNA, 25 bp, Homo sapien
ttcagagtccgaggggcctgtgcga

SEQ ID NO: 265790 - DNA, 25 bp, Homo sapien
ttgattcagagtccgaggggcctgt

SEQ ID NO: 265791 - DNA, 25 bp, Homo sapien
tcttgattcagagtccgaggggcct

SEQ ID NO: 265792 - DNA, 25 bp, Homo sapien
cctggatcagtggtactgactcttg

SEQ ID NO: 265793 - DNA, 25 bp, Homo sapien
aagaagcaggctcactccagtggct

SEQ ID NO: 265794 - DNA, 25 bp, Homo sapien
caatggaagaagcaggctcactcca

SEQ ID NO: 265795 - DNA, 25 bp, Homo sapien
ggctcactccagtggctcaaaactc

SEQ ID NO: 265796 - DNA, 25 bp, Homo sapien
ctacaatggaagaagcaggctcact

SEQ ID NO: 265797 - DNA, 25 bp, Homo sapien
gtgactccagctccgggtacagact

SEQ ID NO: 265798 - DNA, 25 bp, Homo sapien
gcttcgttttcttgccagaggcctc

SEQ ID NO: 265799 - DNA, 25 bp, Homo sapien
agaggcctccagtttggttggcaga

SEQ ID NO: 265800 - DNA, 25 bp, Homo sapien
gtgaccagctgaccaattgaacggg

SEQ ID NO: 265801 - DNA, 25 bp, Homo sapien
caaggcaatgtgtcacttcggtact

SEQ ID NO: 265802 - DNA, 25 bp, Homo sapien
tgaaatgtgcgctctcagtcctgct

SEQ ID NO: 265803 - DNA, 25 bp, Homo sapien
gagcctcaatgtccctgtgtgtgaa

SEQ ID NO: 265804 - DNA, 25 bp, Homo sapien
ctttaactgtatgaccaaggcaatg

SEQ ID NO: 265805 - DNA, 25 bp, Homo sapien
caccaatgacgtgatggctgctgga

SEQ ID NO: 265806 - DNA, 25 bp, Homo sapien
gttcatctgcatggacgtgtggtct

SEQ ID NO: 265807 - DNA, 25 bp, Homo sapien
cgaacggccctgtggataacataag

SEQ ID NO: 265808 - DNA, 25 bp, Homo sapien
cgtaacctggtcaacctcgccatgt

SEQ ID NO: 265809 - DNA, 25 bp, Homo sapien
tttgaaacaagcaaactcagaaatg

SEQ ID NO: 265810 - DNA, 25 bp, Homo sapien
ttgaaacaagcaaactcagaaatgc

SEQ ID NO: 265811 - DNA, 25 bp, Homo sapien
aatgttccaggtaattgtgcagggc

SEQ ID NO: 265812 - DNA, 25 bp, Homo sapien
ggagccctctgaggtcgtggtcact

SEQ ID NO: 265813 - DNA, 25 bp, Homo sapien
aaagaatgttccaggtaattgtgca

SEQ ID NO: 265814 - DNA, 25 bp, Homo sapien
ccctctgaggtcgtggtcactgggt

SEQ ID NO: 265815 - DNA, 25 bp, Homo sapien
tctgcatagttggacacttttgggt

SEQ ID NO: 265816 - DNA, 25 bp, Homo sapien
atctccctgaaaaccagattccaca

SEQ ID NO: 265817 - DNA, 25 bp, Homo sapien
cagacttccaagcattgtagaaggt

SEQ ID NO: 265818 - DNA, 25 bp, Homo sapien
acagcagacttccaagcattgtaga

SEQ ID NO: 265819 - DNA, 25 bp, Homo sapien
aatgtaaacgttccttccccagcat

SEQ ID NO: 265820 - DNA, 25 bp, Homo sapien
ctgcagatgggtaatgtaaacgttc

SEQ ID NO: 265821 - DNA, 25 bp, Homo sapien
cagatgggtaatgtaaacgttcctt

SEQ ID NO: 265822 - DNA, 25 bp, Homo sapien
taatgtaaacgttccttccccagca

SEQ ID NO: 265823 - DNA, 25 bp, Homo sapien
gcaggtgccgtggaatgctctcggg

SEQ ID NO: 265824 - DNA, 25 bp, Homo sapien
ggaattggaaagcattgcaggtgcc

SEQ ID NO: 265825 - DNA, 25 bp, Homo sapien
tgccgtggaatgctctcgggccgcc

SEQ ID NO: 265826 - DNA, 25 bp, Homo sapien
ctttccgggaattggaaagcattgc

SEQ ID NO: 265827 - DNA, 25 bp, Homo sapien
ctccaggaattttcagttggctgca

SEQ ID NO: 265828 - DNA, 25 bp, Homo sapien
tccaggaattttcagttggctgcat

SEQ ID NO: 265829 - DNA, 25 bp, Homo sapien
gggggcgagaaagctctgctcagaa

SEQ ID NO: 265830 - DNA, 25 bp, Homo sapien
gggcgagaaagctctgctcagaacc

SEQ ID NO: 265831 - DNA, 25 bp, Homo sapien
ctgctcagaacctgagatcctccca

SEQ ID NO: 265832 - DNA, 25 bp, Homo sapien
ccagactccagtgacgtagcttctg

SEQ ID NO: 265833 - DNA, 25 bp, Homo sapien
cgcatagggagagacaatgaaggcc

SEQ ID NO: 265834 - DNA, 25 bp, Homo sapien
gctgcacgggtaaagctgctgccct

SEQ ID NO: 265835 - DNA, 25 bp, Homo sapien
ttatttcaaggaccaggcgggacgc

SEQ ID NO: 265836 - DNA, 25 bp, Homo sapien
tagggacatccacgggtttgctaag

SEQ ID NO: 265837 - DNA, 25 bp, Homo sapien
gggcaggtgggcaaacatcgcccct

SEQ ID NO: 265838 - DNA, 25 bp, Homo sapien
tgacactctgcgaattcctcctcaa

SEQ ID NO: 265839 - DNA, 25 bp, Homo sapien
tcactgaagtagaggtaacggctcc

SEQ ID NO: 265840 - DNA, 25 bp, Homo sapien
taacggctcccctggtgagtgagct

SEQ ID NO: 265841 - DNA, 25 bp, Homo sapien
tctgcagtgacactctgcgaattcc

SEQ ID NO: 265842 - DNA, 25 bp, Homo sapien
tggactgctgcctgtacgttgtgtt

SEQ ID NO: 265843 - DNA, 25 bp, Homo sapien
tagcaggtgcagtgtagctctgcag

SEQ ID NO: 265844 - DNA, 25 bp, Homo sapien
ttagcaggtgcagtgtagctctgca

SEQ ID NO: 265845 - DNA, 25 bp, Homo sapien
tgcctgtacgttgtgttctgaggcc

SEQ ID NO: 265846 - DNA, 25 bp, Homo sapien
acctgagctagtgcagagtgaggca

SEQ ID NO: 265847 - DNA, 25 bp, Homo sapien
taagtcaaatgtaggtgacctgagc

SEQ ID NO: 265848 - DNA, 25 bp, Homo sapien
cagacgtagctccagcaggtatgtg

SEQ ID NO: 265849 - DNA, 25 bp, Homo sapien
taacgagtttggctccagtagacgt

SEQ ID NO: 265850 - DNA, 25 bp, Homo sapien
catcttctaaggaatcactgagtcc

SEQ ID NO: 265851 - DNA, 25 bp, Homo sapien
tggagaatagtaacggatcctgtag

SEQ ID NO: 265852 - DNA, 25 bp, Homo sapien
gatcctgtagagtcgtgcgctagta

SEQ ID NO: 265853 - DNA, 25 bp, Homo sapien
gatggtaccgtatagcgcagcacag

SEQ ID NO: 265854 - DNA, 25 bp, Homo sapien
tggaagaagaggtcggcagccttgc

SEQ ID NO: 265855 - DNA, 25 bp, Homo sapien
agaagaggtcggcagccttgcactc

SEQ ID NO: 265856 - DNA, 25 bp, Homo sapien
gaggtcggcagccttgcactctggc

SEQ ID NO: 265857 - DNA, 25 bp, Homo sapien
tcagcgaggaaggctcctcatggaa

SEQ ID NO: 265858 - DNA, 25 bp, Homo sapien
tgtgtttcccaggctttcccggcca

SEQ ID NO: 265859 - DNA, 25 bp, Homo sapien
ccagtgctgggaggggagcgggcca

SEQ ID NO: 265860 - DNA, 25 bp, Homo sapien
ggctttcccggccagggcgcagggc

SEQ ID NO: 265861 - DNA, 25 bp, Homo sapien
ggcgcagggcccgtgggggaggctc

SEQ ID NO: 265862 - DNA, 25 bp, Homo sapien
gagcagagtggcggaggtgaggaag

SEQ ID NO: 265863 - DNA, 25 bp, Homo sapien
ggagcagagtggcggaggtgaggaa

SEQ ID NO: 265864 - DNA, 25 bp, Homo sapien
gcagagtggcggaggtgaggaaggg

SEQ ID NO: 265865 - DNA, 25 bp, Homo sapien
gcccaaagcggcagatctgtgaatt

SEQ ID NO: 265866 - DNA, 25 bp, Homo sapien
tatctggtcatcaggcgcttgtatt

SEQ ID NO: 265867 - DNA, 25 bp, Homo sapien
caggcgcttgtattgccaagtgatt

SEQ ID NO: 265868 - DNA, 25 bp, Homo sapien
gcacccagggggatttcgtactgac

SEQ ID NO: 265869 - DNA, 25 bp, Homo sapien
tttgaaggcacctgaagcctctcct

SEQ ID NO: 265870 - DNA, 25 bp, Homo sapien
ctgccctccgtcccacacatttggg

SEQ ID NO: 265871 - DNA, 25 bp, Homo sapien
ctttgaaggcacctgaagcctctcc

SEQ ID NO: 265872 - DNA, 25 bp, Homo sapien
caggagcaccagctctagtaggcat

SEQ ID NO: 265873 - DNA, 25 bp, Homo sapien
ctccaggatggctgtctgtggcata

SEQ ID NO: 265874 - DNA, 25 bp, Homo sapien
ttcagaaatgcaggagcaccagctc

SEQ ID NO: 265875 - DNA, 25 bp, Homo sapien
tgtggcataaccctgcatcagcagc

SEQ ID NO: 265876 - DNA, 25 bp, Homo sapien
tagaactaggttttcctccacgagc

SEQ ID NO: 265877 - DNA, 25 bp, Homo sapien
tgttttcccagggacatagaactag

SEQ ID NO: 265878 - DNA, 25 bp, Homo sapien
ggacatagaactaggttttcctcca

SEQ ID NO: 265879 - DNA, 25 bp, Homo sapien
cagggacatagaactaggttttcct

SEQ ID NO: 265880 - DNA, 25 bp, Homo sapien
tctcctcctagtgagaggcagctgc

SEQ ID NO: 265881 - DNA, 25 bp, Homo sapien
tcccaggtgcaaaacccagcattct

SEQ ID NO: 265882 - DNA, 25 bp, Homo sapien
aacccagcattctcctcctagtgag

SEQ ID NO: 265883 - DNA, 25 bp, Homo sapien
tgagacttcccaggtgcaaaaccca

SEQ ID NO: 265884 - DNA, 25 bp, Homo sapien
gaatttggatgtacttgcagagctg

SEQ ID NO: 265885 - DNA, 25 bp, Homo sapien
gctgggatggcgctgacacagcctc

SEQ ID NO: 265886 - DNA, 25 bp, Homo sapien
aggaacccagagcactgcaactgcg

SEQ ID NO: 265887 - DNA, 25 bp, Homo sapien
tgcaactgcgctgtgaactcttagg

SEQ ID NO: 265888 - DNA, 25 bp, Homo sapien
gaaggctgtaactaaaatgtctgca

SEQ ID NO: 265889 - DNA, 25 bp, Homo sapien
ttgccgggcttctggagcccgtgca

SEQ ID NO: 265890 - DNA, 25 bp, Homo sapien
tgcctttagcacctgcgacctgatc

SEQ ID NO: 265891 - DNA, 25 bp, Homo sapien
atgtctgcaggatcatgaacatttg

SEQ ID NO: 265892 - DNA, 25 bp, Homo sapien
ttttcatgtgcatgcccaagaggaa

SEQ ID NO: 265893 - DNA, 25 bp, Homo sapien
ccctcgaggtaattcatgctgagag

SEQ ID NO: 265894 - DNA, 25 bp, Homo sapien
cctcgaggtaattcatgctgagagt

SEQ ID NO: 265895 - DNA, 25 bp, Homo sapien
tagtactgatcccaacatctcactc

SEQ ID NO: 265896 - DNA, 25 bp, Homo sapien
gaagatgtagtactgatcccaacat

SEQ ID NO: 265897 - DNA, 25 bp, Homo sapien
ctacggatgaaagtttaggaagatg

SEQ ID NO: 265898 - DNA, 25 bp, Homo sapien
gtttaggaagatgtagtactgatcc

SEQ ID NO: 265899 - DNA, 25 bp, Homo sapien
gagcaggcttcccaatccggatttc

SEQ ID NO: 265900 - DNA, 25 bp, Homo sapien
tgtccacacgctgatagcctctgga

SEQ ID NO: 265901 - DNA, 25 bp, Homo sapien
ccacacgctgatagcctctggagga

SEQ ID NO: 265902 - DNA, 25 bp, Homo sapien
ggtgtccacacgctgatagcctctg

SEQ ID NO: 265903 - DNA, 25 bp, Homo sapien
ggcttggcgcttggctagccgggct

SEQ ID NO: 265904 - DNA, 25 bp, Homo sapien
cacactggggcatatctctggcagc

SEQ ID NO: 265905 - DNA, 25 bp, Homo sapien
gttgctttcttccctcgcccatgat

SEQ ID NO: 265906 - DNA, 25 bp, Homo sapien
agcctccttgagggcgggccacact

SEQ ID NO: 265907 - DNA, 25 bp, Homo sapien
gatgctgaaagaactctctggctta

SEQ ID NO: 265908 - DNA, 25 bp, Homo sapien
agatgctgaaagaactctctggctt

SEQ ID NO: 265909 - DNA, 25 bp, Homo sapien
caggcttggcctttacaaacacatt

SEQ ID NO: 265910 - DNA, 25 bp, Homo sapien
tctgcctgcaggcttggcctttaca

SEQ ID NO: 265911 - DNA, 25 bp, Homo sapien
tgatgcaggaacaccgggaaaaggc

SEQ ID NO: 265912 - DNA, 25 bp, Homo sapien
gaaatagcacgtgaactgagcttcc

SEQ ID NO: 265913 - DNA, 25 bp, Homo sapien
tggtggcacacacaagcatcacacg

SEQ ID NO: 265914 - DNA, 25 bp, Homo sapien
catcacacgtctgggaagtacagct

SEQ ID NO: 265915 - DNA, 25 bp, Homo sapien
agatgtaatggaaacctcagaaaac

SEQ ID NO: 265916 - DNA, 25 bp, Homo sapien
cattccctaaatcatcagttgttgc

SEQ ID NO: 265917 - DNA, 25 bp, Homo sapien
tgatagaatgaggaggaaagtagac

SEQ ID NO: 265918 - DNA, 25 bp, Homo sapien
tgtgggtggacttttactggatgct

SEQ ID NO: 265919 - DNA, 25 bp, Homo sapien
ggacagagagccacatactgagtac

SEQ ID NO: 265920 - DNA, 25 bp, Homo sapien
cttctagggttgaattgggactgca

SEQ ID NO: 265921 - DNA, 25 bp, Homo sapien
tgagtacaagtaagagcttcctggt

SEQ ID NO: 265922 - DNA, 25 bp, Homo sapien
tcatacatcgtttgaagagctgctg

SEQ ID NO: 265923 - DNA, 25 bp, Homo sapien
gaagttccccggtgattctgatcag

SEQ ID NO: 265924 - DNA, 25 bp, Homo sapien
aattccgtgggatgcaattcgtctg

SEQ ID NO: 265925 - DNA, 25 bp, Homo sapien
agttctctagcgtgttcctgtaagg

SEQ ID NO: 265926 - DNA, 25 bp, Homo sapien
gattttgatccactgcagatgagaa

SEQ ID NO: 265927 - DNA, 25 bp, Homo sapien
ttaatagtgcactgacactcatttt

SEQ ID NO: 265928 - DNA, 25 bp, Homo sapien
taatagtgcactgacactcatttta

SEQ ID NO: 265929 - DNA, 25 bp, Homo sapien
tttattaatagtgcactgacactca

SEQ ID NO: 265930 - DNA, 25 bp, Homo sapien
tattaatagtgcactgacactcatt

SEQ ID NO: 265931 - DNA, 25 bp, Homo sapien
gggtctgcattccatcccatagtgg

SEQ ID NO: 265932 - DNA, 25 bp, Homo sapien
gaatacttagcacctgatggctctg

SEQ ID NO: 265933 - DNA, 25 bp, Homo sapien
catagtggtgttgcttgcctgcggc

SEQ ID NO: 265934 - DNA, 25 bp, Homo sapien
gagaaaaacagttcagattccactg

SEQ ID NO: 265935 - DNA, 25 bp, Homo sapien
gatcatacagatcagggaggcatat

SEQ ID NO: 265936 - DNA, 25 bp, Homo sapien
tttcagtttaggaggccatagaacc

SEQ ID NO: 265937 - DNA, 25 bp, Homo sapien
gcatacagtgtaccctcaaggaggg

SEQ ID NO: 265938 - DNA, 25 bp, Homo sapien
gcctcataagtagcaaggaccacga

SEQ ID NO: 265939 - DNA, 25 bp, Homo sapien
tccctgaatatatgagtaagtggct

SEQ ID NO: 265940 - DNA, 25 bp, Homo sapien
tcatagcccggatttcttacgtgct

SEQ ID NO: 265941 - DNA, 25 bp, Homo sapien
tagaacaatactctacccagtgaca

SEQ ID NO: 265942 - DNA, 25 bp, Homo sapien
taatgggtattgtctccagggaaat

SEQ ID NO: 265943 - DNA, 25 bp, Homo sapien
ttggaatcaacagttcatagtagga

SEQ ID NO: 265944 - DNA, 25 bp, Homo sapien
tcaacagttcatagtaggagcatgg

SEQ ID NO: 265945 - DNA, 25 bp, Homo sapien
tagtaggagcatggctgtgttgcca

SEQ ID NO: 265946 - DNA, 25 bp, Homo sapien
taggagcatggctgtgttgccatca

SEQ ID NO: 265947 - DNA, 25 bp, Homo sapien
tgcagtctcggctccaacttcagct

SEQ ID NO: 265948 - DNA, 25 bp, Homo sapien
gcagtctcggctccaacttcagctc

SEQ ID NO: 265949 - DNA, 25 bp, Homo sapien
ttgttgtgagtgtgccctcagtttg

SEQ ID NO: 265950 - DNA, 25 bp, Homo sapien
tgttgtgagtgtgccctcagtttgt

SEQ ID NO: 265951 - DNA, 25 bp, Homo sapien
tattgttgtgagtgtgccctcagtt

SEQ ID NO: 265952 - DNA, 25 bp, Homo sapien
ggtattgttgtgagtgtgccctcag

SEQ ID NO: 265953 - DNA, 25 bp, Homo sapien
caaaaaagactccaagttgacatac

SEQ ID NO: 265954 - DNA, 25 bp, Homo sapien
cggccaggacactaagctttaaatg

SEQ ID NO: 265955 - DNA, 25 bp, Homo sapien
atgcccggccaggacactaagcttt

SEQ ID NO: 265956 - DNA, 25 bp, Homo sapien
aaaagactccaagttgacatacata

SEQ ID NO: 265957 - DNA, 25 bp, Homo sapien
tctagagacttcgtttttctcattt

SEQ ID NO: 265958 - DNA, 25 bp, Homo sapien
gagcctggacttctagagacttcgt

SEQ ID NO: 265959 - DNA, 25 bp, Homo sapien
cctggacttctagagacttcgtttt

SEQ ID NO: 265960 - DNA, 25 bp, Homo sapien
gacttctagagacttcgtttttctc

SEQ ID NO: 265961 - DNA, 25 bp, Homo sapien
cataattagatttgatacctcagta

SEQ ID NO: 265962 - DNA, 25 bp, Homo sapien
ttaaacgactgccataattagattt

SEQ ID NO: 265963 - DNA, 25 bp, Homo sapien
gccataattagatttgatacctcag

SEQ ID NO: 265964 - DNA, 25 bp, Homo sapien
gactgccataattagatttgatacc

SEQ ID NO: 265965 - DNA, 25 bp, Homo sapien
gcagacatttaaacgttaccattca

SEQ ID NO: 265966 - DNA, 25 bp, Homo sapien
tccgtagcagcagacatttaaacgt

SEQ ID NO: 265967 - DNA, 25 bp, Homo sapien
tcttgcttccgtagcagcagacatt

SEQ ID NO: 265968 - DNA, 25 bp, Homo sapien
gaattttcttgcttccgtagcagca

SEQ ID NO: 265969 - DNA, 25 bp, Homo sapien
catttacttctgcagtttgatctgg

SEQ ID NO: 265970 - DNA, 25 bp, Homo sapien
tcctcctggtatgccgggtgaagca

SEQ ID NO: 265971 - DNA, 25 bp, Homo sapien
gatgggctggacttaaacagaacac

SEQ ID NO: 265972 - DNA, 25 bp, Homo sapien
gagtaccaagttctgcattcagtat

SEQ ID NO: 265973 - DNA, 25 bp, Homo sapien
actccgcccgtagttacccagatca

SEQ ID NO: 265974 - DNA, 25 bp, Homo sapien
ccgggttatcttaactgtgcagagc

SEQ ID NO: 265975 - DNA, 25 bp, Homo sapien
tcatcgcctccgttttctgtttagg

SEQ ID NO: 265976 - DNA, 25 bp, Homo sapien
ggttatcttaactgtgcagagcagg

SEQ ID NO: 265977 - DNA, 25 bp, Homo sapien
taagcaggtcacagtcttagaagtg

SEQ ID NO: 265978 - DNA, 25 bp, Homo sapien
cagaggagtggatctgtaagcaggt

SEQ ID NO: 265979 - DNA, 25 bp, Homo sapien
agtcttagaagtgatggtgctctgg

SEQ ID NO: 265980 - DNA, 25 bp, Homo sapien
ggagtggatctgtaagcaggtcaca

SEQ ID NO: 265981 - DNA, 25 bp, Homo sapien
agttttgcagggaccaagggcccag

SEQ ID NO: 265982 - DNA, 25 bp, Homo sapien
tgagccccgatctcaagcagtatgg

SEQ ID NO: 265983 - DNA, 25 bp, Homo sapien
tatgttgattcgtgagcaggcttcg

SEQ ID NO: 265984 - DNA, 25 bp, Homo sapien
cactaagccaaagggtcagcacaga

SEQ ID NO: 265985 - DNA, 25 bp, Homo sapien
cagagggagctcataccccaatcaa

SEQ ID NO: 265986 - DNA, 25 bp, Homo sapien
aagccacggacccttgccatgagtg

SEQ ID NO: 265987 - DNA, 25 bp, Homo sapien
tttagctagacaaagagtactgatc

SEQ ID NO: 265988 - DNA, 25 bp, Homo sapien
tctcaatggcacttgccacgggact

SEQ ID NO: 265989 - DNA, 25 bp, Homo sapien
ccttcaagggcgatcaagaggacgc

SEQ ID NO: 265990 - DNA, 25 bp, Homo sapien
tgagggaaacgccaaccgtaagcga

SEQ ID NO: 265991 - DNA, 25 bp, Homo sapien
tcttgcgaaagaaaggcaaccggcc

SEQ ID NO: 265992 - DNA, 25 bp, Homo sapien
cgtaagcgacttctttctagggaag

SEQ ID NO: 265993 - DNA, 25 bp, Homo sapien
tgtcgaacacctagcgcccgggagc

SEQ ID NO: 265994 - DNA, 25 bp, Homo sapien
cacaaggtcgcggttcaagtctgtc

SEQ ID NO: 265995 - DNA, 25 bp, Homo sapien
gcccgggagccacgcgtaggcccta

SEQ ID NO: 265996 - DNA, 25 bp, Homo sapien
ggttcaagtctgtcgaacacctagc

SEQ ID NO: 265997 - DNA, 25 bp, Homo sapien
gttagagagtctccccacggtccca

SEQ ID NO: 265998 - DNA, 25 bp, Homo sapien
aacaggttagagagtctccccacgg

SEQ ID NO: 265999 - DNA, 25 bp, Homo sapien
agagtctccccacggtcccaatgaa

SEQ ID NO: 266000 - DNA, 25 bp, Homo sapien
ctcaaacaggttagagagtctcccc

SEQ ID NO: 266001 - DNA, 25 bp, Homo sapien
cagtctcgtctttctcgcaaatgtc

SEQ ID NO: 266002 - DNA, 25 bp, Homo sapien
ggcagaacatggtttaacccgccca

SEQ ID NO: 266003 - DNA, 25 bp, Homo sapien
agggccgcaacatcgcagtccggtt

SEQ ID NO: 266004 - DNA, 25 bp, Homo sapien
gtttaacccgcccatgccaatggac

SEQ ID NO: 266005 - DNA, 25 bp, Homo sapien
taaagattaactcgagtcgcctcac

SEQ ID NO: 266006 - DNA, 25 bp, Homo sapien
gcagccacgggaacataaaacgaag

SEQ ID NO: 266007 - DNA, 25 bp, Homo sapien
tcacagaagattaaagccgacgcct

SEQ ID NO: 266008 - DNA, 25 bp, Homo sapien
aaaacagtatctcctcttggtgcaa

SEQ ID NO: 266009 - DNA, 25 bp, Homo sapien
agaaagcagaacagtcaaatacgac

SEQ ID NO: 266010 - DNA, 25 bp, Homo sapien
gaacagtcaaatacgactgaaaact

SEQ ID NO: 266011 - DNA, 25 bp, Homo sapien
gcagaacagtcaaatacgactgaaa

SEQ ID NO: 266012 - DNA, 25 bp, Homo sapien
agtcaaatacgactgaaaactggca

SEQ ID NO: 266013 - DNA, 25 bp, Homo sapien
aggcctagagaacatatatcgggtg

SEQ ID NO: 266014 - DNA, 25 bp, Homo sapien
taaaaggcctagagaacatatatcg

SEQ ID NO: 266015 - DNA, 25 bp, Homo sapien
aaaggcctagagaacatatatcggg

SEQ ID NO: 266016 - DNA, 25 bp, Homo sapien
tagagaacatatatcgggtgcctct

SEQ ID NO: 266017 - DNA, 25 bp, Homo sapien
aatggacaatttctcctgacagcac

SEQ ID NO: 266018 - DNA, 25 bp, Homo sapien
taatcttgcatcaatacttagtcac

SEQ ID NO: 266019 - DNA, 25 bp, Homo sapien
gatacacattctatgaactacaaca

SEQ ID NO: 266020 - DNA, 25 bp, Homo sapien
tatcacgaaataagctgggtagacg

SEQ ID NO: 266021 - DNA, 25 bp, Homo sapien
tatagtgagtattaaggctaaaaat

SEQ ID NO: 266022 - DNA, 25 bp, Homo sapien
taaatttggtatagtgagtattaag

SEQ ID NO: 266023 - DNA, 25 bp, Homo sapien
ttggtatagtgagtattaaggctaa

SEQ ID NO: 266024 - DNA, 25 bp, Homo sapien
caaaaataaatttggtatagtgagt

SEQ ID NO: 266025 - DNA, 25 bp, Homo sapien
ctttcttatagattcgcatatatgt

SEQ ID NO: 266026 - DNA, 25 bp, Homo sapien
ttcttatagattcgcatatatgtgg

SEQ ID NO: 266027 - DNA, 25 bp, Homo sapien
cttatagattcgcatatatgtggcc

SEQ ID NO: 266028 - DNA, 25 bp, Homo sapien
tatagattcgcatatatgtggccaa

SEQ ID NO: 266029 - DNA, 25 bp, Homo sapien
tgttaactccaagcgggtaatgagg

SEQ ID NO: 266030 - DNA, 25 bp, Homo sapien
taaggcgttcctttccaacttgata

SEQ ID NO: 266031 - DNA, 25 bp, Homo sapien
taccacccaatttccactagctgtt

SEQ ID NO: 266032 - DNA, 25 bp, Homo sapien
tcttacagatgcaacatacactagt

SEQ ID NO: 266033 - DNA, 25 bp, Homo sapien
tttttcacattgcttcaagcaatca

SEQ ID NO: 266034 - DNA, 25 bp, Homo sapien
agctttcagagccggtgaaatgtgt

SEQ ID NO: 266035 - DNA, 25 bp, Homo sapien
cacattgcttcaagcaatcaaaaaa

SEQ ID NO: 266036 - DNA, 25 bp, Homo sapien
gagccggtgaaatgtgtttttcaca

SEQ ID NO: 266037 - DNA, 25 bp, Homo sapien
accaatgttatataccagcatttcc

SEQ ID NO: 266038 - DNA, 25 bp, Homo sapien
gaaaccaatgttatataccagcatt

SEQ ID NO: 266039 - DNA, 25 bp, Homo sapien
aagaaaccaatgttatataccagca

SEQ ID NO: 266040 - DNA, 25 bp, Homo sapien
aaagaaaccaatgttatataccagc

SEQ ID NO: 266041 - DNA, 25 bp, Homo sapien
caacagcatgctgggtaacattgta

SEQ ID NO: 266042 - DNA, 25 bp, Homo sapien
agcatgctgggtaacattgtagact

SEQ ID NO: 266043 - DNA, 25 bp, Homo sapien
tgctgggtaacattgtagactcttc

SEQ ID NO: 266044 - DNA, 25 bp, Homo sapien
agttttgccatggtaacacttgtgg

SEQ ID NO: 266045 - DNA, 25 bp, Homo sapien
gaatactggttagccacaaagaact

SEQ ID NO: 266046 - DNA, 25 bp, Homo sapien
tactggttagccacaaagaactaca

SEQ ID NO: 266047 - DNA, 25 bp, Homo sapien
gagggaatactggttagccacaaag

SEQ ID NO: 266048 - DNA, 25 bp, Homo sapien
atgagggaatactggttagccacaa

SEQ ID NO: 266049 - DNA, 25 bp, Homo sapien
gccccacttgaatgaccaataaaga

SEQ ID NO: 266050 - DNA, 25 bp, Homo sapien
tgtttcctctgacaggatacagaca

SEQ ID NO: 266051 - DNA, 25 bp, Homo sapien
aggatatttcctttgccccacttga

SEQ ID NO: 266052 - DNA, 25 bp, Homo sapien
cataagtccaactggcaaagtgaaa

SEQ ID NO: 266053 - DNA, 25 bp, Homo sapien
tcagaagaggccttgcagagaacat

SEQ ID NO: 266054 - DNA, 25 bp, Homo sapien
ccttttacccagatatgacaaatca

SEQ ID NO: 266055 - DNA, 25 bp, Homo sapien
caaaccgcttagtaactaactgtgt

SEQ ID NO: 266056 - DNA, 25 bp, Homo sapien
gagatgatggtctcttaaactctag

SEQ ID NO: 266057 - DNA, 25 bp, Homo sapien
tccttcacacgtttcaggaagctat

SEQ ID NO: 266058 - DNA, 25 bp, Homo sapien
aagctatctcggctcttagagtgct

SEQ ID NO: 266059 - DNA, 25 bp, Homo sapien
gagtgcttaatgtgctcaatacgca

SEQ ID NO: 266060 - DNA, 25 bp, Homo sapien
gatcattttccttcacacgtttcag

SEQ ID NO: 266061 - DNA, 25 bp, Homo sapien
atctcaaccttaaagtgctctcaga

SEQ ID NO: 266062 - DNA, 25 bp, Homo sapien
cagaaccaatgaaatatacaccaaa

SEQ ID NO: 266063 - DNA, 25 bp, Homo sapien
tgtgatgtgttaaatctcaacctta

SEQ ID NO: 266064 - DNA, 25 bp, Homo sapien
taaagtgctctcagaaccaatgaaa

SEQ ID NO: 266065 - DNA, 25 bp, Homo sapien
cagcagctcaggctccttcccattg

SEQ ID NO: 266066 - DNA, 25 bp, Homo sapien
ccatgaattcatagggaataggttc

SEQ ID NO: 266067 - DNA, 25 bp, Homo sapien
agctcaggctccttcccattggttc

SEQ ID NO: 266068 - DNA, 25 bp, Homo sapien
tcaggctccttcccattggttctca

SEQ ID NO: 266069 - DNA, 25 bp, Homo sapien
tttgaatagcaaggacattacataa

SEQ ID NO: 266070 - DNA, 25 bp, Homo sapien
gaaggactatcttcaaaccagtaca

SEQ ID NO: 266071 - DNA, 25 bp, Homo sapien
tgttgcacaataagctacctcatgt

SEQ ID NO: 266072 - DNA, 25 bp, Homo sapien
taatacctcgccattttctgagtaa

SEQ ID NO: 266073 - DNA, 25 bp, Homo sapien
taatacagggtgagtgctaaaggac

SEQ ID NO: 266074 - DNA, 25 bp, Homo sapien
tcatcaagtgaccaaaggaaagcct

SEQ ID NO: 266075 - DNA, 25 bp, Homo sapien
tatcctctcgttaatttgaagggca

SEQ ID NO: 266076 - DNA, 25 bp, Homo sapien
gagacagtccctaaactcaggtgta

SEQ ID NO: 266077 - DNA, 25 bp, Homo sapien
gaaaatacctggctagatcagaaca

SEQ ID NO: 266078 - DNA, 25 bp, Homo sapien
ttcaaggcagacatgtaatcagcac

SEQ ID NO: 266079 - DNA, 25 bp, Homo sapien
cctttgggactggtttcaactgaat

SEQ ID NO: 266080 - DNA, 25 bp, Homo sapien
tcaaagttcaaggaaccacacagcc

SEQ ID NO: 266081 - DNA, 25 bp, Homo sapien
cttgagataggagttacgagttgac

SEQ ID NO: 266082 - DNA, 25 bp, Homo sapien
tggcctctagtcaggcattctgcga

SEQ ID NO: 266083 - DNA, 25 bp, Homo sapien
cagccggagtcactagacctgtggg

SEQ ID NO: 266084 - DNA, 25 bp, Homo sapien
gacagattgctgtaaaacgctgccc

SEQ ID NO: 266085 - DNA, 25 bp, Homo sapien
gggctgctagctgctcgcggctcca

SEQ ID NO: 266086 - DNA, 25 bp, Homo sapien
tcgccagctgggagtgcgggactag

SEQ ID NO: 266087 - DNA, 25 bp, Homo sapien
tgactatcgccgaggctgtgcgctt

SEQ ID NO: 266088 - DNA, 25 bp, Homo sapien
cagaactgtcaaggcccgcggcttt

SEQ ID NO: 266089 - DNA, 25 bp, Homo sapien
gatgggtgcgagcagaaagtgcccg

SEQ ID NO: 266090 - DNA, 25 bp, Homo sapien
ccagcaccgccagtttgatgtcctt

SEQ ID NO: 266091 - DNA, 25 bp, Homo sapien
cgagcagaaagtgcccggacatgct

SEQ ID NO: 266092 - DNA, 25 bp, Homo sapien
tgtccttgggcagtaggtagtccga

SEQ ID NO: 266093 - DNA, 25 bp, Homo sapien
ccagcgcgaaagcagcccgattcta

SEQ ID NO: 266094 - DNA, 25 bp, Homo sapien
cagcgcgaaagcagcccgattctac

SEQ ID NO: 266095 - DNA, 25 bp, Homo sapien
agcgcgaaagcagcccgattctacc

SEQ ID NO: 266096 - DNA, 25 bp, Homo sapien
gcgcgaaagcagcccgattctacct

SEQ ID NO: 266097 - DNA, 25 bp, Homo sapien
gagtgaagggtgcagaaccgtgggc

SEQ ID NO: 266098 - DNA, 25 bp, Homo sapien
cttccagaggctccgcaaagccgtg

SEQ ID NO: 266099 - DNA, 25 bp, Homo sapien
gcgagtacgactggcgggacacctc

SEQ ID NO: 266100 - DNA, 25 bp, Homo sapien
caaagccgtggtgccgcgggcttgg

SEQ ID NO: 266101 - DNA, 25 bp, Homo sapien
ctccaatgaatctcttggtcaggaa

SEQ ID NO: 266102 - DNA, 25 bp, Homo sapien
tcatagtctccaatgaatctcttgg

SEQ ID NO: 266103 - DNA, 25 bp, Homo sapien
ctgtattcggttcatagtctccaat

SEQ ID NO: 266104 - DNA, 25 bp, Homo sapien
tcggttcatagtctccaatgaatct

SEQ ID NO: 266105 - DNA, 25 bp, Homo sapien
tttaattctcaaactcccatccgta

SEQ ID NO: 266106 - DNA, 25 bp, Homo sapien
gctttttaattctcaaactcccatc

SEQ ID NO: 266107 - DNA, 25 bp, Homo sapien
taattctcaaactcccatccgtaaa

SEQ ID NO: 266108 - DNA, 25 bp, Homo sapien
ttaattctcaaactcccatccgtaa

SEQ ID NO: 266109 - DNA, 25 bp, Homo sapien
tagaccagccgtgaatacagcttgc

SEQ ID NO: 266110 - DNA, 25 bp, Homo sapien
ccctcgacatagaccagccgtgaat

SEQ ID NO: 266111 - DNA, 25 bp, Homo sapien
ccccgggagtatcctggatctgcag

SEQ ID NO: 266112 - DNA, 25 bp, Homo sapien
agggagagctggtccccctcgacat

SEQ ID NO: 266113 - DNA, 25 bp, Homo sapien
gggtgagctgtttgcccctggcggt

SEQ ID NO: 266114 - DNA, 25 bp, Homo sapien
gagctgtttgcccctggcggttctt

SEQ ID NO: 266115 - DNA, 25 bp, Homo sapien
gtgggggtgagctgtttgcccctgg

SEQ ID NO: 266116 - DNA, 25 bp, Homo sapien
gctgtttgcccctggcggttcttac

SEQ ID NO: 266117 - DNA, 25 bp, Homo sapien
gctgtgcccactggggtggtctcac

SEQ ID NO: 266118 - DNA, 25 bp, Homo sapien
gtgctgtgcccactggggtggtctc

SEQ ID NO: 266119 - DNA, 25 bp, Homo sapien
tgctgtgcccactggggtggtctca

SEQ ID NO: 266120 - DNA, 25 bp, Homo sapien
ctgtgatggaatagaccagcagaaa

SEQ ID NO: 266121 - DNA, 25 bp, Homo sapien
tggaatagaccagcagaaaaccctc

SEQ ID NO: 266122 - DNA, 25 bp, Homo sapien
tttggacagggaatcgacgacctgg

SEQ ID NO: 266123 - DNA, 25 bp, Homo sapien
gcccactgcacgcatttggacaggg

SEQ ID NO: 266124 - DNA, 25 bp, Homo sapien
ttggctagctgaataccgtcctgtg

SEQ ID NO: 266125 - DNA, 25 bp, Homo sapien
tagagtcagggtggaccttccggat

SEQ ID NO: 266126 - DNA, 25 bp, Homo sapien
cactgaggccgtgcatcttgctcac

SEQ ID NO: 266127 - DNA, 25 bp, Homo sapien
ccgagggatgatggaggctcttctt

SEQ ID NO: 266128 - DNA, 25 bp, Homo sapien
gaagcccagtcttttagctgcacaa

SEQ ID NO: 266129 - DNA, 25 bp, Homo sapien
agctgcacaaatgcgtattaaaaag

SEQ ID NO: 266130 - DNA, 25 bp, Homo sapien
ttatccagcttctaggcaatcactg

SEQ ID NO: 266131 - DNA, 25 bp, Homo sapien
gcaatcactgtttgaattttcagaa

SEQ ID NO: 266132 - DNA, 25 bp, Homo sapien
ggacatatctggtgccctattggaa

SEQ ID NO: 266133 - DNA, 25 bp, Homo sapien
tagggtccacttactgacataagga

SEQ ID NO: 266134 - DNA, 25 bp, Homo sapien
caatctgttggaatggactgactgc

SEQ ID NO: 266135 - DNA, 25 bp, Homo sapien
cttgcctgccagtcaaagggaggtc

SEQ ID NO: 266136 - DNA, 25 bp, Homo sapien
tggatgtcccaggaccacttgtact

SEQ ID NO: 266137 - DNA, 25 bp, Homo sapien
atgtcccaggaccacttgtactcta

SEQ ID NO: 266138 - DNA, 25 bp, Homo sapien
ctgtggactggatgtcccaggacca

SEQ ID NO: 266139 - DNA, 25 bp, Homo sapien
gactggatgtcccaggaccacttgt

SEQ ID NO: 266140 - DNA, 25 bp, Homo sapien
accccaatccctgctaatactgatg

SEQ ID NO: 266141 - DNA, 25 bp, Homo sapien
tttgtgaaggacaccccaatccctg

SEQ ID NO: 266142 - DNA, 25 bp, Homo sapien
taagtttgttctcgctttgtgaagg

SEQ ID NO: 266143 - DNA, 25 bp, Homo sapien
ttctgagagtcgcttatctaataag

SEQ ID NO: 266144 - DNA, 25 bp, Homo sapien
gtttgttccctgtctgcgcttggag

SEQ ID NO: 266145 - DNA, 25 bp, Homo sapien
gctggtgttgtcagaaagaaacccc

SEQ ID NO: 266146 - DNA, 25 bp, Homo sapien
cagctctgcccatgtgtttgttccc

SEQ ID NO: 266147 - DNA, 25 bp, Homo sapien
taaagccattagtagggcacctgcc

SEQ ID NO: 266148 - DNA, 25 bp, Homo sapien
tccccactaaagttgagtcctgaga

SEQ ID NO: 266149 - DNA, 25 bp, Homo sapien
actggagggaggtctgcatgtgggt

SEQ ID NO: 266150 - DNA, 25 bp, Homo sapien
tcctccccactaaagttgagtcctg

SEQ ID NO: 266151 - DNA, 25 bp, Homo sapien
gacccgacccctgtgaccagctgtg

SEQ ID NO: 266152 - DNA, 25 bp, Homo sapien
gccctcctggaagagagctgtcggg

SEQ ID NO: 266153 - DNA, 25 bp, Homo sapien
caggtaccaggattggaaagagaac

SEQ ID NO: 266154 - DNA, 25 bp, Homo sapien
cccctctctgtgatggaaatggcct

SEQ ID NO: 266155 - DNA, 25 bp, Homo sapien
tgggcacctgcagtgctcagaacca

SEQ ID NO: 266156 - DNA, 25 bp, Homo sapien
catctctgattaccttttccaggag

SEQ ID NO: 266157 - DNA, 25 bp, Homo sapien
taactgtgggcctttgggactcatc

SEQ ID NO: 266158 - DNA, 25 bp, Homo sapien
ccttttagcacaatgggtttggcat

SEQ ID NO: 266159 - DNA, 25 bp, Homo sapien
tgctgagcaatgtccaggaattttt

SEQ ID NO: 266160 - DNA, 25 bp, Homo sapien
gagtgtctgaattcttaggaggatt

SEQ ID NO: 266161 - DNA, 25 bp, Homo sapien
cgggggagtgtctgaattcttagga

SEQ ID NO: 266162 - DNA, 25 bp, Homo sapien
gggagtgtctgaattcttaggagga

SEQ ID NO: 266163 - DNA, 25 bp, Homo sapien
ggacgggggagtgtctgaattctta

SEQ ID NO: 266164 - DNA, 25 bp, Homo sapien
gcgtggatggtctcaaagccagctg

SEQ ID NO: 266165 - DNA, 25 bp, Homo sapien
cacagaatcgaaagctatgcgtgga

SEQ ID NO: 266166 - DNA, 25 bp, Homo sapien
gcccctcgagtcttagctgtagcgt

SEQ ID NO: 266167 - DNA, 25 bp, Homo sapien
tatgcgtggagatccagagtgaagc

SEQ ID NO: 266168 - DNA, 25 bp, Homo sapien
cacagtaattggttttcctattagc

SEQ ID NO: 266169 - DNA, 25 bp, Homo sapien
tagctttatgctccaaacaatatgt

SEQ ID NO: 266170 - DNA, 25 bp, Homo sapien
cctattagctttatgctccaaacaa

SEQ ID NO: 266171 - DNA, 25 bp, Homo sapien
tattagctttatgctccaaacaata

SEQ ID NO: 266172 - DNA, 25 bp, Homo sapien
ttcaggtcgttgagtagcaggatgt

SEQ ID NO: 266173 - DNA, 25 bp, Homo sapien
ctttgtttggggactagcttcgcgg

SEQ ID NO: 266174 - DNA, 25 bp, Homo sapien
ccagagagcgcattggctccagctt

SEQ ID NO: 266175 - DNA, 25 bp, Homo sapien
agcttcgcggccactcctaggcgcg

SEQ ID NO: 266176 - DNA, 25 bp, Homo sapien
ccagagccaggaagtagctgattac

SEQ ID NO: 266177 - DNA, 25 bp, Homo sapien
caggctcattaaaaggtgaagcccc

SEQ ID NO: 266178 - DNA, 25 bp, Homo sapien
ctcattaaaaggtgaagccccagag

SEQ ID NO: 266179 - DNA, 25 bp, Homo sapien
ggctcattaaaaggtgaagccccag

SEQ ID NO: 266180 - DNA, 25 bp, Homo sapien
gcggagccacgggtcagggcggacc

SEQ ID NO: 266181 - DNA, 25 bp, Homo sapien
tgtgcaggcagcgaccgacctgtga

SEQ ID NO: 266182 - DNA, 25 bp, Homo sapien
aggcggagccacgggtcagggcgga

SEQ ID NO: 266183 - DNA, 25 bp, Homo sapien
aggcagcgaccgacctgtgagcgcc

SEQ ID NO: 266184 - DNA, 25 bp, Homo sapien
cctgtcggttggcacagtagggcac

SEQ ID NO: 266185 - DNA, 25 bp, Homo sapien
ttcaccttgcaggtggaaatgtcca

SEQ ID NO: 266186 - DNA, 25 bp, Homo sapien
ttcccctgatccctgtcggttggca

SEQ ID NO: 266187 - DNA, 25 bp, Homo sapien
gttggcacagtagggcacagttcac

SEQ ID NO: 266188 - DNA, 25 bp, Homo sapien
ggctgatcccacagatgcaggagat

SEQ ID NO: 266189 - DNA, 25 bp, Homo sapien
gaaacgttcttccagtgccatttgc

SEQ ID NO: 266190 - DNA, 25 bp, Homo sapien
cccagaggggctggtatgaaagcat

SEQ ID NO: 266191 - DNA, 25 bp, Homo sapien
tttccatctgaatgaggcaggtcct

SEQ ID NO: 266192 - DNA, 25 bp, Homo sapien
ttagtcagctccagggccattaata

SEQ ID NO: 266193 - DNA, 25 bp, Homo sapien
tagtcagctccagggccattaataa

SEQ ID NO: 266194 - DNA, 25 bp, Homo sapien
agtcagctccagggccattaataac

SEQ ID NO: 266195 - DNA, 25 bp, Homo sapien
acagtttcacaggaggtactcaggg

SEQ ID NO: 266196 - DNA, 25 bp, Homo sapien
gccacagtttcacaggaggtactca

SEQ ID NO: 266197 - DNA, 25 bp, Homo sapien
tggccacagtttcacaggaggtact

SEQ ID NO: 266198 - DNA, 25 bp, Homo sapien
cacagtttcacaggaggtactcagg

SEQ ID NO: 266199 - DNA, 25 bp, Homo sapien
cagtccagggatgtaagggttgctc

SEQ ID NO: 266200 - DNA, 25 bp, Homo sapien
caaggcggtctgtttgctgacaaca

SEQ ID NO: 266201 - DNA, 25 bp, Homo sapien
tacaatgcaaacaagggctccggtg

SEQ ID NO: 266202 - DNA, 25 bp, Homo sapien
gaccaggacgtttccatgggccgaa

SEQ ID NO: 266203 - DNA, 25 bp, Homo sapien
ttcctaccgagaaagacatgttctg

SEQ ID NO: 266204 - DNA, 25 bp, Homo sapien
cttgttgctgagaccatctccataa

SEQ ID NO: 266205 - DNA, 25 bp, Homo sapien
tacaggtgaagaaacggaactgcag

SEQ ID NO: 266206 - DNA, 25 bp, Homo sapien
cttgttccaagtactccatacttct

SEQ ID NO: 266207 - DNA, 25 bp, Homo sapien
tatgtatcatagagaggcattgcct

SEQ ID NO: 266208 - DNA, 25 bp, Homo sapien
tgtggcagctcataggtcacctttg

SEQ ID NO: 266209 - DNA, 25 bp, Homo sapien
ctgatgttcagagtgcagggcctct

SEQ ID NO: 266210 - DNA, 25 bp, Homo sapien
cattcctagagtaggtgtggcagct

SEQ ID NO: 266211 - DNA, 25 bp, Homo sapien
agttagatttctggagcctcgtgga

SEQ ID NO: 266212 - DNA, 25 bp, Homo sapien
gaaaagatcctgctaaatgtgtccc

SEQ ID NO: 266213 - DNA, 25 bp, Homo sapien
gaaaacaacgtgctgattcctgagc

SEQ ID NO: 266214 - DNA, 25 bp, Homo sapien
gaaaccgtcaaatcaaatgggaggc

SEQ ID NO: 266215 - DNA, 25 bp, Homo sapien
tgatagcctttgtgtacttccaaat

SEQ ID NO: 266216 - DNA, 25 bp, Homo sapien
caggaatggaactgttactcacagt

SEQ ID NO: 266217 - DNA, 25 bp, Homo sapien
tgaataacatcgacactgatagcct

SEQ ID NO: 266218 - DNA, 25 bp, Homo sapien
tagactcgtgtctttgtgcccagat

SEQ ID NO: 266219 - DNA, 25 bp, Homo sapien
cataattaaatccaaattcgatcat

SEQ ID NO: 266220 - DNA, 25 bp, Homo sapien
ttataggcacataattaaatccaaa

SEQ ID NO: 266221 - DNA, 25 bp, Homo sapien
ggttatctttataggcacataatta

SEQ ID NO: 266222 - DNA, 25 bp, Homo sapien
tttgcttcttggttatctttatagg

SEQ ID NO: 266223 - DNA, 25 bp, Homo sapien
taagtgaggcctaattgctctctga

SEQ ID NO: 266224 - DNA, 25 bp, Homo sapien
tcctgcagctgtaattgaccctgtg

SEQ ID NO: 266225 - DNA, 25 bp, Homo sapien
gattacccacaggatcaggtgcttg

SEQ ID NO: 266226 - DNA, 25 bp, Homo sapien
ggccagactccatctactaagtgag

SEQ ID NO: 266227 - DNA, 25 bp, Homo sapien
accgccccgcgtcggcgccgctgct

SEQ ID NO: 266228 - DNA, 25 bp, Homo sapien
gggagcgcgcgcggtcaccaggcac

SEQ ID NO: 266229 - DNA, 25 bp, Homo sapien
gacgccggcacacttccgggagcgc

SEQ ID NO: 266230 - DNA, 25 bp, Homo sapien
tccctgctgaaccttcgcgcgacgc

SEQ ID NO: 266231 - DNA, 25 bp, Homo sapien
caatgaacgcgtcggcgatggtcaa

SEQ ID NO: 266232 - DNA, 25 bp, Homo sapien
ggagctgagctctcgccggctgcaa

SEQ ID NO: 266233 - DNA, 25 bp, Homo sapien
atggtcaaggacgacaccgactcgg

SEQ ID NO: 266234 - DNA, 25 bp, Homo sapien
aggcgcgctgccacgtgccgagaca

SEQ ID NO: 266235 - DNA, 25 bp, Homo sapien
gcagtcagggaaggagcagatgaac

SEQ ID NO: 266236 - DNA, 25 bp, Homo sapien
ctgcagtcagggaaggagcagatga

SEQ ID NO: 266237 - DNA, 25 bp, Homo sapien
tgcagtcagggaaggagcagatgaa

SEQ ID NO: 266238 - DNA, 25 bp, Homo sapien
tgtgcttgcacaggtgcgcgtcaag

SEQ ID NO: 266239 - DNA, 25 bp, Homo sapien
ccccgtgtgcttgcacaggtgcgcg

SEQ ID NO: 266240 - DNA, 25 bp, Homo sapien
gcacaggtgcgcgtcaagcttccag

SEQ ID NO: 266241 - DNA, 25 bp, Homo sapien
caggtgcgcgtcaagcttccaggct

SEQ ID NO: 266242 - DNA, 25 bp, Homo sapien
gatgtcaaagctgaacgcgctgcac

SEQ ID NO: 266243 - DNA, 25 bp, Homo sapien
cctgccatggatatcaaggtcgcag

SEQ ID NO: 266244 - DNA, 25 bp, Homo sapien
tgcttagtaaatcccgagcccctgc

SEQ ID NO: 266245 - DNA, 25 bp, Homo sapien
tcgcagaacgaaggtcctacaactt

SEQ ID NO: 266246 - DNA, 25 bp, Homo sapien
cagaagaggatccaacgaaaagggc

SEQ ID NO: 266247 - DNA, 25 bp, Homo sapien
gaacaaaggtccatggcagcagaaa

SEQ ID NO: 266248 - DNA, 25 bp, Homo sapien
gtctcaaggaagaagcggtcggcct

SEQ ID NO: 266249 - DNA, 25 bp, Homo sapien
tcttacacggctcacacagagaggc

SEQ ID NO: 266250 - DNA, 25 bp, Homo sapien
gatggtagtccctgatgaaggcctt

SEQ ID NO: 266251 - DNA, 25 bp, Homo sapien
tgagtcagaatgtggcggctcagat

SEQ ID NO: 266252 - DNA, 25 bp, Homo sapien
tgtggcggctcagatggtagtccct

SEQ ID NO: 266253 - DNA, 25 bp, Homo sapien
tcctgtgtgagtcagaatgtggcgg

SEQ ID NO: 266254 - DNA, 25 bp, Homo sapien
ccttatctttgctatgggtcactgg

SEQ ID NO: 266255 - DNA, 25 bp, Homo sapien
tagttcctggttgcatggcatttcc

SEQ ID NO: 266256 - DNA, 25 bp, Homo sapien
cactgtccagcgagcagtgggaaac

SEQ ID NO: 266257 - DNA, 25 bp, Homo sapien
gagatagccaagtagcactgtccag

SEQ ID NO: 266258 - DNA, 25 bp, Homo sapien
tgggcccaaacaggcatcacagtga

SEQ ID NO: 266259 - DNA, 25 bp, Homo sapien
caattagggcggctcatggctgagt

SEQ ID NO: 266260 - DNA, 25 bp, Homo sapien
tgcttatgtgacagatgggcccaaa

SEQ ID NO: 266261 - DNA, 25 bp, Homo sapien
cattcctagggccaagcagagacaa

SEQ ID NO: 266262 - DNA, 25 bp, Homo sapien
aatttttgatcacagccattggctg

SEQ ID NO: 266263 - DNA, 25 bp, Homo sapien
ttcttcaagtttgattttgtgttga

SEQ ID NO: 266264 - DNA, 25 bp, Homo sapien
gattttgtgttgaatttttgatcac

SEQ ID NO: 266265 - DNA, 25 bp, Homo sapien
gttgaatttttgatcacagccattg

SEQ ID NO: 266266 - DNA, 25 bp, Homo sapien
tgtttttgttgattttcatgtttgc

SEQ ID NO: 266267 - DNA, 25 bp, Homo sapien
tatatattgtttttgttgattttca

SEQ ID NO: 266268 - DNA, 25 bp, Homo sapien
tatattgtttttgttgattttcatg

SEQ ID NO: 266269 - DNA, 25 bp, Homo sapien
tagaggttcattggtatgctggcac

SEQ ID NO: 266270 - DNA, 25 bp, Homo sapien
tcttaaaggtcttcttacagtcttc

SEQ ID NO: 266271 - DNA, 25 bp, Homo sapien
gttcattggtatgctggcactgatg

SEQ ID NO: 266272 - DNA, 25 bp, Homo sapien
ttgaatagaggttcattggtatgct

SEQ ID NO: 266273 - DNA, 25 bp, Homo sapien
gctttcagaagatttgtcccaccgt

SEQ ID NO: 266274 - DNA, 25 bp, Homo sapien
tgcaagtcaagggaaagtgccggat

SEQ ID NO: 266275 - DNA, 25 bp, Homo sapien
tctgacttggcttagataaacccct

SEQ ID NO: 266276 - DNA, 25 bp, Homo sapien
tctggtgagcaataaaaagcacggg

SEQ ID NO: 266277 - DNA, 25 bp, Homo sapien
gcttgctgggtgatgcaaagtgttt

SEQ ID NO: 266278 - DNA, 25 bp, Homo sapien
tggcatgtcgtttcagcttgctggg

SEQ ID NO: 266279 - DNA, 25 bp, Homo sapien
tgggtgatgcaaagtgtttcccaca

SEQ ID NO: 266280 - DNA, 25 bp, Homo sapien
cgtgggccttggcatgtcgtttcag

SEQ ID NO: 266281 - DNA, 25 bp, Homo sapien
tcagtgtaatgtgtaaccaggcgct

SEQ ID NO: 266282 - DNA, 25 bp, Homo sapien
gaacagattcaaaggcgcccaggat

SEQ ID NO: 266283 - DNA, 25 bp, Homo sapien
tatccaagccttgtgaatggccaac

SEQ ID NO: 266284 - DNA, 25 bp, Homo sapien
gagtgtaagacccaaataagcagga

SEQ ID NO: 266285 - DNA, 25 bp, Homo sapien
ggaacatcctttttgacatacatag

SEQ ID NO: 266286 - DNA, 25 bp, Homo sapien
gaacatcctttttgacatacatagc

SEQ ID NO: 266287 - DNA, 25 bp, Homo sapien
cacatgtttcagaagttccgtccat

SEQ ID NO: 266288 - DNA, 25 bp, Homo sapien
tgtttttgccacaaaggaacatcct

SEQ ID NO: 266289 - DNA, 25 bp, Homo sapien
gggacaaacatttacaccatgcctg

SEQ ID NO: 266290 - DNA, 25 bp, Homo sapien
aacatcatacccagcacttcacaaa

SEQ ID NO: 266291 - DNA, 25 bp, Homo sapien
gctctgctcacctttccaacaacat

SEQ ID NO: 266292 - DNA, 25 bp, Homo sapien
gaaaagcactaaatcagttctgtgg

SEQ ID NO: 266293 - DNA, 25 bp, Homo sapien
gcagggtactgtttcccaggcggtc

SEQ ID NO: 266294 - DNA, 25 bp, Homo sapien
gtgcctgaaacctgatcactatata

SEQ ID NO: 266295 - DNA, 25 bp, Homo sapien
gaaattcttcactacagacctgcca

SEQ ID NO: 266296 - DNA, 25 bp, Homo sapien
tataagtaacattcagtgcctgaaa

SEQ ID NO: 266297 - DNA, 25 bp, Homo sapien
gagttttcatgtgttgcttaaggta

SEQ ID NO: 266298 - DNA, 25 bp, Homo sapien
ttcatgtgttgcttaaggtaatctt

SEQ ID NO: 266299 - DNA, 25 bp, Homo sapien
cggcatacttcacatagtatttcct

SEQ ID NO: 266300 - DNA, 25 bp, Homo sapien
tgcgtttaaatgttttccggcatac

SEQ ID NO: 266301 - DNA, 25 bp, Homo sapien
atatggctttggagattaaacacag

SEQ ID NO: 266302 - DNA, 25 bp, Homo sapien
gctttggagattaaacacagttgta

SEQ ID NO: 266303 - DNA, 25 bp, Homo sapien
ttctcttggacagcgacatacatcc

SEQ ID NO: 266304 - DNA, 25 bp, Homo sapien
agccttctcttggacagcgacatac

SEQ ID NO: 266305 - DNA, 25 bp, Homo sapien
aaccatgttgtgaaagcatagacta

SEQ ID NO: 266306 - DNA, 25 bp, Homo sapien
gactataggaccatgagtatgaggg

SEQ ID NO: 266307 - DNA, 25 bp, Homo sapien
taggaccatgagtatgagggtgagt

SEQ ID NO: 266308 - DNA, 25 bp, Homo sapien
ctataggaccatgagtatgagggtg

SEQ ID NO: 266309 - DNA, 25 bp, Homo sapien
gtacaacagcatgcctagtgagact

SEQ ID NO: 266310 - DNA, 25 bp, Homo sapien
tgtcaggatcatgtacaacagcatg

SEQ ID NO: 266311 - DNA, 25 bp, Homo sapien
catgtacaacagcatgcctagtgag

SEQ ID NO: 266312 - DNA, 25 bp, Homo sapien
cttcttgtcaggatcatgtacaaca

SEQ ID NO: 266313 - DNA, 25 bp, Homo sapien
cacttgaaaactaagcttgcctaag

SEQ ID NO: 266314 - DNA, 25 bp, Homo sapien
taccagcagatatagtgtacaacat

SEQ ID NO: 266315 - DNA, 25 bp, Homo sapien
tacgatagtcatatgtaccagcaga

SEQ ID NO: 266316 - DNA, 25 bp, Homo sapien
cagtagtgcagactcaaacagtaaa

SEQ ID NO: 266317 - DNA, 25 bp, Homo sapien
ggtgactctccgttttgacacaaag

SEQ ID NO: 266318 - DNA, 25 bp, Homo sapien
ttccttttgggagggatatatccac

SEQ ID NO: 266319 - DNA, 25 bp, Homo sapien
tatatccactgagatgagaggccaa

SEQ ID NO: 266320 - DNA, 25 bp, Homo sapien
tagccaagggtaagtactgcaactg

SEQ ID NO: 266321 - DNA, 25 bp, Homo sapien
tgcagtcctttaaacaaagcagtgc

SEQ ID NO: 266322 - DNA, 25 bp, Homo sapien
ggtctgcagtcctttaaacaaagca

SEQ ID NO: 266323 - DNA, 25 bp, Homo sapien
ttggtctgcagtcctttaaacaaag

SEQ ID NO: 266324 - DNA, 25 bp, Homo sapien
tctgcagtcctttaaacaaagcagt

SEQ ID NO: 266325 - DNA, 25 bp, Homo sapien
aataaagaaaagcatgctctgagag

SEQ ID NO: 266326 - DNA, 25 bp, Homo sapien
ttaataaagaaaagcatgctctgag

SEQ ID NO: 266327 - DNA, 25 bp, Homo sapien
gcatcagtaattttaataaagaaaa

SEQ ID NO: 266328 - DNA, 25 bp, Homo sapien
ttttaataaagaaaagcatgctctg

SEQ ID NO: 266329 - DNA, 25 bp, Homo sapien
gtgtgttcttcgtgctttcagcaaa

SEQ ID NO: 266330 - DNA, 25 bp, Homo sapien
gagacactttgaacaaagaccatgg

SEQ ID NO: 266331 - DNA, 25 bp, Homo sapien
cttcgtgctttcagcaaaaatgagg

SEQ ID NO: 266332 - DNA, 25 bp, Homo sapien
cactttgaacaaagaccatggaaat

SEQ ID NO: 266333 - DNA, 25 bp, Homo sapien
tagagtcacttaagcataggtcgca

SEQ ID NO: 266334 - DNA, 25 bp, Homo sapien
taatgctgagccaaacgtagcctct

SEQ ID NO: 266335 - DNA, 25 bp, Homo sapien
gatgaggaggtattttgccaatgcc

SEQ ID NO: 266336 - DNA, 25 bp, Homo sapien
taggtcgcaacccagctgatgcaga

SEQ ID NO: 266337 - DNA, 25 bp, Homo sapien
cagagtcacctgctagtccgcttta

SEQ ID NO: 266338 - DNA, 25 bp, Homo sapien
gtccgctttatcagtgtagacttcc

SEQ ID NO: 266339 - DNA, 25 bp, Homo sapien
catgagttagtctggccagagtcac

SEQ ID NO: 266340 - DNA, 25 bp, Homo sapien
aaatctggtttattctaatagccac

SEQ ID NO: 266341 - DNA, 25 bp, Homo sapien
tgagagataagtgggttgtacagcc

SEQ ID NO: 266342 - DNA, 25 bp, Homo sapien
gatgaatgggtcctctcagcactct

SEQ ID NO: 266343 - DNA, 25 bp, Homo sapien
aacacctgccttaccttgagaatga

SEQ ID NO: 266344 - DNA, 25 bp, Homo sapien
gaccattctttgagaagcaccctga

SEQ ID NO: 266345 - DNA, 25 bp, Homo sapien
tataaagccctagtgggagaccgag

SEQ ID NO: 266346 - DNA, 25 bp, Homo sapien
acagtatgtcaatcgcttgccccag

SEQ ID NO: 266347 - DNA, 25 bp, Homo sapien
agtagaaaaacgtggctccgcccat

SEQ ID NO: 266348 - DNA, 25 bp, Homo sapien
ttctgtcggcggaactgaatcccaa

SEQ ID NO: 266349 - DNA, 25 bp, Homo sapien
gggtcagcacctgtgccgagaagca

SEQ ID NO: 266350 - DNA, 25 bp, Homo sapien
gctaccccatcaggaggccccgagt

SEQ ID NO: 266351 - DNA, 25 bp, Homo sapien
tggaaaagcgttctctgtagcacac

SEQ ID NO: 266352 - DNA, 25 bp, Homo sapien
cccgagtcgaccgaggggtcagcac

SEQ ID NO: 266353 - DNA, 25 bp, Homo sapien
ggcctgaggtgtgccgtggcggcca

SEQ ID NO: 266354 - DNA, 25 bp, Homo sapien
cctggatgttttcgctggggagtat

SEQ ID NO: 266355 - DNA, 25 bp, Homo sapien
gcggccacgctctccctggatgttt

SEQ ID NO: 266356 - DNA, 25 bp, Homo sapien
ttttcgctggggagtatccgaggct

SEQ ID NO: 266357 - DNA, 25 bp, Homo sapien
gagatttggcttccggagcttcact

SEQ ID NO: 266358 - DNA, 25 bp, Homo sapien
acgtgggcgcgtgggagatttggct

SEQ ID NO: 266359 - DNA, 25 bp, Homo sapien
tgggagatttggcttccggagcttc

SEQ ID NO: 266360 - DNA, 25 bp, Homo sapien
tttggcttccggagcttcactagac

SEQ ID NO: 266361 - DNA, 25 bp, Homo sapien
gcctggctatgtttgtcatcatagg

SEQ ID NO: 266362 - DNA, 25 bp, Homo sapien
ctgagcctggctatgtttgtcatca

SEQ ID NO: 266363 - DNA, 25 bp, Homo sapien
gggctgagcctggctatgtttgtca

SEQ ID NO: 266364 - DNA, 25 bp, Homo sapien
cctggctatgtttgtcatcataggc

SEQ ID NO: 266365 - DNA, 25 bp, Homo sapien
ccccacagaaccagatgtgtaatga

SEQ ID NO: 266366 - DNA, 25 bp, Homo sapien
cagatgtgtaatgacaggtctgagc

SEQ ID NO: 266367 - DNA, 25 bp, Homo sapien
cagaaacaggggtccaccggcagaa

SEQ ID NO: 266368 - DNA, 25 bp, Homo sapien
acattgggtttggagtccaccggca

SEQ ID NO: 266369 - DNA, 25 bp, Homo sapien
tggcattggtaagatcatcctgcat

SEQ ID NO: 266370 - DNA, 25 bp, Homo sapien
catggcattggtaagatcatcctgc

SEQ ID NO: 266371 - DNA, 25 bp, Homo sapien
atggcattggtaagatcatcctgca

SEQ ID NO: 266372 - DNA, 25 bp, Homo sapien
agcttcgtcctcatgagtagactga

SEQ ID NO: 266373 - DNA, 25 bp, Homo sapien
gtcccggaagcgcactgacacgttt

SEQ ID NO: 266374 - DNA, 25 bp, Homo sapien
ccccggtcctgcgtttgggtgcctg

SEQ ID NO: 266375 - DNA, 25 bp, Homo sapien
cccgcatcgctggaaggagttctga

SEQ ID NO: 266376 - DNA, 25 bp, Homo sapien
tccttcaggcagaacgctgagccag

SEQ ID NO: 266377 - DNA, 25 bp, Homo sapien
agaacgctgagccagtggaggtcat

SEQ ID NO: 266378 - DNA, 25 bp, Homo sapien
actttgaggttgtcatttggttgca

SEQ ID NO: 266379 - DNA, 25 bp, Homo sapien
cctccaaaaggtgggcaactgagat

SEQ ID NO: 266380 - DNA, 25 bp, Homo sapien
tatatgcgtgcctttttccaacaga

SEQ ID NO: 266381 - DNA, 25 bp, Homo sapien
tgttcaaatatgttgctgggcggct

SEQ ID NO: 266382 - DNA, 25 bp, Homo sapien
gaaagattttgcgtgtgatgattgc

SEQ ID NO: 266383 - DNA, 25 bp, Homo sapien
aatatattctaccaaggtatatgcg

SEQ ID NO: 266384 - DNA, 25 bp, Homo sapien
tcaggggccgtgctctgtgtcattc

SEQ ID NO: 266385 - DNA, 25 bp, Homo sapien
ttcaggggccgtgctctgtgtcatt

SEQ ID NO: 266386 - DNA, 25 bp, Homo sapien
catgttgagtggctctaggtagagc

SEQ ID NO: 266387 - DNA, 25 bp, Homo sapien
tgttgagtggctctaggtagagcca

SEQ ID NO: 266388 - DNA, 25 bp, Homo sapien
gttgagtggctctaggtagagccat

SEQ ID NO: 266389 - DNA, 25 bp, Homo sapien
atgttgagtggctctaggtagagcc

SEQ ID NO: 266390 - DNA, 25 bp, Homo sapien
gactaattgggccattaggacgcag

SEQ ID NO: 266391 - DNA, 25 bp, Homo sapien
tagttctgtacacaatatggtagtg

SEQ ID NO: 266392 - DNA, 25 bp, Homo sapien
gactaaacagtcaacactacgcagc

SEQ ID NO: 266393 - DNA, 25 bp, Homo sapien
taggacgcagtttccagccttttcc

SEQ ID NO: 266394 - DNA, 25 bp, Homo sapien
cctaacagcacttccttgggagcat

SEQ ID NO: 266395 - DNA, 25 bp, Homo sapien
ccctaacagcacttccttgggagca

SEQ ID NO: 266396 - DNA, 25 bp, Homo sapien
atcatcaaatcaatactaatctcca

SEQ ID NO: 266397 - DNA, 25 bp, Homo sapien
catcatcaaatcaatactaatctcc

SEQ ID NO: 266398 - DNA, 25 bp, Homo sapien
tcatcaaatcaatactaatctccat

SEQ ID NO: 266399 - DNA, 25 bp, Homo sapien
tcttgaaacagatgcacgagaagcc

SEQ ID NO: 266400 - DNA, 25 bp, Homo sapien
gaaacagatgcacgagaagcctcat

SEQ ID NO: 266401 - DNA, 25 bp, Homo sapien
gggccagtcttgaaacagatgcacg

SEQ ID NO: 266402 - DNA, 25 bp, Homo sapien
cagtcttgaaacagatgcacgagaa

SEQ ID NO: 266403 - DNA, 25 bp, Homo sapien
cagggatcatccctggaaacttgag

SEQ ID NO: 266404 - DNA, 25 bp, Homo sapien
ccctggaaacttgagccagacagga

SEQ ID NO: 266405 - DNA, 25 bp, Homo sapien
gatcatccctggaaacttgagccag

SEQ ID NO: 266406 - DNA, 25 bp, Homo sapien
gctcctgcttcagggatcatccctg

SEQ ID NO: 266407 - DNA, 25 bp, Homo sapien
tccagatggacctagcatgaggtag

SEQ ID NO: 266408 - DNA, 25 bp, Homo sapien
cagatggacctagcatgaggtagat

SEQ ID NO: 266409 - DNA, 25 bp, Homo sapien
atccagatggacctagcatgaggta

SEQ ID NO: 266410 - DNA, 25 bp, Homo sapien
ccagatggacctagcatgaggtaga

SEQ ID NO: 266411 - DNA, 25 bp, Homo sapien
tattctgccctaagaggtagccttg

SEQ ID NO: 266412 - DNA, 25 bp, Homo sapien
catcccctattctgccctaagaggt

SEQ ID NO: 266413 - DNA, 25 bp, Homo sapien
ccctattctgccctaagaggtagcc

SEQ ID NO: 266414 - DNA, 25 bp, Homo sapien
atcccctattctgccctaagaggta

SEQ ID NO: 266415 - DNA, 25 bp, Homo sapien
ttttgctggctctttagaccgtggg

SEQ ID NO: 266416 - DNA, 25 bp, Homo sapien
aacggttccccagttgactctgtga

SEQ ID NO: 266417 - DNA, 25 bp, Homo sapien
gactctgtgaatagttaatggaacg

SEQ ID NO: 266418 - DNA, 25 bp, Homo sapien
gaccgtgggcctgcaattacagaaa

SEQ ID NO: 266419 - DNA, 25 bp, Homo sapien
tctatccctgggtaactcagaccgc

SEQ ID NO: 266420 - DNA, 25 bp, Homo sapien
tgctccctgcatgtgagtttcgctt

SEQ ID NO: 266421 - DNA, 25 bp, Homo sapien
tagcaaagcaagatgtgcaaacatt

SEQ ID NO: 266422 - DNA, 25 bp, Homo sapien
gtgcaaacattgtcgaccttccccg

SEQ ID NO: 266423 - DNA, 25 bp, Homo sapien
ttttctctgcggactggagcagccg

SEQ ID NO: 266424 - DNA, 25 bp, Homo sapien
ggacgtccctagttcactgggccgc

SEQ ID NO: 266425 - DNA, 25 bp, Homo sapien
catgagcatcgggaagaaagtagca

SEQ ID NO: 266426 - DNA, 25 bp, Homo sapien
aaagtagcagtggagtgtccggtta

SEQ ID NO: 266427 - DNA, 25 bp, Homo sapien
cagcccaatgccagcggcatcaagg

SEQ ID NO: 266428 - DNA, 25 bp, Homo sapien
aatgccagcggcatcaaggctgcct

SEQ ID NO: 266429 - DNA, 25 bp, Homo sapien
ccctagaggcacatgctggctgcca

SEQ ID NO: 266430 - DNA, 25 bp, Homo sapien
cctgccactcgctgttcttgcactt

SEQ ID NO: 266431 - DNA, 25 bp, Homo sapien
ttcaaaaacttggatcagcatttgc

SEQ ID NO: 266432 - DNA, 25 bp, Homo sapien
cactttcaagatgggctatttcaaa

SEQ ID NO: 266433 - DNA, 25 bp, Homo sapien
agatgggctatttcaaaaacttgga

SEQ ID NO: 266434 - DNA, 25 bp, Homo sapien
tcaaaaacttggatcagcatttgct

SEQ ID NO: 266435 - DNA, 25 bp, Homo sapien
catctttaaccttgcaactttgagc

SEQ ID NO: 266436 - DNA, 25 bp, Homo sapien
taagtaccatctttaaccttgcaac

SEQ ID NO: 266437 - DNA, 25 bp, Homo sapien
gcaccactgacacctaagtctacag

SEQ ID NO: 266438 - DNA, 25 bp, Homo sapien
gcaactttgagcaccactgacacct

SEQ ID NO: 266439 - DNA, 25 bp, Homo sapien
gcatatcatggtagtgggcccttga

SEQ ID NO: 266440 - DNA, 25 bp, Homo sapien
tcttacgagcttgatgtggctactc

SEQ ID NO: 266441 - DNA, 25 bp, Homo sapien
gaagttaacagaaggcccgtagtca

SEQ ID NO: 266442 - DNA, 25 bp, Homo sapien
gcatctcaccgttatacacctctgg

SEQ ID NO: 266443 - DNA, 25 bp, Homo sapien
cagcctgatggacttcttttagtgt

SEQ ID NO: 266444 - DNA, 25 bp, Homo sapien
aagtcggctggatatagacttcctg

SEQ ID NO: 266445 - DNA, 25 bp, Homo sapien
ttcttgcaggttaagcatgctacca

SEQ ID NO: 266446 - DNA, 25 bp, Homo sapien
tacctaggaatgtctcaatttctct

SEQ ID NO: 266447 - DNA, 25 bp, Homo sapien
taaactgtgttgtctagaactagga

SEQ ID NO: 266448 - DNA, 25 bp, Homo sapien
tctgagtcaggactagttatggctg

SEQ ID NO: 266449 - DNA, 25 bp, Homo sapien
tctgtaaccagcaagcatagaatct

SEQ ID NO: 266450 - DNA, 25 bp, Homo sapien
tgttagaggaactgaatgaaatgtc

SEQ ID NO: 266451 - DNA, 25 bp, Homo sapien
tgtgatctgcccgccttggcctccc

SEQ ID NO: 266452 - DNA, 25 bp, Homo sapien
ttgtgatctgcccgccttggcctcc

SEQ ID NO: 266453 - DNA, 25 bp, Homo sapien
tgcctccagggctcacgccattctt

SEQ ID NO: 266454 - DNA, 25 bp, Homo sapien
ctgcctccagggctcacgccattct

SEQ ID NO: 266455 - DNA, 25 bp, Homo sapien
catagagtgcatcaactatttctga

SEQ ID NO: 266456 - DNA, 25 bp, Homo sapien
acatagagtgcatcaactatttctg

SEQ ID NO: 266457 - DNA, 25 bp, Homo sapien
gagtgcatcaactatttctgaaata

SEQ ID NO: 266458 - DNA, 25 bp, Homo sapien
tagagtgcatcaactatttctgaaa

SEQ ID NO: 266459 - DNA, 25 bp, Homo sapien
cataagtatattgtctgtaacgtaa

SEQ ID NO: 266460 - DNA, 25 bp, Homo sapien
ttacgggaatcgtaagttcagattg

SEQ ID NO: 266461 - DNA, 25 bp, Homo sapien
aatcgtaagttcagattgcaatgag

SEQ ID NO: 266462 - DNA, 25 bp, Homo sapien
tattgtctgtaacgtaaatgaattt

SEQ ID NO: 266463 - DNA, 25 bp, Homo sapien
ctttgatcacccatagtgtgctcaa

SEQ ID NO: 266464 - DNA, 25 bp, Homo sapien
tctttgatcacccatagtgtgctca

SEQ ID NO: 266465 - DNA, 25 bp, Homo sapien
ttctttgatcacccatagtgtgctc

SEQ ID NO: 266466 - DNA, 25 bp, Homo sapien
tttctttgatcacccatagtgtgct

SEQ ID NO: 266467 - DNA, 25 bp, Homo sapien
atgatgcagttgttggatagttgtg

SEQ ID NO: 266468 - DNA, 25 bp, Homo sapien
cagttgttggatagttgtgtctcac

SEQ ID NO: 266469 - DNA, 25 bp, Homo sapien
catgatgcagttgttggatagttgt

SEQ ID NO: 266470 - DNA, 25 bp, Homo sapien
agctcgccccggagccttggtcctt

SEQ ID NO: 266471 - DNA, 25 bp, Homo sapien
ggtccttcgcggctgtcttcgctcg

SEQ ID NO: 266472 - DNA, 25 bp, Homo sapien
ccggagcggcgccacagctcgcccc

SEQ ID NO: 266473 - DNA, 25 bp, Homo sapien
ccggagccttggtccttcgcggctg

SEQ ID NO: 266474 - DNA, 25 bp, Homo sapien
gcgcaactacgtttctgcttccctg

SEQ ID NO: 266475 - DNA, 25 bp, Homo sapien
tcaggtgcgcttcctctcgaatcgg

SEQ ID NO: 266476 - DNA, 25 bp, Homo sapien
gccccgcgattcctctggatgttca

SEQ ID NO: 266477 - DNA, 25 bp, Homo sapien
tccagctgtccagcgcaactacgtt

SEQ ID NO: 266478 - DNA, 25 bp, Homo sapien
tagggcaagaaagaaatgtctcttt

SEQ ID NO: 266479 - DNA, 25 bp, Homo sapien
gcaagaaagaaatgtctcttttggg

SEQ ID NO: 266480 - DNA, 25 bp, Homo sapien
caagaaagaaatgtctcttttgggg

SEQ ID NO: 266481 - DNA, 25 bp, Homo sapien
gggcaagaaagaaatgtctcttttg

SEQ ID NO: 266482 - DNA, 25 bp, Homo sapien
cagaatacgaaggttgaaggcggta

SEQ ID NO: 266483 - DNA, 25 bp, Homo sapien
ttcaccggggagcttgcagttgcat

SEQ ID NO: 266484 - DNA, 25 bp, Homo sapien
gggtcacgtgcgagatgagtcacca

SEQ ID NO: 266485 - DNA, 25 bp, Homo sapien
gagtcaccacagaatacgaaggttg

SEQ ID NO: 266486 - DNA, 25 bp, Homo sapien
gggcggtgttgacccaggatggccc

SEQ ID NO: 266487 - DNA, 25 bp, Homo sapien
cttaaactgtagtcggtcaacacac

SEQ ID NO: 266488 - DNA, 25 bp, Homo sapien
ggccttttgtgggacgacaggctta

SEQ ID NO: 266489 - DNA, 25 bp, Homo sapien
agtggcaagtccgaaagcggcccga

SEQ ID NO: 266490 - DNA, 25 bp, Homo sapien
cgccccggctcaactctggtacctt

SEQ ID NO: 266491 - DNA, 25 bp, Homo sapien
ggcgccccggctcaactctggtacc

SEQ ID NO: 266492 - DNA, 25 bp, Homo sapien
caggtgatggcgaaggggcgcggcc

SEQ ID NO: 266493 - DNA, 25 bp, Homo sapien
ggtgatggcgaaggggcgcggcctt

SEQ ID NO: 266494 - DNA, 25 bp, Homo sapien
agcgccgccttaccccgaggcccag

SEQ ID NO: 266495 - DNA, 25 bp, Homo sapien
cacgcgaggccactcgcggcgggag

SEQ ID NO: 266496 - DNA, 25 bp, Homo sapien
ggccagcgccgccttaccccgaggc

SEQ ID NO: 266497 - DNA, 25 bp, Homo sapien
gcgaccacgcgaggccactcgcggc

SEQ ID NO: 266498 - DNA, 25 bp, Homo sapien
ccccgacgcggggtgagcggtggct

SEQ ID NO: 266499 - DNA, 25 bp, Homo sapien
gccccgacgcggggtgagcggtggc

SEQ ID NO: 266500 - DNA, 25 bp, Homo sapien
cgccccgacgcggggtgagcggtgg

SEQ ID NO: 266501 - DNA, 25 bp, Homo sapien
ccgccccgacgcggggtgagcggtg

SEQ ID NO: 266502 - DNA, 25 bp, Homo sapien
gcgcggaggcgaagcaggaagcaag

SEQ ID NO: 266503 - DNA, 25 bp, Homo sapien
caggaagcaaggaccgaccgacgga

SEQ ID NO: 266504 - DNA, 25 bp, Homo sapien
cgaccgacggaaggcgcggaggacg

SEQ ID NO: 266505 - DNA, 25 bp, Homo sapien
gtcccatagcgcgaggcgcggaggc

SEQ ID NO: 266506 - DNA, 25 bp, Homo sapien
ggggcggtttctggatcctcaggtg

SEQ ID NO: 266507 - DNA, 25 bp, Homo sapien
tttctggatcctcaggtggtgctgg

SEQ ID NO: 266508 - DNA, 25 bp, Homo sapien
gcggtttctggatcctcaggtggtg

SEQ ID NO: 266509 - DNA, 25 bp, Homo sapien
cgctggggcggtttctggatcctca

SEQ ID NO: 266510 - DNA, 25 bp, Homo sapien
ctctccagctcctgatcctcttcca

SEQ ID NO: 266511 - DNA, 25 bp, Homo sapien
tctccagctcctgatcctcttccat

SEQ ID NO: 266512 - DNA, 25 bp, Homo sapien
gatacagatgatcaatgtgcaggcc

SEQ ID NO: 266513 - DNA, 25 bp, Homo sapien
tggtagagtcacaagcaagggatag

SEQ ID NO: 266514 - DNA, 25 bp, Homo sapien
gactggtcctgctagaggatgaaga

SEQ ID NO: 266515 - DNA, 25 bp, Homo sapien
ggttgaaaggcatagaaatcccgat

SEQ ID NO: 266516 - DNA, 25 bp, Homo sapien
tgaggtcttcaatccagatattttt

SEQ ID NO: 266517 - DNA, 25 bp, Homo sapien
tctgaaggatgggtcgtagtgtaac

SEQ ID NO: 266518 - DNA, 25 bp, Homo sapien
gagaatttcctagggtatggtcttc

SEQ ID NO: 266519 - DNA, 25 bp, Homo sapien
tggtcttcctcgtgcaatacaaatg

SEQ ID NO: 266520 - DNA, 25 bp, Homo sapien
tgatcatgtaacgtagagaatttcc

SEQ ID NO: 266521 - DNA, 25 bp, Homo sapien
ttttgatccttatagtcctttatgc

SEQ ID NO: 266522 - DNA, 25 bp, Homo sapien
caaacttgtcaagcacatgttggca

SEQ ID NO: 266523 - DNA, 25 bp, Homo sapien
tatagtcctttatgctggcctcaaa

SEQ ID NO: 266524 - DNA, 25 bp, Homo sapien
acttgtcaagcacatgttggcagac

SEQ ID NO: 266525 - DNA, 25 bp, Homo sapien
ggaagagaatatcctacaggacagt

SEQ ID NO: 266526 - DNA, 25 bp, Homo sapien
ctagaatcacgcctttctgaaggac

SEQ ID NO: 266527 - DNA, 25 bp, Homo sapien
cacaaacttctaattctgggttctg

SEQ ID NO: 266528 - DNA, 25 bp, Homo sapien
acagagtatgctgtaaccacaaact

SEQ ID NO: 266529 - DNA, 25 bp, Homo sapien
gttcttgcagagattccaacagctg

SEQ ID NO: 266530 - DNA, 25 bp, Homo sapien
aagaatacagaggttcttgcagaga

SEQ ID NO: 266531 - DNA, 25 bp, Homo sapien
agaatacagaggttcttgcagagat

SEQ ID NO: 266532 - DNA, 25 bp, Homo sapien
tcttgcagagattccaacagctgca

SEQ ID NO: 266533 - DNA, 25 bp, Homo sapien
gcatggaacagaaaccagtcaaact

SEQ ID NO: 266534 - DNA, 25 bp, Homo sapien
gaaatgtaggctctatggcacgcta

SEQ ID NO: 266535 - DNA, 25 bp, Homo sapien
taagtgtccactacctgtcaggtgt

SEQ ID NO: 266536 - DNA, 25 bp, Homo sapien
ttgagtgactgaaaagctgcatgcc

SEQ ID NO: 266537 - DNA, 25 bp, Homo sapien
gaatcatgttgacctccaagttggt

SEQ ID NO: 266538 - DNA, 25 bp, Homo sapien
tttcagtacaaatgcttgggaccat

SEQ ID NO: 266539 - DNA, 25 bp, Homo sapien
tctggtttacgagtacaaagagaaa

SEQ ID NO: 266540 - DNA, 25 bp, Homo sapien
atgccttctggtttacgagtacaaa

SEQ ID NO: 266541 - DNA, 25 bp, Homo sapien
gccttctggtttacgagtacaaaga

SEQ ID NO: 266542 - DNA, 25 bp, Homo sapien
cttctggtttacgagtacaaagaga

SEQ ID NO: 266543 - DNA, 25 bp, Homo sapien
taaatggttgacaattttgaacaca

SEQ ID NO: 266544 - DNA, 25 bp, Homo sapien
tttttgatatgagacagttaaatca

SEQ ID NO: 266545 - DNA, 25 bp, Homo sapien
gacatgaacagccaaatatgtatat

SEQ ID NO: 266546 - DNA, 25 bp, Homo sapien
ttttgaagcatgattgctggggcaa

SEQ ID NO: 266547 - DNA, 25 bp, Homo sapien
cagtcaccctactaagttctgaaaa

SEQ ID NO: 266548 - DNA, 25 bp, Homo sapien
gtcaccctactaagttctgaaaatc

SEQ ID NO: 266549 - DNA, 25 bp, Homo sapien
tcaccctactaagttctgaaaatca

SEQ ID NO: 266550 - DNA, 25 bp, Homo sapien
ggcagtcaccctactaagttctgaa

SEQ ID NO: 266551 - DNA, 25 bp, Homo sapien
ccttaagcagttcttctattgcttt

SEQ ID NO: 266552 - DNA, 25 bp, Homo sapien
ttcccacgttttgcctccttaagca

SEQ ID NO: 266553 - DNA, 25 bp, Homo sapien
atgggtcccattgtttcagctctag

SEQ ID NO: 266554 - DNA, 25 bp, Homo sapien
ggtcccattgtttcagctctagttt

SEQ ID NO: 266555 - DNA, 25 bp, Homo sapien
cacggagcagaggataacagtggct

SEQ ID NO: 266556 - DNA, 25 bp, Homo sapien
gtttgtatcttgtccctgtaataag

SEQ ID NO: 266557 - DNA, 25 bp, Homo sapien
aatgctgagccgcagatgagcttcc

SEQ ID NO: 266558 - DNA, 25 bp, Homo sapien
tgctgggagggtagcatgtcctctt

SEQ ID NO: 266559 - DNA, 25 bp, Homo sapien
gttacgtggtatcagtcaacctgga

SEQ ID NO: 266560 - DNA, 25 bp, Homo sapien
tactaactaactgctacatgccagg

SEQ ID NO: 266561 - DNA, 25 bp, Homo sapien
ggtgctctagcatcctataaaaggg

SEQ ID NO: 266562 - DNA, 25 bp, Homo sapien
caagtgggtcctgagtctttctgaa

SEQ ID NO: 266563 - DNA, 25 bp, Homo sapien
tcttgccagctctccagatagacat

SEQ ID NO: 266564 - DNA, 25 bp, Homo sapien
tcttgctctgtaaggagcgttcaag

SEQ ID NO: 266565 - DNA, 25 bp, Homo sapien
tacaatagatcgaattcagaagcag

SEQ ID NO: 266566 - DNA, 25 bp, Homo sapien
gcagatataagaacccaggtgtctt

SEQ ID NO: 266567 - DNA, 25 bp, Homo sapien
tgtgacccgtgaaccctgagagtcc

SEQ ID NO: 266568 - DNA, 25 bp, Homo sapien
tacttgagaatgtccttgatgaagc

SEQ ID NO: 266569 - DNA, 25 bp, Homo sapien
ccagactcatgaggcaatctacaaa

SEQ ID NO: 266570 - DNA, 25 bp, Homo sapien
gcttgctggcacctatctaaagcag

SEQ ID NO: 266571 - DNA, 25 bp, Homo sapien
tattactgtaacagagcccctggta

SEQ ID NO: 266572 - DNA, 25 bp, Homo sapien
attactgtaacagagcccctggtag

SEQ ID NO: 266573 - DNA, 25 bp, Homo sapien
tctcgtatcagctttagggtaacca

SEQ ID NO: 266574 - DNA, 25 bp, Homo sapien
ccattcctggcttttctcgtatcag

SEQ ID NO: 266575 - DNA, 25 bp, Homo sapien
tgataaactggcattagacactcca

SEQ ID NO: 266576 - DNA, 25 bp, Homo sapien
ggcttttctcgtatcagctttaggg

SEQ ID NO: 266577 - DNA, 25 bp, Homo sapien
ttcctcgaggtgagcaaagccctgc

SEQ ID NO: 266578 - DNA, 25 bp, Homo sapien
ggtgaaacatgtccagcaacagaag

SEQ ID NO: 266579 - DNA, 25 bp, Homo sapien
aactgcagcattcacgccaagaggc

SEQ ID NO: 266580 - DNA, 25 bp, Homo sapien
ttcccagacgtgatggtaatccagg

SEQ ID NO: 266581 - DNA, 25 bp, Homo sapien
cctgggggcacgctggcattaggac

SEQ ID NO: 266582 - DNA, 25 bp, Homo sapien
tgggggcacgctggcattaggacat

SEQ ID NO: 266583 - DNA, 25 bp, Homo sapien
ctcctgggggcacgctggcattagg

SEQ ID NO: 266584 - DNA, 25 bp, Homo sapien
ggggcacgctggcattaggacattc

SEQ ID NO: 266585 - DNA, 25 bp, Homo sapien
gaaaaggtacaccagcattacgctg

SEQ ID NO: 266586 - DNA, 25 bp, Homo sapien
agagcttccagaaaaggtacaccag

SEQ ID NO: 266587 - DNA, 25 bp, Homo sapien
ccttagtagtctcaaggtaaagaca

SEQ ID NO: 266588 - DNA, 25 bp, Homo sapien
gcattacgctgccttagtagtctca

SEQ ID NO: 266589 - DNA, 25 bp, Homo sapien
cctgctgcaaataggtagctcttga

SEQ ID NO: 266590 - DNA, 25 bp, Homo sapien
tgctgcaaataggtagctcttgagc

SEQ ID NO: 266591 - DNA, 25 bp, Homo sapien
tcctgctgcaaataggtagctcttg

SEQ ID NO: 266592 - DNA, 25 bp, Homo sapien
ctcctgctgcaaataggtagctctt

SEQ ID NO: 266593 - DNA, 25 bp, Homo sapien
gcatgccacctagtgtaaactctga

SEQ ID NO: 266594 - DNA, 25 bp, Homo sapien
tacacttctatttcaggatgccagg

SEQ ID NO: 266595 - DNA, 25 bp, Homo sapien
taagcagtcaggcattagcatagcc

SEQ ID NO: 266596 - DNA, 25 bp, Homo sapien
caaaatcatgttattcagggtggct

SEQ ID NO: 266597 - DNA, 25 bp, Homo sapien
cttttattggtgctagcaagaggac

SEQ ID NO: 266598 - DNA, 25 bp, Homo sapien
ttattggtgctagcaagaggacact

SEQ ID NO: 266599 - DNA, 25 bp, Homo sapien
aatcttttattggtgctagcaagag

SEQ ID NO: 266600 - DNA, 25 bp, Homo sapien
gaaatcttttattggtgctagcaag

SEQ ID NO: 266601 - DNA, 25 bp, Homo sapien
tcgctggttccttatcgccctcttt

SEQ ID NO: 266602 - DNA, 25 bp, Homo sapien
tgggcctggctcttcgctggttcct

SEQ ID NO: 266603 - DNA, 25 bp, Homo sapien
tcgagcgcggaagctgtgcttgtaa

SEQ ID NO: 266604 - DNA, 25 bp, Homo sapien
gagtaactggcggaacctcgagcgc

SEQ ID NO: 266605 - DNA, 25 bp, Homo sapien
gcagaagtagcttaaacttgccaag

SEQ ID NO: 266606 - DNA, 25 bp, Homo sapien
tgtaagtctactacactgcagaagt

SEQ ID NO: 266607 - DNA, 25 bp, Homo sapien
cctcaagagttgctaggtcattttt

SEQ ID NO: 266608 - DNA, 25 bp, Homo sapien
ggacctaatgtcaaagtcactctca

SEQ ID NO: 266609 - DNA, 25 bp, Homo sapien
tatttttctgagaaatgaccaaaaa

SEQ ID NO: 266610 - DNA, 25 bp, Homo sapien
tttctgagaaatgaccaaaaaattg

SEQ ID NO: 266611 - DNA, 25 bp, Homo sapien
tctgagaaatgaccaaaaaattgga

SEQ ID NO: 266612 - DNA, 25 bp, Homo sapien
tgagaaatgaccaaaaaattggaac

SEQ ID NO: 266613 - DNA, 25 bp, Homo sapien
aaagagcttctcgataaattcccag

SEQ ID NO: 266614 - DNA, 25 bp, Homo sapien
ctttagctggtaagatctagcactg

SEQ ID NO: 266615 - DNA, 25 bp, Homo sapien
aaagccactttgaggatttcctaca

SEQ ID NO: 266616 - DNA, 25 bp, Homo sapien
gaccttggagggctacagcttttca

SEQ ID NO: 266617 - DNA, 25 bp, Homo sapien
acagggagacagaatcttcatcttc

SEQ ID NO: 266618 - DNA, 25 bp, Homo sapien
gaacagggagacagaatcttcatct

SEQ ID NO: 266619 - DNA, 25 bp, Homo sapien
aacagggagacagaatcttcatctt

SEQ ID NO: 266620 - DNA, 25 bp, Homo sapien
gacagccaggcatatgctcagacac

SEQ ID NO: 266621 - DNA, 25 bp, Homo sapien
tgaggacagccaggcatatgctcag

SEQ ID NO: 266622 - DNA, 25 bp, Homo sapien
aggacagccaggcatatgctcagac

SEQ ID NO: 266623 - DNA, 25 bp, Homo sapien
cagccaggcatatgctcagacactt

SEQ ID NO: 266624 - DNA, 25 bp, Homo sapien
ttggatgtatttccttctagcatgt

SEQ ID NO: 266625 - DNA, 25 bp, Homo sapien
tcacaggatgagtccctgggatctg

SEQ ID NO: 266626 - DNA, 25 bp, Homo sapien
caagaatgacttgggcttgtcactc

SEQ ID NO: 266627 - DNA, 25 bp, Homo sapien
ttaggccaatacataactagatttg

SEQ ID NO: 266628 - DNA, 25 bp, Homo sapien
gatgaagcaataattcctcctctgt

SEQ ID NO: 266629 - DNA, 25 bp, Homo sapien
gaggctaccctgacagtcttttatc

SEQ ID NO: 266630 - DNA, 25 bp, Homo sapien
agattggatcgaggctaccctgaca

SEQ ID NO: 266631 - DNA, 25 bp, Homo sapien
aatcttcaaatacagtcccattctg

SEQ ID NO: 266632 - DNA, 25 bp, Homo sapien
ttacagtcccaatcttcaaatacag

SEQ ID NO: 266633 - DNA, 25 bp, Homo sapien
acccaactactgcttctagaagtga

SEQ ID NO: 266634 - DNA, 25 bp, Homo sapien
gccagcatcacacccaactactgct

SEQ ID NO: 266635 - DNA, 25 bp, Homo sapien
atcacacccaactactgcttctaga

SEQ ID NO: 266636 - DNA, 25 bp, Homo sapien
ccaactactgcttctagaagtgatg

SEQ ID NO: 266637 - DNA, 25 bp, Homo sapien
ctgtgcttttacgactgaagtgtgg

SEQ ID NO: 266638 - DNA, 25 bp, Homo sapien
tgtttgcatagccaatggtttccct

SEQ ID NO: 266639 - DNA, 25 bp, Homo sapien
tgcttttacgactgaagtgtggttc

SEQ ID NO: 266640 - DNA, 25 bp, Homo sapien
tgaaaatgtttgcatagccaatggt

SEQ ID NO: 266641 - DNA, 25 bp, Homo sapien
ctgcactcattgacacgattgagga

SEQ ID NO: 266642 - DNA, 25 bp, Homo sapien
cacgattgaggatgaactatgatca

SEQ ID NO: 266643 - DNA, 25 bp, Homo sapien
ttgctctccgcaacttgaaaacatg

SEQ ID NO: 266644 - DNA, 25 bp, Homo sapien
gatcagtcctaactatggcctctct

SEQ ID NO: 266645 - DNA, 25 bp, Homo sapien
tggtcatcacccttggatggcatag

SEQ ID NO: 266646 - DNA, 25 bp, Homo sapien
tacacagtcctttccagtgaagggc

SEQ ID NO: 266647 - DNA, 25 bp, Homo sapien
gcatttccatgggtagttgcctgaa

SEQ ID NO: 266648 - DNA, 25 bp, Homo sapien
gaagggctcattcttatccaggtgg

SEQ ID NO: 266649 - DNA, 25 bp, Homo sapien
tgatttcgaagctctcttcccagct

SEQ ID NO: 266650 - DNA, 25 bp, Homo sapien
cctcctcttgaattttgtctccttt

SEQ ID NO: 266651 - DNA, 25 bp, Homo sapien
ttcccctcattctcaatttccaaag

SEQ ID NO: 266652 - DNA, 25 bp, Homo sapien
tcccaagtgggtcagagagattgaa

SEQ ID NO: 266653 - DNA, 25 bp, Homo sapien
cctcaactcctgcaaaaatgcgatg

SEQ ID NO: 266654 - DNA, 25 bp, Homo sapien
cagttgaatcctatacctaacagag

SEQ ID NO: 266655 - DNA, 25 bp, Homo sapien
catggaaaagtgactcaaaggcaac

SEQ ID NO: 266656 - DNA, 25 bp, Homo sapien
aaagaatgtagtctgcacaatggca

SEQ ID NO: 266657 - DNA, 25 bp, Homo sapien
gccagcatttgtcttgggacttttc

SEQ ID NO: 266658 - DNA, 25 bp, Homo sapien
ttgcgctattcctagacagagattg

SEQ ID NO: 266659 - DNA, 25 bp, Homo sapien
caagttcttgatcaaattgcgctat

SEQ ID NO: 266660 - DNA, 25 bp, Homo sapien
tcttgatcaaattgcgctattccta

SEQ ID NO: 266661 - DNA, 25 bp, Homo sapien
cggagaaaatctctcgaggcctgta

SEQ ID NO: 266662 - DNA, 25 bp, Homo sapien
agtggaaacgtagtggttggccact

SEQ ID NO: 266663 - DNA, 25 bp, Homo sapien
tctgtccttgggttgggtggaatca

SEQ ID NO: 266664 - DNA, 25 bp, Homo sapien
tgtcccatgagaacatccaggttgc

SEQ ID NO: 266665 - DNA, 25 bp, Homo sapien
gaaatacagccctgaatgctttcac

SEQ ID NO: 266666 - DNA, 25 bp, Homo sapien
ggaaatacagccctgaatgctttca

SEQ ID NO: 266667 - DNA, 25 bp, Homo sapien
atccactggtgcagctatggtttcc

SEQ ID NO: 266668 - DNA, 25 bp, Homo sapien
ccactggtgcagctatggtttccac

SEQ ID NO: 266669 - DNA, 25 bp, Homo sapien
ctgacggggaaggcggatcctgtac

SEQ ID NO: 266670 - DNA, 25 bp, Homo sapien
gggaaggcggatcctgtacaatgga

SEQ ID NO: 266671 - DNA, 25 bp, Homo sapien
acggggaaggcggatcctgtacaat

SEQ ID NO: 266672 - DNA, 25 bp, Homo sapien
ggaaggcggatcctgtacaatggag

SEQ ID NO: 266673 - DNA, 25 bp, Homo sapien
gctcggatgtttcctgcttagggta

SEQ ID NO: 266674 - DNA, 25 bp, Homo sapien
gctctgggctcggatgtttcctgct

SEQ ID NO: 266675 - DNA, 25 bp, Homo sapien
tgggctcggatgtttcctgcttagg

SEQ ID NO: 266676 - DNA, 25 bp, Homo sapien
gatgtttcctgcttagggtactggg

SEQ ID NO: 266677 - DNA, 25 bp, Homo sapien
ctatgatgggcagaactggaagctg

SEQ ID NO: 266678 - DNA, 25 bp, Homo sapien
atgggcagaactggaagctgccgct

SEQ ID NO: 266679 - DNA, 25 bp, Homo sapien
cagaactggaagctgccgctgacac

SEQ ID NO: 266680 - DNA, 25 bp, Homo sapien
gcagaactggaagctgccgctgaca

SEQ ID NO: 266681 - DNA, 25 bp, Homo sapien
caaagggacctgctgattgcagtcc

SEQ ID NO: 266682 - DNA, 25 bp, Homo sapien
tgactccgggaaacgccgagcctgg

SEQ ID NO: 266683 - DNA, 25 bp, Homo sapien
caggttttcgactctggcatggcag

SEQ ID NO: 266684 - DNA, 25 bp, Homo sapien
atttcctgcaaaggccgccggacaa

SEQ ID NO: 266685 - DNA, 25 bp, Homo sapien
cagctgctccaggattttcttggcc

SEQ ID NO: 266686 - DNA, 25 bp, Homo sapien
gcagctgctccaggattttcttggc

SEQ ID NO: 266687 - DNA, 25 bp, Homo sapien
gctgctccaggattttcttggccat

SEQ ID NO: 266688 - DNA, 25 bp, Homo sapien
agcagctgctccaggattttcttgg

SEQ ID NO: 266689 - DNA, 25 bp, Homo sapien
acccactgatagctcaaggctaggg

SEQ ID NO: 266690 - DNA, 25 bp, Homo sapien
ggtaagctaatctgtgtatccccag

SEQ ID NO: 266691 - DNA, 25 bp, Homo sapien
aagggaccagatgtggtatatgctc

SEQ ID NO: 266692 - DNA, 25 bp, Homo sapien
tatgctctgggatgatcagtgacca

SEQ ID NO: 266693 - DNA, 25 bp, Homo sapien
cagcccacttcctaggcctgggtta

SEQ ID NO: 266694 - DNA, 25 bp, Homo sapien
gcctgctggagacacctaaaactca

SEQ ID NO: 266695 - DNA, 25 bp, Homo sapien
gcacatagcaggtggctcgtatata

SEQ ID NO: 266696 - DNA, 25 bp, Homo sapien
actgggaggaccttctggtgtgcct

SEQ ID NO: 266697 - DNA, 25 bp, Homo sapien
cgaagggcggttgtattcctggcat

SEQ ID NO: 266698 - DNA, 25 bp, Homo sapien
tccagcagtgcgctgggaaaccgct

SEQ ID NO: 266699 - DNA, 25 bp, Homo sapien
accgctgccatctcttagtttggaa

SEQ ID NO: 266700 - DNA, 25 bp, Homo sapien
cacatgtggcgagtgcggactgtct

SEQ ID NO: 266701 - DNA, 25 bp, Homo sapien
tccacctgtggaatcgcttctctct

SEQ ID NO: 266702 - DNA, 25 bp, Homo sapien
tctctgcgtcggaagaaggaggacc

SEQ ID NO: 266703 - DNA, 25 bp, Homo sapien
cgcttctctctctgcgtcggaagaa

SEQ ID NO: 266704 - DNA, 25 bp, Homo sapien
tccctccagccggtctcagattttc

SEQ ID NO: 266705 - DNA, 25 bp, Homo sapien
ccagcccgccctctgcgcccaccgc

SEQ ID NO: 266706 - DNA, 25 bp, Homo sapien
ccccggcgcgcggtcgccccgcagc

SEQ ID NO: 266707 - DNA, 25 bp, Homo sapien
agcccgccctctgcgcccaccgcac

SEQ ID NO: 266708 - DNA, 25 bp, Homo sapien
ccggcgcgcggtcgccccgcagcca

SEQ ID NO: 266709 - DNA, 25 bp, Homo sapien
gcctcgcgcagcactagcgagtcca

SEQ ID NO: 266710 - DNA, 25 bp, Homo sapien
gggcgccttcttctcgcccgcctcg

SEQ ID NO: 266711 - DNA, 25 bp, Homo sapien
tgcagcgcgtgcggcgggggcacag

SEQ ID NO: 266712 - DNA, 25 bp, Homo sapien
gcccgcctcgcgcagcactagcgag

SEQ ID NO: 266713 - DNA, 25 bp, Homo sapien
gcagcccagccttgcgcgcgtggca

SEQ ID NO: 266714 - DNA, 25 bp, Homo sapien
cagcccagccttgcgcgcgtggcag

SEQ ID NO: 266715 - DNA, 25 bp, Homo sapien
agcccagccttgcgcgcgtggcagg

SEQ ID NO: 266716 - DNA, 25 bp, Homo sapien
gcccagccttgcgcgcgtggcaggc

SEQ ID NO: 266717 - DNA, 25 bp, Homo sapien
gaggcggtgacgcagagcgggcaca

SEQ ID NO: 266718 - DNA, 25 bp, Homo sapien
agctgcgaggcggtgacgcagagcg

SEQ ID NO: 266719 - DNA, 25 bp, Homo sapien
tgcgaggcggtgacgcagagcgggc

SEQ ID NO: 266720 - DNA, 25 bp, Homo sapien
aggcggtgacgcagagcgggcacac

SEQ ID NO: 266721 - DNA, 25 bp, Homo sapien
tggcagtactgcgagccgaagggtg

SEQ ID NO: 266722 - DNA, 25 bp, Homo sapien
tactgcgagccgaagggtgggaagg

SEQ ID NO: 266723 - DNA, 25 bp, Homo sapien
gggcgcgtggcagtactgcgagccg

SEQ ID NO: 266724 - DNA, 25 bp, Homo sapien
gcccaggggcgcgtggcagtactgc

SEQ ID NO: 266725 - DNA, 25 bp, Homo sapien
ctggggtcaggcagcgggtaggagg

SEQ ID NO: 266726 - DNA, 25 bp, Homo sapien
tggggtcaggcagcgggtaggaggt

SEQ ID NO: 266727 - DNA, 25 bp, Homo sapien
tctgcccggtccctctgcgcggcgg

SEQ ID NO: 266728 - DNA, 25 bp, Homo sapien
ggctctccatcctgcttcggatcac

SEQ ID NO: 266729 - DNA, 25 bp, Homo sapien
tgcttcggatcacctctgcccggtc

SEQ ID NO: 266730 - DNA, 25 bp, Homo sapien
tccatcctgcttcggatcacctctg

SEQ ID NO: 266731 - DNA, 25 bp, Homo sapien
agaaggaagcgatcagacctctgtg

SEQ ID NO: 266732 - DNA, 25 bp, Homo sapien
gcagagaaggaagcgatcagacctc

SEQ ID NO: 266733 - DNA, 25 bp, Homo sapien
cagagcagagaaggaagcgatcaga

SEQ ID NO: 266734 - DNA, 25 bp, Homo sapien
gagcagagaaggaagcgatcagacc

SEQ ID NO: 266735 - DNA, 25 bp, Homo sapien
atctcgatgcgacgtaggcgggaca

SEQ ID NO: 266736 - DNA, 25 bp, Homo sapien
tgcttctcggacagattcaggtagg

SEQ ID NO: 266737 - DNA, 25 bp, Homo sapien
tggtgaaagccgtgcgcatcctctt

SEQ ID NO: 266738 - DNA, 25 bp, Homo sapien
gtacatattagaagcgaactcgcgc

SEQ ID NO: 266739 - DNA, 25 bp, Homo sapien
ggcggttctgaaaccagatcttcac

SEQ ID NO: 266740 - DNA, 25 bp, Homo sapien
tcggcggttctgaaaccagatcttc

SEQ ID NO: 266741 - DNA, 25 bp, Homo sapien
cggcggttctgaaaccagatcttca

SEQ ID NO: 266742 - DNA, 25 bp, Homo sapien
gagagcgatgcgcacttgcagcctt

SEQ ID NO: 266743 - DNA, 25 bp, Homo sapien
ccgccgccacgatggttgctgccct

SEQ ID NO: 266744 - DNA, 25 bp, Homo sapien
gcacttgcagccttgcggtgcgctc

SEQ ID NO: 266745 - DNA, 25 bp, Homo sapien
cttggctgaggagagcgatgcgcac

SEQ ID NO: 266746 - DNA, 25 bp, Homo sapien
agatcccggtcgtccttccctgagg

SEQ ID NO: 266747 - DNA, 25 bp, Homo sapien
tgaggaggacggagacatgggcaat

SEQ ID NO: 266748 - DNA, 25 bp, Homo sapien
gcaattcgtcgtcatcctcggagca

SEQ ID NO: 266749 - DNA, 25 bp, Homo sapien
gagtgaccgtaagatcccggtcgtc

SEQ ID NO: 266750 - DNA, 25 bp, Homo sapien
aaagcagtgccaaatccatgccagg

SEQ ID NO: 266751 - DNA, 25 bp, Homo sapien
gactcgagcgcttacagtgttcaca

SEQ ID NO: 266752 - DNA, 25 bp, Homo sapien
gtagagtaagcgaggaagcccaagc

SEQ ID NO: 266753 - DNA, 25 bp, Homo sapien
ttggctttggacacgagcgagccct

SEQ ID NO: 266754 - DNA, 25 bp, Homo sapien
taaatatcttctggcattgcagagg

SEQ ID NO: 266755 - DNA, 25 bp, Homo sapien
gcaaggccagatcaagggacaaatg

SEQ ID NO: 266756 - DNA, 25 bp, Homo sapien
tgcagaggccgtacaattacacagc

SEQ ID NO: 266757 - DNA, 25 bp, Homo sapien
tttatcatctgtgagaggagccgtg

SEQ ID NO: 266758 - DNA, 25 bp, Homo sapien
aaggcgggctctcagcggagctgag

SEQ ID NO: 266759 - DNA, 25 bp, Homo sapien
cactggctgagctgtaaggcgagga

SEQ ID NO: 266760 - DNA, 25 bp, Homo sapien
ctgagggttccgagaggcactggct

SEQ ID NO: 266761 - DNA, 25 bp, Homo sapien
agccggctcggaccctgcaactgga

SEQ ID NO: 266762 - DNA, 25 bp, Homo sapien
ttgcccggaatgttccgcgaccagg

SEQ ID NO: 266763 - DNA, 25 bp, Homo sapien
ggcaggatcacttcggattctcgga

SEQ ID NO: 266764 - DNA, 25 bp, Homo sapien
ggattctcggattccttgcccggaa

SEQ ID NO: 266765 - DNA, 25 bp, Homo sapien
cagggactcggctaagggaatttgc

SEQ ID NO: 266766 - DNA, 25 bp, Homo sapien
gggattgtgtgctgcctctgaagga

SEQ ID NO: 266767 - DNA, 25 bp, Homo sapien
ggggattgtgtgctgcctctgaagg

SEQ ID NO: 266768 - DNA, 25 bp, Homo sapien
ggattgtgtgctgcctctgaaggac

SEQ ID NO: 266769 - DNA, 25 bp, Homo sapien
ctctgaggccagtgcgggggattgt

SEQ ID NO: 266770 - DNA, 25 bp, Homo sapien
aggaaactgccttcctgctggtcgc

SEQ ID NO: 266771 - DNA, 25 bp, Homo sapien
gaagaactttcaccagggagattca

SEQ ID NO: 266772 - DNA, 25 bp, Homo sapien
tggattccctcagaagaactttcac

SEQ ID NO: 266773 - DNA, 25 bp, Homo sapien
tggtcgccgcttgtccagtcagcgt

SEQ ID NO: 266774 - DNA, 25 bp, Homo sapien
ccacaaaggtccatattctcaaatg

SEQ ID NO: 266775 - DNA, 25 bp, Homo sapien
gctcgggtcggtgtgggcttttagc

SEQ ID NO: 266776 - DNA, 25 bp, Homo sapien
gggaaccacaaaggtccatattctc

SEQ ID NO: 266777 - DNA, 25 bp, Homo sapien
ccattctgttggctcgggtcggtgt

SEQ ID NO: 266778 - DNA, 25 bp, Homo sapien
ttctagccgtttccagcctcaggct

SEQ ID NO: 266779 - DNA, 25 bp, Homo sapien
tatcttgcgtaaagttcctggaagc

SEQ ID NO: 266780 - DNA, 25 bp, Homo sapien
tgcttttgcaaagccactcgtcccg

SEQ ID NO: 266781 - DNA, 25 bp, Homo sapien
ccctgcgcaaggataaagtagttgg

SEQ ID NO: 266782 - DNA, 25 bp, Homo sapien
taccagaaatactccaccagaccgt

SEQ ID NO: 266783 - DNA, 25 bp, Homo sapien
cgtttcgcgctctggtttgacggca

SEQ ID NO: 266784 - DNA, 25 bp, Homo sapien
catttccagtgccaggcgaaaccga

SEQ ID NO: 266785 - DNA, 25 bp, Homo sapien
caaataattgcaagatgctgatacc

SEQ ID NO: 266786 - DNA, 25 bp, Homo sapien
ttgttgacacaagccgccctctctg

SEQ ID NO: 266787 - DNA, 25 bp, Homo sapien
cagactgccaaggtcacttcaagaa

SEQ ID NO: 266788 - DNA, 25 bp, Homo sapien
agcattttgagctccgggcttggag

SEQ ID NO: 266789 - DNA, 25 bp, Homo sapien
gcttccatgaatgatcgccacaaaa

SEQ ID NO: 266790 - DNA, 25 bp, Homo sapien
ccctttaatgctcttgtaaatcgag

SEQ ID NO: 266791 - DNA, 25 bp, Homo sapien
cccaggtactaactgcagcttgctg

SEQ ID NO: 266792 - DNA, 25 bp, Homo sapien
tttaatgctcttgtaaatcgagcag

SEQ ID NO: 266793 - DNA, 25 bp, Homo sapien
agacccaggtactaactgcagcttg

SEQ ID NO: 266794 - DNA, 25 bp, Homo sapien
ctagcgtaaatgtttctgacagttc

SEQ ID NO: 266795 - DNA, 25 bp, Homo sapien
cagctgtgccaaatgggtcaccttg

SEQ ID NO: 266796 - DNA, 25 bp, Homo sapien
aaatgggtcaccttggagagatgtc

SEQ ID NO: 266797 - DNA, 25 bp, Homo sapien
gagagatgtctgtgcgcaaagagct

SEQ ID NO: 266798 - DNA, 25 bp, Homo sapien
aacagttttgcatcaccgggcctgg

SEQ ID NO: 266799 - DNA, 25 bp, Homo sapien
tttatgagctaagacatggcatact

SEQ ID NO: 266800 - DNA, 25 bp, Homo sapien
cctgggtacctttgatgctggatta

SEQ ID NO: 266801 - DNA, 25 bp, Homo sapien
tcagccttttcaagccaacccatgg

SEQ ID NO: 266802 - DNA, 25 bp, Homo sapien
cttctccttcaatagagtccaacaa

SEQ ID NO: 266803 - DNA, 25 bp, Homo sapien
catctaattgagaacgctgaatggc

SEQ ID NO: 266804 - DNA, 25 bp, Homo sapien
caatttagcaagctcaccaagctgt

SEQ ID NO: 266805 - DNA, 25 bp, Homo sapien
ccttcaatagagtccaacaatttag

SEQ ID NO: 266806 - DNA, 25 bp, Homo sapien
gagggccacttccatcgtgaccctg

SEQ ID NO: 266807 - DNA, 25 bp, Homo sapien
tctctaggcaaaggggactgtactt

SEQ ID NO: 266808 - DNA, 25 bp, Homo sapien
agtctcattctctaggcaaagggga

SEQ ID NO: 266809 - DNA, 25 bp, Homo sapien
aggagctcaccaatctctcttcctt

SEQ ID NO: 266810 - DNA, 25 bp, Homo sapien
tatatgtgctgccaaagctagcaca

SEQ ID NO: 266811 - DNA, 25 bp, Homo sapien
ctgtattgtttcagttttagtatat

SEQ ID NO: 266812 - DNA, 25 bp, Homo sapien
agtatatgtgctgccaaagctagca

SEQ ID NO: 266813 - DNA, 25 bp, Homo sapien
cttctctgtattgtttcagttttag

SEQ ID NO: 266814 - DNA, 25 bp, Homo sapien
caccatagccaccttggtttcgtgg

SEQ ID NO: 266815 - DNA, 25 bp, Homo sapien
gctgctgctactggatccaccatag

SEQ ID NO: 266816 - DNA, 25 bp, Homo sapien
ctgctgctgctactggatccaccat

SEQ ID NO: 266817 - DNA, 25 bp, Homo sapien
tcttctgccaaagccatagctgctg

SEQ ID NO: 266818 - DNA, 25 bp, Homo sapien
caacaagtgtgaacattttttttca

SEQ ID NO: 266819 - DNA, 25 bp, Homo sapien
aattccacgattttgcttgagtaat

SEQ ID NO: 266820 - DNA, 25 bp, Homo sapien
cacttttatcaccaataattccacg

SEQ ID NO: 266821 - DNA, 25 bp, Homo sapien
cttctccgcccaagcaggttgcata

SEQ ID NO: 266822 - DNA, 25 bp, Homo sapien
cttccttcagagaagacggcccgta

SEQ ID NO: 266823 - DNA, 25 bp, Homo sapien
tagggagagccttactttcaacatt

SEQ ID NO: 266824 - DNA, 25 bp, Homo sapien
ggaggtggggctaagggcgtcatag

SEQ ID NO: 266825 - DNA, 25 bp, Homo sapien
tcttccttcagagaagacggcccgt

SEQ ID NO: 266826 - DNA, 25 bp, Homo sapien
tcccgtggccagcagcctttcgctc

SEQ ID NO: 266827 - DNA, 25 bp, Homo sapien
agcctttcgctctgctcagaggaga

SEQ ID NO: 266828 - DNA, 25 bp, Homo sapien
gcagcctttcgctctgctcagagga

SEQ ID NO: 266829 - DNA, 25 bp, Homo sapien
gtggccagcagcctttcgctctgct

SEQ ID NO: 266830 - DNA, 25 bp, Homo sapien
tggccgcgctgtggaagacttttcg

SEQ ID NO: 266831 - DNA, 25 bp, Homo sapien
tattctgagcagagtgccatcagcc

SEQ ID NO: 266832 - DNA, 25 bp, Homo sapien
gttcatcctgcatgtacagggaacc

SEQ ID NO: 266833 - DNA, 25 bp, Homo sapien
cttttcgggcgggtgttcatcctgc

SEQ ID NO: 266834 - DNA, 25 bp, Homo sapien
ggaaagctctctactgaacaatcta

SEQ ID NO: 266835 - DNA, 25 bp, Homo sapien
ctgagagccttcatcatttgcattg

SEQ ID NO: 266836 - DNA, 25 bp, Homo sapien
actcaggaaagctctctactgaaca

SEQ ID NO: 266837 - DNA, 25 bp, Homo sapien
cattggagtcttgagactcaggaaa

SEQ ID NO: 266838 - DNA, 25 bp, Homo sapien
agatgtgcagtctccagaaatccct

SEQ ID NO: 266839 - DNA, 25 bp, Homo sapien
gtcctaggtaaccagctccttgctt

SEQ ID NO: 266840 - DNA, 25 bp, Homo sapien
gcagtctccagaaatccctgctgct

SEQ ID NO: 266841 - DNA, 25 bp, Homo sapien
aggtaaccagctccttgcttccaca

SEQ ID NO: 266842 - DNA, 25 bp, Homo sapien
tttggttgtctcatctctggttcta

SEQ ID NO: 266843 - DNA, 25 bp, Homo sapien
ttggttgtctcatctctggttctac

SEQ ID NO: 266844 - DNA, 25 bp, Homo sapien
cctttggttgtctcatctctggttc

SEQ ID NO: 266845 - DNA, 25 bp, Homo sapien
ccctttggttgtctcatctctggtt

SEQ ID NO: 266846 - DNA, 25 bp, Homo sapien
gctctctctggtgtaagaggagtag

SEQ ID NO: 266847 - DNA, 25 bp, Homo sapien
tccagccactgctcaacgcttcctc

SEQ ID NO: 266848 - DNA, 25 bp, Homo sapien
ggcccccaggcacgagctctttcca

SEQ ID NO: 266849 - DNA, 25 bp, Homo sapien
gggactccgtgtgccccagaactgt

SEQ ID NO: 266850 - DNA, 25 bp, Homo sapien
ccttcacagagacgcggtttacacc

SEQ ID NO: 266851 - DNA, 25 bp, Homo sapien
gtcttcctcggtggtttcagaggca

SEQ ID NO: 266852 - DNA, 25 bp, Homo sapien
ctgatactggaggtccttgccggcc

SEQ ID NO: 266853 - DNA, 25 bp, Homo sapien
tattagctggacgtcctgatagtcc

SEQ ID NO: 266854 - DNA, 25 bp, Homo sapien
cattacaggcgaaatgcgtttccgc

SEQ ID NO: 266855 - DNA, 25 bp, Homo sapien
taaaatcgccgagtccattacaggc

SEQ ID NO: 266856 - DNA, 25 bp, Homo sapien
tagctcctggtatcgtaaaatcgcc

SEQ ID NO: 266857 - DNA, 25 bp, Homo sapien
gcagcgataccgagccattaggcga

SEQ ID NO: 266858 - DNA, 25 bp, Homo sapien
accctccgcttagtaaggtcgtgtg

SEQ ID NO: 266859 - DNA, 25 bp, Homo sapien
aaaacgcatcaagcggaaccctccg

SEQ ID NO: 266860 - DNA, 25 bp, Homo sapien
cgcttagtaaggtcgtgtgttgtac

SEQ ID NO: 266861 - DNA, 25 bp, Homo sapien
caagcggaaccctccgcttagtaag

SEQ ID NO: 266862 - DNA, 25 bp, Homo sapien
ttcacaattagcattttctgctgcc

SEQ ID NO: 266863 - DNA, 25 bp, Homo sapien
tttcacaattagcattttctgctgc

SEQ ID NO: 266864 - DNA, 25 bp, Homo sapien
attagcattttctgctgcctgcgac

SEQ ID NO: 266865 - DNA, 25 bp, Homo sapien
acaattagcattttctgctgcctgc

SEQ ID NO: 266866 - DNA, 25 bp, Homo sapien
gatcgccgggggtattccatggagg

SEQ ID NO: 266867 - DNA, 25 bp, Homo sapien
ggatcgccgggggtattccatggag

SEQ ID NO: 266868 - DNA, 25 bp, Homo sapien
gggatcgccgggggtattccatgga

SEQ ID NO: 266869 - DNA, 25 bp, Homo sapien
aggggatcgccgggggtattccatg

SEQ ID NO: 266870 - DNA, 25 bp, Homo sapien
taatatttttgctcggccctgcaga

SEQ ID NO: 266871 - DNA, 25 bp, Homo sapien
gcagaaagcaaatccgccggttgcg

SEQ ID NO: 266872 - DNA, 25 bp, Homo sapien
ggtctccatttcgatgcttcatttg

SEQ ID NO: 266873 - DNA, 25 bp, Homo sapien
aatccgccggttgcggtcgccggca

SEQ ID NO: 266874 - DNA, 25 bp, Homo sapien
ccgtgattggcctggctggccgcac

SEQ ID NO: 266875 - DNA, 25 bp, Homo sapien
aggtacccgcgagcacctgcttttg

SEQ ID NO: 266876 - DNA, 25 bp, Homo sapien
cactaagaggctaggcccaggtacc

SEQ ID NO: 266877 - DNA, 25 bp, Homo sapien
tgacagctccgcactgatctcagag

SEQ ID NO: 266878 - DNA, 25 bp, Homo sapien
tggaacgcgcatgggtccttgtaaa

SEQ ID NO: 266879 - DNA, 25 bp, Homo sapien
gggctggcgctgaactccggcgccg

SEQ ID NO: 266880 - DNA, 25 bp, Homo sapien
gcgtagtactgctcctcgccgttca

SEQ ID NO: 266881 - DNA, 25 bp, Homo sapien
tgtaaagctgcgtggccgcgtagta

SEQ ID NO: 266882 - DNA, 25 bp, Homo sapien
agcgcgagctgagccgggaggtggt

SEQ ID NO: 266883 - DNA, 25 bp, Homo sapien
agctggacgcggttgggctcctcca

SEQ ID NO: 266884 - DNA, 25 bp, Homo sapien
cactggcctttccacgcgtgagctt

SEQ ID NO: 266885 - DNA, 25 bp, Homo sapien
agggcgccagggaacgggtgcggcg

SEQ ID NO: 266886 - DNA, 25 bp, Homo sapien
tgtgcactaccaaggagtcctgggt

SEQ ID NO: 266887 - DNA, 25 bp, Homo sapien
tgcccttccttaacgaagcgcggga

SEQ ID NO: 266888 - DNA, 25 bp, Homo sapien
catgtccctactcggcttcctcgat

SEQ ID NO: 266889 - DNA, 25 bp, Homo sapien
tgggtccgaggcacccatgtcccta

SEQ ID NO: 266890 - DNA, 25 bp, Homo sapien
aagtggctgaggcacggcagcgatg

SEQ ID NO: 266891 - DNA, 25 bp, Homo sapien
atgacagtgagtagcggcgacgaca

SEQ ID NO: 266892 - DNA, 25 bp, Homo sapien
aaggaaaaggcaactatttgcggtg

SEQ ID NO: 266893 - DNA, 25 bp, Homo sapien
tatttgcggtgcaggtgtgaccaga

SEQ ID NO: 266894 - DNA, 25 bp, Homo sapien
acgattgcagcgcagttcagccctc

SEQ ID NO: 266895 - DNA, 25 bp, Homo sapien
ggaggtggggacgattgcagcgcag

SEQ ID NO: 266896 - DNA, 25 bp, Homo sapien
attgcagcgcagttcagccctcgtc

SEQ ID NO: 266897 - DNA, 25 bp, Homo sapien
gggacgattgcagcgcagttcagcc

SEQ ID NO: 266898 - DNA, 25 bp, Homo sapien
tggataaatttgcagaggcgccgcg

SEQ ID NO: 266899 - DNA, 25 bp, Homo sapien
tctggcgcccctgtcaactgggttt

SEQ ID NO: 266900 - DNA, 25 bp, Homo sapien
ccgggctgcgcgagctggataaatt

SEQ ID NO: 266901 - DNA, 25 bp, Homo sapien
tccggagacttcaaggcctttggcc

SEQ ID NO: 266902 - DNA, 25 bp, Homo sapien
ttgtcacttcgctcttcccaggggc

SEQ ID NO: 266903 - DNA, 25 bp, Homo sapien
gaatttcggctccatcgaagtttcc

SEQ ID NO: 266904 - DNA, 25 bp, Homo sapien
gagcccttttgtcacttcgctcttc

SEQ ID NO: 266905 - DNA, 25 bp, Homo sapien
gcaatttttgaatttcggctccatc

SEQ ID NO: 266906 - DNA, 25 bp, Homo sapien
caaatgccctcagaggtgttgaggg

SEQ ID NO: 266907 - DNA, 25 bp, Homo sapien
ctgagagccagcaaattctccataa

SEQ ID NO: 266908 - DNA, 25 bp, Homo sapien
tggcagctccagactctacgccctg

SEQ ID NO: 266909 - DNA, 25 bp, Homo sapien
agccggacttctgcccgcgaagtga

SEQ ID NO: 266910 - DNA, 25 bp, Homo sapien
gatcttgatgtgtctctcggtcaag

SEQ ID NO: 266911 - DNA, 25 bp, Homo sapien
tgcgcgtccgcttgttctcctccgg

SEQ ID NO: 266912 - DNA, 25 bp, Homo sapien
ggtcaagttcaacatgacagccagc

SEQ ID NO: 266913 - DNA, 25 bp, Homo sapien
tgagatgtacttgttgaataggaac

SEQ ID NO: 266914 - DNA, 25 bp, Homo sapien
cccgccgccgcgcttcttgtcctcc

SEQ ID NO: 266915 - DNA, 25 bp, Homo sapien
gcgacgcgctaaggccaggcggcag

SEQ ID NO: 266916 - DNA, 25 bp, Homo sapien
ctctcgggcggcaacgggggcagcg

SEQ ID NO: 266917 - DNA, 25 bp, Homo sapien
gccagaagctcctcgccggaggtca

SEQ ID NO: 266918 - DNA, 25 bp, Homo sapien
ctggagggctgtggcgacgcgctaa

SEQ ID NO: 266919 - DNA, 25 bp, Homo sapien
tcctcggcgagtggttgaagcccct

SEQ ID NO: 266920 - DNA, 25 bp, Homo sapien
gcttctctaaacaggtcccaaggtg

SEQ ID NO: 266921 - DNA, 25 bp, Homo sapien
gcagattaaggtactcggcccagct

SEQ ID NO: 266922 - DNA, 25 bp, Homo sapien
tccagtatcactaaaagagggcccc

SEQ ID NO: 266923 - DNA, 25 bp, Homo sapien
gggtgcaagttataagatgtgcagt

SEQ ID NO: 266924 - DNA, 25 bp, Homo sapien
tgcagtagtgaagtgtgcagctaga

SEQ ID NO: 266925 - DNA, 25 bp, Homo sapien
cgaatatctttggtttagtggtcac

SEQ ID NO: 266926 - DNA, 25 bp, Homo sapien
cctgccagcagtgtggaactggagc

SEQ ID NO: 266927 - DNA, 25 bp, Homo sapien
gctcgtgaatagttgttggtttcca

SEQ ID NO: 266928 - DNA, 25 bp, Homo sapien
tcggaacaggaattacgtccacatc

SEQ ID NO: 266929 - DNA, 25 bp, Homo sapien
tttccaaggcgcaccaggccactgt

SEQ ID NO: 266930 - DNA, 25 bp, Homo sapien
gatgtgaaggtcatactggctcgtg

SEQ ID NO: 266931 - DNA, 25 bp, Homo sapien
tgcacagacctgtttgtaaataact

SEQ ID NO: 266932 - DNA, 25 bp, Homo sapien
aaacataacccgagcacaaggccca

SEQ ID NO: 266933 - DNA, 25 bp, Homo sapien
agacctgggatgcacagacctgttt

SEQ ID NO: 266934 - DNA, 25 bp, Homo sapien
cacaaacataacccgagcacaaggc

SEQ ID NO: 266935 - DNA, 25 bp, Homo sapien
tgaattcgaatcatcccactgccag

SEQ ID NO: 266936 - DNA, 25 bp, Homo sapien
agtgaattcgaatcatcccactgcc

SEQ ID NO: 266937 - DNA, 25 bp, Homo sapien
gtgaattcgaatcatcccactgcca

SEQ ID NO: 266938 - DNA, 25 bp, Homo sapien
cccactgccagaaaggtttgaaaca

SEQ ID NO: 266939 - DNA, 25 bp, Homo sapien
tggagaaccgcaaggaaagagcact

SEQ ID NO: 266940 - DNA, 25 bp, Homo sapien
tagctactgtttgtggagggattcc

SEQ ID NO: 266941 - DNA, 25 bp, Homo sapien
cgacgacgacgatgacagcctaaaa

SEQ ID NO: 266942 - DNA, 25 bp, Homo sapien
gctgggccaatatttgagggaccaa

SEQ ID NO: 266943 - DNA, 25 bp, Homo sapien
taagcaaagccacgagtagtaagga

SEQ ID NO: 266944 - DNA, 25 bp, Homo sapien
gactgaattcaagcccaaggcggcg

SEQ ID NO: 266945 - DNA, 25 bp, Homo sapien
caccaactaactggtcggcggagct

SEQ ID NO: 266946 - DNA, 25 bp, Homo sapien
tatgagcccactgtatagacaagga

SEQ ID NO: 266947 - DNA, 25 bp, Homo sapien
atatgccgagccagcgcgcacttgg

SEQ ID NO: 266948 - DNA, 25 bp, Homo sapien
cctgccggctctggagcgcatatgc

SEQ ID NO: 266949 - DNA, 25 bp, Homo sapien
acttgggtagggctaactgcgttca

SEQ ID NO: 266950 - DNA, 25 bp, Homo sapien
cagaccttttgaaggccactggtgt

SEQ ID NO: 266951 - DNA, 25 bp, Homo sapien
ggttgaagattccaagaggaatgga

SEQ ID NO: 266952 - DNA, 25 bp, Homo sapien
cttggggttgaagattccaagagga

SEQ ID NO: 266953 - DNA, 25 bp, Homo sapien
tggggttgaagattccaagaggaat

SEQ ID NO: 266954 - DNA, 25 bp, Homo sapien
ttgaagattccaagaggaatggagg

SEQ ID NO: 266955 - DNA, 25 bp, Homo sapien
gacggtattgaccatcaagtgggaa

SEQ ID NO: 266956 - DNA, 25 bp, Homo sapien
tatgttgctgaatgcgttcacgccc

SEQ ID NO: 266957 - DNA, 25 bp, Homo sapien
gtaaaaactgtgagtgcttccaggg

SEQ ID NO: 266958 - DNA, 25 bp, Homo sapien
tgcgtgccgcagcaaagcaggaatc

SEQ ID NO: 266959 - DNA, 25 bp, Homo sapien
tctaaaggctgcctgcacaccctgg

SEQ ID NO: 266960 - DNA, 25 bp, Homo sapien
cttctaaaggctgcctgcacaccct

SEQ ID NO: 266961 - DNA, 25 bp, Homo sapien
cctttccaacttctaaaggctgcct

SEQ ID NO: 266962 - DNA, 25 bp, Homo sapien
aacttctaaaggctgcctgcacacc

SEQ ID NO: 266963 - DNA, 25 bp, Homo sapien
gtagcgaaagcggagcgcgtcgggc

SEQ ID NO: 266964 - DNA, 25 bp, Homo sapien
aaagcggagcgcgtcgggccaaatc

SEQ ID NO: 266965 - DNA, 25 bp, Homo sapien
agcgcgtcgggccaaatcgccaaga

SEQ ID NO: 266966 - DNA, 25 bp, Homo sapien
ccaaatcgccaagactctggcaatg

SEQ ID NO: 266967 - DNA, 25 bp, Homo sapien
ggagtatcggatgtagctgagtcca

SEQ ID NO: 266968 - DNA, 25 bp, Homo sapien
ccagcctgtctccagtaggccacca

SEQ ID NO: 266969 - DNA, 25 bp, Homo sapien
ctgggagtatcggatgtagctgagt

SEQ ID NO: 266970 - DNA, 25 bp, Homo sapien
tcggatgtagctgagtccagcctgt

SEQ ID NO: 266971 - DNA, 25 bp, Homo sapien
gccagaagtctttttggcatttgct

SEQ ID NO: 266972 - DNA, 25 bp, Homo sapien
gcatctctcactacttttgcacaga

SEQ ID NO: 266973 - DNA, 25 bp, Homo sapien
ctttcacaatttttacgctgttgcc

SEQ ID NO: 266974 - DNA, 25 bp, Homo sapien
attctgtcttcagtgcatctctcac

SEQ ID NO: 266975 - DNA, 25 bp, Homo sapien
taacagtgaaccatatttcaattta

SEQ ID NO: 266976 - DNA, 25 bp, Homo sapien
gtcaatttatgaacaagacaggatt

SEQ ID NO: 266977 - DNA, 25 bp, Homo sapien
ttgtcaatttatgaacaagacagga

SEQ ID NO: 266978 - DNA, 25 bp, Homo sapien
cattgtcaatttatgaacaagacag

SEQ ID NO: 266979 - DNA, 25 bp, Homo sapien
taacattagtggttcagcgctccga

SEQ ID NO: 266980 - DNA, 25 bp, Homo sapien
tttcatctcattaaagcaccgggct

SEQ ID NO: 266981 - DNA, 25 bp, Homo sapien
ccctgtaggcaggatggaagctata

SEQ ID NO: 266982 - DNA, 25 bp, Homo sapien
gcttatgctcaaggtacagggtctc

SEQ ID NO: 266983 - DNA, 25 bp, Homo sapien
gccaagatcatcactttagcctggg

SEQ ID NO: 266984 - DNA, 25 bp, Homo sapien
cagaacctatccattgggtactatg

SEQ ID NO: 266985 - DNA, 25 bp, Homo sapien
caaaccccagcaacatgtaatttac

SEQ ID NO: 266986 - DNA, 25 bp, Homo sapien
aaacctgaacatgtatcccttgaac

SEQ ID NO: 266987 - DNA, 25 bp, Homo sapien
tattactgagtaaagcagggtgctc

SEQ ID NO: 266988 - DNA, 25 bp, Homo sapien
tcctgggcgtgatcacaagtctaca

SEQ ID NO: 266989 - DNA, 25 bp, Homo sapien
tcaaatgggcccgttgtctacaaca

SEQ ID NO: 266990 - DNA, 25 bp, Homo sapien
gcttttcaaaaggtgcgcgcaacta

SEQ ID NO: 266991 - DNA, 25 bp, Homo sapien
ttgtttgcttagtggttagaggttc

SEQ ID NO: 266992 - DNA, 25 bp, Homo sapien
gcaagagcacatgggttgtttgctt

SEQ ID NO: 266993 - DNA, 25 bp, Homo sapien
tgggttgtttgcttagtggttagag

SEQ ID NO: 266994 - DNA, 25 bp, Homo sapien
gtttgcttagtggttagaggttcaa

SEQ ID NO: 266995 - DNA, 25 bp, Homo sapien
ggccgcagccatgggctacagcagc

SEQ ID NO: 266996 - DNA, 25 bp, Homo sapien
acctgtgcgagtggatgcggaagcc

SEQ ID NO: 266997 - DNA, 25 bp, Homo sapien
tcccgggctgtctgggagctcggcg

SEQ ID NO: 266998 - DNA, 25 bp, Homo sapien
tcggcagccaaggtaagcagaggct

SEQ ID NO: 266999 - DNA, 25 bp, Homo sapien
atcgctttcaggtgtctgcagaggc

SEQ ID NO: 267000 - DNA, 25 bp, Homo sapien
gatcccgcagccctaggctagttct

SEQ ID NO: 267001 - DNA, 25 bp, Homo sapien
caagttgctggttgtcacctgtaaa

SEQ ID NO: 267002 - DNA, 25 bp, Homo sapien
tcaggaagtccgatgacactcggct

SEQ ID NO: 267003 - DNA, 25 bp, Homo sapien
ttgctgcccttagatgtcagctcta

SEQ ID NO: 267004 - DNA, 25 bp, Homo sapien
gataacctgatcgtggccactcctg

SEQ ID NO: 267005 - DNA, 25 bp, Homo sapien
ttttgataacctgatcgtggccact

SEQ ID NO: 267006 - DNA, 25 bp, Homo sapien
tgcccttagatgtcagctctagctc

SEQ ID NO: 267007 - DNA, 25 bp, Homo sapien
ctgggcggctgtaggcagctgcggc

SEQ ID NO: 267008 - DNA, 25 bp, Homo sapien
gtggcggactctccggaggccctac

SEQ ID NO: 267009 - DNA, 25 bp, Homo sapien
gatggacatgttgggatccactgtg

SEQ ID NO: 267010 - DNA, 25 bp, Homo sapien
aggccctacagaaaggacgatgtca

SEQ ID NO: 267011 - DNA, 25 bp, Homo sapien
ggaccctagcttgcgcggcaatcat

SEQ ID NO: 267012 - DNA, 25 bp, Homo sapien
tgctctcggtttctgtcggccttgg

SEQ ID NO: 267013 - DNA, 25 bp, Homo sapien
cggcaaatagcgacatgctctcggt

SEQ ID NO: 267014 - DNA, 25 bp, Homo sapien
cagggcagttctctccggcaaatag

SEQ ID NO: 267015 - DNA, 25 bp, Homo sapien
tctgactctccccttcgggaggagc

SEQ ID NO: 267016 - DNA, 25 bp, Homo sapien
cccttcgggaggagctctgcgcaga

SEQ ID NO: 267017 - DNA, 25 bp, Homo sapien
ataagcagccgcaagggcgagcgca

SEQ ID NO: 267018 - DNA, 25 bp, Homo sapien
ctgagcataagcagccgcaagggcg

SEQ ID NO: 267019 - DNA, 25 bp, Homo sapien
ctgcgcggcgcctcttccgaaacac

SEQ ID NO: 267020 - DNA, 25 bp, Homo sapien
tggctgcgcggcgcctcttccgaaa

SEQ ID NO: 267021 - DNA, 25 bp, Homo sapien
gctggctgcgcggcgcctcttccga

SEQ ID NO: 267022 - DNA, 25 bp, Homo sapien
agagctggctgcgcggcgcctcttc

SEQ ID NO: 267023 - DNA, 25 bp, Homo sapien
agacacgaccccggtgtctccaatt

SEQ ID NO: 267024 - DNA, 25 bp, Homo sapien
agaatctcccagacacgaccccggt

SEQ ID NO: 267025 - DNA, 25 bp, Homo sapien
acgaccccggtgtctccaattacat

SEQ ID NO: 267026 - DNA, 25 bp, Homo sapien
tcccagacacgaccccggtgtctcc

SEQ ID NO: 267027 - DNA, 25 bp, Homo sapien
catgaagaaagttccgtggctcgct

SEQ ID NO: 267028 - DNA, 25 bp, Homo sapien
taccagcgtccctaggcttgtggcc

SEQ ID NO: 267029 - DNA, 25 bp, Homo sapien
gcgccgagtgcacaccatgaagaaa

SEQ ID NO: 267030 - DNA, 25 bp, Homo sapien
gaaagcgggctgtgctaccagcgtc

SEQ ID NO: 267031 - DNA, 25 bp, Homo sapien
tctttgggctcaggcaagatgccct

SEQ ID NO: 267032 - DNA, 25 bp, Homo sapien
gagggattctaaggcatgtttgcac

SEQ ID NO: 267033 - DNA, 25 bp, Homo sapien
ggtacagtggctcgaaacgtgacag

SEQ ID NO: 267034 - DNA, 25 bp, Homo sapien
gcaacagggaatcaagggagaacgt

SEQ ID NO: 267035 - DNA, 25 bp, Homo sapien
tgagagtggttacagagcctggcca

SEQ ID NO: 267036 - DNA, 25 bp, Homo sapien
cattgcaagtacatttggtggtgtc

SEQ ID NO: 267037 - DNA, 25 bp, Homo sapien
gccccagttgggctgccgtcaaata

SEQ ID NO: 267038 - DNA, 25 bp, Homo sapien
tcaaatacggcacagcctagctagg

SEQ ID NO: 267039 - DNA, 25 bp, Homo sapien
acagtgtatgcaaggtgaattcccc

SEQ ID NO: 267040 - DNA, 25 bp, Homo sapien
tatgaccaccactctagttcaaggc

SEQ ID NO: 267041 - DNA, 25 bp, Homo sapien
tccaagtgacagtggcgaaaggcta

SEQ ID NO: 267042 - DNA, 25 bp, Homo sapien
taacaccctgtgagctaatcctatc

SEQ ID NO: 267043 - DNA, 25 bp, Homo sapien
gattcaacaatttaattgaaccgaa

SEQ ID NO: 267044 - DNA, 25 bp, Homo sapien
tgagtagctgcaacttggcgtgtgc

SEQ ID NO: 267045 - DNA, 25 bp, Homo sapien
gagcattctttacctaccacctaga

SEQ ID NO: 267046 - DNA, 25 bp, Homo sapien
tcaaatttactaataagttgaaata

SEQ ID NO: 267047 - DNA, 25 bp, Homo sapien
tgtttacctaggaactcaagctgtt

SEQ ID NO: 267048 - DNA, 25 bp, Homo sapien
caataggtgctctcatatcctgctg

SEQ ID NO: 267049 - DNA, 25 bp, Homo sapien
taaggctgaatgtgctcataccatg

SEQ ID NO: 267050 - DNA, 25 bp, Homo sapien
gttgtctcagcctaatggactccca

SEQ ID NO: 267051 - DNA, 25 bp, Homo sapien
tataagcatcaatacttgcaacgat

SEQ ID NO: 267052 - DNA, 25 bp, Homo sapien
ccagattccgttaatacaaaatgtt

SEQ ID NO: 267053 - DNA, 25 bp, Homo sapien
ttgcaacgatatttaagctgcatgg

SEQ ID NO: 267054 - DNA, 25 bp, Homo sapien
agcataatgggctttctaaaggtat

SEQ ID NO: 267055 - DNA, 25 bp, Homo sapien
tagagcgagtcatcctcaataacga

SEQ ID NO: 267056 - DNA, 25 bp, Homo sapien
gcccttggatactgtagacacctgg

SEQ ID NO: 267057 - DNA, 25 bp, Homo sapien
aactctgatgggaaaatgcgtccgc

SEQ ID NO: 267058 - DNA, 25 bp, Homo sapien
cagccccgccgaattttggttggat

SEQ ID NO: 267059 - DNA, 25 bp, Homo sapien
aagagagccacctgcagcgcgaggc

SEQ ID NO: 267060 - DNA, 25 bp, Homo sapien
cggtgacgcgcatccttaagagagc

SEQ ID NO: 267061 - DNA, 25 bp, Homo sapien
agccagtgcaacttctccggcggga

SEQ ID NO: 267062 - DNA, 25 bp, Homo sapien
tccactttgcaccagtccgagggaa

SEQ ID NO: 267063 - DNA, 25 bp, Homo sapien
atcccgccgctgactgggtcctgag

SEQ ID NO: 267064 - DNA, 25 bp, Homo sapien
ccgccgctgactgggtcctgagcat

SEQ ID NO: 267065 - DNA, 25 bp, Homo sapien
ctaattgccttggttgacattgaaa

SEQ ID NO: 267066 - DNA, 25 bp, Homo sapien
tgccttggttgacattgaaaccctg

SEQ ID NO: 267067 - DNA, 25 bp, Homo sapien
gaatactgctgcactcaagctgatg

SEQ ID NO: 267068 - DNA, 25 bp, Homo sapien
tgccttgtgtccaagattcttggac

SEQ ID NO: 267069 - DNA, 25 bp, Homo sapien
aaagcagcagtatctttatgatttt

SEQ ID NO: 267070 - DNA, 25 bp, Homo sapien
ccctttttcatgaagatctctgcct

SEQ ID NO: 267071 - DNA, 25 bp, Homo sapien
ccgatttcccgtttcagctcatttc

SEQ ID NO: 267072 - DNA, 25 bp, Homo sapien
ttccgatttcccgtttcagctcatt

SEQ ID NO: 267073 - DNA, 25 bp, Homo sapien
tccgatttcccgtttcagctcattt

SEQ ID NO: 267074 - DNA, 25 bp, Homo sapien
ttttccgatttcccgtttcagctca

SEQ ID NO: 267075 - DNA, 25 bp, Homo sapien
ctagaggggtcacgcgggaggtgca

SEQ ID NO: 267076 - DNA, 25 bp, Homo sapien
agtgctggcctggatgcaactctca

SEQ ID NO: 267077 - DNA, 25 bp, Homo sapien
ctagtgctggcctggatgcaactct

SEQ ID NO: 267078 - DNA, 25 bp, Homo sapien
tagtgctggcctggatgcaactctc

SEQ ID NO: 267079 - DNA, 25 bp, Homo sapien
ccgcgccagctgcagtggttgccat

SEQ ID NO: 267080 - DNA, 25 bp, Homo sapien
ggcagagcccacagccgcgccagct

SEQ ID NO: 267081 - DNA, 25 bp, Homo sapien
acagccgcgccagctgcagtggttg

SEQ ID NO: 267082 - DNA, 25 bp, Homo sapien
agccgcgccagctgcagtggttgcc

SEQ ID NO: 267083 - DNA, 25 bp, Homo sapien
ccccagtaatggcgtgacccagtgt

SEQ ID NO: 267084 - DNA, 25 bp, Homo sapien
accccccagtaatggcgtgacccag

SEQ ID NO: 267085 - DNA, 25 bp, Homo sapien
ccagtaatggcgtgacccagtgtgt

SEQ ID NO: 267086 - DNA, 25 bp, Homo sapien
agtaatggcgtgacccagtgtgtgc

SEQ ID NO: 267087 - DNA, 25 bp, Homo sapien
gaaactgttcgatctcatagaagca

SEQ ID NO: 267088 - DNA, 25 bp, Homo sapien
cttgatgtcaccatggttctgggca

SEQ ID NO: 267089 - DNA, 25 bp, Homo sapien
acactccagaaactgttcgatctca

SEQ ID NO: 267090 - DNA, 25 bp, Homo sapien
taagtgatgtcaggcctcgcaggct

SEQ ID NO: 267091 - DNA, 25 bp, Homo sapien
ttcagcacctcattgaaaccctcac

SEQ ID NO: 267092 - DNA, 25 bp, Homo sapien
gtttcagcacctcattgaaaccctc

SEQ ID NO: 267093 - DNA, 25 bp, Homo sapien
tgtttcagcacctcattgaaaccct

SEQ ID NO: 267094 - DNA, 25 bp, Homo sapien
tttcagcacctcattgaaaccctca

SEQ ID NO: 267095 - DNA, 25 bp, Homo sapien
caggccaatcgttttgccagtcggc

SEQ ID NO: 267096 - DNA, 25 bp, Homo sapien
tcaggccaatcgttttgccagtcgg

SEQ ID NO: 267097 - DNA, 25 bp, Homo sapien
ttccatgaactccctcttttggctt

SEQ ID NO: 267098 - DNA, 25 bp, Homo sapien
tttccatgaactccctcttttggct

SEQ ID NO: 267099 - DNA, 25 bp, Homo sapien
tctttccatgaactccctcttttgg

SEQ ID NO: 267100 - DNA, 25 bp, Homo sapien
ctttccatgaactccctcttttggc

SEQ ID NO: 267101 - DNA, 25 bp, Homo sapien
aatgaatctagaaggtgaatcagag

SEQ ID NO: 267102 - DNA, 25 bp, Homo sapien
caggaatgaatctagaaggtgaatc

SEQ ID NO: 267103 - DNA, 25 bp, Homo sapien
tgtggctggggggatagcgatagag

SEQ ID NO: 267104 - DNA, 25 bp, Homo sapien
ggggatagcgatagagtagtcagga

SEQ ID NO: 267105 - DNA, 25 bp, Homo sapien
tggttcctccgagttgtttattcca

SEQ ID NO: 267106 - DNA, 25 bp, Homo sapien
gagacctgataccttccttatttgt

SEQ ID NO: 267107 - DNA, 25 bp, Homo sapien
tggcgccgaattctcacgagacctg

SEQ ID NO: 267108 - DNA, 25 bp, Homo sapien
catccgcgagctatcggcggttgga

SEQ ID NO: 267109 - DNA, 25 bp, Homo sapien
gcgggaggccgccgccactgttcat

SEQ ID NO: 267110 - DNA, 25 bp, Homo sapien
cgccgccagcgaggaggaggaaggg

SEQ ID NO: 267111 - DNA, 25 bp, Homo sapien
gggcgggaggccgccgccactgttc

SEQ ID NO: 267112 - DNA, 25 bp, Homo sapien
ccgccgccgccagcgaggaggagga

SEQ ID NO: 267113 - DNA, 25 bp, Homo sapien
cgtagtagcggcagtacttcagctt

SEQ ID NO: 267114 - DNA, 25 bp, Homo sapien
actcctccccgtagaagcaagtctt

SEQ ID NO: 267115 - DNA, 25 bp, Homo sapien
ctcctccccgtagaagcaagtctta

SEQ ID NO: 267116 - DNA, 25 bp, Homo sapien
tcctccccgtagaagcaagtcttat

SEQ ID NO: 267117 - DNA, 25 bp, Homo sapien
acactcctccccgtagaagcaagtc

SEQ ID NO: 267118 - DNA, 25 bp, Homo sapien
cccggcggcagggtcctcatgcagg

SEQ ID NO: 267119 - DNA, 25 bp, Homo sapien
cggcggcagggtcctcatgcaggaa

SEQ ID NO: 267120 - DNA, 25 bp, Homo sapien
cagccccggcggcagggtcctcatg

SEQ ID NO: 267121 - DNA, 25 bp, Homo sapien
ctatggaggccgaggcccggggcag

SEQ ID NO: 267122 - DNA, 25 bp, Homo sapien
cagccgcggtccatcgagtcccccg

SEQ ID NO: 267123 - DNA, 25 bp, Homo sapien
gagtcccccgctactgcctcctccg

SEQ ID NO: 267124 - DNA, 25 bp, Homo sapien
ggtccatcgagtcccccgctactgc

SEQ ID NO: 267125 - DNA, 25 bp, Homo sapien
cgcgacggctcccggcggaaagccg

SEQ ID NO: 267126 - DNA, 25 bp, Homo sapien
tgtcagtggctaccccaaataagct

SEQ ID NO: 267127 - DNA, 25 bp, Homo sapien
tcagagtacattaggcttccatgtg

SEQ ID NO: 267128 - DNA, 25 bp, Homo sapien
taagctagaaagagtgtctctggga

SEQ ID NO: 267129 - DNA, 25 bp, Homo sapien
tctatgtgcgaatgtggaacaaact

SEQ ID NO: 267130 - DNA, 25 bp, Homo sapien
tagtttgagatctatgccaagataa

SEQ ID NO: 267131 - DNA, 25 bp, Homo sapien
tcgaaagctgccaataaagcaataa

SEQ ID NO: 267132 - DNA, 25 bp, Homo sapien
gccaagataattactattttctaca

SEQ ID NO: 267133 - DNA, 25 bp, Homo sapien
tattttctacataatcgaaagctgc

SEQ ID NO: 267134 - DNA, 25 bp, Homo sapien
gggccatgtccgatacatctttgtt

SEQ ID NO: 267135 - DNA, 25 bp, Homo sapien
gtcataatttataatgtcaaactcc

SEQ ID NO: 267136 - DNA, 25 bp, Homo sapien
cactcacaaatgaccagggccatgt

SEQ ID NO: 267137 - DNA, 25 bp, Homo sapien
ttattaatctatgcactcacaaatg

SEQ ID NO: 267138 - DNA, 25 bp, Homo sapien
tgaatgagataaggaggaatcccct

SEQ ID NO: 267139 - DNA, 25 bp, Homo sapien
aacgtggccacagcttattatctgg

SEQ ID NO: 267140 - DNA, 25 bp, Homo sapien
caatcttaggaggtatatttccagg

SEQ ID NO: 267141 - DNA, 25 bp, Homo sapien
tagaagggccttcacaacgtggcca

SEQ ID NO: 267142 - DNA, 25 bp, Homo sapien
acccggctgattgcctccacttttc

SEQ ID NO: 267143 - DNA, 25 bp, Homo sapien
tgagcccagcctagcacatttgtac

SEQ ID NO: 267144 - DNA, 25 bp, Homo sapien
acctcctgggttctacaggtgtgcg

SEQ ID NO: 267145 - DNA, 25 bp, Homo sapien
ccacggcacccggctgattgcctcc

SEQ ID NO: 267146 - DNA, 25 bp, Homo sapien
gagctatgtgctcatctcttgaaac

SEQ ID NO: 267147 - DNA, 25 bp, Homo sapien
tattatccgaagaatgcaaaccctt

SEQ ID NO: 267148 - DNA, 25 bp, Homo sapien
ggtgattacaacttcaggatatggc

SEQ ID NO: 267149 - DNA, 25 bp, Homo sapien
cctaataatgccacattggacactg

SEQ ID NO: 267150 - DNA, 25 bp, Homo sapien
tgtatcagttaaagcacctccatcc

SEQ ID NO: 267151 - DNA, 25 bp, Homo sapien
ttgtatcagttaaagcacctccatc

SEQ ID NO: 267152 - DNA, 25 bp, Homo sapien
gatattttgtttctacagggcttcc

SEQ ID NO: 267153 - DNA, 25 bp, Homo sapien
caataaagctggtgctaaaatagga

SEQ ID NO: 267154 - DNA, 25 bp, Homo sapien
tacctgaaattgtggctcacaggca

SEQ ID NO: 267155 - DNA, 25 bp, Homo sapien
tgtatggtctctccatcctgtaagg

SEQ ID NO: 267156 - DNA, 25 bp, Homo sapien
taaattccaatatccactgaagagg

SEQ ID NO: 267157 - DNA, 25 bp, Homo sapien
gagggtacccgttgactatgaataa

SEQ ID NO: 267158 - DNA, 25 bp, Homo sapien
tgggctgaatatggcttggcactgt

SEQ ID NO: 267159 - DNA, 25 bp, Homo sapien
gggagctgctactattagtcattct

SEQ ID NO: 267160 - DNA, 25 bp, Homo sapien
gcttggggagctgctactattagtc

SEQ ID NO: 267161 - DNA, 25 bp, Homo sapien
catgggctgaatatggcttggcact

SEQ ID NO: 267162 - DNA, 25 bp, Homo sapien
tctttatgcccgtttacaattttca

SEQ ID NO: 267163 - DNA, 25 bp, Homo sapien
ctggaatctaaatctcaatagttag

SEQ ID NO: 267164 - DNA, 25 bp, Homo sapien
caatggttgtatattacttttagag

SEQ ID NO: 267165 - DNA, 25 bp, Homo sapien
ataagcaaaagggatcaggtcttac

SEQ ID NO: 267166 - DNA, 25 bp, Homo sapien
taagttacgtaagtttccacacata

SEQ ID NO: 267167 - DNA, 25 bp, Homo sapien
taaacaaggatgaagcaggtgatgt

SEQ ID NO: 267168 - DNA, 25 bp, Homo sapien
gatgttgagggcaccaaagtcatta

SEQ ID NO: 267169 - DNA, 25 bp, Homo sapien
aagtcattaaacaaggatgaagcag

SEQ ID NO: 267170 - DNA, 25 bp, Homo sapien
tctgagagatgttgagggcaccaaa

SEQ ID NO: 267171 - DNA, 25 bp, Homo sapien
gattaacatgcttacaatgggtcac

SEQ ID NO: 267172 - DNA, 25 bp, Homo sapien
gggataactatacaccgtgaagcca

SEQ ID NO: 267173 - DNA, 25 bp, Homo sapien
tagctgttgctgatcctaaccaaaa

SEQ ID NO: 267174 - DNA, 25 bp, Homo sapien
gtgaagccaacaccaccacagtctt

SEQ ID NO: 267175 - DNA, 25 bp, Homo sapien
taaggaaatccattaaacccacaga

SEQ ID NO: 267176 - DNA, 25 bp, Homo sapien
tccaggttgtattcgcttttcagca

SEQ ID NO: 267177 - DNA, 25 bp, Homo sapien
gctttgtctattgtcctgggtctgt

SEQ ID NO: 267178 - DNA, 25 bp, Homo sapien
tatccatgataagagcctataagga

SEQ ID NO: 267179 - DNA, 25 bp, Homo sapien
gagcttaggctagcatgtttgtgga

SEQ ID NO: 267180 - DNA, 25 bp, Homo sapien
agaagccaaccagctaaccttagaa

SEQ ID NO: 267181 - DNA, 25 bp, Homo sapien
gctactacacttcgcaaatagaatg

SEQ ID NO: 267182 - DNA, 25 bp, Homo sapien
tgagctatcaataatgctaggcccc

SEQ ID NO: 267183 - DNA, 25 bp, Homo sapien
tcacataattctgggacatagcgcc

SEQ ID NO: 267184 - DNA, 25 bp, Homo sapien
tgcagatcataaataggagactata

SEQ ID NO: 267185 - DNA, 25 bp, Homo sapien
taccatttgacaagtacaaggcatt

SEQ ID NO: 267186 - DNA, 25 bp, Homo sapien
tgtagctgtcactatgtagctgcca

SEQ ID NO: 267187 - DNA, 25 bp, Homo sapien
ttaaatcattcattgggccaggtga

SEQ ID NO: 267188 - DNA, 25 bp, Homo sapien
cttgaagtcggagtttgaaccagcc

SEQ ID NO: 267189 - DNA, 25 bp, Homo sapien
gcagtggcccaactatagctaattg

SEQ ID NO: 267190 - DNA, 25 bp, Homo sapien
cccttaggagtgtcaggagataggc

SEQ ID NO: 267191 - DNA, 25 bp, Homo sapien
tctgacatacagtaatataacccta

SEQ ID NO: 267192 - DNA, 25 bp, Homo sapien
catgccatggaaccacgttataagt

SEQ ID NO: 267193 - DNA, 25 bp, Homo sapien
tgtgaataagaataagtatgtaccc

SEQ ID NO: 267194 - DNA, 25 bp, Homo sapien
gtacccttagtgattcatgccatgg

SEQ ID NO: 267195 - DNA, 25 bp, Homo sapien
tttgcttttcgtgcctttgatccca

SEQ ID NO: 267196 - DNA, 25 bp, Homo sapien
tcctgatttacacctgtcagcaagg

SEQ ID NO: 267197 - DNA, 25 bp, Homo sapien
caaaccatattgatgggtactcctg

SEQ ID NO: 267198 - DNA, 25 bp, Homo sapien
ttgatcccatcggaactagcctctc

SEQ ID NO: 267199 - DNA, 25 bp, Homo sapien
tgtcaaagcacagtagtttccttct

SEQ ID NO: 267200 - DNA, 25 bp, Homo sapien
tggagccagggacgaaacaaagagt

SEQ ID NO: 267201 - DNA, 25 bp, Homo sapien
tacaaagacaggcagttgtggtcgt

SEQ ID NO: 267202 - DNA, 25 bp, Homo sapien
gcaaggaaggaatatttagtctcag

SEQ ID NO: 267203 - DNA, 25 bp, Homo sapien
acaagtaaaatactgggttggtgca

SEQ ID NO: 267204 - DNA, 25 bp, Homo sapien
taggtctgagaacattaaagatttc

SEQ ID NO: 267205 - DNA, 25 bp, Homo sapien
tctcccttccatgaagaacacaagg

SEQ ID NO: 267206 - DNA, 25 bp, Homo sapien
gaacacaaggtcattactctaaagt

SEQ ID NO: 267207 - DNA, 25 bp, Homo sapien
taaactttgtcacagtagacagaac

SEQ ID NO: 267208 - DNA, 25 bp, Homo sapien
gaggcaagatcagacaatcaggtag

SEQ ID NO: 267209 - DNA, 25 bp, Homo sapien
ggtcaactgtcaattgtagcagagg

SEQ ID NO: 267210 - DNA, 25 bp, Homo sapien
gggaggatccctaacttggtgttca

SEQ ID NO: 267211 - DNA, 25 bp, Homo sapien
tgagggcagtacaaaggccaagaag

SEQ ID NO: 267212 - DNA, 25 bp, Homo sapien
gtaacctggctagggacatttttgc

SEQ ID NO: 267213 - DNA, 25 bp, Homo sapien
gacacaagtagataaggttagcaca

SEQ ID NO: 267214 - DNA, 25 bp, Homo sapien
acagtcagcactccgtattcatggg

SEQ ID NO: 267215 - DNA, 25 bp, Homo sapien
agttatctgtgggtggtaacctggc

SEQ ID NO: 267216 - DNA, 25 bp, Homo sapien
cagataaaattggtggagacagcag

SEQ ID NO: 267217 - DNA, 25 bp, Homo sapien
tagcatgtgtatgttggaacccggc

SEQ ID NO: 267218 - DNA, 25 bp, Homo sapien
tgaagcaaactaagccctccgattt

SEQ ID NO: 267219 - DNA, 25 bp, Homo sapien
taaagcaattctctgtacataacag

SEQ ID NO: 267220 - DNA, 25 bp, Homo sapien
ccatctctacaccagtaccctccag

SEQ ID NO: 267221 - DNA, 25 bp, Homo sapien
ctgcagtgagccatctctacaccag

SEQ ID NO: 267222 - DNA, 25 bp, Homo sapien
gccatctctacaccagtaccctcca

SEQ ID NO: 267223 - DNA, 25 bp, Homo sapien
agtgagccatctctacaccagtacc

SEQ ID NO: 267224 - DNA, 25 bp, Homo sapien
cagctatcactacggtggtttttca

SEQ ID NO: 267225 - DNA, 25 bp, Homo sapien
taccagtttctgagtgcataaatgc

SEQ ID NO: 267226 - DNA, 25 bp, Homo sapien
caagtatggaattctagggtgacac

SEQ ID NO: 267227 - DNA, 25 bp, Homo sapien
tgagactcacaagaaatggtacctt

SEQ ID NO: 267228 - DNA, 25 bp, Homo sapien
atatcaatagtgagaccacattcat

SEQ ID NO: 267229 - DNA, 25 bp, Homo sapien
ttcaatgattcttttgttgattcca

SEQ ID NO: 267230 - DNA, 25 bp, Homo sapien
agggagatatcaatagtgagaccac

SEQ ID NO: 267231 - DNA, 25 bp, Homo sapien
caatagtgagaccacattcatgctc

SEQ ID NO: 267232 - DNA, 25 bp, Homo sapien
ggtcgccagcctgcccattcttgga

SEQ ID NO: 267233 - DNA, 25 bp, Homo sapien
ccagaagggcatggtcgccagcctg

SEQ ID NO: 267234 - DNA, 25 bp, Homo sapien
gagctactagcttcaatttcaccaa

SEQ ID NO: 267235 - DNA, 25 bp, Homo sapien
cattcttggagctactagcttcaat

SEQ ID NO: 267236 - DNA, 25 bp, Homo sapien
gtgtggttccactggtgctgccatc

SEQ ID NO: 267237 - DNA, 25 bp, Homo sapien
tgctgccatctttatgggtgacttt

SEQ ID NO: 267238 - DNA, 25 bp, Homo sapien
gctgccatctttatgggtgactttc

SEQ ID NO: 267239 - DNA, 25 bp, Homo sapien
caagcagtgtggttccactggtgct

SEQ ID NO: 267240 - DNA, 25 bp, Homo sapien
ggtccacagacacagtaccaatacc

SEQ ID NO: 267241 - DNA, 25 bp, Homo sapien
ttgtagacaccctggagaggctggt

SEQ ID NO: 267242 - DNA, 25 bp, Homo sapien
agtctccactcggtccacagacaca

SEQ ID NO: 267243 - DNA, 25 bp, Homo sapien
ccactcggtccacagacacagtacc

SEQ ID NO: 267244 - DNA, 25 bp, Homo sapien
caactgccttcattcgtgggtcatt

SEQ ID NO: 267245 - DNA, 25 bp, Homo sapien
actgccttcattcgtgggtcatttt

SEQ ID NO: 267246 - DNA, 25 bp, Homo sapien
tgtcaacagcaacactcccccaacg

SEQ ID NO: 267247 - DNA, 25 bp, Homo sapien
aacactcccccaacgaacatctttg

SEQ ID NO: 267248 - DNA, 25 bp, Homo sapien
attcagtacaagggcatagacagca

SEQ ID NO: 267249 - DNA, 25 bp, Homo sapien
gacagcactgatttagcctgaatgg

SEQ ID NO: 267250 - DNA, 25 bp, Homo sapien
tcagtacaagggcatagacagcact

SEQ ID NO: 267251 - DNA, 25 bp, Homo sapien
ctgtgtggcaattcagtacaagggc

SEQ ID NO: 267252 - DNA, 25 bp, Homo sapien
cttattaccaaaatggcaataaatc

SEQ ID NO: 267253 - DNA, 25 bp, Homo sapien
ttaccaaaatggcaataaatcttta

SEQ ID NO: 267254 - DNA, 25 bp, Homo sapien
taccaaaatggcaataaatctttac

SEQ ID NO: 267255 - DNA, 25 bp, Homo sapien
tattaccaaaatggcaataaatctt

SEQ ID NO: 267256 - DNA, 25 bp, Homo sapien
ttcaagaatttagggccatcttcca

SEQ ID NO: 267257 - DNA, 25 bp, Homo sapien
tcaagaatttagggccatcttccag

SEQ ID NO: 267258 - DNA, 25 bp, Homo sapien
cttcaagaatttagggccatcttcc

SEQ ID NO: 267259 - DNA, 25 bp, Homo sapien
aaacaactcagaagaggatggtctg

SEQ ID NO: 267260 - DNA, 25 bp, Homo sapien
tagccttctgagatttctgggcaaa

SEQ ID NO: 267261 - DNA, 25 bp, Homo sapien
tttagccttctgagatttctgggca

SEQ ID NO: 267262 - DNA, 25 bp, Homo sapien
atttagccttctgagatttctgggc

SEQ ID NO: 267263 - DNA, 25 bp, Homo sapien
agccttctgagatttctgggcaaac

SEQ ID NO: 267264 - DNA, 25 bp, Homo sapien
actgaaactaacagtcctgagacca

SEQ ID NO: 267265 - DNA, 25 bp, Homo sapien
ctgaaactaacagtcctgagaccat

SEQ ID NO: 267266 - DNA, 25 bp, Homo sapien
cattgcatatatggcccaaaaaggc

SEQ ID NO: 267267 - DNA, 25 bp, Homo sapien
aagagctcggcctgctttagctatc

SEQ ID NO: 267268 - DNA, 25 bp, Homo sapien
gaatcctgaccgttagcttaaatgt

SEQ ID NO: 267269 - DNA, 25 bp, Homo sapien
tcatgtccaaaacaaccaagtgctt

SEQ ID NO: 267270 - DNA, 25 bp, Homo sapien
gctatgagattacacggaaaacacc

SEQ ID NO: 267271 - DNA, 25 bp, Homo sapien
taatgcccatgcagtaccatgcgtg

SEQ ID NO: 267272 - DNA, 25 bp, Homo sapien
ggaaggtaacaagtcaccaggctaa

SEQ ID NO: 267273 - DNA, 25 bp, Homo sapien
caaaatactagatctggaaggtaac

SEQ ID NO: 267274 - DNA, 25 bp, Homo sapien
taaactcgcttgcagtaggatttgg

SEQ ID NO: 267275 - DNA, 25 bp, Homo sapien
gaggttgatcctcctttaggaataa

SEQ ID NO: 267276 - DNA, 25 bp, Homo sapien
taggaataaactcgcttgcagtagg

SEQ ID NO: 267277 - DNA, 25 bp, Homo sapien
ttgactgggacacgttactcagcct

SEQ ID NO: 267278 - DNA, 25 bp, Homo sapien
gagagaaaacttgagagaaggcaga

SEQ ID NO: 267279 - DNA, 25 bp, Homo sapien
agaaaacttgagagaaggcagacat

SEQ ID NO: 267280 - DNA, 25 bp, Homo sapien
gatgggtgagagaaaacttgagaga

SEQ ID NO: 267281 - DNA, 25 bp, Homo sapien
ggatgggtgagagaaaacttgagag

SEQ ID NO: 267282 - DNA, 25 bp, Homo sapien
ctggcgctaatccagcagtagcagg

SEQ ID NO: 267283 - DNA, 25 bp, Homo sapien
tggcgctaatccagcagtagcaggg

SEQ ID NO: 267284 - DNA, 25 bp, Homo sapien
cataagataccaatctgctcagcac

SEQ ID NO: 267285 - DNA, 25 bp, Homo sapien
ctttatgggtacattatgggcagaa

SEQ ID NO: 267286 - DNA, 25 bp, Homo sapien
tcaaagggtcacattgaactatgcc

SEQ ID NO: 267287 - DNA, 25 bp, Homo sapien
tcctgtataggttctagaagcctaa

SEQ ID NO: 267288 - DNA, 25 bp, Homo sapien
tcttaagttgtgttaaatcagtggt

SEQ ID NO: 267289 - DNA, 25 bp, Homo sapien
aatgtatctttaggctatgtgttac

SEQ ID NO: 267290 - DNA, 25 bp, Homo sapien
taacttcgtttccagagatctagtc

SEQ ID NO: 267291 - DNA, 25 bp, Homo sapien
tgtataacactctggaaattagtct

SEQ ID NO: 267292 - DNA, 25 bp, Homo sapien
aaaaatactcgggaaaattctgatg

SEQ ID NO: 267293 - DNA, 25 bp, Homo sapien
gggcccacacatgataattaagcag

SEQ ID NO: 267294 - DNA, 25 bp, Homo sapien
caaatgatacacaagaacaccatgc

SEQ ID NO: 267295 - DNA, 25 bp, Homo sapien
catgcagaaatgtgtgctgctcctg

SEQ ID NO: 267296 - DNA, 25 bp, Homo sapien
ccaatttggcaccataacctcagga

SEQ ID NO: 267297 - DNA, 25 bp, Homo sapien
tcccaacccttcaacattataagag

SEQ ID NO: 267298 - DNA, 25 bp, Homo sapien
tctgaacaagaacgacaaatattaa

SEQ ID NO: 267299 - DNA, 25 bp, Homo sapien
taaactgaaaacgatctgcttatcc

SEQ ID NO: 267300 - DNA, 25 bp, Homo sapien
gccataaacgtctcgcctcagtttc

SEQ ID NO: 267301 - DNA, 25 bp, Homo sapien
acatccctctctgcgccataaacgt

SEQ ID NO: 267302 - DNA, 25 bp, Homo sapien
tctctgcgccataaacgtctcgcct

SEQ ID NO: 267303 - DNA, 25 bp, Homo sapien
tgcgccataaacgtctcgcctcagt

SEQ ID NO: 267304 - DNA, 25 bp, Homo sapien
ggtgctctcaacctacttgactaaa

SEQ ID NO: 267305 - DNA, 25 bp, Homo sapien
agtaggcacattgctctgggtatca

SEQ ID NO: 267306 - DNA, 25 bp, Homo sapien
aagaaaaaatgatccctggtgctct

SEQ ID NO: 267307 - DNA, 25 bp, Homo sapien
tacagaattagaggaccactcctaa

SEQ ID NO: 267308 - DNA, 25 bp, Homo sapien
tcatgactaagcatcggcaactcct

SEQ ID NO: 267309 - DNA, 25 bp, Homo sapien
tgattactagttccagaaccatagg

SEQ ID NO: 267310 - DNA, 25 bp, Homo sapien
tgtctcactaacattaccaaggtgg

SEQ ID NO: 267311 - DNA, 25 bp, Homo sapien
aaatgaagtgatactagcctcagcc

SEQ ID NO: 267312 - DNA, 25 bp, Homo sapien
tagaggccatgtggatctaacccaa

SEQ ID NO: 267313 - DNA, 25 bp, Homo sapien
catttttacagcctccgggttgcgg

SEQ ID NO: 267314 - DNA, 25 bp, Homo sapien
ttttttacgttgaagctactagagc

SEQ ID NO: 267315 - DNA, 25 bp, Homo sapien
taccttatgactgcgtaacagtgac

SEQ ID NO: 267316 - DNA, 25 bp, Homo sapien
ggaccatgctagttttctctgtact

SEQ ID NO: 267317 - DNA, 25 bp, Homo sapien
ctgtactgttctaattttagcgtat

SEQ ID NO: 267318 - DNA, 25 bp, Homo sapien
tagttttctctgtactgttctaatt

SEQ ID NO: 267319 - DNA, 25 bp, Homo sapien
gtactgttctaattttagcgtatgt

SEQ ID NO: 267320 - DNA, 25 bp, Homo sapien
tccatcctttagtcgaatcagtcag

SEQ ID NO: 267321 - DNA, 25 bp, Homo sapien
gactgcaaagcttctatgctgacct

SEQ ID NO: 267322 - DNA, 25 bp, Homo sapien
taaacaaacagacccctcatagagc

SEQ ID NO: 267323 - DNA, 25 bp, Homo sapien
gctgacctctcagtgcatacaaatt

SEQ ID NO: 267324 - DNA, 25 bp, Homo sapien
cagcaatagctatcatcatcaaatt

SEQ ID NO: 267325 - DNA, 25 bp, Homo sapien
ggtaccaacaaccaagatgctaaat

SEQ ID NO: 267326 - DNA, 25 bp, Homo sapien
gaagatctcctcttttcttggtacc

SEQ ID NO: 267327 - DNA, 25 bp, Homo sapien
ggccatcacggaagaagtactaagt

SEQ ID NO: 267328 - DNA, 25 bp, Homo sapien
tctacacatccacttggagagaggt

SEQ ID NO: 267329 - DNA, 25 bp, Homo sapien
gaaagaatagaaccacactacagga

SEQ ID NO: 267330 - DNA, 25 bp, Homo sapien
tgtttaaccacaggaatcttacgct

SEQ ID NO: 267331 - DNA, 25 bp, Homo sapien
tgaagacaatactaacaagatgccc

SEQ ID NO: 267332 - DNA, 25 bp, Homo sapien
tccctacttgtctaaaatgaaatgc

SEQ ID NO: 267333 - DNA, 25 bp, Homo sapien
ataaactggccaagtaaccaaagat

SEQ ID NO: 267334 - DNA, 25 bp, Homo sapien
aagctagtctctaagactttccaaa

SEQ ID NO: 267335 - DNA, 25 bp, Homo sapien
caacagaactacaattcttgagccc

SEQ ID NO: 267336 - DNA, 25 bp, Homo sapien
gaaatttaatagcaagagtgaccaa

SEQ ID NO: 267337 - DNA, 25 bp, Homo sapien
gatttactgcaagaatagtctcctc

SEQ ID NO: 267338 - DNA, 25 bp, Homo sapien
ccaaatatgttagcagatttactgc

SEQ ID NO: 267339 - DNA, 25 bp, Homo sapien
tgggatcgtaagtgcaaagatgaag

SEQ ID NO: 267340 - DNA, 25 bp, Homo sapien
aaacattcatttggaagaaacatca

SEQ ID NO: 267341 - DNA, 25 bp, Homo sapien
tgcaaacattcatttggaagaaaca

SEQ ID NO: 267342 - DNA, 25 bp, Homo sapien
aatgcaaacattcatttggaagaaa

SEQ ID NO: 267343 - DNA, 25 bp, Homo sapien
caaacattcatttggaagaaacatc

SEQ ID NO: 267344 - DNA, 25 bp, Homo sapien
taatggagcaataattggttttaga

SEQ ID NO: 267345 - DNA, 25 bp, Homo sapien
tcttaatggagcaataattggtttt

SEQ ID NO: 267346 - DNA, 25 bp, Homo sapien
cttaatggagcaataattggtttta

SEQ ID NO: 267347 - DNA, 25 bp, Homo sapien
ttcttaatggagcaataattggttt

SEQ ID NO: 267348 - DNA, 25 bp, Homo sapien
aggagaagtatgtggagtaatcttg

SEQ ID NO: 267349 - DNA, 25 bp, Homo sapien
gagcaggagaagtatgtggagtaat

SEQ ID NO: 267350 - DNA, 25 bp, Homo sapien
gggaagacccagcagacaacgacat

SEQ ID NO: 267351 - DNA, 25 bp, Homo sapien
gcaggagaagtatgtggagtaatct

SEQ ID NO: 267352 - DNA, 25 bp, Homo sapien
gaagacggagtctgagaaacaggat

SEQ ID NO: 267353 - DNA, 25 bp, Homo sapien
gaaggcaccatgtaacttgctggat

SEQ ID NO: 267354 - DNA, 25 bp, Homo sapien
gatgtagaggcactagaaggcacca

SEQ ID NO: 267355 - DNA, 25 bp, Homo sapien
tatagaagtaagtcgtcccaccaac

SEQ ID NO: 267356 - DNA, 25 bp, Homo sapien
gggtgaaatagcgaacatccatctc

SEQ ID NO: 267357 - DNA, 25 bp, Homo sapien
taagatagcatagtttaggctgggc

SEQ ID NO: 267358 - DNA, 25 bp, Homo sapien
tgcgctgccctaacatgactgctct

SEQ ID NO: 267359 - DNA, 25 bp, Homo sapien
cctggccaactgatcaactgggtga

SEQ ID NO: 267360 - DNA, 25 bp, Homo sapien
ggagttcatcagccatgaagaagga

SEQ ID NO: 267361 - DNA, 25 bp, Homo sapien
tataagcaacgtgaggtgcagttgg

SEQ ID NO: 267362 - DNA, 25 bp, Homo sapien
gataaatatgatagtttggaaacac

SEQ ID NO: 267363 - DNA, 25 bp, Homo sapien
cgtttgctttcggttgcatataagc

SEQ ID NO: 267364 - DNA, 25 bp, Homo sapien
taaattcgatgtgctttactagagc

SEQ ID NO: 267365 - DNA, 25 bp, Homo sapien
aaaacactatactggtagaactcac

SEQ ID NO: 267366 - DNA, 25 bp, Homo sapien
aacacgtgactaacgctgtggctga

SEQ ID NO: 267367 - DNA, 25 bp, Homo sapien
tcaaggtctactagtaaactggtaa

SEQ ID NO: 267368 - DNA, 25 bp, Homo sapien
tctgcttgatcaatttgagccattg

SEQ ID NO: 267369 - DNA, 25 bp, Homo sapien
gcttgatcaatttgagccattgtta

SEQ ID NO: 267370 - DNA, 25 bp, Homo sapien
catatctgcttgatcaatttgagcc

SEQ ID NO: 267371 - DNA, 25 bp, Homo sapien
gccattgttattaaatgtctgttga

SEQ ID NO: 267372 - DNA, 25 bp, Homo sapien
gtttaccagccattggtcctgaagg

SEQ ID NO: 267373 - DNA, 25 bp, Homo sapien
gagacaacactcactagacgatgct

SEQ ID NO: 267374 - DNA, 25 bp, Homo sapien
tgtggtacagttagaacaacctagt

SEQ ID NO: 267375 - DNA, 25 bp, Homo sapien
cttaaggtgtaacagccagacatat

SEQ ID NO: 267376 - DNA, 25 bp, Homo sapien
tagctggagttacagttgggcacca

SEQ ID NO: 267377 - DNA, 25 bp, Homo sapien
agctggagttacagttgggcaccac

SEQ ID NO: 267378 - DNA, 25 bp, Homo sapien
tggagttacagttgggcaccaccac

SEQ ID NO: 267379 - DNA, 25 bp, Homo sapien
ggagttacagttgggcaccaccacg

SEQ ID NO: 267380 - DNA, 25 bp, Homo sapien
ataggctatggtagctgtcaacctc

SEQ ID NO: 267381 - DNA, 25 bp, Homo sapien
gagggaataggctatggtagctgtc

SEQ ID NO: 267382 - DNA, 25 bp, Homo sapien
gctatggtagctgtcaacctctgta

SEQ ID NO: 267383 - DNA, 25 bp, Homo sapien
atggtagctgtcaacctctgtagga

SEQ ID NO: 267384 - DNA, 25 bp, Homo sapien
tacttgatttctgtatccggttggg

SEQ ID NO: 267385 - DNA, 25 bp, Homo sapien
tgtttacagctttgtagcaagatgt

SEQ ID NO: 267386 - DNA, 25 bp, Homo sapien
cctccgaaggcaatatggcagatca

SEQ ID NO: 267387 - DNA, 25 bp, Homo sapien
tgtagcaagatgtaatatatccaaa

SEQ ID NO: 267388 - DNA, 25 bp, Homo sapien
ggctcagcaaatgctttagtggtaa

SEQ ID NO: 267389 - DNA, 25 bp, Homo sapien
cacgcaaagttacgatatttgagtg

SEQ ID NO: 267390 - DNA, 25 bp, Homo sapien
tagtggtaaatacttcacgcaaagt

SEQ ID NO: 267391 - DNA, 25 bp, Homo sapien
gcactttgtgttaacaagacgaaaa

SEQ ID NO: 267392 - DNA, 25 bp, Homo sapien
attaaagtgtctgctcatcatagtt

SEQ ID NO: 267393 - DNA, 25 bp, Homo sapien
gcatcagcattagggtcattaaagt

SEQ ID NO: 267394 - DNA, 25 bp, Homo sapien
taaagtgtctgctcatcatagtttc

SEQ ID NO: 267395 - DNA, 25 bp, Homo sapien
ctcttggtgaagtaggcatcagcat

SEQ ID NO: 267396 - DNA, 25 bp, Homo sapien
tatgtaattgttaaccaaataaata

SEQ ID NO: 267397 - DNA, 25 bp, Homo sapien
ttctgtaaccacttaattattgaat

SEQ ID NO: 267398 - DNA, 25 bp, Homo sapien
ttttctgtaaccacttaattattga

SEQ ID NO: 267399 - DNA, 25 bp, Homo sapien
tacgcaatgcagaacttagttggac

SEQ ID NO: 267400 - DNA, 25 bp, Homo sapien
tatatgcccaaataagagattctgg

SEQ ID NO: 267401 - DNA, 25 bp, Homo sapien
cctgggcaatggtccctcgtgctga

SEQ ID NO: 267402 - DNA, 25 bp, Homo sapien
caaacctgctgtatgaatggtacgc

SEQ ID NO: 267403 - DNA, 25 bp, Homo sapien
aaaactccaacacaatttactcgca

SEQ ID NO: 267404 - DNA, 25 bp, Homo sapien
aactccaacacaatttactcgcaac

SEQ ID NO: 267405 - DNA, 25 bp, Homo sapien
aaactccaacacaatttactcgcaa

SEQ ID NO: 267406 - DNA, 25 bp, Homo sapien
cattagaagatgatggtactggctc

SEQ ID NO: 267407 - DNA, 25 bp, Homo sapien
gaaagaagggtgtgaaacgtctgca

SEQ ID NO: 267408 - DNA, 25 bp, Homo sapien
gttgctatcaaccagaacagcttgg

SEQ ID NO: 267409 - DNA, 25 bp, Homo sapien
taatcggagccaactacctaggcac

SEQ ID NO: 267410 - DNA, 25 bp, Homo sapien
gtgattctcagaataacctggagct

SEQ ID NO: 267411 - DNA, 25 bp, Homo sapien
gcaggcagggtcctcaaatactggt

SEQ ID NO: 267412 - DNA, 25 bp, Homo sapien
tattaaaaagacgacttcgagcctc

SEQ ID NO: 267413 - DNA, 25 bp, Homo sapien
taatacactgacactactgcctaaa

SEQ ID NO: 267414 - DNA, 25 bp, Homo sapien
aaatcagattcttcaggtcagagga

SEQ ID NO: 267415 - DNA, 25 bp, Homo sapien
gccaaagagttgcaagccaaagcca

SEQ ID NO: 267416 - DNA, 25 bp, Homo sapien
cagaggaatagttgattgtcaccag

SEQ ID NO: 267417 - DNA, 25 bp, Homo sapien
taaattctctcgctgaattcctgcc

SEQ ID NO: 267418 - DNA, 25 bp, Homo sapien
taacaaagaacaggtgggcaatccc

SEQ ID NO: 267419 - DNA, 25 bp, Homo sapien
tgaataggatccagacaaccactgg

SEQ ID NO: 267420 - DNA, 25 bp, Homo sapien
tccagggctacacagaaagatcaga

SEQ ID NO: 267421 - DNA, 25 bp, Homo sapien
gcttctagtgctgtcacaagtagga

SEQ ID NO: 267422 - DNA, 25 bp, Homo sapien
cctgttttggtcagtcaacaaatac

SEQ ID NO: 267423 - DNA, 25 bp, Homo sapien
ataaaatcgagcaccaatcatgggc

SEQ ID NO: 267424 - DNA, 25 bp, Homo sapien
tcctctatgacatcatttctcattt

SEQ ID NO: 267425 - DNA, 25 bp, Homo sapien
agcagcatccaattgagtataaaat

SEQ ID NO: 267426 - DNA, 25 bp, Homo sapien
tgagtataaaatcgagcaccaatca

SEQ ID NO: 267427 - DNA, 25 bp, Homo sapien
gagcctaaacagtcttccattttga

SEQ ID NO: 267428 - DNA, 25 bp, Homo sapien
tgctaggagcctaaacagtcttcca

SEQ ID NO: 267429 - DNA, 25 bp, Homo sapien
tttgctaggagcctaaacagtcttc

SEQ ID NO: 267430 - DNA, 25 bp, Homo sapien
taggagcctaaacagtcttccattt

SEQ ID NO: 267431 - DNA, 25 bp, Homo sapien
cacagtatcaataatgtgtgaaagt

SEQ ID NO: 267432 - DNA, 25 bp, Homo sapien
tagaatttagtatgcattcacagta

SEQ ID NO: 267433 - DNA, 25 bp, Homo sapien
ttttctgaggacaatctagaattta

SEQ ID NO: 267434 - DNA, 25 bp, Homo sapien
tcacagtatcaataatgtgtgaaag

SEQ ID NO: 267435 - DNA, 25 bp, Homo sapien
taccaggccattaaagtatgaggag

SEQ ID NO: 267436 - DNA, 25 bp, Homo sapien
tagcatagtggttaggagcacacac

SEQ ID NO: 267437 - DNA, 25 bp, Homo sapien
tctggaaccatactgtctagactgg

SEQ ID NO: 267438 - DNA, 25 bp, Homo sapien
taacaatggtaactccatcataggg

SEQ ID NO: 267439 - DNA, 25 bp, Homo sapien
gagataactgcccagaaagtagaac

SEQ ID NO: 267440 - DNA, 25 bp, Homo sapien
ttatgactcaaaacctacaccaagg

SEQ ID NO: 267441 - DNA, 25 bp, Homo sapien
tatttgcagataacacctgggaaac

SEQ ID NO: 267442 - DNA, 25 bp, Homo sapien
acatctgagcgatgagaattccagg

SEQ ID NO: 267443 - DNA, 25 bp, Homo sapien
actcatgctgtatggtctgtggcca

SEQ ID NO: 267444 - DNA, 25 bp, Homo sapien
tcagcccctaccattagataaaatg

SEQ ID NO: 267445 - DNA, 25 bp, Homo sapien
gaactagtaagtctatgaattccag

SEQ ID NO: 267446 - DNA, 25 bp, Homo sapien
gggaaatcatcccttatgcattcct

SEQ ID NO: 267447 - DNA, 25 bp, Homo sapien
ttctgtcacctgatgaaaaagatga

SEQ ID NO: 267448 - DNA, 25 bp, Homo sapien
ccctaaagagtttcaacagataacg

SEQ ID NO: 267449 - DNA, 25 bp, Homo sapien
cagataacggtctccagtctctgac

SEQ ID NO: 267450 - DNA, 25 bp, Homo sapien
aattatatgactgaggtcaatccag

SEQ ID NO: 267451 - DNA, 25 bp, Homo sapien
tttccagcaaccccacagcaaatga

SEQ ID NO: 267452 - DNA, 25 bp, Homo sapien
ttccagcaaccccacagcaaatgag

SEQ ID NO: 267453 - DNA, 25 bp, Homo sapien
cagcgctttaagtcactgtaggtca

SEQ ID NO: 267454 - DNA, 25 bp, Homo sapien
ttaagtcactgtaggtcaccacaag

SEQ ID NO: 267455 - DNA, 25 bp, Homo sapien
tgtaggtcaccacaagtacactctt

SEQ ID NO: 267456 - DNA, 25 bp, Homo sapien
ttcaaagcagcgctttaagtcactg

SEQ ID NO: 267457 - DNA, 25 bp, Homo sapien
tgctattggttaaggtctttagcca

SEQ ID NO: 267458 - DNA, 25 bp, Homo sapien
gtcctgcgtgcttttttagcaaata

SEQ ID NO: 267459 - DNA, 25 bp, Homo sapien
ttaaggtctttagccatgtcctgcg

SEQ ID NO: 267460 - DNA, 25 bp, Homo sapien
tagtgcaatttgctattggttaagg

SEQ ID NO: 267461 - DNA, 25 bp, Homo sapien
ttgctcatctcctgttcgtttccca

SEQ ID NO: 267462 - DNA, 25 bp, Homo sapien
tcctgttcgtttcccaaatgtgaat

SEQ ID NO: 267463 - DNA, 25 bp, Homo sapien
cctgttcgtttcccaaatgtgaatg

SEQ ID NO: 267464 - DNA, 25 bp, Homo sapien
tgctcatctcctgttcgtttcccaa

SEQ ID NO: 267465 - DNA, 25 bp, Homo sapien
ttcacagataacagcctccaatggc

SEQ ID NO: 267466 - DNA, 25 bp, Homo sapien
gcaaccctcaatggcaaaaacgctg

SEQ ID NO: 267467 - DNA, 25 bp, Homo sapien
caatggcagccatagctcttgggta

SEQ ID NO: 267468 - DNA, 25 bp, Homo sapien
tgaactaacagtgggtggcatacag

SEQ ID NO: 267469 - DNA, 25 bp, Homo sapien
cctaaagtaatacactcctgaactt

SEQ ID NO: 267470 - DNA, 25 bp, Homo sapien
taatacactcctgaactttaggcct

SEQ ID NO: 267471 - DNA, 25 bp, Homo sapien
aagaacctaaagtaatacactcctg

SEQ ID NO: 267472 - DNA, 25 bp, Homo sapien
tcctgaactttaggcctttaacaca

SEQ ID NO: 267473 - DNA, 25 bp, Homo sapien
tcttgataccagaccactgctgagt

SEQ ID NO: 267474 - DNA, 25 bp, Homo sapien
ctgcaaaggcacagcagatcgttat

SEQ ID NO: 267475 - DNA, 25 bp, Homo sapien
gcagatcgttatccctccaaattca

SEQ ID NO: 267476 - DNA, 25 bp, Homo sapien
aaggcacagcagatcgttatccctc

SEQ ID NO: 267477 - DNA, 25 bp, Homo sapien
caagtttggcgacaactgcatgtcc

SEQ ID NO: 267478 - DNA, 25 bp, Homo sapien
cgcacagagtgagttattatcaaaa

SEQ ID NO: 267479 - DNA, 25 bp, Homo sapien
ttattcaggaatatcgcacagagtg

SEQ ID NO: 267480 - DNA, 25 bp, Homo sapien
gaaaattcctatgtatttggcagtc

SEQ ID NO: 267481 - DNA, 25 bp, Homo sapien
gcaagtgcttggaagtctgtcctga

SEQ ID NO: 267482 - DNA, 25 bp, Homo sapien
ccagtgctagtaaaacattcagtgc

SEQ ID NO: 267483 - DNA, 25 bp, Homo sapien
taaagcgtgtctctagtcttcaaag

SEQ ID NO: 267484 - DNA, 25 bp, Homo sapien
tcttcagttgcatggtgagcaccca

SEQ ID NO: 267485 - DNA, 25 bp, Homo sapien
gacatccaaatcacagaaccaaggt

SEQ ID NO: 267486 - DNA, 25 bp, Homo sapien
gaccaacgttacatgatttcaaggg

SEQ ID NO: 267487 - DNA, 25 bp, Homo sapien
tgtaaacttgccttgcacagggaag

SEQ ID NO: 267488 - DNA, 25 bp, Homo sapien
caactgatgctaccaaacgtggact

SEQ ID NO: 267489 - DNA, 25 bp, Homo sapien
taagtaaccgaagaatgtatgcctc

SEQ ID NO: 267490 - DNA, 25 bp, Homo sapien
gaagactcactagccagaagagagg

SEQ ID NO: 267491 - DNA, 25 bp, Homo sapien
gcagcggcttttgtggaagactcac

SEQ ID NO: 267492 - DNA, 25 bp, Homo sapien
gatgggaccgtcatcagcacattcc

SEQ ID NO: 267493 - DNA, 25 bp, Homo sapien
tgaattgacaaccacgggaggcagt

SEQ ID NO: 267494 - DNA, 25 bp, Homo sapien
tatttagccgtgtagccatgccagg

SEQ ID NO: 267495 - DNA, 25 bp, Homo sapien
taaggtacctagtgcaccccgatag

SEQ ID NO: 267496 - DNA, 25 bp, Homo sapien
gacccaagtccctgcgtggtaggaa

SEQ ID NO: 267497 - DNA, 25 bp, Homo sapien
gaagacaatattagctgacaggctg

SEQ ID NO: 267498 - DNA, 25 bp, Homo sapien
gactcaccaggccttatgacaaatg

SEQ ID NO: 267499 - DNA, 25 bp, Homo sapien
cttactatgtaccatgggcttgcca

SEQ ID NO: 267500 - DNA, 25 bp, Homo sapien
cctaagtgacaaagcttgaagcgct

SEQ ID NO: 267501 - DNA, 25 bp, Homo sapien
ttttactcaacttgaatttatgttc

SEQ ID NO: 267502 - DNA, 25 bp, Homo sapien
ttactcaacttgaatttatgttcct

SEQ ID NO: 267503 - DNA, 25 bp, Homo sapien
cattttactcaacttgaatttatgt

SEQ ID NO: 267504 - DNA, 25 bp, Homo sapien
tttactcaacttgaatttatgttcc

SEQ ID NO: 267505 - DNA, 25 bp, Homo sapien
gtgtcatttatggattaatcgtttt

SEQ ID NO: 267506 - DNA, 25 bp, Homo sapien
aatcactcatctttttagtgtcatt

SEQ ID NO: 267507 - DNA, 25 bp, Homo sapien
agtgtcatttatggattaatcgttt

SEQ ID NO: 267508 - DNA, 25 bp, Homo sapien
tcatttatggattaatcgtttttca

SEQ ID NO: 267509 - DNA, 25 bp, Homo sapien
ttttgttgtactatattggttggca

SEQ ID NO: 267510 - DNA, 25 bp, Homo sapien
caaaaactacaaatctgtgcctctg

SEQ ID NO: 267511 - DNA, 25 bp, Homo sapien
ccctcctaactagaatgtatacaca

SEQ ID NO: 267512 - DNA, 25 bp, Homo sapien
ggtactgctgttcttatgtgggatt

SEQ ID NO: 267513 - DNA, 25 bp, Homo sapien
gaggcaaaagaatcattgctatcat

SEQ ID NO: 267514 - DNA, 25 bp, Homo sapien
gagaagactaatgataaactgtaga

SEQ ID NO: 267515 - DNA, 25 bp, Homo sapien
cattctacactagtttgaagaagtt

SEQ ID NO: 267516 - DNA, 25 bp, Homo sapien
tatcgtaacgttctgcttagtgggc

SEQ ID NO: 267517 - DNA, 25 bp, Homo sapien
ccaaacggaggatagaagctgtgta

SEQ ID NO: 267518 - DNA, 25 bp, Homo sapien
gaaatatgggttcaacgcacctccc

SEQ ID NO: 267519 - DNA, 25 bp, Homo sapien
tgaaaagtgaaagaacctggtgggc

SEQ ID NO: 267520 - DNA, 25 bp, Homo sapien
caatttgaagggatcagctacactg

SEQ ID NO: 267521 - DNA, 25 bp, Homo sapien
tcgtgtaaggagtggaccatcattc

SEQ ID NO: 267522 - DNA, 25 bp, Homo sapien
gcatagttcagcgttgccaactcat

SEQ ID NO: 267523 - DNA, 25 bp, Homo sapien
gaaaaatttctcaggtactaccatg

SEQ ID NO: 267524 - DNA, 25 bp, Homo sapien
tgaatgaatacagcttggccatggt

SEQ ID NO: 267525 - DNA, 25 bp, Homo sapien
gatcagcgccttcagcaagcaatag

SEQ ID NO: 267526 - DNA, 25 bp, Homo sapien
gggagtctaccaccactgaaattgg

SEQ ID NO: 267527 - DNA, 25 bp, Homo sapien
taactggatagagcgagggatgcca

SEQ ID NO: 267528 - DNA, 25 bp, Homo sapien
gcatagtccctggaagagaggcact

SEQ ID NO: 267529 - DNA, 25 bp, Homo sapien
tctgaaacctgcagaagaaccctcc

SEQ ID NO: 267530 - DNA, 25 bp, Homo sapien
gctaatcacattggatgaggagccc

SEQ ID NO: 267531 - DNA, 25 bp, Homo sapien
tacatgctggtggttgcccgcaatc

SEQ ID NO: 267532 - DNA, 25 bp, Homo sapien
gaggagccctcccttacttagctta

SEQ ID NO: 267533 - DNA, 25 bp, Homo sapien
atatctttaagccctgacatgtcac

SEQ ID NO: 267534 - DNA, 25 bp, Homo sapien
atctttaagccctgacatgtcacat

SEQ ID NO: 267535 - DNA, 25 bp, Homo sapien
cttgatatctttaagccctgacatg

SEQ ID NO: 267536 - DNA, 25 bp, Homo sapien
tgatatctttaagccctgacatgtc

SEQ ID NO: 267537 - DNA, 25 bp, Homo sapien
ttcatccccagaccgaaagaaggtg

SEQ ID NO: 267538 - DNA, 25 bp, Homo sapien
aggtgttcacgctttcatgcaggtc

SEQ ID NO: 267539 - DNA, 25 bp, Homo sapien
cagcagggacatcaacagagtagca

SEQ ID NO: 267540 - DNA, 25 bp, Homo sapien
gcaatctgcaggcttcatcgccgag

SEQ ID NO: 267541 - DNA, 25 bp, Homo sapien
gattacatacctactccacacaagg

SEQ ID NO: 267542 - DNA, 25 bp, Homo sapien
ctgaactgagttttcccactcggag

SEQ ID NO: 267543 - DNA, 25 bp, Homo sapien
tggtggttctgtgcaatccactcat

SEQ ID NO: 267544 - DNA, 25 bp, Homo sapien
tgtctgcagatgttgattacatacc

SEQ ID NO: 267545 - DNA, 25 bp, Homo sapien
tcatgtccccgatcctccaaattct

SEQ ID NO: 267546 - DNA, 25 bp, Homo sapien
catccaagcagtttgccgtcaaggg

SEQ ID NO: 267547 - DNA, 25 bp, Homo sapien
tagataactgtaagggactaaccat

SEQ ID NO: 267548 - DNA, 25 bp, Homo sapien
acatatgagtgggaggtaggccggg

SEQ ID NO: 267549 - DNA, 25 bp, Homo sapien
aaattatttcctcttggctctgggt

SEQ ID NO: 267550 - DNA, 25 bp, Homo sapien
ttatttcctcttggctctgggtcat

SEQ ID NO: 267551 - DNA, 25 bp, Homo sapien
ctggaatgagaacattttggttgaa

SEQ ID NO: 267552 - DNA, 25 bp, Homo sapien
gaaaattatttcctcttggctctgg

SEQ ID NO: 267553 - DNA, 25 bp, Homo sapien
gctcttatcatagaggccctgattt

SEQ ID NO: 267554 - DNA, 25 bp, Homo sapien
gacagctgaccccaagattctgagt

SEQ ID NO: 267555 - DNA, 25 bp, Homo sapien
cagcagcctctgatgactaacatga

SEQ ID NO: 267556 - DNA, 25 bp, Homo sapien
acaccagcaagggaggacagctgac

SEQ ID NO: 267557 - DNA, 25 bp, Homo sapien
caaaaaccagcagcggtaagtatcc

SEQ ID NO: 267558 - DNA, 25 bp, Homo sapien
acacatttcatgtgcctcttactgt

SEQ ID NO: 267559 - DNA, 25 bp, Homo sapien
tcagggaggtgtcattgtctcgctg

SEQ ID NO: 267560 - DNA, 25 bp, Homo sapien
cattgtgccgctgccgatcacacat

SEQ ID NO: 267561 - DNA, 25 bp, Homo sapien
ttgacgtcaccagaaggaggtgccg

SEQ ID NO: 267562 - DNA, 25 bp, Homo sapien
tccgtagccgcagggaagcgagcct

SEQ ID NO: 267563 - DNA, 25 bp, Homo sapien
tgggggaccccttgacgtcaccaga

SEQ ID NO: 267564 - DNA, 25 bp, Homo sapien
ggaccccttgacgtcaccagaagga

SEQ ID NO: 267565 - DNA, 25 bp, Homo sapien
gagctgatggaggactaaacacccc

SEQ ID NO: 267566 - DNA, 25 bp, Homo sapien
tcttcccaaaggtgccaagcaagcg

SEQ ID NO: 267567 - DNA, 25 bp, Homo sapien
tcaatgcggccgaaaaagacacgga

SEQ ID NO: 267568 - DNA, 25 bp, Homo sapien
tcaggtgagaccaacagacactgtg

SEQ ID NO: 267569 - DNA, 25 bp, Homo sapien
aactacctctaggagtagggaaatg

SEQ ID NO: 267570 - DNA, 25 bp, Homo sapien
gtagggaaatgataattgtgctgca

SEQ ID NO: 267571 - DNA, 25 bp, Homo sapien
actacctctaggagtagggaaatga

SEQ ID NO: 267572 - DNA, 25 bp, Homo sapien
tacctctaggagtagggaaatgata

SEQ ID NO: 267573 - DNA, 25 bp, Homo sapien
atataaactgttactaccttcaaag

SEQ ID NO: 267574 - DNA, 25 bp, Homo sapien
ttattaccttctccgcctttccaga

SEQ ID NO: 267575 - DNA, 25 bp, Homo sapien
tataaactgttactaccttcaaagc

SEQ ID NO: 267576 - DNA, 25 bp, Homo sapien
cttctccgcctttccagaatgcctt

SEQ ID NO: 267577 - DNA, 25 bp, Homo sapien
gtggctggctgctccgtgactgctg

SEQ ID NO: 267578 - DNA, 25 bp, Homo sapien
catgacaagtgtgtccaggaggagc

SEQ ID NO: 267579 - DNA, 25 bp, Homo sapien
cgtgtttccgtaggcctggctgact

SEQ ID NO: 267580 - DNA, 25 bp, Homo sapien
ggtgacacagccgtgtttccgtagg

SEQ ID NO: 267581 - DNA, 25 bp, Homo sapien
ctccacagtaggtttcactgagctt

SEQ ID NO: 267582 - DNA, 25 bp, Homo sapien
ttcactgagcttggggatctaactt

SEQ ID NO: 267583 - DNA, 25 bp, Homo sapien
cacagtaggtttcactgagcttggg

SEQ ID NO: 267584 - DNA, 25 bp, Homo sapien
gagcttggggatctaactttcttac

SEQ ID NO: 267585 - DNA, 25 bp, Homo sapien
ctggagctcaaccagatcatgcagt

SEQ ID NO: 267586 - DNA, 25 bp, Homo sapien
tcttaatatagaaatccaatgtagt

SEQ ID NO: 267587 - DNA, 25 bp, Homo sapien
tgcgatcgccttgcaggtttgggtc

SEQ ID NO: 267588 - DNA, 25 bp, Homo sapien
ctagggatgtttgcgatggccttgc

SEQ ID NO: 267589 - DNA, 25 bp, Homo sapien
tttgggtctgcaaggctagattcca

SEQ ID NO: 267590 - DNA, 25 bp, Homo sapien
ccttgcgggtttgtttgcgatcgcc

SEQ ID NO: 267591 - DNA, 25 bp, Homo sapien
gctgctgcttttgcaacggtctgac

SEQ ID NO: 267592 - DNA, 25 bp, Homo sapien
gagcatcgtcggcagggtcgcctct

SEQ ID NO: 267593 - DNA, 25 bp, Homo sapien
ccctctgacatgagcatcgtcggca

SEQ ID NO: 267594 - DNA, 25 bp, Homo sapien
ttatgatcaactgtggacgcccctc

SEQ ID NO: 267595 - DNA, 25 bp, Homo sapien
ggctcctgtgtcagtcttgttggca

SEQ ID NO: 267596 - DNA, 25 bp, Homo sapien
tcttgttggcaccagcgttgtacga

SEQ ID NO: 267597 - DNA, 25 bp, Homo sapien
cagcgttgtacgatgcaggaaacag

SEQ ID NO: 267598 - DNA, 25 bp, Homo sapien
catcgccacattgttcgcgggacaa

SEQ ID NO: 267599 - DNA, 25 bp, Homo sapien
tccaaaacatcaagtttaacaattc

SEQ ID NO: 267600 - DNA, 25 bp, Homo sapien
ccaggttccactgtaatctgacttc

SEQ ID NO: 267601 - DNA, 25 bp, Homo sapien
ccattgtgtggatgtgctacaattt

SEQ ID NO: 267602 - DNA, 25 bp, Homo sapien
ccatatctttgcatgtgtcaccagt

SEQ ID NO: 267603 - DNA, 25 bp, Homo sapien
cattcactagctgacaaacattcaa

SEQ ID NO: 267604 - DNA, 25 bp, Homo sapien
tttagcactgaggagtagtccattg

SEQ ID NO: 267605 - DNA, 25 bp, Homo sapien
gatgtcattggccaacccatggaga

SEQ ID NO: 267606 - DNA, 25 bp, Homo sapien
cacgtgtgtgtagagagaagcctca

SEQ ID NO: 267607 - DNA, 25 bp, Homo sapien
caatttcacggcctgttcaccaggg

SEQ ID NO: 267608 - DNA, 25 bp, Homo sapien
tgtagcagcttacacgcattgtgag

SEQ ID NO: 267609 - DNA, 25 bp, Homo sapien
gcttgatcccgcagttgctctggaa

SEQ ID NO: 267610 - DNA, 25 bp, Homo sapien
gaacataaatggcaccaccacagag

SEQ ID NO: 267611 - DNA, 25 bp, Homo sapien
cattgacactgaacagctgggcttt

SEQ ID NO: 267612 - DNA, 25 bp, Homo sapien
tctcgcagacattgaggtggctccc

SEQ ID NO: 267613 - DNA, 25 bp, Homo sapien
cctcgtttcccgttgactgtggata

SEQ ID NO: 267614 - DNA, 25 bp, Homo sapien
gaaggcatctgctttgtggtatctg

SEQ ID NO: 267615 - DNA, 25 bp, Homo sapien
tgagttcatagtctgctcagttccc

SEQ ID NO: 267616 - DNA, 25 bp, Homo sapien
tcagttcccgtgagcaagcaatcat

SEQ ID NO: 267617 - DNA, 25 bp, Homo sapien
aacagaggaagatgtaggactgtga

SEQ ID NO: 267618 - DNA, 25 bp, Homo sapien
gaaacagaggaagatgtaggactgt

SEQ ID NO: 267619 - DNA, 25 bp, Homo sapien
cagaggaagatgtaggactgtgact

SEQ ID NO: 267620 - DNA, 25 bp, Homo sapien
ggaaacagaggaagatgtaggactg

SEQ ID NO: 267621 - DNA, 25 bp, Homo sapien
ctcaaaaggcttatagagcatccga

SEQ ID NO: 267622 - DNA, 25 bp, Homo sapien
agtctccagtcctggcgcaataaca

SEQ ID NO: 267623 - DNA, 25 bp, Homo sapien
ccaaatgttgcaaccagcttctcag

SEQ ID NO: 267624 - DNA, 25 bp, Homo sapien
tccgaagcgaagacgccaaatgttg

SEQ ID NO: 267625 - DNA, 25 bp, Homo sapien
ccaaccaaggagctgtggtgaaggc

SEQ ID NO: 267626 - DNA, 25 bp, Homo sapien
ccgcagagctgcagtagggaaggac

SEQ ID NO: 267627 - DNA, 25 bp, Homo sapien
tgaaggccgtaggtgaacgccagcc

SEQ ID NO: 267628 - DNA, 25 bp, Homo sapien
agaacccgatcttcacgccgcagag

SEQ ID NO: 267629 - DNA, 25 bp, Homo sapien
gatcaggaatcctgacttgcgacat

SEQ ID NO: 267630 - DNA, 25 bp, Homo sapien
ggatcaggaatcctgacttgcgaca

SEQ ID NO: 267631 - DNA, 25 bp, Homo sapien
cttgaacgatcacaacataacccct

SEQ ID NO: 267632 - DNA, 25 bp, Homo sapien
tgaacgatcacaacataacccctga

SEQ ID NO: 267633 - DNA, 25 bp, Homo sapien
aacgatcacaacataacccctgata

SEQ ID NO: 267634 - DNA, 25 bp, Homo sapien
cgatcacaacataacccctgataca

SEQ ID NO: 267635 - DNA, 25 bp, Homo sapien
ccgattctcaagtgggtgctaggac

SEQ ID NO: 267636 - DNA, 25 bp, Homo sapien
ctgagccgattctcaagtgggtgct

SEQ ID NO: 267637 - DNA, 25 bp, Homo sapien
gccgattctcaagtgggtgctagga

SEQ ID NO: 267638 - DNA, 25 bp, Homo sapien
gagccgattctcaagtgggtgctag

SEQ ID NO: 267639 - DNA, 25 bp, Homo sapien
gtggtctcctagtgctatgaccacc

SEQ ID NO: 267640 - DNA, 25 bp, Homo sapien
tcctagtgctatgaccaccttctgt

SEQ ID NO: 267641 - DNA, 25 bp, Homo sapien
ggtctcctagtgctatgaccacctt

SEQ ID NO: 267642 - DNA, 25 bp, Homo sapien
ctagtgctatgaccaccttctgtat

SEQ ID NO: 267643 - DNA, 25 bp, Homo sapien
atcttcttggtaagccagtccgcct

SEQ ID NO: 267644 - DNA, 25 bp, Homo sapien
tgagcatgcatcttcttggtaagcc

SEQ ID NO: 267645 - DNA, 25 bp, Homo sapien
tgcatcttcttggtaagccagtccg

SEQ ID NO: 267646 - DNA, 25 bp, Homo sapien
taacatttcgtcagttttgtccagc

SEQ ID NO: 267647 - DNA, 25 bp, Homo sapien
ccatatctccatgcatggcagagac

SEQ ID NO: 267648 - DNA, 25 bp, Homo sapien
tcattccttctggtccatatctcca

SEQ ID NO: 267649 - DNA, 25 bp, Homo sapien
gtccatatctccatgcatggcagag

SEQ ID NO: 267650 - DNA, 25 bp, Homo sapien
tggtccatatctccatgcatggcag

SEQ ID NO: 267651 - DNA, 25 bp, Homo sapien
gccaaactgtccacgtcgaccgatt

SEQ ID NO: 267652 - DNA, 25 bp, Homo sapien
actgtccacgtcgaccgattctgtg

SEQ ID NO: 267653 - DNA, 25 bp, Homo sapien
gtgataatcaaaactctgctagagc

SEQ ID NO: 267654 - DNA, 25 bp, Homo sapien
tacggccaaactgtccacgtcgacc

SEQ ID NO: 267655 - DNA, 25 bp, Homo sapien
aggtattatagaaggtctcgatgtc

SEQ ID NO: 267656 - DNA, 25 bp, Homo sapien
attatagaaggtctcgatgtctcaa

SEQ ID NO: 267657 - DNA, 25 bp, Homo sapien
ggaggtattatagaaggtctcgatg

SEQ ID NO: 267658 - DNA, 25 bp, Homo sapien
atggaggtattatagaaggtctcga

SEQ ID NO: 267659 - DNA, 25 bp, Homo sapien
catgaggtcttaacacgttgcctag

SEQ ID NO: 267660 - DNA, 25 bp, Homo sapien
ttagacatgaggtcttaacacgttg

SEQ ID NO: 267661 - DNA, 25 bp, Homo sapien
ggccctccatccctaatttcctctc

SEQ ID NO: 267662 - DNA, 25 bp, Homo sapien
gacatgaggtcttaacacgttgcct

SEQ ID NO: 267663 - DNA, 25 bp, Homo sapien
tgacacccgagccacaagcagacat

SEQ ID NO: 267664 - DNA, 25 bp, Homo sapien
ctgacacccgagccacaagcagaca

SEQ ID NO: 267665 - DNA, 25 bp, Homo sapien
aagtgcgtccgtcctggcgaggaag

SEQ ID NO: 267666 - DNA, 25 bp, Homo sapien
gggccaagggcgcagtaagggtgtg

SEQ ID NO: 267667 - DNA, 25 bp, Homo sapien
gccaagggcgcagtaagggtgtggg

SEQ ID NO: 267668 - DNA, 25 bp, Homo sapien
cgccggaagtgcgtccgtcctggcg

SEQ ID NO: 267669 - DNA, 25 bp, Homo sapien
accgtcagtcgaccccgccgctcac

SEQ ID NO: 267670 - DNA, 25 bp, Homo sapien
ctctgccccgttaccgtcagtcgac

SEQ ID NO: 267671 - DNA, 25 bp, Homo sapien
ttaccgtcagtcgaccccgccgctc

SEQ ID NO: 267672 - DNA, 25 bp, Homo sapien
tctgccccgttaccgtcagtcgacc

SEQ ID NO: 267673 - DNA, 25 bp, Homo sapien
aaagctgcgttacacaaatgcgacc

SEQ ID NO: 267674 - DNA, 25 bp, Homo sapien
tgtgggctgtttactaggcagttac

SEQ ID NO: 267675 - DNA, 25 bp, Homo sapien
caaacagggaatagcaactgtctga

SEQ ID NO: 267676 - DNA, 25 bp, Homo sapien
gctcccagaggttacccgtcaagga

SEQ ID NO: 267677 - DNA, 25 bp, Homo sapien
tgtggcaatggtgactcagtgttct

SEQ ID NO: 267678 - DNA, 25 bp, Homo sapien
gtaccgatatcagagtctgtggcaa

SEQ ID NO: 267679 - DNA, 25 bp, Homo sapien
agagtctgtggcaatggtgactcag

SEQ ID NO: 267680 - DNA, 25 bp, Homo sapien
cagcagtaccgatatcagagtctgt

SEQ ID NO: 267681 - DNA, 25 bp, Homo sapien
tagaaactttctagatttggatgga

SEQ ID NO: 267682 - DNA, 25 bp, Homo sapien
ttctagatttggatggatggcctac

SEQ ID NO: 267683 - DNA, 25 bp, Homo sapien
caatagaaactttctagatttggat

SEQ ID NO: 267684 - DNA, 25 bp, Homo sapien
aactttctagatttggatggatggc

SEQ ID NO: 267685 - DNA, 25 bp, Homo sapien
ggagccgagaaaggcaaatctacga

SEQ ID NO: 267686 - DNA, 25 bp, Homo sapien
tactagttacatttgagagtgccta

SEQ ID NO: 267687 - DNA, 25 bp, Homo sapien
tttctaataaaggaaggagccgaga

SEQ ID NO: 267688 - DNA, 25 bp, Homo sapien
gaaaaggtgaattctgacttctgga

SEQ ID NO: 267689 - DNA, 25 bp, Homo sapien
ccagttctgtatatcaaggttttcc

SEQ ID NO: 267690 - DNA, 25 bp, Homo sapien
ggttttcctcaagcatgaaacctcc

SEQ ID NO: 267691 - DNA, 25 bp, Homo sapien
aaatctttgttggttcatcgatgtc

SEQ ID NO: 267692 - DNA, 25 bp, Homo sapien
ttcatcgatgtctgaagcacaaagt

SEQ ID NO: 267693 - DNA, 25 bp, Homo sapien
cagctacaggtagttttagtatcaa

SEQ ID NO: 267694 - DNA, 25 bp, Homo sapien
aacagcattctactgggtcttgctg

SEQ ID NO: 267695 - DNA, 25 bp, Homo sapien
cgtttgtatatttgatttagtcagg

SEQ ID NO: 267696 - DNA, 25 bp, Homo sapien
tgcacggcccaagacgctaacttta

SEQ ID NO: 267697 - DNA, 25 bp, Homo sapien
tcaaaaggtccacttgctgaaagtt

SEQ ID NO: 267698 - DNA, 25 bp, Homo sapien
tactgtcctttagctcagatccaag

SEQ ID NO: 267699 - DNA, 25 bp, Homo sapien
gctcagatccaagtcctctggcatt

SEQ ID NO: 267700 - DNA, 25 bp, Homo sapien
ctttcaaaaggtccacttgctgaaa

SEQ ID NO: 267701 - DNA, 25 bp, Homo sapien
gatgagacacctcttccactacaga

SEQ ID NO: 267702 - DNA, 25 bp, Homo sapien
ggatgctctaattgggaacctacta

SEQ ID NO: 267703 - DNA, 25 bp, Homo sapien
caaatcatgctaatgggcaccactg

SEQ ID NO: 267704 - DNA, 25 bp, Homo sapien
caccactgcctaggaggatgctcta

SEQ ID NO: 267705 - DNA, 25 bp, Homo sapien
taattcaaggggatgactaggcaaa

SEQ ID NO: 267706 - DNA, 25 bp, Homo sapien
caaggggatgactaggcaaaagttc

SEQ ID NO: 267707 - DNA, 25 bp, Homo sapien
ctgataattcaaggggatgactagg

SEQ ID NO: 267708 - DNA, 25 bp, Homo sapien
ttttctgataattcaaggggatgac

SEQ ID NO: 267709 - DNA, 25 bp, Homo sapien
taacaactgcatcatcttccccaag

SEQ ID NO: 267710 - DNA, 25 bp, Homo sapien
tataagtgtactctgggctgtcaac

SEQ ID NO: 267711 - DNA, 25 bp, Homo sapien
gttctcaaagatgatcaactgtgct

SEQ ID NO: 267712 - DNA, 25 bp, Homo sapien
ggcagacctatcctcttattagaaa

SEQ ID NO: 267713 - DNA, 25 bp, Homo sapien
cgacttgactcatggattctaaaac

SEQ ID NO: 267714 - DNA, 25 bp, Homo sapien
tacatttagggaactttggccataa

SEQ ID NO: 267715 - DNA, 25 bp, Homo sapien
aaatggctcctaaggatagtgaatg

SEQ ID NO: 267716 - DNA, 25 bp, Homo sapien
cacgctactctcttgataacattgt

SEQ ID NO: 267717 - DNA, 25 bp, Homo sapien
gctgcactgccttgaattccatctg

SEQ ID NO: 267718 - DNA, 25 bp, Homo sapien
tagcggagcaaatagaccctgaatg

SEQ ID NO: 267719 - DNA, 25 bp, Homo sapien
tgcactgccttgaattccatctgta

SEQ ID NO: 267720 - DNA, 25 bp, Homo sapien
cggagcaaatagaccctgaatgttt

SEQ ID NO: 267721 - DNA, 25 bp, Homo sapien
caggcagctgttatacatcttgaca

SEQ ID NO: 267722 - DNA, 25 bp, Homo sapien
tggtagttagatcagagtacagtcc

SEQ ID NO: 267723 - DNA, 25 bp, Homo sapien
taagactagtagatggctaagccaa

SEQ ID NO: 267724 - DNA, 25 bp, Homo sapien
tctaaggttcagaaagctctccagc

SEQ ID NO: 267725 - DNA, 25 bp, Homo sapien
tgaaaattcgcaaaaccaaatacaa

SEQ ID NO: 267726 - DNA, 25 bp, Homo sapien
ttgaaaattcgcaaaaccaaataca

SEQ ID NO: 267727 - DNA, 25 bp, Homo sapien
gtctcatcattacccctcaaaacat

SEQ ID NO: 267728 - DNA, 25 bp, Homo sapien
catccagtgaaagatttgagcttga

SEQ ID NO: 267729 - DNA, 25 bp, Homo sapien
aacatccagtgaaagatttgagctt

SEQ ID NO: 267730 - DNA, 25 bp, Homo sapien
tcctcaaatccaatagtctcatcat

SEQ ID NO: 267731 - DNA, 25 bp, Homo sapien
ataaaacttaatcctgttggatatt

SEQ ID NO: 267732 - DNA, 25 bp, Homo sapien
cagcagccaagcaaaactaataaaa

SEQ ID NO: 267733 - DNA, 25 bp, Homo sapien
ctaataaaacttaatcctgttggat

SEQ ID NO: 267734 - DNA, 25 bp, Homo sapien
cggacatcagcagccaagcaaaact

SEQ ID NO: 267735 - DNA, 25 bp, Homo sapien
acacttcatggatggtctagcacca

SEQ ID NO: 267736 - DNA, 25 bp, Homo sapien
cagcctgaggaaccatatgccaaaa

SEQ ID NO: 267737 - DNA, 25 bp, Homo sapien
aaagccatgtgattcccagtgcgga

SEQ ID NO: 267738 - DNA, 25 bp, Homo sapien
tccctctcgccatataattcactgg

SEQ ID NO: 267739 - DNA, 25 bp, Homo sapien
gaaaacaaaccagtgattgcctggg

SEQ ID NO: 267740 - DNA, 25 bp, Homo sapien
ccacaggacgggaaacaatctctta

SEQ ID NO: 267741 - DNA, 25 bp, Homo sapien
ggagaccaggttccatgttaattaa

SEQ ID NO: 267742 - DNA, 25 bp, Homo sapien
tgtatccacacaaacgtaagaattc

SEQ ID NO: 267743 - DNA, 25 bp, Homo sapien
tacagtaaaccaagtttatattcca

SEQ ID NO: 267744 - DNA, 25 bp, Homo sapien
aagtgtggctctcccatgacttcgc

SEQ ID NO: 267745 - DNA, 25 bp, Homo sapien
attccaccatcaagtgtggctctcc

SEQ ID NO: 267746 - DNA, 25 bp, Homo sapien
agtgtggctctcccatgacttcgct

SEQ ID NO: 267747 - DNA, 25 bp, Homo sapien
tgtacatcaaattacagtacaaaga

SEQ ID NO: 267748 - DNA, 25 bp, Homo sapien
gcagccctcggtttccatgaacagc

SEQ ID NO: 267749 - DNA, 25 bp, Homo sapien
taatgttgtgtacatcaaattacag

SEQ ID NO: 267750 - DNA, 25 bp, Homo sapien
tgcagccctcggtttccatgaacag

SEQ ID NO: 267751 - DNA, 25 bp, Homo sapien
cacatggctgtaaaccaaagacccc

SEQ ID NO: 267752 - DNA, 25 bp, Homo sapien
tttaaatgatcactgatactacttg

SEQ ID NO: 267753 - DNA, 25 bp, Homo sapien
tcacatggctgtaaaccaaagaccc

SEQ ID NO: 267754 - DNA, 25 bp, Homo sapien
gatcactgatactacttgagcagaa

SEQ ID NO: 267755 - DNA, 25 bp, Homo sapien
ttaatataaattaagagctttaaca

SEQ ID NO: 267756 - DNA, 25 bp, Homo sapien
ctactgttttaatataaattaagag

SEQ ID NO: 267757 - DNA, 25 bp, Homo sapien
caaaggctactgttttaatataaat

SEQ ID NO: 267758 - DNA, 25 bp, Homo sapien
ctgttttaatataaattaagagctt

SEQ ID NO: 267759 - DNA, 25 bp, Homo sapien
gaaacaggttgaattgaaacctgta

SEQ ID NO: 267760 - DNA, 25 bp, Homo sapien
aaagatgctactataaagtttatag

SEQ ID NO: 267761 - DNA, 25 bp, Homo sapien
tgaattgaaacctgtagatcatttt

SEQ ID NO: 267762 - DNA, 25 bp, Homo sapien
caggttgaattgaaacctgtagatc

SEQ ID NO: 267763 - DNA, 25 bp, Homo sapien
cttcataaagaataccttacagtat

SEQ ID NO: 267764 - DNA, 25 bp, Homo sapien
aagtttaacctacatctactggttg

SEQ ID NO: 267765 - DNA, 25 bp, Homo sapien
cacttaaagaccagaccaaaatcaa

SEQ ID NO: 267766 - DNA, 25 bp, Homo sapien
gttaatggacgacactgatatatct

SEQ ID NO: 267767 - DNA, 25 bp, Homo sapien
tatgaatcttattagacattggcac

SEQ ID NO: 267768 - DNA, 25 bp, Homo sapien
tactggagaaggctacataattcaa

SEQ ID NO: 267769 - DNA, 25 bp, Homo sapien
ccttcccttttgtatcatatgaatc

SEQ ID NO: 267770 - DNA, 25 bp, Homo sapien
aatgtcatatgttagcccggtgctg

SEQ ID NO: 267771 - DNA, 25 bp, Homo sapien
cagccacggtatgctaccatctgta

SEQ ID NO: 267772 - DNA, 25 bp, Homo sapien
tagacagtgtaagtctcctctttca

SEQ ID NO: 267773 - DNA, 25 bp, Homo sapien
ctgtagacagtgtaagtctcctctt

SEQ ID NO: 267774 - DNA, 25 bp, Homo sapien
accacactcagccacggtatgctac

SEQ ID NO: 267775 - DNA, 25 bp, Homo sapien
tatgtatctaggtcttcaaggtcac

SEQ ID NO: 267776 - DNA, 25 bp, Homo sapien
gagatccgggaccatatttgataag

SEQ ID NO: 267777 - DNA, 25 bp, Homo sapien
caaggtcacatttatgtggaagtcc

SEQ ID NO: 267778 - DNA, 25 bp, Homo sapien
gtttaagcaattgtctacatcagcc

SEQ ID NO: 267779 - DNA, 25 bp, Homo sapien
gactgttgtcgtttagtaggagacc

SEQ ID NO: 267780 - DNA, 25 bp, Homo sapien
gcttctctcgctccgtcgattagga

SEQ ID NO: 267781 - DNA, 25 bp, Homo sapien
caacaatagctgtggagaaacggga

SEQ ID NO: 267782 - DNA, 25 bp, Homo sapien
tggtggcgacctcggccttcagtgt

SEQ ID NO: 267783 - DNA, 25 bp, Homo sapien
agtatccaaagcaacagaggtcaag

SEQ ID NO: 267784 - DNA, 25 bp, Homo sapien
gaccatcaggttatggaacccaaag

SEQ ID NO: 267785 - DNA, 25 bp, Homo sapien
gcaagctcacagaggaaaccgagac

SEQ ID NO: 267786 - DNA, 25 bp, Homo sapien
ccgagacggagctctcagggtagca

SEQ ID NO: 267787 - DNA, 25 bp, Homo sapien
ttcagctacacctaaaggaagggag

SEQ ID NO: 267788 - DNA, 25 bp, Homo sapien
tgactaagatttcctgcatgccagc

SEQ ID NO: 267789 - DNA, 25 bp, Homo sapien
tcatacaagagtcagccatggtccc

SEQ ID NO: 267790 - DNA, 25 bp, Homo sapien
gtagtacagggcacagatgaccaaa

SEQ ID NO: 267791 - DNA, 25 bp, Homo sapien
cctgggtcacaagacctggacttca

SEQ ID NO: 267792 - DNA, 25 bp, Homo sapien
ccctgggtcacaagacctggacttc

SEQ ID NO: 267793 - DNA, 25 bp, Homo sapien
tcccctgggtcacaagacctggact

SEQ ID NO: 267794 - DNA, 25 bp, Homo sapien
cccctgggtcacaagacctggactt

SEQ ID NO: 267795 - DNA, 25 bp, Homo sapien
gtcaatttctcaaggtcatacacca

SEQ ID NO: 267796 - DNA, 25 bp, Homo sapien
caacactacgtccatatcttccaag

SEQ ID NO: 267797 - DNA, 25 bp, Homo sapien
ttttactaagaagtcagcaaccaca

SEQ ID NO: 267798 - DNA, 25 bp, Homo sapien
gcaaccacaatactggtcaatttct

SEQ ID NO: 267799 - DNA, 25 bp, Homo sapien
ctgccagctgtttgagaagatgagg

SEQ ID NO: 267800 - DNA, 25 bp, Homo sapien
tccagctcttgactgaactgccagc

SEQ ID NO: 267801 - DNA, 25 bp, Homo sapien
agaattcattccagctcttgactga

SEQ ID NO: 267802 - DNA, 25 bp, Homo sapien
catgcacaagaattcattccagctc

SEQ ID NO: 267803 - DNA, 25 bp, Homo sapien
tgggcctgaggaaccgggtagtcta

SEQ ID NO: 267804 - DNA, 25 bp, Homo sapien
tcgtggaccacactgcccactggtg

SEQ ID NO: 267805 - DNA, 25 bp, Homo sapien
tagaatggcctgatcctcgtggacc

SEQ ID NO: 267806 - DNA, 25 bp, Homo sapien
cccactggtggaggcgtactcgaag

SEQ ID NO: 267807 - DNA, 25 bp, Homo sapien
cccttgtggactgttagtaggcatg

SEQ ID NO: 267808 - DNA, 25 bp, Homo sapien
tacttaacatcctaattgttaggga

SEQ ID NO: 267809 - DNA, 25 bp, Homo sapien
gaagccctaagttcaataataacaa

SEQ ID NO: 267810 - DNA, 25 bp, Homo sapien
tgaggacttggagaaattcgagccc

SEQ ID NO: 267811 - DNA, 25 bp, Homo sapien
gtgcctttgcctgtcgacccccaca

SEQ ID NO: 267812 - DNA, 25 bp, Homo sapien
tgtcgacccccacaactgcactgcc

SEQ ID NO: 267813 - DNA, 25 bp, Homo sapien
cacaactgcactgccctcctactcc

SEQ ID NO: 267814 - DNA, 25 bp, Homo sapien
tttgcctgtcgacccccacaactgc

SEQ ID NO: 267815 - DNA, 25 bp, Homo sapien
cagacttttccgaggctcacctggc

SEQ ID NO: 267816 - DNA, 25 bp, Homo sapien
tctcgattgggactatgcccgcacc

SEQ ID NO: 267817 - DNA, 25 bp, Homo sapien
ccaggactgctgcaaagttgtctac

SEQ ID NO: 267818 - DNA, 25 bp, Homo sapien
tgtctacgtccatgggaagctcggg

SEQ ID NO: 267819 - DNA, 25 bp, Homo sapien
cctggcggcagacttcggaaacttc

SEQ ID NO: 267820 - DNA, 25 bp, Homo sapien
ttgcactgctgtcatgggcaactac

SEQ ID NO: 267821 - DNA, 25 bp, Homo sapien
ttctaacagaaggtcccgaccattg

SEQ ID NO: 267822 - DNA, 25 bp, Homo sapien
cttctggaagccgaatttctaacag

SEQ ID NO: 267823 - DNA, 25 bp, Homo sapien
gcaagccagggacaaaagtaactga

SEQ ID NO: 267824 - DNA, 25 bp, Homo sapien
cagcaagccagggacaaaagtaact

SEQ ID NO: 267825 - DNA, 25 bp, Homo sapien
caagccagggacaaaagtaactgag

SEQ ID NO: 267826 - DNA, 25 bp, Homo sapien
ccagcaagccagggacaaaagtaac

SEQ ID NO: 267827 - DNA, 25 bp, Homo sapien
ttccagggagaatggtaatcctttc

SEQ ID NO: 267828 - DNA, 25 bp, Homo sapien
gtacgtgtgccccataagtcctgct

SEQ ID NO: 267829 - DNA, 25 bp, Homo sapien
atttcaaacacactgcccagctcct

SEQ ID NO: 267830 - DNA, 25 bp, Homo sapien
gctccacatacagaggctcaggacc

SEQ ID NO: 267831 - DNA, 25 bp, Homo sapien
gtcttcctaggcgttttgtcctgga

SEQ ID NO: 267832 - DNA, 25 bp, Homo sapien
ttgtcctggatctgcgtaaggctgg

SEQ ID NO: 267833 - DNA, 25 bp, Homo sapien
gcatcaaggatcaatgggatctttg

SEQ ID NO: 267834 - DNA, 25 bp, Homo sapien
taggcgttttgtcctggatctgcgt

SEQ ID NO: 267835 - DNA, 25 bp, Homo sapien
gggagccaaggagatgtgcagggca

SEQ ID NO: 267836 - DNA, 25 bp, Homo sapien
gagcatgtgggtagaacagaggcat

SEQ ID NO: 267837 - DNA, 25 bp, Homo sapien
catcagaactatggctgagagggag

SEQ ID NO: 267838 - DNA, 25 bp, Homo sapien
tgtctgctggagccttttcccaggg

SEQ ID NO: 267839 - DNA, 25 bp, Homo sapien
caggtaactctgaccggcctctttc

SEQ ID NO: 267840 - DNA, 25 bp, Homo sapien
gcatttggcccatcacgctatagaa

SEQ ID NO: 267841 - DNA, 25 bp, Homo sapien
tatagaagtgcaggccactgtcact

SEQ ID NO: 267842 - DNA, 25 bp, Homo sapien
tttgcatgaagtgggtgggtcctcc

SEQ ID NO: 267843 - DNA, 25 bp, Homo sapien
tctgcaaggcaccatgccctggcag

SEQ ID NO: 267844 - DNA, 25 bp, Homo sapien
gcaaggcaccatgccctggcagtca

SEQ ID NO: 267845 - DNA, 25 bp, Homo sapien
ctctgcaaggcaccatgccctggca

SEQ ID NO: 267846 - DNA, 25 bp, Homo sapien
tgcaaggcaccatgccctggcagtc

SEQ ID NO: 267847 - DNA, 25 bp, Homo sapien
tcagaacagaagagggagccgcttc

SEQ ID NO: 267848 - DNA, 25 bp, Homo sapien
tgcctgattcataggagcccaaagc

SEQ ID NO: 267849 - DNA, 25 bp, Homo sapien
tcgaattaggcgcagcaggaggcat

SEQ ID NO: 267850 - DNA, 25 bp, Homo sapien
taagaatgagttggccgttccaggg

SEQ ID NO: 267851 - DNA, 25 bp, Homo sapien
caggtctgtactccgctaagcggtc

SEQ ID NO: 267852 - DNA, 25 bp, Homo sapien
cgctaagcggtcaagggtttccgca

SEQ ID NO: 267853 - DNA, 25 bp, Homo sapien
tgtactccgctaagcggtcaagggt

SEQ ID NO: 267854 - DNA, 25 bp, Homo sapien
cgacaggtctgtactccgctaagcg

SEQ ID NO: 267855 - DNA, 25 bp, Homo sapien
agacgctcatctcgggccgggttcc

SEQ ID NO: 267856 - DNA, 25 bp, Homo sapien
aaagatgtaatgtccaagaggccac

SEQ ID NO: 267857 - DNA, 25 bp, Homo sapien
acggagacgctcatctcgggccggg

SEQ ID NO: 267858 - DNA, 25 bp, Homo sapien
agaaagatgtaatgtccaagaggcc

SEQ ID NO: 267859 - DNA, 25 bp, Homo sapien
caccggaccgcgcagcagaggattc

SEQ ID NO: 267860 - DNA, 25 bp, Homo sapien
ggaccgcgcagcagaggattcgctc

SEQ ID NO: 267861 - DNA, 25 bp, Homo sapien
accgcgcagcagaggattcgctcac

SEQ ID NO: 267862 - DNA, 25 bp, Homo sapien
cggaccgcgcagcagaggattcgct

SEQ ID NO: 267863 - DNA, 25 bp, Homo sapien
ctctaaagcagtgggtgttgaacct

SEQ ID NO: 267864 - DNA, 25 bp, Homo sapien
taggctggattccgatgccctgaga

SEQ ID NO: 267865 - DNA, 25 bp, Homo sapien
gttccaagccaccataccactaagg

SEQ ID NO: 267866 - DNA, 25 bp, Homo sapien
aggctggattccgatgccctgagag

SEQ ID NO: 267867 - DNA, 25 bp, Homo sapien
ctaggctggattccgatgccctgag

SEQ ID NO: 267868 - DNA, 25 bp, Homo sapien
tactgccattggtgacaattggccc

SEQ ID NO: 267869 - DNA, 25 bp, Homo sapien
gacaattggccctagtaaacaatcc

SEQ ID NO: 267870 - DNA, 25 bp, Homo sapien
aatgagttttactgccattggtgac

SEQ ID NO: 267871 - DNA, 25 bp, Homo sapien
ccctagtaaacaatccagctgtgga

SEQ ID NO: 267872 - DNA, 25 bp, Homo sapien
gtgacaggcgtccatccagtgggcc

SEQ ID NO: 267873 - DNA, 25 bp, Homo sapien
catcgtttcgaagcacctgaggttt

SEQ ID NO: 267874 - DNA, 25 bp, Homo sapien
tgatgaaccaaagggagatgctctc

SEQ ID NO: 267875 - DNA, 25 bp, Homo sapien
gaccttataccaacgagcagactgt

SEQ ID NO: 267876 - DNA, 25 bp, Homo sapien
tggacgtatggattacaaacatttt

SEQ ID NO: 267877 - DNA, 25 bp, Homo sapien
attgagactacagaaacatgtcacc

SEQ ID NO: 267878 - DNA, 25 bp, Homo sapien
tttggacgtatggattacaaacatt

SEQ ID NO: 267879 - DNA, 25 bp, Homo sapien
tttttggacgtatggattacaaaca

SEQ ID NO: 267880 - DNA, 25 bp, Homo sapien
tcaaagctgcccagagaataagcat

SEQ ID NO: 267881 - DNA, 25 bp, Homo sapien
taagtatctcctgagtcaatgatgg

SEQ ID NO: 267882 - DNA, 25 bp, Homo sapien
gagacatgggaggtgcgtcagaaac

SEQ ID NO: 267883 - DNA, 25 bp, Homo sapien
acgagtagcgtccagggagccgaaa

SEQ ID NO: 267884 - DNA, 25 bp, Homo sapien
gaggttcattgcaaggccataagct

SEQ ID NO: 267885 - DNA, 25 bp, Homo sapien
tttagagtcttgtacctgaggttca

SEQ ID NO: 267886 - DNA, 25 bp, Homo sapien
tgtggcttgcatcactttctgcctt

SEQ ID NO: 267887 - DNA, 25 bp, Homo sapien
tgaactctcatagacaccaacaggt

SEQ ID NO: 267888 - DNA, 25 bp, Homo sapien
caggagcaagttaaggtgatccact

SEQ ID NO: 267889 - DNA, 25 bp, Homo sapien
tcaagaatgagtacctacaaaaaac

SEQ ID NO: 267890 - DNA, 25 bp, Homo sapien
ggtttgcatataatttgctacatag

SEQ ID NO: 267891 - DNA, 25 bp, Homo sapien
taataagttcagcaaattcacagga

SEQ ID NO: 267892 - DNA, 25 bp, Homo sapien
gagaattttagaccaatatccttga

SEQ ID NO: 267893 - DNA, 25 bp, Homo sapien
aaagagaattttagaccaatatcct

SEQ ID NO: 267894 - DNA, 25 bp, Homo sapien
gaattttagaccaatatccttgatg

SEQ ID NO: 267895 - DNA, 25 bp, Homo sapien
agagaattttagaccaatatccttg

SEQ ID NO: 267896 - DNA, 25 bp, Homo sapien
aaagggacagtaactccagggcaca

SEQ ID NO: 267897 - DNA, 25 bp, Homo sapien
aagggacagtaactccagggcacat

SEQ ID NO: 267898 - DNA, 25 bp, Homo sapien
gaacatgactgcacaaacataggtt

SEQ ID NO: 267899 - DNA, 25 bp, Homo sapien
tcatatgtacacaacacagttcact

SEQ ID NO: 267900 - DNA, 25 bp, Homo sapien
cataggtttctgtgttattttggct

SEQ ID NO: 267901 - DNA, 25 bp, Homo sapien
attccatcatatgtacacaacacag

SEQ ID NO: 267902 - DNA, 25 bp, Homo sapien
gaactctaaatacacttaccacaga

SEQ ID NO: 267903 - DNA, 25 bp, Homo sapien
agatctttttaccatgtcccatgtg

SEQ ID NO: 267904 - DNA, 25 bp, Homo sapien
tccctctttatgtccagtaatgatc

SEQ ID NO: 267905 - DNA, 25 bp, Homo sapien
gtctctcatgatttgtttggcgtag

SEQ ID NO: 267906 - DNA, 25 bp, Homo sapien
tctggtaaagttgacaagagcagtc

SEQ ID NO: 267907 - DNA, 25 bp, Homo sapien
gagaaggtaagaaagcgtccacaga

SEQ ID NO: 267908 - DNA, 25 bp, Homo sapien
agctgccaaatgaaagttctggtaa

SEQ ID NO: 267909 - DNA, 25 bp, Homo sapien
gaatgccattgtgccaaggtcgtga

SEQ ID NO: 267910 - DNA, 25 bp, Homo sapien
gcccccacaacgtgcttggattaga

SEQ ID NO: 267911 - DNA, 25 bp, Homo sapien
cattgcacccagccgatagccaatt

SEQ ID NO: 267912 - DNA, 25 bp, Homo sapien
tcttgaattaggcataaacatgaat

SEQ ID NO: 267913 - DNA, 25 bp, Homo sapien
cagccgatagccaattcttgaatta

SEQ ID NO: 267914 - DNA, 25 bp, Homo sapien
gagctttgaagaacgggaaagccat

SEQ ID NO: 267915 - DNA, 25 bp, Homo sapien
actgagctttgaagaacgggaaagc

SEQ ID NO: 267916 - DNA, 25 bp, Homo sapien
ttctcccataagacaggaactgagc

SEQ ID NO: 267917 - DNA, 25 bp, Homo sapien
ccataagacaggaactgagctttga

SEQ ID NO: 267918 - DNA, 25 bp, Homo sapien
tcaccgtccagttagctctctgcgt

SEQ ID NO: 267919 - DNA, 25 bp, Homo sapien
ataagaaactactcaccgtccagtt

SEQ ID NO: 267920 - DNA, 25 bp, Homo sapien
gtccagttagctctctgcgtccaca

SEQ ID NO: 267921 - DNA, 25 bp, Homo sapien
aaactactcaccgtccagttagctc

SEQ ID NO: 267922 - DNA, 25 bp, Homo sapien
cgcaggcgagattggaaacgcccag

SEQ ID NO: 267923 - DNA, 25 bp, Homo sapien
gggagggcgatgctgccgcaggcga

SEQ ID NO: 267924 - DNA, 25 bp, Homo sapien
gatgctgccgcaggcgagattggaa

SEQ ID NO: 267925 - DNA, 25 bp, Homo sapien
ctgccgcaggcgagattggaaacgc

SEQ ID NO: 267926 - DNA, 25 bp, Homo sapien
cagagagtgcgctgcaagctgtgat

SEQ ID NO: 267927 - DNA, 25 bp, Homo sapien
caaacaactctatcgtaggcacgct

SEQ ID NO: 267928 - DNA, 25 bp, Homo sapien
gatgcagcactggaagccgttaatt

SEQ ID NO: 267929 - DNA, 25 bp, Homo sapien
taggcacgctgaccttcactccatg

SEQ ID NO: 267930 - DNA, 25 bp, Homo sapien
tatcatcaccaataccacataaata

SEQ ID NO: 267931 - DNA, 25 bp, Homo sapien
ggatatcatcaccaataccacataa

SEQ ID NO: 267932 - DNA, 25 bp, Homo sapien
gggatatcatcaccaataccacata

SEQ ID NO: 267933 - DNA, 25 bp, Homo sapien
gatatcatcaccaataccacataaa

SEQ ID NO: 267934 - DNA, 25 bp, Homo sapien
gcagcagcagcccacatagtcctcc

SEQ ID NO: 267935 - DNA, 25 bp, Homo sapien
gggagcaatgatgctaacgcgtcct

SEQ ID NO: 267936 - DNA, 25 bp, Homo sapien
tgatgctaacgcgtcctctctggca

SEQ ID NO: 267937 - DNA, 25 bp, Homo sapien
tatgcataagtgtttggcatgggaa

SEQ ID NO: 267938 - DNA, 25 bp, Homo sapien
tggactgagtagctgccggagaatc

SEQ ID NO: 267939 - DNA, 25 bp, Homo sapien
gctgccggagaatcccaaaatccac

SEQ ID NO: 267940 - DNA, 25 bp, Homo sapien
tggacacgctggactgagtagctgc

SEQ ID NO: 267941 - DNA, 25 bp, Homo sapien
gagtagctgccggagaatcccaaaa

SEQ ID NO: 267942 - DNA, 25 bp, Homo sapien
tatgaatattcccaacaaaccctct

SEQ ID NO: 267943 - DNA, 25 bp, Homo sapien
gccttatatgaatattcccaacaaa

SEQ ID NO: 267944 - DNA, 25 bp, Homo sapien
acaaacgccttatatgaatattccc

SEQ ID NO: 267945 - DNA, 25 bp, Homo sapien
tatatgaatattcccaacaaaccct

SEQ ID NO: 267946 - DNA, 25 bp, Homo sapien
agttccttgttattgcccggtggtg

SEQ ID NO: 267947 - DNA, 25 bp, Homo sapien
tacatgtcccctttaaccctagcta

SEQ ID NO: 267948 - DNA, 25 bp, Homo sapien
ccccatgtttgcatgatcatgggaa

SEQ ID NO: 267949 - DNA, 25 bp, Homo sapien
gcatgtgcgcttgcatttccgtacc

SEQ ID NO: 267950 - DNA, 25 bp, Homo sapien
tcatcctccccgctctcatgctttt

SEQ ID NO: 267951 - DNA, 25 bp, Homo sapien
gttctttccacgactccctcactgt

SEQ ID NO: 267952 - DNA, 25 bp, Homo sapien
accctttggtggggctgcttgccat

SEQ ID NO: 267953 - DNA, 25 bp, Homo sapien
tgtcaaccctttggtggggctgctt

SEQ ID NO: 267954 - DNA, 25 bp, Homo sapien
caaccctttggtggggctgcttgcc

SEQ ID NO: 267955 - DNA, 25 bp, Homo sapien
tcaaccctttggtggggctgcttgc

SEQ ID NO: 267956 - DNA, 25 bp, Homo sapien
tgtcccgcaactgagtgtaacatga

SEQ ID NO: 267957 - DNA, 25 bp, Homo sapien
tcgtcatgagaggagctgacctcca

SEQ ID NO: 267958 - DNA, 25 bp, Homo sapien
cttttagccaaaacgtctagactgg

SEQ ID NO: 267959 - DNA, 25 bp, Homo sapien
gacttggtccctgaatactccgcgt

SEQ ID NO: 267960 - DNA, 25 bp, Homo sapien
gacagcgtggtctggcaatgtcttc

SEQ ID NO: 267961 - DNA, 25 bp, Homo sapien
tttccctctgaggtactgtcagttg

SEQ ID NO: 267962 - DNA, 25 bp, Homo sapien
aggtactgtcagttgcagggaaagc

SEQ ID NO: 267963 - DNA, 25 bp, Homo sapien
gatggtttaggatgacgcacactct

SEQ ID NO: 267964 - DNA, 25 bp, Homo sapien
catcggtggcttccgggtgtgcttc

SEQ ID NO: 267965 - DNA, 25 bp, Homo sapien
gattatcagcccctcctaaggaagc

SEQ ID NO: 267966 - DNA, 25 bp, Homo sapien
gggatttccttcgatgccaaagtca

SEQ ID NO: 267967 - DNA, 25 bp, Homo sapien
gaggtcactgttcagcagatggcca

SEQ ID NO: 267968 - DNA, 25 bp, Homo sapien
tcctcaatgacatccaagggcttgc

SEQ ID NO: 267969 - DNA, 25 bp, Homo sapien
ttgaacaccaaaaccataacactgt

SEQ ID NO: 267970 - DNA, 25 bp, Homo sapien
taaaagccacatgactgtcacctgg

SEQ ID NO: 267971 - DNA, 25 bp, Homo sapien
tctccaacagaaggattgaacacca

SEQ ID NO: 267972 - DNA, 25 bp, Homo sapien
tgtaggctggtaggtcatgttcaca

SEQ ID NO: 267973 - DNA, 25 bp, Homo sapien
tcagcaacagatgtggtgacctctt

SEQ ID NO: 267974 - DNA, 25 bp, Homo sapien
ttctgagcggccactttgagggtcc

SEQ ID NO: 267975 - DNA, 25 bp, Homo sapien
gagaactgaatctgctcttgctgag

SEQ ID NO: 267976 - DNA, 25 bp, Homo sapien
tgatcttgggcctcacatgcttggg

SEQ ID NO: 267977 - DNA, 25 bp, Homo sapien
caacaagcgtgcactatcagtaggg

SEQ ID NO: 267978 - DNA, 25 bp, Homo sapien
ttctcatagaggttggcagatggct

SEQ ID NO: 267979 - DNA, 25 bp, Homo sapien
tcaatccggaactgaagacccttgg

SEQ ID NO: 267980 - DNA, 25 bp, Homo sapien
tggacatgactagatcccagatgat

SEQ ID NO: 267981 - DNA, 25 bp, Homo sapien
cctctctcagaagagtgcttactct

SEQ ID NO: 267982 - DNA, 25 bp, Homo sapien
tacccatgctatgtaaccagcaggg

SEQ ID NO: 267983 - DNA, 25 bp, Homo sapien
ttcctgccaattgggaaaagagttc

SEQ ID NO: 267984 - DNA, 25 bp, Homo sapien
ggcttaaggagcatggctgaccgat

SEQ ID NO: 267985 - DNA, 25 bp, Homo sapien
ggcgctcgctgaagacctctgactt

SEQ ID NO: 267986 - DNA, 25 bp, Homo sapien
ggacattgcacccaatcctagctgg

SEQ ID NO: 267987 - DNA, 25 bp, Homo sapien
ctctttgcagatggtaaacgggaca

SEQ ID NO: 267988 - DNA, 25 bp, Homo sapien
aaaaggcagaaactgttggatcggt

SEQ ID NO: 267989 - DNA, 25 bp, Homo sapien
aaaggcagaaactgttggatcggtt

SEQ ID NO: 267990 - DNA, 25 bp, Homo sapien
aggcagaaactgttggatcggttac

SEQ ID NO: 267991 - DNA, 25 bp, Homo sapien
aaggcagaaactgttggatcggtta

SEQ ID NO: 267992 - DNA, 25 bp, Homo sapien
ctctcatgcctcagcctccagagta

SEQ ID NO: 267993 - DNA, 25 bp, Homo sapien
cactgtagcctctgtctcttgggtt

SEQ ID NO: 267994 - DNA, 25 bp, Homo sapien
aagtgactctcatgcctcagcctcc

SEQ ID NO: 267995 - DNA, 25 bp, Homo sapien
ttacaggcacacacccccaagtcca

SEQ ID NO: 267996 - DNA, 25 bp, Homo sapien
ataaatgaaacaaaagctaggtctt

SEQ ID NO: 267997 - DNA, 25 bp, Homo sapien
gcagaactaaatacaattgtaagaa

SEQ ID NO: 267998 - DNA, 25 bp, Homo sapien
agagcagaactaaatacaattgtaa

SEQ ID NO: 267999 - DNA, 25 bp, Homo sapien
atgaaacaaaagctaggtctttgaa

SEQ ID NO: 268000 - DNA, 25 bp, Homo sapien
ttatatttcataagcctgaggtggc

SEQ ID NO: 268001 - DNA, 25 bp, Homo sapien
tctctctggctaataaggattggtc

SEQ ID NO: 268002 - DNA, 25 bp, Homo sapien
gagaatcaacgtcttccatattgcc

SEQ ID NO: 268003 - DNA, 25 bp, Homo sapien
tgctgtgtctatttgggccaaggtc

SEQ ID NO: 268004 - DNA, 25 bp, Homo sapien
tattcgcaccaaagacctacacaga

SEQ ID NO: 268005 - DNA, 25 bp, Homo sapien
ggaggatcctcattgtagactagca

SEQ ID NO: 268006 - DNA, 25 bp, Homo sapien
tacttacaggatcaacataggaggg

SEQ ID NO: 268007 - DNA, 25 bp, Homo sapien
tttaaagcattcttgaggctgggca

SEQ ID NO: 268008 - DNA, 25 bp, Homo sapien
ctgtgccaatctttacatataccat

SEQ ID NO: 268009 - DNA, 25 bp, Homo sapien
ataccattccctctgtctgaagcac

SEQ ID NO: 268010 - DNA, 25 bp, Homo sapien
aatctttacatataccattccctct

SEQ ID NO: 268011 - DNA, 25 bp, Homo sapien
tctgtctgaagcaccctttcttcct

SEQ ID NO: 268012 - DNA, 25 bp, Homo sapien
tgtagttaaaccatgtcccactgag

SEQ ID NO: 268013 - DNA, 25 bp, Homo sapien
gatctccaagggaaccactgtagtt

SEQ ID NO: 268014 - DNA, 25 bp, Homo sapien
agatctccaagggaaccactgtagt

SEQ ID NO: 268015 - DNA, 25 bp, Homo sapien
tctccaagggaaccactgtagttaa

SEQ ID NO: 268016 - DNA, 25 bp, Homo sapien
ggcaaattggatagataagcaagac

SEQ ID NO: 268017 - DNA, 25 bp, Homo sapien
tgcaatgacacccataaagtaagga

SEQ ID NO: 268018 - DNA, 25 bp, Homo sapien
tggattaaacatctcatctaaaaga

SEQ ID NO: 268019 - DNA, 25 bp, Homo sapien
gactatgatttaataagcccactat

SEQ ID NO: 268020 - DNA, 25 bp, Homo sapien
gcagctcccccgaaagtgaggctat

SEQ ID NO: 268021 - DNA, 25 bp, Homo sapien
gtgtccagtaaaggcagaagctgca

SEQ ID NO: 268022 - DNA, 25 bp, Homo sapien
ccccgaaagtgaggctatggagagc

SEQ ID NO: 268023 - DNA, 25 bp, Homo sapien
ctatggagagccgtgtgtccagtaa

SEQ ID NO: 268024 - DNA, 25 bp, Homo sapien
gacggagaccagatttcgggagatt

SEQ ID NO: 268025 - DNA, 25 bp, Homo sapien
ggagacgtgagtatccgggaggacg

SEQ ID NO: 268026 - DNA, 25 bp, Homo sapien
tatccgggaggacggagaccagatt

SEQ ID NO: 268027 - DNA, 25 bp, Homo sapien
tcgggagattggattttgcagcatt

SEQ ID NO: 268028 - DNA, 25 bp, Homo sapien
ggagacgctggagctccggacaaag

SEQ ID NO: 268029 - DNA, 25 bp, Homo sapien
agacgctggagctccggacaaagcc

SEQ ID NO: 268030 - DNA, 25 bp, Homo sapien
gagacgctggagctccggacaaagc

SEQ ID NO: 268031 - DNA, 25 bp, Homo sapien
acgctggagctccggacaaagccaa

SEQ ID NO: 268032 - DNA, 25 bp, Homo sapien
cttcagtagatgaataacacaacaa

SEQ ID NO: 268033 - DNA, 25 bp, Homo sapien
cccataactgatggtgtcaaatggg

SEQ ID NO: 268034 - DNA, 25 bp, Homo sapien
agatgaataacacaacaatgggaag

SEQ ID NO: 268035 - DNA, 25 bp, Homo sapien
tcaaatgggctatttttcttcagta

SEQ ID NO: 268036 - DNA, 25 bp, Homo sapien
tggtttcccatccaataacattgac

SEQ ID NO: 268037 - DNA, 25 bp, Homo sapien
gggacagcagctgttgtaacatgct

SEQ ID NO: 268038 - DNA, 25 bp, Homo sapien
tcatcaaaggcacagctgaatgggc

SEQ ID NO: 268039 - DNA, 25 bp, Homo sapien
ggcccctggcaaggtcttgaaaaca

SEQ ID NO: 268040 - DNA, 25 bp, Homo sapien
ctacgcaaatgttccacacatcatc

SEQ ID NO: 268041 - DNA, 25 bp, Homo sapien
tacgcaaatgttccacacatcatct

SEQ ID NO: 268042 - DNA, 25 bp, Homo sapien
ggatgcggactctatgtggaacagc

SEQ ID NO: 268043 - DNA, 25 bp, Homo sapien
gagaccccaaatggtcctgccatct

SEQ ID NO: 268044 - DNA, 25 bp, Homo sapien
gggctcccgtttccacattcatcat

SEQ ID NO: 268045 - DNA, 25 bp, Homo sapien
gggttgggctaatggcctgaagcct

SEQ ID NO: 268046 - DNA, 25 bp, Homo sapien
cgctgagcttatgcttaccacatag

SEQ ID NO: 268047 - DNA, 25 bp, Homo sapien
cctggcgctgagcttatgcttacca

SEQ ID NO: 268048 - DNA, 25 bp, Homo sapien
tggcgctgagcttatgcttaccaca

SEQ ID NO: 268049 - DNA, 25 bp, Homo sapien
ggcgctgagcttatgcttaccacat

SEQ ID NO: 268050 - DNA, 25 bp, Homo sapien
tgctccatggagtcccttagtggct

SEQ ID NO: 268051 - DNA, 25 bp, Homo sapien
catggagtcccttagtggctggtgc

SEQ ID NO: 268052 - DNA, 25 bp, Homo sapien
gctggtgcaggtagaaaggacagga

SEQ ID NO: 268053 - DNA, 25 bp, Homo sapien
cctaaagccagcaattttcaactgt

SEQ ID NO: 268054 - DNA, 25 bp, Homo sapien
gtgtcaactccttgccacacagagt

SEQ ID NO: 268055 - DNA, 25 bp, Homo sapien
ttttctaatcaaaggggtcagcgta

SEQ ID NO: 268056 - DNA, 25 bp, Homo sapien
tcagcgtaaatgggtgttggcagtt

SEQ ID NO: 268057 - DNA, 25 bp, Homo sapien
tggcagttgacggctgcagctgtct

SEQ ID NO: 268058 - DNA, 25 bp, Homo sapien
tgaggcgggaggcccggggacacta

SEQ ID NO: 268059 - DNA, 25 bp, Homo sapien
atgaggcgggaggcccggggacact

SEQ ID NO: 268060 - DNA, 25 bp, Homo sapien
ctagggaatgaggcgggaggcccgg

SEQ ID NO: 268061 - DNA, 25 bp, Homo sapien
gaatgaggcgggaggcccggggaca

SEQ ID NO: 268062 - DNA, 25 bp, Homo sapien
ggacaataccccctggaatgagggc

SEQ ID NO: 268063 - DNA, 25 bp, Homo sapien
gacaataccccctggaatgagggca

SEQ ID NO: 268064 - DNA, 25 bp, Homo sapien
ataccccctggaatgagggcagtgg

SEQ ID NO: 268065 - DNA, 25 bp, Homo sapien
caataccccctggaatgagggcagt

SEQ ID NO: 268066 - DNA, 25 bp, Homo sapien
taaatgcgtgtcaaagtagttcaca

SEQ ID NO: 268067 - DNA, 25 bp, Homo sapien
catacatagctatattcctctcctc

SEQ ID NO: 268068 - DNA, 25 bp, Homo sapien
caaagtagttcacatacatagctat

SEQ ID NO: 268069 - DNA, 25 bp, Homo sapien
tggagaagttaaatgcgtgtcaaag

SEQ ID NO: 268070 - DNA, 25 bp, Homo sapien
tgatgtctcaaacttagacaccttt

SEQ ID NO: 268071 - DNA, 25 bp, Homo sapien
tcaactgatccttcaaatttgtctc

SEQ ID NO: 268072 - DNA, 25 bp, Homo sapien
ccattacgcatcacatcaacatttg

SEQ ID NO: 268073 - DNA, 25 bp, Homo sapien
aattcctctgtacgcacctccatta

SEQ ID NO: 268074 - DNA, 25 bp, Homo sapien
tggctattctgtctgtctgtcccac

SEQ ID NO: 268075 - DNA, 25 bp, Homo sapien
cacatggctattctgtctgtctgtc

SEQ ID NO: 268076 - DNA, 25 bp, Homo sapien
catggctattctgtctgtctgtccc

SEQ ID NO: 268077 - DNA, 25 bp, Homo sapien
tcacatggctattctgtctgtctgt

SEQ ID NO: 268078 - DNA, 25 bp, Homo sapien
catcgacaccgatttttgtcagcag

SEQ ID NO: 268079 - DNA, 25 bp, Homo sapien
tcctaatatctagtgcacatcgaca

SEQ ID NO: 268080 - DNA, 25 bp, Homo sapien
tagtgcacatcgacaccgatttttg

SEQ ID NO: 268081 - DNA, 25 bp, Homo sapien
ttacccctcctaatatctagtgcac

SEQ ID NO: 268082 - DNA, 25 bp, Homo sapien
gcttatcatacaattggtgctcaac

SEQ ID NO: 268083 - DNA, 25 bp, Homo sapien
ctgcactgtaaggtccgggttctca

SEQ ID NO: 268084 - DNA, 25 bp, Homo sapien
taaggtccgggttctcactgctgta

SEQ ID NO: 268085 - DNA, 25 bp, Homo sapien
gtgcttatcatacaattggtgctca

SEQ ID NO: 268086 - DNA, 25 bp, Homo sapien
cttgacccccaatattgtaagacac

SEQ ID NO: 268087 - DNA, 25 bp, Homo sapien
aaccctctatttaccctgatcgtgg

SEQ ID NO: 268088 - DNA, 25 bp, Homo sapien
tatttaccctgatcgtggcacttac

SEQ ID NO: 268089 - DNA, 25 bp, Homo sapien
cttcttgacccccaatattgtaaga

SEQ ID NO: 268090 - DNA, 25 bp, Homo sapien
tgttagggcatcagggctccagatt

SEQ ID NO: 268091 - DNA, 25 bp, Homo sapien
gttagggcatcagggctccagattt

SEQ ID NO: 268092 - DNA, 25 bp, Homo sapien
ctgttagggcatcagggctccagat

SEQ ID NO: 268093 - DNA, 25 bp, Homo sapien
cctgttagggcatcagggctccaga

SEQ ID NO: 268094 - DNA, 25 bp, Homo sapien
tgccaaaatcgctgtcaaaaatcta

SEQ ID NO: 268095 - DNA, 25 bp, Homo sapien
gatgtaaacaacatgagcagaccgc

SEQ ID NO: 268096 - DNA, 25 bp, Homo sapien
cgcaaaaatcgtgccaggaaagcaa

SEQ ID NO: 268097 - DNA, 25 bp, Homo sapien
tgtcttcccactgtagcgcacatct

SEQ ID NO: 268098 - DNA, 25 bp, Homo sapien
catgctctcatcaaccactactgtg

SEQ ID NO: 268099 - DNA, 25 bp, Homo sapien
tcatggggtccctcaacagagaaac

SEQ ID NO: 268100 - DNA, 25 bp, Homo sapien
tgaacctttgctaatatatcaacat

SEQ ID NO: 268101 - DNA, 25 bp, Homo sapien
actgtcaggcaatgacaggtcatgg

SEQ ID NO: 268102 - DNA, 25 bp, Homo sapien
tatatgccaaatgcccggtagttcg

SEQ ID NO: 268103 - DNA, 25 bp, Homo sapien
cccttggatcctaaaaaagccatgg

SEQ ID NO: 268104 - DNA, 25 bp, Homo sapien
ccatctaagcaaaccaagggagtag

SEQ ID NO: 268105 - DNA, 25 bp, Homo sapien
aagagctcccatgaaggactgcagc

SEQ ID NO: 268106 - DNA, 25 bp, Homo sapien
aaccaatctggaggcgggcaaggtt

SEQ ID NO: 268107 - DNA, 25 bp, Homo sapien
aaggccacacaaggccaaaccaatc

SEQ ID NO: 268108 - DNA, 25 bp, Homo sapien
gccacacaaggccaaaccaatctgg

SEQ ID NO: 268109 - DNA, 25 bp, Homo sapien
ccaaaccaatctggaggcgggcaag

SEQ ID NO: 268110 - DNA, 25 bp, Homo sapien
cacaggctcctgagcttccctgggc

SEQ ID NO: 268111 - DNA, 25 bp, Homo sapien
ctgtgcctaccaccacaggctcctg

SEQ ID NO: 268112 - DNA, 25 bp, Homo sapien
accacaggctcctgagcttccctgg

SEQ ID NO: 268113 - DNA, 25 bp, Homo sapien
caggctcctgagcttccctgggcat

SEQ ID NO: 268114 - DNA, 25 bp, Homo sapien
gacctggaagcagccctctattgag

SEQ ID NO: 268115 - DNA, 25 bp, Homo sapien
ttctcagggtaaatcacttgcttgg

SEQ ID NO: 268116 - DNA, 25 bp, Homo sapien
gccgaggttcactgtctagcagacc

SEQ ID NO: 268117 - DNA, 25 bp, Homo sapien
gaacgtcaggtcaactggtggccga

SEQ ID NO: 268118 - DNA, 25 bp, Homo sapien
tcacttctctgcacagggttcccaa

SEQ ID NO: 268119 - DNA, 25 bp, Homo sapien
cacttctctgcacagggttcccaaa

SEQ ID NO: 268120 - DNA, 25 bp, Homo sapien
caacttgggcaagctgaagcgttat

SEQ ID NO: 268121 - DNA, 25 bp, Homo sapien
gagactctggagaataagacggaca

SEQ ID NO: 268122 - DNA, 25 bp, Homo sapien
tgtggcagctgtaaggtaacgccgc

SEQ ID NO: 268123 - DNA, 25 bp, Homo sapien
tgggcttccctcatacagctgtgtg

SEQ ID NO: 268124 - DNA, 25 bp, Homo sapien
gaatagaccaaaaacaagttctgaa

SEQ ID NO: 268125 - DNA, 25 bp, Homo sapien
gttctgaaattgaggcagtaattaa

SEQ ID NO: 268126 - DNA, 25 bp, Homo sapien
gaccaaaaacaagttctgaaattga

SEQ ID NO: 268127 - DNA, 25 bp, Homo sapien
tctgaaattgaggcagtaattaata

SEQ ID NO: 268128 - DNA, 25 bp, Homo sapien
cattcaaacttgaggaatttcctac

SEQ ID NO: 268129 - DNA, 25 bp, Homo sapien
ggaaatcatgttattaattaacaac

SEQ ID NO: 268130 - DNA, 25 bp, Homo sapien
tttggaaatcatgttattaattaac

SEQ ID NO: 268131 - DNA, 25 bp, Homo sapien
aacaacattcaaacttgaggaattt

SEQ ID NO: 268132 - DNA, 25 bp, Homo sapien
tcctgaactcggagtcgggagtcca

SEQ ID NO: 268133 - DNA, 25 bp, Homo sapien
tcataggtaacgtgaggaaacccag

SEQ ID NO: 268134 - DNA, 25 bp, Homo sapien
tagaaacccgtagtgtcctgaactc

SEQ ID NO: 268135 - DNA, 25 bp, Homo sapien
gctaatgctccatgttgtgaaaaca

SEQ ID NO: 268136 - DNA, 25 bp, Homo sapien
tcctcaataaagctcaagtgagata

SEQ ID NO: 268137 - DNA, 25 bp, Homo sapien
aattaccattattggccgggtgcgg

SEQ ID NO: 268138 - DNA, 25 bp, Homo sapien
gattaacaaatactagaagcatcct

SEQ ID NO: 268139 - DNA, 25 bp, Homo sapien
aaattaccattattggccgggtgcg

SEQ ID NO: 268140 - DNA, 25 bp, Homo sapien
tcttcctccactggagacccttcca

SEQ ID NO: 268141 - DNA, 25 bp, Homo sapien
ctgttcctgcatggaagaaggcagg

SEQ ID NO: 268142 - DNA, 25 bp, Homo sapien
aagaaggcaggagcatctcacctcc

SEQ ID NO: 268143 - DNA, 25 bp, Homo sapien
cttcctccactggagacccttccat

SEQ ID NO: 268144 - DNA, 25 bp, Homo sapien
tttaggactgttggacttacatcag

SEQ ID NO: 268145 - DNA, 25 bp, Homo sapien
gcttttaggactgttggacttacat

SEQ ID NO: 268146 - DNA, 25 bp, Homo sapien
tagcagacttgctcagtcttccagc

SEQ ID NO: 268147 - DNA, 25 bp, Homo sapien
aaggtggcattagcagacttgctca

SEQ ID NO: 268148 - DNA, 25 bp, Homo sapien
gatccgaatggtctaggtctgcctc

SEQ ID NO: 268149 - DNA, 25 bp, Homo sapien
tctgcctcggatgttggacccttta

SEQ ID NO: 268150 - DNA, 25 bp, Homo sapien
tccttccctagtgttcttgcctgct

SEQ ID NO: 268151 - DNA, 25 bp, Homo sapien
ggatcattttctatgaccgggatca

SEQ ID NO: 268152 - DNA, 25 bp, Homo sapien
taccctcagctatacacattcagaa

SEQ ID NO: 268153 - DNA, 25 bp, Homo sapien
tattgcctttgcttgactccattgc

SEQ ID NO: 268154 - DNA, 25 bp, Homo sapien
tagactacttttggcagttatggtc

SEQ ID NO: 268155 - DNA, 25 bp, Homo sapien
ttttgacagcatcttgtagttttcc

SEQ ID NO: 268156 - DNA, 25 bp, Homo sapien
tgggcaccagctccccttggttcat

SEQ ID NO: 268157 - DNA, 25 bp, Homo sapien
tggccaccagattcctctctccaag

SEQ ID NO: 268158 - DNA, 25 bp, Homo sapien
tcctctctccaagtcactgcatggg

SEQ ID NO: 268159 - DNA, 25 bp, Homo sapien
ggacacagacagcccacactgggca

SEQ ID NO: 268160 - DNA, 25 bp, Homo sapien
ggttgagatatgctaatgagccccg

SEQ ID NO: 268161 - DNA, 25 bp, Homo sapien
tgagccccgatttggaggaggaact

SEQ ID NO: 268162 - DNA, 25 bp, Homo sapien
gaggagctgattctactgttgacaa

SEQ ID NO: 268163 - DNA, 25 bp, Homo sapien
gtttgagaatacctgcttggataag

SEQ ID NO: 268164 - DNA, 25 bp, Homo sapien
cacgtggtacacactaaagaaaggt

SEQ ID NO: 268165 - DNA, 25 bp, Homo sapien
cgtatagagtatgtgacacgtggta

SEQ ID NO: 268166 - DNA, 25 bp, Homo sapien
caacacgaagtcttaagcagggaag

SEQ ID NO: 268167 - DNA, 25 bp, Homo sapien
agaaaggttaggctcccctctcctg

SEQ ID NO: 268168 - DNA, 25 bp, Homo sapien
tgccactggtcctcctatggcttcg

SEQ ID NO: 268169 - DNA, 25 bp, Homo sapien
tcagtggtctggctcggaagaggca

SEQ ID NO: 268170 - DNA, 25 bp, Homo sapien
tttccagggcgataactatgatcac

SEQ ID NO: 268171 - DNA, 25 bp, Homo sapien
tatggcttcgtatctttccagggcg

SEQ ID NO: 268172 - DNA, 25 bp, Homo sapien
tggcgctggaagtaaactcctgcgg

SEQ ID NO: 268173 - DNA, 25 bp, Homo sapien
cagcgggtgtggaagtggattttgg

SEQ ID NO: 268174 - DNA, 25 bp, Homo sapien
tcctgcggggtgctgtcacactgga

SEQ ID NO: 268175 - DNA, 25 bp, Homo sapien
tgtgtccttagaaggcagagatgcc

SEQ ID NO: 268176 - DNA, 25 bp, Homo sapien
ttgcagcctcacaaacagaatatgt

SEQ ID NO: 268177 - DNA, 25 bp, Homo sapien
tatcctttcatatggctaagagccc

SEQ ID NO: 268178 - DNA, 25 bp, Homo sapien
tgtaacagctacatagtaccgcatc

SEQ ID NO: 268179 - DNA, 25 bp, Homo sapien
gactcctcggtgtgagactattatg

SEQ ID NO: 268180 - DNA, 25 bp, Homo sapien
caactttccagtagatagagctgag

SEQ ID NO: 268181 - DNA, 25 bp, Homo sapien
tcacaacctgggctctaggagtgct

SEQ ID NO: 268182 - DNA, 25 bp, Homo sapien
tagccagctagcatggcaagatgtt

SEQ ID NO: 268183 - DNA, 25 bp, Homo sapien
gaccccataggtcctttcaacagaa

SEQ ID NO: 268184 - DNA, 25 bp, Homo sapien
taaagatgaaagatgtgaaggctct

SEQ ID NO: 268185 - DNA, 25 bp, Homo sapien
gaaatttgctgactggtgggttaaa

SEQ ID NO: 268186 - DNA, 25 bp, Homo sapien
tctgcaatgccaaataaatatgtca

SEQ ID NO: 268187 - DNA, 25 bp, Homo sapien
tcactcttctccagttatcttacag

SEQ ID NO: 268188 - DNA, 25 bp, Homo sapien
aaaatgtggctgtctgtcgaacagg

SEQ ID NO: 268189 - DNA, 25 bp, Homo sapien
gaaaatgtggctgtctgtcgaacag

SEQ ID NO: 268190 - DNA, 25 bp, Homo sapien
atgaccaaatctgtcgactctggcc

SEQ ID NO: 268191 - DNA, 25 bp, Homo sapien
aacatgaccaaatctgtcgactctg

SEQ ID NO: 268192 - DNA, 25 bp, Homo sapien
catgaccaaatctgtcgactctggc

SEQ ID NO: 268193 - DNA, 25 bp, Homo sapien
acatgaccaaatctgtcgactctgg

SEQ ID NO: 268194 - DNA, 25 bp, Homo sapien
tgctaagcaattcatggtgcaggag

SEQ ID NO: 268195 - DNA, 25 bp, Homo sapien
ttcaagacagcaggtcagatccaca

SEQ ID NO: 268196 - DNA, 25 bp, Homo sapien
gctgtcataattctcatgggtcacg

SEQ ID NO: 268197 - DNA, 25 bp, Homo sapien
ctgtcataattctcatgggtcacgc

SEQ ID NO: 268198 - DNA, 25 bp, Homo sapien
ggtggttgaagctgctactctctta

SEQ ID NO: 268199 - DNA, 25 bp, Homo sapien
cagcaggtttattcgtatcttgatc

SEQ ID NO: 268200 - DNA, 25 bp, Homo sapien
tgaatgaagcttggtggttgaagct

SEQ ID NO: 268201 - DNA, 25 bp, Homo sapien
aacagcaggtttattcgtatcttga

SEQ ID NO: 268202 - DNA, 25 bp, Homo sapien
ctttcccctgcccacccacttctgc

SEQ ID NO: 268203 - DNA, 25 bp, Homo sapien
ccctgcccacccacttctgccttct

SEQ ID NO: 268204 - DNA, 25 bp, Homo sapien
tcccctgcccacccacttctgcctt

SEQ ID NO: 268205 - DNA, 25 bp, Homo sapien
ctgcccacccacttctgccttctcc

SEQ ID NO: 268206 - DNA, 25 bp, Homo sapien
tgcaggctttaaaggaggggcatgt

SEQ ID NO: 268207 - DNA, 25 bp, Homo sapien
atatttctcaggaagagccaccatg

SEQ ID NO: 268208 - DNA, 25 bp, Homo sapien
catatttctcaggaagagccaccat

SEQ ID NO: 268209 - DNA, 25 bp, Homo sapien
ttctggggccagcgaacaacccgca

SEQ ID NO: 268210 - DNA, 25 bp, Homo sapien
cttctggggccagcgaacaacccgc

SEQ ID NO: 268211 - DNA, 25 bp, Homo sapien
tcttctggggccagcgaacaacccg

SEQ ID NO: 268212 - DNA, 25 bp, Homo sapien
tctggggccagcgaacaacccgcat

SEQ ID NO: 268213 - DNA, 25 bp, Homo sapien
gtactttatctcaacattctcagtg

SEQ ID NO: 268214 - DNA, 25 bp, Homo sapien
cctgaatatgtactttatctcaaca

SEQ ID NO: 268215 - DNA, 25 bp, Homo sapien
aatcaacctgaatatgtactttatc

SEQ ID NO: 268216 - DNA, 25 bp, Homo sapien
ttgcttgttgtaggcaaatcaacct

SEQ ID NO: 268217 - DNA, 25 bp, Homo sapien
ggtcacctgtgaaaaaacactcagt

SEQ ID NO: 268218 - DNA, 25 bp, Homo sapien
ccggtcacctgtgaaaaaacactca

SEQ ID NO: 268219 - DNA, 25 bp, Homo sapien
gtcacctgtgaaaaaacactcagta

SEQ ID NO: 268220 - DNA, 25 bp, Homo sapien
cacctgtgaaaaaacactcagtaca

SEQ ID NO: 268221 - DNA, 25 bp, Homo sapien
tctaaagaaatgctgcgtggccacg

SEQ ID NO: 268222 - DNA, 25 bp, Homo sapien
tgcgcaacgcccagctgtctggtct

SEQ ID NO: 268223 - DNA, 25 bp, Homo sapien
ggcggaaacccatttcgagctgccg

SEQ ID NO: 268224 - DNA, 25 bp, Homo sapien
acggcgagggcatcaaagccgcaga

SEQ ID NO: 268225 - DNA, 25 bp, Homo sapien
ttattaatgatccttcccagacgta

SEQ ID NO: 268226 - DNA, 25 bp, Homo sapien
tttcacacctaaggataaacgtggc

SEQ ID NO: 268227 - DNA, 25 bp, Homo sapien
cacacctaaggataaacgtggctcc

SEQ ID NO: 268228 - DNA, 25 bp, Homo sapien
tattaatgatccttcccagacgtat

SEQ ID NO: 268229 - DNA, 25 bp, Homo sapien
tcaacagccgacgtgaacggtactg

SEQ ID NO: 268230 - DNA, 25 bp, Homo sapien
gaccatctcccctcgaaaatgcaaa

SEQ ID NO: 268231 - DNA, 25 bp, Homo sapien
ccctttgttgtgatgtgagcagtaa

SEQ ID NO: 268232 - DNA, 25 bp, Homo sapien
gcagtaatgtcggaaagtgaccatc

SEQ ID NO: 268233 - DNA, 25 bp, Homo sapien
ccagccgctgttggtctctggtttg

SEQ ID NO: 268234 - DNA, 25 bp, Homo sapien
tgccagccgctgttggtctctggtt

SEQ ID NO: 268235 - DNA, 25 bp, Homo sapien
gaaatgtcatgccaagtgtagctgt

SEQ ID NO: 268236 - DNA, 25 bp, Homo sapien
tagctgtagtagcagagaggtccag

SEQ ID NO: 268237 - DNA, 25 bp, Homo sapien
tctgggagcatggatacagcagatc

SEQ ID NO: 268238 - DNA, 25 bp, Homo sapien
tactacaccacttgggggtctggga

SEQ ID NO: 268239 - DNA, 25 bp, Homo sapien
gtttggcccgtggtgaggaacatac

SEQ ID NO: 268240 - DNA, 25 bp, Homo sapien
agtccgtccctgagagtcacactca

SEQ ID NO: 268241 - DNA, 25 bp, Homo sapien
aaggctgaaagtgcacgtgctgcaa

SEQ ID NO: 268242 - DNA, 25 bp, Homo sapien
cgtgctgcaactgaacaaaccttga

SEQ ID NO: 268243 - DNA, 25 bp, Homo sapien
cctgtgagtcgggagttcagctctg

SEQ ID NO: 268244 - DNA, 25 bp, Homo sapien
ttgaaactcctggtaatcacccttg

SEQ ID NO: 268245 - DNA, 25 bp, Homo sapien
tctttctcagcttctggctctacta

SEQ ID NO: 268246 - DNA, 25 bp, Homo sapien
ttttactgcctcttggctttcgctt

SEQ ID NO: 268247 - DNA, 25 bp, Homo sapien
ttctcagcttctggctctactacca

SEQ ID NO: 268248 - DNA, 25 bp, Homo sapien
gcctcttggctttcgcttactgctt

SEQ ID NO: 268249 - DNA, 25 bp, Homo sapien
taactgtgaagtcgcttgcctaggc

SEQ ID NO: 268250 - DNA, 25 bp, Homo sapien
tatatgccctgatacccctcagagg

SEQ ID NO: 268251 - DNA, 25 bp, Homo sapien
caaactggcataaaagccttgaagg

SEQ ID NO: 268252 - DNA, 25 bp, Homo sapien
ggtatctctcctaggcaaactggca

SEQ ID NO: 268253 - DNA, 25 bp, Homo sapien
ctggagcggacgcaggaagcacaaa

SEQ ID NO: 268254 - DNA, 25 bp, Homo sapien
ggctctgctgcaatcctagctccta

SEQ ID NO: 268255 - DNA, 25 bp, Homo sapien
cacaaaaggcgagcctgggcttcag

SEQ ID NO: 268256 - DNA, 25 bp, Homo sapien
tataaacgtgatgtatatggcctct

SEQ ID NO: 268257 - DNA, 25 bp, Homo sapien
tcattcaaggtgtcagcgggcaact

SEQ ID NO: 268258 - DNA, 25 bp, Homo sapien
ccatgtggttcccttggctacctta

SEQ ID NO: 268259 - DNA, 25 bp, Homo sapien
cgaggtaccggcacacacgaaaggg

SEQ ID NO: 268260 - DNA, 25 bp, Homo sapien
gcgggcaactcctaagccgaggtac

SEQ ID NO: 268261 - DNA, 25 bp, Homo sapien
cactgaaggcagttataaggcttgc

SEQ ID NO: 268262 - DNA, 25 bp, Homo sapien
ggcactgaaggcagttataaggctt

SEQ ID NO: 268263 - DNA, 25 bp, Homo sapien
aggcagttataaggcttgcagcagc

SEQ ID NO: 268264 - DNA, 25 bp, Homo sapien
tgaaggcagttataaggcttgcagc

SEQ ID NO: 268265 - DNA, 25 bp, Homo sapien
tcatttgttcatgtaccgctctcct

SEQ ID NO: 268266 - DNA, 25 bp, Homo sapien
ttcatgtaccgctctcctttgcacg

SEQ ID NO: 268267 - DNA, 25 bp, Homo sapien
tcctttgcacgctgagttctccatt

SEQ ID NO: 268268 - DNA, 25 bp, Homo sapien
tgtaccgctctcctttgcacgctga

SEQ ID NO: 268269 - DNA, 25 bp, Homo sapien
gcaagttcgattgacagctcttttt

SEQ ID NO: 268270 - DNA, 25 bp, Homo sapien
tgtttgcaagttcgattgacagctc

SEQ ID NO: 268271 - DNA, 25 bp, Homo sapien
ttcatccctgatgtttgcaagttcg

SEQ ID NO: 268272 - DNA, 25 bp, Homo sapien
cctgatgtttgcaagttcgattgac

SEQ ID NO: 268273 - DNA, 25 bp, Homo sapien
tgctgctccggatcacacactagca

SEQ ID NO: 268274 - DNA, 25 bp, Homo sapien
gttggaagaagcctacatctggcgt

SEQ ID NO: 268275 - DNA, 25 bp, Homo sapien
tacatctggcgtcaacccctgggct

SEQ ID NO: 268276 - DNA, 25 bp, Homo sapien
tgtccgggtgtaggtgtccctgcag

SEQ ID NO: 268277 - DNA, 25 bp, Homo sapien
cagctgtattgaagagccctggctc

SEQ ID NO: 268278 - DNA, 25 bp, Homo sapien
aaaacagctgtattgaagagccctg

SEQ ID NO: 268279 - DNA, 25 bp, Homo sapien
gctgtattgaagagccctggctctt

SEQ ID NO: 268280 - DNA, 25 bp, Homo sapien
aacagctgtattgaagagccctggc

SEQ ID NO: 268281 - DNA, 25 bp, Homo sapien
tggctaaactctgaccatgttcttc

SEQ ID NO: 268282 - DNA, 25 bp, Homo sapien
tttctgactggctaaactctgacca

SEQ ID NO: 268283 - DNA, 25 bp, Homo sapien
gactggctaaactctgaccatgttc

SEQ ID NO: 268284 - DNA, 25 bp, Homo sapien
tctgactggctaaactctgaccatg

SEQ ID NO: 268285 - DNA, 25 bp, Homo sapien
tcacatctaacctatgaccagcaat

SEQ ID NO: 268286 - DNA, 25 bp, Homo sapien
tgtatgtccacaaaaggcttgtaat

SEQ ID NO: 268287 - DNA, 25 bp, Homo sapien
tctatatgtagggatttacctgaga

SEQ ID NO: 268288 - DNA, 25 bp, Homo sapien
ttctctaatgttaaactcacatcta

SEQ ID NO: 268289 - DNA, 25 bp, Homo sapien
gtggtctgcaagcatctgcggaatg

SEQ ID NO: 268290 - DNA, 25 bp, Homo sapien
cagaggggatggtggacttgagtct

SEQ ID NO: 268291 - DNA, 25 bp, Homo sapien
catctgcggaatggcccagggaggg

SEQ ID NO: 268292 - DNA, 25 bp, Homo sapien
ctgtggtctgcaagcatctgcggaa

SEQ ID NO: 268293 - DNA, 25 bp, Homo sapien
gaatggctctaccacgccatctcca

SEQ ID NO: 268294 - DNA, 25 bp, Homo sapien
cagagtctgcaggaatggctctacc

SEQ ID NO: 268295 - DNA, 25 bp, Homo sapien
ttgctcaacaccacaaccttcagat

SEQ ID NO: 268296 - DNA, 25 bp, Homo sapien
cttccacatctgcaagaatggcttg

SEQ ID NO: 268297 - DNA, 25 bp, Homo sapien
agagtcacagagtgatccctttctg

SEQ ID NO: 268298 - DNA, 25 bp, Homo sapien
aatttgcttccaggcttccgccttc

SEQ ID NO: 268299 - DNA, 25 bp, Homo sapien
tcacagagtgatccctttctgctct

SEQ ID NO: 268300 - DNA, 25 bp, Homo sapien
agtcacagagtgatccctttctgct

SEQ ID NO: 268301 - DNA, 25 bp, Homo sapien
tattttccacaggatgtggaaggca

SEQ ID NO: 268302 - DNA, 25 bp, Homo sapien
acaggatgtggaaggcacctctctt

SEQ ID NO: 268303 - DNA, 25 bp, Homo sapien
tgtggaaggcacctctctttctttc

SEQ ID NO: 268304 - DNA, 25 bp, Homo sapien
ttttccacaggatgtggaaggcacc

SEQ ID NO: 268305 - DNA, 25 bp, Homo sapien
catactgatgatagacaataccaca

SEQ ID NO: 268306 - DNA, 25 bp, Homo sapien
ggctctacagctcgtaataaaatct

SEQ ID NO: 268307 - DNA, 25 bp, Homo sapien
ttggttttccaaagaggcagccaaa

SEQ ID NO: 268308 - DNA, 25 bp, Homo sapien
ggcagccaaaataggtggttacgga

SEQ ID NO: 268309 - DNA, 25 bp, Homo sapien
ttaaaaaatggccgtaggaggcatg

SEQ ID NO: 268310 - DNA, 25 bp, Homo sapien
gcgcaaagcacaagatctttcttta

SEQ ID NO: 268311 - DNA, 25 bp, Homo sapien
ctgggcgcaaagcacaagatctttc

SEQ ID NO: 268312 - DNA, 25 bp, Homo sapien
taaaaaatggccgtaggaggcatgg

SEQ ID NO: 268313 - DNA, 25 bp, Homo sapien
agctggtcaccgtgctcctcctgca

SEQ ID NO: 268314 - DNA, 25 bp, Homo sapien
ttgacaccggatgctcagcagctgg

SEQ ID NO: 268315 - DNA, 25 bp, Homo sapien
tagtttctcgcactttgctgtatgg

SEQ ID NO: 268316 - DNA, 25 bp, Homo sapien
gcgccatttccgcctcgaattgcag

SEQ ID NO: 268317 - DNA, 25 bp, Homo sapien
caacagcagagctcgagccgcactg

SEQ ID NO: 268318 - DNA, 25 bp, Homo sapien
acagcagagctcgagccgcactgca

SEQ ID NO: 268319 - DNA, 25 bp, Homo sapien
cccaacagcagagctcgagccgcac

SEQ ID NO: 268320 - DNA, 25 bp, Homo sapien
agcagagctcgagccgcactgcaga

SEQ ID NO: 268321 - DNA, 25 bp, Homo sapien
ggtggggacgaagccatcggagctg

SEQ ID NO: 268322 - DNA, 25 bp, Homo sapien
gtggggacgaagccatcggagctgg

SEQ ID NO: 268323 - DNA, 25 bp, Homo sapien
ccagaaggacagagatgtcgttatc

SEQ ID NO: 268324 - DNA, 25 bp, Homo sapien
caccatggaccctgaaaccacggat

SEQ ID NO: 268325 - DNA, 25 bp, Homo sapien
gaggccccaagagtggagagtccac

SEQ ID NO: 268326 - DNA, 25 bp, Homo sapien
caatgcaaccgtccctgagaaggag

SEQ ID NO: 268327 - DNA, 25 bp, Homo sapien
tgcctgcctaccaggtttactgttt

SEQ ID NO: 268328 - DNA, 25 bp, Homo sapien
catcatggctggcggtgagatcttc

SEQ ID NO: 268329 - DNA, 25 bp, Homo sapien
tctctaggagagcagcatcatggct

SEQ ID NO: 268330 - DNA, 25 bp, Homo sapien
ggcaactgtgtggttattttccatc

SEQ ID NO: 268331 - DNA, 25 bp, Homo sapien
cttggactttgtggtcgtggtcatc

SEQ ID NO: 268332 - DNA, 25 bp, Homo sapien
ctgcctgctgcacacgaggctggga

SEQ ID NO: 268333 - DNA, 25 bp, Homo sapien
gcaggaaaggctcggattgcaccac

SEQ ID NO: 268334 - DNA, 25 bp, Homo sapien
gaaaggctcggattgcaccacccac

SEQ ID NO: 268335 - DNA, 25 bp, Homo sapien
cagcaggaaaggctcggattgcacc

SEQ ID NO: 268336 - DNA, 25 bp, Homo sapien
aggaaaggctcggattgcaccaccc

SEQ ID NO: 268337 - DNA, 25 bp, Homo sapien
tgcaccaggagggaaagacaggaaa

SEQ ID NO: 268338 - DNA, 25 bp, Homo sapien
cccaggagccaacaggaaaaaatgc

SEQ ID NO: 268339 - DNA, 25 bp, Homo sapien
acaagagaggaaggggggctccaca

SEQ ID NO: 268340 - DNA, 25 bp, Homo sapien
atctcttcttttcccaggagccaac

SEQ ID NO: 268341 - DNA, 25 bp, Homo sapien
ggctcagtgctgtgtctacacggac

SEQ ID NO: 268342 - DNA, 25 bp, Homo sapien
tggtagcctcttggctgcactcgga

SEQ ID NO: 268343 - DNA, 25 bp, Homo sapien
gctgcactcggagaactatacgtcc

SEQ ID NO: 268344 - DNA, 25 bp, Homo sapien
tgtctacacggacaccttggtagcc

SEQ ID NO: 268345 - DNA, 25 bp, Homo sapien
aatgacagccgcagtttttcaaaat

SEQ ID NO: 268346 - DNA, 25 bp, Homo sapien
ctgcaatgacagccgcagtttttca

SEQ ID NO: 268347 - DNA, 25 bp, Homo sapien
caatgacagccgcagtttttcaaaa

SEQ ID NO: 268348 - DNA, 25 bp, Homo sapien
gcaatgacagccgcagtttttcaaa

SEQ ID NO: 268349 - DNA, 25 bp, Homo sapien
tgagccatcgaagaagcagaattcc

SEQ ID NO: 268350 - DNA, 25 bp, Homo sapien
cagtgccacgtatgttgccagagga

SEQ ID NO: 268351 - DNA, 25 bp, Homo sapien
tgttacagctatgggattcacctcc

SEQ ID NO: 268352 - DNA, 25 bp, Homo sapien
gaattcctgcctacgtgttacagct

SEQ ID NO: 268353 - DNA, 25 bp, Homo sapien
gagctgccacgtaagctgagtccac

SEQ ID NO: 268354 - DNA, 25 bp, Homo sapien
gactgggttgcatgtccttaatagg

SEQ ID NO: 268355 - DNA, 25 bp, Homo sapien
ccttaataggagctgccacgtaagc

SEQ ID NO: 268356 - DNA, 25 bp, Homo sapien
ctgccccgtggccagactggcgctc

SEQ ID NO: 268357 - DNA, 25 bp, Homo sapien
caagtaatgatacaaggagtccagc

SEQ ID NO: 268358 - DNA, 25 bp, Homo sapien
aagtaatgatacaaggagtccagct

SEQ ID NO: 268359 - DNA, 25 bp, Homo sapien
gcaagtaatgatacaaggagtccag

SEQ ID NO: 268360 - DNA, 25 bp, Homo sapien
agtaatgatacaaggagtccagctg

SEQ ID NO: 268361 - DNA, 25 bp, Homo sapien
aaggcctcttcgaagcggcgggctc

SEQ ID NO: 268362 - DNA, 25 bp, Homo sapien
tcaaggcctcttcgaagcggcgggc

SEQ ID NO: 268363 - DNA, 25 bp, Homo sapien
gggctctgtcccgcagagactggct

SEQ ID NO: 268364 - DNA, 25 bp, Homo sapien
cctcaaggcctcttcgaagcggcgg

SEQ ID NO: 268365 - DNA, 25 bp, Homo sapien
gtcttcttccaagtgctgataagga

SEQ ID NO: 268366 - DNA, 25 bp, Homo sapien
gcttcagactcttcatgtcttcttc

SEQ ID NO: 268367 - DNA, 25 bp, Homo sapien
ctgcttcagactcttcatgtcttct

SEQ ID NO: 268368 - DNA, 25 bp, Homo sapien
cttccaagtgctgataaggagccaa

SEQ ID NO: 268369 - DNA, 25 bp, Homo sapien
tttccagctcaagaatcttcttttc

SEQ ID NO: 268370 - DNA, 25 bp, Homo sapien
cctggctgaacaccatcaacgatga

SEQ ID NO: 268371 - DNA, 25 bp, Homo sapien
tctgcttgggtgtaagcaatgggca

SEQ ID NO: 268372 - DNA, 25 bp, Homo sapien
acagcaggaatgtcatggaggttac

SEQ ID NO: 268373 - DNA, 25 bp, Homo sapien
gtgaggccacctccaagattcctta

SEQ ID NO: 268374 - DNA, 25 bp, Homo sapien
ccacaggcagccgtaggagttaggc

SEQ ID NO: 268375 - DNA, 25 bp, Homo sapien
caagagagggcgagaagacagcaca

SEQ ID NO: 268376 - DNA, 25 bp, Homo sapien
tctccgcatctgtaaagcggctggt

SEQ ID NO: 268377 - DNA, 25 bp, Homo sapien
gcatcagggatgctgcattgtgctg

SEQ ID NO: 268378 - DNA, 25 bp, Homo sapien
gaggtcttcgttctgctgttggaga

SEQ ID NO: 268379 - DNA, 25 bp, Homo sapien
tttggtcaatccttgctttgaggtc

SEQ ID NO: 268380 - DNA, 25 bp, Homo sapien
tttgaggtcttcgttctgctgttgg

SEQ ID NO: 268381 - DNA, 25 bp, Homo sapien
ttgctttgaggtcttcgttctgctg

SEQ ID NO: 268382 - DNA, 25 bp, Homo sapien
ggaccctgctgcacacttttgctga

SEQ ID NO: 268383 - DNA, 25 bp, Homo sapien
tttttagcctgggaacacccagctg

SEQ ID NO: 268384 - DNA, 25 bp, Homo sapien
gcgagacctggatggaaattgtgaa

SEQ ID NO: 268385 - DNA, 25 bp, Homo sapien
agctgatgaagccaaaaccctgctt

SEQ ID NO: 268386 - DNA, 25 bp, Homo sapien
aagcagctcttcattggttcggctc

SEQ ID NO: 268387 - DNA, 25 bp, Homo sapien
ctggtcgggtccccagtttggagct

SEQ ID NO: 268388 - DNA, 25 bp, Homo sapien
tctgggtgttgtgctgactctggcc

SEQ ID NO: 268389 - DNA, 25 bp, Homo sapien
atgtgggcgagagtttaatcggact

SEQ ID NO: 268390 - DNA, 25 bp, Homo sapien
gcagttaccgttcacaaatagctgg

SEQ ID NO: 268391 - DNA, 25 bp, Homo sapien
cacattcctaagtgccgacaccagg

SEQ ID NO: 268392 - DNA, 25 bp, Homo sapien
aggatgcattcgcagctactgagca

SEQ ID NO: 268393 - DNA, 25 bp, Homo sapien
gaaccgcagcatgtgtatatacgta

SEQ ID NO: 268394 - DNA, 25 bp, Homo sapien
ttccggagggtgcaacaatagctta

SEQ ID NO: 268395 - DNA, 25 bp, Homo sapien
cattttagagacagatgccagtcca

SEQ ID NO: 268396 - DNA, 25 bp, Homo sapien
ccttctgggtctaagatgggagcac

SEQ ID NO: 268397 - DNA, 25 bp, Homo sapien
gtcacatacaggaaacaagggcatc

SEQ ID NO: 268398 - DNA, 25 bp, Homo sapien
agcaggcgtgccctggacaagccga

SEQ ID NO: 268399 - DNA, 25 bp, Homo sapien
aacacgtgtgccgagcaggcgtgcc

SEQ ID NO: 268400 - DNA, 25 bp, Homo sapien
catgtctgccttcacgttggcaaca

SEQ ID NO: 268401 - DNA, 25 bp, Homo sapien
agcgtggactcatcctagggccagg

SEQ ID NO: 268402 - DNA, 25 bp, Homo sapien
cgggagcggtgatggctcagatgag

SEQ ID NO: 268403 - DNA, 25 bp, Homo sapien
ccgccccatgtgtttcgggagcggt

SEQ ID NO: 268404 - DNA, 25 bp, Homo sapien
gagagaaatccgaattctgatggtg

SEQ ID NO: 268405 - DNA, 25 bp, Homo sapien
acgtggagagaaatccgaattctga

SEQ ID NO: 268406 - DNA, 25 bp, Homo sapien
tccgaacgtggaaacgtcgctccag

SEQ ID NO: 268407 - DNA, 25 bp, Homo sapien
gctgcagcatccgaacgtggaaacg

SEQ ID NO: 268408 - DNA, 25 bp, Homo sapien
cagcatccgaacgtggaaacgtcgc

SEQ ID NO: 268409 - DNA, 25 bp, Homo sapien
aggccgcccacgcatctcccaaatg

SEQ ID NO: 268410 - DNA, 25 bp, Homo sapien
atccattctgacatccagccagaac

SEQ ID NO: 268411 - DNA, 25 bp, Homo sapien
catccattctgacatccagccagaa

SEQ ID NO: 268412 - DNA, 25 bp, Homo sapien
ccccatccattctgacatccagcca

SEQ ID NO: 268413 - DNA, 25 bp, Homo sapien
ccatccattctgacatccagccaga

SEQ ID NO: 268414 - DNA, 25 bp, Homo sapien
cattcaactaatcacggccagggct

SEQ ID NO: 268415 - DNA, 25 bp, Homo sapien
gggatgttgtgaccccattcattca

SEQ ID NO: 268416 - DNA, 25 bp, Homo sapien
taggctttaaacacaaatatgcaac

SEQ ID NO: 268417 - DNA, 25 bp, Homo sapien
caggaaaagggatgttgtgacccca

SEQ ID NO: 268418 - DNA, 25 bp, Homo sapien
tgagctcccaagtccaggggagggg

SEQ ID NO: 268419 - DNA, 25 bp, Homo sapien
gaggggtgggcgcagggacctggga

SEQ ID NO: 268420 - DNA, 25 bp, Homo sapien
agaggcactgagctcccaagtccag

SEQ ID NO: 268421 - DNA, 25 bp, Homo sapien
aggggctgctcaagcccccaggctg

SEQ ID NO: 268422 - DNA, 25 bp, Homo sapien
tccttcaacttcaatcgcaggtggg

SEQ ID NO: 268423 - DNA, 25 bp, Homo sapien
tccacctgtgcttaactccgtaact

SEQ ID NO: 268424 - DNA, 25 bp, Homo sapien
cgcaggtgggaagctgtccaaccat

SEQ ID NO: 268425 - DNA, 25 bp, Homo sapien
ccagagtcattgctcgaagtgtaca

SEQ ID NO: 268426 - DNA, 25 bp, Homo sapien
aggaagattggcctgcatcatcacg

SEQ ID NO: 268427 - DNA, 25 bp, Homo sapien
tggcgctggcactggaaaaagcttc

SEQ ID NO: 268428 - DNA, 25 bp, Homo sapien
agcttcccgacttagtgagtgagga

SEQ ID NO: 268429 - DNA, 25 bp, Homo sapien
tgagtgaggaagattggcctgcatc

SEQ ID NO: 268430 - DNA, 25 bp, Homo sapien
agggacagggctgtctgagctcgga

SEQ ID NO: 268431 - DNA, 25 bp, Homo sapien
gtctgagctcggagctgtagggcat

SEQ ID NO: 268432 - DNA, 25 bp, Homo sapien
atacaagggacagggctgtctgagc

SEQ ID NO: 268433 - DNA, 25 bp, Homo sapien
ctgagctcggagctgtagggcatcc

SEQ ID NO: 268434 - DNA, 25 bp, Homo sapien
gagaagccgctatgcacagtcagca

SEQ ID NO: 268435 - DNA, 25 bp, Homo sapien
gtcagcagctgcgtggcaggtgctc

SEQ ID NO: 268436 - DNA, 25 bp, Homo sapien
tgaatttggcggtgcagtcatgtga

SEQ ID NO: 268437 - DNA, 25 bp, Homo sapien
gatgatgagtgccagctggttctga

SEQ ID NO: 268438 - DNA, 25 bp, Homo sapien
tggaatatgtgatgagcgtctgcac

SEQ ID NO: 268439 - DNA, 25 bp, Homo sapien
agctgctctccgggccccagcgtgc

SEQ ID NO: 268440 - DNA, 25 bp, Homo sapien
ggccccagcgtgcctatgatctgga

SEQ ID NO: 268441 - DNA, 25 bp, Homo sapien
ggaaggcaggcgagctgctctccgg

SEQ ID NO: 268442 - DNA, 25 bp, Homo sapien
ctgctgcccagaagataaggtttga

SEQ ID NO: 268443 - DNA, 25 bp, Homo sapien
tgcccagaagataaggtttgacctt

SEQ ID NO: 268444 - DNA, 25 bp, Homo sapien
cagaagataaggtttgacctttgag

SEQ ID NO: 268445 - DNA, 25 bp, Homo sapien
tgagttttgtcagctgatggatggt

SEQ ID NO: 268446 - DNA, 25 bp, Homo sapien
gtctgtgctggcctgcacatacact

SEQ ID NO: 268447 - DNA, 25 bp, Homo sapien
ctgttgccgccccagtctgtgctgg

SEQ ID NO: 268448 - DNA, 25 bp, Homo sapien
cccagtctgtgctggcctgcacata

SEQ ID NO: 268449 - DNA, 25 bp, Homo sapien
tgtgctggcctgcacatacactatc

SEQ ID NO: 268450 - DNA, 25 bp, Homo sapien
gtagttgtcgtccaccacctttcaa

SEQ ID NO: 268451 - DNA, 25 bp, Homo sapien
taactgcaaatcaggttggtctctg

SEQ ID NO: 268452 - DNA, 25 bp, Homo sapien
gacaacactgtgtacattgaccact

SEQ ID NO: 268453 - DNA, 25 bp, Homo sapien
ggtacattatctcatgcttctgcaa

SEQ ID NO: 268454 - DNA, 25 bp, Homo sapien
tttgcagtcccacgtggcatggcct

SEQ ID NO: 268455 - DNA, 25 bp, Homo sapien
ctttgttcagatgggtggaaacgct

SEQ ID NO: 268456 - DNA, 25 bp, Homo sapien
cacggagcaggcattgtgaactggc

SEQ ID NO: 268457 - DNA, 25 bp, Homo sapien
gaactggctggtgtttgcagtccca

SEQ ID NO: 268458 - DNA, 25 bp, Homo sapien
acagctggaagggtgcatggcccgc

SEQ ID NO: 268459 - DNA, 25 bp, Homo sapien
ctggaagggtgcatggcccgctcac

SEQ ID NO: 268460 - DNA, 25 bp, Homo sapien
tgcacagctggaagggtgcatggcc

SEQ ID NO: 268461 - DNA, 25 bp, Homo sapien
gtgcacagctggaagggtgcatggc

SEQ ID NO: 268462 - DNA, 25 bp, Homo sapien
caccaaggccctgacgcactgcctc

SEQ ID NO: 268463 - DNA, 25 bp, Homo sapien
gccaccaaggccctgacgcactgcc

SEQ ID NO: 268464 - DNA, 25 bp, Homo sapien
ccaccaaggccctgacgcactgcct

SEQ ID NO: 268465 - DNA, 25 bp, Homo sapien
ggagccggcttacaggagggcagct

SEQ ID NO: 268466 - DNA, 25 bp, Homo sapien
aagagggggatgaagtgggtctcca

SEQ ID NO: 268467 - DNA, 25 bp, Homo sapien
ggcagctggctcgggagccggctta

SEQ ID NO: 268468 - DNA, 25 bp, Homo sapien
agcagatctccacccccctgcctca

SEQ ID NO: 268469 - DNA, 25 bp, Homo sapien
cttgcccaaacaagaatattcttag

SEQ ID NO: 268470 - DNA, 25 bp, Homo sapien
aaatgatagtttcacatctcttagt

SEQ ID NO: 268471 - DNA, 25 bp, Homo sapien
atattcttagttccactggccagga

SEQ ID NO: 268472 - DNA, 25 bp, Homo sapien
agttcccttgcccaaacaagaatat

SEQ ID NO: 268473 - DNA, 25 bp, Homo sapien
gggagtgatttaagcaatggtgtct

SEQ ID NO: 268474 - DNA, 25 bp, Homo sapien
ggtcaccgtgcttttatgagtagtg

SEQ ID NO: 268475 - DNA, 25 bp, Homo sapien
tggtgtctggagtaagccttacaat

SEQ ID NO: 268476 - DNA, 25 bp, Homo sapien
gggtgccttgcataatagttcactg

SEQ ID NO: 268477 - DNA, 25 bp, Homo sapien
tggacacagaagcacgcctaggctg

SEQ ID NO: 268478 - DNA, 25 bp, Homo sapien
ggcagggatgggacccatgccccct

SEQ ID NO: 268479 - DNA, 25 bp, Homo sapien
cccatgccccctccttagaggacgg

SEQ ID NO: 268480 - DNA, 25 bp, Homo sapien
acagaagcacgcctaggctgggcag

SEQ ID NO: 268481 - DNA, 25 bp, Homo sapien
ggagtctgtggccttcctcacgcag

SEQ ID NO: 268482 - DNA, 25 bp, Homo sapien
tgggagtctgtggccttcctcacgc

SEQ ID NO: 268483 - DNA, 25 bp, Homo sapien
ctgggagtctgtggccttcctcacg

SEQ ID NO: 268484 - DNA, 25 bp, Homo sapien
agtctgtggccttcctcacgcagag

SEQ ID NO: 268485 - DNA, 25 bp, Homo sapien
ttgacattttaatgggcgccatggc

SEQ ID NO: 268486 - DNA, 25 bp, Homo sapien
gaattcgagggatagacagtctcca

SEQ ID NO: 268487 - DNA, 25 bp, Homo sapien
tctggctgagatttccgtgcaagac

SEQ ID NO: 268488 - DNA, 25 bp, Homo sapien
ttgagaaggtgcgtctcccctgctc

SEQ ID NO: 268489 - DNA, 25 bp, Homo sapien
agctctggagttggcgcagcacagc

SEQ ID NO: 268490 - DNA, 25 bp, Homo sapien
tcttctgcaactgtcctgaggagcc

SEQ ID NO: 268491 - DNA, 25 bp, Homo sapien
tgtgtgctttacctgtctgcgtgag

SEQ ID NO: 268492 - DNA, 25 bp, Homo sapien
tacggatgctcacggttgcacacag

SEQ ID NO: 268493 - DNA, 25 bp, Homo sapien
ctgtcgcatctggtcgggcaaggtg

SEQ ID NO: 268494 - DNA, 25 bp, Homo sapien
ggttggaggaaagcaatctcagagc

SEQ ID NO: 268495 - DNA, 25 bp, Homo sapien
tgtcgcatctggtcgggcaaggtgg

SEQ ID NO: 268496 - DNA, 25 bp, Homo sapien
tggaggaaagcaatctcagagccat

SEQ ID NO: 268497 - DNA, 25 bp, Homo sapien
gcgcacctccatggacgtcatttgt

SEQ ID NO: 268498 - DNA, 25 bp, Homo sapien
gcatgtgtgcacataggctttgcat

SEQ ID NO: 268499 - DNA, 25 bp, Homo sapien
cacattcgccttccgttctacagag

SEQ ID NO: 268500 - DNA, 25 bp, Homo sapien
tttgtcctcttatgcgagcagccgg

SEQ ID NO: 268501 - DNA, 25 bp, Homo sapien
tcaactggcagcagtgatctgtgct

SEQ ID NO: 268502 - DNA, 25 bp, Homo sapien
ggcgctcccatgttgctttaacctg

SEQ ID NO: 268503 - DNA, 25 bp, Homo sapien
cacgctgtaaagatcgcactgggtt

SEQ ID NO: 268504 - DNA, 25 bp, Homo sapien
ttaacctggctgaggcccgatgctg

SEQ ID NO: 268505 - DNA, 25 bp, Homo sapien
cattgtctactttcggcctgtgggt

SEQ ID NO: 268506 - DNA, 25 bp, Homo sapien
tcaatactatttggtgcctgctagg

SEQ ID NO: 268507 - DNA, 25 bp, Homo sapien
ttactgactgctgcgtgtgctgtgg

SEQ ID NO: 268508 - DNA, 25 bp, Homo sapien
tagaaggatgatcaggatgcagccc

SEQ ID NO: 268509 - DNA, 25 bp, Homo sapien
ctgagacaaaagtgggtgccctatt

SEQ ID NO: 268510 - DNA, 25 bp, Homo sapien
tggcaaagtttcgatgaagggaaac

SEQ ID NO: 268511 - DNA, 25 bp, Homo sapien
tggtgacgggaaccttaagctgatg

SEQ ID NO: 268512 - DNA, 25 bp, Homo sapien
ccttaagctgatggggattgtctgc

SEQ ID NO: 268513 - DNA, 25 bp, Homo sapien
tgactgtggcaaagtttcgatgaag

SEQ ID NO: 268514 - DNA, 25 bp, Homo sapien
tacttggtgcaggtagtggagtttc

SEQ ID NO: 268515 - DNA, 25 bp, Homo sapien
tcagccccagacgaagtcctttgtt

SEQ ID NO: 268516 - DNA, 25 bp, Homo sapien
tgttttttgggtcagccccagacga

SEQ ID NO: 268517 - DNA, 25 bp, Homo sapien
taatgaagccccgtgtacccgctta

SEQ ID NO: 268518 - DNA, 25 bp, Homo sapien
gaagctggaagtcctcgtgctctgt

SEQ ID NO: 268519 - DNA, 25 bp, Homo sapien
tccggtgtttcttacatagaccagg

SEQ ID NO: 268520 - DNA, 25 bp, Homo sapien
taaatcccttagctggccactgaag

SEQ ID NO: 268521 - DNA, 25 bp, Homo sapien
tagaccaggttagtctgcccaagat

SEQ ID NO: 268522 - DNA, 25 bp, Homo sapien
caggtgagcatgcgggcaattggcc

SEQ ID NO: 268523 - DNA, 25 bp, Homo sapien
attcaggtgagcatgcgggcaattg

SEQ ID NO: 268524 - DNA, 25 bp, Homo sapien
tcattcaggtgagcatgcgggcaat

SEQ ID NO: 268525 - DNA, 25 bp, Homo sapien
tcaggtgagcatgcgggcaattggc

SEQ ID NO: 268526 - DNA, 25 bp, Homo sapien
cctctggcactctcatgcggtggga

SEQ ID NO: 268527 - DNA, 25 bp, Homo sapien
cccctctggcactctcatgcggtgg

SEQ ID NO: 268528 - DNA, 25 bp, Homo sapien
tggcactctcatgcggtgggaagga

SEQ ID NO: 268529 - DNA, 25 bp, Homo sapien
tctggcactctcatgcggtgggaag

SEQ ID NO: 268530 - DNA, 25 bp, Homo sapien
catggtattggtctggtgccttcga

SEQ ID NO: 268531 - DNA, 25 bp, Homo sapien
aaatatggaccacgtggtgtgctga

SEQ ID NO: 268532 - DNA, 25 bp, Homo sapien
ggtgtgctgaaagggccactccacc

SEQ ID NO: 268533 - DNA, 25 bp, Homo sapien
cgatgaaagcaatgcaggtggcact

SEQ ID NO: 268534 - DNA, 25 bp, Homo sapien
gattatgcccggtttggaatatttg

SEQ ID NO: 268535 - DNA, 25 bp, Homo sapien
aatttggggtggcactccagagtga

SEQ ID NO: 268536 - DNA, 25 bp, Homo sapien
aacaattttgattatgcccggtttg

SEQ ID NO: 268537 - DNA, 25 bp, Homo sapien
tgagttgaatgttggcatattgagg

SEQ ID NO: 268538 - DNA, 25 bp, Homo sapien
tgggcaccgccatgatgtcatcttt

SEQ ID NO: 268539 - DNA, 25 bp, Homo sapien
gggcaccgccatgatgtcatctttt

SEQ ID NO: 268540 - DNA, 25 bp, Homo sapien
ggcaccgccatgatgtcatcttttc

SEQ ID NO: 268541 - DNA, 25 bp, Homo sapien
gttgaaactgaacatatctgatggc

SEQ ID NO: 268542 - DNA, 25 bp, Homo sapien
ctttgctgcaagatcgaggctgtcc

SEQ ID NO: 268543 - DNA, 25 bp, Homo sapien
gaaaccttccttgtatccctcctga

SEQ ID NO: 268544 - DNA, 25 bp, Homo sapien
cagccacagacttagagattctgag

SEQ ID NO: 268545 - DNA, 25 bp, Homo sapien
ggctgagctgaatccgttttcactg

SEQ ID NO: 268546 - DNA, 25 bp, Homo sapien
gggctgagctgaatccgttttcact

SEQ ID NO: 268547 - DNA, 25 bp, Homo sapien
aataccagtgtcaggagcggactcg

SEQ ID NO: 268548 - DNA, 25 bp, Homo sapien
tcagaagacaccagctaaggttttc

SEQ ID NO: 268549 - DNA, 25 bp, Homo sapien
gagcttttgcatgcctacgactatg

SEQ ID NO: 268550 - DNA, 25 bp, Homo sapien
agcggactcgttccccttcatggcg

SEQ ID NO: 268551 - DNA, 25 bp, Homo sapien
ttgtgtgtggtggactgagatccac

SEQ ID NO: 268552 - DNA, 25 bp, Homo sapien
tccagggcataagtaggtgcacaga

SEQ ID NO: 268553 - DNA, 25 bp, Homo sapien
ttttctccagggcataagtaggtgc

SEQ ID NO: 268554 - DNA, 25 bp, Homo sapien
ctgtctttcccgggcttttctccag

SEQ ID NO: 268555 - DNA, 25 bp, Homo sapien
cttgaagaggctgcccgagaactgg

SEQ ID NO: 268556 - DNA, 25 bp, Homo sapien
gccttttgagaggtgtgagagtcta

SEQ ID NO: 268557 - DNA, 25 bp, Homo sapien
ggtaaggtgggctactgtctgcatc

SEQ ID NO: 268558 - DNA, 25 bp, Homo sapien
tatagatgctgctgcgttaggaagc

SEQ ID NO: 268559 - DNA, 25 bp, Homo sapien
cagagagccaggtgccctcggctga

SEQ ID NO: 268560 - DNA, 25 bp, Homo sapien
gcagagagggtcctccttcgcctca

SEQ ID NO: 268561 - DNA, 25 bp, Homo sapien
aacaggatgcgatttcagacatggg

SEQ ID NO: 268562 - DNA, 25 bp, Homo sapien
ggtgaagggccgatctccaatgaga

SEQ ID NO: 268563 - DNA, 25 bp, Homo sapien
taatgtgaccaggacgtctgtggcc

SEQ ID NO: 268564 - DNA, 25 bp, Homo sapien
atttgtgtaatgtgaccaggacgtc

SEQ ID NO: 268565 - DNA, 25 bp, Homo sapien
ggctagccagcagccgtgtgctttg

SEQ ID NO: 268566 - DNA, 25 bp, Homo sapien
ccagcagccgtgtgctttgtttgct

SEQ ID NO: 268567 - DNA, 25 bp, Homo sapien
aaactgctaggcctttgtacccagg

SEQ ID NO: 268568 - DNA, 25 bp, Homo sapien
cctcctccatgctgagttcggggca

SEQ ID NO: 268569 - DNA, 25 bp, Homo sapien
caataacgttgcttgatgcaaactg

SEQ ID NO: 268570 - DNA, 25 bp, Homo sapien
taggcctttgtacccaggcacgtgg

SEQ ID NO: 268571 - DNA, 25 bp, Homo sapien
ggtacttggagctgactcgtgtatt

SEQ ID NO: 268572 - DNA, 25 bp, Homo sapien
cgtgtatttggctccaactgtggga

SEQ ID NO: 268573 - DNA, 25 bp, Homo sapien
cctgctgaatctggcgcctggctct

SEQ ID NO: 268574 - DNA, 25 bp, Homo sapien
gagcctgctgaatctggcgcctggc

SEQ ID NO: 268575 - DNA, 25 bp, Homo sapien
aacttgggccgttcagaatagtgta

SEQ ID NO: 268576 - DNA, 25 bp, Homo sapien
ggtttgtgccccatcagaggaatac

SEQ ID NO: 268577 - DNA, 25 bp, Homo sapien
tcagaggaatactccggaggaactt

SEQ ID NO: 268578 - DNA, 25 bp, Homo sapien
cagcatgcttgtggtccaccaggtt

SEQ ID NO: 268579 - DNA, 25 bp, Homo sapien
tcttaaggccagtggccgctgtcat

SEQ ID NO: 268580 - DNA, 25 bp, Homo sapien
tgttcgtaggggaaagtcagcttcc

SEQ ID NO: 268581 - DNA, 25 bp, Homo sapien
cctttgcagggggtcttgtggaaat

SEQ ID NO: 268582 - DNA, 25 bp, Homo sapien
gtgttccatccttcttaaggccagt

SEQ ID NO: 268583 - DNA, 25 bp, Homo sapien
tgtctccatacagcacaggggtggt

SEQ ID NO: 268584 - DNA, 25 bp, Homo sapien
ttgggtctgtaggataggatgtctc

SEQ ID NO: 268585 - DNA, 25 bp, Homo sapien
tcactcatcccgtgcttgggtctgt

SEQ ID NO: 268586 - DNA, 25 bp, Homo sapien
gatgtctccatacagcacaggggtg

SEQ ID NO: 268587 - DNA, 25 bp, Homo sapien
tcagatcggattcttggctgtgagg

SEQ ID NO: 268588 - DNA, 25 bp, Homo sapien
tgtgagggcaaccagctgctttcct

SEQ ID NO: 268589 - DNA, 25 bp, Homo sapien
gaaaccatctagcagtggtgactca

SEQ ID NO: 268590 - DNA, 25 bp, Homo sapien
tcagggagtggcctctgctcggtat

SEQ ID NO: 268591 - DNA, 25 bp, Homo sapien
ggctcctctcgccaaatctgggggg

SEQ ID NO: 268592 - DNA, 25 bp, Homo sapien
gaagatgtatcttcttggggcccct

SEQ ID NO: 268593 - DNA, 25 bp, Homo sapien
tagaactcttatccccagggtcagg

SEQ ID NO: 268594 - DNA, 25 bp, Homo sapien
tcctctcgccaaatctggggggtct

SEQ ID NO: 268595 - DNA, 25 bp, Homo sapien
aagggcttagtaagtagatcagaaa

SEQ ID NO: 268596 - DNA, 25 bp, Homo sapien
aaaataggtttagcatattacgatc

SEQ ID NO: 268597 - DNA, 25 bp, Homo sapien
taggtttagcatattacgatcatgt

SEQ ID NO: 268598 - DNA, 25 bp, Homo sapien
taagtagatcagaaatgtactccct

SEQ ID NO: 268599 - DNA, 25 bp, Homo sapien
tgctgtggcgcggtgcgctcagatt

SEQ ID NO: 268600 - DNA, 25 bp, Homo sapien
ctcagattggcggagaaacggccac

SEQ ID NO: 268601 - DNA, 25 bp, Homo sapien
gaaacggccacacgcctacggagct

SEQ ID NO: 268602 - DNA, 25 bp, Homo sapien
cgcggtgcgctcagattggcggaga

SEQ ID NO: 268603 - DNA, 25 bp, Homo sapien
gattcaaagaccacggacaccgtcc

SEQ ID NO: 268604 - DNA, 25 bp, Homo sapien
gagaaggacctgtagaaaggattca

SEQ ID NO: 268605 - DNA, 25 bp, Homo sapien
cggacaccgtccactgtttttctgt

SEQ ID NO: 268606 - DNA, 25 bp, Homo sapien
cagcagctgatatttgagaaggacc

SEQ ID NO: 268607 - DNA, 25 bp, Homo sapien
taaattgctagtctaattccaaggg

SEQ ID NO: 268608 - DNA, 25 bp, Homo sapien
aaattgctagtctaattccaaggga

SEQ ID NO: 268609 - DNA, 25 bp, Homo sapien
tataaattgctagtctaattccaag

SEQ ID NO: 268610 - DNA, 25 bp, Homo sapien
attgctagtctaattccaagggaat

SEQ ID NO: 268611 - DNA, 25 bp, Homo sapien
cttaatggttgctggaatcttgggc

SEQ ID NO: 268612 - DNA, 25 bp, Homo sapien
tgaagttcgtatgtatccagcaggt

SEQ ID NO: 268613 - DNA, 25 bp, Homo sapien
tagggcctaaattgtagcatctccc

SEQ ID NO: 268614 - DNA, 25 bp, Homo sapien
ggcagctgctctttgattgtaatca

SEQ ID NO: 268615 - DNA, 25 bp, Homo sapien
cagagcttgttaccctggttacctt

SEQ ID NO: 268616 - DNA, 25 bp, Homo sapien
aatcttgtcaacagttggatgccag

SEQ ID NO: 268617 - DNA, 25 bp, Homo sapien
gtcaacagttggatgccaggcctga

SEQ ID NO: 268618 - DNA, 25 bp, Homo sapien
accttcttacctagtgccaatggcc

SEQ ID NO: 268619 - DNA, 25 bp, Homo sapien
ggcgccccgtgtagctgaaaaacca

SEQ ID NO: 268620 - DNA, 25 bp, Homo sapien
cgccccgtgtagctgaaaaaccaga

SEQ ID NO: 268621 - DNA, 25 bp, Homo sapien
atggggcgccccgtgtagctgaaaa

SEQ ID NO: 268622 - DNA, 25 bp, Homo sapien
aaaaccagaggtttgcttgggccat

SEQ ID NO: 268623 - DNA, 25 bp, Homo sapien
tcagccttaagtcgtgaaaggagcc

SEQ ID NO: 268624 - DNA, 25 bp, Homo sapien
tgttggcagcacatctactgaactg

SEQ ID NO: 268625 - DNA, 25 bp, Homo sapien
cgaggatgacgtggagactctcgaa

SEQ ID NO: 268626 - DNA, 25 bp, Homo sapien
tactgaactgcaaatgacagggacg

SEQ ID NO: 268627 - DNA, 25 bp, Homo sapien
actgtggatgtggtacagatcctct

SEQ ID NO: 268628 - DNA, 25 bp, Homo sapien
tatccctggatgcttatggagctgc

SEQ ID NO: 268629 - DNA, 25 bp, Homo sapien
tgtggcatacatagtggatacctga

SEQ ID NO: 268630 - DNA, 25 bp, Homo sapien
tggagtaacaccagagcgtagggca

SEQ ID NO: 268631 - DNA, 25 bp, Homo sapien
acagaaatacagactacgtcagaga

SEQ ID NO: 268632 - DNA, 25 bp, Homo sapien
agaaatacagactacgtcagagaat

SEQ ID NO: 268633 - DNA, 25 bp, Homo sapien
acagactacgtcagagaatactata

SEQ ID NO: 268634 - DNA, 25 bp, Homo sapien
aatacagactacgtcagagaatact

SEQ ID NO: 268635 - DNA, 25 bp, Homo sapien
tgtatacatatgtaactaacctgca

SEQ ID NO: 268636 - DNA, 25 bp, Homo sapien
caccagcatggcacatgtatacata

SEQ ID NO: 268637 - DNA, 25 bp, Homo sapien
agatgacacattagtgggtgcagcg

SEQ ID NO: 268638 - DNA, 25 bp, Homo sapien
ctaatgctagatgacacattagtgg

SEQ ID NO: 268639 - DNA, 25 bp, Homo sapien
cttgtaggatgtggcagcattgatt

SEQ ID NO: 268640 - DNA, 25 bp, Homo sapien
ctgtgcagttgagtgcattctcccc

SEQ ID NO: 268641 - DNA, 25 bp, Homo sapien
cactgtgcagttgagtgcattctcc

SEQ ID NO: 268642 - DNA, 25 bp, Homo sapien
gatgtggcagcattgattccctgca

SEQ ID NO: 268643 - DNA, 25 bp, Homo sapien
gatagccagtgtcaaaatcgtcatt

SEQ ID NO: 268644 - DNA, 25 bp, Homo sapien
tagccagtgtcaaaatcgtcatttc

SEQ ID NO: 268645 - DNA, 25 bp, Homo sapien
aaaatcgtcatttcttctcactctc

SEQ ID NO: 268646 - DNA, 25 bp, Homo sapien
gtgtcaaaatcgtcatttcttctca

SEQ ID NO: 268647 - DNA, 25 bp, Homo sapien
gagcccagctgttcttatgcccctt

SEQ ID NO: 268648 - DNA, 25 bp, Homo sapien
tggcaatggctaatcccaagcccta

SEQ ID NO: 268649 - DNA, 25 bp, Homo sapien
gaataagaagcaaaaccccacaatg

SEQ ID NO: 268650 - DNA, 25 bp, Homo sapien
aattggttaaactcggcatgcagtc

SEQ ID NO: 268651 - DNA, 25 bp, Homo sapien
agaacgaagctgatcgtccttcttc

SEQ ID NO: 268652 - DNA, 25 bp, Homo sapien
cagaacgaagctgatcgtccttctt

SEQ ID NO: 268653 - DNA, 25 bp, Homo sapien
cttcttctcctgacagagggcactc

SEQ ID NO: 268654 - DNA, 25 bp, Homo sapien
ttctcctgacagagggcactctgga

SEQ ID NO: 268655 - DNA, 25 bp, Homo sapien
catggtgctgttggggccactttct

SEQ ID NO: 268656 - DNA, 25 bp, Homo sapien
gccatgtccccagttgtgagaaaag

SEQ ID NO: 268657 - DNA, 25 bp, Homo sapien
tttcttgtccacctgagaggcagca

SEQ ID NO: 268658 - DNA, 25 bp, Homo sapien
aggggcttgatccttgccatgtccc

SEQ ID NO: 268659 - DNA, 25 bp, Homo sapien
tggaatgtgcatcctcagcacttgt

SEQ ID NO: 268660 - DNA, 25 bp, Homo sapien
gactgtatgtgtaactggcttgcca

SEQ ID NO: 268661 - DNA, 25 bp, Homo sapien
ccctgcgtgatggttctctagtgga

SEQ ID NO: 268662 - DNA, 25 bp, Homo sapien
gcctgtgctgcgaatagccttcact

SEQ ID NO: 268663 - DNA, 25 bp, Homo sapien
ccatgaatgtctccaagtcggtgtc

SEQ ID NO: 268664 - DNA, 25 bp, Homo sapien
aatggtgcccttgagttgaagcttc

SEQ ID NO: 268665 - DNA, 25 bp, Homo sapien
aagcccgaagcttgcaatggtgccc

SEQ ID NO: 268666 - DNA, 25 bp, Homo sapien
ttgaagcttccaccacactgggcag

SEQ ID NO: 268667 - DNA, 25 bp, Homo sapien
tgtccatctcccttgagaggctgtg

SEQ ID NO: 268668 - DNA, 25 bp, Homo sapien
tgatagatcagctgtcggctgctgg

SEQ ID NO: 268669 - DNA, 25 bp, Homo sapien
cagggtgcctgtgataagtagcatc

SEQ ID NO: 268670 - DNA, 25 bp, Homo sapien
ccaggcaagggtggctatcgctgca

SEQ ID NO: 268671 - DNA, 25 bp, Homo sapien
tagcatcctgtgataggcaggcaca

SEQ ID NO: 268672 - DNA, 25 bp, Homo sapien
tcctggacacctatctcctacaacc

SEQ ID NO: 268673 - DNA, 25 bp, Homo sapien
acatattgcccctactcctggacac

SEQ ID NO: 268674 - DNA, 25 bp, Homo sapien
ctcctacaacctgaacccacgtcat

SEQ ID NO: 268675 - DNA, 25 bp, Homo sapien
ggacacctatctcctacaacctgaa

SEQ ID NO: 268676 - DNA, 25 bp, Homo sapien
gtaagaaagagaatgtgctgatttc

SEQ ID NO: 268677 - DNA, 25 bp, Homo sapien
tcggagtaagaaagagaatgtgctg

SEQ ID NO: 268678 - DNA, 25 bp, Homo sapien
cttcggagtaagaaagagaatgtgc

SEQ ID NO: 268679 - DNA, 25 bp, Homo sapien
gagtaagaaagagaatgtgctgatt

SEQ ID NO: 268680 - DNA, 25 bp, Homo sapien
taggtcttggtgtgagatcattccc

SEQ ID NO: 268681 - DNA, 25 bp, Homo sapien
tcagtccacgttccaagaaaggcag

SEQ ID NO: 268682 - DNA, 25 bp, Homo sapien
tagaggctccacgaaagtcagcatg

SEQ ID NO: 268683 - DNA, 25 bp, Homo sapien
gaggagcaaacgcttcggagcctcg

SEQ ID NO: 268684 - DNA, 25 bp, Homo sapien
gctgaactagccttgggaaggaact

SEQ ID NO: 268685 - DNA, 25 bp, Homo sapien
agctgtaactttccgctcgctgagt

SEQ ID NO: 268686 - DNA, 25 bp, Homo sapien
ggcacactggtaggcatgatggaaa

SEQ ID NO: 268687 - DNA, 25 bp, Homo sapien
gataccccatagtcattgtgtccag

SEQ ID NO: 268688 - DNA, 25 bp, Homo sapien
tatgtccctgcctaacgctggtgtc

SEQ ID NO: 268689 - DNA, 25 bp, Homo sapien
tggactgcctggtggttaaaatacg

SEQ ID NO: 268690 - DNA, 25 bp, Homo sapien
taagtgttctggacaaggccaagct

SEQ ID NO: 268691 - DNA, 25 bp, Homo sapien
cctgaatgatgagcctatgtccctg

SEQ ID NO: 268692 - DNA, 25 bp, Homo sapien
tgaattctaccaaagtcagccgtgg

SEQ ID NO: 268693 - DNA, 25 bp, Homo sapien
gagagtgcgtctcctagccttaatg

SEQ ID NO: 268694 - DNA, 25 bp, Homo sapien
gagggtagtttcagtcactcatcgg

SEQ ID NO: 268695 - DNA, 25 bp, Homo sapien
tggctgcactggcacagaatactaa

SEQ ID NO: 268696 - DNA, 25 bp, Homo sapien
cagaggcagtgtgaaacaatcgttt

SEQ ID NO: 268697 - DNA, 25 bp, Homo sapien
cttttaaacaggagagcttgctatc

SEQ ID NO: 268698 - DNA, 25 bp, Homo sapien
tattaagagcacgtgagatcatggc

SEQ ID NO: 268699 - DNA, 25 bp, Homo sapien
gacagtgtcactagtcacaggttga

SEQ ID NO: 268700 - DNA, 25 bp, Homo sapien
aacaaaattgagagattgctagcaa

SEQ ID NO: 268701 - DNA, 25 bp, Homo sapien
ggatcaacaaaattgagagattgct

SEQ ID NO: 268702 - DNA, 25 bp, Homo sapien
gatcaacaaaattgagagattgcta

SEQ ID NO: 268703 - DNA, 25 bp, Homo sapien
tcaacaaaattgagagattgctagc

SEQ ID NO: 268704 - DNA, 25 bp, Homo sapien
cctgttggccccttgtatgtaccct

SEQ ID NO: 268705 - DNA, 25 bp, Homo sapien
tatgtaccctgtgtttgagttgtaa

SEQ ID NO: 268706 - DNA, 25 bp, Homo sapien
gagttgtaatgaacccctgcttgtc

SEQ ID NO: 268707 - DNA, 25 bp, Homo sapien
cctgtgtttgagttgtaatgaaccc

SEQ ID NO: 268708 - DNA, 25 bp, Homo sapien
tgctcttgtcttggcagttgggccg

SEQ ID NO: 268709 - DNA, 25 bp, Homo sapien
tcttgtcttggcagttgggccgcat

SEQ ID NO: 268710 - DNA, 25 bp, Homo sapien
aatgctcttgtcttggcagttgggc

SEQ ID NO: 268711 - DNA, 25 bp, Homo sapien
catgacagcattaatgctcttgtct

SEQ ID NO: 268712 - DNA, 25 bp, Homo sapien
gggagcaagccatgcagctatctta

SEQ ID NO: 268713 - DNA, 25 bp, Homo sapien
tgtactacctactaatggctggcta

SEQ ID NO: 268714 - DNA, 25 bp, Homo sapien
tattttagtcatccactgcggtccg

SEQ ID NO: 268715 - DNA, 25 bp, Homo sapien
tattttcctcactaatttgggcagc

SEQ ID NO: 268716 - DNA, 25 bp, Homo sapien
ctgaccggcactttggctccaaaat

SEQ ID NO: 268717 - DNA, 25 bp, Homo sapien
gaccggcactttggctccaaaataa

SEQ ID NO: 268718 - DNA, 25 bp, Homo sapien
tgaccggcactttggctccaaaata

SEQ ID NO: 268719 - DNA, 25 bp, Homo sapien
ggggattgttcctcttcgaaccaga

SEQ ID NO: 268720 - DNA, 25 bp, Homo sapien
gattgttcctcttcgaaccagaacc

SEQ ID NO: 268721 - DNA, 25 bp, Homo sapien
cgacgacgacgacgggggctgcctc

SEQ ID NO: 268722 - DNA, 25 bp, Homo sapien
actcggctcggtccacctggcgcgg

SEQ ID NO: 268723 - DNA, 25 bp, Homo sapien
gttatctgtgtacatccacgctggg

SEQ ID NO: 268724 - DNA, 25 bp, Homo sapien
tgcttaatgaggacttgactcggga

SEQ ID NO: 268725 - DNA, 25 bp, Homo sapien
ttaaatgcccttgagcgcgggtttc

SEQ ID NO: 268726 - DNA, 25 bp, Homo sapien
caaggctcacgcgtcgatgtgtagc

SEQ ID NO: 268727 - DNA, 25 bp, Homo sapien
gggaccagccgaagtcggcgtcgcc

SEQ ID NO: 268728 - DNA, 25 bp, Homo sapien
gtcgcccggagctcgcgaggccggg

SEQ ID NO: 268729 - DNA, 25 bp, Homo sapien
cagaagaggagtggcgaggagccgg

SEQ ID NO: 268730 - DNA, 25 bp, Homo sapien
tctgagaggaaaccattcccgggct

SEQ ID NO: 268731 - DNA, 25 bp, Homo sapien
tcttcttctgaatgaagggaaatct

SEQ ID NO: 268732 - DNA, 25 bp, Homo sapien
tgttctgatccaaactcccttttct

SEQ ID NO: 268733 - DNA, 25 bp, Homo sapien
ggagcatcctgttctgatccaaact

SEQ ID NO: 268734 - DNA, 25 bp, Homo sapien
aaccaggagcatcctgttctgatcc

SEQ ID NO: 268735 - DNA, 25 bp, Homo sapien
tgtacttgaatcttaaattcagctg

SEQ ID NO: 268736 - DNA, 25 bp, Homo sapien
tattgtacttgaatcttaaattcag

SEQ ID NO: 268737 - DNA, 25 bp, Homo sapien
ccccaaatggccaaagcaataatga

SEQ ID NO: 268738 - DNA, 25 bp, Homo sapien
caaatggccaaagcaataatgagca

SEQ ID NO: 268739 - DNA, 25 bp, Homo sapien
tttatcataggatatctggcctggc

SEQ ID NO: 268740 - DNA, 25 bp, Homo sapien
gagactgctaaggaggactttcaca

SEQ ID NO: 268741 - DNA, 25 bp, Homo sapien
gaaagcaatgaagagcctggctccc

SEQ ID NO: 268742 - DNA, 25 bp, Homo sapien
aacaggcttacttttactgcaggag

SEQ ID NO: 268743 - DNA, 25 bp, Homo sapien
cgaggctaacgtgtcatggagtcca

SEQ ID NO: 268744 - DNA, 25 bp, Homo sapien
gctggcaccatttttgttgtgtcaa

SEQ ID NO: 268745 - DNA, 25 bp, Homo sapien
gcaccatttttgttgtgtcaagctc

SEQ ID NO: 268746 - DNA, 25 bp, Homo sapien
agaccggccttctcgaggctaacgt

SEQ ID NO: 268747 - DNA, 25 bp, Homo sapien
gtaacgaatccaattggagatgaag

SEQ ID NO: 268748 - DNA, 25 bp, Homo sapien
gaattttcctgcgtatttgtcacac

SEQ ID NO: 268749 - DNA, 25 bp, Homo sapien
atgaaggtctaggtttgaggagcaa

SEQ ID NO: 268750 - DNA, 25 bp, Homo sapien
cacaatttgattcgggttgtcccac

SEQ ID NO: 268751 - DNA, 25 bp, Homo sapien
tcggaatcgaatctgaaaaaccatc

SEQ ID NO: 268752 - DNA, 25 bp, Homo sapien
aggggaatggccctcctcggtgcct

SEQ ID NO: 268753 - DNA, 25 bp, Homo sapien
attcatcaggtctcggaatcgaatc

SEQ ID NO: 268754 - DNA, 25 bp, Homo sapien
gagaggggaatggccctcctcggtg

SEQ ID NO: 268755 - DNA, 25 bp, Homo sapien
gctggctcacccctatggacctgtt

SEQ ID NO: 268756 - DNA, 25 bp, Homo sapien
cccctatggacctgtttctgatgag

SEQ ID NO: 268757 - DNA, 25 bp, Homo sapien
tgtgacttgttgaccgctggctcac

SEQ ID NO: 268758 - DNA, 25 bp, Homo sapien
gtttatcctgtgacttgttgaccgc

SEQ ID NO: 268759 - DNA, 25 bp, Homo sapien
gatatttcatgggcctttcatgtgg

SEQ ID NO: 268760 - DNA, 25 bp, Homo sapien
tttcatgggcctttcatgtgggttt

SEQ ID NO: 268761 - DNA, 25 bp, Homo sapien
catgggcctttcatgtgggttttta

SEQ ID NO: 268762 - DNA, 25 bp, Homo sapien
agagaccatctggaactagaagagt

SEQ ID NO: 268763 - DNA, 25 bp, Homo sapien
gctctggagcaaatggagccagtcc

SEQ ID NO: 268764 - DNA, 25 bp, Homo sapien
ggctctggagcaaatggagccagtc

SEQ ID NO: 268765 - DNA, 25 bp, Homo sapien
agccagtgacttcatacataaagaa

SEQ ID NO: 268766 - DNA, 25 bp, Homo sapien
gctcgcccagtctccacttcttctg

SEQ ID NO: 268767 - DNA, 25 bp, Homo sapien
gtagtttgcactgaaagccagtgac

SEQ ID NO: 268768 - DNA, 25 bp, Homo sapien
tctgtaagtagtttgcactgaaagc

SEQ ID NO: 268769 - DNA, 25 bp, Homo sapien
cccggagacaaaggctgccaatgga

SEQ ID NO: 268770 - DNA, 25 bp, Homo sapien
acgtgcccccggagacaaaggctgc

SEQ ID NO: 268771 - DNA, 25 bp, Homo sapien
agcagggggcgctgtattgcacgtg

SEQ ID NO: 268772 - DNA, 25 bp, Homo sapien
tgtattgcacgtgcccccggagaca

SEQ ID NO: 268773 - DNA, 25 bp, Homo sapien
taagtcgcacatggcattagctgcc

SEQ ID NO: 268774 - DNA, 25 bp, Homo sapien
tagctgccatgtcttgaatttgggc

SEQ ID NO: 268775 - DNA, 25 bp, Homo sapien
gaagcggagagcctttaagtcgcac

SEQ ID NO: 268776 - DNA, 25 bp, Homo sapien
ggcactgagcactttaagcagacag

SEQ ID NO: 268777 - DNA, 25 bp, Homo sapien
aaagatgtgaaggaaggatgtcctc

SEQ ID NO: 268778 - DNA, 25 bp, Homo sapien
tccacctgttccagtgacaccaaag

SEQ ID NO: 268779 - DNA, 25 bp, Homo sapien
tgcctccagccaggaattccacctg

SEQ ID NO: 268780 - DNA, 25 bp, Homo sapien
caaacaactcccaaatgaatttcct

SEQ ID NO: 268781 - DNA, 25 bp, Homo sapien
tcagaactttctgcggccgctcctt

SEQ ID NO: 268782 - DNA, 25 bp, Homo sapien
ctgagtacagctggcaatccagatg

SEQ ID NO: 268783 - DNA, 25 bp, Homo sapien
ttcctccatggaaagacacaccagg

SEQ ID NO: 268784 - DNA, 25 bp, Homo sapien
ggccgctccttgctgagtacagctg

SEQ ID NO: 268785 - DNA, 25 bp, Homo sapien
ctgcaagattgcatcatcgattgag

SEQ ID NO: 268786 - DNA, 25 bp, Homo sapien
tcacatggcctgtcagaagatggac

SEQ ID NO: 268787 - DNA, 25 bp, Homo sapien
agcaaatggctaaactgtatccctc

SEQ ID NO: 268788 - DNA, 25 bp, Homo sapien
cccatagacgaatgcagcaaatggc

SEQ ID NO: 268789 - DNA, 25 bp, Homo sapien
gcaaatggctaaactgtatccctct

SEQ ID NO: 268790 - DNA, 25 bp, Homo sapien
ctttgacccatagacgaatgcagca

SEQ ID NO: 268791 - DNA, 25 bp, Homo sapien
gcaaggggcatcaccatctgccgtg

SEQ ID NO: 268792 - DNA, 25 bp, Homo sapien
tccagaagcaaggggcatcaccatc

SEQ ID NO: 268793 - DNA, 25 bp, Homo sapien
gggcatcaccatctgccgtgccaac

SEQ ID NO: 268794 - DNA, 25 bp, Homo sapien
ctgtgtccatccagaagcaaggggc

SEQ ID NO: 268795 - DNA, 25 bp, Homo sapien
aagtcttccaatccccaggcttaca

SEQ ID NO: 268796 - DNA, 25 bp, Homo sapien
aaacatcatcagcacggcacccttg

SEQ ID NO: 268797 - DNA, 25 bp, Homo sapien
tttatcagaggagtgtgatgcactc

SEQ ID NO: 268798 - DNA, 25 bp, Homo sapien
gaggaaagactgtgccaagtcttcc

SEQ ID NO: 268799 - DNA, 25 bp, Homo sapien
agtgtgtcagaacaccacagtaccc

SEQ ID NO: 268800 - DNA, 25 bp, Homo sapien
aaacagctctgacacagggagtgtg

SEQ ID NO: 268801 - DNA, 25 bp, Homo sapien
cagaacaccacagtaccctctggga

SEQ ID NO: 268802 - DNA, 25 bp, Homo sapien
cagggagtgtgtcagaacaccacag

SEQ ID NO: 268803 - DNA, 25 bp, Homo sapien
ctgccagtctgaagagggaacaagc

SEQ ID NO: 268804 - DNA, 25 bp, Homo sapien
gagctcaggatgtggtgccgtgcga

SEQ ID NO: 268805 - DNA, 25 bp, Homo sapien
ccagtctgaagagggaacaagcaga

SEQ ID NO: 268806 - DNA, 25 bp, Homo sapien
gtgcgagggcggtaagtggaaggaa

SEQ ID NO: 268807 - DNA, 25 bp, Homo sapien
tagagtggaaacgaccagcttcccc

SEQ ID NO: 268808 - DNA, 25 bp, Homo sapien
ctgtgcttttgtcaactttcctgca

SEQ ID NO: 268809 - DNA, 25 bp, Homo sapien
ctggtcgttgctctctaccgaggag

SEQ ID NO: 268810 - DNA, 25 bp, Homo sapien
ttgctctctaccgaggaggctctcc

SEQ ID NO: 268811 - DNA, 25 bp, Homo sapien
ccactgctctccacacccacaccca

SEQ ID NO: 268812 - DNA, 25 bp, Homo sapien
ccaggtgggccccactgctctccac

SEQ ID NO: 268813 - DNA, 25 bp, Homo sapien
tgcccaggtgggccccactgctctc

SEQ ID NO: 268814 - DNA, 25 bp, Homo sapien
ctgcccaggtgggccccactgctct

SEQ ID NO: 268815 - DNA, 25 bp, Homo sapien
aggagtgagacagctgccaaggtcc

SEQ ID NO: 268816 - DNA, 25 bp, Homo sapien
gacagctgccaaggtccaccttgtt

SEQ ID NO: 268817 - DNA, 25 bp, Homo sapien
agtgagacagctgccaaggtccacc

SEQ ID NO: 268818 - DNA, 25 bp, Homo sapien
tggtgaggagtgagacagctgccaa

SEQ ID NO: 268819 - DNA, 25 bp, Homo sapien
tcttctatccaggaggccgttagtg

SEQ ID NO: 268820 - DNA, 25 bp, Homo sapien
gtggaccaggaagtcaggacaagat

SEQ ID NO: 268821 - DNA, 25 bp, Homo sapien
aggccgttagtggaccaggaagtca

SEQ ID NO: 268822 - DNA, 25 bp, Homo sapien
atccaggaggccgttagtggaccag

SEQ ID NO: 268823 - DNA, 25 bp, Homo sapien
tctggatccagggtatatcatgatc

SEQ ID NO: 268824 - DNA, 25 bp, Homo sapien
caattttcagaacatctcctgggct

SEQ ID NO: 268825 - DNA, 25 bp, Homo sapien
ccagggtatatcatgatcattgtca

SEQ ID NO: 268826 - DNA, 25 bp, Homo sapien
ccattgtatagagaagtattctgga

SEQ ID NO: 268827 - DNA, 25 bp, Homo sapien
cagcagccccgatgtaatgccacat

SEQ ID NO: 268828 - DNA, 25 bp, Homo sapien
cgatgtaatgccacatcccagtgtg

SEQ ID NO: 268829 - DNA, 25 bp, Homo sapien
ggaggaagccaccaatctttgttct

SEQ ID NO: 268830 - DNA, 25 bp, Homo sapien
actcagcagccccgatgtaatgcca

SEQ ID NO: 268831 - DNA, 25 bp, Homo sapien
tggctgagagctgactgtttgcatg

SEQ ID NO: 268832 - DNA, 25 bp, Homo sapien
ttggaacccaactggcagatgtgct

SEQ ID NO: 268833 - DNA, 25 bp, Homo sapien
gactgtttgcatgatgcagttctca

SEQ ID NO: 268834 - DNA, 25 bp, Homo sapien
tcacagaaccttgtggtgccatctg

SEQ ID NO: 268835 - DNA, 25 bp, Homo sapien
tgggcccagccaggacgagactggg

SEQ ID NO: 268836 - DNA, 25 bp, Homo sapien
gactggggagtgttctgcggctgag

SEQ ID NO: 268837 - DNA, 25 bp, Homo sapien
tgccggccctgatgaccggccatga

SEQ ID NO: 268838 - DNA, 25 bp, Homo sapien
gatgaccggccatgatcgttccatt

SEQ ID NO: 268839 - DNA, 25 bp, Homo sapien
aggccaggccaagggagcgctgagg

SEQ ID NO: 268840 - DNA, 25 bp, Homo sapien
caattgtctacgtaataactgttgc

SEQ ID NO: 268841 - DNA, 25 bp, Homo sapien
acagcaggtgggagggcgagatcag

SEQ ID NO: 268842 - DNA, 25 bp, Homo sapien
ctaaggacacgaggaagcccagtgg

SEQ ID NO: 268843 - DNA, 25 bp, Homo sapien
cttcacatggatttagaatagtttt

SEQ ID NO: 268844 - DNA, 25 bp, Homo sapien
ggcttcacatggatttagaatagtt

SEQ ID NO: 268845 - DNA, 25 bp, Homo sapien
aagggcttcacatggatttagaata

SEQ ID NO: 268846 - DNA, 25 bp, Homo sapien
gggcttcacatggatttagaatagt

SEQ ID NO: 268847 - DNA, 25 bp, Homo sapien
tgggtgggtgcaaccccaatgacca

SEQ ID NO: 268848 - DNA, 25 bp, Homo sapien
caaaagatgagacgttgcctgcaac

SEQ ID NO: 268849 - DNA, 25 bp, Homo sapien
gcaaaggcagagataccgtactggc

SEQ ID NO: 268850 - DNA, 25 bp, Homo sapien
caatgaccaaggagctggccaagct

SEQ ID NO: 268851 - DNA, 25 bp, Homo sapien
agtgcctgaccgtttcctgggagag

SEQ ID NO: 268852 - DNA, 25 bp, Homo sapien
gatcccagacatggattttccctga

SEQ ID NO: 268853 - DNA, 25 bp, Homo sapien
gaagccggctcaggtcagtgcctga

SEQ ID NO: 268854 - DNA, 25 bp, Homo sapien
tccctgaaaccaactcttcctgtct

SEQ ID NO: 268855 - DNA, 25 bp, Homo sapien
tcactgactgaaatctttgacctct

SEQ ID NO: 268856 - DNA, 25 bp, Homo sapien
cctctgtagtacagatgggatccat

SEQ ID NO: 268857 - DNA, 25 bp, Homo sapien
caggctgctgttttcgtcgacggtg

SEQ ID NO: 268858 - DNA, 25 bp, Homo sapien
gacggtgtccgtaactcactgactg

SEQ ID NO: 268859 - DNA, 25 bp, Homo sapien
ctgatataattctggatgtatgagc

SEQ ID NO: 268860 - DNA, 25 bp, Homo sapien
atgagcagttttcatacaacactct

SEQ ID NO: 268861 - DNA, 25 bp, Homo sapien
tttcatacaacactctccctaaagc

SEQ ID NO: 268862 - DNA, 25 bp, Homo sapien
gatataattctggatgtatgagcag

SEQ ID NO: 268863 - DNA, 25 bp, Homo sapien
ggagaattgatgtggcaggtcctga

SEQ ID NO: 268864 - DNA, 25 bp, Homo sapien
gaagccatggccaggtcagtcttcc

SEQ ID NO: 268865 - DNA, 25 bp, Homo sapien
tgagaatttcactccacacgtgacg

SEQ ID NO: 268866 - DNA, 25 bp, Homo sapien
agggacagccgcttctgagaatttc

SEQ ID NO: 268867 - DNA, 25 bp, Homo sapien
tgtctgtgggacagtcatttacccg

SEQ ID NO: 268868 - DNA, 25 bp, Homo sapien
tcataaatagcaaaaggtctgtctg

SEQ ID NO: 268869 - DNA, 25 bp, Homo sapien
caaggccctgtcacatgatttttct

SEQ ID NO: 268870 - DNA, 25 bp, Homo sapien
gaagagatgccttgttacaaggccc

SEQ ID NO: 268871 - DNA, 25 bp, Homo sapien
cctgcagggcatggcgaggtgagac

SEQ ID NO: 268872 - DNA, 25 bp, Homo sapien
catggcgaggtgagactatgaaggc

SEQ ID NO: 268873 - DNA, 25 bp, Homo sapien
caccgccagggcactcgctcctctg

SEQ ID NO: 268874 - DNA, 25 bp, Homo sapien
gcagggcatggcgaggtgagactat

SEQ ID NO: 268875 - DNA, 25 bp, Homo sapien
agaaaattgaagctgtaaacagatg

SEQ ID NO: 268876 - DNA, 25 bp, Homo sapien
aattgaagctgtaaacagatgttca

SEQ ID NO: 268877 - DNA, 25 bp, Homo sapien
tcattagaaaattgaagctgtaaac

SEQ ID NO: 268878 - DNA, 25 bp, Homo sapien
ctaatcattagaaaattgaagctgt

SEQ ID NO: 268879 - DNA, 25 bp, Homo sapien
ggaaacatttcagcatcaacagctt

SEQ ID NO: 268880 - DNA, 25 bp, Homo sapien
ccacaggacgcatcatggaatatgt

SEQ ID NO: 268881 - DNA, 25 bp, Homo sapien
taaccccacaggacgcatcatggaa

SEQ ID NO: 268882 - DNA, 25 bp, Homo sapien
tactgtttgcataaccccacaggac

SEQ ID NO: 268883 - DNA, 25 bp, Homo sapien
agtcatcccaagctagtttctggct

SEQ ID NO: 268884 - DNA, 25 bp, Homo sapien
gacgtaagggtattcttcagagtca

SEQ ID NO: 268885 - DNA, 25 bp, Homo sapien
tggaacccaagctctacctctgtac

SEQ ID NO: 268886 - DNA, 25 bp, Homo sapien
gtttctggcttgtcactggaaccca

SEQ ID NO: 268887 - DNA, 25 bp, Homo sapien
cctggaattttcgatgggagctgtc

SEQ ID NO: 268888 - DNA, 25 bp, Homo sapien
tgtttgggccgagtccatatttcct

SEQ ID NO: 268889 - DNA, 25 bp, Homo sapien
tagcacaagaacagcggcacattcc

SEQ ID NO: 268890 - DNA, 25 bp, Homo sapien
gctgtcacctggaaccagcgagctt

SEQ ID NO: 268891 - DNA, 25 bp, Homo sapien
cctttagtgagaaggtgactcgatt

SEQ ID NO: 268892 - DNA, 25 bp, Homo sapien
gatatgagttgaaatgaatccttta

SEQ ID NO: 268893 - DNA, 25 bp, Homo sapien
caaacctctcttgtttgtgaacctg

SEQ ID NO: 268894 - DNA, 25 bp, Homo sapien
gactcgatttacatgcagaatttca

SEQ ID NO: 268895 - DNA, 25 bp, Homo sapien
aagaaagcatcctctttagcgatcc

SEQ ID NO: 268896 - DNA, 25 bp, Homo sapien
tgccactttgtaactgctcagctgt

SEQ ID NO: 268897 - DNA, 25 bp, Homo sapien
attgtctgtccactgccggtccagg

SEQ ID NO: 268898 - DNA, 25 bp, Homo sapien
tagcgatcctcaaggcactggtggt

SEQ ID NO: 268899 - DNA, 25 bp, Homo sapien
taaaactgcaaacagtccttggaag

SEQ ID NO: 268900 - DNA, 25 bp, Homo sapien
agatgttctattcttcccaggatca

SEQ ID NO: 268901 - DNA, 25 bp, Homo sapien
gcctcaatgggcctctgtatcatca

SEQ ID NO: 268902 - DNA, 25 bp, Homo sapien
cattactaacggcagaagatgttct

SEQ ID NO: 268903 - DNA, 25 bp, Homo sapien
tgtggtcccatcacacatcaagtcc

SEQ ID NO: 268904 - DNA, 25 bp, Homo sapien
ctgcctgaactaaatcaatacatct

SEQ ID NO: 268905 - DNA, 25 bp, Homo sapien
tcggcctcccctacaactggccttg

SEQ ID NO: 268906 - DNA, 25 bp, Homo sapien
catcacacatcaagtccagacctat

SEQ ID NO: 268907 - DNA, 25 bp, Homo sapien
tgataatgagattctaatggagatc

SEQ ID NO: 268908 - DNA, 25 bp, Homo sapien
ggagatctggacagaaacggctgct

SEQ ID NO: 268909 - DNA, 25 bp, Homo sapien
gaaacggctgcttgctcgatggctt

SEQ ID NO: 268910 - DNA, 25 bp, Homo sapien
taatgagattctaatggagatctgg

SEQ ID NO: 268911 - DNA, 25 bp, Homo sapien
tttcattttccgaaatggcagccat

SEQ ID NO: 268912 - DNA, 25 bp, Homo sapien
ttctaataatgtccctgaattagcc

SEQ ID NO: 268913 - DNA, 25 bp, Homo sapien
agtttctaataatgtccctgaatta

SEQ ID NO: 268914 - DNA, 25 bp, Homo sapien
gtttcattttccgaaatggcagcca

SEQ ID NO: 268915 - DNA, 25 bp, Homo sapien
gctaacactcactcgtgcttcttca

SEQ ID NO: 268916 - DNA, 25 bp, Homo sapien
gcttgtcccttgtggttgagaatcg

SEQ ID NO: 268917 - DNA, 25 bp, Homo sapien
tgagaatcgtgaatcagttgagcac

SEQ ID NO: 268918 - DNA, 25 bp, Homo sapien
gttttgtaatgacaaagccccacac

SEQ ID NO: 268919 - DNA, 25 bp, Homo sapien
gacacgaatttctggcttaagacgg

SEQ ID NO: 268920 - DNA, 25 bp, Homo sapien
gacggtgttgggctccttgtattaa

SEQ ID NO: 268921 - DNA, 25 bp, Homo sapien
tctggcttaagacggtgttgggctc

SEQ ID NO: 268922 - DNA, 25 bp, Homo sapien
tattaagccaggtaggttgctgggc

SEQ ID NO: 268923 - DNA, 25 bp, Homo sapien
ttagcatgaaaggttgctatggaga

SEQ ID NO: 268924 - DNA, 25 bp, Homo sapien
tagcatgaaaggttgctatggagac

SEQ ID NO: 268925 - DNA, 25 bp, Homo sapien
gttccactggtcagacgccccagag

SEQ ID NO: 268926 - DNA, 25 bp, Homo sapien
gaagatccgctaagagaaacagcca

SEQ ID NO: 268927 - DNA, 25 bp, Homo sapien
gaaacagccaagatagtttgttcca

SEQ ID NO: 268928 - DNA, 25 bp, Homo sapien
gatgaagatccgctaagagaaacag

SEQ ID NO: 268929 - DNA, 25 bp, Homo sapien
cgggcctctgccgtctggagctgtc

SEQ ID NO: 268930 - DNA, 25 bp, Homo sapien
tgacttgaggttggctgtaaatgtg

SEQ ID NO: 268931 - DNA, 25 bp, Homo sapien
ctgggctcactctccgggcctctgc

SEQ ID NO: 268932 - DNA, 25 bp, Homo sapien
aatgtgagtactagagaagggagct

SEQ ID NO: 268933 - DNA, 25 bp, Homo sapien
tgttaaggtccctgagttctcagcc

SEQ ID NO: 268934 - DNA, 25 bp, Homo sapien
ccctggctttgcttagagatggatc

SEQ ID NO: 268935 - DNA, 25 bp, Homo sapien
gcatcctccgcagcgttctgactaa

SEQ ID NO: 268936 - DNA, 25 bp, Homo sapien
gcctggtgttaaggtccctgagttc

SEQ ID NO: 268937 - DNA, 25 bp, Homo sapien
cctgggtgaaggttagtgagtccaa

SEQ ID NO: 268938 - DNA, 25 bp, Homo sapien
gcagagcaattgcacctgggtgaag

SEQ ID NO: 268939 - DNA, 25 bp, Homo sapien
tctacccactctgtggaacgcagag

SEQ ID NO: 268940 - DNA, 25 bp, Homo sapien
tctgtggaacgcagagcaattgcac

SEQ ID NO: 268941 - DNA, 25 bp, Homo sapien
gctgtgcatcggtgctgctccctgg

SEQ ID NO: 268942 - DNA, 25 bp, Homo sapien
gcgctgcttatgaattcaggatgca

SEQ ID NO: 268943 - DNA, 25 bp, Homo sapien
ggtttctgcgctgcttatgaattca

SEQ ID NO: 268944 - DNA, 25 bp, Homo sapien
gatgcacgggctgtgcatcggtgct

SEQ ID NO: 268945 - DNA, 25 bp, Homo sapien
ccagcattgctccttttagccgtct

SEQ ID NO: 268946 - DNA, 25 bp, Homo sapien
tgccttcccagacgttgtgggcgag

SEQ ID NO: 268947 - DNA, 25 bp, Homo sapien
tgggcgaggcgagctgtgcccgaag

SEQ ID NO: 268948 - DNA, 25 bp, Homo sapien
gaagaagacgcctcttttagagggc

SEQ ID NO: 268949 - DNA, 25 bp, Homo sapien
gtcacaattcccttcacaacccaga

SEQ ID NO: 268950 - DNA, 25 bp, Homo sapien
cagatgtgtaaccttctactgcttg

SEQ ID NO: 268951 - DNA, 25 bp, Homo sapien
ttctggaactttctgtacattgtaa

SEQ ID NO: 268952 - DNA, 25 bp, Homo sapien
tctgtgtgttcgtagagttttctca

SEQ ID NO: 268953 - DNA, 25 bp, Homo sapien
catctaacatatgtttccaatgcca

SEQ ID NO: 268954 - DNA, 25 bp, Homo sapien
tgtcggtactcatgcaggtactctc

SEQ ID NO: 268955 - DNA, 25 bp, Homo sapien
aagtactgaggtgtccagcatctaa

SEQ ID NO: 268956 - DNA, 25 bp, Homo sapien
catgcaggtactctcatcttctatt

SEQ ID NO: 268957 - DNA, 25 bp, Homo sapien
aactgcttggatgtaaaataggtgc

SEQ ID NO: 268958 - DNA, 25 bp, Homo sapien
ggaatttctaagccatggccaaaag

SEQ ID NO: 268959 - DNA, 25 bp, Homo sapien
actgcttggatgtaaaataggtgca

SEQ ID NO: 268960 - DNA, 25 bp, Homo sapien
agtccacatgctcagtcaggggggt

SEQ ID NO: 268961 - DNA, 25 bp, Homo sapien
agtcaggggggtgcccccactcctg

SEQ ID NO: 268962 - DNA, 25 bp, Homo sapien
acatgctcagtcaggggggtgcccc

SEQ ID NO: 268963 - DNA, 25 bp, Homo sapien
tggcactggccttgcacagtccaca

SEQ ID NO: 268964 - DNA, 25 bp, Homo sapien
ctgtaagaaaggtactaggatcacg

SEQ ID NO: 268965 - DNA, 25 bp, Homo sapien
ggtactaggatcacgaaggaagcca

SEQ ID NO: 268966 - DNA, 25 bp, Homo sapien
taagaaaggtactaggatcacgaag

SEQ ID NO: 268967 - DNA, 25 bp, Homo sapien
gaaaggtactaggatcacgaaggaa

SEQ ID NO: 268968 - DNA, 25 bp, Homo sapien
gtgcacctcgtggagccataaagga

SEQ ID NO: 268969 - DNA, 25 bp, Homo sapien
ctaacgtgcacctcgtggagccata

SEQ ID NO: 268970 - DNA, 25 bp, Homo sapien
cctctcgacgctggcctgtgtctaa

SEQ ID NO: 268971 - DNA, 25 bp, Homo sapien
tcctctcgacgctggcctgtgtcta

SEQ ID NO: 268972 - DNA, 25 bp, Homo sapien
tctgaggaacctgagagttgattcc

SEQ ID NO: 268973 - DNA, 25 bp, Homo sapien
catctgaggaacctgagagttgatt

SEQ ID NO: 268974 - DNA, 25 bp, Homo sapien
ggaacctgagagttgattccgttcg

SEQ ID NO: 268975 - DNA, 25 bp, Homo sapien
tgagagttgattccgttcgggctcc

SEQ ID NO: 268976 - DNA, 25 bp, Homo sapien
cctgggtgggtttgcatttagctct

SEQ ID NO: 268977 - DNA, 25 bp, Homo sapien
tcctgggtgggtttgcatttagctc

SEQ ID NO: 268978 - DNA, 25 bp, Homo sapien
gcatgatgccaacataggaaataaa

SEQ ID NO: 268979 - DNA, 25 bp, Homo sapien
actggcccggagcaaacagcactcc

SEQ ID NO: 268980 - DNA, 25 bp, Homo sapien
aaagaattgtaaaccatgcactctc

SEQ ID NO: 268981 - DNA, 25 bp, Homo sapien
gagtcagggagcatgatgccaacat

SEQ ID NO: 268982 - DNA, 25 bp, Homo sapien
tccaggagccaaaataaagaggcag

SEQ ID NO: 268983 - DNA, 25 bp, Homo sapien
tcctgacggtctgcagatatgaaga

SEQ ID NO: 268984 - DNA, 25 bp, Homo sapien
gatatgaagacttactccaggagcc

SEQ ID NO: 268985 - DNA, 25 bp, Homo sapien
tcagtggatgcattcgctgggaatc

SEQ ID NO: 268986 - DNA, 25 bp, Homo sapien
ttccctgtcgtgctacatgccatag

SEQ ID NO: 268987 - DNA, 25 bp, Homo sapien
tttggcttctccacagacagacact

SEQ ID NO: 268988 - DNA, 25 bp, Homo sapien
gccaggaagcttgagtccgtttcca

SEQ ID NO: 268989 - DNA, 25 bp, Homo sapien
tgccatagccatcctactcaagtgt

SEQ ID NO: 268990 - DNA, 25 bp, Homo sapien
agcaagctggggtttccatcttggg

SEQ ID NO: 268991 - DNA, 25 bp, Homo sapien
catcttgggagagtgaagttaggca

SEQ ID NO: 268992 - DNA, 25 bp, Homo sapien
aagctggggtttccatcttgggaga

SEQ ID NO: 268993 - DNA, 25 bp, Homo sapien
ccatcttgggagagtgaagttaggc

SEQ ID NO: 268994 - DNA, 25 bp, Homo sapien
gctggtcaatgtcccggaactgttt

SEQ ID NO: 268995 - DNA, 25 bp, Homo sapien
agtctcatagcctggctggtcaatg

SEQ ID NO: 268996 - DNA, 25 bp, Homo sapien
agcctggctggtcaatgtcccggaa

SEQ ID NO: 268997 - DNA, 25 bp, Homo sapien
catagcctggctggtcaatgtcccg

SEQ ID NO: 268998 - DNA, 25 bp, Homo sapien
gagccaacgatctctgcaaattgcc

SEQ ID NO: 268999 - DNA, 25 bp, Homo sapien
gaagggtattcgcatggctcatcac

SEQ ID NO: 269000 - DNA, 25 bp, Homo sapien
tgagctgaccaaatatgtggacagg

SEQ ID NO: 269001 - DNA, 25 bp, Homo sapien
ggctcatcacttcccaatgaaaagg

SEQ ID NO: 269002 - DNA, 25 bp, Homo sapien
aagaaacagatcacgctgctcctcg

SEQ ID NO: 269003 - DNA, 25 bp, Homo sapien
ccatgtagagtgaagatgtttgcca

SEQ ID NO: 269004 - DNA, 25 bp, Homo sapien
tgctcctcgatgagtgcagtgttca

SEQ ID NO: 269005 - DNA, 25 bp, Homo sapien
cctggcactttgctaccatgtagag

SEQ ID NO: 269006 - DNA, 25 bp, Homo sapien
cctgcagggttgagcatcgcactcg

SEQ ID NO: 269007 - DNA, 25 bp, Homo sapien
tgtggcaagatgacccctgcagggt

SEQ ID NO: 269008 - DNA, 25 bp, Homo sapien
caagatgacccctgcagggttgagc

SEQ ID NO: 269009 - DNA, 25 bp, Homo sapien
ggttgagcatcgcactcgcatgtga

SEQ ID NO: 269010 - DNA, 25 bp, Homo sapien
acgagctcagcaccaaatttatcac

SEQ ID NO: 269011 - DNA, 25 bp, Homo sapien
tgcacgagctcagcaccaaatttat

SEQ ID NO: 269012 - DNA, 25 bp, Homo sapien
ggggacgttggtctggacagcagca

SEQ ID NO: 269013 - DNA, 25 bp, Homo sapien
gctgcacgagctcagcaccaaattt

SEQ ID NO: 269014 - DNA, 25 bp, Homo sapien
ttactttgcccacaccatcgagaca

SEQ ID NO: 269015 - DNA, 25 bp, Homo sapien
tttgctgaaacgagagccgggagac

SEQ ID NO: 269016 - DNA, 25 bp, Homo sapien
gagacagttcttcagagatcattac

SEQ ID NO: 269017 - DNA, 25 bp, Homo sapien
tgttagcgcccgtgattactctgga

SEQ ID NO: 269018 - DNA, 25 bp, Homo sapien
agtgggcaggctcttgatgccaagc

SEQ ID NO: 269019 - DNA, 25 bp, Homo sapien
ggctcttgatgccaagccaagaatc

SEQ ID NO: 269020 - DNA, 25 bp, Homo sapien
tcttgatgccaagccaagaatctgc

SEQ ID NO: 269021 - DNA, 25 bp, Homo sapien
ggcaggctcttgatgccaagccaag

SEQ ID NO: 269022 - DNA, 25 bp, Homo sapien
ccacgaggatctgagaggaaagggt

SEQ ID NO: 269023 - DNA, 25 bp, Homo sapien
cacgaggatctgagaggaaagggtg

SEQ ID NO: 269024 - DNA, 25 bp, Homo sapien
ctccacgaggatctgagaggaaagg

SEQ ID NO: 269025 - DNA, 25 bp, Homo sapien
tccacgaggatctgagaggaaaggg

SEQ ID NO: 269026 - DNA, 25 bp, Homo sapien
taagagcactctgagaccaggagcc

SEQ ID NO: 269027 - DNA, 25 bp, Homo sapien
gttctctcgggcctgaaggcttcgc

SEQ ID NO: 269028 - DNA, 25 bp, Homo sapien
tctgctgcctgatgggatctcccac

SEQ ID NO: 269029 - DNA, 25 bp, Homo sapien
tcgcttccactgttctacgctgccg

SEQ ID NO: 269030 - DNA, 25 bp, Homo sapien
tggaattggaaggtgttcttggacc

SEQ ID NO: 269031 - DNA, 25 bp, Homo sapien
ctggaattggaaggtgttcttggac

SEQ ID NO: 269032 - DNA, 25 bp, Homo sapien
gaattggaaggtgttcttggacctc

SEQ ID NO: 269033 - DNA, 25 bp, Homo sapien
gtaacgggtactggctttgctaaca

SEQ ID NO: 269034 - DNA, 25 bp, Homo sapien
caccgggtaattatagcttccagcc

SEQ ID NO: 269035 - DNA, 25 bp, Homo sapien
gtgatactgccacccgtaacgggta

SEQ ID NO: 269036 - DNA, 25 bp, Homo sapien
ctttgtcaacaatccatttagcaac

SEQ ID NO: 269037 - DNA, 25 bp, Homo sapien
ggtatttcctgaacgtcatggaaca

SEQ ID NO: 269038 - DNA, 25 bp, Homo sapien
aacacgaggcccaggtgattcagcg

SEQ ID NO: 269039 - DNA, 25 bp, Homo sapien
tgaacgtcatggaacacgaggccca

SEQ ID NO: 269040 - DNA, 25 bp, Homo sapien
gtgattcagcgaggtcagagtctgc

SEQ ID NO: 269041 - DNA, 25 bp, Homo sapien
catccccagtgctgtgccaaggtga

SEQ ID NO: 269042 - DNA, 25 bp, Homo sapien
gtgagtctgcttctgctgggagtta

SEQ ID NO: 269043 - DNA, 25 bp, Homo sapien
tgctgtgccaaggtgagtctgcttc

SEQ ID NO: 269044 - DNA, 25 bp, Homo sapien
tcagaactccatccccagtgctgtg

SEQ ID NO: 269045 - DNA, 25 bp, Homo sapien
gtctctgctgaatacaccggcatgt

SEQ ID NO: 269046 - DNA, 25 bp, Homo sapien
tgaatgatcactgctgcgtcagcct

SEQ ID NO: 269047 - DNA, 25 bp, Homo sapien
ttgccgtccattcagaaatgtctga

SEQ ID NO: 269048 - DNA, 25 bp, Homo sapien
tgcaaagtaagtcattggtatttac

SEQ ID NO: 269049 - DNA, 25 bp, Homo sapien
atgtctgaatgatcactgctgcgtc

SEQ ID NO: 269050 - DNA, 25 bp, Homo sapien
gactccggcctctcagcgctttcca

SEQ ID NO: 269051 - DNA, 25 bp, Homo sapien
tcaggggcttgcacttttgttctct

SEQ ID NO: 269052 - DNA, 25 bp, Homo sapien
aaagagtgaaccgaccgtgaatggc

SEQ ID NO: 269053 - DNA, 25 bp, Homo sapien
gtgaatggccttcagccacttcctc

SEQ ID NO: 269054 - DNA, 25 bp, Homo sapien
tcatggggagggtcctgttgaagaa

SEQ ID NO: 269055 - DNA, 25 bp, Homo sapien
catggggagggtcctgttgaagaaa

SEQ ID NO: 269056 - DNA, 25 bp, Homo sapien
gagtgcccccccaagtactgaataa

SEQ ID NO: 269057 - DNA, 25 bp, Homo sapien
ggctctacgtccaaccctcagtgag

SEQ ID NO: 269058 - DNA, 25 bp, Homo sapien
taaacgcatgtgcaccgaggacgtg

SEQ ID NO: 269059 - DNA, 25 bp, Homo sapien
gacgtgcgaggcgttcgtttctcca

SEQ ID NO: 269060 - DNA, 25 bp, Homo sapien
agagacagcacggaacgatccgagg

SEQ ID NO: 269061 - DNA, 25 bp, Homo sapien
aaacacatcacttgtccctgggtga

SEQ ID NO: 269062 - DNA, 25 bp, Homo sapien
acagcacggaacgatccgaggccac

SEQ ID NO: 269063 - DNA, 25 bp, Homo sapien
ggaacgatccgaggccacaaaacac

SEQ ID NO: 269064 - DNA, 25 bp, Homo sapien
cataaatccgagtgcctccagaact

SEQ ID NO: 269065 - DNA, 25 bp, Homo sapien
ctgtgctcttattcataaatccgag

SEQ ID NO: 269066 - DNA, 25 bp, Homo sapien
tgctcttattcataaatccgagtgc

SEQ ID NO: 269067 - DNA, 25 bp, Homo sapien
ttattcataaatccgagtgcctcca

SEQ ID NO: 269068 - DNA, 25 bp, Homo sapien
tagagaccctgagaagtaagccagg

SEQ ID NO: 269069 - DNA, 25 bp, Homo sapien
agagaccctgagaagtaagccaggg

SEQ ID NO: 269070 - DNA, 25 bp, Homo sapien
gggaggagtcccagtgggcagcttg

SEQ ID NO: 269071 - DNA, 25 bp, Homo sapien
tgggggtggtcagctcttcactcat

SEQ ID NO: 269072 - DNA, 25 bp, Homo sapien
caaattgacgagaatcctcttgaga

SEQ ID NO: 269073 - DNA, 25 bp, Homo sapien
tgtgtcaaattgacgagaatcctct

SEQ ID NO: 269074 - DNA, 25 bp, Homo sapien
aaaatgactgtgtcaaattgacgag

SEQ ID NO: 269075 - DNA, 25 bp, Homo sapien
gactgtgtcaaattgacgagaatcc

SEQ ID NO: 269076 - DNA, 25 bp, Homo sapien
ttcatatcaaaatgtcctcgggtca

SEQ ID NO: 269077 - DNA, 25 bp, Homo sapien
ttggtgataaacacagttgaaagct

SEQ ID NO: 269078 - DNA, 25 bp, Homo sapien
caaaacaagagtaaagcgagtgtgt

SEQ ID NO: 269079 - DNA, 25 bp, Homo sapien
gtaaagcgagtgtgtcggaatgtcc

SEQ ID NO: 269080 - DNA, 25 bp, Homo sapien
attgccaggctgagaatcaccactg

SEQ ID NO: 269081 - DNA, 25 bp, Homo sapien
actggtgacaaatgctggacggcct

SEQ ID NO: 269082 - DNA, 25 bp, Homo sapien
gggctgcgcatttggagaagatcca

SEQ ID NO: 269083 - DNA, 25 bp, Homo sapien
caggacgtagctcttcacttggacc

SEQ ID NO: 269084 - DNA, 25 bp, Homo sapien
agggtgaccccgtcctccatcatgg

SEQ ID NO: 269085 - DNA, 25 bp, Homo sapien
gctcggcttgcagtagaacgtttcc

SEQ ID NO: 269086 - DNA, 25 bp, Homo sapien
cccgcgttgggcaagcagggtgacc

SEQ ID NO: 269087 - DNA, 25 bp, Homo sapien
gggttctgtatgacggagctccccg

SEQ ID NO: 269088 - DNA, 25 bp, Homo sapien
gggagacgctcctccgttagtcacg

SEQ ID NO: 269089 - DNA, 25 bp, Homo sapien
ggaagaatctaaggggagacgctcc

SEQ ID NO: 269090 - DNA, 25 bp, Homo sapien
gacgctcctccgttagtcacgcaag

SEQ ID NO: 269091 - DNA, 25 bp, Homo sapien
ctccgttagtcacgcaagcttgcct

SEQ ID NO: 269092 - DNA, 25 bp, Homo sapien
tgttctgacaacgaggtgcggttct

SEQ ID NO: 269093 - DNA, 25 bp, Homo sapien
cttggaaactaggagcgtgacgaga

SEQ ID NO: 269094 - DNA, 25 bp, Homo sapien
tgccttcgggcaggagaatctccac

SEQ ID NO: 269095 - DNA, 25 bp, Homo sapien
ccctcaggtgtgtgggcttggaaac

SEQ ID NO: 269096 - DNA, 25 bp, Homo sapien
ggggacaattcagccaggtggcgag

SEQ ID NO: 269097 - DNA, 25 bp, Homo sapien
ggaggggagatgccaaaggtctgga

SEQ ID NO: 269098 - DNA, 25 bp, Homo sapien
aaggggacaattcagccaggtggcg

SEQ ID NO: 269099 - DNA, 25 bp, Homo sapien
ggggagatgccaaaggtctggaggt

SEQ ID NO: 269100 - DNA, 25 bp, Homo sapien
tccatcctctagatcaggaggccgg

SEQ ID NO: 269101 - DNA, 25 bp, Homo sapien
cctgtgctccatcctctagatcagg

SEQ ID NO: 269102 - DNA, 25 bp, Homo sapien
atcctctagatcaggaggccggggt

SEQ ID NO: 269103 - DNA, 25 bp, Homo sapien
gctccatcctctagatcaggaggcc

SEQ ID NO: 269104 - DNA, 25 bp, Homo sapien
catacacgacggcagaggacacaga

SEQ ID NO: 269105 - DNA, 25 bp, Homo sapien
gacctggacatgacttcctgggtca

SEQ ID NO: 269106 - DNA, 25 bp, Homo sapien
tcacgctttgccagcatacacgacg

SEQ ID NO: 269107 - DNA, 25 bp, Homo sapien
tcctgggtcatatagaccaactggg

SEQ ID NO: 269108 - DNA, 25 bp, Homo sapien
gctccagtgtcaacttgctgacggc

SEQ ID NO: 269109 - DNA, 25 bp, Homo sapien
caacggttgcccgaacgtgggactg

SEQ ID NO: 269110 - DNA, 25 bp, Homo sapien
gctgacggctgctaatgctgagcaa

SEQ ID NO: 269111 - DNA, 25 bp, Homo sapien
gaacgtgggactgaattcctcctca

SEQ ID NO: 269112 - DNA, 25 bp, Homo sapien
acatctgcaggggcggcatgtcata

SEQ ID NO: 269113 - DNA, 25 bp, Homo sapien
catctgcaggggcggcatgtcatac

SEQ ID NO: 269114 - DNA, 25 bp, Homo sapien
cacatctgcaggggcggcatgtcat

SEQ ID NO: 269115 - DNA, 25 bp, Homo sapien
acagctcctgggtctaagaggtaca

SEQ ID NO: 269116 - DNA, 25 bp, Homo sapien
cctgggtctaagaggtacagagcac

SEQ ID NO: 269117 - DNA, 25 bp, Homo sapien
tttatcggacgtcacatgcagacag

SEQ ID NO: 269118 - DNA, 25 bp, Homo sapien
tcatttatcggacgtcacatgcaga

SEQ ID NO: 269119 - DNA, 25 bp, Homo sapien
gctccacacagtgccggagtcgctg

SEQ ID NO: 269120 - DNA, 25 bp, Homo sapien
ctgcatggcgggattcttcgatgag

SEQ ID NO: 269121 - DNA, 25 bp, Homo sapien
gcgggattcttcgatgagccaagca

SEQ ID NO: 269122 - DNA, 25 bp, Homo sapien
gattcttcgatgagccaagcagtcc

SEQ ID NO: 269123 - DNA, 25 bp, Homo sapien
gcatggcgggattcttcgatgagcc

SEQ ID NO: 269124 - DNA, 25 bp, Homo sapien
tttattcagcaaaggttgatgtgcc

SEQ ID NO: 269125 - DNA, 25 bp, Homo sapien
caagctattggaatcaccgttcctg

SEQ ID NO: 269126 - DNA, 25 bp, Homo sapien
tcctgaggtcgtttattcagcaaag

SEQ ID NO: 269127 - DNA, 25 bp, Homo sapien
ttgatgtgccttgctagtgagaagc

SEQ ID NO: 269128 - DNA, 25 bp, Homo sapien
gtgaagaaaccacctgtgcagcgtg

SEQ ID NO: 269129 - DNA, 25 bp, Homo sapien
tggacgtccttcaggaaacaggcct

SEQ ID NO: 269130 - DNA, 25 bp, Homo sapien
gcagcgtgtcggtgaaagaggacag

SEQ ID NO: 269131 - DNA, 25 bp, Homo sapien
ctatggacgtccttcaggaaacagg

SEQ ID NO: 269132 - DNA, 25 bp, Homo sapien
agtgatgcaatacagaggacgctaa

SEQ ID NO: 269133 - DNA, 25 bp, Homo sapien
ggacgctaacactacacgccttctt

SEQ ID NO: 269134 - DNA, 25 bp, Homo sapien
acgccttcttagttgtcaggcaggg

SEQ ID NO: 269135 - DNA, 25 bp, Homo sapien
cagggaccctgcgagtcttttagcc

SEQ ID NO: 269136 - DNA, 25 bp, Homo sapien
aactgctccgtagtcctcctcagag

SEQ ID NO: 269137 - DNA, 25 bp, Homo sapien
tcagagtcagaagtgagcgtgcaat

SEQ ID NO: 269138 - DNA, 25 bp, Homo sapien
tacggccaaccacgatgacgtcata

SEQ ID NO: 269139 - DNA, 25 bp, Homo sapien
actgaggagctagactacggccaac

SEQ ID NO: 269140 - DNA, 25 bp, Homo sapien
cttgcttcctaaactgtgaaggaca

SEQ ID NO: 269141 - DNA, 25 bp, Homo sapien
ccttgcttcctaaactgtgaaggac

SEQ ID NO: 269142 - DNA, 25 bp, Homo sapien
ttcttggagctcctaataaggcgat

SEQ ID NO: 269143 - DNA, 25 bp, Homo sapien
tattgcagtttccaacagtaggatg

SEQ ID NO: 269144 - DNA, 25 bp, Homo sapien
ggagtacagactcttctgcttggca

SEQ ID NO: 269145 - DNA, 25 bp, Homo sapien
ctaataaggcgattggagtacagac

SEQ ID NO: 269146 - DNA, 25 bp, Homo sapien
aatctacagaatcagtgctcttggc

SEQ ID NO: 269147 - DNA, 25 bp, Homo sapien
aaacccatggccgatgagccaacca

SEQ ID NO: 269148 - DNA, 25 bp, Homo sapien
aggcaggtataacaaatctacagaa

SEQ ID NO: 269149 - DNA, 25 bp, Homo sapien
tggccgatgagccaaccaaccacag

SEQ ID NO: 269150 - DNA, 25 bp, Homo sapien
gataggccagcattgctaggcaggc

SEQ ID NO: 269151 - DNA, 25 bp, Homo sapien
gcaaaataaccagaagcctcccgtg

SEQ ID NO: 269152 - DNA, 25 bp, Homo sapien
tttggtccaacaggccaggttttgc

SEQ ID NO: 269153 - DNA, 25 bp, Homo sapien
gctggtccaacaggccaggttttgg

SEQ ID NO: 269154 - DNA, 25 bp, Homo sapien
ccgaagaggcttccccggaaagatg

SEQ ID NO: 269155 - DNA, 25 bp, Homo sapien
agatgagtgggtgttcaccagcgga

SEQ ID NO: 269156 - DNA, 25 bp, Homo sapien
gaggatccgaagaggcttccccgga

SEQ ID NO: 269157 - DNA, 25 bp, Homo sapien
gcttccccggaaagatgatgctggg

SEQ ID NO: 269158 - DNA, 25 bp, Homo sapien
gggctagtggctcaggcttcagccc

SEQ ID NO: 269159 - DNA, 25 bp, Homo sapien
gatggaaacacctggctctttgtcc

SEQ ID NO: 269160 - DNA, 25 bp, Homo sapien
accttcctaacactgctgtgccagg

SEQ ID NO: 269161 - DNA, 25 bp, Homo sapien
ccttgcccatacactggcctttgat

SEQ ID NO: 269162 - DNA, 25 bp, Homo sapien
ctcaatctcctgtcaaccaactggg

SEQ ID NO: 269163 - DNA, 25 bp, Homo sapien
aactggggaatcttcactccagagc

SEQ ID NO: 269164 - DNA, 25 bp, Homo sapien
ttgtctctcagggttgagctgttgc

SEQ ID NO: 269165 - DNA, 25 bp, Homo sapien
tgttgcctctcattcttagccacag

SEQ ID NO: 269166 - DNA, 25 bp, Homo sapien
agctgccggtcacaatatcttttca

SEQ ID NO: 269167 - DNA, 25 bp, Homo sapien
tatcttttcagtgctacatttccct

SEQ ID NO: 269168 - DNA, 25 bp, Homo sapien
cggtcacaatatcttttcagtgcta

SEQ ID NO: 269169 - DNA, 25 bp, Homo sapien
ggatgatgatacagctgccggtcac

SEQ ID NO: 269170 - DNA, 25 bp, Homo sapien
gcgtttgccccttagcatgatttct

SEQ ID NO: 269171 - DNA, 25 bp, Homo sapien
ctttgacagctgttgatggagagct

SEQ ID NO: 269172 - DNA, 25 bp, Homo sapien
tatagttgcgtttgccccttagcat

SEQ ID NO: 269173 - DNA, 25 bp, Homo sapien
tccggatgatttactgtatagttgc

SEQ ID NO: 269174 - DNA, 25 bp, Homo sapien
tctctgggctatccgcggccttttt

SEQ ID NO: 269175 - DNA, 25 bp, Homo sapien
cgtttctctgggctatccgcggcct

SEQ ID NO: 269176 - DNA, 25 bp, Homo sapien
tacctctatctttggatcccagaag

SEQ ID NO: 269177 - DNA, 25 bp, Homo sapien
gtcgtttctctgggctatccgcggc

SEQ ID NO: 269178 - DNA, 25 bp, Homo sapien
caggatcactgcatgttatgatggc

SEQ ID NO: 269179 - DNA, 25 bp, Homo sapien
gctgctactttgctaatctcattag

SEQ ID NO: 269180 - DNA, 25 bp, Homo sapien
tagcttagctgtgtttgtgcatagg

SEQ ID NO: 269181 - DNA, 25 bp, Homo sapien
tggacacagtgtctcgcaggatcac

SEQ ID NO: 269182 - DNA, 25 bp, Homo sapien
tcaaagcagcagttccaaacataac

SEQ ID NO: 269183 - DNA, 25 bp, Homo sapien
tctctagcaaagtgtttgtattcca

SEQ ID NO: 269184 - DNA, 25 bp, Homo sapien
cccgtctttgttatggtcagcttca

SEQ ID NO: 269185 - DNA, 25 bp, Homo sapien
ttggatgtattgcattcaaagcagc

SEQ ID NO: 269186 - DNA, 25 bp, Homo sapien
tgccttacccagaatgagtgctagg

SEQ ID NO: 269187 - DNA, 25 bp, Homo sapien
ccttacccagaatgagtgctaggat

SEQ ID NO: 269188 - DNA, 25 bp, Homo sapien
cagaagacagtgtgttgccttaccc

SEQ ID NO: 269189 - DNA, 25 bp, Homo sapien
cagtgtgttgccttacccagaatga

SEQ ID NO: 269190 - DNA, 25 bp, Homo sapien
acagttgccgccacacccggcttat

SEQ ID NO: 269191 - DNA, 25 bp, Homo sapien
cctaacttttaatatacaacacaca

SEQ ID NO: 269192 - DNA, 25 bp, Homo sapien
cgcacctggccctaacttttaatat

SEQ ID NO: 269193 - DNA, 25 bp, Homo sapien
tggccctaacttttaatatacaaca

SEQ ID NO: 269194 - DNA, 25 bp, Homo sapien
tactgcaacagaggcacataggaat

SEQ ID NO: 269195 - DNA, 25 bp, Homo sapien
catgagtcatgcagtgaattggtaa

SEQ ID NO: 269196 - DNA, 25 bp, Homo sapien
tattcaactggaagatatagccgag

SEQ ID NO: 269197 - DNA, 25 bp, Homo sapien
tgaagatcaaccttcgtgaggtcga

SEQ ID NO: 269198 - DNA, 25 bp, Homo sapien
taccacatggctcaaagccccagct

SEQ ID NO: 269199 - DNA, 25 bp, Homo sapien
caattgaatgattgcccatggttct

SEQ ID NO: 269200 - DNA, 25 bp, Homo sapien
gaatgattgcccatggttcttaatc

SEQ ID NO: 269201 - DNA, 25 bp, Homo sapien
gtgatcaattgaatgattgcccatg

SEQ ID NO: 269202 - DNA, 25 bp, Homo sapien
gaaggatgctgaaggtgacgcttct

SEQ ID NO: 269203 - DNA, 25 bp, Homo sapien
cgatgacagtgttattatagccaaa

SEQ ID NO: 269204 - DNA, 25 bp, Homo sapien
gtgccccaacccctgagttattcag

SEQ ID NO: 269205 - DNA, 25 bp, Homo sapien
tacagggcgagatctagaaggatgc

SEQ ID NO: 269206 - DNA, 25 bp, Homo sapien
gtgcagcaaatgaccatggcacgtg

SEQ ID NO: 269207 - DNA, 25 bp, Homo sapien
ggactaggggaaggataacatgagg

SEQ ID NO: 269208 - DNA, 25 bp, Homo sapien
cagcaaatgaccatggcacgtgtat

SEQ ID NO: 269209 - DNA, 25 bp, Homo sapien
ggggactaggggaaggataacatga

SEQ ID NO: 269210 - DNA, 25 bp, Homo sapien
gcagtctatctgttttgctaatctt

SEQ ID NO: 269211 - DNA, 25 bp, Homo sapien
gctagcagtctatctgttttgctaa

SEQ ID NO: 269212 - DNA, 25 bp, Homo sapien
tggctagcagtctatctgttttgct

SEQ ID NO: 269213 - DNA, 25 bp, Homo sapien
ggaattataccagctcctcttttta

SEQ ID NO: 269214 - DNA, 25 bp, Homo sapien
gataccctggttttgacgtggaaga

SEQ ID NO: 269215 - DNA, 25 bp, Homo sapien
cacctcagaggcgtagtaaatatct

SEQ ID NO: 269216 - DNA, 25 bp, Homo sapien
ggccgagcacatcctatatcaaaga

SEQ ID NO: 269217 - DNA, 25 bp, Homo sapien
gatcaggcgtcccaatcgagaagta

SEQ ID NO: 269218 - DNA, 25 bp, Homo sapien
cagatacatacatagctatagaaag

SEQ ID NO: 269219 - DNA, 25 bp, Homo sapien
ttctgatatgaggaacggaactcca

SEQ ID NO: 269220 - DNA, 25 bp, Homo sapien
gaatacacatatgggatctagaggg

SEQ ID NO: 269221 - DNA, 25 bp, Homo sapien
gataataatagatatggcatgtggt

SEQ ID NO: 269222 - DNA, 25 bp, Homo sapien
gtactaatgcctttcaagtgtttct

SEQ ID NO: 269223 - DNA, 25 bp, Homo sapien
cattttatgtactaatgcctttcaa

SEQ ID NO: 269224 - DNA, 25 bp, Homo sapien
tgtactaatgcctttcaagtgtttc

SEQ ID NO: 269225 - DNA, 25 bp, Homo sapien
tttatgtactaatgcctttcaagtg

SEQ ID NO: 269226 - DNA, 25 bp, Homo sapien
caggagtttgtgtgcatctcgtgca

SEQ ID NO: 269227 - DNA, 25 bp, Homo sapien
tgcatctcgtgcagggaacatgctg

SEQ ID NO: 269228 - DNA, 25 bp, Homo sapien
agaacactccaggagtttgtgtgca

SEQ ID NO: 269229 - DNA, 25 bp, Homo sapien
ttgtgtgcatctcgtgcagggaaca

SEQ ID NO: 269230 - DNA, 25 bp, Homo sapien
tatttaagctcgtgtttttcacctg

SEQ ID NO: 269231 - DNA, 25 bp, Homo sapien
ttattatttaagctcgtgtttttca

SEQ ID NO: 269232 - DNA, 25 bp, Homo sapien
tataagcaatatatctttaaggaaa

SEQ ID NO: 269233 - DNA, 25 bp, Homo sapien
aatacttataagcaatatatcttta

SEQ ID NO: 269234 - DNA, 25 bp, Homo sapien
atgcacggacgatcacgtgcgtgga

SEQ ID NO: 269235 - DNA, 25 bp, Homo sapien
ggctagatgcacggacgatcacgtg

SEQ ID NO: 269236 - DNA, 25 bp, Homo sapien
ctagatgcacggacgatcacgtgcg

SEQ ID NO: 269237 - DNA, 25 bp, Homo sapien
agatgcacggacgatcacgtgcgtg

SEQ ID NO: 269238 - DNA, 25 bp, Homo sapien
tcctcggcatggctgctgactgcag

SEQ ID NO: 269239 - DNA, 25 bp, Homo sapien
gctttcccatgcacgcattacctga

SEQ ID NO: 269240 - DNA, 25 bp, Homo sapien
ccatgcacgcattacctgaggccat

SEQ ID NO: 269241 - DNA, 25 bp, Homo sapien
ccaccatggatgtggccttgaagtt

SEQ ID NO: 269242 - DNA, 25 bp, Homo sapien
attagcaagcagggggatgttcagg

SEQ ID NO: 269243 - DNA, 25 bp, Homo sapien
ccaggtgggtgaactgagagtccac

SEQ ID NO: 269244 - DNA, 25 bp, Homo sapien
ccgggggatgttaatccaagccagg

SEQ ID NO: 269245 - DNA, 25 bp, Homo sapien
caagcctccctccttccgggggatg

SEQ ID NO: 269246 - DNA, 25 bp, Homo sapien
catcaatgataaagaggccccagta

SEQ ID NO: 269247 - DNA, 25 bp, Homo sapien
tcatctgttttcagctcaccgtaat

SEQ ID NO: 269248 - DNA, 25 bp, Homo sapien
cccagtaggcaatgcactcatctgt

SEQ ID NO: 269249 - DNA, 25 bp, Homo sapien
gcaaaggacacccttgccatcaatg

SEQ ID NO: 269250 - DNA, 25 bp, Homo sapien
gcaggacaaacttccctgtgctcgt

SEQ ID NO: 269251 - DNA, 25 bp, Homo sapien
cctgtgctcgtccgtgtactggatg

SEQ ID NO: 269252 - DNA, 25 bp, Homo sapien
agcaggacaaacttccctgtgctcg

SEQ ID NO: 269253 - DNA, 25 bp, Homo sapien
tccctgtgctcgtccgtgtactgga

SEQ ID NO: 269254 - DNA, 25 bp, Homo sapien
aaggccttggcctagccctccaggg

SEQ ID NO: 269255 - DNA, 25 bp, Homo sapien
agaaggccttggcctagccctccag

SEQ ID NO: 269256 - DNA, 25 bp, Homo sapien
gaaggccttggcctagccctccagg

SEQ ID NO: 269257 - DNA, 25 bp, Homo sapien
aggccttggcctagccctccagggt

SEQ ID NO: 269258 - DNA, 25 bp, Homo sapien
ttcggtgcagaaccgtatgtatgtc

SEQ ID NO: 269259 - DNA, 25 bp, Homo sapien
cctttcctggatacgtttatttctg

SEQ ID NO: 269260 - DNA, 25 bp, Homo sapien
tgcagaaccgtatgtatgtcacaca

SEQ ID NO: 269261 - DNA, 25 bp, Homo sapien
aggttgctgcctttcggtgcagaac

SEQ ID NO: 269262 - DNA, 25 bp, Homo sapien
ggcctcgggtcttcggcgcctctga

SEQ ID NO: 269263 - DNA, 25 bp, Homo sapien
tcagggatgagcagccgcccaagct

SEQ ID NO: 269264 - DNA, 25 bp, Homo sapien
cagggatgagcagccgcccaagctg

SEQ ID NO: 269265 - DNA, 25 bp, Homo sapien
gcagggcctcgggtcttcggcgcct

SEQ ID NO: 269266 - DNA, 25 bp, Homo sapien
gtggaggtgagcctcgggcttcccg

SEQ ID NO: 269267 - DNA, 25 bp, Homo sapien
agtggaggtgagcctcgggcttccc

SEQ ID NO: 269268 - DNA, 25 bp, Homo sapien
tggaccgcatcgctgaatgtgcccg

SEQ ID NO: 269269 - DNA, 25 bp, Homo sapien
caggctcgcggtgcatcatgggaat

SEQ ID NO: 269270 - DNA, 25 bp, Homo sapien
gataaactttgagcggaccgggaca

SEQ ID NO: 269271 - DNA, 25 bp, Homo sapien
aattgtagttcagcgactcctcggg

SEQ ID NO: 269272 - DNA, 25 bp, Homo sapien
ccgccgccttttcacgcacgtcgcg

SEQ ID NO: 269273 - DNA, 25 bp, Homo sapien
gccgccttttcacgcacgtcgcgag

SEQ ID NO: 269274 - DNA, 25 bp, Homo sapien
cgccgccttttcacgcacgtcgcga

SEQ ID NO: 269275 - DNA, 25 bp, Homo sapien
cgccgccgccttttcacgcacgtcg

SEQ ID NO: 269276 - DNA, 25 bp, Homo sapien
tccttcgacgccactggcatcacct

SEQ ID NO: 269277 - DNA, 25 bp, Homo sapien
gcggcggacgcctggacaggcggcg

SEQ ID NO: 269278 - DNA, 25 bp, Homo sapien
actggcatcacctccgaaagcagca

SEQ ID NO: 269279 - DNA, 25 bp, Homo sapien
aaaggcgctgcgacgccccgggtgc

SEQ ID NO: 269280 - DNA, 25 bp, Homo sapien
tcaattcggtttgactggagaaaaa

SEQ ID NO: 269281 - DNA, 25 bp, Homo sapien
agaggtggcgtaggatccacacatc

SEQ ID NO: 269282 - DNA, 25 bp, Homo sapien
ggtggcgtaggatccacacatccct

SEQ ID NO: 269283 - DNA, 25 bp, Homo sapien
gcgtaggatccacacatcccttggg

SEQ ID NO: 269284 - DNA, 25 bp, Homo sapien
aaactgtaacaagtaaagaagctga

SEQ ID NO: 269285 - DNA, 25 bp, Homo sapien
agttcccggctttcttcatcattaa

SEQ ID NO: 269286 - DNA, 25 bp, Homo sapien
ttcctctcacttgctaataacgagt

SEQ ID NO: 269287 - DNA, 25 bp, Homo sapien
gaggtctctggtagtagttcccggc

SEQ ID NO: 269288 - DNA, 25 bp, Homo sapien
ctactttaatagctggaaattctcc

SEQ ID NO: 269289 - DNA, 25 bp, Homo sapien
tcttctgtcggctctccaggaagcc

SEQ ID NO: 269290 - DNA, 25 bp, Homo sapien
gatttcttctgtcggctctccagga

SEQ ID NO: 269291 - DNA, 25 bp, Homo sapien
atttcttctgtcggctctccaggaa

SEQ ID NO: 269292 - DNA, 25 bp, Homo sapien
ttgcagtgcagaaaacccttgattg

SEQ ID NO: 269293 - DNA, 25 bp, Homo sapien
gcatcaacttgcaggtaccatcgaa

SEQ ID NO: 269294 - DNA, 25 bp, Homo sapien
gggataaacagcttgcccgccataa

SEQ ID NO: 269295 - DNA, 25 bp, Homo sapien
tccaaactggagtggtggtcacctc

SEQ ID NO: 269296 - DNA, 25 bp, Homo sapien
atcttcatggttggaaaatctgttg

SEQ ID NO: 269297 - DNA, 25 bp, Homo sapien
tcttcatggttggaaaatctgttgt

SEQ ID NO: 269298 - DNA, 25 bp, Homo sapien
tcttcgtggccacacgatggctgct

SEQ ID NO: 269299 - DNA, 25 bp, Homo sapien
tcctgctgctttctcgaagtgaagc

SEQ ID NO: 269300 - DNA, 25 bp, Homo sapien
cccacctaactctgcattccaggca

SEQ ID NO: 269301 - DNA, 25 bp, Homo sapien
catctgtgactcaggttgcttcttt

SEQ ID NO: 269302 - DNA, 25 bp, Homo sapien
tgcggctgccttcacgctacaatgg

SEQ ID NO: 269303 - DNA, 25 bp, Homo sapien
ggcagtaacgttcctcgtgagtgct

SEQ ID NO: 269304 - DNA, 25 bp, Homo sapien
ttgtgacgggcactgtatgacagca

SEQ ID NO: 269305 - DNA, 25 bp, Homo sapien
ctttactttccccagagtgagggag

SEQ ID NO: 269306 - DNA, 25 bp, Homo sapien
tatattagggaaacactacaaacac

SEQ ID NO: 269307 - DNA, 25 bp, Homo sapien
aaagacctgatgtcatatggaagcc

SEQ ID NO: 269308 - DNA, 25 bp, Homo sapien
actaatcgttgtgaaagagagtggc

SEQ ID NO: 269309 - DNA, 25 bp, Homo sapien
gagagtggcatcctatctttgaatt

SEQ ID NO: 269310 - DNA, 25 bp, Homo sapien
ctgttccatcttggtgggggcggca

SEQ ID NO: 269311 - DNA, 25 bp, Homo sapien
aggaagcgcacacagaatctagagg

SEQ ID NO: 269312 - DNA, 25 bp, Homo sapien
tgttccatcttggtgggggcggcag

SEQ ID NO: 269313 - DNA, 25 bp, Homo sapien
tgcctgtaacccttgtcatttggag

SEQ ID NO: 269314 - DNA, 25 bp, Homo sapien
gcatgcctgtaacccttgtcatttg

SEQ ID NO: 269315 - DNA, 25 bp, Homo sapien
tgctgcatgcctgtaacccttgtca

SEQ ID NO: 269316 - DNA, 25 bp, Homo sapien
gctgcatgcctgtaacccttgtcat

SEQ ID NO: 269317 - DNA, 25 bp, Homo sapien
tttgaattagatacagaaaggattt

SEQ ID NO: 269318 - DNA, 25 bp, Homo sapien
cctttgctagactgggggtactggt

SEQ ID NO: 269319 - DNA, 25 bp, Homo sapien
ttcctttgctagactgggggtactg

SEQ ID NO: 269320 - DNA, 25 bp, Homo sapien
gttttgaattagatacagaaaggat

SEQ ID NO: 269321 - DNA, 25 bp, Homo sapien
catgtccctgattagagtggttggg

SEQ ID NO: 269322 - DNA, 25 bp, Homo sapien
tgtccatgtccctgattagagtggt

SEQ ID NO: 269323 - DNA, 25 bp, Homo sapien
tccatgtccctgattagagtggttg

SEQ ID NO: 269324 - DNA, 25 bp, Homo sapien
attagagtggttggggcattctcac

SEQ ID NO: 269325 - DNA, 25 bp, Homo sapien
ggttgacaacaggtacagcttgtac

SEQ ID NO: 269326 - DNA, 25 bp, Homo sapien
acaggtacagcttgtactgcaaggg

SEQ ID NO: 269327 - DNA, 25 bp, Homo sapien
gacaacaggtacagcttgtactgca

SEQ ID NO: 269328 - DNA, 25 bp, Homo sapien
ggaggttgacaacaggtacagcttg

SEQ ID NO: 269329 - DNA, 25 bp, Homo sapien
ccaaggcgggtcttgacagagaagc

SEQ ID NO: 269330 - DNA, 25 bp, Homo sapien
cataggaggccatgtacatgttgcc

SEQ ID NO: 269331 - DNA, 25 bp, Homo sapien
cagcgaattgtctaagatgggaggc

SEQ ID NO: 269332 - DNA, 25 bp, Homo sapien
gctctgatgacgcttgacatggcaa

SEQ ID NO: 269333 - DNA, 25 bp, Homo sapien
caatggtgttttcagctggagcctc

SEQ ID NO: 269334 - DNA, 25 bp, Homo sapien
ggcttcaatggtgttttcagctgga

SEQ ID NO: 269335 - DNA, 25 bp, Homo sapien
tggagcctcttcctgccattccttt

SEQ ID NO: 269336 - DNA, 25 bp, Homo sapien
tcctggcttcaatggtgttttcagc

SEQ ID NO: 269337 - DNA, 25 bp, Homo sapien
ggattggtgcatttggtctcagttc

SEQ ID NO: 269338 - DNA, 25 bp, Homo sapien
gattggtgcatttggtctcagttcc

SEQ ID NO: 269339 - DNA, 25 bp, Homo sapien
gctttgcaggcgaatggggcacaga

SEQ ID NO: 269340 - DNA, 25 bp, Homo sapien
tgctggggcctacactggctttgca

SEQ ID NO: 269341 - DNA, 25 bp, Homo sapien
cgttcctatcgcctatgatgaaaga

SEQ ID NO: 269342 - DNA, 25 bp, Homo sapien
tcttctccgttcctatcgcctatga

SEQ ID NO: 269343 - DNA, 25 bp, Homo sapien
gttcctatcgcctatgatgaaagaa

SEQ ID NO: 269344 - DNA, 25 bp, Homo sapien
ctccgttcctatcgcctatgatgaa

SEQ ID NO: 269345 - DNA, 25 bp, Homo sapien
ctgccttctgtttaagttgcaaagc

SEQ ID NO: 269346 - DNA, 25 bp, Homo sapien
gcaaggaaggcactccgcccaaaac

SEQ ID NO: 269347 - DNA, 25 bp, Homo sapien
tttaagttgcaaagcaatgattgtc

SEQ ID NO: 269348 - DNA, 25 bp, Homo sapien
tgctggtatggtcccgtggcaagga

SEQ ID NO: 269349 - DNA, 25 bp, Homo sapien
gaatctaggtttcgtaggtcctgaa

SEQ ID NO: 269350 - DNA, 25 bp, Homo sapien
gcagaacagacgcagccttaaaaga

SEQ ID NO: 269351 - DNA, 25 bp, Homo sapien
aaataagagcatgtgagccaaaggg

SEQ ID NO: 269352 - DNA, 25 bp, Homo sapien
gcacagaaagtgctttacccaaaca

SEQ ID NO: 269353 - DNA, 25 bp, Homo sapien
tccccacgacttgacgatttgagcg

SEQ ID NO: 269354 - DNA, 25 bp, Homo sapien
tggtagcctccccacgacttgacga

SEQ ID NO: 269355 - DNA, 25 bp, Homo sapien
cgacttgacgatttgagcgtctgag

SEQ ID NO: 269356 - DNA, 25 bp, Homo sapien
cttgacgatttgagcgtctgagtga

SEQ ID NO: 269357 - DNA, 25 bp, Homo sapien
gaagtgggatcatgagtagggctag

SEQ ID NO: 269358 - DNA, 25 bp, Homo sapien
tgggatcatgagtagggctaggccc

SEQ ID NO: 269359 - DNA, 25 bp, Homo sapien
taggcccactgtgtggggtctttca

SEQ ID NO: 269360 - DNA, 25 bp, Homo sapien
gaagaagtgggatcatgagtagggc

SEQ ID NO: 269361 - DNA, 25 bp, Homo sapien
ataaaaggtttggtgaggcagctgc

SEQ ID NO: 269362 - DNA, 25 bp, Homo sapien
cagttcttgactggcggtgactttg

SEQ ID NO: 269363 - DNA, 25 bp, Homo sapien
ctaatacctataccccagctttgaa

SEQ ID NO: 269364 - DNA, 25 bp, Homo sapien
gaaggaggagctaatttcagcccta

SEQ ID NO: 269365 - DNA, 25 bp, Homo sapien
gaaagagacacctgccggtggcatg

SEQ ID NO: 269366 - DNA, 25 bp, Homo sapien
tcttacaacaggcataggtccacgt

SEQ ID NO: 269367 - DNA, 25 bp, Homo sapien
cacaagagcgttgctccgcagtcag

SEQ ID NO: 269368 - DNA, 25 bp, Homo sapien
gcagctgccggcgtttcaaaggtga

SEQ ID NO: 269369 - DNA, 25 bp, Homo sapien
ccccagaaacaagagccagtaggtt

SEQ ID NO: 269370 - DNA, 25 bp, Homo sapien
gtcctttgatcttgggtttgagagc

SEQ ID NO: 269371 - DNA, 25 bp, Homo sapien
tttggaggccggcaaggcatttcct

SEQ ID NO: 269372 - DNA, 25 bp, Homo sapien
aaacttcccagggtgatgggtcctg

SEQ ID NO: 269373 - DNA, 25 bp, Homo sapien
ggatgcctctattcgtcccaagaga

SEQ ID NO: 269374 - DNA, 25 bp, Homo sapien
caggagcaccagatagtggctttcc

SEQ ID NO: 269375 - DNA, 25 bp, Homo sapien
caagatcacgatttgggatgcctct

SEQ ID NO: 269376 - DNA, 25 bp, Homo sapien
gaaggcacagcagatccaagatcac

SEQ ID NO: 269377 - DNA, 25 bp, Homo sapien
aagagattagccaaaggtgagtggc

SEQ ID NO: 269378 - DNA, 25 bp, Homo sapien
tctcctaaagagattagccaaaggt

SEQ ID NO: 269379 - DNA, 25 bp, Homo sapien
taatccctcaacaactatcacatct

SEQ ID NO: 269380 - DNA, 25 bp, Homo sapien
tagctgggcagaggataatccctca

SEQ ID NO: 269381 - DNA, 25 bp, Homo sapien
ctttaaaaatgggtcgtcttgccag

SEQ ID NO: 269382 - DNA, 25 bp, Homo sapien
gccagtcattgagggtcaccgcggt

SEQ ID NO: 269383 - DNA, 25 bp, Homo sapien
aaaaatgggtcgtcttgccagtcat

SEQ ID NO: 269384 - DNA, 25 bp, Homo sapien
ccacgacgtttattgtttccagctg

SEQ ID NO: 269385 - DNA, 25 bp, Homo sapien
ttgcagctgtaagaaccgaggccca

SEQ ID NO: 269386 - DNA, 25 bp, Homo sapien
gacttttgaaaacagcgaaggagaa

SEQ ID NO: 269387 - DNA, 25 bp, Homo sapien
gaaggagaaatcagtcctcccagca

SEQ ID NO: 269388 - DNA, 25 bp, Homo sapien
tccgtggcaggagttgtgctaactt

SEQ ID NO: 269389 - DNA, 25 bp, Homo sapien
ccttatattgtggagtgggccctgg

SEQ ID NO: 269390 - DNA, 25 bp, Homo sapien
ctagaaggcagaagctagggccaag

SEQ ID NO: 269391 - DNA, 25 bp, Homo sapien
gccctggaagatagttagagaccct

SEQ ID NO: 269392 - DNA, 25 bp, Homo sapien
gccaaggcggctgctaaggaattcc

SEQ ID NO: 269393 - DNA, 25 bp, Homo sapien
gcagcggtccgtttcattttagaca

SEQ ID NO: 269394 - DNA, 25 bp, Homo sapien
gattctgctcctgaaacttagtaca

SEQ ID NO: 269395 - DNA, 25 bp, Homo sapien
ttttagacaggaaaatgagggcgca

SEQ ID NO: 269396 - DNA, 25 bp, Homo sapien
gagaggccagagaacaagacagcag

SEQ ID NO: 269397 - DNA, 25 bp, Homo sapien
ctgccccttttcgtcgatgttcggg

SEQ ID NO: 269398 - DNA, 25 bp, Homo sapien
cttattatacggagggttgtcagga

SEQ ID NO: 269399 - DNA, 25 bp, Homo sapien
taaatgtgatcctcggtggtttgaa

SEQ ID NO: 269400 - DNA, 25 bp, Homo sapien
gcttcatcaacctggatgttacgga

SEQ ID NO: 269401 - DNA, 25 bp, Homo sapien
gcgggtcattcaccagtgctatgag

SEQ ID NO: 269402 - DNA, 25 bp, Homo sapien
gggtcattcaccagtgctatgaggg

SEQ ID NO: 269403 - DNA, 25 bp, Homo sapien
ctgcgggtcattcaccagtgctatg

SEQ ID NO: 269404 - DNA, 25 bp, Homo sapien
gtcattcaccagtgctatgagggac

SEQ ID NO: 269405 - DNA, 25 bp, Homo sapien
gtccacaggtcgcttttccccatat

SEQ ID NO: 269406 - DNA, 25 bp, Homo sapien
actgctgcaagcgaacgccagacgg

SEQ ID NO: 269407 - DNA, 25 bp, Homo sapien
ctgcaagcgaacgccagacggtggc

SEQ ID NO: 269408 - DNA, 25 bp, Homo sapien
taactgctgcaagcgaacgccagac

SEQ ID NO: 269409 - DNA, 25 bp, Homo sapien
tgctgcaagcgaacgccagacggtg

SEQ ID NO: 269410 - DNA, 25 bp, Homo sapien
cccgttagggtagccagattttatg

SEQ ID NO: 269411 - DNA, 25 bp, Homo sapien
tatagttccgtctattaatggccac

SEQ ID NO: 269412 - DNA, 25 bp, Homo sapien
tctggtaggacactgtgtcaacatc

SEQ ID NO: 269413 - DNA, 25 bp, Homo sapien
tgtctgaactcttatcccgttaggg

SEQ ID NO: 269414 - DNA, 25 bp, Homo sapien
tcattaaggatgagagcctagacac

SEQ ID NO: 269415 - DNA, 25 bp, Homo sapien
tttaccaatgccacctgagtccaag

SEQ ID NO: 269416 - DNA, 25 bp, Homo sapien
aattactaaagcagggaagtgcagc

SEQ ID NO: 269417 - DNA, 25 bp, Homo sapien
taaaagatgcagcacctcagagcag

SEQ ID NO: 269418 - DNA, 25 bp, Homo sapien
caatcgtcattcacatacaccttca

SEQ ID NO: 269419 - DNA, 25 bp, Homo sapien
taattcccactgcatctacacaaag

SEQ ID NO: 269420 - DNA, 25 bp, Homo sapien
tgtgccagaaaaatatcacggaaat

SEQ ID NO: 269421 - DNA, 25 bp, Homo sapien
gtaccccaaagaggagcggcgtgca

SEQ ID NO: 269422 - DNA, 25 bp, Homo sapien
tggggcctattcttccacgaggaca

SEQ ID NO: 269423 - DNA, 25 bp, Homo sapien
actcttgcatgggtgtaagttctgc

SEQ ID NO: 269424 - DNA, 25 bp, Homo sapien
gacggtgtcccgcatttgctgagtg

SEQ ID NO: 269425 - DNA, 25 bp, Homo sapien
cactgacggggctgatgcttggcac

SEQ ID NO: 269426 - DNA, 25 bp, Homo sapien
tgcattttacgcacgccctccaggg

SEQ ID NO: 269427 - DNA, 25 bp, Homo sapien
ggccgactcgccagtgcaaattacg

SEQ ID NO: 269428 - DNA, 25 bp, Homo sapien
gcaaatagcaccgacagctgcagct

SEQ ID NO: 269429 - DNA, 25 bp, Homo sapien
cgcccttgtgagcagctcagcggaa

SEQ ID NO: 269430 - DNA, 25 bp, Homo sapien
aagaccctgcaggtcaacgtttcgc

SEQ ID NO: 269431 - DNA, 25 bp, Homo sapien
gagcctgactccgctcccagttttt

SEQ ID NO: 269432 - DNA, 25 bp, Homo sapien
agcccaggccgacagttcctcaaga

SEQ ID NO: 269433 - DNA, 25 bp, Homo sapien
gtcaacgtttcgcaacttcccaagc

SEQ ID NO: 269434 - DNA, 25 bp, Homo sapien
tgagttcgagagtctggaaaggcct

SEQ ID NO: 269435 - DNA, 25 bp, Homo sapien
aaactgtattcgtcattctgcctgc

SEQ ID NO: 269436 - DNA, 25 bp, Homo sapien
tgcgcaggcccacaaagataacaca

SEQ ID NO: 269437 - DNA, 25 bp, Homo sapien
tatttcggttggcttggtcgaggac

SEQ ID NO: 269438 - DNA, 25 bp, Homo sapien
tcccgtaggtcgaagacaacatctc

SEQ ID NO: 269439 - DNA, 25 bp, Homo sapien
aatagatccaattccttcccgtagg

SEQ ID NO: 269440 - DNA, 25 bp, Homo sapien
taggcagcctgctagtaggggactc

SEQ ID NO: 269441 - DNA, 25 bp, Homo sapien
actacttgattgatgagtaggcagc

SEQ ID NO: 269442 - DNA, 25 bp, Homo sapien
ccacgttacaggtgaaaatcttcta

SEQ ID NO: 269443 - DNA, 25 bp, Homo sapien
gaaatcgtccttataaaggtctgaa

SEQ ID NO: 269444 - DNA, 25 bp, Homo sapien
taaatacaacagactacattggatc

SEQ ID NO: 269445 - DNA, 25 bp, Homo sapien
gagtctcaaacttatcttaaccacg

SEQ ID NO: 269446 - DNA, 25 bp, Homo sapien
ggcaacggtgttggattccagttcc

SEQ ID NO: 269447 - DNA, 25 bp, Homo sapien
ttttagtctccaaagatctgtaggc

SEQ ID NO: 269448 - DNA, 25 bp, Homo sapien
tccaaagatctgtaggcaacggtgt

SEQ ID NO: 269449 - DNA, 25 bp, Homo sapien
tatctctaggcatgttgcattcaaa

SEQ ID NO: 269450 - DNA, 25 bp, Homo sapien
aatatgtaatgctcgtcttccaggg

SEQ ID NO: 269451 - DNA, 25 bp, Homo sapien
ggaatccagaaatagaaagtcagtg

SEQ ID NO: 269452 - DNA, 25 bp, Homo sapien
ctaaacctgtaagtgagcatgagca

SEQ ID NO: 269453 - DNA, 25 bp, Homo sapien
caagggtatgcagactctggaatcc

SEQ ID NO: 269454 - DNA, 25 bp, Homo sapien
aaatttcctaactttgctgtgcaaa

SEQ ID NO: 269455 - DNA, 25 bp, Homo sapien
gagctattgctgattagttaccaca

SEQ ID NO: 269456 - DNA, 25 bp, Homo sapien
catatggcatattgattaacgagtc

SEQ ID NO: 269457 - DNA, 25 bp, Homo sapien
gatgatcgtcccatcacagtgttgt

SEQ ID NO: 269458 - DNA, 25 bp, Homo sapien
tacacgcttttgtgatggagtgctg

SEQ ID NO: 269459 - DNA, 25 bp, Homo sapien
gaatgtatccccaaaagcgtgagct

SEQ ID NO: 269460 - DNA, 25 bp, Homo sapien
ggactgctcaggaaacgagactttc

SEQ ID NO: 269461 - DNA, 25 bp, Homo sapien
taatcaatctactcaaagcatggga

SEQ ID NO: 269462 - DNA, 25 bp, Homo sapien
cctttgctttggaaggatattgctg

SEQ ID NO: 269463 - DNA, 25 bp, Homo sapien
ctttgctttggaaggatattgctgc

SEQ ID NO: 269464 - DNA, 25 bp, Homo sapien
gacagtttccaattgaggatgcaaa

SEQ ID NO: 269465 - DNA, 25 bp, Homo sapien
gggacgctattacatagcaaaagac

SEQ ID NO: 269466 - DNA, 25 bp, Homo sapien
tggcattctcgtagtgggacgctat

SEQ ID NO: 269467 - DNA, 25 bp, Homo sapien
attaaaagacagtttccaattgagg

SEQ ID NO: 269468 - DNA, 25 bp, Homo sapien
ccataattaggaagagtcgactcgc

SEQ ID NO: 269469 - DNA, 25 bp, Homo sapien
ttttgaaactttcggtgcacggtga

SEQ ID NO: 269470 - DNA, 25 bp, Homo sapien
tagtgcaaagccacgaattggcagc

SEQ ID NO: 269471 - DNA, 25 bp, Homo sapien
caaaccgataggaaacgaggctgcc

SEQ ID NO: 269472 - DNA, 25 bp, Homo sapien
ctcgcactcacacactctctcatac

SEQ ID NO: 269473 - DNA, 25 bp, Homo sapien
cacacacacaaagggaaggagccat

SEQ ID NO: 269474 - DNA, 25 bp, Homo sapien
acacacacacacaaagggaaggagc

SEQ ID NO: 269475 - DNA, 25 bp, Homo sapien
cctcgcactcacacactctctcata

SEQ ID NO: 269476 - DNA, 25 bp, Homo sapien
tggcttgggttagacacatgcacac

SEQ ID NO: 269477 - DNA, 25 bp, Homo sapien
agccccgtgagttggcggtagccaa

SEQ ID NO: 269478 - DNA, 25 bp, Homo sapien
gcaaacgggctctggtcaggacaat

SEQ ID NO: 269479 - DNA, 25 bp, Homo sapien
caatccttgatgacgtgtccccgga

SEQ ID NO: 269480 - DNA, 25 bp, Homo sapien
acggctttgggcgtgaatgtggggc

SEQ ID NO: 269481 - DNA, 25 bp, Homo sapien
ggctttgggcgtgaatgtggggcaa

SEQ ID NO: 269482 - DNA, 25 bp, Homo sapien
tcaacggctttgggcgtgaatgtgg

SEQ ID NO: 269483 - DNA, 25 bp, Homo sapien
caacggctttgggcgtgaatgtggg

SEQ ID NO: 269484 - DNA, 25 bp, Homo sapien
gaggcaggaggtacttaagcagctg

SEQ ID NO: 269485 - DNA, 25 bp, Homo sapien
ccaattctagagaacttattgatat

SEQ ID NO: 269486 - DNA, 25 bp, Homo sapien
tggctatcatcaatgctgcccacgg

SEQ ID NO: 269487 - DNA, 25 bp, Homo sapien
tttctgtgccatagcattgatggct

SEQ ID NO: 269488 - DNA, 25 bp, Homo sapien
tggtaaggctgtctgtcccaaccgg

SEQ ID NO: 269489 - DNA, 25 bp, Homo sapien
tcagcacctgcacttgtcagttagg

SEQ ID NO: 269490 - DNA, 25 bp, Homo sapien
cagttaggcctgatgttaccctgga

SEQ ID NO: 269491 - DNA, 25 bp, Homo sapien
tacaaaccgctttgggcactcagtg

SEQ ID NO: 269492 - DNA, 25 bp, Homo sapien
tgtgcttttcatgacttatcttcct

SEQ ID NO: 269493 - DNA, 25 bp, Homo sapien
ctgtgcttttcatgacttatcttcc

SEQ ID NO: 269494 - DNA, 25 bp, Homo sapien
gtgcttttcatgacttatcttcctc

SEQ ID NO: 269495 - DNA, 25 bp, Homo sapien
gcttttcatgacttatcttcctcat

SEQ ID NO: 269496 - DNA, 25 bp, Homo sapien
gaagcaaagggccattctgtgagag

SEQ ID NO: 269497 - DNA, 25 bp, Homo sapien
tgaagcaaagggccattctgtgaga

SEQ ID NO: 269498 - DNA, 25 bp, Homo sapien
cgtgaagcaaagggccattctgtga

SEQ ID NO: 269499 - DNA, 25 bp, Homo sapien
agcaaagggccattctgtgagagaa

SEQ ID NO: 269500 - DNA, 25 bp, Homo sapien
tcatccataccactgccattggcag

SEQ ID NO: 269501 - DNA, 25 bp, Homo sapien
ccccagagccggcaaatgttggtag

SEQ ID NO: 269502 - DNA, 25 bp, Homo sapien
tggtagaattccattgacctcagca

SEQ ID NO: 269503 - DNA, 25 bp, Homo sapien
ggctgtggcagcagtagattttcca

SEQ ID NO: 269504 - DNA, 25 bp, Homo sapien
ctttctcagagatagagcatttccc

SEQ ID NO: 269505 - DNA, 25 bp, Homo sapien
ttgacagtcctgtccaacaggttcc

SEQ ID NO: 269506 - DNA, 25 bp, Homo sapien
gtcttggcaaataggaatcccgttc

SEQ ID NO: 269507 - DNA, 25 bp, Homo sapien
cagagatagagcatttcccagcact

SEQ ID NO: 269508 - DNA, 25 bp, Homo sapien
ttcaaaaggtctagctctctgcctt

SEQ ID NO: 269509 - DNA, 25 bp, Homo sapien
cacctcccccgatccgatcctgatt

SEQ ID NO: 269510 - DNA, 25 bp, Homo sapien
tgattcaaaaggtctagctctctgc

SEQ ID NO: 269511 - DNA, 25 bp, Homo sapien
ctggctgcacctcccccgatccgat

SEQ ID NO: 269512 - DNA, 25 bp, Homo sapien
cagctgtgcaacctggggacagaag

SEQ ID NO: 269513 - DNA, 25 bp, Homo sapien
ggtgtgggagaaataagacagcctc

SEQ ID NO: 269514 - DNA, 25 bp, Homo sapien
aagtgccaggtaaccccagagcctg

SEQ ID NO: 269515 - DNA, 25 bp, Homo sapien
cactgggagagggtgatacccacac

SEQ ID NO: 269516 - DNA, 25 bp, Homo sapien
ggcagtctcagggtggggacaaagg

SEQ ID NO: 269517 - DNA, 25 bp, Homo sapien
cagtctcagggtggggacaaaggtc

SEQ ID NO: 269518 - DNA, 25 bp, Homo sapien
gctacatggcagtctcagggtgggg

SEQ ID NO: 269519 - DNA, 25 bp, Homo sapien
ctcagggtggggacaaaggtcaggg

SEQ ID NO: 269520 - DNA, 25 bp, Homo sapien
tcattcatagaagcaagtccccagc

SEQ ID NO: 269521 - DNA, 25 bp, Homo sapien
tcatatgtcattcatagaagcaagt

SEQ ID NO: 269522 - DNA, 25 bp, Homo sapien
tgtcattcatagaagcaagtcccca

SEQ ID NO: 269523 - DNA, 25 bp, Homo sapien
atatgtcattcatagaagcaagtcc

SEQ ID NO: 269524 - DNA, 25 bp, Homo sapien
ggaggagccaatacaagtgaatcaa

SEQ ID NO: 269525 - DNA, 25 bp, Homo sapien
aatcaagtttgcgttcatcacccag

SEQ ID NO: 269526 - DNA, 25 bp, Homo sapien
gcatctggaggagccaatacaagtg

SEQ ID NO: 269527 - DNA, 25 bp, Homo sapien
caatacaagtgaatcaagtttgcgt

SEQ ID NO: 269528 - DNA, 25 bp, Homo sapien
gcaaagcacagcttcggatgaactc

SEQ ID NO: 269529 - DNA, 25 bp, Homo sapien
gaatgaactaagcaaacactgaagt

SEQ ID NO: 269530 - DNA, 25 bp, Homo sapien
cggatgaactccatcaagtgctgct

SEQ ID NO: 269531 - DNA, 25 bp, Homo sapien
aagaaacttgagaatgaactaagca

SEQ ID NO: 269532 - DNA, 25 bp, Homo sapien
cgaatttccaagtacggcagctgcc

SEQ ID NO: 269533 - DNA, 25 bp, Homo sapien
aaagagcttcacattgaatcccgtt

SEQ ID NO: 269534 - DNA, 25 bp, Homo sapien
ttctaatcgtagtagatgtactgtg

SEQ ID NO: 269535 - DNA, 25 bp, Homo sapien
tgatattttctaatcgtagtagatg

SEQ ID NO: 269536 - DNA, 25 bp, Homo sapien
tagtagatgtactgtgtaatatgac

SEQ ID NO: 269537 - DNA, 25 bp, Homo sapien
taatcgtagtagatgtactgtgtaa

SEQ ID NO: 269538 - DNA, 25 bp, Homo sapien
tgcacccagtgccttcgctacaatg

SEQ ID NO: 269539 - DNA, 25 bp, Homo sapien
gtgccttcgctacaatggatcactg

SEQ ID NO: 269540 - DNA, 25 bp, Homo sapien
ccagtgccttcgctacaatggatca

SEQ ID NO: 269541 - DNA, 25 bp, Homo sapien
tgcccgtgcacccagtgccttcgct

SEQ ID NO: 269542 - DNA, 25 bp, Homo sapien
tctcatgttcaataacacttgttta

SEQ ID NO: 269543 - DNA, 25 bp, Homo sapien
ttaatataatctccttttcccatca

SEQ ID NO: 269544 - DNA, 25 bp, Homo sapien
tgaataagacccattcagtattttc

SEQ ID NO: 269545 - DNA, 25 bp, Homo sapien
tcccatcaaaacaagacaagcgtct

SEQ ID NO: 269546 - DNA, 25 bp, Homo sapien
cttgcatttactgtacatcggtcac

SEQ ID NO: 269547 - DNA, 25 bp, Homo sapien
tcttgcatttactgtacatcggtca

SEQ ID NO: 269548 - DNA, 25 bp, Homo sapien
gcatcttaaggattcaatgatacag

SEQ ID NO: 269549 - DNA, 25 bp, Homo sapien
ggtaattcgcacatccaccatctca

SEQ ID NO: 269550 - DNA, 25 bp, Homo sapien
tattccatcaacgatgggatttcac

SEQ ID NO: 269551 - DNA, 25 bp, Homo sapien
gagaatgtgcaatatccttccagct

SEQ ID NO: 269552 - DNA, 25 bp, Homo sapien
aacccagcgccaattctatcagctt

SEQ ID NO: 269553 - DNA, 25 bp, Homo sapien
ccaacccagcgccaattctatcagc

SEQ ID NO: 269554 - DNA, 25 bp, Homo sapien
ctccaaccaacccagcgccaattct

SEQ ID NO: 269555 - DNA, 25 bp, Homo sapien
ccaaccaacccagcgccaattctat

SEQ ID NO: 269556 - DNA, 25 bp, Homo sapien
tgaaaagcaagataggtttcccatt

SEQ ID NO: 269557 - DNA, 25 bp, Homo sapien
caccatgcccacgaagttattaaaa

SEQ ID NO: 269558 - DNA, 25 bp, Homo sapien
cacagttataaagtagagacccagc

SEQ ID NO: 269559 - DNA, 25 bp, Homo sapien
gttgttaataaatgaactgggtgca

SEQ ID NO: 269560 - DNA, 25 bp, Homo sapien
ggtggagtacaagcccttgtcagct

SEQ ID NO: 269561 - DNA, 25 bp, Homo sapien
agcttcccttctgcgcaccaagggt

SEQ ID NO: 269562 - DNA, 25 bp, Homo sapien
cgcaccaagggtggagtacaagccc

SEQ ID NO: 269563 - DNA, 25 bp, Homo sapien
cccttgtcagctgggcgatgctcca

SEQ ID NO: 269564 - DNA, 25 bp, Homo sapien
ctggctgtagatcaggattggcatc

SEQ ID NO: 269565 - DNA, 25 bp, Homo sapien
gctggctgtagatcaggattggcat

SEQ ID NO: 269566 - DNA, 25 bp, Homo sapien
tggctgtagatcaggattggcatca

SEQ ID NO: 269567 - DNA, 25 bp, Homo sapien
ttccagatcagccacggcaacctgg

SEQ ID NO: 269568 - DNA, 25 bp, Homo sapien
gttccagatcagccacggcaacctg

SEQ ID NO: 269569 - DNA, 25 bp, Homo sapien
tccagatcagccacggcaacctggt

SEQ ID NO: 269570 - DNA, 25 bp, Homo sapien
agttccagatcagccacggcaacct

SEQ ID NO: 269571 - DNA, 25 bp, Homo sapien
cctagcagggtcatggaaattagca

SEQ ID NO: 269572 - DNA, 25 bp, Homo sapien
tatgagaattcttaccactgaaggc

SEQ ID NO: 269573 - DNA, 25 bp, Homo sapien
tatgtaggtatcttggcacaaccca

SEQ ID NO: 269574 - DNA, 25 bp, Homo sapien
gactttcagtagaatgagcacctta

SEQ ID NO: 269575 - DNA, 25 bp, Homo sapien
agaggagagaataccaatgttggcc

SEQ ID NO: 269576 - DNA, 25 bp, Homo sapien
gaaatggcatgttaccagcggctcc

SEQ ID NO: 269577 - DNA, 25 bp, Homo sapien
gtcaaagactttgtctcagaggaga

SEQ ID NO: 269578 - DNA, 25 bp, Homo sapien
agattgactagtggaagagggccta

SEQ ID NO: 269579 - DNA, 25 bp, Homo sapien
tacagtcacatcagggattaggaca

SEQ ID NO: 269580 - DNA, 25 bp, Homo sapien
catgacagcgacaattctggagagt

SEQ ID NO: 269581 - DNA, 25 bp, Homo sapien
gaggtcacgtctctaaatacagtca

SEQ ID NO: 269582 - DNA, 25 bp, Homo sapien
tcctatcagatcagggctccacctt

SEQ ID NO: 269583 - DNA, 25 bp, Homo sapien
ccatgtggatgaggagtgacacgaa

SEQ ID NO: 269584 - DNA, 25 bp, Homo sapien
ctccatgtggatgaggagtgacacg

SEQ ID NO: 269585 - DNA, 25 bp, Homo sapien
tggatgaggagtgacacgaaggagc

SEQ ID NO: 269586 - DNA, 25 bp, Homo sapien
tgtggatgaggagtgacacgaagga

SEQ ID NO: 269587 - DNA, 25 bp, Homo sapien
aacgtagctgctaatagcccactga

SEQ ID NO: 269588 - DNA, 25 bp, Homo sapien
cactgatgactggaagtttactgat

SEQ ID NO: 269589 - DNA, 25 bp, Homo sapien
tttgactgcccaaaaaacgtagctg

SEQ ID NO: 269590 - DNA, 25 bp, Homo sapien
gtttactgatagcatatattgttga

SEQ ID NO: 269591 - DNA, 25 bp, Homo sapien
cacgacccgttctgactagtcaaca

SEQ ID NO: 269592 - DNA, 25 bp, Homo sapien
gcagcgaaagcgcagggactttgca

SEQ ID NO: 269593 - DNA, 25 bp, Homo sapien
gtcaacagccgatctgtccctgctg

SEQ ID NO: 269594 - DNA, 25 bp, Homo sapien
gactttgcattccacgacccgttct

SEQ ID NO: 269595 - DNA, 25 bp, Homo sapien
ctgagcccgccatgtgtgagtggct

SEQ ID NO: 269596 - DNA, 25 bp, Homo sapien
tggctgctgagcccgccatgtgtga

SEQ ID NO: 269597 - DNA, 25 bp, Homo sapien
tgctgagcccgccatgtgtgagtgg

SEQ ID NO: 269598 - DNA, 25 bp, Homo sapien
gccatgtgtgagtggctgggtttgg

SEQ ID NO: 269599 - DNA, 25 bp, Homo sapien
gaaggtgaagacgtgagcacttccg

SEQ ID NO: 269600 - DNA, 25 bp, Homo sapien
gccctgtggccgcagacgcagttgc

SEQ ID NO: 269601 - DNA, 25 bp, Homo sapien
cagaggcgtggctgtccgccctgtg

SEQ ID NO: 269602 - DNA, 25 bp, Homo sapien
agacgtgagcacttccggtcgccct

SEQ ID NO: 269603 - DNA, 25 bp, Homo sapien
tgatctccaccctagttgcaacgtt

SEQ ID NO: 269604 - DNA, 25 bp, Homo sapien
gatcggaactcctgttccagcttga

SEQ ID NO: 269605 - DNA, 25 bp, Homo sapien
agtccgcggcaaaagagtcctcctt

SEQ ID NO: 269606 - DNA, 25 bp, Homo sapien
tcgcgtctccactaggaaggcggct

SEQ ID NO: 269607 - DNA, 25 bp, Homo sapien
cacaatgaacgtgtcaaggtggccc

SEQ ID NO: 269608 - DNA, 25 bp, Homo sapien
ttagcccagcatgaacccagttaga

SEQ ID NO: 269609 - DNA, 25 bp, Homo sapien
tctgcggtactctcaaatgggaaac

SEQ ID NO: 269610 - DNA, 25 bp, Homo sapien
taggctcggcacgtgaactgtcaaa

SEQ ID NO: 269611 - DNA, 25 bp, Homo sapien
ccgagtcattggctaatttatgtca

SEQ ID NO: 269612 - DNA, 25 bp, Homo sapien
cacttgagacatgtcaatatcacta

SEQ ID NO: 269613 - DNA, 25 bp, Homo sapien
cattggctaatttatgtcacttgag

SEQ ID NO: 269614 - DNA, 25 bp, Homo sapien
taatttatgtcacttgagacatgtc

SEQ ID NO: 269615 - DNA, 25 bp, Homo sapien
ttccaatcttcggagaatccatcat

SEQ ID NO: 269616 - DNA, 25 bp, Homo sapien
tccaatcactggcaaaccatttcca

SEQ ID NO: 269617 - DNA, 25 bp, Homo sapien
tccctatatcagtccctggtccaat

SEQ ID NO: 269618 - DNA, 25 bp, Homo sapien
catgtggagtgaagatatccctata

SEQ ID NO: 269619 - DNA, 25 bp, Homo sapien
tacccgggagaatttatgtaccata

SEQ ID NO: 269620 - DNA, 25 bp, Homo sapien
cattactgtaagatttccgtggaag

SEQ ID NO: 269621 - DNA, 25 bp, Homo sapien
gttaactggtaacatcaaaattgaa

SEQ ID NO: 269622 - DNA, 25 bp, Homo sapien
taaaacaatctttcgccattactgt

SEQ ID NO: 269623 - DNA, 25 bp, Homo sapien
catctgatggaactttagctgaatc

SEQ ID NO: 269624 - DNA, 25 bp, Homo sapien
tctgatggaactttagctgaatcaa

SEQ ID NO: 269625 - DNA, 25 bp, Homo sapien
actcatctgatggaactttagctga

SEQ ID NO: 269626 - DNA, 25 bp, Homo sapien
ctcatctgatggaactttagctgaa

SEQ ID NO: 269627 - DNA, 25 bp, Homo sapien
ctgcagatcctcacacaaaaagata

SEQ ID NO: 269628 - DNA, 25 bp, Homo sapien
gatagattcttgaaaactaattcgg

SEQ ID NO: 269629 - DNA, 25 bp, Homo sapien
tagattcttgaaaactaattcggta

SEQ ID NO: 269630 - DNA, 25 bp, Homo sapien
cctcacacaaaaagatagattcttg

SEQ ID NO: 269631 - DNA, 25 bp, Homo sapien
tctgggccaactctattgaatcagc

SEQ ID NO: 269632 - DNA, 25 bp, Homo sapien
atagctaacaaggacctccaaaagg

SEQ ID NO: 269633 - DNA, 25 bp, Homo sapien
tatataaaagccgtaccagtcggta

SEQ ID NO: 269634 - DNA, 25 bp, Homo sapien
ggatcttatgttcccaaaccctctg

SEQ ID NO: 269635 - DNA, 25 bp, Homo sapien
taagaaactcctcatgtcctttgca

SEQ ID NO: 269636 - DNA, 25 bp, Homo sapien
aagtaagaaactcctcatgtccttt

SEQ ID NO: 269637 - DNA, 25 bp, Homo sapien
acctaacgtagatgacaggctgaca

SEQ ID NO: 269638 - DNA, 25 bp, Homo sapien
taacgtagatgacaggctgacaggt

SEQ ID NO: 269639 - DNA, 25 bp, Homo sapien
gagcgactaagtttcaaggtgattc

SEQ ID NO: 269640 - DNA, 25 bp, Homo sapien
tgaaatgcactaaatcccctcagat

SEQ ID NO: 269641 - DNA, 25 bp, Homo sapien
gatagcctcttctaccaattgaaca

SEQ ID NO: 269642 - DNA, 25 bp, Homo sapien
gcgcctgccacggtattttctgtag

SEQ ID NO: 269643 - DNA, 25 bp, Homo sapien
tctgaggcttatgtggagtgtgaca

SEQ ID NO: 269644 - DNA, 25 bp, Homo sapien
tccgctccaaggaatcagctgtcct

SEQ ID NO: 269645 - DNA, 25 bp, Homo sapien
tattaagtgatttagagcccaaagg

SEQ ID NO: 269646 - DNA, 25 bp, Homo sapien
gattctgttgaccactactatcagg

SEQ ID NO: 269647 - DNA, 25 bp, Homo sapien
tatattttgtaagcaaccgccagaa

SEQ ID NO: 269648 - DNA, 25 bp, Homo sapien
tgtagcaggatcttttgtagtagcc

SEQ ID NO: 269649 - DNA, 25 bp, Homo sapien
ggatacagtctaaccaacagagagc

SEQ ID NO: 269650 - DNA, 25 bp, Homo sapien
gaatatagattcctccttcgagcac

SEQ ID NO: 269651 - DNA, 25 bp, Homo sapien
taatgtaactggtattatctcaagc

SEQ ID NO: 269652 - DNA, 25 bp, Homo sapien
ttttgggcagtcaggataatgtaac

SEQ ID NO: 269653 - DNA, 25 bp, Homo sapien
gcttcgtgatactgttcctgggctc

SEQ ID NO: 269654 - DNA, 25 bp, Homo sapien
ctcaagcttcgtgatactgttcctg

SEQ ID NO: 269655 - DNA, 25 bp, Homo sapien
ggttcaagtgattgttcaacttcca

SEQ ID NO: 269656 - DNA, 25 bp, Homo sapien
ttcaagtgattgttcaacttccacc

SEQ ID NO: 269657 - DNA, 25 bp, Homo sapien
caagtgattgttcaacttccacctc

SEQ ID NO: 269658 - DNA, 25 bp, Homo sapien
cagtggcgtgatcccaggttcaagt

SEQ ID NO: 269659 - DNA, 25 bp, Homo sapien
tgcctgtggttcacttagcagccat

SEQ ID NO: 269660 - DNA, 25 bp, Homo sapien
tgctgtctacactcctgcctgtggt

SEQ ID NO: 269661 - DNA, 25 bp, Homo sapien
cccttcgtctaatgtgtccatgctg

SEQ ID NO: 269662 - DNA, 25 bp, Homo sapien
catcttggtgatgcgatctattgcc

SEQ ID NO: 269663 - DNA, 25 bp, Homo sapien
tacctttgggcacacatatctatgt

SEQ ID NO: 269664 - DNA, 25 bp, Homo sapien
taattccaatattgaactgctgctc

SEQ ID NO: 269665 - DNA, 25 bp, Homo sapien
taaaagactctacatgcatctgact

SEQ ID NO: 269666 - DNA, 25 bp, Homo sapien
catgccactatattcagctgaaaca

SEQ ID NO: 269667 - DNA, 25 bp, Homo sapien
tctctaacttcattcagacaggtct

SEQ ID NO: 269668 - DNA, 25 bp, Homo sapien
tctaacttcattcagacaggtctct

SEQ ID NO: 269669 - DNA, 25 bp, Homo sapien
taatgtgcatctaagctggggctga

SEQ ID NO: 269670 - DNA, 25 bp, Homo sapien
taacttcattcagacaggtctctat

SEQ ID NO: 269671 - DNA, 25 bp, Homo sapien
tccccctagcctggaactacagttg

SEQ ID NO: 269672 - DNA, 25 bp, Homo sapien
cgatttggcccaagagactgagtcc

SEQ ID NO: 269673 - DNA, 25 bp, Homo sapien
gagcctcacttccatggtccagttc

SEQ ID NO: 269674 - DNA, 25 bp, Homo sapien
gcccaagagactgagtccttccatc

SEQ ID NO: 269675 - DNA, 25 bp, Homo sapien
tgtccacactgcgaacattcaaagt

SEQ ID NO: 269676 - DNA, 25 bp, Homo sapien
gcgaacattcaaagtcccaagaaaa

SEQ ID NO: 269677 - DNA, 25 bp, Homo sapien
cactgcgaacattcaaagtcccaag

SEQ ID NO: 269678 - DNA, 25 bp, Homo sapien
gttttgatattggtgtccacactgc

SEQ ID NO: 269679 - DNA, 25 bp, Homo sapien
caaactgtagtgtctggtgctcaaa

SEQ ID NO: 269680 - DNA, 25 bp, Homo sapien
gagaattgctgctagcctccaagag

SEQ ID NO: 269681 - DNA, 25 bp, Homo sapien
tgggacctgagcctaaacacgaaat

SEQ ID NO: 269682 - DNA, 25 bp, Homo sapien
ggtaacaggtacatcgatcatggcc

SEQ ID NO: 269683 - DNA, 25 bp, Homo sapien
gcattaagtgggtgccactcaggga

SEQ ID NO: 269684 - DNA, 25 bp, Homo sapien
catttgtaaaggtgaccagactctt

SEQ ID NO: 269685 - DNA, 25 bp, Homo sapien
catggaccaaaatgggcagcattaa

SEQ ID NO: 269686 - DNA, 25 bp, Homo sapien
tactgttgcaattgttacatggacc

SEQ ID NO: 269687 - DNA, 25 bp, Homo sapien
gaaaagtagcagatttgggcccgct

SEQ ID NO: 269688 - DNA, 25 bp, Homo sapien
gaaatatcgcgtccctgtgctacaa

SEQ ID NO: 269689 - DNA, 25 bp, Homo sapien
gaaaatatatctgctcaaggccact

SEQ ID NO: 269690 - DNA, 25 bp, Homo sapien
cgaaaatctcggtatggcctccata

SEQ ID NO: 269691 - DNA, 25 bp, Homo sapien
caaaagatgtctgaagtgaactagt

SEQ ID NO: 269692 - DNA, 25 bp, Homo sapien
tcagaatggtatcccagacagttgg

SEQ ID NO: 269693 - DNA, 25 bp, Homo sapien
cctccagatgtgtgccttaattaga

SEQ ID NO: 269694 - DNA, 25 bp, Homo sapien
gacagttggaagtcatcatgcagta

SEQ ID NO: 269695 - DNA, 25 bp, Homo sapien
tatttgctcgatactgaattacaga

SEQ ID NO: 269696 - DNA, 25 bp, Homo sapien
gtcattctgtggtaagccttctaca

SEQ ID NO: 269697 - DNA, 25 bp, Homo sapien
gttatctgataaagacagccttcaa

SEQ ID NO: 269698 - DNA, 25 bp, Homo sapien
aatgaaatgcatagtgctgcaagtc

SEQ ID NO: 269699 - DNA, 25 bp, Homo sapien
ccaaaaagtccccacatgctagaat

SEQ ID NO: 269700 - DNA, 25 bp, Homo sapien
catgctagaatttagtttctatgcc

SEQ ID NO: 269701 - DNA, 25 bp, Homo sapien
aagtccccacatgctagaatttagt

SEQ ID NO: 269702 - DNA, 25 bp, Homo sapien
tccccacatgctagaatttagtttc

SEQ ID NO: 269703 - DNA, 25 bp, Homo sapien
gaatgacattctgctacatcccaca

SEQ ID NO: 269704 - DNA, 25 bp, Homo sapien
tacttaaagcagtgtgtcgctggca

SEQ ID NO: 269705 - DNA, 25 bp, Homo sapien
aatgtacgattccacttctatgagg

SEQ ID NO: 269706 - DNA, 25 bp, Homo sapien
aaaactagcagtaggatgcactacc

SEQ ID NO: 269707 - DNA, 25 bp, Homo sapien
caatatgtatctctgaagcaggaac

SEQ ID NO: 269708 - DNA, 25 bp, Homo sapien
tgtgcctttcagaacatgggccttt

SEQ ID NO: 269709 - DNA, 25 bp, Homo sapien
tgtatctctgaagcaggaacttcaa

SEQ ID NO: 269710 - DNA, 25 bp, Homo sapien
tttaagtcatcacattccagccaac

SEQ ID NO: 269711 - DNA, 25 bp, Homo sapien
gatctccatgagttacagctgtgtc

SEQ ID NO: 269712 - DNA, 25 bp, Homo sapien
tcattactgagagcgtgttggtcat

SEQ ID NO: 269713 - DNA, 25 bp, Homo sapien
tacaacttgggatggaaaacttatg

SEQ ID NO: 269714 - DNA, 25 bp, Homo sapien
gatagtttcttcaagtgtcagaggt

SEQ ID NO: 269715 - DNA, 25 bp, Homo sapien
acttagatgttgtggtttgagaatc

SEQ ID NO: 269716 - DNA, 25 bp, Homo sapien
gagcgtccttctcaatttctactga

SEQ ID NO: 269717 - DNA, 25 bp, Homo sapien
agatgtgacacgttctggttttaat

SEQ ID NO: 269718 - DNA, 25 bp, Homo sapien
tcaaattagatacctgagatgtgac

SEQ ID NO: 269719 - DNA, 25 bp, Homo sapien
gagtggcataaaagaagcacccctg

SEQ ID NO: 269720 - DNA, 25 bp, Homo sapien
ctgaaggttgtaaatcagttatagt

SEQ ID NO: 269721 - DNA, 25 bp, Homo sapien
cctttaactgaaggttgtaaatcag

SEQ ID NO: 269722 - DNA, 25 bp, Homo sapien
gaagcacccctgcttattaagcctt

SEQ ID NO: 269723 - DNA, 25 bp, Homo sapien
gctttcttggatacgtggctggcct

SEQ ID NO: 269724 - DNA, 25 bp, Homo sapien
aacgcaggcattatttgtcagagag

SEQ ID NO: 269725 - DNA, 25 bp, Homo sapien
caagtttaatgttctaacgcaggca

SEQ ID NO: 269726 - DNA, 25 bp, Homo sapien
gaggcttacttgcactcttacgagc

SEQ ID NO: 269727 - DNA, 25 bp, Homo sapien
tattcatcgaaatgaggtaggtcta

SEQ ID NO: 269728 - DNA, 25 bp, Homo sapien
gaggtaggtctaatgtgtcatttgc

SEQ ID NO: 269729 - DNA, 25 bp, Homo sapien
aaactcatcgaaaatatcagtcttc

SEQ ID NO: 269730 - DNA, 25 bp, Homo sapien
tctcaaacagatattcatcgaaatg

SEQ ID NO: 269731 - DNA, 25 bp, Homo sapien
tacacaagtaattacacaagtccag

SEQ ID NO: 269732 - DNA, 25 bp, Homo sapien
aaaccttgcattttgttcatggtta

SEQ ID NO: 269733 - DNA, 25 bp, Homo sapien
cctgaacacattgtaagttcttcta

SEQ ID NO: 269734 - DNA, 25 bp, Homo sapien
tgtgtaagaaagattacatgcttca

SEQ ID NO: 269735 - DNA, 25 bp, Homo sapien
aagcgccacgagcaacaggtttcca

SEQ ID NO: 269736 - DNA, 25 bp, Homo sapien
gacctctggacaatctgcctgcgaa

SEQ ID NO: 269737 - DNA, 25 bp, Homo sapien
gatagaagctatcctctccagggcc

SEQ ID NO: 269738 - DNA, 25 bp, Homo sapien
caaacaggcgtaggctcttacagaa

SEQ ID NO: 269739 - DNA, 25 bp, Homo sapien
gtacagcacgtggttcttccctcca

SEQ ID NO: 269740 - DNA, 25 bp, Homo sapien
ggttcttccctccaagcgtgtcgta

SEQ ID NO: 269741 - DNA, 25 bp, Homo sapien
gtccctggttactggtggcgcgccc

SEQ ID NO: 269742 - DNA, 25 bp, Homo sapien
gtattctctccgtgcgacctattcc

SEQ ID NO: 269743 - DNA, 25 bp, Homo sapien
cttgcatggcacaggccccactctg

SEQ ID NO: 269744 - DNA, 25 bp, Homo sapien
ctccttgcatggcacaggccccact

SEQ ID NO: 269745 - DNA, 25 bp, Homo sapien
cctctccttgcatggcacaggcccc

SEQ ID NO: 269746 - DNA, 25 bp, Homo sapien
ctctccttgcatggcacaggcccca

SEQ ID NO: 269747 - DNA, 25 bp, Homo sapien
gcttgtgtctaagctcagctgcctc

SEQ ID NO: 269748 - DNA, 25 bp, Homo sapien
tctgcttgtgtctaagctcagctgc

SEQ ID NO: 269749 - DNA, 25 bp, Homo sapien
ttgtgtctaagctcagctgcctcgc

SEQ ID NO: 269750 - DNA, 25 bp, Homo sapien
tgcttgtgtctaagctcagctgcct

SEQ ID NO: 269751 - DNA, 25 bp, Homo sapien
tgtacagctgcaggagcctccagct

SEQ ID NO: 269752 - DNA, 25 bp, Homo sapien
gctgcaggagcctccagctctgcat

SEQ ID NO: 269753 - DNA, 25 bp, Homo sapien
ctgtacagctgcaggagcctccagc

SEQ ID NO: 269754 - DNA, 25 bp, Homo sapien
acagctgcaggagcctccagctctg

SEQ ID NO: 269755 - DNA, 25 bp, Homo sapien
tattgactgcctcgttgatctcacc

SEQ ID NO: 269756 - DNA, 25 bp, Homo sapien
tgcccatattgactgcctcgttgat

SEQ ID NO: 269757 - DNA, 25 bp, Homo sapien
tcacccattcccaccaagttcaatt

SEQ ID NO: 269758 - DNA, 25 bp, Homo sapien
gactgcctcgttgatctcacccatt

SEQ ID NO: 269759 - DNA, 25 bp, Homo sapien
cctcctccacgggtcaccagctgtc

SEQ ID NO: 269760 - DNA, 25 bp, Homo sapien
atggatgccactctttagtctctga

SEQ ID NO: 269761 - DNA, 25 bp, Homo sapien
aggagatggatgccactctttagtc

SEQ ID NO: 269762 - DNA, 25 bp, Homo sapien
gatggatgccactctttagtctctg

SEQ ID NO: 269763 - DNA, 25 bp, Homo sapien
ccttccacttgggatatatgaactg

SEQ ID NO: 269764 - DNA, 25 bp, Homo sapien
tgttagcttctggtttgcattgatg

SEQ ID NO: 269765 - DNA, 25 bp, Homo sapien
tcatgtaagacaattccacgagaag

SEQ ID NO: 269766 - DNA, 25 bp, Homo sapien
gcattgatgttggtaggtctccaca

SEQ ID NO: 269767 - DNA, 25 bp, Homo sapien
tcctaggatctataatagcaatgcc

SEQ ID NO: 269768 - DNA, 25 bp, Homo sapien
atcccagacagtttttgctcaggcc

SEQ ID NO: 269769 - DNA, 25 bp, Homo sapien
gctcaggcctatcctaggatctata

SEQ ID NO: 269770 - DNA, 25 bp, Homo sapien
tagcaatgcctatgttcgggttctt

SEQ ID NO: 269771 - DNA, 25 bp, Homo sapien
aacacacaacttaaaaattctagca

SEQ ID NO: 269772 - DNA, 25 bp, Homo sapien
catactctttgctttgccccaaatc

SEQ ID NO: 269773 - DNA, 25 bp, Homo sapien
tctgcaagcgcagtcatgtctcttt

SEQ ID NO: 269774 - DNA, 25 bp, Homo sapien
gcagcaaattctcaccactctgcaa

SEQ ID NO: 269775 - DNA, 25 bp, Homo sapien
tgtgtagttttcctgataaaactca

SEQ ID NO: 269776 - DNA, 25 bp, Homo sapien
tcctgcatgccccttgccagattga

SEQ ID NO: 269777 - DNA, 25 bp, Homo sapien
tgtagttttcctgataaaactcaca

SEQ ID NO: 269778 - DNA, 25 bp, Homo sapien
ccttgccagattgagaagcactgat

SEQ ID NO: 269779 - DNA, 25 bp, Homo sapien
gcagggctgcacttaggccctaatg

SEQ ID NO: 269780 - DNA, 25 bp, Homo sapien
tgctgcatgtttagagatgtcacag

SEQ ID NO: 269781 - DNA, 25 bp, Homo sapien
tgtgacggccataatgaaatcctta

SEQ ID NO: 269782 - DNA, 25 bp, Homo sapien
tcacaggatgtgacggccataatga

SEQ ID NO: 269783 - DNA, 25 bp, Homo sapien
gaatgaatcctggacccaagaccat

SEQ ID NO: 269784 - DNA, 25 bp, Homo sapien
atgaatcctggacccaagaccatga

SEQ ID NO: 269785 - DNA, 25 bp, Homo sapien
ccagaatgaatcctggacccaagac

SEQ ID NO: 269786 - DNA, 25 bp, Homo sapien
cagaatgaatcctggacccaagacc

SEQ ID NO: 269787 - DNA, 25 bp, Homo sapien
tgagagcttgcactctttcatcatt

SEQ ID NO: 269788 - DNA, 25 bp, Homo sapien
gaagtgagagcttgcactctttcat

SEQ ID NO: 269789 - DNA, 25 bp, Homo sapien
gggaagtgagagcttgcactctttc

SEQ ID NO: 269790 - DNA, 25 bp, Homo sapien
aaggggaagtgagagcttgcactct

SEQ ID NO: 269791 - DNA, 25 bp, Homo sapien
cttcaggctccccagagaggactgc

SEQ ID NO: 269792 - DNA, 25 bp, Homo sapien
ccagagaggactgctctgcctccag

SEQ ID NO: 269793 - DNA, 25 bp, Homo sapien
cccagagaggactgctctgcctcca

SEQ ID NO: 269794 - DNA, 25 bp, Homo sapien
aggctccccagagaggactgctctg

SEQ ID NO: 269795 - DNA, 25 bp, Homo sapien
acaggacaacattgcctacagtttc

SEQ ID NO: 269796 - DNA, 25 bp, Homo sapien
cattctggaccacgctgatgagggt

SEQ ID NO: 269797 - DNA, 25 bp, Homo sapien
ttctggaccacgctgatgagggtga

SEQ ID NO: 269798 - DNA, 25 bp, Homo sapien
aacaggacaacattgcctacagttt

SEQ ID NO: 269799 - DNA, 25 bp, Homo sapien
agaggtgaggagaacctgtccttga

SEQ ID NO: 269800 - DNA, 25 bp, Homo sapien
gaacctgtccttgaaacagagagct

SEQ ID NO: 269801 - DNA, 25 bp, Homo sapien
gaggagaacctgtccttgaaacaga

SEQ ID NO: 269802 - DNA, 25 bp, Homo sapien
ggtgaggagaacctgtccttgaaac

SEQ ID NO: 269803 - DNA, 25 bp, Homo sapien
gcagagcagggccagttccctggtg

SEQ ID NO: 269804 - DNA, 25 bp, Homo sapien
cagagcagggccagttccctggtgc

SEQ ID NO: 269805 - DNA, 25 bp, Homo sapien
aggagaaagccctgggcagagcagg

SEQ ID NO: 269806 - DNA, 25 bp, Homo sapien
ctagaccatgatggcaaagtccagg

SEQ ID NO: 269807 - DNA, 25 bp, Homo sapien
catgtattccgtcacagagctttgc

SEQ ID NO: 269808 - DNA, 25 bp, Homo sapien
ccactctgtgcaatgggtagtactg

SEQ ID NO: 269809 - DNA, 25 bp, Homo sapien
tgcagccgggacttcaaactctgcg

SEQ ID NO: 269810 - DNA, 25 bp, Homo sapien
tcccactctgtaggtaagaacgctg

SEQ ID NO: 269811 - DNA, 25 bp, Homo sapien
ttcgtgctccactttatgggcaaag

SEQ ID NO: 269812 - DNA, 25 bp, Homo sapien
cgtgctccactttatgggcaaagaa

SEQ ID NO: 269813 - DNA, 25 bp, Homo sapien
ctttcgtgctccactttatgggcaa

SEQ ID NO: 269814 - DNA, 25 bp, Homo sapien
tgctccactttatgggcaaagaatc

SEQ ID NO: 269815 - DNA, 25 bp, Homo sapien
agtgttccggtcctctggaagctcc

SEQ ID NO: 269816 - DNA, 25 bp, Homo sapien
ttggcagtgtagacccgctcaaagg

SEQ ID NO: 269817 - DNA, 25 bp, Homo sapien
cgctcaaaggcaagtgttccggtcc

SEQ ID NO: 269818 - DNA, 25 bp, Homo sapien
gtgtagacccgctcaaaggcaagtg

SEQ ID NO: 269819 - DNA, 25 bp, Homo sapien
tcagacagacatgtggtattaaggg

SEQ ID NO: 269820 - DNA, 25 bp, Homo sapien
ctccctggcgctcagaaacttggct

SEQ ID NO: 269821 - DNA, 25 bp, Homo sapien
taagggtggtcatcactcctagaag

SEQ ID NO: 269822 - DNA, 25 bp, Homo sapien
ttagcaacatcagggttaggactca

SEQ ID NO: 269823 - DNA, 25 bp, Homo sapien
tccgtagtccatagtccccagcatg

SEQ ID NO: 269824 - DNA, 25 bp, Homo sapien
ttttcttgggtgaccatgactcccc

SEQ ID NO: 269825 - DNA, 25 bp, Homo sapien
acaggcccctagtccgtagtccata

SEQ ID NO: 269826 - DNA, 25 bp, Homo sapien
catcaaagttgctcctgggatggaa

SEQ ID NO: 269827 - DNA, 25 bp, Homo sapien
aaccctgcagtgtgaatctttgtcc

SEQ ID NO: 269828 - DNA, 25 bp, Homo sapien
gcagtgtgaatctttgtcctgagtt

SEQ ID NO: 269829 - DNA, 25 bp, Homo sapien
tccctcccatggtgccagcagcaag

SEQ ID NO: 269830 - DNA, 25 bp, Homo sapien
ccagggactccaaccctgcagtgtg

SEQ ID NO: 269831 - DNA, 25 bp, Homo sapien
aaagagggagatctaggtggcccac

SEQ ID NO: 269832 - DNA, 25 bp, Homo sapien
ggagtggagcccagagcacgtggga

SEQ ID NO: 269833 - DNA, 25 bp, Homo sapien
cagagcacgtgggagcatggagaaa

SEQ ID NO: 269834 - DNA, 25 bp, Homo sapien
gactgctggaatagccctggacaga

SEQ ID NO: 269835 - DNA, 25 bp, Homo sapien
cacttacatctacccaataagatgg

SEQ ID NO: 269836 - DNA, 25 bp, Homo sapien
taaatcccattcgtaattccactta

SEQ ID NO: 269837 - DNA, 25 bp, Homo sapien
tccacttacatctacccaataagat

SEQ ID NO: 269838 - DNA, 25 bp, Homo sapien
aataatcaccatcgtgcatgaaaca

SEQ ID NO: 269839 - DNA, 25 bp, Homo sapien
ggggtacgcatctacacagttctgg

SEQ ID NO: 269840 - DNA, 25 bp, Homo sapien
aagtagccccgcagaccagagcaca

SEQ ID NO: 269841 - DNA, 25 bp, Homo sapien
gctgcaaagtagccccgcagaccag

SEQ ID NO: 269842 - DNA, 25 bp, Homo sapien
gaggaaagtggggtacgcatctaca

SEQ ID NO: 269843 - DNA, 25 bp, Homo sapien
caagtccgcattcatctagatcaag

SEQ ID NO: 269844 - DNA, 25 bp, Homo sapien
ttatctagctacagcaagtccgcat

SEQ ID NO: 269845 - DNA, 25 bp, Homo sapien
cgcattcatctagatcaagcatcat

SEQ ID NO: 269846 - DNA, 25 bp, Homo sapien
tagctacagcaagtccgcattcatc

SEQ ID NO: 269847 - DNA, 25 bp, Homo sapien
tctttcaatgggaacccaattgaac

SEQ ID NO: 269848 - DNA, 25 bp, Homo sapien
tgggtggaaaatggccacactcata

SEQ ID NO: 269849 - DNA, 25 bp, Homo sapien
gtggaaaatggccacactcataccc

SEQ ID NO: 269850 - DNA, 25 bp, Homo sapien
ccaattgaacatgagctaacagaga

SEQ ID NO: 269851 - DNA, 25 bp, Homo sapien
ccaattaggcaatcaacattggtca

SEQ ID NO: 269852 - DNA, 25 bp, Homo sapien
agcccaattaggcaatcaacattgg

SEQ ID NO: 269853 - DNA, 25 bp, Homo sapien
taggcaatcaacattggtcacaaaa

SEQ ID NO: 269854 - DNA, 25 bp, Homo sapien
aattaggcaatcaacattggtcaca

SEQ ID NO: 269855 - DNA, 25 bp, Homo sapien
tgtgtcagtttcgtagccaccaaaa

SEQ ID NO: 269856 - DNA, 25 bp, Homo sapien
acacctgtgtcagtttcgtagccac

SEQ ID NO: 269857 - DNA, 25 bp, Homo sapien
cctgtgtcagtttcgtagccaccaa

SEQ ID NO: 269858 - DNA, 25 bp, Homo sapien
gtcagtttcgtagccaccaaaacat

SEQ ID NO: 269859 - DNA, 25 bp, Homo sapien
gacaaagtacttttgcctcacaaac

SEQ ID NO: 269860 - DNA, 25 bp, Homo sapien
tgcgttctctctcctaggtaaccga

SEQ ID NO: 269861 - DNA, 25 bp, Homo sapien
caaacaagtacatcagtccagcaaa

SEQ ID NO: 269862 - DNA, 25 bp, Homo sapien
atcagtccagcaaacgcagcaggaa

SEQ ID NO: 269863 - DNA, 25 bp, Homo sapien
ttgcaatctctaaggaactgacggc

SEQ ID NO: 269864 - DNA, 25 bp, Homo sapien
gaactgacggcatactctaacgccg

SEQ ID NO: 269865 - DNA, 25 bp, Homo sapien
tggcacctgaaaccatactagtgca

SEQ ID NO: 269866 - DNA, 25 bp, Homo sapien
agcagcctcacagaacgtgttcctg

SEQ ID NO: 269867 - DNA, 25 bp, Homo sapien
ggggctggcaggatcttcttcttat

SEQ ID NO: 269868 - DNA, 25 bp, Homo sapien
tatggggctggcaggatcttcttct

SEQ ID NO: 269869 - DNA, 25 bp, Homo sapien
gctggcaggatcttcttcttatcac

SEQ ID NO: 269870 - DNA, 25 bp, Homo sapien
ttatggggctggcaggatcttcttc

SEQ ID NO: 269871 - DNA, 25 bp, Homo sapien
agtccaagtgtgacatagcccagga

SEQ ID NO: 269872 - DNA, 25 bp, Homo sapien
ctgcagagtccaagtgtgacatagc

SEQ ID NO: 269873 - DNA, 25 bp, Homo sapien
tcggttggtgaggtcaagaactaaa

SEQ ID NO: 269874 - DNA, 25 bp, Homo sapien
ctagcaattcctcctcggttggtga

SEQ ID NO: 269875 - DNA, 25 bp, Homo sapien
tgtggcaagtgagcatggtgggcag

SEQ ID NO: 269876 - DNA, 25 bp, Homo sapien
gcagataccgaacctgacccaggct

SEQ ID NO: 269877 - DNA, 25 bp, Homo sapien
tggtgggcagataccgaacctgacc

SEQ ID NO: 269878 - DNA, 25 bp, Homo sapien
tgggcagataccgaacctgacccag

SEQ ID NO: 269879 - DNA, 25 bp, Homo sapien
ctgaagatggcaggttctgttgacc

SEQ ID NO: 269880 - DNA, 25 bp, Homo sapien
ttctgttgaccattgggcatcctca

SEQ ID NO: 269881 - DNA, 25 bp, Homo sapien
caggttctgttgaccattgggcatc

SEQ ID NO: 269882 - DNA, 25 bp, Homo sapien
gatggcaggttctgttgaccattgg

SEQ ID NO: 269883 - DNA, 25 bp, Homo sapien
gtcacttccgaaaaagaagatgagg

SEQ ID NO: 269884 - DNA, 25 bp, Homo sapien
tggtggtggagatcgtctttatgta

SEQ ID NO: 269885 - DNA, 25 bp, Homo sapien
cagcaacggacatgaggaacaggaa

SEQ ID NO: 269886 - DNA, 25 bp, Homo sapien
tgatgcgtttcccaaatatgtagcc

SEQ ID NO: 269887 - DNA, 25 bp, Homo sapien
gcccagatggccaatagatttacag

SEQ ID NO: 269888 - DNA, 25 bp, Homo sapien
ggaaaagcaaggttaactcaagctg

SEQ ID NO: 269889 - DNA, 25 bp, Homo sapien
catcattttgttcccggaaaagcaa

SEQ ID NO: 269890 - DNA, 25 bp, Homo sapien
tgattagatgagaacaccaacccca

SEQ ID NO: 269891 - DNA, 25 bp, Homo sapien
acaaactagtcgtttgtgggtatag

SEQ ID NO: 269892 - DNA, 25 bp, Homo sapien
caaactagtcgtttgtgggtataga

SEQ ID NO: 269893 - DNA, 25 bp, Homo sapien
atattatcatttagtttgaggaaaa

SEQ ID NO: 269894 - DNA, 25 bp, Homo sapien
taatattatcatttagtttgaggaa

SEQ ID NO: 269895 - DNA, 25 bp, Homo sapien
tattactgtccagctcgattgagag

SEQ ID NO: 269896 - DNA, 25 bp, Homo sapien
cgattgagagttcaatcctgatgaa

SEQ ID NO: 269897 - DNA, 25 bp, Homo sapien
gctcccctataagagctggcttctc

SEQ ID NO: 269898 - DNA, 25 bp, Homo sapien
tggaatcttgactacaccccgccat

SEQ ID NO: 269899 - DNA, 25 bp, Homo sapien
tggagccacaagatgggggctggac

SEQ ID NO: 269900 - DNA, 25 bp, Homo sapien
ctggagccacaagatgggggctgga

SEQ ID NO: 269901 - DNA, 25 bp, Homo sapien
ggagccacaagatgggggctggact

SEQ ID NO: 269902 - DNA, 25 bp, Homo sapien
gagccacaagatgggggctggactt

SEQ ID NO: 269903 - DNA, 25 bp, Homo sapien
ggggccagcacctccctccagccca

SEQ ID NO: 269904 - DNA, 25 bp, Homo sapien
cctccctccagcccacccttgaaga

SEQ ID NO: 269905 - DNA, 25 bp, Homo sapien
gggaactgcccaggggccagcacct

SEQ ID NO: 269906 - DNA, 25 bp, Homo sapien
ccctccagcccacccttgaagacac

SEQ ID NO: 269907 - DNA, 25 bp, Homo sapien
cactcacagagcatccttcgctggg

SEQ ID NO: 269908 - DNA, 25 bp, Homo sapien
ttccagacgctgagcttcccaacag

SEQ ID NO: 269909 - DNA, 25 bp, Homo sapien
gaaatatcccagcttgaaagatgtt

SEQ ID NO: 269910 - DNA, 25 bp, Homo sapien
ggcatgctggtaatggaaatatccc

SEQ ID NO: 269911 - DNA, 25 bp, Homo sapien
atgacacggccactgccaggctcca

SEQ ID NO: 269912 - DNA, 25 bp, Homo sapien
cactcatgggacaccctacacatga

SEQ ID NO: 269913 - DNA, 25 bp, Homo sapien
tcatgggacaccctacacatgacac

SEQ ID NO: 269914 - DNA, 25 bp, Homo sapien
atgggacaccctacacatgacacgg

SEQ ID NO: 269915 - DNA, 25 bp, Homo sapien
aatatttaagcacacgtcttgtgta

SEQ ID NO: 269916 - DNA, 25 bp, Homo sapien
gagactctgagcatggtaaatattt

SEQ ID NO: 269917 - DNA, 25 bp, Homo sapien
taactgtcacagatccggatgcacc

SEQ ID NO: 269918 - DNA, 25 bp, Homo sapien
cagatccggatgcaccgggagccat

SEQ ID NO: 269919 - DNA, 25 bp, Homo sapien
tgcctgggactcccaggatatccct

SEQ ID NO: 269920 - DNA, 25 bp, Homo sapien
gctccaggagtggtcccagaagact

SEQ ID NO: 269921 - DNA, 25 bp, Homo sapien
aggagtggtcccagaagactcccct

SEQ ID NO: 269922 - DNA, 25 bp, Homo sapien
gtctgtgggcccctgacacgtgcag

SEQ ID NO: 269923 - DNA, 25 bp, Homo sapien
tcatcttccagagaattccctgaga

SEQ ID NO: 269924 - DNA, 25 bp, Homo sapien
cgtggctgtaagaaacgctgctgca

SEQ ID NO: 269925 - DNA, 25 bp, Homo sapien
tgagcccagcaaagacgcctcttga

SEQ ID NO: 269926 - DNA, 25 bp, Homo sapien
tgacttcggtgtagcctcatcttcc

SEQ ID NO: 269927 - DNA, 25 bp, Homo sapien
tgagagagacatcgcatggcgcaag

SEQ ID NO: 269928 - DNA, 25 bp, Homo sapien
tggcgcaaggttccaagtagggttc

SEQ ID NO: 269929 - DNA, 25 bp, Homo sapien
ctgccgcaaagggactcagtgttgt

SEQ ID NO: 269930 - DNA, 25 bp, Homo sapien
tatttcttgcctacacttgacaccg

SEQ ID NO: 269931 - DNA, 25 bp, Homo sapien
gctggacgcagctgaccccaacaga

SEQ ID NO: 269932 - DNA, 25 bp, Homo sapien
gttgcccgggcaatcctgcaggagc

SEQ ID NO: 269933 - DNA, 25 bp, Homo sapien
gcaaaagcctgttaaattcctaatg

SEQ ID NO: 269934 - DNA, 25 bp, Homo sapien
ttgaaatggtgggaagggtcatcca

SEQ ID NO: 269935 - DNA, 25 bp, Homo sapien
tagtctgacgagctgtgagtggaca

SEQ ID NO: 269936 - DNA, 25 bp, Homo sapien
tggcggaccctcaccaaggtccatc

SEQ ID NO: 269937 - DNA, 25 bp, Homo sapien
gaaagctgaagcttagtctgacgag

SEQ ID NO: 269938 - DNA, 25 bp, Homo sapien
tggacagctgtcagtagccacgctc

SEQ ID NO: 269939 - DNA, 25 bp, Homo sapien
tcaaatgactagaaagagacgcagg

SEQ ID NO: 269940 - DNA, 25 bp, Homo sapien
gtaggttgctctccgctgatgctgg

SEQ ID NO: 269941 - DNA, 25 bp, Homo sapien
ctcagatcccaaagcacaaggtgtg

SEQ ID NO: 269942 - DNA, 25 bp, Homo sapien
gaaggttcctggcagcaacttgctg

SEQ ID NO: 269943 - DNA, 25 bp, Homo sapien
gaaacagcgtgtcttgcgtgacaac

SEQ ID NO: 269944 - DNA, 25 bp, Homo sapien
caaagtgttggactgctgcgagtgc

SEQ ID NO: 269945 - DNA, 25 bp, Homo sapien
tgcgagtgctgctaaggacagagtg

SEQ ID NO: 269946 - DNA, 25 bp, Homo sapien
gctgcggcgtcctgtcagaaacagc

SEQ ID NO: 269947 - DNA, 25 bp, Homo sapien
agcgccgcaggatagtgccctctgc

SEQ ID NO: 269948 - DNA, 25 bp, Homo sapien
gctttcaaaaaagcgccgcaggata

SEQ ID NO: 269949 - DNA, 25 bp, Homo sapien
aaaaaagcgccgcaggatagtgccc

SEQ ID NO: 269950 - DNA, 25 bp, Homo sapien
ccgcaggatagtgccctctgcatct

SEQ ID NO: 269951 - DNA, 25 bp, Homo sapien
gaatcaaatagccaagggactcctc

SEQ ID NO: 269952 - DNA, 25 bp, Homo sapien
tatgcctctcgcctagtgccatgtg

SEQ ID NO: 269953 - DNA, 25 bp, Homo sapien
tcagccaggactgcgcaaacatcat

SEQ ID NO: 269954 - DNA, 25 bp, Homo sapien
cccaatggaaacgtctaagtactga

SEQ ID NO: 269955 - DNA, 25 bp, Homo sapien
tcctagtgcaccagtcacttgtaaa

SEQ ID NO: 269956 - DNA, 25 bp, Homo sapien
cacttgtaaatgtcggtggtctata

SEQ ID NO: 269957 - DNA, 25 bp, Homo sapien
gtggtctatagcgtgttgcaccaga

SEQ ID NO: 269958 - DNA, 25 bp, Homo sapien
gcaagcattcagaatttcctagtgc

SEQ ID NO: 269959 - DNA, 25 bp, Homo sapien
tgggtgtggccaatgagggaaggaa

SEQ ID NO: 269960 - DNA, 25 bp, Homo sapien
ctgctcttctcaagatggtctcctc

SEQ ID NO: 269961 - DNA, 25 bp, Homo sapien
ttcagactttgtcctgagtcactcc

SEQ ID NO: 269962 - DNA, 25 bp, Homo sapien
tgagtcacctgagaggtcactgctc

SEQ ID NO: 269963 - DNA, 25 bp, Homo sapien
agggggcacacaggggagctccaga

SEQ ID NO: 269964 - DNA, 25 bp, Homo sapien
gagaggacatgctgtgccacgtggg

SEQ ID NO: 269965 - DNA, 25 bp, Homo sapien
agaggagaggacatgctgtgccacg

SEQ ID NO: 269966 - DNA, 25 bp, Homo sapien
caagaggagaggacatgctgtgcca

SEQ ID NO: 269967 - DNA, 25 bp, Homo sapien
gcccaggaccaaactgtgaagtaca

SEQ ID NO: 269968 - DNA, 25 bp, Homo sapien
aaatcttcccaaggatcgtggcata

SEQ ID NO: 269969 - DNA, 25 bp, Homo sapien
aaatagttcccaacatcccaccagg

SEQ ID NO: 269970 - DNA, 25 bp, Homo sapien
aatgcatcaacattgacgtcatggc

SEQ ID NO: 269971 - DNA, 25 bp, Homo sapien
gaaaccatcaaaccctaaatgctgg

SEQ ID NO: 269972 - DNA, 25 bp, Homo sapien
tcagattagattggagaagccggga

SEQ ID NO: 269973 - DNA, 25 bp, Homo sapien
ggattcttaacgtttcaaccagcag

SEQ ID NO: 269974 - DNA, 25 bp, Homo sapien
tattaacgactgaggcaagacgggc

SEQ ID NO: 269975 - DNA, 25 bp, Homo sapien
cagaaaagaggaacttgttaggaag

SEQ ID NO: 269976 - DNA, 25 bp, Homo sapien
gattcgctggcgaagcctttgaaat

SEQ ID NO: 269977 - DNA, 25 bp, Homo sapien
tcagccccagtctctattgaaaaaa

SEQ ID NO: 269978 - DNA, 25 bp, Homo sapien
tgaaggttccaggaatgactcacgg

SEQ ID NO: 269979 - DNA, 25 bp, Homo sapien
cctaagctgccattgaaatctattt

SEQ ID NO: 269980 - DNA, 25 bp, Homo sapien
ccttcctaagctgccattgaaatct

SEQ ID NO: 269981 - DNA, 25 bp, Homo sapien
caacctcttccccactgcggcccct

SEQ ID NO: 269982 - DNA, 25 bp, Homo sapien
tttgccagagcaaaaaatgggggaa

SEQ ID NO: 269983 - DNA, 25 bp, Homo sapien
aacagagagtggtctgtaatttcct

SEQ ID NO: 269984 - DNA, 25 bp, Homo sapien
agtagaaacagagagtggtctgtaa

SEQ ID NO: 269985 - DNA, 25 bp, Homo sapien
ttctggaaggaatatccactccata

SEQ ID NO: 269986 - DNA, 25 bp, Homo sapien
atatccactccatatggcctgaagc

SEQ ID NO: 269987 - DNA, 25 bp, Homo sapien
tgcagacggctgactggtgacgact

SEQ ID NO: 269988 - DNA, 25 bp, Homo sapien
gaggttcaggacacatatctgcagc

SEQ ID NO: 269989 - DNA, 25 bp, Homo sapien
tgacgactgaacaagacggaaaggc

SEQ ID NO: 269990 - DNA, 25 bp, Homo sapien
tatgcccgaagcctttgaagggagc

SEQ ID NO: 269991 - DNA, 25 bp, Homo sapien
gagccaagtgaatcaggggagtttc

SEQ ID NO: 269992 - DNA, 25 bp, Homo sapien
tgatgggcacagtctgtcttctctg

SEQ ID NO: 269993 - DNA, 25 bp, Homo sapien
gccaagtgaatcaggggagtttcct

SEQ ID NO: 269994 - DNA, 25 bp, Homo sapien
ggagtttcctttatggtccctgatg

SEQ ID NO: 269995 - DNA, 25 bp, Homo sapien
tcaagtatgtgaactaaagcttccc

SEQ ID NO: 269996 - DNA, 25 bp, Homo sapien
tcagaaacgtgagacatttggaaca

SEQ ID NO: 269997 - DNA, 25 bp, Homo sapien
acaagagagcaatgtcccaccctca

SEQ ID NO: 269998 - DNA, 25 bp, Homo sapien
gacaactgatgggactcaacttcaa

SEQ ID NO: 269999 - DNA, 25 bp, Homo sapien
agtgtgctgtcacttggcggccttt

SEQ ID NO: 270000 - DNA, 25 bp, Homo sapien
ggcctttgccggagtggccagaggg

SEQ ID NO: 270001 - DNA, 25 bp, Homo sapien
tcacttggcggcctttgccggagtg

SEQ ID NO: 270002 - DNA, 25 bp, Homo sapien
gggcgctggcgagagctaacagcct

SEQ ID NO: 270003 - DNA, 25 bp, Homo sapien
cagacctgagttaagatcccagcac

SEQ ID NO: 270004 - DNA, 25 bp, Homo sapien
gcacttccacttcggaggtctgtga

SEQ ID NO: 270005 - DNA, 25 bp, Homo sapien
ggtcaggcacacacttcgaacttgg

SEQ ID NO: 270006 - DNA, 25 bp, Homo sapien
ggtcttagacccgaactgcatggtc

SEQ ID NO: 270007 - DNA, 25 bp, Homo sapien
taaagattcacaccctaaaatgggc

SEQ ID NO: 270008 - DNA, 25 bp, Homo sapien
cggtgtctacagataagattggctt

SEQ ID NO: 270009 - DNA, 25 bp, Homo sapien
gatggctcttagtaacggtgtctac

SEQ ID NO: 270010 - DNA, 25 bp, Homo sapien
taaaatgggcagattcggaaagtca

SEQ ID NO: 270011 - DNA, 25 bp, Homo sapien
acgcggtggccgctcaggtgccagt

SEQ ID NO: 270012 - DNA, 25 bp, Homo sapien
tcaggtgccagtctgaccgcccggg

SEQ ID NO: 270013 - DNA, 25 bp, Homo sapien
gccctgcaggcaccgcgcggagaaa

SEQ ID NO: 270014 - DNA, 25 bp, Homo sapien
cttttatccgccctctggacgcccg

SEQ ID NO: 270015 - DNA, 25 bp, Homo sapien
cggcacctgatggtccccaggaggg

SEQ ID NO: 270016 - DNA, 25 bp, Homo sapien
tcagccgcgcgcgaggtgaggaggg

SEQ ID NO: 270017 - DNA, 25 bp, Homo sapien
ccgcgtcgtcggtcctcacaccgcc

SEQ ID NO: 270018 - DNA, 25 bp, Homo sapien
gcctgcttccgtccggtgcctacag

SEQ ID NO: 270019 - DNA, 25 bp, Homo sapien
agggccagctcgcagtcgcaggtcc

SEQ ID NO: 270020 - DNA, 25 bp, Homo sapien
tgcgaagctccccagacgagatgga

SEQ ID NO: 270021 - DNA, 25 bp, Homo sapien
agctcgcagtcgcaggtccacaggc

SEQ ID NO: 270022 - DNA, 25 bp, Homo sapien
atggaggtcaggctcggcctggcca

SEQ ID NO: 270023 - DNA, 25 bp, Homo sapien
tggtcgccgctcagctggaaggcac

SEQ ID NO: 270024 - DNA, 25 bp, Homo sapien
acgagctggtcgccgctcagctgga

SEQ ID NO: 270025 - DNA, 25 bp, Homo sapien
agctggtcgccgctcagctggaagg

SEQ ID NO: 270026 - DNA, 25 bp, Homo sapien
cacgagctggtcgccgctcagctgg

SEQ ID NO: 270027 - DNA, 25 bp, Homo sapien
tagagctgcccgtcgaggcgcacga

SEQ ID NO: 270028 - DNA, 25 bp, Homo sapien
gccgtcaccgaagacgttgaagccc

SEQ ID NO: 270029 - DNA, 25 bp, Homo sapien
gatgtagctgctgaggcggtagagc

SEQ ID NO: 270030 - DNA, 25 bp, Homo sapien
gcgcacgaggccgtcaccgaagacg

SEQ ID NO: 270031 - DNA, 25 bp, Homo sapien
tacttttgaaacacgaagtgaggcc

SEQ ID NO: 270032 - DNA, 25 bp, Homo sapien
tctccactcggtctcctcactggag

SEQ ID NO: 270033 - DNA, 25 bp, Homo sapien
ttacttttgaaacacgaagtgaggc

SEQ ID NO: 270034 - DNA, 25 bp, Homo sapien
aactttgagcttttgcatgcttctc

SEQ ID NO: 270035 - DNA, 25 bp, Homo sapien
tggccacaacagtcaagcatcctgg

SEQ ID NO: 270036 - DNA, 25 bp, Homo sapien
aaagcctgcttcagatggctgggcc

SEQ ID NO: 270037 - DNA, 25 bp, Homo sapien
cattaaggccctcaggtttcgcact

SEQ ID NO: 270038 - DNA, 25 bp, Homo sapien
tatttccccagaacttatctgtgcc

SEQ ID NO: 270039 - DNA, 25 bp, Homo sapien
catgtggaatcaggcctgaagtgcc

SEQ ID NO: 270040 - DNA, 25 bp, Homo sapien
agccctgagatctttggaagcatgc

SEQ ID NO: 270041 - DNA, 25 bp, Homo sapien
tgagttctggcttcggcatacctcc

SEQ ID NO: 270042 - DNA, 25 bp, Homo sapien
tggcagctcagaggaacgaagcttt

SEQ ID NO: 270043 - DNA, 25 bp, Homo sapien
ttcttgtgctggaggggctcagagt

SEQ ID NO: 270044 - DNA, 25 bp, Homo sapien
ccttcttgtgctggaggggctcaga

SEQ ID NO: 270045 - DNA, 25 bp, Homo sapien
tgccttcttgtgctggaggggctca

SEQ ID NO: 270046 - DNA, 25 bp, Homo sapien
atgtgtctcattgccttcttgtgct

SEQ ID NO: 270047 - DNA, 25 bp, Homo sapien
aatcacagtagttggtcagttccac

SEQ ID NO: 270048 - DNA, 25 bp, Homo sapien
tttttggtctgtacattaataaaga

SEQ ID NO: 270049 - DNA, 25 bp, Homo sapien
gaacaacattggtttgctcaatata

SEQ ID NO: 270050 - DNA, 25 bp, Homo sapien
gtctttataatcacagtagttggtc

SEQ ID NO: 270051 - DNA, 25 bp, Homo sapien
aatgtcagatcacttcccacctagg

SEQ ID NO: 270052 - DNA, 25 bp, Homo sapien
aattacgcatcctagtttgcccggg

SEQ ID NO: 270053 - DNA, 25 bp, Homo sapien
taacgtcctgaattgataagcccta

SEQ ID NO: 270054 - DNA, 25 bp, Homo sapien
tagtcatttctgcaacctccaaagg

SEQ ID NO: 270055 - DNA, 25 bp, Homo sapien
gatatctcagagacaaaccttcggt

SEQ ID NO: 270056 - DNA, 25 bp, Homo sapien
agtgtttacgtcctcgaggaaggca

SEQ ID NO: 270057 - DNA, 25 bp, Homo sapien
ctaaccttattcatctcgtttttct

SEQ ID NO: 270058 - DNA, 25 bp, Homo sapien
gagacaaaccttcggtccaccaaca

SEQ ID NO: 270059 - DNA, 25 bp, Homo sapien
gttctcctccatttaacagccaggg

SEQ ID NO: 270060 - DNA, 25 bp, Homo sapien
tctcctccatttaacagccagggac

SEQ ID NO: 270061 - DNA, 25 bp, Homo sapien
tgtgttctcctccatttaacagcca

SEQ ID NO: 270062 - DNA, 25 bp, Homo sapien
tgttctcctccatttaacagccagg

SEQ ID NO: 270063 - DNA, 25 bp, Homo sapien
cttgctgggtattcaaatcacaact

SEQ ID NO: 270064 - DNA, 25 bp, Homo sapien
tgaacttgcgcaatctgccagccac

SEQ ID NO: 270065 - DNA, 25 bp, Homo sapien
tcacaacttggctcttacagaaact

SEQ ID NO: 270066 - DNA, 25 bp, Homo sapien
actcctgaacttgcgcaatctgcca

SEQ ID NO: 270067 - DNA, 25 bp, Homo sapien
ctcgtgtttacaagaaacgcgtacg

SEQ ID NO: 270068 - DNA, 25 bp, Homo sapien
tcactgaggagatgaccatgtccat

SEQ ID NO: 270069 - DNA, 25 bp, Homo sapien
gatgaccatgtccatcccttgctct

SEQ ID NO: 270070 - DNA, 25 bp, Homo sapien
atcttggggtgcctcgtgtttacaa

SEQ ID NO: 270071 - DNA, 25 bp, Homo sapien
gaaagagagaggaacattgcattga

SEQ ID NO: 270072 - DNA, 25 bp, Homo sapien
tgaaagagagaggaacattgcattg

SEQ ID NO: 270073 - DNA, 25 bp, Homo sapien
ctgaaagagagaggaacattgcatt

SEQ ID NO: 270074 - DNA, 25 bp, Homo sapien
gggggaagaaattcttcactgcctc

SEQ ID NO: 270075 - DNA, 25 bp, Homo sapien
tcttcactgcctcttgaaaatcaaa

SEQ ID NO: 270076 - DNA, 25 bp, Homo sapien
agaaattcttcactgcctcttgaaa

SEQ ID NO: 270077 - DNA, 25 bp, Homo sapien
ctggggggaagaaattcttcactgc

SEQ ID NO: 270078 - DNA, 25 bp, Homo sapien
gaattcatatgcaaagcttaaattt

SEQ ID NO: 270079 - DNA, 25 bp, Homo sapien
ttacaacggaattactgagcccaaa

SEQ ID NO: 270080 - DNA, 25 bp, Homo sapien
taatgcatcagctttgaattcatat

SEQ ID NO: 270081 - DNA, 25 bp, Homo sapien
aatcaaataatgcatcagctttgaa

SEQ ID NO: 270082 - DNA, 25 bp, Homo sapien
tacactgaactttcggtcagagaaa

SEQ ID NO: 270083 - DNA, 25 bp, Homo sapien
ggattaaaggctcactcattttttc

SEQ ID NO: 270084 - DNA, 25 bp, Homo sapien
ttccagaaataacttaatcgtctcc

SEQ ID NO: 270085 - DNA, 25 bp, Homo sapien
tgctccttcggattaaaggctcact

SEQ ID NO: 270086 - DNA, 25 bp, Homo sapien
catatccttcggaatttttaacata

SEQ ID NO: 270087 - DNA, 25 bp, Homo sapien
cttccacatatccttcggaattttt

SEQ ID NO: 270088 - DNA, 25 bp, Homo sapien
cacatatccttcggaatttttaaca

SEQ ID NO: 270089 - DNA, 25 bp, Homo sapien
tccacatatccttcggaatttttaa

SEQ ID NO: 270090 - DNA, 25 bp, Homo sapien
cataatgtaatcctcatgtcagaag

SEQ ID NO: 270091 - DNA, 25 bp, Homo sapien
gaatcaattgactctcttccattat

SEQ ID NO: 270092 - DNA, 25 bp, Homo sapien
tgttgtacagaatatgaacatttgg

SEQ ID NO: 270093 - DNA, 25 bp, Homo sapien
gcagcagtcttccaatatgattgcc

SEQ ID NO: 270094 - DNA, 25 bp, Homo sapien
ccacgtgacaagcaggaggtgcatc

SEQ ID NO: 270095 - DNA, 25 bp, Homo sapien
ggtgccaggtttggaccacgtgaca

SEQ ID NO: 270096 - DNA, 25 bp, Homo sapien
tctgaagttgaagtggccccagagc

SEQ ID NO: 270097 - DNA, 25 bp, Homo sapien
gccatggtgaaaccggaaaatcctg

SEQ ID NO: 270098 - DNA, 25 bp, Homo sapien
tgggtgacagattgcagttaaaaac

SEQ ID NO: 270099 - DNA, 25 bp, Homo sapien
tgatctgggtgacagattgcagtta

SEQ ID NO: 270100 - DNA, 25 bp, Homo sapien
aaatggtaattctgccaaaagaggc

SEQ ID NO: 270101 - DNA, 25 bp, Homo sapien
taaattggttgggtgtctcttcaga

SEQ ID NO: 270102 - DNA, 25 bp, Homo sapien
tgttttcaataaggaggacgctgcc

SEQ ID NO: 270103 - DNA, 25 bp, Homo sapien
tgaagcatgctaggtcaacagccag

SEQ ID NO: 270104 - DNA, 25 bp, Homo sapien
gaaaaacatatttgcctcccagtga

SEQ ID NO: 270105 - DNA, 25 bp, Homo sapien
aaggctgccacaaaaactcccaggg

SEQ ID NO: 270106 - DNA, 25 bp, Homo sapien
gcctcagtcataaatttaatcaatt

SEQ ID NO: 270107 - DNA, 25 bp, Homo sapien
gagaaagtggctatgaaaacccaca

SEQ ID NO: 270108 - DNA, 25 bp, Homo sapien
ttctgttattaagtagcattcccct

SEQ ID NO: 270109 - DNA, 25 bp, Homo sapien
caaaaggcgcttcttgagaaagtgg

SEQ ID NO: 270110 - DNA, 25 bp, Homo sapien
taagttacaaggcaaatacaacacc

SEQ ID NO: 270111 - DNA, 25 bp, Homo sapien
gatatccacctaaggtttgtttgca

SEQ ID NO: 270112 - DNA, 25 bp, Homo sapien
cctaaggtttgtttgcactggtgta

SEQ ID NO: 270113 - DNA, 25 bp, Homo sapien
tcatatttgatatccacctaaggtt

SEQ ID NO: 270114 - DNA, 25 bp, Homo sapien
ttgtttgcactggtgtaaaacttag

SEQ ID NO: 270115 - DNA, 25 bp, Homo sapien
ctggtaatttgacatactaggtggt

SEQ ID NO: 270116 - DNA, 25 bp, Homo sapien
gtggttagtaactactgactgtctc

SEQ ID NO: 270117 - DNA, 25 bp, Homo sapien
tattacccacttgggtgaaaagaga

SEQ ID NO: 270118 - DNA, 25 bp, Homo sapien
caacacagttattacccacttgggt

SEQ ID NO: 270119 - DNA, 25 bp, Homo sapien
aggccacgttcctggcaccaaccat

SEQ ID NO: 270120 - DNA, 25 bp, Homo sapien
caggccacgttcctggcaccaacca

SEQ ID NO: 270121 - DNA, 25 bp, Homo sapien
gtgagctttccggaccactgtcttg

SEQ ID NO: 270122 - DNA, 25 bp, Homo sapien
tgagctttccggaccactgtcttgt

SEQ ID NO: 270123 - DNA, 25 bp, Homo sapien
gagctttccggaccactgtcttgta

SEQ ID NO: 270124 - DNA, 25 bp, Homo sapien
cagtgagctttccggaccactgtct

SEQ ID NO: 270125 - DNA, 25 bp, Homo sapien
aggcggccgcggggccctggctcca

SEQ ID NO: 270126 - DNA, 25 bp, Homo sapien
ggcggccgcggggccctggctccag

SEQ ID NO: 270127 - DNA, 25 bp, Homo sapien
ggccgcggggccctggctccagcta

SEQ ID NO: 270128 - DNA, 25 bp, Homo sapien
tctgccccaggaggcggccgcgggg

SEQ ID NO: 270129 - DNA, 25 bp, Homo sapien
agagagagggatccggagccctggg

SEQ ID NO: 270130 - DNA, 25 bp, Homo sapien
ggtggcagagagagggatccggagc

SEQ ID NO: 270131 - DNA, 25 bp, Homo sapien
ggcagagagagggatccggagccct

SEQ ID NO: 270132 - DNA, 25 bp, Homo sapien
ggaggttgtggtggcagagagaggg

SEQ ID NO: 270133 - DNA, 25 bp, Homo sapien
tgtcccctcttagccaggcacttcc

SEQ ID NO: 270134 - DNA, 25 bp, Homo sapien
gatcgggactcaggcaggacctgtt

SEQ ID NO: 270135 - DNA, 25 bp, Homo sapien
tgctgtttccaagatcctatatggg

SEQ ID NO: 270136 - DNA, 25 bp, Homo sapien
gccaggcacttcctcgagtgtttaa

SEQ ID NO: 270137 - DNA, 25 bp, Homo sapien
tggtagcataggaatcccagttggg

SEQ ID NO: 270138 - DNA, 25 bp, Homo sapien
tgcagtcctcatagtggtagcatag

SEQ ID NO: 270139 - DNA, 25 bp, Homo sapien
gcaggcactgctcctgttttaggcg

SEQ ID NO: 270140 - DNA, 25 bp, Homo sapien
cctgttttaggcgtgaatgcagtcc

SEQ ID NO: 270141 - DNA, 25 bp, Homo sapien
gattgagaataggatcactaagtga

SEQ ID NO: 270142 - DNA, 25 bp, Homo sapien
tgtgtctgattgagaataggatcac

SEQ ID NO: 270143 - DNA, 25 bp, Homo sapien
cactaagtgaatatgtatatcctaa

SEQ ID NO: 270144 - DNA, 25 bp, Homo sapien
gtactcatcactatattgtgtctga

SEQ ID NO: 270145 - DNA, 25 bp, Homo sapien
gaagtctcagttttgatcaaatctt

SEQ ID NO: 270146 - DNA, 25 bp, Homo sapien
gagatttgtggctcttgattcctct

SEQ ID NO: 270147 - DNA, 25 bp, Homo sapien
gagatgagatttgtggctcttgatt

SEQ ID NO: 270148 - DNA, 25 bp, Homo sapien
tgatcaaatcttctttagagtgtga

SEQ ID NO: 270149 - DNA, 25 bp, Homo sapien
agattgaaaacttcaaagagttgtg

SEQ ID NO: 270150 - DNA, 25 bp, Homo sapien
gagattgaaaacttcaaagagttgt

SEQ ID NO: 270151 - DNA, 25 bp, Homo sapien
acccagtcgaaacgcgggctctgta

SEQ ID NO: 270152 - DNA, 25 bp, Homo sapien
tggatgctgggagcccgtcaacagg

SEQ ID NO: 270153 - DNA, 25 bp, Homo sapien
gaatcctttacaaccagctgccact

SEQ ID NO: 270154 - DNA, 25 bp, Homo sapien
aacaggagacattggttgacccagt

SEQ ID NO: 270155 - DNA, 25 bp, Homo sapien
actgatttgatagtgccttgttaac

SEQ ID NO: 270156 - DNA, 25 bp, Homo sapien
cattgaagccgggattttccaaggg

SEQ ID NO: 270157 - DNA, 25 bp, Homo sapien
ccacaaagtctctcttagtaaggga

SEQ ID NO: 270158 - DNA, 25 bp, Homo sapien
agtgtccccgtttgttgacagtgag

SEQ ID NO: 270159 - DNA, 25 bp, Homo sapien
atttggtaattccttcggaattcag

SEQ ID NO: 270160 - DNA, 25 bp, Homo sapien
tggtaattccttcggaattcagtgt

SEQ ID NO: 270161 - DNA, 25 bp, Homo sapien
ttggtaattccttcggaattcagtg

SEQ ID NO: 270162 - DNA, 25 bp, Homo sapien
cttgagtagcatccatatttgaaac

SEQ ID NO: 270163 - DNA, 25 bp, Homo sapien
ttgagtagcatccatatttgaaact

SEQ ID NO: 270164 - DNA, 25 bp, Homo sapien
tgggatggcacagtaagggacttcc

SEQ ID NO: 270165 - DNA, 25 bp, Homo sapien
acatctcctgtgcacatttgggatg

SEQ ID NO: 270166 - DNA, 25 bp, Homo sapien
ggacttccttccagggacctaggca

SEQ ID NO: 270167 - DNA, 25 bp, Homo sapien
tagaagaacgatggtgtttacagtc

SEQ ID NO: 270168 - DNA, 25 bp, Homo sapien
tactctttgacttgagaggaagtaa

SEQ ID NO: 270169 - DNA, 25 bp, Homo sapien
tttgtcgtagtcactttggtatgtg

SEQ ID NO: 270170 - DNA, 25 bp, Homo sapien
aaagcattaagaaatctgggtaggt

SEQ ID NO: 270171 - DNA, 25 bp, Homo sapien
gactctgaaggtactctttgacttg

SEQ ID NO: 270172 - DNA, 25 bp, Homo sapien
gactgacctgttgcccctaagatgc

SEQ ID NO: 270173 - DNA, 25 bp, Homo sapien
ccctcacgtaggatgctgagaggca

SEQ ID NO: 270174 - DNA, 25 bp, Homo sapien
caagcgctcttattctctgagttca

SEQ ID NO: 270175 - DNA, 25 bp, Homo sapien
gtcacttggctgcaaactaggataa

SEQ ID NO: 270176 - DNA, 25 bp, Homo sapien
agccttaggagcctcttggttttct

SEQ ID NO: 270177 - DNA, 25 bp, Homo sapien
ttctgaagtgccagactggcccaga

SEQ ID NO: 270178 - DNA, 25 bp, Homo sapien
agcagagccttaggagcctcttggt

SEQ ID NO: 270179 - DNA, 25 bp, Homo sapien
agagccttaggagcctcttggtttt

SEQ ID NO: 270180 - DNA, 25 bp, Homo sapien
tgccagagcactttgaggagtccct

SEQ ID NO: 270181 - DNA, 25 bp, Homo sapien
ggttggattgcacctgacacacagt

SEQ ID NO: 270182 - DNA, 25 bp, Homo sapien
cacagtaagagacagcggtgcctgc

SEQ ID NO: 270183 - DNA, 25 bp, Homo sapien
agaatgtagatctgaggctgccaga

SEQ ID NO: 270184 - DNA, 25 bp, Homo sapien
tgttagctaacaggtctacctcacc

SEQ ID NO: 270185 - DNA, 25 bp, Homo sapien
ttagctaacaggtctacctcacctg

SEQ ID NO: 270186 - DNA, 25 bp, Homo sapien
tagctaacaggtctacctcacctgt

SEQ ID NO: 270187 - DNA, 25 bp, Homo sapien
cttgttagctaacaggtctacctca

SEQ ID NO: 270188 - DNA, 25 bp, Homo sapien
gcattgatgagtgggccattctaca

SEQ ID NO: 270189 - DNA, 25 bp, Homo sapien
gctggcattgatgagtgggccattc

SEQ ID NO: 270190 - DNA, 25 bp, Homo sapien
tgagtgggccattctacagcagagc

SEQ ID NO: 270191 - DNA, 25 bp, Homo sapien
attctacagcagagcttggaaagag

SEQ ID NO: 270192 - DNA, 25 bp, Homo sapien
tacgaataaagcgatcaataatttg

SEQ ID NO: 270193 - DNA, 25 bp, Homo sapien
tagtgtcacagtgagtacgaataaa

SEQ ID NO: 270194 - DNA, 25 bp, Homo sapien
gaataaagcgatcaataatttgtct

SEQ ID NO: 270195 - DNA, 25 bp, Homo sapien
cagtgagtacgaataaagcgatcaa

SEQ ID NO: 270196 - DNA, 25 bp, Homo sapien
gactatcacatcatacttgaagcta

SEQ ID NO: 270197 - DNA, 25 bp, Homo sapien
taaagcggagcaaaagacacaaatt

SEQ ID NO: 270198 - DNA, 25 bp, Homo sapien
aaatgactaggaatgtcctcgtgct

SEQ ID NO: 270199 - DNA, 25 bp, Homo sapien
gacacaaattcatgactatcacatc

SEQ ID NO: 270200 - DNA, 25 bp, Homo sapien
cacataattcctagttcacaggaga

SEQ ID NO: 270201 - DNA, 25 bp, Homo sapien
aaactattggatacagctaaagcta

SEQ ID NO: 270202 - DNA, 25 bp, Homo sapien
tttctcatattcacgtaacacacaa

SEQ ID NO: 270203 - DNA, 25 bp, Homo sapien
catatacttgattaatggcattaaa

SEQ ID NO: 270204 - DNA, 25 bp, Homo sapien
ctcactgtgcactgtgtcatcaaac

SEQ ID NO: 270205 - DNA, 25 bp, Homo sapien
cactgtgcactgtgtcatcaaacat

SEQ ID NO: 270206 - DNA, 25 bp, Homo sapien
gttgggtcctcactgtgcactgtgt

SEQ ID NO: 270207 - DNA, 25 bp, Homo sapien
ggtcctcactgtgcactgtgtcatc

SEQ ID NO: 270208 - DNA, 25 bp, Homo sapien
gcagaatgtgcttacaaggctggga

SEQ ID NO: 270209 - DNA, 25 bp, Homo sapien
gagctggcatgccctggttgcccat

SEQ ID NO: 270210 - DNA, 25 bp, Homo sapien
gagacatcggcctgcttcagatcag

SEQ ID NO: 270211 - DNA, 25 bp, Homo sapien
tcggcctgcttcagatcaggagctg

SEQ ID NO: 270212 - DNA, 25 bp, Homo sapien
cacagggatgcatttgtgtggcggt

SEQ ID NO: 270213 - DNA, 25 bp, Homo sapien
gatgcatttgtgtggcggtcagatc

SEQ ID NO: 270214 - DNA, 25 bp, Homo sapien
gcggtcagatcagagccaacactaa

SEQ ID NO: 270215 - DNA, 25 bp, Homo sapien
tgtgtggcggtcagatcagagccaa

SEQ ID NO: 270216 - DNA, 25 bp, Homo sapien
tgcttttctctttattttctacagt

SEQ ID NO: 270217 - DNA, 25 bp, Homo sapien
gattcctatcttcttctctttgctt

SEQ ID NO: 270218 - DNA, 25 bp, Homo sapien
gcttttctctttattttctacagtg

SEQ ID NO: 270219 - DNA, 25 bp, Homo sapien
tttctctttattttctacagtgagc

SEQ ID NO: 270220 - DNA, 25 bp, Homo sapien
tgtctttctggtggaatgtccacac

SEQ ID NO: 270221 - DNA, 25 bp, Homo sapien
gcttgagtcaactccaggggattct

SEQ ID NO: 270222 - DNA, 25 bp, Homo sapien
caaaatagaaggaactaattgtctt

SEQ ID NO: 270223 - DNA, 25 bp, Homo sapien
ttttggcttgagtcaactccagggg

SEQ ID NO: 270224 - DNA, 25 bp, Homo sapien
tcaggatcgccgctgtgttcagtat

SEQ ID NO: 270225 - DNA, 25 bp, Homo sapien
tgttcagtatgctgcacagacccca

SEQ ID NO: 270226 - DNA, 25 bp, Homo sapien
gacactggcccatcagggtctcggt

SEQ ID NO: 270227 - DNA, 25 bp, Homo sapien
tgggctagaagcatcacgggtccct

SEQ ID NO: 270228 - DNA, 25 bp, Homo sapien
cattaaggtgttcagccttgtcgaa

SEQ ID NO: 270229 - DNA, 25 bp, Homo sapien
agacacgctgcccactgatgtgccg

SEQ ID NO: 270230 - DNA, 25 bp, Homo sapien
gcacagcttggcattaaggtgttca

SEQ ID NO: 270231 - DNA, 25 bp, Homo sapien
cagccttgtcgaaatacaaaaacgt

SEQ ID NO: 270232 - DNA, 25 bp, Homo sapien
gaatattttttcgtcttagcttcaa

SEQ ID NO: 270233 - DNA, 25 bp, Homo sapien
aatttttttactgcgatggattgcc

SEQ ID NO: 270234 - DNA, 25 bp, Homo sapien
ttttatgtggaattggccttttgcc

SEQ ID NO: 270235 - DNA, 25 bp, Homo sapien
ggattgcctgtccactaactagcat

SEQ ID NO: 270236 - DNA, 25 bp, Homo sapien
ctggccaattcctacctgaaagggt

SEQ ID NO: 270237 - DNA, 25 bp, Homo sapien
caattcctacctgaaagggtgcatt

SEQ ID NO: 270238 - DNA, 25 bp, Homo sapien
tcctacctgaaagggtgcatttaag

SEQ ID NO: 270239 - DNA, 25 bp, Homo sapien
gccaattcctacctgaaagggtgca

SEQ ID NO: 270240 - DNA, 25 bp, Homo sapien
tttattctgtgacctcatactctgt

SEQ ID NO: 270241 - DNA, 25 bp, Homo sapien
tctgtgacctcatactctgtttcat

SEQ ID NO: 270242 - DNA, 25 bp, Homo sapien
ctctgaggttccatacaggatggca

SEQ ID NO: 270243 - DNA, 25 bp, Homo sapien
ggccatgcggtgttgtaagctgcat

SEQ ID NO: 270244 - DNA, 25 bp, Homo sapien
gaggagcacgtgcttctgcatgcaa

SEQ ID NO: 270245 - DNA, 25 bp, Homo sapien
catcagatgggctcttgttggccct

SEQ ID NO: 270246 - DNA, 25 bp, Homo sapien
tccagtggagacatgtcacattcct

SEQ ID NO: 270247 - DNA, 25 bp, Homo sapien
tgtgcaaccaagttcagcaccagtt

SEQ ID NO: 270248 - DNA, 25 bp, Homo sapien
cttctaagtcatgctccagtggaga

SEQ ID NO: 270249 - DNA, 25 bp, Homo sapien
ggtgggctgacggtgccaaacttca

SEQ ID NO: 270250 - DNA, 25 bp, Homo sapien
gccagtgtaggggtcatgaagaaag

SEQ ID NO: 270251 - DNA, 25 bp, Homo sapien
gctttcatgaacagttgttctattt

SEQ ID NO: 270252 - DNA, 25 bp, Homo sapien
gcctcatttcgaatcttagcagtac

SEQ ID NO: 270253 - DNA, 25 bp, Homo sapien
tgtgcctcatttcgaatcttagcag

SEQ ID NO: 270254 - DNA, 25 bp, Homo sapien
atgtgtgcctcatttcgaatcttag

SEQ ID NO: 270255 - DNA, 25 bp, Homo sapien
ctcatttcgaatcttagcagtacac

SEQ ID NO: 270256 - DNA, 25 bp, Homo sapien
atgatgatgatggttgttgttgaga

SEQ ID NO: 270257 - DNA, 25 bp, Homo sapien
ggatgatgatgatggttgttgttga

SEQ ID NO: 270258 - DNA, 25 bp, Homo sapien
gatgatgatgatggttgttgttgag

SEQ ID NO: 270259 - DNA, 25 bp, Homo sapien
gaggatgatgatgatggttgttgtt

SEQ ID NO: 270260 - DNA, 25 bp, Homo sapien
gctgggctggcttctgctgccagtt

SEQ ID NO: 270261 - DNA, 25 bp, Homo sapien
tgggctggcttctgctgccagtttc

SEQ ID NO: 270262 - DNA, 25 bp, Homo sapien
gctggcttctgctgccagtttcttt

SEQ ID NO: 270263 - DNA, 25 bp, Homo sapien
gggctggcttctgctgccagtttct

SEQ ID NO: 270264 - DNA, 25 bp, Homo sapien
aataactggggtgtgcctgttgagc

SEQ ID NO: 270265 - DNA, 25 bp, Homo sapien
tcttggacataacatcattattagc

SEQ ID NO: 270266 - DNA, 25 bp, Homo sapien
catggataatgcctttcttggacat

SEQ ID NO: 270267 - DNA, 25 bp, Homo sapien
ttattagcacataaacgcggctgcc

SEQ ID NO: 270268 - DNA, 25 bp, Homo sapien
catgattaaggtgtcgtcaggcata

SEQ ID NO: 270269 - DNA, 25 bp, Homo sapien
catagagagaatgcgcagcacggga

SEQ ID NO: 270270 - DNA, 25 bp, Homo sapien
tgcagggaccagaaataaatagctc

SEQ ID NO: 270271 - DNA, 25 bp, Homo sapien
tagctgcagatacgtgcggaagcca

SEQ ID NO: 270272 - DNA, 25 bp, Homo sapien
tagcactcagcatccttatcaaatg

SEQ ID NO: 270273 - DNA, 25 bp, Homo sapien
gtagcactcagcatccttatcaaat

SEQ ID NO: 270274 - DNA, 25 bp, Homo sapien
gcactcagcatccttatcaaatgaa

SEQ ID NO: 270275 - DNA, 25 bp, Homo sapien
actcagcatccttatcaaatgaaaa

SEQ ID NO: 270276 - DNA, 25 bp, Homo sapien
cagtttattgcagtgtagcatgcag

SEQ ID NO: 270277 - DNA, 25 bp, Homo sapien
tttattgcagtgtagcatgcagatg

SEQ ID NO: 270278 - DNA, 25 bp, Homo sapien
tgatcagtttattgcagtgtagcat

SEQ ID NO: 270279 - DNA, 25 bp, Homo sapien
attgcagtgtagcatgcagatgaca

SEQ ID NO: 270280 - DNA, 25 bp, Homo sapien
gatgggaatccgggttttcgatgag

SEQ ID NO: 270281 - DNA, 25 bp, Homo sapien
ctctggatgggaatccgggttttcg

SEQ ID NO: 270282 - DNA, 25 bp, Homo sapien
ctggatgggaatccgggttttcgat

SEQ ID NO: 270283 - DNA, 25 bp, Homo sapien
gtgtgagtgggcattgccctctgga

SEQ ID NO: 270284 - DNA, 25 bp, Homo sapien
tcagggcatagggaagctgcagcac

SEQ ID NO: 270285 - DNA, 25 bp, Homo sapien
gaggaacccagatccgctgatgctg

SEQ ID NO: 270286 - DNA, 25 bp, Homo sapien
cagggtagatgcaaagtgcagaggg

SEQ ID NO: 270287 - DNA, 25 bp, Homo sapien
tcttatgagggtggttacagggtag

SEQ ID NO: 270288 - DNA, 25 bp, Homo sapien
cctgattcctcagggtaacagtcat

SEQ ID NO: 270289 - DNA, 25 bp, Homo sapien
ctgattcctcagggtaacagtcatt

SEQ ID NO: 270290 - DNA, 25 bp, Homo sapien
caccctgattcctcagggtaacagt

SEQ ID NO: 270291 - DNA, 25 bp, Homo sapien
ccctgattcctcagggtaacagtca

SEQ ID NO: 270292 - DNA, 25 bp, Homo sapien
cattgctgtagagaatcaggtactt

SEQ ID NO: 270293 - DNA, 25 bp, Homo sapien
tgtagagaatcaggtacttgtcagg

SEQ ID NO: 270294 - DNA, 25 bp, Homo sapien
agagaatcaggtacttgtcaggatc

SEQ ID NO: 270295 - DNA, 25 bp, Homo sapien
tgctgtagagaatcaggtacttgtc

SEQ ID NO: 270296 - DNA, 25 bp, Homo sapien
ttgagacacagatgctcctgtcctc

SEQ ID NO: 270297 - DNA, 25 bp, Homo sapien
tttgcctccgcttgagacacagatg

SEQ ID NO: 270298 - DNA, 25 bp, Homo sapien
caacgccgcatttccttttccgctt

SEQ ID NO: 270299 - DNA, 25 bp, Homo sapien
tcttcgttttgcctccgcttgagac

SEQ ID NO: 270300 - DNA, 25 bp, Homo sapien
gagccagggagccccgtttacgcag

SEQ ID NO: 270301 - DNA, 25 bp, Homo sapien
ccagggagccccgtttacgcagttg

SEQ ID NO: 270302 - DNA, 25 bp, Homo sapien
agccagggagccccgtttacgcagt

SEQ ID NO: 270303 - DNA, 25 bp, Homo sapien
ccaaggcaggtgtagggactagcca

SEQ ID NO: 270304 - DNA, 25 bp, Homo sapien
atcaaagcggaagcacggatcctgg

SEQ ID NO: 270305 - DNA, 25 bp, Homo sapien
ttcacacaagtgagatgcgctgccg

SEQ ID NO: 270306 - DNA, 25 bp, Homo sapien
ccagcgggagggcttgttctacatc

SEQ ID NO: 270307 - DNA, 25 bp, Homo sapien
taaagcagcagaggccgaaaactta

SEQ ID NO: 270308 - DNA, 25 bp, Homo sapien
caaagattaaagcagcagaggccga

SEQ ID NO: 270309 - DNA, 25 bp, Homo sapien
ctagcaacaaagattaaagcagcag

SEQ ID NO: 270310 - DNA, 25 bp, Homo sapien
caacaaagattaaagcagcagaggc

SEQ ID NO: 270311 - DNA, 25 bp, Homo sapien
tggaacagttccaaattcgttcaag

SEQ ID NO: 270312 - DNA, 25 bp, Homo sapien
gaacagttccaaattcgttcaagtc

SEQ ID NO: 270313 - DNA, 25 bp, Homo sapien
tgagctctggaacagttccaaattc

SEQ ID NO: 270314 - DNA, 25 bp, Homo sapien
gctctggaacagttccaaattcgtt

SEQ ID NO: 270315 - DNA, 25 bp, Homo sapien
tgcccagtgttcatggagtcaccag

SEQ ID NO: 270316 - DNA, 25 bp, Homo sapien
ctgcccagtgttcatggagtcacca

SEQ ID NO: 270317 - DNA, 25 bp, Homo sapien
tcagcctggaatagtatctagcctt

SEQ ID NO: 270318 - DNA, 25 bp, Homo sapien
ctccactgacccctcatccgtcagc

SEQ ID NO: 270319 - DNA, 25 bp, Homo sapien
ggcagaagcagaacggtcacacatc

SEQ ID NO: 270320 - DNA, 25 bp, Homo sapien
gcagaagcagaacggtcacacatcc

SEQ ID NO: 270321 - DNA, 25 bp, Homo sapien
tggcagaagcagaacggtcacacat

SEQ ID NO: 270322 - DNA, 25 bp, Homo sapien
cagcttctgtggcaattatggtggc

SEQ ID NO: 270323 - DNA, 25 bp, Homo sapien
ttcccaggggacatatattgtattg

SEQ ID NO: 270324 - DNA, 25 bp, Homo sapien
aagagaattctctgatgacaaaggg

SEQ ID NO: 270325 - DNA, 25 bp, Homo sapien
ttctgtgctgttcaacttccccagc

SEQ ID NO: 270326 - DNA, 25 bp, Homo sapien
tttcaatccgctgttctccaaaggg

SEQ ID NO: 270327 - DNA, 25 bp, Homo sapien
tcccgagacgaaatcagaggtgagt

SEQ ID NO: 270328 - DNA, 25 bp, Homo sapien
gtggctctcacaccaattcccaggg

SEQ ID NO: 270329 - DNA, 25 bp, Homo sapien
gaagggagtgcgtcacaccttttcc

SEQ ID NO: 270330 - DNA, 25 bp, Homo sapien
ccattaagacttctgtacagggagg

SEQ ID NO: 270331 - DNA, 25 bp, Homo sapien
tgtcgggtctgcgtcttggaggaaa

SEQ ID NO: 270332 - DNA, 25 bp, Homo sapien
tcgggtctgcgtcttggaggaaagg

SEQ ID NO: 270333 - DNA, 25 bp, Homo sapien
ggtggggtctccattaagacttctg

SEQ ID NO: 270334 - DNA, 25 bp, Homo sapien
tgctagaaactcggcaacttggttt

SEQ ID NO: 270335 - DNA, 25 bp, Homo sapien
ttgctagaaactcggcaacttggtt

SEQ ID NO: 270336 - DNA, 25 bp, Homo sapien
cttggttttcccgttctgcgtggct

SEQ ID NO: 270337 - DNA, 25 bp, Homo sapien
gttttcccgttctgcgtggctccca

SEQ ID NO: 270338 - DNA, 25 bp, Homo sapien
gtcatcaatgcaaccaggacctcca

SEQ ID NO: 270339 - DNA, 25 bp, Homo sapien
atgcaaccaggacctccagtccttg

SEQ ID NO: 270340 - DNA, 25 bp, Homo sapien
gaggaggtcatcaatgcaaccagga

SEQ ID NO: 270341 - DNA, 25 bp, Homo sapien
agcaagatggaggaggtcatcaatg

SEQ ID NO: 270342 - DNA, 25 bp, Homo sapien
catctactgtgatactggtttggtc

SEQ ID NO: 270343 - DNA, 25 bp, Homo sapien
gccaattgctcacgttgaacttcat

SEQ ID NO: 270344 - DNA, 25 bp, Homo sapien
tggtcagatccagacaacagttctc

SEQ ID NO: 270345 - DNA, 25 bp, Homo sapien
ggttggtgaatttgtgtcatcagcc

SEQ ID NO: 270346 - DNA, 25 bp, Homo sapien
tcttcatgtcttggagatgcttttc

SEQ ID NO: 270347 - DNA, 25 bp, Homo sapien
gaacattccacacaagtccctgcat

SEQ ID NO: 270348 - DNA, 25 bp, Homo sapien
ttctttactgctgagtttcttgaac

SEQ ID NO: 270349 - DNA, 25 bp, Homo sapien
ggtgaacttcctgtcaagcttcttc

SEQ ID NO: 270350 - DNA, 25 bp, Homo sapien
gcttgagcggcctttcaaaatatga

SEQ ID NO: 270351 - DNA, 25 bp, Homo sapien
tgcacttttgaagtcagtcccacaa

SEQ ID NO: 270352 - DNA, 25 bp, Homo sapien
gaagtggactttgcttgtagtcaac

SEQ ID NO: 270353 - DNA, 25 bp, Homo sapien
tgtgtgttccagtaagggcttgagc

SEQ ID NO: 270354 - DNA, 25 bp, Homo sapien
tggattccagaaaagtcgagcatgt

SEQ ID NO: 270355 - DNA, 25 bp, Homo sapien
ttctcataagatgtgtacagcctga

SEQ ID NO: 270356 - DNA, 25 bp, Homo sapien
gaaaagtcgagcatgtagctgccat

SEQ ID NO: 270357 - DNA, 25 bp, Homo sapien
catatgccagaccatttgagctctc

SEQ ID NO: 270358 - DNA, 25 bp, Homo sapien
tatagtttatatttggagagggcac

SEQ ID NO: 270359 - DNA, 25 bp, Homo sapien
ggcatgttcttaattttgggcatct

SEQ ID NO: 270360 - DNA, 25 bp, Homo sapien
agtaacccagtctccatgcactttc

SEQ ID NO: 270361 - DNA, 25 bp, Homo sapien
cgcattgttaatggtaatgtttggc

SEQ ID NO: 270362 - DNA, 25 bp, Homo sapien
ttgaggaccaagagcatcagccagt

SEQ ID NO: 270363 - DNA, 25 bp, Homo sapien
aatcttctgggttagttgaatcgtc

SEQ ID NO: 270364 - DNA, 25 bp, Homo sapien
gccagtccctgtgcagtttagcagg

SEQ ID NO: 270365 - DNA, 25 bp, Homo sapien
gaatcatcattgtccctgagccaga

SEQ ID NO: 270366 - DNA, 25 bp, Homo sapien
tcatccctagataagaactctcttc

SEQ ID NO: 270367 - DNA, 25 bp, Homo sapien
tagaagaacaatcttcagcttccca

SEQ ID NO: 270368 - DNA, 25 bp, Homo sapien
tatgagttgagggataattggtttt

SEQ ID NO: 270369 - DNA, 25 bp, Homo sapien
tgtccaaggggactgaaagtgcctt

SEQ ID NO: 270370 - DNA, 25 bp, Homo sapien
tgatcacattctgctcgcctttggg

SEQ ID NO: 270371 - DNA, 25 bp, Homo sapien
gggcaaaccaaggaatgcttggcct

SEQ ID NO: 270372 - DNA, 25 bp, Homo sapien
ccttatctctttcgtcttttgcttg

SEQ ID NO: 270373 - DNA, 25 bp, Homo sapien
gaatgaaaacgtcttgactcctttg

SEQ ID NO: 270374 - DNA, 25 bp, Homo sapien
caattgttccagctggcgctagtag

SEQ ID NO: 270375 - DNA, 25 bp, Homo sapien
ttttctaagagtggtcttggcaccc

SEQ ID NO: 270376 - DNA, 25 bp, Homo sapien
agtggtcttggcacccatgcctcgc

SEQ ID NO: 270377 - DNA, 25 bp, Homo sapien
catgcctcgccaatctgtgtccttt

SEQ ID NO: 270378 - DNA, 25 bp, Homo sapien
attggtttgtttgaaggtgctccgt

SEQ ID NO: 270379 - DNA, 25 bp, Homo sapien
tattggtttgtttgaaggtgctccg

SEQ ID NO: 270380 - DNA, 25 bp, Homo sapien
ctggaatattggtttgtttgaaggt

SEQ ID NO: 270381 - DNA, 25 bp, Homo sapien
gaatattggtttgtttgaaggtgct

SEQ ID NO: 270382 - DNA, 25 bp, Homo sapien
tagtgatcacagtacaataatccca

SEQ ID NO: 270383 - DNA, 25 bp, Homo sapien
tggggacagccgtagtgatcacagt

SEQ ID NO: 270384 - DNA, 25 bp, Homo sapien
tgatcacagtacaataatcccatgg

SEQ ID NO: 270385 - DNA, 25 bp, Homo sapien
cagtacaataatcccatggaaaagg

SEQ ID NO: 270386 - DNA, 25 bp, Homo sapien
catgacataaaacaggggagctgta

SEQ ID NO: 270387 - DNA, 25 bp, Homo sapien
atgacataaaacaggggagctgtac

SEQ ID NO: 270388 - DNA, 25 bp, Homo sapien
tcatgacataaaacaggggagctgt

SEQ ID NO: 270389 - DNA, 25 bp, Homo sapien
ctggtcccttctgccatgctgaagc

SEQ ID NO: 270390 - DNA, 25 bp, Homo sapien
gctgtgcagccgctatctgtcgtgg

SEQ ID NO: 270391 - DNA, 25 bp, Homo sapien
cctggcttggcttgaccgaaattta

SEQ ID NO: 270392 - DNA, 25 bp, Homo sapien
actcgggcgatgtgctttactgtcc

SEQ ID NO: 270393 - DNA, 25 bp, Homo sapien
ttagcccaccggcttttgacaaggc

SEQ ID NO: 270394 - DNA, 25 bp, Homo sapien
ttgacaaggccataaacaagcagct

SEQ ID NO: 270395 - DNA, 25 bp, Homo sapien
agcagctgtaggcttccagatctca

SEQ ID NO: 270396 - DNA, 25 bp, Homo sapien
acaagcagctgtaggcttccagatc

SEQ ID NO: 270397 - DNA, 25 bp, Homo sapien
gataggcattcaatgtcctcagtga

SEQ ID NO: 270398 - DNA, 25 bp, Homo sapien
tcagcataggcaggacagagacggg

SEQ ID NO: 270399 - DNA, 25 bp, Homo sapien
caatggcaacgtggcttggcaaagg

SEQ ID NO: 270400 - DNA, 25 bp, Homo sapien
gcagctggagccgataggcattcaa

SEQ ID NO: 270401 - DNA, 25 bp, Homo sapien
ctccaagtaggtacaatcacagact

SEQ ID NO: 270402 - DNA, 25 bp, Homo sapien
ggtacaatcacagacttcactttgt

SEQ ID NO: 270403 - DNA, 25 bp, Homo sapien
tcacagacttcactttgtttttcat

SEQ ID NO: 270404 - DNA, 25 bp, Homo sapien
gtaggtacaatcacagacttcactt

SEQ ID NO: 270405 - DNA, 25 bp, Homo sapien
tctcacccaacaactatgatacacc

SEQ ID NO: 270406 - DNA, 25 bp, Homo sapien
gtctcacccaacaactatgatacac

SEQ ID NO: 270407 - DNA, 25 bp, Homo sapien
tgtctcacccaacaactatgataca

SEQ ID NO: 270408 - DNA, 25 bp, Homo sapien
tttccagaagtgacgaaagtcatgt

SEQ ID NO: 270409 - DNA, 25 bp, Homo sapien
tgtggtttccagaagtgacgaaagt

SEQ ID NO: 270410 - DNA, 25 bp, Homo sapien
cagaagtgacgaaagtcatgtggca

SEQ ID NO: 270411 - DNA, 25 bp, Homo sapien
agtgacgaaagtcatgtggcatgtc

SEQ ID NO: 270412 - DNA, 25 bp, Homo sapien
aataatctccccgttgtaactggag

SEQ ID NO: 270413 - DNA, 25 bp, Homo sapien
gtggcctgagatgacttttcaaata

SEQ ID NO: 270414 - DNA, 25 bp, Homo sapien
gttcagcttgtatgatatgtggcct

SEQ ID NO: 270415 - DNA, 25 bp, Homo sapien
aatctccccgttgtaactggagagg

SEQ ID NO: 270416 - DNA, 25 bp, Homo sapien
gcccacttcatagaatagcctccag

SEQ ID NO: 270417 - DNA, 25 bp, Homo sapien
aggcccacttcatagaatagcctcc

SEQ ID NO: 270418 - DNA, 25 bp, Homo sapien
ggcccacttcatagaatagcctcca

SEQ ID NO: 270419 - DNA, 25 bp, Homo sapien
aagtttgcaatgaggcccacttcat

SEQ ID NO: 270420 - DNA, 25 bp, Homo sapien
ttagccaggtaggaaagggcatctc

SEQ ID NO: 270421 - DNA, 25 bp, Homo sapien
atagacatgcacaaagccttgctgg

SEQ ID NO: 270422 - DNA, 25 bp, Homo sapien
ctgtcaccgagatgctgctgactgg

SEQ ID NO: 270423 - DNA, 25 bp, Homo sapien
gcagaccatactcctggatgtcata

SEQ ID NO: 270424 - DNA, 25 bp, Homo sapien
gtcaccatgctgacatgtgcccttc

SEQ ID NO: 270425 - DNA, 25 bp, Homo sapien
tgcagtcaagggaggatgacagcag

SEQ ID NO: 270426 - DNA, 25 bp, Homo sapien
cttttcttctatcagctccaaacta

SEQ ID NO: 270427 - DNA, 25 bp, Homo sapien
tgacagcagaaacttttcttctatc

SEQ ID NO: 270428 - DNA, 25 bp, Homo sapien
agtgcagtcaagggaggatgacagc

SEQ ID NO: 270429 - DNA, 25 bp, Homo sapien
ggactctcaggtggctctaggaggc

SEQ ID NO: 270430 - DNA, 25 bp, Homo sapien
actctcaggtggctctaggaggcag

SEQ ID NO: 270431 - DNA, 25 bp, Homo sapien
gactctcaggtggctctaggaggca

SEQ ID NO: 270432 - DNA, 25 bp, Homo sapien
ggggactctcaggtggctctaggag

SEQ ID NO: 270433 - DNA, 25 bp, Homo sapien
tgttcgttaacaccagcaccatcat

SEQ ID NO: 270434 - DNA, 25 bp, Homo sapien
ggcttgcagtttgcaaggacatgct

SEQ ID NO: 270435 - DNA, 25 bp, Homo sapien
cagcctctgcgagtctgttcgttaa

SEQ ID NO: 270436 - DNA, 25 bp, Homo sapien
gattccacagcaatgtgccgattgt

SEQ ID NO: 270437 - DNA, 25 bp, Homo sapien
atctctctccttctttctgtgtaag

SEQ ID NO: 270438 - DNA, 25 bp, Homo sapien
tctccttctttctgtgtaagctgac

SEQ ID NO: 270439 - DNA, 25 bp, Homo sapien
tctctctccttctttctgtgtaagc

SEQ ID NO: 270440 - DNA, 25 bp, Homo sapien
tctctccttctttctgtgtaagctg

SEQ ID NO: 270441 - DNA, 25 bp, Homo sapien
agacctgacacgcaggcgacctcgt

SEQ ID NO: 270442 - DNA, 25 bp, Homo sapien
attaaacaagtctgagccagtaaca

SEQ ID NO: 270443 - DNA, 25 bp, Homo sapien
acgcaggcgacctcgtggccctgga

SEQ ID NO: 270444 - DNA, 25 bp, Homo sapien
ttaaattaaacaagtctgagccagt

SEQ ID NO: 270445 - DNA, 25 bp, Homo sapien
cttctgggcagcttcacttccttct

SEQ ID NO: 270446 - DNA, 25 bp, Homo sapien
ttctgggcagcttcacttccttctt

SEQ ID NO: 270447 - DNA, 25 bp, Homo sapien
gactccttctgggcagcttcacttc

SEQ ID NO: 270448 - DNA, 25 bp, Homo sapien
tcaggactccttctgggcagcttca

SEQ ID NO: 270449 - DNA, 25 bp, Homo sapien
tagaactcagacaaggaaattgctt

SEQ ID NO: 270450 - DNA, 25 bp, Homo sapien
ctcagacaaggaaattgctttatga

SEQ ID NO: 270451 - DNA, 25 bp, Homo sapien
ttagaactcagacaaggaaattgct

SEQ ID NO: 270452 - DNA, 25 bp, Homo sapien
gaactcagacaaggaaattgcttta

SEQ ID NO: 270453 - DNA, 25 bp, Homo sapien
attttccattgttcctcgttgcatg

SEQ ID NO: 270454 - DNA, 25 bp, Homo sapien
atggtagggcatattcagactctcc

SEQ ID NO: 270455 - DNA, 25 bp, Homo sapien
attgttcctcgttgcatgtcttcct

SEQ ID NO: 270456 - DNA, 25 bp, Homo sapien
aggggttaatggtagggcatattca

SEQ ID NO: 270457 - DNA, 25 bp, Homo sapien
cctcctgccctgctattgtgtggct

SEQ ID NO: 270458 - DNA, 25 bp, Homo sapien
aacccccaggcgctgatgtcctcat

SEQ ID NO: 270459 - DNA, 25 bp, Homo sapien
ttcaccaagccgttgctctgagcag

SEQ ID NO: 270460 - DNA, 25 bp, Homo sapien
agccgttgctctgagcagggctctt

SEQ ID NO: 270461 - DNA, 25 bp, Homo sapien
ctgagcaattcaccaagccgttgct

SEQ ID NO: 270462 - DNA, 25 bp, Homo sapien
catgtgtaagcagcagaccctgagg

SEQ ID NO: 270463 - DNA, 25 bp, Homo sapien
gaagcagggactcgttactcctttc

SEQ ID NO: 270464 - DNA, 25 bp, Homo sapien
gcccaagatgctgagaacctcccag

SEQ ID NO: 270465 - DNA, 25 bp, Homo sapien
caagatgctgagaacctcccagctc

SEQ ID NO: 270466 - DNA, 25 bp, Homo sapien
tggaacactgggaatcctctccact

SEQ ID NO: 270467 - DNA, 25 bp, Homo sapien
ggcttttggaacactgggaatcctc

SEQ ID NO: 270468 - DNA, 25 bp, Homo sapien
gggcagccgggcttttggaacactg

SEQ ID NO: 270469 - DNA, 25 bp, Homo sapien
tcctctccactatccttgctgataa

SEQ ID NO: 270470 - DNA, 25 bp, Homo sapien
aactgtactgcttgttcaagagggc

SEQ ID NO: 270471 - DNA, 25 bp, Homo sapien
aacctccacatcagaatggtgaatg

SEQ ID NO: 270472 - DNA, 25 bp, Homo sapien
taagtctgacttcataagggctttc

SEQ ID NO: 270473 - DNA, 25 bp, Homo sapien
taatatggacttggactagataacc

SEQ ID NO: 270474 - DNA, 25 bp, Homo sapien
ttcttggccctgatatctatatttc

SEQ ID NO: 270475 - DNA, 25 bp, Homo sapien
tagggaaagaccttcttaacatgta

SEQ ID NO: 270476 - DNA, 25 bp, Homo sapien
gtttcttggccctgatatctatatt

SEQ ID NO: 270477 - DNA, 25 bp, Homo sapien
tttcttggccctgatatctatattt

SEQ ID NO: 270478 - DNA, 25 bp, Homo sapien
aaaaaagttgaccagcctccagaag

SEQ ID NO: 270479 - DNA, 25 bp, Homo sapien
tatttttgcccaagtcatcagtaag

SEQ ID NO: 270480 - DNA, 25 bp, Homo sapien
caagtcatcagtaagtatgaggaca

SEQ ID NO: 270481 - DNA, 25 bp, Homo sapien
gttgaccagcctccagaagctaaaa

SEQ ID NO: 270482 - DNA, 25 bp, Homo sapien
aatatgaacattatggccctttggg

SEQ ID NO: 270483 - DNA, 25 bp, Homo sapien
cagaagtagagctaattttggcctc

SEQ ID NO: 270484 - DNA, 25 bp, Homo sapien
gggaattgtccacctatctgttggg

SEQ ID NO: 270485 - DNA, 25 bp, Homo sapien
tcctaatcccctgtgaaacctgtta

SEQ ID NO: 270486 - DNA, 25 bp, Homo sapien
tgttagcgaccacggaagcagtcct

SEQ ID NO: 270487 - DNA, 25 bp, Homo sapien
tgaatctcgaaatgaactggaagct

SEQ ID NO: 270488 - DNA, 25 bp, Homo sapien
caaaagaggatggatgtcgtcactg

SEQ ID NO: 270489 - DNA, 25 bp, Homo sapien
aacattgttggccttaatgcccggg

SEQ ID NO: 270490 - DNA, 25 bp, Homo sapien
tgcgagccgcggcagagtgaggcag

SEQ ID NO: 270491 - DNA, 25 bp, Homo sapien
tttctcccagggtttcttatcagcc

SEQ ID NO: 270492 - DNA, 25 bp, Homo sapien
caggccgcggctgtctgtgtgtcct

SEQ ID NO: 270493 - DNA, 25 bp, Homo sapien
ctgagtgtcagaggaacggccagac

SEQ ID NO: 270494 - DNA, 25 bp, Homo sapien
gcagaaagtgataccgtggacagcc

SEQ ID NO: 270495 - DNA, 25 bp, Homo sapien
gaacagcgtcggcttaaatcagacc

SEQ ID NO: 270496 - DNA, 25 bp, Homo sapien
aatgacgcttattgccagggaaccc

SEQ ID NO: 270497 - DNA, 25 bp, Homo sapien
tggacagcctgccaaatgacgtcac

SEQ ID NO: 270498 - DNA, 25 bp, Homo sapien
gctccctgcgtgatttccccatgca

SEQ ID NO: 270499 - DNA, 25 bp, Homo sapien
tgctccctgcgtgatttccccatgc

SEQ ID NO: 270500 - DNA, 25 bp, Homo sapien
tctgctccctgcgtgatttccccat

SEQ ID NO: 270501 - DNA, 25 bp, Homo sapien
ctccctgcgtgatttccccatgcat

SEQ ID NO: 270502 - DNA, 25 bp, Homo sapien
gcatatgtatttgttcgtctcctct

SEQ ID NO: 270503 - DNA, 25 bp, Homo sapien
ctctgtatttgcatactctggcaga

SEQ ID NO: 270504 - DNA, 25 bp, Homo sapien
ggcagagaaatggagtcctcttcct

SEQ ID NO: 270505 - DNA, 25 bp, Homo sapien
ctaatccgcatatgtatttgttcgt

SEQ ID NO: 270506 - DNA, 25 bp, Homo sapien
cccacgggataggagagcctcttag

SEQ ID NO: 270507 - DNA, 25 bp, Homo sapien
ctgaaggctgaaggccccacgggat

SEQ ID NO: 270508 - DNA, 25 bp, Homo sapien
ctttaccagaggcaggttagtgatc

SEQ ID NO: 270509 - DNA, 25 bp, Homo sapien
ctggactcaccacctaaggctgctt

SEQ ID NO: 270510 - DNA, 25 bp, Homo sapien
tcagcgcagccctctgacaatattt

SEQ ID NO: 270511 - DNA, 25 bp, Homo sapien
gcagccctctgacaatatttagcag

SEQ ID NO: 270512 - DNA, 25 bp, Homo sapien
agcgcagccctctgacaatatttag

SEQ ID NO: 270513 - DNA, 25 bp, Homo sapien
cgcagccctctgacaatatttagca

SEQ ID NO: 270514 - DNA, 25 bp, Homo sapien
tcacaggtatgcccggagctgttcc

SEQ ID NO: 270515 - DNA, 25 bp, Homo sapien
tgcccggagctgttcccgatagggt

SEQ ID NO: 270516 - DNA, 25 bp, Homo sapien
ttcccgatagggttctttcatctcc

SEQ ID NO: 270517 - DNA, 25 bp, Homo sapien
agctgttcccgatagggttctttca

SEQ ID NO: 270518 - DNA, 25 bp, Homo sapien
tcaagctctacatgataatgggggg

SEQ ID NO: 270519 - DNA, 25 bp, Homo sapien
aggatgaagagatggcggagcctcc

SEQ ID NO: 270520 - DNA, 25 bp, Homo sapien
gctctgagccagctgaggtcttctt

SEQ ID NO: 270521 - DNA, 25 bp, Homo sapien
gagcctccaaagtgcggagtgtgat

SEQ ID NO: 270522 - DNA, 25 bp, Homo sapien
gcgagtccacctatccaggcagtca

SEQ ID NO: 270523 - DNA, 25 bp, Homo sapien
gtctacacgcagagcgagtccacct

SEQ ID NO: 270524 - DNA, 25 bp, Homo sapien
agagcgagtccacctatccaggcag

SEQ ID NO: 270525 - DNA, 25 bp, Homo sapien
ttacatggctgggtctacacgcaga

SEQ ID NO: 270526 - DNA, 25 bp, Homo sapien
gaggctgagcgccctacctgggcgc

SEQ ID NO: 270527 - DNA, 25 bp, Homo sapien
agcaggtgaggagcgcgagcagcgc

SEQ ID NO: 270528 - DNA, 25 bp, Homo sapien
aggtgaggagcgcgagcagcgccgg

SEQ ID NO: 270529 - DNA, 25 bp, Homo sapien
gcaggtgaggagcgcgagcagcgcc

SEQ ID NO: 270530 - DNA, 25 bp, Homo sapien
caggtgaggagcgcgagcagcgccg

SEQ ID NO: 270531 - DNA, 25 bp, Homo sapien
gcactgctctgctcgcagacgtgtc

SEQ ID NO: 270532 - DNA, 25 bp, Homo sapien
cagcggagacccgagacaggagcaa

SEQ ID NO: 270533 - DNA, 25 bp, Homo sapien
gtcggaatccgggaagggctggcgc

SEQ ID NO: 270534 - DNA, 25 bp, Homo sapien
tgtcccctgatgtccccagcggaga

SEQ ID NO: 270535 - DNA, 25 bp, Homo sapien
gcatggcgcatagccaacttacttg

SEQ ID NO: 270536 - DNA, 25 bp, Homo sapien
taagctccaggatgcatggcgcata

SEQ ID NO: 270537 - DNA, 25 bp, Homo sapien
gctttccaggattaattccaggtcc

SEQ ID NO: 270538 - DNA, 25 bp, Homo sapien
caagtacccactttgaagataatcc

SEQ ID NO: 270539 - DNA, 25 bp, Homo sapien
gaatgaatgtttggagtcagagcca

SEQ ID NO: 270540 - DNA, 25 bp, Homo sapien
gaatgtttggagtcagagccatcac

SEQ ID NO: 270541 - DNA, 25 bp, Homo sapien
gccatcacagacgaagatatcccta

SEQ ID NO: 270542 - DNA, 25 bp, Homo sapien
cctagagccacatttaggctctgca

SEQ ID NO: 270543 - DNA, 25 bp, Homo sapien
ctttgtatcttcagaagccaaacca

SEQ ID NO: 270544 - DNA, 25 bp, Homo sapien
ctgagactgcttgacctctttcttt

SEQ ID NO: 270545 - DNA, 25 bp, Homo sapien
ttgtatcttcagaagccaaaccaaa

SEQ ID NO: 270546 - DNA, 25 bp, Homo sapien
tgcttgacctctttctttgtatctt

SEQ ID NO: 270547 - DNA, 25 bp, Homo sapien
tcatttttccttgatataccacttt

SEQ ID NO: 270548 - DNA, 25 bp, Homo sapien
ttttccttgatataccacttttctc

SEQ ID NO: 270549 - DNA, 25 bp, Homo sapien
tttccttgatataccacttttctcc

SEQ ID NO: 270550 - DNA, 25 bp, Homo sapien
tattaatcatccttgagaaactcag

SEQ ID NO: 270551 - DNA, 25 bp, Homo sapien
tgacaaaagtgtttacagtggcact

SEQ ID NO: 270552 - DNA, 25 bp, Homo sapien
agaaactcagatgtgtgcacaagga

SEQ ID NO: 270553 - DNA, 25 bp, Homo sapien
aaatatccactaacaagatacatta

SEQ ID NO: 270554 - DNA, 25 bp, Homo sapien
gtaagatctgcagcctgctttaaga

SEQ ID NO: 270555 - DNA, 25 bp, Homo sapien
tgtgtaagatctgcagcctgcttta

SEQ ID NO: 270556 - DNA, 25 bp, Homo sapien
tggatgacgaatacaattcctttta

SEQ ID NO: 270557 - DNA, 25 bp, Homo sapien
gactctggatgacgaatacaattcc

SEQ ID NO: 270558 - DNA, 25 bp, Homo sapien
tctgctgcacgagggatcatggccc

SEQ ID NO: 270559 - DNA, 25 bp, Homo sapien
tctgagccatgcaactcgagtgagt

SEQ ID NO: 270560 - DNA, 25 bp, Homo sapien
gaactgaggtataggactgactcca

SEQ ID NO: 270561 - DNA, 25 bp, Homo sapien
tataatgtgtcagggatagaagcca

SEQ ID NO: 270562 - DNA, 25 bp, Homo sapien
atggtactcttcaaaccacttcttt

SEQ ID NO: 270563 - DNA, 25 bp, Homo sapien
cttgtttagccagctgatgaaggag

SEQ ID NO: 270564 - DNA, 25 bp, Homo sapien
gtaacaacggaagtatggtccatgc

SEQ ID NO: 270565 - DNA, 25 bp, Homo sapien
tgcggtaacaacggaagtatggtcc

SEQ ID NO: 270566 - DNA, 25 bp, Homo sapien
atgcaccttcttgtttagccagctg

SEQ ID NO: 270567 - DNA, 25 bp, Homo sapien
cttagaggggtcatatcttctgagg

SEQ ID NO: 270568 - DNA, 25 bp, Homo sapien
gtcatatcttctgagggtttccaag

SEQ ID NO: 270569 - DNA, 25 bp, Homo sapien
gaggggtcatatcttctgagggttt

SEQ ID NO: 270570 - DNA, 25 bp, Homo sapien
gggtcatatcttctgagggtttcca

SEQ ID NO: 270571 - DNA, 25 bp, Homo sapien
aaatcaaataacttcaggtagtgac

SEQ ID NO: 270572 - DNA, 25 bp, Homo sapien
taacttcaggtagtgactgaaatgt

SEQ ID NO: 270573 - DNA, 25 bp, Homo sapien
gtaaatcaaataacttcaggtagtg

SEQ ID NO: 270574 - DNA, 25 bp, Homo sapien
caaataacttcaggtagtgactgaa

SEQ ID NO: 270575 - DNA, 25 bp, Homo sapien
agcaaagtctggatacttaaaaact

SEQ ID NO: 270576 - DNA, 25 bp, Homo sapien
tgtttacaagtggaatacttaaggc

SEQ ID NO: 270577 - DNA, 25 bp, Homo sapien
aggattctcggaaaaggcataatgg

SEQ ID NO: 270578 - DNA, 25 bp, Homo sapien
tctcggaaaaggcataatggtgaat

SEQ ID NO: 270579 - DNA, 25 bp, Homo sapien
aaagtcggatttcaaggattcactc

SEQ ID NO: 270580 - DNA, 25 bp, Homo sapien
cggatttcaaggattcactctttag

SEQ ID NO: 270581 - DNA, 25 bp, Homo sapien
taaatctattgtaaagtcggatttc

SEQ ID NO: 270582 - DNA, 25 bp, Homo sapien
ttcactctttagtctcttggtaagc

SEQ ID NO: 270583 - DNA, 25 bp, Homo sapien
tcctccgcctttgtcccagatgtag

SEQ ID NO: 270584 - DNA, 25 bp, Homo sapien
gaatggaatgtggtagcacagtaga

SEQ ID NO: 270585 - DNA, 25 bp, Homo sapien
acgtcattggtacaaaactcaggca

SEQ ID NO: 270586 - DNA, 25 bp, Homo sapien
gaagtccacgtcattggtacaaaac

SEQ ID NO: 270587 - DNA, 25 bp, Homo sapien
ttgcatgtttttactgcaacaaaaa

SEQ ID NO: 270588 - DNA, 25 bp, Homo sapien
caaaaatatccttcttcttcactgg

SEQ ID NO: 270589 - DNA, 25 bp, Homo sapien
catgtttttactgcaacaaaaatat

SEQ ID NO: 270590 - DNA, 25 bp, Homo sapien
ttctgtcaccatgaaatttcttgca

SEQ ID NO: 270591 - DNA, 25 bp, Homo sapien
tggctgccacgaggtacatgagaca

SEQ ID NO: 270592 - DNA, 25 bp, Homo sapien
tgagacatgtacacaaactgcatgg

SEQ ID NO: 270593 - DNA, 25 bp, Homo sapien
ctgagcaaacggcaatttaacctct

SEQ ID NO: 270594 - DNA, 25 bp, Homo sapien
acctctttaattagagggagactgc

SEQ ID NO: 270595 - DNA, 25 bp, Homo sapien
gcagcttgcagccactaaaagttca

SEQ ID NO: 270596 - DNA, 25 bp, Homo sapien
aatatcctccattgcataatgctgg

SEQ ID NO: 270597 - DNA, 25 bp, Homo sapien
tgtgaggaaaggtcaagaactttcc

SEQ ID NO: 270598 - DNA, 25 bp, Homo sapien
cacactgttgggtaaaatatcctcc

SEQ ID NO: 270599 - DNA, 25 bp, Homo sapien
tcccaaatccacagtaggaatggaa

SEQ ID NO: 270600 - DNA, 25 bp, Homo sapien
ttcccaaatccacagtaggaatgga

SEQ ID NO: 270601 - DNA, 25 bp, Homo sapien
ttcagtatagtcactatagtattca

SEQ ID NO: 270602 - DNA, 25 bp, Homo sapien
cccaaatccacagtaggaatggaat

SEQ ID NO: 270603 - DNA, 25 bp, Homo sapien
aatgtctaccattccactctgtatg

SEQ ID NO: 270604 - DNA, 25 bp, Homo sapien
ccactctgtatgtcctaaaaagtgt

SEQ ID NO: 270605 - DNA, 25 bp, Homo sapien
actctgtatgtcctaaaaagtgttt

SEQ ID NO: 270606 - DNA, 25 bp, Homo sapien
tggagtctccaatgtctaccattcc

SEQ ID NO: 270607 - DNA, 25 bp, Homo sapien
tcacagacacattgaaccagtggga

SEQ ID NO: 270608 - DNA, 25 bp, Homo sapien
gagataatgaaattcaagccattca

SEQ ID NO: 270609 - DNA, 25 bp, Homo sapien
gaaccagtgggaactttagagataa

SEQ ID NO: 270610 - DNA, 25 bp, Homo sapien
ctttagagataatgaaattcaagcc

SEQ ID NO: 270611 - DNA, 25 bp, Homo sapien
gctgttttgtcctggctacgattca

SEQ ID NO: 270612 - DNA, 25 bp, Homo sapien
gactaaccatgctgttttgtcctgg

SEQ ID NO: 270613 - DNA, 25 bp, Homo sapien
catccacaatgactaaccatgctgt

SEQ ID NO: 270614 - DNA, 25 bp, Homo sapien
tcctggctacgattcagaaatcttt

SEQ ID NO: 270615 - DNA, 25 bp, Homo sapien
gcaaactgtaatagccttggtctcc

SEQ ID NO: 270616 - DNA, 25 bp, Homo sapien
tcttttccgcccacagagtctgtca

SEQ ID NO: 270617 - DNA, 25 bp, Homo sapien
ggaattctcttaaggcagtcagctc

SEQ ID NO: 270618 - DNA, 25 bp, Homo sapien
tctggcagtcatagaactcacctca

SEQ ID NO: 270619 - DNA, 25 bp, Homo sapien
taagcatgctagtcctcaattccac

SEQ ID NO: 270620 - DNA, 25 bp, Homo sapien
tgttggttaagtaagacaccttggc

SEQ ID NO: 270621 - DNA, 25 bp, Homo sapien
gaggctttgtccctacctagtggtg

SEQ ID NO: 270622 - DNA, 25 bp, Homo sapien
ccatgttggtgttgtgggtagctac

SEQ ID NO: 270623 - DNA, 25 bp, Homo sapien
accccaggagggtggacatatttag

SEQ ID NO: 270624 - DNA, 25 bp, Homo sapien
gggagagccatgggactcaccccag

SEQ ID NO: 270625 - DNA, 25 bp, Homo sapien
ctcaacatttaagggcccaaaccag

SEQ ID NO: 270626 - DNA, 25 bp, Homo sapien
cctggctgatctctcaacatttaag

SEQ ID NO: 270627 - DNA, 25 bp, Homo sapien
caaagtggttgagaaagaatatgct

SEQ ID NO: 270628 - DNA, 25 bp, Homo sapien
tacaattcaacgctgtatccaggat

SEQ ID NO: 270629 - DNA, 25 bp, Homo sapien
gccagtctagcatggtacaattcaa

SEQ ID NO: 270630 - DNA, 25 bp, Homo sapien
atcaaaatcatggagagcagcagcc

SEQ ID NO: 270631 - DNA, 25 bp, Homo sapien
gagtggtgtaaaaatctgatctgct

SEQ ID NO: 270632 - DNA, 25 bp, Homo sapien
tgtttggcttacacatagagtatcc

SEQ ID NO: 270633 - DNA, 25 bp, Homo sapien
cctgcgacttcttattgaagcaact

SEQ ID NO: 270634 - DNA, 25 bp, Homo sapien
gactctaggactgcctcgtaataag

SEQ ID NO: 270635 - DNA, 25 bp, Homo sapien
cgtagccgtagcgctctcccagaaa

SEQ ID NO: 270636 - DNA, 25 bp, Homo sapien
gaaacacaggctcgccggagtcata

SEQ ID NO: 270637 - DNA, 25 bp, Homo sapien
ggagtcataacagctaagcaagtgc

SEQ ID NO: 270638 - DNA, 25 bp, Homo sapien
tcccagaaacacaggctcgccggag

SEQ ID NO: 270639 - DNA, 25 bp, Homo sapien
ctcctcctcccgtgatgtagctgta

SEQ ID NO: 270640 - DNA, 25 bp, Homo sapien
tcctcctcccgtgatgtagctgtag

SEQ ID NO: 270641 - DNA, 25 bp, Homo sapien
cctcctcctcccgtgatgtagctgt

SEQ ID NO: 270642 - DNA, 25 bp, Homo sapien
tgcccacagcactcaatggaagttt

SEQ ID NO: 270643 - DNA, 25 bp, Homo sapien
tatgaatcagtctaggaggaaggaa

SEQ ID NO: 270644 - DNA, 25 bp, Homo sapien
tactgagctctaggtaaaaccctac

SEQ ID NO: 270645 - DNA, 25 bp, Homo sapien
gctcaataactgaaagggccgaagg

SEQ ID NO: 270646 - DNA, 25 bp, Homo sapien
tcatcgggagcatcattgctgtagc

SEQ ID NO: 270647 - DNA, 25 bp, Homo sapien
tactggcgagaagtctcctgacggc

SEQ ID NO: 270648 - DNA, 25 bp, Homo sapien
cattcccaggaccatatcatcggga

SEQ ID NO: 270649 - DNA, 25 bp, Homo sapien
tgtagcatcgacatttactggcgag

SEQ ID NO: 270650 - DNA, 25 bp, Homo sapien
aattataactgctcagggagttaaa

SEQ ID NO: 270651 - DNA, 25 bp, Homo sapien
gaaattataactgctcagggagtta

SEQ ID NO: 270652 - DNA, 25 bp, Homo sapien
tataactgctcagggagttaaaaat

SEQ ID NO: 270653 - DNA, 25 bp, Homo sapien
ttataactgctcagggagttaaaaa

SEQ ID NO: 270654 - DNA, 25 bp, Homo sapien
cagatgagtgttccaacaataatat

SEQ ID NO: 270655 - DNA, 25 bp, Homo sapien
tcagatgagtgttccaacaataata

SEQ ID NO: 270656 - DNA, 25 bp, Homo sapien
taacctagcttcaccagtacaaata

SEQ ID NO: 270657 - DNA, 25 bp, Homo sapien
cagcacctggcctaacctagcttca

SEQ ID NO: 270658 - DNA, 25 bp, Homo sapien
tagcttcaccagtacaaatatactg

SEQ ID NO: 270659 - DNA, 25 bp, Homo sapien
tggcctaacctagcttcaccagtac

SEQ ID NO: 270660 - DNA, 25 bp, Homo sapien
ttgatgagaaaggtagtccttaggg

SEQ ID NO: 270661 - DNA, 25 bp, Homo sapien
ttgtggaacgatatgggaacttgat

SEQ ID NO: 270662 - DNA, 25 bp, Homo sapien
ttccagtgtttgtggaacgatatgg

SEQ ID NO: 270663 - DNA, 25 bp, Homo sapien
cactggatcgatgttccagtgtttg

SEQ ID NO: 270664 - DNA, 25 bp, Homo sapien
ggtgccaaccatgtgaaatacacct

SEQ ID NO: 270665 - DNA, 25 bp, Homo sapien
cactgggtgccaaccatgtgaaata

SEQ ID NO: 270666 - DNA, 25 bp, Homo sapien
ttcgtcactgggtgccaaccatgtg

SEQ ID NO: 270667 - DNA, 25 bp, Homo sapien
ttgtcttcgtcactgggtgccaacc

SEQ ID NO: 270668 - DNA, 25 bp, Homo sapien
cagcttggagaatacacagtcatca

SEQ ID NO: 270669 - DNA, 25 bp, Homo sapien
cagttcattccctgcgcaggctagg

SEQ ID NO: 270670 - DNA, 25 bp, Homo sapien
tcaggaagcacccaatgccatgtgg

SEQ ID NO: 270671 - DNA, 25 bp, Homo sapien
tgccatgtggcagacacaagtgttg

SEQ ID NO: 270672 - DNA, 25 bp, Homo sapien
tacaaatagaactgtagacagtcac

SEQ ID NO: 270673 - DNA, 25 bp, Homo sapien
actgtagacagtcacatctctccag

SEQ ID NO: 270674 - DNA, 25 bp, Homo sapien
ttccattacaatgaagagacagaac

SEQ ID NO: 270675 - DNA, 25 bp, Homo sapien
tagaactgtagacagtcacatctct

SEQ ID NO: 270676 - DNA, 25 bp, Homo sapien
gaggacactattttctggcagcatc

SEQ ID NO: 270677 - DNA, 25 bp, Homo sapien
gaaattgcctgatcaccatgctgtc

SEQ ID NO: 270678 - DNA, 25 bp, Homo sapien
tcctgagactcacatagagcttgct

SEQ ID NO: 270679 - DNA, 25 bp, Homo sapien
caatacgaagctctagcagaagacc

SEQ ID NO: 270680 - DNA, 25 bp, Homo sapien
aaattctgtgctgggctataaaaag

SEQ ID NO: 270681 - DNA, 25 bp, Homo sapien
taaatactaatactattgcaaatag

SEQ ID NO: 270682 - DNA, 25 bp, Homo sapien
acacaggtacttttggtggtatggc

SEQ ID NO: 270683 - DNA, 25 bp, Homo sapien
aatagtcaatctatgctacaagaaa

SEQ ID NO: 270684 - DNA, 25 bp, Homo sapien
gatacatcccttggatggccacaga

SEQ ID NO: 270685 - DNA, 25 bp, Homo sapien
taggcttgaagcgatctagaaatcc

SEQ ID NO: 270686 - DNA, 25 bp, Homo sapien
caatgactgaacaaagctaaggcca

SEQ ID NO: 270687 - DNA, 25 bp, Homo sapien
gctaaggccatcagtataggcttga

SEQ ID NO: 270688 - DNA, 25 bp, Homo sapien
cttttccactggtgtaggcagccag

SEQ ID NO: 270689 - DNA, 25 bp, Homo sapien
ggatgccagcttcaatcatgtcaaa

SEQ ID NO: 270690 - DNA, 25 bp, Homo sapien
ggtaacagttagtaggccagagcag

SEQ ID NO: 270691 - DNA, 25 bp, Homo sapien
catgttgttctctcagtggtaacag

SEQ ID NO: 270692 - DNA, 25 bp, Homo sapien
tcttttacttgtggttaggcttaca

SEQ ID NO: 270693 - DNA, 25 bp, Homo sapien
ccccggtatcagtagaaggcactaa

SEQ ID NO: 270694 - DNA, 25 bp, Homo sapien
taggcttacaccattccaaaaagta

SEQ ID NO: 270695 - DNA, 25 bp, Homo sapien
cacttaaaagtaccagaggaggtgc

SEQ ID NO: 270696 - DNA, 25 bp, Homo sapien
gaaagccctatttcaaagcaaagga

SEQ ID NO: 270697 - DNA, 25 bp, Homo sapien
tactgagccgctgacttttttctga

SEQ ID NO: 270698 - DNA, 25 bp, Homo sapien
caatatctggtcctggaaatgtcag

SEQ ID NO: 270699 - DNA, 25 bp, Homo sapien
ggatatatacaacaagaggtcttca

SEQ ID NO: 270700 - DNA, 25 bp, Homo sapien
cttcagtgttcaaagtcagttgacc

SEQ ID NO: 270701 - DNA, 25 bp, Homo sapien
cagttgaccaacatcagctgtgttg

SEQ ID NO: 270702 - DNA, 25 bp, Homo sapien
gtcagttgaccaacatcagctgtgt

SEQ ID NO: 270703 - DNA, 25 bp, Homo sapien
tgaccaacatcagctgtgttgtgca

SEQ ID NO: 270704 - DNA, 25 bp, Homo sapien
tgaggcccaacctgttgccaaccat

SEQ ID NO: 270705 - DNA, 25 bp, Homo sapien
tgacctggccgagtttcttgctggc

SEQ ID NO: 270706 - DNA, 25 bp, Homo sapien
caacctgttgccaaccatgacctgg

SEQ ID NO: 270707 - DNA, 25 bp, Homo sapien
caaccatgacctggccgagtttctt

SEQ ID NO: 270708 - DNA, 25 bp, Homo sapien
tgcattctctctttcggacccagct

SEQ ID NO: 270709 - DNA, 25 bp, Homo sapien
tcttcctacatgctgtggtcatcag

SEQ ID NO: 270710 - DNA, 25 bp, Homo sapien
ttctctctttcggacccagcttctt

SEQ ID NO: 270711 - DNA, 25 bp, Homo sapien
tctctttggcaattgcattctctct

SEQ ID NO: 270712 - DNA, 25 bp, Homo sapien
agtgccaacagaggggtgatccagg

SEQ ID NO: 270713 - DNA, 25 bp, Homo sapien
gccaacagaggggtgatccagggga

SEQ ID NO: 270714 - DNA, 25 bp, Homo sapien
ccagtgccaacagaggggtgatcca

SEQ ID NO: 270715 - DNA, 25 bp, Homo sapien
acagaggggtgatccaggggagctg

SEQ ID NO: 270716 - DNA, 25 bp, Homo sapien
aggctgggtagagcttgtctggctt

SEQ ID NO: 270717 - DNA, 25 bp, Homo sapien
agcaaagcatgtcggccaggcagca

SEQ ID NO: 270718 - DNA, 25 bp, Homo sapien
cccccgcctcagtgcagtatgctcc

SEQ ID NO: 270719 - DNA, 25 bp, Homo sapien
agcagcaaagcatgtcggccaggca

SEQ ID NO: 270720 - DNA, 25 bp, Homo sapien
ccactgacacagtgtccagccacat

SEQ ID NO: 270721 - DNA, 25 bp, Homo sapien
cactgacacagtgtccagccacatc

SEQ ID NO: 270722 - DNA, 25 bp, Homo sapien
gccactgacacagtgtccagccaca

SEQ ID NO: 270723 - DNA, 25 bp, Homo sapien
actgacacagtgtccagccacatct

SEQ ID NO: 270724 - DNA, 25 bp, Homo sapien
tagccaggtgttcttagtagacatt

SEQ ID NO: 270725 - DNA, 25 bp, Homo sapien
ttactaaaagagctgttccaaaggc

SEQ ID NO: 270726 - DNA, 25 bp, Homo sapien
aaaatggtgcttctatctgcctcag

SEQ ID NO: 270727 - DNA, 25 bp, Homo sapien
aaacagacttggatctattttgaga

SEQ ID NO: 270728 - DNA, 25 bp, Homo sapien
ctgatgctggcagtctttctcccat

SEQ ID NO: 270729 - DNA, 25 bp, Homo sapien
atgctggcagtctttctcccatcat

SEQ ID NO: 270730 - DNA, 25 bp, Homo sapien
aaaatactctcctgatgctggcagt

SEQ ID NO: 270731 - DNA, 25 bp, Homo sapien
caaaatactctcctgatgctggcag

SEQ ID NO: 270732 - DNA, 25 bp, Homo sapien
gacagtattcatgaaaggagtaatg

SEQ ID NO: 270733 - DNA, 25 bp, Homo sapien
attcatgaaaggagtaatgaagagc

SEQ ID NO: 270734 - DNA, 25 bp, Homo sapien
tgaaaggagtaatgaagagcccctg

SEQ ID NO: 270735 - DNA, 25 bp, Homo sapien
agacagtattcatgaaaggagtaat

SEQ ID NO: 270736 - DNA, 25 bp, Homo sapien
gcaccgcgatgtgattgaaaacagc

SEQ ID NO: 270737 - DNA, 25 bp, Homo sapien
agtaggcaccgcgatgtgattgaaa

SEQ ID NO: 270738 - DNA, 25 bp, Homo sapien
taggcaccgcgatgtgattgaaaac

SEQ ID NO: 270739 - DNA, 25 bp, Homo sapien
gcagtaggcaccgcgatgtgattga

SEQ ID NO: 270740 - DNA, 25 bp, Homo sapien
tgttccatcatttcaggtacgagga

SEQ ID NO: 270741 - DNA, 25 bp, Homo sapien
tgctcattctgggtcgtggtattcc

SEQ ID NO: 270742 - DNA, 25 bp, Homo sapien
gtggtattccatcccgtggctttgg

SEQ ID NO: 270743 - DNA, 25 bp, Homo sapien
gtgtcttccatagccttttgttcca

SEQ ID NO: 270744 - DNA, 25 bp, Homo sapien
ttccctgagagacctggaaaaccca

SEQ ID NO: 270745 - DNA, 25 bp, Homo sapien
taattattccctgagagacctggaa

SEQ ID NO: 270746 - DNA, 25 bp, Homo sapien
tcctcataattattccctgagagac

SEQ ID NO: 270747 - DNA, 25 bp, Homo sapien
tccctgagagacctggaaaacccat

SEQ ID NO: 270748 - DNA, 25 bp, Homo sapien
tatgcgagcgtgtacacttagcatg

SEQ ID NO: 270749 - DNA, 25 bp, Homo sapien
tgtcacaagaaaccgaacagctttt

SEQ ID NO: 270750 - DNA, 25 bp, Homo sapien
tcactgggtatcaaaagggctaatg

SEQ ID NO: 270751 - DNA, 25 bp, Homo sapien
ggctgtttcagatcccgtgctggct

SEQ ID NO: 270752 - DNA, 25 bp, Homo sapien
gttgctgtttgggtttcgcatagcc

SEQ ID NO: 270753 - DNA, 25 bp, Homo sapien
gtttcgcatagccagacgttttaag

SEQ ID NO: 270754 - DNA, 25 bp, Homo sapien
tttgggtttcgcatagccagacgtt

SEQ ID NO: 270755 - DNA, 25 bp, Homo sapien
ctgtttgggtttcgcatagccagac

SEQ ID NO: 270756 - DNA, 25 bp, Homo sapien
gaagccttggtcatccaatcggaga

SEQ ID NO: 270757 - DNA, 25 bp, Homo sapien
cagacacagattgttccgagcctgg

SEQ ID NO: 270758 - DNA, 25 bp, Homo sapien
cggagaattgggttctattttgaca

SEQ ID NO: 270759 - DNA, 25 bp, Homo sapien
tggggtaatgccgaaaaacagacaa

SEQ ID NO: 270760 - DNA, 25 bp, Homo sapien
cctgagtcaggtgctatgaaggatc

SEQ ID NO: 270761 - DNA, 25 bp, Homo sapien
tagtgggttgcagcacttagataag

SEQ ID NO: 270762 - DNA, 25 bp, Homo sapien
tattcaaatgaagcaagcagtaaga

SEQ ID NO: 270763 - DNA, 25 bp, Homo sapien
gtaagaatttaaggcatcactgaaa

SEQ ID NO: 270764 - DNA, 25 bp, Homo sapien
gactttgagatgtcatcacagagga

SEQ ID NO: 270765 - DNA, 25 bp, Homo sapien
ggatgagcacaaggaccatcttctg

SEQ ID NO: 270766 - DNA, 25 bp, Homo sapien
gtacaagtctgttcaaatgcatcca

SEQ ID NO: 270767 - DNA, 25 bp, Homo sapien
cagacccagaaactgaattgaccag

SEQ ID NO: 270768 - DNA, 25 bp, Homo sapien
gaaggatagacatacttcagagcat

SEQ ID NO: 270769 - DNA, 25 bp, Homo sapien
agagcagcgagcaagtgctgcattt

SEQ ID NO: 270770 - DNA, 25 bp, Homo sapien
ttgtctacccactccaagagcagcg

SEQ ID NO: 270771 - DNA, 25 bp, Homo sapien
gtaactcttgtgtgacatctcccag

SEQ ID NO: 270772 - DNA, 25 bp, Homo sapien
aacaccctggccatgcctcttagac

SEQ ID NO: 270773 - DNA, 25 bp, Homo sapien
tggccatgcctcttagacctccagt

SEQ ID NO: 270774 - DNA, 25 bp, Homo sapien
agacctccagtctttccaggatttc

SEQ ID NO: 270775 - DNA, 25 bp, Homo sapien
tcttcaggtttattttccttggcca

SEQ ID NO: 270776 - DNA, 25 bp, Homo sapien
atgccagtttggcattaaagggaag

SEQ ID NO: 270777 - DNA, 25 bp, Homo sapien
gccagtttggcattaaagggaagga

SEQ ID NO: 270778 - DNA, 25 bp, Homo sapien
taaatgccagtttggcattaaaggg

SEQ ID NO: 270779 - DNA, 25 bp, Homo sapien
ccagtttggcattaaagggaaggat

SEQ ID NO: 270780 - DNA, 25 bp, Homo sapien
tctggagagcgtctgaaattactgg

SEQ ID NO: 270781 - DNA, 25 bp, Homo sapien
tctacaagatgtatgccaggttgac

SEQ ID NO: 270782 - DNA, 25 bp, Homo sapien
caggatctacaggatgcatgggctt

SEQ ID NO: 270783 - DNA, 25 bp, Homo sapien
cagggcttgagaacacgcaatggca

SEQ ID NO: 270784 - DNA, 25 bp, Homo sapien
gctgatgggtttagcttcttcactt

SEQ ID NO: 270785 - DNA, 25 bp, Homo sapien
tctgctgatgggtttagcttcttca

SEQ ID NO: 270786 - DNA, 25 bp, Homo sapien
tatttaattctgctgatgggtttag

SEQ ID NO: 270787 - DNA, 25 bp, Homo sapien
taattctgctgatgggtttagcttc

SEQ ID NO: 270788 - DNA, 25 bp, Homo sapien
gggaaggagttgttgcagaaagtaa

SEQ ID NO: 270789 - DNA, 25 bp, Homo sapien
gaaggagttgttgcagaaagtaact

SEQ ID NO: 270790 - DNA, 25 bp, Homo sapien
caaaggagaaggcaacggtctctct

SEQ ID NO: 270791 - DNA, 25 bp, Homo sapien
aaggagaaggcaacggtctctctgg

SEQ ID NO: 270792 - DNA, 25 bp, Homo sapien
tccaacctttcagcagggaatccag

SEQ ID NO: 270793 - DNA, 25 bp, Homo sapien
tatttccttcatatgcggacaggaa

SEQ ID NO: 270794 - DNA, 25 bp, Homo sapien
ccacatctccctattaattatcaca

SEQ ID NO: 270795 - DNA, 25 bp, Homo sapien
ggaatcctctgttccgtcaactgga

SEQ ID NO: 270796 - DNA, 25 bp, Homo sapien
tatcttcctgtctcattatcctgtg

SEQ ID NO: 270797 - DNA, 25 bp, Homo sapien
gtctcattatcctgtgcaccctcac

SEQ ID NO: 270798 - DNA, 25 bp, Homo sapien
ttcctgtctcattatcctgtgcacc

SEQ ID NO: 270799 - DNA, 25 bp, Homo sapien
tgtctcattatcctgtgcaccctca

SEQ ID NO: 270800 - DNA, 25 bp, Homo sapien
gtagcctgagatgattgagtccaaa

SEQ ID NO: 270801 - DNA, 25 bp, Homo sapien
tgtagcctgagatgattgagtccaa

SEQ ID NO: 270802 - DNA, 25 bp, Homo sapien
gcctgagatgattgagtccaaaccc

SEQ ID NO: 270803 - DNA, 25 bp, Homo sapien
tagcctgagatgattgagtccaaac

SEQ ID NO: 270804 - DNA, 25 bp, Homo sapien
tcagccagttggagtatggaagcct

SEQ ID NO: 270805 - DNA, 25 bp, Homo sapien
attgtcaccacccaagcacactagc

SEQ ID NO: 270806 - DNA, 25 bp, Homo sapien
aagcacactagctgctttgtccctt

SEQ ID NO: 270807 - DNA, 25 bp, Homo sapien
tcttcaattctgtggtaattcccag

SEQ ID NO: 270808 - DNA, 25 bp, Homo sapien
gcttgccagcaacagcatttgaggc

SEQ ID NO: 270809 - DNA, 25 bp, Homo sapien
acgagatagctggtgccacttccgc

SEQ ID NO: 270810 - DNA, 25 bp, Homo sapien
cagggcttgccagcaacagcatttg

SEQ ID NO: 270811 - DNA, 25 bp, Homo sapien
catttgaggcagcaacgagatagct

SEQ ID NO: 270812 - DNA, 25 bp, Homo sapien
ctaggatgcttctgcagaaaccaaa

SEQ ID NO: 270813 - DNA, 25 bp, Homo sapien
accaaagccaaaaacattccacagt

SEQ ID NO: 270814 - DNA, 25 bp, Homo sapien
aaccaaagccaaaaacattccacag

SEQ ID NO: 270815 - DNA, 25 bp, Homo sapien
gatgcttctgcagaaaccaaaacca

SEQ ID NO: 270816 - DNA, 25 bp, Homo sapien
tcatgtctatatctctggcccaagc

SEQ ID NO: 270817 - DNA, 25 bp, Homo sapien
gattcccatatcaggcaggtccttg

SEQ ID NO: 270818 - DNA, 25 bp, Homo sapien
caagcccctccacggctgatgtaag

SEQ ID NO: 270819 - DNA, 25 bp, Homo sapien
gagactggtccatgacaatccttgg

SEQ ID NO: 270820 - DNA, 25 bp, Homo sapien
aggtaggcagagtgctaaaggatcc

SEQ ID NO: 270821 - DNA, 25 bp, Homo sapien
ctataatagaggtaggcagagtgct

SEQ ID NO: 270822 - DNA, 25 bp, Homo sapien
gggttagcaggacccctccacctga

SEQ ID NO: 270823 - DNA, 25 bp, Homo sapien
tgctaaaggatcctggagagtttca

SEQ ID NO: 270824 - DNA, 25 bp, Homo sapien
tgtgagtcgctcatgagaaatcctt

SEQ ID NO: 270825 - DNA, 25 bp, Homo sapien
gagtcgctcatgagaaatccttcca

SEQ ID NO: 270826 - DNA, 25 bp, Homo sapien
catgtgagtcgctcatgagaaatcc

SEQ ID NO: 270827 - DNA, 25 bp, Homo sapien
gctcatgagaaatccttccattgac

SEQ ID NO: 270828 - DNA, 25 bp, Homo sapien
ctgacagcagacacattcaccttaa

SEQ ID NO: 270829 - DNA, 25 bp, Homo sapien
gctgaagatacctgtccctcagttt

SEQ ID NO: 270830 - DNA, 25 bp, Homo sapien
taattggaatgctgaagatacctgt

SEQ ID NO: 270831 - DNA, 25 bp, Homo sapien
gcagacacattcaccttaaattcta

SEQ ID NO: 270832 - DNA, 25 bp, Homo sapien
aaaactgtgatcagcttcccagact

SEQ ID NO: 270833 - DNA, 25 bp, Homo sapien
ctgtgatcagcttcccagactctta

SEQ ID NO: 270834 - DNA, 25 bp, Homo sapien
ttctcagcattgtcagcttcaaaac

SEQ ID NO: 270835 - DNA, 25 bp, Homo sapien
tcagcttcaaaactgtgatcagctt

SEQ ID NO: 270836 - DNA, 25 bp, Homo sapien
acccacaaatatggaggaccagttg

SEQ ID NO: 270837 - DNA, 25 bp, Homo sapien
tagggaggaatgacaaaacatctgt

SEQ ID NO: 270838 - DNA, 25 bp, Homo sapien
tgctctcgtccgttatacaaaatgg

SEQ ID NO: 270839 - DNA, 25 bp, Homo sapien
tacttgcttggtagaacgtttacaa

SEQ ID NO: 270840 - DNA, 25 bp, Homo sapien
tgctgcactgtggtaagatctgctc

SEQ ID NO: 270841 - DNA, 25 bp, Homo sapien
aggtagtcttgccacagccgctttg

SEQ ID NO: 270842 - DNA, 25 bp, Homo sapien
gggaaaatcgcttactcaagcttca

SEQ ID NO: 270843 - DNA, 25 bp, Homo sapien
gatctgctcagtcctaatttaccag

SEQ ID NO: 270844 - DNA, 25 bp, Homo sapien
agtgagttgacccatatttccagaa

SEQ ID NO: 270845 - DNA, 25 bp, Homo sapien
gagttgacccatatttccagaatcc

SEQ ID NO: 270846 - DNA, 25 bp, Homo sapien
tccagtgagttgacccatatttcca

SEQ ID NO: 270847 - DNA, 25 bp, Homo sapien
ccagtgagttgacccatatttccag

SEQ ID NO: 270848 - DNA, 25 bp, Homo sapien
tctcactcttgtacctgtgggccct

SEQ ID NO: 270849 - DNA, 25 bp, Homo sapien
actctcactcttgtacctgtgggcc

SEQ ID NO: 270850 - DNA, 25 bp, Homo sapien
tcactcttgtacctgtgggccctac

SEQ ID NO: 270851 - DNA, 25 bp, Homo sapien
tcactctcactcttgtacctgtggg

SEQ ID NO: 270852 - DNA, 25 bp, Homo sapien
tatcaaaatcccaacgttcagggac

SEQ ID NO: 270853 - DNA, 25 bp, Homo sapien
atcaaaatcccaacgttcagggaca

SEQ ID NO: 270854 - DNA, 25 bp, Homo sapien
caaaatcccaacgttcagggacatt

SEQ ID NO: 270855 - DNA, 25 bp, Homo sapien
aatcccaacgttcagggacattttg

SEQ ID NO: 270856 - DNA, 25 bp, Homo sapien
ccttgagatatttgctgttgaagtg

SEQ ID NO: 270857 - DNA, 25 bp, Homo sapien
tgagatatttgctgttgaagtgttt

SEQ ID NO: 270858 - DNA, 25 bp, Homo sapien
aattttaccttgagatatttgctgt

SEQ ID NO: 270859 - DNA, 25 bp, Homo sapien
ttgtgttgttcaattttaccttgag

SEQ ID NO: 270860 - DNA, 25 bp, Homo sapien
acctcactggcatgaagggagatgg

SEQ ID NO: 270861 - DNA, 25 bp, Homo sapien
agacgtatcctcttatacctcagca

SEQ ID NO: 270862 - DNA, 25 bp, Homo sapien
gtagtaagttcagtgcctcccatgt

SEQ ID NO: 270863 - DNA, 25 bp, Homo sapien
cagcaattgagttattagacgtatc

SEQ ID NO: 270864 - DNA, 25 bp, Homo sapien
tgatcagaacgatgaaatgaagtag

SEQ ID NO: 270865 - DNA, 25 bp, Homo sapien
gaaagaacattgtaatcaatctgag

SEQ ID NO: 270866 - DNA, 25 bp, Homo sapien
cattgtaatcaatctgaggctgaag

SEQ ID NO: 270867 - DNA, 25 bp, Homo sapien
ctttgacattgatcagaacgatgaa

SEQ ID NO: 270868 - DNA, 25 bp, Homo sapien
tcgtccgccccgttcccacagtcat

SEQ ID NO: 270869 - DNA, 25 bp, Homo sapien
cctttttggcatgaaggagtgatca

SEQ ID NO: 270870 - DNA, 25 bp, Homo sapien
gctcggggtaagcacttggtaagat

SEQ ID NO: 270871 - DNA, 25 bp, Homo sapien
cacagtgaaaagctcggggtaagca

SEQ ID NO: 270872 - DNA, 25 bp, Homo sapien
agcactcctgtgttaaggccacgct

SEQ ID NO: 270873 - DNA, 25 bp, Homo sapien
tttccatgcactgtgccaaatatgg

SEQ ID NO: 270874 - DNA, 25 bp, Homo sapien
ttaaggccacgctgttagcatttcc

SEQ ID NO: 270875 - DNA, 25 bp, Homo sapien
tatggtcgcccatccactagtgtca

SEQ ID NO: 270876 - DNA, 25 bp, Homo sapien
atcatgtccccatgattttgtggat

SEQ ID NO: 270877 - DNA, 25 bp, Homo sapien
aaccaatcatgtccccatgattttg

SEQ ID NO: 270878 - DNA, 25 bp, Homo sapien
tgcaaaccaatcatgtccccatgat

SEQ ID NO: 270879 - DNA, 25 bp, Homo sapien
tacctcaatcttctcaatggcattt

SEQ ID NO: 270880 - DNA, 25 bp, Homo sapien
tcatcggcacagactttaagtcacc

SEQ ID NO: 270881 - DNA, 25 bp, Homo sapien
cattgttagaaatcatcggcacaga

SEQ ID NO: 270882 - DNA, 25 bp, Homo sapien
tttacacattccaattcagtttctt

SEQ ID NO: 270883 - DNA, 25 bp, Homo sapien
cacagcattgtggatactgttttag

SEQ ID NO: 270884 - DNA, 25 bp, Homo sapien
atctggaagactgtggattttgttt

SEQ ID NO: 270885 - DNA, 25 bp, Homo sapien
taagttttgtgtatttgatgaaaac

SEQ ID NO: 270886 - DNA, 25 bp, Homo sapien
gtatttgatgaaaactttatctgga

SEQ ID NO: 270887 - DNA, 25 bp, Homo sapien
actttatctggaagactgtggattt

SEQ ID NO: 270888 - DNA, 25 bp, Homo sapien
aatatttgcagattacataatccaa

SEQ ID NO: 270889 - DNA, 25 bp, Homo sapien
ggatatgtgtctaatgcaattatgc

SEQ ID NO: 270890 - DNA, 25 bp, Homo sapien
cctggatatgtgtctaatgcaatta

SEQ ID NO: 270891 - DNA, 25 bp, Homo sapien
tgtgtctaatgcaattatgctgaag

SEQ ID NO: 270892 - DNA, 25 bp, Homo sapien
gccaagttagctgatgtaagtcttt

SEQ ID NO: 270893 - DNA, 25 bp, Homo sapien
ttccaggtctgagggttgtgatgca

SEQ ID NO: 270894 - DNA, 25 bp, Homo sapien
gttgtgatgcagttgtggttgagat

SEQ ID NO: 270895 - DNA, 25 bp, Homo sapien
agtctttgaatattccaggtctgag

SEQ ID NO: 270896 - DNA, 25 bp, Homo sapien
tcccgtaaacaagcgctgtgaaatt

SEQ ID NO: 270897 - DNA, 25 bp, Homo sapien
aatttaatcccgtaaacaagcgctg

SEQ ID NO: 270898 - DNA, 25 bp, Homo sapien
gtaaacaagcgctgtgaaattctgg

SEQ ID NO: 270899 - DNA, 25 bp, Homo sapien
taatcccgtaaacaagcgctgtgaa

SEQ ID NO: 270900 - DNA, 25 bp, Homo sapien
agcttctaagtagttattaaccata

SEQ ID NO: 270901 - DNA, 25 bp, Homo sapien
gcttctaagtagttattaaccatag

SEQ ID NO: 270902 - DNA, 25 bp, Homo sapien
ttctaagtagttattaaccatagac

SEQ ID NO: 270903 - DNA, 25 bp, Homo sapien
gagcttctaagtagttattaaccat

SEQ ID NO: 270904 - DNA, 25 bp, Homo sapien
gagatactttattctattgccttcc

SEQ ID NO: 270905 - DNA, 25 bp, Homo sapien
tgtgagatactttattctattgcct

SEQ ID NO: 270906 - DNA, 25 bp, Homo sapien
agcactgtgagcgaatcgcacgaca

SEQ ID NO: 270907 - DNA, 25 bp, Homo sapien
gaatcgcacgacagaaacgtagaat

SEQ ID NO: 270908 - DNA, 25 bp, Homo sapien
aaccaatttgatttctaggcagaaa

SEQ ID NO: 270909 - DNA, 25 bp, Homo sapien
accaatttgatttctaggcagaaac

SEQ ID NO: 270910 - DNA, 25 bp, Homo sapien
aaaggtgaggtgatagttccgttat

SEQ ID NO: 270911 - DNA, 25 bp, Homo sapien
cgttatcgtattgctagacagatcc

SEQ ID NO: 270912 - DNA, 25 bp, Homo sapien
tagttccgttatcgtattgctagac

SEQ ID NO: 270913 - DNA, 25 bp, Homo sapien
ggtgatagttccgttatcgtattgc

SEQ ID NO: 270914 - DNA, 25 bp, Homo sapien
gagactgaagttgtttaagactttc

SEQ ID NO: 270915 - DNA, 25 bp, Homo sapien
taagactttcaaactggttcttgtg

SEQ ID NO: 270916 - DNA, 25 bp, Homo sapien
ctggttcttgtgaagatacataaga

SEQ ID NO: 270917 - DNA, 25 bp, Homo sapien
gactgaagttgtttaagactttcaa

SEQ ID NO: 270918 - DNA, 25 bp, Homo sapien
ctggaaaatacacacgataggttta

SEQ ID NO: 270919 - DNA, 25 bp, Homo sapien
gtgttgagatgaaacgttttaataa

SEQ ID NO: 270920 - DNA, 25 bp, Homo sapien
gagatgaaacgttttaataattgca

SEQ ID NO: 270921 - DNA, 25 bp, Homo sapien
cacgataggtttaatggtgttgaga

SEQ ID NO: 270922 - DNA, 25 bp, Homo sapien
ttgaaacattcgtgtgtttatattt

SEQ ID NO: 270923 - DNA, 25 bp, Homo sapien
tgaaacattcgtgtgtttatatttg

SEQ ID NO: 270924 - DNA, 25 bp, Homo sapien
gttgaaacattcgtgtgtttatatt

SEQ ID NO: 270925 - DNA, 25 bp, Homo sapien
gtttatatttggaatctctatcctt

SEQ ID NO: 270926 - DNA, 25 bp, Homo sapien
aacagcgtgtttccagagagaaggg

SEQ ID NO: 270927 - DNA, 25 bp, Homo sapien
ctcttattgggcctcaattggataa

SEQ ID NO: 270928 - DNA, 25 bp, Homo sapien
gcctcaattggataaacagcgtgtt

SEQ ID NO: 270929 - DNA, 25 bp, Homo sapien
tggataaacagcgtgtttccagaga

SEQ ID NO: 270930 - DNA, 25 bp, Homo sapien
taaacaccgaggtctactgacttta

SEQ ID NO: 270931 - DNA, 25 bp, Homo sapien
aatgcattctcactggatctgggaa

SEQ ID NO: 270932 - DNA, 25 bp, Homo sapien
gcagctgccttaaacacagatttct

SEQ ID NO: 270933 - DNA, 25 bp, Homo sapien
gacctctgacactaggaaaatgcat

SEQ ID NO: 270934 - DNA, 25 bp, Homo sapien
gaacctacagttgcagtcctatcgg

SEQ ID NO: 270935 - DNA, 25 bp, Homo sapien
gagttcttcatgaaacactaggcag

SEQ ID NO: 270936 - DNA, 25 bp, Homo sapien
taggtatacaacttcactaggtttg

SEQ ID NO: 270937 - DNA, 25 bp, Homo sapien
gggctgcaactccatgctaggtata

SEQ ID NO: 270938 - DNA, 25 bp, Homo sapien
gagcataggagcagtatcgaaagtt

SEQ ID NO: 270939 - DNA, 25 bp, Homo sapien
tctgaggatattgttagccaagagg

SEQ ID NO: 270940 - DNA, 25 bp, Homo sapien
caagggcatacatattcggacatgg

SEQ ID NO: 270941 - DNA, 25 bp, Homo sapien
tgaagaaatgccgtccgtcaagggc

SEQ ID NO: 270942 - DNA, 25 bp, Homo sapien
tgaaacagtgtatgtcatcagtttc

SEQ ID NO: 270943 - DNA, 25 bp, Homo sapien
aacagtgtatgtcatcagtttccaa

SEQ ID NO: 270944 - DNA, 25 bp, Homo sapien
aagaattgaaacagtgtatgtcatc

SEQ ID NO: 270945 - DNA, 25 bp, Homo sapien
gaattgaaacagtgtatgtcatcag

SEQ ID NO: 270946 - DNA, 25 bp, Homo sapien
caagtaggtcagtagcagaacagag

SEQ ID NO: 270947 - DNA, 25 bp, Homo sapien
gaggtctgccgttttccaggtcgaa

SEQ ID NO: 270948 - DNA, 25 bp, Homo sapien
taaaaatcccgccatccagatgcaa

SEQ ID NO: 270949 - DNA, 25 bp, Homo sapien
gagacttcggtggacagcatggcca

SEQ ID NO: 270950 - DNA, 25 bp, Homo sapien
taaggtttccaactaaggcaacagc

SEQ ID NO: 270951 - DNA, 25 bp, Homo sapien
gaccttgatagtactagggagccac

SEQ ID NO: 270952 - DNA, 25 bp, Homo sapien
gagtcaaaagaagatcgccccaaag

SEQ ID NO: 270953 - DNA, 25 bp, Homo sapien
tctctgagtggaggtgtacacagtc

SEQ ID NO: 270954 - DNA, 25 bp, Homo sapien
tgagcctgggaatccactatgtctt

SEQ ID NO: 270955 - DNA, 25 bp, Homo sapien
cagcctgtaatactctggatcctgg

SEQ ID NO: 270956 - DNA, 25 bp, Homo sapien
gatctgttgtttctcccgtacctaa

SEQ ID NO: 270957 - DNA, 25 bp, Homo sapien
ggagagtctctattaagtgcaccta

SEQ ID NO: 270958 - DNA, 25 bp, Homo sapien
aaaatatgaatctgaacctagactg

SEQ ID NO: 270959 - DNA, 25 bp, Homo sapien
gaaatcatagtataaagccatacgg

SEQ ID NO: 270960 - DNA, 25 bp, Homo sapien
tataaaactagttgtcttaggcctc

SEQ ID NO: 270961 - DNA, 25 bp, Homo sapien
tatgtaagattggtgaagtctaggg

SEQ ID NO: 270962 - DNA, 25 bp, Homo sapien
ttctgtggtctgcaaggcggttttt

SEQ ID NO: 270963 - DNA, 25 bp, Homo sapien
gaacatagtaatataggaaaacaca

SEQ ID NO: 270964 - DNA, 25 bp, Homo sapien
tggaacagaacatagtaatatagga

SEQ ID NO: 270965 - DNA, 25 bp, Homo sapien
caaggcggttttttgaatggaacag

SEQ ID NO: 270966 - DNA, 25 bp, Homo sapien
aaaaagaaacgatttgcaacagcca

SEQ ID NO: 270967 - DNA, 25 bp, Homo sapien
tttaactacaaatacaggaatccag

SEQ ID NO: 270968 - DNA, 25 bp, Homo sapien
tataaaaaagaaacgatttgcaaca

SEQ ID NO: 270969 - DNA, 25 bp, Homo sapien
agaaacgatttgcaacagccacctc

SEQ ID NO: 270970 - DNA, 25 bp, Homo sapien
aaaagttggttgtgagagtatagag

SEQ ID NO: 270971 - DNA, 25 bp, Homo sapien
ggaagaggagtcctctatccacaca

SEQ ID NO: 270972 - DNA, 25 bp, Homo sapien
ccacacaatggatgtagataaactt

SEQ ID NO: 270973 - DNA, 25 bp, Homo sapien
caaagcactgttaactggaaggaaa

SEQ ID NO: 270974 - DNA, 25 bp, Homo sapien
tgaaagaccacacagtgccaacctg

SEQ ID NO: 270975 - DNA, 25 bp, Homo sapien
cctcagcatggttggtagatagtac

SEQ ID NO: 270976 - DNA, 25 bp, Homo sapien
cagtgcaacccgatgtgaaagacca

SEQ ID NO: 270977 - DNA, 25 bp, Homo sapien
tttaggtagtccactgaaagtccag

SEQ ID NO: 270978 - DNA, 25 bp, Homo sapien
gtgtccaatttgtttgtgccctggg

SEQ ID NO: 270979 - DNA, 25 bp, Homo sapien
caatagggatactgctctaaagaaa

SEQ ID NO: 270980 - DNA, 25 bp, Homo sapien
cattgtgagtatgcaaacagtccca

SEQ ID NO: 270981 - DNA, 25 bp, Homo sapien
cagaacttgccagcaatagggatac

SEQ ID NO: 270982 - DNA, 25 bp, Homo sapien
aaacaagttaggaagcaattcatca

SEQ ID NO: 270983 - DNA, 25 bp, Homo sapien
aatgtcagcaaacctggaaaacaag

SEQ ID NO: 270984 - DNA, 25 bp, Homo sapien
gaaaggtgatagtgctacctgtaca

SEQ ID NO: 270985 - DNA, 25 bp, Homo sapien
gaggcatttcagcaattgcaatgga

SEQ ID NO: 270986 - DNA, 25 bp, Homo sapien
gtgctacctgtacataaagctcaaa

SEQ ID NO: 270987 - DNA, 25 bp, Homo sapien
aagctcctgaccatcaagaggcatt

SEQ ID NO: 270988 - DNA, 25 bp, Homo sapien
atgatgccatggagacctgctgaat

SEQ ID NO: 270989 - DNA, 25 bp, Homo sapien
ctggcagcagagtcatccttaagag

SEQ ID NO: 270990 - DNA, 25 bp, Homo sapien
taaaccttggggtgatgggcctgct

SEQ ID NO: 270991 - DNA, 25 bp, Homo sapien
tgatgggcctgcttttgtggcttca

SEQ ID NO: 270992 - DNA, 25 bp, Homo sapien
cgggagctctgtattgcttactaac

SEQ ID NO: 270993 - DNA, 25 bp, Homo sapien
gagcaaatctgtagcaaatcaccaa

SEQ ID NO: 270994 - DNA, 25 bp, Homo sapien
tctatcatgtgcactctcgggagct

SEQ ID NO: 270995 - DNA, 25 bp, Homo sapien
taaagtcttgaaaatgtagcatgag

SEQ ID NO: 270996 - DNA, 25 bp, Homo sapien
gcgccgagcgctggagccccgggaa

SEQ ID NO: 270997 - DNA, 25 bp, Homo sapien
gccaccgccggaggctacttcgctg

SEQ ID NO: 270998 - DNA, 25 bp, Homo sapien
gccgccgtagttgccaccgccggag

SEQ ID NO: 270999 - DNA, 25 bp, Homo sapien
aggctacttcgctgcgccgagcgct

SEQ ID NO: 271000 - DNA, 25 bp, Homo sapien
cggcgcccaacgagacccacagcat

SEQ ID NO: 271001 - DNA, 25 bp, Homo sapien
ggacaccggcgcccaacgagaccca

SEQ ID NO: 271002 - DNA, 25 bp, Homo sapien
accggcgcccaacgagacccacagc

SEQ ID NO: 271003 - DNA, 25 bp, Homo sapien
acaccggcgcccaacgagacccaca

SEQ ID NO: 271004 - DNA, 25 bp, Homo sapien
ccggggcgaggggcaagcggggctg

SEQ ID NO: 271005 - DNA, 25 bp, Homo sapien
ggcgaggggcaagcggggctgggta

SEQ ID NO: 271006 - DNA, 25 bp, Homo sapien
cggggcgaggggcaagcggggctgg

SEQ ID NO: 271007 - DNA, 25 bp, Homo sapien
gcgaggggcaagcggggctgggtac

SEQ ID NO: 271008 - DNA, 25 bp, Homo sapien
gggcattgactacctgctgcactgt

SEQ ID NO: 271009 - DNA, 25 bp, Homo sapien
ttttctcaaggaaggtcccgtgtca

SEQ ID NO: 271010 - DNA, 25 bp, Homo sapien
aatgctgctcaggtacgggttccca

SEQ ID NO: 271011 - DNA, 25 bp, Homo sapien
ggtcgagtccattctacgggaagat

SEQ ID NO: 271012 - DNA, 25 bp, Homo sapien
cgagtgtgccagtgtgaacgctgca

SEQ ID NO: 271013 - DNA, 25 bp, Homo sapien
gttggtacaagagaacgagtgtgcc

SEQ ID NO: 271014 - DNA, 25 bp, Homo sapien
tctttaagtgccagtacgggaaaca

SEQ ID NO: 271015 - DNA, 25 bp, Homo sapien
aacacttggttacctgtcttctggg

SEQ ID NO: 271016 - DNA, 25 bp, Homo sapien
atacccagcccctattttcatactt

SEQ ID NO: 271017 - DNA, 25 bp, Homo sapien
gcccctattttcatacttttgatag

SEQ ID NO: 271018 - DNA, 25 bp, Homo sapien
catacttttgatagacagaaaagtc

SEQ ID NO: 271019 - DNA, 25 bp, Homo sapien
tattttcatacttttgatagacaga

SEQ ID NO: 271020 - DNA, 25 bp, Homo sapien
ggaatgcagacggagcatccgtttc

SEQ ID NO: 271021 - DNA, 25 bp, Homo sapien
gaatgcagacggagcatccgtttca

SEQ ID NO: 271022 - DNA, 25 bp, Homo sapien
atgcagacggagcatccgtttcaaa

SEQ ID NO: 271023 - DNA, 25 bp, Homo sapien
ctggaatgcagacggagcatccgtt

SEQ ID NO: 271024 - DNA, 25 bp, Homo sapien
tcatcaaactctgggtggatttttt

SEQ ID NO: 271025 - DNA, 25 bp, Homo sapien
ctcatcaaactctgggtggattttt

SEQ ID NO: 271026 - DNA, 25 bp, Homo sapien
tcctcatcaaactctgggtggattt

SEQ ID NO: 271027 - DNA, 25 bp, Homo sapien
cctcatcaaactctgggtggatttt

SEQ ID NO: 271028 - DNA, 25 bp, Homo sapien
gacatcctttatgaaacgggtaaca

SEQ ID NO: 271029 - DNA, 25 bp, Homo sapien
gggctcattccactaactgtgaagc

SEQ ID NO: 271030 - DNA, 25 bp, Homo sapien
tggcacaaggttaatgaggcctagc

SEQ ID NO: 271031 - DNA, 25 bp, Homo sapien
cgggtaacaggacagatgaaatgat

SEQ ID NO: 271032 - DNA, 25 bp, Homo sapien
gactagataccctattgcacttggg

SEQ ID NO: 271033 - DNA, 25 bp, Homo sapien
ggtgctgcctcttgagactagatac

SEQ ID NO: 271034 - DNA, 25 bp, Homo sapien
gacataaggctctcaaacaatggga

SEQ ID NO: 271035 - DNA, 25 bp, Homo sapien
taaaacatgagactggataaactgg

SEQ ID NO: 271036 - DNA, 25 bp, Homo sapien
caacaagtggcaagactggacctct

SEQ ID NO: 271037 - DNA, 25 bp, Homo sapien
aagtggccgtattgtgccacttctc

SEQ ID NO: 271038 - DNA, 25 bp, Homo sapien
gttgagtttcaacaagtggcaagac

SEQ ID NO: 271039 - DNA, 25 bp, Homo sapien
ccagtgaagcggcattggcagttga

SEQ ID NO: 271040 - DNA, 25 bp, Homo sapien
gatgctctcagacagtgtaggtgaa

SEQ ID NO: 271041 - DNA, 25 bp, Homo sapien
aatgagatagccaggcaactggtgc

SEQ ID NO: 271042 - DNA, 25 bp, Homo sapien
tggtgggcagcaggatgatgctctc

SEQ ID NO: 271043 - DNA, 25 bp, Homo sapien
ttagtctaggtccatgaagtgcttt

SEQ ID NO: 271044 - DNA, 25 bp, Homo sapien
gacgatggcttacatgaccatgcat

SEQ ID NO: 271045 - DNA, 25 bp, Homo sapien
tgaccatgcatctgggtcgacccat

SEQ ID NO: 271046 - DNA, 25 bp, Homo sapien
ggtcgacccatgatctgagctcagc

SEQ ID NO: 271047 - DNA, 25 bp, Homo sapien
aggcaaacagacgatggcttacatg

SEQ ID NO: 271048 - DNA, 25 bp, Homo sapien
ttgaatccacggatgaagaacccaa

SEQ ID NO: 271049 - DNA, 25 bp, Homo sapien
gatacacaaggccaactgtatgtgg

SEQ ID NO: 271050 - DNA, 25 bp, Homo sapien
cacggatgaagaacccaaggataca

SEQ ID NO: 271051 - DNA, 25 bp, Homo sapien
ggccaactgtatgtggaaattttaa

SEQ ID NO: 271052 - DNA, 25 bp, Homo sapien
aagggtgccatctgctatctcggcc

SEQ ID NO: 271053 - DNA, 25 bp, Homo sapien
gtcacagaaagggtgccatctgcta

SEQ ID NO: 271054 - DNA, 25 bp, Homo sapien
cacagaaagggtgccatctgctatc

SEQ ID NO: 271055 - DNA, 25 bp, Homo sapien
gaaagggtgccatctgctatctcgg

SEQ ID NO: 271056 - DNA, 25 bp, Homo sapien
ttccacgtttcgcaggtgcctcgac

SEQ ID NO: 271057 - DNA, 25 bp, Homo sapien
ttgaatttcaacctcctctccacaa

SEQ ID NO: 271058 - DNA, 25 bp, Homo sapien
cccctttgggcactgtcaggatgtg

SEQ ID NO: 271059 - DNA, 25 bp, Homo sapien
aggatgtgtcggtcacccagcaact

SEQ ID NO: 271060 - DNA, 25 bp, Homo sapien
tcacagtccactgagagaggaacat

SEQ ID NO: 271061 - DNA, 25 bp, Homo sapien
ccagtgtgaggagaatgtgagttcc

SEQ ID NO: 271062 - DNA, 25 bp, Homo sapien
tgccctggcacaagcacttccagtg

SEQ ID NO: 271063 - DNA, 25 bp, Homo sapien
cattggagagcacacaatttgtgag

SEQ ID NO: 271064 - DNA, 25 bp, Homo sapien
caggggccccagtcactggaactag

SEQ ID NO: 271065 - DNA, 25 bp, Homo sapien
ctggaactagactttcggatgtggc

SEQ ID NO: 271066 - DNA, 25 bp, Homo sapien
ccttcttgacaatgtagacaggcct

SEQ ID NO: 271067 - DNA, 25 bp, Homo sapien
tttcggatgtggcattctcacttcc

SEQ ID NO: 271068 - DNA, 25 bp, Homo sapien
tccacagccgacaacgggtatatgg

SEQ ID NO: 271069 - DNA, 25 bp, Homo sapien
cacagccgacaacgggtatatggga

SEQ ID NO: 271070 - DNA, 25 bp, Homo sapien
aaatccacagccgacaacgggtata

SEQ ID NO: 271071 - DNA, 25 bp, Homo sapien
tcagaaatccacagccgacaacggg

SEQ ID NO: 271072 - DNA, 25 bp, Homo sapien
cagacatttttggaagaccagccat

SEQ ID NO: 271073 - DNA, 25 bp, Homo sapien
ttccaccaggctgatgcatttggct

SEQ ID NO: 271074 - DNA, 25 bp, Homo sapien
caccaggctgatgcatttggctgag

SEQ ID NO: 271075 - DNA, 25 bp, Homo sapien
ccaggctgatgcatttggctgaggc

SEQ ID NO: 271076 - DNA, 25 bp, Homo sapien
tcatcgcatgaatgaggacccagca

SEQ ID NO: 271077 - DNA, 25 bp, Homo sapien
tacagctactctgagcacgaatcgc

SEQ ID NO: 271078 - DNA, 25 bp, Homo sapien
gtttgggctacagtctcatcgcatg

SEQ ID NO: 271079 - DNA, 25 bp, Homo sapien
tatggcgggcttgatcacaaattca

SEQ ID NO: 271080 - DNA, 25 bp, Homo sapien
tgtctggcaccatgctatgttcaag

SEQ ID NO: 271081 - DNA, 25 bp, Homo sapien
gtctggcaccatgctatgttcaaga

SEQ ID NO: 271082 - DNA, 25 bp, Homo sapien
gtgtctggcaccatgctatgttcaa

SEQ ID NO: 271083 - DNA, 25 bp, Homo sapien
ccccagactctgatgttctcatgct

SEQ ID NO: 271084 - DNA, 25 bp, Homo sapien
gccgccgccccagactctgatgttc

SEQ ID NO: 271085 - DNA, 25 bp, Homo sapien
agactctgatgttctcatgctttac

SEQ ID NO: 271086 - DNA, 25 bp, Homo sapien
cgccgccgccccagactctgatgtt

SEQ ID NO: 271087 - DNA, 25 bp, Homo sapien
caaaaatccagaaagccaaacccag

SEQ ID NO: 271088 - DNA, 25 bp, Homo sapien
ctgaacaaaaatccagaaagccaaa

SEQ ID NO: 271089 - DNA, 25 bp, Homo sapien
tccagaaagccaaacccagcggcag

SEQ ID NO: 271090 - DNA, 25 bp, Homo sapien
aaaatccagaaagccaaacccagcg

SEQ ID NO: 271091 - DNA, 25 bp, Homo sapien
ataaattgctgtcatcaactgccat

SEQ ID NO: 271092 - DNA, 25 bp, Homo sapien
ggcaggctactccttcttgatgatt

SEQ ID NO: 271093 - DNA, 25 bp, Homo sapien
catttcctatgagtagttcaggtgg

SEQ ID NO: 271094 - DNA, 25 bp, Homo sapien
caggtgaatgggatccaagttctta

SEQ ID NO: 271095 - DNA, 25 bp, Homo sapien
tctcttcttcgggtgcctcaggtga

SEQ ID NO: 271096 - DNA, 25 bp, Homo sapien
catctgtcccccataaagaaggctc

SEQ ID NO: 271097 - DNA, 25 bp, Homo sapien
gaaggctccaataaatcgatcagcc

SEQ ID NO: 271098 - DNA, 25 bp, Homo sapien
gatcagccataacaaaaaggccact

SEQ ID NO: 271099 - DNA, 25 bp, Homo sapien
aaatcgatcagccataacaaaaagg

SEQ ID NO: 271100 - DNA, 25 bp, Homo sapien
tggatgccctgaccataagttctgc

SEQ ID NO: 271101 - DNA, 25 bp, Homo sapien
gacagaggctgtttacccgcaggaa

SEQ ID NO: 271102 - DNA, 25 bp, Homo sapien
cccgcaggaaggtcagaaagcatct

SEQ ID NO: 271103 - DNA, 25 bp, Homo sapien
tcctcttggtcgtgaacagtcctca

SEQ ID NO: 271104 - DNA, 25 bp, Homo sapien
caggacgcctaaggaaagggtgtgt

SEQ ID NO: 271105 - DNA, 25 bp, Homo sapien
ccaaggacgcggcaaccagggagca

SEQ ID NO: 271106 - DNA, 25 bp, Homo sapien
acgcggcaaccagggagcaggaatc

SEQ ID NO: 271107 - DNA, 25 bp, Homo sapien
aatcgggggacgcaggacgcctaag

SEQ ID NO: 271108 - DNA, 25 bp, Homo sapien
tgcatcgccatatttgaacttgtgg

SEQ ID NO: 271109 - DNA, 25 bp, Homo sapien
ctgcatcgccatatttgaacttgtg

SEQ ID NO: 271110 - DNA, 25 bp, Homo sapien
tctggctctggcaatatcatggagg

SEQ ID NO: 271111 - DNA, 25 bp, Homo sapien
ctagacgcccctgggcctaagcttc

SEQ ID NO: 271112 - DNA, 25 bp, Homo sapien
tgggcctaagcttccggccagggat

SEQ ID NO: 271113 - DNA, 25 bp, Homo sapien
aatatcatggaggatcatgctggcc

SEQ ID NO: 271114 - DNA, 25 bp, Homo sapien
cgagctcgctgtggtctccgctggg

SEQ ID NO: 271115 - DNA, 25 bp, Homo sapien
actggcgatccggacgacgagctcg

SEQ ID NO: 271116 - DNA, 25 bp, Homo sapien
ttccagactggcgatccggacgacg

SEQ ID NO: 271117 - DNA, 25 bp, Homo sapien
cagactggcgatccggacgacgagc

SEQ ID NO: 271118 - DNA, 25 bp, Homo sapien
tcagccaggtctctctggttgtcca

SEQ ID NO: 271119 - DNA, 25 bp, Homo sapien
cagccaggtctctctggttgtccac

SEQ ID NO: 271120 - DNA, 25 bp, Homo sapien
gttcagccaggtctctctggttgtc

SEQ ID NO: 271121 - DNA, 25 bp, Homo sapien
ttcagccaggtctctctggttgtcc

SEQ ID NO: 271122 - DNA, 25 bp, Homo sapien
gcccagtggccgggcaagctcttct

SEQ ID NO: 271123 - DNA, 25 bp, Homo sapien
tggtgtggctagcttcttggccggg

SEQ ID NO: 271124 - DNA, 25 bp, Homo sapien
tcatcctctgctggtgtggctagct

SEQ ID NO: 271125 - DNA, 25 bp, Homo sapien
gctggtgtggctagcttcttggccg

SEQ ID NO: 271126 - DNA, 25 bp, Homo sapien
gtggctagcttcttggccgggggct

SEQ ID NO: 271127 - DNA, 25 bp, Homo sapien
tgcagccgctcctcattggtaatgc

SEQ ID NO: 271128 - DNA, 25 bp, Homo sapien
cctcattggtaatgccgcagctgtg

SEQ ID NO: 271129 - DNA, 25 bp, Homo sapien
taatgccgcagctgtgttgcctcat

SEQ ID NO: 271130 - DNA, 25 bp, Homo sapien
gccgctcctcattggtaatgccgca

SEQ ID NO: 271131 - DNA, 25 bp, Homo sapien
caccagcgcgggcttcttggccttc

SEQ ID NO: 271132 - DNA, 25 bp, Homo sapien
ggacttggccaccagcgcgggcttc

SEQ ID NO: 271133 - DNA, 25 bp, Homo sapien
ccaaggcttgaagtccagcaggatg

SEQ ID NO: 271134 - DNA, 25 bp, Homo sapien
ttggccaccagcgcgggcttcttgg

SEQ ID NO: 271135 - DNA, 25 bp, Homo sapien
aggtgggccgtgtccgtctcatcgt

SEQ ID NO: 271136 - DNA, 25 bp, Homo sapien
gcaccagcccgtccggctggatgaa

SEQ ID NO: 271137 - DNA, 25 bp, Homo sapien
cggctggatgaagcgcacacaggcc

SEQ ID NO: 271138 - DNA, 25 bp, Homo sapien
caggtgggccgtgtccgtctcatcg

SEQ ID NO: 271139 - DNA, 25 bp, Homo sapien
catacactcttcaaacttggtgatc

SEQ ID NO: 271140 - DNA, 25 bp, Homo sapien
tgcatacactcttcaaacttggtga

SEQ ID NO: 271141 - DNA, 25 bp, Homo sapien
cttgtcctccaccacacgctgaatc

SEQ ID NO: 271142 - DNA, 25 bp, Homo sapien
tctgcatacactcttcaaacttggt

SEQ ID NO: 271143 - DNA, 25 bp, Homo sapien
tcagggcctcatgcacgcgggcaca

SEQ ID NO: 271144 - DNA, 25 bp, Homo sapien
tctcagtttttaattgtgtcagggc

SEQ ID NO: 271145 - DNA, 25 bp, Homo sapien
ttttaattgtgtcagggcctcatgc

SEQ ID NO: 271146 - DNA, 25 bp, Homo sapien
tgccggtctcagtttttaattgtgt

SEQ ID NO: 271147 - DNA, 25 bp, Homo sapien
aatctgtctgtgaggatggtgacca

SEQ ID NO: 271148 - DNA, 25 bp, Homo sapien
tgtgcactaggctaaggctcacctg

SEQ ID NO: 271149 - DNA, 25 bp, Homo sapien
ccagttgaggtcttgatgctgtgca

SEQ ID NO: 271150 - DNA, 25 bp, Homo sapien
acagattgttttccatacgcctcag

SEQ ID NO: 271151 - DNA, 25 bp, Homo sapien
tgaacccacacacagtacagaatag

SEQ ID NO: 271152 - DNA, 25 bp, Homo sapien
gagcaaagtgctcccagatgccatg

SEQ ID NO: 271153 - DNA, 25 bp, Homo sapien
gcagaaacttaagcacaaggaccca

SEQ ID NO: 271154 - DNA, 25 bp, Homo sapien
gattgagcctgagactatgtatgga

SEQ ID NO: 271155 - DNA, 25 bp, Homo sapien
aaaagtgaccttgcacactgcccaa

SEQ ID NO: 271156 - DNA, 25 bp, Homo sapien
caaaacattggcttgagagctagga

SEQ ID NO: 271157 - DNA, 25 bp, Homo sapien
gccaaccagagtgcaaaaagtgacc

SEQ ID NO: 271158 - DNA, 25 bp, Homo sapien
tattgaatagcctggagccaaccag

SEQ ID NO: 271159 - DNA, 25 bp, Homo sapien
atgtaggcaaggttttcacactggg

SEQ ID NO: 271160 - DNA, 25 bp, Homo sapien
gatttccagcgtaaagtcctccaga

SEQ ID NO: 271161 - DNA, 25 bp, Homo sapien
gacatcagtgacactagctgacgtt

SEQ ID NO: 271162 - DNA, 25 bp, Homo sapien
tcctgagatttccagcgtaaagtcc

SEQ ID NO: 271163 - DNA, 25 bp, Homo sapien
tatgcgggaccatttggacagtttc

SEQ ID NO: 271164 - DNA, 25 bp, Homo sapien
tgtttcctttatgcgggaccatttg

SEQ ID NO: 271165 - DNA, 25 bp, Homo sapien
tgcattctcccacaggaaccatcag

SEQ ID NO: 271166 - DNA, 25 bp, Homo sapien
taggtacactgaaacgactgtgaag

SEQ ID NO: 271167 - DNA, 25 bp, Homo sapien
tcttccagtgtgagcatccctcaat

SEQ ID NO: 271168 - DNA, 25 bp, Homo sapien
tctgctcttccagtgtgagcatccc

SEQ ID NO: 271169 - DNA, 25 bp, Homo sapien
cagtgtgagcatccctcaatccaac

SEQ ID NO: 271170 - DNA, 25 bp, Homo sapien
gagcatccctcaatccaacatttag

SEQ ID NO: 271171 - DNA, 25 bp, Homo sapien
gctgccagattccatttcttaacat

SEQ ID NO: 271172 - DNA, 25 bp, Homo sapien
tggaccctaaaagtggctgtgatgt

SEQ ID NO: 271173 - DNA, 25 bp, Homo sapien
ctcacagaatccttggcaacaaaga

SEQ ID NO: 271174 - DNA, 25 bp, Homo sapien
tcctgagagccaagcctcacagaat

SEQ ID NO: 271175 - DNA, 25 bp, Homo sapien
caaagaattccaccactaccccttg

SEQ ID NO: 271176 - DNA, 25 bp, Homo sapien
cacactctgctcctgatagggccac

SEQ ID NO: 271177 - DNA, 25 bp, Homo sapien
aaaatcccgatatttctcaggatgc

SEQ ID NO: 271178 - DNA, 25 bp, Homo sapien
cacttagggcctgatacatgtaaac

SEQ ID NO: 271179 - DNA, 25 bp, Homo sapien
gagaagtgttcgctttgtaacagaa

SEQ ID NO: 271180 - DNA, 25 bp, Homo sapien
tgctggcaccttccctcattgtaat

SEQ ID NO: 271181 - DNA, 25 bp, Homo sapien
taatagcctgctggacttttagttt

SEQ ID NO: 271182 - DNA, 25 bp, Homo sapien
taagtggccattcatcaactccagg

SEQ ID NO: 271183 - DNA, 25 bp, Homo sapien
tagttttgggtttagggacatgcca

SEQ ID NO: 271184 - DNA, 25 bp, Homo sapien
ctgtcatcaccagaaacgccggctg

SEQ ID NO: 271185 - DNA, 25 bp, Homo sapien
gaagaccccacctgaactgggatcg

SEQ ID NO: 271186 - DNA, 25 bp, Homo sapien
cctaggctgcgggaggaatttccca

SEQ ID NO: 271187 - DNA, 25 bp, Homo sapien
tccggccgggagtgctcatctaaag

SEQ ID NO: 271188 - DNA, 25 bp, Homo sapien
tgatactgatctcaaagaagcccga

SEQ ID NO: 271189 - DNA, 25 bp, Homo sapien
tgatctcaaagaagcccgaatcctg

SEQ ID NO: 271190 - DNA, 25 bp, Homo sapien
tcaaagaagcccgaatcctgctggc

SEQ ID NO: 271191 - DNA, 25 bp, Homo sapien
agcccgaatcctgctggctggccat

SEQ ID NO: 271192 - DNA, 25 bp, Homo sapien
taaactacgttagcagaagtgaccc

SEQ ID NO: 271193 - DNA, 25 bp, Homo sapien
taaacagagtggtcatatggcgtcc

SEQ ID NO: 271194 - DNA, 25 bp, Homo sapien
acttgatctgtacccctttgctgga

SEQ ID NO: 271195 - DNA, 25 bp, Homo sapien
aagtgaccccgtggccttagagagg

SEQ ID NO: 271196 - DNA, 25 bp, Homo sapien
aaaagaggactaagagaaattctag

SEQ ID NO: 271197 - DNA, 25 bp, Homo sapien
ataaattcggaaaatcgtaatacat

SEQ ID NO: 271198 - DNA, 25 bp, Homo sapien
ttttggacagacttacctctgtatt

SEQ ID NO: 271199 - DNA, 25 bp, Homo sapien
taaataccaagctatattgcatttt

SEQ ID NO: 271200 - DNA, 25 bp, Homo sapien
taaactcaaagaagttggcctcgtg

SEQ ID NO: 271201 - DNA, 25 bp, Homo sapien
tccaggtgggatgcatttatgaagc

SEQ ID NO: 271202 - DNA, 25 bp, Homo sapien
acaaatgccattcgcgtttccagga

SEQ ID NO: 271203 - DNA, 25 bp, Homo sapien
tgcctgtctgaaatgcttgctgccc

SEQ ID NO: 271204 - DNA, 25 bp, Homo sapien
gggctactttcaagactttgccgct

SEQ ID NO: 271205 - DNA, 25 bp, Homo sapien
gtgggggctactttcaagactttgc

SEQ ID NO: 271206 - DNA, 25 bp, Homo sapien
tactttcaagactttgccgctgctt

SEQ ID NO: 271207 - DNA, 25 bp, Homo sapien
gctactttcaagactttgccgctgc

SEQ ID NO: 271208 - DNA, 25 bp, Homo sapien
tgttgccattaacaagccgtgggac

SEQ ID NO: 271209 - DNA, 25 bp, Homo sapien
aaactaacacagtctgggaccgaga

SEQ ID NO: 271210 - DNA, 25 bp, Homo sapien
tatggactctgtggcattatggacc

SEQ ID NO: 271211 - DNA, 25 bp, Homo sapien
tccaaagtgcatcagggacgcatgt

SEQ ID NO: 271212 - DNA, 25 bp, Homo sapien
taagtttctgagacagtagtgcaca

SEQ ID NO: 271213 - DNA, 25 bp, Homo sapien
aatacaggtttatcagactccagtg

SEQ ID NO: 271214 - DNA, 25 bp, Homo sapien
caaaaataaggttgctcagggtcat

SEQ ID NO: 271215 - DNA, 25 bp, Homo sapien
tctgtcaaaagtggtcaggtgcaaa

SEQ ID NO: 271216 - DNA, 25 bp, Homo sapien
gttgctcactgccaccataagtgtc

SEQ ID NO: 271217 - DNA, 25 bp, Homo sapien
ccaatgggacaatttttagctgcac

SEQ ID NO: 271218 - DNA, 25 bp, Homo sapien
ggcagactgttcataccaatgggac

SEQ ID NO: 271219 - DNA, 25 bp, Homo sapien
tgtctcagccacaatgcagggccct

SEQ ID NO: 271220 - DNA, 25 bp, Homo sapien
caagcccttttatgaagctgatcac

SEQ ID NO: 271221 - DNA, 25 bp, Homo sapien
tccaacaagcagttgtaatctccat

SEQ ID NO: 271222 - DNA, 25 bp, Homo sapien
agcccttttatgaagctgatcacac

SEQ ID NO: 271223 - DNA, 25 bp, Homo sapien
atcacacaggatcgtctccaacaag

SEQ ID NO: 271224 - DNA, 25 bp, Homo sapien
gcatatacgtggaatcatgcttgta

SEQ ID NO: 271225 - DNA, 25 bp, Homo sapien
gattccatgaatctacccattttag

SEQ ID NO: 271226 - DNA, 25 bp, Homo sapien
tatccactgattagcaactcccaat

SEQ ID NO: 271227 - DNA, 25 bp, Homo sapien
caattgtatagcagatcactagagc

SEQ ID NO: 271228 - DNA, 25 bp, Homo sapien
ctttcagggtccaggtcagtatggt

SEQ ID NO: 271229 - DNA, 25 bp, Homo sapien
tttcagggtccaggtcagtatggtc

SEQ ID NO: 271230 - DNA, 25 bp, Homo sapien
ctttttacccagtcctgcaagcaaa

SEQ ID NO: 271231 - DNA, 25 bp, Homo sapien
tgctttttacccagtcctgcaagca

SEQ ID NO: 271232 - DNA, 25 bp, Homo sapien
gctttttacccagtcctgcaagcaa

SEQ ID NO: 271233 - DNA, 25 bp, Homo sapien
tttttacccagtcctgcaagcaaat

SEQ ID NO: 271234 - DNA, 25 bp, Homo sapien
tctccctgtgcgtgccagaagcagg

SEQ ID NO: 271235 - DNA, 25 bp, Homo sapien
tggaaccggaggcttgatgtaaccg

SEQ ID NO: 271236 - DNA, 25 bp, Homo sapien
tctgggtccacattgatgggtagca

SEQ ID NO: 271237 - DNA, 25 bp, Homo sapien
gatacgaatcttgcgttcagcctga

SEQ ID NO: 271238 - DNA, 25 bp, Homo sapien
aggcagtttccacggcatgtactca

SEQ ID NO: 271239 - DNA, 25 bp, Homo sapien
aagaggcagtttccacggcatgtac

SEQ ID NO: 271240 - DNA, 25 bp, Homo sapien
cagcatacagatgaattttcaaaga

SEQ ID NO: 271241 - DNA, 25 bp, Homo sapien
ttcaaagaggcagtttccacggcat

SEQ ID NO: 271242 - DNA, 25 bp, Homo sapien
caatgtaaggcagactcatgcctgc

SEQ ID NO: 271243 - DNA, 25 bp, Homo sapien
ttagagcaatcaatgtaaggcagac

SEQ ID NO: 271244 - DNA, 25 bp, Homo sapien
tctttagagtcctattagagcaatc

SEQ ID NO: 271245 - DNA, 25 bp, Homo sapien
gagattcagtgctctttagagtcct

SEQ ID NO: 271246 - DNA, 25 bp, Homo sapien
ctggaaatacagtgagatcgttggg

SEQ ID NO: 271247 - DNA, 25 bp, Homo sapien
cctgggtaggactcaagtattttgc

SEQ ID NO: 271248 - DNA, 25 bp, Homo sapien
ggctaagaccaggtctgctgaaagg

SEQ ID NO: 271249 - DNA, 25 bp, Homo sapien
catgagcacctggagggctaagacc

SEQ ID NO: 271250 - DNA, 25 bp, Homo sapien
atctctggttttaccgcctaggtct

SEQ ID NO: 271251 - DNA, 25 bp, Homo sapien
tggttttaccgcctaggtcttcaca

SEQ ID NO: 271252 - DNA, 25 bp, Homo sapien
taccgcctaggtcttcacaattcac

SEQ ID NO: 271253 - DNA, 25 bp, Homo sapien
tttaccgcctaggtcttcacaattc

SEQ ID NO: 271254 - DNA, 25 bp, Homo sapien
ttagacccacagtcccgttcatcaa

SEQ ID NO: 271255 - DNA, 25 bp, Homo sapien
acccacagtcccgttcatcaaaatg

SEQ ID NO: 271256 - DNA, 25 bp, Homo sapien
ccacagtcccgttcatcaaaatgac

SEQ ID NO: 271257 - DNA, 25 bp, Homo sapien
agtcccgttcatcaaaatgactaga

SEQ ID NO: 271258 - DNA, 25 bp, Homo sapien
gaagaattctgcaggagtttcagta

SEQ ID NO: 271259 - DNA, 25 bp, Homo sapien
tgtagtcctcagttcgcactctggg

SEQ ID NO: 271260 - DNA, 25 bp, Homo sapien
ctgcgtgagaagtaagatgtagtcc

SEQ ID NO: 271261 - DNA, 25 bp, Homo sapien
ggaattttctcctgcgctgaagaat

SEQ ID NO: 271262 - DNA, 25 bp, Homo sapien
cacattcatgagtgaggcaccgagc

SEQ ID NO: 271263 - DNA, 25 bp, Homo sapien
cacagtcatcatcttgtgcaattac

SEQ ID NO: 271264 - DNA, 25 bp, Homo sapien
atgagtgaggcaccgagcaccatcc

SEQ ID NO: 271265 - DNA, 25 bp, Homo sapien
catcttgtgcaattacacattcatg

SEQ ID NO: 271266 - DNA, 25 bp, Homo sapien
gggtcttctccacgttgcagagatt

SEQ ID NO: 271267 - DNA, 25 bp, Homo sapien
ttctccacgttgcagagattttgtc

SEQ ID NO: 271268 - DNA, 25 bp, Homo sapien
aattgggggtcttctccacgttgca

SEQ ID NO: 271269 - DNA, 25 bp, Homo sapien
tgatcaaattgggggtcttctccac

SEQ ID NO: 271270 - DNA, 25 bp, Homo sapien
catttgaaccacagtaagcaccttc

SEQ ID NO: 271271 - DNA, 25 bp, Homo sapien
gaaaggaccaaaagagaggagctcc

SEQ ID NO: 271272 - DNA, 25 bp, Homo sapien
tctggtgaaggttcggtctctactt

SEQ ID NO: 271273 - DNA, 25 bp, Homo sapien
gatactatcacattaacagcagctg

SEQ ID NO: 271274 - DNA, 25 bp, Homo sapien
gatacctagctctatataccctgtt

SEQ ID NO: 271275 - DNA, 25 bp, Homo sapien
tgttcaaaggatgcacttagcatag

SEQ ID NO: 271276 - DNA, 25 bp, Homo sapien
taccctgttgttcatgccagtgaca

SEQ ID NO: 271277 - DNA, 25 bp, Homo sapien
taaaaagggccattcaggattagtc

SEQ ID NO: 271278 - DNA, 25 bp, Homo sapien
gaaaacttccctctgaactctcatc

SEQ ID NO: 271279 - DNA, 25 bp, Homo sapien
tgctgaaaacttccctctgaactct

SEQ ID NO: 271280 - DNA, 25 bp, Homo sapien
aacttccctctgaactctcatcaac

SEQ ID NO: 271281 - DNA, 25 bp, Homo sapien
ctgctgaaaacttccctctgaactc

SEQ ID NO: 271282 - DNA, 25 bp, Homo sapien
ataatgtacgtagaatggaaggcag

SEQ ID NO: 271283 - DNA, 25 bp, Homo sapien
tactcagaaagggagctcattgagc

SEQ ID NO: 271284 - DNA, 25 bp, Homo sapien
cagtcaaataatgtacgtagaatgg

SEQ ID NO: 271285 - DNA, 25 bp, Homo sapien
aaagggagctcattgagctgatgac

SEQ ID NO: 271286 - DNA, 25 bp, Homo sapien
atgtgattcatcctcaatgccattt

SEQ ID NO: 271287 - DNA, 25 bp, Homo sapien
gtgattcatcctcaatgccattttg

SEQ ID NO: 271288 - DNA, 25 bp, Homo sapien
attgcttgttcttggtctgtattca

SEQ ID NO: 271289 - DNA, 25 bp, Homo sapien
tgatttattgcttgttcttggtctg

SEQ ID NO: 271290 - DNA, 25 bp, Homo sapien
tggcgaggtcccgtctttccattaa

SEQ ID NO: 271291 - DNA, 25 bp, Homo sapien
gtctttccattaaataatctcgctg

SEQ ID NO: 271292 - DNA, 25 bp, Homo sapien
aaataaaatcaatggcgaggtcccg

SEQ ID NO: 271293 - DNA, 25 bp, Homo sapien
taaataatctcgctgttgttcatcg

SEQ ID NO: 271294 - DNA, 25 bp, Homo sapien
actgtctattacaggatgaagtgga

SEQ ID NO: 271295 - DNA, 25 bp, Homo sapien
gccaagttaataacatcatgtatta

SEQ ID NO: 271296 - DNA, 25 bp, Homo sapien
taaagtgcttgaaagccaagttaat

SEQ ID NO: 271297 - DNA, 25 bp, Homo sapien
ttaaactgtctattacaggatgaag

SEQ ID NO: 271298 - DNA, 25 bp, Homo sapien
gtataattagacaagttagggatcc

SEQ ID NO: 271299 - DNA, 25 bp, Homo sapien
ggtataattagacaagttagggatc

SEQ ID NO: 271300 - DNA, 25 bp, Homo sapien
attgccagtgttgggaccaaggtac

SEQ ID NO: 271301 - DNA, 25 bp, Homo sapien
ttggcttgtgccaacactccaatga

SEQ ID NO: 271302 - DNA, 25 bp, Homo sapien
actccaatgacttctgcatacaggt

SEQ ID NO: 271303 - DNA, 25 bp, Homo sapien
tgtgccaacactccaatgacttctg

SEQ ID NO: 271304 - DNA, 25 bp, Homo sapien
atgacttctgcatacaggtctgcca

SEQ ID NO: 271305 - DNA, 25 bp, Homo sapien
catatgggttctgctctttgtgccg

SEQ ID NO: 271306 - DNA, 25 bp, Homo sapien
taattcgaaagaatttcatgcccat

SEQ ID NO: 271307 - DNA, 25 bp, Homo sapien
tgtgccgtaattcttttagctccgc

SEQ ID NO: 271308 - DNA, 25 bp, Homo sapien
ccactggatacatcttaattcgaaa

SEQ ID NO: 271309 - DNA, 25 bp, Homo sapien
aagcccagccaaggcatgcttgata

SEQ ID NO: 271310 - DNA, 25 bp, Homo sapien
tatctttgtctttgacctcgaggaa

SEQ ID NO: 271311 - DNA, 25 bp, Homo sapien
caaggcatgcttgatatctttgtct

SEQ ID NO: 271312 - DNA, 25 bp, Homo sapien
cctcgaggaagtaatgtgcacattc

SEQ ID NO: 271313 - DNA, 25 bp, Homo sapien
aagaaagttccagcgtggtgtcata

SEQ ID NO: 271314 - DNA, 25 bp, Homo sapien
gttccagcgtggtgtcatacaggct

SEQ ID NO: 271315 - DNA, 25 bp, Homo sapien
tggtgtcatacaggctttccacaaa

SEQ ID NO: 271316 - DNA, 25 bp, Homo sapien
cacaaaatttctaaggcagggaaca

SEQ ID NO: 271317 - DNA, 25 bp, Homo sapien
ggaattttagtctgtgcagttttgt

SEQ ID NO: 271318 - DNA, 25 bp, Homo sapien
ttcctgtctaggaattttagtctgt

SEQ ID NO: 271319 - DNA, 25 bp, Homo sapien
tgttttcgattttctcatagttact

SEQ ID NO: 271320 - DNA, 25 bp, Homo sapien
tctaggaattttagtctgtgcagtt

SEQ ID NO: 271321 - DNA, 25 bp, Homo sapien
cactgtgtagcacaacagtgcccag

SEQ ID NO: 271322 - DNA, 25 bp, Homo sapien
gaaacaggacactgtgtagcacaac

SEQ ID NO: 271323 - DNA, 25 bp, Homo sapien
cagtgcccagtggatgcagggcact

SEQ ID NO: 271324 - DNA, 25 bp, Homo sapien
caggacactgtgtagcacaacagtg

SEQ ID NO: 271325 - DNA, 25 bp, Homo sapien
cagagcaaacaggtcaccagggggt

SEQ ID NO: 271326 - DNA, 25 bp, Homo sapien
aaatgtgccacctgttcaggaacag

SEQ ID NO: 271327 - DNA, 25 bp, Homo sapien
gcaaacaggtcaccagggggtacaa

SEQ ID NO: 271328 - DNA, 25 bp, Homo sapien
gaaaatgtgccacctgttcaggaac

SEQ ID NO: 271329 - DNA, 25 bp, Homo sapien
tcgtttttgagctgacaaatactaa

SEQ ID NO: 271330 - DNA, 25 bp, Homo sapien
cgtttttgagctgacaaatactaac

SEQ ID NO: 271331 - DNA, 25 bp, Homo sapien
atcgtttttgagctgacaaatacta

SEQ ID NO: 271332 - DNA, 25 bp, Homo sapien
agtaatctgtagagagattccagtg

SEQ ID NO: 271333 - DNA, 25 bp, Homo sapien
tcatgtaaacccaaagtaatctgta

SEQ ID NO: 271334 - DNA, 25 bp, Homo sapien
taaacccaaagtaatctgtagagag

SEQ ID NO: 271335 - DNA, 25 bp, Homo sapien
catttaattcgaatcatgtaaaccc

SEQ ID NO: 271336 - DNA, 25 bp, Homo sapien
tcacaaagatgttcagaggcatgtc

SEQ ID NO: 271337 - DNA, 25 bp, Homo sapien
aagatgttcagaggcatgtcccttg

SEQ ID NO: 271338 - DNA, 25 bp, Homo sapien
atgtcccttggtaccacaccgcggg

SEQ ID NO: 271339 - DNA, 25 bp, Homo sapien
tgtcccttggtaccacaccgcggga

SEQ ID NO: 271340 - DNA, 25 bp, Homo sapien
tttgctggttttcccacacaaagaa

SEQ ID NO: 271341 - DNA, 25 bp, Homo sapien
tgggttgagactgaatgcttttgct

SEQ ID NO: 271342 - DNA, 25 bp, Homo sapien
gaaaatcgaaaatgatttctttcat

SEQ ID NO: 271343 - DNA, 25 bp, Homo sapien
ctttcattgcaaaatctaaacgttc

SEQ ID NO: 271344 - DNA, 25 bp, Homo sapien
tgtaaccggcatgggaggttcccca

SEQ ID NO: 271345 - DNA, 25 bp, Homo sapien
tttctgctgcaagctatcagctatg

SEQ ID NO: 271346 - DNA, 25 bp, Homo sapien
tactcttaacgtgtttcctgaagga

SEQ ID NO: 271347 - DNA, 25 bp, Homo sapien
caagaatgcccgtaaaccaatgttc

SEQ ID NO: 271348 - DNA, 25 bp, Homo sapien
tacttctttatcaaggtgccttaaa

SEQ ID NO: 271349 - DNA, 25 bp, Homo sapien
tgtacattagtcagcatcatacacc

SEQ ID NO: 271350 - DNA, 25 bp, Homo sapien
acttgagagtaatataaggacatgc

SEQ ID NO: 271351 - DNA, 25 bp, Homo sapien
gtctacagcttttcgtacttgagag

SEQ ID NO: 271352 - DNA, 25 bp, Homo sapien
gaaattatgccacagctatcaaatg

SEQ ID NO: 271353 - DNA, 25 bp, Homo sapien
gcagatttcatgtgaggctctgagg

SEQ ID NO: 271354 - DNA, 25 bp, Homo sapien
taattcatagcccaacaacacagtc

SEQ ID NO: 271355 - DNA, 25 bp, Homo sapien
ggaactgtcacgagatgtataaaga

SEQ ID NO: 271356 - DNA, 25 bp, Homo sapien
cggttgaaaagtctaaagcaacatc

SEQ ID NO: 271357 - DNA, 25 bp, Homo sapien
tctggcaatttgtgaggtaagaact

SEQ ID NO: 271358 - DNA, 25 bp, Homo sapien
tttggaacagtttcactgtcgccca

SEQ ID NO: 271359 - DNA, 25 bp, Homo sapien
gcctggcgtaatgcattttttatat

SEQ ID NO: 271360 - DNA, 25 bp, Homo sapien
catcaggaagcagtcgaggaatagc

SEQ ID NO: 271361 - DNA, 25 bp, Homo sapien
caagttttgacatcccatcaggaag

SEQ ID NO: 271362 - DNA, 25 bp, Homo sapien
caataagttcaagttttgacatccc

SEQ ID NO: 271363 - DNA, 25 bp, Homo sapien
gcaacacaggtcctgaaaagatcta

SEQ ID NO: 271364 - DNA, 25 bp, Homo sapien
gcaacttcagggacgaatcaaggag

SEQ ID NO: 271365 - DNA, 25 bp, Homo sapien
gatgcatatcatttacttcccggag

SEQ ID NO: 271366 - DNA, 25 bp, Homo sapien
gacttttccttgtgtctggatgact

SEQ ID NO: 271367 - DNA, 25 bp, Homo sapien
tctgagaagtcaacaagtaaaccct

SEQ ID NO: 271368 - DNA, 25 bp, Homo sapien
gacagtttgcgtgtggccacctgga

SEQ ID NO: 271369 - DNA, 25 bp, Homo sapien
ccgactgaattctgtgactggagcc

SEQ ID NO: 271370 - DNA, 25 bp, Homo sapien
gagcaaaaccttctacagcgtggag

SEQ ID NO: 271371 - DNA, 25 bp, Homo sapien
gggcaataaacaacgctcgaatttc

SEQ ID NO: 271372 - DNA, 25 bp, Homo sapien
tgaatccgaaactgctacatgaata

SEQ ID NO: 271373 - DNA, 25 bp, Homo sapien
agaatggaagaacttagctgatcca

SEQ ID NO: 271374 - DNA, 25 bp, Homo sapien
tccatgacatcaatcatcggcctgt

SEQ ID NO: 271375 - DNA, 25 bp, Homo sapien
gaagaacttagctgatccatgacat

SEQ ID NO: 271376 - DNA, 25 bp, Homo sapien
aaacacccaaattattccacataat

SEQ ID NO: 271377 - DNA, 25 bp, Homo sapien
tttcactgactattttagataggtc

SEQ ID NO: 271378 - DNA, 25 bp, Homo sapien
tattaatctgacataaacacccaaa

SEQ ID NO: 271379 - DNA, 25 bp, Homo sapien
tagataggtccagagcttttaagag

SEQ ID NO: 271380 - DNA, 25 bp, Homo sapien
cgactggagccgagtgaaggcataa

SEQ ID NO: 271381 - DNA, 25 bp, Homo sapien
ccactgcagatccacattgtgggtg

SEQ ID NO: 271382 - DNA, 25 bp, Homo sapien
catcataatggctattgaccaggac

SEQ ID NO: 271383 - DNA, 25 bp, Homo sapien
gactgtgcaaatatccagacatggg

SEQ ID NO: 271384 - DNA, 25 bp, Homo sapien
tcgtagctcactgtaccatcaggtg

SEQ ID NO: 271385 - DNA, 25 bp, Homo sapien
tgtcctgggctcataatactgggtt

SEQ ID NO: 271386 - DNA, 25 bp, Homo sapien
gtaacatagttgtctccgctgccgg

SEQ ID NO: 271387 - DNA, 25 bp, Homo sapien
tctggagtggaagctcttaagtgtc

SEQ ID NO: 271388 - DNA, 25 bp, Homo sapien
actaaggactctgtgatctcaatgc

SEQ ID NO: 271389 - DNA, 25 bp, Homo sapien
ctttaacagaactcccaccgatggg

SEQ ID NO: 271390 - DNA, 25 bp, Homo sapien
ctagtctcatcaaaggcaccaactg

SEQ ID NO: 271391 - DNA, 25 bp, Homo sapien
caatgctctctagtctcatcaaagg

SEQ ID NO: 271392 - DNA, 25 bp, Homo sapien
ttctttccagagcttctttcattaa

SEQ ID NO: 271393 - DNA, 25 bp, Homo sapien
ttcattaatggatgaagttcttcta

SEQ ID NO: 271394 - DNA, 25 bp, Homo sapien
ccagagcttctttcattaatggatg

SEQ ID NO: 271395 - DNA, 25 bp, Homo sapien
gagcttctttcattaatggatgaag

SEQ ID NO: 271396 - DNA, 25 bp, Homo sapien
cgaagtagttgtagccttaacaagt

SEQ ID NO: 271397 - DNA, 25 bp, Homo sapien
cttaacaagtctcgccgttctcggc

SEQ ID NO: 271398 - DNA, 25 bp, Homo sapien
ctgtcacttattacaccagcatcag

SEQ ID NO: 271399 - DNA, 25 bp, Homo sapien
gtcacttattacaccagcatcagcc

SEQ ID NO: 271400 - DNA, 25 bp, Homo sapien
tcagcttctaggagcatgcgggtca

SEQ ID NO: 271401 - DNA, 25 bp, Homo sapien
aatgtgcccggatatctttaagaat

SEQ ID NO: 271402 - DNA, 25 bp, Homo sapien
gagcatgcgggtcaagtccacatat

SEQ ID NO: 271403 - DNA, 25 bp, Homo sapien
agaacaaagctcccagggctaaagt

SEQ ID NO: 271404 - DNA, 25 bp, Homo sapien
taatttcttgtaacggatcaccgta

SEQ ID NO: 271405 - DNA, 25 bp, Homo sapien
gacgaaagcaccgtaataaagaaca

SEQ ID NO: 271406 - DNA, 25 bp, Homo sapien
gcaccgtaataaagaacacgaatgg

SEQ ID NO: 271407 - DNA, 25 bp, Homo sapien
cgtaataaagaacacgaatgggctt

SEQ ID NO: 271408 - DNA, 25 bp, Homo sapien
ggggaagagaaatcttcggtggtga

SEQ ID NO: 271409 - DNA, 25 bp, Homo sapien
gggaagagaaatcttcggtggtgaa

SEQ ID NO: 271410 - DNA, 25 bp, Homo sapien
ctgggggaagagaaatcttcggtgg

SEQ ID NO: 271411 - DNA, 25 bp, Homo sapien
tctgtcactgtaacgatccagagga

SEQ ID NO: 271412 - DNA, 25 bp, Homo sapien
tgaacataatgctgaagggtcctgc

SEQ ID NO: 271413 - DNA, 25 bp, Homo sapien
tgcccactggctgaataagatgaaa

SEQ ID NO: 271414 - DNA, 25 bp, Homo sapien
tactgatatcttgtaatctgatgat

SEQ ID NO: 271415 - DNA, 25 bp, Homo sapien
cacattgtcaaagacagggccacag

SEQ ID NO: 271416 - DNA, 25 bp, Homo sapien
gggaaaggcccacattgtcaaagac

SEQ ID NO: 271417 - DNA, 25 bp, Homo sapien
tgtcaagccatttatataggtagcc

SEQ ID NO: 271418 - DNA, 25 bp, Homo sapien
gacaagccagaatgttgtcaagcca

SEQ ID NO: 271419 - DNA, 25 bp, Homo sapien
gaaaggctttacttacagcccacaa

SEQ ID NO: 271420 - DNA, 25 bp, Homo sapien
gaaaaatgtcttaaccttgatggag

SEQ ID NO: 271421 - DNA, 25 bp, Homo sapien
caggtaataatgtagagaacgtggc

SEQ ID NO: 271422 - DNA, 25 bp, Homo sapien
caggacttaggtctgggatggattc

SEQ ID NO: 271423 - DNA, 25 bp, Homo sapien
caatttttacctctggaaaggagtg

SEQ ID NO: 271424 - DNA, 25 bp, Homo sapien
tgctatggctttgaagcagccagat

SEQ ID NO: 271425 - DNA, 25 bp, Homo sapien
tccagtagcaagacaacaacttcgc

SEQ ID NO: 271426 - DNA, 25 bp, Homo sapien
taggaacctgtgtagcatcggtcaa

SEQ ID NO: 271427 - DNA, 25 bp, Homo sapien
ccagatgcaagttggtaggaacctg

SEQ ID NO: 271428 - DNA, 25 bp, Homo sapien
cttgaccttgtaatcagagcattta

SEQ ID NO: 271429 - DNA, 25 bp, Homo sapien
gctattaaattcataagcaacaaca

SEQ ID NO: 271430 - DNA, 25 bp, Homo sapien
tgcacttgaccttgtaatcagagca

SEQ ID NO: 271431 - DNA, 25 bp, Homo sapien
gttgaagaatgagctattaaattca

SEQ ID NO: 271432 - DNA, 25 bp, Homo sapien
tgccttcagccagaggtttgcctag

SEQ ID NO: 271433 - DNA, 25 bp, Homo sapien
gtggtgtgccacctagatccttctt

SEQ ID NO: 271434 - DNA, 25 bp, Homo sapien
gctgaatccttgatctgaagccttc

SEQ ID NO: 271435 - DNA, 25 bp, Homo sapien
ttctttcaggatggaggcactcaat

SEQ ID NO: 271436 - DNA, 25 bp, Homo sapien
tgtcactatgtcgaagggatagttc

SEQ ID NO: 271437 - DNA, 25 bp, Homo sapien
ctgcatgagctgcatggagatttca

SEQ ID NO: 271438 - DNA, 25 bp, Homo sapien
gaggccttgaatagaacaaggttta

SEQ ID NO: 271439 - DNA, 25 bp, Homo sapien
tagaacaaggtttaacaatgtcact

SEQ ID NO: 271440 - DNA, 25 bp, Homo sapien
tattttctatgccagtaaatgatac

SEQ ID NO: 271441 - DNA, 25 bp, Homo sapien
tctattttctgtactcaaggatgga

SEQ ID NO: 271442 - DNA, 25 bp, Homo sapien
ggatggatattttctatgccagtaa

SEQ ID NO: 271443 - DNA, 25 bp, Homo sapien
ctattttctgtactcaaggatggat

SEQ ID NO: 271444 - DNA, 25 bp, Homo sapien
cagcgggccgtgtgttccatagaga

SEQ ID NO: 271445 - DNA, 25 bp, Homo sapien
tcctggccagctcacatgacaagag

SEQ ID NO: 271446 - DNA, 25 bp, Homo sapien
atgacaagagggcaagtgacacgct

SEQ ID NO: 271447 - DNA, 25 bp, Homo sapien
ccatagagaatacttcccggtcttt

SEQ ID NO: 271448 - DNA, 25 bp, Homo sapien
cataaagtacctagcatggaggctg

SEQ ID NO: 271449 - DNA, 25 bp, Homo sapien
aactagtgaaaggttgcctgactcc

SEQ ID NO: 271450 - DNA, 25 bp, Homo sapien
aatttagaggttctgtgacttgccc

SEQ ID NO: 271451 - DNA, 25 bp, Homo sapien
tgcttcctagctatatggtctcgag

SEQ ID NO: 271452 - DNA, 25 bp, Homo sapien
catgtaggcagcaaacaaatcttgg

SEQ ID NO: 271453 - DNA, 25 bp, Homo sapien
tgggtgaagtgcataaaaataaatt

SEQ ID NO: 271454 - DNA, 25 bp, Homo sapien
tatcttttctgctagactatgaacg

SEQ ID NO: 271455 - DNA, 25 bp, Homo sapien
cactgtgcttggcttgattgcatat

SEQ ID NO: 271456 - DNA, 25 bp, Homo sapien
catgtacatgaggttgttcaggacc

SEQ ID NO: 271457 - DNA, 25 bp, Homo sapien
ccttgacttcgtcctctgggctgct

SEQ ID NO: 271458 - DNA, 25 bp, Homo sapien
gtaagcatgatctggcgcccgttgg

SEQ ID NO: 271459 - DNA, 25 bp, Homo sapien
tctcagcccgtgagaagcagtcacg

SEQ ID NO: 271460 - DNA, 25 bp, Homo sapien
tctcattgttggctaaagcattcca

SEQ ID NO: 271461 - DNA, 25 bp, Homo sapien
gtaggagaactgtgtcgctgctgac

SEQ ID NO: 271462 - DNA, 25 bp, Homo sapien
tcaggaactgcaaggtgatcctcag

SEQ ID NO: 271463 - DNA, 25 bp, Homo sapien
gcaaggtgatcctcaggttgttgct

SEQ ID NO: 271464 - DNA, 25 bp, Homo sapien
cacaatgctggacgatggggttcac

SEQ ID NO: 271465 - DNA, 25 bp, Homo sapien
ggaagccttgctactggccgtgaag

SEQ ID NO: 271466 - DNA, 25 bp, Homo sapien
tgttacggcacaagtatattgccac

SEQ ID NO: 271467 - DNA, 25 bp, Homo sapien
tagaagggcgggttgtcacaatgct

SEQ ID NO: 271468 - DNA, 25 bp, Homo sapien
gattctttcaatatcttgttctcct

SEQ ID NO: 271469 - DNA, 25 bp, Homo sapien
cagcaaccactgtattgctgctaga

SEQ ID NO: 271470 - DNA, 25 bp, Homo sapien
actgtattgctgctagaggtggttc

SEQ ID NO: 271471 - DNA, 25 bp, Homo sapien
ctttcaatatcttgttctcctcagc

SEQ ID NO: 271472 - DNA, 25 bp, Homo sapien
gatatactgagtagagttggaaagt

SEQ ID NO: 271473 - DNA, 25 bp, Homo sapien
tgtccattagcagaacaactcatgg

SEQ ID NO: 271474 - DNA, 25 bp, Homo sapien
ggcaattctaattccagatggtctg

SEQ ID NO: 271475 - DNA, 25 bp, Homo sapien
cctgaggtatgcgaaattccaccac

SEQ ID NO: 271476 - DNA, 25 bp, Homo sapien
gagtgactctgatttgactactgat

SEQ ID NO: 271477 - DNA, 25 bp, Homo sapien
ggcaaggcaataagaaggctgagat

SEQ ID NO: 271478 - DNA, 25 bp, Homo sapien
ctaatgtggagggaacggagacttt

SEQ ID NO: 271479 - DNA, 25 bp, Homo sapien
tggttaaccaagacagcacaaagca

SEQ ID NO: 271480 - DNA, 25 bp, Homo sapien
ctcaaaccttcttcactgttatatc

SEQ ID NO: 271481 - DNA, 25 bp, Homo sapien
tcttcactgttatatcttttgggca

SEQ ID NO: 271482 - DNA, 25 bp, Homo sapien
cttcttcactgttatatcttttggg

SEQ ID NO: 271483 - DNA, 25 bp, Homo sapien
caaaccttcttcactgttatatctt

SEQ ID NO: 271484 - DNA, 25 bp, Homo sapien
tctgacttaactcataacagatcaa

SEQ ID NO: 271485 - DNA, 25 bp, Homo sapien
cttaactcataacagatcaatactc

SEQ ID NO: 271486 - DNA, 25 bp, Homo sapien
taacagatcaatactctatttcttt

SEQ ID NO: 271487 - DNA, 25 bp, Homo sapien
ggaaggtgcagggctattgctgtcc

SEQ ID NO: 271488 - DNA, 25 bp, Homo sapien
catcgtaggatcctccagagctatt

SEQ ID NO: 271489 - DNA, 25 bp, Homo sapien
tgctgtatcttgactcgaggcgagt

SEQ ID NO: 271490 - DNA, 25 bp, Homo sapien
tccagagctattgctgtatcttgac

SEQ ID NO: 271491 - DNA, 25 bp, Homo sapien
ttttatcttcatcgtaggatcctcc

SEQ ID NO: 271492 - DNA, 25 bp, Homo sapien
gcccgtgtagggagaaattggatca

SEQ ID NO: 271493 - DNA, 25 bp, Homo sapien
taagggctgcggctgcttggtctct

SEQ ID NO: 271494 - DNA, 25 bp, Homo sapien
gtctccgggagatagtcaaccaggg

SEQ ID NO: 271495 - DNA, 25 bp, Homo sapien
aatagtcagcaaccagcccgtgtag

SEQ ID NO: 271496 - DNA, 25 bp, Homo sapien
tgaaataatgaaattaatgcaactt

SEQ ID NO: 271497 - DNA, 25 bp, Homo sapien
ctaatcaatgaaataatgaaattaa

SEQ ID NO: 271498 - DNA, 25 bp, Homo sapien
aatgaaataatgaaattaatgcaac

SEQ ID NO: 271499 - DNA, 25 bp, Homo sapien
tcaatgaaataatgaaattaatgca

SEQ ID NO: 271500 - DNA, 25 bp, Homo sapien
agtcttctcgtacactgtgatccac

SEQ ID NO: 271501 - DNA, 25 bp, Homo sapien
ataatggtagatgaagcgcccagtc

SEQ ID NO: 271502 - DNA, 25 bp, Homo sapien
gaagcgcccagtcttctcgtacact

SEQ ID NO: 271503 - DNA, 25 bp, Homo sapien
cagcatgaagtaataatggtagatg

SEQ ID NO: 271504 - DNA, 25 bp, Homo sapien
tattcaggttggtaggctggctgca

SEQ ID NO: 271505 - DNA, 25 bp, Homo sapien
caagagagggcaatcaagaggtgaa

SEQ ID NO: 271506 - DNA, 25 bp, Homo sapien
tctgcaggagcacggaagcaatgga

SEQ ID NO: 271507 - DNA, 25 bp, Homo sapien
tgtgttcaaagacttcaggccggta

SEQ ID NO: 271508 - DNA, 25 bp, Homo sapien
ggagcttgaactaagccctgagtca

SEQ ID NO: 271509 - DNA, 25 bp, Homo sapien
gcaccggggatgactggtcctctct

SEQ ID NO: 271510 - DNA, 25 bp, Homo sapien
cagactgatgctagaggaggtggag

SEQ ID NO: 271511 - DNA, 25 bp, Homo sapien
ctggtcgtgagaaactcaatgagct

SEQ ID NO: 271512 - DNA, 25 bp, Homo sapien
caacgtgacgtagaaaattagtgag

SEQ ID NO: 271513 - DNA, 25 bp, Homo sapien
taaatacagatacaacgtgacgtag

SEQ ID NO: 271514 - DNA, 25 bp, Homo sapien
catggcaccaaagtggaccaaatgc

SEQ ID NO: 271515 - DNA, 25 bp, Homo sapien
gatttttaggtgtgatgtcttcatg

SEQ ID NO: 271516 - DNA, 25 bp, Homo sapien
gggaaaggaatttgttctccatgag

SEQ ID NO: 271517 - DNA, 25 bp, Homo sapien
caacttacaaagtgcctagtatagt

SEQ ID NO: 271518 - DNA, 25 bp, Homo sapien
caagatggtcctggtattgaatcag

SEQ ID NO: 271519 - DNA, 25 bp, Homo sapien
acttgtctcgtacagttgttgtgaa

SEQ ID NO: 271520 - DNA, 25 bp, Homo sapien
cttgagggcccggaatatctggaag

SEQ ID NO: 271521 - DNA, 25 bp, Homo sapien
tccaccaatcttgagagaaggtcag

SEQ ID NO: 271522 - DNA, 25 bp, Homo sapien
tggaaggaccgaccagcatagtgcc

SEQ ID NO: 271523 - DNA, 25 bp, Homo sapien
tgcgagggctgtctgcaatgcaact

SEQ ID NO: 271524 - DNA, 25 bp, Homo sapien
cagtcagacaagttatccacagccg

SEQ ID NO: 271525 - DNA, 25 bp, Homo sapien
cgggacaatacagttaggaggtcac

SEQ ID NO: 271526 - DNA, 25 bp, Homo sapien
ccacagccgcctccaaggttaggag

SEQ ID NO: 271527 - DNA, 25 bp, Homo sapien
ttaggagcgcttccattacataacc

SEQ ID NO: 271528 - DNA, 25 bp, Homo sapien
ggtcgatgacaccaaacttcttggg

SEQ ID NO: 271529 - DNA, 25 bp, Homo sapien
gaagcttcgttgatgccggctccgt

SEQ ID NO: 271530 - DNA, 25 bp, Homo sapien
gatgggtccgtgagactgtccttca

SEQ ID NO: 271531 - DNA, 25 bp, Homo sapien
tgtgacccagaatatggtggccagc

SEQ ID NO: 271532 - DNA, 25 bp, Homo sapien
tgagacagggtgaacgaggctggct

SEQ ID NO: 271533 - DNA, 25 bp, Homo sapien
catcagaattgagacagggtgaacg

SEQ ID NO: 271534 - DNA, 25 bp, Homo sapien
acagggtgaacgaggctggctttac

SEQ ID NO: 271535 - DNA, 25 bp, Homo sapien
aattgagacagggtgaacgaggctg

SEQ ID NO: 271536 - DNA, 25 bp, Homo sapien
ttattgtaccaaatgatgaacacag

SEQ ID NO: 271537 - DNA, 25 bp, Homo sapien
tcttattgtaccaaatgatgaacac

SEQ ID NO: 271538 - DNA, 25 bp, Homo sapien
cttattgtaccaaatgatgaacaca

SEQ ID NO: 271539 - DNA, 25 bp, Homo sapien
aggcaggagacacaagacattcagt

SEQ ID NO: 271540 - DNA, 25 bp, Homo sapien
tgaggcaggagacacaagacattca

SEQ ID NO: 271541 - DNA, 25 bp, Homo sapien
gcaggagacacaagacattcagtgg

SEQ ID NO: 271542 - DNA, 25 bp, Homo sapien
aggagacacaagacattcagtggaa

SEQ ID NO: 271543 - DNA, 25 bp, Homo sapien
ctgagcaatcctttcggctatatcc

SEQ ID NO: 271544 - DNA, 25 bp, Homo sapien
aatcctttcggctatatccttacag

SEQ ID NO: 271545 - DNA, 25 bp, Homo sapien
tatccttacagaactgattgggatt

SEQ ID NO: 271546 - DNA, 25 bp, Homo sapien
tacagaactgattgggattttcaaa

SEQ ID NO: 271547 - DNA, 25 bp, Homo sapien
tcgacagaccacattgacccacgtg

SEQ ID NO: 271548 - DNA, 25 bp, Homo sapien
gtggcacagtccctcgtgtagctgt

SEQ ID NO: 271549 - DNA, 25 bp, Homo sapien
tgcttcatgaaggtatcgacagacc

SEQ ID NO: 271550 - DNA, 25 bp, Homo sapien
gccaggtaggtaaccatattcaagg

SEQ ID NO: 271551 - DNA, 25 bp, Homo sapien
tccatgtagctgagaagactgtaga

SEQ ID NO: 271552 - DNA, 25 bp, Homo sapien
ggctgctgcacactagggaggccct

SEQ ID NO: 271553 - DNA, 25 bp, Homo sapien
ttgacaggaacgacagaaaggtcca

SEQ ID NO: 271554 - DNA, 25 bp, Homo sapien
agactgtagatcacctggagcaggg

SEQ ID NO: 271555 - DNA, 25 bp, Homo sapien
tcgcccgcaggcctaagacaaaatg

SEQ ID NO: 271556 - DNA, 25 bp, Homo sapien
tctgcgcaagggaagccatggttta

SEQ ID NO: 271557 - DNA, 25 bp, Homo sapien
gataaaaagtatcagacgtcgcccg

SEQ ID NO: 271558 - DNA, 25 bp, Homo sapien
ttgagcatggcctgcaagggtcatc

SEQ ID NO: 271559 - DNA, 25 bp, Homo sapien
gaagcactagtccacactcgatgta

SEQ ID NO: 271560 - DNA, 25 bp, Homo sapien
tatttttgagaggtcactgtgctgg

SEQ ID NO: 271561 - DNA, 25 bp, Homo sapien
ccgaaatatcgaagtggaagtccag

SEQ ID NO: 271562 - DNA, 25 bp, Homo sapien
aaggctggctgaccgagaaactacc

SEQ ID NO: 271563 - DNA, 25 bp, Homo sapien
gaaactgtcaattttacacctggct

SEQ ID NO: 271564 - DNA, 25 bp, Homo sapien
tgtggtggctgcataggcagcaatt

SEQ ID NO: 271565 - DNA, 25 bp, Homo sapien
tctggagcatgctgctaaccagctg

SEQ ID NO: 271566 - DNA, 25 bp, Homo sapien
aattcgcaaactcaagctccgagca

SEQ ID NO: 271567 - DNA, 25 bp, Homo sapien
atcataccgcctcccgatgattgga

SEQ ID NO: 271568 - DNA, 25 bp, Homo sapien
cagctcatcataccgcctcccgatg

SEQ ID NO: 271569 - DNA, 25 bp, Homo sapien
gctcatcataccgcctcccgatgat

SEQ ID NO: 271570 - DNA, 25 bp, Homo sapien
tcatcataccgcctcccgatgattg

SEQ ID NO: 271571 - DNA, 25 bp, Homo sapien
tccagctcactggaacaaggacgtt

SEQ ID NO: 271572 - DNA, 25 bp, Homo sapien
cactggaacaaggacgttggagttg

SEQ ID NO: 271573 - DNA, 25 bp, Homo sapien
aagatgtgctccgggtgacggccat

SEQ ID NO: 271574 - DNA, 25 bp, Homo sapien
agtggaagatgtgctccgggtgacg

SEQ ID NO: 271575 - DNA, 25 bp, Homo sapien
gaaaggacatgtaccaacttctctt

SEQ ID NO: 271576 - DNA, 25 bp, Homo sapien
agaaaggacatgtaccaacttctct

SEQ ID NO: 271577 - DNA, 25 bp, Homo sapien
aaaggacatgtaccaacttctcttt

SEQ ID NO: 271578 - DNA, 25 bp, Homo sapien
gagaaaggacatgtaccaacttctc

SEQ ID NO: 271579 - DNA, 25 bp, Homo sapien
gcaccgtatttccagtacacaccta

SEQ ID NO: 271580 - DNA, 25 bp, Homo sapien
tggttgtttgtgctacgaaaaattg

SEQ ID NO: 271581 - DNA, 25 bp, Homo sapien
gctcttcatagcaccgtatttccag

SEQ ID NO: 271582 - DNA, 25 bp, Homo sapien
aaaattgtaattggctcttcatagc

SEQ ID NO: 271583 - DNA, 25 bp, Homo sapien
tgaagactctaaactgctgctcgct

SEQ ID NO: 271584 - DNA, 25 bp, Homo sapien
gaagataccaagcttgtctggtgct

SEQ ID NO: 271585 - DNA, 25 bp, Homo sapien
ccacatctaggaagtcgaagtctct

SEQ ID NO: 271586 - DNA, 25 bp, Homo sapien
gctgctcgctgtttgtgtcatccat

SEQ ID NO: 271587 - DNA, 25 bp, Homo sapien
aacaccagccaccgagctaagcaga

SEQ ID NO: 271588 - DNA, 25 bp, Homo sapien
acaccagccaccgagctaagcagag

SEQ ID NO: 271589 - DNA, 25 bp, Homo sapien
agccaccgagctaagcagagcaaag

SEQ ID NO: 271590 - DNA, 25 bp, Homo sapien
ccaccgagctaagcagagcaaagag

SEQ ID NO: 271591 - DNA, 25 bp, Homo sapien
ttcatagctgaaagtatcttattac

SEQ ID NO: 271592 - DNA, 25 bp, Homo sapien
caaacatgattcatagctgaaagta

SEQ ID NO: 271593 - DNA, 25 bp, Homo sapien
tgtttttgcaaacatgattcatagc

SEQ ID NO: 271594 - DNA, 25 bp, Homo sapien
catgattcatagctgaaagtatctt

SEQ ID NO: 271595 - DNA, 25 bp, Homo sapien
gcctcttcaattgtaggactagcag

SEQ ID NO: 271596 - DNA, 25 bp, Homo sapien
ctagcagagagtcgtttgggaaatc

SEQ ID NO: 271597 - DNA, 25 bp, Homo sapien
agcttgacaacaccatgagcccggt

SEQ ID NO: 271598 - DNA, 25 bp, Homo sapien
gaaatctggtgcagttaaacatgag

SEQ ID NO: 271599 - DNA, 25 bp, Homo sapien
gaacaccttctttattccgaggaca

SEQ ID NO: 271600 - DNA, 25 bp, Homo sapien
tttattccgaggacatgattctctc

SEQ ID NO: 271601 - DNA, 25 bp, Homo sapien
gaaagaattggtgaagaacaccttc

SEQ ID NO: 271602 - DNA, 25 bp, Homo sapien
ggaccggatctgctcaacttgtttt

SEQ ID NO: 271603 - DNA, 25 bp, Homo sapien
gaattaccgagaactagcttaagtg

SEQ ID NO: 271604 - DNA, 25 bp, Homo sapien
gagaactagcttaagtggccatgta

SEQ ID NO: 271605 - DNA, 25 bp, Homo sapien
tatattttgaattaccgagaactag

SEQ ID NO: 271606 - DNA, 25 bp, Homo sapien
taagtggccatgtaagtgttaaaga

SEQ ID NO: 271607 - DNA, 25 bp, Homo sapien
atatcacacttatccaggctgtcca

SEQ ID NO: 271608 - DNA, 25 bp, Homo sapien
tgtccagagaacgtctgcgcactcc

SEQ ID NO: 271609 - DNA, 25 bp, Homo sapien
ggtgcattttattcaggctaggagt

SEQ ID NO: 271610 - DNA, 25 bp, Homo sapien
cctcctcctcggatgattcatcgga

SEQ ID NO: 271611 - DNA, 25 bp, Homo sapien
gactctgccagctagaacccgtatg

SEQ ID NO: 271612 - DNA, 25 bp, Homo sapien
gtatgacaccacctgacagttccga

SEQ ID NO: 271613 - DNA, 25 bp, Homo sapien
tccgattttagttcagcagctgtgg

SEQ ID NO: 271614 - DNA, 25 bp, Homo sapien
gacagttccgattttagttcagcag

SEQ ID NO: 271615 - DNA, 25 bp, Homo sapien
ttctgcaggggtcgagtcacaggct

SEQ ID NO: 271616 - DNA, 25 bp, Homo sapien
aagcatcaaagctggacattctggt

SEQ ID NO: 271617 - DNA, 25 bp, Homo sapien
ccatgggattcgtctcttcagaggg

SEQ ID NO: 271618 - DNA, 25 bp, Homo sapien
agctggacattctggtgttaaagga

SEQ ID NO: 271619 - DNA, 25 bp, Homo sapien
tgcatgtatgctttacccttgagaa

SEQ ID NO: 271620 - DNA, 25 bp, Homo sapien
tccctgagcctgctgggttgctcgg

SEQ ID NO: 271621 - DNA, 25 bp, Homo sapien
ggttgctcggtctttccatataggg

SEQ ID NO: 271622 - DNA, 25 bp, Homo sapien
tatgcacgagtgatccagagtcctt

SEQ ID NO: 271623 - DNA, 25 bp, Homo sapien
ggtccagtgcccgattgcctttttc

SEQ ID NO: 271624 - DNA, 25 bp, Homo sapien
gaaagatcatcctcatgcacggtgg

SEQ ID NO: 271625 - DNA, 25 bp, Homo sapien
taaagctgtcgctgcattcaaaagc

SEQ ID NO: 271626 - DNA, 25 bp, Homo sapien
cagtcatgtccaggctaaagctgtc

SEQ ID NO: 271627 - DNA, 25 bp, Homo sapien
cacggattctttcacgattcgagga

SEQ ID NO: 271628 - DNA, 25 bp, Homo sapien
tgttccacacgaggccctataatgg

SEQ ID NO: 271629 - DNA, 25 bp, Homo sapien
taggatgtcccagcagtgcaactgt

SEQ ID NO: 271630 - DNA, 25 bp, Homo sapien
gaaaccagagatacgcagggaaagt

SEQ ID NO: 271631 - DNA, 25 bp, Homo sapien
aaggcggcaaggatggctgagaaga

SEQ ID NO: 271632 - DNA, 25 bp, Homo sapien
gaaaggcggcaaggatggctgagaa

SEQ ID NO: 271633 - DNA, 25 bp, Homo sapien
cggcaaggatggctgagaagaaggg

SEQ ID NO: 271634 - DNA, 25 bp, Homo sapien
ctgaaaggcggcaaggatggctgag

SEQ ID NO: 271635 - DNA, 25 bp, Homo sapien
taagctggttgatgtggctgcgcca

SEQ ID NO: 271636 - DNA, 25 bp, Homo sapien
tcctcggcatcgtcacaggctgcgg

SEQ ID NO: 271637 - DNA, 25 bp, Homo sapien
gccatctgagtcacacataagctgg

SEQ ID NO: 271638 - DNA, 25 bp, Homo sapien
tgagtcacacataagctggttgatg

SEQ ID NO: 271639 - DNA, 25 bp, Homo sapien
gggttggaatcccacctgcactctg

SEQ ID NO: 271640 - DNA, 25 bp, Homo sapien
tgcttcaagctcagacataggtcta

SEQ ID NO: 271641 - DNA, 25 bp, Homo sapien
cataggtctagttaactgcaatggc

SEQ ID NO: 271642 - DNA, 25 bp, Homo sapien
aacaagcgagatttaagcgtgccca

SEQ ID NO: 271643 - DNA, 25 bp, Homo sapien
aggaagcagaaccttttctgaatat

SEQ ID NO: 271644 - DNA, 25 bp, Homo sapien
ttaggaagcagaaccttttctgaat

SEQ ID NO: 271645 - DNA, 25 bp, Homo sapien
taggaagcagaaccttttctgaata

SEQ ID NO: 271646 - DNA, 25 bp, Homo sapien
ggaagcagaaccttttctgaatatt

SEQ ID NO: 271647 - DNA, 25 bp, Homo sapien
gaagagctgacaaatttggatccga

SEQ ID NO: 271648 - DNA, 25 bp, Homo sapien
tccaaggtaactggctgcatcacag

SEQ ID NO: 271649 - DNA, 25 bp, Homo sapien
tctccaaggtaactggctgcatcac

SEQ ID NO: 271650 - DNA, 25 bp, Homo sapien
cgattccccggaggttatctccaag

SEQ ID NO: 271651 - DNA, 25 bp, Homo sapien
tcggcatccacaaaaagtgtaggac

SEQ ID NO: 271652 - DNA, 25 bp, Homo sapien
agtctcggcatccacaaaaagtgta

SEQ ID NO: 271653 - DNA, 25 bp, Homo sapien
ggcatccacaaaaagtgtaggacat

SEQ ID NO: 271654 - DNA, 25 bp, Homo sapien
gtctcggcatccacaaaaagtgtag

SEQ ID NO: 271655 - DNA, 25 bp, Homo sapien
gatcagtgccaacgatgcagacgga

SEQ ID NO: 271656 - DNA, 25 bp, Homo sapien
actgggcaacctggcatcatgggca

SEQ ID NO: 271657 - DNA, 25 bp, Homo sapien
tgaattaccgtcagccagagactgt

SEQ ID NO: 271658 - DNA, 25 bp, Homo sapien
caagcagtgtgaagacaaacctcca

SEQ ID NO: 271659 - DNA, 25 bp, Homo sapien
tgcagttctaacacactgaacttga

SEQ ID NO: 271660 - DNA, 25 bp, Homo sapien
ttcttgcagttctaacacactgaac

SEQ ID NO: 271661 - DNA, 25 bp, Homo sapien
tattcttgcagttctaacacactga

SEQ ID NO: 271662 - DNA, 25 bp, Homo sapien
aatattcttgcagttctaacacact

SEQ ID NO: 271663 - DNA, 25 bp, Homo sapien
gagtttgaactcttgcccttgggca

SEQ ID NO: 271664 - DNA, 25 bp, Homo sapien
acttctgtcatgctgcggtggctgc

SEQ ID NO: 271665 - DNA, 25 bp, Homo sapien
catctgagatgagagacggcaagtc

SEQ ID NO: 271666 - DNA, 25 bp, Homo sapien
cccttgggcaggtcaagataacatc

SEQ ID NO: 271667 - DNA, 25 bp, Homo sapien
gacaggtaattactccatctcttga

SEQ ID NO: 271668 - DNA, 25 bp, Homo sapien
cctggttgacaggtaattactccat

SEQ ID NO: 271669 - DNA, 25 bp, Homo sapien
gagtcccctggttgacaggtaatta

SEQ ID NO: 271670 - DNA, 25 bp, Homo sapien
tttcttcggagtcccctggttgaca

SEQ ID NO: 271671 - DNA, 25 bp, Homo sapien
caatgttagagcacacaagagaccc

SEQ ID NO: 271672 - DNA, 25 bp, Homo sapien
tactctgttggtttcatgtaaatgt

SEQ ID NO: 271673 - DNA, 25 bp, Homo sapien
gacagtatccagcaaaaaaggttat

SEQ ID NO: 271674 - DNA, 25 bp, Homo sapien
tcttcttttctcaagttccaggctt

SEQ ID NO: 271675 - DNA, 25 bp, Homo sapien
tcttattcagagacaccaggaattc

SEQ ID NO: 271676 - DNA, 25 bp, Homo sapien
gagagtccatatagggcagtctaca

SEQ ID NO: 271677 - DNA, 25 bp, Homo sapien
aaggcaggcccagtgttgctagatc

SEQ ID NO: 271678 - DNA, 25 bp, Homo sapien
gaattggttatagttcacaagccac

SEQ ID NO: 271679 - DNA, 25 bp, Homo sapien
cagtaggactgaaaaagcaatagca

SEQ ID NO: 271680 - DNA, 25 bp, Homo sapien
gcagctggaagtgtagcttatataa

SEQ ID NO: 271681 - DNA, 25 bp, Homo sapien
tggccgatgagcttacagtaggact

SEQ ID NO: 271682 - DNA, 25 bp, Homo sapien
atggagctaacttcgtgcacctggc

SEQ ID NO: 271683 - DNA, 25 bp, Homo sapien
cctccgcatagctgccagagagatc

SEQ ID NO: 271684 - DNA, 25 bp, Homo sapien
taggtgcggcatgtcttatgatctc

SEQ ID NO: 271685 - DNA, 25 bp, Homo sapien
tacctgaaatactcctaggtgcggc

SEQ ID NO: 271686 - DNA, 25 bp, Homo sapien
tacccctaggcaaatgagccgttag

SEQ ID NO: 271687 - DNA, 25 bp, Homo sapien
tgtgtgtacctacccatatgaatac

SEQ ID NO: 271688 - DNA, 25 bp, Homo sapien
gaaatattcagttctagacatctgc

SEQ ID NO: 271689 - DNA, 25 bp, Homo sapien
gaatacacacaccaggtataccttg

SEQ ID NO: 271690 - DNA, 25 bp, Homo sapien
taaatgcaactacctactacagaag

SEQ ID NO: 271691 - DNA, 25 bp, Homo sapien
tgagactgaagataatagccatcct

SEQ ID NO: 271692 - DNA, 25 bp, Homo sapien
ttagtacagtccagcacctaagtgc

SEQ ID NO: 271693 - DNA, 25 bp, Homo sapien
tcaagagtgagtagatctgggttca

SEQ ID NO: 271694 - DNA, 25 bp, Homo sapien
aattgtgaccatggacgctgtccta

SEQ ID NO: 271695 - DNA, 25 bp, Homo sapien
tatgggtgtggttaagcataagctt

SEQ ID NO: 271696 - DNA, 25 bp, Homo sapien
gggtgtggttaagcataagcttaat

SEQ ID NO: 271697 - DNA, 25 bp, Homo sapien
atgggtgtggttaagcataagctta

SEQ ID NO: 271698 - DNA, 25 bp, Homo sapien
cttatgggtgtggttaagcataagc

SEQ ID NO: 271699 - DNA, 25 bp, Homo sapien
gcatggactggatggctgcttcagt

SEQ ID NO: 271700 - DNA, 25 bp, Homo sapien
aatgactgcactggcttccttcagg

SEQ ID NO: 271701 - DNA, 25 bp, Homo sapien
ggaccacgcgccgtctgaatagaga

SEQ ID NO: 271702 - DNA, 25 bp, Homo sapien
tgatctgccgcaaagctttgccgag

SEQ ID NO: 271703 - DNA, 25 bp, Homo sapien
agtgaggactcggtaactctgggcc

SEQ ID NO: 271704 - DNA, 25 bp, Homo sapien
tggttagaccccaccagggcataag

SEQ ID NO: 271705 - DNA, 25 bp, Homo sapien
cataagtacccgtctgtcccagagt

SEQ ID NO: 271706 - DNA, 25 bp, Homo sapien
tcagagactagtgccagaaacactg

SEQ ID NO: 271707 - DNA, 25 bp, Homo sapien
tctgtccaggacgttctaagctacc

SEQ ID NO: 271708 - DNA, 25 bp, Homo sapien
gaagacactgaatgacgttgcccca

SEQ ID NO: 271709 - DNA, 25 bp, Homo sapien
catcttacagttttcagtggccagc

SEQ ID NO: 271710 - DNA, 25 bp, Homo sapien
tagtcggctttggtatgcaacggaa

SEQ ID NO: 271711 - DNA, 25 bp, Homo sapien
gaaagttgtctactgtggttagcca

SEQ ID NO: 271712 - DNA, 25 bp, Homo sapien
caatagccgacaagatttgactggt

SEQ ID NO: 271713 - DNA, 25 bp, Homo sapien
catcacggtggttctctgctgggta

SEQ ID NO: 271714 - DNA, 25 bp, Homo sapien
agtgatgtctaagttacagagcgcc

SEQ ID NO: 271715 - DNA, 25 bp, Homo sapien
cattgtttgttaggacttagaacca

SEQ ID NO: 271716 - DNA, 25 bp, Homo sapien
tacagttcactgaaaagatcattgt

SEQ ID NO: 271717 - DNA, 25 bp, Homo sapien
caggaagcacgtgtaagctattgat

SEQ ID NO: 271718 - DNA, 25 bp, Homo sapien
aagcagcctggaggtacgcttattc

SEQ ID NO: 271719 - DNA, 25 bp, Homo sapien
taattgatctcaaacaaatgcattg

SEQ ID NO: 271720 - DNA, 25 bp, Homo sapien
aaaaactagtttcattgagatacaa

SEQ ID NO: 271721 - DNA, 25 bp, Homo sapien
tatcctgggtcatgataggtatcca

SEQ ID NO: 271722 - DNA, 25 bp, Homo sapien
gagatacaatgaacataccctaata

SEQ ID NO: 271723 - DNA, 25 bp, Homo sapien
aaacagtgcctagcccagagtgggc

SEQ ID NO: 271724 - DNA, 25 bp, Homo sapien
taggagcctcatgggaacagggacc

SEQ ID NO: 271725 - DNA, 25 bp, Homo sapien
gatagctgcggtgtcctctaaaaca

SEQ ID NO: 271726 - DNA, 25 bp, Homo sapien
gatagctaagatagccctgtccaca

SEQ ID NO: 271727 - DNA, 25 bp, Homo sapien
caatgatgtgcctagttgtagtttc

SEQ ID NO: 271728 - DNA, 25 bp, Homo sapien
agctcttattgcatctcttttgaag

SEQ ID NO: 271729 - DNA, 25 bp, Homo sapien
taagagatattttcgctgggtatat

SEQ ID NO: 271730 - DNA, 25 bp, Homo sapien
tctttccccttcgtaaatctgctta

SEQ ID NO: 271731 - DNA, 25 bp, Homo sapien
ctagtttcagaagctcgcgccacaa

SEQ ID NO: 271732 - DNA, 25 bp, Homo sapien
tcagtgtggcgaaaggaaattcctt

SEQ ID NO: 271733 - DNA, 25 bp, Homo sapien
gccgcaaaagacacccgaggcgcag

SEQ ID NO: 271734 - DNA, 25 bp, Homo sapien
ctggccacgtgacgccgtgacgcga

SEQ ID NO: 271735 - DNA, 25 bp, Homo sapien
aaaccgcgccggtcacaaatctgtc

SEQ ID NO: 271736 - DNA, 25 bp, Homo sapien
aagctgacaaaaaccgcgccggtca

SEQ ID NO: 271737 - DNA, 25 bp, Homo sapien
cttttttggccggagtaagctgaca

SEQ ID NO: 271738 - DNA, 25 bp, Homo sapien
tggccggagtaagctgacaaaaacc

SEQ ID NO: 271739 - DNA, 25 bp, Homo sapien
aacgtggctagtgcgactagagaag

SEQ ID NO: 271740 - DNA, 25 bp, Homo sapien
ggtgccactagccacattaagcact

SEQ ID NO: 271741 - DNA, 25 bp, Homo sapien
tgtgctgtccaaaccggtgccacta

SEQ ID NO: 271742 - DNA, 25 bp, Homo sapien
tcctggaacggtaacagcttactgt

SEQ ID NO: 271743 - DNA, 25 bp, Homo sapien
tattcctccaatgcttggtaaataa

SEQ ID NO: 271744 - DNA, 25 bp, Homo sapien
gatattcctccaatgcttggtaaat

SEQ ID NO: 271745 - DNA, 25 bp, Homo sapien
ctacgatattcctccaatgcttggt

SEQ ID NO: 271746 - DNA, 25 bp, Homo sapien
acgatattcctccaatgcttggtaa

SEQ ID NO: 271747 - DNA, 25 bp, Homo sapien
tgcccaatccgtccatgcaaggcca

SEQ ID NO: 271748 - DNA, 25 bp, Homo sapien
gtcctgcccaatccgtccatgcaag

SEQ ID NO: 271749 - DNA, 25 bp, Homo sapien
ggtgtcctgcccaatccgtccatgc

SEQ ID NO: 271750 - DNA, 25 bp, Homo sapien
ctgcccaatccgtccatgcaaggcc

SEQ ID NO: 271751 - DNA, 25 bp, Homo sapien
aacccaggagccaggtgtaggacca

SEQ ID NO: 271752 - DNA, 25 bp, Homo sapien
tgcaggggtacaggcaagtcccttt

SEQ ID NO: 271753 - DNA, 25 bp, Homo sapien
tgtgtttccatccatgcactcgttg

SEQ ID NO: 271754 - DNA, 25 bp, Homo sapien
ctcgttggcccaacaaacacctgct

SEQ ID NO: 271755 - DNA, 25 bp, Homo sapien
tcatagggcctgttggagagagtcc

SEQ ID NO: 271756 - DNA, 25 bp, Homo sapien
tgtttgccactgtcctaaagcctaa

SEQ ID NO: 271757 - DNA, 25 bp, Homo sapien
gctgagtggctgtatcatagggcct

SEQ ID NO: 271758 - DNA, 25 bp, Homo sapien
cttggtgtaagaaggggcgctcaca

SEQ ID NO: 271759 - DNA, 25 bp, Homo sapien
gcctgaaccctgatgtgaagagtag

SEQ ID NO: 271760 - DNA, 25 bp, Homo sapien
gatgtgaagagtaggattcaaatat

SEQ ID NO: 271761 - DNA, 25 bp, Homo sapien
tgaagagtaggattcaaatatgact

SEQ ID NO: 271762 - DNA, 25 bp, Homo sapien
tgtgaagagtaggattcaaatatga

SEQ ID NO: 271763 - DNA, 25 bp, Homo sapien
cctcgcagacattctcgctgcactg

SEQ ID NO: 271764 - DNA, 25 bp, Homo sapien
tccccctcgcagacattctcgctgc

SEQ ID NO: 271765 - DNA, 25 bp, Homo sapien
cccctcgcagacattctcgctgcac

SEQ ID NO: 271766 - DNA, 25 bp, Homo sapien
tcgcagacattctcgctgcactggg

SEQ ID NO: 271767 - DNA, 25 bp, Homo sapien
actgtggattgatgaccaactgggt

SEQ ID NO: 271768 - DNA, 25 bp, Homo sapien
aactgggtcctggtgtcctcctgga

SEQ ID NO: 271769 - DNA, 25 bp, Homo sapien
ggaactggtgttcaactgtggattg

SEQ ID NO: 271770 - DNA, 25 bp, Homo sapien
gttcaactgtggattgatgaccaac

SEQ ID NO: 271771 - DNA, 25 bp, Homo sapien
tcagctgtggcctaatgaccacctg

SEQ ID NO: 271772 - DNA, 25 bp, Homo sapien
gtgttcagctgtggcctaatgacca

SEQ ID NO: 271773 - DNA, 25 bp, Homo sapien
tggtgttccctcaagattggtgttc

SEQ ID NO: 271774 - DNA, 25 bp, Homo sapien
ggtgttccctcaagattggtgttca

SEQ ID NO: 271775 - DNA, 25 bp, Homo sapien
caatgtccacctgagcctgggtgtc

SEQ ID NO: 271776 - DNA, 25 bp, Homo sapien
gatgttcacctttgacctgatgtcc

SEQ ID NO: 271777 - DNA, 25 bp, Homo sapien
cctggggcctggtgtaaacctctag

SEQ ID NO: 271778 - DNA, 25 bp, Homo sapien
ttgggcttgatgtcaacctggagcc

SEQ ID NO: 271779 - DNA, 25 bp, Homo sapien
ctggggcataggtgcccactggggg

SEQ ID NO: 271780 - DNA, 25 bp, Homo sapien
tggggcataggtgcccactgggggc

SEQ ID NO: 271781 - DNA, 25 bp, Homo sapien
gggcataggtgcccactgggggctt

SEQ ID NO: 271782 - DNA, 25 bp, Homo sapien
ggcataggtgcccactgggggcttc

SEQ ID NO: 271783 - DNA, 25 bp, Homo sapien
cctggggcctggtgtaaacctctag

SEQ ID NO: 271784 - DNA, 25 bp, Homo sapien
atgtccacctgagtactgatgtcca

SEQ ID NO: 271785 - DNA, 25 bp, Homo sapien
caatgtccacctgagcctgggtgtc

SEQ ID NO: 271786 - DNA, 25 bp, Homo sapien
ttgggcttgatgtcaacctggagcc

SEQ ID NO: 271787 - DNA, 25 bp, Homo sapien
taggcttaagtgtacatctgtggcc

SEQ ID NO: 271788 - DNA, 25 bp, Homo sapien
tctgccttaggcttaagtgtacatc

SEQ ID NO: 271789 - DNA, 25 bp, Homo sapien
gggtctgccttaggcttaagtgtac

SEQ ID NO: 271790 - DNA, 25 bp, Homo sapien
ccttaggcttaagtgtacatctgtg

SEQ ID NO: 271791 - DNA, 25 bp, Homo sapien
taagtaattcacgtgtcaggcactg

SEQ ID NO: 271792 - DNA, 25 bp, Homo sapien
tacatataattgctagggccactga

SEQ ID NO: 271793 - DNA, 25 bp, Homo sapien
tgtaaaatgcagacacggaaagctg

SEQ ID NO: 271794 - DNA, 25 bp, Homo sapien
aacatgctctaatgcttccggtggg

SEQ ID NO: 271795 - DNA, 25 bp, Homo sapien
gataggaagtaccagccgtgaaata

SEQ ID NO: 271796 - DNA, 25 bp, Homo sapien
tatggaacagtcagtctacatggac

SEQ ID NO: 271797 - DNA, 25 bp, Homo sapien
gggtgagctcctaacaaactgatct

SEQ ID NO: 271798 - DNA, 25 bp, Homo sapien
gcaggcaagctttggagcgtaatca

SEQ ID NO: 271799 - DNA, 25 bp, Homo sapien
gagtagttcacacattatagtcaca

SEQ ID NO: 271800 - DNA, 25 bp, Homo sapien
gcatgtcaacatatgggcttcgaag

SEQ ID NO: 271801 - DNA, 25 bp, Homo sapien
gaggaacgcaaatgatcagactgtg

SEQ ID NO: 271802 - DNA, 25 bp, Homo sapien
tcagactgtgttttgacggaaaagc

SEQ ID NO: 271803 - DNA, 25 bp, Homo sapien
ggggatggatgataaatccacaggt

SEQ ID NO: 271804 - DNA, 25 bp, Homo sapien
acccttgttgtaagtggggatggat

SEQ ID NO: 271805 - DNA, 25 bp, Homo sapien
ggatggatgataaatccacaggtac

SEQ ID NO: 271806 - DNA, 25 bp, Homo sapien
atggatgataaatccacaggtacat

SEQ ID NO: 271807 - DNA, 25 bp, Homo sapien
tattaagttttgaaagttctcagct

SEQ ID NO: 271808 - DNA, 25 bp, Homo sapien
taagttttgaaagttctcagcttac

SEQ ID NO: 271809 - DNA, 25 bp, Homo sapien
gcatgctcattctcctgtgtggcta

SEQ ID NO: 271810 - DNA, 25 bp, Homo sapien
tgtggctagatgcatttcggaaaag

SEQ ID NO: 271811 - DNA, 25 bp, Homo sapien
taatgacttagcacccctgtattgg

SEQ ID NO: 271812 - DNA, 25 bp, Homo sapien
tgcaaagtagttcagataccagaga

SEQ ID NO: 271813 - DNA, 25 bp, Homo sapien
cggcggcagcgtgaagcccggcggc

SEQ ID NO: 271814 - DNA, 25 bp, Homo sapien
cggcagcgtgaagcccggcggcgag

SEQ ID NO: 271815 - DNA, 25 bp, Homo sapien
gcggcagcgtgaagcccggcggcga

SEQ ID NO: 271816 - DNA, 25 bp, Homo sapien
gaggcgctggcggttgcagccccgg

SEQ ID NO: 271817 - DNA, 25 bp, Homo sapien
aggcgctggcggttgcagccccggg

SEQ ID NO: 271818 - DNA, 25 bp, Homo sapien
ctgaggcgctggcggttgcagcccc

SEQ ID NO: 271819 - DNA, 25 bp, Homo sapien
tgaggcgctggcggttgcagccccg

SEQ ID NO: 271820 - DNA, 25 bp, Homo sapien
ccttacacctccggtggcactcctg

SEQ ID NO: 271821 - DNA, 25 bp, Homo sapien
acacctccggtggcactcctggaat

SEQ ID NO: 271822 - DNA, 25 bp, Homo sapien
tacacctccggtggcactcctggaa

SEQ ID NO: 271823 - DNA, 25 bp, Homo sapien
ttacacctccggtggcactcctgga

SEQ ID NO: 271824 - DNA, 25 bp, Homo sapien
aatgacctgagcgtggagactgccg

SEQ ID NO: 271825 - DNA, 25 bp, Homo sapien
acctaccagtacagggaacgcctct

SEQ ID NO: 271826 - DNA, 25 bp, Homo sapien
gtccatgtcacctaccagtacaggg

SEQ ID NO: 271827 - DNA, 25 bp, Homo sapien
ggagactgccgctgttgtccatgtc

SEQ ID NO: 271828 - DNA, 25 bp, Homo sapien
tccccgtccacctgccagttcacaa

SEQ ID NO: 271829 - DNA, 25 bp, Homo sapien
cacctgccagttcacaaacttcgac

SEQ ID NO: 271830 - DNA, 25 bp, Homo sapien
gtccacctgccagttcacaaacttc

SEQ ID NO: 271831 - DNA, 25 bp, Homo sapien
cctgccagttcacaaacttcgactg

SEQ ID NO: 271832 - DNA, 25 bp, Homo sapien
ttccccagggtgacggctgctgtga

SEQ ID NO: 271833 - DNA, 25 bp, Homo sapien
cggctgctgtgagtcagagccccga

SEQ ID NO: 271834 - DNA, 25 bp, Homo sapien
ctgctgtgagtcagagccccgatac

SEQ ID NO: 271835 - DNA, 25 bp, Homo sapien
ctgggttccccagggtgacggctgc

SEQ ID NO: 271836 - DNA, 25 bp, Homo sapien
gcctgatgctctggaggtagtgggc

SEQ ID NO: 271837 - DNA, 25 bp, Homo sapien
gatgctctggaggtagtgggcttcg

SEQ ID NO: 271838 - DNA, 25 bp, Homo sapien
caaggcctgatgctctggaggtagt

SEQ ID NO: 271839 - DNA, 25 bp, Homo sapien
tctggaggtagtgggcttcgagaat

SEQ ID NO: 271840 - DNA, 25 bp, Homo sapien
ctcgtccccaggccgccggttgtag

SEQ ID NO: 271841 - DNA, 25 bp, Homo sapien
tcgtccccaggccgccggttgtaga

SEQ ID NO: 271842 - DNA, 25 bp, Homo sapien
gtagtatgttgcgtgcatgcccgcc

SEQ ID NO: 271843 - DNA, 25 bp, Homo sapien
tttgtggtagtatgttgcgtgcatg

SEQ ID NO: 271844 - DNA, 25 bp, Homo sapien
tggtagtatgttgcgtgcatgcccg

SEQ ID NO: 271845 - DNA, 25 bp, Homo sapien
gtatgttgcgtgcatgcccgcctgg

SEQ ID NO: 271846 - DNA, 25 bp, Homo sapien
ttgttcttgcggtgattcaggaagg

SEQ ID NO: 271847 - DNA, 25 bp, Homo sapien
tgttcttgcggtgattcaggaaggc

SEQ ID NO: 271848 - DNA, 25 bp, Homo sapien
tacgcatgacagagcttttagagca

SEQ ID NO: 271849 - DNA, 25 bp, Homo sapien
ccaggatgctgagagtataatacgc

SEQ ID NO: 271850 - DNA, 25 bp, Homo sapien
taccacggagtgctatgaaatctat

SEQ ID NO: 271851 - DNA, 25 bp, Homo sapien
gaaatagggagcatgtttacagcca

SEQ ID NO: 271852 - DNA, 25 bp, Homo sapien
gagaactatgaagctagtattcaaa

SEQ ID NO: 271853 - DNA, 25 bp, Homo sapien
cacttttgaggctgagaactatgaa

SEQ ID NO: 271854 - DNA, 25 bp, Homo sapien
gctgagaactatgaagctagtattc

SEQ ID NO: 271855 - DNA, 25 bp, Homo sapien
tttaaggttctcacttttgaggctg

SEQ ID NO: 271856 - DNA, 25 bp, Homo sapien
gaacatgagtaccacagttagactg

SEQ ID NO: 271857 - DNA, 25 bp, Homo sapien
gattgaggccagaacataaagtgcc

SEQ ID NO: 271858 - DNA, 25 bp, Homo sapien
cccaggaagggctctatgaatatta

SEQ ID NO: 271859 - DNA, 25 bp, Homo sapien
tttgtacggtgataggaacccagga

SEQ ID NO: 271860 - DNA, 25 bp, Homo sapien
tcacacatttcactagtgacactga

SEQ ID NO: 271861 - DNA, 25 bp, Homo sapien
agaagatgcacgattgccattcagg

SEQ ID NO: 271862 - DNA, 25 bp, Homo sapien
taagcatcagttgtcgattcattca

SEQ ID NO: 271863 - DNA, 25 bp, Homo sapien
aggggaagcaattccaggctgatga

SEQ ID NO: 271864 - DNA, 25 bp, Homo sapien
gaacaattcagggtcctttcataac

SEQ ID NO: 271865 - DNA, 25 bp, Homo sapien
aattgtacaatctaagtggttggac

SEQ ID NO: 271866 - DNA, 25 bp, Homo sapien
aatgagctgtacacaaatactgaac

SEQ ID NO: 271867 - DNA, 25 bp, Homo sapien
taccatattagggaaactgtttgtc

SEQ ID NO: 271868 - DNA, 25 bp, Homo sapien
cctcagtttgggaattaagtaagct

SEQ ID NO: 271869 - DNA, 25 bp, Homo sapien
cttaagttttagtgacctcagtttg

SEQ ID NO: 271870 - DNA, 25 bp, Homo sapien
gaattcacactttaatgctatggcc

SEQ ID NO: 271871 - DNA, 25 bp, Homo sapien
aaactatgctttagactttgttaga

SEQ ID NO: 271872 - DNA, 25 bp, Homo sapien
ggctatggttcaggcgcacttcaca

SEQ ID NO: 271873 - DNA, 25 bp, Homo sapien
ctatgagtgtgatggtgtttgagaa

SEQ ID NO: 271874 - DNA, 25 bp, Homo sapien
gatggagaaagcactcacctacacg

SEQ ID NO: 271875 - DNA, 25 bp, Homo sapien
cctttctgttctatgagtgtgatgg

SEQ ID NO: 271876 - DNA, 25 bp, Homo sapien
ttcttcatcgcacttgcggcccagg

SEQ ID NO: 271877 - DNA, 25 bp, Homo sapien
gagaagctggcgctgctccttgcca

SEQ ID NO: 271878 - DNA, 25 bp, Homo sapien
ctttgttcatgggtccgggaagcag

SEQ ID NO: 271879 - DNA, 25 bp, Homo sapien
tccttgccatgcttggcggccgctg

SEQ ID NO: 271880 - DNA, 25 bp, Homo sapien
tagattaactactcagcctccagag

SEQ ID NO: 271881 - DNA, 25 bp, Homo sapien
acttatgtcttcagacaggccctgt

SEQ ID NO: 271882 - DNA, 25 bp, Homo sapien
tccatgtttagagagagatctttga

SEQ ID NO: 271883 - DNA, 25 bp, Homo sapien
tcatacatttgagaacagggtcaca

SEQ ID NO: 271884 - DNA, 25 bp, Homo sapien
tatgtaagagtcctagtcttgtcag

SEQ ID NO: 271885 - DNA, 25 bp, Homo sapien
taagagtcctagtcttgtcagaaaa

SEQ ID NO: 271886 - DNA, 25 bp, Homo sapien
agtctatgtaagagtcctagtcttg

SEQ ID NO: 271887 - DNA, 25 bp, Homo sapien
tgtaagagtcctagtcttgtcagaa

SEQ ID NO: 271888 - DNA, 25 bp, Homo sapien
ctgcttcagccatgtaaggcgtgtc

SEQ ID NO: 271889 - DNA, 25 bp, Homo sapien
tactgggaagtagagcattgctatg

SEQ ID NO: 271890 - DNA, 25 bp, Homo sapien
tgtaaggcgtgtcacctccctcttc

SEQ ID NO: 271891 - DNA, 25 bp, Homo sapien
gcagaatcgtgatccaattaaacca

SEQ ID NO: 271892 - DNA, 25 bp, Homo sapien
tactgtatgcctacatatttcattt

SEQ ID NO: 271893 - DNA, 25 bp, Homo sapien
tcttgctatccttgcacatgaaata

SEQ ID NO: 271894 - DNA, 25 bp, Homo sapien
gactatgagtcttttgcgtcttcat

SEQ ID NO: 271895 - DNA, 25 bp, Homo sapien
tctacaaaataacctgctagaattt

SEQ ID NO: 271896 - DNA, 25 bp, Homo sapien
atctcgctgacagtttgaatcacag

SEQ ID NO: 271897 - DNA, 25 bp, Homo sapien
ctgctgccttatctcgctgacagtt

SEQ ID NO: 271898 - DNA, 25 bp, Homo sapien
gctgccttatctcgctgacagtttg

SEQ ID NO: 271899 - DNA, 25 bp, Homo sapien
ccttatctcgctgacagtttgaatc

SEQ ID NO: 271900 - DNA, 25 bp, Homo sapien
taagactgggagatctaaggctgga

SEQ ID NO: 271901 - DNA, 25 bp, Homo sapien
gctcaactctctagagacctgactc

SEQ ID NO: 271902 - DNA, 25 bp, Homo sapien
aagcgaatgggcacaccgcataaga

SEQ ID NO: 271903 - DNA, 25 bp, Homo sapien
tcgtcacactggctagaagtcaagc

SEQ ID NO: 271904 - DNA, 25 bp, Homo sapien
taccaagttcgcatgaagacagtat

SEQ ID NO: 271905 - DNA, 25 bp, Homo sapien
aaaagatgttactgggttatagaag

SEQ ID NO: 271906 - DNA, 25 bp, Homo sapien
cactggtttcaaaaaagatgttact

SEQ ID NO: 271907 - DNA, 25 bp, Homo sapien
gaaacaggataccaagttcgcatga

SEQ ID NO: 271908 - DNA, 25 bp, Homo sapien
catgccaccggtactttatacagag

SEQ ID NO: 271909 - DNA, 25 bp, Homo sapien
ttaatgttagactttctacttgaac

SEQ ID NO: 271910 - DNA, 25 bp, Homo sapien
ctttagtctgatgccgtgggtgagc

SEQ ID NO: 271911 - DNA, 25 bp, Homo sapien
ggctgcatctccactaatacacatg

SEQ ID NO: 271912 - DNA, 25 bp, Homo sapien
tttagctgttcctgtcacacaaaaa

SEQ ID NO: 271913 - DNA, 25 bp, Homo sapien
caaagcagacatataggatgatcaa

SEQ ID NO: 271914 - DNA, 25 bp, Homo sapien
aatttgcttcactgtagtaaccagt

SEQ ID NO: 271915 - DNA, 25 bp, Homo sapien
tatccttaaggtcatgtggtcaacc

SEQ ID NO: 271916 - DNA, 25 bp, Homo sapien
tctatttgatacctgatggtcacac

SEQ ID NO: 271917 - DNA, 25 bp, Homo sapien
tcttgtctatttgatacctgatggt

SEQ ID NO: 271918 - DNA, 25 bp, Homo sapien
tgtctatttgatacctgatggtcac

SEQ ID NO: 271919 - DNA, 25 bp, Homo sapien
cttgtctatttgatacctgatggtc

SEQ ID NO: 271920 - DNA, 25 bp, Homo sapien
tcagctatgacaattgaaaataagc

SEQ ID NO: 271921 - DNA, 25 bp, Homo sapien
gagaatgcagaatggtcagactacc

SEQ ID NO: 271922 - DNA, 25 bp, Homo sapien
aaaactcagagacattccaatatcc

SEQ ID NO: 271923 - DNA, 25 bp, Homo sapien
cattagtcatagattcagtgtcagc

SEQ ID NO: 271924 - DNA, 25 bp, Homo sapien
tgtctcactggagactgaagtccac

SEQ ID NO: 271925 - DNA, 25 bp, Homo sapien
gagatttttgctggcgtagtccata

SEQ ID NO: 271926 - DNA, 25 bp, Homo sapien
gtttttgcctcctgctggtcatgtg

SEQ ID NO: 271927 - DNA, 25 bp, Homo sapien
cacacatcaagagaggacatttaac

SEQ ID NO: 271928 - DNA, 25 bp, Homo sapien
cactaccaaagcagttcattgtcaa

SEQ ID NO: 271929 - DNA, 25 bp, Homo sapien
gacgtggtcccacatgtgcataatt

SEQ ID NO: 271930 - DNA, 25 bp, Homo sapien
tgttgggcacaaacgcttcagcttg

SEQ ID NO: 271931 - DNA, 25 bp, Homo sapien
gctggtagtatgactcgcttgtacc

SEQ ID NO: 271932 - DNA, 25 bp, Homo sapien
gccatagaaccctttaacaggtgct

SEQ ID NO: 271933 - DNA, 25 bp, Homo sapien
gcagtgctctagtcaccatctaaca

SEQ ID NO: 271934 - DNA, 25 bp, Homo sapien
tcaaatctgtcatcggccatagaac

SEQ ID NO: 271935 - DNA, 25 bp, Homo sapien
tagggacaccttcgactttgaacag

SEQ ID NO: 271936 - DNA, 25 bp, Homo sapien
ccttgtagccttattgtcgtagtta

SEQ ID NO: 271937 - DNA, 25 bp, Homo sapien
cgcgcccggacttccagatttattt

SEQ ID NO: 271938 - DNA, 25 bp, Homo sapien
cactggctgcagtttttgataacaa

SEQ ID NO: 271939 - DNA, 25 bp, Homo sapien
gtcttatctgccattaatacactgg

SEQ ID NO: 271940 - DNA, 25 bp, Homo sapien
atatatgaggttaatccttctatgt

SEQ ID NO: 271941 - DNA, 25 bp, Homo sapien
tatttctagcatttgattttggatt

SEQ ID NO: 271942 - DNA, 25 bp, Homo sapien
cagaagtatgagttccagcgtccct

SEQ ID NO: 271943 - DNA, 25 bp, Homo sapien
ctttgtatgtcctggaggcgaggcc

SEQ ID NO: 271944 - DNA, 25 bp, Homo sapien
ggtccctccatgtgcagtgtctatc

SEQ ID NO: 271945 - DNA, 25 bp, Homo sapien
gacttgacgttgcttcacctactcg

SEQ ID NO: 271946 - DNA, 25 bp, Homo sapien
ttactcatgacgtctccatccagga

SEQ ID NO: 271947 - DNA, 25 bp, Homo sapien
ctccatctaggactgggggcatcct

SEQ ID NO: 271948 - DNA, 25 bp, Homo sapien
gttactcatgacgtctccatccagg

SEQ ID NO: 271949 - DNA, 25 bp, Homo sapien
tctccatctaggactgggggcatcc

SEQ ID NO: 271950 - DNA, 25 bp, Homo sapien
ttgtccccggtgtcagggctctggt

SEQ ID NO: 271951 - DNA, 25 bp, Homo sapien
tggtttccaccattgctaacgggcg

SEQ ID NO: 271952 - DNA, 25 bp, Homo sapien
ggttggtcccagaaagcctgaggat

SEQ ID NO: 271953 - DNA, 25 bp, Homo sapien
gctgagctctcagtagaggtcggca

SEQ ID NO: 271954 - DNA, 25 bp, Homo sapien
tgagcccagagttccgggtcgcggg

SEQ ID NO: 271955 - DNA, 25 bp, Homo sapien
cgctgttcctttgcctgagcccaga

SEQ ID NO: 271956 - DNA, 25 bp, Homo sapien
cctagggtccgctgttcctttgcct

SEQ ID NO: 271957 - DNA, 25 bp, Homo sapien
gtccgctgttcctttgcctgagccc

SEQ ID NO: 271958 - DNA, 25 bp, Homo sapien
tggcaaggcgtttcccaggcagcct

SEQ ID NO: 271959 - DNA, 25 bp, Homo sapien
cagcctcagggtcattgagtggacc

SEQ ID NO: 271960 - DNA, 25 bp, Homo sapien
gtcattgagtggaccactatcccac

SEQ ID NO: 271961 - DNA, 25 bp, Homo sapien
ggaggctggcaaggcgtttcccagg

SEQ ID NO: 271962 - DNA, 25 bp, Homo sapien
ggctggcgtgaaagcgtggtctggg

SEQ ID NO: 271963 - DNA, 25 bp, Homo sapien
tgaaagcgtggtctggggttgccat

SEQ ID NO: 271964 - DNA, 25 bp, Homo sapien
cctggctggcgtgaaagcgtggtct

SEQ ID NO: 271965 - DNA, 25 bp, Homo sapien
ctgcctggctggcgtgaaagcgtgg

SEQ ID NO: 271966 - DNA, 25 bp, Homo sapien
cgccttgtgcaggttaccactgcag

SEQ ID NO: 271967 - DNA, 25 bp, Homo sapien
gcgccttgtgcaggttaccactgca

SEQ ID NO: 271968 - DNA, 25 bp, Homo sapien
gccttgtgcaggttaccactgcagc

SEQ ID NO: 271969 - DNA, 25 bp, Homo sapien
gcagttgtccaactggtgcttctgg

SEQ ID NO: 271970 - DNA, 25 bp, Homo sapien
ccagaaagtggatgaccgggccacc

SEQ ID NO: 271971 - DNA, 25 bp, Homo sapien
ccccagaaagtggatgaccgggcca

SEQ ID NO: 271972 - DNA, 25 bp, Homo sapien
gaaagtggatgaccgggccaccctc

SEQ ID NO: 271973 - DNA, 25 bp, Homo sapien
tctcatgttgtctgtggagtggatg

SEQ ID NO: 271974 - DNA, 25 bp, Homo sapien
acactcctctcatgttgtctgtgga

SEQ ID NO: 271975 - DNA, 25 bp, Homo sapien
tcctctcatgttgtctgtggagtgg

SEQ ID NO: 271976 - DNA, 25 bp, Homo sapien
cactcctctcatgttgtctgtggag

SEQ ID NO: 271977 - DNA, 25 bp, Homo sapien
cccagcagctgtccttaaaagattc

SEQ ID NO: 271978 - DNA, 25 bp, Homo sapien
ccagcagctgtccttaaaagattcc

SEQ ID NO: 271979 - DNA, 25 bp, Homo sapien
gcagctgtccttaaaagattcccag

SEQ ID NO: 271980 - DNA, 25 bp, Homo sapien
cagcagctgtccttaaaagattccc

SEQ ID NO: 271981 - DNA, 25 bp, Homo sapien
tagtccaaggcattgtgaggccccg

SEQ ID NO: 271982 - DNA, 25 bp, Homo sapien
tactctcgttcagggcggagcaggt

SEQ ID NO: 271983 - DNA, 25 bp, Homo sapien
gagatcctcctttgccctagtccaa

SEQ ID NO: 271984 - DNA, 25 bp, Homo sapien
ctgccatgtcttagcccagaacggg

SEQ ID NO: 271985 - DNA, 25 bp, Homo sapien
ctagcgcatggcgttgcaggggtcc

SEQ ID NO: 271986 - DNA, 25 bp, Homo sapien
catggcgttgcaggggtcctccagt

SEQ ID NO: 271987 - DNA, 25 bp, Homo sapien
cgcatggcgttgcaggggtcctcca

SEQ ID NO: 271988 - DNA, 25 bp, Homo sapien
agcgcatggcgttgcaggggtcctc

SEQ ID NO: 271989 - DNA, 25 bp, Homo sapien
gggagaggtccttcagtagcatagt

SEQ ID NO: 271990 - DNA, 25 bp, Homo sapien
tagtccagggcggagccgggggaga

SEQ ID NO: 271991 - DNA, 25 bp, Homo sapien
ccgggggagaggtccttcagtagca

SEQ ID NO: 271992 - DNA, 25 bp, Homo sapien
cgggggagaggtccttcagtagcat

SEQ ID NO: 271993 - DNA, 25 bp, Homo sapien
ggcaggaatagctcagggcgagcca

SEQ ID NO: 271994 - DNA, 25 bp, Homo sapien
ctcagggcgagccagggccgaggtc

SEQ ID NO: 271995 - DNA, 25 bp, Homo sapien
ccagggccgaggtcctcgggagcca

SEQ ID NO: 271996 - DNA, 25 bp, Homo sapien
gtcctcgggagccacagtccagggt

SEQ ID NO: 271997 - DNA, 25 bp, Homo sapien
gtggggcaaggatagtccagatctc

SEQ ID NO: 271998 - DNA, 25 bp, Homo sapien
tttcaggcgagggtcttggcgtgca

SEQ ID NO: 271999 - DNA, 25 bp, Homo sapien
aggatagtccagatctccatggcgg

SEQ ID NO: 272000 - DNA, 25 bp, Homo sapien
ggcaaggatagtccagatctccatg

SEQ ID NO: 272001 - DNA, 25 bp, Homo sapien
acgtaatggagtgggagtactccaa

SEQ ID NO: 272002 - DNA, 25 bp, Homo sapien
tcttattgttccgaagtcggtggca

SEQ ID NO: 272003 - DNA, 25 bp, Homo sapien
ccccggtcctgctgtgccccagtcc

SEQ ID NO: 272004 - DNA, 25 bp, Homo sapien
accccggtcctgctgtgccccagtc

SEQ ID NO: 272005 - DNA, 25 bp, Homo sapien
caggggtcttattgttccgaagtcg

SEQ ID NO: 272006 - DNA, 25 bp, Homo sapien
acctcggcctgcagtccaccacgca

SEQ ID NO: 272007 - DNA, 25 bp, Homo sapien
ctgtgccatagtccaacgcgcggcg

SEQ ID NO: 272008 - DNA, 25 bp, Homo sapien
gtgccatagtccaacgcgcggcggg

SEQ ID NO: 272009 - DNA, 25 bp, Homo sapien
ggggagggggtcacctcggcctgca

SEQ ID NO: 272010 - DNA, 25 bp, Homo sapien
caggtcctcgcttgcctttgtcgtg

SEQ ID NO: 272011 - DNA, 25 bp, Homo sapien
ggggttttcctatgcgatagcccac

SEQ ID NO: 272012 - DNA, 25 bp, Homo sapien
ctctcttgtcagagtctctggcgcg

SEQ ID NO: 272013 - DNA, 25 bp, Homo sapien
gtgggggttttcctatgcgatagcc

SEQ ID NO: 272014 - DNA, 25 bp, Homo sapien
ctcttgtcagagtctctggcgcggg

SEQ ID NO: 272015 - DNA, 25 bp, Homo sapien
ctgggaggagtgtggttcctgcctc

SEQ ID NO: 272016 - DNA, 25 bp, Homo sapien
tgggaggagtgtggttcctgcctca

SEQ ID NO: 272017 - DNA, 25 bp, Homo sapien
gggaggagtgtggttcctgcctcac

SEQ ID NO: 272018 - DNA, 25 bp, Homo sapien
gggtcacggtccttcagtgtcttag

SEQ ID NO: 272019 - DNA, 25 bp, Homo sapien
gtcacggtccttcagtgtcttagtc

SEQ ID NO: 272020 - DNA, 25 bp, Homo sapien
cgtggtggggtcacggtccttcagt

SEQ ID NO: 272021 - DNA, 25 bp, Homo sapien
tggggtcacggtccttcagtgtctt

SEQ ID NO: 272022 - DNA, 25 bp, Homo sapien
aaggcagtggtcctccaatgctgga

SEQ ID NO: 272023 - DNA, 25 bp, Homo sapien
gggatcctgccctgcgatagtccag

SEQ ID NO: 272024 - DNA, 25 bp, Homo sapien
tggcagaacgggagtcctccgtgta

SEQ ID NO: 272025 - DNA, 25 bp, Homo sapien
aggtgccgcagtccagagcgtgaca

SEQ ID NO: 272026 - DNA, 25 bp, Homo sapien
cctctggtgccatagctcaggccgg

SEQ ID NO: 272027 - DNA, 25 bp, Homo sapien
tgccatagctcaggccggcgggagc

SEQ ID NO: 272028 - DNA, 25 bp, Homo sapien
gtgccatagtccaggctgccgggag

SEQ ID NO: 272029 - DNA, 25 bp, Homo sapien
tccagggtgcagcagaacaggagtc

SEQ ID NO: 272030 - DNA, 25 bp, Homo sapien
ttcagtagcttagtccagtgcgccg

SEQ ID NO: 272031 - DNA, 25 bp, Homo sapien
tcttgtgcaagagtccgtggctctg

SEQ ID NO: 272032 - DNA, 25 bp, Homo sapien
gctgggctgaggttctcttgtgcaa

SEQ ID NO: 272033 - DNA, 25 bp, Homo sapien
tagctcaggccaatgtcatacagtc

SEQ ID NO: 272034 - DNA, 25 bp, Homo sapien
tcgggctgaagcccaaagtccccca

SEQ ID NO: 272035 - DNA, 25 bp, Homo sapien
cgggctgaagcccaaagtcccccat

SEQ ID NO: 272036 - DNA, 25 bp, Homo sapien
caggggctcctccatctccaccgtg

SEQ ID NO: 272037 - DNA, 25 bp, Homo sapien
ggggctcctccatctccaccgtgtt

SEQ ID NO: 272038 - DNA, 25 bp, Homo sapien
gctcctccatctccaccgtgttctc

SEQ ID NO: 272039 - DNA, 25 bp, Homo sapien
ggctcctccatctccaccgtgttct

SEQ ID NO: 272040 - DNA, 25 bp, Homo sapien
gcttgtgtcctcccatgttttcagt

SEQ ID NO: 272041 - DNA, 25 bp, Homo sapien
gtgtcctcccatgttttcagttaac

SEQ ID NO: 272042 - DNA, 25 bp, Homo sapien
tgtgtcctcccatgttttcagttaa

SEQ ID NO: 272043 - DNA, 25 bp, Homo sapien
ttgtgtcctcccatgttttcagtta

SEQ ID NO: 272044 - DNA, 25 bp, Homo sapien
tacaggttagtgacagacttggtcc

SEQ ID NO: 272045 - DNA, 25 bp, Homo sapien
caggttagtgacagacttggtccca

SEQ ID NO: 272046 - DNA, 25 bp, Homo sapien
aggttagtgacagacttggtcccac

SEQ ID NO: 272047 - DNA, 25 bp, Homo sapien
ttacaggttagtgacagacttggtc

SEQ ID NO: 272048 - DNA, 25 bp, Homo sapien
caacgggctagagcttctgggaagc

SEQ ID NO: 272049 - DNA, 25 bp, Homo sapien
ggctttccgggcaacgggctagagc

SEQ ID NO: 272050 - DNA, 25 bp, Homo sapien
ctttccgggcaacgggctagagctt

SEQ ID NO: 272051 - DNA, 25 bp, Homo sapien
gctagagcttctgggaagcagtcgt

SEQ ID NO: 272052 - DNA, 25 bp, Homo sapien
gggaggccaatccgcaggtgctggg

SEQ ID NO: 272053 - DNA, 25 bp, Homo sapien
ctgcggagtgctggaggtccttgag

SEQ ID NO: 272054 - DNA, 25 bp, Homo sapien
agggagacccatggcgaggcgcgcc

SEQ ID NO: 272055 - DNA, 25 bp, Homo sapien
tgccggtcgcagtctcaaaagcgcc

SEQ ID NO: 272056 - DNA, 25 bp, Homo sapien
ccatcacgccaaagactttccgaaa

SEQ ID NO: 272057 - DNA, 25 bp, Homo sapien
cagccagcttgacaccattgctgct

SEQ ID NO: 272058 - DNA, 25 bp, Homo sapien
agccagcttgacaccattgctgctc

SEQ ID NO: 272059 - DNA, 25 bp, Homo sapien
catggcagcaaaggccagtggtttg

SEQ ID NO: 272060 - DNA, 25 bp, Homo sapien
ggccagtggtttgtgggcggatggt

SEQ ID NO: 272061 - DNA, 25 bp, Homo sapien
agcaaaggccagtggtttgtgggcg

SEQ ID NO: 272062 - DNA, 25 bp, Homo sapien
aaaggccagtggtttgtgggcggat

SEQ ID NO: 272063 - DNA, 25 bp, Homo sapien
aagtggcctcgggaaccgcatctcc

SEQ ID NO: 272064 - DNA, 25 bp, Homo sapien
gcgtcctggccaaaagtggcctcgg

SEQ ID NO: 272065 - DNA, 25 bp, Homo sapien
gccaaaagtggcctcgggaaccgca

SEQ ID NO: 272066 - DNA, 25 bp, Homo sapien
tcctggccaaaagtggcctcgggaa

SEQ ID NO: 272067 - DNA, 25 bp, Homo sapien
cattaccacatggagacaccgtcac

SEQ ID NO: 272068 - DNA, 25 bp, Homo sapien
catagtcacatggacggacacacag

SEQ ID NO: 272069 - DNA, 25 bp, Homo sapien
tgtacagacacacggagacattacc

SEQ ID NO: 272070 - DNA, 25 bp, Homo sapien
ttgttacatggacacaccgccacgt

SEQ ID NO: 272071 - DNA, 25 bp, Homo sapien
tgccacagaaaacgaagggttttga

SEQ ID NO: 272072 - DNA, 25 bp, Homo sapien
agagctgatttagcctgactggcag

SEQ ID NO: 272073 - DNA, 25 bp, Homo sapien
gctggcacatccgtgcaaagatagc

SEQ ID NO: 272074 - DNA, 25 bp, Homo sapien
cgtgcaaagatagctggttgccctt

SEQ ID NO: 272075 - DNA, 25 bp, Homo sapien
gaggttgatggctggtctgcctgct

SEQ ID NO: 272076 - DNA, 25 bp, Homo sapien
cacagcaggccgagttcccagggtg

SEQ ID NO: 272077 - DNA, 25 bp, Homo sapien
gagctcgtatggcactgcggaccac

SEQ ID NO: 272078 - DNA, 25 bp, Homo sapien
tatggcactgcggaccacagcaggc

SEQ ID NO: 272079 - DNA, 25 bp, Homo sapien
ccacagcaggccgagttcccagggt

SEQ ID NO: 272080 - DNA, 25 bp, Homo sapien
tcctgctacacctttgcagaggtgg

SEQ ID NO: 272081 - DNA, 25 bp, Homo sapien
gccacaaatggagccatatagagga

SEQ ID NO: 272082 - DNA, 25 bp, Homo sapien
aagtttcagtgcaacaactttgcca

SEQ ID NO: 272083 - DNA, 25 bp, Homo sapien
tagggtaggacgctaattggtgact

SEQ ID NO: 272084 - DNA, 25 bp, Homo sapien
gcaacaactgtcctacaaatggagc

SEQ ID NO: 272085 - DNA, 25 bp, Homo sapien
caactgtcctacaaatggagccaca

SEQ ID NO: 272086 - DNA, 25 bp, Homo sapien
cacaagcttcagtgcaacaactgtc

SEQ ID NO: 272087 - DNA, 25 bp, Homo sapien
cagtgcaacaactgtcctacaaatg

SEQ ID NO: 272088 - DNA, 25 bp, Homo sapien
tgatgtgccatttgcgggagtgagt

SEQ ID NO: 272089 - DNA, 25 bp, Homo sapien
gctggagaaccggtgcctggcacac

SEQ ID NO: 272090 - DNA, 25 bp, Homo sapien
ggctgatagagcagaggacttcaga

SEQ ID NO: 272091 - DNA, 25 bp, Homo sapien
ctggcacaccgtggcagagttgact

SEQ ID NO: 272092 - DNA, 25 bp, Homo sapien
cagacgtagctacctaataaataag

SEQ ID NO: 272093 - DNA, 25 bp, Homo sapien
aaaggcctagcctatcagacgtagc

SEQ ID NO: 272094 - DNA, 25 bp, Homo sapien
catcagggacttttctggccatccc

SEQ ID NO: 272095 - DNA, 25 bp, Homo sapien
tatctcactctcatgaatagggttt

SEQ ID NO: 272096 - DNA, 25 bp, Homo sapien
cgtcaatatgatttagtgataattg

SEQ ID NO: 272097 - DNA, 25 bp, Homo sapien
gaggtatcgtcaatatgatttagtg

SEQ ID NO: 272098 - DNA, 25 bp, Homo sapien
cagaagagaggtatcgtcaatatga

SEQ ID NO: 272099 - DNA, 25 bp, Homo sapien
gaggcagaagagaggtatcgtcaat

SEQ ID NO: 272100 - DNA, 25 bp, Homo sapien
tgtggtgtggttcataatagtccgt

SEQ ID NO: 272101 - DNA, 25 bp, Homo sapien
agatccttcggataggcagttcaca

SEQ ID NO: 272102 - DNA, 25 bp, Homo sapien
cagggttcgtgctccaatgagtttc

SEQ ID NO: 272103 - DNA, 25 bp, Homo sapien
tagtccgtggactggtatgagtctg

SEQ ID NO: 272104 - DNA, 25 bp, Homo sapien
cctgctgccttaagatgaatcggta

SEQ ID NO: 272105 - DNA, 25 bp, Homo sapien
tggttggccccttgagtgacccgat

SEQ ID NO: 272106 - DNA, 25 bp, Homo sapien
tgtttgattctgcacggacaggcaa

SEQ ID NO: 272107 - DNA, 25 bp, Homo sapien
tatatcctgtatagaaccttgggca

SEQ ID NO: 272108 - DNA, 25 bp, Homo sapien
tctccacacgtgaagacagcaggca

SEQ ID NO: 272109 - DNA, 25 bp, Homo sapien
tgtacacccatgcttggattctggc

SEQ ID NO: 272110 - DNA, 25 bp, Homo sapien
ccctccaggagaccggttggcagga

SEQ ID NO: 272111 - DNA, 25 bp, Homo sapien
ggttcacgatgagacccacaggtcc

SEQ ID NO: 272112 - DNA, 25 bp, Homo sapien
tgtccgtggcgctgacggctgagga

SEQ ID NO: 272113 - DNA, 25 bp, Homo sapien
ctcctgtccgtggcgctgacggctg

SEQ ID NO: 272114 - DNA, 25 bp, Homo sapien
gctgaggacagagctttggtgtggc

SEQ ID NO: 272115 - DNA, 25 bp, Homo sapien
ctgacggctgaggacagagctttgg

SEQ ID NO: 272116 - DNA, 25 bp, Homo sapien
gcttcgggataacttgaggctgcat

SEQ ID NO: 272117 - DNA, 25 bp, Homo sapien
gggataacttgaggctgcatcctgg

SEQ ID NO: 272118 - DNA, 25 bp, Homo sapien
cgtgtgccacggcagcttcgggata

SEQ ID NO: 272119 - DNA, 25 bp, Homo sapien
cggcagcttcgggataacttgaggc

SEQ ID NO: 272120 - DNA, 25 bp, Homo sapien
tcaaaaggataagtatagaattacc

SEQ ID NO: 272121 - DNA, 25 bp, Homo sapien
taaattaactcctatgtatacacca

SEQ ID NO: 272122 - DNA, 25 bp, Homo sapien
ggtagcatacaagtacttacagcaa

SEQ ID NO: 272123 - DNA, 25 bp, Homo sapien
gtttatcaactgaagaacggattaa

SEQ ID NO: 272124 - DNA, 25 bp, Homo sapien
tgtctggtgcatcaactgaatgcat

SEQ ID NO: 272125 - DNA, 25 bp, Homo sapien
gatgtctggtgcatcaactgaatgc

SEQ ID NO: 272126 - DNA, 25 bp, Homo sapien
tcagtaactgatgtctggtgcatca

SEQ ID NO: 272127 - DNA, 25 bp, Homo sapien
taactgatgtctggtgcatcaactg

SEQ ID NO: 272128 - DNA, 25 bp, Homo sapien
ttaagggaagttcattgcctctgct

SEQ ID NO: 272129 - DNA, 25 bp, Homo sapien
taagggaagttcattgcctctgctt

SEQ ID NO: 272130 - DNA, 25 bp, Homo sapien
aagggaagttcattgcctctgcttc

SEQ ID NO: 272131 - DNA, 25 bp, Homo sapien
agggaagttcattgcctctgcttct

SEQ ID NO: 272132 - DNA, 25 bp, Homo sapien
tctgcattgttgaagtcactcagca

SEQ ID NO: 272133 - DNA, 25 bp, Homo sapien
ctgcattgttgaagtcactcagcat

SEQ ID NO: 272134 - DNA, 25 bp, Homo sapien
gggcagggtctgcaacacgtatcaa

SEQ ID NO: 272135 - DNA, 25 bp, Homo sapien
aaagtggtttcagtacttccataga

SEQ ID NO: 272136 - DNA, 25 bp, Homo sapien
cagactttcgaagccagagactgca

SEQ ID NO: 272137 - DNA, 25 bp, Homo sapien
aaagttagttgagcttacaccaagg

SEQ ID NO: 272138 - DNA, 25 bp, Homo sapien
cagctttgccagaagtagaagctgg

SEQ ID NO: 272139 - DNA, 25 bp, Homo sapien
gtgcctttcctgaaactggtccttg

SEQ ID NO: 272140 - DNA, 25 bp, Homo sapien
ccagaagtagaagctggactttgga

SEQ ID NO: 272141 - DNA, 25 bp, Homo sapien
tttgccagaagtagaagctggactt

SEQ ID NO: 272142 - DNA, 25 bp, Homo sapien
ctgaacgggggcactttcagcgaag

SEQ ID NO: 272143 - DNA, 25 bp, Homo sapien
tgaacgggggcactttcagcgaagg

SEQ ID NO: 272144 - DNA, 25 bp, Homo sapien
taggtctgagtttttcctagtcctg

SEQ ID NO: 272145 - DNA, 25 bp, Homo sapien
aggtctgagtttttcctagtcctgc

SEQ ID NO: 272146 - DNA, 25 bp, Homo sapien
ctaggtctgagtttttcctagtcct

SEQ ID NO: 272147 - DNA, 25 bp, Homo sapien
gaggcgagccgtcctaccgcggctc

SEQ ID NO: 272148 - DNA, 25 bp, Homo sapien
ttgccgtcaccacaaaccgcagcga

SEQ ID NO: 272149 - DNA, 25 bp, Homo sapien
gctttctccgttgccgtcaccacaa

SEQ ID NO: 272150 - DNA, 25 bp, Homo sapien
tgcaccacactgctttctccgttgc

SEQ ID NO: 272151 - DNA, 25 bp, Homo sapien
ccagctgaaaacaccggctgttcca

SEQ ID NO: 272152 - DNA, 25 bp, Homo sapien
caccagctgaaaacaccggctgttc

SEQ ID NO: 272153 - DNA, 25 bp, Homo sapien
gcaccagctgaaaacaccggctgtt

SEQ ID NO: 272154 - DNA, 25 bp, Homo sapien
cagctgaaaacaccggctgttccat

SEQ ID NO: 272155 - DNA, 25 bp, Homo sapien
caggaagctacgggggacagagcag

SEQ ID NO: 272156 - DNA, 25 bp, Homo sapien
aggtgtgtgtaaaggactaggggag

SEQ ID NO: 272157 - DNA, 25 bp, Homo sapien
tgggcaggaagctacgggggacaga

SEQ ID NO: 272158 - DNA, 25 bp, Homo sapien
ggcaggaagctacgggggacagagc

SEQ ID NO: 272159 - DNA, 25 bp, Homo sapien
ggagccggctggactcatgacagag

SEQ ID NO: 272160 - DNA, 25 bp, Homo sapien
tggagccggctggactcatgacaga

SEQ ID NO: 272161 - DNA, 25 bp, Homo sapien
ctggagccggctggactcatgacag

SEQ ID NO: 272162 - DNA, 25 bp, Homo sapien
gttgaccacgcggtgcaggggcttg

SEQ ID NO: 272163 - DNA, 25 bp, Homo sapien
atcttgttgaccacgcggtgcaggg

SEQ ID NO: 272164 - DNA, 25 bp, Homo sapien
cttcagcgtgtcccagtacagctgc

SEQ ID NO: 272165 - DNA, 25 bp, Homo sapien
cgatcttgttgaccacgcggtgcag

SEQ ID NO: 272166 - DNA, 25 bp, Homo sapien
ttggagaggtctgtcacaatgtcca

SEQ ID NO: 272167 - DNA, 25 bp, Homo sapien
ggagaggtctgtcacaatgtccaga

SEQ ID NO: 272168 - DNA, 25 bp, Homo sapien
tggagaggtctgtcacaatgtccag

SEQ ID NO: 272169 - DNA, 25 bp, Homo sapien
cttggagaggtctgtcacaatgtcc

SEQ ID NO: 272170 - DNA, 25 bp, Homo sapien
tacgttggctgtaggcaaaactcac

SEQ ID NO: 272171 - DNA, 25 bp, Homo sapien
ggaccctacgttggctgtaggcaaa

SEQ ID NO: 272172 - DNA, 25 bp, Homo sapien
cacgcccttgtggaccctacgttgg

SEQ ID NO: 272173 - DNA, 25 bp, Homo sapien
atggctggacgacccacgcccttgt

SEQ ID NO: 272174 - DNA, 25 bp, Homo sapien
gcagagagaggggacttgggctgag

SEQ ID NO: 272175 - DNA, 25 bp, Homo sapien
ctgcagagagaggggacttgggctg

SEQ ID NO: 272176 - DNA, 25 bp, Homo sapien
cagagagaggggacttgggctgagc

SEQ ID NO: 272177 - DNA, 25 bp, Homo sapien
agagagaggggacttgggctgagct

SEQ ID NO: 272178 - DNA, 25 bp, Homo sapien
gggtgatctcacactttggcaaggt

SEQ ID NO: 272179 - DNA, 25 bp, Homo sapien
tttctccagggtgatctcacacttt

SEQ ID NO: 272180 - DNA, 25 bp, Homo sapien
cagggtgatctcacactttggcaag

SEQ ID NO: 272181 - DNA, 25 bp, Homo sapien
tgagtttctccagggtgatctcaca

SEQ ID NO: 272182 - DNA, 25 bp, Homo sapien
gagctcttgagggagccccgatccc

SEQ ID NO: 272183 - DNA, 25 bp, Homo sapien
atgaaggcccctccagtggtgcccc

SEQ ID NO: 272184 - DNA, 25 bp, Homo sapien
ccaggagctcttgagggagccccga

SEQ ID NO: 272185 - DNA, 25 bp, Homo sapien
tgcccccaggagctcttgagggagc

SEQ ID NO: 272186 - DNA, 25 bp, Homo sapien
gccacagacagagggtgacttctcc

SEQ ID NO: 272187 - DNA, 25 bp, Homo sapien
cacgttcccgcccagcacagcaaac

SEQ ID NO: 272188 - DNA, 25 bp, Homo sapien
acagacagagggtgacttctcccac

SEQ ID NO: 272189 - DNA, 25 bp, Homo sapien
acagagggtgacttctcccacgttc

SEQ ID NO: 272190 - DNA, 25 bp, Homo sapien
cacagccttgtcctccccagagtcc

SEQ ID NO: 272191 - DNA, 25 bp, Homo sapien
tgtcctccccagagtccctgctgtc

SEQ ID NO: 272192 - DNA, 25 bp, Homo sapien
ttgtcctccccagagtccctgctgt

SEQ ID NO: 272193 - DNA, 25 bp, Homo sapien
ccccacagccttgtcctccccagag

SEQ ID NO: 272194 - DNA, 25 bp, Homo sapien
ggccgatcctgggtataatccccac

SEQ ID NO: 272195 - DNA, 25 bp, Homo sapien
tggccgatcctgggtataatcccca

SEQ ID NO: 272196 - DNA, 25 bp, Homo sapien
gtgagcagatattggctaggacagc

SEQ ID NO: 272197 - DNA, 25 bp, Homo sapien
agcagatattggctaggacagcatc

SEQ ID NO: 272198 - DNA, 25 bp, Homo sapien
gagggtgagcagatattggctagga

SEQ ID NO: 272199 - DNA, 25 bp, Homo sapien
atattggctaggacagcatccagga

SEQ ID NO: 272200 - DNA, 25 bp, Homo sapien
gccatccgccctctgtaaagcccag

SEQ ID NO: 272201 - DNA, 25 bp, Homo sapien
gggctggccatccgccctctgtaaa

SEQ ID NO: 272202 - DNA, 25 bp, Homo sapien
agtgggccgtggatggcagtcatgg

SEQ ID NO: 272203 - DNA, 25 bp, Homo sapien
tatgtgatgagtgggccgtggatgg

SEQ ID NO: 272204 - DNA, 25 bp, Homo sapien
ctgtggacgtgaggaggcagcatgg

SEQ ID NO: 272205 - DNA, 25 bp, Homo sapien
tggacgtgaggaggcagcatggtga

SEQ ID NO: 272206 - DNA, 25 bp, Homo sapien
ggacgtgaggaggcagcatggtgac

SEQ ID NO: 272207 - DNA, 25 bp, Homo sapien
tgtggacgtgaggaggcagcatggt

SEQ ID NO: 272208 - DNA, 25 bp, Homo sapien
cctcgccctggagcatgctggggat

SEQ ID NO: 272209 - DNA, 25 bp, Homo sapien
acctcgccctggagcatgctgggga

SEQ ID NO: 272210 - DNA, 25 bp, Homo sapien
ctccggctcggatggcagagacctg

SEQ ID NO: 272211 - DNA, 25 bp, Homo sapien
acggtgccctccggctcggatggca

SEQ ID NO: 272212 - DNA, 25 bp, Homo sapien
gcttcctaacttgtgccggcctggc

SEQ ID NO: 272213 - DNA, 25 bp, Homo sapien
ctgggctccgtgtatgtgaagacaa

SEQ ID NO: 272214 - DNA, 25 bp, Homo sapien
tgtatagccactgccagtccatcca

SEQ ID NO: 272215 - DNA, 25 bp, Homo sapien
gggcagggtagtgggtgggcacatg

SEQ ID NO: 272216 - DNA, 25 bp, Homo sapien
tgtgtcgagcacacacaagacgcgc

SEQ ID NO: 272217 - DNA, 25 bp, Homo sapien
tgagcacaacctcatgctgctgaga

SEQ ID NO: 272218 - DNA, 25 bp, Homo sapien
cctatcagtctgtacaagtgtggga

SEQ ID NO: 272219 - DNA, 25 bp, Homo sapien
aagacgcgctaacaacaacctgagc

SEQ ID NO: 272220 - DNA, 25 bp, Homo sapien
gaattagtttcaccatggacaagag

SEQ ID NO: 272221 - DNA, 25 bp, Homo sapien
tctgcatgaattagtttcaccatgg

SEQ ID NO: 272222 - DNA, 25 bp, Homo sapien
attagtttcaccatggacaagagaa

SEQ ID NO: 272223 - DNA, 25 bp, Homo sapien
catgaattagtttcaccatggacaa

SEQ ID NO: 272224 - DNA, 25 bp, Homo sapien
actagttaatttcttgcagatgtaa

SEQ ID NO: 272225 - DNA, 25 bp, Homo sapien
gactagttaatttcttgcagatgta

SEQ ID NO: 272226 - DNA, 25 bp, Homo sapien
atagtgacacttcatgacccatgga

SEQ ID NO: 272227 - DNA, 25 bp, Homo sapien
tagtgacacttcatgacccatggac

SEQ ID NO: 272228 - DNA, 25 bp, Homo sapien
agaggctcaggagtacatagtgaca

SEQ ID NO: 272229 - DNA, 25 bp, Homo sapien
gctcaggagtacatagtgacacttc

SEQ ID NO: 272230 - DNA, 25 bp, Homo sapien
gtcagcaagtcaggggggttccgct

SEQ ID NO: 272231 - DNA, 25 bp, Homo sapien
cttgtcagcaagtcaggggggttcc

SEQ ID NO: 272232 - DNA, 25 bp, Homo sapien
gggttccgctgcatcctgctgcact

SEQ ID NO: 272233 - DNA, 25 bp, Homo sapien
gttccgctgcatcctgctgcactat

SEQ ID NO: 272234 - DNA, 25 bp, Homo sapien
gaaacaggacatggcaaccagaaca

SEQ ID NO: 272235 - DNA, 25 bp, Homo sapien
caggacatggcaaccagaacagctt

SEQ ID NO: 272236 - DNA, 25 bp, Homo sapien
acaggacatggcaaccagaacagct

SEQ ID NO: 272237 - DNA, 25 bp, Homo sapien
cagtgggatgctcagtgcgcctcag

SEQ ID NO: 272238 - DNA, 25 bp, Homo sapien
gggatgctcagtgcgcctcagcagt

SEQ ID NO: 272239 - DNA, 25 bp, Homo sapien
tgcagtgggatgctcagtgcgcctc

SEQ ID NO: 272240 - DNA, 25 bp, Homo sapien
tcctgcagtgggatgctcagtgcgc

SEQ ID NO: 272241 - DNA, 25 bp, Homo sapien
attttgcatgtgtatcttcccaagt

SEQ ID NO: 272242 - DNA, 25 bp, Homo sapien
catttgggcttttggatagctaagg

SEQ ID NO: 272243 - DNA, 25 bp, Homo sapien
gttcccattttgcatgtgtatcttc

SEQ ID NO: 272244 - DNA, 25 bp, Homo sapien
ctggccatcttccatttgggctttt

SEQ ID NO: 272245 - DNA, 25 bp, Homo sapien
cactcacatgggacattcgcctctt

SEQ ID NO: 272246 - DNA, 25 bp, Homo sapien
acatgggacattcgcctcttaacaa

SEQ ID NO: 272247 - DNA, 25 bp, Homo sapien
aaatctatgggtcctcctccactca

SEQ ID NO: 272248 - DNA, 25 bp, Homo sapien
gaagctagtcatgttgatccatgcc

SEQ ID NO: 272249 - DNA, 25 bp, Homo sapien
agcttacacaccattaacgacaaca

SEQ ID NO: 272250 - DNA, 25 bp, Homo sapien
catggaacccttatgttcactgacc

SEQ ID NO: 272251 - DNA, 25 bp, Homo sapien
tcaagcttacacaccattaacgaca

SEQ ID NO: 272252 - DNA, 25 bp, Homo sapien
ggaacccttatgttcactgaccgga

SEQ ID NO: 272253 - DNA, 25 bp, Homo sapien
acttgctgatgcgtctcttcaattt

SEQ ID NO: 272254 - DNA, 25 bp, Homo sapien
aaaaacttgctgatgcgtctcttca

SEQ ID NO: 272255 - DNA, 25 bp, Homo sapien
cttgctgatgcgtctcttcaatttg

SEQ ID NO: 272256 - DNA, 25 bp, Homo sapien
aaaacttgctgatgcgtctcttcaa

SEQ ID NO: 272257 - DNA, 25 bp, Homo sapien
ctacaaattgagtattggtatcagt

SEQ ID NO: 272258 - DNA, 25 bp, Homo sapien
gagtattggtatcagtcaataaaac

SEQ ID NO: 272259 - DNA, 25 bp, Homo sapien
caaattgagtattggtatcagtcaa

SEQ ID NO: 272260 - DNA, 25 bp, Homo sapien
aattgagtattggtatcagtcaata

SEQ ID NO: 272261 - DNA, 25 bp, Homo sapien
gtatgattatctagcaagttcttca

SEQ ID NO: 272262 - DNA, 25 bp, Homo sapien
aaagtatgtttctgctacatttcag

SEQ ID NO: 272263 - DNA, 25 bp, Homo sapien
aagtatgtttctgctacatttcagt

SEQ ID NO: 272264 - DNA, 25 bp, Homo sapien
agtatgtttctgctacatttcagta

SEQ ID NO: 272265 - DNA, 25 bp, Homo sapien
ttaaagtatgtttctgctacatttc

SEQ ID NO: 272266 - DNA, 25 bp, Homo sapien
catcgttacttcaaccaactgacac

SEQ ID NO: 272267 - DNA, 25 bp, Homo sapien
tgccatcgttacttcaaccaactga

SEQ ID NO: 272268 - DNA, 25 bp, Homo sapien
cttgccatcgttacttcaaccaact

SEQ ID NO: 272269 - DNA, 25 bp, Homo sapien
gttacttcaaccaactgacacagtt

SEQ ID NO: 272270 - DNA, 25 bp, Homo sapien
gatgttcccataacccagtctgtca

SEQ ID NO: 272271 - DNA, 25 bp, Homo sapien
acatcatcatctgctgcttggtttg

SEQ ID NO: 272272 - DNA, 25 bp, Homo sapien
cagtctgtcaggtattctaccatct

SEQ ID NO: 272273 - DNA, 25 bp, Homo sapien
tgtcaggtattctaccatcttattc

SEQ ID NO: 272274 - DNA, 25 bp, Homo sapien
cgttttcaaagccttgatctcttct

SEQ ID NO: 272275 - DNA, 25 bp, Homo sapien
gaagccccagcttggtagaaaatac

SEQ ID NO: 272276 - DNA, 25 bp, Homo sapien
gcataataaaaaataggattcccag

SEQ ID NO: 272277 - DNA, 25 bp, Homo sapien
ggattcccagctttggaagccccag

SEQ ID NO: 272278 - DNA, 25 bp, Homo sapien
ctaccttcctcaccaatgtttgctt

SEQ ID NO: 272279 - DNA, 25 bp, Homo sapien
tctaccttcctcaccaatgtttgct

SEQ ID NO: 272280 - DNA, 25 bp, Homo sapien
cttctaccttcctcaccaatgtttg

SEQ ID NO: 272281 - DNA, 25 bp, Homo sapien
atcttctaccttcctcaccaatgtt

SEQ ID NO: 272282 - DNA, 25 bp, Homo sapien
ttagctttttctagatcaccacaga

SEQ ID NO: 272283 - DNA, 25 bp, Homo sapien
tagctttttctagatcaccacagag

SEQ ID NO: 272284 - DNA, 25 bp, Homo sapien
ggaaaccgaactgattgaatctcac

SEQ ID NO: 272285 - DNA, 25 bp, Homo sapien
tcacggaaaccgaactgattgaatc

SEQ ID NO: 272286 - DNA, 25 bp, Homo sapien
caggtttcacggaaaccgaactgat

SEQ ID NO: 272287 - DNA, 25 bp, Homo sapien
gtttcacggaaaccgaactgattga

SEQ ID NO: 272288 - DNA, 25 bp, Homo sapien
tgggcaaaccctgaggtgctcccca

SEQ ID NO: 272289 - DNA, 25 bp, Homo sapien
gtctggtggggcacggggccatcca

SEQ ID NO: 272290 - DNA, 25 bp, Homo sapien
cactgtctggtggggcacggggcca

SEQ ID NO: 272291 - DNA, 25 bp, Homo sapien
agcccctcagccaggtaggatgccc

SEQ ID NO: 272292 - DNA, 25 bp, Homo sapien
tacataagctttgacagcctgcccc

SEQ ID NO: 272293 - DNA, 25 bp, Homo sapien
ttttacataagctttgacagcctgc

SEQ ID NO: 272294 - DNA, 25 bp, Homo sapien
gcttttacataagctttgacagcct

SEQ ID NO: 272295 - DNA, 25 bp, Homo sapien
gacagagcatctccaactcaagttt

SEQ ID NO: 272296 - DNA, 25 bp, Homo sapien
ctacgacagagcatctccaactcaa

SEQ ID NO: 272297 - DNA, 25 bp, Homo sapien
gagtaataagctctaactgaagaac

SEQ ID NO: 272298 - DNA, 25 bp, Homo sapien
aaaattcctccctacgacagagcat

SEQ ID NO: 272299 - DNA, 25 bp, Homo sapien
gggaaaatacattatatgaacacat

SEQ ID NO: 272300 - DNA, 25 bp, Homo sapien
tcagggttaacactgaaataatctt

SEQ ID NO: 272301 - DNA, 25 bp, Homo sapien
attactaaaatatcaatcagggtta

SEQ ID NO: 272302 - DNA, 25 bp, Homo sapien
taaaatatcaatcagggttaacact

SEQ ID NO: 272303 - DNA, 25 bp, Homo sapien
ccctgccttcggccccatttctctc

SEQ ID NO: 272304 - DNA, 25 bp, Homo sapien
ctctcgattcttaaacaacttatat

SEQ ID NO: 272305 - DNA, 25 bp, Homo sapien
ctctctcgattcttaaacaacttat

SEQ ID NO: 272306 - DNA, 25 bp, Homo sapien
gttgtattcttggaagcctccgcat

SEQ ID NO: 272307 - DNA, 25 bp, Homo sapien
gagtcacgctgcctcacgcaagttg

SEQ ID NO: 272308 - DNA, 25 bp, Homo sapien
cagagtcacgctgcctcacgcaagt

SEQ ID NO: 272309 - DNA, 25 bp, Homo sapien
tcacgctgcctcacgcaagttgtgc

SEQ ID NO: 272310 - DNA, 25 bp, Homo sapien
ccagccagtcgccagagtcacgctg

SEQ ID NO: 272311 - DNA, 25 bp, Homo sapien
gttctttccaagctagtatcttgcc

SEQ ID NO: 272312 - DNA, 25 bp, Homo sapien
aatggtgtccaacacttcatagttc

SEQ ID NO: 272313 - DNA, 25 bp, Homo sapien
cagaggagcctgtgccaatggtgtc

SEQ ID NO: 272314 - DNA, 25 bp, Homo sapien
agctagtatcttgccgtcactcttc

SEQ ID NO: 272315 - DNA, 25 bp, Homo sapien
gaacaaactcttcatctaagtattg

SEQ ID NO: 272316 - DNA, 25 bp, Homo sapien
aacaaactcttcatctaagtattgc

SEQ ID NO: 272317 - DNA, 25 bp, Homo sapien
ttcagggccagagtcaactgagtcg

SEQ ID NO: 272318 - DNA, 25 bp, Homo sapien
gggccagagtcaactgagtcgtcac

SEQ ID NO: 272319 - DNA, 25 bp, Homo sapien
cagggccagagtcaactgagtcgtc

SEQ ID NO: 272320 - DNA, 25 bp, Homo sapien
tcagggccagagtcaactgagtcgt

SEQ ID NO: 272321 - DNA, 25 bp, Homo sapien
tacagtatgatcaccaccacttcgt

SEQ ID NO: 272322 - DNA, 25 bp, Homo sapien
gtttcagaccccgacgcactacagt

SEQ ID NO: 272323 - DNA, 25 bp, Homo sapien
ttcagaccccgacgcactacagtat

SEQ ID NO: 272324 - DNA, 25 bp, Homo sapien
tggtttcagaccccgacgcactaca

SEQ ID NO: 272325 - DNA, 25 bp, Homo sapien
gtaggacatgtgattcgtttgttca

SEQ ID NO: 272326 - DNA, 25 bp, Homo sapien
ggacatgtgattcgtttgttcagga

SEQ ID NO: 272327 - DNA, 25 bp, Homo sapien
gacatgtgattcgtttgttcaggag

SEQ ID NO: 272328 - DNA, 25 bp, Homo sapien
catgtgattcgtttgttcaggagac

SEQ ID NO: 272329 - DNA, 25 bp, Homo sapien
gcaagatgtcatggtattaatgacc

SEQ ID NO: 272330 - DNA, 25 bp, Homo sapien
aagctaacagatttgaactacagag

SEQ ID NO: 272331 - DNA, 25 bp, Homo sapien
aaatctagacatgacaattgtaagc

SEQ ID NO: 272332 - DNA, 25 bp, Homo sapien
cacacaggattaaaagcccaaccaa

SEQ ID NO: 272333 - DNA, 25 bp, Homo sapien
ctgccacgtggcctcaggtggttct

SEQ ID NO: 272334 - DNA, 25 bp, Homo sapien
gttggtgaagaagtcagcctcctgg

SEQ ID NO: 272335 - DNA, 25 bp, Homo sapien
tctgcagttggtgaagaagtcagcc

SEQ ID NO: 272336 - DNA, 25 bp, Homo sapien
cgtggcctcaggtggttctgcagtt

SEQ ID NO: 272337 - DNA, 25 bp, Homo sapien
gatggacaaaggcactctcctaggc

SEQ ID NO: 272338 - DNA, 25 bp, Homo sapien
tcaaaatataaggtagcctcctggc

SEQ ID NO: 272339 - DNA, 25 bp, Homo sapien
ggaatgtcctaccaccaagcatgag

SEQ ID NO: 272340 - DNA, 25 bp, Homo sapien
tgaaagtattcctcttacagccagg

SEQ ID NO: 272341 - DNA, 25 bp, Homo sapien
cagtgtatgaatacaagaactctgg

SEQ ID NO: 272342 - DNA, 25 bp, Homo sapien
tactgataaaataagctagcattgc

SEQ ID NO: 272343 - DNA, 25 bp, Homo sapien
tatcttttggctgggcgaggtcgct

SEQ ID NO: 272344 - DNA, 25 bp, Homo sapien
gagatcactgtgaccaatataatga

SEQ ID NO: 272345 - DNA, 25 bp, Homo sapien
cataggcaaagactgtggcgacctc

SEQ ID NO: 272346 - DNA, 25 bp, Homo sapien
cacattcacgttctggaggatgaca

SEQ ID NO: 272347 - DNA, 25 bp, Homo sapien
tactttcagatcacatgttggttgg

SEQ ID NO: 272348 - DNA, 25 bp, Homo sapien
cctcaagtgtagttgaagattgtca

SEQ ID NO: 272349 - DNA, 25 bp, Homo sapien
tcatggtctttttattctgttgggc

SEQ ID NO: 272350 - DNA, 25 bp, Homo sapien
ctcatggtctttttattctgttggg

SEQ ID NO: 272351 - DNA, 25 bp, Homo sapien
tctcatggtctttttattctgttgg

SEQ ID NO: 272352 - DNA, 25 bp, Homo sapien
ttctcatggtctttttattctgttg

SEQ ID NO: 272353 - DNA, 25 bp, Homo sapien
caaaggagactcttatacatgactt

SEQ ID NO: 272354 - DNA, 25 bp, Homo sapien
aatcaatggcggttactcagttcac

SEQ ID NO: 272355 - DNA, 25 bp, Homo sapien
tcagttcactagtcagcaacgtgtg

SEQ ID NO: 272356 - DNA, 25 bp, Homo sapien
gatgttttacattagccagcttgac

SEQ ID NO: 272357 - DNA, 25 bp, Homo sapien
ctggaactcctcccgtgccggctgg

SEQ ID NO: 272358 - DNA, 25 bp, Homo sapien
ggaactcctcccgtgccggctgggc

SEQ ID NO: 272359 - DNA, 25 bp, Homo sapien
agggctccaagcctcgccacagccg

SEQ ID NO: 272360 - DNA, 25 bp, Homo sapien
gctgtcaaagcatcagcccggacca

SEQ ID NO: 272361 - DNA, 25 bp, Homo sapien
tttttcccagagaatctccgataag

SEQ ID NO: 272362 - DNA, 25 bp, Homo sapien
cccagagaatctccgataagaaggt

SEQ ID NO: 272363 - DNA, 25 bp, Homo sapien
aaaccgaggctgttctcccaacgtg

SEQ ID NO: 272364 - DNA, 25 bp, Homo sapien
cacagtaaaggtcccaaaatacaca

SEQ ID NO: 272365 - DNA, 25 bp, Homo sapien
tgagggcagtgaccccggaggacac

SEQ ID NO: 272366 - DNA, 25 bp, Homo sapien
aaagaaacctggcgagactcggcct

SEQ ID NO: 272367 - DNA, 25 bp, Homo sapien
cccggaggacactgaaagaaacctg

SEQ ID NO: 272368 - DNA, 25 bp, Homo sapien
gaaagaaacctggcgagactcggcc

SEQ ID NO: 272369 - DNA, 25 bp, Homo sapien
ccatcatgctgctaggattgtgagg

SEQ ID NO: 272370 - DNA, 25 bp, Homo sapien
gggtcccatcatgctgctaggattg

SEQ ID NO: 272371 - DNA, 25 bp, Homo sapien
tcccatcatgctgctaggattgtga

SEQ ID NO: 272372 - DNA, 25 bp, Homo sapien
catcatgctgctaggattgtgaggt

SEQ ID NO: 272373 - DNA, 25 bp, Homo sapien
agggttcattctctgcattgatcct

SEQ ID NO: 272374 - DNA, 25 bp, Homo sapien
ctgtgggctgggactcatgggcacc

SEQ ID NO: 272375 - DNA, 25 bp, Homo sapien
ggctgggactcatgggcaccatgcc

SEQ ID NO: 272376 - DNA, 25 bp, Homo sapien
tgggctgggactcatgggcaccatg

SEQ ID NO: 272377 - DNA, 25 bp, Homo sapien
tgtgggctgggactcatgggcacca

SEQ ID NO: 272378 - DNA, 25 bp, Homo sapien
taatcccgggcatggcagggccaag

SEQ ID NO: 272379 - DNA, 25 bp, Homo sapien
ggcatggcagggccaagggaattgg

SEQ ID NO: 272380 - DNA, 25 bp, Homo sapien
catggcagggccaagggaattgggt

SEQ ID NO: 272381 - DNA, 25 bp, Homo sapien
cccgggcatggcagggccaagggaa

SEQ ID NO: 272382 - DNA, 25 bp, Homo sapien
ggtcccacataggtaccaggtgatg

SEQ ID NO: 272383 - DNA, 25 bp, Homo sapien
ggagtatggaattgagttagcactg

SEQ ID NO: 272384 - DNA, 25 bp, Homo sapien
agtatggaattgagttagcactgtt

SEQ ID NO: 272385 - DNA, 25 bp, Homo sapien
ggaggagtatggaattgagttagca

SEQ ID NO: 272386 - DNA, 25 bp, Homo sapien
taacaatccgttcatgtggtgtggc

SEQ ID NO: 272387 - DNA, 25 bp, Homo sapien
cctaacaatccgttcatgtggtgtg

SEQ ID NO: 272388 - DNA, 25 bp, Homo sapien
ctaacaatccgttcatgtggtgtgg

SEQ ID NO: 272389 - DNA, 25 bp, Homo sapien
ctattcacgttgttaggagaatttt

SEQ ID NO: 272390 - DNA, 25 bp, Homo sapien
tttggaagtcatttatgttgcctga

SEQ ID NO: 272391 - DNA, 25 bp, Homo sapien
tgttaggagaattttttggaagtca

SEQ ID NO: 272392 - DNA, 25 bp, Homo sapien
ttggaagtcatttatgttgcctgac

SEQ ID NO: 272393 - DNA, 25 bp, Homo sapien
cgtcatgcttggagagtaattgtca

SEQ ID NO: 272394 - DNA, 25 bp, Homo sapien
ggaagtttcctcctagctcgccgtc

SEQ ID NO: 272395 - DNA, 25 bp, Homo sapien
gtaattgtcattctgaaaggagtgg

SEQ ID NO: 272396 - DNA, 25 bp, Homo sapien
aaagttcggcctttttactgcatga

SEQ ID NO: 272397 - DNA, 25 bp, Homo sapien
ctcaactgaagatcgaggagtcaca

SEQ ID NO: 272398 - DNA, 25 bp, Homo sapien
tcaactgaagatcgaggagtcacaa

SEQ ID NO: 272399 - DNA, 25 bp, Homo sapien
aactgaagatcgaggagtcacaaag

SEQ ID NO: 272400 - DNA, 25 bp, Homo sapien
ctgaagatcgaggagtcacaaagaa

SEQ ID NO: 272401 - DNA, 25 bp, Homo sapien
ttttggaagctgtacaaccgagaat

SEQ ID NO: 272402 - DNA, 25 bp, Homo sapien
tagaacttccatccaaagcgagggc

SEQ ID NO: 272403 - DNA, 25 bp, Homo sapien
gcctgagggttcagtgtgcttgaaa

SEQ ID NO: 272404 - DNA, 25 bp, Homo sapien
tgtccaagaccacctgagacaccat

SEQ ID NO: 272405 - DNA, 25 bp, Homo sapien
tatttgtccattagcaactccaagg

SEQ ID NO: 272406 - DNA, 25 bp, Homo sapien
gtatttgtccattagcaactccaag

SEQ ID NO: 272407 - DNA, 25 bp, Homo sapien
agtatttgtccattagcaactccaa

SEQ ID NO: 272408 - DNA, 25 bp, Homo sapien
tttgtccattagcaactccaaggtt

SEQ ID NO: 272409 - DNA, 25 bp, Homo sapien
tgcagagcccgtgccgtcagcagga

SEQ ID NO: 272410 - DNA, 25 bp, Homo sapien
ctgacaggaagggtgcctgatgcag

SEQ ID NO: 272411 - DNA, 25 bp, Homo sapien
aactccaccccgttggtagctgtgc

SEQ ID NO: 272412 - DNA, 25 bp, Homo sapien
tggtgtgcaactccaccccgttggt

SEQ ID NO: 272413 - DNA, 25 bp, Homo sapien
ctggctacaggatcccctgaaactg

SEQ ID NO: 272414 - DNA, 25 bp, Homo sapien
aggaatgaacttcatcaggtggtac

SEQ ID NO: 272415 - DNA, 25 bp, Homo sapien
tcattcattagccaaacaaagctgt

SEQ ID NO: 272416 - DNA, 25 bp, Homo sapien
tctccaagagcttgtccgggttttg

SEQ ID NO: 272417 - DNA, 25 bp, Homo sapien
ccaagagcttgtccgggttttggag

SEQ ID NO: 272418 - DNA, 25 bp, Homo sapien
ttatctccaagagcttgtccgggtt

SEQ ID NO: 272419 - DNA, 25 bp, Homo sapien
tatctccaagagcttgtccgggttt

SEQ ID NO: 272420 - DNA, 25 bp, Homo sapien
ggcagctccagggcgaatatccctc

SEQ ID NO: 272421 - DNA, 25 bp, Homo sapien
cagctccagggcgaatatccctcac

SEQ ID NO: 272422 - DNA, 25 bp, Homo sapien
caaaggcagctccagggcgaatatc

SEQ ID NO: 272423 - DNA, 25 bp, Homo sapien
aaggcagctccagggcgaatatccc

SEQ ID NO: 272424 - DNA, 25 bp, Homo sapien
cttttcagacaggcttgacttgtta

SEQ ID NO: 272425 - DNA, 25 bp, Homo sapien
ttttcagacaggcttgacttgttaa

SEQ ID NO: 272426 - DNA, 25 bp, Homo sapien
gtccatttagaatgaagcctaagta

SEQ ID NO: 272427 - DNA, 25 bp, Homo sapien
gaagtccatttagaatgaagcctaa

SEQ ID NO: 272428 - DNA, 25 bp, Homo sapien
ttagaatgaagcctaagtattcctc

SEQ ID NO: 272429 - DNA, 25 bp, Homo sapien
aatgaagcctaagtattcctcagca

SEQ ID NO: 272430 - DNA, 25 bp, Homo sapien
tttttggggccattggaaatcgcac

SEQ ID NO: 272431 - DNA, 25 bp, Homo sapien
tcccattcatcctcgcttccttcac

SEQ ID NO: 272432 - DNA, 25 bp, Homo sapien
gttcccattcatcctcgcttccttc

SEQ ID NO: 272433 - DNA, 25 bp, Homo sapien
ttgttcccattcatcctcgcttcct

SEQ ID NO: 272434 - DNA, 25 bp, Homo sapien
tgttcccattcatcctcgcttcctt

SEQ ID NO: 272435 - DNA, 25 bp, Homo sapien
tggcgggtgatggaagtcttgttcc

SEQ ID NO: 272436 - DNA, 25 bp, Homo sapien
cgggtgatggaagtcttgttccggg

SEQ ID NO: 272437 - DNA, 25 bp, Homo sapien
tgatggaagtcttgttccgggggcc

SEQ ID NO: 272438 - DNA, 25 bp, Homo sapien
ctggcgggtgatggaagtcttgttc

SEQ ID NO: 272439 - DNA, 25 bp, Homo sapien
accaaaaatgtggtgattggagtct

SEQ ID NO: 272440 - DNA, 25 bp, Homo sapien
aatgtggtgattggagtctgaacaa

SEQ ID NO: 272441 - DNA, 25 bp, Homo sapien
ccaaaaatgtggtgattggagtctg

SEQ ID NO: 272442 - DNA, 25 bp, Homo sapien
aaaatgtggtgattggagtctgaac

SEQ ID NO: 272443 - DNA, 25 bp, Homo sapien
tgtggtataaccttggacagattct

SEQ ID NO: 272444 - DNA, 25 bp, Homo sapien
tttttgtggtataaccttggacaga

SEQ ID NO: 272445 - DNA, 25 bp, Homo sapien
gactggatatccaactgcaacgtga

SEQ ID NO: 272446 - DNA, 25 bp, Homo sapien
gaatcgtttcaggtgcagcacgagg

SEQ ID NO: 272447 - DNA, 25 bp, Homo sapien
gagaaagcagttctttactaatttc

SEQ ID NO: 272448 - DNA, 25 bp, Homo sapien
gaaagcagttctttactaatttcca

SEQ ID NO: 272449 - DNA, 25 bp, Homo sapien
caaagagccgataggttctgtggca

SEQ ID NO: 272450 - DNA, 25 bp, Homo sapien
tgcaaagagccgataggttctgtgg

SEQ ID NO: 272451 - DNA, 25 bp, Homo sapien
aagagccgataggttctgtggcatt

SEQ ID NO: 272452 - DNA, 25 bp, Homo sapien
ctgcaaagagccgataggttctgtg

SEQ ID NO: 272453 - DNA, 25 bp, Homo sapien
tcgcactgttgccgtgatggtagac

SEQ ID NO: 272454 - DNA, 25 bp, Homo sapien
gcactgttgccgtgatggtagacca

SEQ ID NO: 272455 - DNA, 25 bp, Homo sapien
ccgtcgcactgttgccgtgatggta

SEQ ID NO: 272456 - DNA, 25 bp, Homo sapien
cgtcgcactgttgccgtgatggtag

SEQ ID NO: 272457 - DNA, 25 bp, Homo sapien
gccagccattcagaccgatctggaa

SEQ ID NO: 272458 - DNA, 25 bp, Homo sapien
cattcagaccgatctggaagacgtc

SEQ ID NO: 272459 - DNA, 25 bp, Homo sapien
accttgactgtctggtcatcgatgc

SEQ ID NO: 272460 - DNA, 25 bp, Homo sapien
actgtctggtcatcgatgcgcagcc

SEQ ID NO: 272461 - DNA, 25 bp, Homo sapien
tcctacaaagcggacactgggctca

SEQ ID NO: 272462 - DNA, 25 bp, Homo sapien
caaagcggacactgggctcacacac

SEQ ID NO: 272463 - DNA, 25 bp, Homo sapien
ctacaaagcggacactgggctcaca

SEQ ID NO: 272464 - DNA, 25 bp, Homo sapien
tgtcctacaaagcggacactgggct

SEQ ID NO: 272465 - DNA, 25 bp, Homo sapien
gacaactttatactcctagatatca

SEQ ID NO: 272466 - DNA, 25 bp, Homo sapien
cctagatatcactaaactgtgtaca

SEQ ID NO: 272467 - DNA, 25 bp, Homo sapien
agaattaaacagagcagactgaagg

SEQ ID NO: 272468 - DNA, 25 bp, Homo sapien
gactgaaggagagatcttcattatt

SEQ ID NO: 272469 - DNA, 25 bp, Homo sapien
tctgcctgcctttgcgctcaaagct

SEQ ID NO: 272470 - DNA, 25 bp, Homo sapien
cacctggttaattcttactcagaca

SEQ ID NO: 272471 - DNA, 25 bp, Homo sapien
actcagacatcaaggctccctgtga

SEQ ID NO: 272472 - DNA, 25 bp, Homo sapien
cagtcacaaggaagtaaggcctcct

SEQ ID NO: 272473 - DNA, 25 bp, Homo sapien
ttccacactccctcaggtatatgtc

SEQ ID NO: 272474 - DNA, 25 bp, Homo sapien
ccctcaggtatatgtcagccagaca

SEQ ID NO: 272475 - DNA, 25 bp, Homo sapien
gccagacaaggctggtaattgctac

SEQ ID NO: 272476 - DNA, 25 bp, Homo sapien
cacactccctcaggtatatgtcagc

SEQ ID NO: 272477 - DNA, 25 bp, Homo sapien
cagaggaagagttgatttatcttca

SEQ ID NO: 272478 - DNA, 25 bp, Homo sapien
cccagaggaagagttgatttatctt

SEQ ID NO: 272479 - DNA, 25 bp, Homo sapien
gaggaagagttgatttatcttcagg

SEQ ID NO: 272480 - DNA, 25 bp, Homo sapien
ctcccagaggaagagttgatttatc

SEQ ID NO: 272481 - DNA, 25 bp, Homo sapien
actttcatcgtaggacacagcttgg

SEQ ID NO: 272482 - DNA, 25 bp, Homo sapien
ttgccaatcagcagaaaccactttc

SEQ ID NO: 272483 - DNA, 25 bp, Homo sapien
aatagtgtctaggattcttctcttc

SEQ ID NO: 272484 - DNA, 25 bp, Homo sapien
cctattatgcaagagaaatagtgtc

SEQ ID NO: 272485 - DNA, 25 bp, Homo sapien
aaagggatcaaggtgtgagtagaat

SEQ ID NO: 272486 - DNA, 25 bp, Homo sapien
tattaatgagacgatgaagagaaac

SEQ ID NO: 272487 - DNA, 25 bp, Homo sapien
aacggtgctagccttagctaccttg

SEQ ID NO: 272488 - DNA, 25 bp, Homo sapien
gagtagaatgttgctctctttgatt

SEQ ID NO: 272489 - DNA, 25 bp, Homo sapien
tcaaatggtaacctgaagcacatcg

SEQ ID NO: 272490 - DNA, 25 bp, Homo sapien
aatggtaacctgaagcacatcgatg

SEQ ID NO: 272491 - DNA, 25 bp, Homo sapien
ggtaacctgaagcacatcgatgaag

SEQ ID NO: 272492 - DNA, 25 bp, Homo sapien
cctgaagcacatcgatgaagttgtt

SEQ ID NO: 272493 - DNA, 25 bp, Homo sapien
catacagtgcatcagtgaatagggt

SEQ ID NO: 272494 - DNA, 25 bp, Homo sapien
tagtcagatgccaaagctggaagcc

SEQ ID NO: 272495 - DNA, 25 bp, Homo sapien
tccagttgattagagccaagtgacc

SEQ ID NO: 272496 - DNA, 25 bp, Homo sapien
ggctaggacctcagaacaatgttaa

SEQ ID NO: 272497 - DNA, 25 bp, Homo sapien
tctttcatggctccaaagggcctga

SEQ ID NO: 272498 - DNA, 25 bp, Homo sapien
tgtgcttaatcctacttctctgcga

SEQ ID NO: 272499 - DNA, 25 bp, Homo sapien
tgttcaaagtaaagctagatgccca

SEQ ID NO: 272500 - DNA, 25 bp, Homo sapien
cagaattactagagagtgtgttcaa

SEQ ID NO: 272501 - DNA, 25 bp, Homo sapien
tatcattcactaattcaatcaccag

SEQ ID NO: 272502 - DNA, 25 bp, Homo sapien
cattcactaattcaatcaccagcat

SEQ ID NO: 272503 - DNA, 25 bp, Homo sapien
ttttacactatcattcactaattca

SEQ ID NO: 272504 - DNA, 25 bp, Homo sapien
cttcttttacactatcattcactaa

SEQ ID NO: 272505 - DNA, 25 bp, Homo sapien
gctggggcaagccaggggactcgct

SEQ ID NO: 272506 - DNA, 25 bp, Homo sapien
agccaggggactcgctggcaagcca

SEQ ID NO: 272507 - DNA, 25 bp, Homo sapien
gcaagccaggggactcgctggcaag

SEQ ID NO: 272508 - DNA, 25 bp, Homo sapien
cggcgggcgctggggcaagccaggg

SEQ ID NO: 272509 - DNA, 25 bp, Homo sapien
ggcacaggcgctgccagcggcggcc

SEQ ID NO: 272510 - DNA, 25 bp, Homo sapien
aggcgctgccagcggcggccgctgg

SEQ ID NO: 272511 - DNA, 25 bp, Homo sapien
ccgctggcacgtccgggccggtggt

SEQ ID NO: 272512 - DNA, 25 bp, Homo sapien
gcggccgctggcacgtccgggccgg

SEQ ID NO: 272513 - DNA, 25 bp, Homo sapien
ctcaatctggtgacactgcaagcgc

SEQ ID NO: 272514 - DNA, 25 bp, Homo sapien
gttggttcgctccagctcaatctgg

SEQ ID NO: 272515 - DNA, 25 bp, Homo sapien
taatcactgaactccagagtgggca

SEQ ID NO: 272516 - DNA, 25 bp, Homo sapien
taaaatccgggctgtccaagtagta

SEQ ID NO: 272517 - DNA, 25 bp, Homo sapien
tcagggttcctttggaaaggatgaa

SEQ ID NO: 272518 - DNA, 25 bp, Homo sapien
tttcatcatctgtttcaacatcacc

SEQ ID NO: 272519 - DNA, 25 bp, Homo sapien
atcatctgtttcaacatcaccaata

SEQ ID NO: 272520 - DNA, 25 bp, Homo sapien
ctgtttcaacatcaccaatacattc

SEQ ID NO: 272521 - DNA, 25 bp, Homo sapien
gtaatgactgggaaaatttctgcac

SEQ ID NO: 272522 - DNA, 25 bp, Homo sapien
agttctgatgtgctcaatcaatttg

SEQ ID NO: 272523 - DNA, 25 bp, Homo sapien
tctgatgtgctcaatcaatttgtgt

SEQ ID NO: 272524 - DNA, 25 bp, Homo sapien
gaagttctgatgtgctcaatcaatt

SEQ ID NO: 272525 - DNA, 25 bp, Homo sapien
tagaagttctgatgtgctcaatcaa

SEQ ID NO: 272526 - DNA, 25 bp, Homo sapien
gcaaattcctgggcaagttcatatc

SEQ ID NO: 272527 - DNA, 25 bp, Homo sapien
tgcaaattcctgggcaagttcatat

SEQ ID NO: 272528 - DNA, 25 bp, Homo sapien
caaattcctgggcaagttcatatcc

SEQ ID NO: 272529 - DNA, 25 bp, Homo sapien
tggacatgcagatagccttgcagat

SEQ ID NO: 272530 - DNA, 25 bp, Homo sapien
caagtggtcatttctcctggacatg

SEQ ID NO: 272531 - DNA, 25 bp, Homo sapien
aagtggtcatttctcctggacatgc

SEQ ID NO: 272532 - DNA, 25 bp, Homo sapien
cttgcagatttcaccctttgcatca

SEQ ID NO: 272533 - DNA, 25 bp, Homo sapien
atacaagattttgaacatttccggt

SEQ ID NO: 272534 - DNA, 25 bp, Homo sapien
cgtcggatacaagattttgaacatt

SEQ ID NO: 272535 - DNA, 25 bp, Homo sapien
caagattttgaacatttccggtgag

SEQ ID NO: 272536 - DNA, 25 bp, Homo sapien
ctttcgtcggatacaagattttgaa

SEQ ID NO: 272537 - DNA, 25 bp, Homo sapien
gtgatgatcccatggctttcaacta

SEQ ID NO: 272538 - DNA, 25 bp, Homo sapien
aatcagttccttcccatccgtggct

SEQ ID NO: 272539 - DNA, 25 bp, Homo sapien
caggcagagtataaatcagttcctt

SEQ ID NO: 272540 - DNA, 25 bp, Homo sapien
ttgtatgtcgaagcagaattgtttg

SEQ ID NO: 272541 - DNA, 25 bp, Homo sapien
tttcagcccactcattattgtctta

SEQ ID NO: 272542 - DNA, 25 bp, Homo sapien
ctttgaccagatgttttattaagat

SEQ ID NO: 272543 - DNA, 25 bp, Homo sapien
tctggcaatgtgcacaccaatgcat

SEQ ID NO: 272544 - DNA, 25 bp, Homo sapien
caaatctttgtgtaacttgtaagtt

SEQ ID NO: 272545 - DNA, 25 bp, Homo sapien
tataggaatcactatcaagttcagc

SEQ ID NO: 272546 - DNA, 25 bp, Homo sapien
tgctgctataggaatcactatcaag

SEQ ID NO: 272547 - DNA, 25 bp, Homo sapien
agagaagagagtgacgtgatgctcc

SEQ ID NO: 272548 - DNA, 25 bp, Homo sapien
gcatggagtacacatccctctgggc

SEQ ID NO: 272549 - DNA, 25 bp, Homo sapien
gctgactttgtagtgctattttgtt

SEQ ID NO: 272550 - DNA, 25 bp, Homo sapien
gggttgcaatccaaggaatccctcc

SEQ ID NO: 272551 - DNA, 25 bp, Homo sapien
aagctgactttgtagtgctattttg

SEQ ID NO: 272552 - DNA, 25 bp, Homo sapien
tgcaatccaaggaatccctccagat

SEQ ID NO: 272553 - DNA, 25 bp, Homo sapien
gctgcagagatggatctgagagaag

SEQ ID NO: 272554 - DNA, 25 bp, Homo sapien
tgcagagatggatctgagagaagaa

SEQ ID NO: 272555 - DNA, 25 bp, Homo sapien
agctgcagagatggatctgagagaa

SEQ ID NO: 272556 - DNA, 25 bp, Homo sapien
ctgcagagatggatctgagagaaga

SEQ ID NO: 272557 - DNA, 25 bp, Homo sapien
cgctgatagccattgcttgaggtgg

SEQ ID NO: 272558 - DNA, 25 bp, Homo sapien
ggctttggcttggtgcccagaagaa

SEQ ID NO: 272559 - DNA, 25 bp, Homo sapien
cttgaggtggtgtctagtcttaacc

SEQ ID NO: 272560 - DNA, 25 bp, Homo sapien
tgccactactgagccaggacgctga

SEQ ID NO: 272561 - DNA, 25 bp, Homo sapien
aagctcacgctgtgctctcctttat

SEQ ID NO: 272562 - DNA, 25 bp, Homo sapien
ggaaagctcacgctgtgctctcctt

SEQ ID NO: 272563 - DNA, 25 bp, Homo sapien
gaaggaaagctcacgctgtgctctc

SEQ ID NO: 272564 - DNA, 25 bp, Homo sapien
ctcacgctgtgctctcctttatagg

SEQ ID NO: 272565 - DNA, 25 bp, Homo sapien
tttccaagtttatgggatatagtac

SEQ ID NO: 272566 - DNA, 25 bp, Homo sapien
gagattgcagattataatagcatgt

SEQ ID NO: 272567 - DNA, 25 bp, Homo sapien
tgttattcaccctacttgttaatgc

SEQ ID NO: 272568 - DNA, 25 bp, Homo sapien
gcagattataatagcatgtaaagag

SEQ ID NO: 272569 - DNA, 25 bp, Homo sapien
caatgagtgagctcaggattatctt

SEQ ID NO: 272570 - DNA, 25 bp, Homo sapien
gacaatgagtgagctcaggattatc

SEQ ID NO: 272571 - DNA, 25 bp, Homo sapien
atgagtgagctcaggattatcttgg

SEQ ID NO: 272572 - DNA, 25 bp, Homo sapien
ctgacaatgagtgagctcaggatta

SEQ ID NO: 272573 - DNA, 25 bp, Homo sapien
ggcccaaagtggacatcaggcccca

SEQ ID NO: 272574 - DNA, 25 bp, Homo sapien
gcccaaagtggacatcaggccccat

SEQ ID NO: 272575 - DNA, 25 bp, Homo sapien
taggcccaaagtggacatcaggccc

SEQ ID NO: 272576 - DNA, 25 bp, Homo sapien
ctaggcccaaagtggacatcaggcc

SEQ ID NO: 272577 - DNA, 25 bp, Homo sapien
cctgagacctggggtccacctgggc

SEQ ID NO: 272578 - DNA, 25 bp, Homo sapien
ccctggggcctggtgtgcccctgag

SEQ ID NO: 272579 - DNA, 25 bp, Homo sapien
tggggcctggtgtgcccctgagacc

SEQ ID NO: 272580 - DNA, 25 bp, Homo sapien
tgttcccctggggcctggtgtgccc

SEQ ID NO: 272581 - DNA, 25 bp, Homo sapien
ggattgatgaccaactgggtcctgg

SEQ ID NO: 272582 - DNA, 25 bp, Homo sapien
tgtcctcctggcacctgatgtccac

SEQ ID NO: 272583 - DNA, 25 bp, Homo sapien
tgtggattgatgaccaactgggtcc

SEQ ID NO: 272584 - DNA, 25 bp, Homo sapien
gtgttcagctgtggattgatgacca

SEQ ID NO: 272585 - DNA, 25 bp, Homo sapien
gacccgctgcatgggtctccaggga

SEQ ID NO: 272586 - DNA, 25 bp, Homo sapien
ggctccctcatacgcgctctggtag

SEQ ID NO: 272587 - DNA, 25 bp, Homo sapien
tctggtaggtgctagggacgaccct

SEQ ID NO: 272588 - DNA, 25 bp, Homo sapien
tttcgttagtaaggcactccggctg

SEQ ID NO: 272589 - DNA, 25 bp, Homo sapien
ttgggtagagcacatgttgccgggc

SEQ ID NO: 272590 - DNA, 25 bp, Homo sapien
gttgccgggcatgcccttgaaaaca

SEQ ID NO: 272591 - DNA, 25 bp, Homo sapien
catgttgccgggcatgcccttgaaa

SEQ ID NO: 272592 - DNA, 25 bp, Homo sapien
tagagcacatgttgccgggcatgcc

SEQ ID NO: 272593 - DNA, 25 bp, Homo sapien
aagcattaaactgacactcgagtct

SEQ ID NO: 272594 - DNA, 25 bp, Homo sapien
taaactgacactcgagtctgtagcc

SEQ ID NO: 272595 - DNA, 25 bp, Homo sapien
ggctgtgccaaaagacttgaggttg

SEQ ID NO: 272596 - DNA, 25 bp, Homo sapien
ctcgagtctgtagccggctgtgcca

SEQ ID NO: 272597 - DNA, 25 bp, Homo sapien
tctggtgctgggaaattctgatttt

SEQ ID NO: 272598 - DNA, 25 bp, Homo sapien
gaaacttttgatgcacaaacgtcca

SEQ ID NO: 272599 - DNA, 25 bp, Homo sapien
tcttgaaacttttgatgcacaaacg

SEQ ID NO: 272600 - DNA, 25 bp, Homo sapien
tgtacattttagggattcttgaaac

SEQ ID NO: 272601 - DNA, 25 bp, Homo sapien
tgtttctcccttcatttgctgtatc

SEQ ID NO: 272602 - DNA, 25 bp, Homo sapien
cattggtgatgaactggtgtgattt

SEQ ID NO: 272603 - DNA, 25 bp, Homo sapien
cttctttgtttggatccattggtga

SEQ ID NO: 272604 - DNA, 25 bp, Homo sapien
tgtttggatccattggtgatgaact

SEQ ID NO: 272605 - DNA, 25 bp, Homo sapien
tcaaattgttcatggtgtttatttt

SEQ ID NO: 272606 - DNA, 25 bp, Homo sapien
acccctgtcaaattgttcatggtgt

SEQ ID NO: 272607 - DNA, 25 bp, Homo sapien
caaattgttcatggtgtttattttc

SEQ ID NO: 272608 - DNA, 25 bp, Homo sapien
attgttcatggtgtttattttctct

SEQ ID NO: 272609 - DNA, 25 bp, Homo sapien
cttttggcattgaagtcttatgtaa

SEQ ID NO: 272610 - DNA, 25 bp, Homo sapien
ttcaatatgcccctctgtttcttgc

SEQ ID NO: 272611 - DNA, 25 bp, Homo sapien
aagtttgctggtagatcttgagcac

SEQ ID NO: 272612 - DNA, 25 bp, Homo sapien
gagcactgaaggctaattgttccat

SEQ ID NO: 272613 - DNA, 25 bp, Homo sapien
gcagttctgctatgatgtagtaagc

SEQ ID NO: 272614 - DNA, 25 bp, Homo sapien
gctgctgttattcaactgtcaatca

SEQ ID NO: 272615 - DNA, 25 bp, Homo sapien
tttgaactatcttctggtgtccact

SEQ ID NO: 272616 - DNA, 25 bp, Homo sapien
ggatacacaattttggactggcttt

SEQ ID NO: 272617 - DNA, 25 bp, Homo sapien
tcagttgtgattggtggttctggca

SEQ ID NO: 272618 - DNA, 25 bp, Homo sapien
tctggcatgcggaaataaaatttcc

SEQ ID NO: 272619 - DNA, 25 bp, Homo sapien
caggtaaaccgtcagttgtgattgg

SEQ ID NO: 272620 - DNA, 25 bp, Homo sapien
cctgcagattcttgtgagcaacagg

SEQ ID NO: 272621 - DNA, 25 bp, Homo sapien
atgcaaagcagaaattaccaaaaca

SEQ ID NO: 272622 - DNA, 25 bp, Homo sapien
aagcagaaattaccaaaacacatcc

SEQ ID NO: 272623 - DNA, 25 bp, Homo sapien
gcaaagcagaaattaccaaaacaca

SEQ ID NO: 272624 - DNA, 25 bp, Homo sapien
agttatcctcaacgaagaagaccgg

SEQ ID NO: 272625 - DNA, 25 bp, Homo sapien
gatctagccaaaggtcttgggtgaa

SEQ ID NO: 272626 - DNA, 25 bp, Homo sapien
tgaaatgagaacacggctgaaagaa

SEQ ID NO: 272627 - DNA, 25 bp, Homo sapien
tgggtgaaatgagaacacggctgaa

SEQ ID NO: 272628 - DNA, 25 bp, Homo sapien
ctgatctagccaaaggtcttgggtg

SEQ ID NO: 272629 - DNA, 25 bp, Homo sapien
atgtcttctcctaagtctatttgaa

SEQ ID NO: 272630 - DNA, 25 bp, Homo sapien
tgaaagaattggccacattctttac

SEQ ID NO: 272631 - DNA, 25 bp, Homo sapien
ctgtgaaagaattggccacattctt

SEQ ID NO: 272632 - DNA, 25 bp, Homo sapien
tgtgaaagaattggccacattcttt

SEQ ID NO: 272633 - DNA, 25 bp, Homo sapien
gtgaaagaattggccacattcttta

SEQ ID NO: 272634 - DNA, 25 bp, Homo sapien
tatctgatgttgtcttaggtgtgag

SEQ ID NO: 272635 - DNA, 25 bp, Homo sapien
tctgatgttgtcttaggtgtgagaa

SEQ ID NO: 272636 - DNA, 25 bp, Homo sapien
ctgatgttgtcttaggtgtgagaac

SEQ ID NO: 272637 - DNA, 25 bp, Homo sapien
aattatctgatgttgtcttaggtgt

SEQ ID NO: 272638 - DNA, 25 bp, Homo sapien
gtaagatctgaagactgcttaaaat

SEQ ID NO: 272639 - DNA, 25 bp, Homo sapien
gttgaggaataggaaaaggctttgc

SEQ ID NO: 272640 - DNA, 25 bp, Homo sapien
tgtaggttgtgtctccagtataaat

SEQ ID NO: 272641 - DNA, 25 bp, Homo sapien
tctctcatgtatagtaagatctgaa

SEQ ID NO: 272642 - DNA, 25 bp, Homo sapien
cttatgtatagtcagagttgaagac

SEQ ID NO: 272643 - DNA, 25 bp, Homo sapien
tatgtatagtcagagttgaagacta

SEQ ID NO: 272644 - DNA, 25 bp, Homo sapien
atgtatagtcagagttgaagactac

SEQ ID NO: 272645 - DNA, 25 bp, Homo sapien
ttatgtatagtcagagttgaagact

SEQ ID NO: 272646 - DNA, 25 bp, Homo sapien
gtaggatttctctcccatatgaata

SEQ ID NO: 272647 - DNA, 25 bp, Homo sapien
aggatttctctcccatatgaataat

SEQ ID NO: 272648 - DNA, 25 bp, Homo sapien
tgtaggatttctctcccatatgaat

SEQ ID NO: 272649 - DNA, 25 bp, Homo sapien
ttgtaggatttctctcccatatgaa

SEQ ID NO: 272650 - DNA, 25 bp, Homo sapien
acattcttcacatttatagggtttc

SEQ ID NO: 272651 - DNA, 25 bp, Homo sapien
attcttttatgttctttcagttttg

SEQ ID NO: 272652 - DNA, 25 bp, Homo sapien
tctcaagtatgaattcttttatgtt

SEQ ID NO: 272653 - DNA, 25 bp, Homo sapien
ctgagaaacagtaaaaagctttgcc

SEQ ID NO: 272654 - DNA, 25 bp, Homo sapien
tgaactatgttatgttgagtaaggc

SEQ ID NO: 272655 - DNA, 25 bp, Homo sapien
cttgtgtatagtaaggtttgaagac

SEQ ID NO: 272656 - DNA, 25 bp, Homo sapien
tctctcccctatgaattatcgtatg

SEQ ID NO: 272657 - DNA, 25 bp, Homo sapien
tatgtttagtaaagcttaaaaatca

SEQ ID NO: 272658 - DNA, 25 bp, Homo sapien
ctcccctatgaattatcgtatgttt

SEQ ID NO: 272659 - DNA, 25 bp, Homo sapien
cttttatgtgtcatgaggtatgagc

SEQ ID NO: 272660 - DNA, 25 bp, Homo sapien
tgtcatgaggtatgagcatgtcaga

SEQ ID NO: 272661 - DNA, 25 bp, Homo sapien
tgtgtcatgaggtatgagcatgtca

SEQ ID NO: 272662 - DNA, 25 bp, Homo sapien
cctgacttttaaatgtccaacaaag

SEQ ID NO: 272663 - DNA, 25 bp, Homo sapien
cacaaaaggccttaatagctaagaa

SEQ ID NO: 272664 - DNA, 25 bp, Homo sapien
cagttaaattctccacagaaaggtt

SEQ ID NO: 272665 - DNA, 25 bp, Homo sapien
tgaaggaatcactctacctgacttt

SEQ ID NO: 272666 - DNA, 25 bp, Homo sapien
tgggaaataaataatgcgtaaacat

SEQ ID NO: 272667 - DNA, 25 bp, Homo sapien
tttagagttttggttctgtgattaa

SEQ ID NO: 272668 - DNA, 25 bp, Homo sapien
taaaatgataagacactgtagactc

SEQ ID NO: 272669 - DNA, 25 bp, Homo sapien
gcacttgcactccttaaatttatac

SEQ ID NO: 272670 - DNA, 25 bp, Homo sapien
gttcccttagagatattctctgtca

SEQ ID NO: 272671 - DNA, 25 bp, Homo sapien
tatcaactcacatggtaagggtatt

SEQ ID NO: 272672 - DNA, 25 bp, Homo sapien
tcccttagagatattctctgtcaat

SEQ ID NO: 272673 - DNA, 25 bp, Homo sapien
tctttacttagagtgactataaatc

SEQ ID NO: 272674 - DNA, 25 bp, Homo sapien
tagatcacctggtcatgcagggaac

SEQ ID NO: 272675 - DNA, 25 bp, Homo sapien
gagtagccgttccttcgcatgtcct

SEQ ID NO: 272676 - DNA, 25 bp, Homo sapien
acctggtcatgcagggaacccacag

SEQ ID NO: 272677 - DNA, 25 bp, Homo sapien
gtgtggtgcgggtgcacgatgtcca

SEQ ID NO: 272678 - DNA, 25 bp, Homo sapien
cctggatgttgagataatcttcact

SEQ ID NO: 272679 - DNA, 25 bp, Homo sapien
gcactttagactcctggatgttgag

SEQ ID NO: 272680 - DNA, 25 bp, Homo sapien
ggcactttagactcctggatgttga

SEQ ID NO: 272681 - DNA, 25 bp, Homo sapien
tagactcctggatgttgagataatc

SEQ ID NO: 272682 - DNA, 25 bp, Homo sapien
tgccacccggcaggacgtccttcca

SEQ ID NO: 272683 - DNA, 25 bp, Homo sapien
ggccatgccgattctctgcttcttg

SEQ ID NO: 272684 - DNA, 25 bp, Homo sapien
tgcttcttgccacccggcaggacgt

SEQ ID NO: 272685 - DNA, 25 bp, Homo sapien
gaacatgcaggccatgccgattctc

SEQ ID NO: 272686 - DNA, 25 bp, Homo sapien
cgtcgatgttcatggcactggtgca

SEQ ID NO: 272687 - DNA, 25 bp, Homo sapien
ccttccacgtcgatgttcatggcac

SEQ ID NO: 272688 - DNA, 25 bp, Homo sapien
tcttgccttccacgtcgatgttcat

SEQ ID NO: 272689 - DNA, 25 bp, Homo sapien
tccacgtcgatgttcatggcactgg

SEQ ID NO: 272690 - DNA, 25 bp, Homo sapien
tctgtcagactcaggctggccgctg

SEQ ID NO: 272691 - DNA, 25 bp, Homo sapien
tgagtccagcttctcgaacttccag

SEQ ID NO: 272692 - DNA, 25 bp, Homo sapien
gactcaggctggccgctgagtccag

SEQ ID NO: 272693 - DNA, 25 bp, Homo sapien
cagactcaggctggccgctgagtcc

SEQ ID NO: 272694 - DNA, 25 bp, Homo sapien
gggccttgcgggctaggtgccggca

SEQ ID NO: 272695 - DNA, 25 bp, Homo sapien
cagggccttgcgggctaggtgccgg

SEQ ID NO: 272696 - DNA, 25 bp, Homo sapien
agggccttgcgggctaggtgccggc

SEQ ID NO: 272697 - DNA, 25 bp, Homo sapien
ggccttgcgggctaggtgccggcac

SEQ ID NO: 272698 - DNA, 25 bp, Homo sapien
tccaataaattaggctgtagaaaga

SEQ ID NO: 272699 - DNA, 25 bp, Homo sapien
caataaattaggctgtagaaagagg

SEQ ID NO: 272700 - DNA, 25 bp, Homo sapien
atccaataaattaggctgtagaaag

SEQ ID NO: 272701 - DNA, 25 bp, Homo sapien
ccaataaattaggctgtagaaagag

SEQ ID NO: 272702 - DNA, 25 bp, Homo sapien
tggcagggtagtcacattggccacg

SEQ ID NO: 272703 - DNA, 25 bp, Homo sapien
ctagcaagcagaggtccgtgtggcc

SEQ ID NO: 272704 - DNA, 25 bp, Homo sapien
gccaggtggcggctgacagtgtagg

SEQ ID NO: 272705 - DNA, 25 bp, Homo sapien
tgggtttggcaccagtgggagccgg

SEQ ID NO: 272706 - DNA, 25 bp, Homo sapien
taatgcagacatgacacccaaaata

SEQ ID NO: 272707 - DNA, 25 bp, Homo sapien
aggtggccgcagtgcgagatccaca

SEQ ID NO: 272708 - DNA, 25 bp, Homo sapien
agtttctcccctgccaaggcgaggt

SEQ ID NO: 272709 - DNA, 25 bp, Homo sapien
tcggggccgcatcgacggtgaataa

SEQ ID NO: 272710 - DNA, 25 bp, Homo sapien
ttaaagtatgattcattaggtagaa

SEQ ID NO: 272711 - DNA, 25 bp, Homo sapien
tgtttattatgtgaaccatcgcagg

SEQ ID NO: 272712 - DNA, 25 bp, Homo sapien
tattatgtgaaccatcgcaggcagg

SEQ ID NO: 272713 - DNA, 25 bp, Homo sapien
tcttcagtattagtggacccacatt

SEQ ID NO: 272714 - DNA, 25 bp, Homo sapien
ttcttcttcagtattagtggaccca

SEQ ID NO: 272715 - DNA, 25 bp, Homo sapien
tggccctggaactagtccccagtgt

SEQ ID NO: 272716 - DNA, 25 bp, Homo sapien
gccctggaactagtccccagtgtat

SEQ ID NO: 272717 - DNA, 25 bp, Homo sapien
tctccgatacgtttatttcataaac

SEQ ID NO: 272718 - DNA, 25 bp, Homo sapien
gtggccctggaactagtccccagtg

SEQ ID NO: 272719 - DNA, 25 bp, Homo sapien
aatgtttcttcaggtactttgcctc

SEQ ID NO: 272720 - DNA, 25 bp, Homo sapien
tttactctattgattgctccctttg

SEQ ID NO: 272721 - DNA, 25 bp, Homo sapien
ttgcttgcacagctttttagtttga

SEQ ID NO: 272722 - DNA, 25 bp, Homo sapien
ggctacctctttactctattgattg

SEQ ID NO: 272723 - DNA, 25 bp, Homo sapien
taggagaggggggtgtagtagccat

SEQ ID NO: 272724 - DNA, 25 bp, Homo sapien
tgataggagaggggggtgtagtagc

SEQ ID NO: 272725 - DNA, 25 bp, Homo sapien
ggtgataggagaggggggtgtagta

SEQ ID NO: 272726 - DNA, 25 bp, Homo sapien
ataggagaggggggtgtagtagcca

SEQ ID NO: 272727 - DNA, 25 bp, Homo sapien
cacagaagacactactctgtccatc

SEQ ID NO: 272728 - DNA, 25 bp, Homo sapien
ggggcgggtgggtcactctcggctg

SEQ ID NO: 272729 - DNA, 25 bp, Homo sapien
cgagggggcgggtgggtcactctcg

SEQ ID NO: 272730 - DNA, 25 bp, Homo sapien
gcgggtgggtcactctcggctgcct

SEQ ID NO: 272731 - DNA, 25 bp, Homo sapien
actctcggctgcctcaccgggtaat

SEQ ID NO: 272732 - DNA, 25 bp, Homo sapien
aaactactccacggccgaggaactg

SEQ ID NO: 272733 - DNA, 25 bp, Homo sapien
tacaatggctcagtgcccacaattc

SEQ ID NO: 272734 - DNA, 25 bp, Homo sapien
taggagaatactttgcagcatggct

SEQ ID NO: 272735 - DNA, 25 bp, Homo sapien
caaaggatctttaaggcacctacca

SEQ ID NO: 272736 - DNA, 25 bp, Homo sapien
tggcaccctgagcaatttagggagg

SEQ ID NO: 272737 - DNA, 25 bp, Homo sapien
atggaagtcaaaggttcttgacctt

SEQ ID NO: 272738 - DNA, 25 bp, Homo sapien
gaaacagccattcactcatttcctt

SEQ ID NO: 272739 - DNA, 25 bp, Homo sapien
gaagtcaaaggttcttgaccttcta

SEQ ID NO: 272740 - DNA, 25 bp, Homo sapien
ggagcagatgccatcatggaagtca

SEQ ID NO: 272741 - DNA, 25 bp, Homo sapien
cattcttagctattccacactaatg

SEQ ID NO: 272742 - DNA, 25 bp, Homo sapien
tttgttagatctgacatttgcttgg

SEQ ID NO: 272743 - DNA, 25 bp, Homo sapien
gtaatctaggactatcattgcattt

SEQ ID NO: 272744 - DNA, 25 bp, Homo sapien
cacagagtctgaaaagcattacagt

SEQ ID NO: 272745 - DNA, 25 bp, Homo sapien
tatctgttgctactctgagtttggc

SEQ ID NO: 272746 - DNA, 25 bp, Homo sapien
tgttgctactctgagtttggcatta

SEQ ID NO: 272747 - DNA, 25 bp, Homo sapien
gcatatctgttgctactctgagttt

SEQ ID NO: 272748 - DNA, 25 bp, Homo sapien
aggcatatctgttgctactctgagt

SEQ ID NO: 272749 - DNA, 25 bp, Homo sapien
ataaccttctacaactgggagaaca

SEQ ID NO: 272750 - DNA, 25 bp, Homo sapien
atgtagaatcctggtacattaaata

SEQ ID NO: 272751 - DNA, 25 bp, Homo sapien
aatacacagtatcacctacaatcag

SEQ ID NO: 272752 - DNA, 25 bp, Homo sapien
atacacagtatcacctacaatcagg

SEQ ID NO: 272753 - DNA, 25 bp, Homo sapien
tacacagtatcacctacaatcagga

SEQ ID NO: 272754 - DNA, 25 bp, Homo sapien
aatcaggatgtgattgatgcagctc

SEQ ID NO: 272755 - DNA, 25 bp, Homo sapien
attatgaacttctcctggttgatca

SEQ ID NO: 272756 - DNA, 25 bp, Homo sapien
ttatgaacttctcctggttgatcac

SEQ ID NO: 272757 - DNA, 25 bp, Homo sapien
cctggttgatcacattgatacctgt

SEQ ID NO: 272758 - DNA, 25 bp, Homo sapien
tcctggttgatcacattgatacctg

SEQ ID NO: 272759 - DNA, 25 bp, Homo sapien
taaaaaaatatttcaggttgcagga

SEQ ID NO: 272760 - DNA, 25 bp, Homo sapien
aagaacaacattcttatacagtgga

SEQ ID NO: 272761 - DNA, 25 bp, Homo sapien
gggacagttttgtattcatcaacaa

SEQ ID NO: 272762 - DNA, 25 bp, Homo sapien
tgggacagttttgtattcatcaaca

SEQ ID NO: 272763 - DNA, 25 bp, Homo sapien
agaacaacattcttatacagtggac

SEQ ID NO: 272764 - DNA, 25 bp, Homo sapien
ctggcatgtaccactcttcaaatct

SEQ ID NO: 272765 - DNA, 25 bp, Homo sapien
ctgccactgagctccttattgagtt

SEQ ID NO: 272766 - DNA, 25 bp, Homo sapien
agtgctgcatgtgattgattaccac

SEQ ID NO: 272767 - DNA, 25 bp, Homo sapien
cctttgtaagcttaggtttgattct

SEQ ID NO: 272768 - DNA, 25 bp, Homo sapien
tgattgattaccacccgaacctttg

SEQ ID NO: 272769 - DNA, 25 bp, Homo sapien
cttgttccccaacatgacactatta

SEQ ID NO: 272770 - DNA, 25 bp, Homo sapien
ttcagaatggtatttgtcaacaaaa

SEQ ID NO: 272771 - DNA, 25 bp, Homo sapien
gggaaaaggatttataccactgcat

SEQ ID NO: 272772 - DNA, 25 bp, Homo sapien
gttccccaacatgacactattaaat

SEQ ID NO: 272773 - DNA, 25 bp, Homo sapien
taccaacaacttcttgacaaggtcc

SEQ ID NO: 272774 - DNA, 25 bp, Homo sapien
ctttggatccactaccaacaacttc

SEQ ID NO: 272775 - DNA, 25 bp, Homo sapien
gcctttggatccactaccaacaact

SEQ ID NO: 272776 - DNA, 25 bp, Homo sapien
ccaacaacttcttgacaaggtccag

SEQ ID NO: 272777 - DNA, 25 bp, Homo sapien
gaacctgagatagagctgtggattc

SEQ ID NO: 272778 - DNA, 25 bp, Homo sapien
gacagaagatcttgaaactttctct

SEQ ID NO: 272779 - DNA, 25 bp, Homo sapien
tgtggattcattttcctcagacaga

SEQ ID NO: 272780 - DNA, 25 bp, Homo sapien
ctgggctagaacctgagatagagct

SEQ ID NO: 272781 - DNA, 25 bp, Homo sapien
tgaggccgctttcgactagtagaag

SEQ ID NO: 272782 - DNA, 25 bp, Homo sapien
cacagccgggcgctttgtggtctcg

SEQ ID NO: 272783 - DNA, 25 bp, Homo sapien
gctttgtggtctcggcacccttggc

SEQ ID NO: 272784 - DNA, 25 bp, Homo sapien
ttggcttccccttcatgaggccgct

SEQ ID NO: 272785 - DNA, 25 bp, Homo sapien
aattgtacatcagtgactgtgaaaa

SEQ ID NO: 272786 - DNA, 25 bp, Homo sapien
ccaggttccatcaggtttttaattg

SEQ ID NO: 272787 - DNA, 25 bp, Homo sapien
taattgtacatcagtgactgtgaaa

SEQ ID NO: 272788 - DNA, 25 bp, Homo sapien
gccgcgtccacctggagctaagggt

SEQ ID NO: 272789 - DNA, 25 bp, Homo sapien
ccacctggagctaagggtcccgcca

SEQ ID NO: 272790 - DNA, 25 bp, Homo sapien
gtccgggccgcgtccacctggagct

SEQ ID NO: 272791 - DNA, 25 bp, Homo sapien
cacctggagctaagggtcccgccag

SEQ ID NO: 272792 - DNA, 25 bp, Homo sapien
cgccttcggctccttgcgggggtcg

SEQ ID NO: 272793 - DNA, 25 bp, Homo sapien
tgcgccgacgctggcggcgactcgg

SEQ ID NO: 272794 - DNA, 25 bp, Homo sapien
ggctcccgccgccttcggctccttg

SEQ ID NO: 272795 - DNA, 25 bp, Homo sapien
tcggcccttgggtcggctcgggcgc

SEQ ID NO: 272796 - DNA, 25 bp, Homo sapien
cacgtgctcccaatgattcctacgc

SEQ ID NO: 272797 - DNA, 25 bp, Homo sapien
tcacgtgctcccaatgattcctacg

SEQ ID NO: 272798 - DNA, 25 bp, Homo sapien
acgtgctcccaatgattcctacgct

SEQ ID NO: 272799 - DNA, 25 bp, Homo sapien
gaggccaagactgagagttcaagac

SEQ ID NO: 272800 - DNA, 25 bp, Homo sapien
tatgcatattttgtccagtgaaaca

SEQ ID NO: 272801 - DNA, 25 bp, Homo sapien
ttcttcagcgcaatctcaagtccaa

SEQ ID NO: 272802 - DNA, 25 bp, Homo sapien
taacacactgagagactaaaatgct

SEQ ID NO: 272803 - DNA, 25 bp, Homo sapien
tctaggaacagggtgatacagtgcc

SEQ ID NO: 272804 - DNA, 25 bp, Homo sapien
ttaacatgtgttaggcggagtacca

SEQ ID NO: 272805 - DNA, 25 bp, Homo sapien
ttcaagagtgcaatatcaggctggg

SEQ ID NO: 272806 - DNA, 25 bp, Homo sapien
tgaagggcgtcatcaagaagcaatg

SEQ ID NO: 272807 - DNA, 25 bp, Homo sapien
tcttccagaagtataccaggcaaag

SEQ ID NO: 272808 - DNA, 25 bp, Homo sapien
ctctgttttacagcgctgaggcttc

SEQ ID NO: 272809 - DNA, 25 bp, Homo sapien
cagccaggtggcacataattacatc

SEQ ID NO: 272810 - DNA, 25 bp, Homo sapien
tgaggcttctcatcacagttctatg

SEQ ID NO: 272811 - DNA, 25 bp, Homo sapien
ggcagatcacactggactcccagca

SEQ ID NO: 272812 - DNA, 25 bp, Homo sapien
aggcagatcacactggactcccagc

SEQ ID NO: 272813 - DNA, 25 bp, Homo sapien
actcccagcactgaatctggctcaa

SEQ ID NO: 272814 - DNA, 25 bp, Homo sapien
gttgtaactgttctaatcttgctgc

SEQ ID NO: 272815 - DNA, 25 bp, Homo sapien
agttgtaactgttctaatcttgctg

SEQ ID NO: 272816 - DNA, 25 bp, Homo sapien
cttatatagctttctttgtcatatt

SEQ ID NO: 272817 - DNA, 25 bp, Homo sapien
taaaataatatcttatatagctttc

SEQ ID NO: 272818 - DNA, 25 bp, Homo sapien
tatagctttctttgtcatatttttc

SEQ ID NO: 272819 - DNA, 25 bp, Homo sapien
taatatcttatatagctttctttgt

SEQ ID NO: 272820 - DNA, 25 bp, Homo sapien
tcattgtctctagctagtctgttac

SEQ ID NO: 272821 - DNA, 25 bp, Homo sapien
taattcattgtctctagctagtctg

SEQ ID NO: 272822 - DNA, 25 bp, Homo sapien
tcccttaattcattgtctctagcta

SEQ ID NO: 272823 - DNA, 25 bp, Homo sapien
cattgtctctagctagtctgttact

SEQ ID NO: 272824 - DNA, 25 bp, Homo sapien
aggatctcgtgtagaaattgctttg

SEQ ID NO: 272825 - DNA, 25 bp, Homo sapien
gagaggatctcgtgtagaaattgct

SEQ ID NO: 272826 - DNA, 25 bp, Homo sapien
tcagagagaggatctcgtgtagaaa

SEQ ID NO: 272827 - DNA, 25 bp, Homo sapien
tttcagagagaggatctcgtgtaga

SEQ ID NO: 272828 - DNA, 25 bp, Homo sapien
agagaatctccattttagcacttac

SEQ ID NO: 272829 - DNA, 25 bp, Homo sapien
ctctagaattccatttaacagacag

SEQ ID NO: 272830 - DNA, 25 bp, Homo sapien
tctctagaattccatttaacagaca

SEQ ID NO: 272831 - DNA, 25 bp, Homo sapien
tcatctctagaattccatttaacag

SEQ ID NO: 272832 - DNA, 25 bp, Homo sapien
catctctagaattccatttaacaga

SEQ ID NO: 272833 - DNA, 25 bp, Homo sapien
aaccataggatctgggtaattacag

SEQ ID NO: 272834 - DNA, 25 bp, Homo sapien
gggtaattacagtccagaagttcca

SEQ ID NO: 272835 - DNA, 25 bp, Homo sapien
attacagtccagaagttccatagcc

SEQ ID NO: 272836 - DNA, 25 bp, Homo sapien
gatctgggtaattacagtccagaag

SEQ ID NO: 272837 - DNA, 25 bp, Homo sapien
aatctcacaagcaagttatccaaat

SEQ ID NO: 272838 - DNA, 25 bp, Homo sapien
aatcctttgattagtcaatgctttc

SEQ ID NO: 272839 - DNA, 25 bp, Homo sapien
ccaatcctttgattagtcaatgctt

SEQ ID NO: 272840 - DNA, 25 bp, Homo sapien
cctttgattagtcaatgctttcttc

SEQ ID NO: 272841 - DNA, 25 bp, Homo sapien
gacttgcctattcaggtgcttcaaa

SEQ ID NO: 272842 - DNA, 25 bp, Homo sapien
taagttaatgagcttttccattgcc

SEQ ID NO: 272843 - DNA, 25 bp, Homo sapien
tgcacgacaataggactccaaaagc

SEQ ID NO: 272844 - DNA, 25 bp, Homo sapien
tcaaatacatcccacatgcacgaca

SEQ ID NO: 272845 - DNA, 25 bp, Homo sapien
gagtctcaaacacagactagagtca

SEQ ID NO: 272846 - DNA, 25 bp, Homo sapien
aaagagtctcaaacacagactagag

SEQ ID NO: 272847 - DNA, 25 bp, Homo sapien
gcagtgaaaagagtctcaaacacag

SEQ ID NO: 272848 - DNA, 25 bp, Homo sapien
tgccccactgcagtgaaaagagtct

SEQ ID NO: 272849 - DNA, 25 bp, Homo sapien
tgaaattagataggcacttccacgg

SEQ ID NO: 272850 - DNA, 25 bp, Homo sapien
ccacggtgagtttcacatgcacaaa

SEQ ID NO: 272851 - DNA, 25 bp, Homo sapien
gatacaaattgcaagtcactcctgc

SEQ ID NO: 272852 - DNA, 25 bp, Homo sapien
gatgcacgtaagtaaactcagcctg

SEQ ID NO: 272853 - DNA, 25 bp, Homo sapien
cctcgctccgcgcatgcgaagctcc

SEQ ID NO: 272854 - DNA, 25 bp, Homo sapien
tcgctccgcgcatgcgaagctcccg

SEQ ID NO: 272855 - DNA, 25 bp, Homo sapien
gggcctcgctccgcgcatgcgaagc

SEQ ID NO: 272856 - DNA, 25 bp, Homo sapien
ggcctcgctccgcgcatgcgaagct

SEQ ID NO: 272857 - DNA, 25 bp, Homo sapien
gaagttttgcgggtgtgcgtggacc

SEQ ID NO: 272858 - DNA, 25 bp, Homo sapien
acacgccgcgcgaccgtggccgtcg

SEQ ID NO: 272859 - DNA, 25 bp, Homo sapien
cggcggcgaagttttgacagctgct

SEQ ID NO: 272860 - DNA, 25 bp, Homo sapien
cggcaacatggagcgagcaggacac

SEQ ID NO: 272861 - DNA, 25 bp, Homo sapien
aaagacacatggatcccggtcctcc

SEQ ID NO: 272862 - DNA, 25 bp, Homo sapien
ggaaagacacatggatcccggtcct

SEQ ID NO: 272863 - DNA, 25 bp, Homo sapien
caggaaagacacatggatcccggtc

SEQ ID NO: 272864 - DNA, 25 bp, Homo sapien
ccaggaaagacacatggatcccggt

SEQ ID NO: 272865 - DNA, 25 bp, Homo sapien
tgcggctgctccacgcacttgttct

SEQ ID NO: 272866 - DNA, 25 bp, Homo sapien
cgcacttgttctcctccgacgacat

SEQ ID NO: 272867 - DNA, 25 bp, Homo sapien
tggctgcggctgctccacgcacttg

SEQ ID NO: 272868 - DNA, 25 bp, Homo sapien
gctgcggctgctccacgcacttgtt

SEQ ID NO: 272869 - DNA, 25 bp, Homo sapien
cggccccgaggtcttttgtctgcgg

SEQ ID NO: 272870 - DNA, 25 bp, Homo sapien
ccccgaggtcttttgtctgcggctg

SEQ ID NO: 272871 - DNA, 25 bp, Homo sapien
gccggccccgaggtcttttgtctgc

SEQ ID NO: 272872 - DNA, 25 bp, Homo sapien
gccccgaggtcttttgtctgcggct

SEQ ID NO: 272873 - DNA, 25 bp, Homo sapien
acggcacacgcgagagccacagaag

SEQ ID NO: 272874 - DNA, 25 bp, Homo sapien
acattcacagttcttccacggcaca

SEQ ID NO: 272875 - DNA, 25 bp, Homo sapien
ctacaacttcgaaagacattcacag

SEQ ID NO: 272876 - DNA, 25 bp, Homo sapien
agaagccgagcagctcgctggcact

SEQ ID NO: 272877 - DNA, 25 bp, Homo sapien
tcttgaatcagcctatggggcttgg

SEQ ID NO: 272878 - DNA, 25 bp, Homo sapien
cctatggggcttggagcgttgaaca

SEQ ID NO: 272879 - DNA, 25 bp, Homo sapien
tcatttcaggtttaaggctttggtg

SEQ ID NO: 272880 - DNA, 25 bp, Homo sapien
acttcgaaattccttgagtctcact

SEQ ID NO: 272881 - DNA, 25 bp, Homo sapien
agaaaaggccacttctgggaccctg

SEQ ID NO: 272882 - DNA, 25 bp, Homo sapien
gctagaaaaggccacttctgggacc

SEQ ID NO: 272883 - DNA, 25 bp, Homo sapien
ttccgccaggtttagttacaggagc

SEQ ID NO: 272884 - DNA, 25 bp, Homo sapien
cgccaggtttagttacaggagctag

SEQ ID NO: 272885 - DNA, 25 bp, Homo sapien
gtcccggggatttgagaagacattc

SEQ ID NO: 272886 - DNA, 25 bp, Homo sapien
ttggaacccacattttgggattctg

SEQ ID NO: 272887 - DNA, 25 bp, Homo sapien
tgggtcccggggatttgagaagaca

SEQ ID NO: 272888 - DNA, 25 bp, Homo sapien
gccaccgaagacgggaagacgcatt

SEQ ID NO: 272889 - DNA, 25 bp, Homo sapien
ccaatttgcccagtcagcccttggg

SEQ ID NO: 272890 - DNA, 25 bp, Homo sapien
tggaaacggccaaaacaatgcgtct

SEQ ID NO: 272891 - DNA, 25 bp, Homo sapien
gttccctgaatctccgccgggagcg

SEQ ID NO: 272892 - DNA, 25 bp, Homo sapien
tcaggccgcacgatttagaagggct

SEQ ID NO: 272893 - DNA, 25 bp, Homo sapien
cacaagaccttgtaggattatttct

SEQ ID NO: 272894 - DNA, 25 bp, Homo sapien
gaagttaccatcactctccacacaa

SEQ ID NO: 272895 - DNA, 25 bp, Homo sapien
ggttaaagaagttaccatcactctc

SEQ ID NO: 272896 - DNA, 25 bp, Homo sapien
tcactctccacacaagaccttgtag

SEQ ID NO: 272897 - DNA, 25 bp, Homo sapien
cggcaccaaatttcatgcgcatccg

SEQ ID NO: 272898 - DNA, 25 bp, Homo sapien
gcaccaaatttcatgcgcatccgtg

SEQ ID NO: 272899 - DNA, 25 bp, Homo sapien
caccaaatttcatgcgcatccgtgt

SEQ ID NO: 272900 - DNA, 25 bp, Homo sapien
caaatttcatgcgcatccgtgtgaa

SEQ ID NO: 272901 - DNA, 25 bp, Homo sapien
ttagctcggtctggcgacaagcagc

SEQ ID NO: 272902 - DNA, 25 bp, Homo sapien
ccggcggttatcagcacgagattgg

SEQ ID NO: 272903 - DNA, 25 bp, Homo sapien
tccgaaatgcgttgccgtctggctg

SEQ ID NO: 272904 - DNA, 25 bp, Homo sapien
tctgggaggaatcgcattgggaaca

SEQ ID NO: 272905 - DNA, 25 bp, Homo sapien
tccaggagtggctgtcgggcgagct

SEQ ID NO: 272906 - DNA, 25 bp, Homo sapien
aggagtggctgtcgggcgagctggg

SEQ ID NO: 272907 - DNA, 25 bp, Homo sapien
ttgggctagagctttaggggctcca

SEQ ID NO: 272908 - DNA, 25 bp, Homo sapien
gggctccaggagtggctgtcgggcg

SEQ ID NO: 272909 - DNA, 25 bp, Homo sapien
atcgggcagcgtcaatcttcagtcg

SEQ ID NO: 272910 - DNA, 25 bp, Homo sapien
cgaagctcggcttctgtgatggtcc

SEQ ID NO: 272911 - DNA, 25 bp, Homo sapien
cgatcgggcagcgtcaatcttcagt

SEQ ID NO: 272912 - DNA, 25 bp, Homo sapien
ttctgtgatggtccaggggacttcc

SEQ ID NO: 272913 - DNA, 25 bp, Homo sapien
cccttgaaaagaaggcaacgtggag

SEQ ID NO: 272914 - DNA, 25 bp, Homo sapien
caggggttttgaagcttggccgtca

SEQ ID NO: 272915 - DNA, 25 bp, Homo sapien
ttcggcctaataagggaagtgggca

SEQ ID NO: 272916 - DNA, 25 bp, Homo sapien
tatcgattaaacaggggatggactt

SEQ ID NO: 272917 - DNA, 25 bp, Homo sapien
aagagagtcagtgaaggaagatagg

SEQ ID NO: 272918 - DNA, 25 bp, Homo sapien
ttgttctctggtgggcaggggtgga

SEQ ID NO: 272919 - DNA, 25 bp, Homo sapien
aggggatgcgatggcctggcctggg

SEQ ID NO: 272920 - DNA, 25 bp, Homo sapien
gagagtcagtgaaggaagatagggg

SEQ ID NO: 272921 - DNA, 25 bp, Homo sapien
gagaacttggaagtcatcactccca

SEQ ID NO: 272922 - DNA, 25 bp, Homo sapien
gccacagagccagtaattggtagga

SEQ ID NO: 272923 - DNA, 25 bp, Homo sapien
tctctccgagaatagaggtcacagg

SEQ ID NO: 272924 - DNA, 25 bp, Homo sapien
gaaaatcagtttacctgagagcaga

SEQ ID NO: 272925 - DNA, 25 bp, Homo sapien
agaggatgggatgggactcccttgc

SEQ ID NO: 272926 - DNA, 25 bp, Homo sapien
aggatgggatgggactcccttgctc

SEQ ID NO: 272927 - DNA, 25 bp, Homo sapien
gaggatgggatgggactcccttgct

SEQ ID NO: 272928 - DNA, 25 bp, Homo sapien
gatcttgtgtcgtcagtacaacatt

SEQ ID NO: 272929 - DNA, 25 bp, Homo sapien
tgagatcttgtgtcgtcagtacaac

SEQ ID NO: 272930 - DNA, 25 bp, Homo sapien
gagatcttgtgtcgtcagtacaaca

SEQ ID NO: 272931 - DNA, 25 bp, Homo sapien
gtctgagatcttgtgtcgtcagtac

SEQ ID NO: 272932 - DNA, 25 bp, Homo sapien
tgaacagagaatccaccattagggc

SEQ ID NO: 272933 - DNA, 25 bp, Homo sapien
gaatccaccattagggcaaccagct

SEQ ID NO: 272934 - DNA, 25 bp, Homo sapien
aatccaccattagggcaaccagctg

SEQ ID NO: 272935 - DNA, 25 bp, Homo sapien
agagaatccaccattagggcaacca

SEQ ID NO: 272936 - DNA, 25 bp, Homo sapien
agttgtcagagcatacagtagaatc

SEQ ID NO: 272937 - DNA, 25 bp, Homo sapien
tagaatctggtagtgaatccataac

SEQ ID NO: 272938 - DNA, 25 bp, Homo sapien
tacagtagaatctggtagtgaatcc

SEQ ID NO: 272939 - DNA, 25 bp, Homo sapien
ccattgtggtcatagttgtcagagc

SEQ ID NO: 272940 - DNA, 25 bp, Homo sapien
tctaaattcttgattcctaagtccg

SEQ ID NO: 272941 - DNA, 25 bp, Homo sapien
tgattcctaagtccgtcacttcttt

SEQ ID NO: 272942 - DNA, 25 bp, Homo sapien
cttgattcctaagtccgtcacttct

SEQ ID NO: 272943 - DNA, 25 bp, Homo sapien
ttcttgattcctaagtccgtcactt

SEQ ID NO: 272944 - DNA, 25 bp, Homo sapien
tcattgatgtcaattctgtatgcag

SEQ ID NO: 272945 - DNA, 25 bp, Homo sapien
gtcattgatgtcaattctgtatgca

SEQ ID NO: 272946 - DNA, 25 bp, Homo sapien
cattgatgtcaattctgtatgcagg

SEQ ID NO: 272947 - DNA, 25 bp, Homo sapien
tgagcagaactggggcactgacaat

SEQ ID NO: 272948 - DNA, 25 bp, Homo sapien
aaagagggcagatattgagcagaac

SEQ ID NO: 272949 - DNA, 25 bp, Homo sapien
agacatgcatgtggccaagcatatg

SEQ ID NO: 272950 - DNA, 25 bp, Homo sapien
ctgacaattggcctttgacatgaac

SEQ ID NO: 272951 - DNA, 25 bp, Homo sapien
cccaagagccatgaatcctaagaca

SEQ ID NO: 272952 - DNA, 25 bp, Homo sapien
tttctgtcatactgaagcctctaac

SEQ ID NO: 272953 - DNA, 25 bp, Homo sapien
ctaagacaatgctcacagcctgtgc

SEQ ID NO: 272954 - DNA, 25 bp, Homo sapien
cagggctcaaattccaccccaagag

SEQ ID NO: 272955 - DNA, 25 bp, Homo sapien
caaatgcaaaggatgatataattga

SEQ ID NO: 272956 - DNA, 25 bp, Homo sapien
caaaggatgatataattgaatgcac

SEQ ID NO: 272957 - DNA, 25 bp, Homo sapien
gatgatataattgaatgcacaattt

SEQ ID NO: 272958 - DNA, 25 bp, Homo sapien
ccaaatgcaaaggatgatataattg

SEQ ID NO: 272959 - DNA, 25 bp, Homo sapien
aaattaggtcggcaaggacgagagt

SEQ ID NO: 272960 - DNA, 25 bp, Homo sapien
gtgaaaattaggtcggcaaggacga

SEQ ID NO: 272961 - DNA, 25 bp, Homo sapien
tccagtaagaccaggaaaactccaa

SEQ ID NO: 272962 - DNA, 25 bp, Homo sapien
gacgagagtgacatccagtaagacc

SEQ ID NO: 272963 - DNA, 25 bp, Homo sapien
gaacatccatgagaaaaaataaggc

SEQ ID NO: 272964 - DNA, 25 bp, Homo sapien
caaatactcgaagaagaacatccat

SEQ ID NO: 272965 - DNA, 25 bp, Homo sapien
tctacaaatactcgaagaagaacat

SEQ ID NO: 272966 - DNA, 25 bp, Homo sapien
tcgaagaagaacatccatgagaaaa

SEQ ID NO: 272967 - DNA, 25 bp, Homo sapien
gtacaaaatagcttaatgcattata

SEQ ID NO: 272968 - DNA, 25 bp, Homo sapien
taaaagtacaaaatagcttaatgca

SEQ ID NO: 272969 - DNA, 25 bp, Homo sapien
ccaaagtgcttcttataaaagtaca

SEQ ID NO: 272970 - DNA, 25 bp, Homo sapien
caaaatagcttaatgcattataaaa

SEQ ID NO: 272971 - DNA, 25 bp, Homo sapien
caccaatgtggggaggagagcacaa

SEQ ID NO: 272972 - DNA, 25 bp, Homo sapien
agccaccaatgtggggaggagagca

SEQ ID NO: 272973 - DNA, 25 bp, Homo sapien
ccaccaatgtggggaggagagcaca

SEQ ID NO: 272974 - DNA, 25 bp, Homo sapien
ggagccaccaatgtggggaggagag

SEQ ID NO: 272975 - DNA, 25 bp, Homo sapien
gagacactctattacagaagacctg

SEQ ID NO: 272976 - DNA, 25 bp, Homo sapien
aagacctggacttcagttcagttca

SEQ ID NO: 272977 - DNA, 25 bp, Homo sapien
ggagagacactctattacagaagac

SEQ ID NO: 272978 - DNA, 25 bp, Homo sapien
gttgaaggagagacactctattaca

SEQ ID NO: 272979 - DNA, 25 bp, Homo sapien
acagaaacaaaactacgggcgactg

SEQ ID NO: 272980 - DNA, 25 bp, Homo sapien
agagtgtggcatgccacaatggaga

SEQ ID NO: 272981 - DNA, 25 bp, Homo sapien
aaaactacgggcgactgtagtgttg

SEQ ID NO: 272982 - DNA, 25 bp, Homo sapien
ctacgggcgactgtagtgttgttcc

SEQ ID NO: 272983 - DNA, 25 bp, Homo sapien
tgaccctgagagtggtgcaaccatc

SEQ ID NO: 272984 - DNA, 25 bp, Homo sapien
tatgctaatgaggaggactggagac

SEQ ID NO: 272985 - DNA, 25 bp, Homo sapien
cagtgcaggctactccctagaaaga

SEQ ID NO: 272986 - DNA, 25 bp, Homo sapien
ccaaaggtcggccaaggtatgctaa

SEQ ID NO: 272987 - DNA, 25 bp, Homo sapien
tcccagtcgttaagaaatgcctaag

SEQ ID NO: 272988 - DNA, 25 bp, Homo sapien
gagagctgccttccatgagaccaga

SEQ ID NO: 272989 - DNA, 25 bp, Homo sapien
tcagcgcaggcctctaaaaaagcaa

SEQ ID NO: 272990 - DNA, 25 bp, Homo sapien
gatttttcagaacatgtcccagtcg

SEQ ID NO: 272991 - DNA, 25 bp, Homo sapien
ccctggacccactttgtgtactatt

SEQ ID NO: 272992 - DNA, 25 bp, Homo sapien
gaaaatgctagaccgacacagctat

SEQ ID NO: 272993 - DNA, 25 bp, Homo sapien
taaactaaacacttgatgtgactgc

SEQ ID NO: 272994 - DNA, 25 bp, Homo sapien
gtgtactattagcttgtctcattcc

SEQ ID NO: 272995 - DNA, 25 bp, Homo sapien
ttgtgcccagtggagcaacccatca

SEQ ID NO: 272996 - DNA, 25 bp, Homo sapien
gacataatatgaaaagagccttgga

SEQ ID NO: 272997 - DNA, 25 bp, Homo sapien
ttgtggcctatggaacaccaggttc

SEQ ID NO: 272998 - DNA, 25 bp, Homo sapien
tcactcgggaactcaacaagagacg

SEQ ID NO: 272999 - DNA, 25 bp, Homo sapien
gttgagttggatattttagtcaaca

SEQ ID NO: 273000 - DNA, 25 bp, Homo sapien
tgcctcagcagtagttgacttttgt

SEQ ID NO: 273001 - DNA, 25 bp, Homo sapien
ttgagttggatattttagtcaacat

SEQ ID NO: 273002 - DNA, 25 bp, Homo sapien
tagcacctgctgactctttatagca

SEQ ID NO: 273003 - DNA, 25 bp, Homo sapien
cctctagtggtgtggtgtttacttg

SEQ ID NO: 273004 - DNA, 25 bp, Homo sapien
ggtttgcataccttcagtaaaagat

SEQ ID NO: 273005 - DNA, 25 bp, Homo sapien
tgcctggtgactctttatagcacct

SEQ ID NO: 273006 - DNA, 25 bp, Homo sapien
acctggcctgttgttgttttagaga

SEQ ID NO: 273007 - DNA, 25 bp, Homo sapien
gggatcaaagaatagtcccacctca

SEQ ID NO: 273008 - DNA, 25 bp, Homo sapien
cccagccagtgtttcagagctttaa

SEQ ID NO: 273009 - DNA, 25 bp, Homo sapien
agagctttaaggtgatgagagatgc

SEQ ID NO: 273010 - DNA, 25 bp, Homo sapien
tttgtttgataggtccacttgggcc

SEQ ID NO: 273011 - DNA, 25 bp, Homo sapien
gggccatagtgttgtttgagttatc

SEQ ID NO: 273012 - DNA, 25 bp, Homo sapien
ctagcatgtgaactattctggagac

SEQ ID NO: 273013 - DNA, 25 bp, Homo sapien
gatttgttttgtgggctagcatgtg

SEQ ID NO: 273014 - DNA, 25 bp, Homo sapien
cattgacgtgccatggaacgtggcc

SEQ ID NO: 273015 - DNA, 25 bp, Homo sapien
gagtgacattgagtcccctcgtggc

SEQ ID NO: 273016 - DNA, 25 bp, Homo sapien
catttgctgagccttgtggacgtca

SEQ ID NO: 273017 - DNA, 25 bp, Homo sapien
tgccgccaggtccaacagtaagaat

SEQ ID NO: 273018 - DNA, 25 bp, Homo sapien
tgatccttttgcgggggaagatctt

SEQ ID NO: 273019 - DNA, 25 bp, Homo sapien
aactgtgatccttttgcgggggaag

SEQ ID NO: 273020 - DNA, 25 bp, Homo sapien
tgtgatccttttgcgggggaagatc

SEQ ID NO: 273021 - DNA, 25 bp, Homo sapien
actgtgatccttttgcgggggaaga

SEQ ID NO: 273022 - DNA, 25 bp, Homo sapien
ggagaggatcggctggcccaatgcc

SEQ ID NO: 273023 - DNA, 25 bp, Homo sapien
atcctcatccaggactttgagacgc

SEQ ID NO: 273024 - DNA, 25 bp, Homo sapien
cctcatccaggactttgagacgctc

SEQ ID NO: 273025 - DNA, 25 bp, Homo sapien
tcatccaggactttgagacgctccc

SEQ ID NO: 273026 - DNA, 25 bp, Homo sapien
acctcaagcagatccgcctcattga

SEQ ID NO: 273027 - DNA, 25 bp, Homo sapien
ggtgggcattgggccccatgccaac

SEQ ID NO: 273028 - DNA, 25 bp, Homo sapien
tcattgagaagcaggcccctgagaa

SEQ ID NO: 273029 - DNA, 25 bp, Homo sapien
gaagcaggcccctgagaacaaggcc

SEQ ID NO: 273030 - DNA, 25 bp, Homo sapien
tacaagcacaggttagcgtctacat

SEQ ID NO: 273031 - DNA, 25 bp, Homo sapien
gcggctgcgcatctcctagaagtgg

SEQ ID NO: 273032 - DNA, 25 bp, Homo sapien
tgtggatggcctagaacaacgagta

SEQ ID NO: 273033 - DNA, 25 bp, Homo sapien
tgtggaggacatctcagaaccgctg

SEQ ID NO: 273034 - DNA, 25 bp, Homo sapien
tagctgcacagtctgcgagtgggcg

SEQ ID NO: 273035 - DNA, 25 bp, Homo sapien
aaggttttggcggtagctgcacagt

SEQ ID NO: 273036 - DNA, 25 bp, Homo sapien
tggttgcgatcctcacagccagcat

SEQ ID NO: 273037 - DNA, 25 bp, Homo sapien
gcggatgggcggtgggtggttgcga

SEQ ID NO: 273038 - DNA, 25 bp, Homo sapien
aggcggaaggacagccctgcgccac

SEQ ID NO: 273039 - DNA, 25 bp, Homo sapien
cctgcgccaccaccaggagaaggga

SEQ ID NO: 273040 - DNA, 25 bp, Homo sapien
acagccctgcgccaccaccaggaga

SEQ ID NO: 273041 - DNA, 25 bp, Homo sapien
ccaccaggagaagggagcgcggtag

SEQ ID NO: 273042 - DNA, 25 bp, Homo sapien
tccagtggccgcacaaggcatatcc

SEQ ID NO: 273043 - DNA, 25 bp, Homo sapien
ctccagtggccgcacaaggcatatc

SEQ ID NO: 273044 - DNA, 25 bp, Homo sapien
gaactcgtttctggcgtggggcttg

SEQ ID NO: 273045 - DNA, 25 bp, Homo sapien
ttgtgcgcaccccagaccgggagga

SEQ ID NO: 273046 - DNA, 25 bp, Homo sapien
gtacatcaaacatccaggcctggtg

SEQ ID NO: 273047 - DNA, 25 bp, Homo sapien
catttaatgagaccatgtctagtac

SEQ ID NO: 273048 - DNA, 25 bp, Homo sapien
ccatgtctagtacatcaaacatcca

SEQ ID NO: 273049 - DNA, 25 bp, Homo sapien
tgtgaaatcatactcatttaatgag

SEQ ID NO: 273050 - DNA, 25 bp, Homo sapien
gctcatcattcgagccttttcctat

SEQ ID NO: 273051 - DNA, 25 bp, Homo sapien
tggtgacacttgcaccatatgctca

SEQ ID NO: 273052 - DNA, 25 bp, Homo sapien
ttgcaccatatgctcatcattcgag

SEQ ID NO: 273053 - DNA, 25 bp, Homo sapien
agcagttggtgacacttgcaccata

SEQ ID NO: 273054 - DNA, 25 bp, Homo sapien
gatggctgcgattcctccgtgcaat

SEQ ID NO: 273055 - DNA, 25 bp, Homo sapien
gcctggtccatagaacgagtagctg

SEQ ID NO: 273056 - DNA, 25 bp, Homo sapien
tacttgagaagccttgcgtacccct

SEQ ID NO: 273057 - DNA, 25 bp, Homo sapien
caagtgccttctaaccgctgagcta

SEQ ID NO: 273058 - DNA, 25 bp, Homo sapien
ctgggagaagcttgtctctgtacat

SEQ ID NO: 273059 - DNA, 25 bp, Homo sapien
acagtttattctgcaaaagtttcat

SEQ ID NO: 273060 - DNA, 25 bp, Homo sapien
ttcttctgccagaaagttggctaga

SEQ ID NO: 273061 - DNA, 25 bp, Homo sapien
agaggaggcttttgaaccagttgat

SEQ ID NO: 273062 - DNA, 25 bp, Homo sapien
taattctttagcgacttttccagcc

SEQ ID NO: 273063 - DNA, 25 bp, Homo sapien
ttccagcctgcatgtgtttcaagac

SEQ ID NO: 273064 - DNA, 25 bp, Homo sapien
ggacagccacgtttgaaattcggat

SEQ ID NO: 273065 - DNA, 25 bp, Homo sapien
ccacttctaattgggtcaggtgaac

SEQ ID NO: 273066 - DNA, 25 bp, Homo sapien
aattatgtttatctgtgttagcccc

SEQ ID NO: 273067 - DNA, 25 bp, Homo sapien
ggtttcactatcagccccaaaggag

SEQ ID NO: 273068 - DNA, 25 bp, Homo sapien
cagtcatttacaaccacaggttgcc

SEQ ID NO: 273069 - DNA, 25 bp, Homo sapien
cctgctggtagcaggttagaatgag

SEQ ID NO: 273070 - DNA, 25 bp, Homo sapien
gcctcattggctaatacctcaggat

SEQ ID NO: 273071 - DNA, 25 bp, Homo sapien
aaaggcaactgatgtatcagctgtc

SEQ ID NO: 273072 - DNA, 25 bp, Homo sapien
aatctggtactcttttggtggaaga

SEQ ID NO: 273073 - DNA, 25 bp, Homo sapien
gtggaagatcagttgtaactagggt

SEQ ID NO: 273074 - DNA, 25 bp, Homo sapien
tccagtaaagatggttgaagagctg

SEQ ID NO: 273075 - DNA, 25 bp, Homo sapien
ttccagtaaagatggttgaagagct

SEQ ID NO: 273076 - DNA, 25 bp, Homo sapien
tcagtaagattattgcaggaatttt

SEQ ID NO: 273077 - DNA, 25 bp, Homo sapien
ttgttcagtaagattattgcaggaa

SEQ ID NO: 273078 - DNA, 25 bp, Homo sapien
tattgttcagtaagattattgcagg

SEQ ID NO: 273079 - DNA, 25 bp, Homo sapien
gttcagtaagattattgcaggaatt

SEQ ID NO: 273080 - DNA, 25 bp, Homo sapien
ttatttgtactgagactggatatct

SEQ ID NO: 273081 - DNA, 25 bp, Homo sapien
tatttgtactgagactggatatctt

SEQ ID NO: 273082 - DNA, 25 bp, Homo sapien
ctttttgtcaggcagtgagaacaag

SEQ ID NO: 273083 - DNA, 25 bp, Homo sapien
ctgtctgtaagatgttggtgatggt

SEQ ID NO: 273084 - DNA, 25 bp, Homo sapien
tgaattacagctggcaactcatcag

SEQ ID NO: 273085 - DNA, 25 bp, Homo sapien
tgagaacaaggactctgtctgtaag

SEQ ID NO: 273086 - DNA, 25 bp, Homo sapien
ctgagtctgcggaaggccctggagt

SEQ ID NO: 273087 - DNA, 25 bp, Homo sapien
tgagtctctcgcaccaggtggctga

SEQ ID NO: 273088 - DNA, 25 bp, Homo sapien
ccagtggaggttgctgttgaacaga

SEQ ID NO: 273089 - DNA, 25 bp, Homo sapien
agaagttgaggtgagtctctcgcac

SEQ ID NO: 273090 - DNA, 25 bp, Homo sapien
cctggatctaggaactggtgggcaa

SEQ ID NO: 273091 - DNA, 25 bp, Homo sapien
tatgtgcctggatctaggaactggt

SEQ ID NO: 273092 - DNA, 25 bp, Homo sapien
acatgtatgtgcctggatctaggaa

SEQ ID NO: 273093 - DNA, 25 bp, Homo sapien
tggatctaggaactggtgggcaaac

SEQ ID NO: 273094 - DNA, 25 bp, Homo sapien
ggcacaggccaggactacaggccac

SEQ ID NO: 273095 - DNA, 25 bp, Homo sapien
tgtgcctgaggatgctttgcctgcc

SEQ ID NO: 273096 - DNA, 25 bp, Homo sapien
cccagctgatatggggatgagggct

SEQ ID NO: 273097 - DNA, 25 bp, Homo sapien
gcctgcccagctgatatggggatga

SEQ ID NO: 273098 - DNA, 25 bp, Homo sapien
ccgtcagagggctgtgtcctctctg

SEQ ID NO: 273099 - DNA, 25 bp, Homo sapien
ttagccgtcagagggctgtgtcctc

SEQ ID NO: 273100 - DNA, 25 bp, Homo sapien
gcctgaagagctcagtgcggattgc

SEQ ID NO: 273101 - DNA, 25 bp, Homo sapien
gaagagctcagtgcggattgctgac

SEQ ID NO: 273102 - DNA, 25 bp, Homo sapien
gatcacatactcagcaggcacctga

SEQ ID NO: 273103 - DNA, 25 bp, Homo sapien
caccgagtcttccaagcctgcatgg

SEQ ID NO: 273104 - DNA, 25 bp, Homo sapien
ggctgtcctagccttctccaccgag

SEQ ID NO: 273105 - DNA, 25 bp, Homo sapien
ggcccatcaacagcacagttgccaa

SEQ ID NO: 273106 - DNA, 25 bp, Homo sapien
ccaagggccaaggtcttcatagaac

SEQ ID NO: 273107 - DNA, 25 bp, Homo sapien
ccccaagggccaaggtcttcataga

SEQ ID NO: 273108 - DNA, 25 bp, Homo sapien
cccaagggccaaggtcttcatagaa

SEQ ID NO: 273109 - DNA, 25 bp, Homo sapien
caagggccaaggtcttcatagaaca

SEQ ID NO: 273110 - DNA, 25 bp, Homo sapien
tgggatgcacgacgtcaaccaccga

SEQ ID NO: 273111 - DNA, 25 bp, Homo sapien
tagagttgggatgcacgacgtcaac

SEQ ID NO: 273112 - DNA, 25 bp, Homo sapien
gagttgggatgcacgacgtcaacca

SEQ ID NO: 273113 - DNA, 25 bp, Homo sapien
gcttagagttgggatgcacgacgtc

SEQ ID NO: 273114 - DNA, 25 bp, Homo sapien
gaactaaaaaggcggcttcagactc

SEQ ID NO: 273115 - DNA, 25 bp, Homo sapien
attgctgccattgcagctctcagaa

SEQ ID NO: 273116 - DNA, 25 bp, Homo sapien
ctcagaactaaaaaggcggcttcag

SEQ ID NO: 273117 - DNA, 25 bp, Homo sapien
tcgagggaatcctccccgtcaccaa

SEQ ID NO: 273118 - DNA, 25 bp, Homo sapien
taatgtaaatgagagactcccctcc

SEQ ID NO: 273119 - DNA, 25 bp, Homo sapien
agaaatagacccatcagagaaatgc

SEQ ID NO: 273120 - DNA, 25 bp, Homo sapien
aaaactaatgtaaatgagagactcc

SEQ ID NO: 273121 - DNA, 25 bp, Homo sapien
ccaaaacatagaaattgcaaagtcc

SEQ ID NO: 273122 - DNA, 25 bp, Homo sapien
ttatacatactcatggctatacggg

SEQ ID NO: 273123 - DNA, 25 bp, Homo sapien
taactatagccatctacagtactat

SEQ ID NO: 273124 - DNA, 25 bp, Homo sapien
ttcagtacatgtagatggtgatcag

SEQ ID NO: 273125 - DNA, 25 bp, Homo sapien
tgtatccattaacaaatctcttact

SEQ ID NO: 273126 - DNA, 25 bp, Homo sapien
ctcatttgaagtctgaagtattcca

SEQ ID NO: 273127 - DNA, 25 bp, Homo sapien
catactcatttgaagtctgaagtat

SEQ ID NO: 273128 - DNA, 25 bp, Homo sapien
tactcatttgaagtctgaagtattc

SEQ ID NO: 273129 - DNA, 25 bp, Homo sapien
tcatttgaagtctgaagtattccat

SEQ ID NO: 273130 - DNA, 25 bp, Homo sapien
taaaatatgtcaagttagagagaaa

SEQ ID NO: 273131 - DNA, 25 bp, Homo sapien
gcatcctggaactaggttctataat

SEQ ID NO: 273132 - DNA, 25 bp, Homo sapien
cattttgccccaagtatatacttca

SEQ ID NO: 273133 - DNA, 25 bp, Homo sapien
tcagattaagcatcctggaactagg

SEQ ID NO: 273134 - DNA, 25 bp, Homo sapien
caatatttgtaacattctcatagcc

SEQ ID NO: 273135 - DNA, 25 bp, Homo sapien
ctcatagccatctggtggtggttcg

SEQ ID NO: 273136 - DNA, 25 bp, Homo sapien
gaaagcattatatggtggcacaata

SEQ ID NO: 273137 - DNA, 25 bp, Homo sapien
ctggtggtggttcgaggtatgacgt

SEQ ID NO: 273138 - DNA, 25 bp, Homo sapien
gatgaggttttcatagtactgaata

SEQ ID NO: 273139 - DNA, 25 bp, Homo sapien
ctatacaggttttatatagcaaaag

SEQ ID NO: 273140 - DNA, 25 bp, Homo sapien
aatccacatgaatgattcacctaat

SEQ ID NO: 273141 - DNA, 25 bp, Homo sapien
ttccttggttttagtcctctataca

SEQ ID NO: 273142 - DNA, 25 bp, Homo sapien
gagacagctcttgtcctatactggg

SEQ ID NO: 273143 - DNA, 25 bp, Homo sapien
gttctccacaataggcaggtactgc

SEQ ID NO: 273144 - DNA, 25 bp, Homo sapien
gatgaagtggctcaattgcccacgg

SEQ ID NO: 273145 - DNA, 25 bp, Homo sapien
gactatgagtcaacaagtcaccatg

SEQ ID NO: 273146 - DNA, 25 bp, Homo sapien
ccccatctgctgtgaagtgaatggt

SEQ ID NO: 273147 - DNA, 25 bp, Homo sapien
gatggctccctgagcaaggtctgct

SEQ ID NO: 273148 - DNA, 25 bp, Homo sapien
gctgctcccagagaaactggcgtag

SEQ ID NO: 273149 - DNA, 25 bp, Homo sapien
ccctgagcaaggtctgctgctccca

SEQ ID NO: 273150 - DNA, 25 bp, Homo sapien
gagaaactggcgtagcctgatgcat

SEQ ID NO: 273151 - DNA, 25 bp, Homo sapien
aattgctgcttagtgtaatcctcac

SEQ ID NO: 273152 - DNA, 25 bp, Homo sapien
aatcctcactgggagcatgaaagtc

SEQ ID NO: 273153 - DNA, 25 bp, Homo sapien
caggcctcctgccataattgctgct

SEQ ID NO: 273154 - DNA, 25 bp, Homo sapien
tagtgtaatcctcactgggagcatg

SEQ ID NO: 273155 - DNA, 25 bp, Homo sapien
catgaaggccccagacttaatgcag

SEQ ID NO: 273156 - DNA, 25 bp, Homo sapien
gacttaatgcagtaggtggaatcac

SEQ ID NO: 273157 - DNA, 25 bp, Homo sapien
tcttgtagtcagatgcaggtaggtc

SEQ ID NO: 273158 - DNA, 25 bp, Homo sapien
aacctgtgctagcatggacaagggc

SEQ ID NO: 273159 - DNA, 25 bp, Homo sapien
tgtaggaatggtgcttgcggaccct

SEQ ID NO: 273160 - DNA, 25 bp, Homo sapien
agccccgtacatgccccacttctct

SEQ ID NO: 273161 - DNA, 25 bp, Homo sapien
caaatggcactgtaggaatggtgct

SEQ ID NO: 273162 - DNA, 25 bp, Homo sapien
ctcccaaatggcactgtaggaatgg

SEQ ID NO: 273163 - DNA, 25 bp, Homo sapien
gaagttcatgaggaatacagcccag

SEQ ID NO: 273164 - DNA, 25 bp, Homo sapien
gacggtagtgaagttcatgaggaat

SEQ ID NO: 273165 - DNA, 25 bp, Homo sapien
tggagcaggacggtagtgaagttca

SEQ ID NO: 273166 - DNA, 25 bp, Homo sapien
gtagtgaagttcatgaggaatacag

SEQ ID NO: 273167 - DNA, 25 bp, Homo sapien
tggtcactggacaggcctcgtgctg

SEQ ID NO: 273168 - DNA, 25 bp, Homo sapien
tgctgtggtcactggacaggcctcg

SEQ ID NO: 273169 - DNA, 25 bp, Homo sapien
gctgtggtcactggacaggcctcgt

SEQ ID NO: 273170 - DNA, 25 bp, Homo sapien
tgtggtcactggacaggcctcgtgc

SEQ ID NO: 273171 - DNA, 25 bp, Homo sapien
agtgtgaggtacagaccagcacaga

SEQ ID NO: 273172 - DNA, 25 bp, Homo sapien
cagcacagagagggtaccgccccag

SEQ ID NO: 273173 - DNA, 25 bp, Homo sapien
gtgtgaggtacagaccagcacagag

SEQ ID NO: 273174 - DNA, 25 bp, Homo sapien
acagagagggtaccgccccaggctc

SEQ ID NO: 273175 - DNA, 25 bp, Homo sapien
ggagcgggaccggtatcggtctctg

SEQ ID NO: 273176 - DNA, 25 bp, Homo sapien
ccggtatcggtctctgtgacaccca

SEQ ID NO: 273177 - DNA, 25 bp, Homo sapien
cgggaccggtatcggtctctgtgac

SEQ ID NO: 273178 - DNA, 25 bp, Homo sapien
ggccgtgctgacctctcccggggat

SEQ ID NO: 273179 - DNA, 25 bp, Homo sapien
gggccctagggtccagcgctgcccc

SEQ ID NO: 273180 - DNA, 25 bp, Homo sapien
agggctgcctgggtcaccgggctcc

SEQ ID NO: 273181 - DNA, 25 bp, Homo sapien
ggcaggggccctagggtccagcgct

SEQ ID NO: 273182 - DNA, 25 bp, Homo sapien
caggcaggggccctagggtccagcg

SEQ ID NO: 273183 - DNA, 25 bp, Homo sapien
tagaggtcgcagaagcgcctcctgt

SEQ ID NO: 273184 - DNA, 25 bp, Homo sapien
tctacattcgtcctgtgggagcccg

SEQ ID NO: 273185 - DNA, 25 bp, Homo sapien
cagaagcagcttcgggttgcacagg

SEQ ID NO: 273186 - DNA, 25 bp, Homo sapien
catccgcaaagaaagcggcctggct

SEQ ID NO: 273187 - DNA, 25 bp, Homo sapien
cacgaagcgcagtctcggcttccgt

SEQ ID NO: 273188 - DNA, 25 bp, Homo sapien
acatcttctccgagactcgctctga

SEQ ID NO: 273189 - DNA, 25 bp, Homo sapien
gggcctcgcacgaagcgcagtctcg

SEQ ID NO: 273190 - DNA, 25 bp, Homo sapien
caaacggaagccaccacatcttctc

SEQ ID NO: 273191 - DNA, 25 bp, Homo sapien
tgctctgtccccggtgtcgcagacg

SEQ ID NO: 273192 - DNA, 25 bp, Homo sapien
ccggtgtcgcagacgtccccacatt

SEQ ID NO: 273193 - DNA, 25 bp, Homo sapien
gtgtcgcagacgtccccacattcca

SEQ ID NO: 273194 - DNA, 25 bp, Homo sapien
cacattccacttcggctgtgttctc

SEQ ID NO: 273195 - DNA, 25 bp, Homo sapien
ccagaggcattgatagtgtcatgac

SEQ ID NO: 273196 - DNA, 25 bp, Homo sapien
ggtgcaccaaaacctgggatcaggg

SEQ ID NO: 273197 - DNA, 25 bp, Homo sapien
ccaatgcatgaaagactgtctgggc

SEQ ID NO: 273198 - DNA, 25 bp, Homo sapien
ggatcagggcattgtagacatggct

SEQ ID NO: 273199 - DNA, 25 bp, Homo sapien
ggctctattcaaattgggctgaggg

SEQ ID NO: 273200 - DNA, 25 bp, Homo sapien
tttgttctgtgacatcctgtgctgc

SEQ ID NO: 273201 - DNA, 25 bp, Homo sapien
cctgtgctgcattagaggagcacac

SEQ ID NO: 273202 - DNA, 25 bp, Homo sapien
ataaacaatagctaaaggttagttg

SEQ ID NO: 273203 - DNA, 25 bp, Homo sapien
attattactatgtttgttctgtgac

SEQ ID NO: 273204 - DNA, 25 bp, Homo sapien
aggctctcgtatatccattatctca

SEQ ID NO: 273205 - DNA, 25 bp, Homo sapien
cgattactacactcaggctctcgta

SEQ ID NO: 273206 - DNA, 25 bp, Homo sapien
cattatctcacgtaattacctcttt

SEQ ID NO: 273207 - DNA, 25 bp, Homo sapien
tacatagtagcacgattactacact

SEQ ID NO: 273208 - DNA, 25 bp, Homo sapien
caagtcctcaaatctcctgctttgg

SEQ ID NO: 273209 - DNA, 25 bp, Homo sapien
cctgctttggagagtcacagcttcc

SEQ ID NO: 273210 - DNA, 25 bp, Homo sapien
gggtgaaccaagtcctcaaatctcc

SEQ ID NO: 273211 - DNA, 25 bp, Homo sapien
ctcaaatctcctgctttggagagtc

SEQ ID NO: 273212 - DNA, 25 bp, Homo sapien
ccaatgccgtacctggaggatgaag

SEQ ID NO: 273213 - DNA, 25 bp, Homo sapien
gcccaatgccgtacctggaggatga

SEQ ID NO: 273214 - DNA, 25 bp, Homo sapien
tagcccaatgccgtacctggaggat

SEQ ID NO: 273215 - DNA, 25 bp, Homo sapien
ctgtagcccaatgccgtacctggag

SEQ ID NO: 273216 - DNA, 25 bp, Homo sapien
ggtggtccaccaaagcacgctgcac

SEQ ID NO: 273217 - DNA, 25 bp, Homo sapien
tggtccaccaaagcacgctgcacct

SEQ ID NO: 273218 - DNA, 25 bp, Homo sapien
gtggtccaccaaagcacgctgcacc

SEQ ID NO: 273219 - DNA, 25 bp, Homo sapien
ttccccttgaatcgggtctgggctg

SEQ ID NO: 273220 - DNA, 25 bp, Homo sapien
cccttgaatcgggtctgggctgctc

SEQ ID NO: 273221 - DNA, 25 bp, Homo sapien
tccccttgaatcgggtctgggctgc

SEQ ID NO: 273222 - DNA, 25 bp, Homo sapien
cttgaatcgggtctgggctgctcac

SEQ ID NO: 273223 - DNA, 25 bp, Homo sapien
ggtccttgtcatgggacagaaactg

SEQ ID NO: 273224 - DNA, 25 bp, Homo sapien
gcagctccttagtcagctggtcctt

SEQ ID NO: 273225 - DNA, 25 bp, Homo sapien
gctggtccttgtcatgggacagaaa

SEQ ID NO: 273226 - DNA, 25 bp, Homo sapien
ggtcaggacaatcaatgccttcacc

SEQ ID NO: 273227 - DNA, 25 bp, Homo sapien
aagccactactgtgagtctccaagc

SEQ ID NO: 273228 - DNA, 25 bp, Homo sapien
tgcacagccaccctaggagacatgg

SEQ ID NO: 273229 - DNA, 25 bp, Homo sapien
taaacactcttataaattgccagca

SEQ ID NO: 273230 - DNA, 25 bp, Homo sapien
aagccaaattgcttcttatgcagaa

SEQ ID NO: 273231 - DNA, 25 bp, Homo sapien
ccaggtaaccaacggagtgatttat

SEQ ID NO: 273232 - DNA, 25 bp, Homo sapien
taggaacttccaccaaagactgaag

SEQ ID NO: 273233 - DNA, 25 bp, Homo sapien
gaattacacgtcctctgatacttag

SEQ ID NO: 273234 - DNA, 25 bp, Homo sapien
cccacagcatgggaaccaaggcctt

SEQ ID NO: 273235 - DNA, 25 bp, Homo sapien
cacttgggaatgttggtgttctcca

SEQ ID NO: 273236 - DNA, 25 bp, Homo sapien
ccaggaatctcagctctttgctcat

SEQ ID NO: 273237 - DNA, 25 bp, Homo sapien
ggaatctcagctctttgctcatgtg

SEQ ID NO: 273238 - DNA, 25 bp, Homo sapien
tggtgttctccaggaatctcagctc

SEQ ID NO: 273239 - DNA, 25 bp, Homo sapien
taatcatcctggtcagaaccaaggc

SEQ ID NO: 273240 - DNA, 25 bp, Homo sapien
gaaactgtcattcaggcagtctgcc

SEQ ID NO: 273241 - DNA, 25 bp, Homo sapien
tgcatagacctgctgaacatggcca

SEQ ID NO: 273242 - DNA, 25 bp, Homo sapien
tctgccttcaaagatcaagccctgg

SEQ ID NO: 273243 - DNA, 25 bp, Homo sapien
agcacttggcgttatctgtcttgat

SEQ ID NO: 273244 - DNA, 25 bp, Homo sapien
tctccagcacttggcgttatctgtc

SEQ ID NO: 273245 - DNA, 25 bp, Homo sapien
acttggcgttatctgtcttgattgg

SEQ ID NO: 273246 - DNA, 25 bp, Homo sapien
ccagcacttggcgttatctgtcttg

SEQ ID NO: 273247 - DNA, 25 bp, Homo sapien
gagctgccatacttccagaaagaaa

SEQ ID NO: 273248 - DNA, 25 bp, Homo sapien
gaaatattgctaccctgagaagggc

SEQ ID NO: 273249 - DNA, 25 bp, Homo sapien
aattattgtgctacccagttgtaca

SEQ ID NO: 273250 - DNA, 25 bp, Homo sapien
tatttagacagggacggtctagctc

SEQ ID NO: 273251 - DNA, 25 bp, Homo sapien
atctggacttcggagtgtcgaggag

SEQ ID NO: 273252 - DNA, 25 bp, Homo sapien
tggacttcggagtgtcgaggaggtt

SEQ ID NO: 273253 - DNA, 25 bp, Homo sapien
tctggacttcggagtgtcgaggagg

SEQ ID NO: 273254 - DNA, 25 bp, Homo sapien
gacttcggagtgtcgaggaggtttc

SEQ ID NO: 273255 - DNA, 25 bp, Homo sapien
gcttgggctcaaacacagggtgctg

SEQ ID NO: 273256 - DNA, 25 bp, Homo sapien
tgttgggtctcacaaggtccagtct

SEQ ID NO: 273257 - DNA, 25 bp, Homo sapien
catgctaaggaatctgtaccaggac

SEQ ID NO: 273258 - DNA, 25 bp, Homo sapien
tacagagcttatggcctagtgcaga

SEQ ID NO: 273259 - DNA, 25 bp, Homo sapien
caggattccagtcatttttcaaggg

SEQ ID NO: 273260 - DNA, 25 bp, Homo sapien
aatgctgcgctgttctctatcaggg

SEQ ID NO: 273261 - DNA, 25 bp, Homo sapien
catgggaatagcatgtgagccggcc

SEQ ID NO: 273262 - DNA, 25 bp, Homo sapien
tcttcaagggaggttcctggaacca

SEQ ID NO: 273263 - DNA, 25 bp, Homo sapien
agcaaaaaggaatgtagtaggacag

SEQ ID NO: 273264 - DNA, 25 bp, Homo sapien
gtagtaggacagcagggtgataata

SEQ ID NO: 273265 - DNA, 25 bp, Homo sapien
taaggagaaggtcagcaaaaaacat

SEQ ID NO: 273266 - DNA, 25 bp, Homo sapien
ataaggagaaggtcagcaaaaaaca

SEQ ID NO: 273267 - DNA, 25 bp, Homo sapien
ggtccaggggaccagtattcagcac

SEQ ID NO: 273268 - DNA, 25 bp, Homo sapien
catgtggctctctagtggtcccgga

SEQ ID NO: 273269 - DNA, 25 bp, Homo sapien
tagggctaaacgtgccatgcaggtc

SEQ ID NO: 273270 - DNA, 25 bp, Homo sapien
tctgcatcgtgcaaagacagtccct

SEQ ID NO: 273271 - DNA, 25 bp, Homo sapien
gaggttacagacttcctgaggacca

SEQ ID NO: 273272 - DNA, 25 bp, Homo sapien
gcctcgctgaggacgttctgagctg

SEQ ID NO: 273273 - DNA, 25 bp, Homo sapien
gctgcaaagtatgcagtggtcgtct

SEQ ID NO: 273274 - DNA, 25 bp, Homo sapien
cattggaagccaagtgcgcctctgt

SEQ ID NO: 273275 - DNA, 25 bp, Homo sapien
tctgagctggtgctatcatcctggg

SEQ ID NO: 273276 - DNA, 25 bp, Homo sapien
gtggctctggtaatgtaatcacagg

SEQ ID NO: 273277 - DNA, 25 bp, Homo sapien
taatcacaggagtcctcaaaagagg

SEQ ID NO: 273278 - DNA, 25 bp, Homo sapien
cacaggagtcctcaaaagagggact

SEQ ID NO: 273279 - DNA, 25 bp, Homo sapien
tgtaatcacaggagtcctcaaaaga

SEQ ID NO: 273280 - DNA, 25 bp, Homo sapien
taagcccgtcatcaaacccagatgg

SEQ ID NO: 273281 - DNA, 25 bp, Homo sapien
tgttcctaatcagccctcatgggtg

SEQ ID NO: 273282 - DNA, 25 bp, Homo sapien
cacaggccagttccgtagtgttggg

SEQ ID NO: 273283 - DNA, 25 bp, Homo sapien
tatttgattgcagaggccaacggat

SEQ ID NO: 273284 - DNA, 25 bp, Homo sapien
aaattttggactgagcagccccagc

SEQ ID NO: 273285 - DNA, 25 bp, Homo sapien
gactatggtttgacgtgcccaggaa

SEQ ID NO: 273286 - DNA, 25 bp, Homo sapien
tgtcacgcattgcttaacggcaggg

SEQ ID NO: 273287 - DNA, 25 bp, Homo sapien
aaatacttatggagcgtgatgagcc

SEQ ID NO: 273288 - DNA, 25 bp, Homo sapien
caaatgacttggtgttgtcctgcag

SEQ ID NO: 273289 - DNA, 25 bp, Homo sapien
cagtaagttgctggatacaaactca

SEQ ID NO: 273290 - DNA, 25 bp, Homo sapien
tctatgacttcatgcgagatccggc

SEQ ID NO: 273291 - DNA, 25 bp, Homo sapien
gaaatcatagccttgttcacagatg

SEQ ID NO: 273292 - DNA, 25 bp, Homo sapien
ttctaacatctggaataagacaagg

SEQ ID NO: 273293 - DNA, 25 bp, Homo sapien
tcttctaacatctggaataagacaa

SEQ ID NO: 273294 - DNA, 25 bp, Homo sapien
cttctaacatctggaataagacaag

SEQ ID NO: 273295 - DNA, 25 bp, Homo sapien
tttattcttacattgagttacaaca

SEQ ID NO: 273296 - DNA, 25 bp, Homo sapien
ttattcttacattgagttacaacac

SEQ ID NO: 273297 - DNA, 25 bp, Homo sapien
tgtagttcttctcaagcattattta

SEQ ID NO: 273298 - DNA, 25 bp, Homo sapien
gtagttcttctcaagcattatttat

SEQ ID NO: 273299 - DNA, 25 bp, Homo sapien
ggtctgtgaatacttgccaagcgca

SEQ ID NO: 273300 - DNA, 25 bp, Homo sapien
tacgtattagaatcccatgaggtgc

SEQ ID NO: 273301 - DNA, 25 bp, Homo sapien
gaaagtcttcatgtaacctcagggt

SEQ ID NO: 273302 - DNA, 25 bp, Homo sapien
tcctcactgatggtaagtaccccgg

SEQ ID NO: 273303 - DNA, 25 bp, Homo sapien
tcttttccgcggtggagttcgagtc

SEQ ID NO: 273304 - DNA, 25 bp, Homo sapien
agttcgagtcggctccactttgctc

SEQ ID NO: 273305 - DNA, 25 bp, Homo sapien
gcgaacgaacgttctgaggctttct

SEQ ID NO: 273306 - DNA, 25 bp, Homo sapien
ggcccggctggcgtcgcggagggct

SEQ ID NO: 273307 - DNA, 25 bp, Homo sapien
cgggacagcggacggcgggctgcgt

SEQ ID NO: 273308 - DNA, 25 bp, Homo sapien
cccgggacagcggacggcgggctgc

SEQ ID NO: 273309 - DNA, 25 bp, Homo sapien
cagaccagcgcccggtggtccagga

SEQ ID NO: 273310 - DNA, 25 bp, Homo sapien
gcccggtggtccaggagtcgcaggg

SEQ ID NO: 273311 - DNA, 25 bp, Homo sapien
ggcgccgcgatatctgtgcccaagg

SEQ ID NO: 273312 - DNA, 25 bp, Homo sapien
ctccagtcacgacggcgggccaggt

SEQ ID NO: 273313 - DNA, 25 bp, Homo sapien
gcggctaccgctccccacgtcgagt

SEQ ID NO: 273314 - DNA, 25 bp, Homo sapien
cgggccaggttgtgcaacacgcgcc

SEQ ID NO: 273315 - DNA, 25 bp, Homo sapien
aaggaatacttgtgagccaccggca

SEQ ID NO: 273316 - DNA, 25 bp, Homo sapien
tgcatgaagcctaggcagcgagaac

SEQ ID NO: 273317 - DNA, 25 bp, Homo sapien
gctggcggtcatgggaaacctgcat

SEQ ID NO: 273318 - DNA, 25 bp, Homo sapien
ctatgggcattcctccaggctggcg

SEQ ID NO: 273319 - DNA, 25 bp, Homo sapien
cctgttgtgccacaggtctagagag

SEQ ID NO: 273320 - DNA, 25 bp, Homo sapien
tgggagattagaccatgacaggatg

SEQ ID NO: 273321 - DNA, 25 bp, Homo sapien
gacacaggatccaggacatgggaga

SEQ ID NO: 273322 - DNA, 25 bp, Homo sapien
gcatctgtactgtttgctagaaggc

SEQ ID NO: 273323 - DNA, 25 bp, Homo sapien
tctacatatggagtgttgggaacct

SEQ ID NO: 273324 - DNA, 25 bp, Homo sapien
agatttcagcatttggaggtcaccc

SEQ ID NO: 273325 - DNA, 25 bp, Homo sapien
tgtctgaatgctacaaaagggagtt

SEQ ID NO: 273326 - DNA, 25 bp, Homo sapien
ctcagaaccttataacgttcagggc

SEQ ID NO: 273327 - DNA, 25 bp, Homo sapien
tgtacccattaccactttcagaaac

SEQ ID NO: 273328 - DNA, 25 bp, Homo sapien
tgtgtacccattaccactttcagaa

SEQ ID NO: 273329 - DNA, 25 bp, Homo sapien
ctgtgtacccattaccactttcaga

SEQ ID NO: 273330 - DNA, 25 bp, Homo sapien
acccattaccactttcagaaactga

SEQ ID NO: 273331 - DNA, 25 bp, Homo sapien
cccttggtcactcaaaaagtcccag

SEQ ID NO: 273332 - DNA, 25 bp, Homo sapien
ggtgacaccagaatatgccatcagc

SEQ ID NO: 273333 - DNA, 25 bp, Homo sapien
ggacgtcaagcagtgtgccccttgg

SEQ ID NO: 273334 - DNA, 25 bp, Homo sapien
tccagatatgctaacaccaggctca

SEQ ID NO: 273335 - DNA, 25 bp, Homo sapien
tattcttgaccgtgcagtttagccc

SEQ ID NO: 273336 - DNA, 25 bp, Homo sapien
taatgaatgttctcgacaggaagcg

SEQ ID NO: 273337 - DNA, 25 bp, Homo sapien
ggtgcacgcatccacaattctccgg

SEQ ID NO: 273338 - DNA, 25 bp, Homo sapien
tgaacctggagtggcatggcaagac

SEQ ID NO: 273339 - DNA, 25 bp, Homo sapien
tatagatacagtagggcagctcccc

SEQ ID NO: 273340 - DNA, 25 bp, Homo sapien
attcagagacttatagccgagaccc

SEQ ID NO: 273341 - DNA, 25 bp, Homo sapien
gcaggtacagacagctagacagcaa

SEQ ID NO: 273342 - DNA, 25 bp, Homo sapien
atagccgagaccctgagatgcccca

SEQ ID NO: 273343 - DNA, 25 bp, Homo sapien
gcctgtggcccttggccgcgtcctc

SEQ ID NO: 273344 - DNA, 25 bp, Homo sapien
gtgtccattcgatgtgagccacggg

SEQ ID NO: 273345 - DNA, 25 bp, Homo sapien
cgagggtgaatccagctgtcatcca

SEQ ID NO: 273346 - DNA, 25 bp, Homo sapien
gtcaggtttcgagggtgaatccagc

SEQ ID NO: 273347 - DNA, 25 bp, Homo sapien
gagccacggggaacaggtctccttg

SEQ ID NO: 273348 - DNA, 25 bp, Homo sapien
tcctgagcctgactgggagagccac

SEQ ID NO: 273349 - DNA, 25 bp, Homo sapien
ttgaacccccatgtctgagcacagg

SEQ ID NO: 273350 - DNA, 25 bp, Homo sapien
aacccccatgtctgagcacaggact

SEQ ID NO: 273351 - DNA, 25 bp, Homo sapien
gagcccaatcctgagcctgactggg

SEQ ID NO: 273352 - DNA, 25 bp, Homo sapien
tcaaacctgacgcacaaacgttcat

SEQ ID NO: 273353 - DNA, 25 bp, Homo sapien
gtggtgatgcctcagtttggacaga

SEQ ID NO: 273354 - DNA, 25 bp, Homo sapien
tttggacagaaactcaaacctgacg

SEQ ID NO: 273355 - DNA, 25 bp, Homo sapien
gacagataactctgcaccctcgagg

SEQ ID NO: 273356 - DNA, 25 bp, Homo sapien
cacgccaggcaggtaaaaactattt

SEQ ID NO: 273357 - DNA, 25 bp, Homo sapien
ctctcaaattctaggacaatgggta

SEQ ID NO: 273358 - DNA, 25 bp, Homo sapien
ggaacctcttgagaccattatggag

SEQ ID NO: 273359 - DNA, 25 bp, Homo sapien
ggctatggagatctggcacacgcca

SEQ ID NO: 273360 - DNA, 25 bp, Homo sapien
tcctggtcagggtcaaccacaaagt

SEQ ID NO: 273361 - DNA, 25 bp, Homo sapien
ggcaggtggtgaacggtcacctcat

SEQ ID NO: 273362 - DNA, 25 bp, Homo sapien
ggtcagggtcaaccacaaagtggct

SEQ ID NO: 273363 - DNA, 25 bp, Homo sapien
gcaggtggtgaacggtcacctcata

SEQ ID NO: 273364 - DNA, 25 bp, Homo sapien
caaagcactcccagtcttggcctct

SEQ ID NO: 273365 - DNA, 25 bp, Homo sapien
tcacagaggccattggggagggaat

SEQ ID NO: 273366 - DNA, 25 bp, Homo sapien
tcccaggtgctggcaatgccagcca

SEQ ID NO: 273367 - DNA, 25 bp, Homo sapien
caatgccagccaatgtcttgctgag

SEQ ID NO: 273368 - DNA, 25 bp, Homo sapien
tcagggaatggaggttgcagcacac

SEQ ID NO: 273369 - DNA, 25 bp, Homo sapien
caaaggatgcctgagaagaaaagcc

SEQ ID NO: 273370 - DNA, 25 bp, Homo sapien
aagtgggcttcctgacatagctggc

SEQ ID NO: 273371 - DNA, 25 bp, Homo sapien
taaaactcctgggatcttgggccac

SEQ ID NO: 273372 - DNA, 25 bp, Homo sapien
taccttcatcctggcgtgctcacag

SEQ ID NO: 273373 - DNA, 25 bp, Homo sapien
gcatggcgtggttaccttcatcctg

SEQ ID NO: 273374 - DNA, 25 bp, Homo sapien
ctgagctcatgcatggcgtggttac

SEQ ID NO: 273375 - DNA, 25 bp, Homo sapien
ctcatgcatggcgtggttaccttca

SEQ ID NO: 273376 - DNA, 25 bp, Homo sapien
tagattcgttccacagggtgaagct

SEQ ID NO: 273377 - DNA, 25 bp, Homo sapien
tctccatgtgcggaaaactggtcag

SEQ ID NO: 273378 - DNA, 25 bp, Homo sapien
cgcaggtatgtggtgcatgtgctca

SEQ ID NO: 273379 - DNA, 25 bp, Homo sapien
tcagcaggatctggtaatgggtaga

SEQ ID NO: 273380 - DNA, 25 bp, Homo sapien
tagttcccctttgtctctattttca

SEQ ID NO: 273381 - DNA, 25 bp, Homo sapien
tactgtagtctcgaactccaacttc

SEQ ID NO: 273382 - DNA, 25 bp, Homo sapien
tatctttagttcccctttgtctcta

SEQ ID NO: 273383 - DNA, 25 bp, Homo sapien
gcacctggccttatttccttatctt

SEQ ID NO: 273384 - DNA, 25 bp, Homo sapien
tagagtgagtgtgacgttggatcgc

SEQ ID NO: 273385 - DNA, 25 bp, Homo sapien
agtgtgacgttggatcgctggtgga

SEQ ID NO: 273386 - DNA, 25 bp, Homo sapien
agcaccctttaaggttgcgtagagt

SEQ ID NO: 273387 - DNA, 25 bp, Homo sapien
ccctttaaggttgcgtagagtgagt

SEQ ID NO: 273388 - DNA, 25 bp, Homo sapien
aaacagtcgcggagtgtctgaggca

SEQ ID NO: 273389 - DNA, 25 bp, Homo sapien
agtgtctgaggcagtcattgaggca

SEQ ID NO: 273390 - DNA, 25 bp, Homo sapien
gcaggaaacagtcgcggagtgtctg

SEQ ID NO: 273391 - DNA, 25 bp, Homo sapien
gtctgaggcagtcattgaggcagct

SEQ ID NO: 273392 - DNA, 25 bp, Homo sapien
caggatggagatgcccgtgatgaac

SEQ ID NO: 273393 - DNA, 25 bp, Homo sapien
tggagatgcccgtgatgaaccagta

SEQ ID NO: 273394 - DNA, 25 bp, Homo sapien
gtgatgaaccagtacacccacaggg

SEQ ID NO: 273395 - DNA, 25 bp, Homo sapien
tgcccgtgatgaaccagtacaccca

SEQ ID NO: 273396 - DNA, 25 bp, Homo sapien
cagctagcctccaggtcatgcagac

SEQ ID NO: 273397 - DNA, 25 bp, Homo sapien
tcactgtatttttcacttccaggcc

SEQ ID NO: 273398 - DNA, 25 bp, Homo sapien
cggtgtatttggtgtcatcactgta

SEQ ID NO: 273399 - DNA, 25 bp, Homo sapien
tcatcactgtatttttcacttccag

SEQ ID NO: 273400 - DNA, 25 bp, Homo sapien
ggtgtatttggtgtcatcactgtat

SEQ ID NO: 273401 - DNA, 25 bp, Homo sapien
gaatttcaggaccacgtccacgtag

SEQ ID NO: 273402 - DNA, 25 bp, Homo sapien
tccaggtcctggatgcggaagtaca

SEQ ID NO: 273403 - DNA, 25 bp, Homo sapien
tcacattcgaaccagtcgggacagc

SEQ ID NO: 273404 - DNA, 25 bp, Homo sapien
gactacgtaggtgccgaagcaggct

SEQ ID NO: 273405 - DNA, 25 bp, Homo sapien
tcctctgcggcgagcaccagggtgt

SEQ ID NO: 273406 - DNA, 25 bp, Homo sapien
cggactgcggcaccgtcagccaggg

SEQ ID NO: 273407 - DNA, 25 bp, Homo sapien
ccccgccagtgccagccggactgcg

SEQ ID NO: 273408 - DNA, 25 bp, Homo sapien
tgcaggtgaggttccagctttgcca

SEQ ID NO: 273409 - DNA, 25 bp, Homo sapien
tcagactctgctcgaagagcgagag

SEQ ID NO: 273410 - DNA, 25 bp, Homo sapien
tgctcctcctcgtagggcgtgtgtg

SEQ ID NO: 273411 - DNA, 25 bp, Homo sapien
ggaagaggacgctatttcgcccagc

SEQ ID NO: 273412 - DNA, 25 bp, Homo sapien
tgtagccctggtcagactgcactga

SEQ ID NO: 273413 - DNA, 25 bp, Homo sapien
ccctctgactctgaccccatcgtgt

SEQ ID NO: 273414 - DNA, 25 bp, Homo sapien
cctctgactctgaccccatcgtgtc

SEQ ID NO: 273415 - DNA, 25 bp, Homo sapien
gatagacgataaccagaccgctgca

SEQ ID NO: 273416 - DNA, 25 bp, Homo sapien
taccattagctcctgggagcgggct

SEQ ID NO: 273417 - DNA, 25 bp, Homo sapien
tttaacgtgtcctcggcactagcgg

SEQ ID NO: 273418 - DNA, 25 bp, Homo sapien
gaataatggagcctcaaggacgctc

SEQ ID NO: 273419 - DNA, 25 bp, Homo sapien
tgcagaggctcatcagacgaaaggt

SEQ ID NO: 273420 - DNA, 25 bp, Homo sapien
tcaggcataggaatgaagggcaccc

SEQ ID NO: 273421 - DNA, 25 bp, Homo sapien
cactgatagtcggaacgcgggtgca

SEQ ID NO: 273422 - DNA, 25 bp, Homo sapien
tgaagaatcctacgtgctaacagct

SEQ ID NO: 273423 - DNA, 25 bp, Homo sapien
gaatgcatggtaggtgtccagaccc

SEQ ID NO: 273424 - DNA, 25 bp, Homo sapien
tatgggccatacaccatctgggaca

SEQ ID NO: 273425 - DNA, 25 bp, Homo sapien
atttactggcatgggctcaaaggcc

SEQ ID NO: 273426 - DNA, 25 bp, Homo sapien
gaagctcttggcattcagcggacag

SEQ ID NO: 273427 - DNA, 25 bp, Homo sapien
gctgcgtgcataatcggcctggaca

SEQ ID NO: 273428 - DNA, 25 bp, Homo sapien
tacccttgcattcagagatcccagc

SEQ ID NO: 273429 - DNA, 25 bp, Homo sapien
aaagtcatgaaactctacgcgggag

SEQ ID NO: 273430 - DNA, 25 bp, Homo sapien
gacacaggcatggttagatgctccg

SEQ ID NO: 273431 - DNA, 25 bp, Homo sapien
tgtaaggatcctctgtccgacacag

SEQ ID NO: 273432 - DNA, 25 bp, Homo sapien
gatgagcaagctacctagggcggac

SEQ ID NO: 273433 - DNA, 25 bp, Homo sapien
gctcctgagagacgccaaatatggg

SEQ ID NO: 273434 - DNA, 25 bp, Homo sapien
ttcatcaacctaaatggacagggcg

SEQ ID NO: 273435 - DNA, 25 bp, Homo sapien
tcttctagggaagcaagctggcgct

SEQ ID NO: 273436 - DNA, 25 bp, Homo sapien
gctaagcaggcgtttcactcagggc

SEQ ID NO: 273437 - DNA, 25 bp, Homo sapien
tgtgttgtgaccctagcttgctgct

SEQ ID NO: 273438 - DNA, 25 bp, Homo sapien
tctcttcacgtgtaggcaatgccca

SEQ ID NO: 273439 - DNA, 25 bp, Homo sapien
ggaagtggcacctcactagcattta

SEQ ID NO: 273440 - DNA, 25 bp, Homo sapien
tccgtgggttttgtgaaagagagct

SEQ ID NO: 273441 - DNA, 25 bp, Homo sapien
gaaccgcctgctcctaacaattcag

SEQ ID NO: 273442 - DNA, 25 bp, Homo sapien
gatcctgggctcagaatctcgagaa

SEQ ID NO: 273443 - DNA, 25 bp, Homo sapien
catctaggtactaacgccctgcggt

SEQ ID NO: 273444 - DNA, 25 bp, Homo sapien
ggattcccagcgacttccttaggag

SEQ ID NO: 273445 - DNA, 25 bp, Homo sapien
taggagtccgcgctccatgggagtc

SEQ ID NO: 273446 - DNA, 25 bp, Homo sapien
gaatcgggtcgtccctgagatggct

SEQ ID NO: 273447 - DNA, 25 bp, Homo sapien
gcagactgacctccacggaactgga

SEQ ID NO: 273448 - DNA, 25 bp, Homo sapien
ggctgaaacggactcttatttaaga

SEQ ID NO: 273449 - DNA, 25 bp, Homo sapien
gggcgaggcctgactaacccctgcg

SEQ ID NO: 273450 - DNA, 25 bp, Homo sapien
ggtgttatcacgctgcaagctgtta

SEQ ID NO: 273451 - DNA, 25 bp, Homo sapien
ttttcagtgactatacagcagtctc

SEQ ID NO: 273452 - DNA, 25 bp, Homo sapien
agtgactatacagcagtctctccca

SEQ ID NO: 273453 - DNA, 25 bp, Homo sapien
gctgttgagctcatccattaatttt

SEQ ID NO: 273454 - DNA, 25 bp, Homo sapien
gttgagctcatccattaatttttca

SEQ ID NO: 273455 - DNA, 25 bp, Homo sapien
tcatttcatagcctgatatgggtca

SEQ ID NO: 273456 - DNA, 25 bp, Homo sapien
caggtggctactcttgacctttttg

SEQ ID NO: 273457 - DNA, 25 bp, Homo sapien
agcctgatatgggtcaggtggctac

SEQ ID NO: 273458 - DNA, 25 bp, Homo sapien
gggtcaggtggctactcttgacctt

SEQ ID NO: 273459 - DNA, 25 bp, Homo sapien
tcagggtgttaactgctgggcagcc

SEQ ID NO: 273460 - DNA, 25 bp, Homo sapien
ggtctgagccattaccttggaatca

SEQ ID NO: 273461 - DNA, 25 bp, Homo sapien
tggtaatcgggacaccctgcagagc

SEQ ID NO: 273462 - DNA, 25 bp, Homo sapien
gataaaatccccttgggtctgagcc

SEQ ID NO: 273463 - DNA, 25 bp, Homo sapien
ccagcccggccatccactagctata

SEQ ID NO: 273464 - DNA, 25 bp, Homo sapien
tggcgatggagtcccagcccggcca

SEQ ID NO: 273465 - DNA, 25 bp, Homo sapien
gcctggcgatggagtcccagcccgg

SEQ ID NO: 273466 - DNA, 25 bp, Homo sapien
tgcaggcctggcgatggagtcccag

SEQ ID NO: 273467 - DNA, 25 bp, Homo sapien
tattggttcataaccctgtccccac

SEQ ID NO: 273468 - DNA, 25 bp, Homo sapien
gcacttggcaggcttcaaaagatga

SEQ ID NO: 273469 - DNA, 25 bp, Homo sapien
tgttttcatggtacctaccgcccca

SEQ ID NO: 273470 - DNA, 25 bp, Homo sapien
cctgagaccctcctatggtgagtcc

SEQ ID NO: 273471 - DNA, 25 bp, Homo sapien
tgtacaggcgtctacaatcccagga

SEQ ID NO: 273472 - DNA, 25 bp, Homo sapien
cacgggcaccgagacttatgcttca

SEQ ID NO: 273473 - DNA, 25 bp, Homo sapien
ccatgagtgtggcattactggtcac

SEQ ID NO: 273474 - DNA, 25 bp, Homo sapien
ctttcgtggcagtctaacctcaggc

SEQ ID NO: 273475 - DNA, 25 bp, Homo sapien
tcaccgcgatctcggtctaggaggc

SEQ ID NO: 273476 - DNA, 25 bp, Homo sapien
gatccgcaggcacagggcgatagta

SEQ ID NO: 273477 - DNA, 25 bp, Homo sapien
cacagggcgatagtacggacgccgc

SEQ ID NO: 273478 - DNA, 25 bp, Homo sapien
tcttccttgcaacggagcccctttg

SEQ ID NO: 273479 - DNA, 25 bp, Homo sapien
cggcccggccctgaagtcaaggttg

SEQ ID NO: 273480 - DNA, 25 bp, Homo sapien
aagacttaacaattggcgcgcgacg

SEQ ID NO: 273481 - DNA, 25 bp, Homo sapien
tgcgcagtctccctatgcgctggga

SEQ ID NO: 273482 - DNA, 25 bp, Homo sapien
gcccagaggacctgaacatcactaa

SEQ ID NO: 273483 - DNA, 25 bp, Homo sapien
gactagtaggaaatatgtatccctt

SEQ ID NO: 273484 - DNA, 25 bp, Homo sapien
gaattctccctcagcaagactgagt

SEQ ID NO: 273485 - DNA, 25 bp, Homo sapien
tgtgaggtaggatatgccagtttcc

SEQ ID NO: 273486 - DNA, 25 bp, Homo sapien
gccattcctgtactgggaaccaact

SEQ ID NO: 273487 - DNA, 25 bp, Homo sapien
tgctgccgttggtgtccttggcaca

SEQ ID NO: 273488 - DNA, 25 bp, Homo sapien
ttatttgggagacaacacggacttg

SEQ ID NO: 273489 - DNA, 25 bp, Homo sapien
gagacaacacggacttgctgatgct

SEQ ID NO: 273490 - DNA, 25 bp, Homo sapien
ccttggcacaggtataaagcccagc

SEQ ID NO: 273491 - DNA, 25 bp, Homo sapien
tactgctaaaagcttgttggagaac

SEQ ID NO: 273492 - DNA, 25 bp, Homo sapien
ctaaaagcttgttggagaacaccac

SEQ ID NO: 273493 - DNA, 25 bp, Homo sapien
ttattactgctaaaagcttgttgga

SEQ ID NO: 273494 - DNA, 25 bp, Homo sapien
ctgctaaaagcttgttggagaacac

SEQ ID NO: 273495 - DNA, 25 bp, Homo sapien
gatcgcttaagttgatttctgccag

SEQ ID NO: 273496 - DNA, 25 bp, Homo sapien
aatttatgatctctcccagtgtctg

SEQ ID NO: 273497 - DNA, 25 bp, Homo sapien
tgcttgcatccactgaggacttttg

SEQ ID NO: 273498 - DNA, 25 bp, Homo sapien
cagaatttgccattgcgaagttacc

SEQ ID NO: 273499 - DNA, 25 bp, Homo sapien
gatttaatctggatccattccggcg

SEQ ID NO: 273500 - DNA, 25 bp, Homo sapien
gcagtgcgtttagaggtacacccca

SEQ ID NO: 273501 - DNA, 25 bp, Homo sapien
tccacagggcatacagcatccgatt

SEQ ID NO: 273502 - DNA, 25 bp, Homo sapien
gagaggttttcctgtgctcgccctg

SEQ ID NO: 273503 - DNA, 25 bp, Homo sapien
tccattccacgcagttgctcaaagc

SEQ ID NO: 273504 - DNA, 25 bp, Homo sapien
catagctggtgaaggacacctccat

SEQ ID NO: 273505 - DNA, 25 bp, Homo sapien
agctcacaggaatctcagaaactga

SEQ ID NO: 273506 - DNA, 25 bp, Homo sapien
tatttatgcacttggagagctcaca

SEQ ID NO: 273507 - DNA, 25 bp, Homo sapien
cctattctggtctctttaactctct

SEQ ID NO: 273508 - DNA, 25 bp, Homo sapien
tgggtggtctcatccattcctttgc

SEQ ID NO: 273509 - DNA, 25 bp, Homo sapien
ggtggtctcatccattcctttgctt

SEQ ID NO: 273510 - DNA, 25 bp, Homo sapien
tcctgggtggtctcatccattcctt

SEQ ID NO: 273511 - DNA, 25 bp, Homo sapien
cgtattggtcagaccggtgccagat

SEQ ID NO: 273512 - DNA, 25 bp, Homo sapien
gacgtattggtcagaccggtgccag

SEQ ID NO: 273513 - DNA, 25 bp, Homo sapien
acgtattggtcagaccggtgccaga

SEQ ID NO: 273514 - DNA, 25 bp, Homo sapien
gtattggtcagaccggtgccagatg

SEQ ID NO: 273515 - DNA, 25 bp, Homo sapien
gaagccactgggcagcgtgttcttt

SEQ ID NO: 273516 - DNA, 25 bp, Homo sapien
ctggaagccactgggcagcgtgttc

SEQ ID NO: 273517 - DNA, 25 bp, Homo sapien
agccactgggcagcgtgttctttgt

SEQ ID NO: 273518 - DNA, 25 bp, Homo sapien
actgggcagcgtgttctttgttttt

SEQ ID NO: 273519 - DNA, 25 bp, Homo sapien
agaggaaacgttgtgagcgatgtca

SEQ ID NO: 273520 - DNA, 25 bp, Homo sapien
agcacagggagattgttgcacatca

SEQ ID NO: 273521 - DNA, 25 bp, Homo sapien
cttagaggaaacgttgtgagcgatg

SEQ ID NO: 273522 - DNA, 25 bp, Homo sapien
gtcagcacagggagattgttgcaca

SEQ ID NO: 273523 - DNA, 25 bp, Homo sapien
gcagctctttccacgatggcttcgt

SEQ ID NO: 273524 - DNA, 25 bp, Homo sapien
ggcagctctttccacgatggcttcg

SEQ ID NO: 273525 - DNA, 25 bp, Homo sapien
agctctttccacgatggcttcgtgg

SEQ ID NO: 273526 - DNA, 25 bp, Homo sapien
ctctttccacgatggcttcgtggtt

SEQ ID NO: 273527 - DNA, 25 bp, Homo sapien
aaaaaacagagccatgttccacgtt

SEQ ID NO: 273528 - DNA, 25 bp, Homo sapien
gttctgaacacaagcccagtttctg

SEQ ID NO: 273529 - DNA, 25 bp, Homo sapien
gcaaaatattcttcccgaatggcct

SEQ ID NO: 273530 - DNA, 25 bp, Homo sapien
tggcctcacgtgtgctccctatcat

SEQ ID NO: 273531 - DNA, 25 bp, Homo sapien
gctggccagcaggtcgggagctggg

SEQ ID NO: 273532 - DNA, 25 bp, Homo sapien
gagctgggggagagggtggagacat

SEQ ID NO: 273533 - DNA, 25 bp, Homo sapien
gaaggctggccagcaggtcgggagc

SEQ ID NO: 273534 - DNA, 25 bp, Homo sapien
ttgagaggccacaggaaggctggcc

SEQ ID NO: 273535 - DNA, 25 bp, Homo sapien
ttggctattgaacccgtgaggcccg

SEQ ID NO: 273536 - DNA, 25 bp, Homo sapien
ctgcggaactgagtgtctgttggct

SEQ ID NO: 273537 - DNA, 25 bp, Homo sapien
cgtgaggcccgcgtttccacatctt

SEQ ID NO: 273538 - DNA, 25 bp, Homo sapien
tgagtgtctgttggctattgaaccc

SEQ ID NO: 273539 - DNA, 25 bp, Homo sapien
ggaagccaaggtcgccttgcagtcc

SEQ ID NO: 273540 - DNA, 25 bp, Homo sapien
ccaggaagccaaggtcgccttgcag

SEQ ID NO: 273541 - DNA, 25 bp, Homo sapien
ttctccctctcaattggccttttcc

SEQ ID NO: 273542 - DNA, 25 bp, Homo sapien
tccctctcaattggccttttcccgc

SEQ ID NO: 273543 - DNA, 25 bp, Homo sapien
tgtggtctccctgtggtgcccagcc

SEQ ID NO: 273544 - DNA, 25 bp, Homo sapien
atgtggtctccctgtggtgcccagc

SEQ ID NO: 273545 - DNA, 25 bp, Homo sapien
tggtcttaaactccagtcctcacgt

SEQ ID NO: 273546 - DNA, 25 bp, Homo sapien
tcttaaactccagtcctcacgtgat

SEQ ID NO: 273547 - DNA, 25 bp, Homo sapien
cggccttgacactctgaccagagga

SEQ ID NO: 273548 - DNA, 25 bp, Homo sapien
gaccagaggacattcctcttgcggg

SEQ ID NO: 273549 - DNA, 25 bp, Homo sapien
tgtcatccccgctcatcttctgggt

SEQ ID NO: 273550 - DNA, 25 bp, Homo sapien
ttggccctttggaggcctccggctc

SEQ ID NO: 273551 - DNA, 25 bp, Homo sapien
tcttgcgaatgttgaggagagcctg

SEQ ID NO: 273552 - DNA, 25 bp, Homo sapien
actctcttgcgaatgttgaggagag

SEQ ID NO: 273553 - DNA, 25 bp, Homo sapien
gaaatagcaccaacagtgggtctct

SEQ ID NO: 273554 - DNA, 25 bp, Homo sapien
gatcagggtcctggataagagctga

SEQ ID NO: 273555 - DNA, 25 bp, Homo sapien
agttgctagcgtcagggtagggcag

SEQ ID NO: 273556 - DNA, 25 bp, Homo sapien
cctagtctgagcagttgctagcgtc

SEQ ID NO: 273557 - DNA, 25 bp, Homo sapien
tgggcgggcagaagccacgctccca

SEQ ID NO: 273558 - DNA, 25 bp, Homo sapien
tcaggcagttccatccacgggctgc

SEQ ID NO: 273559 - DNA, 25 bp, Homo sapien
caaggccatattcaagtttccccgt

SEQ ID NO: 273560 - DNA, 25 bp, Homo sapien
tacttaagccaggacctaatcaagg

SEQ ID NO: 273561 - DNA, 25 bp, Homo sapien
taattaaatcgaataacaaggccat

SEQ ID NO: 273562 - DNA, 25 bp, Homo sapien
acaggcgtggctgggcccaaaataa

SEQ ID NO: 273563 - DNA, 25 bp, Homo sapien
gcctggcatgatcccccggcccggc

SEQ ID NO: 273564 - DNA, 25 bp, Homo sapien
ctgcctggcatgatcccccggcccg

SEQ ID NO: 273565 - DNA, 25 bp, Homo sapien
cctggcatgatcccccggcccggcc

SEQ ID NO: 273566 - DNA, 25 bp, Homo sapien
tgcctggcatgatcccccggcccgg

SEQ ID NO: 273567 - DNA, 25 bp, Homo sapien
ctctgtgttttaccctgtggctccg

SEQ ID NO: 273568 - DNA, 25 bp, Homo sapien
aacatgggcgtcttgcagctctgtg

SEQ ID NO: 273569 - DNA, 25 bp, Homo sapien
gctccgtacgtgtgcctctgtcagc

SEQ ID NO: 273570 - DNA, 25 bp, Homo sapien
cagcaatacgctgtttcatccacat

SEQ ID NO: 273571 - DNA, 25 bp, Homo sapien
tcatttccaatcttggtcaattttc

SEQ ID NO: 273572 - DNA, 25 bp, Homo sapien
caatcttggtcaattttcttgagca

SEQ ID NO: 273573 - DNA, 25 bp, Homo sapien
tgagatgacgagctctacttctgca

SEQ ID NO: 273574 - DNA, 25 bp, Homo sapien
tttccaatcttggtcaattttcttg

SEQ ID NO: 273575 - DNA, 25 bp, Homo sapien
tcgttttgatacagccacagcccat

SEQ ID NO: 273576 - DNA, 25 bp, Homo sapien
gatgactagggctaggtctctggcc

SEQ ID NO: 273577 - DNA, 25 bp, Homo sapien
ttaaccagggatgactagggctagg

SEQ ID NO: 273578 - DNA, 25 bp, Homo sapien
tctctggcccagtacagtcgttttg

SEQ ID NO: 273579 - DNA, 25 bp, Homo sapien
tctactgtgagcctgggttccgttc

SEQ ID NO: 273580 - DNA, 25 bp, Homo sapien
ggcgatggcctgctcttctctactg

SEQ ID NO: 273581 - DNA, 25 bp, Homo sapien
cgatggcctgctcttctctactgtg

SEQ ID NO: 273582 - DNA, 25 bp, Homo sapien
tactgtgagcctgggttccgttctc

SEQ ID NO: 273583 - DNA, 25 bp, Homo sapien
ggcaggttgaatgggtttaatggat

SEQ ID NO: 273584 - DNA, 25 bp, Homo sapien
acgttcttttcgaaccacctgactg

SEQ ID NO: 273585 - DNA, 25 bp, Homo sapien
ctctgcggacagttggggtttggat

SEQ ID NO: 273586 - DNA, 25 bp, Homo sapien
cttttcgaaccacctgactggcagg

SEQ ID NO: 273587 - DNA, 25 bp, Homo sapien
gcctcttggtgttgcgctcagccaa

SEQ ID NO: 273588 - DNA, 25 bp, Homo sapien
tacagaacattgcttgaagctgagc

SEQ ID NO: 273589 - DNA, 25 bp, Homo sapien
tgtttcccacgcagcagttgtgcat

SEQ ID NO: 273590 - DNA, 25 bp, Homo sapien
gctcctgtgcaggtaaaccagctgt

SEQ ID NO: 273591 - DNA, 25 bp, Homo sapien
caagatggccctgtcacaggcggca

SEQ ID NO: 273592 - DNA, 25 bp, Homo sapien
agcacccaagatggccctgtcacag

SEQ ID NO: 273593 - DNA, 25 bp, Homo sapien
cccaagatggccctgtcacaggcgg

SEQ ID NO: 273594 - DNA, 25 bp, Homo sapien
gatggccctgtcacaggcggcacct

SEQ ID NO: 273595 - DNA, 25 bp, Homo sapien
tgccccttttcgacagacaaattcc

SEQ ID NO: 273596 - DNA, 25 bp, Homo sapien
aatgtgcacgttacagaaatccaag

SEQ ID NO: 273597 - DNA, 25 bp, Homo sapien
gctgaaagcgatgaaaatccagggt

SEQ ID NO: 273598 - DNA, 25 bp, Homo sapien
taggtttcacaataccactgctgcc

SEQ ID NO: 273599 - DNA, 25 bp, Homo sapien
ttcctccaggaagcgtttcactcgc

SEQ ID NO: 273600 - DNA, 25 bp, Homo sapien
ccccagaagcatgatgcttcctcca

SEQ ID NO: 273601 - DNA, 25 bp, Homo sapien
acccccagaagcatgatgcttcctc

SEQ ID NO: 273602 - DNA, 25 bp, Homo sapien
ctccaggaagcgtttcactcgccat

SEQ ID NO: 273603 - DNA, 25 bp, Homo sapien
ctaatgtgtactttggacattgtcc

SEQ ID NO: 273604 - DNA, 25 bp, Homo sapien
actaatgtgtactttggacattgtc

SEQ ID NO: 273605 - DNA, 25 bp, Homo sapien
gcaaaaggagtattcccaacaaggc

SEQ ID NO: 273606 - DNA, 25 bp, Homo sapien
gagtattcccaacaaggccaaagaa

SEQ ID NO: 273607 - DNA, 25 bp, Homo sapien
aggagtattcccaacaaggccaaag

SEQ ID NO: 273608 - DNA, 25 bp, Homo sapien
ggagtattcccaacaaggccaaaga

SEQ ID NO: 273609 - DNA, 25 bp, Homo sapien
cactgactccaggaagacaaaaggc

SEQ ID NO: 273610 - DNA, 25 bp, Homo sapien
ggttagaaccatcaacctgctctct

SEQ ID NO: 273611 - DNA, 25 bp, Homo sapien
ggagtatgtcatgccctctgctgct

SEQ ID NO: 273612 - DNA, 25 bp, Homo sapien
ttgcttggaaacgaagaaatcctgc

SEQ ID NO: 273613 - DNA, 25 bp, Homo sapien
taagtataagtcctgatccacccag

SEQ ID NO: 273614 - DNA, 25 bp, Homo sapien
tggatgctacacaatggaccgacgg

SEQ ID NO: 273615 - DNA, 25 bp, Homo sapien
catttcacgaagatagcctaaggca

SEQ ID NO: 273616 - DNA, 25 bp, Homo sapien
gtgtactgggaaacctggacctctg

SEQ ID NO: 273617 - DNA, 25 bp, Homo sapien
ctcaatggttgttggtaggcctaca

SEQ ID NO: 273618 - DNA, 25 bp, Homo sapien
ttctgaaacgcatggagtaaaggca

SEQ ID NO: 273619 - DNA, 25 bp, Homo sapien
cgagggtaaaacatctaccactgta

SEQ ID NO: 273620 - DNA, 25 bp, Homo sapien
cagaaatcgtagcaataacaccttt

SEQ ID NO: 273621 - DNA, 25 bp, Homo sapien
cccaaatccatcgcctccgccatgt

SEQ ID NO: 273622 - DNA, 25 bp, Homo sapien
ctttgcccaaatccatcgcctccgc

SEQ ID NO: 273623 - DNA, 25 bp, Homo sapien
tttgcccaaatccatcgcctccgcc

SEQ ID NO: 273624 - DNA, 25 bp, Homo sapien
tgcccaaatccatcgcctccgccat

SEQ ID NO: 273625 - DNA, 25 bp, Homo sapien
agagtcgaggaatggatgggtccat

SEQ ID NO: 273626 - DNA, 25 bp, Homo sapien
tggacctgacagtgcggtcaccctg

SEQ ID NO: 273627 - DNA, 25 bp, Homo sapien
ggctcctggacctgacagtgcggtc

SEQ ID NO: 273628 - DNA, 25 bp, Homo sapien
tgggccccacgtggaagaacacaga

SEQ ID NO: 273629 - DNA, 25 bp, Homo sapien
gctgggccccacgtggaagaacaca

SEQ ID NO: 273630 - DNA, 25 bp, Homo sapien
acgtcatccgcgtctgggaaggcgc

SEQ ID NO: 273631 - DNA, 25 bp, Homo sapien
ttcccgtcagtcaggacagccacgt

SEQ ID NO: 273632 - DNA, 25 bp, Homo sapien
tgcgtgggcgagttgtccacaagcc

SEQ ID NO: 273633 - DNA, 25 bp, Homo sapien
ccgggctttgtctccgagcagtgtc

SEQ ID NO: 273634 - DNA, 25 bp, Homo sapien
cagtggttgggacaagctatgctca

SEQ ID NO: 273635 - DNA, 25 bp, Homo sapien
tgtggttcccattatccgcagccag

SEQ ID NO: 273636 - DNA, 25 bp, Homo sapien
tacaggcttgactgagaagggttcc

SEQ ID NO: 273637 - DNA, 25 bp, Homo sapien
ccttcaggccgatgtggagttctct

SEQ ID NO: 273638 - DNA, 25 bp, Homo sapien
gatccaacaatatgcccgctgagga

SEQ ID NO: 273639 - DNA, 25 bp, Homo sapien
gagatgtctccctgaactcaaggtg

SEQ ID NO: 273640 - DNA, 25 bp, Homo sapien
taaacggccatcactgttacacagc

SEQ ID NO: 273641 - DNA, 25 bp, Homo sapien
gccattgggtgatcatgaacagcca

SEQ ID NO: 273642 - DNA, 25 bp, Homo sapien
ttggctggatgctgagaaacaactc

SEQ ID NO: 273643 - DNA, 25 bp, Homo sapien
tacaagtcaggcttaggatgaaccc

SEQ ID NO: 273644 - DNA, 25 bp, Homo sapien
tcagcactacaatctgacagggcag

SEQ ID NO: 273645 - DNA, 25 bp, Homo sapien
gacagggcagtctaacccagagaga

SEQ ID NO: 273646 - DNA, 25 bp, Homo sapien
tagaacttgctaattccccagacat

SEQ ID NO: 273647 - DNA, 25 bp, Homo sapien
tgcctcttagactggacatggatcc

SEQ ID NO: 273648 - DNA, 25 bp, Homo sapien
tggtagcaggcagcaacgtttgttt

SEQ ID NO: 273649 - DNA, 25 bp, Homo sapien
gaggcactgcaccatggatctaact

SEQ ID NO: 273650 - DNA, 25 bp, Homo sapien
gcggcccctttaacatttgctcctg

SEQ ID NO: 273651 - DNA, 25 bp, Homo sapien
ggagactaagctggccgatcctgtg

SEQ ID NO: 273652 - DNA, 25 bp, Homo sapien
caagtagatgaaaggcggccccttt

SEQ ID NO: 273653 - DNA, 25 bp, Homo sapien
ggagtccagcaactctcagcagttg

SEQ ID NO: 273654 - DNA, 25 bp, Homo sapien
gtagaatggctgctgagaagtttcg

SEQ ID NO: 273655 - DNA, 25 bp, Homo sapien
gctttcctgggcattatggatttaa

SEQ ID NO: 273656 - DNA, 25 bp, Homo sapien
cttgctttcctgggcattatggatt

SEQ ID NO: 273657 - DNA, 25 bp, Homo sapien
ttgtagaatggctgctgagaagttt

SEQ ID NO: 273658 - DNA, 25 bp, Homo sapien
gatctgacgtcccacaacttagggt

SEQ ID NO: 273659 - DNA, 25 bp, Homo sapien
tatacaccaaaggtaggaactctgg

SEQ ID NO: 273660 - DNA, 25 bp, Homo sapien
tctatcatagcttggaaggtcctaa

SEQ ID NO: 273661 - DNA, 25 bp, Homo sapien
tgtcagtccactaacaggcctcaag

SEQ ID NO: 273662 - DNA, 25 bp, Homo sapien
caaaggacacacatagggagaggaa

SEQ ID NO: 273663 - DNA, 25 bp, Homo sapien
tccaaggaggcaagacaagttttct

SEQ ID NO: 273664 - DNA, 25 bp, Homo sapien
gctagaatactatcctccaaggagg

SEQ ID NO: 273665 - DNA, 25 bp, Homo sapien
gaatcgaataggcttaaatggtccc

SEQ ID NO: 273666 - DNA, 25 bp, Homo sapien
gctaagaactgggagggtgttttca

SEQ ID NO: 273667 - DNA, 25 bp, Homo sapien
tgtggcatctccttagaggatcact

SEQ ID NO: 273668 - DNA, 25 bp, Homo sapien
taaagtttgccgtatggttcatgtg

SEQ ID NO: 273669 - DNA, 25 bp, Homo sapien
tcacttttactatgtggtttccaag

SEQ ID NO: 273670 - DNA, 25 bp, Homo sapien
taggtaagtcagaatcagctagagc

SEQ ID NO: 273671 - DNA, 25 bp, Homo sapien
tacagatcacgtatttccattctct

SEQ ID NO: 273672 - DNA, 25 bp, Homo sapien
cccaggccaatctcatttgataggt

SEQ ID NO: 273673 - DNA, 25 bp, Homo sapien
cagctagagccggaaatgaaactac

SEQ ID NO: 273674 - DNA, 25 bp, Homo sapien
gaaaacacgctatgggagctgagaa

SEQ ID NO: 273675 - DNA, 25 bp, Homo sapien
tgagctgagattgacaggcgatcct

SEQ ID NO: 273676 - DNA, 25 bp, Homo sapien
gcaacagcacaagaggaaggttcta

SEQ ID NO: 273677 - DNA, 25 bp, Homo sapien
gcctttcttcgggagacaatggaga

SEQ ID NO: 273678 - DNA, 25 bp, Homo sapien
tgatatctcttcgttgatagcagcc

SEQ ID NO: 273679 - DNA, 25 bp, Homo sapien
aactccacgtcatctctgtgaagag

SEQ ID NO: 273680 - DNA, 25 bp, Homo sapien
tctctgtgaagagcggcttctaact

SEQ ID NO: 273681 - DNA, 25 bp, Homo sapien
tatctcttcgttgatagcagccctg

SEQ ID NO: 273682 - DNA, 25 bp, Homo sapien
tttgtgagtttgccctgtagttctg

SEQ ID NO: 273683 - DNA, 25 bp, Homo sapien
tgtgagtttgccctgtagttctgtc

SEQ ID NO: 273684 - DNA, 25 bp, Homo sapien
ttttgtgagtttgccctgtagttct

SEQ ID NO: 273685 - DNA, 25 bp, Homo sapien
ctttttgtgagtttgccctgtagtt

SEQ ID NO: 273686 - DNA, 25 bp, Homo sapien
ggtttggactggctgcctctccatt

SEQ ID NO: 273687 - DNA, 25 bp, Homo sapien
ccggccattactgagtgcttgaacc

SEQ ID NO: 273688 - DNA, 25 bp, Homo sapien
attcagcacacgagcaccggccatt

SEQ ID NO: 273689 - DNA, 25 bp, Homo sapien
cttgaaccttgcagggtttggactg

SEQ ID NO: 273690 - DNA, 25 bp, Homo sapien
tcacagagtcggtgcaggatctcca

SEQ ID NO: 273691 - DNA, 25 bp, Homo sapien
ggatctccacccgtgtgcgaagagg

SEQ ID NO: 273692 - DNA, 25 bp, Homo sapien
aagacatcgtctgcatccagccggt

SEQ ID NO: 273693 - DNA, 25 bp, Homo sapien
cccagcggtagttgatgatgtcctc

SEQ ID NO: 273694 - DNA, 25 bp, Homo sapien
agagagaatccaacagcaatcctga

SEQ ID NO: 273695 - DNA, 25 bp, Homo sapien
gagcggttgttttatgtgagcacac

SEQ ID NO: 273696 - DNA, 25 bp, Homo sapien
tgagttccagtgacagggctcccaa

SEQ ID NO: 273697 - DNA, 25 bp, Homo sapien
gcagttccggcataacctcctgtga

SEQ ID NO: 273698 - DNA, 25 bp, Homo sapien
gaaataccaatatagtgccccagaa

SEQ ID NO: 273699 - DNA, 25 bp, Homo sapien
tggattttccttgcaccgggtcctc

SEQ ID NO: 273700 - DNA, 25 bp, Homo sapien
cattcgtgttccatagaaataccaa

SEQ ID NO: 273701 - DNA, 25 bp, Homo sapien
ttcacccaatggctccacacggaga

SEQ ID NO: 273702 - DNA, 25 bp, Homo sapien
tttttccaggaatacttgagacatt

SEQ ID NO: 273703 - DNA, 25 bp, Homo sapien
ctcctgcagtttcttccgttttggg

SEQ ID NO: 273704 - DNA, 25 bp, Homo sapien
cgtttttccaggaatacttgagaca

SEQ ID NO: 273705 - DNA, 25 bp, Homo sapien
tccaggaatacttgagacatttttt

SEQ ID NO: 273706 - DNA, 25 bp, Homo sapien
catgtcttgtctgtggctcggatgc

SEQ ID NO: 273707 - DNA, 25 bp, Homo sapien
tcttgtctgtggctcggatgccaag

SEQ ID NO: 273708 - DNA, 25 bp, Homo sapien
atgtcttgtctgtggctcggatgcc

SEQ ID NO: 273709 - DNA, 25 bp, Homo sapien
tgtctgtggctcggatgccaaggaa

SEQ ID NO: 273710 - DNA, 25 bp, Homo sapien
tgccgttctcgaagggaggtcctct

SEQ ID NO: 273711 - DNA, 25 bp, Homo sapien
ggtcctctcgcgaaaactctcggtg

SEQ ID NO: 273712 - DNA, 25 bp, Homo sapien
gcacaggagccaccaagtaccttgg

SEQ ID NO: 273713 - DNA, 25 bp, Homo sapien
gatctcaggcaggaagtcctcactg

SEQ ID NO: 273714 - DNA, 25 bp, Homo sapien
gaggacagagcagagagtgtggcgc

SEQ ID NO: 273715 - DNA, 25 bp, Homo sapien
ggacagagcagagagtgtggcgcac

SEQ ID NO: 273716 - DNA, 25 bp, Homo sapien
gaggaggacagagcagagagtgtgg

SEQ ID NO: 273717 - DNA, 25 bp, Homo sapien
aggaggacagagcagagagtgtggc

SEQ ID NO: 273718 - DNA, 25 bp, Homo sapien
taacactggagttcagacaggatgg

SEQ ID NO: 273719 - DNA, 25 bp, Homo sapien
gagaacatgataggacccacagtga

SEQ ID NO: 273720 - DNA, 25 bp, Homo sapien
tgtgaaaagccaccgtcactattgg

SEQ ID NO: 273721 - DNA, 25 bp, Homo sapien
ggtggcatgaggtcccattctaaca

SEQ ID NO: 273722 - DNA, 25 bp, Homo sapien
taatgtgccatgactgatgatatca

SEQ ID NO: 273723 - DNA, 25 bp, Homo sapien
catgaacttaagtacaccgatggtg

SEQ ID NO: 273724 - DNA, 25 bp, Homo sapien
cctgcttaagggttagacacagcac

SEQ ID NO: 273725 - DNA, 25 bp, Homo sapien
tggatcatccaggacggcggaagtc

SEQ ID NO: 273726 - DNA, 25 bp, Homo sapien
gtttgatggacaggtggtcagacat

SEQ ID NO: 273727 - DNA, 25 bp, Homo sapien
cctttgtgcgctgtggacgttttcc

SEQ ID NO: 273728 - DNA, 25 bp, Homo sapien
tgcctttgtgcgctgtggacgtttt

SEQ ID NO: 273729 - DNA, 25 bp, Homo sapien
tcagacatccacctaggatgcaact

SEQ ID NO: 273730 - DNA, 25 bp, Homo sapien
aaatggctttgaagtaataccctgg

SEQ ID NO: 273731 - DNA, 25 bp, Homo sapien
gctttgaagtaataccctggtaaga

SEQ ID NO: 273732 - DNA, 25 bp, Homo sapien
tcaaacctaatgctacccacgaaga

SEQ ID NO: 273733 - DNA, 25 bp, Homo sapien
gctacccacgaagaactgacaaagg

SEQ ID NO: 273734 - DNA, 25 bp, Homo sapien
cttctgcactgctagaagaatctga

SEQ ID NO: 273735 - DNA, 25 bp, Homo sapien
tcctctcttcctttagcatctgctc

SEQ ID NO: 273736 - DNA, 25 bp, Homo sapien
ttcttctgcactgctagaagaatct

SEQ ID NO: 273737 - DNA, 25 bp, Homo sapien
tctcttcctttagcatctgctcctg

SEQ ID NO: 273738 - DNA, 25 bp, Homo sapien
atgcacctctccagaccacgcggac

SEQ ID NO: 273739 - DNA, 25 bp, Homo sapien
acctctccagaccacgcggacactg

SEQ ID NO: 273740 - DNA, 25 bp, Homo sapien
cagaccacgcggacactgcacatac

SEQ ID NO: 273741 - DNA, 25 bp, Homo sapien
ctctccagaccacgcggacactgca

SEQ ID NO: 273742 - DNA, 25 bp, Homo sapien
gatgggactacaatacaggcattat

SEQ ID NO: 273743 - DNA, 25 bp, Homo sapien
gaaactgagccataaaaatgagttt

SEQ ID NO: 273744 - DNA, 25 bp, Homo sapien
tccatgaacgtagaaagctttccag

SEQ ID NO: 273745 - DNA, 25 bp, Homo sapien
gagttttggacctgcctatataaat

SEQ ID NO: 273746 - DNA, 25 bp, Homo sapien
tacgacagaggaactatttacaggt

SEQ ID NO: 273747 - DNA, 25 bp, Homo sapien
taaaatccgcttagaatgtcacaca

SEQ ID NO: 273748 - DNA, 25 bp, Homo sapien
ggaactccaagatgagtgaccatca

SEQ ID NO: 273749 - DNA, 25 bp, Homo sapien
gaatataaataccagcatacgacag

SEQ ID NO: 273750 - DNA, 25 bp, Homo sapien
cacttgcagggaacaaggaggtagg

SEQ ID NO: 273751 - DNA, 25 bp, Homo sapien
acttgcagggaacaaggaggtaggg

SEQ ID NO: 273752 - DNA, 25 bp, Homo sapien
gaaaagaggcaaggagaaaaatgag

SEQ ID NO: 273753 - DNA, 25 bp, Homo sapien
gggccaaagaaaagaggcaaggaga

SEQ ID NO: 273754 - DNA, 25 bp, Homo sapien
tttatgaaggcatccatgcaagcaa

SEQ ID NO: 273755 - DNA, 25 bp, Homo sapien
atgcaagcaatggtctgctccccac

SEQ ID NO: 273756 - DNA, 25 bp, Homo sapien
gctcttgccgttctgcgtttatgaa

SEQ ID NO: 273757 - DNA, 25 bp, Homo sapien
aggccctgccgccagtgggattttg

SEQ ID NO: 273758 - DNA, 25 bp, Homo sapien
cactgacatggcgtgttccttcatc

SEQ ID NO: 273759 - DNA, 25 bp, Homo sapien
acactgacatggcgtgttccttcat

SEQ ID NO: 273760 - DNA, 25 bp, Homo sapien
actgacatggcgtgttccttcatca

SEQ ID NO: 273761 - DNA, 25 bp, Homo sapien
tttcctctctcatgggggaattggg

SEQ ID NO: 273762 - DNA, 25 bp, Homo sapien
tccttgagccagcagccatgccctt

SEQ ID NO: 273763 - DNA, 25 bp, Homo sapien
ctgagctttctcctcttcgctcgat

SEQ ID NO: 273764 - DNA, 25 bp, Homo sapien
tggagggagctcctttccttgagcc

SEQ ID NO: 273765 - DNA, 25 bp, Homo sapien
tagcagtgaaatcatcatccaactc

SEQ ID NO: 273766 - DNA, 25 bp, Homo sapien
ttatacatagcagtgaaatcatcat

SEQ ID NO: 273767 - DNA, 25 bp, Homo sapien
ctttatacatagcagtgaaatcatc

SEQ ID NO: 273768 - DNA, 25 bp, Homo sapien
agtgaaatcatcatccaactcaaag

SEQ ID NO: 273769 - DNA, 25 bp, Homo sapien
taatctgataatagttaggggcata

SEQ ID NO: 273770 - DNA, 25 bp, Homo sapien
catccacaggttccaagaagggcca

SEQ ID NO: 273771 - DNA, 25 bp, Homo sapien
ggaatccttgtgagcctttaccacg

SEQ ID NO: 273772 - DNA, 25 bp, Homo sapien
tagttaggggcataagattcatcca

SEQ ID NO: 273773 - DNA, 25 bp, Homo sapien
tatagtaggcattactgcaaagaca

SEQ ID NO: 273774 - DNA, 25 bp, Homo sapien
tagtaggcattactgcaaagacaac

SEQ ID NO: 273775 - DNA, 25 bp, Homo sapien
taggcattactgcaaagacaacttc

SEQ ID NO: 273776 - DNA, 25 bp, Homo sapien
gcattactgcaaagacaacttctac

SEQ ID NO: 273777 - DNA, 25 bp, Homo sapien
gaacatggtcttcatgtcatttaca

SEQ ID NO: 273778 - DNA, 25 bp, Homo sapien
ctttccccattatactttcgacaat

SEQ ID NO: 273779 - DNA, 25 bp, Homo sapien
tactttcgacaattcctgaacatgg

SEQ ID NO: 273780 - DNA, 25 bp, Homo sapien
ggtacagtataaacctccattcagt

SEQ ID NO: 273781 - DNA, 25 bp, Homo sapien
tattcttgattacagatatgtatct

SEQ ID NO: 273782 - DNA, 25 bp, Homo sapien
cagatatgtatctagcacaaactcc

SEQ ID NO: 273783 - DNA, 25 bp, Homo sapien
tcttgattacagatatgtatctagc

SEQ ID NO: 273784 - DNA, 25 bp, Homo sapien
gattacagatatgtatctagcacaa

SEQ ID NO: 273785 - DNA, 25 bp, Homo sapien
gaggcacacacagtataatccagac

SEQ ID NO: 273786 - DNA, 25 bp, Homo sapien
gatattgcagatctactacgccagc

SEQ ID NO: 273787 - DNA, 25 bp, Homo sapien
tcagctctatgtagggtcagtcccc

SEQ ID NO: 273788 - DNA, 25 bp, Homo sapien
ccctcggtggttaaagaggcacaca

SEQ ID NO: 273789 - DNA, 25 bp, Homo sapien
cctggagcgggtccaaacatggctc

SEQ ID NO: 273790 - DNA, 25 bp, Homo sapien
tgctctgatcgtccccagaagaggg

SEQ ID NO: 273791 - DNA, 25 bp, Homo sapien
caggaaaatgtttcatcattgcccg

SEQ ID NO: 273792 - DNA, 25 bp, Homo sapien
tcattgcccgatggaaacacctctc

SEQ ID NO: 273793 - DNA, 25 bp, Homo sapien
aggggatgagaaaaacctcggccat

SEQ ID NO: 273794 - DNA, 25 bp, Homo sapien
ggctgggtgtcccaccacaatgcag

SEQ ID NO: 273795 - DNA, 25 bp, Homo sapien
gatgagaaaaacctcggccattgga

SEQ ID NO: 273796 - DNA, 25 bp, Homo sapien
tgagaaaaacctcggccattggaag

SEQ ID NO: 273797 - DNA, 25 bp, Homo sapien
ggactccagaggagccatacaaggt

SEQ ID NO: 273798 - DNA, 25 bp, Homo sapien
gcagagggccaaatgttcctggtac

SEQ ID NO: 273799 - DNA, 25 bp, Homo sapien
caaggtggcaggatctgatcctcgc

SEQ ID NO: 273800 - DNA, 25 bp, Homo sapien
ggtgaaaggctgacgctgctgcaca

SEQ ID NO: 273801 - DNA, 25 bp, Homo sapien
ctcctctggtgtgcctagcctgggt

SEQ ID NO: 273802 - DNA, 25 bp, Homo sapien
ggtcctcggaggctgttaattccaa

SEQ ID NO: 273803 - DNA, 25 bp, Homo sapien
cggaggctgttaattccaactggag

SEQ ID NO: 273804 - DNA, 25 bp, Homo sapien
catgttagaaaggtgtgtcagcccc

SEQ ID NO: 273805 - DNA, 25 bp, Homo sapien
cattccagacggcagagtgtactcg

SEQ ID NO: 273806 - DNA, 25 bp, Homo sapien
caagggtccttggttcgtagcacca

SEQ ID NO: 273807 - DNA, 25 bp, Homo sapien
caaacaaagaactgggtgctggcac

SEQ ID NO: 273808 - DNA, 25 bp, Homo sapien
tacgatcgatacatatggctgggag

SEQ ID NO: 273809 - DNA, 25 bp, Homo sapien
gctacctgcggaaaagggccaggta

SEQ ID NO: 273810 - DNA, 25 bp, Homo sapien
gctgacacagtgactgacattgggt

SEQ ID NO: 273811 - DNA, 25 bp, Homo sapien
tgtgcttcactgttctccggtgccc

SEQ ID NO: 273812 - DNA, 25 bp, Homo sapien
ggctcttgtgcttcactgttctccg

SEQ ID NO: 273813 - DNA, 25 bp, Homo sapien
acaggcgcccgacaccatgctggct

SEQ ID NO: 273814 - DNA, 25 bp, Homo sapien
aggcgcccgacaccatgctggctaa

SEQ ID NO: 273815 - DNA, 25 bp, Homo sapien
caggcgcccgacaccatgctggcta

SEQ ID NO: 273816 - DNA, 25 bp, Homo sapien
tcatcagaatcactggccatgctgg

SEQ ID NO: 273817 - DNA, 25 bp, Homo sapien
gttgtcatcagaatcactggccatg

SEQ ID NO: 273818 - DNA, 25 bp, Homo sapien
gatggttgtcatcagaatcactggc

SEQ ID NO: 273819 - DNA, 25 bp, Homo sapien
gaggggatggttgtcatcagaatca

SEQ ID NO: 273820 - DNA, 25 bp, Homo sapien
gggccggagaatggaaatgtcctta

SEQ ID NO: 273821 - DNA, 25 bp, Homo sapien
ttgtggctcacggactctaggcaga

SEQ ID NO: 273822 - DNA, 25 bp, Homo sapien
attcactcttacagtgggccggaga

SEQ ID NO: 273823 - DNA, 25 bp, Homo sapien
tgggttgcccgattcgtaagaggct

SEQ ID NO: 273824 - DNA, 25 bp, Homo sapien
tcctggcagcgatagatgggaccct

SEQ ID NO: 273825 - DNA, 25 bp, Homo sapien
taatgggcagctgaattcgggtact

SEQ ID NO: 273826 - DNA, 25 bp, Homo sapien
tatccgagggccagggattcttgcc

SEQ ID NO: 273827 - DNA, 25 bp, Homo sapien
tagagatactcgctggctgacaacg

SEQ ID NO: 273828 - DNA, 25 bp, Homo sapien
aatgttgacacaggcttgcttacag

SEQ ID NO: 273829 - DNA, 25 bp, Homo sapien
gcaatgttgacacaggcttgcttac

SEQ ID NO: 273830 - DNA, 25 bp, Homo sapien
tgttgacacaggcttgcttacagct

SEQ ID NO: 273831 - DNA, 25 bp, Homo sapien
caatgttgacacaggcttgcttaca

SEQ ID NO: 273832 - DNA, 25 bp, Homo sapien
ggaggcttatgaggcggcacctcct

SEQ ID NO: 273833 - DNA, 25 bp, Homo sapien
cgactggaccgggtgcatctgcatt

SEQ ID NO: 273834 - DNA, 25 bp, Homo sapien
ggaagtgttggaggcttatgaggcg

SEQ ID NO: 273835 - DNA, 25 bp, Homo sapien
gtctttgggaacgaggcctgcgact

SEQ ID NO: 273836 - DNA, 25 bp, Homo sapien
tggctccagctcaagtatggcacga

SEQ ID NO: 273837 - DNA, 25 bp, Homo sapien
ttttagggcccgtgactggctccag

SEQ ID NO: 273838 - DNA, 25 bp, Homo sapien
cacattccagtcttcgtgtgcagct

SEQ ID NO: 273839 - DNA, 25 bp, Homo sapien
ggaatagagctgacagggcactccc

SEQ ID NO: 273840 - DNA, 25 bp, Homo sapien
aactattcggtagggctggtggcaa

SEQ ID NO: 273841 - DNA, 25 bp, Homo sapien
tgctgtgtgcccaccagttaggacc

SEQ ID NO: 273842 - DNA, 25 bp, Homo sapien
tcagctgtgcaagagatccctggcc

SEQ ID NO: 273843 - DNA, 25 bp, Homo sapien
caaaatgtgattcgtgccagaaagc

SEQ ID NO: 273844 - DNA, 25 bp, Homo sapien
cacagatacaacagataattccaag

SEQ ID NO: 273845 - DNA, 25 bp, Homo sapien
catgactgattttactatgattcac

SEQ ID NO: 273846 - DNA, 25 bp, Homo sapien
tttaaatcaccatgactgattttac

SEQ ID NO: 273847 - DNA, 25 bp, Homo sapien
gaacttgttcttgatagctatttta

SEQ ID NO: 273848 - DNA, 25 bp, Homo sapien
gggagaatccagtgtaattcaactc

SEQ ID NO: 273849 - DNA, 25 bp, Homo sapien
cagaatgctaacgagggagaatcca

SEQ ID NO: 273850 - DNA, 25 bp, Homo sapien
caaatacagaatgctaacgagggag

SEQ ID NO: 273851 - DNA, 25 bp, Homo sapien
gaatccagtgtaattcaactctaca

SEQ ID NO: 273852 - DNA, 25 bp, Homo sapien
ccacggacagcatatgtttagcaaa

SEQ ID NO: 273853 - DNA, 25 bp, Homo sapien
ttttccacggacagcatatgtttag

SEQ ID NO: 273854 - DNA, 25 bp, Homo sapien
tcatggatgcttccgattagcttcc

SEQ ID NO: 273855 - DNA, 25 bp, Homo sapien
attagcttccttttccacggacagc

SEQ ID NO: 273856 - DNA, 25 bp, Homo sapien
agcatcgctctagcaacagctgatt

SEQ ID NO: 273857 - DNA, 25 bp, Homo sapien
tcacagcatcgctctagcaacagct

SEQ ID NO: 273858 - DNA, 25 bp, Homo sapien
acagcatcgctctagcaacagctga

SEQ ID NO: 273859 - DNA, 25 bp, Homo sapien
ttttcctgtatcgttcacagcatcg

SEQ ID NO: 273860 - DNA, 25 bp, Homo sapien
tggacaatggacgaagcactagtac

SEQ ID NO: 273861 - DNA, 25 bp, Homo sapien
tatagcagatctgcacttcaaagac

SEQ ID NO: 273862 - DNA, 25 bp, Homo sapien
tccagacagcttatagcagatctgc

SEQ ID NO: 273863 - DNA, 25 bp, Homo sapien
tgtggattcctgcaaccttgcagct

SEQ ID NO: 273864 - DNA, 25 bp, Homo sapien
tggggatgggtgggctaggggttca

SEQ ID NO: 273865 - DNA, 25 bp, Homo sapien
agaaaaggtgagaagaagatcctgc

SEQ ID NO: 273866 - DNA, 25 bp, Homo sapien
aagatggcaaatgcatttgcatctg

SEQ ID NO: 273867 - DNA, 25 bp, Homo sapien
atggcaaatgcatttgcatctgctt

SEQ ID NO: 273868 - DNA, 25 bp, Homo sapien
aaccatcattttcctaatggagaag

SEQ ID NO: 273869 - DNA, 25 bp, Homo sapien
accatcattttcctaatggagaaga

SEQ ID NO: 273870 - DNA, 25 bp, Homo sapien
ttcaggataccttacacactacttc

SEQ ID NO: 273871 - DNA, 25 bp, Homo sapien
tgtccttctagcttgagagcaaacc

SEQ ID NO: 273872 - DNA, 25 bp, Homo sapien
gagccatgagtgttaaatcaaagag

SEQ ID NO: 273873 - DNA, 25 bp, Homo sapien
gccggcacgctgacaaggtgacagt

SEQ ID NO: 273874 - DNA, 25 bp, Homo sapien
cagcctggaggcaaaacttgtgtcc

SEQ ID NO: 273875 - DNA, 25 bp, Homo sapien
taagtgtcgctctcagtgaaacagg

SEQ ID NO: 273876 - DNA, 25 bp, Homo sapien
tgaaacagggaatcagcagaccacg

SEQ ID NO: 273877 - DNA, 25 bp, Homo sapien
ggacaatcaactgctcgtcagccgt

SEQ ID NO: 273878 - DNA, 25 bp, Homo sapien
cgtccttgtcatatgctgtccagaa

SEQ ID NO: 273879 - DNA, 25 bp, Homo sapien
cagttgttgaggcactcacgggcca

SEQ ID NO: 273880 - DNA, 25 bp, Homo sapien
gcaagcgagtcgacgttcatctcag

SEQ ID NO: 273881 - DNA, 25 bp, Homo sapien
aaagcaaagcccgtggatatatcca

SEQ ID NO: 273882 - DNA, 25 bp, Homo sapien
tgcatctaaggaccaaaatgtaaat

SEQ ID NO: 273883 - DNA, 25 bp, Homo sapien
ctgcatctaaggaccaaaatgtaaa

SEQ ID NO: 273884 - DNA, 25 bp, Homo sapien
taaggaccaaaatgtaaatgccagg

SEQ ID NO: 273885 - DNA, 25 bp, Homo sapien
accaaaatgtaaatgccagggccat

SEQ ID NO: 273886 - DNA, 25 bp, Homo sapien
gaggctactatccagtcaagccacg

SEQ ID NO: 273887 - DNA, 25 bp, Homo sapien
tgcagggttccagactctcaccgca

SEQ ID NO: 273888 - DNA, 25 bp, Homo sapien
gtcagccagcttggactggttttcc

SEQ ID NO: 273889 - DNA, 25 bp, Homo sapien
gagaggtggctttcagtgtcagcca

SEQ ID NO: 273890 - DNA, 25 bp, Homo sapien
ctggaacccaggatatagttcagat

SEQ ID NO: 273891 - DNA, 25 bp, Homo sapien
ggaacccaggatatagttcagatcg

SEQ ID NO: 273892 - DNA, 25 bp, Homo sapien
cccaggatatagttcagatcgctgc

SEQ ID NO: 273893 - DNA, 25 bp, Homo sapien
ggatatagttcagatcgctgctgag

SEQ ID NO: 273894 - DNA, 25 bp, Homo sapien
tgctttcggtaagaacctctgcctt

SEQ ID NO: 273895 - DNA, 25 bp, Homo sapien
ctgctttcggtaagaacctctgcct

SEQ ID NO: 273896 - DNA, 25 bp, Homo sapien
tggctaggagccctctcctgttaac

SEQ ID NO: 273897 - DNA, 25 bp, Homo sapien
gcttccgagtcttgcacatactgtc

SEQ ID NO: 273898 - DNA, 25 bp, Homo sapien
tctttccgcatccaaacccagtgat

SEQ ID NO: 273899 - DNA, 25 bp, Homo sapien
tgttctttgggcttcagctcagacg

SEQ ID NO: 273900 - DNA, 25 bp, Homo sapien
tgggaggcagaacttgcagggagcc

SEQ ID NO: 273901 - DNA, 25 bp, Homo sapien
cctgggtgacacagcgagcctccat

SEQ ID NO: 273902 - DNA, 25 bp, Homo sapien
ggagccgagatcgcaccactgcact

SEQ ID NO: 273903 - DNA, 25 bp, Homo sapien
ccagcctgggtgacacagcgagcct

SEQ ID NO: 273904 - DNA, 25 bp, Homo sapien
gaagaagtggaagcttccttggctc

SEQ ID NO: 273905 - DNA, 25 bp, Homo sapien
ggcaagtgacgacctccttgggctg

SEQ ID NO: 273906 - DNA, 25 bp, Homo sapien
cagagcacgggttttgagtgcagcc

SEQ ID NO: 273907 - DNA, 25 bp, Homo sapien
tctggccccgtagcagtgtggacag

SEQ ID NO: 273908 - DNA, 25 bp, Homo sapien
tggctccttggggtagccgctgttg

SEQ ID NO: 273909 - DNA, 25 bp, Homo sapien
gctccttggggtagccgctgttggg

SEQ ID NO: 273910 - DNA, 25 bp, Homo sapien
tgctggctccttggggtagccgctg

SEQ ID NO: 273911 - DNA, 25 bp, Homo sapien
ctggctccttggggtagccgctgtt

SEQ ID NO: 273912 - DNA, 25 bp, Homo sapien
tcacacaaacggactgaaggtcagg

SEQ ID NO: 273913 - DNA, 25 bp, Homo sapien
gaggtgacctagttccagccaaaag

SEQ ID NO: 273914 - DNA, 25 bp, Homo sapien
ttcttatctttcaggcgggaggcag

SEQ ID NO: 273915 - DNA, 25 bp, Homo sapien
tggatgtgctatcaccacagcgact

SEQ ID NO: 273916 - DNA, 25 bp, Homo sapien
gcaggttagggagcggatgcagcca

SEQ ID NO: 273917 - DNA, 25 bp, Homo sapien
ggcaggttagggagcggatgcagcc

SEQ ID NO: 273918 - DNA, 25 bp, Homo sapien
ggttagggagcggatgcagccagga

SEQ ID NO: 273919 - DNA, 25 bp, Homo sapien
caggttagggagcggatgcagccag

SEQ ID NO: 273920 - DNA, 25 bp, Homo sapien
aggcgagtcttggccaagtcgatgg

SEQ ID NO: 273921 - DNA, 25 bp, Homo sapien
tcgatggggaacacgcaggtcaccc

SEQ ID NO: 273922 - DNA, 25 bp, Homo sapien
gccctgctacacctccattgatgag

SEQ ID NO: 273923 - DNA, 25 bp, Homo sapien
cctgctacacctccattgatgagtt

SEQ ID NO: 273924 - DNA, 25 bp, Homo sapien
tcggtacatgccgaagaagccctcc

SEQ ID NO: 273925 - DNA, 25 bp, Homo sapien
gagccgtcttcatcaggcagtcgat

SEQ ID NO: 273926 - DNA, 25 bp, Homo sapien
gcccgagccgtcttcatcaggcagt

SEQ ID NO: 273927 - DNA, 25 bp, Homo sapien
agccctccgcccgagccgtcttcat

SEQ ID NO: 273928 - DNA, 25 bp, Homo sapien
cagcaacggaaggaacaccagttcc

SEQ ID NO: 273929 - DNA, 25 bp, Homo sapien
catccccgcagcaacggaaggaaca

SEQ ID NO: 273930 - DNA, 25 bp, Homo sapien
ctcatcaggaaggaccccctggcag

SEQ ID NO: 273931 - DNA, 25 bp, Homo sapien
atgtcccatacgctcacacctgctg

SEQ ID NO: 273932 - DNA, 25 bp, Homo sapien
tctcggcggcacaagcatacgagct

SEQ ID NO: 273933 - DNA, 25 bp, Homo sapien
ctctgtgggtctccggaagccttac

SEQ ID NO: 273934 - DNA, 25 bp, Homo sapien
ttgtccaaggtacctcctggctggg

SEQ ID NO: 273935 - DNA, 25 bp, Homo sapien
gagggctcgcctgctcttactgagg

SEQ ID NO: 273936 - DNA, 25 bp, Homo sapien
agcagccgccggaaaaagtcgttgg

SEQ ID NO: 273937 - DNA, 25 bp, Homo sapien
gcagccgccggaaaaagtcgttggc

SEQ ID NO: 273938 - DNA, 25 bp, Homo sapien
tgagcagccgccggaaaaagtcgtt

SEQ ID NO: 273939 - DNA, 25 bp, Homo sapien
catgagcagccgccggaaaaagtcg

SEQ ID NO: 273940 - DNA, 25 bp, Homo sapien
ctgtatatgctatatgttctctata

SEQ ID NO: 273941 - DNA, 25 bp, Homo sapien
tatattatctgtcacacttccaaag

SEQ ID NO: 273942 - DNA, 25 bp, Homo sapien
gatggatttgtctgtatatgctata

SEQ ID NO: 273943 - DNA, 25 bp, Homo sapien
tgacccacgccgaagtgcagtggag

SEQ ID NO: 273944 - DNA, 25 bp, Homo sapien
acagagaaaactacccagaccaggc

SEQ ID NO: 273945 - DNA, 25 bp, Homo sapien
gaaaacagtgacagagaaaactacc

SEQ ID NO: 273946 - DNA, 25 bp, Homo sapien
ccttgatcccttcaggaacatcact

SEQ ID NO: 273947 - DNA, 25 bp, Homo sapien
cagaccaggcgttgtccttgatccc

SEQ ID NO: 273948 - DNA, 25 bp, Homo sapien
ctatgggaacaggcgtcaggctcct

SEQ ID NO: 273949 - DNA, 25 bp, Homo sapien
atgggaacaggcgtcaggctccttc

SEQ ID NO: 273950 - DNA, 25 bp, Homo sapien
tgccctcttgtgagagggggacttt

SEQ ID NO: 273951 - DNA, 25 bp, Homo sapien
gaacaggcgtcaggctccttcagcc

SEQ ID NO: 273952 - DNA, 25 bp, Homo sapien
cggcaagcatctccatcttcaggtt

SEQ ID NO: 273953 - DNA, 25 bp, Homo sapien
atttccatgggacaggtcaccacga

SEQ ID NO: 273954 - DNA, 25 bp, Homo sapien
agcatcctgcagctgaatcttgagc

SEQ ID NO: 273955 - DNA, 25 bp, Homo sapien
aggtcaccacgacctggcacatccc

SEQ ID NO: 273956 - DNA, 25 bp, Homo sapien
cagcattgatgaaatgggtaaccat

SEQ ID NO: 273957 - DNA, 25 bp, Homo sapien
gaaatgggtaaccataaatgaagac

SEQ ID NO: 273958 - DNA, 25 bp, Homo sapien
aatctttaggagatcaagtctaatt

SEQ ID NO: 273959 - DNA, 25 bp, Homo sapien
gagatcaagtctaattgtgaagaaa

SEQ ID NO: 273960 - DNA, 25 bp, Homo sapien
cctgtgggtggaagccgaaccagtt

SEQ ID NO: 273961 - DNA, 25 bp, Homo sapien
caggccctgagtgcggagcagctcc

SEQ ID NO: 273962 - DNA, 25 bp, Homo sapien
gagtggcacccaggcccctgtagag

SEQ ID NO: 273963 - DNA, 25 bp, Homo sapien
ccgaaccagttgtgtaggacctgga

SEQ ID NO: 273964 - DNA, 25 bp, Homo sapien
ccttcttttgtgccccgtgagcgtg

SEQ ID NO: 273965 - DNA, 25 bp, Homo sapien
cgaggcgggaaatgcgttctgtaca

SEQ ID NO: 273966 - DNA, 25 bp, Homo sapien
cctgcagcctcttgactgccagagg

SEQ ID NO: 273967 - DNA, 25 bp, Homo sapien
gttgccatctgttccgccgtcccag

SEQ ID NO: 273968 - DNA, 25 bp, Homo sapien
caggttgttaaggttggcaaacagt

SEQ ID NO: 273969 - DNA, 25 bp, Homo sapien
gagctcgttgaaccccaggttgtta

SEQ ID NO: 273970 - DNA, 25 bp, Homo sapien
cggcgagctcgttgaaccccaggtt

SEQ ID NO: 273971 - DNA, 25 bp, Homo sapien
ccaggttgttaaggttggcaaacag

SEQ ID NO: 273972 - DNA, 25 bp, Homo sapien
aaggaatgtgcaaaggacgccttac

SEQ ID NO: 273973 - DNA, 25 bp, Homo sapien
tagaggcgtcactgcgaccgcagct

SEQ ID NO: 273974 - DNA, 25 bp, Homo sapien
agctatggaacctgccacacagcct

SEQ ID NO: 273975 - DNA, 25 bp, Homo sapien
acacagcctgacacgaaggaatgtg

SEQ ID NO: 273976 - DNA, 25 bp, Homo sapien
ctcctgtagagccaccacatataaa

SEQ ID NO: 273977 - DNA, 25 bp, Homo sapien
gaacagcttactttcggtgtcctcc

SEQ ID NO: 273978 - DNA, 25 bp, Homo sapien
aagttaaagtaagtagtgaacagct

SEQ ID NO: 273979 - DNA, 25 bp, Homo sapien
tataaaactgactcataggccgggc

SEQ ID NO: 273980 - DNA, 25 bp, Homo sapien
ttgagggtttggattcgagttttca

SEQ ID NO: 273981 - DNA, 25 bp, Homo sapien
ggtgatcccactgtacatgtcctcg

SEQ ID NO: 273982 - DNA, 25 bp, Homo sapien
ggcacagtcggtgatcccactgtac

SEQ ID NO: 273983 - DNA, 25 bp, Homo sapien
gagggtttggattcgagttttcaga

SEQ ID NO: 273984 - DNA, 25 bp, Homo sapien
agatggtccctcctgaatccagagt

SEQ ID NO: 273985 - DNA, 25 bp, Homo sapien
taaaatagaccccttgagcaatccc

SEQ ID NO: 273986 - DNA, 25 bp, Homo sapien
gatgcgctctccaatcccaataaaa

SEQ ID NO: 273987 - DNA, 25 bp, Homo sapien
caatcccaaagagaggtgctatgac

SEQ ID NO: 273988 - DNA, 25 bp, Homo sapien
tctcccgagattgaggtagcactac

SEQ ID NO: 273989 - DNA, 25 bp, Homo sapien
ccatccagggattcgaaagggtgct

SEQ ID NO: 273990 - DNA, 25 bp, Homo sapien
ggtgcttggtctcaaactaggtgct

SEQ ID NO: 273991 - DNA, 25 bp, Homo sapien
gtagcactacaacgcagaggaccag

SEQ ID NO: 273992 - DNA, 25 bp, Homo sapien
tgtgacagtgtccagccggttctgc

SEQ ID NO: 273993 - DNA, 25 bp, Homo sapien
tccttccagcagtagtcgctttact

SEQ ID NO: 273994 - DNA, 25 bp, Homo sapien
cttgaggcttaaggcgcatgtggca

SEQ ID NO: 273995 - DNA, 25 bp, Homo sapien
cactctccgtctggcctaaaggtga

SEQ ID NO: 273996 - DNA, 25 bp, Homo sapien
aggtcacgagtcagcgacgtagaag

SEQ ID NO: 273997 - DNA, 25 bp, Homo sapien
cacgagtcagcgacgtagaaggacc

SEQ ID NO: 273998 - DNA, 25 bp, Homo sapien
cggtcaggtcacgagtcagcgacgt

SEQ ID NO: 273999 - DNA, 25 bp, Homo sapien
tcaggtcacgagtcagcgacgtaga

SEQ ID NO: 274000 - DNA, 25 bp, Homo sapien
tcaaaacagcccgactaatttcaga

SEQ ID NO: 274001 - DNA, 25 bp, Homo sapien
tcctacccaagatcccagtttagga

SEQ ID NO: 274002 - DNA, 25 bp, Homo sapien
cagcccgactaatttcagatagagg

SEQ ID NO: 274003 - DNA, 25 bp, Homo sapien
aatttcagatagaggaactccttat

SEQ ID NO: 274004 - DNA, 25 bp, Homo sapien
tgtagctgctccaccctaataagga

SEQ ID NO: 274005 - DNA, 25 bp, Homo sapien
acttgaggtcaagcgatacacccgc

SEQ ID NO: 274006 - DNA, 25 bp, Homo sapien
catagcttcccactccctaggtgtg

SEQ ID NO: 274007 - DNA, 25 bp, Homo sapien
tcctctaaatgggacctgggaaggc

SEQ ID NO: 274008 - DNA, 25 bp, Homo sapien
gctaacatcttagttggaaaaccag

SEQ ID NO: 274009 - DNA, 25 bp, Homo sapien
cagacgcggtccctcttgtgaagct

SEQ ID NO: 274010 - DNA, 25 bp, Homo sapien
gaagctaacatcttagttggaaaac

SEQ ID NO: 274011 - DNA, 25 bp, Homo sapien
aagcaatgatgagtacatcagacgc

SEQ ID NO: 274012 - DNA, 25 bp, Homo sapien
taggcgctacagatctctagcctac

SEQ ID NO: 274013 - DNA, 25 bp, Homo sapien
cagattttaataggcgctacagatc

SEQ ID NO: 274014 - DNA, 25 bp, Homo sapien
ttttaataggcgctacagatctcta

SEQ ID NO: 274015 - DNA, 25 bp, Homo sapien
ggacagattttaataggcgctacag

SEQ ID NO: 274016 - DNA, 25 bp, Homo sapien
tatctacacagtcacgacagcctcg

SEQ ID NO: 274017 - DNA, 25 bp, Homo sapien
tcctcctaggcgaagggaactggct

SEQ ID NO: 274018 - DNA, 25 bp, Homo sapien
caagggagcaggtcaaataagtatc

SEQ ID NO: 274019 - DNA, 25 bp, Homo sapien
ggaggtctctccgtccagatgtgac

SEQ ID NO: 274020 - DNA, 25 bp, Homo sapien
ggagggtgaggtcaccccggcgtgc

SEQ ID NO: 274021 - DNA, 25 bp, Homo sapien
ccggcgtgccttcgtcacggccggc

SEQ ID NO: 274022 - DNA, 25 bp, Homo sapien
cggcagttgcttccgacagggtccc

SEQ ID NO: 274023 - DNA, 25 bp, Homo sapien
ccccagcggcggtgagtgctccgac

SEQ ID NO: 274024 - DNA, 25 bp, Homo sapien
gctcgatacggtctctgggcacttt

SEQ ID NO: 274025 - DNA, 25 bp, Homo sapien
aggtgaaaaccacctcctcacccag

SEQ ID NO: 274026 - DNA, 25 bp, Homo sapien
cgtcgtcggaaccactggggagtcg

SEQ ID NO: 274027 - DNA, 25 bp, Homo sapien
gagtcggtggctcgatacggtctct

SEQ ID NO: 274028 - DNA, 25 bp, Homo sapien
cttcagccttgtgacagagcaagaa

SEQ ID NO: 274029 - DNA, 25 bp, Homo sapien
tagtcccagttacttcagggggctg

SEQ ID NO: 274030 - DNA, 25 bp, Homo sapien
gggctgagagaggagaatggcgtga

SEQ ID NO: 274031 - DNA, 25 bp, Homo sapien
cccagttacttcagggggctgagag

SEQ ID NO: 274032 - DNA, 25 bp, Homo sapien
tctttctgtgccttaatctttttac

SEQ ID NO: 274033 - DNA, 25 bp, Homo sapien
aattggctggtgaggctccaaaaag

SEQ ID NO: 274034 - DNA, 25 bp, Homo sapien
gaattggctggtgaggctccaaaaa

SEQ ID NO: 274035 - DNA, 25 bp, Homo sapien
ttggctggtgaggctccaaaaaggt

SEQ ID NO: 274036 - DNA, 25 bp, Homo sapien
tgaattggctggtgaggctccaaaa

SEQ ID NO: 274037 - DNA, 25 bp, Homo sapien
ccaagtagctgagaacaacatactt

SEQ ID NO: 274038 - DNA, 25 bp, Homo sapien
gtagctgagaacaacatactttgtt

SEQ ID NO: 274039 - DNA, 25 bp, Homo sapien
agtagctgagaacaacatactttgt

SEQ ID NO: 274040 - DNA, 25 bp, Homo sapien
agctgagaacaacatactttgtttc

SEQ ID NO: 274041 - DNA, 25 bp, Homo sapien
ctgtgttctcaacactgcacaccag

SEQ ID NO: 274042 - DNA, 25 bp, Homo sapien
gcccaacaggtagaggctgtaggga

SEQ ID NO: 274043 - DNA, 25 bp, Homo sapien
aggctgtagggagctgtgttctcaa

SEQ ID NO: 274044 - DNA, 25 bp, Homo sapien
agcccaacaggtagaggctgtaggg

SEQ ID NO: 274045 - DNA, 25 bp, Homo sapien
ggggtgaaagtcctaagccttggca

SEQ ID NO: 274046 - DNA, 25 bp, Homo sapien
gggtggctatatatgctgcaaagcc

SEQ ID NO: 274047 - DNA, 25 bp, Homo sapien
agccactccagtcgtggctaaaggg

SEQ ID NO: 274048 - DNA, 25 bp, Homo sapien
ggtacagctcgggaaatggcttcag

SEQ ID NO: 274049 - DNA, 25 bp, Homo sapien
tccaatcacaccaccatcaatacca

SEQ ID NO: 274050 - DNA, 25 bp, Homo sapien
atccaatcacaccaccatcaatacc

SEQ ID NO: 274051 - DNA, 25 bp, Homo sapien
cttgcagataatataacctattgga

SEQ ID NO: 274052 - DNA, 25 bp, Homo sapien
agataatataacctattggatccat

SEQ ID NO: 274053 - DNA, 25 bp, Homo sapien
gcagataatataacctattggatcc

SEQ ID NO: 274054 - DNA, 25 bp, Homo sapien
tgcagataatataacctattggatc

SEQ ID NO: 274055 - DNA, 25 bp, Homo sapien
ctgttagaggagagtggtttttcat

SEQ ID NO: 274056 - DNA, 25 bp, Homo sapien
ttctgttagaggagagtggtttttc

SEQ ID NO: 274057 - DNA, 25 bp, Homo sapien
tctgttagaggagagtggtttttca

SEQ ID NO: 274058 - DNA, 25 bp, Homo sapien
cttctgttagaggagagtggttttt

SEQ ID NO: 274059 - DNA, 25 bp, Homo sapien
cctgaattcaaagtgggcaaatttg

SEQ ID NO: 274060 - DNA, 25 bp, Homo sapien
ttttgagagagagttacgcccttgc

SEQ ID NO: 274061 - DNA, 25 bp, Homo sapien
aagtcttaatatagccttgtctggg

SEQ ID NO: 274062 - DNA, 25 bp, Homo sapien
tctattacacaggagcctaagaacc

SEQ ID NO: 274063 - DNA, 25 bp, Homo sapien
gattgtgaagctatatctagttgaa

SEQ ID NO: 274064 - DNA, 25 bp, Homo sapien
tgatccagagattgtgaagctatat

SEQ ID NO: 274065 - DNA, 25 bp, Homo sapien
ccagagattgtgaagctatatctag

SEQ ID NO: 274066 - DNA, 25 bp, Homo sapien
tgtgaagctatatctagttgaaccc

SEQ ID NO: 274067 - DNA, 25 bp, Homo sapien
caacagtaaaccataacaaacacaa

SEQ ID NO: 274068 - DNA, 25 bp, Homo sapien
aacagtaaaccataacaaacacaat

SEQ ID NO: 274069 - DNA, 25 bp, Homo sapien
ccaacagtaaaccataacaaacaca

SEQ ID NO: 274070 - DNA, 25 bp, Homo sapien
tataattggtgtaagttgttaactg

SEQ ID NO: 274071 - DNA, 25 bp, Homo sapien
aattggtgtaagttgttaactgttg

SEQ ID NO: 274072 - DNA, 25 bp, Homo sapien
gttgttaactgttgagaatacccca

SEQ ID NO: 274073 - DNA, 25 bp, Homo sapien
atgtataattggtgtaagttgttaa

SEQ ID NO: 274074 - DNA, 25 bp, Homo sapien
aggttgtggtgggccgagatggtgc

SEQ ID NO: 274075 - DNA, 25 bp, Homo sapien
ggttgtggtgggccgagatggtgcc

SEQ ID NO: 274076 - DNA, 25 bp, Homo sapien
aaagaaatataatggtcgggcacag

SEQ ID NO: 274077 - DNA, 25 bp, Homo sapien
tataaagtgcttgcctccgagaaag

SEQ ID NO: 274078 - DNA, 25 bp, Homo sapien
tcgggcacagtgtttcacaccggta

SEQ ID NO: 274079 - DNA, 25 bp, Homo sapien
tccagagtacaaatgcgatgcaagg

SEQ ID NO: 274080 - DNA, 25 bp, Homo sapien
gccaagattgtgccattgcactcta

SEQ ID NO: 274081 - DNA, 25 bp, Homo sapien
aggggccgggtgcggtggctcacgc

SEQ ID NO: 274082 - DNA, 25 bp, Homo sapien
gcctgggcaacaagagtgaaactcc

SEQ ID NO: 274083 - DNA, 25 bp, Homo sapien
acctgggagatagaggttgcagcga

SEQ ID NO: 274084 - DNA, 25 bp, Homo sapien
cactggagaagtgtgacggtcaaag

SEQ ID NO: 274085 - DNA, 25 bp, Homo sapien
attggcagggctgaacactggagaa

SEQ ID NO: 274086 - DNA, 25 bp, Homo sapien
gctttctggattggcagggctgaac

SEQ ID NO: 274087 - DNA, 25 bp, Homo sapien
gacggtcaaagcctgtgctggtgaa

SEQ ID NO: 274088 - DNA, 25 bp, Homo sapien
ttatggagaggctctttcagttcct

SEQ ID NO: 274089 - DNA, 25 bp, Homo sapien
ttgcaatgctttatggagaggctct

SEQ ID NO: 274090 - DNA, 25 bp, Homo sapien
aatgctttatggagaggctctttca

SEQ ID NO: 274091 - DNA, 25 bp, Homo sapien
ggctctttcagttcctgggacactt

SEQ ID NO: 274092 - DNA, 25 bp, Homo sapien
aatttttttctttcagatggagtct

SEQ ID NO: 274093 - DNA, 25 bp, Homo sapien
aatggcatgatctcagctcactgca

SEQ ID NO: 274094 - DNA, 25 bp, Homo sapien
ctgccaccatgctcagctaattttt

SEQ ID NO: 274095 - DNA, 25 bp, Homo sapien
ccctctgtcatgcaggctggagtgc

SEQ ID NO: 274096 - DNA, 25 bp, Homo sapien
ccaggctaaagtattttagcatcgt

SEQ ID NO: 274097 - DNA, 25 bp, Homo sapien
tctaccaggctaaagtattttagca

SEQ ID NO: 274098 - DNA, 25 bp, Homo sapien
tggttgtttgtctaccaggctaaag

SEQ ID NO: 274099 - DNA, 25 bp, Homo sapien
tgtttgtctaccaggctaaagtatt

SEQ ID NO: 274100 - DNA, 25 bp, Homo sapien
gagttgaaataaatatcgcaataaa

SEQ ID NO: 274101 - DNA, 25 bp, Homo sapien
tacaggataggatttttatgctgca

SEQ ID NO: 274102 - DNA, 25 bp, Homo sapien
gataggatttttatgctgcaaagaa

SEQ ID NO: 274103 - DNA, 25 bp, Homo sapien
gaaatacctgaattattaatacagg

SEQ ID NO: 274104 - DNA, 25 bp, Homo sapien
tgtggtctccagtgtacattcccga

SEQ ID NO: 274105 - DNA, 25 bp, Homo sapien
ggtctccagtgtacattcccgaaat

SEQ ID NO: 274106 - DNA, 25 bp, Homo sapien
ttattccagccgctggcatgaactg

SEQ ID NO: 274107 - DNA, 25 bp, Homo sapien
attccagccgctggcatgaactgtg

SEQ ID NO: 274108 - DNA, 25 bp, Homo sapien
tcaaatggtatgtgacacgagacac

SEQ ID NO: 274109 - DNA, 25 bp, Homo sapien
catcaattaggtacataaggtcaca

SEQ ID NO: 274110 - DNA, 25 bp, Homo sapien
caattccaaatagaggtaggtgtct

SEQ ID NO: 274111 - DNA, 25 bp, Homo sapien
tggtcaagggattctaggcaagtca

SEQ ID NO: 274112 - DNA, 25 bp, Homo sapien
ggtcaggagtttgagaccagcctgg

SEQ ID NO: 274113 - DNA, 25 bp, Homo sapien
ctgtctctactaaaagtacaaaaat

SEQ ID NO: 274114 - DNA, 25 bp, Homo sapien
ccaacatggcaagaccctgtctcta

SEQ ID NO: 274115 - DNA, 25 bp, Homo sapien
tgggaggccaacagaggcagatcac

SEQ ID NO: 274116 - DNA, 25 bp, Homo sapien
tcaaaacagattacctccactggct

SEQ ID NO: 274117 - DNA, 25 bp, Homo sapien
actaatttatagttctgagagtccc

SEQ ID NO: 274118 - DNA, 25 bp, Homo sapien
tctcttcgtacactatgtggtctct

SEQ ID NO: 274119 - DNA, 25 bp, Homo sapien
cttggtgtagaaatgaagcgtacta

SEQ ID NO: 274120 - DNA, 25 bp, Homo sapien
gtagcaaaaccagaggcaccaaaat

SEQ ID NO: 274121 - DNA, 25 bp, Homo sapien
tgtcgtagcaaaaccagaggcacca

SEQ ID NO: 274122 - DNA, 25 bp, Homo sapien
tcgtagcaaaaccagaggcaccaaa

SEQ ID NO: 274123 - DNA, 25 bp, Homo sapien
ttgtcgtagcaaaaccagaggcacc

SEQ ID NO: 274124 - DNA, 25 bp, Homo sapien
tgtactctgccgaatagtcctccag

SEQ ID NO: 274125 - DNA, 25 bp, Homo sapien
caccttgctgaatgatgtactctgc

SEQ ID NO: 274126 - DNA, 25 bp, Homo sapien
tatgtcacgccaaactgcagcagtg

SEQ ID NO: 274127 - DNA, 25 bp, Homo sapien
caaaggttcttgaccacgtcttgtc

SEQ ID NO: 274128 - DNA, 25 bp, Homo sapien
gaaaatatttttaatatataacagc

SEQ ID NO: 274129 - DNA, 25 bp, Homo sapien
caaaaagtacgggatagagcacggc

SEQ ID NO: 274130 - DNA, 25 bp, Homo sapien
tcaagtttcaatgccacgatggtcg

SEQ ID NO: 274131 - DNA, 25 bp, Homo sapien
cgatggtcgtgctttctgatgaaac

SEQ ID NO: 274132 - DNA, 25 bp, Homo sapien
tgagaccgaagcctgccatgatagt

SEQ ID NO: 274133 - DNA, 25 bp, Homo sapien
taccaagcacgtaaacctaggatgt

SEQ ID NO: 274134 - DNA, 25 bp, Homo sapien
aagagagtccgcataaatgtccagg

SEQ ID NO: 274135 - DNA, 25 bp, Homo sapien
ttaactcaaaccctcagatgcatag

SEQ ID NO: 274136 - DNA, 25 bp, Homo sapien
tcactgactgttgggcaaattacaa

SEQ ID NO: 274137 - DNA, 25 bp, Homo sapien
aacctggcatttgtaaaagtgtgac

SEQ ID NO: 274138 - DNA, 25 bp, Homo sapien
cagagacgcatgtgaaaacctggca

SEQ ID NO: 274139 - DNA, 25 bp, Homo sapien
cagacagacttctaacgtagcaaca

SEQ ID NO: 274140 - DNA, 25 bp, Homo sapien
cgtagcaacacaagcccaggaaatg

SEQ ID NO: 274141 - DNA, 25 bp, Homo sapien
tgacgacggagaaagtaaaatacaa

SEQ ID NO: 274142 - DNA, 25 bp, Homo sapien
caagaagtatttatcatgtgacgac

SEQ ID NO: 274143 - DNA, 25 bp, Homo sapien
cattccctccagtaatcttttatgg

SEQ ID NO: 274144 - DNA, 25 bp, Homo sapien
tacaatagacagatgacattccctc

SEQ ID NO: 274145 - DNA, 25 bp, Homo sapien
cagacatggataccaaaacaagtaa

SEQ ID NO: 274146 - DNA, 25 bp, Homo sapien
caactatgctgtcctacctcttaga

SEQ ID NO: 274147 - DNA, 25 bp, Homo sapien
gcaaaggagtaatttcgagggctca

SEQ ID NO: 274148 - DNA, 25 bp, Homo sapien
ccttagcttgctatgacaaattgga

SEQ ID NO: 274149 - DNA, 25 bp, Homo sapien
ttctaaaaacagagcctctaatagc

SEQ ID NO: 274150 - DNA, 25 bp, Homo sapien
gcacttctaaaaacagagcctctaa

SEQ ID NO: 274151 - DNA, 25 bp, Homo sapien
ctgcacttctaaaaacagagcctct

SEQ ID NO: 274152 - DNA, 25 bp, Homo sapien
aaaacagagcctctaatagcagtaa

SEQ ID NO: 274153 - DNA, 25 bp, Homo sapien
caaactgttgggattacaagcatga

SEQ ID NO: 274154 - DNA, 25 bp, Homo sapien
aaactgttgggattacaagcatgag

SEQ ID NO: 274155 - DNA, 25 bp, Homo sapien
aaatagggtatcaccatggtgttgg

SEQ ID NO: 274156 - DNA, 25 bp, Homo sapien
tacttttggtagaaatagggtatca

SEQ ID NO: 274157 - DNA, 25 bp, Homo sapien
tactaaattcccaagcgctgtctcc

SEQ ID NO: 274158 - DNA, 25 bp, Homo sapien
agtttaagaccctgatccggctcca

SEQ ID NO: 274159 - DNA, 25 bp, Homo sapien
caaagcagcataccattttagaggg

SEQ ID NO: 274160 - DNA, 25 bp, Homo sapien
tgaatctaaggtaccatccggccat

SEQ ID NO: 274161 - DNA, 25 bp, Homo sapien
ggtctatgagaggaactagtagtct

SEQ ID NO: 274162 - DNA, 25 bp, Homo sapien
ggtgtcctaaaaactaggtctatga

SEQ ID NO: 274163 - DNA, 25 bp, Homo sapien
tactgatataattgcaaggtgcttg

SEQ ID NO: 274164 - DNA, 25 bp, Homo sapien
acagggagataaacaaggtgtccta

SEQ ID NO: 274165 - DNA, 25 bp, Homo sapien
agtctcatctactcaactcaggagg

SEQ ID NO: 274166 - DNA, 25 bp, Homo sapien
tgtagtctcatctactcaactcagg

SEQ ID NO: 274167 - DNA, 25 bp, Homo sapien
tccaaaaaaaacagaggcaattaga

SEQ ID NO: 274168 - DNA, 25 bp, Homo sapien
aagatcttgtctcaattccaaaaaa

SEQ ID NO: 274169 - DNA, 25 bp, Homo sapien
ctatcttctgcagtgattccagggt

SEQ ID NO: 274170 - DNA, 25 bp, Homo sapien
gatgtaaatgtcattgctatcttct

SEQ ID NO: 274171 - DNA, 25 bp, Homo sapien
ggactgacttgtccagagttgtcgc

SEQ ID NO: 274172 - DNA, 25 bp, Homo sapien
tcacagttggagactctgggggact

SEQ ID NO: 274173 - DNA, 25 bp, Homo sapien
gactcagggcctagtgacactggca

SEQ ID NO: 274174 - DNA, 25 bp, Homo sapien
tgacacaggtaagctctcagactgc

SEQ ID NO: 274175 - DNA, 25 bp, Homo sapien
ggatccattgcaatctgctgccagg

SEQ ID NO: 274176 - DNA, 25 bp, Homo sapien
aactctggctagctgacagtgacac

SEQ ID NO: 274177 - DNA, 25 bp, Homo sapien
aggctctcttcccttgcgtttatct

SEQ ID NO: 274178 - DNA, 25 bp, Homo sapien
tcagacggcggcacgggcttcttct

SEQ ID NO: 274179 - DNA, 25 bp, Homo sapien
tttctcaactgtgatcacttctgtg

SEQ ID NO: 274180 - DNA, 25 bp, Homo sapien
tcaccggcgggggacagtctagact

SEQ ID NO: 274181 - DNA, 25 bp, Homo sapien
ggctaccccgatggccactgccagg

SEQ ID NO: 274182 - DNA, 25 bp, Homo sapien
cagcccctccaaacagcagtataga

SEQ ID NO: 274183 - DNA, 25 bp, Homo sapien
gcagcagcccctccaaacagcagta

SEQ ID NO: 274184 - DNA, 25 bp, Homo sapien
gggctaccccgatggccactgccag

SEQ ID NO: 274185 - DNA, 25 bp, Homo sapien
tgtgccctgcatagtgacgtcgtgg

SEQ ID NO: 274186 - DNA, 25 bp, Homo sapien
aaaaaagagtgggtgcagagcctgc

SEQ ID NO: 274187 - DNA, 25 bp, Homo sapien
tcaatttagcatgagcggaggccct

SEQ ID NO: 274188 - DNA, 25 bp, Homo sapien
tgggtgaccactagcgaaaagggct

SEQ ID NO: 274189 - DNA, 25 bp, Homo sapien
acataaatttcaaaaagaaagcaca

SEQ ID NO: 274190 - DNA, 25 bp, Homo sapien
aagaaagcacatttaaaacatcagg

SEQ ID NO: 274191 - DNA, 25 bp, Homo sapien
aaaagaaagcacatttaaaacatca

SEQ ID NO: 274192 - DNA, 25 bp, Homo sapien
ttgctttagggagattttatttgaa

SEQ ID NO: 274193 - DNA, 25 bp, Homo sapien
tactcccagaccttgttttgaccaa

SEQ ID NO: 274194 - DNA, 25 bp, Homo sapien
tcaagataacgcaccagtttgctct

SEQ ID NO: 274195 - DNA, 25 bp, Homo sapien
gacacgctacaggataaagctggaa

SEQ ID NO: 274196 - DNA, 25 bp, Homo sapien
tcaatgcaactatcagagcccatga

SEQ ID NO: 274197 - DNA, 25 bp, Homo sapien
gattggtgcttgaatgcgctcagcc

SEQ ID NO: 274198 - DNA, 25 bp, Homo sapien
tattgagggaatcagcgcaaagcct

SEQ ID NO: 274199 - DNA, 25 bp, Homo sapien
gaacagtagctgtgggtcaaagcca

SEQ ID NO: 274200 - DNA, 25 bp, Homo sapien
gatgatcatgagagtccccttaagg

SEQ ID NO: 274201 - DNA, 25 bp, Homo sapien
ttgggcagaagctctaggtcgtgtc

SEQ ID NO: 274202 - DNA, 25 bp, Homo sapien
tagcaatcagatagcctacaaggcc

SEQ ID NO: 274203 - DNA, 25 bp, Homo sapien
tccagtatgtcgctgagatgttaaa

SEQ ID NO: 274204 - DNA, 25 bp, Homo sapien
ccgtcttgatgggtatgatcaccac

SEQ ID NO: 274205 - DNA, 25 bp, Homo sapien
tccttatgcagtaaacaactggcgc

SEQ ID NO: 274206 - DNA, 25 bp, Homo sapien
cacagcatggtgagcagagcacagg

SEQ ID NO: 274207 - DNA, 25 bp, Homo sapien
taactgctgggacagattgcctaac

SEQ ID NO: 274208 - DNA, 25 bp, Homo sapien
ggctgcacgtcggaatttgtcccca

SEQ ID NO: 274209 - DNA, 25 bp, Homo sapien
tgcaatacataccacgctagggctg

SEQ ID NO: 274210 - DNA, 25 bp, Homo sapien
tactaaaaagaagtgctgccgcgca

SEQ ID NO: 274211 - DNA, 25 bp, Homo sapien
ctaaagacatgaagccacgggtgcc

SEQ ID NO: 274212 - DNA, 25 bp, Homo sapien
tcaaatgatgggaagtccggcccca

SEQ ID NO: 274213 - DNA, 25 bp, Homo sapien
taaagtacaaccatagaggatggtc

SEQ ID NO: 274214 - DNA, 25 bp, Homo sapien
caaccatagaggatggtcttacagc

SEQ ID NO: 274215 - DNA, 25 bp, Homo sapien
ggtcttacagcaggcagtatcctgt

SEQ ID NO: 274216 - DNA, 25 bp, Homo sapien
gaggatggtcttacagcaggcagta

SEQ ID NO: 274217 - DNA, 25 bp, Homo sapien
gatgaggtttctcccatgttaggct

SEQ ID NO: 274218 - DNA, 25 bp, Homo sapien
gagatgaggtttctcccatgttagg

SEQ ID NO: 274219 - DNA, 25 bp, Homo sapien
tagagatgaggtttctcccatgtta

SEQ ID NO: 274220 - DNA, 25 bp, Homo sapien
gaggtttctcccatgttaggctggt

SEQ ID NO: 274221 - DNA, 25 bp, Homo sapien
agtagagacttagggttagccagga

SEQ ID NO: 274222 - DNA, 25 bp, Homo sapien
tagtagagacttagggttagccagg

SEQ ID NO: 274223 - DNA, 25 bp, Homo sapien
tttagtagagacttagggttagcca

SEQ ID NO: 274224 - DNA, 25 bp, Homo sapien
ttagtagagacttagggttagccag

SEQ ID NO: 274225 - DNA, 25 bp, Homo sapien
tggacatttgacactggagcctgcc

SEQ ID NO: 274226 - DNA, 25 bp, Homo sapien
gcagaagggccgtgagtcatcctct

SEQ ID NO: 274227 - DNA, 25 bp, Homo sapien
tgagggtcccactcatttgcaaggg

SEQ ID NO: 274228 - DNA, 25 bp, Homo sapien
cgtgaccgaggactgtgcccgtttt

SEQ ID NO: 274229 - DNA, 25 bp, Homo sapien
aggttgggcaggatagacggtggct

SEQ ID NO: 274230 - DNA, 25 bp, Homo sapien
tgctgttagtgcttctgaggaggtt

SEQ ID NO: 274231 - DNA, 25 bp, Homo sapien
tctgttcatgagatgtgagagtggt

SEQ ID NO: 274232 - DNA, 25 bp, Homo sapien
tgaggaagcagctcgtgtctctgtt

SEQ ID NO: 274233 - DNA, 25 bp, Homo sapien
tggagccttatccacaccctcagtc

SEQ ID NO: 274234 - DNA, 25 bp, Homo sapien
tctcaggcttgcacccccttcctgg

SEQ ID NO: 274235 - DNA, 25 bp, Homo sapien
gcagaggatgcggtttttccacatt

SEQ ID NO: 274236 - DNA, 25 bp, Homo sapien
gcagatggacccacccagagctctt

SEQ ID NO: 274237 - DNA, 25 bp, Homo sapien
tcaacaaatacgaatgtgcagcggt

SEQ ID NO: 274238 - DNA, 25 bp, Homo sapien
cacagtgcggattctgtaagtgggc

SEQ ID NO: 274239 - DNA, 25 bp, Homo sapien
gtcatgatggctcggtgggcagcga

SEQ ID NO: 274240 - DNA, 25 bp, Homo sapien
ggccttctgcggctggaccggcctt

SEQ ID NO: 274241 - DNA, 25 bp, Homo sapien
aatgatgtgcggatcctcgctgctg

SEQ ID NO: 274242 - DNA, 25 bp, Homo sapien
cccgctccttagagcactggcaatg

SEQ ID NO: 274243 - DNA, 25 bp, Homo sapien
ctgggaaactgttgagtggctgaat

SEQ ID NO: 274244 - DNA, 25 bp, Homo sapien
tgttgagtggctgaatgaccccagg

SEQ ID NO: 274245 - DNA, 25 bp, Homo sapien
taggaactggactcctcaaggacgc

SEQ ID NO: 274246 - DNA, 25 bp, Homo sapien
tgtccaagcacagtcacgttctgag

SEQ ID NO: 274247 - DNA, 25 bp, Homo sapien
caaggacgctttagaaaatgccggc

SEQ ID NO: 274248 - DNA, 25 bp, Homo sapien
aaatgccggcctcgttctgttgcaa

SEQ ID NO: 274249 - DNA, 25 bp, Homo sapien
cgatgtgttgttctccccgggtccg

SEQ ID NO: 274250 - DNA, 25 bp, Homo sapien
ccctggcgcagagacgatgtgttgt

SEQ ID NO: 274251 - DNA, 25 bp, Homo sapien
gacaccagtcagataggaggagggc

SEQ ID NO: 274252 - DNA, 25 bp, Homo sapien
taaatgcgtgggcacggctgggttc

SEQ ID NO: 274253 - DNA, 25 bp, Homo sapien
aaagtttcccagagcataggcagtg

SEQ ID NO: 274254 - DNA, 25 bp, Homo sapien
tgcacaacagaagcgggtttcctca

SEQ ID NO: 274255 - DNA, 25 bp, Homo sapien
gattctctgcaacccatatggcttc

SEQ ID NO: 274256 - DNA, 25 bp, Homo sapien
tctgtgaggaccgaaaatgaccatc

SEQ ID NO: 274257 - DNA, 25 bp, Homo sapien
agaccgggagaggaaggccacctgg

SEQ ID NO: 274258 - DNA, 25 bp, Homo sapien
ctttgcccttttcgcttgatcttgg

SEQ ID NO: 274259 - DNA, 25 bp, Homo sapien
aactttgcccttttcgcttgatctt

SEQ ID NO: 274260 - DNA, 25 bp, Homo sapien
acaagatgggggtgacgcctcccga

SEQ ID NO: 274261 - DNA, 25 bp, Homo sapien
ggtttggaggctagatcctgcccag

SEQ ID NO: 274262 - DNA, 25 bp, Homo sapien
tgaacatctcactgaattgcccggg

SEQ ID NO: 274263 - DNA, 25 bp, Homo sapien
cattcccggagtttggagggatcca

SEQ ID NO: 274264 - DNA, 25 bp, Homo sapien
taaaacacacgtgcacgagcaacag

SEQ ID NO: 274265 - DNA, 25 bp, Homo sapien
gacttcctgcgtcaagcgttctcaa

SEQ ID NO: 274266 - DNA, 25 bp, Homo sapien
caaggctgactaaactggaggctga

SEQ ID NO: 274267 - DNA, 25 bp, Homo sapien
tcaggccgattttgaccagcaatga

SEQ ID NO: 274268 - DNA, 25 bp, Homo sapien
tatatcacacgcataaaacaccagg

SEQ ID NO: 274269 - DNA, 25 bp, Homo sapien
tttctcttcgtatcactggcctggc

SEQ ID NO: 274270 - DNA, 25 bp, Homo sapien
gaactcgcccttgtctcagtttggg

SEQ ID NO: 274271 - DNA, 25 bp, Homo sapien
gaaatgaagctgacaacctggcaag

SEQ ID NO: 274272 - DNA, 25 bp, Homo sapien
tactagaggaactgatcacctgcgc

SEQ ID NO: 274273 - DNA, 25 bp, Homo sapien
tagcccgacctacaagagagaactt

SEQ ID NO: 274274 - DNA, 25 bp, Homo sapien
caagagagaacttgcgtttacctct

SEQ ID NO: 274275 - DNA, 25 bp, Homo sapien
taaatacaagcaacgcagctgcctc

SEQ ID NO: 274276 - DNA, 25 bp, Homo sapien
cacagggacgggtggtgacttcacc

SEQ ID NO: 274277 - DNA, 25 bp, Homo sapien
ctcagcctgcattatgagggctgaa

SEQ ID NO: 274278 - DNA, 25 bp, Homo sapien
gcctgcattatgagggctgaatgac

SEQ ID NO: 274279 - DNA, 25 bp, Homo sapien
atgctcagcctgcattatgagggct

SEQ ID NO: 274280 - DNA, 25 bp, Homo sapien
gactgtcaccacgaggtctgctgtg

SEQ ID NO: 274281 - DNA, 25 bp, Homo sapien
cgtgcaatttaagaggagacccagc

SEQ ID NO: 274282 - DNA, 25 bp, Homo sapien
aggtaatgaaggtagacagctagag

SEQ ID NO: 274283 - DNA, 25 bp, Homo sapien
gagcgcagcactcgtgcaatttaag

SEQ ID NO: 274284 - DNA, 25 bp, Homo sapien
ggtagacagctagagcgcagcactc

SEQ ID NO: 274285 - DNA, 25 bp, Homo sapien
gcctccaggtggatgggactctcca

SEQ ID NO: 274286 - DNA, 25 bp, Homo sapien
cccgggaggggatgcgggcctccag

SEQ ID NO: 274287 - DNA, 25 bp, Homo sapien
cctccaggtggatgggactctccat

SEQ ID NO: 274288 - DNA, 25 bp, Homo sapien
ggaggggatgcgggcctccaggtgg

SEQ ID NO: 274289 - DNA, 25 bp, Homo sapien
ggtggtaggcttgtacgcagaaaca

SEQ ID NO: 274290 - DNA, 25 bp, Homo sapien
tggtaggcttgtacgcagaaacacg

SEQ ID NO: 274291 - DNA, 25 bp, Homo sapien
gcttgtacgcagaaacacgtttcat

SEQ ID NO: 274292 - DNA, 25 bp, Homo sapien
taggcttgtacgcagaaacacgttt

SEQ ID NO: 274293 - DNA, 25 bp, Homo sapien
gggcggtgtctcctggcctgctcat

SEQ ID NO: 274294 - DNA, 25 bp, Homo sapien
gctcccctttctctgaaataagtca

SEQ ID NO: 274295 - DNA, 25 bp, Homo sapien
tttcctcagagcctcgatggttctg

SEQ ID NO: 274296 - DNA, 25 bp, Homo sapien
ttctgagagtctgggcggtgtctcc

SEQ ID NO: 274297 - DNA, 25 bp, Homo sapien
cattctcgacaaccacagtccaggt

SEQ ID NO: 274298 - DNA, 25 bp, Homo sapien
tgcttggcattctcgacaaccacag

SEQ ID NO: 274299 - DNA, 25 bp, Homo sapien
cacagtccaggttagggagggcctc

SEQ ID NO: 274300 - DNA, 25 bp, Homo sapien
tcgacaaccacagtccaggttaggg

SEQ ID NO: 274301 - DNA, 25 bp, Homo sapien
tgaattggcccaagagagggcactg

SEQ ID NO: 274302 - DNA, 25 bp, Homo sapien
ctgacatagcttcccgttaacagag

SEQ ID NO: 274303 - DNA, 25 bp, Homo sapien
gagtggtgcgaagttttgctttgca

SEQ ID NO: 274304 - DNA, 25 bp, Homo sapien
ggtgcgaagttttgctttgcagcag

SEQ ID NO: 274305 - DNA, 25 bp, Homo sapien
cccgttaacagaggactcctgtgta

SEQ ID NO: 274306 - DNA, 25 bp, Homo sapien
atgcacagcagcgtacgggcagcac

SEQ ID NO: 274307 - DNA, 25 bp, Homo sapien
agaaccacgggagcctcacactggg

SEQ ID NO: 274308 - DNA, 25 bp, Homo sapien
actggggagccgtactccaggtcag

SEQ ID NO: 274309 - DNA, 25 bp, Homo sapien
gttctgagaaccacgggagcctcac

SEQ ID NO: 274310 - DNA, 25 bp, Homo sapien
actgagccgttgcaggttgagcagc

SEQ ID NO: 274311 - DNA, 25 bp, Homo sapien
gagctagccgtcctcagcgtccgct

SEQ ID NO: 274312 - DNA, 25 bp, Homo sapien
ggaaagcacgctcagttcttctcaa

SEQ ID NO: 274313 - DNA, 25 bp, Homo sapien
cttcatctacacaagagctagccgt

SEQ ID NO: 274314 - DNA, 25 bp, Homo sapien
ttgcccaggctctctggggtgtggt

SEQ ID NO: 274315 - DNA, 25 bp, Homo sapien
ctcctagccttaagccatctgctgg

SEQ ID NO: 274316 - DNA, 25 bp, Homo sapien
tagagacgaggcctccctgtgtttc

SEQ ID NO: 274317 - DNA, 25 bp, Homo sapien
tcactgaagctttgacttcctggtc

SEQ ID NO: 274318 - DNA, 25 bp, Homo sapien
gagcttcagggcctcttctgtatca

SEQ ID NO: 274319 - DNA, 25 bp, Homo sapien
tcagggcctcttctgtatcattctg

SEQ ID NO: 274320 - DNA, 25 bp, Homo sapien
cttcagggcctcttctgtatcattc

SEQ ID NO: 274321 - DNA, 25 bp, Homo sapien
gggcctcttctgtatcattctggaa

SEQ ID NO: 274322 - DNA, 25 bp, Homo sapien
gcaatgtatcctccacattatgtga

SEQ ID NO: 274323 - DNA, 25 bp, Homo sapien
ccacattatgtgacgagtgttgtgt

SEQ ID NO: 274324 - DNA, 25 bp, Homo sapien
tatatttgaggcgaaaagcccagcc

SEQ ID NO: 274325 - DNA, 25 bp, Homo sapien
gtgatatatttgaggcgaaaagccc

SEQ ID NO: 274326 - DNA, 25 bp, Homo sapien
caccagtgccctgcaggtcgaaatc

SEQ ID NO: 274327 - DNA, 25 bp, Homo sapien
tgcaggtcgaaatctcttcggccgg

SEQ ID NO: 274328 - DNA, 25 bp, Homo sapien
ggaattaaaacttgcctgctggttg

SEQ ID NO: 274329 - DNA, 25 bp, Homo sapien
ccggggaattaaaacttgcctgctg

SEQ ID NO: 274330 - DNA, 25 bp, Homo sapien
agccatcctgcctctgttcatccat

SEQ ID NO: 274331 - DNA, 25 bp, Homo sapien
gagccatcctgcctctgttcatcca

SEQ ID NO: 274332 - DNA, 25 bp, Homo sapien
cttgggtgccggtcgcattgttcca

SEQ ID NO: 274333 - DNA, 25 bp, Homo sapien
ggagccatcctgcctctgttcatcc

SEQ ID NO: 274334 - DNA, 25 bp, Homo sapien
actgtacacagggtggtgcaggaca

SEQ ID NO: 274335 - DNA, 25 bp, Homo sapien
ttatgaactgtacacagggtggtgc

SEQ ID NO: 274336 - DNA, 25 bp, Homo sapien
aggttcctgtgattatgaactgtac

SEQ ID NO: 274337 - DNA, 25 bp, Homo sapien
gtctccaggttcctgtgattatgaa

SEQ ID NO: 274338 - DNA, 25 bp, Homo sapien
gaagagcgaggggcactctgcatgg

SEQ ID NO: 274339 - DNA, 25 bp, Homo sapien
aagagcgaggggcactctgcatggc

SEQ ID NO: 274340 - DNA, 25 bp, Homo sapien
tctctctgataaggtgagccaagac

SEQ ID NO: 274341 - DNA, 25 bp, Homo sapien
cacaggatgtgggtcgagagtgacg

SEQ ID NO: 274342 - DNA, 25 bp, Homo sapien
gcagagctctctctgataaggtgag

SEQ ID NO: 274343 - DNA, 25 bp, Homo sapien
cagtgtccacaggatgtgggtcgag

SEQ ID NO: 274344 - DNA, 25 bp, Homo sapien
aaccagtggggtattgtagaaggca

SEQ ID NO: 274345 - DNA, 25 bp, Homo sapien
tgtagaaggcagtattggggcccca

SEQ ID NO: 274346 - DNA, 25 bp, Homo sapien
ctggaggaaccagtggggtattgta

SEQ ID NO: 274347 - DNA, 25 bp, Homo sapien
gggtattgtagaaggcagtattggg

SEQ ID NO: 274348 - DNA, 25 bp, Homo sapien
ccgtcaccctcagtggagtgttgga

SEQ ID NO: 274349 - DNA, 25 bp, Homo sapien
gagtgaaaagatgaccggaagaggg

SEQ ID NO: 274350 - DNA, 25 bp, Homo sapien
agacagaggccagattggagaggga

SEQ ID NO: 274351 - DNA, 25 bp, Homo sapien
ccggaagagggtcattaggagggtg

SEQ ID NO: 274352 - DNA, 25 bp, Homo sapien
tcatctccaccccataatgactagt

SEQ ID NO: 274353 - DNA, 25 bp, Homo sapien
attatccactgattgacagccatca

SEQ ID NO: 274354 - DNA, 25 bp, Homo sapien
cataatgactagttttcaacttggc

SEQ ID NO: 274355 - DNA, 25 bp, Homo sapien
tatccactgattgacagccatcatc

SEQ ID NO: 274356 - DNA, 25 bp, Homo sapien
aatcaccgggctatctttagccatg

SEQ ID NO: 274357 - DNA, 25 bp, Homo sapien
ttctgtgcctccctgcaagcataca

SEQ ID NO: 274358 - DNA, 25 bp, Homo sapien
gccatgttgcggtgtggctgcacct

SEQ ID NO: 274359 - DNA, 25 bp, Homo sapien
ccacttggctgtgcttaattctgtg

SEQ ID NO: 274360 - DNA, 25 bp, Homo sapien
ggacagccacggtcacttggtgcat

SEQ ID NO: 274361 - DNA, 25 bp, Homo sapien
tggacagccacggtcacttggtgca

SEQ ID NO: 274362 - DNA, 25 bp, Homo sapien
ctttgatttgttgggtgagaggaaa

SEQ ID NO: 274363 - DNA, 25 bp, Homo sapien
gggctttgatttgttgggtgagagg

SEQ ID NO: 274364 - DNA, 25 bp, Homo sapien
ctggtgctgcccagcagcgtcacgg

SEQ ID NO: 274365 - DNA, 25 bp, Homo sapien
tggtgctgcccagcagcgtcacggg

SEQ ID NO: 274366 - DNA, 25 bp, Homo sapien
gtgctgcccagcagcgtcacgggca

SEQ ID NO: 274367 - DNA, 25 bp, Homo sapien
tgctgcccagcagcgtcacgggcat

SEQ ID NO: 274368 - DNA, 25 bp, Homo sapien
ttgtttttcacgagagcaacaatac

SEQ ID NO: 274369 - DNA, 25 bp, Homo sapien
tgtttttcacgagagcaacaatact

SEQ ID NO: 274370 - DNA, 25 bp, Homo sapien
tttcacgagagcaacaatacttttt

SEQ ID NO: 274371 - DNA, 25 bp, Homo sapien
tttttcacgagagcaacaatacttt

SEQ ID NO: 274372 - DNA, 25 bp, Homo sapien
tctgatcttagatggacagcagata

SEQ ID NO: 274373 - DNA, 25 bp, Homo sapien
ccggctctgatcttagatggacagc

SEQ ID NO: 274374 - DNA, 25 bp, Homo sapien
agcccggctctgatcttagatggac

SEQ ID NO: 274375 - DNA, 25 bp, Homo sapien
gctctgatcttagatggacagcaga

SEQ ID NO: 274376 - DNA, 25 bp, Homo sapien
agggaaaacattgtctcattggcag

SEQ ID NO: 274377 - DNA, 25 bp, Homo sapien
ctgtcttggcgggcacagtcttgct

SEQ ID NO: 274378 - DNA, 25 bp, Homo sapien
caagatgaacgcgtgcagcggctgt

SEQ ID NO: 274379 - DNA, 25 bp, Homo sapien
agggcccaggctgcaagatgaacgc

SEQ ID NO: 274380 - DNA, 25 bp, Homo sapien
tccaccaaagtgaccgttctgggag

SEQ ID NO: 274381 - DNA, 25 bp, Homo sapien
gagctcttgggattccagctggaga

SEQ ID NO: 274382 - DNA, 25 bp, Homo sapien
agattgtggcggcactgtggaaaca

SEQ ID NO: 274383 - DNA, 25 bp, Homo sapien
agagccagcaagattgtggcggcac

SEQ ID NO: 274384 - DNA, 25 bp, Homo sapien
caccttggcacaccccgcctcggga

SEQ ID NO: 274385 - DNA, 25 bp, Homo sapien
ggcacaccccgcctcgggacaccat

SEQ ID NO: 274386 - DNA, 25 bp, Homo sapien
agggagagcactgccaccttggcac

SEQ ID NO: 274387 - DNA, 25 bp, Homo sapien
gcagggagagcactgccaccttggc

SEQ ID NO: 274388 - DNA, 25 bp, Homo sapien
gatgagcccaagattctgaggagca

SEQ ID NO: 274389 - DNA, 25 bp, Homo sapien
cctgtattgttccttgatttccacg

SEQ ID NO: 274390 - DNA, 25 bp, Homo sapien
catattctgtcttcccctgtattgt

SEQ ID NO: 274391 - DNA, 25 bp, Homo sapien
cctggtgtcaaatgctctgcagctg

SEQ ID NO: 274392 - DNA, 25 bp, Homo sapien
gacaaaatagacaactttctgagac

SEQ ID NO: 274393 - DNA, 25 bp, Homo sapien
ggacaaaatagacaactttctgaga

SEQ ID NO: 274394 - DNA, 25 bp, Homo sapien
aagggacaaaatagacaactttctg

SEQ ID NO: 274395 - DNA, 25 bp, Homo sapien
gggacaaaatagacaactttctgag

SEQ ID NO: 274396 - DNA, 25 bp, Homo sapien
ggcaggatggcgcttggccgtggca

SEQ ID NO: 274397 - DNA, 25 bp, Homo sapien
gaggcaggatggcgcttggccgtgg

SEQ ID NO: 274398 - DNA, 25 bp, Homo sapien
aggatggcgcttggccgtggcaggg

SEQ ID NO: 274399 - DNA, 25 bp, Homo sapien
gcaggatggcgcttggccgtggcag

SEQ ID NO: 274400 - DNA, 25 bp, Homo sapien
gggtgtggagtaggaggagacacag

SEQ ID NO: 274401 - DNA, 25 bp, Homo sapien
acacagaagcgaccctcctggctgg

SEQ ID NO: 274402 - DNA, 25 bp, Homo sapien
gagacacagaagcgaccctcctggc

SEQ ID NO: 274403 - DNA, 25 bp, Homo sapien
tgtgggattcatgtgggtgtggagt

SEQ ID NO: 274404 - DNA, 25 bp, Homo sapien
tccaccgcgcttcagtttagcagtg

SEQ ID NO: 274405 - DNA, 25 bp, Homo sapien
tcagcagtgccatgcggctgctgct

SEQ ID NO: 274406 - DNA, 25 bp, Homo sapien
ctctgtgccctttcagcgatggcgt

SEQ ID NO: 274407 - DNA, 25 bp, Homo sapien
cagtttagcagtgcgcttacggtca

SEQ ID NO: 274408 - DNA, 25 bp, Homo sapien
ggtcttctgcggggttctggaataa

SEQ ID NO: 274409 - DNA, 25 bp, Homo sapien
tcttctgcggggttctggaataagg

SEQ ID NO: 274410 - DNA, 25 bp, Homo sapien
gtcttctgcggggttctggaataag

SEQ ID NO: 274411 - DNA, 25 bp, Homo sapien
aggtcttctgcggggttctggaata

SEQ ID NO: 274412 - DNA, 25 bp, Homo sapien
ttgaattgtttggaactgcagagga

SEQ ID NO: 274413 - DNA, 25 bp, Homo sapien
aatgcaaacagtactgtctggatat

SEQ ID NO: 274414 - DNA, 25 bp, Homo sapien
ctggatatgaataaggattgaattg

SEQ ID NO: 274415 - DNA, 25 bp, Homo sapien
gaggaattttccattggagaaacag

SEQ ID NO: 274416 - DNA, 25 bp, Homo sapien
gctgcacatttagcaaggctcaggc

SEQ ID NO: 274417 - DNA, 25 bp, Homo sapien
agctgcacatttagcaaggctcagg

SEQ ID NO: 274418 - DNA, 25 bp, Homo sapien
cagctgcacatttagcaaggctcag

SEQ ID NO: 274419 - DNA, 25 bp, Homo sapien
atttaatctcttttgagacagcatc

SEQ ID NO: 274420 - DNA, 25 bp, Homo sapien
ctgttgtgataaataggaggaggag

SEQ ID NO: 274421 - DNA, 25 bp, Homo sapien
ttgtgataaataggaggaggagctc

SEQ ID NO: 274422 - DNA, 25 bp, Homo sapien
caactcatcttcctgcctcgacctt

SEQ ID NO: 274423 - DNA, 25 bp, Homo sapien
tgggagccagagtaacaggaaagtc

SEQ ID NO: 274424 - DNA, 25 bp, Homo sapien
tggaattttggcagctcacataaac

SEQ ID NO: 274425 - DNA, 25 bp, Homo sapien
gcagctcacataaaccatggcccag

SEQ ID NO: 274426 - DNA, 25 bp, Homo sapien
ggcccagagggaagtatgatttcca

SEQ ID NO: 274427 - DNA, 25 bp, Homo sapien
ttgctcttgactgcctcgtcacttt

SEQ ID NO: 274428 - DNA, 25 bp, Homo sapien
ctttgctcttgactgcctcgtcact

SEQ ID NO: 274429 - DNA, 25 bp, Homo sapien
ttgactgcctcgtcactttccttac

SEQ ID NO: 274430 - DNA, 25 bp, Homo sapien
tcttgactgcctcgtcactttcctt

SEQ ID NO: 274431 - DNA, 25 bp, Homo sapien
taggagttactagtgacagcagcag

SEQ ID NO: 274432 - DNA, 25 bp, Homo sapien
agagacagatttggccacgcgcggt

SEQ ID NO: 274433 - DNA, 25 bp, Homo sapien
gatgagtgtgcccatagtcctgtgt

SEQ ID NO: 274434 - DNA, 25 bp, Homo sapien
cagcagcaggtgaaattaagaccct

SEQ ID NO: 274435 - DNA, 25 bp, Homo sapien
tacagttccaaacaccttctctttc

SEQ ID NO: 274436 - DNA, 25 bp, Homo sapien
tcacttgtcttgagcatctaagctg

SEQ ID NO: 274437 - DNA, 25 bp, Homo sapien
agaacagccgctcagttacagttcc

SEQ ID NO: 274438 - DNA, 25 bp, Homo sapien
ttgagcatctaagctgcagagggcg

SEQ ID NO: 274439 - DNA, 25 bp, Homo sapien
ccagcacgcatgctaggctgcccag

SEQ ID NO: 274440 - DNA, 25 bp, Homo sapien
ccccagcacgcatgctaggctgccc

SEQ ID NO: 274441 - DNA, 25 bp, Homo sapien
cccagcacgcatgctaggctgccca

SEQ ID NO: 274442 - DNA, 25 bp, Homo sapien
gtttgaacacagagcgacggcggaa

SEQ ID NO: 274443 - DNA, 25 bp, Homo sapien
ttctcctggtcaaatggatgtcagg

SEQ ID NO: 274444 - DNA, 25 bp, Homo sapien
caaaggcatggcgttgagggctttc

SEQ ID NO: 274445 - DNA, 25 bp, Homo sapien
atgtcagggtacagtgtgggcttta

SEQ ID NO: 274446 - DNA, 25 bp, Homo sapien
gcatattccttgaaatattcctggc

SEQ ID NO: 274447 - DNA, 25 bp, Homo sapien
agagtcaggaggtaattctgaagca

SEQ ID NO: 274448 - DNA, 25 bp, Homo sapien
ccaggagaggtgcattgaggttagt

SEQ ID NO: 274449 - DNA, 25 bp, Homo sapien
gaggttagttggcatattccttgaa

SEQ ID NO: 274450 - DNA, 25 bp, Homo sapien
ggcagaatacacaataatacaacca

SEQ ID NO: 274451 - DNA, 25 bp, Homo sapien
tccaaccgacataatagatatttcc

SEQ ID NO: 274452 - DNA, 25 bp, Homo sapien
aatacaaccattaatgtctatggag

SEQ ID NO: 274453 - DNA, 25 bp, Homo sapien
tcagaacttttcattgatgtggcag

SEQ ID NO: 274454 - DNA, 25 bp, Homo sapien
cattttctctagtagaaaattccaa

SEQ ID NO: 274455 - DNA, 25 bp, Homo sapien
tcattttctctagtagaaaattcca

SEQ ID NO: 274456 - DNA, 25 bp, Homo sapien
ggatctctgacccaaaatatatctt

SEQ ID NO: 274457 - DNA, 25 bp, Homo sapien
tggaagtgcactcgtttggacagtc

SEQ ID NO: 274458 - DNA, 25 bp, Homo sapien
tttatctgcctctaaaattgtcctc

SEQ ID NO: 274459 - DNA, 25 bp, Homo sapien
gaaagtatacatttagcaccatgaa

SEQ ID NO: 274460 - DNA, 25 bp, Homo sapien
tgaaagctgtggctccctgtacatt

SEQ ID NO: 274461 - DNA, 25 bp, Homo sapien
gctccctgtacatttgtggacttca

SEQ ID NO: 274462 - DNA, 25 bp, Homo sapien
gctgtggctccctgtacatttgtgg

SEQ ID NO: 274463 - DNA, 25 bp, Homo sapien
tgtggctccctgtacatttgtggac

SEQ ID NO: 274464 - DNA, 25 bp, Homo sapien
cgtccaccccattttcattgtgctt

SEQ ID NO: 274465 - DNA, 25 bp, Homo sapien
gtgcggatgccacgtaccacacact

SEQ ID NO: 274466 - DNA, 25 bp, Homo sapien
cagccacgtccaccccattttcatt

SEQ ID NO: 274467 - DNA, 25 bp, Homo sapien
cagtgcggatgccacgtaccacaca

SEQ ID NO: 274468 - DNA, 25 bp, Homo sapien
gctgtgaagccctagtcggtgagta

SEQ ID NO: 274469 - DNA, 25 bp, Homo sapien
tagtcggtgagtaccctccagtccc

SEQ ID NO: 274470 - DNA, 25 bp, Homo sapien
gcggtgatgcggctgtgaagcccta

SEQ ID NO: 274471 - DNA, 25 bp, Homo sapien
tgaagccctagtcggtgagtaccct

SEQ ID NO: 274472 - DNA, 25 bp, Homo sapien
tgcccctgccgaggcaggcgcccac

SEQ ID NO: 274473 - DNA, 25 bp, Homo sapien
ctgcccctgccgaggcaggcgccca

SEQ ID NO: 274474 - DNA, 25 bp, Homo sapien
gactactcagatgttacgcgacttg

SEQ ID NO: 274475 - DNA, 25 bp, Homo sapien
aaataaacgttttcgcctagtgcag

SEQ ID NO: 274476 - DNA, 25 bp, Homo sapien
gaatttccaaccttcgaggtgctag

SEQ ID NO: 274477 - DNA, 25 bp, Homo sapien
cgggctccggcatcaagaggttttc

SEQ ID NO: 274478 - DNA, 25 bp, Homo sapien
tggcagccattcctatacataaagt

SEQ ID NO: 274479 - DNA, 25 bp, Homo sapien
taaagtcaataatcatgttcttcag

SEQ ID NO: 274480 - DNA, 25 bp, Homo sapien
ggctagacatgctcaactgcagtgg

SEQ ID NO: 274481 - DNA, 25 bp, Homo sapien
tcttcagaagactccaggctagaca

SEQ ID NO: 274482 - DNA, 25 bp, Homo sapien
ttgctactaggaagatggaattcac

SEQ ID NO: 274483 - DNA, 25 bp, Homo sapien
gaattcacttcagattttggtccgt

SEQ ID NO: 274484 - DNA, 25 bp, Homo sapien
ctggtgtcttgctactaggaagatg

SEQ ID NO: 274485 - DNA, 25 bp, Homo sapien
tttggtccgttggtgacttgattaa

SEQ ID NO: 274486 - DNA, 25 bp, Homo sapien
cagagctggagggtggccaagccca

SEQ ID NO: 274487 - DNA, 25 bp, Homo sapien
tggttttgcaatatcgtggtggtag

SEQ ID NO: 274488 - DNA, 25 bp, Homo sapien
caggccccctggttttgcaatatcg

SEQ ID NO: 274489 - DNA, 25 bp, Homo sapien
tcgcaggacagcagtgatttctgca

SEQ ID NO: 274490 - DNA, 25 bp, Homo sapien
atcgtggtggtagttctaagtatcc

SEQ ID NO: 274491 - DNA, 25 bp, Homo sapien
tgttggccaatcagacgaggactgc

SEQ ID NO: 274492 - DNA, 25 bp, Homo sapien
tacccaaagctcagatcggaccatg

SEQ ID NO: 274493 - DNA, 25 bp, Homo sapien
tgagtgacgtcccaaggtaacagag

SEQ ID NO: 274494 - DNA, 25 bp, Homo sapien
aaagttgctgccgaaaagtcatgcc

SEQ ID NO: 274495 - DNA, 25 bp, Homo sapien
tgcttctatcactgtttgtagcctc

SEQ ID NO: 274496 - DNA, 25 bp, Homo sapien
gcttctatcactgtttgtagcctcc

SEQ ID NO: 274497 - DNA, 25 bp, Homo sapien
cagcaccagccaatgcaggtcggga

SEQ ID NO: 274498 - DNA, 25 bp, Homo sapien
accagccaatgcaggtcgggaccat

SEQ ID NO: 274499 - DNA, 25 bp, Homo sapien
acatggtttaagctttgcacagctg

SEQ ID NO: 274500 - DNA, 25 bp, Homo sapien
agggtcacatggtttaagctttgca

SEQ ID NO: 274501 - DNA, 25 bp, Homo sapien
cagtgttgtgctttcagggtcacat

SEQ ID NO: 274502 - DNA, 25 bp, Homo sapien
tcagtgttgtgctttcagggtcaca

SEQ ID NO: 274503 - DNA, 25 bp, Homo sapien
cggcagcaagggaatgtaaaccagc

SEQ ID NO: 274504 - DNA, 25 bp, Homo sapien
tcaaaggagttgctcgaggcaccgc

SEQ ID NO: 274505 - DNA, 25 bp, Homo sapien
caccgcgtgattctgcggcagcaag

SEQ ID NO: 274506 - DNA, 25 bp, Homo sapien
gcttcctgtgtggtccggaatcggt

SEQ ID NO: 274507 - DNA, 25 bp, Homo sapien
gggcaaagccaggaagggacacaca

SEQ ID NO: 274508 - DNA, 25 bp, Homo sapien
ggcaaagccaggaagggacacacag

SEQ ID NO: 274509 - DNA, 25 bp, Homo sapien
gggacacacagccacgggctgaacg

SEQ ID NO: 274510 - DNA, 25 bp, Homo sapien
acacagccacgggctgaacgcaagc

SEQ ID NO: 274511 - DNA, 25 bp, Homo sapien
cttcaaggagcacacgctcatttca

SEQ ID NO: 274512 - DNA, 25 bp, Homo sapien
aaggagcacacgctcatttcatcca

SEQ ID NO: 274513 - DNA, 25 bp, Homo sapien
aggagcacacgctcatttcatccat

SEQ ID NO: 274514 - DNA, 25 bp, Homo sapien
tcaaggagcacacgctcatttcatc

SEQ ID NO: 274515 - DNA, 25 bp, Homo sapien
tgcatgacttgcagcttagcaagcc

SEQ ID NO: 274516 - DNA, 25 bp, Homo sapien
cgatgacacagctttgaccgacggg

SEQ ID NO: 274517 - DNA, 25 bp, Homo sapien
cactgcctgcccgttggtgggcaca

SEQ ID NO: 274518 - DNA, 25 bp, Homo sapien
gcaagcctctgagcgatgacacagc

SEQ ID NO: 274519 - DNA, 25 bp, Homo sapien
aggacacacggcactttagtcactc

SEQ ID NO: 274520 - DNA, 25 bp, Homo sapien
ggacacacggcactttagtcactcc

SEQ ID NO: 274521 - DNA, 25 bp, Homo sapien
gggatgagaagaaccgggtgagaga

SEQ ID NO: 274522 - DNA, 25 bp, Homo sapien
tgctggcaggcttgccgaaccaaag

SEQ ID NO: 274523 - DNA, 25 bp, Homo sapien
aagtgatggtgggaaggaaacccag

SEQ ID NO: 274524 - DNA, 25 bp, Homo sapien
tctgctgcaaaaggagcagacgtcc

SEQ ID NO: 274525 - DNA, 25 bp, Homo sapien
tttttctgacgctgagcagctcaga

SEQ ID NO: 274526 - DNA, 25 bp, Homo sapien
tgaatgagtaggtgagttcatagtt

SEQ ID NO: 274527 - DNA, 25 bp, Homo sapien
aatgagtaggtgagttcatagttct

SEQ ID NO: 274528 - DNA, 25 bp, Homo sapien
gaatgagtaggtgagttcatagttc

SEQ ID NO: 274529 - DNA, 25 bp, Homo sapien
tgtcattcccctactgtactgtgtt

SEQ ID NO: 274530 - DNA, 25 bp, Homo sapien
tgtgtcattcccctactgtactgtg

SEQ ID NO: 274531 - DNA, 25 bp, Homo sapien
ttccacagttccttatagttatttg

SEQ ID NO: 274532 - DNA, 25 bp, Homo sapien
tccttatagttatttgtgtcattcc

SEQ ID NO: 274533 - DNA, 25 bp, Homo sapien
gtcaacctagcctgtcttgccttct

SEQ ID NO: 274534 - DNA, 25 bp, Homo sapien
gacgtcaacctagcctgtcttgcct

SEQ ID NO: 274535 - DNA, 25 bp, Homo sapien
cacactggttccacatttcaggcca

SEQ ID NO: 274536 - DNA, 25 bp, Homo sapien
atctgacgtcaacctagcctgtctt

SEQ ID NO: 274537 - DNA, 25 bp, Homo sapien
tgttccttccatttggcagagggct

SEQ ID NO: 274538 - DNA, 25 bp, Homo sapien
cagagggctcagtgtggctccttgc

SEQ ID NO: 274539 - DNA, 25 bp, Homo sapien
taggctctggaacttggggttgttc

SEQ ID NO: 274540 - DNA, 25 bp, Homo sapien
cttccatttggcagagggctcagtg

SEQ ID NO: 274541 - DNA, 25 bp, Homo sapien
cggcggcgcggagtactctaggagt

SEQ ID NO: 274542 - DNA, 25 bp, Homo sapien
cccggcggcgcggagtactctagga

SEQ ID NO: 274543 - DNA, 25 bp, Homo sapien
gcggcgcggagtactctaggagttg

SEQ ID NO: 274544 - DNA, 25 bp, Homo sapien
gcagcgggcgcggacatctttgcgc

SEQ ID NO: 274545 - DNA, 25 bp, Homo sapien
caaaagctgggctcgcctggaggct

SEQ ID NO: 274546 - DNA, 25 bp, Homo sapien
cacgtcagatttgcaggattcttgc

SEQ ID NO: 274547 - DNA, 25 bp, Homo sapien
gctcctggttacgatcaaagactca

SEQ ID NO: 274548 - DNA, 25 bp, Homo sapien
tccctggaatacctggccctagctt

SEQ ID NO: 274549 - DNA, 25 bp, Homo sapien
aggctccgggatatcccgagttggc

SEQ ID NO: 274550 - DNA, 25 bp, Homo sapien
cctccccagaggctccgggatatcc

SEQ ID NO: 274551 - DNA, 25 bp, Homo sapien
gtcctcagacgtcggagtgaccgcc

SEQ ID NO: 274552 - DNA, 25 bp, Homo sapien
aggtcctcagacgtcggagtgaccg

SEQ ID NO: 274553 - DNA, 25 bp, Homo sapien
tgcagaggtcgaagaatcgctcttc

SEQ ID NO: 274554 - DNA, 25 bp, Homo sapien
gaggggggctgcagaggtcgaagaa

SEQ ID NO: 274555 - DNA, 25 bp, Homo sapien
cagaggtcgaagaatcgctcttcat

SEQ ID NO: 274556 - DNA, 25 bp, Homo sapien
ggctgcagaggtcgaagaatcgctc

SEQ ID NO: 274557 - DNA, 25 bp, Homo sapien
ctgctgcgcaggggtcccccgagcc

SEQ ID NO: 274558 - DNA, 25 bp, Homo sapien
gctgctgcgcaggggtcccccgagc

SEQ ID NO: 274559 - DNA, 25 bp, Homo sapien
tgctgcgcaggggtcccccgagccc

SEQ ID NO: 274560 - DNA, 25 bp, Homo sapien
cggctcgctgctgcgcaggggtccc

SEQ ID NO: 274561 - DNA, 25 bp, Homo sapien
ccagaaggtccacggccggcgcccg

SEQ ID NO: 274562 - DNA, 25 bp, Homo sapien
cagaaggtccacggccggcgcccgg

SEQ ID NO: 274563 - DNA, 25 bp, Homo sapien
gttcctctgccacggcgtggttggc

SEQ ID NO: 274564 - DNA, 25 bp, Homo sapien
gcgggttcctctgccacggcgtggt

SEQ ID NO: 274565 - DNA, 25 bp, Homo sapien
gccacggcgtggttggccagactct

SEQ ID NO: 274566 - DNA, 25 bp, Homo sapien
agcgccgcccggaagtccaggtgca

SEQ ID NO: 274567 - DNA, 25 bp, Homo sapien
tcattgtaccttggaacaaggagca

SEQ ID NO: 274568 - DNA, 25 bp, Homo sapien
ccatcatcagccaaggtcaggaata

SEQ ID NO: 274569 - DNA, 25 bp, Homo sapien
gaggacttttaccacctgcttactg

SEQ ID NO: 274570 - DNA, 25 bp, Homo sapien
tcctctaattggaccagaacgctgc

SEQ ID NO: 274571 - DNA, 25 bp, Homo sapien
tcagttagaagtggttcccctccat

SEQ ID NO: 274572 - DNA, 25 bp, Homo sapien
cagttagaagtggttcccctccatt

SEQ ID NO: 274573 - DNA, 25 bp, Homo sapien
ttcagttagaagtggttcccctcca

SEQ ID NO: 274574 - DNA, 25 bp, Homo sapien
cttgccaccgatccatttctgccag

SEQ ID NO: 274575 - DNA, 25 bp, Homo sapien
ccaggagaggacttcttgccaccga

SEQ ID NO: 274576 - DNA, 25 bp, Homo sapien
cctggtaatactgaaggacccagga

SEQ ID NO: 274577 - DNA, 25 bp, Homo sapien
ggacctggtaatactgaaggaccca

SEQ ID NO: 274578 - DNA, 25 bp, Homo sapien
cagctccaggactttggggggtagc

SEQ ID NO: 274579 - DNA, 25 bp, Homo sapien
cacagctccaggactttggggggta

SEQ ID NO: 274580 - DNA, 25 bp, Homo sapien
agctccaggactttggggggtagct

SEQ ID NO: 274581 - DNA, 25 bp, Homo sapien
acagctccaggactttggggggtag

SEQ ID NO: 274582 - DNA, 25 bp, Homo sapien
taagcaagttgtgccaagtcccgct

SEQ ID NO: 274583 - DNA, 25 bp, Homo sapien
ttctggtactgccaccggccgacag

SEQ ID NO: 274584 - DNA, 25 bp, Homo sapien
cggccgacagtcaagcagttccaca

SEQ ID NO: 274585 - DNA, 25 bp, Homo sapien
ctaagcaagttgtgccaagtcccgc

SEQ ID NO: 274586 - DNA, 25 bp, Homo sapien
gcacccgctgcacgtgaaattctgc

SEQ ID NO: 274587 - DNA, 25 bp, Homo sapien
gtgaatggcctgaagtacatccagt

SEQ ID NO: 274588 - DNA, 25 bp, Homo sapien
gcctccgataagcagcccagaggca

SEQ ID NO: 274589 - DNA, 25 bp, Homo sapien
gcctgaagtacatccagtcgccgct

SEQ ID NO: 274590 - DNA, 25 bp, Homo sapien
gtgcttgcttctaagacctgagcag

SEQ ID NO: 274591 - DNA, 25 bp, Homo sapien
tgcttgcttctaagacctgagcagg

SEQ ID NO: 274592 - DNA, 25 bp, Homo sapien
tgtgcttgcttctaagacctgagca

SEQ ID NO: 274593 - DNA, 25 bp, Homo sapien
tgacaggaacttgtgggagacagag

SEQ ID NO: 274594 - DNA, 25 bp, Homo sapien
gctcaccgcagagtcccaaagctgg

SEQ ID NO: 274595 - DNA, 25 bp, Homo sapien
gcagagtcccaaagctggcgaacca

SEQ ID NO: 274596 - DNA, 25 bp, Homo sapien
agtcccaaagctggcgaaccaacat

SEQ ID NO: 274597 - DNA, 25 bp, Homo sapien
gatcaaatctcaccaccaggagaca

SEQ ID NO: 274598 - DNA, 25 bp, Homo sapien
tgaggttctagtcagagttcagccc

SEQ ID NO: 274599 - DNA, 25 bp, Homo sapien
tgctctcatagactccaggactggc

SEQ ID NO: 274600 - DNA, 25 bp, Homo sapien
tcagtccatgttcaggagtcagcag

SEQ ID NO: 274601 - DNA, 25 bp, Homo sapien
agttcagccctagaaaaagtggagg

SEQ ID NO: 274602 - DNA, 25 bp, Homo sapien
ctggtagaggcgagaaaatgcagcc

SEQ ID NO: 274603 - DNA, 25 bp, Homo sapien
tcagtcacggatgcggagctggtag

SEQ ID NO: 274604 - DNA, 25 bp, Homo sapien
agaaaatgcagccttccggatccag

SEQ ID NO: 274605 - DNA, 25 bp, Homo sapien
ccttccggatccagcggaagagctg

SEQ ID NO: 274606 - DNA, 25 bp, Homo sapien
gagattaggctggtcccatttcccc

SEQ ID NO: 274607 - DNA, 25 bp, Homo sapien
gcgcctgtggatgtgtcgctctgtc

SEQ ID NO: 274608 - DNA, 25 bp, Homo sapien
gacacagtgcactccgcgagattag

SEQ ID NO: 274609 - DNA, 25 bp, Homo sapien
cgcgaccagccgaagtagggtgcaa

SEQ ID NO: 274610 - DNA, 25 bp, Homo sapien
tataggcgtgcaccacatctagcta

SEQ ID NO: 274611 - DNA, 25 bp, Homo sapien
actataggcgtgcaccacatctagc

SEQ ID NO: 274612 - DNA, 25 bp, Homo sapien
gactataggcgtgcaccacatctag

SEQ ID NO: 274613 - DNA, 25 bp, Homo sapien
taggcgtgcaccacatctagctaat

SEQ ID NO: 274614 - DNA, 25 bp, Homo sapien
cagcttcaagcgcatggcaagacca

SEQ ID NO: 274615 - DNA, 25 bp, Homo sapien
agagcaagacttggccaggacaacc

SEQ ID NO: 274616 - DNA, 25 bp, Homo sapien
cagaggcactgagcgtaacagagca

SEQ ID NO: 274617 - DNA, 25 bp, Homo sapien
cagtgcaggcaagaagaggccctct

SEQ ID NO: 274618 - DNA, 25 bp, Homo sapien
caaggaaaagctagcaagcaccttc

SEQ ID NO: 274619 - DNA, 25 bp, Homo sapien
tccttgcacagaaactcataagatg

SEQ ID NO: 274620 - DNA, 25 bp, Homo sapien
gcacagcagtgctctacgcttcctt

SEQ ID NO: 274621 - DNA, 25 bp, Homo sapien
ctcataagatgcttgtggctggtga

SEQ ID NO: 274622 - DNA, 25 bp, Homo sapien
gtcccagctactcgggaggctgagg

SEQ ID NO: 274623 - DNA, 25 bp, Homo sapien
gggcacctgtagtcccagctactcg

SEQ ID NO: 274624 - DNA, 25 bp, Homo sapien
aaaaatattagccaggcgaggtggt

SEQ ID NO: 274625 - DNA, 25 bp, Homo sapien
gtagtcccagctactcgggaggctg

SEQ ID NO: 274626 - DNA, 25 bp, Homo sapien
ctgtgaagtttacctactttactca

SEQ ID NO: 274627 - DNA, 25 bp, Homo sapien
tgtgaagtttacctactttactcat

SEQ ID NO: 274628 - DNA, 25 bp, Homo sapien
aagcgatatgaaacaggtcccggga

SEQ ID NO: 274629 - DNA, 25 bp, Homo sapien
tatctagggtagttaagtgggccca

SEQ ID NO: 274630 - DNA, 25 bp, Homo sapien
cacatacacgcagaatagggatcac

SEQ ID NO: 274631 - DNA, 25 bp, Homo sapien
tagggatcacctgcacgaagctatg

SEQ ID NO: 274632 - DNA, 25 bp, Homo sapien
taaacgtggcacagtgtgtgtagtg

SEQ ID NO: 274633 - DNA, 25 bp, Homo sapien
aatagagagcgggagtagaaagact

SEQ ID NO: 274634 - DNA, 25 bp, Homo sapien
aagaaaagtttactatcagagactg

SEQ ID NO: 274635 - DNA, 25 bp, Homo sapien
tcagagactgtatctggagggataa

SEQ ID NO: 274636 - DNA, 25 bp, Homo sapien
aacggaatgacacacagctatgaag

SEQ ID NO: 274637 - DNA, 25 bp, Homo sapien
tgtgaccccatcacgcaacggaatg

SEQ ID NO: 274638 - DNA, 25 bp, Homo sapien
tctgtgaccccatcacgcaacggaa

SEQ ID NO: 274639 - DNA, 25 bp, Homo sapien
catcacgcaacggaatgacacacag

SEQ ID NO: 274640 - DNA, 25 bp, Homo sapien
ctgtacttgtaggctttggaaagca

SEQ ID NO: 274641 - DNA, 25 bp, Homo sapien
ctaaacttggggctgctgtacttgt

SEQ ID NO: 274642 - DNA, 25 bp, Homo sapien
ttggggctgctgtacttgtaggctt

SEQ ID NO: 274643 - DNA, 25 bp, Homo sapien
ggctgctgtacttgtaggctttgga

SEQ ID NO: 274644 - DNA, 25 bp, Homo sapien
gaggtgccctactcgcggttcatgt

SEQ ID NO: 274645 - DNA, 25 bp, Homo sapien
tgtgaactggcctgcttgtatctcc

SEQ ID NO: 274646 - DNA, 25 bp, Homo sapien
gaggccaccttctagatgtagaaag

SEQ ID NO: 274647 - DNA, 25 bp, Homo sapien
gaaactgaacgtccagagtgtgaac

SEQ ID NO: 274648 - DNA, 25 bp, Homo sapien
acaggccccatctgtggatgtgagg

SEQ ID NO: 274649 - DNA, 25 bp, Homo sapien
tggccaggccgtgggtgggttgctt

SEQ ID NO: 274650 - DNA, 25 bp, Homo sapien
aaatcagtagaattcccacaggccc

SEQ ID NO: 274651 - DNA, 25 bp, Homo sapien
aggccaaagtccatcggccccacgg

SEQ ID NO: 274652 - DNA, 25 bp, Homo sapien
cgtacaccaccgctggaggaatgca

SEQ ID NO: 274653 - DNA, 25 bp, Homo sapien
ggtgggatcacgagtcctgtatttc

SEQ ID NO: 274654 - DNA, 25 bp, Homo sapien
tcctaccagcccgaaacactgaggt

SEQ ID NO: 274655 - DNA, 25 bp, Homo sapien
accgtgcccactgtctgtcctgtag

SEQ ID NO: 274656 - DNA, 25 bp, Homo sapien
taatttttacatatcccagtctctg

SEQ ID NO: 274657 - DNA, 25 bp, Homo sapien
tgcaacatgcattggtagaatcgtg

SEQ ID NO: 274658 - DNA, 25 bp, Homo sapien
cgtgtgatggtcttttgtgatactt

SEQ ID NO: 274659 - DNA, 25 bp, Homo sapien
aggactgcgtgtctgctcctgagct

SEQ ID NO: 274660 - DNA, 25 bp, Homo sapien
ttgcaataccttaacagtgctgaaa

SEQ ID NO: 274661 - DNA, 25 bp, Homo sapien
agacaccagagggttgggcattctt

SEQ ID NO: 274662 - DNA, 25 bp, Homo sapien
tcatactgcaatgttgctagataca

SEQ ID NO: 274663 - DNA, 25 bp, Homo sapien
gggcattcttgcaataccttaacag

SEQ ID NO: 274664 - DNA, 25 bp, Homo sapien
gatggcctcattccaggtgctatgg

SEQ ID NO: 274665 - DNA, 25 bp, Homo sapien
cagctctaccatttaaaagcggtgg

SEQ ID NO: 274666 - DNA, 25 bp, Homo sapien
ggatggccctctaccgcatttggaa

SEQ ID NO: 274667 - DNA, 25 bp, Homo sapien
gataatatctacctcgctggcttga

SEQ ID NO: 274668 - DNA, 25 bp, Homo sapien
ctttaagaaatcagagccggccggg

SEQ ID NO: 274669 - DNA, 25 bp, Homo sapien
tttaagaaatcagagccggccgggc

SEQ ID NO: 274670 - DNA, 25 bp, Homo sapien
aaggcttagcactttaagaaatcag

SEQ ID NO: 274671 - DNA, 25 bp, Homo sapien
ggtgaacttgctaaatgaagagatg

SEQ ID NO: 274672 - DNA, 25 bp, Homo sapien
tgaacttgctaaatgaagagatggg

SEQ ID NO: 274673 - DNA, 25 bp, Homo sapien
actaacggccatagctgccattggg

SEQ ID NO: 274674 - DNA, 25 bp, Homo sapien
aaaaaactaacggccatagctgcca

SEQ ID NO: 274675 - DNA, 25 bp, Homo sapien
actaggatctatatccatactggtt

SEQ ID NO: 274676 - DNA, 25 bp, Homo sapien
aggagaagaaactaggatctatatc

SEQ ID NO: 274677 - DNA, 25 bp, Homo sapien
ggaataaaacagagtacataatata

SEQ ID NO: 274678 - DNA, 25 bp, Homo sapien
ctggtcagtgtagtaagaccccatc

SEQ ID NO: 274679 - DNA, 25 bp, Homo sapien
gaggtccagtcatcctacgtggcag

SEQ ID NO: 274680 - DNA, 25 bp, Homo sapien
gactgttaacacgaacctggaaaga

SEQ ID NO: 274681 - DNA, 25 bp, Homo sapien
tcactaaaaggtaaggcagacagca

SEQ ID NO: 274682 - DNA, 25 bp, Homo sapien
gaaagcatttcacgtataccataag

SEQ ID NO: 274683 - DNA, 25 bp, Homo sapien
gcatggttactaacatggattaggg

SEQ ID NO: 274684 - DNA, 25 bp, Homo sapien
ccccaaagatatgtttgcctaaaat

SEQ ID NO: 274685 - DNA, 25 bp, Homo sapien
ttagttagaaagagctggccaggca

SEQ ID NO: 274686 - DNA, 25 bp, Homo sapien
ggaataaggatcttgatgtaattga

SEQ ID NO: 274687 - DNA, 25 bp, Homo sapien
gatagctctttttcacacaggtcag

SEQ ID NO: 274688 - DNA, 25 bp, Homo sapien
ccaagcagttgagggaaaagggtca

SEQ ID NO: 274689 - DNA, 25 bp, Homo sapien
tctggatcgggttttgacacaagtc

SEQ ID NO: 274690 - DNA, 25 bp, Homo sapien
gctgacttgcccacatgcaggatga

SEQ ID NO: 274691 - DNA, 25 bp, Homo sapien
taccagctcctaaaagaacacctaa

SEQ ID NO: 274692 - DNA, 25 bp, Homo sapien
caaggctctgtcacagatgggtaac

SEQ ID NO: 274693 - DNA, 25 bp, Homo sapien
tggcctcgtgacatccaaggctctg

SEQ ID NO: 274694 - DNA, 25 bp, Homo sapien
cagactgtgcagagaacactgaggc

SEQ ID NO: 274695 - DNA, 25 bp, Homo sapien
gagcaaacgatatcttaccattaga

SEQ ID NO: 274696 - DNA, 25 bp, Homo sapien
cccatgaagtccagagagcaaacga

SEQ ID NO: 274697 - DNA, 25 bp, Homo sapien
gctgggctatgcttcagagagtctg

SEQ ID NO: 274698 - DNA, 25 bp, Homo sapien
gatcacataactggtaagagctaga

SEQ ID NO: 274699 - DNA, 25 bp, Homo sapien
gcttttattcctcacaacaaacctc

SEQ ID NO: 274700 - DNA, 25 bp, Homo sapien
atggcttttattcctcacaacaaac

SEQ ID NO: 274701 - DNA, 25 bp, Homo sapien
tggcttttattcctcacaacaaacc

SEQ ID NO: 274702 - DNA, 25 bp, Homo sapien
gggaggctgccctattaccaaagcg

SEQ ID NO: 274703 - DNA, 25 bp, Homo sapien
ggcgggcaggtcacaaaggcccctc

SEQ ID NO: 274704 - DNA, 25 bp, Homo sapien
gcggctcaaatctccgggtcctcgg

SEQ ID NO: 274705 - DNA, 25 bp, Homo sapien
gcgagagcagccttcgtgaccccag

SEQ ID NO: 274706 - DNA, 25 bp, Homo sapien
cgcgccgggcccgcagctgcccccc

SEQ ID NO: 274707 - DNA, 25 bp, Homo sapien
gacgccggggacaggcgcgccgggc

SEQ ID NO: 274708 - DNA, 25 bp, Homo sapien
cgggcccgcagctgccccccggcat

SEQ ID NO: 274709 - DNA, 25 bp, Homo sapien
cgccgggcccgcagctgccccccgg

SEQ ID NO: 274710 - DNA, 25 bp, Homo sapien
gctccagatacagccgcctccgccg

SEQ ID NO: 274711 - DNA, 25 bp, Homo sapien
gctgccgctgtcctcgcccgcgcac

SEQ ID NO: 274712 - DNA, 25 bp, Homo sapien
gggctgtgcgtgcagcaaacccaag

SEQ ID NO: 274713 - DNA, 25 bp, Homo sapien
tctgaccgctggaaagacttgggag

SEQ ID NO: 274714 - DNA, 25 bp, Homo sapien
aaagtccttcgactctgaccgctgg

SEQ ID NO: 274715 - DNA, 25 bp, Homo sapien
tgtgcgtgcagcaaacccaagccgc

SEQ ID NO: 274716 - DNA, 25 bp, Homo sapien
ctgccccagccgctgccctgtgagc

SEQ ID NO: 274717 - DNA, 25 bp, Homo sapien
gccccagccgctgccctgtgagcca

SEQ ID NO: 274718 - DNA, 25 bp, Homo sapien
tgccctgtgagccaaggcccctcac

SEQ ID NO: 274719 - DNA, 25 bp, Homo sapien
tgagccaaggcccctcactcggagg

SEQ ID NO: 274720 - DNA, 25 bp, Homo sapien
gacttccagcataagaggccggagg

SEQ ID NO: 274721 - DNA, 25 bp, Homo sapien
agacttccagcataagaggccggag

SEQ ID NO: 274722 - DNA, 25 bp, Homo sapien
acttccagcataagaggccggaggg

SEQ ID NO: 274723 - DNA, 25 bp, Homo sapien
ttccagcataagaggccggagggcg

SEQ ID NO: 274724 - DNA, 25 bp, Homo sapien
tctgggcttgtagagctcagacaag

SEQ ID NO: 274725 - DNA, 25 bp, Homo sapien
tcagacaagttctgtcctccttggt

SEQ ID NO: 274726 - DNA, 25 bp, Homo sapien
tgctcctgtctctctcagttctatt

SEQ ID NO: 274727 - DNA, 25 bp, Homo sapien
cagttctattttcaatctgggcttg

SEQ ID NO: 274728 - DNA, 25 bp, Homo sapien
ccacagagcagacccagtgctgaag

SEQ ID NO: 274729 - DNA, 25 bp, Homo sapien
ttcggcctggaagttccacagagca

SEQ ID NO: 274730 - DNA, 25 bp, Homo sapien
aagcccgtgggacgcatcctcacgt

SEQ ID NO: 274731 - DNA, 25 bp, Homo sapien
gtgctgaagcccgtgggacgcatcc

SEQ ID NO: 274732 - DNA, 25 bp, Homo sapien
ggctcaggcactgagctcgactcct

SEQ ID NO: 274733 - DNA, 25 bp, Homo sapien
cagcccacagctcccgcatcgagct

SEQ ID NO: 274734 - DNA, 25 bp, Homo sapien
tcaggcactgagctcgactcctgca

SEQ ID NO: 274735 - DNA, 25 bp, Homo sapien
tcgagctcccggctcaggcactgag

SEQ ID NO: 274736 - DNA, 25 bp, Homo sapien
agccagtagagtccacgtcaaagtg

SEQ ID NO: 274737 - DNA, 25 bp, Homo sapien
ccagtagagtccacgtcaaagtgtg

SEQ ID NO: 274738 - DNA, 25 bp, Homo sapien
gcattttccagctccgggtaaccca

SEQ ID NO: 274739 - DNA, 25 bp, Homo sapien
agtagagtccacgtcaaagtgtggg

SEQ ID NO: 274740 - DNA, 25 bp, Homo sapien
cagctctatagcagctggaccagga

SEQ ID NO: 274741 - DNA, 25 bp, Homo sapien
caaggaagaactggcgatcatggca

SEQ ID NO: 274742 - DNA, 25 bp, Homo sapien
gggctaattccaaaccacaagattc

SEQ ID NO: 274743 - DNA, 25 bp, Homo sapien
tgctctaaaggttgcttcccagggt

SEQ ID NO: 274744 - DNA, 25 bp, Homo sapien
ggagagggaagcaacgaggtcagag

SEQ ID NO: 274745 - DNA, 25 bp, Homo sapien
ggggagagggaagcaacgaggtcag

SEQ ID NO: 274746 - DNA, 25 bp, Homo sapien
gggagagggaagcaacgaggtcaga

SEQ ID NO: 274747 - DNA, 25 bp, Homo sapien
gagagggaagcaacgaggtcagaga

SEQ ID NO: 274748 - DNA, 25 bp, Homo sapien
gagcatcaaaagtgccgtctgcctg

SEQ ID NO: 274749 - DNA, 25 bp, Homo sapien
taggctccagatctatcatgacggc

SEQ ID NO: 274750 - DNA, 25 bp, Homo sapien
tctcgctgaaaaaggtggtgaagga

SEQ ID NO: 274751 - DNA, 25 bp, Homo sapien
cttggcccacgtggactgatatgca

SEQ ID NO: 274752 - DNA, 25 bp, Homo sapien
cgagatgttctctgtggaggggaac

SEQ ID NO: 274753 - DNA, 25 bp, Homo sapien
tggaggggaactccgcccccactca

SEQ ID NO: 274754 - DNA, 25 bp, Homo sapien
ctactgtgggccaatgcctctgcag

SEQ ID NO: 274755 - DNA, 25 bp, Homo sapien
tactgtgggccaatgcctctgcagt

SEQ ID NO: 274756 - DNA, 25 bp, Homo sapien
aagagaggaagaccattaggtccta

SEQ ID NO: 274757 - DNA, 25 bp, Homo sapien
tccaagagaggaagaccattaggtc

SEQ ID NO: 274758 - DNA, 25 bp, Homo sapien
cttccaagagaggaagaccattagg

SEQ ID NO: 274759 - DNA, 25 bp, Homo sapien
ccaagagaggaagaccattaggtcc

SEQ ID NO: 274760 - DNA, 25 bp, Homo sapien
cagcttccgtatgcggtccagcacc

SEQ ID NO: 274761 - DNA, 25 bp, Homo sapien
agctggcggtaggttcctgcccgaa

SEQ ID NO: 274762 - DNA, 25 bp, Homo sapien
ggtccagcaccaggtcaatgctctc

SEQ ID NO: 274763 - DNA, 25 bp, Homo sapien
gctctccttgcccaccgtgtagtgg

SEQ ID NO: 274764 - DNA, 25 bp, Homo sapien
ccgtcccctgccctcctgatcttac

SEQ ID NO: 274765 - DNA, 25 bp, Homo sapien
tagcgacattcacatccttgggcac

SEQ ID NO: 274766 - DNA, 25 bp, Homo sapien
aatccagggagaggcgttccatcag

SEQ ID NO: 274767 - DNA, 25 bp, Homo sapien
taggtagggcgctcaatgtcaaggt

SEQ ID NO: 274768 - DNA, 25 bp, Homo sapien
ggagctggttatctcggccacagag

SEQ ID NO: 274769 - DNA, 25 bp, Homo sapien
cagactgcgggcacttggttaccac

SEQ ID NO: 274770 - DNA, 25 bp, Homo sapien
taccattcagcattcctggtcctgg

SEQ ID NO: 274771 - DNA, 25 bp, Homo sapien
gaatctgacaaaagaccatgggtgg

SEQ ID NO: 274772 - DNA, 25 bp, Homo sapien
ttgcctgccggtccagctcagaggg

SEQ ID NO: 274773 - DNA, 25 bp, Homo sapien
ggacatcttggtcacttggcatggc

SEQ ID NO: 274774 - DNA, 25 bp, Homo sapien
agatacaagtcagccagaggataac

SEQ ID NO: 274775 - DNA, 25 bp, Homo sapien
cagccagaggataactcaggatggg

SEQ ID NO: 274776 - DNA, 25 bp, Homo sapien
ggctatgggatgcaacaggcgggat

SEQ ID NO: 274777 - DNA, 25 bp, Homo sapien
tgctgagcatgcagacggcccgctg

SEQ ID NO: 274778 - DNA, 25 bp, Homo sapien
tacatgaggtcgaacttgtggtcga

SEQ ID NO: 274779 - DNA, 25 bp, Homo sapien
ttggcgtacatgaggtcgaacttgt

SEQ ID NO: 274780 - DNA, 25 bp, Homo sapien
ccacggtcgggggctggtagttgat

SEQ ID NO: 274781 - DNA, 25 bp, Homo sapien
cagctaagtcttccctggcctcaga

SEQ ID NO: 274782 - DNA, 25 bp, Homo sapien
cagggcagctaagtcttccctggcc

SEQ ID NO: 274783 - DNA, 25 bp, Homo sapien
ttctccagggcagctaagtcttccc

SEQ ID NO: 274784 - DNA, 25 bp, Homo sapien
aaacgaatcagtccccacttcttca

SEQ ID NO: 274785 - DNA, 25 bp, Homo sapien
gcgggctatagacccactcatgtga

SEQ ID NO: 274786 - DNA, 25 bp, Homo sapien
tcctcgcatgtgaaactgggctgca

SEQ ID NO: 274787 - DNA, 25 bp, Homo sapien
ctaagtctagatgatgcccggagcg

SEQ ID NO: 274788 - DNA, 25 bp, Homo sapien
tcagtgtccacttagcccagtcgtg

SEQ ID NO: 274789 - DNA, 25 bp, Homo sapien
gatgaattaaacattgaacctccct

SEQ ID NO: 274790 - DNA, 25 bp, Homo sapien
caatttgttgccttaatggagaacc

SEQ ID NO: 274791 - DNA, 25 bp, Homo sapien
gcatgggtttcagggtgcaactcaa

SEQ ID NO: 274792 - DNA, 25 bp, Homo sapien
ggcactccctatcctctggcaattt

SEQ ID NO: 274793 - DNA, 25 bp, Homo sapien
tgtgctgttcccatcgaaggtcagt

SEQ ID NO: 274794 - DNA, 25 bp, Homo sapien
agctggtctgccatcttcaaacgat

SEQ ID NO: 274795 - DNA, 25 bp, Homo sapien
aaagacagctttgaggaacggctcc

SEQ ID NO: 274796 - DNA, 25 bp, Homo sapien
ggtcatagatgaacaggagatcccc

SEQ ID NO: 274797 - DNA, 25 bp, Homo sapien
ctgggcgccagcgtgcggggaaacc

SEQ ID NO: 274798 - DNA, 25 bp, Homo sapien
cggctgccgttgcagccgcgcacct

SEQ ID NO: 274799 - DNA, 25 bp, Homo sapien
cagccgcgcacctgctccagacttc

SEQ ID NO: 274800 - DNA, 25 bp, Homo sapien
tgggcgccagcgtgcggggaaaccc

SEQ ID NO: 274801 - DNA, 25 bp, Homo sapien
ccactgaatggaaagcgaaacttac

SEQ ID NO: 274802 - DNA, 25 bp, Homo sapien
tgagttccacgtcgggactgagccg

SEQ ID NO: 274803 - DNA, 25 bp, Homo sapien
ctcaagcgccatgcaagcgtccagc

SEQ ID NO: 274804 - DNA, 25 bp, Homo sapien
agctgggaccgaagttccgctccgg

SEQ ID NO: 274805 - DNA, 25 bp, Homo sapien
ctgggtcccaggcgtttccattcat

SEQ ID NO: 274806 - DNA, 25 bp, Homo sapien
cttatgtgagccaggcacgatggaa

SEQ ID NO: 274807 - DNA, 25 bp, Homo sapien
tccaggaagcgcttatgtgagccag

SEQ ID NO: 274808 - DNA, 25 bp, Homo sapien
tgcctggcccgcgttcaggacagca

SEQ ID NO: 274809 - DNA, 25 bp, Homo sapien
caggacagcacgacttcacttccag

SEQ ID NO: 274810 - DNA, 25 bp, Homo sapien
ctcaggagcccaaacgccttgctca

SEQ ID NO: 274811 - DNA, 25 bp, Homo sapien
tgcctcaggagcccaaacgccttgc

SEQ ID NO: 274812 - DNA, 25 bp, Homo sapien
tcaggagcccaaacgccttgctcat

SEQ ID NO: 274813 - DNA, 25 bp, Homo sapien
tcttcaagatctgccggggactgcg

SEQ ID NO: 274814 - DNA, 25 bp, Homo sapien
catgagggtagtcccaggccctggg

SEQ ID NO: 274815 - DNA, 25 bp, Homo sapien
tgagggtagtcccaggccctgggac

SEQ ID NO: 274816 - DNA, 25 bp, Homo sapien
atgagggtagtcccaggccctggga

SEQ ID NO: 274817 - DNA, 25 bp, Homo sapien
gcagtcaagaagaggaaaacgggag

SEQ ID NO: 274818 - DNA, 25 bp, Homo sapien
atgcagtcaagaagaggaaaacggg

SEQ ID NO: 274819 - DNA, 25 bp, Homo sapien
tgcagtcaagaagaggaaaacggga

SEQ ID NO: 274820 - DNA, 25 bp, Homo sapien
cagtcaagaagaggaaaacgggagg

SEQ ID NO: 274821 - DNA, 25 bp, Homo sapien
caggtctgtccaatgttgtgtaaac

SEQ ID NO: 274822 - DNA, 25 bp, Homo sapien
tggaaagggacgcttctcctctgct

SEQ ID NO: 274823 - DNA, 25 bp, Homo sapien
ctggaaagggacgcttctcctctgc

SEQ ID NO: 274824 - DNA, 25 bp, Homo sapien
tggtccttaatcaggttccagagtt

SEQ ID NO: 274825 - DNA, 25 bp, Homo sapien
gatctggtccttaatcaggttccag

SEQ ID NO: 274826 - DNA, 25 bp, Homo sapien
gtccttaatcaggttccagagtttg

SEQ ID NO: 274827 - DNA, 25 bp, Homo sapien
tctggtccttaatcaggttccagag

SEQ ID NO: 274828 - DNA, 25 bp, Homo sapien
tcaaggagtccttcacccggatcgt

SEQ ID NO: 274829 - DNA, 25 bp, Homo sapien
ctccatggcacagtcaacgcaaatc

SEQ ID NO: 274830 - DNA, 25 bp, Homo sapien
ccggatcgtatacagggcctgcagt

SEQ ID NO: 274831 - DNA, 25 bp, Homo sapien
ggctttgagtccacatcaaaaagag

SEQ ID NO: 274832 - DNA, 25 bp, Homo sapien
acagggaaaaagcagcgttggtatt

SEQ ID NO: 274833 - DNA, 25 bp, Homo sapien
gaacagggaaaaagcagcgttggta

SEQ ID NO: 274834 - DNA, 25 bp, Homo sapien
agaacagggaaaaagcagcgttggt

SEQ ID NO: 274835 - DNA, 25 bp, Homo sapien
gaaaaagcagcgttggtatttccca

SEQ ID NO: 274836 - DNA, 25 bp, Homo sapien
tggaagaagcagtgcagggcgtcct

SEQ ID NO: 274837 - DNA, 25 bp, Homo sapien
ctggaagaagcagtgcagggcgtcc

SEQ ID NO: 274838 - DNA, 25 bp, Homo sapien
ggaagaagcagtgcagggcgtcctc

SEQ ID NO: 274839 - DNA, 25 bp, Homo sapien
acagaagcacttgcttttgcttgat

SEQ ID NO: 274840 - DNA, 25 bp, Homo sapien
gaagcacttgcttttgcttgataac

SEQ ID NO: 274841 - DNA, 25 bp, Homo sapien
agttctcacagaagcacttgctttt

SEQ ID NO: 274842 - DNA, 25 bp, Homo sapien
ttgcttttgcttgataactccctgg

SEQ ID NO: 274843 - DNA, 25 bp, Homo sapien
ggggcaaatgggtcagcttcaagac

SEQ ID NO: 274844 - DNA, 25 bp, Homo sapien
agtacagggagtggcagatctttct

SEQ ID NO: 274845 - DNA, 25 bp, Homo sapien
tctcgtctgtgaattcctgatggag

SEQ ID NO: 274846 - DNA, 25 bp, Homo sapien
agaatcgcatgaggtggattgtcag

SEQ ID NO: 274847 - DNA, 25 bp, Homo sapien
gaagtacagggagtggcagatcttt

SEQ ID NO: 274848 - DNA, 25 bp, Homo sapien
tcacaagactctcgcttcattggaa

SEQ ID NO: 274849 - DNA, 25 bp, Homo sapien
tcgcttcattggaaggatctggctg

SEQ ID NO: 274850 - DNA, 25 bp, Homo sapien
tcagcatcacaagactctcgcttca

SEQ ID NO: 274851 - DNA, 25 bp, Homo sapien
caagactctcgcttcattggaagga

SEQ ID NO: 274852 - DNA, 25 bp, Homo sapien
aacaggtggctcctagcagactggg

SEQ ID NO: 274853 - DNA, 25 bp, Homo sapien
tccaaagaagcctactgaattctgg

SEQ ID NO: 274854 - DNA, 25 bp, Homo sapien
tgaggaacaggtggctcctagcaga

SEQ ID NO: 274855 - DNA, 25 bp, Homo sapien
tgaggcatatgaacacaaatccaat

SEQ ID NO: 274856 - DNA, 25 bp, Homo sapien
gacccactgcatccagtcaaaaaag

SEQ ID NO: 274857 - DNA, 25 bp, Homo sapien
catgagttttggtaactgttacagc

SEQ ID NO: 274858 - DNA, 25 bp, Homo sapien
tccagtacagggttgggtgaaacaa

SEQ ID NO: 274859 - DNA, 25 bp, Homo sapien
cctatgaaatgtatacggcctaagt

SEQ ID NO: 274860 - DNA, 25 bp, Homo sapien
catttgcagactttgtgcagaactt

SEQ ID NO: 274861 - DNA, 25 bp, Homo sapien
taaaagatatcaaccagccagtgct

SEQ ID NO: 274862 - DNA, 25 bp, Homo sapien
ggcggcagacgcaaagctgagtcac

SEQ ID NO: 274863 - DNA, 25 bp, Homo sapien
gaactttacaaaatgcagggcaata

SEQ ID NO: 274864 - DNA, 25 bp, Homo sapien
caagattagaactttcccctgggag

SEQ ID NO: 274865 - DNA, 25 bp, Homo sapien
agttctgtttctccacaagcccagg

SEQ ID NO: 274866 - DNA, 25 bp, Homo sapien
caaggcaagattagaactttcccct

SEQ ID NO: 274867 - DNA, 25 bp, Homo sapien
ggggtggggatcatcagaacacagt

SEQ ID NO: 274868 - DNA, 25 bp, Homo sapien
tattggagtcattgaagcagaacca

SEQ ID NO: 274869 - DNA, 25 bp, Homo sapien
cgtgcgcaatcacagcaaaaagctc

SEQ ID NO: 274870 - DNA, 25 bp, Homo sapien
cacagcattccggatgtagacacag

SEQ ID NO: 274871 - DNA, 25 bp, Homo sapien
gtaatgaccggagtctgccattccc

SEQ ID NO: 274872 - DNA, 25 bp, Homo sapien
agttaggatttccgtaggtacactg

SEQ ID NO: 274873 - DNA, 25 bp, Homo sapien
cagtggtagttaggatttccgtagg

SEQ ID NO: 274874 - DNA, 25 bp, Homo sapien
ggatttccgtaggtacactggatgt

SEQ ID NO: 274875 - DNA, 25 bp, Homo sapien
taggatttccgtaggtacactggat

SEQ ID NO: 274876 - DNA, 25 bp, Homo sapien
gcacggctgattggcagctacctgt

SEQ ID NO: 274877 - DNA, 25 bp, Homo sapien
tgcatgtgcacagcagacgggagat

SEQ ID NO: 274878 - DNA, 25 bp, Homo sapien
taaacgaggagaggacaatacggcc

SEQ ID NO: 274879 - DNA, 25 bp, Homo sapien
aatacggccaggaagtgcatgtgca

SEQ ID NO: 274880 - DNA, 25 bp, Homo sapien
atgtaaaccagaagatatgcagttt

SEQ ID NO: 274881 - DNA, 25 bp, Homo sapien
taaaccagaagatatgcagtttcct

SEQ ID NO: 274882 - DNA, 25 bp, Homo sapien
atcttcatgtaaaccagaagatatg

SEQ ID NO: 274883 - DNA, 25 bp, Homo sapien
gtaaaccagaagatatgcagtttcc

SEQ ID NO: 274884 - DNA, 25 bp, Homo sapien
atctctgaaggttttgggcatttcc

SEQ ID NO: 274885 - DNA, 25 bp, Homo sapien
tcaatctctgaaggttttgggcatt

SEQ ID NO: 274886 - DNA, 25 bp, Homo sapien
caatctctgaaggttttgggcattt

SEQ ID NO: 274887 - DNA, 25 bp, Homo sapien
tctctgaaggttttgggcatttcca

SEQ ID NO: 274888 - DNA, 25 bp, Homo sapien
tctcttagaagactccgtagatcca

SEQ ID NO: 274889 - DNA, 25 bp, Homo sapien
gaagactccgtagatccaggaacgg

SEQ ID NO: 274890 - DNA, 25 bp, Homo sapien
tagatccaggaacggaaatggaaaa

SEQ ID NO: 274891 - DNA, 25 bp, Homo sapien
aaatctcttagaagactccgtagat

SEQ ID NO: 274892 - DNA, 25 bp, Homo sapien
cagtggagacacctagaatgacttg

SEQ ID NO: 274893 - DNA, 25 bp, Homo sapien
tagcgtggattcatatgacatcaag

SEQ ID NO: 274894 - DNA, 25 bp, Homo sapien
gaaaaagcacaagaatgaacgaacg

SEQ ID NO: 274895 - DNA, 25 bp, Homo sapien
caatactcattaagcatagcgtgga

SEQ ID NO: 274896 - DNA, 25 bp, Homo sapien
cactgcagaaagtgttctgagccac

SEQ ID NO: 274897 - DNA, 25 bp, Homo sapien
tagcttcactagtgcaggtccacct

SEQ ID NO: 274898 - DNA, 25 bp, Homo sapien
taatgcatacctgaacctggaaact

SEQ ID NO: 274899 - DNA, 25 bp, Homo sapien
cacttgcactcatggaaggcttttc

SEQ ID NO: 274900 - DNA, 25 bp, Homo sapien
ttagaggacacacaccttgcatgag

SEQ ID NO: 274901 - DNA, 25 bp, Homo sapien
aagttatctgggtttagagcgtgaa

SEQ ID NO: 274902 - DNA, 25 bp, Homo sapien
tatctgggtttagagcgtgaaactt

SEQ ID NO: 274903 - DNA, 25 bp, Homo sapien
cgtgaaactttgttagaggacacac

SEQ ID NO: 274904 - DNA, 25 bp, Homo sapien
gataataatgctgcggtgccgacag

SEQ ID NO: 274905 - DNA, 25 bp, Homo sapien
cagtagtgatggtccaatggcgccc

SEQ ID NO: 274906 - DNA, 25 bp, Homo sapien
tcacggtggcagcttcaaggacagt

SEQ ID NO: 274907 - DNA, 25 bp, Homo sapien
cagcagcagtattgcgggatcccca

SEQ ID NO: 274908 - DNA, 25 bp, Homo sapien
tccaaagattggcaagcagtacccg

SEQ ID NO: 274909 - DNA, 25 bp, Homo sapien
tctgcgcagtgcgctcatcgctggt

SEQ ID NO: 274910 - DNA, 25 bp, Homo sapien
tggcaagcagtacccgtgaaataac

SEQ ID NO: 274911 - DNA, 25 bp, Homo sapien
cacatcctccaaagattggcaagca

SEQ ID NO: 274912 - DNA, 25 bp, Homo sapien
aatgtcccggtccacggaatcgtca

SEQ ID NO: 274913 - DNA, 25 bp, Homo sapien
tggatggcctcctcaatgtcccggt

SEQ ID NO: 274914 - DNA, 25 bp, Homo sapien
tggcctcctcaatgtcccggtccac

SEQ ID NO: 274915 - DNA, 25 bp, Homo sapien
tcctcaatgtcccggtccacggaat

SEQ ID NO: 274916 - DNA, 25 bp, Homo sapien
ctggccccgggctgtgccgctccac

SEQ ID NO: 274917 - DNA, 25 bp, Homo sapien
ggctgtgcatggctgggccccgctg

SEQ ID NO: 274918 - DNA, 25 bp, Homo sapien
ccgcccgcagccctggaaggctgtg

SEQ ID NO: 274919 - DNA, 25 bp, Homo sapien
agccctggaaggctgtgcatggctg

SEQ ID NO: 274920 - DNA, 25 bp, Homo sapien
tgtgagccagttcccgcttacatct

SEQ ID NO: 274921 - DNA, 25 bp, Homo sapien
tgctctgctcatgctgactggggag

SEQ ID NO: 274922 - DNA, 25 bp, Homo sapien
ctgctctgctcatgctgactgggga

SEQ ID NO: 274923 - DNA, 25 bp, Homo sapien
tgtacggcgctcgtgactcgctttc

SEQ ID NO: 274924 - DNA, 25 bp, Homo sapien
tggtcgtggtcgtgaccttggacct

SEQ ID NO: 274925 - DNA, 25 bp, Homo sapien
cgccgaattttcatgtgtgtctggt

SEQ ID NO: 274926 - DNA, 25 bp, Homo sapien
gtgggatttcgagagtgacttcgcc

SEQ ID NO: 274927 - DNA, 25 bp, Homo sapien
caatgccgtcgtcgctgctggagtc

SEQ ID NO: 274928 - DNA, 25 bp, Homo sapien
tcctcaatgccgtcgtcgctgctgg

SEQ ID NO: 274929 - DNA, 25 bp, Homo sapien
tcgtcgctgctggagtcggacgcct

SEQ ID NO: 274930 - DNA, 25 bp, Homo sapien
tggcctcctcaatgccgtcgtcgct

SEQ ID NO: 274931 - DNA, 25 bp, Homo sapien
ggtccgtggtcttggtgggcactgg

SEQ ID NO: 274932 - DNA, 25 bp, Homo sapien
ggaatggtcagcgtccagatcccct

SEQ ID NO: 274933 - DNA, 25 bp, Homo sapien
tctgcctggcaagaggaccattcca

SEQ ID NO: 274934 - DNA, 25 bp, Homo sapien
gtctgcctggcaagaggaccattcc

SEQ ID NO: 274935 - DNA, 25 bp, Homo sapien
tggtcagcgtccagatcccctggac

SEQ ID NO: 274936 - DNA, 25 bp, Homo sapien
aacgtccagatttcctgctcaatgc

SEQ ID NO: 274937 - DNA, 25 bp, Homo sapien
tgagggccaaaaacgtccagatttc

SEQ ID NO: 274938 - DNA, 25 bp, Homo sapien
caaaaacgtccagatttcctgctca

SEQ ID NO: 274939 - DNA, 25 bp, Homo sapien
cttgagggccaaaaacgtccagatt

SEQ ID NO: 274940 - DNA, 25 bp, Homo sapien
gccaggagtgggtccagtgttttag

SEQ ID NO: 274941 - DNA, 25 bp, Homo sapien
agccaggagtgggtccagtgtttta

SEQ ID NO: 274942 - DNA, 25 bp, Homo sapien
ccaggagtgggtccagtgttttaga

SEQ ID NO: 274943 - DNA, 25 bp, Homo sapien
tctttccccaccacccgcatgttct

SEQ ID NO: 274944 - DNA, 25 bp, Homo sapien
caccacccgcatgttcttgggagtg

SEQ ID NO: 274945 - DNA, 25 bp, Homo sapien
ccctcatggccgggcccggctctcc

SEQ ID NO: 274946 - DNA, 25 bp, Homo sapien
ccccaccacccgcatgttcttggga

SEQ ID NO: 274947 - DNA, 25 bp, Homo sapien
agtgtcaccgggcaccctagcggcg

SEQ ID NO: 274948 - DNA, 25 bp, Homo sapien
ctgtgacgtgcgagtgtcaccgggc

SEQ ID NO: 274949 - DNA, 25 bp, Homo sapien
atggaaaggtcccaccctagcggcg

SEQ ID NO: 274950 - DNA, 25 bp, Homo sapien
gtgcgagtgtcaccgggcaccctag

SEQ ID NO: 274951 - DNA, 25 bp, Homo sapien
cttcttcttgtctaggtgccttgcc

SEQ ID NO: 274952 - DNA, 25 bp, Homo sapien
ttcttcttgtctaggtgccttgcct

SEQ ID NO: 274953 - DNA, 25 bp, Homo sapien
tcttcttgtctaggtgccttgcctc

SEQ ID NO: 274954 - DNA, 25 bp, Homo sapien
ctggaagtgcgtctgggaggtgctg

SEQ ID NO: 274955 - DNA, 25 bp, Homo sapien
gaacctgaccttcttcctgcacaca

SEQ ID NO: 274956 - DNA, 25 bp, Homo sapien
gacctcttcttgagctttcacttgg

SEQ ID NO: 274957 - DNA, 25 bp, Homo sapien
gaggtgctgaacctgaccttcttcc

SEQ ID NO: 274958 - DNA, 25 bp, Homo sapien
ctggagccctcgcagctgtctctct

SEQ ID NO: 274959 - DNA, 25 bp, Homo sapien
ccggggcttcgtcctctcggccctg

SEQ ID NO: 274960 - DNA, 25 bp, Homo sapien
gggcttcgtcctctcggccctgctg

SEQ ID NO: 274961 - DNA, 25 bp, Homo sapien
caggaaggccggggcttcgtcctct

SEQ ID NO: 274962 - DNA, 25 bp, Homo sapien
aatagattctcttcggaggcggagg

SEQ ID NO: 274963 - DNA, 25 bp, Homo sapien
gaatagattctcttcggaggcggag

SEQ ID NO: 274964 - DNA, 25 bp, Homo sapien
ctgttgtcagacaaggagccagggc

SEQ ID NO: 274965 - DNA, 25 bp, Homo sapien
agccagggctgggagctgggccctg

SEQ ID NO: 274966 - DNA, 25 bp, Homo sapien
tgttgtcagacaaggagccagggct

SEQ ID NO: 274967 - DNA, 25 bp, Homo sapien
gctgggagctgggccctgggactct

SEQ ID NO: 274968 - DNA, 25 bp, Homo sapien
tctccagttcgatgctatcgtcgct

SEQ ID NO: 274969 - DNA, 25 bp, Homo sapien
ccagttcgatgctatcgtcgctgtc

SEQ ID NO: 274970 - DNA, 25 bp, Homo sapien
cctaatctccagttcgatgctatcg

SEQ ID NO: 274971 - DNA, 25 bp, Homo sapien
cttcctaatctccagttcgatgcta

SEQ ID NO: 274972 - DNA, 25 bp, Homo sapien
cctgcaaggtacctctggcctggct

SEQ ID NO: 274973 - DNA, 25 bp, Homo sapien
tcctgcaaggtacctctggcctggc

SEQ ID NO: 274974 - DNA, 25 bp, Homo sapien
tggtcctcctgggtggcgcatgatc

SEQ ID NO: 274975 - DNA, 25 bp, Homo sapien
gctgagcaggcacgctgcgccctgt

SEQ ID NO: 274976 - DNA, 25 bp, Homo sapien
tgatcccctccgccggatcagtggg

SEQ ID NO: 274977 - DNA, 25 bp, Homo sapien
tcgatgcccttcagccaaatgtgca

SEQ ID NO: 274978 - DNA, 25 bp, Homo sapien
caaagtcactccagggcggggcgcg

SEQ ID NO: 274979 - DNA, 25 bp, Homo sapien
ggggcgcggttggcctgggctccag

SEQ ID NO: 274980 - DNA, 25 bp, Homo sapien
tccacgtgaaaggtccccctggctc

SEQ ID NO: 274981 - DNA, 25 bp, Homo sapien
ctctcccaatgccgccccctccacg

SEQ ID NO: 274982 - DNA, 25 bp, Homo sapien
tctcccaatgccgccccctccacgc

SEQ ID NO: 274983 - DNA, 25 bp, Homo sapien
gggctgaagaggccggtctccctgc

SEQ ID NO: 274984 - DNA, 25 bp, Homo sapien
ggctgaagaggccggtctccctgcc

SEQ ID NO: 274985 - DNA, 25 bp, Homo sapien
ctgcttggccggtgaccgcagtcct

SEQ ID NO: 274986 - DNA, 25 bp, Homo sapien
cttggccggtgaccgcagtccttct

SEQ ID NO: 274987 - DNA, 25 bp, Homo sapien
ggtgaccgcagtccttcttcgccag

SEQ ID NO: 274988 - DNA, 25 bp, Homo sapien
ttcctgcttggccggtgaccgcagt

SEQ ID NO: 274989 - DNA, 25 bp, Homo sapien
atcctttcctccgagccagagctct

SEQ ID NO: 274990 - DNA, 25 bp, Homo sapien
tcctttcctccgagccagagctctt

SEQ ID NO: 274991 - DNA, 25 bp, Homo sapien
ggtcctggtcaactctactgattga

SEQ ID NO: 274992 - DNA, 25 bp, Homo sapien
cactggtgtccctgcccaaggtgtc

SEQ ID NO: 274993 - DNA, 25 bp, Homo sapien
gtcctggtcctggtcaactctactg

SEQ ID NO: 274994 - DNA, 25 bp, Homo sapien
gtccctgcccaaggtgtcctggtcc

SEQ ID NO: 274995 - DNA, 25 bp, Homo sapien
tgccgccactgcagcagcaacacct

SEQ ID NO: 274996 - DNA, 25 bp, Homo sapien
gctgccgccactgcagcagcaacac

SEQ ID NO: 274997 - DNA, 25 bp, Homo sapien
cttcactactgagctgccgccactg

SEQ ID NO: 274998 - DNA, 25 bp, Homo sapien
gagctgccgccactgcagcagcaac

SEQ ID NO: 274999 - DNA, 25 bp, Homo sapien
agactatgtataacagactgtttcc

SEQ ID NO: 275000 - DNA, 25 bp, Homo sapien
aaagcattgtttcgtgttggtatac

SEQ ID NO: 275001 - DNA, 25 bp, Homo sapien
acacaggcacagatacacgtcggct

SEQ ID NO: 275002 - DNA, 25 bp, Homo sapien
aaacatcagagtccctgtaaacctg

SEQ ID NO: 275003 - DNA, 25 bp, Homo sapien
cttgaatgcagccacacaggttccc

SEQ ID NO: 275004 - DNA, 25 bp, Homo sapien
tgaatgcagccacacaggttcccca

SEQ ID NO: 275005 - DNA, 25 bp, Homo sapien
gaatgcagccacacaggttccccat

SEQ ID NO: 275006 - DNA, 25 bp, Homo sapien
ttgaatgcagccacacaggttcccc

SEQ ID NO: 275007 - DNA, 25 bp, Homo sapien
atccacactgtgaggtccaactgct

SEQ ID NO: 275008 - DNA, 25 bp, Homo sapien
gaccaagggcaggagatccctaatc

SEQ ID NO: 275009 - DNA, 25 bp, Homo sapien
gagatccctaatcccatcaccatgg

SEQ ID NO: 275010 - DNA, 25 bp, Homo sapien
cacagatagtggcacttaggaccaa

SEQ ID NO: 275011 - DNA, 25 bp, Homo sapien
gcttccttttcacacgctttttgga

SEQ ID NO: 275012 - DNA, 25 bp, Homo sapien
tttttggaaggcttcttcgagtcac

SEQ ID NO: 275013 - DNA, 25 bp, Homo sapien
tttcacacgctttttggaaggcttc

SEQ ID NO: 275014 - DNA, 25 bp, Homo sapien
cttggtagtagagtagggcttcctt

SEQ ID NO: 275015 - DNA, 25 bp, Homo sapien
cattgaatgtgctccctgaagtcac

SEQ ID NO: 275016 - DNA, 25 bp, Homo sapien
actggttggtgtgcacagcatatct

SEQ ID NO: 275017 - DNA, 25 bp, Homo sapien
tcatagttttctgctcggatttcaa

SEQ ID NO: 275018 - DNA, 25 bp, Homo sapien
aggattggtcatattggtcatagtt

SEQ ID NO: 275019 - DNA, 25 bp, Homo sapien
tctgctcggatttcaataagaaact

SEQ ID NO: 275020 - DNA, 25 bp, Homo sapien
tattggtcatagttttctgctcgga

SEQ ID NO: 275021 - DNA, 25 bp, Homo sapien
tctttcaaggttgctgaagactgta

SEQ ID NO: 275022 - DNA, 25 bp, Homo sapien
tgggctgaagcttgtccaatctttc

SEQ ID NO: 275023 - DNA, 25 bp, Homo sapien
aggttgctgaagactgtatgatgga

SEQ ID NO: 275024 - DNA, 25 bp, Homo sapien
ccaatctttcaaggttgctgaagac

SEQ ID NO: 275025 - DNA, 25 bp, Homo sapien
gaaagacaggcaagaacgaggagct

SEQ ID NO: 275026 - DNA, 25 bp, Homo sapien
aaatcctccctcgtggaaagacagg

SEQ ID NO: 275027 - DNA, 25 bp, Homo sapien
gcttgagctcctgctagaaaatcct

SEQ ID NO: 275028 - DNA, 25 bp, Homo sapien
tatagtttgatgagagtcccactgc

SEQ ID NO: 275029 - DNA, 25 bp, Homo sapien
tgtccttgtgaactagagactcctc

SEQ ID NO: 275030 - DNA, 25 bp, Homo sapien
ctgtccttgtgaactagagactcct

SEQ ID NO: 275031 - DNA, 25 bp, Homo sapien
tagattcacgcctcagaggggccac

SEQ ID NO: 275032 - DNA, 25 bp, Homo sapien
gcctcagaggggccacctgcaccac

SEQ ID NO: 275033 - DNA, 25 bp, Homo sapien
acgcctcagaggggccacctgcacc

SEQ ID NO: 275034 - DNA, 25 bp, Homo sapien
tcacgcctcagaggggccacctgca

SEQ ID NO: 275035 - DNA, 25 bp, Homo sapien
tcttggcatccagattgttttcttg

SEQ ID NO: 275036 - DNA, 25 bp, Homo sapien
ctttcttggcatccagattgttttc

SEQ ID NO: 275037 - DNA, 25 bp, Homo sapien
ttcttggcatccagattgttttctt

SEQ ID NO: 275038 - DNA, 25 bp, Homo sapien
tttcttggcatccagattgttttct

SEQ ID NO: 275039 - DNA, 25 bp, Homo sapien
tatcgtgtgaggcatcctcgttagt

SEQ ID NO: 275040 - DNA, 25 bp, Homo sapien
cgttagtgatatcgtgtgaggcatc

SEQ ID NO: 275041 - DNA, 25 bp, Homo sapien
tcctcgttagtgatatcgtgtgagg

SEQ ID NO: 275042 - DNA, 25 bp, Homo sapien
gtgatatcgtgtgaggcatcctcgt

SEQ ID NO: 275043 - DNA, 25 bp, Homo sapien
tagcgatggcttgtacactgtcctc

SEQ ID NO: 275044 - DNA, 25 bp, Homo sapien
actgtcctcattagcgacgttgtgt

SEQ ID NO: 275045 - DNA, 25 bp, Homo sapien
tcctcattagcgatggcttgtacac

SEQ ID NO: 275046 - DNA, 25 bp, Homo sapien
ttgtacactgtcctcattagcgacg

SEQ ID NO: 275047 - DNA, 25 bp, Homo sapien
gttgtgtacagcgtcctcgttagca

SEQ ID NO: 275048 - DNA, 25 bp, Homo sapien
tgtgtacagcgtcctcgttagcaat

SEQ ID NO: 275049 - DNA, 25 bp, Homo sapien
tagcgatgttgtgtacagcgtcctc

SEQ ID NO: 275050 - DNA, 25 bp, Homo sapien
gatgttgtgtacagcgtcctcgtta

SEQ ID NO: 275051 - DNA, 25 bp, Homo sapien
tggtgatgtcttatatggtgtcctc

SEQ ID NO: 275052 - DNA, 25 bp, Homo sapien
ggtgatgtcttatatggtgtcctca

SEQ ID NO: 275053 - DNA, 25 bp, Homo sapien
gtgatgtcttatatggtgtcctcat

SEQ ID NO: 275054 - DNA, 25 bp, Homo sapien
ttttacagatgtcttgtacagtgtc

SEQ ID NO: 275055 - DNA, 25 bp, Homo sapien
taagcaatgtcgtctacagcgtcct

SEQ ID NO: 275056 - DNA, 25 bp, Homo sapien
tacagcgtccttattagcgaattcg

SEQ ID NO: 275057 - DNA, 25 bp, Homo sapien
tgtcttgtacggtgtccttataagc

SEQ ID NO: 275058 - DNA, 25 bp, Homo sapien
ctagagatggcgcttttttctcagg

SEQ ID NO: 275059 - DNA, 25 bp, Homo sapien
tctcaggaagtgagttatttcaggg

SEQ ID NO: 275060 - DNA, 25 bp, Homo sapien
tatttcagggtaggtatcattctcc

SEQ ID NO: 275061 - DNA, 25 bp, Homo sapien
agagatggcgcttttttctcaggaa

SEQ ID NO: 275062 - DNA, 25 bp, Homo sapien
tgggctcacagatatccctacagcc

SEQ ID NO: 275063 - DNA, 25 bp, Homo sapien
tcccaccctagctgaagccatggtg

SEQ ID NO: 275064 - DNA, 25 bp, Homo sapien
ataagtcattagagagaggcccacc

SEQ ID NO: 275065 - DNA, 25 bp, Homo sapien
atggtgcttcgcacaggatcccctg

SEQ ID NO: 275066 - DNA, 25 bp, Homo sapien
tacaaatccccatcatcagatatgc

SEQ ID NO: 275067 - DNA, 25 bp, Homo sapien
ccccatcatcagatatgctctccac

SEQ ID NO: 275068 - DNA, 25 bp, Homo sapien
atcatcagatatgctctccacaatc

SEQ ID NO: 275069 - DNA, 25 bp, Homo sapien
ctacaaatccccatcatcagatatg

SEQ ID NO: 275070 - DNA, 25 bp, Homo sapien
ctgggaactctctccaattggatct

SEQ ID NO: 275071 - DNA, 25 bp, Homo sapien
gcctgtgagagagttgtgtccctca

SEQ ID NO: 275072 - DNA, 25 bp, Homo sapien
tcagattctgttcaccacaggtgac

SEQ ID NO: 275073 - DNA, 25 bp, Homo sapien
aacctcttctgcacaatcccaaggg

SEQ ID NO: 275074 - DNA, 25 bp, Homo sapien
cctttaagccaggagtcaacagtga

SEQ ID NO: 275075 - DNA, 25 bp, Homo sapien
ccctttaagccaggagtcaacagtg

SEQ ID NO: 275076 - DNA, 25 bp, Homo sapien
taataagtacgctgggaagacaaca

SEQ ID NO: 275077 - DNA, 25 bp, Homo sapien
gcgggcactcagttccactaacgaa

SEQ ID NO: 275078 - DNA, 25 bp, Homo sapien
taaaatcactaaggcggacttccag

SEQ ID NO: 275079 - DNA, 25 bp, Homo sapien
catcatcggaagtcagaagttgaac

SEQ ID NO: 275080 - DNA, 25 bp, Homo sapien
taacagaaacgcatggtctcccaga

SEQ ID NO: 275081 - DNA, 25 bp, Homo sapien
ccttccttggagcttgaccttgtca

SEQ ID NO: 275082 - DNA, 25 bp, Homo sapien
tcagacaggtatagatgagtgttcc

SEQ ID NO: 275083 - DNA, 25 bp, Homo sapien
tgatcagccatgcaagaataaatga

SEQ ID NO: 275084 - DNA, 25 bp, Homo sapien
cctgtgagtttgctacatggtgcat

SEQ ID NO: 275085 - DNA, 25 bp, Homo sapien
cagtgttatttgatctctagggtct

SEQ ID NO: 275086 - DNA, 25 bp, Homo sapien
ttagattgatatctcaccttggcag

SEQ ID NO: 275087 - DNA, 25 bp, Homo sapien
cttgtacttacaaagatttatcctg

SEQ ID NO: 275088 - DNA, 25 bp, Homo sapien
aatgaaagtcaaagctgagggagaa

SEQ ID NO: 275089 - DNA, 25 bp, Homo sapien
tgagggagaaggagcggccatccat

SEQ ID NO: 275090 - DNA, 25 bp, Homo sapien
gccaccagcaatgaaagtcaaagct

SEQ ID NO: 275091 - DNA, 25 bp, Homo sapien
ggagcctgagccaccagcaatgaaa

SEQ ID NO: 275092 - DNA, 25 bp, Homo sapien
ttgcagcccatggacattggaacag

SEQ ID NO: 275093 - DNA, 25 bp, Homo sapien
tgcagcccatggacattggaacagt

SEQ ID NO: 275094 - DNA, 25 bp, Homo sapien
gcccatggacattggaacagtccat

SEQ ID NO: 275095 - DNA, 25 bp, Homo sapien
cagcccatggacattggaacagtcc

SEQ ID NO: 275096 - DNA, 25 bp, Homo sapien
agcgctgacgtcatctcaggaaccg

SEQ ID NO: 275097 - DNA, 25 bp, Homo sapien
cgtcatctcaggaaccgtgctgcgt

SEQ ID NO: 275098 - DNA, 25 bp, Homo sapien
ctggtgctttcagcgagcagcgctg

SEQ ID NO: 275099 - DNA, 25 bp, Homo sapien
tgttctctcgcctgctctttaggat

SEQ ID NO: 275100 - DNA, 25 bp, Homo sapien
gccatacctttgcctctaagtgtcc

SEQ ID NO: 275101 - DNA, 25 bp, Homo sapien
catacctttgcctctaagtgtcccc

SEQ ID NO: 275102 - DNA, 25 bp, Homo sapien
ctttgcctctaagtgtcccccagtt

SEQ ID NO: 275103 - DNA, 25 bp, Homo sapien
acctttgcctctaagtgtcccccag

SEQ ID NO: 275104 - DNA, 25 bp, Homo sapien
ggggcaggtttacatcttggctgtc

SEQ ID NO: 275105 - DNA, 25 bp, Homo sapien
ctgggggcaggtttacatcttggct

SEQ ID NO: 275106 - DNA, 25 bp, Homo sapien
tctgggggcaggtttacatcttggc

SEQ ID NO: 275107 - DNA, 25 bp, Homo sapien
tgggggcaggtttacatcttggctg

SEQ ID NO: 275108 - DNA, 25 bp, Homo sapien
atttgagttgatagcagtgcgggga

SEQ ID NO: 275109 - DNA, 25 bp, Homo sapien
gtgaagctgtcaaaggaagattgta

SEQ ID NO: 275110 - DNA, 25 bp, Homo sapien
tgagttgatagcagtgcggggaggg

SEQ ID NO: 275111 - DNA, 25 bp, Homo sapien
aggaagattgtaataaattaactgg

SEQ ID NO: 275112 - DNA, 25 bp, Homo sapien
ccacaggataatttgtagttccaca

SEQ ID NO: 275113 - DNA, 25 bp, Homo sapien
acaggataatttgtagttccacagc

SEQ ID NO: 275114 - DNA, 25 bp, Homo sapien
tccacagctatttgttgagcatcct

SEQ ID NO: 275115 - DNA, 25 bp, Homo sapien
aggataatttgtagttccacagcta

SEQ ID NO: 275116 - DNA, 25 bp, Homo sapien
tggaaaacgcccctaacaggagatg

SEQ ID NO: 275117 - DNA, 25 bp, Homo sapien
agaaagagactctggtgcacgtcat

SEQ ID NO: 275118 - DNA, 25 bp, Homo sapien
aaacgcccctaacaggagatgagaa

SEQ ID NO: 275119 - DNA, 25 bp, Homo sapien
gatgagaaagagactctggtgcacg

SEQ ID NO: 275120 - DNA, 25 bp, Homo sapien
tccagctctgcgttttggcacctct

SEQ ID NO: 275121 - DNA, 25 bp, Homo sapien
tctgtggctgggcatccctctgaac

SEQ ID NO: 275122 - DNA, 25 bp, Homo sapien
tgggcatccctctgaactgtgcact

SEQ ID NO: 275123 - DNA, 25 bp, Homo sapien
ggagcaggtgattggttccagctct

SEQ ID NO: 275124 - DNA, 25 bp, Homo sapien
agaggagactcgtatggggggtggt

SEQ ID NO: 275125 - DNA, 25 bp, Homo sapien
tggtgaggataaggccgatccatct

SEQ ID NO: 275126 - DNA, 25 bp, Homo sapien
cagaggagactcgtatggggggtgg

SEQ ID NO: 275127 - DNA, 25 bp, Homo sapien
ccttctacaagcactcattgttctg

SEQ ID NO: 275128 - DNA, 25 bp, Homo sapien
gagggtagcccctgttttagcagaa

SEQ ID NO: 275129 - DNA, 25 bp, Homo sapien
ttcaacaaataaccgagtgccttct

SEQ ID NO: 275130 - DNA, 25 bp, Homo sapien
gttatctccggtgccacagaattca

SEQ ID NO: 275131 - DNA, 25 bp, Homo sapien
aagtcaagaatacccccgggagcag

SEQ ID NO: 275132 - DNA, 25 bp, Homo sapien
taagtcaagaatacccccgggagca

SEQ ID NO: 275133 - DNA, 25 bp, Homo sapien
tgtcatacactctccgctttcggac

SEQ ID NO: 275134 - DNA, 25 bp, Homo sapien
tgatgtcatacactctccgctttcg

SEQ ID NO: 275135 - DNA, 25 bp, Homo sapien
gatgtcatacactctccgctttcgg

SEQ ID NO: 275136 - DNA, 25 bp, Homo sapien
ggtgatgtcatacactctccgcttt

SEQ ID NO: 275137 - DNA, 25 bp, Homo sapien
cttaattaactcatccaaagcatct

SEQ ID NO: 275138 - DNA, 25 bp, Homo sapien
cttggatttcttttcaacgaggtcg

SEQ ID NO: 275139 - DNA, 25 bp, Homo sapien
tgctgagcacaatccttaattaact

SEQ ID NO: 275140 - DNA, 25 bp, Homo sapien
tccaaaattgctaagatcagatcct

SEQ ID NO: 275141 - DNA, 25 bp, Homo sapien
tgggagctggaacatccaatctggt

SEQ ID NO: 275142 - DNA, 25 bp, Homo sapien
gacgatctgttcatggaaggcctga

SEQ ID NO: 275143 - DNA, 25 bp, Homo sapien
tggagctttaactgcaatgacgatc

SEQ ID NO: 275144 - DNA, 25 bp, Homo sapien
gaaggcctgaatgctatgaatgtct

SEQ ID NO: 275145 - DNA, 25 bp, Homo sapien
gataggtccgttggtgctccttatg

SEQ ID NO: 275146 - DNA, 25 bp, Homo sapien
acatcgataggtccgttggtgctcc

SEQ ID NO: 275147 - DNA, 25 bp, Homo sapien
ggtccgttggtgctccttatgtgca

SEQ ID NO: 275148 - DNA, 25 bp, Homo sapien
aaatagacatcgataggtccgttgg

SEQ ID NO: 275149 - DNA, 25 bp, Homo sapien
catgatgccgctactgagaacgaga

SEQ ID NO: 275150 - DNA, 25 bp, Homo sapien
gaagatattcccaaaaaactcagtg

SEQ ID NO: 275151 - DNA, 25 bp, Homo sapien
caaagacactactggccatgatgcc

SEQ ID NO: 275152 - DNA, 25 bp, Homo sapien
ctggagagagggcaaggtacaactt

SEQ ID NO: 275153 - DNA, 25 bp, Homo sapien
tagtctttaaggttgctggctacgg

SEQ ID NO: 275154 - DNA, 25 bp, Homo sapien
tcaagccctgcagcaacagttattg

SEQ ID NO: 275155 - DNA, 25 bp, Homo sapien
cagatagaatgaactggacccgagt

SEQ ID NO: 275156 - DNA, 25 bp, Homo sapien
taaaatgaagcctgtttgaaacctg

SEQ ID NO: 275157 - DNA, 25 bp, Homo sapien
gtccagccgccaactcggccaacgg

SEQ ID NO: 275158 - DNA, 25 bp, Homo sapien
tgaacgggctccaggcaactgagcc

SEQ ID NO: 275159 - DNA, 25 bp, Homo sapien
cggcctgggcccgaacaggaaggag

SEQ ID NO: 275160 - DNA, 25 bp, Homo sapien
gaaccgtcggttgcttgaactctcg

SEQ ID NO: 275161 - DNA, 25 bp, Homo sapien
gggacacctgcagcagatgctaagg

SEQ ID NO: 275162 - DNA, 25 bp, Homo sapien
gaaacttgtgtgtactgggcctaga

SEQ ID NO: 275163 - DNA, 25 bp, Homo sapien
gtctcctgctgtacatccatactgg

SEQ ID NO: 275164 - DNA, 25 bp, Homo sapien
aaatggcaggcagaccagaagtccc

SEQ ID NO: 275165 - DNA, 25 bp, Homo sapien
atccactccagtagtgaccccaacg

SEQ ID NO: 275166 - DNA, 25 bp, Homo sapien
agggcctccatccactccagtagtg

SEQ ID NO: 275167 - DNA, 25 bp, Homo sapien
agctgcaggagcagaagtgccacac

SEQ ID NO: 275168 - DNA, 25 bp, Homo sapien
actccagtagtgaccccaacgtggg

SEQ ID NO: 275169 - DNA, 25 bp, Homo sapien
gcctcccgtagagcggtaggggctc

SEQ ID NO: 275170 - DNA, 25 bp, Homo sapien
agcggtaggggctcgagatggcatt

SEQ ID NO: 275171 - DNA, 25 bp, Homo sapien
gagcggtaggggctcgagatggcat

SEQ ID NO: 275172 - DNA, 25 bp, Homo sapien
ccgtagagcggtaggggctcgagat

SEQ ID NO: 275173 - DNA, 25 bp, Homo sapien
taagggaggtggcagcatcaaaggc

SEQ ID NO: 275174 - DNA, 25 bp, Homo sapien
gtggcagcatcaaaggctcccctcg

SEQ ID NO: 275175 - DNA, 25 bp, Homo sapien
aggtggcagcatcaaaggctcccct

SEQ ID NO: 275176 - DNA, 25 bp, Homo sapien
ggaggtggcagcatcaaaggctccc

SEQ ID NO: 275177 - DNA, 25 bp, Homo sapien
cactcttgatgcgctggaaagccgc

SEQ ID NO: 275178 - DNA, 25 bp, Homo sapien
tgcactcttgatgcgctggaaagcc

SEQ ID NO: 275179 - DNA, 25 bp, Homo sapien
cagtgcactcttgatgcgctggaaa

SEQ ID NO: 275180 - DNA, 25 bp, Homo sapien
tcttgatgcgctggaaagccgcctc

SEQ ID NO: 275181 - DNA, 25 bp, Homo sapien
taattaaataaatatggccgagcat

SEQ ID NO: 275182 - DNA, 25 bp, Homo sapien
tggccgagcatggtgccttaggcct

SEQ ID NO: 275183 - DNA, 25 bp, Homo sapien
aaataattaaataaatatggccgag

SEQ ID NO: 275184 - DNA, 25 bp, Homo sapien
gttcatgaggtcaggagcccgagac

SEQ ID NO: 275185 - DNA, 25 bp, Homo sapien
ctttctcggactcccgggatgtggc

SEQ ID NO: 275186 - DNA, 25 bp, Homo sapien
cctaagggtgacagcactgtctgtc

SEQ ID NO: 275187 - DNA, 25 bp, Homo sapien
gaagggttgacactgggttctgccc

SEQ ID NO: 275188 - DNA, 25 bp, Homo sapien
tgcaggtattgaggccgagatgccc

SEQ ID NO: 275189 - DNA, 25 bp, Homo sapien
cttggcttcagtagctcacccagct

SEQ ID NO: 275190 - DNA, 25 bp, Homo sapien
ttcagtagctcacccagcttacagg

SEQ ID NO: 275191 - DNA, 25 bp, Homo sapien
tggcttcagtagctcacccagctta

SEQ ID NO: 275192 - DNA, 25 bp, Homo sapien
gcttcagtagctcacccagcttaca

SEQ ID NO: 275193 - DNA, 25 bp, Homo sapien
ccaccgtggccgacactttcattaa

SEQ ID NO: 275194 - DNA, 25 bp, Homo sapien
gagacgacttgcgtgcatgttgact

SEQ ID NO: 275195 - DNA, 25 bp, Homo sapien
gttgacttcatgatcagcgccgctg

SEQ ID NO: 275196 - DNA, 25 bp, Homo sapien
aagtttcctgagacgacttgcgtgc

SEQ ID NO: 275197 - DNA, 25 bp, Homo sapien
ctttgggtctacagctacgtcttac

SEQ ID NO: 275198 - DNA, 25 bp, Homo sapien
ttttccatgttctaaaagtgctcct

SEQ ID NO: 275199 - DNA, 25 bp, Homo sapien
cagggctggtggttgctttgggtct

SEQ ID NO: 275200 - DNA, 25 bp, Homo sapien
tccatgttctaaaagtgctcctctc

SEQ ID NO: 275201 - DNA, 25 bp, Homo sapien
ggtggcgaggacagaacaggagcct

SEQ ID NO: 275202 - DNA, 25 bp, Homo sapien
tgggtggcgaggacagaacaggagc

SEQ ID NO: 275203 - DNA, 25 bp, Homo sapien
cgtgggtggcgaggacagaacagga

SEQ ID NO: 275204 - DNA, 25 bp, Homo sapien
gggtggcgaggacagaacaggagcc

SEQ ID NO: 275205 - DNA, 25 bp, Homo sapien
cctggacaatccgtgtcctggcagc

SEQ ID NO: 275206 - DNA, 25 bp, Homo sapien
aaaccaccccaagtgttcgagtgtg

SEQ ID NO: 275207 - DNA, 25 bp, Homo sapien
catcttcccacttgcattgtatgtg

SEQ ID NO: 275208 - DNA, 25 bp, Homo sapien
agacagggacttgcctaggtttgca

SEQ ID NO: 275209 - DNA, 25 bp, Homo sapien
ccatgactgacagctggtccttgga

SEQ ID NO: 275210 - DNA, 25 bp, Homo sapien
ctggtggtggcgttgaaacagcacc

SEQ ID NO: 275211 - DNA, 25 bp, Homo sapien
caaaactgagcctatcctggaaggc

SEQ ID NO: 275212 - DNA, 25 bp, Homo sapien
gaccaaaactgagcctatcctggaa

SEQ ID NO: 275213 - DNA, 25 bp, Homo sapien
agcaggggaccaaaactgagcctat

SEQ ID NO: 275214 - DNA, 25 bp, Homo sapien
gggaccaaaactgagcctatcctgg

SEQ ID NO: 275215 - DNA, 25 bp, Homo sapien
gatatttggaaacactaacagctag

SEQ ID NO: 275216 - DNA, 25 bp, Homo sapien
cacatgcaagcaagctgcaaactga

SEQ ID NO: 275217 - DNA, 25 bp, Homo sapien
tatgcctcgcccagaaactgagttt

SEQ ID NO: 275218 - DNA, 25 bp, Homo sapien
tctactctggcaagttaaacataaa

SEQ ID NO: 275219 - DNA, 25 bp, Homo sapien
cagtatacaagtctggtcacagcag

SEQ ID NO: 275220 - DNA, 25 bp, Homo sapien
catatggaattaatgttggttctca

SEQ ID NO: 275221 - DNA, 25 bp, Homo sapien
gttcccacaggctcataactaaagg

SEQ ID NO: 275222 - DNA, 25 bp, Homo sapien
tatcacactatcttatggagaagag

SEQ ID NO: 275223 - DNA, 25 bp, Homo sapien
acttgtactaacaacgcaatgtcag

SEQ ID NO: 275224 - DNA, 25 bp, Homo sapien
tcagtaacaaagacataaatttgaa

SEQ ID NO: 275225 - DNA, 25 bp, Homo sapien
tcattgttgctatcatctttgtcaa

SEQ ID NO: 275226 - DNA, 25 bp, Homo sapien
aatatgcttggcaacatagctgaaa

SEQ ID NO: 275227 - DNA, 25 bp, Homo sapien
gggctctactctcatttccttgctg

SEQ ID NO: 275228 - DNA, 25 bp, Homo sapien
ccttggtccgtgaagaagatggtcc

SEQ ID NO: 275229 - DNA, 25 bp, Homo sapien
tggaaagccaagggctctactctca

SEQ ID NO: 275230 - DNA, 25 bp, Homo sapien
ttccttggtccgtgaagaagatggt

SEQ ID NO: 275231 - DNA, 25 bp, Homo sapien
gggctgaacatggccagcccctcac

SEQ ID NO: 275232 - DNA, 25 bp, Homo sapien
actaagaaagtgacaaggcaagttg

SEQ ID NO: 275233 - DNA, 25 bp, Homo sapien
agaaagtgacaaggcaagttgcaga

SEQ ID NO: 275234 - DNA, 25 bp, Homo sapien
ctcacatcaacaatatgtaaagagc

SEQ ID NO: 275235 - DNA, 25 bp, Homo sapien
acagagggctcacatcaacaatatg

SEQ ID NO: 275236 - DNA, 25 bp, Homo sapien
gcaggaccatgtagaatcccaccgg

SEQ ID NO: 275237 - DNA, 25 bp, Homo sapien
ggccactttagaggcgagactccgt

SEQ ID NO: 275238 - DNA, 25 bp, Homo sapien
caccggcccttgctgagtcattgcg

SEQ ID NO: 275239 - DNA, 25 bp, Homo sapien
cacaggacctgggtctaaggcacca

SEQ ID NO: 275240 - DNA, 25 bp, Homo sapien
agctcacgtcatcccgaccgcggcg

SEQ ID NO: 275241 - DNA, 25 bp, Homo sapien
gcgccccgcccgtcttaggacagtc

SEQ ID NO: 275242 - DNA, 25 bp, Homo sapien
ttatgacagtccctagcgcagcgcg

SEQ ID NO: 275243 - DNA, 25 bp, Homo sapien
gccccttttatgacagtccctagcg

SEQ ID NO: 275244 - DNA, 25 bp, Homo sapien
ggcgcggacgcccgctagccgccgg

SEQ ID NO: 275245 - DNA, 25 bp, Homo sapien
caggctctgtaacgccgacagcagc

SEQ ID NO: 275246 - DNA, 25 bp, Homo sapien
cgacagcagctggtagtgtcgctcc

SEQ ID NO: 275247 - DNA, 25 bp, Homo sapien
tcctccaaggcgcccgcgtagcgct

SEQ ID NO: 275248 - DNA, 25 bp, Homo sapien
tgctgccgggcaccgtccgccacct

SEQ ID NO: 275249 - DNA, 25 bp, Homo sapien
tggttgtacaggctcttttcggtga

SEQ ID NO: 275250 - DNA, 25 bp, Homo sapien
tcggtgaggtgctggatctccagta

SEQ ID NO: 275251 - DNA, 25 bp, Homo sapien
gctcgttctgtaggcgcaggcgctg

SEQ ID NO: 275252 - DNA, 25 bp, Homo sapien
agtagcccctgcacgatttcgaaca

SEQ ID NO: 275253 - DNA, 25 bp, Homo sapien
ccaaaaaggcgctgtctcagtctct

SEQ ID NO: 275254 - DNA, 25 bp, Homo sapien
ctctgcgcccttgattttgttaatc

SEQ ID NO: 275255 - DNA, 25 bp, Homo sapien
aacaaaactcgttggacacattggt

SEQ ID NO: 275256 - DNA, 25 bp, Homo sapien
cattggtcaccaaaaaggcgctgtc

SEQ ID NO: 275257 - DNA, 25 bp, Homo sapien
ctgtcaacagaactccaattaccgg

SEQ ID NO: 275258 - DNA, 25 bp, Homo sapien
cccgaacagggagtttctgctaaga

SEQ ID NO: 275259 - DNA, 25 bp, Homo sapien
gagggcaacgcagtcagatctacca

SEQ ID NO: 275260 - DNA, 25 bp, Homo sapien
ggccaaccaagcacggaggcctagg

SEQ ID NO: 275261 - DNA, 25 bp, Homo sapien
tataatttgcaggaaagggctccga

SEQ ID NO: 275262 - DNA, 25 bp, Homo sapien
catgcggctcaagtgggaagctctt

SEQ ID NO: 275263 - DNA, 25 bp, Homo sapien
ggcctgagagggaactgaccctgaa

SEQ ID NO: 275264 - DNA, 25 bp, Homo sapien
gatgtgcaactagaatgaggccctg

SEQ ID NO: 275265 - DNA, 25 bp, Homo sapien
tgcatgcatcttacagctcaataaa

SEQ ID NO: 275266 - DNA, 25 bp, Homo sapien
aatgagccatgcacttgggattagt

SEQ ID NO: 275267 - DNA, 25 bp, Homo sapien
gcacagtctgagcattaaggaataa

SEQ ID NO: 275268 - DNA, 25 bp, Homo sapien
tgctcacagaatgatggggcggcat

SEQ ID NO: 275269 - DNA, 25 bp, Homo sapien
ccaagcaaagctccacggtccctgc

SEQ ID NO: 275270 - DNA, 25 bp, Homo sapien
accaagcaaagctccacggtccctg

SEQ ID NO: 275271 - DNA, 25 bp, Homo sapien
caccaagcaaagctccacggtccct

SEQ ID NO: 275272 - DNA, 25 bp, Homo sapien
ccaccaagcaaagctccacggtccc

SEQ ID NO: 275273 - DNA, 25 bp, Homo sapien
cccactgtcacggcaagtctccagg

SEQ ID NO: 275274 - DNA, 25 bp, Homo sapien
cagccaggccaaaggggtgtctgca

SEQ ID NO: 275275 - DNA, 25 bp, Homo sapien
gaggacgccagcctcctccatcctc

SEQ ID NO: 275276 - DNA, 25 bp, Homo sapien
tgcactggggaggacgccagcctcc

SEQ ID NO: 275277 - DNA, 25 bp, Homo sapien
tctgcactggggaggacgccagcct

SEQ ID NO: 275278 - DNA, 25 bp, Homo sapien
ctctagttctcgctgctgagccgcc

SEQ ID NO: 275279 - DNA, 25 bp, Homo sapien
tacatgccggtctctggttgtccct

SEQ ID NO: 275280 - DNA, 25 bp, Homo sapien
tgagggcagctcaaacacatgctcc

SEQ ID NO: 275281 - DNA, 25 bp, Homo sapien
gacttgttggttacatgccggtctc

SEQ ID NO: 275282 - DNA, 25 bp, Homo sapien
cgaatgctttgacttgggactgcct

SEQ ID NO: 275283 - DNA, 25 bp, Homo sapien
tgtgctctgctggtcagccaccttc

SEQ ID NO: 275284 - DNA, 25 bp, Homo sapien
ttggtggtcacgtagaagccagcca

SEQ ID NO: 275285 - DNA, 25 bp, Homo sapien
gatcttctggtccatcgcccgctgc

SEQ ID NO: 275286 - DNA, 25 bp, Homo sapien
ccatcgcccgctgctcctcacggat

SEQ ID NO: 275287 - DNA, 25 bp, Homo sapien
tgcctttctggtcacactgggcagc

SEQ ID NO: 275288 - DNA, 25 bp, Homo sapien
ctgggcagcaggcaactgccaggga

SEQ ID NO: 275289 - DNA, 25 bp, Homo sapien
ccagggacctcctagccccagggct

SEQ ID NO: 275290 - DNA, 25 bp, Homo sapien
cagcttccggatgagttccagcagg

SEQ ID NO: 275291 - DNA, 25 bp, Homo sapien
caagggagcggctgagaccagaaca

SEQ ID NO: 275292 - DNA, 25 bp, Homo sapien
ctatcctagggtttgacagcaagtc

SEQ ID NO: 275293 - DNA, 25 bp, Homo sapien
ggtcaagaagatgaactctgcccag

SEQ ID NO: 275294 - DNA, 25 bp, Homo sapien
gatgtgcccggtggagtaaggtgtg

SEQ ID NO: 275295 - DNA, 25 bp, Homo sapien
aacctgatacctgcctgggacagcc

SEQ ID NO: 275296 - DNA, 25 bp, Homo sapien
aactctcctcgaatgtgtgggccca

SEQ ID NO: 275297 - DNA, 25 bp, Homo sapien
tgcccagagtatgggcactcaggtg

SEQ ID NO: 275298 - DNA, 25 bp, Homo sapien
ccttggacctagaggattgtccacc

SEQ ID NO: 275299 - DNA, 25 bp, Homo sapien
cctcttagaggcgtgtgtgcatgct

SEQ ID NO: 275300 - DNA, 25 bp, Homo sapien
gaacgtgcgtgtggtcaagcctgct

SEQ ID NO: 275301 - DNA, 25 bp, Homo sapien
taatggactcgctggacataccgtc

SEQ ID NO: 275302 - DNA, 25 bp, Homo sapien
gttgtagcgtgtcctctgcccgatg

SEQ ID NO: 275303 - DNA, 25 bp, Homo sapien
ctcggacctcgcaaattttcctatt

SEQ ID NO: 275304 - DNA, 25 bp, Homo sapien
tccctctcggacctcgcaaattttc

SEQ ID NO: 275305 - DNA, 25 bp, Homo sapien
aacgcgcaggaggcgtaccgcagcc

SEQ ID NO: 275306 - DNA, 25 bp, Homo sapien
gcaggaggcgtaccgcagccggcga

SEQ ID NO: 275307 - DNA, 25 bp, Homo sapien
tactgaagttcagccggaggccagt

SEQ ID NO: 275308 - DNA, 25 bp, Homo sapien
agttcagccggaggccagtattgat

SEQ ID NO: 275309 - DNA, 25 bp, Homo sapien
tgaagttcagccggaggccagtatt

SEQ ID NO: 275310 - DNA, 25 bp, Homo sapien
tcagccggaggccagtattgatagg

SEQ ID NO: 275311 - DNA, 25 bp, Homo sapien
caggtacccattcgctatcattaac

SEQ ID NO: 275312 - DNA, 25 bp, Homo sapien
gggccaggtacccattcgctatcat

SEQ ID NO: 275313 - DNA, 25 bp, Homo sapien
tacccattcgctatcattaacatat

SEQ ID NO: 275314 - DNA, 25 bp, Homo sapien
attcatcacttgtgggtgtttctcg

SEQ ID NO: 275315 - DNA, 25 bp, Homo sapien
catcacttgtgggtgtttctcgaag

SEQ ID NO: 275316 - DNA, 25 bp, Homo sapien
tttattcatcacttgtgggtgtttc

SEQ ID NO: 275317 - DNA, 25 bp, Homo sapien
agtatttattcatcacttgtgggtg

SEQ ID NO: 275318 - DNA, 25 bp, Homo sapien
cctgttgctgccacttgtcctgggt

SEQ ID NO: 275319 - DNA, 25 bp, Homo sapien
ctgttgctgccacttgtcctgggtc

SEQ ID NO: 275320 - DNA, 25 bp, Homo sapien
gttgctgccacttgtcctgggtcat

SEQ ID NO: 275321 - DNA, 25 bp, Homo sapien
tgttgctgccacttgtcctgggtca

SEQ ID NO: 275322 - DNA, 25 bp, Homo sapien
cagggcccagagtgttttggggaga

SEQ ID NO: 275323 - DNA, 25 bp, Homo sapien
tccagggcccagagtgttttgggga

SEQ ID NO: 275324 - DNA, 25 bp, Homo sapien
ttttggggagatcctgtgctggcat

SEQ ID NO: 275325 - DNA, 25 bp, Homo sapien
gtgttttggggagatcctgtgctgg

SEQ ID NO: 275326 - DNA, 25 bp, Homo sapien
ttccagaggccagaaaaccatgatg

SEQ ID NO: 275327 - DNA, 25 bp, Homo sapien
tctccagcaccgttccagaggccag

SEQ ID NO: 275328 - DNA, 25 bp, Homo sapien
caggactttgtggttcctcctgcac

SEQ ID NO: 275329 - DNA, 25 bp, Homo sapien
acagctgccatgaacttccacagga

SEQ ID NO: 275330 - DNA, 25 bp, Homo sapien
gaccctggacagtcacacgatggga

SEQ ID NO: 275331 - DNA, 25 bp, Homo sapien
gcctgacggcttgttccttgaatga

SEQ ID NO: 275332 - DNA, 25 bp, Homo sapien
gaggcccatccagagcaattgtgaa

SEQ ID NO: 275333 - DNA, 25 bp, Homo sapien
catacggagagagatgggccatgtc

SEQ ID NO: 275334 - DNA, 25 bp, Homo sapien
catgggcaagtgaggacatccagaa

SEQ ID NO: 275335 - DNA, 25 bp, Homo sapien
gctggctctgccaaggtgcatgtgt

SEQ ID NO: 275336 - DNA, 25 bp, Homo sapien
aacggatggctcagcagagcggcca

SEQ ID NO: 275337 - DNA, 25 bp, Homo sapien
tgccgcttgggtgctctggtcatca

SEQ ID NO: 275338 - DNA, 25 bp, Homo sapien
tggcccatccagccaggcgaggggc

SEQ ID NO: 275339 - DNA, 25 bp, Homo sapien
ggctggtttcctgtgtccgccacct

SEQ ID NO: 275340 - DNA, 25 bp, Homo sapien
ctcttcatcataggggtcaggcgga

SEQ ID NO: 275341 - DNA, 25 bp, Homo sapien
gccctcttcatcataggggtcaggc

SEQ ID NO: 275342 - DNA, 25 bp, Homo sapien
gggcgccagtctccggcccagcccc

SEQ ID NO: 275343 - DNA, 25 bp, Homo sapien
gggcgggcgccagtctccggcccag

SEQ ID NO: 275344 - DNA, 25 bp, Homo sapien
agggccgtccgtgccacaaagcatg

SEQ ID NO: 275345 - DNA, 25 bp, Homo sapien
gcacagggccgtccgtgccacaaag

SEQ ID NO: 275346 - DNA, 25 bp, Homo sapien
ctcctggtgttgcaccggctgcaca

SEQ ID NO: 275347 - DNA, 25 bp, Homo sapien
cctggtgttgcaccggctgcacagg

SEQ ID NO: 275348 - DNA, 25 bp, Homo sapien
gattgcaccccttgatttgcctggc

SEQ ID NO: 275349 - DNA, 25 bp, Homo sapien
ccacgatgcacaagaatagttcccg

SEQ ID NO: 275350 - DNA, 25 bp, Homo sapien
taatcctagagatgcacgatgccaa

SEQ ID NO: 275351 - DNA, 25 bp, Homo sapien
tagttcccgatgtgcaaagtgttta

SEQ ID NO: 275352 - DNA, 25 bp, Homo sapien
tgcgtgtcgtgcctcggacagcacc

SEQ ID NO: 275353 - DNA, 25 bp, Homo sapien
tgtcgtgcctcggacagcaccaggt

SEQ ID NO: 275354 - DNA, 25 bp, Homo sapien
cgtgtcgtgcctcggacagcaccag

SEQ ID NO: 275355 - DNA, 25 bp, Homo sapien
gtgtgtgctgcagccactcgggggc

SEQ ID NO: 275356 - DNA, 25 bp, Homo sapien
ggatcaaggaaccacctcggatcag

SEQ ID NO: 275357 - DNA, 25 bp, Homo sapien
aagcgggctggtctgtttggagcac

SEQ ID NO: 275358 - DNA, 25 bp, Homo sapien
tggagcacaggtagcccctcaatgt

SEQ ID NO: 275359 - DNA, 25 bp, Homo sapien
ggaaccacctcggatcagctgcagc

SEQ ID NO: 275360 - DNA, 25 bp, Homo sapien
tcaaatctgtctcctcgtggaagcc

SEQ ID NO: 275361 - DNA, 25 bp, Homo sapien
tcgtggaagcccgtcctgattagtt

SEQ ID NO: 275362 - DNA, 25 bp, Homo sapien
tcctgattagttgggtccctgcaga

SEQ ID NO: 275363 - DNA, 25 bp, Homo sapien
ttcaaatctgtctcctcgtggaagc

SEQ ID NO: 275364 - DNA, 25 bp, Homo sapien
tcttccgtcgctttgaattgaccta

SEQ ID NO: 275365 - DNA, 25 bp, Homo sapien
gaaccatcaccttttaaacctgtga

SEQ ID NO: 275366 - DNA, 25 bp, Homo sapien
cactcaggatcatgcttcaaggttc

SEQ ID NO: 275367 - DNA, 25 bp, Homo sapien
gcaacctctaatgtatcttccgtcg

SEQ ID NO: 275368 - DNA, 25 bp, Homo sapien
tgaaaggctttgctcgcctagagag

SEQ ID NO: 275369 - DNA, 25 bp, Homo sapien
gctcgtgggaccgagggacatcagc

SEQ ID NO: 275370 - DNA, 25 bp, Homo sapien
gcctggctcgtgggaccgagggaca

SEQ ID NO: 275371 - DNA, 25 bp, Homo sapien
tggctcgtgggaccgagggacatca

SEQ ID NO: 275372 - DNA, 25 bp, Homo sapien
tggtcagacagacagcgctcagtgc

SEQ ID NO: 275373 - DNA, 25 bp, Homo sapien
ctggtcagacagacagcgctcagtg

SEQ ID NO: 275374 - DNA, 25 bp, Homo sapien
ttggtggtgacgatgacaaagggct

SEQ ID NO: 275375 - DNA, 25 bp, Homo sapien
gggctgcaggtacgtccactgcacg

SEQ ID NO: 275376 - DNA, 25 bp, Homo sapien
gctgcaggtacgtccactgcacgtt

SEQ ID NO: 275377 - DNA, 25 bp, Homo sapien
tggtggtgacgatgacaaagggctg

SEQ ID NO: 275378 - DNA, 25 bp, Homo sapien
tcctgggcgcacccctgagggttgc

SEQ ID NO: 275379 - DNA, 25 bp, Homo sapien
ctgggcgcacccctgagggttgcag

SEQ ID NO: 275380 - DNA, 25 bp, Homo sapien
cctgggcgcacccctgagggttgca

SEQ ID NO: 275381 - DNA, 25 bp, Homo sapien
aattcttcatgaatggcgtcgaacc

SEQ ID NO: 275382 - DNA, 25 bp, Homo sapien
gggaattcttcatgaatggcgtcga

SEQ ID NO: 275383 - DNA, 25 bp, Homo sapien
atggcgtcgaaccatgggactctgg

SEQ ID NO: 275384 - DNA, 25 bp, Homo sapien
catgaatggcgtcgaaccatgggac

SEQ ID NO: 275385 - DNA, 25 bp, Homo sapien
taggatgctcaacctctacctaagc

SEQ ID NO: 275386 - DNA, 25 bp, Homo sapien
agtgtcaggttggtgctcaagaagg

SEQ ID NO: 275387 - DNA, 25 bp, Homo sapien
aggatgctcaacctctacctaagca

SEQ ID NO: 275388 - DNA, 25 bp, Homo sapien
tcaggttggtgctcaagaaggttca

SEQ ID NO: 275389 - DNA, 25 bp, Homo sapien
gaagtttttagtaattgtcacagat

SEQ ID NO: 275390 - DNA, 25 bp, Homo sapien
ggaagtttttagtaattgtcacaga

SEQ ID NO: 275391 - DNA, 25 bp, Homo sapien
agggtcggggacctcgtcctctcag

SEQ ID NO: 275392 - DNA, 25 bp, Homo sapien
gggacctcgtcctctcagtttcaag

SEQ ID NO: 275393 - DNA, 25 bp, Homo sapien
cagagtcacccctctttttaagaca

SEQ ID NO: 275394 - DNA, 25 bp, Homo sapien
gtttcaagcatgaccccacatcaga

SEQ ID NO: 275395 - DNA, 25 bp, Homo sapien
cagagacagaaacaacggtgggcac

SEQ ID NO: 275396 - DNA, 25 bp, Homo sapien
ccgaaaacagtatggtgcgtcctca

SEQ ID NO: 275397 - DNA, 25 bp, Homo sapien
caacgtgagcagagcgtgaggactc

SEQ ID NO: 275398 - DNA, 25 bp, Homo sapien
tcacacaggccgaaaggtggaaacg

SEQ ID NO: 275399 - DNA, 25 bp, Homo sapien
tctgcggggtggtcctccggctggc

SEQ ID NO: 275400 - DNA, 25 bp, Homo sapien
tggtctgcggggtggtcctccggct

SEQ ID NO: 275401 - DNA, 25 bp, Homo sapien
aggccctgggcgtgtggtctgcggg

SEQ ID NO: 275402 - DNA, 25 bp, Homo sapien
gcctccccctcggtgccaggccctg

SEQ ID NO: 275403 - DNA, 25 bp, Homo sapien
tagccagtgtcatcagggtgtcgct

SEQ ID NO: 275404 - DNA, 25 bp, Homo sapien
agtgtcatcagggtgtcgctttcac

SEQ ID NO: 275405 - DNA, 25 bp, Homo sapien
ctagccagtgtcatcagggtgtcgc

SEQ ID NO: 275406 - DNA, 25 bp, Homo sapien
ccagtgtcatcagggtgtcgctttc

SEQ ID NO: 275407 - DNA, 25 bp, Homo sapien
cggggtacagtaaacgatgaccaga

SEQ ID NO: 275408 - DNA, 25 bp, Homo sapien
ccggggtacagtaaacgatgaccag

SEQ ID NO: 275409 - DNA, 25 bp, Homo sapien
tgccccggggtacagtaaacgatga

SEQ ID NO: 275410 - DNA, 25 bp, Homo sapien
ctgccccggggtacagtaaacgatg

SEQ ID NO: 275411 - DNA, 25 bp, Homo sapien
agaggctgcggcggttggggtcata

SEQ ID NO: 275412 - DNA, 25 bp, Homo sapien
gaggctgcggcggttggggtcatag

SEQ ID NO: 275413 - DNA, 25 bp, Homo sapien
aggctgcggcggttggggtcatagg

SEQ ID NO: 275414 - DNA, 25 bp, Homo sapien
tgagaaccacgtgaacatgaggacc

SEQ ID NO: 275415 - DNA, 25 bp, Homo sapien
caaagctgcttgtgggacattcatc

SEQ ID NO: 275416 - DNA, 25 bp, Homo sapien
gcaggtttcatcactgacagggcac

SEQ ID NO: 275417 - DNA, 25 bp, Homo sapien
cagaatcacactccgagagcttgga

SEQ ID NO: 275418 - DNA, 25 bp, Homo sapien
aacatttgcttaatcccatgcacaa

SEQ ID NO: 275419 - DNA, 25 bp, Homo sapien
catttgcttaatcccatgcacaaat

SEQ ID NO: 275420 - DNA, 25 bp, Homo sapien
acatttgcttaatcccatgcacaaa

SEQ ID NO: 275421 - DNA, 25 bp, Homo sapien
ctgaggtcaagaagccagagcacag

SEQ ID NO: 275422 - DNA, 25 bp, Homo sapien
accagtgcgctcaccatcgacgtat

SEQ ID NO: 275423 - DNA, 25 bp, Homo sapien
tgtacaccagtgcgctcaccatcga

SEQ ID NO: 275424 - DNA, 25 bp, Homo sapien
cagtgcgctcaccatcgacgtatta

SEQ ID NO: 275425 - DNA, 25 bp, Homo sapien
cgctcaccatcgacgtattaatgat

SEQ ID NO: 275426 - DNA, 25 bp, Homo sapien
gccagggaatggttccagaacacac

SEQ ID NO: 275427 - DNA, 25 bp, Homo sapien
agatgcagaactcccggcatcacat

SEQ ID NO: 275428 - DNA, 25 bp, Homo sapien
tgaagatgcagaactcccggcatca

SEQ ID NO: 275429 - DNA, 25 bp, Homo sapien
gaagatgcagaactcccggcatcac

SEQ ID NO: 275430 - DNA, 25 bp, Homo sapien
aagatgcagaactcccggcatcaca

SEQ ID NO: 275431 - DNA, 25 bp, Homo sapien
tgttggccactgcatctcgggagtc

SEQ ID NO: 275432 - DNA, 25 bp, Homo sapien
tgaaacaggccagataaacagtgct

SEQ ID NO: 275433 - DNA, 25 bp, Homo sapien
gaactgggcactacactcgtgttgg

SEQ ID NO: 275434 - DNA, 25 bp, Homo sapien
tcgggagtcccacaagtgagaggcc

SEQ ID NO: 275435 - DNA, 25 bp, Homo sapien
cggccccctgcaccgaacagccacc

SEQ ID NO: 275436 - DNA, 25 bp, Homo sapien
gccccctgcaccgaacagccaccca

SEQ ID NO: 275437 - DNA, 25 bp, Homo sapien
ccccctgcaccgaacagccacccag

SEQ ID NO: 275438 - DNA, 25 bp, Homo sapien
ggccccctgcaccgaacagccaccc

SEQ ID NO: 275439 - DNA, 25 bp, Homo sapien
ggctgctccccaccgtgttcctcac

SEQ ID NO: 275440 - DNA, 25 bp, Homo sapien
gtgagtgctgaaagcccggcgccct

SEQ ID NO: 275441 - DNA, 25 bp, Homo sapien
ggtgagacggttccctccgcccatg

SEQ ID NO: 275442 - DNA, 25 bp, Homo sapien
tgggggcagtctttgcccggccctg

SEQ ID NO: 275443 - DNA, 25 bp, Homo sapien
tacgacatgggtccggttcctggac

SEQ ID NO: 275444 - DNA, 25 bp, Homo sapien
gctgcactggcgtacgacatgggtc

SEQ ID NO: 275445 - DNA, 25 bp, Homo sapien
ctggagacgtccatgagcacctcga

SEQ ID NO: 275446 - DNA, 25 bp, Homo sapien
tggcgtacgacatgggtccggttcc

SEQ ID NO: 275447 - DNA, 25 bp, Homo sapien
taattggttgatttgcttcgttcaa

SEQ ID NO: 275448 - DNA, 25 bp, Homo sapien
aggctcagcgggcatagtggccaca

SEQ ID NO: 275449 - DNA, 25 bp, Homo sapien
caaagcgcttagaatggaagattta

SEQ ID NO: 275450 - DNA, 25 bp, Homo sapien
tcagcgggcatagtggccacaagaa

SEQ ID NO: 275451 - DNA, 25 bp, Homo sapien
ttggctgaaagacttactaccgctt

SEQ ID NO: 275452 - DNA, 25 bp, Homo sapien
gaaatgccttcgtaagcccctacag

SEQ ID NO: 275453 - DNA, 25 bp, Homo sapien
tgggctagcagaaaccttccaaata

SEQ ID NO: 275454 - DNA, 25 bp, Homo sapien
ttctgatagatctgccaagggcgtc

SEQ ID NO: 275455 - DNA, 25 bp, Homo sapien
cagactcgtgtccagagaagatcgt

SEQ ID NO: 275456 - DNA, 25 bp, Homo sapien
tatccccagactcgtgtccagagaa

SEQ ID NO: 275457 - DNA, 25 bp, Homo sapien
ggctatccccagactcgtgtccaga

SEQ ID NO: 275458 - DNA, 25 bp, Homo sapien
tcgtgtccagagaagatcgtgttga

SEQ ID NO: 275459 - DNA, 25 bp, Homo sapien
gcactgtgtgcttcgaattccagga

SEQ ID NO: 275460 - DNA, 25 bp, Homo sapien
taaggtgctaatccgttaaggtcgc

SEQ ID NO: 275461 - DNA, 25 bp, Homo sapien
aaagttcgagcatctgacagttccc

SEQ ID NO: 275462 - DNA, 25 bp, Homo sapien
gaatctagcttaccagatggccata

SEQ ID NO: 275463 - DNA, 25 bp, Homo sapien
attatgcatttcagaccaggtgcag

SEQ ID NO: 275464 - DNA, 25 bp, Homo sapien
gattatgcatttcagaccaggtgca

SEQ ID NO: 275465 - DNA, 25 bp, Homo sapien
aaagattatgcatttcagaccaggt

SEQ ID NO: 275466 - DNA, 25 bp, Homo sapien
aagattatgcatttcagaccaggtg

SEQ ID NO: 275467 - DNA, 25 bp, Homo sapien
taccatcaatccctaaagacaacag

SEQ ID NO: 275468 - DNA, 25 bp, Homo sapien
taacgcaactaaagctcatagacag

SEQ ID NO: 275469 - DNA, 25 bp, Homo sapien
gattgcattcagttagggttttcca

SEQ ID NO: 275470 - DNA, 25 bp, Homo sapien
tctcaattgaacctttagaggcatc

SEQ ID NO: 275471 - DNA, 25 bp, Homo sapien
tcttccactgttctttattccttct

SEQ ID NO: 275472 - DNA, 25 bp, Homo sapien
atatttactcttccactgttcttta

SEQ ID NO: 275473 - DNA, 25 bp, Homo sapien
tcatatttactcttccactgttctt

SEQ ID NO: 275474 - DNA, 25 bp, Homo sapien
tactcttccactgttctttattcct

SEQ ID NO: 275475 - DNA, 25 bp, Homo sapien
gtggaggcgggcggatcgcaaggac

SEQ ID NO: 275476 - DNA, 25 bp, Homo sapien
ggaggcgggcggatcgcaaggacag

SEQ ID NO: 275477 - DNA, 25 bp, Homo sapien
gaggtggaggcgggcggatcgcaag

SEQ ID NO: 275478 - DNA, 25 bp, Homo sapien
aggtggaggcgggcggatcgcaagg

SEQ ID NO: 275479 - DNA, 25 bp, Homo sapien
ggccattccagctaaaaggtcatca

SEQ ID NO: 275480 - DNA, 25 bp, Homo sapien
cagaaactctataggtcacgtgacc

SEQ ID NO: 275481 - DNA, 25 bp, Homo sapien
gacctatgggagtcctgatccaaac

SEQ ID NO: 275482 - DNA, 25 bp, Homo sapien
tgggtatcacagagttacaactggc

SEQ ID NO: 275483 - DNA, 25 bp, Homo sapien
gaatctgtcccataagtctccaatg

SEQ ID NO: 275484 - DNA, 25 bp, Homo sapien
caagtctagagttttctggtggagg

SEQ ID NO: 275485 - DNA, 25 bp, Homo sapien
atttgtgtgatgtctaataaaagtg

SEQ ID NO: 275486 - DNA, 25 bp, Homo sapien
tcacatcttcatcagacaaggataa

SEQ ID NO: 275487 - DNA, 25 bp, Homo sapien
ctggtggaggctttacatgtttgta

SEQ ID NO: 275488 - DNA, 25 bp, Homo sapien
cgtcaacgggaaactgctcgcatag

SEQ ID NO: 275489 - DNA, 25 bp, Homo sapien
gaatcttcagcgatccacaggtgga

SEQ ID NO: 275490 - DNA, 25 bp, Homo sapien
cactcgctcaggttggaaagatgca

SEQ ID NO: 275491 - DNA, 25 bp, Homo sapien
gaaagatgcattgcccgtcaacggg

SEQ ID NO: 275492 - DNA, 25 bp, Homo sapien
cagtcactggtgtacatccttgtaa

SEQ ID NO: 275493 - DNA, 25 bp, Homo sapien
aaagcataaggactgcctgtctacc

SEQ ID NO: 275494 - DNA, 25 bp, Homo sapien
gtaacatctacgtcagccaaaagca

SEQ ID NO: 275495 - DNA, 25 bp, Homo sapien
tttatccccgtatcagcgcaatgct

SEQ ID NO: 275496 - DNA, 25 bp, Homo sapien
tctgagcccttacgcctcggcaggt

SEQ ID NO: 275497 - DNA, 25 bp, Homo sapien
tctgaccttgaggagctgtgggagg

SEQ ID NO: 275498 - DNA, 25 bp, Homo sapien
caccctgtagcactgcaaacacagg

SEQ ID NO: 275499 - DNA, 25 bp, Homo sapien
gagcttaagtataggtctctaccca

SEQ ID NO: 275500 - DNA, 25 bp, Homo sapien
gcactctctgcactgggttcttcct

SEQ ID NO: 275501 - DNA, 25 bp, Homo sapien
tgtgtgggcccctagtctctgtctc

SEQ ID NO: 275502 - DNA, 25 bp, Homo sapien
tgtccgaggcctctgctatcccaat

SEQ ID NO: 275503 - DNA, 25 bp, Homo sapien
gagtctacatgctgagcgggcctgt

SEQ ID NO: 275504 - DNA, 25 bp, Homo sapien
caccatggagggccgcctggcggga

SEQ ID NO: 275505 - DNA, 25 bp, Homo sapien
actaaagagggtccgcaagcagggc

SEQ ID NO: 275506 - DNA, 25 bp, Homo sapien
tggcgggacacgccccaacatacag

SEQ ID NO: 275507 - DNA, 25 bp, Homo sapien
gctagtgtcaattttcactgaatta

SEQ ID NO: 275508 - DNA, 25 bp, Homo sapien
tctgtgtctttaacctcctctaatc

SEQ ID NO: 275509 - DNA, 25 bp, Homo sapien
tttaacctcctctaatccaacagtc

SEQ ID NO: 275510 - DNA, 25 bp, Homo sapien
tctttaacctcctctaatccaacag

SEQ ID NO: 275511 - DNA, 25 bp, Homo sapien
gtgtctttaacctcctctaatccaa

SEQ ID NO: 275512 - DNA, 25 bp, Homo sapien
tcgctggctctgtacgcactacgcg

SEQ ID NO: 275513 - DNA, 25 bp, Homo sapien
agccgcggcacctcggaccgcgaag

SEQ ID NO: 275514 - DNA, 25 bp, Homo sapien
ccggcccattggattgcggccccgg

SEQ ID NO: 275515 - DNA, 25 bp, Homo sapien
gcgaagccgcttcggcccggagctg

SEQ ID NO: 275516 - DNA, 25 bp, Homo sapien
tgcgctccgcattctgctgggccgt

SEQ ID NO: 275517 - DNA, 25 bp, Homo sapien
cggtgcgctccgcattctgctgggc

SEQ ID NO: 275518 - DNA, 25 bp, Homo sapien
gggctcggtgcgctccgcattctgc

SEQ ID NO: 275519 - DNA, 25 bp, Homo sapien
tccgcattctgctgggccgtccggg

SEQ ID NO: 275520 - DNA, 25 bp, Homo sapien
tgtggaatgtgattacatactggtt

SEQ ID NO: 275521 - DNA, 25 bp, Homo sapien
atgtgattacatactggttgacacc

SEQ ID NO: 275522 - DNA, 25 bp, Homo sapien
ttgtgtgtggtttgacactattcca

SEQ ID NO: 275523 - DNA, 25 bp, Homo sapien
cttgtgtgtggtttgacactattcc

SEQ ID NO: 275524 - DNA, 25 bp, Homo sapien
gatgactccagctacatttcccgag

SEQ ID NO: 275525 - DNA, 25 bp, Homo sapien
cgtgctctgctaaatgatgactcca

SEQ ID NO: 275526 - DNA, 25 bp, Homo sapien
tacatttcccgaggccaagagatga

SEQ ID NO: 275527 - DNA, 25 bp, Homo sapien
aacccagggacaccgtgctctgcta

SEQ ID NO: 275528 - DNA, 25 bp, Homo sapien
tccgtcttggcctggatccgcaggg

SEQ ID NO: 275529 - DNA, 25 bp, Homo sapien
gggtgcaaagaagtcccctcctctg

SEQ ID NO: 275530 - DNA, 25 bp, Homo sapien
gtgttgagtcccgagcacacaggtc

SEQ ID NO: 275531 - DNA, 25 bp, Homo sapien
catccttgccccgaaagtcatgggc

SEQ ID NO: 275532 - DNA, 25 bp, Homo sapien
tgagttgcccacagacagacttgac

SEQ ID NO: 275533 - DNA, 25 bp, Homo sapien
tgtatgtggccaagcgtctgcaggt

SEQ ID NO: 275534 - DNA, 25 bp, Homo sapien
acatggaacttcacgggtcactggg

SEQ ID NO: 275535 - DNA, 25 bp, Homo sapien
taaagtggaccatgcaggctgcaga

SEQ ID NO: 275536 - DNA, 25 bp, Homo sapien
ggccatggccacacctgatgcgttt

SEQ ID NO: 275537 - DNA, 25 bp, Homo sapien
tcagaccgcacatgttagaggcagg

SEQ ID NO: 275538 - DNA, 25 bp, Homo sapien
aaaagaagtgatggcctgcaccgag

SEQ ID NO: 275539 - DNA, 25 bp, Homo sapien
acaacggttgcactgaagatggccc

SEQ ID NO: 275540 - DNA, 25 bp, Homo sapien
gtgaaggtgcattactccggcgcct

SEQ ID NO: 275541 - DNA, 25 bp, Homo sapien
gagtgaaggtgcattactccggcgc

SEQ ID NO: 275542 - DNA, 25 bp, Homo sapien
tgatgcttttgagcctgtggaggtc

SEQ ID NO: 275543 - DNA, 25 bp, Homo sapien
aggtgcattactccggcgcctggag

SEQ ID NO: 275544 - DNA, 25 bp, Homo sapien
acgagtcaagtgcagtcgtgagaac

SEQ ID NO: 275545 - DNA, 25 bp, Homo sapien
tcaagtgcagtcgtgagaacgggaa

SEQ ID NO: 275546 - DNA, 25 bp, Homo sapien
gcagtcgtgagaacgggaaaagagt

SEQ ID NO: 275547 - DNA, 25 bp, Homo sapien
tcgtgagaacgggaaaagagtacaa

SEQ ID NO: 275548 - DNA, 25 bp, Homo sapien
cagtgaatcagctcgttgtagtgga

SEQ ID NO: 275549 - DNA, 25 bp, Homo sapien
tgctggccggatctccactccatga

SEQ ID NO: 275550 - DNA, 25 bp, Homo sapien
tgattcctcgcgaccatccattgca

SEQ ID NO: 275551 - DNA, 25 bp, Homo sapien
tgcttattccccttgatcaggccgg

SEQ ID NO: 275552 - DNA, 25 bp, Homo sapien
agctgctaccgggtctacctgagcg

SEQ ID NO: 275553 - DNA, 25 bp, Homo sapien
tgccagcgcctgaatggctctctcg

SEQ ID NO: 275554 - DNA, 25 bp, Homo sapien
gagaactactgggatgccgcgcaga

SEQ ID NO: 275555 - DNA, 25 bp, Homo sapien
acagggtggcaccactacgaaggca

SEQ ID NO: 275556 - DNA, 25 bp, Homo sapien
acttccacgcggtgaacgtggcgca

SEQ ID NO: 275557 - DNA, 25 bp, Homo sapien
gccagaggaggcgacccttcgcact

SEQ ID NO: 275558 - DNA, 25 bp, Homo sapien
ttcgcacttccacgcggtgaacgtg

SEQ ID NO: 275559 - DNA, 25 bp, Homo sapien
gtggcgcagcccgttcgcttcagca

SEQ ID NO: 275560 - DNA, 25 bp, Homo sapien
ggtccatgctccttcttaatagcac

SEQ ID NO: 275561 - DNA, 25 bp, Homo sapien
accgtgcccggtccatgctccttct

SEQ ID NO: 275562 - DNA, 25 bp, Homo sapien
cccggtccatgctccttcttaatag

SEQ ID NO: 275563 - DNA, 25 bp, Homo sapien
gtgcccggtccatgctccttcttaa

SEQ ID NO: 275564 - DNA, 25 bp, Homo sapien
agtcatttgactttgaggcaccatg

SEQ ID NO: 275565 - DNA, 25 bp, Homo sapien
aactttatggacacagtagttacat

SEQ ID NO: 275566 - DNA, 25 bp, Homo sapien
tgggagagtcatttgactttgaggc

SEQ ID NO: 275567 - DNA, 25 bp, Homo sapien
ttttgttaactttatggacacagta

SEQ ID NO: 275568 - DNA, 25 bp, Homo sapien
tgatccacccgcctgcatctctgaa

SEQ ID NO: 275569 - DNA, 25 bp, Homo sapien
gcatacgcctccacgctcggctaat

SEQ ID NO: 275570 - DNA, 25 bp, Homo sapien
acaggcatacgcctccacgctcggc

SEQ ID NO: 275571 - DNA, 25 bp, Homo sapien
aggcatacgcctccacgctcggcta

SEQ ID NO: 275572 - DNA, 25 bp, Homo sapien
ttacaggcatacgcctccacgctcg

SEQ ID NO: 275573 - DNA, 25 bp, Homo sapien
gcagccgagagtgtgcgccagcccg

SEQ ID NO: 275574 - DNA, 25 bp, Homo sapien
cagccgagagtgtgcgccagcccgc

SEQ ID NO: 275575 - DNA, 25 bp, Homo sapien
tgcagccgagagtgtgcgccagccc

SEQ ID NO: 275576 - DNA, 25 bp, Homo sapien
agccgagagtgtgcgccagcccgcg

SEQ ID NO: 275577 - DNA, 25 bp, Homo sapien
cgccccatgccccgcgcctttcgat

SEQ ID NO: 275578 - DNA, 25 bp, Homo sapien
tgaagacccttggagtcccagccag

SEQ ID NO: 275579 - DNA, 25 bp, Homo sapien
tcccacttcgttctctccgctcccc

SEQ ID NO: 275580 - DNA, 25 bp, Homo sapien
aagacccttggagtcccagccaggt

SEQ ID NO: 275581 - DNA, 25 bp, Homo sapien
cttgggcagggctccctggcactca

SEQ ID NO: 275582 - DNA, 25 bp, Homo sapien
cttgcacgccatgtccttgggcagg

SEQ ID NO: 275583 - DNA, 25 bp, Homo sapien
gggcagggctccctggcactcaatg

SEQ ID NO: 275584 - DNA, 25 bp, Homo sapien
ggcagggctccctggcactcaatga

SEQ ID NO: 275585 - DNA, 25 bp, Homo sapien
ttgaggttctggtgcatgatgtcca

SEQ ID NO: 275586 - DNA, 25 bp, Homo sapien
gaagtagaacagcttgatgttgaag

SEQ ID NO: 275587 - DNA, 25 bp, Homo sapien
tgaagtagaacagcttgatgttgaa

SEQ ID NO: 275588 - DNA, 25 bp, Homo sapien
agtagaacagcttgatgttgaagtc

SEQ ID NO: 275589 - DNA, 25 bp, Homo sapien
ctgaagtagaacagcttgatgttga

SEQ ID NO: 275590 - DNA, 25 bp, Homo sapien
cacaagagttcagttccctgggagc

SEQ ID NO: 275591 - DNA, 25 bp, Homo sapien
tcctgatgttggagtcgtaaggcat

SEQ ID NO: 275592 - DNA, 25 bp, Homo sapien
ttcttggagtgtgggaagtccacgc

SEQ ID NO: 275593 - DNA, 25 bp, Homo sapien
tgttgaagaccatagagggcagtcc

SEQ ID NO: 275594 - DNA, 25 bp, Homo sapien
aagcctaggatgtccgactgcctgg

SEQ ID NO: 275595 - DNA, 25 bp, Homo sapien
tttctccctggtcgacggcttgctg

SEQ ID NO: 275596 - DNA, 25 bp, Homo sapien
aagaaattgatgaaaacagcggctc

SEQ ID NO: 275597 - DNA, 25 bp, Homo sapien
cactaggtgcgcatctctggaggct

SEQ ID NO: 275598 - DNA, 25 bp, Homo sapien
cagggtctctggaaccgtggaagcc

SEQ ID NO: 275599 - DNA, 25 bp, Homo sapien
ggtaccacagtagacaggccttgaa

SEQ ID NO: 275600 - DNA, 25 bp, Homo sapien
tcatttacactaccggaggcgtctg

SEQ ID NO: 275601 - DNA, 25 bp, Homo sapien
tcaattggatagtctaaggcagctc

SEQ ID NO: 275602 - DNA, 25 bp, Homo sapien
gccaggagcgactggcgccgctgcc

SEQ ID NO: 275603 - DNA, 25 bp, Homo sapien
gtgccaggagcgactggcgccgctg

SEQ ID NO: 275604 - DNA, 25 bp, Homo sapien
ggtgccaggagcgactggcgccgct

SEQ ID NO: 275605 - DNA, 25 bp, Homo sapien
caggagcgactggcgccgctgccgt

SEQ ID NO: 275606 - DNA, 25 bp, Homo sapien
gacttttgcgtaggaacccttgcca

SEQ ID NO: 275607 - DNA, 25 bp, Homo sapien
gatccgtccgtcagaggtctcaaag

SEQ ID NO: 275608 - DNA, 25 bp, Homo sapien
tgtccagtttgcactcagcgcggta

SEQ ID NO: 275609 - DNA, 25 bp, Homo sapien
ggtcttgctgaggatgatgcgccca

SEQ ID NO: 275610 - DNA, 25 bp, Homo sapien
ttagtttacgtgaaggccgactgca

SEQ ID NO: 275611 - DNA, 25 bp, Homo sapien
ttcagatcctacctgcctacttagt

SEQ ID NO: 275612 - DNA, 25 bp, Homo sapien
gacgaattttacttgcacctgtgcc

SEQ ID NO: 275613 - DNA, 25 bp, Homo sapien
aattgacgaattttacttgcacctg

SEQ ID NO: 275614 - DNA, 25 bp, Homo sapien
cttgatgcttgcacacaccctgtgg

SEQ ID NO: 275615 - DNA, 25 bp, Homo sapien
tcttgatgcttgcacacaccctgtg

SEQ ID NO: 275616 - DNA, 25 bp, Homo sapien
tggtggtcagtaaggaacgtctttg

SEQ ID NO: 275617 - DNA, 25 bp, Homo sapien
cgctgccaagaaccgggccaagaag

SEQ ID NO: 275618 - DNA, 25 bp, Homo sapien
ccctgaccgtgtggaggcatggccc

SEQ ID NO: 275619 - DNA, 25 bp, Homo sapien
gctaccttgtagatcctggagccag

SEQ ID NO: 275620 - DNA, 25 bp, Homo sapien
tggttttgggaggaacacgaagaca

SEQ ID NO: 275621 - DNA, 25 bp, Homo sapien
ccccggcaggtggtacataagaaca

SEQ ID NO: 275622 - DNA, 25 bp, Homo sapien
gataatctcgaactcccgtcagcag

SEQ ID NO: 275623 - DNA, 25 bp, Homo sapien
ggatgattaggcgatgaccacccac

SEQ ID NO: 275624 - DNA, 25 bp, Homo sapien
tcccgtgggtcttgagcttgtagcc

SEQ ID NO: 275625 - DNA, 25 bp, Homo sapien
agttctgctcaaatccctgccgtgg

SEQ ID NO: 275626 - DNA, 25 bp, Homo sapien
taattctccattgaccaggcctgac

SEQ ID NO: 275627 - DNA, 25 bp, Homo sapien
gccatgacctgggaagctacactta

SEQ ID NO: 275628 - DNA, 25 bp, Homo sapien
taaaatgccagcgatcgtgatccgg

SEQ ID NO: 275629 - DNA, 25 bp, Homo sapien
gggagcagccaagccctcgcagctg

SEQ ID NO: 275630 - DNA, 25 bp, Homo sapien
ctgcactaggtgagagcagggtgta

SEQ ID NO: 275631 - DNA, 25 bp, Homo sapien
ctttgaatcacacggcagacatcag

SEQ ID NO: 275632 - DNA, 25 bp, Homo sapien
ctcagggtcacctcgaatcaccttt

SEQ ID NO: 275633 - DNA, 25 bp, Homo sapien
tccgccccggacagggtggcaccca

SEQ ID NO: 275634 - DNA, 25 bp, Homo sapien
tcccgccattggccttaactggccc

SEQ ID NO: 275635 - DNA, 25 bp, Homo sapien
ctggcttcaccgcattccaggggct

SEQ ID NO: 275636 - DNA, 25 bp, Homo sapien
gcatctggcctatgaccctgtgcct

SEQ ID NO: 275637 - DNA, 25 bp, Homo sapien
tggtgaagccttacctgcggtcagt

SEQ ID NO: 275638 - DNA, 25 bp, Homo sapien
accattcaagtggatggcacgcacg

SEQ ID NO: 275639 - DNA, 25 bp, Homo sapien
tagtgtccccataacaagcttggcc

SEQ ID NO: 275640 - DNA, 25 bp, Homo sapien
ggtctggacccaaacccatgtgtct

SEQ ID NO: 275641 - DNA, 25 bp, Homo sapien
cttgagccagtgcacacaaccagca

SEQ ID NO: 275642 - DNA, 25 bp, Homo sapien
aacagcattggaattaggctaatta

SEQ ID NO: 275643 - DNA, 25 bp, Homo sapien
caaaccatgcccctataagaaggga

SEQ ID NO: 275644 - DNA, 25 bp, Homo sapien
ctgactgctccgctgactggccgtg

SEQ ID NO: 275645 - DNA, 25 bp, Homo sapien
tcttgagaggtgacgccacctggac

SEQ ID NO: 275646 - DNA, 25 bp, Homo sapien
tagaatggaccaattagcgctctgt

SEQ ID NO: 275647 - DNA, 25 bp, Homo sapien
tctgtaaaaaacgtaccaatcagca

SEQ ID NO: 275648 - DNA, 25 bp, Homo sapien
tcaggtgatcttgagaggtgacgcc

SEQ ID NO: 275649 - DNA, 25 bp, Homo sapien
ggaagattgcttttgcatggtacct

SEQ ID NO: 275650 - DNA, 25 bp, Homo sapien
gattgcttttgcatggtacctggcg

SEQ ID NO: 275651 - DNA, 25 bp, Homo sapien
taatatgccacgaaaaaccttagca

SEQ ID NO: 275652 - DNA, 25 bp, Homo sapien
ataataatatgccacgaaaaacctt

SEQ ID NO: 275653 - DNA, 25 bp, Homo sapien
atcaaccgggtactgtagctgggcg

SEQ ID NO: 275654 - DNA, 25 bp, Homo sapien
tcccttacatctgcatagatgccgg

SEQ ID NO: 275655 - DNA, 25 bp, Homo sapien
tagatgccggctggactgctgatca

SEQ ID NO: 275656 - DNA, 25 bp, Homo sapien
gatctgggagcccaaatcccttaca

SEQ ID NO: 275657 - DNA, 25 bp, Homo sapien
aggccaggtggtcgttcaggctttg

SEQ ID NO: 275658 - DNA, 25 bp, Homo sapien
aggtaggaggccaggtggtcgttca

SEQ ID NO: 275659 - DNA, 25 bp, Homo sapien
ggctttgcatggtctccttctcatt

SEQ ID NO: 275660 - DNA, 25 bp, Homo sapien
taggaggccaggtggtcgttcaggc

SEQ ID NO: 275661 - DNA, 25 bp, Homo sapien
atggatgtcgctcctcacaaactgg

SEQ ID NO: 275662 - DNA, 25 bp, Homo sapien
tggatgtcgctcctcacaaactggt

SEQ ID NO: 275663 - DNA, 25 bp, Homo sapien
ggatgtcgctcctcacaaactggtg

SEQ ID NO: 275664 - DNA, 25 bp, Homo sapien
ccatggatgtcgctcctcacaaact

SEQ ID NO: 275665 - DNA, 25 bp, Homo sapien
ttctcatcaagtccaggccaatctc

SEQ ID NO: 275666 - DNA, 25 bp, Homo sapien
gatctcggtggactgcgtgatgacc

SEQ ID NO: 275667 - DNA, 25 bp, Homo sapien
ctcagcagctctgatctcggtggac

SEQ ID NO: 275668 - DNA, 25 bp, Homo sapien
tctcggtggactgcgtgatgaccac

SEQ ID NO: 275669 - DNA, 25 bp, Homo sapien
gctccgactccaggtacagtaggac

SEQ ID NO: 275670 - DNA, 25 bp, Homo sapien
gcctccagattgacctggatgttcc

SEQ ID NO: 275671 - DNA, 25 bp, Homo sapien
tccagattgacctggatgttccagg

SEQ ID NO: 275672 - DNA, 25 bp, Homo sapien
gactccaggtacagtaggaccctgt

SEQ ID NO: 275673 - DNA, 25 bp, Homo sapien
tggcttcctttacctagcatagtgt

SEQ ID NO: 275674 - DNA, 25 bp, Homo sapien
gtggaatcatctctacaatacagtt

SEQ ID NO: 275675 - DNA, 25 bp, Homo sapien
tgctgctatcaatgctcactgacaa

SEQ ID NO: 275676 - DNA, 25 bp, Homo sapien
ggcccgaggcagcaactcatctgct

SEQ ID NO: 275677 - DNA, 25 bp, Homo sapien
tccaaattttgtcgtcctagggcaa

SEQ ID NO: 275678 - DNA, 25 bp, Homo sapien
gaatggagtcccaaacaacttgtgg

SEQ ID NO: 275679 - DNA, 25 bp, Homo sapien
ttgtggtcccaaaacagtacagtgg

SEQ ID NO: 275680 - DNA, 25 bp, Homo sapien
gactctggaggtgcatgctcagcta

SEQ ID NO: 275681 - DNA, 25 bp, Homo sapien
tacagctgcctgttgtatgacttgg

SEQ ID NO: 275682 - DNA, 25 bp, Homo sapien
tggcatcctttagtcttttacaaca

SEQ ID NO: 275683 - DNA, 25 bp, Homo sapien
cagttggagtttggccaatcttagc

SEQ ID NO: 275684 - DNA, 25 bp, Homo sapien
gaagatcaacagttaagagagaaag

SEQ ID NO: 275685 - DNA, 25 bp, Homo sapien
cctttggccgataatcaggatttcc

SEQ ID NO: 275686 - DNA, 25 bp, Homo sapien
acacacggactatttttgtactaga

SEQ ID NO: 275687 - DNA, 25 bp, Homo sapien
cacttggacattggtcacttgtagg

SEQ ID NO: 275688 - DNA, 25 bp, Homo sapien
aactctaattatgacagctacactg

SEQ ID NO: 275689 - DNA, 25 bp, Homo sapien
tccttctcccgtgagcagacacaag

SEQ ID NO: 275690 - DNA, 25 bp, Homo sapien
cgtgagcagacacaaggttctctgc

SEQ ID NO: 275691 - DNA, 25 bp, Homo sapien
tctcccgtgagcagacacaaggttc

SEQ ID NO: 275692 - DNA, 25 bp, Homo sapien
gaaagtccccacaatctaggtctct

SEQ ID NO: 275693 - DNA, 25 bp, Homo sapien
gacaccatccaagtatacccatgaa

SEQ ID NO: 275694 - DNA, 25 bp, Homo sapien
accatccaagtatacccatgaatcc

SEQ ID NO: 275695 - DNA, 25 bp, Homo sapien
tacccatgaatccataatgggagtt

SEQ ID NO: 275696 - DNA, 25 bp, Homo sapien
caccatccaagtatacccatgaatc

SEQ ID NO: 275697 - DNA, 25 bp, Homo sapien
taccgacttcgagaaatatgcaagg

SEQ ID NO: 275698 - DNA, 25 bp, Homo sapien
tatgcaaggacttactgggtccggt

SEQ ID NO: 275699 - DNA, 25 bp, Homo sapien
tggacatcaggagccacggagtgct

SEQ ID NO: 275700 - DNA, 25 bp, Homo sapien
tcaggtcccagcatcagtgagaggg

SEQ ID NO: 275701 - DNA, 25 bp, Homo sapien
acagtaccactacttatcaacacaa

SEQ ID NO: 275702 - DNA, 25 bp, Homo sapien
gcacagtaccactacttatcaacac

SEQ ID NO: 275703 - DNA, 25 bp, Homo sapien
cacagtaccactacttatcaacaca

SEQ ID NO: 275704 - DNA, 25 bp, Homo sapien
cagtaccactacttatcaacacaag

SEQ ID NO: 275705 - DNA, 25 bp, Homo sapien
tctcaggataacttctagaagtgga

SEQ ID NO: 275706 - DNA, 25 bp, Homo sapien
ggttgttctctcaggataacttcta

SEQ ID NO: 275707 - DNA, 25 bp, Homo sapien
tgttctctcaggataacttctagaa

SEQ ID NO: 275708 - DNA, 25 bp, Homo sapien
ctgtggttgttctctcaggataact

SEQ ID NO: 275709 - DNA, 25 bp, Homo sapien
tcacagtgaggatcttcacgggtcc

SEQ ID NO: 275710 - DNA, 25 bp, Homo sapien
gttgagactcggacagcagatggcc

SEQ ID NO: 275711 - DNA, 25 bp, Homo sapien
gcagatggccggagaagaatcacgc

SEQ ID NO: 275712 - DNA, 25 bp, Homo sapien
cctttcatggtcttatctggcgaga

SEQ ID NO: 275713 - DNA, 25 bp, Homo sapien
tcttggtgctgagcatcaaggtgcc

SEQ ID NO: 275714 - DNA, 25 bp, Homo sapien
cagtaccacagattgccgttcaggg

SEQ ID NO: 275715 - DNA, 25 bp, Homo sapien
agacacctccgcatgcagtgcaggg

SEQ ID NO: 275716 - DNA, 25 bp, Homo sapien
aaaaaagtgtccctataagcagagc

SEQ ID NO: 275717 - DNA, 25 bp, Homo sapien
taagccagggttattgtatctggaa

SEQ ID NO: 275718 - DNA, 25 bp, Homo sapien
tagttgtaggtgcattgttttgagc

SEQ ID NO: 275719 - DNA, 25 bp, Homo sapien
cataattgataccataggattagga

SEQ ID NO: 275720 - DNA, 25 bp, Homo sapien
tgaacagaatagtaaccaatgaaga

SEQ ID NO: 275721 - DNA, 25 bp, Homo sapien
aaatcttctagtccatgagtacata

SEQ ID NO: 275722 - DNA, 25 bp, Homo sapien
tattaaatcttctagtccatgagta

SEQ ID NO: 275723 - DNA, 25 bp, Homo sapien
aagttattaaatcttctagtccatg

SEQ ID NO: 275724 - DNA, 25 bp, Homo sapien
ccagcctaacatcttaaagttatta

SEQ ID NO: 275725 - DNA, 25 bp, Homo sapien
gcagttggcgaaatctgagtcccca

SEQ ID NO: 275726 - DNA, 25 bp, Homo sapien
cactttagtttgtggcgcgtgcaca

SEQ ID NO: 275727 - DNA, 25 bp, Homo sapien
gataggagcgcacctggtacagtcc

SEQ ID NO: 275728 - DNA, 25 bp, Homo sapien
gaagagtcagtacaaggcccaagat

SEQ ID NO: 275729 - DNA, 25 bp, Homo sapien
tacattgtacccttgcagataactt

SEQ ID NO: 275730 - DNA, 25 bp, Homo sapien
gcaatcctcctgtgcagatactttt

SEQ ID NO: 275731 - DNA, 25 bp, Homo sapien
ggtcttactttgtcgctcagaatgg

SEQ ID NO: 275732 - DNA, 25 bp, Homo sapien
cccactatggaaatgtagcttttaa

SEQ ID NO: 275733 - DNA, 25 bp, Homo sapien
ttgcttgaaacccagagtgggaggt

SEQ ID NO: 275734 - DNA, 25 bp, Homo sapien
ttgaaacccagagtgggaggttgca

SEQ ID NO: 275735 - DNA, 25 bp, Homo sapien
tgaggtcgcatcactgcggtccagc

SEQ ID NO: 275736 - DNA, 25 bp, Homo sapien
agctgaggtcgcatcactgcggtcc

SEQ ID NO: 275737 - DNA, 25 bp, Homo sapien
gaggagcggcgcaggggatgcggct

SEQ ID NO: 275738 - DNA, 25 bp, Homo sapien
taataagtcggactcagactggcga

SEQ ID NO: 275739 - DNA, 25 bp, Homo sapien
tgtctaggcaaacggccccgatctt

SEQ ID NO: 275740 - DNA, 25 bp, Homo sapien
caagatgcccaatagcgcgtgttga

SEQ ID NO: 275741 - DNA, 25 bp, Homo sapien
gctcctccgagtccaaatgttcatg

SEQ ID NO: 275742 - DNA, 25 bp, Homo sapien
cgcagggctagcgagatacttcgca

SEQ ID NO: 275743 - DNA, 25 bp, Homo sapien
gctagcgagatacttcgcagcacgg

SEQ ID NO: 275744 - DNA, 25 bp, Homo sapien
tacttcgcagcacggaggccgtcat

SEQ ID NO: 275745 - DNA, 25 bp, Homo sapien
gctagtcgggcgcagggctagcgag

SEQ ID NO: 275746 - DNA, 25 bp, Homo sapien
gctcgccagggtgctcagattttca

SEQ ID NO: 275747 - DNA, 25 bp, Homo sapien
taagagtcacgaccagatggctcat

SEQ ID NO: 275748 - DNA, 25 bp, Homo sapien
gatatgacagcaaggtcaacgtgga

SEQ ID NO: 275749 - DNA, 25 bp, Homo sapien
aaatctttcgttcagaccacagagg

SEQ ID NO: 275750 - DNA, 25 bp, Homo sapien
cttctccaggctaggcgcggttgct

SEQ ID NO: 275751 - DNA, 25 bp, Homo sapien
aaattgcaatgctcccaaacccggg

SEQ ID NO: 275752 - DNA, 25 bp, Homo sapien
ataaaaaattgcaatgctcccaaac

SEQ ID NO: 275753 - DNA, 25 bp, Homo sapien
ctgaaagatacaagagtatgtataa

SEQ ID NO: 275754 - DNA, 25 bp, Homo sapien
gacgctcgctggtgagtctctctaa

SEQ ID NO: 275755 - DNA, 25 bp, Homo sapien
gttcccagaaagacaacaatgacgc

SEQ ID NO: 275756 - DNA, 25 bp, Homo sapien
gaaagacaacaatgacgctcgctgg

SEQ ID NO: 275757 - DNA, 25 bp, Homo sapien
gtctctctaagctgcgtctgccaag

SEQ ID NO: 275758 - DNA, 25 bp, Homo sapien
ttttcggatcttccttttcaagcgc

SEQ ID NO: 275759 - DNA, 25 bp, Homo sapien
caataggaattagctcttgagtagc

SEQ ID NO: 275760 - DNA, 25 bp, Homo sapien
aattagctcttgagtagccttttcc

SEQ ID NO: 275761 - DNA, 25 bp, Homo sapien
tcttccttttcaagcgctcctttgc

SEQ ID NO: 275762 - DNA, 25 bp, Homo sapien
tactgaccaatgactatcacaggtg

SEQ ID NO: 275763 - DNA, 25 bp, Homo sapien
cagagcagtgcttaagcatctggat

SEQ ID NO: 275764 - DNA, 25 bp, Homo sapien
cagagccattcaagagtaccaccca

SEQ ID NO: 275765 - DNA, 25 bp, Homo sapien
tcattagggccaagtcagctcaagc

SEQ ID NO: 275766 - DNA, 25 bp, Homo sapien
gcttctagcatagccctgatggtgt

SEQ ID NO: 275767 - DNA, 25 bp, Homo sapien
cggtggtgtgtaatgtggcccttcc

SEQ ID NO: 275768 - DNA, 25 bp, Homo sapien
taggatcccgcttgatggcctcagc

SEQ ID NO: 275769 - DNA, 25 bp, Homo sapien
attccagttgcagttcctccagagc

SEQ ID NO: 275770 - DNA, 25 bp, Homo sapien
gtcattcctactctcaggggcagca

SEQ ID NO: 275771 - DNA, 25 bp, Homo sapien
caggggcagcatgttaaggatagca

SEQ ID NO: 275772 - DNA, 25 bp, Homo sapien
tggtcattcctactctcaggggcag

SEQ ID NO: 275773 - DNA, 25 bp, Homo sapien
ctcaggggcagcatgttaaggatag

SEQ ID NO: 275774 - DNA, 25 bp, Homo sapien
atttattaacagcatgcctgattct

SEQ ID NO: 275775 - DNA, 25 bp, Homo sapien
ttattaacagcatgcctgattctgt

SEQ ID NO: 275776 - DNA, 25 bp, Homo sapien
tttattaacagcatgcctgattctg

SEQ ID NO: 275777 - DNA, 25 bp, Homo sapien
tatttattaacagcatgcctgattc

SEQ ID NO: 275778 - DNA, 25 bp, Homo sapien
cacgctaggaagacaacctaagttc

SEQ ID NO: 275779 - DNA, 25 bp, Homo sapien
gaaaaaagtgaaccacacgctagga

SEQ ID NO: 275780 - DNA, 25 bp, Homo sapien
cctaagttcttattccaatgaaatg

SEQ ID NO: 275781 - DNA, 25 bp, Homo sapien
gacaacctaagttcttattccaatg

SEQ ID NO: 275782 - DNA, 25 bp, Homo sapien
atatagggattatttcagaatggaa

SEQ ID NO: 275783 - DNA, 25 bp, Homo sapien
gtgtgtataaagagctgttatatat

SEQ ID NO: 275784 - DNA, 25 bp, Homo sapien
caataagaaatatagggattatttc

SEQ ID NO: 275785 - DNA, 25 bp, Homo sapien
gaaatatagggattatttcagaatg

SEQ ID NO: 275786 - DNA, 25 bp, Homo sapien
cagatctgggaggttcgctgcacca

SEQ ID NO: 275787 - DNA, 25 bp, Homo sapien
tttgaccggcctatggctgtactcg

SEQ ID NO: 275788 - DNA, 25 bp, Homo sapien
gagtggacgctcaagcaagactgct

SEQ ID NO: 275789 - DNA, 25 bp, Homo sapien
tgtactcggattgcattctcagcct

SEQ ID NO: 275790 - DNA, 25 bp, Homo sapien
caggacccctggtaaaactgcagct

SEQ ID NO: 275791 - DNA, 25 bp, Homo sapien
cagcataggtactgcagggcgtttc

SEQ ID NO: 275792 - DNA, 25 bp, Homo sapien
cccagctgttcggagtccaggagtt

SEQ ID NO: 275793 - DNA, 25 bp, Homo sapien
tttttataaacgtcccagccaggca

SEQ ID NO: 275794 - DNA, 25 bp, Homo sapien
ttcatagtgaaacaactccatggag

SEQ ID NO: 275795 - DNA, 25 bp, Homo sapien
taaatcatccaagcttctgctggcc

SEQ ID NO: 275796 - DNA, 25 bp, Homo sapien
gagatcttttgacatgctaatctga

SEQ ID NO: 275797 - DNA, 25 bp, Homo sapien
gatcttcactttctataacgtgaga

SEQ ID NO: 275798 - DNA, 25 bp, Homo sapien
cagttacctcccaccgactcagtta

SEQ ID NO: 275799 - DNA, 25 bp, Homo sapien
gcagagaaaaagctggtgcagggaa

SEQ ID NO: 275800 - DNA, 25 bp, Homo sapien
gccaaaccacatgagggtgtctgtc

SEQ ID NO: 275801 - DNA, 25 bp, Homo sapien
agagctggtgtagggtgtatgaaac

SEQ ID NO: 275802 - DNA, 25 bp, Homo sapien
gaaggtgaagccgaccacagtggct

SEQ ID NO: 275803 - DNA, 25 bp, Homo sapien
tggactttgatgctcccctgggcta

SEQ ID NO: 275804 - DNA, 25 bp, Homo sapien
tccgcgtgagtaccagaccacttga

SEQ ID NO: 275805 - DNA, 25 bp, Homo sapien
caaagaacccgaaagacaagtccag

SEQ ID NO: 275806 - DNA, 25 bp, Homo sapien
agtctacatgcatattgaatgttta

SEQ ID NO: 275807 - DNA, 25 bp, Homo sapien
taagaaatgagccaacttatttgac

SEQ ID NO: 275808 - DNA, 25 bp, Homo sapien
ttcctagagaaaagtgtaattgaag

SEQ ID NO: 275809 - DNA, 25 bp, Homo sapien
taaagcaaatatcttgaaagataaa

SEQ ID NO: 275810 - DNA, 25 bp, Homo sapien
tacctctgtgtaccttggtggcaag

SEQ ID NO: 275811 - DNA, 25 bp, Homo sapien
aaacgcacttaggaactttgcctgt

SEQ ID NO: 275812 - DNA, 25 bp, Homo sapien
tctttttaagcagcgtatgcctgga

SEQ ID NO: 275813 - DNA, 25 bp, Homo sapien
aactataatgaaaaggtgagcccag

SEQ ID NO: 275814 - DNA, 25 bp, Homo sapien
ggttcgtgccttcgaatctgtacag

SEQ ID NO: 275815 - DNA, 25 bp, Homo sapien
tgtgttcggtaatgataacgatgga

SEQ ID NO: 275816 - DNA, 25 bp, Homo sapien
atctgtacagcggtgttgtgttcgg

SEQ ID NO: 275817 - DNA, 25 bp, Homo sapien
gatggaagctaatacctgctggtac

SEQ ID NO: 275818 - DNA, 25 bp, Homo sapien
cggcggggtttcttcgttgcattgc

SEQ ID NO: 275819 - DNA, 25 bp, Homo sapien
tcggcggggtttcttcgttgcattg

SEQ ID NO: 275820 - DNA, 25 bp, Homo sapien
gggcagcatttacgtttgcaatagg

SEQ ID NO: 275821 - DNA, 25 bp, Homo sapien
gcccgagtcctcgatggctgaagca

SEQ ID NO: 275822 - DNA, 25 bp, Homo sapien
aggatttgtagcttagttccgcccg

SEQ ID NO: 275823 - DNA, 25 bp, Homo sapien
ttagttccgcccgagtcctcgatgg

SEQ ID NO: 275824 - DNA, 25 bp, Homo sapien
cactgggaaccctcagggaaagtat

SEQ ID NO: 275825 - DNA, 25 bp, Homo sapien
ctttgggaagagaagcctactgcct

SEQ ID NO: 275826 - DNA, 25 bp, Homo sapien
tttacccagaaaagcgacgctgggc

SEQ ID NO: 275827 - DNA, 25 bp, Homo sapien
gacgctgggcggacatctttacttt

SEQ ID NO: 275828 - DNA, 25 bp, Homo sapien
agcttcttagttcccagccttcctt

SEQ ID NO: 275829 - DNA, 25 bp, Homo sapien
gctcctccgattggtccagggatca

SEQ ID NO: 275830 - DNA, 25 bp, Homo sapien
ggatcaccaaccaatagcttcttag

SEQ ID NO: 275831 - DNA, 25 bp, Homo sapien
ggcggtcaagactcccgccaaatca

SEQ ID NO: 275832 - DNA, 25 bp, Homo sapien
acggcggccggacgcctggcgctcg

SEQ ID NO: 275833 - DNA, 25 bp, Homo sapien
agccacggcggccggacgcctggcg

SEQ ID NO: 275834 - DNA, 25 bp, Homo sapien
ccacggcggccggacgcctggcgct

SEQ ID NO: 275835 - DNA, 25 bp, Homo sapien
ggcggccggacgcctggcgctcgcg

SEQ ID NO: 275836 - DNA, 25 bp, Homo sapien
ggctctggaccacctcgtagaactc

SEQ ID NO: 275837 - DNA, 25 bp, Homo sapien
acctcgtagaactctttgcggaaat

SEQ ID NO: 275838 - DNA, 25 bp, Homo sapien
gaactctttgcggaaatcggacacg

SEQ ID NO: 275839 - DNA, 25 bp, Homo sapien
tctttgcggaaatcggacacgaaca

SEQ ID NO: 275840 - DNA, 25 bp, Homo sapien
acacagagcatccacgtccgaggcc

SEQ ID NO: 275841 - DNA, 25 bp, Homo sapien
ctgaaggatcttgcacgcacacaga

SEQ ID NO: 275842 - DNA, 25 bp, Homo sapien
gagcatccacgtccgaggccacgaa

SEQ ID NO: 275843 - DNA, 25 bp, Homo sapien
gaaggatcttgcacgcacacagagc

SEQ ID NO: 275844 - DNA, 25 bp, Homo sapien
gaaatgcagtttcaagttcttgcca

SEQ ID NO: 275845 - DNA, 25 bp, Homo sapien
tgccacccagaaactggaaccagcg

SEQ ID NO: 275846 - DNA, 25 bp, Homo sapien
tatgctcaagaaatgcagtttcaag

SEQ ID NO: 275847 - DNA, 25 bp, Homo sapien
tgcacgtggtcacactggaacaagg

SEQ ID NO: 275848 - DNA, 25 bp, Homo sapien
caataggtctacattagctccacag

SEQ ID NO: 275849 - DNA, 25 bp, Homo sapien
ggcctatgggtgtcacacacaaaga

SEQ ID NO: 275850 - DNA, 25 bp, Homo sapien
tacattgacgacattgactggccta

SEQ ID NO: 275851 - DNA, 25 bp, Homo sapien
caggttgaagaatatccaataggtc

SEQ ID NO: 275852 - DNA, 25 bp, Homo sapien
aagtacagacagtttgagggcatag

SEQ ID NO: 275853 - DNA, 25 bp, Homo sapien
aaagtacagacagtttgagggcata

SEQ ID NO: 275854 - DNA, 25 bp, Homo sapien
aaaagtacagacagtttgagggcat

SEQ ID NO: 275855 - DNA, 25 bp, Homo sapien
gatgtcttcataggcgggaacttca

SEQ ID NO: 275856 - DNA, 25 bp, Homo sapien
taggcgggaacttcaaggtcatcat

SEQ ID NO: 275857 - DNA, 25 bp, Homo sapien
tcttctaaccgtgtgcgcttctcag

SEQ ID NO: 275858 - DNA, 25 bp, Homo sapien
taaccgtgtgcgcttctcagaaggc

SEQ ID NO: 275859 - DNA, 25 bp, Homo sapien
aatagacatattcagtttctggcag

SEQ ID NO: 275860 - DNA, 25 bp, Homo sapien
tctaacctttagagtgccaactgaa

SEQ ID NO: 275861 - DNA, 25 bp, Homo sapien
tagcctcccatcctgaccgtgatat

SEQ ID NO: 275862 - DNA, 25 bp, Homo sapien
gaagctgggcaaagtatataagtga

SEQ ID NO: 275863 - DNA, 25 bp, Homo sapien
ggaatttatccccacagcccaagaa

SEQ ID NO: 275864 - DNA, 25 bp, Homo sapien
caaagagaacaaaaggtggagcaaa

SEQ ID NO: 275865 - DNA, 25 bp, Homo sapien
atttggcagaagtcagtaggcccag

SEQ ID NO: 275866 - DNA, 25 bp, Homo sapien
gaaggttccaatttggcagaagtca

SEQ ID NO: 275867 - DNA, 25 bp, Homo sapien
tccgcatggtttgctccactatctc

SEQ ID NO: 275868 - DNA, 25 bp, Homo sapien
tcctccgcatggtttgctccactat

SEQ ID NO: 275869 - DNA, 25 bp, Homo sapien
tgcctcctccgcatggtttgctcca

SEQ ID NO: 275870 - DNA, 25 bp, Homo sapien
tccgggcctcccactctcgccgctg

SEQ ID NO: 275871 - DNA, 25 bp, Homo sapien
cctgtcactcatgggaccggcgaac

SEQ ID NO: 275872 - DNA, 25 bp, Homo sapien
agcggccacaggttcactcccagag

SEQ ID NO: 275873 - DNA, 25 bp, Homo sapien
ggcgaacaacctggagctcttctcc

SEQ ID NO: 275874 - DNA, 25 bp, Homo sapien
ttctccaatgcagcggccacaggtt

SEQ ID NO: 275875 - DNA, 25 bp, Homo sapien
gctcgtagtcaaagaggatgtctct

SEQ ID NO: 275876 - DNA, 25 bp, Homo sapien
gatgtcccatgatattcatactgct

SEQ ID NO: 275877 - DNA, 25 bp, Homo sapien
tgctcgtagtcaaagaggatgtctc

SEQ ID NO: 275878 - DNA, 25 bp, Homo sapien
gatattcatactgctcgtagtcaaa

SEQ ID NO: 275879 - DNA, 25 bp, Homo sapien
agcatccaagccagctcaaacatca

SEQ ID NO: 275880 - DNA, 25 bp, Homo sapien
gcatccaagccagctcaaacatcac

SEQ ID NO: 275881 - DNA, 25 bp, Homo sapien
cacagctgccgcaggggctacgtac

SEQ ID NO: 275882 - DNA, 25 bp, Homo sapien
tcccacacagctgccgcaggggcta

SEQ ID NO: 275883 - DNA, 25 bp, Homo sapien
caaggcaacaaatactcccacacag

SEQ ID NO: 275884 - DNA, 25 bp, Homo sapien
aggcaacaaatactcccacacagct

SEQ ID NO: 275885 - DNA, 25 bp, Homo sapien
gtctgttagtccaacgatggcccac

SEQ ID NO: 275886 - DNA, 25 bp, Homo sapien
actggtctgttagtccaacgatggc

SEQ ID NO: 275887 - DNA, 25 bp, Homo sapien
ccactggtctgttagtccaacgatg

SEQ ID NO: 275888 - DNA, 25 bp, Homo sapien
tggtctgttagtccaacgatggccc

SEQ ID NO: 275889 - DNA, 25 bp, Homo sapien
aaactggtgagtttgtactgctgtc

SEQ ID NO: 275890 - DNA, 25 bp, Homo sapien
gagaaaagactcactgtctatggta

SEQ ID NO: 275891 - DNA, 25 bp, Homo sapien
ccttcactgaattacctactgggat

SEQ ID NO: 275892 - DNA, 25 bp, Homo sapien
ttacctaggttggattcctgcaatc

SEQ ID NO: 275893 - DNA, 25 bp, Homo sapien
tgcatagaaaccaagcacccaggaa

SEQ ID NO: 275894 - DNA, 25 bp, Homo sapien
gggtgtggtctctagccttgtccac

SEQ ID NO: 275895 - DNA, 25 bp, Homo sapien
acacctcctgagaatgggcaccgca

SEQ ID NO: 275896 - DNA, 25 bp, Homo sapien
aaagtagcacaagcctcggctggtt

SEQ ID NO: 275897 - DNA, 25 bp, Homo sapien
ttgtggcgggaaacgtggcgctgca

SEQ ID NO: 275898 - DNA, 25 bp, Homo sapien
cacggagagtgtgttctcctcatcc

SEQ ID NO: 275899 - DNA, 25 bp, Homo sapien
aaggagatccgtgtgcagtccacgg

SEQ ID NO: 275900 - DNA, 25 bp, Homo sapien
ctcatcctcgttccggtggttgtgg

SEQ ID NO: 275901 - DNA, 25 bp, Homo sapien
gcttctgtccatgcacagaccacag

SEQ ID NO: 275902 - DNA, 25 bp, Homo sapien
cccatgtctgcaaggaactcctgga

SEQ ID NO: 275903 - DNA, 25 bp, Homo sapien
gaccagtgctggtagagcaccaggc

SEQ ID NO: 275904 - DNA, 25 bp, Homo sapien
gctgcggtatagctggtgttgcaca

SEQ ID NO: 275905 - DNA, 25 bp, Homo sapien
tccttcaaggagatgtccatggcct

SEQ ID NO: 275906 - DNA, 25 bp, Homo sapien
ggcctggaacttctgcttcacctgc

SEQ ID NO: 275907 - DNA, 25 bp, Homo sapien
tatttgcagactcttcaatcatttc

SEQ ID NO: 275908 - DNA, 25 bp, Homo sapien
atttcccgcaaattctccttcaagg

SEQ ID NO: 275909 - DNA, 25 bp, Homo sapien
ttctcggggctctccatcaaagaca

SEQ ID NO: 275910 - DNA, 25 bp, Homo sapien
cttgtgcttgaacccaaaatgaatg

SEQ ID NO: 275911 - DNA, 25 bp, Homo sapien
ctggccagaaacttgtgcttgaacc

SEQ ID NO: 275912 - DNA, 25 bp, Homo sapien
tgctgaaagtctgcacgcgcatgtc

SEQ ID NO: 275913 - DNA, 25 bp, Homo sapien
tccatgagagagcagtacaggaaag

SEQ ID NO: 275914 - DNA, 25 bp, Homo sapien
tgacgaggttggtgcaaaggcagct

SEQ ID NO: 275915 - DNA, 25 bp, Homo sapien
gctgcttcttggcgagttccaggcc

SEQ ID NO: 275916 - DNA, 25 bp, Homo sapien
catggtacagcttgtccaggttact

SEQ ID NO: 275917 - DNA, 25 bp, Homo sapien
gatgccggcctagagaacagcatga

SEQ ID NO: 275918 - DNA, 25 bp, Homo sapien
tgagcaggcttagggatgccggcct

SEQ ID NO: 275919 - DNA, 25 bp, Homo sapien
cttagggatgccggcctagagaaca

SEQ ID NO: 275920 - DNA, 25 bp, Homo sapien
ttgctgagcaggcttagggatgccg

SEQ ID NO: 275921 - DNA, 25 bp, Homo sapien
ttcttcctgtccgagctgtcggtct

SEQ ID NO: 275922 - DNA, 25 bp, Homo sapien
cctgtccgagctgtcggtctctggg

SEQ ID NO: 275923 - DNA, 25 bp, Homo sapien
tgcccaccacggtcactgtgccatg

SEQ ID NO: 275924 - DNA, 25 bp, Homo sapien
gcagcagtttgcagcgccggttctt

SEQ ID NO: 275925 - DNA, 25 bp, Homo sapien
gtgctttccgctgccttctcaaacg

SEQ ID NO: 275926 - DNA, 25 bp, Homo sapien
aaatggttgtgcagcatccgggagc

SEQ ID NO: 275927 - DNA, 25 bp, Homo sapien
tgagaggtcaaaatggttgtgcagc

SEQ ID NO: 275928 - DNA, 25 bp, Homo sapien
tccgggagctggtgctttccgctgc

SEQ ID NO: 275929 - DNA, 25 bp, Homo sapien
agggaaataagtgcgtccagaaact

SEQ ID NO: 275930 - DNA, 25 bp, Homo sapien
tccagaaacttgctccgatcctcag

SEQ ID NO: 275931 - DNA, 25 bp, Homo sapien
taagtgcgtccagaaacttgctccg

SEQ ID NO: 275932 - DNA, 25 bp, Homo sapien
acttgctccgatcctcagctttcag

SEQ ID NO: 275933 - DNA, 25 bp, Homo sapien
gagccaagcacacaaaagcccggat

SEQ ID NO: 275934 - DNA, 25 bp, Homo sapien
ccagcgcctgacacgaaggctgtgg

SEQ ID NO: 275935 - DNA, 25 bp, Homo sapien
caagcacacaaaagcccggatggct

SEQ ID NO: 275936 - DNA, 25 bp, Homo sapien
caaaagcccggatggctgctctgcg

SEQ ID NO: 275937 - DNA, 25 bp, Homo sapien
gcttctacatctcaaatcatgtcca

SEQ ID NO: 275938 - DNA, 25 bp, Homo sapien
aatggcttctacatctcaaatcatg

SEQ ID NO: 275939 - DNA, 25 bp, Homo sapien
tcaaatcatgtccataacttacaat

SEQ ID NO: 275940 - DNA, 25 bp, Homo sapien
taaaaaatggcttctacatctcaaa

SEQ ID NO: 275941 - DNA, 25 bp, Homo sapien
tatcatgtttaaggttccatttaat

SEQ ID NO: 275942 - DNA, 25 bp, Homo sapien
aaaagatgttttagtgtggatttct

SEQ ID NO: 275943 - DNA, 25 bp, Homo sapien
gaagttcaattaagatgttttgggc

SEQ ID NO: 275944 - DNA, 25 bp, Homo sapien
tttcagaagttcaattaagatgttt

SEQ ID NO: 275945 - DNA, 25 bp, Homo sapien
agtggtaagatcataatatccttta

SEQ ID NO: 275946 - DNA, 25 bp, Homo sapien
gaacaagatcatttagaagtgagtt

SEQ ID NO: 275947 - DNA, 25 bp, Homo sapien
catttagaagtgagttagtgggcca

SEQ ID NO: 275948 - DNA, 25 bp, Homo sapien
gatcatttagaagtgagttagtggg

SEQ ID NO: 275949 - DNA, 25 bp, Homo sapien
gggtgtgccaccaatggaggctgca

SEQ ID NO: 275950 - DNA, 25 bp, Homo sapien
tgggtgtgccaccaatggaggctgc

SEQ ID NO: 275951 - DNA, 25 bp, Homo sapien
gttgggcaggtctccttcttctggt

SEQ ID NO: 275952 - DNA, 25 bp, Homo sapien
gcagggctgatgcacaggggctcgg

SEQ ID NO: 275953 - DNA, 25 bp, Homo sapien
ttggccaggtttgggccttgctacc

SEQ ID NO: 275954 - DNA, 25 bp, Homo sapien
gccttgttgggcaggtctccttctt

SEQ ID NO: 275955 - DNA, 25 bp, Homo sapien
gccaaagtccttccacttgactggg

SEQ ID NO: 275956 - DNA, 25 bp, Homo sapien
caaaggctgcctttaaagtggtgga

SEQ ID NO: 275957 - DNA, 25 bp, Homo sapien
tcctggactgaagtggattcctgcc

SEQ ID NO: 275958 - DNA, 25 bp, Homo sapien
gggaaagcatgtcgctggacctccg

SEQ ID NO: 275959 - DNA, 25 bp, Homo sapien
ggtgtgtgcatccactttccccagc

SEQ ID NO: 275960 - DNA, 25 bp, Homo sapien
tctctgctgacccataggctgtggg

SEQ ID NO: 275961 - DNA, 25 bp, Homo sapien
gatgctccaggcagacccgatccca

SEQ ID NO: 275962 - DNA, 25 bp, Homo sapien
cccaccctgcggagaaggcttgtag

SEQ ID NO: 275963 - DNA, 25 bp, Homo sapien
ttctctgctgacccataggctgtgg

SEQ ID NO: 275964 - DNA, 25 bp, Homo sapien
ttttgggcagtggtccggcctctct

SEQ ID NO: 275965 - DNA, 25 bp, Homo sapien
cttttgggcagtggtccggcctctc

SEQ ID NO: 275966 - DNA, 25 bp, Homo sapien
gggcagtggtccggcctctctcttc

SEQ ID NO: 275967 - DNA, 25 bp, Homo sapien
ttgggcagtggtccggcctctctct

SEQ ID NO: 275968 - DNA, 25 bp, Homo sapien
gggcgcgacgacaagcggcggaggc

SEQ ID NO: 275969 - DNA, 25 bp, Homo sapien
gcgcgacgacaagcggcggaggccg

SEQ ID NO: 275970 - DNA, 25 bp, Homo sapien
cggggcgcgacgacaagcggcggag

SEQ ID NO: 275971 - DNA, 25 bp, Homo sapien
cgggcggggcgcgacgacaagcggc

SEQ ID NO: 275972 - DNA, 25 bp, Homo sapien
ctggggtcgccagcttgctcttgta

SEQ ID NO: 275973 - DNA, 25 bp, Homo sapien
tcgccagcttgctcttgtaccgcag

SEQ ID NO: 275974 - DNA, 25 bp, Homo sapien
cttgctcttgtaccgcaggcctgtg

SEQ ID NO: 275975 - DNA, 25 bp, Homo sapien
agcttgctcttgtaccgcaggcctg

SEQ ID NO: 275976 - DNA, 25 bp, Homo sapien
gggcgggggagagacggagagacac

SEQ ID NO: 275977 - DNA, 25 bp, Homo sapien
cggcgggcgggggagagacggagag

SEQ ID NO: 275978 - DNA, 25 bp, Homo sapien
gcgggggagagacggagagacacgg

SEQ ID NO: 275979 - DNA, 25 bp, Homo sapien
gcgggcgggggagagacggagagac

SEQ ID NO: 275980 - DNA, 25 bp, Homo sapien
gaatcacccgagtcagctctgggag

SEQ ID NO: 275981 - DNA, 25 bp, Homo sapien
tggtccccaagtgacaaaagatact

SEQ ID NO: 275982 - DNA, 25 bp, Homo sapien
gacaaaagatactcccagggcttcc

SEQ ID NO: 275983 - DNA, 25 bp, Homo sapien
tcctgagccatatgacacagctgcg

SEQ ID NO: 275984 - DNA, 25 bp, Homo sapien
tcccttaggctctcctggctgagag

SEQ ID NO: 275985 - DNA, 25 bp, Homo sapien
tgtccaggccctggtcctgttgtgg

SEQ ID NO: 275986 - DNA, 25 bp, Homo sapien
cagccctcccttaggctctcctggc

SEQ ID NO: 275987 - DNA, 25 bp, Homo sapien
ttaggctctcctggctgagagacct

SEQ ID NO: 275988 - DNA, 25 bp, Homo sapien
ccagtagaatcccaacaggcaagcc

SEQ ID NO: 275989 - DNA, 25 bp, Homo sapien
cagtagaatcccaacaggcaagccc

SEQ ID NO: 275990 - DNA, 25 bp, Homo sapien
cctgactgggcgaactggccccaag

SEQ ID NO: 275991 - DNA, 25 bp, Homo sapien
agctgtggcggcgtcgcagtccggg

SEQ ID NO: 275992 - DNA, 25 bp, Homo sapien
gtcgcctggaaattgggccgcgggc

SEQ ID NO: 275993 - DNA, 25 bp, Homo sapien
tggctcgcgtggaccgggagccctg

SEQ ID NO: 275994 - DNA, 25 bp, Homo sapien
ttgcggacgcgggaagtgaggcctg

SEQ ID NO: 275995 - DNA, 25 bp, Homo sapien
ctgcgttgtccaccccgttttgcgg

SEQ ID NO: 275996 - DNA, 25 bp, Homo sapien
cagcgagggaccttggcgcggctct

SEQ ID NO: 275997 - DNA, 25 bp, Homo sapien
ttggcgcggctctgccttaggctgc

SEQ ID NO: 275998 - DNA, 25 bp, Homo sapien
ctctgggcctgggtccgcggcgaca

SEQ ID NO: 275999 - DNA, 25 bp, Homo sapien
cctctgggcctgggtccgcggcgac

SEQ ID NO: 276000 - DNA, 25 bp, Homo sapien
tccgccgcgttttggagtcgcgtga

SEQ ID NO: 276001 - DNA, 25 bp, Homo sapien
ttggagtcgcgtgaggtgaggcctg

SEQ ID NO: 276002 - DNA, 25 bp, Homo sapien
ggccgcattctccgccgcgttttgg

SEQ ID NO: 276003 - DNA, 25 bp, Homo sapien
tggacagggcacgtcgccccaccgt

SEQ ID NO: 276004 - DNA, 25 bp, Homo sapien
ccaaatgcggtatgaggagacagca

SEQ ID NO: 276005 - DNA, 25 bp, Homo sapien
ctccagaagcccaataccctgtctc

SEQ ID NO: 276006 - DNA, 25 bp, Homo sapien
tggggcatttcgttggcaaaaataa

SEQ ID NO: 276007 - DNA, 25 bp, Homo sapien
tagggacacaaaggtttctccagaa

SEQ ID NO: 276008 - DNA, 25 bp, Homo sapien
tgtggcgaagcccacgtactgcttg

SEQ ID NO: 276009 - DNA, 25 bp, Homo sapien
gaagcccacgtactgcttgtcaatg

SEQ ID NO: 276010 - DNA, 25 bp, Homo sapien
tggcgaagcccacgtactgcttgtc

SEQ ID NO: 276011 - DNA, 25 bp, Homo sapien
gcgaagcccacgtactgcttgtcaa

SEQ ID NO: 276012 - DNA, 25 bp, Homo sapien
caccgacttgcggtgcacctggttg

SEQ ID NO: 276013 - DNA, 25 bp, Homo sapien
caaagcctttcttcaccgacttgcg

SEQ ID NO: 276014 - DNA, 25 bp, Homo sapien
gagtgtgaagtcaaagcctttcttc

SEQ ID NO: 276015 - DNA, 25 bp, Homo sapien
cctttcttcaccgacttgcggtgca

SEQ ID NO: 276016 - DNA, 25 bp, Homo sapien
agcttccggtccttgtacaagtctg

SEQ ID NO: 276017 - DNA, 25 bp, Homo sapien
ccttgtacaagtctgtcaggaagag

SEQ ID NO: 276018 - DNA, 25 bp, Homo sapien
tacaagtctgtcaggaagaggctgt

SEQ ID NO: 276019 - DNA, 25 bp, Homo sapien
tccggtccttgtacaagtctgtcag

SEQ ID NO: 276020 - DNA, 25 bp, Homo sapien
aatctctaccgtctggctgatgcgc

SEQ ID NO: 276021 - DNA, 25 bp, Homo sapien
gttgttgacagcgtccccgaatccc

SEQ ID NO: 276022 - DNA, 25 bp, Homo sapien
tctcctcaatgtccaccgtgtgttt

SEQ ID NO: 276023 - DNA, 25 bp, Homo sapien
gaatcccggcgtgtccacgatggtg

SEQ ID NO: 276024 - DNA, 25 bp, Homo sapien
tataggcagcagtgcactcggttgt

SEQ ID NO: 276025 - DNA, 25 bp, Homo sapien
gttctttcggttgaggccgctctca

SEQ ID NO: 276026 - DNA, 25 bp, Homo sapien
catcacggaagtactgctcaaactg

SEQ ID NO: 276027 - DNA, 25 bp, Homo sapien
ccacatagtcggtgatgggcttcca

SEQ ID NO: 276028 - DNA, 25 bp, Homo sapien
gccttcatgaaacccacatccactg

SEQ ID NO: 276029 - DNA, 25 bp, Homo sapien
ggcacgatgttgaccttctcatgca

SEQ ID NO: 276030 - DNA, 25 bp, Homo sapien
cagctttggcgatgagaggcacgat

SEQ ID NO: 276031 - DNA, 25 bp, Homo sapien
gggacaagacagtcagctttggcga

SEQ ID NO: 276032 - DNA, 25 bp, Homo sapien
ctggtatacatggatcccaaacttg

SEQ ID NO: 276033 - DNA, 25 bp, Homo sapien
cactcagggaactggtatacatgga

SEQ ID NO: 276034 - DNA, 25 bp, Homo sapien
ggatcccaaacttgtcaatctcctc

SEQ ID NO: 276035 - DNA, 25 bp, Homo sapien
cagggaactggtatacatggatccc

SEQ ID NO: 276036 - DNA, 25 bp, Homo sapien
ccccctgccccaccagtctgcatgt

SEQ ID NO: 276037 - DNA, 25 bp, Homo sapien
atcccccctgccccaccagtctgca

SEQ ID NO: 276038 - DNA, 25 bp, Homo sapien
ccctgccccaccagtctgcatgttc

SEQ ID NO: 276039 - DNA, 25 bp, Homo sapien
ctgccccaccagtctgcatgttcac

SEQ ID NO: 276040 - DNA, 25 bp, Homo sapien
ggggaaggagggagaaaggctcaca

SEQ ID NO: 276041 - DNA, 25 bp, Homo sapien
gggaaggagggagaaaggctcacac

SEQ ID NO: 276042 - DNA, 25 bp, Homo sapien
tgggggaaggagggagaaaggctca

SEQ ID NO: 276043 - DNA, 25 bp, Homo sapien
accaccgtgttgctgcctataacgg

SEQ ID NO: 276044 - DNA, 25 bp, Homo sapien
cgtgttgctgcctataacggcgaag

SEQ ID NO: 276045 - DNA, 25 bp, Homo sapien
ctataacggcgaagggcgcgctctc

SEQ ID NO: 276046 - DNA, 25 bp, Homo sapien
tgctgcctataacggcgaagggcgc

SEQ ID NO: 276047 - DNA, 25 bp, Homo sapien
gcacgtcgcacgtcacgtccttgag

SEQ ID NO: 276048 - DNA, 25 bp, Homo sapien
cagtgcgcgcggtagttctcgtagt

SEQ ID NO: 276049 - DNA, 25 bp, Homo sapien
gagcatgttgcgcagcttcacgaag

SEQ ID NO: 276050 - DNA, 25 bp, Homo sapien
tccttgaggtcgtgcatatgcgtgc

SEQ ID NO: 276051 - DNA, 25 bp, Homo sapien
ggcttagggaatggtgcaaagttca

SEQ ID NO: 276052 - DNA, 25 bp, Homo sapien
ccggccctcagttatggagacgtgg

SEQ ID NO: 276053 - DNA, 25 bp, Homo sapien
tgggctgacaggaccggccctcagt

SEQ ID NO: 276054 - DNA, 25 bp, Homo sapien
gaatggtgcaaagttcaagtctggg

SEQ ID NO: 276055 - DNA, 25 bp, Homo sapien
aagcttctcagtctcggcgtccggg

SEQ ID NO: 276056 - DNA, 25 bp, Homo sapien
gatggggctctccatgcggctgtcc

SEQ ID NO: 276057 - DNA, 25 bp, Homo sapien
catcctgataagcttctcagtctcg

SEQ ID NO: 276058 - DNA, 25 bp, Homo sapien
ccttcatcctgataagcttctcagt

SEQ ID NO: 276059 - DNA, 25 bp, Homo sapien
gcagcatctcctgcatgcgcctcag

SEQ ID NO: 276060 - DNA, 25 bp, Homo sapien
tgctgcttcatcctctgcagcatct

SEQ ID NO: 276061 - DNA, 25 bp, Homo sapien
ctctgcagcatctcctgcatgcgcc

SEQ ID NO: 276062 - DNA, 25 bp, Homo sapien
tctgcagcatctcctgcatgcgcct

SEQ ID NO: 276063 - DNA, 25 bp, Homo sapien
gcgtcccggagacggacggtgtgtc

SEQ ID NO: 276064 - DNA, 25 bp, Homo sapien
ctgtggccccgcgtctccgggtcgg

SEQ ID NO: 276065 - DNA, 25 bp, Homo sapien
gaacagtccggtctggtgtccaggg

SEQ ID NO: 276066 - DNA, 25 bp, Homo sapien
acggacggtgtgtccgcggcgagcg

SEQ ID NO: 276067 - DNA, 25 bp, Homo sapien
caagggaggcggatctctgaagtcc

SEQ ID NO: 276068 - DNA, 25 bp, Homo sapien
aaggagggctcccaagtccgttctg

SEQ ID NO: 276069 - DNA, 25 bp, Homo sapien
gcctctggcctccttatgtctggag

SEQ ID NO: 276070 - DNA, 25 bp, Homo sapien
tcggcccgcctcgacagaaaatggg

SEQ ID NO: 276071 - DNA, 25 bp, Homo sapien
gagaagaggcctcgagcgagggcag

SEQ ID NO: 276072 - DNA, 25 bp, Homo sapien
gggacggcaccgagagttgccagga

SEQ ID NO: 276073 - DNA, 25 bp, Homo sapien
ggcctaggctcaggatcccggcaca

SEQ ID NO: 276074 - DNA, 25 bp, Homo sapien
gcgggtgggaacatcgggaggccta

SEQ ID NO: 276075 - DNA, 25 bp, Homo sapien
cagatagcacactatcgccggaggc

SEQ ID NO: 276076 - DNA, 25 bp, Homo sapien
accaggacaggacgcggcattcaca

SEQ ID NO: 276077 - DNA, 25 bp, Homo sapien
cgctgcgacgttcaccaacattgtt

SEQ ID NO: 276078 - DNA, 25 bp, Homo sapien
gagagccgagcgataaggccgcccc

SEQ ID NO: 276079 - DNA, 25 bp, Homo sapien
cgagaagacggcagcccggcttact

SEQ ID NO: 276080 - DNA, 25 bp, Homo sapien
gcgagaagacggcagcccggcttac

SEQ ID NO: 276081 - DNA, 25 bp, Homo sapien
ggcgagaagacggcagcccggctta

SEQ ID NO: 276082 - DNA, 25 bp, Homo sapien
aagcgccgcagtaagccgagcggtc

SEQ ID NO: 276083 - DNA, 25 bp, Homo sapien
agctgcagccaaacgaccagagctc

SEQ ID NO: 276084 - DNA, 25 bp, Homo sapien
agctcctctcaacccgggtcggcct

SEQ ID NO: 276085 - DNA, 25 bp, Homo sapien
catctctgagtacccagactgccgg

SEQ ID NO: 276086 - DNA, 25 bp, Homo sapien
ccagctcggttgtgtcgacagggaa

SEQ ID NO: 276087 - DNA, 25 bp, Homo sapien
tcgtcctcggccagatagggcagca

SEQ ID NO: 276088 - DNA, 25 bp, Homo sapien
cagcaggagcagtaagctcagcgcc

SEQ ID NO: 276089 - DNA, 25 bp, Homo sapien
cgtcaggttgttgccggtcagcacc

SEQ ID NO: 276090 - DNA, 25 bp, Homo sapien
gcgacagccgggctgcggcgcgagc

SEQ ID NO: 276091 - DNA, 25 bp, Homo sapien
gtcagcgacagccgggctgcggcgc

SEQ ID NO: 276092 - DNA, 25 bp, Homo sapien
gacagccgggctgcggcgcgagcgc

SEQ ID NO: 276093 - DNA, 25 bp, Homo sapien
tcagcgacagccgggctgcggcgcg

SEQ ID NO: 276094 - DNA, 25 bp, Homo sapien
tcagaagggtttattcagcaccaga

SEQ ID NO: 276095 - DNA, 25 bp, Homo sapien
cccaagcctggaagtgcgggttcgc

SEQ ID NO: 276096 - DNA, 25 bp, Homo sapien
gtcgagtttgcaggcccgtgttgcc

SEQ ID NO: 276097 - DNA, 25 bp, Homo sapien
tctggaccgcattgtgccccatggt

SEQ ID NO: 276098 - DNA, 25 bp, Homo sapien
gggaatttccaggtcagtcgtgcag

SEQ ID NO: 276099 - DNA, 25 bp, Homo sapien
tgactcctgtctgcccctgaggtta

SEQ ID NO: 276100 - DNA, 25 bp, Homo sapien
tgtttgtgtccccttgaaccgcctc

SEQ ID NO: 276101 - DNA, 25 bp, Homo sapien
tcatgccttcccatgtggccttttg

SEQ ID NO: 276102 - DNA, 25 bp, Homo sapien
tgtccccacagcgttctcaccgtcc

SEQ ID NO: 276103 - DNA, 25 bp, Homo sapien
cagtgtccccacagcgttctcaccg

SEQ ID NO: 276104 - DNA, 25 bp, Homo sapien
agtgtccccacagcgttctcaccgt

SEQ ID NO: 276105 - DNA, 25 bp, Homo sapien
tccccacagcgttctcaccgtccac

SEQ ID NO: 276106 - DNA, 25 bp, Homo sapien
tgggggactcgccagaggcacagga

SEQ ID NO: 276107 - DNA, 25 bp, Homo sapien
taccttgtgccagtcagaaggaaca

SEQ ID NO: 276108 - DNA, 25 bp, Homo sapien
cagtggcatggagagtaccttgtgc

SEQ ID NO: 276109 - DNA, 25 bp, Homo sapien
catgcaggccccgtgtggtgcagcc

SEQ ID NO: 276110 - DNA, 25 bp, Homo sapien
ggcctgcgggccctgatgccgccca

SEQ ID NO: 276111 - DNA, 25 bp, Homo sapien
cactccctgtggtagctggccagga

SEQ ID NO: 276112 - DNA, 25 bp, Homo sapien
tctgactccgtctgtgacctgggca

SEQ ID NO: 276113 - DNA, 25 bp, Homo sapien
tactaacggagagggattttcctgc

SEQ ID NO: 276114 - DNA, 25 bp, Homo sapien
gttgtgctaaggaatgcatgagctc

SEQ ID NO: 276115 - DNA, 25 bp, Homo sapien
ccttcctcctcgctccccctgccgg

SEQ ID NO: 276116 - DNA, 25 bp, Homo sapien
gccgcggttcccttcctcctcgctc

SEQ ID NO: 276117 - DNA, 25 bp, Homo sapien
cctcctcgctccccctgccggccgc

SEQ ID NO: 276118 - DNA, 25 bp, Homo sapien
ttcctcctcgctccccctgccggcc

SEQ ID NO: 276119 - DNA, 25 bp, Homo sapien
gaagccctcgaagcgcgaggccgtc

SEQ ID NO: 276120 - DNA, 25 bp, Homo sapien
tccaggagccctcggctaaaggggc

SEQ ID NO: 276121 - DNA, 25 bp, Homo sapien
gtcccagcctccagccggagccgcc

SEQ ID NO: 276122 - DNA, 25 bp, Homo sapien
cggaccccgttgctcaacgctggga

SEQ ID NO: 276123 - DNA, 25 bp, Homo sapien
tggccaggacgcttatacatccgga

SEQ ID NO: 276124 - DNA, 25 bp, Homo sapien
aggacccagcccagtaaatgcccaa

SEQ ID NO: 276125 - DNA, 25 bp, Homo sapien
tgaagttggctcactatcgtcgctg

SEQ ID NO: 276126 - DNA, 25 bp, Homo sapien
cttatacatccggagggtgggcagt

SEQ ID NO: 276127 - DNA, 25 bp, Homo sapien
ctgcaaccagagaggcgatgctgaa

SEQ ID NO: 276128 - DNA, 25 bp, Homo sapien
aggcgatgctgaacgcactggctcg

SEQ ID NO: 276129 - DNA, 25 bp, Homo sapien
ccagagaggcgatgctgaacgcact

SEQ ID NO: 276130 - DNA, 25 bp, Homo sapien
aaccagagaggcgatgctgaacgca

SEQ ID NO: 276131 - DNA, 25 bp, Homo sapien
gccagcgaagcttcacccggtcgga

SEQ ID NO: 276132 - DNA, 25 bp, Homo sapien
ttcacccggtcggaggaccctgagc

SEQ ID NO: 276133 - DNA, 25 bp, Homo sapien
agcgaagcttcacccggtcggagga

SEQ ID NO: 276134 - DNA, 25 bp, Homo sapien
tggtgggcggtgcgctccgccgcct

SEQ ID NO: 276135 - DNA, 25 bp, Homo sapien
ccatgtccctggtgacggtgctgaa

SEQ ID NO: 276136 - DNA, 25 bp, Homo sapien
ttccatgtccctggtgacggtgctg

SEQ ID NO: 276137 - DNA, 25 bp, Homo sapien
cttccatgtccctggtgacggtgct

SEQ ID NO: 276138 - DNA, 25 bp, Homo sapien
acacggcggagatcatgacccgcgg

SEQ ID NO: 276139 - DNA, 25 bp, Homo sapien
tcgcagaaatgcgagagctgcgtga

SEQ ID NO: 276140 - DNA, 25 bp, Homo sapien
gagccacgggctggacacggcggag

SEQ ID NO: 276141 - DNA, 25 bp, Homo sapien
ctgcaacgtcgcagaaatgcgagag

SEQ ID NO: 276142 - DNA, 25 bp, Homo sapien
ggcggcgcacgggtcgtagcgcggc

SEQ ID NO: 276143 - DNA, 25 bp, Homo sapien
ctcgcgcgggccgtacgggtcggcg

SEQ ID NO: 276144 - DNA, 25 bp, Homo sapien
cggccggcgcaaacgggtaggcgtg

SEQ ID NO: 276145 - DNA, 25 bp, Homo sapien
gcgcaaacgggtaggcgtgcggcgg

SEQ ID NO: 276146 - DNA, 25 bp, Homo sapien
gcggccgcgcagctggccccggggc

SEQ ID NO: 276147 - DNA, 25 bp, Homo sapien
ctgcggccgcgcagctggccccggg

SEQ ID NO: 276148 - DNA, 25 bp, Homo sapien
tgcggccgcgcagctggccccgggg

SEQ ID NO: 276149 - DNA, 25 bp, Homo sapien
cggccgcgcagctggccccggggcc

SEQ ID NO: 276150 - DNA, 25 bp, Homo sapien
atctctagctgcacgctcacaccgg

SEQ ID NO: 276151 - DNA, 25 bp, Homo sapien
agctggttgaactcgtcccacagcg

SEQ ID NO: 276152 - DNA, 25 bp, Homo sapien
caccttcgcgttcttcttcaccggc

SEQ ID NO: 276153 - DNA, 25 bp, Homo sapien
cagcgccttcatctctagctgcacg

SEQ ID NO: 276154 - DNA, 25 bp, Homo sapien
gtgaagcccagcgccgacaaggccc

SEQ ID NO: 276155 - DNA, 25 bp, Homo sapien
cgacaaggcccttgccgggctggcc

SEQ ID NO: 276156 - DNA, 25 bp, Homo sapien
cagcgccgacaaggcccttgccggg

SEQ ID NO: 276157 - DNA, 25 bp, Homo sapien
tgccgggctggcctgagccagcggc

SEQ ID NO: 276158 - DNA, 25 bp, Homo sapien
ggtgatgaggccttgggtcacccta

SEQ ID NO: 276159 - DNA, 25 bp, Homo sapien
ggggtgatgaggccttgggtcaccc

SEQ ID NO: 276160 - DNA, 25 bp, Homo sapien
ctgggggtgatgaggccttgggtca

SEQ ID NO: 276161 - DNA, 25 bp, Homo sapien
gtgatgaggccttgggtcaccctag

SEQ ID NO: 276162 - DNA, 25 bp, Homo sapien
gccgaagagcttcacttggaaggtg

SEQ ID NO: 276163 - DNA, 25 bp, Homo sapien
catatagtcggccatgggatccatg

SEQ ID NO: 276164 - DNA, 25 bp, Homo sapien
cggtagcgcttatcgtccaccggca

SEQ ID NO: 276165 - DNA, 25 bp, Homo sapien
gaagtccatgagcagcatatagtcg

SEQ ID NO: 276166 - DNA, 25 bp, Homo sapien
agttgggtcaccaggcggagacccg

SEQ ID NO: 276167 - DNA, 25 bp, Homo sapien
aagagtttcatggtgcagacgaccc

SEQ ID NO: 276168 - DNA, 25 bp, Homo sapien
ttgatcgggcagcatcgcaggtgcc

SEQ ID NO: 276169 - DNA, 25 bp, Homo sapien
catcgcaggtgcctaaagagtttca

SEQ ID NO: 276170 - DNA, 25 bp, Homo sapien
tgagcttgtcgaaggacacgatttg

SEQ ID NO: 276171 - DNA, 25 bp, Homo sapien
gccgttgtcgtccagtaggttgttg

SEQ ID NO: 276172 - DNA, 25 bp, Homo sapien
gtccgggtggtagtgcacgcggcct

SEQ ID NO: 276173 - DNA, 25 bp, Homo sapien
actgcgcgcccttggcaggcgagtc

SEQ ID NO: 276174 - DNA, 25 bp, Homo sapien
agacaaggtggggaatcagctccag

SEQ ID NO: 276175 - DNA, 25 bp, Homo sapien
aagacaaggtggggaatcagctcca

SEQ ID NO: 276176 - DNA, 25 bp, Homo sapien
gaagacaaggtggggaatcagctcc

SEQ ID NO: 276177 - DNA, 25 bp, Homo sapien
cagtgaccgcggtgaatcgtgtctc

SEQ ID NO: 276178 - DNA, 25 bp, Homo sapien
tccacatagaccacgtggaagcggg

SEQ ID NO: 276179 - DNA, 25 bp, Homo sapien
cacaaaggttttgaagttctcctcg

SEQ ID NO: 276180 - DNA, 25 bp, Homo sapien
cgctatctttgcgtgggtccacata

SEQ ID NO: 276181 - DNA, 25 bp, Homo sapien
ttccagaggcgttgaatccgctcag

SEQ ID NO: 276182 - DNA, 25 bp, Homo sapien
gaggcgttgaatccgctcaggtcct

SEQ ID NO: 276183 - DNA, 25 bp, Homo sapien
cgcttttccagaggcgttgaatccg

SEQ ID NO: 276184 - DNA, 25 bp, Homo sapien
acccgcttttccagaggcgttgaat

SEQ ID NO: 276185 - DNA, 25 bp, Homo sapien
gaacagagcgggttccctagtaatc

SEQ ID NO: 276186 - DNA, 25 bp, Homo sapien
cctctctggtgtcccccaggtgggt

SEQ ID NO: 276187 - DNA, 25 bp, Homo sapien
aggaacctcctctctcactagggaa

SEQ ID NO: 276188 - DNA, 25 bp, Homo sapien
taatctgggtaaacctcagatcagg

SEQ ID NO: 276189 - DNA, 25 bp, Homo sapien
tgggtgtgagcaagccgctggagcc

SEQ ID NO: 276190 - DNA, 25 bp, Homo sapien
ttaggagaagcgcaccaagggcctt

SEQ ID NO: 276191 - DNA, 25 bp, Homo sapien
gccacccgacctcggcggaggatag

SEQ ID NO: 276192 - DNA, 25 bp, Homo sapien
tgacaagaaccagtccacgtctgcc

SEQ ID NO: 276193 - DNA, 25 bp, Homo sapien
gtcacagtcccggaagcctttcgcg

SEQ ID NO: 276194 - DNA, 25 bp, Homo sapien
tgctggcaatcttgagctgcgtgat

SEQ ID NO: 276195 - DNA, 25 bp, Homo sapien
ctttcgcgaagggattgctggcaat

SEQ ID NO: 276196 - DNA, 25 bp, Homo sapien
gaagcctttcgcgaagggattgctg

SEQ ID NO: 276197 - DNA, 25 bp, Homo sapien
cgggaggcggatcagggcggcgcct

SEQ ID NO: 276198 - DNA, 25 bp, Homo sapien
ggaggcggatcagggcggcgcctgc

SEQ ID NO: 276199 - DNA, 25 bp, Homo sapien
gggaggcggatcagggcggcgcctg

SEQ ID NO: 276200 - DNA, 25 bp, Homo sapien
gcgggaggcggatcagggcggcgcc

SEQ ID NO: 276201 - DNA, 25 bp, Homo sapien
ggaagccacggggttccgcgagcgc

SEQ ID NO: 276202 - DNA, 25 bp, Homo sapien
gctcatgagcggcagtgcgccgggc

SEQ ID NO: 276203 - DNA, 25 bp, Homo sapien
ttccgcgagcgcgcgaaggcgctca

SEQ ID NO: 276204 - DNA, 25 bp, Homo sapien
ctttctccgtgccgctgggctgcgt

SEQ ID NO: 276205 - DNA, 25 bp, Homo sapien
tagagcgcgcacagggccggaaccc

SEQ ID NO: 276206 - DNA, 25 bp, Homo sapien
aaggctcttggccgccctcggtgtt

SEQ ID NO: 276207 - DNA, 25 bp, Homo sapien
tcggtgttccccgaccagtcggtgc

SEQ ID NO: 276208 - DNA, 25 bp, Homo sapien
gaggagctccgacgccccatgcgag

SEQ ID NO: 276209 - DNA, 25 bp, Homo sapien
tcgcgctggaattctcgccgggcct

SEQ ID NO: 276210 - DNA, 25 bp, Homo sapien
tggcccgcccgcgtcgcgctggaat

SEQ ID NO: 276211 - DNA, 25 bp, Homo sapien
gccgggcagcgggactaagccgccg

SEQ ID NO: 276212 - DNA, 25 bp, Homo sapien
gggcagcgggactaagccgccggcg

SEQ ID NO: 276213 - DNA, 25 bp, Homo sapien
atagtggtcgtaggcggcggccgga

SEQ ID NO: 276214 - DNA, 25 bp, Homo sapien
cgagatagtggtcgtaggcggcggc

SEQ ID NO: 276215 - DNA, 25 bp, Homo sapien
cttggccccgagatagtggtcgtag

SEQ ID NO: 276216 - DNA, 25 bp, Homo sapien
aggcggcggccggatatttgtaggg

SEQ ID NO: 276217 - DNA, 25 bp, Homo sapien
gcgcgtgcgggtggtagccgtggcc

SEQ ID NO: 276218 - DNA, 25 bp, Homo sapien
gtggtggtgcggatgcgcgtgcggg

SEQ ID NO: 276219 - DNA, 25 bp, Homo sapien
gcagcgggtagggcgccggccggct

SEQ ID NO: 276220 - DNA, 25 bp, Homo sapien
tagccgtggccacgcaggccgggca

SEQ ID NO: 276221 - DNA, 25 bp, Homo sapien
tatctggggcaatagtcgtaggagc

SEQ ID NO: 276222 - DNA, 25 bp, Homo sapien
gcggctccggccgacgagtacatgt

SEQ ID NO: 276223 - DNA, 25 bp, Homo sapien
gggcaatagtcgtaggagccgggcg

SEQ ID NO: 276224 - DNA, 25 bp, Homo sapien
tccggccgacgagtacatgttggcg

SEQ ID NO: 276225 - DNA, 25 bp, Homo sapien
gggcgggagcgcgacagggcccgtg

SEQ ID NO: 276226 - DNA, 25 bp, Homo sapien
tgggggaacgtattccttgcttgcc

SEQ ID NO: 276227 - DNA, 25 bp, Homo sapien
gcccggcgaacttcggggctgtgca

SEQ ID NO: 276228 - DNA, 25 bp, Homo sapien
ctgtgcaggaccggggcgggagcgc

SEQ ID NO: 276229 - DNA, 25 bp, Homo sapien
caaataaatggacacgcaggcggct

SEQ ID NO: 276230 - DNA, 25 bp, Homo sapien
gaaccggatacttcgatagcccaag

SEQ ID NO: 276231 - DNA, 25 bp, Homo sapien
acatgtatctacaccgcctgcaggc

SEQ ID NO: 276232 - DNA, 25 bp, Homo sapien
gcgaaaccgtttatcaagtcggcgc

SEQ ID NO: 276233 - DNA, 25 bp, Homo sapien
cccagaatagggacaactgcaggtg

SEQ ID NO: 276234 - DNA, 25 bp, Homo sapien
caccgaccggcagtgtctgtcatga

SEQ ID NO: 276235 - DNA, 25 bp, Homo sapien
gaaaagcacaagcatctgtcccgaa

SEQ ID NO: 276236 - DNA, 25 bp, Homo sapien
taaagtcactaaggagggaacatgc

SEQ ID NO: 276237 - DNA, 25 bp, Homo sapien
acaagaagttctcagatgcacaaac

SEQ ID NO: 276238 - DNA, 25 bp, Homo sapien
tacaagaagttctcagatgcacaaa

SEQ ID NO: 276239 - DNA, 25 bp, Homo sapien
tttacaagaagttctcagatgcaca

SEQ ID NO: 276240 - DNA, 25 bp, Homo sapien
caagaagttctcagatgcacaaact

SEQ ID NO: 276241 - DNA, 25 bp, Homo sapien
ggcaggcaatcactgggcactggtt

SEQ ID NO: 276242 - DNA, 25 bp, Homo sapien
tcactgggcactggttgaggactga

SEQ ID NO: 276243 - DNA, 25 bp, Homo sapien
cactggttgaggactgagcacatga

SEQ ID NO: 276244 - DNA, 25 bp, Homo sapien
gagcacatgagggacggtgagcagc

SEQ ID NO: 276245 - DNA, 25 bp, Homo sapien
gcagggcaggtgtgctcaacgggga

SEQ ID NO: 276246 - DNA, 25 bp, Homo sapien
cagggcaggtgtgctcaacggggaa

SEQ ID NO: 276247 - DNA, 25 bp, Homo sapien
agggcaggtgtgctcaacggggaac

SEQ ID NO: 276248 - DNA, 25 bp, Homo sapien
cacagccatgagcaactgggtagac

SEQ ID NO: 276249 - DNA, 25 bp, Homo sapien
gcaactgggtagactggggactgtt

SEQ ID NO: 276250 - DNA, 25 bp, Homo sapien
agccatgagcaactgggtagactgg

SEQ ID NO: 276251 - DNA, 25 bp, Homo sapien
ccacagccatgagcaactgggtaga

SEQ ID NO: 276252 - DNA, 25 bp, Homo sapien
gaacaatgccaccagctagcggcca

SEQ ID NO: 276253 - DNA, 25 bp, Homo sapien
gcagcactcgggtgcaggaatccca

SEQ ID NO: 276254 - DNA, 25 bp, Homo sapien
agctcaacgcccgtgctcgtaagct

SEQ ID NO: 276255 - DNA, 25 bp, Homo sapien
tctgaatccgtggaggaacaatgcc

SEQ ID NO: 276256 - DNA, 25 bp, Homo sapien
tcaacaaagacggtcacctgcggtc

SEQ ID NO: 276257 - DNA, 25 bp, Homo sapien
tggtgtgttcctagacgtctcagct

SEQ ID NO: 276258 - DNA, 25 bp, Homo sapien
gttcctagacgtctcagctttcact

SEQ ID NO: 276259 - DNA, 25 bp, Homo sapien
tgaagggttggcactctgcggggca

SEQ ID NO: 276260 - DNA, 25 bp, Homo sapien
agtgaagggaaacacgacaactcca

SEQ ID NO: 276261 - DNA, 25 bp, Homo sapien
acacgacaactccatgtgcccatgg

SEQ ID NO: 276262 - DNA, 25 bp, Homo sapien
tggaatttactgaacaagtcactgt

SEQ ID NO: 276263 - DNA, 25 bp, Homo sapien
attggaatttactgaacaagtcact

SEQ ID NO: 276264 - DNA, 25 bp, Homo sapien
gacttcttacttgggggcttcaaga

SEQ ID NO: 276265 - DNA, 25 bp, Homo sapien
cttacttgggggcttcaagagcacg

SEQ ID NO: 276266 - DNA, 25 bp, Homo sapien
ttgggggcttcaagagcacgtccag

SEQ ID NO: 276267 - DNA, 25 bp, Homo sapien
cagacttcttacttgggggcttcaa

SEQ ID NO: 276268 - DNA, 25 bp, Homo sapien
tcttttaagagaccagggacagtgg

SEQ ID NO: 276269 - DNA, 25 bp, Homo sapien
atgcacacttgacctcctgacttgg

SEQ ID NO: 276270 - DNA, 25 bp, Homo sapien
aactcatggcctttaagtgaactgc

SEQ ID NO: 276271 - DNA, 25 bp, Homo sapien
ggcctttaagtgaactgcttccacc

SEQ ID NO: 276272 - DNA, 25 bp, Homo sapien
cgtgcacgtaggacctgtctgtgtg

SEQ ID NO: 276273 - DNA, 25 bp, Homo sapien
tgggtcttgctcttggcagcgctcc

SEQ ID NO: 276274 - DNA, 25 bp, Homo sapien
gctccgggtctcgtgcagtgcccta

SEQ ID NO: 276275 - DNA, 25 bp, Homo sapien
agcttgggggttcacatacctcatg

SEQ ID NO: 276276 - DNA, 25 bp, Homo sapien
gatatgttcaacatctctgccattt

SEQ ID NO: 276277 - DNA, 25 bp, Homo sapien
tctgatatgttcaacatctctgcca

SEQ ID NO: 276278 - DNA, 25 bp, Homo sapien
tatctgatatgttcaacatctctgc

SEQ ID NO: 276279 - DNA, 25 bp, Homo sapien
tgatatgttcaacatctctgccatt

SEQ ID NO: 276280 - DNA, 25 bp, Homo sapien
ggccagagccaccttctttcccttg

SEQ ID NO: 276281 - DNA, 25 bp, Homo sapien
ttcttcatgacagcaggggccagag

SEQ ID NO: 276282 - DNA, 25 bp, Homo sapien
ctgcttcttcatgacagcaggggcc

SEQ ID NO: 276283 - DNA, 25 bp, Homo sapien
ccagagccaccttctttcccttggc

SEQ ID NO: 276284 - DNA, 25 bp, Homo sapien
gatgtcctgtccgatgccaaaattc

SEQ ID NO: 276285 - DNA, 25 bp, Homo sapien
ttcacaaagtgggtgaggtctcttt

SEQ ID NO: 276286 - DNA, 25 bp, Homo sapien
catttcacaaagtgggtgaggtctc

SEQ ID NO: 276287 - DNA, 25 bp, Homo sapien
gccatttcacaaagtgggtgaggtc

SEQ ID NO: 276288 - DNA, 25 bp, Homo sapien
ggtgaactggttaattgcaggaggc

SEQ ID NO: 276289 - DNA, 25 bp, Homo sapien
taggtgaactggttaattgcaggag

SEQ ID NO: 276290 - DNA, 25 bp, Homo sapien
ctaggtgaactggttaattgcagga

SEQ ID NO: 276291 - DNA, 25 bp, Homo sapien
tgaactggttaattgcaggaggcac

SEQ ID NO: 276292 - DNA, 25 bp, Homo sapien
ctgagtagctgtttggcagtccagg

SEQ ID NO: 276293 - DNA, 25 bp, Homo sapien
gagtagctgtttggcagtccagggc

SEQ ID NO: 276294 - DNA, 25 bp, Homo sapien
tgagtagctgtttggcagtccaggg

SEQ ID NO: 276295 - DNA, 25 bp, Homo sapien
gtcgtctgcaatcaccaccagctga

SEQ ID NO: 276296 - DNA, 25 bp, Homo sapien
tggtggggacgtcccgtttgccagc

SEQ ID NO: 276297 - DNA, 25 bp, Homo sapien
agcccaggccaacagtctctgcttc

SEQ ID NO: 276298 - DNA, 25 bp, Homo sapien
gtggtgacgatgttaactcctgctc

SEQ ID NO: 276299 - DNA, 25 bp, Homo sapien
agacaaccagctcgatgggatccac

SEQ ID NO: 276300 - DNA, 25 bp, Homo sapien
caaggcaggcaagaagacaaccagc

SEQ ID NO: 276301 - DNA, 25 bp, Homo sapien
ccccattttacgacacaaggcaggc

SEQ ID NO: 276302 - DNA, 25 bp, Homo sapien
gaagacaaccagctcgatgggatcc

SEQ ID NO: 276303 - DNA, 25 bp, Homo sapien
ctatgtgaaggtgacagtggtgcag

SEQ ID NO: 276304 - DNA, 25 bp, Homo sapien
gtggactagacgtcccagtcttgcc

SEQ ID NO: 276305 - DNA, 25 bp, Homo sapien
caggtcttcctgtggactagacgtc

SEQ ID NO: 276306 - DNA, 25 bp, Homo sapien
ttcctgtggactagacgtcccagtc

SEQ ID NO: 276307 - DNA, 25 bp, Homo sapien
catcagcttagccaaagtgcctttg

SEQ ID NO: 276308 - DNA, 25 bp, Homo sapien
ttaggacccaggatgttgccgcccc

SEQ ID NO: 276309 - DNA, 25 bp, Homo sapien
caggatgttgccgccccagtgacgg

SEQ ID NO: 276310 - DNA, 25 bp, Homo sapien
gcttccatcagcttagccaaagtgc

SEQ ID NO: 276311 - DNA, 25 bp, Homo sapien
cttttcgagcttggcgatacgagcc

SEQ ID NO: 276312 - DNA, 25 bp, Homo sapien
tttaatgtacagaaaactcaacagt

SEQ ID NO: 276313 - DNA, 25 bp, Homo sapien
aatgtacagaaaactcaacagtgta

SEQ ID NO: 276314 - DNA, 25 bp, Homo sapien
gccttttcgagcttggcgatacgag

SEQ ID NO: 276315 - DNA, 25 bp, Homo sapien
tcaccagccttctgatgcagcgagc

SEQ ID NO: 276316 - DNA, 25 bp, Homo sapien
ttcagggacatgtatgaggaccact

SEQ ID NO: 276317 - DNA, 25 bp, Homo sapien
gaactctgttattagaacccagtgg

SEQ ID NO: 276318 - DNA, 25 bp, Homo sapien
agtgagtgtccttctgtccctggca

SEQ ID NO: 276319 - DNA, 25 bp, Homo sapien
taaaaggtcaggacctacgtcaagc

SEQ ID NO: 276320 - DNA, 25 bp, Homo sapien
gtcactggcatagccctcagggcag

SEQ ID NO: 276321 - DNA, 25 bp, Homo sapien
tcaagcctgaggcagtcactggcat

SEQ ID NO: 276322 - DNA, 25 bp, Homo sapien
gcagctgacctgcaacataagaata

SEQ ID NO: 276323 - DNA, 25 bp, Homo sapien
tacttgctaggtgcatgaaggctct

SEQ ID NO: 276324 - DNA, 25 bp, Homo sapien
tcatggttcggtaccactacatggg

SEQ ID NO: 276325 - DNA, 25 bp, Homo sapien
catgagctgagggtccttacctgac

SEQ ID NO: 276326 - DNA, 25 bp, Homo sapien
gaatgatgcccatgcagtgccttgg

SEQ ID NO: 276327 - DNA, 25 bp, Homo sapien
gccctgttgggacctcgttcctgta

SEQ ID NO: 276328 - DNA, 25 bp, Homo sapien
tcccagctggaatgtgaggaaggct

SEQ ID NO: 276329 - DNA, 25 bp, Homo sapien
gcggattcagcacttaagccctagt

SEQ ID NO: 276330 - DNA, 25 bp, Homo sapien
cccatagctgggcaagatgcgcttg

SEQ ID NO: 276331 - DNA, 25 bp, Homo sapien
ccaatattttgccaagcctaggagt

SEQ ID NO: 276332 - DNA, 25 bp, Homo sapien
tactacccaaagtggtcatcagagg

SEQ ID NO: 276333 - DNA, 25 bp, Homo sapien
ggcaatataacgagaccctagcttt

SEQ ID NO: 276334 - DNA, 25 bp, Homo sapien
cacaggccaggttcggttgttcatg

SEQ ID NO: 276335 - DNA, 25 bp, Homo sapien
catgtaagtcttcctggtttccggg

SEQ ID NO: 276336 - DNA, 25 bp, Homo sapien
aaaggcccaggctaacaagttccag

SEQ ID NO: 276337 - DNA, 25 bp, Homo sapien
agtggttgccatctctgaagggacg

SEQ ID NO: 276338 - DNA, 25 bp, Homo sapien
caggttcgccaacgtgccagtggtt

SEQ ID NO: 276339 - DNA, 25 bp, Homo sapien
cactgtgtgtctctatggatctgac

SEQ ID NO: 276340 - DNA, 25 bp, Homo sapien
tatgtgtgtccattatctgtcagtg

SEQ ID NO: 276341 - DNA, 25 bp, Homo sapien
cctcgagggacttcatgtaagtaga

SEQ ID NO: 276342 - DNA, 25 bp, Homo sapien
attgtacaagcagcatgaccatcca

SEQ ID NO: 276343 - DNA, 25 bp, Homo sapien
ccctgtggtagggacgcagtgtcta

SEQ ID NO: 276344 - DNA, 25 bp, Homo sapien
cccaggcaaggaggatgcacagtct

SEQ ID NO: 276345 - DNA, 25 bp, Homo sapien
atgactgccacgaaggaggcccctt

SEQ ID NO: 276346 - DNA, 25 bp, Homo sapien
ggacaggctccatggttctccctca

SEQ ID NO: 276347 - DNA, 25 bp, Homo sapien
gcttgtgctggtttccatcgactgc

SEQ ID NO: 276348 - DNA, 25 bp, Homo sapien
gtttccatcgactgcctgctgcctt

SEQ ID NO: 276349 - DNA, 25 bp, Homo sapien
gctggtttccatcgactgcctgctg

SEQ ID NO: 276350 - DNA, 25 bp, Homo sapien
tgtgctggtttccatcgactgcctg

SEQ ID NO: 276351 - DNA, 25 bp, Homo sapien
agagccgtcactgctatccacggcg

SEQ ID NO: 276352 - DNA, 25 bp, Homo sapien
ctcctgagagcggtcactgctactt

SEQ ID NO: 276353 - DNA, 25 bp, Homo sapien
gagcggtcactgctacttacggtgc

SEQ ID NO: 276354 - DNA, 25 bp, Homo sapien
tcctgagagccgtcactgctatcca

SEQ ID NO: 276355 - DNA, 25 bp, Homo sapien
tcctgagagcggtcactgctactta

SEQ ID NO: 276356 - DNA, 25 bp, Homo sapien
tcctgagagcggtcactgctactca

SEQ ID NO: 276357 - DNA, 25 bp, Homo sapien
agagcggtcactgctacccacggtg

SEQ ID NO: 276358 - DNA, 25 bp, Homo sapien
accctcctgagagcggtcactgcta

SEQ ID NO: 276359 - DNA, 25 bp, Homo sapien
agagcggtcactgctacccacggcg

SEQ ID NO: 276360 - DNA, 25 bp, Homo sapien
agagcggtcactgctacccacggtg

SEQ ID NO: 276361 - DNA, 25 bp, Homo sapien
tctcctgagagcggtcactgctacc

SEQ ID NO: 276362 - DNA, 25 bp, Homo sapien
ctcctgagagcggtcactgctaccc

SEQ ID NO: 276363 - DNA, 25 bp, Homo sapien
ccacactctcctgagagcggtcact

SEQ ID NO: 276364 - DNA, 25 bp, Homo sapien
ccacggcgcccacactctcctgaga

SEQ ID NO: 276365 - DNA, 25 bp, Homo sapien
gcgcccacactctcctgagagcggt

SEQ ID NO: 276366 - DNA, 25 bp, Homo sapien
actctcctgagagcggtcactgcta

SEQ ID NO: 276367 - DNA, 25 bp, Homo sapien
catcagctttttgataagacacaaa

SEQ ID NO: 276368 - DNA, 25 bp, Homo sapien
ggcatcagctttttgataagacaca

SEQ ID NO: 276369 - DNA, 25 bp, Homo sapien
cactgctacccacggtgcacccaca

SEQ ID NO: 276370 - DNA, 25 bp, Homo sapien
tcaggcatcagctttttgataagac

SEQ ID NO: 276371 - DNA, 25 bp, Homo sapien
ccgtgcctggcctcttcgcattttc

SEQ ID NO: 276372 - DNA, 25 bp, Homo sapien
ctggcctcttcgcattttctttttc

SEQ ID NO: 276373 - DNA, 25 bp, Homo sapien
gcacacaccactatacccgactaat

SEQ ID NO: 276374 - DNA, 25 bp, Homo sapien
ggcacacaccactatacccgactaa

SEQ ID NO: 276375 - DNA, 25 bp, Homo sapien
gcaggttcatgctccccgggggacc

SEQ ID NO: 276376 - DNA, 25 bp, Homo sapien
gctggaggagagagatgcttctcca

SEQ ID NO: 276377 - DNA, 25 bp, Homo sapien
cagcaggttcatgctccccggggga

SEQ ID NO: 276378 - DNA, 25 bp, Homo sapien
ccatcagcaggttcatgctccccgg

SEQ ID NO: 276379 - DNA, 25 bp, Homo sapien
gctgagcggtgcaacggtcatctgt

SEQ ID NO: 276380 - DNA, 25 bp, Homo sapien
tcattcccaaattgaagttttagat

SEQ ID NO: 276381 - DNA, 25 bp, Homo sapien
atttccctatagctaatctctctgg

SEQ ID NO: 276382 - DNA, 25 bp, Homo sapien
tctcctggctgagcggtgcaacggt

SEQ ID NO: 276383 - DNA, 25 bp, Homo sapien
ctgcggggattaggagggcgcttcc

SEQ ID NO: 276384 - DNA, 25 bp, Homo sapien
tgcggggattaggagggcgcttccg

SEQ ID NO: 276385 - DNA, 25 bp, Homo sapien
ggattaggagggcgcttccggtggc

SEQ ID NO: 276386 - DNA, 25 bp, Homo sapien
cgacgatggcggcaatggcggtggc

SEQ ID NO: 276387 - DNA, 25 bp, Homo sapien
cccagaagccccacgacgatggcgg

SEQ ID NO: 276388 - DNA, 25 bp, Homo sapien
cggcgggcagccctagctgccccag

SEQ ID NO: 276389 - DNA, 25 bp, Homo sapien
gcgcggcgggcagccctagctgccc

SEQ ID NO: 276390 - DNA, 25 bp, Homo sapien
ctgacttcggtaagccccagtggca

SEQ ID NO: 276391 - DNA, 25 bp, Homo sapien
cagtggcaaacccagatcagttggt

SEQ ID NO: 276392 - DNA, 25 bp, Homo sapien
aaaaagcaggtctgttagcagggca

SEQ ID NO: 276393 - DNA, 25 bp, Homo sapien
gcctatctaggctggaacgaacact

SEQ ID NO: 276394 - DNA, 25 bp, Homo sapien
ttcaagtgatatagccacgttggcc

SEQ ID NO: 276395 - DNA, 25 bp, Homo sapien
gacttcaagtgatatagccacgttg

SEQ ID NO: 276396 - DNA, 25 bp, Homo sapien
agtgatatagccacgttggcctccc

SEQ ID NO: 276397 - DNA, 25 bp, Homo sapien
tgacttcaagtgatatagccacgtt

SEQ ID NO: 276398 - DNA, 25 bp, Homo sapien
agtactaaaggtctctgaaatacag

SEQ ID NO: 276399 - DNA, 25 bp, Homo sapien
aataatgacataagctgtctcctct

SEQ ID NO: 276400 - DNA, 25 bp, Homo sapien
ctatgccttctaactagcagtaaca

SEQ ID NO: 276401 - DNA, 25 bp, Homo sapien
gacataagctgtctcctctcgctgt

SEQ ID NO: 276402 - DNA, 25 bp, Homo sapien
tgatcatgccctctgcgctacttta

SEQ ID NO: 276403 - DNA, 25 bp, Homo sapien
ttcctagtgcctcgttcccagaggg

SEQ ID NO: 276404 - DNA, 25 bp, Homo sapien
caaaactgcaaggaacaagtgcgcc

SEQ ID NO: 276405 - DNA, 25 bp, Homo sapien
ggagcgtcttactggagccctgctg

SEQ ID NO: 276406 - DNA, 25 bp, Homo sapien
tgtgatccagtggtccggaagaata

SEQ ID NO: 276407 - DNA, 25 bp, Homo sapien
gatcaaccctcggatgcaacaaccg

SEQ ID NO: 276408 - DNA, 25 bp, Homo sapien
gcaacaaccggagcacacagtgtac

SEQ ID NO: 276409 - DNA, 25 bp, Homo sapien
tctgaggcgctaagagtcccaggct

SEQ ID NO: 276410 - DNA, 25 bp, Homo sapien
ttctttgcacaactcggagcggagc

SEQ ID NO: 276411 - DNA, 25 bp, Homo sapien
ctttgcacaactcggagcggagctc

SEQ ID NO: 276412 - DNA, 25 bp, Homo sapien
cctcctgtcactggtcaccaaatat

SEQ ID NO: 276413 - DNA, 25 bp, Homo sapien
gcacaactcggagcggagctcggct

SEQ ID NO: 276414 - DNA, 25 bp, Homo sapien
agctcaaggccacattcctaaaatg

SEQ ID NO: 276415 - DNA, 25 bp, Homo sapien
tgcacatggcttctaacagctcaag

SEQ ID NO: 276416 - DNA, 25 bp, Homo sapien
catggctaccaagagaatttcctgt

SEQ ID NO: 276417 - DNA, 25 bp, Homo sapien
ccttcaaagcgcctgcctgagaaag

SEQ ID NO: 276418 - DNA, 25 bp, Homo sapien
tcaagggtgttctcctggtcacatc

SEQ ID NO: 276419 - DNA, 25 bp, Homo sapien
ccagacctgcatggtggtcgcacat

SEQ ID NO: 276420 - DNA, 25 bp, Homo sapien
gcacattcgctttatccttcaaggg

SEQ ID NO: 276421 - DNA, 25 bp, Homo sapien
gacacaccaagaggcagatgcaagg

SEQ ID NO: 276422 - DNA, 25 bp, Homo sapien
agggaaggctttcacacggactgca

SEQ ID NO: 276423 - DNA, 25 bp, Homo sapien
ggaaggctttcacacggactgcaca

SEQ ID NO: 276424 - DNA, 25 bp, Homo sapien
gaaggctttcacacggactgcacac

SEQ ID NO: 276425 - DNA, 25 bp, Homo sapien
aagggaaggctttcacacggactgc

SEQ ID NO: 276426 - DNA, 25 bp, Homo sapien
atgcatagcaacatcatccacaatg

SEQ ID NO: 276427 - DNA, 25 bp, Homo sapien
atatgcatagcaacatcatccacaa

SEQ ID NO: 276428 - DNA, 25 bp, Homo sapien
tatgcatagcaacatcatccacaat

SEQ ID NO: 276429 - DNA, 25 bp, Homo sapien
ctgctacccttgggaagggtcccag

SEQ ID NO: 276430 - DNA, 25 bp, Homo sapien
gctgcaggagtgggaatcgtgctgc

SEQ ID NO: 276431 - DNA, 25 bp, Homo sapien
gctgctacccttgggaagggtccca

SEQ ID NO: 276432 - DNA, 25 bp, Homo sapien
tgctgctacccttgggaagggtccc

SEQ ID NO: 276433 - DNA, 25 bp, Homo sapien
aggctccagccctctggctgcggga

SEQ ID NO: 276434 - DNA, 25 bp, Homo sapien
cttcaaagcacctctgagcaggctc

SEQ ID NO: 276435 - DNA, 25 bp, Homo sapien
ctctggctgcgggaggggtctgggg

SEQ ID NO: 276436 - DNA, 25 bp, Homo sapien
cagccctctggctgcgggaggggtc

SEQ ID NO: 276437 - DNA, 25 bp, Homo sapien
agggagccagccttctcgtgccctc

SEQ ID NO: 276438 - DNA, 25 bp, Homo sapien
cctctggtgccctcgggtagacaga

SEQ ID NO: 276439 - DNA, 25 bp, Homo sapien
catcgcccccttgtgtttgcagagg

SEQ ID NO: 276440 - DNA, 25 bp, Homo sapien
gcctcagttgcctgacgtgtcagcg

SEQ ID NO: 276441 - DNA, 25 bp, Homo sapien
ccaacagcagaggcggggcctccgg

SEQ ID NO: 276442 - DNA, 25 bp, Homo sapien
ctgccaacagcagaggcggggcctc

SEQ ID NO: 276443 - DNA, 25 bp, Homo sapien
tgccaacagcagaggcggggcctcc

SEQ ID NO: 276444 - DNA, 25 bp, Homo sapien
acagcagaggcggggcctccggcat

SEQ ID NO: 276445 - DNA, 25 bp, Homo sapien
ccagcagcaccaggcccagcaacac

SEQ ID NO: 276446 - DNA, 25 bp, Homo sapien
agcagcaccaggcccagcaacacag

SEQ ID NO: 276447 - DNA, 25 bp, Homo sapien
accagcagcaccaggcccagcaaca

SEQ ID NO: 276448 - DNA, 25 bp, Homo sapien
caccagcagcaccaggcccagcaac

SEQ ID NO: 276449 - DNA, 25 bp, Homo sapien
atgaactcgttccagccgataaggc

SEQ ID NO: 276450 - DNA, 25 bp, Homo sapien
tgaactcgttccagccgataaggca

SEQ ID NO: 276451 - DNA, 25 bp, Homo sapien
actcgttccagccgataaggcacag

SEQ ID NO: 276452 - DNA, 25 bp, Homo sapien
gaactcgttccagccgataaggcac

SEQ ID NO: 276453 - DNA, 25 bp, Homo sapien
cacgctctgtgcgttcccgggctcc

SEQ ID NO: 276454 - DNA, 25 bp, Homo sapien
agcacgctctgtgcgttcccgggct

SEQ ID NO: 276455 - DNA, 25 bp, Homo sapien
ctccagcacgctctgtgcgttcccg

SEQ ID NO: 276456 - DNA, 25 bp, Homo sapien
atggcctccagcacgctctgtgcgt

SEQ ID NO: 276457 - DNA, 25 bp, Homo sapien
cgggccatgcgcacagctgagtagc

SEQ ID NO: 276458 - DNA, 25 bp, Homo sapien
cagctgagtagccacagtaggcccc

SEQ ID NO: 276459 - DNA, 25 bp, Homo sapien
agcaggcgggccatgcgcacagctg

SEQ ID NO: 276460 - DNA, 25 bp, Homo sapien
tgcgcacagctgagtagccacagta

SEQ ID NO: 276461 - DNA, 25 bp, Homo sapien
ttgtccttcacgccagcgaaatcca

SEQ ID NO: 276462 - DNA, 25 bp, Homo sapien
cgccagcgaaatccaccatccgctg

SEQ ID NO: 276463 - DNA, 25 bp, Homo sapien
cacagtcggggttgatctcgatggt

SEQ ID NO: 276464 - DNA, 25 bp, Homo sapien
tgatggcggcacagtcggggttgat

SEQ ID NO: 276465 - DNA, 25 bp, Homo sapien
agtgcccacgtcctcacagacagga

SEQ ID NO: 276466 - DNA, 25 bp, Homo sapien
tcacagacaggaggccatccctaca

SEQ ID NO: 276467 - DNA, 25 bp, Homo sapien
tgtcagtgcccacgtcctcacagac

SEQ ID NO: 276468 - DNA, 25 bp, Homo sapien
tgcccacgtcctcacagacaggagg

SEQ ID NO: 276469 - DNA, 25 bp, Homo sapien
tgggacgctccaaccacaagggtga

SEQ ID NO: 276470 - DNA, 25 bp, Homo sapien
cagtgtgtccacatcatacttcttc

SEQ ID NO: 276471 - DNA, 25 bp, Homo sapien
gaggaagaccatgtccagtgtgtcc

SEQ ID NO: 276472 - DNA, 25 bp, Homo sapien
tccttccagtggtcgaggaagacca

SEQ ID NO: 276473 - DNA, 25 bp, Homo sapien
actcagtgtcgctgaccaccaggga

SEQ ID NO: 276474 - DNA, 25 bp, Homo sapien
tggtgcctccagagcgagctgtgtc

SEQ ID NO: 276475 - DNA, 25 bp, Homo sapien
cacacagggctctactggaatgcct

SEQ ID NO: 276476 - DNA, 25 bp, Homo sapien
tcagtctgtgaagggccaccagtgc

SEQ ID NO: 276477 - DNA, 25 bp, Homo sapien
taattaccagctttgcgcaagcagc

SEQ ID NO: 276478 - DNA, 25 bp, Homo sapien
tagaccctcacaagagccaggttgt

SEQ ID NO: 276479 - DNA, 25 bp, Homo sapien
tgcagatgtgcgtttaacaaggaca

SEQ ID NO: 276480 - DNA, 25 bp, Homo sapien
tgcccaagtgaagcccatctggctg

SEQ ID NO: 276481 - DNA, 25 bp, Homo sapien
tgacagtatggacaccacacggctg

SEQ ID NO: 276482 - DNA, 25 bp, Homo sapien
tgccttgaaacactggtatccgacc

SEQ ID NO: 276483 - DNA, 25 bp, Homo sapien
cacggctgcaaggtcagtgaggtca

SEQ ID NO: 276484 - DNA, 25 bp, Homo sapien
gaaaagacgtagaacaaagcgccac

SEQ ID NO: 276485 - DNA, 25 bp, Homo sapien
gagtatccatcccttagaacagcat

SEQ ID NO: 276486 - DNA, 25 bp, Homo sapien
gacagggacctttctctcatcaact

SEQ ID NO: 276487 - DNA, 25 bp, Homo sapien
ggagttgttactggacacgcagcca

SEQ ID NO: 276488 - DNA, 25 bp, Homo sapien
ggagacaatattggcctgaccaggg

SEQ ID NO: 276489 - DNA, 25 bp, Homo sapien
cctgggcagatcacgttgtcagcca

SEQ ID NO: 276490 - DNA, 25 bp, Homo sapien
caggaacgattggtagtgtgtgcac

SEQ ID NO: 276491 - DNA, 25 bp, Homo sapien
tgtgctaggaagtctggcgcacctg

SEQ ID NO: 276492 - DNA, 25 bp, Homo sapien
tgtcagccagtagcactgtcccctt

SEQ ID NO: 276493 - DNA, 25 bp, Homo sapien
agcccggagccgcagaaggtcagca

SEQ ID NO: 276494 - DNA, 25 bp, Homo sapien
taagataatatagctagccagtgtt

SEQ ID NO: 276495 - DNA, 25 bp, Homo sapien
agcaggagcacgtctggcaccttca

SEQ ID NO: 276496 - DNA, 25 bp, Homo sapien
aaaaaagaacaatccagtgttgcag

SEQ ID NO: 276497 - DNA, 25 bp, Homo sapien
gcccttagcgttagcgtccgtcaag

SEQ ID NO: 276498 - DNA, 25 bp, Homo sapien
gctggtctcggtgcaggtgaactca

SEQ ID NO: 276499 - DNA, 25 bp, Homo sapien
gctagcagtctgaccccttggagga

SEQ ID NO: 276500 - DNA, 25 bp, Homo sapien
ggtgtgaatgctggctgactcctct

SEQ ID NO: 276501 - DNA, 25 bp, Homo sapien
cttaaagataagatgcgggcgcgtt

SEQ ID NO: 276502 - DNA, 25 bp, Homo sapien
gtctggtcttctgcgctctgctcca

SEQ ID NO: 276503 - DNA, 25 bp, Homo sapien
gcgtttttggcgcagtgtctggtct

SEQ ID NO: 276504 - DNA, 25 bp, Homo sapien
gaagatggagccagcttaaagataa

SEQ ID NO: 276505 - DNA, 25 bp, Homo sapien
ctggcccctgcccttttctggatga

SEQ ID NO: 276506 - DNA, 25 bp, Homo sapien
agctgtgtggctacaaatggtcccc

SEQ ID NO: 276507 - DNA, 25 bp, Homo sapien
tgcagaccagtgttgccaggagctc

SEQ ID NO: 276508 - DNA, 25 bp, Homo sapien
gtcatgtgtagcagcaccactcttg

SEQ ID NO: 276509 - DNA, 25 bp, Homo sapien
agagcacctggaggctcacgtcctg

SEQ ID NO: 276510 - DNA, 25 bp, Homo sapien
tgtgagagcacctggaggctcacgt

SEQ ID NO: 276511 - DNA, 25 bp, Homo sapien
tcctggattcccttgggtacgtggc

SEQ ID NO: 276512 - DNA, 25 bp, Homo sapien
ccttgggtacgtggccaatgtccat

SEQ ID NO: 276513 - DNA, 25 bp, Homo sapien
atgggccagccaccgccaccaatgt

SEQ ID NO: 276514 - DNA, 25 bp, Homo sapien
tcccggtaagccgtggaggcaatgg

SEQ ID NO: 276515 - DNA, 25 bp, Homo sapien
acactcctacaaacttcatgctcat

SEQ ID NO: 276516 - DNA, 25 bp, Homo sapien
tagtagggcactacacctctccaca

SEQ ID NO: 276517 - DNA, 25 bp, Homo sapien
tgacacaatcttcatgcgcaggctg

SEQ ID NO: 276518 - DNA, 25 bp, Homo sapien
gacagaggactgctacagacaactg

SEQ ID NO: 276519 - DNA, 25 bp, Homo sapien
tgaatcccagcagtgcaagcacagg

SEQ ID NO: 276520 - DNA, 25 bp, Homo sapien
tgcattcagaatcgcaggcccttgc

SEQ ID NO: 276521 - DNA, 25 bp, Homo sapien
ccctagcatgcagccagataaagat

SEQ ID NO: 276522 - DNA, 25 bp, Homo sapien
tttttagatattccgtctctctgtg

SEQ ID NO: 276523 - DNA, 25 bp, Homo sapien
cctgagactggctaattcctgaaaa

SEQ ID NO: 276524 - DNA, 25 bp, Homo sapien
tgtgtagtcaactctccctagcatg

SEQ ID NO: 276525 - DNA, 25 bp, Homo sapien
cctgggtttagcttggggacatcct

SEQ ID NO: 276526 - DNA, 25 bp, Homo sapien
cagggtgggtgtcgggacatgctga

SEQ ID NO: 276527 - DNA, 25 bp, Homo sapien
ccctcaagacaggtgagtggcctgg

SEQ ID NO: 276528 - DNA, 25 bp, Homo sapien
gacatcctctcccacataggacagc

SEQ ID NO: 276529 - DNA, 25 bp, Homo sapien
tcatagagcaggaagcgaggagact

SEQ ID NO: 276530 - DNA, 25 bp, Homo sapien
catagagcaggaagcgaggagactt

SEQ ID NO: 276531 - DNA, 25 bp, Homo sapien
tcacctcgcgctcatagagcaggaa

SEQ ID NO: 276532 - DNA, 25 bp, Homo sapien
tacagtcagtgtcacctcgcgctca

SEQ ID NO: 276533 - DNA, 25 bp, Homo sapien
tccgctttgcgcacgggccgcgtga

SEQ ID NO: 276534 - DNA, 25 bp, Homo sapien
cgggactgacatcccggaggcccaa

SEQ ID NO: 276535 - DNA, 25 bp, Homo sapien
gaggcccaatggcaagccgtcatct

SEQ ID NO: 276536 - DNA, 25 bp, Homo sapien
gcgccgggtctctcgaccaatggga

SEQ ID NO: 276537 - DNA, 25 bp, Homo sapien
gggaccgctgctcctgtagcctctg

SEQ ID NO: 276538 - DNA, 25 bp, Homo sapien
gcccagcttgacttgtgcagggtga

SEQ ID NO: 276539 - DNA, 25 bp, Homo sapien
agaggcattagctgggaccgctgct

SEQ ID NO: 276540 - DNA, 25 bp, Homo sapien
cccagcttgacttgtgcagggtgag

SEQ ID NO: 276541 - DNA, 25 bp, Homo sapien
tgggcgcgctgtcgctcggaggctg

SEQ ID NO: 276542 - DNA, 25 bp, Homo sapien
gtctgagcgcttcctgatccagcgg

SEQ ID NO: 276543 - DNA, 25 bp, Homo sapien
gaagccggcgcgttcaccattgggc

SEQ ID NO: 276544 - DNA, 25 bp, Homo sapien
gctgcgccaaagcttcgggctgcgc

SEQ ID NO: 276545 - DNA, 25 bp, Homo sapien
actagcggagtcggccagccccgga

SEQ ID NO: 276546 - DNA, 25 bp, Homo sapien
gccgggccactagcggagtcggcca

SEQ ID NO: 276547 - DNA, 25 bp, Homo sapien
cagcctggcccggtccgcgcaccca

SEQ ID NO: 276548 - DNA, 25 bp, Homo sapien
cccggtccgcgcacccagagcccag

SEQ ID NO: 276549 - DNA, 25 bp, Homo sapien
actgaggcagggtgaggaagtgcgg

SEQ ID NO: 276550 - DNA, 25 bp, Homo sapien
tgaggaagtgcggccagcccaccca

SEQ ID NO: 276551 - DNA, 25 bp, Homo sapien
cagggtgaggaagtgcggccagccc

SEQ ID NO: 276552 - DNA, 25 bp, Homo sapien
aggcagggtgaggaagtgcggccag

SEQ ID NO: 276553 - DNA, 25 bp, Homo sapien
tagcacaaacaagaggcatcgtgag

SEQ ID NO: 276554 - DNA, 25 bp, Homo sapien
tcaagttagcatggcactgaagatc

SEQ ID NO: 276555 - DNA, 25 bp, Homo sapien
tgaccttgttttcacggagcccatc

SEQ ID NO: 276556 - DNA, 25 bp, Homo sapien
taccatgcccgcaaagaggatgaag

SEQ ID NO: 276557 - DNA, 25 bp, Homo sapien
gggaccatcaggaactgcctttctc

SEQ ID NO: 276558 - DNA, 25 bp, Homo sapien
gaccatcaggaactgcctttctctc

SEQ ID NO: 276559 - DNA, 25 bp, Homo sapien
gagggaaggaccagaggaaagccag

SEQ ID NO: 276560 - DNA, 25 bp, Homo sapien
tggggaggggaccatcaggaactgc

SEQ ID NO: 276561 - DNA, 25 bp, Homo sapien
agccctgcctccgcctccaacagca

SEQ ID NO: 276562 - DNA, 25 bp, Homo sapien
acacgccaccagtgggggcagccct

SEQ ID NO: 276563 - DNA, 25 bp, Homo sapien
gccctgcctccgcctccaacagcat

SEQ ID NO: 276564 - DNA, 25 bp, Homo sapien
cccacacgccaccagtgggggcagc

SEQ ID NO: 276565 - DNA, 25 bp, Homo sapien
gctctgctgacacaggtcgcgaggt

SEQ ID NO: 276566 - DNA, 25 bp, Homo sapien
gcggctctgctgacacaggtcgcga

SEQ ID NO: 276567 - DNA, 25 bp, Homo sapien
ggcggctctgctgacacaggtcgcg

SEQ ID NO: 276568 - DNA, 25 bp, Homo sapien
cggctctgctgacacaggtcgcgag

SEQ ID NO: 276569 - DNA, 25 bp, Homo sapien
gaaacagggcgaggatcaaacttaa

SEQ ID NO: 276570 - DNA, 25 bp, Homo sapien
gggcgcagcagatgcagagcgaggg

SEQ ID NO: 276571 - DNA, 25 bp, Homo sapien
gcgcagcagatgcagagcgaggggg

SEQ ID NO: 276572 - DNA, 25 bp, Homo sapien
ggcgcagcagatgcagagcgagggg

SEQ ID NO: 276573 - DNA, 25 bp, Homo sapien
agggcgcagcagatgcagagcgagg

SEQ ID NO: 276574 - DNA, 25 bp, Homo sapien
cttgggtggcatgagaactggctgg

SEQ ID NO: 276575 - DNA, 25 bp, Homo sapien
atgagaactggctgggcacccagga

SEQ ID NO: 276576 - DNA, 25 bp, Homo sapien
acagcagcttgggtggcatgagaac

SEQ ID NO: 276577 - DNA, 25 bp, Homo sapien
cttcctgcacacagcagcttgggtg

SEQ ID NO: 276578 - DNA, 25 bp, Homo sapien
agcatcccacactgagtgaccctgt

SEQ ID NO: 276579 - DNA, 25 bp, Homo sapien
acgtctttgtacattgactggagtc

SEQ ID NO: 276580 - DNA, 25 bp, Homo sapien
cccgagaggcattctgacagcatcc

SEQ ID NO: 276581 - DNA, 25 bp, Homo sapien
gtggctgagtcttcacgtctttgta

SEQ ID NO: 276582 - DNA, 25 bp, Homo sapien
taacttggagggtcggctgtagaat

SEQ ID NO: 276583 - DNA, 25 bp, Homo sapien
cactgaggatctcgttgttgttccc

SEQ ID NO: 276584 - DNA, 25 bp, Homo sapien
tcggctgtagaattcatccctgttg

SEQ ID NO: 276585 - DNA, 25 bp, Homo sapien
ccccagaagtcagctaacttggagg

SEQ ID NO: 276586 - DNA, 25 bp, Homo sapien
ggagaagttccaagcaaagcaggaa

SEQ ID NO: 276587 - DNA, 25 bp, Homo sapien
accatcagatcttggctgggagcgg

SEQ ID NO: 276588 - DNA, 25 bp, Homo sapien
atcttggctgggagcggcagctcat

SEQ ID NO: 276589 - DNA, 25 bp, Homo sapien
gaaggagaagttccaagcaaagcag

SEQ ID NO: 276590 - DNA, 25 bp, Homo sapien
cggctgcaggtagttggtgagtgct

SEQ ID NO: 276591 - DNA, 25 bp, Homo sapien
gagtgctgccagcttgccacgtgtg

SEQ ID NO: 276592 - DNA, 25 bp, Homo sapien
tgcggctgcaggtagttggtgagtg

SEQ ID NO: 276593 - DNA, 25 bp, Homo sapien
gtgctgccagcttgccacgtgtgct

SEQ ID NO: 276594 - DNA, 25 bp, Homo sapien
gcaggggacagatgctgtgtccaca

SEQ ID NO: 276595 - DNA, 25 bp, Homo sapien
caggcatgtgctcttctcccaggaa

SEQ ID NO: 276596 - DNA, 25 bp, Homo sapien
tccacagctgcaggcatgtgctctt

SEQ ID NO: 276597 - DNA, 25 bp, Homo sapien
tcccaggaacactgatatggggccc

SEQ ID NO: 276598 - DNA, 25 bp, Homo sapien
tgtccacgtcagtggtcagaaagtg

SEQ ID NO: 276599 - DNA, 25 bp, Homo sapien
gtcagaaagtgggtgacaagttcac

SEQ ID NO: 276600 - DNA, 25 bp, Homo sapien
tacagatggccctccatagagacct

SEQ ID NO: 276601 - DNA, 25 bp, Homo sapien
tcaggtcggctgctatgaggttgaa

SEQ ID NO: 276602 - DNA, 25 bp, Homo sapien
cggccagagccactctatgtgactg

SEQ ID NO: 276603 - DNA, 25 bp, Homo sapien
ctcatgccatcacaggaagccttgg

SEQ ID NO: 276604 - DNA, 25 bp, Homo sapien
tgccaagtcacgaggagcaacgtcc

SEQ ID NO: 276605 - DNA, 25 bp, Homo sapien
agttggtacatctgtgacaggctca

SEQ ID NO: 276606 - DNA, 25 bp, Homo sapien
aggctcccctcggttcccatagtag

SEQ ID NO: 276607 - DNA, 25 bp, Homo sapien
tcaaaacgataggatcaggctcccc

SEQ ID NO: 276608 - DNA, 25 bp, Homo sapien
gcaaatgacgtctccctttgctgtg

SEQ ID NO: 276609 - DNA, 25 bp, Homo sapien
ctggcgtcaaaacgataggatcagg

SEQ ID NO: 276610 - DNA, 25 bp, Homo sapien
gaagcttccaggaaatcgcagcacc

SEQ ID NO: 276611 - DNA, 25 bp, Homo sapien
gtccctacagttttgtgcacccagg

SEQ ID NO: 276612 - DNA, 25 bp, Homo sapien
agcagtccccggaacctaggctatg

SEQ ID NO: 276613 - DNA, 25 bp, Homo sapien
ttaaggcacagagttccacgatgcc

SEQ ID NO: 276614 - DNA, 25 bp, Homo sapien
caaggaccacaggactcatgatgag

SEQ ID NO: 276615 - DNA, 25 bp, Homo sapien
tgtgacctgcaacctcacttggtga

SEQ ID NO: 276616 - DNA, 25 bp, Homo sapien
agttccaccgtgtacacccagtggg

SEQ ID NO: 276617 - DNA, 25 bp, Homo sapien
tggcgctaagggcactgacacactc

SEQ ID NO: 276618 - DNA, 25 bp, Homo sapien
tgagaaccgaggatgccacgtggat

SEQ ID NO: 276619 - DNA, 25 bp, Homo sapien
aaatgggtgaactgtgccgctagtc

SEQ ID NO: 276620 - DNA, 25 bp, Homo sapien
ccctcaactgatgcggaggttctgg

SEQ ID NO: 276621 - DNA, 25 bp, Homo sapien
gccgctagtcagtcatatctcaata

SEQ ID NO: 276622 - DNA, 25 bp, Homo sapien
tattgcatatgttctcgggtcccct

SEQ ID NO: 276623 - DNA, 25 bp, Homo sapien
tcatagaggctgcactccaactgtg

SEQ ID NO: 276624 - DNA, 25 bp, Homo sapien
tagagctcaccttctgatggaaaga

SEQ ID NO: 276625 - DNA, 25 bp, Homo sapien
tacagaccataagccagtttcagca

SEQ ID NO: 276626 - DNA, 25 bp, Homo sapien
tagcaaaatagtgaggccttatctc

SEQ ID NO: 276627 - DNA, 25 bp, Homo sapien
cattgaactgcatagtcatgggcaa

SEQ ID NO: 276628 - DNA, 25 bp, Homo sapien
gaagggagttggactctacctgaca

SEQ ID NO: 276629 - DNA, 25 bp, Homo sapien
tatcttggccgaggcatttcccagg

SEQ ID NO: 276630 - DNA, 25 bp, Homo sapien
gagtctccagcagcgcgttgctcag

SEQ ID NO: 276631 - DNA, 25 bp, Homo sapien
cagggagtctccagcagcgcgttgc

SEQ ID NO: 276632 - DNA, 25 bp, Homo sapien
agcgcgttgctcagcccgtaggtgc

SEQ ID NO: 276633 - DNA, 25 bp, Homo sapien
agcagcgcgttgctcagcccgtagg

SEQ ID NO: 276634 - DNA, 25 bp, Homo sapien
tggctccgttccacagcctccagga

SEQ ID NO: 276635 - DNA, 25 bp, Homo sapien
ggctccgttccacagcctccaggaa

SEQ ID NO: 276636 - DNA, 25 bp, Homo sapien
gcgtgagtcacacaccaggcgtgtt

SEQ ID NO: 276637 - DNA, 25 bp, Homo sapien
tgactcaatcgtggagctttggccc

SEQ ID NO: 276638 - DNA, 25 bp, Homo sapien
tccacgtttctgctcaaggcggaaa

SEQ ID NO: 276639 - DNA, 25 bp, Homo sapien
tgggcatttgcctctgtgacagaag

SEQ ID NO: 276640 - DNA, 25 bp, Homo sapien
gtagccagggcagcgcacgcacaca

SEQ ID NO: 276641 - DNA, 25 bp, Homo sapien
ccctggtcctcgatggccgggtctg

SEQ ID NO: 276642 - DNA, 25 bp, Homo sapien
acacagccgcgtacttgctcagcat

SEQ ID NO: 276643 - DNA, 25 bp, Homo sapien
ccgcgtacttgctcagcatgggctg

SEQ ID NO: 276644 - DNA, 25 bp, Homo sapien
ggtggcgcacccacggtgctgcaat

SEQ ID NO: 276645 - DNA, 25 bp, Homo sapien
ctgcgtctggacagggcagaagctc

SEQ ID NO: 276646 - DNA, 25 bp, Homo sapien
ctttgccggccctctagcgtgggag

SEQ ID NO: 276647 - DNA, 25 bp, Homo sapien
tctggaatccactcaggcgaggaag

SEQ ID NO: 276648 - DNA, 25 bp, Homo sapien
catcagtggcgtgtgagctcttggc

SEQ ID NO: 276649 - DNA, 25 bp, Homo sapien
tctccccgtgtagcatgagccaagg

SEQ ID NO: 276650 - DNA, 25 bp, Homo sapien
taggaaccccatgcctggaggctgt

SEQ ID NO: 276651 - DNA, 25 bp, Homo sapien
gctttgcagacggagggtggccctg

SEQ ID NO: 276652 - DNA, 25 bp, Homo sapien
ctacgctcagtgaaggtcacgtggc

SEQ ID NO: 276653 - DNA, 25 bp, Homo sapien
cgtggccgtccgcatctaccaggat

SEQ ID NO: 276654 - DNA, 25 bp, Homo sapien
cttgtccatcatgctacgctcagtg

SEQ ID NO: 276655 - DNA, 25 bp, Homo sapien
aactcataggttctggtctcccagt

SEQ ID NO: 276656 - DNA, 25 bp, Homo sapien
tcaagagtccaagcacgcctgtgtt

SEQ ID NO: 276657 - DNA, 25 bp, Homo sapien
tgcagtatggcaaaggaaggtttcc

SEQ ID NO: 276658 - DNA, 25 bp, Homo sapien
gttcatggtatacctcggccggtcc

SEQ ID NO: 276659 - DNA, 25 bp, Homo sapien
gcacatgagaggtgagagtcgccct

SEQ ID NO: 276660 - DNA, 25 bp, Homo sapien
gggattctgagagcccctggtgcac

SEQ ID NO: 276661 - DNA, 25 bp, Homo sapien
aggattgtctcaaacacagaggacc

SEQ ID NO: 276662 - DNA, 25 bp, Homo sapien
tctccagctgggtaagcgggattct

SEQ ID NO: 276663 - DNA, 25 bp, Homo sapien
tctggcacactcaagggcactgaat

SEQ ID NO: 276664 - DNA, 25 bp, Homo sapien
gagctcacattcaggtacagattcc

SEQ ID NO: 276665 - DNA, 25 bp, Homo sapien
gctcacattcaggtacagattccta

SEQ ID NO: 276666 - DNA, 25 bp, Homo sapien
gttttattatcaggagctcacattc

SEQ ID NO: 276667 - DNA, 25 bp, Homo sapien
ggagctcacattcaggtacagattc

SEQ ID NO: 276668 - DNA, 25 bp, Homo sapien
gcctccattgcgacctgatagacct

SEQ ID NO: 276669 - DNA, 25 bp, Homo sapien
tctcagcattggatatccgggaccc

SEQ ID NO: 276670 - DNA, 25 bp, Homo sapien
tgcccatggacagatggactgaccc

SEQ ID NO: 276671 - DNA, 25 bp, Homo sapien
ccactggcaccctgcatacaaggga

SEQ ID NO: 276672 - DNA, 25 bp, Homo sapien
tgcgcgtatccgtccgtgtccaaat

SEQ ID NO: 276673 - DNA, 25 bp, Homo sapien
tgatcagagtgacagcaggtctgct

SEQ ID NO: 276674 - DNA, 25 bp, Homo sapien
tacacggtgttcttcctgtgcgcgt

SEQ ID NO: 276675 - DNA, 25 bp, Homo sapien
ttttggtagacacagcgtttcgaca

SEQ ID NO: 276676 - DNA, 25 bp, Homo sapien
tggggactcagggatcaggtgcatc

SEQ ID NO: 276677 - DNA, 25 bp, Homo sapien
cagggatcaggtgcatctggcaaca

SEQ ID NO: 276678 - DNA, 25 bp, Homo sapien
tgccaggaaggccattgtccaggcc

SEQ ID NO: 276679 - DNA, 25 bp, Homo sapien
gccaggaaggccattgtccaggccc

SEQ ID NO: 276680 - DNA, 25 bp, Homo sapien
agagggcagaagcagcttatgttgg

SEQ ID NO: 276681 - DNA, 25 bp, Homo sapien
gagggcagaagcagcttatgttggg

SEQ ID NO: 276682 - DNA, 25 bp, Homo sapien
agaagaaggtgagttccccatctgc

SEQ ID NO: 276683 - DNA, 25 bp, Homo sapien
tctgagaagaaggtgagttccccat

SEQ ID NO: 276684 - DNA, 25 bp, Homo sapien
aagacgtggtctcaggaagtctgca

SEQ ID NO: 276685 - DNA, 25 bp, Homo sapien
gcctggccatgtctgttcatagaat

SEQ ID NO: 276686 - DNA, 25 bp, Homo sapien
aggatgagacctgaggccatgccgc

SEQ ID NO: 276687 - DNA, 25 bp, Homo sapien
tagaattgcctccacgttagccagc

SEQ ID NO: 276688 - DNA, 25 bp, Homo sapien
cacgcctggccattgaaatcatttc

SEQ ID NO: 276689 - DNA, 25 bp, Homo sapien
ccacgcctggccattgaaatcattt

SEQ ID NO: 276690 - DNA, 25 bp, Homo sapien
tgggctggcagtcttttcttcccac

SEQ ID NO: 276691 - DNA, 25 bp, Homo sapien
cagactatatactctgccaacttta

SEQ ID NO: 276692 - DNA, 25 bp, Homo sapien
tacttctcccatcggaacttctcag

SEQ ID NO: 276693 - DNA, 25 bp, Homo sapien
ggggatctactggtgagtcaaactc

SEQ ID NO: 276694 - DNA, 25 bp, Homo sapien
acagggagcgcggagtacgccggga

SEQ ID NO: 276695 - DNA, 25 bp, Homo sapien
gaatgccgggagcaggggagcgcgg

SEQ ID NO: 276696 - DNA, 25 bp, Homo sapien
gaggagcgccgggaacgggaagcac

SEQ ID NO: 276697 - DNA, 25 bp, Homo sapien
agcgcggggaatgccgggaacaggg

SEQ ID NO: 276698 - DNA, 25 bp, Homo sapien
aagcctcaccgaccgaccgccgcag

SEQ ID NO: 276699 - DNA, 25 bp, Homo sapien
aagccgcccgcagccaaaccacagc

SEQ ID NO: 276700 - DNA, 25 bp, Homo sapien
tgtccaggctctccggtcgccggca

SEQ ID NO: 276701 - DNA, 25 bp, Homo sapien
aaccacagccgggaaagcctcaccg

SEQ ID NO: 276702 - DNA, 25 bp, Homo sapien
ctttcccgcctgaaggcgatgctag

SEQ ID NO: 276703 - DNA, 25 bp, Homo sapien
acgagagtcggcaacgcctgggccc

SEQ ID NO: 276704 - DNA, 25 bp, Homo sapien
tttacccgggcggacagcgacgaga

SEQ ID NO: 276705 - DNA, 25 bp, Homo sapien
aaggcgatgctaggcttcgggccct

SEQ ID NO: 276706 - DNA, 25 bp, Homo sapien
tggacaaaaagacttaggcgacttc

SEQ ID NO: 276707 - DNA, 25 bp, Homo sapien
tatctacgtgacactcaacccgtga

SEQ ID NO: 276708 - DNA, 25 bp, Homo sapien
caaactgtgttaaagccggcagggt

SEQ ID NO: 276709 - DNA, 25 bp, Homo sapien
caacccgtgagcattctgtggacaa

SEQ ID NO: 276710 - DNA, 25 bp, Homo sapien
gcactgaggaggtagtcgccaaacc

SEQ ID NO: 276711 - DNA, 25 bp, Homo sapien
gaaggacacccaaattccagcatgc

SEQ ID NO: 276712 - DNA, 25 bp, Homo sapien
tgacccaacggaggtggatagcaga

SEQ ID NO: 276713 - DNA, 25 bp, Homo sapien
tgactggtccagatacggaaggcca

SEQ ID NO: 276714 - DNA, 25 bp, Homo sapien
ggcgagcgcgagaccctcagctcaa

SEQ ID NO: 276715 - DNA, 25 bp, Homo sapien
tcagctcaactctgcggcactaggg

SEQ ID NO: 276716 - DNA, 25 bp, Homo sapien
catagttctgttcccgatggaggag

SEQ ID NO: 276717 - DNA, 25 bp, Homo sapien
cagtgatgcagcgtgctgaggtcac

SEQ ID NO: 276718 - DNA, 25 bp, Homo sapien
aaaatatcgtcacaaaatgacagaa

SEQ ID NO: 276719 - DNA, 25 bp, Homo sapien
aaaaatatcgtcacaaaatgacaga

SEQ ID NO: 276720 - DNA, 25 bp, Homo sapien
gactggcgactaagcgagtctgtct

SEQ ID NO: 276721 - DNA, 25 bp, Homo sapien
tcatgccggagtggcacctttcttc

SEQ ID NO: 276722 - DNA, 25 bp, Homo sapien
tcagcttaagtgactggcgactaag

SEQ ID NO: 276723 - DNA, 25 bp, Homo sapien
gcgagtctgtcttcatgccggagtg

SEQ ID NO: 276724 - DNA, 25 bp, Homo sapien
cagagttttacaagccctcacataa

SEQ ID NO: 276725 - DNA, 25 bp, Homo sapien
tgtagacagcttttagaaccactgc

SEQ ID NO: 276726 - DNA, 25 bp, Homo sapien
ggcttagtcaagctggccacattgc

SEQ ID NO: 276727 - DNA, 25 bp, Homo sapien
gctaacatgcacaagtccgctgaga

SEQ ID NO: 276728 - DNA, 25 bp, Homo sapien
cgggcccacacgggagcggagaggg

SEQ ID NO: 276729 - DNA, 25 bp, Homo sapien
ctgcgggcccacacgggagcggaga

SEQ ID NO: 276730 - DNA, 25 bp, Homo sapien
ctacagttcgggtctatgaggaggc

SEQ ID NO: 276731 - DNA, 25 bp, Homo sapien
tcagcagggagttcggactgtccat

SEQ ID NO: 276732 - DNA, 25 bp, Homo sapien
cactgacagggctaaggagcagacc

SEQ ID NO: 276733 - DNA, 25 bp, Homo sapien
gaacgattgctttagccgtgaaccc

SEQ ID NO: 276734 - DNA, 25 bp, Homo sapien
tcaaaagatgctgcaattcccaaat

SEQ ID NO: 276735 - DNA, 25 bp, Homo sapien
aaagatgctgcaattcccaaatctc

SEQ ID NO: 276736 - DNA, 25 bp, Homo sapien
tattccacctcagaggggattttgg

SEQ ID NO: 276737 - DNA, 25 bp, Homo sapien
caaaagatgctgcaattcccaaatc

SEQ ID NO: 276738 - DNA, 25 bp, Homo sapien
gcaaaacacgctgttcagacaccag

SEQ ID NO: 276739 - DNA, 25 bp, Homo sapien
gcccttagggtgcatgatcatctga

SEQ ID NO: 276740 - DNA, 25 bp, Homo sapien
cactgccaaggagcgtaactcagca

SEQ ID NO: 276741 - DNA, 25 bp, Homo sapien
ctagatcagggatgcagggcctacc

SEQ ID NO: 276742 - DNA, 25 bp, Homo sapien
gatggtcgctgtctccgccatattt

SEQ ID NO: 276743 - DNA, 25 bp, Homo sapien
tcttggtcatcatcggctgcacact

SEQ ID NO: 276744 - DNA, 25 bp, Homo sapien
ttgtctctccatcggacggatggtc

SEQ ID NO: 276745 - DNA, 25 bp, Homo sapien
tgttcgcctctttttgggggcacaa

SEQ ID NO: 276746 - DNA, 25 bp, Homo sapien
tcccgttcccaagaagtatggcctg

SEQ ID NO: 276747 - DNA, 25 bp, Homo sapien
gaccacccgagactctctgtgtagg

SEQ ID NO: 276748 - DNA, 25 bp, Homo sapien
actccagagttatggaatgtcatga

SEQ ID NO: 276749 - DNA, 25 bp, Homo sapien
tctgtgtaggtacaccgggactcca

SEQ ID NO: 276750 - DNA, 25 bp, Homo sapien
tgatgcctttcaccggcctctgctt

SEQ ID NO: 276751 - DNA, 25 bp, Homo sapien
gatgtgcacgttttggtctgagaac

SEQ ID NO: 276752 - DNA, 25 bp, Homo sapien
cccgagagtctgaaactctgatgcc

SEQ ID NO: 276753 - DNA, 25 bp, Homo sapien
tatggattacaaggacaacccgaga

SEQ ID NO: 276754 - DNA, 25 bp, Homo sapien
taatgcagacaagggatgctactca

SEQ ID NO: 276755 - DNA, 25 bp, Homo sapien
tccagctctgcagatcggctcaggg

SEQ ID NO: 276756 - DNA, 25 bp, Homo sapien
gggtgaggtcactgctttgctcccg

SEQ ID NO: 276757 - DNA, 25 bp, Homo sapien
catctttgcacacctcgactttggc

SEQ ID NO: 276758 - DNA, 25 bp, Homo sapien
tatccacagaatggtgacagtttcc

SEQ ID NO: 276759 - DNA, 25 bp, Homo sapien
aaaacaaagctcatgggtcccagga

SEQ ID NO: 276760 - DNA, 25 bp, Homo sapien
taagacttaaatggcgggactaggc

SEQ ID NO: 276761 - DNA, 25 bp, Homo sapien
tgccacacctgaagagagaactaag

SEQ ID NO: 276762 - DNA, 25 bp, Homo sapien
caggtagcttcgaaattcctcgaga

SEQ ID NO: 276763 - DNA, 25 bp, Homo sapien
ttcccgattgaattgccgccgctca

SEQ ID NO: 276764 - DNA, 25 bp, Homo sapien
aaagtcaaaacgcttctccaggtag

SEQ ID NO: 276765 - DNA, 25 bp, Homo sapien
ttgctcaaagtcaaaacgcttctcc

SEQ ID NO: 276766 - DNA, 25 bp, Homo sapien
ctttctttgtgggtgcatcttgcac

SEQ ID NO: 276767 - DNA, 25 bp, Homo sapien
actgataaagtaatgagcttctgat

SEQ ID NO: 276768 - DNA, 25 bp, Homo sapien
agatgggcctctcggactccgcctg

SEQ ID NO: 276769 - DNA, 25 bp, Homo sapien
gctggcaagatgggcctctcggact

SEQ ID NO: 276770 - DNA, 25 bp, Homo sapien
atgtactcgtgcaggatgcagacct

SEQ ID NO: 276771 - DNA, 25 bp, Homo sapien
tagacagggcggaccttgaggacac

SEQ ID NO: 276772 - DNA, 25 bp, Homo sapien
ggatgcagacctcggatttcccgtt

SEQ ID NO: 276773 - DNA, 25 bp, Homo sapien
cattcaaagaaattatagacagggc

SEQ ID NO: 276774 - DNA, 25 bp, Homo sapien
aatggtcaccgaggcaccaaaaggc

SEQ ID NO: 276775 - DNA, 25 bp, Homo sapien
gatccgtaagtcacaccatcaatgg

SEQ ID NO: 276776 - DNA, 25 bp, Homo sapien
gcttgcagttccagatccgtaagtc

SEQ ID NO: 276777 - DNA, 25 bp, Homo sapien
tattcttcgcaagttttttgctgct

SEQ ID NO: 276778 - DNA, 25 bp, Homo sapien
ctcgagttcttcactgtctttgggc

SEQ ID NO: 276779 - DNA, 25 bp, Homo sapien
cagaggtctgtttaacaaagtcagg

SEQ ID NO: 276780 - DNA, 25 bp, Homo sapien
gatgaggatttccagtgtagctcgg

SEQ ID NO: 276781 - DNA, 25 bp, Homo sapien
ttcagaggtctgtttaacaaagtca

SEQ ID NO: 276782 - DNA, 25 bp, Homo sapien
cagctcacactaacagggcagggta

SEQ ID NO: 276783 - DNA, 25 bp, Homo sapien
tagactgcctcaaagattcattccc

SEQ ID NO: 276784 - DNA, 25 bp, Homo sapien
tatgtgtacccgacatttacggtgc

SEQ ID NO: 276785 - DNA, 25 bp, Homo sapien
gactaacctacagggcatggaaggc

SEQ ID NO: 276786 - DNA, 25 bp, Homo sapien
cacaagcccttgctacaaataacca

SEQ ID NO: 276787 - DNA, 25 bp, Homo sapien
aatgcacccttcaaaattccacaag

SEQ ID NO: 276788 - DNA, 25 bp, Homo sapien
taaaaggccaaatttatagtatgta

SEQ ID NO: 276789 - DNA, 25 bp, Homo sapien
tataaataagaatgcacccttcaaa

SEQ ID NO: 276790 - DNA, 25 bp, Homo sapien
acagaagataaaggagcaaacttga

SEQ ID NO: 276791 - DNA, 25 bp, Homo sapien
aagataaaggagcaaacttgaagac

SEQ ID NO: 276792 - DNA, 25 bp, Homo sapien
gaagacagggcaattgaaataatcc

SEQ ID NO: 276793 - DNA, 25 bp, Homo sapien
ttgaagacagggcaattgaaataat

SEQ ID NO: 276794 - DNA, 25 bp, Homo sapien
tacctgaaggaaacgaatccgccca

SEQ ID NO: 276795 - DNA, 25 bp, Homo sapien
catcaggaaagtgtggcatcaggaa

SEQ ID NO: 276796 - DNA, 25 bp, Homo sapien
gacacacagctcgaaagacagtaga

SEQ ID NO: 276797 - DNA, 25 bp, Homo sapien
tggacgaccttacagcagccttact

SEQ ID NO: 276798 - DNA, 25 bp, Homo sapien
cttttaaggcactcgtggaggatct

SEQ ID NO: 276799 - DNA, 25 bp, Homo sapien
tggaggatctgatatggagacaaca

SEQ ID NO: 276800 - DNA, 25 bp, Homo sapien
cctcgatgctgatgtggttaaaata

SEQ ID NO: 276801 - DNA, 25 bp, Homo sapien
tggtcagctcgtagacccgcgagtc

SEQ ID NO: 276802 - DNA, 25 bp, Homo sapien
aaacagacaacagatggcgtcccct

SEQ ID NO: 276803 - DNA, 25 bp, Homo sapien
tgggaagcccttaggaaatgaccaa

SEQ ID NO: 276804 - DNA, 25 bp, Homo sapien
acagacaacagatggcgtcccctga

SEQ ID NO: 276805 - DNA, 25 bp, Homo sapien
ctctgggaagcccttaggaaatgac

SEQ ID NO: 276806 - DNA, 25 bp, Homo sapien
gccatgacgtattcactcttctggt

SEQ ID NO: 276807 - DNA, 25 bp, Homo sapien
ccaggaaccacttcaaacttgatag

SEQ ID NO: 276808 - DNA, 25 bp, Homo sapien
gcactgtgtgcttgccacacgccat

SEQ ID NO: 276809 - DNA, 25 bp, Homo sapien
atagacgtgtcacccatcccatggt

SEQ ID NO: 276810 - DNA, 25 bp, Homo sapien
caagacgcacacctccagaaacagg

SEQ ID NO: 276811 - DNA, 25 bp, Homo sapien
gattctgctggctgttcgaggagga

SEQ ID NO: 276812 - DNA, 25 bp, Homo sapien
gacaatgccagggcaacagctgaga

SEQ ID NO: 276813 - DNA, 25 bp, Homo sapien
ccttaggctgaacgtgtggtggcca

SEQ ID NO: 276814 - DNA, 25 bp, Homo sapien
cagctgaaggatcttctgtgaggct

SEQ ID NO: 276815 - DNA, 25 bp, Homo sapien
ctcacggccatacatgcgcagtaaa

SEQ ID NO: 276816 - DNA, 25 bp, Homo sapien
gccatacatgcgcagtaaagacccc

SEQ ID NO: 276817 - DNA, 25 bp, Homo sapien
aaggatcttctgtgaggctaactgc

SEQ ID NO: 276818 - DNA, 25 bp, Homo sapien
catagccagtaagaacagcacgctg

SEQ ID NO: 276819 - DNA, 25 bp, Homo sapien
tgggcactggcttacactgcaggat

SEQ ID NO: 276820 - DNA, 25 bp, Homo sapien
tatcatgtccagagtaaaggcctct

SEQ ID NO: 276821 - DNA, 25 bp, Homo sapien
tcttctgttagagatggaccggcac

SEQ ID NO: 276822 - DNA, 25 bp, Homo sapien
ctgggaagtatagcacctcacgctc

SEQ ID NO: 276823 - DNA, 25 bp, Homo sapien
acctcacgctcaggactgcaggctg

SEQ ID NO: 276824 - DNA, 25 bp, Homo sapien
gtatagcacctcacgctcaggactg

SEQ ID NO: 276825 - DNA, 25 bp, Homo sapien
aggctgtagctctacggcctgcccg

SEQ ID NO: 276826 - DNA, 25 bp, Homo sapien
ctgaggatgtgcaggttgggcttgt

SEQ ID NO: 276827 - DNA, 25 bp, Homo sapien
ttgctgaggatgtgcaggttgggct

SEQ ID NO: 276828 - DNA, 25 bp, Homo sapien
aggatgtgcaggttgggcttgttct

SEQ ID NO: 276829 - DNA, 25 bp, Homo sapien
gaggatgtgcaggttgggcttgttc

SEQ ID NO: 276830 - DNA, 25 bp, Homo sapien
aggctgggcggacgccacaatggac

SEQ ID NO: 276831 - DNA, 25 bp, Homo sapien
cgccaggctgggcggacgccacaat

SEQ ID NO: 276832 - DNA, 25 bp, Homo sapien
ccaggctgggcggacgccacaatgg

SEQ ID NO: 276833 - DNA, 25 bp, Homo sapien
caggctgggcggacgccacaatgga

SEQ ID NO: 276834 - DNA, 25 bp, Homo sapien
cacacgtccacggtgcacaggggct

SEQ ID NO: 276835 - DNA, 25 bp, Homo sapien
acacgtccacggtgcacaggggctc

SEQ ID NO: 276836 - DNA, 25 bp, Homo sapien
tcacacgtccacggtgcacaggggc

SEQ ID NO: 276837 - DNA, 25 bp, Homo sapien
ggtggacatatggactcgactgcaa

SEQ ID NO: 276838 - DNA, 25 bp, Homo sapien
tgtaaaaaactgttgccggaggcca

SEQ ID NO: 276839 - DNA, 25 bp, Homo sapien
tcagactccggcaggaacacatttc

SEQ ID NO: 276840 - DNA, 25 bp, Homo sapien
tttgcctccaatcccagaaagctag

SEQ ID NO: 276841 - DNA, 25 bp, Homo sapien
aaaaagcgccatcagtaccgcctgt

SEQ ID NO: 276842 - DNA, 25 bp, Homo sapien
agatggcgcaccacaagcacacggc

SEQ ID NO: 276843 - DNA, 25 bp, Homo sapien
aagcgccatcagtaccgcctgtagg

SEQ ID NO: 276844 - DNA, 25 bp, Homo sapien
acggcagaacgctggactcttgctt

SEQ ID NO: 276845 - DNA, 25 bp, Homo sapien
tggctaagggcaacagtcacagtca

SEQ ID NO: 276846 - DNA, 25 bp, Homo sapien
cacgaagctttggttcacaggcgca

SEQ ID NO: 276847 - DNA, 25 bp, Homo sapien
gattcatacccatgcttggcagacg

SEQ ID NO: 276848 - DNA, 25 bp, Homo sapien
gggcgcacagagaccacaagagtat

SEQ ID NO: 276849 - DNA, 25 bp, Homo sapien
atcaaggctcgccttccaggcacag

SEQ ID NO: 276850 - DNA, 25 bp, Homo sapien
tgctttatgtgttcagacaatcaag

SEQ ID NO: 276851 - DNA, 25 bp, Homo sapien
tgttcagacaatcaaggctcgcctt

SEQ ID NO: 276852 - DNA, 25 bp, Homo sapien
cccttctggacagtttgctttatgt

SEQ ID NO: 276853 - DNA, 25 bp, Homo sapien
gaagacaggtgggttcctgtagcct

SEQ ID NO: 276854 - DNA, 25 bp, Homo sapien
ccaggatattcagaggtaggcagcc

SEQ ID NO: 276855 - DNA, 25 bp, Homo sapien
cagggcctttgtggactagccaagg

SEQ ID NO: 276856 - DNA, 25 bp, Homo sapien
gccaaagggcacagaaccctgtgcc

SEQ ID NO: 276857 - DNA, 25 bp, Homo sapien
tcagcctgtccatgcaccagttggg

SEQ ID NO: 276858 - DNA, 25 bp, Homo sapien
gtgtgggcgcaagacgcccctcttg

SEQ ID NO: 276859 - DNA, 25 bp, Homo sapien
aaacttgccaagtgagtgtgggcgc

SEQ ID NO: 276860 - DNA, 25 bp, Homo sapien
ctgagcagcttgagcggaagcagct

SEQ ID NO: 276861 - DNA, 25 bp, Homo sapien
acacgagtggccgacgtggtgaccc

SEQ ID NO: 276862 - DNA, 25 bp, Homo sapien
gcctttgtgacattccgcagcgctg

SEQ ID NO: 276863 - DNA, 25 bp, Homo sapien
gagtgagccaccagtaacacgagtg

SEQ ID NO: 276864 - DNA, 25 bp, Homo sapien
gggacaaggccctgcgcgttttgca

SEQ ID NO: 276865 - DNA, 25 bp, Homo sapien
tgagatctttaaactggagctgcag

SEQ ID NO: 276866 - DNA, 25 bp, Homo sapien
ctctgagatctttaaactggagctg

SEQ ID NO: 276867 - DNA, 25 bp, Homo sapien
gatctttaaactggagctgcagaac

SEQ ID NO: 276868 - DNA, 25 bp, Homo sapien
tctgagatctttaaactggagctgc

SEQ ID NO: 276869 - DNA, 25 bp, Homo sapien
gaaacgcgccgcgattcaaaaccag

SEQ ID NO: 276870 - DNA, 25 bp, Homo sapien
gaggcggacactctcattgtccggc

SEQ ID NO: 276871 - DNA, 25 bp, Homo sapien
agctttattggctcaggaggcggac

SEQ ID NO: 276872 - DNA, 25 bp, Homo sapien
aacgcgccgcgattcaaaaccagta

SEQ ID NO: 276873 - DNA, 25 bp, Homo sapien
gtcgtcgctggctccgcggcctctc

SEQ ID NO: 276874 - DNA, 25 bp, Homo sapien
tcgtcgctggctccgcggcctctcg

SEQ ID NO: 276875 - DNA, 25 bp, Homo sapien
gcggcctctcggcggctactcgtag

SEQ ID NO: 276876 - DNA, 25 bp, Homo sapien
ggcctctcggcggctactcgtagct

SEQ ID NO: 276877 - DNA, 25 bp, Homo sapien
cccaaggtcacgcgggggccctgca

SEQ ID NO: 276878 - DNA, 25 bp, Homo sapien
caaggtcacgcgggggccctgcagc

SEQ ID NO: 276879 - DNA, 25 bp, Homo sapien
gcaggcctcgagcccccaaacccca

SEQ ID NO: 276880 - DNA, 25 bp, Homo sapien
tccgcaggcctcgagcccccaaacc

SEQ ID NO: 276881 - DNA, 25 bp, Homo sapien
gccgtcccgcgtggcgacggccgct

SEQ ID NO: 276882 - DNA, 25 bp, Homo sapien
ggccgtcccgcgtggcgacggccgc

SEQ ID NO: 276883 - DNA, 25 bp, Homo sapien
tggcgacggccgctccccaacccac

SEQ ID NO: 276884 - DNA, 25 bp, Homo sapien
ttccagacgtaagaaccgaatgaat

SEQ ID NO: 276885 - DNA, 25 bp, Homo sapien
gtgccccacgctggaacgcgagctt

SEQ ID NO: 276886 - DNA, 25 bp, Homo sapien
cgtgggcgacggaaagaataaatgc

SEQ ID NO: 276887 - DNA, 25 bp, Homo sapien
acgctggaacgcgagcttctgccac

SEQ ID NO: 276888 - DNA, 25 bp, Homo sapien
ccgcctgggtcggcgcatctaggac

SEQ ID NO: 276889 - DNA, 25 bp, Homo sapien
gcttttcgctgctcttcactgttcc

SEQ ID NO: 276890 - DNA, 25 bp, Homo sapien
actcaaccagacaccgcagccaaca

SEQ ID NO: 276891 - DNA, 25 bp, Homo sapien
gcagccaacaaagccgccgcctggg

SEQ ID NO: 276892 - DNA, 25 bp, Homo sapien
agaagtccgtaagagacccaagact

SEQ ID NO: 276893 - DNA, 25 bp, Homo sapien
ccagaagtccgtaagagacccaaga

SEQ ID NO: 276894 - DNA, 25 bp, Homo sapien
cttggtcacccagaagtccgtaaga

SEQ ID NO: 276895 - DNA, 25 bp, Homo sapien
gtccgtaagagacccaagacttcac

SEQ ID NO: 276896 - DNA, 25 bp, Homo sapien
gactcgtctgtattctcagtggaag

SEQ ID NO: 276897 - DNA, 25 bp, Homo sapien
agggtcatggttggactcgtctgta

SEQ ID NO: 276898 - DNA, 25 bp, Homo sapien
ctattggctcaaactgagggtcatg

SEQ ID NO: 276899 - DNA, 25 bp, Homo sapien
gaaactattggctcaaactgagggt

SEQ ID NO: 276900 - DNA, 25 bp, Homo sapien
tgggattagtcaccaactttaggcc

SEQ ID NO: 276901 - DNA, 25 bp, Homo sapien
gagcagcaagatgggatgcccttca

SEQ ID NO: 276902 - DNA, 25 bp, Homo sapien
ctgctcaaccaagggactccctgga

SEQ ID NO: 276903 - DNA, 25 bp, Homo sapien
ttcacgatgccaaagaagtctatgc

SEQ ID NO: 276904 - DNA, 25 bp, Homo sapien
tccttccattctgggagatcgttct

SEQ ID NO: 276905 - DNA, 25 bp, Homo sapien
tgaggaggcggatggcccctttctc

SEQ ID NO: 276906 - DNA, 25 bp, Homo sapien
catgaggaggcggatggcccctttc

SEQ ID NO: 276907 - DNA, 25 bp, Homo sapien
cctcgctccttccattctgggagat

SEQ ID NO: 276908 - DNA, 25 bp, Homo sapien
tgctctaagcttcgctgcgggcctg

SEQ ID NO: 276909 - DNA, 25 bp, Homo sapien
tgggcgctgcgtcctcccatcaggg

SEQ ID NO: 276910 - DNA, 25 bp, Homo sapien
cccgtgtgctctaagcttcgctgcg

SEQ ID NO: 276911 - DNA, 25 bp, Homo sapien
cgctgcgggcctgctctgagttcag

SEQ ID NO: 276912 - DNA, 25 bp, Homo sapien
tacacgtcactatctgaactgggag

SEQ ID NO: 276913 - DNA, 25 bp, Homo sapien
ttagacaaagtaccacggcgcctga

SEQ ID NO: 276914 - DNA, 25 bp, Homo sapien
gaaatgattcaaacggctcgaggag

SEQ ID NO: 276915 - DNA, 25 bp, Homo sapien
ccatgattgatgcaggagtgcccac

SEQ ID NO: 276916 - DNA, 25 bp, Homo sapien
acggtcgctacctgcgttgggcttc

SEQ ID NO: 276917 - DNA, 25 bp, Homo sapien
caggcacggtcgctacctgcgttgg

SEQ ID NO: 276918 - DNA, 25 bp, Homo sapien
aggcacggtcgctacctgcgttggg

SEQ ID NO: 276919 - DNA, 25 bp, Homo sapien
gcacggtcgctacctgcgttgggct

SEQ ID NO: 276920 - DNA, 25 bp, Homo sapien
ccatttgggcagagcggtagagcac

SEQ ID NO: 276921 - DNA, 25 bp, Homo sapien
taagaaaggactggtccacctgaca

SEQ ID NO: 276922 - DNA, 25 bp, Homo sapien
cagcttggacgatctggactggaaa

SEQ ID NO: 276923 - DNA, 25 bp, Homo sapien
aggctcggctcccaaccgtgttgga

SEQ ID NO: 276924 - DNA, 25 bp, Homo sapien
ctctctcttcgatctctttcctgca

SEQ ID NO: 276925 - DNA, 25 bp, Homo sapien
cctgcattcttcaaactttgttttg

SEQ ID NO: 276926 - DNA, 25 bp, Homo sapien
ctctcttcgatctctttcctgcatt

SEQ ID NO: 276927 - DNA, 25 bp, Homo sapien
ttctctctcttcgatctctttcctg

SEQ ID NO: 276928 - DNA, 25 bp, Homo sapien
tcaagcactgcctagaccatggtca

SEQ ID NO: 276929 - DNA, 25 bp, Homo sapien
tcactctggatacgtgaggcggcca

SEQ ID NO: 276930 - DNA, 25 bp, Homo sapien
ttcagtgacgaaaggaagccaggtg

SEQ ID NO: 276931 - DNA, 25 bp, Homo sapien
tctgagagacaaaccgaggaccatc

SEQ ID NO: 276932 - DNA, 25 bp, Homo sapien
ccttcaccgagagagcttctagctt

SEQ ID NO: 276933 - DNA, 25 bp, Homo sapien
tccttcaccgagagagcttctagct

SEQ ID NO: 276934 - DNA, 25 bp, Homo sapien
cttcaccgagagagcttctagcttt

SEQ ID NO: 276935 - DNA, 25 bp, Homo sapien
ttgatgactataaataagtgtttcc

SEQ ID NO: 276936 - DNA, 25 bp, Homo sapien
tgatgactataaataagtgtttcca

SEQ ID NO: 276937 - DNA, 25 bp, Homo sapien
gttagcgttcgcactcctataggaa

SEQ ID NO: 276938 - DNA, 25 bp, Homo sapien
tcttaacaggccagacttgtaccgg

SEQ ID NO: 276939 - DNA, 25 bp, Homo sapien
cgctcaggtggtaaagctcgctcgc

SEQ ID NO: 276940 - DNA, 25 bp, Homo sapien
tcatgacaaacggtgacagggcacg

SEQ ID NO: 276941 - DNA, 25 bp, Homo sapien
ggcgggcgggctggacgcggcgcag

SEQ ID NO: 276942 - DNA, 25 bp, Homo sapien
gcgccgccgcatccctccccggggc

SEQ ID NO: 276943 - DNA, 25 bp, Homo sapien
gcgggctggacgcggcgcaggaccc

SEQ ID NO: 276944 - DNA, 25 bp, Homo sapien
gggcgggctggacgcggcgcaggac

SEQ ID NO: 276945 - DNA, 25 bp, Homo sapien
gtgctggagccgaccagcagcgcgg

SEQ ID NO: 276946 - DNA, 25 bp, Homo sapien
ggcggccgtggccaccgggatgtac

SEQ ID NO: 276947 - DNA, 25 bp, Homo sapien
caccgggatgtacttggcgggtttg

SEQ ID NO: 276948 - DNA, 25 bp, Homo sapien
tacttggcgggtttgaggcgcgtcc

SEQ ID NO: 276949 - DNA, 25 bp, Homo sapien
aagacccttggcgatctggctgagg

SEQ ID NO: 276950 - DNA, 25 bp, Homo sapien
gagagggtgctcttcacaactgggc

SEQ ID NO: 276951 - DNA, 25 bp, Homo sapien
cctcctagagagatgtgtgaatgtc

SEQ ID NO: 276952 - DNA, 25 bp, Homo sapien
aaactgccctgctgtatgtgcccca

SEQ ID NO: 276953 - DNA, 25 bp, Homo sapien
ttggtcaaccctcgggctgcaagga

SEQ ID NO: 276954 - DNA, 25 bp, Homo sapien
ttaaaccaaacgcaggccctcatga

SEQ ID NO: 276955 - DNA, 25 bp, Homo sapien
aatttcaagatgttgacagcggagc

SEQ ID NO: 276956 - DNA, 25 bp, Homo sapien
gatgcggcgagtgccattggtcaac

SEQ ID NO: 276957 - DNA, 25 bp, Homo sapien
acacagctcgtgtcaaccacgggca

SEQ ID NO: 276958 - DNA, 25 bp, Homo sapien
tgccattgtagacgggaacagctgg

SEQ ID NO: 276959 - DNA, 25 bp, Homo sapien
gctggggacacagctcgtgtcaacc

SEQ ID NO: 276960 - DNA, 25 bp, Homo sapien
gatgccattgtagacgggaacagct

SEQ ID NO: 276961 - DNA, 25 bp, Homo sapien
aaacaccagggtccatgaaagtggc

SEQ ID NO: 276962 - DNA, 25 bp, Homo sapien
gaaaacaccagggtccatgaaagtg

SEQ ID NO: 276963 - DNA, 25 bp, Homo sapien
caccagggtccatgaaagtggccat

SEQ ID NO: 276964 - DNA, 25 bp, Homo sapien
aacaccagggtccatgaaagtggcc

SEQ ID NO: 276965 - DNA, 25 bp, Homo sapien
ccaggcagtgagcaggaagttgact

SEQ ID NO: 276966 - DNA, 25 bp, Homo sapien
ggcagtgagcaggaagttgactttc

SEQ ID NO: 276967 - DNA, 25 bp, Homo sapien
ggagccaggcagtgagcaggaagtt

SEQ ID NO: 276968 - DNA, 25 bp, Homo sapien
gagccaggcagtgagcaggaagttg

SEQ ID NO: 276969 - DNA, 25 bp, Homo sapien
acttcatgcggacctggatacctcg

SEQ ID NO: 276970 - DNA, 25 bp, Homo sapien
gatacctcgcacatccacgttcttg

SEQ ID NO: 276971 - DNA, 25 bp, Homo sapien
cggcgggcggtagaagtggcacgtg

SEQ ID NO: 276972 - DNA, 25 bp, Homo sapien
ttgtacagcggagcccggaagtcgt

SEQ ID NO: 276973 - DNA, 25 bp, Homo sapien
aggaacaggaagaagtagcgatagt

SEQ ID NO: 276974 - DNA, 25 bp, Homo sapien
ttcgacgcccgatgcagttgttgac

SEQ ID NO: 276975 - DNA, 25 bp, Homo sapien
gaagaagtagcgatagtttcgacgc

SEQ ID NO: 276976 - DNA, 25 bp, Homo sapien
cgatagtttcgacgcccgatgcagt

SEQ ID NO: 276977 - DNA, 25 bp, Homo sapien
gtagaccaggccgaaggccacgacg

SEQ ID NO: 276978 - DNA, 25 bp, Homo sapien
tggttcagcacgtagaccaggccga

SEQ ID NO: 276979 - DNA, 25 bp, Homo sapien
agcccctcagcgtggttcagcacgt

SEQ ID NO: 276980 - DNA, 25 bp, Homo sapien
tcagcgtggttcagcacgtagacca

SEQ ID NO: 276981 - DNA, 25 bp, Homo sapien
ggtccacatcgcctctgcaatgagg

SEQ ID NO: 276982 - DNA, 25 bp, Homo sapien
cttctgaggctcaatctccctggtg

SEQ ID NO: 276983 - DNA, 25 bp, Homo sapien
tggtgaacgtgtccccggtccacat

SEQ ID NO: 276984 - DNA, 25 bp, Homo sapien
tgaggctcaatctccctggtgaacg

SEQ ID NO: 276985 - DNA, 25 bp, Homo sapien
agcaggtgcctgtggacaaacctcc

SEQ ID NO: 276986 - DNA, 25 bp, Homo sapien
acggtgcaggccaggacaccgcaga

SEQ ID NO: 276987 - DNA, 25 bp, Homo sapien
aggtgcctgtggacaaacctcctcc

SEQ ID NO: 276988 - DNA, 25 bp, Homo sapien
ctagcccgttaaggccaacggtgca

SEQ ID NO: 276989 - DNA, 25 bp, Homo sapien
tggtgcgcccccgagtgaccagcac

SEQ ID NO: 276990 - DNA, 25 bp, Homo sapien
ctgctcgttggtggtgcgcccccga

SEQ ID NO: 276991 - DNA, 25 bp, Homo sapien
ccccgagtgaccagcaccacatgga

SEQ ID NO: 276992 - DNA, 25 bp, Homo sapien
tggaagccagtgaggccaatgacag

SEQ ID NO: 276993 - DNA, 25 bp, Homo sapien
ctgtggatgcaggaccctcagccag

SEQ ID NO: 276994 - DNA, 25 bp, Homo sapien
aagtggcttaggtgggatcagccca

SEQ ID NO: 276995 - DNA, 25 bp, Homo sapien
ataggttacccagcctgaacttgca

SEQ ID NO: 276996 - DNA, 25 bp, Homo sapien
ttagaagctgatacttgcgggaagt

SEQ ID NO: 276997 - DNA, 25 bp, Homo sapien
gcagcctcgggtgaaagggttcaca

SEQ ID NO: 276998 - DNA, 25 bp, Homo sapien
gccagggggctacacagcacgtgct

SEQ ID NO: 276999 - DNA, 25 bp, Homo sapien
cagggggctacacagcacgtgctcc

SEQ ID NO: 277000 - DNA, 25 bp, Homo sapien
cagcctcgggtgaaagggttcacac

SEQ ID NO: 277001 - DNA, 25 bp, Homo sapien
agggcacaggggtcagtagccagcc

SEQ ID NO: 277002 - DNA, 25 bp, Homo sapien
gcaccagggcacaggggtcagtagc

SEQ ID NO: 277003 - DNA, 25 bp, Homo sapien
caccagggcacaggggtcagtagcc

SEQ ID NO: 277004 - DNA, 25 bp, Homo sapien
gcacaggggtcagtagccagcccac

SEQ ID NO: 277005 - DNA, 25 bp, Homo sapien
cggtgcagctcggtccaggagttca

SEQ ID NO: 277006 - DNA, 25 bp, Homo sapien
aaggcggcttcaaactcaccgcgag

SEQ ID NO: 277007 - DNA, 25 bp, Homo sapien
taagcttgaccttgagcggtgcagc

SEQ ID NO: 277008 - DNA, 25 bp, Homo sapien
ttcaggcctaaggaaaggcggcttc

SEQ ID NO: 277009 - DNA, 25 bp, Homo sapien
gccagcctctatcttggggggcagt

SEQ ID NO: 277010 - DNA, 25 bp, Homo sapien
agtggtggccccaagtccagtggct

SEQ ID NO: 277011 - DNA, 25 bp, Homo sapien
tggcttctcatccagccggtccagg

SEQ ID NO: 277012 - DNA, 25 bp, Homo sapien
tgctgaacgtgccagcctctatctt

SEQ ID NO: 277013 - DNA, 25 bp, Homo sapien
cacagaagggcaccttgggacccgt

SEQ ID NO: 277014 - DNA, 25 bp, Homo sapien
gtccacagaagggcaccttgggacc

SEQ ID NO: 277015 - DNA, 25 bp, Homo sapien
tccacagaagggcaccttgggaccc

SEQ ID NO: 277016 - DNA, 25 bp, Homo sapien
cagaagggcaccttgggacccgtgg

SEQ ID NO: 277017 - DNA, 25 bp, Homo sapien
cataggacaggctgccgttgcggtt

SEQ ID NO: 277018 - DNA, 25 bp, Homo sapien
ctggacagcgaggacagtgacgtct

SEQ ID NO: 277019 - DNA, 25 bp, Homo sapien
gcccagccacaaggtcgtctctgga

SEQ ID NO: 277020 - DNA, 25 bp, Homo sapien
caaagcgcccgagaaggcatcagag

SEQ ID NO: 277021 - DNA, 25 bp, Homo sapien
ggaggtccgtgtggatgaaggcgac

SEQ ID NO: 277022 - DNA, 25 bp, Homo sapien
tgggaggtccgtgtggatgaaggcg

SEQ ID NO: 277023 - DNA, 25 bp, Homo sapien
gaggtccgtgtggatgaaggcgaca

SEQ ID NO: 277024 - DNA, 25 bp, Homo sapien
gggaggtccgtgtggatgaaggcga

SEQ ID NO: 277025 - DNA, 25 bp, Homo sapien
gatgccgtgaggacaccatgcgtct

SEQ ID NO: 277026 - DNA, 25 bp, Homo sapien
gaactatgtcctacagggagggcca

SEQ ID NO: 277027 - DNA, 25 bp, Homo sapien
ccagctctagaagaacgagtcgtcg

SEQ ID NO: 277028 - DNA, 25 bp, Homo sapien
gggatgacctatgagtgcccagcca

SEQ ID NO: 277029 - DNA, 25 bp, Homo sapien
ttcttgaggcgagagccctttgtcc

SEQ ID NO: 277030 - DNA, 25 bp, Homo sapien
gctgcccacttctaggtctcgggct

SEQ ID NO: 277031 - DNA, 25 bp, Homo sapien
ttgtccccgggctgcgatccctgcc

SEQ ID NO: 277032 - DNA, 25 bp, Homo sapien
gaccaacagcagctgtatctttgct

SEQ ID NO: 277033 - DNA, 25 bp, Homo sapien
acgtggactagtgcagccgagttgt

SEQ ID NO: 277034 - DNA, 25 bp, Homo sapien
tctcaggaaaacgaggggctgccct

SEQ ID NO: 277035 - DNA, 25 bp, Homo sapien
ctctgggcttggagggttcacctgg

SEQ ID NO: 277036 - DNA, 25 bp, Homo sapien
agcaagacagagacgacgcggacgt

SEQ ID NO: 277037 - DNA, 25 bp, Homo sapien
ggccggtggcaggtcccagccgggc

SEQ ID NO: 277038 - DNA, 25 bp, Homo sapien
gggagtcttcagctgagggtggtcc

SEQ ID NO: 277039 - DNA, 25 bp, Homo sapien
ttaagcttacttgggggagtcttca

SEQ ID NO: 277040 - DNA, 25 bp, Homo sapien
ccggggactgcccattaagcttact

SEQ ID NO: 277041 - DNA, 25 bp, Homo sapien
gacaccttcttaaccagcgtgtgcc

SEQ ID NO: 277042 - DNA, 25 bp, Homo sapien
tggtccccgtggcaccatggcggat

SEQ ID NO: 277043 - DNA, 25 bp, Homo sapien
agctgtggaggcgtggcactctctc

SEQ ID NO: 277044 - DNA, 25 bp, Homo sapien
ggcccttgtcccagtgagccgactt

SEQ ID NO: 277045 - DNA, 25 bp, Homo sapien
agagggtgccccaaagaggctgact

SEQ ID NO: 277046 - DNA, 25 bp, Homo sapien
tacaagcttccagcggggtccgtga

SEQ ID NO: 277047 - DNA, 25 bp, Homo sapien
gggacactcggtccgggagcccaca

SEQ ID NO: 277048 - DNA, 25 bp, Homo sapien
acgcgttagttaggagtagcctggc

SEQ ID NO: 277049 - DNA, 25 bp, Homo sapien
ccacaggctgtgtcagaaggacggt

SEQ ID NO: 277050 - DNA, 25 bp, Homo sapien
taaaacagacacaacgcaagcagac

SEQ ID NO: 277051 - DNA, 25 bp, Homo sapien
gagcactgacacatcagacacggcg

SEQ ID NO: 277052 - DNA, 25 bp, Homo sapien
tgtcatgtgcttactctcaggtccc

SEQ ID NO: 277053 - DNA, 25 bp, Homo sapien
agtgtgctttcccacggcgcgagca

SEQ ID NO: 277054 - DNA, 25 bp, Homo sapien
tggccttgcccaaggaaagaatcaa

SEQ ID NO: 277055 - DNA, 25 bp, Homo sapien
tcctgcagcaatagccctggccttg

SEQ ID NO: 277056 - DNA, 25 bp, Homo sapien
aaacaccctgtcactgccagaactg

SEQ ID NO: 277057 - DNA, 25 bp, Homo sapien
tgagccaacaggtggcccctatgca

SEQ ID NO: 277058 - DNA, 25 bp, Homo sapien
tctgactcagcccaagtcggcagaa

SEQ ID NO: 277059 - DNA, 25 bp, Homo sapien
gggtagcggcagacccaagtctttc

SEQ ID NO: 277060 - DNA, 25 bp, Homo sapien
cagtggtgggcggtcctccgggcgg

SEQ ID NO: 277061 - DNA, 25 bp, Homo sapien
atccacgggtgcaggtgccaatccg

SEQ ID NO: 277062 - DNA, 25 bp, Homo sapien
ccccatccacgggtgcaggtgccaa

SEQ ID NO: 277063 - DNA, 25 bp, Homo sapien
ccatccacgggtgcaggtgccaatc

SEQ ID NO: 277064 - DNA, 25 bp, Homo sapien
gtggctccaggaagttaaggcatct

SEQ ID NO: 277065 - DNA, 25 bp, Homo sapien
gaccacaggaccttggtggcaggca

SEQ ID NO: 277066 - DNA, 25 bp, Homo sapien
tgaggtcatgtggacacagggtctc

SEQ ID NO: 277067 - DNA, 25 bp, Homo sapien
gcaggccgtaccactgctggaggac

SEQ ID NO: 277068 - DNA, 25 bp, Homo sapien
ggcagcccacctctaggagcttaaa

SEQ ID NO: 277069 - DNA, 25 bp, Homo sapien
tcagagatatattaggtgaaaagca

SEQ ID NO: 277070 - DNA, 25 bp, Homo sapien
gcaaagctgggctacaggatgacct

SEQ ID NO: 277071 - DNA, 25 bp, Homo sapien
cactttcagatattgaggtaagagg

SEQ ID NO: 277072 - DNA, 25 bp, Homo sapien
tgtgttggctccagatcggccctgt

SEQ ID NO: 277073 - DNA, 25 bp, Homo sapien
caagtaaaaggtgcagcactggcca

SEQ ID NO: 277074 - DNA, 25 bp, Homo sapien
cacgtgacgagggtagacggtctcc

SEQ ID NO: 277075 - DNA, 25 bp, Homo sapien
ggtactcagcgccttcctatcgatg

SEQ ID NO: 277076 - DNA, 25 bp, Homo sapien
taaagagcccggctggctttaggag

SEQ ID NO: 277077 - DNA, 25 bp, Homo sapien
cacagcaggccgagcctgtgtcact

SEQ ID NO: 277078 - DNA, 25 bp, Homo sapien
tatccgtaggacctggctcctaggg

SEQ ID NO: 277079 - DNA, 25 bp, Homo sapien
ggcctcctgttgatacggaaaggaa

SEQ ID NO: 277080 - DNA, 25 bp, Homo sapien
gggactggccctccacctcgtgact

SEQ ID NO: 277081 - DNA, 25 bp, Homo sapien
tgccgacacgaggtcacctggagtc

SEQ ID NO: 277082 - DNA, 25 bp, Homo sapien
cagaggctgagaacatcttggaggc

SEQ ID NO: 277083 - DNA, 25 bp, Homo sapien
gagcccatgcctgctcagtgcagca

SEQ ID NO: 277084 - DNA, 25 bp, Homo sapien
gaatctgcagtggttgccggctaag

SEQ ID NO: 277085 - DNA, 25 bp, Homo sapien
gattaaatgggatctgcggctgcca

SEQ ID NO: 277086 - DNA, 25 bp, Homo sapien
tctgataaatgtccccgtgctggag

SEQ ID NO: 277087 - DNA, 25 bp, Homo sapien
caggaagccccgtagtgtgaaggat

SEQ ID NO: 277088 - DNA, 25 bp, Homo sapien
tgggtgttccctaaatagccatgga

SEQ ID NO: 277089 - DNA, 25 bp, Homo sapien
tggtacagtgtagaccggagcaccc

SEQ ID NO: 277090 - DNA, 25 bp, Homo sapien
tattgtggcatggagagctgtcgat

SEQ ID NO: 277091 - DNA, 25 bp, Homo sapien
gaacccatgtttgagtccccatgaa

SEQ ID NO: 277092 - DNA, 25 bp, Homo sapien
tcgccagccgctcgggattacaatt

SEQ ID NO: 277093 - DNA, 25 bp, Homo sapien
gctgctgaaactcgggcagatccca

SEQ ID NO: 277094 - DNA, 25 bp, Homo sapien
tgctgtgttattcgccagccgctcg

SEQ ID NO: 277095 - DNA, 25 bp, Homo sapien
cgagctgcagaacgtgtctggaggg

SEQ ID NO: 277096 - DNA, 25 bp, Homo sapien
tgccggcagggcttgtagcctcagc

SEQ ID NO: 277097 - DNA, 25 bp, Homo sapien
ccggcagggcttgtagcctcagcac

SEQ ID NO: 277098 - DNA, 25 bp, Homo sapien
cttgtgttccctgccgggtgccggc

SEQ ID NO: 277099 - DNA, 25 bp, Homo sapien
gccttgtgttccctgccgggtgccg

SEQ ID NO: 277100 - DNA, 25 bp, Homo sapien
cgggctggcatagtcttgagggcct

SEQ ID NO: 277101 - DNA, 25 bp, Homo sapien
agcccgggctggcatagtcttgagg

SEQ ID NO: 277102 - DNA, 25 bp, Homo sapien
ggagcccagctgaaggggcccgagc

SEQ ID NO: 277103 - DNA, 25 bp, Homo sapien
gctggcatagtcttgagggcctgca

SEQ ID NO: 277104 - DNA, 25 bp, Homo sapien
tgctaggtccacggagcctactgcc

SEQ ID NO: 277105 - DNA, 25 bp, Homo sapien
ctaggtccacggagcctactgcccc

SEQ ID NO: 277106 - DNA, 25 bp, Homo sapien
tgtgctaggtccacggagcctactg

SEQ ID NO: 277107 - DNA, 25 bp, Homo sapien
gtgtgctaggtccacggagcctact

SEQ ID NO: 277108 - DNA, 25 bp, Homo sapien
gtgcccaggcccacgggagagccca

SEQ ID NO: 277109 - DNA, 25 bp, Homo sapien
tgggtgcccaggcccacgggagagc

SEQ ID NO: 277110 - DNA, 25 bp, Homo sapien
gggtgcccaggcccacgggagagcc

SEQ ID NO: 277111 - DNA, 25 bp, Homo sapien
gctgggtgcccaggcccacgggaga

SEQ ID NO: 277112 - DNA, 25 bp, Homo sapien
cctgtggccctgcacagaggcgaag

SEQ ID NO: 277113 - DNA, 25 bp, Homo sapien
tggccctgcacagaggcgaaggtgg

SEQ ID NO: 277114 - DNA, 25 bp, Homo sapien
gccctgcacagaggcgaaggtgggc

SEQ ID NO: 277115 - DNA, 25 bp, Homo sapien
tgtggccctgcacagaggcgaaggt

SEQ ID NO: 277116 - DNA, 25 bp, Homo sapien
ggcgcagcgcgggcaagacgcgccg

SEQ ID NO: 277117 - DNA, 25 bp, Homo sapien
cgggcaagacgcgccgcagagccat

SEQ ID NO: 277118 - DNA, 25 bp, Homo sapien
cagcgcgggcaagacgcgccgcaga

SEQ ID NO: 277119 - DNA, 25 bp, Homo sapien
cagcggcgcgaagcggggaatgtag

SEQ ID NO: 277120 - DNA, 25 bp, Homo sapien
gccaggcgcagaagcgcagcaccag

SEQ ID NO: 277121 - DNA, 25 bp, Homo sapien
agcaccagcaggctgcgcgccagct

SEQ ID NO: 277122 - DNA, 25 bp, Homo sapien
cagcgcgggccaggcgcagaagcgc

SEQ ID NO: 277123 - DNA, 25 bp, Homo sapien
tgcgcgccagctcccaggttcgcca

SEQ ID NO: 277124 - DNA, 25 bp, Homo sapien
ccaccccgcccatgaagttcttgca

SEQ ID NO: 277125 - DNA, 25 bp, Homo sapien
cagcccacagcaggctcctgacccc

SEQ ID NO: 277126 - DNA, 25 bp, Homo sapien
ccccgcccatgaagttcttgcacat

SEQ ID NO: 277127 - DNA, 25 bp, Homo sapien
ccccaccccgcccatgaagttcttg

SEQ ID NO: 277128 - DNA, 25 bp, Homo sapien
tctgccgtgaaccagtcctcaatct

SEQ ID NO: 277129 - DNA, 25 bp, Homo sapien
ggtctctgccgtgaaccagtcctca

SEQ ID NO: 277130 - DNA, 25 bp, Homo sapien
tctctgccgtgaaccagtcctcaat

SEQ ID NO: 277131 - DNA, 25 bp, Homo sapien
agggtctctgccgtgaaccagtcct

SEQ ID NO: 277132 - DNA, 25 bp, Homo sapien
tttaaaaccagtggcgtgcagtagc

SEQ ID NO: 277133 - DNA, 25 bp, Homo sapien
tctgatccttcacctgccggcgtgg

SEQ ID NO: 277134 - DNA, 25 bp, Homo sapien
gcacatcagcagagttggcgacccc

SEQ ID NO: 277135 - DNA, 25 bp, Homo sapien
tctaggcggctctgaaaacactgag

SEQ ID NO: 277136 - DNA, 25 bp, Homo sapien
tggtcctgctgtcgatgaggctgct

SEQ ID NO: 277137 - DNA, 25 bp, Homo sapien
gtcctgctgtcgatgaggctgctcc

SEQ ID NO: 277138 - DNA, 25 bp, Homo sapien
cctgctgtcgatgaggctgctccag

SEQ ID NO: 277139 - DNA, 25 bp, Homo sapien
cttggtcctgctgtcgatgaggctg

SEQ ID NO: 277140 - DNA, 25 bp, Homo sapien
ccgaagtgtgtactctaacagcctc

SEQ ID NO: 277141 - DNA, 25 bp, Homo sapien
gtgtgtactctaacagcctccccag

SEQ ID NO: 277142 - DNA, 25 bp, Homo sapien
gtgtactctaacagcctccccagtt

SEQ ID NO: 277143 - DNA, 25 bp, Homo sapien
gaagtgtgtactctaacagcctccc

SEQ ID NO: 277144 - DNA, 25 bp, Homo sapien
agcacagagccccggaacctccaac

SEQ ID NO: 277145 - DNA, 25 bp, Homo sapien
gccagtgcactgccctacgcgggcc

SEQ ID NO: 277146 - DNA, 25 bp, Homo sapien
agagccccggaacctccaacgcagc

SEQ ID NO: 277147 - DNA, 25 bp, Homo sapien
cccggaacctccaacgcagccagtg

SEQ ID NO: 277148 - DNA, 25 bp, Homo sapien
tctcttagtgttcccagcccacggg

SEQ ID NO: 277149 - DNA, 25 bp, Homo sapien
cctctcttagtgttcccagcccacg

SEQ ID NO: 277150 - DNA, 25 bp, Homo sapien
aaccctctcatgcagggccgggagg

SEQ ID NO: 277151 - DNA, 25 bp, Homo sapien
tcttagtgttcccagcccacgggaa

SEQ ID NO: 277152 - DNA, 25 bp, Homo sapien
tcctcagcaaaccgggacagcaggg

SEQ ID NO: 277153 - DNA, 25 bp, Homo sapien
tagcatcctcgtcatctgtagctcc

SEQ ID NO: 277154 - DNA, 25 bp, Homo sapien
tccatccgctgtagcatcctcgtca

SEQ ID NO: 277155 - DNA, 25 bp, Homo sapien
gctgtagcatcctcgtcatctgtag

SEQ ID NO: 277156 - DNA, 25 bp, Homo sapien
gagcaactattgctcaagtgaggca

SEQ ID NO: 277157 - DNA, 25 bp, Homo sapien
gaggcaggtgccctcttctgcatga

SEQ ID NO: 277158 - DNA, 25 bp, Homo sapien
tgcccgagcgggacagctcgccttg

SEQ ID NO: 277159 - DNA, 25 bp, Homo sapien
cttctgcatgagtcccgggtcccca

SEQ ID NO: 277160 - DNA, 25 bp, Homo sapien
gccgcacgcccatctctgtggcttt

SEQ ID NO: 277161 - DNA, 25 bp, Homo sapien
agccgcacgcccatctctgtggctt

SEQ ID NO: 277162 - DNA, 25 bp, Homo sapien
cagccgcacgcccatctctgtggct

SEQ ID NO: 277163 - DNA, 25 bp, Homo sapien
attgaacttccgctgcatctccagc

SEQ ID NO: 277164 - DNA, 25 bp, Homo sapien
ggaagtaggtctgctcggcatccac

SEQ ID NO: 277165 - DNA, 25 bp, Homo sapien
ttgaacttccgctgcatctccagcg

SEQ ID NO: 277166 - DNA, 25 bp, Homo sapien
ctggaagtaggtctgctcggcatcc

SEQ ID NO: 277167 - DNA, 25 bp, Homo sapien
tcagatgagaggagcccctcctgtg

SEQ ID NO: 277168 - DNA, 25 bp, Homo sapien
tggggtctccaagccccaaggcagg

SEQ ID NO: 277169 - DNA, 25 bp, Homo sapien
caggcaaatgccagggagctcagat

SEQ ID NO: 277170 - DNA, 25 bp, Homo sapien
gcaaatgccagggagctcagatgag

SEQ ID NO: 277171 - DNA, 25 bp, Homo sapien
tgtgggtgaggatggttctccaacc

SEQ ID NO: 277172 - DNA, 25 bp, Homo sapien
tggcagtggggacatctgcagcttc

SEQ ID NO: 277173 - DNA, 25 bp, Homo sapien
gaggatggttctccaacctctgtct

SEQ ID NO: 277174 - DNA, 25 bp, Homo sapien
gggagcaatggcagtggggacatct

SEQ ID NO: 277175 - DNA, 25 bp, Homo sapien
cctcatatccgatctctgctgcaca

SEQ ID NO: 277176 - DNA, 25 bp, Homo sapien
catatccgatctctgctgcacaggc

SEQ ID NO: 277177 - DNA, 25 bp, Homo sapien
tcatatccgatctctgctgcacagg

SEQ ID NO: 277178 - DNA, 25 bp, Homo sapien
ctcatatccgatctctgctgcacag

SEQ ID NO: 277179 - DNA, 25 bp, Homo sapien
aggcctggtttcttggcgccctgcc

SEQ ID NO: 277180 - DNA, 25 bp, Homo sapien
caggcctggtttcttggcgccctgc

SEQ ID NO: 277181 - DNA, 25 bp, Homo sapien
tcaggcctggtttcttggcgccctg

SEQ ID NO: 277182 - DNA, 25 bp, Homo sapien
ctgcgcagtgcgaagcgcactgtgt

SEQ ID NO: 277183 - DNA, 25 bp, Homo sapien
atcaccttggccttggcgttgtgct

SEQ ID NO: 277184 - DNA, 25 bp, Homo sapien
ctcctccagcacgtagtccaggcac

SEQ ID NO: 277185 - DNA, 25 bp, Homo sapien
ggccttggcgttgtgcttcagctcc

SEQ ID NO: 277186 - DNA, 25 bp, Homo sapien
ggctcaggttggggtttcggtgcag

SEQ ID NO: 277187 - DNA, 25 bp, Homo sapien
tggaggagacaacggctcaggttgg

SEQ ID NO: 277188 - DNA, 25 bp, Homo sapien
ctggaggagacaacggctcaggttg

SEQ ID NO: 277189 - DNA, 25 bp, Homo sapien
caggttggggtttcggtgcagggtg

SEQ ID NO: 277190 - DNA, 25 bp, Homo sapien
ccaccctgagctctgcactgctgcc

SEQ ID NO: 277191 - DNA, 25 bp, Homo sapien
tctgcccaccctgagctctgcactg

SEQ ID NO: 277192 - DNA, 25 bp, Homo sapien
tgcccaccctgagctctgcactgct

SEQ ID NO: 277193 - DNA, 25 bp, Homo sapien
tcactctgcccaccctgagctctgc

SEQ ID NO: 277194 - DNA, 25 bp, Homo sapien
tctaccgaagttgtgctccatggga

SEQ ID NO: 277195 - DNA, 25 bp, Homo sapien
cacagtccgatgtccagaatgccag

SEQ ID NO: 277196 - DNA, 25 bp, Homo sapien
ggaccccattgtgtgcatagcttgg

SEQ ID NO: 277197 - DNA, 25 bp, Homo sapien
ggactgggctccaacactacatttg

SEQ ID NO: 277198 - DNA, 25 bp, Homo sapien
gagtccaccagcattgagagtccac

SEQ ID NO: 277199 - DNA, 25 bp, Homo sapien
cacagcaagatagtagggacagaca

SEQ ID NO: 277200 - DNA, 25 bp, Homo sapien
tatatccaggtatcccgacttcgct

SEQ ID NO: 277201 - DNA, 25 bp, Homo sapien
ggtttgaaatatccacgcagtgaca

SEQ ID NO: 277202 - DNA, 25 bp, Homo sapien
agtaggatgcaagcgcagctcctcc

SEQ ID NO: 277203 - DNA, 25 bp, Homo sapien
ccaaagtacagtaggatgcaagcgc

SEQ ID NO: 277204 - DNA, 25 bp, Homo sapien
tgtccaaagtacagtaggatgcaag

SEQ ID NO: 277205 - DNA, 25 bp, Homo sapien
agtacagtaggatgcaagcgcagct

SEQ ID NO: 277206 - DNA, 25 bp, Homo sapien
ccagcgggaagctgatctggtcaca

SEQ ID NO: 277207 - DNA, 25 bp, Homo sapien
gctgatctggtcacacatgcctagc

SEQ ID NO: 277208 - DNA, 25 bp, Homo sapien
gaagctgatctggtcacacatgcct

SEQ ID NO: 277209 - DNA, 25 bp, Homo sapien
gcgggaagctgatctggtcacacat

SEQ ID NO: 277210 - DNA, 25 bp, Homo sapien
cctatacttgtacacagggtagcca

SEQ ID NO: 277211 - DNA, 25 bp, Homo sapien
gccctatacttgtacacagggtagc

SEQ ID NO: 277212 - DNA, 25 bp, Homo sapien
cagccctatacttgtacacagggta

SEQ ID NO: 277213 - DNA, 25 bp, Homo sapien
ctacagccctatacttgtacacagg

SEQ ID NO: 277214 - DNA, 25 bp, Homo sapien
cgtggcaggacacgtatgacagcac

SEQ ID NO: 277215 - DNA, 25 bp, Homo sapien
gctgccgctcccgacgggcaccctt

SEQ ID NO: 277216 - DNA, 25 bp, Homo sapien
acgggcacccttcacgaggctgctg

SEQ ID NO: 277217 - DNA, 25 bp, Homo sapien
cagggcgtggcaggacacgtatgac

SEQ ID NO: 277218 - DNA, 25 bp, Homo sapien
ctaacagttaccagcggctatccca

SEQ ID NO: 277219 - DNA, 25 bp, Homo sapien
catccgaggaaagttcctaacagtt

SEQ ID NO: 277220 - DNA, 25 bp, Homo sapien
gcccacacatccgaggaaagttcct

SEQ ID NO: 277221 - DNA, 25 bp, Homo sapien
gtgcccccaccattggcagggctgg

SEQ ID NO: 277222 - DNA, 25 bp, Homo sapien
acctgctggaactcatccgaaagct

SEQ ID NO: 277223 - DNA, 25 bp, Homo sapien
aagcagggtcatctcacacagccca

SEQ ID NO: 277224 - DNA, 25 bp, Homo sapien
aagtctgatcgtgtctgcgtcccca

SEQ ID NO: 277225 - DNA, 25 bp, Homo sapien
gaccccagttggttggctcaacgcc

SEQ ID NO: 277226 - DNA, 25 bp, Homo sapien
ttcctaacctggtcaaagcagggtc

SEQ ID NO: 277227 - DNA, 25 bp, Homo sapien
cgcagagcaaaggccttcggtggat

SEQ ID NO: 277228 - DNA, 25 bp, Homo sapien
accacccgacgggaagagccatggg

SEQ ID NO: 277229 - DNA, 25 bp, Homo sapien
agagcaaaggccttcggtggatacc

SEQ ID NO: 277230 - DNA, 25 bp, Homo sapien
tggataccacccgacgggaagagcc

SEQ ID NO: 277231 - DNA, 25 bp, Homo sapien
cagtggctgttgaccatcgtctcct

SEQ ID NO: 277232 - DNA, 25 bp, Homo sapien
gtggctgttgaccatcgtctcctgg

SEQ ID NO: 277233 - DNA, 25 bp, Homo sapien
agtggctgttgaccatcgtctcctg

SEQ ID NO: 277234 - DNA, 25 bp, Homo sapien
gaattggatacttcagagatctccc

SEQ ID NO: 277235 - DNA, 25 bp, Homo sapien
ggatacttcagagatctcccttacc

SEQ ID NO: 277236 - DNA, 25 bp, Homo sapien
attggatacttcagagatctccctt

SEQ ID NO: 277237 - DNA, 25 bp, Homo sapien
ctgaattggatacttcagagatctc

SEQ ID NO: 277238 - DNA, 25 bp, Homo sapien
ttgaatgcagccacacaggttcccc

SEQ ID NO: 277239 - DNA, 25 bp, Homo sapien
cttgaatgcagccacacaggttccc

SEQ ID NO: 277240 - DNA, 25 bp, Homo sapien
gaatgcagccacacaggttccccat

SEQ ID NO: 277241 - DNA, 25 bp, Homo sapien
tgaatgcagccacacaggttcccca

SEQ ID NO: 277242 - DNA, 25 bp, Homo sapien
tttcacacgctttttggaaggcttc

SEQ ID NO: 277243 - DNA, 25 bp, Homo sapien
cttggtagtagagtagggcttcctt

SEQ ID NO: 277244 - DNA, 25 bp, Homo sapien
gcttccttttcacacgctttttgga

SEQ ID NO: 277245 - DNA, 25 bp, Homo sapien
tttttggaaggcttcttcgagtcac

SEQ ID NO: 277246 - DNA, 25 bp, Homo sapien
cattgaatgtgctccctgaagtcac

SEQ ID NO: 277247 - DNA, 25 bp, Homo sapien
cagatttcctgtagaatccttttct

SEQ ID NO: 277248 - DNA, 25 bp, Homo sapien
tggaggctctccagacaaaagccag

SEQ ID NO: 277249 - DNA, 25 bp, Homo sapien
catggaggctctccagacaaaagcc

SEQ ID NO: 277250 - DNA, 25 bp, Homo sapien
gccagcagttaagctccagatttcc

SEQ ID NO: 277251 - DNA, 25 bp, Homo sapien
gatcacggagttcagtgagcactca

SEQ ID NO: 277252 - DNA, 25 bp, Homo sapien
tctatcagacagactgcgtgggcag

SEQ ID NO: 277253 - DNA, 25 bp, Homo sapien
ccatgtggacctggcaagctcatgt

SEQ ID NO: 277254 - DNA, 25 bp, Homo sapien
taagctggacacttagcagtggcgg

SEQ ID NO: 277255 - DNA, 25 bp, Homo sapien
actggttggtgtgcacagcatatct

SEQ ID NO: 277256 - DNA, 25 bp, Homo sapien
tcatagttttctgctcggatttcaa

SEQ ID NO: 277257 - DNA, 25 bp, Homo sapien
tctgctcggatttcaataagaaact

SEQ ID NO: 277258 - DNA, 25 bp, Homo sapien
tattggtcatagttttctgctcgga

SEQ ID NO: 277259 - DNA, 25 bp, Homo sapien
aggattggtcatattggtcatagtt

SEQ ID NO: 277260 - DNA, 25 bp, Homo sapien
tcggcccttgtcaggactgatcctc

SEQ ID NO: 277261 - DNA, 25 bp, Homo sapien
ctcggcccttgtcaggactgatcct

SEQ ID NO: 277262 - DNA, 25 bp, Homo sapien
caggactgatcctctcaactactga

SEQ ID NO: 277263 - DNA, 25 bp, Homo sapien
gatcctctcaactactgaccatttc

SEQ ID NO: 277264 - DNA, 25 bp, Homo sapien
tctttcaaggttgctgaagactgta

SEQ ID NO: 277265 - DNA, 25 bp, Homo sapien
tgggctgaagcttgtccaatctttc

SEQ ID NO: 277266 - DNA, 25 bp, Homo sapien
aggttgctgaagactgtatgatgga

SEQ ID NO: 277267 - DNA, 25 bp, Homo sapien
ccaatctttcaaggttgctgaagac

SEQ ID NO: 277268 - DNA, 25 bp, Homo sapien
tgtccttgtgaactagagactcctc

SEQ ID NO: 277269 - DNA, 25 bp, Homo sapien
ctgtccttgtgaactagagactcct

SEQ ID NO: 277270 - DNA, 25 bp, Homo sapien
caaagctttttgaggggtatgtcat

SEQ ID NO: 277271 - DNA, 25 bp, Homo sapien
acaaagctttttgaggggtatgtca

SEQ ID NO: 277272 - DNA, 25 bp, Homo sapien
atgcctcagaggggccacctgcacc

SEQ ID NO: 277273 - DNA, 25 bp, Homo sapien
tagattcatgcctcagaggggccac

SEQ ID NO: 277274 - DNA, 25 bp, Homo sapien
gcctcagaggggccacctgcaccac

SEQ ID NO: 277275 - DNA, 25 bp, Homo sapien
tcatgcctcagaggggccacctgca

SEQ ID NO: 277276 - DNA, 25 bp, Homo sapien
tttcttggcatccagattgttttct

SEQ ID NO: 277277 - DNA, 25 bp, Homo sapien
ttcttggcatccagattgttttctt

SEQ ID NO: 277278 - DNA, 25 bp, Homo sapien
ctttcttggcatccagattgttttc

SEQ ID NO: 277279 - DNA, 25 bp, Homo sapien
tcttggcatccagattgttttcttg

SEQ ID NO: 277280 - DNA, 25 bp, Homo sapien
tatcgtgtgaggcatcctcgttagt

SEQ ID NO: 277281 - DNA, 25 bp, Homo sapien
gttagtgatatcgtgtgaggcatcc

SEQ ID NO: 277282 - DNA, 25 bp, Homo sapien
gtgatatcgtgtgaggcatcctcgt

SEQ ID NO: 277283 - DNA, 25 bp, Homo sapien
cctcgttagtgatatcgtgtgaggc

SEQ ID NO: 277284 - DNA, 25 bp, Homo sapien
atacggtgtcatcattagtgatgtt

SEQ ID NO: 277285 - DNA, 25 bp, Homo sapien
ttagcgatggcttgtacactgtcct

SEQ ID NO: 277286 - DNA, 25 bp, Homo sapien
agcgatggcttgtacactgtcctca

SEQ ID NO: 277287 - DNA, 25 bp, Homo sapien
cattagcgatggcttgtacactgtc

SEQ ID NO: 277288 - DNA, 25 bp, Homo sapien
tcctcattagcgatggcttgtacac

SEQ ID NO: 277289 - DNA, 25 bp, Homo sapien
gttgtgtacagcgtcctcgttagca

SEQ ID NO: 277290 - DNA, 25 bp, Homo sapien
tggtgatgtcttatatggtgtcctc

SEQ ID NO: 277291 - DNA, 25 bp, Homo sapien
tcctcattagcgatgttgtgtacag

SEQ ID NO: 277292 - DNA, 25 bp, Homo sapien
tgatgtcttatatggtgtcctcatt

SEQ ID NO: 277293 - DNA, 25 bp, Homo sapien
ttttacagatgtcttgtacagtgtc

SEQ ID NO: 277294 - DNA, 25 bp, Homo sapien
gcgaattcgtatacagcatcctcat

SEQ ID NO: 277295 - DNA, 25 bp, Homo sapien
tacagcgtccttattagcgaattcg

SEQ ID NO: 277296 - DNA, 25 bp, Homo sapien
tgtcttgtacggtgtccttataagc

SEQ ID NO: 277297 - DNA, 25 bp, Homo sapien
cataaatagtccacattggcagatg

SEQ ID NO: 277298 - DNA, 25 bp, Homo sapien
aaactgcagatgacatcgataatgc

SEQ ID NO: 277299 - DNA, 25 bp, Homo sapien
catgtctacatttgattaaactgca

SEQ ID NO: 277300 - DNA, 25 bp, Homo sapien
gataatgcacactggcagatgttca

SEQ ID NO: 277301 - DNA, 25 bp, Homo sapien
tgcctggcatgggttggtgagaggc

SEQ ID NO: 277302 - DNA, 25 bp, Homo sapien
tcccccaaaactggcacggaagaca

SEQ ID NO: 277303 - DNA, 25 bp, Homo sapien
gaatcaggtttctgtaccctagaga

SEQ ID NO: 277304 - DNA, 25 bp, Homo sapien
gataagtcattagagagaggcccac

SEQ ID NO: 277305 - DNA, 25 bp, Homo sapien
gcctgtgagagagttgtgtccctca

SEQ ID NO: 277306 - DNA, 25 bp, Homo sapien
catggtgcttcgcacaggatcccct

SEQ ID NO: 277307 - DNA, 25 bp, Homo sapien
gaatgctgagtaaattggccaaaaa

SEQ ID NO: 277308 - DNA, 25 bp, Homo sapien
taaaagcctttaacccagaatgctg

SEQ ID NO: 277309 - DNA, 25 bp, Homo sapien
caatactataggagttgcatgggta

SEQ ID NO: 277310 - DNA, 25 bp, Homo sapien
aactaagtcaacttatacaagtgaa

SEQ ID NO: 277311 - DNA, 25 bp, Homo sapien
taacagaaacgcatggtctcccaga

SEQ ID NO: 277312 - DNA, 25 bp, Homo sapien
ccttccttggagcttgaccttgtca

SEQ ID NO: 277313 - DNA, 25 bp, Homo sapien
tcagacaggtatagatgagtgttcc

SEQ ID NO: 277314 - DNA, 25 bp, Homo sapien
tgatcagccatgcaagaataaatga

SEQ ID NO: 277315 - DNA, 25 bp, Homo sapien
aaataaataaatgtacacctgtaat

SEQ ID NO: 277316 - DNA, 25 bp, Homo sapien
ataaatatggccgagcatggtgcct

SEQ ID NO: 277317 - DNA, 25 bp, Homo sapien
attaataaatacagagcaagattcc

SEQ ID NO: 277318 - DNA, 25 bp, Homo sapien
tatggccgagcatggtgccttaggc

SEQ ID NO: 277319 - DNA, 25 bp, Homo sapien
cagtacaagaaccttggaacaggaa

SEQ ID NO: 277320 - DNA, 25 bp, Homo sapien
tacccccagtgacttatatgctaat

SEQ ID NO: 277321 - DNA, 25 bp, Homo sapien
gcccagcctatgagttagtacttct

SEQ ID NO: 277322 - DNA, 25 bp, Homo sapien
tatcctcttcctagtcagtacaaga

SEQ ID NO: 277323 - DNA, 25 bp, Homo sapien
gccccttctcacgccggccggaggc

SEQ ID NO: 277324 - DNA, 25 bp, Homo sapien
ctgcggctggcaggcgtcacaatgg

SEQ ID NO: 277325 - DNA, 25 bp, Homo sapien
cgcctagcgggctggatcacaatgg

SEQ ID NO: 277326 - DNA, 25 bp, Homo sapien
aggcgtcacaatgggcggcagggag

SEQ ID NO: 277327 - DNA, 25 bp, Homo sapien
ctgtggagaccgagcctaaatgccg

SEQ ID NO: 277328 - DNA, 25 bp, Homo sapien
gaccatctcggttatccttctgcaa

SEQ ID NO: 277329 - DNA, 25 bp, Homo sapien
gagcccgcgcatcagcttctctagc

SEQ ID NO: 277330 - DNA, 25 bp, Homo sapien
gcttccgctggcgaccatctcggtt

SEQ ID NO: 277331 - DNA, 25 bp, Homo sapien
agcagcagctcctgcgtcgcggcca

SEQ ID NO: 277332 - DNA, 25 bp, Homo sapien
cgccaggtagaagagcggcgttccc

SEQ ID NO: 277333 - DNA, 25 bp, Homo sapien
cccgccaggtagaagagcggcgttc

SEQ ID NO: 277334 - DNA, 25 bp, Homo sapien
ccaggtagaagagcggcgttccccg

SEQ ID NO: 277335 - DNA, 25 bp, Homo sapien
cgcccgccaggtagaagagcggcgt

SEQ ID NO: 277336 - DNA, 25 bp, Homo sapien
ctcctccagtcttctgcgcacccgc

SEQ ID NO: 277337 - DNA, 25 bp, Homo sapien
tcctccagtcttctgcgcacccgct

SEQ ID NO: 277338 - DNA, 25 bp, Homo sapien
agccccattctaggactcttcctca

SEQ ID NO: 277339 - DNA, 25 bp, Homo sapien
tctccgccggtcctacctcacccca

SEQ ID NO: 277340 - DNA, 25 bp, Homo sapien
ggtcctggggcggtgccgacctctc

SEQ ID NO: 277341 - DNA, 25 bp, Homo sapien
ccaccctgggtccagccccattcta

SEQ ID NO: 277342 - DNA, 25 bp, Homo sapien
cctgcagctgcctgctgtgctgctc

SEQ ID NO: 277343 - DNA, 25 bp, Homo sapien
ctcccactgctcctgcagctgcctg

SEQ ID NO: 277344 - DNA, 25 bp, Homo sapien
ctgactcgacagctcctcccactgc

SEQ ID NO: 277345 - DNA, 25 bp, Homo sapien
tgctcctgcagctgcctgctgtgct

SEQ ID NO: 277346 - DNA, 25 bp, Homo sapien
gcaggacttccgagaggaaccaaga

SEQ ID NO: 277347 - DNA, 25 bp, Homo sapien
ggacttccgagaggaaccaagagac

SEQ ID NO: 277348 - DNA, 25 bp, Homo sapien
aggacttccgagaggaaccaagaga

SEQ ID NO: 277349 - DNA, 25 bp, Homo sapien
caggacttccgagaggaaccaagag

SEQ ID NO: 277350 - DNA, 25 bp, Homo sapien
tctgcggttcccctccgtagaagag

SEQ ID NO: 277351 - DNA, 25 bp, Homo sapien
gggaatgtcaggaggtccgcaggcc

SEQ ID NO: 277352 - DNA, 25 bp, Homo sapien
aggaggtccgcaggccggcaacccg

SEQ ID NO: 277353 - DNA, 25 bp, Homo sapien
atgtcaggaggtccgcaggccggca

SEQ ID NO: 277354 - DNA, 25 bp, Homo sapien
gaatgtcaggaggtccgcaggccgg

SEQ ID NO: 277355 - DNA, 25 bp, Homo sapien
tgcaaggcgcatttggtctccgcca

SEQ ID NO: 277356 - DNA, 25 bp, Homo sapien
cctgcaaggcgcatttggtctccgc

SEQ ID NO: 277357 - DNA, 25 bp, Homo sapien
caaggcgcatttggtctccgccagc

SEQ ID NO: 277358 - DNA, 25 bp, Homo sapien
tcctgcaaggcgcatttggtctccg

SEQ ID NO: 277359 - DNA, 25 bp, Homo sapien
cggtctgctcctggaatatggccca

SEQ ID NO: 277360 - DNA, 25 bp, Homo sapien
tacggtctgctcctggaatatggcc

SEQ ID NO: 277361 - DNA, 25 bp, Homo sapien
gactacggtctgctcctggaatatg

SEQ ID NO: 277362 - DNA, 25 bp, Homo sapien
tgcaggactacggtctgctcctgga

SEQ ID NO: 277363 - DNA, 25 bp, Homo sapien
cgccccaggtctgggggaggagagg

SEQ ID NO: 277364 - DNA, 25 bp, Homo sapien
ccccaggtctgggggaggagaggcg

SEQ ID NO: 277365 - DNA, 25 bp, Homo sapien
ccaggtctgggggaggagaggcggg

SEQ ID NO: 277366 - DNA, 25 bp, Homo sapien
caggtctgggggaggagaggcggga

SEQ ID NO: 277367 - DNA, 25 bp, Homo sapien
gtgagagtgcggactgaggcctcgg

SEQ ID NO: 277368 - DNA, 25 bp, Homo sapien
ctggagcgggtgagagtgcggactg

SEQ ID NO: 277369 - DNA, 25 bp, Homo sapien
gcgggtgagagtgcggactgaggcc

SEQ ID NO: 277370 - DNA, 25 bp, Homo sapien
gagcgggtgagagtgcggactgagg

SEQ ID NO: 277371 - DNA, 25 bp, Homo sapien
tcccggccactctgccaggcgtcca

SEQ ID NO: 277372 - DNA, 25 bp, Homo sapien
cccggccactctgccaggcgtccag

SEQ ID NO: 277373 - DNA, 25 bp, Homo sapien
gcgcccgcaggcccaactcccttac

SEQ ID NO: 277374 - DNA, 25 bp, Homo sapien
gggacaggcatgcaggtgggagccc

SEQ ID NO: 277375 - DNA, 25 bp, Homo sapien
ccgccgcgcccgcaggcccaactcc

SEQ ID NO: 277376 - DNA, 25 bp, Homo sapien
agcccggccccacagtgccccgccg

SEQ ID NO: 277377 - DNA, 25 bp, Homo sapien
tgctgtactgcactccgcgaagctg

SEQ ID NO: 277378 - DNA, 25 bp, Homo sapien
cggtgctgtactgcactccgcgaag

SEQ ID NO: 277379 - DNA, 25 bp, Homo sapien
atctcctccatgagcgactcggtgc

SEQ ID NO: 277380 - DNA, 25 bp, Homo sapien
ccatgagcgactcggtgctgtactg

SEQ ID NO: 277381 - DNA, 25 bp, Homo sapien
cccgcccggacccgcgcaggcgctc

SEQ ID NO: 277382 - DNA, 25 bp, Homo sapien
ccgcccggacccgcgcaggcgctca

SEQ ID NO: 277383 - DNA, 25 bp, Homo sapien
cgcccggacccgcgcaggcgctcac

SEQ ID NO: 277384 - DNA, 25 bp, Homo sapien
gagggccgcatccagctacctccgc

SEQ ID NO: 277385 - DNA, 25 bp, Homo sapien
agggccgcatccagctacctccgcg

SEQ ID NO: 277386 - DNA, 25 bp, Homo sapien
ggccgcatccagctacctccgcgcc

SEQ ID NO: 277387 - DNA, 25 bp, Homo sapien
gggccgcatccagctacctccgcgc

SEQ ID NO: 277388 - DNA, 25 bp, Homo sapien
gcgagggccgccgaacagccgcgtc

SEQ ID NO: 277389 - DNA, 25 bp, Homo sapien
gagggccgccgaacagccgcgtctc

SEQ ID NO: 277390 - DNA, 25 bp, Homo sapien
gcgcgagggccgccgaacagccgcg

SEQ ID NO: 277391 - DNA, 25 bp, Homo sapien
ctgatggccagcgcgcgagggccgc

SEQ ID NO: 277392 - DNA, 25 bp, Homo sapien
ggcaggtgggggaccgcggccgcgc

SEQ ID NO: 277393 - DNA, 25 bp, Homo sapien
ctgcggggcgaaaggcgggcaggtg

SEQ ID NO: 277394 - DNA, 25 bp, Homo sapien
cggccgcgcccaccgcccggctcac

SEQ ID NO: 277395 - DNA, 25 bp, Homo sapien
cgcggccgcgcccaccgcccggctc

SEQ ID NO: 277396 - DNA, 25 bp, Homo sapien
tgaggctccagagccacgcggagac

SEQ ID NO: 277397 - DNA, 25 bp, Homo sapien
gggacagcgtgtagcgcaggcggcg

SEQ ID NO: 277398 - DNA, 25 bp, Homo sapien
gggtccaacagcaccgtccagagca

SEQ ID NO: 277399 - DNA, 25 bp, Homo sapien
gcgcagcgtcgtctccgaggtgagg

SEQ ID NO: 277400 - DNA, 25 bp, Homo sapien
accttggtctacactctcaggagag

SEQ ID NO: 277401 - DNA, 25 bp, Homo sapien
cacctggagccaggcgcggggcgct

SEQ ID NO: 277402 - DNA, 25 bp, Homo sapien
gaaaagccagtcaagctcctacatg

SEQ ID NO: 277403 - DNA, 25 bp, Homo sapien
catgtgatcagagggaaaagaccta

SEQ ID NO: 277404 - DNA, 25 bp, Homo sapien
gaaaaggcagcttgtcagattggca

SEQ ID NO: 277405 - DNA, 25 bp, Homo sapien
gaatacagagtgtgacttcccaaat

SEQ ID NO: 277406 - DNA, 25 bp, Homo sapien
caggcttagtaacgccgtggactgc

SEQ ID NO: 277407 - DNA, 25 bp, Homo sapien
tgaagctgccccacaatcatggagc

SEQ ID NO: 277408 - DNA, 25 bp, Homo sapien
tggactgcagcgacaatcagtggat

SEQ ID NO: 277409 - DNA, 25 bp, Homo sapien
gaatgacatcccctactgaggaggg

SEQ ID NO: 277410 - DNA, 25 bp, Homo sapien
gatcagggtttgtggaaccctccag

SEQ ID NO: 277411 - DNA, 25 bp, Homo sapien
ttgtggaaccctccagcgtggtcac

SEQ ID NO: 277412 - DNA, 25 bp, Homo sapien
tctgatcagggtttgtggaaccctc

SEQ ID NO: 277413 - DNA, 25 bp, Homo sapien
agggtttgtggaaccctccagcgtg

SEQ ID NO: 277414 - DNA, 25 bp, Homo sapien
ccaaagccctcatttgtgcattgtt

SEQ ID NO: 277415 - DNA, 25 bp, Homo sapien
cattgttgtcatagctgcccaagtg

SEQ ID NO: 277416 - DNA, 25 bp, Homo sapien
aactgagccctccaaagccctcatt

SEQ ID NO: 277417 - DNA, 25 bp, Homo sapien
tgatattttctgggttatctcttgt

SEQ ID NO: 277418 - DNA, 25 bp, Homo sapien
tgtctggtatgtgggaatcttctgc

SEQ ID NO: 277419 - DNA, 25 bp, Homo sapien
tgtgcctttgccgaacacctccagg

SEQ ID NO: 277420 - DNA, 25 bp, Homo sapien
tgggaatcttctgccccacggcagc

SEQ ID NO: 277421 - DNA, 25 bp, Homo sapien
gcctttgccgaacacctccaggaga

SEQ ID NO: 277422 - DNA, 25 bp, Homo sapien
gtctggcgggacctcacatagtgca

SEQ ID NO: 277423 - DNA, 25 bp, Homo sapien
gcttttggagtctgcctggcctggt

SEQ ID NO: 277424 - DNA, 25 bp, Homo sapien
tctggacaaggtatatgaggccact

SEQ ID NO: 277425 - DNA, 25 bp, Homo sapien
tctcgttggcctgtatgtagtctgg

SEQ ID NO: 277426 - DNA, 25 bp, Homo sapien
tcagctgtaggcgggtcctactgac

SEQ ID NO: 277427 - DNA, 25 bp, Homo sapien
tcactaactgctttactccgagggc

SEQ ID NO: 277428 - DNA, 25 bp, Homo sapien
tctcactaactgctttactccgagg

SEQ ID NO: 277429 - DNA, 25 bp, Homo sapien
ctcactaactgctttactccgaggg

SEQ ID NO: 277430 - DNA, 25 bp, Homo sapien
ctagaggcaccggttttttgtgagg

SEQ ID NO: 277431 - DNA, 25 bp, Homo sapien
gtgggcagcgcatcgtaggatctta

SEQ ID NO: 277432 - DNA, 25 bp, Homo sapien
gcgcatcgtaggatcttaggtgcat

SEQ ID NO: 277433 - DNA, 25 bp, Homo sapien
tgtgaggtgggcagcgcatcgtagg

SEQ ID NO: 277434 - DNA, 25 bp, Homo sapien
gaggcagctttcaccgcgggaagaa

SEQ ID NO: 277435 - DNA, 25 bp, Homo sapien
ggaggcagctttcaccgcgggaaga

SEQ ID NO: 277436 - DNA, 25 bp, Homo sapien
gcggattaatcctcacgtagtgttt

SEQ ID NO: 277437 - DNA, 25 bp, Homo sapien
gtcgcggattaatcctcacgtagtg

SEQ ID NO: 277438 - DNA, 25 bp, Homo sapien
cagtcgcggattaatcctcacgtag

SEQ ID NO: 277439 - DNA, 25 bp, Homo sapien
ctgcagtcgcggattaatcctcacg

SEQ ID NO: 277440 - DNA, 25 bp, Homo sapien
acaggtaggcacgatcccatcctcg

SEQ ID NO: 277441 - DNA, 25 bp, Homo sapien
ggtaggcacgatcccatcctcgatc

SEQ ID NO: 277442 - DNA, 25 bp, Homo sapien
ggacaggtaggcacgatcccatcct

SEQ ID NO: 277443 - DNA, 25 bp, Homo sapien
aggtaggcacgatcccatcctcgat

SEQ ID NO: 277444 - DNA, 25 bp, Homo sapien
tgagtttttacgaccgattcctgaa

SEQ ID NO: 277445 - DNA, 25 bp, Homo sapien
cagcccgagggagtcaggcctttaa

SEQ ID NO: 277446 - DNA, 25 bp, Homo sapien
tggaacttgtagattagtcactgag

SEQ ID NO: 277447 - DNA, 25 bp, Homo sapien
ctccctgcggtgtttttctgccagt

SEQ ID NO: 277448 - DNA, 25 bp, Homo sapien
cacaggacgagcagtagacttggaa

SEQ ID NO: 277449 - DNA, 25 bp, Homo sapien
gaacgttccgtcttgtgccattgag

SEQ ID NO: 277450 - DNA, 25 bp, Homo sapien
gaacagggccgggagtctgatactt

SEQ ID NO: 277451 - DNA, 25 bp, Homo sapien
ttagtgggctctgaacaccaagaac

SEQ ID NO: 277452 - DNA, 25 bp, Homo sapien
attctcatctgccagtgtctggact

SEQ ID NO: 277453 - DNA, 25 bp, Homo sapien
tctcatctgccagtgtctggactcc

SEQ ID NO: 277454 - DNA, 25 bp, Homo sapien
gagcacaggccatgtggttggtctg

SEQ ID NO: 277455 - DNA, 25 bp, Homo sapien
ctggcttggcttcttttcgtccatt

SEQ ID NO: 277456 - DNA, 25 bp, Homo sapien
tctcttgtgctgtcggagagctggc

SEQ ID NO: 277457 - DNA, 25 bp, Homo sapien
tctagtaggagttgccaagcacatc

SEQ ID NO: 277458 - DNA, 25 bp, Homo sapien
ggaagccacccctctgacatatgtg

SEQ ID NO: 277459 - DNA, 25 bp, Homo sapien
gggctgtcctccaaggatccaggat

SEQ ID NO: 277460 - DNA, 25 bp, Homo sapien
aggactgcggtcctgcaccgtctgc

SEQ ID NO: 277461 - DNA, 25 bp, Homo sapien
tgcggtcctgcaccgtctgcggtct

SEQ ID NO: 277462 - DNA, 25 bp, Homo sapien
gattttgcgatttccaggactgcgg

SEQ ID NO: 277463 - DNA, 25 bp, Homo sapien
gatttccaggactgcggtcctgcac

SEQ ID NO: 277464 - DNA, 25 bp, Homo sapien
aaggggagttgatctggaggtcaag

SEQ ID NO: 277465 - DNA, 25 bp, Homo sapien
gccaaggggagttgatctggaggtc

SEQ ID NO: 277466 - DNA, 25 bp, Homo sapien
gagttgatctggaggtcaagagatt

SEQ ID NO: 277467 - DNA, 25 bp, Homo sapien
gaggccaaggggagttgatctggag

SEQ ID NO: 277468 - DNA, 25 bp, Homo sapien
atccaaatgccagcctgctcacaga

SEQ ID NO: 277469 - DNA, 25 bp, Homo sapien
ttttaaagaagcataaggctggaga

SEQ ID NO: 277470 - DNA, 25 bp, Homo sapien
ggatccaaatgccagcctgctcaca

SEQ ID NO: 277471 - DNA, 25 bp, Homo sapien
taaagaagcataaggctggagaggc

SEQ ID NO: 277472 - DNA, 25 bp, Homo sapien
caggcctggtcattctgacacccac

SEQ ID NO: 277473 - DNA, 25 bp, Homo sapien
tcaggcctggtcattctgacaccca

SEQ ID NO: 277474 - DNA, 25 bp, Homo sapien
gtgcggtggccacgtcatcattggc

SEQ ID NO: 277475 - DNA, 25 bp, Homo sapien
ggctgcagtctattcccagaacaca

SEQ ID NO: 277476 - DNA, 25 bp, Homo sapien
gctgcagtctattcccagaacacat

SEQ ID NO: 277477 - DNA, 25 bp, Homo sapien
ccagaactcagattgtgcggtggcc

SEQ ID NO: 277478 - DNA, 25 bp, Homo sapien
agacaagctggtggtttcctgctcc

SEQ ID NO: 277479 - DNA, 25 bp, Homo sapien
ccaggaagtcaccaatttatgccaa

SEQ ID NO: 277480 - DNA, 25 bp, Homo sapien
atcagtatagtacattacaatccag

SEQ ID NO: 277481 - DNA, 25 bp, Homo sapien
cagacaccccatcagtatagtacat

SEQ ID NO: 277482 - DNA, 25 bp, Homo sapien
gaacttcctgctccacgcctgcgca

SEQ ID NO: 277483 - DNA, 25 bp, Homo sapien
aggaacttcctgctccacgcctgcg

SEQ ID NO: 277484 - DNA, 25 bp, Homo sapien
tccaggaacttcctgctccacgcct

SEQ ID NO: 277485 - DNA, 25 bp, Homo sapien
ccaggaacttcctgctccacgcctg

SEQ ID NO: 277486 - DNA, 25 bp, Homo sapien
tctgtgtcaggagtgtcctcaccac

SEQ ID NO: 277487 - DNA, 25 bp, Homo sapien
gtctctgtgtcaggagtgtcctcac

SEQ ID NO: 277488 - DNA, 25 bp, Homo sapien
ccacctggggatggacctccactgt

SEQ ID NO: 277489 - DNA, 25 bp, Homo sapien
ctgtgtcaggagtgtcctcaccacc

SEQ ID NO: 277490 - DNA, 25 bp, Homo sapien
ggccatgtgggtcacggcccctggc

SEQ ID NO: 277491 - DNA, 25 bp, Homo sapien
tttgctgcgactgtgctgcttgctc

SEQ ID NO: 277492 - DNA, 25 bp, Homo sapien
agcctttgctgcgactgtgctgctt

SEQ ID NO: 277493 - DNA, 25 bp, Homo sapien
tccagcctttgctgcgactgtgctg

SEQ ID NO: 277494 - DNA, 25 bp, Homo sapien
ttctgggcataggtgacatggagca

SEQ ID NO: 277495 - DNA, 25 bp, Homo sapien
agtttctgggcataggtgacatgga

SEQ ID NO: 277496 - DNA, 25 bp, Homo sapien
tttctgggcataggtgacatggagc

SEQ ID NO: 277497 - DNA, 25 bp, Homo sapien
tctgggcataggtgacatggagcat

SEQ ID NO: 277498 - DNA, 25 bp, Homo sapien
ctgggggttccggcctgggccgcag

SEQ ID NO: 277499 - DNA, 25 bp, Homo sapien
gcccacgggcggccgggcgtcgcca

SEQ ID NO: 277500 - DNA, 25 bp, Homo sapien
cccacgggcggccgggcgtcgccat

SEQ ID NO: 277501 - DNA, 25 bp, Homo sapien
ccggcccattggattgcggccccgg

SEQ ID NO: 277502 - DNA, 25 bp, Homo sapien
agccgcggcacctcggaccgcgaag

SEQ ID NO: 277503 - DNA, 25 bp, Homo sapien
tcgctggctctgtacgcactacgcg

SEQ ID NO: 277504 - DNA, 25 bp, Homo sapien
gcgaagccgcttcggcccggagctg

SEQ ID NO: 277505 - DNA, 25 bp, Homo sapien
gcatactgagcacacggagccgcgg

SEQ ID NO: 277506 - DNA, 25 bp, Homo sapien
agccgccgctcgctgacctccagga

SEQ ID NO: 277507 - DNA, 25 bp, Homo sapien
gtgcgcgccggtcctctcgcccgcg

SEQ ID NO: 277508 - DNA, 25 bp, Homo sapien
ggagccgcggctgtgcgcgccggtc

SEQ ID NO: 277509 - DNA, 25 bp, Homo sapien
cggtgcgctccgcattctgctgggc

SEQ ID NO: 277510 - DNA, 25 bp, Homo sapien
gggctcggtgcgctccgcattctgc

SEQ ID NO: 277511 - DNA, 25 bp, Homo sapien
tccgcattctgctgggccgtccggg

SEQ ID NO: 277512 - DNA, 25 bp, Homo sapien
tgcgctccgcattctgctgggccgt

SEQ ID NO: 277513 - DNA, 25 bp, Homo sapien
ctaggctgcccttgtgcggccgccc

SEQ ID NO: 277514 - DNA, 25 bp, Homo sapien
tcctgggggtaccagagtagccagc

SEQ ID NO: 277515 - DNA, 25 bp, Homo sapien
gaggccgctgtccaattggtgccgt

SEQ ID NO: 277516 - DNA, 25 bp, Homo sapien
tggagaccctgcctcgtcactgaga

SEQ ID NO: 277517 - DNA, 25 bp, Homo sapien
gacactattccagtgcgtggagacc

SEQ ID NO: 277518 - DNA, 25 bp, Homo sapien
gctgtccaattggtgccgtgtggaa

SEQ ID NO: 277519 - DNA, 25 bp, Homo sapien
gaatgcctgaatcggcagggccagt

SEQ ID NO: 277520 - DNA, 25 bp, Homo sapien
caacttctgcgccatagtgtcgggc

SEQ ID NO: 277521 - DNA, 25 bp, Homo sapien
gagcaggactgtagcaacaccaact

SEQ ID NO: 277522 - DNA, 25 bp, Homo sapien
tcctgcttagagtatcccagctgag

SEQ ID NO: 277523 - DNA, 25 bp, Homo sapien
gaggctcccttgcacatgagaagtc

SEQ ID NO: 277524 - DNA, 25 bp, Homo sapien
tatattacatgcaccataggctgga

SEQ ID NO: 277525 - DNA, 25 bp, Homo sapien
caagagtctacgctacacctaggca

SEQ ID NO: 277526 - DNA, 25 bp, Homo sapien
ccgcgtgcagctaaacagtgtttcg

SEQ ID NO: 277527 - DNA, 25 bp, Homo sapien
ttcttgcactgccaaaccatgcctg

SEQ ID NO: 277528 - DNA, 25 bp, Homo sapien
cacccatcatacagtatattaaaac

SEQ ID NO: 277529 - DNA, 25 bp, Homo sapien
cactgccaaaccatgcctgagaatt

SEQ ID NO: 277530 - DNA, 25 bp, Homo sapien
catacagtatattaaaacttgattc

SEQ ID NO: 277531 - DNA, 25 bp, Homo sapien
ggtccgcgcagcgggcgacttgcgg

SEQ ID NO: 277532 - DNA, 25 bp, Homo sapien
gggtccgcgcagcgggcgacttgcg

SEQ ID NO: 277533 - DNA, 25 bp, Homo sapien
ccgcgcagcgggcgacttgcggcat

SEQ ID NO: 277534 - DNA, 25 bp, Homo sapien
tccgcgcagcgggcgacttgcggca

SEQ ID NO: 277535 - DNA, 25 bp, Homo sapien
tggcttcctgtctgccttctctcat

SEQ ID NO: 277536 - DNA, 25 bp, Homo sapien
ggacagagtgcactactggaggggt

SEQ ID NO: 277537 - DNA, 25 bp, Homo sapien
agcctgtacctaccagggaggacag

SEQ ID NO: 277538 - DNA, 25 bp, Homo sapien
gggaggacagagtgcactactggag

SEQ ID NO: 277539 - DNA, 25 bp, Homo sapien
gaggacagagtgcactactggaggg

SEQ ID NO: 277540 - DNA, 25 bp, Homo sapien
gcaccactgcgtggaggatggagct

SEQ ID NO: 277541 - DNA, 25 bp, Homo sapien
tgcaccactgcgtggaggatggagc

SEQ ID NO: 277542 - DNA, 25 bp, Homo sapien
ctgcaccactgcgtggaggatggag

SEQ ID NO: 277543 - DNA, 25 bp, Homo sapien
ggctgcaccactgcgtggaggatgg

SEQ ID NO: 277544 - DNA, 25 bp, Homo sapien
ggatgagggccagcacgggcccgct

SEQ ID NO: 277545 - DNA, 25 bp, Homo sapien
gatgttcagcgggtgctcgatcagc

SEQ ID NO: 277546 - DNA, 25 bp, Homo sapien
agttgttcaggtcctcagctgtcac

SEQ ID NO: 277547 - DNA, 25 bp, Homo sapien
ttcagcgggtgctcgatcagctcag

SEQ ID NO: 277548 - DNA, 25 bp, Homo sapien
aaagcctctacgatgcggtggtacg

SEQ ID NO: 277549 - DNA, 25 bp, Homo sapien
tctacgatgcggtggtacgtcaggc

SEQ ID NO: 277550 - DNA, 25 bp, Homo sapien
cggtggtacgtcaggcccttctgct

SEQ ID NO: 277551 - DNA, 25 bp, Homo sapien
ggtccccaagcagggtcctcttggc

SEQ ID NO: 277552 - DNA, 25 bp, Homo sapien
agtccatccgagcacacagtaggcc

SEQ ID NO: 277553 - DNA, 25 bp, Homo sapien
cagcgaagaactcagaggtcatgtt

SEQ ID NO: 277554 - DNA, 25 bp, Homo sapien
gaactcagaggtcatgttgcggacc

SEQ ID NO: 277555 - DNA, 25 bp, Homo sapien
ctgggcagcgaagaactcagaggtc

SEQ ID NO: 277556 - DNA, 25 bp, Homo sapien
actcagaggtcatgttgcggaccac

SEQ ID NO: 277557 - DNA, 25 bp, Homo sapien
agtgcccccgtcatccggcgtgtag

SEQ ID NO: 277558 - DNA, 25 bp, Homo sapien
cgggcttgtcgtaggagatcgggtg

SEQ ID NO: 277559 - DNA, 25 bp, Homo sapien
tgtggtcagagatctgggaccggag

SEQ ID NO: 277560 - DNA, 25 bp, Homo sapien
ccggcgtgtagaactcgggcttgtc

SEQ ID NO: 277561 - DNA, 25 bp, Homo sapien
agtcgtccattcattattgaacagg

SEQ ID NO: 277562 - DNA, 25 bp, Homo sapien
ccattcattattgaacaggatccca

SEQ ID NO: 277563 - DNA, 25 bp, Homo sapien
ggagagctgaagtcgtccattcatt

SEQ ID NO: 277564 - DNA, 25 bp, Homo sapien
ctgaagtcgtccattcattattgaa

SEQ ID NO: 277565 - DNA, 25 bp, Homo sapien
gggtgccccaaactcattggtgatg

SEQ ID NO: 277566 - DNA, 25 bp, Homo sapien
ctggctggatgaaattggcaggtga

SEQ ID NO: 277567 - DNA, 25 bp, Homo sapien
tgaggggggtgccccaaactcattg

SEQ ID NO: 277568 - DNA, 25 bp, Homo sapien
tggcaggtgaggggggtgccccaaa

SEQ ID NO: 277569 - DNA, 25 bp, Homo sapien
ctgcggccgatgggagaagacaggg

SEQ ID NO: 277570 - DNA, 25 bp, Homo sapien
cagtgcagtgtctgtggtgatctgc

SEQ ID NO: 277571 - DNA, 25 bp, Homo sapien
atgatcgtcgggcacatggacaaga

SEQ ID NO: 277572 - DNA, 25 bp, Homo sapien
gcagtgtctgtggtgatctgcgtgc

SEQ ID NO: 277573 - DNA, 25 bp, Homo sapien
accatgatcgtcgggcacatggaca

SEQ ID NO: 277574 - DNA, 25 bp, Homo sapien
cagggagaaaaggggtgacacatac

SEQ ID NO: 277575 - DNA, 25 bp, Homo sapien
gcagggccagggagaaaaggggtga

SEQ ID NO: 277576 - DNA, 25 bp, Homo sapien
ctgtgcagagtgggcagggccaggg

SEQ ID NO: 277577 - DNA, 25 bp, Homo sapien
ggccagggagaaaaggggtgacaca

SEQ ID NO: 277578 - DNA, 25 bp, Homo sapien
ggcatgggagtgtgatcagcgtggc

SEQ ID NO: 277579 - DNA, 25 bp, Homo sapien
ctggggcatgggagtgtgatcagcg

SEQ ID NO: 277580 - DNA, 25 bp, Homo sapien
gggagtgtgatcagcgtggcttggg

SEQ ID NO: 277581 - DNA, 25 bp, Homo sapien
catgggagtgtgatcagcgtggctt

SEQ ID NO: 277582 - DNA, 25 bp, Homo sapien
gtcatagccgaaccagaggttgtag

SEQ ID NO: 277583 - DNA, 25 bp, Homo sapien
tgggaccccacaccgtgactcagtt

SEQ ID NO: 277584 - DNA, 25 bp, Homo sapien
agagaggacaccaaccattgtccac

SEQ ID NO: 277585 - DNA, 25 bp, Homo sapien
gaaccacacctgtgtggtcacaggc

SEQ ID NO: 277586 - DNA, 25 bp, Homo sapien
ggtggtgccatttcaggccaggtca

SEQ ID NO: 277587 - DNA, 25 bp, Homo sapien
ggattgcttgtcagccttgtctgcc

SEQ ID NO: 277588 - DNA, 25 bp, Homo sapien
catcctggtgagtatcttgtccctg

SEQ ID NO: 277589 - DNA, 25 bp, Homo sapien
ctcttcctcatcctggtgagtatct

SEQ ID NO: 277590 - DNA, 25 bp, Homo sapien
gagcactcagtagccagcaggttcc

SEQ ID NO: 277591 - DNA, 25 bp, Homo sapien
ggagtaagcttgcagggcggctggg

SEQ ID NO: 277592 - DNA, 25 bp, Homo sapien
agaaagggagtaagcttgcagggcg

SEQ ID NO: 277593 - DNA, 25 bp, Homo sapien
catggatcagctctgagaccccgag

SEQ ID NO: 277594 - DNA, 25 bp, Homo sapien
ggacaagatcccaggatctcagcct

SEQ ID NO: 277595 - DNA, 25 bp, Homo sapien
gacagcgtgtcaatctctgaaggtt

SEQ ID NO: 277596 - DNA, 25 bp, Homo sapien
aaatctcttagaagactccgtagat

SEQ ID NO: 277597 - DNA, 25 bp, Homo sapien
cgtagatccaggaacggaaatggaa

SEQ ID NO: 277598 - DNA, 25 bp, Homo sapien
gaaaatgacagcgtgtcaatctctg

SEQ ID NO: 277599 - DNA, 25 bp, Homo sapien
taaactgtcgtatgttggctggcct

SEQ ID NO: 277600 - DNA, 25 bp, Homo sapien
gcgtagatattctccatcctcaatt

SEQ ID NO: 277601 - DNA, 25 bp, Homo sapien
ttggctggcctgaacaagcgtagat

SEQ ID NO: 277602 - DNA, 25 bp, Homo sapien
catgtctcctgtcttgaagtaaact

SEQ ID NO: 277603 - DNA, 25 bp, Homo sapien
tatcattatgcttggaggtacagca

SEQ ID NO: 277604 - DNA, 25 bp, Homo sapien
ggtcagtagttgagaggatcagtcc

SEQ ID NO: 277605 - DNA, 25 bp, Homo sapien
cctgggaaccccttcaggtgcaaag

SEQ ID NO: 277606 - DNA, 25 bp, Homo sapien
gatcagtcctgacaagggccgaggt

SEQ ID NO: 277607 - DNA, 25 bp, Homo sapien
cacccatcatacagtatattaaaac

SEQ ID NO: 277608 - DNA, 25 bp, Homo sapien
ttcttgcactgccaaaccatgcctg

SEQ ID NO: 277609 - DNA, 25 bp, Homo sapien
catacagtatattaaaacttgattc

SEQ ID NO: 277610 - DNA, 25 bp, Homo sapien
cactgccaaaccatgcctgagaatt

SEQ ID NO: 277611 - DNA, 25 bp, Homo sapien
caaggcgtcagctgtccaagctcag

SEQ ID NO: 277612 - DNA, 25 bp, Homo sapien
cagtggcagatgatccaaggcgtca

SEQ ID NO: 277613 - DNA, 25 bp, Homo sapien
tgtgcatttctaggtctgggcgcca

SEQ ID NO: 277614 - DNA, 25 bp, Homo sapien
aaatgttgaccagagatcagtggca

SEQ ID NO: 277615 - DNA, 25 bp, Homo sapien
ggatacttcagagatctcccttacc

SEQ ID NO: 277616 - DNA, 25 bp, Homo sapien
gaattggatacttcagagatctccc

SEQ ID NO: 277617 - DNA, 25 bp, Homo sapien
attggatacttcagagatctccctt

SEQ ID NO: 277618 - DNA, 25 bp, Homo sapien
ctgaattggatacttcagagatctc

SEQ ID NO: 277619 - DNA, 25 bp, Homo sapien
gaatgcagccacacaggttccccat

SEQ ID NO: 277620 - DNA, 25 bp, Homo sapien
ttgaatgcagccacacaggttcccc

SEQ ID NO: 277621 - DNA, 25 bp, Homo sapien
cttgaatgcagccacacaggttccc

SEQ ID NO: 277622 - DNA, 25 bp, Homo sapien
tgaatgcagccacacaggttcccca

SEQ ID NO: 277623 - DNA, 25 bp, Homo sapien
tttttggaaggcttcttcgagtcac

SEQ ID NO: 277624 - DNA, 25 bp, Homo sapien
tttcacacgctttttggaaggcttc

SEQ ID NO: 277625 - DNA, 25 bp, Homo sapien
cttggtggtagagtagggcttcctt

SEQ ID NO: 277626 - DNA, 25 bp, Homo sapien
gcttccttttcacacgctttttgga

SEQ ID NO: 277627 - DNA, 25 bp, Homo sapien
cattgaatgtgctccctgaagtcac

SEQ ID NO: 277628 - DNA, 25 bp, Homo sapien
actggttggtgtgcacagcatatct

SEQ ID NO: 277629 - DNA, 25 bp, Homo sapien
gcttgtccaatctttcaagattgct

SEQ ID NO: 277630 - DNA, 25 bp, Homo sapien
agattgctgaagactgtatgatgga

SEQ ID NO: 277631 - DNA, 25 bp, Homo sapien
tctttcaagattgctgaagactgta

SEQ ID NO: 277632 - DNA, 25 bp, Homo sapien
ctgaagcttgtccaatctttcaaga

SEQ ID NO: 277633 - DNA, 25 bp, Homo sapien
ctgtccttgtgaactagagactcct

SEQ ID NO: 277634 - DNA, 25 bp, Homo sapien
tgtccttgtgaactagagactcctc

SEQ ID NO: 277635 - DNA, 25 bp, Homo sapien
gatacagtccacaacctgaagccgt

SEQ ID NO: 277636 - DNA, 25 bp, Homo sapien
tgaagccgtcatagctaaatgccat

SEQ ID NO: 277637 - DNA, 25 bp, Homo sapien
tctctcaggtccacgtaggttggca

SEQ ID NO: 277638 - DNA, 25 bp, Homo sapien
aagacattgcttccaaggacaagga

SEQ ID NO: 277639 - DNA, 25 bp, Homo sapien
tcttggcatccagattgttttcttg

SEQ ID NO: 277640 - DNA, 25 bp, Homo sapien
gattccagaatacttactagattca

SEQ ID NO: 277641 - DNA, 25 bp, Homo sapien
aagtgattccagaatacttactaga

SEQ ID NO: 277642 - DNA, 25 bp, Homo sapien
ctttcttggcatccagattgttttc

SEQ ID NO: 277643 - DNA, 25 bp, Homo sapien
gtcctcattagcgatattgtgggcg

SEQ ID NO: 277644 - DNA, 25 bp, Homo sapien
gtcatatatggcgtcctcagtagca

SEQ ID NO: 277645 - DNA, 25 bp, Homo sapien
ggcgtcctcagtagcaatgtcatat

SEQ ID NO: 277646 - DNA, 25 bp, Homo sapien
tagcgatattgtgggcggcgtcctc

SEQ ID NO: 277647 - DNA, 25 bp, Homo sapien
cggcttagcgatcgcttgggcggca

SEQ ID NO: 277648 - DNA, 25 bp, Homo sapien
ccatgggcggcgtccggcttagcga

SEQ ID NO: 277649 - DNA, 25 bp, Homo sapien
cttagcgatcgcttgggcggcatcc

SEQ ID NO: 277650 - DNA, 25 bp, Homo sapien
cggcgtccggcttagcgatcgcttg

SEQ ID NO: 277651 - DNA, 25 bp, Homo sapien
cgttagcgatgccctgcgcggtgac

SEQ ID NO: 277652 - DNA, 25 bp, Homo sapien
tcgttagcgatgccctgcgcggtga

SEQ ID NO: 277653 - DNA, 25 bp, Homo sapien
ctcgttagcgatgccctgcgcggtg

SEQ ID NO: 277654 - DNA, 25 bp, Homo sapien
gcgtcctcagcgatgccgtcggcga

SEQ ID NO: 277655 - DNA, 25 bp, Homo sapien
gcgacatcctcggtagcgatgccct

SEQ ID NO: 277656 - DNA, 25 bp, Homo sapien
ttagccacgccctggacggtgtggt

SEQ ID NO: 277657 - DNA, 25 bp, Homo sapien
ctgggcagcgacctcgttagccacg

SEQ ID NO: 277658 - DNA, 25 bp, Homo sapien
gccctggacttcaacctcgttagcg

SEQ ID NO: 277659 - DNA, 25 bp, Homo sapien
tggacttcaacctcgttagcgacgc

SEQ ID NO: 277660 - DNA, 25 bp, Homo sapien
ccttgtgtgcgatgccctggacttc

SEQ ID NO: 277661 - DNA, 25 bp, Homo sapien
tggacttcgacctcgttagcgacgc

SEQ ID NO: 277662 - DNA, 25 bp, Homo sapien
aagacgctgtggagggcgtcctcat

SEQ ID NO: 277663 - DNA, 25 bp, Homo sapien
atcctcatgtgctatgccctgggcg

SEQ ID NO: 277664 - DNA, 25 bp, Homo sapien
gcatcctcatgtgctatgccctggg

SEQ ID NO: 277665 - DNA, 25 bp, Homo sapien
atggagggcctcctggttaacgacg

SEQ ID NO: 277666 - DNA, 25 bp, Homo sapien
ctcgttagcgatgccctgggcggcg

SEQ ID NO: 277667 - DNA, 25 bp, Homo sapien
cgttagcgatgccctgggcggcgac

SEQ ID NO: 277668 - DNA, 25 bp, Homo sapien
tcgttagcgatgccctgggcggcga

SEQ ID NO: 277669 - DNA, 25 bp, Homo sapien
gtgacctctttagcgacgccctggg

SEQ ID NO: 277670 - DNA, 25 bp, Homo sapien
tggacttcaacctcgttagcgacgc

SEQ ID NO: 277671 - DNA, 25 bp, Homo sapien
ttagccacgccctggacggtgtggt

SEQ ID NO: 277672 - DNA, 25 bp, Homo sapien
cgtcggcgacatcctcggtagcgat

SEQ ID NO: 277673 - DNA, 25 bp, Homo sapien
cttagcgatcgcttgggcggcatcc

SEQ ID NO: 277674 - DNA, 25 bp, Homo sapien
tcggcgacatcctcggtagcgatgc

SEQ ID NO: 277675 - DNA, 25 bp, Homo sapien
tggacttcaacctcgttagcgacgc

SEQ ID NO: 277676 - DNA, 25 bp, Homo sapien
cgtcggcgacatcctcggtagcgat

SEQ ID NO: 277677 - DNA, 25 bp, Homo sapien
ctcgttagcgatgccctgggcggcg

SEQ ID NO: 277678 - DNA, 25 bp, Homo sapien
cgttagcgatgccctgggcggcgac

SEQ ID NO: 277679 - DNA, 25 bp, Homo sapien
tcgttagcgatgccctgggcggcga

SEQ ID NO: 277680 - DNA, 25 bp, Homo sapien
gcgtcctccttagccatgtgccggg

SEQ ID NO: 277681 - DNA, 25 bp, Homo sapien
ggcggcgtcctccttagccatgtgc

SEQ ID NO: 277682 - DNA, 25 bp, Homo sapien
ggcgtcctccttagccatgtgccgg

SEQ ID NO: 277683 - DNA, 25 bp, Homo sapien
cagtgtcctcgttagcgtgccttgt

SEQ ID NO: 277684 - DNA, 25 bp, Homo sapien
ctgtacagtgtcctcgttagcgtgc

SEQ ID NO: 277685 - DNA, 25 bp, Homo sapien
gtgtcctcgttagcgtgccttgtac

SEQ ID NO: 277686 - DNA, 25 bp, Homo sapien
tacagtgtcctcgttagcgtgcctt

SEQ ID NO: 277687 - DNA, 25 bp, Homo sapien
ttcttgcgatagttactagcgatgt

SEQ ID NO: 277688 - DNA, 25 bp, Homo sapien
gttcttgcgatagttactagcgatg

SEQ ID NO: 277689 - DNA, 25 bp, Homo sapien
tcttgcgatagttactagcgatgtc

SEQ ID NO: 277690 - DNA, 25 bp, Homo sapien
gcggatcagtgtagtgccgctgcat

SEQ ID NO: 277691 - DNA, 25 bp, Homo sapien
tccgtgtgcggatcagtgtagtgcc

SEQ ID NO: 277692 - DNA, 25 bp, Homo sapien
tcgctgtgtatctccgtgtgcggat

SEQ ID NO: 277693 - DNA, 25 bp, Homo sapien
ctcttgcgggcggatgtcgctgtgt

SEQ ID NO: 277694 - DNA, 25 bp, Homo sapien
caggcctaaggttccgcggccagga

SEQ ID NO: 277695 - DNA, 25 bp, Homo sapien
ggcaagtggacagaccggactccca

SEQ ID NO: 277696 - DNA, 25 bp, Homo sapien
aaaggactgcgactgccacaaagag

SEQ ID NO: 277697 - DNA, 25 bp, Homo sapien
acaggtcccgaagcggacagagacc

SEQ ID NO: 277698 - DNA, 25 bp, Homo sapien
ccgccacacgctcctcccggcgaac

SEQ ID NO: 277699 - DNA, 25 bp, Homo sapien
ccccgccacacgctcctcccggcga

SEQ ID NO: 277700 - DNA, 25 bp, Homo sapien
cccgccacacgctcctcccggcgaa

SEQ ID NO: 277701 - DNA, 25 bp, Homo sapien
atgctcggcgcactcacgccccggc

SEQ ID NO: 277702 - DNA, 25 bp, Homo sapien
gctcagccccatgctcggcgcactc

SEQ ID NO: 277703 - DNA, 25 bp, Homo sapien
ctgcacgatcacacgcacggagccc

SEQ ID NO: 277704 - DNA, 25 bp, Homo sapien
ggttcaggccggctccgcagatacc

SEQ ID NO: 277705 - DNA, 25 bp, Homo sapien
cctgaagagcgagtactgctcctgg

SEQ ID NO: 277706 - DNA, 25 bp, Homo sapien
tgaagagcgagtactgctcctgggg

SEQ ID NO: 277707 - DNA, 25 bp, Homo sapien
ctgaagagcgagtactgctcctggg

SEQ ID NO: 277708 - DNA, 25 bp, Homo sapien
tctcgggctccggggcagggatctc

SEQ ID NO: 277709 - DNA, 25 bp, Homo sapien
cgggctccggggcagggatctccat

SEQ ID NO: 277710 - DNA, 25 bp, Homo sapien
ctgtcttctcgggctccggggcagg

SEQ ID NO: 277711 - DNA, 25 bp, Homo sapien
tgtcttctcgggctccggggcaggg

SEQ ID NO: 277712 - DNA, 25 bp, Homo sapien
gaaactggcctgatctctctgagtg

SEQ ID NO: 277713 - DNA, 25 bp, Homo sapien
caatcaagcacgtctgagtgggaac

SEQ ID NO: 277714 - DNA, 25 bp, Homo sapien
gaaatgagtcaaggtcacggctacc

SEQ ID NO: 277715 - DNA, 25 bp, Homo sapien
tcatgacgaaaagagctgctacccc

SEQ ID NO: 277716 - DNA, 25 bp, Homo sapien
caacccgatatatcctcgagattct

SEQ ID NO: 277717 - DNA, 25 bp, Homo sapien
tatcctcgagattctctttcaggga

SEQ ID NO: 277718 - DNA, 25 bp, Homo sapien
cgatatatcctcgagattctctttc

SEQ ID NO: 277719 - DNA, 25 bp, Homo sapien
gaccccaacccgatatatcctcgag

SEQ ID NO: 277720 - DNA, 25 bp, Homo sapien
catgcattgcatttgactgtcaagt

SEQ ID NO: 277721 - DNA, 25 bp, Homo sapien
cacaatacacgttttgcagctgttt

SEQ ID NO: 277722 - DNA, 25 bp, Homo sapien
caagtttcttgaggactataaagca

SEQ ID NO: 277723 - DNA, 25 bp, Homo sapien
gtttctagctggctataatctgcca

SEQ ID NO: 277724 - DNA, 25 bp, Homo sapien
gacactgaccatgactgaattcggg

SEQ ID NO: 277725 - DNA, 25 bp, Homo sapien
gtctgaatagacaccacagggccct

SEQ ID NO: 277726 - DNA, 25 bp, Homo sapien
tcagcaagttctgtgccccaaggga

SEQ ID NO: 277727 - DNA, 25 bp, Homo sapien
cagtaacgcaaaaggatccgatccc

SEQ ID NO: 277728 - DNA, 25 bp, Homo sapien
atataggttctcacccaggactgat

SEQ ID NO: 277729 - DNA, 25 bp, Homo sapien
tataggttctcacccaggactgatt

SEQ ID NO: 277730 - DNA, 25 bp, Homo sapien
aatgacatataggttctcacccagg

SEQ ID NO: 277731 - DNA, 25 bp, Homo sapien
ctgaaatgacatataggttctcacc

SEQ ID NO: 277732 - DNA, 25 bp, Homo sapien
ccctctgaggggagtctagttgacc

SEQ ID NO: 277733 - DNA, 25 bp, Homo sapien
caaggccctctgaggggagtctagt

SEQ ID NO: 277734 - DNA, 25 bp, Homo sapien
gggagtctagttgaccccactcctc

SEQ ID NO: 277735 - DNA, 25 bp, Homo sapien
tgaggggagtctagttgaccccact

SEQ ID NO: 277736 - DNA, 25 bp, Homo sapien
caagaaggttctggtagttctccaa

SEQ ID NO: 277737 - DNA, 25 bp, Homo sapien
tatactctgaagaccccacgtgtgc

SEQ ID NO: 277738 - DNA, 25 bp, Homo sapien
catgatatatctggcaccagggccg

SEQ ID NO: 277739 - DNA, 25 bp, Homo sapien
cattgcttgaggactgttccagagc

SEQ ID NO: 277740 - DNA, 25 bp, Homo sapien
gaagtggacaccctctctgggaaca

SEQ ID NO: 277741 - DNA, 25 bp, Homo sapien
atggctcctcgcctcgttccagatg

SEQ ID NO: 277742 - DNA, 25 bp, Homo sapien
ctctggggacttccctctgcatgct

SEQ ID NO: 277743 - DNA, 25 bp, Homo sapien
gggacttccctctgcatgctccatg

SEQ ID NO: 277744 - DNA, 25 bp, Homo sapien
tcctcgcctcgttccagatgagaga

SEQ ID NO: 277745 - DNA, 25 bp, Homo sapien
ccacatccacaccaagtgagaggta

SEQ ID NO: 277746 - DNA, 25 bp, Homo sapien
ctgcagctcagctggtgttgctata

SEQ ID NO: 277747 - DNA, 25 bp, Homo sapien
cacatccacaccaagtgagaggtaa

SEQ ID NO: 277748 - DNA, 25 bp, Homo sapien
tgttgctatagtgtagaccacatcc

SEQ ID NO: 277749 - DNA, 25 bp, Homo sapien
caagcggaaacctggcctagaattc

SEQ ID NO: 277750 - DNA, 25 bp, Homo sapien
ggaaacctggcctagaattcagatt

SEQ ID NO: 277751 - DNA, 25 bp, Homo sapien
tgtgagcaagcggaaacctggccta

SEQ ID NO: 277752 - DNA, 25 bp, Homo sapien
agcaagcggaaacctggcctagaat

SEQ ID NO: 277753 - DNA, 25 bp, Homo sapien
gctcctgggccggttcttctttgca

SEQ ID NO: 277754 - DNA, 25 bp, Homo sapien
cctgggccggttcttctttgcaaat

SEQ ID NO: 277755 - DNA, 25 bp, Homo sapien
tgttgagagggcaccgccttcagct

SEQ ID NO: 277756 - DNA, 25 bp, Homo sapien
ctgctgttgagagggcaccgccttc

SEQ ID NO: 277757 - DNA, 25 bp, Homo sapien
agggacgtcccagaccatggcaggt

SEQ ID NO: 277758 - DNA, 25 bp, Homo sapien
ctacagggacgtcccagaccatggc

SEQ ID NO: 277759 - DNA, 25 bp, Homo sapien
acgtcccagaccatggcaggtgcgg

SEQ ID NO: 277760 - DNA, 25 bp, Homo sapien
ggacgtcccagaccatggcaggtgc

SEQ ID NO: 277761 - DNA, 25 bp, Homo sapien
tttctggctcacttggcgtggaggc

SEQ ID NO: 277762 - DNA, 25 bp, Homo sapien
cctcgggaacgcgttgctgggcgaa

SEQ ID NO: 277763 - DNA, 25 bp, Homo sapien
gtggaggcgttttcccctgcacaca

SEQ ID NO: 277764 - DNA, 25 bp, Homo sapien
gccctcagtggcctggacgttcttg

SEQ ID NO: 277765 - DNA, 25 bp, Homo sapien
cccggcgcccgccccgcgctgccgg

SEQ ID NO: 277766 - DNA, 25 bp, Homo sapien
cgcccgccccgcgctgccggcgcac

SEQ ID NO: 277767 - DNA, 25 bp, Homo sapien
ccggcgcccgccccgcgctgccggc

SEQ ID NO: 277768 - DNA, 25 bp, Homo sapien
ggcgcccgccccgcgctgccggcgc

SEQ ID NO: 277769 - DNA, 25 bp, Homo sapien
cgcgagcggctgttgaaggccttct

SEQ ID NO: 277770 - DNA, 25 bp, Homo sapien
atcgcacttgtaagccttctcccgg

SEQ ID NO: 277771 - DNA, 25 bp, Homo sapien
ggatcttctcatgcacggtgaggga

SEQ ID NO: 277772 - DNA, 25 bp, Homo sapien
gcagctgaaggccttctcgcaggcg

SEQ ID NO: 277773 - DNA, 25 bp, Homo sapien
tctccccggagtggattttctgatg

SEQ ID NO: 277774 - DNA, 25 bp, Homo sapien
caacactggctgcagtcgaagggct

SEQ ID NO: 277775 - DNA, 25 bp, Homo sapien
tgcgccggtgcacgatgaggtaggc

SEQ ID NO: 277776 - DNA, 25 bp, Homo sapien
gatgtttaatgagacagtggttctg

SEQ ID NO: 277777 - DNA, 25 bp, Homo sapien
tgaggtgcgagctccagttgaacat

SEQ ID NO: 277778 - DNA, 25 bp, Homo sapien
tttgccacatccagcgcgtcgatgg

SEQ ID NO: 277779 - DNA, 25 bp, Homo sapien
ggctgccaggcacgtagtatgtgct

SEQ ID NO: 277780 - DNA, 25 bp, Homo sapien
tgtttgttgaactggatggccaagg

SEQ ID NO: 277781 - DNA, 25 bp, Homo sapien
gaaaacaggtggcaagactacctca

SEQ ID NO: 277782 - DNA, 25 bp, Homo sapien
agaaagcagctactgacaccaaagc

SEQ ID NO: 277783 - DNA, 25 bp, Homo sapien
gggtgataaggcaaggctcccacac

SEQ ID NO: 277784 - DNA, 25 bp, Homo sapien
caccctggcatgcagacctgatggg

SEQ ID NO: 277785 - DNA, 25 bp, Homo sapien
aaactcctgattaaagccgtgtcag

SEQ ID NO: 277786 - DNA, 25 bp, Homo sapien
ccgtccgaggatacaacagttgata

SEQ ID NO: 277787 - DNA, 25 bp, Homo sapien
gtcaggagcccgtccgaggatacaa

SEQ ID NO: 277788 - DNA, 25 bp, Homo sapien
caacagttgatatacctccttttaa

SEQ ID NO: 277789 - DNA, 25 bp, Homo sapien
ttttccagggtttgcaaaacagctc

SEQ ID NO: 277790 - DNA, 25 bp, Homo sapien
aaacagctccatgtgggaccaccat

SEQ ID NO: 277791 - DNA, 25 bp, Homo sapien
gaatgcactgggcacctgcctggta

SEQ ID NO: 277792 - DNA, 25 bp, Homo sapien
tataaagtatgatcaccaagagggc

SEQ ID NO: 277793 - DNA, 25 bp, Homo sapien
ggatcacttgagcccacaagttcga

SEQ ID NO: 277794 - DNA, 25 bp, Homo sapien
tgagctgtgactgcggcaccacact

SEQ ID NO: 277795 - DNA, 25 bp, Homo sapien
cccagctactcaggaggctgaggca

SEQ ID NO: 277796 - DNA, 25 bp, Homo sapien
aggcatggtggagtgtgtctgtagt

SEQ ID NO: 277797 - DNA, 25 bp, Homo sapien
aaatgattaaagtaggctgggcatg

SEQ ID NO: 277798 - DNA, 25 bp, Homo sapien
ggctgcagtgatctgcaatggcacc

SEQ ID NO: 277799 - DNA, 25 bp, Homo sapien
gcagtgatctgcaatggcaccactg

SEQ ID NO: 277800 - DNA, 25 bp, Homo sapien
gtgatctgcaatggcaccactgtac

SEQ ID NO: 277801 - DNA, 25 bp, Homo sapien
tctatcttcgggtgaggtcattgtc

SEQ ID NO: 277802 - DNA, 25 bp, Homo sapien
gctgaggtcactcacctggtaaaga

SEQ ID NO: 277803 - DNA, 25 bp, Homo sapien
tggacaggggtcatctatcttcggg

SEQ ID NO: 277804 - DNA, 25 bp, Homo sapien
aggtcactcacctggtaaagaagct

SEQ ID NO: 277805 - DNA, 25 bp, Homo sapien
ccagacagcgtctcattggccaaag

SEQ ID NO: 277806 - DNA, 25 bp, Homo sapien
cattggccgagttatggagcgctcc

SEQ ID NO: 277807 - DNA, 25 bp, Homo sapien
taccttctcattggttgcagccaga

SEQ ID NO: 277808 - DNA, 25 bp, Homo sapien
tcttactggccaggagtggacttgg

SEQ ID NO: 277809 - DNA, 25 bp, Homo sapien
gaaacggacgcccagcgacaaatcg

SEQ ID NO: 277810 - DNA, 25 bp, Homo sapien
ccagcaagaggaaacggacgcccag

SEQ ID NO: 277811 - DNA, 25 bp, Homo sapien
aatcggcgcatacggtcgaacacgg

SEQ ID NO: 277812 - DNA, 25 bp, Homo sapien
ccagcgacaaatcggcgcatacggt

SEQ ID NO: 277813 - DNA, 25 bp, Homo sapien
ccaccaagcctaaggtgtcctggat

SEQ ID NO: 277814 - DNA, 25 bp, Homo sapien
gagcgcaggaaaccgccgccacctg

SEQ ID NO: 277815 - DNA, 25 bp, Homo sapien
ttgggggcctgtcgctgtcgccatc

SEQ ID NO: 277816 - DNA, 25 bp, Homo sapien
tgtcgccatcgcccgagcgcaggaa

SEQ ID NO: 277817 - DNA, 25 bp, Homo sapien
accacgacctggataacacactcaa

SEQ ID NO: 277818 - DNA, 25 bp, Homo sapien
ccacgacctggataacacactcaac

SEQ ID NO: 277819 - DNA, 25 bp, Homo sapien
cccaccacgacctggataacacact

SEQ ID NO: 277820 - DNA, 25 bp, Homo sapien
caccacgacctggataacacactca

SEQ ID NO: 277821 - DNA, 25 bp, Homo sapien
cttcgcatcgatgccgccgccgcgg

SEQ ID NO: 277822 - DNA, 25 bp, Homo sapien
ccatctgcttcgcatcgatgccgcc

SEQ ID NO: 277823 - DNA, 25 bp, Homo sapien
ctgcttcgcatcgatgccgccgccg

SEQ ID NO: 277824 - DNA, 25 bp, Homo sapien
catctgcttcgcatcgatgccgccg

SEQ ID NO: 277825 - DNA, 25 bp, Homo sapien
gctgaggcacgtggtagccctcttt

SEQ ID NO: 277826 - DNA, 25 bp, Homo sapien
ggattacgtcactgcaggaactgct

SEQ ID NO: 277827 - DNA, 25 bp, Homo sapien
tctgtgataaaaagacccctcccgc

SEQ ID NO: 277828 - DNA, 25 bp, Homo sapien
agcagagatgcatcagctcgcctgg

SEQ ID NO: 277829 - DNA, 25 bp, Homo sapien
tgctacagctgcacgtctggacagt

SEQ ID NO: 277830 - DNA, 25 bp, Homo sapien
gatctatgtgttaggtggccgctca

SEQ ID NO: 277831 - DNA, 25 bp, Homo sapien
tgacaactccagtgaggactaggct

SEQ ID NO: 277832 - DNA, 25 bp, Homo sapien
tttacgatgtggagaaggactgctg

SEQ ID NO: 277833 - DNA, 25 bp, Homo sapien
gagacacactgctacgatccaggca

SEQ ID NO: 277834 - DNA, 25 bp, Homo sapien
tggcaaccctcctcaacaagctgta

SEQ ID NO: 277835 - DNA, 25 bp, Homo sapien
acaacgatgccggatacaggaggga

SEQ ID NO: 277836 - DNA, 25 bp, Homo sapien
gagtccacagtgttcactcttggca

SEQ ID NO: 277837 - DNA, 25 bp, Homo sapien
aaaatcttgaggatctagctagggc

SEQ ID NO: 277838 - DNA, 25 bp, Homo sapien
tagacttgaccccaaaagcatgagc

SEQ ID NO: 277839 - DNA, 25 bp, Homo sapien
gaaggtattgctcttcccaacggag

SEQ ID NO: 277840 - DNA, 25 bp, Homo sapien
gccacgcgacgtgatgaccagaaga

SEQ ID NO: 277841 - DNA, 25 bp, Homo sapien
atttccatggtagaggcagtcaaac

SEQ ID NO: 277842 - DNA, 25 bp, Homo sapien
aggatccacctgaatttcatcgcac

SEQ ID NO: 277843 - DNA, 25 bp, Homo sapien
aaaccatagtggatgaaaggctcag

SEQ ID NO: 277844 - DNA, 25 bp, Homo sapien
taaaccatagtggatgaaaggctca

SEQ ID NO: 277845 - DNA, 25 bp, Homo sapien
ccacctgaatttcatcgcacttgat

SEQ ID NO: 277846 - DNA, 25 bp, Homo sapien
ggcgagcccttgtcctgggtccctg

SEQ ID NO: 277847 - DNA, 25 bp, Homo sapien
ccttgtcctgggtccctgcatctga

SEQ ID NO: 277848 - DNA, 25 bp, Homo sapien
cttgtcctgggtccctgcatctgac

SEQ ID NO: 277849 - DNA, 25 bp, Homo sapien
ctaggcgagcccttgtcctgggtcc

SEQ ID NO: 277850 - DNA, 25 bp, Homo sapien
ttctctactgcatcgatgggagact

SEQ ID NO: 277851 - DNA, 25 bp, Homo sapien
tttctctactgcatcgatgggagac

SEQ ID NO: 277852 - DNA, 25 bp, Homo sapien
ggtcatgtagggacactgaggccac

SEQ ID NO: 277853 - DNA, 25 bp, Homo sapien
cactgaggccacataacatctctta

SEQ ID NO: 277854 - DNA, 25 bp, Homo sapien
tcacagccaccaatgacgtagatct

SEQ ID NO: 277855 - DNA, 25 bp, Homo sapien
ccaatgacgtagatctggtcatgta

SEQ ID NO: 277856 - DNA, 25 bp, Homo sapien
gtgtagtctagacattccactgaac

SEQ ID NO: 277857 - DNA, 25 bp, Homo sapien
catctgctgtgtagtctagacattc

SEQ ID NO: 277858 - DNA, 25 bp, Homo sapien
gctgtgtagtctagacattccactg

SEQ ID NO: 277859 - DNA, 25 bp, Homo sapien
tctgctgtgtagtctagacattcca

SEQ ID NO: 277860 - DNA, 25 bp, Homo sapien
tagatcaaatctcccagggtggtgg

SEQ ID NO: 277861 - DNA, 25 bp, Homo sapien
gagacatagatcaaatctcccaggg

SEQ ID NO: 277862 - DNA, 25 bp, Homo sapien
ctccagagacatagatcaaatctcc

SEQ ID NO: 277863 - DNA, 25 bp, Homo sapien
catagatcaaatctcccagggtggt

SEQ ID NO: 277864 - DNA, 25 bp, Homo sapien
cctcctagacagtggatcactccac

SEQ ID NO: 277865 - DNA, 25 bp, Homo sapien
tcctcctagacagtggatcactcca

SEQ ID NO: 277866 - DNA, 25 bp, Homo sapien
atcctcctagacagtggatcactcc

SEQ ID NO: 277867 - DNA, 25 bp, Homo sapien
tgcaattgcatagagtctcccccga

SEQ ID NO: 277868 - DNA, 25 bp, Homo sapien
tgcatagagtctcccccgaagcact

SEQ ID NO: 277869 - DNA, 25 bp, Homo sapien
gcaattgcatagagtctcccccgaa

SEQ ID NO: 277870 - DNA, 25 bp, Homo sapien
aattgcatagagtctcccccgaagc

SEQ ID NO: 277871 - DNA, 25 bp, Homo sapien
tcccagctgttgatgatagggttgt

SEQ ID NO: 277872 - DNA, 25 bp, Homo sapien
gttgatgatagggttgtaacattca

SEQ ID NO: 277873 - DNA, 25 bp, Homo sapien
tgatgatagggttgtaacattcaat

SEQ ID NO: 277874 - DNA, 25 bp, Homo sapien
cagctgttgatgatagggttgtaac

SEQ ID NO: 277875 - DNA, 25 bp, Homo sapien
gcagtacaaaccactccttggcaga

SEQ ID NO: 277876 - DNA, 25 bp, Homo sapien
gaatggaactgtgttgcccctagct

SEQ ID NO: 277877 - DNA, 25 bp, Homo sapien
cactggactggtcactagctctgga

SEQ ID NO: 277878 - DNA, 25 bp, Homo sapien
gaatttcactccatgacacagagga

SEQ ID NO: 277879 - DNA, 25 bp, Homo sapien
tggaaggacactccgtacccccatc

SEQ ID NO: 277880 - DNA, 25 bp, Homo sapien
ttctgtctcttgggcagctgtgagc

SEQ ID NO: 277881 - DNA, 25 bp, Homo sapien
gaagcctctttggaaggacactccg

SEQ ID NO: 277882 - DNA, 25 bp, Homo sapien
gcctctttggaaggacactccgtac

SEQ ID NO: 277883 - DNA, 25 bp, Homo sapien
ggggggacagagacgaatgagtttg

SEQ ID NO: 277884 - DNA, 25 bp, Homo sapien
cagagacgaatgagtttgatctgtt

SEQ ID NO: 277885 - DNA, 25 bp, Homo sapien
tgaaataactcagctaactttggcc

SEQ ID NO: 277886 - DNA, 25 bp, Homo sapien
aaggggggacagagacgaatgagtt

SEQ ID NO: 277887 - DNA, 25 bp, Homo sapien
caggctgaagattaagttcatcacc

SEQ ID NO: 277888 - DNA, 25 bp, Homo sapien
gactttccagagtgatgcctttttg

SEQ ID NO: 277889 - DNA, 25 bp, Homo sapien
aaaatctttggactttccagagtga

SEQ ID NO: 277890 - DNA, 25 bp, Homo sapien
ccgtcaatgacagaccagaccacat

SEQ ID NO: 277891 - DNA, 25 bp, Homo sapien
aaggaggccctcttgactctgcggt

SEQ ID NO: 277892 - DNA, 25 bp, Homo sapien
ggaggtcaccctcagagaaggaggc

SEQ ID NO: 277893 - DNA, 25 bp, Homo sapien
ctattggggtagttgtggaggtcac

SEQ ID NO: 277894 - DNA, 25 bp, Homo sapien
gccctcttgactctgcggtggtcat

SEQ ID NO: 277895 - DNA, 25 bp, Homo sapien
gggccggcctgacgagcctcagttc

SEQ ID NO: 277896 - DNA, 25 bp, Homo sapien
gggcggccttgcaacaggcgggcga

SEQ ID NO: 277897 - DNA, 25 bp, Homo sapien
gcaggtccgaatgcggccttcctgg

SEQ ID NO: 277898 - DNA, 25 bp, Homo sapien
ctcagttccctcgatcgggcccggg

SEQ ID NO: 277899 - DNA, 25 bp, Homo sapien
gaaagagtcaatggattcagacggg

SEQ ID NO: 277900 - DNA, 25 bp, Homo sapien
ctgtcctccgcagagcgccggagtg

SEQ ID NO: 277901 - DNA, 25 bp, Homo sapien
tcgctcattcgttggttcggccccg

SEQ ID NO: 277902 - DNA, 25 bp, Homo sapien
tgagccttggcgatcgctgctgtcc

SEQ ID NO: 277903 - DNA, 25 bp, Homo sapien
ggtgcgcgccaccacgaccggctag

SEQ ID NO: 277904 - DNA, 25 bp, Homo sapien
ttttttgtgtgtgttttggtagaga

SEQ ID NO: 277905 - DNA, 25 bp, Homo sapien
tttgtgtgtgttttggtagagatgg

SEQ ID NO: 277906 - DNA, 25 bp, Homo sapien
gtgcgcgccaccacgaccggctagt

SEQ ID NO: 277907 - DNA, 25 bp, Homo sapien
actggagaaaatatcgaaggtggca

SEQ ID NO: 277908 - DNA, 25 bp, Homo sapien
gaagttgtcctttatccttagcaaa

SEQ ID NO: 277909 - DNA, 25 bp, Homo sapien
gagtattcatttgcccagtttccaa

SEQ ID NO: 277910 - DNA, 25 bp, Homo sapien
gccctaatgtttaagtgactgaagt

SEQ ID NO: 277911 - DNA, 25 bp, Homo sapien
ttgtttgactagtccatcaattttc

SEQ ID NO: 277912 - DNA, 25 bp, Homo sapien
gtttgactagtccatcaattttctt

SEQ ID NO: 277913 - DNA, 25 bp, Homo sapien
tgactagtccatcaattttcttttt

SEQ ID NO: 277914 - DNA, 25 bp, Homo sapien
acttgtttgactagtccatcaattt

SEQ ID NO: 277915 - DNA, 25 bp, Homo sapien
tcaatggccacatatttcctggaca

SEQ ID NO: 277916 - DNA, 25 bp, Homo sapien
tgctttggcactcagtccctgggag

SEQ ID NO: 277917 - DNA, 25 bp, Homo sapien
gccatgtctctagcctgcgggttcc

SEQ ID NO: 277918 - DNA, 25 bp, Homo sapien
caaggctggttccactcaatggcca

SEQ ID NO: 277919 - DNA, 25 bp, Homo sapien
aattgagtgactattccctttggta

SEQ ID NO: 277920 - DNA, 25 bp, Homo sapien
tcttgacactgtagaccctcctggg

SEQ ID NO: 277921 - DNA, 25 bp, Homo sapien
tccccgcattgggttggtgcccagg

SEQ ID NO: 277922 - DNA, 25 bp, Homo sapien
ggttgatcctgaagtggacttgccc

SEQ ID NO: 277923 - DNA, 25 bp, Homo sapien
gtctcgcgcacaggcttgtgggaaa

SEQ ID NO: 277924 - DNA, 25 bp, Homo sapien
cgccgcccgtatcccgcttggccgc

SEQ ID NO: 277925 - DNA, 25 bp, Homo sapien
aagccgtccgcagtgcctcggccga

SEQ ID NO: 277926 - DNA, 25 bp, Homo sapien
acagagccaggcccaaacccggaag

SEQ ID NO: 277927 - DNA, 25 bp, Homo sapien
cttctgccggaaggcggtgctccgc

SEQ ID NO: 277928 - DNA, 25 bp, Homo sapien
gcggtgctccgccagtcggtctctt

SEQ ID NO: 277929 - DNA, 25 bp, Homo sapien
cagcttctgccggaaggcggtgctc

SEQ ID NO: 277930 - DNA, 25 bp, Homo sapien
cagtcggtctcttgcccggaaacgt

SEQ ID NO: 277931 - DNA, 25 bp, Homo sapien
tctcctccagaaacgacgatcgctt

SEQ ID NO: 277932 - DNA, 25 bp, Homo sapien
ttcaccgttgatgcgcttttctgga

SEQ ID NO: 277933 - DNA, 25 bp, Homo sapien
taacagaaacaagcagtcggtggtg

SEQ ID NO: 277934 - DNA, 25 bp, Homo sapien
aagagaaaccatgaagcacccagcc

SEQ ID NO: 277935 - DNA, 25 bp, Homo sapien
cagcatcacaaacaccagtaatagc

SEQ ID NO: 277936 - DNA, 25 bp, Homo sapien
tagctggaagacctctggtcagggt

SEQ ID NO: 277937 - DNA, 25 bp, Homo sapien
cagcatgggtccttgactggccaca

SEQ ID NO: 277938 - DNA, 25 bp, Homo sapien
cccagcatgggtccttgactggcca

SEQ ID NO: 277939 - DNA, 25 bp, Homo sapien
accctcatcaccatcaggctttgaa

SEQ ID NO: 277940 - DNA, 25 bp, Homo sapien
aagctcccactgttggtctgtttca

SEQ ID NO: 277941 - DNA, 25 bp, Homo sapien
ccactcctgagacaatgatgcggca

SEQ ID NO: 277942 - DNA, 25 bp, Homo sapien
gtctgtttcacaaatcccactcctg

SEQ ID NO: 277943 - DNA, 25 bp, Homo sapien
tagcagactcatcacttcctcaaag

SEQ ID NO: 277944 - DNA, 25 bp, Homo sapien
gaaccctgagttctacttcacaaca

SEQ ID NO: 277945 - DNA, 25 bp, Homo sapien
tctacttcacaacaggggctctgtc

SEQ ID NO: 277946 - DNA, 25 bp, Homo sapien
ggcttctgaggacgaaccctgagtt

SEQ ID NO: 277947 - DNA, 25 bp, Homo sapien
tttaacttctaggtgcacagcccag

SEQ ID NO: 277948 - DNA, 25 bp, Homo sapien
gagtcctccatggaataacacgtca

SEQ ID NO: 277949 - DNA, 25 bp, Homo sapien
tttaccagaagacatgaccaaagcc

SEQ ID NO: 277950 - DNA, 25 bp, Homo sapien
cacagcccagagaattaagtgcata

SEQ ID NO: 277951 - DNA, 25 bp, Homo sapien
taactgtactgagaggcaaccggaa

SEQ ID NO: 277952 - DNA, 25 bp, Homo sapien
ggaacttcccaagtagagcaggact

SEQ ID NO: 277953 - DNA, 25 bp, Homo sapien
gaagacaacagtcccagtctgggca

SEQ ID NO: 277954 - DNA, 25 bp, Homo sapien
caagggcagcgcagtgtaacatcat

SEQ ID NO: 277955 - DNA, 25 bp, Homo sapien
aaaaattgaggaaatcacttagaga

SEQ ID NO: 277956 - DNA, 25 bp, Homo sapien
tgaggaaatcacttagagaggagag

SEQ ID NO: 277957 - DNA, 25 bp, Homo sapien
aattgaggaaatcacttagagagga

SEQ ID NO: 277958 - DNA, 25 bp, Homo sapien
ttgaggaaatcacttagagaggaga

SEQ ID NO: 277959 - DNA, 25 bp, Homo sapien
gaaaacatggctctccatatccttg

SEQ ID NO: 277960 - DNA, 25 bp, Homo sapien
aggaaaacatggctctccatatcct

SEQ ID NO: 277961 - DNA, 25 bp, Homo sapien
ggaaaacatggctctccatatcctt

SEQ ID NO: 277962 - DNA, 25 bp, Homo sapien
aaacgtatccgtagtacagagccca

SEQ ID NO: 277963 - DNA, 25 bp, Homo sapien
cctgtggcgagttctagataagcat

SEQ ID NO: 277964 - DNA, 25 bp, Homo sapien
cagtcacacgtgtccatagtacaga

SEQ ID NO: 277965 - DNA, 25 bp, Homo sapien
cacacacagattaaaggaggtggtc

SEQ ID NO: 277966 - DNA, 25 bp, Homo sapien
gcttgggagacatcagagcccatgg

SEQ ID NO: 277967 - DNA, 25 bp, Homo sapien
gaaaagaccctcgtttggatcctga

SEQ ID NO: 277968 - DNA, 25 bp, Homo sapien
tctgctctccgatttagcacccagt

SEQ ID NO: 277969 - DNA, 25 bp, Homo sapien
cccagttcataagaaggagggggca

SEQ ID NO: 277970 - DNA, 25 bp, Homo sapien
gatgaagaagcgcagtcatcggact

SEQ ID NO: 277971 - DNA, 25 bp, Homo sapien
accagatgaagaagcgcagtcatcg

SEQ ID NO: 277972 - DNA, 25 bp, Homo sapien
gaagaagcgcagtcatcggactccc

SEQ ID NO: 277973 - DNA, 25 bp, Homo sapien
ccagatgaagaagcgcagtcatcgg

SEQ ID NO: 277974 - DNA, 25 bp, Homo sapien
gaatgtctcgaaaatggataatgag

SEQ ID NO: 277975 - DNA, 25 bp, Homo sapien
cctggccacgagagaaaggtattcg

SEQ ID NO: 277976 - DNA, 25 bp, Homo sapien
tcgaaaatggataatgagcctggcc

SEQ ID NO: 277977 - DNA, 25 bp, Homo sapien
aatgagcctggccacgagagaaagg

SEQ ID NO: 277978 - DNA, 25 bp, Homo sapien
tctggagtcaaatgcaaggcagtga

SEQ ID NO: 277979 - DNA, 25 bp, Homo sapien
tgagcaagtgaagcagcaacccgtt

SEQ ID NO: 277980 - DNA, 25 bp, Homo sapien
gaagcaagtgaggtgacacagacct

SEQ ID NO: 277981 - DNA, 25 bp, Homo sapien
ccgtttagaccactttgaggacagc

SEQ ID NO: 277982 - DNA, 25 bp, Homo sapien
ggaagccagtccagctgaccccagt

SEQ ID NO: 277983 - DNA, 25 bp, Homo sapien
gcccagcggagaacttctgtagcag

SEQ ID NO: 277984 - DNA, 25 bp, Homo sapien
agtgcccagcggagaacttctgtag

SEQ ID NO: 277985 - DNA, 25 bp, Homo sapien
cagtgcccagcggagaacttctgta

SEQ ID NO: 277986 - DNA, 25 bp, Homo sapien
cactgacggaagcttgagatttctt

SEQ ID NO: 277987 - DNA, 25 bp, Homo sapien
gacggaagcttgagatttcttgtta

SEQ ID NO: 277988 - DNA, 25 bp, Homo sapien
ctgacggaagcttgagatttcttgt

SEQ ID NO: 277989 - DNA, 25 bp, Homo sapien
acggaagcttgagatttcttgttat

SEQ ID NO: 277990 - DNA, 25 bp, Homo sapien
tgagcgtacaaagcacgatgggccc

SEQ ID NO: 277991 - DNA, 25 bp, Homo sapien
cagagcactgaggagaaatgtccca

SEQ ID NO: 277992 - DNA, 25 bp, Homo sapien
tctgagcaagcggtaacacagtggc

SEQ ID NO: 277993 - DNA, 25 bp, Homo sapien
gactgaccatggctcaaagggcgta

SEQ ID NO: 277994 - DNA, 25 bp, Homo sapien
cgggccccgaggaggcatgccaatt

SEQ ID NO: 277995 - DNA, 25 bp, Homo sapien
ggaggcatgccaattccagcggctc

SEQ ID NO: 277996 - DNA, 25 bp, Homo sapien
aggctctggagtgcattcataggat

SEQ ID NO: 277997 - DNA, 25 bp, Homo sapien
agcaggtccgccagtcaggctctgg

SEQ ID NO: 277998 - DNA, 25 bp, Homo sapien
ttgccgtagacacgacagccatgct

SEQ ID NO: 277999 - DNA, 25 bp, Homo sapien
tggagttgccgtagacacgacagcc

SEQ ID NO: 278000 - DNA, 25 bp, Homo sapien
ccgtagacacgacagccatgctgtg

SEQ ID NO: 278001 - DNA, 25 bp, Homo sapien
tctgtggagttgccgtagacacgac

SEQ ID NO: 278002 - DNA, 25 bp, Homo sapien
ctctgaagtgggatgacaaggcaac

SEQ ID NO: 278003 - DNA, 25 bp, Homo sapien
gcttgggacgaagaaccaggcagat

SEQ ID NO: 278004 - DNA, 25 bp, Homo sapien
gacaaggaacttgagccggcacttc

SEQ ID NO: 278005 - DNA, 25 bp, Homo sapien
ggcgtgggcaggatatcaagcttca

SEQ ID NO: 278006 - DNA, 25 bp, Homo sapien
ggctgccgctggaatctgaacgttc

SEQ ID NO: 278007 - DNA, 25 bp, Homo sapien
gaacgttccatttaccacagacaga

SEQ ID NO: 278008 - DNA, 25 bp, Homo sapien
tacgagttcgcccatgtcgtggcat

SEQ ID NO: 278009 - DNA, 25 bp, Homo sapien
tacgaatggcatcgaacatgtgctc

SEQ ID NO: 278010 - DNA, 25 bp, Homo sapien
tgctgcagcgccacctgctggagct

SEQ ID NO: 278011 - DNA, 25 bp, Homo sapien
gcgccacctgctggagctgcagctg

SEQ ID NO: 278012 - DNA, 25 bp, Homo sapien
tgcagcgccacctgctggagctgca

SEQ ID NO: 278013 - DNA, 25 bp, Homo sapien
cagcgccacctgctggagctgcagc

SEQ ID NO: 278014 - DNA, 25 bp, Homo sapien
ctgctgctgcactactgcttggaac

SEQ ID NO: 278015 - DNA, 25 bp, Homo sapien
gctgcactactgcttggaactgctg

SEQ ID NO: 278016 - DNA, 25 bp, Homo sapien
gctgctgcactactgcttggaactg

SEQ ID NO: 278017 - DNA, 25 bp, Homo sapien
tgctgcactactgcttggaactgct

SEQ ID NO: 278018 - DNA, 25 bp, Homo sapien
ttttgagaagcccatggaaaagggc

SEQ ID NO: 278019 - DNA, 25 bp, Homo sapien
agaagcccatggaaaagggcaggca

SEQ ID NO: 278020 - DNA, 25 bp, Homo sapien
aagggcaggcacacgtgtcaagaga

SEQ ID NO: 278021 - DNA, 25 bp, Homo sapien
actgggcccggccttgtcccagact

SEQ ID NO: 278022 - DNA, 25 bp, Homo sapien
ttataggtgtacgccaccatgtcca

SEQ ID NO: 278023 - DNA, 25 bp, Homo sapien
attataggtgtacgccaccatgtcc

SEQ ID NO: 278024 - DNA, 25 bp, Homo sapien
ctgtgctattcgctgcagctgctgt

SEQ ID NO: 278025 - DNA, 25 bp, Homo sapien
gcagctgtgctattcgctgcagctg

SEQ ID NO: 278026 - DNA, 25 bp, Homo sapien
cagctgtgctattcgctgcagctgc

SEQ ID NO: 278027 - DNA, 25 bp, Homo sapien
tgtgctattcgctgcagctgctgtt

SEQ ID NO: 278028 - DNA, 25 bp, Homo sapien
gcatcggtggctgctgaattggtgg

SEQ ID NO: 278029 - DNA, 25 bp, Homo sapien
catcggtggctgctgaattggtggc

SEQ ID NO: 278030 - DNA, 25 bp, Homo sapien
tggctgctgcatcggtggctgctga

SEQ ID NO: 278031 - DNA, 25 bp, Homo sapien
tgctgcatcggtggctgctgaattg

SEQ ID NO: 278032 - DNA, 25 bp, Homo sapien
accaaaggctgggtctgcgactgtg

SEQ ID NO: 278033 - DNA, 25 bp, Homo sapien
cctgtgacaccaaaggctgggtctg

SEQ ID NO: 278034 - DNA, 25 bp, Homo sapien
tggttgggtatacaacatttgtcca

SEQ ID NO: 278035 - DNA, 25 bp, Homo sapien
cgactgtggcgggagttgtgatggt

SEQ ID NO: 278036 - DNA, 25 bp, Homo sapien
actccgggagccaccatctgggcag

SEQ ID NO: 278037 - DNA, 25 bp, Homo sapien
tgctgcaccaccatcggagctcgga

SEQ ID NO: 278038 - DNA, 25 bp, Homo sapien
tccgggagccaccatctgggcagcc

SEQ ID NO: 278039 - DNA, 25 bp, Homo sapien
gggagccaccatctgggcagcctga

SEQ ID NO: 278040 - DNA, 25 bp, Homo sapien
aacagaggatcgatggtccaaagag

SEQ ID NO: 278041 - DNA, 25 bp, Homo sapien
tgtgccaccactaagctgactctga

SEQ ID NO: 278042 - DNA, 25 bp, Homo sapien
aagtgaggtcctgaacagaggatcg

SEQ ID NO: 278043 - DNA, 25 bp, Homo sapien
cactgggtgggcagtcactatgtgc

SEQ ID NO: 278044 - DNA, 25 bp, Homo sapien
ggtggccaaggcttcagtacagtag

SEQ ID NO: 278045 - DNA, 25 bp, Homo sapien
tatgtttactggatcagatgagcca

SEQ ID NO: 278046 - DNA, 25 bp, Homo sapien
cagaagggtccagcaaaaagagaga

SEQ ID NO: 278047 - DNA, 25 bp, Homo sapien
gatgagccaggcagctatcaacatt

SEQ ID NO: 278048 - DNA, 25 bp, Homo sapien
tgagagtcgatttaccaccacctgc

SEQ ID NO: 278049 - DNA, 25 bp, Homo sapien
tagaacaaaacacgccaggctcaga

SEQ ID NO: 278050 - DNA, 25 bp, Homo sapien
gacaggtgccagtaacagagctcca

SEQ ID NO: 278051 - DNA, 25 bp, Homo sapien
aacaacacatctcatggtgggaggc

SEQ ID NO: 278052 - DNA, 25 bp, Homo sapien
tgatcgcaacaaagaaactcagtgc

SEQ ID NO: 278053 - DNA, 25 bp, Homo sapien
gagagggcacgtgtagcctctgcaa

SEQ ID NO: 278054 - DNA, 25 bp, Homo sapien
tgtagcctctgcaagaaggagcacc

SEQ ID NO: 278055 - DNA, 25 bp, Homo sapien
gggacaacagacaaggtgatcgcaa

SEQ ID NO: 278056 - DNA, 25 bp, Homo sapien
cttgggccaaggcttccgtgatcat

SEQ ID NO: 278057 - DNA, 25 bp, Homo sapien
gatggagcttgacgggatggcggac

SEQ ID NO: 278058 - DNA, 25 bp, Homo sapien
acacagcggtggtaggcgggaaccg

SEQ ID NO: 278059 - DNA, 25 bp, Homo sapien
gcgggaaccgggctcttatgtgcat

SEQ ID NO: 278060 - DNA, 25 bp, Homo sapien
gatggcggacacagcggtggtaggc

SEQ ID NO: 278061 - DNA, 25 bp, Homo sapien
tgagccctcgatcctgacttggtgg

SEQ ID NO: 278062 - DNA, 25 bp, Homo sapien
ccagtggatactgtgccagaggcta

SEQ ID NO: 278063 - DNA, 25 bp, Homo sapien
caggagtgcccagtaaacaagaagg

SEQ ID NO: 278064 - DNA, 25 bp, Homo sapien
gcagacttaatctaagggccaggga

SEQ ID NO: 278065 - DNA, 25 bp, Homo sapien
tcttgcagctaacaagcatgaacaa

SEQ ID NO: 278066 - DNA, 25 bp, Homo sapien
taatctcaacagttttggagaccga

SEQ ID NO: 278067 - DNA, 25 bp, Homo sapien
gggtgtccctctattcgcttttctc

SEQ ID NO: 278068 - DNA, 25 bp, Homo sapien
tcaacagttttggagaccgaggcgg

SEQ ID NO: 278069 - DNA, 25 bp, Homo sapien
cctggtactgcagccggacgtagag

SEQ ID NO: 278070 - DNA, 25 bp, Homo sapien
tgtgggagactgtaccaagagcctg

SEQ ID NO: 278071 - DNA, 25 bp, Homo sapien
actgtaccaagagcctggtactgca

SEQ ID NO: 278072 - DNA, 25 bp, Homo sapien
agccggacgtagagggctgagctgg

SEQ ID NO: 278073 - DNA, 25 bp, Homo sapien
caggtgaatgcccttggtacacggg

SEQ ID NO: 278074 - DNA, 25 bp, Homo sapien
tagcctgagtccgtgaggcatgccc

SEQ ID NO: 278075 - DNA, 25 bp, Homo sapien
ggcatgcccaccgtaacaggaagat

SEQ ID NO: 278076 - DNA, 25 bp, Homo sapien
caaatgggcagtgtagtctccagac

SEQ ID NO: 278077 - DNA, 25 bp, Homo sapien
gagaggcgagctactcagtgtcaga

SEQ ID NO: 278078 - DNA, 25 bp, Homo sapien
gctggccacgacacaaataagatca

SEQ ID NO: 278079 - DNA, 25 bp, Homo sapien
gcaaagagggatgccttgtcacact

SEQ ID NO: 278080 - DNA, 25 bp, Homo sapien
tctgctgaccagtgggaccgtcttc

SEQ ID NO: 278081 - DNA, 25 bp, Homo sapien
tgcacctgctggcccggtgacggcg

SEQ ID NO: 278082 - DNA, 25 bp, Homo sapien
tgctggcccggtgacggcgaggaca

SEQ ID NO: 278083 - DNA, 25 bp, Homo sapien
tcgactgcggggtctgcacctgctg

SEQ ID NO: 278084 - DNA, 25 bp, Homo sapien
ggcatcgactgcggggtctgcacct

SEQ ID NO: 278085 - DNA, 25 bp, Homo sapien
caagtgagagaaacatgtgagccgg

SEQ ID NO: 278086 - DNA, 25 bp, Homo sapien
gccaagtgagagaaacatgtgagcc

SEQ ID NO: 278087 - DNA, 25 bp, Homo sapien
tgcagccaagtgagagaaacatgtg

SEQ ID NO: 278088 - DNA, 25 bp, Homo sapien
agagaaacatgtgagccggggtcca

SEQ ID NO: 278089 - DNA, 25 bp, Homo sapien
ggtccgcgccgtcactgggctctgg

SEQ ID NO: 278090 - DNA, 25 bp, Homo sapien
actgaagttctgtggggtccgcgcc

SEQ ID NO: 278091 - DNA, 25 bp, Homo sapien
caggtgtgtttaaaggtccaggtga

SEQ ID NO: 278092 - DNA, 25 bp, Homo sapien
caggaagctactgggagatggggca

SEQ ID NO: 278093 - DNA, 25 bp, Homo sapien
ggacacaggcgggtgaggccacagc

SEQ ID NO: 278094 - DNA, 25 bp, Homo sapien
agctcgcacacccagtatgagctga

SEQ ID NO: 278095 - DNA, 25 bp, Homo sapien
ggagtgaccttagcacctcaggccc

SEQ ID NO: 278096 - DNA, 25 bp, Homo sapien
ccctcgggtggggaacttgagctct

SEQ ID NO: 278097 - DNA, 25 bp, Homo sapien
atcttgttgatcatgcggcgcaggg

SEQ ID NO: 278098 - DNA, 25 bp, Homo sapien
cgatcttgttgatcatgcggcgcag

SEQ ID NO: 278099 - DNA, 25 bp, Homo sapien
cgcaggggctcgatgtacttcgaca

SEQ ID NO: 278100 - DNA, 25 bp, Homo sapien
cgatgtacttcgacagctgcttcag

SEQ ID NO: 278101 - DNA, 25 bp, Homo sapien
cgcttcgaggggtctgtcagaatgt

SEQ ID NO: 278102 - DNA, 25 bp, Homo sapien
tcgaggggtctgtcagaatgtccag

SEQ ID NO: 278103 - DNA, 25 bp, Homo sapien
cgaggggtctgtcagaatgtccaga

SEQ ID NO: 278104 - DNA, 25 bp, Homo sapien
cttcgaggggtctgtcagaatgtcc

SEQ ID NO: 278105 - DNA, 25 bp, Homo sapien
tggaggaccacccaatagtgactgg

SEQ ID NO: 278106 - DNA, 25 bp, Homo sapien
cattttcatgacaacacacgtgggc

SEQ ID NO: 278107 - DNA, 25 bp, Homo sapien
tttggaggtactgcccgagctctga

SEQ ID NO: 278108 - DNA, 25 bp, Homo sapien
tgaaagggaggtatatgccaatgcc

SEQ ID NO: 278109 - DNA, 25 bp, Homo sapien
tccagggcgatctcacacttttgca

SEQ ID NO: 278110 - DNA, 25 bp, Homo sapien
tcacacttttgcaaggtcttcaggg

SEQ ID NO: 278111 - DNA, 25 bp, Homo sapien
gatctcacacttttgcaaggtcttc

SEQ ID NO: 278112 - DNA, 25 bp, Homo sapien
ggcgatctcacacttttgcaaggtc

SEQ ID NO: 278113 - DNA, 25 bp, Homo sapien
tcctctgaaatgggtgaaggaggca

SEQ ID NO: 278114 - DNA, 25 bp, Homo sapien
ttcccctaggggtgtctggcatccc

SEQ ID NO: 278115 - DNA, 25 bp, Homo sapien
cagatgccctgaccttgaaggccct

SEQ ID NO: 278116 - DNA, 25 bp, Homo sapien
ggctgatcctgggaataatccccca

SEQ ID NO: 278117 - DNA, 25 bp, Homo sapien
ctgctgtttggtcggtggcaccggg

SEQ ID NO: 278118 - DNA, 25 bp, Homo sapien
tgctgtttggtcggtggcaccgggg

SEQ ID NO: 278119 - DNA, 25 bp, Homo sapien
tgttggccaggacggcatccaggag

SEQ ID NO: 278120 - DNA, 25 bp, Homo sapien
atggttgaagacaggtgagcggatg

SEQ ID NO: 278121 - DNA, 25 bp, Homo sapien
aacgaatgtgcggtacagggaatgg

SEQ ID NO: 278122 - DNA, 25 bp, Homo sapien
tcatggctggaacgaatgtgcggta

SEQ ID NO: 278123 - DNA, 25 bp, Homo sapien
gtgatgggtgggccgtgaatggcgg

SEQ ID NO: 278124 - DNA, 25 bp, Homo sapien
cacctggcacacgcggcccagggct

SEQ ID NO: 278125 - DNA, 25 bp, Homo sapien
cacacctggcacacgcggcccaggg

SEQ ID NO: 278126 - DNA, 25 bp, Homo sapien
cagggctggccgccctccgcaaagc

SEQ ID NO: 278127 - DNA, 25 bp, Homo sapien
acacctggcacacgcggcccagggc

SEQ ID NO: 278128 - DNA, 25 bp, Homo sapien
cgctcatcatcctcaagcctgcgct

SEQ ID NO: 278129 - DNA, 25 bp, Homo sapien
cagtgagaagggtccaggtttacca

SEQ ID NO: 278130 - DNA, 25 bp, Homo sapien
cttgcagatcaggtggacagtgcca

SEQ ID NO: 278131 - DNA, 25 bp, Homo sapien
ggccacctcaccctggagcacactg

SEQ ID NO: 278132 - DNA, 25 bp, Homo sapien
gagtgctctgcattgatgggtgccc

SEQ ID NO: 278133 - DNA, 25 bp, Homo sapien
tttccaaacgtgaagcctggagtgc

SEQ ID NO: 278134 - DNA, 25 bp, Homo sapien
ggagcccggtgtgtgtgaggataga

SEQ ID NO: 278135 - DNA, 25 bp, Homo sapien
ggttctgggcgctgtgccatctggc

SEQ ID NO: 278136 - DNA, 25 bp, Homo sapien
cgtactgccactgccggtctatcca

SEQ ID NO: 278137 - DNA, 25 bp, Homo sapien
actgccggtctatccacagcgggct

SEQ ID NO: 278138 - DNA, 25 bp, Homo sapien
tccacagcgggctttgggcaggata

SEQ ID NO: 278139 - DNA, 25 bp, Homo sapien
gcaggatagtcagcgggcacactga

SEQ ID NO: 278140 - DNA, 25 bp, Homo sapien
cagctgacgtgacacaagttgaagg

SEQ ID NO: 278141 - DNA, 25 bp, Homo sapien
acaaccaccctggacagctgacgtg

SEQ ID NO: 278142 - DNA, 25 bp, Homo sapien
ccttttctctcaggcgaccactgga

SEQ ID NO: 278143 - DNA, 25 bp, Homo sapien
agtgggagcagagacccttttctct

SEQ ID NO: 278144 - DNA, 25 bp, Homo sapien
agagcagtgggcgtgaacctaaggc

SEQ ID NO: 278145 - DNA, 25 bp, Homo sapien
gaggtgatgtgtcctgcacgctgcc

SEQ ID NO: 278146 - DNA, 25 bp, Homo sapien
tgtgcccaagctaccagtggaacct

SEQ ID NO: 278147 - DNA, 25 bp, Homo sapien
ctgaacaggatctagggctctgcct

SEQ ID NO: 278148 - DNA, 25 bp, Homo sapien
caaggcggtgaccgagtgcttgtcc

SEQ ID NO: 278149 - DNA, 25 bp, Homo sapien
gtcatgcagcggtgcaccgactgga

SEQ ID NO: 278150 - DNA, 25 bp, Homo sapien
gaggtcatgcagcggtgcaccgact

SEQ ID NO: 278151 - DNA, 25 bp, Homo sapien
gcggtgaccgagtgcttgtccggga

SEQ ID NO: 278152 - DNA, 25 bp, Homo sapien
gagacgctctaacaacaccctgagt

SEQ ID NO: 278153 - DNA, 25 bp, Homo sapien
gagtgcaccctcacgctgctgagat

SEQ ID NO: 278154 - DNA, 25 bp, Homo sapien
taaccccaggctctctaaggaagcc

SEQ ID NO: 278155 - DNA, 25 bp, Homo sapien
gagcagcctgaggatcgcatctggc

SEQ ID NO: 278156 - DNA, 25 bp, Homo sapien
tcagtgaacactggagttgcttcta

SEQ ID NO: 278157 - DNA, 25 bp, Homo sapien
aatttctgacttcatgatgcacccg

SEQ ID NO: 278158 - DNA, 25 bp, Homo sapien
gctgcatagtgttcccttgtgcgga

SEQ ID NO: 278159 - DNA, 25 bp, Homo sapien
tgaacaattaattccccacgcagcc

SEQ ID NO: 278160 - DNA, 25 bp, Homo sapien
gaggattttccagcagaggtatagc

SEQ ID NO: 278161 - DNA, 25 bp, Homo sapien
gaggtatagctctgctgacatctct

SEQ ID NO: 278162 - DNA, 25 bp, Homo sapien
tttgcacagtgatgccaagacttgg

SEQ ID NO: 278163 - DNA, 25 bp, Homo sapien
ctaccttctaggctaccctgaaagc

SEQ ID NO: 278164 - DNA, 25 bp, Homo sapien
ctaatgagaggcatcttgttggctt

SEQ ID NO: 278165 - DNA, 25 bp, Homo sapien
cacggcatcagggtagaagtcacta

SEQ ID NO: 278166 - DNA, 25 bp, Homo sapien
aggccaccatcacggcatcagggta

SEQ ID NO: 278167 - DNA, 25 bp, Homo sapien
ttggcttggagttcctcagagtgtc

SEQ ID NO: 278168 - DNA, 25 bp, Homo sapien
ccagtgccatcagcagcccccggca

SEQ ID NO: 278169 - DNA, 25 bp, Homo sapien
ccatagcagccaccccagcaccagc

SEQ ID NO: 278170 - DNA, 25 bp, Homo sapien
caccagtgccatcagcagcccccgg

SEQ ID NO: 278171 - DNA, 25 bp, Homo sapien
cagcaccagcaccagtgccatcagc

SEQ ID NO: 278172 - DNA, 25 bp, Homo sapien
caaaggcgaccacctggggaccctg

SEQ ID NO: 278173 - DNA, 25 bp, Homo sapien
gcagagcacaatcatgtacaggtct

SEQ ID NO: 278174 - DNA, 25 bp, Homo sapien
tgtgctcttccttgacgccccctca

SEQ ID NO: 278175 - DNA, 25 bp, Homo sapien
gggaccctggttcacatctacacac

SEQ ID NO: 278176 - DNA, 25 bp, Homo sapien
gacaggtagaaccagtcttggccag

SEQ ID NO: 278177 - DNA, 25 bp, Homo sapien
tgggacaggtagaaccagtcttggc

SEQ ID NO: 278178 - DNA, 25 bp, Homo sapien
tgtgggacaggtagaaccagtcttg

SEQ ID NO: 278179 - DNA, 25 bp, Homo sapien
cttgtgggacaggtagaaccagtct

SEQ ID NO: 278180 - DNA, 25 bp, Homo sapien
gagttcatgctggtcacgttgtcac

SEQ ID NO: 278181 - DNA, 25 bp, Homo sapien
catgagcctactaagagagacgtca

SEQ ID NO: 278182 - DNA, 25 bp, Homo sapien
gaaggagactacaccttccacagag

SEQ ID NO: 278183 - DNA, 25 bp, Homo sapien
tgagggacatcatcatgaaggatgt

SEQ ID NO: 278184 - DNA, 25 bp, Homo sapien
accaggctcgatgatgtgcacatgc

SEQ ID NO: 278185 - DNA, 25 bp, Homo sapien
aaccaggctcgatgatgtgcacatg

SEQ ID NO: 278186 - DNA, 25 bp, Homo sapien
aaggcaaagaccattcccaccagca

SEQ ID NO: 278187 - DNA, 25 bp, Homo sapien
aggcaaagaccattcccaccagcat

SEQ ID NO: 278188 - DNA, 25 bp, Homo sapien
gacatcagaatggacaggtaggaga

SEQ ID NO: 278189 - DNA, 25 bp, Homo sapien
ttctcagacatcagaatggacaggt

SEQ ID NO: 278190 - DNA, 25 bp, Homo sapien
tcagacatcagaatggacaggtagg

SEQ ID NO: 278191 - DNA, 25 bp, Homo sapien
cagacatcagaatggacaggtagga

SEQ ID NO: 278192 - DNA, 25 bp, Homo sapien
cggatgaatgccttgttccacgtcc

SEQ ID NO: 278193 - DNA, 25 bp, Homo sapien
ttcatggctaaggtgcccagggaca

SEQ ID NO: 278194 - DNA, 25 bp, Homo sapien
cagaagtatgaccaggatgaaagcc

SEQ ID NO: 278195 - DNA, 25 bp, Homo sapien
acaccatccaatagcagtccaggag

SEQ ID NO: 278196 - DNA, 25 bp, Homo sapien
tgacaaacaggttcttctccttgac

SEQ ID NO: 278197 - DNA, 25 bp, Homo sapien
tgctgacaaacaggttcttctcctt

SEQ ID NO: 278198 - DNA, 25 bp, Homo sapien
cttgaagatgttgacggtggtgctg

SEQ ID NO: 278199 - DNA, 25 bp, Homo sapien
ggtggtgctgacaaacaggttcttc

SEQ ID NO: 278200 - DNA, 25 bp, Homo sapien
ccagggactagatggtcagacccca

SEQ ID NO: 278201 - DNA, 25 bp, Homo sapien
cagggactagatggtcagaccccag

SEQ ID NO: 278202 - DNA, 25 bp, Homo sapien
catgtggtgcatgaccgtgtcctcc

SEQ ID NO: 278203 - DNA, 25 bp, Homo sapien
tcatggaacttaggctcccagtgct

SEQ ID NO: 278204 - DNA, 25 bp, Homo sapien
taccgaatgctctgccatgctgctc

SEQ ID NO: 278205 - DNA, 25 bp, Homo sapien
catagacctgtggaagatatctcgg

SEQ ID NO: 278206 - DNA, 25 bp, Homo sapien
ggaatttgaggtgataccaatgttc

SEQ ID NO: 278207 - DNA, 25 bp, Homo sapien
aaatgtattgtggtgatggctacgt

SEQ ID NO: 278208 - DNA, 25 bp, Homo sapien
gaactcgtgcacgaatatccatagc

SEQ ID NO: 278209 - DNA, 25 bp, Homo sapien
ggctacgtaactgtgcatattctaa

SEQ ID NO: 278210 - DNA, 25 bp, Homo sapien
ggcgcccgtgacagagcgagcttaa

SEQ ID NO: 278211 - DNA, 25 bp, Homo sapien
cgcccgtgacagagcgagcttaacg

SEQ ID NO: 278212 - DNA, 25 bp, Homo sapien
gcgagcttaacggattaataagcgc

SEQ ID NO: 278213 - DNA, 25 bp, Homo sapien
gcgcccgtgacagagcgagcttaac

SEQ ID NO: 278214 - DNA, 25 bp, Homo sapien
tgcttctccccagacatgggagctg

SEQ ID NO: 278215 - DNA, 25 bp, Homo sapien
ctgtagcagatgctaggggggccac

SEQ ID NO: 278216 - DNA, 25 bp, Homo sapien
agctgtagaggggacctctgtagca

SEQ ID NO: 278217 - DNA, 25 bp, Homo sapien
aggggacctctgtagcagatgctag

SEQ ID NO: 278218 - DNA, 25 bp, Homo sapien
cactccaatagtgaccccaatgtgc

SEQ ID NO: 278219 - DNA, 25 bp, Homo sapien
atagtgaccccaatgtgcggttcaa

SEQ ID NO: 278220 - DNA, 25 bp, Homo sapien
ctccaatagtgaccccaatgtgcgg

SEQ ID NO: 278221 - DNA, 25 bp, Homo sapien
caatagtgaccccaatgtgcggttc

SEQ ID NO: 278222 - DNA, 25 bp, Homo sapien
tctcccgtagagctgcaggagctcg

SEQ ID NO: 278223 - DNA, 25 bp, Homo sapien
gtctcccgtagagctgcaggagctc

SEQ ID NO: 278224 - DNA, 25 bp, Homo sapien
gtatctgccgtcttttcacactggg

SEQ ID NO: 278225 - DNA, 25 bp, Homo sapien
gtgtctacggggcctagaggactgg

SEQ ID NO: 278226 - DNA, 25 bp, Homo sapien
gtctacggggcctagaggactggga

SEQ ID NO: 278227 - DNA, 25 bp, Homo sapien
ctgtatctgccgtcttttcacactg

SEQ ID NO: 278228 - DNA, 25 bp, Homo sapien
gggatccactaggcccagacagtct

SEQ ID NO: 278229 - DNA, 25 bp, Homo sapien
tccactaggcccagacagtcttagg

SEQ ID NO: 278230 - DNA, 25 bp, Homo sapien
cttggcttcagtagctcacccagct

SEQ ID NO: 278231 - DNA, 25 bp, Homo sapien
ttcagtagctcacccagcttacagg

SEQ ID NO: 278232 - DNA, 25 bp, Homo sapien
gcttcagtagctcacccagcttaca

SEQ ID NO: 278233 - DNA, 25 bp, Homo sapien
tggcttcagtagctcacccagctta

SEQ ID NO: 278234 - DNA, 25 bp, Homo sapien
ggcttccatctctgtctcagtgacc

SEQ ID NO: 278235 - DNA, 25 bp, Homo sapien
ttccatctctgtctcagtgaccatt

SEQ ID NO: 278236 - DNA, 25 bp, Homo sapien
ccatctctgtctcagtgaccattca

SEQ ID NO: 278237 - DNA, 25 bp, Homo sapien
atctctgtctcagtgaccattcagc

SEQ ID NO: 278238 - DNA, 25 bp, Homo sapien
cctggacaatccgtgtcctggcagc

SEQ ID NO: 278239 - DNA, 25 bp, Homo sapien
ctgcacaaccttgccactgtctttg

SEQ ID NO: 278240 - DNA, 25 bp, Homo sapien
ttctgctttggtcctctacagggtg

SEQ ID NO: 278241 - DNA, 25 bp, Homo sapien
ggaaacctctggctaatcaggctat

SEQ ID NO: 278242 - DNA, 25 bp, Homo sapien
tgtctttggccccatgctgctccgg

SEQ ID NO: 278243 - DNA, 25 bp, Homo sapien
cagtggcgcacttcaatagatgcag

SEQ ID NO: 278244 - DNA, 25 bp, Homo sapien
cacgatctcagtggcgcacttcaat

SEQ ID NO: 278245 - DNA, 25 bp, Homo sapien
agaactccacgatctcagtggcgca

SEQ ID NO: 278246 - DNA, 25 bp, Homo sapien
tggacaaacagggaagaactccacg

SEQ ID NO: 278247 - DNA, 25 bp, Homo sapien
tacagtggaacaatcgaagctagct

SEQ ID NO: 278248 - DNA, 25 bp, Homo sapien
tattccagggattgttcaacatcag

SEQ ID NO: 278249 - DNA, 25 bp, Homo sapien
catgagcaagatccgtaaaggaaac

SEQ ID NO: 278250 - DNA, 25 bp, Homo sapien
ggtattatgtggtatgcctagagct

SEQ ID NO: 278251 - DNA, 25 bp, Homo sapien
caggcaagttgaagattggttcccc

SEQ ID NO: 278252 - DNA, 25 bp, Homo sapien
tacacactaaatggttcgctgaagt

SEQ ID NO: 278253 - DNA, 25 bp, Homo sapien
tggcacttgcaaactgatcgatctc

SEQ ID NO: 278254 - DNA, 25 bp, Homo sapien
cgggtcaggccggatcacacttagt

SEQ ID NO: 278255 - DNA, 25 bp, Homo sapien
atcacccgttcccaagggcctagag

SEQ ID NO: 278256 - DNA, 25 bp, Homo sapien
gcctggtactctgcgaagcacctcg

SEQ ID NO: 278257 - DNA, 25 bp, Homo sapien
gtactctgcgaagcacctcgcggcg

SEQ ID NO: 278258 - DNA, 25 bp, Homo sapien
ctgggtggatcacccgttcccaagg

SEQ ID NO: 278259 - DNA, 25 bp, Homo sapien
ccagccgcaggctcatgattgagga

SEQ ID NO: 278260 - DNA, 25 bp, Homo sapien
aaactgaggttggcgctacaaggcg

SEQ ID NO: 278261 - DNA, 25 bp, Homo sapien
gctacaaggcggactgggtcgctca

SEQ ID NO: 278262 - DNA, 25 bp, Homo sapien
aggatcccgcagtcgccaggaagga

SEQ ID NO: 278263 - DNA, 25 bp, Homo sapien
cgcgcacctccccttgcagaagcag

SEQ ID NO: 278264 - DNA, 25 bp, Homo sapien
gaagcagcgcttcctggcttcgcct

SEQ ID NO: 278265 - DNA, 25 bp, Homo sapien
ccttgcagaagcagcgcttcctggc

SEQ ID NO: 278266 - DNA, 25 bp, Homo sapien
acctccccttgcagaagcagcgctt

SEQ ID NO: 278267 - DNA, 25 bp, Homo sapien
ccaccctgggtccagccccattcca

SEQ ID NO: 278268 - DNA, 25 bp, Homo sapien
caccctgggtccagccccattccag

SEQ ID NO: 278269 - DNA, 25 bp, Homo sapien
tcaccgccggtcctacctcacccca

SEQ ID NO: 278270 - DNA, 25 bp, Homo sapien
gcggtgccggcctcaccgccggtcc

SEQ ID NO: 278271 - DNA, 25 bp, Homo sapien
ctgactcgacagctcctcccactgc

SEQ ID NO: 278272 - DNA, 25 bp, Homo sapien
ctgtgctgctcctgcggacagggtc

SEQ ID NO: 278273 - DNA, 25 bp, Homo sapien
tgactcgacagctcctcccactgcc

SEQ ID NO: 278274 - DNA, 25 bp, Homo sapien
cctgctgtgctgctcctgcggacag

SEQ ID NO: 278275 - DNA, 25 bp, Homo sapien
caatgagagcgagggcaagggcagg

SEQ ID NO: 278276 - DNA, 25 bp, Homo sapien
acggggaggcaatgagagcgagggc

SEQ ID NO: 278277 - DNA, 25 bp, Homo sapien
gggaggcaatgagagcgagggcaag

SEQ ID NO: 278278 - DNA, 25 bp, Homo sapien
ggcaatgagagcgagggcaagggca

SEQ ID NO: 278279 - DNA, 25 bp, Homo sapien
tgcagttcccctccgtagtagaaga

SEQ ID NO: 278280 - DNA, 25 bp, Homo sapien
ctgcagttcccctccgtagtagaag

SEQ ID NO: 278281 - DNA, 25 bp, Homo sapien
tgcaaggcgcatttggtctccgcca

SEQ ID NO: 278282 - DNA, 25 bp, Homo sapien
cctgcaaggcgcatttggtctccgc

SEQ ID NO: 278283 - DNA, 25 bp, Homo sapien
caaggcgcatttggtctccgccagc

SEQ ID NO: 278284 - DNA, 25 bp, Homo sapien
tcctgcaaggcgcatttggtctccg

SEQ ID NO: 278285 - DNA, 25 bp, Homo sapien
acactcgaaagcctaccctcctcca

SEQ ID NO: 278286 - DNA, 25 bp, Homo sapien
ctaccctcctccaacagaacccgct

SEQ ID NO: 278287 - DNA, 25 bp, Homo sapien
ccttccccatccacactcgaaagcc

SEQ ID NO: 278288 - DNA, 25 bp, Homo sapien
tgtggacacccgggttagactcggc

SEQ ID NO: 278289 - DNA, 25 bp, Homo sapien
cggtctgctcctggaatatggccca

SEQ ID NO: 278290 - DNA, 25 bp, Homo sapien
tacggtctgctcctggaatatggcc

SEQ ID NO: 278291 - DNA, 25 bp, Homo sapien
gactacggtctgctcctggaatatg

SEQ ID NO: 278292 - DNA, 25 bp, Homo sapien
tgcaggactacggtctgctcctgga

SEQ ID NO: 278293 - DNA, 25 bp, Homo sapien
gcgggaggcaccttggcgtctgagt

SEQ ID NO: 278294 - DNA, 25 bp, Homo sapien
aggcgggaggcaccttggcgtctga

SEQ ID NO: 278295 - DNA, 25 bp, Homo sapien
gaggcgggaggcaccttggcgtctg

SEQ ID NO: 278296 - DNA, 25 bp, Homo sapien
ggcgggaggcaccttggcgtctgag

SEQ ID NO: 278297 - DNA, 25 bp, Homo sapien
gtgagagtgcggactgaggcctcgg

SEQ ID NO: 278298 - DNA, 25 bp, Homo sapien
cgtcctggcggtgggttgggagact

SEQ ID NO: 278299 - DNA, 25 bp, Homo sapien
ctggagcgggtgagagtgcggactg

SEQ ID NO: 278300 - DNA, 25 bp, Homo sapien
tcctggcggtgggttgggagactta

SEQ ID NO: 278301 - DNA, 25 bp, Homo sapien
tcccggccactctgccaggcgtcca

SEQ ID NO: 278302 - DNA, 25 bp, Homo sapien
cccggccactctgccaggcgtccag

SEQ ID NO: 278303 - DNA, 25 bp, Homo sapien
gggacaggcatgcaggtgggagccc

SEQ ID NO: 278304 - DNA, 25 bp, Homo sapien
gcgcccgcaagcccaactcccttac

SEQ ID NO: 278305 - DNA, 25 bp, Homo sapien
ccgccgcgcccgcaagcccaactcc

SEQ ID NO: 278306 - DNA, 25 bp, Homo sapien
ccgcgcccgcaagcccaactccctt

SEQ ID NO: 278307 - DNA, 25 bp, Homo sapien
tactgcactctgcgaagctgcccgt

SEQ ID NO: 278308 - DNA, 25 bp, Homo sapien
tgctgtactgcactctgcgaagctg

SEQ ID NO: 278309 - DNA, 25 bp, Homo sapien
atctcctccatgagcgactcggtgc

SEQ ID NO: 278310 - DNA, 25 bp, Homo sapien
ccatgagcgactcggtgctgtactg

SEQ ID NO: 278311 - DNA, 25 bp, Homo sapien
gagggccgcatccagctacctccgc

SEQ ID NO: 278312 - DNA, 25 bp, Homo sapien
agggccgcatccagctacctccgcg

SEQ ID NO: 278313 - DNA, 25 bp, Homo sapien
gggccgcatccagctacctccgcgc

SEQ ID NO: 278314 - DNA, 25 bp, Homo sapien
ggccgcatccagctacctccgcgcc

SEQ ID NO: 278315 - DNA, 25 bp, Homo sapien
ctgatggccagcgcgcgaggaccgc

SEQ ID NO: 278316 - DNA, 25 bp, Homo sapien
gaggaccgccgaacagccgcgtctc

SEQ ID NO: 278317 - DNA, 25 bp, Homo sapien
cagcgcgcgaggaccgccgaacagc

SEQ ID NO: 278318 - DNA, 25 bp, Homo sapien
cgaggaccgccgaacagccgcgtct

SEQ ID NO: 278319 - DNA, 25 bp, Homo sapien
gcggcggctcgggcgggcacgtggg

SEQ ID NO: 278320 - DNA, 25 bp, Homo sapien
ctgcagggcgaaaggcgggcaggtg

SEQ ID NO: 278321 - DNA, 25 bp, Homo sapien
tgcagggcgaaaggcgggcaggtgg

SEQ ID NO: 278322 - DNA, 25 bp, Homo sapien
ggcacgtgggggaccgcggccgcgc

SEQ ID NO: 278323 - DNA, 25 bp, Homo sapien
cccaggaagaggagcggcagcgtca

SEQ ID NO: 278324 - DNA, 25 bp, Homo sapien
gggtccaacagcaccgtccagagca

SEQ ID NO: 278325 - DNA, 25 bp, Homo sapien
acagcaccgtccagagcagcgacag

SEQ ID NO: 278326 - DNA, 25 bp, Homo sapien
ctccagagccacgcggagacggcgc

SEQ ID NO: 278327 - DNA, 25 bp, Homo sapien
gcggggacagcgtgtagcgcaggcg

SEQ ID NO: 278328 - DNA, 25 bp, Homo sapien
gcaggcggcgcagcgtcgtctccga

SEQ ID NO: 278329 - DNA, 25 bp, Homo sapien
gggacagcgtgtagcgcaggcggcg

SEQ ID NO: 278330 - DNA, 25 bp, Homo sapien
gcgcagcgtcgtctccgaggtgagg

SEQ ID NO: 278331 - DNA, 25 bp, Homo sapien
accttggtctacactctcaggagag

SEQ ID NO: 278332 - DNA, 25 bp, Homo sapien
cacctggagccaggcgcggggcgct

SEQ ID NO: 278333 - DNA, 25 bp, Homo sapien
gcctgtaatcccagctacttgggag

SEQ ID NO: 278334 - DNA, 25 bp, Homo sapien
ggatgacagtgcaagacttggtctc

SEQ ID NO: 278335 - DNA, 25 bp, Homo sapien
aaactaaccaggcatggtggcgcgt

SEQ ID NO: 278336 - DNA, 25 bp, Homo sapien
ctggatgacagtgcaagacttggtc

SEQ ID NO: 278337 - DNA, 25 bp, Homo sapien
cagatgcagtgactttctaaggcag

SEQ ID NO: 278338 - DNA, 25 bp, Homo sapien
ttctttagcagacccacggctgaca

SEQ ID NO: 278339 - DNA, 25 bp, Homo sapien
tctggctccacttagaagagggcaa

SEQ ID NO: 278340 - DNA, 25 bp, Homo sapien
actaaaggactatacgttgccggtg

SEQ ID NO: 278341 - DNA, 25 bp, Homo sapien
ggtacacatatattagtgacttggt

SEQ ID NO: 278342 - DNA, 25 bp, Homo sapien
tacttcctaggctcttaaggtcaat

SEQ ID NO: 278343 - DNA, 25 bp, Homo sapien
tggtattgtcccatagatcatcgac

SEQ ID NO: 278344 - DNA, 25 bp, Homo sapien
gatcatcgacattctctgtagtctt

SEQ ID NO: 278345 - DNA, 25 bp, Homo sapien
ttttgtttctcagtacagccggccc

SEQ ID NO: 278346 - DNA, 25 bp, Homo sapien
tcctgtgatctcctctgccaagtaa

SEQ ID NO: 278347 - DNA, 25 bp, Homo sapien
tggattattttttctaggcccagga

SEQ ID NO: 278348 - DNA, 25 bp, Homo sapien
tggaaccagttctcctgaggatacc

SEQ ID NO: 278349 - DNA, 25 bp, Homo sapien
tacaatactgagtcttcagcgtggc

SEQ ID NO: 278350 - DNA, 25 bp, Homo sapien
gattttgcactctagcttttgtcag

SEQ ID NO: 278351 - DNA, 25 bp, Homo sapien
tgttcaggacacagaccggtggttg

SEQ ID NO: 278352 - DNA, 25 bp, Homo sapien
gagccttcatctgtcacatacaata

SEQ ID NO: 278353 - DNA, 25 bp, Homo sapien
aagtggcgcttcagagatgaaagca

SEQ ID NO: 278354 - DNA, 25 bp, Homo sapien
tgagaagtggcgcttcagagatgaa

SEQ ID NO: 278355 - DNA, 25 bp, Homo sapien
tttctgagaagtggcgcttcagaga

SEQ ID NO: 278356 - DNA, 25 bp, Homo sapien
tgtgtttctgagaagtggcgcttca

SEQ ID NO: 278357 - DNA, 25 bp, Homo sapien
caccccacgcagatgttatgatgag

SEQ ID NO: 278358 - DNA, 25 bp, Homo sapien
gaagtgcgtttaatgagtgtttcat

SEQ ID NO: 278359 - DNA, 25 bp, Homo sapien
ctctagctgatccagcgggcctttg

SEQ ID NO: 278360 - DNA, 25 bp, Homo sapien
gatctgcagactgagcagtttcccc

SEQ ID NO: 278361 - DNA, 25 bp, Homo sapien
cgcagtagaaatgccaacgggtgct

SEQ ID NO: 278362 - DNA, 25 bp, Homo sapien
gatgttaagacgctggatccggctc

SEQ ID NO: 278363 - DNA, 25 bp, Homo sapien
ggaaatcatacccatcgcagtagaa

SEQ ID NO: 278364 - DNA, 25 bp, Homo sapien
cactcggtagaggttgaaagcgaac

SEQ ID NO: 278365 - DNA, 25 bp, Homo sapien
tgtgtgggaccacaattagcatgct

SEQ ID NO: 278366 - DNA, 25 bp, Homo sapien
tggtcatttgctgcgaggaagttcc

SEQ ID NO: 278367 - DNA, 25 bp, Homo sapien
aagttccccttggtctgcatcatgg

SEQ ID NO: 278368 - DNA, 25 bp, Homo sapien
gtcagttgcgcttcgagggtcttca

SEQ ID NO: 278369 - DNA, 25 bp, Homo sapien
tccagcttgaatttcggcagaagca

SEQ ID NO: 278370 - DNA, 25 bp, Homo sapien
tcgatggcgatcctttggtctgaga

SEQ ID NO: 278371 - DNA, 25 bp, Homo sapien
ctccactagattgtagttcttctcc

SEQ ID NO: 278372 - DNA, 25 bp, Homo sapien
ttgtcaaacagcatcctgatcccca

SEQ ID NO: 278373 - DNA, 25 bp, Homo sapien
ccctgtctctggtgtcagcgggagt

SEQ ID NO: 278374 - DNA, 25 bp, Homo sapien
tgtatagtgcggtgtttaatggctc

SEQ ID NO: 278375 - DNA, 25 bp, Homo sapien
gcatccatgaaactaggcattctgt

SEQ ID NO: 278376 - DNA, 25 bp, Homo sapien
gctgagcgcccgattggtttaagtt

SEQ ID NO: 278377 - DNA, 25 bp, Homo sapien
caatctcatatcattcagggaaagg

SEQ ID NO: 278378 - DNA, 25 bp, Homo sapien
tagaggccggctaggttcatgttcc

SEQ ID NO: 278379 - DNA, 25 bp, Homo sapien
gacaacatgtaaggtggaaatcaca

SEQ ID NO: 278380 - DNA, 25 bp, Homo sapien
ggaaatcacagctggtcagagtcac

SEQ ID NO: 278381 - DNA, 25 bp, Homo sapien
ctgtttggaaaggaaagttgtcaga

SEQ ID NO: 278382 - DNA, 25 bp, Homo sapien
tgtttggaaaggaaagttgtcagat

SEQ ID NO: 278383 - DNA, 25 bp, Homo sapien
gcttgggtgccttcctcgttcactg

SEQ ID NO: 278384 - DNA, 25 bp, Homo sapien
cagctggtgcgatgctcgtagatga

SEQ ID NO: 278385 - DNA, 25 bp, Homo sapien
ggttggccactcttcccatgaagag

SEQ ID NO: 278386 - DNA, 25 bp, Homo sapien
gaaccccaccgtggtcacagtggtg

SEQ ID NO: 278387 - DNA, 25 bp, Homo sapien
tgagaccctctaggtaacagcagac

SEQ ID NO: 278388 - DNA, 25 bp, Homo sapien
gaatggtgctagttgtgtaccctcc

SEQ ID NO: 278389 - DNA, 25 bp, Homo sapien
tatgggagacatggcacacactgtc

SEQ ID NO: 278390 - DNA, 25 bp, Homo sapien
cagtgacttctatgagcttacagca

SEQ ID NO: 278391 - DNA, 25 bp, Homo sapien
tacctaagcagttgtagaagagcca

SEQ ID NO: 278392 - DNA, 25 bp, Homo sapien
gcctgaggtctgcacatcctggaaa

SEQ ID NO: 278393 - DNA, 25 bp, Homo sapien
aactgtgcctgttaaccatgagtgg

SEQ ID NO: 278394 - DNA, 25 bp, Homo sapien
tgaaatggcagcaaggcctgaggtc

SEQ ID NO: 278395 - DNA, 25 bp, Homo sapien
ggatgggctgtgcattgacctcctt

SEQ ID NO: 278396 - DNA, 25 bp, Homo sapien
atgggctgtgcattgacctccttca

SEQ ID NO: 278397 - DNA, 25 bp, Homo sapien
tgggctgtgcattgacctccttcag

SEQ ID NO: 278398 - DNA, 25 bp, Homo sapien
gatgggctgtgcattgacctccttc

SEQ ID NO: 278399 - DNA, 25 bp, Homo sapien
ccttggccgctttagtcccattaag

SEQ ID NO: 278400 - DNA, 25 bp, Homo sapien
tggccgctttagtcccattaagtag

SEQ ID NO: 278401 - DNA, 25 bp, Homo sapien
cgctttagtcccattaagtagttgt

SEQ ID NO: 278402 - DNA, 25 bp, Homo sapien
gaccttggccgctttagtcccatta

SEQ ID NO: 278403 - DNA, 25 bp, Homo sapien
gaatttgtttgttagaaggtcatga

SEQ ID NO: 278404 - DNA, 25 bp, Homo sapien
ttagaaggtcatgaatctgtctaca

SEQ ID NO: 278405 - DNA, 25 bp, Homo sapien
ttttcgtatcttaatcttgtgtcct

SEQ ID NO: 278406 - DNA, 25 bp, Homo sapien
ggctgattttcgtatcttaatcttg

SEQ ID NO: 278407 - DNA, 25 bp, Homo sapien
cgaccccgcggtcgtcgcgcgaact

SEQ ID NO: 278408 - DNA, 25 bp, Homo sapien
gccgaccccgcggtcgtcgcgcgaa

SEQ ID NO: 278409 - DNA, 25 bp, Homo sapien
gaccccgcggtcgtcgcgcgaactc

SEQ ID NO: 278410 - DNA, 25 bp, Homo sapien
tctcggactcgtacatgagggccag

SEQ ID NO: 278411 - DNA, 25 bp, Homo sapien
cgtcgtcgtcgaacggattgtagct

SEQ ID NO: 278412 - DNA, 25 bp, Homo sapien
ggaggacctcctgccgcaagtactg

SEQ ID NO: 278413 - DNA, 25 bp, Homo sapien
agtactgctgcctgtccgcgggcgc

SEQ ID NO: 278414 - DNA, 25 bp, Homo sapien
caacgaagcagactaatagctaagg

SEQ ID NO: 278415 - DNA, 25 bp, Homo sapien
agtactccagatgcacataccttta

SEQ ID NO: 278416 - DNA, 25 bp, Homo sapien
aaactgccctcttcaagtactccag

SEQ ID NO: 278417 - DNA, 25 bp, Homo sapien
aatctggcgtttccccgtgagctag

SEQ ID NO: 278418 - DNA, 25 bp, Homo sapien
taatgtcgaagaaacggactctcca

SEQ ID NO: 278419 - DNA, 25 bp, Homo sapien
gacactcgcaggcacatagtcctct

SEQ ID NO: 278420 - DNA, 25 bp, Homo sapien
gaaggaatggccaaaaccctgtgcc

SEQ ID NO: 278421 - DNA, 25 bp, Homo sapien
tctttctggctcactccggaaggaa

SEQ ID NO: 278422 - DNA, 25 bp, Homo sapien
gagtgcatcacgtttgaactctcaa

SEQ ID NO: 278423 - DNA, 25 bp, Homo sapien
ccctggtctaatgtttgttgctgga

SEQ ID NO: 278424 - DNA, 25 bp, Homo sapien
cctcagtggagttaagttcagctac

SEQ ID NO: 278425 - DNA, 25 bp, Homo sapien
tccattgatgttactgtgccagccg

SEQ ID NO: 278426 - DNA, 25 bp, Homo sapien
agttccggggacaccttgatggcct

SEQ ID NO: 278427 - DNA, 25 bp, Homo sapien
aatggaatgcccagtgtgggtgact

SEQ ID NO: 278428 - DNA, 25 bp, Homo sapien
ctctgaatggaatgcccagtgtggg

SEQ ID NO: 278429 - DNA, 25 bp, Homo sapien
gcaatgtatctactctaagttccgg

SEQ ID NO: 278430 - DNA, 25 bp, Homo sapien
agaatccctgagaatgaggatatca

SEQ ID NO: 278431 - DNA, 25 bp, Homo sapien
gaatccctgagaatgaggatatcac

SEQ ID NO: 278432 - DNA, 25 bp, Homo sapien
cagcctgacatgtgttgggatgcat

SEQ ID NO: 278433 - DNA, 25 bp, Homo sapien
caactattttgggagcgccaataac

SEQ ID NO: 278434 - DNA, 25 bp, Homo sapien
tgcattttctggtcacaggacaggc

SEQ ID NO: 278435 - DNA, 25 bp, Homo sapien
caggacaggcattgcaaccaaggca

SEQ ID NO: 278436 - DNA, 25 bp, Homo sapien
accaccaagacaggcctcaaccgct

SEQ ID NO: 278437 - DNA, 25 bp, Homo sapien
accgctccaggtaccgaggcaggtc

SEQ ID NO: 278438 - DNA, 25 bp, Homo sapien
gggagaatgaggtccctgaacggac

SEQ ID NO: 278439 - DNA, 25 bp, Homo sapien
cttcccgtgggagaatgaggtccct

SEQ ID NO: 278440 - DNA, 25 bp, Homo sapien
ggatttgaagtaattgaccagcccc

SEQ ID NO: 278441 - DNA, 25 bp, Homo sapien
tgtgcgctccaggactcctcgctga

SEQ ID NO: 278442 - DNA, 25 bp, Homo sapien
gatcttcaaatcttggtccatcttg

SEQ ID NO: 278443 - DNA, 25 bp, Homo sapien
tgatgtgtttctggctgatcttcaa

SEQ ID NO: 278444 - DNA, 25 bp, Homo sapien
cacatttgtacagattacgctgagg

SEQ ID NO: 278445 - DNA, 25 bp, Homo sapien
tatacccagatggtagaagatgcac

SEQ ID NO: 278446 - DNA, 25 bp, Homo sapien
ggcactgacgtggactgaaagtctt

SEQ ID NO: 278447 - DNA, 25 bp, Homo sapien
gcctctgaaagcatgggattttaca

SEQ ID NO: 278448 - DNA, 25 bp, Homo sapien
tagacagggatagctcttgcaactc

SEQ ID NO: 278449 - DNA, 25 bp, Homo sapien
ccaatctgggaatcagggttactcg

SEQ ID NO: 278450 - DNA, 25 bp, Homo sapien
gattttgctccgtggcctagtttgc

SEQ ID NO: 278451 - DNA, 25 bp, Homo sapien
tgaccacttcgccagccaatctggg

SEQ ID NO: 278452 - DNA, 25 bp, Homo sapien
ccagctttctaaggtttgggtggct

SEQ ID NO: 278453 - DNA, 25 bp, Homo sapien
tacttgtacttatagcttctttcaa

SEQ ID NO: 278454 - DNA, 25 bp, Homo sapien
ggtggctggcctggtactttgcttc

SEQ ID NO: 278455 - DNA, 25 bp, Homo sapien
tactttgcttcctgttctttacttg

SEQ ID NO: 278456 - DNA, 25 bp, Homo sapien
tctaaacgcacacggaaaagccctg

SEQ ID NO: 278457 - DNA, 25 bp, Homo sapien
tgatgaggccggttttcccagccct

SEQ ID NO: 278458 - DNA, 25 bp, Homo sapien
taatgcaaaactacacagtctgtgg

SEQ ID NO: 278459 - DNA, 25 bp, Homo sapien
aaattgtgtcttgggtgcagtgtcc

SEQ ID NO: 278460 - DNA, 25 bp, Homo sapien
gggtaagcatcagtactcatggcag

SEQ ID NO: 278461 - DNA, 25 bp, Homo sapien
ggtaagcatcagtactcatggcaga

SEQ ID NO: 278462 - DNA, 25 bp, Homo sapien
ctttgggtaagcatcagtactcatg

SEQ ID NO: 278463 - DNA, 25 bp, Homo sapien
ttgggtaagcatcagtactcatggc

SEQ ID NO: 278464 - DNA, 25 bp, Homo sapien
cttctggtgataggctcgaaggtgt

SEQ ID NO: 278465 - DNA, 25 bp, Homo sapien
atcttctggtgataggctcgaaggt

SEQ ID NO: 278466 - DNA, 25 bp, Homo sapien
ctaggttgctgtcgatcttctggtg

SEQ ID NO: 278467 - DNA, 25 bp, Homo sapien
ggttgctgtcgatcttctggtgata

SEQ ID NO: 278468 - DNA, 25 bp, Homo sapien
tctgtgctttttatgttgacatcta

SEQ ID NO: 278469 - DNA, 25 bp, Homo sapien
ttgacatctaacttgtccactttgg

SEQ ID NO: 278470 - DNA, 25 bp, Homo sapien
tgtcagccggtcaagaatgtcatct

SEQ ID NO: 278471 - DNA, 25 bp, Homo sapien
ggctatgtccttcagacgacccagt

SEQ ID NO: 278472 - DNA, 25 bp, Homo sapien
caatagagtggaaatccgtctgtct

SEQ ID NO: 278473 - DNA, 25 bp, Homo sapien
taatcaaacgcccaagatatgcagg

SEQ ID NO: 278474 - DNA, 25 bp, Homo sapien
tgatgactcctaaacaaaggtgtgg

SEQ ID NO: 278475 - DNA, 25 bp, Homo sapien
aaatagaggctcatggctgcaagac

SEQ ID NO: 278476 - DNA, 25 bp, Homo sapien
catttccaggagtcgcagtgagcag

SEQ ID NO: 278477 - DNA, 25 bp, Homo sapien
gaggaagaccattgtgcagctgcat

SEQ ID NO: 278478 - DNA, 25 bp, Homo sapien
tactaatatacatgccaaggatggg

SEQ ID NO: 278479 - DNA, 25 bp, Homo sapien
agcctcgagccagtggaagacctgt

SEQ ID NO: 278480 - DNA, 25 bp, Homo sapien
tagttcgataagctttaatcaggcc

SEQ ID NO: 278481 - DNA, 25 bp, Homo sapien
caccctgggatggtcgttaatgaca

SEQ ID NO: 278482 - DNA, 25 bp, Homo sapien
gaatctaacaagtgggtagcacaga

SEQ ID NO: 278483 - DNA, 25 bp, Homo sapien
gaaagctcaccttgcctatggaggc

SEQ ID NO: 278484 - DNA, 25 bp, Homo sapien
tgcctgacggtgataaaaagttgac

SEQ ID NO: 278485 - DNA, 25 bp, Homo sapien
tcccgggttcatgcttttaagcagc

SEQ ID NO: 278486 - DNA, 25 bp, Homo sapien
tgaaagcctcacgaagtagttttgt

SEQ ID NO: 278487 - DNA, 25 bp, Homo sapien
agtggaaccgtgcacaaaagctgct

SEQ ID NO: 278488 - DNA, 25 bp, Homo sapien
gaggccctctaatatgtcagacgaa

SEQ ID NO: 278489 - DNA, 25 bp, Homo sapien
tcctgtagcttacggacagtcccct

SEQ ID NO: 278490 - DNA, 25 bp, Homo sapien
cacaggacgtagaacgagagggtct

SEQ ID NO: 278491 - DNA, 25 bp, Homo sapien
tataaagtagcatcagcaaccaggc

SEQ ID NO: 278492 - DNA, 25 bp, Homo sapien
tgaccagccagagagtgcactattt

SEQ ID NO: 278493 - DNA, 25 bp, Homo sapien
gaaggcacagtttgtttccagctca

SEQ ID NO: 278494 - DNA, 25 bp, Homo sapien
ttccagctcaactgtggaaatcaaa

SEQ ID NO: 278495 - DNA, 25 bp, Homo sapien
aaatgtgtctagtctagagggtagc

SEQ ID NO: 278496 - DNA, 25 bp, Homo sapien
tcttgcaacccgagttaaattcacg

SEQ ID NO: 278497 - DNA, 25 bp, Homo sapien
acaaattactagatgttagaaaact

SEQ ID NO: 278498 - DNA, 25 bp, Homo sapien
gaaaactttctcgaaggacagtgca

SEQ ID NO: 278499 - DNA, 25 bp, Homo sapien
aaaaaagacatccacaaggcaactc

SEQ ID NO: 278500 - DNA, 25 bp, Homo sapien
gcacttttaatgactagctcatcaa

SEQ ID NO: 278501 - DNA, 25 bp, Homo sapien
tcatcattttgtactgacaccgcat

SEQ ID NO: 278502 - DNA, 25 bp, Homo sapien
gggactagaggccaagctattttta

SEQ ID NO: 278503 - DNA, 25 bp, Homo sapien
actttaaaattctacaggtcacgtg

SEQ ID NO: 278504 - DNA, 25 bp, Homo sapien
ctgtaagacgctagccacctctcgt

SEQ ID NO: 278505 - DNA, 25 bp, Homo sapien
ccacctctcgtcctgtgaacccagg

SEQ ID NO: 278506 - DNA, 25 bp, Homo sapien
gctagccacctctcgtcctgtgaac

SEQ ID NO: 278507 - DNA, 25 bp, Homo sapien
agggccatcagtggagactgtgtca

SEQ ID NO: 278508 - DNA, 25 bp, Homo sapien
gcgacgatcagggtgggcgctggtc

SEQ ID NO: 278509 - DNA, 25 bp, Homo sapien
cggcggtaggcactctcttcctggg

SEQ ID NO: 278510 - DNA, 25 bp, Homo sapien
cgctcccgcgttccaggaggaggct

SEQ ID NO: 278511 - DNA, 25 bp, Homo sapien
atcaggagcaccgtcgcgacgatca

SEQ ID NO: 278512 - DNA, 25 bp, Homo sapien
cagcttgttcccaatagccacagca

SEQ ID NO: 278513 - DNA, 25 bp, Homo sapien
actcgaaggagcgtcgcgcctccgg

SEQ ID NO: 278514 - DNA, 25 bp, Homo sapien
gtcacacgaggcaccgaactcgaag

SEQ ID NO: 278515 - DNA, 25 bp, Homo sapien
tccggggtgcttttgcccagcttgt

SEQ ID NO: 278516 - DNA, 25 bp, Homo sapien
gccgcagctcgacgggtcttcaccg

SEQ ID NO: 278517 - DNA, 25 bp, Homo sapien
gcgccgcagctcgacgggtcttcac

SEQ ID NO: 278518 - DNA, 25 bp, Homo sapien
cgcagctcgacgggtcttcaccgac

SEQ ID NO: 278519 - DNA, 25 bp, Homo sapien
ggcgccgcagctcgacgggtcttca

SEQ ID NO: 278520 - DNA, 25 bp, Homo sapien
caggcaaacccgagccgcagcggag

SEQ ID NO: 278521 - DNA, 25 bp, Homo sapien
ctcgaggagcgctcagagggctggg

SEQ ID NO: 278522 - DNA, 25 bp, Homo sapien
ggttctcgggctgctcggcgtccca

SEQ ID NO: 278523 - DNA, 25 bp, Homo sapien
cacacggagagagccgcccgggaat

SEQ ID NO: 278524 - DNA, 25 bp, Homo sapien
tgctctgcacgccttagcccggcag

SEQ ID NO: 278525 - DNA, 25 bp, Homo sapien
ccttagcccggcagacggctttggg

SEQ ID NO: 278526 - DNA, 25 bp, Homo sapien
taggggcggcggctgtcctcgcctg

SEQ ID NO: 278527 - DNA, 25 bp, Homo sapien
gactctgcggcggtaggggcggcgg

SEQ ID NO: 278528 - DNA, 25 bp, Homo sapien
tgtaaaactccagcagggccggcaa

SEQ ID NO: 278529 - DNA, 25 bp, Homo sapien
gaatcgcggacgaggaacataccgt

SEQ ID NO: 278530 - DNA, 25 bp, Homo sapien
tctcggacaccgacagcacatagtc

SEQ ID NO: 278531 - DNA, 25 bp, Homo sapien
tgggagacccgcgagttctcggaca

SEQ ID NO: 278532 - DNA, 25 bp, Homo sapien
aaatctctgctaaaacgcttaaggc

SEQ ID NO: 278533 - DNA, 25 bp, Homo sapien
gagtaatacccggtcgacaaatcca

SEQ ID NO: 278534 - DNA, 25 bp, Homo sapien
ggaaccgcaggtttcaccaatcaga

SEQ ID NO: 278535 - DNA, 25 bp, Homo sapien
taaagtcataaacatctaaccctgg

SEQ ID NO: 278536 - DNA, 25 bp, Homo sapien
gcatgccaccacatccgattaattt

SEQ ID NO: 278537 - DNA, 25 bp, Homo sapien
ggtcttgccatgttgtctaagctgg

SEQ ID NO: 278538 - DNA, 25 bp, Homo sapien
gtgcatgccaccacatccgattaat

SEQ ID NO: 278539 - DNA, 25 bp, Homo sapien
attacagtctgggccaccacgcctg

SEQ ID NO: 278540 - DNA, 25 bp, Homo sapien
tttaaagggcaggtcttcggcatca

SEQ ID NO: 278541 - DNA, 25 bp, Homo sapien
tacagagtccgtacatattccaggt

SEQ ID NO: 278542 - DNA, 25 bp, Homo sapien
gctttccgtgtggtgaggatctcac

SEQ ID NO: 278543 - DNA, 25 bp, Homo sapien
caagcttttcgacataagggacagg

SEQ ID NO: 278544 - DNA, 25 bp, Homo sapien
aaacttctctagtaatgaactatag

SEQ ID NO: 278545 - DNA, 25 bp, Homo sapien
ttctctagtaatgaactatagaaat

SEQ ID NO: 278546 - DNA, 25 bp, Homo sapien
ggtgctctacaccttcagagaaact

SEQ ID NO: 278547 - DNA, 25 bp, Homo sapien
ctagtaatgaactatagaaatgatc

SEQ ID NO: 278548 - DNA, 25 bp, Homo sapien
ggtgagatccctgctcaatgtaacc

SEQ ID NO: 278549 - DNA, 25 bp, Homo sapien
gtgatagtgccacggcaccccagac

SEQ ID NO: 278550 - DNA, 25 bp, Homo sapien
ggccactaaccccaacaggatagaa

SEQ ID NO: 278551 - DNA, 25 bp, Homo sapien
ccttcaggtggtagtcattgtagac

SEQ ID NO: 278552 - DNA, 25 bp, Homo sapien
gagggtcaaagattttgacgtgcgt

SEQ ID NO: 278553 - DNA, 25 bp, Homo sapien
caaagattttgacgtgcgtaaaggg

SEQ ID NO: 278554 - DNA, 25 bp, Homo sapien
tttgcgcccgttcacttcgccttcc

SEQ ID NO: 278555 - DNA, 25 bp, Homo sapien
gccatttatattcatccttgtgact

SEQ ID NO: 278556 - DNA, 25 bp, Homo sapien
tttcccacttcaaaggagactagga

SEQ ID NO: 278557 - DNA, 25 bp, Homo sapien
gctttcccacttcaaaggagactag

SEQ ID NO: 278558 - DNA, 25 bp, Homo sapien
tgctttcccacttcaaaggagacta

SEQ ID NO: 278559 - DNA, 25 bp, Homo sapien
ttcccacttcaaaggagactaggac

SEQ ID NO: 278560 - DNA, 25 bp, Homo sapien
tactggcaaccaagacaataaaggc

SEQ ID NO: 278561 - DNA, 25 bp, Homo sapien
gatacaaacatcaggaggcagccgc

SEQ ID NO: 278562 - DNA, 25 bp, Homo sapien
tccaaatgtgtgtgcgactgccagt

SEQ ID NO: 278563 - DNA, 25 bp, Homo sapien
tagaacacacaagtctaggccaggc

SEQ ID NO: 278564 - DNA, 25 bp, Homo sapien
tgcttgggagcatcacagacactta

SEQ ID NO: 278565 - DNA, 25 bp, Homo sapien
tctgaagtgcgccacacaaggtgag

SEQ ID NO: 278566 - DNA, 25 bp, Homo sapien
tttaccagggtccacaagggagagc

SEQ ID NO: 278567 - DNA, 25 bp, Homo sapien
caaggaagggctaatctccaaggct

SEQ ID NO: 278568 - DNA, 25 bp, Homo sapien
gaccgtctaagaagcaaggccactg

SEQ ID NO: 278569 - DNA, 25 bp, Homo sapien
tagggacaacgatcctgtctcagag

SEQ ID NO: 278570 - DNA, 25 bp, Homo sapien
tccacaccgacagcagttactaggg

SEQ ID NO: 278571 - DNA, 25 bp, Homo sapien
tagaaaacagaaccagcacagcgtc

SEQ ID NO: 278572 - DNA, 25 bp, Homo sapien
tatacaaacaggccatggaaacaag

SEQ ID NO: 278573 - DNA, 25 bp, Homo sapien
aacaagggttttgatgctgggacca

SEQ ID NO: 278574 - DNA, 25 bp, Homo sapien
taatctgttaagaaaagacactcga

SEQ ID NO: 278575 - DNA, 25 bp, Homo sapien
gcaagttttattgagacaatataca

SEQ ID NO: 278576 - DNA, 25 bp, Homo sapien
gtaagggcgcgcgagaagggacgcg

SEQ ID NO: 278577 - DNA, 25 bp, Homo sapien
tgggatctgggatccaaacgccgtg

SEQ ID NO: 278578 - DNA, 25 bp, Homo sapien
aagggacgcggagagcgccggtcag

SEQ ID NO: 278579 - DNA, 25 bp, Homo sapien
ctgggatccaaacgccgtggccgcg

SEQ ID NO: 278580 - DNA, 25 bp, Homo sapien
tcggcctggcgatgcggggacatga

SEQ ID NO: 278581 - DNA, 25 bp, Homo sapien
gtccgggttgcacgccccgcggcca

SEQ ID NO: 278582 - DNA, 25 bp, Homo sapien
gggacatgagtaaaggtctggagga

SEQ ID NO: 278583 - DNA, 25 bp, Homo sapien
cgggcggggaccgaaggtgcagctc

SEQ ID NO: 278584 - DNA, 25 bp, Homo sapien
gagccatgattctgccactacatcc

SEQ ID NO: 278585 - DNA, 25 bp, Homo sapien
gaaatcacagtgcaccctgatgttg

SEQ ID NO: 278586 - DNA, 25 bp, Homo sapien
tgcatctctgcgttgtaggtagacc

SEQ ID NO: 278587 - DNA, 25 bp, Homo sapien
tattctggttcctaacacttgggtg

SEQ ID NO: 278588 - DNA, 25 bp, Homo sapien
ccttgtctttcaagcaggctggagc

SEQ ID NO: 278589 - DNA, 25 bp, Homo sapien
gcgcgggcctgggctcgggaaccgc

SEQ ID NO: 278590 - DNA, 25 bp, Homo sapien
cgggcctgggctcgggaaccgcttg

SEQ ID NO: 278591 - DNA, 25 bp, Homo sapien
tcggcgcgggcctgggctcgggaac

SEQ ID NO: 278592 - DNA, 25 bp, Homo sapien
gctcggcgcgggcctgggctcggga

SEQ ID NO: 278593 - DNA, 25 bp, Homo sapien
ggtccagataccaggaagggccgtg

SEQ ID NO: 278594 - DNA, 25 bp, Homo sapien
tcgcagggcagccactgctccgtgt

SEQ ID NO: 278595 - DNA, 25 bp, Homo sapien
ctcctcgcagggcagccactgctcc

SEQ ID NO: 278596 - DNA, 25 bp, Homo sapien
tgctccgtgttccaggcccagcagt

SEQ ID NO: 278597 - DNA, 25 bp, Homo sapien
agggcagccactgctccgtgttcca

SEQ ID NO: 278598 - DNA, 25 bp, Homo sapien
gagctgtcggaggcctagggcgccc

SEQ ID NO: 278599 - DNA, 25 bp, Homo sapien
gcaggccttagagacgctggagccg

SEQ ID NO: 278600 - DNA, 25 bp, Homo sapien
gccttagagacgctggagccgccat

SEQ ID NO: 278601 - DNA, 25 bp, Homo sapien
agctgtcggaggcctagggcgcccc

SEQ ID NO: 278602 - DNA, 25 bp, Homo sapien
tgggtttggagaagcagccgcccat

SEQ ID NO: 278603 - DNA, 25 bp, Homo sapien
ctggtttgggtttggagaagcagcc

SEQ ID NO: 278604 - DNA, 25 bp, Homo sapien
ggtttgggtttggagaagcagccgc

SEQ ID NO: 278605 - DNA, 25 bp, Homo sapien
tttgggtttggagaagcagccgccc

SEQ ID NO: 278606 - DNA, 25 bp, Homo sapien
agcctccacgcaatcctgagggctg

SEQ ID NO: 278607 - DNA, 25 bp, Homo sapien
cattctcgaggtccttgacgtggca

SEQ ID NO: 278608 - DNA, 25 bp, Homo sapien
agcaccacctcgatcttgagctcca

SEQ ID NO: 278609 - DNA, 25 bp, Homo sapien
tccgtgtggaagtggcgggccgtgc

SEQ ID NO: 278610 - DNA, 25 bp, Homo sapien
agggcgtggaactccccattgtcct

SEQ ID NO: 278611 - DNA, 25 bp, Homo sapien
cacttatggcccagggcgtggaact

SEQ ID NO: 278612 - DNA, 25 bp, Homo sapien
ggtgcgccgtagtgcggacacttat

SEQ ID NO: 278613 - DNA, 25 bp, Homo sapien
ctttcaccaggggtgcgccgtagtg

SEQ ID NO: 278614 - DNA, 25 bp, Homo sapien
gatgttgaagcaggcgccgtgccag

SEQ ID NO: 278615 - DNA, 25 bp, Homo sapien
ccagtgctgatgttgaagcaggcgc

SEQ ID NO: 278616 - DNA, 25 bp, Homo sapien
gaacttgtgtagactgtccaggcca

SEQ ID NO: 278617 - DNA, 25 bp, Homo sapien
gcgcacccgaccacgggacagaacg

SEQ ID NO: 278618 - DNA, 25 bp, Homo sapien
ttgctggcccggacgtacaccttct

SEQ ID NO: 278619 - DNA, 25 bp, Homo sapien
gcttgctggcccggacgtacacctt

SEQ ID NO: 278620 - DNA, 25 bp, Homo sapien
ctggcccggacgtacaccttctcct

SEQ ID NO: 278621 - DNA, 25 bp, Homo sapien
ctgcttgctggcccggacgtacacc

SEQ ID NO: 278622 - DNA, 25 bp, Homo sapien
gccatcaccttggtccttcgctgca

SEQ ID NO: 278623 - DNA, 25 bp, Homo sapien
caatgagcacattggtgctactgct

SEQ ID NO: 278624 - DNA, 25 bp, Homo sapien
cagcacttggagagatacacttggc

SEQ ID NO: 278625 - DNA, 25 bp, Homo sapien
cacttggagagatacacttggccat

SEQ ID NO: 278626 - DNA, 25 bp, Homo sapien
cttgctgagcttgggacggtcgtag

SEQ ID NO: 278627 - DNA, 25 bp, Homo sapien
ggaaggtgccggtctagcgtgcaca

SEQ ID NO: 278628 - DNA, 25 bp, Homo sapien
gatccggtcggagaagccctcctgc

SEQ ID NO: 278629 - DNA, 25 bp, Homo sapien
tagcgtgcacaggacgatccggtcg

SEQ ID NO: 278630 - DNA, 25 bp, Homo sapien
cctcgatgccataggctcggaaaaa

SEQ ID NO: 278631 - DNA, 25 bp, Homo sapien
gagcacctcgatgccataggctcgg

SEQ ID NO: 278632 - DNA, 25 bp, Homo sapien
gccataggctcggaaaaactccttg

SEQ ID NO: 278633 - DNA, 25 bp, Homo sapien
tgagcctcggtgagcacctcgatgc

SEQ ID NO: 278634 - DNA, 25 bp, Homo sapien
ttcttagttctcacgtccactgtga

SEQ ID NO: 278635 - DNA, 25 bp, Homo sapien
cagcttgctgtactccagcttgaag

SEQ ID NO: 278636 - DNA, 25 bp, Homo sapien
tcttagttctcacgtccactgtgac

SEQ ID NO: 278637 - DNA, 25 bp, Homo sapien
cagcagcttgctgtactccagcttg

SEQ ID NO: 278638 - DNA, 25 bp, Homo sapien
tcaccacgcgattggcatcctctgg

SEQ ID NO: 278639 - DNA, 25 bp, Homo sapien
tctggcgtccggatagtgaacacgt

SEQ ID NO: 278640 - DNA, 25 bp, Homo sapien
acgacgaccacgttgcggcctcggg

SEQ ID NO: 278641 - DNA, 25 bp, Homo sapien
agtgaacacgttctccacttctttg

SEQ ID NO: 278642 - DNA, 25 bp, Homo sapien
cccaggaacctcctgaagggcgtct

SEQ ID NO: 278643 - DNA, 25 bp, Homo sapien
acagagtgggccttctccgtcaggt

SEQ ID NO: 278644 - DNA, 25 bp, Homo sapien
gccttctccgtcaggtaagcggcca

SEQ ID NO: 278645 - DNA, 25 bp, Homo sapien
gagtgggccttctccgtcaggtaag

SEQ ID NO: 278646 - DNA, 25 bp, Homo sapien
catgtagaacttcacccggttgttc

SEQ ID NO: 278647 - DNA, 25 bp, Homo sapien
gctcagacacctccgtctgcatgta

SEQ ID NO: 278648 - DNA, 25 bp, Homo sapien
gtctgcatgtagaacttcacccggt

SEQ ID NO: 278649 - DNA, 25 bp, Homo sapien
cacctccgtctgcatgtagaacttc

SEQ ID NO: 278650 - DNA, 25 bp, Homo sapien
gggagtgggtggataaacaggtgga

SEQ ID NO: 278651 - DNA, 25 bp, Homo sapien
gagtgggtggataaacaggtggacc

SEQ ID NO: 278652 - DNA, 25 bp, Homo sapien
gggtggataaacaggtggacccagc

SEQ ID NO: 278653 - DNA, 25 bp, Homo sapien
gtggataaacaggtggacccagctc

SEQ ID NO: 278654 - DNA, 25 bp, Homo sapien
gtcagcccgcacgaccttgctgctc

SEQ ID NO: 278655 - DNA, 25 bp, Homo sapien
acgcagacgtcagcccgcacgacct

SEQ ID NO: 278656 - DNA, 25 bp, Homo sapien
gacgtcagcccgcacgaccttgctg

SEQ ID NO: 278657 - DNA, 25 bp, Homo sapien
tgcccaccacgcagacgtcagcccg

SEQ ID NO: 278658 - DNA, 25 bp, Homo sapien
caaattggcacttcagctggagcag

SEQ ID NO: 278659 - DNA, 25 bp, Homo sapien
gagcagaagccagttcgagtctcgt

SEQ ID NO: 278660 - DNA, 25 bp, Homo sapien
tacagcatgcgcttgatgtgccagc

SEQ ID NO: 278661 - DNA, 25 bp, Homo sapien
tatgtcaactctcgcagggcatgga

SEQ ID NO: 278662 - DNA, 25 bp, Homo sapien
tgccgctttgcctcaggaagcctgt

SEQ ID NO: 278663 - DNA, 25 bp, Homo sapien
cagggatgaagcctcgggaatccaa

SEQ ID NO: 278664 - DNA, 25 bp, Homo sapien
cttgttgacagggatgaagcctcgg

SEQ ID NO: 278665 - DNA, 25 bp, Homo sapien
tcgggaatccaaaccgatgccgctt

SEQ ID NO: 278666 - DNA, 25 bp, Homo sapien
gtcctccccacccagtgccatccac

SEQ ID NO: 278667 - DNA, 25 bp, Homo sapien
tccccacccagtgccatccacccca

SEQ ID NO: 278668 - DNA, 25 bp, Homo sapien
ccccacccagtgccatccaccccac

SEQ ID NO: 278669 - DNA, 25 bp, Homo sapien
cctccccacccagtgccatccaccc

SEQ ID NO: 278670 - DNA, 25 bp, Homo sapien
ctgcaaacacgcctgggacattggt

SEQ ID NO: 278671 - DNA, 25 bp, Homo sapien
aatgtggaatgttcactttgcggtt

SEQ ID NO: 278672 - DNA, 25 bp, Homo sapien
cgcctgggacattggtctgcatcat

SEQ ID NO: 278673 - DNA, 25 bp, Homo sapien
tcactttgcggttgttcctccaggc

SEQ ID NO: 278674 - DNA, 25 bp, Homo sapien
ccaaacatggcggtccagaggtagg

SEQ ID NO: 278675 - DNA, 25 bp, Homo sapien
gcctcctgcgccaacatgttctggg

SEQ ID NO: 278676 - DNA, 25 bp, Homo sapien
tcttgccaaacatggcggtccagag

SEQ ID NO: 278677 - DNA, 25 bp, Homo sapien
gaggtagggcacagtgctcatctcc

SEQ ID NO: 278678 - DNA, 25 bp, Homo sapien
agcgagttcttaccggcctcttcct

SEQ ID NO: 278679 - DNA, 25 bp, Homo sapien
taggtagttcgtagccttgccgcca

SEQ ID NO: 278680 - DNA, 25 bp, Homo sapien
ggccctgctccatacgtccttttag

SEQ ID NO: 278681 - DNA, 25 bp, Homo sapien
gagggaacgagacgtcacaggatcc

SEQ ID NO: 278682 - DNA, 25 bp, Homo sapien
ctccagatccccctggatgatgacg

SEQ ID NO: 278683 - DNA, 25 bp, Homo sapien
ttagtgtaaaaagccacaaacttca

SEQ ID NO: 278684 - DNA, 25 bp, Homo sapien
cccctggatgatgacgtcgtcgaag

SEQ ID NO: 278685 - DNA, 25 bp, Homo sapien
gacgtcgtcgaagccttctccgtag

SEQ ID NO: 278686 - DNA, 25 bp, Homo sapien
ggctgggctcttgttctgggatttt

SEQ ID NO: 278687 - DNA, 25 bp, Homo sapien
ggcaacaagaatggcctgagcaccc

SEQ ID NO: 278688 - DNA, 25 bp, Homo sapien
tccctgctttgcacatcgcggcttg

SEQ ID NO: 278689 - DNA, 25 bp, Homo sapien
tgaccgtgcacaagcttcgggcttt

SEQ ID NO: 278690 - DNA, 25 bp, Homo sapien
cagcgaccttggacacaatgggatc

SEQ ID NO: 278691 - DNA, 25 bp, Homo sapien
ttccggatggcacggcctgaggcca

SEQ ID NO: 278692 - DNA, 25 bp, Homo sapien
aatgggatcgtagttcatgctggcc

SEQ ID NO: 278693 - DNA, 25 bp, Homo sapien
ccgcttccggatggcacggcctgag

SEQ ID NO: 278694 - DNA, 25 bp, Homo sapien
ctatgtggagggcatacccagggca

SEQ ID NO: 278695 - DNA, 25 bp, Homo sapien
tatgtccagttaggtgtcccacgcc

SEQ ID NO: 278696 - DNA, 25 bp, Homo sapien
tgttgagtgaaacctagaaccaccc

SEQ ID NO: 278697 - DNA, 25 bp, Homo sapien
gaatctcattgacaccacaccagga

SEQ ID NO: 278698 - DNA, 25 bp, Homo sapien
tgggaaaggctcagaacggtcaaca

SEQ ID NO: 278699 - DNA, 25 bp, Homo sapien
cagggaggtgtacttggacagaggg

SEQ ID NO: 278700 - DNA, 25 bp, Homo sapien
gataagaccattgggtggagggtct

SEQ ID NO: 278701 - DNA, 25 bp, Homo sapien
tgccagaccctagtgcccagcaggg

SEQ ID NO: 278702 - DNA, 25 bp, Homo sapien
ttccccgtaagccaggacatgtcgc

SEQ ID NO: 278703 - DNA, 25 bp, Homo sapien
gatcctttccccgtaagccaggaca

SEQ ID NO: 278704 - DNA, 25 bp, Homo sapien
cgtaagccaggacatgtcgccagtc

SEQ ID NO: 278705 - DNA, 25 bp, Homo sapien
tcaggatcctttccccgtaagccag

SEQ ID NO: 278706 - DNA, 25 bp, Homo sapien
tttgcctgcccaagtctactgcatg

SEQ ID NO: 278707 - DNA, 25 bp, Homo sapien
gggaccagtcccaatagagggagaa

SEQ ID NO: 278708 - DNA, 25 bp, Homo sapien
taatgtttaacgtgttgcagggttc

SEQ ID NO: 278709 - DNA, 25 bp, Homo sapien
gaggccttgagggttgagcatcttc

SEQ ID NO: 278710 - DNA, 25 bp, Homo sapien
tatgtactggcgctgcgttgtccct

SEQ ID NO: 278711 - DNA, 25 bp, Homo sapien
tgaatgcagtgtgtcgtccctagcc

SEQ ID NO: 278712 - DNA, 25 bp, Homo sapien
gacaagcctaccgcttgccgagaca

SEQ ID NO: 278713 - DNA, 25 bp, Homo sapien
atcggccgcgctgtaagcccaactt

SEQ ID NO: 278714 - DNA, 25 bp, Homo sapien
gcgtcaggtactcgacactgtccga

SEQ ID NO: 278715 - DNA, 25 bp, Homo sapien
gatgcactgtttcgaagggcccgaa

SEQ ID NO: 278716 - DNA, 25 bp, Homo sapien
cactgtccgagcagctatggtcgaa

SEQ ID NO: 278717 - DNA, 25 bp, Homo sapien
ggcccgaagttgagcgtcaggtact

SEQ ID NO: 278718 - DNA, 25 bp, Homo sapien
ggcatctttataggccaccactgtg

SEQ ID NO: 278719 - DNA, 25 bp, Homo sapien
aatggcatctttataggccaccact

SEQ ID NO: 278720 - DNA, 25 bp, Homo sapien
tataggccaccactgtgtgcttgct

SEQ ID NO: 278721 - DNA, 25 bp, Homo sapien
atctttataggccaccactgtgtgc

SEQ ID NO: 278722 - DNA, 25 bp, Homo sapien
agcagtctttcacatcgaaccgcag

SEQ ID NO: 278723 - DNA, 25 bp, Homo sapien
agtctttcacatcgaaccgcaggag

SEQ ID NO: 278724 - DNA, 25 bp, Homo sapien
cacatcgaaccgcaggaggtcattg

SEQ ID NO: 278725 - DNA, 25 bp, Homo sapien
tttcacatcgaaccgcaggaggtca

SEQ ID NO: 278726 - DNA, 25 bp, Homo sapien
cagcacggggtccatcaatttcatt

SEQ ID NO: 278727 - DNA, 25 bp, Homo sapien
gcagtgcagcatcttacagcacggg

SEQ ID NO: 278728 - DNA, 25 bp, Homo sapien
ttcatttaatacctatctatctaac

SEQ ID NO: 278729 - DNA, 25 bp, Homo sapien
tctatccacctatcatctacctata

SEQ ID NO: 278730 - DNA, 25 bp, Homo sapien
aagacaaacatgctgctcccataga

SEQ ID NO: 278731 - DNA, 25 bp, Homo sapien
tcccatagacgacggccgagtggtg

SEQ ID NO: 278732 - DNA, 25 bp, Homo sapien
ctgctcccatagacgacggccgagt

SEQ ID NO: 278733 - DNA, 25 bp, Homo sapien
ctcccatagacgacggccgagtggt

SEQ ID NO: 278734 - DNA, 25 bp, Homo sapien
ttcaattttccactccgtccactgg

SEQ ID NO: 278735 - DNA, 25 bp, Homo sapien
cagcttgtcactgtacaccgtggcc

SEQ ID NO: 278736 - DNA, 25 bp, Homo sapien
tggcgttgccgtcatagccagcaaa

SEQ ID NO: 278737 - DNA, 25 bp, Homo sapien
gccagcaaagatccacagcttgtca

SEQ ID NO: 278738 - DNA, 25 bp, Homo sapien
atgggctgacctagcgactggcaac

SEQ ID NO: 278739 - DNA, 25 bp, Homo sapien
tggaggccaattgtccacatgtcat

SEQ ID NO: 278740 - DNA, 25 bp, Homo sapien
ggccaattgtccacatgtcattcaa

SEQ ID NO: 278741 - DNA, 25 bp, Homo sapien
tcggtcctggaggccaattgtccac

SEQ ID NO: 278742 - DNA, 25 bp, Homo sapien
ggtcctggaggccaattgtccacat

SEQ ID NO: 278743 - DNA, 25 bp, Homo sapien
ccgcaggtcaccagggaggagagcg

SEQ ID NO: 278744 - DNA, 25 bp, Homo sapien
cagtgaggaactggtcgtgaaggcc

SEQ ID NO: 278745 - DNA, 25 bp, Homo sapien
acacgtggcactctgcccatccaaa

SEQ ID NO: 278746 - DNA, 25 bp, Homo sapien
caaacctcgaatcactgtgcagcca

SEQ ID NO: 278747 - DNA, 25 bp, Homo sapien
gctttgcccagagaatacaaacatc

SEQ ID NO: 278748 - DNA, 25 bp, Homo sapien
ccttgaattcaaactggaagaggtt

SEQ ID NO: 278749 - DNA, 25 bp, Homo sapien
tacaaacatcttgtcccggcacaca

SEQ ID NO: 278750 - DNA, 25 bp, Homo sapien
ggttattttggctccgctttgccca

SEQ ID NO: 278751 - DNA, 25 bp, Homo sapien
tatttgagatctatgcaggccacgt

SEQ ID NO: 278752 - DNA, 25 bp, Homo sapien
tgaccaagctattcacgaggaaggg

SEQ ID NO: 278753 - DNA, 25 bp, Homo sapien
ttcacgttcagagggaggcctagcc

SEQ ID NO: 278754 - DNA, 25 bp, Homo sapien
gagctcacaaggatggttaccatgg

SEQ ID NO: 278755 - DNA, 25 bp, Homo sapien
ggtatgcccgtagcgccgctgcggg

SEQ ID NO: 278756 - DNA, 25 bp, Homo sapien
gagcaggtgttcagttgggatgcgt

SEQ ID NO: 278757 - DNA, 25 bp, Homo sapien
gtgttcagttgggatgcgtgtccac

SEQ ID NO: 278758 - DNA, 25 bp, Homo sapien
aggtgttcagttgggatgcgtgtcc

SEQ ID NO: 278759 - DNA, 25 bp, Homo sapien
ttgggcagcgtgttgtcggccgcac

SEQ ID NO: 278760 - DNA, 25 bp, Homo sapien
acacatagaggtggcggtcaaaggc

SEQ ID NO: 278761 - DNA, 25 bp, Homo sapien
tcatagcagtgcagctcgttgggca

SEQ ID NO: 278762 - DNA, 25 bp, Homo sapien
tgggctggacgacctcccaggtctg

SEQ ID NO: 278763 - DNA, 25 bp, Homo sapien
ctcggaagcacaggctcgctcgggc

SEQ ID NO: 278764 - DNA, 25 bp, Homo sapien
acacatctcgggacttcttgaagcc

SEQ ID NO: 278765 - DNA, 25 bp, Homo sapien
acttcttgaagccaacccgctcctc

SEQ ID NO: 278766 - DNA, 25 bp, Homo sapien
ctgaggtggtgccaaagtccaggcc

SEQ ID NO: 278767 - DNA, 25 bp, Homo sapien
tgaccccaagcaagtatttctcggg

SEQ ID NO: 278768 - DNA, 25 bp, Homo sapien
ccccatgtgtgagaggtgttgatca

SEQ ID NO: 278769 - DNA, 25 bp, Homo sapien
gggtgatggagtcttaatgaggatc

SEQ ID NO: 278770 - DNA, 25 bp, Homo sapien
gcaagtatttctcggggcctcagtc

SEQ ID NO: 278771 - DNA, 25 bp, Homo sapien
ccgagatgacagcagccgcgtggaa

SEQ ID NO: 278772 - DNA, 25 bp, Homo sapien
gcgtggaagagcctcccactgggca

SEQ ID NO: 278773 - DNA, 25 bp, Homo sapien
ccccgaagatgtacatggcgtccga

SEQ ID NO: 278774 - DNA, 25 bp, Homo sapien
ccccgctgcggatgttgttgtccac

SEQ ID NO: 278775 - DNA, 25 bp, Homo sapien
tggctgtgagtccctgccctgacca

SEQ ID NO: 278776 - DNA, 25 bp, Homo sapien
cctgcctctcttgccttcggctggg

SEQ ID NO: 278777 - DNA, 25 bp, Homo sapien
tcagcagagctctgccgtctccact

SEQ ID NO: 278778 - DNA, 25 bp, Homo sapien
gcctggacctgcgtcctcacactgg

SEQ ID NO: 278779 - DNA, 25 bp, Homo sapien
tcgtgcagcgtgcatttagggtaac

SEQ ID NO: 278780 - DNA, 25 bp, Homo sapien
agcacgaactccacgtcgcagaact

SEQ ID NO: 278781 - DNA, 25 bp, Homo sapien
actccacgtcgcagaactggcggct

SEQ ID NO: 278782 - DNA, 25 bp, Homo sapien
gcccgtagtcctcgtgcagcgtgca

SEQ ID NO: 278783 - DNA, 25 bp, Homo sapien
tgcacaaagaatgatgcactggcag

SEQ ID NO: 278784 - DNA, 25 bp, Homo sapien
gcacaaagaatgatgcactggcaga

SEQ ID NO: 278785 - DNA, 25 bp, Homo sapien
ctgcacaaagaatgatgcactggca

SEQ ID NO: 278786 - DNA, 25 bp, Homo sapien
cgcgcctgcgtgatcttcctgcgaa

SEQ ID NO: 278787 - DNA, 25 bp, Homo sapien
tgatcttcctgcgaagccagcggct

SEQ ID NO: 278788 - DNA, 25 bp, Homo sapien
aagccagcggctccgcgctgtgaca

SEQ ID NO: 278789 - DNA, 25 bp, Homo sapien
tgacaatggctacgtggccctgcac

SEQ ID NO: 278790 - DNA, 25 bp, Homo sapien
tccgtgggtatttgatcttgtcggt

SEQ ID NO: 278791 - DNA, 25 bp, Homo sapien
agcacctcgaagggccgggcctcgg

SEQ ID NO: 278792 - DNA, 25 bp, Homo sapien
ctttccgtgggtatttgatcttgtc

SEQ ID NO: 278793 - DNA, 25 bp, Homo sapien
tatttgatcttgtcggtgtagagga

SEQ ID NO: 278794 - DNA, 25 bp, Homo sapien
ccccgaatctcagggagccggagag

SEQ ID NO: 278795 - DNA, 25 bp, Homo sapien
cccccgaatctcagggagccggaga

SEQ ID NO: 278796 - DNA, 25 bp, Homo sapien
gagcccccgaatctcagggagccgg

SEQ ID NO: 278797 - DNA, 25 bp, Homo sapien
ccagagcccccgaatctcagggagc

SEQ ID NO: 278798 - DNA, 25 bp, Homo sapien
agccgggcggcactctcgcacacaa

SEQ ID NO: 278799 - DNA, 25 bp, Homo sapien
atgtactggcggcacagctgctcca

SEQ ID NO: 278800 - DNA, 25 bp, Homo sapien
tgctccaggcggcacaactggaagc

SEQ ID NO: 278801 - DNA, 25 bp, Homo sapien
cactctcgcacacaaccagcacgtt

SEQ ID NO: 278802 - DNA, 25 bp, Homo sapien
tgaagtgggactcctttaccacgaa

SEQ ID NO: 278803 - DNA, 25 bp, Homo sapien
tgggactcctttaccacgaagttca

SEQ ID NO: 278804 - DNA, 25 bp, Homo sapien
tggttgaagtgggactcctttacca

SEQ ID NO: 278805 - DNA, 25 bp, Homo sapien
cctttaccacgaagttcaggcagtg

SEQ ID NO: 278806 - DNA, 25 bp, Homo sapien
gagaggcgctcgaactccttcatca

SEQ ID NO: 278807 - DNA, 25 bp, Homo sapien
gccgcacaatctccactatcagtgg

SEQ ID NO: 278808 - DNA, 25 bp, Homo sapien
gtggagaggagaggcgctcgaactc

SEQ ID NO: 278809 - DNA, 25 bp, Homo sapien
tggctggtccaagggagtgcgaggg

SEQ ID NO: 278810 - DNA, 25 bp, Homo sapien
ccagaaattggctcaggaaatccca

SEQ ID NO: 278811 - DNA, 25 bp, Homo sapien
aaagagaagtccagagactgatcac

SEQ ID NO: 278812 - DNA, 25 bp, Homo sapien
tccctgtacccaggagagcactctg

SEQ ID NO: 278813 - DNA, 25 bp, Homo sapien
agacctgacatcctagcccgaaaga

SEQ ID NO: 278814 - DNA, 25 bp, Homo sapien
gtcagcacaagccccagggagagct

SEQ ID NO: 278815 - DNA, 25 bp, Homo sapien
actgcatggcctctggtgcctgcag

SEQ ID NO: 278816 - DNA, 25 bp, Homo sapien
aagagccagcaaccggggtcagcac

SEQ ID NO: 278817 - DNA, 25 bp, Homo sapien
ggtgcctgcagacatcaccaagagc

SEQ ID NO: 278818 - DNA, 25 bp, Homo sapien
cgccctggccgactcaagcactatg

SEQ ID NO: 278819 - DNA, 25 bp, Homo sapien
tgcccatgttgctgccctgaacaaa

SEQ ID NO: 278820 - DNA, 25 bp, Homo sapien
ccttcctgcatatctgcccatgttg

SEQ ID NO: 278821 - DNA, 25 bp, Homo sapien
aggcagaaggcctcactcgccctga

SEQ ID NO: 278822 - DNA, 25 bp, Homo sapien
cccgtcaagcaacagagtgatgtca

SEQ ID NO: 278823 - DNA, 25 bp, Homo sapien
gagcgggcggccaggatagccttgt

SEQ ID NO: 278824 - DNA, 25 bp, Homo sapien
ctggccgtgggtgcccgtcaagcaa

SEQ ID NO: 278825 - DNA, 25 bp, Homo sapien
agtgatgtcacagaattccgcgccc

SEQ ID NO: 278826 - DNA, 25 bp, Homo sapien
gttcacctgcccatcttcgggcatg

SEQ ID NO: 278827 - DNA, 25 bp, Homo sapien
tgaaggaccggaacatggcttcaaa

SEQ ID NO: 278828 - DNA, 25 bp, Homo sapien
gatgtagcgcagcatggactcgaag

SEQ ID NO: 278829 - DNA, 25 bp, Homo sapien
catctccccgatggagatgttcacc

SEQ ID NO: 278830 - DNA, 25 bp, Homo sapien
agcgagtcctcgggcggcatgttga

SEQ ID NO: 278831 - DNA, 25 bp, Homo sapien
gcgagtcctcgggcggcatgttgac

SEQ ID NO: 278832 - DNA, 25 bp, Homo sapien
tggtggggacctgggagttcactgg

SEQ ID NO: 278833 - DNA, 25 bp, Homo sapien
cttggtggggacctgggagttcact

SEQ ID NO: 278834 - DNA, 25 bp, Homo sapien
gacctgggagttcactggggagtga

SEQ ID NO: 278835 - DNA, 25 bp, Homo sapien
tggggacctgggagttcactgggga

SEQ ID NO: 278836 - DNA, 25 bp, Homo sapien
agagcgggcctcaaagccacctgag

SEQ ID NO: 278837 - DNA, 25 bp, Homo sapien
ggagagcgggcctcaaagccacctg

SEQ ID NO: 278838 - DNA, 25 bp, Homo sapien
gcgggcctcaaagccacctgaggtg

SEQ ID NO: 278839 - DNA, 25 bp, Homo sapien
agcgggcctcaaagccacctgaggt

SEQ ID NO: 278840 - DNA, 25 bp, Homo sapien
ctgaagtgacataaggagtacctcc

SEQ ID NO: 278841 - DNA, 25 bp, Homo sapien
gctgactaaaggaagctggtccgcc

SEQ ID NO: 278842 - DNA, 25 bp, Homo sapien
tgaactacttagtgggtcaaaggcc

SEQ ID NO: 278843 - DNA, 25 bp, Homo sapien
tagcgctgttccatggccttgcagg

SEQ ID NO: 278844 - DNA, 25 bp, Homo sapien
aggttctgcttgcagtacgcctgca

SEQ ID NO: 278845 - DNA, 25 bp, Homo sapien
ttgcagtacgcctgcagccggttgt

SEQ ID NO: 278846 - DNA, 25 bp, Homo sapien
gcacgttctgcaccgtcacgttcat

SEQ ID NO: 278847 - DNA, 25 bp, Homo sapien
tgttgtagaagccgtagtagtaggg

SEQ ID NO: 278848 - DNA, 25 bp, Homo sapien
gggaccttgaggcgctgcccctttc

SEQ ID NO: 278849 - DNA, 25 bp, Homo sapien
accttgaggcgctgcccctttcacc

SEQ ID NO: 278850 - DNA, 25 bp, Homo sapien
ctgcaatggcagggaccttgaggcg

SEQ ID NO: 278851 - DNA, 25 bp, Homo sapien
tgcaatggcagggaccttgaggcgc

SEQ ID NO: 278852 - DNA, 25 bp, Homo sapien
cagtgcctgcgttttgtcagctgcc

SEQ ID NO: 278853 - DNA, 25 bp, Homo sapien
gtgcacaatgatgtgcaggcagtgc

SEQ ID NO: 278854 - DNA, 25 bp, Homo sapien
cacaatgatgtgcaggcagtgccgc

SEQ ID NO: 278855 - DNA, 25 bp, Homo sapien
ccagtgcctgcgttttgtcagctgc

SEQ ID NO: 278856 - DNA, 25 bp, Homo sapien
ctggctcagcgaccgcagggtgggc

SEQ ID NO: 278857 - DNA, 25 bp, Homo sapien
agggagtctatgatgtccagcagca

SEQ ID NO: 278858 - DNA, 25 bp, Homo sapien
tcagatgtcggcgcccagctctgcg

SEQ ID NO: 278859 - DNA, 25 bp, Homo sapien
agctctgcgcactgcttgtctgaga

SEQ ID NO: 278860 - DNA, 25 bp, Homo sapien
tcaagtcaggtgagacccatacatc

SEQ ID NO: 278861 - DNA, 25 bp, Homo sapien
caggcacggcgattcttcacaatgg

SEQ ID NO: 278862 - DNA, 25 bp, Homo sapien
tgccataggcatgcgcatagccggt

SEQ ID NO: 278863 - DNA, 25 bp, Homo sapien
catagccggtagtcttctcagtagg

SEQ ID NO: 278864 - DNA, 25 bp, Homo sapien
catggatagagacaggtaaggccac

SEQ ID NO: 278865 - DNA, 25 bp, Homo sapien
gtaaggccactgacctacatctggg

SEQ ID NO: 278866 - DNA, 25 bp, Homo sapien
tgttcccagtaagggagcgctggct

SEQ ID NO: 278867 - DNA, 25 bp, Homo sapien
gctggctcccagcactagagtggat

SEQ ID NO: 278868 - DNA, 25 bp, Homo sapien
cacgtgggcgacaatactggtagtc

SEQ ID NO: 278869 - DNA, 25 bp, Homo sapien
cagaagtcaagagaatcggctggga

SEQ ID NO: 278870 - DNA, 25 bp, Homo sapien
tctctatggtaccaacttccggcgc

SEQ ID NO: 278871 - DNA, 25 bp, Homo sapien
agcggacgaaagagaagcccacgtg

SEQ ID NO: 278872 - DNA, 25 bp, Homo sapien
aatttccgtattgcaaattagccgg

SEQ ID NO: 278873 - DNA, 25 bp, Homo sapien
cctgtgttgtactttgagagattcc

SEQ ID NO: 278874 - DNA, 25 bp, Homo sapien
cctccccagtacgagagtgagtgcg

SEQ ID NO: 278875 - DNA, 25 bp, Homo sapien
ggttctttcgtgcaagcgtcccagg

SEQ ID NO: 278876 - DNA, 25 bp, Homo sapien
ccataacgctaggagagctaattac

SEQ ID NO: 278877 - DNA, 25 bp, Homo sapien
tctgtattccccaccataacgctag

SEQ ID NO: 278878 - DNA, 25 bp, Homo sapien
gagggtgcggcaggcaaccatccct

SEQ ID NO: 278879 - DNA, 25 bp, Homo sapien
ggcaggcaaccatccctctgtattc

SEQ ID NO: 278880 - DNA, 25 bp, Homo sapien
ggaccataagttcggccaagtgcgc

SEQ ID NO: 278881 - DNA, 25 bp, Homo sapien
ccacggtggtccctgtgggagacct

SEQ ID NO: 278882 - DNA, 25 bp, Homo sapien
tgcgccttagtgcactggtacgtgg

SEQ ID NO: 278883 - DNA, 25 bp, Homo sapien
catctctgacaggtgggcattaact

SEQ ID NO: 278884 - DNA, 25 bp, Homo sapien
tgtaggtgacagacccaattgctgc

SEQ ID NO: 278885 - DNA, 25 bp, Homo sapien
cagtggccagcagatatgtatgtcc

SEQ ID NO: 278886 - DNA, 25 bp, Homo sapien
gcacacaggtggtcacagtaaacag

SEQ ID NO: 278887 - DNA, 25 bp, Homo sapien
taactgctacgtgcttggcagggca

SEQ ID NO: 278888 - DNA, 25 bp, Homo sapien
aaagatgtcagtgcggctgtcgcca

SEQ ID NO: 278889 - DNA, 25 bp, Homo sapien
tatgacatgtcagcacaacctggac

SEQ ID NO: 278890 - DNA, 25 bp, Homo sapien
tagtcgacagcaaagccacctatga

SEQ ID NO: 278891 - DNA, 25 bp, Homo sapien
tgtgccatcaggaagcaggagacct

SEQ ID NO: 278892 - DNA, 25 bp, Homo sapien
cataggatggctgcaagggtcacac

SEQ ID NO: 278893 - DNA, 25 bp, Homo sapien
tccatggtgctaaacaagagtgtct

SEQ ID NO: 278894 - DNA, 25 bp, Homo sapien
gaatccgtatcaactctcagaggca

SEQ ID NO: 278895 - DNA, 25 bp, Homo sapien
tttggacccgcacagtaaaagggca

SEQ ID NO: 278896 - DNA, 25 bp, Homo sapien
ggacacttccactaaagcaggatcc

SEQ ID NO: 278897 - DNA, 25 bp, Homo sapien
ccaggccaggccagttgctgttaaa

SEQ ID NO: 278898 - DNA, 25 bp, Homo sapien
tccactaaagcaggatccagatcca

SEQ ID NO: 278899 - DNA, 25 bp, Homo sapien
cagccgcagctgaacaggaggcaaa

SEQ ID NO: 278900 - DNA, 25 bp, Homo sapien
ccagcctgtcgtagcccctggggag

SEQ ID NO: 278901 - DNA, 25 bp, Homo sapien
cccagcctgtcgtagcccctgggga

SEQ ID NO: 278902 - DNA, 25 bp, Homo sapien
ccccagcctgtcgtagcccctgggg

SEQ ID NO: 278903 - DNA, 25 bp, Homo sapien
cgcccacccgccagttcctggtcat

SEQ ID NO: 278904 - DNA, 25 bp, Homo sapien
agaccacgatcccaaactgcagcag

SEQ ID NO: 278905 - DNA, 25 bp, Homo sapien
gcagggcgcccacccgccagttcct

SEQ ID NO: 278906 - DNA, 25 bp, Homo sapien
cacatagaccacgatcccaaactgc

SEQ ID NO: 278907 - DNA, 25 bp, Homo sapien
ggccacatcccacagccggtttcca

SEQ ID NO: 278908 - DNA, 25 bp, Homo sapien
agccggtttccaagctccttgatct

SEQ ID NO: 278909 - DNA, 25 bp, Homo sapien
ctgaggtggcttcacgaagtcggcc

SEQ ID NO: 278910 - DNA, 25 bp, Homo sapien
tggcttcacgaagtcggccacatcc

SEQ ID NO: 278911 - DNA, 25 bp, Homo sapien
agcagaagtggcagttgaggctggg

SEQ ID NO: 278912 - DNA, 25 bp, Homo sapien
ctcgtgttgactggaaaggccggaa

SEQ ID NO: 278913 - DNA, 25 bp, Homo sapien
ctgggctcgtgttgactggaaaggc

SEQ ID NO: 278914 - DNA, 25 bp, Homo sapien
ggcctggctgggctcgtgttgactg

SEQ ID NO: 278915 - DNA, 25 bp, Homo sapien
tggctgggctcgtgttgactggaaa

SEQ ID NO: 278916 - DNA, 25 bp, Homo sapien
tcaccaagaagaacacgttctctcc

SEQ ID NO: 278917 - DNA, 25 bp, Homo sapien
gctggcgtcacaaggaagttggtca

SEQ ID NO: 278918 - DNA, 25 bp, Homo sapien
ttggtcaccaagaagaacacgttct

SEQ ID NO: 278919 - DNA, 25 bp, Homo sapien
cttgggctggcgtcacaaggaagtt

SEQ ID NO: 278920 - DNA, 25 bp, Homo sapien
cgtcgacccagcagttagccagtgg

SEQ ID NO: 278921 - DNA, 25 bp, Homo sapien
ccagcagttagccagtgggacggac

SEQ ID NO: 278922 - DNA, 25 bp, Homo sapien
agtcctcgtcgacccagcagttagc

SEQ ID NO: 278923 - DNA, 25 bp, Homo sapien
gggcagtcctcgtcgacccagcagt

SEQ ID NO: 278924 - DNA, 25 bp, Homo sapien
agggcacaacgccactctccacggg

SEQ ID NO: 278925 - DNA, 25 bp, Homo sapien
ggcaccaactccagatctcacaggt

SEQ ID NO: 278926 - DNA, 25 bp, Homo sapien
gatctcacaggtcctgtgggtccca

SEQ ID NO: 278927 - DNA, 25 bp, Homo sapien
gtgggtcccattgaacaccacacac

SEQ ID NO: 278928 - DNA, 25 bp, Homo sapien
tagagaagttgaacttgctgaaggt

SEQ ID NO: 278929 - DNA, 25 bp, Homo sapien
ttagagaagttgaacttgctgaagg

SEQ ID NO: 278930 - DNA, 25 bp, Homo sapien
atgaacagtgtgaagttctgggcct

SEQ ID NO: 278931 - DNA, 25 bp, Homo sapien
tttgatgaacagtgtgaagttctgg

SEQ ID NO: 278932 - DNA, 25 bp, Homo sapien
ggctgaattgtggttcatagcggca

SEQ ID NO: 278933 - DNA, 25 bp, Homo sapien
tagcggcagtgcttaaaataggtgg

SEQ ID NO: 278934 - DNA, 25 bp, Homo sapien
ggtcccaggtctccaaggcattgga

SEQ ID NO: 278935 - DNA, 25 bp, Homo sapien
gaggtccccaatgcggaacacggga

SEQ ID NO: 278936 - DNA, 25 bp, Homo sapien
gtccaggtcacaatcccagtgaact

SEQ ID NO: 278937 - DNA, 25 bp, Homo sapien
tcccagtgaactctgatgcctacag

SEQ ID NO: 278938 - DNA, 25 bp, Homo sapien
gaactctgatgcctacagagccacc

SEQ ID NO: 278939 - DNA, 25 bp, Homo sapien
agagtccccggtgtccaggtcacaa

SEQ ID NO: 278940 - DNA, 25 bp, Homo sapien
ctgaagttgtagctcttctcctgca

SEQ ID NO: 278941 - DNA, 25 bp, Homo sapien
tgaagttgtagctcttctcctgcag

SEQ ID NO: 278942 - DNA, 25 bp, Homo sapien
gaagcggattccatagagcttgagc

SEQ ID NO: 278943 - DNA, 25 bp, Homo sapien
gaggatgtcgaagcggattccatag

SEQ ID NO: 278944 - DNA, 25 bp, Homo sapien
ttccatagagcttgagcagggtgcg

SEQ ID NO: 278945 - DNA, 25 bp, Homo sapien
gtgcgggcctccacacccggttgct

SEQ ID NO: 278946 - DNA, 25 bp, Homo sapien
cggtgcccagtgtgacggccgtggg

SEQ ID NO: 278947 - DNA, 25 bp, Homo sapien
acggccgtggggatgagcccgaact

SEQ ID NO: 278948 - DNA, 25 bp, Homo sapien
gccgtggggatgagcccgaacttcc

SEQ ID NO: 278949 - DNA, 25 bp, Homo sapien
cagccaagctgccccggtgcccagt

SEQ ID NO: 278950 - DNA, 25 bp, Homo sapien
caggtgcccacagtgctcgcactca

SEQ ID NO: 278951 - DNA, 25 bp, Homo sapien
accccgagactcaatgtgcaggcac

SEQ ID NO: 278952 - DNA, 25 bp, Homo sapien
agcatgcattggacacaccctggtc

SEQ ID NO: 278953 - DNA, 25 bp, Homo sapien
agcctgcaccccgagactcaatgtg

SEQ ID NO: 278954 - DNA, 25 bp, Homo sapien
ggcttctctatccacatacagcagt

SEQ ID NO: 278955 - DNA, 25 bp, Homo sapien
tcatactttgtcctccagtagaaat

SEQ ID NO: 278956 - DNA, 25 bp, Homo sapien
ctcctcatactttgtcctccagtag

SEQ ID NO: 278957 - DNA, 25 bp, Homo sapien
gggcttctctatccacatacagcag

SEQ ID NO: 278958 - DNA, 25 bp, Homo sapien
caggtgctgagctccgtctgaggca

SEQ ID NO: 278959 - DNA, 25 bp, Homo sapien
tacaggctcccggaatgggttggca

SEQ ID NO: 278960 - DNA, 25 bp, Homo sapien
tccacacagagttggcggttgcttt

SEQ ID NO: 278961 - DNA, 25 bp, Homo sapien
ggtgtcagaacttggacagggccat

SEQ ID NO: 278962 - DNA, 25 bp, Homo sapien
tctcaaaacacagccgacttctatg

SEQ ID NO: 278963 - DNA, 25 bp, Homo sapien
gtcaggttctgtcgccgtctcaaaa

SEQ ID NO: 278964 - DNA, 25 bp, Homo sapien
gcagtcggagccctgcaatacaggt

SEQ ID NO: 278965 - DNA, 25 bp, Homo sapien
tcccagtctccacgggtcaggttct

SEQ ID NO: 278966 - DNA, 25 bp, Homo sapien
ctcataaactaagcaggtgtgggcc

SEQ ID NO: 278967 - DNA, 25 bp, Homo sapien
ggaaagcagccggtcctcataaact

SEQ ID NO: 278968 - DNA, 25 bp, Homo sapien
taccgaggagggatatagaaggtcc

SEQ ID NO: 278969 - DNA, 25 bp, Homo sapien
gtgtgggcccaagacacatgctccg

SEQ ID NO: 278970 - DNA, 25 bp, Homo sapien
tatgacttggactgaagtgaatttc

SEQ ID NO: 278971 - DNA, 25 bp, Homo sapien
tttcagatgtacagcctcccacagc

SEQ ID NO: 278972 - DNA, 25 bp, Homo sapien
ggtatgacttggactgaagtgaatt

SEQ ID NO: 278973 - DNA, 25 bp, Homo sapien
ctaggtatgacttggactgaagtga

SEQ ID NO: 278974 - DNA, 25 bp, Homo sapien
tctaaagagtaggtgccagtcctgg

SEQ ID NO: 278975 - DNA, 25 bp, Homo sapien
gattctagatgtcagcccagtctca

SEQ ID NO: 278976 - DNA, 25 bp, Homo sapien
gctcctacatgggtgcacaagtgcc

SEQ ID NO: 278977 - DNA, 25 bp, Homo sapien
gcaaggagggttccatgacaggcat

SEQ ID NO: 278978 - DNA, 25 bp, Homo sapien
cacaggaacccctcatggttacgac

SEQ ID NO: 278979 - DNA, 25 bp, Homo sapien
ctctcacaggaacccctcatggtta

SEQ ID NO: 278980 - DNA, 25 bp, Homo sapien
ccagacctctcacaggaacccctca

SEQ ID NO: 278981 - DNA, 25 bp, Homo sapien
acctctcacaggaacccctcatggt

SEQ ID NO: 278982 - DNA, 25 bp, Homo sapien
ggcctcgggaccctgctcggcctcg

SEQ ID NO: 278983 - DNA, 25 bp, Homo sapien
ttccgtctccaggtcggagtcccaa

SEQ ID NO: 278984 - DNA, 25 bp, Homo sapien
cctcgggaccctgctcggcctcggg

SEQ ID NO: 278985 - DNA, 25 bp, Homo sapien
gtcggagtcccaattggcctcggga

SEQ ID NO: 278986 - DNA, 25 bp, Homo sapien
tatgagcccaagcaacccaatgttg

SEQ ID NO: 278987 - DNA, 25 bp, Homo sapien
tcttttaacctggattgcaggccac

SEQ ID NO: 278988 - DNA, 25 bp, Homo sapien
gatgcttccaggagcaatgaaggga

SEQ ID NO: 278989 - DNA, 25 bp, Homo sapien
ggtggtagctaatcctgccagagtc

SEQ ID NO: 278990 - DNA, 25 bp, Homo sapien
ccacggtgccggaggttcagctctt

SEQ ID NO: 278991 - DNA, 25 bp, Homo sapien
gcaggagatgggcacaacactatgg

SEQ ID NO: 278992 - DNA, 25 bp, Homo sapien
tatgggcccggcaagacctcaggta

SEQ ID NO: 278993 - DNA, 25 bp, Homo sapien
gctcccttggcgcagaaagcaggag

SEQ ID NO: 278994 - DNA, 25 bp, Homo sapien
ggtccagccgcttgacatatggatt

SEQ ID NO: 278995 - DNA, 25 bp, Homo sapien
attgtctcgaaggtccagccgcttg

SEQ ID NO: 278996 - DNA, 25 bp, Homo sapien
gacacggcccagctttcaacgatgg

SEQ ID NO: 278997 - DNA, 25 bp, Homo sapien
gaaaggacttctatcaggcatcggc

SEQ ID NO: 278998 - DNA, 25 bp, Homo sapien
ggagcacgtacatgggtcacacact

SEQ ID NO: 278999 - DNA, 25 bp, Homo sapien
gcattcaggtactgggagtctccca

SEQ ID NO: 279000 - DNA, 25 bp, Homo sapien
tcggcaaggtgctgggccgcctgct

SEQ ID NO: 279001 - DNA, 25 bp, Homo sapien
ggccagcaggagttcggcaaggtgc

SEQ ID NO: 279002 - DNA, 25 bp, Homo sapien
gacttcaggtctgtgtgggccagca

SEQ ID NO: 279003 - DNA, 25 bp, Homo sapien
gtcattcagctggttgtagctcagg

SEQ ID NO: 279004 - DNA, 25 bp, Homo sapien
acagcagcgcgcaatgagatatttg

SEQ ID NO: 279005 - DNA, 25 bp, Homo sapien
tggttttgttcaaggtggatccctg

SEQ ID NO: 279006 - DNA, 25 bp, Homo sapien
gatccctggtggctaagtcagtgcc

SEQ ID NO: 279007 - DNA, 25 bp, Homo sapien
agcacatacagcagcgcgcaatgag

SEQ ID NO: 279008 - DNA, 25 bp, Homo sapien
aatgcacgcaggcttggagctgggc

SEQ ID NO: 279009 - DNA, 25 bp, Homo sapien
tggaaatgcacgcaggcttggagct

SEQ ID NO: 279010 - DNA, 25 bp, Homo sapien
gaaatgcacgcaggcttggagctgg

SEQ ID NO: 279011 - DNA, 25 bp, Homo sapien
ctgtggaaatgcacgcaggcttgga

SEQ ID NO: 279012 - DNA, 25 bp, Homo sapien
cgttaagctcggtgagtcctgtgtt

SEQ ID NO: 279013 - DNA, 25 bp, Homo sapien
ctcctgggccccggaggtgattcca

SEQ ID NO: 279014 - DNA, 25 bp, Homo sapien
cagtcccctggcaaatgccacagct

SEQ ID NO: 279015 - DNA, 25 bp, Homo sapien
tgattccagctcacgttaagctcgg

SEQ ID NO: 279016 - DNA, 25 bp, Homo sapien
cagcttgagccacccattcccgagc

SEQ ID NO: 279017 - DNA, 25 bp, Homo sapien
ccaccctagcaccagcttgagccac

SEQ ID NO: 279018 - DNA, 25 bp, Homo sapien
tgtaccaccctagcaccagcttgag

SEQ ID NO: 279019 - DNA, 25 bp, Homo sapien
cttgtaccaccctagcaccagcttg

SEQ ID NO: 279020 - DNA, 25 bp, Homo sapien
caacacgttgttggccttcagagcc

SEQ ID NO: 279021 - DNA, 25 bp, Homo sapien
tcacccaccgcagaggctccaggat

SEQ ID NO: 279022 - DNA, 25 bp, Homo sapien
tgagttcctccaacacgttgttggc

SEQ ID NO: 279023 - DNA, 25 bp, Homo sapien
gatgtctagaactttaaggaagatg

SEQ ID NO: 279024 - DNA, 25 bp, Homo sapien
tctatgtaacaacgatgaactcccc

SEQ ID NO: 279025 - DNA, 25 bp, Homo sapien
tctgccggagatgctttatacaccg

SEQ ID NO: 279026 - DNA, 25 bp, Homo sapien
tatacaccgtgtgcaattcgcagcc

SEQ ID NO: 279027 - DNA, 25 bp, Homo sapien
gcagccatccgcctgtgctatagga

SEQ ID NO: 279028 - DNA, 25 bp, Homo sapien
cctcagcgtctggttgacccggagg

SEQ ID NO: 279029 - DNA, 25 bp, Homo sapien
agcgtctggttgacccggaggccca

SEQ ID NO: 279030 - DNA, 25 bp, Homo sapien
tcccatcgcagagatgcggttgtta

SEQ ID NO: 279031 - DNA, 25 bp, Homo sapien
aggctcagggctcccatcgcagaga

SEQ ID NO: 279032 - DNA, 25 bp, Homo sapien
cactgtttcggctcagaaggtgtct

SEQ ID NO: 279033 - DNA, 25 bp, Homo sapien
gccactatggccacactgtttcggc

SEQ ID NO: 279034 - DNA, 25 bp, Homo sapien
gatagtcagacagaatgctctggtg

SEQ ID NO: 279035 - DNA, 25 bp, Homo sapien
gtgtctccatcagatagtcagacag

SEQ ID NO: 279036 - DNA, 25 bp, Homo sapien
gattgtcctggacagacttgaggag

SEQ ID NO: 279037 - DNA, 25 bp, Homo sapien
ggattgtcctggacagacttgagga

SEQ ID NO: 279038 - DNA, 25 bp, Homo sapien
ccttcacttcgcatgggattcctgg

SEQ ID NO: 279039 - DNA, 25 bp, Homo sapien
aagcagccttcacttcgcatgggat

SEQ ID NO: 279040 - DNA, 25 bp, Homo sapien
ggtcaaagcagctgattggagatga

SEQ ID NO: 279041 - DNA, 25 bp, Homo sapien
gtcaaagcagctgattggagatgag

SEQ ID NO: 279042 - DNA, 25 bp, Homo sapien
tggtaacaaggcctcgtgagtcaaa

SEQ ID NO: 279043 - DNA, 25 bp, Homo sapien
tcagtgcagacacaagtggtaacaa

SEQ ID NO: 279044 - DNA, 25 bp, Homo sapien
aaggcctcgtgagtcaaagagctcc

SEQ ID NO: 279045 - DNA, 25 bp, Homo sapien
cacacggctgacgtgaggactcagt

SEQ ID NO: 279046 - DNA, 25 bp, Homo sapien
ctatggatattcatgcacgagttct

SEQ ID NO: 279047 - DNA, 25 bp, Homo sapien
accacattgcatttatccactggtg

SEQ ID NO: 279048 - DNA, 25 bp, Homo sapien
cattgcatttatccactggtgggca

SEQ ID NO: 279049 - DNA, 25 bp, Homo sapien
gatattcatgcacgagttcttgtgg

SEQ ID NO: 279050 - DNA, 25 bp, Homo sapien
tagaatatgcacagttacgtagcca

SEQ ID NO: 279051 - DNA, 25 bp, Homo sapien
gtctccggacctgataaattctgcg

SEQ ID NO: 279052 - DNA, 25 bp, Homo sapien
taaatgcggtcatgcgacacgtgat

SEQ ID NO: 279053 - DNA, 25 bp, Homo sapien
caggaaagtgccgagttgggactca

SEQ ID NO: 279054 - DNA, 25 bp, Homo sapien
tgccccacgtggatagagatactca

SEQ ID NO: 279055 - DNA, 25 bp, Homo sapien
gccccacgtggatagagatactcac

SEQ ID NO: 279056 - DNA, 25 bp, Homo sapien
ctgccccacgtggatagagatactc

SEQ ID NO: 279057 - DNA, 25 bp, Homo sapien
ccccacgtggatagagatactcact

SEQ ID NO: 279058 - DNA, 25 bp, Homo sapien
gtcatccccaccaccgatggttttg

SEQ ID NO: 279059 - DNA, 25 bp, Homo sapien
gggcgttgcctatctggacacctgc

SEQ ID NO: 279060 - DNA, 25 bp, Homo sapien
caggctgaattgcaagttcaaggca

SEQ ID NO: 279061 - DNA, 25 bp, Homo sapien
ggcatttgaccgtcaggctgaattg

SEQ ID NO: 279062 - DNA, 25 bp, Homo sapien
aaagctgccatccagtgcccgagga

SEQ ID NO: 279063 - DNA, 25 bp, Homo sapien
aagctgccatccagtgcccgaggac

SEQ ID NO: 279064 - DNA, 25 bp, Homo sapien
caggaaagctgccatccagtgcccg

SEQ ID NO: 279065 - DNA, 25 bp, Homo sapien
ggaaagctgccatccagtgcccgag

SEQ ID NO: 279066 - DNA, 25 bp, Homo sapien
catgaaactttcagtttccgcccta

SEQ ID NO: 279067 - DNA, 25 bp, Homo sapien
taacaatgccatgggcatttgcttg

SEQ ID NO: 279068 - DNA, 25 bp, Homo sapien
ttgcttgtctatcccatccattctg

SEQ ID NO: 279069 - DNA, 25 bp, Homo sapien
cacaggagcgcacgtggggttttac

SEQ ID NO: 279070 - DNA, 25 bp, Homo sapien
gatccggtccaggacaaggtctcct

SEQ ID NO: 279071 - DNA, 25 bp, Homo sapien
gtccaggacaaggtctccttgccga

SEQ ID NO: 279072 - DNA, 25 bp, Homo sapien
tccggtccaggacaaggtctccttg

SEQ ID NO: 279073 - DNA, 25 bp, Homo sapien
ccggtccaggacaaggtctccttgc

SEQ ID NO: 279074 - DNA, 25 bp, Homo sapien
ggaagccctgcagtcccatgcacag

SEQ ID NO: 279075 - DNA, 25 bp, Homo sapien
aagccctgcagtcccatgcacagat

SEQ ID NO: 279076 - DNA, 25 bp, Homo sapien
atggggaagccctgcagtcccatgc

SEQ ID NO: 279077 - DNA, 25 bp, Homo sapien
cctgcagtcccatgcacagatcagc

SEQ ID NO: 279078 - DNA, 25 bp, Homo sapien
ttcccgtagtccaccgagagccgct

SEQ ID NO: 279079 - DNA, 25 bp, Homo sapien
tcttcccgtagtccaccgagagccg

SEQ ID NO: 279080 - DNA, 25 bp, Homo sapien
acttcttcccgtagtccaccgagag

SEQ ID NO: 279081 - DNA, 25 bp, Homo sapien
tggacttcttcccgtagtccaccga

SEQ ID NO: 279082 - DNA, 25 bp, Homo sapien
tgtccaggttgcactgacatgtcga

SEQ ID NO: 279083 - DNA, 25 bp, Homo sapien
gtccaggttgcactgacatgtcgac

SEQ ID NO: 279084 - DNA, 25 bp, Homo sapien
gccccaacgaatcacagggaggccg

SEQ ID NO: 279085 - DNA, 25 bp, Homo sapien
cccaacgaatcacagggaggccgtg

SEQ ID NO: 279086 - DNA, 25 bp, Homo sapien
attcagggccccaacgaatcacagg

SEQ ID NO: 279087 - DNA, 25 bp, Homo sapien
agggccccaacgaatcacagggagg

SEQ ID NO: 279088 - DNA, 25 bp, Homo sapien
ggaggtggatgtgggtgtacggcac

SEQ ID NO: 279089 - DNA, 25 bp, Homo sapien
gggaggtggatgtgggtgtacggca

SEQ ID NO: 279090 - DNA, 25 bp, Homo sapien
agatgatcaaggcataggtggccag

SEQ ID NO: 279091 - DNA, 25 bp, Homo sapien
ctgagatgatcaaggcataggtggc

SEQ ID NO: 279092 - DNA, 25 bp, Homo sapien
aagtgggcactggcgatctcggcca

SEQ ID NO: 279093 - DNA, 25 bp, Homo sapien
gcactggcgatctcggccacggaca

SEQ ID NO: 279094 - DNA, 25 bp, Homo sapien
gctcgaagtgggcactggcgatctc

SEQ ID NO: 279095 - DNA, 25 bp, Homo sapien
ttggctggctcgaagtgggcactgg

SEQ ID NO: 279096 - DNA, 25 bp, Homo sapien
acatcccctcggtacaacatgcagc

SEQ ID NO: 279097 - DNA, 25 bp, Homo sapien
agcaggctatgtacttgccatggtg

SEQ ID NO: 279098 - DNA, 25 bp, Homo sapien
ggaccacatcccctcggtacaacat

SEQ ID NO: 279099 - DNA, 25 bp, Homo sapien
gcaggctatgtacttgccatggtga

SEQ ID NO: 279100 - DNA, 25 bp, Homo sapien
cttgatggtggcgatggccccactg

SEQ ID NO: 279101 - DNA, 25 bp, Homo sapien
tgatggtggcgatggccccactgac

SEQ ID NO: 279102 - DNA, 25 bp, Homo sapien
tagatggtgcgcttgctcttgatgg

SEQ ID NO: 279103 - DNA, 25 bp, Homo sapien
ctcttgatggtggcgatggccccac

SEQ ID NO: 279104 - DNA, 25 bp, Homo sapien
aagggcaagaaagcggtccgtgaag

SEQ ID NO: 279105 - DNA, 25 bp, Homo sapien
cagagaagggcaagaaagcggtccg

SEQ ID NO: 279106 - DNA, 25 bp, Homo sapien
agaagggcaagaaagcggtccgtga

SEQ ID NO: 279107 - DNA, 25 bp, Homo sapien
ccagagaagggcaagaaagcggtcc

SEQ ID NO: 279108 - DNA, 25 bp, Homo sapien
cattgcaacttggtcaggtttcccc

SEQ ID NO: 279109 - DNA, 25 bp, Homo sapien
tgatgttgcttagcatccacatggc

SEQ ID NO: 279110 - DNA, 25 bp, Homo sapien
tgtaccattgcacaaaggcctgctt

SEQ ID NO: 279111 - DNA, 25 bp, Homo sapien
ccaggtccttgcgagcctcagagga

SEQ ID NO: 279112 - DNA, 25 bp, Homo sapien
ccagaggacaccccgccagcccagc

SEQ ID NO: 279113 - DNA, 25 bp, Homo sapien
acagagtcttagaacagaaacacag

SEQ ID NO: 279114 - DNA, 25 bp, Homo sapien
gagtcttagaacagaaacacagtct

SEQ ID NO: 279115 - DNA, 25 bp, Homo sapien
tcttagaacagaaacacagtctttc

SEQ ID NO: 279116 - DNA, 25 bp, Homo sapien
cagagtcttagaacagaaacacagt

SEQ ID NO: 279117 - DNA, 25 bp, Homo sapien
tgcccgaagtcagagccgggcccat

SEQ ID NO: 279118 - DNA, 25 bp, Homo sapien
acacgacgagcgtgcccgaagtcag

SEQ ID NO: 279119 - DNA, 25 bp, Homo sapien
tgtctctgcacacgacgagcgtgcc

SEQ ID NO: 279120 - DNA, 25 bp, Homo sapien
gcggccgtgtctctgcacacgacga

SEQ ID NO: 279121 - DNA, 25 bp, Homo sapien
accaagtttgttaagaggttgatct

SEQ ID NO: 279122 - DNA, 25 bp, Homo sapien
ccaagtttgttaagaggttgatctc

SEQ ID NO: 279123 - DNA, 25 bp, Homo sapien
gaccaagtttgttaagaggttgatc

SEQ ID NO: 279124 - DNA, 25 bp, Homo sapien
cgggtcctgagggtatcagagctcc

SEQ ID NO: 279125 - DNA, 25 bp, Homo sapien
aagtcgtccagaagcctccgtgatg

SEQ ID NO: 279126 - DNA, 25 bp, Homo sapien
agacaggagcggttttctccccagg

SEQ ID NO: 279127 - DNA, 25 bp, Homo sapien
tcctcacggtggatgccgccactca

SEQ ID NO: 279128 - DNA, 25 bp, Homo sapien
gacatgatgaaatatgcctcatgca

SEQ ID NO: 279129 - DNA, 25 bp, Homo sapien
ccaaccaatgaaaggatgaagggac

SEQ ID NO: 279130 - DNA, 25 bp, Homo sapien
gggacttcagcatacagacatgatg

SEQ ID NO: 279131 - DNA, 25 bp, Homo sapien
gacaacatgtcatttgcaaaaacac

SEQ ID NO: 279132 - DNA, 25 bp, Homo sapien
gtgaggacggtgacgaaggtaccca

SEQ ID NO: 279133 - DNA, 25 bp, Homo sapien
tgaggacggtgacgaaggtacccag

SEQ ID NO: 279134 - DNA, 25 bp, Homo sapien
cgaaggtacccaggtctggggctgc

SEQ ID NO: 279135 - DNA, 25 bp, Homo sapien
ctccacgcactgacgcacgatgtag

SEQ ID NO: 279136 - DNA, 25 bp, Homo sapien
gcactgacgcacgatgtagggcacc

SEQ ID NO: 279137 - DNA, 25 bp, Homo sapien
acgcactgacgcacgatgtagggca

SEQ ID NO: 279138 - DNA, 25 bp, Homo sapien
gctcgatctcctccacgcactgacg

SEQ ID NO: 279139 - DNA, 25 bp, Homo sapien
ggccaccccagacatgcggtagatg

SEQ ID NO: 279140 - DNA, 25 bp, Homo sapien
accccagacatgcggtagatgccca

SEQ ID NO: 279141 - DNA, 25 bp, Homo sapien
ccaccccagacatgcggtagatgcc

SEQ ID NO: 279142 - DNA, 25 bp, Homo sapien
gccaccccagacatgcggtagatgc

SEQ ID NO: 279143 - DNA, 25 bp, Homo sapien
aaggatgtgacatgcctgggccatg

SEQ ID NO: 279144 - DNA, 25 bp, Homo sapien
cgtccatctcgctcatcatcactga

SEQ ID NO: 279145 - DNA, 25 bp, Homo sapien
catgcctgcgatggcgttcacgtcc

SEQ ID NO: 279146 - DNA, 25 bp, Homo sapien
catcatcactgacacgtccttgtta

SEQ ID NO: 279147 - DNA, 25 bp, Homo sapien
gcagctcacggaagtacagcttcag

SEQ ID NO: 279148 - DNA, 25 bp, Homo sapien
cacagcgctggccgccagtgaggac

SEQ ID NO: 279149 - DNA, 25 bp, Homo sapien
gtcacacccacagcgctggccgcca

SEQ ID NO: 279150 - DNA, 25 bp, Homo sapien
agcgctggccgccagtgaggaccct

SEQ ID NO: 279151 - DNA, 25 bp, Homo sapien
acccacagcgctggccgccagtgag

SEQ ID NO: 279152 - DNA, 25 bp, Homo sapien
cttgcgcagtttaggcttgtcatca

SEQ ID NO: 279153 - DNA, 25 bp, Homo sapien
gggacacgagtccttgcgcagttta

SEQ ID NO: 279154 - DNA, 25 bp, Homo sapien
tgggttacgacaagccggagacctc

SEQ ID NO: 279155 - DNA, 25 bp, Homo sapien
cactcccctgggttacgacaagccg

SEQ ID NO: 279156 - DNA, 25 bp, Homo sapien
ggtgagcaggttggcctccggcagg

SEQ ID NO: 279157 - DNA, 25 bp, Homo sapien
tgagcaggttggcctccggcaggga

SEQ ID NO: 279158 - DNA, 25 bp, Homo sapien
gagcaggttggcctccggcagggac

SEQ ID NO: 279159 - DNA, 25 bp, Homo sapien
gtgagcaggttggcctccggcaggg

SEQ ID NO: 279160 - DNA, 25 bp, Homo sapien
agcgtggggccaaacaccgtgccaa

SEQ ID NO: 279161 - DNA, 25 bp, Homo sapien
caaacaccgtgccaaggttgtgcag

SEQ ID NO: 279162 - DNA, 25 bp, Homo sapien
caccgtgccaaggttgtgcagggac

SEQ ID NO: 279163 - DNA, 25 bp, Homo sapien
ggccaaacaccgtgccaaggttgtg

SEQ ID NO: 279164 - DNA, 25 bp, Homo sapien
gacatcggtggagaacaggatgctc

SEQ ID NO: 279165 - DNA, 25 bp, Homo sapien
ttagacatcggtggagaacaggatg

SEQ ID NO: 279166 - DNA, 25 bp, Homo sapien
acatcggtggagaacaggatgctct

SEQ ID NO: 279167 - DNA, 25 bp, Homo sapien
tagacatcggtggagaacaggatgc

SEQ ID NO: 279168 - DNA, 25 bp, Homo sapien
ggtcgctctccctggagaacgaacc

SEQ ID NO: 279169 - DNA, 25 bp, Homo sapien
ggacgaggtcgctctccctggagaa

SEQ ID NO: 279170 - DNA, 25 bp, Homo sapien
aagtccaggcctgtggaagccaaac

SEQ ID NO: 279171 - DNA, 25 bp, Homo sapien
cgtgggccggaagggcggtcaggat

SEQ ID NO: 279172 - DNA, 25 bp, Homo sapien
gacacggattgtccagggattacat

SEQ ID NO: 279173 - DNA, 25 bp, Homo sapien
gagccaggcgcttagaggaagacca

SEQ ID NO: 279174 - DNA, 25 bp, Homo sapien
gattacattccagcatcttattagg

SEQ ID NO: 279175 - DNA, 25 bp, Homo sapien
cctccacgtatcctgttctccagag

SEQ ID NO: 279176 - DNA, 25 bp, Homo sapien
cagacgcagacagaaagccttcaag

SEQ ID NO: 279177 - DNA, 25 bp, Homo sapien
caccgggcccagataggtacagaga

SEQ ID NO: 279178 - DNA, 25 bp, Homo sapien
tcttgaaaatacttggcggcctcca

SEQ ID NO: 279179 - DNA, 25 bp, Homo sapien
cgggcccagataggtacagagagca

SEQ ID NO: 279180 - DNA, 25 bp, Homo sapien
aacttcttaatgaaagtgtcggcca

SEQ ID NO: 279181 - DNA, 25 bp, Homo sapien
ttcttaatgaaagtgtcggccacgg

SEQ ID NO: 279182 - DNA, 25 bp, Homo sapien
aggaaacttcttaatgaaagtgtcg

SEQ ID NO: 279183 - DNA, 25 bp, Homo sapien
gaaacttcttaatgaaagtgtcggc

SEQ ID NO: 279184 - DNA, 25 bp, Homo sapien
ggcaccagcgatgccacaggtgtac

SEQ ID NO: 279185 - DNA, 25 bp, Homo sapien
catggcaccagcgatgccacaggtg

SEQ ID NO: 279186 - DNA, 25 bp, Homo sapien
cagcgatgccacaggtgtacccagt

SEQ ID NO: 279187 - DNA, 25 bp, Homo sapien
atgccatggcaccagcgatgccaca

SEQ ID NO: 279188 - DNA, 25 bp, Homo sapien
tgcaaagcagtagtgggcaaacacc

SEQ ID NO: 279189 - DNA, 25 bp, Homo sapien
tgtgctttggtcatccgcaacccag

SEQ ID NO: 279190 - DNA, 25 bp, Homo sapien
gaaatgacggctgctcaactgtgca

SEQ ID NO: 279191 - DNA, 25 bp, Homo sapien
tgccacctagcatggtcaatcaagg

SEQ ID NO: 279192 - DNA, 25 bp, Homo sapien
aactattttgactgcgcatgcggga

SEQ ID NO: 279193 - DNA, 25 bp, Homo sapien
gaattctgtggcaccggagataaca

SEQ ID NO: 279194 - DNA, 25 bp, Homo sapien
ggcgacttgagatccgcgggtctcc

SEQ ID NO: 279195 - DNA, 25 bp, Homo sapien
gagaccccatcaacgtggagggcct

SEQ ID NO: 279196 - DNA, 25 bp, Homo sapien
aacagcatcttcctaaaatcttcct

SEQ ID NO: 279197 - DNA, 25 bp, Homo sapien
ctcaaagccatagtggcaaaaagca

SEQ ID NO: 279198 - DNA, 25 bp, Homo sapien
caaagccatagtggcaaaaagcaaa

SEQ ID NO: 279199 - DNA, 25 bp, Homo sapien
tcttcctaaaatcttcctcttccat

SEQ ID NO: 279200 - DNA, 25 bp, Homo sapien
cagacaccagaaacggaagagcacc

SEQ ID NO: 279201 - DNA, 25 bp, Homo sapien
ttccagaactgtcggcactgcagca

SEQ ID NO: 279202 - DNA, 25 bp, Homo sapien
taaaggcattggttctatacagcgt

SEQ ID NO: 279203 - DNA, 25 bp, Homo sapien
tagccagatggtatagaaatgacac

SEQ ID NO: 279204 - DNA, 25 bp, Homo sapien
gaattggatacttcagagatctccc

SEQ ID NO: 279205 - DNA, 25 bp, Homo sapien
ggatacttcagagatctcccttacc

SEQ ID NO: 279206 - DNA, 25 bp, Homo sapien
attggatacttcagagatctccctt

SEQ ID NO: 279207 - DNA, 25 bp, Homo sapien
ctgaattggatacttcagagatctc

SEQ ID NO: 279208 - DNA, 25 bp, Homo sapien
aaatgaaaccacaaaggttcaatct

SEQ ID NO: 279209 - DNA, 25 bp, Homo sapien
atgaaaccacaaaggttcaatctgc

SEQ ID NO: 279210 - DNA, 25 bp, Homo sapien
ccacaaaggttcaatctgctctgac

SEQ ID NO: 279211 - DNA, 25 bp, Homo sapien
aaccacaaaggttcaatctgctctg

SEQ ID NO: 279212 - DNA, 25 bp, Homo sapien
atccacactgtgaggtccaactgct

SEQ ID NO: 279213 - DNA, 25 bp, Homo sapien
gaccaagggcaggagatccctaatc

SEQ ID NO: 279214 - DNA, 25 bp, Homo sapien
gagatccctaatcccatcaccatgg

SEQ ID NO: 279215 - DNA, 25 bp, Homo sapien
cacagatagtggcacttaggaccaa

SEQ ID NO: 279216 - DNA, 25 bp, Homo sapien
ttgaatgcagccacacaggttcccc

SEQ ID NO: 279217 - DNA, 25 bp, Homo sapien
cttgaatgcagccacacaggttccc

SEQ ID NO: 279218 - DNA, 25 bp, Homo sapien
tgaatgcagccacacaggttcccca

SEQ ID NO: 279219 - DNA, 25 bp, Homo sapien
gaatgcagccacacaggttccccat

SEQ ID NO: 279220 - DNA, 25 bp, Homo sapien
agcatggctgtcagttcattggcag

SEQ ID NO: 279221 - DNA, 25 bp, Homo sapien
tcattggcagtgctactcatgaatg

SEQ ID NO: 279222 - DNA, 25 bp, Homo sapien
gctgtcagttcattggcagtgctac

SEQ ID NO: 279223 - DNA, 25 bp, Homo sapien
cagttcattggcagtgctactcatg

SEQ ID NO: 279224 - DNA, 25 bp, Homo sapien
acatgctttttggaaggcttcttcg

SEQ ID NO: 279225 - DNA, 25 bp, Homo sapien
cttggtagtagagtagggcttcctt

SEQ ID NO: 279226 - DNA, 25 bp, Homo sapien
tcacatgctttttggaaggcttctt

SEQ ID NO: 279227 - DNA, 25 bp, Homo sapien
tttcacatgctttttggaaggcttc

SEQ ID NO: 279228 - DNA, 25 bp, Homo sapien
cattgaatgtgctccctgaagtcac

SEQ ID NO: 279229 - DNA, 25 bp, Homo sapien
acattcacaagcaaatcatgcagac

SEQ ID NO: 279230 - DNA, 25 bp, Homo sapien
cacaagcaaatcatgcagacttgca

SEQ ID NO: 279231 - DNA, 25 bp, Homo sapien
atcatgcagacttgcacacagacca

SEQ ID NO: 279232 - DNA, 25 bp, Homo sapien
catacccacacacaacctaatgtga

SEQ ID NO: 279233 - DNA, 25 bp, Homo sapien
actggttggtgtgcacagcatatct

SEQ ID NO: 279234 - DNA, 25 bp, Homo sapien
tgggctgaagcttgtccaatctttc

SEQ ID NO: 279235 - DNA, 25 bp, Homo sapien
tctttcaaggttgctgaagactgta

SEQ ID NO: 279236 - DNA, 25 bp, Homo sapien
aggttgctgaagactgtatgatgga

SEQ ID NO: 279237 - DNA, 25 bp, Homo sapien
ccaatctttcaaggttgctgaagac

SEQ ID NO: 279238 - DNA, 25 bp, Homo sapien
tgtccttgtgaactagagactcctc

SEQ ID NO: 279239 - DNA, 25 bp, Homo sapien
ctgtccttgtgaactagagactcct

SEQ ID NO: 279240 - DNA, 25 bp, Homo sapien
gatacagtccacaacctgaagccgt

SEQ ID NO: 279241 - DNA, 25 bp, Homo sapien
tgaagccgtcatagctaaatgccat

SEQ ID NO: 279242 - DNA, 25 bp, Homo sapien
aagacattgcttccaaggacaagga

SEQ ID NO: 279243 - DNA, 25 bp, Homo sapien
tctctcaggtccacgtaggttggca

SEQ ID NO: 279244 - DNA, 25 bp, Homo sapien
tagattcaagcctcagaggggccac

SEQ ID NO: 279245 - DNA, 25 bp, Homo sapien
aagcctcagaggggccacctgcacc

SEQ ID NO: 279246 - DNA, 25 bp, Homo sapien
gcctcagaggggccacctgcaccac

SEQ ID NO: 279247 - DNA, 25 bp, Homo sapien
tcaagcctcagaggggccacctgca

SEQ ID NO: 279248 - DNA, 25 bp, Homo sapien
tcttggcatccagattgttttcttg

SEQ ID NO: 279249 - DNA, 25 bp, Homo sapien
tttcttggcatccagattgttttct

SEQ ID NO: 279250 - DNA, 25 bp, Homo sapien
ttcttggcatccagattgttttctt

SEQ ID NO: 279251 - DNA, 25 bp, Homo sapien
ctttcttggcatccagattgttttc

SEQ ID NO: 279252 - DNA, 25 bp, Homo sapien
actagccggtcaatagtgagatggc

SEQ ID NO: 279253 - DNA, 25 bp, Homo sapien
cggtcaatagtgagatggctcctca

SEQ ID NO: 279254 - DNA, 25 bp, Homo sapien
gccggtcaatagtgagatggctcct

SEQ ID NO: 279255 - DNA, 25 bp, Homo sapien
cggcactagccggtcaatagtgaga

SEQ ID NO: 279256 - DNA, 25 bp, Homo sapien
tcacagcatgggtcaagctgatgct

SEQ ID NO: 279257 - DNA, 25 bp, Homo sapien
ctagtgaagctaagggatgtggctc

SEQ ID NO: 279258 - DNA, 25 bp, Homo sapien
gatgtggctcagaacactttctgca

SEQ ID NO: 279259 - DNA, 25 bp, Homo sapien
ccaggtggacctgcactagtgaagc

SEQ ID NO: 279260 - DNA, 25 bp, Homo sapien
ctagaaaaacacagagttaaggtca

SEQ ID NO: 279261 - DNA, 25 bp, Homo sapien
tagaaaaacacagagttaaggtcag

SEQ ID NO: 279262 - DNA, 25 bp, Homo sapien
aaaacacagagttaaggtcagtgcc

SEQ ID NO: 279263 - DNA, 25 bp, Homo sapien
gaaaaacacagagttaaggtcagtg

SEQ ID NO: 279264 - DNA, 25 bp, Homo sapien
ttagcgatgtcgtgtgtggcgtcct

SEQ ID NO: 279265 - DNA, 25 bp, Homo sapien
ttggcgatgccctggatggtgtcct

SEQ ID NO: 279266 - DNA, 25 bp, Homo sapien
ccgtggacggcgtactccttggcga

SEQ ID NO: 279267 - DNA, 25 bp, Homo sapien
tgccgtggacggcgtactccttggc

SEQ ID NO: 279268 - DNA, 25 bp, Homo sapien
cctggatggtgtcctcgttggcgat

SEQ ID NO: 279269 - DNA, 25 bp, Homo sapien
ccgtggacggcgtactccttggcga

SEQ ID NO: 279270 - DNA, 25 bp, Homo sapien
ttgtcggcggcctcgttagcgatgc

SEQ ID NO: 279271 - DNA, 25 bp, Homo sapien
tccttggcgatgccctggatggcgt

SEQ ID NO: 279272 - DNA, 25 bp, Homo sapien
gcgatgccgtggacggcgtactcct

SEQ ID NO: 279273 - DNA, 25 bp, Homo sapien
ggcgtcctcactggcgattccgtgg

SEQ ID NO: 279274 - DNA, 25 bp, Homo sapien
cctcactggcgattccgtgggcggc

SEQ ID NO: 279275 - DNA, 25 bp, Homo sapien
tgggcggcgtcctcactggcgattc
